United States Patent Application Publication US 2005/0244851 A1 - sequence listing, part 91

SEQ ID NO: 3545605 - DNA, 25 bp, Homo sapien
cataaaacaaagtgactattgtcag

SEQ ID NO: 3545606 - DNA, 25 bp, Homo sapien
tttgtgcctgccttcagcagaacgg

SEQ ID NO: 3545607 - DNA, 25 bp, Homo sapien
aagtgactattgtcaggtgggaagc

SEQ ID NO: 3545608 - DNA, 25 bp, Homo sapien
tgtgcctgccttcagcagaacggat

SEQ ID NO: 3545609 - DNA, 25 bp, Homo sapien
tgagagagcccattaaggaagccat

SEQ ID NO: 3545610 - DNA, 25 bp, Homo sapien
tgtctacaaaggagaggtgaccaag

SEQ ID NO: 3545611 - DNA, 25 bp, Homo sapien
taaggcacagtgaccagagagatgc

SEQ ID NO: 3545612 - DNA, 25 bp, Homo sapien
gccagtgtgattaggtagatcgcca

SEQ ID NO: 3545613 - DNA, 25 bp, Homo sapien
agtgacaaagaatgtgaggattctc

SEQ ID NO: 3545614 - DNA, 25 bp, Homo sapien
gtgacaaagaatgtgaggattctct

SEQ ID NO: 3545615 - DNA, 25 bp, Homo sapien
gagaggaactccttacgtggtacac

SEQ ID NO: 3545616 - DNA, 25 bp, Homo sapien
aagaaattaccaacctacctgagag

SEQ ID NO: 3545617 - DNA, 25 bp, Homo sapien
gcatgattcaccacagatacatcca

SEQ ID NO: 3545618 - DNA, 25 bp, Homo sapien
tgtaaaggtaacactcacaaactgt

SEQ ID NO: 3545619 - DNA, 25 bp, Homo sapien
tagcaaacagtttcttttgaataac

SEQ ID NO: 3545620 - DNA, 25 bp, Homo sapien
ttagcaaacagtttcttttgaataa

SEQ ID NO: 3545621 - DNA, 25 bp, Homo sapien
gatcaatgggtttaacatcggactc

SEQ ID NO: 3545622 - DNA, 25 bp, Homo sapien
tcaatgggtttaacatcggactcac

SEQ ID NO: 3545623 - DNA, 25 bp, Homo sapien
gctgtagatcaatgggtttaacatc

SEQ ID NO: 3545624 - DNA, 25 bp, Homo sapien
gtagatcaatgggtttaacatcgga

SEQ ID NO: 3545625 - DNA, 25 bp, Homo sapien
caattttcccctgttgtatagatgt

SEQ ID NO: 3545626 - DNA, 25 bp, Homo sapien
catgcagaacagtgtcccatagaag

SEQ ID NO: 3545627 - DNA, 25 bp, Homo sapien
catagaagacagtgacagcggtcac

SEQ ID NO: 3545628 - DNA, 25 bp, Homo sapien
tcccctcagcagtgtggatacgcag

SEQ ID NO: 3545629 - DNA, 25 bp, Homo sapien
caccaccaacatggcggtctctttg

SEQ ID NO: 3545630 - DNA, 25 bp, Homo sapien
tcattgggtccacagaaggacagac

SEQ ID NO: 3545631 - DNA, 25 bp, Homo sapien
taaatatagggagcagcagcgagac

SEQ ID NO: 3545632 - DNA, 25 bp, Homo sapien
caaagccataaatatagggagcagc

SEQ ID NO: 3545633 - DNA, 25 bp, Homo sapien
cctggtcattttgcttccatataac

SEQ ID NO: 3545634 - DNA, 25 bp, Homo sapien
catttgcaaagccataaatataggg

SEQ ID NO: 3545635 - DNA, 25 bp, Homo sapien
tgagcatataataatctgtaatcac

SEQ ID NO: 3545636 - DNA, 25 bp, Homo sapien
gtgagcatataataatctgtaatca

SEQ ID NO: 3545637 - DNA, 25 bp, Homo sapien
aattggataaagcagccgatgaagg

SEQ ID NO: 3545638 - DNA, 25 bp, Homo sapien
ttggataaagcagccgatgaaggaa

SEQ ID NO: 3545639 - DNA, 25 bp, Homo sapien
gataaagcagccgatgaaggaaatg

SEQ ID NO: 3545640 - DNA, 25 bp, Homo sapien
taaagcagccgatgaaggaaatggt

SEQ ID NO: 3545641 - DNA, 25 bp, Homo sapien
ctgaggagtaacattggtggtataa

SEQ ID NO: 3545642 - DNA, 25 bp, Homo sapien
gtcacttctgattaacaagatcatg

SEQ ID NO: 3545643 - DNA, 25 bp, Homo sapien
agtgtgtagtgtcgagtcacttctg

SEQ ID NO: 3545644 - DNA, 25 bp, Homo sapien
gaggagtaacattggtggtataaca

SEQ ID NO: 3545645 - DNA, 25 bp, Homo sapien
tcagcccgatctgtcagtcccagga

SEQ ID NO: 3545646 - DNA, 25 bp, Homo sapien
tgcagctcagcccgatctgtcagtc

SEQ ID NO: 3545647 - DNA, 25 bp, Homo sapien
actcagtcacggctgtatggttttt

SEQ ID NO: 3545648 - DNA, 25 bp, Homo sapien
aacaaactcagtcacggctgtatgg

SEQ ID NO: 3545649 - DNA, 25 bp, Homo sapien
ggattttcccctaatcatttgttgc

SEQ ID NO: 3545650 - DNA, 25 bp, Homo sapien
aactgcaattttatgaaaggatttt

SEQ ID NO: 3545651 - DNA, 25 bp, Homo sapien
tcatttgttgcatggcaaggattac

SEQ ID NO: 3545652 - DNA, 25 bp, Homo sapien
ctaaactgcaattttatgaaaggat

SEQ ID NO: 3545653 - DNA, 25 bp, Homo sapien
tgttccgtaggctatagatcaatgg

SEQ ID NO: 3545654 - DNA, 25 bp, Homo sapien
tcagcattgggctcaaaaaagtata

SEQ ID NO: 3545655 - DNA, 25 bp, Homo sapien
ttcagcattgggctcaaaaaagtat

SEQ ID NO: 3545656 - DNA, 25 bp, Homo sapien
tgaagagagagcttgagagattaaa

SEQ ID NO: 3545657 - DNA, 25 bp, Homo sapien
atcctggaactgtaatgcaaagggc

SEQ ID NO: 3545658 - DNA, 25 bp, Homo sapien
taagaaacccatacatgtaagggat

SEQ ID NO: 3545659 - DNA, 25 bp, Homo sapien
tccaatgccattgaagcaaggatgt

SEQ ID NO: 3545660 - DNA, 25 bp, Homo sapien
gccagtgtgattaggtagatcgcaa

SEQ ID NO: 3545661 - DNA, 25 bp, Homo sapien
gtcagtcccaagagaatgaattctg

SEQ ID NO: 3545662 - DNA, 25 bp, Homo sapien
aatgaattctgtcactatggtgtgg

SEQ ID NO: 3545663 - DNA, 25 bp, Homo sapien
ctgtcagtcccaagagaatgaattc

SEQ ID NO: 3545664 - DNA, 25 bp, Homo sapien
gtcactatggtgtggtttggggaga

SEQ ID NO: 3545665 - DNA, 25 bp, Homo sapien
tagcaaacagtttcttttggataac

SEQ ID NO: 3545666 - DNA, 25 bp, Homo sapien
agcaaacagtttcttttggataact

SEQ ID NO: 3545667 - DNA, 25 bp, Homo sapien
ttagcaaacagtttcttttggataa

SEQ ID NO: 3545668 - DNA, 25 bp, Homo sapien
cagcgttccttgaaagacagtgacg

SEQ ID NO: 3545669 - DNA, 25 bp, Homo sapien
gacagtgacggcagtcacaagggac

SEQ ID NO: 3545670 - DNA, 25 bp, Homo sapien
cctcagcagtgcagatatgcagaat

SEQ ID NO: 3545671 - DNA, 25 bp, Homo sapien
tcaggcacatgtgaaacagcgttcc

SEQ ID NO: 3545672 - DNA, 25 bp, Homo sapien
ctccaattttacatcagagtcagcc

SEQ ID NO: 3545673 - DNA, 25 bp, Homo sapien
tgcataataaaagtggttgatctcc

SEQ ID NO: 3545674 - DNA, 25 bp, Homo sapien
tctccaattttacatcagagtcagc

SEQ ID NO: 3545675 - DNA, 25 bp, Homo sapien
atctccaattttacatcagagtcag

SEQ ID NO: 3545676 - DNA, 25 bp, Homo sapien
gcatcggaggagtggcattggtggc

SEQ ID NO: 3545677 - DNA, 25 bp, Homo sapien
ccagcatcggaggagtggcattggt

SEQ ID NO: 3545678 - DNA, 25 bp, Homo sapien
gtgttgaatcacttcttattaagaa

SEQ ID NO: 3545679 - DNA, 25 bp, Homo sapien
tgaaattggataaagcaaccaataa

SEQ ID NO: 3545680 - DNA, 25 bp, Homo sapien
caccactttgtcttgatccattgag

SEQ ID NO: 3545681 - DNA, 25 bp, Homo sapien
tcttgatccattgagtagctggagc

SEQ ID NO: 3545682 - DNA, 25 bp, Homo sapien
tggggatgactactgtgtaagacag

SEQ ID NO: 3545683 - DNA, 25 bp, Homo sapien
actgtgtaagacagacaccactttg

SEQ ID NO: 3545684 - DNA, 25 bp, Homo sapien
gattgtcccaaagaagatagtgacc

SEQ ID NO: 3545685 - DNA, 25 bp, Homo sapien
atgaacaggattgtcccaaagaaga

SEQ ID NO: 3545686 - DNA, 25 bp, Homo sapien
tgaccaccgccaagtgggaagcaca

SEQ ID NO: 3545687 - DNA, 25 bp, Homo sapien
gaagatagtgaccaccgccaagtgg

SEQ ID NO: 3545688 - DNA, 25 bp, Homo sapien
caagaatcagtaggagacagctcaa

SEQ ID NO: 3545689 - DNA, 25 bp, Homo sapien
taattctgggtgatccgtgaatccc

SEQ ID NO: 3545690 - DNA, 25 bp, Homo sapien
catgccaagatttccaacaacggtg

SEQ ID NO: 3545691 - DNA, 25 bp, Homo sapien
tatgtggctaacaccaggagggcac

SEQ ID NO: 3545692 - DNA, 25 bp, Homo sapien
tgtaggaatacaggttttctgtttc

SEQ ID NO: 3545693 - DNA, 25 bp, Homo sapien
agtcagatttatggctttgaaaaac

SEQ ID NO: 3545694 - DNA, 25 bp, Homo sapien
gctttgaaaaactgtgcaggtgaca

SEQ ID NO: 3545695 - DNA, 25 bp, Homo sapien
ctgtttccaacagtcagatttatgg

SEQ ID NO: 3545696 - DNA, 25 bp, Homo sapien
acaagatgtgtttccataagatctt

SEQ ID NO: 3545697 - DNA, 25 bp, Homo sapien
tacaagatgtgtttccataagatct

SEQ ID NO: 3545698 - DNA, 25 bp, Homo sapien
tgacggaagaagagtaagaggcatc

SEQ ID NO: 3545699 - DNA, 25 bp, Homo sapien
caagacggcaatgaagatacacagg

SEQ ID NO: 3545700 - DNA, 25 bp, Homo sapien
cattgagtagctagatgtagggcgc

SEQ ID NO: 3545701 - DNA, 25 bp, Homo sapien
taacgaaggcatcttcaagacggca

SEQ ID NO: 3545702 - DNA, 25 bp, Homo sapien
tttgatttctgcctcgaacctcttt

SEQ ID NO: 3545703 - DNA, 25 bp, Homo sapien
gatttctgcctcgaacctctttcat

SEQ ID NO: 3545704 - DNA, 25 bp, Homo sapien
ttctgcctcgaacctctttcataag

SEQ ID NO: 3545705 - DNA, 25 bp, Homo sapien
tgatttctgcctcgaacctctttca

SEQ ID NO: 3545706 - DNA, 25 bp, Homo sapien
ctgaatgtagaaagcgatgtgacct

SEQ ID NO: 3545707 - DNA, 25 bp, Homo sapien
ggtcaggacataggtctgaatgtag

SEQ ID NO: 3545708 - DNA, 25 bp, Homo sapien
atgtagaaagcgatgtgacctgttg

SEQ ID NO: 3545709 - DNA, 25 bp, Homo sapien
tagaaagcaggtcaggacataggtc

SEQ ID NO: 3545710 - DNA, 25 bp, Homo sapien
caggaggacctcgactgtggtctca

SEQ ID NO: 3545711 - DNA, 25 bp, Homo sapien
gaaaaccgcaatgatcttgccgcca

SEQ ID NO: 3545712 - DNA, 25 bp, Homo sapien
tgctttgcaatagctctccttcgag

SEQ ID NO: 3545713 - DNA, 25 bp, Homo sapien
tgtgaccaccgtgtagaaaaccgca

SEQ ID NO: 3545714 - DNA, 25 bp, Homo sapien
agatggcagtcccataaataaggtt

SEQ ID NO: 3545715 - DNA, 25 bp, Homo sapien
atggcagtcccataaataaggttac

SEQ ID NO: 3545716 - DNA, 25 bp, Homo sapien
catgaagatggcagtcccataaata

SEQ ID NO: 3545717 - DNA, 25 bp, Homo sapien
gaagatggcagtcccataaataagg

SEQ ID NO: 3545718 - DNA, 25 bp, Homo sapien
tggataatgcctgataccgcccaga

SEQ ID NO: 3545719 - DNA, 25 bp, Homo sapien
ggataatgcctgataccgcccagag

SEQ ID NO: 3545720 - DNA, 25 bp, Homo sapien
taatgcctgataccgcccagaggct

SEQ ID NO: 3545721 - DNA, 25 bp, Homo sapien
ggtggataatgcctgataccgccca

SEQ ID NO: 3545722 - DNA, 25 bp, Homo sapien
cagtagggcaaactcaacgtgagaa

SEQ ID NO: 3545723 - DNA, 25 bp, Homo sapien
gctactggaccaagaaataactgcc

SEQ ID NO: 3545724 - DNA, 25 bp, Homo sapien
cagattgaaggatccggacatagga

SEQ ID NO: 3545725 - DNA, 25 bp, Homo sapien
ttcaggatattaggcccacagtagg

SEQ ID NO: 3545726 - DNA, 25 bp, Homo sapien
accaaggaggacacaatcattccaa

SEQ ID NO: 3545727 - DNA, 25 bp, Homo sapien
caatcattccaaaggagagggagaa

SEQ ID NO: 3545728 - DNA, 25 bp, Homo sapien
ggacacaatcattccaaaggagagg

SEQ ID NO: 3545729 - DNA, 25 bp, Homo sapien
gacaccaaggaggacacaatcattc

SEQ ID NO: 3545730 - DNA, 25 bp, Homo sapien
gagtagcgcagctggagaatgagat

SEQ ID NO: 3545731 - DNA, 25 bp, Homo sapien
atctgagtagcgcagctggagaatg

SEQ ID NO: 3545732 - DNA, 25 bp, Homo sapien
tctgagtagcgcagctggagaatga

SEQ ID NO: 3545733 - DNA, 25 bp, Homo sapien
tagcgcagctggagaatgagatggt

SEQ ID NO: 3545734 - DNA, 25 bp, Homo sapien
gatgtgtagcaaatgtccagaaagg

SEQ ID NO: 3545735 - DNA, 25 bp, Homo sapien
cccgccatgttggacagcatttggg

SEQ ID NO: 3545736 - DNA, 25 bp, Homo sapien
tggatgtgtagcaaatgtccagaaa

SEQ ID NO: 3545737 - DNA, 25 bp, Homo sapien
ctttttccccgccatgttggacagc

SEQ ID NO: 3545738 - DNA, 25 bp, Homo sapien
gtttggaggagaggttccatctaga

SEQ ID NO: 3545739 - DNA, 25 bp, Homo sapien
cagccaccgttgataaatagaacaa

SEQ ID NO: 3545740 - DNA, 25 bp, Homo sapien
gagaggttccatctagataatagtg

SEQ ID NO: 3545741 - DNA, 25 bp, Homo sapien
tgattataacatttccagccaccgt

SEQ ID NO: 3545742 - DNA, 25 bp, Homo sapien
gaattgtgagaggacatagccagga

SEQ ID NO: 3545743 - DNA, 25 bp, Homo sapien
tcatccaggggtaatatattccatc

SEQ ID NO: 3545744 - DNA, 25 bp, Homo sapien
tgcgaattgtgagaggacatagcca

SEQ ID NO: 3545745 - DNA, 25 bp, Homo sapien
gtagccatcatccaggggtaatata

SEQ ID NO: 3545746 - DNA, 25 bp, Homo sapien
gtttgtggttgtatagtctgtgttg

SEQ ID NO: 3545747 - DNA, 25 bp, Homo sapien
tgagcagtgggttgatcacggtgta

SEQ ID NO: 3545748 - DNA, 25 bp, Homo sapien
tgtggttgtatagtctgtgttgctt

SEQ ID NO: 3545749 - DNA, 25 bp, Homo sapien
agtgggttgatcacggtgtagaaca

SEQ ID NO: 3545750 - DNA, 25 bp, Homo sapien
gaaatgcgcttatcttctgagacac

SEQ ID NO: 3545751 - DNA, 25 bp, Homo sapien
ccaggagatagcattcagtgtaggc

SEQ ID NO: 3545752 - DNA, 25 bp, Homo sapien
caagcaggactttttcgtagaccct

SEQ ID NO: 3545753 - DNA, 25 bp, Homo sapien
tcctatgtaggagccagcaacaagc

SEQ ID NO: 3545754 - DNA, 25 bp, Homo sapien
tcagtcaggatggtgcaatttccca

SEQ ID NO: 3545755 - DNA, 25 bp, Homo sapien
aaatagaatcggctgccactgggaa

SEQ ID NO: 3545756 - DNA, 25 bp, Homo sapien
cccaacaagatgaattcagtcagga

SEQ ID NO: 3545757 - DNA, 25 bp, Homo sapien
aaggttatcaaatagagcatcagaa

SEQ ID NO: 3545758 - DNA, 25 bp, Homo sapien
tctttaagaaactgaagtctatcta

SEQ ID NO: 3545759 - DNA, 25 bp, Homo sapien
ttctttaagaaactgaagtctatct

SEQ ID NO: 3545760 - DNA, 25 bp, Homo sapien
tttctttaagaaactgaagtctatc

SEQ ID NO: 3545761 - DNA, 25 bp, Homo sapien
tttaagaaactgaagtctatctaac

SEQ ID NO: 3545762 - DNA, 25 bp, Homo sapien
caccatagtacaaggtgagagccgt

SEQ ID NO: 3545763 - DNA, 25 bp, Homo sapien
agaagacctggaggcggcccttaat

SEQ ID NO: 3545764 - DNA, 25 bp, Homo sapien
ggcccttaatggaacggatcttcga

SEQ ID NO: 3545765 - DNA, 25 bp, Homo sapien
ggtttagcattggaatcaccacagt

SEQ ID NO: 3545766 - DNA, 25 bp, Homo sapien
gaagagatggacgcaagaataagtg

SEQ ID NO: 3545767 - DNA, 25 bp, Homo sapien
agtgatgattggaggcaagcataaa

SEQ ID NO: 3545768 - DNA, 25 bp, Homo sapien
cagtgggagtgatgattggaggcaa

SEQ ID NO: 3545769 - DNA, 25 bp, Homo sapien
agagatggacgcaagaataagtgca

SEQ ID NO: 3545770 - DNA, 25 bp, Homo sapien
tgagtttacaaagccgccaaggtgt

SEQ ID NO: 3545771 - DNA, 25 bp, Homo sapien
caagactggcacataactctgggaa

SEQ ID NO: 3545772 - DNA, 25 bp, Homo sapien
tattgctgccacagaagctcaaggt

SEQ ID NO: 3545773 - DNA, 25 bp, Homo sapien
caaggtaggtgtctcactggtgatg

SEQ ID NO: 3545774 - DNA, 25 bp, Homo sapien
ggctgatgacataaatgatgagaaa

SEQ ID NO: 3545775 - DNA, 25 bp, Homo sapien
aaatgcaagtcagcaggatatcggg

SEQ ID NO: 3545776 - DNA, 25 bp, Homo sapien
caagaatcagcacagatgagagaat

SEQ ID NO: 3545777 - DNA, 25 bp, Homo sapien
catgggtgtgtagggccaagaatca

SEQ ID NO: 3545778 - DNA, 25 bp, Homo sapien
cacctggtgtggaaagctctggccg

SEQ ID NO: 3545779 - DNA, 25 bp, Homo sapien
gatggccccattgtgataagggacc

SEQ ID NO: 3545780 - DNA, 25 bp, Homo sapien
tgcagaaaagcaattaccccgatgg

SEQ ID NO: 3545781 - DNA, 25 bp, Homo sapien
tagaggctaatccagcatccatggc

SEQ ID NO: 3545782 - DNA, 25 bp, Homo sapien
caaaccacaagctatcaaagttcaa

SEQ ID NO: 3545783 - DNA, 25 bp, Homo sapien
tctccatacattcttggctgggcca

SEQ ID NO: 3545784 - DNA, 25 bp, Homo sapien
ggctgggccattaccaggttataga

SEQ ID NO: 3545785 - DNA, 25 bp, Homo sapien
gaagacattatcatacacacgacca

SEQ ID NO: 3545786 - DNA, 25 bp, Homo sapien
tgacagtcctgtggatggcatcttt

SEQ ID NO: 3545787 - DNA, 25 bp, Homo sapien
ggccttgcaaaacttcctctgagtg

SEQ ID NO: 3545788 - DNA, 25 bp, Homo sapien
tgagtgacagtcctgtggatggcat

SEQ ID NO: 3545789 - DNA, 25 bp, Homo sapien
cagtcctgtggatggcatctttgac

SEQ ID NO: 3545790 - DNA, 25 bp, Homo sapien
gacactactttattgagatccaggg

SEQ ID NO: 3545791 - DNA, 25 bp, Homo sapien
ctactttattgagatccagggagaa

SEQ ID NO: 3545792 - DNA, 25 bp, Homo sapien
gtgtaaaacacagacactactttat

SEQ ID NO: 3545793 - DNA, 25 bp, Homo sapien
cactactttattgagatccagggag

SEQ ID NO: 3545794 - DNA, 25 bp, Homo sapien
aaagaaaagggtaccatacgagatg

SEQ ID NO: 3545795 - DNA, 25 bp, Homo sapien
gaaaagggtaccatacgagatgaaa

SEQ ID NO: 3545796 - DNA, 25 bp, Homo sapien
gtaccatacgagatgaaaacagctg

SEQ ID NO: 3545797 - DNA, 25 bp, Homo sapien
aagggtaccatacgagatgaaaaca

SEQ ID NO: 3545798 - DNA, 25 bp, Homo sapien
aaaggattgatgacattagggccac

SEQ ID NO: 3545799 - DNA, 25 bp, Homo sapien
tagggacccaccactagctggatgc

SEQ ID NO: 3545800 - DNA, 25 bp, Homo sapien
ggaaatcaggatagtcagaccactg

SEQ ID NO: 3545801 - DNA, 25 bp, Homo sapien
tgagcctggtatcagcacatacaag

SEQ ID NO: 3545802 - DNA, 25 bp, Homo sapien
ccaagtttccagttacattgatgac

SEQ ID NO: 3545803 - DNA, 25 bp, Homo sapien
ctgcaactgaggattgtaattcaag

SEQ ID NO: 3545804 - DNA, 25 bp, Homo sapien
tgcaactgaggattgtaattcaagc

SEQ ID NO: 3545805 - DNA, 25 bp, Homo sapien
cagagaaaccggagaaagatgaatc

SEQ ID NO: 3545806 - DNA, 25 bp, Homo sapien
gccatctagtggcaatgcttaacaa

SEQ ID NO: 3545807 - DNA, 25 bp, Homo sapien
cttaagaagaaaccacgacagtgtt

SEQ ID NO: 3545808 - DNA, 25 bp, Homo sapien
gaaagttgtcactggagtaactcag

SEQ ID NO: 3545809 - DNA, 25 bp, Homo sapien
tctttttggtaatcatcctccccat

SEQ ID NO: 3545810 - DNA, 25 bp, Homo sapien
ctttttggtaatcatcctccccatg

SEQ ID NO: 3545811 - DNA, 25 bp, Homo sapien
caagctgtagatgagaggtttcaac

SEQ ID NO: 3545812 - DNA, 25 bp, Homo sapien
gaggtttcaacatggggatgtacag

SEQ ID NO: 3545813 - DNA, 25 bp, Homo sapien
catggggatgtacagaacaccaaca

SEQ ID NO: 3545814 - DNA, 25 bp, Homo sapien
ttcaacatggggatgtacagaacac

SEQ ID NO: 3545815 - DNA, 25 bp, Homo sapien
caatttattgatccgggcgtcagca

SEQ ID NO: 3545816 - DNA, 25 bp, Homo sapien
ggcgtcagcacacacgagagaaaga

SEQ ID NO: 3545817 - DNA, 25 bp, Homo sapien
gaaatcagctgcataacgtacaacc

SEQ ID NO: 3545818 - DNA, 25 bp, Homo sapien
tcaggctactgacaactagtacagc

SEQ ID NO: 3545819 - DNA, 25 bp, Homo sapien
caatgactatgaagaacccaaagaa

SEQ ID NO: 3545820 - DNA, 25 bp, Homo sapien
aagccaagagaagatactcaatgac

SEQ ID NO: 3545821 - DNA, 25 bp, Homo sapien
aatgactatgaagaacccaaagaac

SEQ ID NO: 3545822 - DNA, 25 bp, Homo sapien
caagagaagatactcaatgactatg

SEQ ID NO: 3545823 - DNA, 25 bp, Homo sapien
aacttgtggcccacaacggatgaga

SEQ ID NO: 3545824 - DNA, 25 bp, Homo sapien
caaataagtcagtgagcaacttgtg

SEQ ID NO: 3545825 - DNA, 25 bp, Homo sapien
tgagcaacttgtggcccacaacgga

SEQ ID NO: 3545826 - DNA, 25 bp, Homo sapien
taagtcagtgagcaacttgtggccc

SEQ ID NO: 3545827 - DNA, 25 bp, Homo sapien
agcaggaatcgagccagatgcgaac

SEQ ID NO: 3545828 - DNA, 25 bp, Homo sapien
caggaatcgagccagatgcgaacca

SEQ ID NO: 3545829 - DNA, 25 bp, Homo sapien
gtgaaagcaggaatcgagccagatg

SEQ ID NO: 3545830 - DNA, 25 bp, Homo sapien
aaagcaggaatcgagccagatgcga

SEQ ID NO: 3545831 - DNA, 25 bp, Homo sapien
gaagacttgcagctgaagatgatac

SEQ ID NO: 3545832 - DNA, 25 bp, Homo sapien
cttaagcctacaaaaatgaattctg

SEQ ID NO: 3545833 - DNA, 25 bp, Homo sapien
gaattctgtgatccttttatatttc

SEQ ID NO: 3545834 - DNA, 25 bp, Homo sapien
aatgaattctgtgatccttttatat

SEQ ID NO: 3545835 - DNA, 25 bp, Homo sapien
aaaaatgaattctgtgatcctttta

SEQ ID NO: 3545836 - DNA, 25 bp, Homo sapien
cagactgcgcctcaagttcttcaca

SEQ ID NO: 3545837 - DNA, 25 bp, Homo sapien
gactgcgcctcaagttcttcacaaa

SEQ ID NO: 3545838 - DNA, 25 bp, Homo sapien
gcctcaagttcttcacaaatgacca

SEQ ID NO: 3545839 - DNA, 25 bp, Homo sapien
tgcgcctcaagttcttcacaaatga

SEQ ID NO: 3545840 - DNA, 25 bp, Homo sapien
cccaaatgccctgcttctaaaaact

SEQ ID NO: 3545841 - DNA, 25 bp, Homo sapien
ttcccaaatgccctgcttctaaaaa

SEQ ID NO: 3545842 - DNA, 25 bp, Homo sapien
acttcccaaatgccctgcttctaaa

SEQ ID NO: 3545843 - DNA, 25 bp, Homo sapien
ccacttcccaaatgccctgcttcta

SEQ ID NO: 3545844 - DNA, 25 bp, Homo sapien
cattgtaaacatagagaacatggat

SEQ ID NO: 3545845 - DNA, 25 bp, Homo sapien
aatccgggtaccattgtaaacatag

SEQ ID NO: 3545846 - DNA, 25 bp, Homo sapien
taccattgtaaacatagagaacatg

SEQ ID NO: 3545847 - DNA, 25 bp, Homo sapien
ccgggtaccattgtaaacatagaga

SEQ ID NO: 3545848 - DNA, 25 bp, Homo sapien
tcaaacttcttgctgaatgaatctt

SEQ ID NO: 3545849 - DNA, 25 bp, Homo sapien
ttctttcaaacttcttgctgaatga

SEQ ID NO: 3545850 - DNA, 25 bp, Homo sapien
ctttctttcaaacttcttgctgaat

SEQ ID NO: 3545851 - DNA, 25 bp, Homo sapien
ctttcaaacttcttgctgaatgaat

SEQ ID NO: 3545852 - DNA, 25 bp, Homo sapien
gacagccatcaggtgtgaagagcaa

SEQ ID NO: 3545853 - DNA, 25 bp, Homo sapien
cagataaagaagagtgtcccataca

SEQ ID NO: 3545854 - DNA, 25 bp, Homo sapien
cgcgtcagcagagcgaattctcagg

SEQ ID NO: 3545855 - DNA, 25 bp, Homo sapien
gaagtctttgcgtctcgcgtcagca

SEQ ID NO: 3545856 - DNA, 25 bp, Homo sapien
gagtaggcgaaaggtgaaagtcata

SEQ ID NO: 3545857 - DNA, 25 bp, Homo sapien
gtttggaccacagtagagtaggcga

SEQ ID NO: 3545858 - DNA, 25 bp, Homo sapien
ttataaggcccacagcataaggccc

SEQ ID NO: 3545859 - DNA, 25 bp, Homo sapien
aatatgggtatctgcatatgccagg

SEQ ID NO: 3545860 - DNA, 25 bp, Homo sapien
ctgttgggacataatgagtgtatac

SEQ ID NO: 3545861 - DNA, 25 bp, Homo sapien
acaaaggcttatagatagcctatac

SEQ ID NO: 3545862 - DNA, 25 bp, Homo sapien
gaaggaaacattcagttactacaaa

SEQ ID NO: 3545863 - DNA, 25 bp, Homo sapien
tctccacgaagatatcagtcaacat

SEQ ID NO: 3545864 - DNA, 25 bp, Homo sapien
tcccggaacagtgacaagataaaca

SEQ ID NO: 3545865 - DNA, 25 bp, Homo sapien
cagtcaacatcttgggaccgatggc

SEQ ID NO: 3545866 - DNA, 25 bp, Homo sapien
gggtctggagtcgagaatccatcca

SEQ ID NO: 3545867 - DNA, 25 bp, Homo sapien
tgaaagagatttgttaatcccacgg

SEQ ID NO: 3545868 - DNA, 25 bp, Homo sapien
gaaagagatttgttaatcccacgga

SEQ ID NO: 3545869 - DNA, 25 bp, Homo sapien
ctgaaagagatttgttaatcccacg

SEQ ID NO: 3545870 - DNA, 25 bp, Homo sapien
cctgcccaaggaaatatagaatgaa

SEQ ID NO: 3545871 - DNA, 25 bp, Homo sapien
gactatgttagttttcctgcccaag

SEQ ID NO: 3545872 - DNA, 25 bp, Homo sapien
gaatgaagatattgtccacctaagc

SEQ ID NO: 3545873 - DNA, 25 bp, Homo sapien
gttccagccgctataccaagtgaca

SEQ ID NO: 3545874 - DNA, 25 bp, Homo sapien
tttttcttctgaatgcatctttcac

SEQ ID NO: 3545875 - DNA, 25 bp, Homo sapien
ttcctctcaatttttcttctgaatg

SEQ ID NO: 3545876 - DNA, 25 bp, Homo sapien
ctataataaattttttcctctcaat

SEQ ID NO: 3545877 - DNA, 25 bp, Homo sapien
caatttttcttctgaatgcatcttt

SEQ ID NO: 3545878 - DNA, 25 bp, Homo sapien
ttaaccatggggattaccacagtat

SEQ ID NO: 3545879 - DNA, 25 bp, Homo sapien
accatggggattaccacagtataaa

SEQ ID NO: 3545880 - DNA, 25 bp, Homo sapien
aaccatggggattaccacagtataa

SEQ ID NO: 3545881 - DNA, 25 bp, Homo sapien
gttaaccatggggattaccacagta

SEQ ID NO: 3545882 - DNA, 25 bp, Homo sapien
gaacttggccgaacataaatcaaga

SEQ ID NO: 3545883 - DNA, 25 bp, Homo sapien
tgaacttggccgaacataaatcaag

SEQ ID NO: 3545884 - DNA, 25 bp, Homo sapien
cttgaacttggccgaacataaatca

SEQ ID NO: 3545885 - DNA, 25 bp, Homo sapien
acttggccgaacataaatcaagaaa

SEQ ID NO: 3545886 - DNA, 25 bp, Homo sapien
tcagaccactgagtactcctatagc

SEQ ID NO: 3545887 - DNA, 25 bp, Homo sapien
gagacagccgcaaggtgagaaaaac

SEQ ID NO: 3545888 - DNA, 25 bp, Homo sapien
tccagccaagacaaacagcacaaat

SEQ ID NO: 3545889 - DNA, 25 bp, Homo sapien
tataggagaccatgatgatcagacc

SEQ ID NO: 3545890 - DNA, 25 bp, Homo sapien
agtgaaaattgtatgagtcatggtg

SEQ ID NO: 3545891 - DNA, 25 bp, Homo sapien
gaaagcagtggaaaaatatcacaga

SEQ ID NO: 3545892 - DNA, 25 bp, Homo sapien
aaagtgaaaattgtatgagtcatgg

SEQ ID NO: 3545893 - DNA, 25 bp, Homo sapien
gggaaagcagtggaaaaatatcaca

SEQ ID NO: 3545894 - DNA, 25 bp, Homo sapien
taagagccatggcataaggccctac

SEQ ID NO: 3545895 - DNA, 25 bp, Homo sapien
cttataagagccatggcataaggcc

SEQ ID NO: 3545896 - DNA, 25 bp, Homo sapien
ttataagagccatggcataaggccc

SEQ ID NO: 3545897 - DNA, 25 bp, Homo sapien
tataagagccatggcataaggccct

SEQ ID NO: 3545898 - DNA, 25 bp, Homo sapien
cctgctgagacataatgagcgtata

SEQ ID NO: 3545899 - DNA, 25 bp, Homo sapien
agctgcatacagacctgctgagaca

SEQ ID NO: 3545900 - DNA, 25 bp, Homo sapien
aatgagcgtatacaacaagggcttg

SEQ ID NO: 3545901 - DNA, 25 bp, Homo sapien
gagcgtatacaacaagggcttgcag

SEQ ID NO: 3545902 - DNA, 25 bp, Homo sapien
gccagagaaaacactcagctgcctc

SEQ ID NO: 3545903 - DNA, 25 bp, Homo sapien
cagctgcctcaaagagaccaaagaa

SEQ ID NO: 3545904 - DNA, 25 bp, Homo sapien
ggcagccagagaaaacactcagctg

SEQ ID NO: 3545905 - DNA, 25 bp, Homo sapien
actcagctgcctcaaagagaccaaa

SEQ ID NO: 3545906 - DNA, 25 bp, Homo sapien
ctctgcaaagatattacacagcatc

SEQ ID NO: 3545907 - DNA, 25 bp, Homo sapien
tttctctgcaaagatattacacagc

SEQ ID NO: 3545908 - DNA, 25 bp, Homo sapien
ttttctctgcaaagatattacacag

SEQ ID NO: 3545909 - DNA, 25 bp, Homo sapien
ttctctgcaaagatattacacagca

SEQ ID NO: 3545910 - DNA, 25 bp, Homo sapien
ctgggatcaatccatatgagagtga

SEQ ID NO: 3545911 - DNA, 25 bp, Homo sapien
tacaaaggacaagtgcctaagaaaa

SEQ ID NO: 3545912 - DNA, 25 bp, Homo sapien
tgtggagtctgggatcaatccatat

SEQ ID NO: 3545913 - DNA, 25 bp, Homo sapien
tccatatgagagtgatcatccccaa

SEQ ID NO: 3545914 - DNA, 25 bp, Homo sapien
tcccagggtgataagataaacaaag

SEQ ID NO: 3545915 - DNA, 25 bp, Homo sapien
ccagggtgataagataaacaaagag

SEQ ID NO: 3545916 - DNA, 25 bp, Homo sapien
cccagggtgataagataaacaaaga

SEQ ID NO: 3545917 - DNA, 25 bp, Homo sapien
ctcccagggtgataagataaacaaa

SEQ ID NO: 3545918 - DNA, 25 bp, Homo sapien
agagaaattcagtcactactgtctg

SEQ ID NO: 3545919 - DNA, 25 bp, Homo sapien
gatgatctgtgaggcccaataagag

SEQ ID NO: 3545920 - DNA, 25 bp, Homo sapien
taagagaaattcagtcactactgtc

SEQ ID NO: 3545921 - DNA, 25 bp, Homo sapien
ctgatagggatgatctgtgaggccc

SEQ ID NO: 3545922 - DNA, 25 bp, Homo sapien
ctgaagaggaagacaaatccctcat

SEQ ID NO: 3545923 - DNA, 25 bp, Homo sapien
gacttcagagtaatatgacctatta

SEQ ID NO: 3545924 - DNA, 25 bp, Homo sapien
tatgttctcttcatagaacgtgaga

SEQ ID NO: 3545925 - DNA, 25 bp, Homo sapien
tatacagtgggacctactcatctgg

SEQ ID NO: 3545926 - DNA, 25 bp, Homo sapien
tatgacctattacagttttccagga

SEQ ID NO: 3545927 - DNA, 25 bp, Homo sapien
tagaggaggagaggcgctctgcttt

SEQ ID NO: 3545928 - DNA, 25 bp, Homo sapien
agaggaggagaggcgctctgctttt

SEQ ID NO: 3545929 - DNA, 25 bp, Homo sapien
aatgtcctcccatagcttggagtaa

SEQ ID NO: 3545930 - DNA, 25 bp, Homo sapien
agcttggagtaatttcatcgtctga

SEQ ID NO: 3545931 - DNA, 25 bp, Homo sapien
taggcatcaaagcaacgtatctcaa

SEQ ID NO: 3545932 - DNA, 25 bp, Homo sapien
tctacaaagccacaattaccctgat

SEQ ID NO: 3545933 - DNA, 25 bp, Homo sapien
gcaaatcgaattgaacagcacatca

SEQ ID NO: 3545934 - DNA, 25 bp, Homo sapien
gaacatagatgcaaagccaacagtg

SEQ ID NO: 3545935 - DNA, 25 bp, Homo sapien
aaaatgagagacttccctgatcctc

SEQ ID NO: 3545936 - DNA, 25 bp, Homo sapien
ccaccgggttcctctcatgacaagt

SEQ ID NO: 3545937 - DNA, 25 bp, Homo sapien
cctcctcacaggaagtgtgacaggg

SEQ ID NO: 3545938 - DNA, 25 bp, Homo sapien
ccgggttcctctcatgacaagtggg

SEQ ID NO: 3545939 - DNA, 25 bp, Homo sapien
gtaatcacgtcccaaacagtctgca

SEQ ID NO: 3545940 - DNA, 25 bp, Homo sapien
cagtctgcatccatttggtagctgg

SEQ ID NO: 3545941 - DNA, 25 bp, Homo sapien
catgctacttgttgtctttgtggga

SEQ ID NO: 3545942 - DNA, 25 bp, Homo sapien
ggtagctggttcatacatcatgggc

SEQ ID NO: 3545943 - DNA, 25 bp, Homo sapien
agcaagcatcaggtagcagcaacac

SEQ ID NO: 3545944 - DNA, 25 bp, Homo sapien
tgattcagcaagcatcaggtagcag

SEQ ID NO: 3545945 - DNA, 25 bp, Homo sapien
gcaagcatcaggtagcagcaacaca

SEQ ID NO: 3545946 - DNA, 25 bp, Homo sapien
ttatgattcagcaagcatcaggtag

SEQ ID NO: 3545947 - DNA, 25 bp, Homo sapien
cattttctatggcactccctcttac

SEQ ID NO: 3545948 - DNA, 25 bp, Homo sapien
tcattttctatggcactccctctta

SEQ ID NO: 3545949 - DNA, 25 bp, Homo sapien
catctgtgttctatggcattgtgat

SEQ ID NO: 3545950 - DNA, 25 bp, Homo sapien
gcctgagagtccaagatgcgagaga

SEQ ID NO: 3545951 - DNA, 25 bp, Homo sapien
ttgtgattgatctgcagcctgagag

SEQ ID NO: 3545952 - DNA, 25 bp, Homo sapien
tacaccatgggaacaacgggtctcc

SEQ ID NO: 3545953 - DNA, 25 bp, Homo sapien
gaccccaacccagtgattgctccac

SEQ ID NO: 3545954 - DNA, 25 bp, Homo sapien
accccaacccagtgattgctccaca

SEQ ID NO: 3545955 - DNA, 25 bp, Homo sapien
ccccaacccagtgattgctccacat

SEQ ID NO: 3545956 - DNA, 25 bp, Homo sapien
gattcttgagtaagctatcagggtc

SEQ ID NO: 3545957 - DNA, 25 bp, Homo sapien
tgcacctggtttgggactgcagaag

SEQ ID NO: 3545958 - DNA, 25 bp, Homo sapien
cagtcaagctggctcaattcttcag

SEQ ID NO: 3545959 - DNA, 25 bp, Homo sapien
ctccacctaatgcacctggtttggg

SEQ ID NO: 3545960 - DNA, 25 bp, Homo sapien
tgctccctgggtacgtatgaaatca

SEQ ID NO: 3545961 - DNA, 25 bp, Homo sapien
tacacagcttgacctaggaaaaaat

SEQ ID NO: 3545962 - DNA, 25 bp, Homo sapien
aagagcaatcatataacctcctggg

SEQ ID NO: 3545963 - DNA, 25 bp, Homo sapien
tgattgacaaaacagcatgctccct

SEQ ID NO: 3545964 - DNA, 25 bp, Homo sapien
gagacgctgatcactgttaaagaca

SEQ ID NO: 3545965 - DNA, 25 bp, Homo sapien
aagacagcgtccataacaagaatcc

SEQ ID NO: 3545966 - DNA, 25 bp, Homo sapien
tgctcttgtggagacgctgatcact

SEQ ID NO: 3545967 - DNA, 25 bp, Homo sapien
cactgttaaagacagcgtccataac

SEQ ID NO: 3545968 - DNA, 25 bp, Homo sapien
tcgttgagtgtgatattggagcaga

SEQ ID NO: 3545969 - DNA, 25 bp, Homo sapien
taacctcagagaaagtcgttgagtg

SEQ ID NO: 3545970 - DNA, 25 bp, Homo sapien
gaaagtcgttgagtgtgatattgga

SEQ ID NO: 3545971 - DNA, 25 bp, Homo sapien
cagagaaagtcgttgagtgtgatat

SEQ ID NO: 3545972 - DNA, 25 bp, Homo sapien
cattcgcctgagtccctcatccaca

SEQ ID NO: 3545973 - DNA, 25 bp, Homo sapien
aggccattcgcctgagtccctcatc

SEQ ID NO: 3545974 - DNA, 25 bp, Homo sapien
tcaggccattcgcctgagtccctca

SEQ ID NO: 3545975 - DNA, 25 bp, Homo sapien
gccattcgcctgagtccctcatcca

SEQ ID NO: 3545976 - DNA, 25 bp, Homo sapien
gtgtaaatgaagtactgagcataga

SEQ ID NO: 3545977 - DNA, 25 bp, Homo sapien
actgagcatagaaaaggcagtaaac

SEQ ID NO: 3545978 - DNA, 25 bp, Homo sapien
tgagcatagaaaaggcagtaaacat

SEQ ID NO: 3545979 - DNA, 25 bp, Homo sapien
tgaagtactgagcatagaaaaggca

SEQ ID NO: 3545980 - DNA, 25 bp, Homo sapien
ctccatagggtgtagataggttcaa

SEQ ID NO: 3545981 - DNA, 25 bp, Homo sapien
gtgtggtaaccaggatccaatagat

SEQ ID NO: 3545982 - DNA, 25 bp, Homo sapien
caggatccaatagattggcagggca

SEQ ID NO: 3545983 - DNA, 25 bp, Homo sapien
tatgggtgaacctgaacaagcagcc

SEQ ID NO: 3545984 - DNA, 25 bp, Homo sapien
ctgctccccctgactataattaggg

SEQ ID NO: 3545985 - DNA, 25 bp, Homo sapien
gaaagtgacaccaaaagcccttcac

SEQ ID NO: 3545986 - DNA, 25 bp, Homo sapien
tataattaggggtgtcacttgggtg

SEQ ID NO: 3545987 - DNA, 25 bp, Homo sapien
agaacaactcgttgccgcctcctga

SEQ ID NO: 3545988 - DNA, 25 bp, Homo sapien
gctctcggtggcagcggcgggcccc

SEQ ID NO: 3545989 - DNA, 25 bp, Homo sapien
ctgctctcggtggcagcggcgggcc

SEQ ID NO: 3545990 - DNA, 25 bp, Homo sapien
tctcggtggcagcggcgggccccat

SEQ ID NO: 3545991 - DNA, 25 bp, Homo sapien
tgctctcggtggcagcggcgggccc

SEQ ID NO: 3545992 - DNA, 25 bp, Homo sapien
tgatcaatcatagcaactggagtcc

SEQ ID NO: 3545993 - DNA, 25 bp, Homo sapien
gatagcctgcctttcgattaacgtg

SEQ ID NO: 3545994 - DNA, 25 bp, Homo sapien
tgggcttaatcatcttccgaacgtg

SEQ ID NO: 3545995 - DNA, 25 bp, Homo sapien
cagcatagctgggtttgatactcgg

SEQ ID NO: 3545996 - DNA, 25 bp, Homo sapien
tgagtcctggactggccaaagggct

SEQ ID NO: 3545997 - DNA, 25 bp, Homo sapien
tagagttccaggacctcatgcagct

SEQ ID NO: 3545998 - DNA, 25 bp, Homo sapien
caagacctggatctcagctacgaga

SEQ ID NO: 3545999 - DNA, 25 bp, Homo sapien
gaaaggaagactgagatgcggcaac

SEQ ID NO: 3546000 - DNA, 25 bp, Homo sapien
ggtgatgctcttccctttaggtcct

SEQ ID NO: 3546001 - DNA, 25 bp, Homo sapien
gcagaactaggtgatgctcttccct

SEQ ID NO: 3546002 - DNA, 25 bp, Homo sapien
cttgccagtggaggcagaactaggt

SEQ ID NO: 3546003 - DNA, 25 bp, Homo sapien
tagggacaaaaccttgccagtggag

SEQ ID NO: 3546004 - DNA, 25 bp, Homo sapien
tgcagaatatgacccccaatggcct

SEQ ID NO: 3546005 - DNA, 25 bp, Homo sapien
cagaagcttgagtgcagaatatgac

SEQ ID NO: 3546006 - DNA, 25 bp, Homo sapien
gccccctcctacagaagcttgagtg

SEQ ID NO: 3546007 - DNA, 25 bp, Homo sapien
tgagaccatcaatgctgaaaataac

SEQ ID NO: 3546008 - DNA, 25 bp, Homo sapien
acaaccctgagaagtagatactgtt

SEQ ID NO: 3546009 - DNA, 25 bp, Homo sapien
tctggaacccatactcttaactcta

SEQ ID NO: 3546010 - DNA, 25 bp, Homo sapien
tcgtgtacgttaactcactgaatcc

SEQ ID NO: 3546011 - DNA, 25 bp, Homo sapien
aactaggccaatagctctggaaccc

SEQ ID NO: 3546012 - DNA, 25 bp, Homo sapien
ctattcattgcgttcgtgggcttcg

SEQ ID NO: 3546013 - DNA, 25 bp, Homo sapien
cattgcgttcgtgggcttcgtggtc

SEQ ID NO: 3546014 - DNA, 25 bp, Homo sapien
ttcattgcgttcgtgggcttcgtgg

SEQ ID NO: 3546015 - DNA, 25 bp, Homo sapien
tattcattgcgttcgtgggcttcgt

SEQ ID NO: 3546016 - DNA, 25 bp, Homo sapien
tgttcagcaccggatagttcatgag

SEQ ID NO: 3546017 - DNA, 25 bp, Homo sapien
ttcagcaccggatagttcatgagta

SEQ ID NO: 3546018 - DNA, 25 bp, Homo sapien
tatttgttcagcaccggatagttca

SEQ ID NO: 3546019 - DNA, 25 bp, Homo sapien
tccctctatttgttcagcaccggat

SEQ ID NO: 3546020 - DNA, 25 bp, Homo sapien
ctgaataggagactcctgctttaca

SEQ ID NO: 3546021 - DNA, 25 bp, Homo sapien
tgaataggagactcctgctttacaa

SEQ ID NO: 3546022 - DNA, 25 bp, Homo sapien
gaataggagactcctgctttacaat

SEQ ID NO: 3546023 - DNA, 25 bp, Homo sapien
ggcattaatcaggtggccgccctcc

SEQ ID NO: 3546024 - DNA, 25 bp, Homo sapien
cacagacccgttgccatgacagtga

SEQ ID NO: 3546025 - DNA, 25 bp, Homo sapien
gaagggttccattgatcgaaatcca

SEQ ID NO: 3546026 - DNA, 25 bp, Homo sapien
tgaggccaatggatcaggcaggcat

SEQ ID NO: 3546027 - DNA, 25 bp, Homo sapien
gggctgtttcccacctcttcacttg

SEQ ID NO: 3546028 - DNA, 25 bp, Homo sapien
gtttcccacctcttcacttggccaa

SEQ ID NO: 3546029 - DNA, 25 bp, Homo sapien
gctgtttcccacctcttcacttggc

SEQ ID NO: 3546030 - DNA, 25 bp, Homo sapien
tgtttcccacctcttcacttggcca

SEQ ID NO: 3546031 - DNA, 25 bp, Homo sapien
tgagctcattaaaggacctctgtcc

SEQ ID NO: 3546032 - DNA, 25 bp, Homo sapien
aggatgttattgcagagcccagggc

SEQ ID NO: 3546033 - DNA, 25 bp, Homo sapien
gcccagggctgttattgtcaggaga

SEQ ID NO: 3546034 - DNA, 25 bp, Homo sapien
tcttctggcaggatgttattgcaga

SEQ ID NO: 3546035 - DNA, 25 bp, Homo sapien
taagcttgagactcagtagaccagt

SEQ ID NO: 3546036 - DNA, 25 bp, Homo sapien
agatgataccaatgtgcagccgcag

SEQ ID NO: 3546037 - DNA, 25 bp, Homo sapien
catccggccgttcataattcttata

SEQ ID NO: 3546038 - DNA, 25 bp, Homo sapien
tcactcaagacccactgacttagag

SEQ ID NO: 3546039 - DNA, 25 bp, Homo sapien
tcggagtttatcctgccggcaaggg

SEQ ID NO: 3546040 - DNA, 25 bp, Homo sapien
ctgaaagggccttgaatggcagtcc

SEQ ID NO: 3546041 - DNA, 25 bp, Homo sapien
ccagggaattcggagtttatcctgc

SEQ ID NO: 3546042 - DNA, 25 bp, Homo sapien
tgaaagggccttgaatggcagtcca

SEQ ID NO: 3546043 - DNA, 25 bp, Homo sapien
ggctttcccacgtgatcccagcaga

SEQ ID NO: 3546044 - DNA, 25 bp, Homo sapien
ccctgtcggctttcccacgtgatcc

SEQ ID NO: 3546045 - DNA, 25 bp, Homo sapien
cacccctgtcggctttcccacgtga

SEQ ID NO: 3546046 - DNA, 25 bp, Homo sapien
tgtcggctttcccacgtgatcccag

SEQ ID NO: 3546047 - DNA, 25 bp, Homo sapien
cttggttccctgactgccaaatttt

SEQ ID NO: 3546048 - DNA, 25 bp, Homo sapien
ttctggaaagctccagttgctcctc

SEQ ID NO: 3546049 - DNA, 25 bp, Homo sapien
ccctgactgccaaatttttttctgg

SEQ ID NO: 3546050 - DNA, 25 bp, Homo sapien
ttttttctggaaagctccagttgct

SEQ ID NO: 3546051 - DNA, 25 bp, Homo sapien
gcagccttcagtaaggagctgtcca

SEQ ID NO: 3546052 - DNA, 25 bp, Homo sapien
agcagccttcagtaaggagctgtcc

SEQ ID NO: 3546053 - DNA, 25 bp, Homo sapien
cagcagccttcagtaaggagctgtc

SEQ ID NO: 3546054 - DNA, 25 bp, Homo sapien
ccagcagccttcagtaaggagctgt

SEQ ID NO: 3546055 - DNA, 25 bp, Homo sapien
gctgtctacaatgtagaaaggagga

SEQ ID NO: 3546056 - DNA, 25 bp, Homo sapien
gtctacaatgtagaaaggaggaaac

SEQ ID NO: 3546057 - DNA, 25 bp, Homo sapien
tgtctagtcctatgaccatcccttc

SEQ ID NO: 3546058 - DNA, 25 bp, Homo sapien
ctgtctagtcctatgaccatccctt

SEQ ID NO: 3546059 - DNA, 25 bp, Homo sapien
tcctaagaatctcaagggcttccag

SEQ ID NO: 3546060 - DNA, 25 bp, Homo sapien
gcaagggctgcatccattatcttca

SEQ ID NO: 3546061 - DNA, 25 bp, Homo sapien
tatcttcattcctggcacgttgcag

SEQ ID NO: 3546062 - DNA, 25 bp, Homo sapien
gtgtatctattttcctaagggcaag

SEQ ID NO: 3546063 - DNA, 25 bp, Homo sapien
gatgtccagacatggattcccagaa

SEQ ID NO: 3546064 - DNA, 25 bp, Homo sapien
tggctcatccataacttccccagga

SEQ ID NO: 3546065 - DNA, 25 bp, Homo sapien
tcagtgtcggctccacttggctcat

SEQ ID NO: 3546066 - DNA, 25 bp, Homo sapien
ttcccagaaactgtttgactcagtg

SEQ ID NO: 3546067 - DNA, 25 bp, Homo sapien
gaagacctagtttccagtatgaaca

SEQ ID NO: 3546068 - DNA, 25 bp, Homo sapien
agtatgaacactgaactggttgcca

SEQ ID NO: 3546069 - DNA, 25 bp, Homo sapien
ggttgccacaatgccataatttgag

SEQ ID NO: 3546070 - DNA, 25 bp, Homo sapien
aagagacctgaagacctagtttcca

SEQ ID NO: 3546071 - DNA, 25 bp, Homo sapien
taatgataatagtggctccaatagc

SEQ ID NO: 3546072 - DNA, 25 bp, Homo sapien
ggctccaatagcctgttgttgccgt

SEQ ID NO: 3546073 - DNA, 25 bp, Homo sapien
tgttgttgccgtcgtaaattcccaa

SEQ ID NO: 3546074 - DNA, 25 bp, Homo sapien
caatagcctgttgttgccgtcgtaa

SEQ ID NO: 3546075 - DNA, 25 bp, Homo sapien
cacggcggcctcagagggacaattt

SEQ ID NO: 3546076 - DNA, 25 bp, Homo sapien
ttgatgaaccacagtgactaacagg

SEQ ID NO: 3546077 - DNA, 25 bp, Homo sapien
cagatgagttccaggcaggaagtct

SEQ ID NO: 3546078 - DNA, 25 bp, Homo sapien
tccagtgttcactggatgctttgag

SEQ ID NO: 3546079 - DNA, 25 bp, Homo sapien
gaaacaagcttttactgcgtccaga

SEQ ID NO: 3546080 - DNA, 25 bp, Homo sapien
gggatctccctacaggaagcctggt

SEQ ID NO: 3546081 - DNA, 25 bp, Homo sapien
tgcataggacaaggagtagccacac

SEQ ID NO: 3546082 - DNA, 25 bp, Homo sapien
tcattccagggagggtcaagatgtc

SEQ ID NO: 3546083 - DNA, 25 bp, Homo sapien
ttttcagaaagcaagggcaaaggcc

SEQ ID NO: 3546084 - DNA, 25 bp, Homo sapien
ggccgagggcgccaggcttctctct

SEQ ID NO: 3546085 - DNA, 25 bp, Homo sapien
ttcagaaagcaagggcaaaggccgg

SEQ ID NO: 3546086 - DNA, 25 bp, Homo sapien
ggagggccgagggcgccaggcttct

SEQ ID NO: 3546087 - DNA, 25 bp, Homo sapien
cacccttgcccatgttggggccggg

SEQ ID NO: 3546088 - DNA, 25 bp, Homo sapien
tgtgccccgaagagtagctggctga

SEQ ID NO: 3546089 - DNA, 25 bp, Homo sapien
tagtcaaccacaagggtctcctggc

SEQ ID NO: 3546090 - DNA, 25 bp, Homo sapien
ggatttctcgtgcatctgttctcca

SEQ ID NO: 3546091 - DNA, 25 bp, Homo sapien
ttcaccaggtggtagggcatccagc

SEQ ID NO: 3546092 - DNA, 25 bp, Homo sapien
gcaccacgatgatgctgagcagccg

SEQ ID NO: 3546093 - DNA, 25 bp, Homo sapien
ggtgcgtaacaccatgacaggcatg

SEQ ID NO: 3546094 - DNA, 25 bp, Homo sapien
gttccttgcggaagtggccagcgat

SEQ ID NO: 3546095 - DNA, 25 bp, Homo sapien
ccaggagggcggccagcacccaaag

SEQ ID NO: 3546096 - DNA, 25 bp, Homo sapien
caggagggcggccagcacccaaaga

SEQ ID NO: 3546097 - DNA, 25 bp, Homo sapien
aggagggcggccagcacccaaagaa

SEQ ID NO: 3546098 - DNA, 25 bp, Homo sapien
gatatcagctgagcgcctcttctcc

SEQ ID NO: 3546099 - DNA, 25 bp, Homo sapien
gccaggctagcaatgaagatatcag

SEQ ID NO: 3546100 - DNA, 25 bp, Homo sapien
ggcagcgtcaccacgaaggtcaggt

SEQ ID NO: 3546101 - DNA, 25 bp, Homo sapien
tcccggtacgtgtaggtagcccaca

SEQ ID NO: 3546102 - DNA, 25 bp, Homo sapien
gaggaagaccaacatgtagatggca

SEQ ID NO: 3546103 - DNA, 25 bp, Homo sapien
tgagggcccccgaggatttccagtc

SEQ ID NO: 3546104 - DNA, 25 bp, Homo sapien
gccccatagtagttgtcaaaatcac

SEQ ID NO: 3546105 - DNA, 25 bp, Homo sapien
tttccagtctgtgtactcacactca

SEQ ID NO: 3546106 - DNA, 25 bp, Homo sapien
tgccttacccccgtctcagttaaga

SEQ ID NO: 3546107 - DNA, 25 bp, Homo sapien
tgtctcctccttgactcgtcactcc

SEQ ID NO: 3546108 - DNA, 25 bp, Homo sapien
agacacttccttgcaccctcctgcg

SEQ ID NO: 3546109 - DNA, 25 bp, Homo sapien
ggcttgagcctcagagagtaagaag

SEQ ID NO: 3546110 - DNA, 25 bp, Homo sapien
ctgtgggaaaggatatggatccatc

SEQ ID NO: 3546111 - DNA, 25 bp, Homo sapien
tgttcccactggaatgctgagccag

SEQ ID NO: 3546112 - DNA, 25 bp, Homo sapien
ggatccatcgctttcatctgccgac

SEQ ID NO: 3546113 - DNA, 25 bp, Homo sapien
gctgttcccactggaatgctgagcc

SEQ ID NO: 3546114 - DNA, 25 bp, Homo sapien
agagttaccagactcattgagaggg

SEQ ID NO: 3546115 - DNA, 25 bp, Homo sapien
ataagatccggcctccaaccaggag

SEQ ID NO: 3546116 - DNA, 25 bp, Homo sapien
gagcagttaatctcactagagttac

SEQ ID NO: 3546117 - DNA, 25 bp, Homo sapien
gaggccaccgtttgggaccagagag

SEQ ID NO: 3546118 - DNA, 25 bp, Homo sapien
tgtgtccctaacagctggtggtgtt

SEQ ID NO: 3546119 - DNA, 25 bp, Homo sapien
atgaatggcaagatcacatgagaat

SEQ ID NO: 3546120 - DNA, 25 bp, Homo sapien
gaatggcaagatcacatgagaatcc

SEQ ID NO: 3546121 - DNA, 25 bp, Homo sapien
tgaatggcaagatcacatgagaatc

SEQ ID NO: 3546122 - DNA, 25 bp, Homo sapien
tccccccattacttggcacagcgcc

SEQ ID NO: 3546123 - DNA, 25 bp, Homo sapien
catccccccattacttggcacagcg

SEQ ID NO: 3546124 - DNA, 25 bp, Homo sapien
atccccccattacttggcacagcgc

SEQ ID NO: 3546125 - DNA, 25 bp, Homo sapien
ccccccattacttggcacagcgccc

SEQ ID NO: 3546126 - DNA, 25 bp, Homo sapien
tctacagccaggatgtgttttccca

SEQ ID NO: 3546127 - DNA, 25 bp, Homo sapien
tagaagcctgagagctctacagcca

SEQ ID NO: 3546128 - DNA, 25 bp, Homo sapien
gagaaatctcatagatggatcccgc

SEQ ID NO: 3546129 - DNA, 25 bp, Homo sapien
tgttttcccagcacaaggccatgct

SEQ ID NO: 3546130 - DNA, 25 bp, Homo sapien
tcctgtttctcaggcagcagccact

SEQ ID NO: 3546131 - DNA, 25 bp, Homo sapien
gttttcctgtttctcaggcagcagc

SEQ ID NO: 3546132 - DNA, 25 bp, Homo sapien
ttttcctgtttctcaggcagcagcc

SEQ ID NO: 3546133 - DNA, 25 bp, Homo sapien
tttcctgtttctcaggcagcagcca

SEQ ID NO: 3546134 - DNA, 25 bp, Homo sapien
tctgatagctccctcccctctggtc

SEQ ID NO: 3546135 - DNA, 25 bp, Homo sapien
cctctggtccctgctatgcctttct

SEQ ID NO: 3546136 - DNA, 25 bp, Homo sapien
aaagcaggcacagtctgatagctcc

SEQ ID NO: 3546137 - DNA, 25 bp, Homo sapien
ttcactggacttggcacggtgccca

SEQ ID NO: 3546138 - DNA, 25 bp, Homo sapien
tggaaactctggagaccaaatgaca

SEQ ID NO: 3546139 - DNA, 25 bp, Homo sapien
gcagaactgtgacgagctgatgagt

SEQ ID NO: 3546140 - DNA, 25 bp, Homo sapien
aagtcaattcttggccacctggaga

SEQ ID NO: 3546141 - DNA, 25 bp, Homo sapien
cagcctaaaccactgtccactgaaa

SEQ ID NO: 3546142 - DNA, 25 bp, Homo sapien
tttctttgtctgagattcggcactg

SEQ ID NO: 3546143 - DNA, 25 bp, Homo sapien
cgtgcaactgccagcgagaagagaa

SEQ ID NO: 3546144 - DNA, 25 bp, Homo sapien
aactgccagcgagaagagaatgttc

SEQ ID NO: 3546145 - DNA, 25 bp, Homo sapien
ttgtctgagattcggcactggtccc

SEQ ID NO: 3546146 - DNA, 25 bp, Homo sapien
caccatgtacaaaggagagtaacac

SEQ ID NO: 3546147 - DNA, 25 bp, Homo sapien
taaggccgggtgtggcataaactct

SEQ ID NO: 3546148 - DNA, 25 bp, Homo sapien
cactgtaaccggctgacaccatgta

SEQ ID NO: 3546149 - DNA, 25 bp, Homo sapien
gtaacacagctctactaccaccagg

SEQ ID NO: 3546150 - DNA, 25 bp, Homo sapien
gcccaaagcacagaaggcatcctgt

SEQ ID NO: 3546151 - DNA, 25 bp, Homo sapien
gggtcaataaatctgccgcagcagc

SEQ ID NO: 3546152 - DNA, 25 bp, Homo sapien
gcagccgtggatcagtgagggcaaa

SEQ ID NO: 3546153 - DNA, 25 bp, Homo sapien
caaagggctgggtcaataaatctgc

SEQ ID NO: 3546154 - DNA, 25 bp, Homo sapien
tactgagggctccatggacaaaggc

SEQ ID NO: 3546155 - DNA, 25 bp, Homo sapien
aggccagctcgttcttgggcccaaa

SEQ ID NO: 3546156 - DNA, 25 bp, Homo sapien
tcttgggcccaaacaccagttgcag

SEQ ID NO: 3546157 - DNA, 25 bp, Homo sapien
atactgagggctccatggacaaagg

SEQ ID NO: 3546158 - DNA, 25 bp, Homo sapien
tgctgttccattcccaagggcatcc

SEQ ID NO: 3546159 - DNA, 25 bp, Homo sapien
tgggagagcaccagtgactgctccc

SEQ ID NO: 3546160 - DNA, 25 bp, Homo sapien
tacagtcccacccattataaaaatc

SEQ ID NO: 3546161 - DNA, 25 bp, Homo sapien
aaaatgtcattggtctctgtggggt

SEQ ID NO: 3546162 - DNA, 25 bp, Homo sapien
ggcagggatacagtcccacccatta

SEQ ID NO: 3546163 - DNA, 25 bp, Homo sapien
ggacaaaaccttcaaccactagtga

SEQ ID NO: 3546164 - DNA, 25 bp, Homo sapien
tcggagggtgatacaaagtgcataa

SEQ ID NO: 3546165 - DNA, 25 bp, Homo sapien
aaagtgcataaatgtgcctccccag

SEQ ID NO: 3546166 - DNA, 25 bp, Homo sapien
acaaagtgcataaatgtgcctcccc

SEQ ID NO: 3546167 - DNA, 25 bp, Homo sapien
agttcggagggtgatacaaagtgca

SEQ ID NO: 3546168 - DNA, 25 bp, Homo sapien
gggcatggtggggctccagccgtct

SEQ ID NO: 3546169 - DNA, 25 bp, Homo sapien
gacagaggctgcagcctggggcatg

SEQ ID NO: 3546170 - DNA, 25 bp, Homo sapien
gcatggtggggctccagccgtctcc

SEQ ID NO: 3546171 - DNA, 25 bp, Homo sapien
tggggcatggtggggctccagccgt

SEQ ID NO: 3546172 - DNA, 25 bp, Homo sapien
cactgcctgagactgccaggtggga

SEQ ID NO: 3546173 - DNA, 25 bp, Homo sapien
cagggaccccacaggaatgggcact

SEQ ID NO: 3546174 - DNA, 25 bp, Homo sapien
gggaccccacaggaatgggcactgc

SEQ ID NO: 3546175 - DNA, 25 bp, Homo sapien
aatgggcactgcctgagactgccag

SEQ ID NO: 3546176 - DNA, 25 bp, Homo sapien
ggtcatggagcctggtaagtgccca

SEQ ID NO: 3546177 - DNA, 25 bp, Homo sapien
cccagctaagcctggtcatggagcc

SEQ ID NO: 3546178 - DNA, 25 bp, Homo sapien
gaagggaggaaaagacatcagggaa

SEQ ID NO: 3546179 - DNA, 25 bp, Homo sapien
cttggtgcccccagctaagcctggt

SEQ ID NO: 3546180 - DNA, 25 bp, Homo sapien
acaccaggccagacaacaacctgac

SEQ ID NO: 3546181 - DNA, 25 bp, Homo sapien
tggctgaccactctccgtccagcca

SEQ ID NO: 3546182 - DNA, 25 bp, Homo sapien
caccaggccagacaacaacctgacc

SEQ ID NO: 3546183 - DNA, 25 bp, Homo sapien
agccagttgggcgacgatccttctg

SEQ ID NO: 3546184 - DNA, 25 bp, Homo sapien
ccagttgggcgacgatccttctgac

SEQ ID NO: 3546185 - DNA, 25 bp, Homo sapien
cttgaagccagttgggcgacgatcc

SEQ ID NO: 3546186 - DNA, 25 bp, Homo sapien
cttcttcagtttcagggcttgaagc

SEQ ID NO: 3546187 - DNA, 25 bp, Homo sapien
ggaggcagacggcaaaggtccagaa

SEQ ID NO: 3546188 - DNA, 25 bp, Homo sapien
ctaggaggcagacggcaaaggtcca

SEQ ID NO: 3546189 - DNA, 25 bp, Homo sapien
taggaggcagacggcaaaggtccag

SEQ ID NO: 3546190 - DNA, 25 bp, Homo sapien
gaggcagacggcaaaggtccagaat

SEQ ID NO: 3546191 - DNA, 25 bp, Homo sapien
cacaacaaggagacgtgatagggac

SEQ ID NO: 3546192 - DNA, 25 bp, Homo sapien
tgaacacaacaaggagacgtgatag

SEQ ID NO: 3546193 - DNA, 25 bp, Homo sapien
caacaaggagacgtgatagggacag

SEQ ID NO: 3546194 - DNA, 25 bp, Homo sapien
caaggagacgtgatagggacagaaa

SEQ ID NO: 3546195 - DNA, 25 bp, Homo sapien
ttctggctcgacttgctctcagcca

SEQ ID NO: 3546196 - DNA, 25 bp, Homo sapien
gatttcgaacgctggaccgcggact

SEQ ID NO: 3546197 - DNA, 25 bp, Homo sapien
gactccttctggctcgacttgctct

SEQ ID NO: 3546198 - DNA, 25 bp, Homo sapien
tgggaccttgcaggatttcgaacgc

SEQ ID NO: 3546199 - DNA, 25 bp, Homo sapien
ttcagccccttggtgcccaacgaca

SEQ ID NO: 3546200 - DNA, 25 bp, Homo sapien
gatggcacccgagatgcccgtggct

SEQ ID NO: 3546201 - DNA, 25 bp, Homo sapien
tcttcatctgaagatggcacccgag

SEQ ID NO: 3546202 - DNA, 25 bp, Homo sapien
cgacatccgtgtccggcggctctga

SEQ ID NO: 3546203 - DNA, 25 bp, Homo sapien
tacatggcactgtcgaggatctcgg

SEQ ID NO: 3546204 - DNA, 25 bp, Homo sapien
tggaacaggtgtgcatccgagtctg

SEQ ID NO: 3546205 - DNA, 25 bp, Homo sapien
acgcttgcgccccaagttggcacgg

SEQ ID NO: 3546206 - DNA, 25 bp, Homo sapien
aagttggcacggctccgatacatgg

SEQ ID NO: 3546207 - DNA, 25 bp, Homo sapien
aacagtagctgaccaggagctggac

SEQ ID NO: 3546208 - DNA, 25 bp, Homo sapien
cctcatcccacgggagcccctcaac

SEQ ID NO: 3546209 - DNA, 25 bp, Homo sapien
aatggtgacaccactgccattgctg

SEQ ID NO: 3546210 - DNA, 25 bp, Homo sapien
ggcaatggtgacaccactgccattg

SEQ ID NO: 3546211 - DNA, 25 bp, Homo sapien
acctacaacccgctttctgcctcct

SEQ ID NO: 3546212 - DNA, 25 bp, Homo sapien
aggaatggggctctcgctgcatcgc

SEQ ID NO: 3546213 - DNA, 25 bp, Homo sapien
tcctggactgggactgctcagggaa

SEQ ID NO: 3546214 - DNA, 25 bp, Homo sapien
tcacgttcacgtgacgcacctacaa

SEQ ID NO: 3546215 - DNA, 25 bp, Homo sapien
ccttgggagggtcgccgagaagtct

SEQ ID NO: 3546216 - DNA, 25 bp, Homo sapien
cgagccaccgccttggagctgctgg

SEQ ID NO: 3546217 - DNA, 25 bp, Homo sapien
gtctggctggcctcaccatcaggct

SEQ ID NO: 3546218 - DNA, 25 bp, Homo sapien
ggtgccatccacgtcttctgtctgg

SEQ ID NO: 3546219 - DNA, 25 bp, Homo sapien
tggggggcgggccgggcacctgcca

SEQ ID NO: 3546220 - DNA, 25 bp, Homo sapien
gagagaacgagatcatcgtaaggcc

SEQ ID NO: 3546221 - DNA, 25 bp, Homo sapien
agagagagaacgagatcatcgtaag

SEQ ID NO: 3546222 - DNA, 25 bp, Homo sapien
gagatcatcgtaaggccccatctcc

SEQ ID NO: 3546223 - DNA, 25 bp, Homo sapien
gaacgagatcatcgtaaggccccat

SEQ ID NO: 3546224 - DNA, 25 bp, Homo sapien
gcacggagtcgctgcaaggatgaaa

SEQ ID NO: 3546225 - DNA, 25 bp, Homo sapien
ctgttgcatgctagcaatgtgttcc

SEQ ID NO: 3546226 - DNA, 25 bp, Homo sapien
gtgctcgggcagtcacactccttgg

SEQ ID NO: 3546227 - DNA, 25 bp, Homo sapien
tggtcagcacgcaccgcagaagcag

SEQ ID NO: 3546228 - DNA, 25 bp, Homo sapien
aaacacggcacaagcacaccacaca

SEQ ID NO: 3546229 - DNA, 25 bp, Homo sapien
gagcttgtgcgctgtttgtcactcc

SEQ ID NO: 3546230 - DNA, 25 bp, Homo sapien
accacatctacaggcacggcacaga

SEQ ID NO: 3546231 - DNA, 25 bp, Homo sapien
tctctcactaactcatactgcccgc

SEQ ID NO: 3546232 - DNA, 25 bp, Homo sapien
cagcttaaaatcagggagaatttgg

SEQ ID NO: 3546233 - DNA, 25 bp, Homo sapien
ccagcttaaaatcagggagaatttg

SEQ ID NO: 3546234 - DNA, 25 bp, Homo sapien
taccctgaggaccaagacggtatcc

SEQ ID NO: 3546235 - DNA, 25 bp, Homo sapien
ccctgaggaccaagacggtatccca

SEQ ID NO: 3546236 - DNA, 25 bp, Homo sapien
gtaccctgaggaccaagacggtatc

SEQ ID NO: 3546237 - DNA, 25 bp, Homo sapien
cctgaggaccaagacggtatcccac

SEQ ID NO: 3546238 - DNA, 25 bp, Homo sapien
cagaggcaaacatggcgctggaact

SEQ ID NO: 3546239 - DNA, 25 bp, Homo sapien
aaacgtgaatatcccagtgttctga

SEQ ID NO: 3546240 - DNA, 25 bp, Homo sapien
gaactacaaaacgtgaatatcccag

SEQ ID NO: 3546241 - DNA, 25 bp, Homo sapien
aacatggcgctggaactacaaaacg

SEQ ID NO: 3546242 - DNA, 25 bp, Homo sapien
cccaaggtcaggtgtccagtctgcc

SEQ ID NO: 3546243 - DNA, 25 bp, Homo sapien
gacgaggagtaatcttcaccctggg

SEQ ID NO: 3546244 - DNA, 25 bp, Homo sapien
agtctgggtcacaggtcacctccaa

SEQ ID NO: 3546245 - DNA, 25 bp, Homo sapien
tcaggcccagattgttaccccagtc

SEQ ID NO: 3546246 - DNA, 25 bp, Homo sapien
gatttaaggaactctccggcctcca

SEQ ID NO: 3546247 - DNA, 25 bp, Homo sapien
tttaaggaactctccggcctccaca

SEQ ID NO: 3546248 - DNA, 25 bp, Homo sapien
ttaaggaactctccggcctccacac

SEQ ID NO: 3546249 - DNA, 25 bp, Homo sapien
aggaactctccggcctccacacctg

SEQ ID NO: 3546250 - DNA, 25 bp, Homo sapien
ctcctccctccccgacctcagccaa

SEQ ID NO: 3546251 - DNA, 25 bp, Homo sapien
ctgtggcctcctccctccccgacct

SEQ ID NO: 3546252 - DNA, 25 bp, Homo sapien
tggcctcctccctccccgacctcag

SEQ ID NO: 3546253 - DNA, 25 bp, Homo sapien
gcctcctccctccccgacctcagcc

SEQ ID NO: 3546254 - DNA, 25 bp, Homo sapien
tgctcttcacattaacatcagaagt

SEQ ID NO: 3546255 - DNA, 25 bp, Homo sapien
tccaaacagccggtcaggttcatgt

SEQ ID NO: 3546256 - DNA, 25 bp, Homo sapien
atgtctctcaagctcaggccacctg

SEQ ID NO: 3546257 - DNA, 25 bp, Homo sapien
cacattaacatcagaagtccagtcc

SEQ ID NO: 3546258 - DNA, 25 bp, Homo sapien
tggtcttcccaggaggcacaaagtg

SEQ ID NO: 3546259 - DNA, 25 bp, Homo sapien
ccaatgatgccaaactgatagctcc

SEQ ID NO: 3546260 - DNA, 25 bp, Homo sapien
tcactggcctcgatgcagaagtccc

SEQ ID NO: 3546261 - DNA, 25 bp, Homo sapien
catcttgctagaagggctaaagcca

SEQ ID NO: 3546262 - DNA, 25 bp, Homo sapien
tgccaccactgctgtagtcccttat

SEQ ID NO: 3546263 - DNA, 25 bp, Homo sapien
tgggcgtcaagggtcctggagctgc

SEQ ID NO: 3546264 - DNA, 25 bp, Homo sapien
ctgggcgtcaagggtcctggagctg

SEQ ID NO: 3546265 - DNA, 25 bp, Homo sapien
ggagctgccaccactgctgtagtcc

SEQ ID NO: 3546266 - DNA, 25 bp, Homo sapien
gctggagtaagtgccctgggaatcc

SEQ ID NO: 3546267 - DNA, 25 bp, Homo sapien
tggcatcttggctggcataagcacc

SEQ ID NO: 3546268 - DNA, 25 bp, Homo sapien
tggctgctgtacctaccatggtggt

SEQ ID NO: 3546269 - DNA, 25 bp, Homo sapien
ggctgccataggtgccgagtgacac

SEQ ID NO: 3546270 - DNA, 25 bp, Homo sapien
tcagcgtcctcatccttaaacgagg

SEQ ID NO: 3546271 - DNA, 25 bp, Homo sapien
tcagcgctgcctagtgcctgaaagc

SEQ ID NO: 3546272 - DNA, 25 bp, Homo sapien
gggagtcaatccagcagagtcagcg

SEQ ID NO: 3546273 - DNA, 25 bp, Homo sapien
tgaaagccccactttggcaacagaa

SEQ ID NO: 3546274 - DNA, 25 bp, Homo sapien
gcctcatccctcagcgcagcgttgg

SEQ ID NO: 3546275 - DNA, 25 bp, Homo sapien
cctcagcgcagcgttggccagcagc

SEQ ID NO: 3546276 - DNA, 25 bp, Homo sapien
catccctcagcgcagcgttggccag

SEQ ID NO: 3546277 - DNA, 25 bp, Homo sapien
tcagggcttcggagccggccagcct

SEQ ID NO: 3546278 - DNA, 25 bp, Homo sapien
gctggcctccccatccccaggctgg

SEQ ID NO: 3546279 - DNA, 25 bp, Homo sapien
cctccccatccccaggctgggccat

SEQ ID NO: 3546280 - DNA, 25 bp, Homo sapien
gcctccccatccccaggctgggcca

SEQ ID NO: 3546281 - DNA, 25 bp, Homo sapien
tggcctccccatccccaggctgggc

SEQ ID NO: 3546282 - DNA, 25 bp, Homo sapien
gcgcagggatagagctgggctgcta

SEQ ID NO: 3546283 - DNA, 25 bp, Homo sapien
cccccaacccgccttggggctgctg

SEQ ID NO: 3546284 - DNA, 25 bp, Homo sapien
gatagagctgggctgctacccgcgc

SEQ ID NO: 3546285 - DNA, 25 bp, Homo sapien
cagggatagagctgggctgctaccc

SEQ ID NO: 3546286 - DNA, 25 bp, Homo sapien
cccattctccctatgcccattctca

SEQ ID NO: 3546287 - DNA, 25 bp, Homo sapien
ccattctccctatgcccattctcac

SEQ ID NO: 3546288 - DNA, 25 bp, Homo sapien
aagggctcctgcgactcgtatctct

SEQ ID NO: 3546289 - DNA, 25 bp, Homo sapien
gggatgccctacacaagtcttgagc

SEQ ID NO: 3546290 - DNA, 25 bp, Homo sapien
gtgaagccaggaggtcgtccagcca

SEQ ID NO: 3546291 - DNA, 25 bp, Homo sapien
aaggctgcctccctggtagccaggg

SEQ ID NO: 3546292 - DNA, 25 bp, Homo sapien
aaaggtaatccaggtgtgccctcag

SEQ ID NO: 3546293 - DNA, 25 bp, Homo sapien
gaacttcctgacccacttggagctg

SEQ ID NO: 3546294 - DNA, 25 bp, Homo sapien
gacatgcttggatcatccccctgca

SEQ ID NO: 3546295 - DNA, 25 bp, Homo sapien
agctgggaattgaggttgactctcc

SEQ ID NO: 3546296 - DNA, 25 bp, Homo sapien
agaatcggcgctgaaccaggctggt

SEQ ID NO: 3546297 - DNA, 25 bp, Homo sapien
tcctgactgggtgactggagcacac

SEQ ID NO: 3546298 - DNA, 25 bp, Homo sapien
ccgccagatggaaacgtccgagtga

SEQ ID NO: 3546299 - DNA, 25 bp, Homo sapien
tccctgctggaaacggccaagttgc

SEQ ID NO: 3546300 - DNA, 25 bp, Homo sapien
atcaggggccggggtgaggtggcag

SEQ ID NO: 3546301 - DNA, 25 bp, Homo sapien
gatcaggggccggggtgaggtggca

SEQ ID NO: 3546302 - DNA, 25 bp, Homo sapien
tcaggggccggggtgaggtggcagg

SEQ ID NO: 3546303 - DNA, 25 bp, Homo sapien
cgatcaggggccggggtgaggtggc

SEQ ID NO: 3546304 - DNA, 25 bp, Homo sapien
gaagcctgggaagcttcaggagtct

SEQ ID NO: 3546305 - DNA, 25 bp, Homo sapien
ccctcgtcaggcagggctgcacttg

SEQ ID NO: 3546306 - DNA, 25 bp, Homo sapien
cagggagaactcttatcaggcgggt

SEQ ID NO: 3546307 - DNA, 25 bp, Homo sapien
gcacttggagctgatggagtcacag

SEQ ID NO: 3546308 - DNA, 25 bp, Homo sapien
ttagccaggtccccgttgaaggcca

SEQ ID NO: 3546309 - DNA, 25 bp, Homo sapien
tgaaggccaggtcggaaggaaggct

SEQ ID NO: 3546310 - DNA, 25 bp, Homo sapien
atcagcaggtagctccgagctggct

SEQ ID NO: 3546311 - DNA, 25 bp, Homo sapien
ccgagctggctgccttagccaggtc

SEQ ID NO: 3546312 - DNA, 25 bp, Homo sapien
tggagactttactggcccctcctgg

SEQ ID NO: 3546313 - DNA, 25 bp, Homo sapien
gagcagtggtcgtgccataggtcct

SEQ ID NO: 3546314 - DNA, 25 bp, Homo sapien
cgcgagctgccatcgtggttaaagg

SEQ ID NO: 3546315 - DNA, 25 bp, Homo sapien
ctgggaccatcccctgaagagggtg

SEQ ID NO: 3546316 - DNA, 25 bp, Homo sapien
caaggacctccttccgaggctgctc

SEQ ID NO: 3546317 - DNA, 25 bp, Homo sapien
tcttccaccgtggtggccgcgaagc

SEQ ID NO: 3546318 - DNA, 25 bp, Homo sapien
tcaaccgcaggccttggtgcaaagg

SEQ ID NO: 3546319 - DNA, 25 bp, Homo sapien
tgcacatcgagctgggggtgtcaaa

SEQ ID NO: 3546320 - DNA, 25 bp, Homo sapien
tgacagggggtttggcccgagtgtc

SEQ ID NO: 3546321 - DNA, 25 bp, Homo sapien
tattgacccaagtcaaacaaaagta

SEQ ID NO: 3546322 - DNA, 25 bp, Homo sapien
cccaagtcaaacaaaagtaaatctg

SEQ ID NO: 3546323 - DNA, 25 bp, Homo sapien
ctattgacccaagtcaaacaaaagt

SEQ ID NO: 3546324 - DNA, 25 bp, Homo sapien
tggctccaccctgcacccattggta

SEQ ID NO: 3546325 - DNA, 25 bp, Homo sapien
ctggctccaccctgcacccattggt

SEQ ID NO: 3546326 - DNA, 25 bp, Homo sapien
ggctccaccctgcacccattggtac

SEQ ID NO: 3546327 - DNA, 25 bp, Homo sapien
ctcagagccagtaggcaccagctcc

SEQ ID NO: 3546328 - DNA, 25 bp, Homo sapien
cagagccagtaggcaccagctcctc

SEQ ID NO: 3546329 - DNA, 25 bp, Homo sapien
ctggctcagagccagtaggcaccag

SEQ ID NO: 3546330 - DNA, 25 bp, Homo sapien
tggctcagagccagtaggcaccagc

SEQ ID NO: 3546331 - DNA, 25 bp, Homo sapien
gctttccctgagagtagacactttc

SEQ ID NO: 3546332 - DNA, 25 bp, Homo sapien
tttccctgagagtagacactttcat

SEQ ID NO: 3546333 - DNA, 25 bp, Homo sapien
tgagctttccctgagagtagacact

SEQ ID NO: 3546334 - DNA, 25 bp, Homo sapien
gctgagctttccctgagagtagaca

SEQ ID NO: 3546335 - DNA, 25 bp, Homo sapien
cagagaggtatgagctggggtggct

SEQ ID NO: 3546336 - DNA, 25 bp, Homo sapien
gggaggcagagaggtatgagctggg

SEQ ID NO: 3546337 - DNA, 25 bp, Homo sapien
cggggaggcagagaggtatgagctg

SEQ ID NO: 3546338 - DNA, 25 bp, Homo sapien
cttgagagcggggaggcagagaggt

SEQ ID NO: 3546339 - DNA, 25 bp, Homo sapien
gagagaagtctcctatttctaacag

SEQ ID NO: 3546340 - DNA, 25 bp, Homo sapien
aagtcctagcgcttcagggagtcac

SEQ ID NO: 3546341 - DNA, 25 bp, Homo sapien
aaaaagagttgggcgttgccagtag

SEQ ID NO: 3546342 - DNA, 25 bp, Homo sapien
ttcaaagatcctccccaactcttat

SEQ ID NO: 3546343 - DNA, 25 bp, Homo sapien
taatttctcaatcgcttggcttcag

SEQ ID NO: 3546344 - DNA, 25 bp, Homo sapien
aatttgatgaggtaaagccagggcc

SEQ ID NO: 3546345 - DNA, 25 bp, Homo sapien
caccttccacgacagtcagggtgga

SEQ ID NO: 3546346 - DNA, 25 bp, Homo sapien
catagcaatggcctcccactggatt

SEQ ID NO: 3546347 - DNA, 25 bp, Homo sapien
cagcctagggttggctttaaggagt

SEQ ID NO: 3546348 - DNA, 25 bp, Homo sapien
ggtggtagaagcctgtcacatgagc

SEQ ID NO: 3546349 - DNA, 25 bp, Homo sapien
tcagtgctgggtgggtctaccactt

SEQ ID NO: 3546350 - DNA, 25 bp, Homo sapien
caatgagctaacatccctgataacc

SEQ ID NO: 3546351 - DNA, 25 bp, Homo sapien
catgagcttcaggatctgatatacc

SEQ ID NO: 3546352 - DNA, 25 bp, Homo sapien
ttcactctcccaggccctagtcctg

SEQ ID NO: 3546353 - DNA, 25 bp, Homo sapien
atactccaaccacctcctcagttcc

SEQ ID NO: 3546354 - DNA, 25 bp, Homo sapien
ctgttcttcagatactccaaccacc

SEQ ID NO: 3546355 - DNA, 25 bp, Homo sapien
ctccaaccacctcctcagttcccat

SEQ ID NO: 3546356 - DNA, 25 bp, Homo sapien
tgttcttcagatactccaaccacct

SEQ ID NO: 3546357 - DNA, 25 bp, Homo sapien
cattggtcagttaaccaccacggaa

SEQ ID NO: 3546358 - DNA, 25 bp, Homo sapien
ccacggaagactgcccactgtgggt

SEQ ID NO: 3546359 - DNA, 25 bp, Homo sapien
gaaacccagtactgtcaacccattg

SEQ ID NO: 3546360 - DNA, 25 bp, Homo sapien
agagccctgaggacaacccaaactt

SEQ ID NO: 3546361 - DNA, 25 bp, Homo sapien
gtagcagggtagaaacgagctgacc

SEQ ID NO: 3546362 - DNA, 25 bp, Homo sapien
cgagctgacccctggcagataaggc

SEQ ID NO: 3546363 - DNA, 25 bp, Homo sapien
gattcgcagcggttctgagcactcc

SEQ ID NO: 3546364 - DNA, 25 bp, Homo sapien
ctgcagcaatgaaggcgggctcaga

SEQ ID NO: 3546365 - DNA, 25 bp, Homo sapien
agaagcggaggacctgtgagcgggc

SEQ ID NO: 3546366 - DNA, 25 bp, Homo sapien
ggtgggctgcagacgtcgatcaggt

SEQ ID NO: 3546367 - DNA, 25 bp, Homo sapien
tctccagccggatccgaggctagag

SEQ ID NO: 3546368 - DNA, 25 bp, Homo sapien
ggtcggcagggacagcacgtaaact

SEQ ID NO: 3546369 - DNA, 25 bp, Homo sapien
ctgggggcgtgccgaaggagccggg

SEQ ID NO: 3546370 - DNA, 25 bp, Homo sapien
gctcggggccccgatgccagtcccc

SEQ ID NO: 3546371 - DNA, 25 bp, Homo sapien
ctccgctcggctcggggccccgatg

SEQ ID NO: 3546372 - DNA, 25 bp, Homo sapien
tcggggccccgatgccagtccccgc

SEQ ID NO: 3546373 - DNA, 25 bp, Homo sapien
ctcggctcggggccccgatgccagt

SEQ ID NO: 3546374 - DNA, 25 bp, Homo sapien
taactccgtactttgttgcaccacc

SEQ ID NO: 3546375 - DNA, 25 bp, Homo sapien
caaaagcttcacatataactccgta

SEQ ID NO: 3546376 - DNA, 25 bp, Homo sapien
accaccactctacgcacacgctcat

SEQ ID NO: 3546377 - DNA, 25 bp, Homo sapien
gcacacgctcatcctccccgactct

SEQ ID NO: 3546378 - DNA, 25 bp, Homo sapien
caggagagcatgttcagatggcaca

SEQ ID NO: 3546379 - DNA, 25 bp, Homo sapien
tgaaagtagaaataggccccaggta

SEQ ID NO: 3546380 - DNA, 25 bp, Homo sapien
gcagcagctacatccttaaggtcgg

SEQ ID NO: 3546381 - DNA, 25 bp, Homo sapien
gatggcacagaatccagggactgca

SEQ ID NO: 3546382 - DNA, 25 bp, Homo sapien
atcggatcctgacgctgagtcctct

SEQ ID NO: 3546383 - DNA, 25 bp, Homo sapien
tactcatcggatcctgacgctgagt

SEQ ID NO: 3546384 - DNA, 25 bp, Homo sapien
tcatcggatcctgacgctgagtcct

SEQ ID NO: 3546385 - DNA, 25 bp, Homo sapien
gggagtactggctagttcttcttct

SEQ ID NO: 3546386 - DNA, 25 bp, Homo sapien
cacaggccccacattcctgccgcac

SEQ ID NO: 3546387 - DNA, 25 bp, Homo sapien
ccagcccacaggccccacattcctg

SEQ ID NO: 3546388 - DNA, 25 bp, Homo sapien
ccacaggccccacattcctgccgca

SEQ ID NO: 3546389 - DNA, 25 bp, Homo sapien
gcccacaggccccacattcctgccg

SEQ ID NO: 3546390 - DNA, 25 bp, Homo sapien
tgaggacgacttggatgatgagccc

SEQ ID NO: 3546391 - DNA, 25 bp, Homo sapien
ctagagggcgtggatttcttttcca

SEQ ID NO: 3546392 - DNA, 25 bp, Homo sapien
tctcgcttagctgccttgaggacga

SEQ ID NO: 3546393 - DNA, 25 bp, Homo sapien
gagctctcatcactagacacaaact

SEQ ID NO: 3546394 - DNA, 25 bp, Homo sapien
caagggagagtatcatgagtacacc

SEQ ID NO: 3546395 - DNA, 25 bp, Homo sapien
gcagcccaatgtgcaaaacctactt

SEQ ID NO: 3546396 - DNA, 25 bp, Homo sapien
ttcactctgaacgtaaatagctgcg

SEQ ID NO: 3546397 - DNA, 25 bp, Homo sapien
gagtacaccagaagaatcagagggc

SEQ ID NO: 3546398 - DNA, 25 bp, Homo sapien
gccctattgtgtcacccatacttgg

SEQ ID NO: 3546399 - DNA, 25 bp, Homo sapien
aatgccctattgtgtcacccatact

SEQ ID NO: 3546400 - DNA, 25 bp, Homo sapien
tgtcacccatacttgggcaatggcc

SEQ ID NO: 3546401 - DNA, 25 bp, Homo sapien
tattgtgtcacccatacttgggcaa

SEQ ID NO: 3546402 - DNA, 25 bp, Homo sapien
taccctactgcagtcagaagcatct

SEQ ID NO: 3546403 - DNA, 25 bp, Homo sapien
taactttccaatgctcaacttcggc

SEQ ID NO: 3546404 - DNA, 25 bp, Homo sapien
agcactaccctactgcagtcagaag

SEQ ID NO: 3546405 - DNA, 25 bp, Homo sapien
agaagcactaccctactgcagtcag

SEQ ID NO: 3546406 - DNA, 25 bp, Homo sapien
aaaaaagtctgccacaaaaatcagt

SEQ ID NO: 3546407 - DNA, 25 bp, Homo sapien
aaaagtctgccacaaaaatcagtga

SEQ ID NO: 3546408 - DNA, 25 bp, Homo sapien
aaaatcagtgactgggccatgttct

SEQ ID NO: 3546409 - DNA, 25 bp, Homo sapien
agtctgccacaaaaatcagtgactg

SEQ ID NO: 3546410 - DNA, 25 bp, Homo sapien
atggctttttcatagtccctcctgg

SEQ ID NO: 3546411 - DNA, 25 bp, Homo sapien
gcatcctcagccttgcgatcccact

SEQ ID NO: 3546412 - DNA, 25 bp, Homo sapien
ttttcatagtccctcctggcatcct

SEQ ID NO: 3546413 - DNA, 25 bp, Homo sapien
ctcttagaagactcgcctcggcccc

SEQ ID NO: 3546414 - DNA, 25 bp, Homo sapien
ctctcgccagcccatgagaggcatc

SEQ ID NO: 3546415 - DNA, 25 bp, Homo sapien
gcccatgagaggcatcacccctcct

SEQ ID NO: 3546416 - DNA, 25 bp, Homo sapien
tctcgccagcccatgagaggcatca

SEQ ID NO: 3546417 - DNA, 25 bp, Homo sapien
catgagaggcatcacccctcctctg

SEQ ID NO: 3546418 - DNA, 25 bp, Homo sapien
tggtctgacttgatcttctctcggc

SEQ ID NO: 3546419 - DNA, 25 bp, Homo sapien
tctcggctggcattgagccacagca

SEQ ID NO: 3546420 - DNA, 25 bp, Homo sapien
cacagcatgtatgcagacatgggcc

SEQ ID NO: 3546421 - DNA, 25 bp, Homo sapien
ggaaagatccgtgatgctgatgcca

SEQ ID NO: 3546422 - DNA, 25 bp, Homo sapien
cctttttgagctgtttccgcttctt

SEQ ID NO: 3546423 - DNA, 25 bp, Homo sapien
tcttgcggctcttgcggtccttggc

SEQ ID NO: 3546424 - DNA, 25 bp, Homo sapien
gcttcttgcggctcttgcggtcctt

SEQ ID NO: 3546425 - DNA, 25 bp, Homo sapien
ctttttgagctgtttccgcttcttc

SEQ ID NO: 3546426 - DNA, 25 bp, Homo sapien
ccagccacagcaattggttacttga

SEQ ID NO: 3546427 - DNA, 25 bp, Homo sapien
gacaaatccaaagatacccacccaa

SEQ ID NO: 3546428 - DNA, 25 bp, Homo sapien
aaaacaaatcaatgagcttcagcgg

SEQ ID NO: 3546429 - DNA, 25 bp, Homo sapien
ggaagaccagaggacagtatccacc

SEQ ID NO: 3546430 - DNA, 25 bp, Homo sapien
ggcacatttcacacacgcacgtaac

SEQ ID NO: 3546431 - DNA, 25 bp, Homo sapien
tgtcaacatcgtaacaaggctggag

SEQ ID NO: 3546432 - DNA, 25 bp, Homo sapien
ccaaccattatgtttatgaactaca

SEQ ID NO: 3546433 - DNA, 25 bp, Homo sapien
taatgtgtcaacatcgtaacaaggc

SEQ ID NO: 3546434 - DNA, 25 bp, Homo sapien
cctgtatgctgctggacagtcttca

SEQ ID NO: 3546435 - DNA, 25 bp, Homo sapien
cagtgcctacccctgtaattgacag

SEQ ID NO: 3546436 - DNA, 25 bp, Homo sapien
tcttgtctgatatatgtgaaactcc

SEQ ID NO: 3546437 - DNA, 25 bp, Homo sapien
ggcccctacagtcttctgatgaaaa

SEQ ID NO: 3546438 - DNA, 25 bp, Homo sapien
gattcaatgacttactcgacaaccc

SEQ ID NO: 3546439 - DNA, 25 bp, Homo sapien
tgaatccagtagtgtctgaagccaa

SEQ ID NO: 3546440 - DNA, 25 bp, Homo sapien
cccagactccgcagtaatatgaact

SEQ ID NO: 3546441 - DNA, 25 bp, Homo sapien
ccaactggcacattcagggcggtat

SEQ ID NO: 3546442 - DNA, 25 bp, Homo sapien
tcctcctcttcacctgggttgaatg

SEQ ID NO: 3546443 - DNA, 25 bp, Homo sapien
cttcctcctcttcacctgggttgaa

SEQ ID NO: 3546444 - DNA, 25 bp, Homo sapien
tcttcacctgggttgaatgactcat

SEQ ID NO: 3546445 - DNA, 25 bp, Homo sapien
cctcttcacctgggttgaatgactc

SEQ ID NO: 3546446 - DNA, 25 bp, Homo sapien
tattcatcgtagcttgggttcatgc

SEQ ID NO: 3546447 - DNA, 25 bp, Homo sapien
tcatcctctccaagtaggcatcatg

SEQ ID NO: 3546448 - DNA, 25 bp, Homo sapien
gctgtcattggcattctcctcccgg

SEQ ID NO: 3546449 - DNA, 25 bp, Homo sapien
tcttctcctgagtcatcgctgctgt

SEQ ID NO: 3546450 - DNA, 25 bp, Homo sapien
tagactggtctaaggtcatgcagag

SEQ ID NO: 3546451 - DNA, 25 bp, Homo sapien
acacagccaacgtgcagggcctatg

SEQ ID NO: 3546452 - DNA, 25 bp, Homo sapien
ttcctgccaactgggttagtccaag

SEQ ID NO: 3546453 - DNA, 25 bp, Homo sapien
cccatgcctgtcaagtcagagcagc

SEQ ID NO: 3546454 - DNA, 25 bp, Homo sapien
aggagagggtctcatcctccccaca

SEQ ID NO: 3546455 - DNA, 25 bp, Homo sapien
agaaagaccaggagagggtctcatc

SEQ ID NO: 3546456 - DNA, 25 bp, Homo sapien
cctttctcccctatagaaagaccag

SEQ ID NO: 3546457 - DNA, 25 bp, Homo sapien
ttctcccctatagaaagaccaggag

SEQ ID NO: 3546458 - DNA, 25 bp, Homo sapien
ctctttcaatcctcggtttttgatg

SEQ ID NO: 3546459 - DNA, 25 bp, Homo sapien
ttcaatcctcggtttttgatgttga

SEQ ID NO: 3546460 - DNA, 25 bp, Homo sapien
tcgcgttgacaaaatcaaacagttt

SEQ ID NO: 3546461 - DNA, 25 bp, Homo sapien
atgttgagctttttcgcgttgacaa

SEQ ID NO: 3546462 - DNA, 25 bp, Homo sapien
tgctctagggttggagagtgcccca

SEQ ID NO: 3546463 - DNA, 25 bp, Homo sapien
agacaaagctggctcgggaccagga

SEQ ID NO: 3546464 - DNA, 25 bp, Homo sapien
gaaaaggaccaaatcctgatgtagc

SEQ ID NO: 3546465 - DNA, 25 bp, Homo sapien
gtttctaaagtctgagcactccagg

SEQ ID NO: 3546466 - DNA, 25 bp, Homo sapien
ttgtggacgtagatgaagccccgct

SEQ ID NO: 3546467 - DNA, 25 bp, Homo sapien
taggaacaggtaatgcactgggccc

SEQ ID NO: 3546468 - DNA, 25 bp, Homo sapien
gctgctgaaggtatactgagtgccc

SEQ ID NO: 3546469 - DNA, 25 bp, Homo sapien
caaaggagatctcatcgaagcggat

SEQ ID NO: 3546470 - DNA, 25 bp, Homo sapien
tgacagagggtgcagggagcctggt

SEQ ID NO: 3546471 - DNA, 25 bp, Homo sapien
cagagggtgcagggagcctggttag

SEQ ID NO: 3546472 - DNA, 25 bp, Homo sapien
acagagggtgcagggagcctggtta

SEQ ID NO: 3546473 - DNA, 25 bp, Homo sapien
ctgacagagggtgcagggagcctgg

SEQ ID NO: 3546474 - DNA, 25 bp, Homo sapien
gcatttcccatacccaggcagggca

SEQ ID NO: 3546475 - DNA, 25 bp, Homo sapien
acacggcatttcccatacccaggca

SEQ ID NO: 3546476 - DNA, 25 bp, Homo sapien
cggcatttcccatacccaggcaggg

SEQ ID NO: 3546477 - DNA, 25 bp, Homo sapien
catttcccatacccaggcagggcag

SEQ ID NO: 3546478 - DNA, 25 bp, Homo sapien
ggcactgtgatcttgcggtttacca

SEQ ID NO: 3546479 - DNA, 25 bp, Homo sapien
taccagtgctttcatgacccggctg

SEQ ID NO: 3546480 - DNA, 25 bp, Homo sapien
ctgaccatctcatagagggatcctg

SEQ ID NO: 3546481 - DNA, 25 bp, Homo sapien
ttggtgagccgaccctcaaagcgct

SEQ ID NO: 3546482 - DNA, 25 bp, Homo sapien
ttctaatggcacacctgtctcctgc

SEQ ID NO: 3546483 - DNA, 25 bp, Homo sapien
aagaaagcaaggtgaggtcacaaca

SEQ ID NO: 3546484 - DNA, 25 bp, Homo sapien
caacactactgccttctaatggcac

SEQ ID NO: 3546485 - DNA, 25 bp, Homo sapien
gtgaggtcacaacactactgccttc

SEQ ID NO: 3546486 - DNA, 25 bp, Homo sapien
tcatgttcagagtcaacgaaatgtc

SEQ ID NO: 3546487 - DNA, 25 bp, Homo sapien
agcgagtttggccttgcttgattgg

SEQ ID NO: 3546488 - DNA, 25 bp, Homo sapien
tggtagcgagtttggccttgcttga

SEQ ID NO: 3546489 - DNA, 25 bp, Homo sapien
agtcaacgaaatgtcctcgtccttg

SEQ ID NO: 3546490 - DNA, 25 bp, Homo sapien
caaaggtcttgccatgcaggtgcag

SEQ ID NO: 3546491 - DNA, 25 bp, Homo sapien
ggtagatccgaatgtcataacgacc

SEQ ID NO: 3546492 - DNA, 25 bp, Homo sapien
taacgaccacgaggagtcagacact

SEQ ID NO: 3546493 - DNA, 25 bp, Homo sapien
gaacatctggcgctggtccttgtgg

SEQ ID NO: 3546494 - DNA, 25 bp, Homo sapien
gctcccaggccagccaatgcctgct

SEQ ID NO: 3546495 - DNA, 25 bp, Homo sapien
aaagcacatattggtagccaagcag

SEQ ID NO: 3546496 - DNA, 25 bp, Homo sapien
ccaggccagccaatgcctgctcagc

SEQ ID NO: 3546497 - DNA, 25 bp, Homo sapien
cacatattggtagccaagcagcagg

SEQ ID NO: 3546498 - DNA, 25 bp, Homo sapien
ggtgggacgtagaagcgcacctcca

SEQ ID NO: 3546499 - DNA, 25 bp, Homo sapien
cgtcatcgttttggtggaattccag

SEQ ID NO: 3546500 - DNA, 25 bp, Homo sapien
catgagagacacctctgcgtcatcg

SEQ ID NO: 3546501 - DNA, 25 bp, Homo sapien
tagaagcgcacctccatgagagaca

SEQ ID NO: 3546502 - DNA, 25 bp, Homo sapien
tgctgaggggtatctcaaagactgg

SEQ ID NO: 3546503 - DNA, 25 bp, Homo sapien
gctgaggggtatctcaaagactggc

SEQ ID NO: 3546504 - DNA, 25 bp, Homo sapien
ccaaccccaggcagtatactgtagg

SEQ ID NO: 3546505 - DNA, 25 bp, Homo sapien
tgaggaaagggcttatccagccaca

SEQ ID NO: 3546506 - DNA, 25 bp, Homo sapien
gctcctccccttaagtctgcataag

SEQ ID NO: 3546507 - DNA, 25 bp, Homo sapien
gatactgcggttagtctgtttagac

SEQ ID NO: 3546508 - DNA, 25 bp, Homo sapien
tctccattagctcaaggcgatagtg

SEQ ID NO: 3546509 - DNA, 25 bp, Homo sapien
caaggcgatagtgagttttgaagaa

SEQ ID NO: 3546510 - DNA, 25 bp, Homo sapien
tagctcaaggcgatagtgagttttg

SEQ ID NO: 3546511 - DNA, 25 bp, Homo sapien
ttcacacaaaggtccttctccatta

SEQ ID NO: 3546512 - DNA, 25 bp, Homo sapien
cgattctcggaagccatcatacttg

SEQ ID NO: 3546513 - DNA, 25 bp, Homo sapien
aagcagtttaagtccatggcccaga

SEQ ID NO: 3546514 - DNA, 25 bp, Homo sapien
cacggcgccagataccttctgttaa

SEQ ID NO: 3546515 - DNA, 25 bp, Homo sapien
tagacatggccattctttgtaagca

SEQ ID NO: 3546516 - DNA, 25 bp, Homo sapien
tcctgatagacgtcgttgaactcca

SEQ ID NO: 3546517 - DNA, 25 bp, Homo sapien
tttcacctcctgatagacgtcgttg

SEQ ID NO: 3546518 - DNA, 25 bp, Homo sapien
gatagacgtcgttgaactccagtgt

SEQ ID NO: 3546519 - DNA, 25 bp, Homo sapien
cacctcctgatagacgtcgttgaac

SEQ ID NO: 3546520 - DNA, 25 bp, Homo sapien
gtcgacccctgcctgtggtggcctg

SEQ ID NO: 3546521 - DNA, 25 bp, Homo sapien
gcctgtggtggcctgggcagagccc

SEQ ID NO: 3546522 - DNA, 25 bp, Homo sapien
ctgtggtggcctgggcagagcccca

SEQ ID NO: 3546523 - DNA, 25 bp, Homo sapien
gtggtggcctgggcagagccccagg

SEQ ID NO: 3546524 - DNA, 25 bp, Homo sapien
agtgggtgtgcggatgctcagcagg

SEQ ID NO: 3546525 - DNA, 25 bp, Homo sapien
ctgagtgggtgtgcggatgctcagc

SEQ ID NO: 3546526 - DNA, 25 bp, Homo sapien
tgggtgtgcggatgctcagcaggtt

SEQ ID NO: 3546527 - DNA, 25 bp, Homo sapien
tcctgagtgggtgtgcggatgctca

SEQ ID NO: 3546528 - DNA, 25 bp, Homo sapien
gagtgcagggtttccctcgcaccgc

SEQ ID NO: 3546529 - DNA, 25 bp, Homo sapien
tcagagtgcagggtttccctcgcac

SEQ ID NO: 3546530 - DNA, 25 bp, Homo sapien
cagctcagagtgcagggtttccctc

SEQ ID NO: 3546531 - DNA, 25 bp, Homo sapien
caatccagctcagagtgcagggttt

SEQ ID NO: 3546532 - DNA, 25 bp, Homo sapien
gccccacataatggattcgcccgct

SEQ ID NO: 3546533 - DNA, 25 bp, Homo sapien
aatggtccatgtcgagggtcccgtg

SEQ ID NO: 3546534 - DNA, 25 bp, Homo sapien
gttgcgaacgcggaatggtccatgt

SEQ ID NO: 3546535 - DNA, 25 bp, Homo sapien
gctccccgcggttgcgaacgcggaa

SEQ ID NO: 3546536 - DNA, 25 bp, Homo sapien
tcctcaggctgcggcctcgcgaggg

SEQ ID NO: 3546537 - DNA, 25 bp, Homo sapien
cccggcgcgagaggtgggcgcgctg

SEQ ID NO: 3546538 - DNA, 25 bp, Homo sapien
gccccggcgcgagaggtgggcgcgc

SEQ ID NO: 3546539 - DNA, 25 bp, Homo sapien
gggccccggcgcgagaggtgggcgc

SEQ ID NO: 3546540 - DNA, 25 bp, Homo sapien
tagagcgtcagcgactctggaggac

SEQ ID NO: 3546541 - DNA, 25 bp, Homo sapien
tgagctggctagagagacgcgagtc

SEQ ID NO: 3546542 - DNA, 25 bp, Homo sapien
agtcgggcccgcctgcgagacagtc

SEQ ID NO: 3546543 - DNA, 25 bp, Homo sapien
cggaagccgtacacaggccacagag

SEQ ID NO: 3546544 - DNA, 25 bp, Homo sapien
cctggtgtcagattcaccttggagc

SEQ ID NO: 3546545 - DNA, 25 bp, Homo sapien
caagaggctggcaaacggccttatc

SEQ ID NO: 3546546 - DNA, 25 bp, Homo sapien
gccttatccagttcaagtcctggtg

SEQ ID NO: 3546547 - DNA, 25 bp, Homo sapien
accttggagccagaactgatttgaa

SEQ ID NO: 3546548 - DNA, 25 bp, Homo sapien
gccaggtctcccccgtataatccca

SEQ ID NO: 3546549 - DNA, 25 bp, Homo sapien
aggtctcccccgtataatcccagag

SEQ ID NO: 3546550 - DNA, 25 bp, Homo sapien
tcccccgtataatcccagagtgcat

SEQ ID NO: 3546551 - DNA, 25 bp, Homo sapien
gtctcccccgtataatcccagagtg

SEQ ID NO: 3546552 - DNA, 25 bp, Homo sapien
ctcatcacaccccagaagacccaga

SEQ ID NO: 3546553 - DNA, 25 bp, Homo sapien
ctcaggaatgaagagggtccttagc

SEQ ID NO: 3546554 - DNA, 25 bp, Homo sapien
gacccatgccactgggggcaactca

SEQ ID NO: 3546555 - DNA, 25 bp, Homo sapien
gctcaggcaggctattaggtgactg

SEQ ID NO: 3546556 - DNA, 25 bp, Homo sapien
ctacttcatcaactctacatccttc

SEQ ID NO: 3546557 - DNA, 25 bp, Homo sapien
ttcctggagcccagtacctcatctg

SEQ ID NO: 3546558 - DNA, 25 bp, Homo sapien
catctgtgacaaagttaatagcaac

SEQ ID NO: 3546559 - DNA, 25 bp, Homo sapien
acaataatgtctctcaatgtcccca

SEQ ID NO: 3546560 - DNA, 25 bp, Homo sapien
aagtgggggacggagagacacagag

SEQ ID NO: 3546561 - DNA, 25 bp, Homo sapien
ctgagaaagtgggggacggagagac

SEQ ID NO: 3546562 - DNA, 25 bp, Homo sapien
agtgggggacggagagacacagagg

SEQ ID NO: 3546563 - DNA, 25 bp, Homo sapien
agaaagtgggggacggagagacaca

SEQ ID NO: 3546564 - DNA, 25 bp, Homo sapien
tttcccgagagtgaatgcttccagg

SEQ ID NO: 3546565 - DNA, 25 bp, Homo sapien
gaactggagtaatccccaaagtgag

SEQ ID NO: 3546566 - DNA, 25 bp, Homo sapien
ctgctggcagggtctccgtgccgct

SEQ ID NO: 3546567 - DNA, 25 bp, Homo sapien
gaatgcttccaggatttttccgaac

SEQ ID NO: 3546568 - DNA, 25 bp, Homo sapien
cattgagctcgtcgccaataacctc

SEQ ID NO: 3546569 - DNA, 25 bp, Homo sapien
gaagggcagttgcttgtcgcattga

SEQ ID NO: 3546570 - DNA, 25 bp, Homo sapien
gaaggagcagacgaagggcagttgc

SEQ ID NO: 3546571 - DNA, 25 bp, Homo sapien
gcttgtcgcattgagctcgtcgcca

SEQ ID NO: 3546572 - DNA, 25 bp, Homo sapien
tctccctgccctggtgcccttcccc

SEQ ID NO: 3546573 - DNA, 25 bp, Homo sapien
ctatcccttctccctgccctggtgc

SEQ ID NO: 3546574 - DNA, 25 bp, Homo sapien
cttctccctgccctggtgcccttcc

SEQ ID NO: 3546575 - DNA, 25 bp, Homo sapien
ctgccctggtgcccttccccctcac

SEQ ID NO: 3546576 - DNA, 25 bp, Homo sapien
ctggggaccagtaagcaaaattcca

SEQ ID NO: 3546577 - DNA, 25 bp, Homo sapien
tggggaccagtaagcaaaattccag

SEQ ID NO: 3546578 - DNA, 25 bp, Homo sapien
agtccagcaaaaccgcttccacagg

SEQ ID NO: 3546579 - DNA, 25 bp, Homo sapien
atcagtccagcaaaaccgcttccac

SEQ ID NO: 3546580 - DNA, 25 bp, Homo sapien
gcacccaagatttggcccctgactt

SEQ ID NO: 3546581 - DNA, 25 bp, Homo sapien
tgcacccaagatttggcccctgact

SEQ ID NO: 3546582 - DNA, 25 bp, Homo sapien
gttgactgtgctagtgcagcactga

SEQ ID NO: 3546583 - DNA, 25 bp, Homo sapien
ggttgcctccgtagcatctgctgca

SEQ ID NO: 3546584 - DNA, 25 bp, Homo sapien
gcagcactgaatgcgatagttgaag

SEQ ID NO: 3546585 - DNA, 25 bp, Homo sapien
gaggttgcctccaatccagacctgg

SEQ ID NO: 3546586 - DNA, 25 bp, Homo sapien
taggagtccgcaccaataggtagcg

SEQ ID NO: 3546587 - DNA, 25 bp, Homo sapien
tggacttccctgcacttcaacaatg

SEQ ID NO: 3546588 - DNA, 25 bp, Homo sapien
caaagttgtcttgacaggcagaagc

SEQ ID NO: 3546589 - DNA, 25 bp, Homo sapien
tagcggcagatcttgcaccttggac

SEQ ID NO: 3546590 - DNA, 25 bp, Homo sapien
cagatcctggcctaggtctgcctgt

SEQ ID NO: 3546591 - DNA, 25 bp, Homo sapien
ggctctccagatggggggcatcatt

SEQ ID NO: 3546592 - DNA, 25 bp, Homo sapien
atcctggcctaggtctgcctgtgtc

SEQ ID NO: 3546593 - DNA, 25 bp, Homo sapien
tctaggctctccagatggggggcat

SEQ ID NO: 3546594 - DNA, 25 bp, Homo sapien
taacctgccatcaggtcaagagctt

SEQ ID NO: 3546595 - DNA, 25 bp, Homo sapien
gggaagaagaggtaacctgccatca

SEQ ID NO: 3546596 - DNA, 25 bp, Homo sapien
gaggtaacctgccatcaggtcaaga

SEQ ID NO: 3546597 - DNA, 25 bp, Homo sapien
gaagaggtaacctgccatcaggtca

SEQ ID NO: 3546598 - DNA, 25 bp, Homo sapien
agggcaggagcaagaggcattgcat

SEQ ID NO: 3546599 - DNA, 25 bp, Homo sapien
gatgaagagcagaaactgttcccag

SEQ ID NO: 3546600 - DNA, 25 bp, Homo sapien
gagaaagggcaggagcaagaggcat

SEQ ID NO: 3546601 - DNA, 25 bp, Homo sapien
aagagcagaaactgttcccagcagg

SEQ ID NO: 3546602 - DNA, 25 bp, Homo sapien
gacactactccaccgtccttcttgg

SEQ ID NO: 3546603 - DNA, 25 bp, Homo sapien
tagcgaggacactactccaccgtcc

SEQ ID NO: 3546604 - DNA, 25 bp, Homo sapien
tctactgtcttttagcgaggacact

SEQ ID NO: 3546605 - DNA, 25 bp, Homo sapien
atctactgtcttttagcgaggacac

SEQ ID NO: 3546606 - DNA, 25 bp, Homo sapien
taaggacaggcctcctacgtgtttg

SEQ ID NO: 3546607 - DNA, 25 bp, Homo sapien
gccctatgaggtgctgcttcttccc

SEQ ID NO: 3546608 - DNA, 25 bp, Homo sapien
tcctacgtgtttgccctatgaggtg

SEQ ID NO: 3546609 - DNA, 25 bp, Homo sapien
gacaggcctcctacgtgtttgccct

SEQ ID NO: 3546610 - DNA, 25 bp, Homo sapien
caagagtctgagacctccactctca

SEQ ID NO: 3546611 - DNA, 25 bp, Homo sapien
gcttcaggggccagaagcagccttt

SEQ ID NO: 3546612 - DNA, 25 bp, Homo sapien
gcctctggcttcaggggccagaagc

SEQ ID NO: 3546613 - DNA, 25 bp, Homo sapien
cactctcagtgcctctggcttcagg

SEQ ID NO: 3546614 - DNA, 25 bp, Homo sapien
cttcatccccgtgtgaccataaggg

SEQ ID NO: 3546615 - DNA, 25 bp, Homo sapien
cccgtgcttcatccccgtgtgacca

SEQ ID NO: 3546616 - DNA, 25 bp, Homo sapien
tcctgtgtcccaagatgaacccaag

SEQ ID NO: 3546617 - DNA, 25 bp, Homo sapien
caagagtgagacagtctggctttcc

SEQ ID NO: 3546618 - DNA, 25 bp, Homo sapien
tctatgaagagaactagctgagccc

SEQ ID NO: 3546619 - DNA, 25 bp, Homo sapien
caaactgggccattgggagtctacc

SEQ ID NO: 3546620 - DNA, 25 bp, Homo sapien
tgaatgttgtggactgttcccaggg

SEQ ID NO: 3546621 - DNA, 25 bp, Homo sapien
gcagcactatgcaggtgcccagtaa

SEQ ID NO: 3546622 - DNA, 25 bp, Homo sapien
atgataaggaagaagtttcaatgag

SEQ ID NO: 3546623 - DNA, 25 bp, Homo sapien
tggatccgcgatcagaggagaaaat

SEQ ID NO: 3546624 - DNA, 25 bp, Homo sapien
taagcagagtggatccgcgatcaga

SEQ ID NO: 3546625 - DNA, 25 bp, Homo sapien
aatgagggctaagcagagtggatcc

SEQ ID NO: 3546626 - DNA, 25 bp, Homo sapien
acccattttattgcagggaggtgga

SEQ ID NO: 3546627 - DNA, 25 bp, Homo sapien
agggagggatggcaagcagaggagg

SEQ ID NO: 3546628 - DNA, 25 bp, Homo sapien
caggagagggcagctctgaactgct

SEQ ID NO: 3546629 - DNA, 25 bp, Homo sapien
cagtaaaacccattttattgcaggg

SEQ ID NO: 3546630 - DNA, 25 bp, Homo sapien
tcttctgaggcagtgggctcgacgc

SEQ ID NO: 3546631 - DNA, 25 bp, Homo sapien
ttctgaggcagtgggctcgacgcca

SEQ ID NO: 3546632 - DNA, 25 bp, Homo sapien
agtcttctgaggcagtgggctcgac

SEQ ID NO: 3546633 - DNA, 25 bp, Homo sapien
aggaagtcttctgaggcagtgggct

SEQ ID NO: 3546634 - DNA, 25 bp, Homo sapien
tttccatcgttcatccccagcccca

SEQ ID NO: 3546635 - DNA, 25 bp, Homo sapien
ttccatcgttcatccccagccccac

SEQ ID NO: 3546636 - DNA, 25 bp, Homo sapien
ctttccatcgttcatccccagcccc

SEQ ID NO: 3546637 - DNA, 25 bp, Homo sapien
tgccgtcaacccactgaaagcgtct

SEQ ID NO: 3546638 - DNA, 25 bp, Homo sapien
gcggctgccgtcaacccactgaaag

SEQ ID NO: 3546639 - DNA, 25 bp, Homo sapien
agcagcccagtatgcaaagttccag

SEQ ID NO: 3546640 - DNA, 25 bp, Homo sapien
tatgcaaagttccagcggctgccgt

SEQ ID NO: 3546641 - DNA, 25 bp, Homo sapien
ctggccccgtatctgccagctcttt

SEQ ID NO: 3546642 - DNA, 25 bp, Homo sapien
tgctggaccatgatgggaactgtcc

SEQ ID NO: 3546643 - DNA, 25 bp, Homo sapien
tgaaatgctgatccacggcaattat

SEQ ID NO: 3546644 - DNA, 25 bp, Homo sapien
ctggaccatgatgggaactgtccta

SEQ ID NO: 3546645 - DNA, 25 bp, Homo sapien
gcaattatcaccatcagattctatg

SEQ ID NO: 3546646 - DNA, 25 bp, Homo sapien
tcagtgttgtctgtgggtgtccatc

SEQ ID NO: 3546647 - DNA, 25 bp, Homo sapien
aatctgatgcaagctgagtgctggc

SEQ ID NO: 3546648 - DNA, 25 bp, Homo sapien
gcaggtgcaccccatttagtgttca

SEQ ID NO: 3546649 - DNA, 25 bp, Homo sapien
tgctggctgagatcagcaggtgcac

SEQ ID NO: 3546650 - DNA, 25 bp, Homo sapien
tccaatccagacttgaccctggttg

SEQ ID NO: 3546651 - DNA, 25 bp, Homo sapien
gaacactggattcgataattaatat

SEQ ID NO: 3546652 - DNA, 25 bp, Homo sapien
ccctgtagcacctccggcaagtaaa

SEQ ID NO: 3546653 - DNA, 25 bp, Homo sapien
tgagcgcgctgacagaacactggat

SEQ ID NO: 3546654 - DNA, 25 bp, Homo sapien
gacaaagaatggagcatccttccta

SEQ ID NO: 3546655 - DNA, 25 bp, Homo sapien
gccctcaatgggaaaaagagccagt

SEQ ID NO: 3546656 - DNA, 25 bp, Homo sapien
tgaggctcaggttctactgacaccc

SEQ ID NO: 3546657 - DNA, 25 bp, Homo sapien
tgcaacttctgtttgtaggtggccc

SEQ ID NO: 3546658 - DNA, 25 bp, Homo sapien
cttgactaaacgtctgaagacttct

SEQ ID NO: 3546659 - DNA, 25 bp, Homo sapien
ttgactaaacgtctgaagacttctc

SEQ ID NO: 3546660 - DNA, 25 bp, Homo sapien
gggtctcaaaggtggaagtctcaga

SEQ ID NO: 3546661 - DNA, 25 bp, Homo sapien
gatgcccaccacttttactgtgtcc

SEQ ID NO: 3546662 - DNA, 25 bp, Homo sapien
ctcttcctcaggacacgtaaggttt

SEQ ID NO: 3546663 - DNA, 25 bp, Homo sapien
aggcagcgtcttagcacccaaaggg

SEQ ID NO: 3546664 - DNA, 25 bp, Homo sapien
gagccagaagtaaggggagtttcat

SEQ ID NO: 3546665 - DNA, 25 bp, Homo sapien
tgccccaaatagaagagccagaagt

SEQ ID NO: 3546666 - DNA, 25 bp, Homo sapien
cccaaatagaagagccagaagtaag

SEQ ID NO: 3546667 - DNA, 25 bp, Homo sapien
aaactgccccaaatagaagagccag

SEQ ID NO: 3546668 - DNA, 25 bp, Homo sapien
tttcacatcccgcagaaggaatgtg

SEQ ID NO: 3546669 - DNA, 25 bp, Homo sapien
catcccgcagaaggaatgtgcaagg

SEQ ID NO: 3546670 - DNA, 25 bp, Homo sapien
tcacatcccgcagaaggaatgtgca

SEQ ID NO: 3546671 - DNA, 25 bp, Homo sapien
ccgcagaaggaatgtgcaaggcaga

SEQ ID NO: 3546672 - DNA, 25 bp, Homo sapien
tgaaagccacaggtagacgcctgcc

SEQ ID NO: 3546673 - DNA, 25 bp, Homo sapien
aaagccacaggtagacgcctgccag

SEQ ID NO: 3546674 - DNA, 25 bp, Homo sapien
ctgaaagccacaggtagacgcctgc

SEQ ID NO: 3546675 - DNA, 25 bp, Homo sapien
gccacaggtagacgcctgccagccc

SEQ ID NO: 3546676 - DNA, 25 bp, Homo sapien
tgggagaataaactgtcaccagctc

SEQ ID NO: 3546677 - DNA, 25 bp, Homo sapien
gggagaataaactgtcaccagctcc

SEQ ID NO: 3546678 - DNA, 25 bp, Homo sapien
cctgggtctttagatcttcccaaag

SEQ ID NO: 3546679 - DNA, 25 bp, Homo sapien
ctgggtctttagatcttcccaaagc

SEQ ID NO: 3546680 - DNA, 25 bp, Homo sapien
tgatatccatcaatcggacactgag

SEQ ID NO: 3546681 - DNA, 25 bp, Homo sapien
gaccttgttgcctccagaagcaggg

SEQ ID NO: 3546682 - DNA, 25 bp, Homo sapien
gaagatgggtctaggagtcactgtc

SEQ ID NO: 3546683 - DNA, 25 bp, Homo sapien
ctaataggtctagcgtgaaggtcag

SEQ ID NO: 3546684 - DNA, 25 bp, Homo sapien
agagggagcccattcttggaaacca

SEQ ID NO: 3546685 - DNA, 25 bp, Homo sapien
gaaaccagttgactgttcagggacc

SEQ ID NO: 3546686 - DNA, 25 bp, Homo sapien
tcagggaccctcactcctagggaag

SEQ ID NO: 3546687 - DNA, 25 bp, Homo sapien
tgaaatccacagcttagcaaccctg

SEQ ID NO: 3546688 - DNA, 25 bp, Homo sapien
aataggcttcaagggaccatgaacc

SEQ ID NO: 3546689 - DNA, 25 bp, Homo sapien
tcaacctggaaactatgaataggct

SEQ ID NO: 3546690 - DNA, 25 bp, Homo sapien
gagcttttcaacctggaaactatga

SEQ ID NO: 3546691 - DNA, 25 bp, Homo sapien
cctgcagcagagcttttcaacctgg

SEQ ID NO: 3546692 - DNA, 25 bp, Homo sapien
tatcacaggccattgtccccatgct

SEQ ID NO: 3546693 - DNA, 25 bp, Homo sapien
catagtagcaattaacccaaaccca

SEQ ID NO: 3546694 - DNA, 25 bp, Homo sapien
aagtcttcccacatagtagcaatta

SEQ ID NO: 3546695 - DNA, 25 bp, Homo sapien
ccctgcgaccatatttgataacatg

SEQ ID NO: 3546696 - DNA, 25 bp, Homo sapien
caggctcttgtctacaagctcaaac

SEQ ID NO: 3546697 - DNA, 25 bp, Homo sapien
ttcatgatcaggctcttgtctacaa

SEQ ID NO: 3546698 - DNA, 25 bp, Homo sapien
cactggcatgacaagtgacccttgt

SEQ ID NO: 3546699 - DNA, 25 bp, Homo sapien
ctacaagctcaaactcactggcatg

SEQ ID NO: 3546700 - DNA, 25 bp, Homo sapien
aagcacaaagaatgtggtcctcgga

SEQ ID NO: 3546701 - DNA, 25 bp, Homo sapien
caaagaatgtggtcctcggatgtta

SEQ ID NO: 3546702 - DNA, 25 bp, Homo sapien
gaatgtggtcctcggatgttaaaag

SEQ ID NO: 3546703 - DNA, 25 bp, Homo sapien
tgtggtcctcggatgttaaaagacc

SEQ ID NO: 3546704 - DNA, 25 bp, Homo sapien
tgtggtgcacgctctgaagggcaca

SEQ ID NO: 3546705 - DNA, 25 bp, Homo sapien
gcattccagactccacaaggtgtga

SEQ ID NO: 3546706 - DNA, 25 bp, Homo sapien
tgttcggtggagacaagctaaagcg

SEQ ID NO: 3546707 - DNA, 25 bp, Homo sapien
cgagtgcttgcagggaggttttcta

SEQ ID NO: 3546708 - DNA, 25 bp, Homo sapien
cacatgccaagcactcgacctaatt

SEQ ID NO: 3546709 - DNA, 25 bp, Homo sapien
tttgattgccaaataatatcccaaa

SEQ ID NO: 3546710 - DNA, 25 bp, Homo sapien
tgtgatctgttcaacccaccacatg

SEQ ID NO: 3546711 - DNA, 25 bp, Homo sapien
ccaactggtggacattaggcatctt

SEQ ID NO: 3546712 - DNA, 25 bp, Homo sapien
aatttaacccgtggcagaggatcca

SEQ ID NO: 3546713 - DNA, 25 bp, Homo sapien
tataggcttcggagccaaacaggcc

SEQ ID NO: 3546714 - DNA, 25 bp, Homo sapien
gaaatccttcggtcaagcaggtcag

SEQ ID NO: 3546715 - DNA, 25 bp, Homo sapien
ctgtgagttctctagccaaggctgc

SEQ ID NO: 3546716 - DNA, 25 bp, Homo sapien
gcaaagtcttttgggacacgaggtc

SEQ ID NO: 3546717 - DNA, 25 bp, Homo sapien
tgttttgctgggataggcaaagtct

SEQ ID NO: 3546718 - DNA, 25 bp, Homo sapien
tggtggaagatgaacaaaaccatcc

SEQ ID NO: 3546719 - DNA, 25 bp, Homo sapien
caaaaccatcctcggggctgaaaag

SEQ ID NO: 3546720 - DNA, 25 bp, Homo sapien
cagagggactttctttccaagtacg

SEQ ID NO: 3546721 - DNA, 25 bp, Homo sapien
tccaagtacggcattcccgatatac

SEQ ID NO: 3546722 - DNA, 25 bp, Homo sapien
ttctttccaagtacggcattcccga

SEQ ID NO: 3546723 - DNA, 25 bp, Homo sapien
gactttctttccaagtacggcattc

SEQ ID NO: 3546724 - DNA, 25 bp, Homo sapien
gaatgtcagaagaatggcaagcatg

SEQ ID NO: 3546725 - DNA, 25 bp, Homo sapien
aaaggggtggaagaatgtcagaaga

SEQ ID NO: 3546726 - DNA, 25 bp, Homo sapien
gtggaagaatgtcagaagaatggca

SEQ ID NO: 3546727 - DNA, 25 bp, Homo sapien
gaatggcaagcatgaacatcacatt

SEQ ID NO: 3546728 - DNA, 25 bp, Homo sapien
tagaggcaccagctagaatacacag

SEQ ID NO: 3546729 - DNA, 25 bp, Homo sapien
taaagaaacagaggcctagcgagca

SEQ ID NO: 3546730 - DNA, 25 bp, Homo sapien
tcacatgggaagctggtagaggcac

SEQ ID NO: 3546731 - DNA, 25 bp, Homo sapien
ttccatgaccaatgaagggaccaga

SEQ ID NO: 3546732 - DNA, 25 bp, Homo sapien
acaaggccatcaccagcccaaagag

SEQ ID NO: 3546733 - DNA, 25 bp, Homo sapien
aggccatcaccagcccaaagagctt

SEQ ID NO: 3546734 - DNA, 25 bp, Homo sapien
gagggtgaagatggggaactggagc

SEQ ID NO: 3546735 - DNA, 25 bp, Homo sapien
agagacaccacagccgacaaggcca

SEQ ID NO: 3546736 - DNA, 25 bp, Homo sapien
atgtcagggccagcgaaggcaccgt

SEQ ID NO: 3546737 - DNA, 25 bp, Homo sapien
ggccgcgttgctcccatagaggaag

SEQ ID NO: 3546738 - DNA, 25 bp, Homo sapien
aaggcaccgtcgagcagagggccac

SEQ ID NO: 3546739 - DNA, 25 bp, Homo sapien
aggaaggagcggctgatcacttgca

SEQ ID NO: 3546740 - DNA, 25 bp, Homo sapien
tctggtacttctgtttaagccggtc

SEQ ID NO: 3546741 - DNA, 25 bp, Homo sapien
tgtttaagccggtccatgagcaggc

SEQ ID NO: 3546742 - DNA, 25 bp, Homo sapien
cagcactccgaactgagtgaaggca

SEQ ID NO: 3546743 - DNA, 25 bp, Homo sapien
ggcacacagcactccgaactgagtg

SEQ ID NO: 3546744 - DNA, 25 bp, Homo sapien
aaggagttgagagtgccaatgaaga

SEQ ID NO: 3546745 - DNA, 25 bp, Homo sapien
ccatgttggtcagcaaggagttgag

SEQ ID NO: 3546746 - DNA, 25 bp, Homo sapien
tgccaatgaagaggtagtgccacaa

SEQ ID NO: 3546747 - DNA, 25 bp, Homo sapien
cggccatgttggtcagcaaggagtt

SEQ ID NO: 3546748 - DNA, 25 bp, Homo sapien
gcaaagcgccgagagaaagcgtagc

SEQ ID NO: 3546749 - DNA, 25 bp, Homo sapien
aggcaaagcgccgagagaaagcgta

SEQ ID NO: 3546750 - DNA, 25 bp, Homo sapien
gctccagaaggagcggagttcctgc

SEQ ID NO: 3546751 - DNA, 25 bp, Homo sapien
agagaaagcgtagctccagaaggag

SEQ ID NO: 3546752 - DNA, 25 bp, Homo sapien
tccttcgctgaaaggaactcctttg

SEQ ID NO: 3546753 - DNA, 25 bp, Homo sapien
ccttcgctgaaaggaactcctttga

SEQ ID NO: 3546754 - DNA, 25 bp, Homo sapien
agctccctgttttcatgctcagctg

SEQ ID NO: 3546755 - DNA, 25 bp, Homo sapien
gaaacaaaagccccaccagcaaggc

SEQ ID NO: 3546756 - DNA, 25 bp, Homo sapien
aaagccccaccagcaaggccaagga

SEQ ID NO: 3546757 - DNA, 25 bp, Homo sapien
aacaaaagccccaccagcaaggcca

SEQ ID NO: 3546758 - DNA, 25 bp, Homo sapien
aaaagccccaccagcaaggccaagg

SEQ ID NO: 3546759 - DNA, 25 bp, Homo sapien
gaggccctgaggctgatgccttttt

SEQ ID NO: 3546760 - DNA, 25 bp, Homo sapien
ggaaagtgcgtgctacatgccaggt

SEQ ID NO: 3546761 - DNA, 25 bp, Homo sapien
cagtgggtatgggatgtgcccccgg

SEQ ID NO: 3546762 - DNA, 25 bp, Homo sapien
gcatcaggaggaaagtgcgtgctac

SEQ ID NO: 3546763 - DNA, 25 bp, Homo sapien
tggtcgaacggtgttggccaaatag

SEQ ID NO: 3546764 - DNA, 25 bp, Homo sapien
aagagtcaaatgctccattgtacag

SEQ ID NO: 3546765 - DNA, 25 bp, Homo sapien
cttaataataaggaagactgccgag

SEQ ID NO: 3546766 - DNA, 25 bp, Homo sapien
tgccgaggaagagtcaaatgctcca

SEQ ID NO: 3546767 - DNA, 25 bp, Homo sapien
ggattcccccaatggtgagcattgg

SEQ ID NO: 3546768 - DNA, 25 bp, Homo sapien
caggattcccccaatggtgagcatt

SEQ ID NO: 3546769 - DNA, 25 bp, Homo sapien
aggattcccccaatggtgagcattg

SEQ ID NO: 3546770 - DNA, 25 bp, Homo sapien
tcgtggccaccataaccaaggcaat

SEQ ID NO: 3546771 - DNA, 25 bp, Homo sapien
tgagggatcaggaggcctgcacatc

SEQ ID NO: 3546772 - DNA, 25 bp, Homo sapien
gacatgtctttgcaaggggtcctgc

SEQ ID NO: 3546773 - DNA, 25 bp, Homo sapien
aataaaccagattggagttccagac

SEQ ID NO: 3546774 - DNA, 25 bp, Homo sapien
ggtgaaggctatgatgagtgtggcg

SEQ ID NO: 3546775 - DNA, 25 bp, Homo sapien
cagaggtgaaggctatgatgagtgt

SEQ ID NO: 3546776 - DNA, 25 bp, Homo sapien
gaggtgaaggctatgatgagtgtgg

SEQ ID NO: 3546777 - DNA, 25 bp, Homo sapien
aggtgaaggctatgatgagtgtggc

SEQ ID NO: 3546778 - DNA, 25 bp, Homo sapien
tcctattagctaagcccctagggag

SEQ ID NO: 3546779 - DNA, 25 bp, Homo sapien
cacgagattaggatgcagcaacaca

SEQ ID NO: 3546780 - DNA, 25 bp, Homo sapien
tgtgtgtgagatcacgtcccgaacc

SEQ ID NO: 3546781 - DNA, 25 bp, Homo sapien
cagtggcaataccaaagaaacttcc

SEQ ID NO: 3546782 - DNA, 25 bp, Homo sapien
tcttgaaccggtcaaagatgtagcc

SEQ ID NO: 3546783 - DNA, 25 bp, Homo sapien
tatgaggcgtgccacggtggtcttg

SEQ ID NO: 3546784 - DNA, 25 bp, Homo sapien
gaccccagggtgaagatgagtgaga

SEQ ID NO: 3546785 - DNA, 25 bp, Homo sapien
ccagtggggaatgtcatgaagttgt

SEQ ID NO: 3546786 - DNA, 25 bp, Homo sapien
gtagaaaaaaggtctcccatgcatc

SEQ ID NO: 3546787 - DNA, 25 bp, Homo sapien
gagtagaaaaaaggtctcccatgca

SEQ ID NO: 3546788 - DNA, 25 bp, Homo sapien
agaaaaaaggtctcccatgcatccc

SEQ ID NO: 3546789 - DNA, 25 bp, Homo sapien
ctggagtagaaaaaaggtctcccat

SEQ ID NO: 3546790 - DNA, 25 bp, Homo sapien
cagcatctggtccacacagatcctt

SEQ ID NO: 3546791 - DNA, 25 bp, Homo sapien
ggtccacacagatccttaaagtaat

SEQ ID NO: 3546792 - DNA, 25 bp, Homo sapien
ggcattgccaatcggcccagcatct

SEQ ID NO: 3546793 - DNA, 25 bp, Homo sapien
tgccctgtggcattgccaatcggcc

SEQ ID NO: 3546794 - DNA, 25 bp, Homo sapien
ccagccaaagaggacgccagcaaag

SEQ ID NO: 3546795 - DNA, 25 bp, Homo sapien
aggcattccagcagcccagtcagca

SEQ ID NO: 3546796 - DNA, 25 bp, Homo sapien
cagcaaagcccaggcattccagcag

SEQ ID NO: 3546797 - DNA, 25 bp, Homo sapien
agcagtgtggccacgtgcaggggca

SEQ ID NO: 3546798 - DNA, 25 bp, Homo sapien
gcgccgtaagcctggcgtttgagca

SEQ ID NO: 3546799 - DNA, 25 bp, Homo sapien
tcctttcccgtagctctctggttgt

SEQ ID NO: 3546800 - DNA, 25 bp, Homo sapien
gagtggatcttcaaatcccactttg

SEQ ID NO: 3546801 - DNA, 25 bp, Homo sapien
tgtcctcctggacggatcacaggcg

SEQ ID NO: 3546802 - DNA, 25 bp, Homo sapien
ctgggcaaaaaccatcagcgggtga

SEQ ID NO: 3546803 - DNA, 25 bp, Homo sapien
ggcaaaaaccatcagcgggtgattc

SEQ ID NO: 3546804 - DNA, 25 bp, Homo sapien
ccatcagcgggtgattctctggatc

SEQ ID NO: 3546805 - DNA, 25 bp, Homo sapien
aaccatcagcgggtgattctctgga

SEQ ID NO: 3546806 - DNA, 25 bp, Homo sapien
gaataaagatagaggctgctggaag

SEQ ID NO: 3546807 - DNA, 25 bp, Homo sapien
ggagctcctgcgctcgaattctgaa

SEQ ID NO: 3546808 - DNA, 25 bp, Homo sapien
agctcctgcgctcgaattctgaata

SEQ ID NO: 3546809 - DNA, 25 bp, Homo sapien
tcctgcgctcgaattctgaataccg

SEQ ID NO: 3546810 - DNA, 25 bp, Homo sapien
gcgctcgaattctgaataccgtccc

SEQ ID NO: 3546811 - DNA, 25 bp, Homo sapien
ataatgacagcaactcaaccaggtg

SEQ ID NO: 3546812 - DNA, 25 bp, Homo sapien
gctgccaagttggtgttatcttcag

SEQ ID NO: 3546813 - DNA, 25 bp, Homo sapien
tcccgctgccaagttggtgttatct

SEQ ID NO: 3546814 - DNA, 25 bp, Homo sapien
acaaactcccgctgccaagttggtg

SEQ ID NO: 3546815 - DNA, 25 bp, Homo sapien
tgccctccccgcagaggagcccgag

SEQ ID NO: 3546816 - DNA, 25 bp, Homo sapien
ttcctcgcatcaacttctaccagga

SEQ ID NO: 3546817 - DNA, 25 bp, Homo sapien
gccgcccttcctcgcatcaacttct

SEQ ID NO: 3546818 - DNA, 25 bp, Homo sapien
caacttctaccaggaaagcctccgg

SEQ ID NO: 3546819 - DNA, 25 bp, Homo sapien
acgggccaggttcgcattcgcgcct

SEQ ID NO: 3546820 - DNA, 25 bp, Homo sapien
cgcacgggccaggttcgcattcgcg

SEQ ID NO: 3546821 - DNA, 25 bp, Homo sapien
ctttccgcacgggccaggttcgcat

SEQ ID NO: 3546822 - DNA, 25 bp, Homo sapien
ttccgcacgggccaggttcgcattc

SEQ ID NO: 3546823 - DNA, 25 bp, Homo sapien
tccctcttgaaacttctccctctag

SEQ ID NO: 3546824 - DNA, 25 bp, Homo sapien
tctccctcttgaaacttctccctct

SEQ ID NO: 3546825 - DNA, 25 bp, Homo sapien
ctctccctcttgaaacttctccctc

SEQ ID NO: 3546826 - DNA, 25 bp, Homo sapien
ctccctcttgaaacttctccctcta

SEQ ID NO: 3546827 - DNA, 25 bp, Homo sapien
tctctcccagtttcacactcccaga

SEQ ID NO: 3546828 - DNA, 25 bp, Homo sapien
ctctcccagtttcacactcccagag

SEQ ID NO: 3546829 - DNA, 25 bp, Homo sapien
gtctctcccagtttcacactcccag

SEQ ID NO: 3546830 - DNA, 25 bp, Homo sapien
tctcccagtttcacactcccagagc

SEQ ID NO: 3546831 - DNA, 25 bp, Homo sapien
cccatgttctttggttcgaattcca

SEQ ID NO: 3546832 - DNA, 25 bp, Homo sapien
tgggctatctgtacatccaggactg

SEQ ID NO: 3546833 - DNA, 25 bp, Homo sapien
tgccagaaagatctagctcatgggc

SEQ ID NO: 3546834 - DNA, 25 bp, Homo sapien
caatgtctgcagaagacgtggcctc

SEQ ID NO: 3546835 - DNA, 25 bp, Homo sapien
tcaactggctggtaaggaccagtcc

SEQ ID NO: 3546836 - DNA, 25 bp, Homo sapien
ctggtaaggaccagtccagggtctg

SEQ ID NO: 3546837 - DNA, 25 bp, Homo sapien
tgagacattgctttgaggggaagag

SEQ ID NO: 3546838 - DNA, 25 bp, Homo sapien
actggctggtaaggaccagtccagg

SEQ ID NO: 3546839 - DNA, 25 bp, Homo sapien
gatattctctcctaccctctgacat

SEQ ID NO: 3546840 - DNA, 25 bp, Homo sapien
agcgagggcaattgccactctctgg

SEQ ID NO: 3546841 - DNA, 25 bp, Homo sapien
tgaacaacctcagcgagggcaattg

SEQ ID NO: 3546842 - DNA, 25 bp, Homo sapien
cctctgaacaacctcagcgagggca

SEQ ID NO: 3546843 - DNA, 25 bp, Homo sapien
cagcaagttcagagtcaagtgggat

SEQ ID NO: 3546844 - DNA, 25 bp, Homo sapien
gactggtgtggagcttcattaaaga

SEQ ID NO: 3546845 - DNA, 25 bp, Homo sapien
gaactccagggagctaaaattctga

SEQ ID NO: 3546846 - DNA, 25 bp, Homo sapien
gggactcaactttctaaccaagaga

SEQ ID NO: 3546847 - DNA, 25 bp, Homo sapien
gaggcagctcggcaaacaaacccag

SEQ ID NO: 3546848 - DNA, 25 bp, Homo sapien
atcttgtgatatttcgctccccggg

SEQ ID NO: 3546849 - DNA, 25 bp, Homo sapien
tgtgatatttcgctccccgggagcc

SEQ ID NO: 3546850 - DNA, 25 bp, Homo sapien
gcgacagattgtgccgcggctcatt

SEQ ID NO: 3546851 - DNA, 25 bp, Homo sapien
cccaggttcacaccattatcgtgtc

SEQ ID NO: 3546852 - DNA, 25 bp, Homo sapien
caggttcacaccattatcgtgtctc

SEQ ID NO: 3546853 - DNA, 25 bp, Homo sapien
tcccaggttcacaccattatcgtgt

SEQ ID NO: 3546854 - DNA, 25 bp, Homo sapien
aggttcacaccattatcgtgtctca

SEQ ID NO: 3546855 - DNA, 25 bp, Homo sapien
tctaccgagatctgcctgccgaaga

SEQ ID NO: 3546856 - DNA, 25 bp, Homo sapien
gcgcctactgaggacgactactggg

SEQ ID NO: 3546857 - DNA, 25 bp, Homo sapien
tctgactgcggtgctgagatcgaag

SEQ ID NO: 3546858 - DNA, 25 bp, Homo sapien
atcgaagaggccagtgtccgatccc

SEQ ID NO: 3546859 - DNA, 25 bp, Homo sapien
agttctggccattaactcttcccca

SEQ ID NO: 3546860 - DNA, 25 bp, Homo sapien
tttctcctaagtctaccctggacac

SEQ ID NO: 3546861 - DNA, 25 bp, Homo sapien
ttttgtctgcagagcgtcttccacc

SEQ ID NO: 3546862 - DNA, 25 bp, Homo sapien
tgacttgtggcagccccaagagggc

SEQ ID NO: 3546863 - DNA, 25 bp, Homo sapien
tggccagaggcaagcttcgagaccc

SEQ ID NO: 3546864 - DNA, 25 bp, Homo sapien
gccggtgaggctgcagataacgctt

SEQ ID NO: 3546865 - DNA, 25 bp, Homo sapien
ataacgcttgcaaggacgggagtcg

SEQ ID NO: 3546866 - DNA, 25 bp, Homo sapien
accaccaccgttgcgagggccggtg

SEQ ID NO: 3546867 - DNA, 25 bp, Homo sapien
ctatggtgggaagtttgagtcatac

SEQ ID NO: 3546868 - DNA, 25 bp, Homo sapien
ttactttcggcaggccctagggatg

SEQ ID NO: 3546869 - DNA, 25 bp, Homo sapien
aagtgttactttcggcaggccctag

SEQ ID NO: 3546870 - DNA, 25 bp, Homo sapien
tatagtataacaaggaagctcaaaa

SEQ ID NO: 3546871 - DNA, 25 bp, Homo sapien
cattctgtcctaatcctctgtatgg

SEQ ID NO: 3546872 - DNA, 25 bp, Homo sapien
gcattctgtcctaatcctctgtatg

SEQ ID NO: 3546873 - DNA, 25 bp, Homo sapien
attctgtcctaatcctctgtatgga

SEQ ID NO: 3546874 - DNA, 25 bp, Homo sapien
agcattctgtcctaatcctctgtat

SEQ ID NO: 3546875 - DNA, 25 bp, Homo sapien
gctggcatgccaagcgtcctagtta

SEQ ID NO: 3546876 - DNA, 25 bp, Homo sapien
gtcctagttaatgcccagctgagcc

SEQ ID NO: 3546877 - DNA, 25 bp, Homo sapien
accaaccgccaaagacaggcgcaca

SEQ ID NO: 3546878 - DNA, 25 bp, Homo sapien
cagggcatggttgggaacagggagg

SEQ ID NO: 3546879 - DNA, 25 bp, Homo sapien
tcctctaagacttgcaagcagcagc

SEQ ID NO: 3546880 - DNA, 25 bp, Homo sapien
ctttttatttcctctaagacttgca

SEQ ID NO: 3546881 - DNA, 25 bp, Homo sapien
atttcctctaagacttgcaagcagc

SEQ ID NO: 3546882 - DNA, 25 bp, Homo sapien
tttatttcctctaagacttgcaagc

SEQ ID NO: 3546883 - DNA, 25 bp, Homo sapien
gaagaaggctcaacccctctaggat

SEQ ID NO: 3546884 - DNA, 25 bp, Homo sapien
cgctagaaggagataagaggcaccc

SEQ ID NO: 3546885 - DNA, 25 bp, Homo sapien
gaaaggagggctgtgtctctctcac

SEQ ID NO: 3546886 - DNA, 25 bp, Homo sapien
tatttataaatctacggccatggct

SEQ ID NO: 3546887 - DNA, 25 bp, Homo sapien
tcagagccgctaagcaccttcagtg

SEQ ID NO: 3546888 - DNA, 25 bp, Homo sapien
gccgggcacggtaatagaagaggta

SEQ ID NO: 3546889 - DNA, 25 bp, Homo sapien
atcccaggagtgagaatagcaggag

SEQ ID NO: 3546890 - DNA, 25 bp, Homo sapien
cattggcggcgtactcctgctggag

SEQ ID NO: 3546891 - DNA, 25 bp, Homo sapien
acgcgggctctgactcggttcacat

SEQ ID NO: 3546892 - DNA, 25 bp, Homo sapien
aaccaatgggatcccgttcagggtg

SEQ ID NO: 3546893 - DNA, 25 bp, Homo sapien
tctcaggtataacaagtggcagggc

SEQ ID NO: 3546894 - DNA, 25 bp, Homo sapien
tgtagtcattgttccaccagtatct

SEQ ID NO: 3546895 - DNA, 25 bp, Homo sapien
cagaagggctctcctttcaggggtc

SEQ ID NO: 3546896 - DNA, 25 bp, Homo sapien
caccatcgccatgaaaagtggctgc

SEQ ID NO: 3546897 - DNA, 25 bp, Homo sapien
actgcaggcctgtcagcgtcccaaa

SEQ ID NO: 3546898 - DNA, 25 bp, Homo sapien
gcaaggcgaacacagcactgatgag

SEQ ID NO: 3546899 - DNA, 25 bp, Homo sapien
ccacaggctgagtggaagaaacctc

SEQ ID NO: 3546900 - DNA, 25 bp, Homo sapien
actgcagcatagagactcccacagg

SEQ ID NO: 3546901 - DNA, 25 bp, Homo sapien
tgcagcatagagactcccacaggct

SEQ ID NO: 3546902 - DNA, 25 bp, Homo sapien
gaaacctcgaacaatggtgtgcagg

SEQ ID NO: 3546903 - DNA, 25 bp, Homo sapien
caggtgatgccaaaacccacaagca

SEQ ID NO: 3546904 - DNA, 25 bp, Homo sapien
agttgttgatgagacaggtgatgcc

SEQ ID NO: 3546905 - DNA, 25 bp, Homo sapien
tggaggtgtaagttgttgatgagac

SEQ ID NO: 3546906 - DNA, 25 bp, Homo sapien
gtgatgccaaaacccacaagcagca

SEQ ID NO: 3546907 - DNA, 25 bp, Homo sapien
gatggatttggtagcaaccccgtcc

SEQ ID NO: 3546908 - DNA, 25 bp, Homo sapien
ctgatggatttggtagcaaccccgt

SEQ ID NO: 3546909 - DNA, 25 bp, Homo sapien
tgatggatttggtagcaaccccgtc

SEQ ID NO: 3546910 - DNA, 25 bp, Homo sapien
tggccccgaagacggaggagtagaa

SEQ ID NO: 3546911 - DNA, 25 bp, Homo sapien
ctgagttggggcgtccacgcagtcc

SEQ ID NO: 3546912 - DNA, 25 bp, Homo sapien
tgagaaggcacaacagctgcatggc

SEQ ID NO: 3546913 - DNA, 25 bp, Homo sapien
tccttgatccgccagtccatgatgt

SEQ ID NO: 3546914 - DNA, 25 bp, Homo sapien
cagtggacactatcaccccttccag

SEQ ID NO: 3546915 - DNA, 25 bp, Homo sapien
aaaatagccttcctctgaacccaga

SEQ ID NO: 3546916 - DNA, 25 bp, Homo sapien
cagactcttacatcccacaaaaggg

SEQ ID NO: 3546917 - DNA, 25 bp, Homo sapien
gccagagagcaccaaaatagccttc

SEQ ID NO: 3546918 - DNA, 25 bp, Homo sapien
ctgtctctgccaccttttgttgctg

SEQ ID NO: 3546919 - DNA, 25 bp, Homo sapien
tgtctctgccaccttttgttgctgt

SEQ ID NO: 3546920 - DNA, 25 bp, Homo sapien
accttttgttgctgttcatttgtct

SEQ ID NO: 3546921 - DNA, 25 bp, Homo sapien
gccaccttttgttgctgttcatttg

SEQ ID NO: 3546922 - DNA, 25 bp, Homo sapien
tcctggccaccagtcacaaggtact

SEQ ID NO: 3546923 - DNA, 25 bp, Homo sapien
catcttgttcacagcagccatgtag

SEQ ID NO: 3546924 - DNA, 25 bp, Homo sapien
aggctcttgcgtaaggggacagacc

SEQ ID NO: 3546925 - DNA, 25 bp, Homo sapien
cagtcacaaggtactccagcatctt

SEQ ID NO: 3546926 - DNA, 25 bp, Homo sapien
catcactatcccccaaggccggcac

SEQ ID NO: 3546927 - DNA, 25 bp, Homo sapien
aaggccggcaccttgaccagacact

SEQ ID NO: 3546928 - DNA, 25 bp, Homo sapien
caaggccggcaccttgaccagacac

SEQ ID NO: 3546929 - DNA, 25 bp, Homo sapien
cccaaggccggcaccttgaccagac

SEQ ID NO: 3546930 - DNA, 25 bp, Homo sapien
gttttctgaggtgccccgaacatcc

SEQ ID NO: 3546931 - DNA, 25 bp, Homo sapien
tcacatgggtgtagaagaggtcacc

SEQ ID NO: 3546932 - DNA, 25 bp, Homo sapien
acatgaaggcatccgaaccgtcctc

SEQ ID NO: 3546933 - DNA, 25 bp, Homo sapien
gaagaggtcacctgtcaccttgtgg

SEQ ID NO: 3546934 - DNA, 25 bp, Homo sapien
gctcagggaccagcttagcacagat

SEQ ID NO: 3546935 - DNA, 25 bp, Homo sapien
cagcctgcgtccaacctaagattca

SEQ ID NO: 3546936 - DNA, 25 bp, Homo sapien
gcagcattaacacctcagactccag

SEQ ID NO: 3546937 - DNA, 25 bp, Homo sapien
gggttaatacccaatctacatcata

SEQ ID NO: 3546938 - DNA, 25 bp, Homo sapien
gggaccacatggcatcgagtgccat

SEQ ID NO: 3546939 - DNA, 25 bp, Homo sapien
cacatggcatcgagtgccattgctg

SEQ ID NO: 3546940 - DNA, 25 bp, Homo sapien
atggcatcgagtgccattgctgagg

SEQ ID NO: 3546941 - DNA, 25 bp, Homo sapien
gaccacatggcatcgagtgccattg

SEQ ID NO: 3546942 - DNA, 25 bp, Homo sapien
aggccacaccggcatcgtagatcag

SEQ ID NO: 3546943 - DNA, 25 bp, Homo sapien
atgatgaccacgaaggccacaccgg

SEQ ID NO: 3546944 - DNA, 25 bp, Homo sapien
ggaaaggcttcgatgggccagttga

SEQ ID NO: 3546945 - DNA, 25 bp, Homo sapien
cacgaaggccacaccggcatcgtag

SEQ ID NO: 3546946 - DNA, 25 bp, Homo sapien
tttcccaggtcctcccacgtgcaac

SEQ ID NO: 3546947 - DNA, 25 bp, Homo sapien
tcccaggtcctcccacgtgcaacaa

SEQ ID NO: 3546948 - DNA, 25 bp, Homo sapien
ctttcccaggtcctcccacgtgcaa

SEQ ID NO: 3546949 - DNA, 25 bp, Homo sapien
ttcccaggtcctcccacgtgcaaca

SEQ ID NO: 3546950 - DNA, 25 bp, Homo sapien
catctgaccaggataattaatgtct

SEQ ID NO: 3546951 - DNA, 25 bp, Homo sapien
ggataattaatgtctgctctcccct

SEQ ID NO: 3546952 - DNA, 25 bp, Homo sapien
caggataattaatgtctgctctccc

SEQ ID NO: 3546953 - DNA, 25 bp, Homo sapien
gaccaggataattaatgtctgctct

SEQ ID NO: 3546954 - DNA, 25 bp, Homo sapien
cgtaagagccaatcatgagggccat

SEQ ID NO: 3546955 - DNA, 25 bp, Homo sapien
tgattcctgggaacgtaatggcaga

SEQ ID NO: 3546956 - DNA, 25 bp, Homo sapien
taatggcagaagaggcgtaagagcc

SEQ ID NO: 3546957 - DNA, 25 bp, Homo sapien
ccattaacgtggagcgcaggttccc

SEQ ID NO: 3546958 - DNA, 25 bp, Homo sapien
accactgccaaggacgccacggaag

SEQ ID NO: 3546959 - DNA, 25 bp, Homo sapien
cctgcatccgtgaggcaccactgcc

SEQ ID NO: 3546960 - DNA, 25 bp, Homo sapien
ccaaggacgccacggaaggctgcca

SEQ ID NO: 3546961 - DNA, 25 bp, Homo sapien
tgcaccctgcatccgtgaggcacca

SEQ ID NO: 3546962 - DNA, 25 bp, Homo sapien
tgggtaaggcgaggccggccggcta

SEQ ID NO: 3546963 - DNA, 25 bp, Homo sapien
gcaagactcagcacgggacgtcctc

SEQ ID NO: 3546964 - DNA, 25 bp, Homo sapien
tcagcacgggacgtcctcgtccaag

SEQ ID NO: 3546965 - DNA, 25 bp, Homo sapien
ctcgtccaagtctgggccaagagca

SEQ ID NO: 3546966 - DNA, 25 bp, Homo sapien
agctgggcccgcaagactcagcacg

SEQ ID NO: 3546967 - DNA, 25 bp, Homo sapien
cagggaggatgactcggtcagtcct

SEQ ID NO: 3546968 - DNA, 25 bp, Homo sapien
tgctgtagtccaggacctagaacag

SEQ ID NO: 3546969 - DNA, 25 bp, Homo sapien
tgatctagtgatctgcgtccacagg

SEQ ID NO: 3546970 - DNA, 25 bp, Homo sapien
cattcatgggctctgtacacacaaa

SEQ ID NO: 3546971 - DNA, 25 bp, Homo sapien
ccactcgggggaactctgctgccag

SEQ ID NO: 3546972 - DNA, 25 bp, Homo sapien
caccccactcgggggaactctgctg

SEQ ID NO: 3546973 - DNA, 25 bp, Homo sapien
cctcaccccactcgggggaactctg

SEQ ID NO: 3546974 - DNA, 25 bp, Homo sapien
tctgccctcaccccactcgggggaa

SEQ ID NO: 3546975 - DNA, 25 bp, Homo sapien
agcgccaggaatatcaacggagaca

SEQ ID NO: 3546976 - DNA, 25 bp, Homo sapien
gccaggaatatcaacggagacagag

SEQ ID NO: 3546977 - DNA, 25 bp, Homo sapien
aagtgaacgttaggcagatgccacc

SEQ ID NO: 3546978 - DNA, 25 bp, Homo sapien
tgagtgaagtgaacgttaggcagat

SEQ ID NO: 3546979 - DNA, 25 bp, Homo sapien
ccacgtcccgggaggccagggccat

SEQ ID NO: 3546980 - DNA, 25 bp, Homo sapien
ggtgcaggacgcagtgaagcaggca

SEQ ID NO: 3546981 - DNA, 25 bp, Homo sapien
catgagggtgcaggacgcagtgaag

SEQ ID NO: 3546982 - DNA, 25 bp, Homo sapien
ccagggccatgagggtgcaggacgc

SEQ ID NO: 3546983 - DNA, 25 bp, Homo sapien
gtggcgctgagcacgaaggaaccaa

SEQ ID NO: 3546984 - DNA, 25 bp, Homo sapien
cacgaaggaaccaatggtgaagccc

SEQ ID NO: 3546985 - DNA, 25 bp, Homo sapien
cccaggttgagcatctcgtcctgct

SEQ ID NO: 3546986 - DNA, 25 bp, Homo sapien
aatggtgaagcccaggttgagcatc

SEQ ID NO: 3546987 - DNA, 25 bp, Homo sapien
gagggctcagcacatgacaccagga

SEQ ID NO: 3546988 - DNA, 25 bp, Homo sapien
agggctcagcacatgacaccaggaa

SEQ ID NO: 3546989 - DNA, 25 bp, Homo sapien
agggagggctcagcacatgacacca

SEQ ID NO: 3546990 - DNA, 25 bp, Homo sapien
gaagggagggctcagcacatgacac

SEQ ID NO: 3546991 - DNA, 25 bp, Homo sapien
gatggttgtgaagcacctggagtct

SEQ ID NO: 3546992 - DNA, 25 bp, Homo sapien
taaactgcaaatgactaggtttggg

SEQ ID NO: 3546993 - DNA, 25 bp, Homo sapien
tcaaattctaattccactagctgtg

SEQ ID NO: 3546994 - DNA, 25 bp, Homo sapien
taattccactagctgtgctgcagaa

SEQ ID NO: 3546995 - DNA, 25 bp, Homo sapien
ggcacttatgctggatatagagtag

SEQ ID NO: 3546996 - DNA, 25 bp, Homo sapien
gatacccttataggtaggtcagagg

SEQ ID NO: 3546997 - DNA, 25 bp, Homo sapien
tgtggccaggtaaccccaaagttga

SEQ ID NO: 3546998 - DNA, 25 bp, Homo sapien
tctgagaaacagaggctccgttagc

SEQ ID NO: 3546999 - DNA, 25 bp, Homo sapien
tggagcagccgctgttcagagcagt

SEQ ID NO: 3547000 - DNA, 25 bp, Homo sapien
agataaccatggctggatgcggcag

SEQ ID NO: 3547001 - DNA, 25 bp, Homo sapien
caaggaatcggttttcttccatagc

SEQ ID NO: 3547002 - DNA, 25 bp, Homo sapien
gccatctctcggtgccatctgttgc

SEQ ID NO: 3547003 - DNA, 25 bp, Homo sapien
ggcacgtgctggaatagaagccctc

SEQ ID NO: 3547004 - DNA, 25 bp, Homo sapien
ttcagaatgatcaacagggagcccc

SEQ ID NO: 3547005 - DNA, 25 bp, Homo sapien
agcgcctccggtacgcctgttgcag

SEQ ID NO: 3547006 - DNA, 25 bp, Homo sapien
gctggaatagaagccctcgttcttc

SEQ ID NO: 3547007 - DNA, 25 bp, Homo sapien
gaaacagagcgctgggtgaagggcc

SEQ ID NO: 3547008 - DNA, 25 bp, Homo sapien
agaaacagagcgctgggtgaagggc

SEQ ID NO: 3547009 - DNA, 25 bp, Homo sapien
gcacagaaacagagcgctgggtgaa

SEQ ID NO: 3547010 - DNA, 25 bp, Homo sapien
ggggctcccgctgagccactatcgg

SEQ ID NO: 3547011 - DNA, 25 bp, Homo sapien
agtgccagaggtgcacgcggcacgg

SEQ ID NO: 3547012 - DNA, 25 bp, Homo sapien
cttcccagccggtgccaaggagctg

SEQ ID NO: 3547013 - DNA, 25 bp, Homo sapien
gctggctccgcgcgcactagcagtg

SEQ ID NO: 3547014 - DNA, 25 bp, Homo sapien
caggaaagacccctagaagctggca

SEQ ID NO: 3547015 - DNA, 25 bp, Homo sapien
ttcaaggctaccctacgaccccatc

SEQ ID NO: 3547016 - DNA, 25 bp, Homo sapien
tgtccggactctcgcgccaggaaag

SEQ ID NO: 3547017 - DNA, 25 bp, Homo sapien
ggcagagcgcgctctgaagcaccgc

SEQ ID NO: 3547018 - DNA, 25 bp, Homo sapien
gggctcggacttcggcaggaagtct

SEQ ID NO: 3547019 - DNA, 25 bp, Homo sapien
caggctttgcacctcggaacccgct

SEQ ID NO: 3547020 - DNA, 25 bp, Homo sapien
cgggagggggctcggacttcggcag

SEQ ID NO: 3547021 - DNA, 25 bp, Homo sapien
ggctttgcacctcggaacccgcttg

SEQ ID NO: 3547022 - DNA, 25 bp, Homo sapien
tccagggggactcggtattctcatc

SEQ ID NO: 3547023 - DNA, 25 bp, Homo sapien
gctttgggttcaagcgctccaggag

SEQ ID NO: 3547024 - DNA, 25 bp, Homo sapien
gaggtccgctggaactctggcaaac

SEQ ID NO: 3547025 - DNA, 25 bp, Homo sapien
ctggaactctggcaaacgcgcagct

SEQ ID NO: 3547026 - DNA, 25 bp, Homo sapien
ggtcttctctgcgtgcaggacccgg

SEQ ID NO: 3547027 - DNA, 25 bp, Homo sapien
gtcaccggcaaatgagcagccagca

SEQ ID NO: 3547028 - DNA, 25 bp, Homo sapien
gagcgcaacgctttcgcggcgcgtc

SEQ ID NO: 3547029 - DNA, 25 bp, Homo sapien
tccgctgtctcctcggaagaagcgg

SEQ ID NO: 3547030 - DNA, 25 bp, Homo sapien
gcgccagaggtctgcgaagctgggc

SEQ ID NO: 3547031 - DNA, 25 bp, Homo sapien
gaacccgccgggcgccagaggtctg

SEQ ID NO: 3547032 - DNA, 25 bp, Homo sapien
ccgccgggcgccagaggtctgcgaa

SEQ ID NO: 3547033 - DNA, 25 bp, Homo sapien
ctgggaacccgccgggcgccagagg

SEQ ID NO: 3547034 - DNA, 25 bp, Homo sapien
gttgtatttacacgcgtccggagct

SEQ ID NO: 3547035 - DNA, 25 bp, Homo sapien
atttacacgcgtccggagctgcgcc

SEQ ID NO: 3547036 - DNA, 25 bp, Homo sapien
tagttgtatttacacgcgtccggag

SEQ ID NO: 3547037 - DNA, 25 bp, Homo sapien
ttgatagttgtatttacacgcgtcc

SEQ ID NO: 3547038 - DNA, 25 bp, Homo sapien
ctggtcccggacactctccctctgg

SEQ ID NO: 3547039 - DNA, 25 bp, Homo sapien
gtgactcgcccgctggtcccggaca

SEQ ID NO: 3547040 - DNA, 25 bp, Homo sapien
acagccccagcacctacatttccac

SEQ ID NO: 3547041 - DNA, 25 bp, Homo sapien
gccccagcacctacatttccaccct

SEQ ID NO: 3547042 - DNA, 25 bp, Homo sapien
tgaggctctagtggtccatggaccc

SEQ ID NO: 3547043 - DNA, 25 bp, Homo sapien
catgaggctctagtggtccatggac

SEQ ID NO: 3547044 - DNA, 25 bp, Homo sapien
ttccatgaggctctagtggtccatg

SEQ ID NO: 3547045 - DNA, 25 bp, Homo sapien
ctttccatgaggctctagtggtcca

SEQ ID NO: 3547046 - DNA, 25 bp, Homo sapien
accatcaggctgttgccgagcagga

SEQ ID NO: 3547047 - DNA, 25 bp, Homo sapien
gcaagtatccaggtgtagtacacac

SEQ ID NO: 3547048 - DNA, 25 bp, Homo sapien
tggaggccccagtgatctttgaggt

SEQ ID NO: 3547049 - DNA, 25 bp, Homo sapien
tcaagcagatgatgacagcgaggga

SEQ ID NO: 3547050 - DNA, 25 bp, Homo sapien
gactctctacagagagcctaggcct

SEQ ID NO: 3547051 - DNA, 25 bp, Homo sapien
tactccttcaccaggagacagcgct

SEQ ID NO: 3547052 - DNA, 25 bp, Homo sapien
cacattccagtgtgacaaatactcc

SEQ ID NO: 3547053 - DNA, 25 bp, Homo sapien
taccactccgggatcttgaagactc

SEQ ID NO: 3547054 - DNA, 25 bp, Homo sapien
cagggagcacgtttattaaagtggg

SEQ ID NO: 3547055 - DNA, 25 bp, Homo sapien
ccccagggtgtatactgacagggac

SEQ ID NO: 3547056 - DNA, 25 bp, Homo sapien
cacccaacagggagcacgtttatta

SEQ ID NO: 3547057 - DNA, 25 bp, Homo sapien
gggtacaccccagggtgtatactga

SEQ ID NO: 3547058 - DNA, 25 bp, Homo sapien
catgcaggcccagagctctgctgca

SEQ ID NO: 3547059 - DNA, 25 bp, Homo sapien
tcatgcaggcccagagctctgctgc

SEQ ID NO: 3547060 - DNA, 25 bp, Homo sapien
atgcaggcccagagctctgctgcac

SEQ ID NO: 3547061 - DNA, 25 bp, Homo sapien
aactttttgcccatccgctcatgga

SEQ ID NO: 3547062 - DNA, 25 bp, Homo sapien
gcttccttgtagtgaggaggcacac

SEQ ID NO: 3547063 - DNA, 25 bp, Homo sapien
ggtacttagagacacatcggtccag

SEQ ID NO: 3547064 - DNA, 25 bp, Homo sapien
gactcgcccttggagagctctgctt

SEQ ID NO: 3547065 - DNA, 25 bp, Homo sapien
tgtacatatcggccatcatctccac

SEQ ID NO: 3547066 - DNA, 25 bp, Homo sapien
gttgtacatatcggccatcatctcc

SEQ ID NO: 3547067 - DNA, 25 bp, Homo sapien
ctgttgtacatatcggccatcatct

SEQ ID NO: 3547068 - DNA, 25 bp, Homo sapien
gtacatatcggccatcatctccacc

SEQ ID NO: 3547069 - DNA, 25 bp, Homo sapien
caccgtggaagggatctccttctgg

SEQ ID NO: 3547070 - DNA, 25 bp, Homo sapien
ctcagcctagcaccgtggaagggat

SEQ ID NO: 3547071 - DNA, 25 bp, Homo sapien
cctagcaccgtggaagggatctcct

SEQ ID NO: 3547072 - DNA, 25 bp, Homo sapien
cagcctagcaccgtggaagggatct

SEQ ID NO: 3547073 - DNA, 25 bp, Homo sapien
cacggagaccccaacttctgacaaa

SEQ ID NO: 3547074 - DNA, 25 bp, Homo sapien
ctgcctgggacggatcacaatgccc

SEQ ID NO: 3547075 - DNA, 25 bp, Homo sapien
cactgcctgggacggatcacaatgc

SEQ ID NO: 3547076 - DNA, 25 bp, Homo sapien
tgacaaatactataacgttacccgc

SEQ ID NO: 3547077 - DNA, 25 bp, Homo sapien
ccagcggaagcacgtgggttacttc

SEQ ID NO: 3547078 - DNA, 25 bp, Homo sapien
agcggaagcacgtgggttacttccg

SEQ ID NO: 3547079 - DNA, 25 bp, Homo sapien
ctccagcggaagcacgtgggttact

SEQ ID NO: 3547080 - DNA, 25 bp, Homo sapien
tccagcggaagcacgtgggttactt

SEQ ID NO: 3547081 - DNA, 25 bp, Homo sapien
gaatctctgggagtacagtttaaaa

SEQ ID NO: 3547082 - DNA, 25 bp, Homo sapien
tgggatgtcaccgagcggcttcagt

SEQ ID NO: 3547083 - DNA, 25 bp, Homo sapien
gactcctgtgcgcaaatcaggcgtg

SEQ ID NO: 3547084 - DNA, 25 bp, Homo sapien
agagcgtctgcagcccgatcagaat

SEQ ID NO: 3547085 - DNA, 25 bp, Homo sapien
taggacaaccagatgacagatgagg

SEQ ID NO: 3547086 - DNA, 25 bp, Homo sapien
gattggatacccctagtctaagcaa

SEQ ID NO: 3547087 - DNA, 25 bp, Homo sapien
ggtggcagacgcaccacagaacatc

SEQ ID NO: 3547088 - DNA, 25 bp, Homo sapien
tctaagcaattgaggtcggcctctc

SEQ ID NO: 3547089 - DNA, 25 bp, Homo sapien
aaataggaaactccgagttaagatg

SEQ ID NO: 3547090 - DNA, 25 bp, Homo sapien
gaaactccgagttaagatgtcataa

SEQ ID NO: 3547091 - DNA, 25 bp, Homo sapien
gagttaagatgtcataatctacccc

SEQ ID NO: 3547092 - DNA, 25 bp, Homo sapien
gatcctccagtatatacagtactta

SEQ ID NO: 3547093 - DNA, 25 bp, Homo sapien
cctgggtttgtcttaactctgttgg

SEQ ID NO: 3547094 - DNA, 25 bp, Homo sapien
cctatgggcttcgtcattgctgggc

SEQ ID NO: 3547095 - DNA, 25 bp, Homo sapien
gggttacctgtctacatcctgtgac

SEQ ID NO: 3547096 - DNA, 25 bp, Homo sapien
tccttaggaaactggctgactgtgc

SEQ ID NO: 3547097 - DNA, 25 bp, Homo sapien
ggtctcaataactgcgcaaggtgtt

SEQ ID NO: 3547098 - DNA, 25 bp, Homo sapien
gggataataaactctggccataggg

SEQ ID NO: 3547099 - DNA, 25 bp, Homo sapien
tgtaaaatcctgtctggcccctcag

SEQ ID NO: 3547100 - DNA, 25 bp, Homo sapien
tgagagttccaaccttatgaaggtg

SEQ ID NO: 3547101 - DNA, 25 bp, Homo sapien
tctctgactttaatggcttaagcaa

SEQ ID NO: 3547102 - DNA, 25 bp, Homo sapien
tctgactttaatggcttaagcaaga

SEQ ID NO: 3547103 - DNA, 25 bp, Homo sapien
ttaatggcttaagcaagaacatggt

SEQ ID NO: 3547104 - DNA, 25 bp, Homo sapien
gactttaatggcttaagcaagaaca

SEQ ID NO: 3547105 - DNA, 25 bp, Homo sapien
tccgctatgccgaggatccagtgca

SEQ ID NO: 3547106 - DNA, 25 bp, Homo sapien
tcagtccatgaggtgtgtccgtccg

SEQ ID NO: 3547107 - DNA, 25 bp, Homo sapien
gaacctgggagtgagtccatacaca

SEQ ID NO: 3547108 - DNA, 25 bp, Homo sapien
gatatatacttcacagtctgaggcc

SEQ ID NO: 3547109 - DNA, 25 bp, Homo sapien
gggctccctgatattcggtctattc

SEQ ID NO: 3547110 - DNA, 25 bp, Homo sapien
taggagggccggtccactccgaatc

SEQ ID NO: 3547111 - DNA, 25 bp, Homo sapien
ctccgaatcggagggtgaactcttc

SEQ ID NO: 3547112 - DNA, 25 bp, Homo sapien
aacagctccggattctgtgtcagca

SEQ ID NO: 3547113 - DNA, 25 bp, Homo sapien
aggcttccagttctcactgctgatg

SEQ ID NO: 3547114 - DNA, 25 bp, Homo sapien
tctgtccgttctcgtccacgttggg

SEQ ID NO: 3547115 - DNA, 25 bp, Homo sapien
tggcaagtcttggtgcaaggcttcc

SEQ ID NO: 3547116 - DNA, 25 bp, Homo sapien
tgatgatgggcaggcaaatctgtcc

SEQ ID NO: 3547117 - DNA, 25 bp, Homo sapien
aggctttcaggtggtagggaggttg

SEQ ID NO: 3547118 - DNA, 25 bp, Homo sapien
tactccggcgggaagctgatgcgca

SEQ ID NO: 3547119 - DNA, 25 bp, Homo sapien
gggaggcttgaacggatactccggc

SEQ ID NO: 3547120 - DNA, 25 bp, Homo sapien
tgcgcaggttgaaggctttcaggtg

SEQ ID NO: 3547121 - DNA, 25 bp, Homo sapien
tcctgccccaatccgagggtcctag

SEQ ID NO: 3547122 - DNA, 25 bp, Homo sapien
aaaggggtcaagctccagtctggtt

SEQ ID NO: 3547123 - DNA, 25 bp, Homo sapien
cttcctgccccaatccgagggtcct

SEQ ID NO: 3547124 - DNA, 25 bp, Homo sapien
gagaaaaggggtcaagctccagtct

SEQ ID NO: 3547125 - DNA, 25 bp, Homo sapien
gaagatcctggcacctgctcgctct

SEQ ID NO: 3547126 - DNA, 25 bp, Homo sapien
tgtgatctgtacacgtggctcccct

SEQ ID NO: 3547127 - DNA, 25 bp, Homo sapien
tgcatgtgatctgtacacgtggctc

SEQ ID NO: 3547128 - DNA, 25 bp, Homo sapien
cttctcttgcatgtgatctgtacac

SEQ ID NO: 3547129 - DNA, 25 bp, Homo sapien
gctctgggattcctcccaagtatca

SEQ ID NO: 3547130 - DNA, 25 bp, Homo sapien
agctctgggattcctcccaagtatc

SEQ ID NO: 3547131 - DNA, 25 bp, Homo sapien
ctctgggattcctcccaagtatcat

SEQ ID NO: 3547132 - DNA, 25 bp, Homo sapien
tttggccccaatccaaagccatggt

SEQ ID NO: 3547133 - DNA, 25 bp, Homo sapien
ttggccccaatccaaagccatggtc

SEQ ID NO: 3547134 - DNA, 25 bp, Homo sapien
aatttggccccaatccaaagccatg

SEQ ID NO: 3547135 - DNA, 25 bp, Homo sapien
ctaatttggccccaatccaaagcca

SEQ ID NO: 3547136 - DNA, 25 bp, Homo sapien
gacattggcatcatcgctggacagg

SEQ ID NO: 3547137 - DNA, 25 bp, Homo sapien
cattggcatcatcgctggacaggtt

SEQ ID NO: 3547138 - DNA, 25 bp, Homo sapien
ggacattggcatcatcgctggacag

SEQ ID NO: 3547139 - DNA, 25 bp, Homo sapien
caggacattggcatcatcgctggac

SEQ ID NO: 3547140 - DNA, 25 bp, Homo sapien
gaggcttcttctgaagatcctccag

SEQ ID NO: 3547141 - DNA, 25 bp, Homo sapien
ggcttcttctgaagatcctccagct

SEQ ID NO: 3547142 - DNA, 25 bp, Homo sapien
ggggaggcttcttctgaagatcctc

SEQ ID NO: 3547143 - DNA, 25 bp, Homo sapien
ggaggcttcttctgaagatcctcca

SEQ ID NO: 3547144 - DNA, 25 bp, Homo sapien
caggggacacaagtgagtgggcagt

SEQ ID NO: 3547145 - DNA, 25 bp, Homo sapien
ttggcctagtcctccttatttcagc

SEQ ID NO: 3547146 - DNA, 25 bp, Homo sapien
gggcagttggcctagtcctccttat

SEQ ID NO: 3547147 - DNA, 25 bp, Homo sapien
cagttggcctagtcctccttatttc

SEQ ID NO: 3547148 - DNA, 25 bp, Homo sapien
tctcaggactctagtaatacaggca

SEQ ID NO: 3547149 - DNA, 25 bp, Homo sapien
ctaatcagcattccgtgtttctcag

SEQ ID NO: 3547150 - DNA, 25 bp, Homo sapien
cagagaatactcagggaactttgtc

SEQ ID NO: 3547151 - DNA, 25 bp, Homo sapien
cagttgttatcacaagtttcaggca

SEQ ID NO: 3547152 - DNA, 25 bp, Homo sapien
gggaccgagtgtgtggcacccgtgg

SEQ ID NO: 3547153 - DNA, 25 bp, Homo sapien
ggaccgagtgtgtggcacccgtggc

SEQ ID NO: 3547154 - DNA, 25 bp, Homo sapien
gctccgacccgcgacacagcgcgcc

SEQ ID NO: 3547155 - DNA, 25 bp, Homo sapien
gaccgagctccgacccgcgacacag

SEQ ID NO: 3547156 - DNA, 25 bp, Homo sapien
agcaggaccgagctccgacccgcga

SEQ ID NO: 3547157 - DNA, 25 bp, Homo sapien
tccagcaggaccgagctccgacccg

SEQ ID NO: 3547158 - DNA, 25 bp, Homo sapien
ccagccgtcgctgcgtgggcctccc

SEQ ID NO: 3547159 - DNA, 25 bp, Homo sapien
tccagccgtcgctgcgtgggcctcc

SEQ ID NO: 3547160 - DNA, 25 bp, Homo sapien
gctccggcgaggccaggaggccgtc

SEQ ID NO: 3547161 - DNA, 25 bp, Homo sapien
ccgctccggcgaggccaggaggccg

SEQ ID NO: 3547162 - DNA, 25 bp, Homo sapien
gcccgatccccgcgcggaaggctcg

SEQ ID NO: 3547163 - DNA, 25 bp, Homo sapien
gcggaaggctcggacccgggactca

SEQ ID NO: 3547164 - DNA, 25 bp, Homo sapien
gcggggtgcgccgtgcaccggcggc

SEQ ID NO: 3547165 - DNA, 25 bp, Homo sapien
gtgcgccgtgcaccggcggcgagcg

SEQ ID NO: 3547166 - DNA, 25 bp, Homo sapien
gggcgcacggctttgctgatccctg

SEQ ID NO: 3547167 - DNA, 25 bp, Homo sapien
ctcggggcgcacggctttgctgatc

SEQ ID NO: 3547168 - DNA, 25 bp, Homo sapien
ttccagtcttcgctccgccggcggc

SEQ ID NO: 3547169 - DNA, 25 bp, Homo sapien
tccagtcttcgctccgccggcggcc

SEQ ID NO: 3547170 - DNA, 25 bp, Homo sapien
tccactatcggactgccgccttgag

SEQ ID NO: 3547171 - DNA, 25 bp, Homo sapien
taaataagggatgctcgctgtacag

SEQ ID NO: 3547172 - DNA, 25 bp, Homo sapien
gctccgtgacagttctcagcggcct

SEQ ID NO: 3547173 - DNA, 25 bp, Homo sapien
tacacactcgccctgaataaataag

SEQ ID NO: 3547174 - DNA, 25 bp, Homo sapien
gttcggcgcgggctgcaacgtttct

SEQ ID NO: 3547175 - DNA, 25 bp, Homo sapien
atggcgtagacctgtgccctccgag

SEQ ID NO: 3547176 - DNA, 25 bp, Homo sapien
gggatcctttgtgctgcccggcgtt

SEQ ID NO: 3547177 - DNA, 25 bp, Homo sapien
cgctccatctccgaaactgcgtggg

SEQ ID NO: 3547178 - DNA, 25 bp, Homo sapien
caagaaccttcagtgcatcttcaaa

SEQ ID NO: 3547179 - DNA, 25 bp, Homo sapien
aaatgtctccaagaaccttcagtgc

SEQ ID NO: 3547180 - DNA, 25 bp, Homo sapien
aatgtctccaagaaccttcagtgca

SEQ ID NO: 3547181 - DNA, 25 bp, Homo sapien
tcaaatgtctccaagaaccttcagt

SEQ ID NO: 3547182 - DNA, 25 bp, Homo sapien
agatctaacatgtcacccagggacc

SEQ ID NO: 3547183 - DNA, 25 bp, Homo sapien
tttttaattacatacaaagatctaa

SEQ ID NO: 3547184 - DNA, 25 bp, Homo sapien
tctaacatgtcacccagggaccatt

SEQ ID NO: 3547185 - DNA, 25 bp, Homo sapien
ttttaattacatacaaagatctaac

SEQ ID NO: 3547186 - DNA, 25 bp, Homo sapien
ccactgctctgtttggccaccagtc

SEQ ID NO: 3547187 - DNA, 25 bp, Homo sapien
ctctcttcagcaatggtgaggcgga

SEQ ID NO: 3547188 - DNA, 25 bp, Homo sapien
gcaatggtgaggcggataccctttc

SEQ ID NO: 3547189 - DNA, 25 bp, Homo sapien
ctctgtttggccaccagtctcttgt

SEQ ID NO: 3547190 - DNA, 25 bp, Homo sapien
ttgaaaggtcgagtggcaaatctgt

SEQ ID NO: 3547191 - DNA, 25 bp, Homo sapien
tgaaaggtcgagtggcaaatctgtt

SEQ ID NO: 3547192 - DNA, 25 bp, Homo sapien
tgttgaaaggtcgagtggcaaatct

SEQ ID NO: 3547193 - DNA, 25 bp, Homo sapien
aatgttgaaaggtcgagtggcaaat

SEQ ID NO: 3547194 - DNA, 25 bp, Homo sapien
gtcaaaagatccagggtgcctctct

SEQ ID NO: 3547195 - DNA, 25 bp, Homo sapien
tcacatgaaccacgtcaaaagatcc

SEQ ID NO: 3547196 - DNA, 25 bp, Homo sapien
acgtcaaaagatccagggtgcctct

SEQ ID NO: 3547197 - DNA, 25 bp, Homo sapien
tttcacatgaaccacgtcaaaagat

SEQ ID NO: 3547198 - DNA, 25 bp, Homo sapien
tggtgatcacaccaattcttcatac

SEQ ID NO: 3547199 - DNA, 25 bp, Homo sapien
ggtgatcacaccaattcttcataca

SEQ ID NO: 3547200 - DNA, 25 bp, Homo sapien
caattcttcatacacaggttagcac

SEQ ID NO: 3547201 - DNA, 25 bp, Homo sapien
tcacaccaattcttcatacacaggt

SEQ ID NO: 3547202 - DNA, 25 bp, Homo sapien
agatggtgcgagcatcatgagtccc

SEQ ID NO: 3547203 - DNA, 25 bp, Homo sapien
gtgcgagcatcatgagtccccagat

SEQ ID NO: 3547204 - DNA, 25 bp, Homo sapien
atgagggattcctttggtgtccaca

SEQ ID NO: 3547205 - DNA, 25 bp, Homo sapien
ggatcagggtagcagatggtgcgag

SEQ ID NO: 3547206 - DNA, 25 bp, Homo sapien
acagaaattccctcctgtcttgcca

SEQ ID NO: 3547207 - DNA, 25 bp, Homo sapien
cagaaattccctcctgtcttgccaa

SEQ ID NO: 3547208 - DNA, 25 bp, Homo sapien
tggaggtttccagcttgccgacaac

SEQ ID NO: 3547209 - DNA, 25 bp, Homo sapien
gctaataccactgatgaacccacca

SEQ ID NO: 3547210 - DNA, 25 bp, Homo sapien
gggaaggtcgcaacaacagttatct

SEQ ID NO: 3547211 - DNA, 25 bp, Homo sapien
gctattcgttgaacccatcctggag

SEQ ID NO: 3547212 - DNA, 25 bp, Homo sapien
aggccctgaagggcttcacgaccaa

SEQ ID NO: 3547213 - DNA, 25 bp, Homo sapien
tctcttaccccaaggacttcacctg

SEQ ID NO: 3547214 - DNA, 25 bp, Homo sapien
cttaccccaaggacttcacctgtgt

SEQ ID NO: 3547215 - DNA, 25 bp, Homo sapien
aaacaaacctggagagcatcctctc

SEQ ID NO: 3547216 - DNA, 25 bp, Homo sapien
ggacttgaagggcacatgctactca

SEQ ID NO: 3547217 - DNA, 25 bp, Homo sapien
gatttaccggctcaggtacaccgag

SEQ ID NO: 3547218 - DNA, 25 bp, Homo sapien
tacaccgaggttactggcttgaaaa

SEQ ID NO: 3547219 - DNA, 25 bp, Homo sapien
tgagtgctacatcaacagggacccc

SEQ ID NO: 3547220 - DNA, 25 bp, Homo sapien
tcaatagtttttacagaggctgacc

SEQ ID NO: 3547221 - DNA, 25 bp, Homo sapien
gagttggatcagcactgttcaccca

SEQ ID NO: 3547222 - DNA, 25 bp, Homo sapien
catattacatagctcgtcagtggtg

SEQ ID NO: 3547223 - DNA, 25 bp, Homo sapien
taactctggcggttcaatgtgcatg

SEQ ID NO: 3547224 - DNA, 25 bp, Homo sapien
caaaaggcattcctatgacccagga

SEQ ID NO: 3547225 - DNA, 25 bp, Homo sapien
gctaccttcctgacacatgtatgtg

SEQ ID NO: 3547226 - DNA, 25 bp, Homo sapien
gagccagcaggagtagcctcattag

SEQ ID NO: 3547227 - DNA, 25 bp, Homo sapien
gaaattccaagggatctagtagctc

SEQ ID NO: 3547228 - DNA, 25 bp, Homo sapien
caggtttctgcgatgcagcaccaga

SEQ ID NO: 3547229 - DNA, 25 bp, Homo sapien
gtgtccgctatccaccaaaagggct

SEQ ID NO: 3547230 - DNA, 25 bp, Homo sapien
gcgagtatatgaccccagggcctga

SEQ ID NO: 3547231 - DNA, 25 bp, Homo sapien
tcaggttagggcgagcgctacctct

SEQ ID NO: 3547232 - DNA, 25 bp, Homo sapien
atttaacaatctctggctcttccag

SEQ ID NO: 3547233 - DNA, 25 bp, Homo sapien
catatttaacaatctctggctcttc

SEQ ID NO: 3547234 - DNA, 25 bp, Homo sapien
tatttaacaatctctggctcttcca

SEQ ID NO: 3547235 - DNA, 25 bp, Homo sapien
ggcatatttaacaatctctggctct

SEQ ID NO: 3547236 - DNA, 25 bp, Homo sapien
gccctgccttgcaattctactctgg

SEQ ID NO: 3547237 - DNA, 25 bp, Homo sapien
tcctgtccccaactgtagacccctc

SEQ ID NO: 3547238 - DNA, 25 bp, Homo sapien
ttttcagtgatctgtttcctgtccc

SEQ ID NO: 3547239 - DNA, 25 bp, Homo sapien
ggcctgtatgtccacagatccattt

SEQ ID NO: 3547240 - DNA, 25 bp, Homo sapien
agccataggctatgtcagaatcagc

SEQ ID NO: 3547241 - DNA, 25 bp, Homo sapien
caacatgagccataggctatgtcag

SEQ ID NO: 3547242 - DNA, 25 bp, Homo sapien
gtcagaatcagcctcatccctatga

SEQ ID NO: 3547243 - DNA, 25 bp, Homo sapien
ctatgaacccttaggacattgtctt

SEQ ID NO: 3547244 - DNA, 25 bp, Homo sapien
caactgtgagcactttccgggctgg

SEQ ID NO: 3547245 - DNA, 25 bp, Homo sapien
gatggtaaaggtgaagaggcacctt

SEQ ID NO: 3547246 - DNA, 25 bp, Homo sapien
gccttgcatacaggcagtgctcaga

SEQ ID NO: 3547247 - DNA, 25 bp, Homo sapien
gtttcccagcgatggttccagagcc

SEQ ID NO: 3547248 - DNA, 25 bp, Homo sapien
aattggagcccattttgcccaggga

SEQ ID NO: 3547249 - DNA, 25 bp, Homo sapien
aactgagagacaccaatgagagtcc

SEQ ID NO: 3547250 - DNA, 25 bp, Homo sapien
tgtttgtggacaacagacgggcccg

SEQ ID NO: 3547251 - DNA, 25 bp, Homo sapien
tgagagtccattctctactgagcaa

SEQ ID NO: 3547252 - DNA, 25 bp, Homo sapien
gcatttggcgggaactggatctgcc

SEQ ID NO: 3547253 - DNA, 25 bp, Homo sapien
ttggagacgggcaggaaattgcacc

SEQ ID NO: 3547254 - DNA, 25 bp, Homo sapien
gagtggatcccctgttgcagaagta

SEQ ID NO: 3547255 - DNA, 25 bp, Homo sapien
aattgcaccccttgtatcttccaag

SEQ ID NO: 3547256 - DNA, 25 bp, Homo sapien
atggctttcaggaccctcctggtct

SEQ ID NO: 3547257 - DNA, 25 bp, Homo sapien
catggctttcaggaccctcctggtc

SEQ ID NO: 3547258 - DNA, 25 bp, Homo sapien
aacatggctttcaggaccctcctgg

SEQ ID NO: 3547259 - DNA, 25 bp, Homo sapien
agaacatggctttcaggaccctcct

SEQ ID NO: 3547260 - DNA, 25 bp, Homo sapien
tgctgtgcagccttatctttgcccc

SEQ ID NO: 3547261 - DNA, 25 bp, Homo sapien
ggtgtgatccagttcccagctgggc

SEQ ID NO: 3547262 - DNA, 25 bp, Homo sapien
ctcggtctctacactcgcttctgga

SEQ ID NO: 3547263 - DNA, 25 bp, Homo sapien
gccggaagatggtggccaatgagga

SEQ ID NO: 3547264 - DNA, 25 bp, Homo sapien
tcgaaagtgcctcttcagtgccaag

SEQ ID NO: 3547265 - DNA, 25 bp, Homo sapien
tggtccatgatctacttgccctgtg

SEQ ID NO: 3547266 - DNA, 25 bp, Homo sapien
caaaagtttcattcgctggtggcag

SEQ ID NO: 3547267 - DNA, 25 bp, Homo sapien
ttactctggaagcagccgactaggg

SEQ ID NO: 3547268 - DNA, 25 bp, Homo sapien
tctggctcgtctcaaaagcttgctc

SEQ ID NO: 3547269 - DNA, 25 bp, Homo sapien
ccagccgttgtccttcaccatgtgt

SEQ ID NO: 3547270 - DNA, 25 bp, Homo sapien
gtgacatttcaatgatgtatttccc

SEQ ID NO: 3547271 - DNA, 25 bp, Homo sapien
tgtccttcaccatgtgtgacatttc

SEQ ID NO: 3547272 - DNA, 25 bp, Homo sapien
tcagctggcccgcaacccacgttga

SEQ ID NO: 3547273 - DNA, 25 bp, Homo sapien
agctaccgagtggagccccgtgagc

SEQ ID NO: 3547274 - DNA, 25 bp, Homo sapien
ccccgtgagcaagaggcgctgttca

SEQ ID NO: 3547275 - DNA, 25 bp, Homo sapien
agaaaatgtcagctaccgagtggag

SEQ ID NO: 3547276 - DNA, 25 bp, Homo sapien
gactgaaggcacaagatcacctgat

SEQ ID NO: 3547277 - DNA, 25 bp, Homo sapien
cacacgcacaaggaaagaggtagac

SEQ ID NO: 3547278 - DNA, 25 bp, Homo sapien
ccctttaagactagagcctgggcct

SEQ ID NO: 3547279 - DNA, 25 bp, Homo sapien
gattgagaccctctttgcaaaaggg

SEQ ID NO: 3547280 - DNA, 25 bp, Homo sapien
ttaaacaggtaggctcggccatggc

SEQ ID NO: 3547281 - DNA, 25 bp, Homo sapien
gagttaaacaggtaggctcggccat

SEQ ID NO: 3547282 - DNA, 25 bp, Homo sapien
agttaaacaggtaggctcggccatg

SEQ ID NO: 3547283 - DNA, 25 bp, Homo sapien
ggagttaaacaggtaggctcggcca

SEQ ID NO: 3547284 - DNA, 25 bp, Homo sapien
tgatgttcaggctagcctggtgcgc

SEQ ID NO: 3547285 - DNA, 25 bp, Homo sapien
ccctgggtgatgttcaggctagcct

SEQ ID NO: 3547286 - DNA, 25 bp, Homo sapien
ggctagcctggtgcgcgagaggagg

SEQ ID NO: 3547287 - DNA, 25 bp, Homo sapien
ggaatggcaggtccccgcttcgcgt

SEQ ID NO: 3547288 - DNA, 25 bp, Homo sapien
ccaggtgtgcacggcagtggacaca

SEQ ID NO: 3547289 - DNA, 25 bp, Homo sapien
cacagctgtaagtgcggtgacagcg

SEQ ID NO: 3547290 - DNA, 25 bp, Homo sapien
cagatagctgcggaaagtcttggtg

SEQ ID NO: 3547291 - DNA, 25 bp, Homo sapien
taagctcatcgtgtttggccaggtg

SEQ ID NO: 3547292 - DNA, 25 bp, Homo sapien
agcccccgcagagacggtcgcaggt

SEQ ID NO: 3547293 - DNA, 25 bp, Homo sapien
cgcagagacggtcgcaggtgaagca

SEQ ID NO: 3547294 - DNA, 25 bp, Homo sapien
gcaggtgaagcagcggagcaggttg

SEQ ID NO: 3547295 - DNA, 25 bp, Homo sapien
ggaggacaatgccctggtgggctgg

SEQ ID NO: 3547296 - DNA, 25 bp, Homo sapien
cagacgagaaccagatagaaataga

SEQ ID NO: 3547297 - DNA, 25 bp, Homo sapien
gacgagaaccagatagaaatagaag

SEQ ID NO: 3547298 - DNA, 25 bp, Homo sapien
ccccagacgagaaccagatagaaat

SEQ ID NO: 3547299 - DNA, 25 bp, Homo sapien
gagaagtgttggggggctgcccggc

SEQ ID NO: 3547300 - DNA, 25 bp, Homo sapien
aggacatcaggggagctgcgacctc

SEQ ID NO: 3547301 - DNA, 25 bp, Homo sapien
gagctgcgacctcaggaggacccct

SEQ ID NO: 3547302 - DNA, 25 bp, Homo sapien
caggaggacccctcctgagggaatg

SEQ ID NO: 3547303 - DNA, 25 bp, Homo sapien
tcaggaggacccctcctgagggaat

SEQ ID NO: 3547304 - DNA, 25 bp, Homo sapien
cacagcatccagttgcattgtcgcc

SEQ ID NO: 3547305 - DNA, 25 bp, Homo sapien
cccacagcatccagttgcattgtcg

SEQ ID NO: 3547306 - DNA, 25 bp, Homo sapien
agcatccagttgcattgtcgccctg

SEQ ID NO: 3547307 - DNA, 25 bp, Homo sapien
cagcatccagttgcattgtcgccct

SEQ ID NO: 3547308 - DNA, 25 bp, Homo sapien
aacagtaccaaagccctcacgtgtg

SEQ ID NO: 3547309 - DNA, 25 bp, Homo sapien
gcatgcaggcaggtatacaaaccct

SEQ ID NO: 3547310 - DNA, 25 bp, Homo sapien
gccatgggagcaacgtcatctgcaa

SEQ ID NO: 3547311 - DNA, 25 bp, Homo sapien
ttcgtgaggctctgcatcgcacagg

SEQ ID NO: 3547312 - DNA, 25 bp, Homo sapien
caatgctagagcactaagcagagaa

SEQ ID NO: 3547313 - DNA, 25 bp, Homo sapien
gctgggcactctggcaatgctagag

SEQ ID NO: 3547314 - DNA, 25 bp, Homo sapien
ttagccagggcatacaggctctcct

SEQ ID NO: 3547315 - DNA, 25 bp, Homo sapien
gcctaagtctggttcagagatgcca

SEQ ID NO: 3547316 - DNA, 25 bp, Homo sapien
tccttgccaagagaccacctttcag

SEQ ID NO: 3547317 - DNA, 25 bp, Homo sapien
caagagaccacctttcagtctctgc

SEQ ID NO: 3547318 - DNA, 25 bp, Homo sapien
tgccttcaactttgccagcgagttc

SEQ ID NO: 3547319 - DNA, 25 bp, Homo sapien
ttcaactttgccagcgagttcccct

SEQ ID NO: 3547320 - DNA, 25 bp, Homo sapien
ccatctcggatcacagggagaagca

SEQ ID NO: 3547321 - DNA, 25 bp, Homo sapien
tccaaataattagcagcaccgccag

SEQ ID NO: 3547322 - DNA, 25 bp, Homo sapien
aaataagtgcgggaatcgtcagagc

SEQ ID NO: 3547323 - DNA, 25 bp, Homo sapien
ggaaccaggtgcgaatctcgtgctt

SEQ ID NO: 3547324 - DNA, 25 bp, Homo sapien
cttgaggtctgctccagagatctcc

SEQ ID NO: 3547325 - DNA, 25 bp, Homo sapien
tgaggtctgctccagagatctccgt

SEQ ID NO: 3547326 - DNA, 25 bp, Homo sapien
ggtctgctccagagatctccgtcta

SEQ ID NO: 3547327 - DNA, 25 bp, Homo sapien
tgctccagagatctccgtctatctc

SEQ ID NO: 3547328 - DNA, 25 bp, Homo sapien
ggggcagaggttgtctctcgttctg

SEQ ID NO: 3547329 - DNA, 25 bp, Homo sapien
gtagttgggggctcaagactggggc

SEQ ID NO: 3547330 - DNA, 25 bp, Homo sapien
gcagaggttgtctctcgttctgtac

SEQ ID NO: 3547331 - DNA, 25 bp, Homo sapien
gagggtagttgggggctcaagactg

SEQ ID NO: 3547332 - DNA, 25 bp, Homo sapien
gtggaactgcatcataacactgtga

SEQ ID NO: 3547333 - DNA, 25 bp, Homo sapien
ccccgagtgatggtagtgggcccca

SEQ ID NO: 3547334 - DNA, 25 bp, Homo sapien
actacgcagtgcgtttgggccgccg

SEQ ID NO: 3547335 - DNA, 25 bp, Homo sapien
aagtctacagtgtgtcgccttctgc

SEQ ID NO: 3547336 - DNA, 25 bp, Homo sapien
ccttggaacagatgcggaggcaagc

SEQ ID NO: 3547337 - DNA, 25 bp, Homo sapien
tgctgcctgggacatagagatcatc

SEQ ID NO: 3547338 - DNA, 25 bp, Homo sapien
gctagtacctgtcactcctgggcga

SEQ ID NO: 3547339 - DNA, 25 bp, Homo sapien
tcctgggcgagatatggtgcaccac

SEQ ID NO: 3547340 - DNA, 25 bp, Homo sapien
tgaagtagagatcagcaggaagcct

SEQ ID NO: 3547341 - DNA, 25 bp, Homo sapien
aagtccgggcgtccccttcatgtgg

SEQ ID NO: 3547342 - DNA, 25 bp, Homo sapien
agaccattccatcgccctggattct

SEQ ID NO: 3547343 - DNA, 25 bp, Homo sapien
tggattctgcccggaccagcgacct

SEQ ID NO: 3547344 - DNA, 25 bp, Homo sapien
agcgacctcgccggactgaagattt

SEQ ID NO: 3547345 - DNA, 25 bp, Homo sapien
aaatggttggccaatccgccgcgaa

SEQ ID NO: 3547346 - DNA, 25 bp, Homo sapien
gaattcgagaaggtagctgcttgct

SEQ ID NO: 3547347 - DNA, 25 bp, Homo sapien
tcgtcggtaattggctgcgctggaa

SEQ ID NO: 3547348 - DNA, 25 bp, Homo sapien
gaagcctgtctggactgtaccacct

SEQ ID NO: 3547349 - DNA, 25 bp, Homo sapien
gctctcgtcttctcgcgtgcgtacg

SEQ ID NO: 3547350 - DNA, 25 bp, Homo sapien
ctcgcgtgcgtacgtcgttgtgttg

SEQ ID NO: 3547351 - DNA, 25 bp, Homo sapien
gtcttctcgcgtgcgtacgtcgttg

SEQ ID NO: 3547352 - DNA, 25 bp, Homo sapien
gtgcgcgctctcgtcttctcgcgtg

SEQ ID NO: 3547353 - DNA, 25 bp, Homo sapien
cgccgcggtcgccagggttcgcgcg

SEQ ID NO: 3547354 - DNA, 25 bp, Homo sapien
ggttcgcgcgcacgccccagatcgg

SEQ ID NO: 3547355 - DNA, 25 bp, Homo sapien
gtcgccagggttcgcgcgcacgccc

SEQ ID NO: 3547356 - DNA, 25 bp, Homo sapien
tgcagccaatcaggccgcgaggtcg

SEQ ID NO: 3547357 - DNA, 25 bp, Homo sapien
tcctaccgccaccagccgagtgctc

SEQ ID NO: 3547358 - DNA, 25 bp, Homo sapien
gttctctctcacccgtccgcttcct

SEQ ID NO: 3547359 - DNA, 25 bp, Homo sapien
ttcctcctcctaccgccaccagccg

SEQ ID NO: 3547360 - DNA, 25 bp, Homo sapien
tcctcctaccgccaccagccgagtg

SEQ ID NO: 3547361 - DNA, 25 bp, Homo sapien
agtactttttaacagcagcctgtgg

SEQ ID NO: 3547362 - DNA, 25 bp, Homo sapien
cagcctgtggaattttagccttggt

SEQ ID NO: 3547363 - DNA, 25 bp, Homo sapien
gtaacctggttgaactctgcatctg

SEQ ID NO: 3547364 - DNA, 25 bp, Homo sapien
gaattttagccttggtgtctaagaa

SEQ ID NO: 3547365 - DNA, 25 bp, Homo sapien
tatcttgatctgtctgactgtccat

SEQ ID NO: 3547366 - DNA, 25 bp, Homo sapien
gagctgtatcttgatctgtctgact

SEQ ID NO: 3547367 - DNA, 25 bp, Homo sapien
cctccatccatgagctgtatcttga

SEQ ID NO: 3547368 - DNA, 25 bp, Homo sapien
tgtatcttgatctgtctgactgtcc

SEQ ID NO: 3547369 - DNA, 25 bp, Homo sapien
ggaagcctatcttatgacagcttgc

SEQ ID NO: 3547370 - DNA, 25 bp, Homo sapien
gagccagacccacctttaggctata

SEQ ID NO: 3547371 - DNA, 25 bp, Homo sapien
aatctgtcgcgccacattgtggcct

SEQ ID NO: 3547372 - DNA, 25 bp, Homo sapien
accagtccgttacgacaatctgtcg

SEQ ID NO: 3547373 - DNA, 25 bp, Homo sapien
tctcagtagccccacgaggggagga

SEQ ID NO: 3547374 - DNA, 25 bp, Homo sapien
cacctatgagatttcggtgtgagcc

SEQ ID NO: 3547375 - DNA, 25 bp, Homo sapien
gatttcggtgtgagccttcggcacc

SEQ ID NO: 3547376 - DNA, 25 bp, Homo sapien
gggttggtggtaccacctatgagat

SEQ ID NO: 3547377 - DNA, 25 bp, Homo sapien
gtggacatttgtgcaattgctcgcc

SEQ ID NO: 3547378 - DNA, 25 bp, Homo sapien
tgatccctggaccagactcagtgga

SEQ ID NO: 3547379 - DNA, 25 bp, Homo sapien
ttgatccctggaccagactcagtgg

SEQ ID NO: 3547380 - DNA, 25 bp, Homo sapien
agtggacatttgtgcaattgctcgc

SEQ ID NO: 3547381 - DNA, 25 bp, Homo sapien
tctggaattttggtcacaagaggga

SEQ ID NO: 3547382 - DNA, 25 bp, Homo sapien
ccagttactaactacggaaatagca

SEQ ID NO: 3547383 - DNA, 25 bp, Homo sapien
cctctgctggtgctaagtgtgatta

SEQ ID NO: 3547384 - DNA, 25 bp, Homo sapien
aattatatatctatcctgggatggg

SEQ ID NO: 3547385 - DNA, 25 bp, Homo sapien
gcaggttaactagatatcggtgtca

SEQ ID NO: 3547386 - DNA, 25 bp, Homo sapien
gacatagtaacaggtatgaaagcct

SEQ ID NO: 3547387 - DNA, 25 bp, Homo sapien
gaaagcctgttgaaggcaggttaac

SEQ ID NO: 3547388 - DNA, 25 bp, Homo sapien
gaatataagctcttagccgggcgtg

SEQ ID NO: 3547389 - DNA, 25 bp, Homo sapien
gatgagcctacaaaagcatgtccct

SEQ ID NO: 3547390 - DNA, 25 bp, Homo sapien
ggttccctgcctgctagtgagatca

SEQ ID NO: 3547391 - DNA, 25 bp, Homo sapien
ggcagtcacacttcagccagtttga

SEQ ID NO: 3547392 - DNA, 25 bp, Homo sapien
gagatgtccatgagaaaaccaactg

SEQ ID NO: 3547393 - DNA, 25 bp, Homo sapien
catcctggcaaagagtccagtggtc

SEQ ID NO: 3547394 - DNA, 25 bp, Homo sapien
ttatcagcaggttcagtacagcagg

SEQ ID NO: 3547395 - DNA, 25 bp, Homo sapien
tggaaggcagcttttatcagcaggt

SEQ ID NO: 3547396 - DNA, 25 bp, Homo sapien
atcctggcaaagagtccagtggtcc

SEQ ID NO: 3547397 - DNA, 25 bp, Homo sapien
cctgggagctgcccatacctgggtg

SEQ ID NO: 3547398 - DNA, 25 bp, Homo sapien
tggcctgggagctgcccatacctgg

SEQ ID NO: 3547399 - DNA, 25 bp, Homo sapien
gggagctgcccatacctgggtggtc

SEQ ID NO: 3547400 - DNA, 25 bp, Homo sapien
tgggagctgcccatacctgggtggt

SEQ ID NO: 3547401 - DNA, 25 bp, Homo sapien
caatcttgggtccaacttgaggcaa

SEQ ID NO: 3547402 - DNA, 25 bp, Homo sapien
aactcactgggttgtggcaataggc

SEQ ID NO: 3547403 - DNA, 25 bp, Homo sapien
agaactctagggtatttaggacagg

SEQ ID NO: 3547404 - DNA, 25 bp, Homo sapien
gcagggtaagaacaactaggaacta

SEQ ID NO: 3547405 - DNA, 25 bp, Homo sapien
cttcttgtgatctgaatcagatggt

SEQ ID NO: 3547406 - DNA, 25 bp, Homo sapien
tcttgtgatctgaatcagatggtgt

SEQ ID NO: 3547407 - DNA, 25 bp, Homo sapien
ttcttgtgatctgaatcagatggtg

SEQ ID NO: 3547408 - DNA, 25 bp, Homo sapien
ttgtgatctgaatcagatggtgttt

SEQ ID NO: 3547409 - DNA, 25 bp, Homo sapien
tgtaggagacattaggtacctatca

SEQ ID NO: 3547410 - DNA, 25 bp, Homo sapien
ctgtaggagacattaggtacctatc

SEQ ID NO: 3547411 - DNA, 25 bp, Homo sapien
gtaggagacattaggtacctatcac

SEQ ID NO: 3547412 - DNA, 25 bp, Homo sapien
tagagtccctgtcccaagtcccaag

SEQ ID NO: 3547413 - DNA, 25 bp, Homo sapien
gaaaatcccaagtcggggcaactgc

SEQ ID NO: 3547414 - DNA, 25 bp, Homo sapien
ttcaggggaatttaggagtccagag

SEQ ID NO: 3547415 - DNA, 25 bp, Homo sapien
agaggtgctgctagagtccctgtcc

SEQ ID NO: 3547416 - DNA, 25 bp, Homo sapien
tgggaggctgaatatgcatcagacg

SEQ ID NO: 3547417 - DNA, 25 bp, Homo sapien
ggatcctgggtacggctctgtttgt

SEQ ID NO: 3547418 - DNA, 25 bp, Homo sapien
atgcatcagacgacactgctccggc

SEQ ID NO: 3547419 - DNA, 25 bp, Homo sapien
acaggatcctgggtacggctctgtt

SEQ ID NO: 3547420 - DNA, 25 bp, Homo sapien
gagggaggaaatctctcctgctctt

SEQ ID NO: 3547421 - DNA, 25 bp, Homo sapien
tgctccattatgaaggaacagactt

SEQ ID NO: 3547422 - DNA, 25 bp, Homo sapien
aaggtccaggtgagtagagggagga

SEQ ID NO: 3547423 - DNA, 25 bp, Homo sapien
tctccatgtttaggcctccccattt

SEQ ID NO: 3547424 - DNA, 25 bp, Homo sapien
cggaggctgctgttatcatgggaac

SEQ ID NO: 3547425 - DNA, 25 bp, Homo sapien
catggtccctgtgataggattgaaa

SEQ ID NO: 3547426 - DNA, 25 bp, Homo sapien
tgggaaccaggcagatcaatcatcc

SEQ ID NO: 3547427 - DNA, 25 bp, Homo sapien
gatcagattcgtgctgcctgtcagc

SEQ ID NO: 3547428 - DNA, 25 bp, Homo sapien
tttctagctaccactgcctaacttg

SEQ ID NO: 3547429 - DNA, 25 bp, Homo sapien
gcctaacttgttaccaacatcttta

SEQ ID NO: 3547430 - DNA, 25 bp, Homo sapien
ctttacataagaaaagaactgggag

SEQ ID NO: 3547431 - DNA, 25 bp, Homo sapien
tattcttcctcgtgatactgagtat

SEQ ID NO: 3547432 - DNA, 25 bp, Homo sapien
gaattattctggctgtcttccatgc

SEQ ID NO: 3547433 - DNA, 25 bp, Homo sapien
gtcaggcaactagaattattctggc

SEQ ID NO: 3547434 - DNA, 25 bp, Homo sapien
ggcaactagaattattctggctgtc

SEQ ID NO: 3547435 - DNA, 25 bp, Homo sapien
aaacaagtcaggcaactagaattat

SEQ ID NO: 3547436 - DNA, 25 bp, Homo sapien
tcattcatgtatcgctagtgcccag

SEQ ID NO: 3547437 - DNA, 25 bp, Homo sapien
ctagcaagggtagaaatagctaact

SEQ ID NO: 3547438 - DNA, 25 bp, Homo sapien
gtaacttaataaggacctactagca

SEQ ID NO: 3547439 - DNA, 25 bp, Homo sapien
tgcaaggcactatccatataaatat

SEQ ID NO: 3547440 - DNA, 25 bp, Homo sapien
tccacagtccgggtatgcgttgcct

SEQ ID NO: 3547441 - DNA, 25 bp, Homo sapien
gacttagggctccacagtccgggta

SEQ ID NO: 3547442 - DNA, 25 bp, Homo sapien
agcgcttccgacttagggctccaca

SEQ ID NO: 3547443 - DNA, 25 bp, Homo sapien
tccgggtatgcgttgcctaggttac

SEQ ID NO: 3547444 - DNA, 25 bp, Homo sapien
ctcgcacctccgctagccggctgag

SEQ ID NO: 3547445 - DNA, 25 bp, Homo sapien
ctccgctagccggctgagagccacg

SEQ ID NO: 3547446 - DNA, 25 bp, Homo sapien
tccgctagccggctgagagccacgc

SEQ ID NO: 3547447 - DNA, 25 bp, Homo sapien
gcacctccgctagccggctgagagc

SEQ ID NO: 3547448 - DNA, 25 bp, Homo sapien
tcctggtccgaagccgagtgcggtt

SEQ ID NO: 3547449 - DNA, 25 bp, Homo sapien
gcctgagccccaaacagtgccgtga

SEQ ID NO: 3547450 - DNA, 25 bp, Homo sapien
agctcctgacttgtccgcgccagga

SEQ ID NO: 3547451 - DNA, 25 bp, Homo sapien
tggaggctttcctggtccgaagccg

SEQ ID NO: 3547452 - DNA, 25 bp, Homo sapien
ctttctcaaggagccgcttgtcatt

SEQ ID NO: 3547453 - DNA, 25 bp, Homo sapien
cattggacaatgctttcaaggagta

SEQ ID NO: 3547454 - DNA, 25 bp, Homo sapien
gcgctgtctccgtgtctgccgttgg

SEQ ID NO: 3547455 - DNA, 25 bp, Homo sapien
gcttgtcattggatgcctcaggcac

SEQ ID NO: 3547456 - DNA, 25 bp, Homo sapien
agtgtagatgaaaagctgggaacct

SEQ ID NO: 3547457 - DNA, 25 bp, Homo sapien
ctcttggcagtgtagatgaaaagct

SEQ ID NO: 3547458 - DNA, 25 bp, Homo sapien
cactcttggcagtgtagatgaaaag

SEQ ID NO: 3547459 - DNA, 25 bp, Homo sapien
tagatgaaaagctgggaaccttttg

SEQ ID NO: 3547460 - DNA, 25 bp, Homo sapien
tgccaccagtgccattatggcgtgt

SEQ ID NO: 3547461 - DNA, 25 bp, Homo sapien
tttctccccatagatggacttgcca

SEQ ID NO: 3547462 - DNA, 25 bp, Homo sapien
ccccatagatggacttgccaccagt

SEQ ID NO: 3547463 - DNA, 25 bp, Homo sapien
ccattatggcgtgtgaagtcaccac

SEQ ID NO: 3547464 - DNA, 25 bp, Homo sapien
gaataattctgtgaaagcaggaact

SEQ ID NO: 3547465 - DNA, 25 bp, Homo sapien
agctcgaaggagatgcggcccaggg

SEQ ID NO: 3547466 - DNA, 25 bp, Homo sapien
acagctcgaaggagatgcggcccag

SEQ ID NO: 3547467 - DNA, 25 bp, Homo sapien
ctcgaaggagatgcggcccaggggc

SEQ ID NO: 3547468 - DNA, 25 bp, Homo sapien
gaaggagatgcggcccaggggctca

SEQ ID NO: 3547469 - DNA, 25 bp, Homo sapien
gatgtcaaagaacacggggttgacc

SEQ ID NO: 3547470 - DNA, 25 bp, Homo sapien
tgtcaaagaacacggggttgaccat

SEQ ID NO: 3547471 - DNA, 25 bp, Homo sapien
catccacggtgatgtcaaagaacac

SEQ ID NO: 3547472 - DNA, 25 bp, Homo sapien
gtgatgtcaaagaacacggggttga

SEQ ID NO: 3547473 - DNA, 25 bp, Homo sapien
ctgcacagcttggttagacctagat

SEQ ID NO: 3547474 - DNA, 25 bp, Homo sapien
cattccttcttagttgacctgcaca

SEQ ID NO: 3547475 - DNA, 25 bp, Homo sapien
ttgtcaggcaccctacaggaaggcc

SEQ ID NO: 3547476 - DNA, 25 bp, Homo sapien
gaggcatctagggaattgtcaggca

SEQ ID NO: 3547477 - DNA, 25 bp, Homo sapien
gaggcgaccgttgttatcgagcatt

SEQ ID NO: 3547478 - DNA, 25 bp, Homo sapien
atgggtggttccgtcaggcgcttcc

SEQ ID NO: 3547479 - DNA, 25 bp, Homo sapien
ccttcctttgagagaggtttccgct

SEQ ID NO: 3547480 - DNA, 25 bp, Homo sapien
tcttcgttgcccagtttccgctcag

SEQ ID NO: 3547481 - DNA, 25 bp, Homo sapien
gatggaacatggccaaacttcagtc

SEQ ID NO: 3547482 - DNA, 25 bp, Homo sapien
tttgcagctttgtgtccctggtgat

SEQ ID NO: 3547483 - DNA, 25 bp, Homo sapien
tgtccctggtgatgttggaacatta

SEQ ID NO: 3547484 - DNA, 25 bp, Homo sapien
gctttgtgtccctggtgatgttgga

SEQ ID NO: 3547485 - DNA, 25 bp, Homo sapien
tatgggagcaaagtaaataatttat

SEQ ID NO: 3547486 - DNA, 25 bp, Homo sapien
ttcttaaacaataccccaccacaga

SEQ ID NO: 3547487 - DNA, 25 bp, Homo sapien
ttagctagacttcctaatactggca

SEQ ID NO: 3547488 - DNA, 25 bp, Homo sapien
cttggcccctgcagaggttttagct

SEQ ID NO: 3547489 - DNA, 25 bp, Homo sapien
tgactctgaggaagggtcaggccac

SEQ ID NO: 3547490 - DNA, 25 bp, Homo sapien
gactctgaggaagggtcaggccaca

SEQ ID NO: 3547491 - DNA, 25 bp, Homo sapien
ctgactctgaggaagggtcaggcca

SEQ ID NO: 3547492 - DNA, 25 bp, Homo sapien
gactctccagagaccctataggtgg

SEQ ID NO: 3547493 - DNA, 25 bp, Homo sapien
gagcctagtagttcagagtgaccag

SEQ ID NO: 3547494 - DNA, 25 bp, Homo sapien
tctgtcagatggtaggtaggcgttc

SEQ ID NO: 3547495 - DNA, 25 bp, Homo sapien
tttcaaggtctggtgtccaacggcc

SEQ ID NO: 3547496 - DNA, 25 bp, Homo sapien
tctgagttaggtgccctgacttcag

SEQ ID NO: 3547497 - DNA, 25 bp, Homo sapien
ggtgctctgcagaggactagctctg

SEQ ID NO: 3547498 - DNA, 25 bp, Homo sapien
ctgcagagtctgagttaggtgccct

SEQ ID NO: 3547499 - DNA, 25 bp, Homo sapien
cagagtctgagttaggtgccctgac

SEQ ID NO: 3547500 - DNA, 25 bp, Homo sapien
tattgccccaagaggacaaggagtt

SEQ ID NO: 3547501 - DNA, 25 bp, Homo sapien
tgatgtacagataccaggagatggc

SEQ ID NO: 3547502 - DNA, 25 bp, Homo sapien
gcaacaggtgtttgtccacagaggg

SEQ ID NO: 3547503 - DNA, 25 bp, Homo sapien
taagcactctcggttcagccttcgg

SEQ ID NO: 3547504 - DNA, 25 bp, Homo sapien
acaggatgcagcagtgagctggaac

SEQ ID NO: 3547505 - DNA, 25 bp, Homo sapien
aagctgacaggatgcagcagtgagc

SEQ ID NO: 3547506 - DNA, 25 bp, Homo sapien
tgaagaaggggctacaagctgacag

SEQ ID NO: 3547507 - DNA, 25 bp, Homo sapien
gggctacaagctgacaggatgcagc

SEQ ID NO: 3547508 - DNA, 25 bp, Homo sapien
cagaaaagctaacctgaggaaccgg

SEQ ID NO: 3547509 - DNA, 25 bp, Homo sapien
tgcagaaaagctaacctgaggaacc

SEQ ID NO: 3547510 - DNA, 25 bp, Homo sapien
agctgcagaaaagctaacctgagga

SEQ ID NO: 3547511 - DNA, 25 bp, Homo sapien
cctgcagaaggacatcacagaacac

SEQ ID NO: 3547512 - DNA, 25 bp, Homo sapien
gtatttgcaacccttatttgtggac

SEQ ID NO: 3547513 - DNA, 25 bp, Homo sapien
tatttgcaacccttatttgtggaca

SEQ ID NO: 3547514 - DNA, 25 bp, Homo sapien
ttctgtatttgcaacccttatttgt

SEQ ID NO: 3547515 - DNA, 25 bp, Homo sapien
ctgtatttgcaacccttatttgtgg

SEQ ID NO: 3547516 - DNA, 25 bp, Homo sapien
ttttctataagcaggagtgacagcc

SEQ ID NO: 3547517 - DNA, 25 bp, Homo sapien
gcttttgaccaaataggcttgcccc

SEQ ID NO: 3547518 - DNA, 25 bp, Homo sapien
tccccatgccctgattgttgagaat

SEQ ID NO: 3547519 - DNA, 25 bp, Homo sapien
tgcacattgggagagatgattatcc

SEQ ID NO: 3547520 - DNA, 25 bp, Homo sapien
taaagtggcttgcataagtgtcaga

SEQ ID NO: 3547521 - DNA, 25 bp, Homo sapien
gcttgctcttactcaaaccagaagt

SEQ ID NO: 3547522 - DNA, 25 bp, Homo sapien
tctttcttgagtcttcggtgacaca

SEQ ID NO: 3547523 - DNA, 25 bp, Homo sapien
tcagaggtaaccacttggatccaga

SEQ ID NO: 3547524 - DNA, 25 bp, Homo sapien
ttggcctgcagcccagaatccagca

SEQ ID NO: 3547525 - DNA, 25 bp, Homo sapien
aggagggttgttttccctgaacatg

SEQ ID NO: 3547526 - DNA, 25 bp, Homo sapien
ctgtggtctggtgctactgtgacag

SEQ ID NO: 3547527 - DNA, 25 bp, Homo sapien
ccctggaatgcagttggcctgcagc

SEQ ID NO: 3547528 - DNA, 25 bp, Homo sapien
ctcctcttgtaggaaggagaaaggc

SEQ ID NO: 3547529 - DNA, 25 bp, Homo sapien
cctcttgtaggaaggagaaaggcat

SEQ ID NO: 3547530 - DNA, 25 bp, Homo sapien
ctctctcctcttgtaggaaggagaa

SEQ ID NO: 3547531 - DNA, 25 bp, Homo sapien
gatctctctcctcttgtaggaagga

SEQ ID NO: 3547532 - DNA, 25 bp, Homo sapien
tactggctttctgtgcgtcaagaca

SEQ ID NO: 3547533 - DNA, 25 bp, Homo sapien
acccaagctctagtccctgtagtag

SEQ ID NO: 3547534 - DNA, 25 bp, Homo sapien
cgagtggttgatactttgcccaaag

SEQ ID NO: 3547535 - DNA, 25 bp, Homo sapien
cccaggcagataacaaagcctatac

SEQ ID NO: 3547536 - DNA, 25 bp, Homo sapien
ccagaaacactggtataggtgggac

SEQ ID NO: 3547537 - DNA, 25 bp, Homo sapien
cactagagaagtgtcctttgtccca

SEQ ID NO: 3547538 - DNA, 25 bp, Homo sapien
ggtactgactgcacttctatttgga

SEQ ID NO: 3547539 - DNA, 25 bp, Homo sapien
cacaggctttggaatggcatagacc

SEQ ID NO: 3547540 - DNA, 25 bp, Homo sapien
ctttgggtactcttgcttgctgact

SEQ ID NO: 3547541 - DNA, 25 bp, Homo sapien
ctgcatacactctaagccaaacagg

SEQ ID NO: 3547542 - DNA, 25 bp, Homo sapien
tgctgacttctgcatacactctaag

SEQ ID NO: 3547543 - DNA, 25 bp, Homo sapien
tcctttgggtactcttgcttgctga

SEQ ID NO: 3547544 - DNA, 25 bp, Homo sapien
ccccacacaacttttgcattggttt

SEQ ID NO: 3547545 - DNA, 25 bp, Homo sapien
ttggtttctcaatgtctttgtgggc

SEQ ID NO: 3547546 - DNA, 25 bp, Homo sapien
ttccccacacaacttttgcattggt

SEQ ID NO: 3547547 - DNA, 25 bp, Homo sapien
ggtttctcaatgtctttgtgggcat

SEQ ID NO: 3547548 - DNA, 25 bp, Homo sapien
tgtgagccacctactttcatttctt

SEQ ID NO: 3547549 - DNA, 25 bp, Homo sapien
gagtcttgcattgtcgccccagctg

SEQ ID NO: 3547550 - DNA, 25 bp, Homo sapien
cggagtcttgcattgtcgccccagc

SEQ ID NO: 3547551 - DNA, 25 bp, Homo sapien
aggtgtgagccacctactttcattt

SEQ ID NO: 3547552 - DNA, 25 bp, Homo sapien
gattgcatcttacgagagatctctg

SEQ ID NO: 3547553 - DNA, 25 bp, Homo sapien
ctgagtgggaaccagaacagtactc

SEQ ID NO: 3547554 - DNA, 25 bp, Homo sapien
ggtagacattgcctgatagattgca

SEQ ID NO: 3547555 - DNA, 25 bp, Homo sapien
cagaacagtactcatgccctgatag

SEQ ID NO: 3547556 - DNA, 25 bp, Homo sapien
atcacctgaggtccggagttcaaga

SEQ ID NO: 3547557 - DNA, 25 bp, Homo sapien
tcccagcgcttttggagactgaggt

SEQ ID NO: 3547558 - DNA, 25 bp, Homo sapien
agcgcttttggagactgaggtgggt

SEQ ID NO: 3547559 - DNA, 25 bp, Homo sapien
cgcttttggagactgaggtgggtgg

SEQ ID NO: 3547560 - DNA, 25 bp, Homo sapien
tgaccctaagagcacactgcacagg

SEQ ID NO: 3547561 - DNA, 25 bp, Homo sapien
tgggtaatagaacagccgtgggctt

SEQ ID NO: 3547562 - DNA, 25 bp, Homo sapien
ggatttattttgagctcagccccaa

SEQ ID NO: 3547563 - DNA, 25 bp, Homo sapien
caaccagaaggaggttataccagga

SEQ ID NO: 3547564 - DNA, 25 bp, Homo sapien
gaagacggacactacttggccattg

SEQ ID NO: 3547565 - DNA, 25 bp, Homo sapien
gaacataggtgaaaaccacggtgcc

SEQ ID NO: 3547566 - DNA, 25 bp, Homo sapien
aatggccaccaagaccaagcagtag

SEQ ID NO: 3547567 - DNA, 25 bp, Homo sapien
gaaagatgttgacctgaagcttcct

SEQ ID NO: 3547568 - DNA, 25 bp, Homo sapien
gtatgtcacagtagtagtgtgttag

SEQ ID NO: 3547569 - DNA, 25 bp, Homo sapien
tgtgttggcacaagccaggtggaga

SEQ ID NO: 3547570 - DNA, 25 bp, Homo sapien
gtggtatgtcacagtagtagtgtgt

SEQ ID NO: 3547571 - DNA, 25 bp, Homo sapien
gggtggtatgtcacagtagtagtgt

SEQ ID NO: 3547572 - DNA, 25 bp, Homo sapien
catttccagtctggatagcggagtt

SEQ ID NO: 3547573 - DNA, 25 bp, Homo sapien
tagcggagttggctccaccaaatgc

SEQ ID NO: 3547574 - DNA, 25 bp, Homo sapien
caccaaatgcataggacacagctac

SEQ ID NO: 3547575 - DNA, 25 bp, Homo sapien
gagttggctccaccaaatgcatagg

SEQ ID NO: 3547576 - DNA, 25 bp, Homo sapien
tgccactggcaagggctagttctcc

SEQ ID NO: 3547577 - DNA, 25 bp, Homo sapien
gaccaagagcttaggtgtgaccaca

SEQ ID NO: 3547578 - DNA, 25 bp, Homo sapien
caggatggctccgaagagaagctcc

SEQ ID NO: 3547579 - DNA, 25 bp, Homo sapien
tcacatgcactacaaagaaggcgag

SEQ ID NO: 3547580 - DNA, 25 bp, Homo sapien
tgaagcaggatatcaaactcggatt

SEQ ID NO: 3547581 - DNA, 25 bp, Homo sapien
gatgccagacacaagacataccatg

SEQ ID NO: 3547582 - DNA, 25 bp, Homo sapien
ttggtctgactaagggtctggtggg

SEQ ID NO: 3547583 - DNA, 25 bp, Homo sapien
tatcaaactcggattcttcttggtc

SEQ ID NO: 3547584 - DNA, 25 bp, Homo sapien
aatctccacgtcccaccccatcttc

SEQ ID NO: 3547585 - DNA, 25 bp, Homo sapien
taccctctcactcaaatctccacgt

SEQ ID NO: 3547586 - DNA, 25 bp, Homo sapien
tcaaccttccacctacatctaccct

SEQ ID NO: 3547587 - DNA, 25 bp, Homo sapien
ttccacctacatctaccctctcact

SEQ ID NO: 3547588 - DNA, 25 bp, Homo sapien
aggctttcagggttgatgacttcac

SEQ ID NO: 3547589 - DNA, 25 bp, Homo sapien
tctgcgtgtaggaagtagctggaat

SEQ ID NO: 3547590 - DNA, 25 bp, Homo sapien
cctaggaaggttctgcgtgtaggaa

SEQ ID NO: 3547591 - DNA, 25 bp, Homo sapien
gctttcagggttgatgacttcacat

SEQ ID NO: 3547592 - DNA, 25 bp, Homo sapien
aacaatcttttcctgtttcctccat

SEQ ID NO: 3547593 - DNA, 25 bp, Homo sapien
gagaatgtatcattgcttcccttgt

SEQ ID NO: 3547594 - DNA, 25 bp, Homo sapien
actcacagtccttggcccagatccc

SEQ ID NO: 3547595 - DNA, 25 bp, Homo sapien
ttacttctcaagtgagaatgtatca

SEQ ID NO: 3547596 - DNA, 25 bp, Homo sapien
tctcaagtgagaatgtatcattgct

SEQ ID NO: 3547597 - DNA, 25 bp, Homo sapien
gccttttgtgataagggcctgacag

SEQ ID NO: 3547598 - DNA, 25 bp, Homo sapien
cttttgtgataagggcctgacagat

SEQ ID NO: 3547599 - DNA, 25 bp, Homo sapien
gcaaaggccttttgtgataagggcc

SEQ ID NO: 3547600 - DNA, 25 bp, Homo sapien
aaggccttttgtgataagggcctga

SEQ ID NO: 3547601 - DNA, 25 bp, Homo sapien
cctctgcagctgtcgtggagctcac

SEQ ID NO: 3547602 - DNA, 25 bp, Homo sapien
ccctctgcagctgtcgtggagctca

SEQ ID NO: 3547603 - DNA, 25 bp, Homo sapien
gcagctgtcgtggagctcaccagaa

SEQ ID NO: 3547604 - DNA, 25 bp, Homo sapien
gtgactccaccctggttcgggcact

SEQ ID NO: 3547605 - DNA, 25 bp, Homo sapien
gggtgactccaccctggttcgggca

SEQ ID NO: 3547606 - DNA, 25 bp, Homo sapien
tccaccctggttcgggcactgcacg

SEQ ID NO: 3547607 - DNA, 25 bp, Homo sapien
accctggttcgggcactgcacgtac

SEQ ID NO: 3547608 - DNA, 25 bp, Homo sapien
ggctgccggatgccacaaccctggg

SEQ ID NO: 3547609 - DNA, 25 bp, Homo sapien
tgaggctgccggatgccacaaccct

SEQ ID NO: 3547610 - DNA, 25 bp, Homo sapien
gaggctgccggatgccacaaccctg

SEQ ID NO: 3547611 - DNA, 25 bp, Homo sapien
aggctgccggatgccacaaccctgg

SEQ ID NO: 3547612 - DNA, 25 bp, Homo sapien
taacacccagagactttggtttgct

SEQ ID NO: 3547613 - DNA, 25 bp, Homo sapien
cagatctggtctaattaaaaaccca

SEQ ID NO: 3547614 - DNA, 25 bp, Homo sapien
acccagagactttggtttgctaaca

SEQ ID NO: 3547615 - DNA, 25 bp, Homo sapien
taaaaacccaagtgttggcagccag

SEQ ID NO: 3547616 - DNA, 25 bp, Homo sapien
gaagacagcttgcacaggcatctcc

SEQ ID NO: 3547617 - DNA, 25 bp, Homo sapien
tatgaagacagcttgcacaggcatc

SEQ ID NO: 3547618 - DNA, 25 bp, Homo sapien
gcatctcctcttcaaagcatatttt

SEQ ID NO: 3547619 - DNA, 25 bp, Homo sapien
aggcatctcctcttcaaagcatatt

SEQ ID NO: 3547620 - DNA, 25 bp, Homo sapien
tcagagggttcagcctgcggatgac

SEQ ID NO: 3547621 - DNA, 25 bp, Homo sapien
ttcagcctgcggatgaccacagtgt

SEQ ID NO: 3547622 - DNA, 25 bp, Homo sapien
atcagagggttcagcctgcggatga

SEQ ID NO: 3547623 - DNA, 25 bp, Homo sapien
agggttcagcctgcggatgaccaca

SEQ ID NO: 3547624 - DNA, 25 bp, Homo sapien
gtgagagcttggctgagcatacatg

SEQ ID NO: 3547625 - DNA, 25 bp, Homo sapien
tgttgtgttccatggaattgtgaga

SEQ ID NO: 3547626 - DNA, 25 bp, Homo sapien
tgttccatggaattgtgagagcttg

SEQ ID NO: 3547627 - DNA, 25 bp, Homo sapien
agagcttggctgagcatacatgaag

SEQ ID NO: 3547628 - DNA, 25 bp, Homo sapien
gctctgggcttgcagggagcgcatc

SEQ ID NO: 3547629 - DNA, 25 bp, Homo sapien
ctatagaagaggcagatgatggtga

SEQ ID NO: 3547630 - DNA, 25 bp, Homo sapien
cacaggtggagagagctttgctctg

SEQ ID NO: 3547631 - DNA, 25 bp, Homo sapien
aagaggcagatgatggtgaggtggg

SEQ ID NO: 3547632 - DNA, 25 bp, Homo sapien
gcaaatggtcacgaggatgtaggca

SEQ ID NO: 3547633 - DNA, 25 bp, Homo sapien
aaatggtcacgaggatgtaggcata

SEQ ID NO: 3547634 - DNA, 25 bp, Homo sapien
ctgcaaatggtcacgaggatgtagg

SEQ ID NO: 3547635 - DNA, 25 bp, Homo sapien
tgcaaatggtcacgaggatgtaggc

SEQ ID NO: 3547636 - DNA, 25 bp, Homo sapien
ggcaagttggagcacaggggggatg

SEQ ID NO: 3547637 - DNA, 25 bp, Homo sapien
cggcaagttggagcacaggggggat

SEQ ID NO: 3547638 - DNA, 25 bp, Homo sapien
caacagaaacagtatagcaggtcac

SEQ ID NO: 3547639 - DNA, 25 bp, Homo sapien
cactgtggaaaacgaggagtctatc

SEQ ID NO: 3547640 - DNA, 25 bp, Homo sapien
tctggaccatacagcctgcaaagga

SEQ ID NO: 3547641 - DNA, 25 bp, Homo sapien
cagggcacacagacattgggatata

SEQ ID NO: 3547642 - DNA, 25 bp, Homo sapien
tatcaaggataggacgctcaggaag

SEQ ID NO: 3547643 - DNA, 25 bp, Homo sapien
agaccaaataagacacgtgtgtacc

SEQ ID NO: 3547644 - DNA, 25 bp, Homo sapien
tctggattcacagtaataattcctg

SEQ ID NO: 3547645 - DNA, 25 bp, Homo sapien
tgacaatgagaatgcacttgggctg

SEQ ID NO: 3547646 - DNA, 25 bp, Homo sapien
caaactgatatcgttaaggaatgag

SEQ ID NO: 3547647 - DNA, 25 bp, Homo sapien
taaagccttggagaactctggattc

SEQ ID NO: 3547648 - DNA, 25 bp, Homo sapien
catccacccatgagctttgtgttgg

SEQ ID NO: 3547649 - DNA, 25 bp, Homo sapien
ctgtggttgaacagagaccatccac

SEQ ID NO: 3547650 - DNA, 25 bp, Homo sapien
tttgtgttggagacctcttgacggg

SEQ ID NO: 3547651 - DNA, 25 bp, Homo sapien
ggttgaacagagaccatccacccat

SEQ ID NO: 3547652 - DNA, 25 bp, Homo sapien
taagtgtaagagaccaagatgactg

SEQ ID NO: 3547653 - DNA, 25 bp, Homo sapien
ggatagtgatcaaggcagaagagac

SEQ ID NO: 3547654 - DNA, 25 bp, Homo sapien
catctgagcaggccagttggagcat

SEQ ID NO: 3547655 - DNA, 25 bp, Homo sapien
gattaaccaggatgtaagtgtaaga

SEQ ID NO: 3547656 - DNA, 25 bp, Homo sapien
cctgtgccatagaaggtcatgaggg

SEQ ID NO: 3547657 - DNA, 25 bp, Homo sapien
tcagtcataggctacgatggccagc

SEQ ID NO: 3547658 - DNA, 25 bp, Homo sapien
gcagcagacattcccctgtgccata

SEQ ID NO: 3547659 - DNA, 25 bp, Homo sapien
tcataggctacgatggccagcagca

SEQ ID NO: 3547660 - DNA, 25 bp, Homo sapien
gaccctctagggctcctagtatagg

SEQ ID NO: 3547661 - DNA, 25 bp, Homo sapien
ccaatgattggtggtccaggatata

SEQ ID NO: 3547662 - DNA, 25 bp, Homo sapien
gaaggcttctggctgagctcttctg

SEQ ID NO: 3547663 - DNA, 25 bp, Homo sapien
agaattggcttattttggattgtcc

SEQ ID NO: 3547664 - DNA, 25 bp, Homo sapien
aattagacctgtcattattgcaggc

SEQ ID NO: 3547665 - DNA, 25 bp, Homo sapien
tgactggttgttgcaaattagacct

SEQ ID NO: 3547666 - DNA, 25 bp, Homo sapien
aatttctgtggcttcggttcttgtc

SEQ ID NO: 3547667 - DNA, 25 bp, Homo sapien
tcctggagcacaccaatgatactga

SEQ ID NO: 3547668 - DNA, 25 bp, Homo sapien
taaggcatggttgcttagcaagtcg

SEQ ID NO: 3547669 - DNA, 25 bp, Homo sapien
tgggtgatccccacttttggttcca

SEQ ID NO: 3547670 - DNA, 25 bp, Homo sapien
caacagctgttggttagacatactt

SEQ ID NO: 3547671 - DNA, 25 bp, Homo sapien
caagtcgctggtgagcaacagctgt

SEQ ID NO: 3547672 - DNA, 25 bp, Homo sapien
cactggtgtaatttctcagtggcaa

SEQ ID NO: 3547673 - DNA, 25 bp, Homo sapien
gaggctaccattgcactggtgtaat

SEQ ID NO: 3547674 - DNA, 25 bp, Homo sapien
tgtaatttctcagtggcaagtccac

SEQ ID NO: 3547675 - DNA, 25 bp, Homo sapien
agtgcagtaggaggctaccattgca

SEQ ID NO: 3547676 - DNA, 25 bp, Homo sapien
cactgtatgcctgtttgggttggag

SEQ ID NO: 3547677 - DNA, 25 bp, Homo sapien
gcacattccacagttggtgccctgt

SEQ ID NO: 3547678 - DNA, 25 bp, Homo sapien
ttggagaggcgcacattccacagtt

SEQ ID NO: 3547679 - DNA, 25 bp, Homo sapien
ggtgccctgttgttgccaaacgaca

SEQ ID NO: 3547680 - DNA, 25 bp, Homo sapien
gctggcatgcagtggccggatctca

SEQ ID NO: 3547681 - DNA, 25 bp, Homo sapien
ctcactgcaaactcttcctctcagg

SEQ ID NO: 3547682 - DNA, 25 bp, Homo sapien
caaactcttcctctcaggttcaagt

SEQ ID NO: 3547683 - DNA, 25 bp, Homo sapien
ctggcatgcagtggccggatctcag

SEQ ID NO: 3547684 - DNA, 25 bp, Homo sapien
tatttgttagggaaaatcttggcca

SEQ ID NO: 3547685 - DNA, 25 bp, Homo sapien
caattttcgtgcatgggcctcaaac

SEQ ID NO: 3547686 - DNA, 25 bp, Homo sapien
cagggagcaccgtcttttgaggaca

SEQ ID NO: 3547687 - DNA, 25 bp, Homo sapien
aaattgggccaagttcctgtgcggc

SEQ ID NO: 3547688 - DNA, 25 bp, Homo sapien
tatttagtgattgccccgtgtgacc

SEQ ID NO: 3547689 - DNA, 25 bp, Homo sapien
ttatttagtgattgccccgtgtgac

SEQ ID NO: 3547690 - DNA, 25 bp, Homo sapien
tttagtgattgccccgtgtgaccct

SEQ ID NO: 3547691 - DNA, 25 bp, Homo sapien
agtgattgccccgtgtgaccctctc

SEQ ID NO: 3547692 - DNA, 25 bp, Homo sapien
ggcacttggtggataaagttccctg

SEQ ID NO: 3547693 - DNA, 25 bp, Homo sapien
ttcctgcatggcacttggtggataa

SEQ ID NO: 3547694 - DNA, 25 bp, Homo sapien
tcttttttcctgcatggcacttggt

SEQ ID NO: 3547695 - DNA, 25 bp, Homo sapien
gcacttggtggataaagttccctga

SEQ ID NO: 3547696 - DNA, 25 bp, Homo sapien
ggagcctgtgggatattcctccagc

SEQ ID NO: 3547697 - DNA, 25 bp, Homo sapien
gggatattcctccagccttggcggg

SEQ ID NO: 3547698 - DNA, 25 bp, Homo sapien
gaggaagcggatgctgttaatagcc

SEQ ID NO: 3547699 - DNA, 25 bp, Homo sapien
atgctgttaatagccctgggagtgt

SEQ ID NO: 3547700 - DNA, 25 bp, Homo sapien
aaatttgtgtgtcattcttgttcag

SEQ ID NO: 3547701 - DNA, 25 bp, Homo sapien
attccaattttagtatatatgatgc

SEQ ID NO: 3547702 - DNA, 25 bp, Homo sapien
agtatatatgatgccgaagtgagta

SEQ ID NO: 3547703 - DNA, 25 bp, Homo sapien
gggccatgctaatcttctccgtgtc

SEQ ID NO: 3547704 - DNA, 25 bp, Homo sapien
gcatgcccaaccaaaccctgggtat

SEQ ID NO: 3547705 - DNA, 25 bp, Homo sapien
tctgtgcaggtgcaattgcccacgc

SEQ ID NO: 3547706 - DNA, 25 bp, Homo sapien
ggtgcaattgcccacgcatgcccaa

SEQ ID NO: 3547707 - DNA, 25 bp, Homo sapien
tgggtatcagttgtcccccgtctcc

SEQ ID NO: 3547708 - DNA, 25 bp, Homo sapien
atgcttgtggcccttgctttgtacc

SEQ ID NO: 3547709 - DNA, 25 bp, Homo sapien
gggcatctgtaccaggccccagggt

SEQ ID NO: 3547710 - DNA, 25 bp, Homo sapien
tgtcgggggggcatctgtaccaggc

SEQ ID NO: 3547711 - DNA, 25 bp, Homo sapien
ccaggccctgagatagatgcttgtg

SEQ ID NO: 3547712 - DNA, 25 bp, Homo sapien
gagaaggatgatgtagcatttggaa

SEQ ID NO: 3547713 - DNA, 25 bp, Homo sapien
gatgccggccaaacatttggtcttt

SEQ ID NO: 3547714 - DNA, 25 bp, Homo sapien
tcctgctgatgccaagatgacaaag

SEQ ID NO: 3547715 - DNA, 25 bp, Homo sapien
gtttttcccacttgcgatgatgccg

SEQ ID NO: 3547716 - DNA, 25 bp, Homo sapien
cccctaagctgggtgtctgcctggg

SEQ ID NO: 3547717 - DNA, 25 bp, Homo sapien
gatggtcttggccagcacagtggat

SEQ ID NO: 3547718 - DNA, 25 bp, Homo sapien
cctgggtggcatggaaggctgccac

SEQ ID NO: 3547719 - DNA, 25 bp, Homo sapien
cacagtggatgtgcagaccatgaag

SEQ ID NO: 3547720 - DNA, 25 bp, Homo sapien
tcagacgaagatgcctaagatggcc

SEQ ID NO: 3547721 - DNA, 25 bp, Homo sapien
cagacagccaacgctgtgtcaaggg

SEQ ID NO: 3547722 - DNA, 25 bp, Homo sapien
gggcttgtgatagaacaagaagtca

SEQ ID NO: 3547723 - DNA, 25 bp, Homo sapien
cttctgcacattgggccactggttg

SEQ ID NO: 3547724 - DNA, 25 bp, Homo sapien
gctggccaccctctgaccaagaacc

SEQ ID NO: 3547725 - DNA, 25 bp, Homo sapien
tgaagtctactctggctgatggctg

SEQ ID NO: 3547726 - DNA, 25 bp, Homo sapien
ctgaagtctactctggctgatggct

SEQ ID NO: 3547727 - DNA, 25 bp, Homo sapien
ggctggccaccctctgaccaagaac

SEQ ID NO: 3547728 - DNA, 25 bp, Homo sapien
ggtgacattgcgatttctcttctgg

SEQ ID NO: 3547729 - DNA, 25 bp, Homo sapien
cacaggacgtttttcgttgcagaca

SEQ ID NO: 3547730 - DNA, 25 bp, Homo sapien
tctcaaatagggttgacttcctggt

SEQ ID NO: 3547731 - DNA, 25 bp, Homo sapien
gtcagggaaggcttttgtagcagca

SEQ ID NO: 3547732 - DNA, 25 bp, Homo sapien
gacatctgtgcagtcaggtcgtgga

SEQ ID NO: 3547733 - DNA, 25 bp, Homo sapien
caggtcgtggaggaataagcctcat

SEQ ID NO: 3547734 - DNA, 25 bp, Homo sapien
ctgcagggggaattgagcgacatct

SEQ ID NO: 3547735 - DNA, 25 bp, Homo sapien
gggaattgagcgacatctgtgcagt

SEQ ID NO: 3547736 - DNA, 25 bp, Homo sapien
tgcgctgtcatccaacagaagctct

SEQ ID NO: 3547737 - DNA, 25 bp, Homo sapien
gaagtcaaagtgtccaacaatggct

SEQ ID NO: 3547738 - DNA, 25 bp, Homo sapien
tgtcaaacgttgtcagcacttcccc

SEQ ID NO: 3547739 - DNA, 25 bp, Homo sapien
ccttctgcccagacaattgcgctgt

SEQ ID NO: 3547740 - DNA, 25 bp, Homo sapien
cagcgtcacaccacctggagaaaag

SEQ ID NO: 3547741 - DNA, 25 bp, Homo sapien
ggaccagcagatttctaaggccctt

SEQ ID NO: 3547742 - DNA, 25 bp, Homo sapien
cttcgtgctggaccagcagatttct

SEQ ID NO: 3547743 - DNA, 25 bp, Homo sapien
gatgtcatcaccattattagcagca

SEQ ID NO: 3547744 - DNA, 25 bp, Homo sapien
cattggcatacgtgcctcccaggaa

SEQ ID NO: 3547745 - DNA, 25 bp, Homo sapien
ctgttgcctggctacacggctgggc

SEQ ID NO: 3547746 - DNA, 25 bp, Homo sapien
tctgataggcaacccacagggcttt

SEQ ID NO: 3547747 - DNA, 25 bp, Homo sapien
tctcagagcaggacatcaagttctg

SEQ ID NO: 3547748 - DNA, 25 bp, Homo sapien
gctgggcactgtgcggaggaaggat

SEQ ID NO: 3547749 - DNA, 25 bp, Homo sapien
ggcactgtgcggaggaaggatggga

SEQ ID NO: 3547750 - DNA, 25 bp, Homo sapien
tgctgctgggcactgtgcggaggaa

SEQ ID NO: 3547751 - DNA, 25 bp, Homo sapien
gggcactgtgcggaggaaggatggg

SEQ ID NO: 3547752 - DNA, 25 bp, Homo sapien
tgggggcgctgagatccatggctga

SEQ ID NO: 3547753 - DNA, 25 bp, Homo sapien
gggggcgctgagatccatggctgat

SEQ ID NO: 3547754 - DNA, 25 bp, Homo sapien
attgtgtcaaagagctgccctgccc

SEQ ID NO: 3547755 - DNA, 25 bp, Homo sapien
gtgaggttgaggtattcatttctcc

SEQ ID NO: 3547756 - DNA, 25 bp, Homo sapien
tgatctttgtggattgtgtcaaaga

SEQ ID NO: 3547757 - DNA, 25 bp, Homo sapien
aaagtgaggttgaggtattcatttc

SEQ ID NO: 3547758 - DNA, 25 bp, Homo sapien
ataaggaagctgtcctaccagatat

SEQ ID NO: 3547759 - DNA, 25 bp, Homo sapien
cataaggaagctgtcctaccagata

SEQ ID NO: 3547760 - DNA, 25 bp, Homo sapien
gaaggtcatccctccaaccacgccc

SEQ ID NO: 3547761 - DNA, 25 bp, Homo sapien
caaccacgcccaggagatgttgctg

SEQ ID NO: 3547762 - DNA, 25 bp, Homo sapien
gctgggagccacaagcatagttggt

SEQ ID NO: 3547763 - DNA, 25 bp, Homo sapien
gcatagttggttgtgggtggaagct

SEQ ID NO: 3547764 - DNA, 25 bp, Homo sapien
gtcccacagtgatgtcgggcagccc

SEQ ID NO: 3547765 - DNA, 25 bp, Homo sapien
ctgcagtcccacagtgatgtcgggc

SEQ ID NO: 3547766 - DNA, 25 bp, Homo sapien
cagtcccacagtgatgtcgggcagc

SEQ ID NO: 3547767 - DNA, 25 bp, Homo sapien
tgcagtcccacagtgatgtcgggca

SEQ ID NO: 3547768 - DNA, 25 bp, Homo sapien
cgcagcccggatgaacatatctcct

SEQ ID NO: 3547769 - DNA, 25 bp, Homo sapien
tctggtccagcgctgtgtgtaaggg

SEQ ID NO: 3547770 - DNA, 25 bp, Homo sapien
gggtccagatagtgtccaccatgga

SEQ ID NO: 3547771 - DNA, 25 bp, Homo sapien
taaggggtcgcagcccggatgaaca

SEQ ID NO: 3547772 - DNA, 25 bp, Homo sapien
tctgtgcctgcttcgtttgcgagga

SEQ ID NO: 3547773 - DNA, 25 bp, Homo sapien
gggtcctttgttgtcagagcgtctg

SEQ ID NO: 3547774 - DNA, 25 bp, Homo sapien
ccacaaggaccgcaggataggacat

SEQ ID NO: 3547775 - DNA, 25 bp, Homo sapien
gtttgcgaggatctaggcacacctg

SEQ ID NO: 3547776 - DNA, 25 bp, Homo sapien
aatccggtgatgcacaggagaggcc

SEQ ID NO: 3547777 - DNA, 25 bp, Homo sapien
cagccccagggtataggagtgggaa

SEQ ID NO: 3547778 - DNA, 25 bp, Homo sapien
tctgttcttctggtgaccctgcacc

SEQ ID NO: 3547779 - DNA, 25 bp, Homo sapien
ccgaagttgactggcagagacagcc

SEQ ID NO: 3547780 - DNA, 25 bp, Homo sapien
ggcactggggagtgtgtgctgtcca

SEQ ID NO: 3547781 - DNA, 25 bp, Homo sapien
cggcactggggagtgtgtgctgtcc

SEQ ID NO: 3547782 - DNA, 25 bp, Homo sapien
gcactggggagtgtgtgctgtccat

SEQ ID NO: 3547783 - DNA, 25 bp, Homo sapien
tgtggttggtttcccgcaggctcct

SEQ ID NO: 3547784 - DNA, 25 bp, Homo sapien
gtggttggtttcccgcaggctcctc

SEQ ID NO: 3547785 - DNA, 25 bp, Homo sapien
tggttggtttcccgcaggctcctcc

SEQ ID NO: 3547786 - DNA, 25 bp, Homo sapien
actgacaaagatttgccctaatgtt

SEQ ID NO: 3547787 - DNA, 25 bp, Homo sapien
actgtgttgtagttgatgcctgtct

SEQ ID NO: 3547788 - DNA, 25 bp, Homo sapien
tgagcagatgctatcaggaggcctc

SEQ ID NO: 3547789 - DNA, 25 bp, Homo sapien
atacatatgcatcgaaatgagcaga

SEQ ID NO: 3547790 - DNA, 25 bp, Homo sapien
aactgtgttgtagttgatgcctgtc

SEQ ID NO: 3547791 - DNA, 25 bp, Homo sapien
tccatgcttgtatttccaataaagt

SEQ ID NO: 3547792 - DNA, 25 bp, Homo sapien
cggcatccatgcttgtatttccaat

SEQ ID NO: 3547793 - DNA, 25 bp, Homo sapien
ggcatccatgcttgtatttccaata

SEQ ID NO: 3547794 - DNA, 25 bp, Homo sapien
atgcttgtatttccaataaagtgtc

SEQ ID NO: 3547795 - DNA, 25 bp, Homo sapien
atcaaaagctacattcgttggaaat

SEQ ID NO: 3547796 - DNA, 25 bp, Homo sapien
caaaagctacattcgttggaaattg

SEQ ID NO: 3547797 - DNA, 25 bp, Homo sapien
aaagctacattcgttggaaattgga

SEQ ID NO: 3547798 - DNA, 25 bp, Homo sapien
gctacattcgttggaaattggaatt

SEQ ID NO: 3547799 - DNA, 25 bp, Homo sapien
cttcctctgaggatttggcggagtt

SEQ ID NO: 3547800 - DNA, 25 bp, Homo sapien
catagggatgattacagtgtaaaag

SEQ ID NO: 3547801 - DNA, 25 bp, Homo sapien
cctctgaggatttggcggagttact

SEQ ID NO: 3547802 - DNA, 25 bp, Homo sapien
tagggatgattacagtgtaaaagac

SEQ ID NO: 3547803 - DNA, 25 bp, Homo sapien
caggcatccaggaaagcaaggtggc

SEQ ID NO: 3547804 - DNA, 25 bp, Homo sapien
gagcatgtagcagatcaggataacc

SEQ ID NO: 3547805 - DNA, 25 bp, Homo sapien
cacggcagccataggagataactgt

SEQ ID NO: 3547806 - DNA, 25 bp, Homo sapien
aaggcactggccaaaaagaccctgc

SEQ ID NO: 3547807 - DNA, 25 bp, Homo sapien
gttcagggtgatctgtgaagactac

SEQ ID NO: 3547808 - DNA, 25 bp, Homo sapien
tctgtcacagtgctgagatttcttt

SEQ ID NO: 3547809 - DNA, 25 bp, Homo sapien
gacaagatagaaactgagaaacact

SEQ ID NO: 3547810 - DNA, 25 bp, Homo sapien
tgaagactacaagaatgaactctgt

SEQ ID NO: 3547811 - DNA, 25 bp, Homo sapien
agaatgagattgctgctgtgagaat

SEQ ID NO: 3547812 - DNA, 25 bp, Homo sapien
cattgctgggtaaaattcagagcct

SEQ ID NO: 3547813 - DNA, 25 bp, Homo sapien
tagcagggccaacagtacgcctagt

SEQ ID NO: 3547814 - DNA, 25 bp, Homo sapien
ttcagagccttggacctcataggtc

SEQ ID NO: 3547815 - DNA, 25 bp, Homo sapien
tgatccaattgtatccttgggtggt

SEQ ID NO: 3547816 - DNA, 25 bp, Homo sapien
gggacacctggagtctcctagcgac

SEQ ID NO: 3547817 - DNA, 25 bp, Homo sapien
agggacacctggagtctcctagcga

SEQ ID NO: 3547818 - DNA, 25 bp, Homo sapien
cagggacacctggagtctcctagcg

SEQ ID NO: 3547819 - DNA, 25 bp, Homo sapien
ttctgaaggcgtcttttacatcttt

SEQ ID NO: 3547820 - DNA, 25 bp, Homo sapien
catggggatgaccactgtatagaag

SEQ ID NO: 3547821 - DNA, 25 bp, Homo sapien
gaccactgtatagaagacagacacg

SEQ ID NO: 3547822 - DNA, 25 bp, Homo sapien
ctttctgaaggcgtcttttacatct

SEQ ID NO: 3547823 - DNA, 25 bp, Homo sapien
acatgaagataagggctccaaagaa

SEQ ID NO: 3547824 - DNA, 25 bp, Homo sapien
cagatacatgaagataagggctcca

SEQ ID NO: 3547825 - DNA, 25 bp, Homo sapien
tacatgaagataagggctccaaaga

SEQ ID NO: 3547826 - DNA, 25 bp, Homo sapien
gatacatgaagataagggctccaaa

SEQ ID NO: 3547827 - DNA, 25 bp, Homo sapien
tctcgatgtttgctgtgtcactgca

SEQ ID NO: 3547828 - DNA, 25 bp, Homo sapien
gatgacaatctcgatgtttgctgtg

SEQ ID NO: 3547829 - DNA, 25 bp, Homo sapien
acaatctcgatgtttgctgtgtcac

SEQ ID NO: 3547830 - DNA, 25 bp, Homo sapien
agatgatgacaatctcgatgtttgc

SEQ ID NO: 3547831 - DNA, 25 bp, Homo sapien
gaagaagtttatttgattgtcctta

SEQ ID NO: 3547832 - DNA, 25 bp, Homo sapien
cacagaagaagaagtttatttgatt

SEQ ID NO: 3547833 - DNA, 25 bp, Homo sapien
ggaggtcacagaagaagaagtttat

SEQ ID NO: 3547834 - DNA, 25 bp, Homo sapien
agaagaagaagtttatttgattgtc

SEQ ID NO: 3547835 - DNA, 25 bp, Homo sapien
gagatgaccgttttgcctgtggcca

SEQ ID NO: 3547836 - DNA, 25 bp, Homo sapien
gaatgaattcggttactctggtgag

SEQ ID NO: 3547837 - DNA, 25 bp, Homo sapien
gcaagtggtacgcaggatggctcct

SEQ ID NO: 3547838 - DNA, 25 bp, Homo sapien
cattcccaagaagggtgactaggta

SEQ ID NO: 3547839 - DNA, 25 bp, Homo sapien
aggatgataatgaaataaaaagaat

SEQ ID NO: 3547840 - DNA, 25 bp, Homo sapien
tgaggatgataatgaaataaaaaga

SEQ ID NO: 3547841 - DNA, 25 bp, Homo sapien
ctgaggatgataatgaaataaaaag

SEQ ID NO: 3547842 - DNA, 25 bp, Homo sapien
gaggatgataatgaaataaaaagaa

SEQ ID NO: 3547843 - DNA, 25 bp, Homo sapien
ttaacttgggatgttctccatactc

SEQ ID NO: 3547844 - DNA, 25 bp, Homo sapien
ttcctgaaggcaggtgagtggaact

SEQ ID NO: 3547845 - DNA, 25 bp, Homo sapien
ttatcttcctgaaggcaggtgagtg

SEQ ID NO: 3547846 - DNA, 25 bp, Homo sapien
gaaggcaggtgagtggaactgtgac

SEQ ID NO: 3547847 - DNA, 25 bp, Homo sapien
tcttcctgaaggcaggtgagtggaa

SEQ ID NO: 3547848 - DNA, 25 bp, Homo sapien
tactgcatagttagtcttgagagca

SEQ ID NO: 3547849 - DNA, 25 bp, Homo sapien
tagtcttgagagcagatgggtcaga

SEQ ID NO: 3547850 - DNA, 25 bp, Homo sapien
catagttagtcttgagagcagatgg

SEQ ID NO: 3547851 - DNA, 25 bp, Homo sapien
gttccaagagtctactgcatagtta

SEQ ID NO: 3547852 - DNA, 25 bp, Homo sapien
actttcttgttcaatccacagtagc

SEQ ID NO: 3547853 - DNA, 25 bp, Homo sapien
gcactttcttgttcaatccacagta

SEQ ID NO: 3547854 - DNA, 25 bp, Homo sapien
cactttcttgttcaatccacagtag

SEQ ID NO: 3547855 - DNA, 25 bp, Homo sapien
gttcttagcccagtgctttcgctgc

SEQ ID NO: 3547856 - DNA, 25 bp, Homo sapien
ttcctgtgcatccttaaaacccagc

SEQ ID NO: 3547857 - DNA, 25 bp, Homo sapien
ttcaaaacaggaaactgttgcttca

SEQ ID NO: 3547858 - DNA, 25 bp, Homo sapien
tcaaaacaggaaactgttgcttcag

SEQ ID NO: 3547859 - DNA, 25 bp, Homo sapien
tgcatccttaaaacccagcagtttc

SEQ ID NO: 3547860 - DNA, 25 bp, Homo sapien
ttagtggcagcacccacacttgaat

SEQ ID NO: 3547861 - DNA, 25 bp, Homo sapien
ctgtttccagccttcgtatcacatg

SEQ ID NO: 3547862 - DNA, 25 bp, Homo sapien
agccttcgtatcacatgctctctct

SEQ ID NO: 3547863 - DNA, 25 bp, Homo sapien
tctggctcatcaccgtcaactgcca

SEQ ID NO: 3547864 - DNA, 25 bp, Homo sapien
tctgaagtccacattcactatgttc

SEQ ID NO: 3547865 - DNA, 25 bp, Homo sapien
ctctgaagtccacattcactatgtt

SEQ ID NO: 3547866 - DNA, 25 bp, Homo sapien
tgaagtccacattcactatgttcat

SEQ ID NO: 3547867 - DNA, 25 bp, Homo sapien
ctgaagtccacattcactatgttca

SEQ ID NO: 3547868 - DNA, 25 bp, Homo sapien
catagtcatgacaccaaagacccgc

SEQ ID NO: 3547869 - DNA, 25 bp, Homo sapien
gcttatgaccggtacgtggctgtgt

SEQ ID NO: 3547870 - DNA, 25 bp, Homo sapien
tctggtgccatagtcaattctgtga

SEQ ID NO: 3547871 - DNA, 25 bp, Homo sapien
tatgagcgctgtgccagccaattct

SEQ ID NO: 3547872 - DNA, 25 bp, Homo sapien
catttctagatgatatagccagtga

SEQ ID NO: 3547873 - DNA, 25 bp, Homo sapien
ttaccccaggcttaataataactgc

SEQ ID NO: 3547874 - DNA, 25 bp, Homo sapien
cactccaagacagttcagattgcat

SEQ ID NO: 3547875 - DNA, 25 bp, Homo sapien
tacaacaatctactgtaggtaaggg

SEQ ID NO: 3547876 - DNA, 25 bp, Homo sapien
agcagtggatacatcatagccaaag

SEQ ID NO: 3547877 - DNA, 25 bp, Homo sapien
ggatacatcatagccaaaggaaaga

SEQ ID NO: 3547878 - DNA, 25 bp, Homo sapien
cataagtctcttgaatgcctctact

SEQ ID NO: 3547879 - DNA, 25 bp, Homo sapien
tcttgaatgcctctactttcagcag

SEQ ID NO: 3547880 - DNA, 25 bp, Homo sapien
gaggcaatggcgtaatagatggaca

SEQ ID NO: 3547881 - DNA, 25 bp, Homo sapien
tacaaggcagagtaggtagaaggct

SEQ ID NO: 3547882 - DNA, 25 bp, Homo sapien
ttccagtgggaaatcttcagcccag

SEQ ID NO: 3547883 - DNA, 25 bp, Homo sapien
gaaggctctgatcttcagtgacaga

SEQ ID NO: 3547884 - DNA, 25 bp, Homo sapien
cttgattgtttactactatccccat

SEQ ID NO: 3547885 - DNA, 25 bp, Homo sapien
ttcttgattgtttactactatcccc

SEQ ID NO: 3547886 - DNA, 25 bp, Homo sapien
gcttcttgattgtttactactatcc

SEQ ID NO: 3547887 - DNA, 25 bp, Homo sapien
ctgcttcttgattgtttactactat

SEQ ID NO: 3547888 - DNA, 25 bp, Homo sapien
tgccaacacagggtgcccttcaagc

SEQ ID NO: 3547889 - DNA, 25 bp, Homo sapien
ggtgcccttcaagcagaccttcact

SEQ ID NO: 3547890 - DNA, 25 bp, Homo sapien
ttcaagcagaccttcactatcaggg

SEQ ID NO: 3547891 - DNA, 25 bp, Homo sapien
acacagggtgcccttcaagcagacc

SEQ ID NO: 3547892 - DNA, 25 bp, Homo sapien
gacattgggccaatcctggtacccc

SEQ ID NO: 3547893 - DNA, 25 bp, Homo sapien
tctatctccctgtagatctcatctt

SEQ ID NO: 3547894 - DNA, 25 bp, Homo sapien
gaaactgattgacattgggccaatc

SEQ ID NO: 3547895 - DNA, 25 bp, Homo sapien
tatgggtcacgcaagtactctatct

SEQ ID NO: 3547896 - DNA, 25 bp, Homo sapien
ttttctattgatgagctttctcagg

SEQ ID NO: 3547897 - DNA, 25 bp, Homo sapien
tttttctattgatgagctttctcag

SEQ ID NO: 3547898 - DNA, 25 bp, Homo sapien
agaagagcaattgaatgagcagaag

SEQ ID NO: 3547899 - DNA, 25 bp, Homo sapien
gataaacccacaataaacaacacaa

SEQ ID NO: 3547900 - DNA, 25 bp, Homo sapien
gaagagcaattgaatgagcagaagg

SEQ ID NO: 3547901 - DNA, 25 bp, Homo sapien
gggaagatgataactgataaaccca

SEQ ID NO: 3547902 - DNA, 25 bp, Homo sapien
tgttcagcctggttggagagtccca

SEQ ID NO: 3547903 - DNA, 25 bp, Homo sapien
gaacctggcccgcatgaaagttgta

SEQ ID NO: 3547904 - DNA, 25 bp, Homo sapien
ggtgtgaaggtatatatccaagctg

SEQ ID NO: 3547905 - DNA, 25 bp, Homo sapien
cagtgaccacatacatactcaggaa

SEQ ID NO: 3547906 - DNA, 25 bp, Homo sapien
tgaagaaaggaacacaaagtcttca

SEQ ID NO: 3547907 - DNA, 25 bp, Homo sapien
ctgaagaaaggaacacaaagtcttc

SEQ ID NO: 3547908 - DNA, 25 bp, Homo sapien
gaagaaaggaacacaaagtcttcat

SEQ ID NO: 3547909 - DNA, 25 bp, Homo sapien
tttacggataatggcactcctcaga

SEQ ID NO: 3547910 - DNA, 25 bp, Homo sapien
cagttggcgtcagaggctgctttac

SEQ ID NO: 3547911 - DNA, 25 bp, Homo sapien
gaggctgctttacggataatggcac

SEQ ID NO: 3547912 - DNA, 25 bp, Homo sapien
tcagttggcgtcagaggctgcttta

SEQ ID NO: 3547913 - DNA, 25 bp, Homo sapien
aaggtgtagaccaacgcgatttggc

SEQ ID NO: 3547914 - DNA, 25 bp, Homo sapien
gacagcctggtgcacgcggatgtca

SEQ ID NO: 3547915 - DNA, 25 bp, Homo sapien
tcctctgaggtgctggaccgaggac

SEQ ID NO: 3547916 - DNA, 25 bp, Homo sapien
gacgcaggtacacgaggctgcagca

SEQ ID NO: 3547917 - DNA, 25 bp, Homo sapien
tgctgccgagggtgacaaagaagaa

SEQ ID NO: 3547918 - DNA, 25 bp, Homo sapien
ggaaagcatcaagggtactaccacg

SEQ ID NO: 3547919 - DNA, 25 bp, Homo sapien
caagaggaaacagtccgtgctgccg

SEQ ID NO: 3547920 - DNA, 25 bp, Homo sapien
gactggttgaagacaagtttcccca

SEQ ID NO: 3547921 - DNA, 25 bp, Homo sapien
tcattattggtagttagatcatagt

SEQ ID NO: 3547922 - DNA, 25 bp, Homo sapien
acaaaatttatagccacacctctgc

SEQ ID NO: 3547923 - DNA, 25 bp, Homo sapien
ttgttgcacatcagtctcgtgaacc

SEQ ID NO: 3547924 - DNA, 25 bp, Homo sapien
taaagttagtcacattcatgggcat

SEQ ID NO: 3547925 - DNA, 25 bp, Homo sapien
tttagatgagttttaacaccaaatg

SEQ ID NO: 3547926 - DNA, 25 bp, Homo sapien
taacaccaaatgatagaaatctcag

SEQ ID NO: 3547927 - DNA, 25 bp, Homo sapien
catacagatttggtgggctggaacc

SEQ ID NO: 3547928 - DNA, 25 bp, Homo sapien
gcctgataggctgtcccctcgtctt

SEQ ID NO: 3547929 - DNA, 25 bp, Homo sapien
ctagctgttctgggaaaggcagttc

SEQ ID NO: 3547930 - DNA, 25 bp, Homo sapien
tctgggaaaggcagttcctggtaag

SEQ ID NO: 3547931 - DNA, 25 bp, Homo sapien
tgggaaaggcagttcctggtaagaa

SEQ ID NO: 3547932 - DNA, 25 bp, Homo sapien
gttctgggaaaggcagttcctggta

SEQ ID NO: 3547933 - DNA, 25 bp, Homo sapien
gaccccaaggaaggacagaatatgc

SEQ ID NO: 3547934 - DNA, 25 bp, Homo sapien
gatgaaggccaccagttgtaaggac

SEQ ID NO: 3547935 - DNA, 25 bp, Homo sapien
gatcttgagcagagcagccactatg

SEQ ID NO: 3547936 - DNA, 25 bp, Homo sapien
taaggacaggaacagaccactgatg

SEQ ID NO: 3547937 - DNA, 25 bp, Homo sapien
gggcaggagggataggccaggaaca

SEQ ID NO: 3547938 - DNA, 25 bp, Homo sapien
tgggcaggagggataggccaggaac

SEQ ID NO: 3547939 - DNA, 25 bp, Homo sapien
aattaagttacactctgagccatga

SEQ ID NO: 3547940 - DNA, 25 bp, Homo sapien
gagctaacagtatttctctgtggag

SEQ ID NO: 3547941 - DNA, 25 bp, Homo sapien
gctacaagtacagaaggaagaatca

SEQ ID NO: 3547942 - DNA, 25 bp, Homo sapien
ttttcccaggtaattgagctaacag

SEQ ID NO: 3547943 - DNA, 25 bp, Homo sapien
tacacctcaatttctacctgccaag

SEQ ID NO: 3547944 - DNA, 25 bp, Homo sapien
gattcaggagctattttcagaaaga

SEQ ID NO: 3547945 - DNA, 25 bp, Homo sapien
ctggaaggatcaagactagttcttt

SEQ ID NO: 3547946 - DNA, 25 bp, Homo sapien
tgggccaaactatgtaagatactat

SEQ ID NO: 3547947 - DNA, 25 bp, Homo sapien
caggtgtccctttggtactgagcac

SEQ ID NO: 3547948 - DNA, 25 bp, Homo sapien
gacagcctggtgaacacggatggca

SEQ ID NO: 3547949 - DNA, 25 bp, Homo sapien
tggttaatttcctggcggtagccgc

SEQ ID NO: 3547950 - DNA, 25 bp, Homo sapien
aacaagggcaaactggcgatcctca

SEQ ID NO: 3547951 - DNA, 25 bp, Homo sapien
gggatgcaagtatgccaaggcacag

SEQ ID NO: 3547952 - DNA, 25 bp, Homo sapien
agagggccaggcccacagcgccgcc

SEQ ID NO: 3547953 - DNA, 25 bp, Homo sapien
gggagaggaagagggccaggcccac

SEQ ID NO: 3547954 - DNA, 25 bp, Homo sapien
ccaggcccacagcgccgcccagcat

SEQ ID NO: 3547955 - DNA, 25 bp, Homo sapien
agggccaggcccacagcgccgccca

SEQ ID NO: 3547956 - DNA, 25 bp, Homo sapien
tagtgcaaagggtggcagatggcca

SEQ ID NO: 3547957 - DNA, 25 bp, Homo sapien
agtgcaaagggtggcagatggccac

SEQ ID NO: 3547958 - DNA, 25 bp, Homo sapien
gatgaggggtagtgcaaagggtggc

SEQ ID NO: 3547959 - DNA, 25 bp, Homo sapien
gaggggtagtgcaaagggtggcaga

SEQ ID NO: 3547960 - DNA, 25 bp, Homo sapien
agaagaacatttgggccccacatcc

SEQ ID NO: 3547961 - DNA, 25 bp, Homo sapien
agggcaccacaacggtggtgtagca

SEQ ID NO: 3547962 - DNA, 25 bp, Homo sapien
catcaagggcaccacaacggtggtg

SEQ ID NO: 3547963 - DNA, 25 bp, Homo sapien
agcatcaagggcaccacaacggtgg

SEQ ID NO: 3547964 - DNA, 25 bp, Homo sapien
tcaagggcaccacaacggtggtgta

SEQ ID NO: 3547965 - DNA, 25 bp, Homo sapien
cgctgtatgtgcacacaacccagat

SEQ ID NO: 3547966 - DNA, 25 bp, Homo sapien
gttcggagaacgctgtatgtgcaca

SEQ ID NO: 3547967 - DNA, 25 bp, Homo sapien
gaacctgaaattcagggactgtggt

SEQ ID NO: 3547968 - DNA, 25 bp, Homo sapien
ggactgtggtgaacacacggaacac

SEQ ID NO: 3547969 - DNA, 25 bp, Homo sapien
ctggttgaagacaggttaccacgca

SEQ ID NO: 3547970 - DNA, 25 bp, Homo sapien
gaagacaggttaccacgcaagcatg

SEQ ID NO: 3547971 - DNA, 25 bp, Homo sapien
ccacgcaagcatgccttgtgcaaaa

SEQ ID NO: 3547972 - DNA, 25 bp, Homo sapien
ggttaccacgcaagcatgccttgtg

SEQ ID NO: 3547973 - DNA, 25 bp, Homo sapien
ggctaagcccaatgaagactttgct

SEQ ID NO: 3547974 - DNA, 25 bp, Homo sapien
ttataaatagtaggctaagcccaat

SEQ ID NO: 3547975 - DNA, 25 bp, Homo sapien
atagtaggctaagcccaatgaagac

SEQ ID NO: 3547976 - DNA, 25 bp, Homo sapien
gtaggctaagcccaatgaagacttt

SEQ ID NO: 3547977 - DNA, 25 bp, Homo sapien
gctatagactagagggttaagcatg

SEQ ID NO: 3547978 - DNA, 25 bp, Homo sapien
agaagatggaaacagtagtgaggtg

SEQ ID NO: 3547979 - DNA, 25 bp, Homo sapien
agatggaaacagtagtgaggtgata

SEQ ID NO: 3547980 - DNA, 25 bp, Homo sapien
caggctatagactagagggttaagc

SEQ ID NO: 3547981 - DNA, 25 bp, Homo sapien
tatgaagagcacaatctcatgtgcg

SEQ ID NO: 3547982 - DNA, 25 bp, Homo sapien
aacataagagttcaagataatcaag

SEQ ID NO: 3547983 - DNA, 25 bp, Homo sapien
gatattaaatgctgccaatatgaag

SEQ ID NO: 3547984 - DNA, 25 bp, Homo sapien
tcatgtgcgtaaatatcagagcaag

SEQ ID NO: 3547985 - DNA, 25 bp, Homo sapien
gccagtgactagcaggacaaacact

SEQ ID NO: 3547986 - DNA, 25 bp, Homo sapien
caaacactgtccaccagagagagtt

SEQ ID NO: 3547987 - DNA, 25 bp, Homo sapien
tggatggaggattgaaagagtccac

SEQ ID NO: 3547988 - DNA, 25 bp, Homo sapien
acagatgtaggagccagtgactagc

SEQ ID NO: 3547989 - DNA, 25 bp, Homo sapien
agccgggagtccaacagaatcaaca

SEQ ID NO: 3547990 - DNA, 25 bp, Homo sapien
ggacctgaagctctaggacatctgt

SEQ ID NO: 3547991 - DNA, 25 bp, Homo sapien
acatgatcatcccaaagttcccaac

SEQ ID NO: 3547992 - DNA, 25 bp, Homo sapien
ccagagtggtgagataaatgacagt

SEQ ID NO: 3547993 - DNA, 25 bp, Homo sapien
tctgtgatgcacattcgtactgatg

SEQ ID NO: 3547994 - DNA, 25 bp, Homo sapien
actgcaagatctgtgatgcacattc

SEQ ID NO: 3547995 - DNA, 25 bp, Homo sapien
tgcacattcgtactgatgtgttggt

SEQ ID NO: 3547996 - DNA, 25 bp, Homo sapien
cattcgtactgatgtgttggtgtca

SEQ ID NO: 3547997 - DNA, 25 bp, Homo sapien
ggaacagacaaattgaggatacaaa

SEQ ID NO: 3547998 - DNA, 25 bp, Homo sapien
tggaaatccacatccagaaaagcat

SEQ ID NO: 3547999 - DNA, 25 bp, Homo sapien
ttttgtcctaggaacagacaaattg

SEQ ID NO: 3548000 - DNA, 25 bp, Homo sapien
ccttcaagtccagaccattgactgg

SEQ ID NO: 3548001 - DNA, 25 bp, Homo sapien
atggttcaccatggggaagacaata

SEQ ID NO: 3548002 - DNA, 25 bp, Homo sapien
ggcacaaatggccaaagccttctgg

SEQ ID NO: 3548003 - DNA, 25 bp, Homo sapien
caccatggggaagacaatagtataa

SEQ ID NO: 3548004 - DNA, 25 bp, Homo sapien
ggagctgggctgtatatgcatgaag

SEQ ID NO: 3548005 - DNA, 25 bp, Homo sapien
acatcaataagtaggatatcaagat

SEQ ID NO: 3548006 - DNA, 25 bp, Homo sapien
tggccagaggccattaaggccaata

SEQ ID NO: 3548007 - DNA, 25 bp, Homo sapien
gattttgtcttctctaaggagccca

SEQ ID NO: 3548008 - DNA, 25 bp, Homo sapien
gaatgtctgagtagcccacacagta

SEQ ID NO: 3548009 - DNA, 25 bp, Homo sapien
ttaccacactggcaaaggaatcaga

SEQ ID NO: 3548010 - DNA, 25 bp, Homo sapien
ctacattgatgagatagatgagaac

SEQ ID NO: 3548011 - DNA, 25 bp, Homo sapien
aaaaagtctaccagagacagattac

SEQ ID NO: 3548012 - DNA, 25 bp, Homo sapien
tccaactacattgatgagatagatg

SEQ ID NO: 3548013 - DNA, 25 bp, Homo sapien
ggagctgagagtaccagagaatcaa

SEQ ID NO: 3548014 - DNA, 25 bp, Homo sapien
ttctcaaccgcctttttgaatgcat

SEQ ID NO: 3548015 - DNA, 25 bp, Homo sapien
ccttctcaaccgcctttttgaatgc

SEQ ID NO: 3548016 - DNA, 25 bp, Homo sapien
tcaaccgcctttttgaatgcattct

SEQ ID NO: 3548017 - DNA, 25 bp, Homo sapien
ctcaaccgcctttttgaatgcattc

SEQ ID NO: 3548018 - DNA, 25 bp, Homo sapien
cataaagatagtagttccatagaag

SEQ ID NO: 3548019 - DNA, 25 bp, Homo sapien
acacagcatagaacaaggatgccat

SEQ ID NO: 3548020 - DNA, 25 bp, Homo sapien
gctaggctgtaagtgcataaagata

SEQ ID NO: 3548021 - DNA, 25 bp, Homo sapien
taagtgcataaagatagtagttcca

SEQ ID NO: 3548022 - DNA, 25 bp, Homo sapien
catcttcaagatggtgatgaatatg

SEQ ID NO: 3548023 - DNA, 25 bp, Homo sapien
cttcaagatggtgatgaatatgaac

SEQ ID NO: 3548024 - DNA, 25 bp, Homo sapien
tcttcaagatggtgatgaatatgaa

SEQ ID NO: 3548025 - DNA, 25 bp, Homo sapien
atcttcaagatggtgatgaatatga

SEQ ID NO: 3548026 - DNA, 25 bp, Homo sapien
gctaatgtgtttaccagagcaagac

SEQ ID NO: 3548027 - DNA, 25 bp, Homo sapien
tgaatatgtccccaatgcggaggga

SEQ ID NO: 3548028 - DNA, 25 bp, Homo sapien
cataggagcctatgaccagatgagc

SEQ ID NO: 3548029 - DNA, 25 bp, Homo sapien
cacatacactggctatcgtggtggt

SEQ ID NO: 3548030 - DNA, 25 bp, Homo sapien
caagagtccagcaggatcaacagta

SEQ ID NO: 3548031 - DNA, 25 bp, Homo sapien
gacagttaagtatccaagcagagac

SEQ ID NO: 3548032 - DNA, 25 bp, Homo sapien
gagcagcacaagcattgtacgagga

SEQ ID NO: 3548033 - DNA, 25 bp, Homo sapien
ttctgtggcattggttagacctacc

SEQ ID NO: 3548034 - DNA, 25 bp, Homo sapien
ataataggctgagtagggatgtccg

SEQ ID NO: 3548035 - DNA, 25 bp, Homo sapien
gaacatggtcatcaaactgagaacc

SEQ ID NO: 3548036 - DNA, 25 bp, Homo sapien
ggatgtccgggaatggccttcccat

SEQ ID NO: 3548037 - DNA, 25 bp, Homo sapien
agaggctgtagatgaattcaggaag

SEQ ID NO: 3548038 - DNA, 25 bp, Homo sapien
gacagtttgtccagtgccctcagtg

SEQ ID NO: 3548039 - DNA, 25 bp, Homo sapien
gttcagctgagaaagaccacaggag

SEQ ID NO: 3548040 - DNA, 25 bp, Homo sapien
tcagctgagaaagaccacaggagac

SEQ ID NO: 3548041 - DNA, 25 bp, Homo sapien
cttaatgtttaaggtgttctttctg

SEQ ID NO: 3548042 - DNA, 25 bp, Homo sapien
caccaaggtgctggctgagatgatc

SEQ ID NO: 3548043 - DNA, 25 bp, Homo sapien
gcggtagtagcacatgttctcattg

SEQ ID NO: 3548044 - DNA, 25 bp, Homo sapien
cagaggcatgcggtagtagcacatg

SEQ ID NO: 3548045 - DNA, 25 bp, Homo sapien
attgagattgaaatttcctccctgc

SEQ ID NO: 3548046 - DNA, 25 bp, Homo sapien
gaatacaggctgagaacaaaacagt

SEQ ID NO: 3548047 - DNA, 25 bp, Homo sapien
tgggaatacaggctgagaacaaaac

SEQ ID NO: 3548048 - DNA, 25 bp, Homo sapien
caggctgagaacaaaacagttctca

SEQ ID NO: 3548049 - DNA, 25 bp, Homo sapien
tacaggctgagaacaaaacagttct

SEQ ID NO: 3548050 - DNA, 25 bp, Homo sapien
tttagagaaatttatccagtaacca

SEQ ID NO: 3548051 - DNA, 25 bp, Homo sapien
tatccagtaaccaactgtagaaatg

SEQ ID NO: 3548052 - DNA, 25 bp, Homo sapien
ccctcttctcttggtgctctacaca

SEQ ID NO: 3548053 - DNA, 25 bp, Homo sapien
gagaaatttatccagtaaccaactg

SEQ ID NO: 3548054 - DNA, 25 bp, Homo sapien
ttaaaagactgaatctagagaatat

SEQ ID NO: 3548055 - DNA, 25 bp, Homo sapien
aaagactgaatctagagaatatttt

SEQ ID NO: 3548056 - DNA, 25 bp, Homo sapien
agactgaatctagagaatattttgc

SEQ ID NO: 3548057 - DNA, 25 bp, Homo sapien
gactgaatctagagaatattttgcc

SEQ ID NO: 3548058 - DNA, 25 bp, Homo sapien
catggaatgactggaacttggtcgt

SEQ ID NO: 3548059 - DNA, 25 bp, Homo sapien
gaatcacattggacatgcagaaaga

SEQ ID NO: 3548060 - DNA, 25 bp, Homo sapien
tgcagaaagagaggcgaaatgtatc

SEQ ID NO: 3548061 - DNA, 25 bp, Homo sapien
tatagactataggactgagcatggg

SEQ ID NO: 3548062 - DNA, 25 bp, Homo sapien
tagggggttacacactgctgcgtag

SEQ ID NO: 3548063 - DNA, 25 bp, Homo sapien
tggtataatgtagggggttacacac

SEQ ID NO: 3548064 - DNA, 25 bp, Homo sapien
atgtagggggttacacactgctgcg

SEQ ID NO: 3548065 - DNA, 25 bp, Homo sapien
gttacacactgctgcgtagcggtca

SEQ ID NO: 3548066 - DNA, 25 bp, Homo sapien
caagcaggatgaattcactcacctc

SEQ ID NO: 3548067 - DNA, 25 bp, Homo sapien
gattaatatgatcatccccaggttc

SEQ ID NO: 3548068 - DNA, 25 bp, Homo sapien
ggagtaaccaatgcctgcaagagac

SEQ ID NO: 3548069 - DNA, 25 bp, Homo sapien
taaaacctttggagtgacagctgag

SEQ ID NO: 3548070 - DNA, 25 bp, Homo sapien
tgttattttagaatcacaagatact

SEQ ID NO: 3548071 - DNA, 25 bp, Homo sapien
ggatgttattttagaatcacaagat

SEQ ID NO: 3548072 - DNA, 25 bp, Homo sapien
gatgttattttagaatcacaagata

SEQ ID NO: 3548073 - DNA, 25 bp, Homo sapien
atgttattttagaatcacaagatac

SEQ ID NO: 3548074 - DNA, 25 bp, Homo sapien
gaaaaaccctgtgatgaacaaaaca

SEQ ID NO: 3548075 - DNA, 25 bp, Homo sapien
gtgatgaacaaaacagagttgcaca

SEQ ID NO: 3548076 - DNA, 25 bp, Homo sapien
aaaaaccctgtgatgaacaaaacag

SEQ ID NO: 3548077 - DNA, 25 bp, Homo sapien
atgaacaaaacagagttgcacaaaa

SEQ ID NO: 3548078 - DNA, 25 bp, Homo sapien
gtttatgcacaatctttttatttga

SEQ ID NO: 3548079 - DNA, 25 bp, Homo sapien
taggctgcagatgtgtttatgcaca

SEQ ID NO: 3548080 - DNA, 25 bp, Homo sapien
gactgtaggctgcagatgtgtttat

SEQ ID NO: 3548081 - DNA, 25 bp, Homo sapien
gctgcagatgtgtttatgcacaatc

SEQ ID NO: 3548082 - DNA, 25 bp, Homo sapien
aatgcgctcttcacttcgttgttcc

SEQ ID NO: 3548083 - DNA, 25 bp, Homo sapien
ttgaatgcgctcttcacttcgttgt

SEQ ID NO: 3548084 - DNA, 25 bp, Homo sapien
tcttgaatgcgctcttcacttcgtt

SEQ ID NO: 3548085 - DNA, 25 bp, Homo sapien
cgctcttcacttcgttgttcctcag

SEQ ID NO: 3548086 - DNA, 25 bp, Homo sapien
acagatgccagtttgtctgtgtcca

SEQ ID NO: 3548087 - DNA, 25 bp, Homo sapien
tccatggagtgaccagagctgggct

SEQ ID NO: 3548088 - DNA, 25 bp, Homo sapien
tgatcatagtatagaacacagatgc

SEQ ID NO: 3548089 - DNA, 25 bp, Homo sapien
gctgtaagtacatgaagataatagt

SEQ ID NO: 3548090 - DNA, 25 bp, Homo sapien
gaaaagatattgaaactggctacat

SEQ ID NO: 3548091 - DNA, 25 bp, Homo sapien
cattcacatgtctatcacagcaaga

SEQ ID NO: 3548092 - DNA, 25 bp, Homo sapien
caagataactaggatggcagaaaag

SEQ ID NO: 3548093 - DNA, 25 bp, Homo sapien
tggctacataaatgagaactagctc

SEQ ID NO: 3548094 - DNA, 25 bp, Homo sapien
gactggtggaacatcacagaaaaag

SEQ ID NO: 3548095 - DNA, 25 bp, Homo sapien
actggtggaacatcacagaaaaagc

SEQ ID NO: 3548096 - DNA, 25 bp, Homo sapien
ggaacatcacagaaaaagcaatgga

SEQ ID NO: 3548097 - DNA, 25 bp, Homo sapien
ggtggaacatcacagaaaaagcaat

SEQ ID NO: 3548098 - DNA, 25 bp, Homo sapien
tgtaatgtaggggtttgcacactgc

SEQ ID NO: 3548099 - DNA, 25 bp, Homo sapien
gggtttgcacactgcatcatagcgg

SEQ ID NO: 3548100 - DNA, 25 bp, Homo sapien
gcacactgcatcatagcggtcatag

SEQ ID NO: 3548101 - DNA, 25 bp, Homo sapien
tttgcacactgcatcatagcggtca

SEQ ID NO: 3548102 - DNA, 25 bp, Homo sapien
caagaggaaattttccacagtggca

SEQ ID NO: 3548103 - DNA, 25 bp, Homo sapien
aggaaattttccacagtggcaaagg

SEQ ID NO: 3548104 - DNA, 25 bp, Homo sapien
tgaggccaagaggaaattttccaca

SEQ ID NO: 3548105 - DNA, 25 bp, Homo sapien
ggccaagaggaaattttccacagtg

SEQ ID NO: 3548106 - DNA, 25 bp, Homo sapien
ttgacaaggtatatgagagtgaaca

SEQ ID NO: 3548107 - DNA, 25 bp, Homo sapien
gagcattggttagtcccaggaggat

SEQ ID NO: 3548108 - DNA, 25 bp, Homo sapien
gatgaccttgtctcctataacgagc

SEQ ID NO: 3548109 - DNA, 25 bp, Homo sapien
tataacgagcccagctatgactgtg

SEQ ID NO: 3548110 - DNA, 25 bp, Homo sapien
aatgctaatacatgttgtggaatag

SEQ ID NO: 3548111 - DNA, 25 bp, Homo sapien
tggaatagatattgcaatgaaatgg

SEQ ID NO: 3548112 - DNA, 25 bp, Homo sapien
tcacttctgtacagttcttcatcaa

SEQ ID NO: 3548113 - DNA, 25 bp, Homo sapien
tattagaaaatcagaggatgcctgc

SEQ ID NO: 3548114 - DNA, 25 bp, Homo sapien
cagttggctgtgctagccatcccat

SEQ ID NO: 3548115 - DNA, 25 bp, Homo sapien
ttcgttgttgcatccatacagttgg

SEQ ID NO: 3548116 - DNA, 25 bp, Homo sapien
atccatacagttggctgtgctagcc

SEQ ID NO: 3548117 - DNA, 25 bp, Homo sapien
aattcttcgttgttgcatccataca

SEQ ID NO: 3548118 - DNA, 25 bp, Homo sapien
acagggattagcatggggataacca

SEQ ID NO: 3548119 - DNA, 25 bp, Homo sapien
ccacagggattagcatggggataac

SEQ ID NO: 3548120 - DNA, 25 bp, Homo sapien
ctataaaccacagggattagcatgg

SEQ ID NO: 3548121 - DNA, 25 bp, Homo sapien
ggctataaaccacagggattagcat

SEQ ID NO: 3548122 - DNA, 25 bp, Homo sapien
ggccagagaagcacacacatttgtt

SEQ ID NO: 3548123 - DNA, 25 bp, Homo sapien
gcacatatgtgatgaggacagtctc

SEQ ID NO: 3548124 - DNA, 25 bp, Homo sapien
acagcagcagtcagtaaacctaaga

SEQ ID NO: 3548125 - DNA, 25 bp, Homo sapien
aaacctaagacatgcatgtatggcc

SEQ ID NO: 3548126 - DNA, 25 bp, Homo sapien
ggagatgaccttgtgagctatcagc

SEQ ID NO: 3548127 - DNA, 25 bp, Homo sapien
ttgtaggagatgaccttgtgagcta

SEQ ID NO: 3548128 - DNA, 25 bp, Homo sapien
ggagtgacagtttctgagtagcaaa

SEQ ID NO: 3548129 - DNA, 25 bp, Homo sapien
gacagtttctgagtagcaaaagtcc

SEQ ID NO: 3548130 - DNA, 25 bp, Homo sapien
ataagacaaagaggtggacctgtag

SEQ ID NO: 3548131 - DNA, 25 bp, Homo sapien
ggttcccactcagagtgaagaggta

SEQ ID NO: 3548132 - DNA, 25 bp, Homo sapien
agacaaagaggtggacctgtagttc

SEQ ID NO: 3548133 - DNA, 25 bp, Homo sapien
caaagaggtggacctgtagttctgg

SEQ ID NO: 3548134 - DNA, 25 bp, Homo sapien
ctagtcatatgaattcatttacctc

SEQ ID NO: 3548135 - DNA, 25 bp, Homo sapien
agtcatatgaattcatttacctctg

SEQ ID NO: 3548136 - DNA, 25 bp, Homo sapien
catatgaattcatttacctctgtat

SEQ ID NO: 3548137 - DNA, 25 bp, Homo sapien
gtcatatgaattcatttacctctgt

SEQ ID NO: 3548138 - DNA, 25 bp, Homo sapien
tgttcttcatctcccgcatgagtgg

SEQ ID NO: 3548139 - DNA, 25 bp, Homo sapien
ttcttcatctcccgcatgagtggct

SEQ ID NO: 3548140 - DNA, 25 bp, Homo sapien
tctgttcttcatctcccgcatgagt

SEQ ID NO: 3548141 - DNA, 25 bp, Homo sapien
ctgttcttcatctcccgcatgagtg

SEQ ID NO: 3548142 - DNA, 25 bp, Homo sapien
taaactgaccatcctacagacaatt

SEQ ID NO: 3548143 - DNA, 25 bp, Homo sapien
actgaccatcctacagacaattttg

SEQ ID NO: 3548144 - DNA, 25 bp, Homo sapien
ttaaactgaccatcctacagacaat

SEQ ID NO: 3548145 - DNA, 25 bp, Homo sapien
tgaccatcctacagacaattttgcc

SEQ ID NO: 3548146 - DNA, 25 bp, Homo sapien
gactggagctgggttgtaagtacat

SEQ ID NO: 3548147 - DNA, 25 bp, Homo sapien
atgaccattgtatagaacacaggtg

SEQ ID NO: 3548148 - DNA, 25 bp, Homo sapien
tgtatagaacacaggtgccattttg

SEQ ID NO: 3548149 - DNA, 25 bp, Homo sapien
cattgtatagaacacaggtgccatt

SEQ ID NO: 3548150 - DNA, 25 bp, Homo sapien
agagagaaccatgactgctggaata

SEQ ID NO: 3548151 - DNA, 25 bp, Homo sapien
caagctcgctaatatgtctatcaga

SEQ ID NO: 3548152 - DNA, 25 bp, Homo sapien
gctataaagatattgaagctcacaa

SEQ ID NO: 3548153 - DNA, 25 bp, Homo sapien
tatcaagataaccaggagagctata

SEQ ID NO: 3548154 - DNA, 25 bp, Homo sapien
tccagccatgacgatgggagtgaca

SEQ ID NO: 3548155 - DNA, 25 bp, Homo sapien
cagacgagcacacacagttgttgtc

SEQ ID NO: 3548156 - DNA, 25 bp, Homo sapien
gacgagcacacacagttgttgtcat

SEQ ID NO: 3548157 - DNA, 25 bp, Homo sapien
ggccagacgagcacacacagttgtt

SEQ ID NO: 3548158 - DNA, 25 bp, Homo sapien
gattgtggagacaggaatcccagaa

SEQ ID NO: 3548159 - DNA, 25 bp, Homo sapien
tctgagtcattggttagtcctagaa

SEQ ID NO: 3548160 - DNA, 25 bp, Homo sapien
gggaacctgcagttctgagtcattg

SEQ ID NO: 3548161 - DNA, 25 bp, Homo sapien
ccaggtttccaaccagagtgataat

SEQ ID NO: 3548162 - DNA, 25 bp, Homo sapien
cactgctctgggggactcacaggat

SEQ ID NO: 3548163 - DNA, 25 bp, Homo sapien
actgctctgggggactcacaggatg

SEQ ID NO: 3548164 - DNA, 25 bp, Homo sapien
aggtgtctttgagtgaccacataca

SEQ ID NO: 3548165 - DNA, 25 bp, Homo sapien
tacagcttttcacttagccagacaa

SEQ ID NO: 3548166 - DNA, 25 bp, Homo sapien
atcaaaaggcttaatgttccagcag

SEQ ID NO: 3548167 - DNA, 25 bp, Homo sapien
tctttgagtgaccacatacagcttt

SEQ ID NO: 3548168 - DNA, 25 bp, Homo sapien
tctcaacactttcttgaatgcattc

SEQ ID NO: 3548169 - DNA, 25 bp, Homo sapien
caacactttcttgaatgcattctgg

SEQ ID NO: 3548170 - DNA, 25 bp, Homo sapien
acactttcttgaatgcattctggac

SEQ ID NO: 3548171 - DNA, 25 bp, Homo sapien
ttatagaaatttttgccttctcaac

SEQ ID NO: 3548172 - DNA, 25 bp, Homo sapien
catcttcaagatggtgatgaatatg

SEQ ID NO: 3548173 - DNA, 25 bp, Homo sapien
cttcaagatggtgatgaatatgaac

SEQ ID NO: 3548174 - DNA, 25 bp, Homo sapien
tcttcaagatggtgatgaatatgaa

SEQ ID NO: 3548175 - DNA, 25 bp, Homo sapien
atcttcaagatggtgatgaatatga

SEQ ID NO: 3548176 - DNA, 25 bp, Homo sapien
gatgtaccagattggatttacagaa

SEQ ID NO: 3548177 - DNA, 25 bp, Homo sapien
cacagacatatgagcctagggccag

SEQ ID NO: 3548178 - DNA, 25 bp, Homo sapien
cactagtgtgtttatcagagcaaga

SEQ ID NO: 3548179 - DNA, 25 bp, Homo sapien
aaaccagaatcacctcactagtgtg

SEQ ID NO: 3548180 - DNA, 25 bp, Homo sapien
ggccattgaggccaacaagtaattt

SEQ ID NO: 3548181 - DNA, 25 bp, Homo sapien
caagtaattttccaccgtggccaag

SEQ ID NO: 3548182 - DNA, 25 bp, Homo sapien
cataggccattgaggccaacaagta

SEQ ID NO: 3548183 - DNA, 25 bp, Homo sapien
tgaggccaacaagtaattttccacc

SEQ ID NO: 3548184 - DNA, 25 bp, Homo sapien
gatctgtagttctgggacactggtt

SEQ ID NO: 3548185 - DNA, 25 bp, Homo sapien
tctcctctaaggaacccagccatga

SEQ ID NO: 3548186 - DNA, 25 bp, Homo sapien
gaatgaactttgtcacttccgtaca

SEQ ID NO: 3548187 - DNA, 25 bp, Homo sapien
caagagtccatcaggatcagcaaca

SEQ ID NO: 3548188 - DNA, 25 bp, Homo sapien
gaatcctatagaggcctttgccttc

SEQ ID NO: 3548189 - DNA, 25 bp, Homo sapien
ttaaaatatgaatcctatagaggcc

SEQ ID NO: 3548190 - DNA, 25 bp, Homo sapien
aatatgaatcctatagaggcctttg

SEQ ID NO: 3548191 - DNA, 25 bp, Homo sapien
tatgaatcctatagaggcctttgcc

SEQ ID NO: 3548192 - DNA, 25 bp, Homo sapien
ggtcatcagttaaccccacaaggat

SEQ ID NO: 3548193 - DNA, 25 bp, Homo sapien
tatggccaggcaagcacatacattt

SEQ ID NO: 3548194 - DNA, 25 bp, Homo sapien
tcaactacattggatctacagaagg

SEQ ID NO: 3548195 - DNA, 25 bp, Homo sapien
tccttcaggtgagcgcatcttcatg

SEQ ID NO: 3548196 - DNA, 25 bp, Homo sapien
tcaaacacattagatttcttctgga

SEQ ID NO: 3548197 - DNA, 25 bp, Homo sapien
ttcaaacacattagatttcttctgg

SEQ ID NO: 3548198 - DNA, 25 bp, Homo sapien
cattcaaacacattagatttcttct

SEQ ID NO: 3548199 - DNA, 25 bp, Homo sapien
catcctatgcacagtggatttgatt

SEQ ID NO: 3548200 - DNA, 25 bp, Homo sapien
tacatcctatgcacagtggatttga

SEQ ID NO: 3548201 - DNA, 25 bp, Homo sapien
ttacatcctatgcacagtggatttg

SEQ ID NO: 3548202 - DNA, 25 bp, Homo sapien
acatcctatgcacagtggatttgat

SEQ ID NO: 3548203 - DNA, 25 bp, Homo sapien
gaggaagactcgagggttgtagtac

SEQ ID NO: 3548204 - DNA, 25 bp, Homo sapien
agaggaagactcgagggttgtagta

SEQ ID NO: 3548205 - DNA, 25 bp, Homo sapien
gaatccacaacatcccttgcaggct

SEQ ID NO: 3548206 - DNA, 25 bp, Homo sapien
tgcaggctctcgagctgctacactc

SEQ ID NO: 3548207 - DNA, 25 bp, Homo sapien
gtcatgcagcccttataatgaaggc

SEQ ID NO: 3548208 - DNA, 25 bp, Homo sapien
ggccagcttgcatctccttgatgtg

SEQ ID NO: 3548209 - DNA, 25 bp, Homo sapien
tgatcattttgcatcccatatttaa

SEQ ID NO: 3548210 - DNA, 25 bp, Homo sapien
agttctccacaaatactgagcctct

SEQ ID NO: 3548211 - DNA, 25 bp, Homo sapien
aacttttcaggaatgatcattttgc

SEQ ID NO: 3548212 - DNA, 25 bp, Homo sapien
cacaaatactgagcctcttgtgaat

SEQ ID NO: 3548213 - DNA, 25 bp, Homo sapien
ttagcatctgtatctgagccttagt

SEQ ID NO: 3548214 - DNA, 25 bp, Homo sapien
tgttaacagggtaattatgagaaac

SEQ ID NO: 3548215 - DNA, 25 bp, Homo sapien
catctgtttaatccttgataagtca

SEQ ID NO: 3548216 - DNA, 25 bp, Homo sapien
caaaagagtgaatcggtatcctggt

SEQ ID NO: 3548217 - DNA, 25 bp, Homo sapien
gagctctgtagatttcaatgagaaa

SEQ ID NO: 3548218 - DNA, 25 bp, Homo sapien
cacccagtgcttggatagctgcttc

SEQ ID NO: 3548219 - DNA, 25 bp, Homo sapien
gaaagattcctatatgcagtggatc

SEQ ID NO: 3548220 - DNA, 25 bp, Homo sapien
ttctccaaatgcagatactcttgag

SEQ ID NO: 3548221 - DNA, 25 bp, Homo sapien
tacaccaagtttaatagtgaatgaa

SEQ ID NO: 3548222 - DNA, 25 bp, Homo sapien
aatcttctgctttaaaccacgtcaa

SEQ ID NO: 3548223 - DNA, 25 bp, Homo sapien
tgaaatctttacaccaagtttaata

SEQ ID NO: 3548224 - DNA, 25 bp, Homo sapien
tcttacaattaaaaacaggatgagg

SEQ ID NO: 3548225 - DNA, 25 bp, Homo sapien
taaagtttgttgagtattttccaga

SEQ ID NO: 3548226 - DNA, 25 bp, Homo sapien
aagtttgttgagtattttccagaga

SEQ ID NO: 3548227 - DNA, 25 bp, Homo sapien
gtttgttgagtattttccagagagc

SEQ ID NO: 3548228 - DNA, 25 bp, Homo sapien
ttgttgagtattttccagagagcac

SEQ ID NO: 3548229 - DNA, 25 bp, Homo sapien
tgattgtgccatagaagatggacaa

SEQ ID NO: 3548230 - DNA, 25 bp, Homo sapien
agaagatggacaaagcagtgagatg

SEQ ID NO: 3548231 - DNA, 25 bp, Homo sapien
tagaagatggacaaagcagtgagat

SEQ ID NO: 3548232 - DNA, 25 bp, Homo sapien
catgaagatgattgtgccatagaag

SEQ ID NO: 3548233 - DNA, 25 bp, Homo sapien
gaatggtgatgcatatgaagaagta

SEQ ID NO: 3548234 - DNA, 25 bp, Homo sapien
atgaccaggagggtgaaaaagacgt

SEQ ID NO: 3548235 - DNA, 25 bp, Homo sapien
tcagcagaatgcatcctctgaatgg

SEQ ID NO: 3548236 - DNA, 25 bp, Homo sapien
aaataaggatgaccaggagggtgaa

SEQ ID NO: 3548237 - DNA, 25 bp, Homo sapien
accagtagcaaggagggcacacaca

SEQ ID NO: 3548238 - DNA, 25 bp, Homo sapien
ggaagccagagacataggaaccagt

SEQ ID NO: 3548239 - DNA, 25 bp, Homo sapien
ccaacttgctgatgcgtgtgtcaga

SEQ ID NO: 3548240 - DNA, 25 bp, Homo sapien
gcctgctgcatggatagaggcattg

SEQ ID NO: 3548241 - DNA, 25 bp, Homo sapien
aactgagctgcacatccatcgtagg

SEQ ID NO: 3548242 - DNA, 25 bp, Homo sapien
taatgaagaggcctacataccgctg

SEQ ID NO: 3548243 - DNA, 25 bp, Homo sapien
gctacagctgatgagtaacccaagt

SEQ ID NO: 3548244 - DNA, 25 bp, Homo sapien
cataccgctgcatggcgatcatagg

SEQ ID NO: 3548245 - DNA, 25 bp, Homo sapien
tcagatagtgtgttatacggcccat

SEQ ID NO: 3548246 - DNA, 25 bp, Homo sapien
tactatacacaagtcctagtctcag

SEQ ID NO: 3548247 - DNA, 25 bp, Homo sapien
caatctagggtaagtagtagcttca

SEQ ID NO: 3548248 - DNA, 25 bp, Homo sapien
tgcaagagcacctagagacagaaag

SEQ ID NO: 3548249 - DNA, 25 bp, Homo sapien
cagtgaaggagttttcgccagtaac

SEQ ID NO: 3548250 - DNA, 25 bp, Homo sapien
gcagaaagattagtccttgtgaagc

SEQ ID NO: 3548251 - DNA, 25 bp, Homo sapien
gaatcaaggattctaagagtctggt

SEQ ID NO: 3548252 - DNA, 25 bp, Homo sapien
gaccacgggaagaaagatattgtac

SEQ ID NO: 3548253 - DNA, 25 bp, Homo sapien
tggtatcatgattccacagcagtga

SEQ ID NO: 3548254 - DNA, 25 bp, Homo sapien
cagtgattgtaagacagtgagccac

SEQ ID NO: 3548255 - DNA, 25 bp, Homo sapien
tacactgaaggaagatgcaaagagc

SEQ ID NO: 3548256 - DNA, 25 bp, Homo sapien
tgagtagggccatcactagaggtga

SEQ ID NO: 3548257 - DNA, 25 bp, Homo sapien
aagcagaaggtcagtaacagaaaat

SEQ ID NO: 3548258 - DNA, 25 bp, Homo sapien
attaagcagaaggtcagtaacagaa

SEQ ID NO: 3548259 - DNA, 25 bp, Homo sapien
tattaagcagaaggtcagtaacaga

SEQ ID NO: 3548260 - DNA, 25 bp, Homo sapien
ctattaagcagaaggtcagtaacag

SEQ ID NO: 3548261 - DNA, 25 bp, Homo sapien
gaatggacgtccatccagttcaaag

SEQ ID NO: 3548262 - DNA, 25 bp, Homo sapien
tgaaaatgcccttcgacaactgtgt

SEQ ID NO: 3548263 - DNA, 25 bp, Homo sapien
gtgctcaggatggaacttgtacccc

SEQ ID NO: 3548264 - DNA, 25 bp, Homo sapien
ccatggcactgatacaacggccagt

SEQ ID NO: 3548265 - DNA, 25 bp, Homo sapien
tgtccatggctgaaaggtagttttc

SEQ ID NO: 3548266 - DNA, 25 bp, Homo sapien
taagaaatcctttcggcaatatggc

SEQ ID NO: 3548267 - DNA, 25 bp, Homo sapien
gggtgagaacatggctaagaaatcc

SEQ ID NO: 3548268 - DNA, 25 bp, Homo sapien
tcggcaatatggcttcttgtccttc

SEQ ID NO: 3548269 - DNA, 25 bp, Homo sapien
ctacactggagactgagaggaggcc

SEQ ID NO: 3548270 - DNA, 25 bp, Homo sapien
ggttgagccctgaaagctacactgg

SEQ ID NO: 3548271 - DNA, 25 bp, Homo sapien
tcccagagcctgatatagttgtcct

SEQ ID NO: 3548272 - DNA, 25 bp, Homo sapien
gaggaggccctttcaatctcagtgt

SEQ ID NO: 3548273 - DNA, 25 bp, Homo sapien
tatttcccgaaaggctaatgatact

SEQ ID NO: 3548274 - DNA, 25 bp, Homo sapien
cactcctgagtatatgtatggtttc

SEQ ID NO: 3548275 - DNA, 25 bp, Homo sapien
cagtgtatgaaaatcccaattattc

SEQ ID NO: 3548276 - DNA, 25 bp, Homo sapien
tatctgaatgacttacacatgtcaa

SEQ ID NO: 3548277 - DNA, 25 bp, Homo sapien
ttttcataacctagatgcacctgga

SEQ ID NO: 3548278 - DNA, 25 bp, Homo sapien
tggagggagaagcatccaccattgc

SEQ ID NO: 3548279 - DNA, 25 bp, Homo sapien
tagtcttcacaaaccgcagacctgg

SEQ ID NO: 3548280 - DNA, 25 bp, Homo sapien
tgagctcgacctgggatactagaat

SEQ ID NO: 3548281 - DNA, 25 bp, Homo sapien
cttgctgagatcctgattcaagcaa

SEQ ID NO: 3548282 - DNA, 25 bp, Homo sapien
tgagatcctgattcaagcaaaccaa

SEQ ID NO: 3548283 - DNA, 25 bp, Homo sapien
gagatcctgattcaagcaaaccaag

SEQ ID NO: 3548284 - DNA, 25 bp, Homo sapien
gctgagatcctgattcaagcaaacc

SEQ ID NO: 3548285 - DNA, 25 bp, Homo sapien
tattcaagtgatatatttgctctgt

SEQ ID NO: 3548286 - DNA, 25 bp, Homo sapien
cataaatccctaatggaataattga

SEQ ID NO: 3548287 - DNA, 25 bp, Homo sapien
tctgtattgctttaggttaataggg

SEQ ID NO: 3548288 - DNA, 25 bp, Homo sapien
taatccttaagcacttattcaagtg

SEQ ID NO: 3548289 - DNA, 25 bp, Homo sapien
ttggaggatctctttgggaccaatt

SEQ ID NO: 3548290 - DNA, 25 bp, Homo sapien
cttggaggatctctttgggaccaat

SEQ ID NO: 3548291 - DNA, 25 bp, Homo sapien
tcttggaggatctctttgggaccaa

SEQ ID NO: 3548292 - DNA, 25 bp, Homo sapien
ccatcataatgatccataggcagta

SEQ ID NO: 3548293 - DNA, 25 bp, Homo sapien
tctacctgaaatgtgcctatgtcct

SEQ ID NO: 3548294 - DNA, 25 bp, Homo sapien
tgctagtggattctgtcagcaccac

SEQ ID NO: 3548295 - DNA, 25 bp, Homo sapien
tgaaaaagcattgagcaagctccag

SEQ ID NO: 3548296 - DNA, 25 bp, Homo sapien
gtcctcgcctcctgcagcttgaagg

SEQ ID NO: 3548297 - DNA, 25 bp, Homo sapien
ccctgtcctcgcctcctgcagcttg

SEQ ID NO: 3548298 - DNA, 25 bp, Homo sapien
tcctcgcctcctgcagcttgaaggt

SEQ ID NO: 3548299 - DNA, 25 bp, Homo sapien
ctgtcctcgcctcctgcagcttgaa

SEQ ID NO: 3548300 - DNA, 25 bp, Homo sapien
gagcagtattctatgattgtcaaca

SEQ ID NO: 3548301 - DNA, 25 bp, Homo sapien
gactctagtgtagtcagtttgctac

SEQ ID NO: 3548302 - DNA, 25 bp, Homo sapien
gctacatggcttacttgtgagcagt

SEQ ID NO: 3548303 - DNA, 25 bp, Homo sapien
taaggtaggcaatttcattaggact

SEQ ID NO: 3548304 - DNA, 25 bp, Homo sapien
ataaatgttggagaaaggtagggag

SEQ ID NO: 3548305 - DNA, 25 bp, Homo sapien
ttgatagtactgataggaaccagga

SEQ ID NO: 3548306 - DNA, 25 bp, Homo sapien
tagtactgataggaaccaggactcc

SEQ ID NO: 3548307 - DNA, 25 bp, Homo sapien
tgatagtactgataggaaccaggac

SEQ ID NO: 3548308 - DNA, 25 bp, Homo sapien
gatagtactgataggaaccaggact

SEQ ID NO: 3548309 - DNA, 25 bp, Homo sapien
gtgggatacagcctctcaagtcggg

SEQ ID NO: 3548310 - DNA, 25 bp, Homo sapien
gctggtcttataactacccactggg

SEQ ID NO: 3548311 - DNA, 25 bp, Homo sapien
tgggatacagcctctcaagtcgggt

SEQ ID NO: 3548312 - DNA, 25 bp, Homo sapien
caggaaaggtgttgctggtcttata

SEQ ID NO: 3548313 - DNA, 25 bp, Homo sapien
ggtgccaggtctggttcattgctgt

SEQ ID NO: 3548314 - DNA, 25 bp, Homo sapien
tgccaggtctggttcattgctgtca

SEQ ID NO: 3548315 - DNA, 25 bp, Homo sapien
ggtctggttcattgctgtcagcact

SEQ ID NO: 3548316 - DNA, 25 bp, Homo sapien
caggtctggttcattgctgtcagca

SEQ ID NO: 3548317 - DNA, 25 bp, Homo sapien
agcagcgcagtaagcacagcgtgga

SEQ ID NO: 3548318 - DNA, 25 bp, Homo sapien
caagccactccgctcaaagaaggga

SEQ ID NO: 3548319 - DNA, 25 bp, Homo sapien
aaagaagggactggagccaatctct

SEQ ID NO: 3548320 - DNA, 25 bp, Homo sapien
tcttctttgcaatgagtacagacaa

SEQ ID NO: 3548321 - DNA, 25 bp, Homo sapien
gatgccatgattgccctagagcatg

SEQ ID NO: 3548322 - DNA, 25 bp, Homo sapien
ctcaggatgccatgattgccctaga

SEQ ID NO: 3548323 - DNA, 25 bp, Homo sapien
aggatgccatgattgccctagagca

SEQ ID NO: 3548324 - DNA, 25 bp, Homo sapien
catgattgccctagagcatggatca

SEQ ID NO: 3548325 - DNA, 25 bp, Homo sapien
tctttacaaagggagcaatcattct

SEQ ID NO: 3548326 - DNA, 25 bp, Homo sapien
cctcatctttacaaagggagcaatc

SEQ ID NO: 3548327 - DNA, 25 bp, Homo sapien
ttcctcatctttacaaagggagcaa

SEQ ID NO: 3548328 - DNA, 25 bp, Homo sapien
catctttacaaagggagcaatcatt

SEQ ID NO: 3548329 - DNA, 25 bp, Homo sapien
aggctgtaggaccaaaatttcagcc

SEQ ID NO: 3548330 - DNA, 25 bp, Homo sapien
gctgtaggaccaaaatttcagccca

SEQ ID NO: 3548331 - DNA, 25 bp, Homo sapien
tgtaggaccaaaatttcagcccatc

SEQ ID NO: 3548332 - DNA, 25 bp, Homo sapien
ggctgtaggaccaaaatttcagccc

SEQ ID NO: 3548333 - DNA, 25 bp, Homo sapien
gtctggtaagtgcttcttgccagca

SEQ ID NO: 3548334 - DNA, 25 bp, Homo sapien
gggaggccttgtgatcctgcttgtc

SEQ ID NO: 3548335 - DNA, 25 bp, Homo sapien
aatgccaaggtcctgcaattcctgc

SEQ ID NO: 3548336 - DNA, 25 bp, Homo sapien
cagcaatcggtttctggcaggatgc

SEQ ID NO: 3548337 - DNA, 25 bp, Homo sapien
cattttgcttcgagacattttgatc

SEQ ID NO: 3548338 - DNA, 25 bp, Homo sapien
ggaaattctgcctatctccggtggg

SEQ ID NO: 3548339 - DNA, 25 bp, Homo sapien
tactgcctgttataacatcacactg

SEQ ID NO: 3548340 - DNA, 25 bp, Homo sapien
caagaggttagtgttcagaaggtta

SEQ ID NO: 3548341 - DNA, 25 bp, Homo sapien
aggtggtggtgattcctttggctct

SEQ ID NO: 3548342 - DNA, 25 bp, Homo sapien
cagctgctgacgttttagaaggtgg

SEQ ID NO: 3548343 - DNA, 25 bp, Homo sapien
tccaactgagcagctgctgacgttt

SEQ ID NO: 3548344 - DNA, 25 bp, Homo sapien
tctcagtcaggtgagccatgagctc

SEQ ID NO: 3548345 - DNA, 25 bp, Homo sapien
tctgacattgctagaatcttgctga

SEQ ID NO: 3548346 - DNA, 25 bp, Homo sapien
cttagtttaaccctcatcctagctc

SEQ ID NO: 3548347 - DNA, 25 bp, Homo sapien
cattgctagaatcttgctgaagttt

SEQ ID NO: 3548348 - DNA, 25 bp, Homo sapien
tagtttaaccctcatcctagctctg

SEQ ID NO: 3548349 - DNA, 25 bp, Homo sapien
tgagctcctggatattggtagtata

SEQ ID NO: 3548350 - DNA, 25 bp, Homo sapien
gatattggtagtatacacgagctgc

SEQ ID NO: 3548351 - DNA, 25 bp, Homo sapien
tattggtagtatacacgagctgcgc

SEQ ID NO: 3548352 - DNA, 25 bp, Homo sapien
cctggatattggtagtatacacgag

SEQ ID NO: 3548353 - DNA, 25 bp, Homo sapien
cctctctagatactgatgaacctgt

SEQ ID NO: 3548354 - DNA, 25 bp, Homo sapien
tctaccttcattcaaagcacttttg

SEQ ID NO: 3548355 - DNA, 25 bp, Homo sapien
catttcaccaaatctagatactgca

SEQ ID NO: 3548356 - DNA, 25 bp, Homo sapien
tttcaggccaatatcgtcataggtg

SEQ ID NO: 3548357 - DNA, 25 bp, Homo sapien
aaggatctccgaagtctcatcaagg

SEQ ID NO: 3548358 - DNA, 25 bp, Homo sapien
tgtgttatcctgaatagaaaggatc

SEQ ID NO: 3548359 - DNA, 25 bp, Homo sapien
ctcatcaaggttagtctcctttctg

SEQ ID NO: 3548360 - DNA, 25 bp, Homo sapien
gaggagctgggttggaatattcatc

SEQ ID NO: 3548361 - DNA, 25 bp, Homo sapien
tgtcctgaagggtggagcgttccag

SEQ ID NO: 3548362 - DNA, 25 bp, Homo sapien
tcctgaagggtggagcgttccagtt

SEQ ID NO: 3548363 - DNA, 25 bp, Homo sapien
gaagggtggagcgttccagttcctc

SEQ ID NO: 3548364 - DNA, 25 bp, Homo sapien
agggtggagcgttccagttcctcca

SEQ ID NO: 3548365 - DNA, 25 bp, Homo sapien
tccataaattgtggtttgtttctta

SEQ ID NO: 3548366 - DNA, 25 bp, Homo sapien
ctccataaattgtggtttgtttctt

SEQ ID NO: 3548367 - DNA, 25 bp, Homo sapien
ccataaattgtggtttgtttcttat

SEQ ID NO: 3548368 - DNA, 25 bp, Homo sapien
gcgcatgaatgcagaaccaggactt

SEQ ID NO: 3548369 - DNA, 25 bp, Homo sapien
taatttgcttaagcgcatgaatgca

SEQ ID NO: 3548370 - DNA, 25 bp, Homo sapien
tgggctatctgatccctagcccctg

SEQ ID NO: 3548371 - DNA, 25 bp, Homo sapien
cctagcccctgcattaactaaaagt

SEQ ID NO: 3548372 - DNA, 25 bp, Homo sapien
tctcaagggtagttactgggctgat

SEQ ID NO: 3548373 - DNA, 25 bp, Homo sapien
aggaagaaagatccacaccaagtct

SEQ ID NO: 3548374 - DNA, 25 bp, Homo sapien
gatccacaccaagtctcaagggtag

SEQ ID NO: 3548375 - DNA, 25 bp, Homo sapien
ttgagccaacctgtcctcgatgcca

SEQ ID NO: 3548376 - DNA, 25 bp, Homo sapien
ttttcctctgtttctccagctttga

SEQ ID NO: 3548377 - DNA, 25 bp, Homo sapien
tttcctctgtttctccagctttgaa

SEQ ID NO: 3548378 - DNA, 25 bp, Homo sapien
tttctccagctttgaaatcacacgc

SEQ ID NO: 3548379 - DNA, 25 bp, Homo sapien
ctccagctttgaaatcacacgccat

SEQ ID NO: 3548380 - DNA, 25 bp, Homo sapien
tatggttaatagttccactgctggt

SEQ ID NO: 3548381 - DNA, 25 bp, Homo sapien
taatagttccactgctggttttaat

SEQ ID NO: 3548382 - DNA, 25 bp, Homo sapien
tggttaatatggttaatagttccac

SEQ ID NO: 3548383 - DNA, 25 bp, Homo sapien
caggatttctctggttaatatggtt

SEQ ID NO: 3548384 - DNA, 25 bp, Homo sapien
tatttgccaagagtttattccgcgg

SEQ ID NO: 3548385 - DNA, 25 bp, Homo sapien
gtctagccagaagtataccccacca

SEQ ID NO: 3548386 - DNA, 25 bp, Homo sapien
tattccgcggttagcaccaaactct

SEQ ID NO: 3548387 - DNA, 25 bp, Homo sapien
catgcttcactcttggcagggctga

SEQ ID NO: 3548388 - DNA, 25 bp, Homo sapien
gtcctacatccaagatgctcttgtc

SEQ ID NO: 3548389 - DNA, 25 bp, Homo sapien
gatgctcttgtctcacaggccgtga

SEQ ID NO: 3548390 - DNA, 25 bp, Homo sapien
gaagaggaccgcaaaggaactggat

SEQ ID NO: 3548391 - DNA, 25 bp, Homo sapien
caggccgtgaggaacagctttggca

SEQ ID NO: 3548392 - DNA, 25 bp, Homo sapien
tgtataaaccgcagaagcagatggc

SEQ ID NO: 3548393 - DNA, 25 bp, Homo sapien
ggctggcgtgcaaaggtactatcat

SEQ ID NO: 3548394 - DNA, 25 bp, Homo sapien
ttccggccgcagagcttaagagacc

SEQ ID NO: 3548395 - DNA, 25 bp, Homo sapien
gattcatgcttggattctcagggcc

SEQ ID NO: 3548396 - DNA, 25 bp, Homo sapien
aggagctcacaggtgagtgactcac

SEQ ID NO: 3548397 - DNA, 25 bp, Homo sapien
gagctcacaggtgagtgactcacac

SEQ ID NO: 3548398 - DNA, 25 bp, Homo sapien
ctaggagctcacaggtgagtgactc

SEQ ID NO: 3548399 - DNA, 25 bp, Homo sapien
ggagctcacaggtgagtgactcaca

SEQ ID NO: 3548400 - DNA, 25 bp, Homo sapien
tctgaccaaaccaaggcaagtctgg

SEQ ID NO: 3548401 - DNA, 25 bp, Homo sapien
cggaagacgagatcaataatgtaga

SEQ ID NO: 3548402 - DNA, 25 bp, Homo sapien
gcaagtctgggcagttacgcagaca

SEQ ID NO: 3548403 - DNA, 25 bp, Homo sapien
tgaacgctggctagccagtcccaga

SEQ ID NO: 3548404 - DNA, 25 bp, Homo sapien
taggcgaaataagacttcatctccc

SEQ ID NO: 3548405 - DNA, 25 bp, Homo sapien
taaagcctaggcgaaataagacttc

SEQ ID NO: 3548406 - DNA, 25 bp, Homo sapien
ttcctaaagcctaggcgaaataaga

SEQ ID NO: 3548407 - DNA, 25 bp, Homo sapien
cagttagaacctcccggcatcctct

SEQ ID NO: 3548408 - DNA, 25 bp, Homo sapien
agaagagtccgcgactcctgtgagt

SEQ ID NO: 3548409 - DNA, 25 bp, Homo sapien
gaagtccccgtctccagttcagggc

SEQ ID NO: 3548410 - DNA, 25 bp, Homo sapien
tcccgccggaggaaggccgagtatc

SEQ ID NO: 3548411 - DNA, 25 bp, Homo sapien
gagtccgcgactcctgtgagtaaca

SEQ ID NO: 3548412 - DNA, 25 bp, Homo sapien
gccacttattatggtcaggttaaaa

SEQ ID NO: 3548413 - DNA, 25 bp, Homo sapien
tggtcaggttaaaagcccactgcta

SEQ ID NO: 3548414 - DNA, 25 bp, Homo sapien
cactgctacgattttaagtatggag

SEQ ID NO: 3548415 - DNA, 25 bp, Homo sapien
gagaaatttgccacttattatggtc

SEQ ID NO: 3548416 - DNA, 25 bp, Homo sapien
aggaagaagacgattctgccctccc

SEQ ID NO: 3548417 - DNA, 25 bp, Homo sapien
agaggaagaagacgattctgccctc

SEQ ID NO: 3548418 - DNA, 25 bp, Homo sapien
gaagaagacgattctgccctccctc

SEQ ID NO: 3548419 - DNA, 25 bp, Homo sapien
aaaagaggaagaagacgattctgcc

SEQ ID NO: 3548420 - DNA, 25 bp, Homo sapien
aagaaggacagcgtagtggcacaca

SEQ ID NO: 3548421 - DNA, 25 bp, Homo sapien
gattcagactctgccggaccttagt

SEQ ID NO: 3548422 - DNA, 25 bp, Homo sapien
aaagtcatactgcagtgggacggaa

SEQ ID NO: 3548423 - DNA, 25 bp, Homo sapien
gatatactcggtgctaccacagagg

SEQ ID NO: 3548424 - DNA, 25 bp, Homo sapien
gggttattctcatactcggttccag

SEQ ID NO: 3548425 - DNA, 25 bp, Homo sapien
agaattctaatctctggaggctggc

SEQ ID NO: 3548426 - DNA, 25 bp, Homo sapien
tttagggccccttagcagggtgagc

SEQ ID NO: 3548427 - DNA, 25 bp, Homo sapien
caatggtgctcacttgcttggaagc

SEQ ID NO: 3548428 - DNA, 25 bp, Homo sapien
tatcgaggtatagactagcatccac

SEQ ID NO: 3548429 - DNA, 25 bp, Homo sapien
tttaggcaaacactggccatggccg

SEQ ID NO: 3548430 - DNA, 25 bp, Homo sapien
tgtacaaggtcataccgccagaagc

SEQ ID NO: 3548431 - DNA, 25 bp, Homo sapien
tgtgcctcagaagctagaatcgaag

SEQ ID NO: 3548432 - DNA, 25 bp, Homo sapien
caggacccttctcctttcatgggag

SEQ ID NO: 3548433 - DNA, 25 bp, Homo sapien
ttttgcctgttgtaatgtgcaggac

SEQ ID NO: 3548434 - DNA, 25 bp, Homo sapien
ccttttttgcctgttgtaatgtgca

SEQ ID NO: 3548435 - DNA, 25 bp, Homo sapien
caggtagttacctgaatataggttg

SEQ ID NO: 3548436 - DNA, 25 bp, Homo sapien
cagaagtttcagaactcagtggagc

SEQ ID NO: 3548437 - DNA, 25 bp, Homo sapien
ccacaaaaggcacaagtactaacca

SEQ ID NO: 3548438 - DNA, 25 bp, Homo sapien
tataagaggcggatttgaagtggca

SEQ ID NO: 3548439 - DNA, 25 bp, Homo sapien
gcttggcttaagctctcatgagttg

SEQ ID NO: 3548440 - DNA, 25 bp, Homo sapien
caaggaacaactctgggccagtagc

SEQ ID NO: 3548441 - DNA, 25 bp, Homo sapien
taattgtccaagaggagcttgctcc

SEQ ID NO: 3548442 - DNA, 25 bp, Homo sapien
gagaagacaatgtgtaacgtccaag

SEQ ID NO: 3548443 - DNA, 25 bp, Homo sapien
gcagtcaccatgctatcatcagctg

SEQ ID NO: 3548444 - DNA, 25 bp, Homo sapien
gagttagacttcatcaggcaaaggc

SEQ ID NO: 3548445 - DNA, 25 bp, Homo sapien
tagctggttcctatcacctgaggct

SEQ ID NO: 3548446 - DNA, 25 bp, Homo sapien
tactgctaaggttgggtggtcgtca

SEQ ID NO: 3548447 - DNA, 25 bp, Homo sapien
aaggcacagccaggaatcaccatga

SEQ ID NO: 3548448 - DNA, 25 bp, Homo sapien
agtcagggagctcagtttccggagc

SEQ ID NO: 3548449 - DNA, 25 bp, Homo sapien
tcagtcagggagctcagtttccgga

SEQ ID NO: 3548450 - DNA, 25 bp, Homo sapien
cagtcagggagctcagtttccggag

SEQ ID NO: 3548451 - DNA, 25 bp, Homo sapien
gcacaagcatctctgccaggtactt

SEQ ID NO: 3548452 - DNA, 25 bp, Homo sapien
aagcatctctgccaggtacttggcc

SEQ ID NO: 3548453 - DNA, 25 bp, Homo sapien
gagcacaagcatctctgccaggtac

SEQ ID NO: 3548454 - DNA, 25 bp, Homo sapien
ctgagcacaagcatctctgccaggt

SEQ ID NO: 3548455 - DNA, 25 bp, Homo sapien
ggtttctgggaccttcagagagtag

SEQ ID NO: 3548456 - DNA, 25 bp, Homo sapien
gggtttctgggaccttcagagagta

SEQ ID NO: 3548457 - DNA, 25 bp, Homo sapien
gacaagataccaacaggaggagggc

SEQ ID NO: 3548458 - DNA, 25 bp, Homo sapien
gattaggaggcatcatttggtgccc

SEQ ID NO: 3548459 - DNA, 25 bp, Homo sapien
gataagtaatcatgctgctcagtcc

SEQ ID NO: 3548460 - DNA, 25 bp, Homo sapien
tagcctcctgacctgggaacaagtg

SEQ ID NO: 3548461 - DNA, 25 bp, Homo sapien
cagtgtaaggacgatgcaggcaaga

SEQ ID NO: 3548462 - DNA, 25 bp, Homo sapien
gtgtaaggacgatgcaggcaagaca

SEQ ID NO: 3548463 - DNA, 25 bp, Homo sapien
ggcagtgtaaggacgatgcaggcaa

SEQ ID NO: 3548464 - DNA, 25 bp, Homo sapien
agaggcagtgtaaggacgatgcagg

SEQ ID NO: 3548465 - DNA, 25 bp, Homo sapien
ggacagctgggatcatggcaaactc

SEQ ID NO: 3548466 - DNA, 25 bp, Homo sapien
cctgcagtggctcgttgtttatagc

SEQ ID NO: 3548467 - DNA, 25 bp, Homo sapien
tggcaaactctgagacaaaaacctg

SEQ ID NO: 3548468 - DNA, 25 bp, Homo sapien
tctgcaaccttccaacaagtattcc

SEQ ID NO: 3548469 - DNA, 25 bp, Homo sapien
acatagttccatagtgtagtcaaac

SEQ ID NO: 3548470 - DNA, 25 bp, Homo sapien
atatttagcttcctgagtggagcct

SEQ ID NO: 3548471 - DNA, 25 bp, Homo sapien
ctggaagtgggaatcacatagttcc

SEQ ID NO: 3548472 - DNA, 25 bp, Homo sapien
ggagccttccaacttgtctttgcct

SEQ ID NO: 3548473 - DNA, 25 bp, Homo sapien
tccctgcaagtgagaaacgctgtga

SEQ ID NO: 3548474 - DNA, 25 bp, Homo sapien
gtgtaatttgctggcagcgcccagg

SEQ ID NO: 3548475 - DNA, 25 bp, Homo sapien
tggaagcctggaactcctcgctgtg

SEQ ID NO: 3548476 - DNA, 25 bp, Homo sapien
ggtgcagatgcagaggcacacatct

SEQ ID NO: 3548477 - DNA, 25 bp, Homo sapien
gtaagtgttggtgtcgtgatcaaag

SEQ ID NO: 3548478 - DNA, 25 bp, Homo sapien
aaatgctgcttctggttgatgggcc

SEQ ID NO: 3548479 - DNA, 25 bp, Homo sapien
tcgtgatcaaagtcatctgtcgtct

SEQ ID NO: 3548480 - DNA, 25 bp, Homo sapien
ttgatgggccctgtaaatcctctgg

SEQ ID NO: 3548481 - DNA, 25 bp, Homo sapien
tcttggtggcttccaatccgcaatg

SEQ ID NO: 3548482 - DNA, 25 bp, Homo sapien
acagcagatatgtaatcttgtcagg

SEQ ID NO: 3548483 - DNA, 25 bp, Homo sapien
tgtggatctcattttgtgacagcag

SEQ ID NO: 3548484 - DNA, 25 bp, Homo sapien
cgcaatgggcagttgtggatctcat

SEQ ID NO: 3548485 - DNA, 25 bp, Homo sapien
tgaaggcttgaagagctgcaaactg

SEQ ID NO: 3548486 - DNA, 25 bp, Homo sapien
ttgcctggtagaggacctgaaggct

SEQ ID NO: 3548487 - DNA, 25 bp, Homo sapien
aactgcacataaaccctcttgctgt

SEQ ID NO: 3548488 - DNA, 25 bp, Homo sapien
caaactgcacataaaccctcttgct

SEQ ID NO: 3548489 - DNA, 25 bp, Homo sapien
gcagcacttctgaaccaagtctgca

SEQ ID NO: 3548490 - DNA, 25 bp, Homo sapien
gaatctgcagcacttctgaaccaag

SEQ ID NO: 3548491 - DNA, 25 bp, Homo sapien
agcaggagaatctgcagcacttctg

SEQ ID NO: 3548492 - DNA, 25 bp, Homo sapien
caagtctgcagaggggatggctcaa

SEQ ID NO: 3548493 - DNA, 25 bp, Homo sapien
gagtagctgagcaattagagggaac

SEQ ID NO: 3548494 - DNA, 25 bp, Homo sapien
ctagactaagaagtagattgggatc

SEQ ID NO: 3548495 - DNA, 25 bp, Homo sapien
tggagaatcagccatatataaggag

SEQ ID NO: 3548496 - DNA, 25 bp, Homo sapien
gaatcagccatatataaggagtagc

SEQ ID NO: 3548497 - DNA, 25 bp, Homo sapien
gaacgttgtcaagggctttctccaa

SEQ ID NO: 3548498 - DNA, 25 bp, Homo sapien
tccgcaaagtccagagcaagggact

SEQ ID NO: 3548499 - DNA, 25 bp, Homo sapien
ggcacactttgtcctgaacgttgtc

SEQ ID NO: 3548500 - DNA, 25 bp, Homo sapien
aaagtccagagcaagggactgccct

SEQ ID NO: 3548501 - DNA, 25 bp, Homo sapien
ttcaactggcaatagtgtgcttttt

SEQ ID NO: 3548502 - DNA, 25 bp, Homo sapien
ttacaaccctcttaaggatctcttg

SEQ ID NO: 3548503 - DNA, 25 bp, Homo sapien
aaggcagcagatggataagtcttgg

SEQ ID NO: 3548504 - DNA, 25 bp, Homo sapien
aactaactcccttaatgcttgatta

SEQ ID NO: 3548505 - DNA, 25 bp, Homo sapien
gttgtccaggcaggtaagaactgct

SEQ ID NO: 3548506 - DNA, 25 bp, Homo sapien
gaactacaagcccatgccatcttgc

SEQ ID NO: 3548507 - DNA, 25 bp, Homo sapien
tgtccaggcaggtaagaactgctgg

SEQ ID NO: 3548508 - DNA, 25 bp, Homo sapien
ttgtccaggcaggtaagaactgctg

SEQ ID NO: 3548509 - DNA, 25 bp, Homo sapien
tggaacgactcacctttatgtctgg

SEQ ID NO: 3548510 - DNA, 25 bp, Homo sapien
tgaagtgattaagaatgtggcagct

SEQ ID NO: 3548511 - DNA, 25 bp, Homo sapien
aagtctctcactgtctcatgattgg

SEQ ID NO: 3548512 - DNA, 25 bp, Homo sapien
tcagtccagcttaaatgaagtgatt

SEQ ID NO: 3548513 - DNA, 25 bp, Homo sapien
taagccatgctgaattggtgactca

SEQ ID NO: 3548514 - DNA, 25 bp, Homo sapien
aatcttccctggacataagccatgc

SEQ ID NO: 3548515 - DNA, 25 bp, Homo sapien
ggagcctgaaattcatccaccgttg

SEQ ID NO: 3548516 - DNA, 25 bp, Homo sapien
tccaccgttgtatctagaacttttc

SEQ ID NO: 3548517 - DNA, 25 bp, Homo sapien
ctggaaccaacggaactgtgagcca

SEQ ID NO: 3548518 - DNA, 25 bp, Homo sapien
tctgagatggtaagtatgtcgttgg

SEQ ID NO: 3548519 - DNA, 25 bp, Homo sapien
tgtgagccaacagatgcttcctctg

SEQ ID NO: 3548520 - DNA, 25 bp, Homo sapien
aagtatgtcgttggggttgtagcta

SEQ ID NO: 3548521 - DNA, 25 bp, Homo sapien
gatcctttccagcatggttcctgag

SEQ ID NO: 3548522 - DNA, 25 bp, Homo sapien
caagtttacacctgttctggcagtg

SEQ ID NO: 3548523 - DNA, 25 bp, Homo sapien
gggaactaatcctctgtctgatggg

SEQ ID NO: 3548524 - DNA, 25 bp, Homo sapien
tccagcattggtggagctgtcactt

SEQ ID NO: 3548525 - DNA, 25 bp, Homo sapien
tgagccatggcactctgcctctagc

SEQ ID NO: 3548526 - DNA, 25 bp, Homo sapien
ggcactctgcctctagctttctaat

SEQ ID NO: 3548527 - DNA, 25 bp, Homo sapien
tctgcctctagctttctaattatct

SEQ ID NO: 3548528 - DNA, 25 bp, Homo sapien
catgtcggccaggattgaccttgtg

SEQ ID NO: 3548529 - DNA, 25 bp, Homo sapien
ggcagcataagaaccccagtggtac

SEQ ID NO: 3548530 - DNA, 25 bp, Homo sapien
gatcctaaccagattgaaacggctg

SEQ ID NO: 3548531 - DNA, 25 bp, Homo sapien
gaacatgtacagaatattggccctc

SEQ ID NO: 3548532 - DNA, 25 bp, Homo sapien
cagaatatggatggcaaggaaactc

SEQ ID NO: 3548533 - DNA, 25 bp, Homo sapien
tagctcccagaaaaactggcaaggg

SEQ ID NO: 3548534 - DNA, 25 bp, Homo sapien
caagggtcttgcaactgaggaacca

SEQ ID NO: 3548535 - DNA, 25 bp, Homo sapien
gacctgctgaggagagtccacttgt

SEQ ID NO: 3548536 - DNA, 25 bp, Homo sapien
ccatgatgaaccacttagcttgaac

SEQ ID NO: 3548537 - DNA, 25 bp, Homo sapien
aaattatacgcccagacctgcccaa

SEQ ID NO: 3548538 - DNA, 25 bp, Homo sapien
catccactcctcaaattatacgccc

SEQ ID NO: 3548539 - DNA, 25 bp, Homo sapien
tcctcaaattatacgcccagacctg

SEQ ID NO: 3548540 - DNA, 25 bp, Homo sapien
gcccaacactgtcttatgttcagga

SEQ ID NO: 3548541 - DNA, 25 bp, Homo sapien
tgcagtgtgtaactcattttttgca

SEQ ID NO: 3548542 - DNA, 25 bp, Homo sapien
ccagcttctgggaatgggaacatgt

SEQ ID NO: 3548543 - DNA, 25 bp, Homo sapien
gctgtagtctacatgagaatagaca

SEQ ID NO: 3548544 - DNA, 25 bp, Homo sapien
gaacatgttgcagtgtgtaactcat

SEQ ID NO: 3548545 - DNA, 25 bp, Homo sapien
catggagccggtattccggcaaggt

SEQ ID NO: 3548546 - DNA, 25 bp, Homo sapien
tctccagtctggtccattagatccc

SEQ ID NO: 3548547 - DNA, 25 bp, Homo sapien
tgcagcgctcaatgaatctctggct

SEQ ID NO: 3548548 - DNA, 25 bp, Homo sapien
aggtctgaatgcagcgctcaatgaa

SEQ ID NO: 3548549 - DNA, 25 bp, Homo sapien
ccaagtgagcatgggtaacatccat

SEQ ID NO: 3548550 - DNA, 25 bp, Homo sapien
ttattcaccaagtgagcatgggtaa

SEQ ID NO: 3548551 - DNA, 25 bp, Homo sapien
tgagagtttaaacatctcttggttg

SEQ ID NO: 3548552 - DNA, 25 bp, Homo sapien
tcaccaagtgagcatgggtaacatc

SEQ ID NO: 3548553 - DNA, 25 bp, Homo sapien
tcagagctgttggaggaagaaagca

SEQ ID NO: 3548554 - DNA, 25 bp, Homo sapien
agggcaataaaggtccaagtggtag

SEQ ID NO: 3548555 - DNA, 25 bp, Homo sapien
tgaagtcctggaatatagatgagct

SEQ ID NO: 3548556 - DNA, 25 bp, Homo sapien
tgctgtgacctctattgtcttgaga

SEQ ID NO: 3548557 - DNA, 25 bp, Homo sapien
gcctcattcaggctaggctgtgaac

SEQ ID NO: 3548558 - DNA, 25 bp, Homo sapien
ggctgtttcagctgccatatagaga

SEQ ID NO: 3548559 - DNA, 25 bp, Homo sapien
tgaaggacttaatggctgcaagatt

SEQ ID NO: 3548560 - DNA, 25 bp, Homo sapien
gagaatgcgttgtgtttgtttgact

SEQ ID NO: 3548561 - DNA, 25 bp, Homo sapien
cagttgatgagttctggtgatccaa

SEQ ID NO: 3548562 - DNA, 25 bp, Homo sapien
ggatctttggagtagatttggtaag

SEQ ID NO: 3548563 - DNA, 25 bp, Homo sapien
agtgatcaaggtcatctgtcatatc

SEQ ID NO: 3548564 - DNA, 25 bp, Homo sapien
tttgaatctgtaaatgctgtttcca

SEQ ID NO: 3548565 - DNA, 25 bp, Homo sapien
accacagccttcagattgaatggat

SEQ ID NO: 3548566 - DNA, 25 bp, Homo sapien
tcctgagggcagacaaccactgtat

SEQ ID NO: 3548567 - DNA, 25 bp, Homo sapien
ttaaaatcaggccacttgtccacca

SEQ ID NO: 3548568 - DNA, 25 bp, Homo sapien
aatggatttccatggtttatgtgaa

SEQ ID NO: 3548569 - DNA, 25 bp, Homo sapien
tatttatccaattacattaccccaa

SEQ ID NO: 3548570 - DNA, 25 bp, Homo sapien
ctggcttttaacgtccaagctgtcc

SEQ ID NO: 3548571 - DNA, 25 bp, Homo sapien
cattcctggacgtaggcctaactaa

SEQ ID NO: 3548572 - DNA, 25 bp, Homo sapien
taatttcatactctaaattatgacc

SEQ ID NO: 3548573 - DNA, 25 bp, Homo sapien
tctggtgatgatagaaggagatgtt

SEQ ID NO: 3548574 - DNA, 25 bp, Homo sapien
taaataaccacgtagcctttgttgc

SEQ ID NO: 3548575 - DNA, 25 bp, Homo sapien
aagtctggtgatgatagaaggagat

SEQ ID NO: 3548576 - DNA, 25 bp, Homo sapien
tgaattaggcatgccaacggaagta

SEQ ID NO: 3548577 - DNA, 25 bp, Homo sapien
gaggtaaggcatactaaatgagaga

SEQ ID NO: 3548578 - DNA, 25 bp, Homo sapien
tgcctggctcaaaataggtgcatca

SEQ ID NO: 3548579 - DNA, 25 bp, Homo sapien
tcataaatatcagtccctttccctc

SEQ ID NO: 3548580 - DNA, 25 bp, Homo sapien
gacagtaaacatcttgtagagaggt

SEQ ID NO: 3548581 - DNA, 25 bp, Homo sapien
ttgtcttctttactcctctcagaat

SEQ ID NO: 3548582 - DNA, 25 bp, Homo sapien
gtttgtcttctttactcctctcaga

SEQ ID NO: 3548583 - DNA, 25 bp, Homo sapien
aagtttgtcttctttactcctctca

SEQ ID NO: 3548584 - DNA, 25 bp, Homo sapien
tcctctcagaattttccattatcac

SEQ ID NO: 3548585 - DNA, 25 bp, Homo sapien
catctgggcaccttgcaatggtaac

SEQ ID NO: 3548586 - DNA, 25 bp, Homo sapien
tctgggcaccttgcaatggtaacat

SEQ ID NO: 3548587 - DNA, 25 bp, Homo sapien
gcatctgggcaccttgcaatggtaa

SEQ ID NO: 3548588 - DNA, 25 bp, Homo sapien
atctgggcaccttgcaatggtaaca

SEQ ID NO: 3548589 - DNA, 25 bp, Homo sapien
agttcagggatatggaatctaacca

SEQ ID NO: 3548590 - DNA, 25 bp, Homo sapien
aagttcagggatatggaatctaacc

SEQ ID NO: 3548591 - DNA, 25 bp, Homo sapien
gaagttcagggatatggaatctaac

SEQ ID NO: 3548592 - DNA, 25 bp, Homo sapien
ctcatgtagcatggatcccatatac

SEQ ID NO: 3548593 - DNA, 25 bp, Homo sapien
tctgatactttgtaatgagtcctca

SEQ ID NO: 3548594 - DNA, 25 bp, Homo sapien
tatgtaaagagcagctaaactccac

SEQ ID NO: 3548595 - DNA, 25 bp, Homo sapien
tgttatgagagcatacagatagtga

SEQ ID NO: 3548596 - DNA, 25 bp, Homo sapien
taaattttgatacaccacctccaga

SEQ ID NO: 3548597 - DNA, 25 bp, Homo sapien
tctgcagatgtttccgggaagaaac

SEQ ID NO: 3548598 - DNA, 25 bp, Homo sapien
agaaacgatgagcaacacccttctg

SEQ ID NO: 3548599 - DNA, 25 bp, Homo sapien
tcagcagagtctcgcagagtaaatt

SEQ ID NO: 3548600 - DNA, 25 bp, Homo sapien
atccacatgtaagacatgagttcca

SEQ ID NO: 3548601 - DNA, 25 bp, Homo sapien
gctgaataaaaagtgtcacggagat

SEQ ID NO: 3548602 - DNA, 25 bp, Homo sapien
attatcaacaatccacatgtaagac

SEQ ID NO: 3548603 - DNA, 25 bp, Homo sapien
gcagctgaataaaaagtgtcacgga

SEQ ID NO: 3548604 - DNA, 25 bp, Homo sapien
cattacaaaccaggacaccgtggtc

SEQ ID NO: 3548605 - DNA, 25 bp, Homo sapien
gggaggttctgaatacagcactcaa

SEQ ID NO: 3548606 - DNA, 25 bp, Homo sapien
gaatttattcatcaaggaagcatgg

SEQ ID NO: 3548607 - DNA, 25 bp, Homo sapien
aactgggaccagataagataggaca

SEQ ID NO: 3548608 - DNA, 25 bp, Homo sapien
cagaaagggaaccagtttctttgct

SEQ ID NO: 3548609 - DNA, 25 bp, Homo sapien
attacctcattcagtctggactgtg

SEQ ID NO: 3548610 - DNA, 25 bp, Homo sapien
ttgtgatcttttgactttgaccaat

SEQ ID NO: 3548611 - DNA, 25 bp, Homo sapien
gactttgaccaatttagcagctaca

SEQ ID NO: 3548612 - DNA, 25 bp, Homo sapien
tatggtagctgttggtgtagtgatc

SEQ ID NO: 3548613 - DNA, 25 bp, Homo sapien
tcttgacagttctcgggatctttag

SEQ ID NO: 3548614 - DNA, 25 bp, Homo sapien
tccagttgatgatacctgacatgtc

SEQ ID NO: 3548615 - DNA, 25 bp, Homo sapien
tttggatctgcaaatgttgtttcca

SEQ ID NO: 3548616 - DNA, 25 bp, Homo sapien
gcatcattagcacaagtttttctta

SEQ ID NO: 3548617 - DNA, 25 bp, Homo sapien
tcttatgttagtgtttggcaatttc

SEQ ID NO: 3548618 - DNA, 25 bp, Homo sapien
cctcatcggagtcacttgattcatt

SEQ ID NO: 3548619 - DNA, 25 bp, Homo sapien
catcggagtcacttgattcattgtt

SEQ ID NO: 3548620 - DNA, 25 bp, Homo sapien
ggtcctgcactttttccctttgatg

SEQ ID NO: 3548621 - DNA, 25 bp, Homo sapien
gcactttttccctttgatgctttag

SEQ ID NO: 3548622 - DNA, 25 bp, Homo sapien
cggtcctgcactttttccctttgat

SEQ ID NO: 3548623 - DNA, 25 bp, Homo sapien
tttttccctttgatgctttaggcat

SEQ ID NO: 3548624 - DNA, 25 bp, Homo sapien
tagtatttgggccacagaacttgcc

SEQ ID NO: 3548625 - DNA, 25 bp, Homo sapien
gggacaccaggaggtactatttgat

SEQ ID NO: 3548626 - DNA, 25 bp, Homo sapien
gaacttgccataactgactgggcca

SEQ ID NO: 3548627 - DNA, 25 bp, Homo sapien
tctgttccacccaaagggacaccag

SEQ ID NO: 3548628 - DNA, 25 bp, Homo sapien
gctggaaggtttgatcataaggacc

SEQ ID NO: 3548629 - DNA, 25 bp, Homo sapien
ggaaggtttgatcataaggaccaag

SEQ ID NO: 3548630 - DNA, 25 bp, Homo sapien
aaggtttgatcataaggaccaagtc

SEQ ID NO: 3548631 - DNA, 25 bp, Homo sapien
tggaaggtttgatcataaggaccaa

SEQ ID NO: 3548632 - DNA, 25 bp, Homo sapien
ggaatatagaaatcatgaccagact

SEQ ID NO: 3548633 - DNA, 25 bp, Homo sapien
ggtcctaatccctagaagctttgag

SEQ ID NO: 3548634 - DNA, 25 bp, Homo sapien
taaggggtggccgaataatgcctct

SEQ ID NO: 3548635 - DNA, 25 bp, Homo sapien
taactttgctcaggaaaaaacatac

SEQ ID NO: 3548636 - DNA, 25 bp, Homo sapien
aattatgagaccataaaattgagct

SEQ ID NO: 3548637 - DNA, 25 bp, Homo sapien
tgttaagggtgagcttaagtaatac

SEQ ID NO: 3548638 - DNA, 25 bp, Homo sapien
gtagatcacaatgcttgtgtttgaa

SEQ ID NO: 3548639 - DNA, 25 bp, Homo sapien
cacagatcctagataatcagttgca

SEQ ID NO: 3548640 - DNA, 25 bp, Homo sapien
tcaacaatatttcttgggggtgcat

SEQ ID NO: 3548641 - DNA, 25 bp, Homo sapien
caagatgataaccaatttgcaacat

SEQ ID NO: 3548642 - DNA, 25 bp, Homo sapien
taaaccccaaattgttcagtgcctg

SEQ ID NO: 3548643 - DNA, 25 bp, Homo sapien
atgccagccacaaggacaaatctta

SEQ ID NO: 3548644 - DNA, 25 bp, Homo sapien
cacaagacctgcatgtgaagcatct

SEQ ID NO: 3548645 - DNA, 25 bp, Homo sapien
tcacaagacctgcatgtgaagcatc

SEQ ID NO: 3548646 - DNA, 25 bp, Homo sapien
aggactgttccatcacaatccaaga

SEQ ID NO: 3548647 - DNA, 25 bp, Homo sapien
ttcacaagacctgcatgtgaagcat

SEQ ID NO: 3548648 - DNA, 25 bp, Homo sapien
gtaatctacctgcactgattttgaa

SEQ ID NO: 3548649 - DNA, 25 bp, Homo sapien
gaggatggttttcatgtaatctacc

SEQ ID NO: 3548650 - DNA, 25 bp, Homo sapien
tggtaattccggtataaagaggatg

SEQ ID NO: 3548651 - DNA, 25 bp, Homo sapien
tcattacttgaggtcttgtgtttct

SEQ ID NO: 3548652 - DNA, 25 bp, Homo sapien
tttgtcaggagctttggtgaagatg

SEQ ID NO: 3548653 - DNA, 25 bp, Homo sapien
cttggatctgcaaagtttgctccca

SEQ ID NO: 3548654 - DNA, 25 bp, Homo sapien
ggtaagtgttggtataatgatcctg

SEQ ID NO: 3548655 - DNA, 25 bp, Homo sapien
tacattggagtatgacaggacttcc

SEQ ID NO: 3548656 - DNA, 25 bp, Homo sapien
tcattgccatgcagagaacgtctgg

SEQ ID NO: 3548657 - DNA, 25 bp, Homo sapien
tgttcttctcaccactcctcagttt

SEQ ID NO: 3548658 - DNA, 25 bp, Homo sapien
tgcagagaacgtctggagagtgact

SEQ ID NO: 3548659 - DNA, 25 bp, Homo sapien
gactaccctcatattcagtaactat

SEQ ID NO: 3548660 - DNA, 25 bp, Homo sapien
tctgaggccgggtaatgacgatctg

SEQ ID NO: 3548661 - DNA, 25 bp, Homo sapien
tatcttttatgttgaaaatggcgcc

SEQ ID NO: 3548662 - DNA, 25 bp, Homo sapien
ctgtttctgaggccgggtaatgacg

SEQ ID NO: 3548663 - DNA, 25 bp, Homo sapien
ggtaatgacgatctggtaatctggc

SEQ ID NO: 3548664 - DNA, 25 bp, Homo sapien
atggattcagggatgctcttttcta

SEQ ID NO: 3548665 - DNA, 25 bp, Homo sapien
tttatggattcagggatgctctttt

SEQ ID NO: 3548666 - DNA, 25 bp, Homo sapien
tcagggatgctcttttctaaggatt

SEQ ID NO: 3548667 - DNA, 25 bp, Homo sapien
ttctaaggatttatacagaatctgc

SEQ ID NO: 3548668 - DNA, 25 bp, Homo sapien
agcttctttccctcaagaagatgat

SEQ ID NO: 3548669 - DNA, 25 bp, Homo sapien
ctgggtgtggtggtgagtgtcagta

SEQ ID NO: 3548670 - DNA, 25 bp, Homo sapien
gtgatctgatatcgcaccactgcat

SEQ ID NO: 3548671 - DNA, 25 bp, Homo sapien
ggtgtggtggtgagtgtcagtagtc

SEQ ID NO: 3548672 - DNA, 25 bp, Homo sapien
gtgtggtggtgagtgtcagtagtcc

SEQ ID NO: 3548673 - DNA, 25 bp, Homo sapien
tcagtatggcaatggaaaggtttct

SEQ ID NO: 3548674 - DNA, 25 bp, Homo sapien
ttgtagacctgtaggcacactgcct

SEQ ID NO: 3548675 - DNA, 25 bp, Homo sapien
aaatcacaggctttgtagaccagag

SEQ ID NO: 3548676 - DNA, 25 bp, Homo sapien
gctaatactctacggactgaaacac

SEQ ID NO: 3548677 - DNA, 25 bp, Homo sapien
tacagcaacatgaagtcctaattta

SEQ ID NO: 3548678 - DNA, 25 bp, Homo sapien
tatattatgccagattacagcaaca

SEQ ID NO: 3548679 - DNA, 25 bp, Homo sapien
ccgtgtccctgattcctcaggaata

SEQ ID NO: 3548680 - DNA, 25 bp, Homo sapien
ttttcctgcctaatgtgaacttccg

SEQ ID NO: 3548681 - DNA, 25 bp, Homo sapien
gatacattctatcaatacctatttt

SEQ ID NO: 3548682 - DNA, 25 bp, Homo sapien
tacattctatcaatacctattttat

SEQ ID NO: 3548683 - DNA, 25 bp, Homo sapien
gtttatcagattaaggagatttggg

SEQ ID NO: 3548684 - DNA, 25 bp, Homo sapien
tgagatacattctatcaatacctat

SEQ ID NO: 3548685 - DNA, 25 bp, Homo sapien
gcattgtgaatgtacgttgtgaatg

SEQ ID NO: 3548686 - DNA, 25 bp, Homo sapien
taccagtggctagatacagggaacg

SEQ ID NO: 3548687 - DNA, 25 bp, Homo sapien
ggcaaattcctagagtcataaagta

SEQ ID NO: 3548688 - DNA, 25 bp, Homo sapien
gaatgtgaattatacggttaaacag

SEQ ID NO: 3548689 - DNA, 25 bp, Homo sapien
caatgcaggttcttttttgattgca

SEQ ID NO: 3548690 - DNA, 25 bp, Homo sapien
gcacagtagctctttggtatcacaa

SEQ ID NO: 3548691 - DNA, 25 bp, Homo sapien
aatgatcctgctgaataattgccag

SEQ ID NO: 3548692 - DNA, 25 bp, Homo sapien
tccctggccgtgagcattcctgagt

SEQ ID NO: 3548693 - DNA, 25 bp, Homo sapien
gaagggctcaaggaatgaagcatcc

SEQ ID NO: 3548694 - DNA, 25 bp, Homo sapien
tactccaagatcatacaagtgtttt

SEQ ID NO: 3548695 - DNA, 25 bp, Homo sapien
tatggctggctaattacattagtac

SEQ ID NO: 3548696 - DNA, 25 bp, Homo sapien
cctactccaagatcatacaagtgtt

SEQ ID NO: 3548697 - DNA, 25 bp, Homo sapien
tcttatttaatcttacagtgagtta

SEQ ID NO: 3548698 - DNA, 25 bp, Homo sapien
tgtcccttccctgaatgcaagccag

SEQ ID NO: 3548699 - DNA, 25 bp, Homo sapien
tttaaatagagcacaaggtaagtcc

SEQ ID NO: 3548700 - DNA, 25 bp, Homo sapien
gccctgttacgatagtgattcccaa

SEQ ID NO: 3548701 - DNA, 25 bp, Homo sapien
tcaaaatggtgcctcgggcaggtcc

SEQ ID NO: 3548702 - DNA, 25 bp, Homo sapien
ccgaaagtgcgagtattacaggcat

SEQ ID NO: 3548703 - DNA, 25 bp, Homo sapien
tccgaaagtgcgagtattacaggca

SEQ ID NO: 3548704 - DNA, 25 bp, Homo sapien
cgcggcctccgaaagtgcgagtatt

SEQ ID NO: 3548705 - DNA, 25 bp, Homo sapien
ggcctccgaaagtgcgagtattaca

SEQ ID NO: 3548706 - DNA, 25 bp, Homo sapien
gataccctttcaatgcacgaggaaa

SEQ ID NO: 3548707 - DNA, 25 bp, Homo sapien
cactttagcctgatgaatgccacgg

SEQ ID NO: 3548708 - DNA, 25 bp, Homo sapien
tctataaaactaaccgcaactcgcc

SEQ ID NO: 3548709 - DNA, 25 bp, Homo sapien
acggctgccaccatgctgcttagga

SEQ ID NO: 3548710 - DNA, 25 bp, Homo sapien
tgctcccactcgcaatcaaaaggcg

SEQ ID NO: 3548711 - DNA, 25 bp, Homo sapien
tttatcctggtacgcgggaactggc

SEQ ID NO: 3548712 - DNA, 25 bp, Homo sapien
gatgggtcatctggacaaataggga

SEQ ID NO: 3548713 - DNA, 25 bp, Homo sapien
tcttcatccgaagggtaaagttcca

SEQ ID NO: 3548714 - DNA, 25 bp, Homo sapien
catgatttgcaaaaggagtagcctc

SEQ ID NO: 3548715 - DNA, 25 bp, Homo sapien
cagttctaggaagtgagtgtgaatc

SEQ ID NO: 3548716 - DNA, 25 bp, Homo sapien
tctgcaatgcagtggaaagtgggaa

SEQ ID NO: 3548717 - DNA, 25 bp, Homo sapien
tccttaggttcccagccaacagatc

SEQ ID NO: 3548718 - DNA, 25 bp, Homo sapien
cctaatatagaaagcatgttttgct

SEQ ID NO: 3548719 - DNA, 25 bp, Homo sapien
ggaatttaatagaaagcttcactac

SEQ ID NO: 3548720 - DNA, 25 bp, Homo sapien
atcaagacttcacctgggtccaggt

SEQ ID NO: 3548721 - DNA, 25 bp, Homo sapien
caggttttgcctgttactgcctttg

SEQ ID NO: 3548722 - DNA, 25 bp, Homo sapien
tccttcatagcttgccttacaaggg

SEQ ID NO: 3548723 - DNA, 25 bp, Homo sapien
tactcactgacttgaccacgcggtt

SEQ ID NO: 3548724 - DNA, 25 bp, Homo sapien
tttcctcatgaaagcggtccttaca

SEQ ID NO: 3548725 - DNA, 25 bp, Homo sapien
catgctgagtgtctgaccgcctgta

SEQ ID NO: 3548726 - DNA, 25 bp, Homo sapien
tgtaccctgggtctgctagagcaca

SEQ ID NO: 3548727 - DNA, 25 bp, Homo sapien
caatctagttctgggccggtctgga

SEQ ID NO: 3548728 - DNA, 25 bp, Homo sapien
gcaacagggtctaatgaagtcggcc

SEQ ID NO: 3548729 - DNA, 25 bp, Homo sapien
gagtttcgggcaatagtcgcatacc

SEQ ID NO: 3548730 - DNA, 25 bp, Homo sapien
taacaggagtatccgtttggcacag

SEQ ID NO: 3548731 - DNA, 25 bp, Homo sapien
cacaggtaagaggtcagcggtagct

SEQ ID NO: 3548732 - DNA, 25 bp, Homo sapien
tcatgccagaatgggatcacgagtc

SEQ ID NO: 3548733 - DNA, 25 bp, Homo sapien
ttattatcgatgtgcccaactgcag

SEQ ID NO: 3548734 - DNA, 25 bp, Homo sapien
tccacagtctcagtaggagaactca

SEQ ID NO: 3548735 - DNA, 25 bp, Homo sapien
taaactcaattacgtctgaaaggcc

SEQ ID NO: 3548736 - DNA, 25 bp, Homo sapien
tgatgccgataacaaagacaacttg

SEQ ID NO: 3548737 - DNA, 25 bp, Homo sapien
caaggttctggcgaggtaggtttca

SEQ ID NO: 3548738 - DNA, 25 bp, Homo sapien
tgctggagtggagtggggcgatgtc

SEQ ID NO: 3548739 - DNA, 25 bp, Homo sapien
catgctggagtggagtggggcgatg

SEQ ID NO: 3548740 - DNA, 25 bp, Homo sapien
tgggatttcaggagcccaccaacag

SEQ ID NO: 3548741 - DNA, 25 bp, Homo sapien
cccgggttcaagcagctctctacct

SEQ ID NO: 3548742 - DNA, 25 bp, Homo sapien
aaaggcatacacttgggagaatgga

SEQ ID NO: 3548743 - DNA, 25 bp, Homo sapien
tacctcaaacagttgccctttcagg

SEQ ID NO: 3548744 - DNA, 25 bp, Homo sapien
ggtttcaaaaccaaacgtgctgtgc

SEQ ID NO: 3548745 - DNA, 25 bp, Homo sapien
catatgaatcttcccttgacacaga

SEQ ID NO: 3548746 - DNA, 25 bp, Homo sapien
tgagctcctaagaaatgaatgggtg

SEQ ID NO: 3548747 - DNA, 25 bp, Homo sapien
gcagcctctgcaagataaaagacct

SEQ ID NO: 3548748 - DNA, 25 bp, Homo sapien
aatgcgtggacagcgagatggatca

SEQ ID NO: 3548749 - DNA, 25 bp, Homo sapien
cagtgagtgaggaacagcgattcgc

SEQ ID NO: 3548750 - DNA, 25 bp, Homo sapien
ccggcggtactaaaagagggctgct

SEQ ID NO: 3548751 - DNA, 25 bp, Homo sapien
tgtagctcagcgaagatgaatctcg

SEQ ID NO: 3548752 - DNA, 25 bp, Homo sapien
tgcaaattaccgagccacagtccaa

SEQ ID NO: 3548753 - DNA, 25 bp, Homo sapien
ttcccacaggatgcaagtacagaag

SEQ ID NO: 3548754 - DNA, 25 bp, Homo sapien
ggtctccctgcaagatcctaagaaa

SEQ ID NO: 3548755 - DNA, 25 bp, Homo sapien
caggttgaactaaatcttgatcgcc

SEQ ID NO: 3548756 - DNA, 25 bp, Homo sapien
gagcaacagttacacctatcccagc

SEQ ID NO: 3548757 - DNA, 25 bp, Homo sapien
ggctgcaaatatcaaatgggaccaa

SEQ ID NO: 3548758 - DNA, 25 bp, Homo sapien
ggaatgtgagacaacttccacagcc

SEQ ID NO: 3548759 - DNA, 25 bp, Homo sapien
tcgttggtggctcaaaagattccct

SEQ ID NO: 3548760 - DNA, 25 bp, Homo sapien
ccaacaagatgctttgtggcaagtg

SEQ ID NO: 3548761 - DNA, 25 bp, Homo sapien
ctgtcgctgatgtcaaattgcagtg

SEQ ID NO: 3548762 - DNA, 25 bp, Homo sapien
gtaatgcgcgtcctgagaacaatgc

SEQ ID NO: 3548763 - DNA, 25 bp, Homo sapien
caatgcctaagcagtgctggccgct

SEQ ID NO: 3548764 - DNA, 25 bp, Homo sapien
tgctctgacgcaaacaaaacgcggg

SEQ ID NO: 3548765 - DNA, 25 bp, Homo sapien
gctctggaacttgcagtaggctgga

SEQ ID NO: 3548766 - DNA, 25 bp, Homo sapien
tgctggcagatgacacaagcctcct

SEQ ID NO: 3548767 - DNA, 25 bp, Homo sapien
tatgattcattcaacaggcagaatg

SEQ ID NO: 3548768 - DNA, 25 bp, Homo sapien
ggcagatgacacaagcctcctggat

SEQ ID NO: 3548769 - DNA, 25 bp, Homo sapien
cctacttggagcacagtttcataaa

SEQ ID NO: 3548770 - DNA, 25 bp, Homo sapien
cccttggcctggagcatacctgagt

SEQ ID NO: 3548771 - DNA, 25 bp, Homo sapien
tatacaaacccttggcctggagcat

SEQ ID NO: 3548772 - DNA, 25 bp, Homo sapien
ctatacaaacccttggcctggagca

SEQ ID NO: 3548773 - DNA, 25 bp, Homo sapien
aaacccttggcctggagcatacctg

SEQ ID NO: 3548774 - DNA, 25 bp, Homo sapien
gcctacttgatggtgacttcatgtc

SEQ ID NO: 3548775 - DNA, 25 bp, Homo sapien
tgacttggtcacagtactgtctgtt

SEQ ID NO: 3548776 - DNA, 25 bp, Homo sapien
ggtcacagtactgtctgttgacttt

SEQ ID NO: 3548777 - DNA, 25 bp, Homo sapien
gaggatcccaggctctcctagtctt

SEQ ID NO: 3548778 - DNA, 25 bp, Homo sapien
cattggtgtgagacctgctgaggca

SEQ ID NO: 3548779 - DNA, 25 bp, Homo sapien
cacgggagggaatctcaaggactgc

SEQ ID NO: 3548780 - DNA, 25 bp, Homo sapien
tgtccaacctgtccctatgagataa

SEQ ID NO: 3548781 - DNA, 25 bp, Homo sapien
agaagtgtaccattttcccaggtgg

SEQ ID NO: 3548782 - DNA, 25 bp, Homo sapien
cagcagcctgtatgctgggtccaga

SEQ ID NO: 3548783 - DNA, 25 bp, Homo sapien
ggagctggcgttacatcaagcactg

SEQ ID NO: 3548784 - DNA, 25 bp, Homo sapien
cagacgacatggcacgggtgatcat

SEQ ID NO: 3548785 - DNA, 25 bp, Homo sapien
gcactgtataggaggcctgccagca

SEQ ID NO: 3548786 - DNA, 25 bp, Homo sapien
actctttatgaaatgtggttgacag

SEQ ID NO: 3548787 - DNA, 25 bp, Homo sapien
tcagaactctttatgaaatgtggtt

SEQ ID NO: 3548788 - DNA, 25 bp, Homo sapien
tatgaaatgtggttgacagaatctg

SEQ ID NO: 3548789 - DNA, 25 bp, Homo sapien
gaaatgtggttgacagaatctgcta

SEQ ID NO: 3548790 - DNA, 25 bp, Homo sapien
gatgataaccaatttgcgacatgtt

SEQ ID NO: 3548791 - DNA, 25 bp, Homo sapien
tattatctgccgcatgagcataaaa

SEQ ID NO: 3548792 - DNA, 25 bp, Homo sapien
aggattttctcactattatctgccg

SEQ ID NO: 3548793 - DNA, 25 bp, Homo sapien
ttcaagatgataaccaatttgcgac

SEQ ID NO: 3548794 - DNA, 25 bp, Homo sapien
ctgcatgtgaaacacctaagaacat

SEQ ID NO: 3548795 - DNA, 25 bp, Homo sapien
gtgactgccctggtattcagtaact

SEQ ID NO: 3548796 - DNA, 25 bp, Homo sapien
tgctcctacctggttctgaggctga

SEQ ID NO: 3548797 - DNA, 25 bp, Homo sapien
ctgaggctgagtaatgatgatctgg

SEQ ID NO: 3548798 - DNA, 25 bp, Homo sapien
ttcagtaactattgctcctacctgg

SEQ ID NO: 3548799 - DNA, 25 bp, Homo sapien
tatctgcagagcgttcccaaaaagg

SEQ ID NO: 3548800 - DNA, 25 bp, Homo sapien
tgtccaaggccattgaggcagtact

SEQ ID NO: 3548801 - DNA, 25 bp, Homo sapien
gatggctacaaataagcccagacag

SEQ ID NO: 3548802 - DNA, 25 bp, Homo sapien
agtattactgggcttgggatgctcc

SEQ ID NO: 3548803 - DNA, 25 bp, Homo sapien
cagttggagagacctagaatcagag

SEQ ID NO: 3548804 - DNA, 25 bp, Homo sapien
gggccatgcctaaattgtatcctag

SEQ ID NO: 3548805 - DNA, 25 bp, Homo sapien
tcattggtgatacagctggaatctc

SEQ ID NO: 3548806 - DNA, 25 bp, Homo sapien
tcccaaaggttggaagaagattcag

SEQ ID NO: 3548807 - DNA, 25 bp, Homo sapien
caagagatatcaaacaggctattgg

SEQ ID NO: 3548808 - DNA, 25 bp, Homo sapien
catgggaacagatgtgattactagg

SEQ ID NO: 3548809 - DNA, 25 bp, Homo sapien
ggccaatgattgaactctaaagtga

SEQ ID NO: 3548810 - DNA, 25 bp, Homo sapien
caacttaattgagaaagactacagg

SEQ ID NO: 3548811 - DNA, 25 bp, Homo sapien
ccagcttcaggtgggtatagacgct

SEQ ID NO: 3548812 - DNA, 25 bp, Homo sapien
cacataataataagctgagcctaac

SEQ ID NO: 3548813 - DNA, 25 bp, Homo sapien
gttggccgaggaaacacaaggtata

SEQ ID NO: 3548814 - DNA, 25 bp, Homo sapien
aaatgagataccatatgtcaaacac

SEQ ID NO: 3548815 - DNA, 25 bp, Homo sapien
tagtctgattccatagtataccacg

SEQ ID NO: 3548816 - DNA, 25 bp, Homo sapien
tcgttttagtaactgtggtgttcca

SEQ ID NO: 3548817 - DNA, 25 bp, Homo sapien
gatacgtccaagtaagagcttctct

SEQ ID NO: 3548818 - DNA, 25 bp, Homo sapien
tcaatacagcactaacgttttcgtt

SEQ ID NO: 3548819 - DNA, 25 bp, Homo sapien
tcattctggcctttctaaaacaaac

SEQ ID NO: 3548820 - DNA, 25 bp, Homo sapien
aaagatcttctgatcaaactcattc

SEQ ID NO: 3548821 - DNA, 25 bp, Homo sapien
attctggcctttctaaaacaaactg

SEQ ID NO: 3548822 - DNA, 25 bp, Homo sapien
tctgatcaaactcattctggccttt

SEQ ID NO: 3548823 - DNA, 25 bp, Homo sapien
tgggaatcagaactctttatgaaac

SEQ ID NO: 3548824 - DNA, 25 bp, Homo sapien
gaaacttgattgatagaatctacta

SEQ ID NO: 3548825 - DNA, 25 bp, Homo sapien
atgaaacttgattgatagaatctac

SEQ ID NO: 3548826 - DNA, 25 bp, Homo sapien
gaactctttatgaaacttgattgat

SEQ ID NO: 3548827 - DNA, 25 bp, Homo sapien
tgtctcttaagtctagaggctcctt

SEQ ID NO: 3548828 - DNA, 25 bp, Homo sapien
gagggaaacactccatctggagaat

SEQ ID NO: 3548829 - DNA, 25 bp, Homo sapien
cctatgaggtgcaagcactgctgat

SEQ ID NO: 3548830 - DNA, 25 bp, Homo sapien
ctggagaatgctggcaacttgtctc

SEQ ID NO: 3548831 - DNA, 25 bp, Homo sapien
cagctaccacgcgtggcctcctatt

SEQ ID NO: 3548832 - DNA, 25 bp, Homo sapien
tccatcgtccttggcctccgaatgt

SEQ ID NO: 3548833 - DNA, 25 bp, Homo sapien
tattcacgtgtgcaggcgacatggc

SEQ ID NO: 3548834 - DNA, 25 bp, Homo sapien
gacctctcgtgatccatcgtccttg

SEQ ID NO: 3548835 - DNA, 25 bp, Homo sapien
gaattgacaaagagggttgagccac

SEQ ID NO: 3548836 - DNA, 25 bp, Homo sapien
ggtttccctaaagacaggtggagca

SEQ ID NO: 3548837 - DNA, 25 bp, Homo sapien
ttgagccactacgagcgggagttac

SEQ ID NO: 3548838 - DNA, 25 bp, Homo sapien
cagccatagttaacttagaggaagg

SEQ ID NO: 3548839 - DNA, 25 bp, Homo sapien
cttcagcgagcacaagtcctggaat

SEQ ID NO: 3548840 - DNA, 25 bp, Homo sapien
cgagcacaagtcctggaatctccca

SEQ ID NO: 3548841 - DNA, 25 bp, Homo sapien
tggaatctcccacgcccatcccttt

SEQ ID NO: 3548842 - DNA, 25 bp, Homo sapien
taacagttgtatcttcagcgagcac

SEQ ID NO: 3548843 - DNA, 25 bp, Homo sapien
taaagcgcactgtatcatgatgaat

SEQ ID NO: 3548844 - DNA, 25 bp, Homo sapien
tttgcatccctacgttaaagcgcac

SEQ ID NO: 3548845 - DNA, 25 bp, Homo sapien
tctgtacctatcaagtgtcatatgg

SEQ ID NO: 3548846 - DNA, 25 bp, Homo sapien
catttgttgagcgttcataatcagg

SEQ ID NO: 3548847 - DNA, 25 bp, Homo sapien
tcttcatcaaggtttatacattaaa

SEQ ID NO: 3548848 - DNA, 25 bp, Homo sapien
gaaataacatgttaggctagaaaag

SEQ ID NO: 3548849 - DNA, 25 bp, Homo sapien
tggcctatttctcccattaagtatg

SEQ ID NO: 3548850 - DNA, 25 bp, Homo sapien
cagaggaaaactactgttggcctat

SEQ ID NO: 3548851 - DNA, 25 bp, Homo sapien
tgactctgtcgtttatccctgtaag

SEQ ID NO: 3548852 - DNA, 25 bp, Homo sapien
tattcaaatctttagcaaggagcat

SEQ ID NO: 3548853 - DNA, 25 bp, Homo sapien
catgggttttggatatgactctgtc

SEQ ID NO: 3548854 - DNA, 25 bp, Homo sapien
gaataattccgagcggctgctggcc

SEQ ID NO: 3548855 - DNA, 25 bp, Homo sapien
tattggccgaggacacacaaggaat

SEQ ID NO: 3548856 - DNA, 25 bp, Homo sapien
cacataataataagctgagcctaat

SEQ ID NO: 3548857 - DNA, 25 bp, Homo sapien
tggtttcctgacaatttcggatcga

SEQ ID NO: 3548858 - DNA, 25 bp, Homo sapien
ccagcttcaggtgggtatagacact

SEQ ID NO: 3548859 - DNA, 25 bp, Homo sapien
tactttatgccaaactggtgggtga

SEQ ID NO: 3548860 - DNA, 25 bp, Homo sapien
tcatcagcagtgaatgttatccttc

SEQ ID NO: 3548861 - DNA, 25 bp, Homo sapien
ttatttccattagcaatctgtggaa

SEQ ID NO: 3548862 - DNA, 25 bp, Homo sapien
agggataagtccaagtcagagctta

SEQ ID NO: 3548863 - DNA, 25 bp, Homo sapien
taagtaagtcattctgctactgaaa

SEQ ID NO: 3548864 - DNA, 25 bp, Homo sapien
aatggctggctaattacgttagtgc

SEQ ID NO: 3548865 - DNA, 25 bp, Homo sapien
tatttatcccccgaatggctggcta

SEQ ID NO: 3548866 - DNA, 25 bp, Homo sapien
tcctaaaccaagatcgtacaagttg

SEQ ID NO: 3548867 - DNA, 25 bp, Homo sapien
tcattctggcctttctaaaacaaac

SEQ ID NO: 3548868 - DNA, 25 bp, Homo sapien
aaagatcttctgatcaaactcattc

SEQ ID NO: 3548869 - DNA, 25 bp, Homo sapien
tctgatcaaactcattctggccttt

SEQ ID NO: 3548870 - DNA, 25 bp, Homo sapien
attctggcctttctaaaacaaactg

SEQ ID NO: 3548871 - DNA, 25 bp, Homo sapien
actcatcgtcccatgaagtttgtgg

SEQ ID NO: 3548872 - DNA, 25 bp, Homo sapien
aggtgttgtgttttggccatattca

SEQ ID NO: 3548873 - DNA, 25 bp, Homo sapien
tgtgttttggccatattcaggaact

SEQ ID NO: 3548874 - DNA, 25 bp, Homo sapien
tacttggctatgttcagtcattctt

SEQ ID NO: 3548875 - DNA, 25 bp, Homo sapien
ttaataccatcaagggggctccacc

SEQ ID NO: 3548876 - DNA, 25 bp, Homo sapien
ccacctccaagtccgttgggagttg

SEQ ID NO: 3548877 - DNA, 25 bp, Homo sapien
ccgttgggagttgggtcttcaacat

SEQ ID NO: 3548878 - DNA, 25 bp, Homo sapien
aggacttaataccatcaagggggct

SEQ ID NO: 3548879 - DNA, 25 bp, Homo sapien
ctcatatttgcctcagacaattgcc

SEQ ID NO: 3548880 - DNA, 25 bp, Homo sapien
gtaggcagatgaacccgggccagtt

SEQ ID NO: 3548881 - DNA, 25 bp, Homo sapien
tatgaatcttcccttgacacagcaa

SEQ ID NO: 3548882 - DNA, 25 bp, Homo sapien
tggagagcactaaaattctacagat

SEQ ID NO: 3548883 - DNA, 25 bp, Homo sapien
cattccaacagagtttttgatgaca

SEQ ID NO: 3548884 - DNA, 25 bp, Homo sapien
aggagctgccactaagttctctgac

SEQ ID NO: 3548885 - DNA, 25 bp, Homo sapien
catacaacttgtcttttccacctaa

SEQ ID NO: 3548886 - DNA, 25 bp, Homo sapien
tctctacatacaacttgtcttttcc

SEQ ID NO: 3548887 - DNA, 25 bp, Homo sapien
tataggagagttcccctacacatgc

SEQ ID NO: 3548888 - DNA, 25 bp, Homo sapien
aagatctgatagttatataggagag

SEQ ID NO: 3548889 - DNA, 25 bp, Homo sapien
acggggatgagttttttctatgctg

SEQ ID NO: 3548890 - DNA, 25 bp, Homo sapien
tatataggagagttcccctacacat

SEQ ID NO: 3548891 - DNA, 25 bp, Homo sapien
cgagacactgcctagtgtagctgtg

SEQ ID NO: 3548892 - DNA, 25 bp, Homo sapien
tcatgggctaaaccccaggtcttgc

SEQ ID NO: 3548893 - DNA, 25 bp, Homo sapien
ggtggtagcccccacagagagtccc

SEQ ID NO: 3548894 - DNA, 25 bp, Homo sapien
tgtgaggtggtagcccccacagaga

SEQ ID NO: 3548895 - DNA, 25 bp, Homo sapien
tggctgagtagctgaccagacattt

SEQ ID NO: 3548896 - DNA, 25 bp, Homo sapien
gtagctgaccagacatttgagttcg

SEQ ID NO: 3548897 - DNA, 25 bp, Homo sapien
gacatttgagttcgaatcgtgaagc

SEQ ID NO: 3548898 - DNA, 25 bp, Homo sapien
tgaccagacatttgagttcgaatcg

SEQ ID NO: 3548899 - DNA, 25 bp, Homo sapien
tcagctagtaggaaacctaataaac

SEQ ID NO: 3548900 - DNA, 25 bp, Homo sapien
ctaataaacaccacaggattttgga

SEQ ID NO: 3548901 - DNA, 25 bp, Homo sapien
gttccagaaatatctcagccttcac

SEQ ID NO: 3548902 - DNA, 25 bp, Homo sapien
aaagcctgtcagctagtaggaaacc

SEQ ID NO: 3548903 - DNA, 25 bp, Homo sapien
tccaatactaaaatgggagttacat

SEQ ID NO: 3548904 - DNA, 25 bp, Homo sapien
tgctcatggaagtgatcacccttct

SEQ ID NO: 3548905 - DNA, 25 bp, Homo sapien
tctaccagaccatgtgaattgacat

SEQ ID NO: 3548906 - DNA, 25 bp, Homo sapien
cattcaagggcttacagtgctcatg

SEQ ID NO: 3548907 - DNA, 25 bp, Homo sapien
gctcgtccattccttgccggtgtga

SEQ ID NO: 3548908 - DNA, 25 bp, Homo sapien
aaccagctaaaggtgaggccctgca

SEQ ID NO: 3548909 - DNA, 25 bp, Homo sapien
gaagcagaactaaaagacgtccact

SEQ ID NO: 3548910 - DNA, 25 bp, Homo sapien
ggaactgggcacatagaccctggaa

SEQ ID NO: 3548911 - DNA, 25 bp, Homo sapien
ggcaaaccatttccacgtcctgctg

SEQ ID NO: 3548912 - DNA, 25 bp, Homo sapien
tgagatcttgttagcccttgaggcc

SEQ ID NO: 3548913 - DNA, 25 bp, Homo sapien
cagaaggctcaagctctgtccaaga

SEQ ID NO: 3548914 - DNA, 25 bp, Homo sapien
tctagcaccatcagaccaacagatg

SEQ ID NO: 3548915 - DNA, 25 bp, Homo sapien
gggctgccacgctggtctcattctg

SEQ ID NO: 3548916 - DNA, 25 bp, Homo sapien
cggttaggaagaaacggctttgctg

SEQ ID NO: 3548917 - DNA, 25 bp, Homo sapien
ctaatcctctgtcgccatctgctgg

SEQ ID NO: 3548918 - DNA, 25 bp, Homo sapien
tcgtctcgggagctgtcctgaaagg

SEQ ID NO: 3548919 - DNA, 25 bp, Homo sapien
aaaaccctttgcagctaatgttggc

SEQ ID NO: 3548920 - DNA, 25 bp, Homo sapien
gaccgtgacttaagtgtggaggaaa

SEQ ID NO: 3548921 - DNA, 25 bp, Homo sapien
ataattcattactatcaaaagaggc

SEQ ID NO: 3548922 - DNA, 25 bp, Homo sapien
ttagtctaagaattaagaaactggc

SEQ ID NO: 3548923 - DNA, 25 bp, Homo sapien
ggccaaggtaggcgggctgcctgag

SEQ ID NO: 3548924 - DNA, 25 bp, Homo sapien
aaggtaggcgggctgcctgagttca

SEQ ID NO: 3548925 - DNA, 25 bp, Homo sapien
gaggccaaggtaggcgggctgcctg

SEQ ID NO: 3548926 - DNA, 25 bp, Homo sapien
ccaaggtaggcgggctgcctgagtt

SEQ ID NO: 3548927 - DNA, 25 bp, Homo sapien
tgggagatggaggtttcagtaagcc

SEQ ID NO: 3548928 - DNA, 25 bp, Homo sapien
tgggtgacacagtgagactctgtct

SEQ ID NO: 3548929 - DNA, 25 bp, Homo sapien
aagatcatgccacttcactccagcc

SEQ ID NO: 3548930 - DNA, 25 bp, Homo sapien
cctgggtgacacagtgagactctgt

SEQ ID NO: 3548931 - DNA, 25 bp, Homo sapien
tctcaacttcgtagattgaaaactt

SEQ ID NO: 3548932 - DNA, 25 bp, Homo sapien
tatctccttgtgcactaatatttca

SEQ ID NO: 3548933 - DNA, 25 bp, Homo sapien
taggtggtacaagttttatatcttc

SEQ ID NO: 3548934 - DNA, 25 bp, Homo sapien
tagttgcacagatattaggtggtac

SEQ ID NO: 3548935 - DNA, 25 bp, Homo sapien
accatgatttacaggcggggacagc

SEQ ID NO: 3548936 - DNA, 25 bp, Homo sapien
tcctgcgcgcgcgagactcaagctg

SEQ ID NO: 3548937 - DNA, 25 bp, Homo sapien
gggacagccacattcctgcgcccca

SEQ ID NO: 3548938 - DNA, 25 bp, Homo sapien
tgcagcagatggcgcgctgcagacc

SEQ ID NO: 3548939 - DNA, 25 bp, Homo sapien
aaccgggagaatagaagcaggcaag

SEQ ID NO: 3548940 - DNA, 25 bp, Homo sapien
gatgctttcgctttcgctctcgctt

SEQ ID NO: 3548941 - DNA, 25 bp, Homo sapien
gaaaccgggagaatagaagcaggca

SEQ ID NO: 3548942 - DNA, 25 bp, Homo sapien
tcgctttccaatactcgggactggg

SEQ ID NO: 3548943 - DNA, 25 bp, Homo sapien
aggcttagagttggcctcgacccct

SEQ ID NO: 3548944 - DNA, 25 bp, Homo sapien
tgcccttgcccctggaaaggcagaa

SEQ ID NO: 3548945 - DNA, 25 bp, Homo sapien
gactgacagcgccacccatctgggg

SEQ ID NO: 3548946 - DNA, 25 bp, Homo sapien
tttggtagtgctgcaagtccccttg

SEQ ID NO: 3548947 - DNA, 25 bp, Homo sapien
tacagtgcaggaaccaaaacttgtt

SEQ ID NO: 3548948 - DNA, 25 bp, Homo sapien
caggtcaataagttgcaaaagttgg

SEQ ID NO: 3548949 - DNA, 25 bp, Homo sapien
gcctaaattcatttgctacagtgca

SEQ ID NO: 3548950 - DNA, 25 bp, Homo sapien
ctgaaactgtcggaatatatgggtc

SEQ ID NO: 3548951 - DNA, 25 bp, Homo sapien
gaatcaggcaactccacagaactag

SEQ ID NO: 3548952 - DNA, 25 bp, Homo sapien
gaggtggacgtatatgctagttacc

SEQ ID NO: 3548953 - DNA, 25 bp, Homo sapien
gagagcaactcaaatatctaggagg

SEQ ID NO: 3548954 - DNA, 25 bp, Homo sapien
gaactagaatagattgggagacact

SEQ ID NO: 3548955 - DNA, 25 bp, Homo sapien
gcgggtaagctccagggcactcgcc

SEQ ID NO: 3548956 - DNA, 25 bp, Homo sapien
ctccagggcactcgcccgagcagca

SEQ ID NO: 3548957 - DNA, 25 bp, Homo sapien
agcagggggcgtgtcttctgcttcc

SEQ ID NO: 3548958 - DNA, 25 bp, Homo sapien
cgagcagcagggggcgtgtcttctg

SEQ ID NO: 3548959 - DNA, 25 bp, Homo sapien
gaatggctgaacgagcacggccgct

SEQ ID NO: 3548960 - DNA, 25 bp, Homo sapien
agagagccgggcatttgcatgaagc

SEQ ID NO: 3548961 - DNA, 25 bp, Homo sapien
ctggcctcggccgtggtggtctggg

SEQ ID NO: 3548962 - DNA, 25 bp, Homo sapien
gaagcgactcgaccccacagagcag

SEQ ID NO: 3548963 - DNA, 25 bp, Homo sapien
gggcttgccacacgtcccctcaccc

SEQ ID NO: 3548964 - DNA, 25 bp, Homo sapien
cccctcacccccgatctcactgcct

SEQ ID NO: 3548965 - DNA, 25 bp, Homo sapien
ctgtgtgggatgcctccccgcagct

SEQ ID NO: 3548966 - DNA, 25 bp, Homo sapien
cctctgcgtctcctgtgtgggatgc

SEQ ID NO: 3548967 - DNA, 25 bp, Homo sapien
gacgccgcggcattggcgaatgcct

SEQ ID NO: 3548968 - DNA, 25 bp, Homo sapien
ggcattggcgaatgcctctgctaca

SEQ ID NO: 3548969 - DNA, 25 bp, Homo sapien
cctggacgccgcggcattggcgaat

SEQ ID NO: 3548970 - DNA, 25 bp, Homo sapien
cgcggcattggcgaatgcctctgct

SEQ ID NO: 3548971 - DNA, 25 bp, Homo sapien
tctggctcggctttcccaagagtgc

SEQ ID NO: 3548972 - DNA, 25 bp, Homo sapien
aacagctgtttgagcagagtctctc

SEQ ID NO: 3548973 - DNA, 25 bp, Homo sapien
cactggctgattgaggagagctttc

SEQ ID NO: 3548974 - DNA, 25 bp, Homo sapien
ccttgcttaatcgatgacccgggaa

SEQ ID NO: 3548975 - DNA, 25 bp, Homo sapien
ggaggggcttcaaccgtgtgtggag

SEQ ID NO: 3548976 - DNA, 25 bp, Homo sapien
tctggaggggcttcaaccgtgtgtg

SEQ ID NO: 3548977 - DNA, 25 bp, Homo sapien
tggaggggcttcaaccgtgtgtgga

SEQ ID NO: 3548978 - DNA, 25 bp, Homo sapien
ctggaggggcttcaaccgtgtgtgg

SEQ ID NO: 3548979 - DNA, 25 bp, Homo sapien
tgtgacagaaacgtctcagcccctt

SEQ ID NO: 3548980 - DNA, 25 bp, Homo sapien
ttggaaaaccacccttgtgacagaa

SEQ ID NO: 3548981 - DNA, 25 bp, Homo sapien
ggtacttaggataggcaaggtatct

SEQ ID NO: 3548982 - DNA, 25 bp, Homo sapien
gagtaaatctctacagcatttggaa

SEQ ID NO: 3548983 - DNA, 25 bp, Homo sapien
gcagtgactgaagagctttacttca

SEQ ID NO: 3548984 - DNA, 25 bp, Homo sapien
tttctgttgtagggcagtgactgaa

SEQ ID NO: 3548985 - DNA, 25 bp, Homo sapien
cttgactgggttgtcctttttctgt

SEQ ID NO: 3548986 - DNA, 25 bp, Homo sapien
agtgactgaagagctttacttcagc

SEQ ID NO: 3548987 - DNA, 25 bp, Homo sapien
aagctgagttttagccccgccacaa

SEQ ID NO: 3548988 - DNA, 25 bp, Homo sapien
tttacagctagtcaatggcagggcc

SEQ ID NO: 3548989 - DNA, 25 bp, Homo sapien
taattacaatgtgcaggatgcacca

SEQ ID NO: 3548990 - DNA, 25 bp, Homo sapien
tatggagcaactatttagcgcagtc

SEQ ID NO: 3548991 - DNA, 25 bp, Homo sapien
tcaatattttggagtgcctaggaca

SEQ ID NO: 3548992 - DNA, 25 bp, Homo sapien
tacagccatgagcacataccttgat

SEQ ID NO: 3548993 - DNA, 25 bp, Homo sapien
catggtactcactctctagtgaagg

SEQ ID NO: 3548994 - DNA, 25 bp, Homo sapien
gacatgcaggcatagagaatacagc

SEQ ID NO: 3548995 - DNA, 25 bp, Homo sapien
ctccccaacattcttattgcctttg

SEQ ID NO: 3548996 - DNA, 25 bp, Homo sapien
aatggtacttagatgggaactggag

SEQ ID NO: 3548997 - DNA, 25 bp, Homo sapien
tgttgtgtcccaagaccctatctcc

SEQ ID NO: 3548998 - DNA, 25 bp, Homo sapien
tggctcccagtaaggaacgaattgg

SEQ ID NO: 3548999 - DNA, 25 bp, Homo sapien
tcatatgcatgagccgttggacaga

SEQ ID NO: 3549000 - DNA, 25 bp, Homo sapien
ggcaaactcccatgttcggacttca

SEQ ID NO: 3549001 - DNA, 25 bp, Homo sapien
gctaaggtcaccagttaggaaccca

SEQ ID NO: 3549002 - DNA, 25 bp, Homo sapien
gatctgactccgcaaaacgacttga

SEQ ID NO: 3549003 - DNA, 25 bp, Homo sapien
cataggaaagtcagtacttgcagac

SEQ ID NO: 3549004 - DNA, 25 bp, Homo sapien
gcagacaagtggttagcttggctaa

SEQ ID NO: 3549005 - DNA, 25 bp, Homo sapien
tgtaatgcattaaaagcctgggaat

SEQ ID NO: 3549006 - DNA, 25 bp, Homo sapien
ggctaaaatgtacaaaacacccaga

SEQ ID NO: 3549007 - DNA, 25 bp, Homo sapien
gagagcgggctcaaattctgtgact

SEQ ID NO: 3549008 - DNA, 25 bp, Homo sapien
gaaatgaatgggtatcctggttccc

SEQ ID NO: 3549009 - DNA, 25 bp, Homo sapien
tctgcccctgctcttggtaagtggt

SEQ ID NO: 3549010 - DNA, 25 bp, Homo sapien
gtctgtcaacatagagccctcaaag

SEQ ID NO: 3549011 - DNA, 25 bp, Homo sapien
gaacttccgggtgccgtagatggcc

SEQ ID NO: 3549012 - DNA, 25 bp, Homo sapien
tgtgcagctaaagaacccgccaaag

SEQ ID NO: 3549013 - DNA, 25 bp, Homo sapien
taggacacttggcatccatcgctga

SEQ ID NO: 3549014 - DNA, 25 bp, Homo sapien
gaagagcccggatttgacgcaatag

SEQ ID NO: 3549015 - DNA, 25 bp, Homo sapien
tctgctccaacttttggcagaggag

SEQ ID NO: 3549016 - DNA, 25 bp, Homo sapien
gtaggtgttgaatgtataatagcgc

SEQ ID NO: 3549017 - DNA, 25 bp, Homo sapien
tataatagcgcttcacagcagtttc

SEQ ID NO: 3549018 - DNA, 25 bp, Homo sapien
agaggaggacatccctattccctga

SEQ ID NO: 3549019 - DNA, 25 bp, Homo sapien
tgcgaggtatagttttcctcaaatt

SEQ ID NO: 3549020 - DNA, 25 bp, Homo sapien
ggtaatttgcccaggattccaggat

SEQ ID NO: 3549021 - DNA, 25 bp, Homo sapien
tgacgtgggtgccatagttgagcac

SEQ ID NO: 3549022 - DNA, 25 bp, Homo sapien
gccccagcgtcgacactggtggtga

SEQ ID NO: 3549023 - DNA, 25 bp, Homo sapien
actcgggtagttatagcttggtcct

SEQ ID NO: 3549024 - DNA, 25 bp, Homo sapien
actcatgagttctctaaaagctaca

SEQ ID NO: 3549025 - DNA, 25 bp, Homo sapien
aagcagatgatgaagcggaaaactc

SEQ ID NO: 3549026 - DNA, 25 bp, Homo sapien
ttgcctgatttagcccatgctgccg

SEQ ID NO: 3549027 - DNA, 25 bp, Homo sapien
ctacacagcggccagcaagctttgg

SEQ ID NO: 3549028 - DNA, 25 bp, Homo sapien
tttcatattttccctgactgctgtc

SEQ ID NO: 3549029 - DNA, 25 bp, Homo sapien
aacctggtgatttgctccaaggagg

SEQ ID NO: 3549030 - DNA, 25 bp, Homo sapien
acctggtgatttgctccaaggaggc

SEQ ID NO: 3549031 - DNA, 25 bp, Homo sapien
caacctggtgatttgctccaaggag

SEQ ID NO: 3549032 - DNA, 25 bp, Homo sapien
cctggtgatttgctccaaggaggcc

SEQ ID NO: 3549033 - DNA, 25 bp, Homo sapien
gccagatgtagtggtgacacacaac

SEQ ID NO: 3549034 - DNA, 25 bp, Homo sapien
gggatccctggaacacaatttgaaa

SEQ ID NO: 3549035 - DNA, 25 bp, Homo sapien
gaagaagttttccaagccacaggat

SEQ ID NO: 3549036 - DNA, 25 bp, Homo sapien
ccacaggattcatgggatagctgaa

SEQ ID NO: 3549037 - DNA, 25 bp, Homo sapien
aatcagagtcgccaaacagtggagc

SEQ ID NO: 3549038 - DNA, 25 bp, Homo sapien
gggctcactatgtctcactaagttg

SEQ ID NO: 3549039 - DNA, 25 bp, Homo sapien
ggtacagtcatagtacactgtaacc

SEQ ID NO: 3549040 - DNA, 25 bp, Homo sapien
gcaggaggatctcccaaactcctct

SEQ ID NO: 3549041 - DNA, 25 bp, Homo sapien
cacctcactctcctaggactttggg

SEQ ID NO: 3549042 - DNA, 25 bp, Homo sapien
agtgagcagtttggtaccaggtaca

SEQ ID NO: 3549043 - DNA, 25 bp, Homo sapien
gcttcaaggcacacccatgtgagtg

SEQ ID NO: 3549044 - DNA, 25 bp, Homo sapien
ctttagtgacacaggagaatatgcc

SEQ ID NO: 3549045 - DNA, 25 bp, Homo sapien
tgattgtaaaccagatgcttcaagg

SEQ ID NO: 3549046 - DNA, 25 bp, Homo sapien
ccatgcatgtattctactccggaaa

SEQ ID NO: 3549047 - DNA, 25 bp, Homo sapien
tccatcctgcagagtcagcggtgtc

SEQ ID NO: 3549048 - DNA, 25 bp, Homo sapien
tgttttcccgccaatggatcctaga

SEQ ID NO: 3549049 - DNA, 25 bp, Homo sapien
cattttgacaattgaccgcaatgga

SEQ ID NO: 3549050 - DNA, 25 bp, Homo sapien
tggaagtcagtacagagcaatgcac

SEQ ID NO: 3549051 - DNA, 25 bp, Homo sapien
ctgtgtccgggatgggtggacgtag

SEQ ID NO: 3549052 - DNA, 25 bp, Homo sapien
tagaggccctcactggtgtctggac

SEQ ID NO: 3549053 - DNA, 25 bp, Homo sapien
cctagaggccctcactggtgtctgg

SEQ ID NO: 3549054 - DNA, 25 bp, Homo sapien
gccctagaggccctcactggtgtct

SEQ ID NO: 3549055 - DNA, 25 bp, Homo sapien
aggccctcactggtgtctggacagg

SEQ ID NO: 3549056 - DNA, 25 bp, Homo sapien
tttggctcccgcacgaggtgctgtg

SEQ ID NO: 3549057 - DNA, 25 bp, Homo sapien
gggagcccctggtcgatatatctgg

SEQ ID NO: 3549058 - DNA, 25 bp, Homo sapien
tcatggatggccttgagtctgctgg

SEQ ID NO: 3549059 - DNA, 25 bp, Homo sapien
tcctgccgccccttggagtaaataa

SEQ ID NO: 3549060 - DNA, 25 bp, Homo sapien
ccaggaatgggcttgtgctgggaca

SEQ ID NO: 3549061 - DNA, 25 bp, Homo sapien
ccgagtcgtaggctcccaggaatgg

SEQ ID NO: 3549062 - DNA, 25 bp, Homo sapien
cagtgtcttggtgcgggctccctct

SEQ ID NO: 3549063 - DNA, 25 bp, Homo sapien
acagccgttagcagtgtcttggtgc

SEQ ID NO: 3549064 - DNA, 25 bp, Homo sapien
gcagaggagggctgcacacctccca

SEQ ID NO: 3549065 - DNA, 25 bp, Homo sapien
agaggagggctgcacacctcccata

SEQ ID NO: 3549066 - DNA, 25 bp, Homo sapien
gaggagggctgcacacctcccatac

SEQ ID NO: 3549067 - DNA, 25 bp, Homo sapien
gggcagaggagggctgcacacctcc

SEQ ID NO: 3549068 - DNA, 25 bp, Homo sapien
ggaagggagaccagccaactttgtc

SEQ ID NO: 3549069 - DNA, 25 bp, Homo sapien
catctggattaggacggacaggagc

SEQ ID NO: 3549070 - DNA, 25 bp, Homo sapien
ccagcagatgtgatgtgttctcccc

SEQ ID NO: 3549071 - DNA, 25 bp, Homo sapien
cagtggccccgcaggtatttggaga

SEQ ID NO: 3549072 - DNA, 25 bp, Homo sapien
gggacagcatacagcccacagatac

SEQ ID NO: 3549073 - DNA, 25 bp, Homo sapien
gttcagcagaacatgggacagcata

SEQ ID NO: 3549074 - DNA, 25 bp, Homo sapien
gatacctcaagatcagtgtccgtga

SEQ ID NO: 3549075 - DNA, 25 bp, Homo sapien
ggtggagacctggtggcttcacact

SEQ ID NO: 3549076 - DNA, 25 bp, Homo sapien
cataggagaagaagtaggtggcaaa

SEQ ID NO: 3549077 - DNA, 25 bp, Homo sapien
tggcaaaggagtggctgtcccagaa

SEQ ID NO: 3549078 - DNA, 25 bp, Homo sapien
aaggagtggctgtcccagaaaagca

SEQ ID NO: 3549079 - DNA, 25 bp, Homo sapien
agagggcagcataggagaagaagta

SEQ ID NO: 3549080 - DNA, 25 bp, Homo sapien
aggccaagggccgcaactgctgcat

SEQ ID NO: 3549081 - DNA, 25 bp, Homo sapien
gaggccaagggccgcaactgctgca

SEQ ID NO: 3549082 - DNA, 25 bp, Homo sapien
acaggacacacgaggggcacagaca

SEQ ID NO: 3549083 - DNA, 25 bp, Homo sapien
ctgcaggcagaccttagccacctca

SEQ ID NO: 3549084 - DNA, 25 bp, Homo sapien
gagaaggcagggataagatggcacc

SEQ ID NO: 3549085 - DNA, 25 bp, Homo sapien
aaggcagggataagatggcacctac

SEQ ID NO: 3549086 - DNA, 25 bp, Homo sapien
gaggagaaggcagggataagatggc

SEQ ID NO: 3549087 - DNA, 25 bp, Homo sapien
gaaggcagggataagatggcaccta

SEQ ID NO: 3549088 - DNA, 25 bp, Homo sapien
cctcccacaggcctcgtgttaccca

SEQ ID NO: 3549089 - DNA, 25 bp, Homo sapien
gcctcccacaggcctcgtgttaccc

SEQ ID NO: 3549090 - DNA, 25 bp, Homo sapien
ctcccacaggcctcgtgttacccat

SEQ ID NO: 3549091 - DNA, 25 bp, Homo sapien
gaggttgctgaaagctattgctgcc

SEQ ID NO: 3549092 - DNA, 25 bp, Homo sapien
gggccagaggcataaccgtgcaccc

SEQ ID NO: 3549093 - DNA, 25 bp, Homo sapien
acatggagtagccttgagggacccc

SEQ ID NO: 3549094 - DNA, 25 bp, Homo sapien
cataaccgtgcacccactggaaggg

SEQ ID NO: 3549095 - DNA, 25 bp, Homo sapien
tttgctaattgttctggaaggttga

SEQ ID NO: 3549096 - DNA, 25 bp, Homo sapien
tgttctggaaggttgatctttgtcc

SEQ ID NO: 3549097 - DNA, 25 bp, Homo sapien
ggaggactctgagaagtgtttgcta

SEQ ID NO: 3549098 - DNA, 25 bp, Homo sapien
gctaattgttctggaaggttgatct

SEQ ID NO: 3549099 - DNA, 25 bp, Homo sapien
tgtgaggcatccgtgccagaagcct

SEQ ID NO: 3549100 - DNA, 25 bp, Homo sapien
cctgtaagctggttcctcctcgata

SEQ ID NO: 3549101 - DNA, 25 bp, Homo sapien
acacctcgatgaactggagttccat

SEQ ID NO: 3549102 - DNA, 25 bp, Homo sapien
tgttcttaaagtggcccagttggga

SEQ ID NO: 3549103 - DNA, 25 bp, Homo sapien
gtccagtgagatttcctcctcctcg

SEQ ID NO: 3549104 - DNA, 25 bp, Homo sapien
cctcctcgtgctgttcttgtgtggc

SEQ ID NO: 3549105 - DNA, 25 bp, Homo sapien
tgaatttcctttctaacactacgcc

SEQ ID NO: 3549106 - DNA, 25 bp, Homo sapien
tttctaacactacgcccagcaaggc

SEQ ID NO: 3549107 - DNA, 25 bp, Homo sapien
gatgatcttttcagcccaagatctt

SEQ ID NO: 3549108 - DNA, 25 bp, Homo sapien
cttccccattgacctactaatagaa

SEQ ID NO: 3549109 - DNA, 25 bp, Homo sapien
cattgacctactaatagaagcttgt

SEQ ID NO: 3549110 - DNA, 25 bp, Homo sapien
tgtctttccttactccttgtctaca

SEQ ID NO: 3549111 - DNA, 25 bp, Homo sapien
gtctttccttactccttgtctacaa

SEQ ID NO: 3549112 - DNA, 25 bp, Homo sapien
tagaagcatgaaatccagacaactt

SEQ ID NO: 3549113 - DNA, 25 bp, Homo sapien
caagagtggtctggtctaaggaaga

SEQ ID NO: 3549114 - DNA, 25 bp, Homo sapien
gagataacacagtctgtcaacaggg

SEQ ID NO: 3549115 - DNA, 25 bp, Homo sapien
cagatgctgtttagatgacatggag

SEQ ID NO: 3549116 - DNA, 25 bp, Homo sapien
agcaatatgaattgcctggcccaga

SEQ ID NO: 3549117 - DNA, 25 bp, Homo sapien
ttgcttcaagagtcccaactgttcc

SEQ ID NO: 3549118 - DNA, 25 bp, Homo sapien
agcacacacgttggaaaccactgca

SEQ ID NO: 3549119 - DNA, 25 bp, Homo sapien
gcattcaggtgaagaaagtgataca

SEQ ID NO: 3549120 - DNA, 25 bp, Homo sapien
gtgcctggaaccaaactctgcctct

SEQ ID NO: 3549121 - DNA, 25 bp, Homo sapien
tggtggctcccactacgataccagc

SEQ ID NO: 3549122 - DNA, 25 bp, Homo sapien
tgaatttccgggtgccacagatggc

SEQ ID NO: 3549123 - DNA, 25 bp, Homo sapien
tgctcttcgtcaggattgtctccag

SEQ ID NO: 3549124 - DNA, 25 bp, Homo sapien
ccaccaccatccttatggatggcac

SEQ ID NO: 3549125 - DNA, 25 bp, Homo sapien
ccaccatccttatggatggcactca

SEQ ID NO: 3549126 - DNA, 25 bp, Homo sapien
agaccaccaccatccttatggatgg

SEQ ID NO: 3549127 - DNA, 25 bp, Homo sapien
caccatccttatggatggcactcat

SEQ ID NO: 3549128 - DNA, 25 bp, Homo sapien
aggatctcgcattctcagaactggt

SEQ ID NO: 3549129 - DNA, 25 bp, Homo sapien
aactggtcactatgacagtgttggc

SEQ ID NO: 3549130 - DNA, 25 bp, Homo sapien
atctcgcattctcagaactggtcac

SEQ ID NO: 3549131 - DNA, 25 bp, Homo sapien
atgacagtgttggcatcagcctcac

SEQ ID NO: 3549132 - DNA, 25 bp, Homo sapien
gtgctggctgaagcctctcggacac

SEQ ID NO: 3549133 - DNA, 25 bp, Homo sapien
gcctctcggacactttttcagggaa

SEQ ID NO: 3549134 - DNA, 25 bp, Homo sapien
ggctgggtgaaaggcgggagactag

SEQ ID NO: 3549135 - DNA, 25 bp, Homo sapien
gagcccagccttgacacagtaggac

SEQ ID NO: 3549136 - DNA, 25 bp, Homo sapien
aaatctttggatgtggctggaacca

SEQ ID NO: 3549137 - DNA, 25 bp, Homo sapien
taaatctttggatgtggctggaacc

SEQ ID NO: 3549138 - DNA, 25 bp, Homo sapien
caactcatagtcctgagaaacgcat

SEQ ID NO: 3549139 - DNA, 25 bp, Homo sapien
caaacctgcttcccaactcatagtc

SEQ ID NO: 3549140 - DNA, 25 bp, Homo sapien
tcccaactcatagtcctgagaaacg

SEQ ID NO: 3549141 - DNA, 25 bp, Homo sapien
actcatagtcctgagaaacgcatac

SEQ ID NO: 3549142 - DNA, 25 bp, Homo sapien
tgaaaagcagtcctgagttgtcagg

SEQ ID NO: 3549143 - DNA, 25 bp, Homo sapien
tccatggaaagtagccagttgggca

SEQ ID NO: 3549144 - DNA, 25 bp, Homo sapien
cttgctgttgaagaggcccctgaaa

SEQ ID NO: 3549145 - DNA, 25 bp, Homo sapien
taaattcaccctttgccgcctggaa

SEQ ID NO: 3549146 - DNA, 25 bp, Homo sapien
tgcaacactcctcgcaagtcttgga

SEQ ID NO: 3549147 - DNA, 25 bp, Homo sapien
caaggagggtgcacttcttatgaca

SEQ ID NO: 3549148 - DNA, 25 bp, Homo sapien
tccaactttgggcagagaacaacat

SEQ ID NO: 3549149 - DNA, 25 bp, Homo sapien
gacactccagatggttgcaacactc

SEQ ID NO: 3549150 - DNA, 25 bp, Homo sapien
cagccagggttggtattgaatgtgt

SEQ ID NO: 3549151 - DNA, 25 bp, Homo sapien
gtgtaatagcgtttcacagctgttt

SEQ ID NO: 3549152 - DNA, 25 bp, Homo sapien
gtgttggcctgaaaattgaagtagg

SEQ ID NO: 3549153 - DNA, 25 bp, Homo sapien
tggcctgaaaattgaagtagggaga

SEQ ID NO: 3549154 - DNA, 25 bp, Homo sapien
tccgaggtatggttttcctcaaatg

SEQ ID NO: 3549155 - DNA, 25 bp, Homo sapien
tgaagttcacggtgttttggaaggc

SEQ ID NO: 3549156 - DNA, 25 bp, Homo sapien
ccgaggtatggttttcctcaaatgt

SEQ ID NO: 3549157 - DNA, 25 bp, Homo sapien
gaagttcacggtgttttggaaggca

SEQ ID NO: 3549158 - DNA, 25 bp, Homo sapien
aagaaggaggccttgatgtggtcct

SEQ ID NO: 3549159 - DNA, 25 bp, Homo sapien
acgtgggtgccatagttgaggacca

SEQ ID NO: 3549160 - DNA, 25 bp, Homo sapien
gccccagcgtcgacactggtgatga

SEQ ID NO: 3549161 - DNA, 25 bp, Homo sapien
cctgaactcgggtagttatagcttt

SEQ ID NO: 3549162 - DNA, 25 bp, Homo sapien
gaactcagcagagaacttggcattg

SEQ ID NO: 3549163 - DNA, 25 bp, Homo sapien
tctggaactcagcagagaacttggc

SEQ ID NO: 3549164 - DNA, 25 bp, Homo sapien
tggaactcagcagagaacttggcat

SEQ ID NO: 3549165 - DNA, 25 bp, Homo sapien
ctctggaactcagcagagaacttgg

SEQ ID NO: 3549166 - DNA, 25 bp, Homo sapien
tctgtgttgatgtagtaggagatac

SEQ ID NO: 3549167 - DNA, 25 bp, Homo sapien
ctgtgttgatgtagtaggagatact

SEQ ID NO: 3549168 - DNA, 25 bp, Homo sapien
tgttgatgtagtaggagatacttct

SEQ ID NO: 3549169 - DNA, 25 bp, Homo sapien
gatctgtgttgatgtagtaggagat

SEQ ID NO: 3549170 - DNA, 25 bp, Homo sapien
cagttggtgtaagtcaagtccatca

SEQ ID NO: 3549171 - DNA, 25 bp, Homo sapien
gcagttggtgtaagtcaagtccatc

SEQ ID NO: 3549172 - DNA, 25 bp, Homo sapien
agttggtgtaagtcaagtccatcac

SEQ ID NO: 3549173 - DNA, 25 bp, Homo sapien
cctccagataggacttccaggatag

SEQ ID NO: 3549174 - DNA, 25 bp, Homo sapien
ccatcccatatccacattccgcaga

SEQ ID NO: 3549175 - DNA, 25 bp, Homo sapien
ggacttccaggataggcagtttcca

SEQ ID NO: 3549176 - DNA, 25 bp, Homo sapien
acattccgcagattgtcccagcccc

SEQ ID NO: 3549177 - DNA, 25 bp, Homo sapien
aaaggcttgcctgatgtaacccatg

SEQ ID NO: 3549178 - DNA, 25 bp, Homo sapien
gtctctcccaaaggcttgcctgatg

SEQ ID NO: 3549179 - DNA, 25 bp, Homo sapien
tctcccaaaggcttgcctgatgtaa

SEQ ID NO: 3549180 - DNA, 25 bp, Homo sapien
atctgtctctcccaaaggcttgcct

SEQ ID NO: 3549181 - DNA, 25 bp, Homo sapien
caggagcctacgcagtggccagcaa

SEQ ID NO: 3549182 - DNA, 25 bp, Homo sapien
aggagcctacgcagtggccagcaag

SEQ ID NO: 3549183 - DNA, 25 bp, Homo sapien
acaggagcctacgcagtggccagca

SEQ ID NO: 3549184 - DNA, 25 bp, Homo sapien
cctgggactccaataccagtttcct

SEQ ID NO: 3549185 - DNA, 25 bp, Homo sapien
tatattttccccgactgctgtttcc

SEQ ID NO: 3549186 - DNA, 25 bp, Homo sapien
tccccgactgctgtttcctgggact

SEQ ID NO: 3549187 - DNA, 25 bp, Homo sapien
tgtttcctgggactccaataccagt

SEQ ID NO: 3549188 - DNA, 25 bp, Homo sapien
ctatgatcacggtcccatgatcagc

SEQ ID NO: 3549189 - DNA, 25 bp, Homo sapien
agggtctcgcttatttcctaggcat

SEQ ID NO: 3549190 - DNA, 25 bp, Homo sapien
cgcttatttcctaggcatggtccca

SEQ ID NO: 3549191 - DNA, 25 bp, Homo sapien
ggcatggtcccactatgatcacggt

SEQ ID NO: 3549192 - DNA, 25 bp, Homo sapien
ccactttggagacaagctgacaatt

SEQ ID NO: 3549193 - DNA, 25 bp, Homo sapien
cactttggagacaagctgacaattt

SEQ ID NO: 3549194 - DNA, 25 bp, Homo sapien
accactttggagacaagctgacaat

SEQ ID NO: 3549195 - DNA, 25 bp, Homo sapien
attttcactttattctgaggttgcc

SEQ ID NO: 3549196 - DNA, 25 bp, Homo sapien
actttattctgaggttgcctcgcca

SEQ ID NO: 3549197 - DNA, 25 bp, Homo sapien
tcactttattctgaggttgcctcgc

SEQ ID NO: 3549198 - DNA, 25 bp, Homo sapien
tttcactttattctgaggttgcctc

SEQ ID NO: 3549199 - DNA, 25 bp, Homo sapien
gatgccaacttgttttggctcaggg

SEQ ID NO: 3549200 - DNA, 25 bp, Homo sapien
actgtgtataagactgatgccaact

SEQ ID NO: 3549201 - DNA, 25 bp, Homo sapien
caccagcattaggatacatataaac

SEQ ID NO: 3549202 - DNA, 25 bp, Homo sapien
tctgtttagagcatctttgatttcc

SEQ ID NO: 3549203 - DNA, 25 bp, Homo sapien
cagaaatggagctgaagcaaggcac

SEQ ID NO: 3549204 - DNA, 25 bp, Homo sapien
tctgcacgcagagggtgggaaacat

SEQ ID NO: 3549205 - DNA, 25 bp, Homo sapien
gcacagagttggataaatgagccta

SEQ ID NO: 3549206 - DNA, 25 bp, Homo sapien
tcactgctgtaaggtgagaagcaca

SEQ ID NO: 3549207 - DNA, 25 bp, Homo sapien
gccagaagacagcactcagttagac

SEQ ID NO: 3549208 - DNA, 25 bp, Homo sapien
agacagcactcagttagacctaggc

SEQ ID NO: 3549209 - DNA, 25 bp, Homo sapien
gatgaatttatgcttcttgaagaag

SEQ ID NO: 3549210 - DNA, 25 bp, Homo sapien
ctgcatactgcaccccataaaggag

SEQ ID NO: 3549211 - DNA, 25 bp, Homo sapien
gaggtttatgttccaggacactgtc

SEQ ID NO: 3549212 - DNA, 25 bp, Homo sapien
aacatagcagatgtccagaaacgac

SEQ ID NO: 3549213 - DNA, 25 bp, Homo sapien
tgcagatgggagtcgtcctgataag

SEQ ID NO: 3549214 - DNA, 25 bp, Homo sapien
ggtgatgaggtttatgttccaggac

SEQ ID NO: 3549215 - DNA, 25 bp, Homo sapien
ctttggaaattcagagaatcccaag

SEQ ID NO: 3549216 - DNA, 25 bp, Homo sapien
tgtaattctcgtactgttcctttcc

SEQ ID NO: 3549217 - DNA, 25 bp, Homo sapien
ttgtaattctcgtactgttcctttc

SEQ ID NO: 3549218 - DNA, 25 bp, Homo sapien
tgagttgttaagaatccatttatct

SEQ ID NO: 3549219 - DNA, 25 bp, Homo sapien
ccttgacatattcaagcttaggata

SEQ ID NO: 3549220 - DNA, 25 bp, Homo sapien
tccatttatcttatactccttgaca

SEQ ID NO: 3549221 - DNA, 25 bp, Homo sapien
taattgatgacctcatgaaattcca

SEQ ID NO: 3549222 - DNA, 25 bp, Homo sapien
aataccactgtaagcatggatgtca

SEQ ID NO: 3549223 - DNA, 25 bp, Homo sapien
aagaccttagacctgccttcaactg

SEQ ID NO: 3549224 - DNA, 25 bp, Homo sapien
ccaaataccactgtaagcatggatg

SEQ ID NO: 3549225 - DNA, 25 bp, Homo sapien
cctgccttcaactgagatgatcttc

SEQ ID NO: 3549226 - DNA, 25 bp, Homo sapien
ctcagcttgagggtacttggtggta

SEQ ID NO: 3549227 - DNA, 25 bp, Homo sapien
cttataggtgtgctctgtatagtca

SEQ ID NO: 3549228 - DNA, 25 bp, Homo sapien
catcaggagttgacaattcagctgt

SEQ ID NO: 3549229 - DNA, 25 bp, Homo sapien
gtatagtcagctttctcagcttgag

SEQ ID NO: 3549230 - DNA, 25 bp, Homo sapien
tgcagaatacgaaatcgggtaaaac

SEQ ID NO: 3549231 - DNA, 25 bp, Homo sapien
tcagtttgtggcattgtgcagaata

SEQ ID NO: 3549232 - DNA, 25 bp, Homo sapien
tgtgcagaatacgaaatcgggtaaa

SEQ ID NO: 3549233 - DNA, 25 bp, Homo sapien
cattgtgcagaatacgaaatcgggt

SEQ ID NO: 3549234 - DNA, 25 bp, Homo sapien
cagaggagtacccaggtgtgtgatg

SEQ ID NO: 3549235 - DNA, 25 bp, Homo sapien
tacccaggtgtgtgatgtgtcagtc

SEQ ID NO: 3549236 - DNA, 25 bp, Homo sapien
ccaggtgtgtgatgtgtcagtctgc

SEQ ID NO: 3549237 - DNA, 25 bp, Homo sapien
ggagtacccaggtgtgtgatgtgtc

SEQ ID NO: 3549238 - DNA, 25 bp, Homo sapien
taatgtaaatatgttgctccatttg

SEQ ID NO: 3549239 - DNA, 25 bp, Homo sapien
gctagagctaggatgcatgtacaca

SEQ ID NO: 3549240 - DNA, 25 bp, Homo sapien
gaactaagctactaaggaatccacc

SEQ ID NO: 3549241 - DNA, 25 bp, Homo sapien
tgaaggccttggcacaacatttggt

SEQ ID NO: 3549242 - DNA, 25 bp, Homo sapien
ggcccacagtagtagagattaaagc

SEQ ID NO: 3549243 - DNA, 25 bp, Homo sapien
tctgagagtcctaggagaacaaaca

SEQ ID NO: 3549244 - DNA, 25 bp, Homo sapien
acttccatggatctgcttggtgcca

SEQ ID NO: 3549245 - DNA, 25 bp, Homo sapien
caaatcagggtcacaaggtagatca

SEQ ID NO: 3549246 - DNA, 25 bp, Homo sapien
gatactagggaccatgattgctgag

SEQ ID NO: 3549247 - DNA, 25 bp, Homo sapien
aatggtccaccgtgagaaatcccgg

SEQ ID NO: 3549248 - DNA, 25 bp, Homo sapien
atggtccaccgtgagaaatcccggg

SEQ ID NO: 3549249 - DNA, 25 bp, Homo sapien
gtgagaggcacaagtgctgaaggcc

SEQ ID NO: 3549250 - DNA, 25 bp, Homo sapien
tgaagaatccagaaccatagaagag

SEQ ID NO: 3549251 - DNA, 25 bp, Homo sapien
ggaactgggtcgcatgtacatgaag

SEQ ID NO: 3549252 - DNA, 25 bp, Homo sapien
caaggcatagaatatggacaccacc

SEQ ID NO: 3549253 - DNA, 25 bp, Homo sapien
taagagatgaggaccactagcacag

SEQ ID NO: 3549254 - DNA, 25 bp, Homo sapien
aaaagtggttgatcatatagggccc

SEQ ID NO: 3549255 - DNA, 25 bp, Homo sapien
tatagggcccacagaaatcatgctg

SEQ ID NO: 3549256 - DNA, 25 bp, Homo sapien
actaaggaatccacccacataggcg

SEQ ID NO: 3549257 - DNA, 25 bp, Homo sapien
atgaggcttaagttccaggccaacg

SEQ ID NO: 3549258 - DNA, 25 bp, Homo sapien
gccaacgtcaggaggtagagcccca

SEQ ID NO: 3549259 - DNA, 25 bp, Homo sapien
aaatcttcatttgaggatggtctga

SEQ ID NO: 3549260 - DNA, 25 bp, Homo sapien
ccatcttaatgagggcaatgaggct

SEQ ID NO: 3549261 - DNA, 25 bp, Homo sapien
tattgattgctttgttgccataaca

SEQ ID NO: 3549262 - DNA, 25 bp, Homo sapien
gggtcctgcaatcttgtgctacaag

SEQ ID NO: 3549263 - DNA, 25 bp, Homo sapien
cataacatcttttgcaaaccagatc

SEQ ID NO: 3549264 - DNA, 25 bp, Homo sapien
attgcattgggcagaagggtcctgc

SEQ ID NO: 3549265 - DNA, 25 bp, Homo sapien
ctggctggtgtctcgttccatttta

SEQ ID NO: 3549266 - DNA, 25 bp, Homo sapien
tggctggtgtctcgttccattttag

SEQ ID NO: 3549267 - DNA, 25 bp, Homo sapien
ggctggtgtctcgttccattttagc

SEQ ID NO: 3549268 - DNA, 25 bp, Homo sapien
tgcctgctgtatcaaatggtttggg

SEQ ID NO: 3549269 - DNA, 25 bp, Homo sapien
aatcatctagaatatgagtccttgg

SEQ ID NO: 3549270 - DNA, 25 bp, Homo sapien
gagtccttggaacatacagatattc

SEQ ID NO: 3549271 - DNA, 25 bp, Homo sapien
tgtttcacatgcctgctgtatcaaa

SEQ ID NO: 3549272 - DNA, 25 bp, Homo sapien
gaagcctcggttccactcggtcaat

SEQ ID NO: 3549273 - DNA, 25 bp, Homo sapien
cagtgctgaagcctcggttccactc

SEQ ID NO: 3549274 - DNA, 25 bp, Homo sapien
cactcggtcaattcacacatgttca

SEQ ID NO: 3549275 - DNA, 25 bp, Homo sapien
ggttccactcggtcaattcacacat

SEQ ID NO: 3549276 - DNA, 25 bp, Homo sapien
tccacacgattttttaaggttatca

SEQ ID NO: 3549277 - DNA, 25 bp, Homo sapien
cttaggctgagtatgactattttcc

SEQ ID NO: 3549278 - DNA, 25 bp, Homo sapien
aatatggtgccagatgactcaggca

SEQ ID NO: 3549279 - DNA, 25 bp, Homo sapien
tgaactggggaccttctatctgtaa

SEQ ID NO: 3549280 - DNA, 25 bp, Homo sapien
ttttccgcagcccaagcacgatgcc

SEQ ID NO: 3549281 - DNA, 25 bp, Homo sapien
atagcaacccggcaaaagctgcccg

SEQ ID NO: 3549282 - DNA, 25 bp, Homo sapien
taagtgaccaaaaatccgcacaatc

SEQ ID NO: 3549283 - DNA, 25 bp, Homo sapien
cctgattgtaggatctcacaaatga

SEQ ID NO: 3549284 - DNA, 25 bp, Homo sapien
cttagtttgtgttcctgattgtagg

SEQ ID NO: 3549285 - DNA, 25 bp, Homo sapien
ctggctgctcaacttcaaaaaccac

SEQ ID NO: 3549286 - DNA, 25 bp, Homo sapien
tctggctgctcaacttcaaaaacca

SEQ ID NO: 3549287 - DNA, 25 bp, Homo sapien
tgaagcgatagagacagaggacaat

SEQ ID NO: 3549288 - DNA, 25 bp, Homo sapien
gaaaagccttattgttctacgcaaa

SEQ ID NO: 3549289 - DNA, 25 bp, Homo sapien
tagaggaggaagctagcccatagca

SEQ ID NO: 3549290 - DNA, 25 bp, Homo sapien
agaatcatgtgagctattgtcccca

SEQ ID NO: 3549291 - DNA, 25 bp, Homo sapien
cgtgtaaagcagacgtgataaccac

SEQ ID NO: 3549292 - DNA, 25 bp, Homo sapien
cgaacccaggaccttctgcgtgtaa

SEQ ID NO: 3549293 - DNA, 25 bp, Homo sapien
tgcgtgtaaagcagacgtgataacc

SEQ ID NO: 3549294 - DNA, 25 bp, Homo sapien
tgtaaagcagacgtgataaccacta

SEQ ID NO: 3549295 - DNA, 25 bp, Homo sapien
gtgtaaagcagacgtgataaccgct

SEQ ID NO: 3549296 - DNA, 25 bp, Homo sapien
cgaacccaggaccttctgcgtgtaa

SEQ ID NO: 3549297 - DNA, 25 bp, Homo sapien
tgcgtgtaaagcagacgtgataacc

SEQ ID NO: 3549298 - DNA, 25 bp, Homo sapien
gtgataaccgctacactatggaacc

SEQ ID NO: 3549299 - DNA, 25 bp, Homo sapien
cagggacctttagatcttcagtcta

SEQ ID NO: 3549300 - DNA, 25 bp, Homo sapien
atcgaaccagggacctttagatctt

SEQ ID NO: 3549301 - DNA, 25 bp, Homo sapien
ctgccgaaacccgggatcgaaccag

SEQ ID NO: 3549302 - DNA, 25 bp, Homo sapien
cgctctcccaactgagctatttcgg

SEQ ID NO: 3549303 - DNA, 25 bp, Homo sapien
ttgaaccctggaccctcagattaaa

SEQ ID NO: 3549304 - DNA, 25 bp, Homo sapien
cctggaccctcagattaaaagtctg

SEQ ID NO: 3549305 - DNA, 25 bp, Homo sapien
cgcccgaacagggacttgaaccctg

SEQ ID NO: 3549306 - DNA, 25 bp, Homo sapien
cctcagattaaaagtctgatgctct

SEQ ID NO: 3549307 - DNA, 25 bp, Homo sapien
tcttccttctaccagtttgagttct

SEQ ID NO: 3549308 - DNA, 25 bp, Homo sapien
taatcttccttctaccagtttgagt

SEQ ID NO: 3549309 - DNA, 25 bp, Homo sapien
ataatcttccttctaccagtttgag

SEQ ID NO: 3549310 - DNA, 25 bp, Homo sapien
aatcttccttctaccagtttgagtt

SEQ ID NO: 3549311 - DNA, 25 bp, Homo sapien
gtcttcttctctgagcttgaattcc

SEQ ID NO: 3549312 - DNA, 25 bp, Homo sapien
gtgtcttcttctctgagcttgaatt

SEQ ID NO: 3549313 - DNA, 25 bp, Homo sapien
tgaattccaaatgcttctcaccagg

SEQ ID NO: 3549314 - DNA, 25 bp, Homo sapien
ctcaccaggattccccctctcctct

SEQ ID NO: 3549315 - DNA, 25 bp, Homo sapien
cagatcgcttgagctccagagttcg

SEQ ID NO: 3549316 - DNA, 25 bp, Homo sapien
gcagatcgcttgagctccagagttc

SEQ ID NO: 3549317 - DNA, 25 bp, Homo sapien
agaccagcctgggcaacatggcgac

SEQ ID NO: 3549318 - DNA, 25 bp, Homo sapien
tgggcaacatggcgacaccccgtct

SEQ ID NO: 3549319 - DNA, 25 bp, Homo sapien
tgcatacagcgtctggatatctttg

SEQ ID NO: 3549320 - DNA, 25 bp, Homo sapien
tcttcctgcatacagcgtctggata

SEQ ID NO: 3549321 - DNA, 25 bp, Homo sapien
caggtgttgaagatcaaacggtgtc

SEQ ID NO: 3549322 - DNA, 25 bp, Homo sapien
caaacggtgtcctctgaaattcagt

SEQ ID NO: 3549323 - DNA, 25 bp, Homo sapien
gcactccagcatgggagcaagactc

SEQ ID NO: 3549324 - DNA, 25 bp, Homo sapien
ctccagcatgggagcaagactccat

SEQ ID NO: 3549325 - DNA, 25 bp, Homo sapien
cactgcactccagcatgggagcaag

SEQ ID NO: 3549326 - DNA, 25 bp, Homo sapien
tgcactccagcatgggagcaagact

SEQ ID NO: 3549327 - DNA, 25 bp, Homo sapien
ctttcgaggacttctttggccaaga

SEQ ID NO: 3549328 - DNA, 25 bp, Homo sapien
aagcccgcgaccaagcaggcagcgg

SEQ ID NO: 3549329 - DNA, 25 bp, Homo sapien
tggacaaagcccgtgcgccgaacgc

SEQ ID NO: 3549330 - DNA, 25 bp, Homo sapien
tcccgcccctctgacagtgagagaa

SEQ ID NO: 3549331 - DNA, 25 bp, Homo sapien
cagggacctttagatcttcagtcta

SEQ ID NO: 3549332 - DNA, 25 bp, Homo sapien
ctgccgaaacccgggattgaaccag

SEQ ID NO: 3549333 - DNA, 25 bp, Homo sapien
attgaaccagggacctttagatctt

SEQ ID NO: 3549334 - DNA, 25 bp, Homo sapien
cgctctcccaactgagctatttcgg

SEQ ID NO: 3549335 - DNA, 25 bp, Homo sapien
aggcaaaaaaactgaaaatatatat

SEQ ID NO: 3549336 - DNA, 25 bp, Homo sapien
gcaaaaaaactgaaaatatatatag

SEQ ID NO: 3549337 - DNA, 25 bp, Homo sapien
ggcaaaaaaactgaaaatatatata

SEQ ID NO: 3549338 - DNA, 25 bp, Homo sapien
cacgtgtccaagaaagagtctcagg

SEQ ID NO: 3549339 - DNA, 25 bp, Homo sapien
ttttggaattcagcctatgcgccgg

SEQ ID NO: 3549340 - DNA, 25 bp, Homo sapien
gggccccacaggagcaattatctga

SEQ ID NO: 3549341 - DNA, 25 bp, Homo sapien
gaaagaagccttgacataatccctg

SEQ ID NO: 3549342 - DNA, 25 bp, Homo sapien
aaaatgtccgggcatgagctccagt

SEQ ID NO: 3549343 - DNA, 25 bp, Homo sapien
taacagggtccttcttccgctcaaa

SEQ ID NO: 3549344 - DNA, 25 bp, Homo sapien
atatgggttaactccttggtaacag

SEQ ID NO: 3549345 - DNA, 25 bp, Homo sapien
cagtattctcccctataaatatggg

SEQ ID NO: 3549346 - DNA, 25 bp, Homo sapien
tctctggtcaggtcgtaaccggctg

SEQ ID NO: 3549347 - DNA, 25 bp, Homo sapien
ttcccaagcattgagagtcagagca

SEQ ID NO: 3549348 - DNA, 25 bp, Homo sapien
tgtggctttcatagcttccgcttct

SEQ ID NO: 3549349 - DNA, 25 bp, Homo sapien
gcgctgcttctccgcatttgcttca

SEQ ID NO: 3549350 - DNA, 25 bp, Homo sapien
tcatggcctctctgtcgagcatcac

SEQ ID NO: 3549351 - DNA, 25 bp, Homo sapien
ctgcttcatggcctctctgtcgagc

SEQ ID NO: 3549352 - DNA, 25 bp, Homo sapien
ccattttctcatcccacgtccccag

SEQ ID NO: 3549353 - DNA, 25 bp, Homo sapien
ctcatcccacgtccccagaagagca

SEQ ID NO: 3549354 - DNA, 25 bp, Homo sapien
tacatcccgagagaagtagctataa

SEQ ID NO: 3549355 - DNA, 25 bp, Homo sapien
gattcacaatatcaatttcgccaga

SEQ ID NO: 3549356 - DNA, 25 bp, Homo sapien
cgagagaagtagctataaggaacaa

SEQ ID NO: 3549357 - DNA, 25 bp, Homo sapien
ttgtgattcacaatatcaatttcgc

SEQ ID NO: 3549358 - DNA, 25 bp, Homo sapien
ctgatctatccacaacttgcccaca

SEQ ID NO: 3549359 - DNA, 25 bp, Homo sapien
aacttgcccacaataatgttgtgta

SEQ ID NO: 3549360 - DNA, 25 bp, Homo sapien
caagtgtagtggtgcccagttgcat

SEQ ID NO: 3549361 - DNA, 25 bp, Homo sapien
gtacagttgtggtaactttcttcca

SEQ ID NO: 3549362 - DNA, 25 bp, Homo sapien
tatagccagttatcagaagtgcagg

SEQ ID NO: 3549363 - DNA, 25 bp, Homo sapien
gtgatgtgccctgatcccatggaga

SEQ ID NO: 3549364 - DNA, 25 bp, Homo sapien
ggctggccctgatttgtaccctgaa

SEQ ID NO: 3549365 - DNA, 25 bp, Homo sapien
taacttagggagtctgcgggaactc

SEQ ID NO: 3549366 - DNA, 25 bp, Homo sapien
tgcaatcgtagttcactgcaaactt

SEQ ID NO: 3549367 - DNA, 25 bp, Homo sapien
ggactataggcatatgccaaaatgc

SEQ ID NO: 3549368 - DNA, 25 bp, Homo sapien
tcgtagttcactgcaaacttgacct

SEQ ID NO: 3549369 - DNA, 25 bp, Homo sapien
ttccactatgttgcctaaactggtc

SEQ ID NO: 3549370 - DNA, 25 bp, Homo sapien
cactcaacgagctagaaatacaagg

SEQ ID NO: 3549371 - DNA, 25 bp, Homo sapien
tgcaatacaccacatgaacagaatg

SEQ ID NO: 3549372 - DNA, 25 bp, Homo sapien
tgaagggcgaaaaaacacatgatca

SEQ ID NO: 3549373 - DNA, 25 bp, Homo sapien
ggatggttgaacacataaaaactgg

SEQ ID NO: 3549374 - DNA, 25 bp, Homo sapien
cagtactctcagtccaaggttggtt

SEQ ID NO: 3549375 - DNA, 25 bp, Homo sapien
aatccatgaatgcagaatacccagg

SEQ ID NO: 3549376 - DNA, 25 bp, Homo sapien
tgactgtacctaaccacccatggaa

SEQ ID NO: 3549377 - DNA, 25 bp, Homo sapien
cccaggtatggatggctgactgtac

SEQ ID NO: 3549378 - DNA, 25 bp, Homo sapien
gaaacctaaccttgcaatcatgagt

SEQ ID NO: 3549379 - DNA, 25 bp, Homo sapien
gaacctgactgccaaagtaaggaag

SEQ ID NO: 3549380 - DNA, 25 bp, Homo sapien
tctgatttacagagagaacctgact

SEQ ID NO: 3549381 - DNA, 25 bp, Homo sapien
aaatgatacctaacccatcaggtgg

SEQ ID NO: 3549382 - DNA, 25 bp, Homo sapien
cctgcccaaagccagttagtgaggg

SEQ ID NO: 3549383 - DNA, 25 bp, Homo sapien
tcattccaggagcattaattctgac

SEQ ID NO: 3549384 - DNA, 25 bp, Homo sapien
gatgggtccttaaagagtttctagc

SEQ ID NO: 3549385 - DNA, 25 bp, Homo sapien
tgagggtcagtgctcgaatcagacc

SEQ ID NO: 3549386 - DNA, 25 bp, Homo sapien
gcataatggagaggtatttgcctcg

SEQ ID NO: 3549387 - DNA, 25 bp, Homo sapien
cctcgaaacttgctggtgattttga

SEQ ID NO: 3549388 - DNA, 25 bp, Homo sapien
tcctgacgcaatgtccagccatttt

SEQ ID NO: 3549389 - DNA, 25 bp, Homo sapien
attttgatttcctgacgcaatgtcc

SEQ ID NO: 3549390 - DNA, 25 bp, Homo sapien
gatactgcctataaattggtgagaa

SEQ ID NO: 3549391 - DNA, 25 bp, Homo sapien
caacgctgacgttctgaagaaaaag

SEQ ID NO: 3549392 - DNA, 25 bp, Homo sapien
gaaatcaggttcaaattaagacggc

SEQ ID NO: 3549393 - DNA, 25 bp, Homo sapien
ccacaacagtaggtgaatcccagaa

SEQ ID NO: 3549394 - DNA, 25 bp, Homo sapien
taatcggtccagctcaaaggtctcc

SEQ ID NO: 3549395 - DNA, 25 bp, Homo sapien
gaatggcttactggtgcggaagaca

SEQ ID NO: 3549396 - DNA, 25 bp, Homo sapien
tgttcacagagggatcggtacccat

SEQ ID NO: 3549397 - DNA, 25 bp, Homo sapien
ggtctaacagctcatggtattccag

SEQ ID NO: 3549398 - DNA, 25 bp, Homo sapien
caatctctgagctacatattaccct

SEQ ID NO: 3549399 - DNA, 25 bp, Homo sapien
caccgcccgctcaatcatgaaatta

SEQ ID NO: 3549400 - DNA, 25 bp, Homo sapien
tctggccttaagcaacgctttactt

SEQ ID NO: 3549401 - DNA, 25 bp, Homo sapien
attcactataaaacaagtcaggttc

SEQ ID NO: 3549402 - DNA, 25 bp, Homo sapien
gtgccataccccagagccctcttcc

SEQ ID NO: 3549403 - DNA, 25 bp, Homo sapien
aaacagtgtgccataccccagagcc

SEQ ID NO: 3549404 - DNA, 25 bp, Homo sapien
caaaacagtgtgccataccccagag

SEQ ID NO: 3549405 - DNA, 25 bp, Homo sapien
gtgtgccataccccagagccctctt

SEQ ID NO: 3549406 - DNA, 25 bp, Homo sapien
cataaattgaggctatagtttggct

SEQ ID NO: 3549407 - DNA, 25 bp, Homo sapien
tagtttggcttgtatggtattctgg

SEQ ID NO: 3549408 - DNA, 25 bp, Homo sapien
gtatggtattctggttctcttttcc

SEQ ID NO: 3549409 - DNA, 25 bp, Homo sapien
cggcatggggatcttagagagttct

SEQ ID NO: 3549410 - DNA, 25 bp, Homo sapien
ctgagatctcccatataagaattac

SEQ ID NO: 3549411 - DNA, 25 bp, Homo sapien
ctctgagatctcccatataagaatt

SEQ ID NO: 3549412 - DNA, 25 bp, Homo sapien
tctgagatctcccatataagaatta

SEQ ID NO: 3549413 - DNA, 25 bp, Homo sapien
catcaaggctgatgtcactgctggc

SEQ ID NO: 3549414 - DNA, 25 bp, Homo sapien
aaggctgatgtcactgctggctcca

SEQ ID NO: 3549415 - DNA, 25 bp, Homo sapien
caaggctgatgtcactgctggctcc

SEQ ID NO: 3549416 - DNA, 25 bp, Homo sapien
tcaaggctgatgtcactgctggctc

SEQ ID NO: 3549417 - DNA, 25 bp, Homo sapien
tggtgatgatctcaggtgcatcaaa

SEQ ID NO: 3549418 - DNA, 25 bp, Homo sapien
ggtgatgatctcaggtgcatcaaaa

SEQ ID NO: 3549419 - DNA, 25 bp, Homo sapien
tgactttggttatctttaccaaatg

SEQ ID NO: 3549420 - DNA, 25 bp, Homo sapien
tggttatctttaccaaatgtctgat

SEQ ID NO: 3549421 - DNA, 25 bp, Homo sapien
tttggttatctttaccaaatgtctg

SEQ ID NO: 3549422 - DNA, 25 bp, Homo sapien
ttgttgactttggttatctttacca

SEQ ID NO: 3549423 - DNA, 25 bp, Homo sapien
ggatacgctggtctctttcatactg

SEQ ID NO: 3549424 - DNA, 25 bp, Homo sapien
gagggtttcttccagtcggatacgc

SEQ ID NO: 3549425 - DNA, 25 bp, Homo sapien
tgccaggagtgtttgccggcagcac

SEQ ID NO: 3549426 - DNA, 25 bp, Homo sapien
tactatgggtctgggctaacatgag

SEQ ID NO: 3549427 - DNA, 25 bp, Homo sapien
ctgagagaacgctgcagagctgtgc

SEQ ID NO: 3549428 - DNA, 25 bp, Homo sapien
tatcctaaagagtgtggctcgttcg

SEQ ID NO: 3549429 - DNA, 25 bp, Homo sapien
tatcaagtcattgcacgtgctcaag

SEQ ID NO: 3549430 - DNA, 25 bp, Homo sapien
ggctcgttcgttgacctgtttgatc

SEQ ID NO: 3549431 - DNA, 25 bp, Homo sapien
gccttggccagttccagggccgtca

SEQ ID NO: 3549432 - DNA, 25 bp, Homo sapien
ttcagatggtaggtctgagcacccc

SEQ ID NO: 3549433 - DNA, 25 bp, Homo sapien
ccacggcaggtatgtctcatttctg

SEQ ID NO: 3549434 - DNA, 25 bp, Homo sapien
tgaagttgcaggagtcctccacggt

SEQ ID NO: 3549435 - DNA, 25 bp, Homo sapien
attcctccttattggagctttttgg

SEQ ID NO: 3549436 - DNA, 25 bp, Homo sapien
cattcctccttattggagctttttg

SEQ ID NO: 3549437 - DNA, 25 bp, Homo sapien
tggaaaccacttcttaggaatctct

SEQ ID NO: 3549438 - DNA, 25 bp, Homo sapien
acattcctccttattggagcttttt

SEQ ID NO: 3549439 - DNA, 25 bp, Homo sapien
ttgtaggaatctcttctgcctgggt

SEQ ID NO: 3549440 - DNA, 25 bp, Homo sapien
gtaggaatctcttctgcctgggtca

SEQ ID NO: 3549441 - DNA, 25 bp, Homo sapien
cattgtaggaatctcttctgcctgg

SEQ ID NO: 3549442 - DNA, 25 bp, Homo sapien
taggaatctcttctgcctgggtcat

SEQ ID NO: 3549443 - DNA, 25 bp, Homo sapien
tccagagctacgaataaccttgagt

SEQ ID NO: 3549444 - DNA, 25 bp, Homo sapien
caaagcacatgcaaagtcttggaga

SEQ ID NO: 3549445 - DNA, 25 bp, Homo sapien
gacagctacaacttgggacttccac

SEQ ID NO: 3549446 - DNA, 25 bp, Homo sapien
gcaaggacgggtacatccagagcta

SEQ ID NO: 3549447 - DNA, 25 bp, Homo sapien
gctggcggtaatgccggagctggga

SEQ ID NO: 3549448 - DNA, 25 bp, Homo sapien
cctgggctgtcaatccgcacagatg

SEQ ID NO: 3549449 - DNA, 25 bp, Homo sapien
tgacagtgggctccgacccctgggc

SEQ ID NO: 3549450 - DNA, 25 bp, Homo sapien
ggcttttcactttcgtgacagtggg

SEQ ID NO: 3549451 - DNA, 25 bp, Homo sapien
ctcaggagcccgttgctcagcacga

SEQ ID NO: 3549452 - DNA, 25 bp, Homo sapien
gagcccgttgctcagcacgaaccat

SEQ ID NO: 3549453 - DNA, 25 bp, Homo sapien
ctgtagtagctcaggagcccgttgc

SEQ ID NO: 3549454 - DNA, 25 bp, Homo sapien
acgaaccatcgccgctggtagcctt

SEQ ID NO: 3549455 - DNA, 25 bp, Homo sapien
gggccgggccagccgccgccactcc

SEQ ID NO: 3549456 - DNA, 25 bp, Homo sapien
ctcgagccgagcccgaacccccagc

SEQ ID NO: 3549457 - DNA, 25 bp, Homo sapien
gagcccgaacccccagcgcccgagc

SEQ ID NO: 3549458 - DNA, 25 bp, Homo sapien
gagccgagcccgaacccccagcgcc

SEQ ID NO: 3549459 - DNA, 25 bp, Homo sapien
gccgccgccaagtgctgcaatggct

SEQ ID NO: 3549460 - DNA, 25 bp, Homo sapien
ccgccgccgccaagtgctgcaatgg

SEQ ID NO: 3549461 - DNA, 25 bp, Homo sapien
tggccccaccactcctctcagctcc

SEQ ID NO: 3549462 - DNA, 25 bp, Homo sapien
cgccgccaagtgctgcaatggctgc

SEQ ID NO: 3549463 - DNA, 25 bp, Homo sapien
tggagatacaagaccggaaccgcct

SEQ ID NO: 3549464 - DNA, 25 bp, Homo sapien
acaagaccggaaccgcctacgagag

SEQ ID NO: 3549465 - DNA, 25 bp, Homo sapien
gcctggagatacaagaccggaaccg

SEQ ID NO: 3549466 - DNA, 25 bp, Homo sapien
gccgccgcctggagatacaagaccg

SEQ ID NO: 3549467 - DNA, 25 bp, Homo sapien
gagtgtcacttgaggaagaccccgc

SEQ ID NO: 3549468 - DNA, 25 bp, Homo sapien
gcggatattggcatttctctcgggc

SEQ ID NO: 3549469 - DNA, 25 bp, Homo sapien
ccgccgggaagaaggacgtcgattg

SEQ ID NO: 3549470 - DNA, 25 bp, Homo sapien
gattggtgccgctgagtgtcacttg

SEQ ID NO: 3549471 - DNA, 25 bp, Homo sapien
agcctggggtgggacgcgtccgcca

SEQ ID NO: 3549472 - DNA, 25 bp, Homo sapien
tggggtgggacgcgtccgccagacc

SEQ ID NO: 3549473 - DNA, 25 bp, Homo sapien
ggtgggacgcgtccgccagacccac

SEQ ID NO: 3549474 - DNA, 25 bp, Homo sapien
cctggggtgggacgcgtccgccaga

SEQ ID NO: 3549475 - DNA, 25 bp, Homo sapien
aagtttccagcgctcagggaggacg

SEQ ID NO: 3549476 - DNA, 25 bp, Homo sapien
tggttcagataaaggccaatcagac

SEQ ID NO: 3549477 - DNA, 25 bp, Homo sapien
gaatgcccggccaatctgatcgccg

SEQ ID NO: 3549478 - DNA, 25 bp, Homo sapien
ggaggacgggagaatgcggaatgcc

SEQ ID NO: 3549479 - DNA, 25 bp, Homo sapien
acgtcaccccctcccatcgctcttc

SEQ ID NO: 3549480 - DNA, 25 bp, Homo sapien
atgcgcctgtcactgccacgtcacc

SEQ ID NO: 3549481 - DNA, 25 bp, Homo sapien
ctgtttccgccattcatttcagttt

SEQ ID NO: 3549482 - DNA, 25 bp, Homo sapien
catttcagtttatgcgcctgtcact

SEQ ID NO: 3549483 - DNA, 25 bp, Homo sapien
gaaagcggcattgctgaccagtgag

SEQ ID NO: 3549484 - DNA, 25 bp, Homo sapien
agcggcattgctgaccagtgagaga

SEQ ID NO: 3549485 - DNA, 25 bp, Homo sapien
tgattggttctgagaattggctgtg

SEQ ID NO: 3549486 - DNA, 25 bp, Homo sapien
atgattggttctgagaattggctgt

SEQ ID NO: 3549487 - DNA, 25 bp, Homo sapien
tcgagttgccctacgtgtgccactc

SEQ ID NO: 3549488 - DNA, 25 bp, Homo sapien
gttgccctacgtgtgccactcacga

SEQ ID NO: 3549489 - DNA, 25 bp, Homo sapien
ccaggaataggagccttcttgcagc

SEQ ID NO: 3549490 - DNA, 25 bp, Homo sapien
aagcttgggtccaggaataggagcc

SEQ ID NO: 3549491 - DNA, 25 bp, Homo sapien
ttgggtccaggaataggagccttct

SEQ ID NO: 3549492 - DNA, 25 bp, Homo sapien
ctgaagcttgggtccaggaatagga

SEQ ID NO: 3549493 - DNA, 25 bp, Homo sapien
ctttgttactgttagatgaacaaca

SEQ ID NO: 3549494 - DNA, 25 bp, Homo sapien
ttgttactgttagatgaacaacagt

SEQ ID NO: 3549495 - DNA, 25 bp, Homo sapien
tttgttactgttagatgaacaacag

SEQ ID NO: 3549496 - DNA, 25 bp, Homo sapien
gttactgttagatgaacaacagtaa

SEQ ID NO: 3549497 - DNA, 25 bp, Homo sapien
gctgtaatcactagggatcaaaact

SEQ ID NO: 3549498 - DNA, 25 bp, Homo sapien
cagcagaaagatcacgaaggccatg

SEQ ID NO: 3549499 - DNA, 25 bp, Homo sapien
cagtagacaacggtagagggaagct

SEQ ID NO: 3549500 - DNA, 25 bp, Homo sapien
gacagctggttttaacagaggatct

SEQ ID NO: 3549501 - DNA, 25 bp, Homo sapien
catcctgggtgacttcgaatgcact

SEQ ID NO: 3549502 - DNA, 25 bp, Homo sapien
gaaaaaggacttctcagcctagacc

SEQ ID NO: 3549503 - DNA, 25 bp, Homo sapien
caaagcaggctactagtgaggatca

SEQ ID NO: 3549504 - DNA, 25 bp, Homo sapien
caggctggccctgcaattattcaaa

SEQ ID NO: 3549505 - DNA, 25 bp, Homo sapien
aaaatacatcagctggtttgtgttt

SEQ ID NO: 3549506 - DNA, 25 bp, Homo sapien
aaacgtgctgcatactctttattta

SEQ ID NO: 3549507 - DNA, 25 bp, Homo sapien
ttgtgtttagaagaggtaatgagac

SEQ ID NO: 3549508 - DNA, 25 bp, Homo sapien
aggaccctctgaagaccacataaat

SEQ ID NO: 3549509 - DNA, 25 bp, Homo sapien
gaatcctttggcaggctacaatcta

SEQ ID NO: 3549510 - DNA, 25 bp, Homo sapien
ataggatgagggaaggaatcctttg

SEQ ID NO: 3549511 - DNA, 25 bp, Homo sapien
aaaaacaacttcaataggatgaggg

SEQ ID NO: 3549512 - DNA, 25 bp, Homo sapien
cttaattggctcttctatagtcata

SEQ ID NO: 3549513 - DNA, 25 bp, Homo sapien
ggaatcgatcccacaagactttgct

SEQ ID NO: 3549514 - DNA, 25 bp, Homo sapien
tgacatttagagagacaacccctgt

SEQ ID NO: 3549515 - DNA, 25 bp, Homo sapien
gaggtacaggacacatttggagatc

SEQ ID NO: 3549516 - DNA, 25 bp, Homo sapien
taaagaaaccagcagaagtatcacc

SEQ ID NO: 3549517 - DNA, 25 bp, Homo sapien
gcagaagttctcgtgttgccatgaa

SEQ ID NO: 3549518 - DNA, 25 bp, Homo sapien
tgtaggtatagagattggcttggcc

SEQ ID NO: 3549519 - DNA, 25 bp, Homo sapien
agtttctgccggtcaacatagcgag

SEQ ID NO: 3549520 - DNA, 25 bp, Homo sapien
gagggacactaggtttgtaggtata

SEQ ID NO: 3549521 - DNA, 25 bp, Homo sapien
aagagaagaaacagtccacactgac

SEQ ID NO: 3549522 - DNA, 25 bp, Homo sapien
ataagagaagaaacagtccacactg

SEQ ID NO: 3549523 - DNA, 25 bp, Homo sapien
aaaataagagaagaaacagtccaca

SEQ ID NO: 3549524 - DNA, 25 bp, Homo sapien
tcaaagaacttaaaataagagaaga

SEQ ID NO: 3549525 - DNA, 25 bp, Homo sapien
tgttgattctgtagcagggtctgaa

SEQ ID NO: 3549526 - DNA, 25 bp, Homo sapien
tgattctgtagcagggtctgaactc

SEQ ID NO: 3549527 - DNA, 25 bp, Homo sapien
gattctgtagcagggtctgaactct

SEQ ID NO: 3549528 - DNA, 25 bp, Homo sapien
ttgattctgtagcagggtctgaact

SEQ ID NO: 3549529 - DNA, 25 bp, Homo sapien
ggtcttcaccacggctcaggaggat

SEQ ID NO: 3549530 - DNA, 25 bp, Homo sapien
ttcaccacggctcaggaggatgagg

SEQ ID NO: 3549531 - DNA, 25 bp, Homo sapien
aggatgaggagcagtgacaggccaa

SEQ ID NO: 3549532 - DNA, 25 bp, Homo sapien
ggatgaggagcagtgacaggccaaa

SEQ ID NO: 3549533 - DNA, 25 bp, Homo sapien
agtgaggtgaggattggagagtgct

SEQ ID NO: 3549534 - DNA, 25 bp, Homo sapien
aggtgaggattggagagtgctggtg

SEQ ID NO: 3549535 - DNA, 25 bp, Homo sapien
tgaggtgaggattggagagtgctgg

SEQ ID NO: 3549536 - DNA, 25 bp, Homo sapien
cagtgaggtgaggattggagagtgc

SEQ ID NO: 3549537 - DNA, 25 bp, Homo sapien
gagaagggactcagtaagcatggca

SEQ ID NO: 3549538 - DNA, 25 bp, Homo sapien
agaagggactcagtaagcatggcag

SEQ ID NO: 3549539 - DNA, 25 bp, Homo sapien
gaagggactcagtaagcatggcagc

SEQ ID NO: 3549540 - DNA, 25 bp, Homo sapien
cacttttttcaatgagacctaaact

SEQ ID NO: 3549541 - DNA, 25 bp, Homo sapien
tgcagatgctaacatttcaaggatc

SEQ ID NO: 3549542 - DNA, 25 bp, Homo sapien
ataatttccctttcatagcatacca

SEQ ID NO: 3549543 - DNA, 25 bp, Homo sapien
gggactcattacttagatcgttatt

SEQ ID NO: 3549544 - DNA, 25 bp, Homo sapien
tacaactatgtcaagtaagagggaa

SEQ ID NO: 3549545 - DNA, 25 bp, Homo sapien
gaggaaaataagtttgcattctaga

SEQ ID NO: 3549546 - DNA, 25 bp, Homo sapien
gtaattctgatacagaccacatctt

SEQ ID NO: 3549547 - DNA, 25 bp, Homo sapien
ggtggagttgaattatctacgcaag

SEQ ID NO: 3549548 - DNA, 25 bp, Homo sapien
gcatccttcttgataaggaaaggga

SEQ ID NO: 3549549 - DNA, 25 bp, Homo sapien
ttctcttcccttttcggatacacat

SEQ ID NO: 3549550 - DNA, 25 bp, Homo sapien
tctgtacaaagtggtcatcactagg

SEQ ID NO: 3549551 - DNA, 25 bp, Homo sapien
gaatacgggcaaccattctcttccc

SEQ ID NO: 3549552 - DNA, 25 bp, Homo sapien
gcctaactccagacacggtgtgttg

SEQ ID NO: 3549553 - DNA, 25 bp, Homo sapien
gattccccattggaagactgaaggg

SEQ ID NO: 3549554 - DNA, 25 bp, Homo sapien
tacagagatggtagggaagtgtacc

SEQ ID NO: 3549555 - DNA, 25 bp, Homo sapien
taaatcaggtgcaatctgtaagcac

SEQ ID NO: 3549556 - DNA, 25 bp, Homo sapien
tcttcttccagacttaggagataac

SEQ ID NO: 3549557 - DNA, 25 bp, Homo sapien
tccattagggcaggtcgctcttctt

SEQ ID NO: 3549558 - DNA, 25 bp, Homo sapien
aaattttgtgctttctgtcatccat

SEQ ID NO: 3549559 - DNA, 25 bp, Homo sapien
ccagacttaggagataacgtctttc

SEQ ID NO: 3549560 - DNA, 25 bp, Homo sapien
tctcctcttgtctcgaacttgtttt

SEQ ID NO: 3549561 - DNA, 25 bp, Homo sapien
ttctcctcttgtctcgaacttgttt

SEQ ID NO: 3549562 - DNA, 25 bp, Homo sapien
ctcctcttgtctcgaacttgttttt

SEQ ID NO: 3549563 - DNA, 25 bp, Homo sapien
gaagtggtcacaaatcagacgttct

SEQ ID NO: 3549564 - DNA, 25 bp, Homo sapien
tacacgtgcaggttatagggtacat

SEQ ID NO: 3549565 - DNA, 25 bp, Homo sapien
aactagaatgcatgacgaggtggga

SEQ ID NO: 3549566 - DNA, 25 bp, Homo sapien
gagctacccaatccaaagactcctg

SEQ ID NO: 3549567 - DNA, 25 bp, Homo sapien
atcatcctcactccgagatgtcaca

SEQ ID NO: 3549568 - DNA, 25 bp, Homo sapien
gggattattcacactagaaacggta

SEQ ID NO: 3549569 - DNA, 25 bp, Homo sapien
tcacactagaaacggtaagctttcc

SEQ ID NO: 3549570 - DNA, 25 bp, Homo sapien
tcactccgagatgtcacaacagcat

SEQ ID NO: 3549571 - DNA, 25 bp, Homo sapien
ggtgcgctccttcttagggccatca

SEQ ID NO: 3549572 - DNA, 25 bp, Homo sapien
gggtgataagcttggtgcgctcctt

SEQ ID NO: 3549573 - DNA, 25 bp, Homo sapien
cttataggcgtgctccagtttggcc

SEQ ID NO: 3549574 - DNA, 25 bp, Homo sapien
cagcagctgacagtttctccagttt

SEQ ID NO: 3549575 - DNA, 25 bp, Homo sapien
aatcatccaggtagggatcagtgct

SEQ ID NO: 3549576 - DNA, 25 bp, Homo sapien
atcatccaggtagggatcagtgctt

SEQ ID NO: 3549577 - DNA, 25 bp, Homo sapien
tatctcccgcaccattgagattccg

SEQ ID NO: 3549578 - DNA, 25 bp, Homo sapien
ctcccgcaccattgagattccgatg

SEQ ID NO: 3549579 - DNA, 25 bp, Homo sapien
agttgtgtccggtctaaacattggg

SEQ ID NO: 3549580 - DNA, 25 bp, Homo sapien
gaggtgagttgtgtccggtctaaac

SEQ ID NO: 3549581 - DNA, 25 bp, Homo sapien
ggtgagttgtgtccggtctaaacat

SEQ ID NO: 3549582 - DNA, 25 bp, Homo sapien
tgagttgtgtccggtctaaacattg

SEQ ID NO: 3549583 - DNA, 25 bp, Homo sapien
caactcgcccttgtagcaacttggg

SEQ ID NO: 3549584 - DNA, 25 bp, Homo sapien
tccagggacccgtgcaaactggctg

SEQ ID NO: 3549585 - DNA, 25 bp, Homo sapien
tgggagacatccgtccaggctgtag

SEQ ID NO: 3549586 - DNA, 25 bp, Homo sapien
tgggattcatggcagcaagtggact

SEQ ID NO: 3549587 - DNA, 25 bp, Homo sapien
gtgctcctccaagaagctgtgctct

SEQ ID NO: 3549588 - DNA, 25 bp, Homo sapien
ctgtgctcctccaagaagctgtgct

SEQ ID NO: 3549589 - DNA, 25 bp, Homo sapien
tgtgctcctccaagaagctgtgctc

SEQ ID NO: 3549590 - DNA, 25 bp, Homo sapien
gcacatttttgttaggcttaaagtg

SEQ ID NO: 3549591 - DNA, 25 bp, Homo sapien
ttttgttaggcttaaagtgacatac

SEQ ID NO: 3549592 - DNA, 25 bp, Homo sapien
tgcacatttttgttaggcttaaagt

SEQ ID NO: 3549593 - DNA, 25 bp, Homo sapien
catttttgttaggcttaaagtgaca

SEQ ID NO: 3549594 - DNA, 25 bp, Homo sapien
ggagcaggataacgaggtggcattg

SEQ ID NO: 3549595 - DNA, 25 bp, Homo sapien
accatagggagcaggataacgaggt

SEQ ID NO: 3549596 - DNA, 25 bp, Homo sapien
tcaccatagggagcaggataacgag

SEQ ID NO: 3549597 - DNA, 25 bp, Homo sapien
tagggagcaggataacgaggtggca

SEQ ID NO: 3549598 - DNA, 25 bp, Homo sapien
acatatatacaactacactcaatga

SEQ ID NO: 3549599 - DNA, 25 bp, Homo sapien
tatatacaactacactcaatgaaat

SEQ ID NO: 3549600 - DNA, 25 bp, Homo sapien
ttccacctacactccctcccctcaa

SEQ ID NO: 3549601 - DNA, 25 bp, Homo sapien
tacaactacactcaatgaaatcagt

SEQ ID NO: 3549602 - DNA, 25 bp, Homo sapien
ccttccatgctgtctgagggagata

SEQ ID NO: 3549603 - DNA, 25 bp, Homo sapien
gagggagataccagcagatattctg

SEQ ID NO: 3549604 - DNA, 25 bp, Homo sapien
ctgtctgagggagataccagcagat

SEQ ID NO: 3549605 - DNA, 25 bp, Homo sapien
tccatgctgtctgagggagatacca

SEQ ID NO: 3549606 - DNA, 25 bp, Homo sapien
tctctccaagaggatatattttggt

SEQ ID NO: 3549607 - DNA, 25 bp, Homo sapien
tctccaagaggatatattttggtag

SEQ ID NO: 3549608 - DNA, 25 bp, Homo sapien
ctctccaagaggatatattttggta

SEQ ID NO: 3549609 - DNA, 25 bp, Homo sapien
ctccaagaggatatattttggtagc

SEQ ID NO: 3549610 - DNA, 25 bp, Homo sapien
ccaaattggccttccttttcagctg

SEQ ID NO: 3549611 - DNA, 25 bp, Homo sapien
agctgctggtttcaggtggaggaaa

SEQ ID NO: 3549612 - DNA, 25 bp, Homo sapien
ctgctggtttcaggtggaggaaagt

SEQ ID NO: 3549613 - DNA, 25 bp, Homo sapien
cttccaaattggccttccttttcag

SEQ ID NO: 3549614 - DNA, 25 bp, Homo sapien
ttccaaataattttgcccagattcc

SEQ ID NO: 3549615 - DNA, 25 bp, Homo sapien
tccaaataattttgcccagattccc

SEQ ID NO: 3549616 - DNA, 25 bp, Homo sapien
gcaaagcatattctaatacagacac

SEQ ID NO: 3549617 - DNA, 25 bp, Homo sapien
accgccttggtaatgctcgttcaga

SEQ ID NO: 3549618 - DNA, 25 bp, Homo sapien
gaggcaaagcatattctaatacaga

SEQ ID NO: 3549619 - DNA, 25 bp, Homo sapien
ggtgaagctgggtacagccatctgt

SEQ ID NO: 3549620 - DNA, 25 bp, Homo sapien
catcccagatactggaattcagact

SEQ ID NO: 3549621 - DNA, 25 bp, Homo sapien
gagcaagcagtggtcctcggattcg

SEQ ID NO: 3549622 - DNA, 25 bp, Homo sapien
cggattcgcctcagaacttcagatc

SEQ ID NO: 3549623 - DNA, 25 bp, Homo sapien
cagatccatcccagatactggaatt

SEQ ID NO: 3549624 - DNA, 25 bp, Homo sapien
cattttcaatcaccatcttactgag

SEQ ID NO: 3549625 - DNA, 25 bp, Homo sapien
ttcattttcaatcaccatcttactg

SEQ ID NO: 3549626 - DNA, 25 bp, Homo sapien
ttttcaatcaccatcttactgagcc

SEQ ID NO: 3549627 - DNA, 25 bp, Homo sapien
gttcattttcaatcaccatcttact

SEQ ID NO: 3549628 - DNA, 25 bp, Homo sapien
tcatccagaggacaatcctccaaag

SEQ ID NO: 3549629 - DNA, 25 bp, Homo sapien
atcttcatccagaggacaatcctcc

SEQ ID NO: 3549630 - DNA, 25 bp, Homo sapien
tcattgaattgatcaatctcttcat

SEQ ID NO: 3549631 - DNA, 25 bp, Homo sapien
tgcacctgacccaaatgtatcatca

SEQ ID NO: 3549632 - DNA, 25 bp, Homo sapien
tgtgtgtcagtgtaattcgagtgga

SEQ ID NO: 3549633 - DNA, 25 bp, Homo sapien
tccagggcgggaaacgcggctctgg

SEQ ID NO: 3549634 - DNA, 25 bp, Homo sapien
ctgaaggtagcctgtgtgaatggga

SEQ ID NO: 3549635 - DNA, 25 bp, Homo sapien
cggctctgggaattcccgggtgaca

SEQ ID NO: 3549636 - DNA, 25 bp, Homo sapien
gggaagaagcgctgactccccggct

SEQ ID NO: 3549637 - DNA, 25 bp, Homo sapien
aagaagcgctgactccccggctcct

SEQ ID NO: 3549638 - DNA, 25 bp, Homo sapien
ggaagaagcgctgactccccggctc

SEQ ID NO: 3549639 - DNA, 25 bp, Homo sapien
agggaagaagcgctgactccccggc

SEQ ID NO: 3549640 - DNA, 25 bp, Homo sapien
cggagcgtgcgtggggacgtgcgca

SEQ ID NO: 3549641 - DNA, 25 bp, Homo sapien
cgccgtacgccggagcgtgcgtggg

SEQ ID NO: 3549642 - DNA, 25 bp, Homo sapien
cggctcgcgacccctggccgccgcc

SEQ ID NO: 3549643 - DNA, 25 bp, Homo sapien
gccgccgtacgccggagcgtgcgtg

SEQ ID NO: 3549644 - DNA, 25 bp, Homo sapien
ttctccgtcacccgtggggcggaga

SEQ ID NO: 3549645 - DNA, 25 bp, Homo sapien
tctccgtcacccgtggggcggagaa

SEQ ID NO: 3549646 - DNA, 25 bp, Homo sapien
ctgcgccttgcgcagggaaaaaaga

SEQ ID NO: 3549647 - DNA, 25 bp, Homo sapien
aagaatggaaagttgctggtcttcg

SEQ ID NO: 3549648 - DNA, 25 bp, Homo sapien
gggggtctccccgttgcaatctgcg

SEQ ID NO: 3549649 - DNA, 25 bp, Homo sapien
ggacttcgtcgccactttcagcggc

SEQ ID NO: 3549650 - DNA, 25 bp, Homo sapien
tgctgaaaccctgtattgaagaaaa

SEQ ID NO: 3549651 - DNA, 25 bp, Homo sapien
ttgacaattagttgactgaggctgg

SEQ ID NO: 3549652 - DNA, 25 bp, Homo sapien
ttgtataatcttgttgacaattagt

SEQ ID NO: 3549653 - DNA, 25 bp, Homo sapien
gctgaaaccctgtattgaagaaaaa

SEQ ID NO: 3549654 - DNA, 25 bp, Homo sapien
gtccattttgactaagcttgcagct

SEQ ID NO: 3549655 - DNA, 25 bp, Homo sapien
tctatctgggaaggtcgtccatttt

SEQ ID NO: 3549656 - DNA, 25 bp, Homo sapien
ggaaggtcgtccattttgactaagc

SEQ ID NO: 3549657 - DNA, 25 bp, Homo sapien
tctgggaaggtcgtccattttgact

SEQ ID NO: 3549658 - DNA, 25 bp, Homo sapien
tgcaggaggaccactaagatgtgag

SEQ ID NO: 3549659 - DNA, 25 bp, Homo sapien
caagtatataaagctggtgcagcca

SEQ ID NO: 3549660 - DNA, 25 bp, Homo sapien
atgtgtaggccacagataccacccg

SEQ ID NO: 3549661 - DNA, 25 bp, Homo sapien
gagtaggcttgctggcgcccttctg

SEQ ID NO: 3549662 - DNA, 25 bp, Homo sapien
cataagccatgactaccagcaggac

SEQ ID NO: 3549663 - DNA, 25 bp, Homo sapien
tttgcccattgaaaggaggtttgcc

SEQ ID NO: 3549664 - DNA, 25 bp, Homo sapien
gcaattgtagcatttccaccgaggc

SEQ ID NO: 3549665 - DNA, 25 bp, Homo sapien
tacagagcagtcttgtgaacgcgtg

SEQ ID NO: 3549666 - DNA, 25 bp, Homo sapien
tttgcagttttatttattccttcca

SEQ ID NO: 3549667 - DNA, 25 bp, Homo sapien
ttgcagttttatttattccttccat

SEQ ID NO: 3549668 - DNA, 25 bp, Homo sapien
tagagtattggacctaagaggaaag

SEQ ID NO: 3549669 - DNA, 25 bp, Homo sapien
gagtagagtattggacctaagagga

SEQ ID NO: 3549670 - DNA, 25 bp, Homo sapien
agatgacatgggcctcaaggcatct

SEQ ID NO: 3549671 - DNA, 25 bp, Homo sapien
aaagatgacatgggcctcaaggcat

SEQ ID NO: 3549672 - DNA, 25 bp, Homo sapien
tcctcagaggatccctgggctggca

SEQ ID NO: 3549673 - DNA, 25 bp, Homo sapien
ctgtcctcagaggatccctgggctg

SEQ ID NO: 3549674 - DNA, 25 bp, Homo sapien
cctcagaggatccctgggctggcat

SEQ ID NO: 3549675 - DNA, 25 bp, Homo sapien
tgtcctcagaggatccctgggctgg

SEQ ID NO: 3549676 - DNA, 25 bp, Homo sapien
tgacacagaagagtaactttgctta

SEQ ID NO: 3549677 - DNA, 25 bp, Homo sapien
gacacagaagagtaactttgcttat

SEQ ID NO: 3549678 - DNA, 25 bp, Homo sapien
acacagaagagtaactttgcttatg

SEQ ID NO: 3549679 - DNA, 25 bp, Homo sapien
cacagaagagtaactttgcttatga

SEQ ID NO: 3549680 - DNA, 25 bp, Homo sapien
gccttgatgttgcaccaagaagcct

SEQ ID NO: 3549681 - DNA, 25 bp, Homo sapien
tccacttcttttcaacagacctggt

SEQ ID NO: 3549682 - DNA, 25 bp, Homo sapien
ggcttcctttataattgtggccttg

SEQ ID NO: 3549683 - DNA, 25 bp, Homo sapien
gggagtggtacacttccacttccac

SEQ ID NO: 3549684 - DNA, 25 bp, Homo sapien
ctaatgtggagaagatttgataaat

SEQ ID NO: 3549685 - DNA, 25 bp, Homo sapien
gatcaaccatagtgctgagcacaag

SEQ ID NO: 3549686 - DNA, 25 bp, Homo sapien
agcagcttaaagatacatctaatcc

SEQ ID NO: 3549687 - DNA, 25 bp, Homo sapien
atccatcaggatagtaaaaaataca

SEQ ID NO: 3549688 - DNA, 25 bp, Homo sapien
tctacccaagagctggaacacctat

SEQ ID NO: 3549689 - DNA, 25 bp, Homo sapien
aagtccaatgcgtcattctcatgcc

SEQ ID NO: 3549690 - DNA, 25 bp, Homo sapien
taagcgcctacacctacccaatgtg

SEQ ID NO: 3549691 - DNA, 25 bp, Homo sapien
ttttggcgcacccaccatctaagcg

SEQ ID NO: 3549692 - DNA, 25 bp, Homo sapien
ggccatctgttgtcctctctgttac

SEQ ID NO: 3549693 - DNA, 25 bp, Homo sapien
tctgttgtcctctctgttacggcct

SEQ ID NO: 3549694 - DNA, 25 bp, Homo sapien
tgcatcctgctggccgtcatggcct

SEQ ID NO: 3549695 - DNA, 25 bp, Homo sapien
atggggagaaacctcatttccctgc

SEQ ID NO: 3549696 - DNA, 25 bp, Homo sapien
gccactatgtctatggtcagcacca

SEQ ID NO: 3549697 - DNA, 25 bp, Homo sapien
actatgtctatggtcagcaccacct

SEQ ID NO: 3549698 - DNA, 25 bp, Homo sapien
tcatcactctttcctatgtctccat

SEQ ID NO: 3549699 - DNA, 25 bp, Homo sapien
tttcctatgtctccatcatggccgc

SEQ ID NO: 3549700 - DNA, 25 bp, Homo sapien
tttgtaggcgtgcactatcacgccc

SEQ ID NO: 3549701 - DNA, 25 bp, Homo sapien
gaattaaatcttcggctcgccagtc

SEQ ID NO: 3549702 - DNA, 25 bp, Homo sapien
tcacagcgaactacgaagtgggtac

SEQ ID NO: 3549703 - DNA, 25 bp, Homo sapien
gagcacgcgttcagatggcagaaga

SEQ ID NO: 3549704 - DNA, 25 bp, Homo sapien
tttatgggagccgatgaggtcagca

SEQ ID NO: 3549705 - DNA, 25 bp, Homo sapien
cactggcactaacaacatcgagctg

SEQ ID NO: 3549706 - DNA, 25 bp, Homo sapien
tctgatttacagacacgggaacggg

SEQ ID NO: 3549707 - DNA, 25 bp, Homo sapien
gagcggtcccgatttccaacaagca

SEQ ID NO: 3549708 - DNA, 25 bp, Homo sapien
tcctggcgggatatttttagaacac

SEQ ID NO: 3549709 - DNA, 25 bp, Homo sapien
cgccgcttccggcagctcacctggg

SEQ ID NO: 3549710 - DNA, 25 bp, Homo sapien
cgcttccggcagctcacctgggaag

SEQ ID NO: 3549711 - DNA, 25 bp, Homo sapien
ccgcttccggcagctcacctgggaa

SEQ ID NO: 3549712 - DNA, 25 bp, Homo sapien
cttccggcagctcacctgggaagcg

SEQ ID NO: 3549713 - DNA, 25 bp, Homo sapien
ctgggacgcgctacctgcctccggg

SEQ ID NO: 3549714 - DNA, 25 bp, Homo sapien
cagctgaaggccgtgagtttcgccg

SEQ ID NO: 3549715 - DNA, 25 bp, Homo sapien
gcttcaggatgaaggaccgtctgga

SEQ ID NO: 3549716 - DNA, 25 bp, Homo sapien
tgaaggaccgtctggagcagctgaa

SEQ ID NO: 3549717 - DNA, 25 bp, Homo sapien
gagaggggcttccctttgctcccca

SEQ ID NO: 3549718 - DNA, 25 bp, Homo sapien
cttccctttgctccccaagtcgagg

SEQ ID NO: 3549719 - DNA, 25 bp, Homo sapien
ggcttccctttgctccccaagtcga

SEQ ID NO: 3549720 - DNA, 25 bp, Homo sapien
ctgcatgggagaggggcttcccttt

SEQ ID NO: 3549721 - DNA, 25 bp, Homo sapien
ctacccagcctatcccaggacatgg

SEQ ID NO: 3549722 - DNA, 25 bp, Homo sapien
tggtgggctccctcgacagcctgct

SEQ ID NO: 3549723 - DNA, 25 bp, Homo sapien
ccagacagttccatgcttttgcatg

SEQ ID NO: 3549724 - DNA, 25 bp, Homo sapien
agtgcctctacccagcctatcccag

SEQ ID NO: 3549725 - DNA, 25 bp, Homo sapien
ttcattctctggaagagctgttttt

SEQ ID NO: 3549726 - DNA, 25 bp, Homo sapien
ctgggaggattcattctctggaaga

SEQ ID NO: 3549727 - DNA, 25 bp, Homo sapien
tgggaggattcattctctggaagag

SEQ ID NO: 3549728 - DNA, 25 bp, Homo sapien
ggattcattctctggaagagctgtt

SEQ ID NO: 3549729 - DNA, 25 bp, Homo sapien
tacatatctccaaagtctcagttcc

SEQ ID NO: 3549730 - DNA, 25 bp, Homo sapien
ggcaaaatcctacatatctccaaag

SEQ ID NO: 3549731 - DNA, 25 bp, Homo sapien
tctcctggcaaaatcctacatatct

SEQ ID NO: 3549732 - DNA, 25 bp, Homo sapien
aatcctacatatctccaaagtctca

SEQ ID NO: 3549733 - DNA, 25 bp, Homo sapien
tctcctctctcagggtagcctgctt

SEQ ID NO: 3549734 - DNA, 25 bp, Homo sapien
ctccagccacctttatgttaggccc

SEQ ID NO: 3549735 - DNA, 25 bp, Homo sapien
tccagccacctttatgttaggcccc

SEQ ID NO: 3549736 - DNA, 25 bp, Homo sapien
tctctcagggtagcctgctttttgg

SEQ ID NO: 3549737 - DNA, 25 bp, Homo sapien
atctggaaactgagtgaagttcaac

SEQ ID NO: 3549738 - DNA, 25 bp, Homo sapien
ggcaactttccccagtctccatctg

SEQ ID NO: 3549739 - DNA, 25 bp, Homo sapien
tggaaactgagtgaagttcaacccc

SEQ ID NO: 3549740 - DNA, 25 bp, Homo sapien
tttccccagtctccatctggaaact

SEQ ID NO: 3549741 - DNA, 25 bp, Homo sapien
tcagtgttgcctaagtcattggtga

SEQ ID NO: 3549742 - DNA, 25 bp, Homo sapien
gagaggaggtcataaccctggctgt

SEQ ID NO: 3549743 - DNA, 25 bp, Homo sapien
ggagatagatcccaggttggagttc

SEQ ID NO: 3549744 - DNA, 25 bp, Homo sapien
gagttcagtgttgcctaagtcattg

SEQ ID NO: 3549745 - DNA, 25 bp, Homo sapien
ggctaagctcagtcatgtgggctga

SEQ ID NO: 3549746 - DNA, 25 bp, Homo sapien
tgttgattctttgataaagatgctg

SEQ ID NO: 3549747 - DNA, 25 bp, Homo sapien
aagataagggcattgtgtgctttcc

SEQ ID NO: 3549748 - DNA, 25 bp, Homo sapien
tgtgggctgaagataagggcattgt

SEQ ID NO: 3549749 - DNA, 25 bp, Homo sapien
cctgagattggttgagcttgctctg

SEQ ID NO: 3549750 - DNA, 25 bp, Homo sapien
ttggttgagcttgctctgtagggaa

SEQ ID NO: 3549751 - DNA, 25 bp, Homo sapien
gagcttgctctgtagggaagcctgc

SEQ ID NO: 3549752 - DNA, 25 bp, Homo sapien
tagggaagcctgctgctagctccag

SEQ ID NO: 3549753 - DNA, 25 bp, Homo sapien
catttatttattaaccaaagggatg

SEQ ID NO: 3549754 - DNA, 25 bp, Homo sapien
gatttgctcattgaactgagcttgg

SEQ ID NO: 3549755 - DNA, 25 bp, Homo sapien
tttgctcattgaactgagcttggtc

SEQ ID NO: 3549756 - DNA, 25 bp, Homo sapien
tgctcattgaactgagcttggtcat

SEQ ID NO: 3549757 - DNA, 25 bp, Homo sapien
gctcattgaactgagcttggtcatt

SEQ ID NO: 3549758 - DNA, 25 bp, Homo sapien
atggtgaggtttttaccatcacaag

SEQ ID NO: 3549759 - DNA, 25 bp, Homo sapien
gtgacattgttcatgacacactcca

SEQ ID NO: 3549760 - DNA, 25 bp, Homo sapien
aatgcaccatctgtaaagttgcaga

SEQ ID NO: 3549761 - DNA, 25 bp, Homo sapien
acaatctggcttggccattgcgccc

SEQ ID NO: 3549762 - DNA, 25 bp, Homo sapien
tcctagctccttcatgtattcatca

SEQ ID NO: 3549763 - DNA, 25 bp, Homo sapien
tttgctgtccaccaggcgccatctt

SEQ ID NO: 3549764 - DNA, 25 bp, Homo sapien
caggcgccatcttccttccagctgc

SEQ ID NO: 3549765 - DNA, 25 bp, Homo sapien
tcatgtattcatcaaagcctttgct

SEQ ID NO: 3549766 - DNA, 25 bp, Homo sapien
tgggtgcgggcgggctggcgtgcag

SEQ ID NO: 3549767 - DNA, 25 bp, Homo sapien
gtgcgggcgggctggcgtgcagaga

SEQ ID NO: 3549768 - DNA, 25 bp, Homo sapien
ggtgcgggcgggctggcgtgcagag

SEQ ID NO: 3549769 - DNA, 25 bp, Homo sapien
ggtgggtgcgggcgggctggcgtgc

SEQ ID NO: 3549770 - DNA, 25 bp, Homo sapien
cgcccggcctgaatcaaaacaaaca

SEQ ID NO: 3549771 - DNA, 25 bp, Homo sapien
gcccggcctgaatcaaaacaaacaa

SEQ ID NO: 3549772 - DNA, 25 bp, Homo sapien
gagcgagtgcgacccgttcctttgt

SEQ ID NO: 3549773 - DNA, 25 bp, Homo sapien
ggacctgactcagctaacaatctag

SEQ ID NO: 3549774 - DNA, 25 bp, Homo sapien
gtctgaatggccttcctgagagcga

SEQ ID NO: 3549775 - DNA, 25 bp, Homo sapien
gtgatctacctgatgcgaccctgag

SEQ ID NO: 3549776 - DNA, 25 bp, Homo sapien
caagggacaaggtgctagaatccta

SEQ ID NO: 3549777 - DNA, 25 bp, Homo sapien
tctgagtcttagaaactggctgctc

SEQ ID NO: 3549778 - DNA, 25 bp, Homo sapien
gcttggatctgagtcttctacctgg

SEQ ID NO: 3549779 - DNA, 25 bp, Homo sapien
tactcaaggagggaccaggatgata

SEQ ID NO: 3549780 - DNA, 25 bp, Homo sapien
caaaggctacttatggccggtcaca

SEQ ID NO: 3549781 - DNA, 25 bp, Homo sapien
gcagcagccgctaggaaatcttcaa

SEQ ID NO: 3549782 - DNA, 25 bp, Homo sapien
caagtgtagtgtctgtgctaaccca

SEQ ID NO: 3549783 - DNA, 25 bp, Homo sapien
ggtaaatcccttagatcccctgctg

SEQ ID NO: 3549784 - DNA, 25 bp, Homo sapien
tcacaccctcttccatgtccacatg

SEQ ID NO: 3549785 - DNA, 25 bp, Homo sapien
acaccctcttccatgtccacatgca

SEQ ID NO: 3549786 - DNA, 25 bp, Homo sapien
cacaccctcttccatgtccacatgc

SEQ ID NO: 3549787 - DNA, 25 bp, Homo sapien
caccctcttccatgtccacatgcac

SEQ ID NO: 3549788 - DNA, 25 bp, Homo sapien
gaatactttttgcgatgatgtttct

SEQ ID NO: 3549789 - DNA, 25 bp, Homo sapien
tgcagaatactttttgcgatgatgt

SEQ ID NO: 3549790 - DNA, 25 bp, Homo sapien
cagaatactttttgcgatgatgttt

SEQ ID NO: 3549791 - DNA, 25 bp, Homo sapien
gcagaatactttttgcgatgatgtt

SEQ ID NO: 3549792 - DNA, 25 bp, Homo sapien
tgctgtattatccttgcgatcatct

SEQ ID NO: 3549793 - DNA, 25 bp, Homo sapien
catgatcatgatctgctgtattatc

SEQ ID NO: 3549794 - DNA, 25 bp, Homo sapien
ggatgagcagaagaagatcatgatc

SEQ ID NO: 3549795 - DNA, 25 bp, Homo sapien
tgcgatcatcttagcttccaccatt

SEQ ID NO: 3549796 - DNA, 25 bp, Homo sapien
cacgaacaccatgctatataatcta

SEQ ID NO: 3549797 - DNA, 25 bp, Homo sapien
gatcgactggcatttctaatcctcc

SEQ ID NO: 3549798 - DNA, 25 bp, Homo sapien
cagccctcacagattgatcgactgg

SEQ ID NO: 3549799 - DNA, 25 bp, Homo sapien
taagagggatttggtgatcccagcc

SEQ ID NO: 3549800 - DNA, 25 bp, Homo sapien
tttcagtcatggacaaatccttggg

SEQ ID NO: 3549801 - DNA, 25 bp, Homo sapien
tgatggtggagttctagcaacagcc

SEQ ID NO: 3549802 - DNA, 25 bp, Homo sapien
gaatgggctgatctgcttatgcaaa

SEQ ID NO: 3549803 - DNA, 25 bp, Homo sapien
gctccaggactgtggttcaataacg

SEQ ID NO: 3549804 - DNA, 25 bp, Homo sapien
cataccccttccaagattgtgagaa

SEQ ID NO: 3549805 - DNA, 25 bp, Homo sapien
gggcacaaacatagagccaaacact

SEQ ID NO: 3549806 - DNA, 25 bp, Homo sapien
ggtatgttccttgcctattgtccaa

SEQ ID NO: 3549807 - DNA, 25 bp, Homo sapien
ccagaaaaggccacgcagttctaac

SEQ ID NO: 3549808 - DNA, 25 bp, Homo sapien
gggattaagaatgaccaatgagaag

SEQ ID NO: 3549809 - DNA, 25 bp, Homo sapien
aagggattaagaatgaccaatgaga

SEQ ID NO: 3549810 - DNA, 25 bp, Homo sapien
taagggattaagaatgaccaatgag

SEQ ID NO: 3549811 - DNA, 25 bp, Homo sapien
tttaagggattaagaatgaccaatg

SEQ ID NO: 3549812 - DNA, 25 bp, Homo sapien
gcagaatccttctttcagtagccta

SEQ ID NO: 3549813 - DNA, 25 bp, Homo sapien
aagagctacccaaagacttcagtgg

SEQ ID NO: 3549814 - DNA, 25 bp, Homo sapien
caaatgctgctccttagttatggct

SEQ ID NO: 3549815 - DNA, 25 bp, Homo sapien
tatatacagttatctcctacactca

SEQ ID NO: 3549816 - DNA, 25 bp, Homo sapien
tactttccgtatgcccagcatgttg

SEQ ID NO: 3549817 - DNA, 25 bp, Homo sapien
ggcatgtagaacttgccccagtatt

SEQ ID NO: 3549818 - DNA, 25 bp, Homo sapien
tccccttgtgggtcaagtcatatgg

SEQ ID NO: 3549819 - DNA, 25 bp, Homo sapien
catgttggcagtggctattcgctca

SEQ ID NO: 3549820 - DNA, 25 bp, Homo sapien
catgcgatgcccaacacttttgcga

SEQ ID NO: 3549821 - DNA, 25 bp, Homo sapien
tcaaagtggccccaatgcaggtagc

SEQ ID NO: 3549822 - DNA, 25 bp, Homo sapien
tgtcaggcgcatcatttcaaagtgg

SEQ ID NO: 3549823 - DNA, 25 bp, Homo sapien
tgtgggcaacctggtcaaggaaacc

SEQ ID NO: 3549824 - DNA, 25 bp, Homo sapien
taagtcccatggaggaaaagcctag

SEQ ID NO: 3549825 - DNA, 25 bp, Homo sapien
cattgctgctcgatgctgaattcac

SEQ ID NO: 3549826 - DNA, 25 bp, Homo sapien
taccagggcttgaaaagatctcatg

SEQ ID NO: 3549827 - DNA, 25 bp, Homo sapien
aaaggcttatgtggaggccctggca

SEQ ID NO: 3549828 - DNA, 25 bp, Homo sapien
tacttttggcacaagtggtgccctt

SEQ ID NO: 3549829 - DNA, 25 bp, Homo sapien
tggaaggtccccgtatgtcacttaa

SEQ ID NO: 3549830 - DNA, 25 bp, Homo sapien
tctcttcttacttttggcacaagtg

SEQ ID NO: 3549831 - DNA, 25 bp, Homo sapien
tgtaaactccgtagcttcagtggaa

SEQ ID NO: 3549832 - DNA, 25 bp, Homo sapien
ctatacatctcaaaagatctatttt

SEQ ID NO: 3549833 - DNA, 25 bp, Homo sapien
aaaactatacatctcaaaagatcta

SEQ ID NO: 3549834 - DNA, 25 bp, Homo sapien
taaaactatacatctcaaaagatct

SEQ ID NO: 3549835 - DNA, 25 bp, Homo sapien
aactatacatctcaaaagatctatt

SEQ ID NO: 3549836 - DNA, 25 bp, Homo sapien
tggtctatgccatccagttcaacag

SEQ ID NO: 3549837 - DNA, 25 bp, Homo sapien
ttaacacagctatatcaaagggcca

SEQ ID NO: 3549838 - DNA, 25 bp, Homo sapien
ttatagaagaggaacccgagggcta

SEQ ID NO: 3549839 - DNA, 25 bp, Homo sapien
caaacaggatattaggcaggtagta

SEQ ID NO: 3549840 - DNA, 25 bp, Homo sapien
tggtgggtgggcaaaacttcaggcc

SEQ ID NO: 3549841 - DNA, 25 bp, Homo sapien
tttctctcatatatgcagggacttt

SEQ ID NO: 3549842 - DNA, 25 bp, Homo sapien
ctctcatatatgcagggacttttca

SEQ ID NO: 3549843 - DNA, 25 bp, Homo sapien
atatatgcagggacttttcatgctg

SEQ ID NO: 3549844 - DNA, 25 bp, Homo sapien
gagaacattcctatgtcatctccca

SEQ ID NO: 3549845 - DNA, 25 bp, Homo sapien
cagagaaaagatttacgaacaggag

SEQ ID NO: 3549846 - DNA, 25 bp, Homo sapien
ggcaaaactgtaagctctaaaaaca

SEQ ID NO: 3549847 - DNA, 25 bp, Homo sapien
gggatgggaaacacgagaacattcc

SEQ ID NO: 3549848 - DNA, 25 bp, Homo sapien
cttcaaaacttggtactgggagcag

SEQ ID NO: 3549849 - DNA, 25 bp, Homo sapien
tgggagcagtgtctttacgccagca

SEQ ID NO: 3549850 - DNA, 25 bp, Homo sapien
ttcaaaacttggtactgggagcagt

SEQ ID NO: 3549851 - DNA, 25 bp, Homo sapien
gcagtgtctttacgccagcactggc

SEQ ID NO: 3549852 - DNA, 25 bp, Homo sapien
agacaaatcaagttaaacgacgaag

SEQ ID NO: 3549853 - DNA, 25 bp, Homo sapien
ctgggccaaaggtactacttcttat

SEQ ID NO: 3549854 - DNA, 25 bp, Homo sapien
cgatacaacctgggccaaaggtact

SEQ ID NO: 3549855 - DNA, 25 bp, Homo sapien
caaagacaaatcaagttaaacgacg

SEQ ID NO: 3549856 - DNA, 25 bp, Homo sapien
gagccaccgcgcccgcccaaaagta

SEQ ID NO: 3549857 - DNA, 25 bp, Homo sapien
cgcaaaaggccagccgggatctctg

SEQ ID NO: 3549858 - DNA, 25 bp, Homo sapien
actcaaaggctcaggctccgcaaaa

SEQ ID NO: 3549859 - DNA, 25 bp, Homo sapien
tccgccggaggagtcttgaggtgtg

SEQ ID NO: 3549860 - DNA, 25 bp, Homo sapien
tgtgggatgcggattccactaaatg

SEQ ID NO: 3549861 - DNA, 25 bp, Homo sapien
gatagcgtagttcctaaccagtgct

SEQ ID NO: 3549862 - DNA, 25 bp, Homo sapien
tcggcggtgcgatagcgtagttcct

SEQ ID NO: 3549863 - DNA, 25 bp, Homo sapien
taaccagtgcttcaccaagcatatg

SEQ ID NO: 3549864 - DNA, 25 bp, Homo sapien
agcatatgcagagccgccttttggg

SEQ ID NO: 3549865 - DNA, 25 bp, Homo sapien
agcggcgcactagcgcgagccagca

SEQ ID NO: 3549866 - DNA, 25 bp, Homo sapien
ccgcaggagcggcgcactagcgcga

SEQ ID NO: 3549867 - DNA, 25 bp, Homo sapien
ggagcggcgcactagcgcgagccag

SEQ ID NO: 3549868 - DNA, 25 bp, Homo sapien
caggagcggcgcactagcgcgagcc

SEQ ID NO: 3549869 - DNA, 25 bp, Homo sapien
gcggcgctccactacctagctgtaa

SEQ ID NO: 3549870 - DNA, 25 bp, Homo sapien
gaagttgtgttcactcgggtccact

SEQ ID NO: 3549871 - DNA, 25 bp, Homo sapien
gctgtaatcggctcaggacaccgct

SEQ ID NO: 3549872 - DNA, 25 bp, Homo sapien
gcagagtcccgacggaagcgaaaga

SEQ ID NO: 3549873 - DNA, 25 bp, Homo sapien
cacaggcattcgcttttttgcatag

SEQ ID NO: 3549874 - DNA, 25 bp, Homo sapien
tgtttgatagaagctgaacccacct

SEQ ID NO: 3549875 - DNA, 25 bp, Homo sapien
tattctacatagtggttctccatgt

SEQ ID NO: 3549876 - DNA, 25 bp, Homo sapien
caggaatatggtagcatcacaggca

SEQ ID NO: 3549877 - DNA, 25 bp, Homo sapien
ttgaagggtatgtagtcagcaaccc

SEQ ID NO: 3549878 - DNA, 25 bp, Homo sapien
ggctgtgatgtgctcgtggttgaag

SEQ ID NO: 3549879 - DNA, 25 bp, Homo sapien
ctcgtggttgaagggtatgtagtca

SEQ ID NO: 3549880 - DNA, 25 bp, Homo sapien
tgatgtgctcgtggttgaagggtat

SEQ ID NO: 3549881 - DNA, 25 bp, Homo sapien
tatagccttggctgtactgtgactt

SEQ ID NO: 3549882 - DNA, 25 bp, Homo sapien
aactaggtaacgtcatgcttagacc

SEQ ID NO: 3549883 - DNA, 25 bp, Homo sapien
gaccaaaaccatacagcaatgctct

SEQ ID NO: 3549884 - DNA, 25 bp, Homo sapien
gcatggtgacagttaacatcaggtt

SEQ ID NO: 3549885 - DNA, 25 bp, Homo sapien
agataacgcctatgtcttttcttcc

SEQ ID NO: 3549886 - DNA, 25 bp, Homo sapien
cagactatggaagataacgcctatg

SEQ ID NO: 3549887 - DNA, 25 bp, Homo sapien
gatctcataattattaattaagtga

SEQ ID NO: 3549888 - DNA, 25 bp, Homo sapien
ctatggaagataacgcctatgtctt

SEQ ID NO: 3549889 - DNA, 25 bp, Homo sapien
cattttccgcgatattgttgataga

SEQ ID NO: 3549890 - DNA, 25 bp, Homo sapien
ttgatagaagagacgacaaggcccc

SEQ ID NO: 3549891 - DNA, 25 bp, Homo sapien
ggtgttacaccactaagaaactgcc

SEQ ID NO: 3549892 - DNA, 25 bp, Homo sapien
gaaactgccagtatgtcttgtgatt

SEQ ID NO: 3549893 - DNA, 25 bp, Homo sapien
tcctctaggacaacaagtaacactg

SEQ ID NO: 3549894 - DNA, 25 bp, Homo sapien
gatttttgcgctgtgcttcctctag

SEQ ID NO: 3549895 - DNA, 25 bp, Homo sapien
gctgggtagagttggttgtacctca

SEQ ID NO: 3549896 - DNA, 25 bp, Homo sapien
cacttttcacactaacattgatggt

SEQ ID NO: 3549897 - DNA, 25 bp, Homo sapien
tatcatatccgtagtcttcttgcag

SEQ ID NO: 3549898 - DNA, 25 bp, Homo sapien
gaatttcccctgcttaatctcattg

SEQ ID NO: 3549899 - DNA, 25 bp, Homo sapien
aagggaggatttgagcaatggacat

SEQ ID NO: 3549900 - DNA, 25 bp, Homo sapien
taggtatgtcttgcctttcagggaa

SEQ ID NO: 3549901 - DNA, 25 bp, Homo sapien
cagtgcgattatggccaccagagca

SEQ ID NO: 3549902 - DNA, 25 bp, Homo sapien
caactgggcagttgtgacagggaca

SEQ ID NO: 3549903 - DNA, 25 bp, Homo sapien
tctcagctagggtcagtatgcacaa

SEQ ID NO: 3549904 - DNA, 25 bp, Homo sapien
gaacctcagcatctatgaagcatgg

SEQ ID NO: 3549905 - DNA, 25 bp, Homo sapien
tggcctcttgattctgcaatccagg

SEQ ID NO: 3549906 - DNA, 25 bp, Homo sapien
caggtcatactagctggactttcac

SEQ ID NO: 3549907 - DNA, 25 bp, Homo sapien
gatgttagtagaagcctggcctctt

SEQ ID NO: 3549908 - DNA, 25 bp, Homo sapien
ggcaccacaaagaatatatctcagg

SEQ ID NO: 3549909 - DNA, 25 bp, Homo sapien
gatcttgttgtacatacaggtcaga

SEQ ID NO: 3549910 - DNA, 25 bp, Homo sapien
ggtcagagccaaggttgccattgct

SEQ ID NO: 3549911 - DNA, 25 bp, Homo sapien
tactgtagatgtctccaatgatgcc

SEQ ID NO: 3549912 - DNA, 25 bp, Homo sapien
tgaccaaacagggatctgtaacctt

SEQ ID NO: 3549913 - DNA, 25 bp, Homo sapien
cagtgccaagatcgctagactgggc

SEQ ID NO: 3549914 - DNA, 25 bp, Homo sapien
tagactgggcccatagaaggctgat

SEQ ID NO: 3549915 - DNA, 25 bp, Homo sapien
tatcggcaaggtcgcctcagagttc

SEQ ID NO: 3549916 - DNA, 25 bp, Homo sapien
cttggcaaagcggacggctatcggc

SEQ ID NO: 3549917 - DNA, 25 bp, Homo sapien
tgtctttgtagaatggatactttat

SEQ ID NO: 3549918 - DNA, 25 bp, Homo sapien
atactttatccccagggtctcggca

SEQ ID NO: 3549919 - DNA, 25 bp, Homo sapien
tgaggccgagctgcccaatggttag

SEQ ID NO: 3549920 - DNA, 25 bp, Homo sapien
gtgaggccgagctgcccaatggtta

SEQ ID NO: 3549921 - DNA, 25 bp, Homo sapien
ccttcaagttgtaggctccggccag

SEQ ID NO: 3549922 - DNA, 25 bp, Homo sapien
gattcatggcaatcaggatgctggg

SEQ ID NO: 3549923 - DNA, 25 bp, Homo sapien
tattccattgaccaagggctcctgt

SEQ ID NO: 3549924 - DNA, 25 bp, Homo sapien
gatgaagtcaccgagttctccatga

SEQ ID NO: 3549925 - DNA, 25 bp, Homo sapien
catgaactctgggtctgggtactag

SEQ ID NO: 3549926 - DNA, 25 bp, Homo sapien
tgaactctgggtctgggtactagtc

SEQ ID NO: 3549927 - DNA, 25 bp, Homo sapien
atgaactctgggtctgggtactagt

SEQ ID NO: 3549928 - DNA, 25 bp, Homo sapien
agcatgaactctgggtctgggtact

SEQ ID NO: 3549929 - DNA, 25 bp, Homo sapien
ctttaccttctcttatatgtgcttc

SEQ ID NO: 3549930 - DNA, 25 bp, Homo sapien
caggtaccgcgatttgcaagtggaa

SEQ ID NO: 3549931 - DNA, 25 bp, Homo sapien
tatgtctctcatccacaggtaccgc

SEQ ID NO: 3549932 - DNA, 25 bp, Homo sapien
tcactctctcgtctatgtctctcat

SEQ ID NO: 3549933 - DNA, 25 bp, Homo sapien
cttttattgaacatgtagagagaga

SEQ ID NO: 3549934 - DNA, 25 bp, Homo sapien
aaatggattttatgcagctgaggaa

SEQ ID NO: 3549935 - DNA, 25 bp, Homo sapien
aaggacaataaacatggaactccac

SEQ ID NO: 3549936 - DNA, 25 bp, Homo sapien
tcctgctcgtactgggataaatgaa

SEQ ID NO: 3549937 - DNA, 25 bp, Homo sapien
tagtatttgctccagcgaacctcca

SEQ ID NO: 3549938 - DNA, 25 bp, Homo sapien
gtatttgctccagcgaacctccaag

SEQ ID NO: 3549939 - DNA, 25 bp, Homo sapien
atttgctccagcgaacctccaagtt

SEQ ID NO: 3549940 - DNA, 25 bp, Homo sapien
ttagtatttgctccagcgaacctcc

SEQ ID NO: 3549941 - DNA, 25 bp, Homo sapien
cattgcggacaacgtaactaccagc

SEQ ID NO: 3549942 - DNA, 25 bp, Homo sapien
tccattgcggacaacgtaactacca

SEQ ID NO: 3549943 - DNA, 25 bp, Homo sapien
ttgcggacaacgtaactaccagctc

SEQ ID NO: 3549944 - DNA, 25 bp, Homo sapien
ccattgcggacaacgtaactaccag

SEQ ID NO: 3549945 - DNA, 25 bp, Homo sapien
ccatgagcgctcctccattgtgaaa

SEQ ID NO: 3549946 - DNA, 25 bp, Homo sapien
tgttggcacataggccctgaataca

SEQ ID NO: 3549947 - DNA, 25 bp, Homo sapien
ttggctcagtggttcgcctccactc

SEQ ID NO: 3549948 - DNA, 25 bp, Homo sapien
actcagaagttcccagtaggttctg

SEQ ID NO: 3549949 - DNA, 25 bp, Homo sapien
gattctcacagagtaattgacggag

SEQ ID NO: 3549950 - DNA, 25 bp, Homo sapien
caggaggtgtcacagttataggctc

SEQ ID NO: 3549951 - DNA, 25 bp, Homo sapien
gaaatatgtttcattgattctcaca

SEQ ID NO: 3549952 - DNA, 25 bp, Homo sapien
tataggctcatcagcggagatgttg

SEQ ID NO: 3549953 - DNA, 25 bp, Homo sapien
ggctgcagcgtttggattgctgaat

SEQ ID NO: 3549954 - DNA, 25 bp, Homo sapien
gcagagacgcaagaagagtctttgt

SEQ ID NO: 3549955 - DNA, 25 bp, Homo sapien
tgttaatatccaagaaggtctttcc

SEQ ID NO: 3549956 - DNA, 25 bp, Homo sapien
ccttgagaaatttccgtgagcactg

SEQ ID NO: 3549957 - DNA, 25 bp, Homo sapien
tggcttctcctgtgctaaatgtgtt

SEQ ID NO: 3549958 - DNA, 25 bp, Homo sapien
agactcttcttcacacaggtcagag

SEQ ID NO: 3549959 - DNA, 25 bp, Homo sapien
atggcttctcctgtgctaaatgtgt

SEQ ID NO: 3549960 - DNA, 25 bp, Homo sapien
ctgcccatttattagactcttcttc

SEQ ID NO: 3549961 - DNA, 25 bp, Homo sapien
caaggccaaaacgtccaggctgagc

SEQ ID NO: 3549962 - DNA, 25 bp, Homo sapien
tcccattgaacagacacaaggccaa

SEQ ID NO: 3549963 - DNA, 25 bp, Homo sapien
agtggttgacaacttcggcggttga

SEQ ID NO: 3549964 - DNA, 25 bp, Homo sapien
cggcggttgagtagttcccattgaa

SEQ ID NO: 3549965 - DNA, 25 bp, Homo sapien
taagttttcctcagcgttacgacat

SEQ ID NO: 3549966 - DNA, 25 bp, Homo sapien
attttctagcttgtcgatcaggtgg

SEQ ID NO: 3549967 - DNA, 25 bp, Homo sapien
tataatcaaggcaagctctcccgag

SEQ ID NO: 3549968 - DNA, 25 bp, Homo sapien
gttacgacatactcccaaagccagt

SEQ ID NO: 3549969 - DNA, 25 bp, Homo sapien
tcaacagaggttttaggcggatgta

SEQ ID NO: 3549970 - DNA, 25 bp, Homo sapien
gcgctggttcccctgttatagtttg

SEQ ID NO: 3549971 - DNA, 25 bp, Homo sapien
ttgagggacaacacaacattgacag

SEQ ID NO: 3549972 - DNA, 25 bp, Homo sapien
tggattccaacaagtttgagggaca

SEQ ID NO: 3549973 - DNA, 25 bp, Homo sapien
caaatctcgcatagttggcttggaa

SEQ ID NO: 3549974 - DNA, 25 bp, Homo sapien
tcgcatagttggcttggaataaaag

SEQ ID NO: 3549975 - DNA, 25 bp, Homo sapien
taagagccccactaggggcagctgg

SEQ ID NO: 3549976 - DNA, 25 bp, Homo sapien
cacaaatctcgcatagttggcttgg

SEQ ID NO: 3549977 - DNA, 25 bp, Homo sapien
tgtaccagaatgttgatgaattggc

SEQ ID NO: 3549978 - DNA, 25 bp, Homo sapien
caacagtgtaccagaatgttgatga

SEQ ID NO: 3549979 - DNA, 25 bp, Homo sapien
cagtgtaccagaatgttgatgaatt

SEQ ID NO: 3549980 - DNA, 25 bp, Homo sapien
taccagaatgttgatgaattggctg

SEQ ID NO: 3549981 - DNA, 25 bp, Homo sapien
tttattaagtgatgggcagaaggta

SEQ ID NO: 3549982 - DNA, 25 bp, Homo sapien
ttaagtgatgggcagaaggtaatga

SEQ ID NO: 3549983 - DNA, 25 bp, Homo sapien
atgggcagaaggtaatgagagctcc

SEQ ID NO: 3549984 - DNA, 25 bp, Homo sapien
ggcagaaggtaatgagagctcctcc

SEQ ID NO: 3549985 - DNA, 25 bp, Homo sapien
cggtagataatctcattggataaat

SEQ ID NO: 3549986 - DNA, 25 bp, Homo sapien
gtagataatctcattggataaatat

SEQ ID NO: 3549987 - DNA, 25 bp, Homo sapien
tattagaaggttttacaggagcaaa

SEQ ID NO: 3549988 - DNA, 25 bp, Homo sapien
aatattagaaggttttacaggagca

SEQ ID NO: 3549989 - DNA, 25 bp, Homo sapien
gcaggtgcagatcttcatcttattg

SEQ ID NO: 3549990 - DNA, 25 bp, Homo sapien
tgtctcttcacccacacgggatgta

SEQ ID NO: 3549991 - DNA, 25 bp, Homo sapien
cacaaggttttaatctgagactatc

SEQ ID NO: 3549992 - DNA, 25 bp, Homo sapien
caggtctagcagatgccccagggta

SEQ ID NO: 3549993 - DNA, 25 bp, Homo sapien
tcagaggccatagaagctgcagctt

SEQ ID NO: 3549994 - DNA, 25 bp, Homo sapien
cagaggccatagaagctgcagcttc

SEQ ID NO: 3549995 - DNA, 25 bp, Homo sapien
gtcagaggccatagaagctgcagct

SEQ ID NO: 3549996 - DNA, 25 bp, Homo sapien
tttgcagatttttaatttctttggc

SEQ ID NO: 3549997 - DNA, 25 bp, Homo sapien
agtttgcagatttttaatttctttg

SEQ ID NO: 3549998 - DNA, 25 bp, Homo sapien
tgcagatttttaatttctttggcct

SEQ ID NO: 3549999 - DNA, 25 bp, Homo sapien
ttgcagatttttaatttctttggcc

SEQ ID NO: 3550000 - DNA, 25 bp, Homo sapien
ctggaacttaggtgatgattttgct

SEQ ID NO: 3550001 - DNA, 25 bp, Homo sapien
gctggaacttaggtgatgattttgc

SEQ ID NO: 3550002 - DNA, 25 bp, Homo sapien
tggaacttaggtgatgattttgctt

SEQ ID NO: 3550003 - DNA, 25 bp, Homo sapien
ccagaatgatgaacattacccacag

SEQ ID NO: 3550004 - DNA, 25 bp, Homo sapien
agctgtaaggaggaaaagccaatga

SEQ ID NO: 3550005 - DNA, 25 bp, Homo sapien
ccaatgaggtgctgagtgcttctcg

SEQ ID NO: 3550006 - DNA, 25 bp, Homo sapien
gagtgcttctcggtgctctccagaa

SEQ ID NO: 3550007 - DNA, 25 bp, Homo sapien
ctacttcctgtgattccttggttta

SEQ ID NO: 3550008 - DNA, 25 bp, Homo sapien
gacctacttcctgtgattccttggt

SEQ ID NO: 3550009 - DNA, 25 bp, Homo sapien
agacctacttcctgtgattccttgg

SEQ ID NO: 3550010 - DNA, 25 bp, Homo sapien
cttcctgtgattccttggtttaaga

SEQ ID NO: 3550011 - DNA, 25 bp, Homo sapien
tactgtctttcatctgaatgccgtc

SEQ ID NO: 3550012 - DNA, 25 bp, Homo sapien
tctttcatctgaatgccgtcgttag

SEQ ID NO: 3550013 - DNA, 25 bp, Homo sapien
catctgaatgccgtcgttagaacgc

SEQ ID NO: 3550014 - DNA, 25 bp, Homo sapien
tgccgtcgttagaacgctccttcat

SEQ ID NO: 3550015 - DNA, 25 bp, Homo sapien
gagttggttaagcaaagagttatcc

SEQ ID NO: 3550016 - DNA, 25 bp, Homo sapien
tccgaatggttcttccacactcaaa

SEQ ID NO: 3550017 - DNA, 25 bp, Homo sapien
gagttatcctgccacctaagagcat

SEQ ID NO: 3550018 - DNA, 25 bp, Homo sapien
gagaattgaactgtgccattggcta

SEQ ID NO: 3550019 - DNA, 25 bp, Homo sapien
cttcgctgaaggcattttcttgtca

SEQ ID NO: 3550020 - DNA, 25 bp, Homo sapien
cttcttcgctgaaggcattttcttg

SEQ ID NO: 3550021 - DNA, 25 bp, Homo sapien
ttctcttcttcgctgaaggcatttt

SEQ ID NO: 3550022 - DNA, 25 bp, Homo sapien
gctgaaggcattttcttgtcatctc

SEQ ID NO: 3550023 - DNA, 25 bp, Homo sapien
tcttaggtacattaaatcccactgg

SEQ ID NO: 3550024 - DNA, 25 bp, Homo sapien
ggtacattaaatcccactggctgca

SEQ ID NO: 3550025 - DNA, 25 bp, Homo sapien
ctcttaggtacattaaatcccactg

SEQ ID NO: 3550026 - DNA, 25 bp, Homo sapien
taggtacattaaatcccactggctg

SEQ ID NO: 3550027 - DNA, 25 bp, Homo sapien
tggtctcgatatgcctgaagtatgg

SEQ ID NO: 3550028 - DNA, 25 bp, Homo sapien
tcgatatgcctgaagtatggggtct

SEQ ID NO: 3550029 - DNA, 25 bp, Homo sapien
ggtggtctcgatatgcctgaagtat

SEQ ID NO: 3550030 - DNA, 25 bp, Homo sapien
gatatgcctgaagtatggggtctgc

SEQ ID NO: 3550031 - DNA, 25 bp, Homo sapien
ccattgtggctcctcgtataacctc

SEQ ID NO: 3550032 - DNA, 25 bp, Homo sapien
tggctcctcgtataacctccaacaa

SEQ ID NO: 3550033 - DNA, 25 bp, Homo sapien
tgtggctcctcgtataacctccaac

SEQ ID NO: 3550034 - DNA, 25 bp, Homo sapien
cattgtggctcctcgtataacctcc

SEQ ID NO: 3550035 - DNA, 25 bp, Homo sapien
gcagcatagctgggggaacgggaat

SEQ ID NO: 3550036 - DNA, 25 bp, Homo sapien
gcatagctgggggaacgggaattac

SEQ ID NO: 3550037 - DNA, 25 bp, Homo sapien
agcatagctgggggaacgggaatta

SEQ ID NO: 3550038 - DNA, 25 bp, Homo sapien
cagcatagctgggggaacgggaatt

SEQ ID NO: 3550039 - DNA, 25 bp, Homo sapien
taggaagatgtctacttcttttaga

SEQ ID NO: 3550040 - DNA, 25 bp, Homo sapien
tattagagtttgtagctttaggaag

SEQ ID NO: 3550041 - DNA, 25 bp, Homo sapien
tggtatcacctgatatcttgggctc

SEQ ID NO: 3550042 - DNA, 25 bp, Homo sapien
tccagaccctggaaatcacctattt

SEQ ID NO: 3550043 - DNA, 25 bp, Homo sapien
gatcttgatgttctggtgctgatat

SEQ ID NO: 3550044 - DNA, 25 bp, Homo sapien
ttttctttctctaggtactctagac

SEQ ID NO: 3550045 - DNA, 25 bp, Homo sapien
taggtactctagactatgattggta

SEQ ID NO: 3550046 - DNA, 25 bp, Homo sapien
gactatgattggtattaaatgcttc

SEQ ID NO: 3550047 - DNA, 25 bp, Homo sapien
tgaaaatggcacgtgacaagggcat

SEQ ID NO: 3550048 - DNA, 25 bp, Homo sapien
cctgaaaatggcacgtgacaagggc

SEQ ID NO: 3550049 - DNA, 25 bp, Homo sapien
gatctagcctgaaaatggcacgtga

SEQ ID NO: 3550050 - DNA, 25 bp, Homo sapien
tgaagatctagcctgaaaatggcac

SEQ ID NO: 3550051 - DNA, 25 bp, Homo sapien
tggagttctgagttgctggacttac

SEQ ID NO: 3550052 - DNA, 25 bp, Homo sapien
tcacaggtcatgaacggtacaatgc

SEQ ID NO: 3550053 - DNA, 25 bp, Homo sapien
caatgctgattctcatgatactgga

SEQ ID NO: 3550054 - DNA, 25 bp, Homo sapien
caacctgttgtagtatcagggatac

SEQ ID NO: 3550055 - DNA, 25 bp, Homo sapien
tcaggcaaacatgtttccatctaca

SEQ ID NO: 3550056 - DNA, 25 bp, Homo sapien
agaatgtttatccatcaggagatat

SEQ ID NO: 3550057 - DNA, 25 bp, Homo sapien
catctacatccgagtactcacagga

SEQ ID NO: 3550058 - DNA, 25 bp, Homo sapien
gtactcacaggatttgtagaaaagg

SEQ ID NO: 3550059 - DNA, 25 bp, Homo sapien
gatcgttcgttctcgttatttggta

SEQ ID NO: 3550060 - DNA, 25 bp, Homo sapien
tggaaatgccacatcatcatagata

SEQ ID NO: 3550061 - DNA, 25 bp, Homo sapien
aaccactgggatctgtggaaatgcc

SEQ ID NO: 3550062 - DNA, 25 bp, Homo sapien
tcaggagagactacagatcgttcgt

SEQ ID NO: 3550063 - DNA, 25 bp, Homo sapien
aaaatgtgctataagtagagataca

SEQ ID NO: 3550064 - DNA, 25 bp, Homo sapien
ctgctgtggtggcactgactgtatt

SEQ ID NO: 3550065 - DNA, 25 bp, Homo sapien
ggtggcactgactgtattcatcccc

SEQ ID NO: 3550066 - DNA, 25 bp, Homo sapien
gatatatattacttccacagccatc

SEQ ID NO: 3550067 - DNA, 25 bp, Homo sapien
aagcccctgttacagacttgtccac

SEQ ID NO: 3550068 - DNA, 25 bp, Homo sapien
aagacattagctttcatatccagca

SEQ ID NO: 3550069 - DNA, 25 bp, Homo sapien
agacccttggtcgctttccttccag

SEQ ID NO: 3550070 - DNA, 25 bp, Homo sapien
ctgttacagacttgtccactgactc

SEQ ID NO: 3550071 - DNA, 25 bp, Homo sapien
ccaactgcataaacagttgaaacaa

SEQ ID NO: 3550072 - DNA, 25 bp, Homo sapien
agaactccaactgcataaacagttg

SEQ ID NO: 3550073 - DNA, 25 bp, Homo sapien
gagaaggatccccataaatgatagt

SEQ ID NO: 3550074 - DNA, 25 bp, Homo sapien
ggatccccataaatgatagttcata

SEQ ID NO: 3550075 - DNA, 25 bp, Homo sapien
aatccttcagttgctgttagggcaa

SEQ ID NO: 3550076 - DNA, 25 bp, Homo sapien
gtttatgatccttcccttgactgca

SEQ ID NO: 3550077 - DNA, 25 bp, Homo sapien
ccccgactggcttggtagtaagatg

SEQ ID NO: 3550078 - DNA, 25 bp, Homo sapien
gctgttagggcaagatccaagcccc

SEQ ID NO: 3550079 - DNA, 25 bp, Homo sapien
aatggagttccaatttgggtttatg

SEQ ID NO: 3550080 - DNA, 25 bp, Homo sapien
tggagttccaatttgggtttatgtc

SEQ ID NO: 3550081 - DNA, 25 bp, Homo sapien
tgacttattctgtgtttaagggaaa

SEQ ID NO: 3550082 - DNA, 25 bp, Homo sapien
tatgtctgtcattgttgacttattc

SEQ ID NO: 3550083 - DNA, 25 bp, Homo sapien
ctggaaattcagactatttggctaa

SEQ ID NO: 3550084 - DNA, 25 bp, Homo sapien
caatgtcaggcaaatcaagagatcc

SEQ ID NO: 3550085 - DNA, 25 bp, Homo sapien
tacataggataaaacactagcacct

SEQ ID NO: 3550086 - DNA, 25 bp, Homo sapien
aagtctgagcaccacaacaaatcag

SEQ ID NO: 3550087 - DNA, 25 bp, Homo sapien
agctttgcttttctataatggttaa

SEQ ID NO: 3550088 - DNA, 25 bp, Homo sapien
atcataagaatcaactttctgatta

SEQ ID NO: 3550089 - DNA, 25 bp, Homo sapien
tcataagaatcaactttctgattaa

SEQ ID NO: 3550090 - DNA, 25 bp, Homo sapien
tgccagaattaccaatgtaactgtg

SEQ ID NO: 3550091 - DNA, 25 bp, Homo sapien
attaccaatgtaactgtgaggcagg

SEQ ID NO: 3550092 - DNA, 25 bp, Homo sapien
cttcatatccacagtcatgagtcat

SEQ ID NO: 3550093 - DNA, 25 bp, Homo sapien
agtcatttttgaggacatgccagaa

SEQ ID NO: 3550094 - DNA, 25 bp, Homo sapien
ttttccaactgtatacatagaattc

SEQ ID NO: 3550095 - DNA, 25 bp, Homo sapien
taagtagagcatatcaccaggttct

SEQ ID NO: 3550096 - DNA, 25 bp, Homo sapien
ggtcttcagacttcaatcaggttca

SEQ ID NO: 3550097 - DNA, 25 bp, Homo sapien
catagaattcttagctaatccaaga

SEQ ID NO: 3550098 - DNA, 25 bp, Homo sapien
caaacgaattttaagatcaccaggg

SEQ ID NO: 3550099 - DNA, 25 bp, Homo sapien
gatccagttacgtgtgtaaatgccc

SEQ ID NO: 3550100 - DNA, 25 bp, Homo sapien
tcagcaaaggcacaaactcatagca

SEQ ID NO: 3550101 - DNA, 25 bp, Homo sapien
tgcttataagggaggcaagccaggt

SEQ ID NO: 3550102 - DNA, 25 bp, Homo sapien
gactgactgattgttccttctacca

SEQ ID NO: 3550103 - DNA, 25 bp, Homo sapien
gagtctcattcccttcgctgacaaa

SEQ ID NO: 3550104 - DNA, 25 bp, Homo sapien
tcttggtgacatactcaacacagtg

SEQ ID NO: 3550105 - DNA, 25 bp, Homo sapien
caacacagtgcagggataagataca

SEQ ID NO: 3550106 - DNA, 25 bp, Homo sapien
ttaagtgaagccggccagcacactc

SEQ ID NO: 3550107 - DNA, 25 bp, Homo sapien
aagtgaagccggccagcacactcac

SEQ ID NO: 3550108 - DNA, 25 bp, Homo sapien
taagtgaagccggccagcacactca

SEQ ID NO: 3550109 - DNA, 25 bp, Homo sapien
aagcctgtttccaccgcagcacagc

SEQ ID NO: 3550110 - DNA, 25 bp, Homo sapien
cagaattccagcagagtgcaaatca

SEQ ID NO: 3550111 - DNA, 25 bp, Homo sapien
gacaccatcaggaagataaaactgc

SEQ ID NO: 3550112 - DNA, 25 bp, Homo sapien
gatgttgcttaggtcagctgaagcc

SEQ ID NO: 3550113 - DNA, 25 bp, Homo sapien
catgcctagttgagaggtgaccata

SEQ ID NO: 3550114 - DNA, 25 bp, Homo sapien
tgaccatagagatgaagaccacctc

SEQ ID NO: 3550115 - DNA, 25 bp, Homo sapien
tgtttcctcatgtatcaaacatgca

SEQ ID NO: 3550116 - DNA, 25 bp, Homo sapien
tggcgtaataactcccaggactgag

SEQ ID NO: 3550117 - DNA, 25 bp, Homo sapien
gaatcagcagctccgttccagtctc

SEQ ID NO: 3550118 - DNA, 25 bp, Homo sapien
tgttcactcggtaagaaagcagagt

SEQ ID NO: 3550119 - DNA, 25 bp, Homo sapien
taatctgtgccaattgctgtcagcc

SEQ ID NO: 3550120 - DNA, 25 bp, Homo sapien
taccattaccttgggagcaaggccc

SEQ ID NO: 3550121 - DNA, 25 bp, Homo sapien
gaactggccatctgataataaacgg

SEQ ID NO: 3550122 - DNA, 25 bp, Homo sapien
tccctgtctatgtatctgaacccct

SEQ ID NO: 3550123 - DNA, 25 bp, Homo sapien
tactcttatgttgcctgtttttctc

SEQ ID NO: 3550124 - DNA, 25 bp, Homo sapien
ctgtttttctctcaatgtgttgctg

SEQ ID NO: 3550125 - DNA, 25 bp, Homo sapien
cagccgtccctttactcttatgttg

SEQ ID NO: 3550126 - DNA, 25 bp, Homo sapien
ttttctctcaatgtgttgctgacca

SEQ ID NO: 3550127 - DNA, 25 bp, Homo sapien
taaagtgaatcatgataaaagtaag

SEQ ID NO: 3550128 - DNA, 25 bp, Homo sapien
agtaagaaacataacttcttgttgg

SEQ ID NO: 3550129 - DNA, 25 bp, Homo sapien
ctggctttggctgtatagcagtccg

SEQ ID NO: 3550130 - DNA, 25 bp, Homo sapien
gcagtccgtggtataaagtgaatca

SEQ ID NO: 3550131 - DNA, 25 bp, Homo sapien
tgcagtgaggcaggatttaaggtgg

SEQ ID NO: 3550132 - DNA, 25 bp, Homo sapien
gcagtgaggcaggatttaaggtggc

SEQ ID NO: 3550133 - DNA, 25 bp, Homo sapien
agacagagcactcagaatgcttcca

SEQ ID NO: 3550134 - DNA, 25 bp, Homo sapien
gcagacagagcactcagaatgcttc

SEQ ID NO: 3550135 - DNA, 25 bp, Homo sapien
cagacagagcactcagaatgcttcc

SEQ ID NO: 3550136 - DNA, 25 bp, Homo sapien
tatgattggccacactgagtgcagt

SEQ ID NO: 3550137 - DNA, 25 bp, Homo sapien
aaaagggctggtgcaatgtgtgaca

SEQ ID NO: 3550138 - DNA, 25 bp, Homo sapien
tatagttacaggtaggtaggctcca

SEQ ID NO: 3550139 - DNA, 25 bp, Homo sapien
taatgactgaagtgtacactcctgg

SEQ ID NO: 3550140 - DNA, 25 bp, Homo sapien
gcacagatctagttagtagttccga

SEQ ID NO: 3550141 - DNA, 25 bp, Homo sapien
tccgagtctaactgagggttccaaa

SEQ ID NO: 3550142 - DNA, 25 bp, Homo sapien
gtacagctgtagtgcatttccatca

SEQ ID NO: 3550143 - DNA, 25 bp, Homo sapien
tagccacatgtgactgccatattgt

SEQ ID NO: 3550144 - DNA, 25 bp, Homo sapien
gggttgtgggttatagctctcttac

SEQ ID NO: 3550145 - DNA, 25 bp, Homo sapien
gatccattgggttgtgggttatagc

SEQ ID NO: 3550146 - DNA, 25 bp, Homo sapien
tgtgggttatagctctcttactcac

SEQ ID NO: 3550147 - DNA, 25 bp, Homo sapien
tttattttgatccattgggttgtgg

SEQ ID NO: 3550148 - DNA, 25 bp, Homo sapien
ccttttctctgtggcgattgataga

SEQ ID NO: 3550149 - DNA, 25 bp, Homo sapien
ctctgtggcgattgatagagagcca

SEQ ID NO: 3550150 - DNA, 25 bp, Homo sapien
ttctctgtggcgattgatagagagc

SEQ ID NO: 3550151 - DNA, 25 bp, Homo sapien
ctgtggcgattgatagagagccaga

SEQ ID NO: 3550152 - DNA, 25 bp, Homo sapien
tagcatgacccttgatacgacttga

SEQ ID NO: 3550153 - DNA, 25 bp, Homo sapien
tccttttgaaactccagacttgcag

SEQ ID NO: 3550154 - DNA, 25 bp, Homo sapien
aaatgctcagaggtgtaagttctcc

SEQ ID NO: 3550155 - DNA, 25 bp, Homo sapien
ttagacagcctagaggaccctgagg

SEQ ID NO: 3550156 - DNA, 25 bp, Homo sapien
tcatcctacccgacaggagaacaag

SEQ ID NO: 3550157 - DNA, 25 bp, Homo sapien
aaatcaagcaacccctgtcatccta

SEQ ID NO: 3550158 - DNA, 25 bp, Homo sapien
gtcactagcttcatcatagctcaag

SEQ ID NO: 3550159 - DNA, 25 bp, Homo sapien
ccttcccaactttatcctaattcat

SEQ ID NO: 3550160 - DNA, 25 bp, Homo sapien
tcctgccctcctcagaaactctact

SEQ ID NO: 3550161 - DNA, 25 bp, Homo sapien
gatcaaacatagcaagctggcaggt

SEQ ID NO: 3550162 - DNA, 25 bp, Homo sapien
ctggcaggtgggaagtctaagctat

SEQ ID NO: 3550163 - DNA, 25 bp, Homo sapien
gctcctggcagatcaaacatagcaa

SEQ ID NO: 3550164 - DNA, 25 bp, Homo sapien
cagatgccaaaatgatccccaagct

SEQ ID NO: 3550165 - DNA, 25 bp, Homo sapien
cacttgggtaaaatttggagagaag

SEQ ID NO: 3550166 - DNA, 25 bp, Homo sapien
gctcaataccatcatgccacacaag

SEQ ID NO: 3550167 - DNA, 25 bp, Homo sapien
tcatgccacacaagatctggatagt

SEQ ID NO: 3550168 - DNA, 25 bp, Homo sapien
taaagacagggcctttttgccgctc

SEQ ID NO: 3550169 - DNA, 25 bp, Homo sapien
cactggacatggagtttgccccttt

SEQ ID NO: 3550170 - DNA, 25 bp, Homo sapien
tgaaatccagtcaaacagagtgcct

SEQ ID NO: 3550171 - DNA, 25 bp, Homo sapien
tgagcctcatagaaacccatgtgat

SEQ ID NO: 3550172 - DNA, 25 bp, Homo sapien
atatatcatctcttggcacttcccc

SEQ ID NO: 3550173 - DNA, 25 bp, Homo sapien
gacagatgtccagtcccaagacata

SEQ ID NO: 3550174 - DNA, 25 bp, Homo sapien
ccaacacgttctgaattagatttac

SEQ ID NO: 3550175 - DNA, 25 bp, Homo sapien
gtccagtcccaagacatatatcatc

SEQ ID NO: 3550176 - DNA, 25 bp, Homo sapien
tttgatttctgcgtgtagatgtttc

SEQ ID NO: 3550177 - DNA, 25 bp, Homo sapien
gatttctgcgtgtagatgtttcttc

SEQ ID NO: 3550178 - DNA, 25 bp, Homo sapien
tctgcgtgtagatgtttcttcaggc

SEQ ID NO: 3550179 - DNA, 25 bp, Homo sapien
actttgatttctgcgtgtagatgtt

SEQ ID NO: 3550180 - DNA, 25 bp, Homo sapien
cagctatacaggatgtgatactcac

SEQ ID NO: 3550181 - DNA, 25 bp, Homo sapien
tttctcagtcccatcaacggtttct

SEQ ID NO: 3550182 - DNA, 25 bp, Homo sapien
ctacttaccttcatcttctgaaagt

SEQ ID NO: 3550183 - DNA, 25 bp, Homo sapien
tgtgcccgttggttccagctgagtc

SEQ ID NO: 3550184 - DNA, 25 bp, Homo sapien
tatgtgtgaattgccacttcgagac

SEQ ID NO: 3550185 - DNA, 25 bp, Homo sapien
gagttcaggagtcatggagccttat

SEQ ID NO: 3550186 - DNA, 25 bp, Homo sapien
tgttaggcaagtctgttcttgaagc

SEQ ID NO: 3550187 - DNA, 25 bp, Homo sapien
gaaaagagccaactaatatttgtga

SEQ ID NO: 3550188 - DNA, 25 bp, Homo sapien
cagtaaactcatatgcaggctggtt

SEQ ID NO: 3550189 - DNA, 25 bp, Homo sapien
tcaaaaccttgggtggcattctttg

SEQ ID NO: 3550190 - DNA, 25 bp, Homo sapien
cagcaggacctaaatgaattcagta

SEQ ID NO: 3550191 - DNA, 25 bp, Homo sapien
ctccagaaaggttgggcccctccag

SEQ ID NO: 3550192 - DNA, 25 bp, Homo sapien
ggcagaatcacctccaaccttgctc

SEQ ID NO: 3550193 - DNA, 25 bp, Homo sapien
cagaatcacctccaaccttgctcac

SEQ ID NO: 3550194 - DNA, 25 bp, Homo sapien
gggcagaatcacctccaaccttgct

SEQ ID NO: 3550195 - DNA, 25 bp, Homo sapien
gcagaatcacctccaaccttgctca

SEQ ID NO: 3550196 - DNA, 25 bp, Homo sapien
cagagtgccgtctgtgtttccagtg

SEQ ID NO: 3550197 - DNA, 25 bp, Homo sapien
ttcctctttcgcagagtgccgtctg

SEQ ID NO: 3550198 - DNA, 25 bp, Homo sapien
ttgattaaaaaggagcccagtctct

SEQ ID NO: 3550199 - DNA, 25 bp, Homo sapien
tgattaaaaaggagcccagtctctt

SEQ ID NO: 3550200 - DNA, 25 bp, Homo sapien
attatgtgagacaacacgtgtaagg

SEQ ID NO: 3550201 - DNA, 25 bp, Homo sapien
ttatgtgagacaacacgtgtaaggt

SEQ ID NO: 3550202 - DNA, 25 bp, Homo sapien
tatgtgagacaacacgtgtaaggtt

SEQ ID NO: 3550203 - DNA, 25 bp, Homo sapien
tctccggagctggagaaagtagaca

SEQ ID NO: 3550204 - DNA, 25 bp, Homo sapien
gcctcacattcccatgaaaagcgtg

SEQ ID NO: 3550205 - DNA, 25 bp, Homo sapien
gacacacacgtatgccagtaataaa

SEQ ID NO: 3550206 - DNA, 25 bp, Homo sapien
caatagatacgtgagtgtagggcag

SEQ ID NO: 3550207 - DNA, 25 bp, Homo sapien
catttccatatgtgacacaggatac

SEQ ID NO: 3550208 - DNA, 25 bp, Homo sapien
gacacaggatacacatttgattaag

SEQ ID NO: 3550209 - DNA, 25 bp, Homo sapien
tgcacatgcaaggactgactatact

SEQ ID NO: 3550210 - DNA, 25 bp, Homo sapien
ttctatgggtgaaggaaagcagaag

SEQ ID NO: 3550211 - DNA, 25 bp, Homo sapien
cactagagttaatgcgctatagtca

SEQ ID NO: 3550212 - DNA, 25 bp, Homo sapien
ttacaatgcaaaaccccaccactag

SEQ ID NO: 3550213 - DNA, 25 bp, Homo sapien
tgggatatggtattgcctgggaatc

SEQ ID NO: 3550214 - DNA, 25 bp, Homo sapien
aaaccccaccactagagttaatgcg

SEQ ID NO: 3550215 - DNA, 25 bp, Homo sapien
gaattccagcacacttaagaggagc

SEQ ID NO: 3550216 - DNA, 25 bp, Homo sapien
ggccacagcaatgcagaattccagc

SEQ ID NO: 3550217 - DNA, 25 bp, Homo sapien
caacaaagcactttacatccaaagg

SEQ ID NO: 3550218 - DNA, 25 bp, Homo sapien
cacttaagaggagcaccatgccatc

SEQ ID NO: 3550219 - DNA, 25 bp, Homo sapien
aaatggacatagtcatgtaacaatt

SEQ ID NO: 3550220 - DNA, 25 bp, Homo sapien
atggacatagtcatgtaacaattac

SEQ ID NO: 3550221 - DNA, 25 bp, Homo sapien
cattaaaatggacatagtcatgtaa

SEQ ID NO: 3550222 - DNA, 25 bp, Homo sapien
taaaatggacatagtcatgtaacaa

SEQ ID NO: 3550223 - DNA, 25 bp, Homo sapien
cagtaatggtaacggaatgaataaa

SEQ ID NO: 3550224 - DNA, 25 bp, Homo sapien
ccctgatatagccaagactgaactg

SEQ ID NO: 3550225 - DNA, 25 bp, Homo sapien
tgacaactgatcgtggttacagtaa

SEQ ID NO: 3550226 - DNA, 25 bp, Homo sapien
taaaacgtcaagcttattgcattga

SEQ ID NO: 3550227 - DNA, 25 bp, Homo sapien
ggctgaatcccaagctgcagagttt

SEQ ID NO: 3550228 - DNA, 25 bp, Homo sapien
ttggtcaataaacattatgccacac

SEQ ID NO: 3550229 - DNA, 25 bp, Homo sapien
tttgagtgatcccacttcatatttg

SEQ ID NO: 3550230 - DNA, 25 bp, Homo sapien
catatcttcataaagattccctcat

SEQ ID NO: 3550231 - DNA, 25 bp, Homo sapien
agctggctcttggtactggtactta

SEQ ID NO: 3550232 - DNA, 25 bp, Homo sapien
gctggctcttggtactggtacttat

SEQ ID NO: 3550233 - DNA, 25 bp, Homo sapien
ctggctcttggtactggtacttata

SEQ ID NO: 3550234 - DNA, 25 bp, Homo sapien
gatgtgactatgaaggggttgccaa

SEQ ID NO: 3550235 - DNA, 25 bp, Homo sapien
caatctgggagagcacaatctactc

SEQ ID NO: 3550236 - DNA, 25 bp, Homo sapien
ttgaaaatcatgtatgacttcagga

SEQ ID NO: 3550237 - DNA, 25 bp, Homo sapien
aatatcattcctggatgtgactatg

SEQ ID NO: 3550238 - DNA, 25 bp, Homo sapien
ccccaaattgtgtacgcaacataca

SEQ ID NO: 3550239 - DNA, 25 bp, Homo sapien
gctcatcaaggcaatcagaatccgc

SEQ ID NO: 3550240 - DNA, 25 bp, Homo sapien
cacaaaaatgggatgttcttcataa

SEQ ID NO: 3550241 - DNA, 25 bp, Homo sapien
tcaaggcaatcagaatccgcacaac

SEQ ID NO: 3550242 - DNA, 25 bp, Homo sapien
atgacatctatgtttcccagctggg

SEQ ID NO: 3550243 - DNA, 25 bp, Homo sapien
agcccctggagtggtctgttccatt

SEQ ID NO: 3550244 - DNA, 25 bp, Homo sapien
tacacagatatgaatgtatgacatc

SEQ ID NO: 3550245 - DNA, 25 bp, Homo sapien
tcttgcaatcctttacacagatatg

SEQ ID NO: 3550246 - DNA, 25 bp, Homo sapien
gcagaaaaggtgctacaataagaaa

SEQ ID NO: 3550247 - DNA, 25 bp, Homo sapien
cagaaaaggtgctacaataagaaat

SEQ ID NO: 3550248 - DNA, 25 bp, Homo sapien
gaaaaggtgctacaataagaaatgt

SEQ ID NO: 3550249 - DNA, 25 bp, Homo sapien
agcagaaaaggtgctacaataagaa

SEQ ID NO: 3550250 - DNA, 25 bp, Homo sapien
tggtcttgaggattttaggtgtctc

SEQ ID NO: 3550251 - DNA, 25 bp, Homo sapien
tacccgaaaatcactggagtggtct

SEQ ID NO: 3550252 - DNA, 25 bp, Homo sapien
gagtggtacccgaaaatcactggag

SEQ ID NO: 3550253 - DNA, 25 bp, Homo sapien
agcaagagtggtacccgaaaatcac

SEQ ID NO: 3550254 - DNA, 25 bp, Homo sapien
catggatcttattgcagaaggtgag

SEQ ID NO: 3550255 - DNA, 25 bp, Homo sapien
tggccaggtggcaacatctgtgcct

SEQ ID NO: 3550256 - DNA, 25 bp, Homo sapien
aaggcttcgggatgagtggccaggt

SEQ ID NO: 3550257 - DNA, 25 bp, Homo sapien
cataagggaaataacctgaaccagc

SEQ ID NO: 3550258 - DNA, 25 bp, Homo sapien
tagggaatagaagattcccctggtc

SEQ ID NO: 3550259 - DNA, 25 bp, Homo sapien
cagttttgcagccagaacttgggag

SEQ ID NO: 3550260 - DNA, 25 bp, Homo sapien
tctattttttcttccgtagttggca

SEQ ID NO: 3550261 - DNA, 25 bp, Homo sapien
ttttcttccgtagttggcaacacca

SEQ ID NO: 3550262 - DNA, 25 bp, Homo sapien
tgtacttttaagagctaaatctatt

SEQ ID NO: 3550263 - DNA, 25 bp, Homo sapien
ccttcttttccttcttgttcttcat

SEQ ID NO: 3550264 - DNA, 25 bp, Homo sapien
tccttcttttccttcttgttcttca

SEQ ID NO: 3550265 - DNA, 25 bp, Homo sapien
tcttccacttgcgaaataattatta

SEQ ID NO: 3550266 - DNA, 25 bp, Homo sapien
tccacttgcgaaataattattatta

SEQ ID NO: 3550267 - DNA, 25 bp, Homo sapien
tcagttcttccacttgcgaaataat

SEQ ID NO: 3550268 - DNA, 25 bp, Homo sapien
gttcttccacttgcgaaataattat

SEQ ID NO: 3550269 - DNA, 25 bp, Homo sapien
tcgactcccattctgactcaagcaa

SEQ ID NO: 3550270 - DNA, 25 bp, Homo sapien
tgtttctgcaccttgtcccatcaga

SEQ ID NO: 3550271 - DNA, 25 bp, Homo sapien
tcaaccctgtaatttagtaacactc

SEQ ID NO: 3550272 - DNA, 25 bp, Homo sapien
ttctgttggctgttccaatctctct

SEQ ID NO: 3550273 - DNA, 25 bp, Homo sapien
tatctggcctttgcatggagtgacc

SEQ ID NO: 3550274 - DNA, 25 bp, Homo sapien
agagttaccacaccccatgagggaa

SEQ ID NO: 3550275 - DNA, 25 bp, Homo sapien
catgagggaagctctaaatagccaa

SEQ ID NO: 3550276 - DNA, 25 bp, Homo sapien
catagcttccaagagacatgctgac

SEQ ID NO: 3550277 - DNA, 25 bp, Homo sapien
tatcgttcttgtcattgatgctgca

SEQ ID NO: 3550278 - DNA, 25 bp, Homo sapien
tgcacctcagagatttgttgctact

SEQ ID NO: 3550279 - DNA, 25 bp, Homo sapien
tcatggagcagtatcgttcttgtca

SEQ ID NO: 3550280 - DNA, 25 bp, Homo sapien
gctactgtattggctgttgtggttg

SEQ ID NO: 3550281 - DNA, 25 bp, Homo sapien
gtctctctcccttcacatcctcccc

SEQ ID NO: 3550282 - DNA, 25 bp, Homo sapien
tttttagcttcctgtctctctccct

SEQ ID NO: 3550283 - DNA, 25 bp, Homo sapien
tgtctctctcccttcacatcctccc

SEQ ID NO: 3550284 - DNA, 25 bp, Homo sapien
ctcctttttagcttcctgtctctct

SEQ ID NO: 3550285 - DNA, 25 bp, Homo sapien
cttagagaaattggagaggcaatat

SEQ ID NO: 3550286 - DNA, 25 bp, Homo sapien
tggtgacagaagagatccaatgaat

SEQ ID NO: 3550287 - DNA, 25 bp, Homo sapien
aaatcttagagaaattggagaggca

SEQ ID NO: 3550288 - DNA, 25 bp, Homo sapien
aagagggtatgactaaaatcttaga

SEQ ID NO: 3550289 - DNA, 25 bp, Homo sapien
tcatatagcattgtctttggctttc

SEQ ID NO: 3550290 - DNA, 25 bp, Homo sapien
catatagcattgtctttggctttca

SEQ ID NO: 3550291 - DNA, 25 bp, Homo sapien
tatagcattgtctttggctttcaat

SEQ ID NO: 3550292 - DNA, 25 bp, Homo sapien
atatagcattgtctttggctttcaa

SEQ ID NO: 3550293 - DNA, 25 bp, Homo sapien
acagccccgctcttggacgttagaa

SEQ ID NO: 3550294 - DNA, 25 bp, Homo sapien
ggatccctggttggatttgcactgg

SEQ ID NO: 3550295 - DNA, 25 bp, Homo sapien
gaggaagttgactgccagatcacac

SEQ ID NO: 3550296 - DNA, 25 bp, Homo sapien
ccacgcgtgagtgtagggatccctg

SEQ ID NO: 3550297 - DNA, 25 bp, Homo sapien
ccacaatagcgaagtcatagagata

SEQ ID NO: 3550298 - DNA, 25 bp, Homo sapien
aaaatggtgtccacaatagcgaagt

SEQ ID NO: 3550299 - DNA, 25 bp, Homo sapien
ggtgtccacaatagcgaagtcatag

SEQ ID NO: 3550300 - DNA, 25 bp, Homo sapien
tcatagagataatttgtggctgcca

SEQ ID NO: 3550301 - DNA, 25 bp, Homo sapien
aaaaagaaggcatggtataggagcc

SEQ ID NO: 3550302 - DNA, 25 bp, Homo sapien
agaaggcatggtataggagcctgca

SEQ ID NO: 3550303 - DNA, 25 bp, Homo sapien
ttaaaaagaaggcatggtataggag

SEQ ID NO: 3550304 - DNA, 25 bp, Homo sapien
aaagaaggcatggtataggagcctg

SEQ ID NO: 3550305 - DNA, 25 bp, Homo sapien
ggcacacggttgacacttcataagc

SEQ ID NO: 3550306 - DNA, 25 bp, Homo sapien
gtccactgcgagagacaggcacaag

SEQ ID NO: 3550307 - DNA, 25 bp, Homo sapien
tccctagagatcctatggaccaagt

SEQ ID NO: 3550308 - DNA, 25 bp, Homo sapien
cagctgtgatgcatactcagtaaac

SEQ ID NO: 3550309 - DNA, 25 bp, Homo sapien
gaggcatttctttggtacctactgc

SEQ ID NO: 3550310 - DNA, 25 bp, Homo sapien
cctgggtattcttgggtaacagcaa

SEQ ID NO: 3550311 - DNA, 25 bp, Homo sapien
tgaaactcgcttcccagatacactg

SEQ ID NO: 3550312 - DNA, 25 bp, Homo sapien
cactggaagactccatactcctggg

SEQ ID NO: 3550313 - DNA, 25 bp, Homo sapien
gagtgtttgttgtcatcccgccaaa

SEQ ID NO: 3550314 - DNA, 25 bp, Homo sapien
aggctctctgagcacgatgtctgca

SEQ ID NO: 3550315 - DNA, 25 bp, Homo sapien
cagctcccgccagcaatggagtgtt

SEQ ID NO: 3550316 - DNA, 25 bp, Homo sapien
tgagcacgatgtctgcagctcccgc

SEQ ID NO: 3550317 - DNA, 25 bp, Homo sapien
cactggatcgggggggtcactggat

SEQ ID NO: 3550318 - DNA, 25 bp, Homo sapien
ctggaggttgctggatctggggttt

SEQ ID NO: 3550319 - DNA, 25 bp, Homo sapien
gtcactggatctggggtcataggat

SEQ ID NO: 3550320 - DNA, 25 bp, Homo sapien
aaggaagagcccaaggcgggatcta

SEQ ID NO: 3550321 - DNA, 25 bp, Homo sapien
ggctgcagggttaaactctgagcgt

SEQ ID NO: 3550322 - DNA, 25 bp, Homo sapien
tgagcaccaggactcggttttaatt

SEQ ID NO: 3550323 - DNA, 25 bp, Homo sapien
ctgagcgtaaatagacctcagtgag

SEQ ID NO: 3550324 - DNA, 25 bp, Homo sapien
agtgagcaccaggactcggttttaa

SEQ ID NO: 3550325 - DNA, 25 bp, Homo sapien
aatgttgtaaagatgtgctgatttc

SEQ ID NO: 3550326 - DNA, 25 bp, Homo sapien
tccggcagcgcaagagggcaaagca

SEQ ID NO: 3550327 - DNA, 25 bp, Homo sapien
gcaaagcacagctggaagctcagag

SEQ ID NO: 3550328 - DNA, 25 bp, Homo sapien
ggagggagaagatccaaagtcgaat

SEQ ID NO: 3550329 - DNA, 25 bp, Homo sapien
cactaggaggatttgcacttggcaa

SEQ ID NO: 3550330 - DNA, 25 bp, Homo sapien
gatggttgtgcagtttacccagcag

SEQ ID NO: 3550331 - DNA, 25 bp, Homo sapien
tgcaaagctcttggatctgaaggca

SEQ ID NO: 3550332 - DNA, 25 bp, Homo sapien
gaatgatgcttaacccgagaggacg

SEQ ID NO: 3550333 - DNA, 25 bp, Homo sapien
agaggttccacgtcttgtctggggt

SEQ ID NO: 3550334 - DNA, 25 bp, Homo sapien
gggtctgctcgaagttgacgtgact

SEQ ID NO: 3550335 - DNA, 25 bp, Homo sapien
cacgtcttgtctggggtctgctcga

SEQ ID NO: 3550336 - DNA, 25 bp, Homo sapien
tgctcgaagttgacgtgactgggtt

SEQ ID NO: 3550337 - DNA, 25 bp, Homo sapien
agtgctcttggaacactccagccat

SEQ ID NO: 3550338 - DNA, 25 bp, Homo sapien
cagtgctcttggaacactccagcca

SEQ ID NO: 3550339 - DNA, 25 bp, Homo sapien
aatttgaaaccaaggagtgtagtag

SEQ ID NO: 3550340 - DNA, 25 bp, Homo sapien
tgtagtagctgcatccactcatcct

SEQ ID NO: 3550341 - DNA, 25 bp, Homo sapien
tttgatctgattgcatagtgtcagc

SEQ ID NO: 3550342 - DNA, 25 bp, Homo sapien
tcaatgagagcaatgaggcagtttc

SEQ ID NO: 3550343 - DNA, 25 bp, Homo sapien
acgaaacgatgggaggagcggagcc

SEQ ID NO: 3550344 - DNA, 25 bp, Homo sapien
tgccgttgagcacgaaacgatggga

SEQ ID NO: 3550345 - DNA, 25 bp, Homo sapien
cttgccgttgagcacgaaacgatgg

SEQ ID NO: 3550346 - DNA, 25 bp, Homo sapien
ttgagggtgaggtcaaagtgctgct

SEQ ID NO: 3550347 - DNA, 25 bp, Homo sapien
cactggacctagcttgccttactgg

SEQ ID NO: 3550348 - DNA, 25 bp, Homo sapien
tggatcaggaagctgtccacctgcc

SEQ ID NO: 3550349 - DNA, 25 bp, Homo sapien
attggtttcagaattcaggctgccc

SEQ ID NO: 3550350 - DNA, 25 bp, Homo sapien
tcttggtaaaccgtcctttgcagtg

SEQ ID NO: 3550351 - DNA, 25 bp, Homo sapien
gagttagcatcctgtccatgaaagc

SEQ ID NO: 3550352 - DNA, 25 bp, Homo sapien
tcagatgtcacacggcaggctgggt

SEQ ID NO: 3550353 - DNA, 25 bp, Homo sapien
taacatagcaggaccatagcaggac

SEQ ID NO: 3550354 - DNA, 25 bp, Homo sapien
tgaaagccaggtggaagctcatagc

SEQ ID NO: 3550355 - DNA, 25 bp, Homo sapien
gtgtttattatctgtgcccccaaga

SEQ ID NO: 3550356 - DNA, 25 bp, Homo sapien
cgtaagatccactaaggcagggacc

SEQ ID NO: 3550357 - DNA, 25 bp, Homo sapien
ccccaagatgccgtaagatccacta

SEQ ID NO: 3550358 - DNA, 25 bp, Homo sapien
ggcagggaccatgattgccctcttc

SEQ ID NO: 3550359 - DNA, 25 bp, Homo sapien
tacacctggagtcgcctcaaagaca

SEQ ID NO: 3550360 - DNA, 25 bp, Homo sapien
agtacagtcctgaatccccacgatg

SEQ ID NO: 3550361 - DNA, 25 bp, Homo sapien
tcacctcagtttcgcggacgagacg

SEQ ID NO: 3550362 - DNA, 25 bp, Homo sapien
gatgtcagccgaagccaagtgagga

SEQ ID NO: 3550363 - DNA, 25 bp, Homo sapien
tctcccagatgcttcaggacaagcc

SEQ ID NO: 3550364 - DNA, 25 bp, Homo sapien
ccagatgcttcaggacaagcccctg

SEQ ID NO: 3550365 - DNA, 25 bp, Homo sapien
tcccagatgcttcaggacaagcccc

SEQ ID NO: 3550366 - DNA, 25 bp, Homo sapien
cagatgcttcaggacaagcccctgc

SEQ ID NO: 3550367 - DNA, 25 bp, Homo sapien
gaccctgtggtcgttagccctgaaa

SEQ ID NO: 3550368 - DNA, 25 bp, Homo sapien
gatactttcgcgtgtgagtgccgcc

SEQ ID NO: 3550369 - DNA, 25 bp, Homo sapien
tgattagccccaggtttcccgagtg

SEQ ID NO: 3550370 - DNA, 25 bp, Homo sapien
ggatatcgaattgaaccgcggcacc

SEQ ID NO: 3550371 - DNA, 25 bp, Homo sapien
aggtgctgctcagcgcccggttcag

SEQ ID NO: 3550372 - DNA, 25 bp, Homo sapien
ctaactcgaggtgctgctcagcgcc

SEQ ID NO: 3550373 - DNA, 25 bp, Homo sapien
ccgtctgcggggacgctgcgcagct

SEQ ID NO: 3550374 - DNA, 25 bp, Homo sapien
gcagagagctaaaggggaggccgag

SEQ ID NO: 3550375 - DNA, 25 bp, Homo sapien
tgtagtagcacataatgcgcccgtc

SEQ ID NO: 3550376 - DNA, 25 bp, Homo sapien
aatagggcaccgtgttgagcaccgc

SEQ ID NO: 3550377 - DNA, 25 bp, Homo sapien
accgggttggccacgctgttgaaga

SEQ ID NO: 3550378 - DNA, 25 bp, Homo sapien
cagtttgcagaaggtggtgcccagc

SEQ ID NO: 3550379 - DNA, 25 bp, Homo sapien
tggaggcagtcagctcctgacagca

SEQ ID NO: 3550380 - DNA, 25 bp, Homo sapien
cagccctggaggcagtcagctcctg

SEQ ID NO: 3550381 - DNA, 25 bp, Homo sapien
ggagcacaggattccagccctggag

SEQ ID NO: 3550382 - DNA, 25 bp, Homo sapien
ggcacagagggagcacaggattcca

SEQ ID NO: 3550383 - DNA, 25 bp, Homo sapien
cagcgggcagacagaggtgggagag

SEQ ID NO: 3550384 - DNA, 25 bp, Homo sapien
gcagcgggcagacagaggtgggaga

SEQ ID NO: 3550385 - DNA, 25 bp, Homo sapien
ctagacaagaggcagcgggcagaca

SEQ ID NO: 3550386 - DNA, 25 bp, Homo sapien
gaggcagcgggcagacagaggtggg

SEQ ID NO: 3550387 - DNA, 25 bp, Homo sapien
ctggcacacgggacctctgctgcat

SEQ ID NO: 3550388 - DNA, 25 bp, Homo sapien
cctggcacacgggacctctgctgca

SEQ ID NO: 3550389 - DNA, 25 bp, Homo sapien
tggcacacgggacctctgctgcatc

SEQ ID NO: 3550390 - DNA, 25 bp, Homo sapien
ttcctggcacacgggacctctgctg

SEQ ID NO: 3550391 - DNA, 25 bp, Homo sapien
ttgagttccctggtgccaccatcac

SEQ ID NO: 3550392 - DNA, 25 bp, Homo sapien
aggcccaggttgagttccctggtgc

SEQ ID NO: 3550393 - DNA, 25 bp, Homo sapien
ctggtgccaccatcacccacaggac

SEQ ID NO: 3550394 - DNA, 25 bp, Homo sapien
ccaggttgagttccctggtgccacc

SEQ ID NO: 3550395 - DNA, 25 bp, Homo sapien
ggcttcccggaagccagtgtcccag

SEQ ID NO: 3550396 - DNA, 25 bp, Homo sapien
ccaggtgctcctggtgcagacagac

SEQ ID NO: 3550397 - DNA, 25 bp, Homo sapien
tgtgtgctccctccccttgaccttc

SEQ ID NO: 3550398 - DNA, 25 bp, Homo sapien
aggaagatgggcttcccggaagcca

SEQ ID NO: 3550399 - DNA, 25 bp, Homo sapien
tcactgcttacaaaaccctgcacaa

SEQ ID NO: 3550400 - DNA, 25 bp, Homo sapien
tttttaatgaaactagatcactgct

SEQ ID NO: 3550401 - DNA, 25 bp, Homo sapien
aactagatcactgcttacaaaaccc

SEQ ID NO: 3550402 - DNA, 25 bp, Homo sapien
taatgaaactagatcactgcttaca

SEQ ID NO: 3550403 - DNA, 25 bp, Homo sapien
ccctctactgagatgaggcccagct

SEQ ID NO: 3550404 - DNA, 25 bp, Homo sapien
tgatgtgaatgtcccaccccacaga

SEQ ID NO: 3550405 - DNA, 25 bp, Homo sapien
agcctctcctgtctcacaggaactg

SEQ ID NO: 3550406 - DNA, 25 bp, Homo sapien
tccattgaacgacaggaagggagag

SEQ ID NO: 3550407 - DNA, 25 bp, Homo sapien
gcttctgtccatgcctgttgaagcg

SEQ ID NO: 3550408 - DNA, 25 bp, Homo sapien
gtgatgcccgaaggccacccctgtg

SEQ ID NO: 3550409 - DNA, 25 bp, Homo sapien
cctgttgaagcgatgaacttggcgt

SEQ ID NO: 3550410 - DNA, 25 bp, Homo sapien
aacttggcgtgatgcccgaaggcca

SEQ ID NO: 3550411 - DNA, 25 bp, Homo sapien
catgcaagccctagaaattcctaac

SEQ ID NO: 3550412 - DNA, 25 bp, Homo sapien
tcaaaacttcagagggacttttctc

SEQ ID NO: 3550413 - DNA, 25 bp, Homo sapien
tggcagaacaagcactagcatctac

SEQ ID NO: 3550414 - DNA, 25 bp, Homo sapien
gcttccttagtcataaagctctgcc

SEQ ID NO: 3550415 - DNA, 25 bp, Homo sapien
gcagatgtagatctggacatccgtg

SEQ ID NO: 3550416 - DNA, 25 bp, Homo sapien
tctccgtccattgtttgcagatgta

SEQ ID NO: 3550417 - DNA, 25 bp, Homo sapien
atgtagatctggacatccgtgcccc

SEQ ID NO: 3550418 - DNA, 25 bp, Homo sapien
tccgtccattgtttgcagatgtaga

SEQ ID NO: 3550419 - DNA, 25 bp, Homo sapien
tcagccgctgtagccaggtagtaac

SEQ ID NO: 3550420 - DNA, 25 bp, Homo sapien
ttgacagaggagtcatcagccgctg

SEQ ID NO: 3550421 - DNA, 25 bp, Homo sapien
caaagttgttatccagctgcaaagt

SEQ ID NO: 3550422 - DNA, 25 bp, Homo sapien
gttcttaagcttgcgcagatcccag

SEQ ID NO: 3550423 - DNA, 25 bp, Homo sapien
tacagtggcggtgggtagtaaaata

SEQ ID NO: 3550424 - DNA, 25 bp, Homo sapien
tacctgagatgtccctcacgtcctt

SEQ ID NO: 3550425 - DNA, 25 bp, Homo sapien
gggctcaccaaactcctacctgaga

SEQ ID NO: 3550426 - DNA, 25 bp, Homo sapien
taaaatacgtcacccacagatcatg

SEQ ID NO: 3550427 - DNA, 25 bp, Homo sapien
ccagatcttgatctgagagtccatg

SEQ ID NO: 3550428 - DNA, 25 bp, Homo sapien
atcttgatctgagagtccatggttc

SEQ ID NO: 3550429 - DNA, 25 bp, Homo sapien
cagatcttgatctgagagtccatgg

SEQ ID NO: 3550430 - DNA, 25 bp, Homo sapien
gtcccagatcttgatctgagagtcc

SEQ ID NO: 3550431 - DNA, 25 bp, Homo sapien
ttccaaagatgagtccgtcagggtg

SEQ ID NO: 3550432 - DNA, 25 bp, Homo sapien
ccaaagatgagtccgtcagggtgga

SEQ ID NO: 3550433 - DNA, 25 bp, Homo sapien
ctgttccaaagatgagtccgtcagg

SEQ ID NO: 3550434 - DNA, 25 bp, Homo sapien
aagatgagtccgtcagggtggaact

SEQ ID NO: 3550435 - DNA, 25 bp, Homo sapien
tcaccttggtgagcacacgccctgt

SEQ ID NO: 3550436 - DNA, 25 bp, Homo sapien
cacgccctgtctggatgtcagagaa

SEQ ID NO: 3550437 - DNA, 25 bp, Homo sapien
tgagcacacgccctgtctggatgtc

SEQ ID NO: 3550438 - DNA, 25 bp, Homo sapien
ttggtgagcacacgccctgtctgga

SEQ ID NO: 3550439 - DNA, 25 bp, Homo sapien
gatagtcgccagtggcatgaaggct

SEQ ID NO: 3550440 - DNA, 25 bp, Homo sapien
aggagctcaggagatagtcgccagt

SEQ ID NO: 3550441 - DNA, 25 bp, Homo sapien
gcccgaaccacctgtacacaagagg

SEQ ID NO: 3550442 - DNA, 25 bp, Homo sapien
accaaatcctgatagtggcatcggg

SEQ ID NO: 3550443 - DNA, 25 bp, Homo sapien
cacaacgacatttttatccgcccca

SEQ ID NO: 3550444 - DNA, 25 bp, Homo sapien
ctgggaagggtgaaacaccacgctg

SEQ ID NO: 3550445 - DNA, 25 bp, Homo sapien
gaagggtgaaacaccacgctggtga

SEQ ID NO: 3550446 - DNA, 25 bp, Homo sapien
tcaaacacaacgacatttttatccg

SEQ ID NO: 3550447 - DNA, 25 bp, Homo sapien
tgttggtgtcggacgggcagaggtc

SEQ ID NO: 3550448 - DNA, 25 bp, Homo sapien
gttggtgtcggacgggcagaggtcc

SEQ ID NO: 3550449 - DNA, 25 bp, Homo sapien
cttgttggtgtcggacgggcagagg

SEQ ID NO: 3550450 - DNA, 25 bp, Homo sapien
ggtgtcggacgggcagaggtccagg

SEQ ID NO: 3550451 - DNA, 25 bp, Homo sapien
cggtatttgctgagctcttctggct

SEQ ID NO: 3550452 - DNA, 25 bp, Homo sapien
ccggtatttgctgagctcttctggc

SEQ ID NO: 3550453 - DNA, 25 bp, Homo sapien
ctgccggtatttgctgagctcttct

SEQ ID NO: 3550454 - DNA, 25 bp, Homo sapien
tcttgcgctccgtggttagcacagt

SEQ ID NO: 3550455 - DNA, 25 bp, Homo sapien
ttcttgcgctccgtggttagcacag

SEQ ID NO: 3550456 - DNA, 25 bp, Homo sapien
gcgctccgtggttagcacagtggct

SEQ ID NO: 3550457 - DNA, 25 bp, Homo sapien
ttgcgctccgtggttagcacagtgg

SEQ ID NO: 3550458 - DNA, 25 bp, Homo sapien
acccaaatccattggctcacccgca

SEQ ID NO: 3550459 - DNA, 25 bp, Homo sapien
caccagctcacccaaatccattggc

SEQ ID NO: 3550460 - DNA, 25 bp, Homo sapien
tctggggtcattcccaccagctcac

SEQ ID NO: 3550461 - DNA, 25 bp, Homo sapien
gtcattcccaccagctcacccaaat

SEQ ID NO: 3550462 - DNA, 25 bp, Homo sapien
cctggggcacaatgaggccagcctg

SEQ ID NO: 3550463 - DNA, 25 bp, Homo sapien
gcctgtggtttcagggtagccagag

SEQ ID NO: 3550464 - DNA, 25 bp, Homo sapien
ctggggcacaatgaggccagcctgt

SEQ ID NO: 3550465 - DNA, 25 bp, Homo sapien
ggggatggcaggggagaggctgcac

SEQ ID NO: 3550466 - DNA, 25 bp, Homo sapien
gcagaaccagcccagggtgggggat

SEQ ID NO: 3550467 - DNA, 25 bp, Homo sapien
aatgcagaaccagcccagggtgggg

SEQ ID NO: 3550468 - DNA, 25 bp, Homo sapien
ggtgggggatggcaggggagaggct

SEQ ID NO: 3550469 - DNA, 25 bp, Homo sapien
catcgtgctggtacagagcgtgtga

SEQ ID NO: 3550470 - DNA, 25 bp, Homo sapien
aatgacacggcaggcggcatcgtgc

SEQ ID NO: 3550471 - DNA, 25 bp, Homo sapien
tgtgacagctcttggcgggttgtct

SEQ ID NO: 3550472 - DNA, 25 bp, Homo sapien
cagtgacttccttggtgagacgggc

SEQ ID NO: 3550473 - DNA, 25 bp, Homo sapien
gaggcttgggccggattgggtgagc

SEQ ID NO: 3550474 - DNA, 25 bp, Homo sapien
aggcttgggccggattgggtgagca

SEQ ID NO: 3550475 - DNA, 25 bp, Homo sapien
gggaggcttgggccggattgggtga

SEQ ID NO: 3550476 - DNA, 25 bp, Homo sapien
ggcttgggccggattgggtgagcaa

SEQ ID NO: 3550477 - DNA, 25 bp, Homo sapien
ccgcaatgtacttctcgatgagccg

SEQ ID NO: 3550478 - DNA, 25 bp, Homo sapien
gagccgccgctcataaacatgatta

SEQ ID NO: 3550479 - DNA, 25 bp, Homo sapien
ggatacacatgggtgctccggcact

SEQ ID NO: 3550480 - DNA, 25 bp, Homo sapien
gggtcggtaccattctccgcaatgt

SEQ ID NO: 3550481 - DNA, 25 bp, Homo sapien
ctgtagagaaaaggctggtagtgag

SEQ ID NO: 3550482 - DNA, 25 bp, Homo sapien
taatttcttcaaagtgagggattcc

SEQ ID NO: 3550483 - DNA, 25 bp, Homo sapien
tttgcgagctgtaatttcttcaaag

SEQ ID NO: 3550484 - DNA, 25 bp, Homo sapien
cccctctttggatcaatgtacaggt

SEQ ID NO: 3550485 - DNA, 25 bp, Homo sapien
ttcaaagtgagggattccttttcca

SEQ ID NO: 3550486 - DNA, 25 bp, Homo sapien
ccgctcggcctccggagcgccccat

SEQ ID NO: 3550487 - DNA, 25 bp, Homo sapien
aggccgccgctcggcctccggagcg

SEQ ID NO: 3550488 - DNA, 25 bp, Homo sapien
gccgctcggcctccggagcgcccca

SEQ ID NO: 3550489 - DNA, 25 bp, Homo sapien
ccgccgctcggcctccggagcgccc

SEQ ID NO: 3550490 - DNA, 25 bp, Homo sapien
ggactagcttctgagcctccgcgag

SEQ ID NO: 3550491 - DNA, 25 bp, Homo sapien
cgccagccgagcgatgctagcgtag

SEQ ID NO: 3550492 - DNA, 25 bp, Homo sapien
tagcgtagcgcttcacgtgggaatg

SEQ ID NO: 3550493 - DNA, 25 bp, Homo sapien
gccgggctccgggactagcttctga

SEQ ID NO: 3550494 - DNA, 25 bp, Homo sapien
gacaggccggtatgtagtcttccct

SEQ ID NO: 3550495 - DNA, 25 bp, Homo sapien
gttacgccttaagctgtccctctga

SEQ ID NO: 3550496 - DNA, 25 bp, Homo sapien
agtcttcccttgaagtccagctatc

SEQ ID NO: 3550497 - DNA, 25 bp, Homo sapien
gtccagctatctccagccagattcg

SEQ ID NO: 3550498 - DNA, 25 bp, Homo sapien
tttccagccagagacttccgttccc

SEQ ID NO: 3550499 - DNA, 25 bp, Homo sapien
agccagagacttccgttccctgctg

SEQ ID NO: 3550500 - DNA, 25 bp, Homo sapien
ctctacagcccagatatagtcactt

SEQ ID NO: 3550501 - DNA, 25 bp, Homo sapien
tacagcccagatatagtcacttatt

SEQ ID NO: 3550502 - DNA, 25 bp, Homo sapien
tcatcccgccttgcgcatgcggaga

SEQ ID NO: 3550503 - DNA, 25 bp, Homo sapien
ccggcacaggcttcgattgtgagga

SEQ ID NO: 3550504 - DNA, 25 bp, Homo sapien
aaggccggctagtctccgagctcat

SEQ ID NO: 3550505 - DNA, 25 bp, Homo sapien
catgcggagaaggtaaaccagcgcc

SEQ ID NO: 3550506 - DNA, 25 bp, Homo sapien
cacagacatcagtacttgggaagct

SEQ ID NO: 3550507 - DNA, 25 bp, Homo sapien
ggataaaagccacctcacatgatgg

SEQ ID NO: 3550508 - DNA, 25 bp, Homo sapien
gcttttgcagatccaaggctaggcc

SEQ ID NO: 3550509 - DNA, 25 bp, Homo sapien
gccatggttgagacccacagtataa

SEQ ID NO: 3550510 - DNA, 25 bp, Homo sapien
ttgcggccctgtcttctgaggttct

SEQ ID NO: 3550511 - DNA, 25 bp, Homo sapien
ggcttctgcatctgcgccagcaaac

SEQ ID NO: 3550512 - DNA, 25 bp, Homo sapien
cagaacattgatccttgccgcagcc

SEQ ID NO: 3550513 - DNA, 25 bp, Homo sapien
tgccttggcttcctcctaatgctcg

SEQ ID NO: 3550514 - DNA, 25 bp, Homo sapien
gaggtggatgtccttctctgccagg

SEQ ID NO: 3550515 - DNA, 25 bp, Homo sapien
cgagaaggagttgctgaccagtgcc

SEQ ID NO: 3550516 - DNA, 25 bp, Homo sapien
cacatgatgtgaagaataaatgccc

SEQ ID NO: 3550517 - DNA, 25 bp, Homo sapien
aaatgcccaattcttactgttcagg

SEQ ID NO: 3550518 - DNA, 25 bp, Homo sapien
ccagaacctttgagaggattcctgt

SEQ ID NO: 3550519 - DNA, 25 bp, Homo sapien
gagaggattcctgtcactgcgggaa

SEQ ID NO: 3550520 - DNA, 25 bp, Homo sapien
ctgtcactgcgggaaagggcagcaa

SEQ ID NO: 3550521 - DNA, 25 bp, Homo sapien
cttgccttccagaacctttgagagg

SEQ ID NO: 3550522 - DNA, 25 bp, Homo sapien
cgcccgcgtgctggactcgcgtgta

SEQ ID NO: 3550523 - DNA, 25 bp, Homo sapien
gagggtggccgtgtcgtggtgggcc

SEQ ID NO: 3550524 - DNA, 25 bp, Homo sapien
tcgtggcgccacacgcccgcgtgct

SEQ ID NO: 3550525 - DNA, 25 bp, Homo sapien
ggactcgcgtgtagcctctctggag

SEQ ID NO: 3550526 - DNA, 25 bp, Homo sapien
ggagtcttctgcgtggccatcttca

SEQ ID NO: 3550527 - DNA, 25 bp, Homo sapien
tggtcttcgtcctgcgctatcagcg

SEQ ID NO: 3550528 - DNA, 25 bp, Homo sapien
tagagctgggcatgtacgccctgct

SEQ ID NO: 3550529 - DNA, 25 bp, Homo sapien
tcaatggtgtggtcttcgtcctgcg

SEQ ID NO: 3550530 - DNA, 25 bp, Homo sapien
ggagcttcgcaactacatggagagg

SEQ ID NO: 3550531 - DNA, 25 bp, Homo sapien
cggaagcgagtagagtttgtgacat

SEQ ID NO: 3550532 - DNA, 25 bp, Homo sapien
cagtccatccttgtggcaggcgagg

SEQ ID NO: 3550533 - DNA, 25 bp, Homo sapien
agtttgtgacatttgcgccagcccc

SEQ ID NO: 3550534 - DNA, 25 bp, Homo sapien
ccgtctgtccggtagagtgaagcaa

SEQ ID NO: 3550535 - DNA, 25 bp, Homo sapien
gggctcatgccccttatttatggga

SEQ ID NO: 3550536 - DNA, 25 bp, Homo sapien
tctaacagaataaaccgagaaggaa

SEQ ID NO: 3550537 - DNA, 25 bp, Homo sapien
tgggaaccatttcattctaacagaa

SEQ ID NO: 3550538 - DNA, 25 bp, Homo sapien
tgggacgccctctcatagcgtccag

SEQ ID NO: 3550539 - DNA, 25 bp, Homo sapien
cccctgtccctgctgaaacggctgt

SEQ ID NO: 3550540 - DNA, 25 bp, Homo sapien
tgtccctgctgaaacggctgtggga

SEQ ID NO: 3550541 - DNA, 25 bp, Homo sapien
ctgggacgccctctcatagcgtcca

SEQ ID NO: 3550542 - DNA, 25 bp, Homo sapien
ccagacaaataggagagccgtgacg

SEQ ID NO: 3550543 - DNA, 25 bp, Homo sapien
agccgtgacggcctgaatgccagcc

SEQ ID NO: 3550544 - DNA, 25 bp, Homo sapien
tccatccggcaattgttgatgttcc

SEQ ID NO: 3550545 - DNA, 25 bp, Homo sapien
aggaagaagtagaggtccatccggc

SEQ ID NO: 3550546 - DNA, 25 bp, Homo sapien
tgaagatctccaggggtgtctacaa

SEQ ID NO: 3550547 - DNA, 25 bp, Homo sapien
aggggtgtctacaattcctcttcag

SEQ ID NO: 3550548 - DNA, 25 bp, Homo sapien
gatctccaggggtgtctacaattcc

SEQ ID NO: 3550549 - DNA, 25 bp, Homo sapien
tccaggggtgtctacaattcctctt

SEQ ID NO: 3550550 - DNA, 25 bp, Homo sapien
cagaaaggagccttggaggtccact

SEQ ID NO: 3550551 - DNA, 25 bp, Homo sapien
gaggtccactaagttcaacacttgg

SEQ ID NO: 3550552 - DNA, 25 bp, Homo sapien
gtgactggccaagcccgggctagaa

SEQ ID NO: 3550553 - DNA, 25 bp, Homo sapien
cccagagtcaaagcactttagcagt

SEQ ID NO: 3550554 - DNA, 25 bp, Homo sapien
cagtgccactaggctggagcccaac

SEQ ID NO: 3550555 - DNA, 25 bp, Homo sapien
agcccccgggcaaggacagcagtgc

SEQ ID NO: 3550556 - DNA, 25 bp, Homo sapien
ccacccccgacaggcagaagaagat

SEQ ID NO: 3550557 - DNA, 25 bp, Homo sapien
tgccactaggctggagcccaacagt

SEQ ID NO: 3550558 - DNA, 25 bp, Homo sapien
agaaatcccaaggtgcaggctcagc

SEQ ID NO: 3550559 - DNA, 25 bp, Homo sapien
tggatgcctgtccactcagtggcaa

SEQ ID NO: 3550560 - DNA, 25 bp, Homo sapien
ggcgctgttgccttcaggagaaatc

SEQ ID NO: 3550561 - DNA, 25 bp, Homo sapien
gccaggtctatcatttcagtgacag

SEQ ID NO: 3550562 - DNA, 25 bp, Homo sapien
cagtggtgccgcgttgtacaggacc

SEQ ID NO: 3550563 - DNA, 25 bp, Homo sapien
gatcccaatgagcaggtactgaggg

SEQ ID NO: 3550564 - DNA, 25 bp, Homo sapien
gatgtagtgtaagcgctccatctcc

SEQ ID NO: 3550565 - DNA, 25 bp, Homo sapien
acaggacctccccaatctgctggga

SEQ ID NO: 3550566 - DNA, 25 bp, Homo sapien
catgcatccttgctgcggaagaaag

SEQ ID NO: 3550567 - DNA, 25 bp, Homo sapien
gaggctgaacttggtccaggctacc

SEQ ID NO: 3550568 - DNA, 25 bp, Homo sapien
tcagttcccttactcaagaagcagg

SEQ ID NO: 3550569 - DNA, 25 bp, Homo sapien
ccagctcatacttgtgatccaggca

SEQ ID NO: 3550570 - DNA, 25 bp, Homo sapien
cacaatgacggaggtaaaaccaaag

SEQ ID NO: 3550571 - DNA, 25 bp, Homo sapien
gcttgcaccgcagcagtaaagggtc

SEQ ID NO: 3550572 - DNA, 25 bp, Homo sapien
gatcaagcggtccttcagagggacc

SEQ ID NO: 3550573 - DNA, 25 bp, Homo sapien
ctgccacaatgacggaggtaaaacc

SEQ ID NO: 3550574 - DNA, 25 bp, Homo sapien
gctgaactgggtgccgaacacatgc

SEQ ID NO: 3550575 - DNA, 25 bp, Homo sapien
gatctaggtatctaagggtcccaga

SEQ ID NO: 3550576 - DNA, 25 bp, Homo sapien
tgctcctcagctgtgtaaccaggga

SEQ ID NO: 3550577 - DNA, 25 bp, Homo sapien
aggatccctgcgctgtgacacaagt

SEQ ID NO: 3550578 - DNA, 25 bp, Homo sapien
agggccacagagatgttggccgggt

SEQ ID NO: 3550579 - DNA, 25 bp, Homo sapien
gtttgggatgtggaggtgaagaccc

SEQ ID NO: 3550580 - DNA, 25 bp, Homo sapien
ggccacagagatgttggccgggttg

SEQ ID NO: 3550581 - DNA, 25 bp, Homo sapien
tgggaaaatgtttgggatgtggagg

SEQ ID NO: 3550582 - DNA, 25 bp, Homo sapien
tgtgtgcccctaagtagcaggctgg

SEQ ID NO: 3550583 - DNA, 25 bp, Homo sapien
agtgcgtgcagccttatcccagagc

SEQ ID NO: 3550584 - DNA, 25 bp, Homo sapien
caagtcggacaatctgaatgcagca

SEQ ID NO: 3550585 - DNA, 25 bp, Homo sapien
tattcaaggacctagcctggcacaa

SEQ ID NO: 3550586 - DNA, 25 bp, Homo sapien
cagcacctggaagttggcgatgtcc

SEQ ID NO: 3550587 - DNA, 25 bp, Homo sapien
cgatgtcctcttgcggggaagcccc

SEQ ID NO: 3550588 - DNA, 25 bp, Homo sapien
agggtcaccatgacgggcaagatct

SEQ ID NO: 3550589 - DNA, 25 bp, Homo sapien
accatgacgggcaagatcttcacca

SEQ ID NO: 3550590 - DNA, 25 bp, Homo sapien
tcgtcggccagcacgcgggcacatt

SEQ ID NO: 3550591 - DNA, 25 bp, Homo sapien
cagcacgcgggcacattgacggtct

SEQ ID NO: 3550592 - DNA, 25 bp, Homo sapien
gggagacctctcgtcggccagcacg

SEQ ID NO: 3550593 - DNA, 25 bp, Homo sapien
ctggggagacctctcgtcggccagc

SEQ ID NO: 3550594 - DNA, 25 bp, Homo sapien
ctggccgagtgtcgttgccacagct

SEQ ID NO: 3550595 - DNA, 25 bp, Homo sapien
gttttggagagcgagcttaagcata

SEQ ID NO: 3550596 - DNA, 25 bp, Homo sapien
gagcgagcttaagcatagaggacac

SEQ ID NO: 3550597 - DNA, 25 bp, Homo sapien
tggccgagtgtcgttgccacagctg

SEQ ID NO: 3550598 - DNA, 25 bp, Homo sapien
gtggcgtcgcggccgagatccatca

SEQ ID NO: 3550599 - DNA, 25 bp, Homo sapien
acccaggttgatgctccagtaaaac

SEQ ID NO: 3550600 - DNA, 25 bp, Homo sapien
ctgatgttctgctgaataaacgcca

SEQ ID NO: 3550601 - DNA, 25 bp, Homo sapien
accagcagcgacagcacagcaccca

SEQ ID NO: 3550602 - DNA, 25 bp, Homo sapien
tgctgttgaggtacagcacgaggtt

SEQ ID NO: 3550603 - DNA, 25 bp, Homo sapien
gcctgctcgccggtccagttgaagt

SEQ ID NO: 3550604 - DNA, 25 bp, Homo sapien
gcatctctccgcagaaggagctgcg

SEQ ID NO: 3550605 - DNA, 25 bp, Homo sapien
ccaggaataccagcgcggcgcgcgt

SEQ ID NO: 3550606 - DNA, 25 bp, Homo sapien
tgtccctccgctcactacccggact

SEQ ID NO: 3550607 - DNA, 25 bp, Homo sapien
gttgtcccctctccttatgactcct

SEQ ID NO: 3550608 - DNA, 25 bp, Homo sapien
ctcctccctaattctcaactcccct

SEQ ID NO: 3550609 - DNA, 25 bp, Homo sapien
cactcttgttcacactgcgaccctc

SEQ ID NO: 3550610 - DNA, 25 bp, Homo sapien
cgcaattcggattgcacagaggctg

SEQ ID NO: 3550611 - DNA, 25 bp, Homo sapien
tcacagcgcaattcggattgcacag

SEQ ID NO: 3550612 - DNA, 25 bp, Homo sapien
cagcgcaattcggattgcacagagg

SEQ ID NO: 3550613 - DNA, 25 bp, Homo sapien
gcgcaattcggattgcacagaggct

SEQ ID NO: 3550614 - DNA, 25 bp, Homo sapien
gtgctggcctgccatcggtgatgtt

SEQ ID NO: 3550615 - DNA, 25 bp, Homo sapien
gcctgccatcggtgatgttcagcgg

SEQ ID NO: 3550616 - DNA, 25 bp, Homo sapien
agagctgagagagtgctggcctgcc

SEQ ID NO: 3550617 - DNA, 25 bp, Homo sapien
gatgttcagcgggtggtagatgaag

SEQ ID NO: 3550618 - DNA, 25 bp, Homo sapien
ctaacacagctactgttgagtgtga

SEQ ID NO: 3550619 - DNA, 25 bp, Homo sapien
tgcatctaacacagctactgttgag

SEQ ID NO: 3550620 - DNA, 25 bp, Homo sapien
catctaacacagctactgttgagtg

SEQ ID NO: 3550621 - DNA, 25 bp, Homo sapien
ctgtgcatctaacacagctactgtt

SEQ ID NO: 3550622 - DNA, 25 bp, Homo sapien
gttccagttttcgtatatgtaccgc

SEQ ID NO: 3550623 - DNA, 25 bp, Homo sapien
acctgtacaggggtcattctaatct

SEQ ID NO: 3550624 - DNA, 25 bp, Homo sapien
gaattcacgtgtcatacctgtacag

SEQ ID NO: 3550625 - DNA, 25 bp, Homo sapien
ttcgtatatgtaccgccgaagcttg

SEQ ID NO: 3550626 - DNA, 25 bp, Homo sapien
tctatggaacttttagtcacctgca

SEQ ID NO: 3550627 - DNA, 25 bp, Homo sapien
aggtagatgctaaagccttccctga

SEQ ID NO: 3550628 - DNA, 25 bp, Homo sapien
tcagcttttgcgctctaggtagatg

SEQ ID NO: 3550629 - DNA, 25 bp, Homo sapien
tgcgctctaggtagatgctaaagcc

SEQ ID NO: 3550630 - DNA, 25 bp, Homo sapien
ggctccgcctcttagtaactgtggc

SEQ ID NO: 3550631 - DNA, 25 bp, Homo sapien
gtcatttcatgctgcggagcctcag

SEQ ID NO: 3550632 - DNA, 25 bp, Homo sapien
cctcatggagatgaataagacggtg

SEQ ID NO: 3550633 - DNA, 25 bp, Homo sapien
cggtgcgtgctgtatacataaagct

SEQ ID NO: 3550634 - DNA, 25 bp, Homo sapien
gcactctgagccacgtagatccaca

SEQ ID NO: 3550635 - DNA, 25 bp, Homo sapien
acatggccattggccgctgtcagcc

SEQ ID NO: 3550636 - DNA, 25 bp, Homo sapien
tggcactctgagccacgtagatcca

SEQ ID NO: 3550637 - DNA, 25 bp, Homo sapien
gccattggccgctgtcagcccccag

SEQ ID NO: 3550638 - DNA, 25 bp, Homo sapien
taataccttgagtgtctagcctggc

SEQ ID NO: 3550639 - DNA, 25 bp, Homo sapien
taatagtgtctcctcacaaggtagc

SEQ ID NO: 3550640 - DNA, 25 bp, Homo sapien
cccctggaaaatcgctgagagctca

SEQ ID NO: 3550641 - DNA, 25 bp, Homo sapien
cattagtctgaacatccctggtgcc

SEQ ID NO: 3550642 - DNA, 25 bp, Homo sapien
gccccaccacttgcagagcagccct

SEQ ID NO: 3550643 - DNA, 25 bp, Homo sapien
cagccccaccacttgcagagcagcc

SEQ ID NO: 3550644 - DNA, 25 bp, Homo sapien
gtccctcctccaggttcctcaagca

SEQ ID NO: 3550645 - DNA, 25 bp, Homo sapien
agccctgtccctcctccaggttcct

SEQ ID NO: 3550646 - DNA, 25 bp, Homo sapien
catggctcaagaaatgctgcgggag

SEQ ID NO: 3550647 - DNA, 25 bp, Homo sapien
cagaaaaatcgttggcagggtgcat

SEQ ID NO: 3550648 - DNA, 25 bp, Homo sapien
tcagagagacaacattcgagtcagc

SEQ ID NO: 3550649 - DNA, 25 bp, Homo sapien
tgttttaatgaacccaatgcgtcct

SEQ ID NO: 3550650 - DNA, 25 bp, Homo sapien
tccacaagatcttgggcatttgcca

SEQ ID NO: 3550651 - DNA, 25 bp, Homo sapien
tattcatctttcacgtatttgcagg

SEQ ID NO: 3550652 - DNA, 25 bp, Homo sapien
tgggaattctaaaagagggacctga

SEQ ID NO: 3550653 - DNA, 25 bp, Homo sapien
cacactatagtaaggaggaagctgg

SEQ ID NO: 3550654 - DNA, 25 bp, Homo sapien
tttgccatgccctcgactctgttct

SEQ ID NO: 3550655 - DNA, 25 bp, Homo sapien
ggggctacttggtgctcccctgcta

SEQ ID NO: 3550656 - DNA, 25 bp, Homo sapien
tgagcactatgacttcagcgcccag

SEQ ID NO: 3550657 - DNA, 25 bp, Homo sapien
tctggctcggactcagactatgagc

SEQ ID NO: 3550658 - DNA, 25 bp, Homo sapien
gcgtgactatgtggtgttgcacccg

SEQ ID NO: 3550659 - DNA, 25 bp, Homo sapien
tgctccgggcggtaactgcacttgg

SEQ ID NO: 3550660 - DNA, 25 bp, Homo sapien
tgggcacaactagctgacaatgaca

SEQ ID NO: 3550661 - DNA, 25 bp, Homo sapien
acttgggcagggaatatagccttcc

SEQ ID NO: 3550662 - DNA, 25 bp, Homo sapien
ggagagactcggtacatgctagaga

SEQ ID NO: 3550663 - DNA, 25 bp, Homo sapien
tgcatcctgcgtgcagcaggagaga

SEQ ID NO: 3550664 - DNA, 25 bp, Homo sapien
acatgctagagatgtacagccccag

SEQ ID NO: 3550665 - DNA, 25 bp, Homo sapien
ctgaagactaggtgggtgcatcctg

SEQ ID NO: 3550666 - DNA, 25 bp, Homo sapien
tctggcaggtacttttcaaaaatgc

SEQ ID NO: 3550667 - DNA, 25 bp, Homo sapien
acaaagactcaaaaactgtttcaga

SEQ ID NO: 3550668 - DNA, 25 bp, Homo sapien
aaaatatctggcaggtacttttcaa

SEQ ID NO: 3550669 - DNA, 25 bp, Homo sapien
tacaaagactcaaaaactgtttcag

SEQ ID NO: 3550670 - DNA, 25 bp, Homo sapien
tcttggttctgtgtcgagacgggca

SEQ ID NO: 3550671 - DNA, 25 bp, Homo sapien
tgccctcagaagctcaacagcgtgg

SEQ ID NO: 3550672 - DNA, 25 bp, Homo sapien
tcctgggatggaagagctcgcttct

SEQ ID NO: 3550673 - DNA, 25 bp, Homo sapien
tagagtctgagtctaggacccgcct

SEQ ID NO: 3550674 - DNA, 25 bp, Homo sapien
tagatgtacatatatcgccattcat

SEQ ID NO: 3550675 - DNA, 25 bp, Homo sapien
ccttttgtattgcagagaaatgcgg

SEQ ID NO: 3550676 - DNA, 25 bp, Homo sapien
ggagtccacactgtgttagcagtgg

SEQ ID NO: 3550677 - DNA, 25 bp, Homo sapien
cgataaaaatgaaattgcacgctgc

SEQ ID NO: 3550678 - DNA, 25 bp, Homo sapien
accagcacagaccaacctgtacccc

SEQ ID NO: 3550679 - DNA, 25 bp, Homo sapien
cagcacagaccaacctgtaccccat

SEQ ID NO: 3550680 - DNA, 25 bp, Homo sapien
aacaccagcacagaccaacctgtac

SEQ ID NO: 3550681 - DNA, 25 bp, Homo sapien
ccaacaccagcacagaccaacctgt

SEQ ID NO: 3550682 - DNA, 25 bp, Homo sapien
cacaggtgcctaaagacatgtttgc

SEQ ID NO: 3550683 - DNA, 25 bp, Homo sapien
gaaatccatcctacaagatactaaa

SEQ ID NO: 3550684 - DNA, 25 bp, Homo sapien
cagacaaattgttgatgaatgataa

SEQ ID NO: 3550685 - DNA, 25 bp, Homo sapien
taataatgtcaatggttcagctttc

SEQ ID NO: 3550686 - DNA, 25 bp, Homo sapien
cgaggtataaacagccaaggactta

SEQ ID NO: 3550687 - DNA, 25 bp, Homo sapien
tcagtttcctcgttgattgcgcggg

SEQ ID NO: 3550688 - DNA, 25 bp, Homo sapien
gggcacctgtctgcttgacagcgct

SEQ ID NO: 3550689 - DNA, 25 bp, Homo sapien
tatccggagatgcaagtgcaggctc

SEQ ID NO: 3550690 - DNA, 25 bp, Homo sapien
gcaattaaaagtcccaagctgaggt

SEQ ID NO: 3550691 - DNA, 25 bp, Homo sapien
tcctgacaaatcgagcgctttggcc

SEQ ID NO: 3550692 - DNA, 25 bp, Homo sapien
gctgaggtagtttcagtccatcaca

SEQ ID NO: 3550693 - DNA, 25 bp, Homo sapien
gagacctctgcagccgtggtggtca

SEQ ID NO: 3550694 - DNA, 25 bp, Homo sapien
caaagccaaattgcttccagctgtc

SEQ ID NO: 3550695 - DNA, 25 bp, Homo sapien
tccagctgtccctgatgtcctgtgt

SEQ ID NO: 3550696 - DNA, 25 bp, Homo sapien
gagatttgcagcctcttcctacaaa

SEQ ID NO: 3550697 - DNA, 25 bp, Homo sapien
ctagagggagatttgcagcctcttc

SEQ ID NO: 3550698 - DNA, 25 bp, Homo sapien
taggcatcctccacaggtggccgcc

SEQ ID NO: 3550699 - DNA, 25 bp, Homo sapien
ggcatcctccacaggtggccgcccg

SEQ ID NO: 3550700 - DNA, 25 bp, Homo sapien
ctaggcatcctccacaggtggccgc

SEQ ID NO: 3550701 - DNA, 25 bp, Homo sapien
catcctccacaggtggccgcccggt

SEQ ID NO: 3550702 - DNA, 25 bp, Homo sapien
acagacaggcccacacgccgacatc

SEQ ID NO: 3550703 - DNA, 25 bp, Homo sapien
ccctcgtggcatcctgtggccttgc

SEQ ID NO: 3550704 - DNA, 25 bp, Homo sapien
gcaaacgtaggctccaataggaaaa

SEQ ID NO: 3550705 - DNA, 25 bp, Homo sapien
ccaggaccaggcaaacgtaggctcc

SEQ ID NO: 3550706 - DNA, 25 bp, Homo sapien
ggtcggtcatccagctcagaagcac

SEQ ID NO: 3550707 - DNA, 25 bp, Homo sapien
cacaaacatacaggcggtcggtcat

SEQ ID NO: 3550708 - DNA, 25 bp, Homo sapien
catttggtaaagaaccggcagcgct

SEQ ID NO: 3550709 - DNA, 25 bp, Homo sapien
caaaccagtagagtccattagtgat

SEQ ID NO: 3550710 - DNA, 25 bp, Homo sapien
atgctgcgtcctcaggtagtggaca

SEQ ID NO: 3550711 - DNA, 25 bp, Homo sapien
tggaacaaccaagttaacactcatc

SEQ ID NO: 3550712 - DNA, 25 bp, Homo sapien
tggacatttcaaggcacgtacaact

SEQ ID NO: 3550713 - DNA, 25 bp, Homo sapien
aacttcctaagcaatagcagctcca

SEQ ID NO: 3550714 - DNA, 25 bp, Homo sapien
tgtgaaaaaattgcccctaatgtag

SEQ ID NO: 3550715 - DNA, 25 bp, Homo sapien
gggaggattacatcaacagagtgag

SEQ ID NO: 3550716 - DNA, 25 bp, Homo sapien
tccaaccactgcaagcaaggtctgg

SEQ ID NO: 3550717 - DNA, 25 bp, Homo sapien
gaatgagattcaaggcactaaagga

SEQ ID NO: 3550718 - DNA, 25 bp, Homo sapien
gggcctcctcatagagataactctg

SEQ ID NO: 3550719 - DNA, 25 bp, Homo sapien
tgagtgcagccgcaagtagatgctc

SEQ ID NO: 3550720 - DNA, 25 bp, Homo sapien
gatgctcataaatgcgcacatgcgc

SEQ ID NO: 3550721 - DNA, 25 bp, Homo sapien
tagccttgaatggactggacagaca

SEQ ID NO: 3550722 - DNA, 25 bp, Homo sapien
aaggcctctgggtgccgacgcaagt

SEQ ID NO: 3550723 - DNA, 25 bp, Homo sapien
agggagcaccaacgccacttccagt

SEQ ID NO: 3550724 - DNA, 25 bp, Homo sapien
acttccagttgaccctcgaatctcg

SEQ ID NO: 3550725 - DNA, 25 bp, Homo sapien
aatctcggcgatggctgggccaaag

SEQ ID NO: 3550726 - DNA, 25 bp, Homo sapien
ggaggggccgagggccaggagtgtg

SEQ ID NO: 3550727 - DNA, 25 bp, Homo sapien
agggaggggccgagggccaggagtg

SEQ ID NO: 3550728 - DNA, 25 bp, Homo sapien
gaggggccgagggccaggagtgtgt

SEQ ID NO: 3550729 - DNA, 25 bp, Homo sapien
ctagggaggggccgagggccaggag

SEQ ID NO: 3550730 - DNA, 25 bp, Homo sapien
gccaggcaggccccggcggtggtgg

SEQ ID NO: 3550731 - DNA, 25 bp, Homo sapien
ctaatacccaggccaggcaggcccc

SEQ ID NO: 3550732 - DNA, 25 bp, Homo sapien
taatacccaggccaggcaggccccg

SEQ ID NO: 3550733 - DNA, 25 bp, Homo sapien
caggccaggcaggccccggcggtgg

SEQ ID NO: 3550734 - DNA, 25 bp, Homo sapien
gactgttgaggataaccaggactgg

SEQ ID NO: 3550735 - DNA, 25 bp, Homo sapien
tggggaccaggagtaacccgcagca

SEQ ID NO: 3550736 - DNA, 25 bp, Homo sapien
gagctgaggctgtattgggtaggga

SEQ ID NO: 3550737 - DNA, 25 bp, Homo sapien
ccagaggcacccattggggtcccag

SEQ ID NO: 3550738 - DNA, 25 bp, Homo sapien
cccagaggcccgctgtagaaggagg

SEQ ID NO: 3550739 - DNA, 25 bp, Homo sapien
gaggcccgctgtagaaggagggctg

SEQ ID NO: 3550740 - DNA, 25 bp, Homo sapien
ctactgggaaaggggccggtggcag

SEQ ID NO: 3550741 - DNA, 25 bp, Homo sapien
gctgccgggtaagtggggcccagag

SEQ ID NO: 3550742 - DNA, 25 bp, Homo sapien
ggatgggctgtagggcaaagggtag

SEQ ID NO: 3550743 - DNA, 25 bp, Homo sapien
tggctgcggctgctcttcaaccaca

SEQ ID NO: 3550744 - DNA, 25 bp, Homo sapien
ctgcggctgctcttcaaccacaggg

SEQ ID NO: 3550745 - DNA, 25 bp, Homo sapien
tgctcttcaaccacagggggtgttc

SEQ ID NO: 3550746 - DNA, 25 bp, Homo sapien
gtggaggggcatcgccggccagctc

SEQ ID NO: 3550747 - DNA, 25 bp, Homo sapien
ggggtggaggggcatcgccggccag

SEQ ID NO: 3550748 - DNA, 25 bp, Homo sapien
tggaggggcatcgccggccagctcc

SEQ ID NO: 3550749 - DNA, 25 bp, Homo sapien
gggtggaggggcatcgccggccagc

SEQ ID NO: 3550750 - DNA, 25 bp, Homo sapien
tttccacgcgaacccggcgcaggtg

SEQ ID NO: 3550751 - DNA, 25 bp, Homo sapien
aacccggcgcaggtgggacagcatc

SEQ ID NO: 3550752 - DNA, 25 bp, Homo sapien
cccggcgcaggtgggacagcatcct

SEQ ID NO: 3550753 - DNA, 25 bp, Homo sapien
ttcctggagcttttccacgcgaacc

SEQ ID NO: 3550754 - DNA, 25 bp, Homo sapien
cctccaggaacttctcagccatggc

SEQ ID NO: 3550755 - DNA, 25 bp, Homo sapien
cgccctccaggaacttctcagccat

SEQ ID NO: 3550756 - DNA, 25 bp, Homo sapien
ctcgccctccaggaacttctcagcc

SEQ ID NO: 3550757 - DNA, 25 bp, Homo sapien
gccctccaggaacttctcagccatg

SEQ ID NO: 3550758 - DNA, 25 bp, Homo sapien
tctgccatctacgaaagctcccttg

SEQ ID NO: 3550759 - DNA, 25 bp, Homo sapien
cacagctgacatatggtacatgcac

SEQ ID NO: 3550760 - DNA, 25 bp, Homo sapien
gcttcagctagtgggactgggttcc

SEQ ID NO: 3550761 - DNA, 25 bp, Homo sapien
tcccttgaaggcgaggactgtctct

SEQ ID NO: 3550762 - DNA, 25 bp, Homo sapien
ctcggactcttcttcgatcttcatg

SEQ ID NO: 3550763 - DNA, 25 bp, Homo sapien
gactcttcttcgatcttcatgcctt

SEQ ID NO: 3550764 - DNA, 25 bp, Homo sapien
cggactcttcttcgatcttcatgcc

SEQ ID NO: 3550765 - DNA, 25 bp, Homo sapien
ggactcttcttcgatcttcatgcct

SEQ ID NO: 3550766 - DNA, 25 bp, Homo sapien
aggtttgagcggctgatctccaggg

SEQ ID NO: 3550767 - DNA, 25 bp, Homo sapien
tggtatctatccgagaggtttgagc

SEQ ID NO: 3550768 - DNA, 25 bp, Homo sapien
ggaactccaagttccgctctgccag

SEQ ID NO: 3550769 - DNA, 25 bp, Homo sapien
gcttccggagctcctggtatctatc

SEQ ID NO: 3550770 - DNA, 25 bp, Homo sapien
cggagaggctcatccttggggcaat

SEQ ID NO: 3550771 - DNA, 25 bp, Homo sapien
gagaggctcatccttggggcaatac

SEQ ID NO: 3550772 - DNA, 25 bp, Homo sapien
cttggggcggagaggctcatccttg

SEQ ID NO: 3550773 - DNA, 25 bp, Homo sapien
aggctcatccttggggcaatactca

SEQ ID NO: 3550774 - DNA, 25 bp, Homo sapien
ctcttctacacggagagagcccctg

SEQ ID NO: 3550775 - DNA, 25 bp, Homo sapien
tcaacaagaagtatctaatagttct

SEQ ID NO: 3550776 - DNA, 25 bp, Homo sapien
cacacacccctctatgcacactctt

SEQ ID NO: 3550777 - DNA, 25 bp, Homo sapien
aaactcaacaagaagtatctaatag

SEQ ID NO: 3550778 - DNA, 25 bp, Homo sapien
gtgggtacaaaaccataccagtgct

SEQ ID NO: 3550779 - DNA, 25 bp, Homo sapien
ctggagatatgggatcgcacaaggc

SEQ ID NO: 3550780 - DNA, 25 bp, Homo sapien
tatgggatcgcacaaggctcttggg

SEQ ID NO: 3550781 - DNA, 25 bp, Homo sapien
cagatttgggctggaacgacagtgt

SEQ ID NO: 3550782 - DNA, 25 bp, Homo sapien
tggtcaatcgcctccgagtcattct

SEQ ID NO: 3550783 - DNA, 25 bp, Homo sapien
atcgcctccgagtcattctgcaact

SEQ ID NO: 3550784 - DNA, 25 bp, Homo sapien
cagctggtcaatcgcctccgagtca

SEQ ID NO: 3550785 - DNA, 25 bp, Homo sapien
ggccagctggtcaatcgcctccgag

SEQ ID NO: 3550786 - DNA, 25 bp, Homo sapien
gctttgctggcttcgacatcactgg

SEQ ID NO: 3550787 - DNA, 25 bp, Homo sapien
tctgaaccagaaatacaccaagctc

SEQ ID NO: 3550788 - DNA, 25 bp, Homo sapien
gaagcaaaaccacaatcctcgggtg

SEQ ID NO: 3550789 - DNA, 25 bp, Homo sapien
tcctcgggtgctagatggagctccc

SEQ ID NO: 3550790 - DNA, 25 bp, Homo sapien
cctgcaccagcactcagctagggtg

SEQ ID NO: 3550791 - DNA, 25 bp, Homo sapien
agcactcagctagggtgagccaagg

SEQ ID NO: 3550792 - DNA, 25 bp, Homo sapien
tataggtgtgcgttaccacctccag

SEQ ID NO: 3550793 - DNA, 25 bp, Homo sapien
ccagcaccacagaaatctagggtcc

SEQ ID NO: 3550794 - DNA, 25 bp, Homo sapien
taaagccagcatgagcttaagtgcc

SEQ ID NO: 3550795 - DNA, 25 bp, Homo sapien
gaaatcaaagccctctgtactatca

SEQ ID NO: 3550796 - DNA, 25 bp, Homo sapien
acaataaataaagagatcaaagccc

SEQ ID NO: 3550797 - DNA, 25 bp, Homo sapien
taacctctctagtatgtaaagccag

SEQ ID NO: 3550798 - DNA, 25 bp, Homo sapien
ctcaggctgggcaggcaagtgccac

SEQ ID NO: 3550799 - DNA, 25 bp, Homo sapien
gccctcatacagcatctcaggctgg

SEQ ID NO: 3550800 - DNA, 25 bp, Homo sapien
gggtttaccacagcatcacccaccc

SEQ ID NO: 3550801 - DNA, 25 bp, Homo sapien
cacccctggaaatgacaggtccctt

SEQ ID NO: 3550802 - DNA, 25 bp, Homo sapien
gaagcagcaagcacttccctgggtc

SEQ ID NO: 3550803 - DNA, 25 bp, Homo sapien
ctggaagcagcaagcacttccctgg

SEQ ID NO: 3550804 - DNA, 25 bp, Homo sapien
tggaagcagcaagcacttccctggg

SEQ ID NO: 3550805 - DNA, 25 bp, Homo sapien
aagcagcaagcacttccctgggtcc

SEQ ID NO: 3550806 - DNA, 25 bp, Homo sapien
tagcccgaaatcacactgcaagaag

SEQ ID NO: 3550807 - DNA, 25 bp, Homo sapien
ttgccagtgacctctagcccgaaat

SEQ ID NO: 3550808 - DNA, 25 bp, Homo sapien
tgtgacgtcccttggtttcttacaa

SEQ ID NO: 3550809 - DNA, 25 bp, Homo sapien
acactgcaagaagagctgtgacgtc

SEQ ID NO: 3550810 - DNA, 25 bp, Homo sapien
gaagctgttaccagggcaacttgca

SEQ ID NO: 3550811 - DNA, 25 bp, Homo sapien
ctatggtaccagaagaagctgttac

SEQ ID NO: 3550812 - DNA, 25 bp, Homo sapien
cagaagaagctgttaccagggcaac

SEQ ID NO: 3550813 - DNA, 25 bp, Homo sapien
taccagaagaagctgttaccagggc

SEQ ID NO: 3550814 - DNA, 25 bp, Homo sapien
tgctgttgccttagaaaccttccta

SEQ ID NO: 3550815 - DNA, 25 bp, Homo sapien
acctgctgttgccttagaaaccttc

SEQ ID NO: 3550816 - DNA, 25 bp, Homo sapien
gttgccttagaaaccttcctaatca

SEQ ID NO: 3550817 - DNA, 25 bp, Homo sapien
gctgttgccttagaaaccttcctaa

SEQ ID NO: 3550818 - DNA, 25 bp, Homo sapien
tgtcttgccagcagcgtagagtgtg

SEQ ID NO: 3550819 - DNA, 25 bp, Homo sapien
caacacatatgctctgggcaaacag

SEQ ID NO: 3550820 - DNA, 25 bp, Homo sapien
caggccctgcgtctgaggtttagag

SEQ ID NO: 3550821 - DNA, 25 bp, Homo sapien
ggagtcatcaaaccaggccttaccg

SEQ ID NO: 3550822 - DNA, 25 bp, Homo sapien
ttcaaggttcacctgtattacagga

SEQ ID NO: 3550823 - DNA, 25 bp, Homo sapien
gactggcaggtttcacttaggataa

SEQ ID NO: 3550824 - DNA, 25 bp, Homo sapien
tacaggatgtatcaaacgttctttc

SEQ ID NO: 3550825 - DNA, 25 bp, Homo sapien
tacgaattggactactctaggaacc

SEQ ID NO: 3550826 - DNA, 25 bp, Homo sapien
ttgggtagtagaagttctttacata

SEQ ID NO: 3550827 - DNA, 25 bp, Homo sapien
tggaaatcaattcctaacactattt

SEQ ID NO: 3550828 - DNA, 25 bp, Homo sapien
tgttgggtagtagaagttctttaca

SEQ ID NO: 3550829 - DNA, 25 bp, Homo sapien
tgggtagtagaagttctttacatac

SEQ ID NO: 3550830 - DNA, 25 bp, Homo sapien
gatgtgacccccttgcaacgtccgg

SEQ ID NO: 3550831 - DNA, 25 bp, Homo sapien
tggcgcgcgtgctcgccccgcgacc

SEQ ID NO: 3550832 - DNA, 25 bp, Homo sapien
gtccggcgccccagtggcgcgcgtg

SEQ ID NO: 3550833 - DNA, 25 bp, Homo sapien
caccgcgggttaaaccgcagccgcg

SEQ ID NO: 3550834 - DNA, 25 bp, Homo sapien
cagtcctggtctcttatcacacata

SEQ ID NO: 3550835 - DNA, 25 bp, Homo sapien
ttcattcataagtggagtggccctg

SEQ ID NO: 3550836 - DNA, 25 bp, Homo sapien
tcgactttgggccttttgcaacttc

SEQ ID NO: 3550837 - DNA, 25 bp, Homo sapien
cacaaacaaccccagttacagaagg

SEQ ID NO: 3550838 - DNA, 25 bp, Homo sapien
ggatggcggccgggaagaggctctc

SEQ ID NO: 3550839 - DNA, 25 bp, Homo sapien
actttccagactgggcagccaggca

SEQ ID NO: 3550840 - DNA, 25 bp, Homo sapien
ctcacttcctagatgggatggcggc

SEQ ID NO: 3550841 - DNA, 25 bp, Homo sapien
tgggatggcggccggtcagagacgc

SEQ ID NO: 3550842 - DNA, 25 bp, Homo sapien
gcagtaagcatctctaccacctcca

SEQ ID NO: 3550843 - DNA, 25 bp, Homo sapien
agcagtaagcatctctaccacctcc

SEQ ID NO: 3550844 - DNA, 25 bp, Homo sapien
cagcagtaagcatctctaccacctc

SEQ ID NO: 3550845 - DNA, 25 bp, Homo sapien
ttggagcttttatagaacctgtggc

SEQ ID NO: 3550846 - DNA, 25 bp, Homo sapien
ggcaacttggagcttttatagaacc

SEQ ID NO: 3550847 - DNA, 25 bp, Homo sapien
gcttttatagaacctgtggctctca

SEQ ID NO: 3550848 - DNA, 25 bp, Homo sapien
ctgggggcaacttggagcttttata

SEQ ID NO: 3550849 - DNA, 25 bp, Homo sapien
agcacccggtcagcagaatccttgc

SEQ ID NO: 3550850 - DNA, 25 bp, Homo sapien
catggttaaaactcgggcccagcct

SEQ ID NO: 3550851 - DNA, 25 bp, Homo sapien
tcctctcttagatcagctggttaag

SEQ ID NO: 3550852 - DNA, 25 bp, Homo sapien
gcagaagtgggagcttctcccttcc

SEQ ID NO: 3550853 - DNA, 25 bp, Homo sapien
cagtgatgcccgtggttcagagact

SEQ ID NO: 3550854 - DNA, 25 bp, Homo sapien
tctaccgtcagaggatgttgccagg

SEQ ID NO: 3550855 - DNA, 25 bp, Homo sapien
tagtgcctctaagccacaggacctt

SEQ ID NO: 3550856 - DNA, 25 bp, Homo sapien
tgcaaatatgggtcctagtgcctct

SEQ ID NO: 3550857 - DNA, 25 bp, Homo sapien
ggcggacactaatggtgatgtccct

SEQ ID NO: 3550858 - DNA, 25 bp, Homo sapien
ggtgatgtccctaagtagataggac

SEQ ID NO: 3550859 - DNA, 25 bp, Homo sapien
cactaatggtgatgtccctaagtag

SEQ ID NO: 3550860 - DNA, 25 bp, Homo sapien
ctaagtagataggacagggcagtgt

SEQ ID NO: 3550861 - DNA, 25 bp, Homo sapien
ttaagcatgttcattagcatatatg

SEQ ID NO: 3550862 - DNA, 25 bp, Homo sapien
taagcatgttcattagcatatatgc

SEQ ID NO: 3550863 - DNA, 25 bp, Homo sapien
aagcatgttcattagcatatatgcc

SEQ ID NO: 3550864 - DNA, 25 bp, Homo sapien
cctagcatctgcagacgtggcttaa

SEQ ID NO: 3550865 - DNA, 25 bp, Homo sapien
tctttcttgactagctaacacctag

SEQ ID NO: 3550866 - DNA, 25 bp, Homo sapien
tgtcacttcccagccgtgtgtggtg

SEQ ID NO: 3550867 - DNA, 25 bp, Homo sapien
tgcagacgtggcttaaatgtcactt

SEQ ID NO: 3550868 - DNA, 25 bp, Homo sapien
ttggtttccatgctcctatctccca

SEQ ID NO: 3550869 - DNA, 25 bp, Homo sapien
accagccgcaggttagaggccagga

SEQ ID NO: 3550870 - DNA, 25 bp, Homo sapien
gccaccagccgcaggttagaggcca

SEQ ID NO: 3550871 - DNA, 25 bp, Homo sapien
gtttggtttccatgctcctatctcc

SEQ ID NO: 3550872 - DNA, 25 bp, Homo sapien
cactgtcgtctggactggataccag

SEQ ID NO: 3550873 - DNA, 25 bp, Homo sapien
tcgtctggactggataccaggttgc

SEQ ID NO: 3550874 - DNA, 25 bp, Homo sapien
tctggactggataccaggttgcctt

SEQ ID NO: 3550875 - DNA, 25 bp, Homo sapien
ctacactgtcgtctggactggatac

SEQ ID NO: 3550876 - DNA, 25 bp, Homo sapien
ggggtaaaggtggatgctcacttac

SEQ ID NO: 3550877 - DNA, 25 bp, Homo sapien
gaagtctcccaatataaaaggccgc

SEQ ID NO: 3550878 - DNA, 25 bp, Homo sapien
aaaaggccgccaagtgcttacagga

SEQ ID NO: 3550879 - DNA, 25 bp, Homo sapien
ccagcccagtcacaatttggtgcca

SEQ ID NO: 3550880 - DNA, 25 bp, Homo sapien
taagcggtgaatgagcagtgcagca

SEQ ID NO: 3550881 - DNA, 25 bp, Homo sapien
cacaggtaagcggtgaatgagcagt

SEQ ID NO: 3550882 - DNA, 25 bp, Homo sapien
ccaccttcccacaggtaagcggtga

SEQ ID NO: 3550883 - DNA, 25 bp, Homo sapien
cttcccacaggtaagcggtgaatga

SEQ ID NO: 3550884 - DNA, 25 bp, Homo sapien
gaacaaggttacatccagccttggg

SEQ ID NO: 3550885 - DNA, 25 bp, Homo sapien
gagagacgcatgacacctggcggta

SEQ ID NO: 3550886 - DNA, 25 bp, Homo sapien
tacagtcccagtgagtggaatccca

SEQ ID NO: 3550887 - DNA, 25 bp, Homo sapien
gatgctgacagtggaaacgacttcc

SEQ ID NO: 3550888 - DNA, 25 bp, Homo sapien
atggtggactcttccccccgagaag

SEQ ID NO: 3550889 - DNA, 25 bp, Homo sapien
tggtggactcttccccccgagaagc

SEQ ID NO: 3550890 - DNA, 25 bp, Homo sapien
tgagaacgagcgctctggagtcaca

SEQ ID NO: 3550891 - DNA, 25 bp, Homo sapien
ccatcatggaaagtgctgaagcttc

SEQ ID NO: 3550892 - DNA, 25 bp, Homo sapien
tgtcagccccaaagcgagtgagtgt

SEQ ID NO: 3550893 - DNA, 25 bp, Homo sapien
cccaggacaggagctacagttgaca

SEQ ID NO: 3550894 - DNA, 25 bp, Homo sapien
ttctcttatccagccctttacaagt

SEQ ID NO: 3550895 - DNA, 25 bp, Homo sapien
tcatgagcacgggatgagggtcagc

SEQ ID NO: 3550896 - DNA, 25 bp, Homo sapien
acatggctttctcttatccagccct

SEQ ID NO: 3550897 - DNA, 25 bp, Homo sapien
ctgtacaaccttgcgcgagccgtgt

SEQ ID NO: 3550898 - DNA, 25 bp, Homo sapien
tcggcacaggcccgctggcagggaa

SEQ ID NO: 3550899 - DNA, 25 bp, Homo sapien
agggtcggcacaggcccgctggcag

SEQ ID NO: 3550900 - DNA, 25 bp, Homo sapien
ggcacaggcccgctggcagggaacc

SEQ ID NO: 3550901 - DNA, 25 bp, Homo sapien
cacaggcccgctggcagggaacctt

SEQ ID NO: 3550902 - DNA, 25 bp, Homo sapien
gggtgcagggttcatcatccaaggt

SEQ ID NO: 3550903 - DNA, 25 bp, Homo sapien
cacgtgcaccgggtgcagggttcat

SEQ ID NO: 3550904 - DNA, 25 bp, Homo sapien
tgcaccgggtgcagggttcatcatc

SEQ ID NO: 3550905 - DNA, 25 bp, Homo sapien
cacctggccattcgccaccttcctt

SEQ ID NO: 3550906 - DNA, 25 bp, Homo sapien
cacgggggaacaggccactgagccc

SEQ ID NO: 3550907 - DNA, 25 bp, Homo sapien
agcactccccgtcagggtggaaagg

SEQ ID NO: 3550908 - DNA, 25 bp, Homo sapien
acggggcagcactccccgtcagggt

SEQ ID NO: 3550909 - DNA, 25 bp, Homo sapien
tggaaagggtaggtacaggtgatgg

SEQ ID NO: 3550910 - DNA, 25 bp, Homo sapien
agaagattctgcctgtgtaggtgca

SEQ ID NO: 3550911 - DNA, 25 bp, Homo sapien
cagacatgggtccagcacagacggg

SEQ ID NO: 3550912 - DNA, 25 bp, Homo sapien
tctcgttgttatagaagattctgcc

SEQ ID NO: 3550913 - DNA, 25 bp, Homo sapien
cagacgggaaggtctcgttgttata

SEQ ID NO: 3550914 - DNA, 25 bp, Homo sapien
tccagggatccggatcgggtgaggg

SEQ ID NO: 3550915 - DNA, 25 bp, Homo sapien
cagggatccggatcgggtgagggca

SEQ ID NO: 3550916 - DNA, 25 bp, Homo sapien
gtccacacagtctgtcctcttgcag

SEQ ID NO: 3550917 - DNA, 25 bp, Homo sapien
gcactgtccagggatccggatcggg

SEQ ID NO: 3550918 - DNA, 25 bp, Homo sapien
gaggaaggaggaacttcaccaagac

SEQ ID NO: 3550919 - DNA, 25 bp, Homo sapien
tggaggaaggaggaacttcaccaag

SEQ ID NO: 3550920 - DNA, 25 bp, Homo sapien
ccaccggtgacaccggcccctgcct

SEQ ID NO: 3550921 - DNA, 25 bp, Homo sapien
tcaccaagaccccaccggtgacacc

SEQ ID NO: 3550922 - DNA, 25 bp, Homo sapien
aacgctgcaaactggccaaggcttg

SEQ ID NO: 3550923 - DNA, 25 bp, Homo sapien
caaggcttgccctgaaaggcaacat

SEQ ID NO: 3550924 - DNA, 25 bp, Homo sapien
tggccaaggcttgccctgaaaggca

SEQ ID NO: 3550925 - DNA, 25 bp, Homo sapien
caaaagaaacagcaacgctgcaaac

SEQ ID NO: 3550926 - DNA, 25 bp, Homo sapien
ggttgggattctggtctcctccgct

SEQ ID NO: 3550927 - DNA, 25 bp, Homo sapien
tggctcaccaggaacctacagagta

SEQ ID NO: 3550928 - DNA, 25 bp, Homo sapien
cgcttcctgtagcagccaaagcctg

SEQ ID NO: 3550929 - DNA, 25 bp, Homo sapien
tcccctaaagaggatcggctacttg

SEQ ID NO: 3550930 - DNA, 25 bp, Homo sapien
ctcccgggcttaaatggttctcctg

SEQ ID NO: 3550931 - DNA, 25 bp, Homo sapien
tcccgggcttaaatggttctcctgc

SEQ ID NO: 3550932 - DNA, 25 bp, Homo sapien
ccactcttggccatacacacttttt

SEQ ID NO: 3550933 - DNA, 25 bp, Homo sapien
caccactcttggccatacacacttt

SEQ ID NO: 3550934 - DNA, 25 bp, Homo sapien
accactcttggccatacacactttt

SEQ ID NO: 3550935 - DNA, 25 bp, Homo sapien
cactcttggccatacacactttttt

SEQ ID NO: 3550936 - DNA, 25 bp, Homo sapien
gtggaacttgacagcaccggaggga

SEQ ID NO: 3550937 - DNA, 25 bp, Homo sapien
gagcaggataaactcggtccaaccc

SEQ ID NO: 3550938 - DNA, 25 bp, Homo sapien
agctgaaggcgagcaggttgtcatt

SEQ ID NO: 3550939 - DNA, 25 bp, Homo sapien
tgaaggcgagcaggttgtcattcac

SEQ ID NO: 3550940 - DNA, 25 bp, Homo sapien
aactcaaccccgttgtcgtcaagag

SEQ ID NO: 3550941 - DNA, 25 bp, Homo sapien
gatctgtccaatcggaaactcaacc

SEQ ID NO: 3550942 - DNA, 25 bp, Homo sapien
accccgttgtcgtcaagagagcagc

SEQ ID NO: 3550943 - DNA, 25 bp, Homo sapien
gggtcaccaggcgaccagatctgtc

SEQ ID NO: 3550944 - DNA, 25 bp, Homo sapien
gcaggtgaagcaacactgcccaggg

SEQ ID NO: 3550945 - DNA, 25 bp, Homo sapien
cagggcatgaaggagcactccacct

SEQ ID NO: 3550946 - DNA, 25 bp, Homo sapien
ctgtcgagggtgtgggctcctggca

SEQ ID NO: 3550947 - DNA, 25 bp, Homo sapien
agccgccactcttctcgggggcagg

SEQ ID NO: 3550948 - DNA, 25 bp, Homo sapien
gaacacagccccgtctgcgtaccac

SEQ ID NO: 3550949 - DNA, 25 bp, Homo sapien
gtctgcgtaccaccggccgtggaaa

SEQ ID NO: 3550950 - DNA, 25 bp, Homo sapien
caccggccgtggaaatagcatctca

SEQ ID NO: 3550951 - DNA, 25 bp, Homo sapien
cacaggtggtacactcgtcaccacc

SEQ ID NO: 3550952 - DNA, 25 bp, Homo sapien
ccatcgcatactcaaaagacatgct

SEQ ID NO: 3550953 - DNA, 25 bp, Homo sapien
ctccatcgcatactcaaaagacatg

SEQ ID NO: 3550954 - DNA, 25 bp, Homo sapien
cccactccatcgcatactcaaaaga

SEQ ID NO: 3550955 - DNA, 25 bp, Homo sapien
cactccatcgcatactcaaaagaca

SEQ ID NO: 3550956 - DNA, 25 bp, Homo sapien
ctggaacacaagtacagcaatccgt

SEQ ID NO: 3550957 - DNA, 25 bp, Homo sapien
acaagtacagcaatccgtctgtggg

SEQ ID NO: 3550958 - DNA, 25 bp, Homo sapien
tcaggagagatgcaggacacgtttc

SEQ ID NO: 3550959 - DNA, 25 bp, Homo sapien
ggagagatgcaggacacgtttccag

SEQ ID NO: 3550960 - DNA, 25 bp, Homo sapien
cttcctaaacagacggaccctgtgt

SEQ ID NO: 3550961 - DNA, 25 bp, Homo sapien
actgcaacgtcagcatctggcaggg

SEQ ID NO: 3550962 - DNA, 25 bp, Homo sapien
ttcttgcaggagtgaatttgcccaa

SEQ ID NO: 3550963 - DNA, 25 bp, Homo sapien
ccaaatgtggagacctttattgtgc

SEQ ID NO: 3550964 - DNA, 25 bp, Homo sapien
aaacacatccccttcagctcggacg

SEQ ID NO: 3550965 - DNA, 25 bp, Homo sapien
atccccttcagctcggacgacacca

SEQ ID NO: 3550966 - DNA, 25 bp, Homo sapien
agacacagacggtgcagttctcatt

SEQ ID NO: 3550967 - DNA, 25 bp, Homo sapien
acagacggtgcagttctcattggga

SEQ ID NO: 3550968 - DNA, 25 bp, Homo sapien
ggacaaataggaggtagaggcatca

SEQ ID NO: 3550969 - DNA, 25 bp, Homo sapien
caaataggaggtagaggcatcagac

SEQ ID NO: 3550970 - DNA, 25 bp, Homo sapien
aataggaggtagaggcatcagacct

SEQ ID NO: 3550971 - DNA, 25 bp, Homo sapien
aaggacaaataggaggtagaggcat

SEQ ID NO: 3550972 - DNA, 25 bp, Homo sapien
gaagaggaaacttgaggtctcgctg

SEQ ID NO: 3550973 - DNA, 25 bp, Homo sapien
tctctcactgccctaggtgtcccag

SEQ ID NO: 3550974 - DNA, 25 bp, Homo sapien
tagattcagggtactctgactgtgt

SEQ ID NO: 3550975 - DNA, 25 bp, Homo sapien
tctccatgcttaatgtacctggaac

SEQ ID NO: 3550976 - DNA, 25 bp, Homo sapien
aagaatcccctcccagaccaactga

SEQ ID NO: 3550977 - DNA, 25 bp, Homo sapien
accaagaccatcagacaaagaatcc

SEQ ID NO: 3550978 - DNA, 25 bp, Homo sapien
agaccatcagacaaagaatcccctc

SEQ ID NO: 3550979 - DNA, 25 bp, Homo sapien
caagaccatcagacaaagaatcccc

SEQ ID NO: 3550980 - DNA, 25 bp, Homo sapien
cagcacccaccatctctggagggaa

SEQ ID NO: 3550981 - DNA, 25 bp, Homo sapien
gtgcacgatgggcagcacccaccat

SEQ ID NO: 3550982 - DNA, 25 bp, Homo sapien
tctggagggaattgggtgggaacaa

SEQ ID NO: 3550983 - DNA, 25 bp, Homo sapien
gggaacaagcagcttcacacctcac

SEQ ID NO: 3550984 - DNA, 25 bp, Homo sapien
ctccttgattcatgcatggctccca

SEQ ID NO: 3550985 - DNA, 25 bp, Homo sapien
gctctgtccagcgactccttgattc

SEQ ID NO: 3550986 - DNA, 25 bp, Homo sapien
caggctctgtccagcgactccttga

SEQ ID NO: 3550987 - DNA, 25 bp, Homo sapien
gactccttgattcatgcatggctcc

SEQ ID NO: 3550988 - DNA, 25 bp, Homo sapien
ctgggtgaggaaggggtccccatca

SEQ ID NO: 3550989 - DNA, 25 bp, Homo sapien
tgggtgaggaaggggtccccatcac

SEQ ID NO: 3550990 - DNA, 25 bp, Homo sapien
ggggtctgaggttccccagcaggga

SEQ ID NO: 3550991 - DNA, 25 bp, Homo sapien
gggtctgaggttccccagcagggag

SEQ ID NO: 3550992 - DNA, 25 bp, Homo sapien
aggatgtgggtagtcgtggggtggg

SEQ ID NO: 3550993 - DNA, 25 bp, Homo sapien
atgtgggtagtcgtggggtgggaga

SEQ ID NO: 3550994 - DNA, 25 bp, Homo sapien
gtgggtagtcgtggggtgggagatg

SEQ ID NO: 3550995 - DNA, 25 bp, Homo sapien
ggatgtgggtagtcgtggggtggga

SEQ ID NO: 3550996 - DNA, 25 bp, Homo sapien
ctgggggccctggagccccagaagg

SEQ ID NO: 3550997 - DNA, 25 bp, Homo sapien
tgggggccctggagccccagaagga

SEQ ID NO: 3550998 - DNA, 25 bp, Homo sapien
cctggagccccagaaggagggctat

SEQ ID NO: 3550999 - DNA, 25 bp, Homo sapien
ggccctggagccccagaaggagggc

SEQ ID NO: 3551000 - DNA, 25 bp, Homo sapien
ggacagggcaggccggccggcctca

SEQ ID NO: 3551001 - DNA, 25 bp, Homo sapien
aggccggccggcctcaggaagcaac

SEQ ID NO: 3551002 - DNA, 25 bp, Homo sapien
ccggccggcctcaggaagcaacaga

SEQ ID NO: 3551003 - DNA, 25 bp, Homo sapien
gccggcctcaggaagcaacagaagc

SEQ ID NO: 3551004 - DNA, 25 bp, Homo sapien
gggtgttgccggggttgcaggatgg

SEQ ID NO: 3551005 - DNA, 25 bp, Homo sapien
gacgggtgttgccggggttgcagga

SEQ ID NO: 3551006 - DNA, 25 bp, Homo sapien
ttggacgggtgttgccggggttgca

SEQ ID NO: 3551007 - DNA, 25 bp, Homo sapien
tggacgggtgttgccggggttgcag

SEQ ID NO: 3551008 - DNA, 25 bp, Homo sapien
aggaggcagggtttagggagacctg

SEQ ID NO: 3551009 - DNA, 25 bp, Homo sapien
acacgcggtcagctcggagcctgaa

SEQ ID NO: 3551010 - DNA, 25 bp, Homo sapien
cttcacaggacacgcggtcagctcg

SEQ ID NO: 3551011 - DNA, 25 bp, Homo sapien
tcggagcctgaagccaggtcggcat

SEQ ID NO: 3551012 - DNA, 25 bp, Homo sapien
agccaggtcggcatgtgcataggaa

SEQ ID NO: 3551013 - DNA, 25 bp, Homo sapien
ctctccaatggcctccgacactcgt

SEQ ID NO: 3551014 - DNA, 25 bp, Homo sapien
aatggtgacagactcgcctctccaa

SEQ ID NO: 3551015 - DNA, 25 bp, Homo sapien
tggtgacagactcgcctctccaatg

SEQ ID NO: 3551016 - DNA, 25 bp, Homo sapien
aggaatggtgacagactcgcctctc

SEQ ID NO: 3551017 - DNA, 25 bp, Homo sapien
caggagtgccggttgccatgaaggt

SEQ ID NO: 3551018 - DNA, 25 bp, Homo sapien
aggtggaagccagttcgacaggaac

SEQ ID NO: 3551019 - DNA, 25 bp, Homo sapien
ggagtccctaggcattcgtcagtgt

SEQ ID NO: 3551020 - DNA, 25 bp, Homo sapien
ctgctgacagggagtccctaggcat

SEQ ID NO: 3551021 - DNA, 25 bp, Homo sapien
actcgcacacaaacccaccttctgt

SEQ ID NO: 3551022 - DNA, 25 bp, Homo sapien
gaggaggttacacattcgtcaatgt

SEQ ID NO: 3551023 - DNA, 25 bp, Homo sapien
tgtggcggtcggcagacagctgcat

SEQ ID NO: 3551024 - DNA, 25 bp, Homo sapien
agtggccctcgcaggaggaggttac

SEQ ID NO: 3551025 - DNA, 25 bp, Homo sapien
gctggaccgtcaagaccatgctcaa

SEQ ID NO: 3551026 - DNA, 25 bp, Homo sapien
aacaccgctaagaagcccactctga

SEQ ID NO: 3551027 - DNA, 25 bp, Homo sapien
cactgggatgtctcgtggctacagt

SEQ ID NO: 3551028 - DNA, 25 bp, Homo sapien
caagtgctttgacattgttctctgg

SEQ ID NO: 3551029 - DNA, 25 bp, Homo sapien
ggtaaggtcacagccgtactcccca

SEQ ID NO: 3551030 - DNA, 25 bp, Homo sapien
caacagctgtctccgtcatcgagaa

SEQ ID NO: 3551031 - DNA, 25 bp, Homo sapien
tactccccacatggtccatgggttt

SEQ ID NO: 3551032 - DNA, 25 bp, Homo sapien
tgacagcctccatggttgcaggtaa

SEQ ID NO: 3551033 - DNA, 25 bp, Homo sapien
atccccacttcaccagggtcctcct

SEQ ID NO: 3551034 - DNA, 25 bp, Homo sapien
acaccagtgagcatgcaccccgtgg

SEQ ID NO: 3551035 - DNA, 25 bp, Homo sapien
agtgagcatgcaccccgtggcagtc

SEQ ID NO: 3551036 - DNA, 25 bp, Homo sapien
ggcatcacaccagtgagcatgcacc

SEQ ID NO: 3551037 - DNA, 25 bp, Homo sapien
agcagacattgggagcgatgcagat

SEQ ID NO: 3551038 - DNA, 25 bp, Homo sapien
gacattgggagcgatgcagatgcca

SEQ ID NO: 3551039 - DNA, 25 bp, Homo sapien
tccatcctggcaggagcagacattg

SEQ ID NO: 3551040 - DNA, 25 bp, Homo sapien
gcagatgccactcccacagccgaag

SEQ ID NO: 3551041 - DNA, 25 bp, Homo sapien
cacccatagagggcgcccagccagg

SEQ ID NO: 3551042 - DNA, 25 bp, Homo sapien
actcccaaacccagagaggcagacg

SEQ ID NO: 3551043 - DNA, 25 bp, Homo sapien
cccaaacccagagaggcagacgtgg

SEQ ID NO: 3551044 - DNA, 25 bp, Homo sapien
agggcagcagccactcccaaaccca

SEQ ID NO: 3551045 - DNA, 25 bp, Homo sapien
tctcggccgcgaagtgcccgggcgg

SEQ ID NO: 3551046 - DNA, 25 bp, Homo sapien
ggcagcaggagcgcgacacaggcgg

SEQ ID NO: 3551047 - DNA, 25 bp, Homo sapien
cacaggcggcccgaaggagcagtcc

SEQ ID NO: 3551048 - DNA, 25 bp, Homo sapien
cggccgcgaagtgcccgggcggctt

SEQ ID NO: 3551049 - DNA, 25 bp, Homo sapien
gctgggctcggctcctgcgccgcgc

SEQ ID NO: 3551050 - DNA, 25 bp, Homo sapien
ggctcggctcctgcgccgcgcgcgg

SEQ ID NO: 3551051 - DNA, 25 bp, Homo sapien
tgggctcggctcctgcgccgcgcgc

SEQ ID NO: 3551052 - DNA, 25 bp, Homo sapien
ggctgggctcggctcctgcgccgcg

SEQ ID NO: 3551053 - DNA, 25 bp, Homo sapien
ttagggaaaggcctcccatggccaa

SEQ ID NO: 3551054 - DNA, 25 bp, Homo sapien
ttccccggaaggaggacaactggca

SEQ ID NO: 3551055 - DNA, 25 bp, Homo sapien
caatcaaggcttggtggtctaaggt

SEQ ID NO: 3551056 - DNA, 25 bp, Homo sapien
caggctacccatggcttggcagtca

SEQ ID NO: 3551057 - DNA, 25 bp, Homo sapien
tgcagtggcctctcgcttcataccg

SEQ ID NO: 3551058 - DNA, 25 bp, Homo sapien
cttgatgaggtcgtctgcagtggcc

SEQ ID NO: 3551059 - DNA, 25 bp, Homo sapien
gcttcataccgctgccatcgtcata

SEQ ID NO: 3551060 - DNA, 25 bp, Homo sapien
ggatccgagttagctcctccacaac

SEQ ID NO: 3551061 - DNA, 25 bp, Homo sapien
caccgtcgatgaaacctgtggctgg

SEQ ID NO: 3551062 - DNA, 25 bp, Homo sapien
gggcggctaatatccaggaaactct

SEQ ID NO: 3551063 - DNA, 25 bp, Homo sapien
acctcctgcatcttggggcggctaa

SEQ ID NO: 3551064 - DNA, 25 bp, Homo sapien
caggaaactctcaatcaagtcaccg

SEQ ID NO: 3551065 - DNA, 25 bp, Homo sapien
gaacacgtgcttatcaggaaacacc

SEQ ID NO: 3551066 - DNA, 25 bp, Homo sapien
gagttaaggaacacgtgcttatcag

SEQ ID NO: 3551067 - DNA, 25 bp, Homo sapien
atgggtgagttaaggaacacgtgct

SEQ ID NO: 3551068 - DNA, 25 bp, Homo sapien
taaggaacacgtgcttatcaggaaa

SEQ ID NO: 3551069 - DNA, 25 bp, Homo sapien
agtcatccccacctttgaataagac

SEQ ID NO: 3551070 - DNA, 25 bp, Homo sapien
tcatccccacctttgaataagacca

SEQ ID NO: 3551071 - DNA, 25 bp, Homo sapien
tcagtcatccccacctttgaataag

SEQ ID NO: 3551072 - DNA, 25 bp, Homo sapien
ctcagtcatccccacctttgaataa

SEQ ID NO: 3551073 - DNA, 25 bp, Homo sapien
tagcttccgggtaatgtgactccgt

SEQ ID NO: 3551074 - DNA, 25 bp, Homo sapien
acatatgccgggatgtgcttcccag

SEQ ID NO: 3551075 - DNA, 25 bp, Homo sapien
tcaagacatgtagtagcttccgggt

SEQ ID NO: 3551076 - DNA, 25 bp, Homo sapien
gactccgtgtgccacatatgccggg

SEQ ID NO: 3551077 - DNA, 25 bp, Homo sapien
tttgatgactttattgagtcgattc

SEQ ID NO: 3551078 - DNA, 25 bp, Homo sapien
gactttattgagtcgattctgcatg

SEQ ID NO: 3551079 - DNA, 25 bp, Homo sapien
tattgagtcgattctgcatgtccag

SEQ ID NO: 3551080 - DNA, 25 bp, Homo sapien
tgagtcgattctgcatgtccagcag

SEQ ID NO: 3551081 - DNA, 25 bp, Homo sapien
agctctctgacagtgaggtcaccag

SEQ ID NO: 3551082 - DNA, 25 bp, Homo sapien
cagctctctgacagtgaggtcacca

SEQ ID NO: 3551083 - DNA, 25 bp, Homo sapien
gctctctgacagtgaggtcaccagc

SEQ ID NO: 3551084 - DNA, 25 bp, Homo sapien
ctctctgacagtgaggtcaccagcc

SEQ ID NO: 3551085 - DNA, 25 bp, Homo sapien
gctcagggagggctaatgtgctgca

SEQ ID NO: 3551086 - DNA, 25 bp, Homo sapien
agagctcaaccccacagcatgtatc

SEQ ID NO: 3551087 - DNA, 25 bp, Homo sapien
tgtatcctctacgtaaagggcagcc

SEQ ID NO: 3551088 - DNA, 25 bp, Homo sapien
tgtgctgcagcctcctctagtaaac

SEQ ID NO: 3551089 - DNA, 25 bp, Homo sapien
ccgaagagcaccgagccttgtgtgg

SEQ ID NO: 3551090 - DNA, 25 bp, Homo sapien
ctatcatgccgttgaccgtgccgaa

SEQ ID NO: 3551091 - DNA, 25 bp, Homo sapien
cattgacaaactcgcccaggtggaa

SEQ ID NO: 3551092 - DNA, 25 bp, Homo sapien
gattctgcattaccagagagccgtg

SEQ ID NO: 3551093 - DNA, 25 bp, Homo sapien
ggagctgacatactccacagtaggg

SEQ ID NO: 3551094 - DNA, 25 bp, Homo sapien
ctgaaaggcggtaagaaagtcactt

SEQ ID NO: 3551095 - DNA, 25 bp, Homo sapien
aacctgacacagaacccaatgcttg

SEQ ID NO: 3551096 - DNA, 25 bp, Homo sapien
tggtcacggtgctcaatttccctgg

SEQ ID NO: 3551097 - DNA, 25 bp, Homo sapien
acagcactcatccagttgggattaa

SEQ ID NO: 3551098 - DNA, 25 bp, Homo sapien
tccacagcactcatccagttgggat

SEQ ID NO: 3551099 - DNA, 25 bp, Homo sapien
tttccacagcactcatccagttggg

SEQ ID NO: 3551100 - DNA, 25 bp, Homo sapien
gatttccacagcactcatccagttg

SEQ ID NO: 3551101 - DNA, 25 bp, Homo sapien
aaatacttaatcagggccgggcaca

SEQ ID NO: 3551102 - DNA, 25 bp, Homo sapien
gttcaacaagtgtcaccctagaggg

SEQ ID NO: 3551103 - DNA, 25 bp, Homo sapien
tcctttattcaggagcaaggcccca

SEQ ID NO: 3551104 - DNA, 25 bp, Homo sapien
tcagcagtttgcacggaatccagtt

SEQ ID NO: 3551105 - DNA, 25 bp, Homo sapien
catgggcttgtaggcaagcagcagc

SEQ ID NO: 3551106 - DNA, 25 bp, Homo sapien
ccaggatgaagtcgcccttggtctt

SEQ ID NO: 3551107 - DNA, 25 bp, Homo sapien
cccttggtcttcaggtagagggcca

SEQ ID NO: 3551108 - DNA, 25 bp, Homo sapien
cagcactgagcgcataaggtcgccc

SEQ ID NO: 3551109 - DNA, 25 bp, Homo sapien
agtgcgcagctccttctctgttgtc

SEQ ID NO: 3551110 - DNA, 25 bp, Homo sapien
ctgttgtccactcatagagccgcac

SEQ ID NO: 3551111 - DNA, 25 bp, Homo sapien
tccttctctgttgtccactcataga

SEQ ID NO: 3551112 - DNA, 25 bp, Homo sapien
gctccttctctgttgtccactcata

SEQ ID NO: 3551113 - DNA, 25 bp, Homo sapien
tggctaacagcttcccgttaaattc

SEQ ID NO: 3551114 - DNA, 25 bp, Homo sapien
cgtgctattgatgctggctaacagc

SEQ ID NO: 3551115 - DNA, 25 bp, Homo sapien
tattgatgctggctaacagcttccc

SEQ ID NO: 3551116 - DNA, 25 bp, Homo sapien
accatagagtacacggcccctttca

SEQ ID NO: 3551117 - DNA, 25 bp, Homo sapien
gcctcttcaggatacaccattgctg

SEQ ID NO: 3551118 - DNA, 25 bp, Homo sapien
accacaatgcgaccctgcttgggct

SEQ ID NO: 3551119 - DNA, 25 bp, Homo sapien
catccgaatactgaaagaccacaat

SEQ ID NO: 3551120 - DNA, 25 bp, Homo sapien
agactgagggcatattcattctgca

SEQ ID NO: 3551121 - DNA, 25 bp, Homo sapien
tggagaacagcttgctggagcttac

SEQ ID NO: 3551122 - DNA, 25 bp, Homo sapien
caaaggaggtctcatgaggagcagt

SEQ ID NO: 3551123 - DNA, 25 bp, Homo sapien
gataagtaggttgtgcacctccacc

SEQ ID NO: 3551124 - DNA, 25 bp, Homo sapien
tggagcttacactgctggacagagc

SEQ ID NO: 3551125 - DNA, 25 bp, Homo sapien
ttggacttcaatgcggctggagagg

SEQ ID NO: 3551126 - DNA, 25 bp, Homo sapien
gagaggaccccgaaacactgggaca

SEQ ID NO: 3551127 - DNA, 25 bp, Homo sapien
gtcgtgcccccactcgtgtcttgga

SEQ ID NO: 3551128 - DNA, 25 bp, Homo sapien
gctgggcctcaaggctgtcgtgccc

SEQ ID NO: 3551129 - DNA, 25 bp, Homo sapien
actgtgcgaatgtgcagcttctgga

SEQ ID NO: 3551130 - DNA, 25 bp, Homo sapien
tctcatcgatggtgccaatggtgag

SEQ ID NO: 3551131 - DNA, 25 bp, Homo sapien
actcatagaggggaactgtgcgaat

SEQ ID NO: 3551132 - DNA, 25 bp, Homo sapien
agcttctggatctcatcgatggtgc

SEQ ID NO: 3551133 - DNA, 25 bp, Homo sapien
ctgtcaggatagccatctgaattga

SEQ ID NO: 3551134 - DNA, 25 bp, Homo sapien
tagccatctgaattgaggggacaca

SEQ ID NO: 3551135 - DNA, 25 bp, Homo sapien
tcaggatagccatctgaattgaggg

SEQ ID NO: 3551136 - DNA, 25 bp, Homo sapien
atagccatctgaattgaggggacac

SEQ ID NO: 3551137 - DNA, 25 bp, Homo sapien
gtagaaagagaacgaaaagtcctca

SEQ ID NO: 3551138 - DNA, 25 bp, Homo sapien
tggttgctgctatagatgacagtgg

SEQ ID NO: 3551139 - DNA, 25 bp, Homo sapien
ggcggtcagaacaagcaaagacgtt

SEQ ID NO: 3551140 - DNA, 25 bp, Homo sapien
tcctcaatacggtgggctgggtgcc

SEQ ID NO: 3551141 - DNA, 25 bp, Homo sapien
gaattctgtgtaattctaatactct

SEQ ID NO: 3551142 - DNA, 25 bp, Homo sapien
ccctgggactaagaattctgtgtaa

SEQ ID NO: 3551143 - DNA, 25 bp, Homo sapien
cagaaccctgggactaagaattctg

SEQ ID NO: 3551144 - DNA, 25 bp, Homo sapien
gaaccctgggactaagaattctgtg

SEQ ID NO: 3551145 - DNA, 25 bp, Homo sapien
tgtctcaatgttgagcccaaagtag

SEQ ID NO: 3551146 - DNA, 25 bp, Homo sapien
gtagaaaagcgctccatctcccaag

SEQ ID NO: 3551147 - DNA, 25 bp, Homo sapien
caaggcacaaaggaggtaatggcta

SEQ ID NO: 3551148 - DNA, 25 bp, Homo sapien
taatggctactctcaaaggtggtca

SEQ ID NO: 3551149 - DNA, 25 bp, Homo sapien
caagcaagccacttcatgttccatc

SEQ ID NO: 3551150 - DNA, 25 bp, Homo sapien
cagtagttcaaaagagggcaacttc

SEQ ID NO: 3551151 - DNA, 25 bp, Homo sapien
gatgtccgtccagaggccaatggca

SEQ ID NO: 3551152 - DNA, 25 bp, Homo sapien
ttcaagatacgagccgagatgtccg

SEQ ID NO: 3551153 - DNA, 25 bp, Homo sapien
aaagaagaatatggcagaggaagga

SEQ ID NO: 3551154 - DNA, 25 bp, Homo sapien
gaacaaagaagaatatggcagagga

SEQ ID NO: 3551155 - DNA, 25 bp, Homo sapien
ctgaacaaagaagaatatggcagag

SEQ ID NO: 3551156 - DNA, 25 bp, Homo sapien
gaggaaggaatccaaggctcaaaga

SEQ ID NO: 3551157 - DNA, 25 bp, Homo sapien
gatctgcagatagtagagggccctg

SEQ ID NO: 3551158 - DNA, 25 bp, Homo sapien
ctgatctgccggagctcctgaggat

SEQ ID NO: 3551159 - DNA, 25 bp, Homo sapien
ccaccacctggctgctattgcagga

SEQ ID NO: 3551160 - DNA, 25 bp, Homo sapien
tcttgagagaccaacctcaccgatg

SEQ ID NO: 3551161 - DNA, 25 bp, Homo sapien
actgtgaccaccagtcttagcagtt

SEQ ID NO: 3551162 - DNA, 25 bp, Homo sapien
gaccaccagtcttagcagtttttct

SEQ ID NO: 3551163 - DNA, 25 bp, Homo sapien
ccaccatgttgactgtgaccaccag

SEQ ID NO: 3551164 - DNA, 25 bp, Homo sapien
gagccaccatgttgactgtgaccac

SEQ ID NO: 3551165 - DNA, 25 bp, Homo sapien
agtgccctacccaccaaaggcaaga

SEQ ID NO: 3551166 - DNA, 25 bp, Homo sapien
gacagagacagttcattaatcctta

SEQ ID NO: 3551167 - DNA, 25 bp, Homo sapien
cattaatccttaggcactccagtgc

SEQ ID NO: 3551168 - DNA, 25 bp, Homo sapien
gagagagtgctaaaagctgaaggat

SEQ ID NO: 3551169 - DNA, 25 bp, Homo sapien
ggtgctctgtactgcatctaggtca

SEQ ID NO: 3551170 - DNA, 25 bp, Homo sapien
aatatgccagaaggctatctgcccc

SEQ ID NO: 3551171 - DNA, 25 bp, Homo sapien
ccaagagtcatattggatggtagca

SEQ ID NO: 3551172 - DNA, 25 bp, Homo sapien
cagaatagggtaagcttcggttata

SEQ ID NO: 3551173 - DNA, 25 bp, Homo sapien
agaaagtctgctgatcatccacgaa

SEQ ID NO: 3551174 - DNA, 25 bp, Homo sapien
ctggataagctgctgatgagccacg

SEQ ID NO: 3551175 - DNA, 25 bp, Homo sapien
ggataagctgctgatgagccacgtt

SEQ ID NO: 3551176 - DNA, 25 bp, Homo sapien
gatcatccacgaaacccatcagttc

SEQ ID NO: 3551177 - DNA, 25 bp, Homo sapien
gggtcagaccgcagtggccataatc

SEQ ID NO: 3551178 - DNA, 25 bp, Homo sapien
gcaccaaagtgtcatcagtctcacg

SEQ ID NO: 3551179 - DNA, 25 bp, Homo sapien
cagtctcacgattagggtcagaccg

SEQ ID NO: 3551180 - DNA, 25 bp, Homo sapien
gtctggcccacaaaagagagcacca

SEQ ID NO: 3551181 - DNA, 25 bp, Homo sapien
tctaagtcaaggaaacattgtatac

SEQ ID NO: 3551182 - DNA, 25 bp, Homo sapien
tcctctactatgctttctaattgac

SEQ ID NO: 3551183 - DNA, 25 bp, Homo sapien
actgatttgcagtacttggtgtgtc

SEQ ID NO: 3551184 - DNA, 25 bp, Homo sapien
cttttacatcctgctatcttagtga

SEQ ID NO: 3551185 - DNA, 25 bp, Homo sapien
gtgtcaggcaacatgcctggccata

SEQ ID NO: 3551186 - DNA, 25 bp, Homo sapien
tgtcaggcaacatgcctggccatac

SEQ ID NO: 3551187 - DNA, 25 bp, Homo sapien
tgtaagatctacatcctatgcccac

SEQ ID NO: 3551188 - DNA, 25 bp, Homo sapien
tctatcggttgcctcatataaacaa

SEQ ID NO: 3551189 - DNA, 25 bp, Homo sapien
ggccaaagtccctcatgtaagatct

SEQ ID NO: 3551190 - DNA, 25 bp, Homo sapien
ttcacaacatgtaacaaggccaaag

SEQ ID NO: 3551191 - DNA, 25 bp, Homo sapien
ggcatgctcgtggattccaattcca

SEQ ID NO: 3551192 - DNA, 25 bp, Homo sapien
tccattccggatgatccgcaaagaa

SEQ ID NO: 3551193 - DNA, 25 bp, Homo sapien
ctttgatgcctggtaagtcaatgct

SEQ ID NO: 3551194 - DNA, 25 bp, Homo sapien
cattccggatgatccgcaaagaacc

SEQ ID NO: 3551195 - DNA, 25 bp, Homo sapien
ctaaagaaccccctcaagatactgg

SEQ ID NO: 3551196 - DNA, 25 bp, Homo sapien
atactgggccagtcatactgatgcc

SEQ ID NO: 3551197 - DNA, 25 bp, Homo sapien
tgcccagaaagtaaacacggtatac

SEQ ID NO: 3551198 - DNA, 25 bp, Homo sapien
gccagtcatactgatgcccagaaag

SEQ ID NO: 3551199 - DNA, 25 bp, Homo sapien
tttccatggccactacataggagcc

SEQ ID NO: 3551200 - DNA, 25 bp, Homo sapien
ggtccaccacgcacatatcgacaat

SEQ ID NO: 3551201 - DNA, 25 bp, Homo sapien
tcgacaatgggtcctaagttggtaa

SEQ ID NO: 3551202 - DNA, 25 bp, Homo sapien
ccttgttcattactgtcaacgttga

SEQ ID NO: 3551203 - DNA, 25 bp, Homo sapien
gatctgccattctcatgttccaagg

SEQ ID NO: 3551204 - DNA, 25 bp, Homo sapien
aatgtatccacagcacctagcacct

SEQ ID NO: 3551205 - DNA, 25 bp, Homo sapien
ccaaggattgctgacctagagtcca

SEQ ID NO: 3551206 - DNA, 25 bp, Homo sapien
cgaaagaatatggttgtcccacagg

SEQ ID NO: 3551207 - DNA, 25 bp, Homo sapien
gacccgacaaacacaacaccattat

SEQ ID NO: 3551208 - DNA, 25 bp, Homo sapien
tatgtcaagcactcagcaatagagg

SEQ ID NO: 3551209 - DNA, 25 bp, Homo sapien
caccattatcaaggtatgtcaagca

SEQ ID NO: 3551210 - DNA, 25 bp, Homo sapien
gggagtcacccaggcgagacccgac

SEQ ID NO: 3551211 - DNA, 25 bp, Homo sapien
cccagagttgaggtgtgggaccaca

SEQ ID NO: 3551212 - DNA, 25 bp, Homo sapien
cctaaaagaacattgtagaggaaca

SEQ ID NO: 3551213 - DNA, 25 bp, Homo sapien
caggatcctgtgagatgctccaata

SEQ ID NO: 3551214 - DNA, 25 bp, Homo sapien
tgaaaccagctagattgatctttaa

SEQ ID NO: 3551215 - DNA, 25 bp, Homo sapien
cattagggtccactcgattgtggca

SEQ ID NO: 3551216 - DNA, 25 bp, Homo sapien
tccaaggagttctacacggagatcc

SEQ ID NO: 3551217 - DNA, 25 bp, Homo sapien
aaagcagcatgaagagccggccttc

SEQ ID NO: 3551218 - DNA, 25 bp, Homo sapien
tccttgagagtgacggtgccatcca

SEQ ID NO: 3551219 - DNA, 25 bp, Homo sapien
aagataattttctgaggcgctccat

SEQ ID NO: 3551220 - DNA, 25 bp, Homo sapien
gatatgtcgtcattctgcaggaaaa

SEQ ID NO: 3551221 - DNA, 25 bp, Homo sapien
gaggatagatcctattgcccattaa

SEQ ID NO: 3551222 - DNA, 25 bp, Homo sapien
gaaacagtcattagagattcagcat

SEQ ID NO: 3551223 - DNA, 25 bp, Homo sapien
taggaggggcaatagccaggtattt

SEQ ID NO: 3551224 - DNA, 25 bp, Homo sapien
ttgtcaccattgtgataggtgattg

SEQ ID NO: 3551225 - DNA, 25 bp, Homo sapien
gataggtgattgactcctgtccaat

SEQ ID NO: 3551226 - DNA, 25 bp, Homo sapien
tgattgactcctgtccaatgatgat

SEQ ID NO: 3551227 - DNA, 25 bp, Homo sapien
ttgaattccttttctcggagagaca

SEQ ID NO: 3551228 - DNA, 25 bp, Homo sapien
aagcttcagcttcgacattttcctg

SEQ ID NO: 3551229 - DNA, 25 bp, Homo sapien
gagagacacctcataggtttttacg

SEQ ID NO: 3551230 - DNA, 25 bp, Homo sapien
ctgtttccaagggcccttattgaat

SEQ ID NO: 3551231 - DNA, 25 bp, Homo sapien
gaaaaggccatcatagagacgcagg

SEQ ID NO: 3551232 - DNA, 25 bp, Homo sapien
cgcgatctagtggaataaccttgaa

SEQ ID NO: 3551233 - DNA, 25 bp, Homo sapien
gcaaatagtaggtgcttggcaacca

SEQ ID NO: 3551234 - DNA, 25 bp, Homo sapien
gatgccaataatgccggtctctgag

SEQ ID NO: 3551235 - DNA, 25 bp, Homo sapien
tctgtttatactccaggatgcaggc

SEQ ID NO: 3551236 - DNA, 25 bp, Homo sapien
tggacattgccatgggctcgcgtaa

SEQ ID NO: 3551237 - DNA, 25 bp, Homo sapien
gatgtcaatgctctcgccactctgt

SEQ ID NO: 3551238 - DNA, 25 bp, Homo sapien
ggatgcaggcattgtacttcgctgt

SEQ ID NO: 3551239 - DNA, 25 bp, Homo sapien
tgcccacctctttgacgggccgaag

SEQ ID NO: 3551240 - DNA, 25 bp, Homo sapien
taatctcgtgtttttggcaatcaac

SEQ ID NO: 3551241 - DNA, 25 bp, Homo sapien
ttgggcctgaaaagctccatgaccg

SEQ ID NO: 3551242 - DNA, 25 bp, Homo sapien
ctcggcggtgaccacatagatctct

SEQ ID NO: 3551243 - DNA, 25 bp, Homo sapien
taagagccgtgtgtcctccaaatga

SEQ ID NO: 3551244 - DNA, 25 bp, Homo sapien
ccaagtcaaatgaagaagtcccaga

SEQ ID NO: 3551245 - DNA, 25 bp, Homo sapien
taagatgactcttcccgggttctga

SEQ ID NO: 3551246 - DNA, 25 bp, Homo sapien
gaaaactggactggacctaagagcc

SEQ ID NO: 3551247 - DNA, 25 bp, Homo sapien
ccaaaaagcgcgtacagggacgact

SEQ ID NO: 3551248 - DNA, 25 bp, Homo sapien
gggaccctcgagagcggcttccaac

SEQ ID NO: 3551249 - DNA, 25 bp, Homo sapien
cgactctttcgaggtcgcggtgctg

SEQ ID NO: 3551250 - DNA, 25 bp, Homo sapien
ccctgttctcgaggccgaatgacct

SEQ ID NO: 3551251 - DNA, 25 bp, Homo sapien
tgggcttctgggccgttaccacgta

SEQ ID NO: 3551252 - DNA, 25 bp, Homo sapien
cggtcacgcagccgttcacggcggt

SEQ ID NO: 3551253 - DNA, 25 bp, Homo sapien
ccgttaccacgtagttgtacgacat

SEQ ID NO: 3551254 - DNA, 25 bp, Homo sapien
cgcagccgttcacggcggtgggctt

SEQ ID NO: 3551255 - DNA, 25 bp, Homo sapien
gtcgaggcttggagcggcccgtcgg

SEQ ID NO: 3551256 - DNA, 25 bp, Homo sapien
ttggagcggcccgtcgggactcgag

SEQ ID NO: 3551257 - DNA, 25 bp, Homo sapien
tcgaggcttggagcggcccgtcggg

SEQ ID NO: 3551258 - DNA, 25 bp, Homo sapien
ggcccgtcgggactcgagcgcgaca

SEQ ID NO: 3551259 - DNA, 25 bp, Homo sapien
gacacaagcgaaaagacaggtggcc

SEQ ID NO: 3551260 - DNA, 25 bp, Homo sapien
caacagcgcgcagcgaactccactg

SEQ ID NO: 3551261 - DNA, 25 bp, Homo sapien
cccagagacacgttgcaggccagag

SEQ ID NO: 3551262 - DNA, 25 bp, Homo sapien
ctagaaagagggacacaagcgaaaa

SEQ ID NO: 3551263 - DNA, 25 bp, Homo sapien
gaggtgcgccagtgtcctccgagct

SEQ ID NO: 3551264 - DNA, 25 bp, Homo sapien
aagtcgcggcgccttcggatgtggc

SEQ ID NO: 3551265 - DNA, 25 bp, Homo sapien
agtcctccttccgttgctccaggag

SEQ ID NO: 3551266 - DNA, 25 bp, Homo sapien
cagcgcccgcaggacccggatgaga

SEQ ID NO: 3551267 - DNA, 25 bp, Homo sapien
gggaagggagaccgcgattcgtgca

SEQ ID NO: 3551268 - DNA, 25 bp, Homo sapien
agggaagggagaccgcgattcgtgc

SEQ ID NO: 3551269 - DNA, 25 bp, Homo sapien
ctgcggaggcatagagagggaaggg

SEQ ID NO: 3551270 - DNA, 25 bp, Homo sapien
ggaagggagaccgcgattcgtgcat

SEQ ID NO: 3551271 - DNA, 25 bp, Homo sapien
tgctgctgcctccactgtactcaga

SEQ ID NO: 3551272 - DNA, 25 bp, Homo sapien
cactgtactcagacccaggtagcac

SEQ ID NO: 3551273 - DNA, 25 bp, Homo sapien
cctccactgtactcagacccaggta

SEQ ID NO: 3551274 - DNA, 25 bp, Homo sapien
acccaggtagcacaggattgtccat

SEQ ID NO: 3551275 - DNA, 25 bp, Homo sapien
tgtaatagacattgtaccggtcaca

SEQ ID NO: 3551276 - DNA, 25 bp, Homo sapien
taatagacattgtaccggtcacaga

SEQ ID NO: 3551277 - DNA, 25 bp, Homo sapien
tagacattgtaccggtcacagaagg

SEQ ID NO: 3551278 - DNA, 25 bp, Homo sapien
aatagacattgtaccggtcacagaa

SEQ ID NO: 3551279 - DNA, 25 bp, Homo sapien
cattggcccaccctctaagttgagc

SEQ ID NO: 3551280 - DNA, 25 bp, Homo sapien
tcttgcagagctagggtgtgtgact

SEQ ID NO: 3551281 - DNA, 25 bp, Homo sapien
ggcccaccctctaagttgagcagga

SEQ ID NO: 3551282 - DNA, 25 bp, Homo sapien
gaggtcttgcagagctagggtgtgt

SEQ ID NO: 3551283 - DNA, 25 bp, Homo sapien
tgttatagcagcctgaacaaagaca

SEQ ID NO: 3551284 - DNA, 25 bp, Homo sapien
gttatagcagcctgaacaaagacag

SEQ ID NO: 3551285 - DNA, 25 bp, Homo sapien
ttatagcagcctgaacaaagacagc

SEQ ID NO: 3551286 - DNA, 25 bp, Homo sapien
atatttaatgaaactcgagcttcat

SEQ ID NO: 3551287 - DNA, 25 bp, Homo sapien
acatatttaatgaaactcgagcttc

SEQ ID NO: 3551288 - DNA, 25 bp, Homo sapien
catatttaatgaaactcgagcttca

SEQ ID NO: 3551289 - DNA, 25 bp, Homo sapien
aacatatttaatgaaactcgagctt

SEQ ID NO: 3551290 - DNA, 25 bp, Homo sapien
gaggacatcccagtggctttgaagg

SEQ ID NO: 3551291 - DNA, 25 bp, Homo sapien
gaaggctccagccagtcaagacggt

SEQ ID NO: 3551292 - DNA, 25 bp, Homo sapien
aaatgcctacccctatggagatggg

SEQ ID NO: 3551293 - DNA, 25 bp, Homo sapien
tgccagagagtaggtgggctccaaa

SEQ ID NO: 3551294 - DNA, 25 bp, Homo sapien
ttaggagcaagacccttcccgctct

SEQ ID NO: 3551295 - DNA, 25 bp, Homo sapien
ctctccaccctatttcctcccctga

SEQ ID NO: 3551296 - DNA, 25 bp, Homo sapien
ctggcagtgcgtctttggagaaggc

SEQ ID NO: 3551297 - DNA, 25 bp, Homo sapien
gcaacacttaggagcaagacccttc

SEQ ID NO: 3551298 - DNA, 25 bp, Homo sapien
tctagcatggcacagaacgctaggt

SEQ ID NO: 3551299 - DNA, 25 bp, Homo sapien
tggcacagaacgctaggttgggcca

SEQ ID NO: 3551300 - DNA, 25 bp, Homo sapien
catggcacagaacgctaggttgggc

SEQ ID NO: 3551301 - DNA, 25 bp, Homo sapien
tagcatggcacagaacgctaggttg

SEQ ID NO: 3551302 - DNA, 25 bp, Homo sapien
cctgcccagcgggaggcaggaaggc

SEQ ID NO: 3551303 - DNA, 25 bp, Homo sapien
cagacctgcccagcgggaggcagga

SEQ ID NO: 3551304 - DNA, 25 bp, Homo sapien
gccagacctgcccagcgggaggcag

SEQ ID NO: 3551305 - DNA, 25 bp, Homo sapien
ggcaggaaggccctgatccagcaag

SEQ ID NO: 3551306 - DNA, 25 bp, Homo sapien
gagaagtagaggaagtccacagcca

SEQ ID NO: 3551307 - DNA, 25 bp, Homo sapien
agaagtagaggaagtccacagccac

SEQ ID NO: 3551308 - DNA, 25 bp, Homo sapien
aagtccacagccacctctgttactc

SEQ ID NO: 3551309 - DNA, 25 bp, Homo sapien
ccacagccacctctgttactcatcg

SEQ ID NO: 3551310 - DNA, 25 bp, Homo sapien
caggtcaccaggatttgtagggctg

SEQ ID NO: 3551311 - DNA, 25 bp, Homo sapien
aggtcaccaggatttgtagggctgc

SEQ ID NO: 3551312 - DNA, 25 bp, Homo sapien
tcttgggagagcaggtcaccaggat

SEQ ID NO: 3551313 - DNA, 25 bp, Homo sapien
ggagagcaggtcaccaggatttgta

SEQ ID NO: 3551314 - DNA, 25 bp, Homo sapien
gggaaaggccgggatccaggcctca

SEQ ID NO: 3551315 - DNA, 25 bp, Homo sapien
gtcacagggaaaggccgggatccag

SEQ ID NO: 3551316 - DNA, 25 bp, Homo sapien
aaggccgggatccaggcctcagctg

SEQ ID NO: 3551317 - DNA, 25 bp, Homo sapien
gaaaggccgggatccaggcctcagc

SEQ ID NO: 3551318 - DNA, 25 bp, Homo sapien
gggaagtggacggacacctcacctc

SEQ ID NO: 3551319 - DNA, 25 bp, Homo sapien
ccacatccctaggagtcttaagagg

SEQ ID NO: 3551320 - DNA, 25 bp, Homo sapien
tgtttcacaccgtggactgcacttg

SEQ ID NO: 3551321 - DNA, 25 bp, Homo sapien
gagccgcacggtcacaatacatgca

SEQ ID NO: 3551322 - DNA, 25 bp, Homo sapien
gaagaaagtcgcctgctgaaaccag

SEQ ID NO: 3551323 - DNA, 25 bp, Homo sapien
aggcaagaagtctgggcccagcatt

SEQ ID NO: 3551324 - DNA, 25 bp, Homo sapien
ctgacgccaaggagtgcagaagcca

SEQ ID NO: 3551325 - DNA, 25 bp, Homo sapien
gcccagcattggaagaaagtcgcct

SEQ ID NO: 3551326 - DNA, 25 bp, Homo sapien
gccagaaggatgtagagcaccagca

SEQ ID NO: 3551327 - DNA, 25 bp, Homo sapien
tgttggcaaagaccgcctcactggg

SEQ ID NO: 3551328 - DNA, 25 bp, Homo sapien
accagcatcccggtgctgttggcaa

SEQ ID NO: 3551329 - DNA, 25 bp, Homo sapien
ctgtctgtcggtcaggatccccggc

SEQ ID NO: 3551330 - DNA, 25 bp, Homo sapien
gtggtatggcctggtggtgtttttc

SEQ ID NO: 3551331 - DNA, 25 bp, Homo sapien
tgtggtatggcctggtggtgttttt

SEQ ID NO: 3551332 - DNA, 25 bp, Homo sapien
ctgtggtatggcctggtggtgtttt

SEQ ID NO: 3551333 - DNA, 25 bp, Homo sapien
cactaacagagggtgagaaaacctt

SEQ ID NO: 3551334 - DNA, 25 bp, Homo sapien
ccttcccgggtccatatgtgatcta

SEQ ID NO: 3551335 - DNA, 25 bp, Homo sapien
tgggagactcgatgtcactaacaga

SEQ ID NO: 3551336 - DNA, 25 bp, Homo sapien
gacaaaacaatgtgagccctcgaga

SEQ ID NO: 3551337 - DNA, 25 bp, Homo sapien
tagagttggggaccccactgcactc

SEQ ID NO: 3551338 - DNA, 25 bp, Homo sapien
gagttggggaccccactgcactcac

SEQ ID NO: 3551339 - DNA, 25 bp, Homo sapien
agagttggggaccccactgcactca

SEQ ID NO: 3551340 - DNA, 25 bp, Homo sapien
gatggcggctccaaaaaagacgtgg

SEQ ID NO: 3551341 - DNA, 25 bp, Homo sapien
gaaaagcttctcattaatgcccgaa

SEQ ID NO: 3551342 - DNA, 25 bp, Homo sapien
ggaggctgcgcagccacatggacgc

SEQ ID NO: 3551343 - DNA, 25 bp, Homo sapien
cgaaatgacggatgcgatggacaga

SEQ ID NO: 3551344 - DNA, 25 bp, Homo sapien
ctggcaggcgaagaggaagacagtg

SEQ ID NO: 3551345 - DNA, 25 bp, Homo sapien
gaagacagtggtgatgcccagccag

SEQ ID NO: 3551346 - DNA, 25 bp, Homo sapien
aggaagacagtggtgatgcccagcc

SEQ ID NO: 3551347 - DNA, 25 bp, Homo sapien
ggcaggcgaagaggaagacagtggt

SEQ ID NO: 3551348 - DNA, 25 bp, Homo sapien
tgtgaaacgtaaagacagcaaccag

SEQ ID NO: 3551349 - DNA, 25 bp, Homo sapien
tgcagcgctgcatggaggagtttcc

SEQ ID NO: 3551350 - DNA, 25 bp, Homo sapien
ccacaacagtgaggacgaaggccat

SEQ ID NO: 3551351 - DNA, 25 bp, Homo sapien
tggcagtccttccatggttgtgaaa

SEQ ID NO: 3551352 - DNA, 25 bp, Homo sapien
cagcaaccataagcactgggtgcca

SEQ ID NO: 3551353 - DNA, 25 bp, Homo sapien
aggcaaagccaccacgccagtactg

SEQ ID NO: 3551354 - DNA, 25 bp, Homo sapien
ccagtagatagtgaagaggatgcac

SEQ ID NO: 3551355 - DNA, 25 bp, Homo sapien
acaagtagaaccgtccagacaccat

SEQ ID NO: 3551356 - DNA, 25 bp, Homo sapien
ctaaaggaggtaacactgatttagc

SEQ ID NO: 3551357 - DNA, 25 bp, Homo sapien
ctggctaaaggaggtaacactgatt

SEQ ID NO: 3551358 - DNA, 25 bp, Homo sapien
ggctaaaggaggtaacactgattta

SEQ ID NO: 3551359 - DNA, 25 bp, Homo sapien
aaaggaggtaacactgatttagctc

SEQ ID NO: 3551360 - DNA, 25 bp, Homo sapien
tcactggagaggtaaccaggccttc

SEQ ID NO: 3551361 - DNA, 25 bp, Homo sapien
cccatagagtaagctctatggggct

SEQ ID NO: 3551362 - DNA, 25 bp, Homo sapien
tatggggctaatcttcactggagag

SEQ ID NO: 3551363 - DNA, 25 bp, Homo sapien
agctctatggggctaatcttcactg

SEQ ID NO: 3551364 - DNA, 25 bp, Homo sapien
ttgaaccagctgatgcccctcagct

SEQ ID NO: 3551365 - DNA, 25 bp, Homo sapien
cttgaaccagctgatgcccctcagc

SEQ ID NO: 3551366 - DNA, 25 bp, Homo sapien
tgaaccagctgatgcccctcagctg

SEQ ID NO: 3551367 - DNA, 25 bp, Homo sapien
agccctaatgataggctcagagaac

SEQ ID NO: 3551368 - DNA, 25 bp, Homo sapien
cgaaatgggcaccttgagcaaatca

SEQ ID NO: 3551369 - DNA, 25 bp, Homo sapien
taatgataggctcagagaactggcc

SEQ ID NO: 3551370 - DNA, 25 bp, Homo sapien
ctgggctccaattcctgcgaaatgg

SEQ ID NO: 3551371 - DNA, 25 bp, Homo sapien
aatgcagtccgaaaggatctgtagc

SEQ ID NO: 3551372 - DNA, 25 bp, Homo sapien
agacttagaatagaccctgggcaca

SEQ ID NO: 3551373 - DNA, 25 bp, Homo sapien
tgtagccacaccctagaaaaggtcc

SEQ ID NO: 3551374 - DNA, 25 bp, Homo sapien
gaaaaggtcctggtttactgctctg

SEQ ID NO: 3551375 - DNA, 25 bp, Homo sapien
tagaaaaaggctctacgcaggctgg

SEQ ID NO: 3551376 - DNA, 25 bp, Homo sapien
gggtaagaaatgctagttcccatcc

SEQ ID NO: 3551377 - DNA, 25 bp, Homo sapien
ccggctgagctaaaacaggtcacat

SEQ ID NO: 3551378 - DNA, 25 bp, Homo sapien
cgaaaaaggattctcccggctgagc

SEQ ID NO: 3551379 - DNA, 25 bp, Homo sapien
tataaccaccgcgttggaaggaaga

SEQ ID NO: 3551380 - DNA, 25 bp, Homo sapien
tgctcgtgccagctaacaatgggtg

SEQ ID NO: 3551381 - DNA, 25 bp, Homo sapien
tcaggtgtccaaagaaccgttccag

SEQ ID NO: 3551382 - DNA, 25 bp, Homo sapien
tgcgaagcgagatagcagcggaacc

SEQ ID NO: 3551383 - DNA, 25 bp, Homo sapien
taaccacagtgggacgaagtgaggc

SEQ ID NO: 3551384 - DNA, 25 bp, Homo sapien
tctccaagtccgaagtcagggtcca

SEQ ID NO: 3551385 - DNA, 25 bp, Homo sapien
cctgggaagtgaagtccggagacca

SEQ ID NO: 3551386 - DNA, 25 bp, Homo sapien
gaacagcgaaagctccaacatggcg

SEQ ID NO: 3551387 - DNA, 25 bp, Homo sapien
caagttcgaaggtgacctcttgtca

SEQ ID NO: 3551388 - DNA, 25 bp, Homo sapien
tgccgagggttctgtggctcttacc

SEQ ID NO: 3551389 - DNA, 25 bp, Homo sapien
ggccctatgcatgggcaaacagctg

SEQ ID NO: 3551390 - DNA, 25 bp, Homo sapien
aaggttcagactagctgtgttcagc

SEQ ID NO: 3551391 - DNA, 25 bp, Homo sapien
tgtcccacatgagcacggagagcct

SEQ ID NO: 3551392 - DNA, 25 bp, Homo sapien
tacgagctgtgctatacctgtccca

SEQ ID NO: 3551393 - DNA, 25 bp, Homo sapien
gagcatctcgtgtggaccatctagg

SEQ ID NO: 3551394 - DNA, 25 bp, Homo sapien
caactcagcataaggccagtgggta

SEQ ID NO: 3551395 - DNA, 25 bp, Homo sapien
caaaaggaaaaaaatacaatgcagt

SEQ ID NO: 3551396 - DNA, 25 bp, Homo sapien
acagctcacaccccatttattattt

SEQ ID NO: 3551397 - DNA, 25 bp, Homo sapien
agctcacaccccatttattatttaa

SEQ ID NO: 3551398 - DNA, 25 bp, Homo sapien
tacaaaaggaaaaaaatacaatgca

SEQ ID NO: 3551399 - DNA, 25 bp, Homo sapien
gacaaacaaatcaccgacaacaggg

SEQ ID NO: 3551400 - DNA, 25 bp, Homo sapien
agaagtagcatcaccccatgggtac

SEQ ID NO: 3551401 - DNA, 25 bp, Homo sapien
gacacccggagttgctctcaataag

SEQ ID NO: 3551402 - DNA, 25 bp, Homo sapien
actgagggctatatgagaaacgtgc

SEQ ID NO: 3551403 - DNA, 25 bp, Homo sapien
gctgagttcattcaagtcgggctct

SEQ ID NO: 3551404 - DNA, 25 bp, Homo sapien
tgagctgagttcattcaagtcgggc

SEQ ID NO: 3551405 - DNA, 25 bp, Homo sapien
ctctgagctgagttcattcaagtcg

SEQ ID NO: 3551406 - DNA, 25 bp, Homo sapien
gttcattcaagtcgggctctgtttc

SEQ ID NO: 3551407 - DNA, 25 bp, Homo sapien
tggaagtaggccatatcctgcccaa

SEQ ID NO: 3551408 - DNA, 25 bp, Homo sapien
ccattaaatctagtgctgagggcag

SEQ ID NO: 3551409 - DNA, 25 bp, Homo sapien
gaggtacccaagcactaagcagcag

SEQ ID NO: 3551410 - DNA, 25 bp, Homo sapien
ccgtcaatacgtgagagggaaagca

SEQ ID NO: 3551411 - DNA, 25 bp, Homo sapien
cggctcccggagaatcagaaactca

SEQ ID NO: 3551412 - DNA, 25 bp, Homo sapien
tacgttttcttggacaaagcaccat

SEQ ID NO: 3551413 - DNA, 25 bp, Homo sapien
cattctctatggagaccaggggcct

SEQ ID NO: 3551414 - DNA, 25 bp, Homo sapien
gagaatcagaaactcatacgttttc

SEQ ID NO: 3551415 - DNA, 25 bp, Homo sapien
tgaggagatgcaagtccattaaaaa

SEQ ID NO: 3551416 - DNA, 25 bp, Homo sapien
tcccaatcacacgaagtctttaggt

SEQ ID NO: 3551417 - DNA, 25 bp, Homo sapien
cgtcctttagtcctgatcaaggtga

SEQ ID NO: 3551418 - DNA, 25 bp, Homo sapien
gattgggaggactgccaagcagtct

SEQ ID NO: 3551419 - DNA, 25 bp, Homo sapien
gactgtctgacactagaagtggtga

SEQ ID NO: 3551420 - DNA, 25 bp, Homo sapien
gaggtctctgaacgttcgactgaaa

SEQ ID NO: 3551421 - DNA, 25 bp, Homo sapien
gctgcaaaagtatggaaactgtgac

SEQ ID NO: 3551422 - DNA, 25 bp, Homo sapien
actgaaaaggagactttggctgcaa

SEQ ID NO: 3551423 - DNA, 25 bp, Homo sapien
taacactaagcaggagtcacgtggc

SEQ ID NO: 3551424 - DNA, 25 bp, Homo sapien
tgtctaaacacctacgcaggctggt

SEQ ID NO: 3551425 - DNA, 25 bp, Homo sapien
catgacagccataggtgaggaacca

SEQ ID NO: 3551426 - DNA, 25 bp, Homo sapien
caatgctgcaatacccatctgcggg

SEQ ID NO: 3551427 - DNA, 25 bp, Homo sapien
cacaggttgcagaggataacttgta

SEQ ID NO: 3551428 - DNA, 25 bp, Homo sapien
gataactgacatagttgagaactac

SEQ ID NO: 3551429 - DNA, 25 bp, Homo sapien
caagagaagcaagccatagcactga

SEQ ID NO: 3551430 - DNA, 25 bp, Homo sapien
taacgaggacaggaatgacgtgaga

SEQ ID NO: 3551431 - DNA, 25 bp, Homo sapien
tgggcctacacaagtcaaatgactg

SEQ ID NO: 3551432 - DNA, 25 bp, Homo sapien
tgaaacttcctaagccataacttgg

SEQ ID NO: 3551433 - DNA, 25 bp, Homo sapien
cactatatcaaacgggtgaccagga

SEQ ID NO: 3551434 - DNA, 25 bp, Homo sapien
tgaggaccatgtaccatcttcccaa

SEQ ID NO: 3551435 - DNA, 25 bp, Homo sapien
caagacagagggcagtagccaaacc

SEQ ID NO: 3551436 - DNA, 25 bp, Homo sapien
tgtggtctccatctacaatagcgtc

SEQ ID NO: 3551437 - DNA, 25 bp, Homo sapien
aaatgagtggctaacaacagagaac

SEQ ID NO: 3551438 - DNA, 25 bp, Homo sapien
cagaggatacatgggcatctcccca

SEQ ID NO: 3551439 - DNA, 25 bp, Homo sapien
accgtgctcggccaaggacatcttc

SEQ ID NO: 3551440 - DNA, 25 bp, Homo sapien
agagaaatgggaagtcctagagact

SEQ ID NO: 3551441 - DNA, 25 bp, Homo sapien
tagagacttataaatctgcaaccac

SEQ ID NO: 3551442 - DNA, 25 bp, Homo sapien
cttcctaatgtacttgatgtgagac

SEQ ID NO: 3551443 - DNA, 25 bp, Homo sapien
ccaaattactgaagtgatgggatta

SEQ ID NO: 3551444 - DNA, 25 bp, Homo sapien
caaggccaacctggccagtatggta

SEQ ID NO: 3551445 - DNA, 25 bp, Homo sapien
tatactccagcgtgggcggcaaagt

SEQ ID NO: 3551446 - DNA, 25 bp, Homo sapien
cagtatggtaaagccccgcctctac

SEQ ID NO: 3551447 - DNA, 25 bp, Homo sapien
cagctgaatctcagggtaagactcc

SEQ ID NO: 3551448 - DNA, 25 bp, Homo sapien
gataccaggttaaggcagtcaagaa

SEQ ID NO: 3551449 - DNA, 25 bp, Homo sapien
actgggattcaaattggtacctgaa

SEQ ID NO: 3551450 - DNA, 25 bp, Homo sapien
ccatactctcactcagataccaggt

SEQ ID NO: 3551451 - DNA, 25 bp, Homo sapien
taggtgacctttcccgggagcgatg

SEQ ID NO: 3551452 - DNA, 25 bp, Homo sapien
ggtgtctctcatgctcccggttcct

SEQ ID NO: 3551453 - DNA, 25 bp, Homo sapien
cagtggtgccggtcccgttctctat

SEQ ID NO: 3551454 - DNA, 25 bp, Homo sapien
tcattatgaagcagatcccggtgcc

SEQ ID NO: 3551455 - DNA, 25 bp, Homo sapien
tcatcattggcaacccgggactgtt

SEQ ID NO: 3551456 - DNA, 25 bp, Homo sapien
cactgtaggacttggcttcgatgcc

SEQ ID NO: 3551457 - DNA, 25 bp, Homo sapien
aggacacggcaacgctcatcattgg

SEQ ID NO: 3551458 - DNA, 25 bp, Homo sapien
gataaccgcaatggctgtgagcagc

SEQ ID NO: 3551459 - DNA, 25 bp, Homo sapien
caaccactgagatggagatttccac

SEQ ID NO: 3551460 - DNA, 25 bp, Homo sapien
cattaagttggttttcatgagggca

SEQ ID NO: 3551461 - DNA, 25 bp, Homo sapien
tcattcctaaagaagacccagggtc

SEQ ID NO: 3551462 - DNA, 25 bp, Homo sapien
ctaagtaatactgccggagcttccc

SEQ ID NO: 3551463 - DNA, 25 bp, Homo sapien
tatcttcaaattcggcttcactcac

SEQ ID NO: 3551464 - DNA, 25 bp, Homo sapien
ctgtttcgcttcatgatatcttcaa

SEQ ID NO: 3551465 - DNA, 25 bp, Homo sapien
gcttcactcactgtagagggtggag

SEQ ID NO: 3551466 - DNA, 25 bp, Homo sapien
tgtagagggtggagggcccgaatct

SEQ ID NO: 3551467 - DNA, 25 bp, Homo sapien
catccttgattgctcacatccctta

SEQ ID NO: 3551468 - DNA, 25 bp, Homo sapien
ccttgattgctcacatcccttatta

SEQ ID NO: 3551469 - DNA, 25 bp, Homo sapien
tgattgctcacatcccttattattt

SEQ ID NO: 3551470 - DNA, 25 bp, Homo sapien
aataccatccttgattgctcacatc

SEQ ID NO: 3551471 - DNA, 25 bp, Homo sapien
catgtaagtatctggtggaggcccc

SEQ ID NO: 3551472 - DNA, 25 bp, Homo sapien
ggcagaggccttcatgtaagtatct

SEQ ID NO: 3551473 - DNA, 25 bp, Homo sapien
ggttatagggggcagaggccttcat

SEQ ID NO: 3551474 - DNA, 25 bp, Homo sapien
gccatggtggttatagggggcagag

SEQ ID NO: 3551475 - DNA, 25 bp, Homo sapien
aaggctggattgaggtgaagggcag

SEQ ID NO: 3551476 - DNA, 25 bp, Homo sapien
ggtggggggaagaaggctggattga

SEQ ID NO: 3551477 - DNA, 25 bp, Homo sapien
tggtggggggaagaaggctggattg

SEQ ID NO: 3551478 - DNA, 25 bp, Homo sapien
aagaaggctggattgaggtgaaggg

SEQ ID NO: 3551479 - DNA, 25 bp, Homo sapien
ggccccagggggaggtacagcaaga

SEQ ID NO: 3551480 - DNA, 25 bp, Homo sapien
gatgaggaggtaatcgaggaggtgg

SEQ ID NO: 3551481 - DNA, 25 bp, Homo sapien
gcatgagatgctggtagtggatacc

SEQ ID NO: 3551482 - DNA, 25 bp, Homo sapien
cccagggggaggtacagcaagatga

SEQ ID NO: 3551483 - DNA, 25 bp, Homo sapien
cgaaggaggacgattgaagtagggc

SEQ ID NO: 3551484 - DNA, 25 bp, Homo sapien
aaggaggacgattgaagtagggcag

SEQ ID NO: 3551485 - DNA, 25 bp, Homo sapien
ctggggggcttatccacacgagcag

SEQ ID NO: 3551486 - DNA, 25 bp, Homo sapien
ggccgaaggaggacgattgaagtag

SEQ ID NO: 3551487 - DNA, 25 bp, Homo sapien
gtgtggcccgtccatcagcagaatc

SEQ ID NO: 3551488 - DNA, 25 bp, Homo sapien
ctagaatctcgggaatgggcccgtg

SEQ ID NO: 3551489 - DNA, 25 bp, Homo sapien
gcagaatcactagaatctcgggaat

SEQ ID NO: 3551490 - DNA, 25 bp, Homo sapien
tacaaggttctcagagggtgtggcc

SEQ ID NO: 3551491 - DNA, 25 bp, Homo sapien
cctcttgggactcggacacactcac

SEQ ID NO: 3551492 - DNA, 25 bp, Homo sapien
cccctcttgggactcggacacactc

SEQ ID NO: 3551493 - DNA, 25 bp, Homo sapien
ccctcttgggactcggacacactca

SEQ ID NO: 3551494 - DNA, 25 bp, Homo sapien
tgtgacaggttctgccgggtggccg

SEQ ID NO: 3551495 - DNA, 25 bp, Homo sapien
gtaggagttccaacaatttgtggac

SEQ ID NO: 3551496 - DNA, 25 bp, Homo sapien
tggccggcctcacgtccactttttc

SEQ ID NO: 3551497 - DNA, 25 bp, Homo sapien
ccgagcctgtgcctcaaactgtgac

SEQ ID NO: 3551498 - DNA, 25 bp, Homo sapien
tattcttcgccccttaacagatgga

SEQ ID NO: 3551499 - DNA, 25 bp, Homo sapien
cagggccaaaatatagtacagatct

SEQ ID NO: 3551500 - DNA, 25 bp, Homo sapien
gcagctaggtccctttctaaggcag

SEQ ID NO: 3551501 - DNA, 25 bp, Homo sapien
gatggatattctactacactgcagc

SEQ ID NO: 3551502 - DNA, 25 bp, Homo sapien
ttgctcgattctctgcaaatttcaa

SEQ ID NO: 3551503 - DNA, 25 bp, Homo sapien
tatagagcgaataacctggatcagc

SEQ ID NO: 3551504 - DNA, 25 bp, Homo sapien
cacatcatagactcctatagagcga

SEQ ID NO: 3551505 - DNA, 25 bp, Homo sapien
ctttggactggccatttgctcgatt

SEQ ID NO: 3551506 - DNA, 25 bp, Homo sapien
tggggccggcaagatggaaaaggaa

SEQ ID NO: 3551507 - DNA, 25 bp, Homo sapien
atggaaaaggaagagatgtcaagag

SEQ ID NO: 3551508 - DNA, 25 bp, Homo sapien
ctggggccggcaagatggaaaagga

SEQ ID NO: 3551509 - DNA, 25 bp, Homo sapien
gcaagatggaaaaggaagagatgtc

SEQ ID NO: 3551510 - DNA, 25 bp, Homo sapien
gtcctcacccatacagaattccaaa

SEQ ID NO: 3551511 - DNA, 25 bp, Homo sapien
gcctggcaatatttcaattagtgca

SEQ ID NO: 3551512 - DNA, 25 bp, Homo sapien
ccgccaatgtcccaaacccaggatt

SEQ ID NO: 3551513 - DNA, 25 bp, Homo sapien
ggattctagtcacaactaagtcccc

SEQ ID NO: 3551514 - DNA, 25 bp, Homo sapien
tcaaggtgttcactctgaaatctcg

SEQ ID NO: 3551515 - DNA, 25 bp, Homo sapien
cattatcacaggaccatctaatgac

SEQ ID NO: 3551516 - DNA, 25 bp, Homo sapien
ctgaaatctcgtccctcagatgacc

SEQ ID NO: 3551517 - DNA, 25 bp, Homo sapien
tctaatgaccaccaagagttcaagg

SEQ ID NO: 3551518 - DNA, 25 bp, Homo sapien
tagttctctttcagagatcaatcca

SEQ ID NO: 3551519 - DNA, 25 bp, Homo sapien
aatcattgctttcttcggcaccagt

SEQ ID NO: 3551520 - DNA, 25 bp, Homo sapien
cagtacgtcctcaggatagttctct

SEQ ID NO: 3551521 - DNA, 25 bp, Homo sapien
gttctctttcagagatcaatccaac

SEQ ID NO: 3551522 - DNA, 25 bp, Homo sapien
taaacggcagctcgtctattacgca

SEQ ID NO: 3551523 - DNA, 25 bp, Homo sapien
gagaagctgcccacataaacggcag

SEQ ID NO: 3551524 - DNA, 25 bp, Homo sapien
cactgtaggtatacagaattgcagg

SEQ ID NO: 3551525 - DNA, 25 bp, Homo sapien
caggtcaatctgatctgtattgttg

SEQ ID NO: 3551526 - DNA, 25 bp, Homo sapien
aaaagtctgaactgggcagagtggc

SEQ ID NO: 3551527 - DNA, 25 bp, Homo sapien
taaggaccgctcttgttatcttggt

SEQ ID NO: 3551528 - DNA, 25 bp, Homo sapien
gcctagtgtcaaatattgcccgttg

SEQ ID NO: 3551529 - DNA, 25 bp, Homo sapien
gaggagaccagagaacaaactattg

SEQ ID NO: 3551530 - DNA, 25 bp, Homo sapien
caaatccaactgagggtatgtgcat

SEQ ID NO: 3551531 - DNA, 25 bp, Homo sapien
tgcccagctctagataaatttctgt

SEQ ID NO: 3551532 - DNA, 25 bp, Homo sapien
tgcctgtggacttctcatgactgga

SEQ ID NO: 3551533 - DNA, 25 bp, Homo sapien
tggagtcaacctacttataaaagga

SEQ ID NO: 3551534 - DNA, 25 bp, Homo sapien
tatatatcaatcaagtccactcctt

SEQ ID NO: 3551535 - DNA, 25 bp, Homo sapien
ctcgtcagcatatatatcaatcaag

SEQ ID NO: 3551536 - DNA, 25 bp, Homo sapien
ctggttgaactcctcgtcagcatat

SEQ ID NO: 3551537 - DNA, 25 bp, Homo sapien
caatcaagtccactccttctgacat

SEQ ID NO: 3551538 - DNA, 25 bp, Homo sapien
ctccggaaggaagatcgcgagtccg

SEQ ID NO: 3551539 - DNA, 25 bp, Homo sapien
tccggaggatggacaaagtaaggaa

SEQ ID NO: 3551540 - DNA, 25 bp, Homo sapien
atcgcgagtccggaggatggacaaa

SEQ ID NO: 3551541 - DNA, 25 bp, Homo sapien
ggctccggaaggaagatcgcgagtc

SEQ ID NO: 3551542 - DNA, 25 bp, Homo sapien
ctgcgggattcggaaaaatgcaaga

SEQ ID NO: 3551543 - DNA, 25 bp, Homo sapien
gcgggattcggaaaaatgcaagaat

SEQ ID NO: 3551544 - DNA, 25 bp, Homo sapien
tgcgggattcggaaaaatgcaagaa

SEQ ID NO: 3551545 - DNA, 25 bp, Homo sapien
tcctccctcaaaaggcccgcgactc

SEQ ID NO: 3551546 - DNA, 25 bp, Homo sapien
ctcctccctcaaaaggcccgcgact

SEQ ID NO: 3551547 - DNA, 25 bp, Homo sapien
tctgcctcctccctcaaaaggcccg

SEQ ID NO: 3551548 - DNA, 25 bp, Homo sapien
tgcctcctccctcaaaaggcccgcg

SEQ ID NO: 3551549 - DNA, 25 bp, Homo sapien
cctcagtgccggcccggacccctct

SEQ ID NO: 3551550 - DNA, 25 bp, Homo sapien
tcccgcctcagtgccggcccggacc

SEQ ID NO: 3551551 - DNA, 25 bp, Homo sapien
ctcagtgccggcccggacccctctt

SEQ ID NO: 3551552 - DNA, 25 bp, Homo sapien
cgcctcagtgccggcccggacccct

SEQ ID NO: 3551553 - DNA, 25 bp, Homo sapien
cggactaggcccgaagcgcgcgaac

SEQ ID NO: 3551554 - DNA, 25 bp, Homo sapien
cgagtccggactaggcccgaagcgc

SEQ ID NO: 3551555 - DNA, 25 bp, Homo sapien
gcggcggcgagtccggactaggccc

SEQ ID NO: 3551556 - DNA, 25 bp, Homo sapien
gactaggcccgaagcgcgcgaaccg

SEQ ID NO: 3551557 - DNA, 25 bp, Homo sapien
tgggcacactgcttaggagtcaaca

SEQ ID NO: 3551558 - DNA, 25 bp, Homo sapien
tgcctcagcccaagtgtactcaaag

SEQ ID NO: 3551559 - DNA, 25 bp, Homo sapien
tgcgtgctgtatggaaagcctcccg

SEQ ID NO: 3551560 - DNA, 25 bp, Homo sapien
gctatctctagaggcaagtctgcca

SEQ ID NO: 3551561 - DNA, 25 bp, Homo sapien
ttggtgattataggagccgcacaca

SEQ ID NO: 3551562 - DNA, 25 bp, Homo sapien
ggcagtagaatcagtcacccagact

SEQ ID NO: 3551563 - DNA, 25 bp, Homo sapien
gaaggtcggccagatttgatgagca

SEQ ID NO: 3551564 - DNA, 25 bp, Homo sapien
gaccaggtgcatctaaaggtgttga

SEQ ID NO: 3551565 - DNA, 25 bp, Homo sapien
gaggtgattcgtagctcagctctgg

SEQ ID NO: 3551566 - DNA, 25 bp, Homo sapien
aaggtcccggcgctttctggagaat

SEQ ID NO: 3551567 - DNA, 25 bp, Homo sapien
tatagtagttcccacgtagagccgg

SEQ ID NO: 3551568 - DNA, 25 bp, Homo sapien
gaaacgggaatcttactgcccagga

SEQ ID NO: 3551569 - DNA, 25 bp, Homo sapien
gcacagaacagcatttgacagtgtg

SEQ ID NO: 3551570 - DNA, 25 bp, Homo sapien
tcagacggccttggcgcagagccat

SEQ ID NO: 3551571 - DNA, 25 bp, Homo sapien
ctgagcacagaacagcatttgacag

SEQ ID NO: 3551572 - DNA, 25 bp, Homo sapien
gcgcagagccatgctctcctggtgg

SEQ ID NO: 3551573 - DNA, 25 bp, Homo sapien
ctccagtataggatcctggtgtcaa

SEQ ID NO: 3551574 - DNA, 25 bp, Homo sapien
taggatcctggtgtcaaaaggaatc

SEQ ID NO: 3551575 - DNA, 25 bp, Homo sapien
tgtcaaaaggaatcagatacggctc

SEQ ID NO: 3551576 - DNA, 25 bp, Homo sapien
cctggtgtcaaaaggaatcagatac

SEQ ID NO: 3551577 - DNA, 25 bp, Homo sapien
cggacaccgtgttcctcgtgggcga

SEQ ID NO: 3551578 - DNA, 25 bp, Homo sapien
gcttgcgcggcctctggctctacgg

SEQ ID NO: 3551579 - DNA, 25 bp, Homo sapien
cagtcgctccagatgggcgacaacc

SEQ ID NO: 3551580 - DNA, 25 bp, Homo sapien
tacggcaaccgcttcgaggagttcc

SEQ ID NO: 3551581 - DNA, 25 bp, Homo sapien
aggcggcgctggttcccgggctctg

SEQ ID NO: 3551582 - DNA, 25 bp, Homo sapien
ctggaagccgctccaggactgggca

SEQ ID NO: 3551583 - DNA, 25 bp, Homo sapien
tgctcataggcggcgctggttcccg

SEQ ID NO: 3551584 - DNA, 25 bp, Homo sapien
tggaagccgctccaggactgggcac

SEQ ID NO: 3551585 - DNA, 25 bp, Homo sapien
cctacttaggtcaatggaacggcta

SEQ ID NO: 3551586 - DNA, 25 bp, Homo sapien
tacttttggcgagttgccgggcaca

SEQ ID NO: 3551587 - DNA, 25 bp, Homo sapien
gaattgtcacgtctccctgagtctg

SEQ ID NO: 3551588 - DNA, 25 bp, Homo sapien
taagaggactgactataccctggct

SEQ ID NO: 3551589 - DNA, 25 bp, Homo sapien
gaacgtttattagcacacctgggcg

SEQ ID NO: 3551590 - DNA, 25 bp, Homo sapien
cgtcttcacgggaaacagatggtct

SEQ ID NO: 3551591 - DNA, 25 bp, Homo sapien
gcatcggcgtgctcaaggcttgtcc

SEQ ID NO: 3551592 - DNA, 25 bp, Homo sapien
catggagagcgcctgaacagaagct

SEQ ID NO: 3551593 - DNA, 25 bp, Homo sapien
ggaggcgctggcctgaaactacagt

SEQ ID NO: 3551594 - DNA, 25 bp, Homo sapien
cctgatctgggagatgtagctgcct

SEQ ID NO: 3551595 - DNA, 25 bp, Homo sapien
caagtgtcctctgggaactgaggga

SEQ ID NO: 3551596 - DNA, 25 bp, Homo sapien
gagatctgaggatggctggacactc

SEQ ID NO: 3551597 - DNA, 25 bp, Homo sapien
cttcatttctcttcgctgcaaaatt

SEQ ID NO: 3551598 - DNA, 25 bp, Homo sapien
cacgatcctttattaatcagaacag

SEQ ID NO: 3551599 - DNA, 25 bp, Homo sapien
ggaaatcttgctggcttagagggta

SEQ ID NO: 3551600 - DNA, 25 bp, Homo sapien
caggccttgccacaaaaagcagggc

SEQ ID NO: 3551601 - DNA, 25 bp, Homo sapien
tcaagaacatacaaacagtggccac

SEQ ID NO: 3551602 - DNA, 25 bp, Homo sapien
taattacactttgctcacgggtagc

SEQ ID NO: 3551603 - DNA, 25 bp, Homo sapien
cccgccaaagaggaggatgcagttg

SEQ ID NO: 3551604 - DNA, 25 bp, Homo sapien
taaggactaagtctagggcacccac

SEQ ID NO: 3551605 - DNA, 25 bp, Homo sapien
ttgtatcaataccaggaccagcgtg

SEQ ID NO: 3551606 - DNA, 25 bp, Homo sapien
tggacacaacacgagtacaaagggc

SEQ ID NO: 3551607 - DNA, 25 bp, Homo sapien
gaccacgcacgatgagacggaatga

SEQ ID NO: 3551608 - DNA, 25 bp, Homo sapien
gagtcctggtggaatgctatgcaca

SEQ ID NO: 3551609 - DNA, 25 bp, Homo sapien
agctggtgccactgggccacgggct

SEQ ID NO: 3551610 - DNA, 25 bp, Homo sapien
cccctggcccgctcttccaggacag

SEQ ID NO: 3551611 - DNA, 25 bp, Homo sapien
tcccctggcccgctcttccaggaca

SEQ ID NO: 3551612 - DNA, 25 bp, Homo sapien
gggtttatgtcacagaatcccgtcc

SEQ ID NO: 3551613 - DNA, 25 bp, Homo sapien
gaattttttggttacgtgatatgaa

SEQ ID NO: 3551614 - DNA, 25 bp, Homo sapien
ggttacgtgatatgaagagatcact

SEQ ID NO: 3551615 - DNA, 25 bp, Homo sapien
tcacagaatcccgtcctgggaaaac

SEQ ID NO: 3551616 - DNA, 25 bp, Homo sapien
tgtcacagcctcctgagtagctggg

SEQ ID NO: 3551617 - DNA, 25 bp, Homo sapien
tgggtacaagggattctcctgtcac

SEQ ID NO: 3551618 - DNA, 25 bp, Homo sapien
tcccgaccgcagatgatccacccgt

SEQ ID NO: 3551619 - DNA, 25 bp, Homo sapien
ccgaccgcagatgatccacccgtct

SEQ ID NO: 3551620 - DNA, 25 bp, Homo sapien
tacagggacagtattagttgctcca

SEQ ID NO: 3551621 - DNA, 25 bp, Homo sapien
tatggttgtttatcggcagatggag

SEQ ID NO: 3551622 - DNA, 25 bp, Homo sapien
caattcttacgccaccctgtaaagt

SEQ ID NO: 3551623 - DNA, 25 bp, Homo sapien
gaacactaaagcttggagaggccga

SEQ ID NO: 3551624 - DNA, 25 bp, Homo sapien
gatgatgatggtcgtctccctcagc

SEQ ID NO: 3551625 - DNA, 25 bp, Homo sapien
tgtacatcagccataccttcacgta

SEQ ID NO: 3551626 - DNA, 25 bp, Homo sapien
gtcattgcggctgagcttgtccttg

SEQ ID NO: 3551627 - DNA, 25 bp, Homo sapien
tatcgaaggcgaaggactcattgaa

SEQ ID NO: 3551628 - DNA, 25 bp, Homo sapien
gcagaggggttgtagcagagagaca

SEQ ID NO: 3551629 - DNA, 25 bp, Homo sapien
tgatgtgcccccgatgtccatggct

SEQ ID NO: 3551630 - DNA, 25 bp, Homo sapien
cccgatgtccatggctttgaggttc

SEQ ID NO: 3551631 - DNA, 25 bp, Homo sapien
gatgatgttcacgatgatggagttg

SEQ ID NO: 3551632 - DNA, 25 bp, Homo sapien
catagtccaggacttggaggtagag

SEQ ID NO: 3551633 - DNA, 25 bp, Homo sapien
cgttgcggctgaagcggtcatagtc

SEQ ID NO: 3551634 - DNA, 25 bp, Homo sapien
ccatcgctgcatggcttcagatcct

SEQ ID NO: 3551635 - DNA, 25 bp, Homo sapien
ttccagaaggtctgcatctgggtca

SEQ ID NO: 3551636 - DNA, 25 bp, Homo sapien
tgtagccgacactgaactggatccg

SEQ ID NO: 3551637 - DNA, 25 bp, Homo sapien
tcaaagaggaaggtctcgttccagt

SEQ ID NO: 3551638 - DNA, 25 bp, Homo sapien
tgtgcttcttgtcgggcagcaggta

SEQ ID NO: 3551639 - DNA, 25 bp, Homo sapien
tcgctggtgccgctgaagtccttgg

SEQ ID NO: 3551640 - DNA, 25 bp, Homo sapien
ggtgcttcctgagcgcttgcaccag

SEQ ID NO: 3551641 - DNA, 25 bp, Homo sapien
aaggtgcttcctgagcgcttgcacc

SEQ ID NO: 3551642 - DNA, 25 bp, Homo sapien
gcttcctgagcgcttgcaccagcag

SEQ ID NO: 3551643 - DNA, 25 bp, Homo sapien
ttcctgagcgcttgcaccagcagaa

SEQ ID NO: 3551644 - DNA, 25 bp, Homo sapien
gaagctgtaaccaattaaggggctg

SEQ ID NO: 3551645 - DNA, 25 bp, Homo sapien
caggaagctgtaaccaattaagggg

SEQ ID NO: 3551646 - DNA, 25 bp, Homo sapien
gctgtaaccaattaaggggctgtgc

SEQ ID NO: 3551647 - DNA, 25 bp, Homo sapien
gtaaccaattaaggggctgtgcagg

SEQ ID NO: 3551648 - DNA, 25 bp, Homo sapien
tgagcatctcgctggtgagggagtt

SEQ ID NO: 3551649 - DNA, 25 bp, Homo sapien
tcggtccggcggtcggactcatcgt

SEQ ID NO: 3551650 - DNA, 25 bp, Homo sapien
gtctgagacggaggaacgtggctcg

SEQ ID NO: 3551651 - DNA, 25 bp, Homo sapien
tgagggagttgacgaggtctgagac

SEQ ID NO: 3551652 - DNA, 25 bp, Homo sapien
agcgatggcacgcagggatcccgag

SEQ ID NO: 3551653 - DNA, 25 bp, Homo sapien
cagggatcccgagaggagatgcact

SEQ ID NO: 3551654 - DNA, 25 bp, Homo sapien
gagacccaggcatgccacgtgtgca

SEQ ID NO: 3551655 - DNA, 25 bp, Homo sapien
cacgtgtgcacgtgaagggagacaa

SEQ ID NO: 3551656 - DNA, 25 bp, Homo sapien
ttgcaggtcagggatattggcaaag

SEQ ID NO: 3551657 - DNA, 25 bp, Homo sapien
gaaagccctaagaccaaggatagca

SEQ ID NO: 3551658 - DNA, 25 bp, Homo sapien
ggcaaagtcatcctgttccgaaagc

SEQ ID NO: 3551659 - DNA, 25 bp, Homo sapien
aaggatagcaccaccatccggcctt

SEQ ID NO: 3551660 - DNA, 25 bp, Homo sapien
tcctttgtggtatatggcaactcgg

SEQ ID NO: 3551661 - DNA, 25 bp, Homo sapien
tgtcctccttgctggagatccaggg

SEQ ID NO: 3551662 - DNA, 25 bp, Homo sapien
tcctggatatacaagcccatcagag

SEQ ID NO: 3551663 - DNA, 25 bp, Homo sapien
agggaatgagcaccaccgctgagtc

SEQ ID NO: 3551664 - DNA, 25 bp, Homo sapien
cagagttggtaaaattccatttggc

SEQ ID NO: 3551665 - DNA, 25 bp, Homo sapien
catttggctgctcgggagctagttg

SEQ ID NO: 3551666 - DNA, 25 bp, Homo sapien
ctgtttcagagttggtaaaattcca

SEQ ID NO: 3551667 - DNA, 25 bp, Homo sapien
attccatttggctgctcgggagcta

SEQ ID NO: 3551668 - DNA, 25 bp, Homo sapien
ggtttcgaatctgccccaccacgtg

SEQ ID NO: 3551669 - DNA, 25 bp, Homo sapien
tggctcagcggctgttgcaggctct

SEQ ID NO: 3551670 - DNA, 25 bp, Homo sapien
gaaggatttcatgtccaagcctcgg

SEQ ID NO: 3551671 - DNA, 25 bp, Homo sapien
tcgctggcatttcggctctcccgtg

SEQ ID NO: 3551672 - DNA, 25 bp, Homo sapien
agcagatgaagggatcacagtggaa

SEQ ID NO: 3551673 - DNA, 25 bp, Homo sapien
ggccccagtgcagggtgcgcgctgc

SEQ ID NO: 3551674 - DNA, 25 bp, Homo sapien
tgcgcgctgccggacctcgccaggc

SEQ ID NO: 3551675 - DNA, 25 bp, Homo sapien
cagatgaagggatcacagtggaaga

SEQ ID NO: 3551676 - DNA, 25 bp, Homo sapien
cgggtggcggcaccggtgccggctt

SEQ ID NO: 3551677 - DNA, 25 bp, Homo sapien
actttggcgcccgacaggagggtgc

SEQ ID NO: 3551678 - DNA, 25 bp, Homo sapien
ggacaagttgagcttccctgcggcc

SEQ ID NO: 3551679 - DNA, 25 bp, Homo sapien
ttctcaaggcgtcctctccgggtgg

SEQ ID NO: 3551680 - DNA, 25 bp, Homo sapien
agccacctccaactctatcccacag

SEQ ID NO: 3551681 - DNA, 25 bp, Homo sapien
caactctatcccacaggacaacgaa

SEQ ID NO: 3551682 - DNA, 25 bp, Homo sapien
actctatcccacaggacaacgaagg

SEQ ID NO: 3551683 - DNA, 25 bp, Homo sapien
ctatcccacaggacaacgaagggtt

SEQ ID NO: 3551684 - DNA, 25 bp, Homo sapien
ggggccaggtatggctgccgagggg

SEQ ID NO: 3551685 - DNA, 25 bp, Homo sapien
cgagggggctctcctgcaaggctgg

SEQ ID NO: 3551686 - DNA, 25 bp, Homo sapien
ccgagggggctctcctgcaaggctg

SEQ ID NO: 3551687 - DNA, 25 bp, Homo sapien
tgtgctctcattgttattccaaaag

SEQ ID NO: 3551688 - DNA, 25 bp, Homo sapien
ccataaggggcgtagggtgaaatgt

SEQ ID NO: 3551689 - DNA, 25 bp, Homo sapien
actccttgggagggtaggagctcca

SEQ ID NO: 3551690 - DNA, 25 bp, Homo sapien
ggacagtcgtgggtcgccataaggg

SEQ ID NO: 3551691 - DNA, 25 bp, Homo sapien
tgtgcctggcacacgcacgcataca

SEQ ID NO: 3551692 - DNA, 25 bp, Homo sapien
aaacataccaatgcacacacgcacg

SEQ ID NO: 3551693 - DNA, 25 bp, Homo sapien
cacgcacgcactcgagggccgggaa

SEQ ID NO: 3551694 - DNA, 25 bp, Homo sapien
gggccgggaagccacacagaaagga

SEQ ID NO: 3551695 - DNA, 25 bp, Homo sapien
cactgcagaataaaagctctagtac

SEQ ID NO: 3551696 - DNA, 25 bp, Homo sapien
tctggctagatggagctgaaaggca

SEQ ID NO: 3551697 - DNA, 25 bp, Homo sapien
tctagtactggagaactcaaggttc

SEQ ID NO: 3551698 - DNA, 25 bp, Homo sapien
ctgcctgtcaaaggagaagactggc

SEQ ID NO: 3551699 - DNA, 25 bp, Homo sapien
ttctcctgagaacgtggggacttgc

SEQ ID NO: 3551700 - DNA, 25 bp, Homo sapien
ctcctgagaacgtggggacttgcag

SEQ ID NO: 3551701 - DNA, 25 bp, Homo sapien
ccttctcctgagaacgtggggactt

SEQ ID NO: 3551702 - DNA, 25 bp, Homo sapien
tctcctgagaacgtggggacttgca

SEQ ID NO: 3551703 - DNA, 25 bp, Homo sapien
tcactgcgcccacgccctgagtctg

SEQ ID NO: 3551704 - DNA, 25 bp, Homo sapien
ctccaaggaattcttgtagcgtttg

SEQ ID NO: 3551705 - DNA, 25 bp, Homo sapien
cctgagtctggcgtgcccaccgtct

SEQ ID NO: 3551706 - DNA, 25 bp, Homo sapien
tccaaggaattcttgtagcgtttgc

SEQ ID NO: 3551707 - DNA, 25 bp, Homo sapien
agtcctgctcggggctgtgtccacc

SEQ ID NO: 3551708 - DNA, 25 bp, Homo sapien
gctgtgtccaccactgtctgggggt

SEQ ID NO: 3551709 - DNA, 25 bp, Homo sapien
cagggcaaggttggcagtggccagt

SEQ ID NO: 3551710 - DNA, 25 bp, Homo sapien
gggagaaggccatgtccccagtcct

SEQ ID NO: 3551711 - DNA, 25 bp, Homo sapien
tgagacagacgcagacacaggggac

SEQ ID NO: 3551712 - DNA, 25 bp, Homo sapien
ctgagacagacgcagacacagggga

SEQ ID NO: 3551713 - DNA, 25 bp, Homo sapien
gccgcagaggacgacagtgacgcta

SEQ ID NO: 3551714 - DNA, 25 bp, Homo sapien
tgacgctaaggctgacggtgatgat

SEQ ID NO: 3551715 - DNA, 25 bp, Homo sapien
cagagaccagcaggacgtcgcgcga

SEQ ID NO: 3551716 - DNA, 25 bp, Homo sapien
cagtttgcgctgacaccagtggcag

SEQ ID NO: 3551717 - DNA, 25 bp, Homo sapien
gtgtagtcaaaggaatctctggaac

SEQ ID NO: 3551718 - DNA, 25 bp, Homo sapien
atgtgtagtcaaaggaatctctgga

SEQ ID NO: 3551719 - DNA, 25 bp, Homo sapien
agctgttgccccctttagcccagct

SEQ ID NO: 3551720 - DNA, 25 bp, Homo sapien
gttgccccctttagcccagctttca

SEQ ID NO: 3551721 - DNA, 25 bp, Homo sapien
gaggtactgggtagcagctccagcc

SEQ ID NO: 3551722 - DNA, 25 bp, Homo sapien
cctgggtcagggttctgtcagggca

SEQ ID NO: 3551723 - DNA, 25 bp, Homo sapien
atgctgatggaggagcaaagagctc

SEQ ID NO: 3551724 - DNA, 25 bp, Homo sapien
cagccacagaaactgcctgggtcag

SEQ ID NO: 3551725 - DNA, 25 bp, Homo sapien
cctctcccctagcagaagcgggcac

SEQ ID NO: 3551726 - DNA, 25 bp, Homo sapien
tcacgcctctcccctagcagaagcg

SEQ ID NO: 3551727 - DNA, 25 bp, Homo sapien
gcctctcccctagcagaagcgggca

SEQ ID NO: 3551728 - DNA, 25 bp, Homo sapien
acgcctctcccctagcagaagcggg

SEQ ID NO: 3551729 - DNA, 25 bp, Homo sapien
ggctcccacggcccaaagatgccag

SEQ ID NO: 3551730 - DNA, 25 bp, Homo sapien
aggaaggaagcagactcaggcacag

SEQ ID NO: 3551731 - DNA, 25 bp, Homo sapien
gaagcagactcaggcacagcctggc

SEQ ID NO: 3551732 - DNA, 25 bp, Homo sapien
aaggaagcagactcaggcacagcct

SEQ ID NO: 3551733 - DNA, 25 bp, Homo sapien
tcactatcagggtcactacagagat

SEQ ID NO: 3551734 - DNA, 25 bp, Homo sapien
tattagggtttgtcactatcagggt

SEQ ID NO: 3551735 - DNA, 25 bp, Homo sapien
gttttgtcactattagggtttgtca

SEQ ID NO: 3551736 - DNA, 25 bp, Homo sapien
ggtttgtcactatcagggtcactac

SEQ ID NO: 3551737 - DNA, 25 bp, Homo sapien
aagcgggcagcttgttgatcaagct

SEQ ID NO: 3551738 - DNA, 25 bp, Homo sapien
tcaagcgggcagcttgttgatcaag

SEQ ID NO: 3551739 - DNA, 25 bp, Homo sapien
gcgggcagcttgttgatcaagcttc

SEQ ID NO: 3551740 - DNA, 25 bp, Homo sapien
cgggcagcttgttgatcaagcttcc

SEQ ID NO: 3551741 - DNA, 25 bp, Homo sapien
ggggacaagcagtccgagagaaaca

SEQ ID NO: 3551742 - DNA, 25 bp, Homo sapien
gggacaagcagtccgagagaaacag

SEQ ID NO: 3551743 - DNA, 25 bp, Homo sapien
tcaaggaccccagatgactaggctc

SEQ ID NO: 3551744 - DNA, 25 bp, Homo sapien
ggatataaaaggcactggcccctgg

SEQ ID NO: 3551745 - DNA, 25 bp, Homo sapien
ggtggcctgagttacacataaatca

SEQ ID NO: 3551746 - DNA, 25 bp, Homo sapien
aaatctgacctggaactatagagcc

SEQ ID NO: 3551747 - DNA, 25 bp, Homo sapien
aagcacgtcaagctggcctccgtgg

SEQ ID NO: 3551748 - DNA, 25 bp, Homo sapien
cacaccagggatggtactggactcc

SEQ ID NO: 3551749 - DNA, 25 bp, Homo sapien
ttgcctagaagatgccaagcacgtc

SEQ ID NO: 3551750 - DNA, 25 bp, Homo sapien
gatggatagtgtccttatttcttcc

SEQ ID NO: 3551751 - DNA, 25 bp, Homo sapien
ccagggtaggtgacctaggtccaga

SEQ ID NO: 3551752 - DNA, 25 bp, Homo sapien
aagagaatactcctgccacgggcca

SEQ ID NO: 3551753 - DNA, 25 bp, Homo sapien
tactggcttctaagaaggtgagcag

SEQ ID NO: 3551754 - DNA, 25 bp, Homo sapien
gccggcggcctcttcgacgaagatg

SEQ ID NO: 3551755 - DNA, 25 bp, Homo sapien
tgcctggcgcccagtgggtcgtcct

SEQ ID NO: 3551756 - DNA, 25 bp, Homo sapien
ctagaggacattcagagaagggcgc

SEQ ID NO: 3551757 - DNA, 25 bp, Homo sapien
gaatctctcaccctcatatccaagt

SEQ ID NO: 3551758 - DNA, 25 bp, Homo sapien
accctcatatccaagtgctgagtga

SEQ ID NO: 3551759 - DNA, 25 bp, Homo sapien
tgtgcagggtcttagagcccttcct

SEQ ID NO: 3551760 - DNA, 25 bp, Homo sapien
cgtgcttttagcatcagagagaagc

SEQ ID NO: 3551761 - DNA, 25 bp, Homo sapien
ctcttcgtttgggagcacatcctgg

SEQ ID NO: 3551762 - DNA, 25 bp, Homo sapien
cctggaggctcttcgtttgggagca

SEQ ID NO: 3551763 - DNA, 25 bp, Homo sapien
cacacgttgtccttgggctgttgag

SEQ ID NO: 3551764 - DNA, 25 bp, Homo sapien
tcaattcacagttggcactgcgatg

SEQ ID NO: 3551765 - DNA, 25 bp, Homo sapien
gtgcccgcaaccttggccaagagct

SEQ ID NO: 3551766 - DNA, 25 bp, Homo sapien
agagctgccgggatcctcgccctgg

SEQ ID NO: 3551767 - DNA, 25 bp, Homo sapien
gtcctgcccgccggtgcggggcgcc

SEQ ID NO: 3551768 - DNA, 25 bp, Homo sapien
ctgccgctgtcctgcccgccggtgc

SEQ ID NO: 3551769 - DNA, 25 bp, Homo sapien
tgccgctgtcctgcccgccggtgcg

SEQ ID NO: 3551770 - DNA, 25 bp, Homo sapien
cgccggtgcggggcgccccagcccg

SEQ ID NO: 3551771 - DNA, 25 bp, Homo sapien
ctgggctggccgcctccgggtcccg

SEQ ID NO: 3551772 - DNA, 25 bp, Homo sapien
gggctgcacctagccgcggagccgg

SEQ ID NO: 3551773 - DNA, 25 bp, Homo sapien
tgcgcgccgcgtgtgcgcgccggag

SEQ ID NO: 3551774 - DNA, 25 bp, Homo sapien
gtgtgtgtgtacgaggccgtgtgta

SEQ ID NO: 3551775 - DNA, 25 bp, Homo sapien
cgagcgggctgcacctagccgcgga

SEQ ID NO: 3551776 - DNA, 25 bp, Homo sapien
aaaggcgtggagatccactccgggt

SEQ ID NO: 3551777 - DNA, 25 bp, Homo sapien
tttggctccgatccaaaaggcgtgg

SEQ ID NO: 3551778 - DNA, 25 bp, Homo sapien
agggcgtcagctccggactcaacac

SEQ ID NO: 3551779 - DNA, 25 bp, Homo sapien
ttttccgcttgctggcggctcgagg

SEQ ID NO: 3551780 - DNA, 25 bp, Homo sapien
caagagaaacgccatgagatatagt

SEQ ID NO: 3551781 - DNA, 25 bp, Homo sapien
tagttgtgcaaactgcggctctggg

SEQ ID NO: 3551782 - DNA, 25 bp, Homo sapien
gggcattagacggtccttgttccag

SEQ ID NO: 3551783 - DNA, 25 bp, Homo sapien
cagctcctcagacacacaagagaaa

SEQ ID NO: 3551784 - DNA, 25 bp, Homo sapien
taacctcttcatccagattctggct

SEQ ID NO: 3551785 - DNA, 25 bp, Homo sapien
cctgtaacctcttcatccagattct

SEQ ID NO: 3551786 - DNA, 25 bp, Homo sapien
ctcttcatccagattctggctctca

SEQ ID NO: 3551787 - DNA, 25 bp, Homo sapien
cttcatccagattctggctctcagt

SEQ ID NO: 3551788 - DNA, 25 bp, Homo sapien
agaagtctgagtttccagacgccag

SEQ ID NO: 3551789 - DNA, 25 bp, Homo sapien
agaccatactggcggccccagctgg

SEQ ID NO: 3551790 - DNA, 25 bp, Homo sapien
acgccagaccatactggcggcccca

SEQ ID NO: 3551791 - DNA, 25 bp, Homo sapien
agcagacatcaagctctgcgctggg

SEQ ID NO: 3551792 - DNA, 25 bp, Homo sapien
cgctgagtgacttgttttcgctttc

SEQ ID NO: 3551793 - DNA, 25 bp, Homo sapien
gagtgacttgttttcgctttcctca

SEQ ID NO: 3551794 - DNA, 25 bp, Homo sapien
ttttcgctttcctcacgagcctctg

SEQ ID NO: 3551795 - DNA, 25 bp, Homo sapien
gacttgttttcgctttcctcacgag

SEQ ID NO: 3551796 - DNA, 25 bp, Homo sapien
gaatggctcagagcgcacttgctca

SEQ ID NO: 3551797 - DNA, 25 bp, Homo sapien
gattagggttattacagccgaatgg

SEQ ID NO: 3551798 - DNA, 25 bp, Homo sapien
tggtaatgagcagattagggttatt

SEQ ID NO: 3551799 - DNA, 25 bp, Homo sapien
ctccgggagtggtaatgagcagatt

SEQ ID NO: 3551800 - DNA, 25 bp, Homo sapien
atcggcgaacggctgatcgcccacg

SEQ ID NO: 3551801 - DNA, 25 bp, Homo sapien
gcgaacggctgatcgcccacgactg

SEQ ID NO: 3551802 - DNA, 25 bp, Homo sapien
aaccatcggcgaacggctgatcgcc

SEQ ID NO: 3551803 - DNA, 25 bp, Homo sapien
ccgagcaaccatcggcgaacggctg

SEQ ID NO: 3551804 - DNA, 25 bp, Homo sapien
tatggtgccacaatggctaccgtac

SEQ ID NO: 3551805 - DNA, 25 bp, Homo sapien
gtacctccagatttcacgttcagat

SEQ ID NO: 3551806 - DNA, 25 bp, Homo sapien
ggctaccgtacctccagatttcacg

SEQ ID NO: 3551807 - DNA, 25 bp, Homo sapien
tagatgttgactttcaaccgtatgg

SEQ ID NO: 3551808 - DNA, 25 bp, Homo sapien
agttgctgaaaggccgggcgagggc

SEQ ID NO: 3551809 - DNA, 25 bp, Homo sapien
tcaggcctggaattgataccgccat

SEQ ID NO: 3551810 - DNA, 25 bp, Homo sapien
gtcaggcctggaattgataccgcca

SEQ ID NO: 3551811 - DNA, 25 bp, Homo sapien
cccagagtggggatgccagggatgt

SEQ ID NO: 3551812 - DNA, 25 bp, Homo sapien
agacagtggcttcatcccagagtgg

SEQ ID NO: 3551813 - DNA, 25 bp, Homo sapien
ccctcctagctcacctgcagatctc

SEQ ID NO: 3551814 - DNA, 25 bp, Homo sapien
ggaatgaccaaggcattccagcccc

SEQ ID NO: 3551815 - DNA, 25 bp, Homo sapien
agggtgtgggcttggcctttgcagt

SEQ ID NO: 3551816 - DNA, 25 bp, Homo sapien
agggatctgggcggcccctcctagc

SEQ ID NO: 3551817 - DNA, 25 bp, Homo sapien
tgtggtgaggtgacctgagtaacgg

SEQ ID NO: 3551818 - DNA, 25 bp, Homo sapien
cttaatccggtgcacctggtggctg

SEQ ID NO: 3551819 - DNA, 25 bp, Homo sapien
tgaggtgacctgagtaacgggttgg

SEQ ID NO: 3551820 - DNA, 25 bp, Homo sapien
ctggacagccttaatccggtgcacc

SEQ ID NO: 3551821 - DNA, 25 bp, Homo sapien
agtgcagcgtgggagcacagcttca

SEQ ID NO: 3551822 - DNA, 25 bp, Homo sapien
tcagcgcattaagaaattcctcggg

SEQ ID NO: 3551823 - DNA, 25 bp, Homo sapien
gaattcatgtgcgcggtgcagtgca

SEQ ID NO: 3551824 - DNA, 25 bp, Homo sapien
caaagcgtggtctcgcattccttgg

SEQ ID NO: 3551825 - DNA, 25 bp, Homo sapien
tttgactaatcaccaaaaagcaacc

SEQ ID NO: 3551826 - DNA, 25 bp, Homo sapien
cagacggcagatcgtgggacttctt

SEQ ID NO: 3551827 - DNA, 25 bp, Homo sapien
ggacttcttggcctctatcatcacg

SEQ ID NO: 3551828 - DNA, 25 bp, Homo sapien
cacccagtcccattaagtgcctgaa

SEQ ID NO: 3551829 - DNA, 25 bp, Homo sapien
tatcatcacgcgagccaattttcat

SEQ ID NO: 3551830 - DNA, 25 bp, Homo sapien
tgcttaacttctccgggtctcagga

SEQ ID NO: 3551831 - DNA, 25 bp, Homo sapien
ttgcttaacttctccgggtctcagg

SEQ ID NO: 3551832 - DNA, 25 bp, Homo sapien
gcttaacttctccgggtctcaggat

SEQ ID NO: 3551833 - DNA, 25 bp, Homo sapien
gagaagagtagcatcctttaccgga

SEQ ID NO: 3551834 - DNA, 25 bp, Homo sapien
ggccattgctcttaagtcacaggaa

SEQ ID NO: 3551835 - DNA, 25 bp, Homo sapien
tcaagttcaagggtaggatagcagg

SEQ ID NO: 3551836 - DNA, 25 bp, Homo sapien
tgcctggcagttagcagcctctggt

SEQ ID NO: 3551837 - DNA, 25 bp, Homo sapien
gggcttgcagatccttcttgacatc

SEQ ID NO: 3551838 - DNA, 25 bp, Homo sapien
tgacatcagtttgcccaatcaaggg

SEQ ID NO: 3551839 - DNA, 25 bp, Homo sapien
caaaaaggccaccttctggctgaca

SEQ ID NO: 3551840 - DNA, 25 bp, Homo sapien
tcagctttgaatgtcgccagtaccc

SEQ ID NO: 3551841 - DNA, 25 bp, Homo sapien
cattgggcttagaacaaagcagcag

SEQ ID NO: 3551842 - DNA, 25 bp, Homo sapien
tacagttgggagcaagactgacctg

SEQ ID NO: 3551843 - DNA, 25 bp, Homo sapien
gaacaactcagcttttgcctgggct

SEQ ID NO: 3551844 - DNA, 25 bp, Homo sapien
cacaaggacactgcactctggagag

SEQ ID NO: 3551845 - DNA, 25 bp, Homo sapien
ccagagcctataaggtgtagattct

SEQ ID NO: 3551846 - DNA, 25 bp, Homo sapien
gatgaggtggtcataccagagccta

SEQ ID NO: 3551847 - DNA, 25 bp, Homo sapien
gattctgacctcaagttgcttaaaa

SEQ ID NO: 3551848 - DNA, 25 bp, Homo sapien
cttaaaatctgttgagaagatatag

SEQ ID NO: 3551849 - DNA, 25 bp, Homo sapien
gcagggtactgagggacaagagtag

SEQ ID NO: 3551850 - DNA, 25 bp, Homo sapien
agcagggtactgagggacaagagta

SEQ ID NO: 3551851 - DNA, 25 bp, Homo sapien
cagggtactgagggacaagagtagg

SEQ ID NO: 3551852 - DNA, 25 bp, Homo sapien
cagcagggtactgagggacaagagt

SEQ ID NO: 3551853 - DNA, 25 bp, Homo sapien
tggcaggcggctttcaggctcgcac

SEQ ID NO: 3551854 - DNA, 25 bp, Homo sapien
aggcggctttcaggctcgcacagca

SEQ ID NO: 3551855 - DNA, 25 bp, Homo sapien
cgtggcaggcggctttcaggctcgc

SEQ ID NO: 3551856 - DNA, 25 bp, Homo sapien
gcaggcggctttcaggctcgcacag

SEQ ID NO: 3551857 - DNA, 25 bp, Homo sapien
ctctggtctcgtggattgtacgaac

SEQ ID NO: 3551858 - DNA, 25 bp, Homo sapien
gcctgagctcgggactgggctgagc

SEQ ID NO: 3551859 - DNA, 25 bp, Homo sapien
ggttcatcccctggagttacagcag

SEQ ID NO: 3551860 - DNA, 25 bp, Homo sapien
cacggaaaggttcatcccctggagt

SEQ ID NO: 3551861 - DNA, 25 bp, Homo sapien
agctccttcacggaaaggttcatcc

SEQ ID NO: 3551862 - DNA, 25 bp, Homo sapien
tcagacgttgccgtcagctccttca

SEQ ID NO: 3551863 - DNA, 25 bp, Homo sapien
gctgtggaggccatgtcggggcgga

SEQ ID NO: 3551864 - DNA, 25 bp, Homo sapien
tggaggccatgtcggggcggagtgc

SEQ ID NO: 3551865 - DNA, 25 bp, Homo sapien
ctggtcatttgtgggctggtttgcc

SEQ ID NO: 3551866 - DNA, 25 bp, Homo sapien
gggcggagtgcccaaagcaagcggg

SEQ ID NO: 3551867 - DNA, 25 bp, Homo sapien
tggatgtagaagcacgctggctgcc

SEQ ID NO: 3551868 - DNA, 25 bp, Homo sapien
ctcgaatgtctttgcatcaggtggg

SEQ ID NO: 3551869 - DNA, 25 bp, Homo sapien
gagctgtgtataaactggatgtaga

SEQ ID NO: 3551870 - DNA, 25 bp, Homo sapien
ttgatgtcgaggttgcagcagagca

SEQ ID NO: 3551871 - DNA, 25 bp, Homo sapien
tgctcctgctcggctagtgccctgg

SEQ ID NO: 3551872 - DNA, 25 bp, Homo sapien
cctgctcggctagtgccctggcccg

SEQ ID NO: 3551873 - DNA, 25 bp, Homo sapien
aagacccttgaagccccctgtgaat

SEQ ID NO: 3551874 - DNA, 25 bp, Homo sapien
tagaagacccttgaagccccctgtg

SEQ ID NO: 3551875 - DNA, 25 bp, Homo sapien
tgatgccagtgctgtgtgggtccac

SEQ ID NO: 3551876 - DNA, 25 bp, Homo sapien
tgggctggcctctacgcccattacc

SEQ ID NO: 3551877 - DNA, 25 bp, Homo sapien
tcctcttcctctgcgaaatggcctg

SEQ ID NO: 3551878 - DNA, 25 bp, Homo sapien
tcctctgcgaaatggcctgatgcca

SEQ ID NO: 3551879 - DNA, 25 bp, Homo sapien
gggtgtctactttgtccgcaggcag

SEQ ID NO: 3551880 - DNA, 25 bp, Homo sapien
gagggcaccatttactgatcactga

SEQ ID NO: 3551881 - DNA, 25 bp, Homo sapien
gctacagggttaacaggaggctcca

SEQ ID NO: 3551882 - DNA, 25 bp, Homo sapien
ccttgtatgcaagtcccctgggcta

SEQ ID NO: 3551883 - DNA, 25 bp, Homo sapien
tacaaagaagtagccatgtggagac

SEQ ID NO: 3551884 - DNA, 25 bp, Homo sapien
gaagctatagcagtgaccgatacag

SEQ ID NO: 3551885 - DNA, 25 bp, Homo sapien
gaaaaatatcttgccctcgtagggc

SEQ ID NO: 3551886 - DNA, 25 bp, Homo sapien
tacatggtgagcaagaaaggcctag

SEQ ID NO: 3551887 - DNA, 25 bp, Homo sapien
ttgtcccgtgcaagacgaaggcgag

SEQ ID NO: 3551888 - DNA, 25 bp, Homo sapien
cagtccttaatgcattgagcctcag

SEQ ID NO: 3551889 - DNA, 25 bp, Homo sapien
ataacacacgttccctaaatgcagg

SEQ ID NO: 3551890 - DNA, 25 bp, Homo sapien
gactaccatactgaacaacacaggg

SEQ ID NO: 3551891 - DNA, 25 bp, Homo sapien
ggttgactctgcatcaggtgggcca

SEQ ID NO: 3551892 - DNA, 25 bp, Homo sapien
gagaagcaggtcttccggtgcctca

SEQ ID NO: 3551893 - DNA, 25 bp, Homo sapien
ccctctgtgacttgggaggcaggaa

SEQ ID NO: 3551894 - DNA, 25 bp, Homo sapien
ccagacactgttgatccataggagc

SEQ ID NO: 3551895 - DNA, 25 bp, Homo sapien
tggcagagaagaacctcagctctga

SEQ ID NO: 3551896 - DNA, 25 bp, Homo sapien
gggtggcagagaagaacctcagctc

SEQ ID NO: 3551897 - DNA, 25 bp, Homo sapien
agggggtggcagagaagaacctcag

SEQ ID NO: 3551898 - DNA, 25 bp, Homo sapien
cagagaagaacctcagctctgaaga

SEQ ID NO: 3551899 - DNA, 25 bp, Homo sapien
gatgtaatggttctgtgcattcgcc

SEQ ID NO: 3551900 - DNA, 25 bp, Homo sapien
ctgtgcattcgccagcgagggcagc

SEQ ID NO: 3551901 - DNA, 25 bp, Homo sapien
tcattgccttgggtgctggagtatg

SEQ ID NO: 3551902 - DNA, 25 bp, Homo sapien
ttctcttggccgtatcagggcaccg

SEQ ID NO: 3551903 - DNA, 25 bp, Homo sapien
tcagtgcccctaagcttagggggct

SEQ ID NO: 3551904 - DNA, 25 bp, Homo sapien
tgttgagcatgttctgtggttctgt

SEQ ID NO: 3551905 - DNA, 25 bp, Homo sapien
tggtccccagggtaggtcagtgccc

SEQ ID NO: 3551906 - DNA, 25 bp, Homo sapien
ttgaagattactggtccccagggta

SEQ ID NO: 3551907 - DNA, 25 bp, Homo sapien
acatccagtggggcccgccccacct

SEQ ID NO: 3551908 - DNA, 25 bp, Homo sapien
tggtcctggtccctggcacatccag

SEQ ID NO: 3551909 - DNA, 25 bp, Homo sapien
tctggcccagcgtggcctggtcctg

SEQ ID NO: 3551910 - DNA, 25 bp, Homo sapien
tggtccctggcacatccagtggggc

SEQ ID NO: 3551911 - DNA, 25 bp, Homo sapien
tgggcgaccctgtacgatgctaact

SEQ ID NO: 3551912 - DNA, 25 bp, Homo sapien
caactaccagtccatcaagtggcag

SEQ ID NO: 3551913 - DNA, 25 bp, Homo sapien
caaggagctgtgagtgccctacaac

SEQ ID NO: 3551914 - DNA, 25 bp, Homo sapien
tcagcagaacaagtgggcgaccctg

SEQ ID NO: 3551915 - DNA, 25 bp, Homo sapien
tgctgtccgcaccttggacatgtgt

SEQ ID NO: 3551916 - DNA, 25 bp, Homo sapien
tccgcaccttggacatgtgttccag

SEQ ID NO: 3551917 - DNA, 25 bp, Homo sapien
caggttctgctgtccgcaccttgga

SEQ ID NO: 3551918 - DNA, 25 bp, Homo sapien
accttggacatgtgttccagccacc

SEQ ID NO: 3551919 - DNA, 25 bp, Homo sapien
agacatggtgctcgggcctgaaacc

SEQ ID NO: 3551920 - DNA, 25 bp, Homo sapien
caagaacgtactctatagtgaggga

SEQ ID NO: 3551921 - DNA, 25 bp, Homo sapien
ccaaagcctcaggtagatgggcaag

SEQ ID NO: 3551922 - DNA, 25 bp, Homo sapien
agggagaaaagacgtgcagaaagca

SEQ ID NO: 3551923 - DNA, 25 bp, Homo sapien
atgttcttggactgcgggccctcag

SEQ ID NO: 3551924 - DNA, 25 bp, Homo sapien
taactggaaagtgaccgtccactgc

SEQ ID NO: 3551925 - DNA, 25 bp, Homo sapien
gaatagcagggatagcttgctccca

SEQ ID NO: 3551926 - DNA, 25 bp, Homo sapien
caaaaccgttagcagctggctctgt

SEQ ID NO: 3551927 - DNA, 25 bp, Homo sapien
tctcctttggcgtttgttcctgtag

SEQ ID NO: 3551928 - DNA, 25 bp, Homo sapien
tgtgagtgtcttggccctgtccctg

SEQ ID NO: 3551929 - DNA, 25 bp, Homo sapien
tcagggaaggtaagtgggccacctg

SEQ ID NO: 3551930 - DNA, 25 bp, Homo sapien
gctggcaatggtgtgagtgtcttgg

SEQ ID NO: 3551931 - DNA, 25 bp, Homo sapien
tccccgaaatgttcgtttcttctga

SEQ ID NO: 3551932 - DNA, 25 bp, Homo sapien
gaaatgttcgtttcttctgaagtaa

SEQ ID NO: 3551933 - DNA, 25 bp, Homo sapien
gtatttgtcatgtgccaactctgac

SEQ ID NO: 3551934 - DNA, 25 bp, Homo sapien
ctgcgtgtgcatagagcgcccccta

SEQ ID NO: 3551935 - DNA, 25 bp, Homo sapien
aggtgggacacttccagcaacagta

SEQ ID NO: 3551936 - DNA, 25 bp, Homo sapien
ggtgggacacttccagcaacagtaa

SEQ ID NO: 3551937 - DNA, 25 bp, Homo sapien
taaatgtacagccatgggatgcctg

SEQ ID NO: 3551938 - DNA, 25 bp, Homo sapien
ggatgcctgcgtccacacttctagg

SEQ ID NO: 3551939 - DNA, 25 bp, Homo sapien
tggtaagagctttaaggaccctgct

SEQ ID NO: 3551940 - DNA, 25 bp, Homo sapien
tctaggtggtacatcccaaaggcag

SEQ ID NO: 3551941 - DNA, 25 bp, Homo sapien
ggaggctcacgcatccatcccattg

SEQ ID NO: 3551942 - DNA, 25 bp, Homo sapien
ggctcacgcatccatcccattgcag

SEQ ID NO: 3551943 - DNA, 25 bp, Homo sapien
aggctcacgcatccatcccattgca

SEQ ID NO: 3551944 - DNA, 25 bp, Homo sapien
ctcacgcatccatcccattgcagct

SEQ ID NO: 3551945 - DNA, 25 bp, Homo sapien
tcacacgtagatgccaacccagagc

SEQ ID NO: 3551946 - DNA, 25 bp, Homo sapien
ggccactaaggagatgaggagctct

SEQ ID NO: 3551947 - DNA, 25 bp, Homo sapien
catgaagagtgaggccactaaggag

SEQ ID NO: 3551948 - DNA, 25 bp, Homo sapien
tatcacgagtgtacttggtagaggt

SEQ ID NO: 3551949 - DNA, 25 bp, Homo sapien
gcagttaaggcaaagcgaaggggtg

SEQ ID NO: 3551950 - DNA, 25 bp, Homo sapien
tgggcacagcagttaaggcaaagcg

SEQ ID NO: 3551951 - DNA, 25 bp, Homo sapien
cagttaaggcaaagcgaaggggtgg

SEQ ID NO: 3551952 - DNA, 25 bp, Homo sapien
cacagcagttaaggcaaagcgaagg

SEQ ID NO: 3551953 - DNA, 25 bp, Homo sapien
gagtgcagagagcccagcccacggc

SEQ ID NO: 3551954 - DNA, 25 bp, Homo sapien
tgcagagagcccagcccacggcaat

SEQ ID NO: 3551955 - DNA, 25 bp, Homo sapien
tggagtgcagagagcccagcccacg

SEQ ID NO: 3551956 - DNA, 25 bp, Homo sapien
tgtggagtgcagagagcccagccca

SEQ ID NO: 3551957 - DNA, 25 bp, Homo sapien
cccaatccaatgtacaaaaccggcg

SEQ ID NO: 3551958 - DNA, 25 bp, Homo sapien
agccccaatccaatgtacaaaaccg

SEQ ID NO: 3551959 - DNA, 25 bp, Homo sapien
caatccaatgtacaaaaccggcggg

SEQ ID NO: 3551960 - DNA, 25 bp, Homo sapien
tcagccccaatccaatgtacaaaac

SEQ ID NO: 3551961 - DNA, 25 bp, Homo sapien
tagcgtggtttctccctgagcttcc

SEQ ID NO: 3551962 - DNA, 25 bp, Homo sapien
ctagcgtggtttctccctgagcttc

SEQ ID NO: 3551963 - DNA, 25 bp, Homo sapien
tttctccctgagcttcccacatcac

SEQ ID NO: 3551964 - DNA, 25 bp, Homo sapien
tggtttctccctgagcttcccacat

SEQ ID NO: 3551965 - DNA, 25 bp, Homo sapien
ggtcctctggctgctcagtgaaagg

SEQ ID NO: 3551966 - DNA, 25 bp, Homo sapien
ctctggctgctcagtgaaaggatac

SEQ ID NO: 3551967 - DNA, 25 bp, Homo sapien
tcctctggctgctcagtgaaaggat

SEQ ID NO: 3551968 - DNA, 25 bp, Homo sapien
taatgctggtcctctggctgctcag

SEQ ID NO: 3551969 - DNA, 25 bp, Homo sapien
ggccaaaagcaccacggtcagatgg

SEQ ID NO: 3551970 - DNA, 25 bp, Homo sapien
tgggctggtatatctgctcatggcc

SEQ ID NO: 3551971 - DNA, 25 bp, Homo sapien
actgggctggtatatctgctcatgg

SEQ ID NO: 3551972 - DNA, 25 bp, Homo sapien
ccaaaagcaccacggtcagatgggg

SEQ ID NO: 3551973 - DNA, 25 bp, Homo sapien
ccaggctggagtgcctggagtgcag

SEQ ID NO: 3551974 - DNA, 25 bp, Homo sapien
gtggtgccaactcggctcactgcaa

SEQ ID NO: 3551975 - DNA, 25 bp, Homo sapien
acaggcgtgaaccaccatgcccggc

SEQ ID NO: 3551976 - DNA, 25 bp, Homo sapien
gctccgccttctgggttcaagtgat

SEQ ID NO: 3551977 - DNA, 25 bp, Homo sapien
tctggttctgagtaatctgagtctg

SEQ ID NO: 3551978 - DNA, 25 bp, Homo sapien
tcaaagcatctagtgcctagcaggg

SEQ ID NO: 3551979 - DNA, 25 bp, Homo sapien
cagggagtattttgctcaacaggta

SEQ ID NO: 3551980 - DNA, 25 bp, Homo sapien
gagggctgtaaacgtaaagatctgt

SEQ ID NO: 3551981 - DNA, 25 bp, Homo sapien
tcactaggaggcgtggccgaaaaca

SEQ ID NO: 3551982 - DNA, 25 bp, Homo sapien
tcatcccagagctagatgcgcgtca

SEQ ID NO: 3551983 - DNA, 25 bp, Homo sapien
gaaatcgcgagctgagaaacctaag

SEQ ID NO: 3551984 - DNA, 25 bp, Homo sapien
caaagaagtccatggaacgtggcca

SEQ ID NO: 3551985 - DNA, 25 bp, Homo sapien
tttgccccgcgaaggctaatccgcc

SEQ ID NO: 3551986 - DNA, 25 bp, Homo sapien
aggagcaggcgcctagcacaaccgg

SEQ ID NO: 3551987 - DNA, 25 bp, Homo sapien
gcacaaccggaaaaggaagtgcctc

SEQ ID NO: 3551988 - DNA, 25 bp, Homo sapien
caccggaagaacacgtcggcaggag

SEQ ID NO: 3551989 - DNA, 25 bp, Homo sapien
tctaagcacgtggttcaatttctgg

SEQ ID NO: 3551990 - DNA, 25 bp, Homo sapien
tcaaggctgccttattagtcagggt

SEQ ID NO: 3551991 - DNA, 25 bp, Homo sapien
gaaactcttatgtgctgaggcgatg

SEQ ID NO: 3551992 - DNA, 25 bp, Homo sapien
gaagtgcaatactcttttgagccca

SEQ ID NO: 3551993 - DNA, 25 bp, Homo sapien
tatgctgcggctaccgaggacatgg

SEQ ID NO: 3551994 - DNA, 25 bp, Homo sapien
gtatgtctttgatggcaagccgcca

SEQ ID NO: 3551995 - DNA, 25 bp, Homo sapien
ggaaaaattcactaagcggctggtg

SEQ ID NO: 3551996 - DNA, 25 bp, Homo sapien
tatcttgatgcacccagtgaggcag

SEQ ID NO: 3551997 - DNA, 25 bp, Homo sapien
tataatcctgataaagcttggccca

SEQ ID NO: 3551998 - DNA, 25 bp, Homo sapien
acgttttagcattcctgtcagggcc

SEQ ID NO: 3551999 - DNA, 25 bp, Homo sapien
gattacgtgtgccattctctcccag

SEQ ID NO: 3552000 - DNA, 25 bp, Homo sapien
ttgacccaccttgagagagagccac

SEQ ID NO: 3552001 - DNA, 25 bp, Homo sapien
cactcaggaatcctgtgcacacaca

SEQ ID NO: 3552002 - DNA, 25 bp, Homo sapien
cagatgaacatcatgggttacaaat

SEQ ID NO: 3552003 - DNA, 25 bp, Homo sapien
cacacagatgaacatcatgggttac

SEQ ID NO: 3552004 - DNA, 25 bp, Homo sapien
ctcgtagcagaggcactcaggaatc

SEQ ID NO: 3552005 - DNA, 25 bp, Homo sapien
ggacttggtcttggctcaatagagc

SEQ ID NO: 3552006 - DNA, 25 bp, Homo sapien
tggtgtttgctcagattgggcagcc

SEQ ID NO: 3552007 - DNA, 25 bp, Homo sapien
catgatctacttgaccagaggcagc

SEQ ID NO: 3552008 - DNA, 25 bp, Homo sapien
catgtaagagaccacactgctgtag

SEQ ID NO: 3552009 - DNA, 25 bp, Homo sapien
ctttgtgttgacaaacctctccatg

SEQ ID NO: 3552010 - DNA, 25 bp, Homo sapien
tcccaacatgccttaggacgctcat

SEQ ID NO: 3552011 - DNA, 25 bp, Homo sapien
ttctccagctaagtaaaatgtgccc

SEQ ID NO: 3552012 - DNA, 25 bp, Homo sapien
ggtggtgcatctgaccctatcccaa

SEQ ID NO: 3552013 - DNA, 25 bp, Homo sapien
tgctgaagaggcaaagtagtaatcc

SEQ ID NO: 3552014 - DNA, 25 bp, Homo sapien
caatatgcctagagtagatgctgct

SEQ ID NO: 3552015 - DNA, 25 bp, Homo sapien
taagatacctagctacagcaataga

SEQ ID NO: 3552016 - DNA, 25 bp, Homo sapien
ggagagatgggctaaactgtttatc

SEQ ID NO: 3552017 - DNA, 25 bp, Homo sapien
gactctgggttcagtaggtccctcc

SEQ ID NO: 3552018 - DNA, 25 bp, Homo sapien
tgttctctttagaccctggagggaa

SEQ ID NO: 3552019 - DNA, 25 bp, Homo sapien
cacgcccggcatgagtggaatttta

SEQ ID NO: 3552020 - DNA, 25 bp, Homo sapien
tgagctcccacagactgagttgtgc

SEQ ID NO: 3552021 - DNA, 25 bp, Homo sapien
ttggtgaagataggcatctagccag

SEQ ID NO: 3552022 - DNA, 25 bp, Homo sapien
aagataggcatctagccagagctgc

SEQ ID NO: 3552023 - DNA, 25 bp, Homo sapien
ttattggtgaagataggcatctagc

SEQ ID NO: 3552024 - DNA, 25 bp, Homo sapien
tgaagataggcatctagccagagct

SEQ ID NO: 3552025 - DNA, 25 bp, Homo sapien
cactttgtggtaattgtgtcgaggc

SEQ ID NO: 3552026 - DNA, 25 bp, Homo sapien
actggtactctatgccatgcttggc

SEQ ID NO: 3552027 - DNA, 25 bp, Homo sapien
gggcttggactggtactctatgcca

SEQ ID NO: 3552028 - DNA, 25 bp, Homo sapien
ttggcacacaaggactgcaccaggg

SEQ ID NO: 3552029 - DNA, 25 bp, Homo sapien
actgaaccagtcattgaaggcagac

SEQ ID NO: 3552030 - DNA, 25 bp, Homo sapien
ctgaaccagtcattgaaggcagact

SEQ ID NO: 3552031 - DNA, 25 bp, Homo sapien
gaaccagtcattgaaggcagacttg

SEQ ID NO: 3552032 - DNA, 25 bp, Homo sapien
ccagtcattgaaggcagacttgtgg

SEQ ID NO: 3552033 - DNA, 25 bp, Homo sapien
ggaatatggttcatctgtgtcaccc

SEQ ID NO: 3552034 - DNA, 25 bp, Homo sapien
tgcatgggaatatggttcatctgtg

SEQ ID NO: 3552035 - DNA, 25 bp, Homo sapien
tgggtggaaacccagtccatgttcc

SEQ ID NO: 3552036 - DNA, 25 bp, Homo sapien
atgttccggtcatgatcaatgtgca

SEQ ID NO: 3552037 - DNA, 25 bp, Homo sapien
tttcagccccaatagtggcacataa

SEQ ID NO: 3552038 - DNA, 25 bp, Homo sapien
agtggcacataagtgaggaagaagc

SEQ ID NO: 3552039 - DNA, 25 bp, Homo sapien
gaagaagcggacgtagaaggtaatc

SEQ ID NO: 3552040 - DNA, 25 bp, Homo sapien
gaagcggacgtagaaggtaatcatc

SEQ ID NO: 3552041 - DNA, 25 bp, Homo sapien
ctttcgctggataacaaaatagaaa

SEQ ID NO: 3552042 - DNA, 25 bp, Homo sapien
ttctttcgctggataacaaaataga

SEQ ID NO: 3552043 - DNA, 25 bp, Homo sapien
agaaaatataccactggaagtagag

SEQ ID NO: 3552044 - DNA, 25 bp, Homo sapien
aatataccactggaagtagagaggc

SEQ ID NO: 3552045 - DNA, 25 bp, Homo sapien
ctggtggttgtacggcatatatttt

SEQ ID NO: 3552046 - DNA, 25 bp, Homo sapien
tggttgtacggcatatattttttct

SEQ ID NO: 3552047 - DNA, 25 bp, Homo sapien
tgctggtggttgtacggcatatatt

SEQ ID NO: 3552048 - DNA, 25 bp, Homo sapien
ttgtgctggtggttgtacggcatat

SEQ ID NO: 3552049 - DNA, 25 bp, Homo sapien
acactgcccttgaagcagccatggg

SEQ ID NO: 3552050 - DNA, 25 bp, Homo sapien
tgacagtagaaatgcacaagcccca

SEQ ID NO: 3552051 - DNA, 25 bp, Homo sapien
tacacacagggttgcgctgttaccc

SEQ ID NO: 3552052 - DNA, 25 bp, Homo sapien
tgatgtctgctgataggaatttcct

SEQ ID NO: 3552053 - DNA, 25 bp, Homo sapien
gacaatttaattcctcgcaagctga

SEQ ID NO: 3552054 - DNA, 25 bp, Homo sapien
aactctgcagcctacagccttggga

SEQ ID NO: 3552055 - DNA, 25 bp, Homo sapien
taccttgaactcatgcctagaactg

SEQ ID NO: 3552056 - DNA, 25 bp, Homo sapien
gagaggaacgccaggctaccttgaa

SEQ ID NO: 3552057 - DNA, 25 bp, Homo sapien
tccgctggatcctttgcaaaatgag

SEQ ID NO: 3552058 - DNA, 25 bp, Homo sapien
gcaccttcaaggataggctatctca

SEQ ID NO: 3552059 - DNA, 25 bp, Homo sapien
gggcaagagtgtcaaaaaagcacct

SEQ ID NO: 3552060 - DNA, 25 bp, Homo sapien
gaagagtaagacagtccagccctgg

SEQ ID NO: 3552061 - DNA, 25 bp, Homo sapien
ccccaagacctttccactgatacct

SEQ ID NO: 3552062 - DNA, 25 bp, Homo sapien
actcccctatgttggctgcctccta

SEQ ID NO: 3552063 - DNA, 25 bp, Homo sapien
cacactgacaacatcgtgggcatct

SEQ ID NO: 3552064 - DNA, 25 bp, Homo sapien
tattgcctgttgccttccagaactt

SEQ ID NO: 3552065 - DNA, 25 bp, Homo sapien
gaagggatgcatgttgatgtctggg

SEQ ID NO: 3552066 - DNA, 25 bp, Homo sapien
tgatgtctgggtctttgcggaagca

SEQ ID NO: 3552067 - DNA, 25 bp, Homo sapien
tgcatgtggttccaccaactggcgg

SEQ ID NO: 3552068 - DNA, 25 bp, Homo sapien
tgcggaagcagttgggcttggcatg

SEQ ID NO: 3552069 - DNA, 25 bp, Homo sapien
cttcaggtggccaatcacaaaatga

SEQ ID NO: 3552070 - DNA, 25 bp, Homo sapien
caggtggccaatcacaaaatgatgt

SEQ ID NO: 3552071 - DNA, 25 bp, Homo sapien
gcagatggttccactttgaggtgct

SEQ ID NO: 3552072 - DNA, 25 bp, Homo sapien
tggttccactttgaggtgctgaaga

SEQ ID NO: 3552073 - DNA, 25 bp, Homo sapien
agaagagtcaacactgagagcagcc

SEQ ID NO: 3552074 - DNA, 25 bp, Homo sapien
cagccccagtgtcgccttcactgac

SEQ ID NO: 3552075 - DNA, 25 bp, Homo sapien
ctaggtgagaagagtcaacactgag

SEQ ID NO: 3552076 - DNA, 25 bp, Homo sapien
gtgtcgccttcactgacctcgatgc

SEQ ID NO: 3552077 - DNA, 25 bp, Homo sapien
gaactgagatcaagtgatccggcca

SEQ ID NO: 3552078 - DNA, 25 bp, Homo sapien
ccggccaccttggcctcccaaagtg

SEQ ID NO: 3552079 - DNA, 25 bp, Homo sapien
actgagatcaagtgatccggccacc

SEQ ID NO: 3552080 - DNA, 25 bp, Homo sapien
ttgaactgagatcaagtgatccggc

SEQ ID NO: 3552081 - DNA, 25 bp, Homo sapien
catccagcagcaagatgtgcagcag

SEQ ID NO: 3552082 - DNA, 25 bp, Homo sapien
atccgctccactgtggcccgcagct

SEQ ID NO: 3552083 - DNA, 25 bp, Homo sapien
acatggttggccttcatgagcccca

SEQ ID NO: 3552084 - DNA, 25 bp, Homo sapien
agctcccggaactcatctgtcagct

SEQ ID NO: 3552085 - DNA, 25 bp, Homo sapien
ttgatgtggaaggccacaaagggat

SEQ ID NO: 3552086 - DNA, 25 bp, Homo sapien
ccttgttgatgtggaaggccacaaa

SEQ ID NO: 3552087 - DNA, 25 bp, Homo sapien
tgatgtggaaggccacaaagggatc

SEQ ID NO: 3552088 - DNA, 25 bp, Homo sapien
ggcccttgttgatgtggaaggccac

SEQ ID NO: 3552089 - DNA, 25 bp, Homo sapien
ggcagtgttcgcaccaaaggccatc

SEQ ID NO: 3552090 - DNA, 25 bp, Homo sapien
gctgtacccaagttgaagtgagagg

SEQ ID NO: 3552091 - DNA, 25 bp, Homo sapien
tgcccgccagaaggctgtacccaag

SEQ ID NO: 3552092 - DNA, 25 bp, Homo sapien
agtgccgggagaagatgaaaggtga

SEQ ID NO: 3552093 - DNA, 25 bp, Homo sapien
tattgtcttagttgtccctgcccac

SEQ ID NO: 3552094 - DNA, 25 bp, Homo sapien
gccgtggaccttcccgctgttatag

SEQ ID NO: 3552095 - DNA, 25 bp, Homo sapien
cacagcctgtaagggaactggagcg

SEQ ID NO: 3552096 - DNA, 25 bp, Homo sapien
tccggcgggtatggtctcactgact

SEQ ID NO: 3552097 - DNA, 25 bp, Homo sapien
tgccccaaggcagctactttgggtt

SEQ ID NO: 3552098 - DNA, 25 bp, Homo sapien
ccacgaagaggaagacttccctacg

SEQ ID NO: 3552099 - DNA, 25 bp, Homo sapien
tttgggttgtgcaaggtaaggtcca

SEQ ID NO: 3552100 - DNA, 25 bp, Homo sapien
tcttgcgggtctttcaataagtccc

SEQ ID NO: 3552101 - DNA, 25 bp, Homo sapien
gaatagctgaagacctcgctggcct

SEQ ID NO: 3552102 - DNA, 25 bp, Homo sapien
gggtcctcgctaagtgtatgccatt

SEQ ID NO: 3552103 - DNA, 25 bp, Homo sapien
tctgctgcgacgttatgggaacctg

SEQ ID NO: 3552104 - DNA, 25 bp, Homo sapien
gtttcagccccatcctcgagaatgg

SEQ ID NO: 3552105 - DNA, 25 bp, Homo sapien
cagatggaatgcacggcagggaggc

SEQ ID NO: 3552106 - DNA, 25 bp, Homo sapien
ttttcatcccgcatccgcaggacac

SEQ ID NO: 3552107 - DNA, 25 bp, Homo sapien
aatcaccgggcaacaggtatgatca

SEQ ID NO: 3552108 - DNA, 25 bp, Homo sapien
tctctcccgccttttcatcccgcat

SEQ ID NO: 3552109 - DNA, 25 bp, Homo sapien
ggatgccggcgggtgaactcgctga

SEQ ID NO: 3552110 - DNA, 25 bp, Homo sapien
ttacggtcgatcactagccaccgct

SEQ ID NO: 3552111 - DNA, 25 bp, Homo sapien
aactcgctgatgttgtacaccttac

SEQ ID NO: 3552112 - DNA, 25 bp, Homo sapien
tagtggctgatgacccgggagcccc

SEQ ID NO: 3552113 - DNA, 25 bp, Homo sapien
aagtagcgcggggtaggtccctgag

SEQ ID NO: 3552114 - DNA, 25 bp, Homo sapien
ctgagccgcggtctcggcggccacc

SEQ ID NO: 3552115 - DNA, 25 bp, Homo sapien
ctgggccacctcgtcccaggtgaag

SEQ ID NO: 3552116 - DNA, 25 bp, Homo sapien
gggccacctcgtcccaggtgaagta

SEQ ID NO: 3552117 - DNA, 25 bp, Homo sapien
agtggatttgctggcgcgcgcccag

SEQ ID NO: 3552118 - DNA, 25 bp, Homo sapien
gcagcgcgcgttcccattggccgag

SEQ ID NO: 3552119 - DNA, 25 bp, Homo sapien
ttttcagcaccgcagggcagaccgg

SEQ ID NO: 3552120 - DNA, 25 bp, Homo sapien
tccgcgggctccaggagtggatttg

SEQ ID NO: 3552121 - DNA, 25 bp, Homo sapien
aagcagtatctatgatagcgggaaa

SEQ ID NO: 3552122 - DNA, 25 bp, Homo sapien
gcgggaaatggaaacactctaaatg

SEQ ID NO: 3552123 - DNA, 25 bp, Homo sapien
gtatctatgatagcgggaaatggaa

SEQ ID NO: 3552124 - DNA, 25 bp, Homo sapien
tgatagcgggaaatggaaacactct

SEQ ID NO: 3552125 - DNA, 25 bp, Homo sapien
taacgagcttataatccaggatagg

SEQ ID NO: 3552126 - DNA, 25 bp, Homo sapien
tcagtactatatgggtcatgcctag

SEQ ID NO: 3552127 - DNA, 25 bp, Homo sapien
ctagtcatgtctactggaggagaga

SEQ ID NO: 3552128 - DNA, 25 bp, Homo sapien
tgtattttgctacctccctaacgag

SEQ ID NO: 3552129 - DNA, 25 bp, Homo sapien
tggcttagggtaggcaacatctgca

SEQ ID NO: 3552130 - DNA, 25 bp, Homo sapien
tcgcagctccgtgaggacaagggct

SEQ ID NO: 3552131 - DNA, 25 bp, Homo sapien
ggacacttagctttcctggccccag

SEQ ID NO: 3552132 - DNA, 25 bp, Homo sapien
cacagttataccgaggagctttcct

SEQ ID NO: 3552133 - DNA, 25 bp, Homo sapien
aaggccacagctgtccgttgctgtt

SEQ ID NO: 3552134 - DNA, 25 bp, Homo sapien
gctgttcccacccatggctattagt

SEQ ID NO: 3552135 - DNA, 25 bp, Homo sapien
tctctcatgggttttgaggcctgcc

SEQ ID NO: 3552136 - DNA, 25 bp, Homo sapien
cctgaggttactgcaaaggccacag

SEQ ID NO: 3552137 - DNA, 25 bp, Homo sapien
cattggtccaccctttcatagagag

SEQ ID NO: 3552138 - DNA, 25 bp, Homo sapien
ccttgcagcctggtcactaggcatc

SEQ ID NO: 3552139 - DNA, 25 bp, Homo sapien
ttgttacaaagctcgggtctccctc

SEQ ID NO: 3552140 - DNA, 25 bp, Homo sapien
ctttggttcttcagatgctcttggg

SEQ ID NO: 3552141 - DNA, 25 bp, Homo sapien
aatgtgctatgctcaccttccctct

SEQ ID NO: 3552142 - DNA, 25 bp, Homo sapien
tgagggtatcgatcccgccgggggc

SEQ ID NO: 3552143 - DNA, 25 bp, Homo sapien
aataacagctttcccccaattctcg

SEQ ID NO: 3552144 - DNA, 25 bp, Homo sapien
aatacacatgtgagggggccgaggg

SEQ ID NO: 3552145 - DNA, 25 bp, Homo sapien
tcactgatggaggtaggcgtccagc

SEQ ID NO: 3552146 - DNA, 25 bp, Homo sapien
gcgtccagccagatgtcaccagact

SEQ ID NO: 3552147 - DNA, 25 bp, Homo sapien
taggcgtccagccagatgtcaccag

SEQ ID NO: 3552148 - DNA, 25 bp, Homo sapien
tccagccagatgtcaccagacttct

SEQ ID NO: 3552149 - DNA, 25 bp, Homo sapien
gtggaacctgcccacccgatcttgg

SEQ ID NO: 3552150 - DNA, 25 bp, Homo sapien
tgggcgctgcaacccaaggacagag

SEQ ID NO: 3552151 - DNA, 25 bp, Homo sapien
ccgatcttgggcctgatattggtca

SEQ ID NO: 3552152 - DNA, 25 bp, Homo sapien
tgtcaacaatctgctaggaagccct

SEQ ID NO: 3552153 - DNA, 25 bp, Homo sapien
cctggacaagggtaggcataggccc

SEQ ID NO: 3552154 - DNA, 25 bp, Homo sapien
tcagcatgaggctgacctggacaag

SEQ ID NO: 3552155 - DNA, 25 bp, Homo sapien
tatgagtccctgttaagtgtttcct

SEQ ID NO: 3552156 - DNA, 25 bp, Homo sapien
aattctcactgtgtgcgtgaaggct

SEQ ID NO: 3552157 - DNA, 25 bp, Homo sapien
ccggctgtagttgtgtctcggcatc

SEQ ID NO: 3552158 - DNA, 25 bp, Homo sapien
gaagggcttcacttcgtagctgagg

SEQ ID NO: 3552159 - DNA, 25 bp, Homo sapien
acttcgtagctgaggccgtgcttgg

SEQ ID NO: 3552160 - DNA, 25 bp, Homo sapien
tgcttggcacacagcgacttgacca

SEQ ID NO: 3552161 - DNA, 25 bp, Homo sapien
ctgggggtggggagcgtatgctggc

SEQ ID NO: 3552162 - DNA, 25 bp, Homo sapien
gggggtggggagcgtatgctggcac

SEQ ID NO: 3552163 - DNA, 25 bp, Homo sapien
tgggggtggggagcgtatgctggca

SEQ ID NO: 3552164 - DNA, 25 bp, Homo sapien
ttggtgaaaagtgagggctccacgt

SEQ ID NO: 3552165 - DNA, 25 bp, Homo sapien
ggtgcccgctgaaccagttggtgaa

SEQ ID NO: 3552166 - DNA, 25 bp, Homo sapien
aaaagtgagggctccacgttgcagg

SEQ ID NO: 3552167 - DNA, 25 bp, Homo sapien
aggtgcccgctgaaccagttggtga

SEQ ID NO: 3552168 - DNA, 25 bp, Homo sapien
tccacacgaaccagtggctttccag

SEQ ID NO: 3552169 - DNA, 25 bp, Homo sapien
ggtgcttctcgtggccgatctcctt

SEQ ID NO: 3552170 - DNA, 25 bp, Homo sapien
gtggttcatctgtgtgatccacacg

SEQ ID NO: 3552171 - DNA, 25 bp, Homo sapien
cagtcccggtgcttctcgtggccga

SEQ ID NO: 3552172 - DNA, 25 bp, Homo sapien
ctgcagacgggaaaagggaagctct

SEQ ID NO: 3552173 - DNA, 25 bp, Homo sapien
tacaataggattgtggccatcgccc

SEQ ID NO: 3552174 - DNA, 25 bp, Homo sapien
cacctgtcgcctgtgtgtgacctcg

SEQ ID NO: 3552175 - DNA, 25 bp, Homo sapien
cacttaggcaccctgagtggaggct

SEQ ID NO: 3552176 - DNA, 25 bp, Homo sapien
gcgggcatagaagctggcggcccag

SEQ ID NO: 3552177 - DNA, 25 bp, Homo sapien
cagcaccccagggacgccgtagaag

SEQ ID NO: 3552178 - DNA, 25 bp, Homo sapien
agcaccccagggacgccgtagaagg

SEQ ID NO: 3552179 - DNA, 25 bp, Homo sapien
gaggtaggataagaagaagcgggca

SEQ ID NO: 3552180 - DNA, 25 bp, Homo sapien
gcagaggcgataccgagaggtctcc

SEQ ID NO: 3552181 - DNA, 25 bp, Homo sapien
tgttgcacgcatacatgtgagccac

SEQ ID NO: 3552182 - DNA, 25 bp, Homo sapien
tgccagctcacgaggctgattttag

SEQ ID NO: 3552183 - DNA, 25 bp, Homo sapien
tcagctgagtaaaggaacagggtcc

SEQ ID NO: 3552184 - DNA, 25 bp, Homo sapien
gcacaccagcatgtacgccagattt

SEQ ID NO: 3552185 - DNA, 25 bp, Homo sapien
catgtacgccagattttccacttca

SEQ ID NO: 3552186 - DNA, 25 bp, Homo sapien
cttcaaagttcaccagggtgagcag

SEQ ID NO: 3552187 - DNA, 25 bp, Homo sapien
ccacttcaaagttcaccagggtgag

SEQ ID NO: 3552188 - DNA, 25 bp, Homo sapien
gttgtagggtaggtatctgcgtttc

SEQ ID NO: 3552189 - DNA, 25 bp, Homo sapien
agggtaggtatctgcgtttcttctt

SEQ ID NO: 3552190 - DNA, 25 bp, Homo sapien
tgtagggtaggtatctgcgtttctt

SEQ ID NO: 3552191 - DNA, 25 bp, Homo sapien
tagggtaggtatctgcgtttcttct

SEQ ID NO: 3552192 - DNA, 25 bp, Homo sapien
tctcccgggcaaggtcacggggctg

SEQ ID NO: 3552193 - DNA, 25 bp, Homo sapien
caagggtcaaaggcaactctagatt

SEQ ID NO: 3552194 - DNA, 25 bp, Homo sapien
gggccaagggtcaaaggcaactcta

SEQ ID NO: 3552195 - DNA, 25 bp, Homo sapien
tggagacagcagctctccaggccac

SEQ ID NO: 3552196 - DNA, 25 bp, Homo sapien
gaagtggcggaagttccaccagtgg

SEQ ID NO: 3552197 - DNA, 25 bp, Homo sapien
tgctggaagtggcggaagttccacc

SEQ ID NO: 3552198 - DNA, 25 bp, Homo sapien
tcccccaggaggaagacgggcgcca

SEQ ID NO: 3552199 - DNA, 25 bp, Homo sapien
ccaccgtcacgtctgggtctttgtg

SEQ ID NO: 3552200 - DNA, 25 bp, Homo sapien
ccatcacgaacttctgggccacgtg

SEQ ID NO: 3552201 - DNA, 25 bp, Homo sapien
aggcatggcccaggtcatgctgcag

SEQ ID NO: 3552202 - DNA, 25 bp, Homo sapien
tgggccacgtggttccaccaggact

SEQ ID NO: 3552203 - DNA, 25 bp, Homo sapien
tttagctgccccatcacgaacttct

SEQ ID NO: 3552204 - DNA, 25 bp, Homo sapien
tctgttgggcagttaaggtggctgc

SEQ ID NO: 3552205 - DNA, 25 bp, Homo sapien
ttgggcagttaaggtggctgcaaca

SEQ ID NO: 3552206 - DNA, 25 bp, Homo sapien
ggcagttaaggtggctgcaacacag

SEQ ID NO: 3552207 - DNA, 25 bp, Homo sapien
gtctgttgggcagttaaggtggctg

SEQ ID NO: 3552208 - DNA, 25 bp, Homo sapien
caggatgtggcccagtaggaaagca

SEQ ID NO: 3552209 - DNA, 25 bp, Homo sapien
aagcaaagaaggtgggactggcatc

SEQ ID NO: 3552210 - DNA, 25 bp, Homo sapien
gctcggaagtcctcgaccagctgcg

SEQ ID NO: 3552211 - DNA, 25 bp, Homo sapien
acccaggaggtagataaggagccag

SEQ ID NO: 3552212 - DNA, 25 bp, Homo sapien
cttgatggaaggcacggaaggcatc

SEQ ID NO: 3552213 - DNA, 25 bp, Homo sapien
caaaattgagatcttgatggaaggc

SEQ ID NO: 3552214 - DNA, 25 bp, Homo sapien
gggctgtaggaacttgcgcacaaaa

SEQ ID NO: 3552215 - DNA, 25 bp, Homo sapien
attcaggggtccatcctggctgggt

SEQ ID NO: 3552216 - DNA, 25 bp, Homo sapien
gtcagccggctgatgaacagtcaaa

SEQ ID NO: 3552217 - DNA, 25 bp, Homo sapien
tgaacacggtcaaacatctgcagct

SEQ ID NO: 3552218 - DNA, 25 bp, Homo sapien
tcaagggcgacacacattgagtcct

SEQ ID NO: 3552219 - DNA, 25 bp, Homo sapien
cactgcatgtagaataagatctggg

SEQ ID NO: 3552220 - DNA, 25 bp, Homo sapien
aagtaaataaaatgggccaggcatg

SEQ ID NO: 3552221 - DNA, 25 bp, Homo sapien
tcctgaccccaggtggccaagctgg

SEQ ID NO: 3552222 - DNA, 25 bp, Homo sapien
ctgaccccaggtggccaagctggtc

SEQ ID NO: 3552223 - DNA, 25 bp, Homo sapien
taaagtaaataaaatgggccaggca

SEQ ID NO: 3552224 - DNA, 25 bp, Homo sapien
aacggaagtgacagcgggccctgaa

SEQ ID NO: 3552225 - DNA, 25 bp, Homo sapien
gaagtcactgccaggacattctcct

SEQ ID NO: 3552226 - DNA, 25 bp, Homo sapien
cagctggtgagtcttaaaacggaag

SEQ ID NO: 3552227 - DNA, 25 bp, Homo sapien
cctgaagtcactgccaggacattct

SEQ ID NO: 3552228 - DNA, 25 bp, Homo sapien
tgtttcatcagaaacccgcaggaag

SEQ ID NO: 3552229 - DNA, 25 bp, Homo sapien
gctgtttcatcagaaacccgcagga

SEQ ID NO: 3552230 - DNA, 25 bp, Homo sapien
atcagaaacccgcaggaagagaccg

SEQ ID NO: 3552231 - DNA, 25 bp, Homo sapien
cctggctgtttcatcagaaacccgc

SEQ ID NO: 3552232 - DNA, 25 bp, Homo sapien
ctggcaggaaggcttcattgcctgg

SEQ ID NO: 3552233 - DNA, 25 bp, Homo sapien
gaaggcttcattgcctggacttgag

SEQ ID NO: 3552234 - DNA, 25 bp, Homo sapien
aagggcccagagtactctccccagg

SEQ ID NO: 3552235 - DNA, 25 bp, Homo sapien
tggccaagggcccagagtactctcc

SEQ ID NO: 3552236 - DNA, 25 bp, Homo sapien
catgtcctcgggtcttgaagacctt

SEQ ID NO: 3552237 - DNA, 25 bp, Homo sapien
gacgccgacagtcctgggactggac

SEQ ID NO: 3552238 - DNA, 25 bp, Homo sapien
tggccctgtcaagagggacgccgac

SEQ ID NO: 3552239 - DNA, 25 bp, Homo sapien
tcaggattcatgtcctcgggtcttg

SEQ ID NO: 3552240 - DNA, 25 bp, Homo sapien
tcctcagcgccgtggtggccgatga

SEQ ID NO: 3552241 - DNA, 25 bp, Homo sapien
tgatgtcgtagacgcggcgctcgat

SEQ ID NO: 3552242 - DNA, 25 bp, Homo sapien
gaccagccacttgtcgccgggctgg

SEQ ID NO: 3552243 - DNA, 25 bp, Homo sapien
tggtcgtgcgcgcggatctgctccc

SEQ ID NO: 3552244 - DNA, 25 bp, Homo sapien
accccgagggaagcgaagagcgctc

SEQ ID NO: 3552245 - DNA, 25 bp, Homo sapien
tgcacgcacgagtcctggggatccc

SEQ ID NO: 3552246 - DNA, 25 bp, Homo sapien
gcggccgccgtacgagcgagcgtgc

SEQ ID NO: 3552247 - DNA, 25 bp, Homo sapien
ccgaggtccgagcaagaccccgagg

SEQ ID NO: 3552248 - DNA, 25 bp, Homo sapien
ttcttgactccacccggagcgcggg

SEQ ID NO: 3552249 - DNA, 25 bp, Homo sapien
cttgactccacccggagcgcggggc

SEQ ID NO: 3552250 - DNA, 25 bp, Homo sapien
tcttgactccacccggagcgcgggg

SEQ ID NO: 3552251 - DNA, 25 bp, Homo sapien
acgtcaaatccagtgcgcccagagg

SEQ ID NO: 3552252 - DNA, 25 bp, Homo sapien
gcgtcctgcaacgtcaaatccagtg

SEQ ID NO: 3552253 - DNA, 25 bp, Homo sapien
accatgggccccaatctctgcgggg

SEQ ID NO: 3552254 - DNA, 25 bp, Homo sapien
agccgcgcgtcctgcaacgtcaaat

SEQ ID NO: 3552255 - DNA, 25 bp, Homo sapien
gaaccgaaagcagagtcttgaggag

SEQ ID NO: 3552256 - DNA, 25 bp, Homo sapien
aagaaccgaaagcagagtcttgagg

SEQ ID NO: 3552257 - DNA, 25 bp, Homo sapien
gagtcttgaggagatatttgtacat

SEQ ID NO: 3552258 - DNA, 25 bp, Homo sapien
aagcagagtcttgaggagatatttg

SEQ ID NO: 3552259 - DNA, 25 bp, Homo sapien
aagaggtcattgtgaggcagcacaa

SEQ ID NO: 3552260 - DNA, 25 bp, Homo sapien
ggcagcacaactgtccatccacaga

SEQ ID NO: 3552261 - DNA, 25 bp, Homo sapien
gtgaggcagcacaactgtccatcca

SEQ ID NO: 3552262 - DNA, 25 bp, Homo sapien
attgtgaggcagcacaactgtccat

SEQ ID NO: 3552263 - DNA, 25 bp, Homo sapien
gggccctcgtgcagtgaaattcata

SEQ ID NO: 3552264 - DNA, 25 bp, Homo sapien
tgtttcggaacactgtaaatggact

SEQ ID NO: 3552265 - DNA, 25 bp, Homo sapien
catccacttaaatgagggccctcgt

SEQ ID NO: 3552266 - DNA, 25 bp, Homo sapien
taaatggacttagcactactgaact

SEQ ID NO: 3552267 - DNA, 25 bp, Homo sapien
agatgcccaagccttggccagagcc

SEQ ID NO: 3552268 - DNA, 25 bp, Homo sapien
ttcagatgcccaagccttggccaga

SEQ ID NO: 3552269 - DNA, 25 bp, Homo sapien
aatcccaagcacgagggcgggcagg

SEQ ID NO: 3552270 - DNA, 25 bp, Homo sapien
gtgcaggagtgagggcgcgtggcca

SEQ ID NO: 3552271 - DNA, 25 bp, Homo sapien
aacaggcgtgggtgatctgaagccc

SEQ ID NO: 3552272 - DNA, 25 bp, Homo sapien
gagtatggatccgagctccctggtc

SEQ ID NO: 3552273 - DNA, 25 bp, Homo sapien
tagtagtccaatagggaggccaccg

SEQ ID NO: 3552274 - DNA, 25 bp, Homo sapien
caattctgtgctatggaggccctgc

SEQ ID NO: 3552275 - DNA, 25 bp, Homo sapien
acctcatgatctcccagaacatggg

SEQ ID NO: 3552276 - DNA, 25 bp, Homo sapien
tgacatctccttccgcaacctcatg

SEQ ID NO: 3552277 - DNA, 25 bp, Homo sapien
gccgagcttggccagtgacatctcc

SEQ ID NO: 3552278 - DNA, 25 bp, Homo sapien
aagaagccgagcttggccagtgaca

SEQ ID NO: 3552279 - DNA, 25 bp, Homo sapien
actcagcagcgagcaaaggttggtg

SEQ ID NO: 3552280 - DNA, 25 bp, Homo sapien
agaagactcagcagcgagcaaaggt

SEQ ID NO: 3552281 - DNA, 25 bp, Homo sapien
agagggtcgggccagactggttcag

SEQ ID NO: 3552282 - DNA, 25 bp, Homo sapien
tcgggccagactggttcaggagaag

SEQ ID NO: 3552283 - DNA, 25 bp, Homo sapien
accaggccttgctggatgtagcgga

SEQ ID NO: 3552284 - DNA, 25 bp, Homo sapien
ttgctggatgtagcggatgtaggtg

SEQ ID NO: 3552285 - DNA, 25 bp, Homo sapien
cgtcctgccgcaccaggccttgctg

SEQ ID NO: 3552286 - DNA, 25 bp, Homo sapien
tggatgtagcggatgtaggtgaaga

SEQ ID NO: 3552287 - DNA, 25 bp, Homo sapien
ttcatcaagcgcctgcagcgaacgg

SEQ ID NO: 3552288 - DNA, 25 bp, Homo sapien
catccatcacggagatggcggagct

SEQ ID NO: 3552289 - DNA, 25 bp, Homo sapien
tggcggagctaatgaaccagcatgc

SEQ ID NO: 3552290 - DNA, 25 bp, Homo sapien
cgaacggagcagacgcgcttattat

SEQ ID NO: 3552291 - DNA, 25 bp, Homo sapien
ggtggcggcaggtgcgggtcagccc

SEQ ID NO: 3552292 - DNA, 25 bp, Homo sapien
aagatggcgagatgtagtaatggct

SEQ ID NO: 3552293 - DNA, 25 bp, Homo sapien
gggtcagcccgctcagggcacatgt

SEQ ID NO: 3552294 - DNA, 25 bp, Homo sapien
tggagtccccgagccggattcggtg

SEQ ID NO: 3552295 - DNA, 25 bp, Homo sapien
tggtgctgctacagtcaacctcggc

SEQ ID NO: 3552296 - DNA, 25 bp, Homo sapien
gccaccggctcaatggtgagcgtgt

SEQ ID NO: 3552297 - DNA, 25 bp, Homo sapien
agcgtgttgtcctccacggcggccc

SEQ ID NO: 3552298 - DNA, 25 bp, Homo sapien
ggcagcgtctgcgaagccaccggct

SEQ ID NO: 3552299 - DNA, 25 bp, Homo sapien
gaactctgcaaacaggattgtgtcc

SEQ ID NO: 3552300 - DNA, 25 bp, Homo sapien
actctgcaaacaggattgtgtccac

SEQ ID NO: 3552301 - DNA, 25 bp, Homo sapien
cgtcctctcggtacaccctttccag

SEQ ID NO: 3552302 - DNA, 25 bp, Homo sapien
ctctcggtacaccctttccaggaag

SEQ ID NO: 3552303 - DNA, 25 bp, Homo sapien
tgctggggaccacgcagaggagcag

SEQ ID NO: 3552304 - DNA, 25 bp, Homo sapien
ccttgctggggaccacgcagaggag

SEQ ID NO: 3552305 - DNA, 25 bp, Homo sapien
tcgtaggtgaggtgaaccgccttgc

SEQ ID NO: 3552306 - DNA, 25 bp, Homo sapien
ggccaggccggctcgtaggtgaggt

SEQ ID NO: 3552307 - DNA, 25 bp, Homo sapien
tcttgtggcgagagtggccctttcg

SEQ ID NO: 3552308 - DNA, 25 bp, Homo sapien
ggtgaagctcgcggttgggagaggc

SEQ ID NO: 3552309 - DNA, 25 bp, Homo sapien
gtcccgcagcgggacacacggcggg

SEQ ID NO: 3552310 - DNA, 25 bp, Homo sapien
gacgtgatgaccagcgtcttcaagg

SEQ ID NO: 3552311 - DNA, 25 bp, Homo sapien
tgcttttctgatgccgcctgcttca

SEQ ID NO: 3552312 - DNA, 25 bp, Homo sapien
tggcttctcgaaccatcttgtgagc

SEQ ID NO: 3552313 - DNA, 25 bp, Homo sapien
gcttctcgaaccatcttgtgagctt

SEQ ID NO: 3552314 - DNA, 25 bp, Homo sapien
tgttggcttctcgaaccatcttgtg

SEQ ID NO: 3552315 - DNA, 25 bp, Homo sapien
aggctggccgtcagctcttccagct

SEQ ID NO: 3552316 - DNA, 25 bp, Homo sapien
gctcacattcctcgtcctttagctt

SEQ ID NO: 3552317 - DNA, 25 bp, Homo sapien
cttctgcgctctgtgcagctcctcc

SEQ ID NO: 3552318 - DNA, 25 bp, Homo sapien
cgcaggcgcaacacgtccagctggg

SEQ ID NO: 3552319 - DNA, 25 bp, Homo sapien
tgcgcaggcgcaacacgtccagctg

SEQ ID NO: 3552320 - DNA, 25 bp, Homo sapien
ctgcgcaggcgcaacacgtccagct

SEQ ID NO: 3552321 - DNA, 25 bp, Homo sapien
gcgcaggcgcaacacgtccagctgg

SEQ ID NO: 3552322 - DNA, 25 bp, Homo sapien
tccgtgctcttccaggggaccggga

SEQ ID NO: 3552323 - DNA, 25 bp, Homo sapien
ggacagctgcaaggggcggcgggag

SEQ ID NO: 3552324 - DNA, 25 bp, Homo sapien
cgtgctcttccaggggaccgggaca

SEQ ID NO: 3552325 - DNA, 25 bp, Homo sapien
gctcttccaggggaccgggacagct

SEQ ID NO: 3552326 - DNA, 25 bp, Homo sapien
gcccaggcgtccgttcccagcgccg

SEQ ID NO: 3552327 - DNA, 25 bp, Homo sapien
ggcgcccaggcgtccgttcccagcg

SEQ ID NO: 3552328 - DNA, 25 bp, Homo sapien
caggcgtccgttcccagcgccgccg

SEQ ID NO: 3552329 - DNA, 25 bp, Homo sapien
cgccgactccgccaggggccgagcc

SEQ ID NO: 3552330 - DNA, 25 bp, Homo sapien
gtcagtaggtctcagacgcctgggc

SEQ ID NO: 3552331 - DNA, 25 bp, Homo sapien
tgcccgcggccggtcagtaggtctc

SEQ ID NO: 3552332 - DNA, 25 bp, Homo sapien
cgcggccggtcagtaggtctcagac

SEQ ID NO: 3552333 - DNA, 25 bp, Homo sapien
gccggtcagtaggtctcagacgcct

SEQ ID NO: 3552334 - DNA, 25 bp, Homo sapien
ggcacccagcgtgctcctcagaaga

SEQ ID NO: 3552335 - DNA, 25 bp, Homo sapien
gggcgtagcggacagtccctgcact

SEQ ID NO: 3552336 - DNA, 25 bp, Homo sapien
atggccaggaacacgggacatgtcc

SEQ ID NO: 3552337 - DNA, 25 bp, Homo sapien
gttcccctcaagtacagggcacagg

SEQ ID NO: 3552338 - DNA, 25 bp, Homo sapien
gcttgcaaggccagactgagggtcc

SEQ ID NO: 3552339 - DNA, 25 bp, Homo sapien
agggtgccgggaagggaggtagcag

SEQ ID NO: 3552340 - DNA, 25 bp, Homo sapien
agggaggtagcaggagccttcttcc

SEQ ID NO: 3552341 - DNA, 25 bp, Homo sapien
cctctggagggtgccgggaagggag

SEQ ID NO: 3552342 - DNA, 25 bp, Homo sapien
gaagttggacctaggtgtatcccag

SEQ ID NO: 3552343 - DNA, 25 bp, Homo sapien
gacctcgcagcacagtggatcctct

SEQ ID NO: 3552344 - DNA, 25 bp, Homo sapien
ggtgtcccacataaagcctggaggc

SEQ ID NO: 3552345 - DNA, 25 bp, Homo sapien
gctattccgttgtcatgggcaggac

SEQ ID NO: 3552346 - DNA, 25 bp, Homo sapien
tcactgcttcagtaaatttttattg

SEQ ID NO: 3552347 - DNA, 25 bp, Homo sapien
actgcttcagtaaatttttattgag

SEQ ID NO: 3552348 - DNA, 25 bp, Homo sapien
aatttttattgagcgccttctacga

SEQ ID NO: 3552349 - DNA, 25 bp, Homo sapien
taaatttttattgagcgccttctac

SEQ ID NO: 3552350 - DNA, 25 bp, Homo sapien
tccatacttctcacactagggtggt

SEQ ID NO: 3552351 - DNA, 25 bp, Homo sapien
tccaggttggatggttgggaacatc

SEQ ID NO: 3552352 - DNA, 25 bp, Homo sapien
catcctttctaaagggaacctggag

SEQ ID NO: 3552353 - DNA, 25 bp, Homo sapien
tcaagtagtgataagtgctctctag

SEQ ID NO: 3552354 - DNA, 25 bp, Homo sapien
ccaaagttcatagcgtacagcaggg

SEQ ID NO: 3552355 - DNA, 25 bp, Homo sapien
tacttgggcactaatgcatgctgaa

SEQ ID NO: 3552356 - DNA, 25 bp, Homo sapien
tctcattaaagccaaacactctgtt

SEQ ID NO: 3552357 - DNA, 25 bp, Homo sapien
atgtctccaccatcacagcatcagg

SEQ ID NO: 3552358 - DNA, 25 bp, Homo sapien
tttccttcgtgctgggtgagttccc

SEQ ID NO: 3552359 - DNA, 25 bp, Homo sapien
aggtcggcgcctctctgtagggaaa

SEQ ID NO: 3552360 - DNA, 25 bp, Homo sapien
tggtggaaccagtacgagaacctgc

SEQ ID NO: 3552361 - DNA, 25 bp, Homo sapien
gacgtcctgccgttagcaatgaaaa

SEQ ID NO: 3552362 - DNA, 25 bp, Homo sapien
gaatggaccataggtaccaggccct

SEQ ID NO: 3552363 - DNA, 25 bp, Homo sapien
tcacctagaggctaagtggctcccc

SEQ ID NO: 3552364 - DNA, 25 bp, Homo sapien
gaacaccttgcgtactcagtgtgga

SEQ ID NO: 3552365 - DNA, 25 bp, Homo sapien
ggacacctgtatgcctacgactgga

SEQ ID NO: 3552366 - DNA, 25 bp, Homo sapien
taagagtccaggctcctgcctggcc

SEQ ID NO: 3552367 - DNA, 25 bp, Homo sapien
tggtatcacccggaagacttcttgg

SEQ ID NO: 3552368 - DNA, 25 bp, Homo sapien
ggtggctgacccaaaaccatgaggt

SEQ ID NO: 3552369 - DNA, 25 bp, Homo sapien
tactttcacggtcagaacacgcagc

SEQ ID NO: 3552370 - DNA, 25 bp, Homo sapien
tctagggctagacaggaacttggca

SEQ ID NO: 3552371 - DNA, 25 bp, Homo sapien
aaaactgtgaaagctagactgaacc

SEQ ID NO: 3552372 - DNA, 25 bp, Homo sapien
actcagactctggattcagagtcgg

SEQ ID NO: 3552373 - DNA, 25 bp, Homo sapien
cagagtcgggaacccttagttctat

SEQ ID NO: 3552374 - DNA, 25 bp, Homo sapien
gctagactgaaccattggaaacatt

SEQ ID NO: 3552375 - DNA, 25 bp, Homo sapien
caacggcacttaaggaatctggaag

SEQ ID NO: 3552376 - DNA, 25 bp, Homo sapien
tagtgtgattagaactgaacaacgg

SEQ ID NO: 3552377 - DNA, 25 bp, Homo sapien
tgattcatcccaagacctcaaagac

SEQ ID NO: 3552378 - DNA, 25 bp, Homo sapien
gatagcctggatagatttctgattc

SEQ ID NO: 3552379 - DNA, 25 bp, Homo sapien
ggatgttttggtacaacttatagaa

SEQ ID NO: 3552380 - DNA, 25 bp, Homo sapien
gtggatgttttggtacaacttatag

SEQ ID NO: 3552381 - DNA, 25 bp, Homo sapien
gatgttttggtacaacttatagaaa

SEQ ID NO: 3552382 - DNA, 25 bp, Homo sapien
aagtggatgttttggtacaacttat

SEQ ID NO: 3552383 - DNA, 25 bp, Homo sapien
tcaaagagatattccgccaagccag

SEQ ID NO: 3552384 - DNA, 25 bp, Homo sapien
tgcttgtcaaagagatattccgcca

SEQ ID NO: 3552385 - DNA, 25 bp, Homo sapien
tgtcaaagagatattccgccaagcc

SEQ ID NO: 3552386 - DNA, 25 bp, Homo sapien
gcttgtcaaagagatattccgccaa

SEQ ID NO: 3552387 - DNA, 25 bp, Homo sapien
ggcagctttcccaatccctaaggca

SEQ ID NO: 3552388 - DNA, 25 bp, Homo sapien
caatccctaaggcaaatgatttcct

SEQ ID NO: 3552389 - DNA, 25 bp, Homo sapien
tatttcctggggttccaatactcac

SEQ ID NO: 3552390 - DNA, 25 bp, Homo sapien
aaacaatggggaagacagttagtgg

SEQ ID NO: 3552391 - DNA, 25 bp, Homo sapien
atgtaatgcacactccattgcattc

SEQ ID NO: 3552392 - DNA, 25 bp, Homo sapien
attgcattcagcccgctctcccagt

SEQ ID NO: 3552393 - DNA, 25 bp, Homo sapien
actccattgcattcagcccgctctc

SEQ ID NO: 3552394 - DNA, 25 bp, Homo sapien
tgcacactccattgcattcagcccg

SEQ ID NO: 3552395 - DNA, 25 bp, Homo sapien
gaataggttaatgcatctctaccaa

SEQ ID NO: 3552396 - DNA, 25 bp, Homo sapien
gatgaagtatgacacccctaggatc

SEQ ID NO: 3552397 - DNA, 25 bp, Homo sapien
tgatacccgaacactgccagatgat

SEQ ID NO: 3552398 - DNA, 25 bp, Homo sapien
aaggcaaaagcccagtgtatcatca

SEQ ID NO: 3552399 - DNA, 25 bp, Homo sapien
ggccacctcgttggttctgcagctt

SEQ ID NO: 3552400 - DNA, 25 bp, Homo sapien
gaagattcggccacctcgttggttc

SEQ ID NO: 3552401 - DNA, 25 bp, Homo sapien
ctgaaggaagattcggccacctcgt

SEQ ID NO: 3552402 - DNA, 25 bp, Homo sapien
agattcggccacctcgttggttctg

SEQ ID NO: 3552403 - DNA, 25 bp, Homo sapien
gtgaagaaagtatttggcaaagttc

SEQ ID NO: 3552404 - DNA, 25 bp, Homo sapien
catcatcgcggtcaaagtagtaaga

SEQ ID NO: 3552405 - DNA, 25 bp, Homo sapien
cttcaaagccacatcatcgcggtca

SEQ ID NO: 3552406 - DNA, 25 bp, Homo sapien
aagccacatcatcgcggtcaaagta

SEQ ID NO: 3552407 - DNA, 25 bp, Homo sapien
gaatgtgttatactagggatcccca

SEQ ID NO: 3552408 - DNA, 25 bp, Homo sapien
cccagagacaggtagctgtgacgat

SEQ ID NO: 3552409 - DNA, 25 bp, Homo sapien
tccccagagacaggtagctgtgacg

SEQ ID NO: 3552410 - DNA, 25 bp, Homo sapien
aacactgaatgtgttatactaggga

SEQ ID NO: 3552411 - DNA, 25 bp, Homo sapien
cctttaggatattatgggcattgcc

SEQ ID NO: 3552412 - DNA, 25 bp, Homo sapien
gatgagctactggattgaacccaag

SEQ ID NO: 3552413 - DNA, 25 bp, Homo sapien
caagatggtctcgtcagcctaggct

SEQ ID NO: 3552414 - DNA, 25 bp, Homo sapien
tgaaggaatcagtgcctaaggagac

SEQ ID NO: 3552415 - DNA, 25 bp, Homo sapien
gagtactgaccctgcacttagtcct

SEQ ID NO: 3552416 - DNA, 25 bp, Homo sapien
cccatgcaaggtggcaaatgtggac

SEQ ID NO: 3552417 - DNA, 25 bp, Homo sapien
tgccagctgtaccacatatttattt

SEQ ID NO: 3552418 - DNA, 25 bp, Homo sapien
cagtcacagaaatacaggcctgttt

SEQ ID NO: 3552419 - DNA, 25 bp, Homo sapien
tacggctgctcgagagggatctacc

SEQ ID NO: 3552420 - DNA, 25 bp, Homo sapien
agataaattaggtcccctaggcgca

SEQ ID NO: 3552421 - DNA, 25 bp, Homo sapien
catttagggccaaatgccggaggca

SEQ ID NO: 3552422 - DNA, 25 bp, Homo sapien
cctaggcgcaaggtcaggtgacact

SEQ ID NO: 3552423 - DNA, 25 bp, Homo sapien
tccattttccagaagggcgcaggga

SEQ ID NO: 3552424 - DNA, 25 bp, Homo sapien
gagaagtcctcggaaacctcgagca

SEQ ID NO: 3552425 - DNA, 25 bp, Homo sapien
tctcagggtacagccgagaagaacc

SEQ ID NO: 3552426 - DNA, 25 bp, Homo sapien
taaccgcaggattgatcacacaggc

SEQ ID NO: 3552427 - DNA, 25 bp, Homo sapien
catggacaggtaaacgtaggaggcg

SEQ ID NO: 3552428 - DNA, 25 bp, Homo sapien
gtaaacgtaggaggcgtagagctcc

SEQ ID NO: 3552429 - DNA, 25 bp, Homo sapien
ggttgatggcggcctctgagtcctg

SEQ ID NO: 3552430 - DNA, 25 bp, Homo sapien
gtagagctccaggttgatctggcgg

SEQ ID NO: 3552431 - DNA, 25 bp, Homo sapien
gcggcgactaaggagaggcggcggc

SEQ ID NO: 3552432 - DNA, 25 bp, Homo sapien
cggcgactaaggagaggcggcggcg

SEQ ID NO: 3552433 - DNA, 25 bp, Homo sapien
ggcgactaaggagaggcggcggcgg

SEQ ID NO: 3552434 - DNA, 25 bp, Homo sapien
ggcggcgactaaggagaggcggcgg

SEQ ID NO: 3552435 - DNA, 25 bp, Homo sapien
ttggggcagtccgagggtgcggtga

SEQ ID NO: 3552436 - DNA, 25 bp, Homo sapien
ccttggggcagtccgagggtgcggt

SEQ ID NO: 3552437 - DNA, 25 bp, Homo sapien
ggggcagtccgagggtgcggtgaag

SEQ ID NO: 3552438 - DNA, 25 bp, Homo sapien
cagtccgagggtgcggtgaagaggt

SEQ ID NO: 3552439 - DNA, 25 bp, Homo sapien
actctcggcgaagaacgtctggccc

SEQ ID NO: 3552440 - DNA, 25 bp, Homo sapien
tctcggcgaagaacgtctggccctg

SEQ ID NO: 3552441 - DNA, 25 bp, Homo sapien
acgactctcggcgaagaacgtctgg

SEQ ID NO: 3552442 - DNA, 25 bp, Homo sapien
cgaagaacgtctggccctgcgggtc

SEQ ID NO: 3552443 - DNA, 25 bp, Homo sapien
gagaatcgctggtgtcgcttcgcac

SEQ ID NO: 3552444 - DNA, 25 bp, Homo sapien
cgacgtggatctaaaggcgaagccc

SEQ ID NO: 3552445 - DNA, 25 bp, Homo sapien
gaaatcatagctgcggagaagccct

SEQ ID NO: 3552446 - DNA, 25 bp, Homo sapien
tgcggtttctgcaacaaaggctggg

SEQ ID NO: 3552447 - DNA, 25 bp, Homo sapien
agtattcttctagaggtcgggtcag

SEQ ID NO: 3552448 - DNA, 25 bp, Homo sapien
tattcttctagaggtcgggtcaggt

SEQ ID NO: 3552449 - DNA, 25 bp, Homo sapien
tgagtgaattcctggtaaagagact

SEQ ID NO: 3552450 - DNA, 25 bp, Homo sapien
ttcttctagaggtcgggtcaggtag

SEQ ID NO: 3552451 - DNA, 25 bp, Homo sapien
cttgggcacagggttaaggtgcact

SEQ ID NO: 3552452 - DNA, 25 bp, Homo sapien
cacagggttaaggtgcactagcaca

SEQ ID NO: 3552453 - DNA, 25 bp, Homo sapien
gggttaaggtgcactagcacagagc

SEQ ID NO: 3552454 - DNA, 25 bp, Homo sapien
tgggcaccgggcatcacgggggaga

SEQ ID NO: 3552455 - DNA, 25 bp, Homo sapien
tactggccagcgcaggtcggcttct

SEQ ID NO: 3552456 - DNA, 25 bp, Homo sapien
tagtcgagtggcaacaaatgacttg

SEQ ID NO: 3552457 - DNA, 25 bp, Homo sapien
aatgaggtggccattgtagtcgagt

SEQ ID NO: 3552458 - DNA, 25 bp, Homo sapien
tggtgtactggccagcgcaggtcgg

SEQ ID NO: 3552459 - DNA, 25 bp, Homo sapien
ttgaggggcagggagaagagataga

SEQ ID NO: 3552460 - DNA, 25 bp, Homo sapien
tccttgaggggcagggagaagagat

SEQ ID NO: 3552461 - DNA, 25 bp, Homo sapien
tgaggggcagggagaagagatagac

SEQ ID NO: 3552462 - DNA, 25 bp, Homo sapien
ccttgaggggcagggagaagagata

SEQ ID NO: 3552463 - DNA, 25 bp, Homo sapien
cctcagccttgcctctgagagctcc

SEQ ID NO: 3552464 - DNA, 25 bp, Homo sapien
tcagccttgcctctgagagctccat

SEQ ID NO: 3552465 - DNA, 25 bp, Homo sapien
gccttgcctctgagagctccatagc

SEQ ID NO: 3552466 - DNA, 25 bp, Homo sapien
cagccttgcctctgagagctccata

SEQ ID NO: 3552467 - DNA, 25 bp, Homo sapien
tagccatgggtggtgactcagatca

SEQ ID NO: 3552468 - DNA, 25 bp, Homo sapien
tgcatgaggagtcacaagatgcctc

SEQ ID NO: 3552469 - DNA, 25 bp, Homo sapien
agaaacgtgagtaaatcctggcagg

SEQ ID NO: 3552470 - DNA, 25 bp, Homo sapien
tctgagccctcatccgtgaatagga

SEQ ID NO: 3552471 - DNA, 25 bp, Homo sapien
gaggcctgacagtacccaaggtggt

SEQ ID NO: 3552472 - DNA, 25 bp, Homo sapien
ggcctgacagtacccaaggtggtcg

SEQ ID NO: 3552473 - DNA, 25 bp, Homo sapien
cctgacagtacccaaggtggtcggg

SEQ ID NO: 3552474 - DNA, 25 bp, Homo sapien
tataggattcgggtaggtaggtgga

SEQ ID NO: 3552475 - DNA, 25 bp, Homo sapien
tacctgtaaaactggctcacgccta

SEQ ID NO: 3552476 - DNA, 25 bp, Homo sapien
caaagggcttcttggtaattgaatc

SEQ ID NO: 3552477 - DNA, 25 bp, Homo sapien
gagttatttacacccaaagcagatg

SEQ ID NO: 3552478 - DNA, 25 bp, Homo sapien
acgcctataaaactggctcacacct

SEQ ID NO: 3552479 - DNA, 25 bp, Homo sapien
taggtgctagatttaccagtagata

SEQ ID NO: 3552480 - DNA, 25 bp, Homo sapien
gtagcctgccacgatccctgttgga

SEQ ID NO: 3552481 - DNA, 25 bp, Homo sapien
gttgtcagccggcagtttgattcac

SEQ ID NO: 3552482 - DNA, 25 bp, Homo sapien
ccggtgccacggaatgatgaccctc

SEQ ID NO: 3552483 - DNA, 25 bp, Homo sapien
cctgatgaacaccaccagacttgga

SEQ ID NO: 3552484 - DNA, 25 bp, Homo sapien
tttcacaggcagcaaagacccctag

SEQ ID NO: 3552485 - DNA, 25 bp, Homo sapien
tgatgccaagacaccaaacgacaac

SEQ ID NO: 3552486 - DNA, 25 bp, Homo sapien
gacttggatacccacctaccgatgg

SEQ ID NO: 3552487 - DNA, 25 bp, Homo sapien
taccgagggagaacctacagctttg

SEQ ID NO: 3552488 - DNA, 25 bp, Homo sapien
tcctaggaggcctgactgcagagct

SEQ ID NO: 3552489 - DNA, 25 bp, Homo sapien
tcagttacggataggaaaggtcgac

SEQ ID NO: 3552490 - DNA, 25 bp, Homo sapien
gaccttaatgaggaccgaggccctg

SEQ ID NO: 3552491 - DNA, 25 bp, Homo sapien
ttgaactaaactgggagcttctcag

SEQ ID NO: 3552492 - DNA, 25 bp, Homo sapien
cagtgcagctttcaacaaagggtca

SEQ ID NO: 3552493 - DNA, 25 bp, Homo sapien
cccatagtgttgacagggtaactca

SEQ ID NO: 3552494 - DNA, 25 bp, Homo sapien
tagccccgagcgtgtctacaaaatt

SEQ ID NO: 3552495 - DNA, 25 bp, Homo sapien
gtttcaaggatggtgctttctagct

SEQ ID NO: 3552496 - DNA, 25 bp, Homo sapien
aaaagacataaacacgttctctcag

SEQ ID NO: 3552497 - DNA, 25 bp, Homo sapien
aagacataaacacgttctctcaggc

SEQ ID NO: 3552498 - DNA, 25 bp, Homo sapien
tcaaggatggtgctttctagctgtg

SEQ ID NO: 3552499 - DNA, 25 bp, Homo sapien
tcactcacgtgcaggagggattggc

SEQ ID NO: 3552500 - DNA, 25 bp, Homo sapien
gagtcttcgttctgctataagcccc

SEQ ID NO: 3552501 - DNA, 25 bp, Homo sapien
ccaggttcactcaggcaggttttgt

SEQ ID NO: 3552502 - DNA, 25 bp, Homo sapien
tagtgtgacgtgaagcaggtagctc

SEQ ID NO: 3552503 - DNA, 25 bp, Homo sapien
caataggagggctgactggtacttc

SEQ ID NO: 3552504 - DNA, 25 bp, Homo sapien
gtgagtcccgaaggcccggagccaa

SEQ ID NO: 3552505 - DNA, 25 bp, Homo sapien
ctggttgctcctcccgtgcggtgag

SEQ ID NO: 3552506 - DNA, 25 bp, Homo sapien
cgcagattgctagtggatatggcca

SEQ ID NO: 3552507 - DNA, 25 bp, Homo sapien
cagtgtagagaagctggctacagtg

SEQ ID NO: 3552508 - DNA, 25 bp, Homo sapien
gacgcctccgcagcaaggacagtgt

SEQ ID NO: 3552509 - DNA, 25 bp, Homo sapien
cgtcctgcggcgtgtgacccgtgct

SEQ ID NO: 3552510 - DNA, 25 bp, Homo sapien
cgcagcaaggacagtgtagagaagc

SEQ ID NO: 3552511 - DNA, 25 bp, Homo sapien
gaatggcatgtacttgagtttagat

SEQ ID NO: 3552512 - DNA, 25 bp, Homo sapien
gaagagtagaatggcatgtacttga

SEQ ID NO: 3552513 - DNA, 25 bp, Homo sapien
cctcagcacacagaagagtagaatg

SEQ ID NO: 3552514 - DNA, 25 bp, Homo sapien
ccacctcagcacacagaagagtaga

SEQ ID NO: 3552515 - DNA, 25 bp, Homo sapien
ggataacccttgaggaacacgtcag

SEQ ID NO: 3552516 - DNA, 25 bp, Homo sapien
gataccatgaagactgggcgcctca

SEQ ID NO: 3552517 - DNA, 25 bp, Homo sapien
cctgcaggacgaaggtactgttcca

SEQ ID NO: 3552518 - DNA, 25 bp, Homo sapien
tcacctgcggtgtgcctcaggatca

SEQ ID NO: 3552519 - DNA, 25 bp, Homo sapien
ggatggatgtctagttgttccagca

SEQ ID NO: 3552520 - DNA, 25 bp, Homo sapien
gaaactattgtctagtcctaggtcc

SEQ ID NO: 3552521 - DNA, 25 bp, Homo sapien
tgtgtttaggagcatatggatggat

SEQ ID NO: 3552522 - DNA, 25 bp, Homo sapien
catgcctagcccagcttgtcttttt

SEQ ID NO: 3552523 - DNA, 25 bp, Homo sapien
tccaggagcatgaacagagaggaca

SEQ ID NO: 3552524 - DNA, 25 bp, Homo sapien
atgtcaggtcggagctgcccacgga

SEQ ID NO: 3552525 - DNA, 25 bp, Homo sapien
gttgtcatacagaagcaggacatgc

SEQ ID NO: 3552526 - DNA, 25 bp, Homo sapien
gttctccaggagcatgaacagagag

SEQ ID NO: 3552527 - DNA, 25 bp, Homo sapien
ttgatccctgccacgcacgactgaa

SEQ ID NO: 3552528 - DNA, 25 bp, Homo sapien
tccacagcaacttccttgatccctg

SEQ ID NO: 3552529 - DNA, 25 bp, Homo sapien
ccgcctcgccatgaagctgctgatg

SEQ ID NO: 3552530 - DNA, 25 bp, Homo sapien
gactgaacacagacagcagccgcct

SEQ ID NO: 3552531 - DNA, 25 bp, Homo sapien
tcactggtagggaagagatcctaca

SEQ ID NO: 3552532 - DNA, 25 bp, Homo sapien
aaaaaagtattacatggatcactgg

SEQ ID NO: 3552533 - DNA, 25 bp, Homo sapien
gaagtgtctcctagataacagaata

SEQ ID NO: 3552534 - DNA, 25 bp, Homo sapien
atatgcagcatatttattggataag

SEQ ID NO: 3552535 - DNA, 25 bp, Homo sapien
tgctggttatgccaggctcctctgg

SEQ ID NO: 3552536 - DNA, 25 bp, Homo sapien
tttgggcctccccaacgtgtgcagg

SEQ ID NO: 3552537 - DNA, 25 bp, Homo sapien
cacactcttggagtcatgctcagaa

SEQ ID NO: 3552538 - DNA, 25 bp, Homo sapien
tcagaagccctgattttaccccagt

SEQ ID NO: 3552539 - DNA, 25 bp, Homo sapien
tccagtctctgccagtgggtccatc

SEQ ID NO: 3552540 - DNA, 25 bp, Homo sapien
tagcgacaccttaaattgtgcaact

SEQ ID NO: 3552541 - DNA, 25 bp, Homo sapien
tgactgagtttgctagcatagcgac

SEQ ID NO: 3552542 - DNA, 25 bp, Homo sapien
agtctctgccagtgggtccatcctc

SEQ ID NO: 3552543 - DNA, 25 bp, Homo sapien
cgaaaatgtcaaggacagtttcctt

SEQ ID NO: 3552544 - DNA, 25 bp, Homo sapien
cacgaaaatgtcaaggacagtttcc

SEQ ID NO: 3552545 - DNA, 25 bp, Homo sapien
acacgaaaatgtcaaggacagtttc

SEQ ID NO: 3552546 - DNA, 25 bp, Homo sapien
acgaaaatgtcaaggacagtttcct

SEQ ID NO: 3552547 - DNA, 25 bp, Homo sapien
tgtggtgggactggggtccatcctc

SEQ ID NO: 3552548 - DNA, 25 bp, Homo sapien
gtgggactggggtccatcctccgct

SEQ ID NO: 3552549 - DNA, 25 bp, Homo sapien
ccatcctccgctgtcccgcagtgag

SEQ ID NO: 3552550 - DNA, 25 bp, Homo sapien
gtccatcctccgctgtcccgcagtg

SEQ ID NO: 3552551 - DNA, 25 bp, Homo sapien
aagaggagctaaccctcctaagtat

SEQ ID NO: 3552552 - DNA, 25 bp, Homo sapien
tacacaacaacagccgcataggctc

SEQ ID NO: 3552553 - DNA, 25 bp, Homo sapien
gatcaagtctaatagagttggctaa

SEQ ID NO: 3552554 - DNA, 25 bp, Homo sapien
gctaaccctcctaagtatatatgca

SEQ ID NO: 3552555 - DNA, 25 bp, Homo sapien
tacaatttttagtgaagatcagggt

SEQ ID NO: 3552556 - DNA, 25 bp, Homo sapien
cagggtgtcgttgaaagactttgga

SEQ ID NO: 3552557 - DNA, 25 bp, Homo sapien
gatttattaaagcaacgtgttgaaa

SEQ ID NO: 3552558 - DNA, 25 bp, Homo sapien
cctttacaatttttagtgaagatca

SEQ ID NO: 3552559 - DNA, 25 bp, Homo sapien
ctggaggtggattaagtttggcaac

SEQ ID NO: 3552560 - DNA, 25 bp, Homo sapien
tggcaacttggaggtttaccgcagc

SEQ ID NO: 3552561 - DNA, 25 bp, Homo sapien
taccgcagcgtcacttaagaataag

SEQ ID NO: 3552562 - DNA, 25 bp, Homo sapien
gatcggtgcagtgcttcacttccaa

SEQ ID NO: 3552563 - DNA, 25 bp, Homo sapien
agcgagaccatcaggagacacactg

SEQ ID NO: 3552564 - DNA, 25 bp, Homo sapien
cagcgagaccatcaggagacacact

SEQ ID NO: 3552565 - DNA, 25 bp, Homo sapien
gtggcttattcggctgtgagctcag

SEQ ID NO: 3552566 - DNA, 25 bp, Homo sapien
tggcttattcggctgtgagctcagc

SEQ ID NO: 3552567 - DNA, 25 bp, Homo sapien
gtgagctcagctttcacaatgagtg

SEQ ID NO: 3552568 - DNA, 25 bp, Homo sapien
agctcagctttcacaatgagtgatt

SEQ ID NO: 3552569 - DNA, 25 bp, Homo sapien
cctgaaatacagcataccgatgggt

SEQ ID NO: 3552570 - DNA, 25 bp, Homo sapien
tcctgaaatacagcataccgatggg

SEQ ID NO: 3552571 - DNA, 25 bp, Homo sapien
atggctgcttccggtcgttcctttc

SEQ ID NO: 3552572 - DNA, 25 bp, Homo sapien
caaaaggagtgacgggcagaattgc

SEQ ID NO: 3552573 - DNA, 25 bp, Homo sapien
caaaaagggtatataggatgactcc

SEQ ID NO: 3552574 - DNA, 25 bp, Homo sapien
cagccctgggtaaacttgacaaaag

SEQ ID NO: 3552575 - DNA, 25 bp, Homo sapien
tgactcctccgggatacttggacat

SEQ ID NO: 3552576 - DNA, 25 bp, Homo sapien
ggtaaatgtgcctttcagctagtaa

SEQ ID NO: 3552577 - DNA, 25 bp, Homo sapien
tcgccctggaagacgatcccgagtt

SEQ ID NO: 3552578 - DNA, 25 bp, Homo sapien
tcccgagttcaacgcaggtaaatgt

SEQ ID NO: 3552579 - DNA, 25 bp, Homo sapien
agtgcaccagggcatggtcagagcc

SEQ ID NO: 3552580 - DNA, 25 bp, Homo sapien
caaaaagctcctgtagttgctaact

SEQ ID NO: 3552581 - DNA, 25 bp, Homo sapien
tgttgactgttagaattatgaatgg

SEQ ID NO: 3552582 - DNA, 25 bp, Homo sapien
gcagcttctgtaagtgcacagcaca

SEQ ID NO: 3552583 - DNA, 25 bp, Homo sapien
aactctccgtgttagcaactacatg

SEQ ID NO: 3552584 - DNA, 25 bp, Homo sapien
tacctagcttgaagaaaattcatag

SEQ ID NO: 3552585 - DNA, 25 bp, Homo sapien
aatatttacctagcttgaagaaaat

SEQ ID NO: 3552586 - DNA, 25 bp, Homo sapien
tcaaaactgcatgtgagatatacaa

SEQ ID NO: 3552587 - DNA, 25 bp, Homo sapien
actgcatgtgagatatacaacaaaa

SEQ ID NO: 3552588 - DNA, 25 bp, Homo sapien
catcattgtggcagccgatgagagc

SEQ ID NO: 3552589 - DNA, 25 bp, Homo sapien
gcagcatcattgtggcagccgatga

SEQ ID NO: 3552590 - DNA, 25 bp, Homo sapien
agccgatgagagcaccatcagctgg

SEQ ID NO: 3552591 - DNA, 25 bp, Homo sapien
gtggcagccgatgagagcaccatca

SEQ ID NO: 3552592 - DNA, 25 bp, Homo sapien
tatgtgtaattttccacggatttaa

SEQ ID NO: 3552593 - DNA, 25 bp, Homo sapien
tgtatgtgtaattttccacggattt

SEQ ID NO: 3552594 - DNA, 25 bp, Homo sapien
gttgtatgtgtaattttccacggat

SEQ ID NO: 3552595 - DNA, 25 bp, Homo sapien
tgtgtaattttccacggatttaaga

SEQ ID NO: 3552596 - DNA, 25 bp, Homo sapien
cccaggtgaccctcagaacgttgca

SEQ ID NO: 3552597 - DNA, 25 bp, Homo sapien
agcccttctctgacttacctggaca

SEQ ID NO: 3552598 - DNA, 25 bp, Homo sapien
agcagcatgatcctgacatgacaga

SEQ ID NO: 3552599 - DNA, 25 bp, Homo sapien
tgacagatgtgggagacccacagcc

SEQ ID NO: 3552600 - DNA, 25 bp, Homo sapien
gaccacgtacagttcttgcttttgc

SEQ ID NO: 3552601 - DNA, 25 bp, Homo sapien
ccaccagcctgggagttctgtaaat

SEQ ID NO: 3552602 - DNA, 25 bp, Homo sapien
gacctgagttgtaccaaaagccacc

SEQ ID NO: 3552603 - DNA, 25 bp, Homo sapien
gcttttgccccacagcttgtccatg

SEQ ID NO: 3552604 - DNA, 25 bp, Homo sapien
cctcggcgtcgcatcttctgcttgt

SEQ ID NO: 3552605 - DNA, 25 bp, Homo sapien
ttgtcaggctgcccctcgttgagtg

SEQ ID NO: 3552606 - DNA, 25 bp, Homo sapien
gcccctcgttgagtgagggaagcac

SEQ ID NO: 3552607 - DNA, 25 bp, Homo sapien
actgcttgctgggtagttagggccc

SEQ ID NO: 3552608 - DNA, 25 bp, Homo sapien
agagtgagccgttccttttctgagc

SEQ ID NO: 3552609 - DNA, 25 bp, Homo sapien
tccatggacccaaagttgctttaac

SEQ ID NO: 3552610 - DNA, 25 bp, Homo sapien
gcacctctgttccatggacccaaag

SEQ ID NO: 3552611 - DNA, 25 bp, Homo sapien
gtgagccgttccttttctgagccct

SEQ ID NO: 3552612 - DNA, 25 bp, Homo sapien
aaaaggctgctatctctcgctgatg

SEQ ID NO: 3552613 - DNA, 25 bp, Homo sapien
tctaaggaagactcgggcaatccac

SEQ ID NO: 3552614 - DNA, 25 bp, Homo sapien
tctaaccactgatgagaggcaagtt

SEQ ID NO: 3552615 - DNA, 25 bp, Homo sapien
tctagtccatcgatgaaaaggctgc

SEQ ID NO: 3552616 - DNA, 25 bp, Homo sapien
gaaggtattcctttaactgcaggtg

SEQ ID NO: 3552617 - DNA, 25 bp, Homo sapien
taaacgagcgaaggataatcacctg

SEQ ID NO: 3552618 - DNA, 25 bp, Homo sapien
taaacatgcatgctccgaaaagccg

SEQ ID NO: 3552619 - DNA, 25 bp, Homo sapien
taaagaaatgcaccaagcagggctt

SEQ ID NO: 3552620 - DNA, 25 bp, Homo sapien
tgctcatcttgaagacagctaaccc

SEQ ID NO: 3552621 - DNA, 25 bp, Homo sapien
gcgcccggctgggtcttgctcatct

SEQ ID NO: 3552622 - DNA, 25 bp, Homo sapien
cttgctcatcttgaagacagctaac

SEQ ID NO: 3552623 - DNA, 25 bp, Homo sapien
ccgcgcccggctgggtcttgctcat

SEQ ID NO: 3552624 - DNA, 25 bp, Homo sapien
gcaacaccaggcgggatcagggtca

SEQ ID NO: 3552625 - DNA, 25 bp, Homo sapien
aacaccaggcgggatcagggtcacc

SEQ ID NO: 3552626 - DNA, 25 bp, Homo sapien
accaggcgggatcagggtcacccag

SEQ ID NO: 3552627 - DNA, 25 bp, Homo sapien
acaccaggcgggatcagggtcaccc

SEQ ID NO: 3552628 - DNA, 25 bp, Homo sapien
cagacctccaagcctctgctcccac

SEQ ID NO: 3552629 - DNA, 25 bp, Homo sapien
tcagacctccaagcctctgctccca

SEQ ID NO: 3552630 - DNA, 25 bp, Homo sapien
taggcccattggactttcagactgg

SEQ ID NO: 3552631 - DNA, 25 bp, Homo sapien
gcagtcaacagccaatagccctagg

SEQ ID NO: 3552632 - DNA, 25 bp, Homo sapien
cctttgcgttctgggcatctagcac

SEQ ID NO: 3552633 - DNA, 25 bp, Homo sapien
tgggacgcctctctcgcctttgcgt

SEQ ID NO: 3552634 - DNA, 25 bp, Homo sapien
gaaccaggctcaggtcacgctataa

SEQ ID NO: 3552635 - DNA, 25 bp, Homo sapien
aggctcaggtcacgctataatccca

SEQ ID NO: 3552636 - DNA, 25 bp, Homo sapien
tgataggaaccaggctcaggtcacg

SEQ ID NO: 3552637 - DNA, 25 bp, Homo sapien
taggaaccaggctcaggtcacgcta

SEQ ID NO: 3552638 - DNA, 25 bp, Homo sapien
cattttatctgtaatcgtagcatcg

SEQ ID NO: 3552639 - DNA, 25 bp, Homo sapien
cattcgtaatgtgcagaataagcag

SEQ ID NO: 3552640 - DNA, 25 bp, Homo sapien
taagcaatagcttattcatgaatgt

SEQ ID NO: 3552641 - DNA, 25 bp, Homo sapien
tgcaatttcatgtgtagcaaagagg

SEQ ID NO: 3552642 - DNA, 25 bp, Homo sapien
tggagactgaaactgccccggcttg

SEQ ID NO: 3552643 - DNA, 25 bp, Homo sapien
tgaaactgccccggcttggctgctg

SEQ ID NO: 3552644 - DNA, 25 bp, Homo sapien
ggtggagactgaaactgccccggct

SEQ ID NO: 3552645 - DNA, 25 bp, Homo sapien
gagactgaaactgccccggcttggc

SEQ ID NO: 3552646 - DNA, 25 bp, Homo sapien
gagcttagcagtgtcccaggcattc

SEQ ID NO: 3552647 - DNA, 25 bp, Homo sapien
tacatcaactctggagacaagtact

SEQ ID NO: 3552648 - DNA, 25 bp, Homo sapien
ggcaaacacattggcgcttaccaca

SEQ ID NO: 3552649 - DNA, 25 bp, Homo sapien
ggtgaactatcttccctgttccgag

SEQ ID NO: 3552650 - DNA, 25 bp, Homo sapien
gtctcctcccatgccgtcgctgctg

SEQ ID NO: 3552651 - DNA, 25 bp, Homo sapien
acataagcccgtgtctcctcccatg

SEQ ID NO: 3552652 - DNA, 25 bp, Homo sapien
catcactgcgggaagcagcgttcat

SEQ ID NO: 3552653 - DNA, 25 bp, Homo sapien
cgtcgctgctgtggtaaccatcact

SEQ ID NO: 3552654 - DNA, 25 bp, Homo sapien
tcaccgtcagcaccaaactggctgg

SEQ ID NO: 3552655 - DNA, 25 bp, Homo sapien
gaactaatatcaggaacatggcggc

SEQ ID NO: 3552656 - DNA, 25 bp, Homo sapien
gattctaatttcctctcaccgtcag

SEQ ID NO: 3552657 - DNA, 25 bp, Homo sapien
cagaaaatggaagcccctcatgttg

SEQ ID NO: 3552658 - DNA, 25 bp, Homo sapien
ggagctctcagcagtcaatgcaaaa

SEQ ID NO: 3552659 - DNA, 25 bp, Homo sapien
catgggctggacgaacttggaactc

SEQ ID NO: 3552660 - DNA, 25 bp, Homo sapien
tgctgaggcagtcggtgtgtttccc

SEQ ID NO: 3552661 - DNA, 25 bp, Homo sapien
agttccaggagcctacaggcggtcg

SEQ ID NO: 3552662 - DNA, 25 bp, Homo sapien
tccaccaaaggtaccgaatttcagc

SEQ ID NO: 3552663 - DNA, 25 bp, Homo sapien
cccactgtcattgctagaagaggag

SEQ ID NO: 3552664 - DNA, 25 bp, Homo sapien
tcgggacttcttagaggccagggac

SEQ ID NO: 3552665 - DNA, 25 bp, Homo sapien
gtaacttgcctgtctcatcatcgct

SEQ ID NO: 3552666 - DNA, 25 bp, Homo sapien
gggagtttcacattcacgcctggca

SEQ ID NO: 3552667 - DNA, 25 bp, Homo sapien
gaccttcgacgtgaatcgctggcaa

SEQ ID NO: 3552668 - DNA, 25 bp, Homo sapien
tcagggccttcgaaatccagacgtg

SEQ ID NO: 3552669 - DNA, 25 bp, Homo sapien
ttagagaaacatcgggcccttcgag

SEQ ID NO: 3552670 - DNA, 25 bp, Homo sapien
ttggggcccttcagttttgcgtctg

SEQ ID NO: 3552671 - DNA, 25 bp, Homo sapien
catcttgaacttggggcccttcagt

SEQ ID NO: 3552672 - DNA, 25 bp, Homo sapien
gatatttatttcaggcatcttgaac

SEQ ID NO: 3552673 - DNA, 25 bp, Homo sapien
gggcccttcagttttgcgtctggac

SEQ ID NO: 3552674 - DNA, 25 bp, Homo sapien
cccgagacatcgatgtcggccttgg

SEQ ID NO: 3552675 - DNA, 25 bp, Homo sapien
ggtcccgagacatcgatgtcggcct

SEQ ID NO: 3552676 - DNA, 25 bp, Homo sapien
cgagacatcgatgtcggccttgggc

SEQ ID NO: 3552677 - DNA, 25 bp, Homo sapien
cttgggtcccgagacatcgatgtcg

SEQ ID NO: 3552678 - DNA, 25 bp, Homo sapien
ttgggcattttcaccttgggcatct

SEQ ID NO: 3552679 - DNA, 25 bp, Homo sapien
aagccaggcatgctgaatttgggca

SEQ ID NO: 3552680 - DNA, 25 bp, Homo sapien
gcatcttcaggtgccagtctgggcc

SEQ ID NO: 3552681 - DNA, 25 bp, Homo sapien
cagtctgggccatgaacatccacat

SEQ ID NO: 3552682 - DNA, 25 bp, Homo sapien
gggccctttagtttcgcatctggac

SEQ ID NO: 3552683 - DNA, 25 bp, Homo sapien
gggtcctgagacatcaatgtcagcc

SEQ ID NO: 3552684 - DNA, 25 bp, Homo sapien
tcagccttgggcaggttcacatcca

SEQ ID NO: 3552685 - DNA, 25 bp, Homo sapien
ggaccttcgatattcacatcaggaa

SEQ ID NO: 3552686 - DNA, 25 bp, Homo sapien
tgggcattttcactttgggcatttt

SEQ ID NO: 3552687 - DNA, 25 bp, Homo sapien
ggcattttcactttgggcattttta

SEQ ID NO: 3552688 - DNA, 25 bp, Homo sapien
caatatcaggagtgtcaatgcccac

SEQ ID NO: 3552689 - DNA, 25 bp, Homo sapien
tgtccatgtcgcccttcacctttgg

SEQ ID NO: 3552690 - DNA, 25 bp, Homo sapien
tcaatatcaggagtgtcaatgccca

SEQ ID NO: 3552691 - DNA, 25 bp, Homo sapien
atgtccatgtcgcccttcacctttg

SEQ ID NO: 3552692 - DNA, 25 bp, Homo sapien
gtttaggaacggaaatgtccatatc

SEQ ID NO: 3552693 - DNA, 25 bp, Homo sapien
gaacggaaatgtccatatctccttt

SEQ ID NO: 3552694 - DNA, 25 bp, Homo sapien
tccagtttaggaacggaaatgtcca

SEQ ID NO: 3552695 - DNA, 25 bp, Homo sapien
gatctccctccagtttaggaacgga

SEQ ID NO: 3552696 - DNA, 25 bp, Homo sapien
ttcccttcaggaccttcaatgtcta

SEQ ID NO: 3552697 - DNA, 25 bp, Homo sapien
caatattgacatcaggtgtgtcaat

SEQ ID NO: 3552698 - DNA, 25 bp, Homo sapien
tttccttccggaccttcaatattga

SEQ ID NO: 3552699 - DNA, 25 bp, Homo sapien
caggtgtgtcaatgtccaaactggg

SEQ ID NO: 3552700 - DNA, 25 bp, Homo sapien
cttttatgtcaatttcagggccctt

SEQ ID NO: 3552701 - DNA, 25 bp, Homo sapien
gcatcttgaactttggacccttgag

SEQ ID NO: 3552702 - DNA, 25 bp, Homo sapien
gaaatctcaatgtcagccttaggaa

SEQ ID NO: 3552703 - DNA, 25 bp, Homo sapien
tggaccttcgatactgacatcaggg

SEQ ID NO: 3552704 - DNA, 25 bp, Homo sapien
gacccttgagttttgcatctggacc

SEQ ID NO: 3552705 - DNA, 25 bp, Homo sapien
tgaagccaggcatgctgaacttggg

SEQ ID NO: 3552706 - DNA, 25 bp, Homo sapien
tcagccttgggcaggttcacatcca

SEQ ID NO: 3552707 - DNA, 25 bp, Homo sapien
tgggtcctgagacgtcaaggtcagc

SEQ ID NO: 3552708 - DNA, 25 bp, Homo sapien
cagtctgggccttgaacgtccacat

SEQ ID NO: 3552709 - DNA, 25 bp, Homo sapien
ctttgggcaaattaacatccacttc

SEQ ID NO: 3552710 - DNA, 25 bp, Homo sapien
gggcctttagatcaccttccatctt

SEQ ID NO: 3552711 - DNA, 25 bp, Homo sapien
cttaggcagagaaacatccacatct

SEQ ID NO: 3552712 - DNA, 25 bp, Homo sapien
tcagctttgggcaaattaacatcca

SEQ ID NO: 3552713 - DNA, 25 bp, Homo sapien
taatatccaagtcaggaacttgcat

SEQ ID NO: 3552714 - DNA, 25 bp, Homo sapien
ctttaatatccaagtcaggaacttg

SEQ ID NO: 3552715 - DNA, 25 bp, Homo sapien
tccaagtcaggaacttgcatgtcac

SEQ ID NO: 3552716 - DNA, 25 bp, Homo sapien
tatccaagtcaggaacttgcatgtc

SEQ ID NO: 3552717 - DNA, 25 bp, Homo sapien
tgaagccaggcatgctgaacttggg

SEQ ID NO: 3552718 - DNA, 25 bp, Homo sapien
aacttgggcattttcaccttgggca

SEQ ID NO: 3552719 - DNA, 25 bp, Homo sapien
gcatcttcaggtgccagtctgggcc

SEQ ID NO: 3552720 - DNA, 25 bp, Homo sapien
tcagccttgggcaggttcacatcca

SEQ ID NO: 3552721 - DNA, 25 bp, Homo sapien
ctggagcattaatgtccactttggg

SEQ ID NO: 3552722 - DNA, 25 bp, Homo sapien
gatgtcaacttcaggacccttgagg

SEQ ID NO: 3552723 - DNA, 25 bp, Homo sapien
tcaacttcaggacccttgaggtcac

SEQ ID NO: 3552724 - DNA, 25 bp, Homo sapien
ggggcccttgatgtcaacttcagga

SEQ ID NO: 3552725 - DNA, 25 bp, Homo sapien
ggcagagaaacatccacatcgccct

SEQ ID NO: 3552726 - DNA, 25 bp, Homo sapien
gcagagaaacatccacatcgccctt

SEQ ID NO: 3552727 - DNA, 25 bp, Homo sapien
ggtgcatctctggtatcttaaattt

SEQ ID NO: 3552728 - DNA, 25 bp, Homo sapien
ttcaggtgcatctctggtatcttaa

SEQ ID NO: 3552729 - DNA, 25 bp, Homo sapien
tgtcaggcatcgatattttgggagc

SEQ ID NO: 3552730 - DNA, 25 bp, Homo sapien
caggcatcgatattttgggagcctt

SEQ ID NO: 3552731 - DNA, 25 bp, Homo sapien
cttcgatgttaatgtcaggagtgtc

SEQ ID NO: 3552732 - DNA, 25 bp, Homo sapien
gatgttaatgtcaggagtgtcaatg

SEQ ID NO: 3552733 - DNA, 25 bp, Homo sapien
tcgatgttaatgtcaggagtgtcaa

SEQ ID NO: 3552734 - DNA, 25 bp, Homo sapien
ttcgatgttaatgtcaggagtgtca

SEQ ID NO: 3552735 - DNA, 25 bp, Homo sapien
cagctttagggagggtaacatcgac

SEQ ID NO: 3552736 - DNA, 25 bp, Homo sapien
gaacatcaacgtctacattgggacc

SEQ ID NO: 3552737 - DNA, 25 bp, Homo sapien
ggcattgatgtccactttagggcct

SEQ ID NO: 3552738 - DNA, 25 bp, Homo sapien
tagggcctttgatatcaacctctgg

SEQ ID NO: 3552739 - DNA, 25 bp, Homo sapien
ttgggaagagaaatatccacatcac

SEQ ID NO: 3552740 - DNA, 25 bp, Homo sapien
gatccccttcaagtttgggaagaga

SEQ ID NO: 3552741 - DNA, 25 bp, Homo sapien
ctttcagatccccttcaagtttggg

SEQ ID NO: 3552742 - DNA, 25 bp, Homo sapien
cagatccccttcaagtttgggaaga

SEQ ID NO: 3552743 - DNA, 25 bp, Homo sapien
ggagcatctacatctatctttgggc

SEQ ID NO: 3552744 - DNA, 25 bp, Homo sapien
caggtgtctgaactttagagcccga

SEQ ID NO: 3552745 - DNA, 25 bp, Homo sapien
ccttggacctcgacatcaggagcat

SEQ ID NO: 3552746 - DNA, 25 bp, Homo sapien
tttcaaatttagctccacgtcaggc

SEQ ID NO: 3552747 - DNA, 25 bp, Homo sapien
tcagccttgggcaggttcacgtcca

SEQ ID NO: 3552748 - DNA, 25 bp, Homo sapien
gtcctgagacgtcaaggtcagcctt

SEQ ID NO: 3552749 - DNA, 25 bp, Homo sapien
ttgaagccaggcatgctgatcttgg

SEQ ID NO: 3552750 - DNA, 25 bp, Homo sapien
gaacatcaacgtccaccttgggtcc

SEQ ID NO: 3552751 - DNA, 25 bp, Homo sapien
gaagccaggcatgctgaatttgggc

SEQ ID NO: 3552752 - DNA, 25 bp, Homo sapien
tttcaggttaagatcaatgtcaggc

SEQ ID NO: 3552753 - DNA, 25 bp, Homo sapien
tgggccttcgatattcacatctgga

SEQ ID NO: 3552754 - DNA, 25 bp, Homo sapien
tcagccttgggcaggttcacatcca

SEQ ID NO: 3552755 - DNA, 25 bp, Homo sapien
tcaacatcaggtgcgtcaatgtcca

SEQ ID NO: 3552756 - DNA, 25 bp, Homo sapien
taacatcagggccttcaacgtccac

SEQ ID NO: 3552757 - DNA, 25 bp, Homo sapien
gattcaggtcaatatctggcatgga

SEQ ID NO: 3552758 - DNA, 25 bp, Homo sapien
ggtgccagtctggaccctgaacatt

SEQ ID NO: 3552759 - DNA, 25 bp, Homo sapien
ctgggcccttgaggtcaccttccac

SEQ ID NO: 3552760 - DNA, 25 bp, Homo sapien
gtcctttcaggtttaagtcaatatc

SEQ ID NO: 3552761 - DNA, 25 bp, Homo sapien
caatatcaggcatggagatcttggg

SEQ ID NO: 3552762 - DNA, 25 bp, Homo sapien
taggaagggaaacatccacatcacc

SEQ ID NO: 3552763 - DNA, 25 bp, Homo sapien
catcacccttcactttgggtccttt

SEQ ID NO: 3552764 - DNA, 25 bp, Homo sapien
gttgacgtctacttcagggccctct

SEQ ID NO: 3552765 - DNA, 25 bp, Homo sapien
tccctctggtccttcaatattaaca

SEQ ID NO: 3552766 - DNA, 25 bp, Homo sapien
tcagccttaggcaagttgacgtcta

SEQ ID NO: 3552767 - DNA, 25 bp, Homo sapien
gtcaacgtcagccttaggcaagttg

SEQ ID NO: 3552768 - DNA, 25 bp, Homo sapien
ctttggggcccctgatgttcatatc

SEQ ID NO: 3552769 - DNA, 25 bp, Homo sapien
cccctgatgttcatatctggtactt

SEQ ID NO: 3552770 - DNA, 25 bp, Homo sapien
tcaggtgccagtctggagcttggac

SEQ ID NO: 3552771 - DNA, 25 bp, Homo sapien
gagcttggacatcgggggcatttac

SEQ ID NO: 3552772 - DNA, 25 bp, Homo sapien
gacatccacatgtggccctttaagg

SEQ ID NO: 3552773 - DNA, 25 bp, Homo sapien
caatttgggaacatctacatccacc

SEQ ID NO: 3552774 - DNA, 25 bp, Homo sapien
tatctggcatcttgaacttaggagt

SEQ ID NO: 3552775 - DNA, 25 bp, Homo sapien
cttcaagtgtagatcgaggtctggc

SEQ ID NO: 3552776 - DNA, 25 bp, Homo sapien
cagcatctaatttgggacctttgac

SEQ ID NO: 3552777 - DNA, 25 bp, Homo sapien
ctggcatgtcagcatctaatttggg

SEQ ID NO: 3552778 - DNA, 25 bp, Homo sapien
tctaatttgggacctttgacatcca

SEQ ID NO: 3552779 - DNA, 25 bp, Homo sapien
ttgggacctttgacatccaattctg

SEQ ID NO: 3552780 - DNA, 25 bp, Homo sapien
ggggcagaaacatcaacatctcctt

SEQ ID NO: 3552781 - DNA, 25 bp, Homo sapien
attgaaatcaacatcaggcatggag

SEQ ID NO: 3552782 - DNA, 25 bp, Homo sapien
tttaaattgaaatcaacatcaggca

SEQ ID NO: 3552783 - DNA, 25 bp, Homo sapien
ctttggggcagaaacatcaacatct

SEQ ID NO: 3552784 - DNA, 25 bp, Homo sapien
ttcatttcaccttctaccttgggaa

SEQ ID NO: 3552785 - DNA, 25 bp, Homo sapien
tcatttcaccttctaccttgggaac

SEQ ID NO: 3552786 - DNA, 25 bp, Homo sapien
taagtccacatcaggcatggagatc

SEQ ID NO: 3552787 - DNA, 25 bp, Homo sapien
cctgttaaatctccctccaattttg

SEQ ID NO: 3552788 - DNA, 25 bp, Homo sapien
cttgggggccttgaagtgcatctca

SEQ ID NO: 3552789 - DNA, 25 bp, Homo sapien
aggacactccagctcaacatcaggc

SEQ ID NO: 3552790 - DNA, 25 bp, Homo sapien
tttgaagccaggcatgctgaacttg

SEQ ID NO: 3552791 - DNA, 25 bp, Homo sapien
tgaagccaggcatgctgaacttggg

SEQ ID NO: 3552792 - DNA, 25 bp, Homo sapien
ttgaagccaggcatgctgaacttgg

SEQ ID NO: 3552793 - DNA, 25 bp, Homo sapien
gaagccaggcatgctgaacttgggc

SEQ ID NO: 3552794 - DNA, 25 bp, Homo sapien
catgaacatccacatctggggcatc

SEQ ID NO: 3552795 - DNA, 25 bp, Homo sapien
gaacatccacatctggggcatcaat

SEQ ID NO: 3552796 - DNA, 25 bp, Homo sapien
ggccatgaacatccacatctggggc

SEQ ID NO: 3552797 - DNA, 25 bp, Homo sapien
aacatccacatctggggcatcaatg

SEQ ID NO: 3552798 - DNA, 25 bp, Homo sapien
gaagtgcatgtctggcatcttaaat

SEQ ID NO: 3552799 - DNA, 25 bp, Homo sapien
aaggacctttgacatcaacttgcgg

SEQ ID NO: 3552800 - DNA, 25 bp, Homo sapien
gggcacctccgcttccacaaaagga

SEQ ID NO: 3552801 - DNA, 25 bp, Homo sapien
aattttggcaccgacacatccgcat

SEQ ID NO: 3552802 - DNA, 25 bp, Homo sapien
tccagacacatcaatgtcagccttt

SEQ ID NO: 3552803 - DNA, 25 bp, Homo sapien
gaccttgggagcttttatattcaac

SEQ ID NO: 3552804 - DNA, 25 bp, Homo sapien
tggcacagaagcatctatctctccc

SEQ ID NO: 3552805 - DNA, 25 bp, Homo sapien
caatctgggtcgtgaacctccacat

SEQ ID NO: 3552806 - DNA, 25 bp, Homo sapien
ggagcactaatgtcaactttgggcc

SEQ ID NO: 3552807 - DNA, 25 bp, Homo sapien
ttgggaagggaaacatctacatcag

SEQ ID NO: 3552808 - DNA, 25 bp, Homo sapien
ttaagtccaacatcaggcatagaga

SEQ ID NO: 3552809 - DNA, 25 bp, Homo sapien
cttaagattcaggtccacatcaggc

SEQ ID NO: 3552810 - DNA, 25 bp, Homo sapien
cacattcgctttggacaggttcaca

SEQ ID NO: 3552811 - DNA, 25 bp, Homo sapien
tcttgggcccggaaatgtccacatc

SEQ ID NO: 3552812 - DNA, 25 bp, Homo sapien
tcatatcaggcagcttaacatcggg

SEQ ID NO: 3552813 - DNA, 25 bp, Homo sapien
cactgtgatggtacggctctgggtc

SEQ ID NO: 3552814 - DNA, 25 bp, Homo sapien
gcccagccgacaacacgttgcctgt

SEQ ID NO: 3552815 - DNA, 25 bp, Homo sapien
gagttagcagatgcccggccacagc

SEQ ID NO: 3552816 - DNA, 25 bp, Homo sapien
ctgcagaaagacacgccgggcagag

SEQ ID NO: 3552817 - DNA, 25 bp, Homo sapien
gaagctgggaccaaaacagaggtcc

SEQ ID NO: 3552818 - DNA, 25 bp, Homo sapien
gttgtcaaagtagatggtggcaccc

SEQ ID NO: 3552819 - DNA, 25 bp, Homo sapien
aagacttcacgggtccaggtctggc

SEQ ID NO: 3552820 - DNA, 25 bp, Homo sapien
tggtgccccatggtgttcagcagct

SEQ ID NO: 3552821 - DNA, 25 bp, Homo sapien
cctcacccgactgcaggttgtcaaa

SEQ ID NO: 3552822 - DNA, 25 bp, Homo sapien
ctgcgtcacctcctgcacaaagacg

SEQ ID NO: 3552823 - DNA, 25 bp, Homo sapien
acaaagacgccgtcgtccctctggg

SEQ ID NO: 3552824 - DNA, 25 bp, Homo sapien
atggtcagcccgtgggagccactac

SEQ ID NO: 3552825 - DNA, 25 bp, Homo sapien
gcagctcccgggttgtctcctcctt

SEQ ID NO: 3552826 - DNA, 25 bp, Homo sapien
aggagcgaatgccttgccaggagcc

SEQ ID NO: 3552827 - DNA, 25 bp, Homo sapien
ctttgcaggattccgctcaggagcg

SEQ ID NO: 3552828 - DNA, 25 bp, Homo sapien
cctcagtctctctcgtcgggaatct

SEQ ID NO: 3552829 - DNA, 25 bp, Homo sapien
tctcgtcgggaatctcggtcacaac

SEQ ID NO: 3552830 - DNA, 25 bp, Homo sapien
cgcccgccaccatgcaccacacccg

SEQ ID NO: 3552831 - DNA, 25 bp, Homo sapien
gtgcaatagcggatctcggctcgct

SEQ ID NO: 3552832 - DNA, 25 bp, Homo sapien
agtgcaatagcggatctcggctcgc

SEQ ID NO: 3552833 - DNA, 25 bp, Homo sapien
aggcgcccgccaccatgcaccacac

SEQ ID NO: 3552834 - DNA, 25 bp, Homo sapien
cgaccgagtctgtaagtcttttgcc

SEQ ID NO: 3552835 - DNA, 25 bp, Homo sapien
gcacccggccgaccgagtctgtaag

SEQ ID NO: 3552836 - DNA, 25 bp, Homo sapien
accgagtctgtaagtcttttgccta

SEQ ID NO: 3552837 - DNA, 25 bp, Homo sapien
cggccgaccgagtctgtaagtcttt

SEQ ID NO: 3552838 - DNA, 25 bp, Homo sapien
ccttataggtgcaagcatttagtaa

SEQ ID NO: 3552839 - DNA, 25 bp, Homo sapien
taggtgcaagcatttagtaataaat

SEQ ID NO: 3552840 - DNA, 25 bp, Homo sapien
ggcccttataggtgcaagcatttag

SEQ ID NO: 3552841 - DNA, 25 bp, Homo sapien
tataggtgcaagcatttagtaataa

SEQ ID NO: 3552842 - DNA, 25 bp, Homo sapien
gctactggcggcgacgagccccgtt

SEQ ID NO: 3552843 - DNA, 25 bp, Homo sapien
catagccggcgcgaggcccaaggct

SEQ ID NO: 3552844 - DNA, 25 bp, Homo sapien
tgcgcggaggcggctcttgtaactc

SEQ ID NO: 3552845 - DNA, 25 bp, Homo sapien
tcagccccagggcacggccatagcc

SEQ ID NO: 3552846 - DNA, 25 bp, Homo sapien
gtgaggaccccgggcgttggacagc

SEQ ID NO: 3552847 - DNA, 25 bp, Homo sapien
tgcgcaggccgcgggcatacggggg

SEQ ID NO: 3552848 - DNA, 25 bp, Homo sapien
gccgcgggcatacgggggtgaggac

SEQ ID NO: 3552849 - DNA, 25 bp, Homo sapien
gttggacagcggacccgacgcccac

SEQ ID NO: 3552850 - DNA, 25 bp, Homo sapien
agccaccgcaccctggcccctcatg

SEQ ID NO: 3552851 - DNA, 25 bp, Homo sapien
tacagacacacaccatcatgctcag

SEQ ID NO: 3552852 - DNA, 25 bp, Homo sapien
accgcaccctggcccctcatgccta

SEQ ID NO: 3552853 - DNA, 25 bp, Homo sapien
ccaccgcaccctggcccctcatgcc

SEQ ID NO: 3552854 - DNA, 25 bp, Homo sapien
cagctggtgggatgggtccgaccca

SEQ ID NO: 3552855 - DNA, 25 bp, Homo sapien
tgtgggcagctggtgggatgggtcc

SEQ ID NO: 3552856 - DNA, 25 bp, Homo sapien
tgggtccgacccagtgagagcagca

SEQ ID NO: 3552857 - DNA, 25 bp, Homo sapien
catttggggcatgtgggcagctggt

SEQ ID NO: 3552858 - DNA, 25 bp, Homo sapien
tcctttaatgacccccatctccctg

SEQ ID NO: 3552859 - DNA, 25 bp, Homo sapien
ctttaatgacccccatctccctgaa

SEQ ID NO: 3552860 - DNA, 25 bp, Homo sapien
ttaatgacccccatctccctgaagg

SEQ ID NO: 3552861 - DNA, 25 bp, Homo sapien
atgacccccatctccctgaagggca

SEQ ID NO: 3552862 - DNA, 25 bp, Homo sapien
tccgccatgtgtatgactcgtagtc

SEQ ID NO: 3552863 - DNA, 25 bp, Homo sapien
gaagatcttgccctgattgaaggct

SEQ ID NO: 3552864 - DNA, 25 bp, Homo sapien
tactctcgaaccagcgtctgggtct

SEQ ID NO: 3552865 - DNA, 25 bp, Homo sapien
gaaccagcgtctgggtctcctcgct

SEQ ID NO: 3552866 - DNA, 25 bp, Homo sapien
gaactgctccttcctataagcattc

SEQ ID NO: 3552867 - DNA, 25 bp, Homo sapien
ggtcaagttatgagacaccacccca

SEQ ID NO: 3552868 - DNA, 25 bp, Homo sapien
taagcattcctgaaccctcctaaac

SEQ ID NO: 3552869 - DNA, 25 bp, Homo sapien
ctggggataaaaagccagcatgtgg

SEQ ID NO: 3552870 - DNA, 25 bp, Homo sapien
tggcctcggaagacccagactccag

SEQ ID NO: 3552871 - DNA, 25 bp, Homo sapien
cttgttctccttccttctcagaccc

SEQ ID NO: 3552872 - DNA, 25 bp, Homo sapien
tgttctccttccttctcagacccac

SEQ ID NO: 3552873 - DNA, 25 bp, Homo sapien
ttccttctcagacccactctcttac

SEQ ID NO: 3552874 - DNA, 25 bp, Homo sapien
tctccttccttctcagacccactct

SEQ ID NO: 3552875 - DNA, 25 bp, Homo sapien
cagggaagcgatactctgagtacca

SEQ ID NO: 3552876 - DNA, 25 bp, Homo sapien
cctcattggagtacttgcgcttaaa

SEQ ID NO: 3552877 - DNA, 25 bp, Homo sapien
gaccagccgtccttatcaaagtgct

SEQ ID NO: 3552878 - DNA, 25 bp, Homo sapien
tgctcccagaaatatggcagtgcca

SEQ ID NO: 3552879 - DNA, 25 bp, Homo sapien
tcaatcaataaggaggaaggttgcc

SEQ ID NO: 3552880 - DNA, 25 bp, Homo sapien
gctaagagaagtgaagggtgctttc

SEQ ID NO: 3552881 - DNA, 25 bp, Homo sapien
gaaatggtcattgtgctggcagatg

SEQ ID NO: 3552882 - DNA, 25 bp, Homo sapien
gtggaactcaaagtgggactctgag

SEQ ID NO: 3552883 - DNA, 25 bp, Homo sapien
tccctgttcaggccctccccaggct

SEQ ID NO: 3552884 - DNA, 25 bp, Homo sapien
ccctgttcaggccctccccaggctg

SEQ ID NO: 3552885 - DNA, 25 bp, Homo sapien
ggttcacccggtatccaagccatta

SEQ ID NO: 3552886 - DNA, 25 bp, Homo sapien
gaaatgtaaaccctagcagaccaag

SEQ ID NO: 3552887 - DNA, 25 bp, Homo sapien
cccgggagtaagaactttcagctat

SEQ ID NO: 3552888 - DNA, 25 bp, Homo sapien
tgcctgtgtctggatggagccttcc

SEQ ID NO: 3552889 - DNA, 25 bp, Homo sapien
ttgggcaggtgagcgaaggggtcct

SEQ ID NO: 3552890 - DNA, 25 bp, Homo sapien
gggcaggtgagcgaaggggtccttg

SEQ ID NO: 3552891 - DNA, 25 bp, Homo sapien
gcaggtgagcgaaggggtccttggc

SEQ ID NO: 3552892 - DNA, 25 bp, Homo sapien
tcttgggcaggtgagcgaaggggtc

SEQ ID NO: 3552893 - DNA, 25 bp, Homo sapien
gcttctcttcccgtgaacccttctc

SEQ ID NO: 3552894 - DNA, 25 bp, Homo sapien
tttctcctccttccgctcagcctgg

SEQ ID NO: 3552895 - DNA, 25 bp, Homo sapien
ccttctctttccgtggtgtgtcctt

SEQ ID NO: 3552896 - DNA, 25 bp, Homo sapien
tcctttttaggttgggtctctgcaa

SEQ ID NO: 3552897 - DNA, 25 bp, Homo sapien
tcacacagtttcacttcgcccaaga

SEQ ID NO: 3552898 - DNA, 25 bp, Homo sapien
cctggcggaaagaaggctctagaac

SEQ ID NO: 3552899 - DNA, 25 bp, Homo sapien
tcgcccaagacagcccggaactggg

SEQ ID NO: 3552900 - DNA, 25 bp, Homo sapien
aaaggcctggcggaaagaaggctct

SEQ ID NO: 3552901 - DNA, 25 bp, Homo sapien
acaaagtcagtggaaaggccctgaa

SEQ ID NO: 3552902 - DNA, 25 bp, Homo sapien
aacaaagtcagtggaaaggccctga

SEQ ID NO: 3552903 - DNA, 25 bp, Homo sapien
ataagggtgtaaacaaagtcagtgg

SEQ ID NO: 3552904 - DNA, 25 bp, Homo sapien
tgccaaatggattttccataaactt

SEQ ID NO: 3552905 - DNA, 25 bp, Homo sapien
ccactgccaaatggattttccataa

SEQ ID NO: 3552906 - DNA, 25 bp, Homo sapien
actgccaaatggattttccataaac

SEQ ID NO: 3552907 - DNA, 25 bp, Homo sapien
caaatggattttccataaacttcac

SEQ ID NO: 3552908 - DNA, 25 bp, Homo sapien
ggtgcagacaactgtgatgtcagcc

SEQ ID NO: 3552909 - DNA, 25 bp, Homo sapien
tgtgatgtcagccaatgtcactcgt

SEQ ID NO: 3552910 - DNA, 25 bp, Homo sapien
aatgtcactcgttcgcccaccagaa

SEQ ID NO: 3552911 - DNA, 25 bp, Homo sapien
tcctcgtcttcaagtaagcatccag

SEQ ID NO: 3552912 - DNA, 25 bp, Homo sapien
cccctggcttctctcaaagttccaa

SEQ ID NO: 3552913 - DNA, 25 bp, Homo sapien
gcccctggcttctctcaaagttcca

SEQ ID NO: 3552914 - DNA, 25 bp, Homo sapien
ggcactatatcggaatcagcaaagc

SEQ ID NO: 3552915 - DNA, 25 bp, Homo sapien
ctggctgggggcactatatcggaat

SEQ ID NO: 3552916 - DNA, 25 bp, Homo sapien
ggctgggggcactatatcggaatca

SEQ ID NO: 3552917 - DNA, 25 bp, Homo sapien
tgggggcactatatcggaatcagca

SEQ ID NO: 3552918 - DNA, 25 bp, Homo sapien
ctccaaattctcccattcccatata

SEQ ID NO: 3552919 - DNA, 25 bp, Homo sapien
cattcccatatacccctgcaaatta

SEQ ID NO: 3552920 - DNA, 25 bp, Homo sapien
aattctcccattcccatatacccct

SEQ ID NO: 3552921 - DNA, 25 bp, Homo sapien
caaattctcccattcccatataccc

SEQ ID NO: 3552922 - DNA, 25 bp, Homo sapien
tggcgttgctctcaaacacacagaa

SEQ ID NO: 3552923 - DNA, 25 bp, Homo sapien
catagtaggcaatggcgttgctctc

SEQ ID NO: 3552924 - DNA, 25 bp, Homo sapien
tccatcatcaccctcaaatgctggg

SEQ ID NO: 3552925 - DNA, 25 bp, Homo sapien
ggcaatggcgttgctctcaaacaca

SEQ ID NO: 3552926 - DNA, 25 bp, Homo sapien
ggcaggaaatttgcggagaaattca

SEQ ID NO: 3552927 - DNA, 25 bp, Homo sapien
gccggcaggaaatttgcggagaaat

SEQ ID NO: 3552928 - DNA, 25 bp, Homo sapien
aggaaatttgcggagaaattcaggg

SEQ ID NO: 3552929 - DNA, 25 bp, Homo sapien
cttgccggcaggaaatttgcggaga

SEQ ID NO: 3552930 - DNA, 25 bp, Homo sapien
ggagagcacgcggacctgagccccg

SEQ ID NO: 3552931 - DNA, 25 bp, Homo sapien
tgagccccgctgtactgagcagcga

SEQ ID NO: 3552932 - DNA, 25 bp, Homo sapien
cttgaaggccctccagttttcagga

SEQ ID NO: 3552933 - DNA, 25 bp, Homo sapien
actgagcagcgatgagagccttgaa

SEQ ID NO: 3552934 - DNA, 25 bp, Homo sapien
aggatgactttcctgaataatccca

SEQ ID NO: 3552935 - DNA, 25 bp, Homo sapien
gatgactttcctgaataatcccaat

SEQ ID NO: 3552936 - DNA, 25 bp, Homo sapien
gagagggacaaaattaatgagtaga

SEQ ID NO: 3552937 - DNA, 25 bp, Homo sapien
taatgagtagaagggtcccagtcct

SEQ ID NO: 3552938 - DNA, 25 bp, Homo sapien
gtgtcgcgaatatcatccctccggt

SEQ ID NO: 3552939 - DNA, 25 bp, Homo sapien
cattcattgatggttccgagcgcct

SEQ ID NO: 3552940 - DNA, 25 bp, Homo sapien
gagagacgacctttaaccgtgccag

SEQ ID NO: 3552941 - DNA, 25 bp, Homo sapien
cttctctattatgccggccagcgga

SEQ ID NO: 3552942 - DNA, 25 bp, Homo sapien
agcgaggacgaaacagaagacatac

SEQ ID NO: 3552943 - DNA, 25 bp, Homo sapien
gggaaagaggagagccgtggagaaa

SEQ ID NO: 3552944 - DNA, 25 bp, Homo sapien
gccgcaaagtaagccgcccgggaga

SEQ ID NO: 3552945 - DNA, 25 bp, Homo sapien
gggttctcggcgctgccgcaaagta

SEQ ID NO: 3552946 - DNA, 25 bp, Homo sapien
gaaactcatgggagcgaggaacagc

SEQ ID NO: 3552947 - DNA, 25 bp, Homo sapien
ctgaacccgcctgccaaagtgaggt

SEQ ID NO: 3552948 - DNA, 25 bp, Homo sapien
gaagttgtgagaacccgctggaaaa

SEQ ID NO: 3552949 - DNA, 25 bp, Homo sapien
tgatggtagattttgccaagcccct

SEQ ID NO: 3552950 - DNA, 25 bp, Homo sapien
tgctgttactgcgagcagggcaccg

SEQ ID NO: 3552951 - DNA, 25 bp, Homo sapien
gacccatgttcaggtttgaaatctc

SEQ ID NO: 3552952 - DNA, 25 bp, Homo sapien
tggaagacctgacatcgtcgcttct

SEQ ID NO: 3552953 - DNA, 25 bp, Homo sapien
gacatgagggagaacgcgccctgtc

SEQ ID NO: 3552954 - DNA, 25 bp, Homo sapien
aatctccgtccttgtgcgcataaat

SEQ ID NO: 3552955 - DNA, 25 bp, Homo sapien
gatgaactctcctcgtttaaaggag

SEQ ID NO: 3552956 - DNA, 25 bp, Homo sapien
ccagtttaagaacgggatgaactct

SEQ ID NO: 3552957 - DNA, 25 bp, Homo sapien
gaagaacgctgaacgcaaatctccg

SEQ ID NO: 3552958 - DNA, 25 bp, Homo sapien
ggcgacaggaagaatgtggaggcaa

SEQ ID NO: 3552959 - DNA, 25 bp, Homo sapien
tggctcttctcagtactgctggagc

SEQ ID NO: 3552960 - DNA, 25 bp, Homo sapien
tcttctcagtactgctggagccacc

SEQ ID NO: 3552961 - DNA, 25 bp, Homo sapien
ttctcagtactgctggagccaccca

SEQ ID NO: 3552962 - DNA, 25 bp, Homo sapien
gtgccacgcgcggtgctgcccccgc

SEQ ID NO: 3552963 - DNA, 25 bp, Homo sapien
ccgcactcccctcgagctgtgcgaa

SEQ ID NO: 3552964 - DNA, 25 bp, Homo sapien
attcaggaactctgcgcgggtgcca

SEQ ID NO: 3552965 - DNA, 25 bp, Homo sapien
ccaggtgccacgcgcggtgctgccc

SEQ ID NO: 3552966 - DNA, 25 bp, Homo sapien
gggagagacccatgttcggggtcag

SEQ ID NO: 3552967 - DNA, 25 bp, Homo sapien
agagacccatgttcggggtcagacg

SEQ ID NO: 3552968 - DNA, 25 bp, Homo sapien
ccatgttcggggtcagacgggagca

SEQ ID NO: 3552969 - DNA, 25 bp, Homo sapien
ttcggggtcagacgggagcagctgc

SEQ ID NO: 3552970 - DNA, 25 bp, Homo sapien
ataaactagcagctttattgccctt

SEQ ID NO: 3552971 - DNA, 25 bp, Homo sapien
ctagcagctttattgcccttcaggg

SEQ ID NO: 3552972 - DNA, 25 bp, Homo sapien
actagcagctttattgcccttcagg

SEQ ID NO: 3552973 - DNA, 25 bp, Homo sapien
aaactagcagctttattgcccttca

SEQ ID NO: 3552974 - DNA, 25 bp, Homo sapien
tcacttgagatgtcgaattgcttga

SEQ ID NO: 3552975 - DNA, 25 bp, Homo sapien
ctgtaagaaatgatggagatcaggg

SEQ ID NO: 3552976 - DNA, 25 bp, Homo sapien
acactcggtgccacaaggcacagcg

SEQ ID NO: 3552977 - DNA, 25 bp, Homo sapien
ttgctgctgcaagcgtctacgggct

SEQ ID NO: 3552978 - DNA, 25 bp, Homo sapien
gagacagacgccacaaagctcagca

SEQ ID NO: 3552979 - DNA, 25 bp, Homo sapien
ccaccgtcccctgcacatccctgct

SEQ ID NO: 3552980 - DNA, 25 bp, Homo sapien
tctataaccatctcttctaccctgt

SEQ ID NO: 3552981 - DNA, 25 bp, Homo sapien
ccgtcccctgcacatccctgctgct

SEQ ID NO: 3552982 - DNA, 25 bp, Homo sapien
catctctccaacctctataaccatc

SEQ ID NO: 3552983 - DNA, 25 bp, Homo sapien
tatatggcaccccagtgcttccctg

SEQ ID NO: 3552984 - DNA, 25 bp, Homo sapien
tgttctatatggcaccccagtgctt

SEQ ID NO: 3552985 - DNA, 25 bp, Homo sapien
ggttgcctgttctatatggcacccc

SEQ ID NO: 3552986 - DNA, 25 bp, Homo sapien
cgcgttctcttggttgcctgttcta

SEQ ID NO: 3552987 - DNA, 25 bp, Homo sapien
cattggctgcgacattgtgactcag

SEQ ID NO: 3552988 - DNA, 25 bp, Homo sapien
tcggcagcagttctgtaggcgccca

SEQ ID NO: 3552989 - DNA, 25 bp, Homo sapien
gactcaggtcaaaagggtcctggag

SEQ ID NO: 3552990 - DNA, 25 bp, Homo sapien
gagccacgaagatcccaacaagata

SEQ ID NO: 3552991 - DNA, 25 bp, Homo sapien
ggcttctctgatccctataaacaag

SEQ ID NO: 3552992 - DNA, 25 bp, Homo sapien
aactgatacaggtcctgcaccagag

SEQ ID NO: 3552993 - DNA, 25 bp, Homo sapien
gccatttccttagcaggactttttc

SEQ ID NO: 3552994 - DNA, 25 bp, Homo sapien
ggaagctaggcttctctgatcccta

SEQ ID NO: 3552995 - DNA, 25 bp, Homo sapien
tgttgatgaacatcattactagtcc

SEQ ID NO: 3552996 - DNA, 25 bp, Homo sapien
gggctccacatttatgctgggctcc

SEQ ID NO: 3552997 - DNA, 25 bp, Homo sapien
tatgctgggctccagtcttgaggca

SEQ ID NO: 3552998 - DNA, 25 bp, Homo sapien
aaactgcagtcccagccatcgactt

SEQ ID NO: 3552999 - DNA, 25 bp, Homo sapien
gctccagtcttgaggcatccctggg

SEQ ID NO: 3553000 - DNA, 25 bp, Homo sapien
caccagcaaggtcagggcgtagtta

SEQ ID NO: 3553001 - DNA, 25 bp, Homo sapien
gaagaaaatagatcaccagcaaggt

SEQ ID NO: 3553002 - DNA, 25 bp, Homo sapien
caaggtcagggcgtagttactgaga

SEQ ID NO: 3553003 - DNA, 25 bp, Homo sapien
acaggagggtccctggtctgaagaa

SEQ ID NO: 3553004 - DNA, 25 bp, Homo sapien
agcagagactcaggaaacgggagtt

SEQ ID NO: 3553005 - DNA, 25 bp, Homo sapien
accatccagctcagagcagagactc

SEQ ID NO: 3553006 - DNA, 25 bp, Homo sapien
gaaacgggagttatgcagggccagc

SEQ ID NO: 3553007 - DNA, 25 bp, Homo sapien
acgaggggccggactcgaccatcca

SEQ ID NO: 3553008 - DNA, 25 bp, Homo sapien
ggagttcgggaaacacttcatcctg

SEQ ID NO: 3553009 - DNA, 25 bp, Homo sapien
cagtgtgcgaaaggacaaaggagtt

SEQ ID NO: 3553010 - DNA, 25 bp, Homo sapien
gaataaggccagaacagtttcccca

SEQ ID NO: 3553011 - DNA, 25 bp, Homo sapien
tccagacttgcataactggagccag

SEQ ID NO: 3553012 - DNA, 25 bp, Homo sapien
catcccttgaaagtagtattctagg

SEQ ID NO: 3553013 - DNA, 25 bp, Homo sapien
caaatttattcaacgcagagctctt

SEQ ID NO: 3553014 - DNA, 25 bp, Homo sapien
agtagtattctagggcgcggtgcct

SEQ ID NO: 3553015 - DNA, 25 bp, Homo sapien
gagctcttttctacatcccttgaaa

SEQ ID NO: 3553016 - DNA, 25 bp, Homo sapien
gatgacagaacttgaccacagggcg

SEQ ID NO: 3553017 - DNA, 25 bp, Homo sapien
acacagccccggagaatggatccca

SEQ ID NO: 3553018 - DNA, 25 bp, Homo sapien
tttggactcgatacaccccagggac

SEQ ID NO: 3553019 - DNA, 25 bp, Homo sapien
gagacatcaccgtggagacctgaag

SEQ ID NO: 3553020 - DNA, 25 bp, Homo sapien
tcctctagcagtggtgaagctggag

SEQ ID NO: 3553021 - DNA, 25 bp, Homo sapien
gtctctgctagttccgaggccttcc

SEQ ID NO: 3553022 - DNA, 25 bp, Homo sapien
gccaaggcagagtccggagtttggg

SEQ ID NO: 3553023 - DNA, 25 bp, Homo sapien
agaagcaagggtctcggaggccaag

SEQ ID NO: 3553024 - DNA, 25 bp, Homo sapien
gggccgagtccagcgatggagattc

SEQ ID NO: 3553025 - DNA, 25 bp, Homo sapien
agccagggccgagtccagcgatgga

SEQ ID NO: 3553026 - DNA, 25 bp, Homo sapien
cagggccgagtccagcgatggagat

SEQ ID NO: 3553027 - DNA, 25 bp, Homo sapien
gaagccagggccgagtccagcgatg

SEQ ID NO: 3553028 - DNA, 25 bp, Homo sapien
acagccatggacatcgaagctattt

SEQ ID NO: 3553029 - DNA, 25 bp, Homo sapien
catggacatcgaagctatttatgga

SEQ ID NO: 3553030 - DNA, 25 bp, Homo sapien
gagccaaaagggtggaccacacagc

SEQ ID NO: 3553031 - DNA, 25 bp, Homo sapien
ggaagagccaaaagggtggaccaca

SEQ ID NO: 3553032 - DNA, 25 bp, Homo sapien
tgtgacaagacagcctctcgagcac

SEQ ID NO: 3553033 - DNA, 25 bp, Homo sapien
ggacacgcaggcgatgtcctcccag

SEQ ID NO: 3553034 - DNA, 25 bp, Homo sapien
gggccaccactaggctgcgaagctg

SEQ ID NO: 3553035 - DNA, 25 bp, Homo sapien
tctgcagcctcagctagcgctttgg

SEQ ID NO: 3553036 - DNA, 25 bp, Homo sapien
gacaaacacacttcgaagtccctgg

SEQ ID NO: 3553037 - DNA, 25 bp, Homo sapien
tcccaagtgggcatcaaggctgggt

SEQ ID NO: 3553038 - DNA, 25 bp, Homo sapien
tcgtagttctaccaggtgccggtgc

SEQ ID NO: 3553039 - DNA, 25 bp, Homo sapien
gggcctttctcgcagctcgtagttc

SEQ ID NO: 3553040 - DNA, 25 bp, Homo sapien
cacgcggcagcgattcgacatccga

SEQ ID NO: 3553041 - DNA, 25 bp, Homo sapien
agcgattcgacatccgaatccaccg

SEQ ID NO: 3553042 - DNA, 25 bp, Homo sapien
tggctgtagtaacgtggcagaggca

SEQ ID NO: 3553043 - DNA, 25 bp, Homo sapien
ggttggctgtagtaacgtggcagag

SEQ ID NO: 3553044 - DNA, 25 bp, Homo sapien
agcgactctcctgtaccgacaaaaa

SEQ ID NO: 3553045 - DNA, 25 bp, Homo sapien
tctcctgtaccgacaaaaacacaag

SEQ ID NO: 3553046 - DNA, 25 bp, Homo sapien
cctctgccaccaccggaacccactt

SEQ ID NO: 3553047 - DNA, 25 bp, Homo sapien
gactctcctgtaccgacaaaaacac

SEQ ID NO: 3553048 - DNA, 25 bp, Homo sapien
taagaaccaattacagaatccgagg

SEQ ID NO: 3553049 - DNA, 25 bp, Homo sapien
ttgttactataagaaccaattacag

SEQ ID NO: 3553050 - DNA, 25 bp, Homo sapien
ctataagaaccaattacagaatccg

SEQ ID NO: 3553051 - DNA, 25 bp, Homo sapien
tatttgttactataagaaccaatta

SEQ ID NO: 3553052 - DNA, 25 bp, Homo sapien
ctcaaactccaattaggaaagtccg

SEQ ID NO: 3553053 - DNA, 25 bp, Homo sapien
tttctgagaactggcgtacaaaagg

SEQ ID NO: 3553054 - DNA, 25 bp, Homo sapien
ctgagaactggcgtacaaaaggcag

SEQ ID NO: 3553055 - DNA, 25 bp, Homo sapien
agaactggcgtacaaaaggcagagg

SEQ ID NO: 3553056 - DNA, 25 bp, Homo sapien
catgggccaagttcctgcagtctgt

SEQ ID NO: 3553057 - DNA, 25 bp, Homo sapien
gacaagtctcgaggtggtaacacca

SEQ ID NO: 3553058 - DNA, 25 bp, Homo sapien
agtctgtcctccatcggcaagcatg

SEQ ID NO: 3553059 - DNA, 25 bp, Homo sapien
aaacaggctaggttcccacatgggc

SEQ ID NO: 3553060 - DNA, 25 bp, Homo sapien
gggcaagttgggtcggcgagcagct

SEQ ID NO: 3553061 - DNA, 25 bp, Homo sapien
gtcctccaggacaataggctcattg

SEQ ID NO: 3553062 - DNA, 25 bp, Homo sapien
gcttcaccttcaggggcaagttggg

SEQ ID NO: 3553063 - DNA, 25 bp, Homo sapien
gctcgccgcatttccagatgggtca

SEQ ID NO: 3553064 - DNA, 25 bp, Homo sapien
tgggtttagtttctgacgcttggct

SEQ ID NO: 3553065 - DNA, 25 bp, Homo sapien
gcttgaacgaatccctgaagccaga

SEQ ID NO: 3553066 - DNA, 25 bp, Homo sapien
tagtttctgacgcttggctgctggc

SEQ ID NO: 3553067 - DNA, 25 bp, Homo sapien
gaggccttccattggcagagaaagg

SEQ ID NO: 3553068 - DNA, 25 bp, Homo sapien
tctcataggcccgtttcaccataat

SEQ ID NO: 3553069 - DNA, 25 bp, Homo sapien
tcataggcccgtttcaccataatgc

SEQ ID NO: 3553070 - DNA, 25 bp, Homo sapien
agctggtttctgttgatcggtgtct

SEQ ID NO: 3553071 - DNA, 25 bp, Homo sapien
tgatcggtgtcttggtaccccgagg

SEQ ID NO: 3553072 - DNA, 25 bp, Homo sapien
ccagagggtgaatcttcaatggagt

SEQ ID NO: 3553073 - DNA, 25 bp, Homo sapien
caatggagtcttggcggccttagga

SEQ ID NO: 3553074 - DNA, 25 bp, Homo sapien
ccagatctttgacgatagttgccag

SEQ ID NO: 3553075 - DNA, 25 bp, Homo sapien
tcttggcggccttaggaagtcgaat

SEQ ID NO: 3553076 - DNA, 25 bp, Homo sapien
gataaatgaccccttgagtgtggct

SEQ ID NO: 3553077 - DNA, 25 bp, Homo sapien
gcggccctccttggctgtaataggt

SEQ ID NO: 3553078 - DNA, 25 bp, Homo sapien
taggtccctgcacatgcgtctggca

SEQ ID NO: 3553079 - DNA, 25 bp, Homo sapien
cattgataggagcataaggccgtcg

SEQ ID NO: 3553080 - DNA, 25 bp, Homo sapien
gtggtgccccgagtggccccctcaa

SEQ ID NO: 3553081 - DNA, 25 bp, Homo sapien
cccatacttcttccagtagatccaa

SEQ ID NO: 3553082 - DNA, 25 bp, Homo sapien
aggaagcacagaggcggcactgcat

SEQ ID NO: 3553083 - DNA, 25 bp, Homo sapien
acagaggcggcactgcatgttaggt

SEQ ID NO: 3553084 - DNA, 25 bp, Homo sapien
ccccattcatgccaggttttgaacc

SEQ ID NO: 3553085 - DNA, 25 bp, Homo sapien
catgccaggttttgaacccacagaa

SEQ ID NO: 3553086 - DNA, 25 bp, Homo sapien
ggcaactctcacaagtcaggccctt

SEQ ID NO: 3553087 - DNA, 25 bp, Homo sapien
gtggcaactctcacaagtcaggccc

SEQ ID NO: 3553088 - DNA, 25 bp, Homo sapien
gaatgtagacctgtttcagtttgct

SEQ ID NO: 3553089 - DNA, 25 bp, Homo sapien
gctgtctgcttcagcagctttcaac

SEQ ID NO: 3553090 - DNA, 25 bp, Homo sapien
ggtgggaatgtagacctgtttcagt

SEQ ID NO: 3553091 - DNA, 25 bp, Homo sapien
tttgctgtctgcttcagcagctttc

SEQ ID NO: 3553092 - DNA, 25 bp, Homo sapien
ggtcagcaggtagcctatggtccac

SEQ ID NO: 3553093 - DNA, 25 bp, Homo sapien
cagaggtcagcaggtagcctatggt

SEQ ID NO: 3553094 - DNA, 25 bp, Homo sapien
agcaggtagcctatggtccaccctc

SEQ ID NO: 3553095 - DNA, 25 bp, Homo sapien
aggcagaggtcagcaggtagcctat

SEQ ID NO: 3553096 - DNA, 25 bp, Homo sapien
ctgctgaatataccggtctgtggtt

SEQ ID NO: 3553097 - DNA, 25 bp, Homo sapien
gaatataccggtctgtggttttcca

SEQ ID NO: 3553098 - DNA, 25 bp, Homo sapien
ctgaatataccggtctgtggttttc

SEQ ID NO: 3553099 - DNA, 25 bp, Homo sapien
tgctgaatataccggtctgtggttt

SEQ ID NO: 3553100 - DNA, 25 bp, Homo sapien
tctcctcctagtgccatccacttac

SEQ ID NO: 3553101 - DNA, 25 bp, Homo sapien
agaatgagctggcatctggccccag

SEQ ID NO: 3553102 - DNA, 25 bp, Homo sapien
cccacttctcctcctagtgccatcc

SEQ ID NO: 3553103 - DNA, 25 bp, Homo sapien
gaagaatgagctggcatctggcccc

SEQ ID NO: 3553104 - DNA, 25 bp, Homo sapien
gggtaccagggtcgacatggcctta

SEQ ID NO: 3553105 - DNA, 25 bp, Homo sapien
tcctggcgaatatcattgaagtcct

SEQ ID NO: 3553106 - DNA, 25 bp, Homo sapien
tctagggcctcctcaaatagcatgg

SEQ ID NO: 3553107 - DNA, 25 bp, Homo sapien
caggtcgtagccgttcctttgcaag

SEQ ID NO: 3553108 - DNA, 25 bp, Homo sapien
tagggctcttgcaaaggttcccaca

SEQ ID NO: 3553109 - DNA, 25 bp, Homo sapien
aatggagctgctacaatctagggct

SEQ ID NO: 3553110 - DNA, 25 bp, Homo sapien
cagagtgatatctcgggaggcagca

SEQ ID NO: 3553111 - DNA, 25 bp, Homo sapien
cagcagctgcactcatgtgcaagct

SEQ ID NO: 3553112 - DNA, 25 bp, Homo sapien
accacaagaaactggtcgatctgcc

SEQ ID NO: 3553113 - DNA, 25 bp, Homo sapien
tgctggttccgattatcagattctc

SEQ ID NO: 3553114 - DNA, 25 bp, Homo sapien
aaactggtcgatctgccggtctgtg

SEQ ID NO: 3553115 - DNA, 25 bp, Homo sapien
ccggtctgtgagagggttgtctggg

SEQ ID NO: 3553116 - DNA, 25 bp, Homo sapien
taatctcgccctgatcagcgagaag

SEQ ID NO: 3553117 - DNA, 25 bp, Homo sapien
cagcgagaagtgtcttctgcacggg

SEQ ID NO: 3553118 - DNA, 25 bp, Homo sapien
cctctactaggcgatctgggatctc

SEQ ID NO: 3553119 - DNA, 25 bp, Homo sapien
tctcagcttggtatttgcaaccaac

SEQ ID NO: 3553120 - DNA, 25 bp, Homo sapien
gagggaggtgtatctgagtttccat

SEQ ID NO: 3553121 - DNA, 25 bp, Homo sapien
gagtttccatgaccggcagtctggc

SEQ ID NO: 3553122 - DNA, 25 bp, Homo sapien
gcagtctggcaaccctgtacctcat

SEQ ID NO: 3553123 - DNA, 25 bp, Homo sapien
tcttttgcgggcaatacccattccc

SEQ ID NO: 3553124 - DNA, 25 bp, Homo sapien
caggtactggctcaagatatctgtc

SEQ ID NO: 3553125 - DNA, 25 bp, Homo sapien
tccaggtactggctcaagatatctg

SEQ ID NO: 3553126 - DNA, 25 bp, Homo sapien
tttccaggtactggctcaagatatc

SEQ ID NO: 3553127 - DNA, 25 bp, Homo sapien
ccaggtactggctcaagatatctgt

SEQ ID NO: 3553128 - DNA, 25 bp, Homo sapien
tacgtaagtgcacgcaggctatgct

SEQ ID NO: 3553129 - DNA, 25 bp, Homo sapien
tctccatcttctacgtaagtgcacg

SEQ ID NO: 3553130 - DNA, 25 bp, Homo sapien
taagtgcacgcaggctatgctggcc

SEQ ID NO: 3553131 - DNA, 25 bp, Homo sapien
tcttctacgtaagtgcacgcaggct

SEQ ID NO: 3553132 - DNA, 25 bp, Homo sapien
tgtgggtggctggtaatgattcaaa

SEQ ID NO: 3553133 - DNA, 25 bp, Homo sapien
tgcttcagttgatggcgctgctgct

SEQ ID NO: 3553134 - DNA, 25 bp, Homo sapien
gctcagacacccctggctgctttga

SEQ ID NO: 3553135 - DNA, 25 bp, Homo sapien
taatgattcaaattgccgagaaaga

SEQ ID NO: 3553136 - DNA, 25 bp, Homo sapien
ggctgttgaggctactagaaatgtc

SEQ ID NO: 3553137 - DNA, 25 bp, Homo sapien
gtccctgcgccggaaaagacagaca

SEQ ID NO: 3553138 - DNA, 25 bp, Homo sapien
tgttgaggctactagaaatgtccct

SEQ ID NO: 3553139 - DNA, 25 bp, Homo sapien
ctagaaatgtccctgcgccggaaaa

SEQ ID NO: 3553140 - DNA, 25 bp, Homo sapien
ccgtctaaccaggtaaggattgctg

SEQ ID NO: 3553141 - DNA, 25 bp, Homo sapien
taaggattgctggaagagttctcaa

SEQ ID NO: 3553142 - DNA, 25 bp, Homo sapien
ttgttgagctcctcaatccgtctaa

SEQ ID NO: 3553143 - DNA, 25 bp, Homo sapien
ctcaatccgtctaaccaggtaagga

SEQ ID NO: 3553144 - DNA, 25 bp, Homo sapien
tttcgaatcgaggcgcacaataacg

SEQ ID NO: 3553145 - DNA, 25 bp, Homo sapien
ttcgaatcgaggcgcacaataacgc

SEQ ID NO: 3553146 - DNA, 25 bp, Homo sapien
ttttcgaatcgaggcgcacaataac

SEQ ID NO: 3553147 - DNA, 25 bp, Homo sapien
cttttcgaatcgaggcgcacaataa

SEQ ID NO: 3553148 - DNA, 25 bp, Homo sapien
tcagctccttcggaaccggttccga

SEQ ID NO: 3553149 - DNA, 25 bp, Homo sapien
cgcggtggcaaagccgtcgccccag

SEQ ID NO: 3553150 - DNA, 25 bp, Homo sapien
accctgtcagctccttcggaaccgg

SEQ ID NO: 3553151 - DNA, 25 bp, Homo sapien
tgtcagctccttcggaaccggttcc

SEQ ID NO: 3553152 - DNA, 25 bp, Homo sapien
cccacccggtacatgttggccgcca

SEQ ID NO: 3553153 - DNA, 25 bp, Homo sapien
ccacccggtacatgttggccgccat

SEQ ID NO: 3553154 - DNA, 25 bp, Homo sapien
ctcccacccggtacatgttggccgc

SEQ ID NO: 3553155 - DNA, 25 bp, Homo sapien
tcccacccggtacatgttggccgcc

SEQ ID NO: 3553156 - DNA, 25 bp, Homo sapien
tccgggaggctcgcgggggcagggc

SEQ ID NO: 3553157 - DNA, 25 bp, Homo sapien
cgcacaaaggggtccgggaggctcg

SEQ ID NO: 3553158 - DNA, 25 bp, Homo sapien
cgccgcctccggccgcacaaagggg

SEQ ID NO: 3553159 - DNA, 25 bp, Homo sapien
gggaggctcgcgggggcagggctcg

SEQ ID NO: 3553160 - DNA, 25 bp, Homo sapien
ctcgaggcaaagccccgaacggtgg

SEQ ID NO: 3553161 - DNA, 25 bp, Homo sapien
ggcttcttccggaacgagctcggct

SEQ ID NO: 3553162 - DNA, 25 bp, Homo sapien
gcagatcggctacttccggaagaag

SEQ ID NO: 3553163 - DNA, 25 bp, Homo sapien
aagaagttcggctcctgtcgggcaa

SEQ ID NO: 3553164 - DNA, 25 bp, Homo sapien
tagcgcttcgccaggttatttgcaa

SEQ ID NO: 3553165 - DNA, 25 bp, Homo sapien
ggcagcgggagtcaaggcctaggct

SEQ ID NO: 3553166 - DNA, 25 bp, Homo sapien
aggcagcgggagtcaaggcctaggc

SEQ ID NO: 3553167 - DNA, 25 bp, Homo sapien
gcagcgggagtcaaggcctaggctg

SEQ ID NO: 3553168 - DNA, 25 bp, Homo sapien
cctccaggaaaatgcgcgatcggga

SEQ ID NO: 3553169 - DNA, 25 bp, Homo sapien
aggaaagagtcggcccctagtcgtg

SEQ ID NO: 3553170 - DNA, 25 bp, Homo sapien
aatgtctcgaagtcagtccaggaaa

SEQ ID NO: 3553171 - DNA, 25 bp, Homo sapien
gcgcgatcgggaatgtctcgaagtc

SEQ ID NO: 3553172 - DNA, 25 bp, Homo sapien
cagggagggggttcgagagggcgtg

SEQ ID NO: 3553173 - DNA, 25 bp, Homo sapien
gggttcgagagggcgtggcgggcgc

SEQ ID NO: 3553174 - DNA, 25 bp, Homo sapien
tgaatcggacgctggtcacgtggct

SEQ ID NO: 3553175 - DNA, 25 bp, Homo sapien
tggaagatgctggcgtccttgccgc

SEQ ID NO: 3553176 - DNA, 25 bp, Homo sapien
ttgccgcccagcgagacgaggtgcg

SEQ ID NO: 3553177 - DNA, 25 bp, Homo sapien
cgaggtgcgagtcgtcgtgcgtgaa

SEQ ID NO: 3553178 - DNA, 25 bp, Homo sapien
tgcggtggcggctgagccctcgggc

SEQ ID NO: 3553179 - DNA, 25 bp, Homo sapien
caccccggcgatccccgcggcctca

SEQ ID NO: 3553180 - DNA, 25 bp, Homo sapien
gaagagttgcggtggcggctgagcc

SEQ ID NO: 3553181 - DNA, 25 bp, Homo sapien
tgggccggagggaagagttgcggtg

SEQ ID NO: 3553182 - DNA, 25 bp, Homo sapien
tgtcggtcccatcggagccgtccgg

SEQ ID NO: 3553183 - DNA, 25 bp, Homo sapien
cactttgcagaagtcgtcggccacc

SEQ ID NO: 3553184 - DNA, 25 bp, Homo sapien
cacgcgctcgttgtgggagcggcac

SEQ ID NO: 3553185 - DNA, 25 bp, Homo sapien
cagggagttgatgtcggtcccatcg

SEQ ID NO: 3553186 - DNA, 25 bp, Homo sapien
actgccgcgttccaggcaagccttc

SEQ ID NO: 3553187 - DNA, 25 bp, Homo sapien
agctacaccatttcaggcgctccgg

SEQ ID NO: 3553188 - DNA, 25 bp, Homo sapien
tcaggtttctggactctcacccaac

SEQ ID NO: 3553189 - DNA, 25 bp, Homo sapien
caagcccaaactgggctccaccttg

SEQ ID NO: 3553190 - DNA, 25 bp, Homo sapien
tcccggtctcggctctcatagcgat

SEQ ID NO: 3553191 - DNA, 25 bp, Homo sapien
acacaggtgtaggtagcccattccc

SEQ ID NO: 3553192 - DNA, 25 bp, Homo sapien
tctcatagcgattcttcagctgctt

SEQ ID NO: 3553193 - DNA, 25 bp, Homo sapien
cacacaggtgtaggtagcccattcc

SEQ ID NO: 3553194 - DNA, 25 bp, Homo sapien
ccccatgtcctgctccactgccact

SEQ ID NO: 3553195 - DNA, 25 bp, Homo sapien
cctctccccatgtcctgctccactg

SEQ ID NO: 3553196 - DNA, 25 bp, Homo sapien
catgtcctgctccactgccactcac

SEQ ID NO: 3553197 - DNA, 25 bp, Homo sapien
ctctccccatgtcctgctccactgc

SEQ ID NO: 3553198 - DNA, 25 bp, Homo sapien
agtcaagatgagtgatgaagctgga

SEQ ID NO: 3553199 - DNA, 25 bp, Homo sapien
gatgaaattcccatccttggaccag

SEQ ID NO: 3553200 - DNA, 25 bp, Homo sapien
aatctcatagtccccagaattggac

SEQ ID NO: 3553201 - DNA, 25 bp, Homo sapien
catagtccccagaattggacatgat

SEQ ID NO: 3553202 - DNA, 25 bp, Homo sapien
gcagctgttatcatgccccaccaca

SEQ ID NO: 3553203 - DNA, 25 bp, Homo sapien
gacccctgagtttcgcagctgttat

SEQ ID NO: 3553204 - DNA, 25 bp, Homo sapien
tttaaagtatcccatccatttccca

SEQ ID NO: 3553205 - DNA, 25 bp, Homo sapien
cccttgatgcatcagacccctgagt

SEQ ID NO: 3553206 - DNA, 25 bp, Homo sapien
ttggcaccatcactggaaacactat

SEQ ID NO: 3553207 - DNA, 25 bp, Homo sapien
tacagcggccaaagcggctggattt

SEQ ID NO: 3553208 - DNA, 25 bp, Homo sapien
acgttgtcatgggaaccaatggcca

SEQ ID NO: 3553209 - DNA, 25 bp, Homo sapien
tagatgtagatcacgttgtcatggg

SEQ ID NO: 3553210 - DNA, 25 bp, Homo sapien
ggaagggccagggacgcatgtgagt

SEQ ID NO: 3553211 - DNA, 25 bp, Homo sapien
aagggccagggacgcatgtgagtcc

SEQ ID NO: 3553212 - DNA, 25 bp, Homo sapien
gccagggacgcatgtgagtccaggg

SEQ ID NO: 3553213 - DNA, 25 bp, Homo sapien
gggccagggacgcatgtgagtccag

SEQ ID NO: 3553214 - DNA, 25 bp, Homo sapien
ctgtaccggaccactgagagctgct

SEQ ID NO: 3553215 - DNA, 25 bp, Homo sapien
tgggctgtaccggaccactgagagc

SEQ ID NO: 3553216 - DNA, 25 bp, Homo sapien
ggctgtaccggaccactgagagctg

SEQ ID NO: 3553217 - DNA, 25 bp, Homo sapien
gctcattgccatcaatgacatcaga

SEQ ID NO: 3553218 - DNA, 25 bp, Homo sapien
ataggaagacgaaaaggcaggatgt

SEQ ID NO: 3553219 - DNA, 25 bp, Homo sapien
gaaaggctctgatgtagaagacagg

SEQ ID NO: 3553220 - DNA, 25 bp, Homo sapien
agtggaggcagataggaagacgaaa

SEQ ID NO: 3553221 - DNA, 25 bp, Homo sapien
atgtagaagacaggtcacaactgca

SEQ ID NO: 3553222 - DNA, 25 bp, Homo sapien
ggtagaggtggtcactctcgcccac

SEQ ID NO: 3553223 - DNA, 25 bp, Homo sapien
tctgatgtcgtctgaaaaagtaatc

SEQ ID NO: 3553224 - DNA, 25 bp, Homo sapien
acagaggagtgccaaggcgcaggtg

SEQ ID NO: 3553225 - DNA, 25 bp, Homo sapien
cattcccactgtttctctatcctgg

SEQ ID NO: 3553226 - DNA, 25 bp, Homo sapien
cacaactgccccactcgggtggaag

SEQ ID NO: 3553227 - DNA, 25 bp, Homo sapien
tgttcagtcctacggccacaactgc

SEQ ID NO: 3553228 - DNA, 25 bp, Homo sapien
ctccccgtgttcagtcctacggcca

SEQ ID NO: 3553229 - DNA, 25 bp, Homo sapien
aactgccccactcgggtggaagtca

SEQ ID NO: 3553230 - DNA, 25 bp, Homo sapien
ctgggagaggggagaaggtgaattc

SEQ ID NO: 3553231 - DNA, 25 bp, Homo sapien
gagaggggagaaggtgaattcaaga

SEQ ID NO: 3553232 - DNA, 25 bp, Homo sapien
gggagaggggagaaggtgaattcaa

SEQ ID NO: 3553233 - DNA, 25 bp, Homo sapien
ggagaggggagaaggtgaattcaag

SEQ ID NO: 3553234 - DNA, 25 bp, Homo sapien
gaggtcgatgctccaggccagtgca

SEQ ID NO: 3553235 - DNA, 25 bp, Homo sapien
aggccagtgcatggctctccccatc

SEQ ID NO: 3553236 - DNA, 25 bp, Homo sapien
cttgaggtcgatgctccaggccagt

SEQ ID NO: 3553237 - DNA, 25 bp, Homo sapien
ggcagagctgccggtcgtggccgca

SEQ ID NO: 3553238 - DNA, 25 bp, Homo sapien
tcagcaatgcattcttcgtggttcc

SEQ ID NO: 3553239 - DNA, 25 bp, Homo sapien
gcattcttcgtggttcccaccagca

SEQ ID NO: 3553240 - DNA, 25 bp, Homo sapien
agccaagcccttcagcaatggctcg

SEQ ID NO: 3553241 - DNA, 25 bp, Homo sapien
caatggctcgcacggccccgaagtg

SEQ ID NO: 3553242 - DNA, 25 bp, Homo sapien
agtggtagcagaatgtcaagagccc

SEQ ID NO: 3553243 - DNA, 25 bp, Homo sapien
ggtagcagaatgtcaagagcccact

SEQ ID NO: 3553244 - DNA, 25 bp, Homo sapien
agagtggtagcagaatgtcaagagc

SEQ ID NO: 3553245 - DNA, 25 bp, Homo sapien
tagcagaatgtcaagagcccactga

SEQ ID NO: 3553246 - DNA, 25 bp, Homo sapien
cagcctcctggagggccaccaaccc

SEQ ID NO: 3553247 - DNA, 25 bp, Homo sapien
agcctcctggagggccaccaacccg

SEQ ID NO: 3553248 - DNA, 25 bp, Homo sapien
ctcagcctcctggagggccaccaac

SEQ ID NO: 3553249 - DNA, 25 bp, Homo sapien
tcagcctcctggagggccaccaacc

SEQ ID NO: 3553250 - DNA, 25 bp, Homo sapien
gcgaagatagaaccttcatgagcgt

SEQ ID NO: 3553251 - DNA, 25 bp, Homo sapien
gacacaaggcgaagatagaaccttc

SEQ ID NO: 3553252 - DNA, 25 bp, Homo sapien
cctccggagacacaaggcgaagata

SEQ ID NO: 3553253 - DNA, 25 bp, Homo sapien
tcatgagcgtgagcctgggccacaa

SEQ ID NO: 3553254 - DNA, 25 bp, Homo sapien
cacaaagcaagggataaacttgggt

SEQ ID NO: 3553255 - DNA, 25 bp, Homo sapien
tccagtgagaatgtctccatccgga

SEQ ID NO: 3553256 - DNA, 25 bp, Homo sapien
gtctccatccggaaggaacacaaag

SEQ ID NO: 3553257 - DNA, 25 bp, Homo sapien
ccaggtgagaatgttcccctctgag

SEQ ID NO: 3553258 - DNA, 25 bp, Homo sapien
ggaagggcaaagattaaaagtcgca

SEQ ID NO: 3553259 - DNA, 25 bp, Homo sapien
acagtagaggtcaaagggaagggca

SEQ ID NO: 3553260 - DNA, 25 bp, Homo sapien
ggcaaagattaaaagtcgcagggca

SEQ ID NO: 3553261 - DNA, 25 bp, Homo sapien
gggagagcagacagtagaggtcaaa

SEQ ID NO: 3553262 - DNA, 25 bp, Homo sapien
cggccaggactgagtcatttgtact

SEQ ID NO: 3553263 - DNA, 25 bp, Homo sapien
ttccagaagtggacgtgagatttcc

SEQ ID NO: 3553264 - DNA, 25 bp, Homo sapien
gctgctgtcacgagggttgaagcca

SEQ ID NO: 3553265 - DNA, 25 bp, Homo sapien
aagccaacggccaggactgagtcat

SEQ ID NO: 3553266 - DNA, 25 bp, Homo sapien
catgtgctcattggaatcatccacc

SEQ ID NO: 3553267 - DNA, 25 bp, Homo sapien
cagcatgtgctcattggaatcatcc

SEQ ID NO: 3553268 - DNA, 25 bp, Homo sapien
tctcagccagcttcattccccggct

SEQ ID NO: 3553269 - DNA, 25 bp, Homo sapien
ctgcagtcccacaccgacagcatgt

SEQ ID NO: 3553270 - DNA, 25 bp, Homo sapien
agtttcaacagcgtctctgagtccc

SEQ ID NO: 3553271 - DNA, 25 bp, Homo sapien
tttcaacagcgtctctgagtcccag

SEQ ID NO: 3553272 - DNA, 25 bp, Homo sapien
tgcagtttcaacagcgtctctgagt

SEQ ID NO: 3553273 - DNA, 25 bp, Homo sapien
tcaacagcgtctctgagtcccagat

SEQ ID NO: 3553274 - DNA, 25 bp, Homo sapien
gctgtctgtcccgaggctacccgaa

SEQ ID NO: 3553275 - DNA, 25 bp, Homo sapien
gaggctacccgaacaccatcagggt

SEQ ID NO: 3553276 - DNA, 25 bp, Homo sapien
tgtctgtcccgaggctacccgaaca

SEQ ID NO: 3553277 - DNA, 25 bp, Homo sapien
aacaccatcagggtgaacagcaagg

SEQ ID NO: 3553278 - DNA, 25 bp, Homo sapien
cccagagcgcaacacaaacagatta

SEQ ID NO: 3553279 - DNA, 25 bp, Homo sapien
ttagagcgggagtcacgacccctgt

SEQ ID NO: 3553280 - DNA, 25 bp, Homo sapien
gcaccaccacacaggcgataaagta

SEQ ID NO: 3553281 - DNA, 25 bp, Homo sapien
tgtgtgcccccggtaatgtctctgg

SEQ ID NO: 3553282 - DNA, 25 bp, Homo sapien
tggttctcatgggactggaaggggc

SEQ ID NO: 3553283 - DNA, 25 bp, Homo sapien
ccaaggtgagaaaggtggttctcat

SEQ ID NO: 3553284 - DNA, 25 bp, Homo sapien
aaggtgagaaaggtggttctcatgg

SEQ ID NO: 3553285 - DNA, 25 bp, Homo sapien
gttctcatgggactggaaggggcag

SEQ ID NO: 3553286 - DNA, 25 bp, Homo sapien
ctgcggatgccagacgggatgtaca

SEQ ID NO: 3553287 - DNA, 25 bp, Homo sapien
ctcaaggctgcggatgccagacggg

SEQ ID NO: 3553288 - DNA, 25 bp, Homo sapien
gggtctctggcggtgggccactcgg

SEQ ID NO: 3553289 - DNA, 25 bp, Homo sapien
ccagacgggatgtacatggtaatgg

SEQ ID NO: 3553290 - DNA, 25 bp, Homo sapien
ccaaattgtaattgctcctccgaga

SEQ ID NO: 3553291 - DNA, 25 bp, Homo sapien
caaattgtaattgctcctccgagat

SEQ ID NO: 3553292 - DNA, 25 bp, Homo sapien
ttgtaattgctcctccgagatccag

SEQ ID NO: 3553293 - DNA, 25 bp, Homo sapien
aattgtaattgctcctccgagatcc

SEQ ID NO: 3553294 - DNA, 25 bp, Homo sapien
tgtgctcccggaccgcactaacagg

SEQ ID NO: 3553295 - DNA, 25 bp, Homo sapien
cactaacaggttggcggaggagatt

SEQ ID NO: 3553296 - DNA, 25 bp, Homo sapien
accgcactaacaggttggcggagga

SEQ ID NO: 3553297 - DNA, 25 bp, Homo sapien
tcccggaccgcactaacaggttggc

SEQ ID NO: 3553298 - DNA, 25 bp, Homo sapien
tgaggaggaggaagaatttcttcgc

SEQ ID NO: 3553299 - DNA, 25 bp, Homo sapien
aggaggaggaagaatttcttcgcgg

SEQ ID NO: 3553300 - DNA, 25 bp, Homo sapien
ggaggaggaagaatttcttcgcggc

SEQ ID NO: 3553301 - DNA, 25 bp, Homo sapien
gaggaggaggaagaatttcttcgcg

SEQ ID NO: 3553302 - DNA, 25 bp, Homo sapien
tctgtctccgtctgggtgcctcggc

SEQ ID NO: 3553303 - DNA, 25 bp, Homo sapien
cctccttcagattgggtcccgctag

SEQ ID NO: 3553304 - DNA, 25 bp, Homo sapien
ggtccaggggatgacttgagctcca

SEQ ID NO: 3553305 - DNA, 25 bp, Homo sapien
attgggtcccgctaggctcttcgct

SEQ ID NO: 3553306 - DNA, 25 bp, Homo sapien
ctgccagggctgcctttaccagttc

SEQ ID NO: 3553307 - DNA, 25 bp, Homo sapien
tgcagccgcagcaggcgaagggctt

SEQ ID NO: 3553308 - DNA, 25 bp, Homo sapien
cccgaagccgctggctcagagactg

SEQ ID NO: 3553309 - DNA, 25 bp, Homo sapien
tgcacccgaagccgctggctcagag

SEQ ID NO: 3553310 - DNA, 25 bp, Homo sapien
acccgaagccgctggctcagagact

SEQ ID NO: 3553311 - DNA, 25 bp, Homo sapien
cgaagccgctggctcagagactgga

SEQ ID NO: 3553312 - DNA, 25 bp, Homo sapien
tacatgtgtccggtaggactgcccc

SEQ ID NO: 3553313 - DNA, 25 bp, Homo sapien
cccatcacctgaagaaagcgtagag

SEQ ID NO: 3553314 - DNA, 25 bp, Homo sapien
agcaagctcaggtctccagcgaaag

SEQ ID NO: 3553315 - DNA, 25 bp, Homo sapien
aaatatggagtactgccgaggaacg

SEQ ID NO: 3553316 - DNA, 25 bp, Homo sapien
catccggcccccgggttgctccgag

SEQ ID NO: 3553317 - DNA, 25 bp, Homo sapien
tctgttccaccctagacagggccaa

SEQ ID NO: 3553318 - DNA, 25 bp, Homo sapien
tgcccagccccaataagttacccag

SEQ ID NO: 3553319 - DNA, 25 bp, Homo sapien
tctgtccttctgttccaccctagac

SEQ ID NO: 3553320 - DNA, 25 bp, Homo sapien
ctgaaaagaggtggtagttggggtg

SEQ ID NO: 3553321 - DNA, 25 bp, Homo sapien
tgggcttctctgtccgagtatgcca

SEQ ID NO: 3553322 - DNA, 25 bp, Homo sapien
ttgggcttctctgtccgagtatgcc

SEQ ID NO: 3553323 - DNA, 25 bp, Homo sapien
gggcttctctgtccgagtatgccac

SEQ ID NO: 3553324 - DNA, 25 bp, Homo sapien
cttgggcttctctgtccgagtatgc

SEQ ID NO: 3553325 - DNA, 25 bp, Homo sapien
gaatggattctctaaccctatcgac

SEQ ID NO: 3553326 - DNA, 25 bp, Homo sapien
ctgggtccccgagcctggaatggat

SEQ ID NO: 3553327 - DNA, 25 bp, Homo sapien
gtataggcttcaaagtgtaaagggc

SEQ ID NO: 3553328 - DNA, 25 bp, Homo sapien
ccctatcgacatatacagtataggc

SEQ ID NO: 3553329 - DNA, 25 bp, Homo sapien
ctccaggtccttgggatccacaagg

SEQ ID NO: 3553330 - DNA, 25 bp, Homo sapien
ctcccatgctgtgtggaagcccact

SEQ ID NO: 3553331 - DNA, 25 bp, Homo sapien
acactgagacaccacgggtccagcg

SEQ ID NO: 3553332 - DNA, 25 bp, Homo sapien
agtgcagttggcagcccgtggctcc

SEQ ID NO: 3553333 - DNA, 25 bp, Homo sapien
tgttgtcatcgtcagcaaagtagac

SEQ ID NO: 3553334 - DNA, 25 bp, Homo sapien
taggtgttgtcatcgtcagcaaagt

SEQ ID NO: 3553335 - DNA, 25 bp, Homo sapien
tcatcgtcagcaaagtagacgactc

SEQ ID NO: 3553336 - DNA, 25 bp, Homo sapien
tgtcatcgtcagcaaagtagacgac

SEQ ID NO: 3553337 - DNA, 25 bp, Homo sapien
gggagagatgcagcacaaggaaaag

SEQ ID NO: 3553338 - DNA, 25 bp, Homo sapien
tgcctgtcaacttcatgctaacact

SEQ ID NO: 3553339 - DNA, 25 bp, Homo sapien
actataaattaagggcacagggccg

SEQ ID NO: 3553340 - DNA, 25 bp, Homo sapien
gtggcccttcccaaccaatgcctaa

SEQ ID NO: 3553341 - DNA, 25 bp, Homo sapien
cgaagcaggtggaacacgaagtcag

SEQ ID NO: 3553342 - DNA, 25 bp, Homo sapien
gcacccagcctagatgacagagcga

SEQ ID NO: 3553343 - DNA, 25 bp, Homo sapien
ttgcacccagcctagatgacagagc

SEQ ID NO: 3553344 - DNA, 25 bp, Homo sapien
gccgaagcaggtggaacacgaagtc

SEQ ID NO: 3553345 - DNA, 25 bp, Homo sapien
actgccaagctcaaaatttctttga

SEQ ID NO: 3553346 - DNA, 25 bp, Homo sapien
tattgttctatcttataatttggta

SEQ ID NO: 3553347 - DNA, 25 bp, Homo sapien
gcccagacaagccctttcaacttta

SEQ ID NO: 3553348 - DNA, 25 bp, Homo sapien
ccctaaggagagagagttaattcac

SEQ ID NO: 3553349 - DNA, 25 bp, Homo sapien
tcctgtctttggcatgctctagttt

SEQ ID NO: 3553350 - DNA, 25 bp, Homo sapien
tatttgagtataaatgtggttcatt

SEQ ID NO: 3553351 - DNA, 25 bp, Homo sapien
ggcatgctctagtttgaggaacaac

SEQ ID NO: 3553352 - DNA, 25 bp, Homo sapien
gtataaatgtggttcatttatcctg

SEQ ID NO: 3553353 - DNA, 25 bp, Homo sapien
tggccgtcggagttccgcttgcagc

SEQ ID NO: 3553354 - DNA, 25 bp, Homo sapien
tcagatccttctgccgtagctgctc

SEQ ID NO: 3553355 - DNA, 25 bp, Homo sapien
caacatagatagtaggcagggcctc

SEQ ID NO: 3553356 - DNA, 25 bp, Homo sapien
gttccgcttgcagctgggaaatcct

SEQ ID NO: 3553357 - DNA, 25 bp, Homo sapien
cgcaggggaggaaggcagtcacatg

SEQ ID NO: 3553358 - DNA, 25 bp, Homo sapien
ctgcccgcaggggaggaaggcagtc

SEQ ID NO: 3553359 - DNA, 25 bp, Homo sapien
aggggaggaaggcagtcacatggct

SEQ ID NO: 3553360 - DNA, 25 bp, Homo sapien
gggaggaaggcagtcacatggctgg

SEQ ID NO: 3553361 - DNA, 25 bp, Homo sapien
taaccaatgcaggtatcaccttatg

SEQ ID NO: 3553362 - DNA, 25 bp, Homo sapien
tacctctcgtgtgggaaactcactg

SEQ ID NO: 3553363 - DNA, 25 bp, Homo sapien
gccttctgggcttctaacaagctca

SEQ ID NO: 3553364 - DNA, 25 bp, Homo sapien
tcccaaagggccgtaatcgtctcat

SEQ ID NO: 3553365 - DNA, 25 bp, Homo sapien
taactttagctatggtggtcaggga

SEQ ID NO: 3553366 - DNA, 25 bp, Homo sapien
ggttcgatccattcccttggctagg

SEQ ID NO: 3553367 - DNA, 25 bp, Homo sapien
gaatactcttcctaggaggcactgc

SEQ ID NO: 3553368 - DNA, 25 bp, Homo sapien
aaatacctgaggataacgcagtggc

SEQ ID NO: 3553369 - DNA, 25 bp, Homo sapien
tagaggaggccggcgatcgacacca

SEQ ID NO: 3553370 - DNA, 25 bp, Homo sapien
cagcgcgtagaggaggccggcgatc

SEQ ID NO: 3553371 - DNA, 25 bp, Homo sapien
aagtaggcgagaaacacgttcttca

SEQ ID NO: 3553372 - DNA, 25 bp, Homo sapien
aggaagtaggcgagaaacacgttct

SEQ ID NO: 3553373 - DNA, 25 bp, Homo sapien
gccttcctcgcactcccctaccagc

SEQ ID NO: 3553374 - DNA, 25 bp, Homo sapien
gccagggcacgcttccggtcatctg

SEQ ID NO: 3553375 - DNA, 25 bp, Homo sapien
cctgcgtcccgccttcctcgcactc

SEQ ID NO: 3553376 - DNA, 25 bp, Homo sapien
caaaccccggctcctgtccgcaggc

SEQ ID NO: 3553377 - DNA, 25 bp, Homo sapien
ttctccatcttaagtgcccctcaaa

SEQ ID NO: 3553378 - DNA, 25 bp, Homo sapien
tgtggaaacgtctttctgccgaggg

SEQ ID NO: 3553379 - DNA, 25 bp, Homo sapien
ggaaacgtctttctgccgagggaca

SEQ ID NO: 3553380 - DNA, 25 bp, Homo sapien
tccatcttaagtgcccctcaaaggg

SEQ ID NO: 3553381 - DNA, 25 bp, Homo sapien
aggagccctaactcattgccctcat

SEQ ID NO: 3553382 - DNA, 25 bp, Homo sapien
gagagcaatctggtgggagggaagg

SEQ ID NO: 3553383 - DNA, 25 bp, Homo sapien
ggaaaaggagccctaactcattgcc

SEQ ID NO: 3553384 - DNA, 25 bp, Homo sapien
aagtggcatcaacatacaagaggca

SEQ ID NO: 3553385 - DNA, 25 bp, Homo sapien
ggtgttcgtaagtgaatgtgctcca

SEQ ID NO: 3553386 - DNA, 25 bp, Homo sapien
tccagttagagcaacaggatgttgg

SEQ ID NO: 3553387 - DNA, 25 bp, Homo sapien
tctgggtcttagactagcataagtg

SEQ ID NO: 3553388 - DNA, 25 bp, Homo sapien
gggccgaactccaaggcagaagaaa

SEQ ID NO: 3553389 - DNA, 25 bp, Homo sapien
caacacagaggtctcagggtcatgc

SEQ ID NO: 3553390 - DNA, 25 bp, Homo sapien
cacattgatgccaggcttgcgcagg

SEQ ID NO: 3553391 - DNA, 25 bp, Homo sapien
cgcaggtgaatactccaatcagatg

SEQ ID NO: 3553392 - DNA, 25 bp, Homo sapien
aaggacaggcggctttctggagatc

SEQ ID NO: 3553393 - DNA, 25 bp, Homo sapien
tcaatccagattggtgtctcaaagt

SEQ ID NO: 3553394 - DNA, 25 bp, Homo sapien
gtctcaaagtgtccttcagggtctg

SEQ ID NO: 3553395 - DNA, 25 bp, Homo sapien
gctttccagcccctattatcaccac

SEQ ID NO: 3553396 - DNA, 25 bp, Homo sapien
accacccgctcaatccagattggtg

SEQ ID NO: 3553397 - DNA, 25 bp, Homo sapien
ccagagaatgagaatcgacgcagca

SEQ ID NO: 3553398 - DNA, 25 bp, Homo sapien
gagaatcgacgcagcaggaactctt

SEQ ID NO: 3553399 - DNA, 25 bp, Homo sapien
gaacgtgtgcccatcatccagaaag

SEQ ID NO: 3553400 - DNA, 25 bp, Homo sapien
ggaactcttggcgagtctgatagtt

SEQ ID NO: 3553401 - DNA, 25 bp, Homo sapien
tcatacattctgaagaccgccgcac

SEQ ID NO: 3553402 - DNA, 25 bp, Homo sapien
gatggggtcatccttcatacattct

SEQ ID NO: 3553403 - DNA, 25 bp, Homo sapien
gcactcgcatccatcgaggcacgat

SEQ ID NO: 3553404 - DNA, 25 bp, Homo sapien
gcacgattgtccctccacgctggaa

SEQ ID NO: 3553405 - DNA, 25 bp, Homo sapien
ccttgtccaaccttgggccccacag

SEQ ID NO: 3553406 - DNA, 25 bp, Homo sapien
atgaagttgcccccttgtccaacct

SEQ ID NO: 3553407 - DNA, 25 bp, Homo sapien
ccaggatgaagttgcccccttgtcc

SEQ ID NO: 3553408 - DNA, 25 bp, Homo sapien
ggatgaagttgcccccttgtccaac

SEQ ID NO: 3553409 - DNA, 25 bp, Homo sapien
ggtctggggaccatgatgcttctgg

SEQ ID NO: 3553410 - DNA, 25 bp, Homo sapien
atgcttctggtagctttgaatgtca

SEQ ID NO: 3553411 - DNA, 25 bp, Homo sapien
tagagttacaggcaggtacagggtc

SEQ ID NO: 3553412 - DNA, 25 bp, Homo sapien
ggtagctttgaatgtcataccacac

SEQ ID NO: 3553413 - DNA, 25 bp, Homo sapien
tccccttggccaggcagatagacct

SEQ ID NO: 3553414 - DNA, 25 bp, Homo sapien
gatacagggtgaaccagcaacgcat

SEQ ID NO: 3553415 - DNA, 25 bp, Homo sapien
ccaggcagatagacctggacaccat

SEQ ID NO: 3553416 - DNA, 25 bp, Homo sapien
gctccagagtctgatacagggtgaa

SEQ ID NO: 3553417 - DNA, 25 bp, Homo sapien
tactgatcatctatattgaaggtag

SEQ ID NO: 3553418 - DNA, 25 bp, Homo sapien
caagtactgatcatctatattgaag

SEQ ID NO: 3553419 - DNA, 25 bp, Homo sapien
agtactgatcatctatattgaaggt

SEQ ID NO: 3553420 - DNA, 25 bp, Homo sapien
caagcaagtactgatcatctatatt

SEQ ID NO: 3553421 - DNA, 25 bp, Homo sapien
agcaaagaatatcgctggcccaagg

SEQ ID NO: 3553422 - DNA, 25 bp, Homo sapien
catgtgcccggaagaatggctggta

SEQ ID NO: 3553423 - DNA, 25 bp, Homo sapien
tctcgtcgcccagtgtccaagtggg

SEQ ID NO: 3553424 - DNA, 25 bp, Homo sapien
tggctggtaagcacccatctggtac

SEQ ID NO: 3553425 - DNA, 25 bp, Homo sapien
aatggtcccactcggcagtgttgtc

SEQ ID NO: 3553426 - DNA, 25 bp, Homo sapien
tcggcagtgttgtcccctgtccaca

SEQ ID NO: 3553427 - DNA, 25 bp, Homo sapien
gagacacataggaatagagatcttc

SEQ ID NO: 3553428 - DNA, 25 bp, Homo sapien
gaatagagatcttcaaatggtccca

SEQ ID NO: 3553429 - DNA, 25 bp, Homo sapien
ccaggacaaaggggcgttccatgcc

SEQ ID NO: 3553430 - DNA, 25 bp, Homo sapien
caaagcgctgggagccagcgaagaa

SEQ ID NO: 3553431 - DNA, 25 bp, Homo sapien
gttccatgcccccagagcgctgtct

SEQ ID NO: 3553432 - DNA, 25 bp, Homo sapien
agcgctgtctcagcccatcagcagt

SEQ ID NO: 3553433 - DNA, 25 bp, Homo sapien
tgagcatggtgacctcaggaccatt

SEQ ID NO: 3553434 - DNA, 25 bp, Homo sapien
tgttatgcacatcccggtgctccca

SEQ ID NO: 3553435 - DNA, 25 bp, Homo sapien
gatggttcgttcatgtcattccaga

SEQ ID NO: 3553436 - DNA, 25 bp, Homo sapien
ttccagacaaagaggttgggagctg

SEQ ID NO: 3553437 - DNA, 25 bp, Homo sapien
gattagtgaagtcagggtaaccagc

SEQ ID NO: 3553438 - DNA, 25 bp, Homo sapien
caccaggccctcatcgtgggattag

SEQ ID NO: 3553439 - DNA, 25 bp, Homo sapien
tagctgaacatgttagcccaccagg

SEQ ID NO: 3553440 - DNA, 25 bp, Homo sapien
tcatagctgaacatgttagcccacc

SEQ ID NO: 3553441 - DNA, 25 bp, Homo sapien
tcggtagccggagtccaccttgatg

SEQ ID NO: 3553442 - DNA, 25 bp, Homo sapien
ccgcagctcctcgtgaactcggtag

SEQ ID NO: 3553443 - DNA, 25 bp, Homo sapien
atgtgggggtctacgatggccacca

SEQ ID NO: 3553444 - DNA, 25 bp, Homo sapien
gagccatcccgggttttaacataca

SEQ ID NO: 3553445 - DNA, 25 bp, Homo sapien
gaccaagcgtgactgcaacccctta

SEQ ID NO: 3553446 - DNA, 25 bp, Homo sapien
taccctgagaagaccaagcgtgact

SEQ ID NO: 3553447 - DNA, 25 bp, Homo sapien
tcagccctaccctgagaagaccaag

SEQ ID NO: 3553448 - DNA, 25 bp, Homo sapien
taaactatgcttcagccctaccctg

SEQ ID NO: 3553449 - DNA, 25 bp, Homo sapien
cacagggcaggttgtgatcatcaaa

SEQ ID NO: 3553450 - DNA, 25 bp, Homo sapien
tagttccaacggctctggtggtagc

SEQ ID NO: 3553451 - DNA, 25 bp, Homo sapien
ggtgaaataccgcttgccatcagca

SEQ ID NO: 3553452 - DNA, 25 bp, Homo sapien
aagccaagcgctcaagcatggtgcg

SEQ ID NO: 3553453 - DNA, 25 bp, Homo sapien
caggaagacgtcaatgatgccagtc

SEQ ID NO: 3553454 - DNA, 25 bp, Homo sapien
gactagcatattgccggaaaacatc

SEQ ID NO: 3553455 - DNA, 25 bp, Homo sapien
catccagcgaacatctgtctgtggg

SEQ ID NO: 3553456 - DNA, 25 bp, Homo sapien
gagccctgcaggtagtccatcatct

SEQ ID NO: 3553457 - DNA, 25 bp, Homo sapien
gagtacctagcacgtaacacactga

SEQ ID NO: 3553458 - DNA, 25 bp, Homo sapien
tgcctcaaggcctggaagcttcact

SEQ ID NO: 3553459 - DNA, 25 bp, Homo sapien
cacctgggagtgattagggaactca

SEQ ID NO: 3553460 - DNA, 25 bp, Homo sapien
gataataagtgcattccgtcagccc

SEQ ID NO: 3553461 - DNA, 25 bp, Homo sapien
cccggcagtgttggaagatatatca

SEQ ID NO: 3553462 - DNA, 25 bp, Homo sapien
cagaagatgcccaagtcgcgatgag

SEQ ID NO: 3553463 - DNA, 25 bp, Homo sapien
caaggccattgggttgtacagctca

SEQ ID NO: 3553464 - DNA, 25 bp, Homo sapien
catccaaattgtagaggcgatatgg

SEQ ID NO: 3553465 - DNA, 25 bp, Homo sapien
gagaagtccaaacccacagacatgg

SEQ ID NO: 3553466 - DNA, 25 bp, Homo sapien
agggatcccatagacatgctccatg

SEQ ID NO: 3553467 - DNA, 25 bp, Homo sapien
cctcaggttgtctgcatgctcaggg

SEQ ID NO: 3553468 - DNA, 25 bp, Homo sapien
cttcagcctcaggttgtctgcatgc

SEQ ID NO: 3553469 - DNA, 25 bp, Homo sapien
gctgtcagagtgagttttgaatgtc

SEQ ID NO: 3553470 - DNA, 25 bp, Homo sapien
aggctcctggctcatctttctctgc

SEQ ID NO: 3553471 - DNA, 25 bp, Homo sapien
catacggcttgctgtcagagtgagt

SEQ ID NO: 3553472 - DNA, 25 bp, Homo sapien
tacggcttgctgtcagagtgagttt

SEQ ID NO: 3553473 - DNA, 25 bp, Homo sapien
cttgtcgccatccctgggtgtttcc

SEQ ID NO: 3553474 - DNA, 25 bp, Homo sapien
ttgtcgccatccctgggtgtttcct

SEQ ID NO: 3553475 - DNA, 25 bp, Homo sapien
ggtaggagagctgtctgctccaatc

SEQ ID NO: 3553476 - DNA, 25 bp, Homo sapien
aaggtaggagagctgtctgctccaa

SEQ ID NO: 3553477 - DNA, 25 bp, Homo sapien
taggagagctgtctgctccaatcca

SEQ ID NO: 3553478 - DNA, 25 bp, Homo sapien
ggagagctgtctgctccaatccaga

SEQ ID NO: 3553479 - DNA, 25 bp, Homo sapien
cgtgagattaaccttatccgagaaa

SEQ ID NO: 3553480 - DNA, 25 bp, Homo sapien
ccaagcgtgagattaaccttatccg

SEQ ID NO: 3553481 - DNA, 25 bp, Homo sapien
ttatcccatatgctaccaagcgtga

SEQ ID NO: 3553482 - DNA, 25 bp, Homo sapien
gaaaaggttcttgatcttatcccat

SEQ ID NO: 3553483 - DNA, 25 bp, Homo sapien
caaaagacttcggtcctctagtagg

SEQ ID NO: 3553484 - DNA, 25 bp, Homo sapien
gagtcctcgggcattgacactaagc

SEQ ID NO: 3553485 - DNA, 25 bp, Homo sapien
tggccgtgctgtcaagatgatcttg

SEQ ID NO: 3553486 - DNA, 25 bp, Homo sapien
tctagtaggtcaaggcggaatggcc

SEQ ID NO: 3553487 - DNA, 25 bp, Homo sapien
attaataatagggaaggctggccgg

SEQ ID NO: 3553488 - DNA, 25 bp, Homo sapien
caacagaaggtaaaagactgataca

SEQ ID NO: 3553489 - DNA, 25 bp, Homo sapien
tttatcagtctagagggccctaagg

SEQ ID NO: 3553490 - DNA, 25 bp, Homo sapien
taacatatcctggatgaaatcctgg

SEQ ID NO: 3553491 - DNA, 25 bp, Homo sapien
ctggagaacgagatctgtaaataaa

SEQ ID NO: 3553492 - DNA, 25 bp, Homo sapien
gtttatttctgcttatataaccagc

SEQ ID NO: 3553493 - DNA, 25 bp, Homo sapien
gagtatggcaaggtgctatgctagt

SEQ ID NO: 3553494 - DNA, 25 bp, Homo sapien
caaacaagcaagcaggtagacattg

SEQ ID NO: 3553495 - DNA, 25 bp, Homo sapien
gctcatcaatcctgaaccgagtcat

SEQ ID NO: 3553496 - DNA, 25 bp, Homo sapien
gtggatcagccaccaaaacatctgg

SEQ ID NO: 3553497 - DNA, 25 bp, Homo sapien
cgggctattggtggatcagccacca

SEQ ID NO: 3553498 - DNA, 25 bp, Homo sapien
tctggtacacggtatcggggtcgcc

SEQ ID NO: 3553499 - DNA, 25 bp, Homo sapien
gttcttttgaagcccctgaagctct

SEQ ID NO: 3553500 - DNA, 25 bp, Homo sapien
tgaagcccctgaagctctagcacca

SEQ ID NO: 3553501 - DNA, 25 bp, Homo sapien
cttttgaagcccctgaagctctagc

SEQ ID NO: 3553502 - DNA, 25 bp, Homo sapien
tttgaagcccctgaagctctagcac

SEQ ID NO: 3553503 - DNA, 25 bp, Homo sapien
tgacctcatggatcagatggaccgt

SEQ ID NO: 3553504 - DNA, 25 bp, Homo sapien
ggcctggccgtatgcttctctgtcg

SEQ ID NO: 3553505 - DNA, 25 bp, Homo sapien
ggaccaagctgtagagagtccagca

SEQ ID NO: 3553506 - DNA, 25 bp, Homo sapien
accgtgagggaatcaggaccaagct

SEQ ID NO: 3553507 - DNA, 25 bp, Homo sapien
gcttctatccacagcaagggtaatc

SEQ ID NO: 3553508 - DNA, 25 bp, Homo sapien
caggcagacccctaaaaaagccagt

SEQ ID NO: 3553509 - DNA, 25 bp, Homo sapien
cttaaagttgcttctatccacagca

SEQ ID NO: 3553510 - DNA, 25 bp, Homo sapien
tccacagcaagggtaatccccaggc

SEQ ID NO: 3553511 - DNA, 25 bp, Homo sapien
cagtttttaacaatatcagtgacct

SEQ ID NO: 3553512 - DNA, 25 bp, Homo sapien
gagcgtggaccaagccattcgatta

SEQ ID NO: 3553513 - DNA, 25 bp, Homo sapien
aggattcggagctctacagggtaga

SEQ ID NO: 3553514 - DNA, 25 bp, Homo sapien
tggtgctcacgtgaagacaagggca

SEQ ID NO: 3553515 - DNA, 25 bp, Homo sapien
tagtacaggcttaactgctggcccg

SEQ ID NO: 3553516 - DNA, 25 bp, Homo sapien
gcctcctacgcgccgccactgccgc

SEQ ID NO: 3553517 - DNA, 25 bp, Homo sapien
cagagtttgctccttgaccccaaac

SEQ ID NO: 3553518 - DNA, 25 bp, Homo sapien
cttgtgcagagtttgctccttgacc

SEQ ID NO: 3553519 - DNA, 25 bp, Homo sapien
gcagagtttgctccttgaccccaaa

SEQ ID NO: 3553520 - DNA, 25 bp, Homo sapien
gtgcagagtttgctccttgacccca

SEQ ID NO: 3553521 - DNA, 25 bp, Homo sapien
ccaggcgctgtcagactttgcacgc

SEQ ID NO: 3553522 - DNA, 25 bp, Homo sapien
cacgctctcagcatgacagaagcac

SEQ ID NO: 3553523 - DNA, 25 bp, Homo sapien
gactttgcacgctctcagcatgaca

SEQ ID NO: 3553524 - DNA, 25 bp, Homo sapien
tgtcagactttgcacgctctcagca

SEQ ID NO: 3553525 - DNA, 25 bp, Homo sapien
agcgctctttagaccaaggacttag

SEQ ID NO: 3553526 - DNA, 25 bp, Homo sapien
cctccacccttccggagcacgttag

SEQ ID NO: 3553527 - DNA, 25 bp, Homo sapien
gacagcgctctttagaccaaggact

SEQ ID NO: 3553528 - DNA, 25 bp, Homo sapien
tccacccttccggagcacgttagtc

SEQ ID NO: 3553529 - DNA, 25 bp, Homo sapien
cagagaaaagacctaggcggtcgat

SEQ ID NO: 3553530 - DNA, 25 bp, Homo sapien
tgttgcggtggaggacactgtgcag

SEQ ID NO: 3553531 - DNA, 25 bp, Homo sapien
tggacggtgaaggtgcctggaaacg

SEQ ID NO: 3553532 - DNA, 25 bp, Homo sapien
gaagtcccgaatgaagcgaccccgc

SEQ ID NO: 3553533 - DNA, 25 bp, Homo sapien
gaacagaggtatccagcaaggcatc

SEQ ID NO: 3553534 - DNA, 25 bp, Homo sapien
tacaactgaggcaatcttgggcacc

SEQ ID NO: 3553535 - DNA, 25 bp, Homo sapien
tttgagcgcatctaaaaagggcacc

SEQ ID NO: 3553536 - DNA, 25 bp, Homo sapien
tcatgcatattacccagggccggag

SEQ ID NO: 3553537 - DNA, 25 bp, Homo sapien
gtgggcccggacactctcatcaaag

SEQ ID NO: 3553538 - DNA, 25 bp, Homo sapien
cagcgagcatgttcccgggctgaga

SEQ ID NO: 3553539 - DNA, 25 bp, Homo sapien
tctacgccagtcagaaaagccttga

SEQ ID NO: 3553540 - DNA, 25 bp, Homo sapien
tctcaagtggtcaagcacagcagcc

SEQ ID NO: 3553541 - DNA, 25 bp, Homo sapien
agaatctgagaaccctgacgtgagt

SEQ ID NO: 3553542 - DNA, 25 bp, Homo sapien
caagaatctgagaaccctgacgtga

SEQ ID NO: 3553543 - DNA, 25 bp, Homo sapien
tctcgaggtaggatccgggtttcta

SEQ ID NO: 3553544 - DNA, 25 bp, Homo sapien
ctgacgtgagttctcgaggtaggat

SEQ ID NO: 3553545 - DNA, 25 bp, Homo sapien
ctgagaggcgcgggaccgtgggtgg

SEQ ID NO: 3553546 - DNA, 25 bp, Homo sapien
tgagaggcgcgggaccgtgggtggc

SEQ ID NO: 3553547 - DNA, 25 bp, Homo sapien
gagaggcgcgggaccgtgggtggcc

SEQ ID NO: 3553548 - DNA, 25 bp, Homo sapien
agaggcgcgggaccgtgggtggccg

SEQ ID NO: 3553549 - DNA, 25 bp, Homo sapien
gcccgaggcgcgagcggcggagcgc

SEQ ID NO: 3553550 - DNA, 25 bp, Homo sapien
agccgagcccgaggcgcgagcggcg

SEQ ID NO: 3553551 - DNA, 25 bp, Homo sapien
agcccgaggcgcgagcggcggagcg

SEQ ID NO: 3553552 - DNA, 25 bp, Homo sapien
cgagcccgaggcgcgagcggcggag

SEQ ID NO: 3553553 - DNA, 25 bp, Homo sapien
agttgactgctagagaggcccttct

SEQ ID NO: 3553554 - DNA, 25 bp, Homo sapien
tcagtaggccattaggtaggaggaa

SEQ ID NO: 3553555 - DNA, 25 bp, Homo sapien
taggaggaaatctggagagtgaaaa

SEQ ID NO: 3553556 - DNA, 25 bp, Homo sapien
gctagggctttattacaaatggagt

SEQ ID NO: 3553557 - DNA, 25 bp, Homo sapien
cttcatttctacatcctggggggct

SEQ ID NO: 3553558 - DNA, 25 bp, Homo sapien
tagctctcatcttcaaggtccttca

SEQ ID NO: 3553559 - DNA, 25 bp, Homo sapien
cttcttttgccttttgagctgtggt

SEQ ID NO: 3553560 - DNA, 25 bp, Homo sapien
catcttcaaggtccttcatttctac

SEQ ID NO: 3553561 - DNA, 25 bp, Homo sapien
agtcctggctggctttgaaggggct

SEQ ID NO: 3553562 - DNA, 25 bp, Homo sapien
ctggctggctttgaaggggcttcca

SEQ ID NO: 3553563 - DNA, 25 bp, Homo sapien
tcctggctggctttgaaggggcttc

SEQ ID NO: 3553564 - DNA, 25 bp, Homo sapien
ctagtcctggctggctttgaagggg

SEQ ID NO: 3553565 - DNA, 25 bp, Homo sapien
ataaatccaggattcccctcaccca

SEQ ID NO: 3553566 - DNA, 25 bp, Homo sapien
tccaggattcccctcacccacctct

SEQ ID NO: 3553567 - DNA, 25 bp, Homo sapien
caaataaatccaggattcccctcac

SEQ ID NO: 3553568 - DNA, 25 bp, Homo sapien
taaatccaggattcccctcacccac

SEQ ID NO: 3553569 - DNA, 25 bp, Homo sapien
tctttctgggcaagccggatctgct

SEQ ID NO: 3553570 - DNA, 25 bp, Homo sapien
gctggaggagttttctgcgcttctt

SEQ ID NO: 3553571 - DNA, 25 bp, Homo sapien
ccctgacagtgtaatgttggcacgt

SEQ ID NO: 3553572 - DNA, 25 bp, Homo sapien
gcgcttcttccctgacagtgtaatg

SEQ ID NO: 3553573 - DNA, 25 bp, Homo sapien
cccgccggcgtttgaacagcttctt

SEQ ID NO: 3553574 - DNA, 25 bp, Homo sapien
cggtgcctcagacgccgctcccgat

SEQ ID NO: 3553575 - DNA, 25 bp, Homo sapien
tcagacgccgctcccgattcaacac

SEQ ID NO: 3553576 - DNA, 25 bp, Homo sapien
gattcaacacccgccggcgtttgaa

SEQ ID NO: 3553577 - DNA, 25 bp, Homo sapien
gagaaagatgcgaatcagatggagt

SEQ ID NO: 3553578 - DNA, 25 bp, Homo sapien
tcactgatcccatctcgtgcgagat

SEQ ID NO: 3553579 - DNA, 25 bp, Homo sapien
tctcgtgcgagataaaagggctcag

SEQ ID NO: 3553580 - DNA, 25 bp, Homo sapien
gcttgaggaaacaaagtcgcggccc

SEQ ID NO: 3553581 - DNA, 25 bp, Homo sapien
ttgatctttccccccggagctccca

SEQ ID NO: 3553582 - DNA, 25 bp, Homo sapien
tgatctttccccccggagctcccat

SEQ ID NO: 3553583 - DNA, 25 bp, Homo sapien
cagatggccgcgctgcgtcgaatgc

SEQ ID NO: 3553584 - DNA, 25 bp, Homo sapien
tgcgtcgaatgctccacttgccgag

SEQ ID NO: 3553585 - DNA, 25 bp, Homo sapien
gcgctgcgtcgaatgctccacttgc

SEQ ID NO: 3553586 - DNA, 25 bp, Homo sapien
acttgccgagcctgatgatggggac

SEQ ID NO: 3553587 - DNA, 25 bp, Homo sapien
ggcaggagatgggaatattccacaa

SEQ ID NO: 3553588 - DNA, 25 bp, Homo sapien
tacaaacacgggagcctgttgagtc

SEQ ID NO: 3553589 - DNA, 25 bp, Homo sapien
cacttctacaaacacgggagcctgt

SEQ ID NO: 3553590 - DNA, 25 bp, Homo sapien
cacgggagcctgttgagtcccagaa

SEQ ID NO: 3553591 - DNA, 25 bp, Homo sapien
cttaaaggacttctagggtcctgtg

SEQ ID NO: 3553592 - DNA, 25 bp, Homo sapien
aggacttctagggtcctgtgggctc

SEQ ID NO: 3553593 - DNA, 25 bp, Homo sapien
cagcgttaaatgttcttaaaggact

SEQ ID NO: 3553594 - DNA, 25 bp, Homo sapien
ccagctgagtccagcgttaaatgtt

SEQ ID NO: 3553595 - DNA, 25 bp, Homo sapien
actggattccaccacaatagacggc

SEQ ID NO: 3553596 - DNA, 25 bp, Homo sapien
tccaccacaatagacggcagatggg

SEQ ID NO: 3553597 - DNA, 25 bp, Homo sapien
tcctcatggggcaaatggagatccc

SEQ ID NO: 3553598 - DNA, 25 bp, Homo sapien
aaatggagatccccactctcttcat

SEQ ID NO: 3553599 - DNA, 25 bp, Homo sapien
gaatagggacagcagggaggttggg

SEQ ID NO: 3553600 - DNA, 25 bp, Homo sapien
tagggacagcagggaggttgggcca

SEQ ID NO: 3553601 - DNA, 25 bp, Homo sapien
gggacagcagggaggttgggccaaa

SEQ ID NO: 3553602 - DNA, 25 bp, Homo sapien
ctgaatagggacagcagggaggttg

SEQ ID NO: 3553603 - DNA, 25 bp, Homo sapien
tggagggtaagccagctgccagaca

SEQ ID NO: 3553604 - DNA, 25 bp, Homo sapien
ctggagggtaagccagctgccagac

SEQ ID NO: 3553605 - DNA, 25 bp, Homo sapien
agacacaggctgaggaagtactaac

SEQ ID NO: 3553606 - DNA, 25 bp, Homo sapien
ctgccagacacaggctgaggaagta

SEQ ID NO: 3553607 - DNA, 25 bp, Homo sapien
gcctgggctatttctagtccaaagc

SEQ ID NO: 3553608 - DNA, 25 bp, Homo sapien
tatttctagtccaaagcccatcctc

SEQ ID NO: 3553609 - DNA, 25 bp, Homo sapien
cctctgtcccagagagggttgggca

SEQ ID NO: 3553610 - DNA, 25 bp, Homo sapien
ttcctctgtcccagagagggttggg

SEQ ID NO: 3553611 - DNA, 25 bp, Homo sapien
tgcaagatgattgaactcagaggag

SEQ ID NO: 3553612 - DNA, 25 bp, Homo sapien
gcaccgactgtgctaagcgattata

SEQ ID NO: 3553613 - DNA, 25 bp, Homo sapien
tctttggagcctggccccttaagca

SEQ ID NO: 3553614 - DNA, 25 bp, Homo sapien
agtgcaccccacaaactgttccttt

SEQ ID NO: 3553615 - DNA, 25 bp, Homo sapien
cacctggattaaagccctgtgggcc

SEQ ID NO: 3553616 - DNA, 25 bp, Homo sapien
taccaagtgtgtaccatgacgagaa

SEQ ID NO: 3553617 - DNA, 25 bp, Homo sapien
cctgtgggccaagagttgtgataac

SEQ ID NO: 3553618 - DNA, 25 bp, Homo sapien
cagtatgttacacgaatccagcctt

SEQ ID NO: 3553619 - DNA, 25 bp, Homo sapien
tccaaccagtatacttgactttgag

SEQ ID NO: 3553620 - DNA, 25 bp, Homo sapien
ttgactttgagtgtttgttccagag

SEQ ID NO: 3553621 - DNA, 25 bp, Homo sapien
gatgccctccatgcgctgtgttgaa

SEQ ID NO: 3553622 - DNA, 25 bp, Homo sapien
ctgtgttgaaaacgcgcgggtgact

SEQ ID NO: 3553623 - DNA, 25 bp, Homo sapien
ctagcaatcccaccccggaattgag

SEQ ID NO: 3553624 - DNA, 25 bp, Homo sapien
ctactgatcgggaaacgtcggaaga

SEQ ID NO: 3553625 - DNA, 25 bp, Homo sapien
aaatgggcaatcataaaacccacgg

SEQ ID NO: 3553626 - DNA, 25 bp, Homo sapien
ccaccccggaattgaggacacaggg

SEQ ID NO: 3553627 - DNA, 25 bp, Homo sapien
tagccggccgcttatctatggtttc

SEQ ID NO: 3553628 - DNA, 25 bp, Homo sapien
gatctcagtcgcaatgctgggcgca

SEQ ID NO: 3553629 - DNA, 25 bp, Homo sapien
tccttgcggaaaatgctgatctcag

SEQ ID NO: 3553630 - DNA, 25 bp, Homo sapien
tcgttatcgtgaccccgggagagcg

SEQ ID NO: 3553631 - DNA, 25 bp, Homo sapien
caatgcttagagacgcgtggtcggt

SEQ ID NO: 3553632 - DNA, 25 bp, Homo sapien
cagaagaggctgatcccgataggta

SEQ ID NO: 3553633 - DNA, 25 bp, Homo sapien
tgactgctttaaggtccgcaaggcg

SEQ ID NO: 3553634 - DNA, 25 bp, Homo sapien
cgcaggaatccgaggcagcctttct

SEQ ID NO: 3553635 - DNA, 25 bp, Homo sapien
cacgcccggctgatattagtagttt

SEQ ID NO: 3553636 - DNA, 25 bp, Homo sapien
acgcccggctgatattagtagtttt

SEQ ID NO: 3553637 - DNA, 25 bp, Homo sapien
gaactcagggtctatttattaggaa

SEQ ID NO: 3553638 - DNA, 25 bp, Homo sapien
cagaactcagggtctatttattagg

SEQ ID NO: 3553639 - DNA, 25 bp, Homo sapien
ctcagggtctatttattaggaagga

SEQ ID NO: 3553640 - DNA, 25 bp, Homo sapien
gtgctttatcaaagatgaaggggtc

SEQ ID NO: 3553641 - DNA, 25 bp, Homo sapien
tttcttggccacaatgagaacagca

SEQ ID NO: 3553642 - DNA, 25 bp, Homo sapien
cttggccacaatgagaacagcagaa

SEQ ID NO: 3553643 - DNA, 25 bp, Homo sapien
catttcttggccacaatgagaacag

SEQ ID NO: 3553644 - DNA, 25 bp, Homo sapien
aatgagaacagcagaaggcacgagt

SEQ ID NO: 3553645 - DNA, 25 bp, Homo sapien
cttgaaccacaaggatacttggttt

SEQ ID NO: 3553646 - DNA, 25 bp, Homo sapien
accacaaggatacttggtttttgct

SEQ ID NO: 3553647 - DNA, 25 bp, Homo sapien
aggcttgaaccacaaggatacttgg

SEQ ID NO: 3553648 - DNA, 25 bp, Homo sapien
ccacaaggatacttggtttttgctc

SEQ ID NO: 3553649 - DNA, 25 bp, Homo sapien
cccagtttctagtcctggtttctag

SEQ ID NO: 3553650 - DNA, 25 bp, Homo sapien
tttctagtcctggtttctagtcttg

SEQ ID NO: 3553651 - DNA, 25 bp, Homo sapien
tttcctaggcatgcctccctactcc

SEQ ID NO: 3553652 - DNA, 25 bp, Homo sapien
ccctccttttcctaggcatgcctcc

SEQ ID NO: 3553653 - DNA, 25 bp, Homo sapien
ctgagaaggcccgtctggggaagcc

SEQ ID NO: 3553654 - DNA, 25 bp, Homo sapien
ctgagcaattgcacagggtcctggc

SEQ ID NO: 3553655 - DNA, 25 bp, Homo sapien
gttcctccccacggtggagctccac

SEQ ID NO: 3553656 - DNA, 25 bp, Homo sapien
gccactgagcaattgcacagggtcc

SEQ ID NO: 3553657 - DNA, 25 bp, Homo sapien
cgggcccggaacgtctgggtcagtg

SEQ ID NO: 3553658 - DNA, 25 bp, Homo sapien
gaacgtctgggtcagtgaggtccca

SEQ ID NO: 3553659 - DNA, 25 bp, Homo sapien
tctgggtcagtgaggtcccatctgg

SEQ ID NO: 3553660 - DNA, 25 bp, Homo sapien
cgtctgggtcagtgaggtcccatct

SEQ ID NO: 3553661 - DNA, 25 bp, Homo sapien
ctgggcaccttaacacggaacaaag

SEQ ID NO: 3553662 - DNA, 25 bp, Homo sapien
tactaagtgcggatgagagactccc

SEQ ID NO: 3553663 - DNA, 25 bp, Homo sapien
gagatttggcaaagggcacgttaac

SEQ ID NO: 3553664 - DNA, 25 bp, Homo sapien
gatactcagtattgtgggcatcaaa

SEQ ID NO: 3553665 - DNA, 25 bp, Homo sapien
tactcccgcttggtgggaggctcct

SEQ ID NO: 3553666 - DNA, 25 bp, Homo sapien
ctgtatgcgacactggtcatactcc

SEQ ID NO: 3553667 - DNA, 25 bp, Homo sapien
atactcccgcttggtgggaggctcc

SEQ ID NO: 3553668 - DNA, 25 bp, Homo sapien
tatgcgacactggtcatactcccgc

SEQ ID NO: 3553669 - DNA, 25 bp, Homo sapien
ggtgccactgggggtggctgagagc

SEQ ID NO: 3553670 - DNA, 25 bp, Homo sapien
gagaagagggaacaggacctggctc

SEQ ID NO: 3553671 - DNA, 25 bp, Homo sapien
caggacctggctctggtgccactgg

SEQ ID NO: 3553672 - DNA, 25 bp, Homo sapien
gggtggctgagagcccacactgcca

SEQ ID NO: 3553673 - DNA, 25 bp, Homo sapien
gaaacagatcatataagcccatgct

SEQ ID NO: 3553674 - DNA, 25 bp, Homo sapien
tgaagctggaaaagatttactaacc

SEQ ID NO: 3553675 - DNA, 25 bp, Homo sapien
aaacagtcaatcaggtactcaccca

SEQ ID NO: 3553676 - DNA, 25 bp, Homo sapien
tccattacccgtggcgtcttctcag

SEQ ID NO: 3553677 - DNA, 25 bp, Homo sapien
tgtccctctcgatcttttctctaac

SEQ ID NO: 3553678 - DNA, 25 bp, Homo sapien
gctttgtccctctcgatcttttctc

SEQ ID NO: 3553679 - DNA, 25 bp, Homo sapien
tctgctttgtccctctcgatctttt

SEQ ID NO: 3553680 - DNA, 25 bp, Homo sapien
tctcgatcttttctctaactctttg

SEQ ID NO: 3553681 - DNA, 25 bp, Homo sapien
tctcatctgctatccatcatttccc

SEQ ID NO: 3553682 - DNA, 25 bp, Homo sapien
tcatctgctatccatcatttcccct

SEQ ID NO: 3553683 - DNA, 25 bp, Homo sapien
catctgctatccatcatttcccctg

SEQ ID NO: 3553684 - DNA, 25 bp, Homo sapien
ctcatctgctatccatcatttcccc

SEQ ID NO: 3553685 - DNA, 25 bp, Homo sapien
tggctgctaactcctcggccttttc

SEQ ID NO: 3553686 - DNA, 25 bp, Homo sapien
tgcgctgccgttcccgttccaatgc

SEQ ID NO: 3553687 - DNA, 25 bp, Homo sapien
gcatctcatcttcctgtagccgctg

SEQ ID NO: 3553688 - DNA, 25 bp, Homo sapien
tgtcgtgctgctgacaactcttgcc

SEQ ID NO: 3553689 - DNA, 25 bp, Homo sapien
tcactcaaagcgggtttgccttctc

SEQ ID NO: 3553690 - DNA, 25 bp, Homo sapien
cctcttcactcaaagcgggtttgcc

SEQ ID NO: 3553691 - DNA, 25 bp, Homo sapien
gggtttgccttctccggcagcagaa

SEQ ID NO: 3553692 - DNA, 25 bp, Homo sapien
ggtttgccttctccggcagcagaac

SEQ ID NO: 3553693 - DNA, 25 bp, Homo sapien
ggggtcgtcttcgtgctccatcagc

SEQ ID NO: 3553694 - DNA, 25 bp, Homo sapien
aggaagtgggctcccgtcccaggat

SEQ ID NO: 3553695 - DNA, 25 bp, Homo sapien
gggagtctctaaaggctcgtccaca

SEQ ID NO: 3553696 - DNA, 25 bp, Homo sapien
tcccgtcccaggatatgtccaaggg

SEQ ID NO: 3553697 - DNA, 25 bp, Homo sapien
tcgatgccctggttccctgtgaggg

SEQ ID NO: 3553698 - DNA, 25 bp, Homo sapien
agcctcgatgccctggttccctgtg

SEQ ID NO: 3553699 - DNA, 25 bp, Homo sapien
cctcgatgccctggttccctgtgag

SEQ ID NO: 3553700 - DNA, 25 bp, Homo sapien
cagtccatcgcagcctcgatgccct

SEQ ID NO: 3553701 - DNA, 25 bp, Homo sapien
gcagaaacaccatgaatagcgccca

SEQ ID NO: 3553702 - DNA, 25 bp, Homo sapien
aacaccatgaatagcgcccacgagc

SEQ ID NO: 3553703 - DNA, 25 bp, Homo sapien
gaaacaccatgaatagcgcccacga

SEQ ID NO: 3553704 - DNA, 25 bp, Homo sapien
gggcagaaacaccatgaatagcgcc

SEQ ID NO: 3553705 - DNA, 25 bp, Homo sapien
tccgcgaccccccacacccgcaggc

SEQ ID NO: 3553706 - DNA, 25 bp, Homo sapien
cgagacaggtccgcgaccccccaca

SEQ ID NO: 3553707 - DNA, 25 bp, Homo sapien
gagacaggtccgcgaccccccacac

SEQ ID NO: 3553708 - DNA, 25 bp, Homo sapien
cccatctcgatgagactctcaagag

SEQ ID NO: 3553709 - DNA, 25 bp, Homo sapien
gatgagactctcaagagccgtcagc

SEQ ID NO: 3553710 - DNA, 25 bp, Homo sapien
agactctcaagagccgtcagctccg

SEQ ID NO: 3553711 - DNA, 25 bp, Homo sapien
ctggggaagcccatctcgatgagac

SEQ ID NO: 3553712 - DNA, 25 bp, Homo sapien
gccgacaccgcggcttccgcgggga

SEQ ID NO: 3553713 - DNA, 25 bp, Homo sapien
gcaacccgccctcgacacccgccga

SEQ ID NO: 3553714 - DNA, 25 bp, Homo sapien
aagggtcagcgcgaggcaacccgcc

SEQ ID NO: 3553715 - DNA, 25 bp, Homo sapien
cgccgacgggcgctcgctctctcac

SEQ ID NO: 3553716 - DNA, 25 bp, Homo sapien
ctggtgtgtgacgagaaggagggcg

SEQ ID NO: 3553717 - DNA, 25 bp, Homo sapien
acaccgacgagaagaaagccgaggg

SEQ ID NO: 3553718 - DNA, 25 bp, Homo sapien
atagcagccgggaacaccgacgaga

SEQ ID NO: 3553719 - DNA, 25 bp, Homo sapien
cagccgggaacaccgacgagaagaa

SEQ ID NO: 3553720 - DNA, 25 bp, Homo sapien
ccggctctatagcagccgggaacac

SEQ ID NO: 3553721 - DNA, 25 bp, Homo sapien
aataaaaaacaagggcgtctggctg

SEQ ID NO: 3553722 - DNA, 25 bp, Homo sapien
taggttcgcattactaagtcaggtc

SEQ ID NO: 3553723 - DNA, 25 bp, Homo sapien
gagtagctgctactataggttcgca

SEQ ID NO: 3553724 - DNA, 25 bp, Homo sapien
caactaactacaagcaatgggccag

SEQ ID NO: 3553725 - DNA, 25 bp, Homo sapien
gtcctgagaaccatgactccgccgt

SEQ ID NO: 3553726 - DNA, 25 bp, Homo sapien
caagtaccggacctaaacaagcgct

SEQ ID NO: 3553727 - DNA, 25 bp, Homo sapien
ccaggaaacaaagcgccaagtaccg

SEQ ID NO: 3553728 - DNA, 25 bp, Homo sapien
agacctcagccaggaaacaaagcgc

SEQ ID NO: 3553729 - DNA, 25 bp, Homo sapien
ggctcgggcggcggctcggcgcggg

SEQ ID NO: 3553730 - DNA, 25 bp, Homo sapien
tcagagcgcccctgcggctcgggcg

SEQ ID NO: 3553731 - DNA, 25 bp, Homo sapien
gggcggcggctcggcgcgggcagcc

SEQ ID NO: 3553732 - DNA, 25 bp, Homo sapien
ctcgggcggcggctcggcgcgggca

SEQ ID NO: 3553733 - DNA, 25 bp, Homo sapien
agcgatcgcgcaggcagaagtgcca

SEQ ID NO: 3553734 - DNA, 25 bp, Homo sapien
cagcgatcgcgcaggcagaagtgcc

SEQ ID NO: 3553735 - DNA, 25 bp, Homo sapien
ccagcgatcgcgcaggcagaagtgc

SEQ ID NO: 3553736 - DNA, 25 bp, Homo sapien
tgtcggcagtggtcgtagtcgcagg

SEQ ID NO: 3553737 - DNA, 25 bp, Homo sapien
ttcagttcggctctgcggaccgtag

SEQ ID NO: 3553738 - DNA, 25 bp, Homo sapien
ggccactacgcaaacgacataaatg

SEQ ID NO: 3553739 - DNA, 25 bp, Homo sapien
gcaaaggcggccacgccgtctcagt

SEQ ID NO: 3553740 - DNA, 25 bp, Homo sapien
tgggaaccaagaaggtcacggccag

SEQ ID NO: 3553741 - DNA, 25 bp, Homo sapien
cttgaggggccaagggctgagctct

SEQ ID NO: 3553742 - DNA, 25 bp, Homo sapien
aagggctgagctctgggaaccaaga

SEQ ID NO: 3553743 - DNA, 25 bp, Homo sapien
gagctctgggaaccaagaaggtcac

SEQ ID NO: 3553744 - DNA, 25 bp, Homo sapien
gcagccaggagcttagaatccgaag

SEQ ID NO: 3553745 - DNA, 25 bp, Homo sapien
tccgaaggctgaagtcatacaacgg

SEQ ID NO: 3553746 - DNA, 25 bp, Homo sapien
tgagggatccccaagatctcaggct

SEQ ID NO: 3553747 - DNA, 25 bp, Homo sapien
ttgatgcagcgggaatccaccagct

SEQ ID NO: 3553748 - DNA, 25 bp, Homo sapien
aatgtgaggagtctgccccttttct

SEQ ID NO: 3553749 - DNA, 25 bp, Homo sapien
gtgctggaatgtgaggagtctgccc

SEQ ID NO: 3553750 - DNA, 25 bp, Homo sapien
tggaatgtgaggagtctgccccttt

SEQ ID NO: 3553751 - DNA, 25 bp, Homo sapien
gctggaatgtgaggagtctgcccct

SEQ ID NO: 3553752 - DNA, 25 bp, Homo sapien
ggttggcctccgtcagcaaagctgc

SEQ ID NO: 3553753 - DNA, 25 bp, Homo sapien
agcaggcaggttggcctccgtcagc

SEQ ID NO: 3553754 - DNA, 25 bp, Homo sapien
gcaggttggcctccgtcagcaaagc

SEQ ID NO: 3553755 - DNA, 25 bp, Homo sapien
aggcaggttggcctccgtcagcaaa

SEQ ID NO: 3553756 - DNA, 25 bp, Homo sapien
tggtttctcctcctcggacagctga

SEQ ID NO: 3553757 - DNA, 25 bp, Homo sapien
tctagctcctcttctccgctcaggg

SEQ ID NO: 3553758 - DNA, 25 bp, Homo sapien
cttctccgctcaggggctgctgatc

SEQ ID NO: 3553759 - DNA, 25 bp, Homo sapien
tgctgatctggtttctcctcctcgg

SEQ ID NO: 3553760 - DNA, 25 bp, Homo sapien
cagccaaaaggggaatgcaggggtc

SEQ ID NO: 3553761 - DNA, 25 bp, Homo sapien
ctgcagccaaaaggggaatgcaggg

SEQ ID NO: 3553762 - DNA, 25 bp, Homo sapien
ggaatgcaggggtcagacccagaca

SEQ ID NO: 3553763 - DNA, 25 bp, Homo sapien
caaaaggggaatgcaggggtcagac

SEQ ID NO: 3553764 - DNA, 25 bp, Homo sapien
tccctgagggatcttcagggctctc

SEQ ID NO: 3553765 - DNA, 25 bp, Homo sapien
tgtccctgagggatcttcagggctc

SEQ ID NO: 3553766 - DNA, 25 bp, Homo sapien
ctgtccctgagggatcttcagggct

SEQ ID NO: 3553767 - DNA, 25 bp, Homo sapien
cctgagggatcttcagggctctcac

SEQ ID NO: 3553768 - DNA, 25 bp, Homo sapien
gattgcggagttgactcctcctggc

SEQ ID NO: 3553769 - DNA, 25 bp, Homo sapien
catctgattgcggagttgactcctc

SEQ ID NO: 3553770 - DNA, 25 bp, Homo sapien
gtaacatctgattgcggagttgact

SEQ ID NO: 3553771 - DNA, 25 bp, Homo sapien
tctgattgcggagttgactcctcct

SEQ ID NO: 3553772 - DNA, 25 bp, Homo sapien
gctgtgcctggacggcagtgccaac

SEQ ID NO: 3553773 - DNA, 25 bp, Homo sapien
ggtgataccctaagcctcatactgg

SEQ ID NO: 3553774 - DNA, 25 bp, Homo sapien
cctttgacccttgtctcagtcggtg

SEQ ID NO: 3553775 - DNA, 25 bp, Homo sapien
tgcctggacggcagtgccaacctca

SEQ ID NO: 3553776 - DNA, 25 bp, Homo sapien
gcagagatccttcgttggacttcct

SEQ ID NO: 3553777 - DNA, 25 bp, Homo sapien
agatccttcgttggacttccttccg

SEQ ID NO: 3553778 - DNA, 25 bp, Homo sapien
gctgatgagcagagatccttcgttg

SEQ ID NO: 3553779 - DNA, 25 bp, Homo sapien
ccgggaattgtctctttttcggatg

SEQ ID NO: 3553780 - DNA, 25 bp, Homo sapien
ggaggaaaaactactgagcagccag

SEQ ID NO: 3553781 - DNA, 25 bp, Homo sapien
tgccttaatccccaacatacccctg

SEQ ID NO: 3553782 - DNA, 25 bp, Homo sapien
gccaggactgacttccctcactaac

SEQ ID NO: 3553783 - DNA, 25 bp, Homo sapien
tgacttccctcactaacaatcagga

SEQ ID NO: 3553784 - DNA, 25 bp, Homo sapien
tgtcggggccagatgcccccccaca

SEQ ID NO: 3553785 - DNA, 25 bp, Homo sapien
agagaagcggtgtcggggccagatg

SEQ ID NO: 3553786 - DNA, 25 bp, Homo sapien
ctgcaaagagaagcggtgtcggggc

SEQ ID NO: 3553787 - DNA, 25 bp, Homo sapien
caaagagaagcggtgtcggggccag

SEQ ID NO: 3553788 - DNA, 25 bp, Homo sapien
ggaaggtgaagttgctggcaacacc

SEQ ID NO: 3553789 - DNA, 25 bp, Homo sapien
ctatgaaggcgcaggtcatcgggaa

SEQ ID NO: 3553790 - DNA, 25 bp, Homo sapien
catcgggaagttgtatagcaggtat

SEQ ID NO: 3553791 - DNA, 25 bp, Homo sapien
gttgctggcaacacctatgaaggcg

SEQ ID NO: 3553792 - DNA, 25 bp, Homo sapien
cttgctgtggatctcaatgatcgct

SEQ ID NO: 3553793 - DNA, 25 bp, Homo sapien
ggatctcaatgatcgctccagtggt

SEQ ID NO: 3553794 - DNA, 25 bp, Homo sapien
tgagcccagtgaagtgcgcgtggat

SEQ ID NO: 3553795 - DNA, 25 bp, Homo sapien
ctccatacagctggatgcgcttgct

SEQ ID NO: 3553796 - DNA, 25 bp, Homo sapien
gttctctctatagtctgcgtagagt

SEQ ID NO: 3553797 - DNA, 25 bp, Homo sapien
tctatagtctgcgtagagttccacc

SEQ ID NO: 3553798 - DNA, 25 bp, Homo sapien
cgagttctctctatagtctgcgtag

SEQ ID NO: 3553799 - DNA, 25 bp, Homo sapien
tctctatagtctgcgtagagttcca

SEQ ID NO: 3553800 - DNA, 25 bp, Homo sapien
tagcaggaggctagagaagaccagt

SEQ ID NO: 3553801 - DNA, 25 bp, Homo sapien
gaggctagagaagaccagtgtgtcc

SEQ ID NO: 3553802 - DNA, 25 bp, Homo sapien
tagagaagaccagtgtgtccagcat

SEQ ID NO: 3553803 - DNA, 25 bp, Homo sapien
ggctagagaagaccagtgtgtccag

SEQ ID NO: 3553804 - DNA, 25 bp, Homo sapien
gatacggctgtccatacatcagcac

SEQ ID NO: 3553805 - DNA, 25 bp, Homo sapien
gctctaaggtaacacgatacggctg

SEQ ID NO: 3553806 - DNA, 25 bp, Homo sapien
ggtgaccaagaacatgcccaaatct

SEQ ID NO: 3553807 - DNA, 25 bp, Homo sapien
gatgattcggccacctctggtgtag

SEQ ID NO: 3553808 - DNA, 25 bp, Homo sapien
atcacgtccacccttagtcagcgag

SEQ ID NO: 3553809 - DNA, 25 bp, Homo sapien
cacccttagtcagcgagacattggc

SEQ ID NO: 3553810 - DNA, 25 bp, Homo sapien
tagtcagcgagacattggcaacagg

SEQ ID NO: 3553811 - DNA, 25 bp, Homo sapien
cagcgagacattggcaacagggaag

SEQ ID NO: 3553812 - DNA, 25 bp, Homo sapien
aagggccttacaattcccataggag

SEQ ID NO: 3553813 - DNA, 25 bp, Homo sapien
agaactagaaccctagccctggcaa

SEQ ID NO: 3553814 - DNA, 25 bp, Homo sapien
tattttgatagaaggcccctctcac

SEQ ID NO: 3553815 - DNA, 25 bp, Homo sapien
cccataggagtcctctattttgata

SEQ ID NO: 3553816 - DNA, 25 bp, Homo sapien
tagtagaaatgcacagggctgaggt

SEQ ID NO: 3553817 - DNA, 25 bp, Homo sapien
gactgtcggcatataggaatagtag

SEQ ID NO: 3553818 - DNA, 25 bp, Homo sapien
tgcgggcacggcctgccaagacttg

SEQ ID NO: 3553819 - DNA, 25 bp, Homo sapien
ggaagacagacacccagagcaaaag

SEQ ID NO: 3553820 - DNA, 25 bp, Homo sapien
ctcctgggcccacagtaaggcaggt

SEQ ID NO: 3553821 - DNA, 25 bp, Homo sapien
ggcccacagtaaggcaggtactgga

SEQ ID NO: 3553822 - DNA, 25 bp, Homo sapien
caggtactggagggtcgttgaccat

SEQ ID NO: 3553823 - DNA, 25 bp, Homo sapien
ctgggcccacagtaaggcaggtact

SEQ ID NO: 3553824 - DNA, 25 bp, Homo sapien
ctgccacctggacgccacccctggc

SEQ ID NO: 3553825 - DNA, 25 bp, Homo sapien
tcaggccttgcgttcctagctgctc

SEQ ID NO: 3553826 - DNA, 25 bp, Homo sapien
tgtctggccccaggttcaggccttg

SEQ ID NO: 3553827 - DNA, 25 bp, Homo sapien
ccctggccatgggatgcagcagctg

SEQ ID NO: 3553828 - DNA, 25 bp, Homo sapien
cagtgctaaatctcctcagtggaat

SEQ ID NO: 3553829 - DNA, 25 bp, Homo sapien
gaacgagagatagcaggatagcaaa

SEQ ID NO: 3553830 - DNA, 25 bp, Homo sapien
gggacaaaccaccttgattctcatt

SEQ ID NO: 3553831 - DNA, 25 bp, Homo sapien
tactggactggctttgaggaacgag

SEQ ID NO: 3553832 - DNA, 25 bp, Homo sapien
aagagctttacacacacggtgatac

SEQ ID NO: 3553833 - DNA, 25 bp, Homo sapien
tgaatccacactgctaggcagctgc

SEQ ID NO: 3553834 - DNA, 25 bp, Homo sapien
cacacacggtgatactgaatccaca

SEQ ID NO: 3553835 - DNA, 25 bp, Homo sapien
tgcacggagagaatgtgcgacttgc

SEQ ID NO: 3553836 - DNA, 25 bp, Homo sapien
gagtagccacaattgcttcccgagt

SEQ ID NO: 3553837 - DNA, 25 bp, Homo sapien
gagcagagctcgctcaccgacacgg

SEQ ID NO: 3553838 - DNA, 25 bp, Homo sapien
aaccagtagccttagagtagccaca

SEQ ID NO: 3553839 - DNA, 25 bp, Homo sapien
aggtcgcacggcctgactcgaaacc

SEQ ID NO: 3553840 - DNA, 25 bp, Homo sapien
ctaatcgtgcaaccatggaaaccag

SEQ ID NO: 3553841 - DNA, 25 bp, Homo sapien
taatcgtgcaaccatggaaaccagc

SEQ ID NO: 3553842 - DNA, 25 bp, Homo sapien
aatcgtgcaaccatggaaaccagcc

SEQ ID NO: 3553843 - DNA, 25 bp, Homo sapien
cagggcaaccgtgagacgggacttc

SEQ ID NO: 3553844 - DNA, 25 bp, Homo sapien
gcaaccgtgagacgggacttccggc

SEQ ID NO: 3553845 - DNA, 25 bp, Homo sapien
ctgccagggcaaccgtgagacggga

SEQ ID NO: 3553846 - DNA, 25 bp, Homo sapien
cgcgctgccagggcaaccgtgagac

SEQ ID NO: 3553847 - DNA, 25 bp, Homo sapien
gtctccgcacacctctttttcccca

SEQ ID NO: 3553848 - DNA, 25 bp, Homo sapien
ctggtctccgcacacctctttttcc

SEQ ID NO: 3553849 - DNA, 25 bp, Homo sapien
tggtctccgcacacctctttttccc

SEQ ID NO: 3553850 - DNA, 25 bp, Homo sapien
aagtggcgatccagacgctgatacc

SEQ ID NO: 3553851 - DNA, 25 bp, Homo sapien
tacctgtggcgcatcacattttcct

SEQ ID NO: 3553852 - DNA, 25 bp, Homo sapien
tgagtcacttgtggctaaaacgtga

SEQ ID NO: 3553853 - DNA, 25 bp, Homo sapien
ctgacgagcctctgttgactctgga

SEQ ID NO: 3553854 - DNA, 25 bp, Homo sapien
gggcgactgcccagctgatgtcaga

SEQ ID NO: 3553855 - DNA, 25 bp, Homo sapien
gcagccagtacagactccactgcag

SEQ ID NO: 3553856 - DNA, 25 bp, Homo sapien
aaacgaagattcaggtgctaagtgc

SEQ ID NO: 3553857 - DNA, 25 bp, Homo sapien
taggcccagaccacgccatttgaga

SEQ ID NO: 3553858 - DNA, 25 bp, Homo sapien
gagctactgggagggtaaagccatt

SEQ ID NO: 3553859 - DNA, 25 bp, Homo sapien
aaagtcatccagagcctcaggacag

SEQ ID NO: 3553860 - DNA, 25 bp, Homo sapien
tcatcaagcaatagatctgccatac

SEQ ID NO: 3553861 - DNA, 25 bp, Homo sapien
cagctcctgtgttagaattcttggg

SEQ ID NO: 3553862 - DNA, 25 bp, Homo sapien
catcgtcaaggatcggagatcagag

SEQ ID NO: 3553863 - DNA, 25 bp, Homo sapien
cacaaacgtgcaacgaagccaagtt

SEQ ID NO: 3553864 - DNA, 25 bp, Homo sapien
gaaaagggccaatcaatgcaggcta

SEQ ID NO: 3553865 - DNA, 25 bp, Homo sapien
taagtacaaaagacgctcaagaggc

SEQ ID NO: 3553866 - DNA, 25 bp, Homo sapien
taagatggctgcgcccacagccact

SEQ ID NO: 3553867 - DNA, 25 bp, Homo sapien
agatggctgcgcccacagccactcc

SEQ ID NO: 3553868 - DNA, 25 bp, Homo sapien
aagatggctgcgcccacagccactc

SEQ ID NO: 3553869 - DNA, 25 bp, Homo sapien
ctaagatggctgcgcccacagccac

SEQ ID NO: 3553870 - DNA, 25 bp, Homo sapien
gaaacgttccttctctcgcactgta

SEQ ID NO: 3553871 - DNA, 25 bp, Homo sapien
taagggtctgtacacctgaacaagg

SEQ ID NO: 3553872 - DNA, 25 bp, Homo sapien
aaaacaaggctagggattcctctgg

SEQ ID NO: 3553873 - DNA, 25 bp, Homo sapien
taagctcttggctgacagtgctgag

SEQ ID NO: 3553874 - DNA, 25 bp, Homo sapien
tatagaacaggcagccctaagtgct

SEQ ID NO: 3553875 - DNA, 25 bp, Homo sapien
cctgtctgactgtagggtatagaac

SEQ ID NO: 3553876 - DNA, 25 bp, Homo sapien
atcactctcctttacttggctgcca

SEQ ID NO: 3553877 - DNA, 25 bp, Homo sapien
tcagaatgtcagaagggtgccattt

SEQ ID NO: 3553878 - DNA, 25 bp, Homo sapien
aattcctgtagtatcggtctctgtc

SEQ ID NO: 3553879 - DNA, 25 bp, Homo sapien
cctgtagtatcggtctctgtcctgg

SEQ ID NO: 3553880 - DNA, 25 bp, Homo sapien
ctgtagtatcggtctctgtcctggg

SEQ ID NO: 3553881 - DNA, 25 bp, Homo sapien
ttcctgtagtatcggtctctgtcct

SEQ ID NO: 3553882 - DNA, 25 bp, Homo sapien
gagggaaaccccatcacttggagcc

SEQ ID NO: 3553883 - DNA, 25 bp, Homo sapien
gagagggaaaccccatcacttggag

SEQ ID NO: 3553884 - DNA, 25 bp, Homo sapien
gggaaaccccatcacttggagccag

SEQ ID NO: 3553885 - DNA, 25 bp, Homo sapien
ggaaaccccatcacttggagccaga

SEQ ID NO: 3553886 - DNA, 25 bp, Homo sapien
gtaaaatcgatcatagtctcccctg

SEQ ID NO: 3553887 - DNA, 25 bp, Homo sapien
tctgttgtactcataatctcgcccg

SEQ ID NO: 3553888 - DNA, 25 bp, Homo sapien
aatagtctctgtatctgttgtactc

SEQ ID NO: 3553889 - DNA, 25 bp, Homo sapien
ccctgtatcgatcatagaaattacg

SEQ ID NO: 3553890 - DNA, 25 bp, Homo sapien
gtactgctgcccgtaggcccggttg

SEQ ID NO: 3553891 - DNA, 25 bp, Homo sapien
cgtaggcccggttgtcgtagcctcg

SEQ ID NO: 3553892 - DNA, 25 bp, Homo sapien
gttgtcgtagcctcggcgctgcccg

SEQ ID NO: 3553893 - DNA, 25 bp, Homo sapien
ctgctgcccgtaggcccggttgtcg

SEQ ID NO: 3553894 - DNA, 25 bp, Homo sapien
gaagagaaatggagagcgcgctcag

SEQ ID NO: 3553895 - DNA, 25 bp, Homo sapien
agagaaatggagagcgcgctcagac

SEQ ID NO: 3553896 - DNA, 25 bp, Homo sapien
aagagaaatggagagcgcgctcaga

SEQ ID NO: 3553897 - DNA, 25 bp, Homo sapien
tgacaatgggctgagcttcctcctt

SEQ ID NO: 3553898 - DNA, 25 bp, Homo sapien
cgcttgtttcggttgtttcggcgat

SEQ ID NO: 3553899 - DNA, 25 bp, Homo sapien
ccatatagtcgcatttttcaggcaa

SEQ ID NO: 3553900 - DNA, 25 bp, Homo sapien
tcggcgatttgtccgcttctcggag

SEQ ID NO: 3553901 - DNA, 25 bp, Homo sapien
tataagagtaagagagaagcttgtg

SEQ ID NO: 3553902 - DNA, 25 bp, Homo sapien
aagagtaagagagaagcttgtgggc

SEQ ID NO: 3553903 - DNA, 25 bp, Homo sapien
ataagagtaagagagaagcttgtgg

SEQ ID NO: 3553904 - DNA, 25 bp, Homo sapien
ctataagagtaagagagaagcttgt

SEQ ID NO: 3553905 - DNA, 25 bp, Homo sapien
atctccagcattatagattcaggca

SEQ ID NO: 3553906 - DNA, 25 bp, Homo sapien
catctccagcattatagattcaggc

SEQ ID NO: 3553907 - DNA, 25 bp, Homo sapien
tctccagcattatagattcaggcac

SEQ ID NO: 3553908 - DNA, 25 bp, Homo sapien
tagcttccgccgttggccagaattg

SEQ ID NO: 3553909 - DNA, 25 bp, Homo sapien
tcctcattagggacaaccaccacca

SEQ ID NO: 3553910 - DNA, 25 bp, Homo sapien
cgagagaaggtcttgaacagcaata

SEQ ID NO: 3553911 - DNA, 25 bp, Homo sapien
ccaccaccactttccgagagaaggt

SEQ ID NO: 3553912 - DNA, 25 bp, Homo sapien
ggcactgggaggcttgctgaactaa

SEQ ID NO: 3553913 - DNA, 25 bp, Homo sapien
tctggaccagcttactaaggcactg

SEQ ID NO: 3553914 - DNA, 25 bp, Homo sapien
tgatcaagaataaagttcctctttg

SEQ ID NO: 3553915 - DNA, 25 bp, Homo sapien
tttgtccgggaagcaatctggacca

SEQ ID NO: 3553916 - DNA, 25 bp, Homo sapien
cctcatttgattgagcacagtctca

SEQ ID NO: 3553917 - DNA, 25 bp, Homo sapien
gctcccaggacattgtatcttttct

SEQ ID NO: 3553918 - DNA, 25 bp, Homo sapien
tgggtctttccagatccgggtagtc

SEQ ID NO: 3553919 - DNA, 25 bp, Homo sapien
tccgggtagtcccaccatcagaatc

SEQ ID NO: 3553920 - DNA, 25 bp, Homo sapien
ggctcctccttctgaccgaagttta

SEQ ID NO: 3553921 - DNA, 25 bp, Homo sapien
agtgcgtacacgctcctcaacaggc

SEQ ID NO: 3553922 - DNA, 25 bp, Homo sapien
tcctctatggtcttgggagggactg

SEQ ID NO: 3553923 - DNA, 25 bp, Homo sapien
aacacaaactcttctggtggtggga

SEQ ID NO: 3553924 - DNA, 25 bp, Homo sapien
gatccagaatgccacacctaggtct

SEQ ID NO: 3553925 - DNA, 25 bp, Homo sapien
cacctaggtcttctccattcttgga

SEQ ID NO: 3553926 - DNA, 25 bp, Homo sapien
gaagggcccggtctgccagggaatc

SEQ ID NO: 3553927 - DNA, 25 bp, Homo sapien
gccagggaatccttgctgatccaga

SEQ ID NO: 3553928 - DNA, 25 bp, Homo sapien
tgccttgagtcctcgtccatcgaaa

SEQ ID NO: 3553929 - DNA, 25 bp, Homo sapien
attttctgccttgagtcctcgtcca

SEQ ID NO: 3553930 - DNA, 25 bp, Homo sapien
ctcgtccatcgaaaccgtaagagaa

SEQ ID NO: 3553931 - DNA, 25 bp, Homo sapien
gagtcctcgtccatcgaaaccgtaa

SEQ ID NO: 3553932 - DNA, 25 bp, Homo sapien
ccaactcgaaggagagagacctctg

SEQ ID NO: 3553933 - DNA, 25 bp, Homo sapien
gtgcagccttctttcattgggagat

SEQ ID NO: 3553934 - DNA, 25 bp, Homo sapien
aatcaacagaccacccaactcgaag

SEQ ID NO: 3553935 - DNA, 25 bp, Homo sapien
agctgtggacgggaaaaatcaacag

SEQ ID NO: 3553936 - DNA, 25 bp, Homo sapien
tgtcactccgtaagtactccttgcc

SEQ ID NO: 3553937 - DNA, 25 bp, Homo sapien
ctttgtcactccgtaagtactcctt

SEQ ID NO: 3553938 - DNA, 25 bp, Homo sapien
tccctttgtcactccgtaagtactc

SEQ ID NO: 3553939 - DNA, 25 bp, Homo sapien
ccaaagggtggggaacttctctgag

SEQ ID NO: 3553940 - DNA, 25 bp, Homo sapien
gaagcaatcagtttactccaatgtc

SEQ ID NO: 3553941 - DNA, 25 bp, Homo sapien
caatacttgtaagccgccaacagag

SEQ ID NO: 3553942 - DNA, 25 bp, Homo sapien
gccaacagagcataagtataccagt

SEQ ID NO: 3553943 - DNA, 25 bp, Homo sapien
tataggctatgaagttttaatctcc

SEQ ID NO: 3553944 - DNA, 25 bp, Homo sapien
ttcacaagagtttgatcctcctcct

SEQ ID NO: 3553945 - DNA, 25 bp, Homo sapien
cgtgtccaggttcacaagagtttga

SEQ ID NO: 3553946 - DNA, 25 bp, Homo sapien
tcttcttcaggaggcagtggagact

SEQ ID NO: 3553947 - DNA, 25 bp, Homo sapien
ccaggttcacaagagtttgatcctc

SEQ ID NO: 3553948 - DNA, 25 bp, Homo sapien
cggctgtggtaagcctcctctcgga

SEQ ID NO: 3553949 - DNA, 25 bp, Homo sapien
gacttttcactatcctggtcatctc

SEQ ID NO: 3553950 - DNA, 25 bp, Homo sapien
ccatctgagcctgctggttttgact

SEQ ID NO: 3553951 - DNA, 25 bp, Homo sapien
tcggaattcatagtaagctcggcca

SEQ ID NO: 3553952 - DNA, 25 bp, Homo sapien
aaagacctgaccctctaactgtggg

SEQ ID NO: 3553953 - DNA, 25 bp, Homo sapien
tggaacggactttgacggacttcga

SEQ ID NO: 3553954 - DNA, 25 bp, Homo sapien
cattaccattcaggaaccgagggac

SEQ ID NO: 3553955 - DNA, 25 bp, Homo sapien
cgtaaaagactagcaccaggtgttc

SEQ ID NO: 3553956 - DNA, 25 bp, Homo sapien
ttctcggaagcatctggctcggccg

SEQ ID NO: 3553957 - DNA, 25 bp, Homo sapien
tgcgcggcctgacccaaggcttgag

SEQ ID NO: 3553958 - DNA, 25 bp, Homo sapien
acaggccgaggctccgccttgcagg

SEQ ID NO: 3553959 - DNA, 25 bp, Homo sapien
gcagctcggtcactttcagccgctt

SEQ ID NO: 3553960 - DNA, 25 bp, Homo sapien
gcgcgcggaggacgacggagttcct

SEQ ID NO: 3553961 - DNA, 25 bp, Homo sapien
tttcggctcacggagcccaaaacaa

SEQ ID NO: 3553962 - DNA, 25 bp, Homo sapien
ggtcccgctgcgcagtgtttgcttc

SEQ ID NO: 3553963 - DNA, 25 bp, Homo sapien
ctgcgaaccgtcgaccgagtccgac

SEQ ID NO: 3553964 - DNA, 25 bp, Homo sapien
cctgggaaatgtggcgcaacccggt

SEQ ID NO: 3553965 - DNA, 25 bp, Homo sapien
tagagaagccttctgtagctggtgc

SEQ ID NO: 3553966 - DNA, 25 bp, Homo sapien
ctgtctttccagctagaatgccctg

SEQ ID NO: 3553967 - DNA, 25 bp, Homo sapien
caaaagttgcttccttagagaagcc

SEQ ID NO: 3553968 - DNA, 25 bp, Homo sapien
aattaatttacttgggccgggcatg

SEQ ID NO: 3553969 - DNA, 25 bp, Homo sapien
atatggccgggcgctctagctcatg

SEQ ID NO: 3553970 - DNA, 25 bp, Homo sapien
aatatggccgggcgctctagctcat

SEQ ID NO: 3553971 - DNA, 25 bp, Homo sapien
tatggccgggcgctctagctcatgc

SEQ ID NO: 3553972 - DNA, 25 bp, Homo sapien
ggaaggcagaggtagacagatagat

SEQ ID NO: 3553973 - DNA, 25 bp, Homo sapien
gaaggcagaggtagacagatagata

SEQ ID NO: 3553974 - DNA, 25 bp, Homo sapien
aaggcagaggtagacagatagatag

SEQ ID NO: 3553975 - DNA, 25 bp, Homo sapien
ccttcagacctcatgctaaagaaaa

SEQ ID NO: 3553976 - DNA, 25 bp, Homo sapien
tctcatacttagatcattcatacac

SEQ ID NO: 3553977 - DNA, 25 bp, Homo sapien
cgccacagcccctgttaaattaatt

SEQ ID NO: 3553978 - DNA, 25 bp, Homo sapien
aataaacccttcagacctcatgcta

SEQ ID NO: 3553979 - DNA, 25 bp, Homo sapien
tatgttaaatgaaactacggggatg

SEQ ID NO: 3553980 - DNA, 25 bp, Homo sapien
gccaggttcagtggcgcacgccaat

SEQ ID NO: 3553981 - DNA, 25 bp, Homo sapien
gctgccactagggtgcatgcctgta

SEQ ID NO: 3553982 - DNA, 25 bp, Homo sapien
ggatgtaagcagcaaactccagacc

SEQ ID NO: 3553983 - DNA, 25 bp, Homo sapien
tgcttcccatatgtcctagttaagg

SEQ ID NO: 3553984 - DNA, 25 bp, Homo sapien
tcctagttaaggagctttctttagc

SEQ ID NO: 3553985 - DNA, 25 bp, Homo sapien
tcacagtgctgaatatgacacagac

SEQ ID NO: 3553986 - DNA, 25 bp, Homo sapien
aaaatagtcacttgctggtaagggt

SEQ ID NO: 3553987 - DNA, 25 bp, Homo sapien
tacgaaatgtctgataaagcccaga

SEQ ID NO: 3553988 - DNA, 25 bp, Homo sapien
aagcccagaagacagctcgactgca

SEQ ID NO: 3553989 - DNA, 25 bp, Homo sapien
tatacgaaatgtctgataaagccca

SEQ ID NO: 3553990 - DNA, 25 bp, Homo sapien
acagctcgactgcaataataaatca

SEQ ID NO: 3553991 - DNA, 25 bp, Homo sapien
gaaaattcccagtgcccttggagag

SEQ ID NO: 3553992 - DNA, 25 bp, Homo sapien
ctgcttatctggctgggcaaagaaa

SEQ ID NO: 3553993 - DNA, 25 bp, Homo sapien
catacagtgagaagcgattacacct

SEQ ID NO: 3553994 - DNA, 25 bp, Homo sapien
gctttgccccataaagtcctgctta

SEQ ID NO: 3553995 - DNA, 25 bp, Homo sapien
tgccatctaaggatggtaagagcag

SEQ ID NO: 3553996 - DNA, 25 bp, Homo sapien
gggcagagcctttattcttgtcacc

SEQ ID NO: 3553997 - DNA, 25 bp, Homo sapien
ctgggcagagcctttattcttgtca

SEQ ID NO: 3553998 - DNA, 25 bp, Homo sapien
ctgagctgccatctaaggatggtaa

SEQ ID NO: 3553999 - DNA, 25 bp, Homo sapien
gatgttagtttttggggccaataca

SEQ ID NO: 3554000 - DNA, 25 bp, Homo sapien
tacaaaatctttaggtggccctcca

SEQ ID NO: 3554001 - DNA, 25 bp, Homo sapien
tagaggtcccctgactgcgtgtagc

SEQ ID NO: 3554002 - DNA, 25 bp, Homo sapien
tcattgtgagccttgcggatgtggc

SEQ ID NO: 3554003 - DNA, 25 bp, Homo sapien
tcatagggtcgctcacgtgtgtgca

SEQ ID NO: 3554004 - DNA, 25 bp, Homo sapien
catgtcgccgtagtgtgtaagagca

SEQ ID NO: 3554005 - DNA, 25 bp, Homo sapien
tctgttggcaggaagtggtcacttg

SEQ ID NO: 3554006 - DNA, 25 bp, Homo sapien
cagtcctcgatgatactgccctgca

SEQ ID NO: 3554007 - DNA, 25 bp, Homo sapien
tgcaggtgggaacatcctcagtaaa

SEQ ID NO: 3554008 - DNA, 25 bp, Homo sapien
tcctggagctgcttcgtactcagaa

SEQ ID NO: 3554009 - DNA, 25 bp, Homo sapien
tagaagccttgcagtggtcctccag

SEQ ID NO: 3554010 - DNA, 25 bp, Homo sapien
ctccaggatcctttggttccaccac

SEQ ID NO: 3554011 - DNA, 25 bp, Homo sapien
gggatagaagccttgcagtggtcct

SEQ ID NO: 3554012 - DNA, 25 bp, Homo sapien
gatagaagccttgcagtggtcctcc

SEQ ID NO: 3554013 - DNA, 25 bp, Homo sapien
aacctccatgccaggctgtgtagtg

SEQ ID NO: 3554014 - DNA, 25 bp, Homo sapien
cactggtggatgaggtgcccgcaga

SEQ ID NO: 3554015 - DNA, 25 bp, Homo sapien
tgcccgcagatgtggtgcgtcaacc

SEQ ID NO: 3554016 - DNA, 25 bp, Homo sapien
gagctactagggctggcaagagaga

SEQ ID NO: 3554017 - DNA, 25 bp, Homo sapien
tggctcatctggaggacggacagta

SEQ ID NO: 3554018 - DNA, 25 bp, Homo sapien
tgggtgccacgggaagtactagaca

SEQ ID NO: 3554019 - DNA, 25 bp, Homo sapien
ggcccgggcttgaagccgccgctta

SEQ ID NO: 3554020 - DNA, 25 bp, Homo sapien
ctcagcagatgccaacgaaggttgg

SEQ ID NO: 3554021 - DNA, 25 bp, Homo sapien
caccatcacggtgcagtcacaaagg

SEQ ID NO: 3554022 - DNA, 25 bp, Homo sapien
gatgggccaagaactgggtactacc

SEQ ID NO: 3554023 - DNA, 25 bp, Homo sapien
gaactccatagtaccccacgaagga

SEQ ID NO: 3554024 - DNA, 25 bp, Homo sapien
gtgaatacacaccagatccctcttg

SEQ ID NO: 3554025 - DNA, 25 bp, Homo sapien
cccacttcgagaactccctaagcat

SEQ ID NO: 3554026 - DNA, 25 bp, Homo sapien
ggtagcgtccaacggctccacgaag

SEQ ID NO: 3554027 - DNA, 25 bp, Homo sapien
cgaagtagagatctttttcgctccc

SEQ ID NO: 3554028 - DNA, 25 bp, Homo sapien
caggccttgccaggcgatgcctcta

SEQ ID NO: 3554029 - DNA, 25 bp, Homo sapien
ggagaaagctgatacctcacccacc

SEQ ID NO: 3554030 - DNA, 25 bp, Homo sapien
tagcggagaaagctgatacctcacc

SEQ ID NO: 3554031 - DNA, 25 bp, Homo sapien
gactaccagggtgggaactagcgga

SEQ ID NO: 3554032 - DNA, 25 bp, Homo sapien
tgggaactagcggagaaagctgata

SEQ ID NO: 3554033 - DNA, 25 bp, Homo sapien
gcgggaatcttcagcgtcacgtgac

SEQ ID NO: 3554034 - DNA, 25 bp, Homo sapien
ccaatcaagagccaggaagcctcct

SEQ ID NO: 3554035 - DNA, 25 bp, Homo sapien
tactcgcaaacgtagcaagagaggt

SEQ ID NO: 3554036 - DNA, 25 bp, Homo sapien
ttactcaccagtcttggagcccgca

SEQ ID NO: 3554037 - DNA, 25 bp, Homo sapien
tctattggcgggtctagggtcacca

SEQ ID NO: 3554038 - DNA, 25 bp, Homo sapien
ttcgcgctggtggactaaatgctcc

SEQ ID NO: 3554039 - DNA, 25 bp, Homo sapien
gctggcggctcctgaatgcggtata

SEQ ID NO: 3554040 - DNA, 25 bp, Homo sapien
tataatagggaaactccctccgtgc

SEQ ID NO: 3554041 - DNA, 25 bp, Homo sapien
gtgctgtgcgttgttggagtgagtc

SEQ ID NO: 3554042 - DNA, 25 bp, Homo sapien
tgtcggtttcttattgtgctatacc

SEQ ID NO: 3554043 - DNA, 25 bp, Homo sapien
cttctggtgctgtgcgttgttggag

SEQ ID NO: 3554044 - DNA, 25 bp, Homo sapien
tttttgtcggtttcttattgtgcta

SEQ ID NO: 3554045 - DNA, 25 bp, Homo sapien
tacttgcctgattgtatagggtagc

SEQ ID NO: 3554046 - DNA, 25 bp, Homo sapien
gtttacatctaagtgaagccagtac

SEQ ID NO: 3554047 - DNA, 25 bp, Homo sapien
gagcattatttagcacacagggcag

SEQ ID NO: 3554048 - DNA, 25 bp, Homo sapien
gtataatcagagtccaagtctctgg

SEQ ID NO: 3554049 - DNA, 25 bp, Homo sapien
tttcgtttcatcatagccgggcggc

SEQ ID NO: 3554050 - DNA, 25 bp, Homo sapien
tggccgacatctaccgggagctcta

SEQ ID NO: 3554051 - DNA, 25 bp, Homo sapien
cagaaactgcccatgatcggccgta

SEQ ID NO: 3554052 - DNA, 25 bp, Homo sapien
tccacctactggacaaacttgcagg

SEQ ID NO: 3554053 - DNA, 25 bp, Homo sapien
gcagaacctgcgtccatccgttaaa

SEQ ID NO: 3554054 - DNA, 25 bp, Homo sapien
ggttccgaaacagaagtcagtgcag

SEQ ID NO: 3554055 - DNA, 25 bp, Homo sapien
tcctggccaggtcatacttcgaagt

SEQ ID NO: 3554056 - DNA, 25 bp, Homo sapien
tcttaaagcactaggtggagtcggg

SEQ ID NO: 3554057 - DNA, 25 bp, Homo sapien
caggtaatctggttaataaacatgg

SEQ ID NO: 3554058 - DNA, 25 bp, Homo sapien
tttacaccatgagaaaacctcagag

SEQ ID NO: 3554059 - DNA, 25 bp, Homo sapien
ttacatcgtttaccccagccaggta

SEQ ID NO: 3554060 - DNA, 25 bp, Homo sapien
tgccacatgattgtagcacagtgtg

SEQ ID NO: 3554061 - DNA, 25 bp, Homo sapien
gcatgaacccagaaggcagagcgtg

SEQ ID NO: 3554062 - DNA, 25 bp, Homo sapien
ggcatgaacccagaaggcagagcgt

SEQ ID NO: 3554063 - DNA, 25 bp, Homo sapien
catgaacccagaaggcagagcgtgc

SEQ ID NO: 3554064 - DNA, 25 bp, Homo sapien
atgaacccagaaggcagagcgtgca

SEQ ID NO: 3554065 - DNA, 25 bp, Homo sapien
tcagcaccatccctgtgctactttg

SEQ ID NO: 3554066 - DNA, 25 bp, Homo sapien
tatggtgtggccaccctgaatggct

SEQ ID NO: 3554067 - DNA, 25 bp, Homo sapien
tacagcagctgcatcgaggactccc

SEQ ID NO: 3554068 - DNA, 25 bp, Homo sapien
catccctgtgctactttgtagctgg

SEQ ID NO: 3554069 - DNA, 25 bp, Homo sapien
cttggtgtctgcctgtatccttcga

SEQ ID NO: 3554070 - DNA, 25 bp, Homo sapien
tatagccgtcttcctggtcttggtg

SEQ ID NO: 3554071 - DNA, 25 bp, Homo sapien
tgctatagggctgcgcattgcactg

SEQ ID NO: 3554072 - DNA, 25 bp, Homo sapien
tatccttcgatttggcaccaggtct

SEQ ID NO: 3554073 - DNA, 25 bp, Homo sapien
tgtctctttgacctcacagctgttc

SEQ ID NO: 3554074 - DNA, 25 bp, Homo sapien
gactccatgcccaagtgcctgtaat

SEQ ID NO: 3554075 - DNA, 25 bp, Homo sapien
caaggccctgtttatgttgggagtc

SEQ ID NO: 3554076 - DNA, 25 bp, Homo sapien
gatgctctcgttgggtcacgccttt

SEQ ID NO: 3554077 - DNA, 25 bp, Homo sapien
agaataagcggagtgcttcctgcag

SEQ ID NO: 3554078 - DNA, 25 bp, Homo sapien
tactccattctaagattggcgtttt

SEQ ID NO: 3554079 - DNA, 25 bp, Homo sapien
gtgaccctggttgttactccattct

SEQ ID NO: 3554080 - DNA, 25 bp, Homo sapien
ggttgttactccattctaagattgg

SEQ ID NO: 3554081 - DNA, 25 bp, Homo sapien
ttacaacaggtgtgaaccaacacac

SEQ ID NO: 3554082 - DNA, 25 bp, Homo sapien
gatacctgcttcaaaggaactgtga

SEQ ID NO: 3554083 - DNA, 25 bp, Homo sapien
ccggtaggcacccacagtattgtca

SEQ ID NO: 3554084 - DNA, 25 bp, Homo sapien
cggtgggccatgcaagatacctgct

SEQ ID NO: 3554085 - DNA, 25 bp, Homo sapien
tgactttcagaggtagcatggcagg

SEQ ID NO: 3554086 - DNA, 25 bp, Homo sapien
cgcccgccactctcggatagggagt

SEQ ID NO: 3554087 - DNA, 25 bp, Homo sapien
cccacgttgtcacagtgggaagcca

SEQ ID NO: 3554088 - DNA, 25 bp, Homo sapien
gcgcccggccagtgtttcacatttc

SEQ ID NO: 3554089 - DNA, 25 bp, Homo sapien
tatagggaaggtcgtgtcccgccac

SEQ ID NO: 3554090 - DNA, 25 bp, Homo sapien
acgatttgggacctccgcatccaga

SEQ ID NO: 3554091 - DNA, 25 bp, Homo sapien
ccagagcgcggagcgcaggtcgaag

SEQ ID NO: 3554092 - DNA, 25 bp, Homo sapien
agaccgtagcgccagagcgcggagc

SEQ ID NO: 3554093 - DNA, 25 bp, Homo sapien
gccgggacacggctgccacagccat

SEQ ID NO: 3554094 - DNA, 25 bp, Homo sapien
gtgaagaagcggccccgatcatgct

SEQ ID NO: 3554095 - DNA, 25 bp, Homo sapien
ccgttgcagcgtcgtgccttgcagg

SEQ ID NO: 3554096 - DNA, 25 bp, Homo sapien
ccgcgcagaacagcccgaggatggt

SEQ ID NO: 3554097 - DNA, 25 bp, Homo sapien
tcaaagagcagcacatcccgttgca

SEQ ID NO: 3554098 - DNA, 25 bp, Homo sapien
cttcgggtagtttagtgtcagttct

SEQ ID NO: 3554099 - DNA, 25 bp, Homo sapien
tcctggggttaagtacacaaagcac

SEQ ID NO: 3554100 - DNA, 25 bp, Homo sapien
gctttggcttcctggcaccagtgag

SEQ ID NO: 3554101 - DNA, 25 bp, Homo sapien
gcagaacacgaaatacaacatcact

SEQ ID NO: 3554102 - DNA, 25 bp, Homo sapien
tccctccctcggtcacagtcacggg

SEQ ID NO: 3554103 - DNA, 25 bp, Homo sapien
cacggggcggcctcgggccagacag

SEQ ID NO: 3554104 - DNA, 25 bp, Homo sapien
aggagagggatcaggcagccctccc

SEQ ID NO: 3554105 - DNA, 25 bp, Homo sapien
agagggatcaggcagccctccctcc

SEQ ID NO: 3554106 - DNA, 25 bp, Homo sapien
taatatccaaggactatttacaggg

SEQ ID NO: 3554107 - DNA, 25 bp, Homo sapien
gactgcttctgaggcatgactacga

SEQ ID NO: 3554108 - DNA, 25 bp, Homo sapien
atttacaggggggactgcttctgag

SEQ ID NO: 3554109 - DNA, 25 bp, Homo sapien
agatgacagacgacaaccagacggt

SEQ ID NO: 3554110 - DNA, 25 bp, Homo sapien
tcacttcatgaatgccacttctggg

SEQ ID NO: 3554111 - DNA, 25 bp, Homo sapien
gccacttctgggatctcgcccttgg

SEQ ID NO: 3554112 - DNA, 25 bp, Homo sapien
aatgccacttctgggatctcgccct

SEQ ID NO: 3554113 - DNA, 25 bp, Homo sapien
cacttcatgaatgccacttctggga

SEQ ID NO: 3554114 - DNA, 25 bp, Homo sapien
tggaggcccagagatcctagtcttt

SEQ ID NO: 3554115 - DNA, 25 bp, Homo sapien
aaatgaaggtcagtagaggtaggcc

SEQ ID NO: 3554116 - DNA, 25 bp, Homo sapien
ctcagctaacctgacctcctggagg

SEQ ID NO: 3554117 - DNA, 25 bp, Homo sapien
ttgccactgtatttccagaccttac

SEQ ID NO: 3554118 - DNA, 25 bp, Homo sapien
tagtcccagttgttgtcctgaaggc

SEQ ID NO: 3554119 - DNA, 25 bp, Homo sapien
tgtagtcccagttgttgtcctgaag

SEQ ID NO: 3554120 - DNA, 25 bp, Homo sapien
ggtgtagtcccagttgttgtcctga

SEQ ID NO: 3554121 - DNA, 25 bp, Homo sapien
gtcccagttgttgtcctgaaggcac

SEQ ID NO: 3554122 - DNA, 25 bp, Homo sapien
gactgggtagagaatgcttgcaaca

SEQ ID NO: 3554123 - DNA, 25 bp, Homo sapien
caggcatagcgaaggctctttggat

SEQ ID NO: 3554124 - DNA, 25 bp, Homo sapien
cgaggttcatgccagactgggtaga

SEQ ID NO: 3554125 - DNA, 25 bp, Homo sapien
ggtgcaggcatagcgaaggctcttt

SEQ ID NO: 3554126 - DNA, 25 bp, Homo sapien
ggcattccgcacaaatagctcatca

SEQ ID NO: 3554127 - DNA, 25 bp, Homo sapien
gcattccgcacaaatagctcatcat

SEQ ID NO: 3554128 - DNA, 25 bp, Homo sapien
cattccgcacaaatagctcatcatt

SEQ ID NO: 3554129 - DNA, 25 bp, Homo sapien
agagcacttaaaaagctagacagag

SEQ ID NO: 3554130 - DNA, 25 bp, Homo sapien
gataacatcatcctcccaacatcat

SEQ ID NO: 3554131 - DNA, 25 bp, Homo sapien
catggaatcaatgtttggaaggatt

SEQ ID NO: 3554132 - DNA, 25 bp, Homo sapien
caacatcattcctattctctgattc

SEQ ID NO: 3554133 - DNA, 25 bp, Homo sapien
tccgggtgaaggctcgcaaagaatc

SEQ ID NO: 3554134 - DNA, 25 bp, Homo sapien
aaggctcgcaaagaatcccgggact

SEQ ID NO: 3554135 - DNA, 25 bp, Homo sapien
gaacagcaatgaatgtccgggtgaa

SEQ ID NO: 3554136 - DNA, 25 bp, Homo sapien
cctgaattgctagcaggaacagcaa

SEQ ID NO: 3554137 - DNA, 25 bp, Homo sapien
gggtcaggtcagaaaggacaatagt

SEQ ID NO: 3554138 - DNA, 25 bp, Homo sapien
gtatataagggtataagggaagcac

SEQ ID NO: 3554139 - DNA, 25 bp, Homo sapien
cagcaacaacaccttagggtcacta

SEQ ID NO: 3554140 - DNA, 25 bp, Homo sapien
caatagtaataactacggccgggca

SEQ ID NO: 3554141 - DNA, 25 bp, Homo sapien
tccttgaagactccattgacagaaa

SEQ ID NO: 3554142 - DNA, 25 bp, Homo sapien
ccttgaagactccattgacagaaaa

SEQ ID NO: 3554143 - DNA, 25 bp, Homo sapien
ttgaagactccattgacagaaaaac

SEQ ID NO: 3554144 - DNA, 25 bp, Homo sapien
cttccttgaagactccattgacaga

SEQ ID NO: 3554145 - DNA, 25 bp, Homo sapien
tgtctgggcgcttatgtctaccacg

SEQ ID NO: 3554146 - DNA, 25 bp, Homo sapien
aaggaattgacgtcgtgctgggttt

SEQ ID NO: 3554147 - DNA, 25 bp, Homo sapien
tgagacgcgtgtgcttcagcagccg

SEQ ID NO: 3554148 - DNA, 25 bp, Homo sapien
tgaggaaggcaacaacgttgagacg

SEQ ID NO: 3554149 - DNA, 25 bp, Homo sapien
tctgctatccttgaaatactcggct

SEQ ID NO: 3554150 - DNA, 25 bp, Homo sapien
tgaaaggaatgctcagggaacagca

SEQ ID NO: 3554151 - DNA, 25 bp, Homo sapien
tccagagtcgtaaattgcatagtac

SEQ ID NO: 3554152 - DNA, 25 bp, Homo sapien
aggagcccttgtcggtctccagagt

SEQ ID NO: 3554153 - DNA, 25 bp, Homo sapien
caggccccatcatggtaggcatcca

SEQ ID NO: 3554154 - DNA, 25 bp, Homo sapien
tgcaagaccagactcttcaagtttt

SEQ ID NO: 3554155 - DNA, 25 bp, Homo sapien
caagaccagactcttcaagttttct

SEQ ID NO: 3554156 - DNA, 25 bp, Homo sapien
agtgcaagaccagactcttcaagtt

SEQ ID NO: 3554157 - DNA, 25 bp, Homo sapien
ggaagtgcaagaccagactcttcaa

SEQ ID NO: 3554158 - DNA, 25 bp, Homo sapien
gcaattggtgggggtagctcatggc

SEQ ID NO: 3554159 - DNA, 25 bp, Homo sapien
ttggtgggggtagctcatggccatc

SEQ ID NO: 3554160 - DNA, 25 bp, Homo sapien
aattggtgggggtagctcatggcca

SEQ ID NO: 3554161 - DNA, 25 bp, Homo sapien
tgcagggcggtaacgtcgtgggggc

SEQ ID NO: 3554162 - DNA, 25 bp, Homo sapien
aacttgggaaatcgttcgcgaatgg

SEQ ID NO: 3554163 - DNA, 25 bp, Homo sapien
taacttgggaaatcgttcgcgaatg

SEQ ID NO: 3554164 - DNA, 25 bp, Homo sapien
cttgggaaatcgttcgcgaatggcg

SEQ ID NO: 3554165 - DNA, 25 bp, Homo sapien
acttgggaaatcgttcgcgaatggc

SEQ ID NO: 3554166 - DNA, 25 bp, Homo sapien
tgagtgatgcttcagagccaccgtg

SEQ ID NO: 3554167 - DNA, 25 bp, Homo sapien
gaagtgagtgatgcttcagagccac

SEQ ID NO: 3554168 - DNA, 25 bp, Homo sapien
gacagaagtgagtgatgcttcagag

SEQ ID NO: 3554169 - DNA, 25 bp, Homo sapien
agtgatgcttcagagccaccgtgcc

SEQ ID NO: 3554170 - DNA, 25 bp, Homo sapien
tagggagggcttcctcaacccatgg

SEQ ID NO: 3554171 - DNA, 25 bp, Homo sapien
gggagcacgcgatcctctcaaagga

SEQ ID NO: 3554172 - DNA, 25 bp, Homo sapien
cctgtgctcagggaaaaatggcccc

SEQ ID NO: 3554173 - DNA, 25 bp, Homo sapien
gccctggtcaggatgcattagctca

SEQ ID NO: 3554174 - DNA, 25 bp, Homo sapien
gagccagagctcttctagcttcagc

SEQ ID NO: 3554175 - DNA, 25 bp, Homo sapien
acagggagtttccatcgagccagag

SEQ ID NO: 3554176 - DNA, 25 bp, Homo sapien
gcttcagcccctttatcttgtccaa

SEQ ID NO: 3554177 - DNA, 25 bp, Homo sapien
tgatgtaggtggactggtctcggaa

SEQ ID NO: 3554178 - DNA, 25 bp, Homo sapien
tgcaaaccagcacatctggcctgag

SEQ ID NO: 3554179 - DNA, 25 bp, Homo sapien
cagcttggactagaggcgtgcaaac

SEQ ID NO: 3554180 - DNA, 25 bp, Homo sapien
taggattagagttgcaaaccagcac

SEQ ID NO: 3554181 - DNA, 25 bp, Homo sapien
ccttcaaaaatatagccgagctatc

SEQ ID NO: 3554182 - DNA, 25 bp, Homo sapien
gcctgtacagcctgttgttgctcaa

SEQ ID NO: 3554183 - DNA, 25 bp, Homo sapien
gaacaatgctagacatgtcatccag

SEQ ID NO: 3554184 - DNA, 25 bp, Homo sapien
ttctgaacaatgctagacatgtcat

SEQ ID NO: 3554185 - DNA, 25 bp, Homo sapien
ggatcttcaggttgggtgccttctg

SEQ ID NO: 3554186 - DNA, 25 bp, Homo sapien
gccacttcctatctaacacaccctg

SEQ ID NO: 3554187 - DNA, 25 bp, Homo sapien
gcttcctcatgcctaatactgggcc

SEQ ID NO: 3554188 - DNA, 25 bp, Homo sapien
caagtggatcagagacgaatctgcc

SEQ ID NO: 3554189 - DNA, 25 bp, Homo sapien
gatcagagacgaatctgccctccag

SEQ ID NO: 3554190 - DNA, 25 bp, Homo sapien
ctgccatacagcttctgcgattcag

SEQ ID NO: 3554191 - DNA, 25 bp, Homo sapien
tcttcaatgatcctcagggtagctg

SEQ ID NO: 3554192 - DNA, 25 bp, Homo sapien
cagcttctgcgattcaggacaacgt

SEQ ID NO: 3554193 - DNA, 25 bp, Homo sapien
ctcttcaatgatcctcagggtagct

SEQ ID NO: 3554194 - DNA, 25 bp, Homo sapien
tcaccacctatctgagaactactgc

SEQ ID NO: 3554195 - DNA, 25 bp, Homo sapien
tgccagcattagcagtaaaacatcc

SEQ ID NO: 3554196 - DNA, 25 bp, Homo sapien
aagactgagagggtttgcccatgcc

SEQ ID NO: 3554197 - DNA, 25 bp, Homo sapien
tgacagatcccaccttatcaccacc

SEQ ID NO: 3554198 - DNA, 25 bp, Homo sapien
tgggtctgaacggaggcctttgagg

SEQ ID NO: 3554199 - DNA, 25 bp, Homo sapien
tcaagggcttgttgggagccatcgt

SEQ ID NO: 3554200 - DNA, 25 bp, Homo sapien
gggagccatcgtatcgtttgctcat

SEQ ID NO: 3554201 - DNA, 25 bp, Homo sapien
ctgaacggaggcctttgaggtcaag

SEQ ID NO: 3554202 - DNA, 25 bp, Homo sapien
cagtatagtgtggggtggagcagaa

SEQ ID NO: 3554203 - DNA, 25 bp, Homo sapien
cattcagtatagtgtggggtggagc

SEQ ID NO: 3554204 - DNA, 25 bp, Homo sapien
gagcagaagagttgatgatgataga

SEQ ID NO: 3554205 - DNA, 25 bp, Homo sapien
ttcagtatagtgtggggtggagcag

SEQ ID NO: 3554206 - DNA, 25 bp, Homo sapien
gccaagccaggccctttaaacacac

SEQ ID NO: 3554207 - DNA, 25 bp, Homo sapien
tcttcaacgaagaactgggcccgtg

SEQ ID NO: 3554208 - DNA, 25 bp, Homo sapien
gggcccgtgtattctcatagtgaaa

SEQ ID NO: 3554209 - DNA, 25 bp, Homo sapien
ttatagttgacagccttcaatgcag

SEQ ID NO: 3554210 - DNA, 25 bp, Homo sapien
ggttctcccgatccaaaatcttata

SEQ ID NO: 3554211 - DNA, 25 bp, Homo sapien
tgcacttgctctgaatcatgctcag

SEQ ID NO: 3554212 - DNA, 25 bp, Homo sapien
ggtgaagggcacactgcacttgctc

SEQ ID NO: 3554213 - DNA, 25 bp, Homo sapien
cagtaacatgaatgcgatctcgatc

SEQ ID NO: 3554214 - DNA, 25 bp, Homo sapien
cttgaaccagttctttgaggtccca

SEQ ID NO: 3554215 - DNA, 25 bp, Homo sapien
tgccaagtatcaccccgacggttag

SEQ ID NO: 3554216 - DNA, 25 bp, Homo sapien
gatctcgatcatgccaagtatcacc

SEQ ID NO: 3554217 - DNA, 25 bp, Homo sapien
tcggggaccatcctgggcatcactc

SEQ ID NO: 3554218 - DNA, 25 bp, Homo sapien
ggggaccatcctgggcatcactcat

SEQ ID NO: 3554219 - DNA, 25 bp, Homo sapien
cggggaccatcctgggcatcactca

SEQ ID NO: 3554220 - DNA, 25 bp, Homo sapien
tcaccatatttccaccggaagggac

SEQ ID NO: 3554221 - DNA, 25 bp, Homo sapien
tctttgagggaaattaacgcgttca

SEQ ID NO: 3554222 - DNA, 25 bp, Homo sapien
tcctcaaggcgggaagaccgaatac

SEQ ID NO: 3554223 - DNA, 25 bp, Homo sapien
tcttccagacctacggtttccttca

SEQ ID NO: 3554224 - DNA, 25 bp, Homo sapien
agttcaagaccgactggacgcagta

SEQ ID NO: 3554225 - DNA, 25 bp, Homo sapien
ggaatccaggagtcaacaactcggg

SEQ ID NO: 3554226 - DNA, 25 bp, Homo sapien
tagaaggcgcagctaacattcactg

SEQ ID NO: 3554227 - DNA, 25 bp, Homo sapien
cacattaaaggaagagtcaggccgc

SEQ ID NO: 3554228 - DNA, 25 bp, Homo sapien
cgctgtacgacttcccctcgtccgc

SEQ ID NO: 3554229 - DNA, 25 bp, Homo sapien
tgtacgacttcccctcgtccgccat

SEQ ID NO: 3554230 - DNA, 25 bp, Homo sapien
ctgtacgacttcccctcgtccgcca

SEQ ID NO: 3554231 - DNA, 25 bp, Homo sapien
gctgtacgacttcccctcgtccgcc

SEQ ID NO: 3554232 - DNA, 25 bp, Homo sapien
aactcccaagcgctcaggaccgaag

SEQ ID NO: 3554233 - DNA, 25 bp, Homo sapien
ggcgccaccgcatttatacagcaaa

SEQ ID NO: 3554234 - DNA, 25 bp, Homo sapien
tcaggaccgaagtgtccctacgccg

SEQ ID NO: 3554235 - DNA, 25 bp, Homo sapien
acagcgaagatcaagggcgggctca

SEQ ID NO: 3554236 - DNA, 25 bp, Homo sapien
gaaccctgtgtgtttcataggcctg

SEQ ID NO: 3554237 - DNA, 25 bp, Homo sapien
ggcagtggtcattcttagcagttcc

SEQ ID NO: 3554238 - DNA, 25 bp, Homo sapien
taattgggagaaaacgagctgcagc

SEQ ID NO: 3554239 - DNA, 25 bp, Homo sapien
ccaacagagtgcctcagagtagaga

SEQ ID NO: 3554240 - DNA, 25 bp, Homo sapien
tcaagcaaggaagaccacaaagatg

SEQ ID NO: 3554241 - DNA, 25 bp, Homo sapien
ggatctctgaatgggcggcctcaac

SEQ ID NO: 3554242 - DNA, 25 bp, Homo sapien
catgagccaccggttggaggtgaca

SEQ ID NO: 3554243 - DNA, 25 bp, Homo sapien
gatgaggaagattttgaccatgagc

SEQ ID NO: 3554244 - DNA, 25 bp, Homo sapien
tggggacaaggccgggagaagagga

SEQ ID NO: 3554245 - DNA, 25 bp, Homo sapien
gacaaggccgggagaagaggaaaca

SEQ ID NO: 3554246 - DNA, 25 bp, Homo sapien
ctggggacaaggccgggagaagagg

SEQ ID NO: 3554247 - DNA, 25 bp, Homo sapien
tgttcacagaccattgcagtcagga

SEQ ID NO: 3554248 - DNA, 25 bp, Homo sapien
tatggaccctagttttggccaggct

SEQ ID NO: 3554249 - DNA, 25 bp, Homo sapien
taatgacacggacaggaaatcaggg

SEQ ID NO: 3554250 - DNA, 25 bp, Homo sapien
tataaagtccctaacccacaagagc

SEQ ID NO: 3554251 - DNA, 25 bp, Homo sapien
gtctctcctactagtgagctccagg

SEQ ID NO: 3554252 - DNA, 25 bp, Homo sapien
tcttgccctatcatactgagctgtc

SEQ ID NO: 3554253 - DNA, 25 bp, Homo sapien
tcagacccagcaggattagctcaca

SEQ ID NO: 3554254 - DNA, 25 bp, Homo sapien
gagctgtcactgtcaacttatgtct

SEQ ID NO: 3554255 - DNA, 25 bp, Homo sapien
ccaaacctggatgctcatcagaacc

SEQ ID NO: 3554256 - DNA, 25 bp, Homo sapien
ttaatcagtagttcccaaacctgga

SEQ ID NO: 3554257 - DNA, 25 bp, Homo sapien
cctgactctaggatcaagacagctg

SEQ ID NO: 3554258 - DNA, 25 bp, Homo sapien
tactcacggtaccttataaatggct

SEQ ID NO: 3554259 - DNA, 25 bp, Homo sapien
gactgaagtggtctgaagataaatg

SEQ ID NO: 3554260 - DNA, 25 bp, Homo sapien
cctcttagagccaagccttgattta

SEQ ID NO: 3554261 - DNA, 25 bp, Homo sapien
gagcattgctacaatagcctctgtc

SEQ ID NO: 3554262 - DNA, 25 bp, Homo sapien
tctgaagataaatgccgctccaccc

SEQ ID NO: 3554263 - DNA, 25 bp, Homo sapien
cttggggcttggtatacatattatc

SEQ ID NO: 3554264 - DNA, 25 bp, Homo sapien
ctataaataaattgcgtgtcttggg

SEQ ID NO: 3554265 - DNA, 25 bp, Homo sapien
tggggcttggtatacatattatctc

SEQ ID NO: 3554266 - DNA, 25 bp, Homo sapien
tcttggggcttggtatacatattat

SEQ ID NO: 3554267 - DNA, 25 bp, Homo sapien
ttgtgccatccatgtgcagaggcca

SEQ ID NO: 3554268 - DNA, 25 bp, Homo sapien
aagtgatcttctccgctgagcctcc

SEQ ID NO: 3554269 - DNA, 25 bp, Homo sapien
gattaagtgtcacgatatcggcaac

SEQ ID NO: 3554270 - DNA, 25 bp, Homo sapien
gataaagctaatctggccaactgtt

SEQ ID NO: 3554271 - DNA, 25 bp, Homo sapien
tatcggcaacctactgtgaaatggt

SEQ ID NO: 3554272 - DNA, 25 bp, Homo sapien
ctgggcgtggtctcacgcacttgca

SEQ ID NO: 3554273 - DNA, 25 bp, Homo sapien
cggatcatgacatcaagagattaag

SEQ ID NO: 3554274 - DNA, 25 bp, Homo sapien
gggcgtggtctcacgcacttgcagt

SEQ ID NO: 3554275 - DNA, 25 bp, Homo sapien
gcggatcatgacatcaagagattaa

SEQ ID NO: 3554276 - DNA, 25 bp, Homo sapien
aactcttgtagtagcaggaggcacc

SEQ ID NO: 3554277 - DNA, 25 bp, Homo sapien
gattcttgctatggtgagactgtcc

SEQ ID NO: 3554278 - DNA, 25 bp, Homo sapien
tattaggatacacgttccacaaggg

SEQ ID NO: 3554279 - DNA, 25 bp, Homo sapien
gttcattactttctagccacgcagg

SEQ ID NO: 3554280 - DNA, 25 bp, Homo sapien
tggaacagtgcctcacatgaacagg

SEQ ID NO: 3554281 - DNA, 25 bp, Homo sapien
ccatgggtgggcagaattcactcta

SEQ ID NO: 3554282 - DNA, 25 bp, Homo sapien
tctacttgccactgtatctcccgca

SEQ ID NO: 3554283 - DNA, 25 bp, Homo sapien
actttaagatgccaatccacgggga

SEQ ID NO: 3554284 - DNA, 25 bp, Homo sapien
tggagcccaactcaacaattgtcga

SEQ ID NO: 3554285 - DNA, 25 bp, Homo sapien
ctgcccgactctggatgtaggaatc

SEQ ID NO: 3554286 - DNA, 25 bp, Homo sapien
atgttctgcatggtgtctgcccgac

SEQ ID NO: 3554287 - DNA, 25 bp, Homo sapien
gttccttaaccatgtgtgccaactg

SEQ ID NO: 3554288 - DNA, 25 bp, Homo sapien
tggagaagctgattctacctagttc

SEQ ID NO: 3554289 - DNA, 25 bp, Homo sapien
ctcgggaaccacagaggataatgga

SEQ ID NO: 3554290 - DNA, 25 bp, Homo sapien
ctgattctacctagttcagagcctg

SEQ ID NO: 3554291 - DNA, 25 bp, Homo sapien
ccacagaggataatggagaagctga

SEQ ID NO: 3554292 - DNA, 25 bp, Homo sapien
ggaggcatgggactctgcccccaga

SEQ ID NO: 3554293 - DNA, 25 bp, Homo sapien
gtcgatggcgacatccttggaggca

SEQ ID NO: 3554294 - DNA, 25 bp, Homo sapien
gagagtccatcatgtcgatggcgac

SEQ ID NO: 3554295 - DNA, 25 bp, Homo sapien
tggctggtccgagagtccatcatgt

SEQ ID NO: 3554296 - DNA, 25 bp, Homo sapien
ggatcacgaatctcaaccatctggt

SEQ ID NO: 3554297 - DNA, 25 bp, Homo sapien
ggttcaaagcccacatgctctgggt

SEQ ID NO: 3554298 - DNA, 25 bp, Homo sapien
caacccgtgcctttagaggatgcca

SEQ ID NO: 3554299 - DNA, 25 bp, Homo sapien
ggatgtggcacaccttaacagttaa

SEQ ID NO: 3554300 - DNA, 25 bp, Homo sapien
acaggtgcccgggagaactgctctc

SEQ ID NO: 3554301 - DNA, 25 bp, Homo sapien
caggtgcccgggagaactgctctct

SEQ ID NO: 3554302 - DNA, 25 bp, Homo sapien
aggtgcccgggagaactgctctctc

SEQ ID NO: 3554303 - DNA, 25 bp, Homo sapien
agcaggcatgttaaagagactccca

SEQ ID NO: 3554304 - DNA, 25 bp, Homo sapien
gacctgaagccactagaaagcaggc

SEQ ID NO: 3554305 - DNA, 25 bp, Homo sapien
acccctcctacgcagattgttctca

SEQ ID NO: 3554306 - DNA, 25 bp, Homo sapien
gaaaaacgcaaaggacctgaagcca

SEQ ID NO: 3554307 - DNA, 25 bp, Homo sapien
gaagtcattggacatagaagccagt

SEQ ID NO: 3554308 - DNA, 25 bp, Homo sapien
tgtcctcacttctaaaaccgatttg

SEQ ID NO: 3554309 - DNA, 25 bp, Homo sapien
aaaaccgatttgaagtcattggaca

SEQ ID NO: 3554310 - DNA, 25 bp, Homo sapien
ctctgtcctcacttctaaaaccgat

SEQ ID NO: 3554311 - DNA, 25 bp, Homo sapien
tttgtttgttgaggctattgatgtc

SEQ ID NO: 3554312 - DNA, 25 bp, Homo sapien
ccttggctctcacgaaatcctggag

SEQ ID NO: 3554313 - DNA, 25 bp, Homo sapien
tgcccttggctctcacgaaatcctg

SEQ ID NO: 3554314 - DNA, 25 bp, Homo sapien
ggctctcacgaaatcctggagctga

SEQ ID NO: 3554315 - DNA, 25 bp, Homo sapien
gtccccatggcaatggaaaatgaca

SEQ ID NO: 3554316 - DNA, 25 bp, Homo sapien
agacagaagtgatctgattggaatg

SEQ ID NO: 3554317 - DNA, 25 bp, Homo sapien
tccccatggcaatggaaaatgacag

SEQ ID NO: 3554318 - DNA, 25 bp, Homo sapien
agaagtgatctgattggaatgctgg

SEQ ID NO: 3554319 - DNA, 25 bp, Homo sapien
tcaaagagggacttgcgctttgcca

SEQ ID NO: 3554320 - DNA, 25 bp, Homo sapien
tccactgctttatcatcaaagaggg

SEQ ID NO: 3554321 - DNA, 25 bp, Homo sapien
gatatatgttagctcttcaatttcc

SEQ ID NO: 3554322 - DNA, 25 bp, Homo sapien
ctgtttgatgatatatgttagctct

SEQ ID NO: 3554323 - DNA, 25 bp, Homo sapien
ttggcaaatgtgttgctaaggtctt

SEQ ID NO: 3554324 - DNA, 25 bp, Homo sapien
gcttggcaaatgtgttgctaaggtc

SEQ ID NO: 3554325 - DNA, 25 bp, Homo sapien
cttggcaaatgtgttgctaaggtct

SEQ ID NO: 3554326 - DNA, 25 bp, Homo sapien
gttgctaaggtctttcccaatgcgc

SEQ ID NO: 3554327 - DNA, 25 bp, Homo sapien
ttggccatgagggtgaattcactgc

SEQ ID NO: 3554328 - DNA, 25 bp, Homo sapien
cggacagcacgcaaagctggcttat

SEQ ID NO: 3554329 - DNA, 25 bp, Homo sapien
ggtgaattcactgcgttgtcggaca

SEQ ID NO: 3554330 - DNA, 25 bp, Homo sapien
gcgttgtcggacagcacgcaaagct

SEQ ID NO: 3554331 - DNA, 25 bp, Homo sapien
accacatccaaccctaagtgatttt

SEQ ID NO: 3554332 - DNA, 25 bp, Homo sapien
aaattactgatctagggccaggtgt

SEQ ID NO: 3554333 - DNA, 25 bp, Homo sapien
ccacatccaaccctaagtgattttg

SEQ ID NO: 3554334 - DNA, 25 bp, Homo sapien
aattactgatctagggccaggtgtg

SEQ ID NO: 3554335 - DNA, 25 bp, Homo sapien
gagacactgcctgtacgaaaaaatt

SEQ ID NO: 3554336 - DNA, 25 bp, Homo sapien
gtgagacactgcctgtacgaaaaaa

SEQ ID NO: 3554337 - DNA, 25 bp, Homo sapien
attagctgagtggtgcatccatgta

SEQ ID NO: 3554338 - DNA, 25 bp, Homo sapien
ctgagtggtgcatccatgtagtccc

SEQ ID NO: 3554339 - DNA, 25 bp, Homo sapien
tgacagagttgaaaaacagatctca

SEQ ID NO: 3554340 - DNA, 25 bp, Homo sapien
ctgttgacagagttgaaaaacagat

SEQ ID NO: 3554341 - DNA, 25 bp, Homo sapien
cagagttgaaaaacagatctcaaaa

SEQ ID NO: 3554342 - DNA, 25 bp, Homo sapien
ttgacagagttgaaaaacagatctc

SEQ ID NO: 3554343 - DNA, 25 bp, Homo sapien
gcacagtccttcctagatttgagta

SEQ ID NO: 3554344 - DNA, 25 bp, Homo sapien
ttacttcggttaacagtggtggagc

SEQ ID NO: 3554345 - DNA, 25 bp, Homo sapien
caagcctatcagttccatcaggtac

SEQ ID NO: 3554346 - DNA, 25 bp, Homo sapien
tgcttatagcagaccctacaggccc

SEQ ID NO: 3554347 - DNA, 25 bp, Homo sapien
cctgggtccgatcccggcaggacat

SEQ ID NO: 3554348 - DNA, 25 bp, Homo sapien
ctgacgggtctgcagcgacttgcag

SEQ ID NO: 3554349 - DNA, 25 bp, Homo sapien
tgcagcgacttgcaggcagacagaa

SEQ ID NO: 3554350 - DNA, 25 bp, Homo sapien
gaaactcctgggtccgatcccggca

SEQ ID NO: 3554351 - DNA, 25 bp, Homo sapien
gacccgtagcgtttccgcgggatca

SEQ ID NO: 3554352 - DNA, 25 bp, Homo sapien
ggacctgtgtctttgagagacccag

SEQ ID NO: 3554353 - DNA, 25 bp, Homo sapien
ccagcagttgcaggggacaggacct

SEQ ID NO: 3554354 - DNA, 25 bp, Homo sapien
ggtagacaccctgatccgtgttctt

SEQ ID NO: 3554355 - DNA, 25 bp, Homo sapien
tctgcacttctcgtggactttcgcg

SEQ ID NO: 3554356 - DNA, 25 bp, Homo sapien
gagagtgtcattccccaggcaactt

SEQ ID NO: 3554357 - DNA, 25 bp, Homo sapien
caccccaatcaacaaatccccgagc

SEQ ID NO: 3554358 - DNA, 25 bp, Homo sapien
tttcgcgcccaggacgctcgcaaat

SEQ ID NO: 3554359 - DNA, 25 bp, Homo sapien
ccggggaccctgaagcagagacagg

SEQ ID NO: 3554360 - DNA, 25 bp, Homo sapien
cttcttccaacttggctctggcggc

SEQ ID NO: 3554361 - DNA, 25 bp, Homo sapien
tgagactccggcccggcccgtgtaa

SEQ ID NO: 3554362 - DNA, 25 bp, Homo sapien
gagccaaccccgtggtcctgagact

SEQ ID NO: 3554363 - DNA, 25 bp, Homo sapien
cccgaccaaagactggaagcggcca

SEQ ID NO: 3554364 - DNA, 25 bp, Homo sapien
gagcactgaagccgccgaaacccga

SEQ ID NO: 3554365 - DNA, 25 bp, Homo sapien
aagcggccacgtcacctacacgtaa

SEQ ID NO: 3554366 - DNA, 25 bp, Homo sapien
acttccaatctcaccggccgtcact

SEQ ID NO: 3554367 - DNA, 25 bp, Homo sapien
taaagaaccagctgcccggtggtgt

SEQ ID NO: 3554368 - DNA, 25 bp, Homo sapien
gagccttaaagaaccagctgcccgg

SEQ ID NO: 3554369 - DNA, 25 bp, Homo sapien
gccttaaagaaccagctgcccggtg

SEQ ID NO: 3554370 - DNA, 25 bp, Homo sapien
aaggagccttaaagaaccagctgcc

SEQ ID NO: 3554371 - DNA, 25 bp, Homo sapien
tgagagcaggtctggggtcatccct

SEQ ID NO: 3554372 - DNA, 25 bp, Homo sapien
ttctcggatcggactctcctgcttc

SEQ ID NO: 3554373 - DNA, 25 bp, Homo sapien
gcttccgaatctggtctggttgcct

SEQ ID NO: 3554374 - DNA, 25 bp, Homo sapien
tgcctcttgcttggccgcgaggagc

SEQ ID NO: 3554375 - DNA, 25 bp, Homo sapien
tcgacttgtgattcggatggtccgg

SEQ ID NO: 3554376 - DNA, 25 bp, Homo sapien
ccacagcacggtaatcagaaggctt

SEQ ID NO: 3554377 - DNA, 25 bp, Homo sapien
gaccgaacgtggatagtcgccgcca

SEQ ID NO: 3554378 - DNA, 25 bp, Homo sapien
gagttcaagtcgatatcttcggcgc

SEQ ID NO: 3554379 - DNA, 25 bp, Homo sapien
gggacgacgaggcctctgagctcac

SEQ ID NO: 3554380 - DNA, 25 bp, Homo sapien
ctgaggggacgacgaggcctctgag

SEQ ID NO: 3554381 - DNA, 25 bp, Homo sapien
tgaggggacgacgaggcctctgagc

SEQ ID NO: 3554382 - DNA, 25 bp, Homo sapien
aggggacgacgaggcctctgagctc

SEQ ID NO: 3554383 - DNA, 25 bp, Homo sapien
gggaagccccctctcacactccctg

SEQ ID NO: 3554384 - DNA, 25 bp, Homo sapien
ctcatcttccctgccgtcctcagac

SEQ ID NO: 3554385 - DNA, 25 bp, Homo sapien
tccctgccgtcctcagactcttcct

SEQ ID NO: 3554386 - DNA, 25 bp, Homo sapien
cagacatctcaaagtccttgtcttg

SEQ ID NO: 3554387 - DNA, 25 bp, Homo sapien
ttctccgtctcgtttggagagctcc

SEQ ID NO: 3554388 - DNA, 25 bp, Homo sapien
ttctttctccgtctcgtttggagag

SEQ ID NO: 3554389 - DNA, 25 bp, Homo sapien
gcccaaagttcatctgtctctgtgt

SEQ ID NO: 3554390 - DNA, 25 bp, Homo sapien
tgctccaaacccgagagcttccgct

SEQ ID NO: 3554391 - DNA, 25 bp, Homo sapien
cccagttgtccctgcctgacaagag

SEQ ID NO: 3554392 - DNA, 25 bp, Homo sapien
tcccagttgtccctgcctgacaaga

SEQ ID NO: 3554393 - DNA, 25 bp, Homo sapien
gaggcagttcaattgagacttgaga

SEQ ID NO: 3554394 - DNA, 25 bp, Homo sapien
agaggaggcagttcaattgagactt

SEQ ID NO: 3554395 - DNA, 25 bp, Homo sapien
ctgcaaaagatgagggaccttaagg

SEQ ID NO: 3554396 - DNA, 25 bp, Homo sapien
cacaagaccatgagttggaggtggg

SEQ ID NO: 3554397 - DNA, 25 bp, Homo sapien
ggagccaggcatgctgagacagaaa

SEQ ID NO: 3554398 - DNA, 25 bp, Homo sapien
agacagaaacatgaacggagggcac

SEQ ID NO: 3554399 - DNA, 25 bp, Homo sapien
tccagaccccgtggattctggatcc

SEQ ID NO: 3554400 - DNA, 25 bp, Homo sapien
tgtccaagccacaggaggctagtag

SEQ ID NO: 3554401 - DNA, 25 bp, Homo sapien
gtggcactgcaacccacgcacactg

SEQ ID NO: 3554402 - DNA, 25 bp, Homo sapien
gattctggatcctgtgtatcctcaa

SEQ ID NO: 3554403 - DNA, 25 bp, Homo sapien
gccgaaggtcaatttctgccagctg

SEQ ID NO: 3554404 - DNA, 25 bp, Homo sapien
cttgccgaaggtcaatttctgccag

SEQ ID NO: 3554405 - DNA, 25 bp, Homo sapien
aaggtcaatttctgccagctgccca

SEQ ID NO: 3554406 - DNA, 25 bp, Homo sapien
cgaaggtcaatttctgccagctgcc

SEQ ID NO: 3554407 - DNA, 25 bp, Homo sapien
taggtggtctctaggactggccggc

SEQ ID NO: 3554408 - DNA, 25 bp, Homo sapien
cccggagtgagggtcatggctgtta

SEQ ID NO: 3554409 - DNA, 25 bp, Homo sapien
gtgggtactctccataggtggtctc

SEQ ID NO: 3554410 - DNA, 25 bp, Homo sapien
atggctgttagtgggtactctccat

SEQ ID NO: 3554411 - DNA, 25 bp, Homo sapien
aaaagtatcctcaccctgcacctac

SEQ ID NO: 3554412 - DNA, 25 bp, Homo sapien
cagcataaatggacagagctgaggg

SEQ ID NO: 3554413 - DNA, 25 bp, Homo sapien
agctgcttagcagcataaatggaca

SEQ ID NO: 3554414 - DNA, 25 bp, Homo sapien
aagtgtgtgagcattccatcccccc

SEQ ID NO: 3554415 - DNA, 25 bp, Homo sapien
caaaccataaagattccccattcgg

SEQ ID NO: 3554416 - DNA, 25 bp, Homo sapien
aaataggacaaatacagtgacccag

SEQ ID NO: 3554417 - DNA, 25 bp, Homo sapien
caggcatagttcaggaaactccacc

SEQ ID NO: 3554418 - DNA, 25 bp, Homo sapien
cattcgggcccttcctgtaaagctg

SEQ ID NO: 3554419 - DNA, 25 bp, Homo sapien
gaagagcagttgtgtcaaaccgtgg

SEQ ID NO: 3554420 - DNA, 25 bp, Homo sapien
ggaagcgcttgctcctctgaactca

SEQ ID NO: 3554421 - DNA, 25 bp, Homo sapien
aatacagtagaggaaggtcatgggc

SEQ ID NO: 3554422 - DNA, 25 bp, Homo sapien
ggaggctgctttatcccaggagaag

SEQ ID NO: 3554423 - DNA, 25 bp, Homo sapien
tgtcctggtcccagatgggaacccg

SEQ ID NO: 3554424 - DNA, 25 bp, Homo sapien
ctgtgcaggtgacaagcttctgtga

SEQ ID NO: 3554425 - DNA, 25 bp, Homo sapien
agatgggaacccgcaagtccagcca

SEQ ID NO: 3554426 - DNA, 25 bp, Homo sapien
cctgggagaaactgtatgtcctggt

SEQ ID NO: 3554427 - DNA, 25 bp, Homo sapien
ggaggacagggctatggggggctcg

SEQ ID NO: 3554428 - DNA, 25 bp, Homo sapien
ggacagggctatggggggctcgatg

SEQ ID NO: 3554429 - DNA, 25 bp, Homo sapien
cagggctatggggggctcgatgtgc

SEQ ID NO: 3554430 - DNA, 25 bp, Homo sapien
agggctatggggggctcgatgtgcc

SEQ ID NO: 3554431 - DNA, 25 bp, Homo sapien
ggccctgaacacaggttcctcagag

SEQ ID NO: 3554432 - DNA, 25 bp, Homo sapien
ttcttggccctgaacacaggttcct

SEQ ID NO: 3554433 - DNA, 25 bp, Homo sapien
tgtgctgggtcttggcgcatcctac

SEQ ID NO: 3554434 - DNA, 25 bp, Homo sapien
tgcaggtcccatatcttcaaagcat

SEQ ID NO: 3554435 - DNA, 25 bp, Homo sapien
gataagagtccgttccagagtcctt

SEQ ID NO: 3554436 - DNA, 25 bp, Homo sapien
ggagataagagtccgttccagagtc

SEQ ID NO: 3554437 - DNA, 25 bp, Homo sapien
taagagtccgttccagagtccttaa

SEQ ID NO: 3554438 - DNA, 25 bp, Homo sapien
ataggagataagagtccgttccaga

SEQ ID NO: 3554439 - DNA, 25 bp, Homo sapien
cagcccacctcccccaaccatcagg

SEQ ID NO: 3554440 - DNA, 25 bp, Homo sapien
ccacctcccccaaccatcagggcag

SEQ ID NO: 3554441 - DNA, 25 bp, Homo sapien
cacctcccccaaccatcagggcagg

SEQ ID NO: 3554442 - DNA, 25 bp, Homo sapien
gcccacctcccccaaccatcagggc

SEQ ID NO: 3554443 - DNA, 25 bp, Homo sapien
tgtgtccttgtccttgtcatgccag

SEQ ID NO: 3554444 - DNA, 25 bp, Homo sapien
gggtcagaggatgtgtccttgtcct

SEQ ID NO: 3554445 - DNA, 25 bp, Homo sapien
tgtccttgtcatgccagactctgag

SEQ ID NO: 3554446 - DNA, 25 bp, Homo sapien
tgccagactctgagaatcccagaat

SEQ ID NO: 3554447 - DNA, 25 bp, Homo sapien
actccttgttctaatctttctctcc

SEQ ID NO: 3554448 - DNA, 25 bp, Homo sapien
tgggcgaggccacggaacatgccct

SEQ ID NO: 3554449 - DNA, 25 bp, Homo sapien
gaatatgccatcctcggtgctgaag

SEQ ID NO: 3554450 - DNA, 25 bp, Homo sapien
tgctgaagtgcttcaccgtcctgtc

SEQ ID NO: 3554451 - DNA, 25 bp, Homo sapien
gcccgggcagtgtctctgaccctgg

SEQ ID NO: 3554452 - DNA, 25 bp, Homo sapien
gaagggcaagatggcgaggagagcg

SEQ ID NO: 3554453 - DNA, 25 bp, Homo sapien
agagcgaggctgctgcgccccaggc

SEQ ID NO: 3554454 - DNA, 25 bp, Homo sapien
aggagagcgaggctgctgcgcccca

SEQ ID NO: 3554455 - DNA, 25 bp, Homo sapien
cgaggagagcgaggctgctgcgccc

SEQ ID NO: 3554456 - DNA, 25 bp, Homo sapien
ccagctccggcccgaccaggggcca

SEQ ID NO: 3554457 - DNA, 25 bp, Homo sapien
agctccggcccgaccaggggccact

SEQ ID NO: 3554458 - DNA, 25 bp, Homo sapien
gctccggcccgaccaggggccactc

SEQ ID NO: 3554459 - DNA, 25 bp, Homo sapien
tgtcctccggccgtgaagttcgccg

SEQ ID NO: 3554460 - DNA, 25 bp, Homo sapien
gcctgttttcgctgaagatttaccc

SEQ ID NO: 3554461 - DNA, 25 bp, Homo sapien
gaagttcgccgcctgttttcgctga

SEQ ID NO: 3554462 - DNA, 25 bp, Homo sapien
gtgccccaacacagggcgctcactg

SEQ ID NO: 3554463 - DNA, 25 bp, Homo sapien
ctgagagacgaaggcgtcagtcacg

SEQ ID NO: 3554464 - DNA, 25 bp, Homo sapien
ccaggggcgcgagtgcacccctgca

SEQ ID NO: 3554465 - DNA, 25 bp, Homo sapien
tgcacttcccgacgcccgagcctgc

SEQ ID NO: 3554466 - DNA, 25 bp, Homo sapien
agacgaaggcgtcagtcacgccagg

SEQ ID NO: 3554467 - DNA, 25 bp, Homo sapien
atcccagtctcggtgccgacccaca

SEQ ID NO: 3554468 - DNA, 25 bp, Homo sapien
caagatcccagtctcggtgccgacc

SEQ ID NO: 3554469 - DNA, 25 bp, Homo sapien
agatcccagtctcggtgccgaccca

SEQ ID NO: 3554470 - DNA, 25 bp, Homo sapien
tcccagtctcggtgccgacccacac

SEQ ID NO: 3554471 - DNA, 25 bp, Homo sapien
gttccagcgtgcagcagcagccgcc

SEQ ID NO: 3554472 - DNA, 25 bp, Homo sapien
tccagcgtgcagcagcagccgccat

SEQ ID NO: 3554473 - DNA, 25 bp, Homo sapien
tggttccagcgtgcagcagcagccg

SEQ ID NO: 3554474 - DNA, 25 bp, Homo sapien
atggttccagcgtgcagcagcagcc

SEQ ID NO: 3554475 - DNA, 25 bp, Homo sapien
cagttcacacttccggcgcagcgtg

SEQ ID NO: 3554476 - DNA, 25 bp, Homo sapien
agacagttcacacttccggcgcagc

SEQ ID NO: 3554477 - DNA, 25 bp, Homo sapien
gagtccgatgcagcgcagtgtagtt

SEQ ID NO: 3554478 - DNA, 25 bp, Homo sapien
cagcgtgtgcgtcaccagcgggcgt

SEQ ID NO: 3554479 - DNA, 25 bp, Homo sapien
gccgaaacagtaaagcttccatgct

SEQ ID NO: 3554480 - DNA, 25 bp, Homo sapien
cagtaaagcttccatgcttgttttg

SEQ ID NO: 3554481 - DNA, 25 bp, Homo sapien
gaagagccgaaacagtaaagcttcc

SEQ ID NO: 3554482 - DNA, 25 bp, Homo sapien
gaagtttgaagagccgaaacagtaa

SEQ ID NO: 3554483 - DNA, 25 bp, Homo sapien
ttacgaaaatgaaaccaggaggtgc

SEQ ID NO: 3554484 - DNA, 25 bp, Homo sapien
ccggatcaagccagccctagtctgt

SEQ ID NO: 3554485 - DNA, 25 bp, Homo sapien
tctgtctcccggctccattatgtaa

SEQ ID NO: 3554486 - DNA, 25 bp, Homo sapien
tcctggactgcgtggccggatcaag

SEQ ID NO: 3554487 - DNA, 25 bp, Homo sapien
tagacaagaaacaacaaacgattta

SEQ ID NO: 3554488 - DNA, 25 bp, Homo sapien
cgttctggaatataagtcacgaaag

SEQ ID NO: 3554489 - DNA, 25 bp, Homo sapien
ttgagagaacttcgcccttgttgcc

SEQ ID NO: 3554490 - DNA, 25 bp, Homo sapien
aacactttagaaacgattcaaatca

SEQ ID NO: 3554491 - DNA, 25 bp, Homo sapien
tactcttcaagaggcggacagcgag

SEQ ID NO: 3554492 - DNA, 25 bp, Homo sapien
gcccggcctcgtttactcttcaaga

SEQ ID NO: 3554493 - DNA, 25 bp, Homo sapien
attacagctggtattactaaaccac

SEQ ID NO: 3554494 - DNA, 25 bp, Homo sapien
tacagctggtattactaaaccaccg

SEQ ID NO: 3554495 - DNA, 25 bp, Homo sapien
gggaagtcgctactttacctagaga

SEQ ID NO: 3554496 - DNA, 25 bp, Homo sapien
gaaatacagtaatagcgcatgcgta

SEQ ID NO: 3554497 - DNA, 25 bp, Homo sapien
aagtcatcgctcagtagaaatacag

SEQ ID NO: 3554498 - DNA, 25 bp, Homo sapien
catgcgtaaataggagagggaagtc

SEQ ID NO: 3554499 - DNA, 25 bp, Homo sapien
gcaagacgacgtctcaaaaaaaata

SEQ ID NO: 3554500 - DNA, 25 bp, Homo sapien
ggcaagcgctcaatagttccaacta

SEQ ID NO: 3554501 - DNA, 25 bp, Homo sapien
gcgtcattcaacacactagcgataa

SEQ ID NO: 3554502 - DNA, 25 bp, Homo sapien
tacgctccgtgctcagttataaaac

SEQ ID NO: 3554503 - DNA, 25 bp, Homo sapien
gaagaccacatggagatactacgct

SEQ ID NO: 3554504 - DNA, 25 bp, Homo sapien
tcctattccatctcctatttccaaa

SEQ ID NO: 3554505 - DNA, 25 bp, Homo sapien
agagtgcaccgttcctggaagtact

SEQ ID NO: 3554506 - DNA, 25 bp, Homo sapien
caggtcgatgcgtggagtggacgga

SEQ ID NO: 3554507 - DNA, 25 bp, Homo sapien
catctcctatttccaaaaatccatt

SEQ ID NO: 3554508 - DNA, 25 bp, Homo sapien
tgtactgtccgccagcaaacatctg

SEQ ID NO: 3554509 - DNA, 25 bp, Homo sapien
gtactgtccgccagcaaacatctgg

SEQ ID NO: 3554510 - DNA, 25 bp, Homo sapien
cttgcatttgtactgtccgccagca

SEQ ID NO: 3554511 - DNA, 25 bp, Homo sapien
catttgtactgtccgccagcaaaca

SEQ ID NO: 3554512 - DNA, 25 bp, Homo sapien
tatacagaggaacagacacgaagtg

SEQ ID NO: 3554513 - DNA, 25 bp, Homo sapien
caattggcaacaagctaggtcagta

SEQ ID NO: 3554514 - DNA, 25 bp, Homo sapien
cctaaaggctcatgacgggaacaga

SEQ ID NO: 3554515 - DNA, 25 bp, Homo sapien
taaagctatggccttgaaaccagcc

SEQ ID NO: 3554516 - DNA, 25 bp, Homo sapien
cactttaaggtacatctgaaatacc

SEQ ID NO: 3554517 - DNA, 25 bp, Homo sapien
gcaaaccctcaactgctgtttcatt

SEQ ID NO: 3554518 - DNA, 25 bp, Homo sapien
aacagctaggttgtccaagaacttg

SEQ ID NO: 3554519 - DNA, 25 bp, Homo sapien
caaaagggcaggtagattccagata

SEQ ID NO: 3554520 - DNA, 25 bp, Homo sapien
gttcttattggattggaaaatacaa

SEQ ID NO: 3554521 - DNA, 25 bp, Homo sapien
acacaatatttaacactatgtaacc

SEQ ID NO: 3554522 - DNA, 25 bp, Homo sapien
agttcttattggattggaaaataca

SEQ ID NO: 3554523 - DNA, 25 bp, Homo sapien
atgaacacaatatttaacactatgt

SEQ ID NO: 3554524 - DNA, 25 bp, Homo sapien
tttttatacaccttatttgctcaga

SEQ ID NO: 3554525 - DNA, 25 bp, Homo sapien
ttttttatacaccttatttgctcag

SEQ ID NO: 3554526 - DNA, 25 bp, Homo sapien
ttttatacaccttatttgctcagac

SEQ ID NO: 3554527 - DNA, 25 bp, Homo sapien
cattttttatacaccttatttgctc

SEQ ID NO: 3554528 - DNA, 25 bp, Homo sapien
tccctttctctgtatagaaatcttt

SEQ ID NO: 3554529 - DNA, 25 bp, Homo sapien
caagtgatgattactccctttctct

SEQ ID NO: 3554530 - DNA, 25 bp, Homo sapien
gtgatgattactccctttctctgta

SEQ ID NO: 3554531 - DNA, 25 bp, Homo sapien
gttttcaacaagtgatgattactcc

SEQ ID NO: 3554532 - DNA, 25 bp, Homo sapien
cagtgggttcacctttacaggctct

SEQ ID NO: 3554533 - DNA, 25 bp, Homo sapien
gctctgggactaggacagagagtaa

SEQ ID NO: 3554534 - DNA, 25 bp, Homo sapien
acaggctctgggactaggacagaga

SEQ ID NO: 3554535 - DNA, 25 bp, Homo sapien
agagagtaagacatgtgaaagtttc

SEQ ID NO: 3554536 - DNA, 25 bp, Homo sapien
catagtccaccttacatttaggttt

SEQ ID NO: 3554537 - DNA, 25 bp, Homo sapien
atttttagcatagtccaccttacat

SEQ ID NO: 3554538 - DNA, 25 bp, Homo sapien
tagcatagtccaccttacatttagg

SEQ ID NO: 3554539 - DNA, 25 bp, Homo sapien
ttttagcatagtccaccttacattt

SEQ ID NO: 3554540 - DNA, 25 bp, Homo sapien
ctgtaacttcagcctggagtgaaca

SEQ ID NO: 3554541 - DNA, 25 bp, Homo sapien
acttcagcctggagtgaacacagac

SEQ ID NO: 3554542 - DNA, 25 bp, Homo sapien
gtaacttcagcctggagtgaacaca

SEQ ID NO: 3554543 - DNA, 25 bp, Homo sapien
taacttcagcctggagtgaacacag

SEQ ID NO: 3554544 - DNA, 25 bp, Homo sapien
tagaacatgtcactggaaggcaggc

SEQ ID NO: 3554545 - DNA, 25 bp, Homo sapien
gcagaaagaagtttcagggcacatt

SEQ ID NO: 3554546 - DNA, 25 bp, Homo sapien
ggcacattttataggaaacactact

SEQ ID NO: 3554547 - DNA, 25 bp, Homo sapien
cactacttagcccaagaacttccta

SEQ ID NO: 3554548 - DNA, 25 bp, Homo sapien
ttcagtcacacattgatcagactgg

SEQ ID NO: 3554549 - DNA, 25 bp, Homo sapien
gaaaatacctttcagtcacacattg

SEQ ID NO: 3554550 - DNA, 25 bp, Homo sapien
acagctcagaaaatacctttcagtc

SEQ ID NO: 3554551 - DNA, 25 bp, Homo sapien
tacctttcagtcacacattgatcag

SEQ ID NO: 3554552 - DNA, 25 bp, Homo sapien
ttgggttaagccagttatgtctgtg

SEQ ID NO: 3554553 - DNA, 25 bp, Homo sapien
tggttcaggagatcaaagactttgg

SEQ ID NO: 3554554 - DNA, 25 bp, Homo sapien
gcaattcatcactggtggttcagga

SEQ ID NO: 3554555 - DNA, 25 bp, Homo sapien
gccattgatggtaactattgcaaag

SEQ ID NO: 3554556 - DNA, 25 bp, Homo sapien
tcttgggctttagagagaaggtgct

SEQ ID NO: 3554557 - DNA, 25 bp, Homo sapien
aactcctcttgggctttagagagaa

SEQ ID NO: 3554558 - DNA, 25 bp, Homo sapien
tcaaactcctcttgggctttagaga

SEQ ID NO: 3554559 - DNA, 25 bp, Homo sapien
ctcctcttgggctttagagagaagg

SEQ ID NO: 3554560 - DNA, 25 bp, Homo sapien
catatcccgcattatgttgttccca

SEQ ID NO: 3554561 - DNA, 25 bp, Homo sapien
agaccaagtcagtagtgcttctcat

SEQ ID NO: 3554562 - DNA, 25 bp, Homo sapien
tatgttgttcccacccatcattctc

SEQ ID NO: 3554563 - DNA, 25 bp, Homo sapien
agtgcttctcatatcccgcattatg

SEQ ID NO: 3554564 - DNA, 25 bp, Homo sapien
gagattccatgtaagtcatcacaaa

SEQ ID NO: 3554565 - DNA, 25 bp, Homo sapien
aagtcatcagccgaacgagattcca

SEQ ID NO: 3554566 - DNA, 25 bp, Homo sapien
cagccgaacgagattccatgtaagt

SEQ ID NO: 3554567 - DNA, 25 bp, Homo sapien
aacagcaagtcatcagccgaacgag

SEQ ID NO: 3554568 - DNA, 25 bp, Homo sapien
caagcaggttattggttagtagtac

SEQ ID NO: 3554569 - DNA, 25 bp, Homo sapien
tttgagccaagcaggttattggtta

SEQ ID NO: 3554570 - DNA, 25 bp, Homo sapien
gagccaagcaggttattggttagta

SEQ ID NO: 3554571 - DNA, 25 bp, Homo sapien
gccaagcaggttattggttagtagt

SEQ ID NO: 3554572 - DNA, 25 bp, Homo sapien
ctgtgggtgaaagattcctcagaca

SEQ ID NO: 3554573 - DNA, 25 bp, Homo sapien
gggtgaaagattcctcagacatggt

SEQ ID NO: 3554574 - DNA, 25 bp, Homo sapien
caaagctgtgggtgaaagattcctc

SEQ ID NO: 3554575 - DNA, 25 bp, Homo sapien
tgaaagattcctcagacatggttac

SEQ ID NO: 3554576 - DNA, 25 bp, Homo sapien
catagtgagctagtttgattcatca

SEQ ID NO: 3554577 - DNA, 25 bp, Homo sapien
tgtcggtcatagtgagctagtttga

SEQ ID NO: 3554578 - DNA, 25 bp, Homo sapien
tattttcactgtcggtcatagtgag

SEQ ID NO: 3554579 - DNA, 25 bp, Homo sapien
ttcactgtcggtcatagtgagctag

SEQ ID NO: 3554580 - DNA, 25 bp, Homo sapien
tggtggcataagctgtaaggaacaa

SEQ ID NO: 3554581 - DNA, 25 bp, Homo sapien
ctgcctacttggtggcataagctgt

SEQ ID NO: 3554582 - DNA, 25 bp, Homo sapien
gtggcataagctgtaaggaacaaaa

SEQ ID NO: 3554583 - DNA, 25 bp, Homo sapien
gcctacttggtggcataagctgtaa

SEQ ID NO: 3554584 - DNA, 25 bp, Homo sapien
gcttttcaatggtatatagcaacaa

SEQ ID NO: 3554585 - DNA, 25 bp, Homo sapien
gaaggcttttcaatggtatatagca

SEQ ID NO: 3554586 - DNA, 25 bp, Homo sapien
ggcttttcaatggtatatagcaaca

SEQ ID NO: 3554587 - DNA, 25 bp, Homo sapien
aaggcttttcaatggtatatagcaa

SEQ ID NO: 3554588 - DNA, 25 bp, Homo sapien
tgccctcttcatgttaaccctggtg

SEQ ID NO: 3554589 - DNA, 25 bp, Homo sapien
tatggaataagctctcatgccctct

SEQ ID NO: 3554590 - DNA, 25 bp, Homo sapien
gagttcacaattactggttcccagg

SEQ ID NO: 3554591 - DNA, 25 bp, Homo sapien
tgacaagcattcgtctgaccctggg

SEQ ID NO: 3554592 - DNA, 25 bp, Homo sapien
agaggcagactgtcatcaggaatac

SEQ ID NO: 3554593 - DNA, 25 bp, Homo sapien
tagaggcagactgtcatcaggaata

SEQ ID NO: 3554594 - DNA, 25 bp, Homo sapien
tgtaagatagaggcagactgtcatc

SEQ ID NO: 3554595 - DNA, 25 bp, Homo sapien
agatagaggcagactgtcatcagga

SEQ ID NO: 3554596 - DNA, 25 bp, Homo sapien
attttaaggtattaggatggaatga

SEQ ID NO: 3554597 - DNA, 25 bp, Homo sapien
ttaggatggaatgaagcttattcat

SEQ ID NO: 3554598 - DNA, 25 bp, Homo sapien
tattttaaggtattaggatggaatg

SEQ ID NO: 3554599 - DNA, 25 bp, Homo sapien
aacatgctattaacttttgtacctc

SEQ ID NO: 3554600 - DNA, 25 bp, Homo sapien
ctaacatgctattaacttttgtacc

SEQ ID NO: 3554601 - DNA, 25 bp, Homo sapien
actctaacatgctattaacttttgt

SEQ ID NO: 3554602 - DNA, 25 bp, Homo sapien
tctaacatgctattaacttttgtac

SEQ ID NO: 3554603 - DNA, 25 bp, Homo sapien
gggtaacagcacacccttacaagaa

SEQ ID NO: 3554604 - DNA, 25 bp, Homo sapien
tacaagaactgtagtaccgggttgc

SEQ ID NO: 3554605 - DNA, 25 bp, Homo sapien
catttcaagaggaacaagatggaag

SEQ ID NO: 3554606 - DNA, 25 bp, Homo sapien
gatggaaggcgccaaaaaacattgt

SEQ ID NO: 3554607 - DNA, 25 bp, Homo sapien
tgaattccccaggatagattatgag

SEQ ID NO: 3554608 - DNA, 25 bp, Homo sapien
aattccccaggatagattatgagat

SEQ ID NO: 3554609 - DNA, 25 bp, Homo sapien
attccccaggatagattatgagatg

SEQ ID NO: 3554610 - DNA, 25 bp, Homo sapien
gaattccccaggatagattatgaga

SEQ ID NO: 3554611 - DNA, 25 bp, Homo sapien
tttatgtacctaaaaatagtcattc

SEQ ID NO: 3554612 - DNA, 25 bp, Homo sapien
tctcagtagtaagatgacatcactt

SEQ ID NO: 3554613 - DNA, 25 bp, Homo sapien
cagtagtaagatgacatcacttgaa

SEQ ID NO: 3554614 - DNA, 25 bp, Homo sapien
cacttctcagtagtaagatgacatc

SEQ ID NO: 3554615 - DNA, 25 bp, Homo sapien
tagtaagatgacatcacttgaaagt

SEQ ID NO: 3554616 - DNA, 25 bp, Homo sapien
tgtaagagcataaaccatgtacacc

SEQ ID NO: 3554617 - DNA, 25 bp, Homo sapien
aggtctcctctgtaagagcataaac

SEQ ID NO: 3554618 - DNA, 25 bp, Homo sapien
gtctcctctgtaagagcataaacca

SEQ ID NO: 3554619 - DNA, 25 bp, Homo sapien
ctgtaagagcataaaccatgtacac

SEQ ID NO: 3554620 - DNA, 25 bp, Homo sapien
cgctggctttgcataaagatgggtc

SEQ ID NO: 3554621 - DNA, 25 bp, Homo sapien
ctttgcataaagatgggtcttgtcc

SEQ ID NO: 3554622 - DNA, 25 bp, Homo sapien
tggaacattactgtaacgctggctt

SEQ ID NO: 3554623 - DNA, 25 bp, Homo sapien
tgtaacgctggctttgcataaagat

SEQ ID NO: 3554624 - DNA, 25 bp, Homo sapien
agacaaatcaatagggccctgacat

SEQ ID NO: 3554625 - DNA, 25 bp, Homo sapien
gggccctgacatttgttgcgtacag

SEQ ID NO: 3554626 - DNA, 25 bp, Homo sapien
ctgacatttgttgcgtacagtacag

SEQ ID NO: 3554627 - DNA, 25 bp, Homo sapien
cacccttcactaacacctcagacaa

SEQ ID NO: 3554628 - DNA, 25 bp, Homo sapien
tcagttcgtaaaatcatccccgtag

SEQ ID NO: 3554629 - DNA, 25 bp, Homo sapien
agagttcagttcgtaaaatcatccc

SEQ ID NO: 3554630 - DNA, 25 bp, Homo sapien
agttcagttcgtaaaatcatccccg

SEQ ID NO: 3554631 - DNA, 25 bp, Homo sapien
ttttctccactaatccatcagaaag

SEQ ID NO: 3554632 - DNA, 25 bp, Homo sapien
gagattaagaaatggccgtaagaac

SEQ ID NO: 3554633 - DNA, 25 bp, Homo sapien
cactcaacgaaagagcagagattaa

SEQ ID NO: 3554634 - DNA, 25 bp, Homo sapien
acttccacacactcaacgaaagagc

SEQ ID NO: 3554635 - DNA, 25 bp, Homo sapien
cacacactcaacgaaagagcagaga

SEQ ID NO: 3554636 - DNA, 25 bp, Homo sapien
ttcggttccaacgtgcgcgtaaatc

SEQ ID NO: 3554637 - DNA, 25 bp, Homo sapien
gctctcttcggttccaacgtgcgcg

SEQ ID NO: 3554638 - DNA, 25 bp, Homo sapien
tctcttcggttccaacgtgcgcgta

SEQ ID NO: 3554639 - DNA, 25 bp, Homo sapien
tgcaacaacagagctctcttcggtt

SEQ ID NO: 3554640 - DNA, 25 bp, Homo sapien
cagacggctaagcaagaggcttgca

SEQ ID NO: 3554641 - DNA, 25 bp, Homo sapien
aactcagggcatttcgaaaacgcta

SEQ ID NO: 3554642 - DNA, 25 bp, Homo sapien
aaaacgctattttctgaacagacgg

SEQ ID NO: 3554643 - DNA, 25 bp, Homo sapien
gacaggagcccaataagacattagg

SEQ ID NO: 3554644 - DNA, 25 bp, Homo sapien
tatttatcctcacggagctcagtac

SEQ ID NO: 3554645 - DNA, 25 bp, Homo sapien
tcagagttatttatcctcacggagc

SEQ ID NO: 3554646 - DNA, 25 bp, Homo sapien
ctcacggagctcagtacaggtctgt

SEQ ID NO: 3554647 - DNA, 25 bp, Homo sapien
tctcctcagagttatttatcctcac

SEQ ID NO: 3554648 - DNA, 25 bp, Homo sapien
cactgctacttttaagcctcgaggc

SEQ ID NO: 3554649 - DNA, 25 bp, Homo sapien
ttttaagcctcgaggccacgcacaa

SEQ ID NO: 3554650 - DNA, 25 bp, Homo sapien
gaggccacgcacaagaccttatccg

SEQ ID NO: 3554651 - DNA, 25 bp, Homo sapien
ttatccgccagtcgccctggccagg

SEQ ID NO: 3554652 - DNA, 25 bp, Homo sapien
gctataaagaccacgaagccactta

SEQ ID NO: 3554653 - DNA, 25 bp, Homo sapien
caacacagaaggcatagtgcgtgct

SEQ ID NO: 3554654 - DNA, 25 bp, Homo sapien
aagagtaacagctataaagaccacg

SEQ ID NO: 3554655 - DNA, 25 bp, Homo sapien
tcgcacaatcgctcaaaagaaaata

SEQ ID NO: 3554656 - DNA, 25 bp, Homo sapien
tagaaaaatgagaacgaatctcccc

SEQ ID NO: 3554657 - DNA, 25 bp, Homo sapien
gattaaataccatgccgcagaggcc

SEQ ID NO: 3554658 - DNA, 25 bp, Homo sapien
gcgcacgcgcatacgttgaccgcat

SEQ ID NO: 3554659 - DNA, 25 bp, Homo sapien
tacggcgagcgcacgcgcatacgtt

SEQ ID NO: 3554660 - DNA, 25 bp, Homo sapien
tactggatacttttcagatggtgca

SEQ ID NO: 3554661 - DNA, 25 bp, Homo sapien
gatcatgactgcagaaatagctgct

SEQ ID NO: 3554662 - DNA, 25 bp, Homo sapien
tgcaggctgcgcttagtgattctct

SEQ ID NO: 3554663 - DNA, 25 bp, Homo sapien
taactctgtacatcttgagtgcagg

SEQ ID NO: 3554664 - DNA, 25 bp, Homo sapien
ctgaatgagttagagcccgagaagc

SEQ ID NO: 3554665 - DNA, 25 bp, Homo sapien
tagtcactagcctgccggaatggaa

SEQ ID NO: 3554666 - DNA, 25 bp, Homo sapien
gatcacaggcctagtccacttaaag

SEQ ID NO: 3554667 - DNA, 25 bp, Homo sapien
aagttcacgggcctgtccaaggagg

SEQ ID NO: 3554668 - DNA, 25 bp, Homo sapien
tcttctcctatatccgccactggga

SEQ ID NO: 3554669 - DNA, 25 bp, Homo sapien
tgaccagcggagtaaggagcgctcc

SEQ ID NO: 3554670 - DNA, 25 bp, Homo sapien
acttcagcctgacatggacccacta

SEQ ID NO: 3554671 - DNA, 25 bp, Homo sapien
ctgttgcagattatgagtgaacccc

SEQ ID NO: 3554672 - DNA, 25 bp, Homo sapien
gaagtgccttataacctgacctgag

SEQ ID NO: 3554673 - DNA, 25 bp, Homo sapien
ggtaaccctgaacaatcctcctgga

SEQ ID NO: 3554674 - DNA, 25 bp, Homo sapien
gatcagcctccagtaagaacattgg

SEQ ID NO: 3554675 - DNA, 25 bp, Homo sapien
gaagattgggcactgtctgcacgac

SEQ ID NO: 3554676 - DNA, 25 bp, Homo sapien
gaccaaggccttgagccaacacagt

SEQ ID NO: 3554677 - DNA, 25 bp, Homo sapien
caggtctgccttttatagccccact

SEQ ID NO: 3554678 - DNA, 25 bp, Homo sapien
gtgctggccctcctagaaccacttt

SEQ ID NO: 3554679 - DNA, 25 bp, Homo sapien
gggtccccaggctttagtagatcca

SEQ ID NO: 3554680 - DNA, 25 bp, Homo sapien
tgatatgtgactagccaagccggac

SEQ ID NO: 3554681 - DNA, 25 bp, Homo sapien
gatattgtaggacagtcaggacacc

SEQ ID NO: 3554682 - DNA, 25 bp, Homo sapien
tccctgcctgggaatagcgaagtct

SEQ ID NO: 3554683 - DNA, 25 bp, Homo sapien
tcctggagagtatgcctagggccca

SEQ ID NO: 3554684 - DNA, 25 bp, Homo sapien
cgagtcacggagaagtagcggtcaa

SEQ ID NO: 3554685 - DNA, 25 bp, Homo sapien
gatgagtaccagcaggttgcctgtc

SEQ ID NO: 3554686 - DNA, 25 bp, Homo sapien
gagcagcagattcatgacggaggca

SEQ ID NO: 3554687 - DNA, 25 bp, Homo sapien
ttgatcaccacttcggagccaggct

SEQ ID NO: 3554688 - DNA, 25 bp, Homo sapien
cccttcctccaggcacgctacaggg

SEQ ID NO: 3554689 - DNA, 25 bp, Homo sapien
cttcctccaggcacgctacagggct

SEQ ID NO: 3554690 - DNA, 25 bp, Homo sapien
ctccaggcacgctacagggcttcct

SEQ ID NO: 3554691 - DNA, 25 bp, Homo sapien
ttcctccaggcacgctacagggctt

SEQ ID NO: 3554692 - DNA, 25 bp, Homo sapien
tggccagcagcctgattcagtccat

SEQ ID NO: 3554693 - DNA, 25 bp, Homo sapien
gcttctctatctggccagcagcctg

SEQ ID NO: 3554694 - DNA, 25 bp, Homo sapien
cctgattcagtccatcttgggggag

SEQ ID NO: 3554695 - DNA, 25 bp, Homo sapien
cagcagcctgattcagtccatcttg

SEQ ID NO: 3554696 - DNA, 25 bp, Homo sapien
tgccctggtattcacatgcctgctt

SEQ ID NO: 3554697 - DNA, 25 bp, Homo sapien
ggcacccaatttgagccccaagagg

SEQ ID NO: 3554698 - DNA, 25 bp, Homo sapien
aggcacagccagtgattggcatgtc

SEQ ID NO: 3554699 - DNA, 25 bp, Homo sapien
tggactaggttctggagtgtgcccc

SEQ ID NO: 3554700 - DNA, 25 bp, Homo sapien
tcagctttccgccacagggtgtacg

SEQ ID NO: 3554701 - DNA, 25 bp, Homo sapien
cgggtgtaggtcccacgtgaaactg

SEQ ID NO: 3554702 - DNA, 25 bp, Homo sapien
gggtctgcggacattgggctcctca

SEQ ID NO: 3554703 - DNA, 25 bp, Homo sapien
cgtcgaccctgcttcgctgggtctg

SEQ ID NO: 3554704 - DNA, 25 bp, Homo sapien
gactgccctgaatcagccatccgat

SEQ ID NO: 3554705 - DNA, 25 bp, Homo sapien
ctggctcacgttgaggactgccctg

SEQ ID NO: 3554706 - DNA, 25 bp, Homo sapien
catccgatcaggaagccacctgcag

SEQ ID NO: 3554707 - DNA, 25 bp, Homo sapien
ggccgttcagatccttgcattctca

SEQ ID NO: 3554708 - DNA, 25 bp, Homo sapien
catcctgctcatgtggtctccccag

SEQ ID NO: 3554709 - DNA, 25 bp, Homo sapien
ttcatcctgctcatgtggtctcccc

SEQ ID NO: 3554710 - DNA, 25 bp, Homo sapien
tgtcctggactgcacatcgtggctg

SEQ ID NO: 3554711 - DNA, 25 bp, Homo sapien
gtccttcatcctgctcatgtggtct

SEQ ID NO: 3554712 - DNA, 25 bp, Homo sapien
ggggaagagcctcaaacaaagcctc

SEQ ID NO: 3554713 - DNA, 25 bp, Homo sapien
ggaagagcctcaaacaaagcctcct

SEQ ID NO: 3554714 - DNA, 25 bp, Homo sapien
ttccagatgtttgcacctgcctcag

SEQ ID NO: 3554715 - DNA, 25 bp, Homo sapien
tccagatgtttgcacctgcctcagg

SEQ ID NO: 3554716 - DNA, 25 bp, Homo sapien
ttggaggaggtcatcatgccgagct

SEQ ID NO: 3554717 - DNA, 25 bp, Homo sapien
gcatagtgcttagaactcctgggcc

SEQ ID NO: 3554718 - DNA, 25 bp, Homo sapien
tcatcatgccgagcttagtgcagac

SEQ ID NO: 3554719 - DNA, 25 bp, Homo sapien
ggaggtcatcatgccgagcttagtg

SEQ ID NO: 3554720 - DNA, 25 bp, Homo sapien
gatatccaagagatacagggctcct

SEQ ID NO: 3554721 - DNA, 25 bp, Homo sapien
tccacctcctggcatggatatccaa

SEQ ID NO: 3554722 - DNA, 25 bp, Homo sapien
tgccctctactggctgccatttctg

SEQ ID NO: 3554723 - DNA, 25 bp, Homo sapien
ggaggcttggagtgggaccatctgc

SEQ ID NO: 3554724 - DNA, 25 bp, Homo sapien
gggtagaactcagcagccatgtcca

SEQ ID NO: 3554725 - DNA, 25 bp, Homo sapien
ggtgccaccattggtcacagttgtt

SEQ ID NO: 3554726 - DNA, 25 bp, Homo sapien
caggaggacagtgatgatactggca

SEQ ID NO: 3554727 - DNA, 25 bp, Homo sapien
gccatgtccaccagtaggcttagga

SEQ ID NO: 3554728 - DNA, 25 bp, Homo sapien
tttgggtaggcctgcggcccagaaa

SEQ ID NO: 3554729 - DNA, 25 bp, Homo sapien
tgcacaagccagaatatagatctct

SEQ ID NO: 3554730 - DNA, 25 bp, Homo sapien
agctgaagacgattacagacctggg

SEQ ID NO: 3554731 - DNA, 25 bp, Homo sapien
tgactgaactgtaggagctgaagac

SEQ ID NO: 3554732 - DNA, 25 bp, Homo sapien
gggcttggcctgtggtcatggcctt

SEQ ID NO: 3554733 - DNA, 25 bp, Homo sapien
gcagcaaacagcagggtagcgtaca

SEQ ID NO: 3554734 - DNA, 25 bp, Homo sapien
gcagggtagcgtacaactgcagcac

SEQ ID NO: 3554735 - DNA, 25 bp, Homo sapien
tagcgtacaactgcagcactgagtg

SEQ ID NO: 3554736 - DNA, 25 bp, Homo sapien
tactcagcttggtgtctacttcctg

SEQ ID NO: 3554737 - DNA, 25 bp, Homo sapien
tccatactcagcttggtgtctactt

SEQ ID NO: 3554738 - DNA, 25 bp, Homo sapien
ctccatactcagcttggtgtctact

SEQ ID NO: 3554739 - DNA, 25 bp, Homo sapien
catactcagcttggtgtctacttcc

SEQ ID NO: 3554740 - DNA, 25 bp, Homo sapien
tgtggggccgtcagggggaggtcca

SEQ ID NO: 3554741 - DNA, 25 bp, Homo sapien
tggggccgtcagggggaggtccagc

SEQ ID NO: 3554742 - DNA, 25 bp, Homo sapien
ctgtccttgctgaggttggcgttgg

SEQ ID NO: 3554743 - DNA, 25 bp, Homo sapien
cagtggcagtgaagttttgcagagt

SEQ ID NO: 3554744 - DNA, 25 bp, Homo sapien
gtccttgctgaggttggcgttggca

SEQ ID NO: 3554745 - DNA, 25 bp, Homo sapien
ttttgcagagtggtgtgcaaacaca

SEQ ID NO: 3554746 - DNA, 25 bp, Homo sapien
acaccccccattttctgcatgaggt

SEQ ID NO: 3554747 - DNA, 25 bp, Homo sapien
accccccattttctgcatgaggtca

SEQ ID NO: 3554748 - DNA, 25 bp, Homo sapien
tagctgacaccccccattttctgca

SEQ ID NO: 3554749 - DNA, 25 bp, Homo sapien
tgacaccccccattttctgcatgag

SEQ ID NO: 3554750 - DNA, 25 bp, Homo sapien
tcttgggctggaagctgactaaaat

SEQ ID NO: 3554751 - DNA, 25 bp, Homo sapien
agctgactaaaatggagtggccatt

SEQ ID NO: 3554752 - DNA, 25 bp, Homo sapien
gactaaaatggagtggccattcctt

SEQ ID NO: 3554753 - DNA, 25 bp, Homo sapien
aaatggagtggccattccttttgag

SEQ ID NO: 3554754 - DNA, 25 bp, Homo sapien
tgtgggtggccggagacctgtagga

SEQ ID NO: 3554755 - DNA, 25 bp, Homo sapien
gttctgtaaggccccttctcagtcc

SEQ ID NO: 3554756 - DNA, 25 bp, Homo sapien
cttgtgtgggtggccggagacctgt

SEQ ID NO: 3554757 - DNA, 25 bp, Homo sapien
ccttttaatgatgtggttctggtgg

SEQ ID NO: 3554758 - DNA, 25 bp, Homo sapien
gtccattcttctcttgtgctgaggc

SEQ ID NO: 3554759 - DNA, 25 bp, Homo sapien
cattcttctcttgtgctgaggcctg

SEQ ID NO: 3554760 - DNA, 25 bp, Homo sapien
ttcttctcttgtgctgaggcctgca

SEQ ID NO: 3554761 - DNA, 25 bp, Homo sapien
cttctcttgtgctgaggcctgcagt

SEQ ID NO: 3554762 - DNA, 25 bp, Homo sapien
gctcttgttgctgtcgcgtctgttt

SEQ ID NO: 3554763 - DNA, 25 bp, Homo sapien
tgttgctgtcgcgtctgtttccctt

SEQ ID NO: 3554764 - DNA, 25 bp, Homo sapien
ttgctgtcgcgtctgtttccctttc

SEQ ID NO: 3554765 - DNA, 25 bp, Homo sapien
tcttgttgctgtcgcgtctgtttcc

SEQ ID NO: 3554766 - DNA, 25 bp, Homo sapien
tgggatatatccctgcttctttctg

SEQ ID NO: 3554767 - DNA, 25 bp, Homo sapien
ggatatatccctgcttctttctgag

SEQ ID NO: 3554768 - DNA, 25 bp, Homo sapien
ctgggatatatccctgcttctttct

SEQ ID NO: 3554769 - DNA, 25 bp, Homo sapien
atatatccctgcttctttctgagtg

SEQ ID NO: 3554770 - DNA, 25 bp, Homo sapien
gtcctgcaccgtgtctggcagtggc

SEQ ID NO: 3554771 - DNA, 25 bp, Homo sapien
aggtcctgcaccgtgtctggcagtg

SEQ ID NO: 3554772 - DNA, 25 bp, Homo sapien
ggtcctgcaccgtgtctggcagtgg

SEQ ID NO: 3554773 - DNA, 25 bp, Homo sapien
ggaacagcaccgtagatgaagagag

SEQ ID NO: 3554774 - DNA, 25 bp, Homo sapien
ctcaccagtgggctcacgatgctgc

SEQ ID NO: 3554775 - DNA, 25 bp, Homo sapien
acagcaccgtagatgaagagaggca

SEQ ID NO: 3554776 - DNA, 25 bp, Homo sapien
ggtagagctcggcagtcatgctcac

SEQ ID NO: 3554777 - DNA, 25 bp, Homo sapien
tccctccgtgggcttcagtttctgc

SEQ ID NO: 3554778 - DNA, 25 bp, Homo sapien
cagttgtggtacacctatggttctc

SEQ ID NO: 3554779 - DNA, 25 bp, Homo sapien
catacacctattggattagaatccc

SEQ ID NO: 3554780 - DNA, 25 bp, Homo sapien
tgtgttatagttgcaacaagccaac

SEQ ID NO: 3554781 - DNA, 25 bp, Homo sapien
acagcaagagaggttcggacaatgg

SEQ ID NO: 3554782 - DNA, 25 bp, Homo sapien
gcaagagaggttcggacaatggact

SEQ ID NO: 3554783 - DNA, 25 bp, Homo sapien
acagttccccagtatacaggaagat

SEQ ID NO: 3554784 - DNA, 25 bp, Homo sapien
ggatcattgtgggatacagttcccc

SEQ ID NO: 3554785 - DNA, 25 bp, Homo sapien
ggagttgatgacaaggaagcccaca

SEQ ID NO: 3554786 - DNA, 25 bp, Homo sapien
gattaggtagatgctgactccaaag

SEQ ID NO: 3554787 - DNA, 25 bp, Homo sapien
gaagcccacaagcttggcaggcagg

SEQ ID NO: 3554788 - DNA, 25 bp, Homo sapien
caggtccatgaccagcccatagtat

SEQ ID NO: 3554789 - DNA, 25 bp, Homo sapien
ccttctgcagactggcccggagtac

SEQ ID NO: 3554790 - DNA, 25 bp, Homo sapien
cagcctaatcccttacttagaggag

SEQ ID NO: 3554791 - DNA, 25 bp, Homo sapien
catgggaagtctcaggggatctcac

SEQ ID NO: 3554792 - DNA, 25 bp, Homo sapien
ctcagggcccgggatcctcccaagg

SEQ ID NO: 3554793 - DNA, 25 bp, Homo sapien
ccctgggaggttatcatgggaagtc

SEQ ID NO: 3554794 - DNA, 25 bp, Homo sapien
ttgatccgggcgactctctgcaggg

SEQ ID NO: 3554795 - DNA, 25 bp, Homo sapien
cggaggaggagtgccagcgggccga

SEQ ID NO: 3554796 - DNA, 25 bp, Homo sapien
ccagcgggccgactcaatgaagaac

SEQ ID NO: 3554797 - DNA, 25 bp, Homo sapien
tccatactcaatttggctccttctt

SEQ ID NO: 3554798 - DNA, 25 bp, Homo sapien
gaggaactggcccaggctgtagaca

SEQ ID NO: 3554799 - DNA, 25 bp, Homo sapien
aaaggcgcagagaccagtagctgca

SEQ ID NO: 3554800 - DNA, 25 bp, Homo sapien
gacatagccaatcaaggtgcccacg

SEQ ID NO: 3554801 - DNA, 25 bp, Homo sapien
ccgtgtgtgaatgggcatccactcc

SEQ ID NO: 3554802 - DNA, 25 bp, Homo sapien
gagaggcctacctcctgtccaggtg

SEQ ID NO: 3554803 - DNA, 25 bp, Homo sapien
gacttggatacttaggctggacttg

SEQ ID NO: 3554804 - DNA, 25 bp, Homo sapien
aggctctagcccagtcccggttaat

SEQ ID NO: 3554805 - DNA, 25 bp, Homo sapien
tggccacttggtctgtcttcagcag

SEQ ID NO: 3554806 - DNA, 25 bp, Homo sapien
ctgtctgcaggtagttcaagatgag

SEQ ID NO: 3554807 - DNA, 25 bp, Homo sapien
agatgagtaccttccggcggcctag

SEQ ID NO: 3554808 - DNA, 25 bp, Homo sapien
gaaggctgcgcaggtccctgacaca

SEQ ID NO: 3554809 - DNA, 25 bp, Homo sapien
gagaggagccggaaggcgcagtaga

SEQ ID NO: 3554810 - DNA, 25 bp, Homo sapien
cctctgaagtatgaggctggtgctg

SEQ ID NO: 3554811 - DNA, 25 bp, Homo sapien
tggggccttttgaggacctctgaag

SEQ ID NO: 3554812 - DNA, 25 bp, Homo sapien
tcaaaccagcgccggctggcaatgc

SEQ ID NO: 3554813 - DNA, 25 bp, Homo sapien
gtgctgtagatcctcaaaccagcgc

SEQ ID NO: 3554814 - DNA, 25 bp, Homo sapien
tagggccctgtgagagcacacaagg

SEQ ID NO: 3554815 - DNA, 25 bp, Homo sapien
ggccctgtgagagcacacaaggtcc

SEQ ID NO: 3554816 - DNA, 25 bp, Homo sapien
gtctgcaaggtagccgaacaccatg

SEQ ID NO: 3554817 - DNA, 25 bp, Homo sapien
caccatgtacaaggactgggccagc

SEQ ID NO: 3554818 - DNA, 25 bp, Homo sapien
cagtcacgatggtagatgggaaggt

SEQ ID NO: 3554819 - DNA, 25 bp, Homo sapien
gaaggtgctgttgtcatagatccag

SEQ ID NO: 3554820 - DNA, 25 bp, Homo sapien
tccagccatcggtgcagggctctgt

SEQ ID NO: 3554821 - DNA, 25 bp, Homo sapien
gtggcccctgtgccattggcttctg

SEQ ID NO: 3554822 - DNA, 25 bp, Homo sapien
ggaggtgaagcggaggcaggactca

SEQ ID NO: 3554823 - DNA, 25 bp, Homo sapien
gtgaagcggaggcaggactcaggct

SEQ ID NO: 3554824 - DNA, 25 bp, Homo sapien
tgcggggaggtgaagcggaggcagg

SEQ ID NO: 3554825 - DNA, 25 bp, Homo sapien
cggggaggtgaagcggaggcaggac

SEQ ID NO: 3554826 - DNA, 25 bp, Homo sapien
ctgaggttggcatcggcaggcgggc

SEQ ID NO: 3554827 - DNA, 25 bp, Homo sapien
cagcagtgaagttctgcagggtgtt

SEQ ID NO: 3554828 - DNA, 25 bp, Homo sapien
agccccccgttcttgctgaggttgg

SEQ ID NO: 3554829 - DNA, 25 bp, Homo sapien
ggcgggcggcagtggtgggtaggga

SEQ ID NO: 3554830 - DNA, 25 bp, Homo sapien
gatctgctggaagcggccgacaccc

SEQ ID NO: 3554831 - DNA, 25 bp, Homo sapien
tggatctgctggaagcggccgacac

SEQ ID NO: 3554832 - DNA, 25 bp, Homo sapien
gggaggaccaccagggtgacctgga

SEQ ID NO: 3554833 - DNA, 25 bp, Homo sapien
gaggaccaccagggtgacctggatc

SEQ ID NO: 3554834 - DNA, 25 bp, Homo sapien
aggagcagcactgccgttgcctccg

SEQ ID NO: 3554835 - DNA, 25 bp, Homo sapien
gggagctgagtccgagctgctctgt

SEQ ID NO: 3554836 - DNA, 25 bp, Homo sapien
tgcctccgcagctgggttgctccgg

SEQ ID NO: 3554837 - DNA, 25 bp, Homo sapien
ttcttccccggtctccctgatctgt

SEQ ID NO: 3554838 - DNA, 25 bp, Homo sapien
ctggagacctgacccttgcatgggc

SEQ ID NO: 3554839 - DNA, 25 bp, Homo sapien
ggtctgctggagacctgacccttgc

SEQ ID NO: 3554840 - DNA, 25 bp, Homo sapien
gacctgacccttgcatgggcagttt

SEQ ID NO: 3554841 - DNA, 25 bp, Homo sapien
gggtctgctggagacctgacccttg

SEQ ID NO: 3554842 - DNA, 25 bp, Homo sapien
tataattgggatttaaagtgtggga

SEQ ID NO: 3554843 - DNA, 25 bp, Homo sapien
catataaaggctggacatgaggcca

SEQ ID NO: 3554844 - DNA, 25 bp, Homo sapien
tattggatctccatgtaccgagcca

SEQ ID NO: 3554845 - DNA, 25 bp, Homo sapien
cagtgacctatgagttgacgcagca

SEQ ID NO: 3554846 - DNA, 25 bp, Homo sapien
tatcctggctgacggatggtgcaga

SEQ ID NO: 3554847 - DNA, 25 bp, Homo sapien
tgttaagttgggagaagcctaagct

SEQ ID NO: 3554848 - DNA, 25 bp, Homo sapien
gagtgacttatggatccagcacagg

SEQ ID NO: 3554849 - DNA, 25 bp, Homo sapien
gagcgtccttggtgaaagcggttcc

SEQ ID NO: 3554850 - DNA, 25 bp, Homo sapien
gcccttggaaggagatacaacatcc

SEQ ID NO: 3554851 - DNA, 25 bp, Homo sapien
catgcacaggcgtggtgtacacacc

SEQ ID NO: 3554852 - DNA, 25 bp, Homo sapien
tatgcatgctgggacgtgtagacac

SEQ ID NO: 3554853 - DNA, 25 bp, Homo sapien
tacacaggcctgtcgtacatgaagt

SEQ ID NO: 3554854 - DNA, 25 bp, Homo sapien
cagatgtgcatgctcacgtgtccac

SEQ ID NO: 3554855 - DNA, 25 bp, Homo sapien
ggcagggatggctgaacctttgaac

SEQ ID NO: 3554856 - DNA, 25 bp, Homo sapien
gggcctccctatactcctaaggtgc

SEQ ID NO: 3554857 - DNA, 25 bp, Homo sapien
taaggtgcctggctaggatcagtct

SEQ ID NO: 3554858 - DNA, 25 bp, Homo sapien
ggagacaccttcaccaagctctcag

SEQ ID NO: 3554859 - DNA, 25 bp, Homo sapien
tgaggctgtagagggatcctctggg

SEQ ID NO: 3554860 - DNA, 25 bp, Homo sapien
ctgtagagggatcctctgggaggcc

SEQ ID NO: 3554861 - DNA, 25 bp, Homo sapien
ggagcccaggcctggtccgtgaggc

SEQ ID NO: 3554862 - DNA, 25 bp, Homo sapien
cccaggcctggtccgtgaggctgta

SEQ ID NO: 3554863 - DNA, 25 bp, Homo sapien
agctaaggaaaagccctgggcccag

SEQ ID NO: 3554864 - DNA, 25 bp, Homo sapien
gctaaggaaaagccctgggcccaga

SEQ ID NO: 3554865 - DNA, 25 bp, Homo sapien
gttacttacgcccatacctgtttgc

SEQ ID NO: 3554866 - DNA, 25 bp, Homo sapien
tctggcaagggctgattcagggtct

SEQ ID NO: 3554867 - DNA, 25 bp, Homo sapien
cggtgatcccgtagatgatattggg

SEQ ID NO: 3554868 - DNA, 25 bp, Homo sapien
tgaagggctgtacctcacccgtgat

SEQ ID NO: 3554869 - DNA, 25 bp, Homo sapien
cgagggttcagagtagggattggta

SEQ ID NO: 3554870 - DNA, 25 bp, Homo sapien
agggttcagagtagggattggtagc

SEQ ID NO: 3554871 - DNA, 25 bp, Homo sapien
tgcgagggttcagagtagggattgg

SEQ ID NO: 3554872 - DNA, 25 bp, Homo sapien
ctgcgagggttcagagtagggattg

SEQ ID NO: 3554873 - DNA, 25 bp, Homo sapien
ttcacttgtgtagaggaagaggcag

SEQ ID NO: 3554874 - DNA, 25 bp, Homo sapien
agctggataggcatcccttcccaaa

SEQ ID NO: 3554875 - DNA, 25 bp, Homo sapien
aacacagccaatactgtcctcacgg

SEQ ID NO: 3554876 - DNA, 25 bp, Homo sapien
aatactgtcctcacggtctgcaagt

SEQ ID NO: 3554877 - DNA, 25 bp, Homo sapien
gagcatgagctctgtcgttttacca

SEQ ID NO: 3554878 - DNA, 25 bp, Homo sapien
gccttggagttcaggagcacctaag

SEQ ID NO: 3554879 - DNA, 25 bp, Homo sapien
aaacgtagcttttccaaggtcatga

SEQ ID NO: 3554880 - DNA, 25 bp, Homo sapien
tgcagggacctgctcaaggtaacac

SEQ ID NO: 3554881 - DNA, 25 bp, Homo sapien
tatagtaggcaaaaccggtagcaaa

SEQ ID NO: 3554882 - DNA, 25 bp, Homo sapien
cacccatagccaaactatagtaggc

SEQ ID NO: 3554883 - DNA, 25 bp, Homo sapien
tgccggcccaggtagcttaaggaga

SEQ ID NO: 3554884 - DNA, 25 bp, Homo sapien
aacttggctgggacatcgaccccac

SEQ ID NO: 3554885 - DNA, 25 bp, Homo sapien
agaggcagagaaggattggttagca

SEQ ID NO: 3554886 - DNA, 25 bp, Homo sapien
ctgagaggcagagaaggattggtta

SEQ ID NO: 3554887 - DNA, 25 bp, Homo sapien
gaggcagagaaggattggttagcac

SEQ ID NO: 3554888 - DNA, 25 bp, Homo sapien
gagaggcagagaaggattggttagc

SEQ ID NO: 3554889 - DNA, 25 bp, Homo sapien
tcttcgagtctgaaacccattggtc

SEQ ID NO: 3554890 - DNA, 25 bp, Homo sapien
tcatgtctgacgtgggcatggtcca

SEQ ID NO: 3554891 - DNA, 25 bp, Homo sapien
cattgagctgtatgcctgggtcaga

SEQ ID NO: 3554892 - DNA, 25 bp, Homo sapien
ggttgggcagcagtttaacatccag

SEQ ID NO: 3554893 - DNA, 25 bp, Homo sapien
cgcagcatgggtatccggaacaggt

SEQ ID NO: 3554894 - DNA, 25 bp, Homo sapien
tatccggaacaggtcacttgcggtg

SEQ ID NO: 3554895 - DNA, 25 bp, Homo sapien
tcatgcggcgcagcatgggtatccg

SEQ ID NO: 3554896 - DNA, 25 bp, Homo sapien
acttgcggtgtacttggccttggcc

SEQ ID NO: 3554897 - DNA, 25 bp, Homo sapien
ttcagggccttcgaggactttccag

SEQ ID NO: 3554898 - DNA, 25 bp, Homo sapien
gccacccgccggagtatcttcaggg

SEQ ID NO: 3554899 - DNA, 25 bp, Homo sapien
aaccagcgtatggactctggtgtcc

SEQ ID NO: 3554900 - DNA, 25 bp, Homo sapien
tttccagacaagaccaaccagcgta

SEQ ID NO: 3554901 - DNA, 25 bp, Homo sapien
gttaactgcagccaacgccactggg

SEQ ID NO: 3554902 - DNA, 25 bp, Homo sapien
tgaactggccaaaggtgtagcagta

SEQ ID NO: 3554903 - DNA, 25 bp, Homo sapien
atccgggtaggcacccattccacat

SEQ ID NO: 3554904 - DNA, 25 bp, Homo sapien
tagcagtacccgagtgctgtcgaca

SEQ ID NO: 3554905 - DNA, 25 bp, Homo sapien
gcatccccacggctactgacatcct

SEQ ID NO: 3554906 - DNA, 25 bp, Homo sapien
gccctccgttgggtcttcctgctgt

SEQ ID NO: 3554907 - DNA, 25 bp, Homo sapien
tgctgttgatatcgccctccgttgg

SEQ ID NO: 3554908 - DNA, 25 bp, Homo sapien
cctccccacggatgctgttgatatc

SEQ ID NO: 3554909 - DNA, 25 bp, Homo sapien
ctgaaggctgcaccggagccgctgg

SEQ ID NO: 3554910 - DNA, 25 bp, Homo sapien
cacaggaagcggaagaccatgtaga

SEQ ID NO: 3554911 - DNA, 25 bp, Homo sapien
aagccacacaggaagcggaagacca

SEQ ID NO: 3554912 - DNA, 25 bp, Homo sapien
agatgacggtgctcagggtaatgcc

SEQ ID NO: 3554913 - DNA, 25 bp, Homo sapien
tacctgccatgaagatagactgggc

SEQ ID NO: 3554914 - DNA, 25 bp, Homo sapien
tcagacaggtctccaagcacgagcc

SEQ ID NO: 3554915 - DNA, 25 bp, Homo sapien
caagcacgagccctccaatcagtat

SEQ ID NO: 3554916 - DNA, 25 bp, Homo sapien
tgttggagttgcacaccaagtccca

SEQ ID NO: 3554917 - DNA, 25 bp, Homo sapien
caccttggaactgttacatgagaaa

SEQ ID NO: 3554918 - DNA, 25 bp, Homo sapien
tgggaatggtgacaactagaacaac

SEQ ID NO: 3554919 - DNA, 25 bp, Homo sapien
tgtgaagcagaaccacccattggcc

SEQ ID NO: 3554920 - DNA, 25 bp, Homo sapien
ggcctaaaatgctactcaccttgga

SEQ ID NO: 3554921 - DNA, 25 bp, Homo sapien
tgctggatcttggtttctaccatga

SEQ ID NO: 3554922 - DNA, 25 bp, Homo sapien
tctaccatgatacttgtgatcatgt

SEQ ID NO: 3554923 - DNA, 25 bp, Homo sapien
catctgagaccagatctgctggatc

SEQ ID NO: 3554924 - DNA, 25 bp, Homo sapien
tagaataactgtcatgagctggttt

SEQ ID NO: 3554925 - DNA, 25 bp, Homo sapien
tcagccaacatctttatccctgtca

SEQ ID NO: 3554926 - DNA, 25 bp, Homo sapien
catgcctgaatccttacaatggctt

SEQ ID NO: 3554927 - DNA, 25 bp, Homo sapien
gcttacgaggccctggaaaatcagc

SEQ ID NO: 3554928 - DNA, 25 bp, Homo sapien
tgagacctgtttagaacatgcctga

SEQ ID NO: 3554929 - DNA, 25 bp, Homo sapien
tcagagtgacgagccttcgaaggtg

SEQ ID NO: 3554930 - DNA, 25 bp, Homo sapien
tgtgcagcttgctaacgggtctccc

SEQ ID NO: 3554931 - DNA, 25 bp, Homo sapien
aggtctcaggtgcacggcaagtcac

SEQ ID NO: 3554932 - DNA, 25 bp, Homo sapien
gttgcattcagttaccaggtcccag

SEQ ID NO: 3554933 - DNA, 25 bp, Homo sapien
tgtcacaatggagtccttggtgctg

SEQ ID NO: 3554934 - DNA, 25 bp, Homo sapien
tggagtccttggtgctgttgtagac

SEQ ID NO: 3554935 - DNA, 25 bp, Homo sapien
ctctgtcacaatggagtccttggtg

SEQ ID NO: 3554936 - DNA, 25 bp, Homo sapien
cacaatggagtccttggtgctgttg

SEQ ID NO: 3554937 - DNA, 25 bp, Homo sapien
gccatgttgaggatcgggaggccca

SEQ ID NO: 3554938 - DNA, 25 bp, Homo sapien
gaggcacctctcaggcttcccattt

SEQ ID NO: 3554939 - DNA, 25 bp, Homo sapien
gtatggctacatgcaggaactggaa

SEQ ID NO: 3554940 - DNA, 25 bp, Homo sapien
tggcattgggcggatgtacaaaacg

SEQ ID NO: 3554941 - DNA, 25 bp, Homo sapien
ctggtgatcagtgtagttgaggtcc

SEQ ID NO: 3554942 - DNA, 25 bp, Homo sapien
gatcagtgtagttgaggtccctgct

SEQ ID NO: 3554943 - DNA, 25 bp, Homo sapien
ggccggcagctgctgtagtagggca

SEQ ID NO: 3554944 - DNA, 25 bp, Homo sapien
cagtgtagttgaggtccctgctctg

SEQ ID NO: 3554945 - DNA, 25 bp, Homo sapien
tctctcggattcacctcccctccca

SEQ ID NO: 3554946 - DNA, 25 bp, Homo sapien
acctcccctcccactcctagcagct

SEQ ID NO: 3554947 - DNA, 25 bp, Homo sapien
tcccactcctagcagctgcttcagc

SEQ ID NO: 3554948 - DNA, 25 bp, Homo sapien
cccctcccactcctagcagctgctt

SEQ ID NO: 3554949 - DNA, 25 bp, Homo sapien
tctggtgcacttcaggttggttaaa

SEQ ID NO: 3554950 - DNA, 25 bp, Homo sapien
ctctctctccttatcaaggatcata

SEQ ID NO: 3554951 - DNA, 25 bp, Homo sapien
aggcctgcaatctggtgcacttcag

SEQ ID NO: 3554952 - DNA, 25 bp, Homo sapien
tctctccttatcaaggatcataaga

SEQ ID NO: 3554953 - DNA, 25 bp, Homo sapien
gtcagaagaagctaaatcaggatgg

SEQ ID NO: 3554954 - DNA, 25 bp, Homo sapien
ttcttttttgatgacagaaatgagc

SEQ ID NO: 3554955 - DNA, 25 bp, Homo sapien
aaaactgttaccatggccaggcaca

SEQ ID NO: 3554956 - DNA, 25 bp, Homo sapien
cccattgaaactctcacaaaattct

SEQ ID NO: 3554957 - DNA, 25 bp, Homo sapien
gtcagaattgtgtaaccggaaccag

SEQ ID NO: 3554958 - DNA, 25 bp, Homo sapien
cccattgagtgtaaagtttgatcag

SEQ ID NO: 3554959 - DNA, 25 bp, Homo sapien
gagtgtaaagtttgatcagctttaa

SEQ ID NO: 3554960 - DNA, 25 bp, Homo sapien
cattgagtgtaaagtttgatcagct

SEQ ID NO: 3554961 - DNA, 25 bp, Homo sapien
tgttaggaagaggtagatccctggt

SEQ ID NO: 3554962 - DNA, 25 bp, Homo sapien
gtgttaggaagaggtagatccctgg

SEQ ID NO: 3554963 - DNA, 25 bp, Homo sapien
gagaatacgccattaaggtcatcaa

SEQ ID NO: 3554964 - DNA, 25 bp, Homo sapien
gtaggtggggagaatacgccattaa

SEQ ID NO: 3554965 - DNA, 25 bp, Homo sapien
gtggggagaatacgccattaaggtc

SEQ ID NO: 3554966 - DNA, 25 bp, Homo sapien
agactccataggaaatccagggtag

SEQ ID NO: 3554967 - DNA, 25 bp, Homo sapien
ctaccggacactgcattgattcctg

SEQ ID NO: 3554968 - DNA, 25 bp, Homo sapien
taccggacactgcattgattcctgc

SEQ ID NO: 3554969 - DNA, 25 bp, Homo sapien
ccggacactgcattgattcctgcaa

SEQ ID NO: 3554970 - DNA, 25 bp, Homo sapien
ggacactgcattgattcctgcaact

SEQ ID NO: 3554971 - DNA, 25 bp, Homo sapien
aacactaccaattcccaaagttgct

SEQ ID NO: 3554972 - DNA, 25 bp, Homo sapien
gacgagctcgttgtggtggacagaa

SEQ ID NO: 3554973 - DNA, 25 bp, Homo sapien
agttgctaaaaccacacgcaggatc

SEQ ID NO: 3554974 - DNA, 25 bp, Homo sapien
ggacagaagcactgttgctagcagc

SEQ ID NO: 3554975 - DNA, 25 bp, Homo sapien
tcccaccgggaacgtgaacaatatc

SEQ ID NO: 3554976 - DNA, 25 bp, Homo sapien
tcaaaagggaaacacatctggctgt

SEQ ID NO: 3554977 - DNA, 25 bp, Homo sapien
ccatatgattcagtgtcaaaaggga

SEQ ID NO: 3554978 - DNA, 25 bp, Homo sapien
tgaccagaatgaaaagtcccaccgg

SEQ ID NO: 3554979 - DNA, 25 bp, Homo sapien
tgagtatcaggccataaaagggtac

SEQ ID NO: 3554980 - DNA, 25 bp, Homo sapien
gagtatcaggccataaaagggtaca

SEQ ID NO: 3554981 - DNA, 25 bp, Homo sapien
gctccctaagtgctgcaagttgagt

SEQ ID NO: 3554982 - DNA, 25 bp, Homo sapien
tatcaggccataaaagggtacagtg

SEQ ID NO: 3554983 - DNA, 25 bp, Homo sapien
aaatggatgttttaattcggactgc

SEQ ID NO: 3554984 - DNA, 25 bp, Homo sapien
gaagactctcattcgcaatttgggt

SEQ ID NO: 3554985 - DNA, 25 bp, Homo sapien
tcacaaagcacaggccgaagactct

SEQ ID NO: 3554986 - DNA, 25 bp, Homo sapien
caatttgggtgcacggaacagggaa

SEQ ID NO: 3554987 - DNA, 25 bp, Homo sapien
gccctcatctagctgattgttgata

SEQ ID NO: 3554988 - DNA, 25 bp, Homo sapien
taagccctcatctagctgattgttg

SEQ ID NO: 3554989 - DNA, 25 bp, Homo sapien
ctcatctagctgattgttgataatc

SEQ ID NO: 3554990 - DNA, 25 bp, Homo sapien
aagccctcatctagctgattgttga

SEQ ID NO: 3554991 - DNA, 25 bp, Homo sapien
caatcgagcttgttgctgacactct

SEQ ID NO: 3554992 - DNA, 25 bp, Homo sapien
actctttgggatcttgagcttaact

SEQ ID NO: 3554993 - DNA, 25 bp, Homo sapien
gagcttaacttccttgggctttatg

SEQ ID NO: 3554994 - DNA, 25 bp, Homo sapien
tcaatcgagcttgttgctgacactc

SEQ ID NO: 3554995 - DNA, 25 bp, Homo sapien
tccatgtctaaaataatgaatgcaa

SEQ ID NO: 3554996 - DNA, 25 bp, Homo sapien
agtgtcatcctattccattgtttgc

SEQ ID NO: 3554997 - DNA, 25 bp, Homo sapien
tctcagttacaatgacaaaagcccc

SEQ ID NO: 3554998 - DNA, 25 bp, Homo sapien
taatgaatgcaaagtgccagcctcc

SEQ ID NO: 3554999 - DNA, 25 bp, Homo sapien
tctatgtctaccatagcctcgctta

SEQ ID NO: 3555000 - DNA, 25 bp, Homo sapien
tggacatcatggctcaggactaggc

SEQ ID NO: 3555001 - DNA, 25 bp, Homo sapien
actaggccagagaccgaacagatcc

SEQ ID NO: 3555002 - DNA, 25 bp, Homo sapien
tcaggtgacacaataggtactatgg

SEQ ID NO: 3555003 - DNA, 25 bp, Homo sapien
caaagaatgtggagattgttcatac

SEQ ID NO: 3555004 - DNA, 25 bp, Homo sapien
gcaaagaatgtggagattgttcata

SEQ ID NO: 3555005 - DNA, 25 bp, Homo sapien
aggcaaagaatgtggagattgttca

SEQ ID NO: 3555006 - DNA, 25 bp, Homo sapien
ggcaaagaatgtggagattgttcat

SEQ ID NO: 3555007 - DNA, 25 bp, Homo sapien
caatatgtgccagtcctgaatggca

SEQ ID NO: 3555008 - DNA, 25 bp, Homo sapien
gcccaacactgtaggaacataatag

SEQ ID NO: 3555009 - DNA, 25 bp, Homo sapien
cattattgtcatagatcgtgaccgg

SEQ ID NO: 3555010 - DNA, 25 bp, Homo sapien
caattatgggtgtagacacagtcag

SEQ ID NO: 3555011 - DNA, 25 bp, Homo sapien
cacaatttgcatatgatcttccgtc

SEQ ID NO: 3555012 - DNA, 25 bp, Homo sapien
gccaagaagcgcagtatgcagtaaa

SEQ ID NO: 3555013 - DNA, 25 bp, Homo sapien
gagcgaaggccgcacaggtgttaga

SEQ ID NO: 3555014 - DNA, 25 bp, Homo sapien
gtggagaaccctgccaagaagcgca

SEQ ID NO: 3555015 - DNA, 25 bp, Homo sapien
ttagtttaattagtgtgggcggcaa

SEQ ID NO: 3555016 - DNA, 25 bp, Homo sapien
tttagtttaattagtgtgggcggca

SEQ ID NO: 3555017 - DNA, 25 bp, Homo sapien
tagtttaattagtgtgggcggcaag

SEQ ID NO: 3555018 - DNA, 25 bp, Homo sapien
gccataaatagggattgaaccattg

SEQ ID NO: 3555019 - DNA, 25 bp, Homo sapien
tattagacctcccagaagtgaccca

SEQ ID NO: 3555020 - DNA, 25 bp, Homo sapien
ctgtctgaaagatggccatatatta

SEQ ID NO: 3555021 - DNA, 25 bp, Homo sapien
tagggattgaaccattgattttagt

SEQ ID NO: 3555022 - DNA, 25 bp, Homo sapien
gaaagcagtacagcagagcttgaga

SEQ ID NO: 3555023 - DNA, 25 bp, Homo sapien
gcagagcttgagaagagtttcaact

SEQ ID NO: 3555024 - DNA, 25 bp, Homo sapien
agcagagcttgagaagagtttcaac

SEQ ID NO: 3555025 - DNA, 25 bp, Homo sapien
gtggagaggaaagagcttctgtcgt

SEQ ID NO: 3555026 - DNA, 25 bp, Homo sapien
ggagaggaaagagcttctgtcgtac

SEQ ID NO: 3555027 - DNA, 25 bp, Homo sapien
cagtcacgatggtggagaggaaaga

SEQ ID NO: 3555028 - DNA, 25 bp, Homo sapien
ctcagtcacgatggtggagaggaaa

SEQ ID NO: 3555029 - DNA, 25 bp, Homo sapien
tcccggtatcattgtcagacacagt

SEQ ID NO: 3555030 - DNA, 25 bp, Homo sapien
ctgagggtcccggtatcattgtcag

SEQ ID NO: 3555031 - DNA, 25 bp, Homo sapien
tggataaagcgctgacacttctgtg

SEQ ID NO: 3555032 - DNA, 25 bp, Homo sapien
cactggggatggataaagcgctgac

SEQ ID NO: 3555033 - DNA, 25 bp, Homo sapien
cacaatattagggaacagtaggatg

SEQ ID NO: 3555034 - DNA, 25 bp, Homo sapien
gacaaatctggaatctccccatgcc

SEQ ID NO: 3555035 - DNA, 25 bp, Homo sapien
gcaaaagaaagctatcagacaaatc

SEQ ID NO: 3555036 - DNA, 25 bp, Homo sapien
ccacttgatccaggagcacatcaaa

SEQ ID NO: 3555037 - DNA, 25 bp, Homo sapien
gaacaggtgatccccaagaggaagc

SEQ ID NO: 3555038 - DNA, 25 bp, Homo sapien
gattttcaggtggatgcagtcccca

SEQ ID NO: 3555039 - DNA, 25 bp, Homo sapien
gagactgctagctgttgacaactga

SEQ ID NO: 3555040 - DNA, 25 bp, Homo sapien
catagtgccatgtggatcctgacac

SEQ ID NO: 3555041 - DNA, 25 bp, Homo sapien
cactgagtggtgtgacactactgca

SEQ ID NO: 3555042 - DNA, 25 bp, Homo sapien
ctacagcaccctgttgtgttatcaa

SEQ ID NO: 3555043 - DNA, 25 bp, Homo sapien
actacagcaccctgttgtgttatca

SEQ ID NO: 3555044 - DNA, 25 bp, Homo sapien
tacagcaccctgttgtgttatcaaa

SEQ ID NO: 3555045 - DNA, 25 bp, Homo sapien
tgaagcacccaatacccttctcagc

SEQ ID NO: 3555046 - DNA, 25 bp, Homo sapien
atctgtccctcaagcgtttattctt

SEQ ID NO: 3555047 - DNA, 25 bp, Homo sapien
tctgtccctcaagcgtttattcttt

SEQ ID NO: 3555048 - DNA, 25 bp, Homo sapien
tcccctgaagcacccaatacccttc

SEQ ID NO: 3555049 - DNA, 25 bp, Homo sapien
gtatatgcctttgatatgatttggc

SEQ ID NO: 3555050 - DNA, 25 bp, Homo sapien
ggtatatgcctttgatatgatttgg

SEQ ID NO: 3555051 - DNA, 25 bp, Homo sapien
aaccatttagaatcacagttgtaaa

SEQ ID NO: 3555052 - DNA, 25 bp, Homo sapien
taaccatttagaatcacagttgtaa

SEQ ID NO: 3555053 - DNA, 25 bp, Homo sapien
atttaaccatttagaatcacagttg

SEQ ID NO: 3555054 - DNA, 25 bp, Homo sapien
ttatatttaaccatttagaatcaca

SEQ ID NO: 3555055 - DNA, 25 bp, Homo sapien
tatgcatgtcataccagggcaggaa

SEQ ID NO: 3555056 - DNA, 25 bp, Homo sapien
ccccgtgaaaattagatagactgaa

SEQ ID NO: 3555057 - DNA, 25 bp, Homo sapien
gctaacaggtacactcactgggctg

SEQ ID NO: 3555058 - DNA, 25 bp, Homo sapien
gacaccatggcattgaccaaaggga

SEQ ID NO: 3555059 - DNA, 25 bp, Homo sapien
aaggcaaaggcactgactacatggg

SEQ ID NO: 3555060 - DNA, 25 bp, Homo sapien
ctacatgggaatagcccagatctaa

SEQ ID NO: 3555061 - DNA, 25 bp, Homo sapien
tctgtgtgatctagtgaggctcagg

SEQ ID NO: 3555062 - DNA, 25 bp, Homo sapien
ggatgaggatacaccaaaggcaaag

SEQ ID NO: 3555063 - DNA, 25 bp, Homo sapien
tctgaggggcagctaggctatttac

SEQ ID NO: 3555064 - DNA, 25 bp, Homo sapien
ccagggctcccccaatattagcaaa

SEQ ID NO: 3555065 - DNA, 25 bp, Homo sapien
tgctgtcaagaagaggctggttcct

SEQ ID NO: 3555066 - DNA, 25 bp, Homo sapien
gggtcgagaatatatgcttaggatc

SEQ ID NO: 3555067 - DNA, 25 bp, Homo sapien
ctggatgctgtcaagaagaggctgg

SEQ ID NO: 3555068 - DNA, 25 bp, Homo sapien
cagcaacagaggaaaagttgttaaa

SEQ ID NO: 3555069 - DNA, 25 bp, Homo sapien
catggaggtgataacatactcttgc

SEQ ID NO: 3555070 - DNA, 25 bp, Homo sapien
tcagaaggtacatgggatactgcat

SEQ ID NO: 3555071 - DNA, 25 bp, Homo sapien
ttaatgcagcgtctggaacaaagtc

SEQ ID NO: 3555072 - DNA, 25 bp, Homo sapien
gattatggatgagcacttaaacaca

SEQ ID NO: 3555073 - DNA, 25 bp, Homo sapien
ctgattatggaaggaattagttcat

SEQ ID NO: 3555074 - DNA, 25 bp, Homo sapien
gggcagtagaacaggtaatgccaag

SEQ ID NO: 3555075 - DNA, 25 bp, Homo sapien
tagaacaggtaatgccaagagaagc

SEQ ID NO: 3555076 - DNA, 25 bp, Homo sapien
ggttgccaaaaccacacgcagggtc

SEQ ID NO: 3555077 - DNA, 25 bp, Homo sapien
taaaaggatctgagttgatgcttca

SEQ ID NO: 3555078 - DNA, 25 bp, Homo sapien
gattggcctacatattgtgacttaa

SEQ ID NO: 3555079 - DNA, 25 bp, Homo sapien
taatagctgagaaatgtgattggcc

SEQ ID NO: 3555080 - DNA, 25 bp, Homo sapien
tgaaggaatcagcatctcccaaggt

SEQ ID NO: 3555081 - DNA, 25 bp, Homo sapien
gtcaagatgactcccctaaaccagg

SEQ ID NO: 3555082 - DNA, 25 bp, Homo sapien
tgctgacattcaagaggagaactgg

SEQ ID NO: 3555083 - DNA, 25 bp, Homo sapien
tattgggatacaaaggcccagcacc

SEQ ID NO: 3555084 - DNA, 25 bp, Homo sapien
taagtacattactagaccgggagtg

SEQ ID NO: 3555085 - DNA, 25 bp, Homo sapien
cagcaacttccgtgtggcaaaatct

SEQ ID NO: 3555086 - DNA, 25 bp, Homo sapien
gcaaaatctgtcctaaagccccaga

SEQ ID NO: 3555087 - DNA, 25 bp, Homo sapien
gaaactatcaggaataaatggcacc

SEQ ID NO: 3555088 - DNA, 25 bp, Homo sapien
gaagacaaccatatatccgagccaa

SEQ ID NO: 3555089 - DNA, 25 bp, Homo sapien
ctgagaaaagagggaaagacatttt

SEQ ID NO: 3555090 - DNA, 25 bp, Homo sapien
tgagaaaagagggaaagacattttc

SEQ ID NO: 3555091 - DNA, 25 bp, Homo sapien
tctggcttagtcgacggctcatgtg

SEQ ID NO: 3555092 - DNA, 25 bp, Homo sapien
agaagcatctggcttagtcgacggc

SEQ ID NO: 3555093 - DNA, 25 bp, Homo sapien
ccaaaaagggatggtacttgcaaat

SEQ ID NO: 3555094 - DNA, 25 bp, Homo sapien
gtcgacggctcatgtgattcagtgc

SEQ ID NO: 3555095 - DNA, 25 bp, Homo sapien
taacaattgtatcttgagggacaac

SEQ ID NO: 3555096 - DNA, 25 bp, Homo sapien
tgagaataatattggcccaggtagc

SEQ ID NO: 3555097 - DNA, 25 bp, Homo sapien
aatctgtggaacctaaatcctacaa

SEQ ID NO: 3555098 - DNA, 25 bp, Homo sapien
taaaaaggcagagtgtgttttgtgg

SEQ ID NO: 3555099 - DNA, 25 bp, Homo sapien
ttgtgtgccaatgctaccagggccc

SEQ ID NO: 3555100 - DNA, 25 bp, Homo sapien
tgaggtcgaactgggatgatcaacc

SEQ ID NO: 3555101 - DNA, 25 bp, Homo sapien
taagtgggtcactaacacctgtgcc

SEQ ID NO: 3555102 - DNA, 25 bp, Homo sapien
tagtttttgcaacacgcagaccagg

SEQ ID NO: 3555103 - DNA, 25 bp, Homo sapien
tcaggcaggtgctcctctaaaatga

SEQ ID NO: 3555104 - DNA, 25 bp, Homo sapien
ggtgctcctctaaaatgaagcttcc

SEQ ID NO: 3555105 - DNA, 25 bp, Homo sapien
ctcctctaaaatgaagcttccagag

SEQ ID NO: 3555106 - DNA, 25 bp, Homo sapien
ggcaggtgctcctctaaaatgaagc

SEQ ID NO: 3555107 - DNA, 25 bp, Homo sapien
ctggcataatggttgggctagaaaa

SEQ ID NO: 3555108 - DNA, 25 bp, Homo sapien
tgtctgccataccatgagtcctctg

SEQ ID NO: 3555109 - DNA, 25 bp, Homo sapien
gatgtagcagcttaacacccagctg

SEQ ID NO: 3555110 - DNA, 25 bp, Homo sapien
gggaccttcaattctactctgtgaa

SEQ ID NO: 3555111 - DNA, 25 bp, Homo sapien
cacacagtgtgtccaaaggccaagg

SEQ ID NO: 3555112 - DNA, 25 bp, Homo sapien
ccctgtgagggaaaagtcataggcc

SEQ ID NO: 3555113 - DNA, 25 bp, Homo sapien
gacagagaccagttcctcacacagt

SEQ ID NO: 3555114 - DNA, 25 bp, Homo sapien
catgagctgtaacaactttgggaag

SEQ ID NO: 3555115 - DNA, 25 bp, Homo sapien
tattttaacattcctcacacactgc

SEQ ID NO: 3555116 - DNA, 25 bp, Homo sapien
tctattttaacattcctcacacact

SEQ ID NO: 3555117 - DNA, 25 bp, Homo sapien
attttaacattcctcacacactgca

SEQ ID NO: 3555118 - DNA, 25 bp, Homo sapien
ttttaacattcctcacacactgcat

SEQ ID NO: 3555119 - DNA, 25 bp, Homo sapien
tatgcggagcaattcacaaagagaa

SEQ ID NO: 3555120 - DNA, 25 bp, Homo sapien
gttgggtatgcggagcaattcacaa

SEQ ID NO: 3555121 - DNA, 25 bp, Homo sapien
tatgttgggtatgcggagcaattca

SEQ ID NO: 3555122 - DNA, 25 bp, Homo sapien
tacatatgttgggtatgcggagcaa

SEQ ID NO: 3555123 - DNA, 25 bp, Homo sapien
gatgacatccctttctgtctagcag

SEQ ID NO: 3555124 - DNA, 25 bp, Homo sapien
gttcagttgtcacaaaatggtaggc

SEQ ID NO: 3555125 - DNA, 25 bp, Homo sapien
taagaggacttgtcaaccaacagat

SEQ ID NO: 3555126 - DNA, 25 bp, Homo sapien
tacatggcttaaaaatgcaatggca

SEQ ID NO: 3555127 - DNA, 25 bp, Homo sapien
ctaatccttccttcctctgtcctta

SEQ ID NO: 3555128 - DNA, 25 bp, Homo sapien
tccttccttcctctgtccttattac

SEQ ID NO: 3555129 - DNA, 25 bp, Homo sapien
atccttccttcctctgtccttatta

SEQ ID NO: 3555130 - DNA, 25 bp, Homo sapien
taatccttccttcctctgtccttat

SEQ ID NO: 3555131 - DNA, 25 bp, Homo sapien
cagcattcttcattccattcctgtg

SEQ ID NO: 3555132 - DNA, 25 bp, Homo sapien
catggttaggatgtcttcagcattc

SEQ ID NO: 3555133 - DNA, 25 bp, Homo sapien
ctaagttcctttaagccctcttctg

SEQ ID NO: 3555134 - DNA, 25 bp, Homo sapien
ctgtgtgcagcttttctaagttcct

SEQ ID NO: 3555135 - DNA, 25 bp, Homo sapien
tagcagcacaaagtgtcaatgtcaa

SEQ ID NO: 3555136 - DNA, 25 bp, Homo sapien
tgcactggtctcgaatgacaaaagc

SEQ ID NO: 3555137 - DNA, 25 bp, Homo sapien
ccagggttatatgtccaatactagc

SEQ ID NO: 3555138 - DNA, 25 bp, Homo sapien
agacaaagcatggtgcagacatcac

SEQ ID NO: 3555139 - DNA, 25 bp, Homo sapien
aagcgcagggagcagtatacgagga

SEQ ID NO: 3555140 - DNA, 25 bp, Homo sapien
cacaggtgcctacaatggcgagctg

SEQ ID NO: 3555141 - DNA, 25 bp, Homo sapien
tggcgagctggaggtaagaccatct

SEQ ID NO: 3555142 - DNA, 25 bp, Homo sapien
gatgctaaatgtagcagccccagcc

SEQ ID NO: 3555143 - DNA, 25 bp, Homo sapien
attagataatgggaacaataacaac

SEQ ID NO: 3555144 - DNA, 25 bp, Homo sapien
ctgagaaacaggggcacattagata

SEQ ID NO: 3555145 - DNA, 25 bp, Homo sapien
cacattagataatgggaacaataac

SEQ ID NO: 3555146 - DNA, 25 bp, Homo sapien
gggcacattagataatgggaacaat

SEQ ID NO: 3555147 - DNA, 25 bp, Homo sapien
caaaggcatggaataacctcaatgc

SEQ ID NO: 3555148 - DNA, 25 bp, Homo sapien
caatggtagactggaatactatgta

SEQ ID NO: 3555149 - DNA, 25 bp, Homo sapien
gcaaaggcatggaataacctcaatg

SEQ ID NO: 3555150 - DNA, 25 bp, Homo sapien
aatggtagactggaatactatgtag

SEQ ID NO: 3555151 - DNA, 25 bp, Homo sapien
atggttgggcgatgataatggtttc

SEQ ID NO: 3555152 - DNA, 25 bp, Homo sapien
tggcaatgggcacctcaagtccctc

SEQ ID NO: 3555153 - DNA, 25 bp, Homo sapien
tcaagtccctcgtcacaatcagtgg

SEQ ID NO: 3555154 - DNA, 25 bp, Homo sapien
ctcgtcacaatcagtggagacatgg

SEQ ID NO: 3555155 - DNA, 25 bp, Homo sapien
tgtaaggtagaggttgtaatacctc

SEQ ID NO: 3555156 - DNA, 25 bp, Homo sapien
ttgttgtaaggtagaggttgtaata

SEQ ID NO: 3555157 - DNA, 25 bp, Homo sapien
tgttgtaaggtagaggttgtaatac

SEQ ID NO: 3555158 - DNA, 25 bp, Homo sapien
taaggtagaggttgtaatacctcta

SEQ ID NO: 3555159 - DNA, 25 bp, Homo sapien
tacaatcaggaggtggtgaaaccag

SEQ ID NO: 3555160 - DNA, 25 bp, Homo sapien
tggccaaggcccaaggtaagcattt

SEQ ID NO: 3555161 - DNA, 25 bp, Homo sapien
attatttggaccagcaggcagagac

SEQ ID NO: 3555162 - DNA, 25 bp, Homo sapien
gctcatactcgtccttcttgggtag

SEQ ID NO: 3555163 - DNA, 25 bp, Homo sapien
cataattttccttttgtgtctacaa

SEQ ID NO: 3555164 - DNA, 25 bp, Homo sapien
aatggccatataggttgcctcccac

SEQ ID NO: 3555165 - DNA, 25 bp, Homo sapien
acaaatggccatataggttgcctcc

SEQ ID NO: 3555166 - DNA, 25 bp, Homo sapien
ggccatataggttgcctcccaccat

SEQ ID NO: 3555167 - DNA, 25 bp, Homo sapien
caaatggccatataggttgcctccc

SEQ ID NO: 3555168 - DNA, 25 bp, Homo sapien
gttgagattcgcataccagatccca

SEQ ID NO: 3555169 - DNA, 25 bp, Homo sapien
ggttgagattcgcataccagatccc

SEQ ID NO: 3555170 - DNA, 25 bp, Homo sapien
tggttgagattcgcataccagatcc

SEQ ID NO: 3555171 - DNA, 25 bp, Homo sapien
caggtcatgtacacaagagaggaaa

SEQ ID NO: 3555172 - DNA, 25 bp, Homo sapien
aggtcatgtacacaagagaggaaaa

SEQ ID NO: 3555173 - DNA, 25 bp, Homo sapien
ggtcatgtacacaagagaggaaaat

SEQ ID NO: 3555174 - DNA, 25 bp, Homo sapien
ggaagggaaggagctttggtcatat

SEQ ID NO: 3555175 - DNA, 25 bp, Homo sapien
aggtcccattcagatgaatgagctt

SEQ ID NO: 3555176 - DNA, 25 bp, Homo sapien
tcagggatagtgtcattgtccagta

SEQ ID NO: 3555177 - DNA, 25 bp, Homo sapien
cagcagcgatgatcaagtatgaatg

SEQ ID NO: 3555178 - DNA, 25 bp, Homo sapien
ccagtatatgaacccagcagcgatg

SEQ ID NO: 3555179 - DNA, 25 bp, Homo sapien
cctcagatttgagtcgaatgggatg

SEQ ID NO: 3555180 - DNA, 25 bp, Homo sapien
tccagctgagtttgatggtatacta

SEQ ID NO: 3555181 - DNA, 25 bp, Homo sapien
tatgacgttgaacattataaggaaa

SEQ ID NO: 3555182 - DNA, 25 bp, Homo sapien
ccaggcctccaacttgatctaggag

SEQ ID NO: 3555183 - DNA, 25 bp, Homo sapien
gcctccaacttgatctaggaggtcc

SEQ ID NO: 3555184 - DNA, 25 bp, Homo sapien
agtgatccccaagaggagacaaaat

SEQ ID NO: 3555185 - DNA, 25 bp, Homo sapien
ctggacaagtgatccccaagaggag

SEQ ID NO: 3555186 - DNA, 25 bp, Homo sapien
tggacaagtgatccccaagaggaga

SEQ ID NO: 3555187 - DNA, 25 bp, Homo sapien
acaagtgatccccaagaggagacaa

SEQ ID NO: 3555188 - DNA, 25 bp, Homo sapien
caccacacagattgtagtactccat

SEQ ID NO: 3555189 - DNA, 25 bp, Homo sapien
ttctgtgtcttgtacacaacactca

SEQ ID NO: 3555190 - DNA, 25 bp, Homo sapien
gtgtcttgtacacaacactcagtgc

SEQ ID NO: 3555191 - DNA, 25 bp, Homo sapien
ctcagtgctgacaggatagccctca

SEQ ID NO: 3555192 - DNA, 25 bp, Homo sapien
tgtccacacacggttccatgtctgg

SEQ ID NO: 3555193 - DNA, 25 bp, Homo sapien
tccacacacggttccatgtctggtt

SEQ ID NO: 3555194 - DNA, 25 bp, Homo sapien
ttcatattgaggaatgtcccattca

SEQ ID NO: 3555195 - DNA, 25 bp, Homo sapien
ctgctgtccacacacggttccatgt

SEQ ID NO: 3555196 - DNA, 25 bp, Homo sapien
agtgacaacgtttctgtggcctcag

SEQ ID NO: 3555197 - DNA, 25 bp, Homo sapien
gggatggatgaagtgacaacgtttc

SEQ ID NO: 3555198 - DNA, 25 bp, Homo sapien
atgaagtgacaacgtttctgtggcc

SEQ ID NO: 3555199 - DNA, 25 bp, Homo sapien
tggatgaagtgacaacgtttctgtg

SEQ ID NO: 3555200 - DNA, 25 bp, Homo sapien
cagtttcttcgtccaagacgatgac

SEQ ID NO: 3555201 - DNA, 25 bp, Homo sapien
cgatgacattgtctatgatgtgcac

SEQ ID NO: 3555202 - DNA, 25 bp, Homo sapien
gacgatgacattgtctatgatgtgc

SEQ ID NO: 3555203 - DNA, 25 bp, Homo sapien
tccaagacgatgacattgtctatga

SEQ ID NO: 3555204 - DNA, 25 bp, Homo sapien
aacacgagggcaaactataaaggtg

SEQ ID NO: 3555205 - DNA, 25 bp, Homo sapien
accaacttgatccaagaagtcctga

SEQ ID NO: 3555206 - DNA, 25 bp, Homo sapien
ggcaaactataaaggtggagatgat

SEQ ID NO: 3555207 - DNA, 25 bp, Homo sapien
cgagggcaaactataaaggtggaga

SEQ ID NO: 3555208 - DNA, 25 bp, Homo sapien
cagaaggccatccagccgtacatgc

SEQ ID NO: 3555209 - DNA, 25 bp, Homo sapien
atggtggccatttgattggtggcca

SEQ ID NO: 3555210 - DNA, 25 bp, Homo sapien
ggccatttgattggtggccacttct

SEQ ID NO: 3555211 - DNA, 25 bp, Homo sapien
tccagccgtacatgcacaggatggt

SEQ ID NO: 3555212 - DNA, 25 bp, Homo sapien
ttttcacaattgtaatcgaacaggt

SEQ ID NO: 3555213 - DNA, 25 bp, Homo sapien
agaggttggagcaacaactcttttt

SEQ ID NO: 3555214 - DNA, 25 bp, Homo sapien
ttgtccttgcgatagaggcattcag

SEQ ID NO: 3555215 - DNA, 25 bp, Homo sapien
cgaacaggtaatgaagccatttgtt

SEQ ID NO: 3555216 - DNA, 25 bp, Homo sapien
ttcaatcacactgaattggcaggac

SEQ ID NO: 3555217 - DNA, 25 bp, Homo sapien
gagccagcaagctagctagccagtt

SEQ ID NO: 3555218 - DNA, 25 bp, Homo sapien
ggcaagcactatgtaagcccagatt

SEQ ID NO: 3555219 - DNA, 25 bp, Homo sapien
taagcatgaccttaaaattctaggg

SEQ ID NO: 3555220 - DNA, 25 bp, Homo sapien
gagctttggtggtatacccagccac

SEQ ID NO: 3555221 - DNA, 25 bp, Homo sapien
cagggctccgtgtttggctcactca

SEQ ID NO: 3555222 - DNA, 25 bp, Homo sapien
taaacatgtccctttacatcagtca

SEQ ID NO: 3555223 - DNA, 25 bp, Homo sapien
tcagtcacaatggtgaagaggaagg

SEQ ID NO: 3555224 - DNA, 25 bp, Homo sapien
ggatgaagcaacgacacttctctgg

SEQ ID NO: 3555225 - DNA, 25 bp, Homo sapien
atgaccagggatgaatgcaatgaaa

SEQ ID NO: 3555226 - DNA, 25 bp, Homo sapien
aggatgtggacccagtagtgatgac

SEQ ID NO: 3555227 - DNA, 25 bp, Homo sapien
gggcaacctggctgagagtcccagt

SEQ ID NO: 3555228 - DNA, 25 bp, Homo sapien
tgaggataatgtataatgatggaga

SEQ ID NO: 3555229 - DNA, 25 bp, Homo sapien
aaagatttggaatctccccaggcca

SEQ ID NO: 3555230 - DNA, 25 bp, Homo sapien
tcaaaacccatcgagacagaacagg

SEQ ID NO: 3555231 - DNA, 25 bp, Homo sapien
ccacttgatccaggagcatatcaaa

SEQ ID NO: 3555232 - DNA, 25 bp, Homo sapien
tcagtatacccatagcctgcactgt

SEQ ID NO: 3555233 - DNA, 25 bp, Homo sapien
tatgctaaagtacatgggagacaca

SEQ ID NO: 3555234 - DNA, 25 bp, Homo sapien
tcttataggctatgccctgctcagg

SEQ ID NO: 3555235 - DNA, 25 bp, Homo sapien
gacacattgtgttattagtacgctg

SEQ ID NO: 3555236 - DNA, 25 bp, Homo sapien
taactggtgggataattacaatgaa

SEQ ID NO: 3555237 - DNA, 25 bp, Homo sapien
tataggtccctagcaagtttctgga

SEQ ID NO: 3555238 - DNA, 25 bp, Homo sapien
tgagtactattaaacacaatgtgtc

SEQ ID NO: 3555239 - DNA, 25 bp, Homo sapien
taacaagatatagtgagtcagtaga

SEQ ID NO: 3555240 - DNA, 25 bp, Homo sapien
catgatactggtgctacagtcacca

SEQ ID NO: 3555241 - DNA, 25 bp, Homo sapien
gcatgatactggtgctacagtcacc

SEQ ID NO: 3555242 - DNA, 25 bp, Homo sapien
cagcatgatactggtgctacagtca

SEQ ID NO: 3555243 - DNA, 25 bp, Homo sapien
tgatactggtgctacagtcaccaaa

SEQ ID NO: 3555244 - DNA, 25 bp, Homo sapien
aatggcagcatgatgggaattgcat

SEQ ID NO: 3555245 - DNA, 25 bp, Homo sapien
agtcaatggcagcatgatgggaatt

SEQ ID NO: 3555246 - DNA, 25 bp, Homo sapien
tcaatggcagcatgatgggaattgc

SEQ ID NO: 3555247 - DNA, 25 bp, Homo sapien
caatggcagcatgatgggaattgca

SEQ ID NO: 3555248 - DNA, 25 bp, Homo sapien
ttctagattaaggtaccatgggccc

SEQ ID NO: 3555249 - DNA, 25 bp, Homo sapien
tcaagcatcggagaccaaggtcagc

SEQ ID NO: 3555250 - DNA, 25 bp, Homo sapien
ggttcaagccagtaaaaagccagag

SEQ ID NO: 3555251 - DNA, 25 bp, Homo sapien
gctacactgtgggtcgaaaagggca

SEQ ID NO: 3555252 - DNA, 25 bp, Homo sapien
ttgggctttatgctatccactacag

SEQ ID NO: 3555253 - DNA, 25 bp, Homo sapien
caggcagttattggtttgggcttta

SEQ ID NO: 3555254 - DNA, 25 bp, Homo sapien
gctatccactacagctgaaataact

SEQ ID NO: 3555255 - DNA, 25 bp, Homo sapien
ctccttccatcagggcgtgctctac

SEQ ID NO: 3555256 - DNA, 25 bp, Homo sapien
aatgacaaaccccaagaaagctctg

SEQ ID NO: 3555257 - DNA, 25 bp, Homo sapien
gaaagctctggaagaagccatcatc

SEQ ID NO: 3555258 - DNA, 25 bp, Homo sapien
atcatcagagcaaatggggtcacac

SEQ ID NO: 3555259 - DNA, 25 bp, Homo sapien
tctgatcactaatgaaatgacaaac

SEQ ID NO: 3555260 - DNA, 25 bp, Homo sapien
tatctgaggccattgacaaagtgct

SEQ ID NO: 3555261 - DNA, 25 bp, Homo sapien
cacggcccgattgctaaagatggaa

SEQ ID NO: 3555262 - DNA, 25 bp, Homo sapien
gatggaagtaatgctgcccacctca

SEQ ID NO: 3555263 - DNA, 25 bp, Homo sapien
gatgatcttgtccaccggcaagggc

SEQ ID NO: 3555264 - DNA, 25 bp, Homo sapien
agtgctcatagccaattcgaaaaat

SEQ ID NO: 3555265 - DNA, 25 bp, Homo sapien
tggaccacgcaatcatcttctacat

SEQ ID NO: 3555266 - DNA, 25 bp, Homo sapien
gccagatggaccacgcaatcatctt

SEQ ID NO: 3555267 - DNA, 25 bp, Homo sapien
catagccaattcgaaaaatctcaat

SEQ ID NO: 3555268 - DNA, 25 bp, Homo sapien
aagctgacacattggacttcatcaa

SEQ ID NO: 3555269 - DNA, 25 bp, Homo sapien
ttttgagtgacatccgtgttgttgc

SEQ ID NO: 3555270 - DNA, 25 bp, Homo sapien
caccaaaggcactattcatagagat

SEQ ID NO: 3555271 - DNA, 25 bp, Homo sapien
ggtctcttagatacaccaccaaagg

SEQ ID NO: 3555272 - DNA, 25 bp, Homo sapien
ctttgagaattcttgttacacctac

SEQ ID NO: 3555273 - DNA, 25 bp, Homo sapien
aatatgtagagaagttgccaggagg

SEQ ID NO: 3555274 - DNA, 25 bp, Homo sapien
tacaatatgtagagaagttgccagg

SEQ ID NO: 3555275 - DNA, 25 bp, Homo sapien
atacaatatgtagagaagttgccag

SEQ ID NO: 3555276 - DNA, 25 bp, Homo sapien
gtgtggtctccaagctaactacagc

SEQ ID NO: 3555277 - DNA, 25 bp, Homo sapien
ttctcaggctttggaattgaactcc

SEQ ID NO: 3555278 - DNA, 25 bp, Homo sapien
aggctttggaattgaactccagtct

SEQ ID NO: 3555279 - DNA, 25 bp, Homo sapien
tgtggtctccaagctaactacagcc

SEQ ID NO: 3555280 - DNA, 25 bp, Homo sapien
tcactatttcataattattggaaaa

SEQ ID NO: 3555281 - DNA, 25 bp, Homo sapien
aaatgattttgcaatcacaaagtta

SEQ ID NO: 3555282 - DNA, 25 bp, Homo sapien
gattttgcaatcacaaagttaacaa

SEQ ID NO: 3555283 - DNA, 25 bp, Homo sapien
aaagttaacaaatatcactatttca

SEQ ID NO: 3555284 - DNA, 25 bp, Homo sapien
aacgctgcgaatcccacggattctt

SEQ ID NO: 3555285 - DNA, 25 bp, Homo sapien
ctgttctaatgtgcccggcggaggc

SEQ ID NO: 3555286 - DNA, 25 bp, Homo sapien
ctgccctgttctaatgtgcccggcg

SEQ ID NO: 3555287 - DNA, 25 bp, Homo sapien
tgggagctggaccaacgctgcgaat

SEQ ID NO: 3555288 - DNA, 25 bp, Homo sapien
ctaattcaaggggggaaatgctatt

SEQ ID NO: 3555289 - DNA, 25 bp, Homo sapien
attcaaggggggaaatgctatttag

SEQ ID NO: 3555290 - DNA, 25 bp, Homo sapien
tcaaggggggaaatgctatttagac

SEQ ID NO: 3555291 - DNA, 25 bp, Homo sapien
ttcaaggggggaaatgctatttaga

SEQ ID NO: 3555292 - DNA, 25 bp, Homo sapien
tgcctggcccctggttaggcctcag

SEQ ID NO: 3555293 - DNA, 25 bp, Homo sapien
agctctagtctagcatcgtgcctgg

SEQ ID NO: 3555294 - DNA, 25 bp, Homo sapien
ttgaccgctacggagagtgggctca

SEQ ID NO: 3555295 - DNA, 25 bp, Homo sapien
ggagagttcgagcaagcaccttgac

SEQ ID NO: 3555296 - DNA, 25 bp, Homo sapien
agcgcaggcggctggtccttgggcc

SEQ ID NO: 3555297 - DNA, 25 bp, Homo sapien
tgagcgcaggcggctggtccttggg

SEQ ID NO: 3555298 - DNA, 25 bp, Homo sapien
gcacagctgaacgtctgagcgcagg

SEQ ID NO: 3555299 - DNA, 25 bp, Homo sapien
gggcacagctgaacgtctgagcgca

SEQ ID NO: 3555300 - DNA, 25 bp, Homo sapien
aggcggagcgcgtactccccctcgg

SEQ ID NO: 3555301 - DNA, 25 bp, Homo sapien
gcggagcgcgtactccccctcggcg

SEQ ID NO: 3555302 - DNA, 25 bp, Homo sapien
cggagcgcgtactccccctcggcgc

SEQ ID NO: 3555303 - DNA, 25 bp, Homo sapien
ggaggcggagcgcgtactccccctc

SEQ ID NO: 3555304 - DNA, 25 bp, Homo sapien
ctggcgagttcccagtcggcgcggc

SEQ ID NO: 3555305 - DNA, 25 bp, Homo sapien
ttgcaggggactacgcccctggcga

SEQ ID NO: 3555306 - DNA, 25 bp, Homo sapien
cgcggaggggaaagcgccgcgggct

SEQ ID NO: 3555307 - DNA, 25 bp, Homo sapien
gagccgcggaagcttgggcactggg

SEQ ID NO: 3555308 - DNA, 25 bp, Homo sapien
gatctacagttggagttgccccact

SEQ ID NO: 3555309 - DNA, 25 bp, Homo sapien
agagctctgctgtataccaccggga

SEQ ID NO: 3555310 - DNA, 25 bp, Homo sapien
caggtcgcaggtgagactaacagct

SEQ ID NO: 3555311 - DNA, 25 bp, Homo sapien
agcattaaaacgctgcaggtcgcag

SEQ ID NO: 3555312 - DNA, 25 bp, Homo sapien
tcaggaacggaggagtgagctcttt

SEQ ID NO: 3555313 - DNA, 25 bp, Homo sapien
tattgatagccaagaaagaatatcc

SEQ ID NO: 3555314 - DNA, 25 bp, Homo sapien
taagcatgtacagggaggaactcca

SEQ ID NO: 3555315 - DNA, 25 bp, Homo sapien
ccccttccgaaggtgatggaatcca

SEQ ID NO: 3555316 - DNA, 25 bp, Homo sapien
tagaactgtgccagattgtaggaca

SEQ ID NO: 3555317 - DNA, 25 bp, Homo sapien
cacctggagtcactatataatggaa

SEQ ID NO: 3555318 - DNA, 25 bp, Homo sapien
gagggttctaaatgcaaacatcagc

SEQ ID NO: 3555319 - DNA, 25 bp, Homo sapien
catcagccttgagattagaaacggg

SEQ ID NO: 3555320 - DNA, 25 bp, Homo sapien
gcagagcccaattgtgtctttaata

SEQ ID NO: 3555321 - DNA, 25 bp, Homo sapien
gagcccaattgtgtctttaatagaa

SEQ ID NO: 3555322 - DNA, 25 bp, Homo sapien
aatcagtaaaccaaactccactcct

SEQ ID NO: 3555323 - DNA, 25 bp, Homo sapien
atcagtaaaccaaactccactcctg

SEQ ID NO: 3555324 - DNA, 25 bp, Homo sapien
tttcccgcttgcttctggccagcag

SEQ ID NO: 3555325 - DNA, 25 bp, Homo sapien
tgccacacctactgtcgtgactgca

SEQ ID NO: 3555326 - DNA, 25 bp, Homo sapien
aggatccccacaaggcttgcggcag

SEQ ID NO: 3555327 - DNA, 25 bp, Homo sapien
ctactgtcgtgactgcaccagtgac

SEQ ID NO: 3555328 - DNA, 25 bp, Homo sapien
tagcagatttctgtggagtatcaat

SEQ ID NO: 3555329 - DNA, 25 bp, Homo sapien
aatagcagatttctgtggagtatca

SEQ ID NO: 3555330 - DNA, 25 bp, Homo sapien
tgtggagtatcaatgaatttgaagc

SEQ ID NO: 3555331 - DNA, 25 bp, Homo sapien
taaaccagcgaccaaatagcagatt

SEQ ID NO: 3555332 - DNA, 25 bp, Homo sapien
cactatggctttgttggtcagggca

SEQ ID NO: 3555333 - DNA, 25 bp, Homo sapien
tcactggtcagcgaataaggcaact

SEQ ID NO: 3555334 - DNA, 25 bp, Homo sapien
catagcgcagatggttcacgaagtg

SEQ ID NO: 3555335 - DNA, 25 bp, Homo sapien
tgcccgcttgacgattttgttggaa

SEQ ID NO: 3555336 - DNA, 25 bp, Homo sapien
tggaaggacttgtccatcctgcctg

SEQ ID NO: 3555337 - DNA, 25 bp, Homo sapien
caagcagcctcatcgccccgagcac

SEQ ID NO: 3555338 - DNA, 25 bp, Homo sapien
ctgtgcaaacagtgagttcagtcct

SEQ ID NO: 3555339 - DNA, 25 bp, Homo sapien
ctttggagaaggtccctaagttctg

SEQ ID NO: 3555340 - DNA, 25 bp, Homo sapien
cagatggaccacatagccatctccc

SEQ ID NO: 3555341 - DNA, 25 bp, Homo sapien
tggcccagtgtgcatagccaaagcg

SEQ ID NO: 3555342 - DNA, 25 bp, Homo sapien
ccaaagcgagaaatctcaatcaggt

SEQ ID NO: 3555343 - DNA, 25 bp, Homo sapien
ctccaagtctcggtcttggtctggc

SEQ ID NO: 3555344 - DNA, 25 bp, Homo sapien
tgcaggaaacattctagggcctgac

SEQ ID NO: 3555345 - DNA, 25 bp, Homo sapien
ggaaacattctagggcctgacctgc

SEQ ID NO: 3555346 - DNA, 25 bp, Homo sapien
acattctagggcctgacctgcaagg

SEQ ID NO: 3555347 - DNA, 25 bp, Homo sapien
attctagggcctgacctgcaaggag

SEQ ID NO: 3555348 - DNA, 25 bp, Homo sapien
caaactttggccacagtagaaccag

SEQ ID NO: 3555349 - DNA, 25 bp, Homo sapien
tagagtcagagcctcctaagttcga

SEQ ID NO: 3555350 - DNA, 25 bp, Homo sapien
cactaatagggtggttgttcctcaa

SEQ ID NO: 3555351 - DNA, 25 bp, Homo sapien
tgccagagctgtagaccaacaagaa

SEQ ID NO: 3555352 - DNA, 25 bp, Homo sapien
agtaggcagaccttgcagcgagcag

SEQ ID NO: 3555353 - DNA, 25 bp, Homo sapien
tacatatagttgtccggtcctgagc

SEQ ID NO: 3555354 - DNA, 25 bp, Homo sapien
gaggcacattcctctaccctggaaa

SEQ ID NO: 3555355 - DNA, 25 bp, Homo sapien
cacatatcaagtaggcaaggcggca

SEQ ID NO: 3555356 - DNA, 25 bp, Homo sapien
cacccctgggtagagatttaagacg

SEQ ID NO: 3555357 - DNA, 25 bp, Homo sapien
aactgctcatgtgcacccagaggac

SEQ ID NO: 3555358 - DNA, 25 bp, Homo sapien
aagggagttccctcagagccagtct

SEQ ID NO: 3555359 - DNA, 25 bp, Homo sapien
tcattgggacatagcaaccgcacca

SEQ ID NO: 3555360 - DNA, 25 bp, Homo sapien
aaagaaagctaataactcatgaccc

SEQ ID NO: 3555361 - DNA, 25 bp, Homo sapien
gctaataactcatgacccatgaaaa

SEQ ID NO: 3555362 - DNA, 25 bp, Homo sapien
gtagctaataatggtttctgcattt

SEQ ID NO: 3555363 - DNA, 25 bp, Homo sapien
ttttgtacagcccagtagctaataa

SEQ ID NO: 3555364 - DNA, 25 bp, Homo sapien
ggaaatttggctcaatccattggcc

SEQ ID NO: 3555365 - DNA, 25 bp, Homo sapien
tacaataccacagcagaggtgacta

SEQ ID NO: 3555366 - DNA, 25 bp, Homo sapien
gaaaggtgtatttagatctcccact

SEQ ID NO: 3555367 - DNA, 25 bp, Homo sapien
ggtgactaactacaacagacactgt

SEQ ID NO: 3555368 - DNA, 25 bp, Homo sapien
tctcagcctccagatctataagaag

SEQ ID NO: 3555369 - DNA, 25 bp, Homo sapien
ctctcattaattacccactttcagg

SEQ ID NO: 3555370 - DNA, 25 bp, Homo sapien
gcctcctcactatgggatgccctgt

SEQ ID NO: 3555371 - DNA, 25 bp, Homo sapien
gatgaattcctctttgcaatcagtc

SEQ ID NO: 3555372 - DNA, 25 bp, Homo sapien
ccttataccatgtgagagagcgagc

SEQ ID NO: 3555373 - DNA, 25 bp, Homo sapien
tgtttaccctacaccagaagtggac

SEQ ID NO: 3555374 - DNA, 25 bp, Homo sapien
caaagacctactgcttgttgacctg

SEQ ID NO: 3555375 - DNA, 25 bp, Homo sapien
tggcatggagccctctgtaaatcct

SEQ ID NO: 3555376 - DNA, 25 bp, Homo sapien
tcctagatctagttccgggccaagg

SEQ ID NO: 3555377 - DNA, 25 bp, Homo sapien
gaaagaatctgagccaatgtgggag

SEQ ID NO: 3555378 - DNA, 25 bp, Homo sapien
tagtggagatcacctgacccaaagg

SEQ ID NO: 3555379 - DNA, 25 bp, Homo sapien
tacttgagataactggagctggact

SEQ ID NO: 3555380 - DNA, 25 bp, Homo sapien
tgtataaagtcatcgctgacaggac

SEQ ID NO: 3555381 - DNA, 25 bp, Homo sapien
caagacccccttgatgtataaagtc

SEQ ID NO: 3555382 - DNA, 25 bp, Homo sapien
ccccttgatgtataaagtcatcgct

SEQ ID NO: 3555383 - DNA, 25 bp, Homo sapien
taaagtcatcgctgacaggacagtc

SEQ ID NO: 3555384 - DNA, 25 bp, Homo sapien
gcttttgtcgcttgtttcttgagaa

SEQ ID NO: 3555385 - DNA, 25 bp, Homo sapien
tgtcgcttgtttcttgagaacatga

SEQ ID NO: 3555386 - DNA, 25 bp, Homo sapien
aagcccattcctgcaacgcttgcag

SEQ ID NO: 3555387 - DNA, 25 bp, Homo sapien
cgcttgcagcgatgatgacatctct

SEQ ID NO: 3555388 - DNA, 25 bp, Homo sapien
caacaaacattggtagggaagaggg

SEQ ID NO: 3555389 - DNA, 25 bp, Homo sapien
ggatccagagtacaggctgcacatt

SEQ ID NO: 3555390 - DNA, 25 bp, Homo sapien
gcaacaaagaagagggtgggtcaca

SEQ ID NO: 3555391 - DNA, 25 bp, Homo sapien
gaaacattcagctcgggatacctca

SEQ ID NO: 3555392 - DNA, 25 bp, Homo sapien
ccgcccgctggatgattttgctgca

SEQ ID NO: 3555393 - DNA, 25 bp, Homo sapien
gggcagcggcgagtacttgtcatca

SEQ ID NO: 3555394 - DNA, 25 bp, Homo sapien
tcacgatggccttgtcagtcagggc

SEQ ID NO: 3555395 - DNA, 25 bp, Homo sapien
cagtcagggcggacatgacactggc

SEQ ID NO: 3555396 - DNA, 25 bp, Homo sapien
gcctgggcaacatggcaaaactccg

SEQ ID NO: 3555397 - DNA, 25 bp, Homo sapien
caaggcaggcagatcgcttaagccc

SEQ ID NO: 3555398 - DNA, 25 bp, Homo sapien
taagcccaggagtttcagacaagcc

SEQ ID NO: 3555399 - DNA, 25 bp, Homo sapien
tgggcaacatggcaaaactccgtct

SEQ ID NO: 3555400 - DNA, 25 bp, Homo sapien
cagtgcagccaatcaatactgaggc

SEQ ID NO: 3555401 - DNA, 25 bp, Homo sapien
cagtgacgtgatctggacagcaggc

SEQ ID NO: 3555402 - DNA, 25 bp, Homo sapien
tgccgggccttgtccaaggtgctga

SEQ ID NO: 3555403 - DNA, 25 bp, Homo sapien
caattcccatgctactgagaagacg

SEQ ID NO: 3555404 - DNA, 25 bp, Homo sapien
aggaggccaacgttgctggagtcta

SEQ ID NO: 3555405 - DNA, 25 bp, Homo sapien
caggccacagtgtagactttgatgc

SEQ ID NO: 3555406 - DNA, 25 bp, Homo sapien
cgttgctggagtctagagacccagg

SEQ ID NO: 3555407 - DNA, 25 bp, Homo sapien
aagacgaggcccaaagtcacagacc

SEQ ID NO: 3555408 - DNA, 25 bp, Homo sapien
gataggactacagtggcgcgtcacc

SEQ ID NO: 3555409 - DNA, 25 bp, Homo sapien
tccgcctcctgctcgtgcctcagcc

SEQ ID NO: 3555410 - DNA, 25 bp, Homo sapien
caagtagataggactacagtggcgc

SEQ ID NO: 3555411 - DNA, 25 bp, Homo sapien
gtagataggactacagtggcgcgtc

SEQ ID NO: 3555412 - DNA, 25 bp, Homo sapien
tgtctgtagaaagggcgaaaaatct

SEQ ID NO: 3555413 - DNA, 25 bp, Homo sapien
gatgaaccacatatccatcgccaac

SEQ ID NO: 3555414 - DNA, 25 bp, Homo sapien
atagatggcccagtgtctgtagaaa

SEQ ID NO: 3555415 - DNA, 25 bp, Homo sapien
atcaggtctccaggcttaggctctg

SEQ ID NO: 3555416 - DNA, 25 bp, Homo sapien
gctccacataaacaccaatgagagg

SEQ ID NO: 3555417 - DNA, 25 bp, Homo sapien
ctccacataaacaccaatgagagga

SEQ ID NO: 3555418 - DNA, 25 bp, Homo sapien
ctgggcagcgggtatcccaacgaga

SEQ ID NO: 3555419 - DNA, 25 bp, Homo sapien
cgcacacatcagtatggagctaggg

SEQ ID NO: 3555420 - DNA, 25 bp, Homo sapien
tatcccaacgagaggcggggacaca

SEQ ID NO: 3555421 - DNA, 25 bp, Homo sapien
gggacacagcgcacacatcagtatg

SEQ ID NO: 3555422 - DNA, 25 bp, Homo sapien
tccagatgcacccatgcaactctga

SEQ ID NO: 3555423 - DNA, 25 bp, Homo sapien
tgcacccatgcaactctgactcagt

SEQ ID NO: 3555424 - DNA, 25 bp, Homo sapien
tccaatcaaggtccctccagatgca

SEQ ID NO: 3555425 - DNA, 25 bp, Homo sapien
tctccaatcaaggtccctccagatg

SEQ ID NO: 3555426 - DNA, 25 bp, Homo sapien
gatgcctcgcagctgacagaggtgc

SEQ ID NO: 3555427 - DNA, 25 bp, Homo sapien
gggcagtcgccaagcacagttaacg

SEQ ID NO: 3555428 - DNA, 25 bp, Homo sapien
acagttaacgctgggactccgctgg

SEQ ID NO: 3555429 - DNA, 25 bp, Homo sapien
agatttctgcggacagacctgccct

SEQ ID NO: 3555430 - DNA, 25 bp, Homo sapien
tcgcggtgtggaccctcaaggccag

SEQ ID NO: 3555431 - DNA, 25 bp, Homo sapien
ttccctcgcggtgtggaccctcaag

SEQ ID NO: 3555432 - DNA, 25 bp, Homo sapien
gccaggctcgatttcgctgcgtaga

SEQ ID NO: 3555433 - DNA, 25 bp, Homo sapien
caggctcgatttcgctgcgtagatg

SEQ ID NO: 3555434 - DNA, 25 bp, Homo sapien
ggctcggcaggctagtctacacccg

SEQ ID NO: 3555435 - DNA, 25 bp, Homo sapien
acgggactgcggcttctgttgggca

SEQ ID NO: 3555436 - DNA, 25 bp, Homo sapien
taacaggaaactgcgtctccagacc

SEQ ID NO: 3555437 - DNA, 25 bp, Homo sapien
ccaattagatctcttcctcgcggaa

SEQ ID NO: 3555438 - DNA, 25 bp, Homo sapien
gccccagcaattggaccgggtctaa

SEQ ID NO: 3555439 - DNA, 25 bp, Homo sapien
caattggaccgggtctaatggccgc

SEQ ID NO: 3555440 - DNA, 25 bp, Homo sapien
ccagcaattggaccgggtctaatgg

SEQ ID NO: 3555441 - DNA, 25 bp, Homo sapien
aattggaccgggtctaatggccgcg

SEQ ID NO: 3555442 - DNA, 25 bp, Homo sapien
tgtagaagtaactgacaccaactac

SEQ ID NO: 3555443 - DNA, 25 bp, Homo sapien
caattcggtgtagaagtaactgaca

SEQ ID NO: 3555444 - DNA, 25 bp, Homo sapien
ttgtccaattcggtgtagaagtaac

SEQ ID NO: 3555445 - DNA, 25 bp, Homo sapien
cggtgtagaagtaactgacaccaac

SEQ ID NO: 3555446 - DNA, 25 bp, Homo sapien
gatgacataaacctggaaccactgg

SEQ ID NO: 3555447 - DNA, 25 bp, Homo sapien
tgggatgacataaacctggaaccac

SEQ ID NO: 3555448 - DNA, 25 bp, Homo sapien
agtgggatgacataaacctggaacc

SEQ ID NO: 3555449 - DNA, 25 bp, Homo sapien
gacataaacctggaaccactggtgc

SEQ ID NO: 3555450 - DNA, 25 bp, Homo sapien
cctgggtacaaagctaggaatctga

SEQ ID NO: 3555451 - DNA, 25 bp, Homo sapien
tcaaaggcaagggtctagcagacag

SEQ ID NO: 3555452 - DNA, 25 bp, Homo sapien
cagagaaggcactatgacaatggag

SEQ ID NO: 3555453 - DNA, 25 bp, Homo sapien
taagtcttatgcactccaaggtaga

SEQ ID NO: 3555454 - DNA, 25 bp, Homo sapien
tcgtgtgtgcaaaaccatggaatca

SEQ ID NO: 3555455 - DNA, 25 bp, Homo sapien
cacactatgtggcaacaggattccc

SEQ ID NO: 3555456 - DNA, 25 bp, Homo sapien
taaaacaaggcatgactctgaaggt

SEQ ID NO: 3555457 - DNA, 25 bp, Homo sapien
taagaacattagacacggcagagaa

SEQ ID NO: 3555458 - DNA, 25 bp, Homo sapien
aaatggaagtgtgtttaataatttg

SEQ ID NO: 3555459 - DNA, 25 bp, Homo sapien
gtgtgtttaataatttgaaaccaca

SEQ ID NO: 3555460 - DNA, 25 bp, Homo sapien
tgtgtttaataatttgaaaccacag

SEQ ID NO: 3555461 - DNA, 25 bp, Homo sapien
tggaagtgtgtttaataatttgaaa

SEQ ID NO: 3555462 - DNA, 25 bp, Homo sapien
catgttttagctcttcctggatcgt

SEQ ID NO: 3555463 - DNA, 25 bp, Homo sapien
tctggatatgaacctgtggccgtgg

SEQ ID NO: 3555464 - DNA, 25 bp, Homo sapien
ggcttgttgtgttcttgtttgatct

SEQ ID NO: 3555465 - DNA, 25 bp, Homo sapien
gtctgctcatttattacagggccat

SEQ ID NO: 3555466 - DNA, 25 bp, Homo sapien
caacaactgcatccctcacagtggc

SEQ ID NO: 3555467 - DNA, 25 bp, Homo sapien
gtggcctgagtggaattaccgatat

SEQ ID NO: 3555468 - DNA, 25 bp, Homo sapien
tggaattaccgatatgagaagaagc

SEQ ID NO: 3555469 - DNA, 25 bp, Homo sapien
gcttttttatccatggatggtcttc

SEQ ID NO: 3555470 - DNA, 25 bp, Homo sapien
ccatcatcggcatgttacagaaagc

SEQ ID NO: 3555471 - DNA, 25 bp, Homo sapien
tgtggcagcagctaactcccaagag

SEQ ID NO: 3555472 - DNA, 25 bp, Homo sapien
aacctgtctccatcatcggcatgtt

SEQ ID NO: 3555473 - DNA, 25 bp, Homo sapien
tgaaaatgcagggatacagagaggc

SEQ ID NO: 3555474 - DNA, 25 bp, Homo sapien
tatgcggcaccaaaatcaatagctc

SEQ ID NO: 3555475 - DNA, 25 bp, Homo sapien
tgaacaactgggctacaacctcaag

SEQ ID NO: 3555476 - DNA, 25 bp, Homo sapien
tcaagacctatgaagccagtgaggc

SEQ ID NO: 3555477 - DNA, 25 bp, Homo sapien
gaagacgttcttgctaccattgtgc

SEQ ID NO: 3555478 - DNA, 25 bp, Homo sapien
ctcttccatgttgttataataaatg

SEQ ID NO: 3555479 - DNA, 25 bp, Homo sapien
tgttataataaatgtccttggcaga

SEQ ID NO: 3555480 - DNA, 25 bp, Homo sapien
ccatgttgttataataaatgtcctt

SEQ ID NO: 3555481 - DNA, 25 bp, Homo sapien
ttataataaatgtccttggcagagg

SEQ ID NO: 3555482 - DNA, 25 bp, Homo sapien
cagctgctaagttgttggcttcagc

SEQ ID NO: 3555483 - DNA, 25 bp, Homo sapien
gcagctgctaagttgttggcttcag

SEQ ID NO: 3555484 - DNA, 25 bp, Homo sapien
ctgcagctgctaagttgttggcttc

SEQ ID NO: 3555485 - DNA, 25 bp, Homo sapien
tgcagctgctaagttgttggcttca

SEQ ID NO: 3555486 - DNA, 25 bp, Homo sapien
gcagatcttctccttgataaatttt

SEQ ID NO: 3555487 - DNA, 25 bp, Homo sapien
gacttggggtgaggcagatcttctc

SEQ ID NO: 3555488 - DNA, 25 bp, Homo sapien
tgaagcatggacttggggtgaggca

SEQ ID NO: 3555489 - DNA, 25 bp, Homo sapien
gatcttctccttgataaattttaat

SEQ ID NO: 3555490 - DNA, 25 bp, Homo sapien
tactccagtagtccccgacaggtga

SEQ ID NO: 3555491 - DNA, 25 bp, Homo sapien
tgggtttaatacatacggtatcagt

SEQ ID NO: 3555492 - DNA, 25 bp, Homo sapien
tatcagtgcctgtaactgctctttg

SEQ ID NO: 3555493 - DNA, 25 bp, Homo sapien
caggtgacctttgagccattgatct

SEQ ID NO: 3555494 - DNA, 25 bp, Homo sapien
tttagcgatgggggggatctcccta

SEQ ID NO: 3555495 - DNA, 25 bp, Homo sapien
cactgtagccttgacgtctggggct

SEQ ID NO: 3555496 - DNA, 25 bp, Homo sapien
ctgtagccttgacgtctggggctca

SEQ ID NO: 3555497 - DNA, 25 bp, Homo sapien
tccctatgttgccgaggctgagatg

SEQ ID NO: 3555498 - DNA, 25 bp, Homo sapien
gcaggtgacatcggagaaacatgag

SEQ ID NO: 3555499 - DNA, 25 bp, Homo sapien
gtcctggatgtggtaagagaaagca

SEQ ID NO: 3555500 - DNA, 25 bp, Homo sapien
tgtgatttcgaacattctgaatttc

SEQ ID NO: 3555501 - DNA, 25 bp, Homo sapien
tgagtgaatgtgatttcgaacattc

SEQ ID NO: 3555502 - DNA, 25 bp, Homo sapien
taagggaaactccaatctctaacca

SEQ ID NO: 3555503 - DNA, 25 bp, Homo sapien
tcctccttggagtccatagctatat

SEQ ID NO: 3555504 - DNA, 25 bp, Homo sapien
gagtccatagctatattcataaggg

SEQ ID NO: 3555505 - DNA, 25 bp, Homo sapien
ctgtaaacgcttatccaaaaatgcc

SEQ ID NO: 3555506 - DNA, 25 bp, Homo sapien
tgccagacgaccgtattctgtgaag

SEQ ID NO: 3555507 - DNA, 25 bp, Homo sapien
cattgccagacgaccgtattctgtg

SEQ ID NO: 3555508 - DNA, 25 bp, Homo sapien
tcatccattgccagacgaccgtatt

SEQ ID NO: 3555509 - DNA, 25 bp, Homo sapien
ccagacgaccgtattctgtgaagag

SEQ ID NO: 3555510 - DNA, 25 bp, Homo sapien
tcgaacacccaaactcaggtgatca

SEQ ID NO: 3555511 - DNA, 25 bp, Homo sapien
actggtctcgaacacccaaactcag

SEQ ID NO: 3555512 - DNA, 25 bp, Homo sapien
ccagactggtctcgaacacccaaac

SEQ ID NO: 3555513 - DNA, 25 bp, Homo sapien
agactggtctcgaacacccaaactc

SEQ ID NO: 3555514 - DNA, 25 bp, Homo sapien
tatgcctcatacaattctgaagtgc

SEQ ID NO: 3555515 - DNA, 25 bp, Homo sapien
caaggcatatttctgcatgttaaat

SEQ ID NO: 3555516 - DNA, 25 bp, Homo sapien
caccgcagtatctagtacagagtaa

SEQ ID NO: 3555517 - DNA, 25 bp, Homo sapien
aatacacgttggctattatcatccc

SEQ ID NO: 3555518 - DNA, 25 bp, Homo sapien
gatcgaagttttacagagcaacagc

SEQ ID NO: 3555519 - DNA, 25 bp, Homo sapien
taagccatggcactggtacagaact

SEQ ID NO: 3555520 - DNA, 25 bp, Homo sapien
gagtaacataccagaattgcatcca

SEQ ID NO: 3555521 - DNA, 25 bp, Homo sapien
cataagcaacattaaggatcgaggt

SEQ ID NO: 3555522 - DNA, 25 bp, Homo sapien
cttgaatgttctgagataaattata

SEQ ID NO: 3555523 - DNA, 25 bp, Homo sapien
atcttcttgaatgttctgagataaa

SEQ ID NO: 3555524 - DNA, 25 bp, Homo sapien
cagctgttgaagatcatcttcttga

SEQ ID NO: 3555525 - DNA, 25 bp, Homo sapien
tgcagctgttgaagatcatcttctt

SEQ ID NO: 3555526 - DNA, 25 bp, Homo sapien
agtctttcacagttgactggctgtc

SEQ ID NO: 3555527 - DNA, 25 bp, Homo sapien
tggctgtcaaatgccccctgggtat

SEQ ID NO: 3555528 - DNA, 25 bp, Homo sapien
gaacagaactagtcatagtgcttag

SEQ ID NO: 3555529 - DNA, 25 bp, Homo sapien
ttagagcaaagatggtagcacagtc

SEQ ID NO: 3555530 - DNA, 25 bp, Homo sapien
caaccaatttgaatggccactttcc

SEQ ID NO: 3555531 - DNA, 25 bp, Homo sapien
tcctgttaacggttcttctgggtca

SEQ ID NO: 3555532 - DNA, 25 bp, Homo sapien
ttctgggtcacccaaccaatttgaa

SEQ ID NO: 3555533 - DNA, 25 bp, Homo sapien
gtcacccaaccaatttgaatggcca

SEQ ID NO: 3555534 - DNA, 25 bp, Homo sapien
aaaatccagaatgaaggacttgccc

SEQ ID NO: 3555535 - DNA, 25 bp, Homo sapien
gaaggacttgccctttcggaaggca

SEQ ID NO: 3555536 - DNA, 25 bp, Homo sapien
acatcaagatctcggatgtggtcct

SEQ ID NO: 3555537 - DNA, 25 bp, Homo sapien
ctgagaatataagtatcgtagcata

SEQ ID NO: 3555538 - DNA, 25 bp, Homo sapien
tagctcaaaggaatgttgatctttc

SEQ ID NO: 3555539 - DNA, 25 bp, Homo sapien
agctcaaaggaatgttgatctttct

SEQ ID NO: 3555540 - DNA, 25 bp, Homo sapien
ctagctcaaaggaatgttgatcttt

SEQ ID NO: 3555541 - DNA, 25 bp, Homo sapien
tctgaacaatgggaagtgactggaa

SEQ ID NO: 3555542 - DNA, 25 bp, Homo sapien
gccactgtgaatgtggatgatagcc

SEQ ID NO: 3555543 - DNA, 25 bp, Homo sapien
tagggttcttattgccccagcagca

SEQ ID NO: 3555544 - DNA, 25 bp, Homo sapien
tatagctaggatatgaccaggtgac

SEQ ID NO: 3555545 - DNA, 25 bp, Homo sapien
gggattagtactccgtaggttatgc

SEQ ID NO: 3555546 - DNA, 25 bp, Homo sapien
gctcttcgatttcgcaagtgaaacg

SEQ ID NO: 3555547 - DNA, 25 bp, Homo sapien
tttggtccgttattctaagactgac

SEQ ID NO: 3555548 - DNA, 25 bp, Homo sapien
taagactgacaaaacgttccattgc

SEQ ID NO: 3555549 - DNA, 25 bp, Homo sapien
gaatacacggtgactccttatttgg

SEQ ID NO: 3555550 - DNA, 25 bp, Homo sapien
catgtcttcgggaaagcaaaagaac

SEQ ID NO: 3555551 - DNA, 25 bp, Homo sapien
gaacaacgtactgtgccaaaagcac

SEQ ID NO: 3555552 - DNA, 25 bp, Homo sapien
cctaatacttgtggtcagtgcctca

SEQ ID NO: 3555553 - DNA, 25 bp, Homo sapien
aggccccgattctccgaccagagag

SEQ ID NO: 3555554 - DNA, 25 bp, Homo sapien
cgattctccgaccagagagggcgct

SEQ ID NO: 3555555 - DNA, 25 bp, Homo sapien
agagggcgctgagtgcccgggcacg

SEQ ID NO: 3555556 - DNA, 25 bp, Homo sapien
atccaggccccgattctccgaccag

SEQ ID NO: 3555557 - DNA, 25 bp, Homo sapien
gaaggtgccgccctcgctggaccag

SEQ ID NO: 3555558 - DNA, 25 bp, Homo sapien
ccaccacaaattcggaaaccgagtg

SEQ ID NO: 3555559 - DNA, 25 bp, Homo sapien
cgatccagggaaaatcggcgcctca

SEQ ID NO: 3555560 - DNA, 25 bp, Homo sapien
tttcagaactacagcagggaaggcg

SEQ ID NO: 3555561 - DNA, 25 bp, Homo sapien
ctgccactcgctgaggggacaacat

SEQ ID NO: 3555562 - DNA, 25 bp, Homo sapien
tgctgccactcgctgaggggacaac

SEQ ID NO: 3555563 - DNA, 25 bp, Homo sapien
gctgccactcgctgaggggacaaca

SEQ ID NO: 3555564 - DNA, 25 bp, Homo sapien
gagcctccgccttcaaagcagaagc

SEQ ID NO: 3555565 - DNA, 25 bp, Homo sapien
ggagcctccgccttcaaagcagaag

SEQ ID NO: 3555566 - DNA, 25 bp, Homo sapien
aaactagccagaaggtggggcacgc

SEQ ID NO: 3555567 - DNA, 25 bp, Homo sapien
ggaaagcgcacgcggcagaatcccg

SEQ ID NO: 3555568 - DNA, 25 bp, Homo sapien
cgcggtctgcgtggcccaacggaca

SEQ ID NO: 3555569 - DNA, 25 bp, Homo sapien
cgcaggacgaggctaggcgaggcgg

SEQ ID NO: 3555570 - DNA, 25 bp, Homo sapien
gggcgctgagtgctaccgtcctttg

SEQ ID NO: 3555571 - DNA, 25 bp, Homo sapien
aattgtagtcccgcgctcactgggt

SEQ ID NO: 3555572 - DNA, 25 bp, Homo sapien
ctgggtcccggccagcggtcctcat

SEQ ID NO: 3555573 - DNA, 25 bp, Homo sapien
tgctaccgtcctttgggaattgtag

SEQ ID NO: 3555574 - DNA, 25 bp, Homo sapien
tgcggccggcgcctaacgtgcagac

SEQ ID NO: 3555575 - DNA, 25 bp, Homo sapien
acagctttggtgtttaactaggcct

SEQ ID NO: 3555576 - DNA, 25 bp, Homo sapien
ggcttggcgtggttctccgacgact

SEQ ID NO: 3555577 - DNA, 25 bp, Homo sapien
ccgaggctttatcctggaaccacca

SEQ ID NO: 3555578 - DNA, 25 bp, Homo sapien
tctcccgccccgtatctcttttcac

SEQ ID NO: 3555579 - DNA, 25 bp, Homo sapien
gcggccactcagtcccattccatct

SEQ ID NO: 3555580 - DNA, 25 bp, Homo sapien
ttctcccaccctcgctcgcgtagcc

SEQ ID NO: 3555581 - DNA, 25 bp, Homo sapien
gtccttcggagccgagccgtccgcg

SEQ ID NO: 3555582 - DNA, 25 bp, Homo sapien
aatgcgaaattaatttctgtgaccc

SEQ ID NO: 3555583 - DNA, 25 bp, Homo sapien
taccactctcattttagtcatcaat

SEQ ID NO: 3555584 - DNA, 25 bp, Homo sapien
atatcttctagcaattttgtgggct

SEQ ID NO: 3555585 - DNA, 25 bp, Homo sapien
taccttcactcctcagtcttcagtg

SEQ ID NO: 3555586 - DNA, 25 bp, Homo sapien
ggtttgttgggatttaaacgcatca

SEQ ID NO: 3555587 - DNA, 25 bp, Homo sapien
aaacgcatcattggcagagatttaa

SEQ ID NO: 3555588 - DNA, 25 bp, Homo sapien
aaatgcatgtagaaatggatccatc

SEQ ID NO: 3555589 - DNA, 25 bp, Homo sapien
gataggaaaacatgattcttttact

SEQ ID NO: 3555590 - DNA, 25 bp, Homo sapien
tgtgcaagcccatctatgtgaggag

SEQ ID NO: 3555591 - DNA, 25 bp, Homo sapien
aggagaagccgtgacagtggctcct

SEQ ID NO: 3555592 - DNA, 25 bp, Homo sapien
gatttttatgggactagagctctga

SEQ ID NO: 3555593 - DNA, 25 bp, Homo sapien
aagtaggcacgggaagaccgctcct

SEQ ID NO: 3555594 - DNA, 25 bp, Homo sapien
tcagtaccctttagtttagaacatc

SEQ ID NO: 3555595 - DNA, 25 bp, Homo sapien
ggaagggcccattgcatctcctaaa

SEQ ID NO: 3555596 - DNA, 25 bp, Homo sapien
gatttatagaggcagtctgtgctct

SEQ ID NO: 3555597 - DNA, 25 bp, Homo sapien
tctccctgtggatagaatagaataa

SEQ ID NO: 3555598 - DNA, 25 bp, Homo sapien
gctcagtaggcagttttcacacaca

SEQ ID NO: 3555599 - DNA, 25 bp, Homo sapien
gctggtctgtgcacactgataaaga

SEQ ID NO: 3555600 - DNA, 25 bp, Homo sapien
taaagaggcaggacgttacccaatg

SEQ ID NO: 3555601 - DNA, 25 bp, Homo sapien
tgggatctggttccccaagtgaaac

SEQ ID NO: 3555602 - DNA, 25 bp, Homo sapien
tggcagatatctcggtgtcttaaca

SEQ ID NO: 3555603 - DNA, 25 bp, Homo sapien
taacaccgtcatggacctggtacat

SEQ ID NO: 3555604 - DNA, 25 bp, Homo sapien
tgctattatagacagcgctgaagtt

SEQ ID NO: 3555605 - DNA, 25 bp, Homo sapien
ggactctttgattaccacctggcca

SEQ ID NO: 3555606 - DNA, 25 bp, Homo sapien
ccagagtgcagttttgcaatcctag

SEQ ID NO: 3555607 - DNA, 25 bp, Homo sapien
ttgctctgttcctaagccagagtgc

SEQ ID NO: 3555608 - DNA, 25 bp, Homo sapien
aagccagagtgcagttttgcaatcc

SEQ ID NO: 3555609 - DNA, 25 bp, Homo sapien
ctaagccagagtgcagttttgcaat

SEQ ID NO: 3555610 - DNA, 25 bp, Homo sapien
tggtttcttacctcatcctggctct

SEQ ID NO: 3555611 - DNA, 25 bp, Homo sapien
gggtttgtctttggcaccacgctga

SEQ ID NO: 3555612 - DNA, 25 bp, Homo sapien
ggatctacaagtccgtcatccaagc

SEQ ID NO: 3555613 - DNA, 25 bp, Homo sapien
catcagcttcaggatctacaagtcc

SEQ ID NO: 3555614 - DNA, 25 bp, Homo sapien
tccttcagagggaatatgcactggc

SEQ ID NO: 3555615 - DNA, 25 bp, Homo sapien
tgatggtcccaaagtacggcagctg

SEQ ID NO: 3555616 - DNA, 25 bp, Homo sapien
cactggacaccggttctgagcatta

SEQ ID NO: 3555617 - DNA, 25 bp, Homo sapien
gaaggaaaggctccgccatttggga

SEQ ID NO: 3555618 - DNA, 25 bp, Homo sapien
actaatgaaactgtgtgtacgtgtc

SEQ ID NO: 3555619 - DNA, 25 bp, Homo sapien
taaaaatacagtagcacctaaggag

SEQ ID NO: 3555620 - DNA, 25 bp, Homo sapien
cagtagcacctaaggagcttgaatc

SEQ ID NO: 3555621 - DNA, 25 bp, Homo sapien
tctgtgcgtgcaacataaaaataca

SEQ ID NO: 3555622 - DNA, 25 bp, Homo sapien
tgctaactttattctttatacacag

SEQ ID NO: 3555623 - DNA, 25 bp, Homo sapien
tattctttatacacagtttgggtaa

SEQ ID NO: 3555624 - DNA, 25 bp, Homo sapien
ctttattctttatacacagtttggg

SEQ ID NO: 3555625 - DNA, 25 bp, Homo sapien
aactttattctttatacacagtttg

SEQ ID NO: 3555626 - DNA, 25 bp, Homo sapien
actgtgcatttgatctctgaaagaa

SEQ ID NO: 3555627 - DNA, 25 bp, Homo sapien
tttagttgtacagcataactgtgca

SEQ ID NO: 3555628 - DNA, 25 bp, Homo sapien
gactaatagttggtactcgtaagga

SEQ ID NO: 3555629 - DNA, 25 bp, Homo sapien
agaggtggtgaccttagaagaatga

SEQ ID NO: 3555630 - DNA, 25 bp, Homo sapien
tactctggatccgaaaaaatgcatg

SEQ ID NO: 3555631 - DNA, 25 bp, Homo sapien
tgcatcaagatcaatggagggctca

SEQ ID NO: 3555632 - DNA, 25 bp, Homo sapien
aacttgcaacgtctaacctgtgagg

SEQ ID NO: 3555633 - DNA, 25 bp, Homo sapien
taatactgtctcaaaaaccgtggag

SEQ ID NO: 3555634 - DNA, 25 bp, Homo sapien
gagaggccgagaatcccaattaggg

SEQ ID NO: 3555635 - DNA, 25 bp, Homo sapien
tagtactagtgatctccagggccct

SEQ ID NO: 3555636 - DNA, 25 bp, Homo sapien
attctcggaaaacgtgggccctgcg

SEQ ID NO: 3555637 - DNA, 25 bp, Homo sapien
catgtcaatccttcggcaggcctga

SEQ ID NO: 3555638 - DNA, 25 bp, Homo sapien
cgaagccctcgtggccgtagcagcg

SEQ ID NO: 3555639 - DNA, 25 bp, Homo sapien
gacacacagcgccagacttgaggtc

SEQ ID NO: 3555640 - DNA, 25 bp, Homo sapien
atagtctggcgctcctcaggcgtga

SEQ ID NO: 3555641 - DNA, 25 bp, Homo sapien
cctcgtaggcctccaggatagtctg

SEQ ID NO: 3555642 - DNA, 25 bp, Homo sapien
tgcaggatgtggcgcttgatggtgc

SEQ ID NO: 3555643 - DNA, 25 bp, Homo sapien
ctgcaggatgtggcgcttgatggtg

SEQ ID NO: 3555644 - DNA, 25 bp, Homo sapien
ggatgtggcgcttgatggtgctcac

SEQ ID NO: 3555645 - DNA, 25 bp, Homo sapien
caggatgtggcgcttgatggtgctc

SEQ ID NO: 3555646 - DNA, 25 bp, Homo sapien
gtcgtagtccatcaggtactcgccc

SEQ ID NO: 3555647 - DNA, 25 bp, Homo sapien
accgcggctggtagttccgccgctg

SEQ ID NO: 3555648 - DNA, 25 bp, Homo sapien
gccggctgccgtcgtagtccatcag

SEQ ID NO: 3555649 - DNA, 25 bp, Homo sapien
gcggctggtagttccgccgctgctc

SEQ ID NO: 3555650 - DNA, 25 bp, Homo sapien
gcggaacgtcgcctaaggagggaca

SEQ ID NO: 3555651 - DNA, 25 bp, Homo sapien
gggccgctccaagggagctccaggg

SEQ ID NO: 3555652 - DNA, 25 bp, Homo sapien
acaaaggaccgcattggcgacggcg

SEQ ID NO: 3555653 - DNA, 25 bp, Homo sapien
ctccaggggacagcggaacgtcgcc

SEQ ID NO: 3555654 - DNA, 25 bp, Homo sapien
cagtgccgggggggatggggccctg

SEQ ID NO: 3555655 - DNA, 25 bp, Homo sapien
ccccctcgtcggaggctgcggcagt

SEQ ID NO: 3555656 - DNA, 25 bp, Homo sapien
ccctcccccctcgtcggaggctgcg

SEQ ID NO: 3555657 - DNA, 25 bp, Homo sapien
tcgtcggaggctgcggcagtgccgg

SEQ ID NO: 3555658 - DNA, 25 bp, Homo sapien
caggtgggcggccttctcgctccac

SEQ ID NO: 3555659 - DNA, 25 bp, Homo sapien
gacaggcccgccgaggcgcgtggag

SEQ ID NO: 3555660 - DNA, 25 bp, Homo sapien
ccgaggcgcgtggagcccgggtggc

SEQ ID NO: 3555661 - DNA, 25 bp, Homo sapien
gccggcggatgtggcgctcgatggt

SEQ ID NO: 3555662 - DNA, 25 bp, Homo sapien
tcccgggcgatgagggcctggacag

SEQ ID NO: 3555663 - DNA, 25 bp, Homo sapien
ccagcgcgcccccgcacaccccgca

SEQ ID NO: 3555664 - DNA, 25 bp, Homo sapien
ggccagcgcgcccccgcacaccccg

SEQ ID NO: 3555665 - DNA, 25 bp, Homo sapien
gccagcgcgcccccgcacaccccgc

SEQ ID NO: 3555666 - DNA, 25 bp, Homo sapien
cgcgccggccgccgtccaactccat

SEQ ID NO: 3555667 - DNA, 25 bp, Homo sapien
ctgggggtggcggcggtgggcgcgg

SEQ ID NO: 3555668 - DNA, 25 bp, Homo sapien
gccctctcgccctcgccctcctcca

SEQ ID NO: 3555669 - DNA, 25 bp, Homo sapien
cccgccctctcgccctcgccctcct

SEQ ID NO: 3555670 - DNA, 25 bp, Homo sapien
tggcggcggtgggcgcggccccgcg

SEQ ID NO: 3555671 - DNA, 25 bp, Homo sapien
ggcccgggcctctcagggacccagc

SEQ ID NO: 3555672 - DNA, 25 bp, Homo sapien
cggctctttccggtcaggtcctggg

SEQ ID NO: 3555673 - DNA, 25 bp, Homo sapien
cagcggaggccgagtcccggctctt

SEQ ID NO: 3555674 - DNA, 25 bp, Homo sapien
aggtcctggggggcgaggtcatcgc

SEQ ID NO: 3555675 - DNA, 25 bp, Homo sapien
cgagtcccggctctttccggtcagg

SEQ ID NO: 3555676 - DNA, 25 bp, Homo sapien
acctccagcacgtgggcacggatgt

SEQ ID NO: 3555677 - DNA, 25 bp, Homo sapien
ccggccacaggccatgcacaccagc

SEQ ID NO: 3555678 - DNA, 25 bp, Homo sapien
agcacgtgggcacggatgtcgtcca

SEQ ID NO: 3555679 - DNA, 25 bp, Homo sapien
gttcccccgcgggtcatagtccatg

SEQ ID NO: 3555680 - DNA, 25 bp, Homo sapien
agttctgcagggactccttcagcct

SEQ ID NO: 3555681 - DNA, 25 bp, Homo sapien
cagttctgcagggactccttcagcc

SEQ ID NO: 3555682 - DNA, 25 bp, Homo sapien
cacgggagcatacccactacagcca

SEQ ID NO: 3555683 - DNA, 25 bp, Homo sapien
gggagcatacccactacagccaggt

SEQ ID NO: 3555684 - DNA, 25 bp, Homo sapien
cactacagccaggtctcccacaagc

SEQ ID NO: 3555685 - DNA, 25 bp, Homo sapien
cccacgggagcatacccactacagc

SEQ ID NO: 3555686 - DNA, 25 bp, Homo sapien
ggcgggcaagctgggacaccggccc

SEQ ID NO: 3555687 - DNA, 25 bp, Homo sapien
ccttgggcgggcaagctgggacacc

SEQ ID NO: 3555688 - DNA, 25 bp, Homo sapien
gcgggcaagctgggacaccggcccc

SEQ ID NO: 3555689 - DNA, 25 bp, Homo sapien
gcccttgggcgggcaagctgggaca

SEQ ID NO: 3555690 - DNA, 25 bp, Homo sapien
tgcttttggcggatgtggcgcttga

SEQ ID NO: 3555691 - DNA, 25 bp, Homo sapien
caaggagtaggggtgcttttggcgg

SEQ ID NO: 3555692 - DNA, 25 bp, Homo sapien
tcccagctgttgctgatgacttcct

SEQ ID NO: 3555693 - DNA, 25 bp, Homo sapien
tctcccggggactccaatgcaagga

SEQ ID NO: 3555694 - DNA, 25 bp, Homo sapien
agggttgaagtccatcaggtactcc

SEQ ID NO: 3555695 - DNA, 25 bp, Homo sapien
acaccatgccgtgccgggcagggtt

SEQ ID NO: 3555696 - DNA, 25 bp, Homo sapien
cgggcctcacagtggtctgaatatt

SEQ ID NO: 3555697 - DNA, 25 bp, Homo sapien
ccgccagtggtcgtggtagtagcgc

SEQ ID NO: 3555698 - DNA, 25 bp, Homo sapien
ggctaggcattgtcagttccccaaa

SEQ ID NO: 3555699 - DNA, 25 bp, Homo sapien
gatccccaagacaaagctgccaaca

SEQ ID NO: 3555700 - DNA, 25 bp, Homo sapien
tagcttcctgagactcccattttgg

SEQ ID NO: 3555701 - DNA, 25 bp, Homo sapien
cacatgggagggatccccaagacaa

SEQ ID NO: 3555702 - DNA, 25 bp, Homo sapien
tgtctgcaacgacactggctagctg

SEQ ID NO: 3555703 - DNA, 25 bp, Homo sapien
cttcggagtcataggcctgggttca

SEQ ID NO: 3555704 - DNA, 25 bp, Homo sapien
tgataggtcatgtccgcactctggg

SEQ ID NO: 3555705 - DNA, 25 bp, Homo sapien
taagtagatccatagaatccactgg

SEQ ID NO: 3555706 - DNA, 25 bp, Homo sapien
cctttgagagcgaacgaggaggact

SEQ ID NO: 3555707 - DNA, 25 bp, Homo sapien
cctgcagccgggaaatgagtcaaca

SEQ ID NO: 3555708 - DNA, 25 bp, Homo sapien
aggactggttggttccgctagagct

SEQ ID NO: 3555709 - DNA, 25 bp, Homo sapien
gtcttaaggcgtgaccctgcagccg

SEQ ID NO: 3555710 - DNA, 25 bp, Homo sapien
gccccgtgccgaggccactgctggc

SEQ ID NO: 3555711 - DNA, 25 bp, Homo sapien
ttcgtcttcctctggctccgcgctg

SEQ ID NO: 3555712 - DNA, 25 bp, Homo sapien
cgggcggcagccgtcggccccgtgc

SEQ ID NO: 3555713 - DNA, 25 bp, Homo sapien
cgctgctccggctccggtggtcccc

SEQ ID NO: 3555714 - DNA, 25 bp, Homo sapien
cccagctccggagaagcggagcgca

SEQ ID NO: 3555715 - DNA, 25 bp, Homo sapien
ggtgcctgacgaggcccttgacgca

SEQ ID NO: 3555716 - DNA, 25 bp, Homo sapien
gcgttaccacggctcggaagcgctg

SEQ ID NO: 3555717 - DNA, 25 bp, Homo sapien
taggaagcgaaaaatgctggccccg

SEQ ID NO: 3555718 - DNA, 25 bp, Homo sapien
gaataattctatgcccgccaatctg

SEQ ID NO: 3555719 - DNA, 25 bp, Homo sapien
tattcctaaagtcggcctgtatccc

SEQ ID NO: 3555720 - DNA, 25 bp, Homo sapien
gtagcatttatgtcctgggtccggt

SEQ ID NO: 3555721 - DNA, 25 bp, Homo sapien
tttattacaccaacgtgcagggcag

SEQ ID NO: 3555722 - DNA, 25 bp, Homo sapien
aggggcccaccaccagacccgactg

SEQ ID NO: 3555723 - DNA, 25 bp, Homo sapien
accaccagacccgactgattttttg

SEQ ID NO: 3555724 - DNA, 25 bp, Homo sapien
ccagacccgactgattttttgtact

SEQ ID NO: 3555725 - DNA, 25 bp, Homo sapien
tacttttaatagagatggggtttca

SEQ ID NO: 3555726 - DNA, 25 bp, Homo sapien
gaatgggactgcatacaacagctag

SEQ ID NO: 3555727 - DNA, 25 bp, Homo sapien
caaaagaggttgagagcagcaatgc

SEQ ID NO: 3555728 - DNA, 25 bp, Homo sapien
tcaccgatttctagtcctcaggagc

SEQ ID NO: 3555729 - DNA, 25 bp, Homo sapien
cctcaggagcttgcaaaccgtaaga

SEQ ID NO: 3555730 - DNA, 25 bp, Homo sapien
tttctagaatgtaagggcctgcagg

SEQ ID NO: 3555731 - DNA, 25 bp, Homo sapien
ttaagtatccgcagccgtgggtcag

SEQ ID NO: 3555732 - DNA, 25 bp, Homo sapien
caggtggcgtctctacatgggtgtc

SEQ ID NO: 3555733 - DNA, 25 bp, Homo sapien
cccagagttggaacacgtcgtatca

SEQ ID NO: 3555734 - DNA, 25 bp, Homo sapien
gctaggatgcccagtaagtttgaga

SEQ ID NO: 3555735 - DNA, 25 bp, Homo sapien
cactcaggcagaacccgttaggcta

SEQ ID NO: 3555736 - DNA, 25 bp, Homo sapien
tccatactggtaaggtggacacctg

SEQ ID NO: 3555737 - DNA, 25 bp, Homo sapien
tcagctggcttgtccctagggaggc

SEQ ID NO: 3555738 - DNA, 25 bp, Homo sapien
ctaagaacagtcaaatcataaatca

SEQ ID NO: 3555739 - DNA, 25 bp, Homo sapien
aacattgtagccagtgatgccacac

SEQ ID NO: 3555740 - DNA, 25 bp, Homo sapien
tgccacactcacctatgatctctgt

SEQ ID NO: 3555741 - DNA, 25 bp, Homo sapien
aatgttaaagatggatcttcaaaca

SEQ ID NO: 3555742 - DNA, 25 bp, Homo sapien
ggcgggaaagcctgcaatcgtcttt

SEQ ID NO: 3555743 - DNA, 25 bp, Homo sapien
tgtaaaagcctccttgctagtgccc

SEQ ID NO: 3555744 - DNA, 25 bp, Homo sapien
ccttctctggcgaggtggtggacaa

SEQ ID NO: 3555745 - DNA, 25 bp, Homo sapien
tctaggatggaaagtctgtcgcccc

SEQ ID NO: 3555746 - DNA, 25 bp, Homo sapien
ccgagataccggcgccatgtccagc

SEQ ID NO: 3555747 - DNA, 25 bp, Homo sapien
ggccggggcccatgcggcgggtgct

SEQ ID NO: 3555748 - DNA, 25 bp, Homo sapien
cccatgcggcgggtgctcctgctgt

SEQ ID NO: 3555749 - DNA, 25 bp, Homo sapien
tccctcccccgagataccggcgcca

SEQ ID NO: 3555750 - DNA, 25 bp, Homo sapien
agagtaagcctttacaaacctgtgg

SEQ ID NO: 3555751 - DNA, 25 bp, Homo sapien
caaaccagataggtggctaaatttc

SEQ ID NO: 3555752 - DNA, 25 bp, Homo sapien
tggagtttaaagctggcccttcctc

SEQ ID NO: 3555753 - DNA, 25 bp, Homo sapien
cagtggaagttcagcaaaatgacaa

SEQ ID NO: 3555754 - DNA, 25 bp, Homo sapien
ggaagccctagggtggttctctgca

SEQ ID NO: 3555755 - DNA, 25 bp, Homo sapien
gatgtgcagcctcatccgtggctag

SEQ ID NO: 3555756 - DNA, 25 bp, Homo sapien
gcaccaagagcagggattcatacca

SEQ ID NO: 3555757 - DNA, 25 bp, Homo sapien
ccgtggctagaaggccaaatccaaa

SEQ ID NO: 3555758 - DNA, 25 bp, Homo sapien
tggtggagaaaactgctgacgccgt

SEQ ID NO: 3555759 - DNA, 25 bp, Homo sapien
gacgccgtaacatggatcaaggaag

SEQ ID NO: 3555760 - DNA, 25 bp, Homo sapien
caaggaagtggcactaagctctact

SEQ ID NO: 3555761 - DNA, 25 bp, Homo sapien
gaatctcatgacttatcctggaaca

SEQ ID NO: 3555762 - DNA, 25 bp, Homo sapien
tttgtccttggtagttagcatgaac

SEQ ID NO: 3555763 - DNA, 25 bp, Homo sapien
tagcatgaactatgtagagcaacag

SEQ ID NO: 3555764 - DNA, 25 bp, Homo sapien
tctactgatgagaggtatcctgggt

SEQ ID NO: 3555765 - DNA, 25 bp, Homo sapien
aacagaatgggtagccgtggcctct

SEQ ID NO: 3555766 - DNA, 25 bp, Homo sapien
tccacagtctgtgtagcagcacatc

SEQ ID NO: 3555767 - DNA, 25 bp, Homo sapien
cacatctaacaatgcccaaaagcgg

SEQ ID NO: 3555768 - DNA, 25 bp, Homo sapien
cctcccagccacttgttaatgggtg

SEQ ID NO: 3555769 - DNA, 25 bp, Homo sapien
cattcctattgccagttagagctgc

SEQ ID NO: 3555770 - DNA, 25 bp, Homo sapien
gaggttagaaagctcaaagcccagg

SEQ ID NO: 3555771 - DNA, 25 bp, Homo sapien
ttgggccattcccttctcttagaaa

SEQ ID NO: 3555772 - DNA, 25 bp, Homo sapien
aaagcccaggtcttctgctgccttg

SEQ ID NO: 3555773 - DNA, 25 bp, Homo sapien
ggttcataccacagaggttagaaag

SEQ ID NO: 3555774 - DNA, 25 bp, Homo sapien
taggatgctgaaaggatgaattaag

SEQ ID NO: 3555775 - DNA, 25 bp, Homo sapien
gctgaaaggatgaattaagtataaa

SEQ ID NO: 3555776 - DNA, 25 bp, Homo sapien
gcccagactcttttcataggatgct

SEQ ID NO: 3555777 - DNA, 25 bp, Homo sapien
tcataggatgctgaaaggatgaatt

SEQ ID NO: 3555778 - DNA, 25 bp, Homo sapien
tctagagaagtgagtgaccactccc

SEQ ID NO: 3555779 - DNA, 25 bp, Homo sapien
taagaggacttacctggatcacagg

SEQ ID NO: 3555780 - DNA, 25 bp, Homo sapien
gaaggcgcataggatagatgaccac

SEQ ID NO: 3555781 - DNA, 25 bp, Homo sapien
cactccccgctaagacggtgtctgg

SEQ ID NO: 3555782 - DNA, 25 bp, Homo sapien
taatcttctctttattgttccattt

SEQ ID NO: 3555783 - DNA, 25 bp, Homo sapien
atcttctctttattgttccattttt

SEQ ID NO: 3555784 - DNA, 25 bp, Homo sapien
gctaatcttctctttattgttccat

SEQ ID NO: 3555785 - DNA, 25 bp, Homo sapien
ttattgttccatttttttgtatatg

SEQ ID NO: 3555786 - DNA, 25 bp, Homo sapien
ggtgatccttccacctcagcctccc

SEQ ID NO: 3555787 - DNA, 25 bp, Homo sapien
aagtagctgggattgcaggcacttg

SEQ ID NO: 3555788 - DNA, 25 bp, Homo sapien
gcctcagcctacctccctgggctca

SEQ ID NO: 3555789 - DNA, 25 bp, Homo sapien
tgcagcctcagcctacctccctggg

SEQ ID NO: 3555790 - DNA, 25 bp, Homo sapien
catctacaatgggacagtaaaggaa

SEQ ID NO: 3555791 - DNA, 25 bp, Homo sapien
gctttgtgcttaagttgcaggctct

SEQ ID NO: 3555792 - DNA, 25 bp, Homo sapien
gaaggaggctcttaccctggctgga

SEQ ID NO: 3555793 - DNA, 25 bp, Homo sapien
tttacaagctctcctacactgaatg

SEQ ID NO: 3555794 - DNA, 25 bp, Homo sapien
agaaatccatgtcggcctccgtgca

SEQ ID NO: 3555795 - DNA, 25 bp, Homo sapien
tgccccccacggagagtaactgtga

SEQ ID NO: 3555796 - DNA, 25 bp, Homo sapien
tgcaccccaacaaggcctctgggct

SEQ ID NO: 3555797 - DNA, 25 bp, Homo sapien
gtgccgcggcccaggcaagtgtgct

SEQ ID NO: 3555798 - DNA, 25 bp, Homo sapien
tgcctccaaaatagccaacgagctg

SEQ ID NO: 3555799 - DNA, 25 bp, Homo sapien
ccaacgagatgatgcgggagatccg

SEQ ID NO: 3555800 - DNA, 25 bp, Homo sapien
cagtggcggcaacgacaaagaaaag

SEQ ID NO: 3555801 - DNA, 25 bp, Homo sapien
cagagcgagctgcatgagaagtaca

SEQ ID NO: 3555802 - DNA, 25 bp, Homo sapien
cacagagtatttcgcctaaaccaag

SEQ ID NO: 3555803 - DNA, 25 bp, Homo sapien
tactgcggttgcacagagtatttcg

SEQ ID NO: 3555804 - DNA, 25 bp, Homo sapien
cccctcggtactgcggttgcacaga

SEQ ID NO: 3555805 - DNA, 25 bp, Homo sapien
ggttgcacagagtatttcgcctaaa

SEQ ID NO: 3555806 - DNA, 25 bp, Homo sapien
gggtgggagtcctacacagaggctg

SEQ ID NO: 3555807 - DNA, 25 bp, Homo sapien
ggcttccccttcattggcattaatc

SEQ ID NO: 3555808 - DNA, 25 bp, Homo sapien
ggacagataggctaagcgactccca

SEQ ID NO: 3555809 - DNA, 25 bp, Homo sapien
gggccactgggcactctgtgatggg

SEQ ID NO: 3555810 - DNA, 25 bp, Homo sapien
gccaggctcagcgattaagccgagc

SEQ ID NO: 3555811 - DNA, 25 bp, Homo sapien
tcctgccctatggaacagcccgggt

SEQ ID NO: 3555812 - DNA, 25 bp, Homo sapien
ccctatggaacagcccgggtgctct

SEQ ID NO: 3555813 - DNA, 25 bp, Homo sapien
ccgagcccttgcgtcctaggaaggg

SEQ ID NO: 3555814 - DNA, 25 bp, Homo sapien
atccatgtctgcataagttcccaac

SEQ ID NO: 3555815 - DNA, 25 bp, Homo sapien
tgcataagttcccaacccccatttc

SEQ ID NO: 3555816 - DNA, 25 bp, Homo sapien
cctcagctccttagcatttcccagc

SEQ ID NO: 3555817 - DNA, 25 bp, Homo sapien
tccaagtttctggaaggtgggcttg

SEQ ID NO: 3555818 - DNA, 25 bp, Homo sapien
aacacatgcagaacccaaagggcgg

SEQ ID NO: 3555819 - DNA, 25 bp, Homo sapien
agccattccagtaccggccaggaag

SEQ ID NO: 3555820 - DNA, 25 bp, Homo sapien
gctgggctgtccgaaactctggtct

SEQ ID NO: 3555821 - DNA, 25 bp, Homo sapien
ggccaggaagcgaaagtgccctcag

SEQ ID NO: 3555822 - DNA, 25 bp, Homo sapien
gctgtcggagcagagtgggagccgt

SEQ ID NO: 3555823 - DNA, 25 bp, Homo sapien
cactgatcggggcacggacgtggag

SEQ ID NO: 3555824 - DNA, 25 bp, Homo sapien
cggacgtggagaccgatgtaatctg

SEQ ID NO: 3555825 - DNA, 25 bp, Homo sapien
gctccagaggggttccaatcagggt

SEQ ID NO: 3555826 - DNA, 25 bp, Homo sapien
tcttcccgccctcagcccagtctaa

SEQ ID NO: 3555827 - DNA, 25 bp, Homo sapien
cctcagcccagtctaaggaccaagg

SEQ ID NO: 3555828 - DNA, 25 bp, Homo sapien
tctaaggaccaaggcggcgcctcac

SEQ ID NO: 3555829 - DNA, 25 bp, Homo sapien
gagtgagaagccaggctcttcccgc

SEQ ID NO: 3555830 - DNA, 25 bp, Homo sapien
agcggcgccggtagctcacaaagaa

SEQ ID NO: 3555831 - DNA, 25 bp, Homo sapien
aaagtctttgccatacctacggatg

SEQ ID NO: 3555832 - DNA, 25 bp, Homo sapien
cctccagattgaagcggcgccggta

SEQ ID NO: 3555833 - DNA, 25 bp, Homo sapien
aagtctttgccatacctacggatgg

SEQ ID NO: 3555834 - DNA, 25 bp, Homo sapien
tcatctgtggtccagcgggagttga

SEQ ID NO: 3555835 - DNA, 25 bp, Homo sapien
gctgctcatctgtggtccagcggga

SEQ ID NO: 3555836 - DNA, 25 bp, Homo sapien
tgctcatctgtggtccagcgggagt

SEQ ID NO: 3555837 - DNA, 25 bp, Homo sapien
atctgtggtccagcgggagttgaac

SEQ ID NO: 3555838 - DNA, 25 bp, Homo sapien
ctccggggggcgtagtggatcaata

SEQ ID NO: 3555839 - DNA, 25 bp, Homo sapien
tagtggatcaataccgccctccagg

SEQ ID NO: 3555840 - DNA, 25 bp, Homo sapien
gcgtagtggatcaataccgccctcc

SEQ ID NO: 3555841 - DNA, 25 bp, Homo sapien
gggcgtagtggatcaataccgccct

SEQ ID NO: 3555842 - DNA, 25 bp, Homo sapien
attacaagcgcctgctaccacacct

SEQ ID NO: 3555843 - DNA, 25 bp, Homo sapien
ttacaagcgcctgctaccacacctg

SEQ ID NO: 3555844 - DNA, 25 bp, Homo sapien
aggatggtcttgaactgtgtacctc

SEQ ID NO: 3555845 - DNA, 25 bp, Homo sapien
ccaggatggtcttgaactgtgtacc

SEQ ID NO: 3555846 - DNA, 25 bp, Homo sapien
ggatggtcttgaactgtgtacctca

SEQ ID NO: 3555847 - DNA, 25 bp, Homo sapien
ggccaggatggtcttgaactgtgta

SEQ ID NO: 3555848 - DNA, 25 bp, Homo sapien
cagggctcaggtacatgcccttggg

SEQ ID NO: 3555849 - DNA, 25 bp, Homo sapien
gcttcctgacactgccgtgaggcct

SEQ ID NO: 3555850 - DNA, 25 bp, Homo sapien
tgaggttggcaaggtccgggcttcc

SEQ ID NO: 3555851 - DNA, 25 bp, Homo sapien
tgagagtcaagacctcggagcgtga

SEQ ID NO: 3555852 - DNA, 25 bp, Homo sapien
tgggcgtgcattcaggggccgagag

SEQ ID NO: 3555853 - DNA, 25 bp, Homo sapien
ggcgtgcattcaggggccgagaggg

SEQ ID NO: 3555854 - DNA, 25 bp, Homo sapien
tgcattcaggggccgagagggtaga

SEQ ID NO: 3555855 - DNA, 25 bp, Homo sapien
cctgggcgtgcattcaggggccgag

SEQ ID NO: 3555856 - DNA, 25 bp, Homo sapien
tcacgcctcctcgaccctcttcgag

SEQ ID NO: 3555857 - DNA, 25 bp, Homo sapien
tcgggctctccctcactcacgcctc

SEQ ID NO: 3555858 - DNA, 25 bp, Homo sapien
ttgggatctgcaggatcgggctctc

SEQ ID NO: 3555859 - DNA, 25 bp, Homo sapien
tctctcttgggatctgcaggatcgg

SEQ ID NO: 3555860 - DNA, 25 bp, Homo sapien
cagccgccgggcctgtctgtccatc

SEQ ID NO: 3555861 - DNA, 25 bp, Homo sapien
ccccagccgccgggcctgtctgtcc

SEQ ID NO: 3555862 - DNA, 25 bp, Homo sapien
ctgtcttctttgtccttgcggcccc

SEQ ID NO: 3555863 - DNA, 25 bp, Homo sapien
ttctttgtccttgcggccccccagc

SEQ ID NO: 3555864 - DNA, 25 bp, Homo sapien
gtagtagtatttcaccaggctggga

SEQ ID NO: 3555865 - DNA, 25 bp, Homo sapien
ttcttccaagagtagtagtatttca

SEQ ID NO: 3555866 - DNA, 25 bp, Homo sapien
tcaccaggctgggaatcaacttgtc

SEQ ID NO: 3555867 - DNA, 25 bp, Homo sapien
gttcggctgcgggtcttcttccaag

SEQ ID NO: 3555868 - DNA, 25 bp, Homo sapien
ctggatccgctggaagcatttgcca

SEQ ID NO: 3555869 - DNA, 25 bp, Homo sapien
gctggatccgctggaagcatttgcc

SEQ ID NO: 3555870 - DNA, 25 bp, Homo sapien
catcgtgcttatgccacagaagcat

SEQ ID NO: 3555871 - DNA, 25 bp, Homo sapien
ttctccacatcgtgcttatgccaca

SEQ ID NO: 3555872 - DNA, 25 bp, Homo sapien
caagtccctgggggccaaggctcac

SEQ ID NO: 3555873 - DNA, 25 bp, Homo sapien
ccaagtccctgggggccaaggctca

SEQ ID NO: 3555874 - DNA, 25 bp, Homo sapien
ttctccttggccatcgcaatgtact

SEQ ID NO: 3555875 - DNA, 25 bp, Homo sapien
ctccttggccatcgcaatgtacttg

SEQ ID NO: 3555876 - DNA, 25 bp, Homo sapien
ccttggccatcgcaatgtacttgtc

SEQ ID NO: 3555877 - DNA, 25 bp, Homo sapien
ttggccatcgcaatgtacttgtcaa

SEQ ID NO: 3555878 - DNA, 25 bp, Homo sapien
cttggtgaagggggttatagctcct

SEQ ID NO: 3555879 - DNA, 25 bp, Homo sapien
agcaggggcagggtcttggtgaagg

SEQ ID NO: 3555880 - DNA, 25 bp, Homo sapien
gcaggggcagggtcttggtgaaggg

SEQ ID NO: 3555881 - DNA, 25 bp, Homo sapien
tggtgaagggggttatagctcctaa

SEQ ID NO: 3555882 - DNA, 25 bp, Homo sapien
acagtggttgggtgaccacaccagc

SEQ ID NO: 3555883 - DNA, 25 bp, Homo sapien
cagtggttgggtgaccacaccagca

SEQ ID NO: 3555884 - DNA, 25 bp, Homo sapien
cacagtggttgggtgaccacaccag

SEQ ID NO: 3555885 - DNA, 25 bp, Homo sapien
ggtaattggttccaacgcggatcat

SEQ ID NO: 3555886 - DNA, 25 bp, Homo sapien
caggcttgcactccggaattacggc

SEQ ID NO: 3555887 - DNA, 25 bp, Homo sapien
taattggttccaacgcggatcatgc

SEQ ID NO: 3555888 - DNA, 25 bp, Homo sapien
gcactccggaattacggcctggtaa

SEQ ID NO: 3555889 - DNA, 25 bp, Homo sapien
tgggcaccgtcttggcccggctacg

SEQ ID NO: 3555890 - DNA, 25 bp, Homo sapien
ccggctacgggacaggatcccagag

SEQ ID NO: 3555891 - DNA, 25 bp, Homo sapien
agagcccgcgctcggcttctccatc

SEQ ID NO: 3555892 - DNA, 25 bp, Homo sapien
ctgtccgccgttgggcaccgtcttg

SEQ ID NO: 3555893 - DNA, 25 bp, Homo sapien
ccttcggagagcgacagtggttgcc

SEQ ID NO: 3555894 - DNA, 25 bp, Homo sapien
gcgcaggagccttcggagagcgaca

SEQ ID NO: 3555895 - DNA, 25 bp, Homo sapien
gagagcgacagtggttgccgcactc

SEQ ID NO: 3555896 - DNA, 25 bp, Homo sapien
gtggttgccgcactcgctccgagtg

SEQ ID NO: 3555897 - DNA, 25 bp, Homo sapien
gacgcaagggatgagcgcaaggtcc

SEQ ID NO: 3555898 - DNA, 25 bp, Homo sapien
gagaggtcgccactgaggttaggag

SEQ ID NO: 3555899 - DNA, 25 bp, Homo sapien
ccagggcgtcagaaaagtttgtgca

SEQ ID NO: 3555900 - DNA, 25 bp, Homo sapien
gattactatgtacgcccctcagggt

SEQ ID NO: 3555901 - DNA, 25 bp, Homo sapien
acggcggcgggacggcgcgcacggc

SEQ ID NO: 3555902 - DNA, 25 bp, Homo sapien
ggcagccggccggggcaccggcggc

SEQ ID NO: 3555903 - DNA, 25 bp, Homo sapien
cgacggcggcgggacggcgcgcacg

SEQ ID NO: 3555904 - DNA, 25 bp, Homo sapien
ggcgacggcggcgggacggcgcgca

SEQ ID NO: 3555905 - DNA, 25 bp, Homo sapien
acctccgagcttggcgcgagccgga

SEQ ID NO: 3555906 - DNA, 25 bp, Homo sapien
gcgagccggagggctcccgggaatg

SEQ ID NO: 3555907 - DNA, 25 bp, Homo sapien
agctacctccgagcttggcgcgagc

SEQ ID NO: 3555908 - DNA, 25 bp, Homo sapien
cgagctacctccgagcttggcgcga

SEQ ID NO: 3555909 - DNA, 25 bp, Homo sapien
cgtgaaagtcccaccactcacaatg

SEQ ID NO: 3555910 - DNA, 25 bp, Homo sapien
ctcacaatggactcatcactaagtg

SEQ ID NO: 3555911 - DNA, 25 bp, Homo sapien
gcatctggcctgtcttgtcaaaaat

SEQ ID NO: 3555912 - DNA, 25 bp, Homo sapien
gaaaagtgcacaaaccgtgaaagtc

SEQ ID NO: 3555913 - DNA, 25 bp, Homo sapien
ctacggctgaccgttttttgtggtg

SEQ ID NO: 3555914 - DNA, 25 bp, Homo sapien
aagatccattcgttgccgccggagg

SEQ ID NO: 3555915 - DNA, 25 bp, Homo sapien
atcatgtccgtcctgacgccgctgc

SEQ ID NO: 3555916 - DNA, 25 bp, Homo sapien
ggtgtactccgtgccatcatgtccg

SEQ ID NO: 3555917 - DNA, 25 bp, Homo sapien
tgggaactgcaaggacttagagagc

SEQ ID NO: 3555918 - DNA, 25 bp, Homo sapien
tactgactccgaggtgccttctttc

SEQ ID NO: 3555919 - DNA, 25 bp, Homo sapien
gagagcctaggggaatactgactcc

SEQ ID NO: 3555920 - DNA, 25 bp, Homo sapien
tttaacgtgaggatgcggggcctcc

SEQ ID NO: 3555921 - DNA, 25 bp, Homo sapien
gaaggggtccgttctgtccctcaca

SEQ ID NO: 3555922 - DNA, 25 bp, Homo sapien
ggcctcccctggatcatgtcattca

SEQ ID NO: 3555923 - DNA, 25 bp, Homo sapien
catgttactgcatttgtggccggcc

SEQ ID NO: 3555924 - DNA, 25 bp, Homo sapien
tcctgtcacacctggagacctacag

SEQ ID NO: 3555925 - DNA, 25 bp, Homo sapien
gatcccgttgctagggctgttgcca

SEQ ID NO: 3555926 - DNA, 25 bp, Homo sapien
tagtgcggcgctgtttaaagatggc

SEQ ID NO: 3555927 - DNA, 25 bp, Homo sapien
gcgactccgaaggtacagatccaag

SEQ ID NO: 3555928 - DNA, 25 bp, Homo sapien
gaaaacggaattggctccaggagga

SEQ ID NO: 3555929 - DNA, 25 bp, Homo sapien
ctctgccaggcgctagacatgtaca

SEQ ID NO: 3555930 - DNA, 25 bp, Homo sapien
ggcgctagacatgtacagaggtttt

SEQ ID NO: 3555931 - DNA, 25 bp, Homo sapien
tggttgtaaatggtcctatttcacc

SEQ ID NO: 3555932 - DNA, 25 bp, Homo sapien
ttctgtggttgtaaatggtcctatt

SEQ ID NO: 3555933 - DNA, 25 bp, Homo sapien
aggctgcaggctttggcgacctctc

SEQ ID NO: 3555934 - DNA, 25 bp, Homo sapien
cacaacgagatctttattaggctcc

SEQ ID NO: 3555935 - DNA, 25 bp, Homo sapien
aggctttggcgacctctcagagctg

SEQ ID NO: 3555936 - DNA, 25 bp, Homo sapien
ccacaacgagatctttattaggctc

SEQ ID NO: 3555937 - DNA, 25 bp, Homo sapien
ccggtcagggtgggctgcgggagcc

SEQ ID NO: 3555938 - DNA, 25 bp, Homo sapien
cagtcccggtcagggtgggctgcgg

SEQ ID NO: 3555939 - DNA, 25 bp, Homo sapien
cccggtcagggtgggctgcgggagc

SEQ ID NO: 3555940 - DNA, 25 bp, Homo sapien
gtcccggtcagggtgggctgcggga

SEQ ID NO: 3555941 - DNA, 25 bp, Homo sapien
ggagccggctccggtagatgtcctc

SEQ ID NO: 3555942 - DNA, 25 bp, Homo sapien
gccggctccggtagatgtcctcgtc

SEQ ID NO: 3555943 - DNA, 25 bp, Homo sapien
ggggagccggctccggtagatgtcc

SEQ ID NO: 3555944 - DNA, 25 bp, Homo sapien
gagccggctccggtagatgtcctcg

SEQ ID NO: 3555945 - DNA, 25 bp, Homo sapien
acacgcagatgatcagccggtccac

SEQ ID NO: 3555946 - DNA, 25 bp, Homo sapien
aggaacacgcagatgatcagccggt

SEQ ID NO: 3555947 - DNA, 25 bp, Homo sapien
aacacgcagatgatcagccggtcca

SEQ ID NO: 3555948 - DNA, 25 bp, Homo sapien
gaacacgcagatgatcagccggtcc

SEQ ID NO: 3555949 - DNA, 25 bp, Homo sapien
tggccctgcgcccttcacggaggct

SEQ ID NO: 3555950 - DNA, 25 bp, Homo sapien
tctcgccaccgccaggcgcccttgc

SEQ ID NO: 3555951 - DNA, 25 bp, Homo sapien
cgcccttcacggaggctcacggctg

SEQ ID NO: 3555952 - DNA, 25 bp, Homo sapien
ctgcgcccttcacggaggctcacgg

SEQ ID NO: 3555953 - DNA, 25 bp, Homo sapien
agcgtggccagcacgatctcggcgg

SEQ ID NO: 3555954 - DNA, 25 bp, Homo sapien
cagccactctcgcagcgtggccagc

SEQ ID NO: 3555955 - DNA, 25 bp, Homo sapien
tcccggcgtctgggtccaccgccca

SEQ ID NO: 3555956 - DNA, 25 bp, Homo sapien
tcctaggctctggccccgcccactc

SEQ ID NO: 3555957 - DNA, 25 bp, Homo sapien
cggcgtctgggtccaccgcccactc

SEQ ID NO: 3555958 - DNA, 25 bp, Homo sapien
agtcctaggctctggccccgcccac

SEQ ID NO: 3555959 - DNA, 25 bp, Homo sapien
caaacacgccggtggagatgcaggg

SEQ ID NO: 3555960 - DNA, 25 bp, Homo sapien
cgccggtggagatgcaggggaacgc

SEQ ID NO: 3555961 - DNA, 25 bp, Homo sapien
acacgccggtggagatgcaggggaa

SEQ ID NO: 3555962 - DNA, 25 bp, Homo sapien
cacgccggtggagatgcaggggaac

SEQ ID NO: 3555963 - DNA, 25 bp, Homo sapien
gggttggaacattgtcactgcgccc

SEQ ID NO: 3555964 - DNA, 25 bp, Homo sapien
tgagagggggttggaacattgtcac

SEQ ID NO: 3555965 - DNA, 25 bp, Homo sapien
ggaacattgtcactgcgccccgcct

SEQ ID NO: 3555966 - DNA, 25 bp, Homo sapien
gagagggggttggaacattgtcact

SEQ ID NO: 3555967 - DNA, 25 bp, Homo sapien
tcaggtagcagctgcggagctcggc

SEQ ID NO: 3555968 - DNA, 25 bp, Homo sapien
ctcggcagcctgactggcgctgggc

SEQ ID NO: 3555969 - DNA, 25 bp, Homo sapien
accgagcggagccggtgctccagca

SEQ ID NO: 3555970 - DNA, 25 bp, Homo sapien
cccgtaggcgatgggccccactgtg

SEQ ID NO: 3555971 - DNA, 25 bp, Homo sapien
gggtctacgcggtcctcagctccct

SEQ ID NO: 3555972 - DNA, 25 bp, Homo sapien
cggcgggggtctacgcggtcctcag

SEQ ID NO: 3555973 - DNA, 25 bp, Homo sapien
cctttccccccaagcgctgagcctc

SEQ ID NO: 3555974 - DNA, 25 bp, Homo sapien
aagcgctgagcctcctccgcgaagg

SEQ ID NO: 3555975 - DNA, 25 bp, Homo sapien
cctgatgtcccagtgacacacgggc

SEQ ID NO: 3555976 - DNA, 25 bp, Homo sapien
tgatgtcccagtgacacacgggcgc

SEQ ID NO: 3555977 - DNA, 25 bp, Homo sapien
cccctgatgtcccagtgacacacgg

SEQ ID NO: 3555978 - DNA, 25 bp, Homo sapien
gtgacacacgggcgccctgtctgcg

SEQ ID NO: 3555979 - DNA, 25 bp, Homo sapien
gagccgatagccgccggtgatcttg

SEQ ID NO: 3555980 - DNA, 25 bp, Homo sapien
gatcttggccttgccagtcttacag

SEQ ID NO: 3555981 - DNA, 25 bp, Homo sapien
gcggcccgatgaatgcagccgtcca

SEQ ID NO: 3555982 - DNA, 25 bp, Homo sapien
agggtccggcactcgtcggtaagca

SEQ ID NO: 3555983 - DNA, 25 bp, Homo sapien
tgcgggtctacgaacagagaaccag

SEQ ID NO: 3555984 - DNA, 25 bp, Homo sapien
cgatgggagatagcgccagagcagg

SEQ ID NO: 3555985 - DNA, 25 bp, Homo sapien
cccagggtcccagcatgtgtgtgag

SEQ ID NO: 3555986 - DNA, 25 bp, Homo sapien
agtcgagcgctgaatacttagaggc

SEQ ID NO: 3555987 - DNA, 25 bp, Homo sapien
cgagaaagccggctccttatctccg

SEQ ID NO: 3555988 - DNA, 25 bp, Homo sapien
cgaggggtaattgaaaaagagcgca

SEQ ID NO: 3555989 - DNA, 25 bp, Homo sapien
cttatctccgagtaaacatttcagt

SEQ ID NO: 3555990 - DNA, 25 bp, Homo sapien
aaaaagagcgcacaaatctccccga

SEQ ID NO: 3555991 - DNA, 25 bp, Homo sapien
accgcctccgagcagggagctgttg

SEQ ID NO: 3555992 - DNA, 25 bp, Homo sapien
gccaccgcctccgagcagggagctg

SEQ ID NO: 3555993 - DNA, 25 bp, Homo sapien
ccgcctccgagcagggagctgttgg

SEQ ID NO: 3555994 - DNA, 25 bp, Homo sapien
caccgcctccgagcagggagctgtt

SEQ ID NO: 3555995 - DNA, 25 bp, Homo sapien
ggactgacggctttgtggctgccac

SEQ ID NO: 3555996 - DNA, 25 bp, Homo sapien
tgtctcagtctgtccgatcggctgc

SEQ ID NO: 3555997 - DNA, 25 bp, Homo sapien
ttcctgcgcacagccctgtctgtct

SEQ ID NO: 3555998 - DNA, 25 bp, Homo sapien
gagaggggtcctcaactctgagccc

SEQ ID NO: 3555999 - DNA, 25 bp, Homo sapien
ttggaaatcgatgccccacttcctg

SEQ ID NO: 3556000 - DNA, 25 bp, Homo sapien
aactgtcccagcatctgaccagctg

SEQ ID NO: 3556001 - DNA, 25 bp, Homo sapien
gtttgttcttggaaatcgatgcccc

SEQ ID NO: 3556002 - DNA, 25 bp, Homo sapien
ttcctgcaggccagcggtgggtatc

SEQ ID NO: 3556003 - DNA, 25 bp, Homo sapien
gtgatccagggagccttggcgggtg

SEQ ID NO: 3556004 - DNA, 25 bp, Homo sapien
tggggggccttaggacggccatgga

SEQ ID NO: 3556005 - DNA, 25 bp, Homo sapien
tggtgatccagggagccttggcggg

SEQ ID NO: 3556006 - DNA, 25 bp, Homo sapien
aggacggccatggacccctcagtct

SEQ ID NO: 3556007 - DNA, 25 bp, Homo sapien
gcatccgcactctaccatttattgg

SEQ ID NO: 3556008 - DNA, 25 bp, Homo sapien
tgctgactccgtgggcgactgttca

SEQ ID NO: 3556009 - DNA, 25 bp, Homo sapien
tcacatatctggctgaagggtcggc

SEQ ID NO: 3556010 - DNA, 25 bp, Homo sapien
taaaatgggattgatagtgccacct

SEQ ID NO: 3556011 - DNA, 25 bp, Homo sapien
caagtgtgtttgaggtcgggtggta

SEQ ID NO: 3556012 - DNA, 25 bp, Homo sapien
gaacctgtgttgttctgccggagac

SEQ ID NO: 3556013 - DNA, 25 bp, Homo sapien
ccggtgtactgccttccaagtgtgt

SEQ ID NO: 3556014 - DNA, 25 bp, Homo sapien
agctgcattctgtcctctgccatgg

SEQ ID NO: 3556015 - DNA, 25 bp, Homo sapien
cctctccttgctttgtggaggttgt

SEQ ID NO: 3556016 - DNA, 25 bp, Homo sapien
ctccttgctttgtggaggttgtttg

SEQ ID NO: 3556017 - DNA, 25 bp, Homo sapien
gctcgaggcccccagagcactgccg

SEQ ID NO: 3556018 - DNA, 25 bp, Homo sapien
tcgaggcccccagagcactgccgct

SEQ ID NO: 3556019 - DNA, 25 bp, Homo sapien
gatgaaggagagtccgcagaaaccc

SEQ ID NO: 3556020 - DNA, 25 bp, Homo sapien
gacaggttgccccagcatctgatgg

SEQ ID NO: 3556021 - DNA, 25 bp, Homo sapien
cctgggtggaccgagagctattagt

SEQ ID NO: 3556022 - DNA, 25 bp, Homo sapien
tctgatgggctgtgagacaaatgtg

SEQ ID NO: 3556023 - DNA, 25 bp, Homo sapien
tctgcttgccggcataagcatcatt

SEQ ID NO: 3556024 - DNA, 25 bp, Homo sapien
gcttgccggcataagcatcatttgc

SEQ ID NO: 3556025 - DNA, 25 bp, Homo sapien
cagcttctgcttgccggcataagca

SEQ ID NO: 3556026 - DNA, 25 bp, Homo sapien
tgctgctgggctctacccagcagct

SEQ ID NO: 3556027 - DNA, 25 bp, Homo sapien
cagcatccatatcagtgggggtgag

SEQ ID NO: 3556028 - DNA, 25 bp, Homo sapien
acagacaggcagttgggcagtgcca

SEQ ID NO: 3556029 - DNA, 25 bp, Homo sapien
gcagctgagataggcggtaggagac

SEQ ID NO: 3556030 - DNA, 25 bp, Homo sapien
ggatggccaagagtctccctttggg

SEQ ID NO: 3556031 - DNA, 25 bp, Homo sapien
acacaccagtgccaggccacatggg

SEQ ID NO: 3556032 - DNA, 25 bp, Homo sapien
agtgccaggccacacaccagtgcca

SEQ ID NO: 3556033 - DNA, 25 bp, Homo sapien
cagtgccaggccacacaccagtgcc

SEQ ID NO: 3556034 - DNA, 25 bp, Homo sapien
ccaggccacatgggcagccagattc

SEQ ID NO: 3556035 - DNA, 25 bp, Homo sapien
accagctctgtgcggcccagacata

SEQ ID NO: 3556036 - DNA, 25 bp, Homo sapien
tgtgcggcccagacatagggtcaag

SEQ ID NO: 3556037 - DNA, 25 bp, Homo sapien
cccatgggaggctggtgcggcccca

SEQ ID NO: 3556038 - DNA, 25 bp, Homo sapien
cacaggaggggatggttgatggccc

SEQ ID NO: 3556039 - DNA, 25 bp, Homo sapien
tccgagccagacagcaatgcgtgct

SEQ ID NO: 3556040 - DNA, 25 bp, Homo sapien
caattccctcagagtacagacgtga

SEQ ID NO: 3556041 - DNA, 25 bp, Homo sapien
gggacaatttcccacacaactcgga

SEQ ID NO: 3556042 - DNA, 25 bp, Homo sapien
tcctcgtgcagtgccagggaaacag

SEQ ID NO: 3556043 - DNA, 25 bp, Homo sapien
ctggcgacccgatggaaggttttca

SEQ ID NO: 3556044 - DNA, 25 bp, Homo sapien
cctgaactggaaggatactacctgt

SEQ ID NO: 3556045 - DNA, 25 bp, Homo sapien
catgctctgttcaaggccatcacaa

SEQ ID NO: 3556046 - DNA, 25 bp, Homo sapien
tacaacatctgtggacacctcatgc

SEQ ID NO: 3556047 - DNA, 25 bp, Homo sapien
ccataccatttcccttgcagatttg

SEQ ID NO: 3556048 - DNA, 25 bp, Homo sapien
gaagaaaagatcttttgccctggag

SEQ ID NO: 3556049 - DNA, 25 bp, Homo sapien
gaaaagatcttttgccctggagata

SEQ ID NO: 3556050 - DNA, 25 bp, Homo sapien
cagatttgcagaaacatggcatctt

SEQ ID NO: 3556051 - DNA, 25 bp, Homo sapien
gtaaagcattctggagtggcacaca

SEQ ID NO: 3556052 - DNA, 25 bp, Homo sapien
tgtcgtaaagcattctggagtggca

SEQ ID NO: 3556053 - DNA, 25 bp, Homo sapien
ttatgtggtgtcgtaaagcattctg

SEQ ID NO: 3556054 - DNA, 25 bp, Homo sapien
acacaacgtcatccccttcccggtg

SEQ ID NO: 3556055 - DNA, 25 bp, Homo sapien
tttcttggaagccgtctcaggggcc

SEQ ID NO: 3556056 - DNA, 25 bp, Homo sapien
gccatgcgaccagatggctgacccg

SEQ ID NO: 3556057 - DNA, 25 bp, Homo sapien
tgagtgacgggcctgaccgtccccg

SEQ ID NO: 3556058 - DNA, 25 bp, Homo sapien
gcccaggtgcagcactatctccttt

SEQ ID NO: 3556059 - DNA, 25 bp, Homo sapien
taatgaaccgaagggaatgccagcc

SEQ ID NO: 3556060 - DNA, 25 bp, Homo sapien
gaagcccatccaagagactctggca

SEQ ID NO: 3556061 - DNA, 25 bp, Homo sapien
cacaaagctggtacacggtgaagcc

SEQ ID NO: 3556062 - DNA, 25 bp, Homo sapien
tgttcaggatagagggaccattccc

SEQ ID NO: 3556063 - DNA, 25 bp, Homo sapien
gacgcagatttatgcagccccgaaa

SEQ ID NO: 3556064 - DNA, 25 bp, Homo sapien
gtttcacgaggcacagacgcagatt

SEQ ID NO: 3556065 - DNA, 25 bp, Homo sapien
acaacaaaatccagaagctccggcg

SEQ ID NO: 3556066 - DNA, 25 bp, Homo sapien
tctcaatggcctgacggaggtcaca

SEQ ID NO: 3556067 - DNA, 25 bp, Homo sapien
gccgttgccaacgacttttattcca

SEQ ID NO: 3556068 - DNA, 25 bp, Homo sapien
ggctcctgggaactgcaatctctgc

SEQ ID NO: 3556069 - DNA, 25 bp, Homo sapien
cacaaagccctggacggctgaaagg

SEQ ID NO: 3556070 - DNA, 25 bp, Homo sapien
taaacaggctgatatatgggctcct

SEQ ID NO: 3556071 - DNA, 25 bp, Homo sapien
cctggccctggtgcaaatggagctg

SEQ ID NO: 3556072 - DNA, 25 bp, Homo sapien
tcatttgcaggaggtaccatgtccc

SEQ ID NO: 3556073 - DNA, 25 bp, Homo sapien
tagtggccctagagaaacacaccag

SEQ ID NO: 3556074 - DNA, 25 bp, Homo sapien
gaagcagtgttaatcacgcccacag

SEQ ID NO: 3556075 - DNA, 25 bp, Homo sapien
tacgtgtaacctgtcacctgtgtgc

SEQ ID NO: 3556076 - DNA, 25 bp, Homo sapien
ctacgtgtaacctgtcacctgtgtg

SEQ ID NO: 3556077 - DNA, 25 bp, Homo sapien
ggcgttgacgatggcgtccacctcc

SEQ ID NO: 3556078 - DNA, 25 bp, Homo sapien
gacgatggcgtccacctccagcttg

SEQ ID NO: 3556079 - DNA, 25 bp, Homo sapien
gttgacgatggcgtccacctccagc

SEQ ID NO: 3556080 - DNA, 25 bp, Homo sapien
cggcgttgacgatggcgtccacctc

SEQ ID NO: 3556081 - DNA, 25 bp, Homo sapien
gccatctccttccatgtcgggatct

SEQ ID NO: 3556082 - DNA, 25 bp, Homo sapien
tctccttccatgtcgggatcttctt

SEQ ID NO: 3556083 - DNA, 25 bp, Homo sapien
caaagtccttgcagaagtaatgttc

SEQ ID NO: 3556084 - DNA, 25 bp, Homo sapien
gctgcttgtcactcaggcccttcag

SEQ ID NO: 3556085 - DNA, 25 bp, Homo sapien
agccctcgagcaggtgcctgggcac

SEQ ID NO: 3556086 - DNA, 25 bp, Homo sapien
gccccatcacaaggtccggttgctt

SEQ ID NO: 3556087 - DNA, 25 bp, Homo sapien
ttgctttcctggcaccaaggagtgg

SEQ ID NO: 3556088 - DNA, 25 bp, Homo sapien
gggcaccttgtctccgtagctcttt

SEQ ID NO: 3556089 - DNA, 25 bp, Homo sapien
atttcgcctccttccagtcggtgga

SEQ ID NO: 3556090 - DNA, 25 bp, Homo sapien
cctccttccagtcggtggaggtgct

SEQ ID NO: 3556091 - DNA, 25 bp, Homo sapien
tcgcctccttccagtcggtggaggt

SEQ ID NO: 3556092 - DNA, 25 bp, Homo sapien
ccttccagtcggtggaggtgctcag

SEQ ID NO: 3556093 - DNA, 25 bp, Homo sapien
ggcccaagtgcgcaccccggctgtc

SEQ ID NO: 3556094 - DNA, 25 bp, Homo sapien
cgcacgtgctgctgcgggtcctcgt

SEQ ID NO: 3556095 - DNA, 25 bp, Homo sapien
ggcggccgaacacgcccaggaacgc

SEQ ID NO: 3556096 - DNA, 25 bp, Homo sapien
ggtcctcgtggcacccgccaagtgt

SEQ ID NO: 3556097 - DNA, 25 bp, Homo sapien
cgcgggacggctctccgcccacttg

SEQ ID NO: 3556098 - DNA, 25 bp, Homo sapien
cgggacggctctccgcccacttgga

SEQ ID NO: 3556099 - DNA, 25 bp, Homo sapien
ggcgcgggacggctctccgcccact

SEQ ID NO: 3556100 - DNA, 25 bp, Homo sapien
ggcggcgcgggacggctctccgccc

SEQ ID NO: 3556101 - DNA, 25 bp, Homo sapien
tatttacggcgctcgggagtgtctc

SEQ ID NO: 3556102 - DNA, 25 bp, Homo sapien
cggccgcctctaactttctggttgg

SEQ ID NO: 3556103 - DNA, 25 bp, Homo sapien
caggtgcgacgaacgggtaaatccg

SEQ ID NO: 3556104 - DNA, 25 bp, Homo sapien
cagtgccgagcgttttgcagcctgg

SEQ ID NO: 3556105 - DNA, 25 bp, Homo sapien
tgagctaagctagccggttcatctg

SEQ ID NO: 3556106 - DNA, 25 bp, Homo sapien
cactgggtcactcttgtacctgcag

SEQ ID NO: 3556107 - DNA, 25 bp, Homo sapien
gttgcagtgacattcaggaccacag

SEQ ID NO: 3556108 - DNA, 25 bp, Homo sapien
cacagtacagttagggttttcctgc

SEQ ID NO: 3556109 - DNA, 25 bp, Homo sapien
gttatgggctgaatcatgtctgcct

SEQ ID NO: 3556110 - DNA, 25 bp, Homo sapien
tgaatcatgtctgcctgaattccta

SEQ ID NO: 3556111 - DNA, 25 bp, Homo sapien
tctagcctgggcaaagatagctaaa

SEQ ID NO: 3556112 - DNA, 25 bp, Homo sapien
gggcaaagatagctaaactccgtct

SEQ ID NO: 3556113 - DNA, 25 bp, Homo sapien
catttaggagtgttagggcggcttc

SEQ ID NO: 3556114 - DNA, 25 bp, Homo sapien
ccggcctcatttaggagtgttaggg

SEQ ID NO: 3556115 - DNA, 25 bp, Homo sapien
ttaggagtgttagggcggcttcatt

SEQ ID NO: 3556116 - DNA, 25 bp, Homo sapien
cctcatttaggagtgttagggcggc

SEQ ID NO: 3556117 - DNA, 25 bp, Homo sapien
tgtagatgaataagagaggcagcca

SEQ ID NO: 3556118 - DNA, 25 bp, Homo sapien
tgtgttcaggagtagcaatggcctc

SEQ ID NO: 3556119 - DNA, 25 bp, Homo sapien
gacctggctacgcagagataagctg

SEQ ID NO: 3556120 - DNA, 25 bp, Homo sapien
ggctgttccataggcctgcaaggtt

SEQ ID NO: 3556121 - DNA, 25 bp, Homo sapien
caaggctgaccctagaagcaatagc

SEQ ID NO: 3556122 - DNA, 25 bp, Homo sapien
tagcagcattttcactccgcaggtg

SEQ ID NO: 3556123 - DNA, 25 bp, Homo sapien
tttacatcggactcacgagggctga

SEQ ID NO: 3556124 - DNA, 25 bp, Homo sapien
gagtcatgcggctcctttgttccag

SEQ ID NO: 3556125 - DNA, 25 bp, Homo sapien
ccaagtgtgggggtgtgcgcctgta

SEQ ID NO: 3556126 - DNA, 25 bp, Homo sapien
caagtgtgggggtgtgcgcctgtag

SEQ ID NO: 3556127 - DNA, 25 bp, Homo sapien
agccaagtgtgggggtgtgcgcctg

SEQ ID NO: 3556128 - DNA, 25 bp, Homo sapien
attagccaagtgtgggggtgtgcgc

SEQ ID NO: 3556129 - DNA, 25 bp, Homo sapien
tgcttcctgacaaagatctaggaga

SEQ ID NO: 3556130 - DNA, 25 bp, Homo sapien
ggagtttcagagcaagcaaagatga

SEQ ID NO: 3556131 - DNA, 25 bp, Homo sapien
tcaagtcgaagggatttcctctccc

SEQ ID NO: 3556132 - DNA, 25 bp, Homo sapien
tctcccctaaagaagcgctctgctt

SEQ ID NO: 3556133 - DNA, 25 bp, Homo sapien
caacctcctgggcttcagtgatctt

SEQ ID NO: 3556134 - DNA, 25 bp, Homo sapien
tacaggcacgtgccaccacgtccag

SEQ ID NO: 3556135 - DNA, 25 bp, Homo sapien
aggcacgtgccaccacgtccagcta

SEQ ID NO: 3556136 - DNA, 25 bp, Homo sapien
ccacctcagcctgagtagctaggat

SEQ ID NO: 3556137 - DNA, 25 bp, Homo sapien
gccatgcgccttatcctggaacaga

SEQ ID NO: 3556138 - DNA, 25 bp, Homo sapien
agccatgcgccttatcctggaacag

SEQ ID NO: 3556139 - DNA, 25 bp, Homo sapien
catgcgccttatcctggaacagatg

SEQ ID NO: 3556140 - DNA, 25 bp, Homo sapien
ccagccatgcgccttatcctggaac

SEQ ID NO: 3556141 - DNA, 25 bp, Homo sapien
ctcggctgctctcccatagttggtt

SEQ ID NO: 3556142 - DNA, 25 bp, Homo sapien
tgtgggtctgattgcaattcggtga

SEQ ID NO: 3556143 - DNA, 25 bp, Homo sapien
tgtaatagcacagaagatccagaag

SEQ ID NO: 3556144 - DNA, 25 bp, Homo sapien
gaagacacagagactcgtacctgcg

SEQ ID NO: 3556145 - DNA, 25 bp, Homo sapien
tcaggaaagctacgtactcactggg

SEQ ID NO: 3556146 - DNA, 25 bp, Homo sapien
aagttcaaggccaagcaggtaccag

SEQ ID NO: 3556147 - DNA, 25 bp, Homo sapien
gaatgagcatagtgtttacccagag

SEQ ID NO: 3556148 - DNA, 25 bp, Homo sapien
tgggtctccacagagccttcctcag

SEQ ID NO: 3556149 - DNA, 25 bp, Homo sapien
aggatgatgaaacatggtttcaaac

SEQ ID NO: 3556150 - DNA, 25 bp, Homo sapien
ggatgatgaaacatggtttcaaacg

SEQ ID NO: 3556151 - DNA, 25 bp, Homo sapien
gatgatgaaacatggtttcaaacga

SEQ ID NO: 3556152 - DNA, 25 bp, Homo sapien
tgatgaaacatggtttcaaacgagt

SEQ ID NO: 3556153 - DNA, 25 bp, Homo sapien
gctactctgacactctgtctcttca

SEQ ID NO: 3556154 - DNA, 25 bp, Homo sapien
ttattgttggatcctcctcctttct

SEQ ID NO: 3556155 - DNA, 25 bp, Homo sapien
tcctcctttctctggagctgtgctt

SEQ ID NO: 3556156 - DNA, 25 bp, Homo sapien
tcttcatcaccagccaaggaaaggg

SEQ ID NO: 3556157 - DNA, 25 bp, Homo sapien
gaaagggacacctaagtcagtctag

SEQ ID NO: 3556158 - DNA, 25 bp, Homo sapien
taagtcagtctagggttggaagcta

SEQ ID NO: 3556159 - DNA, 25 bp, Homo sapien
gttagagaaagggacacctaagtca

SEQ ID NO: 3556160 - DNA, 25 bp, Homo sapien
gacacctaagtcagtctagggttgg

SEQ ID NO: 3556161 - DNA, 25 bp, Homo sapien
gggtagggcgtagctgcagggcctc

SEQ ID NO: 3556162 - DNA, 25 bp, Homo sapien
ggcgtagctgcagggcctccttgaa

SEQ ID NO: 3556163 - DNA, 25 bp, Homo sapien
gggcgtagctgcagggcctccttga

SEQ ID NO: 3556164 - DNA, 25 bp, Homo sapien
gtagctgcagggcctccttgaagta

SEQ ID NO: 3556165 - DNA, 25 bp, Homo sapien
gggaaggaggaagccatcagtattc

SEQ ID NO: 3556166 - DNA, 25 bp, Homo sapien
ttgggaaggaggaagccatcagtat

SEQ ID NO: 3556167 - DNA, 25 bp, Homo sapien
ggaaggaggaagccatcagtattcc

SEQ ID NO: 3556168 - DNA, 25 bp, Homo sapien
cttgggaaggaggaagccatcagta

SEQ ID NO: 3556169 - DNA, 25 bp, Homo sapien
gcagagcggaagaagggtattccat

SEQ ID NO: 3556170 - DNA, 25 bp, Homo sapien
ctggagtcagaatcaccccattggc

SEQ ID NO: 3556171 - DNA, 25 bp, Homo sapien
tcagaatcaccccattggcagagcg

SEQ ID NO: 3556172 - DNA, 25 bp, Homo sapien
tcaccccattggcagagcggaagaa

SEQ ID NO: 3556173 - DNA, 25 bp, Homo sapien
atgccctccccgaaggcaagggcag

SEQ ID NO: 3556174 - DNA, 25 bp, Homo sapien
agccagagatgtgactcatgccctc

SEQ ID NO: 3556175 - DNA, 25 bp, Homo sapien
agatgtgactcatgccctccccgaa

SEQ ID NO: 3556176 - DNA, 25 bp, Homo sapien
agagatgtgactcatgccctccccg

SEQ ID NO: 3556177 - DNA, 25 bp, Homo sapien
gctatttcacaatgggaccgcatgc

SEQ ID NO: 3556178 - DNA, 25 bp, Homo sapien
gatgaacacagctatttcacaatgg

SEQ ID NO: 3556179 - DNA, 25 bp, Homo sapien
cagagccaggggtccatcgatgaac

SEQ ID NO: 3556180 - DNA, 25 bp, Homo sapien
gggtccatcgatgaacacagctatt

SEQ ID NO: 3556181 - DNA, 25 bp, Homo sapien
gagtgcagtcagcaacctaggcaga

SEQ ID NO: 3556182 - DNA, 25 bp, Homo sapien
cccagacaagtgttgtaacctttga

SEQ ID NO: 3556183 - DNA, 25 bp, Homo sapien
gcagtcagcaacctaggcagactgg

SEQ ID NO: 3556184 - DNA, 25 bp, Homo sapien
ggtgctgctccatgccggacatggg

SEQ ID NO: 3556185 - DNA, 25 bp, Homo sapien
gacagagtgggtgggagtagctagg

SEQ ID NO: 3556186 - DNA, 25 bp, Homo sapien
gagtgggtgggagtagctaggtgga

SEQ ID NO: 3556187 - DNA, 25 bp, Homo sapien
ggaggacagagtgggtgggagtagc

SEQ ID NO: 3556188 - DNA, 25 bp, Homo sapien
tgggtgggagtagctaggtggaggg

SEQ ID NO: 3556189 - DNA, 25 bp, Homo sapien
gatgataccggggtctccaggcagt

SEQ ID NO: 3556190 - DNA, 25 bp, Homo sapien
cctttgagtaggatggatggccagt

SEQ ID NO: 3556191 - DNA, 25 bp, Homo sapien
gaatgtgcgtccttccctggcagga

SEQ ID NO: 3556192 - DNA, 25 bp, Homo sapien
ggcaggacaggcctttgagtaggat

SEQ ID NO: 3556193 - DNA, 25 bp, Homo sapien
tgcggtgtctccaggggcatcagct

SEQ ID NO: 3556194 - DNA, 25 bp, Homo sapien
atggactagcatcgggggcagggcc

SEQ ID NO: 3556195 - DNA, 25 bp, Homo sapien
gggcagggcctgcggtgtctccagg

SEQ ID NO: 3556196 - DNA, 25 bp, Homo sapien
gcctgcggtgtctccaggggcatca

SEQ ID NO: 3556197 - DNA, 25 bp, Homo sapien
gcccggatgagaaggccagtgctgg

SEQ ID NO: 3556198 - DNA, 25 bp, Homo sapien
ttcagcagagaagccgcggaactgg

SEQ ID NO: 3556199 - DNA, 25 bp, Homo sapien
ttggtgtccaccacgcgctgcacat

SEQ ID NO: 3556200 - DNA, 25 bp, Homo sapien
ggcgaaccgctgcttcctattggtg

SEQ ID NO: 3556201 - DNA, 25 bp, Homo sapien
gcttggagatcgcttgggcatcctc

SEQ ID NO: 3556202 - DNA, 25 bp, Homo sapien
gagccacaggcaaccgaaacaaagt

SEQ ID NO: 3556203 - DNA, 25 bp, Homo sapien
tctgtgggacctttagaaagtctcc

SEQ ID NO: 3556204 - DNA, 25 bp, Homo sapien
aggctcacgtttctctctgggctca

SEQ ID NO: 3556205 - DNA, 25 bp, Homo sapien
tggcgcagggcataggacagagcct

SEQ ID NO: 3556206 - DNA, 25 bp, Homo sapien
gccccatggcgcagggcataggaca

SEQ ID NO: 3556207 - DNA, 25 bp, Homo sapien
cagcttcaaggccccatggcgcagg

SEQ ID NO: 3556208 - DNA, 25 bp, Homo sapien
ttcaaggccccatggcgcagggcat

SEQ ID NO: 3556209 - DNA, 25 bp, Homo sapien
cagtggtctccaggaatagtaggac

SEQ ID NO: 3556210 - DNA, 25 bp, Homo sapien
gcccagagagaaaggagtgccagtg

SEQ ID NO: 3556211 - DNA, 25 bp, Homo sapien
ctgaaccctcaatgacccactgcag

SEQ ID NO: 3556212 - DNA, 25 bp, Homo sapien
cggtggcccctagtctccatggtga

SEQ ID NO: 3556213 - DNA, 25 bp, Homo sapien
ttctacccctggaccctgctgcttc

SEQ ID NO: 3556214 - DNA, 25 bp, Homo sapien
ccttctacccctggaccctgctgct

SEQ ID NO: 3556215 - DNA, 25 bp, Homo sapien
gcccttctacccctggaccctgctg

SEQ ID NO: 3556216 - DNA, 25 bp, Homo sapien
gagcccttctacccctggaccctgc

SEQ ID NO: 3556217 - DNA, 25 bp, Homo sapien
tgagcgctgggtgggagtatacggc

SEQ ID NO: 3556218 - DNA, 25 bp, Homo sapien
tgctgcagagagggaaactaaggcc

SEQ ID NO: 3556219 - DNA, 25 bp, Homo sapien
tatacggctcattaagttcaccacc

SEQ ID NO: 3556220 - DNA, 25 bp, Homo sapien
ctgggtgggagtatacggctcatta

SEQ ID NO: 3556221 - DNA, 25 bp, Homo sapien
agccccgcaccccagatcgctggtg

SEQ ID NO: 3556222 - DNA, 25 bp, Homo sapien
ggaggcagggccgacgtgccgacgg

SEQ ID NO: 3556223 - DNA, 25 bp, Homo sapien
cgtgccgacggaccgggcggaagcg

SEQ ID NO: 3556224 - DNA, 25 bp, Homo sapien
ccccgcagggtggtccgggaggcag

SEQ ID NO: 3556225 - DNA, 25 bp, Homo sapien
ctccaggatcctcgaccgcggcgga

SEQ ID NO: 3556226 - DNA, 25 bp, Homo sapien
tcgaccgcggcggacccgccaatga

SEQ ID NO: 3556227 - DNA, 25 bp, Homo sapien
caggatcctcgaccgcggcggaccc

SEQ ID NO: 3556228 - DNA, 25 bp, Homo sapien
ctcgaccgcggcggacccgccaatg

SEQ ID NO: 3556229 - DNA, 25 bp, Homo sapien
caggagcagatacaggccgagctga

SEQ ID NO: 3556230 - DNA, 25 bp, Homo sapien
aggccgagctgagccccgcccatga

SEQ ID NO: 3556231 - DNA, 25 bp, Homo sapien
cccaggagcagatacaggccgagct

SEQ ID NO: 3556232 - DNA, 25 bp, Homo sapien
gccccaggagcagatacaggccgag

SEQ ID NO: 3556233 - DNA, 25 bp, Homo sapien
caccaggccggattcttcttctttt

SEQ ID NO: 3556234 - DNA, 25 bp, Homo sapien
gcaccaggccggattcttcttcttt

SEQ ID NO: 3556235 - DNA, 25 bp, Homo sapien
gagccagtgccgagttctatgtcca

SEQ ID NO: 3556236 - DNA, 25 bp, Homo sapien
taacaggcggtttttcattgagacg

SEQ ID NO: 3556237 - DNA, 25 bp, Homo sapien
gaaaacgtcacaaagccgcagagag

SEQ ID NO: 3556238 - DNA, 25 bp, Homo sapien
gaggcccacgagtctacaggaatct

SEQ ID NO: 3556239 - DNA, 25 bp, Homo sapien
gtccatgacaagtctgcccaccaaa

SEQ ID NO: 3556240 - DNA, 25 bp, Homo sapien
agtctccacgaaccacagtccatga

SEQ ID NO: 3556241 - DNA, 25 bp, Homo sapien
tatgatgaccagctccgctcaggta

SEQ ID NO: 3556242 - DNA, 25 bp, Homo sapien
gaggcataccgtgtgctcagccgtg

SEQ ID NO: 3556243 - DNA, 25 bp, Homo sapien
tactggtcccagtttcacagcgtga

SEQ ID NO: 3556244 - DNA, 25 bp, Homo sapien
ccaacgcacagtactggtcccagtt

SEQ ID NO: 3556245 - DNA, 25 bp, Homo sapien
gtcccagtttcacagcgtgaggcca

SEQ ID NO: 3556246 - DNA, 25 bp, Homo sapien
agtttcacagcgtgaggccacaggg

SEQ ID NO: 3556247 - DNA, 25 bp, Homo sapien
agccttctacaacgaagcccgggca

SEQ ID NO: 3556248 - DNA, 25 bp, Homo sapien
tccagggccaacagaggcatccttc

SEQ ID NO: 3556249 - DNA, 25 bp, Homo sapien
catccttcagcaggagcgacaacgg

SEQ ID NO: 3556250 - DNA, 25 bp, Homo sapien
caggaaccacacttcgggatcccta

SEQ ID NO: 3556251 - DNA, 25 bp, Homo sapien
ctggactttgcgtaaagggacaggc

SEQ ID NO: 3556252 - DNA, 25 bp, Homo sapien
gggacaggcgggaactgaagagcgg

SEQ ID NO: 3556253 - DNA, 25 bp, Homo sapien
gcgggaactgaagagcggaggtggg

SEQ ID NO: 3556254 - DNA, 25 bp, Homo sapien
ctgcagtgcagccagatagggtctg

SEQ ID NO: 3556255 - DNA, 25 bp, Homo sapien
cgacgaactgagctgtaaccagact

SEQ ID NO: 3556256 - DNA, 25 bp, Homo sapien
caaccctggtgttcgaggtggagct

SEQ ID NO: 3556257 - DNA, 25 bp, Homo sapien
aggtggagctgctcaaaatagagcg

SEQ ID NO: 3556258 - DNA, 25 bp, Homo sapien
tcaaaatagagcgacgaactgagct

SEQ ID NO: 3556259 - DNA, 25 bp, Homo sapien
aggcgtatcctagctttattaaagg

SEQ ID NO: 3556260 - DNA, 25 bp, Homo sapien
gcgtatcctagctttattaaagggc

SEQ ID NO: 3556261 - DNA, 25 bp, Homo sapien
gccgcagagtcaatataaaaacaca

SEQ ID NO: 3556262 - DNA, 25 bp, Homo sapien
aggttggggggcagcgattgtcctg

SEQ ID NO: 3556263 - DNA, 25 bp, Homo sapien
ggttggggggcagcgattgtcctgt

SEQ ID NO: 3556264 - DNA, 25 bp, Homo sapien
tgcatgccccggatcttgtccagca

SEQ ID NO: 3556265 - DNA, 25 bp, Homo sapien
atcttgtccagcaggccagaaatga

SEQ ID NO: 3556266 - DNA, 25 bp, Homo sapien
tgctcagcttctgcatgccccggat

SEQ ID NO: 3556267 - DNA, 25 bp, Homo sapien
tgtccagcaggccagaaatgaaggc

SEQ ID NO: 3556268 - DNA, 25 bp, Homo sapien
acattaaggagaccagaccccaaga

SEQ ID NO: 3556269 - DNA, 25 bp, Homo sapien
gagggtaaacattaaggagaccaga

SEQ ID NO: 3556270 - DNA, 25 bp, Homo sapien
aagatgacaggagccgggctcccct

SEQ ID NO: 3556271 - DNA, 25 bp, Homo sapien
gagaccagaccccaagatgacagga

SEQ ID NO: 3556272 - DNA, 25 bp, Homo sapien
ctctgtgggtttgtaacagtcaacc

SEQ ID NO: 3556273 - DNA, 25 bp, Homo sapien
ggtttgtaacagtcaaccagcagct

SEQ ID NO: 3556274 - DNA, 25 bp, Homo sapien
tgtgggtttgtaacagtcaaccagc

SEQ ID NO: 3556275 - DNA, 25 bp, Homo sapien
gggtttgtaacagtcaaccagcagc

SEQ ID NO: 3556276 - DNA, 25 bp, Homo sapien
tccatgtccaggagctcatccacgt

SEQ ID NO: 3556277 - DNA, 25 bp, Homo sapien
ccgggcatcgtcactctccatgtcc

SEQ ID NO: 3556278 - DNA, 25 bp, Homo sapien
ttgaccctggcagcccgggcatcgt

SEQ ID NO: 3556279 - DNA, 25 bp, Homo sapien
tccacgtcaatctccagttctggga

SEQ ID NO: 3556280 - DNA, 25 bp, Homo sapien
tacctcggaggaacccagccctctg

SEQ ID NO: 3556281 - DNA, 25 bp, Homo sapien
atctcaccagagcaccggtgggtgc

SEQ ID NO: 3556282 - DNA, 25 bp, Homo sapien
ggaaaacagatcaggcccgtgccaa

SEQ ID NO: 3556283 - DNA, 25 bp, Homo sapien
agcaccggtgggtgcagctgtccca

SEQ ID NO: 3556284 - DNA, 25 bp, Homo sapien
agaaagcgggctagcctgcacgcac

SEQ ID NO: 3556285 - DNA, 25 bp, Homo sapien
gcctgagtcaccgtctgaacaacca

SEQ ID NO: 3556286 - DNA, 25 bp, Homo sapien
agctccaggctagcccacagaacag

SEQ ID NO: 3556287 - DNA, 25 bp, Homo sapien
ctgcacgcacgccaagatggagctc

SEQ ID NO: 3556288 - DNA, 25 bp, Homo sapien
aaggcagaagtgacttaggtcaggc

SEQ ID NO: 3556289 - DNA, 25 bp, Homo sapien
ccaaggctcaggctaccccttgagg

SEQ ID NO: 3556290 - DNA, 25 bp, Homo sapien
ccccttgaggcgtctggaggacact

SEQ ID NO: 3556291 - DNA, 25 bp, Homo sapien
aggcggtgagacctcctgccgctgc

SEQ ID NO: 3556292 - DNA, 25 bp, Homo sapien
tcctctaggttgaggcgcttccgta

SEQ ID NO: 3556293 - DNA, 25 bp, Homo sapien
tagctccttgcggtcatacttgacg

SEQ ID NO: 3556294 - DNA, 25 bp, Homo sapien
ctcactgggccctcatcgtccgccc

SEQ ID NO: 3556295 - DNA, 25 bp, Homo sapien
taggttgaggcgcttccgtagctcc

SEQ ID NO: 3556296 - DNA, 25 bp, Homo sapien
gcgccccccgcggtgccgctgtccg

SEQ ID NO: 3556297 - DNA, 25 bp, Homo sapien
gccgcgccccccgcggtgccgctgt

SEQ ID NO: 3556298 - DNA, 25 bp, Homo sapien
ctgaaagtagacgcgtggtcctggg

SEQ ID NO: 3556299 - DNA, 25 bp, Homo sapien
agacgcgtggtcctgggccgccact

SEQ ID NO: 3556300 - DNA, 25 bp, Homo sapien
gggtggcctagctgtccgtactccc

SEQ ID NO: 3556301 - DNA, 25 bp, Homo sapien
tcaggacgacgatttgcgctcacgc

SEQ ID NO: 3556302 - DNA, 25 bp, Homo sapien
cgccaggaccctagtcttcattgga

SEQ ID NO: 3556303 - DNA, 25 bp, Homo sapien
caaacccaggcgttctaagcgctca

SEQ ID NO: 3556304 - DNA, 25 bp, Homo sapien
gggtccctagactctccgagtagca

SEQ ID NO: 3556305 - DNA, 25 bp, Homo sapien
tccctagactctccgagtagcaggt

SEQ ID NO: 3556306 - DNA, 25 bp, Homo sapien
tagactctccgagtagcaggtccca

SEQ ID NO: 3556307 - DNA, 25 bp, Homo sapien
tgtccgggtccctagactctccgag

SEQ ID NO: 3556308 - DNA, 25 bp, Homo sapien
cacactcgtagtaggccgctgcatt

SEQ ID NO: 3556309 - DNA, 25 bp, Homo sapien
gtagtaggccgctgcattggttgaa

SEQ ID NO: 3556310 - DNA, 25 bp, Homo sapien
tagaactatgtcacactcgtagtag

SEQ ID NO: 3556311 - DNA, 25 bp, Homo sapien
ccagcacctagaactatgtcacact

SEQ ID NO: 3556312 - DNA, 25 bp, Homo sapien
cctgccctcagtcttaggttagggc

SEQ ID NO: 3556313 - DNA, 25 bp, Homo sapien
gggcaagtacctcagctaactccct

SEQ ID NO: 3556314 - DNA, 25 bp, Homo sapien
gctccgggaagtaggagtcacattt

SEQ ID NO: 3556315 - DNA, 25 bp, Homo sapien
tctataaaatggactttgggcattt

SEQ ID NO: 3556316 - DNA, 25 bp, Homo sapien
gttaaacctggctcgcgacttagcg

SEQ ID NO: 3556317 - DNA, 25 bp, Homo sapien
cacgcaccggaagggaatctgggtc

SEQ ID NO: 3556318 - DNA, 25 bp, Homo sapien
gatcctctttttgcataggcctgag

SEQ ID NO: 3556319 - DNA, 25 bp, Homo sapien
taacatttggtagtgagcacggccc

SEQ ID NO: 3556320 - DNA, 25 bp, Homo sapien
cagggcagtgggaacgggtggagtt

SEQ ID NO: 3556321 - DNA, 25 bp, Homo sapien
ttcccctgcccaagttccgatccca

SEQ ID NO: 3556322 - DNA, 25 bp, Homo sapien
ggagcttcccctgcccaagttccga

SEQ ID NO: 3556323 - DNA, 25 bp, Homo sapien
tgggagggggcggagcttcccctgc

SEQ ID NO: 3556324 - DNA, 25 bp, Homo sapien
ggcggagcttcccctgcccaagttc

SEQ ID NO: 3556325 - DNA, 25 bp, Homo sapien
caggactggaagactcgcgtccagc

SEQ ID NO: 3556326 - DNA, 25 bp, Homo sapien
tccagctggagctttgccgcatctg

SEQ ID NO: 3556327 - DNA, 25 bp, Homo sapien
tctgcgttgctgtgcccgcgctctt

SEQ ID NO: 3556328 - DNA, 25 bp, Homo sapien
cgctcttcgggcgaggaagtccctt

SEQ ID NO: 3556329 - DNA, 25 bp, Homo sapien
ttagattaccatggcagctcgagcc

SEQ ID NO: 3556330 - DNA, 25 bp, Homo sapien
gcacccagaagatgagaccgcaatt

SEQ ID NO: 3556331 - DNA, 25 bp, Homo sapien
gagccttcctctaagtgagatcggg

SEQ ID NO: 3556332 - DNA, 25 bp, Homo sapien
tggttagatcccaggaactccgtgc

SEQ ID NO: 3556333 - DNA, 25 bp, Homo sapien
tcaggtcctggcacgctggggactg

SEQ ID NO: 3556334 - DNA, 25 bp, Homo sapien
tggcacgctggggactggcgctcac

SEQ ID NO: 3556335 - DNA, 25 bp, Homo sapien
cctggcacgctggggactggcgctc

SEQ ID NO: 3556336 - DNA, 25 bp, Homo sapien
gtcctggcacgctggggactggcgc

SEQ ID NO: 3556337 - DNA, 25 bp, Homo sapien
gtcactcatcctccggagctcgcgg

SEQ ID NO: 3556338 - DNA, 25 bp, Homo sapien
ggagtccacaaactcgtcactcatc

SEQ ID NO: 3556339 - DNA, 25 bp, Homo sapien
ggagctgtggcgactccggatctcc

SEQ ID NO: 3556340 - DNA, 25 bp, Homo sapien
gagctcgcggccatagcgctgtgct

SEQ ID NO: 3556341 - DNA, 25 bp, Homo sapien
gtaggggggcgacgttaatctcagc

SEQ ID NO: 3556342 - DNA, 25 bp, Homo sapien
ctctccccttgtctagccagccttc

SEQ ID NO: 3556343 - DNA, 25 bp, Homo sapien
ccagtgatgatcagcggagctctgt

SEQ ID NO: 3556344 - DNA, 25 bp, Homo sapien
tgatgatcagcggagctctgtgtct

SEQ ID NO: 3556345 - DNA, 25 bp, Homo sapien
tttctgtgaagctgtggaggcctga

SEQ ID NO: 3556346 - DNA, 25 bp, Homo sapien
tgccaggatcgccatgacaacaaat

SEQ ID NO: 3556347 - DNA, 25 bp, Homo sapien
gagtgcctgggcattctgagcatca

SEQ ID NO: 3556348 - DNA, 25 bp, Homo sapien
taaatacgcaggaaacggcagctgt

SEQ ID NO: 3556349 - DNA, 25 bp, Homo sapien
ggttaagaacttgcctgaggccgtg

SEQ ID NO: 3556350 - DNA, 25 bp, Homo sapien
gggaccgacccaaagcattcagtgc

SEQ ID NO: 3556351 - DNA, 25 bp, Homo sapien
taactcaacagtcctacaatggtgg

SEQ ID NO: 3556352 - DNA, 25 bp, Homo sapien
tgcctgtggatgcaactgggatgca

SEQ ID NO: 3556353 - DNA, 25 bp, Homo sapien
taatcaagtgcatcctatatgttcc

SEQ ID NO: 3556354 - DNA, 25 bp, Homo sapien
ctggcgatgatgcttgccggagcct

SEQ ID NO: 3556355 - DNA, 25 bp, Homo sapien
gggcctggcgatgatgcttgccgga

SEQ ID NO: 3556356 - DNA, 25 bp, Homo sapien
ctcggctcaaactctgggatctgga

SEQ ID NO: 3556357 - DNA, 25 bp, Homo sapien
gagtcttcctgctcactcggctcaa

SEQ ID NO: 3556358 - DNA, 25 bp, Homo sapien
tgtgaggacaagatgttacgtagtc

SEQ ID NO: 3556359 - DNA, 25 bp, Homo sapien
tgggccctcatctgtctgccgggtc

SEQ ID NO: 3556360 - DNA, 25 bp, Homo sapien
gttacgtagtcaaggcacagctggg

SEQ ID NO: 3556361 - DNA, 25 bp, Homo sapien
gccctcatctgtctgccgggtctgg

SEQ ID NO: 3556362 - DNA, 25 bp, Homo sapien
caagcccgatctcgaggcccctgac

SEQ ID NO: 3556363 - DNA, 25 bp, Homo sapien
cccaagcccgatctcgaggcccctg

SEQ ID NO: 3556364 - DNA, 25 bp, Homo sapien
ccaagcccgatctcgaggcccctga

SEQ ID NO: 3556365 - DNA, 25 bp, Homo sapien
ggatagtgacagctcccccgggagc

SEQ ID NO: 3556366 - DNA, 25 bp, Homo sapien
attactgcgggcgaaggcgcttggc

SEQ ID NO: 3556367 - DNA, 25 bp, Homo sapien
tgaagctcagccgtcggatgtgatt

SEQ ID NO: 3556368 - DNA, 25 bp, Homo sapien
tgcctcacaccttgggcgtgtgtgg

SEQ ID NO: 3556369 - DNA, 25 bp, Homo sapien
tcctcccaggcgcggaagcttcgcg

SEQ ID NO: 3556370 - DNA, 25 bp, Homo sapien
tcgggggacacctcccgcgccatct

SEQ ID NO: 3556371 - DNA, 25 bp, Homo sapien
caggcgcggaagcttcgcgccgccc

SEQ ID NO: 3556372 - DNA, 25 bp, Homo sapien
ctggactgggtgcccggtcggaaag

SEQ ID NO: 3556373 - DNA, 25 bp, Homo sapien
ccgtgggggcttcacgcctggcagg

SEQ ID NO: 3556374 - DNA, 25 bp, Homo sapien
agggcccgtgggggcttcacgcctg

SEQ ID NO: 3556375 - DNA, 25 bp, Homo sapien
ggcccgtgggggcttcacgcctggc

SEQ ID NO: 3556376 - DNA, 25 bp, Homo sapien
cccgtgggggcttcacgcctggcag

SEQ ID NO: 3556377 - DNA, 25 bp, Homo sapien
aggacgacatgaacgaccgaggcca

SEQ ID NO: 3556378 - DNA, 25 bp, Homo sapien
aacccctatccggtctgtcctggag

SEQ ID NO: 3556379 - DNA, 25 bp, Homo sapien
aggcctccctccctgacatggagag

SEQ ID NO: 3556380 - DNA, 25 bp, Homo sapien
agagtaacctgtctggcctggtgcc

SEQ ID NO: 3556381 - DNA, 25 bp, Homo sapien
gccggctggacaccttcgattacga

SEQ ID NO: 3556382 - DNA, 25 bp, Homo sapien
tacccctttggcgtgactgcagact

SEQ ID NO: 3556383 - DNA, 25 bp, Homo sapien
cacaggcggacctggtgaatgacct

SEQ ID NO: 3556384 - DNA, 25 bp, Homo sapien
tgaccaggtgggcatacgcatgtct

SEQ ID NO: 3556385 - DNA, 25 bp, Homo sapien
cctgtgccaagtttgtctgccgctt

SEQ ID NO: 3556386 - DNA, 25 bp, Homo sapien
ccttgctgctcctgtcatagtgagc

SEQ ID NO: 3556387 - DNA, 25 bp, Homo sapien
accctggcatgacctgccacctctg

SEQ ID NO: 3556388 - DNA, 25 bp, Homo sapien
gtcatagtgagcttgtgccgtcccc

SEQ ID NO: 3556389 - DNA, 25 bp, Homo sapien
tccgggagtggtgtggccgccggtc

SEQ ID NO: 3556390 - DNA, 25 bp, Homo sapien
tggccctgctgtctggcgtgtgcac

SEQ ID NO: 3556391 - DNA, 25 bp, Homo sapien
ccgacagtaagtgcggtgcgggctc

SEQ ID NO: 3556392 - DNA, 25 bp, Homo sapien
acgctagtgtccacacacgtgtgcg

SEQ ID NO: 3556393 - DNA, 25 bp, Homo sapien
ggttcctcgaatcacacatgcggcg

SEQ ID NO: 3556394 - DNA, 25 bp, Homo sapien
taaaagagtcgatgcatggtccgtg

SEQ ID NO: 3556395 - DNA, 25 bp, Homo sapien
gatgaagtacctggacgcctaagcc

SEQ ID NO: 3556396 - DNA, 25 bp, Homo sapien
tacatcgaagggctcaagaagcgcc

SEQ ID NO: 3556397 - DNA, 25 bp, Homo sapien
taccttccgggactcgcaatccagg

SEQ ID NO: 3556398 - DNA, 25 bp, Homo sapien
tccaggacttattgcatgttttaag

SEQ ID NO: 3556399 - DNA, 25 bp, Homo sapien
gctactgggtctacggttcgagtgc

SEQ ID NO: 3556400 - DNA, 25 bp, Homo sapien
gcatgttttaagtcggcttcaccca

SEQ ID NO: 3556401 - DNA, 25 bp, Homo sapien
tcagggttgggcctccgatccagcc

SEQ ID NO: 3556402 - DNA, 25 bp, Homo sapien
tggctgcgggtcctgactcgggtca

SEQ ID NO: 3556403 - DNA, 25 bp, Homo sapien
aatcccgcatttgccgaagtccctg

SEQ ID NO: 3556404 - DNA, 25 bp, Homo sapien
gagggtcggactggtcagggttcag

SEQ ID NO: 3556405 - DNA, 25 bp, Homo sapien
aggccagagtctcccagtgggtgat

SEQ ID NO: 3556406 - DNA, 25 bp, Homo sapien
ggacttggagagcaaaggcccatgc

SEQ ID NO: 3556407 - DNA, 25 bp, Homo sapien
tcttcaaagcagagtgggacttgga

SEQ ID NO: 3556408 - DNA, 25 bp, Homo sapien
cagaaacctatctcagggagggaag

SEQ ID NO: 3556409 - DNA, 25 bp, Homo sapien
tttaatgtatatttgctgcaaagag

SEQ ID NO: 3556410 - DNA, 25 bp, Homo sapien
caacgagcctcctcagggggtagga

SEQ ID NO: 3556411 - DNA, 25 bp, Homo sapien
tgcctctatgccctgcagagcaata

SEQ ID NO: 3556412 - DNA, 25 bp, Homo sapien
cccagagcccttgactgtacagaga

SEQ ID NO: 3556413 - DNA, 25 bp, Homo sapien
cagggtatagatcaacaaaaataca

SEQ ID NO: 3556414 - DNA, 25 bp, Homo sapien
ttcggaaacagggtatagatcaaca

SEQ ID NO: 3556415 - DNA, 25 bp, Homo sapien
gaaacagggtatagatcaacaaaaa

SEQ ID NO: 3556416 - DNA, 25 bp, Homo sapien
gcagaattcggaaacagggtataga

SEQ ID NO: 3556417 - DNA, 25 bp, Homo sapien
cactcagcagcatgttggggatccc

SEQ ID NO: 3556418 - DNA, 25 bp, Homo sapien
catgttggggatcccgcggctgatg

SEQ ID NO: 3556419 - DNA, 25 bp, Homo sapien
agtttcctcttcactcagcagcatg

SEQ ID NO: 3556420 - DNA, 25 bp, Homo sapien
cccgcggctgatggggaacatacgt

SEQ ID NO: 3556421 - DNA, 25 bp, Homo sapien
gcagggtgccctctatcacttccac

SEQ ID NO: 3556422 - DNA, 25 bp, Homo sapien
caggtggcccgggaagcaagtgatg

SEQ ID NO: 3556423 - DNA, 25 bp, Homo sapien
tggcccgggaagcaagtgatgggcc

SEQ ID NO: 3556424 - DNA, 25 bp, Homo sapien
gaagcaagtgatgggccgcttctca

SEQ ID NO: 3556425 - DNA, 25 bp, Homo sapien
cccgggaagcaagtgatgggccgct

SEQ ID NO: 3556426 - DNA, 25 bp, Homo sapien
catatccctcaaccggccctttcgg

SEQ ID NO: 3556427 - DNA, 25 bp, Homo sapien
tggtgcatggtcctcagaaactcct

SEQ ID NO: 3556428 - DNA, 25 bp, Homo sapien
caggtggtgcatggtcctcagaaac

SEQ ID NO: 3556429 - DNA, 25 bp, Homo sapien
agcagcaggtggtgcatggtcctca

SEQ ID NO: 3556430 - DNA, 25 bp, Homo sapien
agaggccaaaattatctccgggcat

SEQ ID NO: 3556431 - DNA, 25 bp, Homo sapien
tgctggggcggggtaaggatcctca

SEQ ID NO: 3556432 - DNA, 25 bp, Homo sapien
cccgcattccccgggatatgctggg

SEQ ID NO: 3556433 - DNA, 25 bp, Homo sapien
ccaaaattatctccgggcatcccga

SEQ ID NO: 3556434 - DNA, 25 bp, Homo sapien
cactttaggtatcatacgcgccacg

SEQ ID NO: 3556435 - DNA, 25 bp, Homo sapien
ttaggtatcatacgcgccacgaagt

SEQ ID NO: 3556436 - DNA, 25 bp, Homo sapien
actccactttaggtatcatacgcgc

SEQ ID NO: 3556437 - DNA, 25 bp, Homo sapien
gcgccacgaagttggggttgaattc

SEQ ID NO: 3556438 - DNA, 25 bp, Homo sapien
ctgcagggcggaggagtttaggcaa

SEQ ID NO: 3556439 - DNA, 25 bp, Homo sapien
gcagggcggaggagtttaggcaagc

SEQ ID NO: 3556440 - DNA, 25 bp, Homo sapien
tgcagggcggaggagtttaggcaag

SEQ ID NO: 3556441 - DNA, 25 bp, Homo sapien
catcccgcccgaaaagggaagactg

SEQ ID NO: 3556442 - DNA, 25 bp, Homo sapien
cacatgcgagctcagcagattgtgg

SEQ ID NO: 3556443 - DNA, 25 bp, Homo sapien
cccgcacatgcgagctcagcagatt

SEQ ID NO: 3556444 - DNA, 25 bp, Homo sapien
cgcacatgcgagctcagcagattgt

SEQ ID NO: 3556445 - DNA, 25 bp, Homo sapien
catgcgagctcagcagattgtgggt

SEQ ID NO: 3556446 - DNA, 25 bp, Homo sapien
caaattagctgctccagtgccgaaa

SEQ ID NO: 3556447 - DNA, 25 bp, Homo sapien
ctattggatagccaggagaaccgga

SEQ ID NO: 3556448 - DNA, 25 bp, Homo sapien
ccatttgtagttgcgtcggctgtcc

SEQ ID NO: 3556449 - DNA, 25 bp, Homo sapien
taccggaagcgtctcagcaggaggt

SEQ ID NO: 3556450 - DNA, 25 bp, Homo sapien
gaggtggaagcattgattcaggcca

SEQ ID NO: 3556451 - DNA, 25 bp, Homo sapien
agcattgattcaggccagtttgaga

SEQ ID NO: 3556452 - DNA, 25 bp, Homo sapien
aatcccggttcctctggcagctgag

SEQ ID NO: 3556453 - DNA, 25 bp, Homo sapien
atacactccgattagcagaagttga

SEQ ID NO: 3556454 - DNA, 25 bp, Homo sapien
cttatgatccactgtggctgcttga

SEQ ID NO: 3556455 - DNA, 25 bp, Homo sapien
ccactgtggctgcttgagttccagc

SEQ ID NO: 3556456 - DNA, 25 bp, Homo sapien
gatccactgtggctgcttgagttcc

SEQ ID NO: 3556457 - DNA, 25 bp, Homo sapien
ccagccatcacattcatcgtccagc

SEQ ID NO: 3556458 - DNA, 25 bp, Homo sapien
tgaatatgccgtgcatgggccctgc

SEQ ID NO: 3556459 - DNA, 25 bp, Homo sapien
tgtggctcgcgtggtttatcttggt

SEQ ID NO: 3556460 - DNA, 25 bp, Homo sapien
gatattgcccgcaagctgtggctcg

SEQ ID NO: 3556461 - DNA, 25 bp, Homo sapien
aacagccactgctaaggtctgcagg

SEQ ID NO: 3556462 - DNA, 25 bp, Homo sapien
ctgttcggtcattgcccatggagcc

SEQ ID NO: 3556463 - DNA, 25 bp, Homo sapien
tcggtcattgcccatggagccaggg

SEQ ID NO: 3556464 - DNA, 25 bp, Homo sapien
ggagctgtgggccttccgccgccaa

SEQ ID NO: 3556465 - DNA, 25 bp, Homo sapien
gaggtgaagggctgttcggtcattg

SEQ ID NO: 3556466 - DNA, 25 bp, Homo sapien
tggtcctgtttgcaggaacgggcat

SEQ ID NO: 3556467 - DNA, 25 bp, Homo sapien
tgaggcatctgtactgggaacagag

SEQ ID NO: 3556468 - DNA, 25 bp, Homo sapien
acatggatatagcagggtgtccctg

SEQ ID NO: 3556469 - DNA, 25 bp, Homo sapien
gcatgcccgctggttttatctctca

SEQ ID NO: 3556470 - DNA, 25 bp, Homo sapien
gatcagaagcctcatggccaacatc

SEQ ID NO: 3556471 - DNA, 25 bp, Homo sapien
tgccaatgctcagaataaagatctg

SEQ ID NO: 3556472 - DNA, 25 bp, Homo sapien
taaagatctgaaagcctgtagcaag

SEQ ID NO: 3556473 - DNA, 25 bp, Homo sapien
aagcctcatggccaacatctctgca

SEQ ID NO: 3556474 - DNA, 25 bp, Homo sapien
ggtcctgacaataggatttccatct

SEQ ID NO: 3556475 - DNA, 25 bp, Homo sapien
caataaccatagtggccggcgatct

SEQ ID NO: 3556476 - DNA, 25 bp, Homo sapien
agcatgctcagcctgggtcctgaca

SEQ ID NO: 3556477 - DNA, 25 bp, Homo sapien
gccctcgtcagtttttggaagatga

SEQ ID NO: 3556478 - DNA, 25 bp, Homo sapien
catgctcggccttaggtggagggcc

SEQ ID NO: 3556479 - DNA, 25 bp, Homo sapien
atgctcggccttaggtggagggccc

SEQ ID NO: 3556480 - DNA, 25 bp, Homo sapien
tgctcggccttaggtggagggcccc

SEQ ID NO: 3556481 - DNA, 25 bp, Homo sapien
agctctgggccgtgaagtctcagca

SEQ ID NO: 3556482 - DNA, 25 bp, Homo sapien
ttcaccaggagacgagagtccacga

SEQ ID NO: 3556483 - DNA, 25 bp, Homo sapien
tagctggagcaaagatgcaggcaca

SEQ ID NO: 3556484 - DNA, 25 bp, Homo sapien
ccaatgagaggcaaactgtgtcccc

SEQ ID NO: 3556485 - DNA, 25 bp, Homo sapien
gaggtgttgatcactcagcatcgcc

SEQ ID NO: 3556486 - DNA, 25 bp, Homo sapien
gacttctggatcatcggacccaggg

SEQ ID NO: 3556487 - DNA, 25 bp, Homo sapien
tgagcagaagctcgatgtcagactt

SEQ ID NO: 3556488 - DNA, 25 bp, Homo sapien
tgccggccactctgaattaagcgct

SEQ ID NO: 3556489 - DNA, 25 bp, Homo sapien
gctgcctaagaaacgtgagccttct

SEQ ID NO: 3556490 - DNA, 25 bp, Homo sapien
tgctgccctgtgactcttgagagtt

SEQ ID NO: 3556491 - DNA, 25 bp, Homo sapien
tttgatataagacgaccacagccgc

SEQ ID NO: 3556492 - DNA, 25 bp, Homo sapien
caagctgccgccatgaaatatctgt

SEQ ID NO: 3556493 - DNA, 25 bp, Homo sapien
ccatcatcgcctctgtctcatcccc

SEQ ID NO: 3556494 - DNA, 25 bp, Homo sapien
tgttgttccatcatcgcctctgtct

SEQ ID NO: 3556495 - DNA, 25 bp, Homo sapien
ttccatcatcgcctctgtctcatcc

SEQ ID NO: 3556496 - DNA, 25 bp, Homo sapien
ttgttccatcatcgcctctgtctca

SEQ ID NO: 3556497 - DNA, 25 bp, Homo sapien
aataaacctggcactggatgttgtc

SEQ ID NO: 3556498 - DNA, 25 bp, Homo sapien
catttccatgggcataagcagtctc

SEQ ID NO: 3556499 - DNA, 25 bp, Homo sapien
catgggcataagcagtctccattct

SEQ ID NO: 3556500 - DNA, 25 bp, Homo sapien
cagcaataaacctggcactggatgt

SEQ ID NO: 3556501 - DNA, 25 bp, Homo sapien
caagctcgttagattgcaggttggg

SEQ ID NO: 3556502 - DNA, 25 bp, Homo sapien
agccacatcaccaagctcgttagat

SEQ ID NO: 3556503 - DNA, 25 bp, Homo sapien
ctgctgtaaacttggcagccacatc

SEQ ID NO: 3556504 - DNA, 25 bp, Homo sapien
aatctgctgtaaacttggcagccac

SEQ ID NO: 3556505 - DNA, 25 bp, Homo sapien
tctgctttaagccttccctgatata

SEQ ID NO: 3556506 - DNA, 25 bp, Homo sapien
gtgccatgtagataaccttccctct

SEQ ID NO: 3556507 - DNA, 25 bp, Homo sapien
ccctgatatagcgtgtggcctgcag

SEQ ID NO: 3556508 - DNA, 25 bp, Homo sapien
agggtctgcttgatgccgacatcga

SEQ ID NO: 3556509 - DNA, 25 bp, Homo sapien
catgaggagtgcctagttctgggct

SEQ ID NO: 3556510 - DNA, 25 bp, Homo sapien
ccaagggacaggatgactttgctca

SEQ ID NO: 3556511 - DNA, 25 bp, Homo sapien
tttgctcagagtcgtgtcctgggcc

SEQ ID NO: 3556512 - DNA, 25 bp, Homo sapien
gaacattgaatctgaggacgctgcc

SEQ ID NO: 3556513 - DNA, 25 bp, Homo sapien
actaattgtgataaaggagccaggc

SEQ ID NO: 3556514 - DNA, 25 bp, Homo sapien
taattgtgataaaggagccaggcag

SEQ ID NO: 3556515 - DNA, 25 bp, Homo sapien
gtggccaccgcacaaccacagaggg

SEQ ID NO: 3556516 - DNA, 25 bp, Homo sapien
tgctggtggccaccgcacaaccaca

SEQ ID NO: 3556517 - DNA, 25 bp, Homo sapien
tgggtgtcataattactgagccaag

SEQ ID NO: 3556518 - DNA, 25 bp, Homo sapien
ggtgtcataattactgagccaaggc

SEQ ID NO: 3556519 - DNA, 25 bp, Homo sapien
gggtgtcataattactgagccaagg

SEQ ID NO: 3556520 - DNA, 25 bp, Homo sapien
gaattgaacgaaccctgagcttccg

SEQ ID NO: 3556521 - DNA, 25 bp, Homo sapien
tgctaagggcaagccatggacacca

SEQ ID NO: 3556522 - DNA, 25 bp, Homo sapien
cataggaaggagctacaaggcttac

SEQ ID NO: 3556523 - DNA, 25 bp, Homo sapien
gcagggctccatgcaggattcagga

SEQ ID NO: 3556524 - DNA, 25 bp, Homo sapien
ctattttcacttctgtgggtcttca

SEQ ID NO: 3556525 - DNA, 25 bp, Homo sapien
acttctgtgggtcttcagttgcttc

SEQ ID NO: 3556526 - DNA, 25 bp, Homo sapien
ttttggtggtagggggtggatctca

SEQ ID NO: 3556527 - DNA, 25 bp, Homo sapien
aagagcaatgttttggtggtagggg

SEQ ID NO: 3556528 - DNA, 25 bp, Homo sapien
ttttcaaacatttgcaccgaagcat

SEQ ID NO: 3556529 - DNA, 25 bp, Homo sapien
aagcatccccaacacggaagaggga

SEQ ID NO: 3556530 - DNA, 25 bp, Homo sapien
aacatttgcaccgaagcatccccaa

SEQ ID NO: 3556531 - DNA, 25 bp, Homo sapien
gcatccccaacacggaagagggaaa

SEQ ID NO: 3556532 - DNA, 25 bp, Homo sapien
taaacacccggaaatgacgcttagc

SEQ ID NO: 3556533 - DNA, 25 bp, Homo sapien
tgttgcccgcccacattagggagac

SEQ ID NO: 3556534 - DNA, 25 bp, Homo sapien
tctttcaaccaaatatggaccaggg

SEQ ID NO: 3556535 - DNA, 25 bp, Homo sapien
gggtcatgcactccaaggaagctgg

SEQ ID NO: 3556536 - DNA, 25 bp, Homo sapien
tctttgctggacaaagccgtccctt

SEQ ID NO: 3556537 - DNA, 25 bp, Homo sapien
accaacactgctgatgcttggcaca

SEQ ID NO: 3556538 - DNA, 25 bp, Homo sapien
cacaccagcgctggtctttgctgga

SEQ ID NO: 3556539 - DNA, 25 bp, Homo sapien
tggcatctgatgggcaccaacactg

SEQ ID NO: 3556540 - DNA, 25 bp, Homo sapien
ccactccgttccttgctccattgcc

SEQ ID NO: 3556541 - DNA, 25 bp, Homo sapien
gtgccactccgttccttgctccatt

SEQ ID NO: 3556542 - DNA, 25 bp, Homo sapien
gcagaggataggaatggacttggcc

SEQ ID NO: 3556543 - DNA, 25 bp, Homo sapien
tgctccattgcctgatgatgcagag

SEQ ID NO: 3556544 - DNA, 25 bp, Homo sapien
ggccccgtggagcttacgtttcata

SEQ ID NO: 3556545 - DNA, 25 bp, Homo sapien
gccacgctgatcaggtgtgtaccag

SEQ ID NO: 3556546 - DNA, 25 bp, Homo sapien
catacagtgcggaccaacattggat

SEQ ID NO: 3556547 - DNA, 25 bp, Homo sapien
attacaataattaggccatccccgc

SEQ ID NO: 3556548 - DNA, 25 bp, Homo sapien
cattgccttgcctgtgtctgctaaa

SEQ ID NO: 3556549 - DNA, 25 bp, Homo sapien
gagtgtgcgactattcattcagtta

SEQ ID NO: 3556550 - DNA, 25 bp, Homo sapien
ggtcatcacgggtgtcgctgtgttc

SEQ ID NO: 3556551 - DNA, 25 bp, Homo sapien
tcccccaggcacagacatcataaag

SEQ ID NO: 3556552 - DNA, 25 bp, Homo sapien
cagaattagctatcgagaccaaggg

SEQ ID NO: 3556553 - DNA, 25 bp, Homo sapien
tccttaggaggcaaaactagccagg

SEQ ID NO: 3556554 - DNA, 25 bp, Homo sapien
gaatgtaggtttcacccaggtgccg

SEQ ID NO: 3556555 - DNA, 25 bp, Homo sapien
gcaggttccaggttctccagacgat

SEQ ID NO: 3556556 - DNA, 25 bp, Homo sapien
caggctgctgctcgtggaatctaga

SEQ ID NO: 3556557 - DNA, 25 bp, Homo sapien
aaaattaacaggacgagcagtggac

SEQ ID NO: 3556558 - DNA, 25 bp, Homo sapien
gagcccgtgggcaaagaagtgaccc

SEQ ID NO: 3556559 - DNA, 25 bp, Homo sapien
cagtctgtggacaatgccttgctcc

SEQ ID NO: 3556560 - DNA, 25 bp, Homo sapien
ccattgctctgggccgagttactga

SEQ ID NO: 3556561 - DNA, 25 bp, Homo sapien
tgtagtttcggctctggtccacctg

SEQ ID NO: 3556562 - DNA, 25 bp, Homo sapien
gcggtacttatacatggcgtagagg

SEQ ID NO: 3556563 - DNA, 25 bp, Homo sapien
cacctggtaggagccctcatcacga

SEQ ID NO: 3556564 - DNA, 25 bp, Homo sapien
gcctccgcggctcaaaggacgtggg

SEQ ID NO: 3556565 - DNA, 25 bp, Homo sapien
gagtcaaagacctccccggaggcga

SEQ ID NO: 3556566 - DNA, 25 bp, Homo sapien
ggtggttcattttgcccgccggcag

SEQ ID NO: 3556567 - DNA, 25 bp, Homo sapien
caggagggtggtgcggtccgtgacc

SEQ ID NO: 3556568 - DNA, 25 bp, Homo sapien
gcagcgtgtcttgggtggcgcccac

SEQ ID NO: 3556569 - DNA, 25 bp, Homo sapien
gggcagcgtgtcttgggtggcgccc

SEQ ID NO: 3556570 - DNA, 25 bp, Homo sapien
gcgggggcagcgtgtcttgggtggc

SEQ ID NO: 3556571 - DNA, 25 bp, Homo sapien
ctggcacgggcccccagagggcggg

SEQ ID NO: 3556572 - DNA, 25 bp, Homo sapien
ggcacgaagggggatcgggtggcca

SEQ ID NO: 3556573 - DNA, 25 bp, Homo sapien
gcacgaagggggatcgggtggccac

SEQ ID NO: 3556574 - DNA, 25 bp, Homo sapien
cacgaagggggatcgggtggccacg

SEQ ID NO: 3556575 - DNA, 25 bp, Homo sapien
tcctccgtgataatgggcaatatta

SEQ ID NO: 3556576 - DNA, 25 bp, Homo sapien
cgtgataatgggcaatattaactct

SEQ ID NO: 3556577 - DNA, 25 bp, Homo sapien
gagtcctccgtgataatgggcaata

SEQ ID NO: 3556578 - DNA, 25 bp, Homo sapien
ctaaggagtcctccgtgataatggg

SEQ ID NO: 3556579 - DNA, 25 bp, Homo sapien
gcaacttacatcaacaaataggccg

SEQ ID NO: 3556580 - DNA, 25 bp, Homo sapien
gacacatggttcctgagctaagcct

SEQ ID NO: 3556581 - DNA, 25 bp, Homo sapien
cagagctgtgtaagcgggttctccc

SEQ ID NO: 3556582 - DNA, 25 bp, Homo sapien
gatagcataccacggaattcaggca

SEQ ID NO: 3556583 - DNA, 25 bp, Homo sapien
caggaaggatcagaagaggctgtcc

SEQ ID NO: 3556584 - DNA, 25 bp, Homo sapien
gctgtcctggtgaggagttggcagg

SEQ ID NO: 3556585 - DNA, 25 bp, Homo sapien
aaggatcagaagaggctgtcctggt

SEQ ID NO: 3556586 - DNA, 25 bp, Homo sapien
cagttcaggaaggatcagaagaggc

SEQ ID NO: 3556587 - DNA, 25 bp, Homo sapien
tgaccatctggccccagatacccct

SEQ ID NO: 3556588 - DNA, 25 bp, Homo sapien
ggtgaccatctggccccagataccc

SEQ ID NO: 3556589 - DNA, 25 bp, Homo sapien
tggtgaccatctggccccagatacc

SEQ ID NO: 3556590 - DNA, 25 bp, Homo sapien
gtggtgaccatctggccccagatac

SEQ ID NO: 3556591 - DNA, 25 bp, Homo sapien
catcatcgcttggacactcagcaga

SEQ ID NO: 3556592 - DNA, 25 bp, Homo sapien
caggtcctcatcatcgcttggacac

SEQ ID NO: 3556593 - DNA, 25 bp, Homo sapien
tcatcatcgcttggacactcagcag

SEQ ID NO: 3556594 - DNA, 25 bp, Homo sapien
ctcagtgtgggggagcggccccggc

SEQ ID NO: 3556595 - DNA, 25 bp, Homo sapien
gtggtctccgcactgagcagcacgg

SEQ ID NO: 3556596 - DNA, 25 bp, Homo sapien
ggtggtggccgtggtctccgcactg

SEQ ID NO: 3556597 - DNA, 25 bp, Homo sapien
tggccgtggtctccgcactgagcag

SEQ ID NO: 3556598 - DNA, 25 bp, Homo sapien
atcccggcccccgatcttgatggca

SEQ ID NO: 3556599 - DNA, 25 bp, Homo sapien
acattggggtcgctctcggcggcca

SEQ ID NO: 3556600 - DNA, 25 bp, Homo sapien
aggcgcaggtgaccctcagtccgca

SEQ ID NO: 3556601 - DNA, 25 bp, Homo sapien
ccattgtagtagaggccggacacct

SEQ ID NO: 3556602 - DNA, 25 bp, Homo sapien
cccacctggacatgcaagcacagaa

SEQ ID NO: 3556603 - DNA, 25 bp, Homo sapien
gggaccttgcttcgctcactgacag

SEQ ID NO: 3556604 - DNA, 25 bp, Homo sapien
tgccaggccaaggtggagtcggtgc

SEQ ID NO: 3556605 - DNA, 25 bp, Homo sapien
cacactccagtatgacacctcagaa

SEQ ID NO: 3556606 - DNA, 25 bp, Homo sapien
ctttgtcgagcagccactcatctac

SEQ ID NO: 3556607 - DNA, 25 bp, Homo sapien
ctactactcgaccaagccggtaggg

SEQ ID NO: 3556608 - DNA, 25 bp, Homo sapien
gagcagccactcatctactactcga

SEQ ID NO: 3556609 - DNA, 25 bp, Homo sapien
aagccggtaggggattctctgtcta

SEQ ID NO: 3556610 - DNA, 25 bp, Homo sapien
tggtaatgtcgtccgtgcccacgtt

SEQ ID NO: 3556611 - DNA, 25 bp, Homo sapien
gcaccacgtggtatttgccgtcgct

SEQ ID NO: 3556612 - DNA, 25 bp, Homo sapien
cgttgggctcgtcgatggtaatgtc

SEQ ID NO: 3556613 - DNA, 25 bp, Homo sapien
cgtcgcttactatggcgttgggctc

SEQ ID NO: 3556614 - DNA, 25 bp, Homo sapien
tagtctccaaggccggaggcgctgt

SEQ ID NO: 3556615 - DNA, 25 bp, Homo sapien
cagcacagcgctccgctggtgggtg

SEQ ID NO: 3556616 - DNA, 25 bp, Homo sapien
aggcgatccatcctcgtgctgggcc

SEQ ID NO: 3556617 - DNA, 25 bp, Homo sapien
ccacgtgtaggtgatgagcgctccc

SEQ ID NO: 3556618 - DNA, 25 bp, Homo sapien
ggccagagctggcgccctccaacat

SEQ ID NO: 3556619 - DNA, 25 bp, Homo sapien
ctaagatatgaagtgatggggggcc

SEQ ID NO: 3556620 - DNA, 25 bp, Homo sapien
taagatatgaagtgatggggggcct

SEQ ID NO: 3556621 - DNA, 25 bp, Homo sapien
agatatgaagtgatggggggcctga

SEQ ID NO: 3556622 - DNA, 25 bp, Homo sapien
atatgaagtgatggggggcctgaga

SEQ ID NO: 3556623 - DNA, 25 bp, Homo sapien
tgaggaagggcatgcggttgatggc

SEQ ID NO: 3556624 - DNA, 25 bp, Homo sapien
cgcgggtgaggaagggcatgcggtt

SEQ ID NO: 3556625 - DNA, 25 bp, Homo sapien
tggcgatgggcacggtgccgtgctt

SEQ ID NO: 3556626 - DNA, 25 bp, Homo sapien
cggttgatggcgatgggcacggtgc

SEQ ID NO: 3556627 - DNA, 25 bp, Homo sapien
ggtgctgaggctggaggagacccgg

SEQ ID NO: 3556628 - DNA, 25 bp, Homo sapien
tgaggctggaggagacccgggcccc

SEQ ID NO: 3556629 - DNA, 25 bp, Homo sapien
tgctgaggctggaggagacccgggc

SEQ ID NO: 3556630 - DNA, 25 bp, Homo sapien
ctgtggaagtggtggacgtggtggg

SEQ ID NO: 3556631 - DNA, 25 bp, Homo sapien
tcggccgcccccagcagcaacagca

SEQ ID NO: 3556632 - DNA, 25 bp, Homo sapien
ctcggccgcccccagcagcaacagc

SEQ ID NO: 3556633 - DNA, 25 bp, Homo sapien
agcagcaacagcggcaacagcggca

SEQ ID NO: 3556634 - DNA, 25 bp, Homo sapien
agcaacagcggcaacagcggcagca

SEQ ID NO: 3556635 - DNA, 25 bp, Homo sapien
atgcctgggtccatcgcgaggagct

SEQ ID NO: 3556636 - DNA, 25 bp, Homo sapien
agcctcggtccggagccaacaaaat

SEQ ID NO: 3556637 - DNA, 25 bp, Homo sapien
tgaagcggaggtaaaccagggccca

SEQ ID NO: 3556638 - DNA, 25 bp, Homo sapien
aatcaactggatcccgccgggaaat

SEQ ID NO: 3556639 - DNA, 25 bp, Homo sapien
aggcgcgagcctgcgagattccggc

SEQ ID NO: 3556640 - DNA, 25 bp, Homo sapien
gggctgagccgaggaaaggcgcgag

SEQ ID NO: 3556641 - DNA, 25 bp, Homo sapien
cgaaggcgggagaccgacggcgact

SEQ ID NO: 3556642 - DNA, 25 bp, Homo sapien
agattccggcggagagatggaggca

SEQ ID NO: 3556643 - DNA, 25 bp, Homo sapien
ccagagctggatttggcccccaggt

SEQ ID NO: 3556644 - DNA, 25 bp, Homo sapien
acatgccagagctggatttggcccc

SEQ ID NO: 3556645 - DNA, 25 bp, Homo sapien
tgccagagctggatttggcccccag

SEQ ID NO: 3556646 - DNA, 25 bp, Homo sapien
tacatgccagagctggatttggccc

SEQ ID NO: 3556647 - DNA, 25 bp, Homo sapien
tgtccctctccagccgtattccatg

SEQ ID NO: 3556648 - DNA, 25 bp, Homo sapien
tcgactgtccctctccagccgtatt

SEQ ID NO: 3556649 - DNA, 25 bp, Homo sapien
ctccagaaatcgactgtccctctcc

SEQ ID NO: 3556650 - DNA, 25 bp, Homo sapien
agaaatcgactgtccctctccagcc

SEQ ID NO: 3556651 - DNA, 25 bp, Homo sapien
gcctccataggaagtcatggtgcag

SEQ ID NO: 3556652 - DNA, 25 bp, Homo sapien
aggtgaagccatcccactgctgcaa

SEQ ID NO: 3556653 - DNA, 25 bp, Homo sapien
tcatggtgcagtcgcaggtgaagcc

SEQ ID NO: 3556654 - DNA, 25 bp, Homo sapien
ctgctgcaagcagacgccctggttg

SEQ ID NO: 3556655 - DNA, 25 bp, Homo sapien
tccacctgcccaatgcggtgcaggg

SEQ ID NO: 3556656 - DNA, 25 bp, Homo sapien
tctgggagacgtccgttgaggtcca

SEQ ID NO: 3556657 - DNA, 25 bp, Homo sapien
ccagcttgggcaggttgctgaacat

SEQ ID NO: 3556658 - DNA, 25 bp, Homo sapien
catattcttgctcagaccgccaatg

SEQ ID NO: 3556659 - DNA, 25 bp, Homo sapien
cccaggtcaaacacgtagtggatgt

SEQ ID NO: 3556660 - DNA, 25 bp, Homo sapien
gagtcaatcttgagcgtgtgcacgt

SEQ ID NO: 3556661 - DNA, 25 bp, Homo sapien
tttgagatcgaggtttcgggcgcca

SEQ ID NO: 3556662 - DNA, 25 bp, Homo sapien
gttccccttcatcaaggacgggcca

SEQ ID NO: 3556663 - DNA, 25 bp, Homo sapien
ggtgatgtcaccatccttgcactgg

SEQ ID NO: 3556664 - DNA, 25 bp, Homo sapien
aatgaagtcattgccgttgcccgag

SEQ ID NO: 3556665 - DNA, 25 bp, Homo sapien
gcactggtccatgtagggctggcca

SEQ ID NO: 3556666 - DNA, 25 bp, Homo sapien
cacgcaggccaaagcgagcattgag

SEQ ID NO: 3556667 - DNA, 25 bp, Homo sapien
attgtcattgagcttgtgccccgca

SEQ ID NO: 3556668 - DNA, 25 bp, Homo sapien
cattgagcttgtgccccgcaaacag

SEQ ID NO: 3556669 - DNA, 25 bp, Homo sapien
cacgccggaccaccctcaccgtgtg

SEQ ID NO: 3556670 - DNA, 25 bp, Homo sapien
ttgtgccccgcaaacagcgtttcgg

SEQ ID NO: 3556671 - DNA, 25 bp, Homo sapien
ggtgcgcagccgacgcgcaggcagt

SEQ ID NO: 3556672 - DNA, 25 bp, Homo sapien
cctgaagaggacctagtattaacct

SEQ ID NO: 3556673 - DNA, 25 bp, Homo sapien
cttcttagagggtaccaggcctcta

SEQ ID NO: 3556674 - DNA, 25 bp, Homo sapien
cagtcagatgatgggaagagggctt

SEQ ID NO: 3556675 - DNA, 25 bp, Homo sapien
ccttgggaatcccagtcgtacaggg

SEQ ID NO: 3556676 - DNA, 25 bp, Homo sapien
gccttggtgttgctgccggtctgtg

SEQ ID NO: 3556677 - DNA, 25 bp, Homo sapien
tgttgctgccggtctgtgaggccct

SEQ ID NO: 3556678 - DNA, 25 bp, Homo sapien
gccggtctgtgaggccctgcaagtc

SEQ ID NO: 3556679 - DNA, 25 bp, Homo sapien
ttccccagtagtgagtccagcccag

SEQ ID NO: 3556680 - DNA, 25 bp, Homo sapien
gcatctacacaatggtttcaatggt

SEQ ID NO: 3556681 - DNA, 25 bp, Homo sapien
ccatgggcacacctagtagaggaca

SEQ ID NO: 3556682 - DNA, 25 bp, Homo sapien
ccaccacagacgtaggcagagtgaa

SEQ ID NO: 3556683 - DNA, 25 bp, Homo sapien
ctgggtgggtctctactatgggtct

SEQ ID NO: 3556684 - DNA, 25 bp, Homo sapien
gatgacctgcaagcttcctatacgg

SEQ ID NO: 3556685 - DNA, 25 bp, Homo sapien
gaaagctcatggcactagaaacggg

SEQ ID NO: 3556686 - DNA, 25 bp, Homo sapien
gagctgaagcccgtgagaagaacct

SEQ ID NO: 3556687 - DNA, 25 bp, Homo sapien
caccaggtgaagtggagtcaaggcc

SEQ ID NO: 3556688 - DNA, 25 bp, Homo sapien
caagatccacatgagtcaccaggga

SEQ ID NO: 3556689 - DNA, 25 bp, Homo sapien
gagcatggaatgtcgccctacactg

SEQ ID NO: 3556690 - DNA, 25 bp, Homo sapien
gaggacagttagcataccccagata

SEQ ID NO: 3556691 - DNA, 25 bp, Homo sapien
tgcaggacagatgctaccaagatcc

SEQ ID NO: 3556692 - DNA, 25 bp, Homo sapien
agaggcaggtgtgggtcagagacaa

SEQ ID NO: 3556693 - DNA, 25 bp, Homo sapien
ggtcagagacaaggccaggtgaggg

SEQ ID NO: 3556694 - DNA, 25 bp, Homo sapien
cagcttctccagacagaggcaggtg

SEQ ID NO: 3556695 - DNA, 25 bp, Homo sapien
ggtgaggggtcaggaagcacagggc

SEQ ID NO: 3556696 - DNA, 25 bp, Homo sapien
aagtggtggccatcatgagtccgta

SEQ ID NO: 3556697 - DNA, 25 bp, Homo sapien
gacatgaaacgcagggacacatcct

SEQ ID NO: 3556698 - DNA, 25 bp, Homo sapien
ccgtaggcccgctgggacatgaaac

SEQ ID NO: 3556699 - DNA, 25 bp, Homo sapien
tacatggagccatcgtagctcagga

SEQ ID NO: 3556700 - DNA, 25 bp, Homo sapien
tcggctacgcccatctatgaagagg

SEQ ID NO: 3556701 - DNA, 25 bp, Homo sapien
gaagcggttccagccttctcgacag

SEQ ID NO: 3556702 - DNA, 25 bp, Homo sapien
cggtcccgatgcagtcacagatgaa

SEQ ID NO: 3556703 - DNA, 25 bp, Homo sapien
tccagtggccaagaacggcgtgctg

SEQ ID NO: 3556704 - DNA, 25 bp, Homo sapien
tcctcacagcggaatgacaagtccc

SEQ ID NO: 3556705 - DNA, 25 bp, Homo sapien
cagaagatagaggtggccgtccaat

SEQ ID NO: 3556706 - DNA, 25 bp, Homo sapien
aaggcctcgggactctcaaaggtca

SEQ ID NO: 3556707 - DNA, 25 bp, Homo sapien
tccatggcaaagtagtcggcccgct

SEQ ID NO: 3556708 - DNA, 25 bp, Homo sapien
aggatcccgtccaccgagatggtca

SEQ ID NO: 3556709 - DNA, 25 bp, Homo sapien
ggtgtaatcctcctgcgtgtagcct

SEQ ID NO: 3556710 - DNA, 25 bp, Homo sapien
tgtagcctgtggtggtcaggatccc

SEQ ID NO: 3556711 - DNA, 25 bp, Homo sapien
gctgcccccaatgtagaagaagtca

SEQ ID NO: 3556712 - DNA, 25 bp, Homo sapien
taggagcccggctgcaacaggtagt

SEQ ID NO: 3556713 - DNA, 25 bp, Homo sapien
agcccggctgcaacaggtagtggca

SEQ ID NO: 3556714 - DNA, 25 bp, Homo sapien
gaaaagcagcaggattagtcactgc

SEQ ID NO: 3556715 - DNA, 25 bp, Homo sapien
cagcaggattagtcactgcgttctc

SEQ ID NO: 3556716 - DNA, 25 bp, Homo sapien
tgccattgacgggttccacaagggc

SEQ ID NO: 3556717 - DNA, 25 bp, Homo sapien
tatgcagcatcaggccgttgcgttg

SEQ ID NO: 3556718 - DNA, 25 bp, Homo sapien
gacaggttgacgtagtcggccgact

SEQ ID NO: 3556719 - DNA, 25 bp, Homo sapien
tgtgacaggtcgtagcagaagaact

SEQ ID NO: 3556720 - DNA, 25 bp, Homo sapien
tggatgccgtggtgtggggaaacgg

SEQ ID NO: 3556721 - DNA, 25 bp, Homo sapien
tgccgtggtgtggggaaacgggaga

SEQ ID NO: 3556722 - DNA, 25 bp, Homo sapien
gatgccgtggtgtggggaaacggga

SEQ ID NO: 3556723 - DNA, 25 bp, Homo sapien
ctggatgccgtggtgtggggaaacg

SEQ ID NO: 3556724 - DNA, 25 bp, Homo sapien
aatggggcagggtacaccagtgctt

SEQ ID NO: 3556725 - DNA, 25 bp, Homo sapien
gcagggtacaccagtgcttccctct

SEQ ID NO: 3556726 - DNA, 25 bp, Homo sapien
gggcagggtacaccagtgcttccct

SEQ ID NO: 3556727 - DNA, 25 bp, Homo sapien
tctcccctccagcaacgcaggcact

SEQ ID NO: 3556728 - DNA, 25 bp, Homo sapien
tgcagctggcaaggcccggtttcct

SEQ ID NO: 3556729 - DNA, 25 bp, Homo sapien
ttggctggtgcacatcgccggctcc

SEQ ID NO: 3556730 - DNA, 25 bp, Homo sapien
cttttgttggctggtgcacatcgcc

SEQ ID NO: 3556731 - DNA, 25 bp, Homo sapien
tgttggctggtgcacatcgccggct

SEQ ID NO: 3556732 - DNA, 25 bp, Homo sapien
tttgttggctggtgcacatcgccgg

SEQ ID NO: 3556733 - DNA, 25 bp, Homo sapien
cttcgctgtttaacgtcaggtgagc

SEQ ID NO: 3556734 - DNA, 25 bp, Homo sapien
ctgtttaacgtcaggtgagccggac

SEQ ID NO: 3556735 - DNA, 25 bp, Homo sapien
gctgtttaacgtcaggtgagccgga

SEQ ID NO: 3556736 - DNA, 25 bp, Homo sapien
tcgctgtttaacgtcaggtgagccg

SEQ ID NO: 3556737 - DNA, 25 bp, Homo sapien
agccagcgaggttcggagaagacgg

SEQ ID NO: 3556738 - DNA, 25 bp, Homo sapien
gcgaggttcggagaagacggaggca

SEQ ID NO: 3556739 - DNA, 25 bp, Homo sapien
agcgaggttcggagaagacggaggc

SEQ ID NO: 3556740 - DNA, 25 bp, Homo sapien
gccagcgaggttcggagaagacgga

SEQ ID NO: 3556741 - DNA, 25 bp, Homo sapien
tgacatctaaactccaccactgaag

SEQ ID NO: 3556742 - DNA, 25 bp, Homo sapien
taccagtcctgtatcaccatgtgtc

SEQ ID NO: 3556743 - DNA, 25 bp, Homo sapien
ccagcagtgcaattgctcgtccaac

SEQ ID NO: 3556744 - DNA, 25 bp, Homo sapien
tattcccctgtgcttagcaaagccc

SEQ ID NO: 3556745 - DNA, 25 bp, Homo sapien
tgcccggccagccgctctgtccggg

SEQ ID NO: 3556746 - DNA, 25 bp, Homo sapien
ccctctgcccggccagccgctctgt

SEQ ID NO: 3556747 - DNA, 25 bp, Homo sapien
ctctgcccggccagccgctctgtcc

SEQ ID NO: 3556748 - DNA, 25 bp, Homo sapien
tctgcccggccagccgctctgtccg

SEQ ID NO: 3556749 - DNA, 25 bp, Homo sapien
atgctccttgggagtcatcaccact

SEQ ID NO: 3556750 - DNA, 25 bp, Homo sapien
agcatgctccttgggagtcatcacc

SEQ ID NO: 3556751 - DNA, 25 bp, Homo sapien
gcagcatgctccttgggagtcatca

SEQ ID NO: 3556752 - DNA, 25 bp, Homo sapien
gaaggcagcatgctccttgggagtc

SEQ ID NO: 3556753 - DNA, 25 bp, Homo sapien
cgtagctcgagctttccctccatca

SEQ ID NO: 3556754 - DNA, 25 bp, Homo sapien
tccctccatcaaatcagaggatgat

SEQ ID NO: 3556755 - DNA, 25 bp, Homo sapien
ggatgattcatcctgttttcttagg

SEQ ID NO: 3556756 - DNA, 25 bp, Homo sapien
gaggaaccagaggatcaaattaagg

SEQ ID NO: 3556757 - DNA, 25 bp, Homo sapien
acatgcacacgctccctcaaaagcc

SEQ ID NO: 3556758 - DNA, 25 bp, Homo sapien
gccacaggacacctatccccaaagc

SEQ ID NO: 3556759 - DNA, 25 bp, Homo sapien
caggacacctatccccaaagcagtg

SEQ ID NO: 3556760 - DNA, 25 bp, Homo sapien
tgcacacgctccctcaaaagcctct

SEQ ID NO: 3556761 - DNA, 25 bp, Homo sapien
cccgcgcccaggcaccgggcggccg

SEQ ID NO: 3556762 - DNA, 25 bp, Homo sapien
cgcccaggcaccgggcggccgctcc

SEQ ID NO: 3556763 - DNA, 25 bp, Homo sapien
ccaggcaccgggcggccgctccccg

SEQ ID NO: 3556764 - DNA, 25 bp, Homo sapien
cgcgcccaggcaccgggcggccgct

SEQ ID NO: 3556765 - DNA, 25 bp, Homo sapien
ttcgctgcagaacttgccgccgaag

SEQ ID NO: 3556766 - DNA, 25 bp, Homo sapien
ctcggcgcacgaaagcgtgaagcgc

SEQ ID NO: 3556767 - DNA, 25 bp, Homo sapien
ggcggctcgtacttgacggtgctca

SEQ ID NO: 3556768 - DNA, 25 bp, Homo sapien
acggtgctcagcgtaagcgccgaga

SEQ ID NO: 3556769 - DNA, 25 bp, Homo sapien
gcggcggtgtcggccgccaccggct

SEQ ID NO: 3556770 - DNA, 25 bp, Homo sapien
ggcggcggtgtcggccgccaccggc

SEQ ID NO: 3556771 - DNA, 25 bp, Homo sapien
cggcggtgtcggccgccaccggctc

SEQ ID NO: 3556772 - DNA, 25 bp, Homo sapien
aggctcacagtgccatgggcccggc

SEQ ID NO: 3556773 - DNA, 25 bp, Homo sapien
tcaggcttcagagccgcgggcgcat

SEQ ID NO: 3556774 - DNA, 25 bp, Homo sapien
gcgcagaggcccagatgccggcttc

SEQ ID NO: 3556775 - DNA, 25 bp, Homo sapien
ccgccgcgggctccgacagaagagc

SEQ ID NO: 3556776 - DNA, 25 bp, Homo sapien
gatgccagcatccctagagccatcc

SEQ ID NO: 3556777 - DNA, 25 bp, Homo sapien
agatgccagcatccctagagccatc

SEQ ID NO: 3556778 - DNA, 25 bp, Homo sapien
tcagatgccagcatccctagagcca

SEQ ID NO: 3556779 - DNA, 25 bp, Homo sapien
cagatgccagcatccctagagccat

SEQ ID NO: 3556780 - DNA, 25 bp, Homo sapien
ggtagcagagctacagggccgcccc

SEQ ID NO: 3556781 - DNA, 25 bp, Homo sapien
cgtctccgacgggtggcagagccag

SEQ ID NO: 3556782 - DNA, 25 bp, Homo sapien
ccagggctagcggtgtctgccgcct

SEQ ID NO: 3556783 - DNA, 25 bp, Homo sapien
tctcggggcgccagaagctggaggg

SEQ ID NO: 3556784 - DNA, 25 bp, Homo sapien
gcctctccgaggaggatgctccgcg

SEQ ID NO: 3556785 - DNA, 25 bp, Homo sapien
ggtgcctctccgaggaggatgctcc

SEQ ID NO: 3556786 - DNA, 25 bp, Homo sapien
tgcctctccgaggaggatgctccgc

SEQ ID NO: 3556787 - DNA, 25 bp, Homo sapien
gaggatgctccgcgagtcagggcgg

SEQ ID NO: 3556788 - DNA, 25 bp, Homo sapien
gctgggacaagccgaaggagaggct

SEQ ID NO: 3556789 - DNA, 25 bp, Homo sapien
gggacgccgcgagagcagggctgat

SEQ ID NO: 3556790 - DNA, 25 bp, Homo sapien
gctgtggaccccgacttgggacgcc

SEQ ID NO: 3556791 - DNA, 25 bp, Homo sapien
acggccagcaggtcttcgcgcagcg

SEQ ID NO: 3556792 - DNA, 25 bp, Homo sapien
tttattccatctggaaaatacaaat

SEQ ID NO: 3556793 - DNA, 25 bp, Homo sapien
aatattcacaagagtctgtacaacc

SEQ ID NO: 3556794 - DNA, 25 bp, Homo sapien
agctgcatgccaccctcatatccca

SEQ ID NO: 3556795 - DNA, 25 bp, Homo sapien
tacaaccttagggacaccagccctg

SEQ ID NO: 3556796 - DNA, 25 bp, Homo sapien
gaaaaacaggttgtgaggaagacac

SEQ ID NO: 3556797 - DNA, 25 bp, Homo sapien
ctaacaacaaggtagtagcccacct

SEQ ID NO: 3556798 - DNA, 25 bp, Homo sapien
agcacccatttccctgatactcccc

SEQ ID NO: 3556799 - DNA, 25 bp, Homo sapien
ccatttccctgatactccccagctc

SEQ ID NO: 3556800 - DNA, 25 bp, Homo sapien
ccaccgtctgtacctcctcctcacg

SEQ ID NO: 3556801 - DNA, 25 bp, Homo sapien
ttacaagtggatgtcaaacacccca

SEQ ID NO: 3556802 - DNA, 25 bp, Homo sapien
acaagtggatgtcaaacaccccatc

SEQ ID NO: 3556803 - DNA, 25 bp, Homo sapien
ctccaccgtctgtacctcctcctca

SEQ ID NO: 3556804 - DNA, 25 bp, Homo sapien
ttttttgaggacttatgccaaccca

SEQ ID NO: 3556805 - DNA, 25 bp, Homo sapien
aacccaaacagttgtgatcaactac

SEQ ID NO: 3556806 - DNA, 25 bp, Homo sapien
ggacttatgccaacccaaacagttg

SEQ ID NO: 3556807 - DNA, 25 bp, Homo sapien
tgccaacccaaacagttgtgatcaa

SEQ ID NO: 3556808 - DNA, 25 bp, Homo sapien
gcaaaataatcatttggccagttgt

SEQ ID NO: 3556809 - DNA, 25 bp, Homo sapien
tttaacatagttgttcggactgttc

SEQ ID NO: 3556810 - DNA, 25 bp, Homo sapien
cttagaccccagtttaacatagttg

SEQ ID NO: 3556811 - DNA, 25 bp, Homo sapien
ggccagttgtcattcagcaaactga

SEQ ID NO: 3556812 - DNA, 25 bp, Homo sapien
taaaaccatcaaataccccaagaga

SEQ ID NO: 3556813 - DNA, 25 bp, Homo sapien
ggcaagggactttccccagaagagc

SEQ ID NO: 3556814 - DNA, 25 bp, Homo sapien
gagggtgagggtgcagacccctcca

SEQ ID NO: 3556815 - DNA, 25 bp, Homo sapien
gagggtgcagacccctccaggctca

SEQ ID NO: 3556816 - DNA, 25 bp, Homo sapien
agagaagctgaaggcgcggtgatgg

SEQ ID NO: 3556817 - DNA, 25 bp, Homo sapien
ctgaaggcgcggtgatggtggctgt

SEQ ID NO: 3556818 - DNA, 25 bp, Homo sapien
tgcttgtggcagttcactccacagg

SEQ ID NO: 3556819 - DNA, 25 bp, Homo sapien
aactgacaggcgatccttgcactgc

SEQ ID NO: 3556820 - DNA, 25 bp, Homo sapien
tgcgccgacactcaactgacaggcg

SEQ ID NO: 3556821 - DNA, 25 bp, Homo sapien
tccttgcactgcttgtggcagttca

SEQ ID NO: 3556822 - DNA, 25 bp, Homo sapien
aggccctgcttgtagatgcccagga

SEQ ID NO: 3556823 - DNA, 25 bp, Homo sapien
ttgaggccctgcttgtagatgccca

SEQ ID NO: 3556824 - DNA, 25 bp, Homo sapien
ctcggcatttgaggccctgcttgta

SEQ ID NO: 3556825 - DNA, 25 bp, Homo sapien
gcatttgaggccctgcttgtagatg

SEQ ID NO: 3556826 - DNA, 25 bp, Homo sapien
gctggagcgcaggaaataggaaacc

SEQ ID NO: 3556827 - DNA, 25 bp, Homo sapien
gaagttgtgtacgaagcccatgcgc

SEQ ID NO: 3556828 - DNA, 25 bp, Homo sapien
ggagcgcaggaaataggaaaccatc

SEQ ID NO: 3556829 - DNA, 25 bp, Homo sapien
gcgcaaggagttgctctcctggaag

SEQ ID NO: 3556830 - DNA, 25 bp, Homo sapien
gaaatggaaacacccaagttccaga

SEQ ID NO: 3556831 - DNA, 25 bp, Homo sapien
tatatcaacaattgctgtaaatgca

SEQ ID NO: 3556832 - DNA, 25 bp, Homo sapien
ggagctttacaatgaagtggtgagc

SEQ ID NO: 3556833 - DNA, 25 bp, Homo sapien
caagtacctagatgctgcctaaaga

SEQ ID NO: 3556834 - DNA, 25 bp, Homo sapien
aagggaagttcccacggatgatctg

SEQ ID NO: 3556835 - DNA, 25 bp, Homo sapien
cttcctgtgagatgtggccatcccc

SEQ ID NO: 3556836 - DNA, 25 bp, Homo sapien
catcgacgtcaaagttccggaacac

SEQ ID NO: 3556837 - DNA, 25 bp, Homo sapien
tccccaaaggcgctgaggtaaggga

SEQ ID NO: 3556838 - DNA, 25 bp, Homo sapien
caggacactcgtgctggcttccagg

SEQ ID NO: 3556839 - DNA, 25 bp, Homo sapien
tcttgaacaggacactcgtgctggc

SEQ ID NO: 3556840 - DNA, 25 bp, Homo sapien
gtgctgggtcttgaacaggacactc

SEQ ID NO: 3556841 - DNA, 25 bp, Homo sapien
aggccctgtgactcctaggggctga

SEQ ID NO: 3556842 - DNA, 25 bp, Homo sapien
ggtggtggggtgcaactcgtggggc

SEQ ID NO: 3556843 - DNA, 25 bp, Homo sapien
cgagggcctgatccagcttgggttt

SEQ ID NO: 3556844 - DNA, 25 bp, Homo sapien
cacgagggcctgatccagcttgggt

SEQ ID NO: 3556845 - DNA, 25 bp, Homo sapien
gggtgcaactcgtggggctggttgg

SEQ ID NO: 3556846 - DNA, 25 bp, Homo sapien
agctcatcctccgtctgatactgat

SEQ ID NO: 3556847 - DNA, 25 bp, Homo sapien
ctggtacagctcatcctccgtctga

SEQ ID NO: 3556848 - DNA, 25 bp, Homo sapien
catcctccgtctgatactgatccag

SEQ ID NO: 3556849 - DNA, 25 bp, Homo sapien
acttggagcgcggctcccgctgcag

SEQ ID NO: 3556850 - DNA, 25 bp, Homo sapien
caaagcctggcttagaacacagcac

SEQ ID NO: 3556851 - DNA, 25 bp, Homo sapien
cccaagaccaagtgtaaagccaagc

SEQ ID NO: 3556852 - DNA, 25 bp, Homo sapien
aaaggtcgacctagaggccacagct

SEQ ID NO: 3556853 - DNA, 25 bp, Homo sapien
tagaacacagcccattgccagaact

SEQ ID NO: 3556854 - DNA, 25 bp, Homo sapien
ttgaggtgcacacccaggatcggga

SEQ ID NO: 3556855 - DNA, 25 bp, Homo sapien
gccgacgccggtagttgccatagtt

SEQ ID NO: 3556856 - DNA, 25 bp, Homo sapien
ctgggtccagccagtcaggcagtgc

SEQ ID NO: 3556857 - DNA, 25 bp, Homo sapien
catcttggccccgttgagccgggtc

SEQ ID NO: 3556858 - DNA, 25 bp, Homo sapien
atgaattcaaggcaatactcactgc

SEQ ID NO: 3556859 - DNA, 25 bp, Homo sapien
agaggagtcatacccccacaactat

SEQ ID NO: 3556860 - DNA, 25 bp, Homo sapien
tcagggacaggtgaaagagtaaaaa

SEQ ID NO: 3556861 - DNA, 25 bp, Homo sapien
gggacaaaggacagaggagtcatac

SEQ ID NO: 3556862 - DNA, 25 bp, Homo sapien
tctccttgaggcgggagatggagct

SEQ ID NO: 3556863 - DNA, 25 bp, Homo sapien
cagggctaacgtggctgtgggtctc

SEQ ID NO: 3556864 - DNA, 25 bp, Homo sapien
tggctgtgggtctccttgaggcggg

SEQ ID NO: 3556865 - DNA, 25 bp, Homo sapien
tcagggctaacgtggctgtgggtct

SEQ ID NO: 3556866 - DNA, 25 bp, Homo sapien
tccgccacgtggacaaagtgtgtga

SEQ ID NO: 3556867 - DNA, 25 bp, Homo sapien
cccactgtgagacgctgttgaagag

SEQ ID NO: 3556868 - DNA, 25 bp, Homo sapien
cagtgcagccatgagtcacgaaact

SEQ ID NO: 3556869 - DNA, 25 bp, Homo sapien
ccaggacggggttgtccacagtgca

SEQ ID NO: 3556870 - DNA, 25 bp, Homo sapien
gatcttgcagaaggagcgatactcc

SEQ ID NO: 3556871 - DNA, 25 bp, Homo sapien
ttctgtcccacagggttccgctgag

SEQ ID NO: 3556872 - DNA, 25 bp, Homo sapien
agtaggtgagatgctccgccagctc

SEQ ID NO: 3556873 - DNA, 25 bp, Homo sapien
ggacatcttgcgctttttctgtccc

SEQ ID NO: 3556874 - DNA, 25 bp, Homo sapien
tttaagcgagagagcaacatgaccc

SEQ ID NO: 3556875 - DNA, 25 bp, Homo sapien
gatgagtaagacacggttcctgccc

SEQ ID NO: 3556876 - DNA, 25 bp, Homo sapien
tgaactgagtcttggtaacacggag

SEQ ID NO: 3556877 - DNA, 25 bp, Homo sapien
tatgaacaacgtactctgtgccagg

SEQ ID NO: 3556878 - DNA, 25 bp, Homo sapien
tataggatactgagtgcccccccag

SEQ ID NO: 3556879 - DNA, 25 bp, Homo sapien
agcacagatggtataggatactgag

SEQ ID NO: 3556880 - DNA, 25 bp, Homo sapien
gcacagatggtataggatactgagt

SEQ ID NO: 3556881 - DNA, 25 bp, Homo sapien
atggtataggatactgagtgccccc

SEQ ID NO: 3556882 - DNA, 25 bp, Homo sapien
ttgatctgctcagccaactccgggt

SEQ ID NO: 3556883 - DNA, 25 bp, Homo sapien
ctgtgccgtcggttcccttcttggt

SEQ ID NO: 3556884 - DNA, 25 bp, Homo sapien
acgctgtctatgtcgattaggctgc

SEQ ID NO: 3556885 - DNA, 25 bp, Homo sapien
atctgctcagccaactccgggttca

SEQ ID NO: 3556886 - DNA, 25 bp, Homo sapien
gtggcacgttttcacctgcagggaa

SEQ ID NO: 3556887 - DNA, 25 bp, Homo sapien
caggtggcacgttttcacctgcagg

SEQ ID NO: 3556888 - DNA, 25 bp, Homo sapien
ctgaccaggtggcacgttttcacct

SEQ ID NO: 3556889 - DNA, 25 bp, Homo sapien
ggcacgttttcacctgcagggaatt

SEQ ID NO: 3556890 - DNA, 25 bp, Homo sapien
ggccttggcaaggccggcgaaggat

SEQ ID NO: 3556891 - DNA, 25 bp, Homo sapien
catgggctccgacggcgggggcctt

SEQ ID NO: 3556892 - DNA, 25 bp, Homo sapien
cgcatgggctccgacggcgggggcc

SEQ ID NO: 3556893 - DNA, 25 bp, Homo sapien
tgcgcatgggctccgacggcggggg

SEQ ID NO: 3556894 - DNA, 25 bp, Homo sapien
catcatgaggaacatgcgcaccagc

SEQ ID NO: 3556895 - DNA, 25 bp, Homo sapien
ctgcgggtcccgcaccttcccggag

SEQ ID NO: 3556896 - DNA, 25 bp, Homo sapien
cagctgcgggtcccgcaccttcccg

SEQ ID NO: 3556897 - DNA, 25 bp, Homo sapien
gcatcatgaggaacatgcgcaccag

SEQ ID NO: 3556898 - DNA, 25 bp, Homo sapien
ccttgtccaggtccagggtgcctgc

SEQ ID NO: 3556899 - DNA, 25 bp, Homo sapien
agctcctccaccgtgcagcccttgt

SEQ ID NO: 3556900 - DNA, 25 bp, Homo sapien
cagcccttgtccaggtccagggtgc

SEQ ID NO: 3556901 - DNA, 25 bp, Homo sapien
gcccttgtccaggtccagggtgcct

SEQ ID NO: 3556902 - DNA, 25 bp, Homo sapien
tgcgctccgggagcctcccaccggg

SEQ ID NO: 3556903 - DNA, 25 bp, Homo sapien
ctccgggagcctcccaccgggctcg

SEQ ID NO: 3556904 - DNA, 25 bp, Homo sapien
gagcctcccaccgggctcggaccga

SEQ ID NO: 3556905 - DNA, 25 bp, Homo sapien
gctgcgctccgggagcctcccaccg

SEQ ID NO: 3556906 - DNA, 25 bp, Homo sapien
ggacgaaccaagatcccaggactgg

SEQ ID NO: 3556907 - DNA, 25 bp, Homo sapien
tgcaacccgccagttgggaaacgga

SEQ ID NO: 3556908 - DNA, 25 bp, Homo sapien
ccattagcaactccggtcactggcg

SEQ ID NO: 3556909 - DNA, 25 bp, Homo sapien
cacccaagttattcgtcggaggccg

SEQ ID NO: 3556910 - DNA, 25 bp, Homo sapien
ccagctcgtccaccccagaatgcaa

SEQ ID NO: 3556911 - DNA, 25 bp, Homo sapien
cagctcgtccaccccagaatgcaaa

SEQ ID NO: 3556912 - DNA, 25 bp, Homo sapien
agctcgtccaccccagaatgcaaac

SEQ ID NO: 3556913 - DNA, 25 bp, Homo sapien
gctgttcacttgagccaggccagcc

SEQ ID NO: 3556914 - DNA, 25 bp, Homo sapien
cgcggacgaggtcgcctcctggacg

SEQ ID NO: 3556915 - DNA, 25 bp, Homo sapien
ctcctggacgtgctgttcacttgag

SEQ ID NO: 3556916 - DNA, 25 bp, Homo sapien
ggccagccttgagtcccgcggccac

SEQ ID NO: 3556917 - DNA, 25 bp, Homo sapien
tcaggcggacttttcctaagagcca

SEQ ID NO: 3556918 - DNA, 25 bp, Homo sapien
gaccttgagaatcacttggcctctg

SEQ ID NO: 3556919 - DNA, 25 bp, Homo sapien
tgtgcacacacgcaaggcagtgcct

SEQ ID NO: 3556920 - DNA, 25 bp, Homo sapien
taccgcttcctcgtgtgaccttgag

SEQ ID NO: 3556921 - DNA, 25 bp, Homo sapien
tcttgggacctgccgcaaggagccc

SEQ ID NO: 3556922 - DNA, 25 bp, Homo sapien
gagcccgcaccggcctggccgaccc

SEQ ID NO: 3556923 - DNA, 25 bp, Homo sapien
gcccgcaccggcctggccgacccca

SEQ ID NO: 3556924 - DNA, 25 bp, Homo sapien
tgggacctgccgcaaggagcccgca

SEQ ID NO: 3556925 - DNA, 25 bp, Homo sapien
tcccgcccgctctccacgccgcggc

SEQ ID NO: 3556926 - DNA, 25 bp, Homo sapien
ccgcccgccggcctcgctgcggctg

SEQ ID NO: 3556927 - DNA, 25 bp, Homo sapien
cgcccgctctccacgccgcggcccc

SEQ ID NO: 3556928 - DNA, 25 bp, Homo sapien
tgcggctgcggctcccgcccgctct

SEQ ID NO: 3556929 - DNA, 25 bp, Homo sapien
gctgcgccacccccaccgggggctc

SEQ ID NO: 3556930 - DNA, 25 bp, Homo sapien
cgccggctgcgccacccccaccggg

SEQ ID NO: 3556931 - DNA, 25 bp, Homo sapien
gacagctggtccttgagatagtctg

SEQ ID NO: 3556932 - DNA, 25 bp, Homo sapien
gggctaggacaagatgggaatattt

SEQ ID NO: 3556933 - DNA, 25 bp, Homo sapien
ggaccgggcgtcttcctgcaggcag

SEQ ID NO: 3556934 - DNA, 25 bp, Homo sapien
gggagcgaggaatgaaatcgtggct

SEQ ID NO: 3556935 - DNA, 25 bp, Homo sapien
ccttagtcacgctggacactgggac

SEQ ID NO: 3556936 - DNA, 25 bp, Homo sapien
agtgtgacagactcaagggctggtt

SEQ ID NO: 3556937 - DNA, 25 bp, Homo sapien
tggtcagaccccataaataggaggg

SEQ ID NO: 3556938 - DNA, 25 bp, Homo sapien
gcttagagatctaactccagtaccc

SEQ ID NO: 3556939 - DNA, 25 bp, Homo sapien
catactgggcaatggtgcggtcact

SEQ ID NO: 3556940 - DNA, 25 bp, Homo sapien
gaacttgccagaggtggctatgttc

SEQ ID NO: 3556941 - DNA, 25 bp, Homo sapien
tcagatggcctcatccggggctggc

SEQ ID NO: 3556942 - DNA, 25 bp, Homo sapien
tatgttccggatcaccatccgcgtc

SEQ ID NO: 3556943 - DNA, 25 bp, Homo sapien
tttaatgtagtcttcataatctgcg

SEQ ID NO: 3556944 - DNA, 25 bp, Homo sapien
tctcctggcatttaatgtagtcttc

SEQ ID NO: 3556945 - DNA, 25 bp, Homo sapien
ttcataatctgcgaagactttaaac

SEQ ID NO: 3556946 - DNA, 25 bp, Homo sapien
tgtagtcttcataatctgcgaagac

SEQ ID NO: 3556947 - DNA, 25 bp, Homo sapien
gcgatcgtagtactcctgggcattg

SEQ ID NO: 3556948 - DNA, 25 bp, Homo sapien
gacaatgtccttgaacaggtcgggc

SEQ ID NO: 3556949 - DNA, 25 bp, Homo sapien
gctcaatgacctgccgaagctcagg

SEQ ID NO: 3556950 - DNA, 25 bp, Homo sapien
tcatggtgcatgagcatattgacaa

SEQ ID NO: 3556951 - DNA, 25 bp, Homo sapien
tgaggcccggaggatacagaaagct

SEQ ID NO: 3556952 - DNA, 25 bp, Homo sapien
caggcctcgttctgagcatgcggga

SEQ ID NO: 3556953 - DNA, 25 bp, Homo sapien
gcaagagcagctaacaggtacaacc

SEQ ID NO: 3556954 - DNA, 25 bp, Homo sapien
agctaagtgttagagccaaggcccc

SEQ ID NO: 3556955 - DNA, 25 bp, Homo sapien
gtctttccagacgtgccgcttgctc

SEQ ID NO: 3556956 - DNA, 25 bp, Homo sapien
cacctgggtgtcttttgcccgtgaa

SEQ ID NO: 3556957 - DNA, 25 bp, Homo sapien
taagcgccctctaaagtttcccaga

SEQ ID NO: 3556958 - DNA, 25 bp, Homo sapien
tgctggccatgaccaagaccttgct

SEQ ID NO: 3556959 - DNA, 25 bp, Homo sapien
ctgaggcttcagtgcccgcagtgga

SEQ ID NO: 3556960 - DNA, 25 bp, Homo sapien
acattggccccgtccatggtgccaa

SEQ ID NO: 3556961 - DNA, 25 bp, Homo sapien
tggagatctgctcagagaggtctgc

SEQ ID NO: 3556962 - DNA, 25 bp, Homo sapien
tggtgccaatggtcagagccccgtt

SEQ ID NO: 3556963 - DNA, 25 bp, Homo sapien
tgaactagtcagagcctccctaggg

SEQ ID NO: 3556964 - DNA, 25 bp, Homo sapien
tatcccaggaagagacgactgatac

SEQ ID NO: 3556965 - DNA, 25 bp, Homo sapien
ggtttaagcattgccctctccagat

SEQ ID NO: 3556966 - DNA, 25 bp, Homo sapien
tctttcaagtacaagtatcccagga

SEQ ID NO: 3556967 - DNA, 25 bp, Homo sapien
tcatggttgaccacatccccgatgg

SEQ ID NO: 3556968 - DNA, 25 bp, Homo sapien
cggtcacccactgccgggtcatggt

SEQ ID NO: 3556969 - DNA, 25 bp, Homo sapien
tcggccagtgagactcggtagttct

SEQ ID NO: 3556970 - DNA, 25 bp, Homo sapien
gctgtgacgagtctgatgatcatct

SEQ ID NO: 3556971 - DNA, 25 bp, Homo sapien
gaggcacaaaaaacttattgggctc

SEQ ID NO: 3556972 - DNA, 25 bp, Homo sapien
tccaatcatcacagtccgaggcaca

SEQ ID NO: 3556973 - DNA, 25 bp, Homo sapien
tcatcacagtccgaggcacaaaaaa

SEQ ID NO: 3556974 - DNA, 25 bp, Homo sapien
agtccgaggcacaaaaaacttattg

SEQ ID NO: 3556975 - DNA, 25 bp, Homo sapien
tacagggtgatgacatggaggcagt

SEQ ID NO: 3556976 - DNA, 25 bp, Homo sapien
cagttgaggagctgtcgtttatatt

SEQ ID NO: 3556977 - DNA, 25 bp, Homo sapien
gatgtggactttgtattccctctct

SEQ ID NO: 3556978 - DNA, 25 bp, Homo sapien
tcgtgaatccgcttcacctggatgt

SEQ ID NO: 3556979 - DNA, 25 bp, Homo sapien
atcatccacaaaggagagcagtttg

SEQ ID NO: 3556980 - DNA, 25 bp, Homo sapien
cacaaaggagagcagtttgcgcagc

SEQ ID NO: 3556981 - DNA, 25 bp, Homo sapien
gccacatcccgaatgaaagcttcat

SEQ ID NO: 3556982 - DNA, 25 bp, Homo sapien
ggccacatcccgaatgaaagcttca

SEQ ID NO: 3556983 - DNA, 25 bp, Homo sapien
cttattctggaacttatgaggctcc

SEQ ID NO: 3556984 - DNA, 25 bp, Homo sapien
ttacacagaaccagccagcgccgag

SEQ ID NO: 3556985 - DNA, 25 bp, Homo sapien
ctggaacttatgaggctccagctca

SEQ ID NO: 3556986 - DNA, 25 bp, Homo sapien
tgccagcccggggttacacagaacc

SEQ ID NO: 3556987 - DNA, 25 bp, Homo sapien
caggtgtgccatgttgatgcgcttc

SEQ ID NO: 3556988 - DNA, 25 bp, Homo sapien
atctcggagtggatgcgcgccacgc

SEQ ID NO: 3556989 - DNA, 25 bp, Homo sapien
gacatgcgccgcagccggtctacgt

SEQ ID NO: 3556990 - DNA, 25 bp, Homo sapien
ggtctacgtcccctgggaatgcggc

SEQ ID NO: 3556991 - DNA, 25 bp, Homo sapien
cgcggcagcagcgtctccaagaggt

SEQ ID NO: 3556992 - DNA, 25 bp, Homo sapien
gaagcgctggttgatctcgtagatg

SEQ ID NO: 3556993 - DNA, 25 bp, Homo sapien
taggcacaggtcctcactgtcacat

SEQ ID NO: 3556994 - DNA, 25 bp, Homo sapien
gtctccaagaggtgcaccggccagc

SEQ ID NO: 3556995 - DNA, 25 bp, Homo sapien
cagtccatccgttccaggtccacca

SEQ ID NO: 3556996 - DNA, 25 bp, Homo sapien
cccagtccatccgttccaggtccac

SEQ ID NO: 3556997 - DNA, 25 bp, Homo sapien
gaggggtgggtgtcattgagctgga

SEQ ID NO: 3556998 - DNA, 25 bp, Homo sapien
gggaggggtgggtgtcattgagctg

SEQ ID NO: 3556999 - DNA, 25 bp, Homo sapien
caaaccacattccatgctatggtca

SEQ ID NO: 3557000 - DNA, 25 bp, Homo sapien
tgggctccaaaccacattccatgct

SEQ ID NO: 3557001 - DNA, 25 bp, Homo sapien
ggtcagtctgggctccaaaccacat

SEQ ID NO: 3557002 - DNA, 25 bp, Homo sapien
agtctgggctccaaaccacattcca

SEQ ID NO: 3557003 - DNA, 25 bp, Homo sapien
agttcgtgcgcacgggatcacggca

SEQ ID NO: 3557004 - DNA, 25 bp, Homo sapien
aaggcatcgaagttcgtgcgcacgg

SEQ ID NO: 3557005 - DNA, 25 bp, Homo sapien
ggtggcagccaccacgaaatactcc

SEQ ID NO: 3557006 - DNA, 25 bp, Homo sapien
atctgggaaggcatcgaagttcgtg

SEQ ID NO: 3557007 - DNA, 25 bp, Homo sapien
cattggggtacaggacacgagagat

SEQ ID NO: 3557008 - DNA, 25 bp, Homo sapien
acgagagatgttctccgccaggttt

SEQ ID NO: 3557009 - DNA, 25 bp, Homo sapien
attatcattggggtacaggacacga

SEQ ID NO: 3557010 - DNA, 25 bp, Homo sapien
tatcattggggtacaggacacgaga

SEQ ID NO: 3557011 - DNA, 25 bp, Homo sapien
cacgggcgtatcgtagggcatggcc

SEQ ID NO: 3557012 - DNA, 25 bp, Homo sapien
cgcatggtgttgacaacattgttgc

SEQ ID NO: 3557013 - DNA, 25 bp, Homo sapien
gacaacattgttgcgatagccaggc

SEQ ID NO: 3557014 - DNA, 25 bp, Homo sapien
gatagccaggcacgggcgtatcgta

SEQ ID NO: 3557015 - DNA, 25 bp, Homo sapien
tggttttaggatccctctaacttgc

SEQ ID NO: 3557016 - DNA, 25 bp, Homo sapien
agccatactgtcacctcggccttct

SEQ ID NO: 3557017 - DNA, 25 bp, Homo sapien
aagccatactgtcacctcggccttc

SEQ ID NO: 3557018 - DNA, 25 bp, Homo sapien
ttttaggatccctctaacttgctgt

SEQ ID NO: 3557019 - DNA, 25 bp, Homo sapien
aagtgcacaggtagcgtgaactcgg

SEQ ID NO: 3557020 - DNA, 25 bp, Homo sapien
tgcacaggtagcgtgaactcgggcc

SEQ ID NO: 3557021 - DNA, 25 bp, Homo sapien
gcgtgaactcgggccgggccttctc

SEQ ID NO: 3557022 - DNA, 25 bp, Homo sapien
tagaagtgcacaggtagcgtgaact

SEQ ID NO: 3557023 - DNA, 25 bp, Homo sapien
atcccgtagccataggcggccaggc

SEQ ID NO: 3557024 - DNA, 25 bp, Homo sapien
aaactcatagcgaatcccgtagcca

SEQ ID NO: 3557025 - DNA, 25 bp, Homo sapien
ctcatagcgaatcccgtagccatag

SEQ ID NO: 3557026 - DNA, 25 bp, Homo sapien
tagcgaatcccgtagccataggcgg

SEQ ID NO: 3557027 - DNA, 25 bp, Homo sapien
cccccgttgcccagccccgcatcct

SEQ ID NO: 3557028 - DNA, 25 bp, Homo sapien
gcccccgttgcccagccccgcatcc

SEQ ID NO: 3557029 - DNA, 25 bp, Homo sapien
ggcccccgttgcccagccccgcatc

SEQ ID NO: 3557030 - DNA, 25 bp, Homo sapien
aggcccccgttgcccagccccgcat

SEQ ID NO: 3557031 - DNA, 25 bp, Homo sapien
ccatggtgttctgtagcgtccgtcc

SEQ ID NO: 3557032 - DNA, 25 bp, Homo sapien
tgtagcgtccgtcccatatagaact

SEQ ID NO: 3557033 - DNA, 25 bp, Homo sapien
gaactctaaagacaggtagtagatc

SEQ ID NO: 3557034 - DNA, 25 bp, Homo sapien
cacaggcattctctaaggccaggtt

SEQ ID NO: 3557035 - DNA, 25 bp, Homo sapien
agtagtgctgctgcgtgcggatcca

SEQ ID NO: 3557036 - DNA, 25 bp, Homo sapien
tagtagtgctgctgcgtgcggatcc

SEQ ID NO: 3557037 - DNA, 25 bp, Homo sapien
tagtgctgctgcgtgcggatccagc

SEQ ID NO: 3557038 - DNA, 25 bp, Homo sapien
gaagaggtgcaactagcagaggcca

SEQ ID NO: 3557039 - DNA, 25 bp, Homo sapien
agagggatgctcaggttactggcca

SEQ ID NO: 3557040 - DNA, 25 bp, Homo sapien
cagtgtcccctgacggaagaggtgc

SEQ ID NO: 3557041 - DNA, 25 bp, Homo sapien
gaactgtagtcctataggccctcgg

SEQ ID NO: 3557042 - DNA, 25 bp, Homo sapien
gatgctgggggagcctactgtccct

SEQ ID NO: 3557043 - DNA, 25 bp, Homo sapien
ctggccccagcagccagatgctggg

SEQ ID NO: 3557044 - DNA, 25 bp, Homo sapien
gggggagcctactgtccctcagccg

SEQ ID NO: 3557045 - DNA, 25 bp, Homo sapien
agctggaaagcagcccaggccagtt

SEQ ID NO: 3557046 - DNA, 25 bp, Homo sapien
tggaacatccccgctttagcgcagt

SEQ ID NO: 3557047 - DNA, 25 bp, Homo sapien
aatggaacatccccgctttagcgca

SEQ ID NO: 3557048 - DNA, 25 bp, Homo sapien
ggaacatccccgctttagcgcagtg

SEQ ID NO: 3557049 - DNA, 25 bp, Homo sapien
caatggaacatccccgctttagcgc

SEQ ID NO: 3557050 - DNA, 25 bp, Homo sapien
aaaatttcacgatatggagccagcg

SEQ ID NO: 3557051 - DNA, 25 bp, Homo sapien
ccagtgaagagaacgcgcagtatac

SEQ ID NO: 3557052 - DNA, 25 bp, Homo sapien
tggagatgaacctaccctcggcaac

SEQ ID NO: 3557053 - DNA, 25 bp, Homo sapien
gatgggaatcccgaaacctggagat

SEQ ID NO: 3557054 - DNA, 25 bp, Homo sapien
gtccaccaggggcgttgctgaggct

SEQ ID NO: 3557055 - DNA, 25 bp, Homo sapien
tcaggctgctttgccgaaccatcct

SEQ ID NO: 3557056 - DNA, 25 bp, Homo sapien
tgtccaccaggggcgttgctgaggc

SEQ ID NO: 3557057 - DNA, 25 bp, Homo sapien
ggctgctttgccgaaccatcctgtc

SEQ ID NO: 3557058 - DNA, 25 bp, Homo sapien
tcaccaatgggcgcggaaagtcctc

SEQ ID NO: 3557059 - DNA, 25 bp, Homo sapien
accaatgggcgcggaaagtcctcac

SEQ ID NO: 3557060 - DNA, 25 bp, Homo sapien
caccaatgggcgcggaaagtcctca

SEQ ID NO: 3557061 - DNA, 25 bp, Homo sapien
tcatggctcgggccatcgccgccgc

SEQ ID NO: 3557062 - DNA, 25 bp, Homo sapien
gccatcgccgccgcggggagggatc

SEQ ID NO: 3557063 - DNA, 25 bp, Homo sapien
catggctcgggccatcgccgccgcg

SEQ ID NO: 3557064 - DNA, 25 bp, Homo sapien
cgggccatcgccgccgcggggaggg

SEQ ID NO: 3557065 - DNA, 25 bp, Homo sapien
agacaaagaagacactcgatgctac

SEQ ID NO: 3557066 - DNA, 25 bp, Homo sapien
gacaaagaagacactcgatgctacg

SEQ ID NO: 3557067 - DNA, 25 bp, Homo sapien
acaaagaagacactcgatgctacgg

SEQ ID NO: 3557068 - DNA, 25 bp, Homo sapien
aggagagcccaagctggcgccccta

SEQ ID NO: 3557069 - DNA, 25 bp, Homo sapien
ggcgccaggagagcccaagctggcg

SEQ ID NO: 3557070 - DNA, 25 bp, Homo sapien
tgcccgttcccaagcgaatcctcag

SEQ ID NO: 3557071 - DNA, 25 bp, Homo sapien
gtcgcttggcccagcccagtgcgtg

SEQ ID NO: 3557072 - DNA, 25 bp, Homo sapien
tgaggttcggcgtgtttaaacgaga

SEQ ID NO: 3557073 - DNA, 25 bp, Homo sapien
tccatatggtgaggttcggcgtgtt

SEQ ID NO: 3557074 - DNA, 25 bp, Homo sapien
gcacacacaatcacatgcgtgcgtc

SEQ ID NO: 3557075 - DNA, 25 bp, Homo sapien
gtgcgtcccaatgtctggctccata

SEQ ID NO: 3557076 - DNA, 25 bp, Homo sapien
aggcatcccgaagggcggcatgccc

SEQ ID NO: 3557077 - DNA, 25 bp, Homo sapien
tggaggcatcccgaagggcggcatg

SEQ ID NO: 3557078 - DNA, 25 bp, Homo sapien
gggagctggaggcatcccgaagggc

SEQ ID NO: 3557079 - DNA, 25 bp, Homo sapien
agctggaggcatcccgaagggcggc

SEQ ID NO: 3557080 - DNA, 25 bp, Homo sapien
catcatggtgacaaagttagaaggg

SEQ ID NO: 3557081 - DNA, 25 bp, Homo sapien
ggtgacaaagttagaagggtccatg

SEQ ID NO: 3557082 - DNA, 25 bp, Homo sapien
tgacaaagttagaagggtccatggg

SEQ ID NO: 3557083 - DNA, 25 bp, Homo sapien
catggtgacaaagttagaagggtcc

SEQ ID NO: 3557084 - DNA, 25 bp, Homo sapien
atgccggcggaaccaggcggtggag

SEQ ID NO: 3557085 - DNA, 25 bp, Homo sapien
catgccggcggaaccaggcggtgga

SEQ ID NO: 3557086 - DNA, 25 bp, Homo sapien
tcatgccggcggaaccaggcggtgg

SEQ ID NO: 3557087 - DNA, 25 bp, Homo sapien
atcatgccggcggaaccaggcggtg

SEQ ID NO: 3557088 - DNA, 25 bp, Homo sapien
ggccccaggcggcagaggcggctgg

SEQ ID NO: 3557089 - DNA, 25 bp, Homo sapien
ggggccccaggcggcagaggcggct

SEQ ID NO: 3557090 - DNA, 25 bp, Homo sapien
ccccaggcggcagaggcggctggac

SEQ ID NO: 3557091 - DNA, 25 bp, Homo sapien
gggaggggccccaggcggcagaggc

SEQ ID NO: 3557092 - DNA, 25 bp, Homo sapien
tggaccctgtgccagcgctcgtggt

SEQ ID NO: 3557093 - DNA, 25 bp, Homo sapien
gcgctcgtggtggtagtcgtcgtat

SEQ ID NO: 3557094 - DNA, 25 bp, Homo sapien
caccatagtggggttgccttgcatc

SEQ ID NO: 3557095 - DNA, 25 bp, Homo sapien
gttgccatggcgggatggaccctgt

SEQ ID NO: 3557096 - DNA, 25 bp, Homo sapien
acgcgcgggggcacaccgcggctgt

SEQ ID NO: 3557097 - DNA, 25 bp, Homo sapien
gggcacaccgcggctgtctgcggct

SEQ ID NO: 3557098 - DNA, 25 bp, Homo sapien
tccttgcttggcatgcggtacggtg

SEQ ID NO: 3557099 - DNA, 25 bp, Homo sapien
ggatgggggcgaggggcgcctgctc

SEQ ID NO: 3557100 - DNA, 25 bp, Homo sapien
cctttgtcaccaatgcccctggaag

SEQ ID NO: 3557101 - DNA, 25 bp, Homo sapien
tttctgtttacaaccccagcagagc

SEQ ID NO: 3557102 - DNA, 25 bp, Homo sapien
cgaacggcacattcaacctcaaggc

SEQ ID NO: 3557103 - DNA, 25 bp, Homo sapien
tgggcttaacagagtaagccctttg

SEQ ID NO: 3557104 - DNA, 25 bp, Homo sapien
ggcggcggcatcatgcccataggtg

SEQ ID NO: 3557105 - DNA, 25 bp, Homo sapien
ctgccatggcaagggggtactggaa

SEQ ID NO: 3557106 - DNA, 25 bp, Homo sapien
cggcggcatcatgcccataggtggt

SEQ ID NO: 3557107 - DNA, 25 bp, Homo sapien
cccataggtggtggcggcatcatac

SEQ ID NO: 3557108 - DNA, 25 bp, Homo sapien
ccaagcctaggtgaagacccacagc

SEQ ID NO: 3557109 - DNA, 25 bp, Homo sapien
aagcctaggtgaagacccacagcca

SEQ ID NO: 3557110 - DNA, 25 bp, Homo sapien
caagcctaggtgaagacccacagcc

SEQ ID NO: 3557111 - DNA, 25 bp, Homo sapien
atgcaggcgatagaccccagagccc

SEQ ID NO: 3557112 - DNA, 25 bp, Homo sapien
gagcccacaggcgtacttcccaggt

SEQ ID NO: 3557113 - DNA, 25 bp, Homo sapien
cttttccttgatgcaggcgatagac

SEQ ID NO: 3557114 - DNA, 25 bp, Homo sapien
agcccacaggcgtacttcccaggta

SEQ ID NO: 3557115 - DNA, 25 bp, Homo sapien
ctctgaagggccagaattcatccag

SEQ ID NO: 3557116 - DNA, 25 bp, Homo sapien
catgccgtggtagggccgactctct

SEQ ID NO: 3557117 - DNA, 25 bp, Homo sapien
aggaccacctccatgcatgccgtgg

SEQ ID NO: 3557118 - DNA, 25 bp, Homo sapien
tgaagggccagaattcatccagggt

SEQ ID NO: 3557119 - DNA, 25 bp, Homo sapien
tatgacacaggaccagaacacaaga

SEQ ID NO: 3557120 - DNA, 25 bp, Homo sapien
gagatcccggaagaacaatgttgcc

SEQ ID NO: 3557121 - DNA, 25 bp, Homo sapien
gaacaaggtcttcccgaagtgagaa

SEQ ID NO: 3557122 - DNA, 25 bp, Homo sapien
ttgtctgctctacccaaaccacgtg

SEQ ID NO: 3557123 - DNA, 25 bp, Homo sapien
gaggtgggttgttggcgggagcagc

SEQ ID NO: 3557124 - DNA, 25 bp, Homo sapien
ctttatccatccgtgctttatcctg

SEQ ID NO: 3557125 - DNA, 25 bp, Homo sapien
tattctttatccatccgtgctttat

SEQ ID NO: 3557126 - DNA, 25 bp, Homo sapien
tatccatccgtgctttatcctgagc

SEQ ID NO: 3557127 - DNA, 25 bp, Homo sapien
tacagtctgaagcaatgtggccagc

SEQ ID NO: 3557128 - DNA, 25 bp, Homo sapien
cacacttggtacacactgtggtgtt

SEQ ID NO: 3557129 - DNA, 25 bp, Homo sapien
tgttggtaatgctgcgggtctctga

SEQ ID NO: 3557130 - DNA, 25 bp, Homo sapien
gtaatgctgcgggtctctgagctct

SEQ ID NO: 3557131 - DNA, 25 bp, Homo sapien
tcccgaagctgcatcttccgtagat

SEQ ID NO: 3557132 - DNA, 25 bp, Homo sapien
tcttccgtagatcattctggtcctc

SEQ ID NO: 3557133 - DNA, 25 bp, Homo sapien
gaagggtcccatttaagcgagccaa

SEQ ID NO: 3557134 - DNA, 25 bp, Homo sapien
ggagtctcgataccctgcttcagga

SEQ ID NO: 3557135 - DNA, 25 bp, Homo sapien
gcatgaagtggctcatcttctcctg

SEQ ID NO: 3557136 - DNA, 25 bp, Homo sapien
tgcctttttgacgttctccattgta

SEQ ID NO: 3557137 - DNA, 25 bp, Homo sapien
ccattgtattggcagtaaccagggc

SEQ ID NO: 3557138 - DNA, 25 bp, Homo sapien
tctggccatctttgcgcccaacctt

SEQ ID NO: 3557139 - DNA, 25 bp, Homo sapien
gatgagcagccccacaaagttgatt

SEQ ID NO: 3557140 - DNA, 25 bp, Homo sapien
caaagttgatttctgggtactcatc

SEQ ID NO: 3557141 - DNA, 25 bp, Homo sapien
gtggaatcatgactttatcactcac

SEQ ID NO: 3557142 - DNA, 25 bp, Homo sapien
gatttctgggtactcatcttgtgga

SEQ ID NO: 3557143 - DNA, 25 bp, Homo sapien
gaactctcgggtgttaagccgcttc

SEQ ID NO: 3557144 - DNA, 25 bp, Homo sapien
ctttttgcgggtgcggaactctcgg

SEQ ID NO: 3557145 - DNA, 25 bp, Homo sapien
tctctgtgatgaggttgtgccgctc

SEQ ID NO: 3557146 - DNA, 25 bp, Homo sapien
gaaatccggattgagtgcaaccatc

SEQ ID NO: 3557147 - DNA, 25 bp, Homo sapien
gaggaaccgaccataacgtgtgcta

SEQ ID NO: 3557148 - DNA, 25 bp, Homo sapien
cgtgtgctactcaagatcgtgtgga

SEQ ID NO: 3557149 - DNA, 25 bp, Homo sapien
aatacaacactcttcggaggaaccg

SEQ ID NO: 3557150 - DNA, 25 bp, Homo sapien
gcaaggacagtatcatcccctggag

SEQ ID NO: 3557151 - DNA, 25 bp, Homo sapien
aaaggaccatagcttgatattctga

SEQ ID NO: 3557152 - DNA, 25 bp, Homo sapien
ggaagagaccatgtggatcaggtta

SEQ ID NO: 3557153 - DNA, 25 bp, Homo sapien
gaggttacactcctagaattttgag

SEQ ID NO: 3557154 - DNA, 25 bp, Homo sapien
ccacagctggattttgcggtaataa

SEQ ID NO: 3557155 - DNA, 25 bp, Homo sapien
tgagagaaccttgcctagttggaga

SEQ ID NO: 3557156 - DNA, 25 bp, Homo sapien
taatgacggctaaatgacacctccg

SEQ ID NO: 3557157 - DNA, 25 bp, Homo sapien
gggaaccatgtcacaccacgttaca

SEQ ID NO: 3557158 - DNA, 25 bp, Homo sapien
gagagcaaggactgaactcggctgc

SEQ ID NO: 3557159 - DNA, 25 bp, Homo sapien
cgcagtttacgagtcaggtcttcta

SEQ ID NO: 3557160 - DNA, 25 bp, Homo sapien
tctcctgtgcgcagtttacgagtca

SEQ ID NO: 3557161 - DNA, 25 bp, Homo sapien
cccaggtctcctgtgcgcagtttac

SEQ ID NO: 3557162 - DNA, 25 bp, Homo sapien
gtcaggtcttctatctgcagttgca

SEQ ID NO: 3557163 - DNA, 25 bp, Homo sapien
gtagtaagacacatggttccccaag

SEQ ID NO: 3557164 - DNA, 25 bp, Homo sapien
tcaacaactcgaggtgaaagtcacc

SEQ ID NO: 3557165 - DNA, 25 bp, Homo sapien
caaagcagtatgtaccgtgggagac

SEQ ID NO: 3557166 - DNA, 25 bp, Homo sapien
tataaatagtccttagggcccagtg

SEQ ID NO: 3557167 - DNA, 25 bp, Homo sapien
attatggtgaaaggccacgctgtga

SEQ ID NO: 3557168 - DNA, 25 bp, Homo sapien
tggtgaaaggccacgctgtgaaaag

SEQ ID NO: 3557169 - DNA, 25 bp, Homo sapien
aaaattatggtgaaaggccacgctg

SEQ ID NO: 3557170 - DNA, 25 bp, Homo sapien
atggtgaaaggccacgctgtgaaaa

SEQ ID NO: 3557171 - DNA, 25 bp, Homo sapien
ctcacctcatcaactggcaatgaac

SEQ ID NO: 3557172 - DNA, 25 bp, Homo sapien
cacctcatcaactggcaatgaacag

SEQ ID NO: 3557173 - DNA, 25 bp, Homo sapien
gagaggcagatgacactcacctcat

SEQ ID NO: 3557174 - DNA, 25 bp, Homo sapien
cctcatcaactggcaatgaacagca

SEQ ID NO: 3557175 - DNA, 25 bp, Homo sapien
taagtgaaaccctaccttcctgata

SEQ ID NO: 3557176 - DNA, 25 bp, Homo sapien
ctaagtgaaaccctaccttcctgat

SEQ ID NO: 3557177 - DNA, 25 bp, Homo sapien
gaacagaccaaaacaaggagctgca

SEQ ID NO: 3557178 - DNA, 25 bp, Homo sapien
cagatgataccaaagtcgtgaaagt

SEQ ID NO: 3557179 - DNA, 25 bp, Homo sapien
ctgcagttacgaacagaccaaaaca

SEQ ID NO: 3557180 - DNA, 25 bp, Homo sapien
agtcgtgaaagtatctcatctcaaa

SEQ ID NO: 3557181 - DNA, 25 bp, Homo sapien
caatctcaaagtgcatttggatgca

SEQ ID NO: 3557182 - DNA, 25 bp, Homo sapien
gctcagaataaatcgtaacaatctc

SEQ ID NO: 3557183 - DNA, 25 bp, Homo sapien
catttggatgcagaacgtatattta

SEQ ID NO: 3557184 - DNA, 25 bp, Homo sapien
atcttgctcagaataaatcgtaaca

SEQ ID NO: 3557185 - DNA, 25 bp, Homo sapien
cgagtaagtccagggggaataactg

SEQ ID NO: 3557186 - DNA, 25 bp, Homo sapien
ttctcgagtaagtccagggggaata

SEQ ID NO: 3557187 - DNA, 25 bp, Homo sapien
ctttcttgttctcgagtaagtccag

SEQ ID NO: 3557188 - DNA, 25 bp, Homo sapien
ttcttgttctcgagtaagtccaggg

SEQ ID NO: 3557189 - DNA, 25 bp, Homo sapien
tactacatcaaccatgagtgctctg

SEQ ID NO: 3557190 - DNA, 25 bp, Homo sapien
tggtaatcttaatgcatatggctgc

SEQ ID NO: 3557191 - DNA, 25 bp, Homo sapien
gcttatggccactacaagggtatgt

SEQ ID NO: 3557192 - DNA, 25 bp, Homo sapien
cacttttgtacgagaggccggacca

SEQ ID NO: 3557193 - DNA, 25 bp, Homo sapien
gtgaggctttcacgccctgctggca

SEQ ID NO: 3557194 - DNA, 25 bp, Homo sapien
ggagctatccttggtacggttccca

SEQ ID NO: 3557195 - DNA, 25 bp, Homo sapien
tgctgtagaagcagaggagctatcc

SEQ ID NO: 3557196 - DNA, 25 bp, Homo sapien
agaagggagtcgctgcacgtcatca

SEQ ID NO: 3557197 - DNA, 25 bp, Homo sapien
cggctgctggtccttacgcggcggc

SEQ ID NO: 3557198 - DNA, 25 bp, Homo sapien
tgctggtccttacgcggcggctggg

SEQ ID NO: 3557199 - DNA, 25 bp, Homo sapien
gctgctggtccttacgcggcggctg

SEQ ID NO: 3557200 - DNA, 25 bp, Homo sapien
tggtccttacgcggcggctggggtg

SEQ ID NO: 3557201 - DNA, 25 bp, Homo sapien
ctgcggcggcgggtacgaggcgccg

SEQ ID NO: 3557202 - DNA, 25 bp, Homo sapien
tgcggcggcgggtacgaggcgccgg

SEQ ID NO: 3557203 - DNA, 25 bp, Homo sapien
gctgcggcggcgggtacgaggcgcc

SEQ ID NO: 3557204 - DNA, 25 bp, Homo sapien
agggcccccatcgagcccacgggcg

SEQ ID NO: 3557205 - DNA, 25 bp, Homo sapien
gtcagggcccccatcgagcccacgg

SEQ ID NO: 3557206 - DNA, 25 bp, Homo sapien
agggcccggctcgaagcctcctttg

SEQ ID NO: 3557207 - DNA, 25 bp, Homo sapien
gcccggctcgaagcctcctttgggc

SEQ ID NO: 3557208 - DNA, 25 bp, Homo sapien
caacggcgtggcgttcgctccggtc

SEQ ID NO: 3557209 - DNA, 25 bp, Homo sapien
acggcgtggcgttcgctccggtcgc

SEQ ID NO: 3557210 - DNA, 25 bp, Homo sapien
gcgtggcgttcgctccggtcgccat

SEQ ID NO: 3557211 - DNA, 25 bp, Homo sapien
ccaacggcgtggcgttcgctccggt

SEQ ID NO: 3557212 - DNA, 25 bp, Homo sapien
ctgcttttcctctgcggcggcttct

SEQ ID NO: 3557213 - DNA, 25 bp, Homo sapien
tgcttttcctctgcggcggcttctc

SEQ ID NO: 3557214 - DNA, 25 bp, Homo sapien
acctgcttttcctctgcggcggctt

SEQ ID NO: 3557215 - DNA, 25 bp, Homo sapien
cctgcttttcctctgcggcggcttc

SEQ ID NO: 3557216 - DNA, 25 bp, Homo sapien
cgcagcgcgcacttcatttgttact

SEQ ID NO: 3557217 - DNA, 25 bp, Homo sapien
aaccgttaggccaagcgaggaaatg

SEQ ID NO: 3557218 - DNA, 25 bp, Homo sapien
tccgattggcggagcctcagtcctt

SEQ ID NO: 3557219 - DNA, 25 bp, Homo sapien
cgcgctgggattggccgaaccgtta

SEQ ID NO: 3557220 - DNA, 25 bp, Homo sapien
taatgcatgcaacagggatgactcg

SEQ ID NO: 3557221 - DNA, 25 bp, Homo sapien
tgactttcaccaggatgactccggg

SEQ ID NO: 3557222 - DNA, 25 bp, Homo sapien
ggtgaacagctaaccaaactggtgc

SEQ ID NO: 3557223 - DNA, 25 bp, Homo sapien
ccaatagggatctcactgcaggtca

SEQ ID NO: 3557224 - DNA, 25 bp, Homo sapien
aatacgtatataaaaaatcgccaag

SEQ ID NO: 3557225 - DNA, 25 bp, Homo sapien
gcttaaatacgcaaaatacttctag

SEQ ID NO: 3557226 - DNA, 25 bp, Homo sapien
taagtaactgagaccagggtggctg

SEQ ID NO: 3557227 - DNA, 25 bp, Homo sapien
aaagggcaaggtcagtacagtatgt

SEQ ID NO: 3557228 - DNA, 25 bp, Homo sapien
cagactgaatctgaggtccgggaag

SEQ ID NO: 3557229 - DNA, 25 bp, Homo sapien
taaagtgttagtctctcagtgcata

SEQ ID NO: 3557230 - DNA, 25 bp, Homo sapien
cagcaagcgttttatgggaggcccc

SEQ ID NO: 3557231 - DNA, 25 bp, Homo sapien
gatccgccacaaggaggcactgtct

SEQ ID NO: 3557232 - DNA, 25 bp, Homo sapien
tccaacacctgccttgaatgtaggg

SEQ ID NO: 3557233 - DNA, 25 bp, Homo sapien
tgaagagatgtgttccctcccctgg

SEQ ID NO: 3557234 - DNA, 25 bp, Homo sapien
gaacagttgaaactctgctggaggg

SEQ ID NO: 3557235 - DNA, 25 bp, Homo sapien
gaaccactgagcctactcgcatggc

SEQ ID NO: 3557236 - DNA, 25 bp, Homo sapien
gcaaaagaggatgcccagccctggg

SEQ ID NO: 3557237 - DNA, 25 bp, Homo sapien
tgcctggggcaaaagaggatgccca

SEQ ID NO: 3557238 - DNA, 25 bp, Homo sapien
tcagtgcctggggcaaaagaggatg

SEQ ID NO: 3557239 - DNA, 25 bp, Homo sapien
gggcaaaagaggatgcccagccctg

SEQ ID NO: 3557240 - DNA, 25 bp, Homo sapien
tctggtagacggacacaggctagcc

SEQ ID NO: 3557241 - DNA, 25 bp, Homo sapien
taagcacaagctacaggagaatggc

SEQ ID NO: 3557242 - DNA, 25 bp, Homo sapien
cctggtctaacacctaggcagtagg

SEQ ID NO: 3557243 - DNA, 25 bp, Homo sapien
ggagaatggccatgccctcaagatg

SEQ ID NO: 3557244 - DNA, 25 bp, Homo sapien
gggtgctaaactacagcagagccct

SEQ ID NO: 3557245 - DNA, 25 bp, Homo sapien
tgagagtccctttgttgaggtcccc

SEQ ID NO: 3557246 - DNA, 25 bp, Homo sapien
gtcacccagtgagatcctacgtggg

SEQ ID NO: 3557247 - DNA, 25 bp, Homo sapien
caagggtgccctggatgagagtccc

SEQ ID NO: 3557248 - DNA, 25 bp, Homo sapien
tgcccacagaaacgtgtgttggagg

SEQ ID NO: 3557249 - DNA, 25 bp, Homo sapien
ctgtggtgcccacagaaacgtgtgt

SEQ ID NO: 3557250 - DNA, 25 bp, Homo sapien
tggtgcccacagaaacgtgtgttgg

SEQ ID NO: 3557251 - DNA, 25 bp, Homo sapien
ccacagaaacgtgtgttggagggaa

SEQ ID NO: 3557252 - DNA, 25 bp, Homo sapien
caaaatggaatggatggcccaggcc

SEQ ID NO: 3557253 - DNA, 25 bp, Homo sapien
tcctctggtctaggatgggcccctt

SEQ ID NO: 3557254 - DNA, 25 bp, Homo sapien
caaaagggcctgcagctaaggcgtg

SEQ ID NO: 3557255 - DNA, 25 bp, Homo sapien
tggtccagttattgcagaggcgtcg

SEQ ID NO: 3557256 - DNA, 25 bp, Homo sapien
ggttgtcagtgggaatgctctccag

SEQ ID NO: 3557257 - DNA, 25 bp, Homo sapien
ctctggtggcccgtgaggatgtaga

SEQ ID NO: 3557258 - DNA, 25 bp, Homo sapien
gtagaggttgctgtgcgcctctggg

SEQ ID NO: 3557259 - DNA, 25 bp, Homo sapien
cctctgggttgtcagtgggaatgct

SEQ ID NO: 3557260 - DNA, 25 bp, Homo sapien
actcggaagatccttgtttcatctg

SEQ ID NO: 3557261 - DNA, 25 bp, Homo sapien
cggaagatccttgtttcatctgtga

SEQ ID NO: 3557262 - DNA, 25 bp, Homo sapien
gccccaagcactcggaagatccttg

SEQ ID NO: 3557263 - DNA, 25 bp, Homo sapien
aagcactcggaagatccttgtttca

SEQ ID NO: 3557264 - DNA, 25 bp, Homo sapien
cattggtatccaggcttcggccttg

SEQ ID NO: 3557265 - DNA, 25 bp, Homo sapien
ctcattggtatccaggcttcggcct

SEQ ID NO: 3557266 - DNA, 25 bp, Homo sapien
gtatccaggcttcggccttgcatcc

SEQ ID NO: 3557267 - DNA, 25 bp, Homo sapien
ttggtatccaggcttcggccttgca

SEQ ID NO: 3557268 - DNA, 25 bp, Homo sapien
cctcctcatcctaccgccagcccca

SEQ ID NO: 3557269 - DNA, 25 bp, Homo sapien
caggtgaccaggatggctcaggaga

SEQ ID NO: 3557270 - DNA, 25 bp, Homo sapien
atcagccctgcacccatcttggcac

SEQ ID NO: 3557271 - DNA, 25 bp, Homo sapien
cacaggggtcctcactgacctcagg

SEQ ID NO: 3557272 - DNA, 25 bp, Homo sapien
cacagtctcgatggggaaatcaaag

SEQ ID NO: 3557273 - DNA, 25 bp, Homo sapien
tggccgtgggctcgccctgcatgtt

SEQ ID NO: 3557274 - DNA, 25 bp, Homo sapien
gatggggaaatcaaaggtcagctca

SEQ ID NO: 3557275 - DNA, 25 bp, Homo sapien
tgcatgttgacaatcctcacacagc

SEQ ID NO: 3557276 - DNA, 25 bp, Homo sapien
caaagctgactaggattgtgtccct

SEQ ID NO: 3557277 - DNA, 25 bp, Homo sapien
gttcaaagctgactaggattgtgtc

SEQ ID NO: 3557278 - DNA, 25 bp, Homo sapien
aaagctgactaggattgtgtccctg

SEQ ID NO: 3557279 - DNA, 25 bp, Homo sapien
tcaaagctgactaggattgtgtccc

SEQ ID NO: 3557280 - DNA, 25 bp, Homo sapien
tatggaagcccaggtgaagcttgtt

SEQ ID NO: 3557281 - DNA, 25 bp, Homo sapien
aagcccaggtgaagcttgttgaagg

SEQ ID NO: 3557282 - DNA, 25 bp, Homo sapien
ttatggaagcccaggtgaagcttgt

SEQ ID NO: 3557283 - DNA, 25 bp, Homo sapien
tggaagcccaggtgaagcttgttga

SEQ ID NO: 3557284 - DNA, 25 bp, Homo sapien
tccctccctcggtctctcatgcaca

SEQ ID NO: 3557285 - DNA, 25 bp, Homo sapien
ctccctcggtctctcatgcacacac

SEQ ID NO: 3557286 - DNA, 25 bp, Homo sapien
cctccctccctcggtctctcatgca

SEQ ID NO: 3557287 - DNA, 25 bp, Homo sapien
tccctcggtctctcatgcacacaca

SEQ ID NO: 3557288 - DNA, 25 bp, Homo sapien
gacatggaacaggacgcggcagccg

SEQ ID NO: 3557289 - DNA, 25 bp, Homo sapien
gatgtcgggcgtcaggccagcctcc

SEQ ID NO: 3557290 - DNA, 25 bp, Homo sapien
aacaggacgcggcagccgggcccct

SEQ ID NO: 3557291 - DNA, 25 bp, Homo sapien
atgaggatgtcgggcgtcaggccag

SEQ ID NO: 3557292 - DNA, 25 bp, Homo sapien
gcagcagggatgctcaggtctccat

SEQ ID NO: 3557293 - DNA, 25 bp, Homo sapien
aggtctccatttctccccccagagc

SEQ ID NO: 3557294 - DNA, 25 bp, Homo sapien
agagctctgagggtgccctgggcct

SEQ ID NO: 3557295 - DNA, 25 bp, Homo sapien
gggcagcagggatgctcaggtctcc

SEQ ID NO: 3557296 - DNA, 25 bp, Homo sapien
ggctcataccactgcagcaggagca

SEQ ID NO: 3557297 - DNA, 25 bp, Homo sapien
gaaacttctgcagcggctcatacca

SEQ ID NO: 3557298 - DNA, 25 bp, Homo sapien
gcaggaaggtggcacccgtgtaggg

SEQ ID NO: 3557299 - DNA, 25 bp, Homo sapien
gtggcacccgtgtaggggttccgca

SEQ ID NO: 3557300 - DNA, 25 bp, Homo sapien
gggagcaggcagtgggcaccgggct

SEQ ID NO: 3557301 - DNA, 25 bp, Homo sapien
ggagcaggcagtgggcaccgggctg

SEQ ID NO: 3557302 - DNA, 25 bp, Homo sapien
gctgggcctgcgctgccccccacca

SEQ ID NO: 3557303 - DNA, 25 bp, Homo sapien
caccgggctgggcctgcgctgcccc

SEQ ID NO: 3557304 - DNA, 25 bp, Homo sapien
ccacacgacactgcaagcagccttt

SEQ ID NO: 3557305 - DNA, 25 bp, Homo sapien
cacacgacactgcaagcagcctttg

SEQ ID NO: 3557306 - DNA, 25 bp, Homo sapien
acacgacactgcaagcagcctttgg

SEQ ID NO: 3557307 - DNA, 25 bp, Homo sapien
tggtacgatcgcgatcacagttcac

SEQ ID NO: 3557308 - DNA, 25 bp, Homo sapien
tgggaccaccaacacacaacgccat

SEQ ID NO: 3557309 - DNA, 25 bp, Homo sapien
acaacgccatgcctacatcaccatg

SEQ ID NO: 3557310 - DNA, 25 bp, Homo sapien
tgcagtggtacgatcgcgatcacag

SEQ ID NO: 3557311 - DNA, 25 bp, Homo sapien
cacccagccccgctgtttcttgaaa

SEQ ID NO: 3557312 - DNA, 25 bp, Homo sapien
acccagccccgctgtttcttgaaag

SEQ ID NO: 3557313 - DNA, 25 bp, Homo sapien
cagccccgctgtttcttgaaagcaa

SEQ ID NO: 3557314 - DNA, 25 bp, Homo sapien
gccccgctgtttcttgaaagcaagg

SEQ ID NO: 3557315 - DNA, 25 bp, Homo sapien
gggatgatgcgctgggtgaggcggt

SEQ ID NO: 3557316 - DNA, 25 bp, Homo sapien
tcatgggcccagatgtgcgtggatt

SEQ ID NO: 3557317 - DNA, 25 bp, Homo sapien
tgatgcgctgggtgaggcggttggt

SEQ ID NO: 3557318 - DNA, 25 bp, Homo sapien
tagcctccgctgctcaaacaggcct

SEQ ID NO: 3557319 - DNA, 25 bp, Homo sapien
cctccctgcccatcccaccttgtac

SEQ ID NO: 3557320 - DNA, 25 bp, Homo sapien
gcagcacgttgttcacgcagtagag

SEQ ID NO: 3557321 - DNA, 25 bp, Homo sapien
tgttcacgcagtagagccaggagca

SEQ ID NO: 3557322 - DNA, 25 bp, Homo sapien
gccaggagcagcgatgtgaaatcag

SEQ ID NO: 3557323 - DNA, 25 bp, Homo sapien
tgacagcagcacgttgttcacgcag

SEQ ID NO: 3557324 - DNA, 25 bp, Homo sapien
gcgtatcctcatgcagttcatgcag

SEQ ID NO: 3557325 - DNA, 25 bp, Homo sapien
catgcagttcatgcaggttgagtgt

SEQ ID NO: 3557326 - DNA, 25 bp, Homo sapien
caggttgagtgtgtagatgccttcc

SEQ ID NO: 3557327 - DNA, 25 bp, Homo sapien
tctccagcgtatcctcatgcagttc

SEQ ID NO: 3557328 - DNA, 25 bp, Homo sapien
ccgagtaacagggtgaatccaggtg

SEQ ID NO: 3557329 - DNA, 25 bp, Homo sapien
gagtaacagggtgaatccaggtgac

SEQ ID NO: 3557330 - DNA, 25 bp, Homo sapien
taacagggtgaatccaggtgacagc

SEQ ID NO: 3557331 - DNA, 25 bp, Homo sapien
gtgacagcagcgtggatccgcaggg

SEQ ID NO: 3557332 - DNA, 25 bp, Homo sapien
ttggggggagcccgtggcaggatga

SEQ ID NO: 3557333 - DNA, 25 bp, Homo sapien
tgcaccttgggagttggggggagcc

SEQ ID NO: 3557334 - DNA, 25 bp, Homo sapien
atgcaccttgggagttggggggagc

SEQ ID NO: 3557335 - DNA, 25 bp, Homo sapien
gggggagcccgtggcaggatgacct

SEQ ID NO: 3557336 - DNA, 25 bp, Homo sapien
tcccgctgcttcatggtggcccagg

SEQ ID NO: 3557337 - DNA, 25 bp, Homo sapien
aggatcctcccgctgcttcatggtg

SEQ ID NO: 3557338 - DNA, 25 bp, Homo sapien
ctgcttcatggtggcccaggccgtg

SEQ ID NO: 3557339 - DNA, 25 bp, Homo sapien
ttcatggtggcccaggccgtgggca

SEQ ID NO: 3557340 - DNA, 25 bp, Homo sapien
ccctaggaacggggcccgcttgatg

SEQ ID NO: 3557341 - DNA, 25 bp, Homo sapien
cccatggtatcgtctggggagtcca

SEQ ID NO: 3557342 - DNA, 25 bp, Homo sapien
cttgatggttcccatggtatcgtct

SEQ ID NO: 3557343 - DNA, 25 bp, Homo sapien
gatggttcccatggtatcgtctggg

SEQ ID NO: 3557344 - DNA, 25 bp, Homo sapien
accacatcccactccaatcgtaccc

SEQ ID NO: 3557345 - DNA, 25 bp, Homo sapien
actccaatcgtaccctctgcagtgg

SEQ ID NO: 3557346 - DNA, 25 bp, Homo sapien
atcccactccaatcgtaccctctgc

SEQ ID NO: 3557347 - DNA, 25 bp, Homo sapien
ccactccaatcgtaccctctgcagt

SEQ ID NO: 3557348 - DNA, 25 bp, Homo sapien
tgaggctgaccgaatagtcagactc

SEQ ID NO: 3557349 - DNA, 25 bp, Homo sapien
attctgaggctgaccgaatagtcag

SEQ ID NO: 3557350 - DNA, 25 bp, Homo sapien
gcctcctggaccgactgcagcaggc

SEQ ID NO: 3557351 - DNA, 25 bp, Homo sapien
tccagggcctcctggaccgactgca

SEQ ID NO: 3557352 - DNA, 25 bp, Homo sapien
gggcctcctggaccgactgcagcag

SEQ ID NO: 3557353 - DNA, 25 bp, Homo sapien
agggcctcctggaccgactgcagca

SEQ ID NO: 3557354 - DNA, 25 bp, Homo sapien
ctgcctcccagattctcctacctca

SEQ ID NO: 3557355 - DNA, 25 bp, Homo sapien
gcgtgcaatggcaagatatcggctc

SEQ ID NO: 3557356 - DNA, 25 bp, Homo sapien
gctggcgtgcaatggcaagatatcg

SEQ ID NO: 3557357 - DNA, 25 bp, Homo sapien
ggcgtgcaatggcaagatatcggct

SEQ ID NO: 3557358 - DNA, 25 bp, Homo sapien
cttcctttcccagtagtgtccactc

SEQ ID NO: 3557359 - DNA, 25 bp, Homo sapien
tcctttcccagtagtgtccactctt

SEQ ID NO: 3557360 - DNA, 25 bp, Homo sapien
cctttcccagtagtgtccactcttc

SEQ ID NO: 3557361 - DNA, 25 bp, Homo sapien
tgcgtggggcgccaaatttcacctg

SEQ ID NO: 3557362 - DNA, 25 bp, Homo sapien
cggctcattcagtgggtcagtttcc

SEQ ID NO: 3557363 - DNA, 25 bp, Homo sapien
tggggcgccaaatttcacctggtga

SEQ ID NO: 3557364 - DNA, 25 bp, Homo sapien
cttcctgcgtggggcgccaaatttc

SEQ ID NO: 3557365 - DNA, 25 bp, Homo sapien
gctgcccccgggagtgaatggtgtc

SEQ ID NO: 3557366 - DNA, 25 bp, Homo sapien
tgctgcccccgggagtgaatggtgt

SEQ ID NO: 3557367 - DNA, 25 bp, Homo sapien
actggatctccgagggggtcctctc

SEQ ID NO: 3557368 - DNA, 25 bp, Homo sapien
agggggtcctctcggctgggccgtg

SEQ ID NO: 3557369 - DNA, 25 bp, Homo sapien
ggagctgctgagtcgtgaacgggtg

SEQ ID NO: 3557370 - DNA, 25 bp, Homo sapien
ggattcttggtcagggccagtttga

SEQ ID NO: 3557371 - DNA, 25 bp, Homo sapien
taggattcttggtcagggccagttt

SEQ ID NO: 3557372 - DNA, 25 bp, Homo sapien
cggcctcttcttaggattcttggtc

SEQ ID NO: 3557373 - DNA, 25 bp, Homo sapien
tctgctgtcggcctcttcttaggat

SEQ ID NO: 3557374 - DNA, 25 bp, Homo sapien
ctggaagctgctcttcgacatgagc

SEQ ID NO: 3557375 - DNA, 25 bp, Homo sapien
gagtcttatctctcagtttgggcgg

SEQ ID NO: 3557376 - DNA, 25 bp, Homo sapien
tgctcttcgacatgagcatcagggc

SEQ ID NO: 3557377 - DNA, 25 bp, Homo sapien
ttatctctcagtttgggcggctgga

SEQ ID NO: 3557378 - DNA, 25 bp, Homo sapien
ggcccagacgtcacatagctcattg

SEQ ID NO: 3557379 - DNA, 25 bp, Homo sapien
attgtagccacctttgcgctccaca

SEQ ID NO: 3557380 - DNA, 25 bp, Homo sapien
atgcccagggcccagacgtcacata

SEQ ID NO: 3557381 - DNA, 25 bp, Homo sapien
tagctcattgtagccacctttgcgc

SEQ ID NO: 3557382 - DNA, 25 bp, Homo sapien
tgtcagctcgcctgacaccccaaag

SEQ ID NO: 3557383 - DNA, 25 bp, Homo sapien
agacgctgtcagctcgcctgacacc

SEQ ID NO: 3557384 - DNA, 25 bp, Homo sapien
gtcccaatgaaagacctcctcttgg

SEQ ID NO: 3557385 - DNA, 25 bp, Homo sapien
gagtcccaatgaaagacctcctctt

SEQ ID NO: 3557386 - DNA, 25 bp, Homo sapien
acctggcagggctcagacgggcagg

SEQ ID NO: 3557387 - DNA, 25 bp, Homo sapien
ctgccgcaggccctaggcaaggcca

SEQ ID NO: 3557388 - DNA, 25 bp, Homo sapien
cagggctctggctcggctgcacctg

SEQ ID NO: 3557389 - DNA, 25 bp, Homo sapien
ggtggccccgcttggtcacagctgc

SEQ ID NO: 3557390 - DNA, 25 bp, Homo sapien
cctgatggtgtccccagggtactga

SEQ ID NO: 3557391 - DNA, 25 bp, Homo sapien
ctgatggtgtccccagggtactgac

SEQ ID NO: 3557392 - DNA, 25 bp, Homo sapien
ccagtttgacatctccctggagagt

SEQ ID NO: 3557393 - DNA, 25 bp, Homo sapien
tggatcttcccctgagaatgcaggt

SEQ ID NO: 3557394 - DNA, 25 bp, Homo sapien
tcccctgagaatgcaggtggtggag

SEQ ID NO: 3557395 - DNA, 25 bp, Homo sapien
tctctgtggatcttcccctgagaat

SEQ ID NO: 3557396 - DNA, 25 bp, Homo sapien
atgtctctgtggatcttcccctgag

SEQ ID NO: 3557397 - DNA, 25 bp, Homo sapien
gcctctcggcagacgtaggcaatct

SEQ ID NO: 3557398 - DNA, 25 bp, Homo sapien
tctcggcagacgtaggcaatctgcc

SEQ ID NO: 3557399 - DNA, 25 bp, Homo sapien
agacgtaggcaatctgccgctcctc

SEQ ID NO: 3557400 - DNA, 25 bp, Homo sapien
cttcagtgcctctcggcagacgtag

SEQ ID NO: 3557401 - DNA, 25 bp, Homo sapien
ccatgcagatccacaagcggtcatt

SEQ ID NO: 3557402 - DNA, 25 bp, Homo sapien
catgcagatccacaagcggtcattc

SEQ ID NO: 3557403 - DNA, 25 bp, Homo sapien
aagcaggtcacatgggggctgcctg

SEQ ID NO: 3557404 - DNA, 25 bp, Homo sapien
ggggtgggcacaaagcaggtcacat

SEQ ID NO: 3557405 - DNA, 25 bp, Homo sapien
ctagggacaaagagctggggtgggc

SEQ ID NO: 3557406 - DNA, 25 bp, Homo sapien
ggccaggaggataaggcagcctcac

SEQ ID NO: 3557407 - DNA, 25 bp, Homo sapien
gcactcacgcaggatggtgatttcc

SEQ ID NO: 3557408 - DNA, 25 bp, Homo sapien
ttggggtggcggcactcacgcagga

SEQ ID NO: 3557409 - DNA, 25 bp, Homo sapien
cgcaggatggtgatttcctgctgga

SEQ ID NO: 3557410 - DNA, 25 bp, Homo sapien
ctcacgcaggatggtgatttcctgc

SEQ ID NO: 3557411 - DNA, 25 bp, Homo sapien
ccagttcggacgtgaccgtgtcgcg

SEQ ID NO: 3557412 - DNA, 25 bp, Homo sapien
ttcacggcggccagttcggacgtga

SEQ ID NO: 3557413 - DNA, 25 bp, Homo sapien
gcttgactatcttcacggcggccag

SEQ ID NO: 3557414 - DNA, 25 bp, Homo sapien
tctagcttgactatcttcacggcgg

SEQ ID NO: 3557415 - DNA, 25 bp, Homo sapien
aggggcggagggtgaagcgggatgg

SEQ ID NO: 3557416 - DNA, 25 bp, Homo sapien
caggggcggagggtgaagcgggatg

SEQ ID NO: 3557417 - DNA, 25 bp, Homo sapien
ctggcaccctcctcccggctctccc

SEQ ID NO: 3557418 - DNA, 25 bp, Homo sapien
cggctctcccgcccgtcccgtcgca

SEQ ID NO: 3557419 - DNA, 25 bp, Homo sapien
gcaccctcctcccggctctcccgcc

SEQ ID NO: 3557420 - DNA, 25 bp, Homo sapien
ggctctcccgcccgtcccgtcgcac

SEQ ID NO: 3557421 - DNA, 25 bp, Homo sapien
ggtcctgcagcgacacatcccgcag

SEQ ID NO: 3557422 - DNA, 25 bp, Homo sapien
tgcagcagctcgaagcggtcccgcg

SEQ ID NO: 3557423 - DNA, 25 bp, Homo sapien
tgtagacgtcgccataggtcccggc

SEQ ID NO: 3557424 - DNA, 25 bp, Homo sapien
agctcgaagcggtcccgcgggtcct

SEQ ID NO: 3557425 - DNA, 25 bp, Homo sapien
cggcgccgggcgggccggcaggcgg

SEQ ID NO: 3557426 - DNA, 25 bp, Homo sapien
ggcgggcgcgagctgcggagccggc

SEQ ID NO: 3557427 - DNA, 25 bp, Homo sapien
gcgggcgggcgcgagctgcggagcc

SEQ ID NO: 3557428 - DNA, 25 bp, Homo sapien
ggcggggcgggcgcccgtggctctg

SEQ ID NO: 3557429 - DNA, 25 bp, Homo sapien
atacagactgtactcgggaccggga

SEQ ID NO: 3557430 - DNA, 25 bp, Homo sapien
taacgttggtctggctctaggtgag

SEQ ID NO: 3557431 - DNA, 25 bp, Homo sapien
gaagtgcggaaatatactcctaggg

SEQ ID NO: 3557432 - DNA, 25 bp, Homo sapien
tggtaattaggacccagcgtgaggt

SEQ ID NO: 3557433 - DNA, 25 bp, Homo sapien
tgatggcgctcgagttgatcttggt

SEQ ID NO: 3557434 - DNA, 25 bp, Homo sapien
acttgcgactgtgccgtgagttgca

SEQ ID NO: 3557435 - DNA, 25 bp, Homo sapien
tgcgctgccgcttgaggaaagacag

SEQ ID NO: 3557436 - DNA, 25 bp, Homo sapien
gaaagacagagtgtagtcactaggg

SEQ ID NO: 3557437 - DNA, 25 bp, Homo sapien
cactctggaaagtgagcactggacc

SEQ ID NO: 3557438 - DNA, 25 bp, Homo sapien
tggaaagtgagcactggaccctccg

SEQ ID NO: 3557439 - DNA, 25 bp, Homo sapien
agtgagcactggaccctccggcggt

SEQ ID NO: 3557440 - DNA, 25 bp, Homo sapien
catcttctcactctggaaagtgagc

SEQ ID NO: 3557441 - DNA, 25 bp, Homo sapien
gcctctcggctcactatgcgcacct

SEQ ID NO: 3557442 - DNA, 25 bp, Homo sapien
tcctgacactgcaccctggccggtg

SEQ ID NO: 3557443 - DNA, 25 bp, Homo sapien
tccgggggggtcctgacactgcacc

SEQ ID NO: 3557444 - DNA, 25 bp, Homo sapien
tcactatgcgcaccttctgccgcac

SEQ ID NO: 3557445 - DNA, 25 bp, Homo sapien
gatgccgtcgtagaatcgcagcagg

SEQ ID NO: 3557446 - DNA, 25 bp, Homo sapien
cctcaaaacggcctagggactgcac

SEQ ID NO: 3557447 - DNA, 25 bp, Homo sapien
cacatgcagcacaggcgtgggactg

SEQ ID NO: 3557448 - DNA, 25 bp, Homo sapien
actgcacaagaaaggtggcccagcc

SEQ ID NO: 3557449 - DNA, 25 bp, Homo sapien
ttggctacttcaaagaactccttgt

SEQ ID NO: 3557450 - DNA, 25 bp, Homo sapien
cagcaggttggggatgacatcattg

SEQ ID NO: 3557451 - DNA, 25 bp, Homo sapien
gtagatctcctcgtcttcccggcag

SEQ ID NO: 3557452 - DNA, 25 bp, Homo sapien
tctcctcgtcttcccggcagtagtt

SEQ ID NO: 3557453 - DNA, 25 bp, Homo sapien
ggtctctgtagggtctgaaggggtc

SEQ ID NO: 3557454 - DNA, 25 bp, Homo sapien
tggggtctctgtagggtctgaaggg

SEQ ID NO: 3557455 - DNA, 25 bp, Homo sapien
agtggggtctctgtagggtctgaag

SEQ ID NO: 3557456 - DNA, 25 bp, Homo sapien
gtggggtctctgtagggtctgaagg

SEQ ID NO: 3557457 - DNA, 25 bp, Homo sapien
gatgatggtggttaaacattggaga

SEQ ID NO: 3557458 - DNA, 25 bp, Homo sapien
tccctacctcctgggtaatggtggc

SEQ ID NO: 3557459 - DNA, 25 bp, Homo sapien
cattggagatttgagactgttctga

SEQ ID NO: 3557460 - DNA, 25 bp, Homo sapien
taatggtggccttgctgcctaggga

SEQ ID NO: 3557461 - DNA, 25 bp, Homo sapien
cagggcttcccgcacattgcggttg

SEQ ID NO: 3557462 - DNA, 25 bp, Homo sapien
tgcggttgcgacagtggtagccagc

SEQ ID NO: 3557463 - DNA, 25 bp, Homo sapien
tcctggatgacagtggccgtgtccg

SEQ ID NO: 3557464 - DNA, 25 bp, Homo sapien
gggtagatgtgttcatcccgatagt

SEQ ID NO: 3557465 - DNA, 25 bp, Homo sapien
gacactcttctacacatcaccaaag

SEQ ID NO: 3557466 - DNA, 25 bp, Homo sapien
cactcgctgccagcccttctacctg

SEQ ID NO: 3557467 - DNA, 25 bp, Homo sapien
ccccaccagggcacacccagaaggg

SEQ ID NO: 3557468 - DNA, 25 bp, Homo sapien
gctgccctgctggcacaaatgcccc

SEQ ID NO: 3557469 - DNA, 25 bp, Homo sapien
agctcctctagatctgccaggttcc

SEQ ID NO: 3557470 - DNA, 25 bp, Homo sapien
tccagctcctctagatctgccaggt

SEQ ID NO: 3557471 - DNA, 25 bp, Homo sapien
tgccaggttccctaaggccatgggg

SEQ ID NO: 3557472 - DNA, 25 bp, Homo sapien
ggtgagtgggtctggccggccaggg

SEQ ID NO: 3557473 - DNA, 25 bp, Homo sapien
gatgtcccaggtcatagagcagcca

SEQ ID NO: 3557474 - DNA, 25 bp, Homo sapien
ccagatgtcccaggtcatagagcag

SEQ ID NO: 3557475 - DNA, 25 bp, Homo sapien
gtcccaggtcatagagcagccagag

SEQ ID NO: 3557476 - DNA, 25 bp, Homo sapien
ctttccagatgtcccaggtcataga

SEQ ID NO: 3557477 - DNA, 25 bp, Homo sapien
tgcagaagctccagcgagtcggtgt

SEQ ID NO: 3557478 - DNA, 25 bp, Homo sapien
agaagctccagcgagtcggtgtgca

SEQ ID NO: 3557479 - DNA, 25 bp, Homo sapien
ctccagcgagtcggtgtgcaggtca

SEQ ID NO: 3557480 - DNA, 25 bp, Homo sapien
ccagcgagtcggtgtgcaggtcaat

SEQ ID NO: 3557481 - DNA, 25 bp, Homo sapien
gaacgccacctccatcttgcggtca

SEQ ID NO: 3557482 - DNA, 25 bp, Homo sapien
ttgcggtcacagcgcatgtatgatc

SEQ ID NO: 3557483 - DNA, 25 bp, Homo sapien
gcggtcacagcgcatgtatgatcct

SEQ ID NO: 3557484 - DNA, 25 bp, Homo sapien
tcacagcgcatgtatgatcctttca

SEQ ID NO: 3557485 - DNA, 25 bp, Homo sapien
gctcagccacaccggcattgactgt

SEQ ID NO: 3557486 - DNA, 25 bp, Homo sapien
ctcgttgcccttgccgtgccaggtg

SEQ ID NO: 3557487 - DNA, 25 bp, Homo sapien
tggcccctgcggtcctcgttgccct

SEQ ID NO: 3557488 - DNA, 25 bp, Homo sapien
agccacaccggcattgactgtctgg

SEQ ID NO: 3557489 - DNA, 25 bp, Homo sapien
aaggccacaccggagctgtccaatt

SEQ ID NO: 3557490 - DNA, 25 bp, Homo sapien
atgatcctcagacagggcgaggtgg

SEQ ID NO: 3557491 - DNA, 25 bp, Homo sapien
cgaggtggacatcccggagacccag

SEQ ID NO: 3557492 - DNA, 25 bp, Homo sapien
acaccggagctgtccaatttggtgc

SEQ ID NO: 3557493 - DNA, 25 bp, Homo sapien
gaggctgttccatatgacatcggag

SEQ ID NO: 3557494 - DNA, 25 bp, Homo sapien
gatgtgggcccgatccttgaagtag

SEQ ID NO: 3557495 - DNA, 25 bp, Homo sapien
ggaacagcgtcttctgggcggcctt

SEQ ID NO: 3557496 - DNA, 25 bp, Homo sapien
gatgacgcggttgacagccagaaaa

SEQ ID NO: 3557497 - DNA, 25 bp, Homo sapien
cacccgccccgacacacgcacagct

SEQ ID NO: 3557498 - DNA, 25 bp, Homo sapien
ggttccacccgccccgacacacgca

SEQ ID NO: 3557499 - DNA, 25 bp, Homo sapien
cgccccgacacacgcacagctcccc

SEQ ID NO: 3557500 - DNA, 25 bp, Homo sapien
tgcaaggcaagccgggggagggagg

SEQ ID NO: 3557501 - DNA, 25 bp, Homo sapien
tacccgatggggtgcgccccaagca

SEQ ID NO: 3557502 - DNA, 25 bp, Homo sapien
cccggggctgtaaagtctgtccaga

SEQ ID NO: 3557503 - DNA, 25 bp, Homo sapien
aagcaccccaatgaggagccccaat

SEQ ID NO: 3557504 - DNA, 25 bp, Homo sapien
tcagccgagactgcagagccttttt

SEQ ID NO: 3557505 - DNA, 25 bp, Homo sapien
aaccccaaggagagtcctggcctcg

SEQ ID NO: 3557506 - DNA, 25 bp, Homo sapien
cccaaggagagtcctggcctcggtc

SEQ ID NO: 3557507 - DNA, 25 bp, Homo sapien
caaaccccaaggagagtcctggcct

SEQ ID NO: 3557508 - DNA, 25 bp, Homo sapien
caaggagagtcctggcctcggtccc

SEQ ID NO: 3557509 - DNA, 25 bp, Homo sapien
tcccacactaggcaccgcggcgcac

SEQ ID NO: 3557510 - DNA, 25 bp, Homo sapien
actacccgccgggaagtggagtctg

SEQ ID NO: 3557511 - DNA, 25 bp, Homo sapien
tgggacatgaagtcccgcccctagg

SEQ ID NO: 3557512 - DNA, 25 bp, Homo sapien
gtcgcactacccgccgggaagtgga

SEQ ID NO: 3557513 - DNA, 25 bp, Homo sapien
cgggccgctgcgctgtggcttctgg

SEQ ID NO: 3557514 - DNA, 25 bp, Homo sapien
acctccttcccgagatactcaggga

SEQ ID NO: 3557515 - DNA, 25 bp, Homo sapien
tgggatctctaggtccgcggctccg

SEQ ID NO: 3557516 - DNA, 25 bp, Homo sapien
ctgagcctggaaatagtggcgggcc

SEQ ID NO: 3557517 - DNA, 25 bp, Homo sapien
tcgccgagcttctgccggttttgct

SEQ ID NO: 3557518 - DNA, 25 bp, Homo sapien
tcggtcggcaagttatgaggaaaaa

SEQ ID NO: 3557519 - DNA, 25 bp, Homo sapien
gttttgctgtcacgggtcggtcggc

SEQ ID NO: 3557520 - DNA, 25 bp, Homo sapien
aggtcgccgagcttctgccggtttt

SEQ ID NO: 3557521 - DNA, 25 bp, Homo sapien
gagagtaaatgtgttcagccgcttt

SEQ ID NO: 3557522 - DNA, 25 bp, Homo sapien
tatcagtgtctgttaacatataaag

SEQ ID NO: 3557523 - DNA, 25 bp, Homo sapien
tgttcagccgctttagctgggtatc

SEQ ID NO: 3557524 - DNA, 25 bp, Homo sapien
taaatgtgttcagccgctttagctg

SEQ ID NO: 3557525 - DNA, 25 bp, Homo sapien
cacgtgctaagagtagcttttgttt

SEQ ID NO: 3557526 - DNA, 25 bp, Homo sapien
tgtgtgcagcactcgtttcccactt

SEQ ID NO: 3557527 - DNA, 25 bp, Homo sapien
cgcccgcgagatactctaacacgtg

SEQ ID NO: 3557528 - DNA, 25 bp, Homo sapien
tctgtgtgcagcactcgtttcccac

SEQ ID NO: 3557529 - DNA, 25 bp, Homo sapien
cttcagtgagccagaatcttgccac

SEQ ID NO: 3557530 - DNA, 25 bp, Homo sapien
ggcttcagtgagccagaatcttgcc

SEQ ID NO: 3557531 - DNA, 25 bp, Homo sapien
tgaggcgcggggaatcccttgaacc

SEQ ID NO: 3557532 - DNA, 25 bp, Homo sapien
ggctgaggcgcggggaatcccttga

SEQ ID NO: 3557533 - DNA, 25 bp, Homo sapien
cagagggcatcaaggagagctctcc

SEQ ID NO: 3557534 - DNA, 25 bp, Homo sapien
tcttgcgcctcacagagcatcaggg

SEQ ID NO: 3557535 - DNA, 25 bp, Homo sapien
cctcagctgggagtcagacagtcca

SEQ ID NO: 3557536 - DNA, 25 bp, Homo sapien
tccccgatgggaggattggctgaca

SEQ ID NO: 3557537 - DNA, 25 bp, Homo sapien
cattagggaggttgcagggctcagc

SEQ ID NO: 3557538 - DNA, 25 bp, Homo sapien
gcaggacacagactcgctggacagg

SEQ ID NO: 3557539 - DNA, 25 bp, Homo sapien
ctgcattagggaggttgcagggctc

SEQ ID NO: 3557540 - DNA, 25 bp, Homo sapien
cacagactcgctggacagggatgtc

SEQ ID NO: 3557541 - DNA, 25 bp, Homo sapien
gaggctgggcgccgcaacgcctcgg

SEQ ID NO: 3557542 - DNA, 25 bp, Homo sapien
gagccgcgggcaactcggcccttct

SEQ ID NO: 3557543 - DNA, 25 bp, Homo sapien
ctgggcgccgcaacgcctcggagaa

SEQ ID NO: 3557544 - DNA, 25 bp, Homo sapien
tgcgtctccaccgaggccttcgctg

SEQ ID NO: 3557545 - DNA, 25 bp, Homo sapien
ttggagcgcacaaaagggtccttca

SEQ ID NO: 3557546 - DNA, 25 bp, Homo sapien
gcacaaaagggtccttcagcatctc

SEQ ID NO: 3557547 - DNA, 25 bp, Homo sapien
cccacgtgtactaggtggttgaagt

SEQ ID NO: 3557548 - DNA, 25 bp, Homo sapien
cgcccgttggcagggcccacgtgta

SEQ ID NO: 3557549 - DNA, 25 bp, Homo sapien
tccgacacgcggaaaaagaagcggc

SEQ ID NO: 3557550 - DNA, 25 bp, Homo sapien
aagaagcggcgcttgctcttggtgc

SEQ ID NO: 3557551 - DNA, 25 bp, Homo sapien
tgaggtccgggatgtcgaactcgtc

SEQ ID NO: 3557552 - DNA, 25 bp, Homo sapien
cttggtgcggaacagctggcgccgg

SEQ ID NO: 3557553 - DNA, 25 bp, Homo sapien
ctgaggtaggtcaggcggaccttct

SEQ ID NO: 3557554 - DNA, 25 bp, Homo sapien
agccctctggattgaggggccgcac

SEQ ID NO: 3557555 - DNA, 25 bp, Homo sapien
gtcaggcggaccttctcggtgccgt

SEQ ID NO: 3557556 - DNA, 25 bp, Homo sapien
tctcggtgccgtagaggaacaggga

SEQ ID NO: 3557557 - DNA, 25 bp, Homo sapien
tctcgctgaacactgtcaggtaggg

SEQ ID NO: 3557558 - DNA, 25 bp, Homo sapien
cttcttgagcggcacggtctgcacc

SEQ ID NO: 3557559 - DNA, 25 bp, Homo sapien
ttgagcggcacggtctgcacccatt

SEQ ID NO: 3557560 - DNA, 25 bp, Homo sapien
ctcctcacgtcaaacacatcgatgg

SEQ ID NO: 3557561 - DNA, 25 bp, Homo sapien
aagccagtcatgaagtggaggcgat

SEQ ID NO: 3557562 - DNA, 25 bp, Homo sapien
gaggcgatgagagccgtgacacagg

SEQ ID NO: 3557563 - DNA, 25 bp, Homo sapien
tgaagtggaggcgatgagagccgtg

SEQ ID NO: 3557564 - DNA, 25 bp, Homo sapien
tcatgaagtggaggcgatgagagcc

SEQ ID NO: 3557565 - DNA, 25 bp, Homo sapien
ggaactcgctgaggctaagctccac

SEQ ID NO: 3557566 - DNA, 25 bp, Homo sapien
ggcgcttgacggctacacagagcac

SEQ ID NO: 3557567 - DNA, 25 bp, Homo sapien
tcgtggccacgagacttgcggcctg

SEQ ID NO: 3557568 - DNA, 25 bp, Homo sapien
cagcgggtagagtgcaaagccaccg

SEQ ID NO: 3557569 - DNA, 25 bp, Homo sapien
cgttgctgcgcagatggatgacaaa

SEQ ID NO: 3557570 - DNA, 25 bp, Homo sapien
gtgccaagcgcaagtcgatcctggt

SEQ ID NO: 3557571 - DNA, 25 bp, Homo sapien
tcctcggtgccaagcgcaagtcgat

SEQ ID NO: 3557572 - DNA, 25 bp, Homo sapien
cggtgccaagcgcaagtcgatcctg

SEQ ID NO: 3557573 - DNA, 25 bp, Homo sapien
tcccagtctggacaggcttttccag

SEQ ID NO: 3557574 - DNA, 25 bp, Homo sapien
agtctggacaggcttttccagaggg

SEQ ID NO: 3557575 - DNA, 25 bp, Homo sapien
ctggacaggcttttccagaggggtt

SEQ ID NO: 3557576 - DNA, 25 bp, Homo sapien
gttggggtgaggcccatcatcttga

SEQ ID NO: 3557577 - DNA, 25 bp, Homo sapien
gcagcccgttgtcgtaagcctcctt

SEQ ID NO: 3557578 - DNA, 25 bp, Homo sapien
gcagcgcagagcgtgtgaggcagca

SEQ ID NO: 3557579 - DNA, 25 bp, Homo sapien
ctccttgagtgtgtacacgggccgg

SEQ ID NO: 3557580 - DNA, 25 bp, Homo sapien
cacagtgcacgtggtgggcggcact

SEQ ID NO: 3557581 - DNA, 25 bp, Homo sapien
cctggattgggcatggataacatca

SEQ ID NO: 3557582 - DNA, 25 bp, Homo sapien
ggtccctggattgggcatggataac

SEQ ID NO: 3557583 - DNA, 25 bp, Homo sapien
cctaaagatgcgtggcaggtccctg

SEQ ID NO: 3557584 - DNA, 25 bp, Homo sapien
ctaaagatgcgtggcaggtccctgg

SEQ ID NO: 3557585 - DNA, 25 bp, Homo sapien
gagcctcaggtcaggggcgtcaaac

SEQ ID NO: 3557586 - DNA, 25 bp, Homo sapien
cagcagcaggcgtgagtcactcagg

SEQ ID NO: 3557587 - DNA, 25 bp, Homo sapien
gcgtcaaacagcagcaggcgtgagt

SEQ ID NO: 3557588 - DNA, 25 bp, Homo sapien
agccccgccggacacctgagggccg

SEQ ID NO: 3557589 - DNA, 25 bp, Homo sapien
agccctcataggcagtgcctgtgcc

SEQ ID NO: 3557590 - DNA, 25 bp, Homo sapien
gttgtgtgacaaaagtagccgcagg

SEQ ID NO: 3557591 - DNA, 25 bp, Homo sapien
ggcacaggttgtgtgacaaaagtag

SEQ ID NO: 3557592 - DNA, 25 bp, Homo sapien
cctgtgcctgtttcggggtgtactc

SEQ ID NO: 3557593 - DNA, 25 bp, Homo sapien
ctgggaccgtggctggagcatagtg

SEQ ID NO: 3557594 - DNA, 25 bp, Homo sapien
atcagcgaggtgcagcggagacact

SEQ ID NO: 3557595 - DNA, 25 bp, Homo sapien
ccagcatcagcgaggtgcagcggag

SEQ ID NO: 3557596 - DNA, 25 bp, Homo sapien
tccgggggcgcagcgtgtgtgagcc

SEQ ID NO: 3557597 - DNA, 25 bp, Homo sapien
ggtgcagcggagacacttggtcggg

SEQ ID NO: 3557598 - DNA, 25 bp, Homo sapien
tggggagggggacagccattaccca

SEQ ID NO: 3557599 - DNA, 25 bp, Homo sapien
cagccattacccaaggcctcccagg

SEQ ID NO: 3557600 - DNA, 25 bp, Homo sapien
gcctcccagggccccatgccccatc

SEQ ID NO: 3557601 - DNA, 25 bp, Homo sapien
ggggacagccattacccaaggcctc

SEQ ID NO: 3557602 - DNA, 25 bp, Homo sapien
caggcaacagtgacctccgagtccc

SEQ ID NO: 3557603 - DNA, 25 bp, Homo sapien
aggggtcaggaaagacaaggggctg

SEQ ID NO: 3557604 - DNA, 25 bp, Homo sapien
caacagtgacctccgagtcccagcc

SEQ ID NO: 3557605 - DNA, 25 bp, Homo sapien
ggcaacagtgacctccgagtcccag

SEQ ID NO: 3557606 - DNA, 25 bp, Homo sapien
gcctgctagccacgatgcacgtgga

SEQ ID NO: 3557607 - DNA, 25 bp, Homo sapien
cccaattgtgcctgctagccacgat

SEQ ID NO: 3557608 - DNA, 25 bp, Homo sapien
gatgcacgtggagtgtccccacagt

SEQ ID NO: 3557609 - DNA, 25 bp, Homo sapien
tggcggcaggcaagctcatcgccac

SEQ ID NO: 3557610 - DNA, 25 bp, Homo sapien
agcaggaagaccttctgtagaggct

SEQ ID NO: 3557611 - DNA, 25 bp, Homo sapien
tagcaggaagaccttctgtagaggc

SEQ ID NO: 3557612 - DNA, 25 bp, Homo sapien
gaagaccttctgtagaggctgtgtt

SEQ ID NO: 3557613 - DNA, 25 bp, Homo sapien
aggaagaccttctgtagaggctgtg

SEQ ID NO: 3557614 - DNA, 25 bp, Homo sapien
cgcaggctgcgtcggccctccggcc

SEQ ID NO: 3557615 - DNA, 25 bp, Homo sapien
catgcgcaggctgcgtcggccctcc

SEQ ID NO: 3557616 - DNA, 25 bp, Homo sapien
ccccatgcgcaggctgcgtcggccc

SEQ ID NO: 3557617 - DNA, 25 bp, Homo sapien
cctgagatgccagggtccttggcag

SEQ ID NO: 3557618 - DNA, 25 bp, Homo sapien
ctccggaaggacaggaagggaatca

SEQ ID NO: 3557619 - DNA, 25 bp, Homo sapien
ctctgagctccggaaggacaggaag

SEQ ID NO: 3557620 - DNA, 25 bp, Homo sapien
gaatcagggagtttgagggcttggt

SEQ ID NO: 3557621 - DNA, 25 bp, Homo sapien
aagggaatcagggagtttgagggct

SEQ ID NO: 3557622 - DNA, 25 bp, Homo sapien
agctcctcccgcagcatggcgagct

SEQ ID NO: 3557623 - DNA, 25 bp, Homo sapien
atggcgagctcctgttgcagggcct

SEQ ID NO: 3557624 - DNA, 25 bp, Homo sapien
ccgcagcatggcgagctcctgttgc

SEQ ID NO: 3557625 - DNA, 25 bp, Homo sapien
tcctcccgcagcatggcgagctcct

SEQ ID NO: 3557626 - DNA, 25 bp, Homo sapien
ggcgcggatctcggcctccagcgct

SEQ ID NO: 3557627 - DNA, 25 bp, Homo sapien
ccatcttctgcagtcgccgcgcctt

SEQ ID NO: 3557628 - DNA, 25 bp, Homo sapien
atcttctgcagtcgccgcgccttcc

SEQ ID NO: 3557629 - DNA, 25 bp, Homo sapien
cgcggatctcggcctccagcgctga

SEQ ID NO: 3557630 - DNA, 25 bp, Homo sapien
caggtagcctcttgagaccttctca

SEQ ID NO: 3557631 - DNA, 25 bp, Homo sapien
gagcgtctgggtgcctacgttcctc

SEQ ID NO: 3557632 - DNA, 25 bp, Homo sapien
tcttgagaccttctcatcattcacc

SEQ ID NO: 3557633 - DNA, 25 bp, Homo sapien
tgcctacgttcctcaaggactccag

SEQ ID NO: 3557634 - DNA, 25 bp, Homo sapien
gctgggcctcccagttgctctccgt

SEQ ID NO: 3557635 - DNA, 25 bp, Homo sapien
cagttgctctccgtctcccgccgct

SEQ ID NO: 3557636 - DNA, 25 bp, Homo sapien
gggcctcccagttgctctccgtctc

SEQ ID NO: 3557637 - DNA, 25 bp, Homo sapien
gttgctctccgtctcccgccgctca

SEQ ID NO: 3557638 - DNA, 25 bp, Homo sapien
tcagcctccggttttcctcctgcag

SEQ ID NO: 3557639 - DNA, 25 bp, Homo sapien
ggcacagagcctcctccttaccact

SEQ ID NO: 3557640 - DNA, 25 bp, Homo sapien
agctggcacagagcctcctccttac

SEQ ID NO: 3557641 - DNA, 25 bp, Homo sapien
gctcagcctccggttttcctcctgc

SEQ ID NO: 3557642 - DNA, 25 bp, Homo sapien
gggtcccatcccgttggtctcagag

SEQ ID NO: 3557643 - DNA, 25 bp, Homo sapien
ggggtcccatcccgttggtctcaga

SEQ ID NO: 3557644 - DNA, 25 bp, Homo sapien
actcctcaaggcgttgctcccactg

SEQ ID NO: 3557645 - DNA, 25 bp, Homo sapien
gctgcgtcacctgccggctcaggga

SEQ ID NO: 3557646 - DNA, 25 bp, Homo sapien
cagctgcgtcacctgccggctcagg

SEQ ID NO: 3557647 - DNA, 25 bp, Homo sapien
caaggcgttgctcccactgtccctg

SEQ ID NO: 3557648 - DNA, 25 bp, Homo sapien
tctggctagctgtggccgcctctct

SEQ ID NO: 3557649 - DNA, 25 bp, Homo sapien
gcccgggtctggctagctgtggccg

SEQ ID NO: 3557650 - DNA, 25 bp, Homo sapien
cagggcccgggtctggctagctgtg

SEQ ID NO: 3557651 - DNA, 25 bp, Homo sapien
cgggtctggctagctgtggccgcct

SEQ ID NO: 3557652 - DNA, 25 bp, Homo sapien
tggtctgtgggggcgtgcagggcct

SEQ ID NO: 3557653 - DNA, 25 bp, Homo sapien
ccgatggtctgtgggggcgtgcagg

SEQ ID NO: 3557654 - DNA, 25 bp, Homo sapien
ctcccgatggtctgtgggggcgtgc

SEQ ID NO: 3557655 - DNA, 25 bp, Homo sapien
agctcccgatggtctgtgggggcgt

SEQ ID NO: 3557656 - DNA, 25 bp, Homo sapien
cttggtgcttcctgctcagctccac

SEQ ID NO: 3557657 - DNA, 25 bp, Homo sapien
tgctccagacactggagcttccgct

SEQ ID NO: 3557658 - DNA, 25 bp, Homo sapien
tccagacactggagcttccgctcca

SEQ ID NO: 3557659 - DNA, 25 bp, Homo sapien
cctgctccagacactggagcttccg

SEQ ID NO: 3557660 - DNA, 25 bp, Homo sapien
acactggagcttccgctccagggca

SEQ ID NO: 3557661 - DNA, 25 bp, Homo sapien
taggtgaagcccacgaatggcaggt

SEQ ID NO: 3557662 - DNA, 25 bp, Homo sapien
tgaagcccacgaatggcaggtgatg

SEQ ID NO: 3557663 - DNA, 25 bp, Homo sapien
cacgaatggcaggtgatggccggag

SEQ ID NO: 3557664 - DNA, 25 bp, Homo sapien
cctgaggtgtaggtgaagcccacga

SEQ ID NO: 3557665 - DNA, 25 bp, Homo sapien
tcccagtccacgccttcgaagaaag

SEQ ID NO: 3557666 - DNA, 25 bp, Homo sapien
cgctggctggcacgtcaggcacgtc

SEQ ID NO: 3557667 - DNA, 25 bp, Homo sapien
atatagggggccgtgctgctcgcca

SEQ ID NO: 3557668 - DNA, 25 bp, Homo sapien
catcaaagttggaggtgtccatggg

SEQ ID NO: 3557669 - DNA, 25 bp, Homo sapien
cggtacttccaaccacacagactca

SEQ ID NO: 3557670 - DNA, 25 bp, Homo sapien
gccggtacttccaaccacacagact

SEQ ID NO: 3557671 - DNA, 25 bp, Homo sapien
tacttccaaccacacagactcaggg

SEQ ID NO: 3557672 - DNA, 25 bp, Homo sapien
ctgccggtacttccaaccacacaga

SEQ ID NO: 3557673 - DNA, 25 bp, Homo sapien
gggagatatagtccggcgtccctac

SEQ ID NO: 3557674 - DNA, 25 bp, Homo sapien
caaagagcagctcataggcgcagac

SEQ ID NO: 3557675 - DNA, 25 bp, Homo sapien
tcgtggttcatgatcttgccgtagg

SEQ ID NO: 3557676 - DNA, 25 bp, Homo sapien
ccaaggactcagcatagaagggcgt

SEQ ID NO: 3557677 - DNA, 25 bp, Homo sapien
catgccgttggtgttgagacgcagg

SEQ ID NO: 3557678 - DNA, 25 bp, Homo sapien
aggagccgaagtcagccaggcgaat

SEQ ID NO: 3557679 - DNA, 25 bp, Homo sapien
gcaggacgttgtctggcttgacatc

SEQ ID NO: 3557680 - DNA, 25 bp, Homo sapien
aatgtgcccgttcacatccagcagg

SEQ ID NO: 3557681 - DNA, 25 bp, Homo sapien
aggtccccaccagcatagtagtcca

SEQ ID NO: 3557682 - DNA, 25 bp, Homo sapien
agacggtcctcgaagcggctcagca

SEQ ID NO: 3557683 - DNA, 25 bp, Homo sapien
agctcgggcgggagacggtcctcga

SEQ ID NO: 3557684 - DNA, 25 bp, Homo sapien
ggtccccaccagcatagtagtccat

SEQ ID NO: 3557685 - DNA, 25 bp, Homo sapien
ctcctcgtcttggaaggcatagtgc

SEQ ID NO: 3557686 - DNA, 25 bp, Homo sapien
aggtactcctcgtcttggaaggcat

SEQ ID NO: 3557687 - DNA, 25 bp, Homo sapien
tgtcccctttcacgagcacatcccg

SEQ ID NO: 3557688 - DNA, 25 bp, Homo sapien
aggcatagtgcagagtggtcaccca

SEQ ID NO: 3557689 - DNA, 25 bp, Homo sapien
ttcagcatctcccacttgtgcagca

SEQ ID NO: 3557690 - DNA, 25 bp, Homo sapien
gtgtccctctgcctcaccacggtga

SEQ ID NO: 3557691 - DNA, 25 bp, Homo sapien
cagcatctcccacttgtgcagcatt

SEQ ID NO: 3557692 - DNA, 25 bp, Homo sapien
ttttcatggcaaaaatctgcccagt

SEQ ID NO: 3557693 - DNA, 25 bp, Homo sapien
agttctttcacctttgatacgaagg

SEQ ID NO: 3557694 - DNA, 25 bp, Homo sapien
catctctctgcagacgcagttcttt

SEQ ID NO: 3557695 - DNA, 25 bp, Homo sapien
gatcaccttcaagatctcaaagtca

SEQ ID NO: 3557696 - DNA, 25 bp, Homo sapien
gccgatcaccttcaagatctcaaag

SEQ ID NO: 3557697 - DNA, 25 bp, Homo sapien
cttgggcaagccaggagctgccgct

SEQ ID NO: 3557698 - DNA, 25 bp, Homo sapien
ttgggcaagccaggagctgccgctc

SEQ ID NO: 3557699 - DNA, 25 bp, Homo sapien
ctgagcacaagttggtatgtgtgtg

SEQ ID NO: 3557700 - DNA, 25 bp, Homo sapien
ggtatgtgtgtgcatgtgtcggggt

SEQ ID NO: 3557701 - DNA, 25 bp, Homo sapien
gttggtatgtgtgtgcatgtgtcgg

SEQ ID NO: 3557702 - DNA, 25 bp, Homo sapien
tgagcacaagttggtatgtgtgtgc

SEQ ID NO: 3557703 - DNA, 25 bp, Homo sapien
gcagatctaggaggccgtcgagccc

SEQ ID NO: 3557704 - DNA, 25 bp, Homo sapien
gctcccgccgtagggggccgctgct

SEQ ID NO: 3557705 - DNA, 25 bp, Homo sapien
ctgctgagctcgtggtgcagcgcca

SEQ ID NO: 3557706 - DNA, 25 bp, Homo sapien
gcagcagatctaggaggccgtcgag

SEQ ID NO: 3557707 - DNA, 25 bp, Homo sapien
tgagtacagctgcagtctaagggtg

SEQ ID NO: 3557708 - DNA, 25 bp, Homo sapien
taacctgatggaaagcacgctggag

SEQ ID NO: 3557709 - DNA, 25 bp, Homo sapien
tgaacttcctcagatcgtgacagcg

SEQ ID NO: 3557710 - DNA, 25 bp, Homo sapien
gcagcaactgaagcatccactggca

SEQ ID NO: 3557711 - DNA, 25 bp, Homo sapien
aacttcaacagtgacttcccggcaa

SEQ ID NO: 3557712 - DNA, 25 bp, Homo sapien
ctaatactgtatggagtgacgggct

SEQ ID NO: 3557713 - DNA, 25 bp, Homo sapien
ttcctgcagactccgagcagcgctg

SEQ ID NO: 3557714 - DNA, 25 bp, Homo sapien
tgacgggctaaggagaacaaggcca

SEQ ID NO: 3557715 - DNA, 25 bp, Homo sapien
agcccggacagtggccactggcctg

SEQ ID NO: 3557716 - DNA, 25 bp, Homo sapien
ccagctgtgtggtacctggtgctcc

SEQ ID NO: 3557717 - DNA, 25 bp, Homo sapien
tgtggtacctggtgctccacctgcc

SEQ ID NO: 3557718 - DNA, 25 bp, Homo sapien
gacagtggccactggcctgcaaacg

SEQ ID NO: 3557719 - DNA, 25 bp, Homo sapien
gggtgcgtcccaaagctccagttaa

SEQ ID NO: 3557720 - DNA, 25 bp, Homo sapien
tgtaaggacatccaagtgagctgcc

SEQ ID NO: 3557721 - DNA, 25 bp, Homo sapien
gctgtctggacatgagagcctagcc

SEQ ID NO: 3557722 - DNA, 25 bp, Homo sapien
tcctttgctaaacagaggaggaagg

SEQ ID NO: 3557723 - DNA, 25 bp, Homo sapien
caagtatgaaagatatcactttaca

SEQ ID NO: 3557724 - DNA, 25 bp, Homo sapien
ctttacagaacagaaactagcttat

SEQ ID NO: 3557725 - DNA, 25 bp, Homo sapien
cagaacagaaactagcttatgtatt

SEQ ID NO: 3557726 - DNA, 25 bp, Homo sapien
tattgggaactttggtcaagtatga

SEQ ID NO: 3557727 - DNA, 25 bp, Homo sapien
cagctgccaaaagggcgacctggct

SEQ ID NO: 3557728 - DNA, 25 bp, Homo sapien
tttcgagaggcgaggaaacatccgc

SEQ ID NO: 3557729 - DNA, 25 bp, Homo sapien
gcggcgacaaagaacgcagcctcta

SEQ ID NO: 3557730 - DNA, 25 bp, Homo sapien
tcccgtgaagcaacctcagctcaga

SEQ ID NO: 3557731 - DNA, 25 bp, Homo sapien
cgcccgtgatcttgccgttgacagg

SEQ ID NO: 3557732 - DNA, 25 bp, Homo sapien
ccttcttggcgttggcgcccgtgat

SEQ ID NO: 3557733 - DNA, 25 bp, Homo sapien
agcttccagatcttccctagcacgg

SEQ ID NO: 3557734 - DNA, 25 bp, Homo sapien
gcttccagatcttccctagcacggt

SEQ ID NO: 3557735 - DNA, 25 bp, Homo sapien
actccacgtcgtcgatgccctcgcc

SEQ ID NO: 3557736 - DNA, 25 bp, Homo sapien
tccacgtcgtcgatgccctcgccgg

SEQ ID NO: 3557737 - DNA, 25 bp, Homo sapien
acccactccacgtcgtcgatgccct

SEQ ID NO: 3557738 - DNA, 25 bp, Homo sapien
caccacccactccacgtcgtcgatg

SEQ ID NO: 3557739 - DNA, 25 bp, Homo sapien
ccgaacggcccgttcatggtgccgt

SEQ ID NO: 3557740 - DNA, 25 bp, Homo sapien
accatcaccatcagccgcgcgatgt

SEQ ID NO: 3557741 - DNA, 25 bp, Homo sapien
gttcatggtgccgtcaaaggcgccg

SEQ ID NO: 3557742 - DNA, 25 bp, Homo sapien
gcgcgatgtcgttggccagcatgtc

SEQ ID NO: 3557743 - DNA, 25 bp, Homo sapien
tccagtcagggcttcacaagcataa

SEQ ID NO: 3557744 - DNA, 25 bp, Homo sapien
ggcttcacaagcataaagtgctgct

SEQ ID NO: 3557745 - DNA, 25 bp, Homo sapien
actccaggccaagtggttccagtca

SEQ ID NO: 3557746 - DNA, 25 bp, Homo sapien
ggggcgactcggcaaaaccatctgg

SEQ ID NO: 3557747 - DNA, 25 bp, Homo sapien
ggctgcggcaaggattcatggacag

SEQ ID NO: 3557748 - DNA, 25 bp, Homo sapien
gggagatctggtgctcgcgctcaat

SEQ ID NO: 3557749 - DNA, 25 bp, Homo sapien
atcttgcggaggctcgggaagtccc

SEQ ID NO: 3557750 - DNA, 25 bp, Homo sapien
tagatctctccgaggttgttcacca

SEQ ID NO: 3557751 - DNA, 25 bp, Homo sapien
ggtgctcgcgctcaatcttctggta

SEQ ID NO: 3557752 - DNA, 25 bp, Homo sapien
acggggtgagcatcaggcgctctct

SEQ ID NO: 3557753 - DNA, 25 bp, Homo sapien
gggtgagcatcaggcgctctcttgg

SEQ ID NO: 3557754 - DNA, 25 bp, Homo sapien
gagcatcaggcgctctcttggccca

SEQ ID NO: 3557755 - DNA, 25 bp, Homo sapien
aggacggggtgagcatcaggcgctc

SEQ ID NO: 3557756 - DNA, 25 bp, Homo sapien
caaggatactccaaggtgctcgctc

SEQ ID NO: 3557757 - DNA, 25 bp, Homo sapien
acagccttggccttgcacggatcat

SEQ ID NO: 3557758 - DNA, 25 bp, Homo sapien
caggaaaacgcacttgaaacagaag

SEQ ID NO: 3557759 - DNA, 25 bp, Homo sapien
gtgctcgctcaggaacagggaagca

SEQ ID NO: 3557760 - DNA, 25 bp, Homo sapien
caatttgtcgtgtaccactgggcac

SEQ ID NO: 3557761 - DNA, 25 bp, Homo sapien
gaaggcaatttgtcgtgtaccactg

SEQ ID NO: 3557762 - DNA, 25 bp, Homo sapien
tcgtgtaccactgggcacatcacac

SEQ ID NO: 3557763 - DNA, 25 bp, Homo sapien
aaagaaggcaatttgtcgtgtacca

SEQ ID NO: 3557764 - DNA, 25 bp, Homo sapien
aaatccctgctgagtgccgatggag

SEQ ID NO: 3557765 - DNA, 25 bp, Homo sapien
tcacagctcggatgacgaaggattt

SEQ ID NO: 3557766 - DNA, 25 bp, Homo sapien
ggccttgccaagtcgtgtccagcca

SEQ ID NO: 3557767 - DNA, 25 bp, Homo sapien
tggtggttgccagctttatccaagc

SEQ ID NO: 3557768 - DNA, 25 bp, Homo sapien
tatccaaagtcagacacgccaaggg

SEQ ID NO: 3557769 - DNA, 25 bp, Homo sapien
cagaggctgctgataggtgccacca

SEQ ID NO: 3557770 - DNA, 25 bp, Homo sapien
tctaggctggctcacgatagggtgc

SEQ ID NO: 3557771 - DNA, 25 bp, Homo sapien
tatttctgaaacaaccgagccctgt

SEQ ID NO: 3557772 - DNA, 25 bp, Homo sapien
cagccgtgcccgcttgatcaggtca

SEQ ID NO: 3557773 - DNA, 25 bp, Homo sapien
gatcaggtcattgagcttcctgagg

SEQ ID NO: 3557774 - DNA, 25 bp, Homo sapien
ttggccagccgtgcccgcttgatca

SEQ ID NO: 3557775 - DNA, 25 bp, Homo sapien
ccgcttgatcaggtcattgagcttc

SEQ ID NO: 3557776 - DNA, 25 bp, Homo sapien
cacttccgagaactcatcggagatg

SEQ ID NO: 3557777 - DNA, 25 bp, Homo sapien
cttcagagccttgatcacttccgag

SEQ ID NO: 3557778 - DNA, 25 bp, Homo sapien
gtcgaagagcaggatgatgcggtcc

SEQ ID NO: 3557779 - DNA, 25 bp, Homo sapien
tccaggacggctgcaaagtcatagc

SEQ ID NO: 3557780 - DNA, 25 bp, Homo sapien
caccacactccatttacctgtataa

SEQ ID NO: 3557781 - DNA, 25 bp, Homo sapien
aaaactacctatcagatactacgct

SEQ ID NO: 3557782 - DNA, 25 bp, Homo sapien
cagatactacgcttattacctgggt

SEQ ID NO: 3557783 - DNA, 25 bp, Homo sapien
atctatacaccaaaccccaccacac

SEQ ID NO: 3557784 - DNA, 25 bp, Homo sapien
cctagctgccggctttgactgcaag

SEQ ID NO: 3557785 - DNA, 25 bp, Homo sapien
cagaatctaggcaggagtttacaca

SEQ ID NO: 3557786 - DNA, 25 bp, Homo sapien
cacaattggaatgggcacggtgcac

SEQ ID NO: 3557787 - DNA, 25 bp, Homo sapien
gacacgggaaggatctgcaagttaa

SEQ ID NO: 3557788 - DNA, 25 bp, Homo sapien
tgctgtccaggacggggttgggcag

SEQ ID NO: 3557789 - DNA, 25 bp, Homo sapien
gatgctgtccaggacggggttgggc

SEQ ID NO: 3557790 - DNA, 25 bp, Homo sapien
atgctgtccaggacggggttgggca

SEQ ID NO: 3557791 - DNA, 25 bp, Homo sapien
tctctccagacaggatcccgggggt

SEQ ID NO: 3557792 - DNA, 25 bp, Homo sapien
cattctctgaaagtccgagcaggct

SEQ ID NO: 3557793 - DNA, 25 bp, Homo sapien
tctcagttgagagcagggatccttc

SEQ ID NO: 3557794 - DNA, 25 bp, Homo sapien
gcctaggtcaccattcagttcggag

SEQ ID NO: 3557795 - DNA, 25 bp, Homo sapien
gaagctgcctttccaacagacggga

SEQ ID NO: 3557796 - DNA, 25 bp, Homo sapien
gggagccgacaacgcccactcttag

SEQ ID NO: 3557797 - DNA, 25 bp, Homo sapien
cagaagctgggggagccgacaacgc

SEQ ID NO: 3557798 - DNA, 25 bp, Homo sapien
gctgggggagccgacaacgcccact

SEQ ID NO: 3557799 - DNA, 25 bp, Homo sapien
cgcccactcttagacccccagtggg

SEQ ID NO: 3557800 - DNA, 25 bp, Homo sapien
gaggaaagcgttgccaaacgcgttg

SEQ ID NO: 3557801 - DNA, 25 bp, Homo sapien
ggccgtgcatgacggcgatgaagga

SEQ ID NO: 3557802 - DNA, 25 bp, Homo sapien
cgcgggtccaccacgagcgcgttgc

SEQ ID NO: 3557803 - DNA, 25 bp, Homo sapien
ggcccgatgcgcatccccgggaagt

SEQ ID NO: 3557804 - DNA, 25 bp, Homo sapien
ctgctcgatcaggtgtcggatgaag

SEQ ID NO: 3557805 - DNA, 25 bp, Homo sapien
tcttgcggcgggcatccttgctgac

SEQ ID NO: 3557806 - DNA, 25 bp, Homo sapien
ccgtgctgtactgccccacgaggag

SEQ ID NO: 3557807 - DNA, 25 bp, Homo sapien
gccaccgtctggaagagctccggct

SEQ ID NO: 3557808 - DNA, 25 bp, Homo sapien
tcggtccctcagtggcggctagcgc

SEQ ID NO: 3557809 - DNA, 25 bp, Homo sapien
acccctcgcggagcggcctttatag

SEQ ID NO: 3557810 - DNA, 25 bp, Homo sapien
tcgaagcgccctctgccgaatgctg

SEQ ID NO: 3557811 - DNA, 25 bp, Homo sapien
agggaatcgggagcgacccacactg

SEQ ID NO: 3557812 - DNA, 25 bp, Homo sapien
gggatggctccacgagacacccagt

SEQ ID NO: 3557813 - DNA, 25 bp, Homo sapien
gaatccccggaagcatcggagtacc

SEQ ID NO: 3557814 - DNA, 25 bp, Homo sapien
gtgcggtcctccagctggctcggaa

SEQ ID NO: 3557815 - DNA, 25 bp, Homo sapien
ccctcgtagggaggctcgcgaaagt

SEQ ID NO: 3557816 - DNA, 25 bp, Homo sapien
gggatctgtgccctacctcccctta

SEQ ID NO: 3557817 - DNA, 25 bp, Homo sapien
catttactgggatctgtgccctacc

SEQ ID NO: 3557818 - DNA, 25 bp, Homo sapien
ggatctgtgccctacctccccttac

SEQ ID NO: 3557819 - DNA, 25 bp, Homo sapien
ttactgggatctgtgccctacctcc

SEQ ID NO: 3557820 - DNA, 25 bp, Homo sapien
cacgatgggaggtttgttcgcctac

SEQ ID NO: 3557821 - DNA, 25 bp, Homo sapien
cattggagagcggataagtaattcc

SEQ ID NO: 3557822 - DNA, 25 bp, Homo sapien
aattgaacctgcgactttgaaagcc

SEQ ID NO: 3557823 - DNA, 25 bp, Homo sapien
taccgcttgtaagatcccttccgag

SEQ ID NO: 3557824 - DNA, 25 bp, Homo sapien
ggaaaaaagtcagtggccgccactc

SEQ ID NO: 3557825 - DNA, 25 bp, Homo sapien
gggcgctaacatcccagccacagag

SEQ ID NO: 3557826 - DNA, 25 bp, Homo sapien
gaaatagcccggtgtgggtgatggg

SEQ ID NO: 3557827 - DNA, 25 bp, Homo sapien
attaagtgcctcctttgagtctgag

SEQ ID NO: 3557828 - DNA, 25 bp, Homo sapien
gaagagtattgcagcccaagggaac

SEQ ID NO: 3557829 - DNA, 25 bp, Homo sapien
tcctgggaggaagcctgttgcattc

SEQ ID NO: 3557830 - DNA, 25 bp, Homo sapien
caaagcatagaggtgccacagggca

SEQ ID NO: 3557831 - DNA, 25 bp, Homo sapien
catttattgggcacgcgcctgggct

SEQ ID NO: 3557832 - DNA, 25 bp, Homo sapien
tggcattgaggcgaacatacctgtg

SEQ ID NO: 3557833 - DNA, 25 bp, Homo sapien
caattcataggtcagagccctgtgc

SEQ ID NO: 3557834 - DNA, 25 bp, Homo sapien
ggagacgagagcactggctgtcaat

SEQ ID NO: 3557835 - DNA, 25 bp, Homo sapien
atacctgtgacctatggaattggca

SEQ ID NO: 3557836 - DNA, 25 bp, Homo sapien
tccactacccgccaccatctggcct

SEQ ID NO: 3557837 - DNA, 25 bp, Homo sapien
catctggcctgggagcgtcgccacg

SEQ ID NO: 3557838 - DNA, 25 bp, Homo sapien
tgggagcgtcgccacggtagtcctg

SEQ ID NO: 3557839 - DNA, 25 bp, Homo sapien
gtcgccacggtagtcctggctggtc

SEQ ID NO: 3557840 - DNA, 25 bp, Homo sapien
cagtgggcacttccacatggagttg

SEQ ID NO: 3557841 - DNA, 25 bp, Homo sapien
ccctgcctggcgtccgccttcggca

SEQ ID NO: 3557842 - DNA, 25 bp, Homo sapien
tggagagtgtcccatgcccactcac

SEQ ID NO: 3557843 - DNA, 25 bp, Homo sapien
tggcgtccgccttcggcagggctct

SEQ ID NO: 3557844 - DNA, 25 bp, Homo sapien
cagggctctggagagtgtcccatgc

SEQ ID NO: 3557845 - DNA, 25 bp, Homo sapien
gatgtagatacacaaacctgccgca

SEQ ID NO: 3557846 - DNA, 25 bp, Homo sapien
gtcaatcaggacttacgaggccacc

SEQ ID NO: 3557847 - DNA, 25 bp, Homo sapien
tcccagacaggttccggtgacaggt

SEQ ID NO: 3557848 - DNA, 25 bp, Homo sapien
tgccagtggtgcatacaggcctaga

SEQ ID NO: 3557849 - DNA, 25 bp, Homo sapien
gtgccgggctggccttcggggcaca

SEQ ID NO: 3557850 - DNA, 25 bp, Homo sapien
tgagtgccgggctggccttcggggc

SEQ ID NO: 3557851 - DNA, 25 bp, Homo sapien
ctgagtgccgggctggccttcgggg

SEQ ID NO: 3557852 - DNA, 25 bp, Homo sapien
gagtgccgggctggccttcggggca

SEQ ID NO: 3557853 - DNA, 25 bp, Homo sapien
caaaagcctccgtcctgggagaagg

SEQ ID NO: 3557854 - DNA, 25 bp, Homo sapien
tgggaaggcgtccttcacagtggcc

SEQ ID NO: 3557855 - DNA, 25 bp, Homo sapien
taatacatcgaaccacacggatatc

SEQ ID NO: 3557856 - DNA, 25 bp, Homo sapien
tttctccccggaggaaaagtgcaga

SEQ ID NO: 3557857 - DNA, 25 bp, Homo sapien
agcgccacttgagggcgtggtcctt

SEQ ID NO: 3557858 - DNA, 25 bp, Homo sapien
gggacaatctggttgcgcatgcccc

SEQ ID NO: 3557859 - DNA, 25 bp, Homo sapien
cgatgccacgtcacagatggtctga

SEQ ID NO: 3557860 - DNA, 25 bp, Homo sapien
tcagtcttgggcactgtccgagcgc

SEQ ID NO: 3557861 - DNA, 25 bp, Homo sapien
tgtcatacacggtctcagctgtggc

SEQ ID NO: 3557862 - DNA, 25 bp, Homo sapien
gacaggatgtcatacacggtctcag

SEQ ID NO: 3557863 - DNA, 25 bp, Homo sapien
gcgcagagcgcttatcctgcaggga

SEQ ID NO: 3557864 - DNA, 25 bp, Homo sapien
tctcgcactgtgtcgtaggccttgg

SEQ ID NO: 3557865 - DNA, 25 bp, Homo sapien
ctggatagcctgtaccaaccggttg

SEQ ID NO: 3557866 - DNA, 25 bp, Homo sapien
gccatccttcctgtactgctcaatg

SEQ ID NO: 3557867 - DNA, 25 bp, Homo sapien
tccttcctgtactgctcaatgggca

SEQ ID NO: 3557868 - DNA, 25 bp, Homo sapien
gttgctgagttccagggcggcagag

SEQ ID NO: 3557869 - DNA, 25 bp, Homo sapien
agagctggacaaccgagtgcatggg

SEQ ID NO: 3557870 - DNA, 25 bp, Homo sapien
gccactcgttgagggcatagcccag

SEQ ID NO: 3557871 - DNA, 25 bp, Homo sapien
gcagctggttcttgcggatgtcctg

SEQ ID NO: 3557872 - DNA, 25 bp, Homo sapien
tgtcctgcagccactcgttgagggc

SEQ ID NO: 3557873 - DNA, 25 bp, Homo sapien
cagaacagaaggaagatcagggacc

SEQ ID NO: 3557874 - DNA, 25 bp, Homo sapien
aacagaaggaagatcagggaccctg

SEQ ID NO: 3557875 - DNA, 25 bp, Homo sapien
gaacagaaggaagatcagggaccct

SEQ ID NO: 3557876 - DNA, 25 bp, Homo sapien
cagaaggaagatcagggaccctgga

SEQ ID NO: 3557877 - DNA, 25 bp, Homo sapien
cgatgaggaggccagcaaaagtgcc

SEQ ID NO: 3557878 - DNA, 25 bp, Homo sapien
cttcagctcggagcagttgagttgg

SEQ ID NO: 3557879 - DNA, 25 bp, Homo sapien
ccgtgcctgcaacagagccgcttta

SEQ ID NO: 3557880 - DNA, 25 bp, Homo sapien
acagagccgctttagcttcagctcg

SEQ ID NO: 3557881 - DNA, 25 bp, Homo sapien
gccagatggggacctcagacgtgaa

SEQ ID NO: 3557882 - DNA, 25 bp, Homo sapien
gggacctcagacgtgaagcggaact

SEQ ID NO: 3557883 - DNA, 25 bp, Homo sapien
cctggtccatcgtgacgtgcttgcc

SEQ ID NO: 3557884 - DNA, 25 bp, Homo sapien
tgccatggtaatccagccagatggg

SEQ ID NO: 3557885 - DNA, 25 bp, Homo sapien
ggggcctcctgcgaaccagtggtct

SEQ ID NO: 3557886 - DNA, 25 bp, Homo sapien
gcctcctgcgaaccagtggtctcta

SEQ ID NO: 3557887 - DNA, 25 bp, Homo sapien
ctggggcctcctgcgaaccagtggt

SEQ ID NO: 3557888 - DNA, 25 bp, Homo sapien
cagtggtctctacgccttcggcctg

SEQ ID NO: 3557889 - DNA, 25 bp, Homo sapien
ccggccaccagactagtgaagaagt

SEQ ID NO: 3557890 - DNA, 25 bp, Homo sapien
accagactagtgaagaagtccttga

SEQ ID NO: 3557891 - DNA, 25 bp, Homo sapien
gatgccggccaccagactagtgaag

SEQ ID NO: 3557892 - DNA, 25 bp, Homo sapien
tcccctgggaccacggggttgatgc

SEQ ID NO: 3557893 - DNA, 25 bp, Homo sapien
tggtccacattgagccgcaggggca

SEQ ID NO: 3557894 - DNA, 25 bp, Homo sapien
gcgagacgcggagacagcactcagg

SEQ ID NO: 3557895 - DNA, 25 bp, Homo sapien
tcaggcccacccaggttggtagtgg

SEQ ID NO: 3557896 - DNA, 25 bp, Homo sapien
ccacatgcagcgctttgatggtgag

SEQ ID NO: 3557897 - DNA, 25 bp, Homo sapien
cactcgtgtgtaggtacaggaactt

SEQ ID NO: 3557898 - DNA, 25 bp, Homo sapien
acaggaacttgttgatctgggagga

SEQ ID NO: 3557899 - DNA, 25 bp, Homo sapien
tgcacgatgaacacctgacgggaca

SEQ ID NO: 3557900 - DNA, 25 bp, Homo sapien
ttagagtgggcacgtcgcggcatcc

SEQ ID NO: 3557901 - DNA, 25 bp, Homo sapien
tgcccccctgcgtgcgccatgagtt

SEQ ID NO: 3557902 - DNA, 25 bp, Homo sapien
tccatgaggacatggtgctgccgcc

SEQ ID NO: 3557903 - DNA, 25 bp, Homo sapien
ccctgcgtgcgccatgagttctggg

SEQ ID NO: 3557904 - DNA, 25 bp, Homo sapien
cttgctcagctggatctccatgagg

SEQ ID NO: 3557905 - DNA, 25 bp, Homo sapien
agtaaccgtccctcacaacgatggg

SEQ ID NO: 3557906 - DNA, 25 bp, Homo sapien
ccccatagaggtgccagacgaggga

SEQ ID NO: 3557907 - DNA, 25 bp, Homo sapien
tcacgtagcaccacccgagtgctgg

SEQ ID NO: 3557908 - DNA, 25 bp, Homo sapien
tgccgatcggccgtgagaagtaacc

SEQ ID NO: 3557909 - DNA, 25 bp, Homo sapien
cctgagtggtctgtccaagaggagc

SEQ ID NO: 3557910 - DNA, 25 bp, Homo sapien
cctgcctcctaagacctgggtgagt

SEQ ID NO: 3557911 - DNA, 25 bp, Homo sapien
gacactcctgggttgctatcacccg

SEQ ID NO: 3557912 - DNA, 25 bp, Homo sapien
tatcacccgagtctatgcctgagtg

SEQ ID NO: 3557913 - DNA, 25 bp, Homo sapien
ggatgcagaactcatcactgtccag

SEQ ID NO: 3557914 - DNA, 25 bp, Homo sapien
ccaggccgggagcatcaaggatgca

SEQ ID NO: 3557915 - DNA, 25 bp, Homo sapien
agggtgtctccatcgccctcctctt

SEQ ID NO: 3557916 - DNA, 25 bp, Homo sapien
tctcctctgagcatgaccctaagct

SEQ ID NO: 3557917 - DNA, 25 bp, Homo sapien
gtagacggagatgggcgacgcctga

SEQ ID NO: 3557918 - DNA, 25 bp, Homo sapien
tgggcgacgcctgagggaggtggcc

SEQ ID NO: 3557919 - DNA, 25 bp, Homo sapien
cggagatgggcgacgcctgagggag

SEQ ID NO: 3557920 - DNA, 25 bp, Homo sapien
tgggaataggtagacggagatgggc

SEQ ID NO: 3557921 - DNA, 25 bp, Homo sapien
cgtcggccaggtcacgctggttgat

SEQ ID NO: 3557922 - DNA, 25 bp, Homo sapien
gccagctcccgtaggctgcgctcgg

SEQ ID NO: 3557923 - DNA, 25 bp, Homo sapien
ggctgcgctcggtgtccaggagggc

SEQ ID NO: 3557924 - DNA, 25 bp, Homo sapien
gagggcgtcggccaggtcacgctgg

SEQ ID NO: 3557925 - DNA, 25 bp, Homo sapien
ggtgcagatcgcctgtgctcattac

SEQ ID NO: 3557926 - DNA, 25 bp, Homo sapien
cattacgtactggagcaggttgacc

SEQ ID NO: 3557927 - DNA, 25 bp, Homo sapien
tgcacgtgtaccacattgttggagc

SEQ ID NO: 3557928 - DNA, 25 bp, Homo sapien
gttggagcagcgcagctcgaatagt

SEQ ID NO: 3557929 - DNA, 25 bp, Homo sapien
tccaggttttaatcacaagttccaa

SEQ ID NO: 3557930 - DNA, 25 bp, Homo sapien
aggttttaatcacaagttccaagag

SEQ ID NO: 3557931 - DNA, 25 bp, Homo sapien
cagtttgccctcggtgctccctttc

SEQ ID NO: 3557932 - DNA, 25 bp, Homo sapien
cacaagttccaagaggtcaacatcc

SEQ ID NO: 3557933 - DNA, 25 bp, Homo sapien
agggtctccacctcacacttgtcgg

SEQ ID NO: 3557934 - DNA, 25 bp, Homo sapien
caaggcggagtcatcgaggatgaac

SEQ ID NO: 3557935 - DNA, 25 bp, Homo sapien
cctcacacttgtcggacaggtacaa

SEQ ID NO: 3557936 - DNA, 25 bp, Homo sapien
acttgtcggacaggtacaaggcgga

SEQ ID NO: 3557937 - DNA, 25 bp, Homo sapien
acagggctgagaagggcccgggcac

SEQ ID NO: 3557938 - DNA, 25 bp, Homo sapien
agggctgagaagggcccgggcaccg

SEQ ID NO: 3557939 - DNA, 25 bp, Homo sapien
gaacagggctgagaagggcccgggc

SEQ ID NO: 3557940 - DNA, 25 bp, Homo sapien
ctgggggggaacagggctgagaagg

SEQ ID NO: 3557941 - DNA, 25 bp, Homo sapien
tccgcggtgatgaggacacgcactg

SEQ ID NO: 3557942 - DNA, 25 bp, Homo sapien
ctggagagagtgaaggtctccgcgg

SEQ ID NO: 3557943 - DNA, 25 bp, Homo sapien
aaggtctccgcggtgatgaggacac

SEQ ID NO: 3557944 - DNA, 25 bp, Homo sapien
gacacgcactgggaggtagagtggc

SEQ ID NO: 3557945 - DNA, 25 bp, Homo sapien
cagggtcatccagcacgtctaggaa

SEQ ID NO: 3557946 - DNA, 25 bp, Homo sapien
catccagcacgtctaggaactccaa

SEQ ID NO: 3557947 - DNA, 25 bp, Homo sapien
gggtcatccagcacgtctaggaact

SEQ ID NO: 3557948 - DNA, 25 bp, Homo sapien
tccagcacgtctaggaactccaaca

SEQ ID NO: 3557949 - DNA, 25 bp, Homo sapien
ggctttgtgcaaccgcagtgtcacc

SEQ ID NO: 3557950 - DNA, 25 bp, Homo sapien
ccatgtagtggcgcaaggtggcttt

SEQ ID NO: 3557951 - DNA, 25 bp, Homo sapien
aggtggctttgtgcaaccgcagtgt

SEQ ID NO: 3557952 - DNA, 25 bp, Homo sapien
ttgtgcaaccgcagtgtcaccagga

SEQ ID NO: 3557953 - DNA, 25 bp, Homo sapien
acaacatgtggggtccccggccctg

SEQ ID NO: 3557954 - DNA, 25 bp, Homo sapien
ttcacattcttgtgggggtccaggt

SEQ ID NO: 3557955 - DNA, 25 bp, Homo sapien
gccctggcccttgcggcccgaggct

SEQ ID NO: 3557956 - DNA, 25 bp, Homo sapien
ccttcctccgatgggtagatggttg

SEQ ID NO: 3557957 - DNA, 25 bp, Homo sapien
tgactgggcagcgggtagtcatcca

SEQ ID NO: 3557958 - DNA, 25 bp, Homo sapien
gtccaggtgactgggcagcgggtag

SEQ ID NO: 3557959 - DNA, 25 bp, Homo sapien
caggtgactgggcagcgggtagtca

SEQ ID NO: 3557960 - DNA, 25 bp, Homo sapien
actgggcagcgggtagtcatccacg

SEQ ID NO: 3557961 - DNA, 25 bp, Homo sapien
cgctgaagagggtaccgtgctccat

SEQ ID NO: 3557962 - DNA, 25 bp, Homo sapien
cacagtactgggagacgctgaagag

SEQ ID NO: 3557963 - DNA, 25 bp, Homo sapien
ttttcagcttccagacagaagtagc

SEQ ID NO: 3557964 - DNA, 25 bp, Homo sapien
ggccacagtactgggagacgctgaa

SEQ ID NO: 3557965 - DNA, 25 bp, Homo sapien
gtgggcatcctcgtcatccgagtcc

SEQ ID NO: 3557966 - DNA, 25 bp, Homo sapien
gctgtgatccgccccttcagcactg

SEQ ID NO: 3557967 - DNA, 25 bp, Homo sapien
ggcatcctcgtcatccgagtccgag

SEQ ID NO: 3557968 - DNA, 25 bp, Homo sapien
gcatcctcgtcatccgagtccgagt

SEQ ID NO: 3557969 - DNA, 25 bp, Homo sapien
ccacatgagcaggtcgttgttgatc

SEQ ID NO: 3557970 - DNA, 25 bp, Homo sapien
acatcttaaagctgtcgtgccagaa

SEQ ID NO: 3557971 - DNA, 25 bp, Homo sapien
tcccacatgagcaggtcgttgttga

SEQ ID NO: 3557972 - DNA, 25 bp, Homo sapien
aggctcccacatgagcaggtcgttg

SEQ ID NO: 3557973 - DNA, 25 bp, Homo sapien
tgttgtagatgctctcgtagacctc

SEQ ID NO: 3557974 - DNA, 25 bp, Homo sapien
tctcgtagacctccttgctgggcag

SEQ ID NO: 3557975 - DNA, 25 bp, Homo sapien
gtccggctctggaacgtcctcatct

SEQ ID NO: 3557976 - DNA, 25 bp, Homo sapien
tctggaacgtcctcatctcctcagg

SEQ ID NO: 3557977 - DNA, 25 bp, Homo sapien
aggttcccgcagctcacagggactc

SEQ ID NO: 3557978 - DNA, 25 bp, Homo sapien
ctcaggttcccgcagctcacaggga

SEQ ID NO: 3557979 - DNA, 25 bp, Homo sapien
gaagggcgagggctcaggttcccgc

SEQ ID NO: 3557980 - DNA, 25 bp, Homo sapien
ggttcccgcagctcacagggactct

SEQ ID NO: 3557981 - DNA, 25 bp, Homo sapien
tttggagacacgcaggcaagggaca

SEQ ID NO: 3557982 - DNA, 25 bp, Homo sapien
gggacaggtggcttccctccatctt

SEQ ID NO: 3557983 - DNA, 25 bp, Homo sapien
caagggacaggtggcttccctccat

SEQ ID NO: 3557984 - DNA, 25 bp, Homo sapien
agtacttgcgcccagtgctcttggg

SEQ ID NO: 3557985 - DNA, 25 bp, Homo sapien
gccgaaataccgtctgctgctccat

SEQ ID NO: 3557986 - DNA, 25 bp, Homo sapien
ctgctaagctctgaccggaactggg

SEQ ID NO: 3557987 - DNA, 25 bp, Homo sapien
gcagagagccgaaataccgtctgct

SEQ ID NO: 3557988 - DNA, 25 bp, Homo sapien
catgtaggtcggagcaggtgagttc

SEQ ID NO: 3557989 - DNA, 25 bp, Homo sapien
cagttctgagtggcaatggcaggca

SEQ ID NO: 3557990 - DNA, 25 bp, Homo sapien
ctggaggctcagcaggtacggtggc

SEQ ID NO: 3557991 - DNA, 25 bp, Homo sapien
caggcgcagtagggcggccagccgg

SEQ ID NO: 3557992 - DNA, 25 bp, Homo sapien
gctccacgtccgcctggaagttggc

SEQ ID NO: 3557993 - DNA, 25 bp, Homo sapien
ggagcccagcgtaccaggaaaggtc

SEQ ID NO: 3557994 - DNA, 25 bp, Homo sapien
cctgggagcccagcgtaccaggaaa

SEQ ID NO: 3557995 - DNA, 25 bp, Homo sapien
tgtggcgcagatgggcgcagggccg

SEQ ID NO: 3557996 - DNA, 25 bp, Homo sapien
cttaggcacacggcgcaggatctgt

SEQ ID NO: 3557997 - DNA, 25 bp, Homo sapien
gaagtgcacttccatgctggttgtc

SEQ ID NO: 3557998 - DNA, 25 bp, Homo sapien
tgcacttccatgctggttgtccgcc

SEQ ID NO: 3557999 - DNA, 25 bp, Homo sapien
acttccatgctggttgtccgccggc

SEQ ID NO: 3558000 - DNA, 25 bp, Homo sapien
tccagctgcccgaagtgcacttcca

SEQ ID NO: 3558001 - DNA, 25 bp, Homo sapien
caaactcggtgaaaaagtgcgtggc

SEQ ID NO: 3558002 - DNA, 25 bp, Homo sapien
gaacatggctacagggacaggccct

SEQ ID NO: 3558003 - DNA, 25 bp, Homo sapien
cagacgtctgaagcaaggtcagggt

SEQ ID NO: 3558004 - DNA, 25 bp, Homo sapien
aggtcatcttcagcagcgagtcagg

SEQ ID NO: 3558005 - DNA, 25 bp, Homo sapien
ccggcgggaggccatgtcgctgcgc

SEQ ID NO: 3558006 - DNA, 25 bp, Homo sapien
ggcctgggcagagagccggcgggag

SEQ ID NO: 3558007 - DNA, 25 bp, Homo sapien
aggaggccaggtctacatcggagag

SEQ ID NO: 3558008 - DNA, 25 bp, Homo sapien
aggccatgtcgctgcgcacagagga

SEQ ID NO: 3558009 - DNA, 25 bp, Homo sapien
tcagccacaggtcttcggcacctag

SEQ ID NO: 3558010 - DNA, 25 bp, Homo sapien
cttcggcacctagcgggcggctctt

SEQ ID NO: 3558011 - DNA, 25 bp, Homo sapien
acaggtcttcggcacctagcgggcg

SEQ ID NO: 3558012 - DNA, 25 bp, Homo sapien
gttcaggtcctgctcaatcagccac

SEQ ID NO: 3558013 - DNA, 25 bp, Homo sapien
gctcacggcgctgagcagttcctga

SEQ ID NO: 3558014 - DNA, 25 bp, Homo sapien
ttcctgaagttgctggagctgcctc

SEQ ID NO: 3558015 - DNA, 25 bp, Homo sapien
ctgtaaggctcacggcgctgagcag

SEQ ID NO: 3558016 - DNA, 25 bp, Homo sapien
cagttcctgaagttgctggagctgc

SEQ ID NO: 3558017 - DNA, 25 bp, Homo sapien
ctgtgggctgtagataatcagcctt

SEQ ID NO: 3558018 - DNA, 25 bp, Homo sapien
caagaaggaagtaaatcccgcactt

SEQ ID NO: 3558019 - DNA, 25 bp, Homo sapien
gctgtagataatcagccttgctgag

SEQ ID NO: 3558020 - DNA, 25 bp, Homo sapien
aaggaagtaaatcccgcacttgaca

SEQ ID NO: 3558021 - DNA, 25 bp, Homo sapien
aaggcctcattttgcttcaacttca

SEQ ID NO: 3558022 - DNA, 25 bp, Homo sapien
ctgagcagctgccgatctgcaaggg

SEQ ID NO: 3558023 - DNA, 25 bp, Homo sapien
gggaaggcctcattttgcttcaact

SEQ ID NO: 3558024 - DNA, 25 bp, Homo sapien
atcagctccatgtaccctgagcagc

SEQ ID NO: 3558025 - DNA, 25 bp, Homo sapien
cgggagctcctcgtagtgcaggcgg

SEQ ID NO: 3558026 - DNA, 25 bp, Homo sapien
ctgtgccgggagctcctcgtagtgc

SEQ ID NO: 3558027 - DNA, 25 bp, Homo sapien
ggagctcctcgtagtgcaggcggac

SEQ ID NO: 3558028 - DNA, 25 bp, Homo sapien
gccgggagctcctcgtagtgcaggc

SEQ ID NO: 3558029 - DNA, 25 bp, Homo sapien
tggcttgggtcccgcactgcctcat

SEQ ID NO: 3558030 - DNA, 25 bp, Homo sapien
ggctgatgcacgtccaccggcggcg

SEQ ID NO: 3558031 - DNA, 25 bp, Homo sapien
gatgcacgtccaccggcggcgcctg

SEQ ID NO: 3558032 - DNA, 25 bp, Homo sapien
ttgggtcccgcactgcctcatcaca

SEQ ID NO: 3558033 - DNA, 25 bp, Homo sapien
cacacagtgctctgctctaggggca

SEQ ID NO: 3558034 - DNA, 25 bp, Homo sapien
actctgggcctgtatcacctggcct

SEQ ID NO: 3558035 - DNA, 25 bp, Homo sapien
catctaacttggttcttggggcctc

SEQ ID NO: 3558036 - DNA, 25 bp, Homo sapien
agagtgtagggtcagcccgtgccct

SEQ ID NO: 3558037 - DNA, 25 bp, Homo sapien
cgttccccatcacccggagagtgct

SEQ ID NO: 3558038 - DNA, 25 bp, Homo sapien
caccctcacgacagtgtccaggaag

SEQ ID NO: 3558039 - DNA, 25 bp, Homo sapien
aaggtcactttgatcctccgaagca

SEQ ID NO: 3558040 - DNA, 25 bp, Homo sapien
ctctgcacacggacctcgacggcca

SEQ ID NO: 3558041 - DNA, 25 bp, Homo sapien
tctcaggtcaggtagagcagcaaag

SEQ ID NO: 3558042 - DNA, 25 bp, Homo sapien
ccgttgtctggagcccctgttctgt

SEQ ID NO: 3558043 - DNA, 25 bp, Homo sapien
agcagcaaaggggaggcagaatttc

SEQ ID NO: 3558044 - DNA, 25 bp, Homo sapien
caccagggtggccgtgccgttgtct

SEQ ID NO: 3558045 - DNA, 25 bp, Homo sapien
ttgtggtcatgcatgaggcccagct

SEQ ID NO: 3558046 - DNA, 25 bp, Homo sapien
agcccatcccgcagacactcctggg

SEQ ID NO: 3558047 - DNA, 25 bp, Homo sapien
aggcccagctctgtgagtcggcagc

SEQ ID NO: 3558048 - DNA, 25 bp, Homo sapien
gctcagagggctccggtagcccatc

SEQ ID NO: 3558049 - DNA, 25 bp, Homo sapien
gcaggcaggcccagtcaggtcctgg

SEQ ID NO: 3558050 - DNA, 25 bp, Homo sapien
gaaacagggtctcaaggcaggcagg

SEQ ID NO: 3558051 - DNA, 25 bp, Homo sapien
cagtggtcggtgagcagagcagccc

SEQ ID NO: 3558052 - DNA, 25 bp, Homo sapien
aggccggacacgcgcactgtgcagt

SEQ ID NO: 3558053 - DNA, 25 bp, Homo sapien
accccggcggggctgcaaggtgagc

SEQ ID NO: 3558054 - DNA, 25 bp, Homo sapien
ggccacctcgatggagcccacgaag

SEQ ID NO: 3558055 - DNA, 25 bp, Homo sapien
tgttgatcaacactggtactgacgt

SEQ ID NO: 3558056 - DNA, 25 bp, Homo sapien
tactgacgcggttgttgacatacac

SEQ ID NO: 3558057 - DNA, 25 bp, Homo sapien
aggaagtaggcagcgacccaggcac

SEQ ID NO: 3558058 - DNA, 25 bp, Homo sapien
cccaggcacacgaggtgttgatcaa

SEQ ID NO: 3558059 - DNA, 25 bp, Homo sapien
cttcctggactcgggcctggctcct

SEQ ID NO: 3558060 - DNA, 25 bp, Homo sapien
cctggactcgggcctggctcctcac

SEQ ID NO: 3558061 - DNA, 25 bp, Homo sapien
tcctggactcgggcctggctcctca

SEQ ID NO: 3558062 - DNA, 25 bp, Homo sapien
ttcctggactcgggcctggctcctc

SEQ ID NO: 3558063 - DNA, 25 bp, Homo sapien
gaagtgacctaagtagtggtgcagc

SEQ ID NO: 3558064 - DNA, 25 bp, Homo sapien
ccttgtacagatcgaggctgagctg

SEQ ID NO: 3558065 - DNA, 25 bp, Homo sapien
tggatgtctcgcagggcaacgctgc

SEQ ID NO: 3558066 - DNA, 25 bp, Homo sapien
ggcagacccgctctttcacacagtt

SEQ ID NO: 3558067 - DNA, 25 bp, Homo sapien
tgccgcccgccggcgatccccgtcc

SEQ ID NO: 3558068 - DNA, 25 bp, Homo sapien
ctcggagaccgccgggcctgggccg

SEQ ID NO: 3558069 - DNA, 25 bp, Homo sapien
gtccggctccgctgttcactagagc

SEQ ID NO: 3558070 - DNA, 25 bp, Homo sapien
cgccggcgatccccgtccggctccg

SEQ ID NO: 3558071 - DNA, 25 bp, Homo sapien
aagattggtttagaagggccaggca

SEQ ID NO: 3558072 - DNA, 25 bp, Homo sapien
tcttacaaaggatcaaagctggaac

SEQ ID NO: 3558073 - DNA, 25 bp, Homo sapien
gaacgtcaagccctgtgacccaggg

SEQ ID NO: 3558074 - DNA, 25 bp, Homo sapien
tagcaagtaaccatcagggctggag

SEQ ID NO: 3558075 - DNA, 25 bp, Homo sapien
caggccctggccgtgaagatctcga

SEQ ID NO: 3558076 - DNA, 25 bp, Homo sapien
gaggcgacacatgtcacactggcag

SEQ ID NO: 3558077 - DNA, 25 bp, Homo sapien
gtcacactggcaggccctggccgtg

SEQ ID NO: 3558078 - DNA, 25 bp, Homo sapien
ctagtagcgagagaggcgacacatg

SEQ ID NO: 3558079 - DNA, 25 bp, Homo sapien
aggggagtccgtgctgcagtcccct

SEQ ID NO: 3558080 - DNA, 25 bp, Homo sapien
ggggagtccgtgctgcagtcccctt

SEQ ID NO: 3558081 - DNA, 25 bp, Homo sapien
ctctctggtcttcccgcgaccccag

SEQ ID NO: 3558082 - DNA, 25 bp, Homo sapien
cagcgtccatccaccgggcccgggc

SEQ ID NO: 3558083 - DNA, 25 bp, Homo sapien
cactgatggtgcagcactgagagac

SEQ ID NO: 3558084 - DNA, 25 bp, Homo sapien
ggtcacttcgcactgtcacattgaa

SEQ ID NO: 3558085 - DNA, 25 bp, Homo sapien
gttgtgtcggtaaccactggccacc

SEQ ID NO: 3558086 - DNA, 25 bp, Homo sapien
ccagcacagagtaccgagaagggaa

SEQ ID NO: 3558087 - DNA, 25 bp, Homo sapien
agcagatagaggaccagggtttgag

SEQ ID NO: 3558088 - DNA, 25 bp, Homo sapien
accagggtttgaggggacgccatag

SEQ ID NO: 3558089 - DNA, 25 bp, Homo sapien
gaccagggtttgaggggacgccata

SEQ ID NO: 3558090 - DNA, 25 bp, Homo sapien
gccaggaccagcagatagaggacca

SEQ ID NO: 3558091 - DNA, 25 bp, Homo sapien
ggtgggatggcgagttctttaaata

SEQ ID NO: 3558092 - DNA, 25 bp, Homo sapien
ggatggcgagttctttaaatactgc

SEQ ID NO: 3558093 - DNA, 25 bp, Homo sapien
gtgggatggcgagttctttaaatac

SEQ ID NO: 3558094 - DNA, 25 bp, Homo sapien
tgggatggcgagttctttaaatact

SEQ ID NO: 3558095 - DNA, 25 bp, Homo sapien
cggcttgcagttttcctgtgcctcc

SEQ ID NO: 3558096 - DNA, 25 bp, Homo sapien
gcggcttgcagttttcctgtgcctc

SEQ ID NO: 3558097 - DNA, 25 bp, Homo sapien
aggtgcggtcctcggagagcagctc

SEQ ID NO: 3558098 - DNA, 25 bp, Homo sapien
gaggtgcggtcctcggagagcagct

SEQ ID NO: 3558099 - DNA, 25 bp, Homo sapien
gcggtcctcggagagcagctcctgc

SEQ ID NO: 3558100 - DNA, 25 bp, Homo sapien
gtgcggtcctcggagagcagctcct

SEQ ID NO: 3558101 - DNA, 25 bp, Homo sapien
caggcctcgataagtcagatgtgga

SEQ ID NO: 3558102 - DNA, 25 bp, Homo sapien
gcctcgataagtcagatgtggagag

SEQ ID NO: 3558103 - DNA, 25 bp, Homo sapien
gcccaggcctcgataagtcagatgt

SEQ ID NO: 3558104 - DNA, 25 bp, Homo sapien
cacagcccaggcctcgataagtcag

SEQ ID NO: 3558105 - DNA, 25 bp, Homo sapien
ggaactcagcagttcagcccctgct

SEQ ID NO: 3558106 - DNA, 25 bp, Homo sapien
ggcaccctctggcatgtgacagatg

SEQ ID NO: 3558107 - DNA, 25 bp, Homo sapien
gcatagcaacaggacgcagcgggaa

SEQ ID NO: 3558108 - DNA, 25 bp, Homo sapien
accctctggcatgtgacagatgatg

SEQ ID NO: 3558109 - DNA, 25 bp, Homo sapien
ccaggtagacctagggaagtttcat

SEQ ID NO: 3558110 - DNA, 25 bp, Homo sapien
gatcattttggttctccacggccac

SEQ ID NO: 3558111 - DNA, 25 bp, Homo sapien
catttgggtgacaaggctcattacc

SEQ ID NO: 3558112 - DNA, 25 bp, Homo sapien
cattttgtctatggagaggcaacca

SEQ ID NO: 3558113 - DNA, 25 bp, Homo sapien
tcctaagtgccgaagacaaaaggcc

SEQ ID NO: 3558114 - DNA, 25 bp, Homo sapien
agaatggctcgggaggagtcactac

SEQ ID NO: 3558115 - DNA, 25 bp, Homo sapien
ccggccctcaggacatgaacatttt

SEQ ID NO: 3558116 - DNA, 25 bp, Homo sapien
tccagcgctgcatttggaaggctca

SEQ ID NO: 3558117 - DNA, 25 bp, Homo sapien
tgaagaaatatcgaaacgggaagag

SEQ ID NO: 3558118 - DNA, 25 bp, Homo sapien
cctgaagaaatatcgaaacgggaag

SEQ ID NO: 3558119 - DNA, 25 bp, Homo sapien
tcctgaagaaatatcgaaacgggaa

SEQ ID NO: 3558120 - DNA, 25 bp, Homo sapien
agaaatatcgaaacgggaagagaga

SEQ ID NO: 3558121 - DNA, 25 bp, Homo sapien
aaacccaaagaagccggtggctgct

SEQ ID NO: 3558122 - DNA, 25 bp, Homo sapien
gaaacccaaagaagccggtggctgc

SEQ ID NO: 3558123 - DNA, 25 bp, Homo sapien
aattcgccctggcaggctgtgtccc

SEQ ID NO: 3558124 - DNA, 25 bp, Homo sapien
gggtgggacaattcgccctggcagg

SEQ ID NO: 3558125 - DNA, 25 bp, Homo sapien
tcctgcaatccttgttgggtttttc

SEQ ID NO: 3558126 - DNA, 25 bp, Homo sapien
tgtttctggacatcagtgatatcag

SEQ ID NO: 3558127 - DNA, 25 bp, Homo sapien
agtgatatcagaggccagagtctcc

SEQ ID NO: 3558128 - DNA, 25 bp, Homo sapien
gccagagtctcctgcaatccttgtt

SEQ ID NO: 3558129 - DNA, 25 bp, Homo sapien
gggccttggctggaagtccctatct

SEQ ID NO: 3558130 - DNA, 25 bp, Homo sapien
gccttggctggaagtccctatcttg

SEQ ID NO: 3558131 - DNA, 25 bp, Homo sapien
cttggctggaagtccctatcttggc

SEQ ID NO: 3558132 - DNA, 25 bp, Homo sapien
ttggctggaagtccctatcttggcc

SEQ ID NO: 3558133 - DNA, 25 bp, Homo sapien
tgggctcgtccatgtgttttcgttt

SEQ ID NO: 3558134 - DNA, 25 bp, Homo sapien
gctcgtccatgtgttttcgtttcct

SEQ ID NO: 3558135 - DNA, 25 bp, Homo sapien
gggagctgggctcgtccatgtgttt

SEQ ID NO: 3558136 - DNA, 25 bp, Homo sapien
gctgggctcgtccatgtgttttcgt

SEQ ID NO: 3558137 - DNA, 25 bp, Homo sapien
ctactgctttcttctcaactgggac

SEQ ID NO: 3558138 - DNA, 25 bp, Homo sapien
cctactgctttcttctcaactggga

SEQ ID NO: 3558139 - DNA, 25 bp, Homo sapien
tcctactgctttcttctcaactggg

SEQ ID NO: 3558140 - DNA, 25 bp, Homo sapien
gctcacagttcatgaaggcacagtg

SEQ ID NO: 3558141 - DNA, 25 bp, Homo sapien
cccatccttaaactgccaaaggcaa

SEQ ID NO: 3558142 - DNA, 25 bp, Homo sapien
ccaaaggcaacttttaacaccagct

SEQ ID NO: 3558143 - DNA, 25 bp, Homo sapien
agttgctcacagttcatgaaggcac

SEQ ID NO: 3558144 - DNA, 25 bp, Homo sapien
caagaggactgtcacttattggttt

SEQ ID NO: 3558145 - DNA, 25 bp, Homo sapien
agaggactgtcacttattggtttcc

SEQ ID NO: 3558146 - DNA, 25 bp, Homo sapien
caacccaagaggactgtcacttatt

SEQ ID NO: 3558147 - DNA, 25 bp, Homo sapien
cccaagaggactgtcacttattggt

SEQ ID NO: 3558148 - DNA, 25 bp, Homo sapien
ggtgggaaactctctcccatttgct

SEQ ID NO: 3558149 - DNA, 25 bp, Homo sapien
tgaatttcaggtgggaaactctctc

SEQ ID NO: 3558150 - DNA, 25 bp, Homo sapien
caggtgacaggttttcatggaacca

SEQ ID NO: 3558151 - DNA, 25 bp, Homo sapien
tgggtaggggatcaagataatttcc

SEQ ID NO: 3558152 - DNA, 25 bp, Homo sapien
tttcccaagaccacgcggacagaat

SEQ ID NO: 3558153 - DNA, 25 bp, Homo sapien
aaagggctgaagattgtccaagttt

SEQ ID NO: 3558154 - DNA, 25 bp, Homo sapien
aatgaagtgttctgtagcaaagggc

SEQ ID NO: 3558155 - DNA, 25 bp, Homo sapien
tccaagtttcccaagaccacgcgga

SEQ ID NO: 3558156 - DNA, 25 bp, Homo sapien
gctttgaaatgtggaggcatatgtc

SEQ ID NO: 3558157 - DNA, 25 bp, Homo sapien
ccttcttaagggtatgactcagttt

SEQ ID NO: 3558158 - DNA, 25 bp, Homo sapien
cttgagggtcctgcaagatcctaat

SEQ ID NO: 3558159 - DNA, 25 bp, Homo sapien
acacttagccaaagaggtaccttct

SEQ ID NO: 3558160 - DNA, 25 bp, Homo sapien
gctgcaacaaaagagagctgcccaa

SEQ ID NO: 3558161 - DNA, 25 bp, Homo sapien
aaaaagctctcagcctcaaaggtgc

SEQ ID NO: 3558162 - DNA, 25 bp, Homo sapien
tgaacgtcaagtaccaggcagtggt

SEQ ID NO: 3558163 - DNA, 25 bp, Homo sapien
gaatctttctctatgccagctgcaa

SEQ ID NO: 3558164 - DNA, 25 bp, Homo sapien
agaagtcgtatgcttctttccctac

SEQ ID NO: 3558165 - DNA, 25 bp, Homo sapien
ctgaatgtggatgcatccttaaaga

SEQ ID NO: 3558166 - DNA, 25 bp, Homo sapien
atgtggatgcatccttaaagagtaa

SEQ ID NO: 3558167 - DNA, 25 bp, Homo sapien
acttttccagaagtcgtatgcttct

SEQ ID NO: 3558168 - DNA, 25 bp, Homo sapien
tcctgggtgatgacttccttatttt

SEQ ID NO: 3558169 - DNA, 25 bp, Homo sapien
gctcctgggtgatgacttccttatt

SEQ ID NO: 3558170 - DNA, 25 bp, Homo sapien
ctcctgggtgatgacttccttattt

SEQ ID NO: 3558171 - DNA, 25 bp, Homo sapien
gaatttatacacattgggtcctgca

SEQ ID NO: 3558172 - DNA, 25 bp, Homo sapien
catgaagaaacctcgtctctggaaa

SEQ ID NO: 3558173 - DNA, 25 bp, Homo sapien
catatctgattttgaatttatacac

SEQ ID NO: 3558174 - DNA, 25 bp, Homo sapien
cattgggtcctgcatgaagaaacct

SEQ ID NO: 3558175 - DNA, 25 bp, Homo sapien
tctagaatctctgtccacttaaggt

SEQ ID NO: 3558176 - DNA, 25 bp, Homo sapien
gaatctctgtccacttaaggtcgtc

SEQ ID NO: 3558177 - DNA, 25 bp, Homo sapien
tagaatctctgtccacttaaggtcg

SEQ ID NO: 3558178 - DNA, 25 bp, Homo sapien
aatctctgtccacttaaggtcgtct

SEQ ID NO: 3558179 - DNA, 25 bp, Homo sapien
gtcgttttgagggactggctcgcca

SEQ ID NO: 3558180 - DNA, 25 bp, Homo sapien
ggtccttcggcctcagaaaagtggc

SEQ ID NO: 3558181 - DNA, 25 bp, Homo sapien
gctatgtctcacacactgactaggg

SEQ ID NO: 3558182 - DNA, 25 bp, Homo sapien
ctctctgaaaaaggcgggcgccaac

SEQ ID NO: 3558183 - DNA, 25 bp, Homo sapien
cttgcaagggcctgggtacgctgtc

SEQ ID NO: 3558184 - DNA, 25 bp, Homo sapien
gaaagcttgcaagggcctgggtacg

SEQ ID NO: 3558185 - DNA, 25 bp, Homo sapien
tacgctgtcggatgtagtggaggca

SEQ ID NO: 3558186 - DNA, 25 bp, Homo sapien
tgctttgaaaaacggggctgtagac

SEQ ID NO: 3558187 - DNA, 25 bp, Homo sapien
catatctattagcatgtgctgcccc

SEQ ID NO: 3558188 - DNA, 25 bp, Homo sapien
gcatgtgctgcccctgaagtctggg

SEQ ID NO: 3558189 - DNA, 25 bp, Homo sapien
tagcatgtgctgcccctgaagtctg

SEQ ID NO: 3558190 - DNA, 25 bp, Homo sapien
tatctattagcatgtgctgcccctg

SEQ ID NO: 3558191 - DNA, 25 bp, Homo sapien
aactgaacttccacccggtcatggg

SEQ ID NO: 3558192 - DNA, 25 bp, Homo sapien
ggtacccaggctgtagaaatcccag

SEQ ID NO: 3558193 - DNA, 25 bp, Homo sapien
ctggaaagctgaccctgcagaatct

SEQ ID NO: 3558194 - DNA, 25 bp, Homo sapien
tcctggaatcagagtgtaaaacccc

SEQ ID NO: 3558195 - DNA, 25 bp, Homo sapien
caagaaagtcttcgtgaccttggac

SEQ ID NO: 3558196 - DNA, 25 bp, Homo sapien
gataatctcgatttctcaggtcaac

SEQ ID NO: 3558197 - DNA, 25 bp, Homo sapien
tggtgtttcgggctccaagaaagtc

SEQ ID NO: 3558198 - DNA, 25 bp, Homo sapien
gtggtggcttccttttcgactgtga

SEQ ID NO: 3558199 - DNA, 25 bp, Homo sapien
ggagaggcccgtgtgctaaggctgc

SEQ ID NO: 3558200 - DNA, 25 bp, Homo sapien
agggcagcacccagtagtgagggag

SEQ ID NO: 3558201 - DNA, 25 bp, Homo sapien
aggcccgtgtgctaaggctgcttcc

SEQ ID NO: 3558202 - DNA, 25 bp, Homo sapien
cgtgtgctaaggctgcttcctgagc

SEQ ID NO: 3558203 - DNA, 25 bp, Homo sapien
ggtgagggctgggatccacaaccag

SEQ ID NO: 3558204 - DNA, 25 bp, Homo sapien
cagcttccctctggtgggatgctcc

SEQ ID NO: 3558205 - DNA, 25 bp, Homo sapien
ggctggaaccagtgtgcgaggcaaa

SEQ ID NO: 3558206 - DNA, 25 bp, Homo sapien
cttagaggaagacccctgcaggctg

SEQ ID NO: 3558207 - DNA, 25 bp, Homo sapien
gagagagcggctgagctgggtaaca

SEQ ID NO: 3558208 - DNA, 25 bp, Homo sapien
gctgctcccggcagccatgttgtcc

SEQ ID NO: 3558209 - DNA, 25 bp, Homo sapien
tggagagagcggctgagctgggtaa

SEQ ID NO: 3558210 - DNA, 25 bp, Homo sapien
agagcggctgagctgggtaacagga

SEQ ID NO: 3558211 - DNA, 25 bp, Homo sapien
ctcatgcacgtgcagggtccggctc

SEQ ID NO: 3558212 - DNA, 25 bp, Homo sapien
aggcgctcatgcacgtgcagggtcc

SEQ ID NO: 3558213 - DNA, 25 bp, Homo sapien
catgcacgtgcagggtccggctcca

SEQ ID NO: 3558214 - DNA, 25 bp, Homo sapien
cgctcatgcacgtgcagggtccggc

SEQ ID NO: 3558215 - DNA, 25 bp, Homo sapien
ccttccgcagggcgaggttgtcttt

SEQ ID NO: 3558216 - DNA, 25 bp, Homo sapien
tccttccgcagggcgaggttgtctt

SEQ ID NO: 3558217 - DNA, 25 bp, Homo sapien
accaccattggaatagccaagtggg

SEQ ID NO: 3558218 - DNA, 25 bp, Homo sapien
ggagaaagatgccaccaccattgga

SEQ ID NO: 3558219 - DNA, 25 bp, Homo sapien
gcatgagccttagccccttccaggg

SEQ ID NO: 3558220 - DNA, 25 bp, Homo sapien
tcaggggccccgcatgagccttagc

SEQ ID NO: 3558221 - DNA, 25 bp, Homo sapien
ggagccattcagcaaccatgtcatt

SEQ ID NO: 3558222 - DNA, 25 bp, Homo sapien
tgtcattaattgcaggttaaagccc

SEQ ID NO: 3558223 - DNA, 25 bp, Homo sapien
tttctcacctgggatatgcacgggc

SEQ ID NO: 3558224 - DNA, 25 bp, Homo sapien
ctagtgccctgagccggtgccattt

SEQ ID NO: 3558225 - DNA, 25 bp, Homo sapien
ttcccgtggcaaccttgatgtcatt

SEQ ID NO: 3558226 - DNA, 25 bp, Homo sapien
ctgtgcaaatcccaacagggccttc

SEQ ID NO: 3558227 - DNA, 25 bp, Homo sapien
agaactcgcccctacgagcactgtg

SEQ ID NO: 3558228 - DNA, 25 bp, Homo sapien
aggcctgtgtagtggctgcagctca

SEQ ID NO: 3558229 - DNA, 25 bp, Homo sapien
tctgtgtgcttctgccggcttcgct

SEQ ID NO: 3558230 - DNA, 25 bp, Homo sapien
tgtctgtgtgcttctgccggcttcg

SEQ ID NO: 3558231 - DNA, 25 bp, Homo sapien
ctgtgtgcttctgccggcttcgctg

SEQ ID NO: 3558232 - DNA, 25 bp, Homo sapien
tgggcggctgcccggttcttctgct

SEQ ID NO: 3558233 - DNA, 25 bp, Homo sapien
ggtcagcagcccattgcccccacag

SEQ ID NO: 3558234 - DNA, 25 bp, Homo sapien
aggcctaaggaagtggcagctcttt

SEQ ID NO: 3558235 - DNA, 25 bp, Homo sapien
gcctaaggaagtggcagctctttaa

SEQ ID NO: 3558236 - DNA, 25 bp, Homo sapien
ctaaggaagtggcagctctttaaat

SEQ ID NO: 3558237 - DNA, 25 bp, Homo sapien
ggaagtggcagctctttaaatcccc

SEQ ID NO: 3558238 - DNA, 25 bp, Homo sapien
actgccttcacgtaatagatgctca

SEQ ID NO: 3558239 - DNA, 25 bp, Homo sapien
aatgagctcctacatggcaggactg

SEQ ID NO: 3558240 - DNA, 25 bp, Homo sapien
ggactggttctttgaaggatcccca

SEQ ID NO: 3558241 - DNA, 25 bp, Homo sapien
aattaattaaagtccagcaggcagc

SEQ ID NO: 3558242 - DNA, 25 bp, Homo sapien
tctgcaaaagtaggaactgtgcttc

SEQ ID NO: 3558243 - DNA, 25 bp, Homo sapien
ctgcaaaagtaggaactgtgcttct

SEQ ID NO: 3558244 - DNA, 25 bp, Homo sapien
tgtgcttctgaacagggaaacgctg

SEQ ID NO: 3558245 - DNA, 25 bp, Homo sapien
aactgtgcttctgaacagggaaacg

SEQ ID NO: 3558246 - DNA, 25 bp, Homo sapien
caactcaggaacttcaaggtttccg

SEQ ID NO: 3558247 - DNA, 25 bp, Homo sapien
tggccccaggatgagttcgtccgta

SEQ ID NO: 3558248 - DNA, 25 bp, Homo sapien
tcaaggtttccgctccggccaagag

SEQ ID NO: 3558249 - DNA, 25 bp, Homo sapien
gacgcagccaagatgcaactcagga

SEQ ID NO: 3558250 - DNA, 25 bp, Homo sapien
atgctgtatcctaccggacgccgga

SEQ ID NO: 3558251 - DNA, 25 bp, Homo sapien
agcgggagctgcgactgctcatgct

SEQ ID NO: 3558252 - DNA, 25 bp, Homo sapien
gactgctcatgctgtatcctaccgg

SEQ ID NO: 3558253 - DNA, 25 bp, Homo sapien
gctgcgactgctcatgctgtatcct

SEQ ID NO: 3558254 - DNA, 25 bp, Homo sapien
gccattgaggatggtcacatagtac

SEQ ID NO: 3558255 - DNA, 25 bp, Homo sapien
tagcctgaggtcaggtttttgataa

SEQ ID NO: 3558256 - DNA, 25 bp, Homo sapien
ggtgataccactctcacgttcaact

SEQ ID NO: 3558257 - DNA, 25 bp, Homo sapien
tgcatcctgggccattgaggatggt

SEQ ID NO: 3558258 - DNA, 25 bp, Homo sapien
gaaggcagctgagtacctgaagcgg

SEQ ID NO: 3558259 - DNA, 25 bp, Homo sapien
aaggcagctgagtacctgaagcggg

SEQ ID NO: 3558260 - DNA, 25 bp, Homo sapien
ggcagctgagtacctgaagcgggca

SEQ ID NO: 3558261 - DNA, 25 bp, Homo sapien
cagctgagtacctgaagcgggcaga

SEQ ID NO: 3558262 - DNA, 25 bp, Homo sapien
tgcagagttgagtctttgccgcctg

SEQ ID NO: 3558263 - DNA, 25 bp, Homo sapien
caaagcccgggtacttgtctcagag

SEQ ID NO: 3558264 - DNA, 25 bp, Homo sapien
gcagaaaacatttgctggcccctga

SEQ ID NO: 3558265 - DNA, 25 bp, Homo sapien
gctttcgcgctacactggcagttga

SEQ ID NO: 3558266 - DNA, 25 bp, Homo sapien
gagagcaaacttcgaggacgtaccc

SEQ ID NO: 3558267 - DNA, 25 bp, Homo sapien
gccaagttgcgctgtgcagtgccat

SEQ ID NO: 3558268 - DNA, 25 bp, Homo sapien
tggtcaacctcttggccctggatgg

SEQ ID NO: 3558269 - DNA, 25 bp, Homo sapien
tgccttccgagagggcaatgctgcc

SEQ ID NO: 3558270 - DNA, 25 bp, Homo sapien
gttgcattagggcttgccactcccc

SEQ ID NO: 3558271 - DNA, 25 bp, Homo sapien
gggacctcaagctgttgcctgagaa

SEQ ID NO: 3558272 - DNA, 25 bp, Homo sapien
ttgtagggagttaggatacacagca

SEQ ID NO: 3558273 - DNA, 25 bp, Homo sapien
agttggcatctgaggttggcacgca

SEQ ID NO: 3558274 - DNA, 25 bp, Homo sapien
gcccgggaatgtgactacggagccc

SEQ ID NO: 3558275 - DNA, 25 bp, Homo sapien
gcaggcattggataggcccgggaat

SEQ ID NO: 3558276 - DNA, 25 bp, Homo sapien
cccgtgcgaggtgcccagagcacat

SEQ ID NO: 3558277 - DNA, 25 bp, Homo sapien
ctcagggtggctgccgcaccctcca

SEQ ID NO: 3558278 - DNA, 25 bp, Homo sapien
aaatgtgggttccagtcctagctcc

SEQ ID NO: 3558279 - DNA, 25 bp, Homo sapien
ccacttgtctctgaaggccagggag

SEQ ID NO: 3558280 - DNA, 25 bp, Homo sapien
tgtacgcagcgaggcagaaaagcac

SEQ ID NO: 3558281 - DNA, 25 bp, Homo sapien
gctgggttgcactctaaagggcaga

SEQ ID NO: 3558282 - DNA, 25 bp, Homo sapien
tcaactggtcattgagcatccggac

SEQ ID NO: 3558283 - DNA, 25 bp, Homo sapien
cagaaaggtccgttccaagagcatc

SEQ ID NO: 3558284 - DNA, 25 bp, Homo sapien
aagagcatcaactggtcattgagca

SEQ ID NO: 3558285 - DNA, 25 bp, Homo sapien
gttcagaaaggtccgttccaagagc

SEQ ID NO: 3558286 - DNA, 25 bp, Homo sapien
gggaggcaggaactgccagtcaccc

SEQ ID NO: 3558287 - DNA, 25 bp, Homo sapien
agctaccagcctggtatcctgccct

SEQ ID NO: 3558288 - DNA, 25 bp, Homo sapien
ggaggcaggaactgccagtcaccct

SEQ ID NO: 3558289 - DNA, 25 bp, Homo sapien
ccagcctggtatcctgccctgggtg

SEQ ID NO: 3558290 - DNA, 25 bp, Homo sapien
ttgatatgcgttggcccaaggctgc

SEQ ID NO: 3558291 - DNA, 25 bp, Homo sapien
gcagtgttgatatgcgttggcccaa

SEQ ID NO: 3558292 - DNA, 25 bp, Homo sapien
cagtgttgatatgcgttggcccaag

SEQ ID NO: 3558293 - DNA, 25 bp, Homo sapien
tgttgatatgcgttggcccaaggct

SEQ ID NO: 3558294 - DNA, 25 bp, Homo sapien
ctgtgaggaacaagcagtggctcag

SEQ ID NO: 3558295 - DNA, 25 bp, Homo sapien
tggctcagtcatgggggtgcagggc

SEQ ID NO: 3558296 - DNA, 25 bp, Homo sapien
cagtggctcagtcatgggggtgcag

SEQ ID NO: 3558297 - DNA, 25 bp, Homo sapien
gtgaggaacaagcagtggctcagtc

SEQ ID NO: 3558298 - DNA, 25 bp, Homo sapien
cactgtagtcactgactttgagggg

SEQ ID NO: 3558299 - DNA, 25 bp, Homo sapien
gaagctgcggagtgtctcactgtag

SEQ ID NO: 3558300 - DNA, 25 bp, Homo sapien
ctgtcactgagccggagaatcacac

SEQ ID NO: 3558301 - DNA, 25 bp, Homo sapien
agcagggccccaagatcttgctggg

SEQ ID NO: 3558302 - DNA, 25 bp, Homo sapien
tcagtcttcagcctctcctgtcctg

SEQ ID NO: 3558303 - DNA, 25 bp, Homo sapien
tgtcctggtctcaggatgccccttg

SEQ ID NO: 3558304 - DNA, 25 bp, Homo sapien
ctcaggatgccccttgtctccctcc

SEQ ID NO: 3558305 - DNA, 25 bp, Homo sapien
gacaaggccagggctcagtcttcag

SEQ ID NO: 3558306 - DNA, 25 bp, Homo sapien
gggtagatcctggctgaagtcttgc

SEQ ID NO: 3558307 - DNA, 25 bp, Homo sapien
ggtagatcctggctgaagtcttgct

SEQ ID NO: 3558308 - DNA, 25 bp, Homo sapien
ccaaaaacttgtccacatagtcaaa

SEQ ID NO: 3558309 - DNA, 25 bp, Homo sapien
acgaagggtgcatagtcgctgccag

SEQ ID NO: 3558310 - DNA, 25 bp, Homo sapien
gtcataggtataggcaatgtccatg

SEQ ID NO: 3558311 - DNA, 25 bp, Homo sapien
cccaggaagtgaacgaagggtgcat

SEQ ID NO: 3558312 - DNA, 25 bp, Homo sapien
caatgtccatggaggagatgcccag

SEQ ID NO: 3558313 - DNA, 25 bp, Homo sapien
cgtacaccgggctgctgcggttgaa

SEQ ID NO: 3558314 - DNA, 25 bp, Homo sapien
tgctgcggttgaagtaccggatcca

SEQ ID NO: 3558315 - DNA, 25 bp, Homo sapien
ggaccaggccgtacaccgggctgct

SEQ ID NO: 3558316 - DNA, 25 bp, Homo sapien
taccggatccagttgtcgtagatgc

SEQ ID NO: 3558317 - DNA, 25 bp, Homo sapien
ctggccggaaggagaatttagtctc

SEQ ID NO: 3558318 - DNA, 25 bp, Homo sapien
ggtccagtccttacgaggcttgccc

SEQ ID NO: 3558319 - DNA, 25 bp, Homo sapien
caacaacagggcgggttctccaccg

SEQ ID NO: 3558320 - DNA, 25 bp, Homo sapien
gtctcctgcccacccgtggtccagt

SEQ ID NO: 3558321 - DNA, 25 bp, Homo sapien
tttggttgcagagaagacgacgctc

SEQ ID NO: 3558322 - DNA, 25 bp, Homo sapien
agaagacgacgctctggacaggggg

SEQ ID NO: 3558323 - DNA, 25 bp, Homo sapien
ctctttggttgcagagaagacgacg

SEQ ID NO: 3558324 - DNA, 25 bp, Homo sapien
tctttggttgcagagaagacgacgc

SEQ ID NO: 3558325 - DNA, 25 bp, Homo sapien
gagatgtccacgttgatgtaggcca

SEQ ID NO: 3558326 - DNA, 25 bp, Homo sapien
caccgagatgtccacgttgatgtag

SEQ ID NO: 3558327 - DNA, 25 bp, Homo sapien
ccgagatgtccacgttgatgtaggc

SEQ ID NO: 3558328 - DNA, 25 bp, Homo sapien
caaacaccgagatgtccacgttgat

SEQ ID NO: 3558329 - DNA, 25 bp, Homo sapien
gaattccgtggagccaatgagccca

SEQ ID NO: 3558330 - DNA, 25 bp, Homo sapien
ccagctcgcaaacacgattgatctg

SEQ ID NO: 3558331 - DNA, 25 bp, Homo sapien
tctgtgaattccgtggagccaatga

SEQ ID NO: 3558332 - DNA, 25 bp, Homo sapien
cgattgatctgcgaggacgccaggt

SEQ ID NO: 3558333 - DNA, 25 bp, Homo sapien
ctgggaatgggggatagagggttgg

SEQ ID NO: 3558334 - DNA, 25 bp, Homo sapien
tgggaatgggggatagagggttgga

SEQ ID NO: 3558335 - DNA, 25 bp, Homo sapien
ccgtgcacccagctgtctcggtggt

SEQ ID NO: 3558336 - DNA, 25 bp, Homo sapien
tccacagccccgtgcacccagctgt

SEQ ID NO: 3558337 - DNA, 25 bp, Homo sapien
cagctgtctcggtggttcccataca

SEQ ID NO: 3558338 - DNA, 25 bp, Homo sapien
tccaggaggacggcggtgccactgc

SEQ ID NO: 3558339 - DNA, 25 bp, Homo sapien
gaggacagcggcatccagagcagag

SEQ ID NO: 3558340 - DNA, 25 bp, Homo sapien
tggatgaggacagcggcatccagag

SEQ ID NO: 3558341 - DNA, 25 bp, Homo sapien
cccaggacgttggaagagttcctca

SEQ ID NO: 3558342 - DNA, 25 bp, Homo sapien
ttcctcagctccaggcggttgtaga

SEQ ID NO: 3558343 - DNA, 25 bp, Homo sapien
acagccccacggatgatgcccagga

SEQ ID NO: 3558344 - DNA, 25 bp, Homo sapien
gttgtagacgctcacattcacctgg

SEQ ID NO: 3558345 - DNA, 25 bp, Homo sapien
ctgggaagtctccgtcaggccggaa

SEQ ID NO: 3558346 - DNA, 25 bp, Homo sapien
agccgggacccaacctgtagtggca

SEQ ID NO: 3558347 - DNA, 25 bp, Homo sapien
aagtctccgtcaggccggaagccgg

SEQ ID NO: 3558348 - DNA, 25 bp, Homo sapien
ccaacctgtagtggcagcccagtgc

SEQ ID NO: 3558349 - DNA, 25 bp, Homo sapien
ggaaatccggagacattggcaaggt

SEQ ID NO: 3558350 - DNA, 25 bp, Homo sapien
ccatcgttgatgtcggcagggtctg

SEQ ID NO: 3558351 - DNA, 25 bp, Homo sapien
ggtctcttgcatcctggaagccaat

SEQ ID NO: 3558352 - DNA, 25 bp, Homo sapien
aatactcgtagtaggagcctcgctc

SEQ ID NO: 3558353 - DNA, 25 bp, Homo sapien
tacacccccatatcgagtcagggca

SEQ ID NO: 3558354 - DNA, 25 bp, Homo sapien
ctgagtctgtagctccttaaagtct

SEQ ID NO: 3558355 - DNA, 25 bp, Homo sapien
aatggtgccttcaagtttgatgccc

SEQ ID NO: 3558356 - DNA, 25 bp, Homo sapien
ttccgcgccccggttggcatagacg

SEQ ID NO: 3558357 - DNA, 25 bp, Homo sapien
cagaaggagcataggcagcataggg

SEQ ID NO: 3558358 - DNA, 25 bp, Homo sapien
cagcatagggttgtaccacatctgg

SEQ ID NO: 3558359 - DNA, 25 bp, Homo sapien
ggtcacgttctcctcagtccggtgg

SEQ ID NO: 3558360 - DNA, 25 bp, Homo sapien
cgttctcctcagtccggtggcagga

SEQ ID NO: 3558361 - DNA, 25 bp, Homo sapien
cccgggcattcccaagactgggcag

SEQ ID NO: 3558362 - DNA, 25 bp, Homo sapien
gggtggcagtatcatggctgggccc

SEQ ID NO: 3558363 - DNA, 25 bp, Homo sapien
ttggaggggtggcagtatcatggct

SEQ ID NO: 3558364 - DNA, 25 bp, Homo sapien
tggcagtatcatggctgggcccagc

SEQ ID NO: 3558365 - DNA, 25 bp, Homo sapien
tacgtggaggcctcggccgagtcca

SEQ ID NO: 3558366 - DNA, 25 bp, Homo sapien
gatgtccacgacgttgggctgctcc

SEQ ID NO: 3558367 - DNA, 25 bp, Homo sapien
aaggacagcagcacttcgtacgtgg

SEQ ID NO: 3558368 - DNA, 25 bp, Homo sapien
tcctcatcccgagggctggaggcca

SEQ ID NO: 3558369 - DNA, 25 bp, Homo sapien
tgccccatgacggtctccaggatct

SEQ ID NO: 3558370 - DNA, 25 bp, Homo sapien
agctgccccatgacggtctccagga

SEQ ID NO: 3558371 - DNA, 25 bp, Homo sapien
ggttctcccggatcctgtgggcatc

SEQ ID NO: 3558372 - DNA, 25 bp, Homo sapien
cccggatcctgtgggcatccagctg

SEQ ID NO: 3558373 - DNA, 25 bp, Homo sapien
aggatgatccccagccccaagaggg

SEQ ID NO: 3558374 - DNA, 25 bp, Homo sapien
gccccaacaccttcgtccactgcat

SEQ ID NO: 3558375 - DNA, 25 bp, Homo sapien
ggatggcaaagtggccgaggatgat

SEQ ID NO: 3558376 - DNA, 25 bp, Homo sapien
caaagtggccgaggatgatccccag

SEQ ID NO: 3558377 - DNA, 25 bp, Homo sapien
taaatgccctttagaatattaacca

SEQ ID NO: 3558378 - DNA, 25 bp, Homo sapien
ccttggtgcgctgaaacctcagcct

SEQ ID NO: 3558379 - DNA, 25 bp, Homo sapien
tggtgccaccttggtgcgctgaaac

SEQ ID NO: 3558380 - DNA, 25 bp, Homo sapien
tgtgaccagcccgggttatgggatt

SEQ ID NO: 3558381 - DNA, 25 bp, Homo sapien
aggctgacaacaaccaggcctggaa

SEQ ID NO: 3558382 - DNA, 25 bp, Homo sapien
ttagagcaggtacccagatcctccg

SEQ ID NO: 3558383 - DNA, 25 bp, Homo sapien
cagtgcttatcttgggaacatcgcc

SEQ ID NO: 3558384 - DNA, 25 bp, Homo sapien
gaacatcgcccttgagctctcatct

SEQ ID NO: 3558385 - DNA, 25 bp, Homo sapien
ccgaggaggtgtccgacctctggcc

SEQ ID NO: 3558386 - DNA, 25 bp, Homo sapien
cagagacagctcgagtgagcagcat

SEQ ID NO: 3558387 - DNA, 25 bp, Homo sapien
gagctggctgaaggagcggcctccc

SEQ ID NO: 3558388 - DNA, 25 bp, Homo sapien
tatttctgggatctagggaggagct

SEQ ID NO: 3558389 - DNA, 25 bp, Homo sapien
tcaggctcttatacaataaggtggg

SEQ ID NO: 3558390 - DNA, 25 bp, Homo sapien
ctccttcaggctcttatacaataag

SEQ ID NO: 3558391 - DNA, 25 bp, Homo sapien
cttcaggctcttatacaataaggtg

SEQ ID NO: 3558392 - DNA, 25 bp, Homo sapien
tccttcaggctcttatacaataagg

SEQ ID NO: 3558393 - DNA, 25 bp, Homo sapien
tgggtggtgttcagtgactcccgaa

SEQ ID NO: 3558394 - DNA, 25 bp, Homo sapien
ggtggtgttcagtgactcccgaagc

SEQ ID NO: 3558395 - DNA, 25 bp, Homo sapien
ccaggttgtgcacttgggtggtgtt

SEQ ID NO: 3558396 - DNA, 25 bp, Homo sapien
ggttgtgcacttgggtggtgttcag

SEQ ID NO: 3558397 - DNA, 25 bp, Homo sapien
ctaagaactggtactcctggatctc

SEQ ID NO: 3558398 - DNA, 25 bp, Homo sapien
ctgatctcctttgaggtccgctggg

SEQ ID NO: 3558399 - DNA, 25 bp, Homo sapien
gaactggtactcctggatctccgag

SEQ ID NO: 3558400 - DNA, 25 bp, Homo sapien
cctgatctcctttgaggtccgctgg

SEQ ID NO: 3558401 - DNA, 25 bp, Homo sapien
cagaggtgttcaggagtgtaaacag

SEQ ID NO: 3558402 - DNA, 25 bp, Homo sapien
agggtcttttggctcagtgggctca

SEQ ID NO: 3558403 - DNA, 25 bp, Homo sapien
cgtgacggtgggttccagttgttct

SEQ ID NO: 3558404 - DNA, 25 bp, Homo sapien
gagtgtaaacaggaacgtgacggtg

SEQ ID NO: 3558405 - DNA, 25 bp, Homo sapien
aagttccgctcctcggaagcctgag

SEQ ID NO: 3558406 - DNA, 25 bp, Homo sapien
ttggccagcttggagtgggctcttt

SEQ ID NO: 3558407 - DNA, 25 bp, Homo sapien
ggttcttgctcctcaacaggctgca

SEQ ID NO: 3558408 - DNA, 25 bp, Homo sapien
gggctctttgtctgcccctaagaga

SEQ ID NO: 3558409 - DNA, 25 bp, Homo sapien
caacagaaggcaactcaggagggag

SEQ ID NO: 3558410 - DNA, 25 bp, Homo sapien
caaaatgctagtaggtctgggactc

SEQ ID NO: 3558411 - DNA, 25 bp, Homo sapien
tcttctagggccaagtagactcggt

SEQ ID NO: 3558412 - DNA, 25 bp, Homo sapien
tctggtacgcgaggaaactttccga

SEQ ID NO: 3558413 - DNA, 25 bp, Homo sapien
agcagcttcaaactcggcattcatg

SEQ ID NO: 3558414 - DNA, 25 bp, Homo sapien
ttcaaactcggcattcatggccgca

SEQ ID NO: 3558415 - DNA, 25 bp, Homo sapien
gatcaaactgctcagcagcttcaaa

SEQ ID NO: 3558416 - DNA, 25 bp, Homo sapien
cagcttcaaactcggcattcatggc

SEQ ID NO: 3558417 - DNA, 25 bp, Homo sapien
acatggtggctggagcatctcaccc

SEQ ID NO: 3558418 - DNA, 25 bp, Homo sapien
agaaatgaggagcaggtgagtgaga

SEQ ID NO: 3558419 - DNA, 25 bp, Homo sapien
aggtgctgcctatcccccaaaagag

SEQ ID NO: 3558420 - DNA, 25 bp, Homo sapien
gagcacacggcagagaaaaacccct

SEQ ID NO: 3558421 - DNA, 25 bp, Homo sapien
gatctctggcattttcttcttctta

SEQ ID NO: 3558422 - DNA, 25 bp, Homo sapien
caagatctctggcattttcttcttc

SEQ ID NO: 3558423 - DNA, 25 bp, Homo sapien
aagatctctggcattttcttcttct

SEQ ID NO: 3558424 - DNA, 25 bp, Homo sapien
atctctggcattttcttcttcttac

SEQ ID NO: 3558425 - DNA, 25 bp, Homo sapien
tggtggggagattccagggagagtc

SEQ ID NO: 3558426 - DNA, 25 bp, Homo sapien
gggagattccagggagagtcatgtc

SEQ ID NO: 3558427 - DNA, 25 bp, Homo sapien
agattccagggagagtcatgtctgg

SEQ ID NO: 3558428 - DNA, 25 bp, Homo sapien
tggggagattccagggagagtcatg

SEQ ID NO: 3558429 - DNA, 25 bp, Homo sapien
tcgaagccaaagcaggaccggcggc

SEQ ID NO: 3558430 - DNA, 25 bp, Homo sapien
tttggagcacaccactggcgagact

SEQ ID NO: 3558431 - DNA, 25 bp, Homo sapien
taggaacgcctgactttcttagaca

SEQ ID NO: 3558432 - DNA, 25 bp, Homo sapien
gagactccggacaagtcttctgccc

SEQ ID NO: 3558433 - DNA, 25 bp, Homo sapien
ctccttagtaagctccctgccaggg

SEQ ID NO: 3558434 - DNA, 25 bp, Homo sapien
aaggtcctccttagtaagctccctg

SEQ ID NO: 3558435 - DNA, 25 bp, Homo sapien
cctcagggttcggcacaggagtgct

SEQ ID NO: 3558436 - DNA, 25 bp, Homo sapien
gacgctgtgtgtcttgaaaaggtcc

SEQ ID NO: 3558437 - DNA, 25 bp, Homo sapien
tagggctcctgcgaggtgattggac

SEQ ID NO: 3558438 - DNA, 25 bp, Homo sapien
cctagggctcctgcgaggtgattgg

SEQ ID NO: 3558439 - DNA, 25 bp, Homo sapien
ggctcctgcgaggtgattggacagc

SEQ ID NO: 3558440 - DNA, 25 bp, Homo sapien
ctcctgcgaggtgattggacagctg

SEQ ID NO: 3558441 - DNA, 25 bp, Homo sapien
tgggccacgatcctctttaagacga

SEQ ID NO: 3558442 - DNA, 25 bp, Homo sapien
cctctttaagacgatgggctttctg

SEQ ID NO: 3558443 - DNA, 25 bp, Homo sapien
tacagcatgggccacgatcctcttt

SEQ ID NO: 3558444 - DNA, 25 bp, Homo sapien
cacgatcctctttaagacgatgggc

SEQ ID NO: 3558445 - DNA, 25 bp, Homo sapien
tttcagggaggatgctcgggagttc

SEQ ID NO: 3558446 - DNA, 25 bp, Homo sapien
ctgatttccgctgggacctccgcag

SEQ ID NO: 3558447 - DNA, 25 bp, Homo sapien
cagagcctgatttccgctgggacct

SEQ ID NO: 3558448 - DNA, 25 bp, Homo sapien
cctccgcagaggcttagtaggagat

SEQ ID NO: 3558449 - DNA, 25 bp, Homo sapien
gaggaggactctagaccttagagtc

SEQ ID NO: 3558450 - DNA, 25 bp, Homo sapien
caggttctagagacagcgagaagat

SEQ ID NO: 3558451 - DNA, 25 bp, Homo sapien
cgagaagattcccaaacaagccctt

SEQ ID NO: 3558452 - DNA, 25 bp, Homo sapien
ccttagagtccagagaacaggttct

SEQ ID NO: 3558453 - DNA, 25 bp, Homo sapien
agcggctcctccggaccgcgttcgc

SEQ ID NO: 3558454 - DNA, 25 bp, Homo sapien
ggctcctccggaccgcgttcgcctc

SEQ ID NO: 3558455 - DNA, 25 bp, Homo sapien
ctgagcggctcctccggaccgcgtt

SEQ ID NO: 3558456 - DNA, 25 bp, Homo sapien
tgagcggctcctccggaccgcgttc

SEQ ID NO: 3558457 - DNA, 25 bp, Homo sapien
gggcgcgcgccaaccgggaaggcca

SEQ ID NO: 3558458 - DNA, 25 bp, Homo sapien
tcgctgcaaaaaacgttcgaattac

SEQ ID NO: 3558459 - DNA, 25 bp, Homo sapien
aggccactcgctgcaaaaaacgttc

SEQ ID NO: 3558460 - DNA, 25 bp, Homo sapien
cactcgctgcaaaaaacgttcgaat

SEQ ID NO: 3558461 - DNA, 25 bp, Homo sapien
gcggaagtgacgtagggctagcggt

SEQ ID NO: 3558462 - DNA, 25 bp, Homo sapien
ggctagcggtctgcggccctcggaa

SEQ ID NO: 3558463 - DNA, 25 bp, Homo sapien
gtagggctagcggtctgcggccctc

SEQ ID NO: 3558464 - DNA, 25 bp, Homo sapien
ggaagcggaagtgacgtagggctag

SEQ ID NO: 3558465 - DNA, 25 bp, Homo sapien
tggcccaggggcgcgatggcgtcat

SEQ ID NO: 3558466 - DNA, 25 bp, Homo sapien
gaggcgtggcccaggggcgcgatgg

SEQ ID NO: 3558467 - DNA, 25 bp, Homo sapien
aggcgtggcccaggggcgcgatggc

SEQ ID NO: 3558468 - DNA, 25 bp, Homo sapien
gcgtggcccaggggcgcgatggcgt

SEQ ID NO: 3558469 - DNA, 25 bp, Homo sapien
tggcagcggagggataatcggggcg

SEQ ID NO: 3558470 - DNA, 25 bp, Homo sapien
gtggtccctgcccttccgcgcctcg

SEQ ID NO: 3558471 - DNA, 25 bp, Homo sapien
ccggggctgaagggagaggcgcagg

SEQ ID NO: 3558472 - DNA, 25 bp, Homo sapien
cagcggagggataatcggggcggcc

SEQ ID NO: 3558473 - DNA, 25 bp, Homo sapien
gtgactattagctagccagaccggc

SEQ ID NO: 3558474 - DNA, 25 bp, Homo sapien
tgagctgcacaataacgccctatgg

SEQ ID NO: 3558475 - DNA, 25 bp, Homo sapien
tccagatcgatgaggtggtgagccc

SEQ ID NO: 3558476 - DNA, 25 bp, Homo sapien
caaagaatatgatgagtgcaggccc

SEQ ID NO: 3558477 - DNA, 25 bp, Homo sapien
cagaaactccaaggacaggcggttg

SEQ ID NO: 3558478 - DNA, 25 bp, Homo sapien
taaaacacccgaggcagccttttgc

SEQ ID NO: 3558479 - DNA, 25 bp, Homo sapien
caggcggttgaagaacatggctccg

SEQ ID NO: 3558480 - DNA, 25 bp, Homo sapien
tcccggtactcgatggccagaaact

SEQ ID NO: 3558481 - DNA, 25 bp, Homo sapien
ccttgccacatctcagggttccaaa

SEQ ID NO: 3558482 - DNA, 25 bp, Homo sapien
cctggctactccttgccacatctca

SEQ ID NO: 3558483 - DNA, 25 bp, Homo sapien
agtacccttccctggctactccttg

SEQ ID NO: 3558484 - DNA, 25 bp, Homo sapien
ctccctcttgcaccctcccactcct

SEQ ID NO: 3558485 - DNA, 25 bp, Homo sapien
ggtcagggcggagaagcagacgtac

SEQ ID NO: 3558486 - DNA, 25 bp, Homo sapien
atggtcagggcggagaagcagacgt

SEQ ID NO: 3558487 - DNA, 25 bp, Homo sapien
tggtcagggcggagaagcagacgta

SEQ ID NO: 3558488 - DNA, 25 bp, Homo sapien
agcatagagtgaccccatggcagcc

SEQ ID NO: 3558489 - DNA, 25 bp, Homo sapien
tcagcatagagtgaccccatggcag

SEQ ID NO: 3558490 - DNA, 25 bp, Homo sapien
cagcatagagtgaccccatggcagc

SEQ ID NO: 3558491 - DNA, 25 bp, Homo sapien
ctcagcatagagtgaccccatggca

SEQ ID NO: 3558492 - DNA, 25 bp, Homo sapien
ccttgcgtccctgccctgagcctac

SEQ ID NO: 3558493 - DNA, 25 bp, Homo sapien
gcccttgcgtccctgccctgagcct

SEQ ID NO: 3558494 - DNA, 25 bp, Homo sapien
gagagtggccccctcgcacaacagt

SEQ ID NO: 3558495 - DNA, 25 bp, Homo sapien
cctcgcacaacagtggggtttccat

SEQ ID NO: 3558496 - DNA, 25 bp, Homo sapien
gagtctctggttctaaagtgcctgg

SEQ ID NO: 3558497 - DNA, 25 bp, Homo sapien
tggcgatgcggtcttgcagccacat

SEQ ID NO: 3558498 - DNA, 25 bp, Homo sapien
cccgcagtgtagatgcaagtcagac

SEQ ID NO: 3558499 - DNA, 25 bp, Homo sapien
gacgaccgtgtagtgaaagctcatg

SEQ ID NO: 3558500 - DNA, 25 bp, Homo sapien
tacgtagtgaggttggttgtacaac

SEQ ID NO: 3558501 - DNA, 25 bp, Homo sapien
gacaaagcagtctttgacagtacat

SEQ ID NO: 3558502 - DNA, 25 bp, Homo sapien
tatacagggaaaagcctctcctaat

SEQ ID NO: 3558503 - DNA, 25 bp, Homo sapien
cttttctctaggcaaagacaaagca

SEQ ID NO: 3558504 - DNA, 25 bp, Homo sapien
ttcaagtgattctcctgtcttaggc

SEQ ID NO: 3558505 - DNA, 25 bp, Homo sapien
caagtgattctcctgtcttaggctt

SEQ ID NO: 3558506 - DNA, 25 bp, Homo sapien
agtgattctcctgtcttaggcttcc

SEQ ID NO: 3558507 - DNA, 25 bp, Homo sapien
ctagagtgcagtggcccaatcggct

SEQ ID NO: 3558508 - DNA, 25 bp, Homo sapien
ccattttgctgatacgtaatctacc

SEQ ID NO: 3558509 - DNA, 25 bp, Homo sapien
tctaagagggctaaatgatcctttc

SEQ ID NO: 3558510 - DNA, 25 bp, Homo sapien
cctttcttgtggactgtgttgttaa

SEQ ID NO: 3558511 - DNA, 25 bp, Homo sapien
caacaaaatgcaggcaatggtccct

SEQ ID NO: 3558512 - DNA, 25 bp, Homo sapien
cagtcacagctttattaatgaccag

SEQ ID NO: 3558513 - DNA, 25 bp, Homo sapien
tcacagctttattaatgaccagggt

SEQ ID NO: 3558514 - DNA, 25 bp, Homo sapien
cagctttattaatgaccagggtaac

SEQ ID NO: 3558515 - DNA, 25 bp, Homo sapien
gaccagtcacagctttattaatgac

SEQ ID NO: 3558516 - DNA, 25 bp, Homo sapien
tcattttcgttggtccaggccagga

SEQ ID NO: 3558517 - DNA, 25 bp, Homo sapien
tccgggcccggtaaagatgatctcg

SEQ ID NO: 3558518 - DNA, 25 bp, Homo sapien
tcctcggctaccacagcatgggctt

SEQ ID NO: 3558519 - DNA, 25 bp, Homo sapien
cgtaggcgaacagcacattgggcag

SEQ ID NO: 3558520 - DNA, 25 bp, Homo sapien
ccgcggctcaggctgactatcgcgg

SEQ ID NO: 3558521 - DNA, 25 bp, Homo sapien
gctccgcggcggaggcatctttcac

SEQ ID NO: 3558522 - DNA, 25 bp, Homo sapien
tcgaaggcagctttttcgcccggcg

SEQ ID NO: 3558523 - DNA, 25 bp, Homo sapien
accacggccgccatggaggcagcag

SEQ ID NO: 3558524 - DNA, 25 bp, Homo sapien
tcgtcctcggtctcgcgttgctgac

SEQ ID NO: 3558525 - DNA, 25 bp, Homo sapien
gcagccggcgtagggcgcttgctag

SEQ ID NO: 3558526 - DNA, 25 bp, Homo sapien
aggagcgctgcaaccgcggagctct

SEQ ID NO: 3558527 - DNA, 25 bp, Homo sapien
ttgctaggcggctgggaggagcgct

SEQ ID NO: 3558528 - DNA, 25 bp, Homo sapien
cacggtagaagttttctgcgcaggt

SEQ ID NO: 3558529 - DNA, 25 bp, Homo sapien
aggtgtaacgcgctggctggacctc

SEQ ID NO: 3558530 - DNA, 25 bp, Homo sapien
gcagcgagcagtagggcgcattaca

SEQ ID NO: 3558531 - DNA, 25 bp, Homo sapien
cgcaggtgccatgcgtccggtagca

SEQ ID NO: 3558532 - DNA, 25 bp, Homo sapien
tggcaccgcgatctacctgcgaacg

SEQ ID NO: 3558533 - DNA, 25 bp, Homo sapien
tctacctgcgaacgcacgccggtgg

SEQ ID NO: 3558534 - DNA, 25 bp, Homo sapien
gatctacctgcgaacgcacgccggt

SEQ ID NO: 3558535 - DNA, 25 bp, Homo sapien
acctgcgaacgcacgccggtggtag

SEQ ID NO: 3558536 - DNA, 25 bp, Homo sapien
tcttttgtaattctggctttctcta

SEQ ID NO: 3558537 - DNA, 25 bp, Homo sapien
gtaattctggctttctctaataaaa

SEQ ID NO: 3558538 - DNA, 25 bp, Homo sapien
tgtaattctggctttctctaataaa

SEQ ID NO: 3558539 - DNA, 25 bp, Homo sapien
cttttgtaattctggctttctctaa

SEQ ID NO: 3558540 - DNA, 25 bp, Homo sapien
gtcttttgtaattctggctttctct

SEQ ID NO: 3558541 - DNA, 25 bp, Homo sapien
ttttgtaattctggctttctctaat

SEQ ID NO: 3558542 - DNA, 25 bp, Homo sapien
attagagaaagccagaattacaaaa

SEQ ID NO: 3558543 - DNA, 25 bp, Homo sapien
tagagaaagccagaattacaaaaga

SEQ ID NO: 3558544 - DNA, 25 bp, Homo sapien
ttagagaaagccagaattacaaaag

SEQ ID NO: 3558545 - DNA, 25 bp, Homo sapien
tttattagagaaagccagaattaca

SEQ ID NO: 3558546 - DNA, 25 bp, Homo sapien
agagaaagccagaattacaaaagac

SEQ ID NO: 3558547 - DNA, 25 bp, Homo sapien
ttttattagagaaagccagaattac

SEQ ID NO: 3558548 - DNA, 25 bp, Homo sapien
ggcggatgcagtacaaccggcgctt

SEQ ID NO: 3558549 - DNA, 25 bp, Homo sapien
gcggatgcagtacaaccggcgcttt

SEQ ID NO: 3558550 - DNA, 25 bp, Homo sapien
ggatgcagtacaaccggcgctttgt

SEQ ID NO: 3558551 - DNA, 25 bp, Homo sapien
gatgcagtacaaccggcgctttgtc

SEQ ID NO: 3558552 - DNA, 25 bp, Homo sapien
tgcagtacaaccggcgctttgtcaa

SEQ ID NO: 3558553 - DNA, 25 bp, Homo sapien
cggatgcagtacaaccggcgctttg

SEQ ID NO: 3558554 - DNA, 25 bp, Homo sapien
caaagcgccggttgtactgcatccg

SEQ ID NO: 3558555 - DNA, 25 bp, Homo sapien
gacaaagcgccggttgtactgcatc

SEQ ID NO: 3558556 - DNA, 25 bp, Homo sapien
aaagcgccggttgtactgcatccgc

SEQ ID NO: 3558557 - DNA, 25 bp, Homo sapien
agcgccggttgtactgcatccgccg

SEQ ID NO: 3558558 - DNA, 25 bp, Homo sapien
ttgacaaagcgccggttgtactgca

SEQ ID NO: 3558559 - DNA, 25 bp, Homo sapien
acaaagcgccggttgtactgcatcc

SEQ ID NO: 3558560 - DNA, 25 bp, Homo sapien
tttcacagctaaaccaagtccctgg

SEQ ID NO: 3558561 - DNA, 25 bp, Homo sapien
ggctcttactcggtttgccttctcc

SEQ ID NO: 3558562 - DNA, 25 bp, Homo sapien
tgctaggtgtggaagacaggaacca

SEQ ID NO: 3558563 - DNA, 25 bp, Homo sapien
agtccctgggctcttactcggtttg

SEQ ID NO: 3558564 - DNA, 25 bp, Homo sapien
cctgggctcttactcggtttgcctt

SEQ ID NO: 3558565 - DNA, 25 bp, Homo sapien
gagtgagagtattagtggtcatggt

SEQ ID NO: 3558566 - DNA, 25 bp, Homo sapien
caccatgaccactaatactctcact

SEQ ID NO: 3558567 - DNA, 25 bp, Homo sapien
ggagaaggcaaaccgagtaagagcc

SEQ ID NO: 3558568 - DNA, 25 bp, Homo sapien
caaaccgagtaagagcccagggact

SEQ ID NO: 3558569 - DNA, 25 bp, Homo sapien
ccagggacttggtttagctgtgaaa

SEQ ID NO: 3558570 - DNA, 25 bp, Homo sapien
aaggcaaaccgagtaagagcccagg

SEQ ID NO: 3558571 - DNA, 25 bp, Homo sapien
tggttcctgtcttccacacctagca

SEQ ID NO: 3558572 - DNA, 25 bp, Homo sapien
cctggcccgtgctggaaaagtgaga

SEQ ID NO: 3558573 - DNA, 25 bp, Homo sapien
tggaaaagtgagaggtcagactcct

SEQ ID NO: 3558574 - DNA, 25 bp, Homo sapien
aaaagtgagaggtcagactcctaag

SEQ ID NO: 3558575 - DNA, 25 bp, Homo sapien
aaagtccatggttccctggcccgtg

SEQ ID NO: 3558576 - DNA, 25 bp, Homo sapien
tccctggcccgtgctggaaaagtga

SEQ ID NO: 3558577 - DNA, 25 bp, Homo sapien
gtccatggttccctggcccgtgctg

SEQ ID NO: 3558578 - DNA, 25 bp, Homo sapien
taggagtctgacctctcacttttcc

SEQ ID NO: 3558579 - DNA, 25 bp, Homo sapien
cacgggccagggaaccatggacttt

SEQ ID NO: 3558580 - DNA, 25 bp, Homo sapien
cacttttccagcacgggccagggaa

SEQ ID NO: 3558581 - DNA, 25 bp, Homo sapien
cttaggagtctgacctctcactttt

SEQ ID NO: 3558582 - DNA, 25 bp, Homo sapien
cagcacgggccagggaaccatggac

SEQ ID NO: 3558583 - DNA, 25 bp, Homo sapien
tgacctctcacttttccagcacggg

SEQ ID NO: 3558584 - DNA, 25 bp, Homo sapien
tcacatcacgagatcctagtctggt

SEQ ID NO: 3558585 - DNA, 25 bp, Homo sapien
gaagtaccggtaagcgtctagtgag

SEQ ID NO: 3558586 - DNA, 25 bp, Homo sapien
tcattacctattgggcgcagcttct

SEQ ID NO: 3558587 - DNA, 25 bp, Homo sapien
gggtgcatagtcctgacagctgagt

SEQ ID NO: 3558588 - DNA, 25 bp, Homo sapien
tgttgaacacagacgtccatgggag

SEQ ID NO: 3558589 - DNA, 25 bp, Homo sapien
gctgggtggcaccttcttgctctta

SEQ ID NO: 3558590 - DNA, 25 bp, Homo sapien
ccagactaggatctcgtgatgtgac

SEQ ID NO: 3558591 - DNA, 25 bp, Homo sapien
gtaagagcaagaaggtgccacccag

SEQ ID NO: 3558592 - DNA, 25 bp, Homo sapien
tcagctgtcaggactatgcacccca

SEQ ID NO: 3558593 - DNA, 25 bp, Homo sapien
taaagagaagctgcgcccaataggt

SEQ ID NO: 3558594 - DNA, 25 bp, Homo sapien
gaaatacaactacactctggctcag

SEQ ID NO: 3558595 - DNA, 25 bp, Homo sapien
ttagtgtggaagctgataaccagac

SEQ ID NO: 3558596 - DNA, 25 bp, Homo sapien
tgccccggaagatcaagtcgtgctc

SEQ ID NO: 3558597 - DNA, 25 bp, Homo sapien
cactggagggcattgccccggaaga

SEQ ID NO: 3558598 - DNA, 25 bp, Homo sapien
ctcatgtagcctcactggagggcat

SEQ ID NO: 3558599 - DNA, 25 bp, Homo sapien
cggaagatcaagtcgtgctcctggc

SEQ ID NO: 3558600 - DNA, 25 bp, Homo sapien
tagcctcactggagggcattgcccc

SEQ ID NO: 3558601 - DNA, 25 bp, Homo sapien
cattgccccggaagatcaagtcgtg

SEQ ID NO: 3558602 - DNA, 25 bp, Homo sapien
gccaggagcacgacttgatcttccg

SEQ ID NO: 3558603 - DNA, 25 bp, Homo sapien
tcttccggggcaatgccctccagtg

SEQ ID NO: 3558604 - DNA, 25 bp, Homo sapien
atgccctccagtgaggctacatgag

SEQ ID NO: 3558605 - DNA, 25 bp, Homo sapien
aatgccctccagtgaggctacatga

SEQ ID NO: 3558606 - DNA, 25 bp, Homo sapien
caggagcacgacttgatcttccggg

SEQ ID NO: 3558607 - DNA, 25 bp, Homo sapien
gggcaatgccctccagtgaggctac

SEQ ID NO: 3558608 - DNA, 25 bp, Homo sapien
ttttcttgtgctcttcactctcgcg

SEQ ID NO: 3558609 - DNA, 25 bp, Homo sapien
ccgagggaacgcttacgagccttat

SEQ ID NO: 3558610 - DNA, 25 bp, Homo sapien
ttacgagccttatctttccctgtag

SEQ ID NO: 3558611 - DNA, 25 bp, Homo sapien
gagggaacgcttacgagccttatct

SEQ ID NO: 3558612 - DNA, 25 bp, Homo sapien
cgcttacgagccttatctttccctg

SEQ ID NO: 3558613 - DNA, 25 bp, Homo sapien
ctctcgcggcccgagggaacgctta

SEQ ID NO: 3558614 - DNA, 25 bp, Homo sapien
ctacagggaaagataaggctcgtaa

SEQ ID NO: 3558615 - DNA, 25 bp, Homo sapien
taagcgttccctcgggccgcgagag

SEQ ID NO: 3558616 - DNA, 25 bp, Homo sapien
gaaagataaggctcgtaagcgttcc

SEQ ID NO: 3558617 - DNA, 25 bp, Homo sapien
cagggaaagataaggctcgtaagcg

SEQ ID NO: 3558618 - DNA, 25 bp, Homo sapien
cgcgagagtgaagagcacaagaaaa

SEQ ID NO: 3558619 - DNA, 25 bp, Homo sapien
gataaggctcgtaagcgttccctcg

SEQ ID NO: 3558620 - DNA, 25 bp, Homo sapien
atgcagctctttgtccgcgcccagg

SEQ ID NO: 3558621 - DNA, 25 bp, Homo sapien
gcagctctttgtccgcgcccaggag

SEQ ID NO: 3558622 - DNA, 25 bp, Homo sapien
ttgtccgcgcccaggagctacacac

SEQ ID NO: 3558623 - DNA, 25 bp, Homo sapien
tgcagctctttgtccgcgcccagga

SEQ ID NO: 3558624 - DNA, 25 bp, Homo sapien
agctctttgtccgcgcccaggagct

SEQ ID NO: 3558625 - DNA, 25 bp, Homo sapien
tttgtccgcgcccaggagctacaca

SEQ ID NO: 3558626 - DNA, 25 bp, Homo sapien
ctcctgggcgcggacaaagagctgc

SEQ ID NO: 3558627 - DNA, 25 bp, Homo sapien
gtgtgtagctcctgggcgcggacaa

SEQ ID NO: 3558628 - DNA, 25 bp, Homo sapien
cctgggcgcggacaaagagctgcat

SEQ ID NO: 3558629 - DNA, 25 bp, Homo sapien
tgtgtagctcctgggcgcggacaaa

SEQ ID NO: 3558630 - DNA, 25 bp, Homo sapien
tcctgggcgcggacaaagagctgca

SEQ ID NO: 3558631 - DNA, 25 bp, Homo sapien
agctcctgggcgcggacaaagagct

SEQ ID NO: 3558632 - DNA, 25 bp, Homo sapien
ccatcccgtcgcgatcgtttctgga

SEQ ID NO: 3558633 - DNA, 25 bp, Homo sapien
gatcgtttctggaccgctttccact

SEQ ID NO: 3558634 - DNA, 25 bp, Homo sapien
gaagggcttgtagcaggttggctgc

SEQ ID NO: 3558635 - DNA, 25 bp, Homo sapien
agtccctatccgaactccttgggag

SEQ ID NO: 3558636 - DNA, 25 bp, Homo sapien
ccttggctggatccgaagggcttgt

SEQ ID NO: 3558637 - DNA, 25 bp, Homo sapien
gcttctcttacaagccgtcttttct

SEQ ID NO: 3558638 - DNA, 25 bp, Homo sapien
acaagcccttcggatccagccaagg

SEQ ID NO: 3558639 - DNA, 25 bp, Homo sapien
tcccaaggagttcggatagggactg

SEQ ID NO: 3558640 - DNA, 25 bp, Homo sapien
tccagaaacgatcgcgacgggatgg

SEQ ID NO: 3558641 - DNA, 25 bp, Homo sapien
tgagtaaagaaaagacggcttgtaa

SEQ ID NO: 3558642 - DNA, 25 bp, Homo sapien
gaaaagacggcttgtaagagaagcc

SEQ ID NO: 3558643 - DNA, 25 bp, Homo sapien
tggaaagcggtccagaaacgatcgc

SEQ ID NO: 3558644 - DNA, 25 bp, Homo sapien
ttcgcggtagctgggaccgccgttc

SEQ ID NO: 3558645 - DNA, 25 bp, Homo sapien
cagtgacgtgacacgcagcccacgg

SEQ ID NO: 3558646 - DNA, 25 bp, Homo sapien
cgcagcccacggtctgtactgacgc

SEQ ID NO: 3558647 - DNA, 25 bp, Homo sapien
acgcagcccacggtctgtactgacg

SEQ ID NO: 3558648 - DNA, 25 bp, Homo sapien
cgcggtagctgggaccgccgttcag

SEQ ID NO: 3558649 - DNA, 25 bp, Homo sapien
tcgcggtagctgggaccgccgttca

SEQ ID NO: 3558650 - DNA, 25 bp, Homo sapien
gacgcgccctcgcttcttcctcttt

SEQ ID NO: 3558651 - DNA, 25 bp, Homo sapien
acgcgccctcgcttcttcctctttc

SEQ ID NO: 3558652 - DNA, 25 bp, Homo sapien
tcctctttctcgactccatcttcgc

SEQ ID NO: 3558653 - DNA, 25 bp, Homo sapien
gcgaagatggagtcgagaaagagga

SEQ ID NO: 3558654 - DNA, 25 bp, Homo sapien
aaagaggaagaagcgagggcgcgtc

SEQ ID NO: 3558655 - DNA, 25 bp, Homo sapien
gaaagaggaagaagcgagggcgcgt

SEQ ID NO: 3558656 - DNA, 25 bp, Homo sapien
cgtcagtacagaccgtgggctgcgt

SEQ ID NO: 3558657 - DNA, 25 bp, Homo sapien
ctgaacggcggtcccagctaccgcg

SEQ ID NO: 3558658 - DNA, 25 bp, Homo sapien
tgaacggcggtcccagctaccgcga

SEQ ID NO: 3558659 - DNA, 25 bp, Homo sapien
ccgtgggctgcgtgtcacgtcactg

SEQ ID NO: 3558660 - DNA, 25 bp, Homo sapien
gaacggcggtcccagctaccgcgaa

SEQ ID NO: 3558661 - DNA, 25 bp, Homo sapien
gcgtcagtacagaccgtgggctgcg

SEQ ID NO: 3558662 - DNA, 25 bp, Homo sapien
ttagccccgggctctgatagagagg

SEQ ID NO: 3558663 - DNA, 25 bp, Homo sapien
taatggtcagtggtgtccccaagga

SEQ ID NO: 3558664 - DNA, 25 bp, Homo sapien
ggccctccgaagctcactgttgcaa

SEQ ID NO: 3558665 - DNA, 25 bp, Homo sapien
gcaaggagcccgacactgatttgat

SEQ ID NO: 3558666 - DNA, 25 bp, Homo sapien
tgactccgcacatacaagtagggct

SEQ ID NO: 3558667 - DNA, 25 bp, Homo sapien
tactactccctggtgcagacagaga

SEQ ID NO: 3558668 - DNA, 25 bp, Homo sapien
gagctaatactgttcggcactgcag

SEQ ID NO: 3558669 - DNA, 25 bp, Homo sapien
cacacttgggaacgggagctaatac

SEQ ID NO: 3558670 - DNA, 25 bp, Homo sapien
gcgccggcggagctctgctgcatcg

SEQ ID NO: 3558671 - DNA, 25 bp, Homo sapien
cgccggcggagctctgctgcatcgg

SEQ ID NO: 3558672 - DNA, 25 bp, Homo sapien
gccggcggagctctgctgcatcggg

SEQ ID NO: 3558673 - DNA, 25 bp, Homo sapien
ggcgccggcggagctctgctgcatc

SEQ ID NO: 3558674 - DNA, 25 bp, Homo sapien
tggaacctagagaagttccctgctc

SEQ ID NO: 3558675 - DNA, 25 bp, Homo sapien
gaacctagagaagttccctgctccc

SEQ ID NO: 3558676 - DNA, 25 bp, Homo sapien
gtggaacctagagaagttccctgct

SEQ ID NO: 3558677 - DNA, 25 bp, Homo sapien
aagtggaacctagagaagttccctg

SEQ ID NO: 3558678 - DNA, 25 bp, Homo sapien
ggttggggtcgtggcctctgagcta

SEQ ID NO: 3558679 - DNA, 25 bp, Homo sapien
ggtcgtggcctctgagctagggatg

SEQ ID NO: 3558680 - DNA, 25 bp, Homo sapien
cctttccatttcaggggctggtggg

SEQ ID NO: 3558681 - DNA, 25 bp, Homo sapien
cctggggttggggtcgtggcctctg

SEQ ID NO: 3558682 - DNA, 25 bp, Homo sapien
ctcctcagtggagttgactgaagtg

SEQ ID NO: 3558683 - DNA, 25 bp, Homo sapien
tcctcagtggagttgactgaagtgg

SEQ ID NO: 3558684 - DNA, 25 bp, Homo sapien
aacaactgtagtggcagtctcctca

SEQ ID NO: 3558685 - DNA, 25 bp, Homo sapien
actgtagtggcagtctcctcagtgg

SEQ ID NO: 3558686 - DNA, 25 bp, Homo sapien
tggcatccaaggttgggcagattct

SEQ ID NO: 3558687 - DNA, 25 bp, Homo sapien
ggaagagaagggacgagaggcgggc

SEQ ID NO: 3558688 - DNA, 25 bp, Homo sapien
tggccttggcatccaaggttgggca

SEQ ID NO: 3558689 - DNA, 25 bp, Homo sapien
agaagggacgagaggcgggcctggc

SEQ ID NO: 3558690 - DNA, 25 bp, Homo sapien
cctggagacccttggtgggcctgta

SEQ ID NO: 3558691 - DNA, 25 bp, Homo sapien
acagggtgactggactcaagggcca

SEQ ID NO: 3558692 - DNA, 25 bp, Homo sapien
tcaaaaatgagtgatgggaccagcg

SEQ ID NO: 3558693 - DNA, 25 bp, Homo sapien
taagccacagtgctcgagccttgga

SEQ ID NO: 3558694 - DNA, 25 bp, Homo sapien
agtgtgtggatgttacgcaggctct

SEQ ID NO: 3558695 - DNA, 25 bp, Homo sapien
tcagcccagcaaagcccgcaggggg

SEQ ID NO: 3558696 - DNA, 25 bp, Homo sapien
gtgtggatgttacgcaggctctgca

SEQ ID NO: 3558697 - DNA, 25 bp, Homo sapien
tggccctccagagctcgtagctcct

SEQ ID NO: 3558698 - DNA, 25 bp, Homo sapien
gaggcaggggcatacccatccaggg

SEQ ID NO: 3558699 - DNA, 25 bp, Homo sapien
ggcaggggcatacccatccagggag

SEQ ID NO: 3558700 - DNA, 25 bp, Homo sapien
agcagtagcactggtgccagcagct

SEQ ID NO: 3558701 - DNA, 25 bp, Homo sapien
caggggcatacccatccagggagga

SEQ ID NO: 3558702 - DNA, 25 bp, Homo sapien
cctggctgtcacagtacccaaaggc

SEQ ID NO: 3558703 - DNA, 25 bp, Homo sapien
gcaggaacgaagtcagtgagtgttc

SEQ ID NO: 3558704 - DNA, 25 bp, Homo sapien
ggctgtcacagtacccaaaggctca

SEQ ID NO: 3558705 - DNA, 25 bp, Homo sapien
ctgaagagcaggaacgaagtcagtg

SEQ ID NO: 3558706 - DNA, 25 bp, Homo sapien
ggatggaggagccacagcctctcct

SEQ ID NO: 3558707 - DNA, 25 bp, Homo sapien
ctgcactggtggatggaggagccac

SEQ ID NO: 3558708 - DNA, 25 bp, Homo sapien
tggaggagccacagcctctcctgag

SEQ ID NO: 3558709 - DNA, 25 bp, Homo sapien
tgcactggtggatggaggagccaca

SEQ ID NO: 3558710 - DNA, 25 bp, Homo sapien
atggggggccacagtgggaacatgc

SEQ ID NO: 3558711 - DNA, 25 bp, Homo sapien
ccatggggggccacagtgggaacat

SEQ ID NO: 3558712 - DNA, 25 bp, Homo sapien
cgggacaggtggaaaggggcccatg

SEQ ID NO: 3558713 - DNA, 25 bp, Homo sapien
aggggcccatggggggccacagtgg

SEQ ID NO: 3558714 - DNA, 25 bp, Homo sapien
ctggaggaaaaggaggcaggaggcc

SEQ ID NO: 3558715 - DNA, 25 bp, Homo sapien
tggaggaaaaggaggcaggaggccc

SEQ ID NO: 3558716 - DNA, 25 bp, Homo sapien
aggaaaaggaggcaggaggccctgg

SEQ ID NO: 3558717 - DNA, 25 bp, Homo sapien
gaggaaaaggaggcaggaggccctg

SEQ ID NO: 3558718 - DNA, 25 bp, Homo sapien
agcgatgcacgaaggacatccatac

SEQ ID NO: 3558719 - DNA, 25 bp, Homo sapien
ggcaggtggggcaggtctgctgccg

SEQ ID NO: 3558720 - DNA, 25 bp, Homo sapien
tctcttctcggcagatgatgcagac

SEQ ID NO: 3558721 - DNA, 25 bp, Homo sapien
gacattgtccattgcctggagctcc

SEQ ID NO: 3558722 - DNA, 25 bp, Homo sapien
ctggtatggaaaatgtggttgcagg

SEQ ID NO: 3558723 - DNA, 25 bp, Homo sapien
gttgcagggcagtctcttggcacca

SEQ ID NO: 3558724 - DNA, 25 bp, Homo sapien
tgacaggggctgtatcaggtccaga

SEQ ID NO: 3558725 - DNA, 25 bp, Homo sapien
gacaggggctgtatcaggtccagag

SEQ ID NO: 3558726 - DNA, 25 bp, Homo sapien
atgacaggggctgtatcaggtccag

SEQ ID NO: 3558727 - DNA, 25 bp, Homo sapien
gatgacaggggctgtatcaggtcca

SEQ ID NO: 3558728 - DNA, 25 bp, Homo sapien
gttcatgttgcggatggctcggcga

SEQ ID NO: 3558729 - DNA, 25 bp, Homo sapien
agggtgttcatgttgcggatggctc

SEQ ID NO: 3558730 - DNA, 25 bp, Homo sapien
cggcgagacatgatggcatctgtca

SEQ ID NO: 3558731 - DNA, 25 bp, Homo sapien
atggctcggcgagacatgatggcat

SEQ ID NO: 3558732 - DNA, 25 bp, Homo sapien
gaagggacgggatcaggtcaggagg

SEQ ID NO: 3558733 - DNA, 25 bp, Homo sapien
aggagaagggacgggatcaggtcag

SEQ ID NO: 3558734 - DNA, 25 bp, Homo sapien
gacgggatcaggtcaggaggatcgg

SEQ ID NO: 3558735 - DNA, 25 bp, Homo sapien
gggacgggatcaggtcaggaggatc

SEQ ID NO: 3558736 - DNA, 25 bp, Homo sapien
ggtgtgcaccttgatcatgatggtc

SEQ ID NO: 3558737 - DNA, 25 bp, Homo sapien
catgggccggatggcaaagagtggg

SEQ ID NO: 3558738 - DNA, 25 bp, Homo sapien
tcatggccaggtacatgggccggat

SEQ ID NO: 3558739 - DNA, 25 bp, Homo sapien
catgaaggccatgtacagcagaacc

SEQ ID NO: 3558740 - DNA, 25 bp, Homo sapien
cagctctgtgtagagcatgtacaca

SEQ ID NO: 3558741 - DNA, 25 bp, Homo sapien
tggtgagcaccatcgtcatcaggat

SEQ ID NO: 3558742 - DNA, 25 bp, Homo sapien
tgtacacagccttgttgtcccaggg

SEQ ID NO: 3558743 - DNA, 25 bp, Homo sapien
ggggttctcactctggaggtccacg

SEQ ID NO: 3558744 - DNA, 25 bp, Homo sapien
cacagaggccccacgggtcaggatg

SEQ ID NO: 3558745 - DNA, 25 bp, Homo sapien
acagaggccccacgggtcaggatgc

SEQ ID NO: 3558746 - DNA, 25 bp, Homo sapien
taggcgtggctgacgaagaggaagt

SEQ ID NO: 3558747 - DNA, 25 bp, Homo sapien
aggatgctgtgataggcgtggctga

SEQ ID NO: 3558748 - DNA, 25 bp, Homo sapien
tacaggtccacggttcacgttccag

SEQ ID NO: 3558749 - DNA, 25 bp, Homo sapien
gagaagccctagagtggaacagcac

SEQ ID NO: 3558750 - DNA, 25 bp, Homo sapien
tgtttaatgctctaggacagcccca

SEQ ID NO: 3558751 - DNA, 25 bp, Homo sapien
cagcgatctagtcaggtgggcacac

SEQ ID NO: 3558752 - DNA, 25 bp, Homo sapien
caatgcggcagtgaaagagccagga

SEQ ID NO: 3558753 - DNA, 25 bp, Homo sapien
aggagatgttggggctgcgttccat

SEQ ID NO: 3558754 - DNA, 25 bp, Homo sapien
agacaatgcggcagtgaaagagcca

SEQ ID NO: 3558755 - DNA, 25 bp, Homo sapien
caggagatgttggggctgcgttcca

SEQ ID NO: 3558756 - DNA, 25 bp, Homo sapien
tgaagtcatcccgaaaaacggtgaa

SEQ ID NO: 3558757 - DNA, 25 bp, Homo sapien
gaagagtgaagagtgcaacaaagcg

SEQ ID NO: 3558758 - DNA, 25 bp, Homo sapien
aacggtgaaggccagacaagtctct

SEQ ID NO: 3558759 - DNA, 25 bp, Homo sapien
tgacggcgtaccaggaacgttccag

SEQ ID NO: 3558760 - DNA, 25 bp, Homo sapien
aatgtggataccaaacattctttcc

SEQ ID NO: 3558761 - DNA, 25 bp, Homo sapien
gcagggaataatgtggataccaaac

SEQ ID NO: 3558762 - DNA, 25 bp, Homo sapien
gccaggcagggaataatgtggatac

SEQ ID NO: 3558763 - DNA, 25 bp, Homo sapien
ctcacctttggggcagccgacatct

SEQ ID NO: 3558764 - DNA, 25 bp, Homo sapien
ctcagttgcccaaagaacaccttgc

SEQ ID NO: 3558765 - DNA, 25 bp, Homo sapien
gttgcccaaagaacaccttgcccat

SEQ ID NO: 3558766 - DNA, 25 bp, Homo sapien
aaagaacaccttgcccatcaccttg

SEQ ID NO: 3558767 - DNA, 25 bp, Homo sapien
caaagaacaccttgcccatcacctt

SEQ ID NO: 3558768 - DNA, 25 bp, Homo sapien
ctgtggtttgaggtcactttctgct

SEQ ID NO: 3558769 - DNA, 25 bp, Homo sapien
tggtttgaggtcactttctgctttc

SEQ ID NO: 3558770 - DNA, 25 bp, Homo sapien
gctgtggtttgaggtcactttctgc

SEQ ID NO: 3558771 - DNA, 25 bp, Homo sapien
tgtggtttgaggtcactttctgctt

SEQ ID NO: 3558772 - DNA, 25 bp, Homo sapien
tgtttgaggtagtaggcgtgagcca

SEQ ID NO: 3558773 - DNA, 25 bp, Homo sapien
gccatcatcactgccgtgcggaaca

SEQ ID NO: 3558774 - DNA, 25 bp, Homo sapien
tggccgccatcatcactgccgtgcg

SEQ ID NO: 3558775 - DNA, 25 bp, Homo sapien
gtagaactggtgtttgaggtagtag

SEQ ID NO: 3558776 - DNA, 25 bp, Homo sapien
gtgccgactccggagacctcaaggg

SEQ ID NO: 3558777 - DNA, 25 bp, Homo sapien
agcaccaggagttgcgggcgtcgca

SEQ ID NO: 3558778 - DNA, 25 bp, Homo sapien
cggccagctgacaggccgaaagcgt

SEQ ID NO: 3558779 - DNA, 25 bp, Homo sapien
aggcttgagcaaagcggccgcaccg

SEQ ID NO: 3558780 - DNA, 25 bp, Homo sapien
gcgtgggtcgtaccaagtgcgtcct

SEQ ID NO: 3558781 - DNA, 25 bp, Homo sapien
cctacgtgggcccatagcaatggtg

SEQ ID NO: 3558782 - DNA, 25 bp, Homo sapien
tagtcacagatggtatggctcctgc

SEQ ID NO: 3558783 - DNA, 25 bp, Homo sapien
gggacagactatacaagcctgaggg

SEQ ID NO: 3558784 - DNA, 25 bp, Homo sapien
caatggtgtctctttagctttacga

SEQ ID NO: 3558785 - DNA, 25 bp, Homo sapien
tattccaacgggtaccaatggtgtc

SEQ ID NO: 3558786 - DNA, 25 bp, Homo sapien
tagctttacgaataagtttggatcc

SEQ ID NO: 3558787 - DNA, 25 bp, Homo sapien
gagcttcgtcatatgaagaaaggga

SEQ ID NO: 3558788 - DNA, 25 bp, Homo sapien
tctacttctctgacactgcgctgca

SEQ ID NO: 3558789 - DNA, 25 bp, Homo sapien
aagtcagccagagtcaccctgctgg

SEQ ID NO: 3558790 - DNA, 25 bp, Homo sapien
gaaaacagatgttcgaagaggctaa

SEQ ID NO: 3558791 - DNA, 25 bp, Homo sapien
tggccgggaggcactctatctactt

SEQ ID NO: 3558792 - DNA, 25 bp, Homo sapien
gagtctagattccttttattacaga

SEQ ID NO: 3558793 - DNA, 25 bp, Homo sapien
tctccaaagagtctagattcctttt

SEQ ID NO: 3558794 - DNA, 25 bp, Homo sapien
gaactatttctccaaagagtctaga

SEQ ID NO: 3558795 - DNA, 25 bp, Homo sapien
tatttctccaaagagtctagattcc

SEQ ID NO: 3558796 - DNA, 25 bp, Homo sapien
taatcctttcctgagatcatcaaaa

SEQ ID NO: 3558797 - DNA, 25 bp, Homo sapien
cctttcctgagatcatcaaaacttc

SEQ ID NO: 3558798 - DNA, 25 bp, Homo sapien
acataatcctttcctgagatcatca

SEQ ID NO: 3558799 - DNA, 25 bp, Homo sapien
aatcctttcctgagatcatcaaaac

SEQ ID NO: 3558800 - DNA, 25 bp, Homo sapien
gatcctatattggtatgaggaatgg

SEQ ID NO: 3558801 - DNA, 25 bp, Homo sapien
gtacagttatgctcagatgaacact

SEQ ID NO: 3558802 - DNA, 25 bp, Homo sapien
acagttatgctcagatgaacactgg

SEQ ID NO: 3558803 - DNA, 25 bp, Homo sapien
cctcagaggtcaaggagctgatcct

SEQ ID NO: 3558804 - DNA, 25 bp, Homo sapien
gctgcaatcagtacacgtttcccct

SEQ ID NO: 3558805 - DNA, 25 bp, Homo sapien
ggctgcaatcagtacacgtttcccc

SEQ ID NO: 3558806 - DNA, 25 bp, Homo sapien
ttttcagtgagctcaacatcttgtc

SEQ ID NO: 3558807 - DNA, 25 bp, Homo sapien
cagatttttatctttgccaaactgc

SEQ ID NO: 3558808 - DNA, 25 bp, Homo sapien
caaactgctaagtgggaaacagtct

SEQ ID NO: 3558809 - DNA, 25 bp, Homo sapien
acccagccgtgaggtgccagatttt

SEQ ID NO: 3558810 - DNA, 25 bp, Homo sapien
cagcttctggctgtattttcgtttt

SEQ ID NO: 3558811 - DNA, 25 bp, Homo sapien
ccagcttctggctgtattttcgttt

SEQ ID NO: 3558812 - DNA, 25 bp, Homo sapien
tcatttttgtacgtttaaatattga

SEQ ID NO: 3558813 - DNA, 25 bp, Homo sapien
agcttctggctgtattttcgttttc

SEQ ID NO: 3558814 - DNA, 25 bp, Homo sapien
gataccacaccagacctagagtttt

SEQ ID NO: 3558815 - DNA, 25 bp, Homo sapien
gagataccacaccagacctagagtt

SEQ ID NO: 3558816 - DNA, 25 bp, Homo sapien
agataccacaccagacctagagttt

SEQ ID NO: 3558817 - DNA, 25 bp, Homo sapien
tttcattaggaacaacatattccaa

SEQ ID NO: 3558818 - DNA, 25 bp, Homo sapien
ttctcaacagattagaaatggtact

SEQ ID NO: 3558819 - DNA, 25 bp, Homo sapien
tttctaagatacaaattatgaatcc

SEQ ID NO: 3558820 - DNA, 25 bp, Homo sapien
caaacctataaattgagttcatctg

SEQ ID NO: 3558821 - DNA, 25 bp, Homo sapien
catattggccaggctcgtctctcga

SEQ ID NO: 3558822 - DNA, 25 bp, Homo sapien
cctagtagtggggactacaggagcc

SEQ ID NO: 3558823 - DNA, 25 bp, Homo sapien
atattggccaggctcgtctctcgaa

SEQ ID NO: 3558824 - DNA, 25 bp, Homo sapien
ctccctagtagtggggactacagga

SEQ ID NO: 3558825 - DNA, 25 bp, Homo sapien
tagagtcctgggaacgctatgcagt

SEQ ID NO: 3558826 - DNA, 25 bp, Homo sapien
gtaaggtgacacatgggcgcttcca

SEQ ID NO: 3558827 - DNA, 25 bp, Homo sapien
caggttaggtatttcaggcaagtca

SEQ ID NO: 3558828 - DNA, 25 bp, Homo sapien
gagaccagcgaaaagccctgacttg

SEQ ID NO: 3558829 - DNA, 25 bp, Homo sapien
cgttagagaaagatgggctcccaca

SEQ ID NO: 3558830 - DNA, 25 bp, Homo sapien
gggatgtccacctctctaagtttcc

SEQ ID NO: 3558831 - DNA, 25 bp, Homo sapien
ccataggatgcacgcatgcggaaag

SEQ ID NO: 3558832 - DNA, 25 bp, Homo sapien
acgcatgcggaaagtcgggccgaac

SEQ ID NO: 3558833 - DNA, 25 bp, Homo sapien
cgtgccggagagataagggagagcc

SEQ ID NO: 3558834 - DNA, 25 bp, Homo sapien
aatttgtcctctcgcggaattggcc

SEQ ID NO: 3558835 - DNA, 25 bp, Homo sapien
gctggctgggaacggcgggagcagc

SEQ ID NO: 3558836 - DNA, 25 bp, Homo sapien
caccgtgagtaagagatagtcagag

SEQ ID NO: 3558837 - DNA, 25 bp, Homo sapien
aatcatgaactgatgtgctttttgt

SEQ ID NO: 3558838 - DNA, 25 bp, Homo sapien
agcctcccttagtccctagctggga

SEQ ID NO: 3558839 - DNA, 25 bp, Homo sapien
agggtttcacccttcagaccagccg

SEQ ID NO: 3558840 - DNA, 25 bp, Homo sapien
cccttcagaccagccgtgttggtca

SEQ ID NO: 3558841 - DNA, 25 bp, Homo sapien
gggcgcgctcagagcagttcatcaa

SEQ ID NO: 3558842 - DNA, 25 bp, Homo sapien
tgcgagaggtcagcacccgcttccg

SEQ ID NO: 3558843 - DNA, 25 bp, Homo sapien
cacttgaagcgtgacttcttcctgg

SEQ ID NO: 3558844 - DNA, 25 bp, Homo sapien
ttcttcctggccaatgcgtctcggg

SEQ ID NO: 3558845 - DNA, 25 bp, Homo sapien
cagaaccgcagaacctcagtagtgt

SEQ ID NO: 3558846 - DNA, 25 bp, Homo sapien
ccaaagcgagtttgcaagtgtctgc

SEQ ID NO: 3558847 - DNA, 25 bp, Homo sapien
gatgagctcctacatccaaagcgag

SEQ ID NO: 3558848 - DNA, 25 bp, Homo sapien
gagcagagtcttcttacctaggtga

SEQ ID NO: 3558849 - DNA, 25 bp, Homo sapien
ctaggcacaagtctgggcaaatggt

SEQ ID NO: 3558850 - DNA, 25 bp, Homo sapien
gctgtggagggagaacgggatccac

SEQ ID NO: 3558851 - DNA, 25 bp, Homo sapien
aaagggtgaagccatcgctgcagga

SEQ ID NO: 3558852 - DNA, 25 bp, Homo sapien
gaagacctggcggagattagaaaaa

SEQ ID NO: 3558853 - DNA, 25 bp, Homo sapien
cctgtccgagccgtgtcagggatag

SEQ ID NO: 3558854 - DNA, 25 bp, Homo sapien
ccagaacatcactgccggacaggtg

SEQ ID NO: 3558855 - DNA, 25 bp, Homo sapien
caatagatctcctgtccgagccgtg

SEQ ID NO: 3558856 - DNA, 25 bp, Homo sapien
caggtgataactggaccaatagatc

SEQ ID NO: 3558857 - DNA, 25 bp, Homo sapien
gcagtagtattaacccttcagggaa

SEQ ID NO: 3558858 - DNA, 25 bp, Homo sapien
tcaagatgaggctccggagcagtag

SEQ ID NO: 3558859 - DNA, 25 bp, Homo sapien
gactctgccctgacttaattggtat

SEQ ID NO: 3558860 - DNA, 25 bp, Homo sapien
tagagaattccataggcaagtgctc

SEQ ID NO: 3558861 - DNA, 25 bp, Homo sapien
agaaagtgtcccaggcaatcggagc

SEQ ID NO: 3558862 - DNA, 25 bp, Homo sapien
gcctctttagggtgtgcgtacagcc

SEQ ID NO: 3558863 - DNA, 25 bp, Homo sapien
tcccgtcattgagagatgtgcacca

SEQ ID NO: 3558864 - DNA, 25 bp, Homo sapien
tcgagaggacaaaaaggtagcagca

SEQ ID NO: 3558865 - DNA, 25 bp, Homo sapien
gaatcaggccctgacaaatttgttg

SEQ ID NO: 3558866 - DNA, 25 bp, Homo sapien
gcctcatgatggtgccaactttgca

SEQ ID NO: 3558867 - DNA, 25 bp, Homo sapien
cacagtacggtgctggctaatggcc

SEQ ID NO: 3558868 - DNA, 25 bp, Homo sapien
gattcagccgaatactcaagcacat

SEQ ID NO: 3558869 - DNA, 25 bp, Homo sapien
gctccgtgtccagaagtaagccagc

SEQ ID NO: 3558870 - DNA, 25 bp, Homo sapien
ggatcccgcccactcagaaaaggcg

SEQ ID NO: 3558871 - DNA, 25 bp, Homo sapien
tcagtccatgctccgtgtccagaag

SEQ ID NO: 3558872 - DNA, 25 bp, Homo sapien
cagaaaaggcgagaaggctttgtga

SEQ ID NO: 3558873 - DNA, 25 bp, Homo sapien
agttcctcacatgcatgctgtggtc

SEQ ID NO: 3558874 - DNA, 25 bp, Homo sapien
gttcctcacatgcatgctgtggtcc

SEQ ID NO: 3558875 - DNA, 25 bp, Homo sapien
agagcaagcaactggctgcatgcct

SEQ ID NO: 3558876 - DNA, 25 bp, Homo sapien
tgggcctccctgcgcagttcctcac

SEQ ID NO: 3558877 - DNA, 25 bp, Homo sapien
cagggtcaggccttccagggttcac

SEQ ID NO: 3558878 - DNA, 25 bp, Homo sapien
gctttgccaagtcgcgcagtagcca

SEQ ID NO: 3558879 - DNA, 25 bp, Homo sapien
tgacggtgaaatggaatcgagcccc

SEQ ID NO: 3558880 - DNA, 25 bp, Homo sapien
tgactccgagataaatagatgacct

SEQ ID NO: 3558881 - DNA, 25 bp, Homo sapien
gagtttttgatagagacagtttcgc

SEQ ID NO: 3558882 - DNA, 25 bp, Homo sapien
gcccagtctaagtgctgtggtgcca

SEQ ID NO: 3558883 - DNA, 25 bp, Homo sapien
tgtcgcccagtctaagtgctgtggt

SEQ ID NO: 3558884 - DNA, 25 bp, Homo sapien
tttgagtttttgatagagacagttt

SEQ ID NO: 3558885 - DNA, 25 bp, Homo sapien
tctccaagaaggacaagctgacaga

SEQ ID NO: 3558886 - DNA, 25 bp, Homo sapien
ctgacaaaatgaccactgcaagctg

SEQ ID NO: 3558887 - DNA, 25 bp, Homo sapien
gaaacagccctgttgactgtgtggg

SEQ ID NO: 3558888 - DNA, 25 bp, Homo sapien
acagagctgacaaaatgaccactgc

SEQ ID NO: 3558889 - DNA, 25 bp, Homo sapien
tgcggcacggcctgtcttgagaaag

SEQ ID NO: 3558890 - DNA, 25 bp, Homo sapien
tatgtattgatgtagagtggtctcc

SEQ ID NO: 3558891 - DNA, 25 bp, Homo sapien
cagcagaggctcaatgaaagggctt

SEQ ID NO: 3558892 - DNA, 25 bp, Homo sapien
catccttgtgctggaataccgtgca

SEQ ID NO: 3558893 - DNA, 25 bp, Homo sapien
gatcatcgttgcctttcccacagca

SEQ ID NO: 3558894 - DNA, 25 bp, Homo sapien
tgttggctcgtagaatagaaactgc

SEQ ID NO: 3558895 - DNA, 25 bp, Homo sapien
gatggtgttgtacctctacacacag

SEQ ID NO: 3558896 - DNA, 25 bp, Homo sapien
aatgggcccttcattctcagtggca

SEQ ID NO: 3558897 - DNA, 25 bp, Homo sapien
gctggagccaactccgagggtgacc

SEQ ID NO: 3558898 - DNA, 25 bp, Homo sapien
tggtccctgctaggacaaggctgtc

SEQ ID NO: 3558899 - DNA, 25 bp, Homo sapien
gaatgacaggatacctggaaggcac

SEQ ID NO: 3558900 - DNA, 25 bp, Homo sapien
aatccagatgcgaagggaagtgccc

SEQ ID NO: 3558901 - DNA, 25 bp, Homo sapien
caaggtctctctgcgatttctgaag

SEQ ID NO: 3558902 - DNA, 25 bp, Homo sapien
tattctaacgtaggcgcttccaagg

SEQ ID NO: 3558903 - DNA, 25 bp, Homo sapien
tgaatatacttgtgccggcgcttcc

SEQ ID NO: 3558904 - DNA, 25 bp, Homo sapien
gaactagtctgaatatgagccccac

SEQ ID NO: 3558905 - DNA, 25 bp, Homo sapien
tgcaatattgcagtgggatctccag

SEQ ID NO: 3558906 - DNA, 25 bp, Homo sapien
tcttcatgataggaggatccctgcc

SEQ ID NO: 3558907 - DNA, 25 bp, Homo sapien
cattttctcattgggaggtccaggg

SEQ ID NO: 3558908 - DNA, 25 bp, Homo sapien
tggccccggagaatcgaagtgcttg

SEQ ID NO: 3558909 - DNA, 25 bp, Homo sapien
gaagaagatggcaccttcgacctcc

SEQ ID NO: 3558910 - DNA, 25 bp, Homo sapien
accattcatattggcagtggcggcg

SEQ ID NO: 3558911 - DNA, 25 bp, Homo sapien
aaggagaagcttcgggacctgctgt

SEQ ID NO: 3558912 - DNA, 25 bp, Homo sapien
caaggtgcccatctatctgaagcgt

SEQ ID NO: 3558913 - DNA, 25 bp, Homo sapien
aaatgcatgagactgtatgtggctc

SEQ ID NO: 3558914 - DNA, 25 bp, Homo sapien
tgaagagctgataaaagccctagaa

SEQ ID NO: 3558915 - DNA, 25 bp, Homo sapien
ctgagcaacagagcggaaactcttg

SEQ ID NO: 3558916 - DNA, 25 bp, Homo sapien
gaataatgtccaaatgcgcataggt

SEQ ID NO: 3558917 - DNA, 25 bp, Homo sapien
gctggtaaggtcttcacaccctgat

SEQ ID NO: 3558918 - DNA, 25 bp, Homo sapien
ctcttaactgaattgggagcctctg

SEQ ID NO: 3558919 - DNA, 25 bp, Homo sapien
gtgggcaggccctaactcactgtcg

SEQ ID NO: 3558920 - DNA, 25 bp, Homo sapien
tgcacgctcgctagcagctggtaag

SEQ ID NO: 3558921 - DNA, 25 bp, Homo sapien
tctaggatctgaactgcccgcagtg

SEQ ID NO: 3558922 - DNA, 25 bp, Homo sapien
tttgaatcaagcagttatgggcccc

SEQ ID NO: 3558923 - DNA, 25 bp, Homo sapien
acaattccgtgagggctgttagccc

SEQ ID NO: 3558924 - DNA, 25 bp, Homo sapien
taagaacgctgtagcaggcctaggt

SEQ ID NO: 3558925 - DNA, 25 bp, Homo sapien
ctgagccccgaacaaggagtccggt

SEQ ID NO: 3558926 - DNA, 25 bp, Homo sapien
cagagatggtccgatcagaagggat

SEQ ID NO: 3558927 - DNA, 25 bp, Homo sapien
aggaacttgggcctggaactccctg

SEQ ID NO: 3558928 - DNA, 25 bp, Homo sapien
tgagaaatagcaaacaacagaggac

SEQ ID NO: 3558929 - DNA, 25 bp, Homo sapien
tgcactgtttataggagcccacctc

SEQ ID NO: 3558930 - DNA, 25 bp, Homo sapien
tctcagcccgaaagggcagcacatt

SEQ ID NO: 3558931 - DNA, 25 bp, Homo sapien
cctgggagagcttttcacaacacag

SEQ ID NO: 3558932 - DNA, 25 bp, Homo sapien
gcagcacattcccacgatcaggagc

SEQ ID NO: 3558933 - DNA, 25 bp, Homo sapien
taggagttcgagtctcttccaccat

SEQ ID NO: 3558934 - DNA, 25 bp, Homo sapien
taatgactctgaagaagcgcaggca

SEQ ID NO: 3558935 - DNA, 25 bp, Homo sapien
tggtagagtcaacctgccaggcact

SEQ ID NO: 3558936 - DNA, 25 bp, Homo sapien
ttgttcagggtccaggaagcaaccc

SEQ ID NO: 3558937 - DNA, 25 bp, Homo sapien
tctgttcaagcaccaggctcaggct

SEQ ID NO: 3558938 - DNA, 25 bp, Homo sapien
ggctgacatggtgaaaccctgtctc

SEQ ID NO: 3558939 - DNA, 25 bp, Homo sapien
cgacgcgggcggatcacaaagtcag

SEQ ID NO: 3558940 - DNA, 25 bp, Homo sapien
ctgacatggtgaaaccctgtctcta

SEQ ID NO: 3558941 - DNA, 25 bp, Homo sapien
gagatcaagaccatcctggctgaca

SEQ ID NO: 3558942 - DNA, 25 bp, Homo sapien
acttgtgcctcatgctccctgtttc

SEQ ID NO: 3558943 - DNA, 25 bp, Homo sapien
cacttgtgcctcatgctccctgttt

SEQ ID NO: 3558944 - DNA, 25 bp, Homo sapien
tcacttgtgcctcatgctccctgtt

SEQ ID NO: 3558945 - DNA, 25 bp, Homo sapien
tgcccagcccagatctgcgcgggtg

SEQ ID NO: 3558946 - DNA, 25 bp, Homo sapien
tggcttccggctcccacaggtgtct

SEQ ID NO: 3558947 - DNA, 25 bp, Homo sapien
tggcctccaatctcaaactggcctc

SEQ ID NO: 3558948 - DNA, 25 bp, Homo sapien
tgagcctcttgcactgatttgcaag

SEQ ID NO: 3558949 - DNA, 25 bp, Homo sapien
tgacagcattgacgggaaaggcgcg

SEQ ID NO: 3558950 - DNA, 25 bp, Homo sapien
gaaaggcgcgggcactgttgatggt

SEQ ID NO: 3558951 - DNA, 25 bp, Homo sapien
agatattcgtagctgaggaaggtga

SEQ ID NO: 3558952 - DNA, 25 bp, Homo sapien
agtccttcctgccggatgctgctca

SEQ ID NO: 3558953 - DNA, 25 bp, Homo sapien
ggtacactctgcgtctcagtccatc

SEQ ID NO: 3558954 - DNA, 25 bp, Homo sapien
tccagcatcccctggtacactctgc

SEQ ID NO: 3558955 - DNA, 25 bp, Homo sapien
tcccctggtacactctgcgtctcag

SEQ ID NO: 3558956 - DNA, 25 bp, Homo sapien
gcatcccctggtacactctgcgtct

SEQ ID NO: 3558957 - DNA, 25 bp, Homo sapien
tgatcatgtctaagggcgtggctgc

SEQ ID NO: 3558958 - DNA, 25 bp, Homo sapien
cacccaggaagcaatgcctgcaaag

SEQ ID NO: 3558959 - DNA, 25 bp, Homo sapien
tgccacccaggaagcaatgcctgca

SEQ ID NO: 3558960 - DNA, 25 bp, Homo sapien
tgtctaagggcgtggctgccaccca

SEQ ID NO: 3558961 - DNA, 25 bp, Homo sapien
tctggtgtgtactggcgacagagcc

SEQ ID NO: 3558962 - DNA, 25 bp, Homo sapien
gaggctgcacagtgcacgggcccct

SEQ ID NO: 3558963 - DNA, 25 bp, Homo sapien
tttgtagccggactttgatgaggtc

SEQ ID NO: 3558964 - DNA, 25 bp, Homo sapien
cgacagagcccttcataggtgatga

SEQ ID NO: 3558965 - DNA, 25 bp, Homo sapien
tggtgatgaaacatgagggccccgg

SEQ ID NO: 3558966 - DNA, 25 bp, Homo sapien
tgcccctcatgcaacagtgaccaac

SEQ ID NO: 3558967 - DNA, 25 bp, Homo sapien
tggccccttatattcacaagaggaa

SEQ ID NO: 3558968 - DNA, 25 bp, Homo sapien
atgtctgcatgcgaccgggacaggc

SEQ ID NO: 3558969 - DNA, 25 bp, Homo sapien
gcctacagcaggcactcagaacaag

SEQ ID NO: 3558970 - DNA, 25 bp, Homo sapien
tggcctccctaaagccggcagtgag

SEQ ID NO: 3558971 - DNA, 25 bp, Homo sapien
aggagcaggttggtttctggcctcc

SEQ ID NO: 3558972 - DNA, 25 bp, Homo sapien
agaacaagcctggattctttttgca

SEQ ID NO: 3558973 - DNA, 25 bp, Homo sapien
gctagggctcttagaatcggcagaa

SEQ ID NO: 3558974 - DNA, 25 bp, Homo sapien
tgcctgaatggttaatgccctgctg

SEQ ID NO: 3558975 - DNA, 25 bp, Homo sapien
tataggtggcacctcgcacaagaag

SEQ ID NO: 3558976 - DNA, 25 bp, Homo sapien
gatgaccatccctatgacacctgtg

SEQ ID NO: 3558977 - DNA, 25 bp, Homo sapien
gtgcagcccgctaggaagatgtgca

SEQ ID NO: 3558978 - DNA, 25 bp, Homo sapien
ggacagagttgaccacagctatgct

SEQ ID NO: 3558979 - DNA, 25 bp, Homo sapien
tgagcaccagcagggtgttgctata

SEQ ID NO: 3558980 - DNA, 25 bp, Homo sapien
tgttgctatagaccccaaacaggac

SEQ ID NO: 3558981 - DNA, 25 bp, Homo sapien
agacacagtggcagcggagtaggca

SEQ ID NO: 3558982 - DNA, 25 bp, Homo sapien
tcctccaggagcagaaccctgctgg

SEQ ID NO: 3558983 - DNA, 25 bp, Homo sapien
aagctggtaccaacagccccagatg

SEQ ID NO: 3558984 - DNA, 25 bp, Homo sapien
gaccccaaaggagtgggccactcac

SEQ ID NO: 3558985 - DNA, 25 bp, Homo sapien
actcatggcggtaaatcttgaccat

SEQ ID NO: 3558986 - DNA, 25 bp, Homo sapien
gactcatggcggtaaatcttgacca

SEQ ID NO: 3558987 - DNA, 25 bp, Homo sapien
ggactcatggcggtaaatcttgacc

SEQ ID NO: 3558988 - DNA, 25 bp, Homo sapien
tcaacgatgccccggtaggtggtct

SEQ ID NO: 3558989 - DNA, 25 bp, Homo sapien
ccccggtaggtggtctgggtctgca

SEQ ID NO: 3558990 - DNA, 25 bp, Homo sapien
gatgccccggtaggtggtctgggtc

SEQ ID NO: 3558991 - DNA, 25 bp, Homo sapien
gcaatcaacgatgccccggtaggtg

SEQ ID NO: 3558992 - DNA, 25 bp, Homo sapien
tcaaacgggtgtcccaggaccaagc

SEQ ID NO: 3558993 - DNA, 25 bp, Homo sapien
tacagtgtcaaacgggtgtcccagg

SEQ ID NO: 3558994 - DNA, 25 bp, Homo sapien
gtgtcaaacgggtgtcccaggacca

SEQ ID NO: 3558995 - DNA, 25 bp, Homo sapien
tttacagtgtcaaacgggtgtccca

SEQ ID NO: 3558996 - DNA, 25 bp, Homo sapien
tgtggtgacaagagggtgctatgag

SEQ ID NO: 3558997 - DNA, 25 bp, Homo sapien
gctatgagtgagggccctcgtgcca

SEQ ID NO: 3558998 - DNA, 25 bp, Homo sapien
gacaagagggtgctatgagtgaggg

SEQ ID NO: 3558999 - DNA, 25 bp, Homo sapien
agtgagggccctcgtgccaggccca

SEQ ID NO: 3559000 - DNA, 25 bp, Homo sapien
ttcctgccaagctctagagactcca

SEQ ID NO: 3559001 - DNA, 25 bp, Homo sapien
tgcacacccaagagggaagagccag

SEQ ID NO: 3559002 - DNA, 25 bp, Homo sapien
aaagacgtacgtgtcctcgctggag

SEQ ID NO: 3559003 - DNA, 25 bp, Homo sapien
ctcgctggagcccatacccgggtat

SEQ ID NO: 3559004 - DNA, 25 bp, Homo sapien
ctcataatgtcgtcgccgggatcca

SEQ ID NO: 3559005 - DNA, 25 bp, Homo sapien
agctggccacgcagaactgcagggc

SEQ ID NO: 3559006 - DNA, 25 bp, Homo sapien
tctccgagagctttactcttctttc

SEQ ID NO: 3559007 - DNA, 25 bp, Homo sapien
ttcttcaactcataatgtcgtcgcc

SEQ ID NO: 3559008 - DNA, 25 bp, Homo sapien
catgtcacccatcttcccgaggaag

SEQ ID NO: 3559009 - DNA, 25 bp, Homo sapien
gcaggttcagaacgtccctctcttt

SEQ ID NO: 3559010 - DNA, 25 bp, Homo sapien
aggaggcaggttcagaacgtccctc

SEQ ID NO: 3559011 - DNA, 25 bp, Homo sapien
cagggctcaaggtatagggtgctca

SEQ ID NO: 3559012 - DNA, 25 bp, Homo sapien
gacagaaggaagaaaaatgtctcac

SEQ ID NO: 3559013 - DNA, 25 bp, Homo sapien
gtgacagaaggaagaaaaatgtctc

SEQ ID NO: 3559014 - DNA, 25 bp, Homo sapien
cattgggtgtgatgtgacagaagga

SEQ ID NO: 3559015 - DNA, 25 bp, Homo sapien
atgtgacagaaggaagaaaaatgtc

SEQ ID NO: 3559016 - DNA, 25 bp, Homo sapien
gatccagccagccacaaattcctcc

SEQ ID NO: 3559017 - DNA, 25 bp, Homo sapien
atccagccagccacaaattcctcca

SEQ ID NO: 3559018 - DNA, 25 bp, Homo sapien
agatccagccagccacaaattcctc

SEQ ID NO: 3559019 - DNA, 25 bp, Homo sapien
gagatccagccagccacaaattcct

SEQ ID NO: 3559020 - DNA, 25 bp, Homo sapien
cacctggaggagtcgtgcagagtac

SEQ ID NO: 3559021 - DNA, 25 bp, Homo sapien
tgcagagtacagtctcacgggccag

SEQ ID NO: 3559022 - DNA, 25 bp, Homo sapien
tcgctctgaggatggcaactgggtt

SEQ ID NO: 3559023 - DNA, 25 bp, Homo sapien
aaggtgagaattggcctggtgccca

SEQ ID NO: 3559024 - DNA, 25 bp, Homo sapien
ttctcttcagggttgtttacgactc

SEQ ID NO: 3559025 - DNA, 25 bp, Homo sapien
tctcttcagggttgtttacgactcc

SEQ ID NO: 3559026 - DNA, 25 bp, Homo sapien
taaagtgcgtgttgatctgcaatgg

SEQ ID NO: 3559027 - DNA, 25 bp, Homo sapien
aagtgcgtgttgatctgcaatggca

SEQ ID NO: 3559028 - DNA, 25 bp, Homo sapien
tatttaaagtgcgtgttgatctgca

SEQ ID NO: 3559029 - DNA, 25 bp, Homo sapien
tttaaagtgcgtgttgatctgcaat

SEQ ID NO: 3559030 - DNA, 25 bp, Homo sapien
tctctgggtgttctgtgcacagcgg

SEQ ID NO: 3559031 - DNA, 25 bp, Homo sapien
gccaacatacgatgggaagaacttg

SEQ ID NO: 3559032 - DNA, 25 bp, Homo sapien
acagggatctctgggtgttctgtgc

SEQ ID NO: 3559033 - DNA, 25 bp, Homo sapien
tttctccatcacagttatcacgcca

SEQ ID NO: 3559034 - DNA, 25 bp, Homo sapien
aaagaccatccccaaagactggcct

SEQ ID NO: 3559035 - DNA, 25 bp, Homo sapien
aactataactgatacaggccaggcg

SEQ ID NO: 3559036 - DNA, 25 bp, Homo sapien
ccccaaagatcatcctaaaagacca

SEQ ID NO: 3559037 - DNA, 25 bp, Homo sapien
actataactgatacaggccaggcgc

SEQ ID NO: 3559038 - DNA, 25 bp, Homo sapien
cctgctgctgaaaggtctccgcctg

SEQ ID NO: 3559039 - DNA, 25 bp, Homo sapien
agtgccaaacccacgactggctttg

SEQ ID NO: 3559040 - DNA, 25 bp, Homo sapien
gtctccgcctggacagtggtcagca

SEQ ID NO: 3559041 - DNA, 25 bp, Homo sapien
tctcagttttgagccctggagccac

SEQ ID NO: 3559042 - DNA, 25 bp, Homo sapien
aatggcctagtcaaggctcactgca

SEQ ID NO: 3559043 - DNA, 25 bp, Homo sapien
aattagccaggcacagtggcccacg

SEQ ID NO: 3559044 - DNA, 25 bp, Homo sapien
ttggaggccaagatgggtggatcat

SEQ ID NO: 3559045 - DNA, 25 bp, Homo sapien
gaggtcaagagatcgagaccatcct

SEQ ID NO: 3559046 - DNA, 25 bp, Homo sapien
cctgtaatcccagcacttttggagg

SEQ ID NO: 3559047 - DNA, 25 bp, Homo sapien
tttaattaatgacccggtattgcca

SEQ ID NO: 3559048 - DNA, 25 bp, Homo sapien
gccaaagtgcctaccttagtcagat

SEQ ID NO: 3559049 - DNA, 25 bp, Homo sapien
ccttgtctgtgatgaccttaggtcg

SEQ ID NO: 3559050 - DNA, 25 bp, Homo sapien
tctcttggctatgaaggaccctcct

SEQ ID NO: 3559051 - DNA, 25 bp, Homo sapien
tggtcacagggtcatgtcagctgcc

SEQ ID NO: 3559052 - DNA, 25 bp, Homo sapien
ccctttggtagcttgtgaatgtgcc

SEQ ID NO: 3559053 - DNA, 25 bp, Homo sapien
tcctggagttgctcggtcttgcgga

SEQ ID NO: 3559054 - DNA, 25 bp, Homo sapien
gaattcttctctgatgggcgggcga

SEQ ID NO: 3559055 - DNA, 25 bp, Homo sapien
ccgaggtgacgggtcaaatgcaaga

SEQ ID NO: 3559056 - DNA, 25 bp, Homo sapien
gaccagcccacattaggtcaaagtg

SEQ ID NO: 3559057 - DNA, 25 bp, Homo sapien
ttccagcacatgtggtggaccagcc

SEQ ID NO: 3559058 - DNA, 25 bp, Homo sapien
gtgttaaaaatagccggagggctca

SEQ ID NO: 3559059 - DNA, 25 bp, Homo sapien
gcagtgaagactcctccattggttt

SEQ ID NO: 3559060 - DNA, 25 bp, Homo sapien
gagactacaggcagtcatgtgcacc

SEQ ID NO: 3559061 - DNA, 25 bp, Homo sapien
ccttcaaaagcgaatggatcccact

SEQ ID NO: 3559062 - DNA, 25 bp, Homo sapien
cacacggttctttcaggccaaatca

SEQ ID NO: 3559063 - DNA, 25 bp, Homo sapien
tccctggccagtgtgagtcctagca

SEQ ID NO: 3559064 - DNA, 25 bp, Homo sapien
tactatagtgttcctcatggcgagc

SEQ ID NO: 3559065 - DNA, 25 bp, Homo sapien
gctcaggaagccctgtattcaggag

SEQ ID NO: 3559066 - DNA, 25 bp, Homo sapien
gagagagcccgcctcaattgatgcc

SEQ ID NO: 3559067 - DNA, 25 bp, Homo sapien
gccttcttgtgcgtttctcggagaa

SEQ ID NO: 3559068 - DNA, 25 bp, Homo sapien
gccttgtagatggagcttgcagatg

SEQ ID NO: 3559069 - DNA, 25 bp, Homo sapien
tctcggagaagttcttagcctgatg

SEQ ID NO: 3559070 - DNA, 25 bp, Homo sapien
gatgccacaacgcagattgatgcct

SEQ ID NO: 3559071 - DNA, 25 bp, Homo sapien
cacttaagacgagattagatgggct

SEQ ID NO: 3559072 - DNA, 25 bp, Homo sapien
cgtcagacttgcatacgcagcagat

SEQ ID NO: 3559073 - DNA, 25 bp, Homo sapien
tcacttgaaagatgggcgtcagact

SEQ ID NO: 3559074 - DNA, 25 bp, Homo sapien
cctggtggccaagacagcctgtttc

SEQ ID NO: 3559075 - DNA, 25 bp, Homo sapien
gatgcaaacaattactgtcgttggg

SEQ ID NO: 3559076 - DNA, 25 bp, Homo sapien
tagtctcgggtatgctgttgtgaaa

SEQ ID NO: 3559077 - DNA, 25 bp, Homo sapien
ttttaaatgagccaagactagaggg

SEQ ID NO: 3559078 - DNA, 25 bp, Homo sapien
gtgtgatctgaaaaccctgcttggt

SEQ ID NO: 3559079 - DNA, 25 bp, Homo sapien
taatgccagggctaacctctccatg

SEQ ID NO: 3559080 - DNA, 25 bp, Homo sapien
tcagcctgctagttaggacgacccg

SEQ ID NO: 3559081 - DNA, 25 bp, Homo sapien
ggagattgactcagctgcccttggt

SEQ ID NO: 3559082 - DNA, 25 bp, Homo sapien
tgagaaccgcaggaacggcctgttg

SEQ ID NO: 3559083 - DNA, 25 bp, Homo sapien
gatatgtagcccatctcttgagctg

SEQ ID NO: 3559084 - DNA, 25 bp, Homo sapien
tatttccctgtaccggcagagttca

SEQ ID NO: 3559085 - DNA, 25 bp, Homo sapien
gaaagctacacttcctgttgtgagt

SEQ ID NO: 3559086 - DNA, 25 bp, Homo sapien
cctcgagatgcgtctatgttgtagc

SEQ ID NO: 3559087 - DNA, 25 bp, Homo sapien
cgttctcaccaagagtgcacaaggg

SEQ ID NO: 3559088 - DNA, 25 bp, Homo sapien
agatcctaccttcagttcttttgag

SEQ ID NO: 3559089 - DNA, 25 bp, Homo sapien
gaaccactgtagtttttcatagcaa

SEQ ID NO: 3559090 - DNA, 25 bp, Homo sapien
tgcacaagggttccgaggttcccac

SEQ ID NO: 3559091 - DNA, 25 bp, Homo sapien
tctttgaccactaaccatgtgaaat

SEQ ID NO: 3559092 - DNA, 25 bp, Homo sapien
tcctgttattgttggtgcaaaaagc

SEQ ID NO: 3559093 - DNA, 25 bp, Homo sapien
tgccaaatccaacgttataaggtac

SEQ ID NO: 3559094 - DNA, 25 bp, Homo sapien
tatcattgggaaggccacatttgcc

SEQ ID NO: 3559095 - DNA, 25 bp, Homo sapien
tgctaagtcatattccatggtgtag

SEQ ID NO: 3559096 - DNA, 25 bp, Homo sapien
gcaattgtgacttgtactgccatca

SEQ ID NO: 3559097 - DNA, 25 bp, Homo sapien
caatacagacagtaactcctatggt

SEQ ID NO: 3559098 - DNA, 25 bp, Homo sapien
tttgtacccataagttagctctcac

SEQ ID NO: 3559099 - DNA, 25 bp, Homo sapien
gatgggttgaaagcacgtgctgcca

SEQ ID NO: 3559100 - DNA, 25 bp, Homo sapien
ctctcctcatgtgccgtggaactgg

SEQ ID NO: 3559101 - DNA, 25 bp, Homo sapien
tagccatctcaaagtgtgctgcggg

SEQ ID NO: 3559102 - DNA, 25 bp, Homo sapien
taaaactgcgtagtggctgcagctg

SEQ ID NO: 3559103 - DNA, 25 bp, Homo sapien
aatttcacctatgaatagatgtgtg

SEQ ID NO: 3559104 - DNA, 25 bp, Homo sapien
tggacttactacctctagaaggaaa

SEQ ID NO: 3559105 - DNA, 25 bp, Homo sapien
tagagtgactggtgtgctgtccctg

SEQ ID NO: 3559106 - DNA, 25 bp, Homo sapien
gaaatacctgagttcctctggcctc

SEQ ID NO: 3559107 - DNA, 25 bp, Homo sapien
tagtacatctaggtaagcaccgcat

SEQ ID NO: 3559108 - DNA, 25 bp, Homo sapien
catctgtgtggtagccgtgtttgaa

SEQ ID NO: 3559109 - DNA, 25 bp, Homo sapien
tataccgcatatctgtgtacatggg

SEQ ID NO: 3559110 - DNA, 25 bp, Homo sapien
gctgtacaggcgtgggtacaccaca

SEQ ID NO: 3559111 - DNA, 25 bp, Homo sapien
tattttggaggactctatctagact

SEQ ID NO: 3559112 - DNA, 25 bp, Homo sapien
cacgtgccagttcctaatggtttta

SEQ ID NO: 3559113 - DNA, 25 bp, Homo sapien
aattttagcataacaagtgacaggg

SEQ ID NO: 3559114 - DNA, 25 bp, Homo sapien
tgttgtccttacaccattttctggc

SEQ ID NO: 3559115 - DNA, 25 bp, Homo sapien
caagaataaggtacgtctttccatc

SEQ ID NO: 3559116 - DNA, 25 bp, Homo sapien
catccactcacgtctatttaatttg

SEQ ID NO: 3559117 - DNA, 25 bp, Homo sapien
tgtgatgtcttcatgccgttgtctt

SEQ ID NO: 3559118 - DNA, 25 bp, Homo sapien
gctattccaggctgcatgtttacct

SEQ ID NO: 3559119 - DNA, 25 bp, Homo sapien
ttgccaacactagttattatctgac

SEQ ID NO: 3559120 - DNA, 25 bp, Homo sapien
caccagtaagtaagagggttccaat

SEQ ID NO: 3559121 - DNA, 25 bp, Homo sapien
tgatgctatcaagcacctttgctgg

SEQ ID NO: 3559122 - DNA, 25 bp, Homo sapien
tggccatatgtgtatgttccctgga

SEQ ID NO: 3559123 - DNA, 25 bp, Homo sapien
gggtgtcccctatcagactacaggt

SEQ ID NO: 3559124 - DNA, 25 bp, Homo sapien
tgtgtagaatgtcagcagacacccc

SEQ ID NO: 3559125 - DNA, 25 bp, Homo sapien
aaataaattagaaggccaagcgtgg

SEQ ID NO: 3559126 - DNA, 25 bp, Homo sapien
gccttggcgacagactaagacgctg

SEQ ID NO: 3559127 - DNA, 25 bp, Homo sapien
ttttagtagatgtggggtctttctg

SEQ ID NO: 3559128 - DNA, 25 bp, Homo sapien
tagtagatgtggggtctttctgtgt

SEQ ID NO: 3559129 - DNA, 25 bp, Homo sapien
gtgatcctcccccgctcaacctccc

SEQ ID NO: 3559130 - DNA, 25 bp, Homo sapien
tgttttagtagatgtggggtctttc

SEQ ID NO: 3559131 - DNA, 25 bp, Homo sapien
gcacaaatcattagttaagggcagt

SEQ ID NO: 3559132 - DNA, 25 bp, Homo sapien
acagcattcctgtctgcgaaggcag

SEQ ID NO: 3559133 - DNA, 25 bp, Homo sapien
gacagttaccaaggagtgtagtccc

SEQ ID NO: 3559134 - DNA, 25 bp, Homo sapien
gcctcaggtggcaatgcacaaatca

SEQ ID NO: 3559135 - DNA, 25 bp, Homo sapien
ccttccatgagttaatggttaaaat

SEQ ID NO: 3559136 - DNA, 25 bp, Homo sapien
taattattatacaacccagccactg

SEQ ID NO: 3559137 - DNA, 25 bp, Homo sapien
caaatgtccttccatgagttaatgg

SEQ ID NO: 3559138 - DNA, 25 bp, Homo sapien
gttaaaataactgtggtgcacccat

SEQ ID NO: 3559139 - DNA, 25 bp, Homo sapien
catttgccattggtgcatcgagcac

SEQ ID NO: 3559140 - DNA, 25 bp, Homo sapien
gtctcacgtttgtcagggttctgcc

SEQ ID NO: 3559141 - DNA, 25 bp, Homo sapien
ggaacggagcgcgtttgctgcacac

SEQ ID NO: 3559142 - DNA, 25 bp, Homo sapien
gggtccctctcttgacagtggtaag

SEQ ID NO: 3559143 - DNA, 25 bp, Homo sapien
ggtgccatgcctagagaatcccaaa

SEQ ID NO: 3559144 - DNA, 25 bp, Homo sapien
tgctgcgctgcagggtaataagccc

SEQ ID NO: 3559145 - DNA, 25 bp, Homo sapien
caaagtgtaattggctctggcagcc

SEQ ID NO: 3559146 - DNA, 25 bp, Homo sapien
gttacatccaaaagtacctgctgcg

SEQ ID NO: 3559147 - DNA, 25 bp, Homo sapien
catgcatacctaaaagataagacca

SEQ ID NO: 3559148 - DNA, 25 bp, Homo sapien
agataagaccaaggaaaaaggccag

SEQ ID NO: 3559149 - DNA, 25 bp, Homo sapien
aattcatgcatacctaaaagataag

SEQ ID NO: 3559150 - DNA, 25 bp, Homo sapien
catacctaaaagataagaccaagga

SEQ ID NO: 3559151 - DNA, 25 bp, Homo sapien
gcccccagggatgagttggtaacca

SEQ ID NO: 3559152 - DNA, 25 bp, Homo sapien
ttactccagcctagaaggtggtgag

SEQ ID NO: 3559153 - DNA, 25 bp, Homo sapien
aaagccatgggtagaggcacagaaa

SEQ ID NO: 3559154 - DNA, 25 bp, Homo sapien
tttgcaaagttggagccttactcca

SEQ ID NO: 3559155 - DNA, 25 bp, Homo sapien
tctctggttcagaacagcttccagc

SEQ ID NO: 3559156 - DNA, 25 bp, Homo sapien
ctctggttcagaacagcttccagca

SEQ ID NO: 3559157 - DNA, 25 bp, Homo sapien
tcgccaatggttgcagacaatccag

SEQ ID NO: 3559158 - DNA, 25 bp, Homo sapien
ctggctccagtcagatcgagggtct

SEQ ID NO: 3559159 - DNA, 25 bp, Homo sapien
gacaatccagtaagccacagctgtt

SEQ ID NO: 3559160 - DNA, 25 bp, Homo sapien
tgcagggatctctcagtcgccaatg

SEQ ID NO: 3559161 - DNA, 25 bp, Homo sapien
gcagacccagagcagtgtaaacact

SEQ ID NO: 3559162 - DNA, 25 bp, Homo sapien
tcctgctccggttcagaaggtctga

SEQ ID NO: 3559163 - DNA, 25 bp, Homo sapien
tgggtgtgtccctgactggctgccc

SEQ ID NO: 3559164 - DNA, 25 bp, Homo sapien
tcttcggagacaaagccattcgctt

SEQ ID NO: 3559165 - DNA, 25 bp, Homo sapien
tcaggataatcagaccaccacaggt

SEQ ID NO: 3559166 - DNA, 25 bp, Homo sapien
taaccagcctggcagtatgatggcc

SEQ ID NO: 3559167 - DNA, 25 bp, Homo sapien
gatcctagaccagcatgccagtgtg

SEQ ID NO: 3559168 - DNA, 25 bp, Homo sapien
gaccttgaaatccatgacgcaggga

SEQ ID NO: 3559169 - DNA, 25 bp, Homo sapien
taaatgcagtactgttctgatcccg

SEQ ID NO: 3559170 - DNA, 25 bp, Homo sapien
gaattcaccagtggacaaaatgagg

SEQ ID NO: 3559171 - DNA, 25 bp, Homo sapien
gaatgcattgtgaaacgactggagt

SEQ ID NO: 3559172 - DNA, 25 bp, Homo sapien
acacacgtatgcgaagggccagaga

SEQ ID NO: 3559173 - DNA, 25 bp, Homo sapien
cttaaagtaggacaaccatggagcc

SEQ ID NO: 3559174 - DNA, 25 bp, Homo sapien
tcaggtgaacataacagacttggcc

SEQ ID NO: 3559175 - DNA, 25 bp, Homo sapien
cctaaggtcaagagaagtgtcagcc

SEQ ID NO: 3559176 - DNA, 25 bp, Homo sapien
ggaatgcttgaagtacccctgggct

SEQ ID NO: 3559177 - DNA, 25 bp, Homo sapien
ggttcaaatccctgcggcgtctttg

SEQ ID NO: 3559178 - DNA, 25 bp, Homo sapien
aaagatgctggtggttggcactcct

SEQ ID NO: 3559179 - DNA, 25 bp, Homo sapien
gggaggtaacagcacaatatctttg

SEQ ID NO: 3559180 - DNA, 25 bp, Homo sapien
tgactactaatctgtcttcaggact

SEQ ID NO: 3559181 - DNA, 25 bp, Homo sapien
tttttcaggtaatagcctgcagctg

SEQ ID NO: 3559182 - DNA, 25 bp, Homo sapien
gtatattcatatttacacgagaacc

SEQ ID NO: 3559183 - DNA, 25 bp, Homo sapien
cctaatataactgccttgtcttttt

SEQ ID NO: 3559184 - DNA, 25 bp, Homo sapien
ggagcttgacttgattgtatattca

SEQ ID NO: 3559185 - DNA, 25 bp, Homo sapien
catcctgataatcctgagttcaagg

SEQ ID NO: 3559186 - DNA, 25 bp, Homo sapien
aagcccctcagaccgaggatcaggg

SEQ ID NO: 3559187 - DNA, 25 bp, Homo sapien
ctggttggtatggacctgtgtgaga

SEQ ID NO: 3559188 - DNA, 25 bp, Homo sapien
ccggcccacagttttggatttcatc

SEQ ID NO: 3559189 - DNA, 25 bp, Homo sapien
ttcacactttcatctatcacaagat

SEQ ID NO: 3559190 - DNA, 25 bp, Homo sapien
ccagggttgctctgttgtccactag

SEQ ID NO: 3559191 - DNA, 25 bp, Homo sapien
cactgttccagggttgctctgttgt

SEQ ID NO: 3559192 - DNA, 25 bp, Homo sapien
tccactagttgccatcttcacactt

SEQ ID NO: 3559193 - DNA, 25 bp, Homo sapien
gggccttgcctattccgcgccgccg

SEQ ID NO: 3559194 - DNA, 25 bp, Homo sapien
ggcagtgcctacgtggcgggcggag

SEQ ID NO: 3559195 - DNA, 25 bp, Homo sapien
accccgtcgcgttgcgcccggcctg

SEQ ID NO: 3559196 - DNA, 25 bp, Homo sapien
taggccgcggtcgacctgggccttg

SEQ ID NO: 3559197 - DNA, 25 bp, Homo sapien
gcctggacgcattccctgaggattt

SEQ ID NO: 3559198 - DNA, 25 bp, Homo sapien
aaagagccagccgagaagcaaaaat

SEQ ID NO: 3559199 - DNA, 25 bp, Homo sapien
gaggatttctgtcggcacaaggtgc

SEQ ID NO: 3559200 - DNA, 25 bp, Homo sapien
gccgagaagcaaaaattcttccagg

SEQ ID NO: 3559201 - DNA, 25 bp, Homo sapien
gccaggccatctcacgtgtacataa

SEQ ID NO: 3559202 - DNA, 25 bp, Homo sapien
gagcccggaagctggactgaaccgt

SEQ ID NO: 3559203 - DNA, 25 bp, Homo sapien
tattgtacaaaccatgtgagcccgg

SEQ ID NO: 3559204 - DNA, 25 bp, Homo sapien
gagctcgcggaaatccctcagtgat

SEQ ID NO: 3559205 - DNA, 25 bp, Homo sapien
ggtgttcacgcagcgctcgctcttg

SEQ ID NO: 3559206 - DNA, 25 bp, Homo sapien
gagccgctggtgttcacgcagcgct

SEQ ID NO: 3559207 - DNA, 25 bp, Homo sapien
tggttcagctctcggcactcgtcga

SEQ ID NO: 3559208 - DNA, 25 bp, Homo sapien
gcgcgaagccggctttgcagacgca

SEQ ID NO: 3559209 - DNA, 25 bp, Homo sapien
aggtgagggcgacaggtgcggcttc

SEQ ID NO: 3559210 - DNA, 25 bp, Homo sapien
gaaggtgagggcgacaggtgcggct

SEQ ID NO: 3559211 - DNA, 25 bp, Homo sapien
ctgaaggtgagggcgacaggtgcgg

SEQ ID NO: 3559212 - DNA, 25 bp, Homo sapien
tgagggcgacaggtgcggcttcgct

SEQ ID NO: 3559213 - DNA, 25 bp, Homo sapien
actcacgcagcgacactcgtctgaa

SEQ ID NO: 3559214 - DNA, 25 bp, Homo sapien
gaggcgtcgagctggaagccgccgg

SEQ ID NO: 3559215 - DNA, 25 bp, Homo sapien
aagccgccgggacactcgcacacgg

SEQ ID NO: 3559216 - DNA, 25 bp, Homo sapien
ggcgcgggaggcgtcgagctggaag

SEQ ID NO: 3559217 - DNA, 25 bp, Homo sapien
tctcgctctgcgatgtcgggcaatg

SEQ ID NO: 3559218 - DNA, 25 bp, Homo sapien
gaaggaattgctctcgctctgcgat

SEQ ID NO: 3559219 - DNA, 25 bp, Homo sapien
tccccaacagcagggggcttgtgtc

SEQ ID NO: 3559220 - DNA, 25 bp, Homo sapien
gggcttgtgtcccagaaggaattgc

SEQ ID NO: 3559221 - DNA, 25 bp, Homo sapien
agggggccagcgcacatgccgtcct

SEQ ID NO: 3559222 - DNA, 25 bp, Homo sapien
gcacatgccgtcctctccgcgctgg

SEQ ID NO: 3559223 - DNA, 25 bp, Homo sapien
gggcacggtcggcattgggcgcccc

SEQ ID NO: 3559224 - DNA, 25 bp, Homo sapien
ggcggcagcagcagtcgtcgaaggt

SEQ ID NO: 3559225 - DNA, 25 bp, Homo sapien
atcggccaaggccaaccctcgccct

SEQ ID NO: 3559226 - DNA, 25 bp, Homo sapien
cgggatcggccaaggccaaccctcg

SEQ ID NO: 3559227 - DNA, 25 bp, Homo sapien
cacgtgacggacagggccccgggat

SEQ ID NO: 3559228 - DNA, 25 bp, Homo sapien
tgcgcgggggccacgtgacggacag

SEQ ID NO: 3559229 - DNA, 25 bp, Homo sapien
gctgccgggtcctggcactcgtcca

SEQ ID NO: 3559230 - DNA, 25 bp, Homo sapien
cggccagggcggcaggctgccgggt

SEQ ID NO: 3559231 - DNA, 25 bp, Homo sapien
agggcgggcgacactcgcagcggta

SEQ ID NO: 3559232 - DNA, 25 bp, Homo sapien
ggagctggcaatcgcggccggaggg

SEQ ID NO: 3559233 - DNA, 25 bp, Homo sapien
ctacgaacagcgagggggtgggtgg

SEQ ID NO: 3559234 - DNA, 25 bp, Homo sapien
aggcactggcgctgcgcgggactgt

SEQ ID NO: 3559235 - DNA, 25 bp, Homo sapien
gcggtagccgccgcgcgtgttctca

SEQ ID NO: 3559236 - DNA, 25 bp, Homo sapien
actccgttccggcagttggactcgt

SEQ ID NO: 3559237 - DNA, 25 bp, Homo sapien
gttggactcgtccaggcactcgtcc

SEQ ID NO: 3559238 - DNA, 25 bp, Homo sapien
cattccagcaggttcccgtcgtagt

SEQ ID NO: 3559239 - DNA, 25 bp, Homo sapien
tgcaaatctccgacccgaacaacat

SEQ ID NO: 3559240 - DNA, 25 bp, Homo sapien
ttcccgtcgtagtagaagccctgct

SEQ ID NO: 3559241 - DNA, 25 bp, Homo sapien
ttgcagtagcactcgtagccaggct

SEQ ID NO: 3559242 - DNA, 25 bp, Homo sapien
gtgacaaacactggccgctccggtc

SEQ ID NO: 3559243 - DNA, 25 bp, Homo sapien
aacactggccgctccggtcccgcag

SEQ ID NO: 3559244 - DNA, 25 bp, Homo sapien
gggtgacaaacactggccgctccgg

SEQ ID NO: 3559245 - DNA, 25 bp, Homo sapien
caaacactggccgctccggtcccgc

SEQ ID NO: 3559246 - DNA, 25 bp, Homo sapien
ggcgggcggagccgcagggcgctta

SEQ ID NO: 3559247 - DNA, 25 bp, Homo sapien
gcggggcgggcggagccgcagggcg

SEQ ID NO: 3559248 - DNA, 25 bp, Homo sapien
gcgggcggagccgcagggcgcttac

SEQ ID NO: 3559249 - DNA, 25 bp, Homo sapien
ggggcgggcggagccgcagggcgct

SEQ ID NO: 3559250 - DNA, 25 bp, Homo sapien
ccgtagttgacgatgttgttgtcct

SEQ ID NO: 3559251 - DNA, 25 bp, Homo sapien
acggtgggctgggatgccgtagttg

SEQ ID NO: 3559252 - DNA, 25 bp, Homo sapien
gtgtagccctttccgtctgggcaga

SEQ ID NO: 3559253 - DNA, 25 bp, Homo sapien
tgggtgtagccctttccgtctgggc

SEQ ID NO: 3559254 - DNA, 25 bp, Homo sapien
caggtagcactccttcttgtggtgg

SEQ ID NO: 3559255 - DNA, 25 bp, Homo sapien
tcctgctgggtcacgttggtggcca

SEQ ID NO: 3559256 - DNA, 25 bp, Homo sapien
tacgctgtcgcagaacactgtgtca

SEQ ID NO: 3559257 - DNA, 25 bp, Homo sapien
ggtagatttcgcagtggtcgcccca

SEQ ID NO: 3559258 - DNA, 25 bp, Homo sapien
cctcacaaccgtgctggtcctgggt

SEQ ID NO: 3559259 - DNA, 25 bp, Homo sapien
caaatgcaattgagcttccgatacc

SEQ ID NO: 3559260 - DNA, 25 bp, Homo sapien
cctaaaagtatcagaagcccaaatg

SEQ ID NO: 3559261 - DNA, 25 bp, Homo sapien
gatacctttaggtctcatcacgcct

SEQ ID NO: 3559262 - DNA, 25 bp, Homo sapien
gctgtccttcataacaccttcagtg

SEQ ID NO: 3559263 - DNA, 25 bp, Homo sapien
tagtacaaagcacagaacctggaaa

SEQ ID NO: 3559264 - DNA, 25 bp, Homo sapien
tgtaaacacaactagctccttccag

SEQ ID NO: 3559265 - DNA, 25 bp, Homo sapien
cagtttacatgttggcctcccctag

SEQ ID NO: 3559266 - DNA, 25 bp, Homo sapien
tggaatgacttctcgtgccttgcct

SEQ ID NO: 3559267 - DNA, 25 bp, Homo sapien
agtgtgtctagggaattactgctcc

SEQ ID NO: 3559268 - DNA, 25 bp, Homo sapien
cagcctaaacttttgttggatgaat

SEQ ID NO: 3559269 - DNA, 25 bp, Homo sapien
gatcattgttattctaggtgaaaga

SEQ ID NO: 3559270 - DNA, 25 bp, Homo sapien
gggaagaccaatacattaatatctg

SEQ ID NO: 3559271 - DNA, 25 bp, Homo sapien
ccattggtattgatgcagtcacccc

SEQ ID NO: 3559272 - DNA, 25 bp, Homo sapien
ggagccattggtattgatgcagtca

SEQ ID NO: 3559273 - DNA, 25 bp, Homo sapien
attgatgcagtcacccccaatgcag

SEQ ID NO: 3559274 - DNA, 25 bp, Homo sapien
gtaggagccattggtattgatgcag

SEQ ID NO: 3559275 - DNA, 25 bp, Homo sapien
cacacgtccccagcctcacactcgt

SEQ ID NO: 3559276 - DNA, 25 bp, Homo sapien
aaagatcctggcgtgttgctgcaga

SEQ ID NO: 3559277 - DNA, 25 bp, Homo sapien
gacactggaaagatcctggcgtgtt

SEQ ID NO: 3559278 - DNA, 25 bp, Homo sapien
tgctgcagatgccattgtcacacac

SEQ ID NO: 3559279 - DNA, 25 bp, Homo sapien
tgagctcggcctctgaggtgccgcc

SEQ ID NO: 3559280 - DNA, 25 bp, Homo sapien
atggagccagttgttgcccacatcc

SEQ ID NO: 3559281 - DNA, 25 bp, Homo sapien
tttctcacttctgcgcatggcctgg

SEQ ID NO: 3559282 - DNA, 25 bp, Homo sapien
acacagtgccctgacgaccaggtca

SEQ ID NO: 3559283 - DNA, 25 bp, Homo sapien
ggagtttcgaacatccgcgtggaca

SEQ ID NO: 3559284 - DNA, 25 bp, Homo sapien
cactttggaagagcaagagtcccca

SEQ ID NO: 3559285 - DNA, 25 bp, Homo sapien
catgaggacccattcccagtgagca

SEQ ID NO: 3559286 - DNA, 25 bp, Homo sapien
caatcagcagcagggaacgttctaa

SEQ ID NO: 3559287 - DNA, 25 bp, Homo sapien
ccttccttggcaaagttcgttgaga

SEQ ID NO: 3559288 - DNA, 25 bp, Homo sapien
tgtttacagacagcgtgacccgctc

SEQ ID NO: 3559289 - DNA, 25 bp, Homo sapien
gaaattctagtggtgccttccttgg

SEQ ID NO: 3559290 - DNA, 25 bp, Homo sapien
tgcaaacgcagcttcgagctctacc

SEQ ID NO: 3559291 - DNA, 25 bp, Homo sapien
gcaactgcggccgtcgggcgcgggc

SEQ ID NO: 3559292 - DNA, 25 bp, Homo sapien
ctgccctcggcgcactcgttcacgt

SEQ ID NO: 3559293 - DNA, 25 bp, Homo sapien
cgcgggcgcgtagccctgggcacag

SEQ ID NO: 3559294 - DNA, 25 bp, Homo sapien
ggaggttctcgcaccagccaggcga

SEQ ID NO: 3559295 - DNA, 25 bp, Homo sapien
tgtgggtctcttccctggaacgcgg

SEQ ID NO: 3559296 - DNA, 25 bp, Homo sapien
gaaagacctagcctcggactctgcc

SEQ ID NO: 3559297 - DNA, 25 bp, Homo sapien
ggactctgccccaccggaaggcgga

SEQ ID NO: 3559298 - DNA, 25 bp, Homo sapien
tgagagggcagcctctactcccgga

SEQ ID NO: 3559299 - DNA, 25 bp, Homo sapien
aggctgacaggcgatgcacttgaag

SEQ ID NO: 3559300 - DNA, 25 bp, Homo sapien
tgttctcgcatttgccatccgggca

SEQ ID NO: 3559301 - DNA, 25 bp, Homo sapien
ccatccgggcaagagcttgggtccc

SEQ ID NO: 3559302 - DNA, 25 bp, Homo sapien
cgatgcacttgaagctcccgggctt

SEQ ID NO: 3559303 - DNA, 25 bp, Homo sapien
caggtggggcttggcgcattcgttc

SEQ ID NO: 3559304 - DNA, 25 bp, Homo sapien
gttgatgcagaagccgccgtcgccg

SEQ ID NO: 3559305 - DNA, 25 bp, Homo sapien
tagccggggtagcagttgcacttgt

SEQ ID NO: 3559306 - DNA, 25 bp, Homo sapien
gccgggaggctttgagccggtagcc

SEQ ID NO: 3559307 - DNA, 25 bp, Homo sapien
cacgaagggggtgtaggaggcggcg

SEQ ID NO: 3559308 - DNA, 25 bp, Homo sapien
gtgtaggaggcggcgggcaagggga

SEQ ID NO: 3559309 - DNA, 25 bp, Homo sapien
tgtaggaggcggcgggcaaggggag

SEQ ID NO: 3559310 - DNA, 25 bp, Homo sapien
tgtgcgggaggaaggggccacgaag

SEQ ID NO: 3559311 - DNA, 25 bp, Homo sapien
ccagggccgcctccgccctggcggc

SEQ ID NO: 3559312 - DNA, 25 bp, Homo sapien
acccagggccgcctccgccctggcg

SEQ ID NO: 3559313 - DNA, 25 bp, Homo sapien
gggccgcctccgccctggcggcgct

SEQ ID NO: 3559314 - DNA, 25 bp, Homo sapien
ccacccagggccgcctccgccctgg

SEQ ID NO: 3559315 - DNA, 25 bp, Homo sapien
tgcagtggcaattgtaggagccgcc

SEQ ID NO: 3559316 - DNA, 25 bp, Homo sapien
cacgtgcaggcggtagccgcggttg

SEQ ID NO: 3559317 - DNA, 25 bp, Homo sapien
taggagccgccggtgttcatgcaga

SEQ ID NO: 3559318 - DNA, 25 bp, Homo sapien
ggctctgcctcgcactcgttcacat

SEQ ID NO: 3559319 - DNA, 25 bp, Homo sapien
ctgcatgcccgccgcctgccctgcg

SEQ ID NO: 3559320 - DNA, 25 bp, Homo sapien
atgcccgccgcctgccctgcgctca

SEQ ID NO: 3559321 - DNA, 25 bp, Homo sapien
gcatgcccgccgcctgccctgcgct

SEQ ID NO: 3559322 - DNA, 25 bp, Homo sapien
tgcccgccgcctgccctgcgctcac

SEQ ID NO: 3559323 - DNA, 25 bp, Homo sapien
gttgcagtggcaggagtagtcaggg

SEQ ID NO: 3559324 - DNA, 25 bp, Homo sapien
tggttcagtcggcactcatcagtct

SEQ ID NO: 3559325 - DNA, 25 bp, Homo sapien
acgcactctccgtggccacagatgt

SEQ ID NO: 3559326 - DNA, 25 bp, Homo sapien
cagatgttctggttcagtcggcact

SEQ ID NO: 3559327 - DNA, 25 bp, Homo sapien
catctggaaaacgaggctaacaacg

SEQ ID NO: 3559328 - DNA, 25 bp, Homo sapien
gcctgggccataacagtgaactctg

SEQ ID NO: 3559329 - DNA, 25 bp, Homo sapien
ctcatggaggatcagggtttcagct

SEQ ID NO: 3559330 - DNA, 25 bp, Homo sapien
ggaatcctaactagtgccaaagctg

SEQ ID NO: 3559331 - DNA, 25 bp, Homo sapien
gcgctgcgggaaggaggcaagtccg

SEQ ID NO: 3559332 - DNA, 25 bp, Homo sapien
agcgatctctacggcgctgcgggaa

SEQ ID NO: 3559333 - DNA, 25 bp, Homo sapien
aggcaagtccggcaggaaccagcgc

SEQ ID NO: 3559334 - DNA, 25 bp, Homo sapien
ctgtgacctgagtgggagcgatctc

SEQ ID NO: 3559335 - DNA, 25 bp, Homo sapien
tgactgtccccgagtacttaaactg

SEQ ID NO: 3559336 - DNA, 25 bp, Homo sapien
cacccagtgatttagcccttgagga

SEQ ID NO: 3559337 - DNA, 25 bp, Homo sapien
gacgatattgactgaagcctccctt

SEQ ID NO: 3559338 - DNA, 25 bp, Homo sapien
ttgaggactcatccctacagtgccc

SEQ ID NO: 3559339 - DNA, 25 bp, Homo sapien
cgtggtggcagttgggtggctctgc

SEQ ID NO: 3559340 - DNA, 25 bp, Homo sapien
ggcaggagtcgtggtggcagttggg

SEQ ID NO: 3559341 - DNA, 25 bp, Homo sapien
caggagtcgtggtggcagttgggtg

SEQ ID NO: 3559342 - DNA, 25 bp, Homo sapien
gagtcgtggtggcagttgggtggct

SEQ ID NO: 3559343 - DNA, 25 bp, Homo sapien
agcagcatgagccctcctgtccctc

SEQ ID NO: 3559344 - DNA, 25 bp, Homo sapien
ctgcgggtgacagcagcatgagccc

SEQ ID NO: 3559345 - DNA, 25 bp, Homo sapien
ctcccatctgggttctcatactcac

SEQ ID NO: 3559346 - DNA, 25 bp, Homo sapien
acccctcccatctgggttctcatac

SEQ ID NO: 3559347 - DNA, 25 bp, Homo sapien
tctgggagttcaacaatcatgtctc

SEQ ID NO: 3559348 - DNA, 25 bp, Homo sapien
tagggtctctgggagttcaacaatc

SEQ ID NO: 3559349 - DNA, 25 bp, Homo sapien
tagtcacatgatcaggttgaatggc

SEQ ID NO: 3559350 - DNA, 25 bp, Homo sapien
tagggtgtgtttgcatagtagtcac

SEQ ID NO: 3559351 - DNA, 25 bp, Homo sapien
tcgccctgaatggtgagcgtctggt

SEQ ID NO: 3559352 - DNA, 25 bp, Homo sapien
gggaaaagtcactctcgccctgaat

SEQ ID NO: 3559353 - DNA, 25 bp, Homo sapien
tcaggtggtggagcctggctagggc

SEQ ID NO: 3559354 - DNA, 25 bp, Homo sapien
gaaaagtcactctcgccctgaatgg

SEQ ID NO: 3559355 - DNA, 25 bp, Homo sapien
cagagctggcgggtcaggcgggtgg

SEQ ID NO: 3559356 - DNA, 25 bp, Homo sapien
atctgttgggcagcgctgacaccgc

SEQ ID NO: 3559357 - DNA, 25 bp, Homo sapien
gtcaggcgggtggtcagtgggtgct

SEQ ID NO: 3559358 - DNA, 25 bp, Homo sapien
gtgccatctgttgggcagcgctgac

SEQ ID NO: 3559359 - DNA, 25 bp, Homo sapien
gtgggcagacacagcgataggagcc

SEQ ID NO: 3559360 - DNA, 25 bp, Homo sapien
cccggcattgcgcactcgttgatgt

SEQ ID NO: 3559361 - DNA, 25 bp, Homo sapien
ccagggttgttgaggcagtcaccat

SEQ ID NO: 3559362 - DNA, 25 bp, Homo sapien
agtcaccatggcgacacacgcccgg

SEQ ID NO: 3559363 - DNA, 25 bp, Homo sapien
cccacttccccacgtacaggccctg

SEQ ID NO: 3559364 - DNA, 25 bp, Homo sapien
gcagtgggtgctgttaagcctcttg

SEQ ID NO: 3559365 - DNA, 25 bp, Homo sapien
gggtgctgttaagcctcttgtagcc

SEQ ID NO: 3559366 - DNA, 25 bp, Homo sapien
acagtcagcgcccacttccccacgt

SEQ ID NO: 3559367 - DNA, 25 bp, Homo sapien
gatgctaccgcagcagtcttcctgc

SEQ ID NO: 3559368 - DNA, 25 bp, Homo sapien
gcagtgccgatgctaccgcagcagt

SEQ ID NO: 3559369 - DNA, 25 bp, Homo sapien
gtgccgatgctaccgcagcagtctt

SEQ ID NO: 3559370 - DNA, 25 bp, Homo sapien
ccaggcagtgccgatgctaccgcag

SEQ ID NO: 3559371 - DNA, 25 bp, Homo sapien
tcaatgcggtgcacctggactgagg

SEQ ID NO: 3559372 - DNA, 25 bp, Homo sapien
gtgatggacgcgcacattcaccacg

SEQ ID NO: 3559373 - DNA, 25 bp, Homo sapien
tgcgctctcggcgttcgagctctca

SEQ ID NO: 3559374 - DNA, 25 bp, Homo sapien
gctgcttgggcagagtgtcctgaaa

SEQ ID NO: 3559375 - DNA, 25 bp, Homo sapien
cccaggagggtcagcgatcacctgg

SEQ ID NO: 3559376 - DNA, 25 bp, Homo sapien
tctgtcccgggcctaggggcaccag

SEQ ID NO: 3559377 - DNA, 25 bp, Homo sapien
cgatcacctggacggcgtagatggc

SEQ ID NO: 3559378 - DNA, 25 bp, Homo sapien
acagagtcgccctccggagccaggg

SEQ ID NO: 3559379 - DNA, 25 bp, Homo sapien
gacacaggcactggtttcgcgagga

SEQ ID NO: 3559380 - DNA, 25 bp, Homo sapien
ctcctgcgggcacctggcagaagcg

SEQ ID NO: 3559381 - DNA, 25 bp, Homo sapien
gcagaagcgcccagtgaagtccggg

SEQ ID NO: 3559382 - DNA, 25 bp, Homo sapien
gcactggccgccattcatgcagggg

SEQ ID NO: 3559383 - DNA, 25 bp, Homo sapien
ccgacactggcccttgagacaggtc

SEQ ID NO: 3559384 - DNA, 25 bp, Homo sapien
ccgatgagcgtcatgttggagccct

SEQ ID NO: 3559385 - DNA, 25 bp, Homo sapien
ctgctgacaactgtcccgacactgg

SEQ ID NO: 3559386 - DNA, 25 bp, Homo sapien
gagacaggtccgcttgcagatcacc

SEQ ID NO: 3559387 - DNA, 25 bp, Homo sapien
cccccgccccgcgcatctcaggggc

SEQ ID NO: 3559388 - DNA, 25 bp, Homo sapien
ctgcgccccgctcgccggccggccc

SEQ ID NO: 3559389 - DNA, 25 bp, Homo sapien
cctcgaccctgccgcccaggcccag

SEQ ID NO: 3559390 - DNA, 25 bp, Homo sapien
ccgccccgcgcatctcaggggccag

SEQ ID NO: 3559391 - DNA, 25 bp, Homo sapien
tgctggtccaatcccctctgaggaa

SEQ ID NO: 3559392 - DNA, 25 bp, Homo sapien
cctgccgggtcacactgacgatgga

SEQ ID NO: 3559393 - DNA, 25 bp, Homo sapien
tttgttgtttaaagcgtcgcctctg

SEQ ID NO: 3559394 - DNA, 25 bp, Homo sapien
cctgcgtagagcgagataccgaggc

SEQ ID NO: 3559395 - DNA, 25 bp, Homo sapien
gcaacgtgcgggggcccaggcctta

SEQ ID NO: 3559396 - DNA, 25 bp, Homo sapien
ggaaaggctgcaacgtgcgggggcc

SEQ ID NO: 3559397 - DNA, 25 bp, Homo sapien
aaggctgcaacgtgcgggggcccag

SEQ ID NO: 3559398 - DNA, 25 bp, Homo sapien
tgcaacgtgcgggggcccaggcctt

SEQ ID NO: 3559399 - DNA, 25 bp, Homo sapien
gactgctgcgaataggttttaccac

SEQ ID NO: 3559400 - DNA, 25 bp, Homo sapien
caaaggacttgatcgctgtgcagca

SEQ ID NO: 3559401 - DNA, 25 bp, Homo sapien
tgggcacacagagcgaattacattg

SEQ ID NO: 3559402 - DNA, 25 bp, Homo sapien
caaggtagcccgtcaggttcaagaa

SEQ ID NO: 3559403 - DNA, 25 bp, Homo sapien
ggactcatgtaaggctctttgtagg

SEQ ID NO: 3559404 - DNA, 25 bp, Homo sapien
cacagtatcgggcagccagatggtt

SEQ ID NO: 3559405 - DNA, 25 bp, Homo sapien
ttttagtacaagaacgacactgtat

SEQ ID NO: 3559406 - DNA, 25 bp, Homo sapien
tcatgaggagtaaattggagagatt

SEQ ID NO: 3559407 - DNA, 25 bp, Homo sapien
tcgcaagagtatgtaggaaggcccc

SEQ ID NO: 3559408 - DNA, 25 bp, Homo sapien
gaaacgacttgtggtacaggcccta

SEQ ID NO: 3559409 - DNA, 25 bp, Homo sapien
tttgcttcagttccaggcctcggga

SEQ ID NO: 3559410 - DNA, 25 bp, Homo sapien
aatacgcggaaagggagaatgcacc

SEQ ID NO: 3559411 - DNA, 25 bp, Homo sapien
tgggccaccgaggttactgacgcct

SEQ ID NO: 3559412 - DNA, 25 bp, Homo sapien
caaagtcacacttggttggaggtca

SEQ ID NO: 3559413 - DNA, 25 bp, Homo sapien
agtagtacgtacctcccagggctgc

SEQ ID NO: 3559414 - DNA, 25 bp, Homo sapien
ctcagagtgttagcgctttgcccaa

SEQ ID NO: 3559415 - DNA, 25 bp, Homo sapien
tgcctcccagggacgatgacatgca

SEQ ID NO: 3559416 - DNA, 25 bp, Homo sapien
tcgcaagcctcatgagtgtgaagcc

SEQ ID NO: 3559417 - DNA, 25 bp, Homo sapien
gcctgctgtggatcgagactgccaa

SEQ ID NO: 3559418 - DNA, 25 bp, Homo sapien
tgctggtcccacgatagccttggtc

SEQ ID NO: 3559419 - DNA, 25 bp, Homo sapien
caaatatgaggctttaagggcccca

SEQ ID NO: 3559420 - DNA, 25 bp, Homo sapien
gtacaagggtcagagactcaagttc

SEQ ID NO: 3559421 - DNA, 25 bp, Homo sapien
cagagatttcaggagtacaagggtc

SEQ ID NO: 3559422 - DNA, 25 bp, Homo sapien
tcagccaagagttttaggatcccag

SEQ ID NO: 3559423 - DNA, 25 bp, Homo sapien
cactctgcggccattgcctttgtca

SEQ ID NO: 3559424 - DNA, 25 bp, Homo sapien
gcttcctgtttatgagtactgttca

SEQ ID NO: 3559425 - DNA, 25 bp, Homo sapien
cagaataactgtagccagtgcttcc

SEQ ID NO: 3559426 - DNA, 25 bp, Homo sapien
aaacagaagaaaagcgataatgtgg

SEQ ID NO: 3559427 - DNA, 25 bp, Homo sapien
cgatgagctagtccgggacctggac

SEQ ID NO: 3559428 - DNA, 25 bp, Homo sapien
aaccagcgcgatgagctagtccggg

SEQ ID NO: 3559429 - DNA, 25 bp, Homo sapien
cctggaccacaaggagcggatgtga

SEQ ID NO: 3559430 - DNA, 25 bp, Homo sapien
tgtcgctggtgaaccagcgcgatga

SEQ ID NO: 3559431 - DNA, 25 bp, Homo sapien
cttccccgtacagggcagggcggat

SEQ ID NO: 3559432 - DNA, 25 bp, Homo sapien
cgccgcaagctgagccggcagttga

SEQ ID NO: 3559433 - DNA, 25 bp, Homo sapien
cggcgggagcgctgcgtgctgagct

SEQ ID NO: 3559434 - DNA, 25 bp, Homo sapien
cgggtggcccataacttctcgcgtc

SEQ ID NO: 3559435 - DNA, 25 bp, Homo sapien
aggtgccgccaccttacggagctga

SEQ ID NO: 3559436 - DNA, 25 bp, Homo sapien
gagctgaactcggtcacctgacgct

SEQ ID NO: 3559437 - DNA, 25 bp, Homo sapien
atgattaacagtatcctctgaggcc

SEQ ID NO: 3559438 - DNA, 25 bp, Homo sapien
gctcattttatgattaacagtatcc

SEQ ID NO: 3559439 - DNA, 25 bp, Homo sapien
agggtgctcagagccagttcatcct

SEQ ID NO: 3559440 - DNA, 25 bp, Homo sapien
tcctgccctaggatgccaccttggt

SEQ ID NO: 3559441 - DNA, 25 bp, Homo sapien
gaccactgggtctgaagaacttccc

SEQ ID NO: 3559442 - DNA, 25 bp, Homo sapien
accttggtcctcagcagtcacagga

SEQ ID NO: 3559443 - DNA, 25 bp, Homo sapien
tcagagaaggtctccactgccagca

SEQ ID NO: 3559444 - DNA, 25 bp, Homo sapien
ccactgccagcagcatggccaagag

SEQ ID NO: 3559445 - DNA, 25 bp, Homo sapien
ctgcggcagctcagagaaggtctcc

SEQ ID NO: 3559446 - DNA, 25 bp, Homo sapien
actgccagcagcatggccaagagtc

SEQ ID NO: 3559447 - DNA, 25 bp, Homo sapien
acctcccagcgcagtgacttgccct

SEQ ID NO: 3559448 - DNA, 25 bp, Homo sapien
gtgacttgccctggcaactggcacc

SEQ ID NO: 3559449 - DNA, 25 bp, Homo sapien
gggttctggtgatgctccccgccca

SEQ ID NO: 3559450 - DNA, 25 bp, Homo sapien
agcgcctgggttctggtgatgctcc

SEQ ID NO: 3559451 - DNA, 25 bp, Homo sapien
ccttctcaacgctgccaccagagct

SEQ ID NO: 3559452 - DNA, 25 bp, Homo sapien
cccttctcaacgctgccaccagagc

SEQ ID NO: 3559453 - DNA, 25 bp, Homo sapien
cgtgccctggagtgaggtccctcca

SEQ ID NO: 3559454 - DNA, 25 bp, Homo sapien
tacccctcccacgccgtgccctgga

SEQ ID NO: 3559455 - DNA, 25 bp, Homo sapien
ctacccctcccacgccgtgccctgg

SEQ ID NO: 3559456 - DNA, 25 bp, Homo sapien
cgccgtgccctggagtgaggtccct

SEQ ID NO: 3559457 - DNA, 25 bp, Homo sapien
agccccccagtgatttatgggagtc

SEQ ID NO: 3559458 - DNA, 25 bp, Homo sapien
ccagccccccagtgatttatgggag

SEQ ID NO: 3559459 - DNA, 25 bp, Homo sapien
cagccccccagtgatttatgggagt

SEQ ID NO: 3559460 - DNA, 25 bp, Homo sapien
cccagccccccagtgatttatggga

SEQ ID NO: 3559461 - DNA, 25 bp, Homo sapien
cccttcccccacacgctgttaggtg

SEQ ID NO: 3559462 - DNA, 25 bp, Homo sapien
ttcccccacacgctgttaggtggct

SEQ ID NO: 3559463 - DNA, 25 bp, Homo sapien
ccccacacgctgttaggtggctgga

SEQ ID NO: 3559464 - DNA, 25 bp, Homo sapien
ccacacgctgttaggtggctggact

SEQ ID NO: 3559465 - DNA, 25 bp, Homo sapien
agcaggctgcagtcgccctgaaggc

SEQ ID NO: 3559466 - DNA, 25 bp, Homo sapien
caatggtgctgagcgagctgaagca

SEQ ID NO: 3559467 - DNA, 25 bp, Homo sapien
gtcccagtgcaactgcctgcagcag

SEQ ID NO: 3559468 - DNA, 25 bp, Homo sapien
ccagggctgcatagaccatgcagaa

SEQ ID NO: 3559469 - DNA, 25 bp, Homo sapien
tctggtggccttgaactggccaggc

SEQ ID NO: 3559470 - DNA, 25 bp, Homo sapien
gggtccctgcctaccccaatactgc

SEQ ID NO: 3559471 - DNA, 25 bp, Homo sapien
gagtgccatgtctgctggggtccct

SEQ ID NO: 3559472 - DNA, 25 bp, Homo sapien
ccctctggtggccttgaactggcca

SEQ ID NO: 3559473 - DNA, 25 bp, Homo sapien
gaacaggatcagctaatacagagct

SEQ ID NO: 3559474 - DNA, 25 bp, Homo sapien
taccggagccagatgggagacaaac

SEQ ID NO: 3559475 - DNA, 25 bp, Homo sapien
gggtacactggaaagtgtgagctgt

SEQ ID NO: 3559476 - DNA, 25 bp, Homo sapien
ctgcaaacgcacatgcctaccggag

SEQ ID NO: 3559477 - DNA, 25 bp, Homo sapien
ggcaggccctatgctctgcctggaa

SEQ ID NO: 3559478 - DNA, 25 bp, Homo sapien
gggccagcaagtgggccacaaccag

SEQ ID NO: 3559479 - DNA, 25 bp, Homo sapien
gatgctggcagcgaagagcagggct

SEQ ID NO: 3559480 - DNA, 25 bp, Homo sapien
gtcctgccctctgagctgttgccca

SEQ ID NO: 3559481 - DNA, 25 bp, Homo sapien
ggcaggccgctggggtgctgtggga

SEQ ID NO: 3559482 - DNA, 25 bp, Homo sapien
ggctccacctcaggcacctgggagg

SEQ ID NO: 3559483 - DNA, 25 bp, Homo sapien
ggtgctgtgggaactggcggctcca

SEQ ID NO: 3559484 - DNA, 25 bp, Homo sapien
gctgtgggaactggcggctccacct

SEQ ID NO: 3559485 - DNA, 25 bp, Homo sapien
tcctggaggcaagacatttgcccat

SEQ ID NO: 3559486 - DNA, 25 bp, Homo sapien
gaggcaagacatttgcccatttcac

SEQ ID NO: 3559487 - DNA, 25 bp, Homo sapien
ggtcctggaggcaagacatttgccc

SEQ ID NO: 3559488 - DNA, 25 bp, Homo sapien
tggaggcaagacatttgcccatttc

SEQ ID NO: 3559489 - DNA, 25 bp, Homo sapien
tagcaggacttggtcaaaagtgctg

SEQ ID NO: 3559490 - DNA, 25 bp, Homo sapien
tggcttctggcttcactggatcccg

SEQ ID NO: 3559491 - DNA, 25 bp, Homo sapien
tggatcccgaggctaagactccaac

SEQ ID NO: 3559492 - DNA, 25 bp, Homo sapien
gaggtccatgctctaagccctaggg

SEQ ID NO: 3559493 - DNA, 25 bp, Homo sapien
agtgtagtgttcctgacccccaaag

SEQ ID NO: 3559494 - DNA, 25 bp, Homo sapien
cctgtgcagtgtagtgttcctgacc

SEQ ID NO: 3559495 - DNA, 25 bp, Homo sapien
tgtgggggcgcaggtcccccttcca

SEQ ID NO: 3559496 - DNA, 25 bp, Homo sapien
cagtgtatgctgtgactcctcctaa

SEQ ID NO: 3559497 - DNA, 25 bp, Homo sapien
tcaaggccccgcttccggcacccac

SEQ ID NO: 3559498 - DNA, 25 bp, Homo sapien
gtggcccagctgacacaaagctcca

SEQ ID NO: 3559499 - DNA, 25 bp, Homo sapien
gtctgagtccgggaacaaggtccag

SEQ ID NO: 3559500 - DNA, 25 bp, Homo sapien
cgagggccgaggtcggctgatgagg

SEQ ID NO: 3559501 - DNA, 25 bp, Homo sapien
tccagggatcaatgcggctgcgaag

SEQ ID NO: 3559502 - DNA, 25 bp, Homo sapien
agcagagcgtgatgtccccggtggg

SEQ ID NO: 3559503 - DNA, 25 bp, Homo sapien
tgatgtccccggtgggggtgagaca

SEQ ID NO: 3559504 - DNA, 25 bp, Homo sapien
tgccaggagcagagcgtgatgtccc

SEQ ID NO: 3559505 - DNA, 25 bp, Homo sapien
aggagcagagcgtgatgtccccggt

SEQ ID NO: 3559506 - DNA, 25 bp, Homo sapien
tcctcctcacgtcgggggctcttgg

SEQ ID NO: 3559507 - DNA, 25 bp, Homo sapien
agtcgggcgtcttgagcgagaagca

SEQ ID NO: 3559508 - DNA, 25 bp, Homo sapien
cgctggcccacagggatacccaggt

SEQ ID NO: 3559509 - DNA, 25 bp, Homo sapien
cagagctgctaccgcgctctgcggg

SEQ ID NO: 3559510 - DNA, 25 bp, Homo sapien
ggctgcggctctctcagtttgcagg

SEQ ID NO: 3559511 - DNA, 25 bp, Homo sapien
gctttcatgaaacctcagacatgtg

SEQ ID NO: 3559512 - DNA, 25 bp, Homo sapien
gcactggtgttgaggccgacatact

SEQ ID NO: 3559513 - DNA, 25 bp, Homo sapien
ttcagggcaagtggcaatccatttc

SEQ ID NO: 3559514 - DNA, 25 bp, Homo sapien
gaagtttgtcactgatctgaactat

SEQ ID NO: 3559515 - DNA, 25 bp, Homo sapien
gaatatgaagaatttctttgggttg

SEQ ID NO: 3559516 - DNA, 25 bp, Homo sapien
tggaacagtcaggacctgcttcagc

SEQ ID NO: 3559517 - DNA, 25 bp, Homo sapien
caagcttgagaacgatggggcccag

SEQ ID NO: 3559518 - DNA, 25 bp, Homo sapien
tgagagcagctaagcgggtcctaca

SEQ ID NO: 3559519 - DNA, 25 bp, Homo sapien
taagcagtctatacgtgagaagccc

SEQ ID NO: 3559520 - DNA, 25 bp, Homo sapien
tgaggatggtccctaggttggcaca

SEQ ID NO: 3559521 - DNA, 25 bp, Homo sapien
tctgagctcactacgagagcattgg

SEQ ID NO: 3559522 - DNA, 25 bp, Homo sapien
tgcccacggaaggagctcagccaga

SEQ ID NO: 3559523 - DNA, 25 bp, Homo sapien
gcctattgtggcctccccaaggtgc

SEQ ID NO: 3559524 - DNA, 25 bp, Homo sapien
ctttgcctactagcctattgtggcc

SEQ ID NO: 3559525 - DNA, 25 bp, Homo sapien
cggaaggagctcagccagatcctgc

SEQ ID NO: 3559526 - DNA, 25 bp, Homo sapien
gatgagtcatctgaatccaggtacc

SEQ ID NO: 3559527 - DNA, 25 bp, Homo sapien
catgtggcttcgtccatgcgggacc

SEQ ID NO: 3559528 - DNA, 25 bp, Homo sapien
tccaggtaccatgtggcttcgtcca

SEQ ID NO: 3559529 - DNA, 25 bp, Homo sapien
gatcctaagggggatgagtcatctg

SEQ ID NO: 3559530 - DNA, 25 bp, Homo sapien
gtcggggggactggcggccccatgc

SEQ ID NO: 3559531 - DNA, 25 bp, Homo sapien
aagcccagcatgctcgccgctctcc

SEQ ID NO: 3559532 - DNA, 25 bp, Homo sapien
tgctcgccgctctccattgcttgag

SEQ ID NO: 3559533 - DNA, 25 bp, Homo sapien
ttgcttgagtcctccagacgtcggg

SEQ ID NO: 3559534 - DNA, 25 bp, Homo sapien
cctccaagaataaggtctgacagag

SEQ ID NO: 3559535 - DNA, 25 bp, Homo sapien
atagtgagtgggctccgcctccaag

SEQ ID NO: 3559536 - DNA, 25 bp, Homo sapien
gtaacaggctagacctaaggcaggg

SEQ ID NO: 3559537 - DNA, 25 bp, Homo sapien
aattagtagtacatagtgtcataca

SEQ ID NO: 3559538 - DNA, 25 bp, Homo sapien
cgaagacgtttctcctccggtcaag

SEQ ID NO: 3559539 - DNA, 25 bp, Homo sapien
caggcccgacctcgaagacgtttct

SEQ ID NO: 3559540 - DNA, 25 bp, Homo sapien
cctgcacggtgatgcggtgcttgaa

SEQ ID NO: 3559541 - DNA, 25 bp, Homo sapien
caaggccgggtgaggcctgcacggt

SEQ ID NO: 3559542 - DNA, 25 bp, Homo sapien
tcgtctgagtcggagatgccctggc

SEQ ID NO: 3559543 - DNA, 25 bp, Homo sapien
atgaagtagagccaggaccccaacc

SEQ ID NO: 3559544 - DNA, 25 bp, Homo sapien
ccaggccacatagggagcggcacga

SEQ ID NO: 3559545 - DNA, 25 bp, Homo sapien
tggataaggaaagctactcgtctga

SEQ ID NO: 3559546 - DNA, 25 bp, Homo sapien
agctgctccgcctgtgaccgctgct

SEQ ID NO: 3559547 - DNA, 25 bp, Homo sapien
gcgcccggagcttgctgcgcttgaa

SEQ ID NO: 3559548 - DNA, 25 bp, Homo sapien
gagtggcatgctgatacgctcgccg

SEQ ID NO: 3559549 - DNA, 25 bp, Homo sapien
agcagcgtcagctcgcgctcgaaca

SEQ ID NO: 3559550 - DNA, 25 bp, Homo sapien
gaagagaccctggatctcgcgcttc

SEQ ID NO: 3559551 - DNA, 25 bp, Homo sapien
gcagctcgtcgaagagaccctggat

SEQ ID NO: 3559552 - DNA, 25 bp, Homo sapien
ttggctcgcagctcgtcgaagagac

SEQ ID NO: 3559553 - DNA, 25 bp, Homo sapien
tcgtcgaagagaccctggatctcgc

SEQ ID NO: 3559554 - DNA, 25 bp, Homo sapien
atggaatggaaggagtcccgcggca

SEQ ID NO: 3559555 - DNA, 25 bp, Homo sapien
tggaatggaaggagtcccgcggcat

SEQ ID NO: 3559556 - DNA, 25 bp, Homo sapien
aggagtcccgcggcatttcccgtag

SEQ ID NO: 3559557 - DNA, 25 bp, Homo sapien
gaatggaaggagtcccgcggcattt

SEQ ID NO: 3559558 - DNA, 25 bp, Homo sapien
gaaggggtccgtgggtggatgtgtc

SEQ ID NO: 3559559 - DNA, 25 bp, Homo sapien
tgcagcggggacagaataagaaggg

SEQ ID NO: 3559560 - DNA, 25 bp, Homo sapien
agctctgtacctcacctgccctccc

SEQ ID NO: 3559561 - DNA, 25 bp, Homo sapien
ataagaaggggtccgtgggtggatg

SEQ ID NO: 3559562 - DNA, 25 bp, Homo sapien
tgttaacagctacgccataggccac

SEQ ID NO: 3559563 - DNA, 25 bp, Homo sapien
ggtatggcacctccccggtcagcag

SEQ ID NO: 3559564 - DNA, 25 bp, Homo sapien
cggccataagctgtgcgaagggctc

SEQ ID NO: 3559565 - DNA, 25 bp, Homo sapien
cagcaaggcagtcaatgccacggta

SEQ ID NO: 3559566 - DNA, 25 bp, Homo sapien
tgggcgagacaacaggtctgtgttc

SEQ ID NO: 3559567 - DNA, 25 bp, Homo sapien
caaaagcaactaggagccaagtggt

SEQ ID NO: 3559568 - DNA, 25 bp, Homo sapien
tgcagccccgtagcagcccgtccag

SEQ ID NO: 3559569 - DNA, 25 bp, Homo sapien
gccctagatttaggcagccacctct

SEQ ID NO: 3559570 - DNA, 25 bp, Homo sapien
gtcactctcaatgggctgcagcagc

SEQ ID NO: 3559571 - DNA, 25 bp, Homo sapien
catccaggcgtaggtgcccgcggca

SEQ ID NO: 3559572 - DNA, 25 bp, Homo sapien
aggtgcccgcggcactcatttgtgt

SEQ ID NO: 3559573 - DNA, 25 bp, Homo sapien
tgtgtggttttgtgccactctcggg

SEQ ID NO: 3559574 - DNA, 25 bp, Homo sapien
agaaccagggtgctcatttttcagg

SEQ ID NO: 3559575 - DNA, 25 bp, Homo sapien
tgggaagggcacctaatacagcctg

SEQ ID NO: 3559576 - DNA, 25 bp, Homo sapien
ttccacatttgcaactccaggccag

SEQ ID NO: 3559577 - DNA, 25 bp, Homo sapien
catttcggcgctggtgcttctcaga

SEQ ID NO: 3559578 - DNA, 25 bp, Homo sapien
gactcgtgggcctggagaattcccc

SEQ ID NO: 3559579 - DNA, 25 bp, Homo sapien
ggccgggctggctggtcagtcctgt

SEQ ID NO: 3559580 - DNA, 25 bp, Homo sapien
tgggccaggtctcccacttgggagg

SEQ ID NO: 3559581 - DNA, 25 bp, Homo sapien
ccgccaggcttcctcacaaggcccc

SEQ ID NO: 3559582 - DNA, 25 bp, Homo sapien
gctcgtagtcgaacagggctgtcca

SEQ ID NO: 3559583 - DNA, 25 bp, Homo sapien
aacgctctcggctgtcacactgatg

SEQ ID NO: 3559584 - DNA, 25 bp, Homo sapien
acacatagttggacgggaagatgcc

SEQ ID NO: 3559585 - DNA, 25 bp, Homo sapien
caggtagtgcatcccacgggcaatc

SEQ ID NO: 3559586 - DNA, 25 bp, Homo sapien
ttctctgggtgcccgtggtccccac

SEQ ID NO: 3559587 - DNA, 25 bp, Homo sapien
gagccggcgctgggatgtgtggagg

SEQ ID NO: 3559588 - DNA, 25 bp, Homo sapien
atgtgtggaggaccttctctgggtg

SEQ ID NO: 3559589 - DNA, 25 bp, Homo sapien
gggatgtgtggaggaccttctctgg

SEQ ID NO: 3559590 - DNA, 25 bp, Homo sapien
taactcattggaagagctgtgcgcc

SEQ ID NO: 3559591 - DNA, 25 bp, Homo sapien
aacccgagtctggtcttggctgcga

SEQ ID NO: 3559592 - DNA, 25 bp, Homo sapien
acaacttctggatagggctgcccca

SEQ ID NO: 3559593 - DNA, 25 bp, Homo sapien
caccatggctagcttggagggaccc

SEQ ID NO: 3559594 - DNA, 25 bp, Homo sapien
cacaactgggtgatcgcgtacagcc

SEQ ID NO: 3559595 - DNA, 25 bp, Homo sapien
tgcacgtgagtacccatggagcagc

SEQ ID NO: 3559596 - DNA, 25 bp, Homo sapien
gcaaatagatatgcacggcttcggg

SEQ ID NO: 3559597 - DNA, 25 bp, Homo sapien
taactgcctagtggtggagctgaac

SEQ ID NO: 3559598 - DNA, 25 bp, Homo sapien
taccaaaactgagtgacccagacct

SEQ ID NO: 3559599 - DNA, 25 bp, Homo sapien
tggcctacatgtctgaaccctgacc

SEQ ID NO: 3559600 - DNA, 25 bp, Homo sapien
caggccctaagagccaaaccatggg

SEQ ID NO: 3559601 - DNA, 25 bp, Homo sapien
accatgggctggtcccacttggagc

SEQ ID NO: 3559602 - DNA, 25 bp, Homo sapien
tggggactgtaagtgcagacaagtt

SEQ ID NO: 3559603 - DNA, 25 bp, Homo sapien
ggttgggaggaatgaaatcgaagtg

SEQ ID NO: 3559604 - DNA, 25 bp, Homo sapien
agaaaagggaggtgaccgctggagg

SEQ ID NO: 3559605 - DNA, 25 bp, Homo sapien
ccacctatggctgagagggtaccag

SEQ ID NO: 3559606 - DNA, 25 bp, Homo sapien
gcttagctcgcagtacagaaactgg

SEQ ID NO: 3559607 - DNA, 25 bp, Homo sapien
tagctcgcagtacagaaactggcac

SEQ ID NO: 3559608 - DNA, 25 bp, Homo sapien
aatccatgcttagctcgcagtacag

SEQ ID NO: 3559609 - DNA, 25 bp, Homo sapien
aaaagtaaaatccatgcttagctcg

SEQ ID NO: 3559610 - DNA, 25 bp, Homo sapien
ctccatggtgagacctaggccctgg

SEQ ID NO: 3559611 - DNA, 25 bp, Homo sapien
gctaggctcggagaaacagagcatc

SEQ ID NO: 3559612 - DNA, 25 bp, Homo sapien
gggtctgttaacttaggtgctggca

SEQ ID NO: 3559613 - DNA, 25 bp, Homo sapien
tccccgaagtggcatcatcaagtcc

SEQ ID NO: 3559614 - DNA, 25 bp, Homo sapien
taggagactcgctgaattttgggac

SEQ ID NO: 3559615 - DNA, 25 bp, Homo sapien
gaagtacgtccagctgtagcccttg

SEQ ID NO: 3559616 - DNA, 25 bp, Homo sapien
ctgctattgtcctcccgcgacggtg

SEQ ID NO: 3559617 - DNA, 25 bp, Homo sapien
ccttgtgcgcctgcgcagtcgagaa

SEQ ID NO: 3559618 - DNA, 25 bp, Homo sapien
gaaagagccggcagagacctctgta

SEQ ID NO: 3559619 - DNA, 25 bp, Homo sapien
cttcagccatggttgagcaaggaaa

SEQ ID NO: 3559620 - DNA, 25 bp, Homo sapien
gaccccagagttccctacagagaag

SEQ ID NO: 3559621 - DNA, 25 bp, Homo sapien
caaacgctggtgttaggcacaggga

SEQ ID NO: 3559622 - DNA, 25 bp, Homo sapien
cgcaatggaggagaagtcttcatct

SEQ ID NO: 3559623 - DNA, 25 bp, Homo sapien
tgagaagtccatgtccgcaatggag

SEQ ID NO: 3559624 - DNA, 25 bp, Homo sapien
agcagggctgagaagtccatgtccg

SEQ ID NO: 3559625 - DNA, 25 bp, Homo sapien
tcatctcctgaaaggaggccattgg

SEQ ID NO: 3559626 - DNA, 25 bp, Homo sapien
cagcatgggctcagttgtgtggggg

SEQ ID NO: 3559627 - DNA, 25 bp, Homo sapien
gaaactcggagttgtcgacggatgc

SEQ ID NO: 3559628 - DNA, 25 bp, Homo sapien
gctgctgaaactcggagttgtcgac

SEQ ID NO: 3559629 - DNA, 25 bp, Homo sapien
gctgaaactcggagttgtcgacgga

SEQ ID NO: 3559630 - DNA, 25 bp, Homo sapien
tggggctaggactgggacaggggct

SEQ ID NO: 3559631 - DNA, 25 bp, Homo sapien
gcctggggctaggactgggacaggg

SEQ ID NO: 3559632 - DNA, 25 bp, Homo sapien
agggcctggggctaggactgggaca

SEQ ID NO: 3559633 - DNA, 25 bp, Homo sapien
ggagggcctggggctaggactggga

SEQ ID NO: 3559634 - DNA, 25 bp, Homo sapien
gccagagctgataccatggctggag

SEQ ID NO: 3559635 - DNA, 25 bp, Homo sapien
ccagagctgataccatggctggagc

SEQ ID NO: 3559636 - DNA, 25 bp, Homo sapien
ggatgacgtaaagggatagggctgg

SEQ ID NO: 3559637 - DNA, 25 bp, Homo sapien
tgctcagggatgacgtaaagggata

SEQ ID NO: 3559638 - DNA, 25 bp, Homo sapien
ggtgctcagggatgacgtaaaggga

SEQ ID NO: 3559639 - DNA, 25 bp, Homo sapien
atggtgctcagggatgacgtaaagg

SEQ ID NO: 3559640 - DNA, 25 bp, Homo sapien
gagacagagaggcaggggtcagaga

SEQ ID NO: 3559641 - DNA, 25 bp, Homo sapien
agagaggcaggggtcagagaaagcc

SEQ ID NO: 3559642 - DNA, 25 bp, Homo sapien
gacagagaggcaggggtcagagaaa

SEQ ID NO: 3559643 - DNA, 25 bp, Homo sapien
gagagacagagaggcaggggtcaga

SEQ ID NO: 3559644 - DNA, 25 bp, Homo sapien
agtggcacggtggttcccaggcttc

SEQ ID NO: 3559645 - DNA, 25 bp, Homo sapien
ggaagtcgctggttcctgcgccatc

SEQ ID NO: 3559646 - DNA, 25 bp, Homo sapien
tgaacctgtcgttccagtgggacaa

SEQ ID NO: 3559647 - DNA, 25 bp, Homo sapien
tgtgcattagcatcccaggaagtcg

SEQ ID NO: 3559648 - DNA, 25 bp, Homo sapien
acagcaatgcgtcgaggtggaggcc

SEQ ID NO: 3559649 - DNA, 25 bp, Homo sapien
gcaatgcgtcgaggtggaggccggg

SEQ ID NO: 3559650 - DNA, 25 bp, Homo sapien
aaggcacagcaatgcgtcgaggtgg

SEQ ID NO: 3559651 - DNA, 25 bp, Homo sapien
cgggaaggcacagcaatgcgtcgag

SEQ ID NO: 3559652 - DNA, 25 bp, Homo sapien
tgaaggtctcatatgtccttttacg

SEQ ID NO: 3559653 - DNA, 25 bp, Homo sapien
tttacgtttctcctcaatccggtga

SEQ ID NO: 3559654 - DNA, 25 bp, Homo sapien
ggtctcatatgtccttttacgtttc

SEQ ID NO: 3559655 - DNA, 25 bp, Homo sapien
tttctcctcaatccggtgacgatcg

SEQ ID NO: 3559656 - DNA, 25 bp, Homo sapien
ggcacagagcccagctgccctgatg

SEQ ID NO: 3559657 - DNA, 25 bp, Homo sapien
gccctgatgctgccaccccagctgt

SEQ ID NO: 3559658 - DNA, 25 bp, Homo sapien
gctgccctgatgctgccaccccagc

SEQ ID NO: 3559659 - DNA, 25 bp, Homo sapien
cagctgccctgatgctgccacccca

SEQ ID NO: 3559660 - DNA, 25 bp, Homo sapien
tggcaggtactggaattccatgggc

SEQ ID NO: 3559661 - DNA, 25 bp, Homo sapien
ccggaacacaatggccacttgtcgg

SEQ ID NO: 3559662 - DNA, 25 bp, Homo sapien
tgcacatcagcttgcgaaaaggagc

SEQ ID NO: 3559663 - DNA, 25 bp, Homo sapien
acttgtcggtgcacatcagcttgcg

SEQ ID NO: 3559664 - DNA, 25 bp, Homo sapien
ttgcgaaaaggagcctcgggcctcc

SEQ ID NO: 3559665 - DNA, 25 bp, Homo sapien
aaagccagttacctgacactccact

SEQ ID NO: 3559666 - DNA, 25 bp, Homo sapien
tatccaaagccagttacctgacact

SEQ ID NO: 3559667 - DNA, 25 bp, Homo sapien
agttacctgacactccacttctctg

SEQ ID NO: 3559668 - DNA, 25 bp, Homo sapien
ggaggaagtatccaaagccagttac

SEQ ID NO: 3559669 - DNA, 25 bp, Homo sapien
agctgccagagtttcggttcactcg

SEQ ID NO: 3559670 - DNA, 25 bp, Homo sapien
cggttcactcggcagatcttgagct

SEQ ID NO: 3559671 - DNA, 25 bp, Homo sapien
cagatcttgagctcggcagtgttgg

SEQ ID NO: 3559672 - DNA, 25 bp, Homo sapien
ggaagatctcatccccaccgaggca

SEQ ID NO: 3559673 - DNA, 25 bp, Homo sapien
acctggaagcagagccgcacagcat

SEQ ID NO: 3559674 - DNA, 25 bp, Homo sapien
atgggtcccgcactgtcacctggaa

SEQ ID NO: 3559675 - DNA, 25 bp, Homo sapien
ctgcctgatgggtcccgcactgtca

SEQ ID NO: 3559676 - DNA, 25 bp, Homo sapien
ttcaggtcgtagtccccacgctgct

SEQ ID NO: 3559677 - DNA, 25 bp, Homo sapien
ggtcccgcttcttcacacactggat

SEQ ID NO: 3559678 - DNA, 25 bp, Homo sapien
caggtcccgcttcttcacacactgg

SEQ ID NO: 3559679 - DNA, 25 bp, Homo sapien
tggatgcgctgactgatagcctgct

SEQ ID NO: 3559680 - DNA, 25 bp, Homo sapien
gggttgttgttggtctggatgcgct

SEQ ID NO: 3559681 - DNA, 25 bp, Homo sapien
tgagcgcccccagtcgtctgtccca

SEQ ID NO: 3559682 - DNA, 25 bp, Homo sapien
ccccagtcgtctgtcccactgtctc

SEQ ID NO: 3559683 - DNA, 25 bp, Homo sapien
gtctgtcccactgtctctcacagag

SEQ ID NO: 3559684 - DNA, 25 bp, Homo sapien
gtcgtctgtcccactgtctctcaca

SEQ ID NO: 3559685 - DNA, 25 bp, Homo sapien
ggcttcctactgtgctgcaacgaac

SEQ ID NO: 3559686 - DNA, 25 bp, Homo sapien
cccctagatcatcgctccatgccta

SEQ ID NO: 3559687 - DNA, 25 bp, Homo sapien
catgcctaaccctctccagtggctt

SEQ ID NO: 3559688 - DNA, 25 bp, Homo sapien
tgtgctgcaacgaaccctgtccctt

SEQ ID NO: 3559689 - DNA, 25 bp, Homo sapien
tggatgcagcggtccgggcagagct

SEQ ID NO: 3559690 - DNA, 25 bp, Homo sapien
gtccctggtcctgtgtagccattga

SEQ ID NO: 3559691 - DNA, 25 bp, Homo sapien
catagaagccatcccggcagtcctt

SEQ ID NO: 3559692 - DNA, 25 bp, Homo sapien
ctttcctacaagctcgtgggggtga

SEQ ID NO: 3559693 - DNA, 25 bp, Homo sapien
ggagcgcccctcgcacttgtagcgg

SEQ ID NO: 3559694 - DNA, 25 bp, Homo sapien
ctgtgctcctctcgcctgggatgct

SEQ ID NO: 3559695 - DNA, 25 bp, Homo sapien
tctcgcctgggatgctgcccgcgga

SEQ ID NO: 3559696 - DNA, 25 bp, Homo sapien
ggtggtatctgtgctcctctcgcct

SEQ ID NO: 3559697 - DNA, 25 bp, Homo sapien
tgatctccacataggggccagaggc

SEQ ID NO: 3559698 - DNA, 25 bp, Homo sapien
aatgatctccacataggggccagag

SEQ ID NO: 3559699 - DNA, 25 bp, Homo sapien
atctccacataggggccagaggcct

SEQ ID NO: 3559700 - DNA, 25 bp, Homo sapien
caatgatctccacataggggccaga

SEQ ID NO: 3559701 - DNA, 25 bp, Homo sapien
ctgccaggggacaccgcagccccat

SEQ ID NO: 3559702 - DNA, 25 bp, Homo sapien
tgccgggaagatgagggggaacagt

SEQ ID NO: 3559703 - DNA, 25 bp, Homo sapien
ctgccgggaagatgagggggaacag

SEQ ID NO: 3559704 - DNA, 25 bp, Homo sapien
aactgaatcagatgcgttctcccct

SEQ ID NO: 3559705 - DNA, 25 bp, Homo sapien
aatagggaaacgaagccagagctgc

SEQ ID NO: 3559706 - DNA, 25 bp, Homo sapien
gaggatgctgagtcaagggccaccc

SEQ ID NO: 3559707 - DNA, 25 bp, Homo sapien
gaatcagggcctgttgtactttctt

SEQ ID NO: 3559708 - DNA, 25 bp, Homo sapien
caggaaggggcggaaagcggcgcgg

SEQ ID NO: 3559709 - DNA, 25 bp, Homo sapien
cctgcgcagcgcccgtcggcgcagg

SEQ ID NO: 3559710 - DNA, 25 bp, Homo sapien
tccggcaggccgaccgctccctgcg

SEQ ID NO: 3559711 - DNA, 25 bp, Homo sapien
caccatccggcaggccgaccgctcc

SEQ ID NO: 3559712 - DNA, 25 bp, Homo sapien
ccattcgccagaggcggaaatgcgc

SEQ ID NO: 3559713 - DNA, 25 bp, Homo sapien
tgggcccgcggcgtgcactacagac

SEQ ID NO: 3559714 - DNA, 25 bp, Homo sapien
ggagcaagtgcacgccgcgcggagg

SEQ ID NO: 3559715 - DNA, 25 bp, Homo sapien
gcggaggacgaagaggctgcacgca

SEQ ID NO: 3559716 - DNA, 25 bp, Homo sapien
aaatcccggagcctcgtctctgaag

SEQ ID NO: 3559717 - DNA, 25 bp, Homo sapien
catcaagagctttgcggagcctaca

SEQ ID NO: 3559718 - DNA, 25 bp, Homo sapien
gaagcctggcgcttgtgtctcagaa

SEQ ID NO: 3559719 - DNA, 25 bp, Homo sapien
taaagcgccagcttacgatacagcc

SEQ ID NO: 3559720 - DNA, 25 bp, Homo sapien
agagggcttgtttccgcttctgctc

SEQ ID NO: 3559721 - DNA, 25 bp, Homo sapien
tggagccctagtgccttgctggtga

SEQ ID NO: 3559722 - DNA, 25 bp, Homo sapien
tagaatatgtcattaactgttgcca

SEQ ID NO: 3559723 - DNA, 25 bp, Homo sapien
tgctggtgagcatgcaagaaggtac

SEQ ID NO: 3559724 - DNA, 25 bp, Homo sapien
tccaaaaaacgaaagataagctgtg

SEQ ID NO: 3559725 - DNA, 25 bp, Homo sapien
ttcgcacccggtgggcgtcacgtga

SEQ ID NO: 3559726 - DNA, 25 bp, Homo sapien
tgggcgtcacgtgacggactcagta

SEQ ID NO: 3559727 - DNA, 25 bp, Homo sapien
gcttcgcacccggtgggcgtcacgt

SEQ ID NO: 3559728 - DNA, 25 bp, Homo sapien
gacggactcagtagaccgccactgg

SEQ ID NO: 3559729 - DNA, 25 bp, Homo sapien
tggtgtctgatcgaagccacgacga

SEQ ID NO: 3559730 - DNA, 25 bp, Homo sapien
gagttctgcctcaagtacggccgta

SEQ ID NO: 3559731 - DNA, 25 bp, Homo sapien
aacattgagtgcattgagctgggcc

SEQ ID NO: 3559732 - DNA, 25 bp, Homo sapien
caatgagatttaccgcaagggcacc

SEQ ID NO: 3559733 - DNA, 25 bp, Homo sapien
gcagagcttcatagagggttacctt

SEQ ID NO: 3559734 - DNA, 25 bp, Homo sapien
ccttggtggatgacaaagtggctga

SEQ ID NO: 3559735 - DNA, 25 bp, Homo sapien
tgggagagacagtcataccaatgac

SEQ ID NO: 3559736 - DNA, 25 bp, Homo sapien
tgctggtagccaggaatgagacagt

SEQ ID NO: 3559737 - DNA, 25 bp, Homo sapien
tcagcctggtagcacaagtggatgc

SEQ ID NO: 3559738 - DNA, 25 bp, Homo sapien
caagagatgtgaagccactcagggc

SEQ ID NO: 3559739 - DNA, 25 bp, Homo sapien
cagcggccagctatcagcacgagtt

SEQ ID NO: 3559740 - DNA, 25 bp, Homo sapien
ccgacttaggaagcaccttggtgca

SEQ ID NO: 3559741 - DNA, 25 bp, Homo sapien
gctcctgcggatcgactccaagtgt

SEQ ID NO: 3559742 - DNA, 25 bp, Homo sapien
tgagcgggccatgctcaagcggctc

SEQ ID NO: 3559743 - DNA, 25 bp, Homo sapien
cacactgtcagaggacatcgtggat

SEQ ID NO: 3559744 - DNA, 25 bp, Homo sapien
caactactacaaggtagggaggcag

SEQ ID NO: 3559745 - DNA, 25 bp, Homo sapien
ggaagtggtgaccagacactgccca

SEQ ID NO: 3559746 - DNA, 25 bp, Homo sapien
taaattgtttctatatgccagagcc

SEQ ID NO: 3559747 - DNA, 25 bp, Homo sapien
tgtgtacagtgagaagggatccgga

SEQ ID NO: 3559748 - DNA, 25 bp, Homo sapien
ggctcagaccaactccaaggtcagc

SEQ ID NO: 3559749 - DNA, 25 bp, Homo sapien
ggtttactgctgtgaagggatcgca

SEQ ID NO: 3559750 - DNA, 25 bp, Homo sapien
gtgatggaatcggttccaaagagct

SEQ ID NO: 3559751 - DNA, 25 bp, Homo sapien
gaatcggttccaaagagctggttta

SEQ ID NO: 3559752 - DNA, 25 bp, Homo sapien
gtttactgctgtgaagggatcgcag

SEQ ID NO: 3559753 - DNA, 25 bp, Homo sapien
actacccagtagaatcctccaggct

SEQ ID NO: 3559754 - DNA, 25 bp, Homo sapien
aagacggaactcctcgtctactcac

SEQ ID NO: 3559755 - DNA, 25 bp, Homo sapien
gggcaagacggaactcctcgtctac

SEQ ID NO: 3559756 - DNA, 25 bp, Homo sapien
caggctccgtctgcgcaattgtgct

SEQ ID NO: 3559757 - DNA, 25 bp, Homo sapien
ctgggccaagttaaggccccacgca

SEQ ID NO: 3559758 - DNA, 25 bp, Homo sapien
gctgggccaagttaaggccccacgc

SEQ ID NO: 3559759 - DNA, 25 bp, Homo sapien
gggatggtctccagaccccacaggg

SEQ ID NO: 3559760 - DNA, 25 bp, Homo sapien
tggcagtggctccaatgaagcggtc

SEQ ID NO: 3559761 - DNA, 25 bp, Homo sapien
tttggcatccgggccagggatggtc

SEQ ID NO: 3559762 - DNA, 25 bp, Homo sapien
cccacagggtgaagcggctgaagtt

SEQ ID NO: 3559763 - DNA, 25 bp, Homo sapien
gcctggctcagcatcgggactacag

SEQ ID NO: 3559764 - DNA, 25 bp, Homo sapien
tggctcagcatcgggactacagctc

SEQ ID NO: 3559765 - DNA, 25 bp, Homo sapien
ctggctcagcatcgggactacagct

SEQ ID NO: 3559766 - DNA, 25 bp, Homo sapien
gctcagcatcgggactacagctccc

SEQ ID NO: 3559767 - DNA, 25 bp, Homo sapien
cgtcagtcccggaatcccgcaaggg

SEQ ID NO: 3559768 - DNA, 25 bp, Homo sapien
agcggccccgaaacgacacttcgag

SEQ ID NO: 3559769 - DNA, 25 bp, Homo sapien
cctcctctccccgtagacagcggcc

SEQ ID NO: 3559770 - DNA, 25 bp, Homo sapien
cctcttggtcgtcagtcccggaatc

SEQ ID NO: 3559771 - DNA, 25 bp, Homo sapien
gagcgggaggcgcaaagggcctcag

SEQ ID NO: 3559772 - DNA, 25 bp, Homo sapien
cgggaggcgcaaagggcctcaggca

SEQ ID NO: 3559773 - DNA, 25 bp, Homo sapien
acccacgctgggtcgagcccggagc

SEQ ID NO: 3559774 - DNA, 25 bp, Homo sapien
ccacgctgggtcgagcccggagctg

SEQ ID NO: 3559775 - DNA, 25 bp, Homo sapien
aggcgatgagaagcgcgcaggccgg

SEQ ID NO: 3559776 - DNA, 25 bp, Homo sapien
aggagcccaggcgatgagaagcgcg

SEQ ID NO: 3559777 - DNA, 25 bp, Homo sapien
cccaggcgatgagaagcgcgcaggc

SEQ ID NO: 3559778 - DNA, 25 bp, Homo sapien
agcccaggcgatgagaagcgcgcag

SEQ ID NO: 3559779 - DNA, 25 bp, Homo sapien
caatgtggcggagcgcaagtggacg

SEQ ID NO: 3559780 - DNA, 25 bp, Homo sapien
cagatgcagtgtggcgggtacggcg

SEQ ID NO: 3559781 - DNA, 25 bp, Homo sapien
caagtggacgcggtgcctctcgatg

SEQ ID NO: 3559782 - DNA, 25 bp, Homo sapien
gatggcgggcgtgaagaagcgcccc

SEQ ID NO: 3559783 - DNA, 25 bp, Homo sapien
ctgacactgaagctggcgcggaaag

SEQ ID NO: 3559784 - DNA, 25 bp, Homo sapien
tacgcgacgccagggctcgcgagct

SEQ ID NO: 3559785 - DNA, 25 bp, Homo sapien
ctcgcgagctgacactgaagctggc

SEQ ID NO: 3559786 - DNA, 25 bp, Homo sapien
ctggcgcggaaagcgcgcaggacct

SEQ ID NO: 3559787 - DNA, 25 bp, Homo sapien
tgaacatgggcacaaatcctcctat

SEQ ID NO: 3559788 - DNA, 25 bp, Homo sapien
tctgtgaccgtgagggagcaagaca

SEQ ID NO: 3559789 - DNA, 25 bp, Homo sapien
tggcttccctaaaccctgactgaaa

SEQ ID NO: 3559790 - DNA, 25 bp, Homo sapien
gaacatcagcatcggacaaggtcac

SEQ ID NO: 3559791 - DNA, 25 bp, Homo sapien
gaccccttgtctatagcaaacctgt

SEQ ID NO: 3559792 - DNA, 25 bp, Homo sapien
atgaatgagcgttgttgtgttccag

SEQ ID NO: 3559793 - DNA, 25 bp, Homo sapien
caacttcaccgttatagcatgaaag

SEQ ID NO: 3559794 - DNA, 25 bp, Homo sapien
taagatccccagaattagtcacctc

SEQ ID NO: 3559795 - DNA, 25 bp, Homo sapien
tagaagcttaattcgattctttggg

SEQ ID NO: 3559796 - DNA, 25 bp, Homo sapien
gagagggcaagactacttcatgggt

SEQ ID NO: 3559797 - DNA, 25 bp, Homo sapien
tagaggttaaaacgcgtgtgtacgc

SEQ ID NO: 3559798 - DNA, 25 bp, Homo sapien
taattgcattcctatagtgtcaagg

SEQ ID NO: 3559799 - DNA, 25 bp, Homo sapien
tttccagtaccacaagatgttcctg

SEQ ID NO: 3559800 - DNA, 25 bp, Homo sapien
aaagatcgctggttcccttcagtgg

SEQ ID NO: 3559801 - DNA, 25 bp, Homo sapien
gaatctttcgatatgaccctagtga

SEQ ID NO: 3559802 - DNA, 25 bp, Homo sapien
tcttactgaggtgcaaatttcccca

SEQ ID NO: 3559803 - DNA, 25 bp, Homo sapien
gagggaaacccttaggcatggcttc

SEQ ID NO: 3559804 - DNA, 25 bp, Homo sapien
ggttacctcctacaatggacacaag

SEQ ID NO: 3559805 - DNA, 25 bp, Homo sapien
ggcttactaccttgggaagtgagga

SEQ ID NO: 3559806 - DNA, 25 bp, Homo sapien
ccgggttcctgggagtaatatgagc

SEQ ID NO: 3559807 - DNA, 25 bp, Homo sapien
taggtttttgattctgttccactgg

SEQ ID NO: 3559808 - DNA, 25 bp, Homo sapien
tatgccagtgccatgccgtttggtt

SEQ ID NO: 3559809 - DNA, 25 bp, Homo sapien
tatatattcttggaaactttgtcaa

SEQ ID NO: 3559810 - DNA, 25 bp, Homo sapien
ataatgtgattcctctagttctgtc

SEQ ID NO: 3559811 - DNA, 25 bp, Homo sapien
tgtgattctctgttcgttgcctgat

SEQ ID NO: 3559812 - DNA, 25 bp, Homo sapien
gcaagtaattaaggtttcgcaaaca

SEQ ID NO: 3559813 - DNA, 25 bp, Homo sapien
gttgcctgattctcaccaaataggg

SEQ ID NO: 3559814 - DNA, 25 bp, Homo sapien
tctatatccatattaaatgtgattc

SEQ ID NO: 3559815 - DNA, 25 bp, Homo sapien
tagctcattggacagaggcacaggt

SEQ ID NO: 3559816 - DNA, 25 bp, Homo sapien
cagtgccggtgtgttattcagctca

SEQ ID NO: 3559817 - DNA, 25 bp, Homo sapien
tcagctcatgcagacgtcagacaag

SEQ ID NO: 3559818 - DNA, 25 bp, Homo sapien
acaagtgtataggtgggttgcctcc

SEQ ID NO: 3559819 - DNA, 25 bp, Homo sapien
tctctcttcacacccaaatgccaaa

SEQ ID NO: 3559820 - DNA, 25 bp, Homo sapien
tagttgctccccaaggatctatgtg

SEQ ID NO: 3559821 - DNA, 25 bp, Homo sapien
ttgctccccaaggatctatgtgttt

SEQ ID NO: 3559822 - DNA, 25 bp, Homo sapien
ggtagttgctccccaaggatctatg

SEQ ID NO: 3559823 - DNA, 25 bp, Homo sapien
tgcaatcaaagctcagtacagcctg

SEQ ID NO: 3559824 - DNA, 25 bp, Homo sapien
gctcaaataatcctcatatctcagc

SEQ ID NO: 3559825 - DNA, 25 bp, Homo sapien
gctagaactgcaggtgcacacaacc

SEQ ID NO: 3559826 - DNA, 25 bp, Homo sapien
aatcaaagctcagtacagcctggac

SEQ ID NO: 3559827 - DNA, 25 bp, Homo sapien
tcagtgattgccacaagcgttggct

SEQ ID NO: 3559828 - DNA, 25 bp, Homo sapien
tgtccaccgagaagctgttgctgcc

SEQ ID NO: 3559829 - DNA, 25 bp, Homo sapien
gaggaagactgaccctgactgtcca

SEQ ID NO: 3559830 - DNA, 25 bp, Homo sapien
ttgctgccatacaacggagacaagg

SEQ ID NO: 3559831 - DNA, 25 bp, Homo sapien
gcctcagaaagggagtgagacctgc

SEQ ID NO: 3559832 - DNA, 25 bp, Homo sapien
gatgggtagtcaccttgtcaggaaa

SEQ ID NO: 3559833 - DNA, 25 bp, Homo sapien
cttataaagggttaggctgggcctg

SEQ ID NO: 3559834 - DNA, 25 bp, Homo sapien
caggagctctgtaagccagccagaa

SEQ ID NO: 3559835 - DNA, 25 bp, Homo sapien
ccaaggaagtttgctctgcgggccc

SEQ ID NO: 3559836 - DNA, 25 bp, Homo sapien
tgtacttccccaacggtcatggcag

SEQ ID NO: 3559837 - DNA, 25 bp, Homo sapien
catgctcggcagctgtgtctaaacc

SEQ ID NO: 3559838 - DNA, 25 bp, Homo sapien
gatggcaggcaggacagtacgttct

SEQ ID NO: 3559839 - DNA, 25 bp, Homo sapien
ggctctaatcggcacagcttgggaa

SEQ ID NO: 3559840 - DNA, 25 bp, Homo sapien
tccagagcgccagagtgagatcctg

SEQ ID NO: 3559841 - DNA, 25 bp, Homo sapien
tactgtccaacaggtcaggtccaca

SEQ ID NO: 3559842 - DNA, 25 bp, Homo sapien
tagtctgccccaatcggaaggatca

SEQ ID NO: 3559843 - DNA, 25 bp, Homo sapien
aatgcagggttttggcgacagagct

SEQ ID NO: 3559844 - DNA, 25 bp, Homo sapien
agagctacaggagtgtgccttggcc

SEQ ID NO: 3559845 - DNA, 25 bp, Homo sapien
ataacttaccccgtctcagggatct

SEQ ID NO: 3559846 - DNA, 25 bp, Homo sapien
aacttaccccgtctcagggatcttg

SEQ ID NO: 3559847 - DNA, 25 bp, Homo sapien
acggcccagtcatcggtccgcaggg

SEQ ID NO: 3559848 - DNA, 25 bp, Homo sapien
agtggacaccacacacgactctcag

SEQ ID NO: 3559849 - DNA, 25 bp, Homo sapien
ggcaggtggattgctacacagtagc

SEQ ID NO: 3559850 - DNA, 25 bp, Homo sapien
caccacaaaaggctccaggtggcgg

SEQ ID NO: 3559851 - DNA, 25 bp, Homo sapien
agttctcagggaagctcaggacgca

SEQ ID NO: 3559852 - DNA, 25 bp, Homo sapien
cagccgcggcctgtagaaagttgag

SEQ ID NO: 3559853 - DNA, 25 bp, Homo sapien
gagggtagcactctgggcatctcca

SEQ ID NO: 3559854 - DNA, 25 bp, Homo sapien
cagagcaggcacagtaaatgcaggc

SEQ ID NO: 3559855 - DNA, 25 bp, Homo sapien
cctgggccacaggagtgagcagata

SEQ ID NO: 3559856 - DNA, 25 bp, Homo sapien
gggagaccttatccgtgagcagtcc

SEQ ID NO: 3559857 - DNA, 25 bp, Homo sapien
cccgggactggagcaccaaggtgtt

SEQ ID NO: 3559858 - DNA, 25 bp, Homo sapien
gctgtgctctcgtgctgtaaggcta

SEQ ID NO: 3559859 - DNA, 25 bp, Homo sapien
tcagcaggtcgcgacccaaatcctc

SEQ ID NO: 3559860 - DNA, 25 bp, Homo sapien
tcacttctcaggtcgctcagcaggt

SEQ ID NO: 3559861 - DNA, 25 bp, Homo sapien
aaggcagacgggctggcccggaagg

SEQ ID NO: 3559862 - DNA, 25 bp, Homo sapien
ttggtctgttcgctcagcttctcac

SEQ ID NO: 3559863 - DNA, 25 bp, Homo sapien
gggccgacgccagagctgggcgccg

SEQ ID NO: 3559864 - DNA, 25 bp, Homo sapien
tgccgaccccgaggggctgcggtca

SEQ ID NO: 3559865 - DNA, 25 bp, Homo sapien
cggctcccacggtgagaccagggct

SEQ ID NO: 3559866 - DNA, 25 bp, Homo sapien
cccacggtgagaccagggctctcgg

SEQ ID NO: 3559867 - DNA, 25 bp, Homo sapien
tgagccacgagttgcttagccaagc

SEQ ID NO: 3559868 - DNA, 25 bp, Homo sapien
gcccttaagtaggtcagcgagtgaa

SEQ ID NO: 3559869 - DNA, 25 bp, Homo sapien
ggatgcataagtcccactggccaag

SEQ ID NO: 3559870 - DNA, 25 bp, Homo sapien
ttagccaagcctttgggatcccgcg

SEQ ID NO: 3559871 - DNA, 25 bp, Homo sapien
tccgttggttgaaatcattgacttc

SEQ ID NO: 3559872 - DNA, 25 bp, Homo sapien
tttgtcctagctattttctctgcca

SEQ ID NO: 3559873 - DNA, 25 bp, Homo sapien
tatttcacatcccaatcagtaacag

SEQ ID NO: 3559874 - DNA, 25 bp, Homo sapien
tgtggcgggagtccaatctcaagga

SEQ ID NO: 3559875 - DNA, 25 bp, Homo sapien
ttgggagaaggttttacaggccaga

SEQ ID NO: 3559876 - DNA, 25 bp, Homo sapien
gaaggttttacaggccagagacact

SEQ ID NO: 3559877 - DNA, 25 bp, Homo sapien
gagaaggttttacaggccagagaca

SEQ ID NO: 3559878 - DNA, 25 bp, Homo sapien
gggagaaggttttacaggccagaga

SEQ ID NO: 3559879 - DNA, 25 bp, Homo sapien
tggttgcaagcaccctggagatttg

SEQ ID NO: 3559880 - DNA, 25 bp, Homo sapien
gaagatggttgcaagcaccctggag

SEQ ID NO: 3559881 - DNA, 25 bp, Homo sapien
gtgaagatggttgcaagcaccctgg

SEQ ID NO: 3559882 - DNA, 25 bp, Homo sapien
agaggtgaagatggttgcaagcacc

SEQ ID NO: 3559883 - DNA, 25 bp, Homo sapien
cccgaggcggaaacctggcagatga

SEQ ID NO: 3559884 - DNA, 25 bp, Homo sapien
cgaggcggaaacctggcagatgatt

SEQ ID NO: 3559885 - DNA, 25 bp, Homo sapien
tgtcccgaggcggaaacctggcaga

SEQ ID NO: 3559886 - DNA, 25 bp, Homo sapien
gtcccgaggcggaaacctggcagat

SEQ ID NO: 3559887 - DNA, 25 bp, Homo sapien
caggctggaagaccggcccttttct

SEQ ID NO: 3559888 - DNA, 25 bp, Homo sapien
tgggacagaatgatgaccagcacct

SEQ ID NO: 3559889 - DNA, 25 bp, Homo sapien
tgggacgaatgacgatgcccatcca

SEQ ID NO: 3559890 - DNA, 25 bp, Homo sapien
ttctttgtacgtgctgagacagcca

SEQ ID NO: 3559891 - DNA, 25 bp, Homo sapien
tatccctgggttgactgccaatccg

SEQ ID NO: 3559892 - DNA, 25 bp, Homo sapien
aatccgaggccgtcatgaagctctg

SEQ ID NO: 3559893 - DNA, 25 bp, Homo sapien
cctggactgccctctgaaatgtgta

SEQ ID NO: 3559894 - DNA, 25 bp, Homo sapien
gactttagagtgtctgggacgctgc

SEQ ID NO: 3559895 - DNA, 25 bp, Homo sapien
ttttgtgagagagtcctacactgtt

SEQ ID NO: 3559896 - DNA, 25 bp, Homo sapien
tttgtgagagagtcctacactgttg

SEQ ID NO: 3559897 - DNA, 25 bp, Homo sapien
ttgtgagagagtcctacactgttgc

SEQ ID NO: 3559898 - DNA, 25 bp, Homo sapien
gaaatattccggctagtgccaggag

SEQ ID NO: 3559899 - DNA, 25 bp, Homo sapien
ttcatctgcctcagctaggactggc

SEQ ID NO: 3559900 - DNA, 25 bp, Homo sapien
ccaaaggacttgtgctgtaagggaa

SEQ ID NO: 3559901 - DNA, 25 bp, Homo sapien
tatgagcaatgattaccaaaggact

SEQ ID NO: 3559902 - DNA, 25 bp, Homo sapien
taaagaaactctggtcgcgcctacc

SEQ ID NO: 3559903 - DNA, 25 bp, Homo sapien
ttaggaaaacacagaggcgcacatt

SEQ ID NO: 3559904 - DNA, 25 bp, Homo sapien
tggaaacgctgccaggtcatcctgt

SEQ ID NO: 3559905 - DNA, 25 bp, Homo sapien
ccacattaggaaagcgaaactcgcc

SEQ ID NO: 3559906 - DNA, 25 bp, Homo sapien
aggctgttacttgccatttgccagg

SEQ ID NO: 3559907 - DNA, 25 bp, Homo sapien
ttgcctttttcctgcactacccgtg

SEQ ID NO: 3559908 - DNA, 25 bp, Homo sapien
tatgctggtttcaggaactatggcc

SEQ ID NO: 3559909 - DNA, 25 bp, Homo sapien
tcacaacgtgattcgcatactggca

SEQ ID NO: 3559910 - DNA, 25 bp, Homo sapien
tcaaagccaagctgagtggcacacc

SEQ ID NO: 3559911 - DNA, 25 bp, Homo sapien
cctgggcttggcgtgcattcaatgc

SEQ ID NO: 3559912 - DNA, 25 bp, Homo sapien
cacctcgtgacagaacagcagaaag

SEQ ID NO: 3559913 - DNA, 25 bp, Homo sapien
tatttagccatcagtggaggcctgg

SEQ ID NO: 3559914 - DNA, 25 bp, Homo sapien
atgctccggtgactccatctcgaag

SEQ ID NO: 3559915 - DNA, 25 bp, Homo sapien
ccggacttctctatgtgaagcacag

SEQ ID NO: 3559916 - DNA, 25 bp, Homo sapien
tctcgaagccggacttctctatgtg

SEQ ID NO: 3559917 - DNA, 25 bp, Homo sapien
actttactgagtgcccgcacaccat

SEQ ID NO: 3559918 - DNA, 25 bp, Homo sapien
tatctgcacttatgaggtagttggc

SEQ ID NO: 3559919 - DNA, 25 bp, Homo sapien
tggccctggtgaaatgcgtctgata

SEQ ID NO: 3559920 - DNA, 25 bp, Homo sapien
tatactgtgcggtgcaatctgagag

SEQ ID NO: 3559921 - DNA, 25 bp, Homo sapien
gcccaagtatgacctcgtgcctgtg

SEQ ID NO: 3559922 - DNA, 25 bp, Homo sapien
cactggtaccttcacctataatatc

SEQ ID NO: 3559923 - DNA, 25 bp, Homo sapien
catcactctttcatcgccagtaact

SEQ ID NO: 3559924 - DNA, 25 bp, Homo sapien
tctcatcatgagtaaatgccatcac

SEQ ID NO: 3559925 - DNA, 25 bp, Homo sapien
cactccctttgacactttcaaaagg

SEQ ID NO: 3559926 - DNA, 25 bp, Homo sapien
gatgcacttgctccacggtatagca

SEQ ID NO: 3559927 - DNA, 25 bp, Homo sapien
gagtgtttctagtcaggagctccac

SEQ ID NO: 3559928 - DNA, 25 bp, Homo sapien
caattaccatgagcccgttccaagg

SEQ ID NO: 3559929 - DNA, 25 bp, Homo sapien
cagactccagcttcggctttcgagt

SEQ ID NO: 3559930 - DNA, 25 bp, Homo sapien
tttcaaggttgggacacaggagact

SEQ ID NO: 3559931 - DNA, 25 bp, Homo sapien
tcaaggttgggacacaggagacttc

SEQ ID NO: 3559932 - DNA, 25 bp, Homo sapien
ttcaaggttgggacacaggagactt

SEQ ID NO: 3559933 - DNA, 25 bp, Homo sapien
tgtttttcaaggttgggacacagga

SEQ ID NO: 3559934 - DNA, 25 bp, Homo sapien
caaggttgggacacaggagacttca

SEQ ID NO: 3559935 - DNA, 25 bp, Homo sapien
tgggacacaggagacttcaggattg

SEQ ID NO: 3559936 - DNA, 25 bp, Homo sapien
gaagtctcctgtgtcccaaccttga

SEQ ID NO: 3559937 - DNA, 25 bp, Homo sapien
ccccaatcctgaagtctcctgtgtc

SEQ ID NO: 3559938 - DNA, 25 bp, Homo sapien
caatcctgaagtctcctgtgtccca

SEQ ID NO: 3559939 - DNA, 25 bp, Homo sapien
agtctcctgtgtcccaaccttgaaa

SEQ ID NO: 3559940 - DNA, 25 bp, Homo sapien
tcctgtgtcccaaccttgaaaaaca

SEQ ID NO: 3559941 - DNA, 25 bp, Homo sapien
tgaagtctcctgtgtcccaaccttg

SEQ ID NO: 3559942 - DNA, 25 bp, Homo sapien
gaagcaggaccagtaagggaccttc

SEQ ID NO: 3559943 - DNA, 25 bp, Homo sapien
acggctactcatggaagcaggacca

SEQ ID NO: 3559944 - DNA, 25 bp, Homo sapien
cggctactcatggaagcaggaccag

SEQ ID NO: 3559945 - DNA, 25 bp, Homo sapien
ggctactcatggaagcaggaccagt

SEQ ID NO: 3559946 - DNA, 25 bp, Homo sapien
tggaagcaggaccagtaagggacct

SEQ ID NO: 3559947 - DNA, 25 bp, Homo sapien
gctactcatggaagcaggaccagta

SEQ ID NO: 3559948 - DNA, 25 bp, Homo sapien
tggtcctgcttccatgagtagccgt

SEQ ID NO: 3559949 - DNA, 25 bp, Homo sapien
aggtcccttactggtcctgcttcca

SEQ ID NO: 3559950 - DNA, 25 bp, Homo sapien
actggtcctgcttccatgagtagcc

SEQ ID NO: 3559951 - DNA, 25 bp, Homo sapien
ctggtcctgcttccatgagtagccg

SEQ ID NO: 3559952 - DNA, 25 bp, Homo sapien
gaaggtcccttactggtcctgcttc

SEQ ID NO: 3559953 - DNA, 25 bp, Homo sapien
tactggtcctgcttccatgagtagc

SEQ ID NO: 3559954 - DNA, 25 bp, Homo sapien
catcccttgacggttctggccttcc

SEQ ID NO: 3559955 - DNA, 25 bp, Homo sapien
gcaatagtgactctgtgcttgtctg

SEQ ID NO: 3559956 - DNA, 25 bp, Homo sapien
tgctgccaacttctaaccgcaatag

SEQ ID NO: 3559957 - DNA, 25 bp, Homo sapien
aaccgcaatagtgactctgtgcttg

SEQ ID NO: 3559958 - DNA, 25 bp, Homo sapien
ctaaccgcaatagtgactctgtgct

SEQ ID NO: 3559959 - DNA, 25 bp, Homo sapien
gccaacttctaaccgcaatagtgac

SEQ ID NO: 3559960 - DNA, 25 bp, Homo sapien
tcactattgcggttagaagttggca

SEQ ID NO: 3559961 - DNA, 25 bp, Homo sapien
cagacaagcacagagtcactattgc

SEQ ID NO: 3559962 - DNA, 25 bp, Homo sapien
ctattgcggttagaagttggcagca

SEQ ID NO: 3559963 - DNA, 25 bp, Homo sapien
gacaagcacagagtcactattgcgg

SEQ ID NO: 3559964 - DNA, 25 bp, Homo sapien
agcacagagtcactattgcggttag

SEQ ID NO: 3559965 - DNA, 25 bp, Homo sapien
ggaaggccagaaccgtcaagggatg

SEQ ID NO: 3559966 - DNA, 25 bp, Homo sapien
ggagcatctggcagccccacacctg

SEQ ID NO: 3559967 - DNA, 25 bp, Homo sapien
tggagcatctggcagccccacacct

SEQ ID NO: 3559968 - DNA, 25 bp, Homo sapien
cacacctgcccttgggggttgcagg

SEQ ID NO: 3559969 - DNA, 25 bp, Homo sapien
acacctgcccttgggggttgcaggc

SEQ ID NO: 3559970 - DNA, 25 bp, Homo sapien
ttctggccccctgcctggagcatct

SEQ ID NO: 3559971 - DNA, 25 bp, Homo sapien
cacctgcccttgggggttgcaggct

SEQ ID NO: 3559972 - DNA, 25 bp, Homo sapien
agcctgcaacccccaagggcaggtg

SEQ ID NO: 3559973 - DNA, 25 bp, Homo sapien
aggtgtggggctgccagatgctcca

SEQ ID NO: 3559974 - DNA, 25 bp, Homo sapien
atgctccaggcagggggccagaagg

SEQ ID NO: 3559975 - DNA, 25 bp, Homo sapien
gcctgcaacccccaagggcaggtgt

SEQ ID NO: 3559976 - DNA, 25 bp, Homo sapien
gggctgccagatgctccaggcaggg

SEQ ID NO: 3559977 - DNA, 25 bp, Homo sapien
ctgcaacccccaagggcaggtgtgg

SEQ ID NO: 3559978 - DNA, 25 bp, Homo sapien
gaattgcaagcaaactgctacgagg

SEQ ID NO: 3559979 - DNA, 25 bp, Homo sapien
agtgccgtcatctccctggagggca

SEQ ID NO: 3559980 - DNA, 25 bp, Homo sapien
gcaagcaaactgctacgaggaggtc

SEQ ID NO: 3559981 - DNA, 25 bp, Homo sapien
tacgaggaggtcaaggaccgctgca

SEQ ID NO: 3559982 - DNA, 25 bp, Homo sapien
gatcaagcatgaattgcaagcaaac

SEQ ID NO: 3559983 - DNA, 25 bp, Homo sapien
catgaattgcaagcaaactgctacg

SEQ ID NO: 3559984 - DNA, 25 bp, Homo sapien
tgccctccagggagatgacggcact

SEQ ID NO: 3559985 - DNA, 25 bp, Homo sapien
cagtttgcttgcaattcatgcttga

SEQ ID NO: 3559986 - DNA, 25 bp, Homo sapien
cctcgtagcagtttgcttgcaattc

SEQ ID NO: 3559987 - DNA, 25 bp, Homo sapien
gacctcctcgtagcagtttgcttgc

SEQ ID NO: 3559988 - DNA, 25 bp, Homo sapien
ggtgcagcggtccttgacctcctcg

SEQ ID NO: 3559989 - DNA, 25 bp, Homo sapien
ttctctgccagggtgcagcggtcct

SEQ ID NO: 3559990 - DNA, 25 bp, Homo sapien
gcccttctgctctggccttggctgc

SEQ ID NO: 3559991 - DNA, 25 bp, Homo sapien
cattggtgctgagtgcccttctgct

SEQ ID NO: 3559992 - DNA, 25 bp, Homo sapien
cttgtcttcgctgcctgcttgttcc

SEQ ID NO: 3559993 - DNA, 25 bp, Homo sapien
ttccatctgctttgattggctcctt

SEQ ID NO: 3559994 - DNA, 25 bp, Homo sapien
cccttgtcttcgctgcctgcttgtt

SEQ ID NO: 3559995 - DNA, 25 bp, Homo sapien
ttggtgctgagtgcccttctgctct

SEQ ID NO: 3559996 - DNA, 25 bp, Homo sapien
aaggagccaatcaaagcagatggaa

SEQ ID NO: 3559997 - DNA, 25 bp, Homo sapien
ggaacaagcaggcagcgaagacaag

SEQ ID NO: 3559998 - DNA, 25 bp, Homo sapien
agcagaagggcactcagcaccaatg

SEQ ID NO: 3559999 - DNA, 25 bp, Homo sapien
gcagccaaggccagagcagaagggc

SEQ ID NO: 3560000 - DNA, 25 bp, Homo sapien
agagcagaagggcactcagcaccaa

SEQ ID NO: 3560001 - DNA, 25 bp, Homo sapien
aacaagcaggcagcgaagacaaggg

SEQ ID NO: 3560002 - DNA, 25 bp, Homo sapien
gcccccgagtctgcgccccttaaga

SEQ ID NO: 3560003 - DNA, 25 bp, Homo sapien
ccccgagtctgcgccccttaagagc

SEQ ID NO: 3560004 - DNA, 25 bp, Homo sapien
cccccgagtctgcgccccttaagag

SEQ ID NO: 3560005 - DNA, 25 bp, Homo sapien
cccgagtctgcgccccttaagagca

SEQ ID NO: 3560006 - DNA, 25 bp, Homo sapien
ctcttaaggggcgcagactcggggg

SEQ ID NO: 3560007 - DNA, 25 bp, Homo sapien
tgctcttaaggggcgcagactcggg

SEQ ID NO: 3560008 - DNA, 25 bp, Homo sapien
gctcttaaggggcgcagactcgggg

SEQ ID NO: 3560009 - DNA, 25 bp, Homo sapien
tcttaaggggcgcagactcgggggc

SEQ ID NO: 3560010 - DNA, 25 bp, Homo sapien
ccaaggacgccatcaagaagaagct

SEQ ID NO: 3560011 - DNA, 25 bp, Homo sapien
cgagtctgcgccccttaagagcaaa

SEQ ID NO: 3560012 - DNA, 25 bp, Homo sapien
gcgccccttaagagcaaaatgattt

SEQ ID NO: 3560013 - DNA, 25 bp, Homo sapien
gccccttaagagcaaaatgatttat

SEQ ID NO: 3560014 - DNA, 25 bp, Homo sapien
gatttatgccagctccaaggacgcc

SEQ ID NO: 3560015 - DNA, 25 bp, Homo sapien
cccgagtctgcgccccttaagagca

SEQ ID NO: 3560016 - DNA, 25 bp, Homo sapien
aaatcattttgctcttaaggggcgc

SEQ ID NO: 3560017 - DNA, 25 bp, Homo sapien
tgctcttaaggggcgcagactcggg

SEQ ID NO: 3560018 - DNA, 25 bp, Homo sapien
agcttcttcttgatggcgtccttgg

SEQ ID NO: 3560019 - DNA, 25 bp, Homo sapien
gatggcgtccttggagctggcataa

SEQ ID NO: 3560020 - DNA, 25 bp, Homo sapien
gcgtccttggagctggcataaatca

SEQ ID NO: 3560021 - DNA, 25 bp, Homo sapien
tcttaaggggcgcagactcgggggc

SEQ ID NO: 3560022 - DNA, 25 bp, Homo sapien
ctcatgatgggaacttctgtggctc

SEQ ID NO: 3560023 - DNA, 25 bp, Homo sapien
ctgggagttgcctgacgcgtgtttc

SEQ ID NO: 3560024 - DNA, 25 bp, Homo sapien
cctggtcaacccagatgtgtgggtt

SEQ ID NO: 3560025 - DNA, 25 bp, Homo sapien
gccagcccaagggtttctcaaagtc

SEQ ID NO: 3560026 - DNA, 25 bp, Homo sapien
ggtttctcaaagtcacctgtggctt

SEQ ID NO: 3560027 - DNA, 25 bp, Homo sapien
tgagctcattctggcacttcttcct

SEQ ID NO: 3560028 - DNA, 25 bp, Homo sapien
tggacagaaacacgcgtcaggcaac

SEQ ID NO: 3560029 - DNA, 25 bp, Homo sapien
aacccacacatctgggttgaccagg

SEQ ID NO: 3560030 - DNA, 25 bp, Homo sapien
gactttgagaaacccttgggctggc

SEQ ID NO: 3560031 - DNA, 25 bp, Homo sapien
aagccacaggtgactttgagaaacc

SEQ ID NO: 3560032 - DNA, 25 bp, Homo sapien
ggaagaagtgccagaatgagctcac

SEQ ID NO: 3560033 - DNA, 25 bp, Homo sapien
cagaagttcccatcatgagaaaggg

SEQ ID NO: 3560034 - DNA, 25 bp, Homo sapien
gactgccgctatgccctctatgatg

SEQ ID NO: 3560035 - DNA, 25 bp, Homo sapien
gtgcgtaagtcttcaacgccagagg

SEQ ID NO: 3560036 - DNA, 25 bp, Homo sapien
gccgctatgccctctatgatgcaac

SEQ ID NO: 3560037 - DNA, 25 bp, Homo sapien
catgaaggtgcgtaagtcttcaacg

SEQ ID NO: 3560038 - DNA, 25 bp, Homo sapien
ggccagactgtcgacgacccctacg

SEQ ID NO: 3560039 - DNA, 25 bp, Homo sapien
taaggactgccgctatgccctctat

SEQ ID NO: 3560040 - DNA, 25 bp, Homo sapien
tctggcgttgaagacttacgcacct

SEQ ID NO: 3560041 - DNA, 25 bp, Homo sapien
cctctggcgttgaagacttacgcac

SEQ ID NO: 3560042 - DNA, 25 bp, Homo sapien
catcatagagggcatagcggcagtc

SEQ ID NO: 3560043 - DNA, 25 bp, Homo sapien
gttgcatcatagagggcatagcggc

SEQ ID NO: 3560044 - DNA, 25 bp, Homo sapien
tcatagagggcatagcggcagtcct

SEQ ID NO: 3560045 - DNA, 25 bp, Homo sapien
cgttgaagacttacgcaccttcatg

SEQ ID NO: 3560046 - DNA, 25 bp, Homo sapien
tcttgacgtatacgtggcatgtctc

SEQ ID NO: 3560047 - DNA, 25 bp, Homo sapien
actcgggacgtggactgagatcttc

SEQ ID NO: 3560048 - DNA, 25 bp, Homo sapien
gaatccttttcttgacgtatacgtg

SEQ ID NO: 3560049 - DNA, 25 bp, Homo sapien
tgacgtatacgtggcatgtctccta

SEQ ID NO: 3560050 - DNA, 25 bp, Homo sapien
ccttttcttgacgtatacgtggcat

SEQ ID NO: 3560051 - DNA, 25 bp, Homo sapien
ctcgggacgtggactgagatcttct

SEQ ID NO: 3560052 - DNA, 25 bp, Homo sapien
gccacgtatacgtcaagaaaaggat

SEQ ID NO: 3560053 - DNA, 25 bp, Homo sapien
agaagatctcagtccacgtcccgag

SEQ ID NO: 3560054 - DNA, 25 bp, Homo sapien
gaagatctcagtccacgtcccgagt

SEQ ID NO: 3560055 - DNA, 25 bp, Homo sapien
cacgtatacgtcaagaaaaggattc

SEQ ID NO: 3560056 - DNA, 25 bp, Homo sapien
taggagacatgccacgtatacgtca

SEQ ID NO: 3560057 - DNA, 25 bp, Homo sapien
gagacatgccacgtatacgtcaaga

SEQ ID NO: 3560058 - DNA, 25 bp, Homo sapien
ggttctgcttttcacgagttttgca

SEQ ID NO: 3560059 - DNA, 25 bp, Homo sapien
caaatgagtcagtagccggtggatc

SEQ ID NO: 3560060 - DNA, 25 bp, Homo sapien
gagcaagtactgtgagtagcaaatg

SEQ ID NO: 3560061 - DNA, 25 bp, Homo sapien
cattctgaggttgtgtcccatctgg

SEQ ID NO: 3560062 - DNA, 25 bp, Homo sapien
tcagtagccggtggatcttttaatt

SEQ ID NO: 3560063 - DNA, 25 bp, Homo sapien
ttgaactaggtgatcagaggccatg

SEQ ID NO: 3560064 - DNA, 25 bp, Homo sapien
gcaaaactcgtgaaaagcagaacct

SEQ ID NO: 3560065 - DNA, 25 bp, Homo sapien
aattaaaagatccaccggctactga

SEQ ID NO: 3560066 - DNA, 25 bp, Homo sapien
gatccaccggctactgactcatttg

SEQ ID NO: 3560067 - DNA, 25 bp, Homo sapien
gatgggacacaacctcagaatggca

SEQ ID NO: 3560068 - DNA, 25 bp, Homo sapien
catttgctactcacagtacttgctc

SEQ ID NO: 3560069 - DNA, 25 bp, Homo sapien
catggcctctgatcacctagttcaa

SEQ ID NO: 3560070 - DNA, 25 bp, Homo sapien
gagtttaaagacctcgaggcctctg

SEQ ID NO: 3560071 - DNA, 25 bp, Homo sapien
taaagacctcgaggcctctgggcac

SEQ ID NO: 3560072 - DNA, 25 bp, Homo sapien
agtttaaagacctcgaggcctctgg

SEQ ID NO: 3560073 - DNA, 25 bp, Homo sapien
aagacctcgaggcctctgggcactt

SEQ ID NO: 3560074 - DNA, 25 bp, Homo sapien
ttaaagacctcgaggcctctgggca

SEQ ID NO: 3560075 - DNA, 25 bp, Homo sapien
tttaaagacctcgaggcctctgggc

SEQ ID NO: 3560076 - DNA, 25 bp, Homo sapien
tgcccagaggcctcgaggtctttaa

SEQ ID NO: 3560077 - DNA, 25 bp, Homo sapien
gtgcccagaggcctcgaggtcttta

SEQ ID NO: 3560078 - DNA, 25 bp, Homo sapien
aagtgcccagaggcctcgaggtctt

SEQ ID NO: 3560079 - DNA, 25 bp, Homo sapien
ccagaggcctcgaggtctttaaact

SEQ ID NO: 3560080 - DNA, 25 bp, Homo sapien
cagaggcctcgaggtctttaaactc

SEQ ID NO: 3560081 - DNA, 25 bp, Homo sapien
gcccagaggcctcgaggtctttaaa

SEQ ID NO: 3560082 - DNA, 25 bp, Homo sapien
ggccggcttcttctgcagttccggg

SEQ ID NO: 3560083 - DNA, 25 bp, Homo sapien
cagatttaccttggattgcccctcc

SEQ ID NO: 3560084 - DNA, 25 bp, Homo sapien
ctggctcgggcaccccgaagcacga

SEQ ID NO: 3560085 - DNA, 25 bp, Homo sapien
gggaccagatttaccttggattgcc

SEQ ID NO: 3560086 - DNA, 25 bp, Homo sapien
actccggatgcggccgagtcacgtg

SEQ ID NO: 3560087 - DNA, 25 bp, Homo sapien
acgtggccggcttcttctgcagttc

SEQ ID NO: 3560088 - DNA, 25 bp, Homo sapien
gtgactcggccgcatccggagtggg

SEQ ID NO: 3560089 - DNA, 25 bp, Homo sapien
cccggaactgcagaagaagccggcc

SEQ ID NO: 3560090 - DNA, 25 bp, Homo sapien
gggcaatccaaggtaaatctggtcc

SEQ ID NO: 3560091 - DNA, 25 bp, Homo sapien
gggacaggagatcggctgggcccgg

SEQ ID NO: 3560092 - DNA, 25 bp, Homo sapien
gaactgcagaagaagccggccacgt

SEQ ID NO: 3560093 - DNA, 25 bp, Homo sapien
gcaatccaaggtaaatctggtcccc

SEQ ID NO: 3560094 - DNA, 25 bp, Homo sapien
tgctgctgcctctcggatacgcgtt

SEQ ID NO: 3560095 - DNA, 25 bp, Homo sapien
tatacggcccgagggctgagaaaac

SEQ ID NO: 3560096 - DNA, 25 bp, Homo sapien
ttcgggagcgcatctaacgagctgc

SEQ ID NO: 3560097 - DNA, 25 bp, Homo sapien
tgcgattaaggccttgcaccgcaag

SEQ ID NO: 3560098 - DNA, 25 bp, Homo sapien
gagccgagtttagggaagtgaccca

SEQ ID NO: 3560099 - DNA, 25 bp, Homo sapien
gattccacagggttagggacctgga

SEQ ID NO: 3560100 - DNA, 25 bp, Homo sapien
tgcagaaacgcgtatccgagaggca

SEQ ID NO: 3560101 - DNA, 25 bp, Homo sapien
tgcacgggtgagaacgcagctcgtt

SEQ ID NO: 3560102 - DNA, 25 bp, Homo sapien
taaaacaacgggtgtatcagaccca

SEQ ID NO: 3560103 - DNA, 25 bp, Homo sapien
cggtgcaaggccttaatcgcaggca

SEQ ID NO: 3560104 - DNA, 25 bp, Homo sapien
agctcgttagatgcgctcccgaacg

SEQ ID NO: 3560105 - DNA, 25 bp, Homo sapien
tgggtcacttccctaaactcggctc

SEQ ID NO: 3560106 - DNA, 25 bp, Homo sapien
gaaaaagcgcgcgagaggtctcggc

SEQ ID NO: 3560107 - DNA, 25 bp, Homo sapien
caaggctgttcctgtctgcgcgtca

SEQ ID NO: 3560108 - DNA, 25 bp, Homo sapien
tcgactggagcatgcggcgtccaaa

SEQ ID NO: 3560109 - DNA, 25 bp, Homo sapien
ggagcatgcggcgtccaaacccggc

SEQ ID NO: 3560110 - DNA, 25 bp, Homo sapien
cggcgtcgcgcctttcttcttaggg

SEQ ID NO: 3560111 - DNA, 25 bp, Homo sapien
cgcgctctcgactggagcatgcggc

SEQ ID NO: 3560112 - DNA, 25 bp, Homo sapien
gtgacgcgcagacaggaacagcctt

SEQ ID NO: 3560113 - DNA, 25 bp, Homo sapien
gcccctaagaagaaaggcgcgacgc

SEQ ID NO: 3560114 - DNA, 25 bp, Homo sapien
gccgcatgctccagtcgagagcgcg

SEQ ID NO: 3560115 - DNA, 25 bp, Homo sapien
gagagcgcgcccctaagaagaaagg

SEQ ID NO: 3560116 - DNA, 25 bp, Homo sapien
gccgggtttggacgccgcatgctcc

SEQ ID NO: 3560117 - DNA, 25 bp, Homo sapien
cgcgcagacaggaacagccttgggt

SEQ ID NO: 3560118 - DNA, 25 bp, Homo sapien
tcattgtgcggctcctactaaacgg

SEQ ID NO: 3560119 - DNA, 25 bp, Homo sapien
ttttgctgtgggataaagagccgct

SEQ ID NO: 3560120 - DNA, 25 bp, Homo sapien
taccagatgggtcttaagaaagccg

SEQ ID NO: 3560121 - DNA, 25 bp, Homo sapien
ggtcattttactgagcgccgcctcg

SEQ ID NO: 3560122 - DNA, 25 bp, Homo sapien
tacatttccctacatgcactgcagc

SEQ ID NO: 3560123 - DNA, 25 bp, Homo sapien
ggccaagggatccagataataccag

SEQ ID NO: 3560124 - DNA, 25 bp, Homo sapien
cgaggcggcgctcagtaaaatgacc

SEQ ID NO: 3560125 - DNA, 25 bp, Homo sapien
taagcggctctttatcccacagcaa

SEQ ID NO: 3560126 - DNA, 25 bp, Homo sapien
tcgctcgctgggtaacggagtcttc

SEQ ID NO: 3560127 - DNA, 25 bp, Homo sapien
ccgtttagtaggagccgcacaatga

SEQ ID NO: 3560128 - DNA, 25 bp, Homo sapien
tagggaaatgtaggcccaggtcctg

SEQ ID NO: 3560129 - DNA, 25 bp, Homo sapien
aacggctttcttaagacccatctgg

SEQ ID NO: 3560130 - DNA, 25 bp, Homo sapien
ttgtgtcctcatccccggcacccat

SEQ ID NO: 3560131 - DNA, 25 bp, Homo sapien
tttgtgtcctcatccccggcaccca

SEQ ID NO: 3560132 - DNA, 25 bp, Homo sapien
ctttgtgtcctcatccccggcaccc

SEQ ID NO: 3560133 - DNA, 25 bp, Homo sapien
ggaggacccgccctcgggctcatgg

SEQ ID NO: 3560134 - DNA, 25 bp, Homo sapien
gctcttcgttcgctggctgaccgag

SEQ ID NO: 3560135 - DNA, 25 bp, Homo sapien
cctgggccaggtgttcgaatcccga

SEQ ID NO: 3560136 - DNA, 25 bp, Homo sapien
gactccagaactggcggcgtcccag

SEQ ID NO: 3560137 - DNA, 25 bp, Homo sapien
tcgcagctgccggattcgtggagtg

SEQ ID NO: 3560138 - DNA, 25 bp, Homo sapien
tgtggagttaactcttttctctccc

SEQ ID NO: 3560139 - DNA, 25 bp, Homo sapien
ttgcatcccagatcctcgcagctgc

SEQ ID NO: 3560140 - DNA, 25 bp, Homo sapien
aaccatctgagtaggttgcatccca

SEQ ID NO: 3560141 - DNA, 25 bp, Homo sapien
gatgcctggccttgagcaaatgact

SEQ ID NO: 3560142 - DNA, 25 bp, Homo sapien
aagcctgagtccaaatctcaccagt

SEQ ID NO: 3560143 - DNA, 25 bp, Homo sapien
gacttatcctcttttcgacttagta

SEQ ID NO: 3560144 - DNA, 25 bp, Homo sapien
gcgacttgcggaagtccaggactct

SEQ ID NO: 3560145 - DNA, 25 bp, Homo sapien
cccagatttgcagcggatcatccca

SEQ ID NO: 3560146 - DNA, 25 bp, Homo sapien
tgagagaattccatgatcaagctac

SEQ ID NO: 3560147 - DNA, 25 bp, Homo sapien
aaggatcccagctcagttagttacg

SEQ ID NO: 3560148 - DNA, 25 bp, Homo sapien
tcctgcagcgcatggtagaagtgag

SEQ ID NO: 3560149 - DNA, 25 bp, Homo sapien
tagtagggccttagagtcacccaac

SEQ ID NO: 3560150 - DNA, 25 bp, Homo sapien
gattatcccagccacctgagcggga

SEQ ID NO: 3560151 - DNA, 25 bp, Homo sapien
catgagtgaacttcttagtagggcc

SEQ ID NO: 3560152 - DNA, 25 bp, Homo sapien
tcaggagcccgagtgatactgctgg

SEQ ID NO: 3560153 - DNA, 25 bp, Homo sapien
ggatttggcgggtagagatgcagga

SEQ ID NO: 3560154 - DNA, 25 bp, Homo sapien
tttggcgggtagagatgcaggataa

SEQ ID NO: 3560155 - DNA, 25 bp, Homo sapien
tgagacacacttcttgcagacctga

SEQ ID NO: 3560156 - DNA, 25 bp, Homo sapien
ctgagacacacttcttgcagacctg

SEQ ID NO: 3560157 - DNA, 25 bp, Homo sapien
gagacacacttcttgcagacctgag

SEQ ID NO: 3560158 - DNA, 25 bp, Homo sapien
gtctgagacacacttcttgcagacc

SEQ ID NO: 3560159 - DNA, 25 bp, Homo sapien
ggaactgctctaagagccaagaaga

SEQ ID NO: 3560160 - DNA, 25 bp, Homo sapien
aagagccaagaagaccaggaggagc

SEQ ID NO: 3560161 - DNA, 25 bp, Homo sapien
agcaggagccactggggtcatttgt

SEQ ID NO: 3560162 - DNA, 25 bp, Homo sapien
ggagccactggggtcatttgtgcag

SEQ ID NO: 3560163 - DNA, 25 bp, Homo sapien
caggaatgagtgaagaaggtagagc

SEQ ID NO: 3560164 - DNA, 25 bp, Homo sapien
tgaagaaggtagagctgtgttgtcc

SEQ ID NO: 3560165 - DNA, 25 bp, Homo sapien
cttgctgaatgtgggcatcgggccc

SEQ ID NO: 3560166 - DNA, 25 bp, Homo sapien
cagaagttggccgagtcagaaggcc

SEQ ID NO: 3560167 - DNA, 25 bp, Homo sapien
ctgcagctgaactgtggctgcctcc

SEQ ID NO: 3560168 - DNA, 25 bp, Homo sapien
acctgcagctgaactgtggctgcct

SEQ ID NO: 3560169 - DNA, 25 bp, Homo sapien
aagccccgccccaacccatcacctg

SEQ ID NO: 3560170 - DNA, 25 bp, Homo sapien
cccaacccatcacctgcagctgaac

SEQ ID NO: 3560171 - DNA, 25 bp, Homo sapien
tggggcaactgccctggcacaaggg

SEQ ID NO: 3560172 - DNA, 25 bp, Homo sapien
gggcaactgccctggcacaaggggt

SEQ ID NO: 3560173 - DNA, 25 bp, Homo sapien
ggggcaactgccctggcacaagggg

SEQ ID NO: 3560174 - DNA, 25 bp, Homo sapien
tgtggggcaactgccctggcacaag

SEQ ID NO: 3560175 - DNA, 25 bp, Homo sapien
gattgaaaaccactaacagtccagt

SEQ ID NO: 3560176 - DNA, 25 bp, Homo sapien
ccagggaactactagggcttatcca

SEQ ID NO: 3560177 - DNA, 25 bp, Homo sapien
cagagttaggaatggaacccagggc

SEQ ID NO: 3560178 - DNA, 25 bp, Homo sapien
tggagtttcttaggacccctgcaag

SEQ ID NO: 3560179 - DNA, 25 bp, Homo sapien
ccagctcctgtcaatgggggcccct

SEQ ID NO: 3560180 - DNA, 25 bp, Homo sapien
ctcccagctcctgtcaatgggggcc

SEQ ID NO: 3560181 - DNA, 25 bp, Homo sapien
agctcctgtcaatgggggcccctgg

SEQ ID NO: 3560182 - DNA, 25 bp, Homo sapien
tcccagctcctgtcaatgggggccc

SEQ ID NO: 3560183 - DNA, 25 bp, Homo sapien
tgaacttggcctgcccccccaagtg

SEQ ID NO: 3560184 - DNA, 25 bp, Homo sapien
tatagagacccccatttaggtgaac

SEQ ID NO: 3560185 - DNA, 25 bp, Homo sapien
acatatagagacccccatttaggtg

SEQ ID NO: 3560186 - DNA, 25 bp, Homo sapien
agagacccccatttaggtgaacttg

SEQ ID NO: 3560187 - DNA, 25 bp, Homo sapien
tttctcattctgcccctcacaacag

SEQ ID NO: 3560188 - DNA, 25 bp, Homo sapien
ttctcattctgcccctcacaacagg

SEQ ID NO: 3560189 - DNA, 25 bp, Homo sapien
ctttctcattctgcccctcacaaca

SEQ ID NO: 3560190 - DNA, 25 bp, Homo sapien
ctcctcagctagggtagctgcaggg

SEQ ID NO: 3560191 - DNA, 25 bp, Homo sapien
cagggagggtggctccctcctgctc

SEQ ID NO: 3560192 - DNA, 25 bp, Homo sapien
agggagggtggctccctcctgctcc

SEQ ID NO: 3560193 - DNA, 25 bp, Homo sapien
ctcagctagggtagctgcagggagg

SEQ ID NO: 3560194 - DNA, 25 bp, Homo sapien
tacaaagacggtgagcctcagtaca

SEQ ID NO: 3560195 - DNA, 25 bp, Homo sapien
ctggcccggtagctcatgagggaat

SEQ ID NO: 3560196 - DNA, 25 bp, Homo sapien
tcagtacagagctggcccggtagct

SEQ ID NO: 3560197 - DNA, 25 bp, Homo sapien
tgagggaattcatggtgaccatctc

SEQ ID NO: 3560198 - DNA, 25 bp, Homo sapien
cagcatggcgctgacgttgttgatt

SEQ ID NO: 3560199 - DNA, 25 bp, Homo sapien
agcatggcgctgacgttgttgattt

SEQ ID NO: 3560200 - DNA, 25 bp, Homo sapien
gcatggcgctgacgttgttgatttg

SEQ ID NO: 3560201 - DNA, 25 bp, Homo sapien
aaggagtggactttctgaccccagg

SEQ ID NO: 3560202 - DNA, 25 bp, Homo sapien
ctgacgattcaaggccacatgtggc

SEQ ID NO: 3560203 - DNA, 25 bp, Homo sapien
tctgtctgacccaggctaactgacg

SEQ ID NO: 3560204 - DNA, 25 bp, Homo sapien
tgacccaaagtgagcagactccctt

SEQ ID NO: 3560205 - DNA, 25 bp, Homo sapien
cagttgagggttgcagaaaccttac

SEQ ID NO: 3560206 - DNA, 25 bp, Homo sapien
tgcatttagagtacccccgtcttcc

SEQ ID NO: 3560207 - DNA, 25 bp, Homo sapien
catttaaccgttagaattgcattta

SEQ ID NO: 3560208 - DNA, 25 bp, Homo sapien
tgtcagttgagggttgcagaaacct

SEQ ID NO: 3560209 - DNA, 25 bp, Homo sapien
ctaatgtaaaagtccccctgcgagt

SEQ ID NO: 3560210 - DNA, 25 bp, Homo sapien
cctaatgtaaaagtccccctgcgag

SEQ ID NO: 3560211 - DNA, 25 bp, Homo sapien
acgctccgctccgaggtgatggtca

SEQ ID NO: 3560212 - DNA, 25 bp, Homo sapien
catgtagcggtgcacaatggatgaa

SEQ ID NO: 3560213 - DNA, 25 bp, Homo sapien
tctgaaaggcattgtaggcaccggg

SEQ ID NO: 3560214 - DNA, 25 bp, Homo sapien
tggatctggaacacgtcagcgggca

SEQ ID NO: 3560215 - DNA, 25 bp, Homo sapien
agggttggaggccgggcagagacag

SEQ ID NO: 3560216 - DNA, 25 bp, Homo sapien
gttggaggccgggcagagacagcgg

SEQ ID NO: 3560217 - DNA, 25 bp, Homo sapien
catagagggttggaggccgggcaga

SEQ ID NO: 3560218 - DNA, 25 bp, Homo sapien
ctgctctcgacatagagggttggag

SEQ ID NO: 3560219 - DNA, 25 bp, Homo sapien
ggtgggggacacaaatgagctcctt

SEQ ID NO: 3560220 - DNA, 25 bp, Homo sapien
gggacacaaatgagctccttgcccg

SEQ ID NO: 3560221 - DNA, 25 bp, Homo sapien
tagagaccccgaggtgggggacaca

SEQ ID NO: 3560222 - DNA, 25 bp, Homo sapien
gacacaaatgagctccttgcccgtc

SEQ ID NO: 3560223 - DNA, 25 bp, Homo sapien
tggatgtagggctccacgcagcggt

SEQ ID NO: 3560224 - DNA, 25 bp, Homo sapien
tggtgcgcaccagactcacactcat

SEQ ID NO: 3560225 - DNA, 25 bp, Homo sapien
ccccatggaagttgacacaggtttg

SEQ ID NO: 3560226 - DNA, 25 bp, Homo sapien
ttggtgtccacgcagcggtagcccc

SEQ ID NO: 3560227 - DNA, 25 bp, Homo sapien
atcgggggcgtcaggctgccagctc

SEQ ID NO: 3560228 - DNA, 25 bp, Homo sapien
gctcctgacaccgtcctgcccatcc

SEQ ID NO: 3560229 - DNA, 25 bp, Homo sapien
agaggggctggaatcgggggcgtca

SEQ ID NO: 3560230 - DNA, 25 bp, Homo sapien
ccagctcctgacaccgtcctgccca

SEQ ID NO: 3560231 - DNA, 25 bp, Homo sapien
caggagaaacggcctggctcgttga

SEQ ID NO: 3560232 - DNA, 25 bp, Homo sapien
tactgacagaggtagctggagtagc

SEQ ID NO: 3560233 - DNA, 25 bp, Homo sapien
ctggctcgttgatgcagcggtactg

SEQ ID NO: 3560234 - DNA, 25 bp, Homo sapien
tggcagaggcgtgtggccagcagct

SEQ ID NO: 3560235 - DNA, 25 bp, Homo sapien
tcagggaatacactacgagggcagg

SEQ ID NO: 3560236 - DNA, 25 bp, Homo sapien
ctgatatgtgggacaggtggcaccc

SEQ ID NO: 3560237 - DNA, 25 bp, Homo sapien
tcaccagtaggcttcagtaaggacg

SEQ ID NO: 3560238 - DNA, 25 bp, Homo sapien
taagaagtctgggatccagccctgg

SEQ ID NO: 3560239 - DNA, 25 bp, Homo sapien
gaagccatcccgatgcagctcatag

SEQ ID NO: 3560240 - DNA, 25 bp, Homo sapien
gctcatagccctggtggcagcgaca

SEQ ID NO: 3560241 - DNA, 25 bp, Homo sapien
aagcagcgctgctcgcatggggccc

SEQ ID NO: 3560242 - DNA, 25 bp, Homo sapien
agcgacacaggaaggtcccatagga

SEQ ID NO: 3560243 - DNA, 25 bp, Homo sapien
ctggaagcccggctcgcactggcag

SEQ ID NO: 3560244 - DNA, 25 bp, Homo sapien
tagcggtagcggcactcgtctatgt

SEQ ID NO: 3560245 - DNA, 25 bp, Homo sapien
gcaggttcacgcagcggtgctggca

SEQ ID NO: 3560246 - DNA, 25 bp, Homo sapien
acacaggagcggttgttaggcccca

SEQ ID NO: 3560247 - DNA, 25 bp, Homo sapien
ttgcggtaaccatcagggcaggtgc

SEQ ID NO: 3560248 - DNA, 25 bp, Homo sapien
acactcgggcccgatcttgcggtaa

SEQ ID NO: 3560249 - DNA, 25 bp, Homo sapien
caggcaagttatggcagtcctggct

SEQ ID NO: 3560250 - DNA, 25 bp, Homo sapien
caggtgcactgataggagccaggca

SEQ ID NO: 3560251 - DNA, 25 bp, Homo sapien
tctgagtttaagacgcctggtgaga

SEQ ID NO: 3560252 - DNA, 25 bp, Homo sapien
cctgcggcaggtcctaaacaacatg

SEQ ID NO: 3560253 - DNA, 25 bp, Homo sapien
tattcggttctctcaacagcacgcg

SEQ ID NO: 3560254 - DNA, 25 bp, Homo sapien
cgcgtaagagttcaccagcctggag

SEQ ID NO: 3560255 - DNA, 25 bp, Homo sapien
ggtgttgagcgggaggcactggtgg

SEQ ID NO: 3560256 - DNA, 25 bp, Homo sapien
gctgtcctgatcgtcgggctcatag

SEQ ID NO: 3560257 - DNA, 25 bp, Homo sapien
tgatcgtcgggctcatagcctggtg

SEQ ID NO: 3560258 - DNA, 25 bp, Homo sapien
ggtccctcgccgtgtaggtcgttga

SEQ ID NO: 3560259 - DNA, 25 bp, Homo sapien
gggcaggcacaagtagcccccgtag

SEQ ID NO: 3560260 - DNA, 25 bp, Homo sapien
ggcctcagggatggtcagacactcg

SEQ ID NO: 3560261 - DNA, 25 bp, Homo sapien
tagtggttgatgcacttcatttccc

SEQ ID NO: 3560262 - DNA, 25 bp, Homo sapien
cagggatggtcagacactcgttgac

SEQ ID NO: 3560263 - DNA, 25 bp, Homo sapien
gcctgctgggcacagccagtctcct

SEQ ID NO: 3560264 - DNA, 25 bp, Homo sapien
ctgggcacagccagtctcctgggct

SEQ ID NO: 3560265 - DNA, 25 bp, Homo sapien
ctgctgggcacagccagtctcctgg

SEQ ID NO: 3560266 - DNA, 25 bp, Homo sapien
ctgcagagaggggcctgctgggcac

SEQ ID NO: 3560267 - DNA, 25 bp, Homo sapien
gcagctatcaatccctttccgggtt

SEQ ID NO: 3560268 - DNA, 25 bp, Homo sapien
tgccctcattctcggcctgcaagtg

SEQ ID NO: 3560269 - DNA, 25 bp, Homo sapien
ttcagagaaggcgtacaggatccag

SEQ ID NO: 3560270 - DNA, 25 bp, Homo sapien
taccctcccaggttgtgatgagaca

SEQ ID NO: 3560271 - DNA, 25 bp, Homo sapien
cccggcagtgctggctgtctgggtc

SEQ ID NO: 3560272 - DNA, 25 bp, Homo sapien
gtcccactcatagccatctgtgcat

SEQ ID NO: 3560273 - DNA, 25 bp, Homo sapien
tgggtcccactcatagccatctgtg

SEQ ID NO: 3560274 - DNA, 25 bp, Homo sapien
tgtctgggtcccactcatagccatc

SEQ ID NO: 3560275 - DNA, 25 bp, Homo sapien
tcgggctcttcagaatcctgaggag

SEQ ID NO: 3560276 - DNA, 25 bp, Homo sapien
gaagctgatcccaagagcaacagta

SEQ ID NO: 3560277 - DNA, 25 bp, Homo sapien
agcaacagtagcagcgcccagagca

SEQ ID NO: 3560278 - DNA, 25 bp, Homo sapien
cgtgtagctgtcgggctcttcagaa

SEQ ID NO: 3560279 - DNA, 25 bp, Homo sapien
actgcccgctcaggaccgtgcttgg

SEQ ID NO: 3560280 - DNA, 25 bp, Homo sapien
tcaactccctgtaccgggagcccga

SEQ ID NO: 3560281 - DNA, 25 bp, Homo sapien
cccctgcggcgaaggccgaggagcg

SEQ ID NO: 3560282 - DNA, 25 bp, Homo sapien
ggagcgcgggcctctgtgggcgcta

SEQ ID NO: 3560283 - DNA, 25 bp, Homo sapien
atgcctgcgggcagacggacgggcg

SEQ ID NO: 3560284 - DNA, 25 bp, Homo sapien
ccgcccgcccttcggcggattcctg

SEQ ID NO: 3560285 - DNA, 25 bp, Homo sapien
gctcggctggctcgggcaatgcctg

SEQ ID NO: 3560286 - DNA, 25 bp, Homo sapien
cttcggcggattcctgagccagcgc

SEQ ID NO: 3560287 - DNA, 25 bp, Homo sapien
tcccttttggcacaaaatgaatgga

SEQ ID NO: 3560288 - DNA, 25 bp, Homo sapien
gacaccattccctgagatatgtctc

SEQ ID NO: 3560289 - DNA, 25 bp, Homo sapien
tgtctcagttcccaaggagccactg

SEQ ID NO: 3560290 - DNA, 25 bp, Homo sapien
catccttgtacacggacaccaggtg

SEQ ID NO: 3560291 - DNA, 25 bp, Homo sapien
acaccaggtgctcagagacagacac

SEQ ID NO: 3560292 - DNA, 25 bp, Homo sapien
cagtcatgatacaggcgcaggaggc

SEQ ID NO: 3560293 - DNA, 25 bp, Homo sapien
agtcatgatacaggcgcaggaggca

SEQ ID NO: 3560294 - DNA, 25 bp, Homo sapien
ccatgtagcggtcccagagggcctg

SEQ ID NO: 3560295 - DNA, 25 bp, Homo sapien
agccgcggagggtgcccatgtagcg

SEQ ID NO: 3560296 - DNA, 25 bp, Homo sapien
cggaagccatcgagggagtggacag

SEQ ID NO: 3560297 - DNA, 25 bp, Homo sapien
gaatactgattcaggaagaaccgca

SEQ ID NO: 3560298 - DNA, 25 bp, Homo sapien
agaaccgcacgtcgctgagtggcca

SEQ ID NO: 3560299 - DNA, 25 bp, Homo sapien
gtggccagtggtcggagcggcaggg

SEQ ID NO: 3560300 - DNA, 25 bp, Homo sapien
gtctctgacatctttattgtgggtc

SEQ ID NO: 3560301 - DNA, 25 bp, Homo sapien
ttattgtgggtcagcttggcggcca

SEQ ID NO: 3560302 - DNA, 25 bp, Homo sapien
gacatctttattgtgggtcagcttg

SEQ ID NO: 3560303 - DNA, 25 bp, Homo sapien
cttctccacgaggtccacaaacagg

SEQ ID NO: 3560304 - DNA, 25 bp, Homo sapien
ctgtggggcagggatccttggagct

SEQ ID NO: 3560305 - DNA, 25 bp, Homo sapien
ggcagggatccttggagctctgctt

SEQ ID NO: 3560306 - DNA, 25 bp, Homo sapien
gcagggatccttggagctctgcttt

SEQ ID NO: 3560307 - DNA, 25 bp, Homo sapien
tggggcagggatccttggagctctg

SEQ ID NO: 3560308 - DNA, 25 bp, Homo sapien
tgtttatgagctgctcccgtcagcg

SEQ ID NO: 3560309 - DNA, 25 bp, Homo sapien
cattgtttatgagctgctcccgtca

SEQ ID NO: 3560310 - DNA, 25 bp, Homo sapien
tttatgagctgctcccgtcagcggc

SEQ ID NO: 3560311 - DNA, 25 bp, Homo sapien
ttgtttatgagctgctcccgtcagc

SEQ ID NO: 3560312 - DNA, 25 bp, Homo sapien
ctgccggccaatccctggcaggggc

SEQ ID NO: 3560313 - DNA, 25 bp, Homo sapien
gggtggcgaactggaggctgaagat

SEQ ID NO: 3560314 - DNA, 25 bp, Homo sapien
ggtaggggtggcgaactggaggctg

SEQ ID NO: 3560315 - DNA, 25 bp, Homo sapien
gctgcccggtaggggtggcgaactg

SEQ ID NO: 3560316 - DNA, 25 bp, Homo sapien
ttccccggagagcagtgcacaccag

SEQ ID NO: 3560317 - DNA, 25 bp, Homo sapien
aagacgcccagctttccccggagag

SEQ ID NO: 3560318 - DNA, 25 bp, Homo sapien
agacagggtcacgcctatagccacc

SEQ ID NO: 3560319 - DNA, 25 bp, Homo sapien
acagggtcacgcctatagccacctg

SEQ ID NO: 3560320 - DNA, 25 bp, Homo sapien
cagggtcacgcctatagccacctgg

SEQ ID NO: 3560321 - DNA, 25 bp, Homo sapien
gggtcacgcctatagccacctgggc

SEQ ID NO: 3560322 - DNA, 25 bp, Homo sapien
gcaggtccagaaggtccttgtcagc

SEQ ID NO: 3560323 - DNA, 25 bp, Homo sapien
ccttgtcagccactagcaccttgag

SEQ ID NO: 3560324 - DNA, 25 bp, Homo sapien
tgtcagccactagcaccttgagctc

SEQ ID NO: 3560325 - DNA, 25 bp, Homo sapien
gaaggtccttgtcagccactagcac

SEQ ID NO: 3560326 - DNA, 25 bp, Homo sapien
aattccttgtctaagtccatgtcca

SEQ ID NO: 3560327 - DNA, 25 bp, Homo sapien
aaattccttgtctaagtccatgtcc

SEQ ID NO: 3560328 - DNA, 25 bp, Homo sapien
gaaattccttgtctaagtccatgtc

SEQ ID NO: 3560329 - DNA, 25 bp, Homo sapien
attccttgtctaagtccatgtccat

SEQ ID NO: 3560330 - DNA, 25 bp, Homo sapien
tgataaaaacccctcctgtgatagc

SEQ ID NO: 3560331 - DNA, 25 bp, Homo sapien
tcagagagatggagtgacatgcccc

SEQ ID NO: 3560332 - DNA, 25 bp, Homo sapien
aacaggagcggatgccaggaactga

SEQ ID NO: 3560333 - DNA, 25 bp, Homo sapien
tgtgatagcctaagcctttcctcac

SEQ ID NO: 3560334 - DNA, 25 bp, Homo sapien
tccctgtctcaaagcggttgttagc

SEQ ID NO: 3560335 - DNA, 25 bp, Homo sapien
gcagaaggcaaagtcaccgaagctc

SEQ ID NO: 3560336 - DNA, 25 bp, Homo sapien
gatcatgagctcagcgcagaaggca

SEQ ID NO: 3560337 - DNA, 25 bp, Homo sapien
cgacggctccaagggtccagttttg

SEQ ID NO: 3560338 - DNA, 25 bp, Homo sapien
tgcacagacgagaggagggtcctct

SEQ ID NO: 3560339 - DNA, 25 bp, Homo sapien
gcacagacgagaggagggtcctctt

SEQ ID NO: 3560340 - DNA, 25 bp, Homo sapien
ctgcacagacgagaggagggtcctc

SEQ ID NO: 3560341 - DNA, 25 bp, Homo sapien
ccagggagccccgcatttcctctac

SEQ ID NO: 3560342 - DNA, 25 bp, Homo sapien
gggagccccgcatttcctctaccac

SEQ ID NO: 3560343 - DNA, 25 bp, Homo sapien
ctggccaaccggtcagagaggagga

SEQ ID NO: 3560344 - DNA, 25 bp, Homo sapien
ttgtccaccagggagccccgcattt

SEQ ID NO: 3560345 - DNA, 25 bp, Homo sapien
gatgctgtgtccgtgtggatgcagt

SEQ ID NO: 3560346 - DNA, 25 bp, Homo sapien
gggagtgaagtgtagatgggatgct

SEQ ID NO: 3560347 - DNA, 25 bp, Homo sapien
aagggaggagaagactaggtatgaa

SEQ ID NO: 3560348 - DNA, 25 bp, Homo sapien
ggaagggaggagaagactaggtatg

SEQ ID NO: 3560349 - DNA, 25 bp, Homo sapien
gggtgatgcctgttttggtgctgat

SEQ ID NO: 3560350 - DNA, 25 bp, Homo sapien
agggtgatgcctgttttggtgctga

SEQ ID NO: 3560351 - DNA, 25 bp, Homo sapien
ttgagggtgatgcctgttttggtgc

SEQ ID NO: 3560352 - DNA, 25 bp, Homo sapien
tgagggtgatgcctgttttggtgct

SEQ ID NO: 3560353 - DNA, 25 bp, Homo sapien
tcccgaacaaaggcctcatcaaagg

SEQ ID NO: 3560354 - DNA, 25 bp, Homo sapien
ctcccgaacaaaggcctcatcaaag

SEQ ID NO: 3560355 - DNA, 25 bp, Homo sapien
cattgaccctccataaaagacagga

SEQ ID NO: 3560356 - DNA, 25 bp, Homo sapien
tgggcctgtttcagccggcaaaatg

SEQ ID NO: 3560357 - DNA, 25 bp, Homo sapien
cttgtggagtcagagaacaccattg

SEQ ID NO: 3560358 - DNA, 25 bp, Homo sapien
cggcaaaatgggtatacagtcagac

SEQ ID NO: 3560359 - DNA, 25 bp, Homo sapien
tggtgcagtagcttgggcggcgcat

SEQ ID NO: 3560360 - DNA, 25 bp, Homo sapien
ccgggagggcggaatctggaagatg

SEQ ID NO: 3560361 - DNA, 25 bp, Homo sapien
ctctcgatgagtagtgcctgccggg

SEQ ID NO: 3560362 - DNA, 25 bp, Homo sapien
aatggtccatggtgtcgctctgcag

SEQ ID NO: 3560363 - DNA, 25 bp, Homo sapien
cccgccgacgccagaggcccttaag

SEQ ID NO: 3560364 - DNA, 25 bp, Homo sapien
aagcggacgctagcatcaggccccg

SEQ ID NO: 3560365 - DNA, 25 bp, Homo sapien
ctggaaagcggacgctagcatcagg

SEQ ID NO: 3560366 - DNA, 25 bp, Homo sapien
ggaaagcggacgctagcatcaggcc

SEQ ID NO: 3560367 - DNA, 25 bp, Homo sapien
catcgagccagaggcgatacacgtc

SEQ ID NO: 3560368 - DNA, 25 bp, Homo sapien
gatacacgtcctcgtcgataagggt

SEQ ID NO: 3560369 - DNA, 25 bp, Homo sapien
gttccccacgaagatgtccagctca

SEQ ID NO: 3560370 - DNA, 25 bp, Homo sapien
cgagtaaccatcgagccagaggcga

SEQ ID NO: 3560371 - DNA, 25 bp, Homo sapien
gagcaggagcgagcactgctcggga

SEQ ID NO: 3560372 - DNA, 25 bp, Homo sapien
gcgagcactgctcgggactggcgcg

SEQ ID NO: 3560373 - DNA, 25 bp, Homo sapien
cgagattccgctcgcggcatcggga

SEQ ID NO: 3560374 - DNA, 25 bp, Homo sapien
gcgccgccttcaggccacttccggg

SEQ ID NO: 3560375 - DNA, 25 bp, Homo sapien
ttggttaaatttatttctgcatggg

SEQ ID NO: 3560376 - DNA, 25 bp, Homo sapien
ggttaaatttatttctgcatgggcc

SEQ ID NO: 3560377 - DNA, 25 bp, Homo sapien
tattttggttaaatttatttctgca

SEQ ID NO: 3560378 - DNA, 25 bp, Homo sapien
ttttggttaaatttatttctgcatg

SEQ ID NO: 3560379 - DNA, 25 bp, Homo sapien
tgtttctcagaagagccgagaggcc

SEQ ID NO: 3560380 - DNA, 25 bp, Homo sapien
tagtgggccgagacttccgaatttg

SEQ ID NO: 3560381 - DNA, 25 bp, Homo sapien
aaccaggagcgatccttagtgggcc

SEQ ID NO: 3560382 - DNA, 25 bp, Homo sapien
tattggtgagctaggacgtttggac

SEQ ID NO: 3560383 - DNA, 25 bp, Homo sapien
ctcaaccggcgtctgcaggcagaga

SEQ ID NO: 3560384 - DNA, 25 bp, Homo sapien
tgcttcctggactcggagcgccagc

SEQ ID NO: 3560385 - DNA, 25 bp, Homo sapien
gcagagaaccgtgagctgcgcgacc

SEQ ID NO: 3560386 - DNA, 25 bp, Homo sapien
gcgagatccgcgagctcaagcagct

SEQ ID NO: 3560387 - DNA, 25 bp, Homo sapien
ctagcgcttaaggagctctgcctgg

SEQ ID NO: 3560388 - DNA, 25 bp, Homo sapien
ctgcctggcgctgggcgaagaatgg

SEQ ID NO: 3560389 - DNA, 25 bp, Homo sapien
gcggcgccgggggatcaggagccgg

SEQ ID NO: 3560390 - DNA, 25 bp, Homo sapien
aggagccgggccagcacccgagctt

SEQ ID NO: 3560391 - DNA, 25 bp, Homo sapien
caattcccatccagaaggactgcag

SEQ ID NO: 3560392 - DNA, 25 bp, Homo sapien
tgggacctagggctccaaatactct

SEQ ID NO: 3560393 - DNA, 25 bp, Homo sapien
cagcgtctgtttggtactcgccggg

SEQ ID NO: 3560394 - DNA, 25 bp, Homo sapien
ggccgctggcatggactaagaaatc

SEQ ID NO: 3560395 - DNA, 25 bp, Homo sapien
ctgcagggagtagggctcaggcgcc

SEQ ID NO: 3560396 - DNA, 25 bp, Homo sapien
ggcgcctcctgagctgtgcggttca

SEQ ID NO: 3560397 - DNA, 25 bp, Homo sapien
agacattggctagggtggcatctgc

SEQ ID NO: 3560398 - DNA, 25 bp, Homo sapien
aggagatagggttgggtggatcaca

SEQ ID NO: 3560399 - DNA, 25 bp, Homo sapien
tcgctgcagcccagatttctcatct

SEQ ID NO: 3560400 - DNA, 25 bp, Homo sapien
tactcttgcgatgagctgaggcaca

SEQ ID NO: 3560401 - DNA, 25 bp, Homo sapien
tggtgccactggtactgcctgtgtc

SEQ ID NO: 3560402 - DNA, 25 bp, Homo sapien
tccttccgggattttgcagatgggt

SEQ ID NO: 3560403 - DNA, 25 bp, Homo sapien
cgcctgcaggaagtcggtcagttcc

SEQ ID NO: 3560404 - DNA, 25 bp, Homo sapien
tcgcgccttactcggcggcgctcct

SEQ ID NO: 3560405 - DNA, 25 bp, Homo sapien
gtcagttccttcctccggttcctgc

SEQ ID NO: 3560406 - DNA, 25 bp, Homo sapien
agccagcttgttccgctcgcgcctt

SEQ ID NO: 3560407 - DNA, 25 bp, Homo sapien
tgtgccagccaagtactttacgtag

SEQ ID NO: 3560408 - DNA, 25 bp, Homo sapien
ccatgagctgtaagcactaggaggg

SEQ ID NO: 3560409 - DNA, 25 bp, Homo sapien
aggaagccgtcttattccccagcca

SEQ ID NO: 3560410 - DNA, 25 bp, Homo sapien
tcatggtggcccagtggtaggaccc

SEQ ID NO: 3560411 - DNA, 25 bp, Homo sapien
acccaggatcaaagggtcaccctca

SEQ ID NO: 3560412 - DNA, 25 bp, Homo sapien
cccaggatcaaagggtcaccctcag

SEQ ID NO: 3560413 - DNA, 25 bp, Homo sapien
caggatcaaagggtcaccctcagga

SEQ ID NO: 3560414 - DNA, 25 bp, Homo sapien
aggatcaaagggtcaccctcaggac

SEQ ID NO: 3560415 - DNA, 25 bp, Homo sapien
ccctctatgcatgtcagcaggtgga

SEQ ID NO: 3560416 - DNA, 25 bp, Homo sapien
gactttagagttgtatagacctggg

SEQ ID NO: 3560417 - DNA, 25 bp, Homo sapien
ggaaaaccagagtacattccccaga

SEQ ID NO: 3560418 - DNA, 25 bp, Homo sapien
ggagccaagaattgtcagttccctc

SEQ ID NO: 3560419 - DNA, 25 bp, Homo sapien
caaggccttcgacgtacccctggag

SEQ ID NO: 3560420 - DNA, 25 bp, Homo sapien
tgttcacaaggccttcgacgtaccc

SEQ ID NO: 3560421 - DNA, 25 bp, Homo sapien
tgttgatgcttggcaccaggtggaa

SEQ ID NO: 3560422 - DNA, 25 bp, Homo sapien
cggatgactcctggccggggttgtg

SEQ ID NO: 3560423 - DNA, 25 bp, Homo sapien
caatgtacaggctagctctgggaac

SEQ ID NO: 3560424 - DNA, 25 bp, Homo sapien
aaatccctgctcataagctgtgtgg

SEQ ID NO: 3560425 - DNA, 25 bp, Homo sapien
gggcagaggctacactgctgtctac

SEQ ID NO: 3560426 - DNA, 25 bp, Homo sapien
tcagagactgacctggtggcaaatc

SEQ ID NO: 3560427 - DNA, 25 bp, Homo sapien
tcgcagcccctcgacaggaaatggg

SEQ ID NO: 3560428 - DNA, 25 bp, Homo sapien
cgagaaacgatagggacttggcgac

SEQ ID NO: 3560429 - DNA, 25 bp, Homo sapien
gagaagtgggttctagctctgccgc

SEQ ID NO: 3560430 - DNA, 25 bp, Homo sapien
gaacctcgaggtctctattcgccgc

SEQ ID NO: 3560431 - DNA, 25 bp, Homo sapien
tgcgcggggccgccgtacccgccgc

SEQ ID NO: 3560432 - DNA, 25 bp, Homo sapien
ctgctgggctgcctgcgctgcggcc

SEQ ID NO: 3560433 - DNA, 25 bp, Homo sapien
tgctgggctgcctgcgctgcggccg

SEQ ID NO: 3560434 - DNA, 25 bp, Homo sapien
ggctgcgcggggccgccgtacccgc

SEQ ID NO: 3560435 - DNA, 25 bp, Homo sapien
tttatgaatgaaaagttctcgggct

SEQ ID NO: 3560436 - DNA, 25 bp, Homo sapien
cgcgccgtgcggagtcttttctttt

SEQ ID NO: 3560437 - DNA, 25 bp, Homo sapien
tctgcggggtacacggctgctgggt

SEQ ID NO: 3560438 - DNA, 25 bp, Homo sapien
gaatgaaaagttctcgggctgaacc

SEQ ID NO: 3560439 - DNA, 25 bp, Homo sapien
agacgcgccgccttggcccgtcggt

SEQ ID NO: 3560440 - DNA, 25 bp, Homo sapien
cacctccaggctccacccccgagac

SEQ ID NO: 3560441 - DNA, 25 bp, Homo sapien
tcggtcccgaacttggcgacgcctc

SEQ ID NO: 3560442 - DNA, 25 bp, Homo sapien
gggcgttgcagcggcgcggtcacct

SEQ ID NO: 3560443 - DNA, 25 bp, Homo sapien
gccaggagagaaccccagggggcca

SEQ ID NO: 3560444 - DNA, 25 bp, Homo sapien
ccagggaggccaggagagaacccca

SEQ ID NO: 3560445 - DNA, 25 bp, Homo sapien
ggagagaaccccagggggccacagc

SEQ ID NO: 3560446 - DNA, 25 bp, Homo sapien
agcttccacccagggaggccaggag

SEQ ID NO: 3560447 - DNA, 25 bp, Homo sapien
cattacaaagggaggctgaaggctc

SEQ ID NO: 3560448 - DNA, 25 bp, Homo sapien
cagggatgggcaagcctcatgtcca

SEQ ID NO: 3560449 - DNA, 25 bp, Homo sapien
ttgtgtcagccctgaacagagggca

SEQ ID NO: 3560450 - DNA, 25 bp, Homo sapien
caggtagttcccaagtgacctagga

SEQ ID NO: 3560451 - DNA, 25 bp, Homo sapien
ttgttggcacggtcaagcactcggg

SEQ ID NO: 3560452 - DNA, 25 bp, Homo sapien
gattggcccggtagatgcccaggta

SEQ ID NO: 3560453 - DNA, 25 bp, Homo sapien
taggtgagcaggcacttaatgcccg

SEQ ID NO: 3560454 - DNA, 25 bp, Homo sapien
ttaatgcccgctgcacggatggctg

SEQ ID NO: 3560455 - DNA, 25 bp, Homo sapien
gataacaactgttcctgtcccgtag

SEQ ID NO: 3560456 - DNA, 25 bp, Homo sapien
gacaataactacagatgccaggcac

SEQ ID NO: 3560457 - DNA, 25 bp, Homo sapien
taagagttactgtcgatgcgcctca

SEQ ID NO: 3560458 - DNA, 25 bp, Homo sapien
ccaggcactggattaaactgtggcc

SEQ ID NO: 3560459 - DNA, 25 bp, Homo sapien
gccttcgctgcgttcgacgccggcc

SEQ ID NO: 3560460 - DNA, 25 bp, Homo sapien
ggccttcgctgcgttcgacgccggc

SEQ ID NO: 3560461 - DNA, 25 bp, Homo sapien
ttcgctgcgttcgacgccggcccag

SEQ ID NO: 3560462 - DNA, 25 bp, Homo sapien
tccggccttcgctgcgttcgacgcc

SEQ ID NO: 3560463 - DNA, 25 bp, Homo sapien
tagcgccgcgccacctcaacaacaa

SEQ ID NO: 3560464 - DNA, 25 bp, Homo sapien
atcttagcgccgcgccacctcaaca

SEQ ID NO: 3560465 - DNA, 25 bp, Homo sapien
ctgccgtggctccgcgccaccgcca

SEQ ID NO: 3560466 - DNA, 25 bp, Homo sapien
cgccatcttagcgccgcgccacctc

SEQ ID NO: 3560467 - DNA, 25 bp, Homo sapien
tgttctcccgaaagatcctgctcca

SEQ ID NO: 3560468 - DNA, 25 bp, Homo sapien
gaagaagattacgactcctagcgcc

SEQ ID NO: 3560469 - DNA, 25 bp, Homo sapien
aataactgaggagggcttgaaggca

SEQ ID NO: 3560470 - DNA, 25 bp, Homo sapien
tctgcgcaggacgtcatggttgcca

SEQ ID NO: 3560471 - DNA, 25 bp, Homo sapien
taagtggtcacatacgggccagatc

SEQ ID NO: 3560472 - DNA, 25 bp, Homo sapien
ccaggacagagcaaccctacgcagc

SEQ ID NO: 3560473 - DNA, 25 bp, Homo sapien
gactagggacaaatactctgttaag

SEQ ID NO: 3560474 - DNA, 25 bp, Homo sapien
ggaaatacaggactagggacaaata

SEQ ID NO: 3560475 - DNA, 25 bp, Homo sapien
tattgaaagggagtctcactatgtc

SEQ ID NO: 3560476 - DNA, 25 bp, Homo sapien
gaaagggagtctcactatgtcaccc

SEQ ID NO: 3560477 - DNA, 25 bp, Homo sapien
aagggagtctcactatgtcacccag

SEQ ID NO: 3560478 - DNA, 25 bp, Homo sapien
ttgaaagggagtctcactatgtcac

SEQ ID NO: 3560479 - DNA, 25 bp, Homo sapien
tgaccttctgccaagattgaccagc

SEQ ID NO: 3560480 - DNA, 25 bp, Homo sapien
ggatacagccaagattacaaacata

SEQ ID NO: 3560481 - DNA, 25 bp, Homo sapien
tataagtgggaaatacggtaagagc

SEQ ID NO: 3560482 - DNA, 25 bp, Homo sapien
tacaaataactttgcgccagtaagt

SEQ ID NO: 3560483 - DNA, 25 bp, Homo sapien
gcaaggatatcttaacgtgagagaa

SEQ ID NO: 3560484 - DNA, 25 bp, Homo sapien
aaccatgtggtgagctcagactgcc

SEQ ID NO: 3560485 - DNA, 25 bp, Homo sapien
caccacatttacagattagaagagg

SEQ ID NO: 3560486 - DNA, 25 bp, Homo sapien
taccagagaaccaaatccggcagta

SEQ ID NO: 3560487 - DNA, 25 bp, Homo sapien
taaggaagacctcttgcaaagctag

SEQ ID NO: 3560488 - DNA, 25 bp, Homo sapien
tgaaattaaattagctaagcacaca

SEQ ID NO: 3560489 - DNA, 25 bp, Homo sapien
gcacacatctcaagaacccagaatg

SEQ ID NO: 3560490 - DNA, 25 bp, Homo sapien
tagaagaaaacatatagccctgaat

SEQ ID NO: 3560491 - DNA, 25 bp, Homo sapien
ggtggactacggaattgatgctaca

SEQ ID NO: 3560492 - DNA, 25 bp, Homo sapien
tgggagattctacagcacgctcgac

SEQ ID NO: 3560493 - DNA, 25 bp, Homo sapien
tacgacaggaagatatgtgcacatc

SEQ ID NO: 3560494 - DNA, 25 bp, Homo sapien
ttttgaaacagacatcccagagtag

SEQ ID NO: 3560495 - DNA, 25 bp, Homo sapien
taggtcctagggctgtcatcctgaa

SEQ ID NO: 3560496 - DNA, 25 bp, Homo sapien
ggatagagagatttgccagccacct

SEQ ID NO: 3560497 - DNA, 25 bp, Homo sapien
ctgttaaacacatgcaagaaggccc

SEQ ID NO: 3560498 - DNA, 25 bp, Homo sapien
tgagcactcccgtacacagggtgac

SEQ ID NO: 3560499 - DNA, 25 bp, Homo sapien
tgtcctcatgcaggggtgaagatgt

SEQ ID NO: 3560500 - DNA, 25 bp, Homo sapien
ccctgggaatgtccaagcccagaag

SEQ ID NO: 3560501 - DNA, 25 bp, Homo sapien
cctgagcaagtggagaattgggtcc

SEQ ID NO: 3560502 - DNA, 25 bp, Homo sapien
cctcatgcaggggtgaagatgtgca

SEQ ID NO: 3560503 - DNA, 25 bp, Homo sapien
agaatcatcttctgagctggactcc

SEQ ID NO: 3560504 - DNA, 25 bp, Homo sapien
gtgttaacaaacaggtcagaatcat

SEQ ID NO: 3560505 - DNA, 25 bp, Homo sapien
atactgtctgcggtttgtgttaaca

SEQ ID NO: 3560506 - DNA, 25 bp, Homo sapien
tctcctgataactgtggctcagctg

SEQ ID NO: 3560507 - DNA, 25 bp, Homo sapien
gtgtttctcagccacttcagagaag

SEQ ID NO: 3560508 - DNA, 25 bp, Homo sapien
tgtttctcagccacttcagagaagg

SEQ ID NO: 3560509 - DNA, 25 bp, Homo sapien
ttctcagccacttcagagaaggcct

SEQ ID NO: 3560510 - DNA, 25 bp, Homo sapien
gttgtgtttctcagccacttcagag

SEQ ID NO: 3560511 - DNA, 25 bp, Homo sapien
ccttgcagagcacaaacgagatttc

SEQ ID NO: 3560512 - DNA, 25 bp, Homo sapien
agagcgcacgtggtccttgcagagc

SEQ ID NO: 3560513 - DNA, 25 bp, Homo sapien
cgagatttcagccttcaccttttct

SEQ ID NO: 3560514 - DNA, 25 bp, Homo sapien
ctgcagagagcgcacgtggtccttg

SEQ ID NO: 3560515 - DNA, 25 bp, Homo sapien
ccagatgttcttgcggtatttggag

SEQ ID NO: 3560516 - DNA, 25 bp, Homo sapien
tgttcttgcggtatttggagggcat

SEQ ID NO: 3560517 - DNA, 25 bp, Homo sapien
ctctcttgatccagatgttcttgcg

SEQ ID NO: 3560518 - DNA, 25 bp, Homo sapien
tgcggtatttggagggcatgctcac

SEQ ID NO: 3560519 - DNA, 25 bp, Homo sapien
ggaagcgctgcccttgggctgtctc

SEQ ID NO: 3560520 - DNA, 25 bp, Homo sapien
aagcgctgcccttgggctgtctcca

SEQ ID NO: 3560521 - DNA, 25 bp, Homo sapien
caggaagcgctgcccttgggctgtc

SEQ ID NO: 3560522 - DNA, 25 bp, Homo sapien
agcgctgcccttgggctgtctccac

SEQ ID NO: 3560523 - DNA, 25 bp, Homo sapien
gattgttccctggggtcctgagtac

SEQ ID NO: 3560524 - DNA, 25 bp, Homo sapien
tcatgcagattgttccctggggtcc

SEQ ID NO: 3560525 - DNA, 25 bp, Homo sapien
ctcatgcagattgttccctggggtc

SEQ ID NO: 3560526 - DNA, 25 bp, Homo sapien
tgcagattgttccctggggtcctga

SEQ ID NO: 3560527 - DNA, 25 bp, Homo sapien
caagaatcagtctcatcagtcagat

SEQ ID NO: 3560528 - DNA, 25 bp, Homo sapien
tcatcagtcagatcaaacaccctct

SEQ ID NO: 3560529 - DNA, 25 bp, Homo sapien
caggagagaccaagaatcagtctca

SEQ ID NO: 3560530 - DNA, 25 bp, Homo sapien
gggagcagaacagcttgtgccccac

SEQ ID NO: 3560531 - DNA, 25 bp, Homo sapien
ggtcggagggcactatgtgctcccc

SEQ ID NO: 3560532 - DNA, 25 bp, Homo sapien
cctgacaatctgctgctggtcggag

SEQ ID NO: 3560533 - DNA, 25 bp, Homo sapien
ctggtcggagggcactatgtgctcc

SEQ ID NO: 3560534 - DNA, 25 bp, Homo sapien
tctgctgctggtcggagggcactat

SEQ ID NO: 3560535 - DNA, 25 bp, Homo sapien
ctcctgagttccttggatggcaggc

SEQ ID NO: 3560536 - DNA, 25 bp, Homo sapien
tcctgagttccttggatggcaggct

SEQ ID NO: 3560537 - DNA, 25 bp, Homo sapien
ctggttaggaacgaagagactgtca

SEQ ID NO: 3560538 - DNA, 25 bp, Homo sapien
taggaacgaagagactgtcaactcc

SEQ ID NO: 3560539 - DNA, 25 bp, Homo sapien
gccaccgtgatggttcaagccagga

SEQ ID NO: 3560540 - DNA, 25 bp, Homo sapien
tacagtatggtatgaggccaccact

SEQ ID NO: 3560541 - DNA, 25 bp, Homo sapien
tgtcatgtaaaagtaactccggccg

SEQ ID NO: 3560542 - DNA, 25 bp, Homo sapien
tatcccggagaaaagaccctcagag

SEQ ID NO: 3560543 - DNA, 25 bp, Homo sapien
gacgctgagagaggatcgtccacga

SEQ ID NO: 3560544 - DNA, 25 bp, Homo sapien
tcggctcccaggaacgctgccggag

SEQ ID NO: 3560545 - DNA, 25 bp, Homo sapien
ccgccgtctaggctggacgctgaga

SEQ ID NO: 3560546 - DNA, 25 bp, Homo sapien
tcgtccacgactcacttcaaggctg

SEQ ID NO: 3560547 - DNA, 25 bp, Homo sapien
tctaactggctagaagtgcccaacg

SEQ ID NO: 3560548 - DNA, 25 bp, Homo sapien
tccaactgcgaggagtgcgacgtga

SEQ ID NO: 3560549 - DNA, 25 bp, Homo sapien
ttaaaggcggctcttgaagcgaccc

SEQ ID NO: 3560550 - DNA, 25 bp, Homo sapien
gaactgcgcgagaagcgagacctta

SEQ ID NO: 3560551 - DNA, 25 bp, Homo sapien
ggcctaaaagcgcaatcgggatatt

SEQ ID NO: 3560552 - DNA, 25 bp, Homo sapien
caggagcgcatggtcggagaactcc

SEQ ID NO: 3560553 - DNA, 25 bp, Homo sapien
cgtggccagctacaacatgggcagc

SEQ ID NO: 3560554 - DNA, 25 bp, Homo sapien
gagacacgcacatcatcaaggcgca

SEQ ID NO: 3560555 - DNA, 25 bp, Homo sapien
actgccgcaagaccagggtcactgg

SEQ ID NO: 3560556 - DNA, 25 bp, Homo sapien
tggtggccggcatcaagtacttcct

SEQ ID NO: 3560557 - DNA, 25 bp, Homo sapien
gagaccacgtcgacctcaccacttg

SEQ ID NO: 3560558 - DNA, 25 bp, Homo sapien
agtacttcctgacgatggagatggg

SEQ ID NO: 3560559 - DNA, 25 bp, Homo sapien
ttccagcagatctggggacccgtcc

SEQ ID NO: 3560560 - DNA, 25 bp, Homo sapien
gggcccggacaatcattccagcaga

SEQ ID NO: 3560561 - DNA, 25 bp, Homo sapien
ctctgcagggcccggacaatcattc

SEQ ID NO: 3560562 - DNA, 25 bp, Homo sapien
tgcagggcccggacaatcattccag

SEQ ID NO: 3560563 - DNA, 25 bp, Homo sapien
tcaattcctgaagtcctcttctcca

SEQ ID NO: 3560564 - DNA, 25 bp, Homo sapien
aattcctgaagtcctcttctccagc

SEQ ID NO: 3560565 - DNA, 25 bp, Homo sapien
caattcctgaagtcctcttctccag

SEQ ID NO: 3560566 - DNA, 25 bp, Homo sapien
tggagccatttctggctacaagccc

SEQ ID NO: 3560567 - DNA, 25 bp, Homo sapien
ggagccatttctggctacaagcccc

SEQ ID NO: 3560568 - DNA, 25 bp, Homo sapien
ttggagccatttctggctacaagcc

SEQ ID NO: 3560569 - DNA, 25 bp, Homo sapien
ctgcctgggagcggaacttctgctg

SEQ ID NO: 3560570 - DNA, 25 bp, Homo sapien
tcaaatgtggtgtccacaatctcat

SEQ ID NO: 3560571 - DNA, 25 bp, Homo sapien
atctcatcgatgacggctgcctggg

SEQ ID NO: 3560572 - DNA, 25 bp, Homo sapien
tcctgctccacgcttgccaccagct

SEQ ID NO: 3560573 - DNA, 25 bp, Homo sapien
cccaggcctcgctcccttcctgtct

SEQ ID NO: 3560574 - DNA, 25 bp, Homo sapien
cctcagaccccaggcctcgctccct

SEQ ID NO: 3560575 - DNA, 25 bp, Homo sapien
ccccaggcctcgctcccttcctgtc

SEQ ID NO: 3560576 - DNA, 25 bp, Homo sapien
cagaccccaggcctcgctcccttcc

SEQ ID NO: 3560577 - DNA, 25 bp, Homo sapien
ctcgatgagccgcttcagcatggtg

SEQ ID NO: 3560578 - DNA, 25 bp, Homo sapien
catggtcccaaactttttctcgatg

SEQ ID NO: 3560579 - DNA, 25 bp, Homo sapien
ccttcactcgccacctctttgggct

SEQ ID NO: 3560580 - DNA, 25 bp, Homo sapien
ttctcagtcatggtcccaaactttt

SEQ ID NO: 3560581 - DNA, 25 bp, Homo sapien
gcttctcttggatccgggcggccct

SEQ ID NO: 3560582 - DNA, 25 bp, Homo sapien
agcttctcttggatccgggcggccc

SEQ ID NO: 3560583 - DNA, 25 bp, Homo sapien
ctgagctccgtcagtgagtcttcca

SEQ ID NO: 3560584 - DNA, 25 bp, Homo sapien
tgagctccgtcagtgagtcttccag

SEQ ID NO: 3560585 - DNA, 25 bp, Homo sapien
gcttcctgatctggtccacctgtcc

SEQ ID NO: 3560586 - DNA, 25 bp, Homo sapien
ctgatctggtccacctgtcccaccc

SEQ ID NO: 3560587 - DNA, 25 bp, Homo sapien
agcttcctgatctggtccacctgtc

SEQ ID NO: 3560588 - DNA, 25 bp, Homo sapien
ccagcttcctgatctggtccacctg

SEQ ID NO: 3560589 - DNA, 25 bp, Homo sapien
ctcaaggcctttgaacagcgccgtc

SEQ ID NO: 3560590 - DNA, 25 bp, Homo sapien
tcctgcttcgctttctcaaggcctt

SEQ ID NO: 3560591 - DNA, 25 bp, Homo sapien
ggcctttgaacagcgccgtctggaa

SEQ ID NO: 3560592 - DNA, 25 bp, Homo sapien
ctatccaccaggacagtaatcacca

SEQ ID NO: 3560593 - DNA, 25 bp, Homo sapien
tgatgatgtaaattacgaggatggg

SEQ ID NO: 3560594 - DNA, 25 bp, Homo sapien
tgatgtaaattacgaggatgggaat

SEQ ID NO: 3560595 - DNA, 25 bp, Homo sapien
tgtaaattacgaggatgggaatgat

SEQ ID NO: 3560596 - DNA, 25 bp, Homo sapien
aggatgggaatgatgtaccaggcgc

SEQ ID NO: 3560597 - DNA, 25 bp, Homo sapien
gtcagatttgcggaacagtgcccgg

SEQ ID NO: 3560598 - DNA, 25 bp, Homo sapien
tttgcggaacagtgcccggaggacc

SEQ ID NO: 3560599 - DNA, 25 bp, Homo sapien
cttggggtcagatttgcggaacagt

SEQ ID NO: 3560600 - DNA, 25 bp, Homo sapien
tgggcacggctgtccatgtagatga

SEQ ID NO: 3560601 - DNA, 25 bp, Homo sapien
gatggctgcgatggacggcaaggac

SEQ ID NO: 3560602 - DNA, 25 bp, Homo sapien
atggacggcaaggactggcccaggg

SEQ ID NO: 3560603 - DNA, 25 bp, Homo sapien
tgcgatggacggcaaggactggccc

SEQ ID NO: 3560604 - DNA, 25 bp, Homo sapien
atgaggatggctgcgatggacggca

SEQ ID NO: 3560605 - DNA, 25 bp, Homo sapien
gaccttgaggatccggaagaggctt

SEQ ID NO: 3560606 - DNA, 25 bp, Homo sapien
aagaggctttggtggtagatggcga

SEQ ID NO: 3560607 - DNA, 25 bp, Homo sapien
gggcccgcaggctcttgaagacctt

SEQ ID NO: 3560608 - DNA, 25 bp, Homo sapien
cgaaggagtgggtctgcatcagcaa

SEQ ID NO: 3560609 - DNA, 25 bp, Homo sapien
aggcccagggcgatgatcttgagca

SEQ ID NO: 3560610 - DNA, 25 bp, Homo sapien
agaagtacgagaggcccagggcgat

SEQ ID NO: 3560611 - DNA, 25 bp, Homo sapien
tacgagaggcccagggcgatgatct

SEQ ID NO: 3560612 - DNA, 25 bp, Homo sapien
ccagaagtcaaagaagtacgagagg

SEQ ID NO: 3560613 - DNA, 25 bp, Homo sapien
cgacttcagcgaaggtctgggccac

SEQ ID NO: 3560614 - DNA, 25 bp, Homo sapien
gccccggatctcgacttcagcgaag

SEQ ID NO: 3560615 - DNA, 25 bp, Homo sapien
cagcatgacggtgttgaggcagaca

SEQ ID NO: 3560616 - DNA, 25 bp, Homo sapien
ccaaggattgggtcaggttccggat

SEQ ID NO: 3560617 - DNA, 25 bp, Homo sapien
gaagccctgaatgaggaaggttagc

SEQ ID NO: 3560618 - DNA, 25 bp, Homo sapien
ccactggaagagattggtagagtgt

SEQ ID NO: 3560619 - DNA, 25 bp, Homo sapien
ttggtagagtgtcccttcttgcggg

SEQ ID NO: 3560620 - DNA, 25 bp, Homo sapien
gaaggttagcttttcccacagccac

SEQ ID NO: 3560621 - DNA, 25 bp, Homo sapien
atgcagaagaatatggagtccaagg

SEQ ID NO: 3560622 - DNA, 25 bp, Homo sapien
aagaatatggagtccaaggccatga

SEQ ID NO: 3560623 - DNA, 25 bp, Homo sapien
tgcagaagaatatggagtccaaggc

SEQ ID NO: 3560624 - DNA, 25 bp, Homo sapien
cagaagaatatggagtccaaggcca

SEQ ID NO: 3560625 - DNA, 25 bp, Homo sapien
tatcctgggtatggacttttttgga

SEQ ID NO: 3560626 - DNA, 25 bp, Homo sapien
ttgccccagtcttctgaatgtttgg

SEQ ID NO: 3560627 - DNA, 25 bp, Homo sapien
tctgaatgtttggtggagatatcct

SEQ ID NO: 3560628 - DNA, 25 bp, Homo sapien
gtggagatatcctgggtatggactt

SEQ ID NO: 3560629 - DNA, 25 bp, Homo sapien
aggaccgagtcatgctgtgagccga

SEQ ID NO: 3560630 - DNA, 25 bp, Homo sapien
ccccgtgggtgtgctacgtgatagg

SEQ ID NO: 3560631 - DNA, 25 bp, Homo sapien
gacacgtgagcggattgtgctggag

SEQ ID NO: 3560632 - DNA, 25 bp, Homo sapien
tgtgctacgtgataggggaagactc

SEQ ID NO: 3560633 - DNA, 25 bp, Homo sapien
ggaaatggtctctccgtgatgagga

SEQ ID NO: 3560634 - DNA, 25 bp, Homo sapien
gaagtgctctggacgtagtcgccat

SEQ ID NO: 3560635 - DNA, 25 bp, Homo sapien
tactcgctgtgatagtcagatatcc

SEQ ID NO: 3560636 - DNA, 25 bp, Homo sapien
taactggaatgatacgcgccgtggt

SEQ ID NO: 3560637 - DNA, 25 bp, Homo sapien
gactcatcgtgttggagcccgctaa

SEQ ID NO: 3560638 - DNA, 25 bp, Homo sapien
actcactgtagggattgggtccatg

SEQ ID NO: 3560639 - DNA, 25 bp, Homo sapien
agcccgctaaggtgggaagcctcgc

SEQ ID NO: 3560640 - DNA, 25 bp, Homo sapien
gcctcgctgtggtggaaggactcac

SEQ ID NO: 3560641 - DNA, 25 bp, Homo sapien
cacgccgtgatggtgcaactcgtaa

SEQ ID NO: 3560642 - DNA, 25 bp, Homo sapien
gagtcactctgctgatggaacccac

SEQ ID NO: 3560643 - DNA, 25 bp, Homo sapien
tcacgttggagctcatcatggtagt

SEQ ID NO: 3560644 - DNA, 25 bp, Homo sapien
tcgtggaagtcttggaactccggag

SEQ ID NO: 3560645 - DNA, 25 bp, Homo sapien
cctatctgcgttattggtgtctgcc

SEQ ID NO: 3560646 - DNA, 25 bp, Homo sapien
cgaaagaacctatctgcgttattgg

SEQ ID NO: 3560647 - DNA, 25 bp, Homo sapien
gtgagagcgaaagaacctatctgcg

SEQ ID NO: 3560648 - DNA, 25 bp, Homo sapien
gtgatgagtgagagcgaaagaacct

SEQ ID NO: 3560649 - DNA, 25 bp, Homo sapien
tgagccaagctcaatgcagactgtg

SEQ ID NO: 3560650 - DNA, 25 bp, Homo sapien
gactgtgctgggaactctggagcca

SEQ ID NO: 3560651 - DNA, 25 bp, Homo sapien
caacaggccccgcctggatttccct

SEQ ID NO: 3560652 - DNA, 25 bp, Homo sapien
caagctcaatgcagactgtggcact

SEQ ID NO: 3560653 - DNA, 25 bp, Homo sapien
cagagtcacagttattcaggagtca

SEQ ID NO: 3560654 - DNA, 25 bp, Homo sapien
cagatttctgtagccctgctgggcc

SEQ ID NO: 3560655 - DNA, 25 bp, Homo sapien
cctgaatacagagtgggaagcacgt

SEQ ID NO: 3560656 - DNA, 25 bp, Homo sapien
gcccggttgtgttggcagagcacca

SEQ ID NO: 3560657 - DNA, 25 bp, Homo sapien
ccttggttgagatcctagtggccac

SEQ ID NO: 3560658 - DNA, 25 bp, Homo sapien
taaagagttgctgatagcagtgtcc

SEQ ID NO: 3560659 - DNA, 25 bp, Homo sapien
ggtcaaccgttgtctccatgaaaaa

SEQ ID NO: 3560660 - DNA, 25 bp, Homo sapien
ggctggcacaccgtagaccataata

SEQ ID NO: 3560661 - DNA, 25 bp, Homo sapien
gaatccggcttctatgactgacata

SEQ ID NO: 3560662 - DNA, 25 bp, Homo sapien
cctgggcatccgtttcatcctcaaa

SEQ ID NO: 3560663 - DNA, 25 bp, Homo sapien
catccgtttcatcctcaaatgtggg

SEQ ID NO: 3560664 - DNA, 25 bp, Homo sapien
caaatgtggggaatccggcttctat

SEQ ID NO: 3560665 - DNA, 25 bp, Homo sapien
gggcctgggcttatccacttggaaa

SEQ ID NO: 3560666 - DNA, 25 bp, Homo sapien
tgagcagttctggacagccctcagg

SEQ ID NO: 3560667 - DNA, 25 bp, Homo sapien
gacagaaaagtatagggagcctcaa

SEQ ID NO: 3560668 - DNA, 25 bp, Homo sapien
caaagttcagcgagggactcaagcc

SEQ ID NO: 3560669 - DNA, 25 bp, Homo sapien
gcgggggattgtccaggacgggctc

SEQ ID NO: 3560670 - DNA, 25 bp, Homo sapien
cttgagggccgcgaggcagcactcg

SEQ ID NO: 3560671 - DNA, 25 bp, Homo sapien
gcgaggcagcactcggatgggccga

SEQ ID NO: 3560672 - DNA, 25 bp, Homo sapien
gcagcactcggatgggccgaggcgg

SEQ ID NO: 3560673 - DNA, 25 bp, Homo sapien
cttctgcttgcgcaacaggtagttc

SEQ ID NO: 3560674 - DNA, 25 bp, Homo sapien
caacaggtagttcgagtactggacc

SEQ ID NO: 3560675 - DNA, 25 bp, Homo sapien
gcttgcgcaacaggtagttcgagta

SEQ ID NO: 3560676 - DNA, 25 bp, Homo sapien
caggtagttcgagtactggacctcg

SEQ ID NO: 3560677 - DNA, 25 bp, Homo sapien
ccgccgccgggcaggtcatagccca

SEQ ID NO: 3560678 - DNA, 25 bp, Homo sapien
cgggcaggtcatagcccataatgtc

SEQ ID NO: 3560679 - DNA, 25 bp, Homo sapien
ccgccgggcaggtcatagcccataa

SEQ ID NO: 3560680 - DNA, 25 bp, Homo sapien
gcaggtcatagcccataatgtccac

SEQ ID NO: 3560681 - DNA, 25 bp, Homo sapien
tcatgacgagcgagaaaacctcctc

SEQ ID NO: 3560682 - DNA, 25 bp, Homo sapien
gagcttggcgtagagcacgtcgtcc

SEQ ID NO: 3560683 - DNA, 25 bp, Homo sapien
gcagcagtggctcgtccccgaagca

SEQ ID NO: 3560684 - DNA, 25 bp, Homo sapien
gaagtactcggcgatcatgacgagc

SEQ ID NO: 3560685 - DNA, 25 bp, Homo sapien
accgtcaggttgtggcgctcggcaa

SEQ ID NO: 3560686 - DNA, 25 bp, Homo sapien
tgaagagcgactcgaacatggcggc

SEQ ID NO: 3560687 - DNA, 25 bp, Homo sapien
tcggcaaagcgaaacaggatgttct

SEQ ID NO: 3560688 - DNA, 25 bp, Homo sapien
tgtgtgcgaacatggcgaagtgctc

SEQ ID NO: 3560689 - DNA, 25 bp, Homo sapien
ttacggtgctgcaccctagcaccag

SEQ ID NO: 3560690 - DNA, 25 bp, Homo sapien
cagcaggattttccggcggctcatc

SEQ ID NO: 3560691 - DNA, 25 bp, Homo sapien
tttccggcggctcatcatcttggtg

SEQ ID NO: 3560692 - DNA, 25 bp, Homo sapien
gatgagaaggcttacggtgctgcac

SEQ ID NO: 3560693 - DNA, 25 bp, Homo sapien
tcctgcggctctggtagcagggcca

SEQ ID NO: 3560694 - DNA, 25 bp, Homo sapien
gggatcctgcggctctggtagcagg

SEQ ID NO: 3560695 - DNA, 25 bp, Homo sapien
acaggcactcatgggggatcctgcg

SEQ ID NO: 3560696 - DNA, 25 bp, Homo sapien
cactcatgggggatcctgcggctct

SEQ ID NO: 3560697 - DNA, 25 bp, Homo sapien
aggcagacgggtttgcagtgggcag

SEQ ID NO: 3560698 - DNA, 25 bp, Homo sapien
cagacgggtttgcagtgggcagagg

SEQ ID NO: 3560699 - DNA, 25 bp, Homo sapien
cagaagaaggcagacgggtttgcag

SEQ ID NO: 3560700 - DNA, 25 bp, Homo sapien
ggcagaagaaggcagacgggtttgc

SEQ ID NO: 3560701 - DNA, 25 bp, Homo sapien
ggcttaagggcagcccaatcctggg

SEQ ID NO: 3560702 - DNA, 25 bp, Homo sapien
cacaggaatgccttggcttaagggc

SEQ ID NO: 3560703 - DNA, 25 bp, Homo sapien
gatgcctgtccccaagctagggtgg

SEQ ID NO: 3560704 - DNA, 25 bp, Homo sapien
ggaggagggcttggtcacacacaag

SEQ ID NO: 3560705 - DNA, 25 bp, Homo sapien
acccttgtctcgaaatccgcacggg

SEQ ID NO: 3560706 - DNA, 25 bp, Homo sapien
gccgccgctatctctggacccttgt

SEQ ID NO: 3560707 - DNA, 25 bp, Homo sapien
ccgagtgccggtggcttgcctctca

SEQ ID NO: 3560708 - DNA, 25 bp, Homo sapien
gatgggatcaggtggcagcgtccgc

SEQ ID NO: 3560709 - DNA, 25 bp, Homo sapien
gacgacatttgagccggcctggaag

SEQ ID NO: 3560710 - DNA, 25 bp, Homo sapien
gattcgaacgtattatgggagctct

SEQ ID NO: 3560711 - DNA, 25 bp, Homo sapien
agacttaacaaacggtggagattcg

SEQ ID NO: 3560712 - DNA, 25 bp, Homo sapien
tgaacgccaggcgatgcgagactga

SEQ ID NO: 3560713 - DNA, 25 bp, Homo sapien
caaaacattaccagcattccaaaag

SEQ ID NO: 3560714 - DNA, 25 bp, Homo sapien
tcccgtctcttagtagctgctccag

SEQ ID NO: 3560715 - DNA, 25 bp, Homo sapien
gcacctggaccatgatccaaaacat

SEQ ID NO: 3560716 - DNA, 25 bp, Homo sapien
accgccccctggagatgagaacaga

SEQ ID NO: 3560717 - DNA, 25 bp, Homo sapien
ttcagataatgatcagaagcctcag

SEQ ID NO: 3560718 - DNA, 25 bp, Homo sapien
gacaatagattgtcacctcttccag

SEQ ID NO: 3560719 - DNA, 25 bp, Homo sapien
gctcttgttcctagtgtaatccttg

SEQ ID NO: 3560720 - DNA, 25 bp, Homo sapien
tgacaggacccgacatccgttttaa

SEQ ID NO: 3560721 - DNA, 25 bp, Homo sapien
ggaagtgtgaattacatacatgaga

SEQ ID NO: 3560722 - DNA, 25 bp, Homo sapien
ttacatacatgagaactccaggcat

SEQ ID NO: 3560723 - DNA, 25 bp, Homo sapien
tgtgaattacatacatgagaactcc

SEQ ID NO: 3560724 - DNA, 25 bp, Homo sapien
aattacatacatgagaactccaggc

SEQ ID NO: 3560725 - DNA, 25 bp, Homo sapien
gatcccattgtccttcgcagaagtg

SEQ ID NO: 3560726 - DNA, 25 bp, Homo sapien
gaagtcttagaaatcctccagtggg

SEQ ID NO: 3560727 - DNA, 25 bp, Homo sapien
tccaggttatgagccggaagggccc

SEQ ID NO: 3560728 - DNA, 25 bp, Homo sapien
tgactctttggagatgaccaggccc

SEQ ID NO: 3560729 - DNA, 25 bp, Homo sapien
aggttgtaatctggtcctgagcagc

SEQ ID NO: 3560730 - DNA, 25 bp, Homo sapien
tctgacagactagagcaggctggat

SEQ ID NO: 3560731 - DNA, 25 bp, Homo sapien
gttgtaatctggtcctgagcagcct

SEQ ID NO: 3560732 - DNA, 25 bp, Homo sapien
gacagactagagcaggctggatcac

SEQ ID NO: 3560733 - DNA, 25 bp, Homo sapien
ctactgttggtgtttaagtgcacca

SEQ ID NO: 3560734 - DNA, 25 bp, Homo sapien
ttaagtgcaccagtggaggcgctca

SEQ ID NO: 3560735 - DNA, 25 bp, Homo sapien
ggtagtcatgcgctgctgttgtact

SEQ ID NO: 3560736 - DNA, 25 bp, Homo sapien
cttgccggagggttcaagatggtct

SEQ ID NO: 3560737 - DNA, 25 bp, Homo sapien
ccgccccggtgcagatgaacctgta

SEQ ID NO: 3560738 - DNA, 25 bp, Homo sapien
gatgaacctgtacgccacctgggag

SEQ ID NO: 3560739 - DNA, 25 bp, Homo sapien
ccggtgcagatgaacctgtacgcca

SEQ ID NO: 3560740 - DNA, 25 bp, Homo sapien
aggtggaccggagctcgtccagctg

SEQ ID NO: 3560741 - DNA, 25 bp, Homo sapien
gtttggtgacgtttgggcagctgcc

SEQ ID NO: 3560742 - DNA, 25 bp, Homo sapien
tgccttctccatctcgttaggttga

SEQ ID NO: 3560743 - DNA, 25 bp, Homo sapien
tgaaaaggcgcgagcctactggcaa

SEQ ID NO: 3560744 - DNA, 25 bp, Homo sapien
tgtgttccttcctacgtgggtccag

SEQ ID NO: 3560745 - DNA, 25 bp, Homo sapien
agaacacactaaggcttggggcatc

SEQ ID NO: 3560746 - DNA, 25 bp, Homo sapien
acacactaaggcttggggcatcagt

SEQ ID NO: 3560747 - DNA, 25 bp, Homo sapien
tcatttactgatccctcctcactaa

SEQ ID NO: 3560748 - DNA, 25 bp, Homo sapien
gtcatcatttactgatccctcctca

SEQ ID NO: 3560749 - DNA, 25 bp, Homo sapien
ggctcatacttataaccccagcaat

SEQ ID NO: 3560750 - DNA, 25 bp, Homo sapien
gtcaagaattcagtgagctgtgttc

SEQ ID NO: 3560751 - DNA, 25 bp, Homo sapien
taataattgtccctgctgagtgtgg

SEQ ID NO: 3560752 - DNA, 25 bp, Homo sapien
ggattgtgtgagctcaggaagtcaa

SEQ ID NO: 3560753 - DNA, 25 bp, Homo sapien
gcttcaaagagaattgttgttgttt

SEQ ID NO: 3560754 - DNA, 25 bp, Homo sapien
acggagacttactctgttgcccagt

SEQ ID NO: 3560755 - DNA, 25 bp, Homo sapien
tgcttcaaagagaattgttgttgtt

SEQ ID NO: 3560756 - DNA, 25 bp, Homo sapien
tgagacggagacttactctgttgcc

SEQ ID NO: 3560757 - DNA, 25 bp, Homo sapien
caggcctgagcaccgcgcccagccg

SEQ ID NO: 3560758 - DNA, 25 bp, Homo sapien
tacaggcctgagcaccgcgcccagc

SEQ ID NO: 3560759 - DNA, 25 bp, Homo sapien
gattacaggcctgagcaccgcgccc

SEQ ID NO: 3560760 - DNA, 25 bp, Homo sapien
attacaggcctgagcaccgcgccca

SEQ ID NO: 3560761 - DNA, 25 bp, Homo sapien
tgagtccaaggataggactggagtt

SEQ ID NO: 3560762 - DNA, 25 bp, Homo sapien
agtccaaggataggactggagttga

SEQ ID NO: 3560763 - DNA, 25 bp, Homo sapien
ggataggactggagttgatagacaa

SEQ ID NO: 3560764 - DNA, 25 bp, Homo sapien
ccaaggataggactggagttgatag

SEQ ID NO: 3560765 - DNA, 25 bp, Homo sapien
tagccgggcgtggtgacacgtacct

SEQ ID NO: 3560766 - DNA, 25 bp, Homo sapien
gccgggcgtggtgacacgtacctgt

SEQ ID NO: 3560767 - DNA, 25 bp, Homo sapien
cgggcgtggtgacacgtacctgtaa

SEQ ID NO: 3560768 - DNA, 25 bp, Homo sapien
attagccgggcgtggtgacacgtac

SEQ ID NO: 3560769 - DNA, 25 bp, Homo sapien
tcccagacgtacttacattcctgtt

SEQ ID NO: 3560770 - DNA, 25 bp, Homo sapien
ctgctgactcatcccagacgtactt

SEQ ID NO: 3560771 - DNA, 25 bp, Homo sapien
catcccagacgtacttacattcctg

SEQ ID NO: 3560772 - DNA, 25 bp, Homo sapien
gactcatcccagacgtacttacatt

SEQ ID NO: 3560773 - DNA, 25 bp, Homo sapien
tcactggaacagctgataatgtccg

SEQ ID NO: 3560774 - DNA, 25 bp, Homo sapien
acctgatgtagatccagagatgtca

SEQ ID NO: 3560775 - DNA, 25 bp, Homo sapien
tgctccttggcttcactagtggctg

SEQ ID NO: 3560776 - DNA, 25 bp, Homo sapien
caacctcgatgcaggtcactggaac

SEQ ID NO: 3560777 - DNA, 25 bp, Homo sapien
tttgaatccaggcaagttaactgcc

SEQ ID NO: 3560778 - DNA, 25 bp, Homo sapien
tcagtagagactgactctgagcatc

SEQ ID NO: 3560779 - DNA, 25 bp, Homo sapien
gaaagtctaactcatactcaggaag

SEQ ID NO: 3560780 - DNA, 25 bp, Homo sapien
gcatctaagtgggtacagtgttgga

SEQ ID NO: 3560781 - DNA, 25 bp, Homo sapien
ccttatttggatcgagagtctttga

SEQ ID NO: 3560782 - DNA, 25 bp, Homo sapien
gatgattgccatgagaggcaaacac

SEQ ID NO: 3560783 - DNA, 25 bp, Homo sapien
ttttaggagcccaacctgatggata

SEQ ID NO: 3560784 - DNA, 25 bp, Homo sapien
tgaagacagacctgaaatccaatga

SEQ ID NO: 3560785 - DNA, 25 bp, Homo sapien
agttcatcatcagcaagacccgtca

SEQ ID NO: 3560786 - DNA, 25 bp, Homo sapien
tcagttctatcagtgttcctgagtt

SEQ ID NO: 3560787 - DNA, 25 bp, Homo sapien
tcagcaagacccgtcagttctatca

SEQ ID NO: 3560788 - DNA, 25 bp, Homo sapien
gacccgtcagttctatcagtgttcc

SEQ ID NO: 3560789 - DNA, 25 bp, Homo sapien
aatattataggtagtcttctgcagc

SEQ ID NO: 3560790 - DNA, 25 bp, Homo sapien
tacagctgtcgtcatttgccatgca

SEQ ID NO: 3560791 - DNA, 25 bp, Homo sapien
ggtttgtctactcctctgacagtgt

SEQ ID NO: 3560792 - DNA, 25 bp, Homo sapien
tgccatgcactagacatccttgcct

SEQ ID NO: 3560793 - DNA, 25 bp, Homo sapien
tgaggtgtggatccaactttccttt

SEQ ID NO: 3560794 - DNA, 25 bp, Homo sapien
ttttgcctttcacatataagtattt

SEQ ID NO: 3560795 - DNA, 25 bp, Homo sapien
tagaaatctactcttacctcagagt

SEQ ID NO: 3560796 - DNA, 25 bp, Homo sapien
catataagtatttaagctacatgaa

SEQ ID NO: 3560797 - DNA, 25 bp, Homo sapien
attctctctctagtaattctatttt

SEQ ID NO: 3560798 - DNA, 25 bp, Homo sapien
tcttttgattattatatatctggta

SEQ ID NO: 3560799 - DNA, 25 bp, Homo sapien
gatgattctctctctagtaattcta

SEQ ID NO: 3560800 - DNA, 25 bp, Homo sapien
tgattctctctctagtaattctatt

SEQ ID NO: 3560801 - DNA, 25 bp, Homo sapien
cagtaagagggctgtctaacccaaa

SEQ ID NO: 3560802 - DNA, 25 bp, Homo sapien
tttagtgagattcagtaactggcag

SEQ ID NO: 3560803 - DNA, 25 bp, Homo sapien
ctgggaatcatactgaacaagacat

SEQ ID NO: 3560804 - DNA, 25 bp, Homo sapien
tctcatggatcttgaagtttagtga

SEQ ID NO: 3560805 - DNA, 25 bp, Homo sapien
tacagcaacctaacatcaaacagaa

SEQ ID NO: 3560806 - DNA, 25 bp, Homo sapien
cacagctcgtcatgaaagtgggctc

SEQ ID NO: 3560807 - DNA, 25 bp, Homo sapien
tgagaactgtcatgcgatttgtccc

SEQ ID NO: 3560808 - DNA, 25 bp, Homo sapien
gaattgaccccaagtggacgttgct

SEQ ID NO: 3560809 - DNA, 25 bp, Homo sapien
agtgttgtcgcgatgtgagtgccca

SEQ ID NO: 3560810 - DNA, 25 bp, Homo sapien
tgaaaagcacgggtctgaaagggca

SEQ ID NO: 3560811 - DNA, 25 bp, Homo sapien
tgagtgcccagcttaggatttgccc

SEQ ID NO: 3560812 - DNA, 25 bp, Homo sapien
gaagcctactcatggttcaccaggg

SEQ ID NO: 3560813 - DNA, 25 bp, Homo sapien
cctgctgggagttgactagaatctg

SEQ ID NO: 3560814 - DNA, 25 bp, Homo sapien
tactgcacgtggcaagtacagtgtg

SEQ ID NO: 3560815 - DNA, 25 bp, Homo sapien
tggccccactgtagtccgtactgca

SEQ ID NO: 3560816 - DNA, 25 bp, Homo sapien
gaataatcctacttccaccgtggcc

SEQ ID NO: 3560817 - DNA, 25 bp, Homo sapien
tcagaggccccactaaagaatcaga

SEQ ID NO: 3560818 - DNA, 25 bp, Homo sapien
cctgtattggtagcagagtcctccc

SEQ ID NO: 3560819 - DNA, 25 bp, Homo sapien
tcattagggaggtagtgggcccagg

SEQ ID NO: 3560820 - DNA, 25 bp, Homo sapien
tccctgagggctggatcattaggga

SEQ ID NO: 3560821 - DNA, 25 bp, Homo sapien
gaacaagggccatgctggcatagtg

SEQ ID NO: 3560822 - DNA, 25 bp, Homo sapien
tcaaataaaggtggcagaggtcaag

SEQ ID NO: 3560823 - DNA, 25 bp, Homo sapien
tggccagggcgtctctagttgtaga

SEQ ID NO: 3560824 - DNA, 25 bp, Homo sapien
ttattaagcggaggctcactgtgca

SEQ ID NO: 3560825 - DNA, 25 bp, Homo sapien
tccacctcccaaggcagtgacgtgt

SEQ ID NO: 3560826 - DNA, 25 bp, Homo sapien
ccaggttggtgaagtccgagccagt

SEQ ID NO: 3560827 - DNA, 25 bp, Homo sapien
gaaacaggcatgaaggtgtctcacc

SEQ ID NO: 3560828 - DNA, 25 bp, Homo sapien
catgttctcaatcatggaaacaggc

SEQ ID NO: 3560829 - DNA, 25 bp, Homo sapien
ttctaaatgaggtgatagcggggct

SEQ ID NO: 3560830 - DNA, 25 bp, Homo sapien
gcaaatcatacctagtgtgacctgg

SEQ ID NO: 3560831 - DNA, 25 bp, Homo sapien
ctagtgtgacctggatctagggtgt

SEQ ID NO: 3560832 - DNA, 25 bp, Homo sapien
aaggccaggagaagcaaatcatacc

SEQ ID NO: 3560833 - DNA, 25 bp, Homo sapien
cctacctaggtgtgtaagctgaagc

SEQ ID NO: 3560834 - DNA, 25 bp, Homo sapien
cacatggtctgatctcccaggagct

SEQ ID NO: 3560835 - DNA, 25 bp, Homo sapien
gatccaaactgtgcagagtgtccca

SEQ ID NO: 3560836 - DNA, 25 bp, Homo sapien
catggtgtgaaatgtgctcccctgg

SEQ ID NO: 3560837 - DNA, 25 bp, Homo sapien
gtttgaggttacaggctgggccgag

SEQ ID NO: 3560838 - DNA, 25 bp, Homo sapien
tgaggttacaggctgggccgaggcc

SEQ ID NO: 3560839 - DNA, 25 bp, Homo sapien
tttgaggttacaggctgggccgagg

SEQ ID NO: 3560840 - DNA, 25 bp, Homo sapien
ttgaggttacaggctgggccgaggc

SEQ ID NO: 3560841 - DNA, 25 bp, Homo sapien
ttcgggttcgacctcccgagcagct

SEQ ID NO: 3560842 - DNA, 25 bp, Homo sapien
gacgtcctcgatggcgccatggcgc

SEQ ID NO: 3560843 - DNA, 25 bp, Homo sapien
tcagtttctcccgacgtcctcgatg

SEQ ID NO: 3560844 - DNA, 25 bp, Homo sapien
tggcgccacactaggtaccttcggg

SEQ ID NO: 3560845 - DNA, 25 bp, Homo sapien
gcagcgagtcttgtctactggtcag

SEQ ID NO: 3560846 - DNA, 25 bp, Homo sapien
tactggtcaggcaggacttctgtga

SEQ ID NO: 3560847 - DNA, 25 bp, Homo sapien
tgacaaactgaaacctgagggaaga

SEQ ID NO: 3560848 - DNA, 25 bp, Homo sapien
gattttatgatagctcgcagcagcg

SEQ ID NO: 3560849 - DNA, 25 bp, Homo sapien
tctccaatgagtggttaggaagcca

SEQ ID NO: 3560850 - DNA, 25 bp, Homo sapien
gccactgctggaattcaaatgagag

SEQ ID NO: 3560851 - DNA, 25 bp, Homo sapien
ggcaggcaacacagtctgacttgag

SEQ ID NO: 3560852 - DNA, 25 bp, Homo sapien
aaacctcagtgggtcgaggatggaa

SEQ ID NO: 3560853 - DNA, 25 bp, Homo sapien
tccctgccagttggccgtcagaggt

SEQ ID NO: 3560854 - DNA, 25 bp, Homo sapien
tatggaaacacctgtcacttaggca

SEQ ID NO: 3560855 - DNA, 25 bp, Homo sapien
tggagacacaactgcagaaatgatc

SEQ ID NO: 3560856 - DNA, 25 bp, Homo sapien
gaaatgatcctgaaccgggaaggac

SEQ ID NO: 3560857 - DNA, 25 bp, Homo sapien
ggcagggagcagtaacctactggct

SEQ ID NO: 3560858 - DNA, 25 bp, Homo sapien
ttctgtgggcaagcgctagccctga

SEQ ID NO: 3560859 - DNA, 25 bp, Homo sapien
tgaggcagggagcagtaacctactg

SEQ ID NO: 3560860 - DNA, 25 bp, Homo sapien
tcagccatctagcagagttctgtgg

SEQ ID NO: 3560861 - DNA, 25 bp, Homo sapien
tgttcatgagccagatccgcaagtt

SEQ ID NO: 3560862 - DNA, 25 bp, Homo sapien
atgaagacgcctcccctaacgtgag

SEQ ID NO: 3560863 - DNA, 25 bp, Homo sapien
tggatgacctgttccccaatgagga

SEQ ID NO: 3560864 - DNA, 25 bp, Homo sapien
tcttggcattgtcgagccacctggg

SEQ ID NO: 3560865 - DNA, 25 bp, Homo sapien
ccaaggtggtagaactgctgaaaga

SEQ ID NO: 3560866 - DNA, 25 bp, Homo sapien
cgtgggacctacagctgagtggaat

SEQ ID NO: 3560867 - DNA, 25 bp, Homo sapien
agtctgacctcgaggacgtgggacc

SEQ ID NO: 3560868 - DNA, 25 bp, Homo sapien
cggatgagctcctgacccagagtgt

SEQ ID NO: 3560869 - DNA, 25 bp, Homo sapien
caggcctactttgggctggacaacg

SEQ ID NO: 3560870 - DNA, 25 bp, Homo sapien
ctcttcatccagcaacagttcctgg

SEQ ID NO: 3560871 - DNA, 25 bp, Homo sapien
tctgtctcaggcctactttgggctg

SEQ ID NO: 3560872 - DNA, 25 bp, Homo sapien
ttgggctggacaacggggagacacg

SEQ ID NO: 3560873 - DNA, 25 bp, Homo sapien
caccatagactcagtggcctggcct

SEQ ID NO: 3560874 - DNA, 25 bp, Homo sapien
ctccctggtgggctaatgctgaagg

SEQ ID NO: 3560875 - DNA, 25 bp, Homo sapien
taacaccgtcactgtggagatggac

SEQ ID NO: 3560876 - DNA, 25 bp, Homo sapien
cttccctaggttcgggccagcagga

SEQ ID NO: 3560877 - DNA, 25 bp, Homo sapien
gctctacattctcgggagcggcgcc

SEQ ID NO: 3560878 - DNA, 25 bp, Homo sapien
gtccctcttctagtggtaccgccca

SEQ ID NO: 3560879 - DNA, 25 bp, Homo sapien
gtgcggtggtatctcccaggctcta

SEQ ID NO: 3560880 - DNA, 25 bp, Homo sapien
taatcacccccattccgtgcggtgg

SEQ ID NO: 3560881 - DNA, 25 bp, Homo sapien
cccctgttgcgggtgaggcggctgc

SEQ ID NO: 3560882 - DNA, 25 bp, Homo sapien
gggcggcgacggtcccctggtggca

SEQ ID NO: 3560883 - DNA, 25 bp, Homo sapien
ggtgaggcggctgctctcatatttt

SEQ ID NO: 3560884 - DNA, 25 bp, Homo sapien
gcggctgctctcatattttcagatg

SEQ ID NO: 3560885 - DNA, 25 bp, Homo sapien
gggctcttatgagctctgctcctca

SEQ ID NO: 3560886 - DNA, 25 bp, Homo sapien
ggagaccgcgggctcttatgagctc

SEQ ID NO: 3560887 - DNA, 25 bp, Homo sapien
ggttctggagaccgcgggctcttat

SEQ ID NO: 3560888 - DNA, 25 bp, Homo sapien
gaccgcgggctcttatgagctctgc

SEQ ID NO: 3560889 - DNA, 25 bp, Homo sapien
tcaggatgacacgtacacagagagc

SEQ ID NO: 3560890 - DNA, 25 bp, Homo sapien
gatcgtgagtgtcgctcttcccaaa

SEQ ID NO: 3560891 - DNA, 25 bp, Homo sapien
tttgctgtgagtaagaagcctccca

SEQ ID NO: 3560892 - DNA, 25 bp, Homo sapien
taataggttctaggctgggccctgg

SEQ ID NO: 3560893 - DNA, 25 bp, Homo sapien
tgcacccaggatcctagtcccctgc

SEQ ID NO: 3560894 - DNA, 25 bp, Homo sapien
agccacttggggaaagatggaaaag

SEQ ID NO: 3560895 - DNA, 25 bp, Homo sapien
cagcttgtatttaagtccctgggct

SEQ ID NO: 3560896 - DNA, 25 bp, Homo sapien
tgccgctacttctctggggaatgtg

SEQ ID NO: 3560897 - DNA, 25 bp, Homo sapien
tgaggctgctgaaacccttacaagg

SEQ ID NO: 3560898 - DNA, 25 bp, Homo sapien
atcccctgggcaatgcagaggcgca

SEQ ID NO: 3560899 - DNA, 25 bp, Homo sapien
gaggtatctgtagctccccatcagg

SEQ ID NO: 3560900 - DNA, 25 bp, Homo sapien
gaacaagggtcagacaaagtcaagg

SEQ ID NO: 3560901 - DNA, 25 bp, Homo sapien
aggtagagctggagacgctgccggg

SEQ ID NO: 3560902 - DNA, 25 bp, Homo sapien
gagtcaggtagagctggagacgctg

SEQ ID NO: 3560903 - DNA, 25 bp, Homo sapien
tcagccagtatatgatgaggggctg

SEQ ID NO: 3560904 - DNA, 25 bp, Homo sapien
cagggctgctgtccgcaaagagcgc

SEQ ID NO: 3560905 - DNA, 25 bp, Homo sapien
gaaaggagaactgaagcctggccag

SEQ ID NO: 3560906 - DNA, 25 bp, Homo sapien
gaatgggggggtgcaccagactcac

SEQ ID NO: 3560907 - DNA, 25 bp, Homo sapien
ggaggtttgccctcaagtgaaggca

SEQ ID NO: 3560908 - DNA, 25 bp, Homo sapien
ctggaagaaaggagaactgaagcct

SEQ ID NO: 3560909 - DNA, 25 bp, Homo sapien
tgaagtacatgagcgccgatgaggt

SEQ ID NO: 3560910 - DNA, 25 bp, Homo sapien
aggccagcgccacgtagtagccatc

SEQ ID NO: 3560911 - DNA, 25 bp, Homo sapien
gccccgtgagcacactgaggatcat

SEQ ID NO: 3560912 - DNA, 25 bp, Homo sapien
agtagccatcgctgccgaacagcag

SEQ ID NO: 3560913 - DNA, 25 bp, Homo sapien
ccccaaagggatatggaaggcccag

SEQ ID NO: 3560914 - DNA, 25 bp, Homo sapien
ccaagactcgcagagtgactctcaa

SEQ ID NO: 3560915 - DNA, 25 bp, Homo sapien
tctaggcctgagattggccctaccc

SEQ ID NO: 3560916 - DNA, 25 bp, Homo sapien
taacagagcagtgctagaggtcact

SEQ ID NO: 3560917 - DNA, 25 bp, Homo sapien
tgctcaggtcactgcgcacggtggc

SEQ ID NO: 3560918 - DNA, 25 bp, Homo sapien
cccacgtatttgtagccactgtagg

SEQ ID NO: 3560919 - DNA, 25 bp, Homo sapien
accagcgctgtgcttgcacacaggc

SEQ ID NO: 3560920 - DNA, 25 bp, Homo sapien
cactgtaggccagcaggtgaaaggt

SEQ ID NO: 3560921 - DNA, 25 bp, Homo sapien
agcaggggtggctcagagccaggca

SEQ ID NO: 3560922 - DNA, 25 bp, Homo sapien
caggggtggctcagagccaggcatc

SEQ ID NO: 3560923 - DNA, 25 bp, Homo sapien
caaagcaggggtggctcagagccag

SEQ ID NO: 3560924 - DNA, 25 bp, Homo sapien
ctgcgccaaagcaggggtggctcag

SEQ ID NO: 3560925 - DNA, 25 bp, Homo sapien
gtgaggaagagagactggggcaaca

SEQ ID NO: 3560926 - DNA, 25 bp, Homo sapien
ggcaggggtgaggaagagagactgg

SEQ ID NO: 3560927 - DNA, 25 bp, Homo sapien
gggcaacagagggtgagctggggac

SEQ ID NO: 3560928 - DNA, 25 bp, Homo sapien
tggggcaacagagggtgagctgggg

SEQ ID NO: 3560929 - DNA, 25 bp, Homo sapien
cagccaggagcacgtaagtaatgaa

SEQ ID NO: 3560930 - DNA, 25 bp, Homo sapien
gccaggagcacgtaagtaatgaagg

SEQ ID NO: 3560931 - DNA, 25 bp, Homo sapien
caggagcacgtaagtaatgaaggcc

SEQ ID NO: 3560932 - DNA, 25 bp, Homo sapien
ccaggagcacgtaagtaatgaaggc

SEQ ID NO: 3560933 - DNA, 25 bp, Homo sapien
caatgatactgaagctcctctgagg

SEQ ID NO: 3560934 - DNA, 25 bp, Homo sapien
taaagcactagaattggctgggcgc

SEQ ID NO: 3560935 - DNA, 25 bp, Homo sapien
gagccgggcattagcagcagtttta

SEQ ID NO: 3560936 - DNA, 25 bp, Homo sapien
ttacacggtggctacgatgggcaca

SEQ ID NO: 3560937 - DNA, 25 bp, Homo sapien
ctgggtgtccacgatgggcctggcc

SEQ ID NO: 3560938 - DNA, 25 bp, Homo sapien
ctggccctgtgcagccaacaggaca

SEQ ID NO: 3560939 - DNA, 25 bp, Homo sapien
ccctgtgcagccaacaggacagaga

SEQ ID NO: 3560940 - DNA, 25 bp, Homo sapien
gaagagtcagctgtatgtgtgggca

SEQ ID NO: 3560941 - DNA, 25 bp, Homo sapien
gaaatcccatagctggagtctgcaa

SEQ ID NO: 3560942 - DNA, 25 bp, Homo sapien
caggaaggtctcaaaagggtgtcct

SEQ ID NO: 3560943 - DNA, 25 bp, Homo sapien
tgcaaagccaggtctaaacccagag

SEQ ID NO: 3560944 - DNA, 25 bp, Homo sapien
tgctgactcagtagctgcgcctctc

SEQ ID NO: 3560945 - DNA, 25 bp, Homo sapien
gaggagcatcacgactgtactgcac

SEQ ID NO: 3560946 - DNA, 25 bp, Homo sapien
agcatcacgactgtactgcacttcc

SEQ ID NO: 3560947 - DNA, 25 bp, Homo sapien
gcagaggagcatcacgactgtactg

SEQ ID NO: 3560948 - DNA, 25 bp, Homo sapien
tcaggggcgttgaggtcttgccggg

SEQ ID NO: 3560949 - DNA, 25 bp, Homo sapien
cttcttggccacgtaggctgtgtcc

SEQ ID NO: 3560950 - DNA, 25 bp, Homo sapien
atacttgagtttgctcacagacaca

SEQ ID NO: 3560951 - DNA, 25 bp, Homo sapien
ttggccacgtaggctgtgtccacag

SEQ ID NO: 3560952 - DNA, 25 bp, Homo sapien
aatacttgagtttgctcacagacac

SEQ ID NO: 3560953 - DNA, 25 bp, Homo sapien
ttcccatgggatgcgatggagctgc

SEQ ID NO: 3560954 - DNA, 25 bp, Homo sapien
catagccacattggccattgggtcc

SEQ ID NO: 3560955 - DNA, 25 bp, Homo sapien
tggctggaataaccaccgcttgtgt

SEQ ID NO: 3560956 - DNA, 25 bp, Homo sapien
ttgggtccccaagcaagtggttgac

SEQ ID NO: 3560957 - DNA, 25 bp, Homo sapien
ggctccgtagcccgagtgataagcc

SEQ ID NO: 3560958 - DNA, 25 bp, Homo sapien
gtgggctccgtagcccgagtgataa

SEQ ID NO: 3560959 - DNA, 25 bp, Homo sapien
ctccgtagcccgagtgataagccat

SEQ ID NO: 3560960 - DNA, 25 bp, Homo sapien
tgggctccgtagcccgagtgataag

SEQ ID NO: 3560961 - DNA, 25 bp, Homo sapien
ggtacgaatactaatgaggcagctg

SEQ ID NO: 3560962 - DNA, 25 bp, Homo sapien
gccggtctcggccaccatgtccgtg

SEQ ID NO: 3560963 - DNA, 25 bp, Homo sapien
gcgcccagggtaccgaccgaggcca

SEQ ID NO: 3560964 - DNA, 25 bp, Homo sapien
gctgcgccgcctcgtgggtacgaat

SEQ ID NO: 3560965 - DNA, 25 bp, Homo sapien
gccaccccgcccggctgtctcttct

SEQ ID NO: 3560966 - DNA, 25 bp, Homo sapien
gagatgaggtttctgcatgtcggcc

SEQ ID NO: 3560967 - DNA, 25 bp, Homo sapien
ggcacccgctgccacgcccatctaa

SEQ ID NO: 3560968 - DNA, 25 bp, Homo sapien
caccccgcccggctgtctcttcttt

SEQ ID NO: 3560969 - DNA, 25 bp, Homo sapien
gaatttccacatacgacgaaaggca

SEQ ID NO: 3560970 - DNA, 25 bp, Homo sapien
tcatagggtggctcgagggccagtg

SEQ ID NO: 3560971 - DNA, 25 bp, Homo sapien
tcgagggccagtgcgaagctccctt

SEQ ID NO: 3560972 - DNA, 25 bp, Homo sapien
gctcccttagggacgaatttccaca

SEQ ID NO: 3560973 - DNA, 25 bp, Homo sapien
actgagcaattagtacgctttgaga

SEQ ID NO: 3560974 - DNA, 25 bp, Homo sapien
gagcaattagtacgctttgagagag

SEQ ID NO: 3560975 - DNA, 25 bp, Homo sapien
caattagtacgctttgagagagagg

SEQ ID NO: 3560976 - DNA, 25 bp, Homo sapien
ttagtacgctttgagagagaggccc

SEQ ID NO: 3560977 - DNA, 25 bp, Homo sapien
aagttcatacctcctagaagccgag

SEQ ID NO: 3560978 - DNA, 25 bp, Homo sapien
ccctggagggcggagtttacatcat

SEQ ID NO: 3560979 - DNA, 25 bp, Homo sapien
tagcgccgcgtgaagagaatgtgta

SEQ ID NO: 3560980 - DNA, 25 bp, Homo sapien
tgacagtcctacgagggcgcagttc

SEQ ID NO: 3560981 - DNA, 25 bp, Homo sapien
caagtctagtggttgagagaggacc

SEQ ID NO: 3560982 - DNA, 25 bp, Homo sapien
tttattggagaagaccccagcaccc

SEQ ID NO: 3560983 - DNA, 25 bp, Homo sapien
tttggtgtatccttggtcacgagcg

SEQ ID NO: 3560984 - DNA, 25 bp, Homo sapien
catactccatgaggggggtctgcac

SEQ ID NO: 3560985 - DNA, 25 bp, Homo sapien
catggatgacccagcgatagcagtc

SEQ ID NO: 3560986 - DNA, 25 bp, Homo sapien
tacacgatgcccagtgcaagcagga

SEQ ID NO: 3560987 - DNA, 25 bp, Homo sapien
tctggctgtgctcggcaagaccagc

SEQ ID NO: 3560988 - DNA, 25 bp, Homo sapien
aaaaagacacacgttggcaccagga

SEQ ID NO: 3560989 - DNA, 25 bp, Homo sapien
gatctggtggtcacgggacaaagct

SEQ ID NO: 3560990 - DNA, 25 bp, Homo sapien
tgtcctctgggaagctcggtctata

SEQ ID NO: 3560991 - DNA, 25 bp, Homo sapien
tccgggtagggtatctgtggctctc

SEQ ID NO: 3560992 - DNA, 25 bp, Homo sapien
cctgggttctgaggacaagggcatc

SEQ ID NO: 3560993 - DNA, 25 bp, Homo sapien
cactcgaagccaccaacgtagttga

SEQ ID NO: 3560994 - DNA, 25 bp, Homo sapien
gcccagttggtgaaagccgtgtcct

SEQ ID NO: 3560995 - DNA, 25 bp, Homo sapien
tcaggctgcttcacgcagagcagag

SEQ ID NO: 3560996 - DNA, 25 bp, Homo sapien
aaactggcacaggtagccgtcgaca

SEQ ID NO: 3560997 - DNA, 25 bp, Homo sapien
cagctgctcgccatgcacgggaaca

SEQ ID NO: 3560998 - DNA, 25 bp, Homo sapien
tctgtgaccctcaagttggggctcg

SEQ ID NO: 3560999 - DNA, 25 bp, Homo sapien
caggccttgtaaggagtgggctggg

SEQ ID NO: 3561000 - DNA, 25 bp, Homo sapien
agaaggcgcagttgacggctgcccc

SEQ ID NO: 3561001 - DNA, 25 bp, Homo sapien
ccagtcatgagtcgggcaatggcca

SEQ ID NO: 3561002 - DNA, 25 bp, Homo sapien
agggtgtggtgagcccagtcatgag

SEQ ID NO: 3561003 - DNA, 25 bp, Homo sapien
tgagtcgggcaatggccagtactag

SEQ ID NO: 3561004 - DNA, 25 bp, Homo sapien
gtgagcccagtcatgagtcgggcaa

SEQ ID NO: 3561005 - DNA, 25 bp, Homo sapien
caagtatcagacaaaggtggtggca

SEQ ID NO: 3561006 - DNA, 25 bp, Homo sapien
tccctggaaacaagtatcagacaaa

SEQ ID NO: 3561007 - DNA, 25 bp, Homo sapien
cttgctggcgctaaaaggatttctc

SEQ ID NO: 3561008 - DNA, 25 bp, Homo sapien
ggctcagggtctcccgccccgaatg

SEQ ID NO: 3561009 - DNA, 25 bp, Homo sapien
ccccttcagcagttgtctcagactg

SEQ ID NO: 3561010 - DNA, 25 bp, Homo sapien
cagactgttcccgaatgtccctggg

SEQ ID NO: 3561011 - DNA, 25 bp, Homo sapien
gcagttgtctcagactgttcccgaa

SEQ ID NO: 3561012 - DNA, 25 bp, Homo sapien
tggcccccttcagcagttgtctcag

SEQ ID NO: 3561013 - DNA, 25 bp, Homo sapien
cccggcggtagacgaggtagccagt

SEQ ID NO: 3561014 - DNA, 25 bp, Homo sapien
tccgcccggcggtagacgaggtagc

SEQ ID NO: 3561015 - DNA, 25 bp, Homo sapien
gcggtagacgaggtagccagtggtg

SEQ ID NO: 3561016 - DNA, 25 bp, Homo sapien
cgcccggcggtagacgaggtagcca

SEQ ID NO: 3561017 - DNA, 25 bp, Homo sapien
gcagccactgctgggatcctgatag

SEQ ID NO: 3561018 - DNA, 25 bp, Homo sapien
agggtcttggaggtgcagccactgc

SEQ ID NO: 3561019 - DNA, 25 bp, Homo sapien
aacttggtggcacagagctggttca

SEQ ID NO: 3561020 - DNA, 25 bp, Homo sapien
aatcgaggcttctgggggcacggcc

SEQ ID NO: 3561021 - DNA, 25 bp, Homo sapien
tctggctccaaagctgagacatcag

SEQ ID NO: 3561022 - DNA, 25 bp, Homo sapien
gatagtgagtaatttgtgccccaag

SEQ ID NO: 3561023 - DNA, 25 bp, Homo sapien
gagtctggactcttcaccaaggaca

SEQ ID NO: 3561024 - DNA, 25 bp, Homo sapien
tgggagaaccaagcggcaaaagctc

SEQ ID NO: 3561025 - DNA, 25 bp, Homo sapien
ctgcacggggctcagtgggagggtg

SEQ ID NO: 3561026 - DNA, 25 bp, Homo sapien
tcctgcacggggctcagtgggaggg

SEQ ID NO: 3561027 - DNA, 25 bp, Homo sapien
cctgcacggggctcagtgggagggt

SEQ ID NO: 3561028 - DNA, 25 bp, Homo sapien
ccagcagctccgacatgtactcggc

SEQ ID NO: 3561029 - DNA, 25 bp, Homo sapien
ccgacatgtactcggcctccagcag

SEQ ID NO: 3561030 - DNA, 25 bp, Homo sapien
agcagctccgacatgtactcggcct

SEQ ID NO: 3561031 - DNA, 25 bp, Homo sapien
aggcaggaactcgtcggcacccgcg

SEQ ID NO: 3561032 - DNA, 25 bp, Homo sapien
agcttctggcgcacttgctccaact

SEQ ID NO: 3561033 - DNA, 25 bp, Homo sapien
ctgggtgagtaggtgcggagcagct

SEQ ID NO: 3561034 - DNA, 25 bp, Homo sapien
gcaggagccgcttgacctgggcgct

SEQ ID NO: 3561035 - DNA, 25 bp, Homo sapien
caggcggaggccctcagctaggcgg

SEQ ID NO: 3561036 - DNA, 25 bp, Homo sapien
ctgcggcaagccggcgccgcaggcg

SEQ ID NO: 3561037 - DNA, 25 bp, Homo sapien
gcggcaagccggcgccgcaggcggg

SEQ ID NO: 3561038 - DNA, 25 bp, Homo sapien
tgcggcaagccggcgccgcaggcgg

SEQ ID NO: 3561039 - DNA, 25 bp, Homo sapien
gagcacagagcaatgcaatgacttc

SEQ ID NO: 3561040 - DNA, 25 bp, Homo sapien
gatgggccggagaggcttgagcaca

SEQ ID NO: 3561041 - DNA, 25 bp, Homo sapien
caggatgggccggagaggcttgagc

SEQ ID NO: 3561042 - DNA, 25 bp, Homo sapien
ttgagcacagagcaatgcaatgact

SEQ ID NO: 3561043 - DNA, 25 bp, Homo sapien
tgtggacacgcgcactttgaagctt

SEQ ID NO: 3561044 - DNA, 25 bp, Homo sapien
gttgaagaagcacaaggcggctccg

SEQ ID NO: 3561045 - DNA, 25 bp, Homo sapien
tcatggaccgaagcagaggtcgtcg

SEQ ID NO: 3561046 - DNA, 25 bp, Homo sapien
ccttgatgttgagggaggagctcca

SEQ ID NO: 3561047 - DNA, 25 bp, Homo sapien
gcggtgtgctgcgagccttgccttc

SEQ ID NO: 3561048 - DNA, 25 bp, Homo sapien
ggtgtgctgcgagccttgccttccc

SEQ ID NO: 3561049 - DNA, 25 bp, Homo sapien
gggcggtgtgctgcgagccttgcct

SEQ ID NO: 3561050 - DNA, 25 bp, Homo sapien
cgggcggtgtgctgcgagccttgcc

SEQ ID NO: 3561051 - DNA, 25 bp, Homo sapien
gtgagtggctgcgtggtggatggct

SEQ ID NO: 3561052 - DNA, 25 bp, Homo sapien
tgagtggctgcgtggtggatggctc

SEQ ID NO: 3561053 - DNA, 25 bp, Homo sapien
gtctgggaacatgagctccgagccc

SEQ ID NO: 3561054 - DNA, 25 bp, Homo sapien
cacagatgagctggactaggtctgg

SEQ ID NO: 3561055 - DNA, 25 bp, Homo sapien
aacatgagctccgagccctccaagg

SEQ ID NO: 3561056 - DNA, 25 bp, Homo sapien
ggtgtggcagtaggcacagatgagc

SEQ ID NO: 3561057 - DNA, 25 bp, Homo sapien
ggcttcaggcaaccgcatgcacagg

SEQ ID NO: 3561058 - DNA, 25 bp, Homo sapien
gcactggcgggtgttagatttccgc

SEQ ID NO: 3561059 - DNA, 25 bp, Homo sapien
ggtgttagatttccgcacgaggaac

SEQ ID NO: 3561060 - DNA, 25 bp, Homo sapien
aggatgtagtggctggagacgaagg

SEQ ID NO: 3561061 - DNA, 25 bp, Homo sapien
ctcagcatgtgcagtgcggccgctg

SEQ ID NO: 3561062 - DNA, 25 bp, Homo sapien
gcggccgctgcgttggcttgcagct

SEQ ID NO: 3561063 - DNA, 25 bp, Homo sapien
gcattgggcacgtcatacagtgggt

SEQ ID NO: 3561064 - DNA, 25 bp, Homo sapien
acacgggccgggtgagcagcaggcg

SEQ ID NO: 3561065 - DNA, 25 bp, Homo sapien
cagtagtgaagctggacgggctggg

SEQ ID NO: 3561066 - DNA, 25 bp, Homo sapien
tcgccaggtgcccagtagtgaagct

SEQ ID NO: 3561067 - DNA, 25 bp, Homo sapien
gagagcccgcgcctgactctccagg

SEQ ID NO: 3561068 - DNA, 25 bp, Homo sapien
gagcccgcgcctgactctccagggc

SEQ ID NO: 3561069 - DNA, 25 bp, Homo sapien
tgggagctccttcgcttcaggaaga

SEQ ID NO: 3561070 - DNA, 25 bp, Homo sapien
tgtcacacccgccagttaactcttg

SEQ ID NO: 3561071 - DNA, 25 bp, Homo sapien
cccgccagttaactcttgtgtgtcc

SEQ ID NO: 3561072 - DNA, 25 bp, Homo sapien
ctgttctggaccctgctttgggggt

SEQ ID NO: 3561073 - DNA, 25 bp, Homo sapien
gggagccccaagagatggatcttca

SEQ ID NO: 3561074 - DNA, 25 bp, Homo sapien
aagaactgccctgagaacacctggg

SEQ ID NO: 3561075 - DNA, 25 bp, Homo sapien
caacatcagcaagaggatgtggctt

SEQ ID NO: 3561076 - DNA, 25 bp, Homo sapien
tcagagttcccgcacagtggaaact

SEQ ID NO: 3561077 - DNA, 25 bp, Homo sapien
cagctgctctgagggtccccctggc

SEQ ID NO: 3561078 - DNA, 25 bp, Homo sapien
ctgcaggaggaagacgagaatcctg

SEQ ID NO: 3561079 - DNA, 25 bp, Homo sapien
ggaagacgagaatcctgggtgcagt

SEQ ID NO: 3561080 - DNA, 25 bp, Homo sapien
ggaggaagacgagaatcctgggtgc

SEQ ID NO: 3561081 - DNA, 25 bp, Homo sapien
tctagaccatcctaactttcttgag

SEQ ID NO: 3561082 - DNA, 25 bp, Homo sapien
gagtgggagctccatcaacccagag

SEQ ID NO: 3561083 - DNA, 25 bp, Homo sapien
cttactgagtggctttgggctggcc

SEQ ID NO: 3561084 - DNA, 25 bp, Homo sapien
cctaactttcttgagccactgattc

SEQ ID NO: 3561085 - DNA, 25 bp, Homo sapien
tctcttctgaggggacacagctgcc

SEQ ID NO: 3561086 - DNA, 25 bp, Homo sapien
catccgattttctcttctgagggga

SEQ ID NO: 3561087 - DNA, 25 bp, Homo sapien
tccgattttctcttctgaggggaca

SEQ ID NO: 3561088 - DNA, 25 bp, Homo sapien
tttctcttctgaggggacacagctg

SEQ ID NO: 3561089 - DNA, 25 bp, Homo sapien
tgggctgttgcctcagtgctgtgcc

SEQ ID NO: 3561090 - DNA, 25 bp, Homo sapien
cccagggccgccttgagcaagagga

SEQ ID NO: 3561091 - DNA, 25 bp, Homo sapien
ggctgacacagactagaaatccctt

SEQ ID NO: 3561092 - DNA, 25 bp, Homo sapien
ggacttgtgagccaactgcgatcca

SEQ ID NO: 3561093 - DNA, 25 bp, Homo sapien
aggatgtcgatctcttgaagcatgt

SEQ ID NO: 3561094 - DNA, 25 bp, Homo sapien
gtcgatctcttgaagcatgtacacg

SEQ ID NO: 3561095 - DNA, 25 bp, Homo sapien
gatctcttgaagcatgtacacgatg

SEQ ID NO: 3561096 - DNA, 25 bp, Homo sapien
tgaagcatgtacacgatgtatgggc

SEQ ID NO: 3561097 - DNA, 25 bp, Homo sapien
cagaaaccagaggtgccttcttcct

SEQ ID NO: 3561098 - DNA, 25 bp, Homo sapien
tggcgtgcagtttgtcatcccacca

SEQ ID NO: 3561099 - DNA, 25 bp, Homo sapien
cctctggcgtgcagtttgtcatccc

SEQ ID NO: 3561100 - DNA, 25 bp, Homo sapien
gcgtgcagtttgtcatcccaccatt

SEQ ID NO: 3561101 - DNA, 25 bp, Homo sapien
tgcagcgtgtcatagagcagcagct

SEQ ID NO: 3561102 - DNA, 25 bp, Homo sapien
ggctctggcggtcctcctccagcct

SEQ ID NO: 3561103 - DNA, 25 bp, Homo sapien
cagcgtgtcatagagcagcagcttc

SEQ ID NO: 3561104 - DNA, 25 bp, Homo sapien
cccctgcagcgtgtcatagagcagc

SEQ ID NO: 3561105 - DNA, 25 bp, Homo sapien
ctggaagagggggcaatagctcagc

SEQ ID NO: 3561106 - DNA, 25 bp, Homo sapien
ccccagtgtgcccaatcaggcccac

SEQ ID NO: 3561107 - DNA, 25 bp, Homo sapien
aagagggggcaatagctcagcagga

SEQ ID NO: 3561108 - DNA, 25 bp, Homo sapien
cttcaggctttgtgccctgcctcac

SEQ ID NO: 3561109 - DNA, 25 bp, Homo sapien
tgcagctcacattcgtacttattcc

SEQ ID NO: 3561110 - DNA, 25 bp, Homo sapien
tccctgcagctcacattcgtactta

SEQ ID NO: 3561111 - DNA, 25 bp, Homo sapien
gctcacattcgtacttattcctgat

SEQ ID NO: 3561112 - DNA, 25 bp, Homo sapien
agctcacattcgtacttattcctga

SEQ ID NO: 3561113 - DNA, 25 bp, Homo sapien
gcccggtgcccacataggagggctg

SEQ ID NO: 3561114 - DNA, 25 bp, Homo sapien
ggagcccggtgcccacataggaggg

SEQ ID NO: 3561115 - DNA, 25 bp, Homo sapien
agcccggtgcccacataggagggct

SEQ ID NO: 3561116 - DNA, 25 bp, Homo sapien
tgccacgggttctgggaggggaaga

SEQ ID NO: 3561117 - DNA, 25 bp, Homo sapien
tgcgaatcttgaggctccgctgcag

SEQ ID NO: 3561118 - DNA, 25 bp, Homo sapien
ccccaaggggctccgtgtattcagg

SEQ ID NO: 3561119 - DNA, 25 bp, Homo sapien
cgcaaccgcagctgactcagtcgtt

SEQ ID NO: 3561120 - DNA, 25 bp, Homo sapien
ctgccacctgaatgcgaatcttgag

SEQ ID NO: 3561121 - DNA, 25 bp, Homo sapien
actcgctgcggcgtcgctcatagtc

SEQ ID NO: 3561122 - DNA, 25 bp, Homo sapien
gagaactgcttctctaggtccagca

SEQ ID NO: 3561123 - DNA, 25 bp, Homo sapien
ctgcggcgtcgctcatagtcctcat

SEQ ID NO: 3561124 - DNA, 25 bp, Homo sapien
ctttagctccgagaactgcttctct

SEQ ID NO: 3561125 - DNA, 25 bp, Homo sapien
ctcttctgtgtctttgcttggaggc

SEQ ID NO: 3561126 - DNA, 25 bp, Homo sapien
ctttgcttggaggctggacaggcat

SEQ ID NO: 3561127 - DNA, 25 bp, Homo sapien
tcagcagcagaatcaccctctgctt

SEQ ID NO: 3561128 - DNA, 25 bp, Homo sapien
cttctgactctgtctggctgccgct

SEQ ID NO: 3561129 - DNA, 25 bp, Homo sapien
gagctatcacttatggctgcccaca

SEQ ID NO: 3561130 - DNA, 25 bp, Homo sapien
tgaacacaactcgatcccagatggg

SEQ ID NO: 3561131 - DNA, 25 bp, Homo sapien
caccttgagcacaaactgggtgaca

SEQ ID NO: 3561132 - DNA, 25 bp, Homo sapien
tgtcactggtgatcctaatcctagc

SEQ ID NO: 3561133 - DNA, 25 bp, Homo sapien
gaaccaaaagccatgcatgacgata

SEQ ID NO: 3561134 - DNA, 25 bp, Homo sapien
gagggcgaaccaaaagccatgcatg

SEQ ID NO: 3561135 - DNA, 25 bp, Homo sapien
caaaagccatgcatgacgatacgca

SEQ ID NO: 3561136 - DNA, 25 bp, Homo sapien
cggagagggcgaaccaaaagccatg

SEQ ID NO: 3561137 - DNA, 25 bp, Homo sapien
gcgggccggtctccatagtaactgg

SEQ ID NO: 3561138 - DNA, 25 bp, Homo sapien
gaggcagagcctatcggtgcttccg

SEQ ID NO: 3561139 - DNA, 25 bp, Homo sapien
tagtaactggccgacattcgcgcag

SEQ ID NO: 3561140 - DNA, 25 bp, Homo sapien
tccgtgtgcgtcatcaggaggcgac

SEQ ID NO: 3561141 - DNA, 25 bp, Homo sapien
cagcccgttgaagggacagatctca

SEQ ID NO: 3561142 - DNA, 25 bp, Homo sapien
gctacctctgtaaagtggagcgaca

SEQ ID NO: 3561143 - DNA, 25 bp, Homo sapien
cccaacagttccgtgaggtaggtat

SEQ ID NO: 3561144 - DNA, 25 bp, Homo sapien
tagtggtaaagctaggaatcgatcc

SEQ ID NO: 3561145 - DNA, 25 bp, Homo sapien
gacttctcagattaggggagggaag

SEQ ID NO: 3561146 - DNA, 25 bp, Homo sapien
acttctcagattaggggagggaagg

SEQ ID NO: 3561147 - DNA, 25 bp, Homo sapien
tgacttctcagattaggggagggaa

SEQ ID NO: 3561148 - DNA, 25 bp, Homo sapien
agcagcgtcggggagagttggggta

SEQ ID NO: 3561149 - DNA, 25 bp, Homo sapien
tctttgaagcccttatgaaccaaga

SEQ ID NO: 3561150 - DNA, 25 bp, Homo sapien
ctcctgtttgaactggcgatatagg

SEQ ID NO: 3561151 - DNA, 25 bp, Homo sapien
gggatggaacttcaacgcttctttg

SEQ ID NO: 3561152 - DNA, 25 bp, Homo sapien
tgaaccaagaaaccttcgttcagga

SEQ ID NO: 3561153 - DNA, 25 bp, Homo sapien
caaaccccgccacatgcagctcgca

SEQ ID NO: 3561154 - DNA, 25 bp, Homo sapien
accccgccacatgcagctcgcaggc

SEQ ID NO: 3561155 - DNA, 25 bp, Homo sapien
ctcaaaatcaaaccccgccacatgc

SEQ ID NO: 3561156 - DNA, 25 bp, Homo sapien
atcaaaccccgccacatgcagctcg

SEQ ID NO: 3561157 - DNA, 25 bp, Homo sapien
agccacagtccagcgtcctcacccc

SEQ ID NO: 3561158 - DNA, 25 bp, Homo sapien
caggttagcaaagtttgatgacatt

SEQ ID NO: 3561159 - DNA, 25 bp, Homo sapien
gacaggttagcaaagtttgatgaca

SEQ ID NO: 3561160 - DNA, 25 bp, Homo sapien
aagacaggttagcaaagtttgatga

SEQ ID NO: 3561161 - DNA, 25 bp, Homo sapien
ccagggccactcctcataactccct

SEQ ID NO: 3561162 - DNA, 25 bp, Homo sapien
tcataactccctgatcccaccaccc

SEQ ID NO: 3561163 - DNA, 25 bp, Homo sapien
cactcctcataactccctgatccca

SEQ ID NO: 3561164 - DNA, 25 bp, Homo sapien
ggccactcctcataactccctgatc

SEQ ID NO: 3561165 - DNA, 25 bp, Homo sapien
caggttgacccagcgggaatagttg

SEQ ID NO: 3561166 - DNA, 25 bp, Homo sapien
gcagcaagctctcttccggcaggtt

SEQ ID NO: 3561167 - DNA, 25 bp, Homo sapien
ggtcctgccaaggtaccacgtaggc

SEQ ID NO: 3561168 - DNA, 25 bp, Homo sapien
gtactgccgaaagcgctcgtcgaag

SEQ ID NO: 3561169 - DNA, 25 bp, Homo sapien
tgcacaacccataatagaagggccg

SEQ ID NO: 3561170 - DNA, 25 bp, Homo sapien
gggtgcacaacccataatagaaggg

SEQ ID NO: 3561171 - DNA, 25 bp, Homo sapien
tggcagggggtgcacaacccataat

SEQ ID NO: 3561172 - DNA, 25 bp, Homo sapien
acaacccataatagaagggccgcac

SEQ ID NO: 3561173 - DNA, 25 bp, Homo sapien
ggagacattggtgcccagcgcataa

SEQ ID NO: 3561174 - DNA, 25 bp, Homo sapien
tgtccacatcgatcaccagggcata

SEQ ID NO: 3561175 - DNA, 25 bp, Homo sapien
cgcataattaatcccgggctgggcc

SEQ ID NO: 3561176 - DNA, 25 bp, Homo sapien
gccaccctggctagcttgtcaaaga

SEQ ID NO: 3561177 - DNA, 25 bp, Homo sapien
acagactacgccagcggccgcaagc

SEQ ID NO: 3561178 - DNA, 25 bp, Homo sapien
ggccgcaagcccggatttaccgcag

SEQ ID NO: 3561179 - DNA, 25 bp, Homo sapien
gggcgcgcagcaacgaccacccggc

SEQ ID NO: 3561180 - DNA, 25 bp, Homo sapien
atttaccgcagcctgccgagcgcag

SEQ ID NO: 3561181 - DNA, 25 bp, Homo sapien
acctgcaatatgttttaggtgtgcc

SEQ ID NO: 3561182 - DNA, 25 bp, Homo sapien
tgttttaggtgtgcctataattggt

SEQ ID NO: 3561183 - DNA, 25 bp, Homo sapien
aatctagttaaaggtgtgtcagttt

SEQ ID NO: 3561184 - DNA, 25 bp, Homo sapien
aatatgttttaggtgtgcctataat

SEQ ID NO: 3561185 - DNA, 25 bp, Homo sapien
gcatcttgccctgcatgtatatggc

SEQ ID NO: 3561186 - DNA, 25 bp, Homo sapien
accaccactaactcagaagggaaat

SEQ ID NO: 3561187 - DNA, 25 bp, Homo sapien
gagaaccaaaggctagggtcccaca

SEQ ID NO: 3561188 - DNA, 25 bp, Homo sapien
tccccagacaggtcggaactaatag

SEQ ID NO: 3561189 - DNA, 25 bp, Homo sapien
ccagctatcatgtggtccagaggac

SEQ ID NO: 3561190 - DNA, 25 bp, Homo sapien
ctccaagtggatgaagagcagctcc

SEQ ID NO: 3561191 - DNA, 25 bp, Homo sapien
tccatgaggtcttgtgcgagtcacc

SEQ ID NO: 3561192 - DNA, 25 bp, Homo sapien
gccaatagagccaacagcacttcgg

SEQ ID NO: 3561193 - DNA, 25 bp, Homo sapien
cacctccctctcgtgtggcagcacc

SEQ ID NO: 3561194 - DNA, 25 bp, Homo sapien
cctccctctcgtgtggcagcacctg

SEQ ID NO: 3561195 - DNA, 25 bp, Homo sapien
gctccacaggaaagtcccagggcca

SEQ ID NO: 3561196 - DNA, 25 bp, Homo sapien
acctccctctcgtgtggcagcacct

SEQ ID NO: 3561197 - DNA, 25 bp, Homo sapien
cacatggtgagggacaccaggtagc

SEQ ID NO: 3561198 - DNA, 25 bp, Homo sapien
gcacatggtgagggacaccaggtag

SEQ ID NO: 3561199 - DNA, 25 bp, Homo sapien
aagaggggcacgaacaggaaccgca

SEQ ID NO: 3561200 - DNA, 25 bp, Homo sapien
tgaagtaggcatcctgtgggaagag

SEQ ID NO: 3561201 - DNA, 25 bp, Homo sapien
ggcacgtggcacagcatgaagaggg

SEQ ID NO: 3561202 - DNA, 25 bp, Homo sapien
ttagaaacggcaaagagcagcatga

SEQ ID NO: 3561203 - DNA, 25 bp, Homo sapien
tgtgtgtgtacagacaaagtctcac

SEQ ID NO: 3561204 - DNA, 25 bp, Homo sapien
gtgtgtgtgtacagacaaagtctca

SEQ ID NO: 3561205 - DNA, 25 bp, Homo sapien
tccgtcccagccagtccatgatgtt

SEQ ID NO: 3561206 - DNA, 25 bp, Homo sapien
ccacaggaagtaagaggtcaggctc

SEQ ID NO: 3561207 - DNA, 25 bp, Homo sapien
gaagtaagaggtcaggctccgtccc

SEQ ID NO: 3561208 - DNA, 25 bp, Homo sapien
cagcagatggggttgaagaactgac

SEQ ID NO: 3561209 - DNA, 25 bp, Homo sapien
ccacttcccaggactggtggagctg

SEQ ID NO: 3561210 - DNA, 25 bp, Homo sapien
cacttcccaggactggtggagctgg

SEQ ID NO: 3561211 - DNA, 25 bp, Homo sapien
tccacttcccaggactggtggagct

SEQ ID NO: 3561212 - DNA, 25 bp, Homo sapien
tgtgatggcggggaagacggacagg

SEQ ID NO: 3561213 - DNA, 25 bp, Homo sapien
caccatggctgtgatggcggggaag

SEQ ID NO: 3561214 - DNA, 25 bp, Homo sapien
tcaccatggctgtgatggcggggaa

SEQ ID NO: 3561215 - DNA, 25 bp, Homo sapien
tggctgtgatggcggggaagacgga

SEQ ID NO: 3561216 - DNA, 25 bp, Homo sapien
caaggcacagcgctgtcagccagat

SEQ ID NO: 3561217 - DNA, 25 bp, Homo sapien
aacacaaggcacagcgctgtcagcc

SEQ ID NO: 3561218 - DNA, 25 bp, Homo sapien
tgaagaccaacacaaggcacagcgc

SEQ ID NO: 3561219 - DNA, 25 bp, Homo sapien
agaccaacacaaggcacagcgctgt

SEQ ID NO: 3561220 - DNA, 25 bp, Homo sapien
caggtcaagatccagggtcagagct

SEQ ID NO: 3561221 - DNA, 25 bp, Homo sapien
tctccaggtcaagatccagggtcag

SEQ ID NO: 3561222 - DNA, 25 bp, Homo sapien
ccttctccaggtcaagatccagggt

SEQ ID NO: 3561223 - DNA, 25 bp, Homo sapien
tctggctctgattccggctccttct

SEQ ID NO: 3561224 - DNA, 25 bp, Homo sapien
ccaattcagaggtcttcggatccaa

SEQ ID NO: 3561225 - DNA, 25 bp, Homo sapien
tgatgagcgaagcaccttagatgga

SEQ ID NO: 3561226 - DNA, 25 bp, Homo sapien
ccacacagctgggatgttgtgaaac

SEQ ID NO: 3561227 - DNA, 25 bp, Homo sapien
tgcatgcatggaacctctgtcgcct

SEQ ID NO: 3561228 - DNA, 25 bp, Homo sapien
ctgggatgatttattggccaggtag

SEQ ID NO: 3561229 - DNA, 25 bp, Homo sapien
gcttgggcctgggatgatttattgg

SEQ ID NO: 3561230 - DNA, 25 bp, Homo sapien
ttgggcctgggatgatttattggcc

SEQ ID NO: 3561231 - DNA, 25 bp, Homo sapien
cctgggatgatttattggccaggta

SEQ ID NO: 3561232 - DNA, 25 bp, Homo sapien
ggcgtgataaagtaccccagggcag

SEQ ID NO: 3561233 - DNA, 25 bp, Homo sapien
atgaggatgcccacacagggcgtga

SEQ ID NO: 3561234 - DNA, 25 bp, Homo sapien
ggcagaggtctcggcgtccacgcca

SEQ ID NO: 3561235 - DNA, 25 bp, Homo sapien
caggctcaggtaacacacgatggac

SEQ ID NO: 3561236 - DNA, 25 bp, Homo sapien
gctgccctgtaggactgcactgaag

SEQ ID NO: 3561237 - DNA, 25 bp, Homo sapien
ctgccctgtaggactgcactgaagg

SEQ ID NO: 3561238 - DNA, 25 bp, Homo sapien
aggaagagggtgctgtaggtggagg

SEQ ID NO: 3561239 - DNA, 25 bp, Homo sapien
tcaactaggcaagactcagaggctc

SEQ ID NO: 3561240 - DNA, 25 bp, Homo sapien
gctattcagtcctcttctgaggtgc

SEQ ID NO: 3561241 - DNA, 25 bp, Homo sapien
cacaggggactctggacaaggttgc

SEQ ID NO: 3561242 - DNA, 25 bp, Homo sapien
caaggttgcgcaggtgtgagcttcc

SEQ ID NO: 3561243 - DNA, 25 bp, Homo sapien
gtgatggagaagaagggtccggggc

SEQ ID NO: 3561244 - DNA, 25 bp, Homo sapien
tggagaagaagggtccggggctcat

SEQ ID NO: 3561245 - DNA, 25 bp, Homo sapien
aaagagcagcagtatggccagcagg

SEQ ID NO: 3561246 - DNA, 25 bp, Homo sapien
caaagagcagcagtatggccagcag

SEQ ID NO: 3561247 - DNA, 25 bp, Homo sapien
ggcaaagagcagcagtatggccagc

SEQ ID NO: 3561248 - DNA, 25 bp, Homo sapien
agagcagcagtatggccagcaggct

SEQ ID NO: 3561249 - DNA, 25 bp, Homo sapien
gaaggaggctcgacacctggggctg

SEQ ID NO: 3561250 - DNA, 25 bp, Homo sapien
gggagggcctcaatgaagctgcctc

SEQ ID NO: 3561251 - DNA, 25 bp, Homo sapien
caggcagagtgcatcagtggggccc

SEQ ID NO: 3561252 - DNA, 25 bp, Homo sapien
ctcaatgaagctgcctcggcagagg

SEQ ID NO: 3561253 - DNA, 25 bp, Homo sapien
gacagcagcgtcacccaattgttga

SEQ ID NO: 3561254 - DNA, 25 bp, Homo sapien
aggcatcctcgggacccgtgtggtt

SEQ ID NO: 3561255 - DNA, 25 bp, Homo sapien
tgttgaagttgaaggcatcctcggg

SEQ ID NO: 3561256 - DNA, 25 bp, Homo sapien
gcagcgtcacccaattgttgaagtt

SEQ ID NO: 3561257 - DNA, 25 bp, Homo sapien
gaagctgatcccgaccaggtggtag

SEQ ID NO: 3561258 - DNA, 25 bp, Homo sapien
gaagaagctgatcccgaccaggtgg

SEQ ID NO: 3561259 - DNA, 25 bp, Homo sapien
atgaagaagctgatcccgaccaggt

SEQ ID NO: 3561260 - DNA, 25 bp, Homo sapien
gatgaagaagctgatcccgaccagg

SEQ ID NO: 3561261 - DNA, 25 bp, Homo sapien
gtgggaaggtcaccccgaggacgca

SEQ ID NO: 3561262 - DNA, 25 bp, Homo sapien
tgggaaggtcaccccgaggacgcac

SEQ ID NO: 3561263 - DNA, 25 bp, Homo sapien
gtcccgcggggcgtctcctcgcgcc

SEQ ID NO: 3561264 - DNA, 25 bp, Homo sapien
ctgtcccgcggggcgtctcctcgcg

SEQ ID NO: 3561265 - DNA, 25 bp, Homo sapien
tcccgcggggcgtctcctcgcgcca

SEQ ID NO: 3561266 - DNA, 25 bp, Homo sapien
cccgcggggcgtctcctcgcgccat

SEQ ID NO: 3561267 - DNA, 25 bp, Homo sapien
ggtgaaaggggcagagaagccgcac

SEQ ID NO: 3561268 - DNA, 25 bp, Homo sapien
tggggtgaaaggggcagagaagccg

SEQ ID NO: 3561269 - DNA, 25 bp, Homo sapien
ctggggtgaaaggggcagagaagcc

SEQ ID NO: 3561270 - DNA, 25 bp, Homo sapien
gggtgaaaggggcagagaagccgca

SEQ ID NO: 3561271 - DNA, 25 bp, Homo sapien
cctcgggcggatttcggcgtgtctc

SEQ ID NO: 3561272 - DNA, 25 bp, Homo sapien
tcagggactcgactctggctcgggc

SEQ ID NO: 3561273 - DNA, 25 bp, Homo sapien
cggctggagtcgcacaggtagcctc

SEQ ID NO: 3561274 - DNA, 25 bp, Homo sapien
tctccccagattccggtgcagggcg

SEQ ID NO: 3561275 - DNA, 25 bp, Homo sapien
aggtgatgccagagccgctcctgcg

SEQ ID NO: 3561276 - DNA, 25 bp, Homo sapien
cctaactagggagccgctgcggagt

SEQ ID NO: 3561277 - DNA, 25 bp, Homo sapien
ctcctgcgacccctaaagctggaac

SEQ ID NO: 3561278 - DNA, 25 bp, Homo sapien
ttcccgcttcgtcagctccgaggtg

SEQ ID NO: 3561279 - DNA, 25 bp, Homo sapien
tttgttaattatacctttgatttgc

SEQ ID NO: 3561280 - DNA, 25 bp, Homo sapien
gttaattatacctttgatttgcagc

SEQ ID NO: 3561281 - DNA, 25 bp, Homo sapien
tatacctttgatttgcagctgcagc

SEQ ID NO: 3561282 - DNA, 25 bp, Homo sapien
aattatacctttgatttgcagctgc

SEQ ID NO: 3561283 - DNA, 25 bp, Homo sapien
gatctgcccgccttggcatcccaaa

SEQ ID NO: 3561284 - DNA, 25 bp, Homo sapien
tgatctgcccgccttggcatcccaa

SEQ ID NO: 3561285 - DNA, 25 bp, Homo sapien
ctggagttcagtggctcattctcgg

SEQ ID NO: 3561286 - DNA, 25 bp, Homo sapien
gttcagtggctcattctcggctcac

SEQ ID NO: 3561287 - DNA, 25 bp, Homo sapien
gcagccgcggggccgtgacgcctgg

SEQ ID NO: 3561288 - DNA, 25 bp, Homo sapien
gccgtgacgcctggcggagggggcg

SEQ ID NO: 3561289 - DNA, 25 bp, Homo sapien
cgtgacgcctggcggagggggcgcg

SEQ ID NO: 3561290 - DNA, 25 bp, Homo sapien
gacgcctggcggagggggcgcgcat

SEQ ID NO: 3561291 - DNA, 25 bp, Homo sapien
tggtgatataaatagctcctctccc

SEQ ID NO: 3561292 - DNA, 25 bp, Homo sapien
tatttcggaaccgtcactggtgata

SEQ ID NO: 3561293 - DNA, 25 bp, Homo sapien
tgcacagttaaaaatagcttcacgg

SEQ ID NO: 3561294 - DNA, 25 bp, Homo sapien
taaaaatagcttcacggaggtggga

SEQ ID NO: 3561295 - DNA, 25 bp, Homo sapien
cggcaaaccgtagcatgacttccat

SEQ ID NO: 3561296 - DNA, 25 bp, Homo sapien
tgtgggtacccaagccctacgtcga

SEQ ID NO: 3561297 - DNA, 25 bp, Homo sapien
ggtacccaagccctacgtcgatgtc

SEQ ID NO: 3561298 - DNA, 25 bp, Homo sapien
cgatgtccccggcaaaccgtagcat

SEQ ID NO: 3561299 - DNA, 25 bp, Homo sapien
tgtcatcaagacgtggagccgctct

SEQ ID NO: 3561300 - DNA, 25 bp, Homo sapien
taacgtcgtcaagtatggcatattg

SEQ ID NO: 3561301 - DNA, 25 bp, Homo sapien
ccaacgttttgaataagtctgtgac

SEQ ID NO: 3561302 - DNA, 25 bp, Homo sapien
tatctctctgcagatggaagtggag

SEQ ID NO: 3561303 - DNA, 25 bp, Homo sapien
tgaatgggatttcaagcggagaatg

SEQ ID NO: 3561304 - DNA, 25 bp, Homo sapien
tattcactcgtagtgagtttccttg

SEQ ID NO: 3561305 - DNA, 25 bp, Homo sapien
cgtagtgagtttccttgaatgggat

SEQ ID NO: 3561306 - DNA, 25 bp, Homo sapien
catttcaatctgtattcactcgtag

SEQ ID NO: 3561307 - DNA, 25 bp, Homo sapien
gagacgctacgttcctttccgatgg

SEQ ID NO: 3561308 - DNA, 25 bp, Homo sapien
tgctgcggtgactttgtagccaact

SEQ ID NO: 3561309 - DNA, 25 bp, Homo sapien
ttcaattccgatggactctgccgcc

SEQ ID NO: 3561310 - DNA, 25 bp, Homo sapien
tctctacacaccagtaacgggattt

SEQ ID NO: 3561311 - DNA, 25 bp, Homo sapien
gatggtcagtaaatgcgaatctcct

SEQ ID NO: 3561312 - DNA, 25 bp, Homo sapien
tactccatgtagtaaccctgcctgg

SEQ ID NO: 3561313 - DNA, 25 bp, Homo sapien
tattggctaccaccagtactggttc

SEQ ID NO: 3561314 - DNA, 25 bp, Homo sapien
caggcaggaacctactgaagctttg

SEQ ID NO: 3561315 - DNA, 25 bp, Homo sapien
ttttgcaactacctcctttgaaatc

SEQ ID NO: 3561316 - DNA, 25 bp, Homo sapien
cttttgcaactacctcctttgaaat

SEQ ID NO: 3561317 - DNA, 25 bp, Homo sapien
tcttcttgggcagccaaatctgcct

SEQ ID NO: 3561318 - DNA, 25 bp, Homo sapien
ttctcccacttggatccttcatgga

SEQ ID NO: 3561319 - DNA, 25 bp, Homo sapien
ttggatccttcatggagatctttcc

SEQ ID NO: 3561320 - DNA, 25 bp, Homo sapien
ggatccttcatggagatctttccat

SEQ ID NO: 3561321 - DNA, 25 bp, Homo sapien
acttggatccttcatggagatcttt

SEQ ID NO: 3561322 - DNA, 25 bp, Homo sapien
tcctgagctttgatgcgggcaatct

SEQ ID NO: 3561323 - DNA, 25 bp, Homo sapien
ttcaccacgcgaatgcccagagaac

SEQ ID NO: 3561324 - DNA, 25 bp, Homo sapien
atgatggagcggacaacagacgaca

SEQ ID NO: 3561325 - DNA, 25 bp, Homo sapien
gatgcgggcaatctcatacacatgc

SEQ ID NO: 3561326 - DNA, 25 bp, Homo sapien
gaaacagtgggctgtccaatcttaa

SEQ ID NO: 3561327 - DNA, 25 bp, Homo sapien
cttcaggaagtaggaaacagtgggc

SEQ ID NO: 3561328 - DNA, 25 bp, Homo sapien
gtaggaaacagtgggctgtccaatc

SEQ ID NO: 3561329 - DNA, 25 bp, Homo sapien
gaagtaggaaacagtgggctgtcca

SEQ ID NO: 3561330 - DNA, 25 bp, Homo sapien
ttgatgtcctttgtcctctcattga

SEQ ID NO: 3561331 - DNA, 25 bp, Homo sapien
ttccttgatgtcctttgtcctctca

SEQ ID NO: 3561332 - DNA, 25 bp, Homo sapien
tgtcctttgtcctctcattgaactc

SEQ ID NO: 3561333 - DNA, 25 bp, Homo sapien
gatgtcctttgtcctctcattgaac

SEQ ID NO: 3561334 - DNA, 25 bp, Homo sapien
cccgcacgatcgcccggatcacacc

SEQ ID NO: 3561335 - DNA, 25 bp, Homo sapien
cgcacgatcgcccggatcacaccgc

SEQ ID NO: 3561336 - DNA, 25 bp, Homo sapien
cacgatcgcccggatcacaccgccg

SEQ ID NO: 3561337 - DNA, 25 bp, Homo sapien
acgatcgcccggatcacaccgccga

SEQ ID NO: 3561338 - DNA, 25 bp, Homo sapien
ctcgggcttcctgaggccccgggcg

SEQ ID NO: 3561339 - DNA, 25 bp, Homo sapien
gggcggcccggccgagctttgacat

SEQ ID NO: 3561340 - DNA, 25 bp, Homo sapien
cgggcggcccggccgagctttgaca

SEQ ID NO: 3561341 - DNA, 25 bp, Homo sapien
tgcggggctgctggcttcagttcac

SEQ ID NO: 3561342 - DNA, 25 bp, Homo sapien
gatgcggggctgctggcttcagttc

SEQ ID NO: 3561343 - DNA, 25 bp, Homo sapien
atgcggggctgctggcttcagttca

SEQ ID NO: 3561344 - DNA, 25 bp, Homo sapien
gggagcagcaagagcgaagctctgg

SEQ ID NO: 3561345 - DNA, 25 bp, Homo sapien
cagcaagagcgaagctctgggcgcc

SEQ ID NO: 3561346 - DNA, 25 bp, Homo sapien
agagcgaagctctgggcgccaccat

SEQ ID NO: 3561347 - DNA, 25 bp, Homo sapien
gcaagagcgaagctctgggcgccac

SEQ ID NO: 3561348 - DNA, 25 bp, Homo sapien
acattttctcactcatagatgggaa

SEQ ID NO: 3561349 - DNA, 25 bp, Homo sapien
tgggaattgaacaatgagaacacat

SEQ ID NO: 3561350 - DNA, 25 bp, Homo sapien
atgggaattgaacaatgagaacaca

SEQ ID NO: 3561351 - DNA, 25 bp, Homo sapien
caccacattttctcactcatagatg

SEQ ID NO: 3561352 - DNA, 25 bp, Homo sapien
gaagacaggtctgcgactctggtca

SEQ ID NO: 3561353 - DNA, 25 bp, Homo sapien
tttgctcaaagcacagcgcacagcg

SEQ ID NO: 3561354 - DNA, 25 bp, Homo sapien
gaggctccatccctagtcagaacga

SEQ ID NO: 3561355 - DNA, 25 bp, Homo sapien
taaaatgggcaactatcgtgcctgc

SEQ ID NO: 3561356 - DNA, 25 bp, Homo sapien
ttttggtgaccttgcatacagagca

SEQ ID NO: 3561357 - DNA, 25 bp, Homo sapien
catgagagtcccctatgtacataca

SEQ ID NO: 3561358 - DNA, 25 bp, Homo sapien
gtggtaacagacacgtcccctggag

SEQ ID NO: 3561359 - DNA, 25 bp, Homo sapien
gccgctccacagagaacatgattga

SEQ ID NO: 3561360 - DNA, 25 bp, Homo sapien
tgatccctcatgtggtcccaggagc

SEQ ID NO: 3561361 - DNA, 25 bp, Homo sapien
tgggccgcctctgaacttgaaggta

SEQ ID NO: 3561362 - DNA, 25 bp, Homo sapien
tggatggactgaccaccaatggagt

SEQ ID NO: 3561363 - DNA, 25 bp, Homo sapien
cagagagacgctcaagtcatgcagc

SEQ ID NO: 3561364 - DNA, 25 bp, Homo sapien
gcagacagaccagggtccccaagca

SEQ ID NO: 3561365 - DNA, 25 bp, Homo sapien
agaccagggtccccaagcatagcat

SEQ ID NO: 3561366 - DNA, 25 bp, Homo sapien
agacagaccagggtccccaagcata

SEQ ID NO: 3561367 - DNA, 25 bp, Homo sapien
ccagggtccccaagcatagcatgca

SEQ ID NO: 3561368 - DNA, 25 bp, Homo sapien
gtgatgcgatcaaggcacacacaga

SEQ ID NO: 3561369 - DNA, 25 bp, Homo sapien
cacagacatactgtgcagtcccagg

SEQ ID NO: 3561370 - DNA, 25 bp, Homo sapien
tccagggggtgatgcgatcaaggca

SEQ ID NO: 3561371 - DNA, 25 bp, Homo sapien
acacagacatactgtgcagtcccag

SEQ ID NO: 3561372 - DNA, 25 bp, Homo sapien
tccttgtggtacagatcagagagct

SEQ ID NO: 3561373 - DNA, 25 bp, Homo sapien
gaaagggtccttacagtagttctga

SEQ ID NO: 3561374 - DNA, 25 bp, Homo sapien
tcttatgagagtgacacttggccca

SEQ ID NO: 3561375 - DNA, 25 bp, Homo sapien
tatcacgttcagacaggtttagcac

SEQ ID NO: 3561376 - DNA, 25 bp, Homo sapien
acaagcctactcttcttgagcacta

SEQ ID NO: 3561377 - DNA, 25 bp, Homo sapien
atgtgaatgtttcacaagcctactc

SEQ ID NO: 3561378 - DNA, 25 bp, Homo sapien
gagcactatttgccacgcactgttc

SEQ ID NO: 3561379 - DNA, 25 bp, Homo sapien
gaatgtttcacaagcctactcttct

SEQ ID NO: 3561380 - DNA, 25 bp, Homo sapien
gaaggtgcagtccatcttgaggatg

SEQ ID NO: 3561381 - DNA, 25 bp, Homo sapien
aatcttcacaagaaccacttgagat

SEQ ID NO: 3561382 - DNA, 25 bp, Homo sapien
tgccagaaggtgcagtccatcttga

SEQ ID NO: 3561383 - DNA, 25 bp, Homo sapien
cacaagaaccacttgagatgccaga

SEQ ID NO: 3561384 - DNA, 25 bp, Homo sapien
tgggttcctctataaacctcgctgc

SEQ ID NO: 3561385 - DNA, 25 bp, Homo sapien
tgggcctagcacttgctgatagcca

SEQ ID NO: 3561386 - DNA, 25 bp, Homo sapien
ctctgtcctgggtcgatggaggaaa

SEQ ID NO: 3561387 - DNA, 25 bp, Homo sapien
cactatgggctcgactctgtgctaa

SEQ ID NO: 3561388 - DNA, 25 bp, Homo sapien
ggacctacccgtgcttgtgttggaa

SEQ ID NO: 3561389 - DNA, 25 bp, Homo sapien
cccaagaagggaggtgttgccattt

SEQ ID NO: 3561390 - DNA, 25 bp, Homo sapien
tgagccaagtcttgaatggcagagc

SEQ ID NO: 3561391 - DNA, 25 bp, Homo sapien
tttggatactagattggtggacacc

SEQ ID NO: 3561392 - DNA, 25 bp, Homo sapien
caagggacctcagtatatgctcatc

SEQ ID NO: 3561393 - DNA, 25 bp, Homo sapien
gaccgtgcgggatttcagtacccaa

SEQ ID NO: 3561394 - DNA, 25 bp, Homo sapien
taacactgttgtgtcaagcagggcc

SEQ ID NO: 3561395 - DNA, 25 bp, Homo sapien
taaggacaccgaccaacttgttgaa

SEQ ID NO: 3561396 - DNA, 25 bp, Homo sapien
aagtccctgacacccgcgccgtctc

SEQ ID NO: 3561397 - DNA, 25 bp, Homo sapien
tcagtcccgtctgccgggactaggc

SEQ ID NO: 3561398 - DNA, 25 bp, Homo sapien
cccgcgccgtctcggcctgggcttg

SEQ ID NO: 3561399 - DNA, 25 bp, Homo sapien
ttggtgacctcgtcagtcccgtctg

SEQ ID NO: 3561400 - DNA, 25 bp, Homo sapien
catttattgctgtggatactttccg

SEQ ID NO: 3561401 - DNA, 25 bp, Homo sapien
tagcgcacccacctggtaatattgg

SEQ ID NO: 3561402 - DNA, 25 bp, Homo sapien
gctggacactctgtcccagccggga

SEQ ID NO: 3561403 - DNA, 25 bp, Homo sapien
tactttccgtccagggcgacttcat

SEQ ID NO: 3561404 - DNA, 25 bp, Homo sapien
gaagatcagttaggccagacaacgg

SEQ ID NO: 3561405 - DNA, 25 bp, Homo sapien
tgggccttaaaggacacagtagctt

SEQ ID NO: 3561406 - DNA, 25 bp, Homo sapien
ggcctctccggctctaacatgtgat

SEQ ID NO: 3561407 - DNA, 25 bp, Homo sapien
tagacagatgattaaggcctctccg

SEQ ID NO: 3561408 - DNA, 25 bp, Homo sapien
aaccctcagtaacaacacttctaca

SEQ ID NO: 3561409 - DNA, 25 bp, Homo sapien
taagaacgaaggacatttttggaca

SEQ ID NO: 3561410 - DNA, 25 bp, Homo sapien
gcccagccaggacatcttttaagaa

SEQ ID NO: 3561411 - DNA, 25 bp, Homo sapien
acacttctacaggatataatttagg

SEQ ID NO: 3561412 - DNA, 25 bp, Homo sapien
gaaggtgtcaagtcttacactaggt

SEQ ID NO: 3561413 - DNA, 25 bp, Homo sapien
taaagaaggtgtcaagtcttacact

SEQ ID NO: 3561414 - DNA, 25 bp, Homo sapien
ggtgtcaagtcttacactaggtgct

SEQ ID NO: 3561415 - DNA, 25 bp, Homo sapien
ccataaagaaggtgtcaagtcttac

SEQ ID NO: 3561416 - DNA, 25 bp, Homo sapien
gcatcgtttagtcaaaaggcacaga

SEQ ID NO: 3561417 - DNA, 25 bp, Homo sapien
cagcgtccccgtcttcctagaggtt

SEQ ID NO: 3561418 - DNA, 25 bp, Homo sapien
tgtttgcagatgagccttcccagcg

SEQ ID NO: 3561419 - DNA, 25 bp, Homo sapien
tgcagtcctagaagtggcatcgttt

SEQ ID NO: 3561420 - DNA, 25 bp, Homo sapien
tgcattgacacagggcaaagctctt

SEQ ID NO: 3561421 - DNA, 25 bp, Homo sapien
tcatacaagccaccatagtgaaggt

SEQ ID NO: 3561422 - DNA, 25 bp, Homo sapien
tggcgtgtgctcctcgaatagagag

SEQ ID NO: 3561423 - DNA, 25 bp, Homo sapien
cagaagtggaaataatcccagggtc

SEQ ID NO: 3561424 - DNA, 25 bp, Homo sapien
ccaagatcaaaccatggcacttcag

SEQ ID NO: 3561425 - DNA, 25 bp, Homo sapien
gcctggacaacagagcgagactcca

SEQ ID NO: 3561426 - DNA, 25 bp, Homo sapien
gagccaagatcaaaccatggcactt

SEQ ID NO: 3561427 - DNA, 25 bp, Homo sapien
cctggacaacagagcgagactccat

SEQ ID NO: 3561428 - DNA, 25 bp, Homo sapien
cagaaacagtctcgtctggaagacg

SEQ ID NO: 3561429 - DNA, 25 bp, Homo sapien
gacggatgtgtacagaagcaactct

SEQ ID NO: 3561430 - DNA, 25 bp, Homo sapien
ctgggtgtggaaagtaaggcctaca

SEQ ID NO: 3561431 - DNA, 25 bp, Homo sapien
tcctgggctggattcgatctttcta

SEQ ID NO: 3561432 - DNA, 25 bp, Homo sapien
ggaggtacacgttgcctgcaaatca

SEQ ID NO: 3561433 - DNA, 25 bp, Homo sapien
cacgttgcctgcaaatcactgttcc

SEQ ID NO: 3561434 - DNA, 25 bp, Homo sapien
tctgcaaatccagggacagcctagg

SEQ ID NO: 3561435 - DNA, 25 bp, Homo sapien
ctctgcaaatccagggacagcctag

SEQ ID NO: 3561436 - DNA, 25 bp, Homo sapien
tcagatcagagctccgaagcggtca

SEQ ID NO: 3561437 - DNA, 25 bp, Homo sapien
caaaattgggctagtcctggccagg

SEQ ID NO: 3561438 - DNA, 25 bp, Homo sapien
gcatggtcccactgaagtcctacta

SEQ ID NO: 3561439 - DNA, 25 bp, Homo sapien
tagtgagtacctagggcggctcaac

SEQ ID NO: 3561440 - DNA, 25 bp, Homo sapien
caagaaacagtgcagggtgcccagt

SEQ ID NO: 3561441 - DNA, 25 bp, Homo sapien
cctggagcccaaatcagtcatgtgg

SEQ ID NO: 3561442 - DNA, 25 bp, Homo sapien
tgaaagttaactgcggagccaagag

SEQ ID NO: 3561443 - DNA, 25 bp, Homo sapien
tacatgaaccgtgccatgaggacag

SEQ ID NO: 3561444 - DNA, 25 bp, Homo sapien
tggtaaccttctcaaatgcagtggg

SEQ ID NO: 3561445 - DNA, 25 bp, Homo sapien
caacaacaacgagtccaggcatggt

SEQ ID NO: 3561446 - DNA, 25 bp, Homo sapien
tattttcaatggatcactaggcagc

SEQ ID NO: 3561447 - DNA, 25 bp, Homo sapien
tgctaatgcgtctgtgcagcccaaa

SEQ ID NO: 3561448 - DNA, 25 bp, Homo sapien
actgctgccccatggaccaggttag

SEQ ID NO: 3561449 - DNA, 25 bp, Homo sapien
gaggttccatgaaactgctgttgca

SEQ ID NO: 3561450 - DNA, 25 bp, Homo sapien
gattcttagagcgtaactgctgccc

SEQ ID NO: 3561451 - DNA, 25 bp, Homo sapien
ccaggttagctaagagaggttccat

SEQ ID NO: 3561452 - DNA, 25 bp, Homo sapien
agtgctttattaacctggcaaaggg

SEQ ID NO: 3561453 - DNA, 25 bp, Homo sapien
cagatgttaaggtccaacccgactt

SEQ ID NO: 3561454 - DNA, 25 bp, Homo sapien
tcctctgcctaagtcacggcccaag

SEQ ID NO: 3561455 - DNA, 25 bp, Homo sapien
cacgtaggagtgtaggcgggcaggg

SEQ ID NO: 3561456 - DNA, 25 bp, Homo sapien
aggtgatcccatccccaggcaatgg

SEQ ID NO: 3561457 - DNA, 25 bp, Homo sapien
acccaggtcataggagtgctggccc

SEQ ID NO: 3561458 - DNA, 25 bp, Homo sapien
gaaggccaaggcaaactgtgccaga

SEQ ID NO: 3561459 - DNA, 25 bp, Homo sapien
gcacgtgtccgtcacgaaggccaag

SEQ ID NO: 3561460 - DNA, 25 bp, Homo sapien
tttttggattctgaccaggactggg

SEQ ID NO: 3561461 - DNA, 25 bp, Homo sapien
gaggccaagagctaagccatccagg

SEQ ID NO: 3561462 - DNA, 25 bp, Homo sapien
gagccagagtcttccgtgactgagg

SEQ ID NO: 3561463 - DNA, 25 bp, Homo sapien
tttgtgagggtgactcatttttgga

SEQ ID NO: 3561464 - DNA, 25 bp, Homo sapien
tggtcccgacgcaggatgcagacgc

SEQ ID NO: 3561465 - DNA, 25 bp, Homo sapien
cctggctttggcattggtagcagta

SEQ ID NO: 3561466 - DNA, 25 bp, Homo sapien
agcacagagacgtggagcaggacgc

SEQ ID NO: 3561467 - DNA, 25 bp, Homo sapien
tgtgagcaacatgagccagggaagc

SEQ ID NO: 3561468 - DNA, 25 bp, Homo sapien
tgtaacccggttctaacatctcagg

SEQ ID NO: 3561469 - DNA, 25 bp, Homo sapien
gcacctagtaggctcccaataagta

SEQ ID NO: 3561470 - DNA, 25 bp, Homo sapien
cccctcaaatcaggaatttgttcta

SEQ ID NO: 3561471 - DNA, 25 bp, Homo sapien
tgtctgattctaacaacctggatcc

SEQ ID NO: 3561472 - DNA, 25 bp, Homo sapien
ccctggcccagaccgcggccggcca

SEQ ID NO: 3561473 - DNA, 25 bp, Homo sapien
ctggcccagaccgcggccggccagc

SEQ ID NO: 3561474 - DNA, 25 bp, Homo sapien
agccctggcccagaccgcggccggc

SEQ ID NO: 3561475 - DNA, 25 bp, Homo sapien
tggcccagaccgcggccggccagca

SEQ ID NO: 3561476 - DNA, 25 bp, Homo sapien
cacagcgcggtgagcacgagaggca

SEQ ID NO: 3561477 - DNA, 25 bp, Homo sapien
cgagcaccagcacgtaagccagctc

SEQ ID NO: 3561478 - DNA, 25 bp, Homo sapien
aggaagagccccacgttgcccagca

SEQ ID NO: 3561479 - DNA, 25 bp, Homo sapien
gctgggatccgagcgcaggaagagc

SEQ ID NO: 3561480 - DNA, 25 bp, Homo sapien
tgatctggccaacggaccagcagtg

SEQ ID NO: 3561481 - DNA, 25 bp, Homo sapien
acccagctgtcggagccggaggact

SEQ ID NO: 3561482 - DNA, 25 bp, Homo sapien
aggactaggccgcttccgtattggg

SEQ ID NO: 3561483 - DNA, 25 bp, Homo sapien
tacggccaatagaagctcggaaggg

SEQ ID NO: 3561484 - DNA, 25 bp, Homo sapien
gatcgccaccttagcagatgaggct

SEQ ID NO: 3561485 - DNA, 25 bp, Homo sapien
tatgctaaaactgtaccaagggccc

SEQ ID NO: 3561486 - DNA, 25 bp, Homo sapien
tgtcatttgcggatcacgccacgga

SEQ ID NO: 3561487 - DNA, 25 bp, Homo sapien
ttctgtagtgaacaaaggaggccgg

SEQ ID NO: 3561488 - DNA, 25 bp, Homo sapien
tgagccagcgcgactacgattcggc

SEQ ID NO: 3561489 - DNA, 25 bp, Homo sapien
atgctgagccagcgcgactacgatt

SEQ ID NO: 3561490 - DNA, 25 bp, Homo sapien
gatgctgagccagcgcgactacgat

SEQ ID NO: 3561491 - DNA, 25 bp, Homo sapien
gctgagccagcgcgactacgattcg

SEQ ID NO: 3561492 - DNA, 25 bp, Homo sapien
acaactggctggatggtgccgtgga

SEQ ID NO: 3561493 - DNA, 25 bp, Homo sapien
ctctagcggatggagaagctcctgg

SEQ ID NO: 3561494 - DNA, 25 bp, Homo sapien
cggctgcaactggagtttgcccggc

SEQ ID NO: 3561495 - DNA, 25 bp, Homo sapien
gctcctggagaccattgaccggctg

SEQ ID NO: 3561496 - DNA, 25 bp, Homo sapien
cacggcagcaggtaaacgagaggct

SEQ ID NO: 3561497 - DNA, 25 bp, Homo sapien
tctcgtatatcccagacaagttggc

SEQ ID NO: 3561498 - DNA, 25 bp, Homo sapien
tgccattggaccctggatccaggcg

SEQ ID NO: 3561499 - DNA, 25 bp, Homo sapien
aagcccacatgggttagtgacttgc

SEQ ID NO: 3561500 - DNA, 25 bp, Homo sapien
cgagtactgcatccgccgtatggtg

SEQ ID NO: 3561501 - DNA, 25 bp, Homo sapien
actgaggttctctatgcaagatgga

SEQ ID NO: 3561502 - DNA, 25 bp, Homo sapien
gcaagatggagagaggatgcaccct

SEQ ID NO: 3561503 - DNA, 25 bp, Homo sapien
tatggtgccctacaagggatccggg

SEQ ID NO: 3561504 - DNA, 25 bp, Homo sapien
caaaggtgcaggtgcagaacttcag

SEQ ID NO: 3561505 - DNA, 25 bp, Homo sapien
tctgctcaccctgaggtacccagtg

SEQ ID NO: 3561506 - DNA, 25 bp, Homo sapien
catggagagggacactatccctaaa

SEQ ID NO: 3561507 - DNA, 25 bp, Homo sapien
gttacaagtttcctggacatggaga

SEQ ID NO: 3561508 - DNA, 25 bp, Homo sapien
ctggccatggtgttcacgccacagg

SEQ ID NO: 3561509 - DNA, 25 bp, Homo sapien
acccacgatgcaagtagtagtaacc

SEQ ID NO: 3561510 - DNA, 25 bp, Homo sapien
accaccgccgagctggccatggtgt

SEQ ID NO: 3561511 - DNA, 25 bp, Homo sapien
aggccccggacccacgatgcaagta

SEQ ID NO: 3561512 - DNA, 25 bp, Homo sapien
gatggcccaaaagggaacgtcagag

SEQ ID NO: 3561513 - DNA, 25 bp, Homo sapien
gctgttcttgatggcccaaaaggga

SEQ ID NO: 3561514 - DNA, 25 bp, Homo sapien
tcttgatggcccaaaagggaacgtc

SEQ ID NO: 3561515 - DNA, 25 bp, Homo sapien
cccagtcagtgccccagctgttctt

SEQ ID NO: 3561516 - DNA, 25 bp, Homo sapien
tcaaatacttgcactgggcctactg

SEQ ID NO: 3561517 - DNA, 25 bp, Homo sapien
tcagggtccttaattctccaggcag

SEQ ID NO: 3561518 - DNA, 25 bp, Homo sapien
tgcagagcgcaaggatcagggtcct

SEQ ID NO: 3561519 - DNA, 25 bp, Homo sapien
gccatagagaggacagatgatgccc

SEQ ID NO: 3561520 - DNA, 25 bp, Homo sapien
caacaccgcatggtcaatgagccaa

SEQ ID NO: 3561521 - DNA, 25 bp, Homo sapien
cggagagggcgggagatcccgtggc

SEQ ID NO: 3561522 - DNA, 25 bp, Homo sapien
ccacaagcaacaccgcatggtcaat

SEQ ID NO: 3561523 - DNA, 25 bp, Homo sapien
ggttgccgtagcccacaagcaacac

SEQ ID NO: 3561524 - DNA, 25 bp, Homo sapien
cattgatggccacggagattgggcc

SEQ ID NO: 3561525 - DNA, 25 bp, Homo sapien
caaaggcattgatggccacggagat

SEQ ID NO: 3561526 - DNA, 25 bp, Homo sapien
atgccaaaggcattgatggccacgg

SEQ ID NO: 3561527 - DNA, 25 bp, Homo sapien
gatggccacggagattgggcctctc

SEQ ID NO: 3561528 - DNA, 25 bp, Homo sapien
ggctcagctccacggagtcattgat

SEQ ID NO: 3561529 - DNA, 25 bp, Homo sapien
tggtagctgtagtcatcctctgtct

SEQ ID NO: 3561530 - DNA, 25 bp, Homo sapien
gactgcatgtgaccctggtagctgt

SEQ ID NO: 3561531 - DNA, 25 bp, Homo sapien
tcattgatgtagaccttggccttct

SEQ ID NO: 3561532 - DNA, 25 bp, Homo sapien
gggcaagccgcccatgcaggccttg

SEQ ID NO: 3561533 - DNA, 25 bp, Homo sapien
gcattggagggcaagccgcccatgc

SEQ ID NO: 3561534 - DNA, 25 bp, Homo sapien
ctttatggccgagtaggcattggag

SEQ ID NO: 3561535 - DNA, 25 bp, Homo sapien
ccaaattctttatggccgagtaggc

SEQ ID NO: 3561536 - DNA, 25 bp, Homo sapien
aaggctggtcccaagaagccctcct

SEQ ID NO: 3561537 - DNA, 25 bp, Homo sapien
gagacagaaggctggtcccaagaag

SEQ ID NO: 3561538 - DNA, 25 bp, Homo sapien
gaaggctggtcccaagaagccctcc

SEQ ID NO: 3561539 - DNA, 25 bp, Homo sapien
acagaaggctggtcccaagaagccc

SEQ ID NO: 3561540 - DNA, 25 bp, Homo sapien
cagaggagtagagcgagatgctcac

SEQ ID NO: 3561541 - DNA, 25 bp, Homo sapien
acagaggagtagagcgagatgctca

SEQ ID NO: 3561542 - DNA, 25 bp, Homo sapien
gacagaggagtagagcgagatgctc

SEQ ID NO: 3561543 - DNA, 25 bp, Homo sapien
gagcagggtcccctggttgagaaac

SEQ ID NO: 3561544 - DNA, 25 bp, Homo sapien
agagcagggtcccctggttgagaaa

SEQ ID NO: 3561545 - DNA, 25 bp, Homo sapien
gcagggtcccctggttgagaaacca

SEQ ID NO: 3561546 - DNA, 25 bp, Homo sapien
tgacttttgtgacagcccccttact

SEQ ID NO: 3561547 - DNA, 25 bp, Homo sapien
gcgaggtcacccacagacttggctt

SEQ ID NO: 3561548 - DNA, 25 bp, Homo sapien
tcccattcaggtggggcgaggtcac

SEQ ID NO: 3561549 - DNA, 25 bp, Homo sapien
caggtagatagtgcggaactcctcc

SEQ ID NO: 3561550 - DNA, 25 bp, Homo sapien
tctgtgctcgcaccatgttattgac

SEQ ID NO: 3561551 - DNA, 25 bp, Homo sapien
ggtgactccatactgagctgtgcca

SEQ ID NO: 3561552 - DNA, 25 bp, Homo sapien
agctgtgccacggtccagggcctgg

SEQ ID NO: 3561553 - DNA, 25 bp, Homo sapien
ttattgacaaagacggacaggcgcc

SEQ ID NO: 3561554 - DNA, 25 bp, Homo sapien
ctcatatgtccggttataggtaatg

SEQ ID NO: 3561555 - DNA, 25 bp, Homo sapien
tcctttgactcatatgtccggttat

SEQ ID NO: 3561556 - DNA, 25 bp, Homo sapien
tttgactcatatgtccggttatagg

SEQ ID NO: 3561557 - DNA, 25 bp, Homo sapien
tgtccggttataggtaatgacaaag

SEQ ID NO: 3561558 - DNA, 25 bp, Homo sapien
ctgaaagtctcgtttctgttgtctg

SEQ ID NO: 3561559 - DNA, 25 bp, Homo sapien
cagggaaatgactgagctgaaagtc

SEQ ID NO: 3561560 - DNA, 25 bp, Homo sapien
gagctgaaagtctcgtttctgttgt

SEQ ID NO: 3561561 - DNA, 25 bp, Homo sapien
gggatcctcattcaacagggaaatg

SEQ ID NO: 3561562 - DNA, 25 bp, Homo sapien
gagtgaaggctgacttgggctcccc

SEQ ID NO: 3561563 - DNA, 25 bp, Homo sapien
tgagtgaaggctgacttgggctccc

SEQ ID NO: 3561564 - DNA, 25 bp, Homo sapien
acgtgtcttccgagctcatccagga

SEQ ID NO: 3561565 - DNA, 25 bp, Homo sapien
agcagcacgtgtcttccgagctcat

SEQ ID NO: 3561566 - DNA, 25 bp, Homo sapien
agcacgtgtcttccgagctcatcca

SEQ ID NO: 3561567 - DNA, 25 bp, Homo sapien
gtgtcttccgagctcatccaggact

SEQ ID NO: 3561568 - DNA, 25 bp, Homo sapien
catggggtcgttgcagggtggctcc

SEQ ID NO: 3561569 - DNA, 25 bp, Homo sapien
agccggcacaccatggggtcgttgc

SEQ ID NO: 3561570 - DNA, 25 bp, Homo sapien
ttggacacggggagccggcacacca

SEQ ID NO: 3561571 - DNA, 25 bp, Homo sapien
tggacacggggagccggcacaccat

SEQ ID NO: 3561572 - DNA, 25 bp, Homo sapien
gggcacagtcggcccttgacggcgc

SEQ ID NO: 3561573 - DNA, 25 bp, Homo sapien
atgttaggtcaaagctcctatccct

SEQ ID NO: 3561574 - DNA, 25 bp, Homo sapien
aggtcaaagctcctatcccttggac

SEQ ID NO: 3561575 - DNA, 25 bp, Homo sapien
cagagatcggttcgtccagcgggca

SEQ ID NO: 3561576 - DNA, 25 bp, Homo sapien
ccatcaccagagatcggttcgtcca

SEQ ID NO: 3561577 - DNA, 25 bp, Homo sapien
gcgcgaagcgggtgggcgccagcag

SEQ ID NO: 3561578 - DNA, 25 bp, Homo sapien
acgcggccgcgcacaaggcccagca

SEQ ID NO: 3561579 - DNA, 25 bp, Homo sapien
ttgaacatctccagcgcgaagcggg

SEQ ID NO: 3561580 - DNA, 25 bp, Homo sapien
gcagcccggccgcggttgaacatct

SEQ ID NO: 3561581 - DNA, 25 bp, Homo sapien
ccccagcagcgacaggagctgcagc

SEQ ID NO: 3561582 - DNA, 25 bp, Homo sapien
cactgcgcccgggagcagccccagc

SEQ ID NO: 3561583 - DNA, 25 bp, Homo sapien
agccccagcagcgacaggagctgca

SEQ ID NO: 3561584 - DNA, 25 bp, Homo sapien
cgggggcggccactgcgcccgggag

SEQ ID NO: 3561585 - DNA, 25 bp, Homo sapien
acagacgctccaccgacccaccggg

SEQ ID NO: 3561586 - DNA, 25 bp, Homo sapien
gcggcccggacccaacagacgctcc

SEQ ID NO: 3561587 - DNA, 25 bp, Homo sapien
caccgggtaccgagcccgcggccag

SEQ ID NO: 3561588 - DNA, 25 bp, Homo sapien
agtcctccctccagcggggcgacgg

SEQ ID NO: 3561589 - DNA, 25 bp, Homo sapien
caaggcttgacataatgggactact

SEQ ID NO: 3561590 - DNA, 25 bp, Homo sapien
taaagaggtctagatgagctgctgg

SEQ ID NO: 3561591 - DNA, 25 bp, Homo sapien
ggaagcataatgttcctgaaccctc

SEQ ID NO: 3561592 - DNA, 25 bp, Homo sapien
actgggcctggtcaaggagtaatag

SEQ ID NO: 3561593 - DNA, 25 bp, Homo sapien
ggtggcgaacccgccgctgctgttg

SEQ ID NO: 3561594 - DNA, 25 bp, Homo sapien
gccgagaccaggtggcgaacccgcc

SEQ ID NO: 3561595 - DNA, 25 bp, Homo sapien
ttgactggtggggatccttcagggc

SEQ ID NO: 3561596 - DNA, 25 bp, Homo sapien
ggccgagaccaggtggcgaacccgc

SEQ ID NO: 3561597 - DNA, 25 bp, Homo sapien
gattaactctatctcctccaggagg

SEQ ID NO: 3561598 - DNA, 25 bp, Homo sapien
gattggaagcttgtccctcaaacca

SEQ ID NO: 3561599 - DNA, 25 bp, Homo sapien
cctcaggcgggctttggagctatat

SEQ ID NO: 3561600 - DNA, 25 bp, Homo sapien
ccttgaagatcactggctcgccaaa

SEQ ID NO: 3561601 - DNA, 25 bp, Homo sapien
gaagtagtcatccacagacaaggtg

SEQ ID NO: 3561602 - DNA, 25 bp, Homo sapien
ttatctgctgcaggctcaactaggg

SEQ ID NO: 3561603 - DNA, 25 bp, Homo sapien
ggaaggtcgaccagtctttatctgc

SEQ ID NO: 3561604 - DNA, 25 bp, Homo sapien
gagtaaagtccaaccagctcagggt

SEQ ID NO: 3561605 - DNA, 25 bp, Homo sapien
gaagtttctatcagagacccgtacg

SEQ ID NO: 3561606 - DNA, 25 bp, Homo sapien
ccagatggttatacagggctccggc

SEQ ID NO: 3561607 - DNA, 25 bp, Homo sapien
gtagacctccctggtagtactgcca

SEQ ID NO: 3561608 - DNA, 25 bp, Homo sapien
cccctcaatgtggaaagagtctaag

SEQ ID NO: 3561609 - DNA, 25 bp, Homo sapien
ggaactgatgtcgatttctctcttc

SEQ ID NO: 3561610 - DNA, 25 bp, Homo sapien
ccacaggatagctgggcagcgacac

SEQ ID NO: 3561611 - DNA, 25 bp, Homo sapien
catctgtgaggaactgatgtcgatt

SEQ ID NO: 3561612 - DNA, 25 bp, Homo sapien
ggattggcctctccggagctcaggg

SEQ ID NO: 3561613 - DNA, 25 bp, Homo sapien
tcattgagaaactctggtggacggc

SEQ ID NO: 3561614 - DNA, 25 bp, Homo sapien
ggatagggcacagcttgaacgtccc

SEQ ID NO: 3561615 - DNA, 25 bp, Homo sapien
taaggaagagtgtgcagtccctggc

SEQ ID NO: 3561616 - DNA, 25 bp, Homo sapien
tggtaaaaccgctggagctcaggct

SEQ ID NO: 3561617 - DNA, 25 bp, Homo sapien
gccaccgtccaggaacagaaagccg

SEQ ID NO: 3561618 - DNA, 25 bp, Homo sapien
ccgtccaggaacagaaagccgaggg

SEQ ID NO: 3561619 - DNA, 25 bp, Homo sapien
caccgtccaggaacagaaagccgag

SEQ ID NO: 3561620 - DNA, 25 bp, Homo sapien
ccgccaccgtccaggaacagaaagc

SEQ ID NO: 3561621 - DNA, 25 bp, Homo sapien
caagggaggcacatcatagaggcca

SEQ ID NO: 3561622 - DNA, 25 bp, Homo sapien
cctgagagtacaagctgggcctagc

SEQ ID NO: 3561623 - DNA, 25 bp, Homo sapien
tagggcagctaacaacacggcagtt

SEQ ID NO: 3561624 - DNA, 25 bp, Homo sapien
tcttatagagtccattgcacagtgc

SEQ ID NO: 3561625 - DNA, 25 bp, Homo sapien
tgagcctttcgtgaggccagctgcc

SEQ ID NO: 3561626 - DNA, 25 bp, Homo sapien
tgagcatcagaaaaagccagtcggc

SEQ ID NO: 3561627 - DNA, 25 bp, Homo sapien
gccagtcggctaaggaggaaaaatg

SEQ ID NO: 3561628 - DNA, 25 bp, Homo sapien
ccctgccttattgactgagcatcag

SEQ ID NO: 3561629 - DNA, 25 bp, Homo sapien
gataatctcttcttagcaagggcca

SEQ ID NO: 3561630 - DNA, 25 bp, Homo sapien
gacggtactctagtttccatgacag

SEQ ID NO: 3561631 - DNA, 25 bp, Homo sapien
tacagtgacctagtaaaccacaggt

SEQ ID NO: 3561632 - DNA, 25 bp, Homo sapien
tttaacaccaccagagtaatccagg

SEQ ID NO: 3561633 - DNA, 25 bp, Homo sapien
ccttcatacatacctgccaagagaa

SEQ ID NO: 3561634 - DNA, 25 bp, Homo sapien
gccttatccttcatacatacctgcc

SEQ ID NO: 3561635 - DNA, 25 bp, Homo sapien
tatccttcatacatacctgccaaga

SEQ ID NO: 3561636 - DNA, 25 bp, Homo sapien
cttatccttcatacatacctgccaa

SEQ ID NO: 3561637 - DNA, 25 bp, Homo sapien
cacacacacaaatatgtacgtatgt

SEQ ID NO: 3561638 - DNA, 25 bp, Homo sapien
acgcacgccactacgcccagataat

SEQ ID NO: 3561639 - DNA, 25 bp, Homo sapien
cacacacaaatatgtacgtatgtat

SEQ ID NO: 3561640 - DNA, 25 bp, Homo sapien
ctgacctcataatttgccttcctcg

SEQ ID NO: 3561641 - DNA, 25 bp, Homo sapien
tgttggccaggatggagtgtggtgg

SEQ ID NO: 3561642 - DNA, 25 bp, Homo sapien
tgatctcagcccactgcaacctcca

SEQ ID NO: 3561643 - DNA, 25 bp, Homo sapien
ttaatgcctcagcctcctgagtagc

SEQ ID NO: 3561644 - DNA, 25 bp, Homo sapien
cctcctgggttcaagtgattttaat

SEQ ID NO: 3561645 - DNA, 25 bp, Homo sapien
atgcatggctaatgttttgttttca

SEQ ID NO: 3561646 - DNA, 25 bp, Homo sapien
tgccagtcatcatgcatggctaatg

SEQ ID NO: 3561647 - DNA, 25 bp, Homo sapien
gtgccagtcatcatgcatggctaat

SEQ ID NO: 3561648 - DNA, 25 bp, Homo sapien
gtcatcatgcatggctaatgttttg

SEQ ID NO: 3561649 - DNA, 25 bp, Homo sapien
gactcaaggcgcctgtcctggtttc

SEQ ID NO: 3561650 - DNA, 25 bp, Homo sapien
atcaattaatggcacgagggcttct

SEQ ID NO: 3561651 - DNA, 25 bp, Homo sapien
ctgggagccgtttgccgactcaagg

SEQ ID NO: 3561652 - DNA, 25 bp, Homo sapien
gagccctgacttccaattgtacaaa

SEQ ID NO: 3561653 - DNA, 25 bp, Homo sapien
taacgagcgggctctaggccctctg

SEQ ID NO: 3561654 - DNA, 25 bp, Homo sapien
gacgcgcgggatgcgagtccccatt

SEQ ID NO: 3561655 - DNA, 25 bp, Homo sapien
ccctcagctaacgagcgggctctag

SEQ ID NO: 3561656 - DNA, 25 bp, Homo sapien
tttctgattggtcgctggacgcgcg

SEQ ID NO: 3561657 - DNA, 25 bp, Homo sapien
gggttctcggtcgccagccattcct

SEQ ID NO: 3561658 - DNA, 25 bp, Homo sapien
gcggggttctcggtcgccagccatt

SEQ ID NO: 3561659 - DNA, 25 bp, Homo sapien
ggtcgttcggacgtcttgcctgtcg

SEQ ID NO: 3561660 - DNA, 25 bp, Homo sapien
aggactgccggtcgttcggacgtct

SEQ ID NO: 3561661 - DNA, 25 bp, Homo sapien
gaagatattcgtgggcaacgtcgac

SEQ ID NO: 3561662 - DNA, 25 bp, Homo sapien
tggctgcggcgacaaaatgaagata

SEQ ID NO: 3561663 - DNA, 25 bp, Homo sapien
agctgcgccgtcatgaaacagttcg

SEQ ID NO: 3561664 - DNA, 25 bp, Homo sapien
tctttgcgccctacggcacggtcat

SEQ ID NO: 3561665 - DNA, 25 bp, Homo sapien
gtctcattctagtgtcaggaagttg

SEQ ID NO: 3561666 - DNA, 25 bp, Homo sapien
aaatgctcttgtaagcccatggaag

SEQ ID NO: 3561667 - DNA, 25 bp, Homo sapien
aattttcagatttcaccacttggtc

SEQ ID NO: 3561668 - DNA, 25 bp, Homo sapien
aactcactaaggagggaaacagaca

SEQ ID NO: 3561669 - DNA, 25 bp, Homo sapien
actggctcctatggtgccgcagcag

SEQ ID NO: 3561670 - DNA, 25 bp, Homo sapien
tcactagcttatggagcccaggcag

SEQ ID NO: 3561671 - DNA, 25 bp, Homo sapien
ggtaaccagccatcctcttacggcg

SEQ ID NO: 3561672 - DNA, 25 bp, Homo sapien
gcttcatataatgcccagccctcgg

SEQ ID NO: 3561673 - DNA, 25 bp, Homo sapien
tggctctagatctgcggtttcccct

SEQ ID NO: 3561674 - DNA, 25 bp, Homo sapien
tcctgttaagtgttcggcagtaacc

SEQ ID NO: 3561675 - DNA, 25 bp, Homo sapien
gccaggaaagggtcagcttaaccat

SEQ ID NO: 3561676 - DNA, 25 bp, Homo sapien
ttctagctgatggtgagcggcacag

SEQ ID NO: 3561677 - DNA, 25 bp, Homo sapien
tcaaaagctgcttcgcaaagggtct

SEQ ID NO: 3561678 - DNA, 25 bp, Homo sapien
gatgagagaaaacgaggcagcagct

SEQ ID NO: 3561679 - DNA, 25 bp, Homo sapien
tatgcgttaccttctaatgctggcc

SEQ ID NO: 3561680 - DNA, 25 bp, Homo sapien
ctaagctctgtcctctaaagtcggt

SEQ ID NO: 3561681 - DNA, 25 bp, Homo sapien
catttcagtgttcggcaggagctag

SEQ ID NO: 3561682 - DNA, 25 bp, Homo sapien
gagtcgcgcgttcattacttccaaa

SEQ ID NO: 3561683 - DNA, 25 bp, Homo sapien
ttctcgggccgtgagacatcgtctg

SEQ ID NO: 3561684 - DNA, 25 bp, Homo sapien
ttgataatttcaggcaggcagtcag

SEQ ID NO: 3561685 - DNA, 25 bp, Homo sapien
tatagcaggccttagttcactccca

SEQ ID NO: 3561686 - DNA, 25 bp, Homo sapien
tcttacaggttcatggcggctacta

SEQ ID NO: 3561687 - DNA, 25 bp, Homo sapien
tatgccttcgtacacatggagcggg

SEQ ID NO: 3561688 - DNA, 25 bp, Homo sapien
ggtgaacatcaacgtggaagccagc

SEQ ID NO: 3561689 - DNA, 25 bp, Homo sapien
gtaatgttgaaatccagggttggga

SEQ ID NO: 3561690 - DNA, 25 bp, Homo sapien
taatgttgaaatccagggttgggag

SEQ ID NO: 3561691 - DNA, 25 bp, Homo sapien
ccagcaggcctcattgtgtgcagaa

SEQ ID NO: 3561692 - DNA, 25 bp, Homo sapien
gctagacctatagagttggatcact

SEQ ID NO: 3561693 - DNA, 25 bp, Homo sapien
ggtgagagtctcactgctccagggt

SEQ ID NO: 3561694 - DNA, 25 bp, Homo sapien
tggtccaaaggctagacctatagag

SEQ ID NO: 3561695 - DNA, 25 bp, Homo sapien
gtggtatgagtatggctcaatgcag

SEQ ID NO: 3561696 - DNA, 25 bp, Homo sapien
tggtatgagtatggctcaatgcagc

SEQ ID NO: 3561697 - DNA, 25 bp, Homo sapien
ggtgtaggtaggccactgcacccga

SEQ ID NO: 3561698 - DNA, 25 bp, Homo sapien
gtgtaggtaggccactgcacccgac

SEQ ID NO: 3561699 - DNA, 25 bp, Homo sapien
tctcatatatgaccgcagcccgagg

SEQ ID NO: 3561700 - DNA, 25 bp, Homo sapien
tgctgtaccacgatcacaggtcgga

SEQ ID NO: 3561701 - DNA, 25 bp, Homo sapien
gaccgcgcggagcaagttctcatat

SEQ ID NO: 3561702 - DNA, 25 bp, Homo sapien
gcccgagggttcagtccgcaattat

SEQ ID NO: 3561703 - DNA, 25 bp, Homo sapien
ggctccgcgtacaagcgccctgggt

SEQ ID NO: 3561704 - DNA, 25 bp, Homo sapien
caagaggcttacacaatgcctggag

SEQ ID NO: 3561705 - DNA, 25 bp, Homo sapien
gagcagcctggctccgcgtacaagc

SEQ ID NO: 3561706 - DNA, 25 bp, Homo sapien
tgaaagagagcacaacacaagaggc

SEQ ID NO: 3561707 - DNA, 25 bp, Homo sapien
catatcccatgtaattacctaggag

SEQ ID NO: 3561708 - DNA, 25 bp, Homo sapien
tacctaggagtctatcaatagctat

SEQ ID NO: 3561709 - DNA, 25 bp, Homo sapien
aggacaagatgcaatctagctgaag

SEQ ID NO: 3561710 - DNA, 25 bp, Homo sapien
taggaatccacttatggctatatat

SEQ ID NO: 3561711 - DNA, 25 bp, Homo sapien
gggaactccagacaccaatggctgg

SEQ ID NO: 3561712 - DNA, 25 bp, Homo sapien
ccttctattgatgatgggaactcca

SEQ ID NO: 3561713 - DNA, 25 bp, Homo sapien
ccctgtgacagaaggctactgttgc

SEQ ID NO: 3561714 - DNA, 25 bp, Homo sapien
ggagcagccagtcattcacccaatt

SEQ ID NO: 3561715 - DNA, 25 bp, Homo sapien
gatctgtgccaatcgacttcaaaag

SEQ ID NO: 3561716 - DNA, 25 bp, Homo sapien
aatttggatccccaacagttctgga

SEQ ID NO: 3561717 - DNA, 25 bp, Homo sapien
cctcattaacatcaggctcctggga

SEQ ID NO: 3561718 - DNA, 25 bp, Homo sapien
tctacttattacagacaaagggcca

SEQ ID NO: 3561719 - DNA, 25 bp, Homo sapien
tagatttataccagcttacttcgga

SEQ ID NO: 3561720 - DNA, 25 bp, Homo sapien
aaagtcatcgctaaaaagaggttag

SEQ ID NO: 3561721 - DNA, 25 bp, Homo sapien
tcttgctgacatgcatatagggtac

SEQ ID NO: 3561722 - DNA, 25 bp, Homo sapien
aagaggttagttgaacaaccactgc

SEQ ID NO: 3561723 - DNA, 25 bp, Homo sapien
tatgaagaaacagggcttaagtgcc

SEQ ID NO: 3561724 - DNA, 25 bp, Homo sapien
gatgctcaatttcaaggtacaagga

SEQ ID NO: 3561725 - DNA, 25 bp, Homo sapien
tagattacaataaggaccccatggg

SEQ ID NO: 3561726 - DNA, 25 bp, Homo sapien
taggaacaccagaaactcagtagta

SEQ ID NO: 3561727 - DNA, 25 bp, Homo sapien
ccaaatggaacttgtggcctaagct

SEQ ID NO: 3561728 - DNA, 25 bp, Homo sapien
taacaccttgacaggccaaatggaa

SEQ ID NO: 3561729 - DNA, 25 bp, Homo sapien
ccttttggatactgtccggagagca

SEQ ID NO: 3561730 - DNA, 25 bp, Homo sapien
gttggagtcatacactaacaccttg

SEQ ID NO: 3561731 - DNA, 25 bp, Homo sapien
tggcagcagcgccagagtttggcaa

SEQ ID NO: 3561732 - DNA, 25 bp, Homo sapien
tgcctcataagagcggacccggtat

SEQ ID NO: 3561733 - DNA, 25 bp, Homo sapien
caataggtgtctgtcatagggatca

SEQ ID NO: 3561734 - DNA, 25 bp, Homo sapien
ggtgtaaggtgttcgaactgctcca

SEQ ID NO: 3561735 - DNA, 25 bp, Homo sapien
ctggcttgtcatctgcttcatctct

SEQ ID NO: 3561736 - DNA, 25 bp, Homo sapien
cttgtcatctgcttcatctctagta

SEQ ID NO: 3561737 - DNA, 25 bp, Homo sapien
gtcatctgcttcatctctagtatct

SEQ ID NO: 3561738 - DNA, 25 bp, Homo sapien
tggcttgtcatctgcttcatctcta

SEQ ID NO: 3561739 - DNA, 25 bp, Homo sapien
cttctggatgcagctatgcgagagg

SEQ ID NO: 3561740 - DNA, 25 bp, Homo sapien
tagccctattgaggacggcagccag

SEQ ID NO: 3561741 - DNA, 25 bp, Homo sapien
gccagaacagtgccatgcactgacc

SEQ ID NO: 3561742 - DNA, 25 bp, Homo sapien
tatgcgagaggaagccttgtgctcc

SEQ ID NO: 3561743 - DNA, 25 bp, Homo sapien
tcatgatgatttcccccatcaaatg

SEQ ID NO: 3561744 - DNA, 25 bp, Homo sapien
ccatcatgatgatttcccccatcaa

SEQ ID NO: 3561745 - DNA, 25 bp, Homo sapien
catcatgatgatttcccccatcaaa

SEQ ID NO: 3561746 - DNA, 25 bp, Homo sapien
atgatgatttcccccatcaaatgaa

SEQ ID NO: 3561747 - DNA, 25 bp, Homo sapien
gagatacttgatggtgctcctctac

SEQ ID NO: 3561748 - DNA, 25 bp, Homo sapien
taaagagcagctaaaggccaaggca

SEQ ID NO: 3561749 - DNA, 25 bp, Homo sapien
tattaatacggtagccacaggcctc

SEQ ID NO: 3561750 - DNA, 25 bp, Homo sapien
gaggtccaagacgatactgttaaca

SEQ ID NO: 3561751 - DNA, 25 bp, Homo sapien
ctttattatcggtataaatagtatg

SEQ ID NO: 3561752 - DNA, 25 bp, Homo sapien
aatttcttcagaagcgggaccatca

SEQ ID NO: 3561753 - DNA, 25 bp, Homo sapien
gaagcgggaccatcattcccattga

SEQ ID NO: 3561754 - DNA, 25 bp, Homo sapien
ttcccattgagtctgatatatttag

SEQ ID NO: 3561755 - DNA, 25 bp, Homo sapien
ctacgatgcttgtactgaaatttct

SEQ ID NO: 3561756 - DNA, 25 bp, Homo sapien
gatactcccgcagatccagacttgc

SEQ ID NO: 3561757 - DNA, 25 bp, Homo sapien
tgaggtactcgtttccccaagcaga

SEQ ID NO: 3561758 - DNA, 25 bp, Homo sapien
tcaatgcaagaatcccgcagggtaa

SEQ ID NO: 3561759 - DNA, 25 bp, Homo sapien
gattctatgcagtcggtgagcaaca

SEQ ID NO: 3561760 - DNA, 25 bp, Homo sapien
tgcgtatggcatcctcagctgccgt

SEQ ID NO: 3561761 - DNA, 25 bp, Homo sapien
gagtgagcgaatctcctgctctgta

SEQ ID NO: 3561762 - DNA, 25 bp, Homo sapien
ttcccatactgctcgaagagtgagc

SEQ ID NO: 3561763 - DNA, 25 bp, Homo sapien
tctgcccgctccatgtgtacgaagg

SEQ ID NO: 3561764 - DNA, 25 bp, Homo sapien
cgagaagtgcgagctatgcgtgaca

SEQ ID NO: 3561765 - DNA, 25 bp, Homo sapien
tgggaaatttcggtgcactgcagca

SEQ ID NO: 3561766 - DNA, 25 bp, Homo sapien
catgcaaacaggaggtcgagggtca

SEQ ID NO: 3561767 - DNA, 25 bp, Homo sapien
tcgcagtgcgcctggtaacaaggtt

SEQ ID NO: 3561768 - DNA, 25 bp, Homo sapien
gccagctcacgcacgcgcgagtgcg

SEQ ID NO: 3561769 - DNA, 25 bp, Homo sapien
cacgtcagagagaaccttacaaaat

SEQ ID NO: 3561770 - DNA, 25 bp, Homo sapien
gacggcggctcccacgtcagagaga

SEQ ID NO: 3561771 - DNA, 25 bp, Homo sapien
gacggccgctcgagcctggacgcga

SEQ ID NO: 3561772 - DNA, 25 bp, Homo sapien
gccttggggagtcgctcaccacaat

SEQ ID NO: 3561773 - DNA, 25 bp, Homo sapien
aagggtcgccactgctgcgtcagag

SEQ ID NO: 3561774 - DNA, 25 bp, Homo sapien
gggcctgttggtggtggcgcggcgc

SEQ ID NO: 3561775 - DNA, 25 bp, Homo sapien
cactgcctagaaaagcggaggcctt

SEQ ID NO: 3561776 - DNA, 25 bp, Homo sapien
tagcgagtaacgcagtcctctgtgg

SEQ ID NO: 3561777 - DNA, 25 bp, Homo sapien
tattgtacctgttcatctctgggca

SEQ ID NO: 3561778 - DNA, 25 bp, Homo sapien
gaactcacctgtctaagtagcactg

SEQ ID NO: 3561779 - DNA, 25 bp, Homo sapien
tgtcgccgcatgatgtctaactagc

SEQ ID NO: 3561780 - DNA, 25 bp, Homo sapien
cgtcatgactgatgataggcccgca

SEQ ID NO: 3561781 - DNA, 25 bp, Homo sapien
tctggtctaccggtttggagcccac

SEQ ID NO: 3561782 - DNA, 25 bp, Homo sapien
tagttacgcgtatccacctgttggc

SEQ ID NO: 3561783 - DNA, 25 bp, Homo sapien
tgaaagctccgattgccaaaccaga

SEQ ID NO: 3561784 - DNA, 25 bp, Homo sapien
gatctactggagagcagacggcaag

SEQ ID NO: 3561785 - DNA, 25 bp, Homo sapien
tgtggtcaggaaagcaaagacaccc

SEQ ID NO: 3561786 - DNA, 25 bp, Homo sapien
cactgtcagagggaaatgagaccag

SEQ ID NO: 3561787 - DNA, 25 bp, Homo sapien
gaggcttggcattggtcaacccagc

SEQ ID NO: 3561788 - DNA, 25 bp, Homo sapien
tccttggccagactcaaggcggtgg

SEQ ID NO: 3561789 - DNA, 25 bp, Homo sapien
cgagtgccctcgcatggcaggagaa

SEQ ID NO: 3561790 - DNA, 25 bp, Homo sapien
cctatgttgagggtgcggcactgtc

SEQ ID NO: 3561791 - DNA, 25 bp, Homo sapien
acctggaagccattgagagcagctg

SEQ ID NO: 3561792 - DNA, 25 bp, Homo sapien
cgtggtgagggacagaggcacgagg

SEQ ID NO: 3561793 - DNA, 25 bp, Homo sapien
ttgtcctgacaagagggcggtccct

SEQ ID NO: 3561794 - DNA, 25 bp, Homo sapien
gatgggttgaccttggcaacagacc

SEQ ID NO: 3561795 - DNA, 25 bp, Homo sapien
ccaccagtctggaattaaacagcag

SEQ ID NO: 3561796 - DNA, 25 bp, Homo sapien
tgcccttgggaacatggactcgtcc

SEQ ID NO: 3561797 - DNA, 25 bp, Homo sapien
tgccgtctttgctgcggagcacaac

SEQ ID NO: 3561798 - DNA, 25 bp, Homo sapien
gcatggtcatggcccgggtcatgcc

SEQ ID NO: 3561799 - DNA, 25 bp, Homo sapien
attcaccacccgtagccacgagctc

SEQ ID NO: 3561800 - DNA, 25 bp, Homo sapien
cttcttaaagaagctgaagcgtttt

SEQ ID NO: 3561801 - DNA, 25 bp, Homo sapien
acactgtgctgagttggccgcagtg

SEQ ID NO: 3561802 - DNA, 25 bp, Homo sapien
gaaagtgagctgactgtttcatgct

SEQ ID NO: 3561803 - DNA, 25 bp, Homo sapien
gaccctcaatcagcttcaaggacac

SEQ ID NO: 3561804 - DNA, 25 bp, Homo sapien
ttcatgctattaggagaatgtggcc

SEQ ID NO: 3561805 - DNA, 25 bp, Homo sapien
tggtgcggccgtcgcacacatccag

SEQ ID NO: 3561806 - DNA, 25 bp, Homo sapien
aagcttctggaatggcacggacaga

SEQ ID NO: 3561807 - DNA, 25 bp, Homo sapien
ggagtgcggcctggtgcggccgtcg

SEQ ID NO: 3561808 - DNA, 25 bp, Homo sapien
gtcttaccacaaaggacaagaccag

SEQ ID NO: 3561809 - DNA, 25 bp, Homo sapien
ctcatccttggcctggaataaatat

SEQ ID NO: 3561810 - DNA, 25 bp, Homo sapien
tccttggcctggaataaatattctt

SEQ ID NO: 3561811 - DNA, 25 bp, Homo sapien
catccttggcctggaataaatattc

SEQ ID NO: 3561812 - DNA, 25 bp, Homo sapien
cctggaataaatattcttttccatc

SEQ ID NO: 3561813 - DNA, 25 bp, Homo sapien
ggcctggttactccactcaggctcc

SEQ ID NO: 3561814 - DNA, 25 bp, Homo sapien
atctccgcctccctcatctacacta

SEQ ID NO: 3561815 - DNA, 25 bp, Homo sapien
catctacactatccccaagtggctg

SEQ ID NO: 3561816 - DNA, 25 bp, Homo sapien
tctggacctgactcatggctcacct

SEQ ID NO: 3561817 - DNA, 25 bp, Homo sapien
gcatccttgtaaaagccgaggctcc

SEQ ID NO: 3561818 - DNA, 25 bp, Homo sapien
acttctccgtggtatggcactcccg

SEQ ID NO: 3561819 - DNA, 25 bp, Homo sapien
ggacacagtacacgttctgccagga

SEQ ID NO: 3561820 - DNA, 25 bp, Homo sapien
tcggtaatcaaaggcgacgctgccc

SEQ ID NO: 3561821 - DNA, 25 bp, Homo sapien
atggctctgggcctcgaggcggcag

SEQ ID NO: 3561822 - DNA, 25 bp, Homo sapien
gctgactcggtagacctgctctggg

SEQ ID NO: 3561823 - DNA, 25 bp, Homo sapien
tgcttgcggcacagcatcccctcca

SEQ ID NO: 3561824 - DNA, 25 bp, Homo sapien
gggcccattggcttcgtcccctgag

SEQ ID NO: 3561825 - DNA, 25 bp, Homo sapien
cggcccttcggggaagctgctgtgc

SEQ ID NO: 3561826 - DNA, 25 bp, Homo sapien
gggaagctgctgtgctcaagtctct

SEQ ID NO: 3561827 - DNA, 25 bp, Homo sapien
agctgctgtgctcaagtctctgttg

SEQ ID NO: 3561828 - DNA, 25 bp, Homo sapien
gaagctgctgtgctcaagtctctgt

SEQ ID NO: 3561829 - DNA, 25 bp, Homo sapien
actccattaacactgggtgcttgtg

SEQ ID NO: 3561830 - DNA, 25 bp, Homo sapien
ctccatctgtgcagactccattaac

SEQ ID NO: 3561831 - DNA, 25 bp, Homo sapien
tctgtgcagactccattaacactgg

SEQ ID NO: 3561832 - DNA, 25 bp, Homo sapien
gcagactccattaacactgggtgct

SEQ ID NO: 3561833 - DNA, 25 bp, Homo sapien
gcacactggctgtgggttcgggagc

SEQ ID NO: 3561834 - DNA, 25 bp, Homo sapien
agaagctgtctggccgcccaccagg

SEQ ID NO: 3561835 - DNA, 25 bp, Homo sapien
cactggctgtgggttcgggagcagg

SEQ ID NO: 3561836 - DNA, 25 bp, Homo sapien
tggctgtgggttcgggagcaggcgg

SEQ ID NO: 3561837 - DNA, 25 bp, Homo sapien
cctccctctttctctttcgctcctt

SEQ ID NO: 3561838 - DNA, 25 bp, Homo sapien
tctttctctttcgctccttctcccg

SEQ ID NO: 3561839 - DNA, 25 bp, Homo sapien
tccctctttctctttcgctccttct

SEQ ID NO: 3561840 - DNA, 25 bp, Homo sapien
cctctttctctttcgctccttctcc

SEQ ID NO: 3561841 - DNA, 25 bp, Homo sapien
ttctggaaggcctcgtgccgcttga

SEQ ID NO: 3561842 - DNA, 25 bp, Homo sapien
gcttctccagcgcacagaatcgctc

SEQ ID NO: 3561843 - DNA, 25 bp, Homo sapien
ccagctcagcgctgcgcaccagtgg

SEQ ID NO: 3561844 - DNA, 25 bp, Homo sapien
ggctctcaacttcgtcgaccgtgca

SEQ ID NO: 3561845 - DNA, 25 bp, Homo sapien
ctactctggaacccacagggtgcag

SEQ ID NO: 3561846 - DNA, 25 bp, Homo sapien
ctggaacccacagggtgcaggatgc

SEQ ID NO: 3561847 - DNA, 25 bp, Homo sapien
gcctggggcccccttggcagctcac

SEQ ID NO: 3561848 - DNA, 25 bp, Homo sapien
actctggaacccacagggtgcagga

SEQ ID NO: 3561849 - DNA, 25 bp, Homo sapien
tcagctgtctcctggcgccgtgcct

SEQ ID NO: 3561850 - DNA, 25 bp, Homo sapien
agctgtctcctggcgccgtgcctgc

SEQ ID NO: 3561851 - DNA, 25 bp, Homo sapien
ccagctgaagccagtccatcttctc

SEQ ID NO: 3561852 - DNA, 25 bp, Homo sapien
tctcagctgtctcctggcgccgtgc

SEQ ID NO: 3561853 - DNA, 25 bp, Homo sapien
tgatgactagatccgcggaggacac

SEQ ID NO: 3561854 - DNA, 25 bp, Homo sapien
gagaagcggtctgcccgggcctcta

SEQ ID NO: 3561855 - DNA, 25 bp, Homo sapien
tccccatgtcgatgcaggaggagaa

SEQ ID NO: 3561856 - DNA, 25 bp, Homo sapien
tgccttgctggttcttgatgactag

SEQ ID NO: 3561857 - DNA, 25 bp, Homo sapien
ttcccggacagccttgaagaagcgg

SEQ ID NO: 3561858 - DNA, 25 bp, Homo sapien
tgggcatccatctgcaggttgacct

SEQ ID NO: 3561859 - DNA, 25 bp, Homo sapien
ccagcgtaggccttctggagccggt

SEQ ID NO: 3561860 - DNA, 25 bp, Homo sapien
aagcggaacttgtctgtggtgtcca

SEQ ID NO: 3561861 - DNA, 25 bp, Homo sapien
gctgagggcctgaatgtcatgctcg

SEQ ID NO: 3561862 - DNA, 25 bp, Homo sapien
cttgtgtcccgggagaactctcgga

SEQ ID NO: 3561863 - DNA, 25 bp, Homo sapien
catgctcgtaggcacagtgtcggcg

SEQ ID NO: 3561864 - DNA, 25 bp, Homo sapien
tcctgaccgatggtgcttgtgtccc

SEQ ID NO: 3561865 - DNA, 25 bp, Homo sapien
gatggacagaccatgccgtgatgtt

SEQ ID NO: 3561866 - DNA, 25 bp, Homo sapien
tggacagaccatgccgtgatgttag

SEQ ID NO: 3561867 - DNA, 25 bp, Homo sapien
aagcagatggacagaccatgccgtg

SEQ ID NO: 3561868 - DNA, 25 bp, Homo sapien
accatgccgtgatgttaggggatgt

SEQ ID NO: 3561869 - DNA, 25 bp, Homo sapien
caggtcatccagctcgcggcggagc

SEQ ID NO: 3561870 - DNA, 25 bp, Homo sapien
agtcacatgctcgtagtcctggccc

SEQ ID NO: 3561871 - DNA, 25 bp, Homo sapien
ccacctgggcttggcggatggatat

SEQ ID NO: 3561872 - DNA, 25 bp, Homo sapien
gagctggcacagccggaggtgctcc

SEQ ID NO: 3561873 - DNA, 25 bp, Homo sapien
gatggtctgcgcgtagtcggccagg

SEQ ID NO: 3561874 - DNA, 25 bp, Homo sapien
gtgctcgtggtcaatcatgtcctgg

SEQ ID NO: 3561875 - DNA, 25 bp, Homo sapien
tggtggatggtctgcgcgtagtcgg

SEQ ID NO: 3561876 - DNA, 25 bp, Homo sapien
ctctctgggtgctcgtggtcaatca

SEQ ID NO: 3561877 - DNA, 25 bp, Homo sapien
gtgtaattcctgctcgcccatccag

SEQ ID NO: 3561878 - DNA, 25 bp, Homo sapien
gcttccctcgaagttccagctcgtg

SEQ ID NO: 3561879 - DNA, 25 bp, Homo sapien
gctgctgctgcacctagagcacgct

SEQ ID NO: 3561880 - DNA, 25 bp, Homo sapien
gcatcgcggtagaactgctgggctc

SEQ ID NO: 3561881 - DNA, 25 bp, Homo sapien
agccccacgtgctcccggagaccac

SEQ ID NO: 3561882 - DNA, 25 bp, Homo sapien
tgctcccggagaccacccttcaccc

SEQ ID NO: 3561883 - DNA, 25 bp, Homo sapien
gaaaatgctgaaagtcctgccccag

SEQ ID NO: 3561884 - DNA, 25 bp, Homo sapien
gaagagaaaatgctgaaagtcctgc

SEQ ID NO: 3561885 - DNA, 25 bp, Homo sapien
gcaggtccttgccatgctccatgga

SEQ ID NO: 3561886 - DNA, 25 bp, Homo sapien
tccttgccatgctccatggagctgg

SEQ ID NO: 3561887 - DNA, 25 bp, Homo sapien
gggcaggtccttgccatgctccatg

SEQ ID NO: 3561888 - DNA, 25 bp, Homo sapien
gccatgctccatggagctggccatg

SEQ ID NO: 3561889 - DNA, 25 bp, Homo sapien
tccacatcgcggtggaactggtgct

SEQ ID NO: 3561890 - DNA, 25 bp, Homo sapien
aagcctgcaggcgccggcagcgttc

SEQ ID NO: 3561891 - DNA, 25 bp, Homo sapien
tgggcctggattgcctccacctcct

SEQ ID NO: 3561892 - DNA, 25 bp, Homo sapien
tcctccacggccctcgaggttctct

SEQ ID NO: 3561893 - DNA, 25 bp, Homo sapien
catccccatcaaaggcccacagcac

SEQ ID NO: 3561894 - DNA, 25 bp, Homo sapien
tccccatcaaaggcccacagcacac

SEQ ID NO: 3561895 - DNA, 25 bp, Homo sapien
atccccatcaaaggcccacagcaca

SEQ ID NO: 3561896 - DNA, 25 bp, Homo sapien
cagctcggttggcatcaaagaggct

SEQ ID NO: 3561897 - DNA, 25 bp, Homo sapien
ggtccttgccgtagtcatccgagtg

SEQ ID NO: 3561898 - DNA, 25 bp, Homo sapien
tcttgagcaggatgttgacgctggt

SEQ ID NO: 3561899 - DNA, 25 bp, Homo sapien
gcttctcaagggtgagctctcgccc

SEQ ID NO: 3561900 - DNA, 25 bp, Homo sapien
caggttgcgggcctcgtcataggac

SEQ ID NO: 3561901 - DNA, 25 bp, Homo sapien
tgccacttagtatgcaggttgcggg

SEQ ID NO: 3561902 - DNA, 25 bp, Homo sapien
tcataggacacgtcctgggctgtca

SEQ ID NO: 3561903 - DNA, 25 bp, Homo sapien
agccagtctttgttggcagccagct

SEQ ID NO: 3561904 - DNA, 25 bp, Homo sapien
cccagaaattgctgcgctgcgtctt

SEQ ID NO: 3561905 - DNA, 25 bp, Homo sapien
ctgctcccggttgtcccgaagacgg

SEQ ID NO: 3561906 - DNA, 25 bp, Homo sapien
ctgctgctcccggttgtcccgaaga

SEQ ID NO: 3561907 - DNA, 25 bp, Homo sapien
ccgaagacggcccagaaattgctgc

SEQ ID NO: 3561908 - DNA, 25 bp, Homo sapien
caccctcttgtgaaactctggaatt

SEQ ID NO: 3561909 - DNA, 25 bp, Homo sapien
gaacgacaccctcttgtgaaactct

SEQ ID NO: 3561910 - DNA, 25 bp, Homo sapien
acgacaccctcttgtgaaactctgg

SEQ ID NO: 3561911 - DNA, 25 bp, Homo sapien
tggaacgacaccctcttgtgaaact

SEQ ID NO: 3561912 - DNA, 25 bp, Homo sapien
attgtgaccctttggctaacctagg

SEQ ID NO: 3561913 - DNA, 25 bp, Homo sapien
gggaataacgccttccgggagcaca

SEQ ID NO: 3561914 - DNA, 25 bp, Homo sapien
ccttccgggagcacaatgaggctac

SEQ ID NO: 3561915 - DNA, 25 bp, Homo sapien
acaatgaggctacccaggaatcctg

SEQ ID NO: 3561916 - DNA, 25 bp, Homo sapien
tctccgtgtgagacagaacatattc

SEQ ID NO: 3561917 - DNA, 25 bp, Homo sapien
ggagtctgccttttcccgaatcttg

SEQ ID NO: 3561918 - DNA, 25 bp, Homo sapien
cgtggatccgttccccattggcgtc

SEQ ID NO: 3561919 - DNA, 25 bp, Homo sapien
tgttgccttcagataccagctggcg

SEQ ID NO: 3561920 - DNA, 25 bp, Homo sapien
cctgcttgggactttgccctggact

SEQ ID NO: 3561921 - DNA, 25 bp, Homo sapien
gctcttcctcctgcttgggactttg

SEQ ID NO: 3561922 - DNA, 25 bp, Homo sapien
ctcctgcttgggactttgccctgga

SEQ ID NO: 3561923 - DNA, 25 bp, Homo sapien
ttcctcctgcttgggactttgccct

SEQ ID NO: 3561924 - DNA, 25 bp, Homo sapien
cagggcatttgcctctcgagtcagt

SEQ ID NO: 3561925 - DNA, 25 bp, Homo sapien
gaagtcatccaagctgcgcaagaag

SEQ ID NO: 3561926 - DNA, 25 bp, Homo sapien
tctcagccgggcgttgatggccact

SEQ ID NO: 3561927 - DNA, 25 bp, Homo sapien
cagatcgttgcctaggccctgggtg

SEQ ID NO: 3561928 - DNA, 25 bp, Homo sapien
tgctcggcaatgtcattcaccgcgg

SEQ ID NO: 3561929 - DNA, 25 bp, Homo sapien
gcaagggtgttcatttcaggctcca

SEQ ID NO: 3561930 - DNA, 25 bp, Homo sapien
ggttggccttcagtaactgctcggc

SEQ ID NO: 3561931 - DNA, 25 bp, Homo sapien
tgctcctgggtgttgacaatgcggt

SEQ ID NO: 3561932 - DNA, 25 bp, Homo sapien
tcgctgagcatggtgtagagcgcca

SEQ ID NO: 3561933 - DNA, 25 bp, Homo sapien
ttggccggtggcttcgaatctcctc

SEQ ID NO: 3561934 - DNA, 25 bp, Homo sapien
tagagcctgcgtggagaactcgtcg

SEQ ID NO: 3561935 - DNA, 25 bp, Homo sapien
catgtcgtttgcatcggcctggaac

SEQ ID NO: 3561936 - DNA, 25 bp, Homo sapien
cagaggcgctgacggcccgcaccct

SEQ ID NO: 3561937 - DNA, 25 bp, Homo sapien
tctcggcctgcacggcgatgtctgc

SEQ ID NO: 3561938 - DNA, 25 bp, Homo sapien
ctgcacggcgatgtctgcctccacc

SEQ ID NO: 3561939 - DNA, 25 bp, Homo sapien
accctctcggcctgcacggcgatgt

SEQ ID NO: 3561940 - DNA, 25 bp, Homo sapien
gcacacatgaagtgcacatgcccgc

SEQ ID NO: 3561941 - DNA, 25 bp, Homo sapien
ccatctgccgcaagaagtcccagag

SEQ ID NO: 3561942 - DNA, 25 bp, Homo sapien
ccacgttgtgctgccgagcggcgat

SEQ ID NO: 3561943 - DNA, 25 bp, Homo sapien
agtcccagagccgtgccacgttgtg

SEQ ID NO: 3561944 - DNA, 25 bp, Homo sapien
gatgtccgtctcaatggcttcgtgc

SEQ ID NO: 3561945 - DNA, 25 bp, Homo sapien
gcagccttgcggtcgaagcgggcgg

SEQ ID NO: 3561946 - DNA, 25 bp, Homo sapien
gacacgaggcgctggttctcgctga

SEQ ID NO: 3561947 - DNA, 25 bp, Homo sapien
tgagccaggtctcccgcatggcagc

SEQ ID NO: 3561948 - DNA, 25 bp, Homo sapien
tggcggatgagctcggtgcgcaggg

SEQ ID NO: 3561949 - DNA, 25 bp, Homo sapien
tgtccgagatgagccggccctcgcg

SEQ ID NO: 3561950 - DNA, 25 bp, Homo sapien
tgttggcccgaagcttgctctggat

SEQ ID NO: 3561951 - DNA, 25 bp, Homo sapien
tgttgatgtccgagatgagccggcc

SEQ ID NO: 3561952 - DNA, 25 bp, Homo sapien
tctggttgttggcccgaagcttgct

SEQ ID NO: 3561953 - DNA, 25 bp, Homo sapien
cccgctaagggagttggccaactgc

SEQ ID NO: 3561954 - DNA, 25 bp, Homo sapien
aactgccggtcattgagggtcacga

SEQ ID NO: 3561955 - DNA, 25 bp, Homo sapien
cagggactcgtatttctccaccagg

SEQ ID NO: 3561956 - DNA, 25 bp, Homo sapien
tcgtttgctcgatccactgcagcag

SEQ ID NO: 3561957 - DNA, 25 bp, Homo sapien
aagtaatggtagtaagtagccacat

SEQ ID NO: 3561958 - DNA, 25 bp, Homo sapien
gtagtaagtagccacataggtaatg

SEQ ID NO: 3561959 - DNA, 25 bp, Homo sapien
cacataggtaatgattgacttctca

SEQ ID NO: 3561960 - DNA, 25 bp, Homo sapien
ctcttgccttccacggccagggcct

SEQ ID NO: 3561961 - DNA, 25 bp, Homo sapien
gaatttagtgtagatatccaatcag

SEQ ID NO: 3561962 - DNA, 25 bp, Homo sapien
gtgtagatatccaatcagcataacc

SEQ ID NO: 3561963 - DNA, 25 bp, Homo sapien
gatatccaatcagcataacccactg

SEQ ID NO: 3561964 - DNA, 25 bp, Homo sapien
tatccaatcagcataacccactgca

SEQ ID NO: 3561965 - DNA, 25 bp, Homo sapien
ccagcagcttggtaagtcccagttc

SEQ ID NO: 3561966 - DNA, 25 bp, Homo sapien
gcattctgcagattatagtgtgcat

SEQ ID NO: 3561967 - DNA, 25 bp, Homo sapien
tatagtgtgcattacacttcttcag

SEQ ID NO: 3561968 - DNA, 25 bp, Homo sapien
atccagcagcttggtaagtcccagt

SEQ ID NO: 3561969 - DNA, 25 bp, Homo sapien
tttatgcacgatggcgttgaaagct

SEQ ID NO: 3561970 - DNA, 25 bp, Homo sapien
cggtgtttatgcacgatggcgttga

SEQ ID NO: 3561971 - DNA, 25 bp, Homo sapien
ctggtggtgaagttgtgtacattga

SEQ ID NO: 3561972 - DNA, 25 bp, Homo sapien
gttgtgtacattgacgttgggataa

SEQ ID NO: 3561973 - DNA, 25 bp, Homo sapien
gaagcagggcatccttggctgactt

SEQ ID NO: 3561974 - DNA, 25 bp, Homo sapien
gacttcttctccttgttgtcttctg

SEQ ID NO: 3561975 - DNA, 25 bp, Homo sapien
tctgtctccacactgatgtcttgga

SEQ ID NO: 3561976 - DNA, 25 bp, Homo sapien
ctgcagtcttcatctggcaccacag

SEQ ID NO: 3561977 - DNA, 25 bp, Homo sapien
ggtcagtcggtggtttccgtccaca

SEQ ID NO: 3561978 - DNA, 25 bp, Homo sapien
gcatgcggccctttgtaggctttgg

SEQ ID NO: 3561979 - DNA, 25 bp, Homo sapien
ttccgtccacaatgtcatgggagcc

SEQ ID NO: 3561980 - DNA, 25 bp, Homo sapien
ccgcatgcggccctttgtaggcttt

SEQ ID NO: 3561981 - DNA, 25 bp, Homo sapien
cggaggtcgctgtacaggtccccca

SEQ ID NO: 3561982 - DNA, 25 bp, Homo sapien
agtatctctcccgagagcacctcga

SEQ ID NO: 3561983 - DNA, 25 bp, Homo sapien
tcagcaggttgcgtccgtcccggag

SEQ ID NO: 3561984 - DNA, 25 bp, Homo sapien
tctctcccgagagcacctcgaggag

SEQ ID NO: 3561985 - DNA, 25 bp, Homo sapien
aaaagttaggcaatgccctgctgcc

SEQ ID NO: 3561986 - DNA, 25 bp, Homo sapien
gtcctaataacatgggacggcccca

SEQ ID NO: 3561987 - DNA, 25 bp, Homo sapien
tctcagaaaccggaaagactcatcc

SEQ ID NO: 3561988 - DNA, 25 bp, Homo sapien
gccattttggcacacagtcagaaga

SEQ ID NO: 3561989 - DNA, 25 bp, Homo sapien
gcacgctggcatactgagcagggtt

SEQ ID NO: 3561990 - DNA, 25 bp, Homo sapien
catagtaaaactcgctggcctcatg

SEQ ID NO: 3561991 - DNA, 25 bp, Homo sapien
tggcctcatgcaggccgttcccgtg

SEQ ID NO: 3561992 - DNA, 25 bp, Homo sapien
gcagctgtttgaagcgtccttccag

SEQ ID NO: 3561993 - DNA, 25 bp, Homo sapien
ctggtaggagtgtttcacagccggc

SEQ ID NO: 3561994 - DNA, 25 bp, Homo sapien
gtcttctctgatgtatagacacact

SEQ ID NO: 3561995 - DNA, 25 bp, Homo sapien
tctctgatgtatagacacactggta

SEQ ID NO: 3561996 - DNA, 25 bp, Homo sapien
cacactggtaggagtgtttcacagc

SEQ ID NO: 3561997 - DNA, 25 bp, Homo sapien
aatgggcggctgcagaaaccagcag

SEQ ID NO: 3561998 - DNA, 25 bp, Homo sapien
atgggcggctgcagaaaccagcagc

SEQ ID NO: 3561999 - DNA, 25 bp, Homo sapien
cagggagaatgggcggctgcagaaa

SEQ ID NO: 3562000 - DNA, 25 bp, Homo sapien
gagaatgggcggctgcagaaaccag

SEQ ID NO: 3562001 - DNA, 25 bp, Homo sapien
tgcgagacctctcaaagaggcgggc

SEQ ID NO: 3562002 - DNA, 25 bp, Homo sapien
ctgccagagccttaatgcgagacct

SEQ ID NO: 3562003 - DNA, 25 bp, Homo sapien
cattgtcccagtccgagtcaggaag

SEQ ID NO: 3562004 - DNA, 25 bp, Homo sapien
gatgtcactgtactggccctggatt

SEQ ID NO: 3562005 - DNA, 25 bp, Homo sapien
ccagaggctgcggttggctgctcag

SEQ ID NO: 3562006 - DNA, 25 bp, Homo sapien
agaggctgcggttggctgctcagtg

SEQ ID NO: 3562007 - DNA, 25 bp, Homo sapien
ggccagaggctgcggttggctgctc

SEQ ID NO: 3562008 - DNA, 25 bp, Homo sapien
ctccttgtggccagaggctgcggtt

SEQ ID NO: 3562009 - DNA, 25 bp, Homo sapien
cgtgccgatcctccagggcagtttt

SEQ ID NO: 3562010 - DNA, 25 bp, Homo sapien
aagatgaagatggagtaggtaccac

SEQ ID NO: 3562011 - DNA, 25 bp, Homo sapien
gagctcaggcgatgggagaggaaga

SEQ ID NO: 3562012 - DNA, 25 bp, Homo sapien
aaccgcagatatgcgggaggagaac

SEQ ID NO: 3562013 - DNA, 25 bp, Homo sapien
aagaaacagcacagcgaaccgcaga

SEQ ID NO: 3562014 - DNA, 25 bp, Homo sapien
gcaggccttgctgggtagttccgtg

SEQ ID NO: 3562015 - DNA, 25 bp, Homo sapien
cgtctgctttctccccgggccagtt

SEQ ID NO: 3562016 - DNA, 25 bp, Homo sapien
acagaaacgccgcacgcggccgctt

SEQ ID NO: 3562017 - DNA, 25 bp, Homo sapien
cgggccagttccggccaccacagcc

SEQ ID NO: 3562018 - DNA, 25 bp, Homo sapien
caccacagccaaccgcgtgcccctc

SEQ ID NO: 3562019 - DNA, 25 bp, Homo sapien
cggcggccccgcggggctctgggcg

SEQ ID NO: 3562020 - DNA, 25 bp, Homo sapien
gggctctgggcggggcccgagtcgc

SEQ ID NO: 3562021 - DNA, 25 bp, Homo sapien
catctggagccggcggccccgcggg

SEQ ID NO: 3562022 - DNA, 25 bp, Homo sapien
cgagtcgccccttccccgcccagcg

SEQ ID NO: 3562023 - DNA, 25 bp, Homo sapien
aaacaggcatctcagcgcttctcag

SEQ ID NO: 3562024 - DNA, 25 bp, Homo sapien
tccatggcacagtgaagattcgtct

SEQ ID NO: 3562025 - DNA, 25 bp, Homo sapien
gaattccggcctagtcaccgtcttg

SEQ ID NO: 3562026 - DNA, 25 bp, Homo sapien
catttctaggcctgacacggctggg

SEQ ID NO: 3562027 - DNA, 25 bp, Homo sapien
tgcaaaagcgaatggaatgatatcc

SEQ ID NO: 3562028 - DNA, 25 bp, Homo sapien
tgaaccagtacagtcaatgatgaag

SEQ ID NO: 3562029 - DNA, 25 bp, Homo sapien
tattttgctctgtagtgaaccagta

SEQ ID NO: 3562030 - DNA, 25 bp, Homo sapien
tctgtgactgggttgctttggaaac

SEQ ID NO: 3562031 - DNA, 25 bp, Homo sapien
tgggtttacgctacggaagtcctga

SEQ ID NO: 3562032 - DNA, 25 bp, Homo sapien
tgcatgctgcctgaatacgtgggtt

SEQ ID NO: 3562033 - DNA, 25 bp, Homo sapien
caagggctggaagctaggaaaccaa

SEQ ID NO: 3562034 - DNA, 25 bp, Homo sapien
gatggcaaaccctcatatcgaaggc

SEQ ID NO: 3562035 - DNA, 25 bp, Homo sapien
taggtctacctgtgagcaactgaga

SEQ ID NO: 3562036 - DNA, 25 bp, Homo sapien
tcagtgcagtcaaacgtggaaaggg

SEQ ID NO: 3562037 - DNA, 25 bp, Homo sapien
caggcaggaatctctcatcagggtt

SEQ ID NO: 3562038 - DNA, 25 bp, Homo sapien
ccaaggttgtgtactgggcaggcac

SEQ ID NO: 3562039 - DNA, 25 bp, Homo sapien
ccgccaccgtgggaaactatctttg

SEQ ID NO: 3562040 - DNA, 25 bp, Homo sapien
cccgccgcagacaaggctgttggag

SEQ ID NO: 3562041 - DNA, 25 bp, Homo sapien
gattagggccaagggccgcatctcg

SEQ ID NO: 3562042 - DNA, 25 bp, Homo sapien
ttctttgctaagtctgggacccagg

SEQ ID NO: 3562043 - DNA, 25 bp, Homo sapien
gctcagccctaaattgttatatctt

SEQ ID NO: 3562044 - DNA, 25 bp, Homo sapien
tgctcagccctaaattgttatatct

SEQ ID NO: 3562045 - DNA, 25 bp, Homo sapien
gtgctcagccctaaattgttatatc

SEQ ID NO: 3562046 - DNA, 25 bp, Homo sapien
tgtctatcatgttatacaaaaatct

SEQ ID NO: 3562047 - DNA, 25 bp, Homo sapien
atgataataaatgagggtgcaaaac

SEQ ID NO: 3562048 - DNA, 25 bp, Homo sapien
gtgcgaagctccaccaactcatctg

SEQ ID NO: 3562049 - DNA, 25 bp, Homo sapien
aatgttgtccaccccttggtccgca

SEQ ID NO: 3562050 - DNA, 25 bp, Homo sapien
ggctgtgcgaagctccaccaactca

SEQ ID NO: 3562051 - DNA, 25 bp, Homo sapien
acgcctggtgctccggggctgtgcg

SEQ ID NO: 3562052 - DNA, 25 bp, Homo sapien
tcaaactcgctggtggaccaaaagc

SEQ ID NO: 3562053 - DNA, 25 bp, Homo sapien
aactcgctggtggaccaaaagctaa

SEQ ID NO: 3562054 - DNA, 25 bp, Homo sapien
tccattcaaactcgctggtggacca

SEQ ID NO: 3562055 - DNA, 25 bp, Homo sapien
gctggtggaccaaaagctaacttcc

SEQ ID NO: 3562056 - DNA, 25 bp, Homo sapien
agcctcctcttcttgtccagcttca

SEQ ID NO: 3562057 - DNA, 25 bp, Homo sapien
tcagcctcctcttcttgtccagctt

SEQ ID NO: 3562058 - DNA, 25 bp, Homo sapien
tcctcttcttgtccagcttcatcct

SEQ ID NO: 3562059 - DNA, 25 bp, Homo sapien
gcctcctcttcttgtccagcttcat

SEQ ID NO: 3562060 - DNA, 25 bp, Homo sapien
ccacgaaatggggagttgatatcaa

SEQ ID NO: 3562061 - DNA, 25 bp, Homo sapien
gagttgatatcaattcagggtcttc

SEQ ID NO: 3562062 - DNA, 25 bp, Homo sapien
ttgatatcaattcagggtcttcaac

SEQ ID NO: 3562063 - DNA, 25 bp, Homo sapien
gggagttgatatcaattcagggtct

SEQ ID NO: 3562064 - DNA, 25 bp, Homo sapien
tctgcccttgcgagggttcctcctc

SEQ ID NO: 3562065 - DNA, 25 bp, Homo sapien
tgcccttgcgagggttcctcctcac

SEQ ID NO: 3562066 - DNA, 25 bp, Homo sapien
ttctgcccttgcgagggttcctcct

SEQ ID NO: 3562067 - DNA, 25 bp, Homo sapien
cttctgcccttgcgagggttcctcc

SEQ ID NO: 3562068 - DNA, 25 bp, Homo sapien
taatattgaaagtgacagtgatttt

SEQ ID NO: 3562069 - DNA, 25 bp, Homo sapien
gttgttaatattgaaagtgacagtg

SEQ ID NO: 3562070 - DNA, 25 bp, Homo sapien
gttaatattgaaagtgacagtgatt

SEQ ID NO: 3562071 - DNA, 25 bp, Homo sapien
gacagtgattttttccccccagcaa

SEQ ID NO: 3562072 - DNA, 25 bp, Homo sapien
agcttctgtcccattcagttccagc

SEQ ID NO: 3562073 - DNA, 25 bp, Homo sapien
caaactccagacatcttaggaaggg

SEQ ID NO: 3562074 - DNA, 25 bp, Homo sapien
taggaagggttttatgcttctggat

SEQ ID NO: 3562075 - DNA, 25 bp, Homo sapien
catcactcaggaaatcaatcaaagc

SEQ ID NO: 3562076 - DNA, 25 bp, Homo sapien
ggccgcagaacacgcgcgcaaactg

SEQ ID NO: 3562077 - DNA, 25 bp, Homo sapien
ttcgcacgccacacccacagccgga

SEQ ID NO: 3562078 - DNA, 25 bp, Homo sapien
gccacacccacagccggaggtgcag

SEQ ID NO: 3562079 - DNA, 25 bp, Homo sapien
actgagcagcctgaagggcgggcgc

SEQ ID NO: 3562080 - DNA, 25 bp, Homo sapien
ggaagccggcgacgcagaagcccag

SEQ ID NO: 3562081 - DNA, 25 bp, Homo sapien
gcacccttacacttctcagccaatt

SEQ ID NO: 3562082 - DNA, 25 bp, Homo sapien
acccttacacttctcagccaatttg

SEQ ID NO: 3562083 - DNA, 25 bp, Homo sapien
ctgcacccttacacttctcagccaa

SEQ ID NO: 3562084 - DNA, 25 bp, Homo sapien
cccttacacttctcagccaatttgt

SEQ ID NO: 3562085 - DNA, 25 bp, Homo sapien
gcaatcattgattagagacagttct

SEQ ID NO: 3562086 - DNA, 25 bp, Homo sapien
tgtagaatctctagcaatatcctct

SEQ ID NO: 3562087 - DNA, 25 bp, Homo sapien
ttatctaagttattgggttattgac

SEQ ID NO: 3562088 - DNA, 25 bp, Homo sapien
tataaagtgaaagctgcaatcattg

SEQ ID NO: 3562089 - DNA, 25 bp, Homo sapien
tgttgggagaactgatactgactcc

SEQ ID NO: 3562090 - DNA, 25 bp, Homo sapien
gagaactgatactgactccagcagc

SEQ ID NO: 3562091 - DNA, 25 bp, Homo sapien
tgggagaactgatactgactccagc

SEQ ID NO: 3562092 - DNA, 25 bp, Homo sapien
ggagaactgatactgactccagcag

SEQ ID NO: 3562093 - DNA, 25 bp, Homo sapien
tcacattgtattacagcttaccggc

SEQ ID NO: 3562094 - DNA, 25 bp, Homo sapien
cactagtgcagaggttaagaaaccc

SEQ ID NO: 3562095 - DNA, 25 bp, Homo sapien
ccaccgcagtgaagaattatctggc

SEQ ID NO: 3562096 - DNA, 25 bp, Homo sapien
taataggtttggagacaatccgagg

SEQ ID NO: 3562097 - DNA, 25 bp, Homo sapien
caagcacttcggagaacagttagca

SEQ ID NO: 3562098 - DNA, 25 bp, Homo sapien
tggatgaatctctgaatagcatggc

SEQ ID NO: 3562099 - DNA, 25 bp, Homo sapien
taaaatgccaactaatctacacagg

SEQ ID NO: 3562100 - DNA, 25 bp, Homo sapien
aattgtacattttcggccgggtgcg

SEQ ID NO: 3562101 - DNA, 25 bp, Homo sapien
gtcttgcgatctggaattacatgtg

SEQ ID NO: 3562102 - DNA, 25 bp, Homo sapien
caccctaaatccaggctaatcctgt

SEQ ID NO: 3562103 - DNA, 25 bp, Homo sapien
tacaggcaggtaattagggatttag

SEQ ID NO: 3562104 - DNA, 25 bp, Homo sapien
gattacaggcaggtaattagggatt

SEQ ID NO: 3562105 - DNA, 25 bp, Homo sapien
tgtgcaaggctaccagagaggccca

SEQ ID NO: 3562106 - DNA, 25 bp, Homo sapien
gcagccatcgccactaaaattacag

SEQ ID NO: 3562107 - DNA, 25 bp, Homo sapien
cagagcttcatatctcaatgcgggt

SEQ ID NO: 3562108 - DNA, 25 bp, Homo sapien
agtacctattcgcagtgagtcccag

SEQ ID NO: 3562109 - DNA, 25 bp, Homo sapien
tgggtaacagtaccttagcaggtat

SEQ ID NO: 3562110 - DNA, 25 bp, Homo sapien
accttagcaggtatgatttgtaaat

SEQ ID NO: 3562111 - DNA, 25 bp, Homo sapien
taacagtaccttagcaggtatgatt

SEQ ID NO: 3562112 - DNA, 25 bp, Homo sapien
cagtaccttagcaggtatgatttgt

SEQ ID NO: 3562113 - DNA, 25 bp, Homo sapien
agagacaaaggaataagtatcttcc

SEQ ID NO: 3562114 - DNA, 25 bp, Homo sapien
gagacaaaggaataagtatcttccc

SEQ ID NO: 3562115 - DNA, 25 bp, Homo sapien
agaagagacaaaggaataagtatct

SEQ ID NO: 3562116 - DNA, 25 bp, Homo sapien
aagagacaaaggaataagtatcttc

SEQ ID NO: 3562117 - DNA, 25 bp, Homo sapien
tctctcccttgtctggcatatcact

SEQ ID NO: 3562118 - DNA, 25 bp, Homo sapien
gctcaggtatctcctcatggaaacc

SEQ ID NO: 3562119 - DNA, 25 bp, Homo sapien
tttacataggaagttgttttatgcc

SEQ ID NO: 3562120 - DNA, 25 bp, Homo sapien
taaggtttgtgttaactttcagcaa

SEQ ID NO: 3562121 - DNA, 25 bp, Homo sapien
gaaagttactgagcggcctgagtcc

SEQ ID NO: 3562122 - DNA, 25 bp, Homo sapien
ccaagtgagggctcgggacaatctc

SEQ ID NO: 3562123 - DNA, 25 bp, Homo sapien
catagaggagatgcgagctctgcgc

SEQ ID NO: 3562124 - DNA, 25 bp, Homo sapien
tttctcctagataccagcgggcaag

SEQ ID NO: 3562125 - DNA, 25 bp, Homo sapien
ttgaaaggggtgtttacgagcagct

SEQ ID NO: 3562126 - DNA, 25 bp, Homo sapien
ctagttgcgtcccagggaccaagag

SEQ ID NO: 3562127 - DNA, 25 bp, Homo sapien
gaagccagagctagttgcgtcccag

SEQ ID NO: 3562128 - DNA, 25 bp, Homo sapien
caaagggtgcagccccttttgaaag

SEQ ID NO: 3562129 - DNA, 25 bp, Homo sapien
tattgagtaaacttcccaggacctg

SEQ ID NO: 3562130 - DNA, 25 bp, Homo sapien
aacatgtaagcagctgtccgccgga

SEQ ID NO: 3562131 - DNA, 25 bp, Homo sapien
aaggaatgaaccaccgcaggcggtg

SEQ ID NO: 3562132 - DNA, 25 bp, Homo sapien
gggacccttatttggcaagagatga

SEQ ID NO: 3562133 - DNA, 25 bp, Homo sapien
tccaggatgaggtcgtcaccttcca

SEQ ID NO: 3562134 - DNA, 25 bp, Homo sapien
cacatgaaccttgcggacagtaccc

SEQ ID NO: 3562135 - DNA, 25 bp, Homo sapien
tcaccttccagtgtcatgtccttgg

SEQ ID NO: 3562136 - DNA, 25 bp, Homo sapien
catgggtgaggtcaccacagtctcc

SEQ ID NO: 3562137 - DNA, 25 bp, Homo sapien
cagccaagccccaccgcctggctgg

SEQ ID NO: 3562138 - DNA, 25 bp, Homo sapien
agccaagccccaccgcctggctggc

SEQ ID NO: 3562139 - DNA, 25 bp, Homo sapien
gaggggacatgacatcctgggccca

SEQ ID NO: 3562140 - DNA, 25 bp, Homo sapien
ggcagaggggacatgacatcctggg

SEQ ID NO: 3562141 - DNA, 25 bp, Homo sapien
gcccattgagctcaaagaagacctg

SEQ ID NO: 3562142 - DNA, 25 bp, Homo sapien
gcctgggtgtccttgaccaagatgg

SEQ ID NO: 3562143 - DNA, 25 bp, Homo sapien
tggccggcccggttcaggtcgctca

SEQ ID NO: 3562144 - DNA, 25 bp, Homo sapien
aagatggaccgcagctgcccattga

SEQ ID NO: 3562145 - DNA, 25 bp, Homo sapien
aggcgagtattcaggctatccaggg

SEQ ID NO: 3562146 - DNA, 25 bp, Homo sapien
tcctctgcgatcttgggtccctgca

SEQ ID NO: 3562147 - DNA, 25 bp, Homo sapien
ctcaaactcctctgcgatcttgggt

SEQ ID NO: 3562148 - DNA, 25 bp, Homo sapien
caggaagaggcgagtattcaggcta

SEQ ID NO: 3562149 - DNA, 25 bp, Homo sapien
ccatgccggtctaccagctccttct

SEQ ID NO: 3562150 - DNA, 25 bp, Homo sapien
ctgagagcacatcttccggcgtcac

SEQ ID NO: 3562151 - DNA, 25 bp, Homo sapien
cctcctccccatgccggtctaccag

SEQ ID NO: 3562152 - DNA, 25 bp, Homo sapien
gggcaaacacatcggggtacatagc

SEQ ID NO: 3562153 - DNA, 25 bp, Homo sapien
ctccacccttggcaggtccttcagt

SEQ ID NO: 3562154 - DNA, 25 bp, Homo sapien
aggccgcccctccacccttggcagg

SEQ ID NO: 3562155 - DNA, 25 bp, Homo sapien
ccctccacccttggcaggtccttca

SEQ ID NO: 3562156 - DNA, 25 bp, Homo sapien
cgcccctccacccttggcaggtcct

SEQ ID NO: 3562157 - DNA, 25 bp, Homo sapien
ccattctgcaccataaactgggcca

SEQ ID NO: 3562158 - DNA, 25 bp, Homo sapien
aaaggacagctcttccgcctgagct

SEQ ID NO: 3562159 - DNA, 25 bp, Homo sapien
gggacaccgatgtagccctgcagga

SEQ ID NO: 3562160 - DNA, 25 bp, Homo sapien
ccacgatcttggaggagggcgtcac

SEQ ID NO: 3562161 - DNA, 25 bp, Homo sapien
ccagacttcatggtggccgtgcagt

SEQ ID NO: 3562162 - DNA, 25 bp, Homo sapien
ttttcatacacgtccgagttgccag

SEQ ID NO: 3562163 - DNA, 25 bp, Homo sapien
ctgtagtcaaacacgcgctccatgg

SEQ ID NO: 3562164 - DNA, 25 bp, Homo sapien
gatgagatcgcccagcatctggttg

SEQ ID NO: 3562165 - DNA, 25 bp, Homo sapien
ggctgtgaagtcatcccagacatgg

SEQ ID NO: 3562166 - DNA, 25 bp, Homo sapien
aggggagtccctctggtacaggcca

SEQ ID NO: 3562167 - DNA, 25 bp, Homo sapien
cagacatggaatcagctgccacatc

SEQ ID NO: 3562168 - DNA, 25 bp, Homo sapien
cctgcccctgacgtgtcgtgggtgt

SEQ ID NO: 3562169 - DNA, 25 bp, Homo sapien
tcgcccgtgtatgagatggcagcct

SEQ ID NO: 3562170 - DNA, 25 bp, Homo sapien
tactgcagtgagtacttggtgcggc

SEQ ID NO: 3562171 - DNA, 25 bp, Homo sapien
tcggccaagcccatgtagtactgca

SEQ ID NO: 3562172 - DNA, 25 bp, Homo sapien
tagttgagggagtcaaacacacgga

SEQ ID NO: 3562173 - DNA, 25 bp, Homo sapien
ttgaagaccacgttgtctgggtagt

SEQ ID NO: 3562174 - DNA, 25 bp, Homo sapien
accacgttgtctgggtagttggtgt

SEQ ID NO: 3562175 - DNA, 25 bp, Homo sapien
caggggcactcatacaggaagcgca

SEQ ID NO: 3562176 - DNA, 25 bp, Homo sapien
ggtgtagcccacagcattggccccc

SEQ ID NO: 3562177 - DNA, 25 bp, Homo sapien
tctttttgagatcgtgggtgcgcac

SEQ ID NO: 3562178 - DNA, 25 bp, Homo sapien
tctcgcagcaggatgtctctgaaac

SEQ ID NO: 3562179 - DNA, 25 bp, Homo sapien
gtggttccgcacagctcgagcaaag

SEQ ID NO: 3562180 - DNA, 25 bp, Homo sapien
tgggcgtccctgaaggtcgtgtcca

SEQ ID NO: 3562181 - DNA, 25 bp, Homo sapien
gttggaccgtttaccatgacatggc

SEQ ID NO: 3562182 - DNA, 25 bp, Homo sapien
ggtggttggaccgtttaccatgaca

SEQ ID NO: 3562183 - DNA, 25 bp, Homo sapien
tggggctggccttgacgggaatcgg

SEQ ID NO: 3562184 - DNA, 25 bp, Homo sapien
tggttggaccgtttaccatgacatg

SEQ ID NO: 3562185 - DNA, 25 bp, Homo sapien
gaggctgagtcgagggcagcagtga

SEQ ID NO: 3562186 - DNA, 25 bp, Homo sapien
agaggctgagtcgagggcagcagtg

SEQ ID NO: 3562187 - DNA, 25 bp, Homo sapien
aggctgagtcgagggcagcagtgag

SEQ ID NO: 3562188 - DNA, 25 bp, Homo sapien
gggagaaagcgggcagtgggtcagg

SEQ ID NO: 3562189 - DNA, 25 bp, Homo sapien
gcaacagcttttgggcccggttctg

SEQ ID NO: 3562190 - DNA, 25 bp, Homo sapien
tctcgtcgatgaactgggtgtccac

SEQ ID NO: 3562191 - DNA, 25 bp, Homo sapien
aacagctctgggttctcgtcgatga

SEQ ID NO: 3562192 - DNA, 25 bp, Homo sapien
aactgctggttgttgagcacattct

SEQ ID NO: 3562193 - DNA, 25 bp, Homo sapien
tcaagccagaggattcgaccacggc

SEQ ID NO: 3562194 - DNA, 25 bp, Homo sapien
agccagaggattcgaccacggccat

SEQ ID NO: 3562195 - DNA, 25 bp, Homo sapien
tggtcaagccagaggattcgaccac

SEQ ID NO: 3562196 - DNA, 25 bp, Homo sapien
cagaggattcgaccacggccatttt

SEQ ID NO: 3562197 - DNA, 25 bp, Homo sapien
ttccagcagtcccctgaggaacccg

SEQ ID NO: 3562198 - DNA, 25 bp, Homo sapien
tttccagcagtcccctgaggaaccc

SEQ ID NO: 3562199 - DNA, 25 bp, Homo sapien
ctttccagcagtcccctgaggaacc

SEQ ID NO: 3562200 - DNA, 25 bp, Homo sapien
aggccgctgaggaacctgcacgggc

SEQ ID NO: 3562201 - DNA, 25 bp, Homo sapien
gcaggccgctgaggaacctgcacgg

SEQ ID NO: 3562202 - DNA, 25 bp, Homo sapien
agcaggccgctgaggaacctgcacg

SEQ ID NO: 3562203 - DNA, 25 bp, Homo sapien
gaacctgcacgggcagggctgagcg

SEQ ID NO: 3562204 - DNA, 25 bp, Homo sapien
ggacccttgtgttcacagacacacg

SEQ ID NO: 3562205 - DNA, 25 bp, Homo sapien
tgttgctgggacccttgtgttcaca

SEQ ID NO: 3562206 - DNA, 25 bp, Homo sapien
tgggacccttgtgttcacagacaca

SEQ ID NO: 3562207 - DNA, 25 bp, Homo sapien
tgctgggacccttgtgttcacagac

SEQ ID NO: 3562208 - DNA, 25 bp, Homo sapien
aaggtgccgggaaccgagcgagccg

SEQ ID NO: 3562209 - DNA, 25 bp, Homo sapien
cccgagcgccatgggcccgagggtg

SEQ ID NO: 3562210 - DNA, 25 bp, Homo sapien
cgggcccgagcgccatgggcccgag

SEQ ID NO: 3562211 - DNA, 25 bp, Homo sapien
aggtgccgggaaccgagcgagccgg

SEQ ID NO: 3562212 - DNA, 25 bp, Homo sapien
tgacttccgcaacatgacgggactg

SEQ ID NO: 3562213 - DNA, 25 bp, Homo sapien
gagccttcgacgacttcctagagag

SEQ ID NO: 3562214 - DNA, 25 bp, Homo sapien
tgtcctacaacaacctccggcaggt

SEQ ID NO: 3562215 - DNA, 25 bp, Homo sapien
tgcgtctgccagaacctgtccgagt

SEQ ID NO: 3562216 - DNA, 25 bp, Homo sapien
ctggaccataaccttattgacgcac

SEQ ID NO: 3562217 - DNA, 25 bp, Homo sapien
accataaccttattgacgcactgcc

SEQ ID NO: 3562218 - DNA, 25 bp, Homo sapien
cataaccttattgacgcactgcccc

SEQ ID NO: 3562219 - DNA, 25 bp, Homo sapien
ggaccataaccttattgacgcactg

SEQ ID NO: 3562220 - DNA, 25 bp, Homo sapien
ggacacctcagtgctagtctctggt

SEQ ID NO: 3562221 - DNA, 25 bp, Homo sapien
taataaaattgttggggacacctca

SEQ ID NO: 3562222 - DNA, 25 bp, Homo sapien
cagggagccctttcctcggttctgg

SEQ ID NO: 3562223 - DNA, 25 bp, Homo sapien
cctccagaccagggtaagggcaggc

SEQ ID NO: 3562224 - DNA, 25 bp, Homo sapien
gtcacggtctctagtgcccctttct

SEQ ID NO: 3562225 - DNA, 25 bp, Homo sapien
cgtggtcacggtctctagtgcccct

SEQ ID NO: 3562226 - DNA, 25 bp, Homo sapien
ggccccgtggtcacggtctctagtg

SEQ ID NO: 3562227 - DNA, 25 bp, Homo sapien
ctggccccgtggtcacggtctctag

SEQ ID NO: 3562228 - DNA, 25 bp, Homo sapien
agcgcgtgatgtcgacagctgatgt

SEQ ID NO: 3562229 - DNA, 25 bp, Homo sapien
tgtgcatggccacgcatcccctcaa

SEQ ID NO: 3562230 - DNA, 25 bp, Homo sapien
agctgatgtcgcgacacacctctgc

SEQ ID NO: 3562231 - DNA, 25 bp, Homo sapien
accaggagccgcagcaaggtgcagg

SEQ ID NO: 3562232 - DNA, 25 bp, Homo sapien
ctttgaccagcagggagtcgtagtg

SEQ ID NO: 3562233 - DNA, 25 bp, Homo sapien
cctgctcatcttggtggcggccgtg

SEQ ID NO: 3562234 - DNA, 25 bp, Homo sapien
tgccgtgggcaatgactttgaccag

SEQ ID NO: 3562235 - DNA, 25 bp, Homo sapien
gaagcattatccaggcggatgccca

SEQ ID NO: 3562236 - DNA, 25 bp, Homo sapien
tgcctgcctccgtgtactctatgtc

SEQ ID NO: 3562237 - DNA, 25 bp, Homo sapien
acttcagagcccacatgcgggtcct

SEQ ID NO: 3562238 - DNA, 25 bp, Homo sapien
cgggctgtggcaacttggcactgca

SEQ ID NO: 3562239 - DNA, 25 bp, Homo sapien
atgcgggtcctccctaactgccggg

SEQ ID NO: 3562240 - DNA, 25 bp, Homo sapien
ggcccaggtcgggtaggctcctgcc

SEQ ID NO: 3562241 - DNA, 25 bp, Homo sapien
atgcggatgttctcctgccgcaggc

SEQ ID NO: 3562242 - DNA, 25 bp, Homo sapien
caatgcggccggtgtccggctggaa

SEQ ID NO: 3562243 - DNA, 25 bp, Homo sapien
tggtgacccggcactggatggcaca

SEQ ID NO: 3562244 - DNA, 25 bp, Homo sapien
gagatggcccgctgaaataccagga

SEQ ID NO: 3562245 - DNA, 25 bp, Homo sapien
aagcctagatttgaagcctcagcag

SEQ ID NO: 3562246 - DNA, 25 bp, Homo sapien
acagtgcgactcctgcccataggct

SEQ ID NO: 3562247 - DNA, 25 bp, Homo sapien
gggagccgactaaactacacagtgc

SEQ ID NO: 3562248 - DNA, 25 bp, Homo sapien
aaaaccccctagagatgcttggaga

SEQ ID NO: 3562249 - DNA, 25 bp, Homo sapien
caaagtgggtgaatcccacgaggcc

SEQ ID NO: 3562250 - DNA, 25 bp, Homo sapien
cagtcacaagtccaagtggaacagc

SEQ ID NO: 3562251 - DNA, 25 bp, Homo sapien
ctgctggacttgtgcccaaaacccc

SEQ ID NO: 3562252 - DNA, 25 bp, Homo sapien
tccacggtgcctgcgttctcgtagc

SEQ ID NO: 3562253 - DNA, 25 bp, Homo sapien
gcttgccgtgcctgtccaccaggaa

SEQ ID NO: 3562254 - DNA, 25 bp, Homo sapien
tctgtgaccgtgtgctccacctgca

SEQ ID NO: 3562255 - DNA, 25 bp, Homo sapien
cgggagttgacctcgatgaagtagt

SEQ ID NO: 3562256 - DNA, 25 bp, Homo sapien
tcacagagtcgctggtgagccgagt

SEQ ID NO: 3562257 - DNA, 25 bp, Homo sapien
agccgagtccgaagctgcgggtcca

SEQ ID NO: 3562258 - DNA, 25 bp, Homo sapien
gggcaatctcgaccaccttctggtg

SEQ ID NO: 3562259 - DNA, 25 bp, Homo sapien
tcgctcgtacaggtgcaggatgttc

SEQ ID NO: 3562260 - DNA, 25 bp, Homo sapien
taggcccgggtgtaattctcctcca

SEQ ID NO: 3562261 - DNA, 25 bp, Homo sapien
caagatctgcacctcgatgtgccgt

SEQ ID NO: 3562262 - DNA, 25 bp, Homo sapien
gatgtgccgtggcttctcgatgaac

SEQ ID NO: 3562263 - DNA, 25 bp, Homo sapien
gatgaacttctccacaaacagcgcc

SEQ ID NO: 3562264 - DNA, 25 bp, Homo sapien
gtgttggagaactcgtgggcctcat

SEQ ID NO: 3562265 - DNA, 25 bp, Homo sapien
cataggccgccttgaagatgatggg

SEQ ID NO: 3562266 - DNA, 25 bp, Homo sapien
actcgtgggcctcatgcagggacgt

SEQ ID NO: 3562267 - DNA, 25 bp, Homo sapien
tcgtagctgtgcaccaccctcatgc

SEQ ID NO: 3562268 - DNA, 25 bp, Homo sapien
cagcaatggcgatggcccgggcctc

SEQ ID NO: 3562269 - DNA, 25 bp, Homo sapien
caggcctgggcgaagtccgctcgct

SEQ ID NO: 3562270 - DNA, 25 bp, Homo sapien
ctcagagaggaacccgtagccaggg

SEQ ID NO: 3562271 - DNA, 25 bp, Homo sapien
catcttgcggaccacttctgggctt

SEQ ID NO: 3562272 - DNA, 25 bp, Homo sapien
tttctgccggtgcatctggcccgtg

SEQ ID NO: 3562273 - DNA, 25 bp, Homo sapien
cggaacacacggatggcaatctcac

SEQ ID NO: 3562274 - DNA, 25 bp, Homo sapien
tagatggctacggtgcggatgccca

SEQ ID NO: 3562275 - DNA, 25 bp, Homo sapien
gccgcggccgatgagataggcttca

SEQ ID NO: 3562276 - DNA, 25 bp, Homo sapien
gaggttcggcggattcccaggagcc

SEQ ID NO: 3562277 - DNA, 25 bp, Homo sapien
gatgggcttatactccaggcgccgg

SEQ ID NO: 3562278 - DNA, 25 bp, Homo sapien
gcggtggaggttcggcggattccca

SEQ ID NO: 3562279 - DNA, 25 bp, Homo sapien
ccatggactgttcggaacttcagca

SEQ ID NO: 3562280 - DNA, 25 bp, Homo sapien
aggcctgcgtcttcaggcccactgg

SEQ ID NO: 3562281 - DNA, 25 bp, Homo sapien
ttcaggcccactggagttgagtctg

SEQ ID NO: 3562282 - DNA, 25 bp, Homo sapien
gtctggccgaggaggaagagccaag

SEQ ID NO: 3562283 - DNA, 25 bp, Homo sapien
ggagttgagtctggccgaggaggaa

SEQ ID NO: 3562284 - DNA, 25 bp, Homo sapien
tgtaccggccttcagtgcacagagg

SEQ ID NO: 3562285 - DNA, 25 bp, Homo sapien
accggccttcagtgcacagaggagg

SEQ ID NO: 3562286 - DNA, 25 bp, Homo sapien
cctgtaccggccttcagtgcacaga

SEQ ID NO: 3562287 - DNA, 25 bp, Homo sapien
taccggccttcagtgcacagaggag

SEQ ID NO: 3562288 - DNA, 25 bp, Homo sapien
tgccatcttcacagcacggcacaga

SEQ ID NO: 3562289 - DNA, 25 bp, Homo sapien
agcccttctggctggcaccattcca

SEQ ID NO: 3562290 - DNA, 25 bp, Homo sapien
acggcacagaataggcgatggccag

SEQ ID NO: 3562291 - DNA, 25 bp, Homo sapien
ctccctctgcggtcccatgctgcag

SEQ ID NO: 3562292 - DNA, 25 bp, Homo sapien
gtgtaaaatcacgctttttggtgga

SEQ ID NO: 3562293 - DNA, 25 bp, Homo sapien
taaaatcacgctttttggtggacat

SEQ ID NO: 3562294 - DNA, 25 bp, Homo sapien
ttgaagcgtgggggtgtaaaatcac

SEQ ID NO: 3562295 - DNA, 25 bp, Homo sapien
agcgtgggggtgtaaaatcacgctt

SEQ ID NO: 3562296 - DNA, 25 bp, Homo sapien
aaatcattgcctaacctaaggtcac

SEQ ID NO: 3562297 - DNA, 25 bp, Homo sapien
tacaagttccttgttacatagatga

SEQ ID NO: 3562298 - DNA, 25 bp, Homo sapien
gttgattctgatgacgtacagttca

SEQ ID NO: 3562299 - DNA, 25 bp, Homo sapien
ctttggcgtcgtatctaaaaaatca

SEQ ID NO: 3562300 - DNA, 25 bp, Homo sapien
tcttgagaaatgatctagtccaacc

SEQ ID NO: 3562301 - DNA, 25 bp, Homo sapien
caacaatggccaggatgtgtgggca

SEQ ID NO: 3562302 - DNA, 25 bp, Homo sapien
ttgcccatgcctgaccagaacagtc

SEQ ID NO: 3562303 - DNA, 25 bp, Homo sapien
tagaggcctctgaaagtcggttctc

SEQ ID NO: 3562304 - DNA, 25 bp, Homo sapien
ctgtttataattgatgttctaggtt

SEQ ID NO: 3562305 - DNA, 25 bp, Homo sapien
ggttaatcccctgtcaatgactttc

SEQ ID NO: 3562306 - DNA, 25 bp, Homo sapien
tgttcctgtaacacccaagtctggg

SEQ ID NO: 3562307 - DNA, 25 bp, Homo sapien
cactgttcctgtaacacccaagtct

SEQ ID NO: 3562308 - DNA, 25 bp, Homo sapien
ttatgacgactttataggtgttttc

SEQ ID NO: 3562309 - DNA, 25 bp, Homo sapien
aacaattatgacgactttataggtg

SEQ ID NO: 3562310 - DNA, 25 bp, Homo sapien
gaaaccaacaattatgacgacttta

SEQ ID NO: 3562311 - DNA, 25 bp, Homo sapien
cctgaaaccaacaattatgacgact

SEQ ID NO: 3562312 - DNA, 25 bp, Homo sapien
gagactgttagaacggcagcagcag

SEQ ID NO: 3562313 - DNA, 25 bp, Homo sapien
ttctcattggagacgagactgttag

SEQ ID NO: 3562314 - DNA, 25 bp, Homo sapien
cagcagcagtagtaaagccgcttgg

SEQ ID NO: 3562315 - DNA, 25 bp, Homo sapien
tggagacgagactgttagaacggca

SEQ ID NO: 3562316 - DNA, 25 bp, Homo sapien
ctgtttagtagtagtgccaggcagg

SEQ ID NO: 3562317 - DNA, 25 bp, Homo sapien
cagcagggtcctagggtgcgccaat

SEQ ID NO: 3562318 - DNA, 25 bp, Homo sapien
tacactaccagggactgtttagtag

SEQ ID NO: 3562319 - DNA, 25 bp, Homo sapien
aaaaaactagtgtcagcagggtcct

SEQ ID NO: 3562320 - DNA, 25 bp, Homo sapien
ccgcagggggagctaccaggggagg

SEQ ID NO: 3562321 - DNA, 25 bp, Homo sapien
cccgcagggggagctaccaggggag

SEQ ID NO: 3562322 - DNA, 25 bp, Homo sapien
gagccacagacagctggagaagatg

SEQ ID NO: 3562323 - DNA, 25 bp, Homo sapien
gcccagagccacagacagctggaga

SEQ ID NO: 3562324 - DNA, 25 bp, Homo sapien
aacacagcaacacaaggaagcccag

SEQ ID NO: 3562325 - DNA, 25 bp, Homo sapien
atggctgccagcaacacagcaacac

SEQ ID NO: 3562326 - DNA, 25 bp, Homo sapien
cacagaagcaggatcaatgaggtca

SEQ ID NO: 3562327 - DNA, 25 bp, Homo sapien
acagaagcaggatcaatgaggtcat

SEQ ID NO: 3562328 - DNA, 25 bp, Homo sapien
ctggcacagaagcaggatcaatgag

SEQ ID NO: 3562329 - DNA, 25 bp, Homo sapien
ggcacagaagcaggatcaatgaggt

SEQ ID NO: 3562330 - DNA, 25 bp, Homo sapien
gaaccatttcttggagtactgccca

SEQ ID NO: 3562331 - DNA, 25 bp, Homo sapien
ggccaccttgtcagatcctcctgtg

SEQ ID NO: 3562332 - DNA, 25 bp, Homo sapien
tattttgtccagcacgtgcattccc

SEQ ID NO: 3562333 - DNA, 25 bp, Homo sapien
ccagtaaggagctgtgcatagcaca

SEQ ID NO: 3562334 - DNA, 25 bp, Homo sapien
taagacctgacatgccaaactgctg

SEQ ID NO: 3562335 - DNA, 25 bp, Homo sapien
agcctggattcaggcacaggactta

SEQ ID NO: 3562336 - DNA, 25 bp, Homo sapien
gctcctggtgaagacccccatgcat

SEQ ID NO: 3562337 - DNA, 25 bp, Homo sapien
ttttttattgattgagcttaagacc

SEQ ID NO: 3562338 - DNA, 25 bp, Homo sapien
tagtgtttggtcagctctccagaag

SEQ ID NO: 3562339 - DNA, 25 bp, Homo sapien
ccttagtgtttggtcagctctccag

SEQ ID NO: 3562340 - DNA, 25 bp, Homo sapien
tggtcagctctccagaaggcagaca

SEQ ID NO: 3562341 - DNA, 25 bp, Homo sapien
cagctctccagaaggcagacactat

SEQ ID NO: 3562342 - DNA, 25 bp, Homo sapien
tagagagtcttgaacgccaagatga

SEQ ID NO: 3562343 - DNA, 25 bp, Homo sapien
gagcccaacaggtggaatcatatta

SEQ ID NO: 3562344 - DNA, 25 bp, Homo sapien
ggaatcatattagagagtcttgaac

SEQ ID NO: 3562345 - DNA, 25 bp, Homo sapien
gcccaacaggtggaatcatattaga

SEQ ID NO: 3562346 - DNA, 25 bp, Homo sapien
cattcggtaagtaagaggaaatggt

SEQ ID NO: 3562347 - DNA, 25 bp, Homo sapien
tcattcggtaagtaagaggaaatgg

SEQ ID NO: 3562348 - DNA, 25 bp, Homo sapien
cttccaccgtcaggcccgactcctt

SEQ ID NO: 3562349 - DNA, 25 bp, Homo sapien
atcttccaccgtcaggcccgactcc

SEQ ID NO: 3562350 - DNA, 25 bp, Homo sapien
tttcccatcttccaccgtcaggccc

SEQ ID NO: 3562351 - DNA, 25 bp, Homo sapien
ccatcttccaccgtcaggcccgact

SEQ ID NO: 3562352 - DNA, 25 bp, Homo sapien
agaacaccatgggacacaatctgca

SEQ ID NO: 3562353 - DNA, 25 bp, Homo sapien
catgggacacaatctgcagctcagg

SEQ ID NO: 3562354 - DNA, 25 bp, Homo sapien
tccacgaagccttcccaagcccatc

SEQ ID NO: 3562355 - DNA, 25 bp, Homo sapien
ccaagcccatccccttccaggccat

SEQ ID NO: 3562356 - DNA, 25 bp, Homo sapien
cctccacgaagccttcccaagccca

SEQ ID NO: 3562357 - DNA, 25 bp, Homo sapien
ctcctccacgaagccttcccaagcc

SEQ ID NO: 3562358 - DNA, 25 bp, Homo sapien
cgcgcgaggcgctttagtcagtttc

SEQ ID NO: 3562359 - DNA, 25 bp, Homo sapien
cacatccagtacgatggggacaact

SEQ ID NO: 3562360 - DNA, 25 bp, Homo sapien
gggctcccgatcctgacagacttgg

SEQ ID NO: 3562361 - DNA, 25 bp, Homo sapien
cagacttgggttcgaaccctcaggg

SEQ ID NO: 3562362 - DNA, 25 bp, Homo sapien
gcaaccgaacttgctgcagtcccgg

SEQ ID NO: 3562363 - DNA, 25 bp, Homo sapien
gctgcggtctccgtgcaaccgaact

SEQ ID NO: 3562364 - DNA, 25 bp, Homo sapien
ggtctccgtgcaaccgaacttgctg

SEQ ID NO: 3562365 - DNA, 25 bp, Homo sapien
tccgtgcaaccgaacttgctgcagt

SEQ ID NO: 3562366 - DNA, 25 bp, Homo sapien
ccgaagctgcaagcacaacagttcg

SEQ ID NO: 3562367 - DNA, 25 bp, Homo sapien
ccgagtagcacgtgtctcccgaagc

SEQ ID NO: 3562368 - DNA, 25 bp, Homo sapien
tgcaagcacaacagttcgcactggg

SEQ ID NO: 3562369 - DNA, 25 bp, Homo sapien
agtagcacgtgtctcccgaagctgc

SEQ ID NO: 3562370 - DNA, 25 bp, Homo sapien
aggtgggagagctttgtcgccatct

SEQ ID NO: 3562371 - DNA, 25 bp, Homo sapien
aaggtgggagagctttgtcgccatc

SEQ ID NO: 3562372 - DNA, 25 bp, Homo sapien
ggtgggagagctttgtcgccatctt

SEQ ID NO: 3562373 - DNA, 25 bp, Homo sapien
tagaaatgatccttgaaagtacagt

SEQ ID NO: 3562374 - DNA, 25 bp, Homo sapien
ttgctttatatgttcagagaaactt

SEQ ID NO: 3562375 - DNA, 25 bp, Homo sapien
ctttagtaataaactatagaaatga

SEQ ID NO: 3562376 - DNA, 25 bp, Homo sapien
aaatgatccttgaaagtacagtcct

SEQ ID NO: 3562377 - DNA, 25 bp, Homo sapien
tgctccactgaacacttccttcaaa

SEQ ID NO: 3562378 - DNA, 25 bp, Homo sapien
actccttcaggtttgctatttttat

SEQ ID NO: 3562379 - DNA, 25 bp, Homo sapien
caggttctgaaggacccaggggtca

SEQ ID NO: 3562380 - DNA, 25 bp, Homo sapien
tttttatctgcggagttctcagttc

SEQ ID NO: 3562381 - DNA, 25 bp, Homo sapien
acacacgcggctcacccggccattt

SEQ ID NO: 3562382 - DNA, 25 bp, Homo sapien
ggctcacccggccatttacacgcct

SEQ ID NO: 3562383 - DNA, 25 bp, Homo sapien
ccactccgcgcagtgcgcatcgcat

SEQ ID NO: 3562384 - DNA, 25 bp, Homo sapien
catcgcatcgcacgccccgcatgtg

SEQ ID NO: 3562385 - DNA, 25 bp, Homo sapien
taaacacatctgtaggctggcagtg

SEQ ID NO: 3562386 - DNA, 25 bp, Homo sapien
gcaaccaatatgtgccaagcctgac

SEQ ID NO: 3562387 - DNA, 25 bp, Homo sapien
aatgttggcaactcacttaaatgta

SEQ ID NO: 3562388 - DNA, 25 bp, Homo sapien
ggtctgtatgggccatcaccaggct

SEQ ID NO: 3562389 - DNA, 25 bp, Homo sapien
cctccactcaggcaaatgagctctg

SEQ ID NO: 3562390 - DNA, 25 bp, Homo sapien
tgacaccctctaggagcctcgacct

SEQ ID NO: 3562391 - DNA, 25 bp, Homo sapien
gctggaacatatgtctggaggccag

SEQ ID NO: 3562392 - DNA, 25 bp, Homo sapien
gggtgcagctgactacaaaccctgt

SEQ ID NO: 3562393 - DNA, 25 bp, Homo sapien
tgtgctcagtcctgcgcaaaccagg

SEQ ID NO: 3562394 - DNA, 25 bp, Homo sapien
acccaggtccttgtgctcagtcctg

SEQ ID NO: 3562395 - DNA, 25 bp, Homo sapien
attctctgtcaaatctactccccgg

SEQ ID NO: 3562396 - DNA, 25 bp, Homo sapien
gcatttgttgatgcccttgcaggcc

SEQ ID NO: 3562397 - DNA, 25 bp, Homo sapien
ctgggctgttgcacctctactggca

SEQ ID NO: 3562398 - DNA, 25 bp, Homo sapien
actggcatcagtctttggttacccc

SEQ ID NO: 3562399 - DNA, 25 bp, Homo sapien
agagcttgtcatccccagcctggtg

SEQ ID NO: 3562400 - DNA, 25 bp, Homo sapien
agagcaggcagagcttgtcatcccc

SEQ ID NO: 3562401 - DNA, 25 bp, Homo sapien
gggtatcatctgctcggtggggcca

SEQ ID NO: 3562402 - DNA, 25 bp, Homo sapien
ccagcaggtggggtatcatctgctc

SEQ ID NO: 3562403 - DNA, 25 bp, Homo sapien
cagcaggtggggtatcatctgctcg

SEQ ID NO: 3562404 - DNA, 25 bp, Homo sapien
atcatctgctcggtggggccaccca

SEQ ID NO: 3562405 - DNA, 25 bp, Homo sapien
aggctgtctaccctatggccacagc

SEQ ID NO: 3562406 - DNA, 25 bp, Homo sapien
caggatggtggctttccctacctga

SEQ ID NO: 3562407 - DNA, 25 bp, Homo sapien
gagacccaggccaacaaattatccc

SEQ ID NO: 3562408 - DNA, 25 bp, Homo sapien
ctctaacccagtggctgtgcggtgc

SEQ ID NO: 3562409 - DNA, 25 bp, Homo sapien
gcattgcctgggctaggcctgcatg

SEQ ID NO: 3562410 - DNA, 25 bp, Homo sapien
agcattgcctgggctaggcctgcat

SEQ ID NO: 3562411 - DNA, 25 bp, Homo sapien
cattgcctgggctaggcctgcatgt

SEQ ID NO: 3562412 - DNA, 25 bp, Homo sapien
aacagtaaacagtaccctggccagg

SEQ ID NO: 3562413 - DNA, 25 bp, Homo sapien
tgtttattcttctaagccagcccct

SEQ ID NO: 3562414 - DNA, 25 bp, Homo sapien
tttggtttgtctggccaggagatca

SEQ ID NO: 3562415 - DNA, 25 bp, Homo sapien
gatcaactgggcataccgtcctgag

SEQ ID NO: 3562416 - DNA, 25 bp, Homo sapien
gctgtctccggtggaacaccttttc

SEQ ID NO: 3562417 - DNA, 25 bp, Homo sapien
tcctgactccctcaacgtgggcgag

SEQ ID NO: 3562418 - DNA, 25 bp, Homo sapien
tcactttttcctcaagactctgaaa

SEQ ID NO: 3562419 - DNA, 25 bp, Homo sapien
ttactgctggcatccaacgtgctcc

SEQ ID NO: 3562420 - DNA, 25 bp, Homo sapien
actagagctattaactatgaaatga

SEQ ID NO: 3562421 - DNA, 25 bp, Homo sapien
gttgcagggcctgtgaagcagaaac

SEQ ID NO: 3562422 - DNA, 25 bp, Homo sapien
ctaactagagctattaactatgaaa

SEQ ID NO: 3562423 - DNA, 25 bp, Homo sapien
tgaagcagaaacaagcatgtatgtg

SEQ ID NO: 3562424 - DNA, 25 bp, Homo sapien
tgtcactcatcacatcccccaggac

SEQ ID NO: 3562425 - DNA, 25 bp, Homo sapien
cactcatcacatcccccaggaccat

SEQ ID NO: 3562426 - DNA, 25 bp, Homo sapien
tttgtcactcatcacatcccccagg

SEQ ID NO: 3562427 - DNA, 25 bp, Homo sapien
ctttgtcactcatcacatcccccag

SEQ ID NO: 3562428 - DNA, 25 bp, Homo sapien
tgccaggtattaaaagcccgccagg

SEQ ID NO: 3562429 - DNA, 25 bp, Homo sapien
caggccagcatgctagaggcccagg

SEQ ID NO: 3562430 - DNA, 25 bp, Homo sapien
catcagcagaagagattatgccagg

SEQ ID NO: 3562431 - DNA, 25 bp, Homo sapien
ccacctggtgcctgttcgctcaagt

SEQ ID NO: 3562432 - DNA, 25 bp, Homo sapien
taactaggtagccgccttcctgcag

SEQ ID NO: 3562433 - DNA, 25 bp, Homo sapien
gtaactaggtagccgccttcctgca

SEQ ID NO: 3562434 - DNA, 25 bp, Homo sapien
ctgcaaggtcctggcccatataggt

SEQ ID NO: 3562435 - DNA, 25 bp, Homo sapien
agtaactaggtagccgccttcctgc

SEQ ID NO: 3562436 - DNA, 25 bp, Homo sapien
tgcagtgggatgtggcacaggaggt

SEQ ID NO: 3562437 - DNA, 25 bp, Homo sapien
aggctggctcttgcagtgggatgtg

SEQ ID NO: 3562438 - DNA, 25 bp, Homo sapien
ggatgtggcacaggaggtttttgtt

SEQ ID NO: 3562439 - DNA, 25 bp, Homo sapien
ggctcttgcagtgggatgtggcaca

SEQ ID NO: 3562440 - DNA, 25 bp, Homo sapien
gaagttggtttcctgtgagctttca

SEQ ID NO: 3562441 - DNA, 25 bp, Homo sapien
ggaagttggtttcctgtgagctttc

SEQ ID NO: 3562442 - DNA, 25 bp, Homo sapien
ttcatgatgcttcccgaatccaccc

SEQ ID NO: 3562443 - DNA, 25 bp, Homo sapien
attgcaatcccagtgccccgcacag

SEQ ID NO: 3562444 - DNA, 25 bp, Homo sapien
ttgcaatcccagtgccccgcacagg

SEQ ID NO: 3562445 - DNA, 25 bp, Homo sapien
ccagtgccccgcacaggcaggtgct

SEQ ID NO: 3562446 - DNA, 25 bp, Homo sapien
gtgccccgcacaggcaggtgctctt

SEQ ID NO: 3562447 - DNA, 25 bp, Homo sapien
tgttggtgctgctcttgaagctgtg

SEQ ID NO: 3562448 - DNA, 25 bp, Homo sapien
cttggacgatggagagtgttggtgc

SEQ ID NO: 3562449 - DNA, 25 bp, Homo sapien
gaagctgtgcaggaaccaccttcat

SEQ ID NO: 3562450 - DNA, 25 bp, Homo sapien
caggaagtcttggacgatggagagt

SEQ ID NO: 3562451 - DNA, 25 bp, Homo sapien
gacatattatagaaactaccaacat

SEQ ID NO: 3562452 - DNA, 25 bp, Homo sapien
gaaactaccaacatttacgcaaagc

SEQ ID NO: 3562453 - DNA, 25 bp, Homo sapien
aatagtaagacatattatagaaact

SEQ ID NO: 3562454 - DNA, 25 bp, Homo sapien
catttacgcaaagcataaaccttca

SEQ ID NO: 3562455 - DNA, 25 bp, Homo sapien
tgaaggaatgagtgccaactatgcc

SEQ ID NO: 3562456 - DNA, 25 bp, Homo sapien
gcacttaatttagcattgggcacag

SEQ ID NO: 3562457 - DNA, 25 bp, Homo sapien
gagtatgtcacatcttcatggtgtc

SEQ ID NO: 3562458 - DNA, 25 bp, Homo sapien
tatatccaagtgcaatttgaagacc

SEQ ID NO: 3562459 - DNA, 25 bp, Homo sapien
agcagaaactgatgaaaggtagcga

SEQ ID NO: 3562460 - DNA, 25 bp, Homo sapien
aaactgatgaaaggtagcgaatgcc

SEQ ID NO: 3562461 - DNA, 25 bp, Homo sapien
acaccagctttagcagaaactgatg

SEQ ID NO: 3562462 - DNA, 25 bp, Homo sapien
aagtggctgaaggaacaccagcttt

SEQ ID NO: 3562463 - DNA, 25 bp, Homo sapien
tcccagtgactagaacgcaagaaga

SEQ ID NO: 3562464 - DNA, 25 bp, Homo sapien
gaccaagttgagctactcctagaga

SEQ ID NO: 3562465 - DNA, 25 bp, Homo sapien
taatctgacaatggcaaaagctttc

SEQ ID NO: 3562466 - DNA, 25 bp, Homo sapien
cagtcggctgttggagtaattatgc

SEQ ID NO: 3562467 - DNA, 25 bp, Homo sapien
aaatgcccggatcgcggctgggctg

SEQ ID NO: 3562468 - DNA, 25 bp, Homo sapien
ccagagcaagagattggctggggaa

SEQ ID NO: 3562469 - DNA, 25 bp, Homo sapien
tgctcgcatggcactgctcgggtac

SEQ ID NO: 3562470 - DNA, 25 bp, Homo sapien
ctgctcgcatggcactgctcgggta

SEQ ID NO: 3562471 - DNA, 25 bp, Homo sapien
cgggctccgtcgacgttcggagcct

SEQ ID NO: 3562472 - DNA, 25 bp, Homo sapien
tggcccgtcgggcagctgtcgggcc

SEQ ID NO: 3562473 - DNA, 25 bp, Homo sapien
tccgtcgacgttcggagcctgctgg

SEQ ID NO: 3562474 - DNA, 25 bp, Homo sapien
gcgggagtcggtccgtgggcagggc

SEQ ID NO: 3562475 - DNA, 25 bp, Homo sapien
gcccgtggccgctctgtctttcctg

SEQ ID NO: 3562476 - DNA, 25 bp, Homo sapien
cccggaatccctcttctgcgactgg

SEQ ID NO: 3562477 - DNA, 25 bp, Homo sapien
tagccggggggctcgtcccgcagcg

SEQ ID NO: 3562478 - DNA, 25 bp, Homo sapien
gctccgggaggaggggcaacgccag

SEQ ID NO: 3562479 - DNA, 25 bp, Homo sapien
tgaaggagatccttgctagttgtaa

SEQ ID NO: 3562480 - DNA, 25 bp, Homo sapien
ccatgaaggagatccttgctagttg

SEQ ID NO: 3562481 - DNA, 25 bp, Homo sapien
ctgatgctgccatgaaggagatcct

SEQ ID NO: 3562482 - DNA, 25 bp, Homo sapien
gctgccatgaaggagatccttgcta

SEQ ID NO: 3562483 - DNA, 25 bp, Homo sapien
agccactggacctggacttttgggt

SEQ ID NO: 3562484 - DNA, 25 bp, Homo sapien
ctttaaaggaagagcctttccagca

SEQ ID NO: 3562485 - DNA, 25 bp, Homo sapien
aattttgcagtccagactttaaagg

SEQ ID NO: 3562486 - DNA, 25 bp, Homo sapien
gagcctttccagcaagcaaaacttt

SEQ ID NO: 3562487 - DNA, 25 bp, Homo sapien
tgttacaaggaactgcggccactga

SEQ ID NO: 3562488 - DNA, 25 bp, Homo sapien
gaaactctggcaatagtcccacctt

SEQ ID NO: 3562489 - DNA, 25 bp, Homo sapien
tgttattatcgcatgttcaatcctg

SEQ ID NO: 3562490 - DNA, 25 bp, Homo sapien
ccaaattcagcagcgattaccagat

SEQ ID NO: 3562491 - DNA, 25 bp, Homo sapien
cagtggcctaatctctgctcactgt

SEQ ID NO: 3562492 - DNA, 25 bp, Homo sapien
aacctctgcctcctgggttcaggtg

SEQ ID NO: 3562493 - DNA, 25 bp, Homo sapien
tgattcttctgtctcagcctctcca

SEQ ID NO: 3562494 - DNA, 25 bp, Homo sapien
aggtgattcttctgtctcagcctct

SEQ ID NO: 3562495 - DNA, 25 bp, Homo sapien
cttgaacctcactgaagactaaggt

SEQ ID NO: 3562496 - DNA, 25 bp, Homo sapien
tgcttagtcagatataaatagccag

SEQ ID NO: 3562497 - DNA, 25 bp, Homo sapien
caaaggcacatagtttactgatctc

SEQ ID NO: 3562498 - DNA, 25 bp, Homo sapien
cctaacaggatggaagttgaaacag

SEQ ID NO: 3562499 - DNA, 25 bp, Homo sapien
tcatctagtggtaatgtaaatcagc

SEQ ID NO: 3562500 - DNA, 25 bp, Homo sapien
gcccggccctcattagagagtctta

SEQ ID NO: 3562501 - DNA, 25 bp, Homo sapien
tactagatcgctgatttgttacaag

SEQ ID NO: 3562502 - DNA, 25 bp, Homo sapien
gcaaatgtctctagctgatcatcta

SEQ ID NO: 3562503 - DNA, 25 bp, Homo sapien
caaaatggcctcgttacacccaggg

SEQ ID NO: 3562504 - DNA, 25 bp, Homo sapien
gaattctgatggactcggaataaag

SEQ ID NO: 3562505 - DNA, 25 bp, Homo sapien
tggaaaacccctcaagcgttgcttc

SEQ ID NO: 3562506 - DNA, 25 bp, Homo sapien
gcctggctggatgtagttgcaaaat

SEQ ID NO: 3562507 - DNA, 25 bp, Homo sapien
gatggcagagtagcaagcaccagga

SEQ ID NO: 3562508 - DNA, 25 bp, Homo sapien
gcagctgtgcatatgtttccccgaa

SEQ ID NO: 3562509 - DNA, 25 bp, Homo sapien
tcagtttcaggccttagcacagtaa

SEQ ID NO: 3562510 - DNA, 25 bp, Homo sapien
taattgcacgggcagaatctgtctg

SEQ ID NO: 3562511 - DNA, 25 bp, Homo sapien
gcacctggccgagacttaaactttc

SEQ ID NO: 3562512 - DNA, 25 bp, Homo sapien
taaaagtctttctgaggcgtaggtc

SEQ ID NO: 3562513 - DNA, 25 bp, Homo sapien
tgtggaacagctgagtagtacatcc

SEQ ID NO: 3562514 - DNA, 25 bp, Homo sapien
tgcggtaagctgagaccatgtcgtt

SEQ ID NO: 3562515 - DNA, 25 bp, Homo sapien
tgtactcctactttgattcacctgc

SEQ ID NO: 3562516 - DNA, 25 bp, Homo sapien
taacactttgtgcattacataggca

SEQ ID NO: 3562517 - DNA, 25 bp, Homo sapien
ttatctcagcaagctacctggcttc

SEQ ID NO: 3562518 - DNA, 25 bp, Homo sapien
aaaaatagagggctctcagtgctgc

SEQ ID NO: 3562519 - DNA, 25 bp, Homo sapien
agctcttggagctggagagtggatg

SEQ ID NO: 3562520 - DNA, 25 bp, Homo sapien
cttggagctggagagtggatgactt

SEQ ID NO: 3562521 - DNA, 25 bp, Homo sapien
ctcttggagctggagagtggatgac

SEQ ID NO: 3562522 - DNA, 25 bp, Homo sapien
ttagctcttggagctggagagtgga

SEQ ID NO: 3562523 - DNA, 25 bp, Homo sapien
aacttttagaattgccagcctattc

SEQ ID NO: 3562524 - DNA, 25 bp, Homo sapien
ggcttctcaattattacaggaatcc

SEQ ID NO: 3562525 - DNA, 25 bp, Homo sapien
cacgatttttggattggcttctcaa

SEQ ID NO: 3562526 - DNA, 25 bp, Homo sapien
tattacaggaatcctcaacttttag

SEQ ID NO: 3562527 - DNA, 25 bp, Homo sapien
aacagtgtagaatatatgcaattct

SEQ ID NO: 3562528 - DNA, 25 bp, Homo sapien
tgtcagaacccattgagaatagtgg

SEQ ID NO: 3562529 - DNA, 25 bp, Homo sapien
tccatgacttgagccatctaaaagt

SEQ ID NO: 3562530 - DNA, 25 bp, Homo sapien
ttcttgtcagaacccattgagaata

SEQ ID NO: 3562531 - DNA, 25 bp, Homo sapien
ttctctagtctaaatagtctcagtt

SEQ ID NO: 3562532 - DNA, 25 bp, Homo sapien
taagccaacaattgtcagcttgtcc

SEQ ID NO: 3562533 - DNA, 25 bp, Homo sapien
taatattgcctgtgtatttacccag

SEQ ID NO: 3562534 - DNA, 25 bp, Homo sapien
tatgcagtctgtataaccttgggtt

SEQ ID NO: 3562535 - DNA, 25 bp, Homo sapien
cagttcaaagctggttccgttgcca

SEQ ID NO: 3562536 - DNA, 25 bp, Homo sapien
caagaattgctaaatttctctcact

SEQ ID NO: 3562537 - DNA, 25 bp, Homo sapien
acaagaattgctaaatttctctcac

SEQ ID NO: 3562538 - DNA, 25 bp, Homo sapien
cacaagaattgctaaatttctctca

SEQ ID NO: 3562539 - DNA, 25 bp, Homo sapien
cccatattagggcaattttctaaca

SEQ ID NO: 3562540 - DNA, 25 bp, Homo sapien
cactacagtgaaactttctttggca

SEQ ID NO: 3562541 - DNA, 25 bp, Homo sapien
gaggagcaacgacatagtcacccat

SEQ ID NO: 3562542 - DNA, 25 bp, Homo sapien
cataattgtcggtcataaattgagg

SEQ ID NO: 3562543 - DNA, 25 bp, Homo sapien
tgcagcccatgagcctcagatgcag

SEQ ID NO: 3562544 - DNA, 25 bp, Homo sapien
ggcttgcagcccatgagcctcagat

SEQ ID NO: 3562545 - DNA, 25 bp, Homo sapien
ggtgcacgagcaggggcttgcagcc

SEQ ID NO: 3562546 - DNA, 25 bp, Homo sapien
agcaggggcttgcagcccatgagcc

SEQ ID NO: 3562547 - DNA, 25 bp, Homo sapien
ttcatgtcagccagatggcaggagg

SEQ ID NO: 3562548 - DNA, 25 bp, Homo sapien
gccacagtgcttggctgaatgataa

SEQ ID NO: 3562549 - DNA, 25 bp, Homo sapien
gcaagtgggcctattacagttttaa

SEQ ID NO: 3562550 - DNA, 25 bp, Homo sapien
gctaaaatgtagcaacctaaatgtc

SEQ ID NO: 3562551 - DNA, 25 bp, Homo sapien
taacactgaactgtgctcctaaaaa

SEQ ID NO: 3562552 - DNA, 25 bp, Homo sapien
tcttattcagtcatcagtcttcggt

SEQ ID NO: 3562553 - DNA, 25 bp, Homo sapien
tagagtaaccaaaatcatggagaca

SEQ ID NO: 3562554 - DNA, 25 bp, Homo sapien
cacattacatgaatcctaaggactt

SEQ ID NO: 3562555 - DNA, 25 bp, Homo sapien
caggtggttagaatttagccttctt

SEQ ID NO: 3562556 - DNA, 25 bp, Homo sapien
catatggaagtataggaagacaggt

SEQ ID NO: 3562557 - DNA, 25 bp, Homo sapien
ggatgtaagaattccagtaacatta

SEQ ID NO: 3562558 - DNA, 25 bp, Homo sapien
tgggatgtaagaattccagtaacat

SEQ ID NO: 3562559 - DNA, 25 bp, Homo sapien
tgaagcagtcctgtgtcctccgaca

SEQ ID NO: 3562560 - DNA, 25 bp, Homo sapien
tgctgcctccccgattgtgtcagga

SEQ ID NO: 3562561 - DNA, 25 bp, Homo sapien
cctccgacagtgcttggcagtgagt

SEQ ID NO: 3562562 - DNA, 25 bp, Homo sapien
ttaacacctgtgaggccagctgctg

SEQ ID NO: 3562563 - DNA, 25 bp, Homo sapien
taatgcagtggtctaacatcagccc

SEQ ID NO: 3562564 - DNA, 25 bp, Homo sapien
ggcactgcgttagaccctgaggata

SEQ ID NO: 3562565 - DNA, 25 bp, Homo sapien
gagtgccagcatccctactgtaggc

SEQ ID NO: 3562566 - DNA, 25 bp, Homo sapien
tactgtaggccatcagctctgtggt

SEQ ID NO: 3562567 - DNA, 25 bp, Homo sapien
tagggctaataggactgcttggctc

SEQ ID NO: 3562568 - DNA, 25 bp, Homo sapien
gagcctcttttgacctgatacagta

SEQ ID NO: 3562569 - DNA, 25 bp, Homo sapien
cagttctggtctggcctggctagaa

SEQ ID NO: 3562570 - DNA, 25 bp, Homo sapien
tctgtaagcctgataaagagcctct

SEQ ID NO: 3562571 - DNA, 25 bp, Homo sapien
tgccagtgacttattccagagtgcc

SEQ ID NO: 3562572 - DNA, 25 bp, Homo sapien
tctgctcttagacacggccttgcca

SEQ ID NO: 3562573 - DNA, 25 bp, Homo sapien
actgagaagagagacgccaactgca

SEQ ID NO: 3562574 - DNA, 25 bp, Homo sapien
caaagcaatagaggcagagtggtcc

SEQ ID NO: 3562575 - DNA, 25 bp, Homo sapien
gccagtgccaattccatctgctaaa

SEQ ID NO: 3562576 - DNA, 25 bp, Homo sapien
ccagtgccaattccatctgctaaag

SEQ ID NO: 3562577 - DNA, 25 bp, Homo sapien
tcagccagtgccaattccatctgct

SEQ ID NO: 3562578 - DNA, 25 bp, Homo sapien
cagccagtgccaattccatctgcta

SEQ ID NO: 3562579 - DNA, 25 bp, Homo sapien
taaaggaccatctccgattctggag

SEQ ID NO: 3562580 - DNA, 25 bp, Homo sapien
ctttaaatatgtgcgccagatgctg

SEQ ID NO: 3562581 - DNA, 25 bp, Homo sapien
tcatcgcccagcatgttgagtccaa

SEQ ID NO: 3562582 - DNA, 25 bp, Homo sapien
gaactgcctccttacctgactgctg

SEQ ID NO: 3562583 - DNA, 25 bp, Homo sapien
taggagcgtcaaggggcaaagcggc

SEQ ID NO: 3562584 - DNA, 25 bp, Homo sapien
ctctgggaacaagctgctcggcggc

SEQ ID NO: 3562585 - DNA, 25 bp, Homo sapien
gggcaaagcggctctgggaacaagc

SEQ ID NO: 3562586 - DNA, 25 bp, Homo sapien
cggttaggagcgtcaaggggcaaag

SEQ ID NO: 3562587 - DNA, 25 bp, Homo sapien
catggccttccgcaaatcgcccaca

SEQ ID NO: 3562588 - DNA, 25 bp, Homo sapien
gcatggccttccgcaaatcgcccac

SEQ ID NO: 3562589 - DNA, 25 bp, Homo sapien
agcatggccttccgcaaatcgccca

SEQ ID NO: 3562590 - DNA, 25 bp, Homo sapien
atggccttccgcaaatcgcccacat

SEQ ID NO: 3562591 - DNA, 25 bp, Homo sapien
gtgacatttgacaaggccgccagag

SEQ ID NO: 3562592 - DNA, 25 bp, Homo sapien
gagcatccccgcaagggagctgctt

SEQ ID NO: 3562593 - DNA, 25 bp, Homo sapien
taatgcagattacggtctccatgtc

SEQ ID NO: 3562594 - DNA, 25 bp, Homo sapien
ctttgtggccgacacgacgttccgg

SEQ ID NO: 3562595 - DNA, 25 bp, Homo sapien
ccccagggagagtcattgagaaaca

SEQ ID NO: 3562596 - DNA, 25 bp, Homo sapien
ccttgttcgccccagggagagtcat

SEQ ID NO: 3562597 - DNA, 25 bp, Homo sapien
tatttgatctgtggccccgtccttg

SEQ ID NO: 3562598 - DNA, 25 bp, Homo sapien
tggacctgccggtttgggctggcct

SEQ ID NO: 3562599 - DNA, 25 bp, Homo sapien
tgcccagtggaagcggataagagcc

SEQ ID NO: 3562600 - DNA, 25 bp, Homo sapien
gaaacatgtccttgacggtggctgg

SEQ ID NO: 3562601 - DNA, 25 bp, Homo sapien
tcataggatgcgaactcagggtcac

SEQ ID NO: 3562602 - DNA, 25 bp, Homo sapien
agacaactttggaagaggccgcggc

SEQ ID NO: 3562603 - DNA, 25 bp, Homo sapien
tgagtccgactgtgcaggcctgtca

SEQ ID NO: 3562604 - DNA, 25 bp, Homo sapien
tctttgtaagcaacctgcctggtgt

SEQ ID NO: 3562605 - DNA, 25 bp, Homo sapien
aagtttcatgtgacccaccctgcgg

SEQ ID NO: 3562606 - DNA, 25 bp, Homo sapien
tctgatttggccttcccgagaacag

SEQ ID NO: 3562607 - DNA, 25 bp, Homo sapien
cagttccctgtggcttacacccgtt

SEQ ID NO: 3562608 - DNA, 25 bp, Homo sapien
gagttccacttgagcctctgccaca

SEQ ID NO: 3562609 - DNA, 25 bp, Homo sapien
catttggtggagtagccctgagttc

SEQ ID NO: 3562610 - DNA, 25 bp, Homo sapien
caggccccttactcaggcatgagga

SEQ ID NO: 3562611 - DNA, 25 bp, Homo sapien
tatcacctgtgagaccctgtgccag

SEQ ID NO: 3562612 - DNA, 25 bp, Homo sapien
gaaagccaagaacaagcagctgggc

SEQ ID NO: 3562613 - DNA, 25 bp, Homo sapien
tgtcttcgacaccatcaacgctgag

SEQ ID NO: 3562614 - DNA, 25 bp, Homo sapien
tcaatcaggagttaagcccgggact

SEQ ID NO: 3562615 - DNA, 25 bp, Homo sapien
ttattgtgatttcccgtggccccag

SEQ ID NO: 3562616 - DNA, 25 bp, Homo sapien
acagcacagggatccgacttgaatt

SEQ ID NO: 3562617 - DNA, 25 bp, Homo sapien
ggctcctgtgcccttattcaggaaa

SEQ ID NO: 3562618 - DNA, 25 bp, Homo sapien
gagggatgatgccacaccaagctgt

SEQ ID NO: 3562619 - DNA, 25 bp, Homo sapien
aatggtgcctgattcggctgtctca

SEQ ID NO: 3562620 - DNA, 25 bp, Homo sapien
ggtctcggtggtaccaggtctcctc

SEQ ID NO: 3562621 - DNA, 25 bp, Homo sapien
tctgggctgactgggaccgtctcag

SEQ ID NO: 3562622 - DNA, 25 bp, Homo sapien
gcttccaaggtggtctgctcgggcc

SEQ ID NO: 3562623 - DNA, 25 bp, Homo sapien
ctcttaggctgaagcgacctgccta

SEQ ID NO: 3562624 - DNA, 25 bp, Homo sapien
aattgggtcatcttttgattattga

SEQ ID NO: 3562625 - DNA, 25 bp, Homo sapien
tttgattattgagtcataggagttt

SEQ ID NO: 3562626 - DNA, 25 bp, Homo sapien
tagagatagagtctacagactggtc

SEQ ID NO: 3562627 - DNA, 25 bp, Homo sapien
ggcatagtggttcacgcctgtaatc

SEQ ID NO: 3562628 - DNA, 25 bp, Homo sapien
aaaggggggtggttagagcaggctg

SEQ ID NO: 3562629 - DNA, 25 bp, Homo sapien
gggcatagtggttcacgcctgtaat

SEQ ID NO: 3562630 - DNA, 25 bp, Homo sapien
gtggttagagcaggctgggcatagt

SEQ ID NO: 3562631 - DNA, 25 bp, Homo sapien
tcagccgctggtggattcggaaccc

SEQ ID NO: 3562632 - DNA, 25 bp, Homo sapien
tgtgacctacgagttccttcctctg

SEQ ID NO: 3562633 - DNA, 25 bp, Homo sapien
tacggaggctgagaccgatgatcct

SEQ ID NO: 3562634 - DNA, 25 bp, Homo sapien
tgtccattgagattctgttgcagag

SEQ ID NO: 3562635 - DNA, 25 bp, Homo sapien
gtttcactgcgttggccaggctggt

SEQ ID NO: 3562636 - DNA, 25 bp, Homo sapien
acctcatgatccgccgcccccgtca

SEQ ID NO: 3562637 - DNA, 25 bp, Homo sapien
cggggtttcactgcgttggccaggc

SEQ ID NO: 3562638 - DNA, 25 bp, Homo sapien
ctcatgatccgccgcccccgtcagc

SEQ ID NO: 3562639 - DNA, 25 bp, Homo sapien
ttggatgcagtcctgctctaacacc

SEQ ID NO: 3562640 - DNA, 25 bp, Homo sapien
tttttggatgcagtcctgctctaac

SEQ ID NO: 3562641 - DNA, 25 bp, Homo sapien
atgcagtcctgctctaacacccagg

SEQ ID NO: 3562642 - DNA, 25 bp, Homo sapien
ggatgcagtcctgctctaacaccca

SEQ ID NO: 3562643 - DNA, 25 bp, Homo sapien
actgcacctggcctacagaggtttt

SEQ ID NO: 3562644 - DNA, 25 bp, Homo sapien
ctgcacctggcctacagaggtttta

SEQ ID NO: 3562645 - DNA, 25 bp, Homo sapien
tctgagatgccaataagaaaataac

SEQ ID NO: 3562646 - DNA, 25 bp, Homo sapien
tacaacaggaaagcctggacaacga

SEQ ID NO: 3562647 - DNA, 25 bp, Homo sapien
cagtcaggtttatgatgaaggctgc

SEQ ID NO: 3562648 - DNA, 25 bp, Homo sapien
ccttccaagagacaaaagatgagtt

SEQ ID NO: 3562649 - DNA, 25 bp, Homo sapien
gaagcgtattgttgtggcaatgtga

SEQ ID NO: 3562650 - DNA, 25 bp, Homo sapien
caatgaagcgtattgttgtggcaat

SEQ ID NO: 3562651 - DNA, 25 bp, Homo sapien
tggcaatgtgacatgctgtaataaa

SEQ ID NO: 3562652 - DNA, 25 bp, Homo sapien
tgaagcgtattgttgtggcaatgtg

SEQ ID NO: 3562653 - DNA, 25 bp, Homo sapien
aatgaatcagtgtggccttcataga

SEQ ID NO: 3562654 - DNA, 25 bp, Homo sapien
tgagtcaataaagaatgaatcagtg

SEQ ID NO: 3562655 - DNA, 25 bp, Homo sapien
taaagaatgaatcagtgtggccttc

SEQ ID NO: 3562656 - DNA, 25 bp, Homo sapien
tggccttcatagaggggtgtggtac

SEQ ID NO: 3562657 - DNA, 25 bp, Homo sapien
catctgtgcgcataggtcagttcta

SEQ ID NO: 3562658 - DNA, 25 bp, Homo sapien
gaattttcccaggtgccatgcttgg

SEQ ID NO: 3562659 - DNA, 25 bp, Homo sapien
tgtctctgcagcatcacaccggtga

SEQ ID NO: 3562660 - DNA, 25 bp, Homo sapien
ggtgacctctgggacactgctctgc

SEQ ID NO: 3562661 - DNA, 25 bp, Homo sapien
ccagacatatggagtagaatgcaaa

SEQ ID NO: 3562662 - DNA, 25 bp, Homo sapien
tgttaatacagctactccaggccgg

SEQ ID NO: 3562663 - DNA, 25 bp, Homo sapien
tccgcatggtgctgtcccctacagt

SEQ ID NO: 3562664 - DNA, 25 bp, Homo sapien
aggaaatgactaagaacattccgca

SEQ ID NO: 3562665 - DNA, 25 bp, Homo sapien
aacattcttatcctccaacatctgg

SEQ ID NO: 3562666 - DNA, 25 bp, Homo sapien
tgtagtccttatctcctcgacaaca

SEQ ID NO: 3562667 - DNA, 25 bp, Homo sapien
tgtgccactcctaggttgcctcggg

SEQ ID NO: 3562668 - DNA, 25 bp, Homo sapien
gaattcaggccctggtgtttactga

SEQ ID NO: 3562669 - DNA, 25 bp, Homo sapien
gaatccgagacttacatatccactg

SEQ ID NO: 3562670 - DNA, 25 bp, Homo sapien
tgtctaagatggagctccagattcc

SEQ ID NO: 3562671 - DNA, 25 bp, Homo sapien
taaatcccacagtcgaccaataggc

SEQ ID NO: 3562672 - DNA, 25 bp, Homo sapien
ggttccctcgctactggatctctca

SEQ ID NO: 3562673 - DNA, 25 bp, Homo sapien
ccatgtttgtgaggtgggcaccgct

SEQ ID NO: 3562674 - DNA, 25 bp, Homo sapien
cagccctgctttggatcaaggtggc

SEQ ID NO: 3562675 - DNA, 25 bp, Homo sapien
agatgatggtcatgtctgagcaggt

SEQ ID NO: 3562676 - DNA, 25 bp, Homo sapien
gacttcatgagctatggaccccagg

SEQ ID NO: 3562677 - DNA, 25 bp, Homo sapien
tcatgagtagtttccctgtgggcca

SEQ ID NO: 3562678 - DNA, 25 bp, Homo sapien
gggcaccagaggtcgctcagctctt

SEQ ID NO: 3562679 - DNA, 25 bp, Homo sapien
tcttccgaggacttgatccgtctca

SEQ ID NO: 3562680 - DNA, 25 bp, Homo sapien
gatccgtctcaagatgactgtctcc

SEQ ID NO: 3562681 - DNA, 25 bp, Homo sapien
taagcattagtgaaccccttgccct

SEQ ID NO: 3562682 - DNA, 25 bp, Homo sapien
gatcaactgtccatgtctgactgtg

SEQ ID NO: 3562683 - DNA, 25 bp, Homo sapien
ccctgggagctcagccagtcctgct

SEQ ID NO: 3562684 - DNA, 25 bp, Homo sapien
ttattgataagcattagtgaacccc

SEQ ID NO: 3562685 - DNA, 25 bp, Homo sapien
catgggtcagggagacaggcagcag

SEQ ID NO: 3562686 - DNA, 25 bp, Homo sapien
gatcatgggtcagggagacaggcag

SEQ ID NO: 3562687 - DNA, 25 bp, Homo sapien
agatcatgggtcagggagacaggca

SEQ ID NO: 3562688 - DNA, 25 bp, Homo sapien
ttgccagatcatgggtcagggagac

SEQ ID NO: 3562689 - DNA, 25 bp, Homo sapien
ctccatctagaagcactctgcttca

SEQ ID NO: 3562690 - DNA, 25 bp, Homo sapien
tccatctagaagcactctgcttcag

SEQ ID NO: 3562691 - DNA, 25 bp, Homo sapien
gaaggtgatggccaggtccttttcc

SEQ ID NO: 3562692 - DNA, 25 bp, Homo sapien
atctagaagcactctgcttcagctg

SEQ ID NO: 3562693 - DNA, 25 bp, Homo sapien
tgctggttagatggaggagttgagc

SEQ ID NO: 3562694 - DNA, 25 bp, Homo sapien
ctgctggttagatggaggagttgag

SEQ ID NO: 3562695 - DNA, 25 bp, Homo sapien
gggttcctccgcagccgggctgagc

SEQ ID NO: 3562696 - DNA, 25 bp, Homo sapien
caagggttcctccgcagccgggctg

SEQ ID NO: 3562697 - DNA, 25 bp, Homo sapien
ctgccaagggttcctccgcagccgg

SEQ ID NO: 3562698 - DNA, 25 bp, Homo sapien
tgccaagggttcctccgcagccggg

SEQ ID NO: 3562699 - DNA, 25 bp, Homo sapien
gagcaatgggctctcgcttctgtcc

SEQ ID NO: 3562700 - DNA, 25 bp, Homo sapien
caagagagctaagggcaggaggtct

SEQ ID NO: 3562701 - DNA, 25 bp, Homo sapien
aagggcaggaggtcttacgtggtgc

SEQ ID NO: 3562702 - DNA, 25 bp, Homo sapien
cctgaggttcttgggtggtgagcaa

SEQ ID NO: 3562703 - DNA, 25 bp, Homo sapien
tcataggggatagagatgccagaga

SEQ ID NO: 3562704 - DNA, 25 bp, Homo sapien
ggatctgatttcaccagcttattct

SEQ ID NO: 3562705 - DNA, 25 bp, Homo sapien
tattcttggccatgcccatagtcct

SEQ ID NO: 3562706 - DNA, 25 bp, Homo sapien
cctcagttctaaatagatagttcct

SEQ ID NO: 3562707 - DNA, 25 bp, Homo sapien
ccccactagcttgtagaggtaagaa

SEQ ID NO: 3562708 - DNA, 25 bp, Homo sapien
catagaatcttcttgcctgttcagc

SEQ ID NO: 3562709 - DNA, 25 bp, Homo sapien
tctccctcaggtcaggacagcaggg

SEQ ID NO: 3562710 - DNA, 25 bp, Homo sapien
aaagaattattatagtggcgtgtcc

SEQ ID NO: 3562711 - DNA, 25 bp, Homo sapien
ttatagtggcgtgtcctcctgagcc

SEQ ID NO: 3562712 - DNA, 25 bp, Homo sapien
ctgcactggaagcgggggtctccgg

SEQ ID NO: 3562713 - DNA, 25 bp, Homo sapien
ctgccacacctctgggggaggctcc

SEQ ID NO: 3562714 - DNA, 25 bp, Homo sapien
agcccatctgcttggcccgacacca

SEQ ID NO: 3562715 - DNA, 25 bp, Homo sapien
tgcactggaagcgggggtctccggg

SEQ ID NO: 3562716 - DNA, 25 bp, Homo sapien
gttcctgagggtcagagtcacgcaa

SEQ ID NO: 3562717 - DNA, 25 bp, Homo sapien
tagagtctgagctggagaatgtgtg

SEQ ID NO: 3562718 - DNA, 25 bp, Homo sapien
ttcagagacgtgtgggtgactggct

SEQ ID NO: 3562719 - DNA, 25 bp, Homo sapien
caagcgcttgggtgacttcagagac

SEQ ID NO: 3562720 - DNA, 25 bp, Homo sapien
gccaggtcaaactgcctcagcagct

SEQ ID NO: 3562721 - DNA, 25 bp, Homo sapien
agctccgcttcctcctcgtcgcggg

SEQ ID NO: 3562722 - DNA, 25 bp, Homo sapien
cagggcccgtactgccaggccaggt

SEQ ID NO: 3562723 - DNA, 25 bp, Homo sapien
ggcccgtactgccaggccaggtcaa

SEQ ID NO: 3562724 - DNA, 25 bp, Homo sapien
gctgctcttcagtacgaggttggct

SEQ ID NO: 3562725 - DNA, 25 bp, Homo sapien
cagtacgaggttggcttcagtctcc

SEQ ID NO: 3562726 - DNA, 25 bp, Homo sapien
cctcaccaccgctttgcctctgcca

SEQ ID NO: 3562727 - DNA, 25 bp, Homo sapien
cttcagtacgaggttggcttcagtc

SEQ ID NO: 3562728 - DNA, 25 bp, Homo sapien
ctctaggggcctcctctaggcccct

SEQ ID NO: 3562729 - DNA, 25 bp, Homo sapien
gcccctccgtgtccactcctcctgc

SEQ ID NO: 3562730 - DNA, 25 bp, Homo sapien
tctaggggcctcctctaggcccctc

SEQ ID NO: 3562731 - DNA, 25 bp, Homo sapien
gctcccccttgctgtgcccagcggg

SEQ ID NO: 3562732 - DNA, 25 bp, Homo sapien
agctcccccttgctgtgcccagcgg

SEQ ID NO: 3562733 - DNA, 25 bp, Homo sapien
cagctcccccttgctgtgcccagcg

SEQ ID NO: 3562734 - DNA, 25 bp, Homo sapien
ccagctcccccttgctgtgcccagc

SEQ ID NO: 3562735 - DNA, 25 bp, Homo sapien
cagtgatgagccgcttccggcccat

SEQ ID NO: 3562736 - DNA, 25 bp, Homo sapien
aatcagtgatgagccgcttccggcc

SEQ ID NO: 3562737 - DNA, 25 bp, Homo sapien
gaatcagtgatgagccgcttccggc

SEQ ID NO: 3562738 - DNA, 25 bp, Homo sapien
atcagtgatgagccgcttccggccc

SEQ ID NO: 3562739 - DNA, 25 bp, Homo sapien
ggcggccacccaggcaggcagagaa

SEQ ID NO: 3562740 - DNA, 25 bp, Homo sapien
cccaggcaggcagagaaggaggcaa

SEQ ID NO: 3562741 - DNA, 25 bp, Homo sapien
ccacccaggcaggcagagaaggagg

SEQ ID NO: 3562742 - DNA, 25 bp, Homo sapien
gcggccacccaggcaggcagagaag

SEQ ID NO: 3562743 - DNA, 25 bp, Homo sapien
gaagaggagagaccggccagtgggc

SEQ ID NO: 3562744 - DNA, 25 bp, Homo sapien
ccagcggcgggcagacaagatgacc

SEQ ID NO: 3562745 - DNA, 25 bp, Homo sapien
ggcgggcagacaagatgacccagac

SEQ ID NO: 3562746 - DNA, 25 bp, Homo sapien
tgggcgcgagaaagacagctgctga

SEQ ID NO: 3562747 - DNA, 25 bp, Homo sapien
cgagagaggaagtcgccggggtcca

SEQ ID NO: 3562748 - DNA, 25 bp, Homo sapien
agagaggaagtcgccggggtccagg

SEQ ID NO: 3562749 - DNA, 25 bp, Homo sapien
gagagaggaagtcgccggggtccag

SEQ ID NO: 3562750 - DNA, 25 bp, Homo sapien
tggaagagggctaagccactggtac

SEQ ID NO: 3562751 - DNA, 25 bp, Homo sapien
ttctgcactggaagagggctaagcc

SEQ ID NO: 3562752 - DNA, 25 bp, Homo sapien
catccggttcttccttccagggata

SEQ ID NO: 3562753 - DNA, 25 bp, Homo sapien
ccatccggttcttccttccagggat

SEQ ID NO: 3562754 - DNA, 25 bp, Homo sapien
tttgtggggagagccaggtagagct

SEQ ID NO: 3562755 - DNA, 25 bp, Homo sapien
ggggagagccaggtagagctgggaa

SEQ ID NO: 3562756 - DNA, 25 bp, Homo sapien
catgaggtttgtggggagagccagg

SEQ ID NO: 3562757 - DNA, 25 bp, Homo sapien
aggtttgtggggagagccaggtaga

SEQ ID NO: 3562758 - DNA, 25 bp, Homo sapien
ccatcgcagcagcttgagtggaaag

SEQ ID NO: 3562759 - DNA, 25 bp, Homo sapien
tctgggtttttctaccactgcatct

SEQ ID NO: 3562760 - DNA, 25 bp, Homo sapien
ggttctctggcctaatgtgcttcca

SEQ ID NO: 3562761 - DNA, 25 bp, Homo sapien
ggtctctgggtttttctaccactgc

SEQ ID NO: 3562762 - DNA, 25 bp, Homo sapien
ttcttctctagtcacctcctctttc

SEQ ID NO: 3562763 - DNA, 25 bp, Homo sapien
ggagcagttccgggaagacttgaaa

SEQ ID NO: 3562764 - DNA, 25 bp, Homo sapien
tctagtcacctcctctttcaccttg

SEQ ID NO: 3562765 - DNA, 25 bp, Homo sapien
agcagttccgggaagacttgaaaag

SEQ ID NO: 3562766 - DNA, 25 bp, Homo sapien
tggtttatagggcacctccaatgca

SEQ ID NO: 3562767 - DNA, 25 bp, Homo sapien
gaagacaattcgaggcaaggtcctg

SEQ ID NO: 3562768 - DNA, 25 bp, Homo sapien
ccagctcggtagacctttgggaggt

SEQ ID NO: 3562769 - DNA, 25 bp, Homo sapien
gcatacagggctggctctcacaaag

SEQ ID NO: 3562770 - DNA, 25 bp, Homo sapien
caagtgggttcagtcccaggcagcg

SEQ ID NO: 3562771 - DNA, 25 bp, Homo sapien
gttgaggccacgcaagtaacacaga

SEQ ID NO: 3562772 - DNA, 25 bp, Homo sapien
gcagtttgtcattgaggcttcgcca

SEQ ID NO: 3562773 - DNA, 25 bp, Homo sapien
gcctcgtagttctgggtcagccgca

SEQ ID NO: 3562774 - DNA, 25 bp, Homo sapien
ccaagctgcggagttggtgctccag

SEQ ID NO: 3562775 - DNA, 25 bp, Homo sapien
ataggtcccagccaagctgcggagt

SEQ ID NO: 3562776 - DNA, 25 bp, Homo sapien
tcccctgtgcgattgagagctggca

SEQ ID NO: 3562777 - DNA, 25 bp, Homo sapien
ccctgggtcccctgtgcgattgaga

SEQ ID NO: 3562778 - DNA, 25 bp, Homo sapien
agagcaccgtgcacaggcacgctaa

SEQ ID NO: 3562779 - DNA, 25 bp, Homo sapien
gcaccgtgcacaggcacgctaacat

SEQ ID NO: 3562780 - DNA, 25 bp, Homo sapien
aggtgccagagcaccgtgcacaggc

SEQ ID NO: 3562781 - DNA, 25 bp, Homo sapien
cagggaggtgccagagcaccgtgca

SEQ ID NO: 3562782 - DNA, 25 bp, Homo sapien
tttagtgctcactctcagggaacgg

SEQ ID NO: 3562783 - DNA, 25 bp, Homo sapien
tcagtggacactttggactggcaaa

SEQ ID NO: 3562784 - DNA, 25 bp, Homo sapien
gaaaagttggacttcaatgaggcct

SEQ ID NO: 3562785 - DNA, 25 bp, Homo sapien
gaccactagggtcgggctgccttat

SEQ ID NO: 3562786 - DNA, 25 bp, Homo sapien
tcagtgaggacttcggcagtggccc

SEQ ID NO: 3562787 - DNA, 25 bp, Homo sapien
tagataggtataacgctttgcccat

SEQ ID NO: 3562788 - DNA, 25 bp, Homo sapien
tacacgcgtgtgttttaggacagag

SEQ ID NO: 3562789 - DNA, 25 bp, Homo sapien
ggttaggtctaatcacagtgctggg

SEQ ID NO: 3562790 - DNA, 25 bp, Homo sapien
aggtaactgtgtcgttgcaggctgc

SEQ ID NO: 3562791 - DNA, 25 bp, Homo sapien
cctcaggctcatgttgtgcaggtgg

SEQ ID NO: 3562792 - DNA, 25 bp, Homo sapien
ttagtcgtgagcttgggaacccaac

SEQ ID NO: 3562793 - DNA, 25 bp, Homo sapien
tcatgaaattaaccagacgaggccg

SEQ ID NO: 3562794 - DNA, 25 bp, Homo sapien
cttcccaggcaaaggcccacagaaa

SEQ ID NO: 3562795 - DNA, 25 bp, Homo sapien
cccaggccactgagaagtagcttgg

SEQ ID NO: 3562796 - DNA, 25 bp, Homo sapien
ttccttttaccccaggccactgaga

SEQ ID NO: 3562797 - DNA, 25 bp, Homo sapien
ggcccacagaaacccatcttccttc

SEQ ID NO: 3562798 - DNA, 25 bp, Homo sapien
ttcctccccggtggagcgtgtggct

SEQ ID NO: 3562799 - DNA, 25 bp, Homo sapien
atatgtactcgcatcctgtccggtg

SEQ ID NO: 3562800 - DNA, 25 bp, Homo sapien
ggccaggagcgcgtctggtctgtta

SEQ ID NO: 3562801 - DNA, 25 bp, Homo sapien
ctgccgggtgacaattgccatctct

SEQ ID NO: 3562802 - DNA, 25 bp, Homo sapien
gccggctccccggccgtgggcacca

SEQ ID NO: 3562803 - DNA, 25 bp, Homo sapien
gccgccggctccccggccgtgggca

SEQ ID NO: 3562804 - DNA, 25 bp, Homo sapien
ctgccgccggctccccggccgtggg

SEQ ID NO: 3562805 - DNA, 25 bp, Homo sapien
ccggctccccggccgtgggcaccat

SEQ ID NO: 3562806 - DNA, 25 bp, Homo sapien
gagtgggagggcgagccgcggctcc

SEQ ID NO: 3562807 - DNA, 25 bp, Homo sapien
gtgggagggcgagccgcggctccgg

SEQ ID NO: 3562808 - DNA, 25 bp, Homo sapien
gccggccgggtgcggctcctctccc

SEQ ID NO: 3562809 - DNA, 25 bp, Homo sapien
ctcctctcccggaggctggcggagt

SEQ ID NO: 3562810 - DNA, 25 bp, Homo sapien
cactcgcaggtttttttcgctcggt

SEQ ID NO: 3562811 - DNA, 25 bp, Homo sapien
tttttttcggtgtgggacattctgc

SEQ ID NO: 3562812 - DNA, 25 bp, Homo sapien
ttaataatcccatccgccaggccca

SEQ ID NO: 3562813 - DNA, 25 bp, Homo sapien
ccgccaggcccactcgcaggttttt

SEQ ID NO: 3562814 - DNA, 25 bp, Homo sapien
gaatgctccgattcaaggcgatgga

SEQ ID NO: 3562815 - DNA, 25 bp, Homo sapien
ggaccagtttcaacaccacaggctt

SEQ ID NO: 3562816 - DNA, 25 bp, Homo sapien
ttgggtgactcagcgggaatgctcc

SEQ ID NO: 3562817 - DNA, 25 bp, Homo sapien
ttaatcagcacgaggcaacggacca

SEQ ID NO: 3562818 - DNA, 25 bp, Homo sapien
ccaaagggaaaagcagctccatctc

SEQ ID NO: 3562819 - DNA, 25 bp, Homo sapien
aaaagcagctccatctccaagctgc

SEQ ID NO: 3562820 - DNA, 25 bp, Homo sapien
tccacactgccaaagggaaaagcag

SEQ ID NO: 3562821 - DNA, 25 bp, Homo sapien
agctccatctccaagctgccagtgc

SEQ ID NO: 3562822 - DNA, 25 bp, Homo sapien
cacactggagggctcagctagagct

SEQ ID NO: 3562823 - DNA, 25 bp, Homo sapien
tctggattccattagcagggagttg

SEQ ID NO: 3562824 - DNA, 25 bp, Homo sapien
aggtgcctcacatcgtcttcccaca

SEQ ID NO: 3562825 - DNA, 25 bp, Homo sapien
ggctcagctagagctctggattcca

SEQ ID NO: 3562826 - DNA, 25 bp, Homo sapien
ccacagccatctttctgaggcccac

SEQ ID NO: 3562827 - DNA, 25 bp, Homo sapien
cacccacagccatctttctgaggcc

SEQ ID NO: 3562828 - DNA, 25 bp, Homo sapien
ccgctttctagcacccacagccatc

SEQ ID NO: 3562829 - DNA, 25 bp, Homo sapien
cgctttctagcacccacagccatct

SEQ ID NO: 3562830 - DNA, 25 bp, Homo sapien
tagcctttgactgttgcaagatttc

SEQ ID NO: 3562831 - DNA, 25 bp, Homo sapien
cagagcactctgtacatatttccgt

SEQ ID NO: 3562832 - DNA, 25 bp, Homo sapien
tctgtacatatttccgttttagcct

SEQ ID NO: 3562833 - DNA, 25 bp, Homo sapien
tgtggtccttaacagagcactctgt

SEQ ID NO: 3562834 - DNA, 25 bp, Homo sapien
attttggagatacggcagggagaat

SEQ ID NO: 3562835 - DNA, 25 bp, Homo sapien
gcagggagaatttgagtggcaaaaa

SEQ ID NO: 3562836 - DNA, 25 bp, Homo sapien
tcagaagagggagacgtcgggagat

SEQ ID NO: 3562837 - DNA, 25 bp, Homo sapien
agacgtcgggagattttggagatac

SEQ ID NO: 3562838 - DNA, 25 bp, Homo sapien
ggactccacgttgcctcttggggtc

SEQ ID NO: 3562839 - DNA, 25 bp, Homo sapien
ctccacgttgcctcttggggtccat

SEQ ID NO: 3562840 - DNA, 25 bp, Homo sapien
gactccacgttgcctcttggggtcc

SEQ ID NO: 3562841 - DNA, 25 bp, Homo sapien
actccacgttgcctcttggggtcca

SEQ ID NO: 3562842 - DNA, 25 bp, Homo sapien
gctcctttgtctgtaaggagggctg

SEQ ID NO: 3562843 - DNA, 25 bp, Homo sapien
cagccatgagtaatactgtctgtgc

SEQ ID NO: 3562844 - DNA, 25 bp, Homo sapien
aaaaatgccagccatgagtaatact

SEQ ID NO: 3562845 - DNA, 25 bp, Homo sapien
ctgtgctcctttgtctgtaaggagg

SEQ ID NO: 3562846 - DNA, 25 bp, Homo sapien
ctgtgtgaggtacatacagcaacaa

SEQ ID NO: 3562847 - DNA, 25 bp, Homo sapien
gcgccagtagccctagttactcggg

SEQ ID NO: 3562848 - DNA, 25 bp, Homo sapien
ggcatgcgccagtagccctagttac

SEQ ID NO: 3562849 - DNA, 25 bp, Homo sapien
ttaaatgtaacacctatttattcat

SEQ ID NO: 3562850 - DNA, 25 bp, Homo sapien
aggggccttgctcatcttttgcatg

SEQ ID NO: 3562851 - DNA, 25 bp, Homo sapien
gggccttgctcatcttttgcatgct

SEQ ID NO: 3562852 - DNA, 25 bp, Homo sapien
ttgctcatcttttgcatgcttcagt

SEQ ID NO: 3562853 - DNA, 25 bp, Homo sapien
gccttgctcatcttttgcatgcttc

SEQ ID NO: 3562854 - DNA, 25 bp, Homo sapien
tccatgttccccgtgacaggtgggc

SEQ ID NO: 3562855 - DNA, 25 bp, Homo sapien
ttcaagagaccagatgggttgcccc

SEQ ID NO: 3562856 - DNA, 25 bp, Homo sapien
ctgtacaatcaatccatcatctggg

SEQ ID NO: 3562857 - DNA, 25 bp, Homo sapien
gggactggacgctgctattgattca

SEQ ID NO: 3562858 - DNA, 25 bp, Homo sapien
cagggttcaggccactgaactgccc

SEQ ID NO: 3562859 - DNA, 25 bp, Homo sapien
ccttgttcttgtcggcgggcttgag

SEQ ID NO: 3562860 - DNA, 25 bp, Homo sapien
tcaggccactgaactgcccgtactt

SEQ ID NO: 3562861 - DNA, 25 bp, Homo sapien
tttcttggctttggcggaattgcgg

SEQ ID NO: 3562862 - DNA, 25 bp, Homo sapien
ggcctagcggctcctttcttcccca

SEQ ID NO: 3562863 - DNA, 25 bp, Homo sapien
cagggcctagcggctcctttcttcc

SEQ ID NO: 3562864 - DNA, 25 bp, Homo sapien
cacagggcctagcggctcctttctt

SEQ ID NO: 3562865 - DNA, 25 bp, Homo sapien
gccacagggcctagcggctcctttc

SEQ ID NO: 3562866 - DNA, 25 bp, Homo sapien
agcacatgagggtctcgtccacact

SEQ ID NO: 3562867 - DNA, 25 bp, Homo sapien
aagagcacatgagggtctcgtccac

SEQ ID NO: 3562868 - DNA, 25 bp, Homo sapien
aaagagcacatgagggtctcgtcca

SEQ ID NO: 3562869 - DNA, 25 bp, Homo sapien
cacatgagggtctcgtccacactca

SEQ ID NO: 3562870 - DNA, 25 bp, Homo sapien
ggcaaagaactcgtagccgtcttct

SEQ ID NO: 3562871 - DNA, 25 bp, Homo sapien
ttggcaaagaactcgtagccgtctt

SEQ ID NO: 3562872 - DNA, 25 bp, Homo sapien
caaagaactcgtagccgtcttctac

SEQ ID NO: 3562873 - DNA, 25 bp, Homo sapien
cttggcaaagaactcgtagccgtct

SEQ ID NO: 3562874 - DNA, 25 bp, Homo sapien
ccttcccctgccgcaggccggagcc

SEQ ID NO: 3562875 - DNA, 25 bp, Homo sapien
gtcccgagcgcaggcacggccctcc

SEQ ID NO: 3562876 - DNA, 25 bp, Homo sapien
cagtcagtcccgagcgcaggcacgg

SEQ ID NO: 3562877 - DNA, 25 bp, Homo sapien
cagtcccgagcgcaggcacggccct

SEQ ID NO: 3562878 - DNA, 25 bp, Homo sapien
tgtgctcggcagatgaggtccaagt

SEQ ID NO: 3562879 - DNA, 25 bp, Homo sapien
cacctcggctccaaaggtaaaagag

SEQ ID NO: 3562880 - DNA, 25 bp, Homo sapien
taaaagagacgccacggtcgttctc

SEQ ID NO: 3562881 - DNA, 25 bp, Homo sapien
tccaagtcgtgcttgtggaggaact

SEQ ID NO: 3562882 - DNA, 25 bp, Homo sapien
cacatcaaggaagtgagtgcagccc

SEQ ID NO: 3562883 - DNA, 25 bp, Homo sapien
tcctgggcgcctagacaggcagaag

SEQ ID NO: 3562884 - DNA, 25 bp, Homo sapien
gagtgacttcccagatgagacctaa

SEQ ID NO: 3562885 - DNA, 25 bp, Homo sapien
gagacaagcccactccatgtaggac

SEQ ID NO: 3562886 - DNA, 25 bp, Homo sapien
gcagttgaagcagtcagtgaaggtt

SEQ ID NO: 3562887 - DNA, 25 bp, Homo sapien
cacagtttgatgttgtagcgtctct

SEQ ID NO: 3562888 - DNA, 25 bp, Homo sapien
tttcgtccactatggccgcgatggg

SEQ ID NO: 3562889 - DNA, 25 bp, Homo sapien
ccgtggcagcagaagatcttttcgt

SEQ ID NO: 3562890 - DNA, 25 bp, Homo sapien
tcatcgtagaaaccatagatgcggt

SEQ ID NO: 3562891 - DNA, 25 bp, Homo sapien
tagatgcggttgatgctggcacact

SEQ ID NO: 3562892 - DNA, 25 bp, Homo sapien
tacttgatcttataggccagcagca

SEQ ID NO: 3562893 - DNA, 25 bp, Homo sapien
tactcaaatagtcgcagaaggtcgt

SEQ ID NO: 3562894 - DNA, 25 bp, Homo sapien
tcagaaaaatctcccgggatttcag

SEQ ID NO: 3562895 - DNA, 25 bp, Homo sapien
agaccgcggatctcgttctctgtca

SEQ ID NO: 3562896 - DNA, 25 bp, Homo sapien
atttcaggcacagaccgcggatctc

SEQ ID NO: 3562897 - DNA, 25 bp, Homo sapien
gctgtacattcttgccaggccgcga

SEQ ID NO: 3562898 - DNA, 25 bp, Homo sapien
ggcgcaatggggtgtcaggaccctg

SEQ ID NO: 3562899 - DNA, 25 bp, Homo sapien
caatggggtgtcaggaccctggacc

SEQ ID NO: 3562900 - DNA, 25 bp, Homo sapien
cgcaatggggtgtcaggaccctgga

SEQ ID NO: 3562901 - DNA, 25 bp, Homo sapien
ctggggcgcaatggggtgtcaggac

SEQ ID NO: 3562902 - DNA, 25 bp, Homo sapien
gggcgacacgggtggccccatggat

SEQ ID NO: 3562903 - DNA, 25 bp, Homo sapien
accaaaaacctcacagcgcaggacc

SEQ ID NO: 3562904 - DNA, 25 bp, Homo sapien
tcgggaggcgactgtcgtgcgcagg

SEQ ID NO: 3562905 - DNA, 25 bp, Homo sapien
ctgctccgcgcgtcggagctggccc

SEQ ID NO: 3562906 - DNA, 25 bp, Homo sapien
agcaggcgcccgatgatcgagtcca

SEQ ID NO: 3562907 - DNA, 25 bp, Homo sapien
gcgcccgatgatcgagtccaggttg

SEQ ID NO: 3562908 - DNA, 25 bp, Homo sapien
tcgagtccaggttgagcttctcgct

SEQ ID NO: 3562909 - DNA, 25 bp, Homo sapien
caggcgcccgatgatcgagtccagg

SEQ ID NO: 3562910 - DNA, 25 bp, Homo sapien
ctccggcagcctccttccggcctgg

SEQ ID NO: 3562911 - DNA, 25 bp, Homo sapien
agggaccagacagggtggcctagga

SEQ ID NO: 3562912 - DNA, 25 bp, Homo sapien
gggaccagacagggtggcctaggag

SEQ ID NO: 3562913 - DNA, 25 bp, Homo sapien
ggaccagacagggtggcctaggaga

SEQ ID NO: 3562914 - DNA, 25 bp, Homo sapien
catggcgtctgcacccgcgggcaga

SEQ ID NO: 3562915 - DNA, 25 bp, Homo sapien
ggctcctgtggcggaagtgccccac

SEQ ID NO: 3562916 - DNA, 25 bp, Homo sapien
gggcggcaggcatggcgtctgcacc

SEQ ID NO: 3562917 - DNA, 25 bp, Homo sapien
cggctcctgtggcggaagtgcccca

SEQ ID NO: 3562918 - DNA, 25 bp, Homo sapien
ggtggaggctgtgtacccacctgcc

SEQ ID NO: 3562919 - DNA, 25 bp, Homo sapien
cactgagagggagagattcgaccct

SEQ ID NO: 3562920 - DNA, 25 bp, Homo sapien
caatttaagacacgttggaggacgg

SEQ ID NO: 3562921 - DNA, 25 bp, Homo sapien
tctagtgcctggacgccttcaggag

SEQ ID NO: 3562922 - DNA, 25 bp, Homo sapien
gaaggcttacggaccctcctgagta

SEQ ID NO: 3562923 - DNA, 25 bp, Homo sapien
cctgtgtctggaggcgtgcggcgcg

SEQ ID NO: 3562924 - DNA, 25 bp, Homo sapien
gtgtctggaggcgtgcggcgcgctg

SEQ ID NO: 3562925 - DNA, 25 bp, Homo sapien
ggcggcctgtgtctggaggcgtgcg

SEQ ID NO: 3562926 - DNA, 25 bp, Homo sapien
cggcctgtgtctggaggcgtgcggc

SEQ ID NO: 3562927 - DNA, 25 bp, Homo sapien
cgcgctgcctcatggagggaaaaca

SEQ ID NO: 3562928 - DNA, 25 bp, Homo sapien
tggtggagaccatgcttcggcggtc

SEQ ID NO: 3562929 - DNA, 25 bp, Homo sapien
accatgcttcggcggtcggcgcgct

SEQ ID NO: 3562930 - DNA, 25 bp, Homo sapien
gcgctgcctcatggagggaaaacag

SEQ ID NO: 3562931 - DNA, 25 bp, Homo sapien
tggtagtttctctgcaatccccggc

SEQ ID NO: 3562932 - DNA, 25 bp, Homo sapien
tgggaaagagtccaccacgctctct

SEQ ID NO: 3562933 - DNA, 25 bp, Homo sapien
cactggattcctccgtggacacttc

SEQ ID NO: 3562934 - DNA, 25 bp, Homo sapien
ccccagcaggcagtaagctttaggg

SEQ ID NO: 3562935 - DNA, 25 bp, Homo sapien
tcattcggcctgaccggtagaggca

SEQ ID NO: 3562936 - DNA, 25 bp, Homo sapien
agtggccctgagacacgtgaacacc

SEQ ID NO: 3562937 - DNA, 25 bp, Homo sapien
caaattctaggatagctctgaagcc

SEQ ID NO: 3562938 - DNA, 25 bp, Homo sapien
tctggcacacctaactagcattggc

SEQ ID NO: 3562939 - DNA, 25 bp, Homo sapien
cattctagagtcagtgaagcacccc

SEQ ID NO: 3562940 - DNA, 25 bp, Homo sapien
cacacgggctgagcggaacattcta

SEQ ID NO: 3562941 - DNA, 25 bp, Homo sapien
cctcagtggtatgagtgcgggccca

SEQ ID NO: 3562942 - DNA, 25 bp, Homo sapien
tatctccaggccaaaattgtgcgca

SEQ ID NO: 3562943 - DNA, 25 bp, Homo sapien
gctgcatgcctaggggcagggttgg

SEQ ID NO: 3562944 - DNA, 25 bp, Homo sapien
ggaggggtctctgtaggaccacagg

SEQ ID NO: 3562945 - DNA, 25 bp, Homo sapien
agggaggggtctctgtaggaccaca

SEQ ID NO: 3562946 - DNA, 25 bp, Homo sapien
gagggaggggtctctgtaggaccac

SEQ ID NO: 3562947 - DNA, 25 bp, Homo sapien
aggggtctctgtaggaccacagggc

SEQ ID NO: 3562948 - DNA, 25 bp, Homo sapien
caaatggttgcctgatgcctgtggt

SEQ ID NO: 3562949 - DNA, 25 bp, Homo sapien
ctgaggcatggtcatgtgggctggg

SEQ ID NO: 3562950 - DNA, 25 bp, Homo sapien
gggagtgagcggctgtgacagggat

SEQ ID NO: 3562951 - DNA, 25 bp, Homo sapien
cagtccagccatggcatcttgggaa

SEQ ID NO: 3562952 - DNA, 25 bp, Homo sapien
tcatcctcctgtcgctcaaggtcat

SEQ ID NO: 3562953 - DNA, 25 bp, Homo sapien
gggctggacgcctctccacattgct

SEQ ID NO: 3562954 - DNA, 25 bp, Homo sapien
cgtggtcatagtctgtgtcctgctc

SEQ ID NO: 3562955 - DNA, 25 bp, Homo sapien
tgcaggccaccatccgcgacgtggt

SEQ ID NO: 3562956 - DNA, 25 bp, Homo sapien
ggtggtagtagccccctgagtcacg

SEQ ID NO: 3562957 - DNA, 25 bp, Homo sapien
gggtggtagtagccccctgagtcac

SEQ ID NO: 3562958 - DNA, 25 bp, Homo sapien
gtggtagtagccccctgagtcacgg

SEQ ID NO: 3562959 - DNA, 25 bp, Homo sapien
cgggtggtagtagccccctgagtca

SEQ ID NO: 3562960 - DNA, 25 bp, Homo sapien
gcaggacaacggtgacagagctgga

SEQ ID NO: 3562961 - DNA, 25 bp, Homo sapien
aggcccctggcagggccagcagcat

SEQ ID NO: 3562962 - DNA, 25 bp, Homo sapien
ccgagcccaaggcccctggcagggc

SEQ ID NO: 3562963 - DNA, 25 bp, Homo sapien
caaggcccctggcagggccagcagc

SEQ ID NO: 3562964 - DNA, 25 bp, Homo sapien
cccaaggcccctggcagggccagca

SEQ ID NO: 3562965 - DNA, 25 bp, Homo sapien
ggctgggtgaccaagaccactttcg

SEQ ID NO: 3562966 - DNA, 25 bp, Homo sapien
ctgggtgaccaagaccactttcgtt

SEQ ID NO: 3562967 - DNA, 25 bp, Homo sapien
tgggatcctcttgggacagccaagc

SEQ ID NO: 3562968 - DNA, 25 bp, Homo sapien
gggatcctcttgggacagccaagca

SEQ ID NO: 3562969 - DNA, 25 bp, Homo sapien
ttccgttccactcccagtccctgag

SEQ ID NO: 3562970 - DNA, 25 bp, Homo sapien
ggcgggcgcagctgccagaggaagt

SEQ ID NO: 3562971 - DNA, 25 bp, Homo sapien
gggaggcgggcgcagctgccagagg

SEQ ID NO: 3562972 - DNA, 25 bp, Homo sapien
tgccccagcggcagggtttccgttc

SEQ ID NO: 3562973 - DNA, 25 bp, Homo sapien
ctccgtgccgggcacccacctccag

SEQ ID NO: 3562974 - DNA, 25 bp, Homo sapien
cctccgtgccgggcacccacctcca

SEQ ID NO: 3562975 - DNA, 25 bp, Homo sapien
ccgcaggcccctccgtgccgggcac

SEQ ID NO: 3562976 - DNA, 25 bp, Homo sapien
caggcccctccgtgccgggcaccca

SEQ ID NO: 3562977 - DNA, 25 bp, Homo sapien
agaaagagaattttatttggaatga

SEQ ID NO: 3562978 - DNA, 25 bp, Homo sapien
ctgggcgtagacatcctccacagga

SEQ ID NO: 3562979 - DNA, 25 bp, Homo sapien
tctgggcagccagctagcccggtgc

SEQ ID NO: 3562980 - DNA, 25 bp, Homo sapien
cctcagaggtcgaggagctcgcctg

SEQ ID NO: 3562981 - DNA, 25 bp, Homo sapien
tgggcgctggcttcggcctgggcct

SEQ ID NO: 3562982 - DNA, 25 bp, Homo sapien
gcggcagatgcggtcgccctgctcc

SEQ ID NO: 3562983 - DNA, 25 bp, Homo sapien
gcatccccgttctccatgcggccca

SEQ ID NO: 3562984 - DNA, 25 bp, Homo sapien
ggcagatgcggtcgccctgctcctt

SEQ ID NO: 3562985 - DNA, 25 bp, Homo sapien
aggcggcagatgcggtcgccctgct

SEQ ID NO: 3562986 - DNA, 25 bp, Homo sapien
ccagagagggacagcgaatggctga

SEQ ID NO: 3562987 - DNA, 25 bp, Homo sapien
gcgaatggctgaagcccacacagca

SEQ ID NO: 3562988 - DNA, 25 bp, Homo sapien
tggtcaggggctgctaagccatagc

SEQ ID NO: 3562989 - DNA, 25 bp, Homo sapien
acagcgaatggctgaagcccacaca

SEQ ID NO: 3562990 - DNA, 25 bp, Homo sapien
atgaggatcgggtcggcatcccgcc

SEQ ID NO: 3562991 - DNA, 25 bp, Homo sapien
ttcaggtcccgctgcttgctgggca

SEQ ID NO: 3562992 - DNA, 25 bp, Homo sapien
ggcacgtaggcctcccgcagtgaga

SEQ ID NO: 3562993 - DNA, 25 bp, Homo sapien
tgtcagacaacacgttgcgccggct

SEQ ID NO: 3562994 - DNA, 25 bp, Homo sapien
cttgcgctcatgcagtttgtagaac

SEQ ID NO: 3562995 - DNA, 25 bp, Homo sapien
gggctcacacttgcgctcatgcagt

SEQ ID NO: 3562996 - DNA, 25 bp, Homo sapien
atgacgatgggctcacacttgcgct

SEQ ID NO: 3562997 - DNA, 25 bp, Homo sapien
ggcacagtcatgacgatgggctcac

SEQ ID NO: 3562998 - DNA, 25 bp, Homo sapien
gccccgcttgggcatgctgcccata

SEQ ID NO: 3562999 - DNA, 25 bp, Homo sapien
gatgtagggaggctcctctgtgatc

SEQ ID NO: 3563000 - DNA, 25 bp, Homo sapien
caaagtaccggatgctggagtcacc

SEQ ID NO: 3563001 - DNA, 25 bp, Homo sapien
tccttgctggtgaacgtgttcagga

SEQ ID NO: 3563002 - DNA, 25 bp, Homo sapien
cttgccgcagacgtagaccacactg

SEQ ID NO: 3563003 - DNA, 25 bp, Homo sapien
ccacactggtgtcggggtcgtagaa

SEQ ID NO: 3563004 - DNA, 25 bp, Homo sapien
cgttgctcgagtccagttcctgcag

SEQ ID NO: 3563005 - DNA, 25 bp, Homo sapien
cagggccccgttgctcgagtccagt

SEQ ID NO: 3563006 - DNA, 25 bp, Homo sapien
ccaaaccaggacgggccttagctgg

SEQ ID NO: 3563007 - DNA, 25 bp, Homo sapien
cccaaaccaggacgggccttagctg

SEQ ID NO: 3563008 - DNA, 25 bp, Homo sapien
ctggcacattgcaggcagtcaggcc

SEQ ID NO: 3563009 - DNA, 25 bp, Homo sapien
caaaccaggacgggccttagctggc

SEQ ID NO: 3563010 - DNA, 25 bp, Homo sapien
ccaggccactaagcaagtgctgaaa

SEQ ID NO: 3563011 - DNA, 25 bp, Homo sapien
tcctccaggccttaagactatgccc

SEQ ID NO: 3563012 - DNA, 25 bp, Homo sapien
aagtgctgaaacatacctcactgtg

SEQ ID NO: 3563013 - DNA, 25 bp, Homo sapien
taagcaagtgctgaaacatacctca

SEQ ID NO: 3563014 - DNA, 25 bp, Homo sapien
ctggggccaggaggcttgctggagg

SEQ ID NO: 3563015 - DNA, 25 bp, Homo sapien
gggctggggccaggaggcttgctgg

SEQ ID NO: 3563016 - DNA, 25 bp, Homo sapien
gaggcttgctggaggaggaggcttt

SEQ ID NO: 3563017 - DNA, 25 bp, Homo sapien
ggaggcttgctggaggaggaggctt

SEQ ID NO: 3563018 - DNA, 25 bp, Homo sapien
aagtctcaagtttgccccctcaggc

SEQ ID NO: 3563019 - DNA, 25 bp, Homo sapien
agaagctaggaaccacaggcctccc

SEQ ID NO: 3563020 - DNA, 25 bp, Homo sapien
ccgttggcatgaacaacatgggcaa

SEQ ID NO: 3563021 - DNA, 25 bp, Homo sapien
gaaagtctgacagagtcctaggccc

SEQ ID NO: 3563022 - DNA, 25 bp, Homo sapien
cgctcgctcattcggctgaagcctg

SEQ ID NO: 3563023 - DNA, 25 bp, Homo sapien
ctcattcggctgaagcctgtggtga

SEQ ID NO: 3563024 - DNA, 25 bp, Homo sapien
gaagatggcccgcatgggccgggcc

SEQ ID NO: 3563025 - DNA, 25 bp, Homo sapien
gggccgggccccctcatgagccttc

SEQ ID NO: 3563026 - DNA, 25 bp, Homo sapien
gcacgctcttgtccttgcatgctga

SEQ ID NO: 3563027 - DNA, 25 bp, Homo sapien
ccgacgggggtcgatgatgcgcacg

SEQ ID NO: 3563028 - DNA, 25 bp, Homo sapien
cgatgatgcgcacgctcttgtcctt

SEQ ID NO: 3563029 - DNA, 25 bp, Homo sapien
aggctgccattgtggttccagctga

SEQ ID NO: 3563030 - DNA, 25 bp, Homo sapien
actcgcttggtgtgcccctccagta

SEQ ID NO: 3563031 - DNA, 25 bp, Homo sapien
actgagcagcacgtttcgggccgtg

SEQ ID NO: 3563032 - DNA, 25 bp, Homo sapien
caccaccggctctgtcagcggggag

SEQ ID NO: 3563033 - DNA, 25 bp, Homo sapien
gggtgccaggcgatgatgcccactc

SEQ ID NO: 3563034 - DNA, 25 bp, Homo sapien
tgaggacaccagtcgatgtccagga

SEQ ID NO: 3563035 - DNA, 25 bp, Homo sapien
gagccgctggctatgacttcgtcgt

SEQ ID NO: 3563036 - DNA, 25 bp, Homo sapien
gatgtccaggacaggtcccgtgtgc

SEQ ID NO: 3563037 - DNA, 25 bp, Homo sapien
caccgtcgggtaggccttgtcaatg

SEQ ID NO: 3563038 - DNA, 25 bp, Homo sapien
gccggaccactttgcggaaggacat

SEQ ID NO: 3563039 - DNA, 25 bp, Homo sapien
ggctgcccgaacacatgccggaatt

SEQ ID NO: 3563040 - DNA, 25 bp, Homo sapien
gaatgtcctcatagcactggtcgtt

SEQ ID NO: 3563041 - DNA, 25 bp, Homo sapien
caggtaacacgggacacgcgaatgt

SEQ ID NO: 3563042 - DNA, 25 bp, Homo sapien
gggctgcggcaccggcttcgggcgg

SEQ ID NO: 3563043 - DNA, 25 bp, Homo sapien
tgcggcaccggcttcgggcggctcc

SEQ ID NO: 3563044 - DNA, 25 bp, Homo sapien
caccggcttcgggcggctccggatc

SEQ ID NO: 3563045 - DNA, 25 bp, Homo sapien
agggggctgcggcaccggcttcggg

SEQ ID NO: 3563046 - DNA, 25 bp, Homo sapien
tgggaagcaggaagcaggattcagg

SEQ ID NO: 3563047 - DNA, 25 bp, Homo sapien
gggaagcaggaagcaggattcagga

SEQ ID NO: 3563048 - DNA, 25 bp, Homo sapien
ctgggaagcaggaagcaggattcag

SEQ ID NO: 3563049 - DNA, 25 bp, Homo sapien
tacacggacagtggatatgttcacg

SEQ ID NO: 3563050 - DNA, 25 bp, Homo sapien
cacgtgactctttttaagttatcaa

SEQ ID NO: 3563051 - DNA, 25 bp, Homo sapien
tcgcgttcttgctcctcataatggc

SEQ ID NO: 3563052 - DNA, 25 bp, Homo sapien
tcataatggcatccgcaggagtctc

SEQ ID NO: 3563053 - DNA, 25 bp, Homo sapien
gttgctgaaggtcacgatactgagc

SEQ ID NO: 3563054 - DNA, 25 bp, Homo sapien
gactgtatcactctaggctgcctgc

SEQ ID NO: 3563055 - DNA, 25 bp, Homo sapien
tcatttacacctgccggaaagggcg

SEQ ID NO: 3563056 - DNA, 25 bp, Homo sapien
gttaggaaccagaacccagacctga

SEQ ID NO: 3563057 - DNA, 25 bp, Homo sapien
gcctctaaagggacatcctgtatgt

SEQ ID NO: 3563058 - DNA, 25 bp, Homo sapien
gacaacttcctatctgtgcacttgg

SEQ ID NO: 3563059 - DNA, 25 bp, Homo sapien
acagagggaggctgttattcaggca

SEQ ID NO: 3563060 - DNA, 25 bp, Homo sapien
gagaagaaaggctagttcaccaggc

SEQ ID NO: 3563061 - DNA, 25 bp, Homo sapien
ctcttctggcgccttgctgagggag

SEQ ID NO: 3563062 - DNA, 25 bp, Homo sapien
tcttgcctcttctggcgccttgctg

SEQ ID NO: 3563063 - DNA, 25 bp, Homo sapien
cagcctcaatgactgttgggggaag

SEQ ID NO: 3563064 - DNA, 25 bp, Homo sapien
gaaggggactagtggaccaggcttg

SEQ ID NO: 3563065 - DNA, 25 bp, Homo sapien
tgttgagggacagtaccccgcaaga

SEQ ID NO: 3563066 - DNA, 25 bp, Homo sapien
taaggacaaagctgtcggcggctcc

SEQ ID NO: 3563067 - DNA, 25 bp, Homo sapien
tctttcactgctctggtgggcctgc

SEQ ID NO: 3563068 - DNA, 25 bp, Homo sapien
ggtcgctgacatggaactgcctgag

SEQ ID NO: 3563069 - DNA, 25 bp, Homo sapien
tgtgggatccgactgtggctgggcc

SEQ ID NO: 3563070 - DNA, 25 bp, Homo sapien
ggtctggacgttagtgtctgcctgt

SEQ ID NO: 3563071 - DNA, 25 bp, Homo sapien
ctgtgggatccgatcgtggctggag

SEQ ID NO: 3563072 - DNA, 25 bp, Homo sapien
tggctgggccgtagggttcagctgt

SEQ ID NO: 3563073 - DNA, 25 bp, Homo sapien
ctctgccatcggctctggcagagtt

SEQ ID NO: 3563074 - DNA, 25 bp, Homo sapien
gccatcggctctggcagagttggac

SEQ ID NO: 3563075 - DNA, 25 bp, Homo sapien
tctgccatcggctctggcagagttg

SEQ ID NO: 3563076 - DNA, 25 bp, Homo sapien
tgccatcggctctggcagagttgga

SEQ ID NO: 3563077 - DNA, 25 bp, Homo sapien
gcgaaggacgagagcacggagcgca

SEQ ID NO: 3563078 - DNA, 25 bp, Homo sapien
ctcgcagagagctgccgcgaaggac

SEQ ID NO: 3563079 - DNA, 25 bp, Homo sapien
ggaggtcggcactggccatgaggca

SEQ ID NO: 3563080 - DNA, 25 bp, Homo sapien
tctgtggctcagtgggcgtgaagct

SEQ ID NO: 3563081 - DNA, 25 bp, Homo sapien
agatgaccaggtcgtaccaccagac

SEQ ID NO: 3563082 - DNA, 25 bp, Homo sapien
gctgacagaatggtcctggccacac

SEQ ID NO: 3563083 - DNA, 25 bp, Homo sapien
tcccagagcaggtagccagagtaga

SEQ ID NO: 3563084 - DNA, 25 bp, Homo sapien
gtagtcggagtagaccagggcctcc

SEQ ID NO: 3563085 - DNA, 25 bp, Homo sapien
acgccatcaacccattggctggcag

SEQ ID NO: 3563086 - DNA, 25 bp, Homo sapien
tagtagaagcggcaggcagctgtcc

SEQ ID NO: 3563087 - DNA, 25 bp, Homo sapien
ctctaggatctggaaggccgctgct

SEQ ID NO: 3563088 - DNA, 25 bp, Homo sapien
taggacacgccccataggaagtagt

SEQ ID NO: 3563089 - DNA, 25 bp, Homo sapien
gagtcctgctggacacggagtgggt

SEQ ID NO: 3563090 - DNA, 25 bp, Homo sapien
gtcctgctggacacggagtgggtgc

SEQ ID NO: 3563091 - DNA, 25 bp, Homo sapien
cagagtcctgctggacacggagtgg

SEQ ID NO: 3563092 - DNA, 25 bp, Homo sapien
agtcctgctggacacggagtgggtg

SEQ ID NO: 3563093 - DNA, 25 bp, Homo sapien
aaccctggcccagtagggccaagtg

SEQ ID NO: 3563094 - DNA, 25 bp, Homo sapien
tgctttgtggcacccggcagcgcta

SEQ ID NO: 3563095 - DNA, 25 bp, Homo sapien
tgcttgctgggaaaccctaaccctg

SEQ ID NO: 3563096 - DNA, 25 bp, Homo sapien
caggaaacccaagctgagaggacat

SEQ ID NO: 3563097 - DNA, 25 bp, Homo sapien
gcgctctagcattattccccatgtt

SEQ ID NO: 3563098 - DNA, 25 bp, Homo sapien
cgtgctcctcaaaacggcattcgag

SEQ ID NO: 3563099 - DNA, 25 bp, Homo sapien
tctgcctaacgaaggcctctgccca

SEQ ID NO: 3563100 - DNA, 25 bp, Homo sapien
cattcgaggcatctgtgatctggcc

SEQ ID NO: 3563101 - DNA, 25 bp, Homo sapien
taagactgtagaatgaagtcgggcg

SEQ ID NO: 3563102 - DNA, 25 bp, Homo sapien
taacgcagacttctaatgatgggaa

SEQ ID NO: 3563103 - DNA, 25 bp, Homo sapien
tataccttgctgattcctaacgcag

SEQ ID NO: 3563104 - DNA, 25 bp, Homo sapien
tgggaatcaccacttctgaaattgc

SEQ ID NO: 3563105 - DNA, 25 bp, Homo sapien
agggcctcccaacccttgctcactc

SEQ ID NO: 3563106 - DNA, 25 bp, Homo sapien
cgggcaggtgcaccaacagggcctc

SEQ ID NO: 3563107 - DNA, 25 bp, Homo sapien
cccgacagtgtcatgggaagagccc

SEQ ID NO: 3563108 - DNA, 25 bp, Homo sapien
tccctccccgacagtgtcatgggaa

SEQ ID NO: 3563109 - DNA, 25 bp, Homo sapien
ggaactaggataccagcctccaggt

SEQ ID NO: 3563110 - DNA, 25 bp, Homo sapien
tgaccactgagggtgtctgtcaggc

SEQ ID NO: 3563111 - DNA, 25 bp, Homo sapien
agacgggctggttgagtcatccaag

SEQ ID NO: 3563112 - DNA, 25 bp, Homo sapien
tgacatggcccacattcagggctgg

SEQ ID NO: 3563113 - DNA, 25 bp, Homo sapien
ggtggtgctcgaagcccttcagcgt

SEQ ID NO: 3563114 - DNA, 25 bp, Homo sapien
taacatgccccgtgcccttgggcaa

SEQ ID NO: 3563115 - DNA, 25 bp, Homo sapien
ccttcagcgtcagggtcagtccttg

SEQ ID NO: 3563116 - DNA, 25 bp, Homo sapien
gcaaggcaggagtcctacgcccagc

SEQ ID NO: 3563117 - DNA, 25 bp, Homo sapien
aataacagcaacctagcagccgcac

SEQ ID NO: 3563118 - DNA, 25 bp, Homo sapien
ttattagcacaaaataacagcaacc

SEQ ID NO: 3563119 - DNA, 25 bp, Homo sapien
taacagcaacctagcagccgcacgg

SEQ ID NO: 3563120 - DNA, 25 bp, Homo sapien
acagcaacctagcagccgcacggcc

SEQ ID NO: 3563121 - DNA, 25 bp, Homo sapien
cccatgggcgcaaggggtccacgct

SEQ ID NO: 3563122 - DNA, 25 bp, Homo sapien
agagcaggcgacgggcggctttccc

SEQ ID NO: 3563123 - DNA, 25 bp, Homo sapien
gcatgccccgaacttcctgagcaaa

SEQ ID NO: 3563124 - DNA, 25 bp, Homo sapien
cctgagcaaactccctaggggctgg

SEQ ID NO: 3563125 - DNA, 25 bp, Homo sapien
tagaagaactggaagccccggtggc

SEQ ID NO: 3563126 - DNA, 25 bp, Homo sapien
cagtagatgaagatcacgtgataga

SEQ ID NO: 3563127 - DNA, 25 bp, Homo sapien
cgcagtagatgaagatcacgtgata

SEQ ID NO: 3563128 - DNA, 25 bp, Homo sapien
cttgaccgcgcagtagatgaagatc

SEQ ID NO: 3563129 - DNA, 25 bp, Homo sapien
tgaccgcgcagtagatgaagatcac

SEQ ID NO: 3563130 - DNA, 25 bp, Homo sapien
cttccgccccggtgcccgctcgcac

SEQ ID NO: 3563131 - DNA, 25 bp, Homo sapien
ccttccgccccggtgcccgctcgca

SEQ ID NO: 3563132 - DNA, 25 bp, Homo sapien
gcacgaagaagatggcgctggagac

SEQ ID NO: 3563133 - DNA, 25 bp, Homo sapien
caggaagcccggcacgaagaagatg

SEQ ID NO: 3563134 - DNA, 25 bp, Homo sapien
aacaacaggaagcccggcacgaaga

SEQ ID NO: 3563135 - DNA, 25 bp, Homo sapien
agcccggcacgaagaagatggcgct

SEQ ID NO: 3563136 - DNA, 25 bp, Homo sapien
cgggctgccgctgactgcccgggca

SEQ ID NO: 3563137 - DNA, 25 bp, Homo sapien
gggctgccgctgactgcccgggcaa

SEQ ID NO: 3563138 - DNA, 25 bp, Homo sapien
gaccagagcccggtcagggcgaggg

SEQ ID NO: 3563139 - DNA, 25 bp, Homo sapien
gcggaggcttcgaggccttccgggc

SEQ ID NO: 3563140 - DNA, 25 bp, Homo sapien
ggagccgtgtactgccgggaggtgg

SEQ ID NO: 3563141 - DNA, 25 bp, Homo sapien
cgtggacccgtggacacaagacagg

SEQ ID NO: 3563142 - DNA, 25 bp, Homo sapien
tgaaaaggagccgtgtactgccggg

SEQ ID NO: 3563143 - DNA, 25 bp, Homo sapien
ggagggcttgccgtggacccgtgga

SEQ ID NO: 3563144 - DNA, 25 bp, Homo sapien
ctgtgggggcgggagggtcgctcac

SEQ ID NO: 3563145 - DNA, 25 bp, Homo sapien
cgcctccagtcccacgccgaccagg

SEQ ID NO: 3563146 - DNA, 25 bp, Homo sapien
gtcgcctccagtcccacgccgacca

SEQ ID NO: 3563147 - DNA, 25 bp, Homo sapien
gcctccagtcccacgccgaccagga

SEQ ID NO: 3563148 - DNA, 25 bp, Homo sapien
gggtcgcctccagtcccacgccgac

SEQ ID NO: 3563149 - DNA, 25 bp, Homo sapien
tgcacacagacggagccgcgggggt

SEQ ID NO: 3563150 - DNA, 25 bp, Homo sapien
gaaggtgccctaggcagagaccctc

SEQ ID NO: 3563151 - DNA, 25 bp, Homo sapien
gctgaaggtgccctaggcagagacc

SEQ ID NO: 3563152 - DNA, 25 bp, Homo sapien
ctgagctgaaggtgccctaggcaga

SEQ ID NO: 3563153 - DNA, 25 bp, Homo sapien
cctgggtccccagttagaagagtga

SEQ ID NO: 3563154 - DNA, 25 bp, Homo sapien
tatggaacacctactgcgtgcctgg

SEQ ID NO: 3563155 - DNA, 25 bp, Homo sapien
tggtactgggaattccgccctgaag

SEQ ID NO: 3563156 - DNA, 25 bp, Homo sapien
catggcccgtccttagtggaggaac

SEQ ID NO: 3563157 - DNA, 25 bp, Homo sapien
tctttgcagtgataagccaggttcc

SEQ ID NO: 3563158 - DNA, 25 bp, Homo sapien
tctaccccaaagaacgaggtgcctg

SEQ ID NO: 3563159 - DNA, 25 bp, Homo sapien
tctgggcaccacctcacttgtagga

SEQ ID NO: 3563160 - DNA, 25 bp, Homo sapien
tacaaaggccctctaaggcgctctg

SEQ ID NO: 3563161 - DNA, 25 bp, Homo sapien
tgtaaaatgggagtgtgatgatggc

SEQ ID NO: 3563162 - DNA, 25 bp, Homo sapien
cctgtacaaaaggagggcagagcct

SEQ ID NO: 3563163 - DNA, 25 bp, Homo sapien
aaatgggagtgtgatgatggcagcc

SEQ ID NO: 3563164 - DNA, 25 bp, Homo sapien
gagcctgtacaaaaggagggcagag

SEQ ID NO: 3563165 - DNA, 25 bp, Homo sapien
gaggccagcaccactcggcggttct

SEQ ID NO: 3563166 - DNA, 25 bp, Homo sapien
cttctggatcaaagggtgttgggtc

SEQ ID NO: 3563167 - DNA, 25 bp, Homo sapien
cactcggcggttcttctggatcaaa

SEQ ID NO: 3563168 - DNA, 25 bp, Homo sapien
ttctggatcaaagggtgttgggtcc

SEQ ID NO: 3563169 - DNA, 25 bp, Homo sapien
tgggggcttaggcgggcaggctcac

SEQ ID NO: 3563170 - DNA, 25 bp, Homo sapien
tgatggtgctgaaggaccactggga

SEQ ID NO: 3563171 - DNA, 25 bp, Homo sapien
ttgtaggagcgctgggtgctgctgc

SEQ ID NO: 3563172 - DNA, 25 bp, Homo sapien
ctgcagcaggtgttgtaggagcgct

SEQ ID NO: 3563173 - DNA, 25 bp, Homo sapien
caggtgttgtaggagcgctgggtgc

SEQ ID NO: 3563174 - DNA, 25 bp, Homo sapien
ctgcggatggaagttcggctggaat

SEQ ID NO: 3563175 - DNA, 25 bp, Homo sapien
gcggatggaagttcggctggaatcc

SEQ ID NO: 3563176 - DNA, 25 bp, Homo sapien
tgcggatggaagttcggctggaatc

SEQ ID NO: 3563177 - DNA, 25 bp, Homo sapien
agctgggcactagggtagggtgacc

SEQ ID NO: 3563178 - DNA, 25 bp, Homo sapien
ctgaaagaggtgagtacagctgggc

SEQ ID NO: 3563179 - DNA, 25 bp, Homo sapien
aagaggtgagtacagctgggcacta

SEQ ID NO: 3563180 - DNA, 25 bp, Homo sapien
aaagaggtgagtacagctgggcact

SEQ ID NO: 3563181 - DNA, 25 bp, Homo sapien
cgactcccccatccggctccggaga

SEQ ID NO: 3563182 - DNA, 25 bp, Homo sapien
gccgactcccccatccggctccgga

SEQ ID NO: 3563183 - DNA, 25 bp, Homo sapien
actcccccatccggctccggagagg

SEQ ID NO: 3563184 - DNA, 25 bp, Homo sapien
ccgactcccccatccggctccggag

SEQ ID NO: 3563185 - DNA, 25 bp, Homo sapien
cttcctcactccctcccgggaagag

SEQ ID NO: 3563186 - DNA, 25 bp, Homo sapien
ctgttgcagaacacaggtctcaggg

SEQ ID NO: 3563187 - DNA, 25 bp, Homo sapien
aacacaggtctcaggggggttgctg

SEQ ID NO: 3563188 - DNA, 25 bp, Homo sapien
ccgggaagagaaaagcaggcctaca

SEQ ID NO: 3563189 - DNA, 25 bp, Homo sapien
cgaaccgggcccgacgctcgaagtg

SEQ ID NO: 3563190 - DNA, 25 bp, Homo sapien
tagcgcagccgggactgcttgtcct

SEQ ID NO: 3563191 - DNA, 25 bp, Homo sapien
gggactgcttgtcctcgtcagccac

SEQ ID NO: 3563192 - DNA, 25 bp, Homo sapien
agtgcagcggcccaaagcgcgcgac

SEQ ID NO: 3563193 - DNA, 25 bp, Homo sapien
atctgcgcccacacacccagcgtcg

SEQ ID NO: 3563194 - DNA, 25 bp, Homo sapien
gccatctgcgcccacacacccagcg

SEQ ID NO: 3563195 - DNA, 25 bp, Homo sapien
gcccgctcaggcgccgtgcgccgcc

SEQ ID NO: 3563196 - DNA, 25 bp, Homo sapien
cacacacccagcgtcgccgctgccc

SEQ ID NO: 3563197 - DNA, 25 bp, Homo sapien
gagagccgggtcatcacctggcatt

SEQ ID NO: 3563198 - DNA, 25 bp, Homo sapien
ggtgtccctgttagagaaattacga

SEQ ID NO: 3563199 - DNA, 25 bp, Homo sapien
caagctaggtagctgggcacctgag

SEQ ID NO: 3563200 - DNA, 25 bp, Homo sapien
tcaccaaggaagtgtctctcgctgg

SEQ ID NO: 3563201 - DNA, 25 bp, Homo sapien
gtcaataaataacccaggtccaggc

SEQ ID NO: 3563202 - DNA, 25 bp, Homo sapien
ggccccttgggtgtgtcaataaata

SEQ ID NO: 3563203 - DNA, 25 bp, Homo sapien
gcgctgggtcccctcatatgaaagg

SEQ ID NO: 3563204 - DNA, 25 bp, Homo sapien
tatacacactggaaaagcctctgcg

SEQ ID NO: 3563205 - DNA, 25 bp, Homo sapien
aggcatgcgagtgcgagcccgcttc

SEQ ID NO: 3563206 - DNA, 25 bp, Homo sapien
ggtgggccacatagccgtctgacag

SEQ ID NO: 3563207 - DNA, 25 bp, Homo sapien
ttcaggctgatgctccgtgctttgc

SEQ ID NO: 3563208 - DNA, 25 bp, Homo sapien
ctggctctgtttgcgcaggaagtcc

SEQ ID NO: 3563209 - DNA, 25 bp, Homo sapien
tggcactgcgcctgtagcttccgca

SEQ ID NO: 3563210 - DNA, 25 bp, Homo sapien
ccataaccggccacgatgttcagtt

SEQ ID NO: 3563211 - DNA, 25 bp, Homo sapien
ccagcgccgcgtatacagccacatc

SEQ ID NO: 3563212 - DNA, 25 bp, Homo sapien
gcacggcccacgatgtaggtctggc

SEQ ID NO: 3563213 - DNA, 25 bp, Homo sapien
gggagatgccaatcagccgccccag

SEQ ID NO: 3563214 - DNA, 25 bp, Homo sapien
ctgtggcgggagatgccaatcagcc

SEQ ID NO: 3563215 - DNA, 25 bp, Homo sapien
gtggcgggagatgccaatcagccgc

SEQ ID NO: 3563216 - DNA, 25 bp, Homo sapien
ggcgggagatgccaatcagccgccc

SEQ ID NO: 3563217 - DNA, 25 bp, Homo sapien
tacacgatcaggtagccggagtcct

SEQ ID NO: 3563218 - DNA, 25 bp, Homo sapien
gaaacattgccttctggcgtagtgg

SEQ ID NO: 3563219 - DNA, 25 bp, Homo sapien
aagttgtgctgcgacagccatgcca

SEQ ID NO: 3563220 - DNA, 25 bp, Homo sapien
ggccggcctgtgacatacacgatca

SEQ ID NO: 3563221 - DNA, 25 bp, Homo sapien
aagaccacagcctccgtgccgcggg

SEQ ID NO: 3563222 - DNA, 25 bp, Homo sapien
ctggcggtgaaggagccgtcgatgc

SEQ ID NO: 3563223 - DNA, 25 bp, Homo sapien
ggtgaaggagccgtcgatgctgaag

SEQ ID NO: 3563224 - DNA, 25 bp, Homo sapien
gcattcggcataggtgtggtcgccc

SEQ ID NO: 3563225 - DNA, 25 bp, Homo sapien
ctcccgcagaggcccggccagccgc

SEQ ID NO: 3563226 - DNA, 25 bp, Homo sapien
aggcctggcggagccctcccgcaga

SEQ ID NO: 3563227 - DNA, 25 bp, Homo sapien
cggcccacggggcggggcgtgagtg

SEQ ID NO: 3563228 - DNA, 25 bp, Homo sapien
gcggggcgaggcctggcggagccct

SEQ ID NO: 3563229 - DNA, 25 bp, Homo sapien
acttcggtgccaaagtggatccact

SEQ ID NO: 3563230 - DNA, 25 bp, Homo sapien
accaatgcccagcgcgcgttctggg

SEQ ID NO: 3563231 - DNA, 25 bp, Homo sapien
gaggcggcccgagctattggtgact

SEQ ID NO: 3563232 - DNA, 25 bp, Homo sapien
tgcgcacggggtagacaccaatgcc

SEQ ID NO: 3563233 - DNA, 25 bp, Homo sapien
ggccctcgcacaccaccgtgtcgct

SEQ ID NO: 3563234 - DNA, 25 bp, Homo sapien
ttctctccagtgagcgtgacgacgt

SEQ ID NO: 3563235 - DNA, 25 bp, Homo sapien
cgctcgcccggtggttggaagtgac

SEQ ID NO: 3563236 - DNA, 25 bp, Homo sapien
gggcccgtacatgaagcgcccgctt

SEQ ID NO: 3563237 - DNA, 25 bp, Homo sapien
tcgcattccgccagctgtggccgct

SEQ ID NO: 3563238 - DNA, 25 bp, Homo sapien
ccgggctgtagatggacggctcctc

SEQ ID NO: 3563239 - DNA, 25 bp, Homo sapien
tcttgacctgcgtgcgttttcgctg

SEQ ID NO: 3563240 - DNA, 25 bp, Homo sapien
agctgtggccgctccttctcgatca

SEQ ID NO: 3563241 - DNA, 25 bp, Homo sapien
gcgagtagtcgatccgcttggtccc

SEQ ID NO: 3563242 - DNA, 25 bp, Homo sapien
ctggcgcaggatgaacgccaccacg

SEQ ID NO: 3563243 - DNA, 25 bp, Homo sapien
gggcagcgtgacggtgggaaaggcg

SEQ ID NO: 3563244 - DNA, 25 bp, Homo sapien
cacgtcggcggactcccagtagctg

SEQ ID NO: 3563245 - DNA, 25 bp, Homo sapien
gcgcggccatggcagcgagtcagga

SEQ ID NO: 3563246 - DNA, 25 bp, Homo sapien
gcggccatggcagcgagtcaggatg

SEQ ID NO: 3563247 - DNA, 25 bp, Homo sapien
ggccatggcagcgagtcaggatggc

SEQ ID NO: 3563248 - DNA, 25 bp, Homo sapien
ctgcgcggccatggcagcgagtcag

SEQ ID NO: 3563249 - DNA, 25 bp, Homo sapien
aagaggctggagtgcgtctgcagag

SEQ ID NO: 3563250 - DNA, 25 bp, Homo sapien
ccgctagtagaggtgggtgttgagg

SEQ ID NO: 3563251 - DNA, 25 bp, Homo sapien
ccagaaggcaccgctagtagaggtg

SEQ ID NO: 3563252 - DNA, 25 bp, Homo sapien
tcttaaccacctcactggtggtgct

SEQ ID NO: 3563253 - DNA, 25 bp, Homo sapien
aacttctggtagcggggcacggtca

SEQ ID NO: 3563254 - DNA, 25 bp, Homo sapien
gcgcaggggtcagccgcgtggaaga

SEQ ID NO: 3563255 - DNA, 25 bp, Homo sapien
aagaggttgtagatctgttcacagg

SEQ ID NO: 3563256 - DNA, 25 bp, Homo sapien
ggccagcaggggctcgaggcgtgag

SEQ ID NO: 3563257 - DNA, 25 bp, Homo sapien
aagacagagaaagattgtggggtca

SEQ ID NO: 3563258 - DNA, 25 bp, Homo sapien
agacagagaaagattgtggggtcag

SEQ ID NO: 3563259 - DNA, 25 bp, Homo sapien
gctttgggagactcacccttggcga

SEQ ID NO: 3563260 - DNA, 25 bp, Homo sapien
cactccctgggaagtcagtagggcc

SEQ ID NO: 3563261 - DNA, 25 bp, Homo sapien
accctgatgtctggtgtgaccccga

SEQ ID NO: 3563262 - DNA, 25 bp, Homo sapien
tagtgcagaacatcccacgggtgtg

SEQ ID NO: 3563263 - DNA, 25 bp, Homo sapien
gggcagaaggccgtgcttgcccgcc

SEQ ID NO: 3563264 - DNA, 25 bp, Homo sapien
gcatcacagttttgcgcagagccag

SEQ ID NO: 3563265 - DNA, 25 bp, Homo sapien
cgtcaggtgcctcggaactggcagc

SEQ ID NO: 3563266 - DNA, 25 bp, Homo sapien
aactggcagcgggtgggcagaaggc

SEQ ID NO: 3563267 - DNA, 25 bp, Homo sapien
agggttctgggctgccccgacccag

SEQ ID NO: 3563268 - DNA, 25 bp, Homo sapien
cgggctcaggactggccatgtcgct

SEQ ID NO: 3563269 - DNA, 25 bp, Homo sapien
caaactccggagagagcagctcatt

SEQ ID NO: 3563270 - DNA, 25 bp, Homo sapien
gttctgagagccctcgggctcagga

SEQ ID NO: 3563271 - DNA, 25 bp, Homo sapien
cggtgcccgcgttagcactgtggca

SEQ ID NO: 3563272 - DNA, 25 bp, Homo sapien
cccggtgcccgcgttagcactgtgg

SEQ ID NO: 3563273 - DNA, 25 bp, Homo sapien
ccgcgttagcactgtggcagagtgc

SEQ ID NO: 3563274 - DNA, 25 bp, Homo sapien
gcccgcgttagcactgtggcagagt

SEQ ID NO: 3563275 - DNA, 25 bp, Homo sapien
aagccggcaccctcaggtgagcgca

SEQ ID NO: 3563276 - DNA, 25 bp, Homo sapien
tccccatcgtggctgtaagggctca

SEQ ID NO: 3563277 - DNA, 25 bp, Homo sapien
tcttgggagcgagacaggctgtccc

SEQ ID NO: 3563278 - DNA, 25 bp, Homo sapien
taggcctggttggtgcgggcaatga

SEQ ID NO: 3563279 - DNA, 25 bp, Homo sapien
agccattctccagaacaggtccagc

SEQ ID NO: 3563280 - DNA, 25 bp, Homo sapien
agccatgccagtgaccgacccaggt

SEQ ID NO: 3563281 - DNA, 25 bp, Homo sapien
ctggcctgatcctacgagttccctg

SEQ ID NO: 3563282 - DNA, 25 bp, Homo sapien
tcctctgtggggagcgttagcccca

SEQ ID NO: 3563283 - DNA, 25 bp, Homo sapien
aggatgttgccgctgtgcaggataa

SEQ ID NO: 3563284 - DNA, 25 bp, Homo sapien
tggacagggcaccagtcgcagcgcc

SEQ ID NO: 3563285 - DNA, 25 bp, Homo sapien
gcctcgaaggcggagctcagcgtct

SEQ ID NO: 3563286 - DNA, 25 bp, Homo sapien
cttggagttggcgtctccagggcct

SEQ ID NO: 3563287 - DNA, 25 bp, Homo sapien
tgcctttagctgcctcggctccagg

SEQ ID NO: 3563288 - DNA, 25 bp, Homo sapien
atgcctttagctgcctcggctccag

SEQ ID NO: 3563289 - DNA, 25 bp, Homo sapien
cctttagctgcctcggctccaggct

SEQ ID NO: 3563290 - DNA, 25 bp, Homo sapien
gcctttagctgcctcggctccaggc

SEQ ID NO: 3563291 - DNA, 25 bp, Homo sapien
gccggtgtcctaggcggtatcttta

SEQ ID NO: 3563292 - DNA, 25 bp, Homo sapien
ccattaaactcatgacctgctgtac

SEQ ID NO: 3563293 - DNA, 25 bp, Homo sapien
tacacgggtgctgggggccggtgtc

SEQ ID NO: 3563294 - DNA, 25 bp, Homo sapien
tgctgggggccggtgtcctaggcgg

SEQ ID NO: 3563295 - DNA, 25 bp, Homo sapien
agttccacttggtcatctccttggg

SEQ ID NO: 3563296 - DNA, 25 bp, Homo sapien
tctgcctccactggggaggcaaagg

SEQ ID NO: 3563297 - DNA, 25 bp, Homo sapien
aggcaaaggcatcaatgaagtcatt

SEQ ID NO: 3563298 - DNA, 25 bp, Homo sapien
tccttggggaagacctcctcactgt

SEQ ID NO: 3563299 - DNA, 25 bp, Homo sapien
tctgcatgcgccactcagacaagct

SEQ ID NO: 3563300 - DNA, 25 bp, Homo sapien
aagaactcttcctcggagctgttct

SEQ ID NO: 3563301 - DNA, 25 bp, Homo sapien
gagtctcgggcaatgttctgcatgc

SEQ ID NO: 3563302 - DNA, 25 bp, Homo sapien
tgttctcagagtctcgggcaatgtt

SEQ ID NO: 3563303 - DNA, 25 bp, Homo sapien
tgccagtgttgctggccgcagaccg

SEQ ID NO: 3563304 - DNA, 25 bp, Homo sapien
cagaccgggcctcggtgctcggttt

SEQ ID NO: 3563305 - DNA, 25 bp, Homo sapien
ccatgttgggatgagtaggaggaac

SEQ ID NO: 3563306 - DNA, 25 bp, Homo sapien
ttggccatgcgctgggccagcatgc

SEQ ID NO: 3563307 - DNA, 25 bp, Homo sapien
tccgtgcccagtcatcagacagtgg

SEQ ID NO: 3563308 - DNA, 25 bp, Homo sapien
tgcatcccgcacgatgtcgatggtg

SEQ ID NO: 3563309 - DNA, 25 bp, Homo sapien
gctcgatcttggcttgcatgcccca

SEQ ID NO: 3563310 - DNA, 25 bp, Homo sapien
gtcttgaccgagtgataaagccggg

SEQ ID NO: 3563311 - DNA, 25 bp, Homo sapien
ccctcttgggactggatgacagttc

SEQ ID NO: 3563312 - DNA, 25 bp, Homo sapien
ttgggactggatgacagttcccgtc

SEQ ID NO: 3563313 - DNA, 25 bp, Homo sapien
gagggagttcggcaagcattgagca

SEQ ID NO: 3563314 - DNA, 25 bp, Homo sapien
gttcggcaagcattgagcagcgcca

SEQ ID NO: 3563315 - DNA, 25 bp, Homo sapien
caggagcctgagaggggcgccaggg

SEQ ID NO: 3563316 - DNA, 25 bp, Homo sapien
gtccccccatagctccaggcctcac

SEQ ID NO: 3563317 - DNA, 25 bp, Homo sapien
aggagcctgagaggggcgccagggt

SEQ ID NO: 3563318 - DNA, 25 bp, Homo sapien
gccagggtccccccatagctccagg

SEQ ID NO: 3563319 - DNA, 25 bp, Homo sapien
tcctctcggccccgctcaggttgaa

SEQ ID NO: 3563320 - DNA, 25 bp, Homo sapien
gttgaagacgtttggctgctgcccc

SEQ ID NO: 3563321 - DNA, 25 bp, Homo sapien
ccaggatgcgctgtctcctctcggc

SEQ ID NO: 3563322 - DNA, 25 bp, Homo sapien
ctcaggttgaagacgtttggctgct

SEQ ID NO: 3563323 - DNA, 25 bp, Homo sapien
agtgcccggaaccagcctgggatgt

SEQ ID NO: 3563324 - DNA, 25 bp, Homo sapien
tgtagggccggttggccaggatctc

SEQ ID NO: 3563325 - DNA, 25 bp, Homo sapien
gagcccacgtggtacaccttgtgtg

SEQ ID NO: 3563326 - DNA, 25 bp, Homo sapien
accttgtgtgtgtattgcccgctgc

SEQ ID NO: 3563327 - DNA, 25 bp, Homo sapien
ggcagcagaatgtggtattccttga

SEQ ID NO: 3563328 - DNA, 25 bp, Homo sapien
ctggtactcgtccaggctcatgggc

SEQ ID NO: 3563329 - DNA, 25 bp, Homo sapien
cagcagaatgtggtattccttgatg

SEQ ID NO: 3563330 - DNA, 25 bp, Homo sapien
cgtccaggctcatgggcagcagaat

SEQ ID NO: 3563331 - DNA, 25 bp, Homo sapien
cggcgggccgcgcgcggcctccgct

SEQ ID NO: 3563332 - DNA, 25 bp, Homo sapien
gggccgcgcgcggcctccgctcctc

SEQ ID NO: 3563333 - DNA, 25 bp, Homo sapien
cgggccgcgcgcggcctccgctcct

SEQ ID NO: 3563334 - DNA, 25 bp, Homo sapien
ctgaaggcgctcggcgggccgcgcg

SEQ ID NO: 3563335 - DNA, 25 bp, Homo sapien
gcagggcacggcgcgacagtcagtg

SEQ ID NO: 3563336 - DNA, 25 bp, Homo sapien
agggcacggcgcgacagtcagtgcg

SEQ ID NO: 3563337 - DNA, 25 bp, Homo sapien
ggcacggcgcgacagtcagtgcggg

SEQ ID NO: 3563338 - DNA, 25 bp, Homo sapien
gcgcagggcacggcgcgacagtcag

SEQ ID NO: 3563339 - DNA, 25 bp, Homo sapien
cgggcccgccacgagggaggcagag

SEQ ID NO: 3563340 - DNA, 25 bp, Homo sapien
ggccgagggactcaggccacgggac

SEQ ID NO: 3563341 - DNA, 25 bp, Homo sapien
gggcgggagggccacctcacctctc

SEQ ID NO: 3563342 - DNA, 25 bp, Homo sapien
gcagaggcgagcctagcaccgccgc

SEQ ID NO: 3563343 - DNA, 25 bp, Homo sapien
tctcggacgtccacctagagctttg

SEQ ID NO: 3563344 - DNA, 25 bp, Homo sapien
tttgttccccgagtgtctctgcgcg

SEQ ID NO: 3563345 - DNA, 25 bp, Homo sapien
gagtggcccagtgcgcccagcatct

SEQ ID NO: 3563346 - DNA, 25 bp, Homo sapien
tctctgcgcggagtggcccagtgcg

SEQ ID NO: 3563347 - DNA, 25 bp, Homo sapien
gcttgaggcgggcgcccctcaccca

SEQ ID NO: 3563348 - DNA, 25 bp, Homo sapien
ggcccatggccccgaccttcctctc

SEQ ID NO: 3563349 - DNA, 25 bp, Homo sapien
gcctcgggttccagcggtggccgga

SEQ ID NO: 3563350 - DNA, 25 bp, Homo sapien
ctctagcttgaggcgggcgcccctc

SEQ ID NO: 3563351 - DNA, 25 bp, Homo sapien
atcaccgccaatccagaggaagcgc

SEQ ID NO: 3563352 - DNA, 25 bp, Homo sapien
aggctgcccacagcgccaagggctg

SEQ ID NO: 3563353 - DNA, 25 bp, Homo sapien
tgcccacagcgccaagggctgtgga

SEQ ID NO: 3563354 - DNA, 25 bp, Homo sapien
tgccaggcatcaccgccaatccaga

SEQ ID NO: 3563355 - DNA, 25 bp, Homo sapien
ccaggtcccaccaaaggctgatggc

SEQ ID NO: 3563356 - DNA, 25 bp, Homo sapien
cccaggtcccaccaaaggctgatgg

SEQ ID NO: 3563357 - DNA, 25 bp, Homo sapien
tgagcggtaggggccacaaaagttc

SEQ ID NO: 3563358 - DNA, 25 bp, Homo sapien
tgctctgcagtggccggataggtcc

SEQ ID NO: 3563359 - DNA, 25 bp, Homo sapien
ccggataggtccagacgctgaggcc

SEQ ID NO: 3563360 - DNA, 25 bp, Homo sapien
gtgggggggtgtccttagtgctgcc

SEQ ID NO: 3563361 - DNA, 25 bp, Homo sapien
gcactctctgactagggcccgggca

SEQ ID NO: 3563362 - DNA, 25 bp, Homo sapien
cactctctgactagggcccgggcat

SEQ ID NO: 3563363 - DNA, 25 bp, Homo sapien
aatactggacatcctctaggcttgg

SEQ ID NO: 3563364 - DNA, 25 bp, Homo sapien
tctggtagtaatactggacatcctc

SEQ ID NO: 3563365 - DNA, 25 bp, Homo sapien
ggctcaggtggcctccagatgtcct

SEQ ID NO: 3563366 - DNA, 25 bp, Homo sapien
agtccagtgtcggtttcctgagcag

SEQ ID NO: 3563367 - DNA, 25 bp, Homo sapien
ctgacagcaggtccgtgtaggtgct

SEQ ID NO: 3563368 - DNA, 25 bp, Homo sapien
ccagcataggtaggccggatctctt

SEQ ID NO: 3563369 - DNA, 25 bp, Homo sapien
tgcccatctcctctatgactgacag

SEQ ID NO: 3563370 - DNA, 25 bp, Homo sapien
catctcctctatgactgacagcagg

SEQ ID NO: 3563371 - DNA, 25 bp, Homo sapien
gactccagtccgcatccataagcaa

SEQ ID NO: 3563372 - DNA, 25 bp, Homo sapien
tccgcatccataagcaaggctttgg

SEQ ID NO: 3563373 - DNA, 25 bp, Homo sapien
catccataagcaaggctttggcccc

SEQ ID NO: 3563374 - DNA, 25 bp, Homo sapien
ggagggggactccagtccgcatcca

SEQ ID NO: 3563375 - DNA, 25 bp, Homo sapien
catggaaggcggtccaaagtcgtta

SEQ ID NO: 3563376 - DNA, 25 bp, Homo sapien
ctgcacgtagcccatggaaggcggt

SEQ ID NO: 3563377 - DNA, 25 bp, Homo sapien
tagcccatggaaggcggtccaaagt

SEQ ID NO: 3563378 - DNA, 25 bp, Homo sapien
acgtagcccatggaaggcggtccaa

SEQ ID NO: 3563379 - DNA, 25 bp, Homo sapien
gagcccgacggcgacgggacgcttc

SEQ ID NO: 3563380 - DNA, 25 bp, Homo sapien
tgagcccgacggcgacgggacgctt

SEQ ID NO: 3563381 - DNA, 25 bp, Homo sapien
ctgagcccgacggcgacgggacgct

SEQ ID NO: 3563382 - DNA, 25 bp, Homo sapien
ttcgcccgattccctccaaaggatg

SEQ ID NO: 3563383 - DNA, 25 bp, Homo sapien
gatgcttcattccatgctgatcaac

SEQ ID NO: 3563384 - DNA, 25 bp, Homo sapien
caacaggcgcgagtaagaggtcagc

SEQ ID NO: 3563385 - DNA, 25 bp, Homo sapien
agcaacaggcgcgagtaagaggtca

SEQ ID NO: 3563386 - DNA, 25 bp, Homo sapien
gaactcaggccgtcttctcttcgag

SEQ ID NO: 3563387 - DNA, 25 bp, Homo sapien
ctgaggctcagcgagggtaggcggc

SEQ ID NO: 3563388 - DNA, 25 bp, Homo sapien
cttcgagacctcgaccgcccggcag

SEQ ID NO: 3563389 - DNA, 25 bp, Homo sapien
caggcccagtattgcagaactcagg

SEQ ID NO: 3563390 - DNA, 25 bp, Homo sapien
gagcaggggcgatgggtttgtagga

SEQ ID NO: 3563391 - DNA, 25 bp, Homo sapien
caggggcgatgggtttgtaggacat

SEQ ID NO: 3563392 - DNA, 25 bp, Homo sapien
gggagcaggggcgatgggtttgtag

SEQ ID NO: 3563393 - DNA, 25 bp, Homo sapien
agcaggggcgatgggtttgtaggac

SEQ ID NO: 3563394 - DNA, 25 bp, Homo sapien
gggcgcggcggacgccagccggccg

SEQ ID NO: 3563395 - DNA, 25 bp, Homo sapien
ctgggcgcggcggacgccagccggc

SEQ ID NO: 3563396 - DNA, 25 bp, Homo sapien
cagccggccgctcctcgggggttgg

SEQ ID NO: 3563397 - DNA, 25 bp, Homo sapien
cgcggcggacgccagccggccgctc

SEQ ID NO: 3563398 - DNA, 25 bp, Homo sapien
ctggtaaatagaggtctggccggaa

SEQ ID NO: 3563399 - DNA, 25 bp, Homo sapien
gagcctccttattggccgagacctg

SEQ ID NO: 3563400 - DNA, 25 bp, Homo sapien
agcaggtcgcaaccgccgccgattg

SEQ ID NO: 3563401 - DNA, 25 bp, Homo sapien
tcactcccgattggtgcgcgaagat

SEQ ID NO: 3563402 - DNA, 25 bp, Homo sapien
gccctccgcaattggcgagttcgcg

SEQ ID NO: 3563403 - DNA, 25 bp, Homo sapien
gctctcaatccgattagtccccagg

SEQ ID NO: 3563404 - DNA, 25 bp, Homo sapien
ggccggcgcgctctcaatccgatta

SEQ ID NO: 3563405 - DNA, 25 bp, Homo sapien
tctgctccggattgggcggtggcca

SEQ ID NO: 3563406 - DNA, 25 bp, Homo sapien
cgggcgcgggcgctaccctcgcgcc

SEQ ID NO: 3563407 - DNA, 25 bp, Homo sapien
gcgcgggcgctaccctcgcgcctca

SEQ ID NO: 3563408 - DNA, 25 bp, Homo sapien
ctgggctgccggttcgcgccgaggg

SEQ ID NO: 3563409 - DNA, 25 bp, Homo sapien
ggctgggctgccggttcgcgccgag

SEQ ID NO: 3563410 - DNA, 25 bp, Homo sapien
tgcttcagacgtctgctccgctctg

SEQ ID NO: 3563411 - DNA, 25 bp, Homo sapien
ccagtttcggcccagcaggggttgc

SEQ ID NO: 3563412 - DNA, 25 bp, Homo sapien
ttgctgtcgcagctgccgtcgccgc

SEQ ID NO: 3563413 - DNA, 25 bp, Homo sapien
tgccaccggtgccttgcgcgcttct

SEQ ID NO: 3563414 - DNA, 25 bp, Homo sapien
ggccgaaggacgcagggctttgacg

SEQ ID NO: 3563415 - DNA, 25 bp, Homo sapien
gggccgaaggacgcagggctttgac

SEQ ID NO: 3563416 - DNA, 25 bp, Homo sapien
ctgggggccgaaggacgcagggctt

SEQ ID NO: 3563417 - DNA, 25 bp, Homo sapien
ggggccgaaggacgcagggctttga

SEQ ID NO: 3563418 - DNA, 25 bp, Homo sapien
ctgcgcatgcgcccgcccgaggcct

SEQ ID NO: 3563419 - DNA, 25 bp, Homo sapien
gcgcatgcgcccgcccgaggcctgc

SEQ ID NO: 3563420 - DNA, 25 bp, Homo sapien
gatctgcgcatgcgcccgcccgagg

SEQ ID NO: 3563421 - DNA, 25 bp, Homo sapien
atctgcgcatgcgcccgcccgaggc

SEQ ID NO: 3563422 - DNA, 25 bp, Homo sapien
gaaggtcaggggtcgttcgctccca

SEQ ID NO: 3563423 - DNA, 25 bp, Homo sapien
gggtcgttcgctcccagcaggcaga

SEQ ID NO: 3563424 - DNA, 25 bp, Homo sapien
gctgcagatgaggcttgcggcatag

SEQ ID NO: 3563425 - DNA, 25 bp, Homo sapien
tcaccccttcatgatgaggaaggtc

SEQ ID NO: 3563426 - DNA, 25 bp, Homo sapien
cttggagatattttattgtcagaga

SEQ ID NO: 3563427 - DNA, 25 bp, Homo sapien
tcaaggaacatgctggtgggcagag

SEQ ID NO: 3563428 - DNA, 25 bp, Homo sapien
ttgagtcctttatgctgcctccagc

SEQ ID NO: 3563429 - DNA, 25 bp, Homo sapien
ggtccccgctagaggcgatgggctt

SEQ ID NO: 3563430 - DNA, 25 bp, Homo sapien
gcagaggctgtggtccttgagtcct

SEQ ID NO: 3563431 - DNA, 25 bp, Homo sapien
ctgccaggacgaagccaaggttttg

SEQ ID NO: 3563432 - DNA, 25 bp, Homo sapien
tgccaggacgaagccaaggttttgg

SEQ ID NO: 3563433 - DNA, 25 bp, Homo sapien
ctgttctctggactgcgctaggagt

SEQ ID NO: 3563434 - DNA, 25 bp, Homo sapien
ggactgcgctaggagtgaggatcat

SEQ ID NO: 3563435 - DNA, 25 bp, Homo sapien
acgtcctggaggatctcgtccacct

SEQ ID NO: 3563436 - DNA, 25 bp, Homo sapien
tgcggccgtccccattggtgtcgaa

SEQ ID NO: 3563437 - DNA, 25 bp, Homo sapien
tcgaccagaccgtccccattgaggt

SEQ ID NO: 3563438 - DNA, 25 bp, Homo sapien
ccattgaggtccacgtcctggagga

SEQ ID NO: 3563439 - DNA, 25 bp, Homo sapien
cgtagctcccggacaccgatcatgt

SEQ ID NO: 3563440 - DNA, 25 bp, Homo sapien
cggacaccgatcatgtctgccgtct

SEQ ID NO: 3563441 - DNA, 25 bp, Homo sapien
agctcccggacaccgatcatgtctg

SEQ ID NO: 3563442 - DNA, 25 bp, Homo sapien
acaccgatcatgtctgccgtctctg

SEQ ID NO: 3563443 - DNA, 25 bp, Homo sapien
ctggactgcttggcttcatgggccc

SEQ ID NO: 3563444 - DNA, 25 bp, Homo sapien
ttggcttcatgggcccagcgggggc

SEQ ID NO: 3563445 - DNA, 25 bp, Homo sapien
gactgcttggcttcatgggcccagc

SEQ ID NO: 3563446 - DNA, 25 bp, Homo sapien
tgcttggcttcatgggcccagcggg

SEQ ID NO: 3563447 - DNA, 25 bp, Homo sapien
caatgtagccgtcccggtctcggtc

SEQ ID NO: 3563448 - DNA, 25 bp, Homo sapien
cggcagccaatgtagccgtcccggt

SEQ ID NO: 3563449 - DNA, 25 bp, Homo sapien
agctcccggcagccaatgtagccgt

SEQ ID NO: 3563450 - DNA, 25 bp, Homo sapien
gcagccaatgtagccgtcccggtct

SEQ ID NO: 3563451 - DNA, 25 bp, Homo sapien
tcaatctcctcgggccgcagctccc

SEQ ID NO: 3563452 - DNA, 25 bp, Homo sapien
tctcctcgggccgcagctcccggtc

SEQ ID NO: 3563453 - DNA, 25 bp, Homo sapien
cttcaatctcctcgggccgcagctc

SEQ ID NO: 3563454 - DNA, 25 bp, Homo sapien
aatctcctcgggccgcagctcccgg

SEQ ID NO: 3563455 - DNA, 25 bp, Homo sapien
tgctgggccgcaggaagatgcaggc

SEQ ID NO: 3563456 - DNA, 25 bp, Homo sapien
aggctgttgagcaccgagtagccct

SEQ ID NO: 3563457 - DNA, 25 bp, Homo sapien
ttgagcaccgagtagccctggacgc

SEQ ID NO: 3563458 - DNA, 25 bp, Homo sapien
accgagtagccctggacgcctggcg

SEQ ID NO: 3563459 - DNA, 25 bp, Homo sapien
ccttggtggggagccgagccactgc

SEQ ID NO: 3563460 - DNA, 25 bp, Homo sapien
tggtggggagccgagccactgcaag

SEQ ID NO: 3563461 - DNA, 25 bp, Homo sapien
agccccttggtggggagccgagcca

SEQ ID NO: 3563462 - DNA, 25 bp, Homo sapien
gggagccgagccactgcaaggggtc

SEQ ID NO: 3563463 - DNA, 25 bp, Homo sapien
cagctggacgggcagctgggggacc

SEQ ID NO: 3563464 - DNA, 25 bp, Homo sapien
atggggcagctggacgggcagctgg

SEQ ID NO: 3563465 - DNA, 25 bp, Homo sapien
gatggggcagctggacgggcagctg

SEQ ID NO: 3563466 - DNA, 25 bp, Homo sapien
cggcgccagggccgcttggcacagt

SEQ ID NO: 3563467 - DNA, 25 bp, Homo sapien
agggccgcttggcacagttccccat

SEQ ID NO: 3563468 - DNA, 25 bp, Homo sapien
gccagggccgcttggcacagttccc

SEQ ID NO: 3563469 - DNA, 25 bp, Homo sapien
gcgccagggccgcttggcacagttc

SEQ ID NO: 3563470 - DNA, 25 bp, Homo sapien
ggtgggcctcggcggatgctgctgc

SEQ ID NO: 3563471 - DNA, 25 bp, Homo sapien
gtgggcctcggcggatgctgctgcc

SEQ ID NO: 3563472 - DNA, 25 bp, Homo sapien
agcctgggagtactgccggggattt

SEQ ID NO: 3563473 - DNA, 25 bp, Homo sapien
tggactggtgccccgcccttggatg

SEQ ID NO: 3563474 - DNA, 25 bp, Homo sapien
gggtagccccaattgcttgcacttg

SEQ ID NO: 3563475 - DNA, 25 bp, Homo sapien
tagccccaattgcttgcacttggct

SEQ ID NO: 3563476 - DNA, 25 bp, Homo sapien
tcggggtagccccaattgcttgcac

SEQ ID NO: 3563477 - DNA, 25 bp, Homo sapien
aagctctcgtcgccgggtggctgct

SEQ ID NO: 3563478 - DNA, 25 bp, Homo sapien
cctcgagctcccggagaagctctcg

SEQ ID NO: 3563479 - DNA, 25 bp, Homo sapien
tcgagctcccggagaagctctcgtc

SEQ ID NO: 3563480 - DNA, 25 bp, Homo sapien
gagaagctctcgtcgccgggtggct

SEQ ID NO: 3563481 - DNA, 25 bp, Homo sapien
ttgtatcctccctagctccccgtgg

SEQ ID NO: 3563482 - DNA, 25 bp, Homo sapien
tgagggacgctgctccgtccggcct

SEQ ID NO: 3563483 - DNA, 25 bp, Homo sapien
ccataaactgggagagccccgtgtc

SEQ ID NO: 3563484 - DNA, 25 bp, Homo sapien
tgcgggagagtggtcttgtgggcag

SEQ ID NO: 3563485 - DNA, 25 bp, Homo sapien
taaactgaacgtcataagccttgtc

SEQ ID NO: 3563486 - DNA, 25 bp, Homo sapien
gctgcaaacaaggtcaggaacatgg

SEQ ID NO: 3563487 - DNA, 25 bp, Homo sapien
ccctggatgatgcagacgtgagcga

SEQ ID NO: 3563488 - DNA, 25 bp, Homo sapien
tgctcagatacagccggaagtctcc

SEQ ID NO: 3563489 - DNA, 25 bp, Homo sapien
tctgcacgaagcaatgggcactccg

SEQ ID NO: 3563490 - DNA, 25 bp, Homo sapien
tctgcaacaagtccggtgtcctctg

SEQ ID NO: 3563491 - DNA, 25 bp, Homo sapien
gatacaagtcccactgaggttacaa

SEQ ID NO: 3563492 - DNA, 25 bp, Homo sapien
gaggcatcttctaggtttgcaatgt

SEQ ID NO: 3563493 - DNA, 25 bp, Homo sapien
ggaacatcccctgacgctgaatgag

SEQ ID NO: 3563494 - DNA, 25 bp, Homo sapien
caggctggcatactacccgagagaa

SEQ ID NO: 3563495 - DNA, 25 bp, Homo sapien
gcacacagacggagaatacacacaa

SEQ ID NO: 3563496 - DNA, 25 bp, Homo sapien
ctttgctttgaaaccacaggctggc

SEQ ID NO: 3563497 - DNA, 25 bp, Homo sapien
ataccatcctgcgtcacctgggccg

SEQ ID NO: 3563498 - DNA, 25 bp, Homo sapien
aggacggagacctcaccctgtacca

SEQ ID NO: 3563499 - DNA, 25 bp, Homo sapien
cctgcgtcacctgggccgcaccctt

SEQ ID NO: 3563500 - DNA, 25 bp, Homo sapien
ccctgtaccagtccaataccatcct

SEQ ID NO: 3563501 - DNA, 25 bp, Homo sapien
gaggacctccgctgcaaatacatct

SEQ ID NO: 3563502 - DNA, 25 bp, Homo sapien
gacatggtgaatgacggcgtggagg

SEQ ID NO: 3563503 - DNA, 25 bp, Homo sapien
ctggtggacatggtgaatgacggcg

SEQ ID NO: 3563504 - DNA, 25 bp, Homo sapien
acggcgtggaggacctccgctgcaa

SEQ ID NO: 3563505 - DNA, 25 bp, Homo sapien
tgaaataattgggattggaaaccgc

SEQ ID NO: 3563506 - DNA, 25 bp, Homo sapien
taatctagggtctttgtcactccgg

SEQ ID NO: 3563507 - DNA, 25 bp, Homo sapien
ccaaccagccatgaggaagcaggtc

SEQ ID NO: 3563508 - DNA, 25 bp, Homo sapien
tatttatacagcagttaagggcagc

SEQ ID NO: 3563509 - DNA, 25 bp, Homo sapien
ccttcttcgcttgagaagcctggca

SEQ ID NO: 3563510 - DNA, 25 bp, Homo sapien
gacagatcctctggtgcagatccag

SEQ ID NO: 3563511 - DNA, 25 bp, Homo sapien
tgggaggccccaaggatacattgtt

SEQ ID NO: 3563512 - DNA, 25 bp, Homo sapien
gatttgttgttaggagacctcaggc

SEQ ID NO: 3563513 - DNA, 25 bp, Homo sapien
gggcaggccactcagcaatgctgat

SEQ ID NO: 3563514 - DNA, 25 bp, Homo sapien
ctgggcaggccactcagcaatgctg

SEQ ID NO: 3563515 - DNA, 25 bp, Homo sapien
tgggcaggccactcagcaatgctga

SEQ ID NO: 3563516 - DNA, 25 bp, Homo sapien
aactgaaaaagacgagttcatcagg

SEQ ID NO: 3563517 - DNA, 25 bp, Homo sapien
gccaaaaaggtcactcttatcacga

SEQ ID NO: 3563518 - DNA, 25 bp, Homo sapien
ctcttatcacgaggaccacagcaga

SEQ ID NO: 3563519 - DNA, 25 bp, Homo sapien
gacgagttcatcaggcttccaagac

SEQ ID NO: 3563520 - DNA, 25 bp, Homo sapien
catgcgaggtttgtttacttgtggc

SEQ ID NO: 3563521 - DNA, 25 bp, Homo sapien
ccagcagaaggcgacatgcgaggtt

SEQ ID NO: 3563522 - DNA, 25 bp, Homo sapien
tttgtttacttgtggcatcaaaggc

SEQ ID NO: 3563523 - DNA, 25 bp, Homo sapien
agccggcgagctaaggagggagcga

SEQ ID NO: 3563524 - DNA, 25 bp, Homo sapien
tcttcggccgaggtaggaatataaa

SEQ ID NO: 3563525 - DNA, 25 bp, Homo sapien
cccgctccggcctggttgaagtagg

SEQ ID NO: 3563526 - DNA, 25 bp, Homo sapien
ccatttagggatgcgcacctcctga

SEQ ID NO: 3563527 - DNA, 25 bp, Homo sapien
gttttacagtcctcggcctggcgga

SEQ ID NO: 3563528 - DNA, 25 bp, Homo sapien
cctatcagagttcttatgaggatga

SEQ ID NO: 3563529 - DNA, 25 bp, Homo sapien
gaaacagagaaaatcgttcctatca

SEQ ID NO: 3563530 - DNA, 25 bp, Homo sapien
gtttggccaccgacagacctgggct

SEQ ID NO: 3563531 - DNA, 25 bp, Homo sapien
taaaatgcttccatccagtacctgc

SEQ ID NO: 3563532 - DNA, 25 bp, Homo sapien
aattacccgggcgtggtggtgagtg

SEQ ID NO: 3563533 - DNA, 25 bp, Homo sapien
attacccgggcgtggtggtgagtgc

SEQ ID NO: 3563534 - DNA, 25 bp, Homo sapien
ggcacaagaattatttgaacctggg

SEQ ID NO: 3563535 - DNA, 25 bp, Homo sapien
aggtggagtttgcagtgagctgaga

SEQ ID NO: 3563536 - DNA, 25 bp, Homo sapien
tgagctgagattacgccactgcact

SEQ ID NO: 3563537 - DNA, 25 bp, Homo sapien
aggcacaagaattatttgaacctgg

SEQ ID NO: 3563538 - DNA, 25 bp, Homo sapien
ttttgtggggacgtttcaggcagct

SEQ ID NO: 3563539 - DNA, 25 bp, Homo sapien
cacctctctgacttggggctgggca

SEQ ID NO: 3563540 - DNA, 25 bp, Homo sapien
ggctgggcatgagggtaaggcagcc

SEQ ID NO: 3563541 - DNA, 25 bp, Homo sapien
gagatgtttatttcggctccatgat

SEQ ID NO: 3563542 - DNA, 25 bp, Homo sapien
caggcttgctgtccagcgggtgcca

SEQ ID NO: 3563543 - DNA, 25 bp, Homo sapien
agcgggtgccacagcttcaggcggt

SEQ ID NO: 3563544 - DNA, 25 bp, Homo sapien
cagcttcaggcggtggtcactgtgg

SEQ ID NO: 3563545 - DNA, 25 bp, Homo sapien
agccagtgccgcaggcgctccccac

SEQ ID NO: 3563546 - DNA, 25 bp, Homo sapien
gccatgggggatgggtcaggaaccg

SEQ ID NO: 3563547 - DNA, 25 bp, Homo sapien
tgccatgggggatgggtcaggaacc

SEQ ID NO: 3563548 - DNA, 25 bp, Homo sapien
ctgccatgggggatgggtcaggaac

SEQ ID NO: 3563549 - DNA, 25 bp, Homo sapien
aggtcatagtcccacacagacacca

SEQ ID NO: 3563550 - DNA, 25 bp, Homo sapien
tgcctaggtcatagtcccacacaga

SEQ ID NO: 3563551 - DNA, 25 bp, Homo sapien
tcagccgtgcctaggtcatagtccc

SEQ ID NO: 3563552 - DNA, 25 bp, Homo sapien
agtcatcagccgtgcctaggtcata

SEQ ID NO: 3563553 - DNA, 25 bp, Homo sapien
cacggtagggtagtggctcagcatg

SEQ ID NO: 3563554 - DNA, 25 bp, Homo sapien
tctcccacagcttaagaagcaggcc

SEQ ID NO: 3563555 - DNA, 25 bp, Homo sapien
tcggctctcccacagcttaagaagc

SEQ ID NO: 3563556 - DNA, 25 bp, Homo sapien
gtagtggctcagcatgtcaaggcca

SEQ ID NO: 3563557 - DNA, 25 bp, Homo sapien
gtgaacactggttttgaatttagat

SEQ ID NO: 3563558 - DNA, 25 bp, Homo sapien
tcattgaactcggggttcagggtct

SEQ ID NO: 3563559 - DNA, 25 bp, Homo sapien
ttcttccctgcatttggatgcagga

SEQ ID NO: 3563560 - DNA, 25 bp, Homo sapien
cagggtcttcctgtgaacactggtt

SEQ ID NO: 3563561 - DNA, 25 bp, Homo sapien
agaggtgaggagtcaccgccttatc

SEQ ID NO: 3563562 - DNA, 25 bp, Homo sapien
ttggcgggttaggtgtggccctgga

SEQ ID NO: 3563563 - DNA, 25 bp, Homo sapien
ggtgaggagtcaccgccttatcctc

SEQ ID NO: 3563564 - DNA, 25 bp, Homo sapien
ctgatcggggaagattggcgggtta

SEQ ID NO: 3563565 - DNA, 25 bp, Homo sapien
cacagtgacagtaggacgtgcccac

SEQ ID NO: 3563566 - DNA, 25 bp, Homo sapien
gggtccgagtaaccattggcatcca

SEQ ID NO: 3563567 - DNA, 25 bp, Homo sapien
taccagcaagccaccctgctgagag

SEQ ID NO: 3563568 - DNA, 25 bp, Homo sapien
tgctgagagctgtagcacagtgaca

SEQ ID NO: 3563569 - DNA, 25 bp, Homo sapien
ccaggccacctctgtctccacctcc

SEQ ID NO: 3563570 - DNA, 25 bp, Homo sapien
ctcccaggccacctctgtctccacc

SEQ ID NO: 3563571 - DNA, 25 bp, Homo sapien
aggccacctctgtctccacctcctc

SEQ ID NO: 3563572 - DNA, 25 bp, Homo sapien
tcccaggccacctctgtctccacct

SEQ ID NO: 3563573 - DNA, 25 bp, Homo sapien
ggtcagccccaatccagtccaaagc

SEQ ID NO: 3563574 - DNA, 25 bp, Homo sapien
aggtcagccccaatccagtccaaag

SEQ ID NO: 3563575 - DNA, 25 bp, Homo sapien
gccccaatccagtccaaagcccacc

SEQ ID NO: 3563576 - DNA, 25 bp, Homo sapien
tcagccccaatccagtccaaagccc

SEQ ID NO: 3563577 - DNA, 25 bp, Homo sapien
gacatgccagtagctccctaagtgg

SEQ ID NO: 3563578 - DNA, 25 bp, Homo sapien
taagtggcctcccatccagtgtgtg

SEQ ID NO: 3563579 - DNA, 25 bp, Homo sapien
gagaggatgttcacttcccaaggag

SEQ ID NO: 3563580 - DNA, 25 bp, Homo sapien
aaggcgaggcttgctgaccacatga

SEQ ID NO: 3563581 - DNA, 25 bp, Homo sapien
gctgcagcaacttgtggctccacca

SEQ ID NO: 3563582 - DNA, 25 bp, Homo sapien
catgctccgggcgctgttgtgcttg

SEQ ID NO: 3563583 - DNA, 25 bp, Homo sapien
cagccacttgggcttagctaatcga

SEQ ID NO: 3563584 - DNA, 25 bp, Homo sapien
gcttagctaatcgacagctgcagca

SEQ ID NO: 3563585 - DNA, 25 bp, Homo sapien
aggtctttggtctctagtggcgtca

SEQ ID NO: 3563586 - DNA, 25 bp, Homo sapien
atctcgggccgtggacaaatgccgc

SEQ ID NO: 3563587 - DNA, 25 bp, Homo sapien
tgacaatgagggctcacagggccta

SEQ ID NO: 3563588 - DNA, 25 bp, Homo sapien
tgcctccggacaagggcctgtctag

SEQ ID NO: 3563589 - DNA, 25 bp, Homo sapien
tgtgtccaggctcttgggcctcttg

SEQ ID NO: 3563590 - DNA, 25 bp, Homo sapien
tgtccaggctcttgggcctcttggc

SEQ ID NO: 3563591 - DNA, 25 bp, Homo sapien
ctgtgtccaggctcttgggcctctt

SEQ ID NO: 3563592 - DNA, 25 bp, Homo sapien
gtgtccaggctcttgggcctcttgg

SEQ ID NO: 3563593 - DNA, 25 bp, Homo sapien
ccccatcacaggttcctggcctctg

SEQ ID NO: 3563594 - DNA, 25 bp, Homo sapien
cctggcctctgcagtcccacctgtg

SEQ ID NO: 3563595 - DNA, 25 bp, Homo sapien
gcccggtcatcctggccagatgctg

SEQ ID NO: 3563596 - DNA, 25 bp, Homo sapien
gcagagagcccggtcatcctggcca

SEQ ID NO: 3563597 - DNA, 25 bp, Homo sapien
tcctggctcggtttggcaccagctt

SEQ ID NO: 3563598 - DNA, 25 bp, Homo sapien
gctgtaccatgggtcctcgcacaca

SEQ ID NO: 3563599 - DNA, 25 bp, Homo sapien
gtgcctgccactgtcgctgtaccat

SEQ ID NO: 3563600 - DNA, 25 bp, Homo sapien
gtcaaagctcctggctcggtttggc

SEQ ID NO: 3563601 - DNA, 25 bp, Homo sapien
cctctgctccacccccaggtggccc

SEQ ID NO: 3563602 - DNA, 25 bp, Homo sapien
tctgctccacccccaggtggcccag

SEQ ID NO: 3563603 - DNA, 25 bp, Homo sapien
ctggccaggccagccccatccctct

SEQ ID NO: 3563604 - DNA, 25 bp, Homo sapien
caggtggcccaggccagatcctcac

SEQ ID NO: 3563605 - DNA, 25 bp, Homo sapien
gaagccgtgataggtgagtgtctcc

SEQ ID NO: 3563606 - DNA, 25 bp, Homo sapien
ggtgagtgtctcctcccagacaggt

SEQ ID NO: 3563607 - DNA, 25 bp, Homo sapien
cccgaacggtgtgtgtccgaagctg

SEQ ID NO: 3563608 - DNA, 25 bp, Homo sapien
tgcactcagcatcctggcgggtgaa

SEQ ID NO: 3563609 - DNA, 25 bp, Homo sapien
ctagggcccaagccgggtgggtcag

SEQ ID NO: 3563610 - DNA, 25 bp, Homo sapien
tatttgcacatcccagcaactgaga

SEQ ID NO: 3563611 - DNA, 25 bp, Homo sapien
aagcagagccaagtgggtgccccag

SEQ ID NO: 3563612 - DNA, 25 bp, Homo sapien
cccaggctgggtgttccaccagagg

SEQ ID NO: 3563613 - DNA, 25 bp, Homo sapien
caactgagacctaggccttgcagga

SEQ ID NO: 3563614 - DNA, 25 bp, Homo sapien
cagcagattggctttgacataggca

SEQ ID NO: 3563615 - DNA, 25 bp, Homo sapien
ggcatccgcggagcctgaggccaat

SEQ ID NO: 3563616 - DNA, 25 bp, Homo sapien
gcccctggcagcagattggctttga

SEQ ID NO: 3563617 - DNA, 25 bp, Homo sapien
tttgacataggcatccgcggagcct

SEQ ID NO: 3563618 - DNA, 25 bp, Homo sapien
tgggaacagacagtgggtatgagac

SEQ ID NO: 3563619 - DNA, 25 bp, Homo sapien
gggaacagacagtgggtatgagaca

SEQ ID NO: 3563620 - DNA, 25 bp, Homo sapien
ccgtgcaatgcagggcactgttgtc

SEQ ID NO: 3563621 - DNA, 25 bp, Homo sapien
cttggcacgatgagccgtgcaatgc

SEQ ID NO: 3563622 - DNA, 25 bp, Homo sapien
tgttgtccgcttcaaaaagaagtgt

SEQ ID NO: 3563623 - DNA, 25 bp, Homo sapien
aaaagaagtgtgaactccagggtgc

SEQ ID NO: 3563624 - DNA, 25 bp, Homo sapien
atggccagatggtagggacacccca

SEQ ID NO: 3563625 - DNA, 25 bp, Homo sapien
cctccatggccagatggtagggaca

SEQ ID NO: 3563626 - DNA, 25 bp, Homo sapien
cccatggcacgtgcttcctgccttg

SEQ ID NO: 3563627 - DNA, 25 bp, Homo sapien
aaggcagcgtcacctcctacctcag

SEQ ID NO: 3563628 - DNA, 25 bp, Homo sapien
agctcagggtgtccccctcttcccg

SEQ ID NO: 3563629 - DNA, 25 bp, Homo sapien
ctgggctgagctcagggtgtccccc

SEQ ID NO: 3563630 - DNA, 25 bp, Homo sapien
gctgagctcagggtgtccccctctt

SEQ ID NO: 3563631 - DNA, 25 bp, Homo sapien
gggctgagctcagggtgtccccctc

SEQ ID NO: 3563632 - DNA, 25 bp, Homo sapien
agcggacggcggacgccgctgcggg

SEQ ID NO: 3563633 - DNA, 25 bp, Homo sapien
agctggggtgcagagcggacggcgg

SEQ ID NO: 3563634 - DNA, 25 bp, Homo sapien
agtagtgggaaatgaggcggatggg

SEQ ID NO: 3563635 - DNA, 25 bp, Homo sapien
ggcccgggctcacatcgatggccat

SEQ ID NO: 3563636 - DNA, 25 bp, Homo sapien
ggcggtgggcggagactcagagaaa

SEQ ID NO: 3563637 - DNA, 25 bp, Homo sapien
tggggtgaagaagcatcgctgatac

SEQ ID NO: 3563638 - DNA, 25 bp, Homo sapien
aagaagcatcgctgataccatgcag

SEQ ID NO: 3563639 - DNA, 25 bp, Homo sapien
gggtgaagaagcatcgctgatacca

SEQ ID NO: 3563640 - DNA, 25 bp, Homo sapien
gtgaagaagcatcgctgataccatg

SEQ ID NO: 3563641 - DNA, 25 bp, Homo sapien
agtcctcagcctggagggttgtggc

SEQ ID NO: 3563642 - DNA, 25 bp, Homo sapien
gtcctcagcctggagggttgtggca

SEQ ID NO: 3563643 - DNA, 25 bp, Homo sapien
tgaggacagagcgcagggttgaggg

SEQ ID NO: 3563644 - DNA, 25 bp, Homo sapien
ggacagagcgcagggttgagggagg

SEQ ID NO: 3563645 - DNA, 25 bp, Homo sapien
cggcccttaccgctctgggagctac

SEQ ID NO: 3563646 - DNA, 25 bp, Homo sapien
ccggcccttaccgctctgggagcta

SEQ ID NO: 3563647 - DNA, 25 bp, Homo sapien
tcccggcccttaccgctctgggagc

SEQ ID NO: 3563648 - DNA, 25 bp, Homo sapien
gctcccggcccttaccgctctggga

SEQ ID NO: 3563649 - DNA, 25 bp, Homo sapien
ggcagtgggtacgcactcatgaggg

SEQ ID NO: 3563650 - DNA, 25 bp, Homo sapien
gcagtgggtacgcactcatgagggc

SEQ ID NO: 3563651 - DNA, 25 bp, Homo sapien
cagtgggtacgcactcatgagggca

SEQ ID NO: 3563652 - DNA, 25 bp, Homo sapien
tcatgctgtgcaacagggccttcag

SEQ ID NO: 3563653 - DNA, 25 bp, Homo sapien
tccatccgtctgatgctgggcagtc

SEQ ID NO: 3563654 - DNA, 25 bp, Homo sapien
cactgcagtgaacacggaggcagac

SEQ ID NO: 3563655 - DNA, 25 bp, Homo sapien
gcatgctgacttcaattcctgtgga

SEQ ID NO: 3563656 - DNA, 25 bp, Homo sapien
tacccaggcaagcatcccagattct

SEQ ID NO: 3563657 - DNA, 25 bp, Homo sapien
gctcacttcaggtttttacaggcca

SEQ ID NO: 3563658 - DNA, 25 bp, Homo sapien
tgtactgtaaatccaactgagaggt

SEQ ID NO: 3563659 - DNA, 25 bp, Homo sapien
cctcaattgttctttgggaaccact

SEQ ID NO: 3563660 - DNA, 25 bp, Homo sapien
tccaggcgcgcaatgaacaactcca

SEQ ID NO: 3563661 - DNA, 25 bp, Homo sapien
ccaggcgcgcaatgaacaactccag

SEQ ID NO: 3563662 - DNA, 25 bp, Homo sapien
tttattcagtcctggagtggagctg

SEQ ID NO: 3563663 - DNA, 25 bp, Homo sapien
aagacctttattcagtcctggagtg

SEQ ID NO: 3563664 - DNA, 25 bp, Homo sapien
gctggcctgacagggtgaagccagg

SEQ ID NO: 3563665 - DNA, 25 bp, Homo sapien
ggctgcttagggcgggccagaccct

SEQ ID NO: 3563666 - DNA, 25 bp, Homo sapien
gctgcagggcaaactcagtgatgac

SEQ ID NO: 3563667 - DNA, 25 bp, Homo sapien
gcagctgcagggcaaactcagtgat

SEQ ID NO: 3563668 - DNA, 25 bp, Homo sapien
tgcagggcaaactcagtgatgacag

SEQ ID NO: 3563669 - DNA, 25 bp, Homo sapien
agggcaaactcagtgatgacagctg

SEQ ID NO: 3563670 - DNA, 25 bp, Homo sapien
gcggcagtgcaaacacctcatctac

SEQ ID NO: 3563671 - DNA, 25 bp, Homo sapien
tggccaccccggcagaagtgggtat

SEQ ID NO: 3563672 - DNA, 25 bp, Homo sapien
ccagacccggtgtggtccatgcagg

SEQ ID NO: 3563673 - DNA, 25 bp, Homo sapien
gtatagccctgattctgcgtctgca

SEQ ID NO: 3563674 - DNA, 25 bp, Homo sapien
cagaggactggaacagcccaacccc

SEQ ID NO: 3563675 - DNA, 25 bp, Homo sapien
cagtgggcctacaccagcaagcact

SEQ ID NO: 3563676 - DNA, 25 bp, Homo sapien
gatccagtgggcctacaccagcaag

SEQ ID NO: 3563677 - DNA, 25 bp, Homo sapien
gggatccagtgggcctacaccagca

SEQ ID NO: 3563678 - DNA, 25 bp, Homo sapien
atccagtgggcctacaccagcaagc

SEQ ID NO: 3563679 - DNA, 25 bp, Homo sapien
cgggtttcccgcagggccgtgtgca

SEQ ID NO: 3563680 - DNA, 25 bp, Homo sapien
acacgtgctcctcgggcactgccag

SEQ ID NO: 3563681 - DNA, 25 bp, Homo sapien
ttggtcagccgggtcgcacttgccg

SEQ ID NO: 3563682 - DNA, 25 bp, Homo sapien
cagggccgtgtgcaccacatcttgg

SEQ ID NO: 3563683 - DNA, 25 bp, Homo sapien
aacagacacaaggagtctggtcctt

SEQ ID NO: 3563684 - DNA, 25 bp, Homo sapien
agacacaaggagtctggtccttgga

SEQ ID NO: 3563685 - DNA, 25 bp, Homo sapien
ccacggagaggtcggggtatcggca

SEQ ID NO: 3563686 - DNA, 25 bp, Homo sapien
gaggtcggggtatcggcagtgcggg

SEQ ID NO: 3563687 - DNA, 25 bp, Homo sapien
tctgcccctagtttactgggaggcc

SEQ ID NO: 3563688 - DNA, 25 bp, Homo sapien
acagcgcaggataagagggtctgca

SEQ ID NO: 3563689 - DNA, 25 bp, Homo sapien
aagccatgcgacctctggaggccag

SEQ ID NO: 3563690 - DNA, 25 bp, Homo sapien
gatacccaaattcggcctatggtgg

SEQ ID NO: 3563691 - DNA, 25 bp, Homo sapien
ctctccgtagtcgccggcagggggc

SEQ ID NO: 3563692 - DNA, 25 bp, Homo sapien
tctccgtagtcgccggcagggggcg

SEQ ID NO: 3563693 - DNA, 25 bp, Homo sapien
gtggcgccccggcaggtgcaccggg

SEQ ID NO: 3563694 - DNA, 25 bp, Homo sapien
tcgaaggggctaagtgccctgccag

SEQ ID NO: 3563695 - DNA, 25 bp, Homo sapien
gacacggatcgctgacctctcgctg

SEQ ID NO: 3563696 - DNA, 25 bp, Homo sapien
gcgcaaggacgcgtacgaggggccc

SEQ ID NO: 3563697 - DNA, 25 bp, Homo sapien
cccttgtgcctcccggtcaggcggc

SEQ ID NO: 3563698 - DNA, 25 bp, Homo sapien
cggctggaccgcagcgtgtacagca

SEQ ID NO: 3563699 - DNA, 25 bp, Homo sapien
cggtcaggcggctggaccgcagcgt

SEQ ID NO: 3563700 - DNA, 25 bp, Homo sapien
agcgtgtacagcagcgccgggaccc

SEQ ID NO: 3563701 - DNA, 25 bp, Homo sapien
agagcggcacgagcaccgcggccga

SEQ ID NO: 3563702 - DNA, 25 bp, Homo sapien
ctgagcagagcggcacgagcaccgc

SEQ ID NO: 3563703 - DNA, 25 bp, Homo sapien
agccggcggcagcgcagctcgccct

SEQ ID NO: 3563704 - DNA, 25 bp, Homo sapien
cggccgacaggcagtcgggcagcat

SEQ ID NO: 3563705 - DNA, 25 bp, Homo sapien
gccgggacactgagggcgcgggatc

SEQ ID NO: 3563706 - DNA, 25 bp, Homo sapien
gcagcccgcgcgacgcgtcccgcct

SEQ ID NO: 3563707 - DNA, 25 bp, Homo sapien
gagggcgcgggatcgggcgagggaa

SEQ ID NO: 3563708 - DNA, 25 bp, Homo sapien
gcccgggtccctccgaaagctgaga

SEQ ID NO: 3563709 - DNA, 25 bp, Homo sapien
gcaagagggcacagtattcaggctg

SEQ ID NO: 3563710 - DNA, 25 bp, Homo sapien
aggctgattcccacacccggtgtaa

SEQ ID NO: 3563711 - DNA, 25 bp, Homo sapien
catgccaaatagtttaatgttaggg

SEQ ID NO: 3563712 - DNA, 25 bp, Homo sapien
ggttccaagcttgccatggtcccag

SEQ ID NO: 3563713 - DNA, 25 bp, Homo sapien
tcactgggagtcctggccaggcccc

SEQ ID NO: 3563714 - DNA, 25 bp, Homo sapien
ggcacaccacagtgggggacaggag

SEQ ID NO: 3563715 - DNA, 25 bp, Homo sapien
caggcacaccacagtgggggacagg

SEQ ID NO: 3563716 - DNA, 25 bp, Homo sapien
gccccagcccagctgggagaggcag

SEQ ID NO: 3563717 - DNA, 25 bp, Homo sapien
ggtatggtgctggtcgggtccttgg

SEQ ID NO: 3563718 - DNA, 25 bp, Homo sapien
gctggtcgggtccttgggatcccta

SEQ ID NO: 3563719 - DNA, 25 bp, Homo sapien
tctgatacgtgacaggcctgtaggt

SEQ ID NO: 3563720 - DNA, 25 bp, Homo sapien
aggctctgatacgtgacaggcctgt

SEQ ID NO: 3563721 - DNA, 25 bp, Homo sapien
gatgatggagccaagcaggggtctt

SEQ ID NO: 3563722 - DNA, 25 bp, Homo sapien
aggtggaagctgaagctttgttggg

SEQ ID NO: 3563723 - DNA, 25 bp, Homo sapien
ctgatgatggagccaagcaggggtc

SEQ ID NO: 3563724 - DNA, 25 bp, Homo sapien
gtcttggaggtggaagctgaagctt

SEQ ID NO: 3563725 - DNA, 25 bp, Homo sapien
ctgtctgtggcacccttcagcacac

SEQ ID NO: 3563726 - DNA, 25 bp, Homo sapien
ccctgtctgtggcacccttcagcac

SEQ ID NO: 3563727 - DNA, 25 bp, Homo sapien
cctgtctgtggcacccttcagcaca

SEQ ID NO: 3563728 - DNA, 25 bp, Homo sapien
aaagcctttggcaaaagggttgctg

SEQ ID NO: 3563729 - DNA, 25 bp, Homo sapien
agcctttggcaaaagggttgctggc

SEQ ID NO: 3563730 - DNA, 25 bp, Homo sapien
gcctttggcaaaagggttgctggcg

SEQ ID NO: 3563731 - DNA, 25 bp, Homo sapien
aagcctttggcaaaagggttgctgg

SEQ ID NO: 3563732 - DNA, 25 bp, Homo sapien
cctgtggttctgataggctgtcact

SEQ ID NO: 3563733 - DNA, 25 bp, Homo sapien
ttctcctgggcatagcgctcactgt

SEQ ID NO: 3563734 - DNA, 25 bp, Homo sapien
actgctgtgaactgggtctctgtga

SEQ ID NO: 3563735 - DNA, 25 bp, Homo sapien
ctggtagcggtgcatagagttgaga

SEQ ID NO: 3563736 - DNA, 25 bp, Homo sapien
cagccctgaccccaggcccttccgt

SEQ ID NO: 3563737 - DNA, 25 bp, Homo sapien
aaggacacaatctggcgcatccact

SEQ ID NO: 3563738 - DNA, 25 bp, Homo sapien
gggcacccttggctggcgagtcggg

SEQ ID NO: 3563739 - DNA, 25 bp, Homo sapien
tgggcacccttggctggcgagtcgg

SEQ ID NO: 3563740 - DNA, 25 bp, Homo sapien
acaatctggcgcatccactgggcac

SEQ ID NO: 3563741 - DNA, 25 bp, Homo sapien
ctgtatctcttgtcgtccaggggga

SEQ ID NO: 3563742 - DNA, 25 bp, Homo sapien
tcttgtcgtccagggggatgaagtc

SEQ ID NO: 3563743 - DNA, 25 bp, Homo sapien
atgaagtccatgagcagggcgtagt

SEQ ID NO: 3563744 - DNA, 25 bp, Homo sapien
tgaagtccatgagcagggcgtagtc

SEQ ID NO: 3563745 - DNA, 25 bp, Homo sapien
ccagctgaactgtcactctggacac

SEQ ID NO: 3563746 - DNA, 25 bp, Homo sapien
tgaactgtcactctggacacacgtg

SEQ ID NO: 3563747 - DNA, 25 bp, Homo sapien
ggttgaattcctcccacagaggctt

SEQ ID NO: 3563748 - DNA, 25 bp, Homo sapien
agctggttgaattcctcccacagag

SEQ ID NO: 3563749 - DNA, 25 bp, Homo sapien
tgagggtgcaagtatgccgaggcca

SEQ ID NO: 3563750 - DNA, 25 bp, Homo sapien
gggtgcaagtatgccgaggccagca

SEQ ID NO: 3563751 - DNA, 25 bp, Homo sapien
tgtaggtagggggtaggtctctgag

SEQ ID NO: 3563752 - DNA, 25 bp, Homo sapien
ctctgagggtgcaagtatgccgagg

SEQ ID NO: 3563753 - DNA, 25 bp, Homo sapien
aaggggtggtcaccactcgtccact

SEQ ID NO: 3563754 - DNA, 25 bp, Homo sapien
aggggtggtcaccactcgtccactc

SEQ ID NO: 3563755 - DNA, 25 bp, Homo sapien
gaaggggtggtcaccactcgtccac

SEQ ID NO: 3563756 - DNA, 25 bp, Homo sapien
cacctcagctcagccctcaggtgct

SEQ ID NO: 3563757 - DNA, 25 bp, Homo sapien
ggcacctcagctcagccctcaggtg

SEQ ID NO: 3563758 - DNA, 25 bp, Homo sapien
acctcagctcagccctcaggtgctc

SEQ ID NO: 3563759 - DNA, 25 bp, Homo sapien
ctcagctcagccctcaggtgctcac

SEQ ID NO: 3563760 - DNA, 25 bp, Homo sapien
cacgtcctgaggtcgtggtcttcct

SEQ ID NO: 3563761 - DNA, 25 bp, Homo sapien
acaagctgtagtctctcggcaggac

SEQ ID NO: 3563762 - DNA, 25 bp, Homo sapien
ttcctactcgagctggacccctggt

SEQ ID NO: 3563763 - DNA, 25 bp, Homo sapien
gcaggacggtccttgcctcctcgat

SEQ ID NO: 3563764 - DNA, 25 bp, Homo sapien
gatgcgcaattgtcaggagcagtgt

SEQ ID NO: 3563765 - DNA, 25 bp, Homo sapien
cagcagcaacgagtgcagtcagcat

SEQ ID NO: 3563766 - DNA, 25 bp, Homo sapien
ggcagcagcaacgagtgcagtcagc

SEQ ID NO: 3563767 - DNA, 25 bp, Homo sapien
ccagccggccggcagatgcgcaatt

SEQ ID NO: 3563768 - DNA, 25 bp, Homo sapien
agctgtgcctcaggacccatcgttc

SEQ ID NO: 3563769 - DNA, 25 bp, Homo sapien
agaagggacctctgtgctcagagct

SEQ ID NO: 3563770 - DNA, 25 bp, Homo sapien
cagaagggacctctgtgctcagagc

SEQ ID NO: 3563771 - DNA, 25 bp, Homo sapien
aggacccatcgttcagatgggaaga

SEQ ID NO: 3563772 - DNA, 25 bp, Homo sapien
ggcaggggtcagcgcgggcatggca

SEQ ID NO: 3563773 - DNA, 25 bp, Homo sapien
gcaggggtcagcgcgggcatggcag

SEQ ID NO: 3563774 - DNA, 25 bp, Homo sapien
aggggtcagcgcgggcatggcaggc

SEQ ID NO: 3563775 - DNA, 25 bp, Homo sapien
gggtcagcgcgggcatggcaggcac

SEQ ID NO: 3563776 - DNA, 25 bp, Homo sapien
tggactctccctcatagagcaggtc

SEQ ID NO: 3563777 - DNA, 25 bp, Homo sapien
caacgcccttctcatagtaggcagc

SEQ ID NO: 3563778 - DNA, 25 bp, Homo sapien
tagtaggcagcctcgttaatgaaca

SEQ ID NO: 3563779 - DNA, 25 bp, Homo sapien
tgtgaacttctcagtctggacaaag

SEQ ID NO: 3563780 - DNA, 25 bp, Homo sapien
aagatgggagcaccaggctgcagtg

SEQ ID NO: 3563781 - DNA, 25 bp, Homo sapien
gctgcagtggctggaagtctcggtc

SEQ ID NO: 3563782 - DNA, 25 bp, Homo sapien
ctggaagatgggagcaccaggctgc

SEQ ID NO: 3563783 - DNA, 25 bp, Homo sapien
ggctgcagtggctggaagtctcggt

SEQ ID NO: 3563784 - DNA, 25 bp, Homo sapien
tgggcacggctggattaagactgtc

SEQ ID NO: 3563785 - DNA, 25 bp, Homo sapien
taggaggagccacccaaattgactg

SEQ ID NO: 3563786 - DNA, 25 bp, Homo sapien
tgtctagccctaaacatggacggga

SEQ ID NO: 3563787 - DNA, 25 bp, Homo sapien
gaacgtctgcaaggtagctgggcac

SEQ ID NO: 3563788 - DNA, 25 bp, Homo sapien
ggtgtggaagcaggattgcctaatc

SEQ ID NO: 3563789 - DNA, 25 bp, Homo sapien
ctcaggcacccaagggaaaggtgtg

SEQ ID NO: 3563790 - DNA, 25 bp, Homo sapien
cacccaagggaaaggtgtggaagca

SEQ ID NO: 3563791 - DNA, 25 bp, Homo sapien
gttcttctcaggcacccaagggaaa

SEQ ID NO: 3563792 - DNA, 25 bp, Homo sapien
gcagagagacatactgccaacatgc

SEQ ID NO: 3563793 - DNA, 25 bp, Homo sapien
tactgccaacatgcatggggatgct

SEQ ID NO: 3563794 - DNA, 25 bp, Homo sapien
catactgccaacatgcatggggatg

SEQ ID NO: 3563795 - DNA, 25 bp, Homo sapien
ctgcagagagacatactgccaacat

SEQ ID NO: 3563796 - DNA, 25 bp, Homo sapien
caggtgcccggcctcggtgcggggg

SEQ ID NO: 3563797 - DNA, 25 bp, Homo sapien
tgcgggggaagtccacgacgcccac

SEQ ID NO: 3563798 - DNA, 25 bp, Homo sapien
agtgcctgccaggtgcccggcctcg

SEQ ID NO: 3563799 - DNA, 25 bp, Homo sapien
ctcggtgcgggggaagtccacgacg

SEQ ID NO: 3563800 - DNA, 25 bp, Homo sapien
atctcaaaggcaggaaaggccgtac

SEQ ID NO: 3563801 - DNA, 25 bp, Homo sapien
gtctataggcttccatctcaaaggc

SEQ ID NO: 3563802 - DNA, 25 bp, Homo sapien
gggtctataggcttccatctcaaag

SEQ ID NO: 3563803 - DNA, 25 bp, Homo sapien
ccatctcaaaggcaggaaaggccgt

SEQ ID NO: 3563804 - DNA, 25 bp, Homo sapien
ggttgaagagttcgatgaagtccag

SEQ ID NO: 3563805 - DNA, 25 bp, Homo sapien
gagaaaatgtcagcccgcagcacac

SEQ ID NO: 3563806 - DNA, 25 bp, Homo sapien
gaagagttcgatgaagtccagaact

SEQ ID NO: 3563807 - DNA, 25 bp, Homo sapien
ctggttgaagagttcgatgaagtcc

SEQ ID NO: 3563808 - DNA, 25 bp, Homo sapien
ccccagaccgctggtacaggaagac

SEQ ID NO: 3563809 - DNA, 25 bp, Homo sapien
cccagaccgctggtacaggaagacc

SEQ ID NO: 3563810 - DNA, 25 bp, Homo sapien
gcggcacaggtgcatggcaaagact

SEQ ID NO: 3563811 - DNA, 25 bp, Homo sapien
tgtcacctcatatgggtcgtccggg

SEQ ID NO: 3563812 - DNA, 25 bp, Homo sapien
gacttcgcgattaagcaggtgccca

SEQ ID NO: 3563813 - DNA, 25 bp, Homo sapien
tcgtgggaggacttcgcgattaagc

SEQ ID NO: 3563814 - DNA, 25 bp, Homo sapien
aaggtgcggttgaggtcatggtcca

SEQ ID NO: 3563815 - DNA, 25 bp, Homo sapien
ggtgaaggtgcggttgaggtcatgg

SEQ ID NO: 3563816 - DNA, 25 bp, Homo sapien
cggcggcagccggatgtggctgccg

SEQ ID NO: 3563817 - DNA, 25 bp, Homo sapien
tggctgccgggttggccagcacagg

SEQ ID NO: 3563818 - DNA, 25 bp, Homo sapien
tgccgggccaggtagacgcccgaca

SEQ ID NO: 3563819 - DNA, 25 bp, Homo sapien
ggtagacgcccgacatctcgttgcc

SEQ ID NO: 3563820 - DNA, 25 bp, Homo sapien
cagtcacagccacgcgacgcagggg

SEQ ID NO: 3563821 - DNA, 25 bp, Homo sapien
gcccgacatctcgttgccatgcgtg

SEQ ID NO: 3563822 - DNA, 25 bp, Homo sapien
gagaccctggccccgatgcaaggga

SEQ ID NO: 3563823 - DNA, 25 bp, Homo sapien
ccctggccccgatgcaagggatctg

SEQ ID NO: 3563824 - DNA, 25 bp, Homo sapien
cctggccccgatgcaagggatctgg

SEQ ID NO: 3563825 - DNA, 25 bp, Homo sapien
gaccctggccccgatgcaagggatc

SEQ ID NO: 3563826 - DNA, 25 bp, Homo sapien
gaaagtgtcaccagagttagctgtg

SEQ ID NO: 3563827 - DNA, 25 bp, Homo sapien
cactccctataggaagaggactgcg

SEQ ID NO: 3563828 - DNA, 25 bp, Homo sapien
gaagatgggttcaccaaggcacact

SEQ ID NO: 3563829 - DNA, 25 bp, Homo sapien
gaggactgcgctcctttttatagac

SEQ ID NO: 3563830 - DNA, 25 bp, Homo sapien
aggactggcgtctaactcgcagaca

SEQ ID NO: 3563831 - DNA, 25 bp, Homo sapien
gccaccaggactggcgtctaactcg

SEQ ID NO: 3563832 - DNA, 25 bp, Homo sapien
ccgggccaccaggactggcgtctaa

SEQ ID NO: 3563833 - DNA, 25 bp, Homo sapien
cgtctaactcgcagacaggctggta

SEQ ID NO: 3563834 - DNA, 25 bp, Homo sapien
gagatccacagatgggaagttttgt

SEQ ID NO: 3563835 - DNA, 25 bp, Homo sapien
tggagatccacagatgggaagtttt

SEQ ID NO: 3563836 - DNA, 25 bp, Homo sapien
gatccacagatgggaagttttgtgg

SEQ ID NO: 3563837 - DNA, 25 bp, Homo sapien
ccacagatgggaagttttgtggcaa

SEQ ID NO: 3563838 - DNA, 25 bp, Homo sapien
gtgggtgggacgggctgaggttcat

SEQ ID NO: 3563839 - DNA, 25 bp, Homo sapien
gggtgggacgggctgaggttcatgc

SEQ ID NO: 3563840 - DNA, 25 bp, Homo sapien
ggacgggctgaggttcatgcagcca

SEQ ID NO: 3563841 - DNA, 25 bp, Homo sapien
tgggacgggctgaggttcatgcagc

SEQ ID NO: 3563842 - DNA, 25 bp, Homo sapien
gagtcgcccttacccaaaggtgcca

SEQ ID NO: 3563843 - DNA, 25 bp, Homo sapien
tctgtccttgcagcccggagagggc

SEQ ID NO: 3563844 - DNA, 25 bp, Homo sapien
cctccttcaccacctcggcaacatg

SEQ ID NO: 3563845 - DNA, 25 bp, Homo sapien
caccacctcggcaacatgcctctgt

SEQ ID NO: 3563846 - DNA, 25 bp, Homo sapien
ccgaaacagcggaagcagctgcctg

SEQ ID NO: 3563847 - DNA, 25 bp, Homo sapien
cacgtggccccagagggttgagggt

SEQ ID NO: 3563848 - DNA, 25 bp, Homo sapien
gactcccggggatcttctgcttgct

SEQ ID NO: 3563849 - DNA, 25 bp, Homo sapien
cttctgcttgctgcgtggcccgtgg

SEQ ID NO: 3563850 - DNA, 25 bp, Homo sapien
ccggcttgttctgcctcattaagag

SEQ ID NO: 3563851 - DNA, 25 bp, Homo sapien
gacaaatgtattcccagctccggct

SEQ ID NO: 3563852 - DNA, 25 bp, Homo sapien
cattaagagaatatttgaagacatt

SEQ ID NO: 3563853 - DNA, 25 bp, Homo sapien
agctccggcttgttctgcctcatta

SEQ ID NO: 3563854 - DNA, 25 bp, Homo sapien
gctgctgctgtagtttttgaagggt

SEQ ID NO: 3563855 - DNA, 25 bp, Homo sapien
caaaggaatgcgtcagcgtgaatgg

SEQ ID NO: 3563856 - DNA, 25 bp, Homo sapien
gttctgtttggtgtgaaccacccag

SEQ ID NO: 3563857 - DNA, 25 bp, Homo sapien
ttgaagggttagatgttctgaggaa

SEQ ID NO: 3563858 - DNA, 25 bp, Homo sapien
gatgctacgcctagaccaaggtccg

SEQ ID NO: 3563859 - DNA, 25 bp, Homo sapien
ctgtccaggcgtaacagagggctca

SEQ ID NO: 3563860 - DNA, 25 bp, Homo sapien
gagccaggtgtacggagcataacat

SEQ ID NO: 3563861 - DNA, 25 bp, Homo sapien
caaggtccgctaggtaatggatgcc

SEQ ID NO: 3563862 - DNA, 25 bp, Homo sapien
tatgagtgcttggaaggatcccagg

SEQ ID NO: 3563863 - DNA, 25 bp, Homo sapien
tgtctggtctacatgcaggcgtgtc

SEQ ID NO: 3563864 - DNA, 25 bp, Homo sapien
gaggacgtgctttccatacgccctg

SEQ ID NO: 3563865 - DNA, 25 bp, Homo sapien
tgtaagtcacaagctgatcgcagga

SEQ ID NO: 3563866 - DNA, 25 bp, Homo sapien
ctgctggttccagtcggtatagggt

SEQ ID NO: 3563867 - DNA, 25 bp, Homo sapien
tgggtagtggatctcctttaatttc

SEQ ID NO: 3563868 - DNA, 25 bp, Homo sapien
tagggtgggtagtggatctccttta

SEQ ID NO: 3563869 - DNA, 25 bp, Homo sapien
catgccccagcgtaacagctgctgg

SEQ ID NO: 3563870 - DNA, 25 bp, Homo sapien
ccccgaatggcacggacagcagaga

SEQ ID NO: 3563871 - DNA, 25 bp, Homo sapien
cgaatggcacggacagcagagatat

SEQ ID NO: 3563872 - DNA, 25 bp, Homo sapien
cagagatatgtaggtgaagccctca

SEQ ID NO: 3563873 - DNA, 25 bp, Homo sapien
tgccgctgctggtccgctccagcat

SEQ ID NO: 3563874 - DNA, 25 bp, Homo sapien
ctggctgctgttggagaaggcgtac

SEQ ID NO: 3563875 - DNA, 25 bp, Homo sapien
gctctgcacgttcacgatgggcagg

SEQ ID NO: 3563876 - DNA, 25 bp, Homo sapien
ctctgcacgttcacgatgggcagga

SEQ ID NO: 3563877 - DNA, 25 bp, Homo sapien
tctgcacgttcacgatgggcaggat

SEQ ID NO: 3563878 - DNA, 25 bp, Homo sapien
gctctgggggtcgtcgccatagaaa

SEQ ID NO: 3563879 - DNA, 25 bp, Homo sapien
gggtcgcagttgtcgtccacgtagc

SEQ ID NO: 3563880 - DNA, 25 bp, Homo sapien
caggccacgcggttggccacggtct

SEQ ID NO: 3563881 - DNA, 25 bp, Homo sapien
tcgccatagaaacgggtgatggtgc

SEQ ID NO: 3563882 - DNA, 25 bp, Homo sapien
gaaggaaaccagagtggccagtcag

SEQ ID NO: 3563883 - DNA, 25 bp, Homo sapien
ggaaaccagagtggccagtcagtga

SEQ ID NO: 3563884 - DNA, 25 bp, Homo sapien
ctgggcgtggaaggaaaccagagtg

SEQ ID NO: 3563885 - DNA, 25 bp, Homo sapien
ggaaggaaaccagagtggccagtca

SEQ ID NO: 3563886 - DNA, 25 bp, Homo sapien
tggccactcctggatccagttgctg

SEQ ID NO: 3563887 - DNA, 25 bp, Homo sapien
ccagttgctgcaatgtgcccagggc

SEQ ID NO: 3563888 - DNA, 25 bp, Homo sapien
agttgctgcaatgtgcccagggcgt

SEQ ID NO: 3563889 - DNA, 25 bp, Homo sapien
gccactcctggatccagttgctgca

SEQ ID NO: 3563890 - DNA, 25 bp, Homo sapien
cttgtgctctagcagctgccctgtc

SEQ ID NO: 3563891 - DNA, 25 bp, Homo sapien
cgcccagcaccacggcaaagcagct

SEQ ID NO: 3563892 - DNA, 25 bp, Homo sapien
gatgtagtccaacttgtgctctagc

SEQ ID NO: 3563893 - DNA, 25 bp, Homo sapien
gaagaagatgtagtccaacttgtgc

SEQ ID NO: 3563894 - DNA, 25 bp, Homo sapien
ctgatttctgacggcttcagcacca

SEQ ID NO: 3563895 - DNA, 25 bp, Homo sapien
ggctgatttctgacggcttcagcac

SEQ ID NO: 3563896 - DNA, 25 bp, Homo sapien
ctggctgatttctgacggcttcagc

SEQ ID NO: 3563897 - DNA, 25 bp, Homo sapien
gctgatttctgacggcttcagcacc

SEQ ID NO: 3563898 - DNA, 25 bp, Homo sapien
ggtagttccagggtgcgatgatgag

SEQ ID NO: 3563899 - DNA, 25 bp, Homo sapien
gggtcaggttcagtgggtagttcca

SEQ ID NO: 3563900 - DNA, 25 bp, Homo sapien
tgggtagttccagggtgcgatgatg

SEQ ID NO: 3563901 - DNA, 25 bp, Homo sapien
gtagttccagggtgcgatgatgagg

SEQ ID NO: 3563902 - DNA, 25 bp, Homo sapien
caggttcgtggaccgtggttcatcc

SEQ ID NO: 3563903 - DNA, 25 bp, Homo sapien
aggttcgtggaccgtggttcatcct

SEQ ID NO: 3563904 - DNA, 25 bp, Homo sapien
tcgtggaccgtggttcatccttcat

SEQ ID NO: 3563905 - DNA, 25 bp, Homo sapien
gttcgtggaccgtggttcatccttc

SEQ ID NO: 3563906 - DNA, 25 bp, Homo sapien
tcagatatgtctgcctcgaaagctg

SEQ ID NO: 3563907 - DNA, 25 bp, Homo sapien
aaggatgagctcagatatgtctgcc

SEQ ID NO: 3563908 - DNA, 25 bp, Homo sapien
tagtcaacctcgttctggcaaagga

SEQ ID NO: 3563909 - DNA, 25 bp, Homo sapien
ccaggcctgcaggttcttgagagcg

SEQ ID NO: 3563910 - DNA, 25 bp, Homo sapien
tggaattcagagtggtcaggcccag

SEQ ID NO: 3563911 - DNA, 25 bp, Homo sapien
caagcgatgttaacccctgagtgcc

SEQ ID NO: 3563912 - DNA, 25 bp, Homo sapien
taaatacagctcctatgggaggcac

SEQ ID NO: 3563913 - DNA, 25 bp, Homo sapien
taaaactagggacatagccagtcac

SEQ ID NO: 3563914 - DNA, 25 bp, Homo sapien
agcacgtcgcgcagaagctgcttgt

SEQ ID NO: 3563915 - DNA, 25 bp, Homo sapien
ttgaaggaagtggcccaggccctgg

SEQ ID NO: 3563916 - DNA, 25 bp, Homo sapien
gaaggaagtggcccaggccctggag

SEQ ID NO: 3563917 - DNA, 25 bp, Homo sapien
tgaaggaagtggcccaggccctgga

SEQ ID NO: 3563918 - DNA, 25 bp, Homo sapien
cttgaaggaagtggcccaggccctg

SEQ ID NO: 3563919 - DNA, 25 bp, Homo sapien
tgcgcagcccggaactcggccggcc

SEQ ID NO: 3563920 - DNA, 25 bp, Homo sapien
ctgcgcagcccggaactcggccggc

SEQ ID NO: 3563921 - DNA, 25 bp, Homo sapien
cagcccggaactcggccggccgcgt

SEQ ID NO: 3563922 - DNA, 25 bp, Homo sapien
cgcagcccggaactcggccggccgc

SEQ ID NO: 3563923 - DNA, 25 bp, Homo sapien
gcagccgccgcagcgtgtcctcgaa

SEQ ID NO: 3563924 - DNA, 25 bp, Homo sapien
gcagcgtgtcctcgaaggggtccat

SEQ ID NO: 3563925 - DNA, 25 bp, Homo sapien
ccgcagcgtgtcctcgaaggggtcc

SEQ ID NO: 3563926 - DNA, 25 bp, Homo sapien
agccgccgcagcgtgtcctcgaagg

SEQ ID NO: 3563927 - DNA, 25 bp, Homo sapien
tccttcacgggcaccctccagccac

SEQ ID NO: 3563928 - DNA, 25 bp, Homo sapien
ctgccggatggggtggcttgaactg

SEQ ID NO: 3563929 - DNA, 25 bp, Homo sapien
ctgcccctccttcacgggcaccctc

SEQ ID NO: 3563930 - DNA, 25 bp, Homo sapien
tggggtggcttgaactgggtggcca

SEQ ID NO: 3563931 - DNA, 25 bp, Homo sapien
ctgctggtcgtagaaggaagcagaa

SEQ ID NO: 3563932 - DNA, 25 bp, Homo sapien
ctctgctggtcgtagaaggaagcag

SEQ ID NO: 3563933 - DNA, 25 bp, Homo sapien
ggcactctgctggtcgtagaaggaa

SEQ ID NO: 3563934 - DNA, 25 bp, Homo sapien
gtggcactctgctggtcgtagaagg

SEQ ID NO: 3563935 - DNA, 25 bp, Homo sapien
tgtctttgtgttctgtgcatcttca

SEQ ID NO: 3563936 - DNA, 25 bp, Homo sapien
gcatcttcatgtgtatggctatgtg

SEQ ID NO: 3563937 - DNA, 25 bp, Homo sapien
gtgtctttgtgttctgtgcatcttc

SEQ ID NO: 3563938 - DNA, 25 bp, Homo sapien
ctgtgcatcttcatgtgtatggcta

SEQ ID NO: 3563939 - DNA, 25 bp, Homo sapien
ccaatggcagaagtccgtgtcttgt

SEQ ID NO: 3563940 - DNA, 25 bp, Homo sapien
tcttgtcatatgtgatgcagggaca

SEQ ID NO: 3563941 - DNA, 25 bp, Homo sapien
agggacagtgctcgcccatggacag

SEQ ID NO: 3563942 - DNA, 25 bp, Homo sapien
cagaagtccgtgtcttgtgaatgac

SEQ ID NO: 3563943 - DNA, 25 bp, Homo sapien
aatcaagacccggattggaggagtc

SEQ ID NO: 3563944 - DNA, 25 bp, Homo sapien
ggtgaaataatcacggagccagcag

SEQ ID NO: 3563945 - DNA, 25 bp, Homo sapien
cacaggtgtcctgatgttcatccca

SEQ ID NO: 3563946 - DNA, 25 bp, Homo sapien
gcacatctggtgctcggtgaaataa

SEQ ID NO: 3563947 - DNA, 25 bp, Homo sapien
tgcctggccttcttacatatattga

SEQ ID NO: 3563948 - DNA, 25 bp, Homo sapien
ggcacatgctgtcaggacatcccca

SEQ ID NO: 3563949 - DNA, 25 bp, Homo sapien
tcccgaatagctgaatagctgggat

SEQ ID NO: 3563950 - DNA, 25 bp, Homo sapien
gtgtaaaccaagctgtgtcccgacc

SEQ ID NO: 3563951 - DNA, 25 bp, Homo sapien
ggaccaacgtgtgcaaaagccctgt

SEQ ID NO: 3563952 - DNA, 25 bp, Homo sapien
tgtgccaatgtgtgcctcgtgcctt

SEQ ID NO: 3563953 - DNA, 25 bp, Homo sapien
tcccagagacgacttgatttgccct

SEQ ID NO: 3563954 - DNA, 25 bp, Homo sapien
caggtgatctggacagagggaccaa

SEQ ID NO: 3563955 - DNA, 25 bp, Homo sapien
gggtccttcgctgcacctccactcc

SEQ ID NO: 3563956 - DNA, 25 bp, Homo sapien
actccctttcttggacatgctgcct

SEQ ID NO: 3563957 - DNA, 25 bp, Homo sapien
gctgcctccagatgcgcaggctctg

SEQ ID NO: 3563958 - DNA, 25 bp, Homo sapien
tctgcccctgggtccttcgctgcac

SEQ ID NO: 3563959 - DNA, 25 bp, Homo sapien
tgactgcgatcctcccaggagactg

SEQ ID NO: 3563960 - DNA, 25 bp, Homo sapien
cacgcctggcaatggggtaatcaat

SEQ ID NO: 3563961 - DNA, 25 bp, Homo sapien
tgctcagtgttacccaacaggcgtg

SEQ ID NO: 3563962 - DNA, 25 bp, Homo sapien
gagactggcagctcccaaaccaact

SEQ ID NO: 3563963 - DNA, 25 bp, Homo sapien
tcactgccaggacctatagctgctc

SEQ ID NO: 3563964 - DNA, 25 bp, Homo sapien
ttatggtggaaggggaagcaaccac

SEQ ID NO: 3563965 - DNA, 25 bp, Homo sapien
atggtggaaggggaagcaaccacat

SEQ ID NO: 3563966 - DNA, 25 bp, Homo sapien
gttatggtggaaggggaagcaacca

SEQ ID NO: 3563967 - DNA, 25 bp, Homo sapien
tatggtggaaggggaagcaaccaca

SEQ ID NO: 3563968 - DNA, 25 bp, Homo sapien
gcatgactaattgttgacattctta

SEQ ID NO: 3563969 - DNA, 25 bp, Homo sapien
tattgcatgactaattgttgacatt

SEQ ID NO: 3563970 - DNA, 25 bp, Homo sapien
actaattgttgacattcttaagatg

SEQ ID NO: 3563971 - DNA, 25 bp, Homo sapien
cctcattcgaccagttctggtggtt

SEQ ID NO: 3563972 - DNA, 25 bp, Homo sapien
ccacagcagcggcacaacgtgtgtg

SEQ ID NO: 3563973 - DNA, 25 bp, Homo sapien
agcagcggcacaacgtgtgtgtctt

SEQ ID NO: 3563974 - DNA, 25 bp, Homo sapien
caaacgatgatgctcccttcgtcat

SEQ ID NO: 3563975 - DNA, 25 bp, Homo sapien
ccaaacgatgatgctcccttcgtca

SEQ ID NO: 3563976 - DNA, 25 bp, Homo sapien
tacctaggatgcacactgattcagc

SEQ ID NO: 3563977 - DNA, 25 bp, Homo sapien
ccttatattatttcggtgggcagca

SEQ ID NO: 3563978 - DNA, 25 bp, Homo sapien
gacctggaggatgtttacgttccca

SEQ ID NO: 3563979 - DNA, 25 bp, Homo sapien
ttttatcccactgcgggtcctgagc

SEQ ID NO: 3563980 - DNA, 25 bp, Homo sapien
agaatatcccgaccaccaagcaagt

SEQ ID NO: 3563981 - DNA, 25 bp, Homo sapien
tattcatcacaacaggtaagtccgg

SEQ ID NO: 3563982 - DNA, 25 bp, Homo sapien
caagatccgccttaagccgtatgag

SEQ ID NO: 3563983 - DNA, 25 bp, Homo sapien
agagtttatctggtccccgaggcag

SEQ ID NO: 3563984 - DNA, 25 bp, Homo sapien
taccacaggtagtgggctcagactg

SEQ ID NO: 3563985 - DNA, 25 bp, Homo sapien
tcttggccgattgctggcacgcctg

SEQ ID NO: 3563986 - DNA, 25 bp, Homo sapien
cctggaccgtcttggccgattgctg

SEQ ID NO: 3563987 - DNA, 25 bp, Homo sapien
ccgattgctggcacgcctgtgctct

SEQ ID NO: 3563988 - DNA, 25 bp, Homo sapien
gcaggtacattactgctgctgtcct

SEQ ID NO: 3563989 - DNA, 25 bp, Homo sapien
caggtacattactgctgctgtcctc

SEQ ID NO: 3563990 - DNA, 25 bp, Homo sapien
aggtacattactgctgctgtcctca

SEQ ID NO: 3563991 - DNA, 25 bp, Homo sapien
aagcaggtacattactgctgctgtc

SEQ ID NO: 3563992 - DNA, 25 bp, Homo sapien
tgatatgtgtttcccgtcacacggc

SEQ ID NO: 3563993 - DNA, 25 bp, Homo sapien
ttcagagctcttcatggcgggggtg

SEQ ID NO: 3563994 - DNA, 25 bp, Homo sapien
cgggtggaggaacggcaccttcagg

SEQ ID NO: 3563995 - DNA, 25 bp, Homo sapien
aagaggagcgggtggaggaacggca

SEQ ID NO: 3563996 - DNA, 25 bp, Homo sapien
agagctcttcatggcgggggtgtcc

SEQ ID NO: 3563997 - DNA, 25 bp, Homo sapien
tgctcgtcctcagcgtcgctctcct

SEQ ID NO: 3563998 - DNA, 25 bp, Homo sapien
atgctcgtcctcagcgtcgctctcc

SEQ ID NO: 3563999 - DNA, 25 bp, Homo sapien
cgctctcctccgagttgtcctccaa

SEQ ID NO: 3564000 - DNA, 25 bp, Homo sapien
ctctcctccgagttgtcctccaagt

SEQ ID NO: 3564001 - DNA, 25 bp, Homo sapien
ccacagcctgccaccagtggtagat

SEQ ID NO: 3564002 - DNA, 25 bp, Homo sapien
tgctccagccatgaggggcaccggg

SEQ ID NO: 3564003 - DNA, 25 bp, Homo sapien
agctgccacacagaggatccagatg

SEQ ID NO: 3564004 - DNA, 25 bp, Homo sapien
tgagtccagtattgttcagggcgct

SEQ ID NO: 3564005 - DNA, 25 bp, Homo sapien
tccagatgtgttgcaggacccgagg

SEQ ID NO: 3564006 - DNA, 25 bp, Homo sapien
cctgcgataggtgccctaagagcca

SEQ ID NO: 3564007 - DNA, 25 bp, Homo sapien
tggctcttactattcctgagggaat

SEQ ID NO: 3564008 - DNA, 25 bp, Homo sapien
gggctggctcttactattcctgagg

SEQ ID NO: 3564009 - DNA, 25 bp, Homo sapien
gagaagggctgactcgtactccccg

SEQ ID NO: 3564010 - DNA, 25 bp, Homo sapien
ccagtgtcctccttctgtggtgcac

SEQ ID NO: 3564011 - DNA, 25 bp, Homo sapien
aacaggtccagtgtcctccttctgt

SEQ ID NO: 3564012 - DNA, 25 bp, Homo sapien
ggtccagtgtcctccttctgtggtg

SEQ ID NO: 3564013 - DNA, 25 bp, Homo sapien
caggtccagtgtcctccttctgtgg

SEQ ID NO: 3564014 - DNA, 25 bp, Homo sapien
gttccaaccattcatgttcctcagc

SEQ ID NO: 3564015 - DNA, 25 bp, Homo sapien
tgagcctgggcgtgtttatcctttt

SEQ ID NO: 3564016 - DNA, 25 bp, Homo sapien
tcagaagtgcgtctctgttttttgt

SEQ ID NO: 3564017 - DNA, 25 bp, Homo sapien
atccatgttgcggcctgcctcagaa

SEQ ID NO: 3564018 - DNA, 25 bp, Homo sapien
tggagaaacactgtccctattaaca

SEQ ID NO: 3564019 - DNA, 25 bp, Homo sapien
gagaaacactgtccctattaacaat

SEQ ID NO: 3564020 - DNA, 25 bp, Homo sapien
ggagaaacactgtccctattaacaa

SEQ ID NO: 3564021 - DNA, 25 bp, Homo sapien
tgagatttgactgctctgctgtgca

SEQ ID NO: 3564022 - DNA, 25 bp, Homo sapien
agatttgactgctctgctgtgcagc

SEQ ID NO: 3564023 - DNA, 25 bp, Homo sapien
tcatgagatttgactgctctgctgt

SEQ ID NO: 3564024 - DNA, 25 bp, Homo sapien
catgagatttgactgctctgctgtg

SEQ ID NO: 3564025 - DNA, 25 bp, Homo sapien
tcagcaaacagctgctaggtgagag

SEQ ID NO: 3564026 - DNA, 25 bp, Homo sapien
gtgagagccacaggtgaagaaggct

SEQ ID NO: 3564027 - DNA, 25 bp, Homo sapien
cagcaaacagctgctaggtgagagc

SEQ ID NO: 3564028 - DNA, 25 bp, Homo sapien
gccacaggtgaagaaggctttatac

SEQ ID NO: 3564029 - DNA, 25 bp, Homo sapien
ggaggggatgattttatagtaagac

SEQ ID NO: 3564030 - DNA, 25 bp, Homo sapien
ggcaagtttgagaagttgagagggg

SEQ ID NO: 3564031 - DNA, 25 bp, Homo sapien
ccttagaatggaggggatgatttta

SEQ ID NO: 3564032 - DNA, 25 bp, Homo sapien
tttgagaagttgagaggggtcacag

SEQ ID NO: 3564033 - DNA, 25 bp, Homo sapien
aaaaaggaccaagaaagatatctgc

SEQ ID NO: 3564034 - DNA, 25 bp, Homo sapien
aaggaccaagaaagatatctgcgtc

SEQ ID NO: 3564035 - DNA, 25 bp, Homo sapien
agagctgaggattcacaatgactgg

SEQ ID NO: 3564036 - DNA, 25 bp, Homo sapien
ggaccaagaaagatatctgcgtcag

SEQ ID NO: 3564037 - DNA, 25 bp, Homo sapien
caaagtgaggataagctgcagttct

SEQ ID NO: 3564038 - DNA, 25 bp, Homo sapien
tgaggataagctgcagttctgggtc

SEQ ID NO: 3564039 - DNA, 25 bp, Homo sapien
acagcaaagtgaggataagctgcag

SEQ ID NO: 3564040 - DNA, 25 bp, Homo sapien
ggataagctgcagttctgggtcctc

SEQ ID NO: 3564041 - DNA, 25 bp, Homo sapien
aaaaaccagcccttaatgctggatg

SEQ ID NO: 3564042 - DNA, 25 bp, Homo sapien
agaggattggaaaaataacagataa

SEQ ID NO: 3564043 - DNA, 25 bp, Homo sapien
gcccttaatgctggatgcaagcaat

SEQ ID NO: 3564044 - DNA, 25 bp, Homo sapien
gaaagaggattggaaaaataacaga

SEQ ID NO: 3564045 - DNA, 25 bp, Homo sapien
tatagttctcaatcggaagaccttt

SEQ ID NO: 3564046 - DNA, 25 bp, Homo sapien
cttatagttctcaatcggaagacct

SEQ ID NO: 3564047 - DNA, 25 bp, Homo sapien
ccttatagttctcaatcggaagacc

SEQ ID NO: 3564048 - DNA, 25 bp, Homo sapien
aaccttatagttctcaatcggaaga

SEQ ID NO: 3564049 - DNA, 25 bp, Homo sapien
tgctgccgtgcggccgccgcaggac

SEQ ID NO: 3564050 - DNA, 25 bp, Homo sapien
ctgccgtgcggccgccgcaggacac

SEQ ID NO: 3564051 - DNA, 25 bp, Homo sapien
ttagactgtgctgccgtgcggccgc

SEQ ID NO: 3564052 - DNA, 25 bp, Homo sapien
gccgtgcggccgccgcaggacactt

SEQ ID NO: 3564053 - DNA, 25 bp, Homo sapien
actgaggccactgcactctttcttg

SEQ ID NO: 3564054 - DNA, 25 bp, Homo sapien
catcactgaggccactgcactcttt

SEQ ID NO: 3564055 - DNA, 25 bp, Homo sapien
ctgaggccactgcactctttcttgg

SEQ ID NO: 3564056 - DNA, 25 bp, Homo sapien
tcactgaggccactgcactctttct

SEQ ID NO: 3564057 - DNA, 25 bp, Homo sapien
gaacgatatagagggtgacagatgg

SEQ ID NO: 3564058 - DNA, 25 bp, Homo sapien
tcaagattgctgaacgatatagagg

SEQ ID NO: 3564059 - DNA, 25 bp, Homo sapien
agattgctgaacgatatagagggtg

SEQ ID NO: 3564060 - DNA, 25 bp, Homo sapien
tgaacgatatagagggtgacagatg

SEQ ID NO: 3564061 - DNA, 25 bp, Homo sapien
ctcttccatgcctccaaaaatggca

SEQ ID NO: 3564062 - DNA, 25 bp, Homo sapien
acactcaggagcatgtctctcttcc

SEQ ID NO: 3564063 - DNA, 25 bp, Homo sapien
tctctcttccatgcctccaaaaatg

SEQ ID NO: 3564064 - DNA, 25 bp, Homo sapien
cggccataggccatcacactcagga

SEQ ID NO: 3564065 - DNA, 25 bp, Homo sapien
aacagcccagcgacgaccggctgca

SEQ ID NO: 3564066 - DNA, 25 bp, Homo sapien
aggaacagcccagcgacgaccggct

SEQ ID NO: 3564067 - DNA, 25 bp, Homo sapien
aggcaagggcaggttggaaaggatg

SEQ ID NO: 3564068 - DNA, 25 bp, Homo sapien
caggcaagggcaggttggaaaggat

SEQ ID NO: 3564069 - DNA, 25 bp, Homo sapien
tagactatgtggatctgtatagttt

SEQ ID NO: 3564070 - DNA, 25 bp, Homo sapien
tgttagactatgtggatctgtatag

SEQ ID NO: 3564071 - DNA, 25 bp, Homo sapien
ctgttagactatgtggatctgtata

SEQ ID NO: 3564072 - DNA, 25 bp, Homo sapien
actatgtggatctgtatagtttgga

SEQ ID NO: 3564073 - DNA, 25 bp, Homo sapien
catcatcatgtaagaagaagaagag

SEQ ID NO: 3564074 - DNA, 25 bp, Homo sapien
aaacagggatgaaacactgttctgc

SEQ ID NO: 3564075 - DNA, 25 bp, Homo sapien
aaaacagggatgaaacactgttctg

SEQ ID NO: 3564076 - DNA, 25 bp, Homo sapien
ggcaaacacacactccagctcgttc

SEQ ID NO: 3564077 - DNA, 25 bp, Homo sapien
gggcaaacacacactccagctcgtt

SEQ ID NO: 3564078 - DNA, 25 bp, Homo sapien
ctggggcaaacacacactccagctc

SEQ ID NO: 3564079 - DNA, 25 bp, Homo sapien
caaacacacactccagctcgttcat

SEQ ID NO: 3564080 - DNA, 25 bp, Homo sapien
ctccctggggtctttgtaaatatgg

SEQ ID NO: 3564081 - DNA, 25 bp, Homo sapien
agctccctggggtctttgtaaatat

SEQ ID NO: 3564082 - DNA, 25 bp, Homo sapien
gctccctggggtctttgtaaatatg

SEQ ID NO: 3564083 - DNA, 25 bp, Homo sapien
aatgaccaggaacagcaagacatga

SEQ ID NO: 3564084 - DNA, 25 bp, Homo sapien
tcttaacattgacaatgaccaggaa

SEQ ID NO: 3564085 - DNA, 25 bp, Homo sapien
ggttcttaacattgacaatgaccag

SEQ ID NO: 3564086 - DNA, 25 bp, Homo sapien
ccaggaacagcaagacatgaaaatg

SEQ ID NO: 3564087 - DNA, 25 bp, Homo sapien
ctttacttaaagagaaatgctggta

SEQ ID NO: 3564088 - DNA, 25 bp, Homo sapien
acttaaagagaaatgctggtagtaa

SEQ ID NO: 3564089 - DNA, 25 bp, Homo sapien
ttacttaaagagaaatgctggtagt

SEQ ID NO: 3564090 - DNA, 25 bp, Homo sapien
taaagagaaatgctggtagtaagcc

SEQ ID NO: 3564091 - DNA, 25 bp, Homo sapien
gattagcaatggctggatcaatcac

SEQ ID NO: 3564092 - DNA, 25 bp, Homo sapien
tggctggatcaatcactgtgagtat

SEQ ID NO: 3564093 - DNA, 25 bp, Homo sapien
ttcaaagaaggttttagattagcaa

SEQ ID NO: 3564094 - DNA, 25 bp, Homo sapien
aagaaggttttagattagcaatggc

SEQ ID NO: 3564095 - DNA, 25 bp, Homo sapien
tcatcttaacgtgtctataaaaggc

SEQ ID NO: 3564096 - DNA, 25 bp, Homo sapien
catcttaacgtgtctataaaaggca

SEQ ID NO: 3564097 - DNA, 25 bp, Homo sapien
gacacttactgtagaatgccaaggg

SEQ ID NO: 3564098 - DNA, 25 bp, Homo sapien
actgtagaatgccaagggcactgta

SEQ ID NO: 3564099 - DNA, 25 bp, Homo sapien
ttggacacttactgtagaatgccaa

SEQ ID NO: 3564100 - DNA, 25 bp, Homo sapien
aatgccaattggacacttactgtag

SEQ ID NO: 3564101 - DNA, 25 bp, Homo sapien
ctagaaaatattcagtcgggttaca

SEQ ID NO: 3564102 - DNA, 25 bp, Homo sapien
ttcagtcgggttacaagaggcccag

SEQ ID NO: 3564103 - DNA, 25 bp, Homo sapien
agaaaatattcagtcgggttacaag

SEQ ID NO: 3564104 - DNA, 25 bp, Homo sapien
cagtcgggttacaagaggcccagga

SEQ ID NO: 3564105 - DNA, 25 bp, Homo sapien
tctctgagcctctaagacttctatt

SEQ ID NO: 3564106 - DNA, 25 bp, Homo sapien
tcgctggccatctcctggacggtta

SEQ ID NO: 3564107 - DNA, 25 bp, Homo sapien
tggacggttaagttgaaaatctgac

SEQ ID NO: 3564108 - DNA, 25 bp, Homo sapien
ttttctagctcttggtcgctggcca

SEQ ID NO: 3564109 - DNA, 25 bp, Homo sapien
gagagtagactctcatccaagaccc

SEQ ID NO: 3564110 - DNA, 25 bp, Homo sapien
ttccatggaaagagaatatgtgggt

SEQ ID NO: 3564111 - DNA, 25 bp, Homo sapien
gagttgcattccagaaggttctaga

SEQ ID NO: 3564112 - DNA, 25 bp, Homo sapien
ttctagaaggttctgtggaaggctg

SEQ ID NO: 3564113 - DNA, 25 bp, Homo sapien
caatatgctcgaattataggcacga

SEQ ID NO: 3564114 - DNA, 25 bp, Homo sapien
tatgctcgaattataggcacgaacc

SEQ ID NO: 3564115 - DNA, 25 bp, Homo sapien
cccaatatgctcgaattataggcac

SEQ ID NO: 3564116 - DNA, 25 bp, Homo sapien
tcgaattataggcacgaaccactgt

SEQ ID NO: 3564117 - DNA, 25 bp, Homo sapien
ggtccacccagtgggcggtcgcgtg

SEQ ID NO: 3564118 - DNA, 25 bp, Homo sapien
tggtttggaacccgctccatgtgct

SEQ ID NO: 3564119 - DNA, 25 bp, Homo sapien
aggagtggtttggaacccgctccat

SEQ ID NO: 3564120 - DNA, 25 bp, Homo sapien
gagtggtttggaacccgctccatgt

SEQ ID NO: 3564121 - DNA, 25 bp, Homo sapien
ttggccatttagatgtgtacccccc

SEQ ID NO: 3564122 - DNA, 25 bp, Homo sapien
tggccatttagatgtgtacccccct

SEQ ID NO: 3564123 - DNA, 25 bp, Homo sapien
catttagatgtgtacccccctttat

SEQ ID NO: 3564124 - DNA, 25 bp, Homo sapien
catttagactgtgtctcctagtctc

SEQ ID NO: 3564125 - DNA, 25 bp, Homo sapien
aagtcatttagactgtgtctcctag

SEQ ID NO: 3564126 - DNA, 25 bp, Homo sapien
gtcatttagactgtgtctcctagtc

SEQ ID NO: 3564127 - DNA, 25 bp, Homo sapien
agaagtcatttagactgtgtctcct

SEQ ID NO: 3564128 - DNA, 25 bp, Homo sapien
gcggattactgttctgcgacttccg

SEQ ID NO: 3564129 - DNA, 25 bp, Homo sapien
tgggaaagtgggacagaaagcgtga

SEQ ID NO: 3564130 - DNA, 25 bp, Homo sapien
ggattactgttctgcgacttccgtg

SEQ ID NO: 3564131 - DNA, 25 bp, Homo sapien
gattactgttctgcgacttccgtgt

SEQ ID NO: 3564132 - DNA, 25 bp, Homo sapien
gtcatgacgaggttccacttcccat

SEQ ID NO: 3564133 - DNA, 25 bp, Homo sapien
agtttctggtcatgacgaggttcca

SEQ ID NO: 3564134 - DNA, 25 bp, Homo sapien
tctggtcatgacgaggttccacttc

SEQ ID NO: 3564135 - DNA, 25 bp, Homo sapien
tggtcatgacgaggttccacttccc

SEQ ID NO: 3564136 - DNA, 25 bp, Homo sapien
tgggttgcagatggtaagggccaca

SEQ ID NO: 3564137 - DNA, 25 bp, Homo sapien
gggttgcagatggtaagggccacat

SEQ ID NO: 3564138 - DNA, 25 bp, Homo sapien
ctctgaaagacacagtcatgactct

SEQ ID NO: 3564139 - DNA, 25 bp, Homo sapien
tccagactcactggtgttccttaaa

SEQ ID NO: 3564140 - DNA, 25 bp, Homo sapien
acagtcatgactctgggacagagcc

SEQ ID NO: 3564141 - DNA, 25 bp, Homo sapien
gattgctgacggaccgtcgcgacgt

SEQ ID NO: 3564142 - DNA, 25 bp, Homo sapien
tgcagattgctgacggaccgtcgcg

SEQ ID NO: 3564143 - DNA, 25 bp, Homo sapien
ggattgcagattgctgacggaccgt

SEQ ID NO: 3564144 - DNA, 25 bp, Homo sapien
attgcagattgctgacggaccgtcg

SEQ ID NO: 3564145 - DNA, 25 bp, Homo sapien
cagtcgctgaagatgtatgcccagg

SEQ ID NO: 3564146 - DNA, 25 bp, Homo sapien
gacagtcgctgaagatgtatgccca

SEQ ID NO: 3564147 - DNA, 25 bp, Homo sapien
gatgtatgcccaggggcggcacatc

SEQ ID NO: 3564148 - DNA, 25 bp, Homo sapien
ctgaagatgtatgcccaggggcggc

SEQ ID NO: 3564149 - DNA, 25 bp, Homo sapien
gtgttcttgaagagtgtgactgagc

SEQ ID NO: 3564150 - DNA, 25 bp, Homo sapien
ctgtgttcttgaagagtgtgactga

SEQ ID NO: 3564151 - DNA, 25 bp, Homo sapien
tgatggctgtgttcttgaagagtgt

SEQ ID NO: 3564152 - DNA, 25 bp, Homo sapien
ggctgtgttcttgaagagtgtgact

SEQ ID NO: 3564153 - DNA, 25 bp, Homo sapien
ggccatcagggtctccgccagcacc

SEQ ID NO: 3564154 - DNA, 25 bp, Homo sapien
tccgccagcacctcgtacagctcgt

SEQ ID NO: 3564155 - DNA, 25 bp, Homo sapien
agggtctccgccagcacctcgtaca

SEQ ID NO: 3564156 - DNA, 25 bp, Homo sapien
cagcacctcgtacagctcgtccaaa

SEQ ID NO: 3564157 - DNA, 25 bp, Homo sapien
aagcaccaggcatacttgactgatg

SEQ ID NO: 3564158 - DNA, 25 bp, Homo sapien
caccaggcatacttgactgatggcc

SEQ ID NO: 3564159 - DNA, 25 bp, Homo sapien
aggcatacttgactgatggccggtg

SEQ ID NO: 3564160 - DNA, 25 bp, Homo sapien
caggcatacttgactgatggccggt

SEQ ID NO: 3564161 - DNA, 25 bp, Homo sapien
cgcagcagctcagaatctgatgagt

SEQ ID NO: 3564162 - DNA, 25 bp, Homo sapien
ttctgcaaaatatcccgcagcagct

SEQ ID NO: 3564163 - DNA, 25 bp, Homo sapien
atctgatgagtctcttaactttgct

SEQ ID NO: 3564164 - DNA, 25 bp, Homo sapien
gagtctcttaactttgcttctaagc

SEQ ID NO: 3564165 - DNA, 25 bp, Homo sapien
attcacaggaacattaagcacgcaa

SEQ ID NO: 3564166 - DNA, 25 bp, Homo sapien
taagcacgcaatagaatgtgttggc

SEQ ID NO: 3564167 - DNA, 25 bp, Homo sapien
gttggcaaagcgctgtgtgatctct

SEQ ID NO: 3564168 - DNA, 25 bp, Homo sapien
gaaagcctgaccttcagatgttgca

SEQ ID NO: 3564169 - DNA, 25 bp, Homo sapien
cagtgcacgcgccgccaggaagcgg

SEQ ID NO: 3564170 - DNA, 25 bp, Homo sapien
aaggagcgcagtgcacgcgccgcca

SEQ ID NO: 3564171 - DNA, 25 bp, Homo sapien
ggagcgcagtgcacgcgccgccagg

SEQ ID NO: 3564172 - DNA, 25 bp, Homo sapien
agcgcagtgcacgcgccgccaggaa

SEQ ID NO: 3564173 - DNA, 25 bp, Homo sapien
cagcgttgcccggagaccgggcgga

SEQ ID NO: 3564174 - DNA, 25 bp, Homo sapien
gggccgcagcgttgcccggagaccg

SEQ ID NO: 3564175 - DNA, 25 bp, Homo sapien
tgcccggagaccgggcggaagccag

SEQ ID NO: 3564176 - DNA, 25 bp, Homo sapien
ttgcccggagaccgggcggaagcca

SEQ ID NO: 3564177 - DNA, 25 bp, Homo sapien
cttttgtggttttgatcagctctct

SEQ ID NO: 3564178 - DNA, 25 bp, Homo sapien
tttgtggttttgatcagctctctgc

SEQ ID NO: 3564179 - DNA, 25 bp, Homo sapien
agcttggcttcagaactgggccagg

SEQ ID NO: 3564180 - DNA, 25 bp, Homo sapien
ttaaggaagcttggcttcagaactg

SEQ ID NO: 3564181 - DNA, 25 bp, Homo sapien
gttttttgtgctattgaagcagggc

SEQ ID NO: 3564182 - DNA, 25 bp, Homo sapien
ttttttgtgctattgaagcagggct

SEQ ID NO: 3564183 - DNA, 25 bp, Homo sapien
agttttttgtgctattgaagcaggg

SEQ ID NO: 3564184 - DNA, 25 bp, Homo sapien
tggagctgttggcatcatgttcctg

SEQ ID NO: 3564185 - DNA, 25 bp, Homo sapien
caggagtgttctgcttgaattccct

SEQ ID NO: 3564186 - DNA, 25 bp, Homo sapien
tgggaaacaggagtgttctgcttga

SEQ ID NO: 3564187 - DNA, 25 bp, Homo sapien
ctccccaccatgagacccctttttg

SEQ ID NO: 3564188 - DNA, 25 bp, Homo sapien
accatgagacccctttttgattctt

SEQ ID NO: 3564189 - DNA, 25 bp, Homo sapien
ataagagttcacgagcatttcctgg

SEQ ID NO: 3564190 - DNA, 25 bp, Homo sapien
ctggctgctggtcataagagttcac

SEQ ID NO: 3564191 - DNA, 25 bp, Homo sapien
tggtcataagagttcacgagcattt

SEQ ID NO: 3564192 - DNA, 25 bp, Homo sapien
agagttcacgagcatttcctgggtg

SEQ ID NO: 3564193 - DNA, 25 bp, Homo sapien
tgtggatgctgttaaaagtctcggc

SEQ ID NO: 3564194 - DNA, 25 bp, Homo sapien
aaatctctgaatatggtcttcatat

SEQ ID NO: 3564195 - DNA, 25 bp, Homo sapien
tggcccgaaatctctgaatatggtc

SEQ ID NO: 3564196 - DNA, 25 bp, Homo sapien
tgttaaaagtctcggccaggccatt

SEQ ID NO: 3564197 - DNA, 25 bp, Homo sapien
gaggacattatcaaagccatggctg

SEQ ID NO: 3564198 - DNA, 25 bp, Homo sapien
gccatggctgcctttgttgaaacac

SEQ ID NO: 3564199 - DNA, 25 bp, Homo sapien
catggctgcctttgttgaaacacat

SEQ ID NO: 3564200 - DNA, 25 bp, Homo sapien
aaagccatggctgcctttgttgaaa

SEQ ID NO: 3564201 - DNA, 25 bp, Homo sapien
ttagaatgaacttatcccattgata

SEQ ID NO: 3564202 - DNA, 25 bp, Homo sapien
attgatactgtaactagagttggca

SEQ ID NO: 3564203 - DNA, 25 bp, Homo sapien
gatactgtaactagagttggcatac

SEQ ID NO: 3564204 - DNA, 25 bp, Homo sapien
gaatgaacttatcccattgatactg

SEQ ID NO: 3564205 - DNA, 25 bp, Homo sapien
tctgctctgtctcgttgttattttg

SEQ ID NO: 3564206 - DNA, 25 bp, Homo sapien
ctctgtctcgttgttattttggtga

SEQ ID NO: 3564207 - DNA, 25 bp, Homo sapien
ttcttccccttcacgtacaataaga

SEQ ID NO: 3564208 - DNA, 25 bp, Homo sapien
tcttccccttcacgtacaataagaa

SEQ ID NO: 3564209 - DNA, 25 bp, Homo sapien
catatctagtatagtccagagggaa

SEQ ID NO: 3564210 - DNA, 25 bp, Homo sapien
gacacaaacaggcaactttccagtc

SEQ ID NO: 3564211 - DNA, 25 bp, Homo sapien
tttttattcagccaggagcgttggc

SEQ ID NO: 3564212 - DNA, 25 bp, Homo sapien
ggaggcgtagacagagaaacctagc

SEQ ID NO: 3564213 - DNA, 25 bp, Homo sapien
ctgagccgatccctaaggacagttc

SEQ ID NO: 3564214 - DNA, 25 bp, Homo sapien
tttgatagtttgatgcattcgctcc

SEQ ID NO: 3564215 - DNA, 25 bp, Homo sapien
tgtgatccctaatatctttgccgcc

SEQ ID NO: 3564216 - DNA, 25 bp, Homo sapien
ttgatgcattcgctccacctttccg

SEQ ID NO: 3564217 - DNA, 25 bp, Homo sapien
agcttgtatgccgggtggaatagct

SEQ ID NO: 3564218 - DNA, 25 bp, Homo sapien
ccgggtggaatagctggaccttgcc

SEQ ID NO: 3564219 - DNA, 25 bp, Homo sapien
tatgccgggtggaatagctggacct

SEQ ID NO: 3564220 - DNA, 25 bp, Homo sapien
gggtggaatagctggaccttgcctc

SEQ ID NO: 3564221 - DNA, 25 bp, Homo sapien
tcctcaatcactttgcaataaaacc

SEQ ID NO: 3564222 - DNA, 25 bp, Homo sapien
aaacctgagattgtgaagatgttca

SEQ ID NO: 3564223 - DNA, 25 bp, Homo sapien
tggtcctcaatcactttgcaataaa

SEQ ID NO: 3564224 - DNA, 25 bp, Homo sapien
ataaaacctgagattgtgaagatgt

SEQ ID NO: 3564225 - DNA, 25 bp, Homo sapien
cagtgacggagcagtaagtacagag

SEQ ID NO: 3564226 - DNA, 25 bp, Homo sapien
gtgacggagcagtaagtacagagtt

SEQ ID NO: 3564227 - DNA, 25 bp, Homo sapien
agtgacggagcagtaagtacagagt

SEQ ID NO: 3564228 - DNA, 25 bp, Homo sapien
cagagttgcttttaatcttggcgag

SEQ ID NO: 3564229 - DNA, 25 bp, Homo sapien
gagttgcttttaatcttggcgagaa

SEQ ID NO: 3564230 - DNA, 25 bp, Homo sapien
tcagagttgcttttaatcttggcga

SEQ ID NO: 3564231 - DNA, 25 bp, Homo sapien
cctcagagttgcttttaatcttggc

SEQ ID NO: 3564232 - DNA, 25 bp, Homo sapien
tggggctggcgagcaaatacttaga

SEQ ID NO: 3564233 - DNA, 25 bp, Homo sapien
aacgaacaccctttgtaagaatgtg

SEQ ID NO: 3564234 - DNA, 25 bp, Homo sapien
ctggcgagcaaatacttagaggaga

SEQ ID NO: 3564235 - DNA, 25 bp, Homo sapien
gaacaccctttgtaagaatgtgaaa

SEQ ID NO: 3564236 - DNA, 25 bp, Homo sapien
gcatggcagtgaagtggaacgggga

SEQ ID NO: 3564237 - DNA, 25 bp, Homo sapien
ctcctctgcaggtgcaatggtgtaa

SEQ ID NO: 3564238 - DNA, 25 bp, Homo sapien
actcctctgcaggtgcaatggtgta

SEQ ID NO: 3564239 - DNA, 25 bp, Homo sapien
caataaaacccatcaatgcttggtg

SEQ ID NO: 3564240 - DNA, 25 bp, Homo sapien
tatgctcccggaaatgaaagcaggg

SEQ ID NO: 3564241 - DNA, 25 bp, Homo sapien
gggtagaggcaaaggtcatggactt

SEQ ID NO: 3564242 - DNA, 25 bp, Homo sapien
cacatttcaggtcagcagggtcggg

SEQ ID NO: 3564243 - DNA, 25 bp, Homo sapien
ggtcttcagtatcagattgttgtgt

SEQ ID NO: 3564244 - DNA, 25 bp, Homo sapien
tcagtatcagattgttgtgtttttt

SEQ ID NO: 3564245 - DNA, 25 bp, Homo sapien
tcttcagtatcagattgttgtgttt

SEQ ID NO: 3564246 - DNA, 25 bp, Homo sapien
gaggtcttcagtatcagattgttgt

SEQ ID NO: 3564247 - DNA, 25 bp, Homo sapien
catgagcttcgatcattgttgaaca

SEQ ID NO: 3564248 - DNA, 25 bp, Homo sapien
gaacatttttcaaccttggaacata

SEQ ID NO: 3564249 - DNA, 25 bp, Homo sapien
caaaacataagaaagaagtaaccat

SEQ ID NO: 3564250 - DNA, 25 bp, Homo sapien
tagaagttagtcaggcaatttttgc

SEQ ID NO: 3564251 - DNA, 25 bp, Homo sapien
tggtgaccaagtctttccaatattt

SEQ ID NO: 3564252 - DNA, 25 bp, Homo sapien
tcctggtgaccaagtctttccaata

SEQ ID NO: 3564253 - DNA, 25 bp, Homo sapien
cttgggtcctggtgaccaagtcttt

SEQ ID NO: 3564254 - DNA, 25 bp, Homo sapien
ttgggtcctggtgaccaagtctttc

SEQ ID NO: 3564255 - DNA, 25 bp, Homo sapien
tattgaacatagcaggtgctttcac

SEQ ID NO: 3564256 - DNA, 25 bp, Homo sapien
cttatattgaacatagcaggtgctt

SEQ ID NO: 3564257 - DNA, 25 bp, Homo sapien
ttatattgaacatagcaggtgcttt

SEQ ID NO: 3564258 - DNA, 25 bp, Homo sapien
tatattgaacatagcaggtgctttc

SEQ ID NO: 3564259 - DNA, 25 bp, Homo sapien
gatctttcttagagaatggaccaat

SEQ ID NO: 3564260 - DNA, 25 bp, Homo sapien
ctttcttagagaatggaccaattac

SEQ ID NO: 3564261 - DNA, 25 bp, Homo sapien
ctgatctttcttagagaatggacca

SEQ ID NO: 3564262 - DNA, 25 bp, Homo sapien
tactgatctttcttagagaatggac

SEQ ID NO: 3564263 - DNA, 25 bp, Homo sapien
ttcataaggcacttgttcttaacaa

SEQ ID NO: 3564264 - DNA, 25 bp, Homo sapien
ggcacttgttcttaacaaccgccat

SEQ ID NO: 3564265 - DNA, 25 bp, Homo sapien
cataaggcacttgttcttaacaacc

SEQ ID NO: 3564266 - DNA, 25 bp, Homo sapien
taaggcacttgttcttaacaaccgc

SEQ ID NO: 3564267 - DNA, 25 bp, Homo sapien
caaacagtggctctttatagcttga

SEQ ID NO: 3564268 - DNA, 25 bp, Homo sapien
tctttagcaaagacccagcagggcc

SEQ ID NO: 3564269 - DNA, 25 bp, Homo sapien
taatcaggtgatgaaaacggcccca

SEQ ID NO: 3564270 - DNA, 25 bp, Homo sapien
taatcattgtaaagttctctggccc

SEQ ID NO: 3564271 - DNA, 25 bp, Homo sapien
gtgaaatatctcatggaatatagca

SEQ ID NO: 3564272 - DNA, 25 bp, Homo sapien
ttctttgagtgtgaaatatctcatg

SEQ ID NO: 3564273 - DNA, 25 bp, Homo sapien
gagtgtgaaatatctcatggaatat

SEQ ID NO: 3564274 - DNA, 25 bp, Homo sapien
cagtgattcccagacaaattatcaa

SEQ ID NO: 3564275 - DNA, 25 bp, Homo sapien
ccatgatgaacgacacagtaactat

SEQ ID NO: 3564276 - DNA, 25 bp, Homo sapien
ctgaggatcaaccaccatgatgaac

SEQ ID NO: 3564277 - DNA, 25 bp, Homo sapien
tgatgaacgacacagtaactatctg

SEQ ID NO: 3564278 - DNA, 25 bp, Homo sapien
tgaggatcaaccaccatgatgaacg

SEQ ID NO: 3564279 - DNA, 25 bp, Homo sapien
ccaatcgaccactccaggggaaaca

SEQ ID NO: 3564280 - DNA, 25 bp, Homo sapien
tcgaccactccaggggaaacacatg

SEQ ID NO: 3564281 - DNA, 25 bp, Homo sapien
gaccaatcgaccactccaggggaaa

SEQ ID NO: 3564282 - DNA, 25 bp, Homo sapien
aatcgaccactccaggggaaacaca

SEQ ID NO: 3564283 - DNA, 25 bp, Homo sapien
taaagggtctgcatgcagagtgagc

SEQ ID NO: 3564284 - DNA, 25 bp, Homo sapien
cagagtgagcaagccacctggatga

SEQ ID NO: 3564285 - DNA, 25 bp, Homo sapien
tctctcttacgtgatgacaaacttg

SEQ ID NO: 3564286 - DNA, 25 bp, Homo sapien
tcttacgtgatgacaaacttgttga

SEQ ID NO: 3564287 - DNA, 25 bp, Homo sapien
tccctgtgtgtaaaatccaacaaca

SEQ ID NO: 3564288 - DNA, 25 bp, Homo sapien
tttccctgtgtgtaaaatccaacaa

SEQ ID NO: 3564289 - DNA, 25 bp, Homo sapien
gatttccctgtgtgtaaaatccaac

SEQ ID NO: 3564290 - DNA, 25 bp, Homo sapien
ttagatttccctgtgtgtaaaatcc

SEQ ID NO: 3564291 - DNA, 25 bp, Homo sapien
tcctagcagtcctgggagagaagca

SEQ ID NO: 3564292 - DNA, 25 bp, Homo sapien
gtggtttccaatcccactttccaga

SEQ ID NO: 3564293 - DNA, 25 bp, Homo sapien
cttgtcttcctagcagtcctgggag

SEQ ID NO: 3564294 - DNA, 25 bp, Homo sapien
gccatctaatcttgtcttcctagca

SEQ ID NO: 3564295 - DNA, 25 bp, Homo sapien
agtccagccctcactaaacgctgaa

SEQ ID NO: 3564296 - DNA, 25 bp, Homo sapien
agccctcactaaacgctgaaactct

SEQ ID NO: 3564297 - DNA, 25 bp, Homo sapien
actaaacgctgaaactcttgttgac

SEQ ID NO: 3564298 - DNA, 25 bp, Homo sapien
ttccaaggctttccttcagtccagc

SEQ ID NO: 3564299 - DNA, 25 bp, Homo sapien
tggactctcctcctcaaataaatca

SEQ ID NO: 3564300 - DNA, 25 bp, Homo sapien
actgccatcgtaattgtgtccccga

SEQ ID NO: 3564301 - DNA, 25 bp, Homo sapien
ttacactgccatcgtaattgtgtcc

SEQ ID NO: 3564302 - DNA, 25 bp, Homo sapien
ccatcgtaattgtgtccccgaccag

SEQ ID NO: 3564303 - DNA, 25 bp, Homo sapien
tcgtaattgtgtccccgaccaggac

SEQ ID NO: 3564304 - DNA, 25 bp, Homo sapien
ctgaatgcggtaacgtgcacgggga

SEQ ID NO: 3564305 - DNA, 25 bp, Homo sapien
atgcggtaacgtgcacggggagata

SEQ ID NO: 3564306 - DNA, 25 bp, Homo sapien
cggtaacgtgcacggggagataagg

SEQ ID NO: 3564307 - DNA, 25 bp, Homo sapien
cgtgcacggggagataaggatgtca

SEQ ID NO: 3564308 - DNA, 25 bp, Homo sapien
catgagcaagcctcccagacggcat

SEQ ID NO: 3564309 - DNA, 25 bp, Homo sapien
gcaggggggctctgatgccgcccac

SEQ ID NO: 3564310 - DNA, 25 bp, Homo sapien
gacggcatccaggagcaaccccaag

SEQ ID NO: 3564311 - DNA, 25 bp, Homo sapien
cagacggcatccaggagcaacccca

SEQ ID NO: 3564312 - DNA, 25 bp, Homo sapien
cgaatccaattattaagacaagctc

SEQ ID NO: 3564313 - DNA, 25 bp, Homo sapien
ccatgtggggctcattaaccacgaa

SEQ ID NO: 3564314 - DNA, 25 bp, Homo sapien
taaatgggttccgaatgaaggccgc

SEQ ID NO: 3564315 - DNA, 25 bp, Homo sapien
gttccgaatgaaggccgccctctcg

SEQ ID NO: 3564316 - DNA, 25 bp, Homo sapien
ggagctcacagggacagcgtcccgg

SEQ ID NO: 3564317 - DNA, 25 bp, Homo sapien
ctcacagggacagcgtcccggggga

SEQ ID NO: 3564318 - DNA, 25 bp, Homo sapien
gtgtgcaggacaccgggagctcaca

SEQ ID NO: 3564319 - DNA, 25 bp, Homo sapien
cacagggacagcgtcccgggggatg

SEQ ID NO: 3564320 - DNA, 25 bp, Homo sapien
cgcggtgcgtcctccccgtcatcgg

SEQ ID NO: 3564321 - DNA, 25 bp, Homo sapien
tcctccccgtcatcgggctgtgcgc

SEQ ID NO: 3564322 - DNA, 25 bp, Homo sapien
cgtcctccccgtcatcgggctgtgc

SEQ ID NO: 3564323 - DNA, 25 bp, Homo sapien
ggtgcgtcctccccgtcatcgggct

SEQ ID NO: 3564324 - DNA, 25 bp, Homo sapien
cgcgggccgctcgttgctctctggc

SEQ ID NO: 3564325 - DNA, 25 bp, Homo sapien
ggcgcggagctaggcatcggggcgg

SEQ ID NO: 3564326 - DNA, 25 bp, Homo sapien
ggagctaggcatcggggcgggcgtg

SEQ ID NO: 3564327 - DNA, 25 bp, Homo sapien
ccgcgggccgctcgttgctctctgg

SEQ ID NO: 3564328 - DNA, 25 bp, Homo sapien
ggcctgcgctgagctcgcctgccct

SEQ ID NO: 3564329 - DNA, 25 bp, Homo sapien
tcctccccgccccaaccaggttgca

SEQ ID NO: 3564330 - DNA, 25 bp, Homo sapien
aaccaggttgcaccccgatggtctc

SEQ ID NO: 3564331 - DNA, 25 bp, Homo sapien
cccaaccaggttgcaccccgatggt

SEQ ID NO: 3564332 - DNA, 25 bp, Homo sapien
cgccccaaccaggttgcaccccgat

SEQ ID NO: 3564333 - DNA, 25 bp, Homo sapien
ctgcccaaggaggagagaagggacg

SEQ ID NO: 3564334 - DNA, 25 bp, Homo sapien
caaggaggagagaagggacgccccg

SEQ ID NO: 3564335 - DNA, 25 bp, Homo sapien
gcccaaggaggagagaagggacgcc

SEQ ID NO: 3564336 - DNA, 25 bp, Homo sapien
tgcccaaggaggagagaagggacgc

SEQ ID NO: 3564337 - DNA, 25 bp, Homo sapien
gcaatttgtcaagaagctgcacggc

SEQ ID NO: 3564338 - DNA, 25 bp, Homo sapien
ctcgtgggcacctttgcaatttgtc

SEQ ID NO: 3564339 - DNA, 25 bp, Homo sapien
caatttgtcaagaagctgcacggcc

SEQ ID NO: 3564340 - DNA, 25 bp, Homo sapien
acttggaaactcgtgggcacctttg

SEQ ID NO: 3564341 - DNA, 25 bp, Homo sapien
tgtcgctgtctagagcccggatctg

SEQ ID NO: 3564342 - DNA, 25 bp, Homo sapien
gggtttgcatgtcgctgtctagagc

SEQ ID NO: 3564343 - DNA, 25 bp, Homo sapien
tcgctgtctagagcccggatctgct

SEQ ID NO: 3564344 - DNA, 25 bp, Homo sapien
cagggtttgcatgtcgctgtctaga

SEQ ID NO: 3564345 - DNA, 25 bp, Homo sapien
gggccctgcagggagtcccaccgct

SEQ ID NO: 3564346 - DNA, 25 bp, Homo sapien
gccctgcagggagtcccaccgcttc

SEQ ID NO: 3564347 - DNA, 25 bp, Homo sapien
tccgtgagcctccacatcggggcct

SEQ ID NO: 3564348 - DNA, 25 bp, Homo sapien
cctgcagggagtcccaccgcttccc

SEQ ID NO: 3564349 - DNA, 25 bp, Homo sapien
tacttggcttttgctttcatcacat

SEQ ID NO: 3564350 - DNA, 25 bp, Homo sapien
gctttcatcacatcgttgaggaaag

SEQ ID NO: 3564351 - DNA, 25 bp, Homo sapien
catcacatcgttgaggaaagaggtg

SEQ ID NO: 3564352 - DNA, 25 bp, Homo sapien
aggaaagaggtggttgcttatggta

SEQ ID NO: 3564353 - DNA, 25 bp, Homo sapien
ggtggataatccaggcacctgctcc

SEQ ID NO: 3564354 - DNA, 25 bp, Homo sapien
ttagggtggataatccaggcacctg

SEQ ID NO: 3564355 - DNA, 25 bp, Homo sapien
tttgttagggtggataatccaggca

SEQ ID NO: 3564356 - DNA, 25 bp, Homo sapien
tcctttgtccagatttgttagggtg

SEQ ID NO: 3564357 - DNA, 25 bp, Homo sapien
actgttgtgctgtgcagcctccaca

SEQ ID NO: 3564358 - DNA, 25 bp, Homo sapien
ccacagggcactttgtatgttcctg

SEQ ID NO: 3564359 - DNA, 25 bp, Homo sapien
cgactgttgtgctgtgcagcctcca

SEQ ID NO: 3564360 - DNA, 25 bp, Homo sapien
tgttgtgctgtgcagcctccacagg

SEQ ID NO: 3564361 - DNA, 25 bp, Homo sapien
tccaacaggctaaggaaaaaggaca

SEQ ID NO: 3564362 - DNA, 25 bp, Homo sapien
acaatccaactgtgcagctgggaat

SEQ ID NO: 3564363 - DNA, 25 bp, Homo sapien
gctgggaatccaacaggctaaggaa

SEQ ID NO: 3564364 - DNA, 25 bp, Homo sapien
aatccaactgtgcagctgggaatcc

SEQ ID NO: 3564365 - DNA, 25 bp, Homo sapien
gtcagacagcccgcatgagacgtga

SEQ ID NO: 3564366 - DNA, 25 bp, Homo sapien
gcgtcagacagcccgcatgagacgt

SEQ ID NO: 3564367 - DNA, 25 bp, Homo sapien
cagacagcccgcatgagacgtgact

SEQ ID NO: 3564368 - DNA, 25 bp, Homo sapien
gacagcccgcatgagacgtgactct

SEQ ID NO: 3564369 - DNA, 25 bp, Homo sapien
tgtggaggggggagtcagagcagac

SEQ ID NO: 3564370 - DNA, 25 bp, Homo sapien
gaggggggagtcagagcagacagcc

SEQ ID NO: 3564371 - DNA, 25 bp, Homo sapien
tggaggggggagtcagagcagacag

SEQ ID NO: 3564372 - DNA, 25 bp, Homo sapien
gtgtggaggggggagtcagagcaga

SEQ ID NO: 3564373 - DNA, 25 bp, Homo sapien
ggataggctgcagttctgggtcctc

SEQ ID NO: 3564374 - DNA, 25 bp, Homo sapien
gaggataggctgcagttctgggtcc

SEQ ID NO: 3564375 - DNA, 25 bp, Homo sapien
gcgaggataggctgcagttctgggt

SEQ ID NO: 3564376 - DNA, 25 bp, Homo sapien
ataggctgcagttctgggtcctctg

SEQ ID NO: 3564377 - DNA, 25 bp, Homo sapien
ctactgggcacagggtgaccccacc

SEQ ID NO: 3564378 - DNA, 25 bp, Homo sapien
tactgggcacagggtgaccccaccg

SEQ ID NO: 3564379 - DNA, 25 bp, Homo sapien
cattttctgtaaaaaatcgtggctc

SEQ ID NO: 3564380 - DNA, 25 bp, Homo sapien
gataggaggtgcaaagtgcgctcac

SEQ ID NO: 3564381 - DNA, 25 bp, Homo sapien
aagtgcgctcacacgcggcccgggt

SEQ ID NO: 3564382 - DNA, 25 bp, Homo sapien
aatcgtggctctcggcggaccctgg

SEQ ID NO: 3564383 - DNA, 25 bp, Homo sapien
cgacctcagacgtggtaaactgagg

SEQ ID NO: 3564384 - DNA, 25 bp, Homo sapien
ccgacctcagacgtggtaaactgag

SEQ ID NO: 3564385 - DNA, 25 bp, Homo sapien
gccctccgcgtcgctctcgtccgag

SEQ ID NO: 3564386 - DNA, 25 bp, Homo sapien
tcgccctccgcgtcgctctcgtccg

SEQ ID NO: 3564387 - DNA, 25 bp, Homo sapien
ccctccgcgtcgctctcgtccgagt

SEQ ID NO: 3564388 - DNA, 25 bp, Homo sapien
cgccctccgcgtcgctctcgtccga

SEQ ID NO: 3564389 - DNA, 25 bp, Homo sapien
ggtgcatgcgccagtgttgataaag

SEQ ID NO: 3564390 - DNA, 25 bp, Homo sapien
cccgtgggctgtagtgatgcttttc

SEQ ID NO: 3564391 - DNA, 25 bp, Homo sapien
gtccctgacacacccgtgggctgta

SEQ ID NO: 3564392 - DNA, 25 bp, Homo sapien
gggacaatgcaaatccctttgcctc

SEQ ID NO: 3564393 - DNA, 25 bp, Homo sapien
actccagatctcagaacccccacct

SEQ ID NO: 3564394 - DNA, 25 bp, Homo sapien
ccagatctcagaacccccacctcag

SEQ ID NO: 3564395 - DNA, 25 bp, Homo sapien
aactccagatctcagaacccccacc

SEQ ID NO: 3564396 - DNA, 25 bp, Homo sapien
ccacagcctgccaccagtggtagat

SEQ ID NO: 3564397 - DNA, 25 bp, Homo sapien
caaagggcagctgccacatagagga

SEQ ID NO: 3564398 - DNA, 25 bp, Homo sapien
aggtgcacccctgctccggccacca

SEQ ID NO: 3564399 - DNA, 25 bp, Homo sapien
ccagtcttgttcagggcactgccca

SEQ ID NO: 3564400 - DNA, 25 bp, Homo sapien
ctgctccggccaccaggggcaccgg

SEQ ID NO: 3564401 - DNA, 25 bp, Homo sapien
ggacaaggggtgagtgttgaagtct

SEQ ID NO: 3564402 - DNA, 25 bp, Homo sapien
gtgttgaagtctggaacagcccaga

SEQ ID NO: 3564403 - DNA, 25 bp, Homo sapien
gggtgagtgttgaagtctggaacag

SEQ ID NO: 3564404 - DNA, 25 bp, Homo sapien
tgaagtctggaacagcccagaccac

SEQ ID NO: 3564405 - DNA, 25 bp, Homo sapien
tggaatgtccctagacaccgtgggc

SEQ ID NO: 3564406 - DNA, 25 bp, Homo sapien
caaggaactaaacactctgtgggtg

SEQ ID NO: 3564407 - DNA, 25 bp, Homo sapien
ggtgctatcccatttcgattcagag

SEQ ID NO: 3564408 - DNA, 25 bp, Homo sapien
cacaagaggtgttccttaggccaca

SEQ ID NO: 3564409 - DNA, 25 bp, Homo sapien
tgcgcagatcgatctcctccgtggg

SEQ ID NO: 3564410 - DNA, 25 bp, Homo sapien
tcgaagccgctgtagataaagaaag

SEQ ID NO: 3564411 - DNA, 25 bp, Homo sapien
tcacgcacgtgcttgaagggcagct

SEQ ID NO: 3564412 - DNA, 25 bp, Homo sapien
ataaagaaaggcacgaggtggcgca

SEQ ID NO: 3564413 - DNA, 25 bp, Homo sapien
atgccatccgatccagaccctttct

SEQ ID NO: 3564414 - DNA, 25 bp, Homo sapien
gccatgccatccgatccagaccctt

SEQ ID NO: 3564415 - DNA, 25 bp, Homo sapien
catgccatccgatccagaccctttc

SEQ ID NO: 3564416 - DNA, 25 bp, Homo sapien
caggccatgccatccgatccagacc

SEQ ID NO: 3564417 - DNA, 25 bp, Homo sapien
agccgctgaggatcccgtggctgtt

SEQ ID NO: 3564418 - DNA, 25 bp, Homo sapien
accacaatgaggtttccgctccgcg

SEQ ID NO: 3564419 - DNA, 25 bp, Homo sapien
gaaccgtcttgttgaagccgctgag

SEQ ID NO: 3564420 - DNA, 25 bp, Homo sapien
tccgcgggagcgtccgcagaaccgt

SEQ ID NO: 3564421 - DNA, 25 bp, Homo sapien
cgcaggccgcggaggagcggtggag

SEQ ID NO: 3564422 - DNA, 25 bp, Homo sapien
tgagagcaagggcagagttccttca

SEQ ID NO: 3564423 - DNA, 25 bp, Homo sapien
caccgtgagcagagagtagggcaca

SEQ ID NO: 3564424 - DNA, 25 bp, Homo sapien
tagggcacacagtcaatccagccac

SEQ ID NO: 3564425 - DNA, 25 bp, Homo sapien
ggaagtaagcaggctttgtggactc

SEQ ID NO: 3564426 - DNA, 25 bp, Homo sapien
gaagtaagcaggctttgtggactcc

SEQ ID NO: 3564427 - DNA, 25 bp, Homo sapien
agtaagcaggctttgtggactcctc

SEQ ID NO: 3564428 - DNA, 25 bp, Homo sapien
gtaagcaggctttgtggactcctcc

SEQ ID NO: 3564429 - DNA, 25 bp, Homo sapien
tcaggtcatacaggtagtggttcag

SEQ ID NO: 3564430 - DNA, 25 bp, Homo sapien
tacagcgtgtggttcaggtcataca

SEQ ID NO: 3564431 - DNA, 25 bp, Homo sapien
tagtggttcaggaaataaatcatgg

SEQ ID NO: 3564432 - DNA, 25 bp, Homo sapien
cgcagctctgcacattgtacagcgt

SEQ ID NO: 3564433 - DNA, 25 bp, Homo sapien
cttgtagtgggagtactcatggtac

SEQ ID NO: 3564434 - DNA, 25 bp, Homo sapien
gagatagggcgcgtgggagccccgc

SEQ ID NO: 3564435 - DNA, 25 bp, Homo sapien
tagaagatggcttggaagaccagga

SEQ ID NO: 3564436 - DNA, 25 bp, Homo sapien
cccatcctgctccttgtagtgggag

SEQ ID NO: 3564437 - DNA, 25 bp, Homo sapien
cacaaaggagagaaggctctcccca

SEQ ID NO: 3564438 - DNA, 25 bp, Homo sapien
ccacaaaggagagaaggctctcccc

SEQ ID NO: 3564439 - DNA, 25 bp, Homo sapien
tggaccacaaaggagagaaggctct

SEQ ID NO: 3564440 - DNA, 25 bp, Homo sapien
aaaggagagaaggctctccccagcc

SEQ ID NO: 3564441 - DNA, 25 bp, Homo sapien
actcctgtgtgtcctgcacccagag

SEQ ID NO: 3564442 - DNA, 25 bp, Homo sapien
tgtgccactcctgtgtgtcctgcac

SEQ ID NO: 3564443 - DNA, 25 bp, Homo sapien
ctgtgccactcctgtgtgtcctgca

SEQ ID NO: 3564444 - DNA, 25 bp, Homo sapien
gccactcctgtgtgtcctgcaccca

SEQ ID NO: 3564445 - DNA, 25 bp, Homo sapien
cccagccaaagttggcaataaagtg

SEQ ID NO: 3564446 - DNA, 25 bp, Homo sapien
ccagccaaagttggcaataaagtgg

SEQ ID NO: 3564447 - DNA, 25 bp, Homo sapien
ggtgatgtagttgcccatggaagcc

SEQ ID NO: 3564448 - DNA, 25 bp, Homo sapien
gatgtagttgcccatggaagcccaa

SEQ ID NO: 3564449 - DNA, 25 bp, Homo sapien
ctggtgatgtagttgcccatggaag

SEQ ID NO: 3564450 - DNA, 25 bp, Homo sapien
tgatgtagttgcccatggaagccca

SEQ ID NO: 3564451 - DNA, 25 bp, Homo sapien
tagtagcgctcccagtagttggtgg

SEQ ID NO: 3564452 - DNA, 25 bp, Homo sapien
catcatccacttcgttccaaaaaac

SEQ ID NO: 3564453 - DNA, 25 bp, Homo sapien
gacaaagagggcgtagatgcccaca

SEQ ID NO: 3564454 - DNA, 25 bp, Homo sapien
agggcacaagcgtgtagtagcgctc

SEQ ID NO: 3564455 - DNA, 25 bp, Homo sapien
ttgccatacttcacctcgcggtagg

SEQ ID NO: 3564456 - DNA, 25 bp, Homo sapien
gggagtcacgttgatgcccatcagc

SEQ ID NO: 3564457 - DNA, 25 bp, Homo sapien
taggtctcgtcgtagtgcaggatca

SEQ ID NO: 3564458 - DNA, 25 bp, Homo sapien
agcattttgctgtcgatgtcgggca

SEQ ID NO: 3564459 - DNA, 25 bp, Homo sapien
accgaaggcattcccgctgacagcg

SEQ ID NO: 3564460 - DNA, 25 bp, Homo sapien
agggagctccaatcaccgaaggcat

SEQ ID NO: 3564461 - DNA, 25 bp, Homo sapien
agaagacggcatgcaggcctcgcag

SEQ ID NO: 3564462 - DNA, 25 bp, Homo sapien
aattctgacggtggcaggtctgtcc

SEQ ID NO: 3564463 - DNA, 25 bp, Homo sapien
cagcacgttcttgagcacgcccagg

SEQ ID NO: 3564464 - DNA, 25 bp, Homo sapien
ttgagcacgcccaggcgcttgcggc

SEQ ID NO: 3564465 - DNA, 25 bp, Homo sapien
gtagacgccgtaggtgagcatgccc

SEQ ID NO: 3564466 - DNA, 25 bp, Homo sapien
tcctcgttgtagttggggtacgcgc

SEQ ID NO: 3564467 - DNA, 25 bp, Homo sapien
tggcccacaggggacgcccgcgcct

SEQ ID NO: 3564468 - DNA, 25 bp, Homo sapien
ctgcgagccacgcacgccgctcgca

SEQ ID NO: 3564469 - DNA, 25 bp, Homo sapien
gcgatcgcgccccgaacccgtgtcc

SEQ ID NO: 3564470 - DNA, 25 bp, Homo sapien
gacgcccgcgcctcgcactccgggt

SEQ ID NO: 3564471 - DNA, 25 bp, Homo sapien
cccgccatcgggtagagcggcggct

SEQ ID NO: 3564472 - DNA, 25 bp, Homo sapien
cccgagcaggtcctcgtcgccctgc

SEQ ID NO: 3564473 - DNA, 25 bp, Homo sapien
ccatcgggtagagcggcggctccgc

SEQ ID NO: 3564474 - DNA, 25 bp, Homo sapien
cgggaccccgagcaggtcctcgtcg

SEQ ID NO: 3564475 - DNA, 25 bp, Homo sapien
ggcccgaactactgcggactcgcgg

SEQ ID NO: 3564476 - DNA, 25 bp, Homo sapien
cgaactactgcggactcgcggcggt

SEQ ID NO: 3564477 - DNA, 25 bp, Homo sapien
ccgaactactgcggactcgcggcgg

SEQ ID NO: 3564478 - DNA, 25 bp, Homo sapien
gcccgaactactgcggactcgcggc

SEQ ID NO: 3564479 - DNA, 25 bp, Homo sapien
tgcgaccgcccggccacttcctccc

SEQ ID NO: 3564480 - DNA, 25 bp, Homo sapien
ctgcgaccgcccggccacttcctcc

SEQ ID NO: 3564481 - DNA, 25 bp, Homo sapien
agaccatccctgcagagaatgcagt

SEQ ID NO: 3564482 - DNA, 25 bp, Homo sapien
agctctcagaacaagagaccatccc

SEQ ID NO: 3564483 - DNA, 25 bp, Homo sapien
ccttctggtttgaatgctcttcctg

SEQ ID NO: 3564484 - DNA, 25 bp, Homo sapien
tggagccacggggccacttttgaaa

SEQ ID NO: 3564485 - DNA, 25 bp, Homo sapien
tccaggcaccttggaagcaccgtgg

SEQ ID NO: 3564486 - DNA, 25 bp, Homo sapien
aggcaccttggaagcaccgtgggcc

SEQ ID NO: 3564487 - DNA, 25 bp, Homo sapien
tccagcccattcctgtgcgagggct

SEQ ID NO: 3564488 - DNA, 25 bp, Homo sapien
agcccattcctgtgcgagggctcca

SEQ ID NO: 3564489 - DNA, 25 bp, Homo sapien
gatcagaatcggagaccctgcggta

SEQ ID NO: 3564490 - DNA, 25 bp, Homo sapien
tcacatggcacaactcagaacgctg

SEQ ID NO: 3564491 - DNA, 25 bp, Homo sapien
ttcaagtaaacaggcagggctcggg

SEQ ID NO: 3564492 - DNA, 25 bp, Homo sapien
tgaagttggcctagtgatccccgcc

SEQ ID NO: 3564493 - DNA, 25 bp, Homo sapien
gttgaaatatgtgccctggagacac

SEQ ID NO: 3564494 - DNA, 25 bp, Homo sapien
acacagcatattgggttgaaatatg

SEQ ID NO: 3564495 - DNA, 25 bp, Homo sapien
tgtttctgcttgaggagcagcaagg

SEQ ID NO: 3564496 - DNA, 25 bp, Homo sapien
ggctttagagcagagacgtgaagat

SEQ ID NO: 3564497 - DNA, 25 bp, Homo sapien
gcagtagcccagaacattcaacctg

SEQ ID NO: 3564498 - DNA, 25 bp, Homo sapien
tagcccagaacattcaacctggtcc

SEQ ID NO: 3564499 - DNA, 25 bp, Homo sapien
gcagcagtagcccagaacattcaac

SEQ ID NO: 3564500 - DNA, 25 bp, Homo sapien
cagctgcaggagcggggccctacaa

SEQ ID NO: 3564501 - DNA, 25 bp, Homo sapien
ctctctgaaccaggttctgcatctg

SEQ ID NO: 3564502 - DNA, 25 bp, Homo sapien
aggttctgcatctgaaagtgggtga

SEQ ID NO: 3564503 - DNA, 25 bp, Homo sapien
accaggttctgcatctgaaagtggg

SEQ ID NO: 3564504 - DNA, 25 bp, Homo sapien
ctgaaagtgggtgaggctgatgcct

SEQ ID NO: 3564505 - DNA, 25 bp, Homo sapien
tgacatcctctttcggccccaggat

SEQ ID NO: 3564506 - DNA, 25 bp, Homo sapien
tggaagcaagtctctaagcctaccc

SEQ ID NO: 3564507 - DNA, 25 bp, Homo sapien
ggaaggatctcctgacccataaaaa

SEQ ID NO: 3564508 - DNA, 25 bp, Homo sapien
taataaccctctcagcttaaggagt

SEQ ID NO: 3564509 - DNA, 25 bp, Homo sapien
gctcagaagcccatgtaagatgtcc

SEQ ID NO: 3564510 - DNA, 25 bp, Homo sapien
ggtggcttgcccgtactacctggga

SEQ ID NO: 3564511 - DNA, 25 bp, Homo sapien
aggagccctgcttcatctggatact

SEQ ID NO: 3564512 - DNA, 25 bp, Homo sapien
cagcctcttgggttgtgaccacctc

SEQ ID NO: 3564513 - DNA, 25 bp, Homo sapien
cacctcaatgtagagggacaggcaa

SEQ ID NO: 3564514 - DNA, 25 bp, Homo sapien
tccatgtccccaagcaacactaggt

SEQ ID NO: 3564515 - DNA, 25 bp, Homo sapien
tgtccaggaaacatgtcccaagttg

SEQ ID NO: 3564516 - DNA, 25 bp, Homo sapien
tcagcatggaccacacatgagcaga

SEQ ID NO: 3564517 - DNA, 25 bp, Homo sapien
taactctttatcctcatggtgccca

SEQ ID NO: 3564518 - DNA, 25 bp, Homo sapien
tacgagtcatactcttccccatgct

SEQ ID NO: 3564519 - DNA, 25 bp, Homo sapien
ccatgccagaggagcttgtaactct

SEQ ID NO: 3564520 - DNA, 25 bp, Homo sapien
tgtggttatgcgatagggtctccct

SEQ ID NO: 3564521 - DNA, 25 bp, Homo sapien
tactgtagtttctccacgcagagct

SEQ ID NO: 3564522 - DNA, 25 bp, Homo sapien
tcagcttcccgccttaacgtggtaa

SEQ ID NO: 3564523 - DNA, 25 bp, Homo sapien
gcggctcggaggtcttcacttattg

SEQ ID NO: 3564524 - DNA, 25 bp, Homo sapien
aaagaggccgcgtgagttgagcatc

SEQ ID NO: 3564525 - DNA, 25 bp, Homo sapien
tgaccaagtcccctcccgacatggg

SEQ ID NO: 3564526 - DNA, 25 bp, Homo sapien
gttgggggcccaagcaccctgactc

SEQ ID NO: 3564527 - DNA, 25 bp, Homo sapien
cgacatgggctccaccacatcacac

SEQ ID NO: 3564528 - DNA, 25 bp, Homo sapien
atccacccacacaggccgttggggg

SEQ ID NO: 3564529 - DNA, 25 bp, Homo sapien
tctgttgggagtggtgccaatatcc

SEQ ID NO: 3564530 - DNA, 25 bp, Homo sapien
ggtgccaatatccatgccctggtgc

SEQ ID NO: 3564531 - DNA, 25 bp, Homo sapien
tgccaatatccatgccctggtgccg

SEQ ID NO: 3564532 - DNA, 25 bp, Homo sapien
ttactctctgttgggagtggtgcca

SEQ ID NO: 3564533 - DNA, 25 bp, Homo sapien
tgcccagcagattcagcttagagaa

SEQ ID NO: 3564534 - DNA, 25 bp, Homo sapien
ccaggggtcgtatcaggggctctaa

SEQ ID NO: 3564535 - DNA, 25 bp, Homo sapien
cagcttagagaaacggtgctcacag

SEQ ID NO: 3564536 - DNA, 25 bp, Homo sapien
tatcaggggctctaaggtaattcca

SEQ ID NO: 3564537 - DNA, 25 bp, Homo sapien
gctcttcgcttctgggctagaagca

SEQ ID NO: 3564538 - DNA, 25 bp, Homo sapien
ccagtctccaacgtcctccagggct

SEQ ID NO: 3564539 - DNA, 25 bp, Homo sapien
ctcttcgcttctgggctagaagcag

SEQ ID NO: 3564540 - DNA, 25 bp, Homo sapien
ctcccagtctccaacgtcctccagg

SEQ ID NO: 3564541 - DNA, 25 bp, Homo sapien
tatatggatttcacagctacactcg

SEQ ID NO: 3564542 - DNA, 25 bp, Homo sapien
gctaagactgtatcccgcaggacat

SEQ ID NO: 3564543 - DNA, 25 bp, Homo sapien
gaggcccaaagagctaggtcaagca

SEQ ID NO: 3564544 - DNA, 25 bp, Homo sapien
tgtcccttgggagtgagcaccgtct

SEQ ID NO: 3564545 - DNA, 25 bp, Homo sapien
cacaggagcagtagtcgaagcacag

SEQ ID NO: 3564546 - DNA, 25 bp, Homo sapien
tgtgttcagtagtgagccacccaaa

SEQ ID NO: 3564547 - DNA, 25 bp, Homo sapien
taataccgtctttagtatcatacac

SEQ ID NO: 3564548 - DNA, 25 bp, Homo sapien
tttagtatcatacacatgtgttcag

SEQ ID NO: 3564549 - DNA, 25 bp, Homo sapien
catcaaaccttgcttgggcgtagtc

SEQ ID NO: 3564550 - DNA, 25 bp, Homo sapien
ggcatcaaaccttgcttgggcgtag

SEQ ID NO: 3564551 - DNA, 25 bp, Homo sapien
aggcatcaaaccttgcttgggcgta

SEQ ID NO: 3564552 - DNA, 25 bp, Homo sapien
gcatcaaaccttgcttgggcgtagt

SEQ ID NO: 3564553 - DNA, 25 bp, Homo sapien
caagagctgagggcacggacccatg

SEQ ID NO: 3564554 - DNA, 25 bp, Homo sapien
ctgagggcacggacccatgagacca

SEQ ID NO: 3564555 - DNA, 25 bp, Homo sapien
tctacaggtgcaggctcctcaagct

SEQ ID NO: 3564556 - DNA, 25 bp, Homo sapien
ctctacaggtgcaggctcctcaagc

SEQ ID NO: 3564557 - DNA, 25 bp, Homo sapien
atccacatgcttagcactgctacca

SEQ ID NO: 3564558 - DNA, 25 bp, Homo sapien
tccacatgcttagcactgctaccat

SEQ ID NO: 3564559 - DNA, 25 bp, Homo sapien
tctcaggatgaacgtctcatccaca

SEQ ID NO: 3564560 - DNA, 25 bp, Homo sapien
cctgcctctcaggatgaacgtctca

SEQ ID NO: 3564561 - DNA, 25 bp, Homo sapien
cttgctaaccctgggtgctgtgggc

SEQ ID NO: 3564562 - DNA, 25 bp, Homo sapien
ctgtgggcactgactgaccgacata

SEQ ID NO: 3564563 - DNA, 25 bp, Homo sapien
ggcactgactgaccgacataacaca

SEQ ID NO: 3564564 - DNA, 25 bp, Homo sapien
ccttgctaaccctgggtgctgtggg

SEQ ID NO: 3564565 - DNA, 25 bp, Homo sapien
gaatgctgtacagagaagcccgaag

SEQ ID NO: 3564566 - DNA, 25 bp, Homo sapien
aagctagactctaatctgactgtgg

SEQ ID NO: 3564567 - DNA, 25 bp, Homo sapien
ggtcctgcaccataccctgggataa

SEQ ID NO: 3564568 - DNA, 25 bp, Homo sapien
caggtcttgctaggtttagatcaca

SEQ ID NO: 3564569 - DNA, 25 bp, Homo sapien
cagagaagtcttataaccaggtagt

SEQ ID NO: 3564570 - DNA, 25 bp, Homo sapien
ttaaggcttccatccatcaaggtgg

SEQ ID NO: 3564571 - DNA, 25 bp, Homo sapien
catgtcacctaaagaataaaggcag

SEQ ID NO: 3564572 - DNA, 25 bp, Homo sapien
gatcagcatgtcaatttctacacag

SEQ ID NO: 3564573 - DNA, 25 bp, Homo sapien
cagggagagttgtaaggccctatcc

SEQ ID NO: 3564574 - DNA, 25 bp, Homo sapien
tcaagacctgtctgatgggccagca

SEQ ID NO: 3564575 - DNA, 25 bp, Homo sapien
ggtctatcttgaggaatattccata

SEQ ID NO: 3564576 - DNA, 25 bp, Homo sapien
taatgaacatgcatgaggccaggct

SEQ ID NO: 3564577 - DNA, 25 bp, Homo sapien
tgggccaccgcacccggccagagtt

SEQ ID NO: 3564578 - DNA, 25 bp, Homo sapien
ggccagagtttcattcttattgtcc

SEQ ID NO: 3564579 - DNA, 25 bp, Homo sapien
atgggccaccgcacccggccagagt

SEQ ID NO: 3564580 - DNA, 25 bp, Homo sapien
cccggccagagtttcattcttattg

SEQ ID NO: 3564581 - DNA, 25 bp, Homo sapien
tgaggaggtcaaaatgaactagtcc

SEQ ID NO: 3564582 - DNA, 25 bp, Homo sapien
taatattccttgttacgaagtgtgc

SEQ ID NO: 3564583 - DNA, 25 bp, Homo sapien
tctgcctagaagtagaaatcattgt

SEQ ID NO: 3564584 - DNA, 25 bp, Homo sapien
accggccgagatcaccaactttaat

SEQ ID NO: 3564585 - DNA, 25 bp, Homo sapien
acaaacatgcctatgaaaaacagga

SEQ ID NO: 3564586 - DNA, 25 bp, Homo sapien
acaggaggtctaattcaataattac

SEQ ID NO: 3564587 - DNA, 25 bp, Homo sapien
gaaaaacaggaggtctaattcaata

SEQ ID NO: 3564588 - DNA, 25 bp, Homo sapien
catgcctatgaaaaacaggaggtct

SEQ ID NO: 3564589 - DNA, 25 bp, Homo sapien
ccaacccaaagtcgggcactacagg

SEQ ID NO: 3564590 - DNA, 25 bp, Homo sapien
tggagaatgaagtggtaaccgataa

SEQ ID NO: 3564591 - DNA, 25 bp, Homo sapien
ttccaacccaaagtcgggcactaca

SEQ ID NO: 3564592 - DNA, 25 bp, Homo sapien
gaatgaagtggtaaccgataaataa

SEQ ID NO: 3564593 - DNA, 25 bp, Homo sapien
ttgcaggcacttctctgaagcaggg

SEQ ID NO: 3564594 - DNA, 25 bp, Homo sapien
gggtgcagatgcctacattccccat

SEQ ID NO: 3564595 - DNA, 25 bp, Homo sapien
cattccccatcaggattgcaggcac

SEQ ID NO: 3564596 - DNA, 25 bp, Homo sapien
aggtcaccacattcgggtacttggg

SEQ ID NO: 3564597 - DNA, 25 bp, Homo sapien
gaaatcttggcttgtacaatggacc

SEQ ID NO: 3564598 - DNA, 25 bp, Homo sapien
cttgtacaatggaccacagtcccca

SEQ ID NO: 3564599 - DNA, 25 bp, Homo sapien
tggcttgtacaatggaccacagtcc

SEQ ID NO: 3564600 - DNA, 25 bp, Homo sapien
aatcttggcttgtacaatggaccac

SEQ ID NO: 3564601 - DNA, 25 bp, Homo sapien
gatgcaaacctagttagtgttggca

SEQ ID NO: 3564602 - DNA, 25 bp, Homo sapien
cacgggactaactaagaacaatggg

SEQ ID NO: 3564603 - DNA, 25 bp, Homo sapien
agtgttggcaaatcatgggtctata

SEQ ID NO: 3564604 - DNA, 25 bp, Homo sapien
cattttaacttgtgtggatgcaaac

SEQ ID NO: 3564605 - DNA, 25 bp, Homo sapien
tcttcagtactgaggttttcaaagt

SEQ ID NO: 3564606 - DNA, 25 bp, Homo sapien
ttcttcagtactgaggttttcaaag

SEQ ID NO: 3564607 - DNA, 25 bp, Homo sapien
tttcttcagtactgaggttttcaaa

SEQ ID NO: 3564608 - DNA, 25 bp, Homo sapien
ggtgggatacttccggatgtttgct

SEQ ID NO: 3564609 - DNA, 25 bp, Homo sapien
tttcttggtgggatacttccggatg

SEQ ID NO: 3564610 - DNA, 25 bp, Homo sapien
gggatacttccggatgtttgctctg

SEQ ID NO: 3564611 - DNA, 25 bp, Homo sapien
tacttccggatgtttgctctgaaaa

SEQ ID NO: 3564612 - DNA, 25 bp, Homo sapien
ctgtaattgtaactgctgtattcga

SEQ ID NO: 3564613 - DNA, 25 bp, Homo sapien
gtattcgaaatcaatgagcatcagt

SEQ ID NO: 3564614 - DNA, 25 bp, Homo sapien
actgctgtattcgaaatcaatgagc

SEQ ID NO: 3564615 - DNA, 25 bp, Homo sapien
aattgtaactgctgtattcgaaatc

SEQ ID NO: 3564616 - DNA, 25 bp, Homo sapien
ggcctagacagagcgtagaagtgct

SEQ ID NO: 3564617 - DNA, 25 bp, Homo sapien
catgcaggagctcgtgctagccaaa

SEQ ID NO: 3564618 - DNA, 25 bp, Homo sapien
actgtggaacaaagcctggcctctt

SEQ ID NO: 3564619 - DNA, 25 bp, Homo sapien
tagaagtgctcacgggaggcataac

SEQ ID NO: 3564620 - DNA, 25 bp, Homo sapien
tgcacactactatacctggctaatg

SEQ ID NO: 3564621 - DNA, 25 bp, Homo sapien
tggtgcgatcacagcatactatagc

SEQ ID NO: 3564622 - DNA, 25 bp, Homo sapien
caggtgcacactactatacctggct

SEQ ID NO: 3564623 - DNA, 25 bp, Homo sapien
tgcgatcacagcatactatagcctt

SEQ ID NO: 3564624 - DNA, 25 bp, Homo sapien
cttcttgacagtcattatgacaaaa

SEQ ID NO: 3564625 - DNA, 25 bp, Homo sapien
tgacaaaatacaactggagatggag

SEQ ID NO: 3564626 - DNA, 25 bp, Homo sapien
caaaatacaactggagatggagtag

SEQ ID NO: 3564627 - DNA, 25 bp, Homo sapien
gagatggagtagattcaagcaatga

SEQ ID NO: 3564628 - DNA, 25 bp, Homo sapien
gtggagctttttaattctggattcc

SEQ ID NO: 3564629 - DNA, 25 bp, Homo sapien
gttttccagttccaagggcagattg

SEQ ID NO: 3564630 - DNA, 25 bp, Homo sapien
tcagtaaatttaattctcagcactt

SEQ ID NO: 3564631 - DNA, 25 bp, Homo sapien
tgtaactgagcaatttgtggagctt

SEQ ID NO: 3564632 - DNA, 25 bp, Homo sapien
aatgtagccattttctcggcgattt

SEQ ID NO: 3564633 - DNA, 25 bp, Homo sapien
aattcttcagtatctaatcgccggc

SEQ ID NO: 3564634 - DNA, 25 bp, Homo sapien
cattttctcggcgatttctgcagaa

SEQ ID NO: 3564635 - DNA, 25 bp, Homo sapien
cattttggttccttattgaatggca

SEQ ID NO: 3564636 - DNA, 25 bp, Homo sapien
ccatagagttttggcccaagtgacc

SEQ ID NO: 3564637 - DNA, 25 bp, Homo sapien
gatgaactgctccagtcggccttgg

SEQ ID NO: 3564638 - DNA, 25 bp, Homo sapien
gcaaacataacgctctccagaacca

SEQ ID NO: 3564639 - DNA, 25 bp, Homo sapien
caagtgacctctctgcgagaatggc

SEQ ID NO: 3564640 - DNA, 25 bp, Homo sapien
caccaaaggccacaacaccatccat

SEQ ID NO: 3564641 - DNA, 25 bp, Homo sapien
tggtatctcaccaaaggccacaaca

SEQ ID NO: 3564642 - DNA, 25 bp, Homo sapien
ggtatctcaccaaaggccacaacac

SEQ ID NO: 3564643 - DNA, 25 bp, Homo sapien
ccttggtatctcaccaaaggccaca

SEQ ID NO: 3564644 - DNA, 25 bp, Homo sapien
taagcaagggtctgcaaagcctcct

SEQ ID NO: 3564645 - DNA, 25 bp, Homo sapien
tatccggggcatttaagcaagggtc

SEQ ID NO: 3564646 - DNA, 25 bp, Homo sapien
tgcttagacattatgctcccctgct

SEQ ID NO: 3564647 - DNA, 25 bp, Homo sapien
cccaacatcacagaaagtatccggg

SEQ ID NO: 3564648 - DNA, 25 bp, Homo sapien
tggtggggacgactcctgtcgccca

SEQ ID NO: 3564649 - DNA, 25 bp, Homo sapien
ggtggggacgactcctgtcgcccag

SEQ ID NO: 3564650 - DNA, 25 bp, Homo sapien
ttctttctgagcttgttcggatccc

SEQ ID NO: 3564651 - DNA, 25 bp, Homo sapien
tctgagcttgttcggatccctcttt

SEQ ID NO: 3564652 - DNA, 25 bp, Homo sapien
tttctgagcttgttcggatccctct

SEQ ID NO: 3564653 - DNA, 25 bp, Homo sapien
gcttgttcggatccctctttattac

SEQ ID NO: 3564654 - DNA, 25 bp, Homo sapien
tttgcaaccaccagaacagtcaggg

SEQ ID NO: 3564655 - DNA, 25 bp, Homo sapien
gatgtgccggtgagacccgatagct

SEQ ID NO: 3564656 - DNA, 25 bp, Homo sapien
tgtgacgggcagcatctaatgcacc

SEQ ID NO: 3564657 - DNA, 25 bp, Homo sapien
gaaggtttctcagcccaccgatgtg

SEQ ID NO: 3564658 - DNA, 25 bp, Homo sapien
tagctacgtggttctctcaagtcaa

SEQ ID NO: 3564659 - DNA, 25 bp, Homo sapien
aaagcgctgtgcaggcaggaaacct

SEQ ID NO: 3564660 - DNA, 25 bp, Homo sapien
taaagacaagcggtcaggctgagtc

SEQ ID NO: 3564661 - DNA, 25 bp, Homo sapien
tagagtgcactcttccaatcaggcc

SEQ ID NO: 3564662 - DNA, 25 bp, Homo sapien
tccattccacagctttatcaaaaat

SEQ ID NO: 3564663 - DNA, 25 bp, Homo sapien
ttccattccacagctttatcaaaaa

SEQ ID NO: 3564664 - DNA, 25 bp, Homo sapien
ctttccattccacagctttatcaaa

SEQ ID NO: 3564665 - DNA, 25 bp, Homo sapien
cattccacagctttatcaaaaatac

SEQ ID NO: 3564666 - DNA, 25 bp, Homo sapien
catttgtgtaatctgcagttctctg

SEQ ID NO: 3564667 - DNA, 25 bp, Homo sapien
tgtggtaggcgctggaaagcttccc

SEQ ID NO: 3564668 - DNA, 25 bp, Homo sapien
taaatcccgttacaatgaaagctat

SEQ ID NO: 3564669 - DNA, 25 bp, Homo sapien
ggctcttaacgtttgcactgataca

SEQ ID NO: 3564670 - DNA, 25 bp, Homo sapien
agagcaccattatgaaggcaagatg

SEQ ID NO: 3564671 - DNA, 25 bp, Homo sapien
tgttcaggctccctaagtcctgtaa

SEQ ID NO: 3564672 - DNA, 25 bp, Homo sapien
taaatccatgataatctcccctgcc

SEQ ID NO: 3564673 - DNA, 25 bp, Homo sapien
gaggaaatctcaaaccaagtgtata

SEQ ID NO: 3564674 - DNA, 25 bp, Homo sapien
taagtggtaagacaactccaggacc

SEQ ID NO: 3564675 - DNA, 25 bp, Homo sapien
ggaggaagagatgtccctttattgt

SEQ ID NO: 3564676 - DNA, 25 bp, Homo sapien
tttcaaaatgttctacttcatgctt

SEQ ID NO: 3564677 - DNA, 25 bp, Homo sapien
tttgtgttatatgattttaggattc

SEQ ID NO: 3564678 - DNA, 25 bp, Homo sapien
tttaaagtatagcttatgtgattat

SEQ ID NO: 3564679 - DNA, 25 bp, Homo sapien
tgatttaaagtatagcttatgtgat

SEQ ID NO: 3564680 - DNA, 25 bp, Homo sapien
agaaagacaggtgagtggaagccca

SEQ ID NO: 3564681 - DNA, 25 bp, Homo sapien
tatcccaaaggttgacttgcaagca

SEQ ID NO: 3564682 - DNA, 25 bp, Homo sapien
gatctagggcaacctgctgacccaa

SEQ ID NO: 3564683 - DNA, 25 bp, Homo sapien
gacttgatgaatatccgtaggaaac

SEQ ID NO: 3564684 - DNA, 25 bp, Homo sapien
tccaggcacgatcgcatggacaagc

SEQ ID NO: 3564685 - DNA, 25 bp, Homo sapien
tgtcacctggaaaccagagtgctcc

SEQ ID NO: 3564686 - DNA, 25 bp, Homo sapien
ggtgtctccttaatgctggaagtga

SEQ ID NO: 3564687 - DNA, 25 bp, Homo sapien
taccgtgaatcgtgtctgtcacctg

SEQ ID NO: 3564688 - DNA, 25 bp, Homo sapien
ccagggacatgactccttcaaggag

SEQ ID NO: 3564689 - DNA, 25 bp, Homo sapien
cttcaaggagtaccagcaatgctgg

SEQ ID NO: 3564690 - DNA, 25 bp, Homo sapien
gaccaaatgggaacgcacaacacta

SEQ ID NO: 3564691 - DNA, 25 bp, Homo sapien
ttatcaaaagaaggcaccaaagcag

SEQ ID NO: 3564692 - DNA, 25 bp, Homo sapien
ggaagtggcttaacacagagtcact

SEQ ID NO: 3564693 - DNA, 25 bp, Homo sapien
tgagacttccgccaactggcacagg

SEQ ID NO: 3564694 - DNA, 25 bp, Homo sapien
tataaacgttcatgcctgtgagacc

SEQ ID NO: 3564695 - DNA, 25 bp, Homo sapien
tgtgagaccgctcataacggtgagg

SEQ ID NO: 3564696 - DNA, 25 bp, Homo sapien
tggctttctggcacttaacccttag

SEQ ID NO: 3564697 - DNA, 25 bp, Homo sapien
cttagagaactgtaccaaagagcag

SEQ ID NO: 3564698 - DNA, 25 bp, Homo sapien
caaagagcagtcatttcagtgtcac

SEQ ID NO: 3564699 - DNA, 25 bp, Homo sapien
tggagctgaacccaatcagaaagtt

SEQ ID NO: 3564700 - DNA, 25 bp, Homo sapien
gatatgtgtatgctttcccataagg

SEQ ID NO: 3564701 - DNA, 25 bp, Homo sapien
taaaatcctcggcacagtgtgtggc

SEQ ID NO: 3564702 - DNA, 25 bp, Homo sapien
taggccagattcattctaaagagct

SEQ ID NO: 3564703 - DNA, 25 bp, Homo sapien
taaagagctggctatacattagcaa

SEQ ID NO: 3564704 - DNA, 25 bp, Homo sapien
tctatccaaggtgctttcaagtatg

SEQ ID NO: 3564705 - DNA, 25 bp, Homo sapien
ctttctatccaaggtgctttcaagt

SEQ ID NO: 3564706 - DNA, 25 bp, Homo sapien
taatttccctttctatccaaggtgc

SEQ ID NO: 3564707 - DNA, 25 bp, Homo sapien
ctatccaaggtgctttcaagtatgg

SEQ ID NO: 3564708 - DNA, 25 bp, Homo sapien
caggttagtctagcccacagaggag

SEQ ID NO: 3564709 - DNA, 25 bp, Homo sapien
cattttgagaggactagacgggtgc

SEQ ID NO: 3564710 - DNA, 25 bp, Homo sapien
tagagcacaggattaaactcccagg

SEQ ID NO: 3564711 - DNA, 25 bp, Homo sapien
aatgggacttaatcgttgcagaacg

SEQ ID NO: 3564712 - DNA, 25 bp, Homo sapien
tgacagagtcaaggaaaagctatcc

SEQ ID NO: 3564713 - DNA, 25 bp, Homo sapien
tatcctcagcaagtgcacacgtgtg

SEQ ID NO: 3564714 - DNA, 25 bp, Homo sapien
caactgttgtcctagctggatgcca

SEQ ID NO: 3564715 - DNA, 25 bp, Homo sapien
cacgtgtgtggaatagctacgtacc

SEQ ID NO: 3564716 - DNA, 25 bp, Homo sapien
tttccgaggctcatcaccaagggtg

SEQ ID NO: 3564717 - DNA, 25 bp, Homo sapien
caggtagggagcactggaacagcat

SEQ ID NO: 3564718 - DNA, 25 bp, Homo sapien
atacagccgcaggagcactttccga

SEQ ID NO: 3564719 - DNA, 25 bp, Homo sapien
catctgcaaaatcgctccatacagc

SEQ ID NO: 3564720 - DNA, 25 bp, Homo sapien
ccatcaggactactctctataaacc

SEQ ID NO: 3564721 - DNA, 25 bp, Homo sapien
acagattctgatcgagctcattaat

SEQ ID NO: 3564722 - DNA, 25 bp, Homo sapien
aaaatgtcataggagctgcgtgagc

SEQ ID NO: 3564723 - DNA, 25 bp, Homo sapien
tcagtttgggaagacgacaacattc

SEQ ID NO: 3564724 - DNA, 25 bp, Homo sapien
aaataaatacaagagcgaaacatca

SEQ ID NO: 3564725 - DNA, 25 bp, Homo sapien
ataaatacaagagcgaaacatcatc

SEQ ID NO: 3564726 - DNA, 25 bp, Homo sapien
taaatacaagagcgaaacatcatct

SEQ ID NO: 3564727 - DNA, 25 bp, Homo sapien
aatacaagagcgaaacatcatctcc

SEQ ID NO: 3564728 - DNA, 25 bp, Homo sapien
gcagcatcaatacaatggtggatac

SEQ ID NO: 3564729 - DNA, 25 bp, Homo sapien
tgttctggcaaattaaaggtaggct

SEQ ID NO: 3564730 - DNA, 25 bp, Homo sapien
tacatgtcattatacggtggccaaa

SEQ ID NO: 3564731 - DNA, 25 bp, Homo sapien
taaccctgttgaagtaagctcatca

SEQ ID NO: 3564732 - DNA, 25 bp, Homo sapien
gcattagcggctctggtgaaagaca

SEQ ID NO: 3564733 - DNA, 25 bp, Homo sapien
aacattttcacaggccgcaggctag

SEQ ID NO: 3564734 - DNA, 25 bp, Homo sapien
aaaatgatcgcccttctagttgaga

SEQ ID NO: 3564735 - DNA, 25 bp, Homo sapien
aattggcagaaaatgacggaacacg

SEQ ID NO: 3564736 - DNA, 25 bp, Homo sapien
cactgatgtggaactcgtcctcgcg

SEQ ID NO: 3564737 - DNA, 25 bp, Homo sapien
ttgcaccacagataggccctgcgcc

SEQ ID NO: 3564738 - DNA, 25 bp, Homo sapien
tgacactgatgtggaactcgtcctc

SEQ ID NO: 3564739 - DNA, 25 bp, Homo sapien
actccttgcaccacagataggccct

SEQ ID NO: 3564740 - DNA, 25 bp, Homo sapien
cggctgttggccgcccagctgcttg

SEQ ID NO: 3564741 - DNA, 25 bp, Homo sapien
gtcgctggcggcgtcgcgctgctgc

SEQ ID NO: 3564742 - DNA, 25 bp, Homo sapien
ccagctgcttggactcgaggtcgct

SEQ ID NO: 3564743 - DNA, 25 bp, Homo sapien
gcgagcggcggctgttggccgccca

SEQ ID NO: 3564744 - DNA, 25 bp, Homo sapien
agcccgagcggcgagggctccgcct

SEQ ID NO: 3564745 - DNA, 25 bp, Homo sapien
cagcccgagcggcgagggctccgcc

SEQ ID NO: 3564746 - DNA, 25 bp, Homo sapien
ccgagcggcgagggctccgcctcgc

SEQ ID NO: 3564747 - DNA, 25 bp, Homo sapien
cagcagcccgagcggcgagggctcc

SEQ ID NO: 3564748 - DNA, 25 bp, Homo sapien
cgcgagaggactaggctcagagtcc

SEQ ID NO: 3564749 - DNA, 25 bp, Homo sapien
ccgcagcgcgagaggactaggctca

SEQ ID NO: 3564750 - DNA, 25 bp, Homo sapien
cggccgcagcgcgagaggactaggc

SEQ ID NO: 3564751 - DNA, 25 bp, Homo sapien
gcgcgagaggactaggctcagagtc

SEQ ID NO: 3564752 - DNA, 25 bp, Homo sapien
gctggccgctgcactcgctcctctg

SEQ ID NO: 3564753 - DNA, 25 bp, Homo sapien
ggcgactgcggcgactgtggagcgg

SEQ ID NO: 3564754 - DNA, 25 bp, Homo sapien
tggagcggggatgtgctgctggccg

SEQ ID NO: 3564755 - DNA, 25 bp, Homo sapien
ctgccgccgccgcacgaggagcgcc

SEQ ID NO: 3564756 - DNA, 25 bp, Homo sapien
taaaccagggcgacatcggggacac

SEQ ID NO: 3564757 - DNA, 25 bp, Homo sapien
ggagataaaccagggcgacatcggg

SEQ ID NO: 3564758 - DNA, 25 bp, Homo sapien
gccgatgaggcgctctttccatttc

SEQ ID NO: 3564759 - DNA, 25 bp, Homo sapien
gcctgcggcgatggccgatgaggcg

SEQ ID NO: 3564760 - DNA, 25 bp, Homo sapien
cttggcagcaggagctggatggagt

SEQ ID NO: 3564761 - DNA, 25 bp, Homo sapien
tcaatagcggccacctccttgctgg

SEQ ID NO: 3564762 - DNA, 25 bp, Homo sapien
cagagcagcccttccggggcactgc

SEQ ID NO: 3564763 - DNA, 25 bp, Homo sapien
gggctgctgctggctcaaagcccag

SEQ ID NO: 3564764 - DNA, 25 bp, Homo sapien
tgctggctcaaagcccagagcagcc

SEQ ID NO: 3564765 - DNA, 25 bp, Homo sapien
ctggcaaggaggacgcgggatctgg

SEQ ID NO: 3564766 - DNA, 25 bp, Homo sapien
gattagcagctttacaacagtttcc

SEQ ID NO: 3564767 - DNA, 25 bp, Homo sapien
tttcagaacattaccaaagcaatct

SEQ ID NO: 3564768 - DNA, 25 bp, Homo sapien
acgggcctgcgtctgtcttctgtcc

SEQ ID NO: 3564769 - DNA, 25 bp, Homo sapien
cttcctttgcatgcgagggtcacac

SEQ ID NO: 3564770 - DNA, 25 bp, Homo sapien
tttgcatgcgagggtcacacgtgcc

SEQ ID NO: 3564771 - DNA, 25 bp, Homo sapien
tcctttgcatgcgagggtcacacgt

SEQ ID NO: 3564772 - DNA, 25 bp, Homo sapien
cctttgcatgcgagggtcacacgtg

SEQ ID NO: 3564773 - DNA, 25 bp, Homo sapien
agtcacagggagtgccctggagctg

SEQ ID NO: 3564774 - DNA, 25 bp, Homo sapien
actctgctctgggtgcgactgggtt

SEQ ID NO: 3564775 - DNA, 25 bp, Homo sapien
ggagctggcaacttgcttgtactct

SEQ ID NO: 3564776 - DNA, 25 bp, Homo sapien
caacttgcttgtactctgctctggg

SEQ ID NO: 3564777 - DNA, 25 bp, Homo sapien
caggcgtccacactgatctccggca

SEQ ID NO: 3564778 - DNA, 25 bp, Homo sapien
agctcaaccagaaacttaactgatg

SEQ ID NO: 3564779 - DNA, 25 bp, Homo sapien
acttaactgatgacgggaccaggcg

SEQ ID NO: 3564780 - DNA, 25 bp, Homo sapien
accaggcgtccacactgatctccgg

SEQ ID NO: 3564781 - DNA, 25 bp, Homo sapien
cctcaatactgcaagtgcatgtaca

SEQ ID NO: 3564782 - DNA, 25 bp, Homo sapien
tcaatactgcaagtgcatgtacaaa

SEQ ID NO: 3564783 - DNA, 25 bp, Homo sapien
tgattaacctcaatactgcaagtgc

SEQ ID NO: 3564784 - DNA, 25 bp, Homo sapien
caatactgcaagtgcatgtacaaaa

SEQ ID NO: 3564785 - DNA, 25 bp, Homo sapien
tctaaactggtcaacggtgtgtggc

SEQ ID NO: 3564786 - DNA, 25 bp, Homo sapien
tctacagcagatccggaacagttcc

SEQ ID NO: 3564787 - DNA, 25 bp, Homo sapien
tgcttgtgcataccgactcctgaga

SEQ ID NO: 3564788 - DNA, 25 bp, Homo sapien
agacccatgggaaggttggcctcca

SEQ ID NO: 3564789 - DNA, 25 bp, Homo sapien
gttgaagacctccagacgcagtgaa

SEQ ID NO: 3564790 - DNA, 25 bp, Homo sapien
tgggctgccctacttcactgttgaa

SEQ ID NO: 3564791 - DNA, 25 bp, Homo sapien
caatcaacagtcttaaggagcgtca

SEQ ID NO: 3564792 - DNA, 25 bp, Homo sapien
aaacgcctgaggagttcgactgcac

SEQ ID NO: 3564793 - DNA, 25 bp, Homo sapien
ttggcatgaatatttctaaacttaa

SEQ ID NO: 3564794 - DNA, 25 bp, Homo sapien
tataatttcctattttattggcatg

SEQ ID NO: 3564795 - DNA, 25 bp, Homo sapien
taatttcctattttattggcatgaa

SEQ ID NO: 3564796 - DNA, 25 bp, Homo sapien
tttataatttcctattttattggca

SEQ ID NO: 3564797 - DNA, 25 bp, Homo sapien
ttataggttaccacagaacaaaagc

SEQ ID NO: 3564798 - DNA, 25 bp, Homo sapien
aaaggccacaaacagtacacctggg

SEQ ID NO: 3564799 - DNA, 25 bp, Homo sapien
gaagggacaatagaagtgctgccac

SEQ ID NO: 3564800 - DNA, 25 bp, Homo sapien
tagttatcccaggtcaagttaagac

SEQ ID NO: 3564801 - DNA, 25 bp, Homo sapien
aactcagaattgcacgtaagaaggc

SEQ ID NO: 3564802 - DNA, 25 bp, Homo sapien
tattaacctcaagcgcttagctgga

SEQ ID NO: 3564803 - DNA, 25 bp, Homo sapien
tgtcacaactgaacaaccgacgggt

SEQ ID NO: 3564804 - DNA, 25 bp, Homo sapien
tgtagaactactgcctgatcctgag

SEQ ID NO: 3564805 - DNA, 25 bp, Homo sapien
catcaaatctggtaccgcgtcgtct

SEQ ID NO: 3564806 - DNA, 25 bp, Homo sapien
tgagttagcttagatgaggtagagt

SEQ ID NO: 3564807 - DNA, 25 bp, Homo sapien
agcattcttttgctccagccgcttg

SEQ ID NO: 3564808 - DNA, 25 bp, Homo sapien
gaggtagagttggaagaagctggaa

SEQ ID NO: 3564809 - DNA, 25 bp, Homo sapien
agccgcttgcaatgatttctcaatt

SEQ ID NO: 3564810 - DNA, 25 bp, Homo sapien
agattgcctcgttaacgttctgctc

SEQ ID NO: 3564811 - DNA, 25 bp, Homo sapien
gctattcttttttacgccaactgaa

SEQ ID NO: 3564812 - DNA, 25 bp, Homo sapien
ccaactgaagattttcggttagaag

SEQ ID NO: 3564813 - DNA, 25 bp, Homo sapien
tcgttaacgttctgctcttgctatt

SEQ ID NO: 3564814 - DNA, 25 bp, Homo sapien
caggtgctccatagttaagatcaac

SEQ ID NO: 3564815 - DNA, 25 bp, Homo sapien
cagatcaactcttgacatgagtgac

SEQ ID NO: 3564816 - DNA, 25 bp, Homo sapien
tagaatttggaagcagcccgaaggc

SEQ ID NO: 3564817 - DNA, 25 bp, Homo sapien
cctctgcatctaggacaggtgctcc

SEQ ID NO: 3564818 - DNA, 25 bp, Homo sapien
tacacgggttatgcttggactctga

SEQ ID NO: 3564819 - DNA, 25 bp, Homo sapien
tctggacattaacgaaaaagactgg

SEQ ID NO: 3564820 - DNA, 25 bp, Homo sapien
actggaatagggctacagcgctgct

SEQ ID NO: 3564821 - DNA, 25 bp, Homo sapien
cagcgctgcttttatgctacacggg

SEQ ID NO: 3564822 - DNA, 25 bp, Homo sapien
ctgtagtggaagagagcacccagtg

SEQ ID NO: 3564823 - DNA, 25 bp, Homo sapien
aagagagcacccagtgttgggctga

SEQ ID NO: 3564824 - DNA, 25 bp, Homo sapien
gcacccagtgttgggctgaaaacat

SEQ ID NO: 3564825 - DNA, 25 bp, Homo sapien
tagtggaagagagcacccagtgttg

SEQ ID NO: 3564826 - DNA, 25 bp, Homo sapien
taacaaactggctaggcactggaat

SEQ ID NO: 3564827 - DNA, 25 bp, Homo sapien
tctagagccttgaagtgcagccaaa

SEQ ID NO: 3564828 - DNA, 25 bp, Homo sapien
ttagagatgggatacagactgtgcc

SEQ ID NO: 3564829 - DNA, 25 bp, Homo sapien
gcaggacttagcgacatcatcacag

SEQ ID NO: 3564830 - DNA, 25 bp, Homo sapien
gagtggtatctgcatcagtgttaga

SEQ ID NO: 3564831 - DNA, 25 bp, Homo sapien
agagctgacagattgactgtctgaa

SEQ ID NO: 3564832 - DNA, 25 bp, Homo sapien
ggcagtcccactctggatttaaaag

SEQ ID NO: 3564833 - DNA, 25 bp, Homo sapien
cagtgttagagctgacagattgact

SEQ ID NO: 3564834 - DNA, 25 bp, Homo sapien
aatgtatcctggagtgtctagcgcg

SEQ ID NO: 3564835 - DNA, 25 bp, Homo sapien
tgttctggtactcgcaatgtgggca

SEQ ID NO: 3564836 - DNA, 25 bp, Homo sapien
taaagggtattctctggactggtcc

SEQ ID NO: 3564837 - DNA, 25 bp, Homo sapien
ttatggcaaggagcccactcagtgc

SEQ ID NO: 3564838 - DNA, 25 bp, Homo sapien
catgctgtatctcgaccagttgaca

SEQ ID NO: 3564839 - DNA, 25 bp, Homo sapien
gtgtaacactcgcagaactcattat

SEQ ID NO: 3564840 - DNA, 25 bp, Homo sapien
tcttagagccttcacacatgctgta

SEQ ID NO: 3564841 - DNA, 25 bp, Homo sapien
tccaggttcaatgtctcttagagcc

SEQ ID NO: 3564842 - DNA, 25 bp, Homo sapien
aacactagcgccaacaccttggaaa

SEQ ID NO: 3564843 - DNA, 25 bp, Homo sapien
gttagcaggaatggccaacactagc

SEQ ID NO: 3564844 - DNA, 25 bp, Homo sapien
caaggccattctagcagttagcagg

SEQ ID NO: 3564845 - DNA, 25 bp, Homo sapien
gtttgactgaggttgacaaggccat

SEQ ID NO: 3564846 - DNA, 25 bp, Homo sapien
ggagtacatgacactgaagtcgttt

SEQ ID NO: 3564847 - DNA, 25 bp, Homo sapien
aaagttcggcaatacaacccaccag

SEQ ID NO: 3564848 - DNA, 25 bp, Homo sapien
ttttccttgtggagtacatgacact

SEQ ID NO: 3564849 - DNA, 25 bp, Homo sapien
tccatgtctaagtagcatgttctcc

SEQ ID NO: 3564850 - DNA, 25 bp, Homo sapien
agttagctcactgggatccccacct

SEQ ID NO: 3564851 - DNA, 25 bp, Homo sapien
cccacctggctatcttctctcctac

SEQ ID NO: 3564852 - DNA, 25 bp, Homo sapien
tgtctatactttagttagctcactg

SEQ ID NO: 3564853 - DNA, 25 bp, Homo sapien
cctggctatcttctctcctaccctg

SEQ ID NO: 3564854 - DNA, 25 bp, Homo sapien
ccaaaatacgatttcagtaggtaat

SEQ ID NO: 3564855 - DNA, 25 bp, Homo sapien
acacttacagcgcttctcaattcag

SEQ ID NO: 3564856 - DNA, 25 bp, Homo sapien
tttcaaggactcaagggctggtggc

SEQ ID NO: 3564857 - DNA, 25 bp, Homo sapien
tgtgtatagcacacttacagcgctt

SEQ ID NO: 3564858 - DNA, 25 bp, Homo sapien
tgctttagggaggtttccacccata

SEQ ID NO: 3564859 - DNA, 25 bp, Homo sapien
tcctgggagataacatagggaacag

SEQ ID NO: 3564860 - DNA, 25 bp, Homo sapien
gaagccaggttatctaatcacggta

SEQ ID NO: 3564861 - DNA, 25 bp, Homo sapien
tctaggccagtagaagactgactgt

SEQ ID NO: 3564862 - DNA, 25 bp, Homo sapien
gttgcaaacattcgcaaataaataa

SEQ ID NO: 3564863 - DNA, 25 bp, Homo sapien
tcagttgcaaacattcgcaaataaa

SEQ ID NO: 3564864 - DNA, 25 bp, Homo sapien
actgtcagttgcaaacattcgcaaa

SEQ ID NO: 3564865 - DNA, 25 bp, Homo sapien
tttgttctgatgagtatctattaca

SEQ ID NO: 3564866 - DNA, 25 bp, Homo sapien
tgggtgacagagcaagattctgcct

SEQ ID NO: 3564867 - DNA, 25 bp, Homo sapien
gtgagccataatcaggccactgcac

SEQ ID NO: 3564868 - DNA, 25 bp, Homo sapien
tccagcctgggtgacagagcaagat

SEQ ID NO: 3564869 - DNA, 25 bp, Homo sapien
acttgagcccaagagatggaagctg

SEQ ID NO: 3564870 - DNA, 25 bp, Homo sapien
cctgaagtcaaacatttgaaggctt

SEQ ID NO: 3564871 - DNA, 25 bp, Homo sapien
ctgccttcctttaataggcctaaat

SEQ ID NO: 3564872 - DNA, 25 bp, Homo sapien
tgttgagaaaatagtgccgtgccca

SEQ ID NO: 3564873 - DNA, 25 bp, Homo sapien
agtgccgtgcccattcgcctgaagt

SEQ ID NO: 3564874 - DNA, 25 bp, Homo sapien
tgagcagacgattcaaacaaaagct

SEQ ID NO: 3564875 - DNA, 25 bp, Homo sapien
acttacactagtcgtcaactttggg

SEQ ID NO: 3564876 - DNA, 25 bp, Homo sapien
tcattaactgtgaggtgagcagacg

SEQ ID NO: 3564877 - DNA, 25 bp, Homo sapien
gaatacagcacacctaatttagagt

SEQ ID NO: 3564878 - DNA, 25 bp, Homo sapien
cttgatgttctaaccacccatgtca

SEQ ID NO: 3564879 - DNA, 25 bp, Homo sapien
gatgttctaaccacccatgtcaaag

SEQ ID NO: 3564880 - DNA, 25 bp, Homo sapien
ttctaaccacccatgtcaaagtcat

SEQ ID NO: 3564881 - DNA, 25 bp, Homo sapien
gttctaaccacccatgtcaaagtca

SEQ ID NO: 3564882 - DNA, 25 bp, Homo sapien
attagccaggcccacgtagtggtac

SEQ ID NO: 3564883 - DNA, 25 bp, Homo sapien
tagccaggcccacgtagtggtacac

SEQ ID NO: 3564884 - DNA, 25 bp, Homo sapien
ccaggcccacgtagtggtacacgcc

SEQ ID NO: 3564885 - DNA, 25 bp, Homo sapien
agccaggcccacgtagtggtacacg

SEQ ID NO: 3564886 - DNA, 25 bp, Homo sapien
ggaagacttcaggtgtattaatgca

SEQ ID NO: 3564887 - DNA, 25 bp, Homo sapien
tactgtttactggacaggatcactg

SEQ ID NO: 3564888 - DNA, 25 bp, Homo sapien
tgatactaccaggaacttactagct

SEQ ID NO: 3564889 - DNA, 25 bp, Homo sapien
gaagaggaaagacatgaggtcctga

SEQ ID NO: 3564890 - DNA, 25 bp, Homo sapien
aaccatgaggcaacatagtgaacac

SEQ ID NO: 3564891 - DNA, 25 bp, Homo sapien
tgtattagctgtgctactgtgccct

SEQ ID NO: 3564892 - DNA, 25 bp, Homo sapien
tagcatgcacaatcaagagctgact

SEQ ID NO: 3564893 - DNA, 25 bp, Homo sapien
ggtttttctgtctccccactgtggc

SEQ ID NO: 3564894 - DNA, 25 bp, Homo sapien
cacagtttgtagacgctgagtgagg

SEQ ID NO: 3564895 - DNA, 25 bp, Homo sapien
acgctgagtgaggagtcgcagatca

SEQ ID NO: 3564896 - DNA, 25 bp, Homo sapien
gaggagtcgcagatcagctcttcag

SEQ ID NO: 3564897 - DNA, 25 bp, Homo sapien
tagctgcaaatccacagtttgtaga

SEQ ID NO: 3564898 - DNA, 25 bp, Homo sapien
aaatgccttgagctcctcgaaggaa

SEQ ID NO: 3564899 - DNA, 25 bp, Homo sapien
aatgccttgagctcctcgaaggaaa

SEQ ID NO: 3564900 - DNA, 25 bp, Homo sapien
tgccttgagctcctcgaaggaaagg

SEQ ID NO: 3564901 - DNA, 25 bp, Homo sapien
ccttgagctcctcgaaggaaaggcg

SEQ ID NO: 3564902 - DNA, 25 bp, Homo sapien
gctaccatgcccagtcctgtatctt

SEQ ID NO: 3564903 - DNA, 25 bp, Homo sapien
taccatgcccagtcctgtatctttt

SEQ ID NO: 3564904 - DNA, 25 bp, Homo sapien
ccatgcccagtcctgtatctttttt

SEQ ID NO: 3564905 - DNA, 25 bp, Homo sapien
agctaccatgcccagtcctgtatct

SEQ ID NO: 3564906 - DNA, 25 bp, Homo sapien
tgtccttcaaatcccgagttaccat

SEQ ID NO: 3564907 - DNA, 25 bp, Homo sapien
accaaactggttgctaggtcatcat

SEQ ID NO: 3564908 - DNA, 25 bp, Homo sapien
tccagaggatggtacatagcgactc

SEQ ID NO: 3564909 - DNA, 25 bp, Homo sapien
tcacagagttccttggcggacattc

SEQ ID NO: 3564910 - DNA, 25 bp, Homo sapien
taaaccaccgctttggctgcatcct

SEQ ID NO: 3564911 - DNA, 25 bp, Homo sapien
tagatgtctgttaggcctcattggt

SEQ ID NO: 3564912 - DNA, 25 bp, Homo sapien
ttaaaagtggcgtatcaaagtctcc

SEQ ID NO: 3564913 - DNA, 25 bp, Homo sapien
tggaagcttgttatacggtctagca

SEQ ID NO: 3564914 - DNA, 25 bp, Homo sapien
ctctcaaagtagttggaaccataga

SEQ ID NO: 3564915 - DNA, 25 bp, Homo sapien
aaagtagttggaaccatagacatgc

SEQ ID NO: 3564916 - DNA, 25 bp, Homo sapien
ttgtagacacggtagtttttgtaga

SEQ ID NO: 3564917 - DNA, 25 bp, Homo sapien
tcaaagtagttggaaccatagacat

SEQ ID NO: 3564918 - DNA, 25 bp, Homo sapien
taagggtagcctgggcccaatgaat

SEQ ID NO: 3564919 - DNA, 25 bp, Homo sapien
tgagtggtgtccatgcagaggacca

SEQ ID NO: 3564920 - DNA, 25 bp, Homo sapien
catacgtttggacatatagctgcct

SEQ ID NO: 3564921 - DNA, 25 bp, Homo sapien
caaaaggaggccaacagtgatttcc

SEQ ID NO: 3564922 - DNA, 25 bp, Homo sapien
ctggaaagaattactaccccatatc

SEQ ID NO: 3564923 - DNA, 25 bp, Homo sapien
actttgagagtaaaaagactatatt

SEQ ID NO: 3564924 - DNA, 25 bp, Homo sapien
tatatgaagcattaaacttgagttt

SEQ ID NO: 3564925 - DNA, 25 bp, Homo sapien
tagtaagacatatcaaccattcagg

SEQ ID NO: 3564926 - DNA, 25 bp, Homo sapien
ctcctctcgactgcatttttgccag

SEQ ID NO: 3564927 - DNA, 25 bp, Homo sapien
gatggtcattagacaacttgcctcc

SEQ ID NO: 3564928 - DNA, 25 bp, Homo sapien
gtgtccttccccgtgtgctgtaatt

SEQ ID NO: 3564929 - DNA, 25 bp, Homo sapien
tgttcgacctcctctcgactgcatt

SEQ ID NO: 3564930 - DNA, 25 bp, Homo sapien
gatcttggattctcccaaccacttc

SEQ ID NO: 3564931 - DNA, 25 bp, Homo sapien
acagcctgacccaggtgcatttagt

SEQ ID NO: 3564932 - DNA, 25 bp, Homo sapien
cagcctgacccaggtgcatttagtc

SEQ ID NO: 3564933 - DNA, 25 bp, Homo sapien
ttagagaatactttcaatgttctct

SEQ ID NO: 3564934 - DNA, 25 bp, Homo sapien
tagagaatactttcaatgttctctc

SEQ ID NO: 3564935 - DNA, 25 bp, Homo sapien
cttagagaatactttcaatgttctc

SEQ ID NO: 3564936 - DNA, 25 bp, Homo sapien
tggataatcccgaccctgtgtgggc

SEQ ID NO: 3564937 - DNA, 25 bp, Homo sapien
cagccccaggcaggttattcaagag

SEQ ID NO: 3564938 - DNA, 25 bp, Homo sapien
gattataacagagctggacatacac

SEQ ID NO: 3564939 - DNA, 25 bp, Homo sapien
gaagctaatgtttgtgacctgtgtc

SEQ ID NO: 3564940 - DNA, 25 bp, Homo sapien
caacctcaaattccagggctcaacc

SEQ ID NO: 3564941 - DNA, 25 bp, Homo sapien
gctcaaccaatcctcccactcagcc

SEQ ID NO: 3564942 - DNA, 25 bp, Homo sapien
acctcaaattccagggctcaaccaa

SEQ ID NO: 3564943 - DNA, 25 bp, Homo sapien
ggactagaggcaggagccaccacat

SEQ ID NO: 3564944 - DNA, 25 bp, Homo sapien
agttaccacactccaaaaatacata

SEQ ID NO: 3564945 - DNA, 25 bp, Homo sapien
gtagaaacgctttacagttaccaca

SEQ ID NO: 3564946 - DNA, 25 bp, Homo sapien
tacagtgaccacataacagagatta

SEQ ID NO: 3564947 - DNA, 25 bp, Homo sapien
gaccacataacagagattatgaaaa

SEQ ID NO: 3564948 - DNA, 25 bp, Homo sapien
gatgccccaccagtacaatgaaaag

SEQ ID NO: 3564949 - DNA, 25 bp, Homo sapien
tcttgggctggacgttagaggccac

SEQ ID NO: 3564950 - DNA, 25 bp, Homo sapien
taggactcaaacagccattcacggt

SEQ ID NO: 3564951 - DNA, 25 bp, Homo sapien
gaaggcctccctaggtttggcacaa

SEQ ID NO: 3564952 - DNA, 25 bp, Homo sapien
ttcatcgggccgacctagaatccac

SEQ ID NO: 3564953 - DNA, 25 bp, Homo sapien
tccagggaacactagagggcgtatg

SEQ ID NO: 3564954 - DNA, 25 bp, Homo sapien
gaaaatcagtcgttgagtcagggaa

SEQ ID NO: 3564955 - DNA, 25 bp, Homo sapien
acttatgaagaacctcccagagctg

SEQ ID NO: 3564956 - DNA, 25 bp, Homo sapien
ggtattagcactacaacaaggaggc

SEQ ID NO: 3564957 - DNA, 25 bp, Homo sapien
gaagcaagccgagtgccattagaga

SEQ ID NO: 3564958 - DNA, 25 bp, Homo sapien
gagatgtgctgaccaggcattccta

SEQ ID NO: 3564959 - DNA, 25 bp, Homo sapien
taacatgcaggactcgggattcgct

SEQ ID NO: 3564960 - DNA, 25 bp, Homo sapien
cgaatacgtggaaggacagacacac

SEQ ID NO: 3564961 - DNA, 25 bp, Homo sapien
tgttcctccttccaaggcggaggtg

SEQ ID NO: 3564962 - DNA, 25 bp, Homo sapien
ggtgcacatcatccgcgaatacgtg

SEQ ID NO: 3564963 - DNA, 25 bp, Homo sapien
tccagcaagttgcatcgagttgtca

SEQ ID NO: 3564964 - DNA, 25 bp, Homo sapien
aaatgagtccccgcagcgtccgagc

SEQ ID NO: 3564965 - DNA, 25 bp, Homo sapien
ctccgctgacgggaaaaatgagtcc

SEQ ID NO: 3564966 - DNA, 25 bp, Homo sapien
gctgcccggccgctgcgatgcgggg

SEQ ID NO: 3564967 - DNA, 25 bp, Homo sapien
gctcctcctcggggcgcgtcccagg

SEQ ID NO: 3564968 - DNA, 25 bp, Homo sapien
ggagggacaccgtgcggcgcagctg

SEQ ID NO: 3564969 - DNA, 25 bp, Homo sapien
atacgaaaagaaggccgcggcctcg

SEQ ID NO: 3564970 - DNA, 25 bp, Homo sapien
ggcttcaggactccgcgtcccaggt

SEQ ID NO: 3564971 - DNA, 25 bp, Homo sapien
gcccgggcacggtggaaggatacga

SEQ ID NO: 3564972 - DNA, 25 bp, Homo sapien
cagacgagcgtttttgttgtgggaa

SEQ ID NO: 3564973 - DNA, 25 bp, Homo sapien
cagatgcaccctaagaccgtgtggg

SEQ ID NO: 3564974 - DNA, 25 bp, Homo sapien
ctgagcgttcctgcgcggagcatgc

SEQ ID NO: 3564975 - DNA, 25 bp, Homo sapien
ggctctagagccagcctctcggact

SEQ ID NO: 3564976 - DNA, 25 bp, Homo sapien
tggcgggtttcctggtcacattcct

SEQ ID NO: 3564977 - DNA, 25 bp, Homo sapien
cggctggcgggtttcctggtcacat

SEQ ID NO: 3564978 - DNA, 25 bp, Homo sapien
ggtttcctggtcacattcctgagca

SEQ ID NO: 3564979 - DNA, 25 bp, Homo sapien
tggtcacattcctgagcaccactac

SEQ ID NO: 3564980 - DNA, 25 bp, Homo sapien
ggttctccgtgaatgtgcactccat

SEQ ID NO: 3564981 - DNA, 25 bp, Homo sapien
tctcacggatggaagctttgctgca

SEQ ID NO: 3564982 - DNA, 25 bp, Homo sapien
gtaaaggaccagctatctgaggcca

SEQ ID NO: 3564983 - DNA, 25 bp, Homo sapien
ccatttcacgggttgaggagttctc

SEQ ID NO: 3564984 - DNA, 25 bp, Homo sapien
caatagcgtaactcactaaggccaa

SEQ ID NO: 3564985 - DNA, 25 bp, Homo sapien
cacaatgtgctgtctgcaaactggg

SEQ ID NO: 3564986 - DNA, 25 bp, Homo sapien
gattgactatgggaattcactgaca

SEQ ID NO: 3564987 - DNA, 25 bp, Homo sapien
tatgggcctaaacaagttgcatggt

SEQ ID NO: 3564988 - DNA, 25 bp, Homo sapien
tcccttgccgcagggtggagaacgg

SEQ ID NO: 3564989 - DNA, 25 bp, Homo sapien
tgcattgggcctgtagtgctgggca

SEQ ID NO: 3564990 - DNA, 25 bp, Homo sapien
ggagaacggatgagccaggctgtct

SEQ ID NO: 3564991 - DNA, 25 bp, Homo sapien
gcaggcagttggtggtgggcccaag

SEQ ID NO: 3564992 - DNA, 25 bp, Homo sapien
cagtcagtactttaattcaggtcag

SEQ ID NO: 3564993 - DNA, 25 bp, Homo sapien
tactttaattcaggtcaggctccga

SEQ ID NO: 3564994 - DNA, 25 bp, Homo sapien
ggcgagcagtcagtactttaattca

SEQ ID NO: 3564995 - DNA, 25 bp, Homo sapien
ttcaggtcaggctccgacacctggg

SEQ ID NO: 3564996 - DNA, 25 bp, Homo sapien
tgtttaagcatctggcatatctcct

SEQ ID NO: 3564997 - DNA, 25 bp, Homo sapien
tgatcatggaattaatctgacagca

SEQ ID NO: 3564998 - DNA, 25 bp, Homo sapien
gcagcaactctttagtgatcatgga

SEQ ID NO: 3564999 - DNA, 25 bp, Homo sapien
gaatttggaagcacttggtttggtc

SEQ ID NO: 3565000 - DNA, 25 bp, Homo sapien
tttctgagtccgcatacatcccgtt

SEQ ID NO: 3565001 - DNA, 25 bp, Homo sapien
cgcatacatcccgttgattaagtag

SEQ ID NO: 3565002 - DNA, 25 bp, Homo sapien
gattaagtagtccacctgggtgtag

SEQ ID NO: 3565003 - DNA, 25 bp, Homo sapien
catcccgttgattaagtagtccacc

SEQ ID NO: 3565004 - DNA, 25 bp, Homo sapien
caccccgagtaacagcaccaccaga

SEQ ID NO: 3565005 - DNA, 25 bp, Homo sapien
ttttgtctaccacggcctgggtgag

SEQ ID NO: 3565006 - DNA, 25 bp, Homo sapien
agggtcaccccgagtaacagcacca

SEQ ID NO: 3565007 - DNA, 25 bp, Homo sapien
agttttgtctaccacggcctgggtg

SEQ ID NO: 3565008 - DNA, 25 bp, Homo sapien
acgagtccgtggctggcatcttagt

SEQ ID NO: 3565009 - DNA, 25 bp, Homo sapien
tggcacgagtccgtggctggcatct

SEQ ID NO: 3565010 - DNA, 25 bp, Homo sapien
ctgggctggcacgagtccgtggctg

SEQ ID NO: 3565011 - DNA, 25 bp, Homo sapien
tggcatcttagtgccccctgagctc

SEQ ID NO: 3565012 - DNA, 25 bp, Homo sapien
tgttggcccagtggaatcagtacct

SEQ ID NO: 3565013 - DNA, 25 bp, Homo sapien
tgttgtgttaaccacaggctggtcc

SEQ ID NO: 3565014 - DNA, 25 bp, Homo sapien
tacctgctccggtgcctgggatgtg

SEQ ID NO: 3565015 - DNA, 25 bp, Homo sapien
tgctgttcttggcaacgcgctgctc

SEQ ID NO: 3565016 - DNA, 25 bp, Homo sapien
cgcagtcgtaatggaggccgcagtc

SEQ ID NO: 3565017 - DNA, 25 bp, Homo sapien
ctgcagtcgtgggagcaatggaggc

SEQ ID NO: 3565018 - DNA, 25 bp, Homo sapien
ctcctgaagttgctggttcactcac

SEQ ID NO: 3565019 - DNA, 25 bp, Homo sapien
acagccgtgggagcaatggaggtca

SEQ ID NO: 3565020 - DNA, 25 bp, Homo sapien
tgttgtgacttccatagagttgagg

SEQ ID NO: 3565021 - DNA, 25 bp, Homo sapien
cctctgttgtgacttccatagagtt

SEQ ID NO: 3565022 - DNA, 25 bp, Homo sapien
ttccatagagttgaggtgggctgcc

SEQ ID NO: 3565023 - DNA, 25 bp, Homo sapien
gacttccatagagttgaggtgggct

SEQ ID NO: 3565024 - DNA, 25 bp, Homo sapien
gtcaatgtgacaggagaagctgctg

SEQ ID NO: 3565025 - DNA, 25 bp, Homo sapien
caatgtgacaggagaagctgctgcc

SEQ ID NO: 3565026 - DNA, 25 bp, Homo sapien
atgtgacaggagaagctgctgccat

SEQ ID NO: 3565027 - DNA, 25 bp, Homo sapien
ctttggtcaatgtgacaggagaagc

SEQ ID NO: 3565028 - DNA, 25 bp, Homo sapien
attcctcttgactaatcccttccac

SEQ ID NO: 3565029 - DNA, 25 bp, Homo sapien
ttcctcttgactaatcccttccaca

SEQ ID NO: 3565030 - DNA, 25 bp, Homo sapien
tcctcttgactaatcccttccacat

SEQ ID NO: 3565031 - DNA, 25 bp, Homo sapien
gaggtgatgtgcgaacatgcttcct

SEQ ID NO: 3565032 - DNA, 25 bp, Homo sapien
taaaactcctttgccctctatgaac

SEQ ID NO: 3565033 - DNA, 25 bp, Homo sapien
gggattgctcagggatcggcttcca

SEQ ID NO: 3565034 - DNA, 25 bp, Homo sapien
caatcatgttcaatcctgcacaggg

SEQ ID NO: 3565035 - DNA, 25 bp, Homo sapien
cactgaacgcacacccaggtttaca

SEQ ID NO: 3565036 - DNA, 25 bp, Homo sapien
tcaccattaaaagcccactgaacgc

SEQ ID NO: 3565037 - DNA, 25 bp, Homo sapien
ttcacatcataaaagaacgcttggc

SEQ ID NO: 3565038 - DNA, 25 bp, Homo sapien
gcagataaactgcacaggtattcac

SEQ ID NO: 3565039 - DNA, 25 bp, Homo sapien
tggatcgttggatgccgcatggctt

SEQ ID NO: 3565040 - DNA, 25 bp, Homo sapien
tcagataaggacaaggagaaaatcc

SEQ ID NO: 3565041 - DNA, 25 bp, Homo sapien
gaaaatccaaatgagcacaagagct

SEQ ID NO: 3565042 - DNA, 25 bp, Homo sapien
caaatgagcacaagagctgtccaca

SEQ ID NO: 3565043 - DNA, 25 bp, Homo sapien
ggagcaaggctgggcggtccccgag

SEQ ID NO: 3565044 - DNA, 25 bp, Homo sapien
gagcaaggctgggcggtccccgagg

SEQ ID NO: 3565045 - DNA, 25 bp, Homo sapien
tacagcagggaggatcagactcaat

SEQ ID NO: 3565046 - DNA, 25 bp, Homo sapien
cacagtttgctagcccctgctttag

SEQ ID NO: 3565047 - DNA, 25 bp, Homo sapien
caccaccctgcatgagtaagacaca

SEQ ID NO: 3565048 - DNA, 25 bp, Homo sapien
tttgccttggaacagacaaggacct

SEQ ID NO: 3565049 - DNA, 25 bp, Homo sapien
gggccatgccatcctttgtggcaca

SEQ ID NO: 3565050 - DNA, 25 bp, Homo sapien
tggcacatgtgagacgaaggtagac

SEQ ID NO: 3565051 - DNA, 25 bp, Homo sapien
gacactgtgtcgctgggcgaagtct

SEQ ID NO: 3565052 - DNA, 25 bp, Homo sapien
gactctccactctagtaacagacgc

SEQ ID NO: 3565053 - DNA, 25 bp, Homo sapien
ctagagtttgaaaaaaagtccacat

SEQ ID NO: 3565054 - DNA, 25 bp, Homo sapien
tgatatcaaggaccaccatgggcct

SEQ ID NO: 3565055 - DNA, 25 bp, Homo sapien
ttcggaggaatccaggagcaaagcc

SEQ ID NO: 3565056 - DNA, 25 bp, Homo sapien
ctaggagccaaccaaaacttcggag

SEQ ID NO: 3565057 - DNA, 25 bp, Homo sapien
cagaaaggcacagagttatcccacc

SEQ ID NO: 3565058 - DNA, 25 bp, Homo sapien
ctgcattgctcagcgtcttgcactc

SEQ ID NO: 3565059 - DNA, 25 bp, Homo sapien
cagctacccggacggcagtgcgagc

SEQ ID NO: 3565060 - DNA, 25 bp, Homo sapien
agcgtcttgcactctgtgcgtgccc

SEQ ID NO: 3565061 - DNA, 25 bp, Homo sapien
tgacagcagctacccggacggcagt

SEQ ID NO: 3565062 - DNA, 25 bp, Homo sapien
cctcggacagtaggaaggagcctga

SEQ ID NO: 3565063 - DNA, 25 bp, Homo sapien
cctggtggccctcggacagtaggaa

SEQ ID NO: 3565064 - DNA, 25 bp, Homo sapien
aacgccggaaatgacgtcacggagg

SEQ ID NO: 3565065 - DNA, 25 bp, Homo sapien
gcccaaacgccggaaatgacgtcac

SEQ ID NO: 3565066 - DNA, 25 bp, Homo sapien
agtgtccattgaaggcacagctctg

SEQ ID NO: 3565067 - DNA, 25 bp, Homo sapien
tctctgatagcatctttggtcacct

SEQ ID NO: 3565068 - DNA, 25 bp, Homo sapien
ctctcctatgagaaagtcatattct

SEQ ID NO: 3565069 - DNA, 25 bp, Homo sapien
tttggtcacctgaaacctagtgtcc

SEQ ID NO: 3565070 - DNA, 25 bp, Homo sapien
tggagtgttatggagagtaaagcca

SEQ ID NO: 3565071 - DNA, 25 bp, Homo sapien
gtggagtgttatggagagtaaagcc

SEQ ID NO: 3565072 - DNA, 25 bp, Homo sapien
ctgtggagtgttatggagagtaaag

SEQ ID NO: 3565073 - DNA, 25 bp, Homo sapien
gagtgttatggagagtaaagccagg

SEQ ID NO: 3565074 - DNA, 25 bp, Homo sapien
atcgggacgatggtgtccaccttgc

SEQ ID NO: 3565075 - DNA, 25 bp, Homo sapien
tcatctgcaaaatcgggacgatggt

SEQ ID NO: 3565076 - DNA, 25 bp, Homo sapien
ttcagctctggagagccgtgtgcca

SEQ ID NO: 3565077 - DNA, 25 bp, Homo sapien
ctggagagccgtgtgccagccctca

SEQ ID NO: 3565078 - DNA, 25 bp, Homo sapien
tgaagcttaacgtcctcactgtacg

SEQ ID NO: 3565079 - DNA, 25 bp, Homo sapien
ccaaaaggagtctggatccgggcgt

SEQ ID NO: 3565080 - DNA, 25 bp, Homo sapien
tctgcgggtaaaggccatttctcca

SEQ ID NO: 3565081 - DNA, 25 bp, Homo sapien
tcactgtacgagatagttttggagc

SEQ ID NO: 3565082 - DNA, 25 bp, Homo sapien
acgaccaggccctgtgcgcagttgg

SEQ ID NO: 3565083 - DNA, 25 bp, Homo sapien
tggttgctgagagatgtgctctcca

SEQ ID NO: 3565084 - DNA, 25 bp, Homo sapien
ggtcagtgcctttgccccgctctga

SEQ ID NO: 3565085 - DNA, 25 bp, Homo sapien
ctcgccctggccgtgacggtcagtg

SEQ ID NO: 3565086 - DNA, 25 bp, Homo sapien
gcagcgagcccctcttcgttccatt

SEQ ID NO: 3565087 - DNA, 25 bp, Homo sapien
caagtcctccaggacggttcttgcc

SEQ ID NO: 3565088 - DNA, 25 bp, Homo sapien
tttcctcacagtctcggggacggag

SEQ ID NO: 3565089 - DNA, 25 bp, Homo sapien
caggacggttcttgcccctgagaag

SEQ ID NO: 3565090 - DNA, 25 bp, Homo sapien
ctaaaatgcgttctgagctcggtcc

SEQ ID NO: 3565091 - DNA, 25 bp, Homo sapien
ttctgagctcggtcctccagtttcc

SEQ ID NO: 3565092 - DNA, 25 bp, Homo sapien
aatgcgttctgagctcggtcctcca

SEQ ID NO: 3565093 - DNA, 25 bp, Homo sapien
gcgttctgagctcggtcctccagtt

SEQ ID NO: 3565094 - DNA, 25 bp, Homo sapien
cgatggaaaccacgagtctgtgcca

SEQ ID NO: 3565095 - DNA, 25 bp, Homo sapien
cctcgatggaaaccacgagtctgtg

SEQ ID NO: 3565096 - DNA, 25 bp, Homo sapien
tcccacctcgatggaaaccacgagt

SEQ ID NO: 3565097 - DNA, 25 bp, Homo sapien
gactgtcggggggtttggcagcctc

SEQ ID NO: 3565098 - DNA, 25 bp, Homo sapien
gagtcgtttcgatactggcctgaat

SEQ ID NO: 3565099 - DNA, 25 bp, Homo sapien
aagcttgtagttagagtcgtttcga

SEQ ID NO: 3565100 - DNA, 25 bp, Homo sapien
ggacagccaagagacctgtataaag

SEQ ID NO: 3565101 - DNA, 25 bp, Homo sapien
taccaccttagttggatttgaagga

SEQ ID NO: 3565102 - DNA, 25 bp, Homo sapien
gaactgtttctctcactatttgcca

SEQ ID NO: 3565103 - DNA, 25 bp, Homo sapien
cctggaactgtttctctcactattt

SEQ ID NO: 3565104 - DNA, 25 bp, Homo sapien
acacccctgagtcagtctccaccct

SEQ ID NO: 3565105 - DNA, 25 bp, Homo sapien
gccatcagcgccccactgactgaca

SEQ ID NO: 3565106 - DNA, 25 bp, Homo sapien
tgcaggctccttgactctggagccc

SEQ ID NO: 3565107 - DNA, 25 bp, Homo sapien
gcaggctccttgactctggagccct

SEQ ID NO: 3565108 - DNA, 25 bp, Homo sapien
caggctccttgactctggagccctg

SEQ ID NO: 3565109 - DNA, 25 bp, Homo sapien
cctcaatggcacatcccggaaggtg

SEQ ID NO: 3565110 - DNA, 25 bp, Homo sapien
caagaagctgtactggacggactca

SEQ ID NO: 3565111 - DNA, 25 bp, Homo sapien
gccgccgtgcagaacgtggtcatct

SEQ ID NO: 3565112 - DNA, 25 bp, Homo sapien
ctcagagaccaaccgcatcgaggtg

SEQ ID NO: 3565113 - DNA, 25 bp, Homo sapien
gactcggacatttactggcccaatg

SEQ ID NO: 3565114 - DNA, 25 bp, Homo sapien
aatggactgaccatcgacctggagg

SEQ ID NO: 3565115 - DNA, 25 bp, Homo sapien
tggcagcacccggaagatcattgtg

SEQ ID NO: 3565116 - DNA, 25 bp, Homo sapien
agaagctctactgggctgacgccaa

SEQ ID NO: 3565117 - DNA, 25 bp, Homo sapien
ctggagaacgctgtcaccgtggagc

SEQ ID NO: 3565118 - DNA, 25 bp, Homo sapien
tattcctggagaacgctgtcaccgt

SEQ ID NO: 3565119 - DNA, 25 bp, Homo sapien
catattcctggagaacgctgtcacc

SEQ ID NO: 3565120 - DNA, 25 bp, Homo sapien
cgcatcatattcctggagaacgctg

SEQ ID NO: 3565121 - DNA, 25 bp, Homo sapien
agtgccctgcacttgtgataggtgg

SEQ ID NO: 3565122 - DNA, 25 bp, Homo sapien
gccgcgtgaactgctgatagccatc

SEQ ID NO: 3565123 - DNA, 25 bp, Homo sapien
gaaggatgcataagttgtagagtgc

SEQ ID NO: 3565124 - DNA, 25 bp, Homo sapien
gatagccatcttctgtcagttgggg

SEQ ID NO: 3565125 - DNA, 25 bp, Homo sapien
atggttccattctaatccgttattt

SEQ ID NO: 3565126 - DNA, 25 bp, Homo sapien
acatggttccattctaatccgttat

SEQ ID NO: 3565127 - DNA, 25 bp, Homo sapien
tctaatccgttattttggctactgc

SEQ ID NO: 3565128 - DNA, 25 bp, Homo sapien
taatccgttattttggctactgcca

SEQ ID NO: 3565129 - DNA, 25 bp, Homo sapien
tgaggcggggtgggtgacaaaagta

SEQ ID NO: 3565130 - DNA, 25 bp, Homo sapien
ctgaggcggggtgggtgacaaaagt

SEQ ID NO: 3565131 - DNA, 25 bp, Homo sapien
ttggtcactctctggctgccctgac

SEQ ID NO: 3565132 - DNA, 25 bp, Homo sapien
cagagcagcgactttcctgttttag

SEQ ID NO: 3565133 - DNA, 25 bp, Homo sapien
aggcagagcagcgactttcctgttt

SEQ ID NO: 3565134 - DNA, 25 bp, Homo sapien
cccaggcagagcagcgactttcctg

SEQ ID NO: 3565135 - DNA, 25 bp, Homo sapien
gcagagcagcgactttcctgtttta

SEQ ID NO: 3565136 - DNA, 25 bp, Homo sapien
tgaaacccgcacagggtggaagtgg

SEQ ID NO: 3565137 - DNA, 25 bp, Homo sapien
catttaccgacactgacatttacca

SEQ ID NO: 3565138 - DNA, 25 bp, Homo sapien
tacaaacaccgacattgaccgacac

SEQ ID NO: 3565139 - DNA, 25 bp, Homo sapien
taccaacactgtttaccaacactga

SEQ ID NO: 3565140 - DNA, 25 bp, Homo sapien
tttgaacacaatcaggctccaggtt

SEQ ID NO: 3565141 - DNA, 25 bp, Homo sapien
tagccgggctctgcctttgaacaca

SEQ ID NO: 3565142 - DNA, 25 bp, Homo sapien
gcatgagaggacttcacgggcagct

SEQ ID NO: 3565143 - DNA, 25 bp, Homo sapien
agaggattccgttccacgtggtggt

SEQ ID NO: 3565144 - DNA, 25 bp, Homo sapien
ctgcagttatgtcgggagaggctct

SEQ ID NO: 3565145 - DNA, 25 bp, Homo sapien
tgatcgagtcgtccaacatgctggg

SEQ ID NO: 3565146 - DNA, 25 bp, Homo sapien
catagctggtgagttcaggatcccc

SEQ ID NO: 3565147 - DNA, 25 bp, Homo sapien
gacctggacaccaacatgatcgagt

SEQ ID NO: 3565148 - DNA, 25 bp, Homo sapien
catcaagtctagtgagatttattca

SEQ ID NO: 3565149 - DNA, 25 bp, Homo sapien
catcttacatggcttcagggaacag

SEQ ID NO: 3565150 - DNA, 25 bp, Homo sapien
aaaaccatcaagtctagtgagattt

SEQ ID NO: 3565151 - DNA, 25 bp, Homo sapien
catggcttcagggaacagacagcat

SEQ ID NO: 3565152 - DNA, 25 bp, Homo sapien
gaaagtccatgttgccagtttggct

SEQ ID NO: 3565153 - DNA, 25 bp, Homo sapien
gtctcttgtataatgggctccctcc

SEQ ID NO: 3565154 - DNA, 25 bp, Homo sapien
tcgcccgggcagttgaagaaagtcc

SEQ ID NO: 3565155 - DNA, 25 bp, Homo sapien
ggttgggccacaccttcagatgcca

SEQ ID NO: 3565156 - DNA, 25 bp, Homo sapien
cacgggctggtagatacagttgtcc

SEQ ID NO: 3565157 - DNA, 25 bp, Homo sapien
ccaggctggcttccggcttgactat

SEQ ID NO: 3565158 - DNA, 25 bp, Homo sapien
gatcaatgtgagaaaggtctgccct

SEQ ID NO: 3565159 - DNA, 25 bp, Homo sapien
gaagcacagtacttttcgtggcgcg

SEQ ID NO: 3565160 - DNA, 25 bp, Homo sapien
gaacgctcctccacttaagctgatt

SEQ ID NO: 3565161 - DNA, 25 bp, Homo sapien
ctaaacgaacgctcctccacttaag

SEQ ID NO: 3565162 - DNA, 25 bp, Homo sapien
tctcacatactaaacgaacgctcct

SEQ ID NO: 3565163 - DNA, 25 bp, Homo sapien
gatcccgttacctctcacatactaa

SEQ ID NO: 3565164 - DNA, 25 bp, Homo sapien
gacctgctgttgctacggcgtaggg

SEQ ID NO: 3565165 - DNA, 25 bp, Homo sapien
tccgtcaagcggaggacctgctgtt

SEQ ID NO: 3565166 - DNA, 25 bp, Homo sapien
attggccactcggattggtggtccg

SEQ ID NO: 3565167 - DNA, 25 bp, Homo sapien
agccaggtttctccccgtttctgat

SEQ ID NO: 3565168 - DNA, 25 bp, Homo sapien
tacgtccgccattttgggcgcttcg

SEQ ID NO: 3565169 - DNA, 25 bp, Homo sapien
ttttgggcgcttcgctgatggtgtc

SEQ ID NO: 3565170 - DNA, 25 bp, Homo sapien
caaggcctgcttgatacgtccgcca

SEQ ID NO: 3565171 - DNA, 25 bp, Homo sapien
tgatggtgtcggtgagcgcgtttcc

SEQ ID NO: 3565172 - DNA, 25 bp, Homo sapien
actttggaaggtattctccacttca

SEQ ID NO: 3565173 - DNA, 25 bp, Homo sapien
aaactgtaagggtgccgtggattgc

SEQ ID NO: 3565174 - DNA, 25 bp, Homo sapien
aaggtattctccacttcagcatgtc

SEQ ID NO: 3565175 - DNA, 25 bp, Homo sapien
tgggaaatagcttttgtcctggagg

SEQ ID NO: 3565176 - DNA, 25 bp, Homo sapien
taagaccatggatgttggactccac

SEQ ID NO: 3565177 - DNA, 25 bp, Homo sapien
ccttagaagttatggtctgcacccc

SEQ ID NO: 3565178 - DNA, 25 bp, Homo sapien
cacttagatagatgtgagactggcc

SEQ ID NO: 3565179 - DNA, 25 bp, Homo sapien
tttgcttgttacacctctgggagtg

SEQ ID NO: 3565180 - DNA, 25 bp, Homo sapien
taggttggctacgtggtaaagaagc

SEQ ID NO: 3565181 - DNA, 25 bp, Homo sapien
cagactgacatttggataccaggta

SEQ ID NO: 3565182 - DNA, 25 bp, Homo sapien
tagatttatttgtcatggaagcccc

SEQ ID NO: 3565183 - DNA, 25 bp, Homo sapien
taaaagggcatttgacagtatgtgg

SEQ ID NO: 3565184 - DNA, 25 bp, Homo sapien
tgatgatagttgtaggtttttgata

SEQ ID NO: 3565185 - DNA, 25 bp, Homo sapien
tcaattatgatgatagttgtaggtt

SEQ ID NO: 3565186 - DNA, 25 bp, Homo sapien
ttgatatatgttgtttatcaagttg

SEQ ID NO: 3565187 - DNA, 25 bp, Homo sapien
ttttgaaatgaacaggtgttggatt

SEQ ID NO: 3565188 - DNA, 25 bp, Homo sapien
ttcttccctgtcaacggaggtgctc

SEQ ID NO: 3565189 - DNA, 25 bp, Homo sapien
gaacggcttcttccctgtcaacgga

SEQ ID NO: 3565190 - DNA, 25 bp, Homo sapien
caggggaacggcttcttccctgtca

SEQ ID NO: 3565191 - DNA, 25 bp, Homo sapien
cttccctgtcaacggaggtgctcac

SEQ ID NO: 3565192 - DNA, 25 bp, Homo sapien
ggctggacacatcaggcatgttctc

SEQ ID NO: 3565193 - DNA, 25 bp, Homo sapien
tgggtagttgtagggtgtgtcctga

SEQ ID NO: 3565194 - DNA, 25 bp, Homo sapien
cacatcaggcatgttctcatcatgt

SEQ ID NO: 3565195 - DNA, 25 bp, Homo sapien
ctcatcatgtagaaggggcactggg

SEQ ID NO: 3565196 - DNA, 25 bp, Homo sapien
tgcctttgctaccctgtaggtaagg

SEQ ID NO: 3565197 - DNA, 25 bp, Homo sapien
cccctctcagtgctataaatatttc

SEQ ID NO: 3565198 - DNA, 25 bp, Homo sapien
tcattgcttggctttttattggcat

SEQ ID NO: 3565199 - DNA, 25 bp, Homo sapien
tgtttcctacctggatcattttcct

SEQ ID NO: 3565200 - DNA, 25 bp, Homo sapien
tacaaaattgctagtggccgggcat

SEQ ID NO: 3565201 - DNA, 25 bp, Homo sapien
tactgatagatccacagagggattc

SEQ ID NO: 3565202 - DNA, 25 bp, Homo sapien
tttcttcagccgtgtttagcctact

SEQ ID NO: 3565203 - DNA, 25 bp, Homo sapien
tgtcatatcctaatgctcagattct

SEQ ID NO: 3565204 - DNA, 25 bp, Homo sapien
tcttgactgattgcttgatcactgg

SEQ ID NO: 3565205 - DNA, 25 bp, Homo sapien
aaaagctggtacctatacgcaagtg

SEQ ID NO: 3565206 - DNA, 25 bp, Homo sapien
tggttcccactaggtattgtataag

SEQ ID NO: 3565207 - DNA, 25 bp, Homo sapien
tatcagcaatagatgagtggacctg

SEQ ID NO: 3565208 - DNA, 25 bp, Homo sapien
cgtgccagtagaccaaatcagcctc

SEQ ID NO: 3565209 - DNA, 25 bp, Homo sapien
cctggtacaatttgagagccctgaa

SEQ ID NO: 3565210 - DNA, 25 bp, Homo sapien
cattgacaaagtaagcaagctcctg

SEQ ID NO: 3565211 - DNA, 25 bp, Homo sapien
gcctcctagcagagcacattgacat

SEQ ID NO: 3565212 - DNA, 25 bp, Homo sapien
gtactaaaatggttggtgtttctga

SEQ ID NO: 3565213 - DNA, 25 bp, Homo sapien
cttggtgttcctacctcgggctgta

SEQ ID NO: 3565214 - DNA, 25 bp, Homo sapien
taacggcttagaagtcttggtgttc

SEQ ID NO: 3565215 - DNA, 25 bp, Homo sapien
tgattgagttgcctgtctatagtta

SEQ ID NO: 3565216 - DNA, 25 bp, Homo sapien
gaagttggttgttgcctgattatgg

SEQ ID NO: 3565217 - DNA, 25 bp, Homo sapien
catggaagttggttgttgcctgatt

SEQ ID NO: 3565218 - DNA, 25 bp, Homo sapien
gtcatggaagttggttgttgcctga

SEQ ID NO: 3565219 - DNA, 25 bp, Homo sapien
cagtcatggaagttggttgttgcct

SEQ ID NO: 3565220 - DNA, 25 bp, Homo sapien
attggtgttatcagagtcagcagta

SEQ ID NO: 3565221 - DNA, 25 bp, Homo sapien
ttgcattctctttattggtgttatc

SEQ ID NO: 3565222 - DNA, 25 bp, Homo sapien
gttacacttgcattctctttattgg

SEQ ID NO: 3565223 - DNA, 25 bp, Homo sapien
ttatgttacacttgcattctcttta

SEQ ID NO: 3565224 - DNA, 25 bp, Homo sapien
agagaaatcttttgacagggttagg

SEQ ID NO: 3565225 - DNA, 25 bp, Homo sapien
tagtcttcctcgttagcttccatga

SEQ ID NO: 3565226 - DNA, 25 bp, Homo sapien
tcccagtgtttcagagtagtcttac

SEQ ID NO: 3565227 - DNA, 25 bp, Homo sapien
gctgtcaactactgaaccacatctg

SEQ ID NO: 3565228 - DNA, 25 bp, Homo sapien
atccacctgatttggcacctcccaa

SEQ ID NO: 3565229 - DNA, 25 bp, Homo sapien
tccacctgatttggcacctcccaaa

SEQ ID NO: 3565230 - DNA, 25 bp, Homo sapien
gatccacctgatttggcacctccca

SEQ ID NO: 3565231 - DNA, 25 bp, Homo sapien
cgggggcttggtaactccatccaga

SEQ ID NO: 3565232 - DNA, 25 bp, Homo sapien
gcctgtcgggggcttggtaactcca

SEQ ID NO: 3565233 - DNA, 25 bp, Homo sapien
tgtcgggggcttggtaactccatcc

SEQ ID NO: 3565234 - DNA, 25 bp, Homo sapien
cagcctgtcgggggcttggtaactc

SEQ ID NO: 3565235 - DNA, 25 bp, Homo sapien
agttggcatttactaggaagtggta

SEQ ID NO: 3565236 - DNA, 25 bp, Homo sapien
ttggcatttactaggaagtggtaga

SEQ ID NO: 3565237 - DNA, 25 bp, Homo sapien
tcagttggcatttactaggaagtgg

SEQ ID NO: 3565238 - DNA, 25 bp, Homo sapien
agtggtagaagtggcgcagtaggtc

SEQ ID NO: 3565239 - DNA, 25 bp, Homo sapien
caatattcttccggatgaatcccat

SEQ ID NO: 3565240 - DNA, 25 bp, Homo sapien
tcaatattcttccggatgaatccca

SEQ ID NO: 3565241 - DNA, 25 bp, Homo sapien
gttgagatagccctgaatacttcag

SEQ ID NO: 3565242 - DNA, 25 bp, Homo sapien
acttcagggttatatacagtctgat

SEQ ID NO: 3565243 - DNA, 25 bp, Homo sapien
agctgttgagatagccctgaatact

SEQ ID NO: 3565244 - DNA, 25 bp, Homo sapien
cctgaatacttcagggttatataca

SEQ ID NO: 3565245 - DNA, 25 bp, Homo sapien
caactggcaaaaactcgactaccat

SEQ ID NO: 3565246 - DNA, 25 bp, Homo sapien
tgtgagccactgcacccagctgtac

SEQ ID NO: 3565247 - DNA, 25 bp, Homo sapien
tctccatgttggtcacactgggctc

SEQ ID NO: 3565248 - DNA, 25 bp, Homo sapien
tccatgttggtcacactgggctcga

SEQ ID NO: 3565249 - DNA, 25 bp, Homo sapien
ggtgtgagccactgcacccagctgt

SEQ ID NO: 3565250 - DNA, 25 bp, Homo sapien
gaaaggttctatgtcttcttgccac

SEQ ID NO: 3565251 - DNA, 25 bp, Homo sapien
tgttggctctcgacaaaattggcaa

SEQ ID NO: 3565252 - DNA, 25 bp, Homo sapien
tcatcagagtcttggtttgagtagg

SEQ ID NO: 3565253 - DNA, 25 bp, Homo sapien
aaagacaagcatggcccaggttatt

SEQ ID NO: 3565254 - DNA, 25 bp, Homo sapien
agtacagtaccctcttgctactcat

SEQ ID NO: 3565255 - DNA, 25 bp, Homo sapien
ccagcagtacagtaccctcttgcta

SEQ ID NO: 3565256 - DNA, 25 bp, Homo sapien
agcagtacagtaccctcttgctact

SEQ ID NO: 3565257 - DNA, 25 bp, Homo sapien
ccagcggtacggtgccctcttctca

SEQ ID NO: 3565258 - DNA, 25 bp, Homo sapien
aaaacgcatactcctagaactaaca

SEQ ID NO: 3565259 - DNA, 25 bp, Homo sapien
gcttactattgacttgatctcctgg

SEQ ID NO: 3565260 - DNA, 25 bp, Homo sapien
gaagtcagcactcaaaagttaattg

SEQ ID NO: 3565261 - DNA, 25 bp, Homo sapien
gcaagattgcaagtatgaagtcagc

SEQ ID NO: 3565262 - DNA, 25 bp, Homo sapien
cagttcagcggagaaaggacagcgt

SEQ ID NO: 3565263 - DNA, 25 bp, Homo sapien
taaatcgtcctgaatggttaggtat

SEQ ID NO: 3565264 - DNA, 25 bp, Homo sapien
tacaaagcgacagcaatcaggacag

SEQ ID NO: 3565265 - DNA, 25 bp, Homo sapien
ttctatgcagaacgttggactttga

SEQ ID NO: 3565266 - DNA, 25 bp, Homo sapien
gaagctcctcttgagtgcactgcag

SEQ ID NO: 3565267 - DNA, 25 bp, Homo sapien
tgcactgcagtacaaccacttgact

SEQ ID NO: 3565268 - DNA, 25 bp, Homo sapien
tttaacttagacagcaagacttggc

SEQ ID NO: 3565269 - DNA, 25 bp, Homo sapien
catgatatgtgtgctggcttgccag

SEQ ID NO: 3565270 - DNA, 25 bp, Homo sapien
gaatacagtgtaagttacccgcaga

SEQ ID NO: 3565271 - DNA, 25 bp, Homo sapien
gtacagaataaacagctcagagaat

SEQ ID NO: 3565272 - DNA, 25 bp, Homo sapien
cagcagcccgtgtcttccctaagat

SEQ ID NO: 3565273 - DNA, 25 bp, Homo sapien
attccctgcccaaaacacttctgtg

SEQ ID NO: 3565274 - DNA, 25 bp, Homo sapien
gaaaataaatacactccaaagcact

SEQ ID NO: 3565275 - DNA, 25 bp, Homo sapien
taaaccaatcatggatcattttgaa

SEQ ID NO: 3565276 - DNA, 25 bp, Homo sapien
caaaactaacttacaacagcccttg

SEQ ID NO: 3565277 - DNA, 25 bp, Homo sapien
cttagcttgcagaatttacccactt

SEQ ID NO: 3565278 - DNA, 25 bp, Homo sapien
cttggattggcaggcgcgctgtttc

SEQ ID NO: 3565279 - DNA, 25 bp, Homo sapien
ggcaggcgcgctgtttcctgtcaca

SEQ ID NO: 3565280 - DNA, 25 bp, Homo sapien
gtcccagccagataccacagttcct

SEQ ID NO: 3565281 - DNA, 25 bp, Homo sapien
cacagttccttggattggcaggcgc

SEQ ID NO: 3565282 - DNA, 25 bp, Homo sapien
tgaatggccctgtatgacgggtgac

SEQ ID NO: 3565283 - DNA, 25 bp, Homo sapien
gatgcctgtctgttgctccttagga

SEQ ID NO: 3565284 - DNA, 25 bp, Homo sapien
tttctgctgcaagtgcctccgatgc

SEQ ID NO: 3565285 - DNA, 25 bp, Homo sapien
gcgcaccaggtgacacttcagtgaa

SEQ ID NO: 3565286 - DNA, 25 bp, Homo sapien
ttagtgtgaccaaagtattaggcgg

SEQ ID NO: 3565287 - DNA, 25 bp, Homo sapien
gatcttgccacccatgtaataatag

SEQ ID NO: 3565288 - DNA, 25 bp, Homo sapien
gggatcaggaccagcaacctttata

SEQ ID NO: 3565289 - DNA, 25 bp, Homo sapien
tcatttttcctccaggccgacaagg

SEQ ID NO: 3565290 - DNA, 25 bp, Homo sapien
tatattgccatatcgtctggtgaaa

SEQ ID NO: 3565291 - DNA, 25 bp, Homo sapien
tctggcaccgaagcatgctaattgt

SEQ ID NO: 3565292 - DNA, 25 bp, Homo sapien
agcagcgtgcctaaacattacattg

SEQ ID NO: 3565293 - DNA, 25 bp, Homo sapien
gaaaatgctcgtgctgctaatggaa

SEQ ID NO: 3565294 - DNA, 25 bp, Homo sapien
tctcgcctggtggtgagttttgcca

SEQ ID NO: 3565295 - DNA, 25 bp, Homo sapien
cgggtgagcccctctctgaagagac

SEQ ID NO: 3565296 - DNA, 25 bp, Homo sapien
cctgacttgaatggcgttggacctc

SEQ ID NO: 3565297 - DNA, 25 bp, Homo sapien
tggagtcagcagtaagccctgggac

SEQ ID NO: 3565298 - DNA, 25 bp, Homo sapien
tgttggccatactgaattatgagac

SEQ ID NO: 3565299 - DNA, 25 bp, Homo sapien
gcaagtgtgccctcattttgtttct

SEQ ID NO: 3565300 - DNA, 25 bp, Homo sapien
gatgtctacaatacaatacctgtat

SEQ ID NO: 3565301 - DNA, 25 bp, Homo sapien
ctgaattatgagactaacagatgtc

SEQ ID NO: 3565302 - DNA, 25 bp, Homo sapien
acgcatgcatccctccgtgcctggg

SEQ ID NO: 3565303 - DNA, 25 bp, Homo sapien
ctgagtacacacctctgcatgctgg

SEQ ID NO: 3565304 - DNA, 25 bp, Homo sapien
gcactgagtacacacctctgcatgc

SEQ ID NO: 3565305 - DNA, 25 bp, Homo sapien
ttgctttctgggcacgcatgcatcc

SEQ ID NO: 3565306 - DNA, 25 bp, Homo sapien
tgcgagtccataggcatctcactgg

SEQ ID NO: 3565307 - DNA, 25 bp, Homo sapien
ccttaggcaggtcttggtgtcagct

SEQ ID NO: 3565308 - DNA, 25 bp, Homo sapien
caatcgtgtaaccagggcacaagct

SEQ ID NO: 3565309 - DNA, 25 bp, Homo sapien
actcatgatggtgtgaccttaggca

SEQ ID NO: 3565310 - DNA, 25 bp, Homo sapien
tcttaatcagatgggtttcactgcc

SEQ ID NO: 3565311 - DNA, 25 bp, Homo sapien
ctgcatccgtgtgccaggtctggcc

SEQ ID NO: 3565312 - DNA, 25 bp, Homo sapien
ggtcagctgcatccgtgtgccaggt

SEQ ID NO: 3565313 - DNA, 25 bp, Homo sapien
gaaaagttgagcatcttaatcagat

SEQ ID NO: 3565314 - DNA, 25 bp, Homo sapien
tatccgtatggaaagacatgagcct

SEQ ID NO: 3565315 - DNA, 25 bp, Homo sapien
gattgcagatccaaacatgagcgct

SEQ ID NO: 3565316 - DNA, 25 bp, Homo sapien
gagcctttattcctactgcacgtca

SEQ ID NO: 3565317 - DNA, 25 bp, Homo sapien
tatctaaaatgtgggatgggcgaag

SEQ ID NO: 3565318 - DNA, 25 bp, Homo sapien
tcgggcttccatcaacgtgaaaatg

SEQ ID NO: 3565319 - DNA, 25 bp, Homo sapien
caaggaacggaatgccaggcaagaa

SEQ ID NO: 3565320 - DNA, 25 bp, Homo sapien
cgtagaagaaagacatcgggcttcc

SEQ ID NO: 3565321 - DNA, 25 bp, Homo sapien
gacaaaggactcagacctcggatat

SEQ ID NO: 3565322 - DNA, 25 bp, Homo sapien
tcacagtcttcaggaacatagggct

SEQ ID NO: 3565323 - DNA, 25 bp, Homo sapien
cacagtcttcaggaacatagggctt

SEQ ID NO: 3565324 - DNA, 25 bp, Homo sapien
agagcacccgactactgaatgccag

SEQ ID NO: 3565325 - DNA, 25 bp, Homo sapien
ctttgaaaagagcacccgactactg

SEQ ID NO: 3565326 - DNA, 25 bp, Homo sapien
tttgaaaagagcacccgactactga

SEQ ID NO: 3565327 - DNA, 25 bp, Homo sapien
aaaagagcacccgactactgaatgc

SEQ ID NO: 3565328 - DNA, 25 bp, Homo sapien
tcagcacccgccacggtagctcccc

SEQ ID NO: 3565329 - DNA, 25 bp, Homo sapien
gtccaggtccttcgggcgccctgga

SEQ ID NO: 3565330 - DNA, 25 bp, Homo sapien
cagcacccgccacggtagctcccct

SEQ ID NO: 3565331 - DNA, 25 bp, Homo sapien
gtttcagtccaggtccttcgggcgc

SEQ ID NO: 3565332 - DNA, 25 bp, Homo sapien
ggtggtcgttccgctggctcctgct

SEQ ID NO: 3565333 - DNA, 25 bp, Homo sapien
tgggcctgtcatgggccactttagg

SEQ ID NO: 3565334 - DNA, 25 bp, Homo sapien
gtggcagactcccgccatccggatt

SEQ ID NO: 3565335 - DNA, 25 bp, Homo sapien
tgccggcacctctcttcttgcgagt

SEQ ID NO: 3565336 - DNA, 25 bp, Homo sapien
actgagaggccgagcttctgagctg

SEQ ID NO: 3565337 - DNA, 25 bp, Homo sapien
tggtgcctgtggatgctcgacggtc

SEQ ID NO: 3565338 - DNA, 25 bp, Homo sapien
gggaggcactgagaggccgagcttc

SEQ ID NO: 3565339 - DNA, 25 bp, Homo sapien
cctgtggatgctcgacggtcccgca

SEQ ID NO: 3565340 - DNA, 25 bp, Homo sapien
gcagggccaagtgttgcccgccatt

SEQ ID NO: 3565341 - DNA, 25 bp, Homo sapien
gcgcagggccaagtgttgcccgcca

SEQ ID NO: 3565342 - DNA, 25 bp, Homo sapien
gggcgcagggccaagtgttgcccgc

SEQ ID NO: 3565343 - DNA, 25 bp, Homo sapien
agggccaagtgttgcccgccattcc

SEQ ID NO: 3565344 - DNA, 25 bp, Homo sapien
taatggataatcttcggccaattta

SEQ ID NO: 3565345 - DNA, 25 bp, Homo sapien
cctgaagtcaaaccttaagataatg

SEQ ID NO: 3565346 - DNA, 25 bp, Homo sapien
gcagagtcagccattcctgttctct

SEQ ID NO: 3565347 - DNA, 25 bp, Homo sapien
tcctcagaagacatcgagcggtcct

SEQ ID NO: 3565348 - DNA, 25 bp, Homo sapien
aagaaaattatatgccatgagtaag

SEQ ID NO: 3565349 - DNA, 25 bp, Homo sapien
gtgttcattgttgaattctagcaaa

SEQ ID NO: 3565350 - DNA, 25 bp, Homo sapien
tcttccagaagatagaactgaaggg

SEQ ID NO: 3565351 - DNA, 25 bp, Homo sapien
tactagcaagttaaatccaacaatg

SEQ ID NO: 3565352 - DNA, 25 bp, Homo sapien
gagggcccagactcatacaaataga

SEQ ID NO: 3565353 - DNA, 25 bp, Homo sapien
tggagagcctaaagacccagaatag

SEQ ID NO: 3565354 - DNA, 25 bp, Homo sapien
gttggaaggctactataaagctaca

SEQ ID NO: 3565355 - DNA, 25 bp, Homo sapien
atagagccaactgatatctgacaaa

SEQ ID NO: 3565356 - DNA, 25 bp, Homo sapien
ctcctctgaggctaaggactcctgg

SEQ ID NO: 3565357 - DNA, 25 bp, Homo sapien
tcaattccagttttatcggtggctg

SEQ ID NO: 3565358 - DNA, 25 bp, Homo sapien
gaagatgcctcacggtgatccctcc

SEQ ID NO: 3565359 - DNA, 25 bp, Homo sapien
tgaagagaacatccatgcaatgaca

SEQ ID NO: 3565360 - DNA, 25 bp, Homo sapien
gtggtatcacaacagcccatccgga

SEQ ID NO: 3565361 - DNA, 25 bp, Homo sapien
agactgacagttcgcgtgcctctgg

SEQ ID NO: 3565362 - DNA, 25 bp, Homo sapien
taagtcctctaactcaagacatgct

SEQ ID NO: 3565363 - DNA, 25 bp, Homo sapien
tacaacagaaccaaaagcgtcaact

SEQ ID NO: 3565364 - DNA, 25 bp, Homo sapien
aacattctctgagaggaagagtcga

SEQ ID NO: 3565365 - DNA, 25 bp, Homo sapien
agtcgaccagagtgagctctccgca

SEQ ID NO: 3565366 - DNA, 25 bp, Homo sapien
aggaagagtcgaccagagtgagctc

SEQ ID NO: 3565367 - DNA, 25 bp, Homo sapien
caagaaaccattagggttttcatgc

SEQ ID NO: 3565368 - DNA, 25 bp, Homo sapien
gccccgctctgcccttcgcagggcc

SEQ ID NO: 3565369 - DNA, 25 bp, Homo sapien
tgccccgctctgcccttcgcagggc

SEQ ID NO: 3565370 - DNA, 25 bp, Homo sapien
agagctctgagtaaactccctgggc

SEQ ID NO: 3565371 - DNA, 25 bp, Homo sapien
ctctgggccagacaaacaatgctca

SEQ ID NO: 3565372 - DNA, 25 bp, Homo sapien
tagagatttctagactaagacaaaa

SEQ ID NO: 3565373 - DNA, 25 bp, Homo sapien
tcccaggactatgggaacccaagct

SEQ ID NO: 3565374 - DNA, 25 bp, Homo sapien
actcagtgtggagaatctgtgataa

SEQ ID NO: 3565375 - DNA, 25 bp, Homo sapien
ctactccattttcaatcccttagat

SEQ ID NO: 3565376 - DNA, 25 bp, Homo sapien
ttcaatcccttagatttaaactcag

SEQ ID NO: 3565377 - DNA, 25 bp, Homo sapien
atcccttagatttaaactcagtgtg

SEQ ID NO: 3565378 - DNA, 25 bp, Homo sapien
cctcccaggagatgcatgaggaagg

SEQ ID NO: 3565379 - DNA, 25 bp, Homo sapien
gtgttctttctcggcctcttctccc

SEQ ID NO: 3565380 - DNA, 25 bp, Homo sapien
ctcccaggagatgcatgaggaaggc

SEQ ID NO: 3565381 - DNA, 25 bp, Homo sapien
acctcccaggagatgcatgaggaag

SEQ ID NO: 3565382 - DNA, 25 bp, Homo sapien
tgccacttcccacgataaaggatag

SEQ ID NO: 3565383 - DNA, 25 bp, Homo sapien
gccacttcccacgataaaggatagg

SEQ ID NO: 3565384 - DNA, 25 bp, Homo sapien
gctgccacttcccacgataaaggat

SEQ ID NO: 3565385 - DNA, 25 bp, Homo sapien
ttgctgccacttcccacgataaagg

SEQ ID NO: 3565386 - DNA, 25 bp, Homo sapien
tttgctgcgctgggtcgttgtggct

SEQ ID NO: 3565387 - DNA, 25 bp, Homo sapien
ctttgctgcgctgggtcgttgtggc

SEQ ID NO: 3565388 - DNA, 25 bp, Homo sapien
tgtctttgctgcgctgggtcgttgt

SEQ ID NO: 3565389 - DNA, 25 bp, Homo sapien
tctttgctgcgctgggtcgttgtgg

SEQ ID NO: 3565390 - DNA, 25 bp, Homo sapien
tatattaacgcaaaggcagtgtcag

SEQ ID NO: 3565391 - DNA, 25 bp, Homo sapien
attaacgcaaaggcagtgtcagaac

SEQ ID NO: 3565392 - DNA, 25 bp, Homo sapien
ctatattaacgcaaaggcagtgtca

SEQ ID NO: 3565393 - DNA, 25 bp, Homo sapien
tattaacgcaaaggcagtgtcagaa

SEQ ID NO: 3565394 - DNA, 25 bp, Homo sapien
aatttcgttggtggcaggtaatggc

SEQ ID NO: 3565395 - DNA, 25 bp, Homo sapien
gcatttgcaaatagaagaacacata

SEQ ID NO: 3565396 - DNA, 25 bp, Homo sapien
tccaaacctccagtctgcatgtagt

SEQ ID NO: 3565397 - DNA, 25 bp, Homo sapien
tcattagtgtctttcgttctgggct

SEQ ID NO: 3565398 - DNA, 25 bp, Homo sapien
ctagagcacctgggctttgctcagg

SEQ ID NO: 3565399 - DNA, 25 bp, Homo sapien
cgcggctgccctccgggagcttcca

SEQ ID NO: 3565400 - DNA, 25 bp, Homo sapien
agagcacctgggctttgctcaggga

SEQ ID NO: 3565401 - DNA, 25 bp, Homo sapien
tgctcagggaggaagaggcgcggct

SEQ ID NO: 3565402 - DNA, 25 bp, Homo sapien
ttttgttagtgagttagggagctgg

SEQ ID NO: 3565403 - DNA, 25 bp, Homo sapien
tgttagtgagttagggagctgggca

SEQ ID NO: 3565404 - DNA, 25 bp, Homo sapien
tttttgttagtgagttagggagctg

SEQ ID NO: 3565405 - DNA, 25 bp, Homo sapien
ttgttagtgagttagggagctgggc

SEQ ID NO: 3565406 - DNA, 25 bp, Homo sapien
gcagtaattcttcaggcagcctgac

SEQ ID NO: 3565407 - DNA, 25 bp, Homo sapien
gcttctggatttctaccaagacatg

SEQ ID NO: 3565408 - DNA, 25 bp, Homo sapien
tgacctcctgcagttgcaccctttg

SEQ ID NO: 3565409 - DNA, 25 bp, Homo sapien
gacattgcccaattggcccttccca

SEQ ID NO: 3565410 - DNA, 25 bp, Homo sapien
caaagtaaccttttgcgtctctggg

SEQ ID NO: 3565411 - DNA, 25 bp, Homo sapien
ttgcgtctctgggaaaacctagatt

SEQ ID NO: 3565412 - DNA, 25 bp, Homo sapien
ggccatcgggggcatcaaagtaacc

SEQ ID NO: 3565413 - DNA, 25 bp, Homo sapien
catcgggggcatcaaagtaaccttt

SEQ ID NO: 3565414 - DNA, 25 bp, Homo sapien
taatggctttaaaccgttcaatatc

SEQ ID NO: 3565415 - DNA, 25 bp, Homo sapien
taaaccgttcaatatcatgatgcaa

SEQ ID NO: 3565416 - DNA, 25 bp, Homo sapien
catgatgcaagttgttgcaacaatt

SEQ ID NO: 3565417 - DNA, 25 bp, Homo sapien
tcaatatcatgatgcaagttgttgc

SEQ ID NO: 3565418 - DNA, 25 bp, Homo sapien
ctcttggttgtaatgcgagggttgt

SEQ ID NO: 3565419 - DNA, 25 bp, Homo sapien
taatgcgagggttgttcgagaatcc

SEQ ID NO: 3565420 - DNA, 25 bp, Homo sapien
gagggttgttcgagaatcctgagtc

SEQ ID NO: 3565421 - DNA, 25 bp, Homo sapien
tgttcgagaatcctgagtctagtga

SEQ ID NO: 3565422 - DNA, 25 bp, Homo sapien
tcatcgaaaagagcttccaactcgt

SEQ ID NO: 3565423 - DNA, 25 bp, Homo sapien
ttccaactcgttttccacatcggct

SEQ ID NO: 3565424 - DNA, 25 bp, Homo sapien
cccatgtgccagtcagctttgcaag

SEQ ID NO: 3565425 - DNA, 25 bp, Homo sapien
gtcttctgtgagcatggttcatcga

SEQ ID NO: 3565426 - DNA, 25 bp, Homo sapien
tcttcatctgcacccctcgtgctgc

SEQ ID NO: 3565427 - DNA, 25 bp, Homo sapien
ggtcttcatctgcacccctcgtgct

SEQ ID NO: 3565428 - DNA, 25 bp, Homo sapien
atctgcacccctcgtgctgctccag

SEQ ID NO: 3565429 - DNA, 25 bp, Homo sapien
tcctcctgtgcttgctctccatcca

SEQ ID NO: 3565430 - DNA, 25 bp, Homo sapien
ggtgcagcaacattaccgtcggaca

SEQ ID NO: 3565431 - DNA, 25 bp, Homo sapien
caaaatgcgccaagatacagaggca

SEQ ID NO: 3565432 - DNA, 25 bp, Homo sapien
gaatggatagataactgcccctaac

SEQ ID NO: 3565433 - DNA, 25 bp, Homo sapien
tcttaagtgagggatctcaacacat

SEQ ID NO: 3565434 - DNA, 25 bp, Homo sapien
ggctctcttattgggatatggtgca

SEQ ID NO: 3565435 - DNA, 25 bp, Homo sapien
ttcaacgcctcaaaggacaggctgg

SEQ ID NO: 3565436 - DNA, 25 bp, Homo sapien
gatgaagcagccttctactagaaga

SEQ ID NO: 3565437 - DNA, 25 bp, Homo sapien
gaagatgccacctagaacttttgca

SEQ ID NO: 3565438 - DNA, 25 bp, Homo sapien
tgtcatggcgtttccaatgttcaga

SEQ ID NO: 3565439 - DNA, 25 bp, Homo sapien
tccccatcagtcatgtcatggcgtt

SEQ ID NO: 3565440 - DNA, 25 bp, Homo sapien
acccagagctgcgtctttagcttcc

SEQ ID NO: 3565441 - DNA, 25 bp, Homo sapien
tcagagaagtatatggcctcgtaga

SEQ ID NO: 3565442 - DNA, 25 bp, Homo sapien
gcttctcgctgttttggttgacaac

SEQ ID NO: 3565443 - DNA, 25 bp, Homo sapien
cgctgttttggttgacaacgagcat

SEQ ID NO: 3565444 - DNA, 25 bp, Homo sapien
ctcgctgttttggttgacaacgagc

SEQ ID NO: 3565445 - DNA, 25 bp, Homo sapien
ttctcgctgttttggttgacaacga

SEQ ID NO: 3565446 - DNA, 25 bp, Homo sapien
gctttttagactttgtgtcccatga

SEQ ID NO: 3565447 - DNA, 25 bp, Homo sapien
ttggtacagttacatggctttttag

SEQ ID NO: 3565448 - DNA, 25 bp, Homo sapien
agacactgggatttggtacagttac

SEQ ID NO: 3565449 - DNA, 25 bp, Homo sapien
ggctttttagactttgtgtcccatg

SEQ ID NO: 3565450 - DNA, 25 bp, Homo sapien
ggctccagatggactgctctctcag

SEQ ID NO: 3565451 - DNA, 25 bp, Homo sapien
ccagatggactgctctctcagtgcc

SEQ ID NO: 3565452 - DNA, 25 bp, Homo sapien
tccatggctccagatggactgctct

SEQ ID NO: 3565453 - DNA, 25 bp, Homo sapien
ttccatggctccagatggactgctc

SEQ ID NO: 3565454 - DNA, 25 bp, Homo sapien
tattaaagctacagagtgtcaggac

SEQ ID NO: 3565455 - DNA, 25 bp, Homo sapien
catcaacaatgtgtcagaattcaca

SEQ ID NO: 3565456 - DNA, 25 bp, Homo sapien
ccagattggtaataggattattaaa

SEQ ID NO: 3565457 - DNA, 25 bp, Homo sapien
aaccagtagcatcaacaatgtgtca

SEQ ID NO: 3565458 - DNA, 25 bp, Homo sapien
gaaatagctgccctgaaaacgctgt

SEQ ID NO: 3565459 - DNA, 25 bp, Homo sapien
aaagttgtcaacagcctaggcacag

SEQ ID NO: 3565460 - DNA, 25 bp, Homo sapien
gctgctctgtgcaaatgcccatcgg

SEQ ID NO: 3565461 - DNA, 25 bp, Homo sapien
tcatcaggcccaattaagtggagag

SEQ ID NO: 3565462 - DNA, 25 bp, Homo sapien
tcacgaagccatgcccgatggcaga

SEQ ID NO: 3565463 - DNA, 25 bp, Homo sapien
catcacgaagccatgcccgatggca

SEQ ID NO: 3565464 - DNA, 25 bp, Homo sapien
ggccatcacgaagccatgcccgatg

SEQ ID NO: 3565465 - DNA, 25 bp, Homo sapien
aaggccatcacgaagccatgcccga

SEQ ID NO: 3565466 - DNA, 25 bp, Homo sapien
ggttatgggccagactttccagcag

SEQ ID NO: 3565467 - DNA, 25 bp, Homo sapien
ccaactcagcatggaaggcagcggg

SEQ ID NO: 3565468 - DNA, 25 bp, Homo sapien
aagtgcagcctatgtccacctggag

SEQ ID NO: 3565469 - DNA, 25 bp, Homo sapien
gatgaggtcccagataagtgcagcc

SEQ ID NO: 3565470 - DNA, 25 bp, Homo sapien
gcagacccgttgactaccgatggta

SEQ ID NO: 3565471 - DNA, 25 bp, Homo sapien
cgttgactaccgatggtaaggctcc

SEQ ID NO: 3565472 - DNA, 25 bp, Homo sapien
cgaggggaaagcagacccgttgact

SEQ ID NO: 3565473 - DNA, 25 bp, Homo sapien
ctaccgatggtaaggctccctcaag

SEQ ID NO: 3565474 - DNA, 25 bp, Homo sapien
cacagaagggagtgctcacaaggcc

SEQ ID NO: 3565475 - DNA, 25 bp, Homo sapien
gcaactttatgctggaatccacgag

SEQ ID NO: 3565476 - DNA, 25 bp, Homo sapien
tactcattagcatggcctgtggagg

SEQ ID NO: 3565477 - DNA, 25 bp, Homo sapien
ttttaaagttccagtcagccagccc

SEQ ID NO: 3565478 - DNA, 25 bp, Homo sapien
ttgatgctggcaaaaatctccctac

SEQ ID NO: 3565479 - DNA, 25 bp, Homo sapien
gttgatgctggcaaaaatctcccta

SEQ ID NO: 3565480 - DNA, 25 bp, Homo sapien
aaagcagtcattggtttagggacat

SEQ ID NO: 3565481 - DNA, 25 bp, Homo sapien
taaagcagtcattggtttagggaca

SEQ ID NO: 3565482 - DNA, 25 bp, Homo sapien
gagatgcagcatgaacctataggag

SEQ ID NO: 3565483 - DNA, 25 bp, Homo sapien
tgcagaccttaaggcactaggattt

SEQ ID NO: 3565484 - DNA, 25 bp, Homo sapien
gggagtcacgctttgtctttttgcc

SEQ ID NO: 3565485 - DNA, 25 bp, Homo sapien
acagggagacaatcaggatgcaatg

SEQ ID NO: 3565486 - DNA, 25 bp, Homo sapien
tttcctatttaatatcctggttgcc

SEQ ID NO: 3565487 - DNA, 25 bp, Homo sapien
cctggttgccatttcactttatata

SEQ ID NO: 3565488 - DNA, 25 bp, Homo sapien
catttaccaacttacatatatgaca

SEQ ID NO: 3565489 - DNA, 25 bp, Homo sapien
tatacaaagccaaacatattcattt

SEQ ID NO: 3565490 - DNA, 25 bp, Homo sapien
tttgatcttgatactgaggaaccaa

SEQ ID NO: 3565491 - DNA, 25 bp, Homo sapien
ctgaggaaccaaatggagtgctttt

SEQ ID NO: 3565492 - DNA, 25 bp, Homo sapien
taattattttgatcttgatactgag

SEQ ID NO: 3565493 - DNA, 25 bp, Homo sapien
ccaaatggagtgcttttagttctct

SEQ ID NO: 3565494 - DNA, 25 bp, Homo sapien
gtccatcccatcagtcaagcaaaag

SEQ ID NO: 3565495 - DNA, 25 bp, Homo sapien
gctaacatcactctgcagtcttggg

SEQ ID NO: 3565496 - DNA, 25 bp, Homo sapien
gccacactgatctgcttgggcctga

SEQ ID NO: 3565497 - DNA, 25 bp, Homo sapien
cataaataaatggtcgcaagccggg

SEQ ID NO: 3565498 - DNA, 25 bp, Homo sapien
agcactgcactaactgatgtgattt

SEQ ID NO: 3565499 - DNA, 25 bp, Homo sapien
gccctgaagccacaggaccgtgccc

SEQ ID NO: 3565500 - DNA, 25 bp, Homo sapien
ctgcactaactgatgtgatttgtgc

SEQ ID NO: 3565501 - DNA, 25 bp, Homo sapien
ccacaccaatatgccaaaccatgag

SEQ ID NO: 3565502 - DNA, 25 bp, Homo sapien
aaaacgagtgaaatgatcagtcgac

SEQ ID NO: 3565503 - DNA, 25 bp, Homo sapien
atcttagaggtgagatgtgaaaggc

SEQ ID NO: 3565504 - DNA, 25 bp, Homo sapien
aaaatcctgatacaatacatacgtg

SEQ ID NO: 3565505 - DNA, 25 bp, Homo sapien
catgtccctgttttgctaatgagac

SEQ ID NO: 3565506 - DNA, 25 bp, Homo sapien
atggggtccagcatttagtataatg

SEQ ID NO: 3565507 - DNA, 25 bp, Homo sapien
gatggggtccagcatttagtataat

SEQ ID NO: 3565508 - DNA, 25 bp, Homo sapien
tggggtccagcatttagtataatgt

SEQ ID NO: 3565509 - DNA, 25 bp, Homo sapien
tacttgtagtagtaccacctgcttc

SEQ ID NO: 3565510 - DNA, 25 bp, Homo sapien
ctagttcctgggacgatgggaactt

SEQ ID NO: 3565511 - DNA, 25 bp, Homo sapien
ggaacttgcaacaggattcctgagc

SEQ ID NO: 3565512 - DNA, 25 bp, Homo sapien
gattctgcaaagttgcttcttccgg

SEQ ID NO: 3565513 - DNA, 25 bp, Homo sapien
cactctgtgaggaaatgagccgagc

SEQ ID NO: 3565514 - DNA, 25 bp, Homo sapien
catttcaagccctctgagaaaggct

SEQ ID NO: 3565515 - DNA, 25 bp, Homo sapien
tactgactcaagcattgtgtcccac

SEQ ID NO: 3565516 - DNA, 25 bp, Homo sapien
gagctctatggctcctctgaggaca

SEQ ID NO: 3565517 - DNA, 25 bp, Homo sapien
gcgcgacgtcctccagcgcgctgag

SEQ ID NO: 3565518 - DNA, 25 bp, Homo sapien
gtgcgcgggtagcagcgaggacagg

SEQ ID NO: 3565519 - DNA, 25 bp, Homo sapien
tgggatcatgcggacgcccgggtgg

SEQ ID NO: 3565520 - DNA, 25 bp, Homo sapien
cgaggacaggaagtgcacgttgcag

SEQ ID NO: 3565521 - DNA, 25 bp, Homo sapien
ggccttcaggccgatgttctccgaa

SEQ ID NO: 3565522 - DNA, 25 bp, Homo sapien
tgaacgcgtgcaggacgggttcctt

SEQ ID NO: 3565523 - DNA, 25 bp, Homo sapien
ggcccaggtacgcttctttgaagac

SEQ ID NO: 3565524 - DNA, 25 bp, Homo sapien
cgtggaactcgtcctcctcgtactt

SEQ ID NO: 3565525 - DNA, 25 bp, Homo sapien
accatcgcatcctcggggctgggca

SEQ ID NO: 3565526 - DNA, 25 bp, Homo sapien
ttaagagctccgtcaccatcgcatc

SEQ ID NO: 3565527 - DNA, 25 bp, Homo sapien
tcaccatcgcatcctcggggctggg

SEQ ID NO: 3565528 - DNA, 25 bp, Homo sapien
gggcttaagagctccgtcaccatcg

SEQ ID NO: 3565529 - DNA, 25 bp, Homo sapien
ggggcgggatggcgggggccgcgca

SEQ ID NO: 3565530 - DNA, 25 bp, Homo sapien
gcgcagggcggcggggcgggatggc

SEQ ID NO: 3565531 - DNA, 25 bp, Homo sapien
gggcgggatggcgggggccgcgcac

SEQ ID NO: 3565532 - DNA, 25 bp, Homo sapien
cagggcggcggggcgggatggcggg

SEQ ID NO: 3565533 - DNA, 25 bp, Homo sapien
aggcgcaggcggccgttggcggttg

SEQ ID NO: 3565534 - DNA, 25 bp, Homo sapien
ccgcagcgtggagcgagcgggatgg

SEQ ID NO: 3565535 - DNA, 25 bp, Homo sapien
gcgcaggcggccgttggcggttgga

SEQ ID NO: 3565536 - DNA, 25 bp, Homo sapien
caggcggccgttggcggttggagaa

SEQ ID NO: 3565537 - DNA, 25 bp, Homo sapien
tgtttccatatgctgagactttcca

SEQ ID NO: 3565538 - DNA, 25 bp, Homo sapien
ggcactgttctcagcattgaggcaa

SEQ ID NO: 3565539 - DNA, 25 bp, Homo sapien
ctttccagcccagcacatgaacttg

SEQ ID NO: 3565540 - DNA, 25 bp, Homo sapien
acagcaagtgaaaatcaacaggctt

SEQ ID NO: 3565541 - DNA, 25 bp, Homo sapien
gaacttggtccttgacttataatcc

SEQ ID NO: 3565542 - DNA, 25 bp, Homo sapien
tgtatttacatgcaccggtcagccc

SEQ ID NO: 3565543 - DNA, 25 bp, Homo sapien
gaagtgctattcttgcccagggcag

SEQ ID NO: 3565544 - DNA, 25 bp, Homo sapien
tggacatgtacaataagacccctct

SEQ ID NO: 3565545 - DNA, 25 bp, Homo sapien
tagctggctctgatagggactgacg

SEQ ID NO: 3565546 - DNA, 25 bp, Homo sapien
atctttggcccataaaggtgggatt

SEQ ID NO: 3565547 - DNA, 25 bp, Homo sapien
aatctttggcccataaaggtgggat

SEQ ID NO: 3565548 - DNA, 25 bp, Homo sapien
acatgcatgtgggccgcgcatggtg

SEQ ID NO: 3565549 - DNA, 25 bp, Homo sapien
aaaacatgcatgtgggccgcgcatg

SEQ ID NO: 3565550 - DNA, 25 bp, Homo sapien
tgtttcatcccgagctaaggtcagg

SEQ ID NO: 3565551 - DNA, 25 bp, Homo sapien
tacccacggtgacaaaagcaggtct

SEQ ID NO: 3565552 - DNA, 25 bp, Homo sapien
ttaataaatccaagccgatgcggag

SEQ ID NO: 3565553 - DNA, 25 bp, Homo sapien
taagcactaggccttcggttgccac

SEQ ID NO: 3565554 - DNA, 25 bp, Homo sapien
caaagtgatgatgtcagtcattgct

SEQ ID NO: 3565555 - DNA, 25 bp, Homo sapien
ggtgccttccaaagcgatgagaatc

SEQ ID NO: 3565556 - DNA, 25 bp, Homo sapien
tcccacaaggatgtacgacacacca

SEQ ID NO: 3565557 - DNA, 25 bp, Homo sapien
tgtggaaattgatgaggttctctcc

SEQ ID NO: 3565558 - DNA, 25 bp, Homo sapien
gatgaggttctctcccacaaggatg

SEQ ID NO: 3565559 - DNA, 25 bp, Homo sapien
tacgacacaccatagccgtcatcag

SEQ ID NO: 3565560 - DNA, 25 bp, Homo sapien
ggacacgtactctgggttattctcc

SEQ ID NO: 3565561 - DNA, 25 bp, Homo sapien
agtcaaacagctccacttgctgctg

SEQ ID NO: 3565562 - DNA, 25 bp, Homo sapien
cctccgctggacacgtactctgggt

SEQ ID NO: 3565563 - DNA, 25 bp, Homo sapien
gggtctggcttgttgataatctcca

SEQ ID NO: 3565564 - DNA, 25 bp, Homo sapien
tcatggcgaggcgatacatatgctg

SEQ ID NO: 3565565 - DNA, 25 bp, Homo sapien
gatgcttctcagacgccaacttgaa

SEQ ID NO: 3565566 - DNA, 25 bp, Homo sapien
cagaagaggtgacgatcgatcccag

SEQ ID NO: 3565567 - DNA, 25 bp, Homo sapien
tagacaccacgtaaaggcagaagag

SEQ ID NO: 3565568 - DNA, 25 bp, Homo sapien
tgcaggagcgcacggtctccgtcct

SEQ ID NO: 3565569 - DNA, 25 bp, Homo sapien
ccctctcggaagagccgggtcatgg

SEQ ID NO: 3565570 - DNA, 25 bp, Homo sapien
aagtcgcatgactcagtggtgcagg

SEQ ID NO: 3565571 - DNA, 25 bp, Homo sapien
catggaggcctcgtatgtgaggcaa

SEQ ID NO: 3565572 - DNA, 25 bp, Homo sapien
ttcagtgcacggcagggcatgctga

SEQ ID NO: 3565573 - DNA, 25 bp, Homo sapien
gaagtacttcagtgcacggcagggc

SEQ ID NO: 3565574 - DNA, 25 bp, Homo sapien
gtacttcagtgcacggcagggcatg

SEQ ID NO: 3565575 - DNA, 25 bp, Homo sapien
aagtacttcagtgcacggcagggca

SEQ ID NO: 3565576 - DNA, 25 bp, Homo sapien
cacaaagtattggtcgcctgttgac

SEQ ID NO: 3565577 - DNA, 25 bp, Homo sapien
cagagtgacactctatcaaggagga

SEQ ID NO: 3565578 - DNA, 25 bp, Homo sapien
cagacaacatgtgaaagccgggcat

SEQ ID NO: 3565579 - DNA, 25 bp, Homo sapien
ggtgctctctgtggcgactactccg

SEQ ID NO: 3565580 - DNA, 25 bp, Homo sapien
gaaacgtggaccatgttcacctgac

SEQ ID NO: 3565581 - DNA, 25 bp, Homo sapien
ttcccaagcagagagcgacagatga

SEQ ID NO: 3565582 - DNA, 25 bp, Homo sapien
cgagcgccagacgaatacgtaactg

SEQ ID NO: 3565583 - DNA, 25 bp, Homo sapien
gaagtgcagatttaccgagcgccag

SEQ ID NO: 3565584 - DNA, 25 bp, Homo sapien
tcgtttgccagaagatttgcggtgt

SEQ ID NO: 3565585 - DNA, 25 bp, Homo sapien
cacaaaggcgtctgggctcgtgcga

SEQ ID NO: 3565586 - DNA, 25 bp, Homo sapien
tttgcggtgttcagggaggtctcta

SEQ ID NO: 3565587 - DNA, 25 bp, Homo sapien
aatggaaatccacgtcgtttgccag

SEQ ID NO: 3565588 - DNA, 25 bp, Homo sapien
caatgttatagcaggtagcgggtct

SEQ ID NO: 3565589 - DNA, 25 bp, Homo sapien
tagcgggtctgacatgagcaggcca

SEQ ID NO: 3565590 - DNA, 25 bp, Homo sapien
aaagtactgacgcacacccagaagg

SEQ ID NO: 3565591 - DNA, 25 bp, Homo sapien
acacacactgggaatatcacgcgac

SEQ ID NO: 3565592 - DNA, 25 bp, Homo sapien
tcaaatagtcacacgtcatcttatg

SEQ ID NO: 3565593 - DNA, 25 bp, Homo sapien
gctgcagacccgtacagatatgttc

SEQ ID NO: 3565594 - DNA, 25 bp, Homo sapien
tgacgctaacaggaacatgggtagg

SEQ ID NO: 3565595 - DNA, 25 bp, Homo sapien
cgtcatcttatgatgacgtcatcac

SEQ ID NO: 3565596 - DNA, 25 bp, Homo sapien
gcaggaactacggttggaaaattca

SEQ ID NO: 3565597 - DNA, 25 bp, Homo sapien
aatagcgctgacagtcttagccagg

SEQ ID NO: 3565598 - DNA, 25 bp, Homo sapien
aaaagggctcctgtgaatgggctgc

SEQ ID NO: 3565599 - DNA, 25 bp, Homo sapien
taagtttaagctggaaatagcgctg

SEQ ID NO: 3565600 - DNA, 25 bp, Homo sapien
agtgcccatcctccgcatagcccag

SEQ ID NO: 3565601 - DNA, 25 bp, Homo sapien
cagctggaggctgtcaatggacatg

SEQ ID NO: 3565602 - DNA, 25 bp, Homo sapien
ggaggctgtcaatggacatgacgta

SEQ ID NO: 3565603 - DNA, 25 bp, Homo sapien
ggaatgttcggattgatgtcgcctt

SEQ ID NO: 3565604 - DNA, 25 bp, Homo sapien
ttgaagacaacaaacgtgaacgact

SEQ ID NO: 3565605 - DNA, 25 bp, Homo sapien
aaaggtgggccacgatcggcgcatc

SEQ ID NO: 3565606 - DNA, 25 bp, Homo sapien
tgttcagcgttgaggcccatcttcc

SEQ ID NO: 3565607 - DNA, 25 bp, Homo sapien
cgatcggcgcatctgcccaggagtg

SEQ ID NO: 3565608 - DNA, 25 bp, Homo sapien
tagtagagatttggcgtagctgtcc

SEQ ID NO: 3565609 - DNA, 25 bp, Homo sapien
tagctgtccattgacgtatccgggt

SEQ ID NO: 3565610 - DNA, 25 bp, Homo sapien
tcatctaacgtcacaaagaacgctg

SEQ ID NO: 3565611 - DNA, 25 bp, Homo sapien
ccaaaataggcctgacgacacctgg

SEQ ID NO: 3565612 - DNA, 25 bp, Homo sapien
ccttcctgtgaatgactcccatggg

SEQ ID NO: 3565613 - DNA, 25 bp, Homo sapien
gcagataccgaacaacgccggcttg

SEQ ID NO: 3565614 - DNA, 25 bp, Homo sapien
ctcccatgggtaagatgctgatctg

SEQ ID NO: 3565615 - DNA, 25 bp, Homo sapien
cggatgagcgcatcttcacccgaga

SEQ ID NO: 3565616 - DNA, 25 bp, Homo sapien
tggtagagccagaccttgaagtagc

SEQ ID NO: 3565617 - DNA, 25 bp, Homo sapien
tacacgacgatgtgcttgctgtctc

SEQ ID NO: 3565618 - DNA, 25 bp, Homo sapien
gctccgaggtattgtccaggatcct

SEQ ID NO: 3565619 - DNA, 25 bp, Homo sapien
tagcgtcctcgatggtacacgacga

SEQ ID NO: 3565620 - DNA, 25 bp, Homo sapien
caatagggcaacttagaaaatatgc

SEQ ID NO: 3565621 - DNA, 25 bp, Homo sapien
tatcaagtcctcttaagcactgctc

SEQ ID NO: 3565622 - DNA, 25 bp, Homo sapien
gatgaagtacgttcactccacgaat

SEQ ID NO: 3565623 - DNA, 25 bp, Homo sapien
gagtaatttaagctcctcagtaagc

SEQ ID NO: 3565624 - DNA, 25 bp, Homo sapien
gaaatccgtgaacacacatggagtg

SEQ ID NO: 3565625 - DNA, 25 bp, Homo sapien
ggatacagcaaaggctccccaatga

SEQ ID NO: 3565626 - DNA, 25 bp, Homo sapien
gaggccagcttttgtgcaaggatac

SEQ ID NO: 3565627 - DNA, 25 bp, Homo sapien
tacaatggacgacagtgtgtggcag

SEQ ID NO: 3565628 - DNA, 25 bp, Homo sapien
gaggcccgcccgtcatacaggcctg

SEQ ID NO: 3565629 - DNA, 25 bp, Homo sapien
gcccgtcatacaggcctgccatgat

SEQ ID NO: 3565630 - DNA, 25 bp, Homo sapien
tcatacaggcctgccatgatggtct

SEQ ID NO: 3565631 - DNA, 25 bp, Homo sapien
tacaggcctgccatgatggtcttgg

SEQ ID NO: 3565632 - DNA, 25 bp, Homo sapien
ctgggtagttccccatccacaggca

SEQ ID NO: 3565633 - DNA, 25 bp, Homo sapien
tgggtagttccccatccacaggcac

SEQ ID NO: 3565634 - DNA, 25 bp, Homo sapien
gacccagtgtgcgttccatcacaaa

SEQ ID NO: 3565635 - DNA, 25 bp, Homo sapien
ctttccgagcacgacccagtgtgcg

SEQ ID NO: 3565636 - DNA, 25 bp, Homo sapien
gagcacgacccagtgtgcgttccat

SEQ ID NO: 3565637 - DNA, 25 bp, Homo sapien
gtgtgcgttccatcacaaacgctga

SEQ ID NO: 3565638 - DNA, 25 bp, Homo sapien
gatccgggaagtattaaacatccgc

SEQ ID NO: 3565639 - DNA, 25 bp, Homo sapien
ctgggatccgggaagtattaaacat

SEQ ID NO: 3565640 - DNA, 25 bp, Homo sapien
tctcctgggatccgggaagtattaa

SEQ ID NO: 3565641 - DNA, 25 bp, Homo sapien
gggaagtattaaacatccgctccca

SEQ ID NO: 3565642 - DNA, 25 bp, Homo sapien
gcagagtggaatcgtggatcccaaa

SEQ ID NO: 3565643 - DNA, 25 bp, Homo sapien
ggaatcgtggatcccaaaagacgaa

SEQ ID NO: 3565644 - DNA, 25 bp, Homo sapien
gagtggaatcgtggatcccaaaaga

SEQ ID NO: 3565645 - DNA, 25 bp, Homo sapien
gcggagcagagtggaatcgtggatc

SEQ ID NO: 3565646 - DNA, 25 bp, Homo sapien
tttgcgcctgtaaagcaggatggca

SEQ ID NO: 3565647 - DNA, 25 bp, Homo sapien
gcgttgccggctcttgctgcctgaa

SEQ ID NO: 3565648 - DNA, 25 bp, Homo sapien
catggatggcgttgccggctcttgc

SEQ ID NO: 3565649 - DNA, 25 bp, Homo sapien
tcccggtccagtttgcgcctgtaaa

SEQ ID NO: 3565650 - DNA, 25 bp, Homo sapien
agcggccctcgtcctcggaggtaga

SEQ ID NO: 3565651 - DNA, 25 bp, Homo sapien
ccctcgtcctcggaggtagatgtac

SEQ ID NO: 3565652 - DNA, 25 bp, Homo sapien
ctgttcaccatgagcggccctcgtc

SEQ ID NO: 3565653 - DNA, 25 bp, Homo sapien
tcctcggaggtagatgtactcctcc

SEQ ID NO: 3565654 - DNA, 25 bp, Homo sapien
cgacaccgtgggaaatgaaaagtgt

SEQ ID NO: 3565655 - DNA, 25 bp, Homo sapien
taactagatggaatgcgacaccgtg

SEQ ID NO: 3565656 - DNA, 25 bp, Homo sapien
tggcagacatttcggcgtctaacag

SEQ ID NO: 3565657 - DNA, 25 bp, Homo sapien
cagggaacgcagtcctaactagatg

SEQ ID NO: 3565658 - DNA, 25 bp, Homo sapien
gaacagtgcccatgcaagggcctcg

SEQ ID NO: 3565659 - DNA, 25 bp, Homo sapien
gtggcactaacctggtgttccgcag

SEQ ID NO: 3565660 - DNA, 25 bp, Homo sapien
cagagagctgacgtttaccagtcca

SEQ ID NO: 3565661 - DNA, 25 bp, Homo sapien
tattccctggcacatgtgtcctgag

SEQ ID NO: 3565662 - DNA, 25 bp, Homo sapien
cccttggaatcaagataaaccaaag

SEQ ID NO: 3565663 - DNA, 25 bp, Homo sapien
cagcgagctcgggaaggatgccctt

SEQ ID NO: 3565664 - DNA, 25 bp, Homo sapien
ctgcatccaccagcgagctcgggaa

SEQ ID NO: 3565665 - DNA, 25 bp, Homo sapien
caccagcgagctcgggaaggatgcc

SEQ ID NO: 3565666 - DNA, 25 bp, Homo sapien
taagaggcctcaccgactgtagata

SEQ ID NO: 3565667 - DNA, 25 bp, Homo sapien
taatttgtagcccaccaggatttta

SEQ ID NO: 3565668 - DNA, 25 bp, Homo sapien
gagcaagtgctgtcatccgtttgaa

SEQ ID NO: 3565669 - DNA, 25 bp, Homo sapien
tggtccaagaccgacagcaaaatct

SEQ ID NO: 3565670 - DNA, 25 bp, Homo sapien
gcaggcgaggcagcgatgtctggaa

SEQ ID NO: 3565671 - DNA, 25 bp, Homo sapien
tgtctggaagctgtacaacatgggt

SEQ ID NO: 3565672 - DNA, 25 bp, Homo sapien
ggcctgaaaagatcttgaccatacc

SEQ ID NO: 3565673 - DNA, 25 bp, Homo sapien
cagtgtctttgacagccgggaccgg

SEQ ID NO: 3565674 - DNA, 25 bp, Homo sapien
gcccttagtttcgggatgggctcca

SEQ ID NO: 3565675 - DNA, 25 bp, Homo sapien
cgcaaggcccttagtttcgggatgg

SEQ ID NO: 3565676 - DNA, 25 bp, Homo sapien
ccgcaaggcccttagtttcgggatg

SEQ ID NO: 3565677 - DNA, 25 bp, Homo sapien
ggagtcccggtgtgtggtgggcact

SEQ ID NO: 3565678 - DNA, 25 bp, Homo sapien
ttgtttggcaaagagtggagtcccg

SEQ ID NO: 3565679 - DNA, 25 bp, Homo sapien
tgtttggcaaagagtggagtcccgg

SEQ ID NO: 3565680 - DNA, 25 bp, Homo sapien
ttggcaaagagtggagtcccggtgt

SEQ ID NO: 3565681 - DNA, 25 bp, Homo sapien
aacatccacccgtggtaggagagca

SEQ ID NO: 3565682 - DNA, 25 bp, Homo sapien
gagagcagcactttcagggagtagc

SEQ ID NO: 3565683 - DNA, 25 bp, Homo sapien
tgaccacgttcttcgtctggctgga

SEQ ID NO: 3565684 - DNA, 25 bp, Homo sapien
tcatcttgccgtgctcagtgaacat

SEQ ID NO: 3565685 - DNA, 25 bp, Homo sapien
tcgatcttggcgtacatcgttgtca

SEQ ID NO: 3565686 - DNA, 25 bp, Homo sapien
gccgtttccagagtccgattgattt

SEQ ID NO: 3565687 - DNA, 25 bp, Homo sapien
ccaccacgataagccaactggaggg

SEQ ID NO: 3565688 - DNA, 25 bp, Homo sapien
ccgggtacacgccagtgatgatgcc

SEQ ID NO: 3565689 - DNA, 25 bp, Homo sapien
agctgtactggctcccaggggcttg

SEQ ID NO: 3565690 - DNA, 25 bp, Homo sapien
ccgtgcagctgtactggctcccagg

SEQ ID NO: 3565691 - DNA, 25 bp, Homo sapien
tgcagctgtactggctcccaggggc

SEQ ID NO: 3565692 - DNA, 25 bp, Homo sapien
cgtgcagctgtactggctcccaggg

SEQ ID NO: 3565693 - DNA, 25 bp, Homo sapien
gagagatagatttgtctaagagctt

SEQ ID NO: 3565694 - DNA, 25 bp, Homo sapien
gcttcatggctcagccgcaggtcaa

SEQ ID NO: 3565695 - DNA, 25 bp, Homo sapien
ccgtccggagtgaccgtgaactgaa

SEQ ID NO: 3565696 - DNA, 25 bp, Homo sapien
gatagatttgtctaagagcttcatg

SEQ ID NO: 3565697 - DNA, 25 bp, Homo sapien
gaaatacctgaacagtcaccacctg

SEQ ID NO: 3565698 - DNA, 25 bp, Homo sapien
ctacccacaatctggaaatacctga

SEQ ID NO: 3565699 - DNA, 25 bp, Homo sapien
gcccaacccaacaggatttttatga

SEQ ID NO: 3565700 - DNA, 25 bp, Homo sapien
ctgcttgcccaacccaacaggattt

SEQ ID NO: 3565701 - DNA, 25 bp, Homo sapien
caagggcgcaaagctcttccaagga

SEQ ID NO: 3565702 - DNA, 25 bp, Homo sapien
ctgggatgggcagacgacaagccca

SEQ ID NO: 3565703 - DNA, 25 bp, Homo sapien
gggatgggcagacgacaagcccagg

SEQ ID NO: 3565704 - DNA, 25 bp, Homo sapien
ggccaagggcgcaaagctcttccaa

SEQ ID NO: 3565705 - DNA, 25 bp, Homo sapien
tcttactgagaacgccggcacctgc

SEQ ID NO: 3565706 - DNA, 25 bp, Homo sapien
atgaatctcaccacctgtccacgtg

SEQ ID NO: 3565707 - DNA, 25 bp, Homo sapien
gccaaaacttcaccagctgacaatg

SEQ ID NO: 3565708 - DNA, 25 bp, Homo sapien
ttctcttactgagaacgccggcacc

SEQ ID NO: 3565709 - DNA, 25 bp, Homo sapien
taaagtatgcaggatgcccttacct

SEQ ID NO: 3565710 - DNA, 25 bp, Homo sapien
ccctagaggcggattcagtgccaca

SEQ ID NO: 3565711 - DNA, 25 bp, Homo sapien
taagacaacaggagcggtgtcccct

SEQ ID NO: 3565712 - DNA, 25 bp, Homo sapien
ttggtgtccctaaatgccgcctgca

SEQ ID NO: 3565713 - DNA, 25 bp, Homo sapien
gcaagtttaattgctcgcttggaaa

SEQ ID NO: 3565714 - DNA, 25 bp, Homo sapien
cttggaaagcgtcctcggaagggca

SEQ ID NO: 3565715 - DNA, 25 bp, Homo sapien
tagatttcgggcagcaagtttaatt

SEQ ID NO: 3565716 - DNA, 25 bp, Homo sapien
agggcaccgccagcaactgcggctt

SEQ ID NO: 3565717 - DNA, 25 bp, Homo sapien
tctccgtgggaaggtcgagccctgc

SEQ ID NO: 3565718 - DNA, 25 bp, Homo sapien
gtgggaaggtcgagccctgcggtgc

SEQ ID NO: 3565719 - DNA, 25 bp, Homo sapien
ctctccgtgggaaggtcgagccctg

SEQ ID NO: 3565720 - DNA, 25 bp, Homo sapien
gagccagaaacgcaggcaccgcgct

SEQ ID NO: 3565721 - DNA, 25 bp, Homo sapien
gaaacgcaggcaccgcgctcaagag

SEQ ID NO: 3565722 - DNA, 25 bp, Homo sapien
agaaacgcaggcaccgcgctcaaga

SEQ ID NO: 3565723 - DNA, 25 bp, Homo sapien
caacgagccagaaacgcaggcaccg

SEQ ID NO: 3565724 - DNA, 25 bp, Homo sapien
gacacttatgtcctcaatttattgc

SEQ ID NO: 3565725 - DNA, 25 bp, Homo sapien
tattgctacgttcactcggtcagag

SEQ ID NO: 3565726 - DNA, 25 bp, Homo sapien
gacagctggatgttcgctggcctca

SEQ ID NO: 3565727 - DNA, 25 bp, Homo sapien
tggcctcagcggtgtgcattctcag

SEQ ID NO: 3565728 - DNA, 25 bp, Homo sapien
catctttgagttctgcggctttaac

SEQ ID NO: 3565729 - DNA, 25 bp, Homo sapien
tattttataacacacggagccgaga

SEQ ID NO: 3565730 - DNA, 25 bp, Homo sapien
ttttaaagtaagatcggccctcatc

SEQ ID NO: 3565731 - DNA, 25 bp, Homo sapien
cctgtgccgagttgggaatattaac

SEQ ID NO: 3565732 - DNA, 25 bp, Homo sapien
aaagaagccggctgttggctggccg

SEQ ID NO: 3565733 - DNA, 25 bp, Homo sapien
cgaaagaagccggctgttggctggc

SEQ ID NO: 3565734 - DNA, 25 bp, Homo sapien
agaagccggctgttggctggccgcg

SEQ ID NO: 3565735 - DNA, 25 bp, Homo sapien
aagccggctgttggctggccgcggc

SEQ ID NO: 3565736 - DNA, 25 bp, Homo sapien
cgtcgggctcgcaggccaagttcgc

SEQ ID NO: 3565737 - DNA, 25 bp, Homo sapien
cttgacccagcgctgcacgggagag

SEQ ID NO: 3565738 - DNA, 25 bp, Homo sapien
gcagcgctcggaccgcgcctggagt

SEQ ID NO: 3565739 - DNA, 25 bp, Homo sapien
gagtccctgcgccaagggcgtgtcc

SEQ ID NO: 3565740 - DNA, 25 bp, Homo sapien
gcggcggcggtggagtgaacgagcg

SEQ ID NO: 3565741 - DNA, 25 bp, Homo sapien
tggagtgaacgagcggcgagcggga

SEQ ID NO: 3565742 - DNA, 25 bp, Homo sapien
gagtcagctacggaggtgcggcagc

SEQ ID NO: 3565743 - DNA, 25 bp, Homo sapien
cagctacggaggtgcggcagcggca

SEQ ID NO: 3565744 - DNA, 25 bp, Homo sapien
taaaatcgcttagctccgtgcctgg

SEQ ID NO: 3565745 - DNA, 25 bp, Homo sapien
cattgccccgtgtaatgctccaggc

SEQ ID NO: 3565746 - DNA, 25 bp, Homo sapien
tcaccgagctgagaagcaaccgatc

SEQ ID NO: 3565747 - DNA, 25 bp, Homo sapien
gatcctcgcgacttatctatcggca

SEQ ID NO: 3565748 - DNA, 25 bp, Homo sapien
attcttccagcgtcaagaacataat

SEQ ID NO: 3565749 - DNA, 25 bp, Homo sapien
cgtcaagaacataataggtgctggg

SEQ ID NO: 3565750 - DNA, 25 bp, Homo sapien
ccagcgtcaagaacataataggtgc

SEQ ID NO: 3565751 - DNA, 25 bp, Homo sapien
caagaacataataggtgctgggaga

SEQ ID NO: 3565752 - DNA, 25 bp, Homo sapien
ggagtctagggcgagcgcagctgca

SEQ ID NO: 3565753 - DNA, 25 bp, Homo sapien
ggccccaagcgtaacaggagggcca

SEQ ID NO: 3565754 - DNA, 25 bp, Homo sapien
caagcgtaacaggagggccaagggg

SEQ ID NO: 3565755 - DNA, 25 bp, Homo sapien
cccaagcgtaacaggagggccaagg

SEQ ID NO: 3565756 - DNA, 25 bp, Homo sapien
tgctccataaatgcaccgatgttat

SEQ ID NO: 3565757 - DNA, 25 bp, Homo sapien
gcgagctggcggctctgcatacagc

SEQ ID NO: 3565758 - DNA, 25 bp, Homo sapien
gctggcggctctgcatacagcaggt

SEQ ID NO: 3565759 - DNA, 25 bp, Homo sapien
caccgatgttatgaacaaagactct

SEQ ID NO: 3565760 - DNA, 25 bp, Homo sapien
tgctctttttaagttcgaccacttc

SEQ ID NO: 3565761 - DNA, 25 bp, Homo sapien
taagttcgaccacttcttctagtta

SEQ ID NO: 3565762 - DNA, 25 bp, Homo sapien
agttcgaccacttcttctagttatg

SEQ ID NO: 3565763 - DNA, 25 bp, Homo sapien
ctgctctttttaagttcgaccactt

SEQ ID NO: 3565764 - DNA, 25 bp, Homo sapien
tcccctcccgccgaccacgctgcag

SEQ ID NO: 3565765 - DNA, 25 bp, Homo sapien
cgccgaccacgctgcagctctcctg

SEQ ID NO: 3565766 - DNA, 25 bp, Homo sapien
tcggcagctgcaacgagcccgcgcc

SEQ ID NO: 3565767 - DNA, 25 bp, Homo sapien
gcccgcgccggcctgcaactgcagc

SEQ ID NO: 3565768 - DNA, 25 bp, Homo sapien
cctcctgagtcagctgggtcggcgg

SEQ ID NO: 3565769 - DNA, 25 bp, Homo sapien
cggccggggcgatagctgaaggtgg

SEQ ID NO: 3565770 - DNA, 25 bp, Homo sapien
tcctgagtcagctgggtcggcggcg

SEQ ID NO: 3565771 - DNA, 25 bp, Homo sapien
ccccacggccggggcgatagctgaa

SEQ ID NO: 3565772 - DNA, 25 bp, Homo sapien
ctccccacgctccagggaaagataa

SEQ ID NO: 3565773 - DNA, 25 bp, Homo sapien
ctgtaaactgctccggaggattacc

SEQ ID NO: 3565774 - DNA, 25 bp, Homo sapien
ctttcgcctgttctacactgtacat

SEQ ID NO: 3565775 - DNA, 25 bp, Homo sapien
caatacggtagtttcctttcgcctg

SEQ ID NO: 3565776 - DNA, 25 bp, Homo sapien
tgctccggaggattaccaatacggt

SEQ ID NO: 3565777 - DNA, 25 bp, Homo sapien
tttcttctttgtcctgctgagtcat

SEQ ID NO: 3565778 - DNA, 25 bp, Homo sapien
atttcttctttgtcctgctgagtca

SEQ ID NO: 3565779 - DNA, 25 bp, Homo sapien
gtccatttcttctttgtcctgctga

SEQ ID NO: 3565780 - DNA, 25 bp, Homo sapien
cctttgtccatttcttctttgtcct

SEQ ID NO: 3565781 - DNA, 25 bp, Homo sapien
tcagcccactgggctggcgccccct

SEQ ID NO: 3565782 - DNA, 25 bp, Homo sapien
tcaatgctgtttatccggaggacag

SEQ ID NO: 3565783 - DNA, 25 bp, Homo sapien
tgcactgactgcctcgctagcttgt

SEQ ID NO: 3565784 - DNA, 25 bp, Homo sapien
cgttcactctgttggcaggtgcaga

SEQ ID NO: 3565785 - DNA, 25 bp, Homo sapien
cctgctgcacatggccgtgtttatc

SEQ ID NO: 3565786 - DNA, 25 bp, Homo sapien
gaaaggatgtcacaggcttgaccac

SEQ ID NO: 3565787 - DNA, 25 bp, Homo sapien
taggccggcaactgcagttatagca

SEQ ID NO: 3565788 - DNA, 25 bp, Homo sapien
tatatttaactatgcccactgttgg

SEQ ID NO: 3565789 - DNA, 25 bp, Homo sapien
tcagaaggtacatgagaggctcccc

SEQ ID NO: 3565790 - DNA, 25 bp, Homo sapien
ccagatgactctaaggtgacagcca

SEQ ID NO: 3565791 - DNA, 25 bp, Homo sapien
gctaggcgtcatgggttggaacaaa

SEQ ID NO: 3565792 - DNA, 25 bp, Homo sapien
gggacagaattctgcagccgctcag

SEQ ID NO: 3565793 - DNA, 25 bp, Homo sapien
gacagccctacacctgcttgcggat

SEQ ID NO: 3565794 - DNA, 25 bp, Homo sapien
agtgcagacctgctaggacagccct

SEQ ID NO: 3565795 - DNA, 25 bp, Homo sapien
gcccagcggtactttctctaactta

SEQ ID NO: 3565796 - DNA, 25 bp, Homo sapien
gggcaaccagcaccgtgcaacaggg

SEQ ID NO: 3565797 - DNA, 25 bp, Homo sapien
cctccgtccgcatgcgcctgggcaa

SEQ ID NO: 3565798 - DNA, 25 bp, Homo sapien
ggcttcctgtcccgagacccacgtg

SEQ ID NO: 3565799 - DNA, 25 bp, Homo sapien
ttccttttcctgaatctcataatga

SEQ ID NO: 3565800 - DNA, 25 bp, Homo sapien
aatgactgtggcttctactcgaaca

SEQ ID NO: 3565801 - DNA, 25 bp, Homo sapien
tgtggcttctactcgaacaagatcc

SEQ ID NO: 3565802 - DNA, 25 bp, Homo sapien
ggcttctactcgaacaagatccttt

SEQ ID NO: 3565803 - DNA, 25 bp, Homo sapien
gactgtggcttctactcgaacaaga

SEQ ID NO: 3565804 - DNA, 25 bp, Homo sapien
gccccagacaaagcccagcacttca

SEQ ID NO: 3565805 - DNA, 25 bp, Homo sapien
ctggcctaattgcactgtgaccact

SEQ ID NO: 3565806 - DNA, 25 bp, Homo sapien
ctggagccccagacaaagcccagca

SEQ ID NO: 3565807 - DNA, 25 bp, Homo sapien
actgtgaccactgtctgcatgtcca

SEQ ID NO: 3565808 - DNA, 25 bp, Homo sapien
agtggcttgccaagcagcgtgaagt

SEQ ID NO: 3565809 - DNA, 25 bp, Homo sapien
caagcagcgtgaagttgtctgcccc

SEQ ID NO: 3565810 - DNA, 25 bp, Homo sapien
agcgtgaagttgtctgccccaacca

SEQ ID NO: 3565811 - DNA, 25 bp, Homo sapien
ttgccaagcagcgtgaagttgtctg

SEQ ID NO: 3565812 - DNA, 25 bp, Homo sapien
tggtggctgagtccctgaatatcca

SEQ ID NO: 3565813 - DNA, 25 bp, Homo sapien
tggctgagtccctgaatatccagag

SEQ ID NO: 3565814 - DNA, 25 bp, Homo sapien
gtggctgagtccctgaatatccaga

SEQ ID NO: 3565815 - DNA, 25 bp, Homo sapien
cttggtggctgagtccctgaatatc

SEQ ID NO: 3565816 - DNA, 25 bp, Homo sapien
agtgcaccacggcaaagagcctgcc

SEQ ID NO: 3565817 - DNA, 25 bp, Homo sapien
acacgcaaggtctagttcatttcca

SEQ ID NO: 3565818 - DNA, 25 bp, Homo sapien
tctctctccacacgcaaggtctagt

SEQ ID NO: 3565819 - DNA, 25 bp, Homo sapien
attaagatcaggtcttcagaggtca

SEQ ID NO: 3565820 - DNA, 25 bp, Homo sapien
cgggtgggtgggcagtcaccctcac

SEQ ID NO: 3565821 - DNA, 25 bp, Homo sapien
gcgggtgggtgggcagtcaccctca

SEQ ID NO: 3565822 - DNA, 25 bp, Homo sapien
ggacctgacagccagcaccccttgt

SEQ ID NO: 3565823 - DNA, 25 bp, Homo sapien
cagtgtgatgtgcagctcctggtgg

SEQ ID NO: 3565824 - DNA, 25 bp, Homo sapien
tggtggggccctagggtggacctga

SEQ ID NO: 3565825 - DNA, 25 bp, Homo sapien
accccttgtgagcacctcactgctg

SEQ ID NO: 3565826 - DNA, 25 bp, Homo sapien
agcccgggtggcaccggcttccagt

SEQ ID NO: 3565827 - DNA, 25 bp, Homo sapien
agtaattgtgcttaactgtgctaac

SEQ ID NO: 3565828 - DNA, 25 bp, Homo sapien
gacatgagtcctgatacctctgcat

SEQ ID NO: 3565829 - DNA, 25 bp, Homo sapien
ccaggtcgacatgagtcctgatacc

SEQ ID NO: 3565830 - DNA, 25 bp, Homo sapien
ccaaggtggtgaactcagggatgtt

SEQ ID NO: 3565831 - DNA, 25 bp, Homo sapien
ggtctggcagaacaacttctggcca

SEQ ID NO: 3565832 - DNA, 25 bp, Homo sapien
tggcagaacaacttctggccaaggt

SEQ ID NO: 3565833 - DNA, 25 bp, Homo sapien
aactgggtctggcagaacaacttct

SEQ ID NO: 3565834 - DNA, 25 bp, Homo sapien
aaaaggctcgctctttcggacaggc

SEQ ID NO: 3565835 - DNA, 25 bp, Homo sapien
caataatcaaagcaggaactctcat

SEQ ID NO: 3565836 - DNA, 25 bp, Homo sapien
catttcgtagacaaatgtcacaagc

SEQ ID NO: 3565837 - DNA, 25 bp, Homo sapien
cacttgggtacttctcagtgctgga

SEQ ID NO: 3565838 - DNA, 25 bp, Homo sapien
gggcttggagctcctagagacatga

SEQ ID NO: 3565839 - DNA, 25 bp, Homo sapien
catgaactccgtgatctgtggttgg

SEQ ID NO: 3565840 - DNA, 25 bp, Homo sapien
gaggggctccacaccaatctgggag

SEQ ID NO: 3565841 - DNA, 25 bp, Homo sapien
agctcctagagacatgaactccgtg

SEQ ID NO: 3565842 - DNA, 25 bp, Homo sapien
gaaggtgctaacctctcacacagga

SEQ ID NO: 3565843 - DNA, 25 bp, Homo sapien
gacacaggggtagtaggcacaacct

SEQ ID NO: 3565844 - DNA, 25 bp, Homo sapien
tgcccagtgtgagaagaacacgctg

SEQ ID NO: 3565845 - DNA, 25 bp, Homo sapien
gctggcaggaaggtgctaacctctc

SEQ ID NO: 3565846 - DNA, 25 bp, Homo sapien
ctggtagatatgaagtgctctgtga

SEQ ID NO: 3565847 - DNA, 25 bp, Homo sapien
cctggtagatatgaagtgctctgtg

SEQ ID NO: 3565848 - DNA, 25 bp, Homo sapien
cttcgagaagcagaccaaagggagg

SEQ ID NO: 3565849 - DNA, 25 bp, Homo sapien
tccgggccccgaaggtctcaggatg

SEQ ID NO: 3565850 - DNA, 25 bp, Homo sapien
cagccgccctaaggtgaccgtcagg

SEQ ID NO: 3565851 - DNA, 25 bp, Homo sapien
ctcaggatgctgtggctgcacgcgg

SEQ ID NO: 3565852 - DNA, 25 bp, Homo sapien
taaggtgaccgtcagggaagatgct

SEQ ID NO: 3565853 - DNA, 25 bp, Homo sapien
cccggcagcatgagtcaggtgcact

SEQ ID NO: 3565854 - DNA, 25 bp, Homo sapien
agttccacccgcagcgagttagcag

SEQ ID NO: 3565855 - DNA, 25 bp, Homo sapien
ctgggcataagcagagagtcccttc

SEQ ID NO: 3565856 - DNA, 25 bp, Homo sapien
tggtttgcgcccattctcagtcagg

SEQ ID NO: 3565857 - DNA, 25 bp, Homo sapien
gcgggaccaagaacggatccctgga

SEQ ID NO: 3565858 - DNA, 25 bp, Homo sapien
taagcttttccgatgtcacaatgtg

SEQ ID NO: 3565859 - DNA, 25 bp, Homo sapien
gcttgggaaatgcacgtcccttccc

SEQ ID NO: 3565860 - DNA, 25 bp, Homo sapien
ccatgcccggcagagaatcagccgg

SEQ ID NO: 3565861 - DNA, 25 bp, Homo sapien
gggcaccattggaagcatctcccgg

SEQ ID NO: 3565862 - DNA, 25 bp, Homo sapien
gcatttgtgtaatgatgctcttggg

SEQ ID NO: 3565863 - DNA, 25 bp, Homo sapien
ggatgagggcaccattggaagcatc

SEQ ID NO: 3565864 - DNA, 25 bp, Homo sapien
ttggaagcatctcccggttgacaca

SEQ ID NO: 3565865 - DNA, 25 bp, Homo sapien
tgtgggccgtcccaccaggaggagc

SEQ ID NO: 3565866 - DNA, 25 bp, Homo sapien
caggaggagcttgaagtagaggaag

SEQ ID NO: 3565867 - DNA, 25 bp, Homo sapien
tttatccaggtgttcttctgtgggc

SEQ ID NO: 3565868 - DNA, 25 bp, Homo sapien
agcttgaagtagaggaaggcagcca

SEQ ID NO: 3565869 - DNA, 25 bp, Homo sapien
ctagggtcctcgtctggtcaggagc

SEQ ID NO: 3565870 - DNA, 25 bp, Homo sapien
tagggtcctcgtctggtcaggagca

SEQ ID NO: 3565871 - DNA, 25 bp, Homo sapien
agcaggggcggcctggagccttttt

SEQ ID NO: 3565872 - DNA, 25 bp, Homo sapien
gtcaggagcaggggcggcctggagc

SEQ ID NO: 3565873 - DNA, 25 bp, Homo sapien
ctggttttccagttaggcagctgat

SEQ ID NO: 3565874 - DNA, 25 bp, Homo sapien
cagaacaggacaattcctgctggtt

SEQ ID NO: 3565875 - DNA, 25 bp, Homo sapien
ttcagcaagtgccaaggaaaggcca

SEQ ID NO: 3565876 - DNA, 25 bp, Homo sapien
ggaaaggccagatttccagtgggtc

SEQ ID NO: 3565877 - DNA, 25 bp, Homo sapien
gggagcctgattccagggggacctg

SEQ ID NO: 3565878 - DNA, 25 bp, Homo sapien
ctgggagcctgattccagggggacc

SEQ ID NO: 3565879 - DNA, 25 bp, Homo sapien
tgggagcctgattccagggggacct

SEQ ID NO: 3565880 - DNA, 25 bp, Homo sapien
gagccaccacgcccaaccaactccc

SEQ ID NO: 3565881 - DNA, 25 bp, Homo sapien
ctgctcaccttggcctcgaaaaatg

SEQ ID NO: 3565882 - DNA, 25 bp, Homo sapien
gatctgctcaccttggcctcgaaaa

SEQ ID NO: 3565883 - DNA, 25 bp, Homo sapien
agccaccacgcccaaccaactccct

SEQ ID NO: 3565884 - DNA, 25 bp, Homo sapien
tcagaatggcgcctcatccctgtcc

SEQ ID NO: 3565885 - DNA, 25 bp, Homo sapien
aatggcgcctcatccctgtcctggt

SEQ ID NO: 3565886 - DNA, 25 bp, Homo sapien
cgcctcatccctgtcctggtcccac

SEQ ID NO: 3565887 - DNA, 25 bp, Homo sapien
agaatggcgcctcatccctgtcctg

SEQ ID NO: 3565888 - DNA, 25 bp, Homo sapien
gctttgttggcgatggaggatacta

SEQ ID NO: 3565889 - DNA, 25 bp, Homo sapien
cccgtgtttttggatgcaggctcca

SEQ ID NO: 3565890 - DNA, 25 bp, Homo sapien
gaggatactaagcatccgcccgtgt

SEQ ID NO: 3565891 - DNA, 25 bp, Homo sapien
tccgcccgtgtttttggatgcaggc

SEQ ID NO: 3565892 - DNA, 25 bp, Homo sapien
ggaagccgtgacagccacttctgtt

SEQ ID NO: 3565893 - DNA, 25 bp, Homo sapien
tccccaggtcagactgcagcgagcg

SEQ ID NO: 3565894 - DNA, 25 bp, Homo sapien
cctctatgtctgcttaaagaagaat

SEQ ID NO: 3565895 - DNA, 25 bp, Homo sapien
tctatgcttccctctcccgtgtgct

SEQ ID NO: 3565896 - DNA, 25 bp, Homo sapien
ctgcacaaccagagggtagactcca

SEQ ID NO: 3565897 - DNA, 25 bp, Homo sapien
tgcaacaggggagtcaccaaagacc

SEQ ID NO: 3565898 - DNA, 25 bp, Homo sapien
caggggagtcaccaaagacccgctt

SEQ ID NO: 3565899 - DNA, 25 bp, Homo sapien
cagagggtagactccagggtgcaac

SEQ ID NO: 3565900 - DNA, 25 bp, Homo sapien
agaaaaccacggatgcgggaaacag

SEQ ID NO: 3565901 - DNA, 25 bp, Homo sapien
gagaaaaccacggatgcgggaaaca

SEQ ID NO: 3565902 - DNA, 25 bp, Homo sapien
gagagaaaaccacggatgcgggaaa

SEQ ID NO: 3565903 - DNA, 25 bp, Homo sapien
tcagggcacccacaaggagcaccgg

SEQ ID NO: 3565904 - DNA, 25 bp, Homo sapien
agggaagcaggtgaccggctggtgc

SEQ ID NO: 3565905 - DNA, 25 bp, Homo sapien
gtgctgctgctgaccgacgagttga

SEQ ID NO: 3565906 - DNA, 25 bp, Homo sapien
cagaggacaaacctggagacgccga

SEQ ID NO: 3565907 - DNA, 25 bp, Homo sapien
tggccagccaatggccatgacgtcc

SEQ ID NO: 3565908 - DNA, 25 bp, Homo sapien
ggccagccaatggccatgacgtcca

SEQ ID NO: 3565909 - DNA, 25 bp, Homo sapien
gccagccaatggccatgacgtccat

SEQ ID NO: 3565910 - DNA, 25 bp, Homo sapien
ctggccagccaatggccatgacgtc

SEQ ID NO: 3565911 - DNA, 25 bp, Homo sapien
ttggtgcccacggtgggcgtctccc

SEQ ID NO: 3565912 - DNA, 25 bp, Homo sapien
aagcccccatctcattggtgcccac

SEQ ID NO: 3565913 - DNA, 25 bp, Homo sapien
catctcattggtgcccacggtgggc

SEQ ID NO: 3565914 - DNA, 25 bp, Homo sapien
cccatctcattggtgcccacggtgg

SEQ ID NO: 3565915 - DNA, 25 bp, Homo sapien
tcaacccgttcatcaggagacagag

SEQ ID NO: 3565916 - DNA, 25 bp, Homo sapien
gggttcctgtgcattcgaaagccca

SEQ ID NO: 3565917 - DNA, 25 bp, Homo sapien
cgtgacaagctgaagcacaggacct

SEQ ID NO: 3565918 - DNA, 25 bp, Homo sapien
tcatcagctcgtggaccttgtcagt

SEQ ID NO: 3565919 - DNA, 25 bp, Homo sapien
caggtaggccgtgtgcactgtgctc

SEQ ID NO: 3565920 - DNA, 25 bp, Homo sapien
tgctccctctggaatagtttagggc

SEQ ID NO: 3565921 - DNA, 25 bp, Homo sapien
accaggtaggccgtgtgcactgtgc

SEQ ID NO: 3565922 - DNA, 25 bp, Homo sapien
gtttagggctgactccacggtccca

SEQ ID NO: 3565923 - DNA, 25 bp, Homo sapien
tcgcttgagcctggcacattgaggt

SEQ ID NO: 3565924 - DNA, 25 bp, Homo sapien
gagcctggcacattgaggttgtagt

SEQ ID NO: 3565925 - DNA, 25 bp, Homo sapien
tgagcctggcacattgaggttgtag

SEQ ID NO: 3565926 - DNA, 25 bp, Homo sapien
gcttgagcctggcacattgaggttg

SEQ ID NO: 3565927 - DNA, 25 bp, Homo sapien
tcacaggtccaggaccaggtttttg

SEQ ID NO: 3565928 - DNA, 25 bp, Homo sapien
ggagatttggcatcatgcaagtggt

SEQ ID NO: 3565929 - DNA, 25 bp, Homo sapien
ggtccaggaccaggtttttgatgga

SEQ ID NO: 3565930 - DNA, 25 bp, Homo sapien
ggatttcttggctaggagatttggc

SEQ ID NO: 3565931 - DNA, 25 bp, Homo sapien
ctcatctggtgcaccctgggccccc

SEQ ID NO: 3565932 - DNA, 25 bp, Homo sapien
tctcatctggtgcaccctgggcccc

SEQ ID NO: 3565933 - DNA, 25 bp, Homo sapien
gctgattcatttgtggcacctgaag

SEQ ID NO: 3565934 - DNA, 25 bp, Homo sapien
acatgaccgctgcaggacgacgcgg

SEQ ID NO: 3565935 - DNA, 25 bp, Homo sapien
accgctgcaggacgacgcgggtcta

SEQ ID NO: 3565936 - DNA, 25 bp, Homo sapien
gggtctactccatgtggattcaggg

SEQ ID NO: 3565937 - DNA, 25 bp, Homo sapien
aggacgacgcgggtctactccatgt

SEQ ID NO: 3565938 - DNA, 25 bp, Homo sapien
gagccgctcgccctgttctggctct

SEQ ID NO: 3565939 - DNA, 25 bp, Homo sapien
gatgatcttcgctaggttccctctg

SEQ ID NO: 3565940 - DNA, 25 bp, Homo sapien
gatcttcgctaggttccctctgagc

SEQ ID NO: 3565941 - DNA, 25 bp, Homo sapien
ccctgatgatcttcgctaggttccc

SEQ ID NO: 3565942 - DNA, 25 bp, Homo sapien
tggaggccggcatcttatccgtgtc

SEQ ID NO: 3565943 - DNA, 25 bp, Homo sapien
gaggccggcatcttatccgtgtcac

SEQ ID NO: 3565944 - DNA, 25 bp, Homo sapien
gatggaggccggcatcttatccgtg

SEQ ID NO: 3565945 - DNA, 25 bp, Homo sapien
aggatggaggccggcatcttatccg

SEQ ID NO: 3565946 - DNA, 25 bp, Homo sapien
cgagctagcatggtgttcattctca

SEQ ID NO: 3565947 - DNA, 25 bp, Homo sapien
ccgggtgggccgtatgggtggtgca

SEQ ID NO: 3565948 - DNA, 25 bp, Homo sapien
cagcggatggctgagtctctaggac

SEQ ID NO: 3565949 - DNA, 25 bp, Homo sapien
aggacggtccccgagctagcatggt

SEQ ID NO: 3565950 - DNA, 25 bp, Homo sapien
tctgacggagggtggcgtgagtaac

SEQ ID NO: 3565951 - DNA, 25 bp, Homo sapien
gtggcgtgagtaacacccagggtgt

SEQ ID NO: 3565952 - DNA, 25 bp, Homo sapien
tgagtaacacccagggtgtgggctc

SEQ ID NO: 3565953 - DNA, 25 bp, Homo sapien
ggtgtttgtggctctgacggagggt

SEQ ID NO: 3565954 - DNA, 25 bp, Homo sapien
tgtggataggtctcgatggcccgtc

SEQ ID NO: 3565955 - DNA, 25 bp, Homo sapien
cagcgcgactgaccttggatgagaa

SEQ ID NO: 3565956 - DNA, 25 bp, Homo sapien
gaaaacctacgtgcagctcttggcc

SEQ ID NO: 3565957 - DNA, 25 bp, Homo sapien
tatgtccgcaaacagcagattggtg

SEQ ID NO: 3565958 - DNA, 25 bp, Homo sapien
caggattgttagaaaggggagcatg

SEQ ID NO: 3565959 - DNA, 25 bp, Homo sapien
gtcctcatggcctgcgggatacctc

SEQ ID NO: 3565960 - DNA, 25 bp, Homo sapien
ctaggactggctcgtcccggagtca

SEQ ID NO: 3565961 - DNA, 25 bp, Homo sapien
tataaaacttccgttggccacattg

SEQ ID NO: 3565962 - DNA, 25 bp, Homo sapien
gatacctcaagtgctcccggaggca

SEQ ID NO: 3565963 - DNA, 25 bp, Homo sapien
tcaactacccaaggcggccaaaggc

SEQ ID NO: 3565964 - DNA, 25 bp, Homo sapien
cttagctacaaggcatgtgaaccag

SEQ ID NO: 3565965 - DNA, 25 bp, Homo sapien
tgctcactgataatgccttaagagg

SEQ ID NO: 3565966 - DNA, 25 bp, Homo sapien
gagccttgacataaccagaaatccc

SEQ ID NO: 3565967 - DNA, 25 bp, Homo sapien
aacttctgtacaagaggtctctagg

SEQ ID NO: 3565968 - DNA, 25 bp, Homo sapien
ccattcctgtcccaaggcgaagggt

SEQ ID NO: 3565969 - DNA, 25 bp, Homo sapien
gggccacagggtctgtttgctggtg

SEQ ID NO: 3565970 - DNA, 25 bp, Homo sapien
aggagaggaaacagatctttcttct

SEQ ID NO: 3565971 - DNA, 25 bp, Homo sapien
tgcacaggtcagtgacgtactcggg

SEQ ID NO: 3565972 - DNA, 25 bp, Homo sapien
ggaagtagacgatgggcttggcgct

SEQ ID NO: 3565973 - DNA, 25 bp, Homo sapien
gggacactgcatctccatggtgact

SEQ ID NO: 3565974 - DNA, 25 bp, Homo sapien
tgcgacttgtccctcccggccagga

SEQ ID NO: 3565975 - DNA, 25 bp, Homo sapien
ttggcagagcgctggcgccgtcggg

SEQ ID NO: 3565976 - DNA, 25 bp, Homo sapien
ccatggccaggatgacgtggttgag

SEQ ID NO: 3565977 - DNA, 25 bp, Homo sapien
caggatgacgtggttgagcttggca

SEQ ID NO: 3565978 - DNA, 25 bp, Homo sapien
accaggaagacggagaccatggcca

SEQ ID NO: 3565979 - DNA, 25 bp, Homo sapien
ccaggaacacgcagaagtagttgtg

SEQ ID NO: 3565980 - DNA, 25 bp, Homo sapien
gaacacgcagaagtagttgtgcagg

SEQ ID NO: 3565981 - DNA, 25 bp, Homo sapien
caggaacacgcagaagtagttgtgc

SEQ ID NO: 3565982 - DNA, 25 bp, Homo sapien
ggaacacgcagaagtagttgtgcag

SEQ ID NO: 3565983 - DNA, 25 bp, Homo sapien
gccgacaggcgcttgggccgccggc

SEQ ID NO: 3565984 - DNA, 25 bp, Homo sapien
agggcgcacaccacggccgacaggc

SEQ ID NO: 3565985 - DNA, 25 bp, Homo sapien
agcagggcgcacaccacggccgaca

SEQ ID NO: 3565986 - DNA, 25 bp, Homo sapien
cgcacaccacggccgacaggcgctt

SEQ ID NO: 3565987 - DNA, 25 bp, Homo sapien
aggatggagaacaccgccttgctga

SEQ ID NO: 3565988 - DNA, 25 bp, Homo sapien
cacacgctgcggatgtagtcggcaa

SEQ ID NO: 3565989 - DNA, 25 bp, Homo sapien
ggctcacgccggtaaggaacatgca

SEQ ID NO: 3565990 - DNA, 25 bp, Homo sapien
gccttgctgaagaggtagcccacat

SEQ ID NO: 3565991 - DNA, 25 bp, Homo sapien
gaggcggcagcatcgcgatctgctc

SEQ ID NO: 3565992 - DNA, 25 bp, Homo sapien
gcagcatcgcgatctgctcgatggt

SEQ ID NO: 3565993 - DNA, 25 bp, Homo sapien
aagatgtagttcatgacggccggag

SEQ ID NO: 3565994 - DNA, 25 bp, Homo sapien
aaggggttcctcttgatggagaagc

SEQ ID NO: 3565995 - DNA, 25 bp, Homo sapien
aggaagccccggctgtagagttccg

SEQ ID NO: 3565996 - DNA, 25 bp, Homo sapien
cggctgtagagttccggggcctcgc

SEQ ID NO: 3565997 - DNA, 25 bp, Homo sapien
tgtagagttccggggcctcgctcag

SEQ ID NO: 3565998 - DNA, 25 bp, Homo sapien
gctgtagagttccggggcctcgctc

SEQ ID NO: 3565999 - DNA, 25 bp, Homo sapien
gggacacctgtgatgccggctggcc

SEQ ID NO: 3566000 - DNA, 25 bp, Homo sapien
ggacacctgtgatgccggctggccc

SEQ ID NO: 3566001 - DNA, 25 bp, Homo sapien
agggacacctgtgatgccggctggc

SEQ ID NO: 3566002 - DNA, 25 bp, Homo sapien
gagggacacctgtgatgccggctgg

SEQ ID NO: 3566003 - DNA, 25 bp, Homo sapien
gagcacatgacatcagggccacctt

SEQ ID NO: 3566004 - DNA, 25 bp, Homo sapien
ctgtagtaagtagctgactgcccca

SEQ ID NO: 3566005 - DNA, 25 bp, Homo sapien
ggcccgcctggctgtagtaagtagc

SEQ ID NO: 3566006 - DNA, 25 bp, Homo sapien
cccctaggctccatggagcacatga

SEQ ID NO: 3566007 - DNA, 25 bp, Homo sapien
ggaccttgaggtccagtcctggtgc

SEQ ID NO: 3566008 - DNA, 25 bp, Homo sapien
cagggaacttgtgcccggccacata

SEQ ID NO: 3566009 - DNA, 25 bp, Homo sapien
agggaacttgtgcccggccacatag

SEQ ID NO: 3566010 - DNA, 25 bp, Homo sapien
ccagggaacttgtgcccggccacat

SEQ ID NO: 3566011 - DNA, 25 bp, Homo sapien
ggaacttgtgcccggccacatagcc

SEQ ID NO: 3566012 - DNA, 25 bp, Homo sapien
cagggccctccgcctgtggcactta

SEQ ID NO: 3566013 - DNA, 25 bp, Homo sapien
agggccctccgcctgtggcacttac

SEQ ID NO: 3566014 - DNA, 25 bp, Homo sapien
ggatgggcctcccaggagcagtttc

SEQ ID NO: 3566015 - DNA, 25 bp, Homo sapien
cttgttcctgttgccgggatgggcc

SEQ ID NO: 3566016 - DNA, 25 bp, Homo sapien
tcctgttgccgggatgggcctccca

SEQ ID NO: 3566017 - DNA, 25 bp, Homo sapien
atgggcctcccaggagcagtttcca

SEQ ID NO: 3566018 - DNA, 25 bp, Homo sapien
tggcagctcaccagtctgcacaccc

SEQ ID NO: 3566019 - DNA, 25 bp, Homo sapien
ccaggcctggcgcgtctgggcccct

SEQ ID NO: 3566020 - DNA, 25 bp, Homo sapien
ctgctggcagctcaccagtctgcac

SEQ ID NO: 3566021 - DNA, 25 bp, Homo sapien
ggcctggcgcgtctgggcccctgct

SEQ ID NO: 3566022 - DNA, 25 bp, Homo sapien
ggctttggaagcagaacccgcccca

SEQ ID NO: 3566023 - DNA, 25 bp, Homo sapien
ccggagccttggaaaataggagctc

SEQ ID NO: 3566024 - DNA, 25 bp, Homo sapien
gatgaggcttcaggaaggaatgccc

SEQ ID NO: 3566025 - DNA, 25 bp, Homo sapien
ctgatccgccgaggcctccttttgt

SEQ ID NO: 3566026 - DNA, 25 bp, Homo sapien
agggagcaccggctgtacacttgcc

SEQ ID NO: 3566027 - DNA, 25 bp, Homo sapien
gcctggtgacgtcacgttggcccga

SEQ ID NO: 3566028 - DNA, 25 bp, Homo sapien
gcactgcagcccgagtccagctgtt

SEQ ID NO: 3566029 - DNA, 25 bp, Homo sapien
gggaactcatctctccgcctggtga

SEQ ID NO: 3566030 - DNA, 25 bp, Homo sapien
gctttgtcttggaagcgagttgcat

SEQ ID NO: 3566031 - DNA, 25 bp, Homo sapien
cccagcaatttcttctcggggcagg

SEQ ID NO: 3566032 - DNA, 25 bp, Homo sapien
tgtcttggaagcgagttgcattttg

SEQ ID NO: 3566033 - DNA, 25 bp, Homo sapien
ggaagcgagttgcattttgtgaatt

SEQ ID NO: 3566034 - DNA, 25 bp, Homo sapien
agatggctccggcaccgtctgcctt

SEQ ID NO: 3566035 - DNA, 25 bp, Homo sapien
cccagatggctccggcaccgtctgc

SEQ ID NO: 3566036 - DNA, 25 bp, Homo sapien
cagatggctccggcaccgtctgcct

SEQ ID NO: 3566037 - DNA, 25 bp, Homo sapien
ggcccagatggctccggcaccgtct

SEQ ID NO: 3566038 - DNA, 25 bp, Homo sapien
cagatgccatctgtccgtgccccat

SEQ ID NO: 3566039 - DNA, 25 bp, Homo sapien
actgtgaacgcctcactttctggga

SEQ ID NO: 3566040 - DNA, 25 bp, Homo sapien
tagacagagttaggacgttccggaa

SEQ ID NO: 3566041 - DNA, 25 bp, Homo sapien
atgaggacacgtgctctgccactgg

SEQ ID NO: 3566042 - DNA, 25 bp, Homo sapien
agatggagtcgcagcaagtcccagc

SEQ ID NO: 3566043 - DNA, 25 bp, Homo sapien
tctgctggctttgctcgttgtgaag

SEQ ID NO: 3566044 - DNA, 25 bp, Homo sapien
tacctttgtgagtgcggtccagagc

SEQ ID NO: 3566045 - DNA, 25 bp, Homo sapien
tggctcgggtccatcgtcgctggtt

SEQ ID NO: 3566046 - DNA, 25 bp, Homo sapien
ccatcgtcgctggttgtggcaggtt

SEQ ID NO: 3566047 - DNA, 25 bp, Homo sapien
aaaccttgctccatgggcgctcggt

SEQ ID NO: 3566048 - DNA, 25 bp, Homo sapien
tacgggaagtcatgcctagggtctg

SEQ ID NO: 3566049 - DNA, 25 bp, Homo sapien
tctgtcggctctatggacctcagcg

SEQ ID NO: 3566050 - DNA, 25 bp, Homo sapien
acctgccttagggagttctgtcggc

SEQ ID NO: 3566051 - DNA, 25 bp, Homo sapien
gaggcctcagtgctattgatgcggc

SEQ ID NO: 3566052 - DNA, 25 bp, Homo sapien
tggaggcctcagtgctattgatgcg

SEQ ID NO: 3566053 - DNA, 25 bp, Homo sapien
tcagtgctattgatgcggctgtgag

SEQ ID NO: 3566054 - DNA, 25 bp, Homo sapien
tgggagcccctgactggacagacga

SEQ ID NO: 3566055 - DNA, 25 bp, Homo sapien
tttcatcttgcggaccctgagtgct

SEQ ID NO: 3566056 - DNA, 25 bp, Homo sapien
gtgcctttcatcttgcggaccctga

SEQ ID NO: 3566057 - DNA, 25 bp, Homo sapien
cctgtgtgatgctcatggggcctcc

SEQ ID NO: 3566058 - DNA, 25 bp, Homo sapien
gtctcttgtgtcctctgagtcctag

SEQ ID NO: 3566059 - DNA, 25 bp, Homo sapien
tgggagcaggaccgtctgagtccta

SEQ ID NO: 3566060 - DNA, 25 bp, Homo sapien
gtcctaggaagtgaccgcagtggga

SEQ ID NO: 3566061 - DNA, 25 bp, Homo sapien
tctgagtcctaggaagtgaccgcag

SEQ ID NO: 3566062 - DNA, 25 bp, Homo sapien
cctaggaagtgaccgcagtgggagc

SEQ ID NO: 3566063 - DNA, 25 bp, Homo sapien
tgagtcctaggaagtgaccgcagtg

SEQ ID NO: 3566064 - DNA, 25 bp, Homo sapien
tgcttttccttcagaggtgctgagc

SEQ ID NO: 3566065 - DNA, 25 bp, Homo sapien
tggaaaccaccgcaaacttggagaa

SEQ ID NO: 3566066 - DNA, 25 bp, Homo sapien
gaacaacagtgcagtcggtatcgag

SEQ ID NO: 3566067 - DNA, 25 bp, Homo sapien
tgcactgtgcattctcgcctgggag

SEQ ID NO: 3566068 - DNA, 25 bp, Homo sapien
cagagctagaggatatgtgcacgta

SEQ ID NO: 3566069 - DNA, 25 bp, Homo sapien
tgcacccgggagctcttagtggaca

SEQ ID NO: 3566070 - DNA, 25 bp, Homo sapien
gctgcagctctaagaagacctgttc

SEQ ID NO: 3566071 - DNA, 25 bp, Homo sapien
tggagagtagcatcaggaaccagga

SEQ ID NO: 3566072 - DNA, 25 bp, Homo sapien
gggtcctgcctcattaagatgcaat

SEQ ID NO: 3566073 - DNA, 25 bp, Homo sapien
cagggcctttacaatcagcaacagc

SEQ ID NO: 3566074 - DNA, 25 bp, Homo sapien
actgtgtacccctcttgtgtggacg

SEQ ID NO: 3566075 - DNA, 25 bp, Homo sapien
cagcaccacagggtacgttccagtt

SEQ ID NO: 3566076 - DNA, 25 bp, Homo sapien
gctcttagggactagaggccaccca

SEQ ID NO: 3566077 - DNA, 25 bp, Homo sapien
ggtaggtcctccgttcagcagaaat

SEQ ID NO: 3566078 - DNA, 25 bp, Homo sapien
tgttgggctgatgtccgtttcctgc

SEQ ID NO: 3566079 - DNA, 25 bp, Homo sapien
cagacatccaggcacggcttggtag

SEQ ID NO: 3566080 - DNA, 25 bp, Homo sapien
gctggctggtccactggtttgtcaa

SEQ ID NO: 3566081 - DNA, 25 bp, Homo sapien
tcagaggaggcctgctggctggtcc

SEQ ID NO: 3566082 - DNA, 25 bp, Homo sapien
ggctggtccactggtttgtcaatca

SEQ ID NO: 3566083 - DNA, 25 bp, Homo sapien
tggctggtccactggtttgtcaatc

SEQ ID NO: 3566084 - DNA, 25 bp, Homo sapien
gaggggacacagtcttggatatgag

SEQ ID NO: 3566085 - DNA, 25 bp, Homo sapien
gggacacagtcttggatatgagccc

SEQ ID NO: 3566086 - DNA, 25 bp, Homo sapien
ggacacagtcttggatatgagccca

SEQ ID NO: 3566087 - DNA, 25 bp, Homo sapien
ggggacacagtcttggatatgagcc

SEQ ID NO: 3566088 - DNA, 25 bp, Homo sapien
atcggtgctgggtcccaatgcccac

SEQ ID NO: 3566089 - DNA, 25 bp, Homo sapien
cacatcggtgctgggtcccaatgcc

SEQ ID NO: 3566090 - DNA, 25 bp, Homo sapien
tgggtcccacatcggtgctgggtcc

SEQ ID NO: 3566091 - DNA, 25 bp, Homo sapien
cccacatcggtgctgggtcccaatg

SEQ ID NO: 3566092 - DNA, 25 bp, Homo sapien
gatggtgttgaatagcgatcgccac

SEQ ID NO: 3566093 - DNA, 25 bp, Homo sapien
gccccagatggtgttgaatagcgat

SEQ ID NO: 3566094 - DNA, 25 bp, Homo sapien
agaagccccagatggtgttgaatag

SEQ ID NO: 3566095 - DNA, 25 bp, Homo sapien
gtctcaggggtgacgtcatcacctt

SEQ ID NO: 3566096 - DNA, 25 bp, Homo sapien
agatgctgccctgggcacacgcagt

SEQ ID NO: 3566097 - DNA, 25 bp, Homo sapien
ggagatgctgccctgggcacacgca

SEQ ID NO: 3566098 - DNA, 25 bp, Homo sapien
ctggagatgctgccctgggcacacg

SEQ ID NO: 3566099 - DNA, 25 bp, Homo sapien
atgctgccctgggcacacgcagttc

SEQ ID NO: 3566100 - DNA, 25 bp, Homo sapien
aggcagcgactccacatgaccatgg

SEQ ID NO: 3566101 - DNA, 25 bp, Homo sapien
cctggcaagtagtcctgccgtataa

SEQ ID NO: 3566102 - DNA, 25 bp, Homo sapien
ccaagaatgtgtttggcggcgccag

SEQ ID NO: 3566103 - DNA, 25 bp, Homo sapien
tgccgtataactgaaaggcagcgac

SEQ ID NO: 3566104 - DNA, 25 bp, Homo sapien
tgggagtggtgcgtgcagggctctc

SEQ ID NO: 3566105 - DNA, 25 bp, Homo sapien
gggctctctgagtaagcggcatccc

SEQ ID NO: 3566106 - DNA, 25 bp, Homo sapien
gctctctgagtaagcggcatcccag

SEQ ID NO: 3566107 - DNA, 25 bp, Homo sapien
ggtagcgatgacagttgccagccac

SEQ ID NO: 3566108 - DNA, 25 bp, Homo sapien
gggacatcgggccacgcagcgtcca

SEQ ID NO: 3566109 - DNA, 25 bp, Homo sapien
agcgtccacacgcaagcacttgcca

SEQ ID NO: 3566110 - DNA, 25 bp, Homo sapien
cacgcagcgtccacacgcaagcact

SEQ ID NO: 3566111 - DNA, 25 bp, Homo sapien
gcagcgtccacacgcaagcacttgc

SEQ ID NO: 3566112 - DNA, 25 bp, Homo sapien
gggcttgtgtggcagtggagctgtc

SEQ ID NO: 3566113 - DNA, 25 bp, Homo sapien
cctgctgggtcgaaagcacctgtct

SEQ ID NO: 3566114 - DNA, 25 bp, Homo sapien
acctgctgggtcgaaagcacctgtc

SEQ ID NO: 3566115 - DNA, 25 bp, Homo sapien
ctgcagcgagaagatgccaggggct

SEQ ID NO: 3566116 - DNA, 25 bp, Homo sapien
gggacagcatctgtatctggctgtg

SEQ ID NO: 3566117 - DNA, 25 bp, Homo sapien
acagcaaatggcagagtttggggtt

SEQ ID NO: 3566118 - DNA, 25 bp, Homo sapien
aatggcagagtttggggttttcaga

SEQ ID NO: 3566119 - DNA, 25 bp, Homo sapien
cagcatctgtatctggctgtgtggg

SEQ ID NO: 3566120 - DNA, 25 bp, Homo sapien
tccacgggtctctcacagtgcaaac

SEQ ID NO: 3566121 - DNA, 25 bp, Homo sapien
gggtctctcacagtgcaaaccccat

SEQ ID NO: 3566122 - DNA, 25 bp, Homo sapien
gtctctcacagtgcaaaccccatgg

SEQ ID NO: 3566123 - DNA, 25 bp, Homo sapien
gcaggtccacgggtctctcacagtg

SEQ ID NO: 3566124 - DNA, 25 bp, Homo sapien
catcaacaaagtccatttgaacctc

SEQ ID NO: 3566125 - DNA, 25 bp, Homo sapien
atgcccgtgtcctgggctcggtgtt

SEQ ID NO: 3566126 - DNA, 25 bp, Homo sapien
ttgcagtcatcaacaaagtccattt

SEQ ID NO: 3566127 - DNA, 25 bp, Homo sapien
tcctgggctcggtgttgatgctccc

SEQ ID NO: 3566128 - DNA, 25 bp, Homo sapien
gcagctattggatcatgtccctccc

SEQ ID NO: 3566129 - DNA, 25 bp, Homo sapien
tgtccctccccgttgtgaaactcag

SEQ ID NO: 3566130 - DNA, 25 bp, Homo sapien
ctggaggactatagtggtccctgat

SEQ ID NO: 3566131 - DNA, 25 bp, Homo sapien
tggtccctgatggtccacctgtttc

SEQ ID NO: 3566132 - DNA, 25 bp, Homo sapien
cgtccacagccctccaccctggtcc

SEQ ID NO: 3566133 - DNA, 25 bp, Homo sapien
tccacagccctccaccctggtcccc

SEQ ID NO: 3566134 - DNA, 25 bp, Homo sapien
ggccgtccacagccctccaccctgg

SEQ ID NO: 3566135 - DNA, 25 bp, Homo sapien
cacagccctccaccctggtccccag

SEQ ID NO: 3566136 - DNA, 25 bp, Homo sapien
tgagctcctcgaggttccctgaagg

SEQ ID NO: 3566137 - DNA, 25 bp, Homo sapien
tccaatgtactctgttaaggctcgc

SEQ ID NO: 3566138 - DNA, 25 bp, Homo sapien
gctcctggcggtttgagtggaggaa

SEQ ID NO: 3566139 - DNA, 25 bp, Homo sapien
taaggctcgccctgagtcctgatgg

SEQ ID NO: 3566140 - DNA, 25 bp, Homo sapien
gacctggtcgggagcagagaagcgc

SEQ ID NO: 3566141 - DNA, 25 bp, Homo sapien
gagtgacctggtcgggagcagagaa

SEQ ID NO: 3566142 - DNA, 25 bp, Homo sapien
tggatgagccagagtgacctggtcg

SEQ ID NO: 3566143 - DNA, 25 bp, Homo sapien
agccagagtgacctggtcgggagca

SEQ ID NO: 3566144 - DNA, 25 bp, Homo sapien
gaaggaagggcttgttgaagtggga

SEQ ID NO: 3566145 - DNA, 25 bp, Homo sapien
ctgaagaaggaagggcttgttgaag

SEQ ID NO: 3566146 - DNA, 25 bp, Homo sapien
aagggcttgttgaagtgggaagact

SEQ ID NO: 3566147 - DNA, 25 bp, Homo sapien
aggaagggcttgttgaagtgggaag

SEQ ID NO: 3566148 - DNA, 25 bp, Homo sapien
gcagcctcgagaacgtcctgcagct

SEQ ID NO: 3566149 - DNA, 25 bp, Homo sapien
cctcgagaacgtcctgcagctgcct

SEQ ID NO: 3566150 - DNA, 25 bp, Homo sapien
cagcctcgagaacgtcctgcagctg

SEQ ID NO: 3566151 - DNA, 25 bp, Homo sapien
agcctcgagaacgtcctgcagctgc

SEQ ID NO: 3566152 - DNA, 25 bp, Homo sapien
gacatatgttctggcgccttcagta

SEQ ID NO: 3566153 - DNA, 25 bp, Homo sapien
tggccgtgacatatgttctggcgcc

SEQ ID NO: 3566154 - DNA, 25 bp, Homo sapien
caggacaagggtggccgtgacatat

SEQ ID NO: 3566155 - DNA, 25 bp, Homo sapien
gggctgtttcctcgttgacttccag

SEQ ID NO: 3566156 - DNA, 25 bp, Homo sapien
tcagaataatcaaatatggccacgt

SEQ ID NO: 3566157 - DNA, 25 bp, Homo sapien
tgtcaggttgggatgactcagaata

SEQ ID NO: 3566158 - DNA, 25 bp, Homo sapien
gcagccatttatcgtttatcctggg

SEQ ID NO: 3566159 - DNA, 25 bp, Homo sapien
cacgtcttttgggatgagcagccat

SEQ ID NO: 3566160 - DNA, 25 bp, Homo sapien
cagctgttgggtgcgtgttatatcc

SEQ ID NO: 3566161 - DNA, 25 bp, Homo sapien
tgttgggtgcgtgttatatccatgc

SEQ ID NO: 3566162 - DNA, 25 bp, Homo sapien
ggcagcagctgttgggtgcgtgtta

SEQ ID NO: 3566163 - DNA, 25 bp, Homo sapien
ggtgcgtgttatatccatgccaggc

SEQ ID NO: 3566164 - DNA, 25 bp, Homo sapien
tctgctatgcgtcctgcaaacattc

SEQ ID NO: 3566165 - DNA, 25 bp, Homo sapien
tgcgtcctgcaaacattccggagcc

SEQ ID NO: 3566166 - DNA, 25 bp, Homo sapien
gctatgcgtcctgcaaacattccgg

SEQ ID NO: 3566167 - DNA, 25 bp, Homo sapien
gctctgctatgcgtcctgcaaacat

SEQ ID NO: 3566168 - DNA, 25 bp, Homo sapien
ctctgtgaggttgaggccccaccca

SEQ ID NO: 3566169 - DNA, 25 bp, Homo sapien
tctgtgaggttgaggccccacccac

SEQ ID NO: 3566170 - DNA, 25 bp, Homo sapien
ctgtgaggttgaggccccacccacc

SEQ ID NO: 3566171 - DNA, 25 bp, Homo sapien
tcctcccctggttccagtagacagc

SEQ ID NO: 3566172 - DNA, 25 bp, Homo sapien
tgagaaaggcccccaatccccgaga

SEQ ID NO: 3566173 - DNA, 25 bp, Homo sapien
gaaaatccagggcagaatgtggctg

SEQ ID NO: 3566174 - DNA, 25 bp, Homo sapien
gcgctcctggggttggattcactgt

SEQ ID NO: 3566175 - DNA, 25 bp, Homo sapien
agagacctagcagcaccagacggtg

SEQ ID NO: 3566176 - DNA, 25 bp, Homo sapien
ggacagacggcccttcttggtggcc

SEQ ID NO: 3566177 - DNA, 25 bp, Homo sapien
cagtgcccataagtcaggagctgga

SEQ ID NO: 3566178 - DNA, 25 bp, Homo sapien
gtgcctggcggacagacggcccttc

SEQ ID NO: 3566179 - DNA, 25 bp, Homo sapien
tgtgttcccctgtgaccgtgtttcg

SEQ ID NO: 3566180 - DNA, 25 bp, Homo sapien
tggccggttctactgcctgctcagg

SEQ ID NO: 3566181 - DNA, 25 bp, Homo sapien
tgtttcaaaagagccgagccctcct

SEQ ID NO: 3566182 - DNA, 25 bp, Homo sapien
tagcatcgtgctggtcctaaacaga

SEQ ID NO: 3566183 - DNA, 25 bp, Homo sapien
cagactgcgatatctcgatgggcca

SEQ ID NO: 3566184 - DNA, 25 bp, Homo sapien
gatgggccaccgtgtcttagcatgg

SEQ ID NO: 3566185 - DNA, 25 bp, Homo sapien
gggctgtcccatgttcccaagaaca

SEQ ID NO: 3566186 - DNA, 25 bp, Homo sapien
aagatgtctggccaatcctagagcc

SEQ ID NO: 3566187 - DNA, 25 bp, Homo sapien
gaatgcagctccttggttgttcagc

SEQ ID NO: 3566188 - DNA, 25 bp, Homo sapien
ctgaccacagggaatgcagctcctt

SEQ ID NO: 3566189 - DNA, 25 bp, Homo sapien
atgcagctccttggttgttcagcac

SEQ ID NO: 3566190 - DNA, 25 bp, Homo sapien
cagggaatgcagctccttggttgtt

SEQ ID NO: 3566191 - DNA, 25 bp, Homo sapien
gtgcagggcccgtgtagcccaacat

SEQ ID NO: 3566192 - DNA, 25 bp, Homo sapien
catcgagggagtttttgtgctggta

SEQ ID NO: 3566193 - DNA, 25 bp, Homo sapien
tgtctagtccgtggcgggctcttac

SEQ ID NO: 3566194 - DNA, 25 bp, Homo sapien
gcccgtgtagcccaacatgtctagt

SEQ ID NO: 3566195 - DNA, 25 bp, Homo sapien
agtaatagcagtaggtgctttcttt

SEQ ID NO: 3566196 - DNA, 25 bp, Homo sapien
taatagcagtaggtgctttctttgt

SEQ ID NO: 3566197 - DNA, 25 bp, Homo sapien
gaccacactatgagctgaaattcca

SEQ ID NO: 3566198 - DNA, 25 bp, Homo sapien
agattttgaccacactatgagctga

SEQ ID NO: 3566199 - DNA, 25 bp, Homo sapien
cacatgggccatcaaatagcgagta

SEQ ID NO: 3566200 - DNA, 25 bp, Homo sapien
gattacggtttatgctcagctgggt

SEQ ID NO: 3566201 - DNA, 25 bp, Homo sapien
agcagcatgggtggatttctcggcc

SEQ ID NO: 3566202 - DNA, 25 bp, Homo sapien
ttaggtgacacatgaccccatggcg

SEQ ID NO: 3566203 - DNA, 25 bp, Homo sapien
catcctccaacttctaaacggccct

SEQ ID NO: 3566204 - DNA, 25 bp, Homo sapien
gctacggataatggcctattgctcc

SEQ ID NO: 3566205 - DNA, 25 bp, Homo sapien
tttgctacggataatggcctattgc

SEQ ID NO: 3566206 - DNA, 25 bp, Homo sapien
ttctaaacggccctagtgtctgttc

SEQ ID NO: 3566207 - DNA, 25 bp, Homo sapien
tctcgcctgatcgtaggattgtggg

SEQ ID NO: 3566208 - DNA, 25 bp, Homo sapien
aaaaacatgatctggtaccatttca

SEQ ID NO: 3566209 - DNA, 25 bp, Homo sapien
ccgtgtcacggacaatttgccacct

SEQ ID NO: 3566210 - DNA, 25 bp, Homo sapien
cagggctctgcctgaatattctcgc

SEQ ID NO: 3566211 - DNA, 25 bp, Homo sapien
ccgtggctgtggccatggccatggc

SEQ ID NO: 3566212 - DNA, 25 bp, Homo sapien
ggctgtggccatggccatggccggt

SEQ ID NO: 3566213 - DNA, 25 bp, Homo sapien
cgtggctgtggccatggccatggcc

SEQ ID NO: 3566214 - DNA, 25 bp, Homo sapien
ctgggcagcccgtggctgtggccat

SEQ ID NO: 3566215 - DNA, 25 bp, Homo sapien
gattgggtggagtgtcccctgcctc

SEQ ID NO: 3566216 - DNA, 25 bp, Homo sapien
ctttttaagcccgatgtgcctgcag

SEQ ID NO: 3566217 - DNA, 25 bp, Homo sapien
aaagatggcacgtagaccaggagcg

SEQ ID NO: 3566218 - DNA, 25 bp, Homo sapien
tgcctccaacggctcccagatgagt

SEQ ID NO: 3566219 - DNA, 25 bp, Homo sapien
catgccctccacctctacctgggtg

SEQ ID NO: 3566220 - DNA, 25 bp, Homo sapien
tatgttcagagccaacgatggcctg

SEQ ID NO: 3566221 - DNA, 25 bp, Homo sapien
agagccaacgatggcctgggcttga

SEQ ID NO: 3566222 - DNA, 25 bp, Homo sapien
ctccacctctacctgggtggcctgg

SEQ ID NO: 3566223 - DNA, 25 bp, Homo sapien
cacggacagcctttgtgttgtctag

SEQ ID NO: 3566224 - DNA, 25 bp, Homo sapien
gaaggcagctcttttccccaaatgc

SEQ ID NO: 3566225 - DNA, 25 bp, Homo sapien
taggacccacaatgatggcctggcc

SEQ ID NO: 3566226 - DNA, 25 bp, Homo sapien
tggaaacaccgaggacacacggaca

SEQ ID NO: 3566227 - DNA, 25 bp, Homo sapien
gctgcaagttcctggcggccaatgg

SEQ ID NO: 3566228 - DNA, 25 bp, Homo sapien
tcatgattgctgtagccaagctgca

SEQ ID NO: 3566229 - DNA, 25 bp, Homo sapien
cacaggatgtgctgatatacagaca

SEQ ID NO: 3566230 - DNA, 25 bp, Homo sapien
gggcttcacctacaagtcatcggga

SEQ ID NO: 3566231 - DNA, 25 bp, Homo sapien
tgtccaagcccattgctgatgggtg

SEQ ID NO: 3566232 - DNA, 25 bp, Homo sapien
gatgggtgatgatcagggcctccac

SEQ ID NO: 3566233 - DNA, 25 bp, Homo sapien
gtctctttgttcacgcatggcctca

SEQ ID NO: 3566234 - DNA, 25 bp, Homo sapien
ttggagccatctctgcgagcctgtg

SEQ ID NO: 3566235 - DNA, 25 bp, Homo sapien
gaaagcctgctgtgacgccagcact

SEQ ID NO: 3566236 - DNA, 25 bp, Homo sapien
aggaaagcctgctgtgacgccagca

SEQ ID NO: 3566237 - DNA, 25 bp, Homo sapien
aagcctgctgtgacgccagcacttc

SEQ ID NO: 3566238 - DNA, 25 bp, Homo sapien
gaaggaaagcctgctgtgacgccag

SEQ ID NO: 3566239 - DNA, 25 bp, Homo sapien
acagcatgataaggagtccgggccc

SEQ ID NO: 3566240 - DNA, 25 bp, Homo sapien
tccattaggattagaggcccctctg

SEQ ID NO: 3566241 - DNA, 25 bp, Homo sapien
ccctgcagcacccaagaattagcgg

SEQ ID NO: 3566242 - DNA, 25 bp, Homo sapien
cacagtgagaaccaacagaagggtc

SEQ ID NO: 3566243 - DNA, 25 bp, Homo sapien
gggcttggaagtctgagctaaagag

SEQ ID NO: 3566244 - DNA, 25 bp, Homo sapien
aagagcttagacttcatgttgtagc

SEQ ID NO: 3566245 - DNA, 25 bp, Homo sapien
catgttgtagcatggaagagctggt

SEQ ID NO: 3566246 - DNA, 25 bp, Homo sapien
agaaggggagactacagcgttgtta

SEQ ID NO: 3566247 - DNA, 25 bp, Homo sapien
cgccatgacgtcttctgtttaaaca

SEQ ID NO: 3566248 - DNA, 25 bp, Homo sapien
ctggctccaggagcaatttcccctg

SEQ ID NO: 3566249 - DNA, 25 bp, Homo sapien
tggaatccaccgtatatcactcgcc

SEQ ID NO: 3566250 - DNA, 25 bp, Homo sapien
tttcccctggatgaaacaatctttg

SEQ ID NO: 3566251 - DNA, 25 bp, Homo sapien
gccttccagcctgacaaaagaaatc

SEQ ID NO: 3566252 - DNA, 25 bp, Homo sapien
acagcttttgctgttcccctcttag

SEQ ID NO: 3566253 - DNA, 25 bp, Homo sapien
aaatcagcagcttgcccgtgggcaa

SEQ ID NO: 3566254 - DNA, 25 bp, Homo sapien
ttgctgttcccctcttagggccttc

SEQ ID NO: 3566255 - DNA, 25 bp, Homo sapien
tctgagacagatgccggggagccgc

SEQ ID NO: 3566256 - DNA, 25 bp, Homo sapien
gtctgagacagatgccggggagccg

SEQ ID NO: 3566257 - DNA, 25 bp, Homo sapien
gggagccgccgggagtgccccagag

SEQ ID NO: 3566258 - DNA, 25 bp, Homo sapien
tgagacagatgccggggagccgccg

SEQ ID NO: 3566259 - DNA, 25 bp, Homo sapien
ggtgcattcgcgtcaaagaggttga

SEQ ID NO: 3566260 - DNA, 25 bp, Homo sapien
ctggcattcggaggacgaccacagg

SEQ ID NO: 3566261 - DNA, 25 bp, Homo sapien
ttgaggtggaaccagctgcgaccct

SEQ ID NO: 3566262 - DNA, 25 bp, Homo sapien
gtggaaccagctgcgaccctcagca

SEQ ID NO: 3566263 - DNA, 25 bp, Homo sapien
tcagccacggagtttcttcaagccc

SEQ ID NO: 3566264 - DNA, 25 bp, Homo sapien
agggtcagcttttgtcggcgcaaga

SEQ ID NO: 3566265 - DNA, 25 bp, Homo sapien
aataccctcagagctaaaccctggc

SEQ ID NO: 3566266 - DNA, 25 bp, Homo sapien
tggagaagctgttcgtgttcgctga

SEQ ID NO: 3566267 - DNA, 25 bp, Homo sapien
tgagagaaggaatctgctcttctga

SEQ ID NO: 3566268 - DNA, 25 bp, Homo sapien
cttcctggttgagagaaggaatctg

SEQ ID NO: 3566269 - DNA, 25 bp, Homo sapien
cctggttgagagaaggaatctgctc

SEQ ID NO: 3566270 - DNA, 25 bp, Homo sapien
tgctcttctgaagcactgtgcttcc

SEQ ID NO: 3566271 - DNA, 25 bp, Homo sapien
tgaaacaggattgacgagacacccg

SEQ ID NO: 3566272 - DNA, 25 bp, Homo sapien
ggctcctgggcgtgcacccaagagc

SEQ ID NO: 3566273 - DNA, 25 bp, Homo sapien
aaaggccaatggcttgaaacaggat

SEQ ID NO: 3566274 - DNA, 25 bp, Homo sapien
cctgggtcgctgtctttattgtctt

SEQ ID NO: 3566275 - DNA, 25 bp, Homo sapien
cagacaccatccactgtcggggaga

SEQ ID NO: 3566276 - DNA, 25 bp, Homo sapien
gtcggggagaggcacgtgtccacag

SEQ ID NO: 3566277 - DNA, 25 bp, Homo sapien
cagagcccagacaccatccactgtc

SEQ ID NO: 3566278 - DNA, 25 bp, Homo sapien
cctggaatgcaaggctgcatgtggc

SEQ ID NO: 3566279 - DNA, 25 bp, Homo sapien
cccaccgaggaccactcaagtttgc

SEQ ID NO: 3566280 - DNA, 25 bp, Homo sapien
acccaccgaggaccactcaagtttg

SEQ ID NO: 3566281 - DNA, 25 bp, Homo sapien
cacccaccgaggaccactcaagttt

SEQ ID NO: 3566282 - DNA, 25 bp, Homo sapien
tccacccaccgaggaccactcaagt

SEQ ID NO: 3566283 - DNA, 25 bp, Homo sapien
ttctctgctgcagtgcctttgggag

SEQ ID NO: 3566284 - DNA, 25 bp, Homo sapien
gctgcatgggggcaaaaatctgaca

SEQ ID NO: 3566285 - DNA, 25 bp, Homo sapien
gctgccacagtctgtcctttctgct

SEQ ID NO: 3566286 - DNA, 25 bp, Homo sapien
gtcctttctgctctggggttctctg

SEQ ID NO: 3566287 - DNA, 25 bp, Homo sapien
ttgtccccagaagcccttgtgcatg

SEQ ID NO: 3566288 - DNA, 25 bp, Homo sapien
gtgcatgtagttttccatgccgtga

SEQ ID NO: 3566289 - DNA, 25 bp, Homo sapien
gagtcccttggcatcaaatgggtgg

SEQ ID NO: 3566290 - DNA, 25 bp, Homo sapien
atcaaatgggtggtttggattctgc

SEQ ID NO: 3566291 - DNA, 25 bp, Homo sapien
tctctgcagcattaccaactggata

SEQ ID NO: 3566292 - DNA, 25 bp, Homo sapien
ggtctgaagtcagggcagcactaca

SEQ ID NO: 3566293 - DNA, 25 bp, Homo sapien
caactggatacactaggcaaaaggc

SEQ ID NO: 3566294 - DNA, 25 bp, Homo sapien
gcaaaggagacagaacccacatcag

SEQ ID NO: 3566295 - DNA, 25 bp, Homo sapien
aggctctgggctgcccgagcccacg

SEQ ID NO: 3566296 - DNA, 25 bp, Homo sapien
tgcccgagcccacgtggccaggctg

SEQ ID NO: 3566297 - DNA, 25 bp, Homo sapien
caggctctgggctgcccgagcccac

SEQ ID NO: 3566298 - DNA, 25 bp, Homo sapien
tgggctgcccgagcccacgtggcca

SEQ ID NO: 3566299 - DNA, 25 bp, Homo sapien
ctgtgcagatgtaatcttgagatga

SEQ ID NO: 3566300 - DNA, 25 bp, Homo sapien
aaatgaagggagacttcaggcagac

SEQ ID NO: 3566301 - DNA, 25 bp, Homo sapien
cttatctggaaatagcgtctgtgca

SEQ ID NO: 3566302 - DNA, 25 bp, Homo sapien
tagcgtctgtgcagatgtaatcttg

SEQ ID NO: 3566303 - DNA, 25 bp, Homo sapien
gaaaattccgcgatgtcacctgctt

SEQ ID NO: 3566304 - DNA, 25 bp, Homo sapien
ggaaaattccgcgatgtcacctgct

SEQ ID NO: 3566305 - DNA, 25 bp, Homo sapien
aaaattccgcgatgtcacctgcttc

SEQ ID NO: 3566306 - DNA, 25 bp, Homo sapien
ctggatgcctgtcctctgttcaccc

SEQ ID NO: 3566307 - DNA, 25 bp, Homo sapien
tctctgacctcatctggtggccagg

SEQ ID NO: 3566308 - DNA, 25 bp, Homo sapien
tggatgcctgtcctctgttcaccct

SEQ ID NO: 3566309 - DNA, 25 bp, Homo sapien
tgaagcagtcgctgctgcgcttcct

SEQ ID NO: 3566310 - DNA, 25 bp, Homo sapien
aagatgaagcagtcgctgctgcgct

SEQ ID NO: 3566311 - DNA, 25 bp, Homo sapien
tgctgcgcttcctgctcagggccat

SEQ ID NO: 3566312 - DNA, 25 bp, Homo sapien
tctctcttggctccaaggaggaaga

SEQ ID NO: 3566313 - DNA, 25 bp, Homo sapien
tccgcatggggtcggtccgcacgca

SEQ ID NO: 3566314 - DNA, 25 bp, Homo sapien
cagcagacgtctgcccgcacggggt

SEQ ID NO: 3566315 - DNA, 25 bp, Homo sapien
ggctcaggtagtctctttggtccca

SEQ ID NO: 3566316 - DNA, 25 bp, Homo sapien
gtgcccggcaccagcagacgtctgc

SEQ ID NO: 3566317 - DNA, 25 bp, Homo sapien
taaatactcctctggtgaggacaca

SEQ ID NO: 3566318 - DNA, 25 bp, Homo sapien
ctctggtgaggacacacctgttcat

SEQ ID NO: 3566319 - DNA, 25 bp, Homo sapien
ctggctttctggtatctaaatactc

SEQ ID NO: 3566320 - DNA, 25 bp, Homo sapien
cacctgttcatatcctgcctgcaca

SEQ ID NO: 3566321 - DNA, 25 bp, Homo sapien
tctggtatctaaatacttctctggt

SEQ ID NO: 3566322 - DNA, 25 bp, Homo sapien
acccggcagggaaaccggagctgca

SEQ ID NO: 3566323 - DNA, 25 bp, Homo sapien
caggccgtttcatccacccggggat

SEQ ID NO: 3566324 - DNA, 25 bp, Homo sapien
atgggagcgagttacaggtgtggcc

SEQ ID NO: 3566325 - DNA, 25 bp, Homo sapien
gcaggaggcacaggccgtttcatcc

SEQ ID NO: 3566326 - DNA, 25 bp, Homo sapien
gcagccacggcccattcacgaagca

SEQ ID NO: 3566327 - DNA, 25 bp, Homo sapien
cgaagcactttggtgaaggtcacca

SEQ ID NO: 3566328 - DNA, 25 bp, Homo sapien
ggcccattcacgaagcactttggtg

SEQ ID NO: 3566329 - DNA, 25 bp, Homo sapien
tgggagcagccacggcccattcacg

SEQ ID NO: 3566330 - DNA, 25 bp, Homo sapien
cccgtgtgaatacctgcacagggca

SEQ ID NO: 3566331 - DNA, 25 bp, Homo sapien
tgtgaatacctgcacagggcacctc

SEQ ID NO: 3566332 - DNA, 25 bp, Homo sapien
ctgccaagactctccccgtgtgaat

SEQ ID NO: 3566333 - DNA, 25 bp, Homo sapien
caaaacctgattgccgtggctgtgt

SEQ ID NO: 3566334 - DNA, 25 bp, Homo sapien
cttacagtccttaggtagtccattg

SEQ ID NO: 3566335 - DNA, 25 bp, Homo sapien
aggtagtccattggtatgggctgcc

SEQ ID NO: 3566336 - DNA, 25 bp, Homo sapien
agtccattggtatgggctgcctgga

SEQ ID NO: 3566337 - DNA, 25 bp, Homo sapien
ttacagtccttaggtagtccattgg

SEQ ID NO: 3566338 - DNA, 25 bp, Homo sapien
tctgtgctggagaggtagaagatca

SEQ ID NO: 3566339 - DNA, 25 bp, Homo sapien
tgctagtgatacacgttccagggct

SEQ ID NO: 3566340 - DNA, 25 bp, Homo sapien
ctgttgctagtgatacacgttccag

SEQ ID NO: 3566341 - DNA, 25 bp, Homo sapien
gagaggtagaagatcatactgcaga

SEQ ID NO: 3566342 - DNA, 25 bp, Homo sapien
tgctggtagctgtgacgtaggagcc

SEQ ID NO: 3566343 - DNA, 25 bp, Homo sapien
agcttccacgctttgtctcacttca

SEQ ID NO: 3566344 - DNA, 25 bp, Homo sapien
gggagatacgtattatcagttgcag

SEQ ID NO: 3566345 - DNA, 25 bp, Homo sapien
tattatcagttgcagcatccacagg

SEQ ID NO: 3566346 - DNA, 25 bp, Homo sapien
cctgttgcttgtcggctgggctcca

SEQ ID NO: 3566347 - DNA, 25 bp, Homo sapien
cgtccttgtcagaaagcccttctgc

SEQ ID NO: 3566348 - DNA, 25 bp, Homo sapien
gcccttctgcaggcagcagctgcat

SEQ ID NO: 3566349 - DNA, 25 bp, Homo sapien
ccgtccttgtcagaaagcccttctg

SEQ ID NO: 3566350 - DNA, 25 bp, Homo sapien
aaagcccttctgcaggcagcagctg

SEQ ID NO: 3566351 - DNA, 25 bp, Homo sapien
ctgctttgttatgccccagaaggaa

SEQ ID NO: 3566352 - DNA, 25 bp, Homo sapien
taatcggcaacttctggaaaatcgg

SEQ ID NO: 3566353 - DNA, 25 bp, Homo sapien
gaaaatcggaaatggaacctctgtg

SEQ ID NO: 3566354 - DNA, 25 bp, Homo sapien
tctgtgatccgaggctgcccttaac

SEQ ID NO: 3566355 - DNA, 25 bp, Homo sapien
cagtctccacagatgcccgtgtcca

SEQ ID NO: 3566356 - DNA, 25 bp, Homo sapien
accctggacctgaggaagtggccgc

SEQ ID NO: 3566357 - DNA, 25 bp, Homo sapien
tggccgcggtgttcaccgctggacc

SEQ ID NO: 3566358 - DNA, 25 bp, Homo sapien
ttcaccgctggaccgggatgacgga

SEQ ID NO: 3566359 - DNA, 25 bp, Homo sapien
tatccccctctgagttcttgccttg

SEQ ID NO: 3566360 - DNA, 25 bp, Homo sapien
ttgattctcctgttactgtcccgcg

SEQ ID NO: 3566361 - DNA, 25 bp, Homo sapien
tcttgccttgattctcctgttactg

SEQ ID NO: 3566362 - DNA, 25 bp, Homo sapien
tcctgttactgtcccgcgaacccac

SEQ ID NO: 3566363 - DNA, 25 bp, Homo sapien
cacctgaagctgactttttccccac

SEQ ID NO: 3566364 - DNA, 25 bp, Homo sapien
tcacctgaagctgactttttcccca

SEQ ID NO: 3566365 - DNA, 25 bp, Homo sapien
acagagggcgggagatgccatcccc

SEQ ID NO: 3566366 - DNA, 25 bp, Homo sapien
gagggcgggagatgccatccccact

SEQ ID NO: 3566367 - DNA, 25 bp, Homo sapien
cttggacagagggcgggagatgcca

SEQ ID NO: 3566368 - DNA, 25 bp, Homo sapien
gtgctttcaccagccatattagctc

SEQ ID NO: 3566369 - DNA, 25 bp, Homo sapien
ccgtcgtggaagcctcggccgtcac

SEQ ID NO: 3566370 - DNA, 25 bp, Homo sapien
cccgtcgtggaagcctcggccgtca

SEQ ID NO: 3566371 - DNA, 25 bp, Homo sapien
gtcgtggaagcctcggccgtcacac

SEQ ID NO: 3566372 - DNA, 25 bp, Homo sapien
cgtcgtggaagcctcggccgtcaca

SEQ ID NO: 3566373 - DNA, 25 bp, Homo sapien
tcgttgctcatgttcacccggcagg

SEQ ID NO: 3566374 - DNA, 25 bp, Homo sapien
tggacacttcgtggagggctccaaa

SEQ ID NO: 3566375 - DNA, 25 bp, Homo sapien
aggccattagctcgtgccctgagga

SEQ ID NO: 3566376 - DNA, 25 bp, Homo sapien
tcttctcttgggtgggtgaatgcca

SEQ ID NO: 3566377 - DNA, 25 bp, Homo sapien
ggccggatgtaagttatcaactata

SEQ ID NO: 3566378 - DNA, 25 bp, Homo sapien
tcaccacattagctcaggggtttgg

SEQ ID NO: 3566379 - DNA, 25 bp, Homo sapien
caggccggatgtaagttatcaacta

SEQ ID NO: 3566380 - DNA, 25 bp, Homo sapien
gagcaggccggatgtaagttatcaa

SEQ ID NO: 3566381 - DNA, 25 bp, Homo sapien
gaagataaagggctgataacaggac

SEQ ID NO: 3566382 - DNA, 25 bp, Homo sapien
tgtgaagataaagggctgataacag

SEQ ID NO: 3566383 - DNA, 25 bp, Homo sapien
tgtgtgaagataaagggctgataac

SEQ ID NO: 3566384 - DNA, 25 bp, Homo sapien
tgaagataaagggctgataacagga

SEQ ID NO: 3566385 - DNA, 25 bp, Homo sapien
ggcgaatgccttgaagcccgggcgg

SEQ ID NO: 3566386 - DNA, 25 bp, Homo sapien
cgaatgccttgaagcccgggcggca

SEQ ID NO: 3566387 - DNA, 25 bp, Homo sapien
taggcgaatgccttgaagcccgggc

SEQ ID NO: 3566388 - DNA, 25 bp, Homo sapien
gaatgccttgaagcccgggcggcag

SEQ ID NO: 3566389 - DNA, 25 bp, Homo sapien
gagcatctcatagttgggggggctg

SEQ ID NO: 3566390 - DNA, 25 bp, Homo sapien
agccacgtcgtgttcctccttgagc

SEQ ID NO: 3566391 - DNA, 25 bp, Homo sapien
ttgagcatctcatagttgggggggc

SEQ ID NO: 3566392 - DNA, 25 bp, Homo sapien
cacgtcgtgttcctccttgagcatc

SEQ ID NO: 3566393 - DNA, 25 bp, Homo sapien
tagagaaatactgaccccactcctc

SEQ ID NO: 3566394 - DNA, 25 bp, Homo sapien
ctagagaaatactgaccccactcct

SEQ ID NO: 3566395 - DNA, 25 bp, Homo sapien
tcctggtttagcagccgggcaagca

SEQ ID NO: 3566396 - DNA, 25 bp, Homo sapien
gccatcctggtttagcagccgggca

SEQ ID NO: 3566397 - DNA, 25 bp, Homo sapien
ccatcctggtttagcagccgggcaa

SEQ ID NO: 3566398 - DNA, 25 bp, Homo sapien
catcctggtttagcagccgggcaag

SEQ ID NO: 3566399 - DNA, 25 bp, Homo sapien
cttgcagccgtgaagcaccagtggg

SEQ ID NO: 3566400 - DNA, 25 bp, Homo sapien
ccttgcagccgtgaagcaccagtgg

SEQ ID NO: 3566401 - DNA, 25 bp, Homo sapien
aggtggaggcaatgcccagagctgt

SEQ ID NO: 3566402 - DNA, 25 bp, Homo sapien
accttgcagccgtgaagcaccagtg

SEQ ID NO: 3566403 - DNA, 25 bp, Homo sapien
cactcttcgatcttccattttgcca

SEQ ID NO: 3566404 - DNA, 25 bp, Homo sapien
cattttgccacttatcattgttggg

SEQ ID NO: 3566405 - DNA, 25 bp, Homo sapien
acggcacactcttcgatcttccatt

SEQ ID NO: 3566406 - DNA, 25 bp, Homo sapien
aattctgctgtgtggaatcaactcc

SEQ ID NO: 3566407 - DNA, 25 bp, Homo sapien
tgtggcctccctcagcattgctgct

SEQ ID NO: 3566408 - DNA, 25 bp, Homo sapien
gcgtgatttctgtgtccgatccccg

SEQ ID NO: 3566409 - DNA, 25 bp, Homo sapien
cgagacccctttgggccagaacgtg

SEQ ID NO: 3566410 - DNA, 25 bp, Homo sapien
aatgtaaagccaagaaggtgcagac

SEQ ID NO: 3566411 - DNA, 25 bp, Homo sapien
ctggtagcctgcagcttgttcattt

SEQ ID NO: 3566412 - DNA, 25 bp, Homo sapien
caggtcctgggttgggtatggagag

SEQ ID NO: 3566413 - DNA, 25 bp, Homo sapien
caggctctgggactctcagactctg

SEQ ID NO: 3566414 - DNA, 25 bp, Homo sapien
gcccagagccaaccaaaccgtggtg

SEQ ID NO: 3566415 - DNA, 25 bp, Homo sapien
tgaaacataaagaggccgaagcgca

SEQ ID NO: 3566416 - DNA, 25 bp, Homo sapien
atgaaacataaagaggccgaagcgc

SEQ ID NO: 3566417 - DNA, 25 bp, Homo sapien
ggtgatgtcactcagcatgcccagt

SEQ ID NO: 3566418 - DNA, 25 bp, Homo sapien
cctgccagcaccggcccatggtgat

SEQ ID NO: 3566419 - DNA, 25 bp, Homo sapien
tggtgatgtcactcagcatgcccag

SEQ ID NO: 3566420 - DNA, 25 bp, Homo sapien
cccagacccactggccggccggacg

SEQ ID NO: 3566421 - DNA, 25 bp, Homo sapien
tcttcatggcaggaactgggggccc

SEQ ID NO: 3566422 - DNA, 25 bp, Homo sapien
tgttgtcagcgcctcgggggacctt

SEQ ID NO: 3566423 - DNA, 25 bp, Homo sapien
ggaaccggggctgggaatgctccac

SEQ ID NO: 3566424 - DNA, 25 bp, Homo sapien
caaggcagggcctttgccacatcca

SEQ ID NO: 3566425 - DNA, 25 bp, Homo sapien
tgccacgaagtgcagctctaagctg

SEQ ID NO: 3566426 - DNA, 25 bp, Homo sapien
gatgatcctcaccaggccaacaact

SEQ ID NO: 3566427 - DNA, 25 bp, Homo sapien
cacactcagtgccacgaagtgcagc

SEQ ID NO: 3566428 - DNA, 25 bp, Homo sapien
cttcctgttgatgatcctcaccagg

SEQ ID NO: 3566429 - DNA, 25 bp, Homo sapien
tttgcctgtgcattgagcagttggg

SEQ ID NO: 3566430 - DNA, 25 bp, Homo sapien
cagttggggctacataaggtttaca

SEQ ID NO: 3566431 - DNA, 25 bp, Homo sapien
ggaacttggaggctcgttcccagcc

SEQ ID NO: 3566432 - DNA, 25 bp, Homo sapien
tctgacgccgatttcttgagttgat

SEQ ID NO: 3566433 - DNA, 25 bp, Homo sapien
ggtttgtgggtgctcacttccatgt

SEQ ID NO: 3566434 - DNA, 25 bp, Homo sapien
tccttgcttgtaaccggtgggtctc

SEQ ID NO: 3566435 - DNA, 25 bp, Homo sapien
gagaactcgtcttttgcatccttgt

SEQ ID NO: 3566436 - DNA, 25 bp, Homo sapien
accgcacaacaggtgacggccaaag

SEQ ID NO: 3566437 - DNA, 25 bp, Homo sapien
cagctgcgacccacacctggcgtgt

SEQ ID NO: 3566438 - DNA, 25 bp, Homo sapien
caggcagcgtgcacatggcccctgg

SEQ ID NO: 3566439 - DNA, 25 bp, Homo sapien
gagtggctgcgagatgctgccccca

SEQ ID NO: 3566440 - DNA, 25 bp, Homo sapien
gcaggcagcgtgcacatggcccctg

SEQ ID NO: 3566441 - DNA, 25 bp, Homo sapien
cgcacacgcccacctgggaacgcac

SEQ ID NO: 3566442 - DNA, 25 bp, Homo sapien
ccacccaggaatgccgacgcccacc

SEQ ID NO: 3566443 - DNA, 25 bp, Homo sapien
cccaggaatgccgacgcccacccag

SEQ ID NO: 3566444 - DNA, 25 bp, Homo sapien
tgggaacgcacacgcccacccagga

SEQ ID NO: 3566445 - DNA, 25 bp, Homo sapien
atcttggaatctggagctcgcaaac

SEQ ID NO: 3566446 - DNA, 25 bp, Homo sapien
acaacttcaggacttagtggcccca

SEQ ID NO: 3566447 - DNA, 25 bp, Homo sapien
ccagcagccacaaatgagagccact

SEQ ID NO: 3566448 - DNA, 25 bp, Homo sapien
ttcaggacttagtggccccagcagc

SEQ ID NO: 3566449 - DNA, 25 bp, Homo sapien
taccaggaagtgtacacaaatgctg

SEQ ID NO: 3566450 - DNA, 25 bp, Homo sapien
caggaagtgtacacaaatgctgcag

SEQ ID NO: 3566451 - DNA, 25 bp, Homo sapien
ccaggaagtgtacacaaatgctgca

SEQ ID NO: 3566452 - DNA, 25 bp, Homo sapien
ttgtaccaggaagtgtacacaaatg

SEQ ID NO: 3566453 - DNA, 25 bp, Homo sapien
caaggtcactgtccgcaggacgagg

SEQ ID NO: 3566454 - DNA, 25 bp, Homo sapien
ggcacacaggagacgttctcagggc

SEQ ID NO: 3566455 - DNA, 25 bp, Homo sapien
acgaggccttagttgccgggcacct

SEQ ID NO: 3566456 - DNA, 25 bp, Homo sapien
acaaccgtgagtggcgcaaaaggaa

SEQ ID NO: 3566457 - DNA, 25 bp, Homo sapien
cagaggagagctgccgtgctggggc

SEQ ID NO: 3566458 - DNA, 25 bp, Homo sapien
agaggagagctgccgtgctggggcc

SEQ ID NO: 3566459 - DNA, 25 bp, Homo sapien
aggagagctgccgtgctggggcctg

SEQ ID NO: 3566460 - DNA, 25 bp, Homo sapien
gagagctgccgtgctggggcctgag

SEQ ID NO: 3566461 - DNA, 25 bp, Homo sapien
aagatgcgtggctgggaatcacaca

SEQ ID NO: 3566462 - DNA, 25 bp, Homo sapien
gaccacccagcacaggcgttgtatg

SEQ ID NO: 3566463 - DNA, 25 bp, Homo sapien
tgtggcctgtgtcaaagccccaagg

SEQ ID NO: 3566464 - DNA, 25 bp, Homo sapien
tcaagcaagcagatactcaggccac

SEQ ID NO: 3566465 - DNA, 25 bp, Homo sapien
cctcgtcccgccttgcacatctgcg

SEQ ID NO: 3566466 - DNA, 25 bp, Homo sapien
cttgtgcatccgtggtcgtccctcg

SEQ ID NO: 3566467 - DNA, 25 bp, Homo sapien
gccttgcacatctgcggtcgtctca

SEQ ID NO: 3566468 - DNA, 25 bp, Homo sapien
tgtgcatccgtggtcgtccctcgtc

SEQ ID NO: 3566469 - DNA, 25 bp, Homo sapien
cttgcacatccgctgtcgtcccaac

SEQ ID NO: 3566470 - DNA, 25 bp, Homo sapien
gccgcggttgtcccaccttgcgcag

SEQ ID NO: 3566471 - DNA, 25 bp, Homo sapien
cgcggttgtcccaccttgcgcagcc

SEQ ID NO: 3566472 - DNA, 25 bp, Homo sapien
tgtcgtcccaacttgcgcagccgcg

SEQ ID NO: 3566473 - DNA, 25 bp, Homo sapien
acatccccctcagcacatagggacc

SEQ ID NO: 3566474 - DNA, 25 bp, Homo sapien
ccccctcagcacatagggaccagag

SEQ ID NO: 3566475 - DNA, 25 bp, Homo sapien
atccccctcagcacatagggaccag

SEQ ID NO: 3566476 - DNA, 25 bp, Homo sapien
tccccctcagcacatagggaccaga

SEQ ID NO: 3566477 - DNA, 25 bp, Homo sapien
gcagagctaaatccccagaggggat

SEQ ID NO: 3566478 - DNA, 25 bp, Homo sapien
cagagctaaatccccagaggggatg

SEQ ID NO: 3566479 - DNA, 25 bp, Homo sapien
cgcagagctaaatccccagagggga

SEQ ID NO: 3566480 - DNA, 25 bp, Homo sapien
agagctaaatccccagaggggatgg

SEQ ID NO: 3566481 - DNA, 25 bp, Homo sapien
ccccagtggattgcctggaaactgg

SEQ ID NO: 3566482 - DNA, 25 bp, Homo sapien
gggccccagtggattgcctggaaac

SEQ ID NO: 3566483 - DNA, 25 bp, Homo sapien
ggctttcctagaccagcaggtgaga

SEQ ID NO: 3566484 - DNA, 25 bp, Homo sapien
aggtgagaaaactggcaagggtgga

SEQ ID NO: 3566485 - DNA, 25 bp, Homo sapien
aggttccagaggcccgctccatgct

SEQ ID NO: 3566486 - DNA, 25 bp, Homo sapien
gttccagaggcccgctccatgctgt

SEQ ID NO: 3566487 - DNA, 25 bp, Homo sapien
taggttccagaggcccgctccatgc

SEQ ID NO: 3566488 - DNA, 25 bp, Homo sapien
ggttccagaggcccgctccatgctg

SEQ ID NO: 3566489 - DNA, 25 bp, Homo sapien
ccctaagtctcgaggcacaggcttc

SEQ ID NO: 3566490 - DNA, 25 bp, Homo sapien
gacagaaccatccagatcggggcca

SEQ ID NO: 3566491 - DNA, 25 bp, Homo sapien
gaccccacagatgggatccaggatt

SEQ ID NO: 3566492 - DNA, 25 bp, Homo sapien
tgggcctgctggctcctaaagcttc

SEQ ID NO: 3566493 - DNA, 25 bp, Homo sapien
aggtacaagcctgagggccgcaggt

SEQ ID NO: 3566494 - DNA, 25 bp, Homo sapien
ggtacaagcctgagggccgcaggtt

SEQ ID NO: 3566495 - DNA, 25 bp, Homo sapien
gtacaagcctgagggccgcaggttc

SEQ ID NO: 3566496 - DNA, 25 bp, Homo sapien
ctgcaacgaaaaacgccacattcca

SEQ ID NO: 3566497 - DNA, 25 bp, Homo sapien
acgaaaaacgccacattccagctga

SEQ ID NO: 3566498 - DNA, 25 bp, Homo sapien
aacgaaaaacgccacattccagctg

SEQ ID NO: 3566499 - DNA, 25 bp, Homo sapien
gcaacgaaaaacgccacattccagc

SEQ ID NO: 3566500 - DNA, 25 bp, Homo sapien
aaatagaaacgcacagagaggcaat

SEQ ID NO: 3566501 - DNA, 25 bp, Homo sapien
accagctggccttgcggattccaga

SEQ ID NO: 3566502 - DNA, 25 bp, Homo sapien
gaaatagaaacgcacagagaggcaa

SEQ ID NO: 3566503 - DNA, 25 bp, Homo sapien
ctggccttgcggattccagaacttt

SEQ ID NO: 3566504 - DNA, 25 bp, Homo sapien
ctgcagatccagcgggccagctgcc

SEQ ID NO: 3566505 - DNA, 25 bp, Homo sapien
gcagatccagcgggccagctgccac

SEQ ID NO: 3566506 - DNA, 25 bp, Homo sapien
agatccagcgggccagctgccactt

SEQ ID NO: 3566507 - DNA, 25 bp, Homo sapien
gatccagcgggccagctgccacttg

SEQ ID NO: 3566508 - DNA, 25 bp, Homo sapien
tcttgtggactgaagactcatttcg

SEQ ID NO: 3566509 - DNA, 25 bp, Homo sapien
ctggctcacggccctgaacacagta

SEQ ID NO: 3566510 - DNA, 25 bp, Homo sapien
gaagactcatttcggagccactcca

SEQ ID NO: 3566511 - DNA, 25 bp, Homo sapien
gattggcaaccctcagtcttgtgga

SEQ ID NO: 3566512 - DNA, 25 bp, Homo sapien
actgggcagccgtacgtgtcccagg

SEQ ID NO: 3566513 - DNA, 25 bp, Homo sapien
cagtcacggacactgaggtgctcag

SEQ ID NO: 3566514 - DNA, 25 bp, Homo sapien
aggatcactgggcagccgtacgtgt

SEQ ID NO: 3566515 - DNA, 25 bp, Homo sapien
catccggctgtgacaacctcaggtc

SEQ ID NO: 3566516 - DNA, 25 bp, Homo sapien
ctgcctcgagcatgtgcaagcttca

SEQ ID NO: 3566517 - DNA, 25 bp, Homo sapien
tcgagcatgtgcaagcttcaggatc

SEQ ID NO: 3566518 - DNA, 25 bp, Homo sapien
cacagtgacactagggacggggacc

SEQ ID NO: 3566519 - DNA, 25 bp, Homo sapien
gcatgtgcaagcttcaggatcttca

SEQ ID NO: 3566520 - DNA, 25 bp, Homo sapien
tgtgctgggcattggacctgccctg

SEQ ID NO: 3566521 - DNA, 25 bp, Homo sapien
gttccgccggcacatgggctgagct

SEQ ID NO: 3566522 - DNA, 25 bp, Homo sapien
tgggagctcagcgtgtgggtggcca

SEQ ID NO: 3566523 - DNA, 25 bp, Homo sapien
agctcagcgtgtgggtggccagagt

SEQ ID NO: 3566524 - DNA, 25 bp, Homo sapien
ctgagcactgccagcgtcgggggct

SEQ ID NO: 3566525 - DNA, 25 bp, Homo sapien
cactgccagcgtcgggggctgcttg

SEQ ID NO: 3566526 - DNA, 25 bp, Homo sapien
gacgcctcgtgctgcatggggttcc

SEQ ID NO: 3566527 - DNA, 25 bp, Homo sapien
ctgccccgacgcctcgtgctgcatg

SEQ ID NO: 3566528 - DNA, 25 bp, Homo sapien
aactgcctggaacgggggctgtagg

SEQ ID NO: 3566529 - DNA, 25 bp, Homo sapien
cttatggtgctaggaactgcctgga

SEQ ID NO: 3566530 - DNA, 25 bp, Homo sapien
ctggaacgggggctgtagggtcagg

SEQ ID NO: 3566531 - DNA, 25 bp, Homo sapien
ttatggtgctaggaactgcctggaa

SEQ ID NO: 3566532 - DNA, 25 bp, Homo sapien
catgaattcgaaggatcctcctttg

SEQ ID NO: 3566533 - DNA, 25 bp, Homo sapien
tcatgaattcgaaggatcctccttt

SEQ ID NO: 3566534 - DNA, 25 bp, Homo sapien
gaattcgaaggatcctcctttgaat

SEQ ID NO: 3566535 - DNA, 25 bp, Homo sapien
cctgggaggttgctggttcatgaat

SEQ ID NO: 3566536 - DNA, 25 bp, Homo sapien
ccaaatgcacccttcacagcactcc

SEQ ID NO: 3566537 - DNA, 25 bp, Homo sapien
gggcccaaatgcacccttcacagca

SEQ ID NO: 3566538 - DNA, 25 bp, Homo sapien
ccccagggcccaaatgcacccttca

SEQ ID NO: 3566539 - DNA, 25 bp, Homo sapien
ctggaggcccaaactcatgggcccc

SEQ ID NO: 3566540 - DNA, 25 bp, Homo sapien
tgtgggcatcggactgccccaggca

SEQ ID NO: 3566541 - DNA, 25 bp, Homo sapien
tgggcatcggactgccccaggcact

SEQ ID NO: 3566542 - DNA, 25 bp, Homo sapien
gatgtgggcatcggactgccccagg

SEQ ID NO: 3566543 - DNA, 25 bp, Homo sapien
gggcatcggactgccccaggcactt

SEQ ID NO: 3566544 - DNA, 25 bp, Homo sapien
tctgccagacaaaagccacttggga

SEQ ID NO: 3566545 - DNA, 25 bp, Homo sapien
tctgaacccaaaccagcagcgactt

SEQ ID NO: 3566546 - DNA, 25 bp, Homo sapien
gcagcgacttgaaccagaacgtggg

SEQ ID NO: 3566547 - DNA, 25 bp, Homo sapien
ccaccgcagtgacgtttcagaagtc

SEQ ID NO: 3566548 - DNA, 25 bp, Homo sapien
cttgttccctgatcagccagacatt

SEQ ID NO: 3566549 - DNA, 25 bp, Homo sapien
cccagaattgaggtgttgaaggctc

SEQ ID NO: 3566550 - DNA, 25 bp, Homo sapien
tgttccctgatcagccagacattgg

SEQ ID NO: 3566551 - DNA, 25 bp, Homo sapien
tcaaccgtcccagaattgaggtgtt

SEQ ID NO: 3566552 - DNA, 25 bp, Homo sapien
ggttgccctgtctacgagggccaaa

SEQ ID NO: 3566553 - DNA, 25 bp, Homo sapien
gtctacgagggccaaattgacccat

SEQ ID NO: 3566554 - DNA, 25 bp, Homo sapien
ctgagggttgccctgtctacgaggg

SEQ ID NO: 3566555 - DNA, 25 bp, Homo sapien
ccctgtctacgagggccaaattgac

SEQ ID NO: 3566556 - DNA, 25 bp, Homo sapien
tgtaccgagtctccaggcatcctgg

SEQ ID NO: 3566557 - DNA, 25 bp, Homo sapien
ccttggagtgcgaattttagccaca

SEQ ID NO: 3566558 - DNA, 25 bp, Homo sapien
caaaggcctgctttgtgtaccgagt

SEQ ID NO: 3566559 - DNA, 25 bp, Homo sapien
gttgacaggctgctccgagatggaa

SEQ ID NO: 3566560 - DNA, 25 bp, Homo sapien
aaaggtctctgcaaccaggatgaag

SEQ ID NO: 3566561 - DNA, 25 bp, Homo sapien
atgaagcaagggctaatccgcagca

SEQ ID NO: 3566562 - DNA, 25 bp, Homo sapien
gacaaaggtctctgcaaccaggatg

SEQ ID NO: 3566563 - DNA, 25 bp, Homo sapien
gcaagggctaatccgcagcagcgag

SEQ ID NO: 3566564 - DNA, 25 bp, Homo sapien
gatcaagcccgtaggttccatgcag

SEQ ID NO: 3566565 - DNA, 25 bp, Homo sapien
tattaacaaagccagacatgcacgc

SEQ ID NO: 3566566 - DNA, 25 bp, Homo sapien
tgtttgcaccgatgaccatgccaga

SEQ ID NO: 3566567 - DNA, 25 bp, Homo sapien
tgaggttcgggacatatctagcccc

SEQ ID NO: 3566568 - DNA, 25 bp, Homo sapien
cactgttcttctcccttgtagcaac

SEQ ID NO: 3566569 - DNA, 25 bp, Homo sapien
ccactgttcttctcccttgtagcaa

SEQ ID NO: 3566570 - DNA, 25 bp, Homo sapien
gttcttctcccttgtagcaactgga

SEQ ID NO: 3566571 - DNA, 25 bp, Homo sapien
ctgttcttctcccttgtagcaactg

SEQ ID NO: 3566572 - DNA, 25 bp, Homo sapien
ctggaagtacagagaaggagaaaag

SEQ ID NO: 3566573 - DNA, 25 bp, Homo sapien
agaaggagaaaagcccagcgcattt

SEQ ID NO: 3566574 - DNA, 25 bp, Homo sapien
acagagaaggagaaaagcccagcgc

SEQ ID NO: 3566575 - DNA, 25 bp, Homo sapien
agagaaggagaaaagcccagcgcat

SEQ ID NO: 3566576 - DNA, 25 bp, Homo sapien
cagcccgtgcgattcactgctgtgc

SEQ ID NO: 3566577 - DNA, 25 bp, Homo sapien
gctgtatggtccagcagcaaggtac

SEQ ID NO: 3566578 - DNA, 25 bp, Homo sapien
ggtctcgatatgtctggttccagtt

SEQ ID NO: 3566579 - DNA, 25 bp, Homo sapien
gctttccgcagcctctgctgtatgg

SEQ ID NO: 3566580 - DNA, 25 bp, Homo sapien
tccgaaagagggaggactggggaga

SEQ ID NO: 3566581 - DNA, 25 bp, Homo sapien
tggggagagggcagggtgaagtcct

SEQ ID NO: 3566582 - DNA, 25 bp, Homo sapien
gagagggcagggtgaagtcctccat

SEQ ID NO: 3566583 - DNA, 25 bp, Homo sapien
gggagagggcagggtgaagtcctcc

SEQ ID NO: 3566584 - DNA, 25 bp, Homo sapien
tcatatttagcgagcattggcccgc

SEQ ID NO: 3566585 - DNA, 25 bp, Homo sapien
tggtcacggagtcatagcggttagt

SEQ ID NO: 3566586 - DNA, 25 bp, Homo sapien
ggtttcttgcgcatccactgtgggc

SEQ ID NO: 3566587 - DNA, 25 bp, Homo sapien
cataggccgtgcactgagctaggta

SEQ ID NO: 3566588 - DNA, 25 bp, Homo sapien
ttcgggttgagttcaatggcagcac

SEQ ID NO: 3566589 - DNA, 25 bp, Homo sapien
gggtcctggacgcttgttcacatgc

SEQ ID NO: 3566590 - DNA, 25 bp, Homo sapien
gcagcacggtgtcatctctattcca

SEQ ID NO: 3566591 - DNA, 25 bp, Homo sapien
cagtttatcgtgtaacattgctcca

SEQ ID NO: 3566592 - DNA, 25 bp, Homo sapien
tgcacatcttcctagcctggggggc

SEQ ID NO: 3566593 - DNA, 25 bp, Homo sapien
cacatcttcctagcctggggggcct

SEQ ID NO: 3566594 - DNA, 25 bp, Homo sapien
gcacatcttcctagcctggggggcc

SEQ ID NO: 3566595 - DNA, 25 bp, Homo sapien
acatcttcctagcctggggggcctg

SEQ ID NO: 3566596 - DNA, 25 bp, Homo sapien
tctttccttggctcgtagacagcat

SEQ ID NO: 3566597 - DNA, 25 bp, Homo sapien
tcttctttcaccgtcctggaggcta

SEQ ID NO: 3566598 - DNA, 25 bp, Homo sapien
attgaatgaggacccaccctggtga

SEQ ID NO: 3566599 - DNA, 25 bp, Homo sapien
cagggttgttcctctatgtgggtcc

SEQ ID NO: 3566600 - DNA, 25 bp, Homo sapien
caaaaccaggtgaaggcgcaaaagc

SEQ ID NO: 3566601 - DNA, 25 bp, Homo sapien
tccagagaagacacgcagggccagg

SEQ ID NO: 3566602 - DNA, 25 bp, Homo sapien
aaaagccgtgtctctgccgcaaggg

SEQ ID NO: 3566603 - DNA, 25 bp, Homo sapien
gcccaggaacgctcagaactgagct

SEQ ID NO: 3566604 - DNA, 25 bp, Homo sapien
tgtgctggccctggtggtccccttg

SEQ ID NO: 3566605 - DNA, 25 bp, Homo sapien
gtgctggccctggtggtccccttgg

SEQ ID NO: 3566606 - DNA, 25 bp, Homo sapien
gtgtgctggccctggtggtcccctt

SEQ ID NO: 3566607 - DNA, 25 bp, Homo sapien
tgctggccctggtggtccccttggg

SEQ ID NO: 3566608 - DNA, 25 bp, Homo sapien
agaggcgtccataggccgtaggctc

SEQ ID NO: 3566609 - DNA, 25 bp, Homo sapien
gacaggggcaggtctcatttgcaaa

SEQ ID NO: 3566610 - DNA, 25 bp, Homo sapien
catgcaccggtagcgggtgctccaa

SEQ ID NO: 3566611 - DNA, 25 bp, Homo sapien
aaggcacaatccaatgcatcaggct

SEQ ID NO: 3566612 - DNA, 25 bp, Homo sapien
gaatgggcttttgtccgaagctgca

SEQ ID NO: 3566613 - DNA, 25 bp, Homo sapien
tctctgtagggtagagcggtaaggc

SEQ ID NO: 3566614 - DNA, 25 bp, Homo sapien
ggcaagaggcccatccctagtcagc

SEQ ID NO: 3566615 - DNA, 25 bp, Homo sapien
agtcagccctgttccgccgaatggg

SEQ ID NO: 3566616 - DNA, 25 bp, Homo sapien
cagtcagtgctgtgaagacaaagaa

SEQ ID NO: 3566617 - DNA, 25 bp, Homo sapien
agtcagtgctgtgaagacaaagaac

SEQ ID NO: 3566618 - DNA, 25 bp, Homo sapien
ctggggcgtacacagccaacagtca

SEQ ID NO: 3566619 - DNA, 25 bp, Homo sapien
caacagtcagtgctgtgaagacaaa

SEQ ID NO: 3566620 - DNA, 25 bp, Homo sapien
ggtcagtgcagccacgaccatcccg

SEQ ID NO: 3566621 - DNA, 25 bp, Homo sapien
acagcaggtgctcggtcagtgcagc

SEQ ID NO: 3566622 - DNA, 25 bp, Homo sapien
cagccacgaccatcccgtcctgcat

SEQ ID NO: 3566623 - DNA, 25 bp, Homo sapien
gtgcagccacgaccatcccgtcctg

SEQ ID NO: 3566624 - DNA, 25 bp, Homo sapien
gatgaaagacgcatccacccaggaa

SEQ ID NO: 3566625 - DNA, 25 bp, Homo sapien
tgaatgccccacgtcaaagaaatgg

SEQ ID NO: 3566626 - DNA, 25 bp, Homo sapien
ttggacccagcaagatgtcactcac

SEQ ID NO: 3566627 - DNA, 25 bp, Homo sapien
actggcatcgcaatctcagggaaga

SEQ ID NO: 3566628 - DNA, 25 bp, Homo sapien
agccatgaaggctttgccatctgac

SEQ ID NO: 3566629 - DNA, 25 bp, Homo sapien
aaggctttgccatctgacccctgct

SEQ ID NO: 3566630 - DNA, 25 bp, Homo sapien
catgaaggctttgccatctgacccc

SEQ ID NO: 3566631 - DNA, 25 bp, Homo sapien
tgaaggctttgccatctgacccctg

SEQ ID NO: 3566632 - DNA, 25 bp, Homo sapien
tccaagacgggcatggcgccagagc

SEQ ID NO: 3566633 - DNA, 25 bp, Homo sapien
gcagaaccaacttccggcagcatta

SEQ ID NO: 3566634 - DNA, 25 bp, Homo sapien
ttccggcagcattatccgtgctttc

SEQ ID NO: 3566635 - DNA, 25 bp, Homo sapien
gagccatccttgtcccgggtggcca

SEQ ID NO: 3566636 - DNA, 25 bp, Homo sapien
tctgtgcaggaacgccagccagagt

SEQ ID NO: 3566637 - DNA, 25 bp, Homo sapien
actccaaagggtcctgatgaaaatg

SEQ ID NO: 3566638 - DNA, 25 bp, Homo sapien
tgtctggggccaattgatacccctc

SEQ ID NO: 3566639 - DNA, 25 bp, Homo sapien
tcaggactcagagcctcaactccaa

SEQ ID NO: 3566640 - DNA, 25 bp, Homo sapien
cccactggcccccaagtgatgttgg

SEQ ID NO: 3566641 - DNA, 25 bp, Homo sapien
ggcccccaagtgatgttggcagcat

SEQ ID NO: 3566642 - DNA, 25 bp, Homo sapien
agatgtcataagaacccactggccc

SEQ ID NO: 3566643 - DNA, 25 bp, Homo sapien
gaagatgtcataagaacccactggc

SEQ ID NO: 3566644 - DNA, 25 bp, Homo sapien
atggcctgcctgtccatggacctcc

SEQ ID NO: 3566645 - DNA, 25 bp, Homo sapien
aggcttcagcgtccccccatggcct

SEQ ID NO: 3566646 - DNA, 25 bp, Homo sapien
atggacctccgacgcggccacctgg

SEQ ID NO: 3566647 - DNA, 25 bp, Homo sapien
tgcctgtccatggacctccgacgcg

SEQ ID NO: 3566648 - DNA, 25 bp, Homo sapien
ttagccagtgtcagcgcactgggag

SEQ ID NO: 3566649 - DNA, 25 bp, Homo sapien
ggagaattgctgtgctcggatgcct

SEQ ID NO: 3566650 - DNA, 25 bp, Homo sapien
tcagcgcactgggagaattgctgtg

SEQ ID NO: 3566651 - DNA, 25 bp, Homo sapien
tgctgtgctcggatgccttctgcca

SEQ ID NO: 3566652 - DNA, 25 bp, Homo sapien
acatcaaggattcgagcagagcccg

SEQ ID NO: 3566653 - DNA, 25 bp, Homo sapien
gcctggcactggcacatccattcat

SEQ ID NO: 3566654 - DNA, 25 bp, Homo sapien
tgttcagtacttatgtgttcagcac

SEQ ID NO: 3566655 - DNA, 25 bp, Homo sapien
tgtgtattcacagccggccacgtgc

SEQ ID NO: 3566656 - DNA, 25 bp, Homo sapien
taaatccagcatgtagaaactggga

SEQ ID NO: 3566657 - DNA, 25 bp, Homo sapien
tctatgtgctaaatccagcatgtag

SEQ ID NO: 3566658 - DNA, 25 bp, Homo sapien
gggcacagtgcttctatgtgctaaa

SEQ ID NO: 3566659 - DNA, 25 bp, Homo sapien
catgtagaaactgggagaagtctgg

SEQ ID NO: 3566660 - DNA, 25 bp, Homo sapien
agtaggtgcttccagcaacctgtga

SEQ ID NO: 3566661 - DNA, 25 bp, Homo sapien
ctgcaggaaagtaggtgcttccagc

SEQ ID NO: 3566662 - DNA, 25 bp, Homo sapien
gaaagtaggtgcttccagcaacctg

SEQ ID NO: 3566663 - DNA, 25 bp, Homo sapien
gcttccagcaacctgtgatcacctt

SEQ ID NO: 3566664 - DNA, 25 bp, Homo sapien
aagggatgccgtcagcttggctgct

SEQ ID NO: 3566665 - DNA, 25 bp, Homo sapien
agggatgccgtcagcttggctgctg

SEQ ID NO: 3566666 - DNA, 25 bp, Homo sapien
agcagaagggatgccgtcagcttgg

SEQ ID NO: 3566667 - DNA, 25 bp, Homo sapien
agaagggatgccgtcagcttggctg

SEQ ID NO: 3566668 - DNA, 25 bp, Homo sapien
accctgagggttccagaagttggtg

SEQ ID NO: 3566669 - DNA, 25 bp, Homo sapien
ttgactggatggtcaaaactggggt

SEQ ID NO: 3566670 - DNA, 25 bp, Homo sapien
gatggtcaaaactggggtgtcttta

SEQ ID NO: 3566671 - DNA, 25 bp, Homo sapien
ttggtggggcccaccatgtgggcag

SEQ ID NO: 3566672 - DNA, 25 bp, Homo sapien
tgacttgctcccaagtgggacactt

SEQ ID NO: 3566673 - DNA, 25 bp, Homo sapien
tccccgacacaacccaagatagaaa

SEQ ID NO: 3566674 - DNA, 25 bp, Homo sapien
aaagcgtcgttcagctgccaagttg

SEQ ID NO: 3566675 - DNA, 25 bp, Homo sapien
gagactttgcggtgacttgctccca

SEQ ID NO: 3566676 - DNA, 25 bp, Homo sapien
cttgttgctgcggtgtctgtctgtg

SEQ ID NO: 3566677 - DNA, 25 bp, Homo sapien
ctgggccttgttgctgcggtgtctg

SEQ ID NO: 3566678 - DNA, 25 bp, Homo sapien
ctgcacgcggatggcgtccagggcc

SEQ ID NO: 3566679 - DNA, 25 bp, Homo sapien
tcctgcacgcggatggcgtccaggg

SEQ ID NO: 3566680 - DNA, 25 bp, Homo sapien
gagggagcaaatgtctctgctgccc

SEQ ID NO: 3566681 - DNA, 25 bp, Homo sapien
tggtgagggagcaaatgtctctgct

SEQ ID NO: 3566682 - DNA, 25 bp, Homo sapien
tcacagatggtgagggagcaaatgt

SEQ ID NO: 3566683 - DNA, 25 bp, Homo sapien
cagatggtgagggagcaaatgtctc

SEQ ID NO: 3566684 - DNA, 25 bp, Homo sapien
tcaggccccagaattctggaaggct

SEQ ID NO: 3566685 - DNA, 25 bp, Homo sapien
ccccagaattctggaaggctccaaa

SEQ ID NO: 3566686 - DNA, 25 bp, Homo sapien
gccccagaattctggaaggctccaa

SEQ ID NO: 3566687 - DNA, 25 bp, Homo sapien
cagaattctggaaggctccaaaaac

SEQ ID NO: 3566688 - DNA, 25 bp, Homo sapien
tggcattggcctggcaggaaggccc

SEQ ID NO: 3566689 - DNA, 25 bp, Homo sapien
cctggcattggcctggcaggaaggc

SEQ ID NO: 3566690 - DNA, 25 bp, Homo sapien
ccagctgcccgctggcccggctcct

SEQ ID NO: 3566691 - DNA, 25 bp, Homo sapien
tcctgggcagctccgtgggaattcc

SEQ ID NO: 3566692 - DNA, 25 bp, Homo sapien
tctgagctgacaatgctggtgccac

SEQ ID NO: 3566693 - DNA, 25 bp, Homo sapien
tcaaccacactccacagggtcatgg

SEQ ID NO: 3566694 - DNA, 25 bp, Homo sapien
tctctgagctgacaatgctggtgcc

SEQ ID NO: 3566695 - DNA, 25 bp, Homo sapien
cactccacagggtcatggctgcttt

SEQ ID NO: 3566696 - DNA, 25 bp, Homo sapien
aggccccgagggcactccgaaatat

SEQ ID NO: 3566697 - DNA, 25 bp, Homo sapien
tcatgagagttccatgaaggccccg

SEQ ID NO: 3566698 - DNA, 25 bp, Homo sapien
atgagagttccatgaaggccccgag

SEQ ID NO: 3566699 - DNA, 25 bp, Homo sapien
gggcactccgaaatatcacagtggc

SEQ ID NO: 3566700 - DNA, 25 bp, Homo sapien
gggtgcttctcagaacaccaggtct

SEQ ID NO: 3566701 - DNA, 25 bp, Homo sapien
catggcatctgggtaccatcgagga

SEQ ID NO: 3566702 - DNA, 25 bp, Homo sapien
aggtcttgcacgctgagtcatggca

SEQ ID NO: 3566703 - DNA, 25 bp, Homo sapien
tgcaagaagacgatggcagagtcgt

SEQ ID NO: 3566704 - DNA, 25 bp, Homo sapien
aaggctcaggcgcacccgggagcat

SEQ ID NO: 3566705 - DNA, 25 bp, Homo sapien
tggcaaggctcaggcgcacccggga

SEQ ID NO: 3566706 - DNA, 25 bp, Homo sapien
gcaaggctcaggcgcacccgggagc

SEQ ID NO: 3566707 - DNA, 25 bp, Homo sapien
ctggcaaggctcaggcgcacccggg

SEQ ID NO: 3566708 - DNA, 25 bp, Homo sapien
gcttcccggagttaggactgcggca

SEQ ID NO: 3566709 - DNA, 25 bp, Homo sapien
tcccggagttaggactgcggcatca

SEQ ID NO: 3566710 - DNA, 25 bp, Homo sapien
actgcggcatcaggggtttcaggcc

SEQ ID NO: 3566711 - DNA, 25 bp, Homo sapien
atttgcttcccggagttaggactgc

SEQ ID NO: 3566712 - DNA, 25 bp, Homo sapien
ggtgtttcaggcctaggatttgctt

SEQ ID NO: 3566713 - DNA, 25 bp, Homo sapien
tccatagtcgggaagcaggaaagtg

SEQ ID NO: 3566714 - DNA, 25 bp, Homo sapien
gcctctccatagtcgggaagcagga

SEQ ID NO: 3566715 - DNA, 25 bp, Homo sapien
ccatagtcgggaagcaggaaagtga

SEQ ID NO: 3566716 - DNA, 25 bp, Homo sapien
ctgtgcctctccatagtcgggaagc

SEQ ID NO: 3566717 - DNA, 25 bp, Homo sapien
tctgacatggaagaggcttggccac

SEQ ID NO: 3566718 - DNA, 25 bp, Homo sapien
gttcagcctgcacgttgacatccgt

SEQ ID NO: 3566719 - DNA, 25 bp, Homo sapien
ttgttattgctgaacatcgggccca

SEQ ID NO: 3566720 - DNA, 25 bp, Homo sapien
atcgggcccatgtcgccgtgttcag

SEQ ID NO: 3566721 - DNA, 25 bp, Homo sapien
ggcctgattggaggctgcaccaaga

SEQ ID NO: 3566722 - DNA, 25 bp, Homo sapien
tctctgtggccgaacttttaactct

SEQ ID NO: 3566723 - DNA, 25 bp, Homo sapien
tgtgtcgttgctttgtctccccagc

SEQ ID NO: 3566724 - DNA, 25 bp, Homo sapien
agccaggtgtaaaccgctgaaggca

SEQ ID NO: 3566725 - DNA, 25 bp, Homo sapien
cttgaggcctttgaggcagtagggt

SEQ ID NO: 3566726 - DNA, 25 bp, Homo sapien
gccccagcccatcgcagctgacatg

SEQ ID NO: 3566727 - DNA, 25 bp, Homo sapien
agttcccctgcttgcagggcgtgag

SEQ ID NO: 3566728 - DNA, 25 bp, Homo sapien
tgagtccggggtcacttgaggcctt

SEQ ID NO: 3566729 - DNA, 25 bp, Homo sapien
agcgttatacgtttgaacttgttgc

SEQ ID NO: 3566730 - DNA, 25 bp, Homo sapien
ttagctctgcatataggtcttctcg

SEQ ID NO: 3566731 - DNA, 25 bp, Homo sapien
ttgatgcggagtaaaagtaagcgtt

SEQ ID NO: 3566732 - DNA, 25 bp, Homo sapien
gatcaattgagtattttagctctgc

SEQ ID NO: 3566733 - DNA, 25 bp, Homo sapien
ttgcggggtacactggagaggaaac

SEQ ID NO: 3566734 - DNA, 25 bp, Homo sapien
ccatctggtgcatcagggttgcggg

SEQ ID NO: 3566735 - DNA, 25 bp, Homo sapien
gatctgcagacactccccatcaatg

SEQ ID NO: 3566736 - DNA, 25 bp, Homo sapien
gtacactggagaggaaacacaattt

SEQ ID NO: 3566737 - DNA, 25 bp, Homo sapien
aagaactgctggcaacgggcagctc

SEQ ID NO: 3566738 - DNA, 25 bp, Homo sapien
gaagaactgctggcaacgggcagct

SEQ ID NO: 3566739 - DNA, 25 bp, Homo sapien
gaactgctggcaacgggcagctcca

SEQ ID NO: 3566740 - DNA, 25 bp, Homo sapien
aggaagaactgctggcaacgggcag

SEQ ID NO: 3566741 - DNA, 25 bp, Homo sapien
tcagtggcaactgagatggtatcgc

SEQ ID NO: 3566742 - DNA, 25 bp, Homo sapien
acagcgcaggatcacgctccggtct

SEQ ID NO: 3566743 - DNA, 25 bp, Homo sapien
atcgcacacgggcacagcgcaggat

SEQ ID NO: 3566744 - DNA, 25 bp, Homo sapien
ctgagatggtatcgcacacgggcac

SEQ ID NO: 3566745 - DNA, 25 bp, Homo sapien
aaaagaccaaagcgcctatcacgaa

SEQ ID NO: 3566746 - DNA, 25 bp, Homo sapien
ccaaagcgcctatcacgaatgccat

SEQ ID NO: 3566747 - DNA, 25 bp, Homo sapien
aagaccaaagcgcctatcacgaatg

SEQ ID NO: 3566748 - DNA, 25 bp, Homo sapien
gaccaaagcgcctatcacgaatgcc

SEQ ID NO: 3566749 - DNA, 25 bp, Homo sapien
tctggctgccgtcatattagcaagt

SEQ ID NO: 3566750 - DNA, 25 bp, Homo sapien
gttccgcacaccttggtcctcaggg

SEQ ID NO: 3566751 - DNA, 25 bp, Homo sapien
ccgtcatattagcaagtggtggtgg

SEQ ID NO: 3566752 - DNA, 25 bp, Homo sapien
tggtggcgtgaccacggttccgcac

SEQ ID NO: 3566753 - DNA, 25 bp, Homo sapien
gagctccgagatgtaaaatgcattc

SEQ ID NO: 3566754 - DNA, 25 bp, Homo sapien
tctggtaaacccatcctccaaactg

SEQ ID NO: 3566755 - DNA, 25 bp, Homo sapien
agacacattggagagctccgagatg

SEQ ID NO: 3566756 - DNA, 25 bp, Homo sapien
gaaccgccttcctgcctctggtaaa

SEQ ID NO: 3566757 - DNA, 25 bp, Homo sapien
aggcccggccgacgcttcccaccat

SEQ ID NO: 3566758 - DNA, 25 bp, Homo sapien
catcctgctgacagatggacggagc

SEQ ID NO: 3566759 - DNA, 25 bp, Homo sapien
acagatggacggagcccagcccgga

SEQ ID NO: 3566760 - DNA, 25 bp, Homo sapien
acacaggcccggccgacgcttccca

SEQ ID NO: 3566761 - DNA, 25 bp, Homo sapien
tacgctcgcaaagacactgtgctga

SEQ ID NO: 3566762 - DNA, 25 bp, Homo sapien
tgctgaatgcgagcccaggtgtacc

SEQ ID NO: 3566763 - DNA, 25 bp, Homo sapien
caacgtgtagcatacgctcgcaaag

SEQ ID NO: 3566764 - DNA, 25 bp, Homo sapien
actccacggacaccaacgtgtagca

SEQ ID NO: 3566765 - DNA, 25 bp, Homo sapien
gtagcatcgtgagagaagtccttga

SEQ ID NO: 3566766 - DNA, 25 bp, Homo sapien
tgcagagtagcatcgtgagagaagt

SEQ ID NO: 3566767 - DNA, 25 bp, Homo sapien
gccactgagggtgcctgagtgcaga

SEQ ID NO: 3566768 - DNA, 25 bp, Homo sapien
gtgcctgagtgcagagtagcatcgt

SEQ ID NO: 3566769 - DNA, 25 bp, Homo sapien
tatgttgatgctataactgtcattt

SEQ ID NO: 3566770 - DNA, 25 bp, Homo sapien
attgtatgttgatgctataactgtc

SEQ ID NO: 3566771 - DNA, 25 bp, Homo sapien
ttgtatgttgatgctataactgtca

SEQ ID NO: 3566772 - DNA, 25 bp, Homo sapien
tgtatgttgatgctataactgtcat

SEQ ID NO: 3566773 - DNA, 25 bp, Homo sapien
cattttcagaccttcggtgggcgcc

SEQ ID NO: 3566774 - DNA, 25 bp, Homo sapien
ttggaggaccttctccgagcgagcc

SEQ ID NO: 3566775 - DNA, 25 bp, Homo sapien
cctttgttcaagcagcgagtcccgg

SEQ ID NO: 3566776 - DNA, 25 bp, Homo sapien
ccgtctgcagggatatcggcttgga

SEQ ID NO: 3566777 - DNA, 25 bp, Homo sapien
tactaccgcctcacacgcttcctct

SEQ ID NO: 3566778 - DNA, 25 bp, Homo sapien
tggtggccgcagtgcaaggcctgaa

SEQ ID NO: 3566779 - DNA, 25 bp, Homo sapien
tgaggagccccaacaacttcctgtc

SEQ ID NO: 3566780 - DNA, 25 bp, Homo sapien
ttcctgtcctactaccgcctcacac

SEQ ID NO: 3566781 - DNA, 25 bp, Homo sapien
catctgtgcaaatcgggtgcgcagt

SEQ ID NO: 3566782 - DNA, 25 bp, Homo sapien
gaatgtccatctgtgcaaatcgggt

SEQ ID NO: 3566783 - DNA, 25 bp, Homo sapien
tgtgcaaatcgggtgcgcagtgcca

SEQ ID NO: 3566784 - DNA, 25 bp, Homo sapien
aaatcgggtgcgcagtgccacacac

SEQ ID NO: 3566785 - DNA, 25 bp, Homo sapien
tgacttttcgcggaggagcgtgctg

SEQ ID NO: 3566786 - DNA, 25 bp, Homo sapien
cttttcgcggaggagcgtgctgcct

SEQ ID NO: 3566787 - DNA, 25 bp, Homo sapien
gagaacagctttgtccaccggggta

SEQ ID NO: 3566788 - DNA, 25 bp, Homo sapien
tccaccggggtagccttgcaggcag

SEQ ID NO: 3566789 - DNA, 25 bp, Homo sapien
cagtggccgcagtgggtggatgcat

SEQ ID NO: 3566790 - DNA, 25 bp, Homo sapien
gatgcatgctgtgccaggctgatgg

SEQ ID NO: 3566791 - DNA, 25 bp, Homo sapien
cagtgggtggatgcatgctgtgcca

SEQ ID NO: 3566792 - DNA, 25 bp, Homo sapien
tgcatgctgtgccaggctgatggct

SEQ ID NO: 3566793 - DNA, 25 bp, Homo sapien
tcgaagccctgctggagtcaagcct

SEQ ID NO: 3566794 - DNA, 25 bp, Homo sapien
cgtctcgggagaggattaggttcca

SEQ ID NO: 3566795 - DNA, 25 bp, Homo sapien
gtatttgcataaccctgagcggtgg

SEQ ID NO: 3566796 - DNA, 25 bp, Homo sapien
tcctctccggagcattttgatacca

SEQ ID NO: 3566797 - DNA, 25 bp, Homo sapien
tgtatgttattatattccgtaggta

SEQ ID NO: 3566798 - DNA, 25 bp, Homo sapien
tatattccgtaggtagatgtgtaac

SEQ ID NO: 3566799 - DNA, 25 bp, Homo sapien
tatgttattatattccgtaggtaga

SEQ ID NO: 3566800 - DNA, 25 bp, Homo sapien
ccgtaggtagatgtgtaacctcttc

SEQ ID NO: 3566801 - DNA, 25 bp, Homo sapien
catccagtggaggtttgtcgggcac

SEQ ID NO: 3566802 - DNA, 25 bp, Homo sapien
gttacagtagcgtagcgtgcccgtg

SEQ ID NO: 3566803 - DNA, 25 bp, Homo sapien
catccagtgacaaaccatccagtgg

SEQ ID NO: 3566804 - DNA, 25 bp, Homo sapien
tgcatgtcctttgcgcctgtgacca

SEQ ID NO: 3566805 - DNA, 25 bp, Homo sapien
caggcacggtttggaaatattcaca

SEQ ID NO: 3566806 - DNA, 25 bp, Homo sapien
tgcgctgctaccgttgacttccagg

SEQ ID NO: 3566807 - DNA, 25 bp, Homo sapien
gatgaattcttatcccctgcccctt

SEQ ID NO: 3566808 - DNA, 25 bp, Homo sapien
tcaacctaagttcggttccgatgaa

SEQ ID NO: 3566809 - DNA, 25 bp, Homo sapien
taacaagtgtgtcttacgtgccacc

SEQ ID NO: 3566810 - DNA, 25 bp, Homo sapien
cctgtaggactctcattcgggatga

SEQ ID NO: 3566811 - DNA, 25 bp, Homo sapien
tcacttagccatggtggacccagcg

SEQ ID NO: 3566812 - DNA, 25 bp, Homo sapien
tagcaagctgccgaaccaaaagaat

SEQ ID NO: 3566813 - DNA, 25 bp, Homo sapien
tgcggcgtctgtctgaaccacgcgg

SEQ ID NO: 3566814 - DNA, 25 bp, Homo sapien
ggccttgagggacgctttgtctgtc

SEQ ID NO: 3566815 - DNA, 25 bp, Homo sapien
gatgttgtgtgtatcgagaggccaa

SEQ ID NO: 3566816 - DNA, 25 bp, Homo sapien
ctggctgcggcgtctgtctgaacca

SEQ ID NO: 3566817 - DNA, 25 bp, Homo sapien
ctgtgcatttctggttgcaccgcgg

SEQ ID NO: 3566818 - DNA, 25 bp, Homo sapien
gtgcatttctggttgcaccgcggcg

SEQ ID NO: 3566819 - DNA, 25 bp, Homo sapien
ctgtgacgcgcaagtctgagggtct

SEQ ID NO: 3566820 - DNA, 25 bp, Homo sapien
agtctgtcctgtgacgcgcaagtct

SEQ ID NO: 3566821 - DNA, 25 bp, Homo sapien
accaacatgtaaccggcatgtttcc

SEQ ID NO: 3566822 - DNA, 25 bp, Homo sapien
agcaccaacatgtaaccggcatgtt

SEQ ID NO: 3566823 - DNA, 25 bp, Homo sapien
acatgtaaccggcatgtttccagca

SEQ ID NO: 3566824 - DNA, 25 bp, Homo sapien
cccagcaccaacatgtaaccggcat

SEQ ID NO: 3566825 - DNA, 25 bp, Homo sapien
aaaggcagcgacatgtctactggga

SEQ ID NO: 3566826 - DNA, 25 bp, Homo sapien
cacctttggttgtttcacggagcag

SEQ ID NO: 3566827 - DNA, 25 bp, Homo sapien
tgggcaaattactctgaaggcaggg

SEQ ID NO: 3566828 - DNA, 25 bp, Homo sapien
tggttatgccacgagctccaaggct

SEQ ID NO: 3566829 - DNA, 25 bp, Homo sapien
agttctacgtagctgggaggcctca

SEQ ID NO: 3566830 - DNA, 25 bp, Homo sapien
ccatcacggcggaaggcgaaaggcc

SEQ ID NO: 3566831 - DNA, 25 bp, Homo sapien
accatcacggcggaaggcgaaaggc

SEQ ID NO: 3566832 - DNA, 25 bp, Homo sapien
ctcaccatcacggcggaaggcgaaa

SEQ ID NO: 3566833 - DNA, 25 bp, Homo sapien
aaaggcatcgtctggccactctagg

SEQ ID NO: 3566834 - DNA, 25 bp, Homo sapien
tgagacttgttcaccaccatgggaa

SEQ ID NO: 3566835 - DNA, 25 bp, Homo sapien
gagtatctgcgctacccagagggtg

SEQ ID NO: 3566836 - DNA, 25 bp, Homo sapien
gagacaaagccttccgcagtcagct

SEQ ID NO: 3566837 - DNA, 25 bp, Homo sapien
aataagctcgatgtctttgcccagg

SEQ ID NO: 3566838 - DNA, 25 bp, Homo sapien
ctcgatgtctttgcccaggagctcc

SEQ ID NO: 3566839 - DNA, 25 bp, Homo sapien
cccaataagctcgatgtctttgccc

SEQ ID NO: 3566840 - DNA, 25 bp, Homo sapien
taagctcgatgtctttgcccaggag

SEQ ID NO: 3566841 - DNA, 25 bp, Homo sapien
cgcctcggtccacaggaaccttcat

SEQ ID NO: 3566842 - DNA, 25 bp, Homo sapien
ccaccgcctcggtccacaggaacct

SEQ ID NO: 3566843 - DNA, 25 bp, Homo sapien
tgttctgcgcttggcccaccgcctc

SEQ ID NO: 3566844 - DNA, 25 bp, Homo sapien
tcctgttctgcgcttggcccaccgc

SEQ ID NO: 3566845 - DNA, 25 bp, Homo sapien
ctgctctgactgtaaggatgggctc

SEQ ID NO: 3566846 - DNA, 25 bp, Homo sapien
agtctgggattgtcatgcctgggca

SEQ ID NO: 3566847 - DNA, 25 bp, Homo sapien
aagggaggtcgtgtcggctcctaca

SEQ ID NO: 3566848 - DNA, 25 bp, Homo sapien
tccaggacggaaatctcccagattt

SEQ ID NO: 3566849 - DNA, 25 bp, Homo sapien
catgccgggagctgattccatggct

SEQ ID NO: 3566850 - DNA, 25 bp, Homo sapien
cccagacagcacctagagttgtcac

SEQ ID NO: 3566851 - DNA, 25 bp, Homo sapien
ccgcatgccgggagctgattccatg

SEQ ID NO: 3566852 - DNA, 25 bp, Homo sapien
gagttgtcacaaggagtgaaaggcc

SEQ ID NO: 3566853 - DNA, 25 bp, Homo sapien
tggcagtggcatgcatccggcaatc

SEQ ID NO: 3566854 - DNA, 25 bp, Homo sapien
ttcggaccgcgcttgtgggataaca

SEQ ID NO: 3566855 - DNA, 25 bp, Homo sapien
tgcagcgtgaccctccttgaagcac

SEQ ID NO: 3566856 - DNA, 25 bp, Homo sapien
gatcaagagtttatgcaagacgagg

SEQ ID NO: 3566857 - DNA, 25 bp, Homo sapien
acatccgggagcattgtcaccgcca

SEQ ID NO: 3566858 - DNA, 25 bp, Homo sapien
ctgagcagacaatagcaggcggacg

SEQ ID NO: 3566859 - DNA, 25 bp, Homo sapien
cgccactcacgagggcacacaagga

SEQ ID NO: 3566860 - DNA, 25 bp, Homo sapien
aggcctgagcagacaatagcaggcg

SEQ ID NO: 3566861 - DNA, 25 bp, Homo sapien
tggtttgagtgggaccgaacccatc

SEQ ID NO: 3566862 - DNA, 25 bp, Homo sapien
ttctgggtcttcttgacaccacgga

SEQ ID NO: 3566863 - DNA, 25 bp, Homo sapien
tggtgttgacagcacccagactttg

SEQ ID NO: 3566864 - DNA, 25 bp, Homo sapien
tagagccattgagtcttgaggagac

SEQ ID NO: 3566865 - DNA, 25 bp, Homo sapien
ggcagctgcgcctcccagaaggcag

SEQ ID NO: 3566866 - DNA, 25 bp, Homo sapien
ggtcacagcgcctttcgggggctcc

SEQ ID NO: 3566867 - DNA, 25 bp, Homo sapien
gccacttgccctcagtggcggctga

SEQ ID NO: 3566868 - DNA, 25 bp, Homo sapien
tcttggagagtgagccttgcggtca

SEQ ID NO: 3566869 - DNA, 25 bp, Homo sapien
gaagctaaagtaccagaagctagga

SEQ ID NO: 3566870 - DNA, 25 bp, Homo sapien
gcctggcccaatttacatcttaaaa

SEQ ID NO: 3566871 - DNA, 25 bp, Homo sapien
tatttccaagtaaagtcacagaagc

SEQ ID NO: 3566872 - DNA, 25 bp, Homo sapien
cagaagctaggacttcaacgtttcc

SEQ ID NO: 3566873 - DNA, 25 bp, Homo sapien
ttgaggcctggctcctcgcctgcag

SEQ ID NO: 3566874 - DNA, 25 bp, Homo sapien
aacccttgaggcctggctcctcgcc

SEQ ID NO: 3566875 - DNA, 25 bp, Homo sapien
cccttgaggcctggctcctcgcctg

SEQ ID NO: 3566876 - DNA, 25 bp, Homo sapien
tgaacccttgaggcctggctcctcg

SEQ ID NO: 3566877 - DNA, 25 bp, Homo sapien
gcagccactcagcaaataggcctct

SEQ ID NO: 3566878 - DNA, 25 bp, Homo sapien
tgtgaccactagacttgttctcagc

SEQ ID NO: 3566879 - DNA, 25 bp, Homo sapien
agccgggcctcatatctctgcaaag

SEQ ID NO: 3566880 - DNA, 25 bp, Homo sapien
gccactcagcaaataggcctcttgt

SEQ ID NO: 3566881 - DNA, 25 bp, Homo sapien
gaacgagagtctttctggcccgaag

SEQ ID NO: 3566882 - DNA, 25 bp, Homo sapien
caaagcgagccaccgtggagatcca

SEQ ID NO: 3566883 - DNA, 25 bp, Homo sapien
aaccaaagtggattcatggcgaccc

SEQ ID NO: 3566884 - DNA, 25 bp, Homo sapien
gacctgaggtgacgctacaaacgag

SEQ ID NO: 3566885 - DNA, 25 bp, Homo sapien
actgctttcggacatgctttctgga

SEQ ID NO: 3566886 - DNA, 25 bp, Homo sapien
ctcctggactgctttcggacatgct

SEQ ID NO: 3566887 - DNA, 25 bp, Homo sapien
tgtggagagccagcgtgtggggact

SEQ ID NO: 3566888 - DNA, 25 bp, Homo sapien
taataatctcctggactgctttcgg

SEQ ID NO: 3566889 - DNA, 25 bp, Homo sapien
tctgcaaatataacggcggcctaac

SEQ ID NO: 3566890 - DNA, 25 bp, Homo sapien
ttaatgctgcaaagctcatcgcccc

SEQ ID NO: 3566891 - DNA, 25 bp, Homo sapien
tatgacgcctcgtaaggacagagac

SEQ ID NO: 3566892 - DNA, 25 bp, Homo sapien
caaaggatatgtctgggtcccctca

SEQ ID NO: 3566893 - DNA, 25 bp, Homo sapien
tgtcaagtcaatgcacgagggctct

SEQ ID NO: 3566894 - DNA, 25 bp, Homo sapien
gattaaataacacacgggaggcacg

SEQ ID NO: 3566895 - DNA, 25 bp, Homo sapien
cctgtgctgccggagaggctgtcaa

SEQ ID NO: 3566896 - DNA, 25 bp, Homo sapien
ggtgactgaccctatccagagccaa

SEQ ID NO: 3566897 - DNA, 25 bp, Homo sapien
atctgttcctcgacgttcggtctct

SEQ ID NO: 3566898 - DNA, 25 bp, Homo sapien
tctgttcctcgacgttcggtctctg

SEQ ID NO: 3566899 - DNA, 25 bp, Homo sapien
ctggctgaacattgagtaacgaaca

SEQ ID NO: 3566900 - DNA, 25 bp, Homo sapien
gctgaacattgagtaacgaacaaaa

SEQ ID NO: 3566901 - DNA, 25 bp, Homo sapien
caaaatgaaagtccggaaccttctg

SEQ ID NO: 3566902 - DNA, 25 bp, Homo sapien
tgcactaattttaaagtctggctga

SEQ ID NO: 3566903 - DNA, 25 bp, Homo sapien
tgtggccagcccataaatgagttct

SEQ ID NO: 3566904 - DNA, 25 bp, Homo sapien
gccccgcctgggaaaggcgcaatca

SEQ ID NO: 3566905 - DNA, 25 bp, Homo sapien
agttttcctgcactgcgactcaagg

SEQ ID NO: 3566906 - DNA, 25 bp, Homo sapien
atgaggcgcctctacggacagttcc

SEQ ID NO: 3566907 - DNA, 25 bp, Homo sapien
ggagtttatcgtaagtagggtcatc

SEQ ID NO: 3566908 - DNA, 25 bp, Homo sapien
tagggtcatcataagggaatttctg

SEQ ID NO: 3566909 - DNA, 25 bp, Homo sapien
cgtaagtagggtcatcataagggaa

SEQ ID NO: 3566910 - DNA, 25 bp, Homo sapien
atcgtaagtagggtcatcataaggg

SEQ ID NO: 3566911 - DNA, 25 bp, Homo sapien
tacagactctcagtcatgtgcacac

SEQ ID NO: 3566912 - DNA, 25 bp, Homo sapien
tcaacttacacaacagctatgctgc

SEQ ID NO: 3566913 - DNA, 25 bp, Homo sapien
tgaaacccagcaggtgcgctaagaa

SEQ ID NO: 3566914 - DNA, 25 bp, Homo sapien
tgtgcacacaacaggctcaacttac

SEQ ID NO: 3566915 - DNA, 25 bp, Homo sapien
tacccagtgcctcgacagcaagtgt

SEQ ID NO: 3566916 - DNA, 25 bp, Homo sapien
tgtgcctagcttacagacacgcctc

SEQ ID NO: 3566917 - DNA, 25 bp, Homo sapien
ctagcaacgagcttaggcccatacc

SEQ ID NO: 3566918 - DNA, 25 bp, Homo sapien
agccctgctgactctcgaggtcaca

SEQ ID NO: 3566919 - DNA, 25 bp, Homo sapien
gaactcctggttcctacgctgagaa

SEQ ID NO: 3566920 - DNA, 25 bp, Homo sapien
ggtgcactaatgactccaggtaaaa

SEQ ID NO: 3566921 - DNA, 25 bp, Homo sapien
taacccatggaactagaactcctgg

SEQ ID NO: 3566922 - DNA, 25 bp, Homo sapien
tcttgagaagcaacaacagccagtg

SEQ ID NO: 3566923 - DNA, 25 bp, Homo sapien
gcagtagacatttccatgcaaaagc

SEQ ID NO: 3566924 - DNA, 25 bp, Homo sapien
tctcagtggtgcaactgtgcagtag

SEQ ID NO: 3566925 - DNA, 25 bp, Homo sapien
caactgtgcagtagacatttccatg

SEQ ID NO: 3566926 - DNA, 25 bp, Homo sapien
tagacatttccatgcaaaagcaaaa

SEQ ID NO: 3566927 - DNA, 25 bp, Homo sapien
cagggtggctttcgtaaccaacaga

SEQ ID NO: 3566928 - DNA, 25 bp, Homo sapien
tctagggataaaagccagtgtcact

SEQ ID NO: 3566929 - DNA, 25 bp, Homo sapien
tgtaagggccaatctaggacaaagg

SEQ ID NO: 3566930 - DNA, 25 bp, Homo sapien
aatatgttcacatgacagagggcac

SEQ ID NO: 3566931 - DNA, 25 bp, Homo sapien
tccatcacacccaaactactgcctt

SEQ ID NO: 3566932 - DNA, 25 bp, Homo sapien
agacccgattttggctccatgcagc

SEQ ID NO: 3566933 - DNA, 25 bp, Homo sapien
tccatgcagcgtgccatgctgcctt

SEQ ID NO: 3566934 - DNA, 25 bp, Homo sapien
cttcatagccttcccgatacccttc

SEQ ID NO: 3566935 - DNA, 25 bp, Homo sapien
gtgaagaagaagcatgcttcatcaa

SEQ ID NO: 3566936 - DNA, 25 bp, Homo sapien
gaagaagaagcatgcttcatcaaat

SEQ ID NO: 3566937 - DNA, 25 bp, Homo sapien
gaagaagcatgcttcatcaaatcaa

SEQ ID NO: 3566938 - DNA, 25 bp, Homo sapien
tgtgaagaagaagcatgcttcatca

SEQ ID NO: 3566939 - DNA, 25 bp, Homo sapien
gcatctggcccggaatctacttttc

SEQ ID NO: 3566940 - DNA, 25 bp, Homo sapien
caccgcatctggcccggaatctact

SEQ ID NO: 3566941 - DNA, 25 bp, Homo sapien
ccgcatctggcccggaatctacttt

SEQ ID NO: 3566942 - DNA, 25 bp, Homo sapien
catctggcccggaatctacttttca

SEQ ID NO: 3566943 - DNA, 25 bp, Homo sapien
tggaactgccactatcttaacctgc

SEQ ID NO: 3566944 - DNA, 25 bp, Homo sapien
cacaaaatgttctccgactggtacc

SEQ ID NO: 3566945 - DNA, 25 bp, Homo sapien
cagtcaccaaacatgcaaggagtgg

SEQ ID NO: 3566946 - DNA, 25 bp, Homo sapien
ccatgaagcagggtgcatagctccc

SEQ ID NO: 3566947 - DNA, 25 bp, Homo sapien
gactgctaaatgttcggccgctttc

SEQ ID NO: 3566948 - DNA, 25 bp, Homo sapien
ttaactaacatctatggacgcgtcc

SEQ ID NO: 3566949 - DNA, 25 bp, Homo sapien
tcacagcgcgagctaaataaacgtc

SEQ ID NO: 3566950 - DNA, 25 bp, Homo sapien
aaccagggtggaacgtttagctcag

SEQ ID NO: 3566951 - DNA, 25 bp, Homo sapien
tgtcgcagcacgaggggctccccag

SEQ ID NO: 3566952 - DNA, 25 bp, Homo sapien
ccccactgtcgcagcacgaggggct

SEQ ID NO: 3566953 - DNA, 25 bp, Homo sapien
agctcccccactgtcgcagcacgag

SEQ ID NO: 3566954 - DNA, 25 bp, Homo sapien
gtcgcagcacgaggggctccccagg

SEQ ID NO: 3566955 - DNA, 25 bp, Homo sapien
ggtacatctatcagcacatccatga

SEQ ID NO: 3566956 - DNA, 25 bp, Homo sapien
ggtgtggtcgggtacatctatcagc

SEQ ID NO: 3566957 - DNA, 25 bp, Homo sapien
tggtcgggtacatctatcagcacat

SEQ ID NO: 3566958 - DNA, 25 bp, Homo sapien
gcacatccatgaatactgccgtatg

SEQ ID NO: 3566959 - DNA, 25 bp, Homo sapien
aaaggcagctcccagatggcaaagg

SEQ ID NO: 3566960 - DNA, 25 bp, Homo sapien
tgtcctcccagaggacgaggcggcc

SEQ ID NO: 3566961 - DNA, 25 bp, Homo sapien
acagggaaggcgggtctggaagagc

SEQ ID NO: 3566962 - DNA, 25 bp, Homo sapien
aagagcagctgggcacgtgccccgc

SEQ ID NO: 3566963 - DNA, 25 bp, Homo sapien
atgcgcacgcccaagggacgccagg

SEQ ID NO: 3566964 - DNA, 25 bp, Homo sapien
tccccaatgcgcacgcccaagggac

SEQ ID NO: 3566965 - DNA, 25 bp, Homo sapien
gagcatcaggcccacacttgtccct

SEQ ID NO: 3566966 - DNA, 25 bp, Homo sapien
aggcgctccccaatgcgcacgccca

SEQ ID NO: 3566967 - DNA, 25 bp, Homo sapien
ctgggagacgaccagacagggcggg

SEQ ID NO: 3566968 - DNA, 25 bp, Homo sapien
tgggagacgaccagacagggcgggg

SEQ ID NO: 3566969 - DNA, 25 bp, Homo sapien
ggagacgaccagacagggcggggtg

SEQ ID NO: 3566970 - DNA, 25 bp, Homo sapien
ctctcatccgccatcacgatggcat

SEQ ID NO: 3566971 - DNA, 25 bp, Homo sapien
gcatcgaatatgtcctgactgccag

SEQ ID NO: 3566972 - DNA, 25 bp, Homo sapien
ggcatcgaatatgtcctgactgcca

SEQ ID NO: 3566973 - DNA, 25 bp, Homo sapien
ccggcagcttcaggcacaaatgctc

SEQ ID NO: 3566974 - DNA, 25 bp, Homo sapien
tttctgcagccccgcggtgccgtag

SEQ ID NO: 3566975 - DNA, 25 bp, Homo sapien
tgcagccccgcggtgccgtagcaga

SEQ ID NO: 3566976 - DNA, 25 bp, Homo sapien
tgccgtagcagacccggcagcttca

SEQ ID NO: 3566977 - DNA, 25 bp, Homo sapien
ggcaggccgggtaagaacggcacgc

SEQ ID NO: 3566978 - DNA, 25 bp, Homo sapien
caggccgggtaagaacggcacgcgg

SEQ ID NO: 3566979 - DNA, 25 bp, Homo sapien
taagaacggcacgcgggagggccca

SEQ ID NO: 3566980 - DNA, 25 bp, Homo sapien
cggcacgcgggagggcccaaagcag

SEQ ID NO: 3566981 - DNA, 25 bp, Homo sapien
tccctgcggccgctagaattctctt

SEQ ID NO: 3566982 - DNA, 25 bp, Homo sapien
ggggccgccattgcgccgcggacgg

SEQ ID NO: 3566983 - DNA, 25 bp, Homo sapien
tctcttcgccgctctgggacggtgt

SEQ ID NO: 3566984 - DNA, 25 bp, Homo sapien
gacggtgtccctgcggccgctagaa

SEQ ID NO: 3566985 - DNA, 25 bp, Homo sapien
tacaggtgcataccacaactcctgg

SEQ ID NO: 3566986 - DNA, 25 bp, Homo sapien
catgatgttggccagctggtctcga

SEQ ID NO: 3566987 - DNA, 25 bp, Homo sapien
gtagagatagggggtttcatgatgt

SEQ ID NO: 3566988 - DNA, 25 bp, Homo sapien
caggtgcataccacaactcctggct

SEQ ID NO: 3566989 - DNA, 25 bp, Homo sapien
tacgtggtgccgatgagtcaggtcc

SEQ ID NO: 3566990 - DNA, 25 bp, Homo sapien
tgcccaggtatgcattaaaatttcc

SEQ ID NO: 3566991 - DNA, 25 bp, Homo sapien
ggtccatgcccaggtatgcattaaa

SEQ ID NO: 3566992 - DNA, 25 bp, Homo sapien
aaagtaaggtgagtatacgtggtgc

SEQ ID NO: 3566993 - DNA, 25 bp, Homo sapien
tgcacacgttggtgtccggttgcac

SEQ ID NO: 3566994 - DNA, 25 bp, Homo sapien
atcatgtttcatgcacacgttggtg

SEQ ID NO: 3566995 - DNA, 25 bp, Homo sapien
ggaatcatgtttcatgcacacgttg

SEQ ID NO: 3566996 - DNA, 25 bp, Homo sapien
catttggaatcatgtttcatgcaca

SEQ ID NO: 3566997 - DNA, 25 bp, Homo sapien
tcttaggatgtagccggaatttgct

SEQ ID NO: 3566998 - DNA, 25 bp, Homo sapien
ctggtcaccctgaccgctaattctt

SEQ ID NO: 3566999 - DNA, 25 bp, Homo sapien
tgtagccggaatttgctgaaaggtt

SEQ ID NO: 3567000 - DNA, 25 bp, Homo sapien
tggtcaccctgaccgctaattcttg

SEQ ID NO: 3567001 - DNA, 25 bp, Homo sapien
gagagaggcccagcccgaaatgatt

SEQ ID NO: 3567002 - DNA, 25 bp, Homo sapien
atgagagaggcccagcccgaaatga

SEQ ID NO: 3567003 - DNA, 25 bp, Homo sapien
gaggcccagcccgaaatgattccct

SEQ ID NO: 3567004 - DNA, 25 bp, Homo sapien
gagaggcccagcccgaaatgattcc

SEQ ID NO: 3567005 - DNA, 25 bp, Homo sapien
ccccatcgatggaggtattcaagca

SEQ ID NO: 3567006 - DNA, 25 bp, Homo sapien
gacaccgggacagcaagttattctc

SEQ ID NO: 3567007 - DNA, 25 bp, Homo sapien
agcttgtccagcaacctcgagggag

SEQ ID NO: 3567008 - DNA, 25 bp, Homo sapien
aagctaaacagaacgtggactcagg

SEQ ID NO: 3567009 - DNA, 25 bp, Homo sapien
acttctcaaagctgggactcctcac

SEQ ID NO: 3567010 - DNA, 25 bp, Homo sapien
ttacttctcaaagctgggactcctc

SEQ ID NO: 3567011 - DNA, 25 bp, Homo sapien
tacttctcaaagctgggactcctca

SEQ ID NO: 3567012 - DNA, 25 bp, Homo sapien
aatgggtccatgctgtcggtctcca

SEQ ID NO: 3567013 - DNA, 25 bp, Homo sapien
caaatgggtccatgctgtcggtctc

SEQ ID NO: 3567014 - DNA, 25 bp, Homo sapien
gcccaaatgggtccatgctgtcggt

SEQ ID NO: 3567015 - DNA, 25 bp, Homo sapien
aagcccaaatgggtccatgctgtcg

SEQ ID NO: 3567016 - DNA, 25 bp, Homo sapien
aggcggtgcttctcggatcggtaca

SEQ ID NO: 3567017 - DNA, 25 bp, Homo sapien
tcggtacacattgtagccatctggg

SEQ ID NO: 3567018 - DNA, 25 bp, Homo sapien
ggatctcctcctcgaaagcacagtc

SEQ ID NO: 3567019 - DNA, 25 bp, Homo sapien
tcagattccaagtggcccctgaggt

SEQ ID NO: 3567020 - DNA, 25 bp, Homo sapien
gtggacagggaacacgggtccacat

SEQ ID NO: 3567021 - DNA, 25 bp, Homo sapien
gcagctctgagcaatccacagtgga

SEQ ID NO: 3567022 - DNA, 25 bp, Homo sapien
cagctctgagcaatccacagtggac

SEQ ID NO: 3567023 - DNA, 25 bp, Homo sapien
cacagtggacagggaacacgggtcc

SEQ ID NO: 3567024 - DNA, 25 bp, Homo sapien
gacgtttgtgctacagactgtccct

SEQ ID NO: 3567025 - DNA, 25 bp, Homo sapien
ccaccagcagtgaccttccacataa

SEQ ID NO: 3567026 - DNA, 25 bp, Homo sapien
tggccaccagcagtgaccttccaca

SEQ ID NO: 3567027 - DNA, 25 bp, Homo sapien
ggacgtttgtgctacagactgtccc

SEQ ID NO: 3567028 - DNA, 25 bp, Homo sapien
acttaatcggtctttgcaatctttc

SEQ ID NO: 3567029 - DNA, 25 bp, Homo sapien
aggaaatcgtcggacatgcacttaa

SEQ ID NO: 3567030 - DNA, 25 bp, Homo sapien
ctttccctcgaagttgcacgcgggt

SEQ ID NO: 3567031 - DNA, 25 bp, Homo sapien
aatcgtcggacatgcacttaatcgg

SEQ ID NO: 3567032 - DNA, 25 bp, Homo sapien
gcacgctgtgcacgcccttgatggc

SEQ ID NO: 3567033 - DNA, 25 bp, Homo sapien
cagcccctgcatcttgccgtcggcg

SEQ ID NO: 3567034 - DNA, 25 bp, Homo sapien
ccatgcagaggtaccgcacgctgtg

SEQ ID NO: 3567035 - DNA, 25 bp, Homo sapien
acggtccgcagagcgactgccttga

SEQ ID NO: 3567036 - DNA, 25 bp, Homo sapien
aggtgtacaggtgccgcaggcggat

SEQ ID NO: 3567037 - DNA, 25 bp, Homo sapien
gtccacgacgccgtcggcacggatg

SEQ ID NO: 3567038 - DNA, 25 bp, Homo sapien
tcgccccagccgtagtgcacgtggg

SEQ ID NO: 3567039 - DNA, 25 bp, Homo sapien
gccggccaggatccatacgtggacc

SEQ ID NO: 3567040 - DNA, 25 bp, Homo sapien
ggtgcccaagacacccgagcatttc

SEQ ID NO: 3567041 - DNA, 25 bp, Homo sapien
atatagtagcgccttacgggcccca

SEQ ID NO: 3567042 - DNA, 25 bp, Homo sapien
tatcgggattgcatcaagcctccgc

SEQ ID NO: 3567043 - DNA, 25 bp, Homo sapien
tggtcgtggccctagatcctggacg

SEQ ID NO: 3567044 - DNA, 25 bp, Homo sapien
gaggaggcctcgcttagcggccggg

SEQ ID NO: 3567045 - DNA, 25 bp, Homo sapien
cagcggccccgaggttcttggctgg

SEQ ID NO: 3567046 - DNA, 25 bp, Homo sapien
gcggccccgaggttcttggctggga

SEQ ID NO: 3567047 - DNA, 25 bp, Homo sapien
aggaggcctcgcttagcggccgggt

SEQ ID NO: 3567048 - DNA, 25 bp, Homo sapien
ctgacggttacagagatggactgcc

SEQ ID NO: 3567049 - DNA, 25 bp, Homo sapien
gttacagagatggactgccgggcct

SEQ ID NO: 3567050 - DNA, 25 bp, Homo sapien
tcatgtgaggtagctgacggttaca

SEQ ID NO: 3567051 - DNA, 25 bp, Homo sapien
tgccgggcctcgagggtttgcccca

SEQ ID NO: 3567052 - DNA, 25 bp, Homo sapien
gccacaaagggtatttctgtacgtg

SEQ ID NO: 3567053 - DNA, 25 bp, Homo sapien
gacagaagtagccacaaagggtatt

SEQ ID NO: 3567054 - DNA, 25 bp, Homo sapien
tttctgtacgtgaatgctcttttcc

SEQ ID NO: 3567055 - DNA, 25 bp, Homo sapien
gggtatttctgtacgtgaatgctct

SEQ ID NO: 3567056 - DNA, 25 bp, Homo sapien
ccgcaagtgctttgatttacaggac

SEQ ID NO: 3567057 - DNA, 25 bp, Homo sapien
caggacagatgtttgccagccgaca

SEQ ID NO: 3567058 - DNA, 25 bp, Homo sapien
tctcggagacctgtcaaacctggcg

SEQ ID NO: 3567059 - DNA, 25 bp, Homo sapien
aatgcgttcgcagcccatgatggtg

SEQ ID NO: 3567060 - DNA, 25 bp, Homo sapien
tggcacaccctagggctgagggccc

SEQ ID NO: 3567061 - DNA, 25 bp, Homo sapien
gataagcagggcaggtactgggcgg

SEQ ID NO: 3567062 - DNA, 25 bp, Homo sapien
ccatggagggcaccgcagataagca

SEQ ID NO: 3567063 - DNA, 25 bp, Homo sapien
ggtactgggcggtcagagccatgat

SEQ ID NO: 3567064 - DNA, 25 bp, Homo sapien
tgctctgcaggttgcgggcacatga

SEQ ID NO: 3567065 - DNA, 25 bp, Homo sapien
tgtctccatactgcatcctcgggtg

SEQ ID NO: 3567066 - DNA, 25 bp, Homo sapien
gccatttgcagtgagtacctcgggt

SEQ ID NO: 3567067 - DNA, 25 bp, Homo sapien
tcctcgggtgtttcctagttggcca

SEQ ID NO: 3567068 - DNA, 25 bp, Homo sapien
tgcttgggggttgatcctaatcgcc

SEQ ID NO: 3567069 - DNA, 25 bp, Homo sapien
ctaatttaggggccaaatggtcaat

SEQ ID NO: 3567070 - DNA, 25 bp, Homo sapien
gttgatcctaatcgcccctaattta

SEQ ID NO: 3567071 - DNA, 25 bp, Homo sapien
tgaccaagtcgagggacccccagga

SEQ ID NO: 3567072 - DNA, 25 bp, Homo sapien
ttactcgttatccaaacacagcagc

SEQ ID NO: 3567073 - DNA, 25 bp, Homo sapien
tactcgttatccaaacacagcagct

SEQ ID NO: 3567074 - DNA, 25 bp, Homo sapien
actcgttatccaaacacagcagctg

SEQ ID NO: 3567075 - DNA, 25 bp, Homo sapien
ctcgttatccaaacacagcagctgc

SEQ ID NO: 3567076 - DNA, 25 bp, Homo sapien
agcagaagttgatattgattcgaag

SEQ ID NO: 3567077 - DNA, 25 bp, Homo sapien
gcagaagttgatattgattcgaagt

SEQ ID NO: 3567078 - DNA, 25 bp, Homo sapien
cagaagttgatattgattcgaagtt

SEQ ID NO: 3567079 - DNA, 25 bp, Homo sapien
tagcagaagttgatattgattcgaa

SEQ ID NO: 3567080 - DNA, 25 bp, Homo sapien
gaagtgaggcccccatgagccaggg

SEQ ID NO: 3567081 - DNA, 25 bp, Homo sapien
tgaagtgaggcccccatgagccagg

SEQ ID NO: 3567082 - DNA, 25 bp, Homo sapien
agtgaggcccccatgagccagggac

SEQ ID NO: 3567083 - DNA, 25 bp, Homo sapien
aagtgaggcccccatgagccaggga

SEQ ID NO: 3567084 - DNA, 25 bp, Homo sapien
tgaggcgcatctctgcatgcctaga

SEQ ID NO: 3567085 - DNA, 25 bp, Homo sapien
cgatacgcctttttactatccttgg

SEQ ID NO: 3567086 - DNA, 25 bp, Homo sapien
tatccttgggtgaggcgcatctctg

SEQ ID NO: 3567087 - DNA, 25 bp, Homo sapien
tttttactatccttgggtgaggcgc

SEQ ID NO: 3567088 - DNA, 25 bp, Homo sapien
tggccgtaggcgagggttgatcgct

SEQ ID NO: 3567089 - DNA, 25 bp, Homo sapien
tctctgatttcgacggccgaggagg

SEQ ID NO: 3567090 - DNA, 25 bp, Homo sapien
gggttgatcgctgggcctggaatct

SEQ ID NO: 3567091 - DNA, 25 bp, Homo sapien
tcaaggcggtctctgatttcgacgg

SEQ ID NO: 3567092 - DNA, 25 bp, Homo sapien
cccgaggtacggttgtgcacactgc

SEQ ID NO: 3567093 - DNA, 25 bp, Homo sapien
gcacactgcgtttctcaccctggga

SEQ ID NO: 3567094 - DNA, 25 bp, Homo sapien
gtttgcccgaggtacggttgtgcac

SEQ ID NO: 3567095 - DNA, 25 bp, Homo sapien
tacggttgtgcacactgcgtttctc

SEQ ID NO: 3567096 - DNA, 25 bp, Homo sapien
ctttctcggaaggtgtgaacatgac

SEQ ID NO: 3567097 - DNA, 25 bp, Homo sapien
ttgtcatgagttgaacactatacac

SEQ ID NO: 3567098 - DNA, 25 bp, Homo sapien
ggcgctcgcagttcgtttcttttgg

SEQ ID NO: 3567099 - DNA, 25 bp, Homo sapien
taagcagagatatgcgtcccttcta

SEQ ID NO: 3567100 - DNA, 25 bp, Homo sapien
tgttatccccttatgccactgccat

SEQ ID NO: 3567101 - DNA, 25 bp, Homo sapien
tatgccaaaagggaatgatgttatc

SEQ ID NO: 3567102 - DNA, 25 bp, Homo sapien
gaaacaaatatgcaactatgccaaa

SEQ ID NO: 3567103 - DNA, 25 bp, Homo sapien
gaatgatgttatccccttatgccac

SEQ ID NO: 3567104 - DNA, 25 bp, Homo sapien
acatgtatgatgtctgggtcgggac

SEQ ID NO: 3567105 - DNA, 25 bp, Homo sapien
gatctagctaggactggccggaaca

SEQ ID NO: 3567106 - DNA, 25 bp, Homo sapien
tgagctcgctggttctgttacaagg

SEQ ID NO: 3567107 - DNA, 25 bp, Homo sapien
gggctccaagcatcacctgtggtga

SEQ ID NO: 3567108 - DNA, 25 bp, Homo sapien
gacagggagccctttgaagatatga

SEQ ID NO: 3567109 - DNA, 25 bp, Homo sapien
aatgcaatttatctcctgggtcaga

SEQ ID NO: 3567110 - DNA, 25 bp, Homo sapien
cagtggcgtccaacgagccatagga

SEQ ID NO: 3567111 - DNA, 25 bp, Homo sapien
tctatggattaacagggtgctgccc

SEQ ID NO: 3567112 - DNA, 25 bp, Homo sapien
gcacggtgagaaggcccctagagaa

SEQ ID NO: 3567113 - DNA, 25 bp, Homo sapien
cagtctaagagcgtcgcagggctgt

SEQ ID NO: 3567114 - DNA, 25 bp, Homo sapien
gagcaggatggagcttgcacggtga

SEQ ID NO: 3567115 - DNA, 25 bp, Homo sapien
gagcttgcacggtgagaaggcccct

SEQ ID NO: 3567116 - DNA, 25 bp, Homo sapien
cagttgtgtacatccagtccagtgg

SEQ ID NO: 3567117 - DNA, 25 bp, Homo sapien
gacaatctgattgggctctgagaca

SEQ ID NO: 3567118 - DNA, 25 bp, Homo sapien
tcagaaagtcgacggatgatccctc

SEQ ID NO: 3567119 - DNA, 25 bp, Homo sapien
gcacatacatcacaacgagggtcgg

SEQ ID NO: 3567120 - DNA, 25 bp, Homo sapien
ggctgtcgctgatccaaaaaaggca

SEQ ID NO: 3567121 - DNA, 25 bp, Homo sapien
taaagttgtccaagggtctctccca

SEQ ID NO: 3567122 - DNA, 25 bp, Homo sapien
aacagagtggcagcgaggacttcaa

SEQ ID NO: 3567123 - DNA, 25 bp, Homo sapien
tatgtcccgattaatagcaacaggg

SEQ ID NO: 3567124 - DNA, 25 bp, Homo sapien
atggtaagattctccactgttgcac

SEQ ID NO: 3567125 - DNA, 25 bp, Homo sapien
ccactgttgcaccagaaaagtcaga

SEQ ID NO: 3567126 - DNA, 25 bp, Homo sapien
aatccaatggtaagattctccactg

SEQ ID NO: 3567127 - DNA, 25 bp, Homo sapien
aaagaaatccaatggtaagattctc

SEQ ID NO: 3567128 - DNA, 25 bp, Homo sapien
tcatccgaagaaagtgcaccaaggt

SEQ ID NO: 3567129 - DNA, 25 bp, Homo sapien
agtgcaccaaggtgaccctcggcac

SEQ ID NO: 3567130 - DNA, 25 bp, Homo sapien
taaactcttcatccgaagaaagtgc

SEQ ID NO: 3567131 - DNA, 25 bp, Homo sapien
tgcaccaaggtgaccctcggcactg

SEQ ID NO: 3567132 - DNA, 25 bp, Homo sapien
cattcttgctcagggcgatgaacat

SEQ ID NO: 3567133 - DNA, 25 bp, Homo sapien
ccttgaacgtgcactcatcggtgaa

SEQ ID NO: 3567134 - DNA, 25 bp, Homo sapien
ttcatggtgggcgacactcggttcc

SEQ ID NO: 3567135 - DNA, 25 bp, Homo sapien
tacttgtaggactcgtaggcgttgt

SEQ ID NO: 3567136 - DNA, 25 bp, Homo sapien
acgaagaaccggctggccacgccga

SEQ ID NO: 3567137 - DNA, 25 bp, Homo sapien
ctggccacgccgaagatgctcacca

SEQ ID NO: 3567138 - DNA, 25 bp, Homo sapien
acgccgaagatgctcaccacgcccc

SEQ ID NO: 3567139 - DNA, 25 bp, Homo sapien
ctccacgggcgagagctccagcagg

SEQ ID NO: 3567140 - DNA, 25 bp, Homo sapien
tgtcgcgggtgtccgcgtgcgcgcc

SEQ ID NO: 3567141 - DNA, 25 bp, Homo sapien
cgcagccgcttgatgcccagcaggt

SEQ ID NO: 3567142 - DNA, 25 bp, Homo sapien
gtgcgcgccgccgatgcggccgtcg

SEQ ID NO: 3567143 - DNA, 25 bp, Homo sapien
ccagcaggtagtcgccggcgccgct

SEQ ID NO: 3567144 - DNA, 25 bp, Homo sapien
ggagcagcgctaccgcggccgtccc

SEQ ID NO: 3567145 - DNA, 25 bp, Homo sapien
tgccgttgggtgcagtgggtgcggc

SEQ ID NO: 3567146 - DNA, 25 bp, Homo sapien
ggcaggcgcgccaacgagagcgcca

SEQ ID NO: 3567147 - DNA, 25 bp, Homo sapien
caggctctcccagcggcgctccagc

SEQ ID NO: 3567148 - DNA, 25 bp, Homo sapien
gtgcgtcggtcaggcggtcagtgcg

SEQ ID NO: 3567149 - DNA, 25 bp, Homo sapien
acctcgggcaggagtgcgcaaccga

SEQ ID NO: 3567150 - DNA, 25 bp, Homo sapien
agagctgcgcctgtggcgtcccgcg

SEQ ID NO: 3567151 - DNA, 25 bp, Homo sapien
gaggccgagccgctatatatatagc

SEQ ID NO: 3567152 - DNA, 25 bp, Homo sapien
gctcacgggaacttggttcctttgc

SEQ ID NO: 3567153 - DNA, 25 bp, Homo sapien
ctttcggaggctcacgggaacttgg

SEQ ID NO: 3567154 - DNA, 25 bp, Homo sapien
tgctgcctgcccttcgcctttcgga

SEQ ID NO: 3567155 - DNA, 25 bp, Homo sapien
cttcgcctttcggaggctcacggga

SEQ ID NO: 3567156 - DNA, 25 bp, Homo sapien
aaggacaggtagcagggcatagggc

SEQ ID NO: 3567157 - DNA, 25 bp, Homo sapien
ccctcaatctagcagggacccaggc

SEQ ID NO: 3567158 - DNA, 25 bp, Homo sapien
catagggccagaggggatattcagc

SEQ ID NO: 3567159 - DNA, 25 bp, Homo sapien
ttcagcatcccctgctcctttgatt

SEQ ID NO: 3567160 - DNA, 25 bp, Homo sapien
ccaggacgcccgctttgccaagtcc

SEQ ID NO: 3567161 - DNA, 25 bp, Homo sapien
ggacgcccgctttgccaagtcctgg

SEQ ID NO: 3567162 - DNA, 25 bp, Homo sapien
aggacgcccgctttgccaagtcctg

SEQ ID NO: 3567163 - DNA, 25 bp, Homo sapien
acgcccgctttgccaagtcctgggg

SEQ ID NO: 3567164 - DNA, 25 bp, Homo sapien
tggcaggatcgccagtacctctcca

SEQ ID NO: 3567165 - DNA, 25 bp, Homo sapien
tcatcgctgccacgttcattaggtg

SEQ ID NO: 3567166 - DNA, 25 bp, Homo sapien
gataaaagtcatcgctgccacgttc

SEQ ID NO: 3567167 - DNA, 25 bp, Homo sapien
gtacctctccagataaaagtcatcg

SEQ ID NO: 3567168 - DNA, 25 bp, Homo sapien
gactgcatttgaccctgaggggccc

SEQ ID NO: 3567169 - DNA, 25 bp, Homo sapien
cggatagcagcaggatccagcaatg

SEQ ID NO: 3567170 - DNA, 25 bp, Homo sapien
ggctggtggcgtaaaggactgcatt

SEQ ID NO: 3567171 - DNA, 25 bp, Homo sapien
tgtctccgaggctggtggcgtaaag

SEQ ID NO: 3567172 - DNA, 25 bp, Homo sapien
tgatgttcgggttttctcctccgtg

SEQ ID NO: 3567173 - DNA, 25 bp, Homo sapien
ttcctgcgctgaaggtaactgtggg

SEQ ID NO: 3567174 - DNA, 25 bp, Homo sapien
tatctcctgggggtcttggtagctt

SEQ ID NO: 3567175 - DNA, 25 bp, Homo sapien
gctgaatgcggctccatgagttgct

SEQ ID NO: 3567176 - DNA, 25 bp, Homo sapien
ctagaaatgtgagcggctgtagagg

SEQ ID NO: 3567177 - DNA, 25 bp, Homo sapien
tgagcggctgtagaggttgtcaaca

SEQ ID NO: 3567178 - DNA, 25 bp, Homo sapien
tagaggttgtcaacatgagcccttt

SEQ ID NO: 3567179 - DNA, 25 bp, Homo sapien
gctgtagaggttgtcaacatgagcc

SEQ ID NO: 3567180 - DNA, 25 bp, Homo sapien
ttcactttgggcctgtcacctgtca

SEQ ID NO: 3567181 - DNA, 25 bp, Homo sapien
tgtcactccacggtacttgctgatg

SEQ ID NO: 3567182 - DNA, 25 bp, Homo sapien
cagttcatgccggtctgtggtcctt

SEQ ID NO: 3567183 - DNA, 25 bp, Homo sapien
tgctgatgacctttccaggagacgg

SEQ ID NO: 3567184 - DNA, 25 bp, Homo sapien
gccggcccatcccacgtcctctccc

SEQ ID NO: 3567185 - DNA, 25 bp, Homo sapien
cggcccatcccacgtcctctccctg

SEQ ID NO: 3567186 - DNA, 25 bp, Homo sapien
agggccggcccatcccacgtcctct

SEQ ID NO: 3567187 - DNA, 25 bp, Homo sapien
caagggccggcccatcccacgtcct

SEQ ID NO: 3567188 - DNA, 25 bp, Homo sapien
tgctggaggcagccgcgctgcgtgg

SEQ ID NO: 3567189 - DNA, 25 bp, Homo sapien
gcatggaagggtggcctggagctgg

SEQ ID NO: 3567190 - DNA, 25 bp, Homo sapien
gatcagtgggatagcaccatctgct

SEQ ID NO: 3567191 - DNA, 25 bp, Homo sapien
catgcaggtcttcctcaagatcagt

SEQ ID NO: 3567192 - DNA, 25 bp, Homo sapien
ttgttcaggcataggaatccagggc

SEQ ID NO: 3567193 - DNA, 25 bp, Homo sapien
tagtgactgcacacatctcctggga

SEQ ID NO: 3567194 - DNA, 25 bp, Homo sapien
tttagagtctcacacctgtgccggg

SEQ ID NO: 3567195 - DNA, 25 bp, Homo sapien
gcttttagctctggcctgcgggact

SEQ ID NO: 3567196 - DNA, 25 bp, Homo sapien
gcagtaaataacatcactcccacag

SEQ ID NO: 3567197 - DNA, 25 bp, Homo sapien
gggtcggaggacatccaattcacca

SEQ ID NO: 3567198 - DNA, 25 bp, Homo sapien
ctctggctgaactggcagtaaataa

SEQ ID NO: 3567199 - DNA, 25 bp, Homo sapien
tccaattcaccaagcattctcctgt

SEQ ID NO: 3567200 - DNA, 25 bp, Homo sapien
catacacaaggcctgaggtgtcccc

SEQ ID NO: 3567201 - DNA, 25 bp, Homo sapien
gggtccgggatgccccagatgaggc

SEQ ID NO: 3567202 - DNA, 25 bp, Homo sapien
ttggcgagcctcaagcggaccgtga

SEQ ID NO: 3567203 - DNA, 25 bp, Homo sapien
ctttctcatacacaaggcctgaggt

SEQ ID NO: 3567204 - DNA, 25 bp, Homo sapien
gttcttgctcccctccttgggctcc

SEQ ID NO: 3567205 - DNA, 25 bp, Homo sapien
tcttgctcccctccttgggctccat

SEQ ID NO: 3567206 - DNA, 25 bp, Homo sapien
ctgttcttgctcccctccttgggct

SEQ ID NO: 3567207 - DNA, 25 bp, Homo sapien
ttcttggcgacttcctgttcttgct

SEQ ID NO: 3567208 - DNA, 25 bp, Homo sapien
gaagtactgactccatccgacgcag

SEQ ID NO: 3567209 - DNA, 25 bp, Homo sapien
catccgacgcagagaaggtcaagcg

SEQ ID NO: 3567210 - DNA, 25 bp, Homo sapien
acgcagagaaggtcaagcgggctcc

SEQ ID NO: 3567211 - DNA, 25 bp, Homo sapien
tgactccatccgacgcagagaaggt

SEQ ID NO: 3567212 - DNA, 25 bp, Homo sapien
ctgccaggaatgttcgcagctgcag

SEQ ID NO: 3567213 - DNA, 25 bp, Homo sapien
ctgctcctgttgactgccaggaatg

SEQ ID NO: 3567214 - DNA, 25 bp, Homo sapien
gccaggaatgttcgcagctgcaggg

SEQ ID NO: 3567215 - DNA, 25 bp, Homo sapien
gcgtgctgctcctgttgactgccag

SEQ ID NO: 3567216 - DNA, 25 bp, Homo sapien
tccgggaaatctgacatgcgctggg

SEQ ID NO: 3567217 - DNA, 25 bp, Homo sapien
cgggaaatctgacatgcgctggggg

SEQ ID NO: 3567218 - DNA, 25 bp, Homo sapien
ccgggaaatctgacatgcgctgggg

SEQ ID NO: 3567219 - DNA, 25 bp, Homo sapien
gaaatagctgagaacccagacgcgg

SEQ ID NO: 3567220 - DNA, 25 bp, Homo sapien
taatgttgtgatgacacaaagcccc

SEQ ID NO: 3567221 - DNA, 25 bp, Homo sapien
tcaagaggctgccacgccaagatgt

SEQ ID NO: 3567222 - DNA, 25 bp, Homo sapien
tcagttcccactggaccctgatttg

SEQ ID NO: 3567223 - DNA, 25 bp, Homo sapien
gagggctccaggttatccgggctct

SEQ ID NO: 3567224 - DNA, 25 bp, Homo sapien
agctgggagcccagtctcgaagcct

SEQ ID NO: 3567225 - DNA, 25 bp, Homo sapien
aagcctgaacgtgagagggctccag

SEQ ID NO: 3567226 - DNA, 25 bp, Homo sapien
ggttatccgggctctgcttctgccg

SEQ ID NO: 3567227 - DNA, 25 bp, Homo sapien
ggcagcccactctgtagctgccgca

SEQ ID NO: 3567228 - DNA, 25 bp, Homo sapien
gcagcccactctgtagctgccgcac

SEQ ID NO: 3567229 - DNA, 25 bp, Homo sapien
tattatagcccagctcgtggatccg

SEQ ID NO: 3567230 - DNA, 25 bp, Homo sapien
agacacgtaccacagtctctcggcg

SEQ ID NO: 3567231 - DNA, 25 bp, Homo sapien
ggcgtactagacaccgtccggtaca

SEQ ID NO: 3567232 - DNA, 25 bp, Homo sapien
gccgggaggcatacgtattatagcc

SEQ ID NO: 3567233 - DNA, 25 bp, Homo sapien
aagagacccctgatggccacaatgc

SEQ ID NO: 3567234 - DNA, 25 bp, Homo sapien
gaagcatagagtcgtcccctcttgt

SEQ ID NO: 3567235 - DNA, 25 bp, Homo sapien
ttgttcatggccaggtaccgcccgg

SEQ ID NO: 3567236 - DNA, 25 bp, Homo sapien
taccgcccggagaagagacccctga

SEQ ID NO: 3567237 - DNA, 25 bp, Homo sapien
ggctgataatataaaccactggcaa

SEQ ID NO: 3567238 - DNA, 25 bp, Homo sapien
tgggccctgatgagccaggctgata

SEQ ID NO: 3567239 - DNA, 25 bp, Homo sapien
cctgtgcctgccagcgggaaagctg

SEQ ID NO: 3567240 - DNA, 25 bp, Homo sapien
caatgcctgtgcctgccagcgggaa

SEQ ID NO: 3567241 - DNA, 25 bp, Homo sapien
gcgggagatcattgtactcgccggg

SEQ ID NO: 3567242 - DNA, 25 bp, Homo sapien
ggagatcattgtactcgccggggga

SEQ ID NO: 3567243 - DNA, 25 bp, Homo sapien
ctggcgggagatcattgtactcgcc

SEQ ID NO: 3567244 - DNA, 25 bp, Homo sapien
gagatcattgtactcgccgggggac

SEQ ID NO: 3567245 - DNA, 25 bp, Homo sapien
gtgtcttagtgagacgaattccgcg

SEQ ID NO: 3567246 - DNA, 25 bp, Homo sapien
gtgagacgaattccgcgcactcgga

SEQ ID NO: 3567247 - DNA, 25 bp, Homo sapien
agagaaccggagtgtcttagtgaga

SEQ ID NO: 3567248 - DNA, 25 bp, Homo sapien
gctttggagagaaccggagtgtctt

SEQ ID NO: 3567249 - DNA, 25 bp, Homo sapien
tccggaggcgcatgtccccaggacg

SEQ ID NO: 3567250 - DNA, 25 bp, Homo sapien
gctccggaggcgcatgtccccagga

SEQ ID NO: 3567251 - DNA, 25 bp, Homo sapien
ggaggcgcatgtccccaggacgccc

SEQ ID NO: 3567252 - DNA, 25 bp, Homo sapien
cggctccggaggcgcatgtccccag

SEQ ID NO: 3567253 - DNA, 25 bp, Homo sapien
cgccaccttcaagcggcggaaccgc

SEQ ID NO: 3567254 - DNA, 25 bp, Homo sapien
gaagccgcggtttgctgaggccgcc

SEQ ID NO: 3567255 - DNA, 25 bp, Homo sapien
gccgccgccaccttcaagcggcgga

SEQ ID NO: 3567256 - DNA, 25 bp, Homo sapien
ctggaggaagccgcggtttgctgag

SEQ ID NO: 3567257 - DNA, 25 bp, Homo sapien
tagtccggcagactcccgcggtgag

SEQ ID NO: 3567258 - DNA, 25 bp, Homo sapien
agctgtggtcttgactgccctccca

SEQ ID NO: 3567259 - DNA, 25 bp, Homo sapien
gagctccgctatcctgctcctcaaa

SEQ ID NO: 3567260 - DNA, 25 bp, Homo sapien
accagaggagcccaaccgtgtagtc

SEQ ID NO: 3567261 - DNA, 25 bp, Homo sapien
tcaaagggcttaaacttgtcagagc

SEQ ID NO: 3567262 - DNA, 25 bp, Homo sapien
ggcaagagtcctccgcgcagaggca

SEQ ID NO: 3567263 - DNA, 25 bp, Homo sapien
tcttctcccggacgtgtaggttgag

SEQ ID NO: 3567264 - DNA, 25 bp, Homo sapien
gatgataaatgccttgtccggctcc

SEQ ID NO: 3567265 - DNA, 25 bp, Homo sapien
ctggcagcgggaggcagacggtctt

SEQ ID NO: 3567266 - DNA, 25 bp, Homo sapien
cagcgggaggcagacggtcttttcc

SEQ ID NO: 3567267 - DNA, 25 bp, Homo sapien
gaggcagacggtcttttcccggaca

SEQ ID NO: 3567268 - DNA, 25 bp, Homo sapien
ggcagcgggaggcagacggtctttt

SEQ ID NO: 3567269 - DNA, 25 bp, Homo sapien
aggctgccgttgacgcggccgctcg

SEQ ID NO: 3567270 - DNA, 25 bp, Homo sapien
ggtggtacttcgtggcgcagtagag

SEQ ID NO: 3567271 - DNA, 25 bp, Homo sapien
tgcagctggaggtggtacttcgtgg

SEQ ID NO: 3567272 - DNA, 25 bp, Homo sapien
ttgacgcggccgctcgggtgcagct

SEQ ID NO: 3567273 - DNA, 25 bp, Homo sapien
ggcgccccgccaaggtgctcgtaga

SEQ ID NO: 3567274 - DNA, 25 bp, Homo sapien
atcgcgccgcaaccgcgccccaggg

SEQ ID NO: 3567275 - DNA, 25 bp, Homo sapien
aggtgctcgtagacgccgccacggc

SEQ ID NO: 3567276 - DNA, 25 bp, Homo sapien
gccaaggtgctcgtagacgccgcca

SEQ ID NO: 3567277 - DNA, 25 bp, Homo sapien
ctgactccggcttcgcgggaaaggt

SEQ ID NO: 3567278 - DNA, 25 bp, Homo sapien
tcgccaacaaaaggccgacgtggtc

SEQ ID NO: 3567279 - DNA, 25 bp, Homo sapien
tgaaagaaaggacggttcgccaaca

SEQ ID NO: 3567280 - DNA, 25 bp, Homo sapien
aaatttccgttgctgcgcaaagcgc

SEQ ID NO: 3567281 - DNA, 25 bp, Homo sapien
cgtcccagtgacggtccagagaggg

SEQ ID NO: 3567282 - DNA, 25 bp, Homo sapien
tccttttgcgcacaccaactgggca

SEQ ID NO: 3567283 - DNA, 25 bp, Homo sapien
gcaggcctcggaggatcccgtccca

SEQ ID NO: 3567284 - DNA, 25 bp, Homo sapien
ggccgggtctggagatgctatctcc

SEQ ID NO: 3567285 - DNA, 25 bp, Homo sapien
tccggtcgctggcgacagccttcag

SEQ ID NO: 3567286 - DNA, 25 bp, Homo sapien
tgacttttccgaggcagccaagctc

SEQ ID NO: 3567287 - DNA, 25 bp, Homo sapien
tctctgggccaagttttcctctctc

SEQ ID NO: 3567288 - DNA, 25 bp, Homo sapien
tgtctgctgttctggtaagcatgac

SEQ ID NO: 3567289 - DNA, 25 bp, Homo sapien
gccactgatgcccacctggagaccc

SEQ ID NO: 3567290 - DNA, 25 bp, Homo sapien
atggtgtgagcaccaagggaccctg

SEQ ID NO: 3567291 - DNA, 25 bp, Homo sapien
tgtgagcaccaagggaccctgcctt

SEQ ID NO: 3567292 - DNA, 25 bp, Homo sapien
gagcaccaagggaccctgccttctt

SEQ ID NO: 3567293 - DNA, 25 bp, Homo sapien
tcaggtgcttgccatgggagtgaag

SEQ ID NO: 3567294 - DNA, 25 bp, Homo sapien
gacagagggacagcattcccgcctg

SEQ ID NO: 3567295 - DNA, 25 bp, Homo sapien
tcccgcctgtcctgtgctttgatgc

SEQ ID NO: 3567296 - DNA, 25 bp, Homo sapien
agcattcccgcctgtcctgtgcttt

SEQ ID NO: 3567297 - DNA, 25 bp, Homo sapien
cttgaatggctcggtgtgccaggtc

SEQ ID NO: 3567298 - DNA, 25 bp, Homo sapien
ttgaatggctcggtgtgccaggtcg

SEQ ID NO: 3567299 - DNA, 25 bp, Homo sapien
ttgctgaatcttcagcacagttggg

SEQ ID NO: 3567300 - DNA, 25 bp, Homo sapien
caacttttgctgaatcttcagcaca

SEQ ID NO: 3567301 - DNA, 25 bp, Homo sapien
tcagatcaacttttgctgaatcttc

SEQ ID NO: 3567302 - DNA, 25 bp, Homo sapien
cagttggggcactgtacatttgtgg

SEQ ID NO: 3567303 - DNA, 25 bp, Homo sapien
cctccgatgttctcacggtgtaaaa

SEQ ID NO: 3567304 - DNA, 25 bp, Homo sapien
tccgatgttctcacggtgtaaaagc

SEQ ID NO: 3567305 - DNA, 25 bp, Homo sapien
tgttctcacggtgtaaaagctgaga

SEQ ID NO: 3567306 - DNA, 25 bp, Homo sapien
gatgttctcacggtgtaaaagctga

SEQ ID NO: 3567307 - DNA, 25 bp, Homo sapien
aggggcctccgacactctgggcaaa

SEQ ID NO: 3567308 - DNA, 25 bp, Homo sapien
tgggcaaacctagtttctgaggact

SEQ ID NO: 3567309 - DNA, 25 bp, Homo sapien
gacaggtgtcaaaaacgagggctcc

SEQ ID NO: 3567310 - DNA, 25 bp, Homo sapien
gcttcacctggatagtggccacctc

SEQ ID NO: 3567311 - DNA, 25 bp, Homo sapien
gcagccagaggctgacatctgtccc

SEQ ID NO: 3567312 - DNA, 25 bp, Homo sapien
ttgcagccagaggctgacatctgtc

SEQ ID NO: 3567313 - DNA, 25 bp, Homo sapien
gccagaggctgacatctgtccccac

SEQ ID NO: 3567314 - DNA, 25 bp, Homo sapien
agccagaggctgacatctgtcccca

SEQ ID NO: 3567315 - DNA, 25 bp, Homo sapien
cctgggatccccataaccctgaatc

SEQ ID NO: 3567316 - DNA, 25 bp, Homo sapien
tgggatccccataaccctgaatcct

SEQ ID NO: 3567317 - DNA, 25 bp, Homo sapien
ccctgggatccccataaccctgaat

SEQ ID NO: 3567318 - DNA, 25 bp, Homo sapien
ctgggatccccataaccctgaatcc

SEQ ID NO: 3567319 - DNA, 25 bp, Homo sapien
tcgtctgtgtggtgtgaccgcccac

SEQ ID NO: 3567320 - DNA, 25 bp, Homo sapien
cctgctcgtctgtgtggtgtgaccg

SEQ ID NO: 3567321 - DNA, 25 bp, Homo sapien
ttccctgctcgtctgtgtggtgtga

SEQ ID NO: 3567322 - DNA, 25 bp, Homo sapien
ctcgtctgtgtggtgtgaccgccca

SEQ ID NO: 3567323 - DNA, 25 bp, Homo sapien
gtgggatcccgctggatgtgctcct

SEQ ID NO: 3567324 - DNA, 25 bp, Homo sapien
agctctctgtacgtgggatcccgct

SEQ ID NO: 3567325 - DNA, 25 bp, Homo sapien
tctgtacgtgggatcccgctggatg

SEQ ID NO: 3567326 - DNA, 25 bp, Homo sapien
tttgcagctctctgtacgtgggatc

SEQ ID NO: 3567327 - DNA, 25 bp, Homo sapien
taggcccagattgtacagggctttg

SEQ ID NO: 3567328 - DNA, 25 bp, Homo sapien
cggaatgtctggagttttgatcatc

SEQ ID NO: 3567329 - DNA, 25 bp, Homo sapien
ttttgatcatcaggggtgttaggcc

SEQ ID NO: 3567330 - DNA, 25 bp, Homo sapien
aggctctcggtgggctgaagcttaa

SEQ ID NO: 3567331 - DNA, 25 bp, Homo sapien
aggatggggctatcctgttcaccag

SEQ ID NO: 3567332 - DNA, 25 bp, Homo sapien
ggatggggctatcctgttcaccagt

SEQ ID NO: 3567333 - DNA, 25 bp, Homo sapien
cccatggggtcagatgatcaggtgt

SEQ ID NO: 3567334 - DNA, 25 bp, Homo sapien
tcagatgatcaggtgtggtcctagc

SEQ ID NO: 3567335 - DNA, 25 bp, Homo sapien
cagcccatggggtcagatgatcagg

SEQ ID NO: 3567336 - DNA, 25 bp, Homo sapien
gggtcagatgatcaggtgtggtcct

SEQ ID NO: 3567337 - DNA, 25 bp, Homo sapien
tgaggccagtttgatgtgcctggca

SEQ ID NO: 3567338 - DNA, 25 bp, Homo sapien
ggccagtttgatgtgcctggcacag

SEQ ID NO: 3567339 - DNA, 25 bp, Homo sapien
ggctgaggccagtttgatgtgcctg

SEQ ID NO: 3567340 - DNA, 25 bp, Homo sapien
aggccagtttgatgtgcctggcaca

SEQ ID NO: 3567341 - DNA, 25 bp, Homo sapien
ggagtttgcatctgactcaaagtcg

SEQ ID NO: 3567342 - DNA, 25 bp, Homo sapien
tctgactcaaagtcgaactcgccct

SEQ ID NO: 3567343 - DNA, 25 bp, Homo sapien
cgtcatcgtcaccatcctcaactgg

SEQ ID NO: 3567344 - DNA, 25 bp, Homo sapien
tgcatctgactcaaagtcgaactcg

SEQ ID NO: 3567345 - DNA, 25 bp, Homo sapien
gcctccgaggatttgttctgcttgg

SEQ ID NO: 3567346 - DNA, 25 bp, Homo sapien
tttgtctctggccgccagagccagc

SEQ ID NO: 3567347 - DNA, 25 bp, Homo sapien
ttggctgccggctcgctatgccagc

SEQ ID NO: 3567348 - DNA, 25 bp, Homo sapien
gatttgttctgcttggctgccggct

SEQ ID NO: 3567349 - DNA, 25 bp, Homo sapien
agcatccaagcacacagtttctttg

SEQ ID NO: 3567350 - DNA, 25 bp, Homo sapien
aagcacacagtttctttggtctctt

SEQ ID NO: 3567351 - DNA, 25 bp, Homo sapien
tccaagcacacagtttctttggtct

SEQ ID NO: 3567352 - DNA, 25 bp, Homo sapien
catccaagcacacagtttctttggt

SEQ ID NO: 3567353 - DNA, 25 bp, Homo sapien
gggagatgataaaacgacagaaatg

SEQ ID NO: 3567354 - DNA, 25 bp, Homo sapien
aaatgggtacgatgggatccctgga

SEQ ID NO: 3567355 - DNA, 25 bp, Homo sapien
tggagcacaggacacgaaacagagc

SEQ ID NO: 3567356 - DNA, 25 bp, Homo sapien
aggacacgaaacagagccacccggc

SEQ ID NO: 3567357 - DNA, 25 bp, Homo sapien
cagaggcagcgttctggtaggtgac

SEQ ID NO: 3567358 - DNA, 25 bp, Homo sapien
ggcgcgtgttccacctgctggagct

SEQ ID NO: 3567359 - DNA, 25 bp, Homo sapien
ctggagctgccggttttctgattct

SEQ ID NO: 3567360 - DNA, 25 bp, Homo sapien
gattcttcgccaagttctccttcgg

SEQ ID NO: 3567361 - DNA, 25 bp, Homo sapien
ctgccccacgtacttcaacacttat

SEQ ID NO: 3567362 - DNA, 25 bp, Homo sapien
tgccccacgtacttcaacacttatc

SEQ ID NO: 3567363 - DNA, 25 bp, Homo sapien
gccccacgtacttcaacacttatca

SEQ ID NO: 3567364 - DNA, 25 bp, Homo sapien
ccaggcgcagctgagacgtgaactc

SEQ ID NO: 3567365 - DNA, 25 bp, Homo sapien
ctcctgtgaggcttcgtcctggggt

SEQ ID NO: 3567366 - DNA, 25 bp, Homo sapien
actcgggagctggtaaaggcgggtg

SEQ ID NO: 3567367 - DNA, 25 bp, Homo sapien
tggccaggcgcagctgagacgtgaa

SEQ ID NO: 3567368 - DNA, 25 bp, Homo sapien
tgcagctgtatcctaggtccagccc

SEQ ID NO: 3567369 - DNA, 25 bp, Homo sapien
agcttccacgcggccctgatggctt

SEQ ID NO: 3567370 - DNA, 25 bp, Homo sapien
ctgtatcctaggtccagccctgggc

SEQ ID NO: 3567371 - DNA, 25 bp, Homo sapien
agctgtatcctaggtccagccctgg

SEQ ID NO: 3567372 - DNA, 25 bp, Homo sapien
cggcccacagctcgcaggcccggct

SEQ ID NO: 3567373 - DNA, 25 bp, Homo sapien
cagctcaggaatgcgcggcccacag

SEQ ID NO: 3567374 - DNA, 25 bp, Homo sapien
cccccagctcaggaatgcgcggccc

SEQ ID NO: 3567375 - DNA, 25 bp, Homo sapien
ccagctcaggaatgcgcggcccaca

SEQ ID NO: 3567376 - DNA, 25 bp, Homo sapien
tggcagcgggaagttcttctcaggt

SEQ ID NO: 3567377 - DNA, 25 bp, Homo sapien
gcgggaagttcttctcaggtgcttg

SEQ ID NO: 3567378 - DNA, 25 bp, Homo sapien
cagcgggaagttcttctcaggtgct

SEQ ID NO: 3567379 - DNA, 25 bp, Homo sapien
gactggcagcgggaagttcttctca

SEQ ID NO: 3567380 - DNA, 25 bp, Homo sapien
ttgacgttcacagaggagttcggac

SEQ ID NO: 3567381 - DNA, 25 bp, Homo sapien
cactggggctttgacgttcacagag

SEQ ID NO: 3567382 - DNA, 25 bp, Homo sapien
gggctttgacgttcacagaggagtt

SEQ ID NO: 3567383 - DNA, 25 bp, Homo sapien
ctttgacgttcacagaggagttcgg

SEQ ID NO: 3567384 - DNA, 25 bp, Homo sapien
gggtgggaagcaagattagactggc

SEQ ID NO: 3567385 - DNA, 25 bp, Homo sapien
gcacttggaaatgccacaggcgatt

SEQ ID NO: 3567386 - DNA, 25 bp, Homo sapien
tggcacttggaaatgccacaggcga

SEQ ID NO: 3567387 - DNA, 25 bp, Homo sapien
ggcacttggaaatgccacaggcgat

SEQ ID NO: 3567388 - DNA, 25 bp, Homo sapien
tggctggcgacgtccccaattgtgg

SEQ ID NO: 3567389 - DNA, 25 bp, Homo sapien
tgcggccctgaacgaaaagtcccga

SEQ ID NO: 3567390 - DNA, 25 bp, Homo sapien
gactcttcccaagccagtgtactgc

SEQ ID NO: 3567391 - DNA, 25 bp, Homo sapien
tccctgcggccctgaacgaaaagtc

SEQ ID NO: 3567392 - DNA, 25 bp, Homo sapien
ccaggtcagtgtgctcaggttgtaa

SEQ ID NO: 3567393 - DNA, 25 bp, Homo sapien
tggcagtgggaccaggctgaaggca

SEQ ID NO: 3567394 - DNA, 25 bp, Homo sapien
cccgcaaaacagcgccatcttgtgg

SEQ ID NO: 3567395 - DNA, 25 bp, Homo sapien
cccaagaacatcaaaggtgggaaag

SEQ ID NO: 3567396 - DNA, 25 bp, Homo sapien
cctggtgtttgccgggtccctggca

SEQ ID NO: 3567397 - DNA, 25 bp, Homo sapien
ttcatccccccgggagatggctgct

SEQ ID NO: 3567398 - DNA, 25 bp, Homo sapien
cgtcatgttcatccccccgggagat

SEQ ID NO: 3567399 - DNA, 25 bp, Homo sapien
gcaggggtgaacgtcatgttcatcc

SEQ ID NO: 3567400 - DNA, 25 bp, Homo sapien
cctcactggccttcctatagccctt

SEQ ID NO: 3567401 - DNA, 25 bp, Homo sapien
tcactggccttcctatagcccttca

SEQ ID NO: 3567402 - DNA, 25 bp, Homo sapien
gcctcactggccttcctatagccct

SEQ ID NO: 3567403 - DNA, 25 bp, Homo sapien
cactggccttcctatagcccttcat

SEQ ID NO: 3567404 - DNA, 25 bp, Homo sapien
gatgaccatggacaccttacaaaga

SEQ ID NO: 3567405 - DNA, 25 bp, Homo sapien
cttacaaagagtgattgtgccatcc

SEQ ID NO: 3567406 - DNA, 25 bp, Homo sapien
catccagaatgctgtccaggtcact

SEQ ID NO: 3567407 - DNA, 25 bp, Homo sapien
ctggccatagggaaggccggctctc

SEQ ID NO: 3567408 - DNA, 25 bp, Homo sapien
gatcgctttggctatggcatggaga

SEQ ID NO: 3567409 - DNA, 25 bp, Homo sapien
caatcttgcctttataaaagatcgc

SEQ ID NO: 3567410 - DNA, 25 bp, Homo sapien
gatggagacacgtggaccaatagca

SEQ ID NO: 3567411 - DNA, 25 bp, Homo sapien
cgtaagtttttgtgctagtgtccat

SEQ ID NO: 3567412 - DNA, 25 bp, Homo sapien
tctagggcactgtgccgagtggtcg

SEQ ID NO: 3567413 - DNA, 25 bp, Homo sapien
gtgccgagtggtcggagatcacctc

SEQ ID NO: 3567414 - DNA, 25 bp, Homo sapien
cactgtgccgagtggtcggagatca

SEQ ID NO: 3567415 - DNA, 25 bp, Homo sapien
tcctcggctcctggctcatcactgg

SEQ ID NO: 3567416 - DNA, 25 bp, Homo sapien
aagagaagatgaggtggtccaagca

SEQ ID NO: 3567417 - DNA, 25 bp, Homo sapien
cacagagagagctaaaactaggacg

SEQ ID NO: 3567418 - DNA, 25 bp, Homo sapien
ggtggtccaagcaccattcctcagc

SEQ ID NO: 3567419 - DNA, 25 bp, Homo sapien
gattgtggtcacaggacagtggcca

SEQ ID NO: 3567420 - DNA, 25 bp, Homo sapien
cacaatcccgccagggacctcaggg

SEQ ID NO: 3567421 - DNA, 25 bp, Homo sapien
ttcagtggcagcctcatttgtcttc

SEQ ID NO: 3567422 - DNA, 25 bp, Homo sapien
cttcctgcacaatcccgccagggac

SEQ ID NO: 3567423 - DNA, 25 bp, Homo sapien
tgcacaatcccgccagggacctcag

SEQ ID NO: 3567424 - DNA, 25 bp, Homo sapien
ggaaggatctcttgagtccaggagg

SEQ ID NO: 3567425 - DNA, 25 bp, Homo sapien
cttgggcaacagaatgagaccttgt

SEQ ID NO: 3567426 - DNA, 25 bp, Homo sapien
caccactgcactccagcttgggcaa

SEQ ID NO: 3567427 - DNA, 25 bp, Homo sapien
tcgaggctgcagtgagctgtgatca

SEQ ID NO: 3567428 - DNA, 25 bp, Homo sapien
gcctctcattcgtagtcatcgttcg

SEQ ID NO: 3567429 - DNA, 25 bp, Homo sapien
cgttcgcggtcgtaactgctactta

SEQ ID NO: 3567430 - DNA, 25 bp, Homo sapien
cgtagtcatcgttcgcggtcgtaac

SEQ ID NO: 3567431 - DNA, 25 bp, Homo sapien
gaccattcagcctctcattcgtagt

SEQ ID NO: 3567432 - DNA, 25 bp, Homo sapien
gctgggtgcgtcctttacagacagg

SEQ ID NO: 3567433 - DNA, 25 bp, Homo sapien
cgtcgggctgggtgcgtcctttaca

SEQ ID NO: 3567434 - DNA, 25 bp, Homo sapien
gactcgctgtgggaattcatatttc

SEQ ID NO: 3567435 - DNA, 25 bp, Homo sapien
gacaggccataagtgagcacgtgga

SEQ ID NO: 3567436 - DNA, 25 bp, Homo sapien
gaaaaaatgctttccgagacaggcc

SEQ ID NO: 3567437 - DNA, 25 bp, Homo sapien
aaaaatgctttccgagacaggccca

SEQ ID NO: 3567438 - DNA, 25 bp, Homo sapien
aggaaaaaatgctttccgagacagg

SEQ ID NO: 3567439 - DNA, 25 bp, Homo sapien
aaaatgctttccgagacaggcccat

SEQ ID NO: 3567440 - DNA, 25 bp, Homo sapien
tctagatacagaaccctagattggc

SEQ ID NO: 3567441 - DNA, 25 bp, Homo sapien
tgatgggctgggattattctgatag

SEQ ID NO: 3567442 - DNA, 25 bp, Homo sapien
caatatgtcactctattgtctttgg

SEQ ID NO: 3567443 - DNA, 25 bp, Homo sapien
tttcaccaattttgctatgatgggc

SEQ ID NO: 3567444 - DNA, 25 bp, Homo sapien
tgagtcaaaatcaggtcaccaccag

SEQ ID NO: 3567445 - DNA, 25 bp, Homo sapien
aagggacacgcctcagccccacagg

SEQ ID NO: 3567446 - DNA, 25 bp, Homo sapien
tctctcttttccttgttctcacttt

SEQ ID NO: 3567447 - DNA, 25 bp, Homo sapien
tgaagggacacgcctcagccccaca

SEQ ID NO: 3567448 - DNA, 25 bp, Homo sapien
tattgcccctgggatcagacacacg

SEQ ID NO: 3567449 - DNA, 25 bp, Homo sapien
catgccgttcatagtctgggacaaa

SEQ ID NO: 3567450 - DNA, 25 bp, Homo sapien
ggcgaggtttccatcacagcggttg

SEQ ID NO: 3567451 - DNA, 25 bp, Homo sapien
tgagggatgcattacagacactcgg

SEQ ID NO: 3567452 - DNA, 25 bp, Homo sapien
gatgcaactttggtgcactcacgcc

SEQ ID NO: 3567453 - DNA, 25 bp, Homo sapien
tgtaacgttaggatccatctcaggc

SEQ ID NO: 3567454 - DNA, 25 bp, Homo sapien
gggttcttgtactctcaacagtgca

SEQ ID NO: 3567455 - DNA, 25 bp, Homo sapien
gattcgccccagagtcagaggcttg

SEQ ID NO: 3567456 - DNA, 25 bp, Homo sapien
gtcttggtaaccagtccctgtgtct

SEQ ID NO: 3567457 - DNA, 25 bp, Homo sapien
gaggttcttgttccggtccatggtc

SEQ ID NO: 3567458 - DNA, 25 bp, Homo sapien
cactgagttgcagacagcttggccc

SEQ ID NO: 3567459 - DNA, 25 bp, Homo sapien
gcttggcccgtgctctgaggtattc

SEQ ID NO: 3567460 - DNA, 25 bp, Homo sapien
ggacccattgcttatccagacccag

SEQ ID NO: 3567461 - DNA, 25 bp, Homo sapien
tagactagacaagacctgatggtga

SEQ ID NO: 3567462 - DNA, 25 bp, Homo sapien
caggtgaaggccataaagtctgcaa

SEQ ID NO: 3567463 - DNA, 25 bp, Homo sapien
gaccatggaggtaccagccaggagc

SEQ ID NO: 3567464 - DNA, 25 bp, Homo sapien
cagtcaagaggtttaagtgcaaggg

SEQ ID NO: 3567465 - DNA, 25 bp, Homo sapien
cagcatggatgttggcatctcgtct

SEQ ID NO: 3567466 - DNA, 25 bp, Homo sapien
taggtgcccatgaccctgagagtga

SEQ ID NO: 3567467 - DNA, 25 bp, Homo sapien
tggttctcaaactcggtcccacagg

SEQ ID NO: 3567468 - DNA, 25 bp, Homo sapien
ccagccatcacaggaagggtgatcc

SEQ ID NO: 3567469 - DNA, 25 bp, Homo sapien
tgggttgagcttttgtaggccaaac

SEQ ID NO: 3567470 - DNA, 25 bp, Homo sapien
agcacctgcgtactaattattggaa

SEQ ID NO: 3567471 - DNA, 25 bp, Homo sapien
gaaataaagattccataccagcttg

SEQ ID NO: 3567472 - DNA, 25 bp, Homo sapien
gccgccgtgcaaccaccacaacacc

SEQ ID NO: 3567473 - DNA, 25 bp, Homo sapien
catggtggagctgttcatgcgggag

SEQ ID NO: 3567474 - DNA, 25 bp, Homo sapien
ggagctgttcatgcgggaggagcaa

SEQ ID NO: 3567475 - DNA, 25 bp, Homo sapien
ggaggagcaagacaagcagcagctg

SEQ ID NO: 3567476 - DNA, 25 bp, Homo sapien
caataaggtagcaaaggcaggtgct

SEQ ID NO: 3567477 - DNA, 25 bp, Homo sapien
tgattccggttccaaaaggtgtcac

SEQ ID NO: 3567478 - DNA, 25 bp, Homo sapien
cgaggcatcgcgcaaaagctggtgc

SEQ ID NO: 3567479 - DNA, 25 bp, Homo sapien
tagatgcaaaatggtaagccgaggc

SEQ ID NO: 3567480 - DNA, 25 bp, Homo sapien
gaaacatcattttagcaaaggccag

SEQ ID NO: 3567481 - DNA, 25 bp, Homo sapien
cacaggaatgtcactgttggacaat

SEQ ID NO: 3567482 - DNA, 25 bp, Homo sapien
agttcataggtgtcgtacatttcca

SEQ ID NO: 3567483 - DNA, 25 bp, Homo sapien
tagttaaccaaatatcgttgagagg

SEQ ID NO: 3567484 - DNA, 25 bp, Homo sapien
gcagggcctctttcgacctgtggca

SEQ ID NO: 3567485 - DNA, 25 bp, Homo sapien
ggacagtgtccttgtgcggccctcg

SEQ ID NO: 3567486 - DNA, 25 bp, Homo sapien
tcagcaaagcagtatggcgcttcgg

SEQ ID NO: 3567487 - DNA, 25 bp, Homo sapien
tcccttcaccgccaggacaaggcag

SEQ ID NO: 3567488 - DNA, 25 bp, Homo sapien
ggtggaccatgaatagcatcaagcc

SEQ ID NO: 3567489 - DNA, 25 bp, Homo sapien
ggttccgctgctctcctctgagggt

SEQ ID NO: 3567490 - DNA, 25 bp, Homo sapien
tggccggccatgcaggttccgctgc

SEQ ID NO: 3567491 - DNA, 25 bp, Homo sapien
tggcaatgacacactggtggccggc

SEQ ID NO: 3567492 - DNA, 25 bp, Homo sapien
cgctttgcaaacaggtggactcggc

SEQ ID NO: 3567493 - DNA, 25 bp, Homo sapien
aaacggctgcggcttcgctagggac

SEQ ID NO: 3567494 - DNA, 25 bp, Homo sapien
taacggtcgaaaacgcgctcttgtc

SEQ ID NO: 3567495 - DNA, 25 bp, Homo sapien
cacccggaaaagagacgatacgccg

SEQ ID NO: 3567496 - DNA, 25 bp, Homo sapien
cccaggaatcggagcgaagcagaga

SEQ ID NO: 3567497 - DNA, 25 bp, Homo sapien
cacactgttactccacagcggagga

SEQ ID NO: 3567498 - DNA, 25 bp, Homo sapien
tgtgcagatgagcagtcacactgtt

SEQ ID NO: 3567499 - DNA, 25 bp, Homo sapien
gttggaaccgtgtccagcacagaag

SEQ ID NO: 3567500 - DNA, 25 bp, Homo sapien
gaggtgctgatgagtgattgacaca

SEQ ID NO: 3567501 - DNA, 25 bp, Homo sapien
ttggcccctgtgtgagttgagtctc

SEQ ID NO: 3567502 - DNA, 25 bp, Homo sapien
gcagtgatggttgccaggacgaatt

SEQ ID NO: 3567503 - DNA, 25 bp, Homo sapien
tccttgtgaggattatgggtcctgc

SEQ ID NO: 3567504 - DNA, 25 bp, Homo sapien
cagatcccagggattagcacatggg

SEQ ID NO: 3567505 - DNA, 25 bp, Homo sapien
atctagtcagtagcccaagccacaa

SEQ ID NO: 3567506 - DNA, 25 bp, Homo sapien
gtgcctgacaccaccatctagtcag

SEQ ID NO: 3567507 - DNA, 25 bp, Homo sapien
cactgtcagagtcatgcaagccaca

SEQ ID NO: 3567508 - DNA, 25 bp, Homo sapien
tctgcttgtcccatttgacaggttt

SEQ ID NO: 3567509 - DNA, 25 bp, Homo sapien
tgtcccatttgacaggtttggtgat

SEQ ID NO: 3567510 - DNA, 25 bp, Homo sapien
catttgacaggtttggtgattagca

SEQ ID NO: 3567511 - DNA, 25 bp, Homo sapien
tgcttgtcccatttgacaggtttgg

SEQ ID NO: 3567512 - DNA, 25 bp, Homo sapien
tatccctcctcggtgcaagtcgcac

SEQ ID NO: 3567513 - DNA, 25 bp, Homo sapien
gcaggttggctgtccacatctgtcc

SEQ ID NO: 3567514 - DNA, 25 bp, Homo sapien
ggtgaccacagctgtcattgcaggt

SEQ ID NO: 3567515 - DNA, 25 bp, Homo sapien
tcattgcaggttggctgtccacatc

SEQ ID NO: 3567516 - DNA, 25 bp, Homo sapien
gctggagaagtgaccaagggcctca

SEQ ID NO: 3567517 - DNA, 25 bp, Homo sapien
ggggctggagaagtgaccaagggcc

SEQ ID NO: 3567518 - DNA, 25 bp, Homo sapien
ggctggagaagtgaccaagggcctc

SEQ ID NO: 3567519 - DNA, 25 bp, Homo sapien
ctggagaagtgaccaagggcctcac

SEQ ID NO: 3567520 - DNA, 25 bp, Homo sapien
gagagaactctgactgcactgtggt

SEQ ID NO: 3567521 - DNA, 25 bp, Homo sapien
gcaaagctggagcagagattcccca

SEQ ID NO: 3567522 - DNA, 25 bp, Homo sapien
ggaatgtgatccttgtcccaggaac

SEQ ID NO: 3567523 - DNA, 25 bp, Homo sapien
gacatgagaaagttctggcgttgga

SEQ ID NO: 3567524 - DNA, 25 bp, Homo sapien
ccatcaagatgccagcgtcgcattt

SEQ ID NO: 3567525 - DNA, 25 bp, Homo sapien
acgtctgctgcccagtttgtgtcca

SEQ ID NO: 3567526 - DNA, 25 bp, Homo sapien
tcggaaacacaacaggagtgacgtc

SEQ ID NO: 3567527 - DNA, 25 bp, Homo sapien
atggcctttcatggttgggtttttg

SEQ ID NO: 3567528 - DNA, 25 bp, Homo sapien
ttttcggcagtcattggcgacgctg

SEQ ID NO: 3567529 - DNA, 25 bp, Homo sapien
ttagggcataccttcctgcactgtg

SEQ ID NO: 3567530 - DNA, 25 bp, Homo sapien
caactcagtatacggtcagcagcat

SEQ ID NO: 3567531 - DNA, 25 bp, Homo sapien
gcagccagtggtgcaatccttggca

SEQ ID NO: 3567532 - DNA, 25 bp, Homo sapien
tgcctgggtactgatttctccagtg

SEQ ID NO: 3567533 - DNA, 25 bp, Homo sapien
tcagactagctcagtgcttgcagtg

SEQ ID NO: 3567534 - DNA, 25 bp, Homo sapien
tgtggttcgccccagttgtcagctc

SEQ ID NO: 3567535 - DNA, 25 bp, Homo sapien
tagctcagtgcttgcagtgtggttc

SEQ ID NO: 3567536 - DNA, 25 bp, Homo sapien
agtgcttgcagtgtggttcgcccca

SEQ ID NO: 3567537 - DNA, 25 bp, Homo sapien
tgaatcacagccagcgggttctcag

SEQ ID NO: 3567538 - DNA, 25 bp, Homo sapien
tactgggctagaggaacaatatgat

SEQ ID NO: 3567539 - DNA, 25 bp, Homo sapien
cagaatactgggctagaggaacaat

SEQ ID NO: 3567540 - DNA, 25 bp, Homo sapien
cagcgggttctcagaatactgggct

SEQ ID NO: 3567541 - DNA, 25 bp, Homo sapien
tccagatcctggtaggcgagagtca

SEQ ID NO: 3567542 - DNA, 25 bp, Homo sapien
gaaatgaccaagactcgcgcagtgc

SEQ ID NO: 3567543 - DNA, 25 bp, Homo sapien
tgtcttaaagcagcctcgcaggtag

SEQ ID NO: 3567544 - DNA, 25 bp, Homo sapien
aaggaattcaccttggacgggctca

SEQ ID NO: 3567545 - DNA, 25 bp, Homo sapien
catatttgtgggaacctgtattctg

SEQ ID NO: 3567546 - DNA, 25 bp, Homo sapien
tgacatgtgttttgactttctcccc

SEQ ID NO: 3567547 - DNA, 25 bp, Homo sapien
cgttgcagccattggaaaacacttc

SEQ ID NO: 3567548 - DNA, 25 bp, Homo sapien
gttcttcccgggagctgactgcaca

SEQ ID NO: 3567549 - DNA, 25 bp, Homo sapien
gagaggatatgacttttactgagtt

SEQ ID NO: 3567550 - DNA, 25 bp, Homo sapien
gatatgacttttactgagtttatcc

SEQ ID NO: 3567551 - DNA, 25 bp, Homo sapien
gaggatatgacttttactgagttta

SEQ ID NO: 3567552 - DNA, 25 bp, Homo sapien
tttgttactataactctccatcaca

SEQ ID NO: 3567553 - DNA, 25 bp, Homo sapien
gaagtcttttgacgcatttcttgcc

SEQ ID NO: 3567554 - DNA, 25 bp, Homo sapien
cacgaatggcaagttgcaagtaatg

SEQ ID NO: 3567555 - DNA, 25 bp, Homo sapien
gagcccaattctttatctccacgaa

SEQ ID NO: 3567556 - DNA, 25 bp, Homo sapien
gacacctttaccagcaattgtagac

SEQ ID NO: 3567557 - DNA, 25 bp, Homo sapien
gtactttcatttgggcaggctttgg

SEQ ID NO: 3567558 - DNA, 25 bp, Homo sapien
gctcaaaccatctttcccccgcatc

SEQ ID NO: 3567559 - DNA, 25 bp, Homo sapien
cttaaattcaatattggctcaaacc

SEQ ID NO: 3567560 - DNA, 25 bp, Homo sapien
ctccttaaattcaatattggctcaa

SEQ ID NO: 3567561 - DNA, 25 bp, Homo sapien
cactgactctcagacccgaaccctt

SEQ ID NO: 3567562 - DNA, 25 bp, Homo sapien
tttgtcttcaccgggttgactccca

SEQ ID NO: 3567563 - DNA, 25 bp, Homo sapien
tctcagacccgaaccctttgtcttc

SEQ ID NO: 3567564 - DNA, 25 bp, Homo sapien
ttgtcttcaccgggttgactcccat

SEQ ID NO: 3567565 - DNA, 25 bp, Homo sapien
gcgccactatggttggctaatgttt

SEQ ID NO: 3567566 - DNA, 25 bp, Homo sapien
gtggtgtgatcgggctcaagcaatg

SEQ ID NO: 3567567 - DNA, 25 bp, Homo sapien
atggttggctaatgttttttctgtg

SEQ ID NO: 3567568 - DNA, 25 bp, Homo sapien
tggtgtgatcgggctcaagcaatgc

SEQ ID NO: 3567569 - DNA, 25 bp, Homo sapien
gcaggacactgttatgaccccattt

SEQ ID NO: 3567570 - DNA, 25 bp, Homo sapien
gattcccacattggagcgcgggctg

SEQ ID NO: 3567571 - DNA, 25 bp, Homo sapien
gcctctgtaggtagattccactccg

SEQ ID NO: 3567572 - DNA, 25 bp, Homo sapien
tactgtgtgtaaggtaccgtccagg

SEQ ID NO: 3567573 - DNA, 25 bp, Homo sapien
cagttagatccccttccactccttg

SEQ ID NO: 3567574 - DNA, 25 bp, Homo sapien
tctttaacggagggacttgtctctc

SEQ ID NO: 3567575 - DNA, 25 bp, Homo sapien
acttgtctctcagttagatcccctt

SEQ ID NO: 3567576 - DNA, 25 bp, Homo sapien
ctttaacggagggacttgtctctca

SEQ ID NO: 3567577 - DNA, 25 bp, Homo sapien
tggctcaggagccagtggcgtcttc

SEQ ID NO: 3567578 - DNA, 25 bp, Homo sapien
cacgtggtagctgctgattagcaaa

SEQ ID NO: 3567579 - DNA, 25 bp, Homo sapien
gaaacataatagagtcgcggtggca

SEQ ID NO: 3567580 - DNA, 25 bp, Homo sapien
tggactgggccctgtagtttaaagc

SEQ ID NO: 3567581 - DNA, 25 bp, Homo sapien
tgtagctggtgaagagaccacgtct

SEQ ID NO: 3567582 - DNA, 25 bp, Homo sapien
caggtttgaccttcagtgatactga

SEQ ID NO: 3567583 - DNA, 25 bp, Homo sapien
tatagtttcagagctgacggaccag

SEQ ID NO: 3567584 - DNA, 25 bp, Homo sapien
ttattataaagtggctggcaatgcc

SEQ ID NO: 3567585 - DNA, 25 bp, Homo sapien
gcaccccagcctggacagcaagagt

SEQ ID NO: 3567586 - DNA, 25 bp, Homo sapien
tgcaccccagcctggacagcaagag

SEQ ID NO: 3567587 - DNA, 25 bp, Homo sapien
gagtgaaactccatctcaaaaaaaa

SEQ ID NO: 3567588 - DNA, 25 bp, Homo sapien
taaaaagtgcggttgggcatttgcc

SEQ ID NO: 3567589 - DNA, 25 bp, Homo sapien
ggtgattgaagccacggacaccggc

SEQ ID NO: 3567590 - DNA, 25 bp, Homo sapien
catttgcctagggtaggtgattgaa

SEQ ID NO: 3567591 - DNA, 25 bp, Homo sapien
agcagaccggaaatgtggaacccca

SEQ ID NO: 3567592 - DNA, 25 bp, Homo sapien
gcagcggccagcatagacgagatat

SEQ ID NO: 3567593 - DNA, 25 bp, Homo sapien
gacgagatatgcactatttcttgaa

SEQ ID NO: 3567594 - DNA, 25 bp, Homo sapien
aggttcctgccagctcgtctgtctg

SEQ ID NO: 3567595 - DNA, 25 bp, Homo sapien
tcgtctgtctgttctttaaagcatc

SEQ ID NO: 3567596 - DNA, 25 bp, Homo sapien
gcaattctctgctatacagattggg

SEQ ID NO: 3567597 - DNA, 25 bp, Homo sapien
gccgggtctatgctactgggtctac

SEQ ID NO: 3567598 - DNA, 25 bp, Homo sapien
ggtctacgcatggtgtgtgccacca

SEQ ID NO: 3567599 - DNA, 25 bp, Homo sapien
ataaggtttccccatctaaggcaat

SEQ ID NO: 3567600 - DNA, 25 bp, Homo sapien
gcagaaaggaataacaccagggtga

SEQ ID NO: 3567601 - DNA, 25 bp, Homo sapien
agggtgagtgtgacctttctgttca

SEQ ID NO: 3567602 - DNA, 25 bp, Homo sapien
gaaaggaataacaccagggtgagtg

SEQ ID NO: 3567603 - DNA, 25 bp, Homo sapien
ccagggtgagtgtgacctttctgtt

SEQ ID NO: 3567604 - DNA, 25 bp, Homo sapien
tctggatgaaaaggtgccatcagcc

SEQ ID NO: 3567605 - DNA, 25 bp, Homo sapien
tgctgaaagcactgaagtccttatt

SEQ ID NO: 3567606 - DNA, 25 bp, Homo sapien
tggtgaagagacaagcgcagtctcc

SEQ ID NO: 3567607 - DNA, 25 bp, Homo sapien
tgtctccaggcatgagcggtctctt

SEQ ID NO: 3567608 - DNA, 25 bp, Homo sapien
tattttatagctcaccaaacaaggg

SEQ ID NO: 3567609 - DNA, 25 bp, Homo sapien
ccaaatgaaagaacgcctggcttcc

SEQ ID NO: 3567610 - DNA, 25 bp, Homo sapien
gtaagcagtcaagggaacagagcca

SEQ ID NO: 3567611 - DNA, 25 bp, Homo sapien
taaagtaccggcttagagctgaagt

SEQ ID NO: 3567612 - DNA, 25 bp, Homo sapien
gtccttgtttgtagattcttcatct

SEQ ID NO: 3567613 - DNA, 25 bp, Homo sapien
tcaagagtggaatttgcttctacat

SEQ ID NO: 3567614 - DNA, 25 bp, Homo sapien
gcttctacatgggtcatcaggatcg

SEQ ID NO: 3567615 - DNA, 25 bp, Homo sapien
cacaatatactcattgctgacaaat

SEQ ID NO: 3567616 - DNA, 25 bp, Homo sapien
tttgtggcgttgaatattaatggtc

SEQ ID NO: 3567617 - DNA, 25 bp, Homo sapien
tgctgcggcgcccacagaaaggccg

SEQ ID NO: 3567618 - DNA, 25 bp, Homo sapien
tggcagccctgcgagatgagccttc

SEQ ID NO: 3567619 - DNA, 25 bp, Homo sapien
gccttccaaggcaaggtctttgtgt

SEQ ID NO: 3567620 - DNA, 25 bp, Homo sapien
caaggtctttgtgtgaaatacctct

SEQ ID NO: 3567621 - DNA, 25 bp, Homo sapien
tcttctaaggctatatttgcagcca

SEQ ID NO: 3567622 - DNA, 25 bp, Homo sapien
ggcgcgacctggactcattgcaact

SEQ ID NO: 3567623 - DNA, 25 bp, Homo sapien
tagtcaccctgctgatctgtccaac

SEQ ID NO: 3567624 - DNA, 25 bp, Homo sapien
cacgcctggcgtgtatcacctagta

SEQ ID NO: 3567625 - DNA, 25 bp, Homo sapien
tgagtggcatttgtcccaagggaac

SEQ ID NO: 3567626 - DNA, 25 bp, Homo sapien
accacctggtgattggcgccatgca

SEQ ID NO: 3567627 - DNA, 25 bp, Homo sapien
caaggctgagcgtaagttgggaacc

SEQ ID NO: 3567628 - DNA, 25 bp, Homo sapien
tgttaaaaaacgaagtctctggcag

SEQ ID NO: 3567629 - DNA, 25 bp, Homo sapien
tcagtcgttccagataagtatttcc

SEQ ID NO: 3567630 - DNA, 25 bp, Homo sapien
ccagcgcgttttccacttaagaccg

SEQ ID NO: 3567631 - DNA, 25 bp, Homo sapien
cgaagagatggaaacgctcgcagcc

SEQ ID NO: 3567632 - DNA, 25 bp, Homo sapien
ccacaggaaatgtctggttaacaca

SEQ ID NO: 3567633 - DNA, 25 bp, Homo sapien
taaaatctagctcattagactgtcc

SEQ ID NO: 3567634 - DNA, 25 bp, Homo sapien
ccctttataggaccaataatgacca

SEQ ID NO: 3567635 - DNA, 25 bp, Homo sapien
tctcttgatttaagcattctgtgcc

SEQ ID NO: 3567636 - DNA, 25 bp, Homo sapien
ttacgaggtgatggttgaagcagct

SEQ ID NO: 3567637 - DNA, 25 bp, Homo sapien
tgtactccttcactccgaaatgctg

SEQ ID NO: 3567638 - DNA, 25 bp, Homo sapien
catcagtctggaggttaaatgtctc

SEQ ID NO: 3567639 - DNA, 25 bp, Homo sapien
actagtctagtgtcattgcagagga

SEQ ID NO: 3567640 - DNA, 25 bp, Homo sapien
aatgtctccggctagtcgtttcctg

SEQ ID NO: 3567641 - DNA, 25 bp, Homo sapien
tggagccagctccatccgtgatgaa

SEQ ID NO: 3567642 - DNA, 25 bp, Homo sapien
tctgttggaagcatgagagtcctgc

SEQ ID NO: 3567643 - DNA, 25 bp, Homo sapien
aattagctgagcttcgtgacacacg

SEQ ID NO: 3567644 - DNA, 25 bp, Homo sapien
tgttcacggagcacttctggcctta

SEQ ID NO: 3567645 - DNA, 25 bp, Homo sapien
aaacttccgggtgacttcttctatg

SEQ ID NO: 3567646 - DNA, 25 bp, Homo sapien
taacctgtcacttgttgggagcatg

SEQ ID NO: 3567647 - DNA, 25 bp, Homo sapien
caaaggacattcgtggcttagctgc

SEQ ID NO: 3567648 - DNA, 25 bp, Homo sapien
cacttgagtatggttgcatgtccaa

SEQ ID NO: 3567649 - DNA, 25 bp, Homo sapien
tctcccaggttcttaagagtcagag

SEQ ID NO: 3567650 - DNA, 25 bp, Homo sapien
ccaggttcttaagagtcagagggtt

SEQ ID NO: 3567651 - DNA, 25 bp, Homo sapien
aggtctcccaggttcttaagagtca

SEQ ID NO: 3567652 - DNA, 25 bp, Homo sapien
ttcttaagagtcagagggtttgtga

SEQ ID NO: 3567653 - DNA, 25 bp, Homo sapien
tcttaatgtctttgctggaaccatg

SEQ ID NO: 3567654 - DNA, 25 bp, Homo sapien
ccatgcaggatgttgattaagtgtt

SEQ ID NO: 3567655 - DNA, 25 bp, Homo sapien
tgcaggatgttgattaagtgttcct

SEQ ID NO: 3567656 - DNA, 25 bp, Homo sapien
catgcaggatgttgattaagtgttc

SEQ ID NO: 3567657 - DNA, 25 bp, Homo sapien
taatacttgttatatggaccctaag

SEQ ID NO: 3567658 - DNA, 25 bp, Homo sapien
ccatgacaaaggattttacgtttat

SEQ ID NO: 3567659 - DNA, 25 bp, Homo sapien
taaaattatgacagaagccatgtgc

SEQ ID NO: 3567660 - DNA, 25 bp, Homo sapien
tgtataaatcctatgaatagagggc

SEQ ID NO: 3567661 - DNA, 25 bp, Homo sapien
catgtttaaagaacgaacctagtgg

SEQ ID NO: 3567662 - DNA, 25 bp, Homo sapien
caaaggcagagcctaggccgtggac

SEQ ID NO: 3567663 - DNA, 25 bp, Homo sapien
caagccagcaaagtgtgtcagacca

SEQ ID NO: 3567664 - DNA, 25 bp, Homo sapien
catacacagtcggtgggtagggccc

SEQ ID NO: 3567665 - DNA, 25 bp, Homo sapien
agagagctgtctagtgtctgtcccc

SEQ ID NO: 3567666 - DNA, 25 bp, Homo sapien
tgctcccgccatcctattcgaagtg

SEQ ID NO: 3567667 - DNA, 25 bp, Homo sapien
gaagccaacttggacatgccagttc

SEQ ID NO: 3567668 - DNA, 25 bp, Homo sapien
gaagtgccagccatacacgtgatga

SEQ ID NO: 3567669 - DNA, 25 bp, Homo sapien
acattcagaagcgaggcccagacat

SEQ ID NO: 3567670 - DNA, 25 bp, Homo sapien
aggcccagacatagaaccccggtct

SEQ ID NO: 3567671 - DNA, 25 bp, Homo sapien
caacattcagaagcgaggcccagac

SEQ ID NO: 3567672 - DNA, 25 bp, Homo sapien
atagaaccccggtcttcatcgcagc

SEQ ID NO: 3567673 - DNA, 25 bp, Homo sapien
ccagtggagaccattgaaatgaagg

SEQ ID NO: 3567674 - DNA, 25 bp, Homo sapien
ggctgaccagatgagccactccagt

SEQ ID NO: 3567675 - DNA, 25 bp, Homo sapien
tgaaatgaaggtaagccgctcccac

SEQ ID NO: 3567676 - DNA, 25 bp, Homo sapien
aaattatgagcatgatgaaaggttt

SEQ ID NO: 3567677 - DNA, 25 bp, Homo sapien
gatgtattcattatcgagttaaata

SEQ ID NO: 3567678 - DNA, 25 bp, Homo sapien
tgtgtatgaaggtcatgattttacc

SEQ ID NO: 3567679 - DNA, 25 bp, Homo sapien
aaacaatttgtaacaacttatgatg

SEQ ID NO: 3567680 - DNA, 25 bp, Homo sapien
atttgacgtgttcattttatatgtg

SEQ ID NO: 3567681 - DNA, 25 bp, Homo sapien
gaggtcttcgctgtgctctatcggc

SEQ ID NO: 3567682 - DNA, 25 bp, Homo sapien
ctcccagaataaagaccgaggtctt

SEQ ID NO: 3567683 - DNA, 25 bp, Homo sapien
tctatcggcctctgcatgacctggc

SEQ ID NO: 3567684 - DNA, 25 bp, Homo sapien
cgttcctgccttgggacctctgttg

SEQ ID NO: 3567685 - DNA, 25 bp, Homo sapien
taggctgctatgtccctgtggccgg

SEQ ID NO: 3567686 - DNA, 25 bp, Homo sapien
gcaacgctacttccgggcgagctct

SEQ ID NO: 3567687 - DNA, 25 bp, Homo sapien
gctcgcgtccctggcacgcatgtgg

SEQ ID NO: 3567688 - DNA, 25 bp, Homo sapien
cggactcagggcacgtgcgtctcct

SEQ ID NO: 3567689 - DNA, 25 bp, Homo sapien
tcccgctggaatctgtggacgtttg

SEQ ID NO: 3567690 - DNA, 25 bp, Homo sapien
tagtctaagggatgcctgatccctg

SEQ ID NO: 3567691 - DNA, 25 bp, Homo sapien
gctgcagctagtcgtgaggctctaa

SEQ ID NO: 3567692 - DNA, 25 bp, Homo sapien
taaaatcaccagaacggtgctttgg

SEQ ID NO: 3567693 - DNA, 25 bp, Homo sapien
gtgaaggtggcctcgccagccctgc

SEQ ID NO: 3567694 - DNA, 25 bp, Homo sapien
agggactcccatcctttcttgcagc

SEQ ID NO: 3567695 - DNA, 25 bp, Homo sapien
cagggactcccatcctttcttgcag

SEQ ID NO: 3567696 - DNA, 25 bp, Homo sapien
ttgggggtgaaggtggcctcgccag

SEQ ID NO: 3567697 - DNA, 25 bp, Homo sapien
gatcaggtgacttctagcagagacc

SEQ ID NO: 3567698 - DNA, 25 bp, Homo sapien
ccaactatgtggagctgcggcagta

SEQ ID NO: 3567699 - DNA, 25 bp, Homo sapien
cctgatggaagttaacccggagcta

SEQ ID NO: 3567700 - DNA, 25 bp, Homo sapien
ccaaattgactgtcacgcggcagct

SEQ ID NO: 3567701 - DNA, 25 bp, Homo sapien
aggatacacctccacagtctgatgg

SEQ ID NO: 3567702 - DNA, 25 bp, Homo sapien
cacagtctgatggaacacactgaag

SEQ ID NO: 3567703 - DNA, 25 bp, Homo sapien
gatgtattgccaggatacacctcca

SEQ ID NO: 3567704 - DNA, 25 bp, Homo sapien
gaatttgagatgtattgccaggata

SEQ ID NO: 3567705 - DNA, 25 bp, Homo sapien
ttaaaaaccatttgagacagctccg

SEQ ID NO: 3567706 - DNA, 25 bp, Homo sapien
gacagctccgttgtcatttgtgagc

SEQ ID NO: 3567707 - DNA, 25 bp, Homo sapien
ttttctgtgaattacacctcctgct

SEQ ID NO: 3567708 - DNA, 25 bp, Homo sapien
ggcccaacttagctatctctggatt

SEQ ID NO: 3567709 - DNA, 25 bp, Homo sapien
tagaaactaaatcaacaccaggcag

SEQ ID NO: 3567710 - DNA, 25 bp, Homo sapien
gagcaagccgctttggaaacaaatc

SEQ ID NO: 3567711 - DNA, 25 bp, Homo sapien
tgccagtatcctggtgagcaagccg

SEQ ID NO: 3567712 - DNA, 25 bp, Homo sapien
tcaagcagctgtatggagaggtcag

SEQ ID NO: 3567713 - DNA, 25 bp, Homo sapien
atttgctgcagacaccattgtggct

SEQ ID NO: 3567714 - DNA, 25 bp, Homo sapien
tttgctgcagacaccattgtggctg

SEQ ID NO: 3567715 - DNA, 25 bp, Homo sapien
agggcccctcctctggctctcagac

SEQ ID NO: 3567716 - DNA, 25 bp, Homo sapien
cagtggctgtgagcagtgccagggc

SEQ ID NO: 3567717 - DNA, 25 bp, Homo sapien
ccagtggctgtgagcagtgccaggg

SEQ ID NO: 3567718 - DNA, 25 bp, Homo sapien
cccctcctctggctctcagacacat

SEQ ID NO: 3567719 - DNA, 25 bp, Homo sapien
gaatcacgtgtaggtgtcctcaaca

SEQ ID NO: 3567720 - DNA, 25 bp, Homo sapien
cagtcttatgatgagaaaggctcca

SEQ ID NO: 3567721 - DNA, 25 bp, Homo sapien
tcaacatttcatagctcgaaccgtc

SEQ ID NO: 3567722 - DNA, 25 bp, Homo sapien
acaatatggttttatgcagatcagg

SEQ ID NO: 3567723 - DNA, 25 bp, Homo sapien
tgattccccacaaagcacgggcagt

SEQ ID NO: 3567724 - DNA, 25 bp, Homo sapien
ttatggctagaagacaccctgctgg

SEQ ID NO: 3567725 - DNA, 25 bp, Homo sapien
ggaaccaaggcagattagctcagtg

SEQ ID NO: 3567726 - DNA, 25 bp, Homo sapien
tacattagattgcaagtcgggcagc

SEQ ID NO: 3567727 - DNA, 25 bp, Homo sapien
tacaagagctaggatcccgtgcaaa

SEQ ID NO: 3567728 - DNA, 25 bp, Homo sapien
ggattcctagacacccagagcgata

SEQ ID NO: 3567729 - DNA, 25 bp, Homo sapien
taaaatgtgcgcagacaccctggaa

SEQ ID NO: 3567730 - DNA, 25 bp, Homo sapien
tgaaagcacacggaagtaaagcgcc

SEQ ID NO: 3567731 - DNA, 25 bp, Homo sapien
gcagctgtttcaaagccctttctat

SEQ ID NO: 3567732 - DNA, 25 bp, Homo sapien
ctatgttcattctgtgcccgactcg

SEQ ID NO: 3567733 - DNA, 25 bp, Homo sapien
cagctgtttcaaagccctttctatg

SEQ ID NO: 3567734 - DNA, 25 bp, Homo sapien
tgttcattctgtgcccgactcgagt

SEQ ID NO: 3567735 - DNA, 25 bp, Homo sapien
aaggtgaccgtcgtgctccgtgtac

SEQ ID NO: 3567736 - DNA, 25 bp, Homo sapien
taaagacatctgagagagcgggaga

SEQ ID NO: 3567737 - DNA, 25 bp, Homo sapien
tctctgttggcgagaccacagggct

SEQ ID NO: 3567738 - DNA, 25 bp, Homo sapien
tcaagccaaatagatccccagaagg

SEQ ID NO: 3567739 - DNA, 25 bp, Homo sapien
tgagaggctcactggtaggacacac

SEQ ID NO: 3567740 - DNA, 25 bp, Homo sapien
gaacgaatgatttgccatgccaggg

SEQ ID NO: 3567741 - DNA, 25 bp, Homo sapien
tattgtccctaggaaagccacagcc

SEQ ID NO: 3567742 - DNA, 25 bp, Homo sapien
cattcacgtggatatgaacggccca

SEQ ID NO: 3567743 - DNA, 25 bp, Homo sapien
ggagcgtgggaaactcacaagcttg

SEQ ID NO: 3567744 - DNA, 25 bp, Homo sapien
agcccatccgtggtggtcccttcgg

SEQ ID NO: 3567745 - DNA, 25 bp, Homo sapien
tatggcatcactttcatagggagcg

SEQ ID NO: 3567746 - DNA, 25 bp, Homo sapien
gagctgaaacatcaatatggcatca

SEQ ID NO: 3567747 - DNA, 25 bp, Homo sapien
caactcgaagcttggtttgggcttt

SEQ ID NO: 3567748 - DNA, 25 bp, Homo sapien
gccttctaggtggtcctggcagaga

SEQ ID NO: 3567749 - DNA, 25 bp, Homo sapien
tcctgcaaccaactcgaagcttggt

SEQ ID NO: 3567750 - DNA, 25 bp, Homo sapien
ttgggctttggcgaggctctaaacg

SEQ ID NO: 3567751 - DNA, 25 bp, Homo sapien
ggctcccattggtgaatccagtcct

SEQ ID NO: 3567752 - DNA, 25 bp, Homo sapien
gctggcggacttggctcccattggt

SEQ ID NO: 3567753 - DNA, 25 bp, Homo sapien
gacttggctcccattggtgaatcca

SEQ ID NO: 3567754 - DNA, 25 bp, Homo sapien
tcccattggtgaatccagtccttcc

SEQ ID NO: 3567755 - DNA, 25 bp, Homo sapien
aataacgtttgcctttgggcctgag

SEQ ID NO: 3567756 - DNA, 25 bp, Homo sapien
ctgtaggatagagttcaattcacta

SEQ ID NO: 3567757 - DNA, 25 bp, Homo sapien
gcctgagagaatcgggcttttgatc

SEQ ID NO: 3567758 - DNA, 25 bp, Homo sapien
aattcactaataacgtttgcctttg

SEQ ID NO: 3567759 - DNA, 25 bp, Homo sapien
tgtgacgtcgccccacaacttggag

SEQ ID NO: 3567760 - DNA, 25 bp, Homo sapien
tgacgtcgccccacaacttggaggt

SEQ ID NO: 3567761 - DNA, 25 bp, Homo sapien
ctgtgacgtcgccccacaacttgga

SEQ ID NO: 3567762 - DNA, 25 bp, Homo sapien
gtgacgtcgccccacaacttggagg

SEQ ID NO: 3567763 - DNA, 25 bp, Homo sapien
gcggggggataacaaagctatctac

SEQ ID NO: 3567764 - DNA, 25 bp, Homo sapien
ggcggggggataacaaagctatcta

SEQ ID NO: 3567765 - DNA, 25 bp, Homo sapien
gcttgcccatctgcatagactgtgc

SEQ ID NO: 3567766 - DNA, 25 bp, Homo sapien
gagcgcgtcttgataaagtgcattg

SEQ ID NO: 3567767 - DNA, 25 bp, Homo sapien
catagactgtgcaggtgtccacatt

SEQ ID NO: 3567768 - DNA, 25 bp, Homo sapien
tgcattgcttttgtgaatgatgggc

SEQ ID NO: 3567769 - DNA, 25 bp, Homo sapien
aaaatcaccgcctcttccatggagc

SEQ ID NO: 3567770 - DNA, 25 bp, Homo sapien
cggcgacggcgtcaaagctttcagg

SEQ ID NO: 3567771 - DNA, 25 bp, Homo sapien
cttcactaagtctgagagagccggg

SEQ ID NO: 3567772 - DNA, 25 bp, Homo sapien
ggcagcggagatctgtaaagcacct

SEQ ID NO: 3567773 - DNA, 25 bp, Homo sapien
tgcagggcgttgtccagcttagtgg

SEQ ID NO: 3567774 - DNA, 25 bp, Homo sapien
cgttgtccagcttagtggcgtccac

SEQ ID NO: 3567775 - DNA, 25 bp, Homo sapien
gggcgttgtccagcttagtggcgtc

SEQ ID NO: 3567776 - DNA, 25 bp, Homo sapien
ctgcagggcgttgtccagcttagtg

SEQ ID NO: 3567777 - DNA, 25 bp, Homo sapien
tctgcctggtgaccgtagggaagcc

SEQ ID NO: 3567778 - DNA, 25 bp, Homo sapien
gggtccctgttgagactccttcatg

SEQ ID NO: 3567779 - DNA, 25 bp, Homo sapien
caggctgggccgcattttggtatca

SEQ ID NO: 3567780 - DNA, 25 bp, Homo sapien
ttcatggctcggtcccttgcggaga

SEQ ID NO: 3567781 - DNA, 25 bp, Homo sapien
gggctttggacgtggaattcagcgg

SEQ ID NO: 3567782 - DNA, 25 bp, Homo sapien
aattcccggggccggctgtgccgct

SEQ ID NO: 3567783 - DNA, 25 bp, Homo sapien
tggacataattcccggggccggctg

SEQ ID NO: 3567784 - DNA, 25 bp, Homo sapien
tttggacgtggaattcagcggcctc

SEQ ID NO: 3567785 - DNA, 25 bp, Homo sapien
gaacgcaggcttaatcgtcccgtag

SEQ ID NO: 3567786 - DNA, 25 bp, Homo sapien
tgaacttcagcattggaggagccag

SEQ ID NO: 3567787 - DNA, 25 bp, Homo sapien
ttcagagtccaaggagtagcggtcc

SEQ ID NO: 3567788 - DNA, 25 bp, Homo sapien
tgtcctcagaggtgtccggcatgga

SEQ ID NO: 3567789 - DNA, 25 bp, Homo sapien
ttaacatactccttgtgggaggaca

SEQ ID NO: 3567790 - DNA, 25 bp, Homo sapien
caaagatggctcgttcaaagtgttc

SEQ ID NO: 3567791 - DNA, 25 bp, Homo sapien
tacagattccaaaccgtaaggttca

SEQ ID NO: 3567792 - DNA, 25 bp, Homo sapien
aaagtgttctccattgaccagtcac

SEQ ID NO: 3567793 - DNA, 25 bp, Homo sapien
gccaaggcaactgtgagaggcccag

SEQ ID NO: 3567794 - DNA, 25 bp, Homo sapien
gactgcctacagttatccacctgag

SEQ ID NO: 3567795 - DNA, 25 bp, Homo sapien
cttggaagtacatctgctgagctca

SEQ ID NO: 3567796 - DNA, 25 bp, Homo sapien
gcaagggccttagcttctaccagaa

SEQ ID NO: 3567797 - DNA, 25 bp, Homo sapien
caacttctgtgggggagtgccacac

SEQ ID NO: 3567798 - DNA, 25 bp, Homo sapien
aggggcaacttctgtgggggagtgc

SEQ ID NO: 3567799 - DNA, 25 bp, Homo sapien
cttctgtgggggagtgccacacttc

SEQ ID NO: 3567800 - DNA, 25 bp, Homo sapien
gggcaacttctgtgggggagtgcca

SEQ ID NO: 3567801 - DNA, 25 bp, Homo sapien
cgattccttggcgttcgtacacaga

SEQ ID NO: 3567802 - DNA, 25 bp, Homo sapien
tcgcatcgtacctcgagggatgccc

SEQ ID NO: 3567803 - DNA, 25 bp, Homo sapien
ttgatttctgccttcgcatcgtacc

SEQ ID NO: 3567804 - DNA, 25 bp, Homo sapien
aacagtgggcgtcatcacggcgatt

SEQ ID NO: 3567805 - DNA, 25 bp, Homo sapien
ttgatggtcgccaccctcggttcca

SEQ ID NO: 3567806 - DNA, 25 bp, Homo sapien
gttcatgtctgagcccgccgggaag

SEQ ID NO: 3567807 - DNA, 25 bp, Homo sapien
ctgggccgctgcttgatggtcgcca

SEQ ID NO: 3567808 - DNA, 25 bp, Homo sapien
gctgcttgatggtcgccaccctcgg

SEQ ID NO: 3567809 - DNA, 25 bp, Homo sapien
cttggaggccgggactatctcctcg

SEQ ID NO: 3567810 - DNA, 25 bp, Homo sapien
ggcttggaggccgggactatctcct

SEQ ID NO: 3567811 - DNA, 25 bp, Homo sapien
tggaggccgggactatctcctcggg

SEQ ID NO: 3567812 - DNA, 25 bp, Homo sapien
ttggaggccgggactatctcctcgg

SEQ ID NO: 3567813 - DNA, 25 bp, Homo sapien
gaaccgtgaggattggagcagcaac

SEQ ID NO: 3567814 - DNA, 25 bp, Homo sapien
tagaaccgtgaggattggagcagca

SEQ ID NO: 3567815 - DNA, 25 bp, Homo sapien
ccgtgaggattggagcagcaacacc

SEQ ID NO: 3567816 - DNA, 25 bp, Homo sapien
tgcaatagaaccgtgaggattggag

SEQ ID NO: 3567817 - DNA, 25 bp, Homo sapien
gaagtgtatgctagggccttgccca

SEQ ID NO: 3567818 - DNA, 25 bp, Homo sapien
gctgtttaaatgcaagggccctgtg

SEQ ID NO: 3567819 - DNA, 25 bp, Homo sapien
gctggtcttccagtcgcgatgtgca

SEQ ID NO: 3567820 - DNA, 25 bp, Homo sapien
tcaggcataagggtgtgtctaaggc

SEQ ID NO: 3567821 - DNA, 25 bp, Homo sapien
ccagagccacggcacggatcagggt

SEQ ID NO: 3567822 - DNA, 25 bp, Homo sapien
tcagggttgtccaacacaaaggcat

SEQ ID NO: 3567823 - DNA, 25 bp, Homo sapien
cacggcacggatcagggttgtccaa

SEQ ID NO: 3567824 - DNA, 25 bp, Homo sapien
gggagctgacccacgggcaaagctc

SEQ ID NO: 3567825 - DNA, 25 bp, Homo sapien
cagaccagaggtccccacaagagga

SEQ ID NO: 3567826 - DNA, 25 bp, Homo sapien
agaggtccccacaagaggaagtttg

SEQ ID NO: 3567827 - DNA, 25 bp, Homo sapien
tgcagagcagctgagacgtacacaa

SEQ ID NO: 3567828 - DNA, 25 bp, Homo sapien
agcagctgagacgtacacaactctg

SEQ ID NO: 3567829 - DNA, 25 bp, Homo sapien
gctgtttgcctgttgactcttcaga

SEQ ID NO: 3567830 - DNA, 25 bp, Homo sapien
cactaggtccactgtccagcgagtt

SEQ ID NO: 3567831 - DNA, 25 bp, Homo sapien
ccagcgagttcctttgcctgtggcc

SEQ ID NO: 3567832 - DNA, 25 bp, Homo sapien
cacaataggcccagagcctgggagc

SEQ ID NO: 3567833 - DNA, 25 bp, Homo sapien
tgggccacggctgctggtccctttg

SEQ ID NO: 3567834 - DNA, 25 bp, Homo sapien
cagcaacgctcggtgtcttcagtcc

SEQ ID NO: 3567835 - DNA, 25 bp, Homo sapien
cagtttctcttgctcagacgggagg

SEQ ID NO: 3567836 - DNA, 25 bp, Homo sapien
gaggctctggaagctcaaatttgta

SEQ ID NO: 3567837 - DNA, 25 bp, Homo sapien
tcagccacctgagtcccgaactgtt

SEQ ID NO: 3567838 - DNA, 25 bp, Homo sapien
ccacgctgttctggcaactgggtcc

SEQ ID NO: 3567839 - DNA, 25 bp, Homo sapien
gaatagagggccattcccgtgagct

SEQ ID NO: 3567840 - DNA, 25 bp, Homo sapien
ggtgttcacacacaaacgtaattgc

SEQ ID NO: 3567841 - DNA, 25 bp, Homo sapien
tgtaggatgctggtgcaagcccggg

SEQ ID NO: 3567842 - DNA, 25 bp, Homo sapien
agcagtggggcctagaaagcccgct

SEQ ID NO: 3567843 - DNA, 25 bp, Homo sapien
ctagaaagcccgctgggagttttct

SEQ ID NO: 3567844 - DNA, 25 bp, Homo sapien
aagcccgctgggagttttctgggca

SEQ ID NO: 3567845 - DNA, 25 bp, Homo sapien
gatgacacaggtcgggacagtggtg

SEQ ID NO: 3567846 - DNA, 25 bp, Homo sapien
tcacccaatctcatctaacatgatt

SEQ ID NO: 3567847 - DNA, 25 bp, Homo sapien
ttgggacagagttaagatgtgcctt

SEQ ID NO: 3567848 - DNA, 25 bp, Homo sapien
ttagggccaggtgctaggctcctcc

SEQ ID NO: 3567849 - DNA, 25 bp, Homo sapien
gctgtgtccagcagcaggcgagcaa

SEQ ID NO: 3567850 - DNA, 25 bp, Homo sapien
gtgtccagcagcaggcgagcaatac

SEQ ID NO: 3567851 - DNA, 25 bp, Homo sapien
ttaattgttgggggagctgtgtcca

SEQ ID NO: 3567852 - DNA, 25 bp, Homo sapien
taattgttgggggagctgtgtccag

SEQ ID NO: 3567853 - DNA, 25 bp, Homo sapien
gtcatgacgatgtgaacacaggtca

SEQ ID NO: 3567854 - DNA, 25 bp, Homo sapien
ggtccggccagcttcacggtcatga

SEQ ID NO: 3567855 - DNA, 25 bp, Homo sapien
gggaacctgagtctatctggggcct

SEQ ID NO: 3567856 - DNA, 25 bp, Homo sapien
cttctccttctagtgccccacaggg

SEQ ID NO: 3567857 - DNA, 25 bp, Homo sapien
tacactcgggccttgtcagctcagg

SEQ ID NO: 3567858 - DNA, 25 bp, Homo sapien
gcccgcagcctacactcgggccttg

SEQ ID NO: 3567859 - DNA, 25 bp, Homo sapien
cttgtcagctcagggcgcctcagga

SEQ ID NO: 3567860 - DNA, 25 bp, Homo sapien
aacagaaaggggaccgccatgagcc

SEQ ID NO: 3567861 - DNA, 25 bp, Homo sapien
tgactccccggaacaaacaggatcc

SEQ ID NO: 3567862 - DNA, 25 bp, Homo sapien
caccctctttccaaaggtgtccctg

SEQ ID NO: 3567863 - DNA, 25 bp, Homo sapien
ccacgtggctgctagtcgcccttcc

SEQ ID NO: 3567864 - DNA, 25 bp, Homo sapien
tgtgtgtttcagagccaccctcttt

SEQ ID NO: 3567865 - DNA, 25 bp, Homo sapien
tccagctccgaggtcatggacttgg

SEQ ID NO: 3567866 - DNA, 25 bp, Homo sapien
ccagctccgaggtcatggacttgga

SEQ ID NO: 3567867 - DNA, 25 bp, Homo sapien
ctccagctccgaggtcatggacttg

SEQ ID NO: 3567868 - DNA, 25 bp, Homo sapien
cagctccgaggtcatggacttggag

SEQ ID NO: 3567869 - DNA, 25 bp, Homo sapien
caccgtgaccaccttaaggaccagg

SEQ ID NO: 3567870 - DNA, 25 bp, Homo sapien
gggtccagattcctggtcaccgtga

SEQ ID NO: 3567871 - DNA, 25 bp, Homo sapien
gattccctccctgccggatcatgtt

SEQ ID NO: 3567872 - DNA, 25 bp, Homo sapien
ctgcctgtggccgactttgacaaca

SEQ ID NO: 3567873 - DNA, 25 bp, Homo sapien
ccaccaggggaaggtatggcttgat

SEQ ID NO: 3567874 - DNA, 25 bp, Homo sapien
ggtatggcttgatcacttgccagat

SEQ ID NO: 3567875 - DNA, 25 bp, Homo sapien
tttatagaaggctcaggtaagtact

SEQ ID NO: 3567876 - DNA, 25 bp, Homo sapien
tgccagatttatagaaggctcaggt

SEQ ID NO: 3567877 - DNA, 25 bp, Homo sapien
cagggcagacaaaggttgcaatttg

SEQ ID NO: 3567878 - DNA, 25 bp, Homo sapien
ggcagacaaaggttgcaatttgagt

SEQ ID NO: 3567879 - DNA, 25 bp, Homo sapien
tgcagggcagacaaaggttgcaatt

SEQ ID NO: 3567880 - DNA, 25 bp, Homo sapien
gacaaaggttgcaatttgagtttaa

SEQ ID NO: 3567881 - DNA, 25 bp, Homo sapien
ctcttgtagaagacggcggaacaac

SEQ ID NO: 3567882 - DNA, 25 bp, Homo sapien
taatataatccagagttgccaaagc

SEQ ID NO: 3567883 - DNA, 25 bp, Homo sapien
taacatcagcatggatatgacagag

SEQ ID NO: 3567884 - DNA, 25 bp, Homo sapien
aaaggtctaacataacgtgaacgag

SEQ ID NO: 3567885 - DNA, 25 bp, Homo sapien
cattgcttctattagtggtggtcag

SEQ ID NO: 3567886 - DNA, 25 bp, Homo sapien
tcaattgcatcctgcggcattgctt

SEQ ID NO: 3567887 - DNA, 25 bp, Homo sapien
cctttgcaggcggtgccgggcatac

SEQ ID NO: 3567888 - DNA, 25 bp, Homo sapien
gtcagaggcgggattgcatccagga

SEQ ID NO: 3567889 - DNA, 25 bp, Homo sapien
atcctccactgtgctgtatgagcag

SEQ ID NO: 3567890 - DNA, 25 bp, Homo sapien
cactgtgctgtatgagcagcccttc

SEQ ID NO: 3567891 - DNA, 25 bp, Homo sapien
gtgtcttcaataccttccttgcttt

SEQ ID NO: 3567892 - DNA, 25 bp, Homo sapien
gcccatcacatgtgactttgtgtct

SEQ ID NO: 3567893 - DNA, 25 bp, Homo sapien
attttggtggattatccttccatta

SEQ ID NO: 3567894 - DNA, 25 bp, Homo sapien
tccaaaattgaacctgctactctct

SEQ ID NO: 3567895 - DNA, 25 bp, Homo sapien
ttccaaaattgaacctgctactctc

SEQ ID NO: 3567896 - DNA, 25 bp, Homo sapien
tttggtggattatccttccattaaa

SEQ ID NO: 3567897 - DNA, 25 bp, Homo sapien
gcctttgagtccacttgctgtgcag

SEQ ID NO: 3567898 - DNA, 25 bp, Homo sapien
tccccgagcatcaaagcacgcgggt

SEQ ID NO: 3567899 - DNA, 25 bp, Homo sapien
cgagcatcaaagcacgcgggtggca

SEQ ID NO: 3567900 - DNA, 25 bp, Homo sapien
tgctcctccccgagcatcaaagcac

SEQ ID NO: 3567901 - DNA, 25 bp, Homo sapien
agcatcaaagcacgcgggtggcaca

SEQ ID NO: 3567902 - DNA, 25 bp, Homo sapien
ggagaaggcccctctgataagctga

SEQ ID NO: 3567903 - DNA, 25 bp, Homo sapien
gataagctgagctacgaatgtgcct

SEQ ID NO: 3567904 - DNA, 25 bp, Homo sapien
agggcagttgctataaatggcctcc

SEQ ID NO: 3567905 - DNA, 25 bp, Homo sapien
catcagccagctcgggtctgagagg

SEQ ID NO: 3567906 - DNA, 25 bp, Homo sapien
cacagaccgagggatgtagaggaca

SEQ ID NO: 3567907 - DNA, 25 bp, Homo sapien
ggacaatggcgaggtggggactcac

SEQ ID NO: 3567908 - DNA, 25 bp, Homo sapien
ctgcacagaccgagggatgtagagg

SEQ ID NO: 3567909 - DNA, 25 bp, Homo sapien
cagaccgagggatgtagaggacaat

SEQ ID NO: 3567910 - DNA, 25 bp, Homo sapien
tctgcatgacggtctttcccttgac

SEQ ID NO: 3567911 - DNA, 25 bp, Homo sapien
ctcaccgagagtgcagtcaggccat

SEQ ID NO: 3567912 - DNA, 25 bp, Homo sapien
gcccaacagagatgaggatagtcaa

SEQ ID NO: 3567913 - DNA, 25 bp, Homo sapien
ttgactgtctgcctcaccgagagtg

SEQ ID NO: 3567914 - DNA, 25 bp, Homo sapien
gtgttgggctttgtgtcgtacgtca

SEQ ID NO: 3567915 - DNA, 25 bp, Homo sapien
tgttgggctttgtgtcgtacgtcag

SEQ ID NO: 3567916 - DNA, 25 bp, Homo sapien
agtgttgggctttgtgtcgtacgtc

SEQ ID NO: 3567917 - DNA, 25 bp, Homo sapien
agcattttctgagccgtgttgagtg

SEQ ID NO: 3567918 - DNA, 25 bp, Homo sapien
ttgaacactcgtgaccatcctgggc

SEQ ID NO: 3567919 - DNA, 25 bp, Homo sapien
tgcagaggggcgttacccttgaaca

SEQ ID NO: 3567920 - DNA, 25 bp, Homo sapien
gggattcaggcggtcactgtcacct

SEQ ID NO: 3567921 - DNA, 25 bp, Homo sapien
cagtagcgagcggtggagatgaggg

SEQ ID NO: 3567922 - DNA, 25 bp, Homo sapien
agaaagctgagtcaccccacccggg

SEQ ID NO: 3567923 - DNA, 25 bp, Homo sapien
ccacccgggggctcctgcagccctg

SEQ ID NO: 3567924 - DNA, 25 bp, Homo sapien
aggccagaaagctgagtcaccccac

SEQ ID NO: 3567925 - DNA, 25 bp, Homo sapien
gggtaaggccagaaagctgagtcac

SEQ ID NO: 3567926 - DNA, 25 bp, Homo sapien
gttctaacagggtggctaactggat

SEQ ID NO: 3567927 - DNA, 25 bp, Homo sapien
ttatgcagagttctaacagggtggc

SEQ ID NO: 3567928 - DNA, 25 bp, Homo sapien
tgcagagttctaacagggtggctaa

SEQ ID NO: 3567929 - DNA, 25 bp, Homo sapien
cagagttctaacagggtggctaact

SEQ ID NO: 3567930 - DNA, 25 bp, Homo sapien
gagtgactgacggatctcactgtgg

SEQ ID NO: 3567931 - DNA, 25 bp, Homo sapien
tgggagagtgactgacggatctcac

SEQ ID NO: 3567932 - DNA, 25 bp, Homo sapien
tgacggatctcactgtgggccgtgc

SEQ ID NO: 3567933 - DNA, 25 bp, Homo sapien
gtgggccgtgcagtgtgtatggttc

SEQ ID NO: 3567934 - DNA, 25 bp, Homo sapien
ctattcaagactaaagtctagccca

SEQ ID NO: 3567935 - DNA, 25 bp, Homo sapien
tattcaagactaaagtctagcccac

SEQ ID NO: 3567936 - DNA, 25 bp, Homo sapien
tccgttcaggaggaaagaccacatc

SEQ ID NO: 3567937 - DNA, 25 bp, Homo sapien
gcgatgttgttagcgaaggtcccac

SEQ ID NO: 3567938 - DNA, 25 bp, Homo sapien
tgggctaagaactgagcgatgttgt

SEQ ID NO: 3567939 - DNA, 25 bp, Homo sapien
catttggtcccggattcgcgtgggt

SEQ ID NO: 3567940 - DNA, 25 bp, Homo sapien
gttatggagaggaacttgtctagcc

SEQ ID NO: 3567941 - DNA, 25 bp, Homo sapien
tctagcctcatgagcagacacgtgt

SEQ ID NO: 3567942 - DNA, 25 bp, Homo sapien
cagtggtaaacgctctccaggaagg

SEQ ID NO: 3567943 - DNA, 25 bp, Homo sapien
caggtctgagaaacatcgaggtgtg

SEQ ID NO: 3567944 - DNA, 25 bp, Homo sapien
gatggcgaccgcatgcctgttatct

SEQ ID NO: 3567945 - DNA, 25 bp, Homo sapien
tctgggctctgatggcgaccgcatg

SEQ ID NO: 3567946 - DNA, 25 bp, Homo sapien
gctctgatggcgaccgcatgcctgt

SEQ ID NO: 3567947 - DNA, 25 bp, Homo sapien
tggcgaccgcatgcctgttatctac

SEQ ID NO: 3567948 - DNA, 25 bp, Homo sapien
cccggtgtgatgcttgccatggcct

SEQ ID NO: 3567949 - DNA, 25 bp, Homo sapien
tcggcagccccggtgtgatgcttgc

SEQ ID NO: 3567950 - DNA, 25 bp, Homo sapien
cagccccggtgtgatgcttgccatg

SEQ ID NO: 3567951 - DNA, 25 bp, Homo sapien
cccggcctcggcagccccggtgtga

SEQ ID NO: 3567952 - DNA, 25 bp, Homo sapien
ggtgtctctgctcgtccacctggtc

SEQ ID NO: 3567953 - DNA, 25 bp, Homo sapien
gaaactcccgcaggcctggactctg

SEQ ID NO: 3567954 - DNA, 25 bp, Homo sapien
gggatgtggtgtctctgctcgtcca

SEQ ID NO: 3567955 - DNA, 25 bp, Homo sapien
ctggcctggagtgatgtgaaactcc

SEQ ID NO: 3567956 - DNA, 25 bp, Homo sapien
acctgtggctcgagggttctccgtg

SEQ ID NO: 3567957 - DNA, 25 bp, Homo sapien
cgtcattaaacctgtggctcgaggg

SEQ ID NO: 3567958 - DNA, 25 bp, Homo sapien
tcgctgggcgtcattaaacctgtgg

SEQ ID NO: 3567959 - DNA, 25 bp, Homo sapien
gggctcgtcgctgggcgtcattaaa

SEQ ID NO: 3567960 - DNA, 25 bp, Homo sapien
ggggtgcaagggagtcaccgtgtcc

SEQ ID NO: 3567961 - DNA, 25 bp, Homo sapien
gggtgcaagggagtcaccgtgtcca

SEQ ID NO: 3567962 - DNA, 25 bp, Homo sapien
gatagaaaatcaagccggtcacaac

SEQ ID NO: 3567963 - DNA, 25 bp, Homo sapien
gagccctcgagtttgagaccccatc

SEQ ID NO: 3567964 - DNA, 25 bp, Homo sapien
tcagaaagtgaagcatcctcattgc

SEQ ID NO: 3567965 - DNA, 25 bp, Homo sapien
ttgtaggtcgcagctactccagagg

SEQ ID NO: 3567966 - DNA, 25 bp, Homo sapien
ggcgttccatatggaagcttccaga

SEQ ID NO: 3567967 - DNA, 25 bp, Homo sapien
tgacccttgggaggctcattccaga

SEQ ID NO: 3567968 - DNA, 25 bp, Homo sapien
ctggatgtgacccttgggaggctca

SEQ ID NO: 3567969 - DNA, 25 bp, Homo sapien
gtcggtcttgctgctaaagccggga

SEQ ID NO: 3567970 - DNA, 25 bp, Homo sapien
gacaatgccacgggagctctcagca

SEQ ID NO: 3567971 - DNA, 25 bp, Homo sapien
ctgccctctggacaatgccacggga

SEQ ID NO: 3567972 - DNA, 25 bp, Homo sapien
aatgccacgggagctctcagcagga

SEQ ID NO: 3567973 - DNA, 25 bp, Homo sapien
tctggacaatgccacgggagctctc

SEQ ID NO: 3567974 - DNA, 25 bp, Homo sapien
cgggctcagcccattcggcgtgcac

SEQ ID NO: 3567975 - DNA, 25 bp, Homo sapien
ggctcagcccattcggcgtgcacga

SEQ ID NO: 3567976 - DNA, 25 bp, Homo sapien
attcggcgtgcacgacccagcccag

SEQ ID NO: 3567977 - DNA, 25 bp, Homo sapien
gcgtgcacgacccagcccagtcgtg

SEQ ID NO: 3567978 - DNA, 25 bp, Homo sapien
tacgattccgttttggttagagctc

SEQ ID NO: 3567979 - DNA, 25 bp, Homo sapien
gaactgacccttttaccataatgaa

SEQ ID NO: 3567980 - DNA, 25 bp, Homo sapien
catggtttcctatatcccggctgac

SEQ ID NO: 3567981 - DNA, 25 bp, Homo sapien
tataattaaagcgagtgctccttgg

SEQ ID NO: 3567982 - DNA, 25 bp, Homo sapien
tctgagttcactattactttataac

SEQ ID NO: 3567983 - DNA, 25 bp, Homo sapien
gtttcactcaggatagtttctattg

SEQ ID NO: 3567984 - DNA, 25 bp, Homo sapien
ctgttggaagctatcttgcagctca

SEQ ID NO: 3567985 - DNA, 25 bp, Homo sapien
cctcttcagggactctacttacatg

SEQ ID NO: 3567986 - DNA, 25 bp, Homo sapien
tgatggttccctccgttagccagag

SEQ ID NO: 3567987 - DNA, 25 bp, Homo sapien
cacaccgggctatgattgatggaga

SEQ ID NO: 3567988 - DNA, 25 bp, Homo sapien
gaatctctactcagccacaaagcgg

SEQ ID NO: 3567989 - DNA, 25 bp, Homo sapien
cagatactaccagagcagacaaggg

SEQ ID NO: 3567990 - DNA, 25 bp, Homo sapien
cctcttcgaaaccgccctggaagtg

SEQ ID NO: 3567991 - DNA, 25 bp, Homo sapien
gcctcttccgcgagacttaagctga

SEQ ID NO: 3567992 - DNA, 25 bp, Homo sapien
tcacttcctcttcgaaaccgccctg

SEQ ID NO: 3567993 - DNA, 25 bp, Homo sapien
ttcgaggggcggcgccgtctccagc

SEQ ID NO: 3567994 - DNA, 25 bp, Homo sapien
ctggctccatgagagggagtgccaa

SEQ ID NO: 3567995 - DNA, 25 bp, Homo sapien
aggcccgggtctgcctccacagctg

SEQ ID NO: 3567996 - DNA, 25 bp, Homo sapien
ggctccatgagagggagtgccaagg

SEQ ID NO: 3567997 - DNA, 25 bp, Homo sapien
ccatgagagggagtgccaaggggct

SEQ ID NO: 3567998 - DNA, 25 bp, Homo sapien
ggctgagtgacttccggtgatccac

SEQ ID NO: 3567999 - DNA, 25 bp, Homo sapien
tgtgggtattcaccttagaggctga

SEQ ID NO: 3568000 - DNA, 25 bp, Homo sapien
tgagtgacttccggtgatccacagc

SEQ ID NO: 3568001 - DNA, 25 bp, Homo sapien
cttgtgggtattcaccttagaggct

SEQ ID NO: 3568002 - DNA, 25 bp, Homo sapien
tcgatactggaggagtcggcaaagg

SEQ ID NO: 3568003 - DNA, 25 bp, Homo sapien
gggctgaggtcgatactggaggagt

SEQ ID NO: 3568004 - DNA, 25 bp, Homo sapien
gaggagtcggcaaaggagggtggtg

SEQ ID NO: 3568005 - DNA, 25 bp, Homo sapien
gagggtggtgcgtgcagggagaagt

SEQ ID NO: 3568006 - DNA, 25 bp, Homo sapien
catcctggtgacagcggaacccgct

SEQ ID NO: 3568007 - DNA, 25 bp, Homo sapien
ggctgatgatgtggtcttgggctcc

SEQ ID NO: 3568008 - DNA, 25 bp, Homo sapien
ctggtgacagcggaacccgctgggg

SEQ ID NO: 3568009 - DNA, 25 bp, Homo sapien
tcctggtgacagcggaacccgctgg

SEQ ID NO: 3568010 - DNA, 25 bp, Homo sapien
taggactcgaatcccggcaggatgc

SEQ ID NO: 3568011 - DNA, 25 bp, Homo sapien
cagatacggcgcctgtccaaggtag

SEQ ID NO: 3568012 - DNA, 25 bp, Homo sapien
gcgcctgtccaaggtaggactcgaa

SEQ ID NO: 3568013 - DNA, 25 bp, Homo sapien
tccaaggtaggactcgaatcccggc

SEQ ID NO: 3568014 - DNA, 25 bp, Homo sapien
gggggacaggcgcatcacgacgcac

SEQ ID NO: 3568015 - DNA, 25 bp, Homo sapien
ctcagggggacaggcgcatcacgac

SEQ ID NO: 3568016 - DNA, 25 bp, Homo sapien
ttgttggcacagaaggcgaggtctc

SEQ ID NO: 3568017 - DNA, 25 bp, Homo sapien
cagaaggcgaggtctcagggggaca

SEQ ID NO: 3568018 - DNA, 25 bp, Homo sapien
agagctcgtggccacgacgggctcc

SEQ ID NO: 3568019 - DNA, 25 bp, Homo sapien
tctggtactgacagtggttcctccc

SEQ ID NO: 3568020 - DNA, 25 bp, Homo sapien
tggaccacagcattgcacggcccaa

SEQ ID NO: 3568021 - DNA, 25 bp, Homo sapien
atttgcaccattctggtactgacag

SEQ ID NO: 3568022 - DNA, 25 bp, Homo sapien
ccagccgggcgaccccatccaccct

SEQ ID NO: 3568023 - DNA, 25 bp, Homo sapien
catgaatgcaggtgagaacgaggcc

SEQ ID NO: 3568024 - DNA, 25 bp, Homo sapien
ctgcccagctgttgctgaataaagg

SEQ ID NO: 3568025 - DNA, 25 bp, Homo sapien
acctgaacacagaggagcatgaatg

SEQ ID NO: 3568026 - DNA, 25 bp, Homo sapien
tggctacattttgcaactgaagacc

SEQ ID NO: 3568027 - DNA, 25 bp, Homo sapien
ggtctgctcggtgttgccagaagaa

SEQ ID NO: 3568028 - DNA, 25 bp, Homo sapien
aattggaccgccaatgagcggcgtg

SEQ ID NO: 3568029 - DNA, 25 bp, Homo sapien
tgttgccagaagaaattgtgggcac

SEQ ID NO: 3568030 - DNA, 25 bp, Homo sapien
ctgcaggatgaaattggaccgccaa

SEQ ID NO: 3568031 - DNA, 25 bp, Homo sapien
ggctcagcggttacaggagccactt

SEQ ID NO: 3568032 - DNA, 25 bp, Homo sapien
cacccacgggggctcaagatgaagg

SEQ ID NO: 3568033 - DNA, 25 bp, Homo sapien
tggcactggctcagcggttacagga

SEQ ID NO: 3568034 - DNA, 25 bp, Homo sapien
actggctcagcggttacaggagcca

SEQ ID NO: 3568035 - DNA, 25 bp, Homo sapien
tgaggatctccatcagggacgacgg

SEQ ID NO: 3568036 - DNA, 25 bp, Homo sapien
tcaccatgaggatctccatcaggga

SEQ ID NO: 3568037 - DNA, 25 bp, Homo sapien
tctccatcagggacgacggcaaaag

SEQ ID NO: 3568038 - DNA, 25 bp, Homo sapien
catcagggacgacggcaaaagtaag

SEQ ID NO: 3568039 - DNA, 25 bp, Homo sapien
tagaagctggcggagcttcagaacc

SEQ ID NO: 3568040 - DNA, 25 bp, Homo sapien
tagacaaatgtagaccctgggccct

SEQ ID NO: 3568041 - DNA, 25 bp, Homo sapien
gagatgacagccgaaaacacagcgt

SEQ ID NO: 3568042 - DNA, 25 bp, Homo sapien
actctcctgaggcttgcagcaggct

SEQ ID NO: 3568043 - DNA, 25 bp, Homo sapien
gtacagggccaggatagagccagaa

SEQ ID NO: 3568044 - DNA, 25 bp, Homo sapien
agccagaagatccagccgcagaaca

SEQ ID NO: 3568045 - DNA, 25 bp, Homo sapien
ctggagggcaagggtacagggccag

SEQ ID NO: 3568046 - DNA, 25 bp, Homo sapien
cagaacaggggccagcgtgtggcag

SEQ ID NO: 3568047 - DNA, 25 bp, Homo sapien
cacttgcgggtctggtgagtccgaa

SEQ ID NO: 3568048 - DNA, 25 bp, Homo sapien
tctgcccttggttggcccctgatgt

SEQ ID NO: 3568049 - DNA, 25 bp, Homo sapien
ctggatcaagggcacacttgcgggt

SEQ ID NO: 3568050 - DNA, 25 bp, Homo sapien
aggtaggaggtagttactaagccag

SEQ ID NO: 3568051 - DNA, 25 bp, Homo sapien
caattgagacaagacatccttcttt

SEQ ID NO: 3568052 - DNA, 25 bp, Homo sapien
aattgagacaagacatccttctttt

SEQ ID NO: 3568053 - DNA, 25 bp, Homo sapien
attgagacaagacatccttcttttt

SEQ ID NO: 3568054 - DNA, 25 bp, Homo sapien
tatgcacactgcttagacatgatgc

SEQ ID NO: 3568055 - DNA, 25 bp, Homo sapien
ccatcaacattgaagtgagactctc

SEQ ID NO: 3568056 - DNA, 25 bp, Homo sapien
aaaattatgatgactcgccgaaggc

SEQ ID NO: 3568057 - DNA, 25 bp, Homo sapien
gacttaaacgctgcaatctcatgag

SEQ ID NO: 3568058 - DNA, 25 bp, Homo sapien
agagctgctgatcggctccagcgga

SEQ ID NO: 3568059 - DNA, 25 bp, Homo sapien
cagagcacagaacacggcatggggc

SEQ ID NO: 3568060 - DNA, 25 bp, Homo sapien
ggatgatggttttccaagcaggcta

SEQ ID NO: 3568061 - DNA, 25 bp, Homo sapien
ttgtaaagtaatcctcgactctccg

SEQ ID NO: 3568062 - DNA, 25 bp, Homo sapien
ggatccacaggactcatgccaagaa

SEQ ID NO: 3568063 - DNA, 25 bp, Homo sapien
gctaaaactgcaggaaaaggctggt

SEQ ID NO: 3568064 - DNA, 25 bp, Homo sapien
gaacctagagccatagtgactaaga

SEQ ID NO: 3568065 - DNA, 25 bp, Homo sapien
gatgcaccctgatccctttgaacgt

SEQ ID NO: 3568066 - DNA, 25 bp, Homo sapien
cagctgcatctctcgccaggtacag

SEQ ID NO: 3568067 - DNA, 25 bp, Homo sapien
gcagctgcatctctcgccaggtaca

SEQ ID NO: 3568068 - DNA, 25 bp, Homo sapien
ccctcccagagatgacgtgtgacaa

SEQ ID NO: 3568069 - DNA, 25 bp, Homo sapien
tccaagctgatgtggcatgacccag

SEQ ID NO: 3568070 - DNA, 25 bp, Homo sapien
tttattacagcaaagggatccaggc

SEQ ID NO: 3568071 - DNA, 25 bp, Homo sapien
tcctcctggaggttagggctaatcc

SEQ ID NO: 3568072 - DNA, 25 bp, Homo sapien
tgaaatgtcctgcaacagctcccta

SEQ ID NO: 3568073 - DNA, 25 bp, Homo sapien
gaagccaaattctgacgggcgcagc

SEQ ID NO: 3568074 - DNA, 25 bp, Homo sapien
tccctgctcgcaaagtaagcatagt

SEQ ID NO: 3568075 - DNA, 25 bp, Homo sapien
tggctcactgaaatagcggccttcc

SEQ ID NO: 3568076 - DNA, 25 bp, Homo sapien
ccattgttgtgagcggaagagaaat

SEQ ID NO: 3568077 - DNA, 25 bp, Homo sapien
ggtcccagaggatcacagtactgct

SEQ ID NO: 3568078 - DNA, 25 bp, Homo sapien
taattttaagcctggagttgattcc

SEQ ID NO: 3568079 - DNA, 25 bp, Homo sapien
cagtgtgttctgcacaaagacagga

SEQ ID NO: 3568080 - DNA, 25 bp, Homo sapien
ggacacagaatagagtgtggctctg

SEQ ID NO: 3568081 - DNA, 25 bp, Homo sapien
acacggacgtccagcaggttccggc

SEQ ID NO: 3568082 - DNA, 25 bp, Homo sapien
gggacacacggacgtccagcaggtt

SEQ ID NO: 3568083 - DNA, 25 bp, Homo sapien
ccaggcctgatggagtgggacacac

SEQ ID NO: 3568084 - DNA, 25 bp, Homo sapien
ggccccagaaggctggtcagccccc

SEQ ID NO: 3568085 - DNA, 25 bp, Homo sapien
agaaggctggtcagcccccaggaca

SEQ ID NO: 3568086 - DNA, 25 bp, Homo sapien
ccccagaaggctggtcagcccccag

SEQ ID NO: 3568087 - DNA, 25 bp, Homo sapien
cagaaggctggtcagcccccaggac

SEQ ID NO: 3568088 - DNA, 25 bp, Homo sapien
ttaaggatgctatccacgctccctg

SEQ ID NO: 3568089 - DNA, 25 bp, Homo sapien
cgccctgagcactcggtggatgctg

SEQ ID NO: 3568090 - DNA, 25 bp, Homo sapien
ccaactggcggacttttaaggatgc

SEQ ID NO: 3568091 - DNA, 25 bp, Homo sapien
ttatagaaccgccttttacaacaga

SEQ ID NO: 3568092 - DNA, 25 bp, Homo sapien
cagtgtactcctcaatgtctgcagg

SEQ ID NO: 3568093 - DNA, 25 bp, Homo sapien
cagcttttgtcacagcggtggcgag

SEQ ID NO: 3568094 - DNA, 25 bp, Homo sapien
cattaacagcgctgcaagagctcac

SEQ ID NO: 3568095 - DNA, 25 bp, Homo sapien
tcatcactgcgaaggcatgccagga

SEQ ID NO: 3568096 - DNA, 25 bp, Homo sapien
gcaacacattaattgggtaaagcca

SEQ ID NO: 3568097 - DNA, 25 bp, Homo sapien
tcgccaatggtaagcaggcaacctg

SEQ ID NO: 3568098 - DNA, 25 bp, Homo sapien
taaactctcggcctctcagtggtgg

SEQ ID NO: 3568099 - DNA, 25 bp, Homo sapien
ctacgtggctgggattgggacatca

SEQ ID NO: 3568100 - DNA, 25 bp, Homo sapien
gttacggtgtccagcattgcgggca

SEQ ID NO: 3568101 - DNA, 25 bp, Homo sapien
taaaatgggtgcagttctacaaagc

SEQ ID NO: 3568102 - DNA, 25 bp, Homo sapien
tgtgctagcacaaaagggccaatct

SEQ ID NO: 3568103 - DNA, 25 bp, Homo sapien
ttgcagtcaacggaacagaagcgga

SEQ ID NO: 3568104 - DNA, 25 bp, Homo sapien
catcgtgtgcatgtatcaaaacgtc

SEQ ID NO: 3568105 - DNA, 25 bp, Homo sapien
gatttgatccttagacatcgtgtgc

SEQ ID NO: 3568106 - DNA, 25 bp, Homo sapien
tcaaaacgtcacatgggcccgtaca

SEQ ID NO: 3568107 - DNA, 25 bp, Homo sapien
tggaggtgacgacatcgcagttatc

SEQ ID NO: 3568108 - DNA, 25 bp, Homo sapien
ggagatgcatgggaaagtctgctcc

SEQ ID NO: 3568109 - DNA, 25 bp, Homo sapien
acacaaaggagatgcatgggaaagt

SEQ ID NO: 3568110 - DNA, 25 bp, Homo sapien
gatgcatgggaaagtctgctccatg

SEQ ID NO: 3568111 - DNA, 25 bp, Homo sapien
cacaaaggagatgcatgggaaagtc

SEQ ID NO: 3568112 - DNA, 25 bp, Homo sapien
caacagagaattgtacaggctggta

SEQ ID NO: 3568113 - DNA, 25 bp, Homo sapien
gtgggacaggtacctctattagtga

SEQ ID NO: 3568114 - DNA, 25 bp, Homo sapien
tgtccgacgtacttggcacatggtg

SEQ ID NO: 3568115 - DNA, 25 bp, Homo sapien
ccgtttgttcaactaatagccactg

SEQ ID NO: 3568116 - DNA, 25 bp, Homo sapien
tagcaaactcgagcaccacttttca

SEQ ID NO: 3568117 - DNA, 25 bp, Homo sapien
aggatgaaggatactgccacctgct

SEQ ID NO: 3568118 - DNA, 25 bp, Homo sapien
gaaaatgtaattagcaaactcgagc

SEQ ID NO: 3568119 - DNA, 25 bp, Homo sapien
ttttcaaggatgaaggatactgcca

SEQ ID NO: 3568120 - DNA, 25 bp, Homo sapien
ttaatattccggtggcaaaatccag

SEQ ID NO: 3568121 - DNA, 25 bp, Homo sapien
aattctcagtcttaagcccctagag

SEQ ID NO: 3568122 - DNA, 25 bp, Homo sapien
tctcagtcttaagcccctagaggag

SEQ ID NO: 3568123 - DNA, 25 bp, Homo sapien
tccagtcgctaggaacacaactcaa

SEQ ID NO: 3568124 - DNA, 25 bp, Homo sapien
ccattgccccgtaatagtcctgagg

SEQ ID NO: 3568125 - DNA, 25 bp, Homo sapien
cattgccccgtaatagtcctgagga

SEQ ID NO: 3568126 - DNA, 25 bp, Homo sapien
ttccattgccccgtaatagtcctga

SEQ ID NO: 3568127 - DNA, 25 bp, Homo sapien
tgccccgtaatagtcctgaggatct

SEQ ID NO: 3568128 - DNA, 25 bp, Homo sapien
ttagtccggcttgccacgccacccc

SEQ ID NO: 3568129 - DNA, 25 bp, Homo sapien
gtccttagtccggcttgccacgcca

SEQ ID NO: 3568130 - DNA, 25 bp, Homo sapien
ccggtccttagtccggcttgccacg

SEQ ID NO: 3568131 - DNA, 25 bp, Homo sapien
ccttagtccggcttgccacgccacc

SEQ ID NO: 3568132 - DNA, 25 bp, Homo sapien
gccggtgttggtgtgaattcttcaa

SEQ ID NO: 3568133 - DNA, 25 bp, Homo sapien
ctccaggtactgtagggctgggaaa

SEQ ID NO: 3568134 - DNA, 25 bp, Homo sapien
cacggactccaggtactgtagggct

SEQ ID NO: 3568135 - DNA, 25 bp, Homo sapien
ctgggaaagccggtgttggtgtgaa

SEQ ID NO: 3568136 - DNA, 25 bp, Homo sapien
ttggcccctcgaagcacgaatccaa

SEQ ID NO: 3568137 - DNA, 25 bp, Homo sapien
cgtcttctcctcaataatgcagtca

SEQ ID NO: 3568138 - DNA, 25 bp, Homo sapien
tcttttttctgcaggaccaccgtct

SEQ ID NO: 3568139 - DNA, 25 bp, Homo sapien
aagcacgaatccaaagccctcattg

SEQ ID NO: 3568140 - DNA, 25 bp, Homo sapien
cagcgaccattattgtagcccgtca

SEQ ID NO: 3568141 - DNA, 25 bp, Homo sapien
ctgtagagagaattccggggacagc

SEQ ID NO: 3568142 - DNA, 25 bp, Homo sapien
gggacagcgaccattattgtagccc

SEQ ID NO: 3568143 - DNA, 25 bp, Homo sapien
gaattccggggacagcgaccattat

SEQ ID NO: 3568144 - DNA, 25 bp, Homo sapien
ccgctcctccgccggggacgttcat

SEQ ID NO: 3568145 - DNA, 25 bp, Homo sapien
gccgctcctccgccggggacgttca

SEQ ID NO: 3568146 - DNA, 25 bp, Homo sapien
caccgcggccgctcctccgccgggg

SEQ ID NO: 3568147 - DNA, 25 bp, Homo sapien
cgcggccgctcctccgccggggacg

SEQ ID NO: 3568148 - DNA, 25 bp, Homo sapien
gggaagcccgggaaaatcagccaga

SEQ ID NO: 3568149 - DNA, 25 bp, Homo sapien
tcgggaatgagctcctccggcttgt

SEQ ID NO: 3568150 - DNA, 25 bp, Homo sapien
cgagcgtggcacaatgagacttgca

SEQ ID NO: 3568151 - DNA, 25 bp, Homo sapien
gctcgccagatccaggcagcatgga

SEQ ID NO: 3568152 - DNA, 25 bp, Homo sapien
atccagcccccgaggcacccagagt

SEQ ID NO: 3568153 - DNA, 25 bp, Homo sapien
gtgtcctctcgcttttcctgctggc

SEQ ID NO: 3568154 - DNA, 25 bp, Homo sapien
gctggcactcgccacatgacatcca

SEQ ID NO: 3568155 - DNA, 25 bp, Homo sapien
cagtgtcctctcgcttttcctgctg

SEQ ID NO: 3568156 - DNA, 25 bp, Homo sapien
aggctgcggctgaactgtcctccac

SEQ ID NO: 3568157 - DNA, 25 bp, Homo sapien
tccaggctgcggctgaactgtcctc

SEQ ID NO: 3568158 - DNA, 25 bp, Homo sapien
caggctgcggctgaactgtcctcca

SEQ ID NO: 3568159 - DNA, 25 bp, Homo sapien
ccaggctgcggctgaactgtcctcc

SEQ ID NO: 3568160 - DNA, 25 bp, Homo sapien
cccgccccgtaggactctgctgctg

SEQ ID NO: 3568161 - DNA, 25 bp, Homo sapien
gctgctgcccggaagttagtgggga

SEQ ID NO: 3568162 - DNA, 25 bp, Homo sapien
gtgagatgaaggctaccggcacccc

SEQ ID NO: 3568163 - DNA, 25 bp, Homo sapien
gaaggggagtgagatgaaggctacc

SEQ ID NO: 3568164 - DNA, 25 bp, Homo sapien
agcacagccaccccggattgggggg

SEQ ID NO: 3568165 - DNA, 25 bp, Homo sapien
gggccccaggtgcagccagctggtg

SEQ ID NO: 3568166 - DNA, 25 bp, Homo sapien
gccaccaaacaagggctgacacagg

SEQ ID NO: 3568167 - DNA, 25 bp, Homo sapien
ccaaacaagggctgacacagggtca

SEQ ID NO: 3568168 - DNA, 25 bp, Homo sapien
agggctgacacagggtcagaggtcc

SEQ ID NO: 3568169 - DNA, 25 bp, Homo sapien
tgctcagggccaccaaacaagggct

SEQ ID NO: 3568170 - DNA, 25 bp, Homo sapien
tgtgagaaccatacgggcacctgga

SEQ ID NO: 3568171 - DNA, 25 bp, Homo sapien
tgcccttacgcgagaaaagcagagg

SEQ ID NO: 3568172 - DNA, 25 bp, Homo sapien
aaatgtgtgccttcaacagtgcagg

SEQ ID NO: 3568173 - DNA, 25 bp, Homo sapien
gacagctttagttcttccgtgacca

SEQ ID NO: 3568174 - DNA, 25 bp, Homo sapien
tgcagacgttggctgcctactcacc

SEQ ID NO: 3568175 - DNA, 25 bp, Homo sapien
gacgcacaagtgcaggtgtcagcag

SEQ ID NO: 3568176 - DNA, 25 bp, Homo sapien
tgaagggccgtgatgaggcgggagg

SEQ ID NO: 3568177 - DNA, 25 bp, Homo sapien
ttggcggtgacgcacaagtgcaggt

SEQ ID NO: 3568178 - DNA, 25 bp, Homo sapien
cacccatgaggactgaaatggcaga

SEQ ID NO: 3568179 - DNA, 25 bp, Homo sapien
cggtgaggcccgaatccttctggaa

SEQ ID NO: 3568180 - DNA, 25 bp, Homo sapien
tctggaatgactcagggtcaacttg

SEQ ID NO: 3568181 - DNA, 25 bp, Homo sapien
ttcctggcgttctttccggtgaggc

SEQ ID NO: 3568182 - DNA, 25 bp, Homo sapien
ggctgttctcttaaagcggctgtga

SEQ ID NO: 3568183 - DNA, 25 bp, Homo sapien
acactgtcgtgctcctgcctagaag

SEQ ID NO: 3568184 - DNA, 25 bp, Homo sapien
tgaacaatgcacaagcacgagtcgg

SEQ ID NO: 3568185 - DNA, 25 bp, Homo sapien
tggccatcagcgtgaacactgtcgt

SEQ ID NO: 3568186 - DNA, 25 bp, Homo sapien
tcggatgaggcactgatgtcagaac

SEQ ID NO: 3568187 - DNA, 25 bp, Homo sapien
actccagctgtctccgagggttgca

SEQ ID NO: 3568188 - DNA, 25 bp, Homo sapien
tgcacgtgtgaggtccaaggtccag

SEQ ID NO: 3568189 - DNA, 25 bp, Homo sapien
ctgaagcgacggtggttcctctggc

SEQ ID NO: 3568190 - DNA, 25 bp, Homo sapien
gcaagaatccttgggtgtgctgatg

SEQ ID NO: 3568191 - DNA, 25 bp, Homo sapien
cttgcaagaatccttgggtgtgctg

SEQ ID NO: 3568192 - DNA, 25 bp, Homo sapien
ctgatggcggctggggaatcacagg

SEQ ID NO: 3568193 - DNA, 25 bp, Homo sapien
agaatccttgggtgtgctgatggcg

SEQ ID NO: 3568194 - DNA, 25 bp, Homo sapien
ttgaggtgaggacccaacaggtgtc

SEQ ID NO: 3568195 - DNA, 25 bp, Homo sapien
cagctcagcggagatgccagctcgg

SEQ ID NO: 3568196 - DNA, 25 bp, Homo sapien
acaggtgtcccagctcagcggagat

SEQ ID NO: 3568197 - DNA, 25 bp, Homo sapien
tgaggacccaacaggtgtcccagct

SEQ ID NO: 3568198 - DNA, 25 bp, Homo sapien
gcagcacagagggccgctcgacagg

SEQ ID NO: 3568199 - DNA, 25 bp, Homo sapien
cacagagggccgctcgacaggcggg

SEQ ID NO: 3568200 - DNA, 25 bp, Homo sapien
cagcacagagggccgctcgacaggc

SEQ ID NO: 3568201 - DNA, 25 bp, Homo sapien
gagggccgctcgacaggcggggcag

SEQ ID NO: 3568202 - DNA, 25 bp, Homo sapien
ggctaatcccacgtatacaggcaat

SEQ ID NO: 3568203 - DNA, 25 bp, Homo sapien
tacgggcaaaacactgggatggctt

SEQ ID NO: 3568204 - DNA, 25 bp, Homo sapien
gcaaggaggattcatgagccccagt

SEQ ID NO: 3568205 - DNA, 25 bp, Homo sapien
gatggcttcctgacaacttaagagg

SEQ ID NO: 3568206 - DNA, 25 bp, Homo sapien
ctgctctgcactcgaccaccaaagc

SEQ ID NO: 3568207 - DNA, 25 bp, Homo sapien
tctgcactcgaccaccaaagccagg

SEQ ID NO: 3568208 - DNA, 25 bp, Homo sapien
gaccaccaaagccagggtccttgcg

SEQ ID NO: 3568209 - DNA, 25 bp, Homo sapien
tgcactcgaccaccaaagccagggt

SEQ ID NO: 3568210 - DNA, 25 bp, Homo sapien
tcttaagaacgagctgcttgtccca

SEQ ID NO: 3568211 - DNA, 25 bp, Homo sapien
acacatcttaagaacgagctgcttg

SEQ ID NO: 3568212 - DNA, 25 bp, Homo sapien
tgtcccagttgtaggctcgctcctt

SEQ ID NO: 3568213 - DNA, 25 bp, Homo sapien
agctgcttgtcccagttgtaggctc

SEQ ID NO: 3568214 - DNA, 25 bp, Homo sapien
tgtccagttcatttattttgttagg

SEQ ID NO: 3568215 - DNA, 25 bp, Homo sapien
ggtgtccagttcatttattttgtta

SEQ ID NO: 3568216 - DNA, 25 bp, Homo sapien
gtgtccagttcatttattttgttag

SEQ ID NO: 3568217 - DNA, 25 bp, Homo sapien
taatcatcacgttgggaagataccc

SEQ ID NO: 3568218 - DNA, 25 bp, Homo sapien
gagaagagcagtactccctggagaa

SEQ ID NO: 3568219 - DNA, 25 bp, Homo sapien
tggctcacccaaatggagacctggt

SEQ ID NO: 3568220 - DNA, 25 bp, Homo sapien
ggagggctgtccatcacaatagaga

SEQ ID NO: 3568221 - DNA, 25 bp, Homo sapien
ctgctcatcacagatatcctggagg

SEQ ID NO: 3568222 - DNA, 25 bp, Homo sapien
catcacagatatcctggaggtcggg

SEQ ID NO: 3568223 - DNA, 25 bp, Homo sapien
caggcaggtctaagagtcgagtgca

SEQ ID NO: 3568224 - DNA, 25 bp, Homo sapien
tccacaggcaggtctaagagtcgag

SEQ ID NO: 3568225 - DNA, 25 bp, Homo sapien
ttccacacatcagacgaactcaaac

SEQ ID NO: 3568226 - DNA, 25 bp, Homo sapien
tctttccacacatcagacgaactca

SEQ ID NO: 3568227 - DNA, 25 bp, Homo sapien
ctggctacctggtggctcgcctgcc

SEQ ID NO: 3568228 - DNA, 25 bp, Homo sapien
aatccaaccacgtgcctgtgccagt

SEQ ID NO: 3568229 - DNA, 25 bp, Homo sapien
catttgcatgctttcgcaaaaacaa

SEQ ID NO: 3568230 - DNA, 25 bp, Homo sapien
gcatgctttcgcaaaaacaatgcta

SEQ ID NO: 3568231 - DNA, 25 bp, Homo sapien
gacatttgcatgctttcgcaaaaac

SEQ ID NO: 3568232 - DNA, 25 bp, Homo sapien
tttgcatgctttcgcaaaaacaatg

SEQ ID NO: 3568233 - DNA, 25 bp, Homo sapien
agtcctagcccggtaacaggcacag

SEQ ID NO: 3568234 - DNA, 25 bp, Homo sapien
gctgcatgcaagatggtccaaagca

SEQ ID NO: 3568235 - DNA, 25 bp, Homo sapien
catttgcagcacagacgaacagctt

SEQ ID NO: 3568236 - DNA, 25 bp, Homo sapien
cagacgaacagctttgaccagaggg

SEQ ID NO: 3568237 - DNA, 25 bp, Homo sapien
ttcttgctgcggtcagcgcgggttt

SEQ ID NO: 3568238 - DNA, 25 bp, Homo sapien
cttcttgctgcggtcagcgcgggtt

SEQ ID NO: 3568239 - DNA, 25 bp, Homo sapien
ggagcccacggtgtagtgcctgaaa

SEQ ID NO: 3568240 - DNA, 25 bp, Homo sapien
cataggagcccacggtgtagtgcct

SEQ ID NO: 3568241 - DNA, 25 bp, Homo sapien
agcacatgttccaagaaccctttcc

SEQ ID NO: 3568242 - DNA, 25 bp, Homo sapien
accaaaagcacatgttccaagaacc

SEQ ID NO: 3568243 - DNA, 25 bp, Homo sapien
aaaagcacatgttccaagaaccctt

SEQ ID NO: 3568244 - DNA, 25 bp, Homo sapien
ccaaaagcacatgttccaagaaccc

SEQ ID NO: 3568245 - DNA, 25 bp, Homo sapien
ttgcttggcatctgcaacaaatatg

SEQ ID NO: 3568246 - DNA, 25 bp, Homo sapien
ttggcatctgcaacaaatatgccca

SEQ ID NO: 3568247 - DNA, 25 bp, Homo sapien
gcttggcatctgcaacaaatatgcc

SEQ ID NO: 3568248 - DNA, 25 bp, Homo sapien
ctttgcttggcatctgcaacaaata

SEQ ID NO: 3568249 - DNA, 25 bp, Homo sapien
gttgtaaacactgctgcactcagag

SEQ ID NO: 3568250 - DNA, 25 bp, Homo sapien
aaacactgctgcactcagagcagcc

SEQ ID NO: 3568251 - DNA, 25 bp, Homo sapien
aatgagttgtaaacactgctgcact

SEQ ID NO: 3568252 - DNA, 25 bp, Homo sapien
tgtaaacactgctgcactcagagca

SEQ ID NO: 3568253 - DNA, 25 bp, Homo sapien
tccatgtgacggctgagcacagagg

SEQ ID NO: 3568254 - DNA, 25 bp, Homo sapien
agctggcaaaggtacgcaagtatca

SEQ ID NO: 3568255 - DNA, 25 bp, Homo sapien
gccgatggagcgtgtggccgtggca

SEQ ID NO: 3568256 - DNA, 25 bp, Homo sapien
gccctggcgagcgagtccatgtgac

SEQ ID NO: 3568257 - DNA, 25 bp, Homo sapien
cgcggaaggagcacaccgtccactt

SEQ ID NO: 3568258 - DNA, 25 bp, Homo sapien
ctccaccgttaccacgcggaaggag

SEQ ID NO: 3568259 - DNA, 25 bp, Homo sapien
acgcggaaggagcacaccgtccact

SEQ ID NO: 3568260 - DNA, 25 bp, Homo sapien
tctccctctccaccgttaccacgcg

SEQ ID NO: 3568261 - DNA, 25 bp, Homo sapien
gcccacagcgtacctccaaaatgaa

SEQ ID NO: 3568262 - DNA, 25 bp, Homo sapien
aagaacaaaggctccgcacaccagc

SEQ ID NO: 3568263 - DNA, 25 bp, Homo sapien
tcttgaaccgtgaattctcggccat

SEQ ID NO: 3568264 - DNA, 25 bp, Homo sapien
gtccccgcagctctcgtaaagaaca

SEQ ID NO: 3568265 - DNA, 25 bp, Homo sapien
cacaagttgtaagccccagactgga

SEQ ID NO: 3568266 - DNA, 25 bp, Homo sapien
gaagaaagatggctccgggaatgtt

SEQ ID NO: 3568267 - DNA, 25 bp, Homo sapien
tgaaaattcgcttctttgacacaag

SEQ ID NO: 3568268 - DNA, 25 bp, Homo sapien
ggactgaacatccaaatcagctgaa

SEQ ID NO: 3568269 - DNA, 25 bp, Homo sapien
ataagtacgggtgaaggacgcctga

SEQ ID NO: 3568270 - DNA, 25 bp, Homo sapien
aataagtacgggtgaaggacgcctg

SEQ ID NO: 3568271 - DNA, 25 bp, Homo sapien
ctgaaaaaccagtgcaattacgcat

SEQ ID NO: 3568272 - DNA, 25 bp, Homo sapien
cagccgggcagccaagcccgttttg

SEQ ID NO: 3568273 - DNA, 25 bp, Homo sapien
ggtcttggccgttcagagccctgct

SEQ ID NO: 3568274 - DNA, 25 bp, Homo sapien
ctttctcattttgcaaggcttggtg

SEQ ID NO: 3568275 - DNA, 25 bp, Homo sapien
gcttggtgtttcctcggtcttggcc

SEQ ID NO: 3568276 - DNA, 25 bp, Homo sapien
gtcccgtgagaaggcgaatgtcaca

SEQ ID NO: 3568277 - DNA, 25 bp, Homo sapien
ggacttctcggctttcaaatacttc

SEQ ID NO: 3568278 - DNA, 25 bp, Homo sapien
ctgcaaggacttctcggctttcaaa

SEQ ID NO: 3568279 - DNA, 25 bp, Homo sapien
cttcccaatcggtacgtcccgtgag

SEQ ID NO: 3568280 - DNA, 25 bp, Homo sapien
tgctgctcactgggatttcagtggg

SEQ ID NO: 3568281 - DNA, 25 bp, Homo sapien
gagacaccctatcttgccaggaaaa

SEQ ID NO: 3568282 - DNA, 25 bp, Homo sapien
aatagcaagggtttccacaacagcc

SEQ ID NO: 3568283 - DNA, 25 bp, Homo sapien
cactgcgctggaatcttaaaggttc

SEQ ID NO: 3568284 - DNA, 25 bp, Homo sapien
catttgacacggcagcacacgagat

SEQ ID NO: 3568285 - DNA, 25 bp, Homo sapien
agggaaacctctcaagatctaacgg

SEQ ID NO: 3568286 - DNA, 25 bp, Homo sapien
gactctagtcagaagaagcaacttg

SEQ ID NO: 3568287 - DNA, 25 bp, Homo sapien
tctaacggggtgatcaggtagcaga

SEQ ID NO: 3568288 - DNA, 25 bp, Homo sapien
cggggtgatcaggtagcagactcta

SEQ ID NO: 3568289 - DNA, 25 bp, Homo sapien
tgtcatttatcaaaggcccacttct

SEQ ID NO: 3568290 - DNA, 25 bp, Homo sapien
tcagcacattgtcggtaactctacg

SEQ ID NO: 3568291 - DNA, 25 bp, Homo sapien
caataccgcacgatcccaagaggat

SEQ ID NO: 3568292 - DNA, 25 bp, Homo sapien
ccaagaggatgcgaggagaaaagat

SEQ ID NO: 3568293 - DNA, 25 bp, Homo sapien
acaggaagtagcccccatgctggtg

SEQ ID NO: 3568294 - DNA, 25 bp, Homo sapien
gccaccccactgggcagcgtggctg

SEQ ID NO: 3568295 - DNA, 25 bp, Homo sapien
gcagcgtggctgactggctgccgga

SEQ ID NO: 3568296 - DNA, 25 bp, Homo sapien
actggctgccggagataagaggcaa

SEQ ID NO: 3568297 - DNA, 25 bp, Homo sapien
ggctgactggctgccggagataaga

SEQ ID NO: 3568298 - DNA, 25 bp, Homo sapien
cctggcctggcgtccttggatgtct

SEQ ID NO: 3568299 - DNA, 25 bp, Homo sapien
catatttgatgagccggctcctggc

SEQ ID NO: 3568300 - DNA, 25 bp, Homo sapien
tctgacgccttgcacatatttgatg

SEQ ID NO: 3568301 - DNA, 25 bp, Homo sapien
tcgtgcatattttgctgaacacacc

SEQ ID NO: 3568302 - DNA, 25 bp, Homo sapien
ggaccgaagtgccagcgtttctcca

SEQ ID NO: 3568303 - DNA, 25 bp, Homo sapien
ggacatcgcacagccagacgaagtt

SEQ ID NO: 3568304 - DNA, 25 bp, Homo sapien
gtttctccaagcactaggacatcgc

SEQ ID NO: 3568305 - DNA, 25 bp, Homo sapien
tgaccgtggtggtggaattgtgatg

SEQ ID NO: 3568306 - DNA, 25 bp, Homo sapien
gcccagccacacttgtagcacagaa

SEQ ID NO: 3568307 - DNA, 25 bp, Homo sapien
cccagggctgggtagcgtgcccagc

SEQ ID NO: 3568308 - DNA, 25 bp, Homo sapien
cacacttgtagcacagaagcagcct

SEQ ID NO: 3568309 - DNA, 25 bp, Homo sapien
ccgcctctccaggacagggaaggct

SEQ ID NO: 3568310 - DNA, 25 bp, Homo sapien
aaggctggaccttccttcagggcgg

SEQ ID NO: 3568311 - DNA, 25 bp, Homo sapien
cgcctctccaggacagggaaggctt

SEQ ID NO: 3568312 - DNA, 25 bp, Homo sapien
ccgcttctccaggacgggaaggctg

SEQ ID NO: 3568313 - DNA, 25 bp, Homo sapien
tgccccgtgctcacagcacgcatct

SEQ ID NO: 3568314 - DNA, 25 bp, Homo sapien
ccaaaggcctctgtgatcttgcgga

SEQ ID NO: 3568315 - DNA, 25 bp, Homo sapien
caggttcccagagcgaggcagagaa

SEQ ID NO: 3568316 - DNA, 25 bp, Homo sapien
ggctggaggtctctcttccaccctc

SEQ ID NO: 3568317 - DNA, 25 bp, Homo sapien
ccgcagcgggttcagggtgacagct

SEQ ID NO: 3568318 - DNA, 25 bp, Homo sapien
cagggataataagggttccaggagc

SEQ ID NO: 3568319 - DNA, 25 bp, Homo sapien
gggttccaggagcactcactgatcc

SEQ ID NO: 3568320 - DNA, 25 bp, Homo sapien
gccttagaggcacattttctgaaac

SEQ ID NO: 3568321 - DNA, 25 bp, Homo sapien
tgaaaacgctcaaatgctggcctgg

SEQ ID NO: 3568322 - DNA, 25 bp, Homo sapien
gggtcctctcaggtaagccacactg

SEQ ID NO: 3568323 - DNA, 25 bp, Homo sapien
tgggtcctctcaggtaagccacact

SEQ ID NO: 3568324 - DNA, 25 bp, Homo sapien
cctgggtcctctcaggtaagccaca

SEQ ID NO: 3568325 - DNA, 25 bp, Homo sapien
ctgggtcctctcaggtaagccacac

SEQ ID NO: 3568326 - DNA, 25 bp, Homo sapien
ctctgccttccagcccagggtcctg

SEQ ID NO: 3568327 - DNA, 25 bp, Homo sapien
caggcagcagccagactgacctcat

SEQ ID NO: 3568328 - DNA, 25 bp, Homo sapien
agggccaggcagcagccagactgac

SEQ ID NO: 3568329 - DNA, 25 bp, Homo sapien
ggccaggcagcagccagactgacct

SEQ ID NO: 3568330 - DNA, 25 bp, Homo sapien
tttcagagacatggagggccaggca

SEQ ID NO: 3568331 - DNA, 25 bp, Homo sapien
tcagcacaccatcgcgaaggagtga

SEQ ID NO: 3568332 - DNA, 25 bp, Homo sapien
aggagtgacgggctctttcagagac

SEQ ID NO: 3568333 - DNA, 25 bp, Homo sapien
aaaagacggcttcttgccatctcag

SEQ ID NO: 3568334 - DNA, 25 bp, Homo sapien
cagggcagcgtcctaaagacaagag

SEQ ID NO: 3568335 - DNA, 25 bp, Homo sapien
catctgtgacaactggaagagccat

SEQ ID NO: 3568336 - DNA, 25 bp, Homo sapien
tcttgctgtgcaaagtagctgggcg

SEQ ID NO: 3568337 - DNA, 25 bp, Homo sapien
tatgctcaaaggactacagcctcag

SEQ ID NO: 3568338 - DNA, 25 bp, Homo sapien
ccccgtgaatgtccgggccatgtca

SEQ ID NO: 3568339 - DNA, 25 bp, Homo sapien
ctaaccccgtgaatgtccgggccat

SEQ ID NO: 3568340 - DNA, 25 bp, Homo sapien
aatgtccgggccatgtcactgccct

SEQ ID NO: 3568341 - DNA, 25 bp, Homo sapien
gaatgtccgggccatgtcactgccc

SEQ ID NO: 3568342 - DNA, 25 bp, Homo sapien
tggccactgtacaaggtgacttttg

SEQ ID NO: 3568343 - DNA, 25 bp, Homo sapien
acaaggtgacttttgcagacaccac

SEQ ID NO: 3568344 - DNA, 25 bp, Homo sapien
cactgtacaaggtgacttttgcaga

SEQ ID NO: 3568345 - DNA, 25 bp, Homo sapien
agtggccactgtacaaggtgacttt

SEQ ID NO: 3568346 - DNA, 25 bp, Homo sapien
cacatggcccagataccagggacag

SEQ ID NO: 3568347 - DNA, 25 bp, Homo sapien
tcacatggcccagataccagggaca

SEQ ID NO: 3568348 - DNA, 25 bp, Homo sapien
gagcaacgcactgctctcaggtcga

SEQ ID NO: 3568349 - DNA, 25 bp, Homo sapien
gatagaggagcaacgcactgctctc

SEQ ID NO: 3568350 - DNA, 25 bp, Homo sapien
gcaacgcactgctctcaggtcgatt

SEQ ID NO: 3568351 - DNA, 25 bp, Homo sapien
caacgcactgctctcaggtcgattt

SEQ ID NO: 3568352 - DNA, 25 bp, Homo sapien
aactacactgggtaggtgctgctca

SEQ ID NO: 3568353 - DNA, 25 bp, Homo sapien
tcacttcctcggtggtctctgcagc

SEQ ID NO: 3568354 - DNA, 25 bp, Homo sapien
ttgaggatcccgactccaacaggct

SEQ ID NO: 3568355 - DNA, 25 bp, Homo sapien
tggtggtgcatacggcacaggacat

SEQ ID NO: 3568356 - DNA, 25 bp, Homo sapien
tggggaccctgtcaacggggctaga

SEQ ID NO: 3568357 - DNA, 25 bp, Homo sapien
cctgtcaacggggctagagaaagcc

SEQ ID NO: 3568358 - DNA, 25 bp, Homo sapien
tgtcaacggggctagagaaagccat

SEQ ID NO: 3568359 - DNA, 25 bp, Homo sapien
ggaccctgtcaacggggctagagaa

SEQ ID NO: 3568360 - DNA, 25 bp, Homo sapien
gcacactatcctggaagccgctact

SEQ ID NO: 3568361 - DNA, 25 bp, Homo sapien
gcaggtggacgggaaaagcccacag

SEQ ID NO: 3568362 - DNA, 25 bp, Homo sapien
aggaggaagacaggttgctccagct

SEQ ID NO: 3568363 - DNA, 25 bp, Homo sapien
ggaagacaggttgctccagctgccc

SEQ ID NO: 3568364 - DNA, 25 bp, Homo sapien
cggtgctggcacagttgagtccttc

SEQ ID NO: 3568365 - DNA, 25 bp, Homo sapien
aacaaagcccggtgctggcacagtt

SEQ ID NO: 3568366 - DNA, 25 bp, Homo sapien
tggcatagccaacaaagcccggtgc

SEQ ID NO: 3568367 - DNA, 25 bp, Homo sapien
aggtgtggcatagccaacaaagccc

SEQ ID NO: 3568368 - DNA, 25 bp, Homo sapien
tctacgacgcaacggccgaatcttg

SEQ ID NO: 3568369 - DNA, 25 bp, Homo sapien
gaaagtcctgaattcgcaactcagc

SEQ ID NO: 3568370 - DNA, 25 bp, Homo sapien
cgaatcttgccacggacaacaccga

SEQ ID NO: 3568371 - DNA, 25 bp, Homo sapien
acaacaccgaccacgggcctgagat

SEQ ID NO: 3568372 - DNA, 25 bp, Homo sapien
actccgccggaaaccatccgatgtg

SEQ ID NO: 3568373 - DNA, 25 bp, Homo sapien
aaaccatccgatgtggccgcgggcg

SEQ ID NO: 3568374 - DNA, 25 bp, Homo sapien
ttacactggacctcctccacgcact

SEQ ID NO: 3568375 - DNA, 25 bp, Homo sapien
gctgtccctgggcttacactggacc

SEQ ID NO: 3568376 - DNA, 25 bp, Homo sapien
gaaatgatgaggtcgtaccttcccc

SEQ ID NO: 3568377 - DNA, 25 bp, Homo sapien
agtcggggggcaccgccacaaagca

SEQ ID NO: 3568378 - DNA, 25 bp, Homo sapien
gcaccgccacaaagcagggaggaaa

SEQ ID NO: 3568379 - DNA, 25 bp, Homo sapien
gatgaggtcgtaccttcccctccta

SEQ ID NO: 3568380 - DNA, 25 bp, Homo sapien
ggtcatctcagagcagtaaccccgg

SEQ ID NO: 3568381 - DNA, 25 bp, Homo sapien
tggccgggatgtgcctcacagtttc

SEQ ID NO: 3568382 - DNA, 25 bp, Homo sapien
aacagatcagccacatcccaggtga

SEQ ID NO: 3568383 - DNA, 25 bp, Homo sapien
gaccaggacaatcatcactgcctga

SEQ ID NO: 3568384 - DNA, 25 bp, Homo sapien
cttccttcacggctgtgaggtcatt

SEQ ID NO: 3568385 - DNA, 25 bp, Homo sapien
caaggacttgctgctgcgccaccag

SEQ ID NO: 3568386 - DNA, 25 bp, Homo sapien
ctccttccttcacggctgtgaggtc

SEQ ID NO: 3568387 - DNA, 25 bp, Homo sapien
ccttcacggctgtgaggtcattctg

SEQ ID NO: 3568388 - DNA, 25 bp, Homo sapien
tgtctggggtcacaaagatggtgca

SEQ ID NO: 3568389 - DNA, 25 bp, Homo sapien
ttgggtcaaggactgtgctggtgtc

SEQ ID NO: 3568390 - DNA, 25 bp, Homo sapien
tcacaaagatggtgcaggatttggg

SEQ ID NO: 3568391 - DNA, 25 bp, Homo sapien
tgctggtgtctggggtcacaaagat

SEQ ID NO: 3568392 - DNA, 25 bp, Homo sapien
agaaaaggaggatggccttactgtc

SEQ ID NO: 3568393 - DNA, 25 bp, Homo sapien
gaaaaggaggatggccttactgtcc

SEQ ID NO: 3568394 - DNA, 25 bp, Homo sapien
cagaaaaggaggatggccttactgt

SEQ ID NO: 3568395 - DNA, 25 bp, Homo sapien
gggctccgtgccaattgtgtgcaaa

SEQ ID NO: 3568396 - DNA, 25 bp, Homo sapien
tgagttttggaaccgagctctgtca

SEQ ID NO: 3568397 - DNA, 25 bp, Homo sapien
gcaccgacagctcggcaggaaggaa

SEQ ID NO: 3568398 - DNA, 25 bp, Homo sapien
tgcgcggcccactcgaatctctttt

SEQ ID NO: 3568399 - DNA, 25 bp, Homo sapien
aggagcggaggacaaccagcagaca

SEQ ID NO: 3568400 - DNA, 25 bp, Homo sapien
cggaggacaaccagcagacactgac

SEQ ID NO: 3568401 - DNA, 25 bp, Homo sapien
ctccaggagcggaggacaaccagca

SEQ ID NO: 3568402 - DNA, 25 bp, Homo sapien
ctcactccaggagcggaggacaacc

SEQ ID NO: 3568403 - DNA, 25 bp, Homo sapien
tttgaccctgtcaccgcggtgaagg

SEQ ID NO: 3568404 - DNA, 25 bp, Homo sapien
ggcttgacagcgacgaagagcctcc

SEQ ID NO: 3568405 - DNA, 25 bp, Homo sapien
ggcacggcactgtagagcttccgct

SEQ ID NO: 3568406 - DNA, 25 bp, Homo sapien
gagtgagtccttgttggcaccaaga

SEQ ID NO: 3568407 - DNA, 25 bp, Homo sapien
cccctcccaaactttaggtgctgtg

SEQ ID NO: 3568408 - DNA, 25 bp, Homo sapien
gcgagtggtctctgaccatggttcc

SEQ ID NO: 3568409 - DNA, 25 bp, Homo sapien
ccaaactttaggtgctgtggcctct

SEQ ID NO: 3568410 - DNA, 25 bp, Homo sapien
cctctgaggcgatggaggcagcatc

SEQ ID NO: 3568411 - DNA, 25 bp, Homo sapien
gcaagcagctaggacttccctgtcc

SEQ ID NO: 3568412 - DNA, 25 bp, Homo sapien
tgtcccctgtccctagggatgccat

SEQ ID NO: 3568413 - DNA, 25 bp, Homo sapien
ggaggctgcaagcagctaggacttc

SEQ ID NO: 3568414 - DNA, 25 bp, Homo sapien
gaggacattgagagatgggggaggc

SEQ ID NO: 3568415 - DNA, 25 bp, Homo sapien
gcagtgcatcgatgtgcacagccag

SEQ ID NO: 3568416 - DNA, 25 bp, Homo sapien
cagtgcatcgatgtgcacagccagg

SEQ ID NO: 3568417 - DNA, 25 bp, Homo sapien
ggtgtcttatccttgtgatgtctca

SEQ ID NO: 3568418 - DNA, 25 bp, Homo sapien
ttgatgaactacatcctcctgccag

SEQ ID NO: 3568419 - DNA, 25 bp, Homo sapien
gatgtctcatttgatgaactacatc

SEQ ID NO: 3568420 - DNA, 25 bp, Homo sapien
cttatccttgtgatgtctcatttga

SEQ ID NO: 3568421 - DNA, 25 bp, Homo sapien
caaactcacacggagcttgccaggt

SEQ ID NO: 3568422 - DNA, 25 bp, Homo sapien
cctcctcaaactcacacggagcttg

SEQ ID NO: 3568423 - DNA, 25 bp, Homo sapien
tcacacggagcttgccaggtggagc

SEQ ID NO: 3568424 - DNA, 25 bp, Homo sapien
ctcaaactcacacggagcttgccag

SEQ ID NO: 3568425 - DNA, 25 bp, Homo sapien
cgccgcccagcctgttgagcgatgg

SEQ ID NO: 3568426 - DNA, 25 bp, Homo sapien
cgggcacgtagctcccaatggtctt

SEQ ID NO: 3568427 - DNA, 25 bp, Homo sapien
gcccagtcgggagcgctggcattga

SEQ ID NO: 3568428 - DNA, 25 bp, Homo sapien
ggtggccgtggagcagacggcccag

SEQ ID NO: 3568429 - DNA, 25 bp, Homo sapien
gagaacatctccacggcacggagct

SEQ ID NO: 3568430 - DNA, 25 bp, Homo sapien
gcacggagctcaagccagtacttcg

SEQ ID NO: 3568431 - DNA, 25 bp, Homo sapien
cagtacttcgcatggaagggacgtg

SEQ ID NO: 3568432 - DNA, 25 bp, Homo sapien
gggacggagaacatctccacggcac

SEQ ID NO: 3568433 - DNA, 25 bp, Homo sapien
gcctgggagacgtccggctggcttg

SEQ ID NO: 3568434 - DNA, 25 bp, Homo sapien
ctggcctgggagacgtccggctggc

SEQ ID NO: 3568435 - DNA, 25 bp, Homo sapien
ggagacgtccggctggcttgggcat

SEQ ID NO: 3568436 - DNA, 25 bp, Homo sapien
cctgggagacgtccggctggcttgg

SEQ ID NO: 3568437 - DNA, 25 bp, Homo sapien
tcctaacacactccgtggcacggtc

SEQ ID NO: 3568438 - DNA, 25 bp, Homo sapien
attccggaatggagttccacaaggg

SEQ ID NO: 3568439 - DNA, 25 bp, Homo sapien
ccacggatggccattccggaatgga

SEQ ID NO: 3568440 - DNA, 25 bp, Homo sapien
ggtccccacggatggccattccgga

SEQ ID NO: 3568441 - DNA, 25 bp, Homo sapien
tccctctgactttggcagcggtccg

SEQ ID NO: 3568442 - DNA, 25 bp, Homo sapien
ctgactttggcagcggtccgctcat

SEQ ID NO: 3568443 - DNA, 25 bp, Homo sapien
ggcagcggtccgctcattatataac

SEQ ID NO: 3568444 - DNA, 25 bp, Homo sapien
gcggtccgctcattatataaccttc

SEQ ID NO: 3568445 - DNA, 25 bp, Homo sapien
gcacttccgagcatagctgggcatg

SEQ ID NO: 3568446 - DNA, 25 bp, Homo sapien
tctgtctgtcagctgggaaccaact

SEQ ID NO: 3568447 - DNA, 25 bp, Homo sapien
agcgtgctggtgacaaagcccaccc

SEQ ID NO: 3568448 - DNA, 25 bp, Homo sapien
tgggcatgccagacccagcgtgctg

SEQ ID NO: 3568449 - DNA, 25 bp, Homo sapien
caccgcggagggttaacgcggatca

SEQ ID NO: 3568450 - DNA, 25 bp, Homo sapien
ttttgtgctcagggcattgaggaag

SEQ ID NO: 3568451 - DNA, 25 bp, Homo sapien
tgtgagccgggctactctgcttttg

SEQ ID NO: 3568452 - DNA, 25 bp, Homo sapien
cggatcaggcgtcctcgagctggca

SEQ ID NO: 3568453 - DNA, 25 bp, Homo sapien
tattgtttacaacgatctcatggga

SEQ ID NO: 3568454 - DNA, 25 bp, Homo sapien
gaacacgtgtcatcaggaaaaaggc

SEQ ID NO: 3568455 - DNA, 25 bp, Homo sapien
ctcctgtcactagcacgctgggcaa

SEQ ID NO: 3568456 - DNA, 25 bp, Homo sapien
tcccgggcgtcagtgacaggaacac

SEQ ID NO: 3568457 - DNA, 25 bp, Homo sapien
cacatgcccttcctctgtatggcaa

SEQ ID NO: 3568458 - DNA, 25 bp, Homo sapien
cttaggtcagaggtagggcagaccc

SEQ ID NO: 3568459 - DNA, 25 bp, Homo sapien
gacggtgatccccacggctttgcta

SEQ ID NO: 3568460 - DNA, 25 bp, Homo sapien
gctttgctaaaaggcggcagtggct

SEQ ID NO: 3568461 - DNA, 25 bp, Homo sapien
ccagctgggctagtctgtgcagaag

SEQ ID NO: 3568462 - DNA, 25 bp, Homo sapien
ggaggaatctgccttggtcatgacc

SEQ ID NO: 3568463 - DNA, 25 bp, Homo sapien
ccagagtcctcggtctcagaagggt

SEQ ID NO: 3568464 - DNA, 25 bp, Homo sapien
ctgaggaaccagaggccaacctgct

SEQ ID NO: 3568465 - DNA, 25 bp, Homo sapien
tggtcatgaccttggtggtcttcag

SEQ ID NO: 3568466 - DNA, 25 bp, Homo sapien
tccccctgaacagtgctccatttgg

SEQ ID NO: 3568467 - DNA, 25 bp, Homo sapien
cggccagggactccgtgtcctccac

SEQ ID NO: 3568468 - DNA, 25 bp, Homo sapien
cagggcgggctccagtgagtaaagg

SEQ ID NO: 3568469 - DNA, 25 bp, Homo sapien
ccgcagggcgggctccagtgagtaa

SEQ ID NO: 3568470 - DNA, 25 bp, Homo sapien
ggaaaacatcccattgaccaggctg

SEQ ID NO: 3568471 - DNA, 25 bp, Homo sapien
gattgtgaacagaacgcttcgcggc

SEQ ID NO: 3568472 - DNA, 25 bp, Homo sapien
cacattccagcatcgtaagggcact

SEQ ID NO: 3568473 - DNA, 25 bp, Homo sapien
ccaggctgtacacggcaagtcagaa

SEQ ID NO: 3568474 - DNA, 25 bp, Homo sapien
tagcttggaatttgcttccaccaga

SEQ ID NO: 3568475 - DNA, 25 bp, Homo sapien
ctagcttggaatttgcttccaccag

SEQ ID NO: 3568476 - DNA, 25 bp, Homo sapien
gcttaagggacaggcctcgcttcat

SEQ ID NO: 3568477 - DNA, 25 bp, Homo sapien
tgcagaaacgccatgattcctgagg

SEQ ID NO: 3568478 - DNA, 25 bp, Homo sapien
gaacggacaaaagattcaccctgag

SEQ ID NO: 3568479 - DNA, 25 bp, Homo sapien
tgagcaccaagggtttgccctgacg

SEQ ID NO: 3568480 - DNA, 25 bp, Homo sapien
gcggatgccagcaacatagaaggct

SEQ ID NO: 3568481 - DNA, 25 bp, Homo sapien
cggatgccagcaacatagaaggctc

SEQ ID NO: 3568482 - DNA, 25 bp, Homo sapien
ggcggatgccagcaacatagaaggc

SEQ ID NO: 3568483 - DNA, 25 bp, Homo sapien
gggcggatgccagcaacatagaagg

SEQ ID NO: 3568484 - DNA, 25 bp, Homo sapien
cagccgatggcagggcgatgggaga

SEQ ID NO: 3568485 - DNA, 25 bp, Homo sapien
gaaacaggccagtgggctcgtccaa

SEQ ID NO: 3568486 - DNA, 25 bp, Homo sapien
cactgccggtccaatgggactgctc

SEQ ID NO: 3568487 - DNA, 25 bp, Homo sapien
cagtgggctcgtccaagttgcaaga

SEQ ID NO: 3568488 - DNA, 25 bp, Homo sapien
ctaaaaaggggaatggccatcagca

SEQ ID NO: 3568489 - DNA, 25 bp, Homo sapien
cagtttggacaaatgcgtaacgaca

SEQ ID NO: 3568490 - DNA, 25 bp, Homo sapien
gaatcctagagccaacccttagcat

SEQ ID NO: 3568491 - DNA, 25 bp, Homo sapien
gaaggaatagagcttacccagagag

SEQ ID NO: 3568492 - DNA, 25 bp, Homo sapien
tacagtgtcactcgaagtccatagt

SEQ ID NO: 3568493 - DNA, 25 bp, Homo sapien
tctgccagctcaaagttgcctgcta

SEQ ID NO: 3568494 - DNA, 25 bp, Homo sapien
cttgatgtattctgccagctcaaag

SEQ ID NO: 3568495 - DNA, 25 bp, Homo sapien
cagctcaaagttgcctgctattatg

SEQ ID NO: 3568496 - DNA, 25 bp, Homo sapien
tattctgccagctcaaagttgcctg

SEQ ID NO: 3568497 - DNA, 25 bp, Homo sapien
ctgcagggtacggccataatgcaac

SEQ ID NO: 3568498 - DNA, 25 bp, Homo sapien
tcatcgcattagcagataagcaggg

SEQ ID NO: 3568499 - DNA, 25 bp, Homo sapien
tgacagttgcaggatcggattttgg

SEQ ID NO: 3568500 - DNA, 25 bp, Homo sapien
caagacacatcggatatgacaacat

SEQ ID NO: 3568501 - DNA, 25 bp, Homo sapien
tagactgggtcagacatgaaggctc

SEQ ID NO: 3568502 - DNA, 25 bp, Homo sapien
ctgaaagcttgcaggtatccaagca

SEQ ID NO: 3568503 - DNA, 25 bp, Homo sapien
cctgaaagcttgcaggtatccaagc

SEQ ID NO: 3568504 - DNA, 25 bp, Homo sapien
gaaagcttgcaggtatccaagcagc

SEQ ID NO: 3568505 - DNA, 25 bp, Homo sapien
tgaaagcttgcaggtatccaagcag

SEQ ID NO: 3568506 - DNA, 25 bp, Homo sapien
ctgcgaccttaagcaccaggtgcat

SEQ ID NO: 3568507 - DNA, 25 bp, Homo sapien
ggtgtgagagtcaaacaccaggggc

SEQ ID NO: 3568508 - DNA, 25 bp, Homo sapien
gtgtgagagtcaaacaccaggggct

SEQ ID NO: 3568509 - DNA, 25 bp, Homo sapien
caggtgtgagagtcaaacaccaggg

SEQ ID NO: 3568510 - DNA, 25 bp, Homo sapien
tcaggtgtgagagtcaaacaccagg

SEQ ID NO: 3568511 - DNA, 25 bp, Homo sapien
caataaccacttgtctctcttctgc

SEQ ID NO: 3568512 - DNA, 25 bp, Homo sapien
ttctgcctcctgctgggtccctttc

SEQ ID NO: 3568513 - DNA, 25 bp, Homo sapien
tgcctcctgctgggtccctttccac

SEQ ID NO: 3568514 - DNA, 25 bp, Homo sapien
cttctgcctcctgctgggtcccttt

SEQ ID NO: 3568515 - DNA, 25 bp, Homo sapien
cccgtcgatggagaccccagccatg

SEQ ID NO: 3568516 - DNA, 25 bp, Homo sapien
gttcccgtcgatggagaccccagcc

SEQ ID NO: 3568517 - DNA, 25 bp, Homo sapien
tcccgtcgatggagaccccagccat

SEQ ID NO: 3568518 - DNA, 25 bp, Homo sapien
ctgttcccgtcgatggagaccccag

SEQ ID NO: 3568519 - DNA, 25 bp, Homo sapien
tagaagggaaagaaaggcttgtatg

SEQ ID NO: 3568520 - DNA, 25 bp, Homo sapien
ctagaagggaaagaaaggcttgtat

SEQ ID NO: 3568521 - DNA, 25 bp, Homo sapien
cctggtggcggcactgtccaccggt

SEQ ID NO: 3568522 - DNA, 25 bp, Homo sapien
tcctggtggcggcactgtccaccgg

SEQ ID NO: 3568523 - DNA, 25 bp, Homo sapien
ggtggcggcactgtccaccggtcac

SEQ ID NO: 3568524 - DNA, 25 bp, Homo sapien
tggtggcggcactgtccaccggtca

SEQ ID NO: 3568525 - DNA, 25 bp, Homo sapien
cataatctctatgatacggtatctt

SEQ ID NO: 3568526 - DNA, 25 bp, Homo sapien
ggtatcttccatcggaaatgagtgg

SEQ ID NO: 3568527 - DNA, 25 bp, Homo sapien
ccatcggaaatgagtggaaatgtct

SEQ ID NO: 3568528 - DNA, 25 bp, Homo sapien
tctatgatacggtatcttccatcgg

SEQ ID NO: 3568529 - DNA, 25 bp, Homo sapien
gagatcaagtcccaatccctggagc

SEQ ID NO: 3568530 - DNA, 25 bp, Homo sapien
acaactttgggatttgctgacctgg

SEQ ID NO: 3568531 - DNA, 25 bp, Homo sapien
aaaagaggctagcaaggtgctagca

SEQ ID NO: 3568532 - DNA, 25 bp, Homo sapien
tctttagaggtaggcagaacaacgg

SEQ ID NO: 3568533 - DNA, 25 bp, Homo sapien
tatgtcagagctctaatccccaagg

SEQ ID NO: 3568534 - DNA, 25 bp, Homo sapien
catatctcctaaacttgctgttggg

SEQ ID NO: 3568535 - DNA, 25 bp, Homo sapien
ttgcagaactacagataacagaagc

SEQ ID NO: 3568536 - DNA, 25 bp, Homo sapien
gactaaattgtgtgtcccctcccaa

SEQ ID NO: 3568537 - DNA, 25 bp, Homo sapien
cacctggctggagagacatcacatc

SEQ ID NO: 3568538 - DNA, 25 bp, Homo sapien
attgagaagatggtgctcagtcacc

SEQ ID NO: 3568539 - DNA, 25 bp, Homo sapien
gaagatggtgctcagtcaccgacat

SEQ ID NO: 3568540 - DNA, 25 bp, Homo sapien
gacatcacatcattgagaagatggt

SEQ ID NO: 3568541 - DNA, 25 bp, Homo sapien
gttcaaaggggtctgtctgtgtctg

SEQ ID NO: 3568542 - DNA, 25 bp, Homo sapien
gggtctgtctgtgtctggaggagat

SEQ ID NO: 3568543 - DNA, 25 bp, Homo sapien
ctgtgtctggaggagattatgtccc

SEQ ID NO: 3568544 - DNA, 25 bp, Homo sapien
gtctgtctgtgtctggaggagatta

SEQ ID NO: 3568545 - DNA, 25 bp, Homo sapien
tgcgcttcccatatggctgctgaga

SEQ ID NO: 3568546 - DNA, 25 bp, Homo sapien
taatgacaggtgattatcagctgcc

SEQ ID NO: 3568547 - DNA, 25 bp, Homo sapien
gatgctgaacctacaagatgactcc

SEQ ID NO: 3568548 - DNA, 25 bp, Homo sapien
ttctacttgaggcacttatgcaggg

SEQ ID NO: 3568549 - DNA, 25 bp, Homo sapien
ctctgggtggcgatggagctagtac

SEQ ID NO: 3568550 - DNA, 25 bp, Homo sapien
gcaaaatgcagtctctgggtggcga

SEQ ID NO: 3568551 - DNA, 25 bp, Homo sapien
cagtctctgggtggcgatggagcta

SEQ ID NO: 3568552 - DNA, 25 bp, Homo sapien
tcacccagtaagtgcaaaatgcagt

SEQ ID NO: 3568553 - DNA, 25 bp, Homo sapien
gaaactgttctcaagttggctccta

SEQ ID NO: 3568554 - DNA, 25 bp, Homo sapien
tggctttcgttggtggcaaacagca

SEQ ID NO: 3568555 - DNA, 25 bp, Homo sapien
ctatgccgtggcttttctgtgtggc

SEQ ID NO: 3568556 - DNA, 25 bp, Homo sapien
cgtctcagtgctgaaactgttctca

SEQ ID NO: 3568557 - DNA, 25 bp, Homo sapien
aagctgctgacgattttcatgcaaa

SEQ ID NO: 3568558 - DNA, 25 bp, Homo sapien
gctgctgacgattttcatgcaaagg

SEQ ID NO: 3568559 - DNA, 25 bp, Homo sapien
ccaagctgctgacgattttcatgca

SEQ ID NO: 3568560 - DNA, 25 bp, Homo sapien
ctgctgacgattttcatgcaaaggt

SEQ ID NO: 3568561 - DNA, 25 bp, Homo sapien
gggcggccctggcttcgtgtgtccg

SEQ ID NO: 3568562 - DNA, 25 bp, Homo sapien
ggcagggcggccctggcttcgtgtg

SEQ ID NO: 3568563 - DNA, 25 bp, Homo sapien
cagggcggccctggcttcgtgtgtc

SEQ ID NO: 3568564 - DNA, 25 bp, Homo sapien
gcggccctggcttcgtgtgtccggg

SEQ ID NO: 3568565 - DNA, 25 bp, Homo sapien
gaaaacaccggtgctttctggtatc

SEQ ID NO: 3568566 - DNA, 25 bp, Homo sapien
cagaaaacaccggtgctttctggta

SEQ ID NO: 3568567 - DNA, 25 bp, Homo sapien
caccggtgctttctggtatcctgcc

SEQ ID NO: 3568568 - DNA, 25 bp, Homo sapien
aacaccggtgctttctggtatcctg

SEQ ID NO: 3568569 - DNA, 25 bp, Homo sapien
tgttcgtgcaggagaagctcgcagc

SEQ ID NO: 3568570 - DNA, 25 bp, Homo sapien
gatcacctccgacgatggctgtgtg

SEQ ID NO: 3568571 - DNA, 25 bp, Homo sapien
tctttgcagcacacagtggcgtgtt

SEQ ID NO: 3568572 - DNA, 25 bp, Homo sapien
ggtgaggccgtaactgtctttataa

SEQ ID NO: 3568573 - DNA, 25 bp, Homo sapien
gcagctttgtgtagggcggtcatcc

SEQ ID NO: 3568574 - DNA, 25 bp, Homo sapien
acctccacagagtcgtccagctgag

SEQ ID NO: 3568575 - DNA, 25 bp, Homo sapien
tcatcccatctttggcacggaagtc

SEQ ID NO: 3568576 - DNA, 25 bp, Homo sapien
tcagggcaacttggttcctcgctcg

SEQ ID NO: 3568577 - DNA, 25 bp, Homo sapien
aacacacacactttagaaccaacat

SEQ ID NO: 3568578 - DNA, 25 bp, Homo sapien
ctgaggaacccaaacacacacactt

SEQ ID NO: 3568579 - DNA, 25 bp, Homo sapien
caaacacacacactttagaaccaac

SEQ ID NO: 3568580 - DNA, 25 bp, Homo sapien
cccaaacacacacactttagaacca

SEQ ID NO: 3568581 - DNA, 25 bp, Homo sapien
cctcgaggcctcctaactgagcggt

SEQ ID NO: 3568582 - DNA, 25 bp, Homo sapien
cgaggcctcctaactgagcggtgcg

SEQ ID NO: 3568583 - DNA, 25 bp, Homo sapien
cctcctaactgagcggtgcgggagc

SEQ ID NO: 3568584 - DNA, 25 bp, Homo sapien
gtcctcgaggcctcctaactgagcg

SEQ ID NO: 3568585 - DNA, 25 bp, Homo sapien
tcagagtctgcactgatgtgttttt

SEQ ID NO: 3568586 - DNA, 25 bp, Homo sapien
agtctgcactgatgtgtttttagca

SEQ ID NO: 3568587 - DNA, 25 bp, Homo sapien
gagtctgcactgatgtgtttttagc

SEQ ID NO: 3568588 - DNA, 25 bp, Homo sapien
cagagtctgcactgatgtgttttta

SEQ ID NO: 3568589 - DNA, 25 bp, Homo sapien
atcaaagctaccagcagccacaagc

SEQ ID NO: 3568590 - DNA, 25 bp, Homo sapien
ctgagcctcgctcatgcagtcctgc

SEQ ID NO: 3568591 - DNA, 25 bp, Homo sapien
agtcctgcctcccaacgtcacaggc

SEQ ID NO: 3568592 - DNA, 25 bp, Homo sapien
aacgtcacaggcatcaaagctacca

SEQ ID NO: 3568593 - DNA, 25 bp, Homo sapien
tctccgggtcgtggaaattgggatc

SEQ ID NO: 3568594 - DNA, 25 bp, Homo sapien
atccaggcctcggtccagcatcttg

SEQ ID NO: 3568595 - DNA, 25 bp, Homo sapien
caagcgatgctgaatgtgatccatg

SEQ ID NO: 3568596 - DNA, 25 bp, Homo sapien
tgatccatgcatttcttcagattgg

SEQ ID NO: 3568597 - DNA, 25 bp, Homo sapien
cttcgtgtggagcttggccaactgt

SEQ ID NO: 3568598 - DNA, 25 bp, Homo sapien
tatacacccgcttcttgtatcgaaa

SEQ ID NO: 3568599 - DNA, 25 bp, Homo sapien
gactggcttgtttatacacccgctt

SEQ ID NO: 3568600 - DNA, 25 bp, Homo sapien
caactgtttctcatcgagactggct

SEQ ID NO: 3568601 - DNA, 25 bp, Homo sapien
ccagagcctacaacatcctcagcat

SEQ ID NO: 3568602 - DNA, 25 bp, Homo sapien
cccagagcctacaacatcctcagca

SEQ ID NO: 3568603 - DNA, 25 bp, Homo sapien
tcaccctgcacggttacacatgtgc

SEQ ID NO: 3568604 - DNA, 25 bp, Homo sapien
tgcacggttacacatgtgctcagag

SEQ ID NO: 3568605 - DNA, 25 bp, Homo sapien
gccgtcaccctgcacggttacacat

SEQ ID NO: 3568606 - DNA, 25 bp, Homo sapien
ccctgcacggttacacatgtgctca

SEQ ID NO: 3568607 - DNA, 25 bp, Homo sapien
tgtgtggtccttagttggccctcaa

SEQ ID NO: 3568608 - DNA, 25 bp, Homo sapien
tgccgttatggaaatgatcagcccc

SEQ ID NO: 3568609 - DNA, 25 bp, Homo sapien
cagcccctgaaatgaactgcatgga

SEQ ID NO: 3568610 - DNA, 25 bp, Homo sapien
gaatctgacacatggtccacactgg

SEQ ID NO: 3568611 - DNA, 25 bp, Homo sapien
gggctgtgggtactcgcgcaggagc

SEQ ID NO: 3568612 - DNA, 25 bp, Homo sapien
gctgtgggtactcgcgcaggagccg

SEQ ID NO: 3568613 - DNA, 25 bp, Homo sapien
cccacgggctgtgggtactcgcgca

SEQ ID NO: 3568614 - DNA, 25 bp, Homo sapien
acgggctgtgggtactcgcgcagga

SEQ ID NO: 3568615 - DNA, 25 bp, Homo sapien
tgggttaatgtacacaggatccgct

SEQ ID NO: 3568616 - DNA, 25 bp, Homo sapien
ggccgtagttcaggacatctttcaa

SEQ ID NO: 3568617 - DNA, 25 bp, Homo sapien
aggatccgctgctttgcaacccaca

SEQ ID NO: 3568618 - DNA, 25 bp, Homo sapien
cacactgtggcatccgggttaaatc

SEQ ID NO: 3568619 - DNA, 25 bp, Homo sapien
aaagcctactggttgctgggacaca

SEQ ID NO: 3568620 - DNA, 25 bp, Homo sapien
gaacccacggcttttcacagtgaaa

SEQ ID NO: 3568621 - DNA, 25 bp, Homo sapien
tgagtgacagaggacgctacctgag

SEQ ID NO: 3568622 - DNA, 25 bp, Homo sapien
agaggcaaagctgcttccacccctt

SEQ ID NO: 3568623 - DNA, 25 bp, Homo sapien
ggtgctcgtggtggcaaacactaaa

SEQ ID NO: 3568624 - DNA, 25 bp, Homo sapien
taatacttcttactgcggacagagg

SEQ ID NO: 3568625 - DNA, 25 bp, Homo sapien
gggtaacacacgaagctgaaatcag

SEQ ID NO: 3568626 - DNA, 25 bp, Homo sapien
caataaagggtaacggagctgtgga

SEQ ID NO: 3568627 - DNA, 25 bp, Homo sapien
tatctccaggcgattagtaagaggc

SEQ ID NO: 3568628 - DNA, 25 bp, Homo sapien
gagacactgcttggttctgccagtg

SEQ ID NO: 3568629 - DNA, 25 bp, Homo sapien
tcaaggtgatgctaaactgggagac

SEQ ID NO: 3568630 - DNA, 25 bp, Homo sapien
gaagcggtgggcagactgtatctcc

SEQ ID NO: 3568631 - DNA, 25 bp, Homo sapien
agagccattgtaaagcagagatcag

SEQ ID NO: 3568632 - DNA, 25 bp, Homo sapien
actgacgatggccagagcaggcatc

SEQ ID NO: 3568633 - DNA, 25 bp, Homo sapien
cactgcacccggctacattcgtgga

SEQ ID NO: 3568634 - DNA, 25 bp, Homo sapien
tgacagtgcagaaagctcctccgtg

SEQ ID NO: 3568635 - DNA, 25 bp, Homo sapien
cattcgtggataaaagagcttttac

SEQ ID NO: 3568636 - DNA, 25 bp, Homo sapien
gtgcctgctggaccgcaagctgctg

SEQ ID NO: 3568637 - DNA, 25 bp, Homo sapien
ctagagggcacgtgtcagcacgtta

SEQ ID NO: 3568638 - DNA, 25 bp, Homo sapien
agcccagttagcgtctctctcagag

SEQ ID NO: 3568639 - DNA, 25 bp, Homo sapien
ttagtcccctcagcccagttagcgt

SEQ ID NO: 3568640 - DNA, 25 bp, Homo sapien
cccacggagtagtcggagaagctct

SEQ ID NO: 3568641 - DNA, 25 bp, Homo sapien
tgtcatagatggtctcttctttgga

SEQ ID NO: 3568642 - DNA, 25 bp, Homo sapien
gcagtggcccggatcgtgtcataga

SEQ ID NO: 3568643 - DNA, 25 bp, Homo sapien
cgtctgctgcaggtcatggatgacc

SEQ ID NO: 3568644 - DNA, 25 bp, Homo sapien
tgctagactagaacaacgtagtggt

SEQ ID NO: 3568645 - DNA, 25 bp, Homo sapien
tgaacagactagcaggacaaatata

SEQ ID NO: 3568646 - DNA, 25 bp, Homo sapien
tactctcaatggaacacagattgtg

SEQ ID NO: 3568647 - DNA, 25 bp, Homo sapien
gtagtggtaattttgctgaacagac

SEQ ID NO: 3568648 - DNA, 25 bp, Homo sapien
gaaggagcgtccaagaaaggcgtca

SEQ ID NO: 3568649 - DNA, 25 bp, Homo sapien
gaacaaggtggcagacttcatcact

SEQ ID NO: 3568650 - DNA, 25 bp, Homo sapien
gctaggatttccaacacagtgattc

SEQ ID NO: 3568651 - DNA, 25 bp, Homo sapien
cactgaccatgtaaccaaaaggagc

SEQ ID NO: 3568652 - DNA, 25 bp, Homo sapien
ttagactgcagctttgagagttgcc

SEQ ID NO: 3568653 - DNA, 25 bp, Homo sapien
atcctgcactggtggccgtggctca

SEQ ID NO: 3568654 - DNA, 25 bp, Homo sapien
tcggcccagcatcgatggtcatgac

SEQ ID NO: 3568655 - DNA, 25 bp, Homo sapien
gagagttgcctgtgatgctcggccc

SEQ ID NO: 3568656 - DNA, 25 bp, Homo sapien
tcagcggcagccacatgttaaccaa

SEQ ID NO: 3568657 - DNA, 25 bp, Homo sapien
tcaaagagacagacacgacagtgat

SEQ ID NO: 3568658 - DNA, 25 bp, Homo sapien
tcaccagaccacagagaggtatcaa

SEQ ID NO: 3568659 - DNA, 25 bp, Homo sapien
ggtttaagacaattagcagtgccca

SEQ ID NO: 3568660 - DNA, 25 bp, Homo sapien
gctgcccgcccggagattgcgccga

SEQ ID NO: 3568661 - DNA, 25 bp, Homo sapien
gtgatcaccacgctgtgtccactgc

SEQ ID NO: 3568662 - DNA, 25 bp, Homo sapien
acaaagggtgatcaccacgctgtgt

SEQ ID NO: 3568663 - DNA, 25 bp, Homo sapien
cgcccggagattgcgccgagctggc

SEQ ID NO: 3568664 - DNA, 25 bp, Homo sapien
agtccagaaggagcacgttgtctcc

SEQ ID NO: 3568665 - DNA, 25 bp, Homo sapien
tcagggtcactcttgcctctccagg

SEQ ID NO: 3568666 - DNA, 25 bp, Homo sapien
cagtgtgacaccgtcactggaggct

SEQ ID NO: 3568667 - DNA, 25 bp, Homo sapien
tctggaaggtggcacactcagggtc

SEQ ID NO: 3568668 - DNA, 25 bp, Homo sapien
gacaccgtcactggaggctgaccct

SEQ ID NO: 3568669 - DNA, 25 bp, Homo sapien
tgacccaggagggagcttcggttcg

SEQ ID NO: 3568670 - DNA, 25 bp, Homo sapien
gctgacccaggagggagcttcggtt

SEQ ID NO: 3568671 - DNA, 25 bp, Homo sapien
acccaggagggagcttcggttcgca

SEQ ID NO: 3568672 - DNA, 25 bp, Homo sapien
gagggagcttcggttcgcaggagcc

SEQ ID NO: 3568673 - DNA, 25 bp, Homo sapien
tcccctttgcataggtcgtgcctcc

SEQ ID NO: 3568674 - DNA, 25 bp, Homo sapien
cctttgcataggtcgtgcctcctct

SEQ ID NO: 3568675 - DNA, 25 bp, Homo sapien
cataggtcgtgcctcctctcagaat

SEQ ID NO: 3568676 - DNA, 25 bp, Homo sapien
tgcataggtcgtgcctcctctcaga

SEQ ID NO: 3568677 - DNA, 25 bp, Homo sapien
cacatggtcatacccagacccagct

SEQ ID NO: 3568678 - DNA, 25 bp, Homo sapien
cacacatggtcatacccagacccag

SEQ ID NO: 3568679 - DNA, 25 bp, Homo sapien
ccagcacacacatggtcatacccag

SEQ ID NO: 3568680 - DNA, 25 bp, Homo sapien
agcacacacatggtcatacccagac

SEQ ID NO: 3568681 - DNA, 25 bp, Homo sapien
cctttcgaggaggaactgtgtactg

SEQ ID NO: 3568682 - DNA, 25 bp, Homo sapien
tcacacgttctcatatgcatccttg

SEQ ID NO: 3568683 - DNA, 25 bp, Homo sapien
cagtgcttctgcacaagggacaagt

SEQ ID NO: 3568684 - DNA, 25 bp, Homo sapien
tgcatccttgtgacacctttcgagg

SEQ ID NO: 3568685 - DNA, 25 bp, Homo sapien
gcaggaactgtctgtattctagagg

SEQ ID NO: 3568686 - DNA, 25 bp, Homo sapien
agcaggaactgtctgtattctagag

SEQ ID NO: 3568687 - DNA, 25 bp, Homo sapien
gagcaggaactgtctgtattctaga

SEQ ID NO: 3568688 - DNA, 25 bp, Homo sapien
gttgggagactgagcctcacagatg

SEQ ID NO: 3568689 - DNA, 25 bp, Homo sapien
ctcatcagaaactgtggagaccaaa

SEQ ID NO: 3568690 - DNA, 25 bp, Homo sapien
gaccaaaagaaagtggcacagtaat

SEQ ID NO: 3568691 - DNA, 25 bp, Homo sapien
ggcacagtaattttcaagtgatgaa

SEQ ID NO: 3568692 - DNA, 25 bp, Homo sapien
gaaaagtattctcaatccataattt

SEQ ID NO: 3568693 - DNA, 25 bp, Homo sapien
aataaactggtgtgccacccaggag

SEQ ID NO: 3568694 - DNA, 25 bp, Homo sapien
gaagcgaccggtgccttcttctgca

SEQ ID NO: 3568695 - DNA, 25 bp, Homo sapien
tgggccacacgaccttcggcaagtt

SEQ ID NO: 3568696 - DNA, 25 bp, Homo sapien
tagcgacgccatcgggtcagtatct

SEQ ID NO: 3568697 - DNA, 25 bp, Homo sapien
gagcgccagcgtccgcgcacacctg

SEQ ID NO: 3568698 - DNA, 25 bp, Homo sapien
cagcgtccgcgcacacctggatcgg

SEQ ID NO: 3568699 - DNA, 25 bp, Homo sapien
ccccgggagcgccagcgtccgcgca

SEQ ID NO: 3568700 - DNA, 25 bp, Homo sapien
ccagcgtccgcgcacacctggatcg

SEQ ID NO: 3568701 - DNA, 25 bp, Homo sapien
aggagccgccgccgcggctcaggtg

SEQ ID NO: 3568702 - DNA, 25 bp, Homo sapien
ccgccgccgcggctcaggtgcaggg

SEQ ID NO: 3568703 - DNA, 25 bp, Homo sapien
gagccgccgccgcggctcaggtgca

SEQ ID NO: 3568704 - DNA, 25 bp, Homo sapien
agccgccgccgcggctcaggtgcag

SEQ ID NO: 3568705 - DNA, 25 bp, Homo sapien
ctttactatgcccaccgttgtagca

SEQ ID NO: 3568706 - DNA, 25 bp, Homo sapien
tacagcatgaaactgctgtctgcac

SEQ ID NO: 3568707 - DNA, 25 bp, Homo sapien
tgctgtctgcactgccgtatatcct

SEQ ID NO: 3568708 - DNA, 25 bp, Homo sapien
tatatcctctcccagttgctgtggc

SEQ ID NO: 3568709 - DNA, 25 bp, Homo sapien
ccgtgggaagcaatgttcagtcttt

SEQ ID NO: 3568710 - DNA, 25 bp, Homo sapien
gtgccgtgggaagcaatgttcagtc

SEQ ID NO: 3568711 - DNA, 25 bp, Homo sapien
ttcagtctttcaggactaggcacat

SEQ ID NO: 3568712 - DNA, 25 bp, Homo sapien
aggactaggcacatcctcatctgtc

SEQ ID NO: 3568713 - DNA, 25 bp, Homo sapien
atttgcttgtctggggtattaaatg

SEQ ID NO: 3568714 - DNA, 25 bp, Homo sapien
gcttgtctggggtattaaatgccat

SEQ ID NO: 3568715 - DNA, 25 bp, Homo sapien
gatttgcttgtctggggtattaaat

SEQ ID NO: 3568716 - DNA, 25 bp, Homo sapien
ttgcttgtctggggtattaaatgcc

SEQ ID NO: 3568717 - DNA, 25 bp, Homo sapien
gagggacattaaaagcattgcagct

SEQ ID NO: 3568718 - DNA, 25 bp, Homo sapien
cctgaagatagatccataaaactgt

SEQ ID NO: 3568719 - DNA, 25 bp, Homo sapien
ggaatcaggcctgatgggcaccctg

SEQ ID NO: 3568720 - DNA, 25 bp, Homo sapien
cagatgcttggcctgcatgagggac

SEQ ID NO: 3568721 - DNA, 25 bp, Homo sapien
gaggtgtggatctagggtgactgct

SEQ ID NO: 3568722 - DNA, 25 bp, Homo sapien
tcagctgactctcctgcttggtttg

SEQ ID NO: 3568723 - DNA, 25 bp, Homo sapien
cagagcttagtctgagcagggactc

SEQ ID NO: 3568724 - DNA, 25 bp, Homo sapien
gctgactctcctgcttggtttgggc

SEQ ID NO: 3568725 - DNA, 25 bp, Homo sapien
tgcgttcctccatccgtcactgatt

SEQ ID NO: 3568726 - DNA, 25 bp, Homo sapien
tcactgtgcgctgaggcttctgggt

SEQ ID NO: 3568727 - DNA, 25 bp, Homo sapien
actgattcgctccaacgacactggc

SEQ ID NO: 3568728 - DNA, 25 bp, Homo sapien
tgttctttttggaccgagcgcaacg

SEQ ID NO: 3568729 - DNA, 25 bp, Homo sapien
ctgcagccacattctcaacgcccat

SEQ ID NO: 3568730 - DNA, 25 bp, Homo sapien
tcccgatgtccctgtgctctgcagc

SEQ ID NO: 3568731 - DNA, 25 bp, Homo sapien
cacgtcctcctcccgatgtccctgt

SEQ ID NO: 3568732 - DNA, 25 bp, Homo sapien
gtcctcctcccgatgtccctgtgct

SEQ ID NO: 3568733 - DNA, 25 bp, Homo sapien
tcctcccgatgtccctgtgctctgc

SEQ ID NO: 3568734 - DNA, 25 bp, Homo sapien
cgtggcagcaaaggcgtacaaggac

SEQ ID NO: 3568735 - DNA, 25 bp, Homo sapien
cccgtttgccaccaggggttagctg

SEQ ID NO: 3568736 - DNA, 25 bp, Homo sapien
gcaaaggcgtacaaggaccaagtgg

SEQ ID NO: 3568737 - DNA, 25 bp, Homo sapien
tcacagcaggcgtggcagcaaaggc

SEQ ID NO: 3568738 - DNA, 25 bp, Homo sapien
tgacatgtgcgtgctcttggccagg

SEQ ID NO: 3568739 - DNA, 25 bp, Homo sapien
tcttcccgacaccttccagaagcct

SEQ ID NO: 3568740 - DNA, 25 bp, Homo sapien
tcagaggtgacatgtgcgtgctctt

SEQ ID NO: 3568741 - DNA, 25 bp, Homo sapien
gcagactcagaggtgacatgtgcgt

SEQ ID NO: 3568742 - DNA, 25 bp, Homo sapien
ctgaataactatggagggctgccct

SEQ ID NO: 3568743 - DNA, 25 bp, Homo sapien
gagcctgaataactatggagggctg

SEQ ID NO: 3568744 - DNA, 25 bp, Homo sapien
tgggaatcgaaatggaggatgcccc

SEQ ID NO: 3568745 - DNA, 25 bp, Homo sapien
ctggtctctgggaatcgaaatggag

SEQ ID NO: 3568746 - DNA, 25 bp, Homo sapien
tcgtcatccacgaagagaagctctg

SEQ ID NO: 3568747 - DNA, 25 bp, Homo sapien
tggtgagcagggtgtctgggtctag

SEQ ID NO: 3568748 - DNA, 25 bp, Homo sapien
ggtctaggatggtcccctctacagc

SEQ ID NO: 3568749 - DNA, 25 bp, Homo sapien
gggacctcgtcgtcatccacgaaga

SEQ ID NO: 3568750 - DNA, 25 bp, Homo sapien
cctctttcagggtcgaatcagcctc

SEQ ID NO: 3568751 - DNA, 25 bp, Homo sapien
caggagctgtgtccctagtgtgagt

SEQ ID NO: 3568752 - DNA, 25 bp, Homo sapien
agcaggagctgtgtccctagtgtga

SEQ ID NO: 3568753 - DNA, 25 bp, Homo sapien
tctctactctcagatcccatggagg

SEQ ID NO: 3568754 - DNA, 25 bp, Homo sapien
ccatggaggggagcaaggcctcctg

SEQ ID NO: 3568755 - DNA, 25 bp, Homo sapien
aggcgagcaggacactctccccaga

SEQ ID NO: 3568756 - DNA, 25 bp, Homo sapien
aaccatcagcttgtaagagaggaaa

SEQ ID NO: 3568757 - DNA, 25 bp, Homo sapien
tctccccagaagcagtaaagacagg

SEQ ID NO: 3568758 - DNA, 25 bp, Homo sapien
ttcacctgagggagatccagctttt

SEQ ID NO: 3568759 - DNA, 25 bp, Homo sapien
tcaactgggaagctgtagctcctcc

SEQ ID NO: 3568760 - DNA, 25 bp, Homo sapien
gccaccatcagagtcaggagatggc

SEQ ID NO: 3568761 - DNA, 25 bp, Homo sapien
cagctccagaatcaggccaccatca

SEQ ID NO: 3568762 - DNA, 25 bp, Homo sapien
caccatcagagtcaggagatggcca

SEQ ID NO: 3568763 - DNA, 25 bp, Homo sapien
gtcagcgctagactccattatgcca

SEQ ID NO: 3568764 - DNA, 25 bp, Homo sapien
tagcagacatcagatcactacagaa

SEQ ID NO: 3568765 - DNA, 25 bp, Homo sapien
gacatttatagcagacatcagatca

SEQ ID NO: 3568766 - DNA, 25 bp, Homo sapien
ccaggaaaaacaatgccagtgtcgc

SEQ ID NO: 3568767 - DNA, 25 bp, Homo sapien
ctttcgttggtcatccttgccgctg

SEQ ID NO: 3568768 - DNA, 25 bp, Homo sapien
gccatcctttcgttggtcatccttg

SEQ ID NO: 3568769 - DNA, 25 bp, Homo sapien
cgttggtcatccttgccgctgtggt

SEQ ID NO: 3568770 - DNA, 25 bp, Homo sapien
gagtgaggatgccatcctttcgttg

SEQ ID NO: 3568771 - DNA, 25 bp, Homo sapien
tggtgacccacatatccttgaacgt

SEQ ID NO: 3568772 - DNA, 25 bp, Homo sapien
agacagaatacggacaggtggccac

SEQ ID NO: 3568773 - DNA, 25 bp, Homo sapien
tctactgatgatggaagagcccatc

SEQ ID NO: 3568774 - DNA, 25 bp, Homo sapien
ccttgtactccttgctggtgaccca

SEQ ID NO: 3568775 - DNA, 25 bp, Homo sapien
ccatctcaaaaaatagataaataaa

SEQ ID NO: 3568776 - DNA, 25 bp, Homo sapien
tctcaaaaaatagataaataaaata

SEQ ID NO: 3568777 - DNA, 25 bp, Homo sapien
tggggctcaggaagtttaaggtcac

SEQ ID NO: 3568778 - DNA, 25 bp, Homo sapien
aaagaggcccctggggctcaggaag

SEQ ID NO: 3568779 - DNA, 25 bp, Homo sapien
caagagcctggagtcgtccagaaag

SEQ ID NO: 3568780 - DNA, 25 bp, Homo sapien
ctgttccaaagctggcggctggagt

SEQ ID NO: 3568781 - DNA, 25 bp, Homo sapien
cttgcagtgtcctgttccaaagctg

SEQ ID NO: 3568782 - DNA, 25 bp, Homo sapien
aggggacaagggcagtaagacaggt

SEQ ID NO: 3568783 - DNA, 25 bp, Homo sapien
cagtgtcctgttccaaagctggcgg

SEQ ID NO: 3568784 - DNA, 25 bp, Homo sapien
tccggacagtagcatgtggccaaag

SEQ ID NO: 3568785 - DNA, 25 bp, Homo sapien
caaagagaaccttctggaggtcggg

SEQ ID NO: 3568786 - DNA, 25 bp, Homo sapien
ctctggatggccttcgtgtggatgc

SEQ ID NO: 3568787 - DNA, 25 bp, Homo sapien
tctgcatccggaatcgcaagccggg

SEQ ID NO: 3568788 - DNA, 25 bp, Homo sapien
gggagaaagaatgttggaagccaga

SEQ ID NO: 3568789 - DNA, 25 bp, Homo sapien
ggcagagggagaaagaatgttggaa

SEQ ID NO: 3568790 - DNA, 25 bp, Homo sapien
agagggagaaagaatgttggaagcc

SEQ ID NO: 3568791 - DNA, 25 bp, Homo sapien
ggagaaagaatgttggaagccagag

SEQ ID NO: 3568792 - DNA, 25 bp, Homo sapien
ttcaaaattgtgagcccctgggaag

SEQ ID NO: 3568793 - DNA, 25 bp, Homo sapien
cttgcctgtgaggaaaaattgccga

SEQ ID NO: 3568794 - DNA, 25 bp, Homo sapien
tgttcaaaattgtgagcccctggga

SEQ ID NO: 3568795 - DNA, 25 bp, Homo sapien
ctgtgaggaaaaattgccgaataac

SEQ ID NO: 3568796 - DNA, 25 bp, Homo sapien
aacaaatgaagaattggactccggg

SEQ ID NO: 3568797 - DNA, 25 bp, Homo sapien
gtcctttatgaaggtaacaaatgaa

SEQ ID NO: 3568798 - DNA, 25 bp, Homo sapien
tcctttatgaaggtaacaaatgaag

SEQ ID NO: 3568799 - DNA, 25 bp, Homo sapien
attggactccggggaacacctgctt

SEQ ID NO: 3568800 - DNA, 25 bp, Homo sapien
tgtcatttctcccgttccaccagga

SEQ ID NO: 3568801 - DNA, 25 bp, Homo sapien
acaaatgtaccagctgaagcgttta

SEQ ID NO: 3568802 - DNA, 25 bp, Homo sapien
tgtaccagctgaagcgtttaggcag

SEQ ID NO: 3568803 - DNA, 25 bp, Homo sapien
cagctgaagcgtttaggcagctcca

SEQ ID NO: 3568804 - DNA, 25 bp, Homo sapien
tctcctgcccaacggtgatctcttg

SEQ ID NO: 3568805 - DNA, 25 bp, Homo sapien
aaagccacatagcagcatttctcct

SEQ ID NO: 3568806 - DNA, 25 bp, Homo sapien
tcatgtcccggatgtactctcgatc

SEQ ID NO: 3568807 - DNA, 25 bp, Homo sapien
gcagaagaagctctcctgcccaacg

SEQ ID NO: 3568808 - DNA, 25 bp, Homo sapien
aggttgactgatgcaaaggacagcc

SEQ ID NO: 3568809 - DNA, 25 bp, Homo sapien
aggttaggtcctggcccgctatgtc

SEQ ID NO: 3568810 - DNA, 25 bp, Homo sapien
tcagcgatgggcacgaagtgtgtca

SEQ ID NO: 3568811 - DNA, 25 bp, Homo sapien
tcaacagttgcaggaggtacgaggt

SEQ ID NO: 3568812 - DNA, 25 bp, Homo sapien
tacagggcaggtatgttgaaaatct

SEQ ID NO: 3568813 - DNA, 25 bp, Homo sapien
tcctcggttagctaaatacagggca

SEQ ID NO: 3568814 - DNA, 25 bp, Homo sapien
gccagaggcgtacagagaaaggact

SEQ ID NO: 3568815 - DNA, 25 bp, Homo sapien
cagggcaggtatgttgaaaatctca

SEQ ID NO: 3568816 - DNA, 25 bp, Homo sapien
tctctttgctgggtgttgggttcaa

SEQ ID NO: 3568817 - DNA, 25 bp, Homo sapien
tgttgggttcaaagacggctccgtc

SEQ ID NO: 3568818 - DNA, 25 bp, Homo sapien
gggcgacgtggagcacctggtagaa

SEQ ID NO: 3568819 - DNA, 25 bp, Homo sapien
aagacggctccgtcaccaacatggg

SEQ ID NO: 3568820 - DNA, 25 bp, Homo sapien
cgggatacagagtcagcagcttcct

SEQ ID NO: 3568821 - DNA, 25 bp, Homo sapien
gaagacgggatacagagtcagcagc

SEQ ID NO: 3568822 - DNA, 25 bp, Homo sapien
gacgggatacagagtcagcagcttc

SEQ ID NO: 3568823 - DNA, 25 bp, Homo sapien
gagaagacgggatacagagtcagca

SEQ ID NO: 3568824 - DNA, 25 bp, Homo sapien
gttgtcccagttggttgttattgcc

SEQ ID NO: 3568825 - DNA, 25 bp, Homo sapien
cccagttggttgttattgcccgaga

SEQ ID NO: 3568826 - DNA, 25 bp, Homo sapien
aatggggtattgcaggttgagtttc

SEQ ID NO: 3568827 - DNA, 25 bp, Homo sapien
ttggttgttattgcccgagaaatgg

SEQ ID NO: 3568828 - DNA, 25 bp, Homo sapien
caaggtaagagtgtgcccgaggagt

SEQ ID NO: 3568829 - DNA, 25 bp, Homo sapien
cctgtccacttcgtagatgaggaaa

SEQ ID NO: 3568830 - DNA, 25 bp, Homo sapien
aagagtgtgcccgaggagtcattcc

SEQ ID NO: 3568831 - DNA, 25 bp, Homo sapien
gagtcattcctaggatatttgtcct

SEQ ID NO: 3568832 - DNA, 25 bp, Homo sapien
cataatccccaagcagcaagctggt

SEQ ID NO: 3568833 - DNA, 25 bp, Homo sapien
gctaaacactccctatggtccagaa

SEQ ID NO: 3568834 - DNA, 25 bp, Homo sapien
cacattatgcaaaagagatgcctct

SEQ ID NO: 3568835 - DNA, 25 bp, Homo sapien
caagctggttggctagctcgagtgc

SEQ ID NO: 3568836 - DNA, 25 bp, Homo sapien
gaaacactgccaataatttgctcca

SEQ ID NO: 3568837 - DNA, 25 bp, Homo sapien
tgtgcattttatcctcttagagagg

SEQ ID NO: 3568838 - DNA, 25 bp, Homo sapien
tatcttggataattagaaacactgc

SEQ ID NO: 3568839 - DNA, 25 bp, Homo sapien
cttggacaacgaggaggaaatccac

SEQ ID NO: 3568840 - DNA, 25 bp, Homo sapien
agcaggtggttcctcttccgggaga

SEQ ID NO: 3568841 - DNA, 25 bp, Homo sapien
gaacttccagaggatgagctccatg

SEQ ID NO: 3568842 - DNA, 25 bp, Homo sapien
tgcaaagagcaagagtgatcgccat

SEQ ID NO: 3568843 - DNA, 25 bp, Homo sapien
taccacggacgattggaacttccag

SEQ ID NO: 3568844 - DNA, 25 bp, Homo sapien
cctaaaggcaaattgctccttctct

SEQ ID NO: 3568845 - DNA, 25 bp, Homo sapien
ctaaaggcaaattgctccttctctg

SEQ ID NO: 3568846 - DNA, 25 bp, Homo sapien
gatttgtggaggcaagttcgcaccc

SEQ ID NO: 3568847 - DNA, 25 bp, Homo sapien
taagcctgcggctctcagagtgggc

SEQ ID NO: 3568848 - DNA, 25 bp, Homo sapien
tactgatttacacatcgctgctctc

SEQ ID NO: 3568849 - DNA, 25 bp, Homo sapien
ggcccggccatctgtatgttatcaa

SEQ ID NO: 3568850 - DNA, 25 bp, Homo sapien
cgggccagcaggccacctctggatg

SEQ ID NO: 3568851 - DNA, 25 bp, Homo sapien
agcagcaccccacagggaagagacc

SEQ ID NO: 3568852 - DNA, 25 bp, Homo sapien
agggaagagaccccgacatcactca

SEQ ID NO: 3568853 - DNA, 25 bp, Homo sapien
ccagcaggccacctctggatgagca

SEQ ID NO: 3568854 - DNA, 25 bp, Homo sapien
atcgtgccgaagtttcccgaggaca

SEQ ID NO: 3568855 - DNA, 25 bp, Homo sapien
gggaacatgcccattgggctttcca

SEQ ID NO: 3568856 - DNA, 25 bp, Homo sapien
cgtgccgaagtttcccgaggacagt

SEQ ID NO: 3568857 - DNA, 25 bp, Homo sapien
gaacatgcccattgggctttccatt

SEQ ID NO: 3568858 - DNA, 25 bp, Homo sapien
agtcacagatgaggggcacgctgtc

SEQ ID NO: 3568859 - DNA, 25 bp, Homo sapien
gaagccagagccgtagtcacagatg

SEQ ID NO: 3568860 - DNA, 25 bp, Homo sapien
ccagagccgtagtcacagatgaggg

SEQ ID NO: 3568861 - DNA, 25 bp, Homo sapien
tagtcacagatgaggggcacgctgt

SEQ ID NO: 3568862 - DNA, 25 bp, Homo sapien
cgatgaccatttgcacatggctgcc

SEQ ID NO: 3568863 - DNA, 25 bp, Homo sapien
gccacttccaggatgccgtgtgcag

SEQ ID NO: 3568864 - DNA, 25 bp, Homo sapien
ccaggatgccgtgtgcagtttgttg

SEQ ID NO: 3568865 - DNA, 25 bp, Homo sapien
gggtcctttccgatgaccatttgca

SEQ ID NO: 3568866 - DNA, 25 bp, Homo sapien
gctctgacatcatcgtgtcctgctg

SEQ ID NO: 3568867 - DNA, 25 bp, Homo sapien
gaagttcaatatgtcccaggcagct

SEQ ID NO: 3568868 - DNA, 25 bp, Homo sapien
gcttgagtcatgtggctgcagagaa

SEQ ID NO: 3568869 - DNA, 25 bp, Homo sapien
tgcaccatcgggcacatcatgcctg

SEQ ID NO: 3568870 - DNA, 25 bp, Homo sapien
agtggaaccatcaaagctcgccgta

SEQ ID NO: 3568871 - DNA, 25 bp, Homo sapien
gaaccatcaaagctcgccgtagcct

SEQ ID NO: 3568872 - DNA, 25 bp, Homo sapien
aaagctcgccgtagccttgaccttc

SEQ ID NO: 3568873 - DNA, 25 bp, Homo sapien
aaacctcagccttagcttcccacag

SEQ ID NO: 3568874 - DNA, 25 bp, Homo sapien
caatttttggtcttgctcggggatg

SEQ ID NO: 3568875 - DNA, 25 bp, Homo sapien
aagaggcagcacctcttggcgtgat

SEQ ID NO: 3568876 - DNA, 25 bp, Homo sapien
gcagcacctcttggcgtgattctca

SEQ ID NO: 3568877 - DNA, 25 bp, Homo sapien
gaggcagcacctcttggcgtgattc

SEQ ID NO: 3568878 - DNA, 25 bp, Homo sapien
ccccaggtgaagagatagcacctgt

SEQ ID NO: 3568879 - DNA, 25 bp, Homo sapien
gctgtgcaaacagaaggtagtcagg

SEQ ID NO: 3568880 - DNA, 25 bp, Homo sapien
tggagacgccgcacatttcaacctg

SEQ ID NO: 3568881 - DNA, 25 bp, Homo sapien
gctgaaacgacagcaataggcagct

SEQ ID NO: 3568882 - DNA, 25 bp, Homo sapien
caacctgacagttgaggctgtgcaa

SEQ ID NO: 3568883 - DNA, 25 bp, Homo sapien
taatacattccgaactatggtcacc

SEQ ID NO: 3568884 - DNA, 25 bp, Homo sapien
tctcctgtctaacccaaacattgta

SEQ ID NO: 3568885 - DNA, 25 bp, Homo sapien
tttttgtgggcatagtgagaacact

SEQ ID NO: 3568886 - DNA, 25 bp, Homo sapien
gatctcagaaacttattctcctgtc

SEQ ID NO: 3568887 - DNA, 25 bp, Homo sapien
agcttcccagggatcaggcactgtg

SEQ ID NO: 3568888 - DNA, 25 bp, Homo sapien
tcaccctgttctcgcccagagagaa

SEQ ID NO: 3568889 - DNA, 25 bp, Homo sapien
agatggccctggcaattggtccgag

SEQ ID NO: 3568890 - DNA, 25 bp, Homo sapien
tggtccgagccgtccttcattctgg

SEQ ID NO: 3568891 - DNA, 25 bp, Homo sapien
ggcaggtggccaagcctggtttcat

SEQ ID NO: 3568892 - DNA, 25 bp, Homo sapien
tgctttgacgccgagacccaagcat

SEQ ID NO: 3568893 - DNA, 25 bp, Homo sapien
acgggcacccaatgctttgacgccg

SEQ ID NO: 3568894 - DNA, 25 bp, Homo sapien
cagcaaagggctgacatgggaggga

SEQ ID NO: 3568895 - DNA, 25 bp, Homo sapien
accgtgcacgctaccaaggagaaac

SEQ ID NO: 3568896 - DNA, 25 bp, Homo sapien
aattctttcgagagggtgggcgctc

SEQ ID NO: 3568897 - DNA, 25 bp, Homo sapien
cagagtctgcacagtcatagggcaa

SEQ ID NO: 3568898 - DNA, 25 bp, Homo sapien
ggactgagacctcctcgctggagaa

SEQ ID NO: 3568899 - DNA, 25 bp, Homo sapien
cctgggctcctaatacaggtaaatt

SEQ ID NO: 3568900 - DNA, 25 bp, Homo sapien
gaaaatccgtctgtgctggcaatac

SEQ ID NO: 3568901 - DNA, 25 bp, Homo sapien
aagagtaaatgcagcctaatgacag

SEQ ID NO: 3568902 - DNA, 25 bp, Homo sapien
gtgggaagacctcctgctcaccagt

SEQ ID NO: 3568903 - DNA, 25 bp, Homo sapien
tggacctggcagaacacgctcttga

SEQ ID NO: 3568904 - DNA, 25 bp, Homo sapien
gaaactgaggctcctcgagttggag

SEQ ID NO: 3568905 - DNA, 25 bp, Homo sapien
taggtactggacacctgccaagtgc

SEQ ID NO: 3568906 - DNA, 25 bp, Homo sapien
aaagcaaggaacagagcgtgattag

SEQ ID NO: 3568907 - DNA, 25 bp, Homo sapien
agcaggcggtaaggcactgcggcgg

SEQ ID NO: 3568908 - DNA, 25 bp, Homo sapien
cggtaaggcactgcggcggtgtagc

SEQ ID NO: 3568909 - DNA, 25 bp, Homo sapien
ggcggtaaggcactgcggcggtgta

SEQ ID NO: 3568910 - DNA, 25 bp, Homo sapien
aggcagcaggcggtaaggcactgcg

SEQ ID NO: 3568911 - DNA, 25 bp, Homo sapien
gccacccggaagatgtagtagccca

SEQ ID NO: 3568912 - DNA, 25 bp, Homo sapien
taggagcactcgatgaccttgggct

SEQ ID NO: 3568913 - DNA, 25 bp, Homo sapien
ccatcggcggatgtgtaggagcact

SEQ ID NO: 3568914 - DNA, 25 bp, Homo sapien
tcaggtcgccgacgtagttgaagtg

SEQ ID NO: 3568915 - DNA, 25 bp, Homo sapien
ggacaggagtgtgggctcgggggcc

SEQ ID NO: 3568916 - DNA, 25 bp, Homo sapien
agctctgcctctgacacacgccttg

SEQ ID NO: 3568917 - DNA, 25 bp, Homo sapien
gacacacgccttgcctccgtgttct

SEQ ID NO: 3568918 - DNA, 25 bp, Homo sapien
ggtcaagcggtgctttgcccaggga

SEQ ID NO: 3568919 - DNA, 25 bp, Homo sapien
agtgggacctattgctacgttttca

SEQ ID NO: 3568920 - DNA, 25 bp, Homo sapien
cacagaggctaaagcaagtaagagc

SEQ ID NO: 3568921 - DNA, 25 bp, Homo sapien
taagagctattatatagtgggacct

SEQ ID NO: 3568922 - DNA, 25 bp, Homo sapien
tgtacatctcgagacacacacagag

SEQ ID NO: 3568923 - DNA, 25 bp, Homo sapien
ggctgtcacaggtgatgccgggcct

SEQ ID NO: 3568924 - DNA, 25 bp, Homo sapien
gtcacaggtgatgccgggcctgtca

SEQ ID NO: 3568925 - DNA, 25 bp, Homo sapien
agcctctccacgttggttctctcca

SEQ ID NO: 3568926 - DNA, 25 bp, Homo sapien
tcacatcctgaataggtgacagcct

SEQ ID NO: 3568927 - DNA, 25 bp, Homo sapien
agatgtcaatggtcttcaggtacca

SEQ ID NO: 3568928 - DNA, 25 bp, Homo sapien
caggtaccaggtttcgttccagaag

SEQ ID NO: 3568929 - DNA, 25 bp, Homo sapien
ccagaagaagtcaatcacgtagatg

SEQ ID NO: 3568930 - DNA, 25 bp, Homo sapien
cccgaagtggtcatggcagatgtca

SEQ ID NO: 3568931 - DNA, 25 bp, Homo sapien
aatacgctctggcttgcgggttccc

SEQ ID NO: 3568932 - DNA, 25 bp, Homo sapien
gtttcaccctctccagccatgacag

SEQ ID NO: 3568933 - DNA, 25 bp, Homo sapien
caagcagtagattaaggtcatggga

SEQ ID NO: 3568934 - DNA, 25 bp, Homo sapien
agagcctgccggcatcggcgtttca

SEQ ID NO: 3568935 - DNA, 25 bp, Homo sapien
gatccgagggttaaactcgatgccc

SEQ ID NO: 3568936 - DNA, 25 bp, Homo sapien
gacgttgaccaggaccatggcattg

SEQ ID NO: 3568937 - DNA, 25 bp, Homo sapien
aagtcaaaccacttcccgatccgag

SEQ ID NO: 3568938 - DNA, 25 bp, Homo sapien
gcttcgctgcgaaggacaggttgat

SEQ ID NO: 3568939 - DNA, 25 bp, Homo sapien
agaagtagcccttgaccatggcgaa

SEQ ID NO: 3568940 - DNA, 25 bp, Homo sapien
tggagacggcatagccaaggatgtt

SEQ ID NO: 3568941 - DNA, 25 bp, Homo sapien
gacaggagatgagcgtttgcaaacc

SEQ ID NO: 3568942 - DNA, 25 bp, Homo sapien
tgatggtgggcgagaaccaggacag

SEQ ID NO: 3568943 - DNA, 25 bp, Homo sapien
tgcctcctacgtagccgggtagaaa

SEQ ID NO: 3568944 - DNA, 25 bp, Homo sapien
tcctggatgcctcctacgtagccgg

SEQ ID NO: 3568945 - DNA, 25 bp, Homo sapien
cgtagccgggtagaaacttatggca

SEQ ID NO: 3568946 - DNA, 25 bp, Homo sapien
agccgggtagaaacttatggcagaa

SEQ ID NO: 3568947 - DNA, 25 bp, Homo sapien
tgctgtgtcccaaccccagggcagg

SEQ ID NO: 3568948 - DNA, 25 bp, Homo sapien
tcccaaccccagggcaggggctgct

SEQ ID NO: 3568949 - DNA, 25 bp, Homo sapien
caaccccagggcaggggctgctgac

SEQ ID NO: 3568950 - DNA, 25 bp, Homo sapien
ctgctgtgtcccaaccccagggcag

SEQ ID NO: 3568951 - DNA, 25 bp, Homo sapien
gagcatgtccggtgacgatgtccac

SEQ ID NO: 3568952 - DNA, 25 bp, Homo sapien
tcgttataggtggagtcttggccca

SEQ ID NO: 3568953 - DNA, 25 bp, Homo sapien
ccacaaggtatagagctgggcggct

SEQ ID NO: 3568954 - DNA, 25 bp, Homo sapien
agatgtccgagagccgagcatgtcc

SEQ ID NO: 3568955 - DNA, 25 bp, Homo sapien
ctgtactggtcacaagccatgatga

SEQ ID NO: 3568956 - DNA, 25 bp, Homo sapien
gccatgatgaagtagtagacgatga

SEQ ID NO: 3568957 - DNA, 25 bp, Homo sapien
ggcgaacagcagtaggaagatgacg

SEQ ID NO: 3568958 - DNA, 25 bp, Homo sapien
gtagacgatgaagggggcgaacagc

SEQ ID NO: 3568959 - DNA, 25 bp, Homo sapien
cgccagtgaaaaccagtccacctcc

SEQ ID NO: 3568960 - DNA, 25 bp, Homo sapien
ctcgccagtgaaaaccagtccacct

SEQ ID NO: 3568961 - DNA, 25 bp, Homo sapien
tcgccagtgaaaaccagtccacctc

SEQ ID NO: 3568962 - DNA, 25 bp, Homo sapien
tgcgaggacggatgcaggcagtcac

SEQ ID NO: 3568963 - DNA, 25 bp, Homo sapien
cgaggacggatgcaggcagtcacac

SEQ ID NO: 3568964 - DNA, 25 bp, Homo sapien
gcgaggacggatgcaggcagtcaca

SEQ ID NO: 3568965 - DNA, 25 bp, Homo sapien
cattggtgacgccatctagactctt

SEQ ID NO: 3568966 - DNA, 25 bp, Homo sapien
catctagactcttggctttgggaat

SEQ ID NO: 3568967 - DNA, 25 bp, Homo sapien
tgttgggttgcgattttgcagccat

SEQ ID NO: 3568968 - DNA, 25 bp, Homo sapien
ccttgagatgcggttctgtcattgg

SEQ ID NO: 3568969 - DNA, 25 bp, Homo sapien
tgtgcacatcttcccggtaccttgt

SEQ ID NO: 3568970 - DNA, 25 bp, Homo sapien
tacattatccctcaaataacagaca

SEQ ID NO: 3568971 - DNA, 25 bp, Homo sapien
tcttcccggtaccttgttcctgaca

SEQ ID NO: 3568972 - DNA, 25 bp, Homo sapien
tgcaagaaagagaaccttgcttaca

SEQ ID NO: 3568973 - DNA, 25 bp, Homo sapien
tcttgccaaatagtttcacagcaga

SEQ ID NO: 3568974 - DNA, 25 bp, Homo sapien
gcctcttgccaaatagtttcacagc

SEQ ID NO: 3568975 - DNA, 25 bp, Homo sapien
cagcctcttgccaaatagtttcaca

SEQ ID NO: 3568976 - DNA, 25 bp, Homo sapien
ctccagcctcttgccaaatagtttc

SEQ ID NO: 3568977 - DNA, 25 bp, Homo sapien
tgatccttctcaaccggctaaagtc

SEQ ID NO: 3568978 - DNA, 25 bp, Homo sapien
aaatgcctgcttgatccttctcaac

SEQ ID NO: 3568979 - DNA, 25 bp, Homo sapien
gctccaaatgcctgcttgatccttc

SEQ ID NO: 3568980 - DNA, 25 bp, Homo sapien
ctgcttgatccttctcaaccggcta

SEQ ID NO: 3568981 - DNA, 25 bp, Homo sapien
aaatgaataagaccgcaggcagctg

SEQ ID NO: 3568982 - DNA, 25 bp, Homo sapien
tcaacagccgcatgtcagggaggac

SEQ ID NO: 3568983 - DNA, 25 bp, Homo sapien
ctgacaaagagggaggcgaacaaca

SEQ ID NO: 3568984 - DNA, 25 bp, Homo sapien
cacagtaggagtcaagcaagaggca

SEQ ID NO: 3568985 - DNA, 25 bp, Homo sapien
gcttgcgcgcgctgctccacgccgc

SEQ ID NO: 3568986 - DNA, 25 bp, Homo sapien
aggggtcggagtcacccgcagggca

SEQ ID NO: 3568987 - DNA, 25 bp, Homo sapien
tccacgccgcctaccctctagccag

SEQ ID NO: 3568988 - DNA, 25 bp, Homo sapien
cttcccctggcctcgcttgcgcgcg

SEQ ID NO: 3568989 - DNA, 25 bp, Homo sapien
ggggtggggcgtggcggagtggcca

SEQ ID NO: 3568990 - DNA, 25 bp, Homo sapien
tggcggagtggccacgtgggccgcg

SEQ ID NO: 3568991 - DNA, 25 bp, Homo sapien
gcggagaacgcgccaggctcatcac

SEQ ID NO: 3568992 - DNA, 25 bp, Homo sapien
gtgggccgcgcggagaacgcgccag

SEQ ID NO: 3568993 - DNA, 25 bp, Homo sapien
aaccccaggatctaatcagggagcc

SEQ ID NO: 3568994 - DNA, 25 bp, Homo sapien
ttaaaccccaggatctaatcaggga

SEQ ID NO: 3568995 - DNA, 25 bp, Homo sapien
taaaccccaggatctaatcagggag

SEQ ID NO: 3568996 - DNA, 25 bp, Homo sapien
aaaccccaggatctaatcagggagc

SEQ ID NO: 3568997 - DNA, 25 bp, Homo sapien
cgcaggcacgtgtagttaggacccc

SEQ ID NO: 3568998 - DNA, 25 bp, Homo sapien
caggcgcctgtgcttttcttcgaca

SEQ ID NO: 3568999 - DNA, 25 bp, Homo sapien
gcaaggctggaattggaactccaca

SEQ ID NO: 3569000 - DNA, 25 bp, Homo sapien
ttttgctgtcgggtcacacctctgg

SEQ ID NO: 3569001 - DNA, 25 bp, Homo sapien
acctcatgatcggtgacagcatctc

SEQ ID NO: 3569002 - DNA, 25 bp, Homo sapien
gatcggtgacagcatctctgagcag

SEQ ID NO: 3569003 - DNA, 25 bp, Homo sapien
ttatacctcatgatcggtgacagca

SEQ ID NO: 3569004 - DNA, 25 bp, Homo sapien
catgatcggtgacagcatctctgag

SEQ ID NO: 3569005 - DNA, 25 bp, Homo sapien
gaagtctggcattctccgaaggaag

SEQ ID NO: 3569006 - DNA, 25 bp, Homo sapien
ggcattctccgaaggaagccgcctg

SEQ ID NO: 3569007 - DNA, 25 bp, Homo sapien
cccgcgaagtctggcattctccgaa

SEQ ID NO: 3569008 - DNA, 25 bp, Homo sapien
gcgcttccccgcgaagtctggcatt

SEQ ID NO: 3569009 - DNA, 25 bp, Homo sapien
ggagtctggggaccagtcggcctta

SEQ ID NO: 3569010 - DNA, 25 bp, Homo sapien
gggaccagtcggccttactcctgtc

SEQ ID NO: 3569011 - DNA, 25 bp, Homo sapien
tggggaccagtcggccttactcctg

SEQ ID NO: 3569012 - DNA, 25 bp, Homo sapien
ctggggaccagtcggccttactcct

SEQ ID NO: 3569013 - DNA, 25 bp, Homo sapien
gggtgtccgctctttctctccccca

SEQ ID NO: 3569014 - DNA, 25 bp, Homo sapien
ggtgtccgctctttctctcccccat

SEQ ID NO: 3569015 - DNA, 25 bp, Homo sapien
catgtcctctgtaacctgcacgtac

SEQ ID NO: 3569016 - DNA, 25 bp, Homo sapien
gtcctctgtaacctgcacgtacaca

SEQ ID NO: 3569017 - DNA, 25 bp, Homo sapien
atcatgtcctctgtaacctgcacgt

SEQ ID NO: 3569018 - DNA, 25 bp, Homo sapien
tgtcctctgtaacctgcacgtacac

SEQ ID NO: 3569019 - DNA, 25 bp, Homo sapien
cacagccaggctgccaattttgaat

SEQ ID NO: 3569020 - DNA, 25 bp, Homo sapien
gccaggccgaaggggccctcaggtc

SEQ ID NO: 3569021 - DNA, 25 bp, Homo sapien
tgtagggtgggatagccttgaggag

SEQ ID NO: 3569022 - DNA, 25 bp, Homo sapien
gtgggatagccttgaggagggagtc

SEQ ID NO: 3569023 - DNA, 25 bp, Homo sapien
cagtcaaggacactgcggtccttct

SEQ ID NO: 3569024 - DNA, 25 bp, Homo sapien
ttgacatccagtcttttcgtcatgc

SEQ ID NO: 3569025 - DNA, 25 bp, Homo sapien
tcttttcgtcatgcagtcaaggaca

SEQ ID NO: 3569026 - DNA, 25 bp, Homo sapien
aggacactgcggtccttctgcttct

SEQ ID NO: 3569027 - DNA, 25 bp, Homo sapien
cagagttcagtcacctcttgagggc

SEQ ID NO: 3569028 - DNA, 25 bp, Homo sapien
tggtagagcatctcctcaaggattt

SEQ ID NO: 3569029 - DNA, 25 bp, Homo sapien
ttcttgggtgagtgcattgatgacg

SEQ ID NO: 3569030 - DNA, 25 bp, Homo sapien
taggccagtatgctggtgacatgat

SEQ ID NO: 3569031 - DNA, 25 bp, Homo sapien
tagtgacatgttgctgtattcttgg

SEQ ID NO: 3569032 - DNA, 25 bp, Homo sapien
tgctgtattcttgggcgagtacact

SEQ ID NO: 3569033 - DNA, 25 bp, Homo sapien
attcttgggcgagtacactagtgac

SEQ ID NO: 3569034 - DNA, 25 bp, Homo sapien
catgttgctgtattcttgggcgagt

SEQ ID NO: 3569035 - DNA, 25 bp, Homo sapien
atgttgctgtattcttgggcgagta

SEQ ID NO: 3569036 - DNA, 25 bp, Homo sapien
tgttgctgtattcttgggcgagtac

SEQ ID NO: 3569037 - DNA, 25 bp, Homo sapien
gttgctgtattcttgggcgagtaca

SEQ ID NO: 3569038 - DNA, 25 bp, Homo sapien
ttgctgtattcttgggcgagtacac

SEQ ID NO: 3569039 - DNA, 25 bp, Homo sapien
gtacgctggtgacatgttgctgtat

SEQ ID NO: 3569040 - DNA, 25 bp, Homo sapien
tgagtacgctggtgacatgttgctg

SEQ ID NO: 3569041 - DNA, 25 bp, Homo sapien
gagtacgctggtgacatgttgctgt

SEQ ID NO: 3569042 - DNA, 25 bp, Homo sapien
tgacatgttgctgtattcttgggtg

SEQ ID NO: 3569043 - DNA, 25 bp, Homo sapien
attcttgggtgagaatgctgaggac

SEQ ID NO: 3569044 - DNA, 25 bp, Homo sapien
tgtattcttgggtgagaatgctgag

SEQ ID NO: 3569045 - DNA, 25 bp, Homo sapien
gtgagaatgctgaggacatgctgct

SEQ ID NO: 3569046 - DNA, 25 bp, Homo sapien
ttgggtgagaatgctgaggacatgc

SEQ ID NO: 3569047 - DNA, 25 bp, Homo sapien
gaagtcctgtcttttccagctggag

SEQ ID NO: 3569048 - DNA, 25 bp, Homo sapien
gctcctgaacccacttgaagtcctg

SEQ ID NO: 3569049 - DNA, 25 bp, Homo sapien
cttgcctttgcttgtgtattcagag

SEQ ID NO: 3569050 - DNA, 25 bp, Homo sapien
cgctagccttgcctttgcttgtgta

SEQ ID NO: 3569051 - DNA, 25 bp, Homo sapien
cagctgttgtaagccctgcagctgc

SEQ ID NO: 3569052 - DNA, 25 bp, Homo sapien
ctcctcaggctgtgggtcatcctgc

SEQ ID NO: 3569053 - DNA, 25 bp, Homo sapien
tataagccctgctgttgctcctcag

SEQ ID NO: 3569054 - DNA, 25 bp, Homo sapien
tgcagctgctcttcaggctgtgggt

SEQ ID NO: 3569055 - DNA, 25 bp, Homo sapien
tgctgttcccagtccagctgctgta

SEQ ID NO: 3569056 - DNA, 25 bp, Homo sapien
tgctgcaagccctgctgttcccagt

SEQ ID NO: 3569057 - DNA, 25 bp, Homo sapien
ccagtccagctgctgcaagccctgc

SEQ ID NO: 3569058 - DNA, 25 bp, Homo sapien
cagctgctgcaagccctgctgttcc

SEQ ID NO: 3569059 - DNA, 25 bp, Homo sapien
tgctgctcttcaggctgtgggtcat

SEQ ID NO: 3569060 - DNA, 25 bp, Homo sapien
ctgtgggtcatcctgctgccagtcc

SEQ ID NO: 3569061 - DNA, 25 bp, Homo sapien
tcttcaggctgtgggtcatcctgct

SEQ ID NO: 3569062 - DNA, 25 bp, Homo sapien
gggtcatcctgctgccagtccagct

SEQ ID NO: 3569063 - DNA, 25 bp, Homo sapien
tagctatctcgggacggggtgtcag

SEQ ID NO: 3569064 - DNA, 25 bp, Homo sapien
gagccagcttggcatcgtgggaatc

SEQ ID NO: 3569065 - DNA, 25 bp, Homo sapien
cagcttggcatcgtgggaatcaata

SEQ ID NO: 3569066 - DNA, 25 bp, Homo sapien
ttggcatcgtgggaatcaataaatg

SEQ ID NO: 3569067 - DNA, 25 bp, Homo sapien
agacagccggaactgaggtcccaaa

SEQ ID NO: 3569068 - DNA, 25 bp, Homo sapien
ttgtagccatcccataggtgtgtga

SEQ ID NO: 3569069 - DNA, 25 bp, Homo sapien
gaacacagcatcttggacaagccag

SEQ ID NO: 3569070 - DNA, 25 bp, Homo sapien
gccatcccataggtgtgtgaacaca

SEQ ID NO: 3569071 - DNA, 25 bp, Homo sapien
ttcccaattgagaccccacaaatca

SEQ ID NO: 3569072 - DNA, 25 bp, Homo sapien
cagtgccggatctgaactactgatc

SEQ ID NO: 3569073 - DNA, 25 bp, Homo sapien
catccagtgccggatctgaactact

SEQ ID NO: 3569074 - DNA, 25 bp, Homo sapien
gaccccacaaatcatgcggcctgtg

SEQ ID NO: 3569075 - DNA, 25 bp, Homo sapien
tgcaacgatgggtggccaaggccac

SEQ ID NO: 3569076 - DNA, 25 bp, Homo sapien
ctgcaacgatgggtggccaaggcca

SEQ ID NO: 3569077 - DNA, 25 bp, Homo sapien
gggtggccaaggccacggtcaaatc

SEQ ID NO: 3569078 - DNA, 25 bp, Homo sapien
tggccaaggccacggtcaaatccag

SEQ ID NO: 3569079 - DNA, 25 bp, Homo sapien
tgtgtaacagcaaccggaaagagaa

SEQ ID NO: 3569080 - DNA, 25 bp, Homo sapien
cagcaaccggaaagagaaacaatgg

SEQ ID NO: 3569081 - DNA, 25 bp, Homo sapien
caggagctgtgtaacagcaaccgga

SEQ ID NO: 3569082 - DNA, 25 bp, Homo sapien
ctccaggagctgtgtaacagcaacc

SEQ ID NO: 3569083 - DNA, 25 bp, Homo sapien
tgctgtgcacccgtctactgctgca

SEQ ID NO: 3569084 - DNA, 25 bp, Homo sapien
tgcacccgtctactgctgcaagccc

SEQ ID NO: 3569085 - DNA, 25 bp, Homo sapien
agctgctgtgcacccgtctactgct

SEQ ID NO: 3569086 - DNA, 25 bp, Homo sapien
agctgtggaggctgtgactccagct

SEQ ID NO: 3569087 - DNA, 25 bp, Homo sapien
gctcctcctcgggtcgtgggtcatc

SEQ ID NO: 3569088 - DNA, 25 bp, Homo sapien
ctgttgctcctcctcgggtcgtggg

SEQ ID NO: 3569089 - DNA, 25 bp, Homo sapien
tgttgctcctcctcgggtcgtgggt

SEQ ID NO: 3569090 - DNA, 25 bp, Homo sapien
tcctcgggtcgtgggtcatcctgct

SEQ ID NO: 3569091 - DNA, 25 bp, Homo sapien
tcttcactggccccataacaatgac

SEQ ID NO: 3569092 - DNA, 25 bp, Homo sapien
acggtgttctgcttgccaaggcaca

SEQ ID NO: 3569093 - DNA, 25 bp, Homo sapien
ggtgttctgcttgccaaggcacagg

SEQ ID NO: 3569094 - DNA, 25 bp, Homo sapien
actggccccataacaatgacccgag

SEQ ID NO: 3569095 - DNA, 25 bp, Homo sapien
atctggacaggtatataaagagccc

SEQ ID NO: 3569096 - DNA, 25 bp, Homo sapien
catctggacaggtatataaagagcc

SEQ ID NO: 3569097 - DNA, 25 bp, Homo sapien
acatctggacaggtatataaagagc

SEQ ID NO: 3569098 - DNA, 25 bp, Homo sapien
ctccaaaggtggctgtggttcctgt

SEQ ID NO: 3569099 - DNA, 25 bp, Homo sapien
tgtgtgccagcctgttcctgctcca

SEQ ID NO: 3569100 - DNA, 25 bp, Homo sapien
tggttcttgtggctgctcccagtgc

SEQ ID NO: 3569101 - DNA, 25 bp, Homo sapien
caagcccgtgtgctgctgtgtgcca

SEQ ID NO: 3569102 - DNA, 25 bp, Homo sapien
ctccttccatggctcagctctccac

SEQ ID NO: 3569103 - DNA, 25 bp, Homo sapien
ccttcagcctcctcactccggaaat

SEQ ID NO: 3569104 - DNA, 25 bp, Homo sapien
ttccatggctcagctctccactggg

SEQ ID NO: 3569105 - DNA, 25 bp, Homo sapien
cagcctcctcactccggaaatgcat

SEQ ID NO: 3569106 - DNA, 25 bp, Homo sapien
ggtggccttgcctggacgcgggcac

SEQ ID NO: 3569107 - DNA, 25 bp, Homo sapien
acgcgggcacccagccaactgccat

SEQ ID NO: 3569108 - DNA, 25 bp, Homo sapien
gtggccttgcctggacgcgggcacc

SEQ ID NO: 3569109 - DNA, 25 bp, Homo sapien
tgatcactaagaaccagcttctcaa

SEQ ID NO: 3569110 - DNA, 25 bp, Homo sapien
taagaaccagcttctcaaccaccat

SEQ ID NO: 3569111 - DNA, 25 bp, Homo sapien
tgactgagatgcaaggtctgacccc

SEQ ID NO: 3569112 - DNA, 25 bp, Homo sapien
ggctgactgagatgcaaggtctgac

SEQ ID NO: 3569113 - DNA, 25 bp, Homo sapien
gcacgggcacatgcgcgtggacttt

SEQ ID NO: 3569114 - DNA, 25 bp, Homo sapien
ggaacaggattcacggcttctatca

SEQ ID NO: 3569115 - DNA, 25 bp, Homo sapien
gcgcgtggacttttcaggaacagga

SEQ ID NO: 3569116 - DNA, 25 bp, Homo sapien
gattcacggcttctatcaccaggtt

SEQ ID NO: 3569117 - DNA, 25 bp, Homo sapien
gttgacctgggcctcacgtactaca

SEQ ID NO: 3569118 - DNA, 25 bp, Homo sapien
acgtactacagcctccacgcgggaa

SEQ ID NO: 3569119 - DNA, 25 bp, Homo sapien
ttgacctgggcctcacgtactacag

SEQ ID NO: 3569120 - DNA, 25 bp, Homo sapien
actacagcctccacgcgggaaagaa

SEQ ID NO: 3569121 - DNA, 25 bp, Homo sapien
gaaaagcctacacgcacgtgcccgt

SEQ ID NO: 3569122 - DNA, 25 bp, Homo sapien
ctgttcctgaaaagcctacacgcac

SEQ ID NO: 3569123 - DNA, 25 bp, Homo sapien
ttcctgaaaagcctacacgcacgtg

SEQ ID NO: 3569124 - DNA, 25 bp, Homo sapien
tcctgaaaagcctacacgcacgtgc

SEQ ID NO: 3569125 - DNA, 25 bp, Homo sapien
tgattcacggctttatgctgataca

SEQ ID NO: 3569126 - DNA, 25 bp, Homo sapien
gagccaatatgactgtgtgttaaag

SEQ ID NO: 3569127 - DNA, 25 bp, Homo sapien
ggtctctgtctggagcatgtggatg

SEQ ID NO: 3569128 - DNA, 25 bp, Homo sapien
cccagggctgtgattcacggcttta

SEQ ID NO: 3569129 - DNA, 25 bp, Homo sapien
cagatcttgtactgacagcaaatag

SEQ ID NO: 3569130 - DNA, 25 bp, Homo sapien
agatcttgtactgacagcaaatagg

SEQ ID NO: 3569131 - DNA, 25 bp, Homo sapien
tgggaatgtacagggctcagatgta

SEQ ID NO: 3569132 - DNA, 25 bp, Homo sapien
tgtcctgtgggttgtgggaatgtac

SEQ ID NO: 3569133 - DNA, 25 bp, Homo sapien
ggctcagatgtaatgaactctgcgt

SEQ ID NO: 3569134 - DNA, 25 bp, Homo sapien
tcagatgtaatgaactctgcgttca

SEQ ID NO: 3569135 - DNA, 25 bp, Homo sapien
gaacaccatggcgtccagggaagaa

SEQ ID NO: 3569136 - DNA, 25 bp, Homo sapien
agggaacaccatggcgtccagggaa

SEQ ID NO: 3569137 - DNA, 25 bp, Homo sapien
acaccatggcgtccagggaagaaca

SEQ ID NO: 3569138 - DNA, 25 bp, Homo sapien
ccatggcgtccagggaagaacacct

SEQ ID NO: 3569139 - DNA, 25 bp, Homo sapien
gatgatgtgtgggatgaactgattc

SEQ ID NO: 3569140 - DNA, 25 bp, Homo sapien
catgtttccggagtgaggaagctga

SEQ ID NO: 3569141 - DNA, 25 bp, Homo sapien
aaacacatgtttccggagtgaggaa

SEQ ID NO: 3569142 - DNA, 25 bp, Homo sapien
ctagaggagagccgagccatggaaa

SEQ ID NO: 3569143 - DNA, 25 bp, Homo sapien
cagcagcagggcttgaagcagctag

SEQ ID NO: 3569144 - DNA, 25 bp, Homo sapien
gcagcagggcttgaagcagctagac

SEQ ID NO: 3569145 - DNA, 25 bp, Homo sapien
aagcagctagactggcagcagctgg

SEQ ID NO: 3569146 - DNA, 25 bp, Homo sapien
ttgaagcagctagactggcagcagc

SEQ ID NO: 3569147 - DNA, 25 bp, Homo sapien
tggactggcagcagaatgacccaca

SEQ ID NO: 3569148 - DNA, 25 bp, Homo sapien
ggactggcagcagaatgacccacag

SEQ ID NO: 3569149 - DNA, 25 bp, Homo sapien
gcagcagggcttacagcagttggac

SEQ ID NO: 3569150 - DNA, 25 bp, Homo sapien
cagcagttggactgggagcagccac

SEQ ID NO: 3569151 - DNA, 25 bp, Homo sapien
acacccacccttggagctcccacaa

SEQ ID NO: 3569152 - DNA, 25 bp, Homo sapien
gaaccacacccacccttggagctcc

SEQ ID NO: 3569153 - DNA, 25 bp, Homo sapien
cccacccttggagctcccacaagag

SEQ ID NO: 3569154 - DNA, 25 bp, Homo sapien
aagaaccacacccacccttggagct

SEQ ID NO: 3569155 - DNA, 25 bp, Homo sapien
acagcccccactgccggagccacag

SEQ ID NO: 3569156 - DNA, 25 bp, Homo sapien
agagccacagcctccagaacagcca

SEQ ID NO: 3569157 - DNA, 25 bp, Homo sapien
agcagcaaatgggcacacagcagct

SEQ ID NO: 3569158 - DNA, 25 bp, Homo sapien
cttgcagcagcaaatgggcacacag

SEQ ID NO: 3569159 - DNA, 25 bp, Homo sapien
attctggcggattgagagtagagca

SEQ ID NO: 3569160 - DNA, 25 bp, Homo sapien
gattctggcggattgagagtagagc

SEQ ID NO: 3569161 - DNA, 25 bp, Homo sapien
tctggcggattgagagtagagcagg

SEQ ID NO: 3569162 - DNA, 25 bp, Homo sapien
ttctggcggattgagagtagagcag

SEQ ID NO: 3569163 - DNA, 25 bp, Homo sapien
gacacacagagccacggaatctcac

SEQ ID NO: 3569164 - DNA, 25 bp, Homo sapien
caaggtgtccaagacacacagagcc

SEQ ID NO: 3569165 - DNA, 25 bp, Homo sapien
gtccaagacacacagagccacggaa

SEQ ID NO: 3569166 - DNA, 25 bp, Homo sapien
tcaaggtgtccaagacacacagagc

SEQ ID NO: 3569167 - DNA, 25 bp, Homo sapien
tgcagccggttctcgctttgctctc

SEQ ID NO: 3569168 - DNA, 25 bp, Homo sapien
ggtgtctgagaattcctcctccttg

SEQ ID NO: 3569169 - DNA, 25 bp, Homo sapien
tgtctgacgcagatgtctttcttgt

SEQ ID NO: 3569170 - DNA, 25 bp, Homo sapien
cctcctccttggactcccagaggat

SEQ ID NO: 3569171 - DNA, 25 bp, Homo sapien
tgctcagcagaacagtcgaatctca

SEQ ID NO: 3569172 - DNA, 25 bp, Homo sapien
tacaaagtgccctgcggaggctgct

SEQ ID NO: 3569173 - DNA, 25 bp, Homo sapien
ggctgctcagcagaacagtcgaatc

SEQ ID NO: 3569174 - DNA, 25 bp, Homo sapien
tcagcagaacagtcgaatctcatga

SEQ ID NO: 3569175 - DNA, 25 bp, Homo sapien
aaatcactcatcatagggaagcgca

SEQ ID NO: 3569176 - DNA, 25 bp, Homo sapien
gaatgctcgaatctgatcgcaggga

SEQ ID NO: 3569177 - DNA, 25 bp, Homo sapien
agaacgtgataccacacattaggat

SEQ ID NO: 3569178 - DNA, 25 bp, Homo sapien
gactaaagggaagtaggaatgctcg

SEQ ID NO: 3569179 - DNA, 25 bp, Homo sapien
cagctttctcctgattcgaggaaga

SEQ ID NO: 3569180 - DNA, 25 bp, Homo sapien
cctccatggtgcaccacacagggag

SEQ ID NO: 3569181 - DNA, 25 bp, Homo sapien
ttcttgcattattataaggaaatcc

SEQ ID NO: 3569182 - DNA, 25 bp, Homo sapien
gattcgaggaagagccccaaagctt

SEQ ID NO: 3569183 - DNA, 25 bp, Homo sapien
ggcttacagcctgggcgcctcagtc

SEQ ID NO: 3569184 - DNA, 25 bp, Homo sapien
acagcctgggcgcctcagtcgcctc

SEQ ID NO: 3569185 - DNA, 25 bp, Homo sapien
tcatggcttacagcctgggcgcctc

SEQ ID NO: 3569186 - DNA, 25 bp, Homo sapien
atggcttacagcctgggcgcctcag

SEQ ID NO: 3569187 - DNA, 25 bp, Homo sapien
tgaacaagactggactcagcagtga

SEQ ID NO: 3569188 - DNA, 25 bp, Homo sapien
caagactggactcagcagtgagtat

SEQ ID NO: 3569189 - DNA, 25 bp, Homo sapien
gcaccctgaacaagactggactcag

SEQ ID NO: 3569190 - DNA, 25 bp, Homo sapien
gggcagcaccctgaacaagactgga

SEQ ID NO: 3569191 - DNA, 25 bp, Homo sapien
cactcctgggagtcttgtacgaaga

SEQ ID NO: 3569192 - DNA, 25 bp, Homo sapien
ttcgtagatggtagctcggcagccc

SEQ ID NO: 3569193 - DNA, 25 bp, Homo sapien
ttcactgtgtacctgggctcgagcc

SEQ ID NO: 3569194 - DNA, 25 bp, Homo sapien
ttacagcgtgggacactgaggtcgc

SEQ ID NO: 3569195 - DNA, 25 bp, Homo sapien
gcatgcgccagcacgtccaatgtta

SEQ ID NO: 3569196 - DNA, 25 bp, Homo sapien
tgcgccagcacgtccaatgttatat

SEQ ID NO: 3569197 - DNA, 25 bp, Homo sapien
cagcacgtccaatgttatatttcta

SEQ ID NO: 3569198 - DNA, 25 bp, Homo sapien
gccagcacgtccaatgttatatttc

SEQ ID NO: 3569199 - DNA, 25 bp, Homo sapien
cacaggaacgtcgtgtgtctgccat

SEQ ID NO: 3569200 - DNA, 25 bp, Homo sapien
aggaacgtcgtgtgtctgccatggc

SEQ ID NO: 3569201 - DNA, 25 bp, Homo sapien
caggaacgtcgtgtgtctgccatgg

SEQ ID NO: 3569202 - DNA, 25 bp, Homo sapien
ccacaggaacgtcgtgtgtctgcca

SEQ ID NO: 3569203 - DNA, 25 bp, Homo sapien
actggaggtgaatggtcaagtctga

SEQ ID NO: 3569204 - DNA, 25 bp, Homo sapien
tcaggtactggaggtgaatggtcaa

SEQ ID NO: 3569205 - DNA, 25 bp, Homo sapien
gtactggaggtgaatggtcaagtct

SEQ ID NO: 3569206 - DNA, 25 bp, Homo sapien
gaggtgaatggtcaagtctgatctc

SEQ ID NO: 3569207 - DNA, 25 bp, Homo sapien
gagaccctcaagtctgcgcactggg

SEQ ID NO: 3569208 - DNA, 25 bp, Homo sapien
gaagtgcaggatgcccttggtattg

SEQ ID NO: 3569209 - DNA, 25 bp, Homo sapien
caaagtccctattcttccacagtgc

SEQ ID NO: 3569210 - DNA, 25 bp, Homo sapien
gcccttggtattgcaaactgtggtt

SEQ ID NO: 3569211 - DNA, 25 bp, Homo sapien
tacaaaacccagtgaagccagctgt

SEQ ID NO: 3569212 - DNA, 25 bp, Homo sapien
agtgaagccagctgtcttggcgctg

SEQ ID NO: 3569213 - DNA, 25 bp, Homo sapien
aaacccagtgaagccagctgtcttg

SEQ ID NO: 3569214 - DNA, 25 bp, Homo sapien
agccagctgtcttggcgctgccact

SEQ ID NO: 3569215 - DNA, 25 bp, Homo sapien
atggtactgtcctctgtagacatca

SEQ ID NO: 3569216 - DNA, 25 bp, Homo sapien
ggtactgtcctctgtagacatcatc

SEQ ID NO: 3569217 - DNA, 25 bp, Homo sapien
tggtactgtcctctgtagacatcat

SEQ ID NO: 3569218 - DNA, 25 bp, Homo sapien
gtactgtcctctgtagacatcatct

SEQ ID NO: 3569219 - DNA, 25 bp, Homo sapien
tggcacttggaaagagagtctagtt

SEQ ID NO: 3569220 - DNA, 25 bp, Homo sapien
cacttggaaagagagtctagttccc

SEQ ID NO: 3569221 - DNA, 25 bp, Homo sapien
taggtttctgctaatagcttcgacc

SEQ ID NO: 3569222 - DNA, 25 bp, Homo sapien
tgcatcatctccatgaagagggtgg

SEQ ID NO: 3569223 - DNA, 25 bp, Homo sapien
tgcctaggcaaacagttcatgacca

SEQ ID NO: 3569224 - DNA, 25 bp, Homo sapien
tctacagggaactctaatcagcaag

SEQ ID NO: 3569225 - DNA, 25 bp, Homo sapien
catcctgcgggtggatgatgctcga

SEQ ID NO: 3569226 - DNA, 25 bp, Homo sapien
cacagacgtggtgaaagaacgcttt

SEQ ID NO: 3569227 - DNA, 25 bp, Homo sapien
catgcccagcctaatttatccattt

SEQ ID NO: 3569228 - DNA, 25 bp, Homo sapien
gcccagcctaatttatccatttaaa

SEQ ID NO: 3569229 - DNA, 25 bp, Homo sapien
ccagcctaatttatccatttaaaga

SEQ ID NO: 3569230 - DNA, 25 bp, Homo sapien
tgcccagcctaatttatccatttaa

SEQ ID NO: 3569231 - DNA, 25 bp, Homo sapien
atgcttaattgcacatgtttgacta

SEQ ID NO: 3569232 - DNA, 25 bp, Homo sapien
tgcttaattgcacatgtttgactaa

SEQ ID NO: 3569233 - DNA, 25 bp, Homo sapien
catgcttaattgcacatgtttgact

SEQ ID NO: 3569234 - DNA, 25 bp, Homo sapien
acatgcttaattgcacatgtttgac

SEQ ID NO: 3569235 - DNA, 25 bp, Homo sapien
ccatctcagttctcaggaatttctg

SEQ ID NO: 3569236 - DNA, 25 bp, Homo sapien
cagttctcaggaatttctgttcgca

SEQ ID NO: 3569237 - DNA, 25 bp, Homo sapien
tctgttcgcagaattatctcctgaa

SEQ ID NO: 3569238 - DNA, 25 bp, Homo sapien
actcttctaataccagcgatttccc

SEQ ID NO: 3569239 - DNA, 25 bp, Homo sapien
agttttgtaggctgtacagggagca

SEQ ID NO: 3569240 - DNA, 25 bp, Homo sapien
aaatgatatacccgccttagcctca

SEQ ID NO: 3569241 - DNA, 25 bp, Homo sapien
tgatatacccgccttagcctcaaag

SEQ ID NO: 3569242 - DNA, 25 bp, Homo sapien
atgatatacccgccttagcctcaaa

SEQ ID NO: 3569243 - DNA, 25 bp, Homo sapien
aatgatatacccgccttagcctcaa

SEQ ID NO: 3569244 - DNA, 25 bp, Homo sapien
ctcgtgatccgaccatcctagcctc

SEQ ID NO: 3569245 - DNA, 25 bp, Homo sapien
tcgtgatccgaccatcctagcctcc

SEQ ID NO: 3569246 - DNA, 25 bp, Homo sapien
tgatcttcatagcaactccctgagg

SEQ ID NO: 3569247 - DNA, 25 bp, Homo sapien
tagacgccgtctacaaggaagagaa

SEQ ID NO: 3569248 - DNA, 25 bp, Homo sapien
tcactgggacatggttagacgccgt

SEQ ID NO: 3569249 - DNA, 25 bp, Homo sapien
caagaggaactcaccaatgggcact

SEQ ID NO: 3569250 - DNA, 25 bp, Homo sapien
ttcaccttcgaagagccatgagccc

SEQ ID NO: 3569251 - DNA, 25 bp, Homo sapien
gcaatagactccctcccagaaagaa

SEQ ID NO: 3569252 - DNA, 25 bp, Homo sapien
gccttgagggccaagtgcagatcac

SEQ ID NO: 3569253 - DNA, 25 bp, Homo sapien
ccatgagcccttctgaaaagacaaa

SEQ ID NO: 3569254 - DNA, 25 bp, Homo sapien
cccaggctggattaccatggcacag

SEQ ID NO: 3569255 - DNA, 25 bp, Homo sapien
ggctggattaccatggcacagtctt

SEQ ID NO: 3569256 - DNA, 25 bp, Homo sapien
gctggattaccatggcacagtcttg

SEQ ID NO: 3569257 - DNA, 25 bp, Homo sapien
caggctggattaccatggcacagtc

SEQ ID NO: 3569258 - DNA, 25 bp, Homo sapien
ggaaaaacatagcatattgaatcat

SEQ ID NO: 3569259 - DNA, 25 bp, Homo sapien
catggtttattcagccatgtggtgg

SEQ ID NO: 3569260 - DNA, 25 bp, Homo sapien
gtcctgtcatggtttattcagccat

SEQ ID NO: 3569261 - DNA, 25 bp, Homo sapien
tgtcatggtttattcagccatgtgg

SEQ ID NO: 3569262 - DNA, 25 bp, Homo sapien
cctgtcatggtttattcagccatgt

SEQ ID NO: 3569263 - DNA, 25 bp, Homo sapien
gcctctcattaggtgcagatatcac

SEQ ID NO: 3569264 - DNA, 25 bp, Homo sapien
atggcctctcattaggtgcagatat

SEQ ID NO: 3569265 - DNA, 25 bp, Homo sapien
taggtgcagatatcactgccaactt

SEQ ID NO: 3569266 - DNA, 25 bp, Homo sapien
cattaggtgcagatatcactgccaa

SEQ ID NO: 3569267 - DNA, 25 bp, Homo sapien
accagcgggctcctcaattctacat

SEQ ID NO: 3569268 - DNA, 25 bp, Homo sapien
ctcaattctacatggcccttaccgt

SEQ ID NO: 3569269 - DNA, 25 bp, Homo sapien
agcgggctcctcaattctacatggc

SEQ ID NO: 3569270 - DNA, 25 bp, Homo sapien
gctcctcaattctacatggccctta

SEQ ID NO: 3569271 - DNA, 25 bp, Homo sapien
tcatttcagcttccggccactggga

SEQ ID NO: 3569272 - DNA, 25 bp, Homo sapien
gctcgaaagggtttgccctgagaca

SEQ ID NO: 3569273 - DNA, 25 bp, Homo sapien
gcgctgctcgaaagggtttgccctg

SEQ ID NO: 3569274 - DNA, 25 bp, Homo sapien
aaagggtttgccctgagacaccaag

SEQ ID NO: 3569275 - DNA, 25 bp, Homo sapien
agaactggtttagcttgcctgcagg

SEQ ID NO: 3569276 - DNA, 25 bp, Homo sapien
tcccgcaggttcttccagaactggt

SEQ ID NO: 3569277 - DNA, 25 bp, Homo sapien
ttccagaactggtttagcttgcctg

SEQ ID NO: 3569278 - DNA, 25 bp, Homo sapien
tttagcttgcctgcaggatcaggaa

SEQ ID NO: 3569279 - DNA, 25 bp, Homo sapien
cctggcgtggtggcagacatggcta

SEQ ID NO: 3569280 - DNA, 25 bp, Homo sapien
ctggcgtggtggcagacatggctac

SEQ ID NO: 3569281 - DNA, 25 bp, Homo sapien
aagaccaggccattttcttcatgtt

SEQ ID NO: 3569282 - DNA, 25 bp, Homo sapien
ttcatgtttcaccagctcatgtaag

SEQ ID NO: 3569283 - DNA, 25 bp, Homo sapien
cctcaaagaccaggccattttcttc

SEQ ID NO: 3569284 - DNA, 25 bp, Homo sapien
caaagaccaggccattttcttcatg

SEQ ID NO: 3569285 - DNA, 25 bp, Homo sapien
ctgcagagagaaccaagggagcctg

SEQ ID NO: 3569286 - DNA, 25 bp, Homo sapien
cagagagaaccaagggagcctgaga

SEQ ID NO: 3569287 - DNA, 25 bp, Homo sapien
agagaaccaagggagcctgagagct

SEQ ID NO: 3569288 - DNA, 25 bp, Homo sapien
agaaccaagggagcctgagagctgc

SEQ ID NO: 3569289 - DNA, 25 bp, Homo sapien
tggaggatgtgtccagacagacacc

SEQ ID NO: 3569290 - DNA, 25 bp, Homo sapien
cacacgcaggcaaacagctcctgaa

SEQ ID NO: 3569291 - DNA, 25 bp, Homo sapien
acgcaggcaaacagctcctgaacat

SEQ ID NO: 3569292 - DNA, 25 bp, Homo sapien
agcacacgcaggcaaacagctcctg

SEQ ID NO: 3569293 - DNA, 25 bp, Homo sapien
aggcgactgtaatactccctcagag

SEQ ID NO: 3569294 - DNA, 25 bp, Homo sapien
ggccctccagccaaggggtgcagac

SEQ ID NO: 3569295 - DNA, 25 bp, Homo sapien
agtcctcggccctccagccaagggg

SEQ ID NO: 3569296 - DNA, 25 bp, Homo sapien
ctcggccctccagccaaggggtgca

SEQ ID NO: 3569297 - DNA, 25 bp, Homo sapien
cttcacagagaagagcacacactgc

SEQ ID NO: 3569298 - DNA, 25 bp, Homo sapien
ttcacagagaagagcacacactgcc

SEQ ID NO: 3569299 - DNA, 25 bp, Homo sapien
tcacagagaagagcacacactgcca

SEQ ID NO: 3569300 - DNA, 25 bp, Homo sapien
cacagagaagagcacacactgccat

SEQ ID NO: 3569301 - DNA, 25 bp, Homo sapien
gtagttcatccagacatccagttgg

SEQ ID NO: 3569302 - DNA, 25 bp, Homo sapien
atccagacatccagttggaagtggg

SEQ ID NO: 3569303 - DNA, 25 bp, Homo sapien
cagtagttcatccagacatccagtt

SEQ ID NO: 3569304 - DNA, 25 bp, Homo sapien
gttcatccagacatccagttggaag

SEQ ID NO: 3569305 - DNA, 25 bp, Homo sapien
tacactgaattctaacaccagggcc

SEQ ID NO: 3569306 - DNA, 25 bp, Homo sapien
cactgaattctaacaccagggccca

SEQ ID NO: 3569307 - DNA, 25 bp, Homo sapien
acactgaattctaacaccagggccc

SEQ ID NO: 3569308 - DNA, 25 bp, Homo sapien
actgaattctaacaccagggcccag

SEQ ID NO: 3569309 - DNA, 25 bp, Homo sapien
caggccttcacataggttgtttaga

SEQ ID NO: 3569310 - DNA, 25 bp, Homo sapien
aggatcttgctttggctttcaggcc

SEQ ID NO: 3569311 - DNA, 25 bp, Homo sapien
gttgtttagatcatggaagtgtttc

SEQ ID NO: 3569312 - DNA, 25 bp, Homo sapien
actttttgtcggacagctttgtaat

SEQ ID NO: 3569313 - DNA, 25 bp, Homo sapien
agaagttaacacaggagtccccagg

SEQ ID NO: 3569314 - DNA, 25 bp, Homo sapien
tctagatccgtattgcaagccactg

SEQ ID NO: 3569315 - DNA, 25 bp, Homo sapien
cataggagactgatgaagtgcaccc

SEQ ID NO: 3569316 - DNA, 25 bp, Homo sapien
aactctatgtgtaggcctgtgagcc

SEQ ID NO: 3569317 - DNA, 25 bp, Homo sapien
ccggagtccccccgaatgggctcag

SEQ ID NO: 3569318 - DNA, 25 bp, Homo sapien
gagtccccccgaatgggctcagtcc

SEQ ID NO: 3569319 - DNA, 25 bp, Homo sapien
cggagtccccccgaatgggctcagt

SEQ ID NO: 3569320 - DNA, 25 bp, Homo sapien
catcgacggcatccgggcccagctg

SEQ ID NO: 3569321 - DNA, 25 bp, Homo sapien
gcccatcgacggcatccgggcccag

SEQ ID NO: 3569322 - DNA, 25 bp, Homo sapien
gatgctccgggcccatcgacggcat

SEQ ID NO: 3569323 - DNA, 25 bp, Homo sapien
tccgggcccatcgacggcatccggg

SEQ ID NO: 3569324 - DNA, 25 bp, Homo sapien
gcgattgcgcctccctaactatggg

SEQ ID NO: 3569325 - DNA, 25 bp, Homo sapien
gattgcgcctccctaactatgggtg

SEQ ID NO: 3569326 - DNA, 25 bp, Homo sapien
tgcgcctccctaactatgggtgaag

SEQ ID NO: 3569327 - DNA, 25 bp, Homo sapien
cagggcgattgcgcctccctaacta

SEQ ID NO: 3569328 - DNA, 25 bp, Homo sapien
ccactatgagttaacaaacactgaa

SEQ ID NO: 3569329 - DNA, 25 bp, Homo sapien
catcttgggccgtctaaggtgaaag

SEQ ID NO: 3569330 - DNA, 25 bp, Homo sapien
tctcatgtcttcgaaggttaaagga

SEQ ID NO: 3569331 - DNA, 25 bp, Homo sapien
tagaagacaagcatgtggtttctct

SEQ ID NO: 3569332 - DNA, 25 bp, Homo sapien
tgtgtgttttcttaagggcactttc

SEQ ID NO: 3569333 - DNA, 25 bp, Homo sapien
ggtgggtgcatcttttctgatgata

SEQ ID NO: 3569334 - DNA, 25 bp, Homo sapien
taggatgcatggatatcatgtgtgt

SEQ ID NO: 3569335 - DNA, 25 bp, Homo sapien
cattgtcatactggtgggtgcatct

SEQ ID NO: 3569336 - DNA, 25 bp, Homo sapien
ctggattctggtcttgaagaaattc

SEQ ID NO: 3569337 - DNA, 25 bp, Homo sapien
cttcctgccacagctcttttccttg

SEQ ID NO: 3569338 - DNA, 25 bp, Homo sapien
ggattctggtcttgaagaaattctc

SEQ ID NO: 3569339 - DNA, 25 bp, Homo sapien
tccttcctgccacagctcttttcct

SEQ ID NO: 3569340 - DNA, 25 bp, Homo sapien
atataggatttgcttatctggtacc

SEQ ID NO: 3569341 - DNA, 25 bp, Homo sapien
aaattatataggatttgcttatctg

SEQ ID NO: 3569342 - DNA, 25 bp, Homo sapien
ttatataggatttgcttatctggta

SEQ ID NO: 3569343 - DNA, 25 bp, Homo sapien
aattatataggatttgcttatctgg

SEQ ID NO: 3569344 - DNA, 25 bp, Homo sapien
cgagggacaccaggtgactgatatt

SEQ ID NO: 3569345 - DNA, 25 bp, Homo sapien
acatctctgtacagctttctcttgg

SEQ ID NO: 3569346 - DNA, 25 bp, Homo sapien
tctgtacagctttctcttggatgtg

SEQ ID NO: 3569347 - DNA, 25 bp, Homo sapien
gtgactgatattttccagcatcaca

SEQ ID NO: 3569348 - DNA, 25 bp, Homo sapien
agtcaatagctacatcttcaaaagt

SEQ ID NO: 3569349 - DNA, 25 bp, Homo sapien
ttcctgggtgaagtcaatagctaca

SEQ ID NO: 3569350 - DNA, 25 bp, Homo sapien
agctacatcttcaaaagtcactttc

SEQ ID NO: 3569351 - DNA, 25 bp, Homo sapien
cttcctgggtgaagtcaatagctac

SEQ ID NO: 3569352 - DNA, 25 bp, Homo sapien
acagtcacaatcctctaggatgctc

SEQ ID NO: 3569353 - DNA, 25 bp, Homo sapien
agtcacaatcctctaggatgctcag

SEQ ID NO: 3569354 - DNA, 25 bp, Homo sapien
tctgatattttactaacgtggtatc

SEQ ID NO: 3569355 - DNA, 25 bp, Homo sapien
ggtgggagaaatttagcagctcaat

SEQ ID NO: 3569356 - DNA, 25 bp, Homo sapien
tttttccattagcttagaagtcagc

SEQ ID NO: 3569357 - DNA, 25 bp, Homo sapien
ctttgtgtatgtgttgggccctgct

SEQ ID NO: 3569358 - DNA, 25 bp, Homo sapien
gcacacagccttgacatacacagtt

SEQ ID NO: 3569359 - DNA, 25 bp, Homo sapien
ccatatgtgtttggaacttgcagag

SEQ ID NO: 3569360 - DNA, 25 bp, Homo sapien
taaagttgtctatcaggtccaggag

SEQ ID NO: 3569361 - DNA, 25 bp, Homo sapien
tgcattcttgacttggctctcgggt

SEQ ID NO: 3569362 - DNA, 25 bp, Homo sapien
tacttcaaaaggctgattgctctgg

SEQ ID NO: 3569363 - DNA, 25 bp, Homo sapien
tctgtggacatgttgagattcacct

SEQ ID NO: 3569364 - DNA, 25 bp, Homo sapien
cagaggagcctctaatttctaattc

SEQ ID NO: 3569365 - DNA, 25 bp, Homo sapien
tctgatgatactctcgattttacca

SEQ ID NO: 3569366 - DNA, 25 bp, Homo sapien
taagtgagacaaagtttattaagaa

SEQ ID NO: 3569367 - DNA, 25 bp, Homo sapien
ccatacaatattggccatttaataa

SEQ ID NO: 3569368 - DNA, 25 bp, Homo sapien
cctaacaatcatggcaaatgaggag

SEQ ID NO: 3569369 - DNA, 25 bp, Homo sapien
tacgtcttacgtggtgtcaagcaag

SEQ ID NO: 3569370 - DNA, 25 bp, Homo sapien
gggaagcaccccatgattaagttat

SEQ ID NO: 3569371 - DNA, 25 bp, Homo sapien
gctcttatattctttgacacctttg

SEQ ID NO: 3569372 - DNA, 25 bp, Homo sapien
tcacatctgggtatttactgaaaag

SEQ ID NO: 3569373 - DNA, 25 bp, Homo sapien
ctgctagaatggctactacagaaaa

SEQ ID NO: 3569374 - DNA, 25 bp, Homo sapien
tagaatggctactacagaaaagagg

SEQ ID NO: 3569375 - DNA, 25 bp, Homo sapien
ctcacatctgggtatttactgaaaa

SEQ ID NO: 3569376 - DNA, 25 bp, Homo sapien
tgaagatgtggctaaatgagggccc

SEQ ID NO: 3569377 - DNA, 25 bp, Homo sapien
tacatttcaaccattctcaagacaa

SEQ ID NO: 3569378 - DNA, 25 bp, Homo sapien
tataaaatagtatcaccgctttgga

SEQ ID NO: 3569379 - DNA, 25 bp, Homo sapien
gagaagccacttaacacacactaga

SEQ ID NO: 3569380 - DNA, 25 bp, Homo sapien
cccagctgacagcttttgtctgcaa

SEQ ID NO: 3569381 - DNA, 25 bp, Homo sapien
tcaggatagagggtttaaaggattc

SEQ ID NO: 3569382 - DNA, 25 bp, Homo sapien
gagtaatcacctagctcaatctgta

SEQ ID NO: 3569383 - DNA, 25 bp, Homo sapien
taaaatcttgctggttctagcacct

SEQ ID NO: 3569384 - DNA, 25 bp, Homo sapien
gaatcttcccataaactacctagtg

SEQ ID NO: 3569385 - DNA, 25 bp, Homo sapien
ccttttttataccactttggctgca

SEQ ID NO: 3569386 - DNA, 25 bp, Homo sapien
tcttcagttgagcagtatgctgctt

SEQ ID NO: 3569387 - DNA, 25 bp, Homo sapien
atagtgctctccgttttttcagatc

SEQ ID NO: 3569388 - DNA, 25 bp, Homo sapien
gatattagcaacttgctgcagggag

SEQ ID NO: 3569389 - DNA, 25 bp, Homo sapien
tcaataatcatggaaagcctctctg

SEQ ID NO: 3569390 - DNA, 25 bp, Homo sapien
gaaaactaatacgtgtggaacagaa

SEQ ID NO: 3569391 - DNA, 25 bp, Homo sapien
caaatcaggtaggacattgtgtgcc

SEQ ID NO: 3569392 - DNA, 25 bp, Homo sapien
gatgttcatctggtacctactggtc

SEQ ID NO: 3569393 - DNA, 25 bp, Homo sapien
tgaagccctctgcaatctaagccat

SEQ ID NO: 3569394 - DNA, 25 bp, Homo sapien
cccagaatgcagtgaaccttcctct

SEQ ID NO: 3569395 - DNA, 25 bp, Homo sapien
gacccttctttgatatccgtgattg

SEQ ID NO: 3569396 - DNA, 25 bp, Homo sapien
taaatctcgaattcacttagtcctg

SEQ ID NO: 3569397 - DNA, 25 bp, Homo sapien
tataacagactctaatgatccattg

SEQ ID NO: 3569398 - DNA, 25 bp, Homo sapien
agaatgtgtactccacagcttttgg

SEQ ID NO: 3569399 - DNA, 25 bp, Homo sapien
tccttgaggtgcatagtagcttgtt

SEQ ID NO: 3569400 - DNA, 25 bp, Homo sapien
aattcttcactcatactcaatggtg

SEQ ID NO: 3569401 - DNA, 25 bp, Homo sapien
caggaacaaggcaaaagtgcccctt

SEQ ID NO: 3569402 - DNA, 25 bp, Homo sapien
caaaaatagagtttgtcaccagtag

SEQ ID NO: 3569403 - DNA, 25 bp, Homo sapien
caccagtagtcctaccttacaataa

SEQ ID NO: 3569404 - DNA, 25 bp, Homo sapien
tgtattataaagatagagtaatcaa

SEQ ID NO: 3569405 - DNA, 25 bp, Homo sapien
attataaagatagagtaatcaaaac

SEQ ID NO: 3569406 - DNA, 25 bp, Homo sapien
tattataaagatagagtaatcaaaa

SEQ ID NO: 3569407 - DNA, 25 bp, Homo sapien
tcctaatggcactcttgacagaaat

SEQ ID NO: 3569408 - DNA, 25 bp, Homo sapien
ttcacttctaatgatgaatgtcctt

SEQ ID NO: 3569409 - DNA, 25 bp, Homo sapien
aaagtaagtaatattgtgtcatata

SEQ ID NO: 3569410 - DNA, 25 bp, Homo sapien
aagtaagtaatattgtgtcatataa

SEQ ID NO: 3569411 - DNA, 25 bp, Homo sapien
agcttcacttctaatgatgaatgtc

SEQ ID NO: 3569412 - DNA, 25 bp, Homo sapien
tgaagtgcaatgctgatgaacatgc

SEQ ID NO: 3569413 - DNA, 25 bp, Homo sapien
aaaaacatgtcttaaactctcttat

SEQ ID NO: 3569414 - DNA, 25 bp, Homo sapien
attgatggacaaaagaagtggtgaa

SEQ ID NO: 3569415 - DNA, 25 bp, Homo sapien
tgcctgacacagatttccttcttgc

SEQ ID NO: 3569416 - DNA, 25 bp, Homo sapien
gacacagatttccttcttgctcctt

SEQ ID NO: 3569417 - DNA, 25 bp, Homo sapien
ctgacacagatttccttcttgctcc

SEQ ID NO: 3569418 - DNA, 25 bp, Homo sapien
tgcggactgcctgacacagatttcc

SEQ ID NO: 3569419 - DNA, 25 bp, Homo sapien
cttgtgtgggtaagggcaaccacat

SEQ ID NO: 3569420 - DNA, 25 bp, Homo sapien
ctttgtgaatattgctttcttcgtt

SEQ ID NO: 3569421 - DNA, 25 bp, Homo sapien
tgaatattgctttcttcgttatgcc

SEQ ID NO: 3569422 - DNA, 25 bp, Homo sapien
tttcttgtgtgggtaagggcaacca

SEQ ID NO: 3569423 - DNA, 25 bp, Homo sapien
aattctcctgtctcagccttccaag

SEQ ID NO: 3569424 - DNA, 25 bp, Homo sapien
tattgttaatagagacagtgtttct

SEQ ID NO: 3569425 - DNA, 25 bp, Homo sapien
cccgcttccgccccccaaactgctg

SEQ ID NO: 3569426 - DNA, 25 bp, Homo sapien
caacttctgcctcccctattcaagc

SEQ ID NO: 3569427 - DNA, 25 bp, Homo sapien
gagactccatgaaaacgcaaagcaa

SEQ ID NO: 3569428 - DNA, 25 bp, Homo sapien
aaaggcaggcacttctggccggtgc

SEQ ID NO: 3569429 - DNA, 25 bp, Homo sapien
tgcaaaaaatgaaacgagcgtggtg

SEQ ID NO: 3569430 - DNA, 25 bp, Homo sapien
cagtctcagtggctcgcacatgtaa

SEQ ID NO: 3569431 - DNA, 25 bp, Homo sapien
gagaaacctaaatctggctgatgtg

SEQ ID NO: 3569432 - DNA, 25 bp, Homo sapien
tgtgcatgtccaatcatagtacctt

SEQ ID NO: 3569433 - DNA, 25 bp, Homo sapien
tggctgatgtgcatgtccaatcata

SEQ ID NO: 3569434 - DNA, 25 bp, Homo sapien
tattgctcacatcttcgttgctgac

SEQ ID NO: 3569435 - DNA, 25 bp, Homo sapien
aaggagcaacgccttttcatagaac

SEQ ID NO: 3569436 - DNA, 25 bp, Homo sapien
tctgcgtagtctccactttattagt

SEQ ID NO: 3569437 - DNA, 25 bp, Homo sapien
gccttttcatagaactcgtactaga

SEQ ID NO: 3569438 - DNA, 25 bp, Homo sapien
gaactcgtactagatcatgaggtca

SEQ ID NO: 3569439 - DNA, 25 bp, Homo sapien
aaatcctcgtcactcaggcggatgc

SEQ ID NO: 3569440 - DNA, 25 bp, Homo sapien
cggggttccttgtagaacacagcta

SEQ ID NO: 3569441 - DNA, 25 bp, Homo sapien
tgccctctcaaatcctcgtcactca

SEQ ID NO: 3569442 - DNA, 25 bp, Homo sapien
acacagctagaccagtgggtgccac

SEQ ID NO: 3569443 - DNA, 25 bp, Homo sapien
tgtgtcaagtatggaaaggacagct

SEQ ID NO: 3569444 - DNA, 25 bp, Homo sapien
tcaagtatggaaaggacagctgaga

SEQ ID NO: 3569445 - DNA, 25 bp, Homo sapien
tgtcaagtatggaaaggacagctga

SEQ ID NO: 3569446 - DNA, 25 bp, Homo sapien
ctgtgtcaagtatggaaaggacagc

SEQ ID NO: 3569447 - DNA, 25 bp, Homo sapien
tttctgtacagctcttgacttccac

SEQ ID NO: 3569448 - DNA, 25 bp, Homo sapien
ggctttctgtacagctcttgacttc

SEQ ID NO: 3569449 - DNA, 25 bp, Homo sapien
gctttctgtacagctcttgacttcc

SEQ ID NO: 3569450 - DNA, 25 bp, Homo sapien
ctggctttctgtacagctcttgact

SEQ ID NO: 3569451 - DNA, 25 bp, Homo sapien
tggaaagcgtttcaaaaatgctcct

SEQ ID NO: 3569452 - DNA, 25 bp, Homo sapien
ctattgaggaagctggaaagcgttt

SEQ ID NO: 3569453 - DNA, 25 bp, Homo sapien
aagctggaaagcgtttcaaaaatgc

SEQ ID NO: 3569454 - DNA, 25 bp, Homo sapien
gaggaagctggaaagcgtttcaaaa

SEQ ID NO: 3569455 - DNA, 25 bp, Homo sapien
gaagtgagtgatgattaagctgatc

SEQ ID NO: 3569456 - DNA, 25 bp, Homo sapien
ttaagctgatcgtgggtgcccgctg

SEQ ID NO: 3569457 - DNA, 25 bp, Homo sapien
acttgatttccagttgatccgatgg

SEQ ID NO: 3569458 - DNA, 25 bp, Homo sapien
tttccagttgatccgatggaagtga

SEQ ID NO: 3569459 - DNA, 25 bp, Homo sapien
tcagctgcacaacttgattgcctta

SEQ ID NO: 3569460 - DNA, 25 bp, Homo sapien
cagctgcacaacttgattgccttac

SEQ ID NO: 3569461 - DNA, 25 bp, Homo sapien
ctctcagctgcacaacttgattgcc

SEQ ID NO: 3569462 - DNA, 25 bp, Homo sapien
tctcagctgcacaacttgattgcct

SEQ ID NO: 3569463 - DNA, 25 bp, Homo sapien
tctgggaaccttctgtgacaccttc

SEQ ID NO: 3569464 - DNA, 25 bp, Homo sapien
ttctgggaaccttctgtgacacctt

SEQ ID NO: 3569465 - DNA, 25 bp, Homo sapien
agtataaaccttcaccacctgtggg

SEQ ID NO: 3569466 - DNA, 25 bp, Homo sapien
taaaccttcaccacctgtgggtctc

SEQ ID NO: 3569467 - DNA, 25 bp, Homo sapien
tcaggtgggaagtataaaccttcac

SEQ ID NO: 3569468 - DNA, 25 bp, Homo sapien
gaagtataaaccttcaccacctgtg

SEQ ID NO: 3569469 - DNA, 25 bp, Homo sapien
ttatggaacaggcgttggagggtac

SEQ ID NO: 3569470 - DNA, 25 bp, Homo sapien
tgctgattttatggaacaggcgttg

SEQ ID NO: 3569471 - DNA, 25 bp, Homo sapien
gtttgctgattttatggaacaggcg

SEQ ID NO: 3569472 - DNA, 25 bp, Homo sapien
tgattttatggaacaggcgttggag

SEQ ID NO: 3569473 - DNA, 25 bp, Homo sapien
gcctcagtgatgtacacggtggtca

SEQ ID NO: 3569474 - DNA, 25 bp, Homo sapien
cttccccgagaaagcgtgcagtggc

SEQ ID NO: 3569475 - DNA, 25 bp, Homo sapien
tggcctcagtgatgtacacggtggt

SEQ ID NO: 3569476 - DNA, 25 bp, Homo sapien
cgagaaagcgtgcagtggcctcagt

SEQ ID NO: 3569477 - DNA, 25 bp, Homo sapien
tattccgaatgctatcacagggtgt

SEQ ID NO: 3569478 - DNA, 25 bp, Homo sapien
gacacaggcggttgacacacatggt

SEQ ID NO: 3569479 - DNA, 25 bp, Homo sapien
aatatcacaggttgtccactgaccg

SEQ ID NO: 3569480 - DNA, 25 bp, Homo sapien
cactgaccgtgatattaggagtccc

SEQ ID NO: 3569481 - DNA, 25 bp, Homo sapien
gacattaggagtatagacccctggg

SEQ ID NO: 3569482 - DNA, 25 bp, Homo sapien
catgcattgggacatcggtagtcac

SEQ ID NO: 3569483 - DNA, 25 bp, Homo sapien
ttgggagcaatatcacacggtgtac

SEQ ID NO: 3569484 - DNA, 25 bp, Homo sapien
cattagtagtagtacccagctagca

SEQ ID NO: 3569485 - DNA, 25 bp, Homo sapien
tggtatttctacatctcacctttgt

SEQ ID NO: 3569486 - DNA, 25 bp, Homo sapien
ttctacatctcacctttgtcagccc

SEQ ID NO: 3569487 - DNA, 25 bp, Homo sapien
ggctggtatttctacatctcacctt

SEQ ID NO: 3569488 - DNA, 25 bp, Homo sapien
gctggtatttctacatctcaccttt

SEQ ID NO: 3569489 - DNA, 25 bp, Homo sapien
aggtcacagcatcaacatgaatgtg

SEQ ID NO: 3569490 - DNA, 25 bp, Homo sapien
agaaataaattctgtaaggctatat

SEQ ID NO: 3569491 - DNA, 25 bp, Homo sapien
cagaaatagtatgagaacttggcca

SEQ ID NO: 3569492 - DNA, 25 bp, Homo sapien
tctgtaaggctatatttgccatata

SEQ ID NO: 3569493 - DNA, 25 bp, Homo sapien
taaaagctacagtcacccaataact

SEQ ID NO: 3569494 - DNA, 25 bp, Homo sapien
tacacgggagctttgggacttacag

SEQ ID NO: 3569495 - DNA, 25 bp, Homo sapien
gaaactgtagagcacacatgtaaag

SEQ ID NO: 3569496 - DNA, 25 bp, Homo sapien
tatacatgtgttgtacagggagaaa

SEQ ID NO: 3569497 - DNA, 25 bp, Homo sapien
ggctgagggacccaccacagagtca

SEQ ID NO: 3569498 - DNA, 25 bp, Homo sapien
ctaaggagtccagagaagaacacac

SEQ ID NO: 3569499 - DNA, 25 bp, Homo sapien
actgatgacgcgtgaagggtcggga

SEQ ID NO: 3569500 - DNA, 25 bp, Homo sapien
caggcgaagtcgatcccataactct

SEQ ID NO: 3569501 - DNA, 25 bp, Homo sapien
cgcgtgaagggtcgggagcaggtca

SEQ ID NO: 3569502 - DNA, 25 bp, Homo sapien
agcaggtcaggcgaagtcgatccca

SEQ ID NO: 3569503 - DNA, 25 bp, Homo sapien
cagatgatccacttgtcccagtctc

SEQ ID NO: 3569504 - DNA, 25 bp, Homo sapien
cctcagatgatccacttgtcccagt

SEQ ID NO: 3569505 - DNA, 25 bp, Homo sapien
tcagatgatccacttgtcccagtct

SEQ ID NO: 3569506 - DNA, 25 bp, Homo sapien
agatgatccacttgtcccagtctcc

SEQ ID NO: 3569507 - DNA, 25 bp, Homo sapien
ctctttagtactgcatctctgtttc

SEQ ID NO: 3569508 - DNA, 25 bp, Homo sapien
agtcctctttagtactgcatctctg

SEQ ID NO: 3569509 - DNA, 25 bp, Homo sapien
catctctgtttctcataaagaccac

SEQ ID NO: 3569510 - DNA, 25 bp, Homo sapien
tgtttctcataaagaccacccccat

SEQ ID NO: 3569511 - DNA, 25 bp, Homo sapien
cagttagagacattagcgtggttgc

SEQ ID NO: 3569512 - DNA, 25 bp, Homo sapien
catctttaaacatgcggaccccgga

SEQ ID NO: 3569513 - DNA, 25 bp, Homo sapien
catcaatttgcaggaacgcacagcc

SEQ ID NO: 3569514 - DNA, 25 bp, Homo sapien
cagggttatgaaaggtctgtccagg

SEQ ID NO: 3569515 - DNA, 25 bp, Homo sapien
agttctctacaggatacttgggatc

SEQ ID NO: 3569516 - DNA, 25 bp, Homo sapien
actcttgtcctgagggcagccgagc

SEQ ID NO: 3569517 - DNA, 25 bp, Homo sapien
ctctccagctgtagttctactttca

SEQ ID NO: 3569518 - DNA, 25 bp, Homo sapien
gactatctgggtttagcaagttctc

SEQ ID NO: 3569519 - DNA, 25 bp, Homo sapien
ctttcaacttatagaagtggatctc

SEQ ID NO: 3569520 - DNA, 25 bp, Homo sapien
ggtatgagccctgtaatctaaatgt

SEQ ID NO: 3569521 - DNA, 25 bp, Homo sapien
tgaaactagctaatgttctctagca

SEQ ID NO: 3569522 - DNA, 25 bp, Homo sapien
gagaccagactcatggttttcaacc

SEQ ID NO: 3569523 - DNA, 25 bp, Homo sapien
gaagacttcttttgcgcatcctgca

SEQ ID NO: 3569524 - DNA, 25 bp, Homo sapien
cttctattagattgggagtttcctg

SEQ ID NO: 3569525 - DNA, 25 bp, Homo sapien
cttctgtgggaacaacctgagggca

SEQ ID NO: 3569526 - DNA, 25 bp, Homo sapien
tttcctgaaagtggagccaagactc

SEQ ID NO: 3569527 - DNA, 25 bp, Homo sapien
aatgataccacatggctgatcttca

SEQ ID NO: 3569528 - DNA, 25 bp, Homo sapien
gataccacatggctgatcttcacag

SEQ ID NO: 3569529 - DNA, 25 bp, Homo sapien
aaatgataccacatggctgatcttc

SEQ ID NO: 3569530 - DNA, 25 bp, Homo sapien
atgataccacatggctgatcttcac

SEQ ID NO: 3569531 - DNA, 25 bp, Homo sapien
gatttcttctgtcactactttggca

SEQ ID NO: 3569532 - DNA, 25 bp, Homo sapien
cagcagctgtttcaagtacaagaca

SEQ ID NO: 3569533 - DNA, 25 bp, Homo sapien
tgactatgtgttagcttccagaaaa

SEQ ID NO: 3569534 - DNA, 25 bp, Homo sapien
actttggcactgactatgtgttagc

SEQ ID NO: 3569535 - DNA, 25 bp, Homo sapien
ttgatgcgaaaagcccatctctcat

SEQ ID NO: 3569536 - DNA, 25 bp, Homo sapien
cgaggagggtggatatcttcagccc

SEQ ID NO: 3569537 - DNA, 25 bp, Homo sapien
ccgaggagggtggatatcttcagcc

SEQ ID NO: 3569538 - DNA, 25 bp, Homo sapien
tttgtgatttgatgcgaaaagccca

SEQ ID NO: 3569539 - DNA, 25 bp, Homo sapien
gaggatgagagggtaataggcttga

SEQ ID NO: 3569540 - DNA, 25 bp, Homo sapien
gagaacacaagctaattctaattca

SEQ ID NO: 3569541 - DNA, 25 bp, Homo sapien
cataatagttgcttctggagaggat

SEQ ID NO: 3569542 - DNA, 25 bp, Homo sapien
aaatggactgggagaacacaagcta

SEQ ID NO: 3569543 - DNA, 25 bp, Homo sapien
ggccatcctagttccattcaccaga

SEQ ID NO: 3569544 - DNA, 25 bp, Homo sapien
tgacttttctagacgttctgtgggc

SEQ ID NO: 3569545 - DNA, 25 bp, Homo sapien
tgttggtcccaatgtaaagctgact

SEQ ID NO: 3569546 - DNA, 25 bp, Homo sapien
caggcttgcaaggtatcgagttcac

SEQ ID NO: 3569547 - DNA, 25 bp, Homo sapien
tttcacagctcatcgggaacaggct

SEQ ID NO: 3569548 - DNA, 25 bp, Homo sapien
tctcagtttcgggagctcaagccgc

SEQ ID NO: 3569549 - DNA, 25 bp, Homo sapien
ccgaggtgtgtgaactggcatgaca

SEQ ID NO: 3569550 - DNA, 25 bp, Homo sapien
catgacagcctaagtaagacgcgga

SEQ ID NO: 3569551 - DNA, 25 bp, Homo sapien
agccaccgttgcctcggatctcgga

SEQ ID NO: 3569552 - DNA, 25 bp, Homo sapien
gtggacctcgaggagccaccgttgc

SEQ ID NO: 3569553 - DNA, 25 bp, Homo sapien
gatctcggaccaccaaacctattct

SEQ ID NO: 3569554 - DNA, 25 bp, Homo sapien
ggaccgtggacctcgaggagccacc

SEQ ID NO: 3569555 - DNA, 25 bp, Homo sapien
ttccgtcttccgtagcacaggaatg

SEQ ID NO: 3569556 - DNA, 25 bp, Homo sapien
ccttctgaccccgagagctactctt

SEQ ID NO: 3569557 - DNA, 25 bp, Homo sapien
ccgtagcacaggaatgcgttctggg

SEQ ID NO: 3569558 - DNA, 25 bp, Homo sapien
tgaaaatgagtcctaccgaggcaag

SEQ ID NO: 3569559 - DNA, 25 bp, Homo sapien
aatggttccttcattgagcacctcc

SEQ ID NO: 3569560 - DNA, 25 bp, Homo sapien
cagcatcctctactggctgggcaat

SEQ ID NO: 3569561 - DNA, 25 bp, Homo sapien
atcctctactggctgggcaatggtt

SEQ ID NO: 3569562 - DNA, 25 bp, Homo sapien
ggttccttcattgagcacctcccag

SEQ ID NO: 3569563 - DNA, 25 bp, Homo sapien
gggaacgctcaagcctggttgaaat

SEQ ID NO: 3569564 - DNA, 25 bp, Homo sapien
tctaatggactgttccagggaaggg

SEQ ID NO: 3569565 - DNA, 25 bp, Homo sapien
gcagacttcctatcttcgtgctgta

SEQ ID NO: 3569566 - DNA, 25 bp, Homo sapien
gcagctgcttcggatccacactgta

SEQ ID NO: 3569567 - DNA, 25 bp, Homo sapien
atttaggcttcagttccactcccag

SEQ ID NO: 3569568 - DNA, 25 bp, Homo sapien
tcatttaggcttcagttccactccc

SEQ ID NO: 3569569 - DNA, 25 bp, Homo sapien
tttaggcttcagttccactcccagg

SEQ ID NO: 3569570 - DNA, 25 bp, Homo sapien
taggcttcagttccactcccaggaa

SEQ ID NO: 3569571 - DNA, 25 bp, Homo sapien
agaacagcccataatgctccccggg

SEQ ID NO: 3569572 - DNA, 25 bp, Homo sapien
cacaccgatcaagtcaactcagtac

SEQ ID NO: 3569573 - DNA, 25 bp, Homo sapien
cccgggagcagaggccactaatgga

SEQ ID NO: 3569574 - DNA, 25 bp, Homo sapien
ggaacacaggcgcttgaaaaagaaa

SEQ ID NO: 3569575 - DNA, 25 bp, Homo sapien
tagggcccatccgtcctgggaaaga

SEQ ID NO: 3569576 - DNA, 25 bp, Homo sapien
gacccagtcctggacttcaagagtg

SEQ ID NO: 3569577 - DNA, 25 bp, Homo sapien
cagaggctaagaggaagactggcca

SEQ ID NO: 3569578 - DNA, 25 bp, Homo sapien
tatggtcccttctagatccagaggc

SEQ ID NO: 3569579 - DNA, 25 bp, Homo sapien
ggtttggctactgttggcctgggag

SEQ ID NO: 3569580 - DNA, 25 bp, Homo sapien
ggagaagtgactttgctttaagaaa

SEQ ID NO: 3569581 - DNA, 25 bp, Homo sapien
ccagggtgcgggcaggcatcactgt

SEQ ID NO: 3569582 - DNA, 25 bp, Homo sapien
aaggaggcaaggtagggagagcgcc

SEQ ID NO: 3569583 - DNA, 25 bp, Homo sapien
ggggccactcactggtactggccct

SEQ ID NO: 3569584 - DNA, 25 bp, Homo sapien
gtggggccactcactggtactggcc

SEQ ID NO: 3569585 - DNA, 25 bp, Homo sapien
caggtgaggtcagcatcggggacac

SEQ ID NO: 3569586 - DNA, 25 bp, Homo sapien
ctgagagggacagtaggcggaggac

SEQ ID NO: 3569587 - DNA, 25 bp, Homo sapien
tcccccatcctgccagtgcctctac

SEQ ID NO: 3569588 - DNA, 25 bp, Homo sapien
cctcccccatcctgccagtgcctct

SEQ ID NO: 3569589 - DNA, 25 bp, Homo sapien
catcgggtttccctcccccatcctg

SEQ ID NO: 3569590 - DNA, 25 bp, Homo sapien
tccctcccccatcctgccagtgcct

SEQ ID NO: 3569591 - DNA, 25 bp, Homo sapien
cttgcccttggctcgaggggtggca

SEQ ID NO: 3569592 - DNA, 25 bp, Homo sapien
gagaacggcgggttccactgcgagt

SEQ ID NO: 3569593 - DNA, 25 bp, Homo sapien
gggtggcaccaatggcggcagcagt

SEQ ID NO: 3569594 - DNA, 25 bp, Homo sapien
tggtggtggcaatgcgcggagaacg

SEQ ID NO: 3569595 - DNA, 25 bp, Homo sapien
tccctagcttcttgggtgtgttgag

SEQ ID NO: 3569596 - DNA, 25 bp, Homo sapien
gccgcagaaggctgttccctagctt

SEQ ID NO: 3569597 - DNA, 25 bp, Homo sapien
ttctttgaggctccccgccgcagaa

SEQ ID NO: 3569598 - DNA, 25 bp, Homo sapien
ctgaaggccatcgactggcgccggt

SEQ ID NO: 3569599 - DNA, 25 bp, Homo sapien
cttctgggcctcagtagtgctctgt

SEQ ID NO: 3569600 - DNA, 25 bp, Homo sapien
tagtgctctgtttgcgcccttcatg

SEQ ID NO: 3569601 - DNA, 25 bp, Homo sapien
gggcctcagtagtgctctgtttgcg

SEQ ID NO: 3569602 - DNA, 25 bp, Homo sapien
tttgcgcccttcatgtcggtctcgg

SEQ ID NO: 3569603 - DNA, 25 bp, Homo sapien
tatctggattggctgcatgctggct

SEQ ID NO: 3569604 - DNA, 25 bp, Homo sapien
gtggtgatgccagtgccctcggcta

SEQ ID NO: 3569605 - DNA, 25 bp, Homo sapien
ggctctagggagacccgtttgcgct

SEQ ID NO: 3569606 - DNA, 25 bp, Homo sapien
ctggctcggcgcagggtctcttggg

SEQ ID NO: 3569607 - DNA, 25 bp, Homo sapien
ccaggggatagcaggtcttcagatg

SEQ ID NO: 3569608 - DNA, 25 bp, Homo sapien
ggcacactcgattgcgctgctgcag

SEQ ID NO: 3569609 - DNA, 25 bp, Homo sapien
aatgcggttccagtcatccagctgc

SEQ ID NO: 3569610 - DNA, 25 bp, Homo sapien
tgctcaggctcatcctggcaagtgc

SEQ ID NO: 3569611 - DNA, 25 bp, Homo sapien
tgagttgccataatcgggagaaccc

SEQ ID NO: 3569612 - DNA, 25 bp, Homo sapien
gaacccaggcgagctagagactgag

SEQ ID NO: 3569613 - DNA, 25 bp, Homo sapien
cggcctgggaacgacgagcagaact

SEQ ID NO: 3569614 - DNA, 25 bp, Homo sapien
gagttggcgctgtctggctcttcca

SEQ ID NO: 3569615 - DNA, 25 bp, Homo sapien
cagtgcaaagatgcccttgagagga

SEQ ID NO: 3569616 - DNA, 25 bp, Homo sapien
cactgtaacatggactggctgctca

SEQ ID NO: 3569617 - DNA, 25 bp, Homo sapien
gaagtgggaattgctgccctgcagc

SEQ ID NO: 3569618 - DNA, 25 bp, Homo sapien
tgcaaagatgcccttgagaggaagt

SEQ ID NO: 3569619 - DNA, 25 bp, Homo sapien
gagactctccagggattctaccttg

SEQ ID NO: 3569620 - DNA, 25 bp, Homo sapien
tctccagggacgctggtgccgtctg

SEQ ID NO: 3569621 - DNA, 25 bp, Homo sapien
atgttgatgatctgcgtggtgcgcc

SEQ ID NO: 3569622 - DNA, 25 bp, Homo sapien
gtcttacgacccgagtccaggaaga

SEQ ID NO: 3569623 - DNA, 25 bp, Homo sapien
tttcagaggtaccaaggaaagcact

SEQ ID NO: 3569624 - DNA, 25 bp, Homo sapien
tgaggtcaagcagcccatctctctg

SEQ ID NO: 3569625 - DNA, 25 bp, Homo sapien
atgtcgtcctgcttggcgagcccaa

SEQ ID NO: 3569626 - DNA, 25 bp, Homo sapien
tgaggtacagtccttcacgctagaa

SEQ ID NO: 3569627 - DNA, 25 bp, Homo sapien
tataattgtcatgagtgctttatgt

SEQ ID NO: 3569628 - DNA, 25 bp, Homo sapien
aaatcaggtataattgtcatgagtg

SEQ ID NO: 3569629 - DNA, 25 bp, Homo sapien
caggtataattgtcatgagtgcttt

SEQ ID NO: 3569630 - DNA, 25 bp, Homo sapien
aatcaggtataattgtcatgagtgc

SEQ ID NO: 3569631 - DNA, 25 bp, Homo sapien
gactcagcaggagcgatagcttcca

SEQ ID NO: 3569632 - DNA, 25 bp, Homo sapien
taatagtcggtctccaatgggcctt

SEQ ID NO: 3569633 - DNA, 25 bp, Homo sapien
cataaacagacatagggaggaaggc

SEQ ID NO: 3569634 - DNA, 25 bp, Homo sapien
tggcctcacatctcagcttagtcag

SEQ ID NO: 3569635 - DNA, 25 bp, Homo sapien
ggtgatactgagtggggtcccctcc

SEQ ID NO: 3569636 - DNA, 25 bp, Homo sapien
ctggtgatactgagtggggtcccct

SEQ ID NO: 3569637 - DNA, 25 bp, Homo sapien
ggggtcccctcctcgcagctcagat

SEQ ID NO: 3569638 - DNA, 25 bp, Homo sapien
gtcccctcctcgcagctcagatcca

SEQ ID NO: 3569639 - DNA, 25 bp, Homo sapien
tctcgaagctgctggtctgcatggg

SEQ ID NO: 3569640 - DNA, 25 bp, Homo sapien
gtctcgaagctgctggtctgcatgg

SEQ ID NO: 3569641 - DNA, 25 bp, Homo sapien
ctttaaagcatcagttgccacctgg

SEQ ID NO: 3569642 - DNA, 25 bp, Homo sapien
gcctggggctcacggctctttaaag

SEQ ID NO: 3569643 - DNA, 25 bp, Homo sapien
ggtgagtctgccagccaaattctta

SEQ ID NO: 3569644 - DNA, 25 bp, Homo sapien
ggagagtgaagaaaagcctaaggca

SEQ ID NO: 3569645 - DNA, 25 bp, Homo sapien
cagtggaataggagtgaggtgagtc

SEQ ID NO: 3569646 - DNA, 25 bp, Homo sapien
taaggcagcagtggcctaggaggag

SEQ ID NO: 3569647 - DNA, 25 bp, Homo sapien
agccgttcagcttcagctcgcagct

SEQ ID NO: 3569648 - DNA, 25 bp, Homo sapien
tggcggcaggtctgttcagcctcct

SEQ ID NO: 3569649 - DNA, 25 bp, Homo sapien
tcataatgtgttttggctttctcca

SEQ ID NO: 3569650 - DNA, 25 bp, Homo sapien
tagctcatggcccagccgttcagct

SEQ ID NO: 3569651 - DNA, 25 bp, Homo sapien
cttctggctcaactgggcttgcagt

SEQ ID NO: 3569652 - DNA, 25 bp, Homo sapien
cagcttatagtgctcagctgcctgc

SEQ ID NO: 3569653 - DNA, 25 bp, Homo sapien
gcagcttatagtgctcagctgcctg

SEQ ID NO: 3569654 - DNA, 25 bp, Homo sapien
ctgcagcttatagtgctcagctgcc

SEQ ID NO: 3569655 - DNA, 25 bp, Homo sapien
tcagagtcagccagtttcttactca

SEQ ID NO: 3569656 - DNA, 25 bp, Homo sapien
gtcagagtcagccagtttcttactc

SEQ ID NO: 3569657 - DNA, 25 bp, Homo sapien
tctctgaaatacctctagctgctcc

SEQ ID NO: 3569658 - DNA, 25 bp, Homo sapien
tctgaaatacctctagctgctccac

SEQ ID NO: 3569659 - DNA, 25 bp, Homo sapien
ctctgaaatacctctagctgctcca

SEQ ID NO: 3569660 - DNA, 25 bp, Homo sapien
tccgtcagggcatgagccagtgcct

SEQ ID NO: 3569661 - DNA, 25 bp, Homo sapien
ttgtaccttggtgcggaaggcagcc

SEQ ID NO: 3569662 - DNA, 25 bp, Homo sapien
gcacgtacggctgccaactcttgga

SEQ ID NO: 3569663 - DNA, 25 bp, Homo sapien
ctcttgcagggtagcgaactccaca

SEQ ID NO: 3569664 - DNA, 25 bp, Homo sapien
ttccttctcttggacctgctggagt

SEQ ID NO: 3569665 - DNA, 25 bp, Homo sapien
ccaggttggcatggagctcagctag

SEQ ID NO: 3569666 - DNA, 25 bp, Homo sapien
tgccggcttatctggagctcgctgt

SEQ ID NO: 3569667 - DNA, 25 bp, Homo sapien
gctcagagatacaacgctgctgctc

SEQ ID NO: 3569668 - DNA, 25 bp, Homo sapien
cctgtgtcactgaggtctgggcact

SEQ ID NO: 3569669 - DNA, 25 bp, Homo sapien
tgcaactctagctctgcaacctggg

SEQ ID NO: 3569670 - DNA, 25 bp, Homo sapien
gccaggcagctacttctttgacgag

SEQ ID NO: 3569671 - DNA, 25 bp, Homo sapien
cctgaaggatttcgttcttctcttc

SEQ ID NO: 3569672 - DNA, 25 bp, Homo sapien
tccctgaaggatttcgttcttctct

SEQ ID NO: 3569673 - DNA, 25 bp, Homo sapien
tttcgttcttctcttcaaggcattt

SEQ ID NO: 3569674 - DNA, 25 bp, Homo sapien
ggatttcgttcttctcttcaaggca

SEQ ID NO: 3569675 - DNA, 25 bp, Homo sapien
taaacatcagcaaacatggggccca

SEQ ID NO: 3569676 - DNA, 25 bp, Homo sapien
cagattaccacacaagccctcataa

SEQ ID NO: 3569677 - DNA, 25 bp, Homo sapien
cctcataaacatcagcaaacatggg

SEQ ID NO: 3569678 - DNA, 25 bp, Homo sapien
catcttgttaccaagatctcctttt

SEQ ID NO: 3569679 - DNA, 25 bp, Homo sapien
tgtgggaggcagctactaccattcc

SEQ ID NO: 3569680 - DNA, 25 bp, Homo sapien
aaaaggtgtactagactgaagccca

SEQ ID NO: 3569681 - DNA, 25 bp, Homo sapien
gatgaggcagctactcgttactact

SEQ ID NO: 3569682 - DNA, 25 bp, Homo sapien
gatccacatcttgtgaacagcagag

SEQ ID NO: 3569683 - DNA, 25 bp, Homo sapien
gcagatgactggcaaactcccgcag

SEQ ID NO: 3569684 - DNA, 25 bp, Homo sapien
tgcagatgactggcaaactcccgca

SEQ ID NO: 3569685 - DNA, 25 bp, Homo sapien
tctctagccactcctgagtggcctt

SEQ ID NO: 3569686 - DNA, 25 bp, Homo sapien
tagccactcctgagtggccttgctg

SEQ ID NO: 3569687 - DNA, 25 bp, Homo sapien
ggtcacagcccagtacccgggaagc

SEQ ID NO: 3569688 - DNA, 25 bp, Homo sapien
gacattcttctcaaccctctcttgg

SEQ ID NO: 3569689 - DNA, 25 bp, Homo sapien
cgccaattatgggataaggaaaggg

SEQ ID NO: 3569690 - DNA, 25 bp, Homo sapien
gactgaagcataagacaggtgctgg

SEQ ID NO: 3569691 - DNA, 25 bp, Homo sapien
gattttgcgatccatctggctcttc

SEQ ID NO: 3569692 - DNA, 25 bp, Homo sapien
tgcttcagggtttcatgcagccgca

SEQ ID NO: 3569693 - DNA, 25 bp, Homo sapien
cattctcctccgaaagctggttgat

SEQ ID NO: 3569694 - DNA, 25 bp, Homo sapien
gctggttgattttgcgatccatctg

SEQ ID NO: 3569695 - DNA, 25 bp, Homo sapien
gcgagggagggaagcagtgagaaga

SEQ ID NO: 3569696 - DNA, 25 bp, Homo sapien
gagtatgggttcctggctgggtgag

SEQ ID NO: 3569697 - DNA, 25 bp, Homo sapien
cctgggaaggaatgcagggagagct

SEQ ID NO: 3569698 - DNA, 25 bp, Homo sapien
tgagaagagagtatgggttcctggc

SEQ ID NO: 3569699 - DNA, 25 bp, Homo sapien
ttcagcagggctaggcggtcaatgc

SEQ ID NO: 3569700 - DNA, 25 bp, Homo sapien
gctaggcggtcaatgcgctgctgca

SEQ ID NO: 3569701 - DNA, 25 bp, Homo sapien
gctggccgcctgcttctcattcagc

SEQ ID NO: 3569702 - DNA, 25 bp, Homo sapien
gctgctgcatcatggctatctgtgc

SEQ ID NO: 3569703 - DNA, 25 bp, Homo sapien
tctcggtgaggagcttgcggttctc

SEQ ID NO: 3569704 - DNA, 25 bp, Homo sapien
ccttctcggtgaggagcttgcggtt

SEQ ID NO: 3569705 - DNA, 25 bp, Homo sapien
ctcggtgaggagcttgcggttctca

SEQ ID NO: 3569706 - DNA, 25 bp, Homo sapien
cttctcggtgaggagcttgcggttc

SEQ ID NO: 3569707 - DNA, 25 bp, Homo sapien
gcaggatatcacccatgggagaagc

SEQ ID NO: 3569708 - DNA, 25 bp, Homo sapien
aggatatcacccatgggagaagctg

SEQ ID NO: 3569709 - DNA, 25 bp, Homo sapien
agctgcttcttcagccgtctcatct

SEQ ID NO: 3569710 - DNA, 25 bp, Homo sapien
ctgcttcttcagccgtctcatctgg

SEQ ID NO: 3569711 - DNA, 25 bp, Homo sapien
ggaagcgaatctccctcttggcctg

SEQ ID NO: 3569712 - DNA, 25 bp, Homo sapien
tgtagctctaggaagcgaatctccc

SEQ ID NO: 3569713 - DNA, 25 bp, Homo sapien
gaggcaaccttctgtagctctagga

SEQ ID NO: 3569714 - DNA, 25 bp, Homo sapien
cactggaagaggaggcaaccttctg

SEQ ID NO: 3569715 - DNA, 25 bp, Homo sapien
ctagaacaggtagaaggcacaggag

SEQ ID NO: 3569716 - DNA, 25 bp, Homo sapien
cctcatggtccagcacaaatttaag

SEQ ID NO: 3569717 - DNA, 25 bp, Homo sapien
tctaggtcctcattaaggtttagcc

SEQ ID NO: 3569718 - DNA, 25 bp, Homo sapien
tttctgtaggaagttctctaggtcc

SEQ ID NO: 3569719 - DNA, 25 bp, Homo sapien
gtttagcccgtcctcatggtccagc

SEQ ID NO: 3569720 - DNA, 25 bp, Homo sapien
gtgaagcatgggctaggcctgctag

SEQ ID NO: 3569721 - DNA, 25 bp, Homo sapien
cctgctaggtggcatggaggcacaa

SEQ ID NO: 3569722 - DNA, 25 bp, Homo sapien
cagtatctgctgttcaaagaaaaac

SEQ ID NO: 3569723 - DNA, 25 bp, Homo sapien
catgggctaggcctgctaggtggca

SEQ ID NO: 3569724 - DNA, 25 bp, Homo sapien
agtggtataagagcagcatggtcat

SEQ ID NO: 3569725 - DNA, 25 bp, Homo sapien
gagctcatggtagagtggtataaga

SEQ ID NO: 3569726 - DNA, 25 bp, Homo sapien
gctcatggtagagtggtataagagc

SEQ ID NO: 3569727 - DNA, 25 bp, Homo sapien
ggagctcatggtagagtggtataag

SEQ ID NO: 3569728 - DNA, 25 bp, Homo sapien
ccttctgtgcagataccaggcattc

SEQ ID NO: 3569729 - DNA, 25 bp, Homo sapien
ttcgccagttccagctctgatccct

SEQ ID NO: 3569730 - DNA, 25 bp, Homo sapien
gatccctctagcaccttctgtgcag

SEQ ID NO: 3569731 - DNA, 25 bp, Homo sapien
cagataccaggcattctggggaaga

SEQ ID NO: 3569732 - DNA, 25 bp, Homo sapien
gacaacaacgtagaaaacagggtga

SEQ ID NO: 3569733 - DNA, 25 bp, Homo sapien
gcaatgacaacaacgtagaaaacag

SEQ ID NO: 3569734 - DNA, 25 bp, Homo sapien
aatgacaacaacgtagaaaacaggg

SEQ ID NO: 3569735 - DNA, 25 bp, Homo sapien
ctgcaatgacaacaacgtagaaaac

SEQ ID NO: 3569736 - DNA, 25 bp, Homo sapien
tggggctatgagatgtaggcctcct

SEQ ID NO: 3569737 - DNA, 25 bp, Homo sapien
aatggctatctctggtggggctatg

SEQ ID NO: 3569738 - DNA, 25 bp, Homo sapien
ttttccatctgaagtcagttctatc

SEQ ID NO: 3569739 - DNA, 25 bp, Homo sapien
gttctatcctgggtcaatccaaggg

SEQ ID NO: 3569740 - DNA, 25 bp, Homo sapien
tcaagatttgctgtccctcttcagt

SEQ ID NO: 3569741 - DNA, 25 bp, Homo sapien
tgcacacaaagtccagtctctctga

SEQ ID NO: 3569742 - DNA, 25 bp, Homo sapien
cagaaaactgcacacaaagtccagt

SEQ ID NO: 3569743 - DNA, 25 bp, Homo sapien
gtctctctgacaccggctgcttcaa

SEQ ID NO: 3569744 - DNA, 25 bp, Homo sapien
gcagcacagatgaacgggaagctat

SEQ ID NO: 3569745 - DNA, 25 bp, Homo sapien
aatggctcaactctaaactgtcagg

SEQ ID NO: 3569746 - DNA, 25 bp, Homo sapien
ctctgaagtgacagggtgaagttcc

SEQ ID NO: 3569747 - DNA, 25 bp, Homo sapien
gggaagctatattacaccatctgga

SEQ ID NO: 3569748 - DNA, 25 bp, Homo sapien
gggatttcaatatcgcctacctcca

SEQ ID NO: 3569749 - DNA, 25 bp, Homo sapien
taggttggcaccagtagcggtatca

SEQ ID NO: 3569750 - DNA, 25 bp, Homo sapien
cattgtcctggatctgagatggaga

SEQ ID NO: 3569751 - DNA, 25 bp, Homo sapien
tactgcagcctaggttcaggcaaca

SEQ ID NO: 3569752 - DNA, 25 bp, Homo sapien
ccacagggtcagccacgtgtagact

SEQ ID NO: 3569753 - DNA, 25 bp, Homo sapien
cagggtcagccacgtgtagactgtt

SEQ ID NO: 3569754 - DNA, 25 bp, Homo sapien
ggtcagccacgtgtagactgttcac

SEQ ID NO: 3569755 - DNA, 25 bp, Homo sapien
gggtcagccacgtgtagactgttca

SEQ ID NO: 3569756 - DNA, 25 bp, Homo sapien
aagagaggagtgcagccccccgggt

SEQ ID NO: 3569757 - DNA, 25 bp, Homo sapien
cagccccccgggtggcgtggagtgt

SEQ ID NO: 3569758 - DNA, 25 bp, Homo sapien
tgcagccccccgggtggcgtggagt

SEQ ID NO: 3569759 - DNA, 25 bp, Homo sapien
gagaggagtgcagccccccgggtgg

SEQ ID NO: 3569760 - DNA, 25 bp, Homo sapien
atgccagacagtcactccaatgcgc

SEQ ID NO: 3569761 - DNA, 25 bp, Homo sapien
gtgatgccagacagtcactccaatg

SEQ ID NO: 3569762 - DNA, 25 bp, Homo sapien
ttggtgatgccagacagtcactcca

SEQ ID NO: 3569763 - DNA, 25 bp, Homo sapien
gatgccagacagtcactccaatgcg

SEQ ID NO: 3569764 - DNA, 25 bp, Homo sapien
cctgcctgtagcctaagaattccat

SEQ ID NO: 3569765 - DNA, 25 bp, Homo sapien
tgcctgtagcctaagaattccatgc

SEQ ID NO: 3569766 - DNA, 25 bp, Homo sapien
agaattccatgctctgtaccccttt

SEQ ID NO: 3569767 - DNA, 25 bp, Homo sapien
cctgtagcctaagaattccatgctc

SEQ ID NO: 3569768 - DNA, 25 bp, Homo sapien
ccagtttggtccatctaaagggact

SEQ ID NO: 3569769 - DNA, 25 bp, Homo sapien
agtcctgggtagaccgtctggtcca

SEQ ID NO: 3569770 - DNA, 25 bp, Homo sapien
caagtccaaagagtttcctgaggtc

SEQ ID NO: 3569771 - DNA, 25 bp, Homo sapien
gactagcttgggctgaagcctcctc

SEQ ID NO: 3569772 - DNA, 25 bp, Homo sapien
cagactcctaaagccaaacgtatct

SEQ ID NO: 3569773 - DNA, 25 bp, Homo sapien
tacaggttttaatccgccattagca

SEQ ID NO: 3569774 - DNA, 25 bp, Homo sapien
ctaaagccaaacgtatctacaggtt

SEQ ID NO: 3569775 - DNA, 25 bp, Homo sapien
cgtatctacaggttttaatccgcca

SEQ ID NO: 3569776 - DNA, 25 bp, Homo sapien
cagtggaaagtaaccccacacacaa

SEQ ID NO: 3569777 - DNA, 25 bp, Homo sapien
ccagtggaaagtaaccccacacaca

SEQ ID NO: 3569778 - DNA, 25 bp, Homo sapien
gataattagatcagcccctgcctgg

SEQ ID NO: 3569779 - DNA, 25 bp, Homo sapien
caagggctgtcctgataattagatc

SEQ ID NO: 3569780 - DNA, 25 bp, Homo sapien
atctctctggacagcaatggaaggg

SEQ ID NO: 3569781 - DNA, 25 bp, Homo sapien
ggcagcagtaataatctgtccatct

SEQ ID NO: 3569782 - DNA, 25 bp, Homo sapien
gcctgcgctgtcctgtgctgcgtgc

SEQ ID NO: 3569783 - DNA, 25 bp, Homo sapien
gtcctgtgctgcgtgctattgtcgg

SEQ ID NO: 3569784 - DNA, 25 bp, Homo sapien
gctgtcctgtgctgcgtgctattgt

SEQ ID NO: 3569785 - DNA, 25 bp, Homo sapien
aggccaggatgccgtgctgtgcccg

SEQ ID NO: 3569786 - DNA, 25 bp, Homo sapien
tgtacgcgacactattctactgacc

SEQ ID NO: 3569787 - DNA, 25 bp, Homo sapien
cttttttagtgtcagagtcccagct

SEQ ID NO: 3569788 - DNA, 25 bp, Homo sapien
tactatagaggtcacaatcattggc

SEQ ID NO: 3569789 - DNA, 25 bp, Homo sapien
tccttgaactcggaatgagcagaga

SEQ ID NO: 3569790 - DNA, 25 bp, Homo sapien
attcctcaagggcataaccagttcc

SEQ ID NO: 3569791 - DNA, 25 bp, Homo sapien
ggccctgtaagctattcccactgta

SEQ ID NO: 3569792 - DNA, 25 bp, Homo sapien
cacactagggctccttaaatctgct

SEQ ID NO: 3569793 - DNA, 25 bp, Homo sapien
tcttgtcttcacatctagaatggaa

SEQ ID NO: 3569794 - DNA, 25 bp, Homo sapien
caggcttgagtgcaagtggcacaat

SEQ ID NO: 3569795 - DNA, 25 bp, Homo sapien
cagcctcctgggctcaaacaatcct

SEQ ID NO: 3569796 - DNA, 25 bp, Homo sapien
aatcctcccacctcagcctccggag

SEQ ID NO: 3569797 - DNA, 25 bp, Homo sapien
gcacaatcatggctcactgcagcct

SEQ ID NO: 3569798 - DNA, 25 bp, Homo sapien
ctttaaattcagtagggagggctgg

SEQ ID NO: 3569799 - DNA, 25 bp, Homo sapien
actttaaattcagtagggagggctg

SEQ ID NO: 3569800 - DNA, 25 bp, Homo sapien
aagaccaacctatccaacgtgacaa

SEQ ID NO: 3569801 - DNA, 25 bp, Homo sapien
caacctatccaacgtgacaaaatcc

SEQ ID NO: 3569802 - DNA, 25 bp, Homo sapien
ttagtatacatgctgccgaaccaag

SEQ ID NO: 3569803 - DNA, 25 bp, Homo sapien
tctctgtatcgttcctattttattt

SEQ ID NO: 3569804 - DNA, 25 bp, Homo sapien
ctgtatcgttcctattttattttgt

SEQ ID NO: 3569805 - DNA, 25 bp, Homo sapien
agtatacatgctgccgaaccaagca

SEQ ID NO: 3569806 - DNA, 25 bp, Homo sapien
gaggatccgagagctttacaaacac

SEQ ID NO: 3569807 - DNA, 25 bp, Homo sapien
ggccaaaactcctctaaaaacagca

SEQ ID NO: 3569808 - DNA, 25 bp, Homo sapien
cgtgccaggccgaaaatcagcttct

SEQ ID NO: 3569809 - DNA, 25 bp, Homo sapien
tgttggcagtgtctcaagggttaga

SEQ ID NO: 3569810 - DNA, 25 bp, Homo sapien
ccctctccagaggataatggctgat

SEQ ID NO: 3569811 - DNA, 25 bp, Homo sapien
aatgaggcagtgttggtaagtctga

SEQ ID NO: 3569812 - DNA, 25 bp, Homo sapien
ataatggctgattaatgaggcagtg

SEQ ID NO: 3569813 - DNA, 25 bp, Homo sapien
tttaccatggcctcattgtccctct

SEQ ID NO: 3569814 - DNA, 25 bp, Homo sapien
taacatccaacaggcccactcagtt

SEQ ID NO: 3569815 - DNA, 25 bp, Homo sapien
tataacatccaacaggcccactcag

SEQ ID NO: 3569816 - DNA, 25 bp, Homo sapien
aaacccagagaggattcattataac

SEQ ID NO: 3569817 - DNA, 25 bp, Homo sapien
gagaggattcattataacatccaac

SEQ ID NO: 3569818 - DNA, 25 bp, Homo sapien
aaaacgtagacaaaaacttatgcat

SEQ ID NO: 3569819 - DNA, 25 bp, Homo sapien
gatagactattatgcagccactaca

SEQ ID NO: 3569820 - DNA, 25 bp, Homo sapien
cagggcagaattagggtaaagactt

SEQ ID NO: 3569821 - DNA, 25 bp, Homo sapien
catttctgagttgtggaattatggg

SEQ ID NO: 3569822 - DNA, 25 bp, Homo sapien
gaggaatcaagttctcaaacatgag

SEQ ID NO: 3569823 - DNA, 25 bp, Homo sapien
taactgaggaatcaagttctcaaac

SEQ ID NO: 3569824 - DNA, 25 bp, Homo sapien
atactgtactgtaagaaccaggacc

SEQ ID NO: 3569825 - DNA, 25 bp, Homo sapien
ctgtactgtaagaaccaggaccacc

SEQ ID NO: 3569826 - DNA, 25 bp, Homo sapien
tagtcacagaatcttttgaccaggc

SEQ ID NO: 3569827 - DNA, 25 bp, Homo sapien
gaattgcaaatgattatacagtaac

SEQ ID NO: 3569828 - DNA, 25 bp, Homo sapien
ggaacaggttacagggcactacaat

SEQ ID NO: 3569829 - DNA, 25 bp, Homo sapien
aagactggagctaccaaaccatctg

SEQ ID NO: 3569830 - DNA, 25 bp, Homo sapien
ggactgcaatggctcctcagctgca

SEQ ID NO: 3569831 - DNA, 25 bp, Homo sapien
ttctggagatgggactgcaatggct

SEQ ID NO: 3569832 - DNA, 25 bp, Homo sapien
tgggattcatcttgattgatttggg

SEQ ID NO: 3569833 - DNA, 25 bp, Homo sapien
aagaactcttccaactctttctggg

SEQ ID NO: 3569834 - DNA, 25 bp, Homo sapien
ctccagcagtctggcttagaattag

SEQ ID NO: 3569835 - DNA, 25 bp, Homo sapien
gaacagggtgatctccagcagtctg

SEQ ID NO: 3569836 - DNA, 25 bp, Homo sapien
aacagggtgatctccagcagtctgg

SEQ ID NO: 3569837 - DNA, 25 bp, Homo sapien
ctccacacactagaacagggtgatc

SEQ ID NO: 3569838 - DNA, 25 bp, Homo sapien
tgggcaaccccagcgttctgtggat

SEQ ID NO: 3569839 - DNA, 25 bp, Homo sapien
aatgattattcattcccctaaccca

SEQ ID NO: 3569840 - DNA, 25 bp, Homo sapien
tgtggatcagacagcaagcagaagg

SEQ ID NO: 3569841 - DNA, 25 bp, Homo sapien
gctcagcctcacattatcctgggca

SEQ ID NO: 3569842 - DNA, 25 bp, Homo sapien
ctgcaaggctgaatcactggtattt

SEQ ID NO: 3569843 - DNA, 25 bp, Homo sapien
ggctgaatcactggtatttcctgtg

SEQ ID NO: 3569844 - DNA, 25 bp, Homo sapien
tcctcagctgcaataaggcagaaga

SEQ ID NO: 3569845 - DNA, 25 bp, Homo sapien
agtcctcagctgcaataaggcagaa

SEQ ID NO: 3569846 - DNA, 25 bp, Homo sapien
tgccctttcggactcggttatggag

SEQ ID NO: 3569847 - DNA, 25 bp, Homo sapien
cccatagattctgccctttcggact

SEQ ID NO: 3569848 - DNA, 25 bp, Homo sapien
tggaggaggccttccgctcgcagcg

SEQ ID NO: 3569849 - DNA, 25 bp, Homo sapien
gattctgccctttcggactcggtta

SEQ ID NO: 3569850 - DNA, 25 bp, Homo sapien
gcgctgtgagcgcacaattagttta

SEQ ID NO: 3569851 - DNA, 25 bp, Homo sapien
gctctgcctcgcgattctccggaat

SEQ ID NO: 3569852 - DNA, 25 bp, Homo sapien
tcttcgtgggctcgcgccagcgctg

SEQ ID NO: 3569853 - DNA, 25 bp, Homo sapien
tccggaatcgtacctcttcgtgggc

SEQ ID NO: 3569854 - DNA, 25 bp, Homo sapien
gaaattccagttccgaaacaaggca

SEQ ID NO: 3569855 - DNA, 25 bp, Homo sapien
cctgtcctcaagcttatagggagta

SEQ ID NO: 3569856 - DNA, 25 bp, Homo sapien
tgctggcatctgattacctcctggt

SEQ ID NO: 3569857 - DNA, 25 bp, Homo sapien
cctgatgccagatgtacaatagttc

SEQ ID NO: 3569858 - DNA, 25 bp, Homo sapien
ggcttactcatgtgtcggcagtcat

SEQ ID NO: 3569859 - DNA, 25 bp, Homo sapien
tgaacaaggtgtggactgaaacagc

SEQ ID NO: 3569860 - DNA, 25 bp, Homo sapien
aaacaagtcacatgtctggtcccag

SEQ ID NO: 3569861 - DNA, 25 bp, Homo sapien
tacttggaactggatgcaggctggt

SEQ ID NO: 3569862 - DNA, 25 bp, Homo sapien
gaagtctttaggaactgcactgggt

SEQ ID NO: 3569863 - DNA, 25 bp, Homo sapien
ggagctggtgctacacaaaatcaga

SEQ ID NO: 3569864 - DNA, 25 bp, Homo sapien
gcccatgggaccagttcataacaga

SEQ ID NO: 3569865 - DNA, 25 bp, Homo sapien
taattgacaatccatgcccatggga

SEQ ID NO: 3569866 - DNA, 25 bp, Homo sapien
tcaacagagggtgggtatcaagaca

SEQ ID NO: 3569867 - DNA, 25 bp, Homo sapien
aatgcctaatggtggagtttcagcc

SEQ ID NO: 3569868 - DNA, 25 bp, Homo sapien
gactcactggcttaactctgggcaa

SEQ ID NO: 3569869 - DNA, 25 bp, Homo sapien
tgtgattcacatacaaaccccttgg

SEQ ID NO: 3569870 - DNA, 25 bp, Homo sapien
tgtggagtcccagcaagtaggcaaa

SEQ ID NO: 3569871 - DNA, 25 bp, Homo sapien
agtactccactcactaaggcagcag

SEQ ID NO: 3569872 - DNA, 25 bp, Homo sapien
gagattcttcccatatgcttgcaga

SEQ ID NO: 3569873 - DNA, 25 bp, Homo sapien
cctaatctgactggccaaacatgag

SEQ ID NO: 3569874 - DNA, 25 bp, Homo sapien
ggtgtggtgatctcaatttaaccag

SEQ ID NO: 3569875 - DNA, 25 bp, Homo sapien
ggccttttctagtccaagatcccta

SEQ ID NO: 3569876 - DNA, 25 bp, Homo sapien
ggagctggagcatgacttggacact

SEQ ID NO: 3569877 - DNA, 25 bp, Homo sapien
gaatcgtagatcaccaaagctggaa

SEQ ID NO: 3569878 - DNA, 25 bp, Homo sapien
gatggcctatgatctctgaaaccag

SEQ ID NO: 3569879 - DNA, 25 bp, Homo sapien
tggagacgtgggtttaccacacagc

SEQ ID NO: 3569880 - DNA, 25 bp, Homo sapien
aatttatctaactctctgggcccct

SEQ ID NO: 3569881 - DNA, 25 bp, Homo sapien
ccagggtctgtagagatgcctcaca

SEQ ID NO: 3569882 - DNA, 25 bp, Homo sapien
caaaccctagtgaggtgcatgtgag

SEQ ID NO: 3569883 - DNA, 25 bp, Homo sapien
gcatgtgagcaccaagtcagggaga

SEQ ID NO: 3569884 - DNA, 25 bp, Homo sapien
ggtactgtataagccgcagtgaggc

SEQ ID NO: 3569885 - DNA, 25 bp, Homo sapien
gccagagcttcaaaggccagtccca

SEQ ID NO: 3569886 - DNA, 25 bp, Homo sapien
ttttgcgtccacacggatctgagaa

SEQ ID NO: 3569887 - DNA, 25 bp, Homo sapien
tcccaaactgtacaaccagctcctc

SEQ ID NO: 3569888 - DNA, 25 bp, Homo sapien
gcgtccacacggatctgagaaagtg

SEQ ID NO: 3569889 - DNA, 25 bp, Homo sapien
agctcctcttttgcgtccacacgga

SEQ ID NO: 3569890 - DNA, 25 bp, Homo sapien
tctgccataccctgggcagtgtgag

SEQ ID NO: 3569891 - DNA, 25 bp, Homo sapien
ctgccataccctgggcagtgtgaga

SEQ ID NO: 3569892 - DNA, 25 bp, Homo sapien
caggggcaggtgaggggtgtctcac

SEQ ID NO: 3569893 - DNA, 25 bp, Homo sapien
agtgtgagaagggtgggcaggggca

SEQ ID NO: 3569894 - DNA, 25 bp, Homo sapien
gctggtaagagacggcagcggtggc

SEQ ID NO: 3569895 - DNA, 25 bp, Homo sapien
agcggtggcagcttcttccaatggg

SEQ ID NO: 3569896 - DNA, 25 bp, Homo sapien
ctgctgcaaatcagagaacgggatg

SEQ ID NO: 3569897 - DNA, 25 bp, Homo sapien
atcagagaacgggatgggctcactg

SEQ ID NO: 3569898 - DNA, 25 bp, Homo sapien
acggtccatgtactcatgctgctcc

SEQ ID NO: 3569899 - DNA, 25 bp, Homo sapien
cctggcacggtccatgtactcatgc

SEQ ID NO: 3569900 - DNA, 25 bp, Homo sapien
cggtccatgtactcatgctgctcca

SEQ ID NO: 3569901 - DNA, 25 bp, Homo sapien
tgcctggcacggtccatgtactcat

SEQ ID NO: 3569902 - DNA, 25 bp, Homo sapien
tcggctccattgagagctttggtag

SEQ ID NO: 3569903 - DNA, 25 bp, Homo sapien
caggctgtggtagttgggctcggct

SEQ ID NO: 3569904 - DNA, 25 bp, Homo sapien
gctgtcttggcaaggatggaagaga

SEQ ID NO: 3569905 - DNA, 25 bp, Homo sapien
cagggcctgctcatcagtgcgagcg

SEQ ID NO: 3569906 - DNA, 25 bp, Homo sapien
ccgagtcctcgttctcgctgctgta

SEQ ID NO: 3569907 - DNA, 25 bp, Homo sapien
gagtcctcgttctcgctgctgtagc

SEQ ID NO: 3569908 - DNA, 25 bp, Homo sapien
agtcctcgttctcgctgctgtagca

SEQ ID NO: 3569909 - DNA, 25 bp, Homo sapien
tcctcgttctcgctgctgtagcagc

SEQ ID NO: 3569910 - DNA, 25 bp, Homo sapien
ttccggtcacatgacccgcggcggc

SEQ ID NO: 3569911 - DNA, 25 bp, Homo sapien
gagggacggcgtccgtgaggagccc

SEQ ID NO: 3569912 - DNA, 25 bp, Homo sapien
tcaggccgcgccgaggagggacggc

SEQ ID NO: 3569913 - DNA, 25 bp, Homo sapien
gaggagcccttccggtcacatgacc

SEQ ID NO: 3569914 - DNA, 25 bp, Homo sapien
tcaaaggaaccataatacacagtgg

SEQ ID NO: 3569915 - DNA, 25 bp, Homo sapien
tatctcaatcccagcataagtgctt

SEQ ID NO: 3569916 - DNA, 25 bp, Homo sapien
gggtagctgtctgcctggatttatc

SEQ ID NO: 3569917 - DNA, 25 bp, Homo sapien
cagagatgaatgagccacaaatgct

SEQ ID NO: 3569918 - DNA, 25 bp, Homo sapien
gacagcttgatggattctgggcaca

SEQ ID NO: 3569919 - DNA, 25 bp, Homo sapien
aaatctgaaagatagggtggttgtt

SEQ ID NO: 3569920 - DNA, 25 bp, Homo sapien
gcaaagccagccacatatacacatg

SEQ ID NO: 3569921 - DNA, 25 bp, Homo sapien
catggagaaagagcaacatttgaac

SEQ ID NO: 3569922 - DNA, 25 bp, Homo sapien
tatgctaagagctgtggccgctacc

SEQ ID NO: 3569923 - DNA, 25 bp, Homo sapien
tatcaggctgcttggtctcactagg

SEQ ID NO: 3569924 - DNA, 25 bp, Homo sapien
gccttcttactgtggagcgggaccc

SEQ ID NO: 3569925 - DNA, 25 bp, Homo sapien
cacgatgttacctgagggacctgca

SEQ ID NO: 3569926 - DNA, 25 bp, Homo sapien
gatgcagggtagtttgggctggcct

SEQ ID NO: 3569927 - DNA, 25 bp, Homo sapien
ggttgggatgcagggtagtttgggc

SEQ ID NO: 3569928 - DNA, 25 bp, Homo sapien
ggaggggccaaagagaccagatcct

SEQ ID NO: 3569929 - DNA, 25 bp, Homo sapien
gccaaagagaccagatcctggcagc

SEQ ID NO: 3569930 - DNA, 25 bp, Homo sapien
gatcctgttcgttgccttccatgtc

SEQ ID NO: 3569931 - DNA, 25 bp, Homo sapien
gtcctgatcctgttcgttgccttcc

SEQ ID NO: 3569932 - DNA, 25 bp, Homo sapien
tcctgatcctgttcgttgccttcca

SEQ ID NO: 3569933 - DNA, 25 bp, Homo sapien
ctgatcctgttcgttgccttccatg

SEQ ID NO: 3569934 - DNA, 25 bp, Homo sapien
atcatccggtgactcattgtagtca

SEQ ID NO: 3569935 - DNA, 25 bp, Homo sapien
ccatcatccggtgactcattgtagt

SEQ ID NO: 3569936 - DNA, 25 bp, Homo sapien
acctctccatcatccggtgactcat

SEQ ID NO: 3569937 - DNA, 25 bp, Homo sapien
ctccatcatccggtgactcattgta

SEQ ID NO: 3569938 - DNA, 25 bp, Homo sapien
cctcttcttcctcgtcatcatagtg

SEQ ID NO: 3569939 - DNA, 25 bp, Homo sapien
ctgcatatcctcatcatcctctgag

SEQ ID NO: 3569940 - DNA, 25 bp, Homo sapien
ctctgagtcctcttcactatcctca

SEQ ID NO: 3569941 - DNA, 25 bp, Homo sapien
gagtcctcttcactatcctcatcat

SEQ ID NO: 3569942 - DNA, 25 bp, Homo sapien
caggacagagcctgtaagccctaca

SEQ ID NO: 3569943 - DNA, 25 bp, Homo sapien
gcaggacagagcctgtaagccctac

SEQ ID NO: 3569944 - DNA, 25 bp, Homo sapien
ggacagagcctgtaagccctacagg

SEQ ID NO: 3569945 - DNA, 25 bp, Homo sapien
tgggcaggacagagcctgtaagccc

SEQ ID NO: 3569946 - DNA, 25 bp, Homo sapien
tgttgtctttctccgcgatgctttg

SEQ ID NO: 3569947 - DNA, 25 bp, Homo sapien
tggcttgccaataggaaccaggttg

SEQ ID NO: 3569948 - DNA, 25 bp, Homo sapien
gccaataggaaccaggttgttgtct

SEQ ID NO: 3569949 - DNA, 25 bp, Homo sapien
ctctgaggctggcttgccaatagga

SEQ ID NO: 3569950 - DNA, 25 bp, Homo sapien
ggtcgatccagattaaaccacagag

SEQ ID NO: 3569951 - DNA, 25 bp, Homo sapien
cacacagggtcgatccagattaaac

SEQ ID NO: 3569952 - DNA, 25 bp, Homo sapien
ctcttccacacagggtcgatccaga

SEQ ID NO: 3569953 - DNA, 25 bp, Homo sapien
cagggtcgatccagattaaaccaca

SEQ ID NO: 3569954 - DNA, 25 bp, Homo sapien
gctttgagtcctggctccaccactt

SEQ ID NO: 3569955 - DNA, 25 bp, Homo sapien
tggctttgagtcctggctccaccac

SEQ ID NO: 3569956 - DNA, 25 bp, Homo sapien
tttgagtcctggctccaccacttac

SEQ ID NO: 3569957 - DNA, 25 bp, Homo sapien
ctggctttgagtcctggctccacca

SEQ ID NO: 3569958 - DNA, 25 bp, Homo sapien
cctctctgagcctcagtgtcttcat

SEQ ID NO: 3569959 - DNA, 25 bp, Homo sapien
aacctctctgagcctcagtgtcttc

SEQ ID NO: 3569960 - DNA, 25 bp, Homo sapien
ctgtttgaccttggctgagtcactt

SEQ ID NO: 3569961 - DNA, 25 bp, Homo sapien
tagctgtttgaccttggctgagtca

SEQ ID NO: 3569962 - DNA, 25 bp, Homo sapien
cttaggacaggcgaactgaggccca

SEQ ID NO: 3569963 - DNA, 25 bp, Homo sapien
taatttatctgaccgacccagggcc

SEQ ID NO: 3569964 - DNA, 25 bp, Homo sapien
gcttagaattcctccgtgaaaggga

SEQ ID NO: 3569965 - DNA, 25 bp, Homo sapien
gaaaataatcgatgcctggtcctgc

SEQ ID NO: 3569966 - DNA, 25 bp, Homo sapien
ttctttgctcattacgataatgacc

SEQ ID NO: 3569967 - DNA, 25 bp, Homo sapien
ttacgataatgaccatgcagttgac

SEQ ID NO: 3569968 - DNA, 25 bp, Homo sapien
cagacagaaatttggccttataggg

SEQ ID NO: 3569969 - DNA, 25 bp, Homo sapien
tgcagttgaccaacagaaagaaagc

SEQ ID NO: 3569970 - DNA, 25 bp, Homo sapien
ggcgacccggaagcgcttcacccag

SEQ ID NO: 3569971 - DNA, 25 bp, Homo sapien
ccggcggcgacccggaagcgcttca

SEQ ID NO: 3569972 - DNA, 25 bp, Homo sapien
ggcggcgacccggaagcgcttcacc

SEQ ID NO: 3569973 - DNA, 25 bp, Homo sapien
cggcgacccggaagcgcttcaccca

SEQ ID NO: 3569974 - DNA, 25 bp, Homo sapien
ctgagcggaagaacccaccagaatc

SEQ ID NO: 3569975 - DNA, 25 bp, Homo sapien
agcggaagaacccaccagaatccgg

SEQ ID NO: 3569976 - DNA, 25 bp, Homo sapien
gaacccaccagaatccgggactcac

SEQ ID NO: 3569977 - DNA, 25 bp, Homo sapien
agaacccaccagaatccgggactca

SEQ ID NO: 3569978 - DNA, 25 bp, Homo sapien
tactatattccaggccttgctagaa

SEQ ID NO: 3569979 - DNA, 25 bp, Homo sapien
gtacacttagagatcgccctcgtca

SEQ ID NO: 3569980 - DNA, 25 bp, Homo sapien
gaatatggtcgcttccctggaagac

SEQ ID NO: 3569981 - DNA, 25 bp, Homo sapien
gaatgactagttagcctcaggcaca

SEQ ID NO: 3569982 - DNA, 25 bp, Homo sapien
ctgatgcctctgttctagtaacctc

SEQ ID NO: 3569983 - DNA, 25 bp, Homo sapien
tctagtaacctctgactcagcttcg

SEQ ID NO: 3569984 - DNA, 25 bp, Homo sapien
actcagcttcgcctttagagatact

SEQ ID NO: 3569985 - DNA, 25 bp, Homo sapien
cagcttcgcctttagagatactcat

SEQ ID NO: 3569986 - DNA, 25 bp, Homo sapien
gctttctggcaacagaggtccttca

SEQ ID NO: 3569987 - DNA, 25 bp, Homo sapien
cagaggtccttcaaacccaattcct

SEQ ID NO: 3569988 - DNA, 25 bp, Homo sapien
acccaattcctattaaactccatca

SEQ ID NO: 3569989 - DNA, 25 bp, Homo sapien
ccaattcctattaaactccatcact

SEQ ID NO: 3569990 - DNA, 25 bp, Homo sapien
tttcagggacagcagttatccgcat

SEQ ID NO: 3569991 - DNA, 25 bp, Homo sapien
gcctctttcagggacagcagttatc

SEQ ID NO: 3569992 - DNA, 25 bp, Homo sapien
tctttcagggacagcagttatccgc

SEQ ID NO: 3569993 - DNA, 25 bp, Homo sapien
cctctttcagggacagcagttatcc

SEQ ID NO: 3569994 - DNA, 25 bp, Homo sapien
tccagtactgtcctggccagatgtg

SEQ ID NO: 3569995 - DNA, 25 bp, Homo sapien
ttccagtactgtcctggccagatgt

SEQ ID NO: 3569996 - DNA, 25 bp, Homo sapien
aatggctgaaactacaagctcgcac

SEQ ID NO: 3569997 - DNA, 25 bp, Homo sapien
ggctgaaactacaagctcgcaccac

SEQ ID NO: 3569998 - DNA, 25 bp, Homo sapien
caaatggctgaaactacaagctcgc

SEQ ID NO: 3569999 - DNA, 25 bp, Homo sapien
tggctgaaactacaagctcgcacca

SEQ ID NO: 3570000 - DNA, 25 bp, Homo sapien
ccataaagtaagattcttataaact

SEQ ID NO: 3570001 - DNA, 25 bp, Homo sapien
cacaatttgttcaagccttcagctt

SEQ ID NO: 3570002 - DNA, 25 bp, Homo sapien
aaagattactaaaggcatataaact

SEQ ID NO: 3570003 - DNA, 25 bp, Homo sapien
tttttgtgaacgagcagattaatgc

SEQ ID NO: 3570004 - DNA, 25 bp, Homo sapien
gcataacatgacgagacaaggaaga

SEQ ID NO: 3570005 - DNA, 25 bp, Homo sapien
ctctggcataacatgacgagacaag

SEQ ID NO: 3570006 - DNA, 25 bp, Homo sapien
aatggccctgctactgtcctttgtg

SEQ ID NO: 3570007 - DNA, 25 bp, Homo sapien
acatgacgagacaaggaagaaaagc

SEQ ID NO: 3570008 - DNA, 25 bp, Homo sapien
tgaggacgaagaccgatctaaactg

SEQ ID NO: 3570009 - DNA, 25 bp, Homo sapien
tcagcacgaacttccagaggctcca

SEQ ID NO: 3570010 - DNA, 25 bp, Homo sapien
tgagagtcctgctagtacacgcttc

SEQ ID NO: 3570011 - DNA, 25 bp, Homo sapien
cctgctaacagggagcggtgttttg

SEQ ID NO: 3570012 - DNA, 25 bp, Homo sapien
tcctttacattgtctatgatgcaaa

SEQ ID NO: 3570013 - DNA, 25 bp, Homo sapien
taatcctttacattgtctatgatgc

SEQ ID NO: 3570014 - DNA, 25 bp, Homo sapien
acagcacttaatcctttacattgtc

SEQ ID NO: 3570015 - DNA, 25 bp, Homo sapien
tttacattgtctatgatgcaaagac

SEQ ID NO: 3570016 - DNA, 25 bp, Homo sapien
ggctgaagtgcagtggagtgaactc

SEQ ID NO: 3570017 - DNA, 25 bp, Homo sapien
tgaagtgcagtggagtgaactcggc

SEQ ID NO: 3570018 - DNA, 25 bp, Homo sapien
tccacctcccagttcaagcgattct

SEQ ID NO: 3570019 - DNA, 25 bp, Homo sapien
ccacctcccagttcaagcgattctc

SEQ ID NO: 3570020 - DNA, 25 bp, Homo sapien
tggccacaaatcatgtttatttctt

SEQ ID NO: 3570021 - DNA, 25 bp, Homo sapien
ctttcctggactacattagcagcca

SEQ ID NO: 3570022 - DNA, 25 bp, Homo sapien
tttcctggactacattagcagccag

SEQ ID NO: 3570023 - DNA, 25 bp, Homo sapien
tctctttcctggactacattagcag

SEQ ID NO: 3570024 - DNA, 25 bp, Homo sapien
cagatgatggctacatagaacctat

SEQ ID NO: 3570025 - DNA, 25 bp, Homo sapien
tacacgaggccagtcggacaagact

SEQ ID NO: 3570026 - DNA, 25 bp, Homo sapien
agagcgatagtgatatgctcaggct

SEQ ID NO: 3570027 - DNA, 25 bp, Homo sapien
gagagccttctcctacacgaggcca

SEQ ID NO: 3570028 - DNA, 25 bp, Homo sapien
taaaatctctggtcagacagatagg

SEQ ID NO: 3570029 - DNA, 25 bp, Homo sapien
gcaaccccaacgaggaagtggcgag

SEQ ID NO: 3570030 - DNA, 25 bp, Homo sapien
tgctggtgagatgcttcatgggact

SEQ ID NO: 3570031 - DNA, 25 bp, Homo sapien
aagtggcgaggttctatgctgcagc

SEQ ID NO: 3570032 - DNA, 25 bp, Homo sapien
tgccctcagcttggataaccaggct

SEQ ID NO: 3570033 - DNA, 25 bp, Homo sapien
ttcgcgctctgcgtcctgtgagtgg

SEQ ID NO: 3570034 - DNA, 25 bp, Homo sapien
agtcccgtttggatagggactgagt

SEQ ID NO: 3570035 - DNA, 25 bp, Homo sapien
gatgacgaaaaattcgggcattccc

SEQ ID NO: 3570036 - DNA, 25 bp, Homo sapien
gcattccacgttgtgtgcagtcccg

SEQ ID NO: 3570037 - DNA, 25 bp, Homo sapien
gcaaatgggctaaccaggcttctga

SEQ ID NO: 3570038 - DNA, 25 bp, Homo sapien
aaaagagctccctgttgcttctcag

SEQ ID NO: 3570039 - DNA, 25 bp, Homo sapien
gatttataggacactgggtacccag

SEQ ID NO: 3570040 - DNA, 25 bp, Homo sapien
tgcggaggcagaggatcttccatcc

SEQ ID NO: 3570041 - DNA, 25 bp, Homo sapien
gggacagggtcttgcaagcagcctc

SEQ ID NO: 3570042 - DNA, 25 bp, Homo sapien
ctctggggatgcacggcggcagggt

SEQ ID NO: 3570043 - DNA, 25 bp, Homo sapien
cctcctgggcagtcgtaagggttgc

SEQ ID NO: 3570044 - DNA, 25 bp, Homo sapien
ctcgcaggtctcagcccgggacagg

SEQ ID NO: 3570045 - DNA, 25 bp, Homo sapien
gggctgtgccgatcctccttgagga

SEQ ID NO: 3570046 - DNA, 25 bp, Homo sapien
catgtgataccgcatccaaagaagg

SEQ ID NO: 3570047 - DNA, 25 bp, Homo sapien
ggtataaagaactccgctctgctgg

SEQ ID NO: 3570048 - DNA, 25 bp, Homo sapien
gctttcctgatcaccagcgtaaggg

SEQ ID NO: 3570049 - DNA, 25 bp, Homo sapien
cggctgccaagccttaagtagttcg

SEQ ID NO: 3570050 - DNA, 25 bp, Homo sapien
accggcccacagtgcgcccttgagc

SEQ ID NO: 3570051 - DNA, 25 bp, Homo sapien
agagattggtcttcagggcggggcc

SEQ ID NO: 3570052 - DNA, 25 bp, Homo sapien
caagccttaagtagttcggccgctc

SEQ ID NO: 3570053 - DNA, 25 bp, Homo sapien
gcggcagcgaggcggtgctatcggg

SEQ ID NO: 3570054 - DNA, 25 bp, Homo sapien
ccggagcccagtgcgacgggcagcg

SEQ ID NO: 3570055 - DNA, 25 bp, Homo sapien
ccagtgcgacgggcagcgggctggg

SEQ ID NO: 3570056 - DNA, 25 bp, Homo sapien
gcgaggcggtgctatcgggcgtggg

SEQ ID NO: 3570057 - DNA, 25 bp, Homo sapien
tcgtcctcggaggagcagcgcgcct

SEQ ID NO: 3570058 - DNA, 25 bp, Homo sapien
ttggaatcgtcgtcctcggaggagc

SEQ ID NO: 3570059 - DNA, 25 bp, Homo sapien
gactccttggaatcgtcgtcctcgg

SEQ ID NO: 3570060 - DNA, 25 bp, Homo sapien
gtggactccttggaatcgtcgtcct

SEQ ID NO: 3570061 - DNA, 25 bp, Homo sapien
cgcgcgctcctgtttgcggaacttg

SEQ ID NO: 3570062 - DNA, 25 bp, Homo sapien
ccgccgcgcccttggcgctggccgc

SEQ ID NO: 3570063 - DNA, 25 bp, Homo sapien
ctcctgtttgcggaacttggcccgg

SEQ ID NO: 3570064 - DNA, 25 bp, Homo sapien
ctggccgcgcgctcctgtttgcgga

SEQ ID NO: 3570065 - DNA, 25 bp, Homo sapien
gcttctcaagcatcactcggaactt

SEQ ID NO: 3570066 - DNA, 25 bp, Homo sapien
tcaagcatcactcggaactttctgc

SEQ ID NO: 3570067 - DNA, 25 bp, Homo sapien
cctggcttctcaagcatcactcgga

SEQ ID NO: 3570068 - DNA, 25 bp, Homo sapien
tctcaagcatcactcggaactttct

SEQ ID NO: 3570069 - DNA, 25 bp, Homo sapien
catgcgcactctcgtacacacacgt

SEQ ID NO: 3570070 - DNA, 25 bp, Homo sapien
ttccatgcgcactctcgtacacaca

SEQ ID NO: 3570071 - DNA, 25 bp, Homo sapien
tccttccatgcgcactctcgtacac

SEQ ID NO: 3570072 - DNA, 25 bp, Homo sapien
tgcgcactctcgtacacacacgtgc

SEQ ID NO: 3570073 - DNA, 25 bp, Homo sapien
gctccttgagctgcgcgctggtgaa

SEQ ID NO: 3570074 - DNA, 25 bp, Homo sapien
tagtgggtctcagcgaaaacgcgct

SEQ ID NO: 3570075 - DNA, 25 bp, Homo sapien
tcagtgaggtcgatcttgagcgcca

SEQ ID NO: 3570076 - DNA, 25 bp, Homo sapien
gctcctcacgcgtgtaaatgtcggg

SEQ ID NO: 3570077 - DNA, 25 bp, Homo sapien
tatttccttgacctgaagggcacga

SEQ ID NO: 3570078 - DNA, 25 bp, Homo sapien
ctttattgcgggctacgggatctgg

SEQ ID NO: 3570079 - DNA, 25 bp, Homo sapien
tctaggaagcttcccgtctgggcag

SEQ ID NO: 3570080 - DNA, 25 bp, Homo sapien
ctacagaagggttcggtcccaggca

SEQ ID NO: 3570081 - DNA, 25 bp, Homo sapien
gggctgtattggaagccgccgggct

SEQ ID NO: 3570082 - DNA, 25 bp, Homo sapien
ctggtggtcgcgtagggcgccaagt

SEQ ID NO: 3570083 - DNA, 25 bp, Homo sapien
ccaagtgcgcagttggaggagccga

SEQ ID NO: 3570084 - DNA, 25 bp, Homo sapien
caaagtcgccgtaggcggacgcctc

SEQ ID NO: 3570085 - DNA, 25 bp, Homo sapien
tacgaattgaggtaggagtagtcca

SEQ ID NO: 3570086 - DNA, 25 bp, Homo sapien
cacgagtcgtacgaattgaggtagg

SEQ ID NO: 3570087 - DNA, 25 bp, Homo sapien
gccacgcacgagtcgtacgaattga

SEQ ID NO: 3570088 - DNA, 25 bp, Homo sapien
ggccgccacgcacgagtcgtacgaa

SEQ ID NO: 3570089 - DNA, 25 bp, Homo sapien
aggttcgagcgccaggctccgagga

SEQ ID NO: 3570090 - DNA, 25 bp, Homo sapien
ctctgagcgcccgagagtccgcccg

SEQ ID NO: 3570091 - DNA, 25 bp, Homo sapien
gtcggaagggaggttcgagcgccag

SEQ ID NO: 3570092 - DNA, 25 bp, Homo sapien
cgtcgcggccgcactcagcccgggt

SEQ ID NO: 3570093 - DNA, 25 bp, Homo sapien
gagtgccgtccaagaggtctgagta

SEQ ID NO: 3570094 - DNA, 25 bp, Homo sapien
ctgagagcattgtgcccctgtctgg

SEQ ID NO: 3570095 - DNA, 25 bp, Homo sapien
agcattgtgcccctgtctggccttt

SEQ ID NO: 3570096 - DNA, 25 bp, Homo sapien
ctgcccgagcaagagtgccgtccaa

SEQ ID NO: 3570097 - DNA, 25 bp, Homo sapien
ggcgctggcctcaaaagagaacatg

SEQ ID NO: 3570098 - DNA, 25 bp, Homo sapien
agcggcgctggcctcaaaagagaac

SEQ ID NO: 3570099 - DNA, 25 bp, Homo sapien
gcggcgctggcctcaaaagagaaca

SEQ ID NO: 3570100 - DNA, 25 bp, Homo sapien
gcagcggcgctggcctcaaaagaga

SEQ ID NO: 3570101 - DNA, 25 bp, Homo sapien
tgtcccggccatagcaatgcaacag

SEQ ID NO: 3570102 - DNA, 25 bp, Homo sapien
tgcaacagagtgtagggccaggaca

SEQ ID NO: 3570103 - DNA, 25 bp, Homo sapien
tagcaatgcaacagagtgtagggcc

SEQ ID NO: 3570104 - DNA, 25 bp, Homo sapien
cttgtcccggccatagcaatgcaac

SEQ ID NO: 3570105 - DNA, 25 bp, Homo sapien
tgactctgggctcccatggtcagga

SEQ ID NO: 3570106 - DNA, 25 bp, Homo sapien
tcagcacgtaggaggcatgcaggcc

SEQ ID NO: 3570107 - DNA, 25 bp, Homo sapien
cacagtgctcgaccgcctcagtcct

SEQ ID NO: 3570108 - DNA, 25 bp, Homo sapien
tccaccctcagcacgtaggaggcat

SEQ ID NO: 3570109 - DNA, 25 bp, Homo sapien
tgcaccgttacccagaactgggatc

SEQ ID NO: 3570110 - DNA, 25 bp, Homo sapien
gggctgcacaaggagttctccagca

SEQ ID NO: 3570111 - DNA, 25 bp, Homo sapien
tggggctgcacaaggagttctccag

SEQ ID NO: 3570112 - DNA, 25 bp, Homo sapien
ttacccagaactgggatccttccca

SEQ ID NO: 3570113 - DNA, 25 bp, Homo sapien
tgggttattggtaggttccagagtc

SEQ ID NO: 3570114 - DNA, 25 bp, Homo sapien
ggttttggcacagcgtctgcaacca

SEQ ID NO: 3570115 - DNA, 25 bp, Homo sapien
tattggtaggttccagagtccagct

SEQ ID NO: 3570116 - DNA, 25 bp, Homo sapien
gggttttggcacagcgtctgcaacc

SEQ ID NO: 3570117 - DNA, 25 bp, Homo sapien
gacggcacatcaacagccagcaggt

SEQ ID NO: 3570118 - DNA, 25 bp, Homo sapien
acggcacatcaacagccagcaggtg

SEQ ID NO: 3570119 - DNA, 25 bp, Homo sapien
tggacggcacatcaacagccagcag

SEQ ID NO: 3570120 - DNA, 25 bp, Homo sapien
ctggacggcacatcaacagccagca

SEQ ID NO: 3570121 - DNA, 25 bp, Homo sapien
gaacttgagccgcgctagccatggg

SEQ ID NO: 3570122 - DNA, 25 bp, Homo sapien
caaagaacttgagccgcgctagcca

SEQ ID NO: 3570123 - DNA, 25 bp, Homo sapien
gtcaaagaacttgagccgcgctagc

SEQ ID NO: 3570124 - DNA, 25 bp, Homo sapien
ttgagccgcgctagccatggggact

SEQ ID NO: 3570125 - DNA, 25 bp, Homo sapien
acttgggggactgtctgacatgagt

SEQ ID NO: 3570126 - DNA, 25 bp, Homo sapien
gaacaaagacttgggggactgtctg

SEQ ID NO: 3570127 - DNA, 25 bp, Homo sapien
tggaatgaagtgtccattgagaaca

SEQ ID NO: 3570128 - DNA, 25 bp, Homo sapien
ctggaatgaagtgtccattgagaac

SEQ ID NO: 3570129 - DNA, 25 bp, Homo sapien
tgaactttgcagtatctcccactag

SEQ ID NO: 3570130 - DNA, 25 bp, Homo sapien
taaaatgtgactgtgtaacctggct

SEQ ID NO: 3570131 - DNA, 25 bp, Homo sapien
tgatggtgagcatggccctatgact

SEQ ID NO: 3570132 - DNA, 25 bp, Homo sapien
tgctttggcccaagaacggtaatag

SEQ ID NO: 3570133 - DNA, 25 bp, Homo sapien
cagaagctgtacctgaagggatatt

SEQ ID NO: 3570134 - DNA, 25 bp, Homo sapien
catatttgagtaaaacaccaaggag

SEQ ID NO: 3570135 - DNA, 25 bp, Homo sapien
gatactctgttgttttgcaggccct

SEQ ID NO: 3570136 - DNA, 25 bp, Homo sapien
gcagaactgaaggatcatacagtaa

SEQ ID NO: 3570137 - DNA, 25 bp, Homo sapien
tcttttgcttagtccctctagctaa

SEQ ID NO: 3570138 - DNA, 25 bp, Homo sapien
tggcatgtaatcgttcatagcactc

SEQ ID NO: 3570139 - DNA, 25 bp, Homo sapien
cagtgcatcagttccagagctttca

SEQ ID NO: 3570140 - DNA, 25 bp, Homo sapien
gtagagtcactaataatgcccttgc

SEQ ID NO: 3570141 - DNA, 25 bp, Homo sapien
gcctgtgaccgacttcagagaagcc

SEQ ID NO: 3570142 - DNA, 25 bp, Homo sapien
gctgtcgcctgtgaccgacttcaga

SEQ ID NO: 3570143 - DNA, 25 bp, Homo sapien
gtgtacgtcctttcgccgtgaggaa

SEQ ID NO: 3570144 - DNA, 25 bp, Homo sapien
cgtgtagaacgtgtacgtcctttcg

SEQ ID NO: 3570145 - DNA, 25 bp, Homo sapien
gaaataggttatgtgtagaagagca

SEQ ID NO: 3570146 - DNA, 25 bp, Homo sapien
gttctgctcccttccagaaataggt

SEQ ID NO: 3570147 - DNA, 25 bp, Homo sapien
taaaataacatagcagtgttcccct

SEQ ID NO: 3570148 - DNA, 25 bp, Homo sapien
cattgctgtccctgaattgcccagt

SEQ ID NO: 3570149 - DNA, 25 bp, Homo sapien
aacaatacaaagaattcatgtacat

SEQ ID NO: 3570150 - DNA, 25 bp, Homo sapien
tacaaagaattcatgtacatcattc

SEQ ID NO: 3570151 - DNA, 25 bp, Homo sapien
gaattcatgtacatcattccctcag

SEQ ID NO: 3570152 - DNA, 25 bp, Homo sapien
ttcatgtacatcattccctcagatt

SEQ ID NO: 3570153 - DNA, 25 bp, Homo sapien
taggctatagcattctttctggcac

SEQ ID NO: 3570154 - DNA, 25 bp, Homo sapien
ctttgtaatcattcactgagctgca

SEQ ID NO: 3570155 - DNA, 25 bp, Homo sapien
tctatggccataggtgagattaggc

SEQ ID NO: 3570156 - DNA, 25 bp, Homo sapien
ccatcttatggtgctcaaaaaggat

SEQ ID NO: 3570157 - DNA, 25 bp, Homo sapien
ggcatgagacctgcttgaactggag

SEQ ID NO: 3570158 - DNA, 25 bp, Homo sapien
atgagacctgcttgaactggaggtg

SEQ ID NO: 3570159 - DNA, 25 bp, Homo sapien
gcatgagacctgcttgaactggagg

SEQ ID NO: 3570160 - DNA, 25 bp, Homo sapien
gaggcatgagacctgcttgaactgg

SEQ ID NO: 3570161 - DNA, 25 bp, Homo sapien
tgctgcattgtctcagagctcaaat

SEQ ID NO: 3570162 - DNA, 25 bp, Homo sapien
ttgctgcattgtctcagagctcaaa

SEQ ID NO: 3570163 - DNA, 25 bp, Homo sapien
gctgcattgtctcagagctcaaatc

SEQ ID NO: 3570164 - DNA, 25 bp, Homo sapien
cttgctgcattgtctcagagctcaa

SEQ ID NO: 3570165 - DNA, 25 bp, Homo sapien
caggttctgtgaatggctgaacagc

SEQ ID NO: 3570166 - DNA, 25 bp, Homo sapien
gatatgggtccaacaccacctagga

SEQ ID NO: 3570167 - DNA, 25 bp, Homo sapien
gcccactgagaagatctgcacttgc

SEQ ID NO: 3570168 - DNA, 25 bp, Homo sapien
acaagtaggacaagtgagctgagcc

SEQ ID NO: 3570169 - DNA, 25 bp, Homo sapien
tgcccctacatggcctccagagtgt

SEQ ID NO: 3570170 - DNA, 25 bp, Homo sapien
ctgcccctacatggcctccagagtg

SEQ ID NO: 3570171 - DNA, 25 bp, Homo sapien
tctgcccctacatggcctccagagt

SEQ ID NO: 3570172 - DNA, 25 bp, Homo sapien
tccgctaggaggcactaagaatagc

SEQ ID NO: 3570173 - DNA, 25 bp, Homo sapien
tgagcaggcctacaagcaatgacac

SEQ ID NO: 3570174 - DNA, 25 bp, Homo sapien
caaagttaccaccacctagtctagg

SEQ ID NO: 3570175 - DNA, 25 bp, Homo sapien
gggcaatgtcgaaacaacacagtgc

SEQ ID NO: 3570176 - DNA, 25 bp, Homo sapien
ggtgtccagaccctctgctttgtga

SEQ ID NO: 3570177 - DNA, 25 bp, Homo sapien
ccctctgctttgtgactaacatgca

SEQ ID NO: 3570178 - DNA, 25 bp, Homo sapien
gggacggtgtccagaccctctgctt

SEQ ID NO: 3570179 - DNA, 25 bp, Homo sapien
gggcttgaaacattggctggtctgt

SEQ ID NO: 3570180 - DNA, 25 bp, Homo sapien
catgtgggcagaggtcaaacccatg

SEQ ID NO: 3570181 - DNA, 25 bp, Homo sapien
gcatgtttattccaggctcgtttag

SEQ ID NO: 3570182 - DNA, 25 bp, Homo sapien
tagctggacgagcagtacagacagg

SEQ ID NO: 3570183 - DNA, 25 bp, Homo sapien
tgggcagaggtcaaacccatgatct

SEQ ID NO: 3570184 - DNA, 25 bp, Homo sapien
agcttcctaatgtctgcgatgttgg

SEQ ID NO: 3570185 - DNA, 25 bp, Homo sapien
tggtcttttgaaggaggcccccaca

SEQ ID NO: 3570186 - DNA, 25 bp, Homo sapien
tggttatctgggactgctgctcagt

SEQ ID NO: 3570187 - DNA, 25 bp, Homo sapien
gagctgagcttgcttggttatctgg

SEQ ID NO: 3570188 - DNA, 25 bp, Homo sapien
tggcctagtccccaaggctgacgaa

SEQ ID NO: 3570189 - DNA, 25 bp, Homo sapien
cataatatagtagcggaaacaggca

SEQ ID NO: 3570190 - DNA, 25 bp, Homo sapien
gggtaatgaaccagtcaggcctcct

SEQ ID NO: 3570191 - DNA, 25 bp, Homo sapien
gctgacgaaacatggtctggcctga

SEQ ID NO: 3570192 - DNA, 25 bp, Homo sapien
aggggcctttattggatggtgaggg

SEQ ID NO: 3570193 - DNA, 25 bp, Homo sapien
tgagggcacataggagcaggcaggt

SEQ ID NO: 3570194 - DNA, 25 bp, Homo sapien
gggcctttattggatggtgagggca

SEQ ID NO: 3570195 - DNA, 25 bp, Homo sapien
gagggcacataggagcaggcaggtg

SEQ ID NO: 3570196 - DNA, 25 bp, Homo sapien
tggtgcccggatgtccagtctgcga

SEQ ID NO: 3570197 - DNA, 25 bp, Homo sapien
ccttgtcgatgatctccagacgcag

SEQ ID NO: 3570198 - DNA, 25 bp, Homo sapien
aggtcctgctcataggctgctgcca

SEQ ID NO: 3570199 - DNA, 25 bp, Homo sapien
agctggttcaccacacggcgttcta

SEQ ID NO: 3570200 - DNA, 25 bp, Homo sapien
attgtagccgtcgaccagcacatct

SEQ ID NO: 3570201 - DNA, 25 bp, Homo sapien
ctcatgtttgatggagcgggcgcca

SEQ ID NO: 3570202 - DNA, 25 bp, Homo sapien
cccagagcagcgtgatgttgtgcct

SEQ ID NO: 3570203 - DNA, 25 bp, Homo sapien
gagcgggcgccatagtgcacattgt

SEQ ID NO: 3570204 - DNA, 25 bp, Homo sapien
ccagaaactcatccctccggaagtg

SEQ ID NO: 3570205 - DNA, 25 bp, Homo sapien
ttgacgagttggatgagctccgagt

SEQ ID NO: 3570206 - DNA, 25 bp, Homo sapien
tttagttccttgttgacgagttgga

SEQ ID NO: 3570207 - DNA, 25 bp, Homo sapien
gacgatctcattgatccgtcccaga

SEQ ID NO: 3570208 - DNA, 25 bp, Homo sapien
ggaagtgccaagaaagacctcttac

SEQ ID NO: 3570209 - DNA, 25 bp, Homo sapien
cttaggctccagcaggaagtgccaa

SEQ ID NO: 3570210 - DNA, 25 bp, Homo sapien
gctccagcaggaagtgccaagaaag

SEQ ID NO: 3570211 - DNA, 25 bp, Homo sapien
ccagcaggaagtgccaagaaagacc

SEQ ID NO: 3570212 - DNA, 25 bp, Homo sapien
caggatagggcgaatcacattctcc

SEQ ID NO: 3570213 - DNA, 25 bp, Homo sapien
agttctttgagatggtgatcttgtc

SEQ ID NO: 3570214 - DNA, 25 bp, Homo sapien
tcaggatagggcgaatcacattctc

SEQ ID NO: 3570215 - DNA, 25 bp, Homo sapien
gatcttgtcacttatctggacatcc

SEQ ID NO: 3570216 - DNA, 25 bp, Homo sapien
tcacccaacagacttgaggctttct

SEQ ID NO: 3570217 - DNA, 25 bp, Homo sapien
cttatcacccaacagacttgaggct

SEQ ID NO: 3570218 - DNA, 25 bp, Homo sapien
ccaacagacttgaggctttcttgaa

SEQ ID NO: 3570219 - DNA, 25 bp, Homo sapien
tatcacccaacagacttgaggcttt

SEQ ID NO: 3570220 - DNA, 25 bp, Homo sapien
tgtgcgatctcgtcgctggccacat

SEQ ID NO: 3570221 - DNA, 25 bp, Homo sapien
tacggttacggctcatctccaaagc

SEQ ID NO: 3570222 - DNA, 25 bp, Homo sapien
cagctgcagcgcgtgctgtgcgatc

SEQ ID NO: 3570223 - DNA, 25 bp, Homo sapien
gatggcgtccttgcaatcaatggtc

SEQ ID NO: 3570224 - DNA, 25 bp, Homo sapien
tgagcacatctggatgggccttgtc

SEQ ID NO: 3570225 - DNA, 25 bp, Homo sapien
gctgcagcatgatggtgagcacatc

SEQ ID NO: 3570226 - DNA, 25 bp, Homo sapien
gggcactgcttcaacttcttggtca

SEQ ID NO: 3570227 - DNA, 25 bp, Homo sapien
ggtggagacccaataaacttggcca

SEQ ID NO: 3570228 - DNA, 25 bp, Homo sapien
aggaaggaaacatgctaggaaggcc

SEQ ID NO: 3570229 - DNA, 25 bp, Homo sapien
gctcctggaactcggacatgtccag

SEQ ID NO: 3570230 - DNA, 25 bp, Homo sapien
cggacatgtccagcctgatgaagcc

SEQ ID NO: 3570231 - DNA, 25 bp, Homo sapien
tggaactcggacatgtccagcctga

SEQ ID NO: 3570232 - DNA, 25 bp, Homo sapien
gaactcggacatgtccagcctgatg

SEQ ID NO: 3570233 - DNA, 25 bp, Homo sapien
ctgtgtggaaacaagcaagtaccaa

SEQ ID NO: 3570234 - DNA, 25 bp, Homo sapien
tttgtgcatatatttggctgtctgc

SEQ ID NO: 3570235 - DNA, 25 bp, Homo sapien
ctttgtgcatatatttggctgtctg

SEQ ID NO: 3570236 - DNA, 25 bp, Homo sapien
gctgtcagacttgggccgggcacta

SEQ ID NO: 3570237 - DNA, 25 bp, Homo sapien
agacttgggccgggcactaccctag

SEQ ID NO: 3570238 - DNA, 25 bp, Homo sapien
ttgggccgggcactaccctagctct

SEQ ID NO: 3570239 - DNA, 25 bp, Homo sapien
gcactaccctagctctctgtcccca

SEQ ID NO: 3570240 - DNA, 25 bp, Homo sapien
ttcatcgtaccagccattctccttc

SEQ ID NO: 3570241 - DNA, 25 bp, Homo sapien
accagagggtgttcttcatcgtacc

SEQ ID NO: 3570242 - DNA, 25 bp, Homo sapien
ctattccagatgatcccaagaagag

SEQ ID NO: 3570243 - DNA, 25 bp, Homo sapien
gaggaagaccagagggtgttcttca

SEQ ID NO: 3570244 - DNA, 25 bp, Homo sapien
gccaaccattaagcaattccaactc

SEQ ID NO: 3570245 - DNA, 25 bp, Homo sapien
tctgcccgacctagggcatgagtcc

SEQ ID NO: 3570246 - DNA, 25 bp, Homo sapien
ctggtcaattctgcccgacctaggg

SEQ ID NO: 3570247 - DNA, 25 bp, Homo sapien
aaatgccaaccattaagcaattcca

SEQ ID NO: 3570248 - DNA, 25 bp, Homo sapien
gctctcctggccaatgatgtgctcc

SEQ ID NO: 3570249 - DNA, 25 bp, Homo sapien
agcacccactgtggcgatggcgctc

SEQ ID NO: 3570250 - DNA, 25 bp, Homo sapien
cactgtggcgatggcgctctcctgg

SEQ ID NO: 3570251 - DNA, 25 bp, Homo sapien
tgctcctttagtcgctgctccaggg

SEQ ID NO: 3570252 - DNA, 25 bp, Homo sapien
cccgctcagcacttaggtccactgg

SEQ ID NO: 3570253 - DNA, 25 bp, Homo sapien
gccgacttcagccatagatctgctt

SEQ ID NO: 3570254 - DNA, 25 bp, Homo sapien
cttcagccatagatctgctttttcc

SEQ ID NO: 3570255 - DNA, 25 bp, Homo sapien
ggctctgccgacttcagccatagat

SEQ ID NO: 3570256 - DNA, 25 bp, Homo sapien
gagccatcagcgaccagcttcccat

SEQ ID NO: 3570257 - DNA, 25 bp, Homo sapien
tattcatcatgggatagctccacat

SEQ ID NO: 3570258 - DNA, 25 bp, Homo sapien
gagcacgttcccctcagctgaatat

SEQ ID NO: 3570259 - DNA, 25 bp, Homo sapien
taaattcctcgtgagtctcggtgca

SEQ ID NO: 3570260 - DNA, 25 bp, Homo sapien
tctcggtgcagtgaggattgggagt

SEQ ID NO: 3570261 - DNA, 25 bp, Homo sapien
tatcagagctaagagtgcctgcctc

SEQ ID NO: 3570262 - DNA, 25 bp, Homo sapien
tgctgagagaactgaggaagccaac

SEQ ID NO: 3570263 - DNA, 25 bp, Homo sapien
cagccagatggcaaactcagggaca

SEQ ID NO: 3570264 - DNA, 25 bp, Homo sapien
tctgccaggaggtgatccacgcttt

SEQ ID NO: 3570265 - DNA, 25 bp, Homo sapien
ttggcttcagaagtcctcagaagct

SEQ ID NO: 3570266 - DNA, 25 bp, Homo sapien
tccaagggtgtgtgtcccatttcat

SEQ ID NO: 3570267 - DNA, 25 bp, Homo sapien
tccccttctcgggcataatccaagg

SEQ ID NO: 3570268 - DNA, 25 bp, Homo sapien
aatccaagggtgtgtgtcccatttc

SEQ ID NO: 3570269 - DNA, 25 bp, Homo sapien
tctctccgattacccagatcctgcc

SEQ ID NO: 3570270 - DNA, 25 bp, Homo sapien
ggtctctccgattacccagatcctg

SEQ ID NO: 3570271 - DNA, 25 bp, Homo sapien
ctgtggtctctccgattacccagat

SEQ ID NO: 3570272 - DNA, 25 bp, Homo sapien
gtggtctctccgattacccagatcc

SEQ ID NO: 3570273 - DNA, 25 bp, Homo sapien
taagctacagacattcagccagtcc

SEQ ID NO: 3570274 - DNA, 25 bp, Homo sapien
aagagttccaggcagtttgttactg

SEQ ID NO: 3570275 - DNA, 25 bp, Homo sapien
tgtacagctgggcattaggagatga

SEQ ID NO: 3570276 - DNA, 25 bp, Homo sapien
gaacaggagggatcgatacggaatt

SEQ ID NO: 3570277 - DNA, 25 bp, Homo sapien
cggcagcttttgttcatgcactaaa

SEQ ID NO: 3570278 - DNA, 25 bp, Homo sapien
acagccacagtctccgtagaaggcg

SEQ ID NO: 3570279 - DNA, 25 bp, Homo sapien
ttcaaacatgctaatcctacgtctg

SEQ ID NO: 3570280 - DNA, 25 bp, Homo sapien
catgctaatcctacgtctgcttcca

SEQ ID NO: 3570281 - DNA, 25 bp, Homo sapien
agggcacacaatgcccacacatctg

SEQ ID NO: 3570282 - DNA, 25 bp, Homo sapien
acatctggctaattcagttatgagg

SEQ ID NO: 3570283 - DNA, 25 bp, Homo sapien
gaggccaatcaatcttgatgggttg

SEQ ID NO: 3570284 - DNA, 25 bp, Homo sapien
aaagggcacacaatgcccacacatc

SEQ ID NO: 3570285 - DNA, 25 bp, Homo sapien
tttccatgatatgcaatatccatga

SEQ ID NO: 3570286 - DNA, 25 bp, Homo sapien
tccatgatatgcaatatccatgact

SEQ ID NO: 3570287 - DNA, 25 bp, Homo sapien
ttccatgatatgcaatatccatgac

SEQ ID NO: 3570288 - DNA, 25 bp, Homo sapien
ccatgatatgcaatatccatgactt

SEQ ID NO: 3570289 - DNA, 25 bp, Homo sapien
cggataccggccaggctcatctgag

SEQ ID NO: 3570290 - DNA, 25 bp, Homo sapien
ttggagccgattaaagccttgatga

SEQ ID NO: 3570291 - DNA, 25 bp, Homo sapien
tctccagctcaactatgcagtggct

SEQ ID NO: 3570292 - DNA, 25 bp, Homo sapien
agtggctcctcgatgtccacaggag

SEQ ID NO: 3570293 - DNA, 25 bp, Homo sapien
taactgctaacatggagggacttta

SEQ ID NO: 3570294 - DNA, 25 bp, Homo sapien
tctcgtatacttagagagttgtgca

SEQ ID NO: 3570295 - DNA, 25 bp, Homo sapien
caatttagaggaggtttctcgtata

SEQ ID NO: 3570296 - DNA, 25 bp, Homo sapien
tagtattcaatcacctgacacaagt

SEQ ID NO: 3570297 - DNA, 25 bp, Homo sapien
agggctcaattctctggaggaacct

SEQ ID NO: 3570298 - DNA, 25 bp, Homo sapien
ccttggagaatgagggctcaattct

SEQ ID NO: 3570299 - DNA, 25 bp, Homo sapien
tgtgtacgatggatgccttggagaa

SEQ ID NO: 3570300 - DNA, 25 bp, Homo sapien
gagaagttaattcctgtgtacgatg

SEQ ID NO: 3570301 - DNA, 25 bp, Homo sapien
tacaagtttggaggaggaagtatcg

SEQ ID NO: 3570302 - DNA, 25 bp, Homo sapien
tagaccagacgacgaagaaaggctt

SEQ ID NO: 3570303 - DNA, 25 bp, Homo sapien
ctgtacaagtttggaggaggaagta

SEQ ID NO: 3570304 - DNA, 25 bp, Homo sapien
gaggaagtatcggagtagaccagac

SEQ ID NO: 3570305 - DNA, 25 bp, Homo sapien
tgcaggccctgagtgacggcaactt

SEQ ID NO: 3570306 - DNA, 25 bp, Homo sapien
cctgagtgacggcaacttgttcagg

SEQ ID NO: 3570307 - DNA, 25 bp, Homo sapien
caggccctgagtgacggcaacttgt

SEQ ID NO: 3570308 - DNA, 25 bp, Homo sapien
ggccctgagtgacggcaacttgttc

SEQ ID NO: 3570309 - DNA, 25 bp, Homo sapien
ctctaggaggataacagggctctgg

SEQ ID NO: 3570310 - DNA, 25 bp, Homo sapien
tctctagctctaggaggataacagg

SEQ ID NO: 3570311 - DNA, 25 bp, Homo sapien
gaatagtgaggctgccaagtactct

SEQ ID NO: 3570312 - DNA, 25 bp, Homo sapien
aggcatctctagctctaggaggata

SEQ ID NO: 3570313 - DNA, 25 bp, Homo sapien
cacccctcctccacctctgctctca

SEQ ID NO: 3570314 - DNA, 25 bp, Homo sapien
accccacccctcctccacctctgct

SEQ ID NO: 3570315 - DNA, 25 bp, Homo sapien
acccctcctccacctctgctctcac

SEQ ID NO: 3570316 - DNA, 25 bp, Homo sapien
cccacccctcctccacctctgctct

SEQ ID NO: 3570317 - DNA, 25 bp, Homo sapien
gacagtgcggtagtcatcagcaaga

SEQ ID NO: 3570318 - DNA, 25 bp, Homo sapien
gaagtcatcctctcgggtgatcagg

SEQ ID NO: 3570319 - DNA, 25 bp, Homo sapien
gaaactggcgcggttgttcagcctg

SEQ ID NO: 3570320 - DNA, 25 bp, Homo sapien
caagaacagcatagtgcaaggccgt

SEQ ID NO: 3570321 - DNA, 25 bp, Homo sapien
aaatagatcagataaggtccctgac

SEQ ID NO: 3570322 - DNA, 25 bp, Homo sapien
tgaaatagatcagataaggtccctg

SEQ ID NO: 3570323 - DNA, 25 bp, Homo sapien
aatagatcagataaggtccctgacc

SEQ ID NO: 3570324 - DNA, 25 bp, Homo sapien
gaaatagatcagataaggtccctga

SEQ ID NO: 3570325 - DNA, 25 bp, Homo sapien
atattatacagagcagttccattac

SEQ ID NO: 3570326 - DNA, 25 bp, Homo sapien
gaaatattatacagagcagttccat

SEQ ID NO: 3570327 - DNA, 25 bp, Homo sapien
gagaccatccttggcatgtcctggg

SEQ ID NO: 3570328 - DNA, 25 bp, Homo sapien
taaaagagatagtcagatgagacca

SEQ ID NO: 3570329 - DNA, 25 bp, Homo sapien
tccagggcacttgtccactggtttg

SEQ ID NO: 3570330 - DNA, 25 bp, Homo sapien
gatgtgccggcttgcaccgtcctgt

SEQ ID NO: 3570331 - DNA, 25 bp, Homo sapien
cagcggggagtcctagccatctcct

SEQ ID NO: 3570332 - DNA, 25 bp, Homo sapien
tgtccactggtttgtgatgtgccgg

SEQ ID NO: 3570333 - DNA, 25 bp, Homo sapien
aaatcatctccaaggtttggatcag

SEQ ID NO: 3570334 - DNA, 25 bp, Homo sapien
ctccaaggtttggatcagccccagc

SEQ ID NO: 3570335 - DNA, 25 bp, Homo sapien
ccaaagaatggattccctgttcctt

SEQ ID NO: 3570336 - DNA, 25 bp, Homo sapien
tcatctccaaggtttggatcagccc

SEQ ID NO: 3570337 - DNA, 25 bp, Homo sapien
ttaccttcaacaggcacagtatctg

SEQ ID NO: 3570338 - DNA, 25 bp, Homo sapien
caacaggcacagtatctgattcaat

SEQ ID NO: 3570339 - DNA, 25 bp, Homo sapien
cattaccttcaacaggcacagtatc

SEQ ID NO: 3570340 - DNA, 25 bp, Homo sapien
ccttcaacaggcacagtatctgatt

SEQ ID NO: 3570341 - DNA, 25 bp, Homo sapien
cgtgtccaagcaaccacgtatgttg

SEQ ID NO: 3570342 - DNA, 25 bp, Homo sapien
aggctgtaggacgtgtccaagcaac

SEQ ID NO: 3570343 - DNA, 25 bp, Homo sapien
gggcctctccaggttcatgagtatt

SEQ ID NO: 3570344 - DNA, 25 bp, Homo sapien
cgtatgttgcccttggtcccagagg

SEQ ID NO: 3570345 - DNA, 25 bp, Homo sapien
ttcactgggaaaggtaggaggctcc

SEQ ID NO: 3570346 - DNA, 25 bp, Homo sapien
cttctggaatggtcaacagtcgtca

SEQ ID NO: 3570347 - DNA, 25 bp, Homo sapien
caaatgccatctgaaggagcttccc

SEQ ID NO: 3570348 - DNA, 25 bp, Homo sapien
caaagttgagcaaacaggcctggca

SEQ ID NO: 3570349 - DNA, 25 bp, Homo sapien
catgggttcgaatcaagtcgcccga

SEQ ID NO: 3570350 - DNA, 25 bp, Homo sapien
gagcggatactcagccattgtgtcc

SEQ ID NO: 3570351 - DNA, 25 bp, Homo sapien
cacacacgaactgggtgcatgggtt

SEQ ID NO: 3570352 - DNA, 25 bp, Homo sapien
cattgtgtccagttttaatcctgtg

SEQ ID NO: 3570353 - DNA, 25 bp, Homo sapien
tccagccaagtctgtgctttgcatt

SEQ ID NO: 3570354 - DNA, 25 bp, Homo sapien
ctgttgtttcggttgatggctgcca

SEQ ID NO: 3570355 - DNA, 25 bp, Homo sapien
ggctgccaccatgagtgctgtccag

SEQ ID NO: 3570356 - DNA, 25 bp, Homo sapien
gctgtccagccaagtctgtgctttg

SEQ ID NO: 3570357 - DNA, 25 bp, Homo sapien
attttcagtgtatggcttgacatct

SEQ ID NO: 3570358 - DNA, 25 bp, Homo sapien
ttcagtgtatggcttgacatctgca

SEQ ID NO: 3570359 - DNA, 25 bp, Homo sapien
cagtgtatggcttgacatctgcacc

SEQ ID NO: 3570360 - DNA, 25 bp, Homo sapien
agtgtatggcttgacatctgcacct

SEQ ID NO: 3570361 - DNA, 25 bp, Homo sapien
gagagctggatgttttggttgctct

SEQ ID NO: 3570362 - DNA, 25 bp, Homo sapien
atacttcctgattaagagagctgga

SEQ ID NO: 3570363 - DNA, 25 bp, Homo sapien
cttcctgattaagagagctggatgt

SEQ ID NO: 3570364 - DNA, 25 bp, Homo sapien
ttggttgctctgatgccatcattaa

SEQ ID NO: 3570365 - DNA, 25 bp, Homo sapien
aaggaaatgtgatctccaccgggag

SEQ ID NO: 3570366 - DNA, 25 bp, Homo sapien
caatcaatgttctccacgaccaggt

SEQ ID NO: 3570367 - DNA, 25 bp, Homo sapien
tcagctcagggctaggcacaaagca

SEQ ID NO: 3570368 - DNA, 25 bp, Homo sapien
gactcctagttagactgtgccaaga

SEQ ID NO: 3570369 - DNA, 25 bp, Homo sapien
tctgcttcccgcctttgcttagctt

SEQ ID NO: 3570370 - DNA, 25 bp, Homo sapien
tcaggagcatcaacatattccgcag

SEQ ID NO: 3570371 - DNA, 25 bp, Homo sapien
gagcatcaacatattccgcaggccc

SEQ ID NO: 3570372 - DNA, 25 bp, Homo sapien
ggagcatcaacatattccgcaggcc

SEQ ID NO: 3570373 - DNA, 25 bp, Homo sapien
caacaggtgattccagggtcagcaa

SEQ ID NO: 3570374 - DNA, 25 bp, Homo sapien
gcccttcgcagtagccaacaggtga

SEQ ID NO: 3570375 - DNA, 25 bp, Homo sapien
gagtggattcccaacattgctgctc

SEQ ID NO: 3570376 - DNA, 25 bp, Homo sapien
tcaatggaatatggtagtggcatcc

SEQ ID NO: 3570377 - DNA, 25 bp, Homo sapien
gcctttccatagatgccgacctgca

SEQ ID NO: 3570378 - DNA, 25 bp, Homo sapien
aagcctttccatagatgccgacctg

SEQ ID NO: 3570379 - DNA, 25 bp, Homo sapien
ctttccatagatgccgacctgcaac

SEQ ID NO: 3570380 - DNA, 25 bp, Homo sapien
cccaagcctttccatagatgccgac

SEQ ID NO: 3570381 - DNA, 25 bp, Homo sapien
tgacttcttgcatattgttggcacg

SEQ ID NO: 3570382 - DNA, 25 bp, Homo sapien
ttgcatattgttggcacgggcagct

SEQ ID NO: 3570383 - DNA, 25 bp, Homo sapien
catattgttggcacgggcagcttcc

SEQ ID NO: 3570384 - DNA, 25 bp, Homo sapien
ttggcacgggcagcttccaacaggg

SEQ ID NO: 3570385 - DNA, 25 bp, Homo sapien
catttggtatcgaagcgtcctccct

SEQ ID NO: 3570386 - DNA, 25 bp, Homo sapien
cagtagtcacattccggccggaagc

SEQ ID NO: 3570387 - DNA, 25 bp, Homo sapien
tcctgggagtgtttcttcgggacca

SEQ ID NO: 3570388 - DNA, 25 bp, Homo sapien
aacaaggccggcgatgttccagggc

SEQ ID NO: 3570389 - DNA, 25 bp, Homo sapien
gagcagccggaggagtagccgtggc

SEQ ID NO: 3570390 - DNA, 25 bp, Homo sapien
agccggaggagtagccgtggcgcca

SEQ ID NO: 3570391 - DNA, 25 bp, Homo sapien
gtagccgtggcgccagtgcttttct

SEQ ID NO: 3570392 - DNA, 25 bp, Homo sapien
ggaggagtagccgtggcgccagtgc

SEQ ID NO: 3570393 - DNA, 25 bp, Homo sapien
gttgcgcactacctcacgggagagg

SEQ ID NO: 3570394 - DNA, 25 bp, Homo sapien
gaggtagtccacagccctaagcctt

SEQ ID NO: 3570395 - DNA, 25 bp, Homo sapien
gcgcgttcgaagacgccgcgaacag

SEQ ID NO: 3570396 - DNA, 25 bp, Homo sapien
tgctgaccacgtccaacatggctgc

SEQ ID NO: 3570397 - DNA, 25 bp, Homo sapien
aatcgtgggcccactttccattcca

SEQ ID NO: 3570398 - DNA, 25 bp, Homo sapien
acaagcgagatcagatatttctcag

SEQ ID NO: 3570399 - DNA, 25 bp, Homo sapien
gaacattctgtgtcaacaagcgaga

SEQ ID NO: 3570400 - DNA, 25 bp, Homo sapien
ggtccttcgatatctgaacattctg

SEQ ID NO: 3570401 - DNA, 25 bp, Homo sapien
tgcccattggcaaccctttattctg

SEQ ID NO: 3570402 - DNA, 25 bp, Homo sapien
gctgcccattggcaaccctttattc

SEQ ID NO: 3570403 - DNA, 25 bp, Homo sapien
tgctgcccattggcaaccctttatt

SEQ ID NO: 3570404 - DNA, 25 bp, Homo sapien
cccattggcaaccctttattctgct

SEQ ID NO: 3570405 - DNA, 25 bp, Homo sapien
tccctgcagacctgcttcggagctt

SEQ ID NO: 3570406 - DNA, 25 bp, Homo sapien
gacctgcttcggagcttccatccat

SEQ ID NO: 3570407 - DNA, 25 bp, Homo sapien
tgcctccagggggtagtcctcagtt

SEQ ID NO: 3570408 - DNA, 25 bp, Homo sapien
ctccagggggtagtcctcagttttg

SEQ ID NO: 3570409 - DNA, 25 bp, Homo sapien
taaactctttctttgctgcagcacc

SEQ ID NO: 3570410 - DNA, 25 bp, Homo sapien
aaatctggctgtgccgtctatcaga

SEQ ID NO: 3570411 - DNA, 25 bp, Homo sapien
tatgcatcccaatcagttctgtagt

SEQ ID NO: 3570412 - DNA, 25 bp, Homo sapien
gactgatcttggtattccctcagag

SEQ ID NO: 3570413 - DNA, 25 bp, Homo sapien
taaattgtctcttatcggacttaaa

SEQ ID NO: 3570414 - DNA, 25 bp, Homo sapien
ttcagacagagcaagttgtaaattg

SEQ ID NO: 3570415 - DNA, 25 bp, Homo sapien
cggaaggggaatctctatagaatgt

SEQ ID NO: 3570416 - DNA, 25 bp, Homo sapien
acaaaggcggaaggggaatctctat

SEQ ID NO: 3570417 - DNA, 25 bp, Homo sapien
gcccacgggaccatatacgacagtt

SEQ ID NO: 3570418 - DNA, 25 bp, Homo sapien
tattctcatgtacaaagcggtcagc

SEQ ID NO: 3570419 - DNA, 25 bp, Homo sapien
cacaggtggatatggccttgaagag

SEQ ID NO: 3570420 - DNA, 25 bp, Homo sapien
gcatctctctaaaggcaactcagaa

SEQ ID NO: 3570421 - DNA, 25 bp, Homo sapien
atcagtatagtagtggtcctcaggg

SEQ ID NO: 3570422 - DNA, 25 bp, Homo sapien
tgccttagggttgcagaaacattcc

SEQ ID NO: 3570423 - DNA, 25 bp, Homo sapien
catggctggctcattcatacctggg

SEQ ID NO: 3570424 - DNA, 25 bp, Homo sapien
tgggactccgcagagcgatagagct

SEQ ID NO: 3570425 - DNA, 25 bp, Homo sapien
tcaagctgctcagacaaagaatggc

SEQ ID NO: 3570426 - DNA, 25 bp, Homo sapien
gagtagggcccactgctcattggtc

SEQ ID NO: 3570427 - DNA, 25 bp, Homo sapien
tctccgtgaggttggaagtcttgct

SEQ ID NO: 3570428 - DNA, 25 bp, Homo sapien
cattggtcacccctgtgctctcaga

SEQ ID NO: 3570429 - DNA, 25 bp, Homo sapien
cattgatgggggccctagtgccatc

SEQ ID NO: 3570430 - DNA, 25 bp, Homo sapien
cagcagccattgatgggggccctag

SEQ ID NO: 3570431 - DNA, 25 bp, Homo sapien
gccattgatgggggccctagtgcca

SEQ ID NO: 3570432 - DNA, 25 bp, Homo sapien
gccctagtgccatccagatcaggca

SEQ ID NO: 3570433 - DNA, 25 bp, Homo sapien
agtccagcgagttgttacttgggag

SEQ ID NO: 3570434 - DNA, 25 bp, Homo sapien
tccaggaagtccagcgagttgttac

SEQ ID NO: 3570435 - DNA, 25 bp, Homo sapien
ggaggccgcggatggtgaacttgtg

SEQ ID NO: 3570436 - DNA, 25 bp, Homo sapien
gtccagtgctcacggttggaggcca

SEQ ID NO: 3570437 - DNA, 25 bp, Homo sapien
gcattgcaatgtgctccatgaagct

SEQ ID NO: 3570438 - DNA, 25 bp, Homo sapien
gggatataggccttctcccggtcca

SEQ ID NO: 3570439 - DNA, 25 bp, Homo sapien
atctccatcggcctgttgcccatgg

SEQ ID NO: 3570440 - DNA, 25 bp, Homo sapien
ttgtagatgggcattgcaatgtgct

SEQ ID NO: 3570441 - DNA, 25 bp, Homo sapien
aggcatcgagtcgtcaggcctgtcc

SEQ ID NO: 3570442 - DNA, 25 bp, Homo sapien
gcatcgagtcgtcaggcctgtccct

SEQ ID NO: 3570443 - DNA, 25 bp, Homo sapien
atcgagtcgtcaggcctgtccctct

SEQ ID NO: 3570444 - DNA, 25 bp, Homo sapien
ctgcaggcatcgagtcgtcaggcct

SEQ ID NO: 3570445 - DNA, 25 bp, Homo sapien
gtctccctgggagaagaattctttg

SEQ ID NO: 3570446 - DNA, 25 bp, Homo sapien
ccagccactgacttgctaggtctgt

SEQ ID NO: 3570447 - DNA, 25 bp, Homo sapien
ttccaccagccactgacttgctagg

SEQ ID NO: 3570448 - DNA, 25 bp, Homo sapien
cactgacttgctaggtctgttcccc

SEQ ID NO: 3570449 - DNA, 25 bp, Homo sapien
gacttgctaggtctgttcccctctc

SEQ ID NO: 3570450 - DNA, 25 bp, Homo sapien
cttccagcccttggtctggtcagag

SEQ ID NO: 3570451 - DNA, 25 bp, Homo sapien
tgcttgttgtttcggtcgtagccca

SEQ ID NO: 3570452 - DNA, 25 bp, Homo sapien
tccagcccttggtctggtcagagag

SEQ ID NO: 3570453 - DNA, 25 bp, Homo sapien
tctgtggtgctgcttgttgtttcgg

SEQ ID NO: 3570454 - DNA, 25 bp, Homo sapien
tcagatccagcatgcgctgatagtc

SEQ ID NO: 3570455 - DNA, 25 bp, Homo sapien
gccaagatgatgtcccgcatcagat

SEQ ID NO: 3570456 - DNA, 25 bp, Homo sapien
ttctggaggtccttgaagatgcgga

SEQ ID NO: 3570457 - DNA, 25 bp, Homo sapien
cttctggaggtccttgaagatgcgg

SEQ ID NO: 3570458 - DNA, 25 bp, Homo sapien
tgatcaaagatgttgcagccgtggg

SEQ ID NO: 3570459 - DNA, 25 bp, Homo sapien
gaggatggcgatggcctgagcaaag

SEQ ID NO: 3570460 - DNA, 25 bp, Homo sapien
caaagatgttgcagccgtgggtgtt

SEQ ID NO: 3570461 - DNA, 25 bp, Homo sapien
aaatgatcaaagatgttgcagccgt

SEQ ID NO: 3570462 - DNA, 25 bp, Homo sapien
cctcagagctgtagagcgcagccag

SEQ ID NO: 3570463 - DNA, 25 bp, Homo sapien
ccctcagagctgtagagcgcagcca

SEQ ID NO: 3570464 - DNA, 25 bp, Homo sapien
cgaggccacctggaaagagttgttt

SEQ ID NO: 3570465 - DNA, 25 bp, Homo sapien
ccaggtcatgacacatgcaggaaat

SEQ ID NO: 3570466 - DNA, 25 bp, Homo sapien
aggccacctggaaagagttgtttgt

SEQ ID NO: 3570467 - DNA, 25 bp, Homo sapien
aggtcatgacacatgcaggaaataa

SEQ ID NO: 3570468 - DNA, 25 bp, Homo sapien
cagaaaaggcgtgcatccagttgtg

SEQ ID NO: 3570469 - DNA, 25 bp, Homo sapien
gatcccggtagcccttcttcaccat

SEQ ID NO: 3570470 - DNA, 25 bp, Homo sapien
tcccggtagcccttcttcaccatca

SEQ ID NO: 3570471 - DNA, 25 bp, Homo sapien
agacagaaaaggcgtgcatccagtt

SEQ ID NO: 3570472 - DNA, 25 bp, Homo sapien
agggtcgggcagtcaattttgtagt

SEQ ID NO: 3570473 - DNA, 25 bp, Homo sapien
gccagggtcgggcagtcaattttgt

SEQ ID NO: 3570474 - DNA, 25 bp, Homo sapien
ccagggtcgggcagtcaattttgta

SEQ ID NO: 3570475 - DNA, 25 bp, Homo sapien
gtcgggcagtcaattttgtagttgt

SEQ ID NO: 3570476 - DNA, 25 bp, Homo sapien
ggcaggccctatggcttcctgatgg

SEQ ID NO: 3570477 - DNA, 25 bp, Homo sapien
gcatggttggtccaagagcagccct

SEQ ID NO: 3570478 - DNA, 25 bp, Homo sapien
tcctgatggcagactacaagcccct

SEQ ID NO: 3570479 - DNA, 25 bp, Homo sapien
tgaagcaaccgttctcggagctatg

SEQ ID NO: 3570480 - DNA, 25 bp, Homo sapien
ggtataggtgaaacttgcaaaattg

SEQ ID NO: 3570481 - DNA, 25 bp, Homo sapien
cccatcatggagaagtttggtatac

SEQ ID NO: 3570482 - DNA, 25 bp, Homo sapien
aattggagtcaatggcagccacagg

SEQ ID NO: 3570483 - DNA, 25 bp, Homo sapien
gtttggtatactcatcatcggagac

SEQ ID NO: 3570484 - DNA, 25 bp, Homo sapien
cttcatgtggtacatcatcatctca

SEQ ID NO: 3570485 - DNA, 25 bp, Homo sapien
gtggctgcgatactgagcctcattc

SEQ ID NO: 3570486 - DNA, 25 bp, Homo sapien
ggctgcgatactgagcctcattcac

SEQ ID NO: 3570487 - DNA, 25 bp, Homo sapien
tggctgcgatactgagcctcattca

SEQ ID NO: 3570488 - DNA, 25 bp, Homo sapien
atggagaaggccgtcgccaggtcct

SEQ ID NO: 3570489 - DNA, 25 bp, Homo sapien
gccaggtcctcgtcgaacttgctga

SEQ ID NO: 3570490 - DNA, 25 bp, Homo sapien
ttgctgaaccatggcccattgatct

SEQ ID NO: 3570491 - DNA, 25 bp, Homo sapien
tgctgatgccgcagtagatggagaa

SEQ ID NO: 3570492 - DNA, 25 bp, Homo sapien
tacgtcccaggcatggaacccgact

SEQ ID NO: 3570493 - DNA, 25 bp, Homo sapien
cgcaggttacgtacgtcccaggcat

SEQ ID NO: 3570494 - DNA, 25 bp, Homo sapien
tgccctcgcagtttccgcaggttac

SEQ ID NO: 3570495 - DNA, 25 bp, Homo sapien
gcagtttccgcaggttacgtacgtc

SEQ ID NO: 3570496 - DNA, 25 bp, Homo sapien
gatgttcaggatctggcccgtggtc

SEQ ID NO: 3570497 - DNA, 25 bp, Homo sapien
tgcggaagccggtgctgtcgtccac

SEQ ID NO: 3570498 - DNA, 25 bp, Homo sapien
gatcggccgggatgcggatctcata

SEQ ID NO: 3570499 - DNA, 25 bp, Homo sapien
tagaaaagcggatgggcatatgcgt

SEQ ID NO: 3570500 - DNA, 25 bp, Homo sapien
gctcattctgatccagcaggaacac

SEQ ID NO: 3570501 - DNA, 25 bp, Homo sapien
atcatccaccacgcccccgtcgaac

SEQ ID NO: 3570502 - DNA, 25 bp, Homo sapien
agctcattctgatccagcaggaaca

SEQ ID NO: 3570503 - DNA, 25 bp, Homo sapien
caccacgcccccgtcgaacaccttg

SEQ ID NO: 3570504 - DNA, 25 bp, Homo sapien
tcacgtcccataaggaggcaaaggc

SEQ ID NO: 3570505 - DNA, 25 bp, Homo sapien
cataaggaggcaaaggccggatttc

SEQ ID NO: 3570506 - DNA, 25 bp, Homo sapien
atcgccctcacgtcccataaggagg

SEQ ID NO: 3570507 - DNA, 25 bp, Homo sapien
cgtcccataaggaggcaaaggccgg

SEQ ID NO: 3570508 - DNA, 25 bp, Homo sapien
tttctggcctccgtgatgatctcct

SEQ ID NO: 3570509 - DNA, 25 bp, Homo sapien
gcctccgtgatgatctcctggagca

SEQ ID NO: 3570510 - DNA, 25 bp, Homo sapien
tctggcctccgtgatgatctcctgg

SEQ ID NO: 3570511 - DNA, 25 bp, Homo sapien
ctggcctccgtgatgatctcctgga

SEQ ID NO: 3570512 - DNA, 25 bp, Homo sapien
aggtgggtgaagaggttctttgcca

SEQ ID NO: 3570513 - DNA, 25 bp, Homo sapien
gggtgaagaggttctttgccacttg

SEQ ID NO: 3570514 - DNA, 25 bp, Homo sapien
agaggttctttgccacttggagaag

SEQ ID NO: 3570515 - DNA, 25 bp, Homo sapien
gaggttctttgccacttggagaaga

SEQ ID NO: 3570516 - DNA, 25 bp, Homo sapien
ccagggtgctggtgagcacggtgct

SEQ ID NO: 3570517 - DNA, 25 bp, Homo sapien
tggcactcacacttgagtttctgtt

SEQ ID NO: 3570518 - DNA, 25 bp, Homo sapien
ctggatcacatgctcgtcctcgtcg

SEQ ID NO: 3570519 - DNA, 25 bp, Homo sapien
gaagcagtgctggatcacatgctcg

SEQ ID NO: 3570520 - DNA, 25 bp, Homo sapien
tggccaccaaatgatttgtcactgg

SEQ ID NO: 3570521 - DNA, 25 bp, Homo sapien
tgcttgccatccagtgattcggatc

SEQ ID NO: 3570522 - DNA, 25 bp, Homo sapien
atttgtggtccctcagctagcccca

SEQ ID NO: 3570523 - DNA, 25 bp, Homo sapien
atcctgctcacgtcattcaatctgg

SEQ ID NO: 3570524 - DNA, 25 bp, Homo sapien
gctcacagcccaacatgctctgcag

SEQ ID NO: 3570525 - DNA, 25 bp, Homo sapien
cttctagcttgttgaaggcgcaggc

SEQ ID NO: 3570526 - DNA, 25 bp, Homo sapien
gcccggctgatgacagggacacaga

SEQ ID NO: 3570527 - DNA, 25 bp, Homo sapien
cacctggtcagtggcccggctgatg

SEQ ID NO: 3570528 - DNA, 25 bp, Homo sapien
ttcagctggatggacttcttgtctt

SEQ ID NO: 3570529 - DNA, 25 bp, Homo sapien
tcagctggatggacttcttgtcttc

SEQ ID NO: 3570530 - DNA, 25 bp, Homo sapien
ggaggtgaggtccttcagctggatg

SEQ ID NO: 3570531 - DNA, 25 bp, Homo sapien
cttcagctggatggacttcttgtct

SEQ ID NO: 3570532 - DNA, 25 bp, Homo sapien
tagaagatccaaatactccaggcag

SEQ ID NO: 3570533 - DNA, 25 bp, Homo sapien
taactacgagagagataagcagact

SEQ ID NO: 3570534 - DNA, 25 bp, Homo sapien
tccaaatggtggacagggtcagcat

SEQ ID NO: 3570535 - DNA, 25 bp, Homo sapien
gaagtgaacaggtcccaggtaagcc

SEQ ID NO: 3570536 - DNA, 25 bp, Homo sapien
tccccgagcactttgtctccgatga

SEQ ID NO: 3570537 - DNA, 25 bp, Homo sapien
ccccgagcactttgtctccgatgac

SEQ ID NO: 3570538 - DNA, 25 bp, Homo sapien
tcttccccgagcactttgtctccga

SEQ ID NO: 3570539 - DNA, 25 bp, Homo sapien
ttccccgagcactttgtctccgatg

SEQ ID NO: 3570540 - DNA, 25 bp, Homo sapien
gctggagattgtcctccgacaccag

SEQ ID NO: 3570541 - DNA, 25 bp, Homo sapien
ggcagcagcgggatgcccgggtctc

SEQ ID NO: 3570542 - DNA, 25 bp, Homo sapien
aggaggcagcagcgggatgcccggg

SEQ ID NO: 3570543 - DNA, 25 bp, Homo sapien
aagctggagattgtcctccgacacc

SEQ ID NO: 3570544 - DNA, 25 bp, Homo sapien
gggaagaggcatccaggtcgtagag

SEQ ID NO: 3570545 - DNA, 25 bp, Homo sapien
gaggcatccaggtcgtagagttccc

SEQ ID NO: 3570546 - DNA, 25 bp, Homo sapien
gaagaggcatccaggtcgtagagtt

SEQ ID NO: 3570547 - DNA, 25 bp, Homo sapien
agaggcatccaggtcgtagagttcc

SEQ ID NO: 3570548 - DNA, 25 bp, Homo sapien
tccgggtccctcaggcgccgctcag

SEQ ID NO: 3570549 - DNA, 25 bp, Homo sapien
ccgtgtccgggtccctcaggcgccg

SEQ ID NO: 3570550 - DNA, 25 bp, Homo sapien
ctccgtgtccgggtccctcaggcgc

SEQ ID NO: 3570551 - DNA, 25 bp, Homo sapien
gtgtccgggtccctcaggcgccgct

SEQ ID NO: 3570552 - DNA, 25 bp, Homo sapien
cgcacagttggaggatcttgcggtc

SEQ ID NO: 3570553 - DNA, 25 bp, Homo sapien
ggttctggacggctcggggagcctc

SEQ ID NO: 3570554 - DNA, 25 bp, Homo sapien
cttgcggtcgcggtcggtgtacgcc

SEQ ID NO: 3570555 - DNA, 25 bp, Homo sapien
tcgcggtcggtgtacgccgccccgc

SEQ ID NO: 3570556 - DNA, 25 bp, Homo sapien
taggtcagtcggtgctatcattatc

SEQ ID NO: 3570557 - DNA, 25 bp, Homo sapien
ccaccagctgtgataagggtcttca

SEQ ID NO: 3570558 - DNA, 25 bp, Homo sapien
tgaggcccagagacgtttagtgact

SEQ ID NO: 3570559 - DNA, 25 bp, Homo sapien
tggacttaggatagggttgcttccc

SEQ ID NO: 3570560 - DNA, 25 bp, Homo sapien
cattatcactcagctggccacagtg

SEQ ID NO: 3570561 - DNA, 25 bp, Homo sapien
tcattatcactcagctggccacagt

SEQ ID NO: 3570562 - DNA, 25 bp, Homo sapien
tcctcattatcactcagctggccac

SEQ ID NO: 3570563 - DNA, 25 bp, Homo sapien
ctcattatcactcagctggccacag

SEQ ID NO: 3570564 - DNA, 25 bp, Homo sapien
cctccccagtcagcagccaatgcct

SEQ ID NO: 3570565 - DNA, 25 bp, Homo sapien
acctgcagagctccccacagcgcct

SEQ ID NO: 3570566 - DNA, 25 bp, Homo sapien
gcagccaatgcctgcctcagctctg

SEQ ID NO: 3570567 - DNA, 25 bp, Homo sapien
cccacagcgcctgcactgggggctc

SEQ ID NO: 3570568 - DNA, 25 bp, Homo sapien
ctgctggcaacagtatttcatctgg

SEQ ID NO: 3570569 - DNA, 25 bp, Homo sapien
tttctctgtgatgaggtaccacttg

SEQ ID NO: 3570570 - DNA, 25 bp, Homo sapien
tgctggcaacagtatttcatctggc

SEQ ID NO: 3570571 - DNA, 25 bp, Homo sapien
ctcagtgcccctcaaagctgaccag

SEQ ID NO: 3570572 - DNA, 25 bp, Homo sapien
tcagtgcccctcaaagctgaccagc

SEQ ID NO: 3570573 - DNA, 25 bp, Homo sapien
cagtgcccctcaaagctgaccagcc

SEQ ID NO: 3570574 - DNA, 25 bp, Homo sapien
ctccttgtccgctagcggcatgacc

SEQ ID NO: 3570575 - DNA, 25 bp, Homo sapien
gcctccttgtccgctagcggcatga

SEQ ID NO: 3570576 - DNA, 25 bp, Homo sapien
ccttgtccgctagcggcatgaccag

SEQ ID NO: 3570577 - DNA, 25 bp, Homo sapien
cagcctccttgtccgctagcggcat

SEQ ID NO: 3570578 - DNA, 25 bp, Homo sapien
ccgcttctgggagatgatagcctcc

SEQ ID NO: 3570579 - DNA, 25 bp, Homo sapien
cccagccgcttctgggagatgatag

SEQ ID NO: 3570580 - DNA, 25 bp, Homo sapien
agccgcttctgggagatgatagcct

SEQ ID NO: 3570581 - DNA, 25 bp, Homo sapien
ccagccgcttctgggagatgatagc

SEQ ID NO: 3570582 - DNA, 25 bp, Homo sapien
ctttcacaggggccatggaaagaat

SEQ ID NO: 3570583 - DNA, 25 bp, Homo sapien
tttcacaggggccatggaaagaatt

SEQ ID NO: 3570584 - DNA, 25 bp, Homo sapien
ttcacaggggccatggaaagaattc

SEQ ID NO: 3570585 - DNA, 25 bp, Homo sapien
ctctacatgcccagacagctgaggg

SEQ ID NO: 3570586 - DNA, 25 bp, Homo sapien
aaaaatgcctggaccgcagatacgc

SEQ ID NO: 3570587 - DNA, 25 bp, Homo sapien
gaggagagcgaagttctttggaatt

SEQ ID NO: 3570588 - DNA, 25 bp, Homo sapien
cctggaggagtggagcttatatgaa

SEQ ID NO: 3570589 - DNA, 25 bp, Homo sapien
ctgggactcaccatccagtaggtag

SEQ ID NO: 3570590 - DNA, 25 bp, Homo sapien
ccatccagtaggtaggtgtagacag

SEQ ID NO: 3570591 - DNA, 25 bp, Homo sapien
gactcaccatccagtaggtaggtgt

SEQ ID NO: 3570592 - DNA, 25 bp, Homo sapien
ccagtaggtaggtgtagacagtttc

SEQ ID NO: 3570593 - DNA, 25 bp, Homo sapien
cacgttgcaggcctgaaatgtcgat

SEQ ID NO: 3570594 - DNA, 25 bp, Homo sapien
agggcctccttgacagcacgttgca

SEQ ID NO: 3570595 - DNA, 25 bp, Homo sapien
gcaggcctgaaatgtcgatgacaga

SEQ ID NO: 3570596 - DNA, 25 bp, Homo sapien
tccttgacagcacgttgcaggcctg

SEQ ID NO: 3570597 - DNA, 25 bp, Homo sapien
ggagggcagtagtgggccttctccc

SEQ ID NO: 3570598 - DNA, 25 bp, Homo sapien
ggaggagggcagtagtgggccttct

SEQ ID NO: 3570599 - DNA, 25 bp, Homo sapien
gagggcagtagtgggccttctcccc

SEQ ID NO: 3570600 - DNA, 25 bp, Homo sapien
ccaggaggagggcagtagtgggcct

SEQ ID NO: 3570601 - DNA, 25 bp, Homo sapien
ccttctctggaaggaagcctcacag

SEQ ID NO: 3570602 - DNA, 25 bp, Homo sapien
ctggcactggctccatgcctccttc

SEQ ID NO: 3570603 - DNA, 25 bp, Homo sapien
catgcctccttctctggaaggaagc

SEQ ID NO: 3570604 - DNA, 25 bp, Homo sapien
tggaaggaagcctcacagtgcccct

SEQ ID NO: 3570605 - DNA, 25 bp, Homo sapien
tggtgccttggatgtgcaaagagga

SEQ ID NO: 3570606 - DNA, 25 bp, Homo sapien
cctgtgagtgcgaagatcttgcagc

SEQ ID NO: 3570607 - DNA, 25 bp, Homo sapien
gcgaagatcttgcagccccagactt

SEQ ID NO: 3570608 - DNA, 25 bp, Homo sapien
aagaggaactgcctgtgagtgcgaa

SEQ ID NO: 3570609 - DNA, 25 bp, Homo sapien
tggagacacgtgcactgtagaatac

SEQ ID NO: 3570610 - DNA, 25 bp, Homo sapien
tccagcctccgagccacactggaga

SEQ ID NO: 3570611 - DNA, 25 bp, Homo sapien
agccacactggagacacgtgcactg

SEQ ID NO: 3570612 - DNA, 25 bp, Homo sapien
gttactccaacagggccgcgtctcc

SEQ ID NO: 3570613 - DNA, 25 bp, Homo sapien
cccattgtgtgtgggaggtaaatgc

SEQ ID NO: 3570614 - DNA, 25 bp, Homo sapien
gcggcctggcctagggttagtgtgg

SEQ ID NO: 3570615 - DNA, 25 bp, Homo sapien
taaatgctgaaggaggcggcctggc

SEQ ID NO: 3570616 - DNA, 25 bp, Homo sapien
tgtgcccattgtgtgtgggaggtaa

SEQ ID NO: 3570617 - DNA, 25 bp, Homo sapien
catgtactggacaagtctttggacc

SEQ ID NO: 3570618 - DNA, 25 bp, Homo sapien
gagagtgggctcagtttcagcacca

SEQ ID NO: 3570619 - DNA, 25 bp, Homo sapien
cctgcacggttaagagactttggcc

SEQ ID NO: 3570620 - DNA, 25 bp, Homo sapien
gctcctgtgcaaggtatagcctgca

SEQ ID NO: 3570621 - DNA, 25 bp, Homo sapien
tcctactggtgctcctgttatttgg

SEQ ID NO: 3570622 - DNA, 25 bp, Homo sapien
tactggtgctcctgttatttgggga

SEQ ID NO: 3570623 - DNA, 25 bp, Homo sapien
cctactggtgctcctgttatttggg

SEQ ID NO: 3570624 - DNA, 25 bp, Homo sapien
actggtgctcctgttatttggggac

SEQ ID NO: 3570625 - DNA, 25 bp, Homo sapien
cacctgctcggtgacacacagtcat

SEQ ID NO: 3570626 - DNA, 25 bp, Homo sapien
cacactcatcaaccaggatgacaca

SEQ ID NO: 3570627 - DNA, 25 bp, Homo sapien
gagtcctgcactgtgtcacactcat

SEQ ID NO: 3570628 - DNA, 25 bp, Homo sapien
caggatgacacaagaagacatgaca

SEQ ID NO: 3570629 - DNA, 25 bp, Homo sapien
gtcacacacgtggtagcatgcaatg

SEQ ID NO: 3570630 - DNA, 25 bp, Homo sapien
tcatggagtgcctcacagccagtgt

SEQ ID NO: 3570631 - DNA, 25 bp, Homo sapien
ggtgccttcccatgacagtgtccta

SEQ ID NO: 3570632 - DNA, 25 bp, Homo sapien
cacatgtaatgtcaggcccaagatc

SEQ ID NO: 3570633 - DNA, 25 bp, Homo sapien
ttacagcaactgaacaactgtggac

SEQ ID NO: 3570634 - DNA, 25 bp, Homo sapien
tgtggacaggaccagcccaatgctc

SEQ ID NO: 3570635 - DNA, 25 bp, Homo sapien
tgctccacgtgaagctgctgaaagc

SEQ ID NO: 3570636 - DNA, 25 bp, Homo sapien
gcccaatgctccacgtgaagctgct

SEQ ID NO: 3570637 - DNA, 25 bp, Homo sapien
cgctcccggcagtgatagacgttct

SEQ ID NO: 3570638 - DNA, 25 bp, Homo sapien
tggtctgagcaatgccctcgggtcc

SEQ ID NO: 3570639 - DNA, 25 bp, Homo sapien
gccacacacctaggaagcaagggag

SEQ ID NO: 3570640 - DNA, 25 bp, Homo sapien
gcttgtccactatatgaggccatct

SEQ ID NO: 3570641 - DNA, 25 bp, Homo sapien
tgtttgctcgtcaaggcccctttga

SEQ ID NO: 3570642 - DNA, 25 bp, Homo sapien
caaggcccctttgagcactgaagag

SEQ ID NO: 3570643 - DNA, 25 bp, Homo sapien
tcctctgtgccgatcttcaacatca

SEQ ID NO: 3570644 - DNA, 25 bp, Homo sapien
ttcaacatcagcagcccaccttgtt

SEQ ID NO: 3570645 - DNA, 25 bp, Homo sapien
agaaagatcctcctggtggccacgt

SEQ ID NO: 3570646 - DNA, 25 bp, Homo sapien
aaaggaggctagagctgatccccga

SEQ ID NO: 3570647 - DNA, 25 bp, Homo sapien
gcaagagagtgacaagttcaggtct

SEQ ID NO: 3570648 - DNA, 25 bp, Homo sapien
tccccgaaggatttaggaagctgag

SEQ ID NO: 3570649 - DNA, 25 bp, Homo sapien
acttctccctccactgagctctcac

SEQ ID NO: 3570650 - DNA, 25 bp, Homo sapien
cacttctccctccactgagctctca

SEQ ID NO: 3570651 - DNA, 25 bp, Homo sapien
ccacttctccctccactgagctctc

SEQ ID NO: 3570652 - DNA, 25 bp, Homo sapien
ccagtcggtcgtctctactccctgg

SEQ ID NO: 3570653 - DNA, 25 bp, Homo sapien
cctggctcctttgcaagggggtcca

SEQ ID NO: 3570654 - DNA, 25 bp, Homo sapien
cagtcggtcgtctctactccctggg

SEQ ID NO: 3570655 - DNA, 25 bp, Homo sapien
tccagtcggtcgtctctactccctg

SEQ ID NO: 3570656 - DNA, 25 bp, Homo sapien
agcagccagggacagccccctcccc

SEQ ID NO: 3570657 - DNA, 25 bp, Homo sapien
gagcagccagggacagccccctccc

SEQ ID NO: 3570658 - DNA, 25 bp, Homo sapien
gcagccagggacagccccctcccct

SEQ ID NO: 3570659 - DNA, 25 bp, Homo sapien
tgagcagccagggacagccccctcc

SEQ ID NO: 3570660 - DNA, 25 bp, Homo sapien
catagccgccagttagagaactgct

SEQ ID NO: 3570661 - DNA, 25 bp, Homo sapien
tggaatctgcaccaacccgccaata

SEQ ID NO: 3570662 - DNA, 25 bp, Homo sapien
gggcttctgattcccagacctctgc

SEQ ID NO: 3570663 - DNA, 25 bp, Homo sapien
gccaataacctaccagtgccctgga

SEQ ID NO: 3570664 - DNA, 25 bp, Homo sapien
aactaaatcgaggtcttcctggttg

SEQ ID NO: 3570665 - DNA, 25 bp, Homo sapien
tagaactaaatcgaggtcttcctgg

SEQ ID NO: 3570666 - DNA, 25 bp, Homo sapien
cacaaatagaactaaatcgaggtct

SEQ ID NO: 3570667 - DNA, 25 bp, Homo sapien
aatcgaggtcttcctggttgtctcc

SEQ ID NO: 3570668 - DNA, 25 bp, Homo sapien
ttggctgctcggctgctcagccccg

SEQ ID NO: 3570669 - DNA, 25 bp, Homo sapien
ttggagaagtgagtgcttggctgct

SEQ ID NO: 3570670 - DNA, 25 bp, Homo sapien
gggcgagggcaggtgaacttggaga

SEQ ID NO: 3570671 - DNA, 25 bp, Homo sapien
acacagagaaggggcgagggcaggt

SEQ ID NO: 3570672 - DNA, 25 bp, Homo sapien
caattaaattcaatacgcacgccac

SEQ ID NO: 3570673 - DNA, 25 bp, Homo sapien
ccaattaaattcaatacgcacgcca

SEQ ID NO: 3570674 - DNA, 25 bp, Homo sapien
tccaattaaattcaatacgcacgcc

SEQ ID NO: 3570675 - DNA, 25 bp, Homo sapien
catccaattaaattcaatacgcacg

SEQ ID NO: 3570676 - DNA, 25 bp, Homo sapien
gactcggagatctccaacacaggag

SEQ ID NO: 3570677 - DNA, 25 bp, Homo sapien
cggagatctccaacacaggagggag

SEQ ID NO: 3570678 - DNA, 25 bp, Homo sapien
aggaaagactcggagatctccaaca

SEQ ID NO: 3570679 - DNA, 25 bp, Homo sapien
aagactcggagatctccaacacagg

SEQ ID NO: 3570680 - DNA, 25 bp, Homo sapien
gagccccacatatatggtgaaggtt

SEQ ID NO: 3570681 - DNA, 25 bp, Homo sapien
ccgggagccccacatatatggtgaa

SEQ ID NO: 3570682 - DNA, 25 bp, Homo sapien
gggagccccacatatatggtgaagg

SEQ ID NO: 3570683 - DNA, 25 bp, Homo sapien
ggtgaaggttccgaggcgtgggcag

SEQ ID NO: 3570684 - DNA, 25 bp, Homo sapien
gaagctcagtgcttggggtggagcc

SEQ ID NO: 3570685 - DNA, 25 bp, Homo sapien
cccggatccgaaaggagttcagagt

SEQ ID NO: 3570686 - DNA, 25 bp, Homo sapien
gccccggatccgaaaggagttcaga

SEQ ID NO: 3570687 - DNA, 25 bp, Homo sapien
gagccccggatccgaaaggagttca

SEQ ID NO: 3570688 - DNA, 25 bp, Homo sapien
cgtccggcttgaggaagacctgctg

SEQ ID NO: 3570689 - DNA, 25 bp, Homo sapien
cggctcgtccggcttgaggaagacc

SEQ ID NO: 3570690 - DNA, 25 bp, Homo sapien
gcggcggctcgtccggcttgaggaa

SEQ ID NO: 3570691 - DNA, 25 bp, Homo sapien
tgcaggctgtcggcgcatggctgcg

SEQ ID NO: 3570692 - DNA, 25 bp, Homo sapien
tgaggaattggacaacagcgatgag

SEQ ID NO: 3570693 - DNA, 25 bp, Homo sapien
gaattggacaacagcgatgaggatg

SEQ ID NO: 3570694 - DNA, 25 bp, Homo sapien
ctgaggaattggacaacagcgatga

SEQ ID NO: 3570695 - DNA, 25 bp, Homo sapien
aggaattggacaacagcgatgagga

SEQ ID NO: 3570696 - DNA, 25 bp, Homo sapien
cccgccggcccggccgctgcgctcg

SEQ ID NO: 3570697 - DNA, 25 bp, Homo sapien
ccggcccggccgctgcgctcggtca

SEQ ID NO: 3570698 - DNA, 25 bp, Homo sapien
gcccgccggcccggccgctgcgctc

SEQ ID NO: 3570699 - DNA, 25 bp, Homo sapien
cgccggcccggccgctgcgctcggt

SEQ ID NO: 3570700 - DNA, 25 bp, Homo sapien
tacacccctatgcacaattggagtc

SEQ ID NO: 3570701 - DNA, 25 bp, Homo sapien
tcatcacggtctggaagagctcaac

SEQ ID NO: 3570702 - DNA, 25 bp, Homo sapien
taagtctggacaaagcctcctctca

SEQ ID NO: 3570703 - DNA, 25 bp, Homo sapien
gtctttccatagatacacgtccatg

SEQ ID NO: 3570704 - DNA, 25 bp, Homo sapien
cctgccattacgcccggctaatatt

SEQ ID NO: 3570705 - DNA, 25 bp, Homo sapien
ggtagaggcagggtttcaccatgtt

SEQ ID NO: 3570706 - DNA, 25 bp, Homo sapien
atttgtattttttggtagaggcagg

SEQ ID NO: 3570707 - DNA, 25 bp, Homo sapien
gggaggccccagtctatggcttcaa

SEQ ID NO: 3570708 - DNA, 25 bp, Homo sapien
agcacctggtttctatgcccctgag

SEQ ID NO: 3570709 - DNA, 25 bp, Homo sapien
gtctaagcaacagggaccaaggccc

SEQ ID NO: 3570710 - DNA, 25 bp, Homo sapien
cattctgtgaatgcgagaacctggg

SEQ ID NO: 3570711 - DNA, 25 bp, Homo sapien
aagagctgggccctaggaccaggaa

SEQ ID NO: 3570712 - DNA, 25 bp, Homo sapien
ttcctggctgcccaagtgacatgaa

SEQ ID NO: 3570713 - DNA, 25 bp, Homo sapien
tggtggcctgaagtccttagtgcag

SEQ ID NO: 3570714 - DNA, 25 bp, Homo sapien
ggaagccctcctacttctgagcctg

SEQ ID NO: 3570715 - DNA, 25 bp, Homo sapien
gcatgtccctcctgatgtcacagga

SEQ ID NO: 3570716 - DNA, 25 bp, Homo sapien
gttcatatgttgtgccttctcctgg

SEQ ID NO: 3570717 - DNA, 25 bp, Homo sapien
ctggcaggcatgtaccaggcatctt

SEQ ID NO: 3570718 - DNA, 25 bp, Homo sapien
gagggagttcatatgttgtgccttc

SEQ ID NO: 3570719 - DNA, 25 bp, Homo sapien
cgagaggtggcaaggggcaaggcca

SEQ ID NO: 3570720 - DNA, 25 bp, Homo sapien
ccgagaggtggcaaggggcaaggcc

SEQ ID NO: 3570721 - DNA, 25 bp, Homo sapien
tccgagaggtggcaaggggcaaggc

SEQ ID NO: 3570722 - DNA, 25 bp, Homo sapien
gctccgagaggtggcaaggggcaag

SEQ ID NO: 3570723 - DNA, 25 bp, Homo sapien
gaattccgggcaacagcatgtgcgg

SEQ ID NO: 3570724 - DNA, 25 bp, Homo sapien
gaaaggcccctatcaaggaggcaga

SEQ ID NO: 3570725 - DNA, 25 bp, Homo sapien
aagtgcaagtgcttccctgcgatgc

SEQ ID NO: 3570726 - DNA, 25 bp, Homo sapien
tgcgatgcgccacacatgtgctgaa

SEQ ID NO: 3570727 - DNA, 25 bp, Homo sapien
gccggtcgcgctgccgggtactgct

SEQ ID NO: 3570728 - DNA, 25 bp, Homo sapien
tcagccggtcgcgctgccgggtact

SEQ ID NO: 3570729 - DNA, 25 bp, Homo sapien
ggctcagccggtcgcgctgccgggt

SEQ ID NO: 3570730 - DNA, 25 bp, Homo sapien
gtcgcgctgccgggtactgctggct

SEQ ID NO: 3570731 - DNA, 25 bp, Homo sapien
agaggatggagtggccgcatgcctg

SEQ ID NO: 3570732 - DNA, 25 bp, Homo sapien
gaggatggagtggccgcatgcctgc

SEQ ID NO: 3570733 - DNA, 25 bp, Homo sapien
aggatggagtggccgcatgcctgcc

SEQ ID NO: 3570734 - DNA, 25 bp, Homo sapien
agactaaggtggcacctcgccctgt

SEQ ID NO: 3570735 - DNA, 25 bp, Homo sapien
gcctccccagccagactaaggtggc

SEQ ID NO: 3570736 - DNA, 25 bp, Homo sapien
agcctggactcaacaccccaatcca

SEQ ID NO: 3570737 - DNA, 25 bp, Homo sapien
gactcaacaccccaatccagctctg

SEQ ID NO: 3570738 - DNA, 25 bp, Homo sapien
ggatcagagacctaagtaactcagg

SEQ ID NO: 3570739 - DNA, 25 bp, Homo sapien
ccaaaccactaggaggtagctacta

SEQ ID NO: 3570740 - DNA, 25 bp, Homo sapien
cacacagcttgtaaacaggagcact

SEQ ID NO: 3570741 - DNA, 25 bp, Homo sapien
gtgctttccaagacagcgggctgtg

SEQ ID NO: 3570742 - DNA, 25 bp, Homo sapien
ggctcctgtttggatgtcaccccta

SEQ ID NO: 3570743 - DNA, 25 bp, Homo sapien
catccaacactgttgtcacaggcat

SEQ ID NO: 3570744 - DNA, 25 bp, Homo sapien
tcattccggctgaggccctgaggct

SEQ ID NO: 3570745 - DNA, 25 bp, Homo sapien
cttgcgacaaggaccagcagagcct

SEQ ID NO: 3570746 - DNA, 25 bp, Homo sapien
aggcctgcttcacgagcatggtgtg

SEQ ID NO: 3570747 - DNA, 25 bp, Homo sapien
cctgcttcacgagcatggtgtgacc

SEQ ID NO: 3570748 - DNA, 25 bp, Homo sapien
caggggaaatggacctcaggcctgc

SEQ ID NO: 3570749 - DNA, 25 bp, Homo sapien
cttcacgagcatggtgtgaccttgg

SEQ ID NO: 3570750 - DNA, 25 bp, Homo sapien
ccaggactccaatgcacattcctgt

SEQ ID NO: 3570751 - DNA, 25 bp, Homo sapien
gcacattcctgtatggtgctgcctt

SEQ ID NO: 3570752 - DNA, 25 bp, Homo sapien
tgctgccttccagaatgtcaccagc

SEQ ID NO: 3570753 - DNA, 25 bp, Homo sapien
acagcaggtacttggtagaaggctg

SEQ ID NO: 3570754 - DNA, 25 bp, Homo sapien
ggctgccgccttgtggcctagtgca

SEQ ID NO: 3570755 - DNA, 25 bp, Homo sapien
caatgatgagtggtccatggctgcc

SEQ ID NO: 3570756 - DNA, 25 bp, Homo sapien
cagtgcaaggtcagatccaggagcg

SEQ ID NO: 3570757 - DNA, 25 bp, Homo sapien
gacattcgacctgtggatctggcca

SEQ ID NO: 3570758 - DNA, 25 bp, Homo sapien
ccgaagagcgggtggtaatgaggct

SEQ ID NO: 3570759 - DNA, 25 bp, Homo sapien
cagggcctcatcttcttagtggaga

SEQ ID NO: 3570760 - DNA, 25 bp, Homo sapien
aaggatggaggtcagcctgtccgcc

SEQ ID NO: 3570761 - DNA, 25 bp, Homo sapien
cccactggctgaggctaaggatgga

SEQ ID NO: 3570762 - DNA, 25 bp, Homo sapien
gcctgagtcactgacacaccacacc

SEQ ID NO: 3570763 - DNA, 25 bp, Homo sapien
actcagactcggactgcagcaggac

SEQ ID NO: 3570764 - DNA, 25 bp, Homo sapien
ggactcagactcggactgcagcagg

SEQ ID NO: 3570765 - DNA, 25 bp, Homo sapien
ctgagtcactgacacaccacaccca

SEQ ID NO: 3570766 - DNA, 25 bp, Homo sapien
ggaaccccatgctgcagtcaggatg

SEQ ID NO: 3570767 - DNA, 25 bp, Homo sapien
gaaagcaaggcctaggttctcagct

SEQ ID NO: 3570768 - DNA, 25 bp, Homo sapien
ggttgggccaagaggtctgaacacc

SEQ ID NO: 3570769 - DNA, 25 bp, Homo sapien
tcagccctgtagaagctcagccaag

SEQ ID NO: 3570770 - DNA, 25 bp, Homo sapien
ttccagcggcggaatcctagagcca

SEQ ID NO: 3570771 - DNA, 25 bp, Homo sapien
agaaggcttccagcggcggaatcct

SEQ ID NO: 3570772 - DNA, 25 bp, Homo sapien
tgtctgaacagaaggcttccagcgg

SEQ ID NO: 3570773 - DNA, 25 bp, Homo sapien
cttggagcataaggggtgtctgaac

SEQ ID NO: 3570774 - DNA, 25 bp, Homo sapien
ggcaagagacccacaggtattttgt

SEQ ID NO: 3570775 - DNA, 25 bp, Homo sapien
ggggagcactccaatcagccaggct

SEQ ID NO: 3570776 - DNA, 25 bp, Homo sapien
gggctcctttgaatggtgtgaacca

SEQ ID NO: 3570777 - DNA, 25 bp, Homo sapien
acaggtattttgtgaaggcccagag

SEQ ID NO: 3570778 - DNA, 25 bp, Homo sapien
tactgtggagtagaaggcaggcacc

SEQ ID NO: 3570779 - DNA, 25 bp, Homo sapien
gccggagggcaatcggggagggcaa

SEQ ID NO: 3570780 - DNA, 25 bp, Homo sapien
agccccctgcccaaaggcatggaga

SEQ ID NO: 3570781 - DNA, 25 bp, Homo sapien
gggcaatcagggcaatcatctactg

SEQ ID NO: 3570782 - DNA, 25 bp, Homo sapien
cacactccggcgcatttcattttca

SEQ ID NO: 3570783 - DNA, 25 bp, Homo sapien
cgggacacgcgtgagggctctgagg

SEQ ID NO: 3570784 - DNA, 25 bp, Homo sapien
cactacctcgaagggggatcagtga

SEQ ID NO: 3570785 - DNA, 25 bp, Homo sapien
agagggtccgcggtgaaggcagcca

SEQ ID NO: 3570786 - DNA, 25 bp, Homo sapien
tccccgccgatatgagaagcagctg

SEQ ID NO: 3570787 - DNA, 25 bp, Homo sapien
tgtgtcgaggtcagtttccctggcg

SEQ ID NO: 3570788 - DNA, 25 bp, Homo sapien
ttttaagtctaacccagcctctggc

SEQ ID NO: 3570789 - DNA, 25 bp, Homo sapien
tctcttagaggaacacgtctgcacc

SEQ ID NO: 3570790 - DNA, 25 bp, Homo sapien
atgtccccattctccataatggaag

SEQ ID NO: 3570791 - DNA, 25 bp, Homo sapien
caatgtccccattctccataatgga

SEQ ID NO: 3570792 - DNA, 25 bp, Homo sapien
aatgtccccattctccataatggaa

SEQ ID NO: 3570793 - DNA, 25 bp, Homo sapien
ctgcacaaacagaaaggtagcgaac

SEQ ID NO: 3570794 - DNA, 25 bp, Homo sapien
caaacagaaaggtagcgaaccactc

SEQ ID NO: 3570795 - DNA, 25 bp, Homo sapien
aaggtagcgaaccactcccggagct

SEQ ID NO: 3570796 - DNA, 25 bp, Homo sapien
cactcccggagctccatctgtgtgt

SEQ ID NO: 3570797 - DNA, 25 bp, Homo sapien
tgcagggttggacgcggacccacat

SEQ ID NO: 3570798 - DNA, 25 bp, Homo sapien
ctgcagggttggacgcggacccaca

SEQ ID NO: 3570799 - DNA, 25 bp, Homo sapien
cagggttggacgcggacccacatga

SEQ ID NO: 3570800 - DNA, 25 bp, Homo sapien
ggttggacgcggacccacatgatgc

SEQ ID NO: 3570801 - DNA, 25 bp, Homo sapien
tgggcagtgatgagggacacaatga

SEQ ID NO: 3570802 - DNA, 25 bp, Homo sapien
ctgagcagggaacaccgtgtctgcc

SEQ ID NO: 3570803 - DNA, 25 bp, Homo sapien
gacacaatgaagggggacgtgccac

SEQ ID NO: 3570804 - DNA, 25 bp, Homo sapien
tgctagtggtcacagatctgggcag

SEQ ID NO: 3570805 - DNA, 25 bp, Homo sapien
tgctgcttctcatgtttctctgtct

SEQ ID NO: 3570806 - DNA, 25 bp, Homo sapien
tctctgtctcatgcaccactgtgaa

SEQ ID NO: 3570807 - DNA, 25 bp, Homo sapien
tgtttctctgtctcatgcaccactg

SEQ ID NO: 3570808 - DNA, 25 bp, Homo sapien
tgtctcatgcaccactgtgaagccc

SEQ ID NO: 3570809 - DNA, 25 bp, Homo sapien
tgagactcttaataggccactcctt

SEQ ID NO: 3570810 - DNA, 25 bp, Homo sapien
tcttaataggccactccttctcagg

SEQ ID NO: 3570811 - DNA, 25 bp, Homo sapien
caggtagactttgagactcttaata

SEQ ID NO: 3570812 - DNA, 25 bp, Homo sapien
gactttgagactcttaataggccac

SEQ ID NO: 3570813 - DNA, 25 bp, Homo sapien
ctctttgcatcccagcacagggcgc

SEQ ID NO: 3570814 - DNA, 25 bp, Homo sapien
gatgccctgcaaactggaggacttg

SEQ ID NO: 3570815 - DNA, 25 bp, Homo sapien
tgataaagccctccctgttcacaat

SEQ ID NO: 3570816 - DNA, 25 bp, Homo sapien
caactgggacatctgtaacagcgaa

SEQ ID NO: 3570817 - DNA, 25 bp, Homo sapien
taccccgatacctgctgattggaaa

SEQ ID NO: 3570818 - DNA, 25 bp, Homo sapien
caggcatggaacaatcagggctgca

SEQ ID NO: 3570819 - DNA, 25 bp, Homo sapien
tgggagcactagagcaatcggcctg

SEQ ID NO: 3570820 - DNA, 25 bp, Homo sapien
tataaaagagattcggctgcaggca

SEQ ID NO: 3570821 - DNA, 25 bp, Homo sapien
cccaggatgcattagaggaggcaca

SEQ ID NO: 3570822 - DNA, 25 bp, Homo sapien
tatgtgaagggccagcactaagcca

SEQ ID NO: 3570823 - DNA, 25 bp, Homo sapien
caagcctgttcagatgacctcagga

SEQ ID NO: 3570824 - DNA, 25 bp, Homo sapien
gaggcggccagggaaatagcatccc

SEQ ID NO: 3570825 - DNA, 25 bp, Homo sapien
gggccccgctccacggcctctggct

SEQ ID NO: 3570826 - DNA, 25 bp, Homo sapien
tcaggggccccgctccacggcctct

SEQ ID NO: 3570827 - DNA, 25 bp, Homo sapien
aggggccccgctccacggcctctgg

SEQ ID NO: 3570828 - DNA, 25 bp, Homo sapien
ctcaggggccccgctccacggcctc

SEQ ID NO: 3570829 - DNA, 25 bp, Homo sapien
ggctacagggcacactagagtggcc

SEQ ID NO: 3570830 - DNA, 25 bp, Homo sapien
actagagtggccgtccagggccaca

SEQ ID NO: 3570831 - DNA, 25 bp, Homo sapien
gagtctacagttctcccccactgct

SEQ ID NO: 3570832 - DNA, 25 bp, Homo sapien
gcacactagagtggccgtccagggc

SEQ ID NO: 3570833 - DNA, 25 bp, Homo sapien
ggggaatctctgagcacattcaggt

SEQ ID NO: 3570834 - DNA, 25 bp, Homo sapien
tccacttgcagaccaaggggaatct

SEQ ID NO: 3570835 - DNA, 25 bp, Homo sapien
ctgtaacgggaatatttccacttgc

SEQ ID NO: 3570836 - DNA, 25 bp, Homo sapien
tgtaacgggaatatttccacttgca

SEQ ID NO: 3570837 - DNA, 25 bp, Homo sapien
ggaggctgcggtcctcacggaactt

SEQ ID NO: 3570838 - DNA, 25 bp, Homo sapien
tgaagtagcgatcgtggaagccacc

SEQ ID NO: 3570839 - DNA, 25 bp, Homo sapien
tgtagagccgcaagcagctgctgtt

SEQ ID NO: 3570840 - DNA, 25 bp, Homo sapien
catgccatgcttggtgtcaccgaca

SEQ ID NO: 3570841 - DNA, 25 bp, Homo sapien
ggcaccaccaggtcccaccctggct

SEQ ID NO: 3570842 - DNA, 25 bp, Homo sapien
tggcaccaccaggtcccaccctggc

SEQ ID NO: 3570843 - DNA, 25 bp, Homo sapien
ctggcaccaccaggtcccaccctgg

SEQ ID NO: 3570844 - DNA, 25 bp, Homo sapien
gcagcaccttctccgcaaagtgcag

SEQ ID NO: 3570845 - DNA, 25 bp, Homo sapien
caccttctccgcaaagtgcaggggg

SEQ ID NO: 3570846 - DNA, 25 bp, Homo sapien
ccttctccgcaaagtgcagggggcg

SEQ ID NO: 3570847 - DNA, 25 bp, Homo sapien
ttctccgcaaagtgcagggggcgct

SEQ ID NO: 3570848 - DNA, 25 bp, Homo sapien
cgttccggcgatccaggatctccag

SEQ ID NO: 3570849 - DNA, 25 bp, Homo sapien
aggtccaatagtccttctccctgat

SEQ ID NO: 3570850 - DNA, 25 bp, Homo sapien
tccctctcgttgacctcaaagcagg

SEQ ID NO: 3570851 - DNA, 25 bp, Homo sapien
tgatgcccacgttccggcgatccag

SEQ ID NO: 3570852 - DNA, 25 bp, Homo sapien
tcttctcttccagatacactgtgca

SEQ ID NO: 3570853 - DNA, 25 bp, Homo sapien
tggcagtgatctcctcccgctgctt

SEQ ID NO: 3570854 - DNA, 25 bp, Homo sapien
agccacgcgcatcttcacaatggca

SEQ ID NO: 3570855 - DNA, 25 bp, Homo sapien
ggcagtgccagccacgcgcatcttc

SEQ ID NO: 3570856 - DNA, 25 bp, Homo sapien
gcgcatcttcacaatggcagtgatc

SEQ ID NO: 3570857 - DNA, 25 bp, Homo sapien
gacaggtggtcaccgtcatctgcaa

SEQ ID NO: 3570858 - DNA, 25 bp, Homo sapien
ttaatgaggtcttccaccacacggc

SEQ ID NO: 3570859 - DNA, 25 bp, Homo sapien
aatgaggtcttccaccacacggcca

SEQ ID NO: 3570860 - DNA, 25 bp, Homo sapien
tgaggtcttccaccacacggccagc

SEQ ID NO: 3570861 - DNA, 25 bp, Homo sapien
gttaatgaggtcttccaccacacgg

SEQ ID NO: 3570862 - DNA, 25 bp, Homo sapien
aggttgtgcacgttcatctggttcg

SEQ ID NO: 3570863 - DNA, 25 bp, Homo sapien
catctggttcgtgtctgagaagcac

SEQ ID NO: 3570864 - DNA, 25 bp, Homo sapien
caattgccaggttgtgcacgttcat

SEQ ID NO: 3570865 - DNA, 25 bp, Homo sapien
ctggaagagcgtgggcccaaacaca

SEQ ID NO: 3570866 - DNA, 25 bp, Homo sapien
gccgcaccagcagctctcggtacct

SEQ ID NO: 3570867 - DNA, 25 bp, Homo sapien
agccgcaccagcagctctcggtacc

SEQ ID NO: 3570868 - DNA, 25 bp, Homo sapien
gccttcactgtggcccggttgacag

SEQ ID NO: 3570869 - DNA, 25 bp, Homo sapien
cactgtggcccggttgacagggggc

SEQ ID NO: 3570870 - DNA, 25 bp, Homo sapien
ccctggctctgtatggagcggcgat

SEQ ID NO: 3570871 - DNA, 25 bp, Homo sapien
gataaatcaagtcagaaaccccctg

SEQ ID NO: 3570872 - DNA, 25 bp, Homo sapien
caggccaggcattcaaccagggtaa

SEQ ID NO: 3570873 - DNA, 25 bp, Homo sapien
tagggtaagcctagtgcaagtgcca

SEQ ID NO: 3570874 - DNA, 25 bp, Homo sapien
cttgagcgccgaggaaacatcatcc

SEQ ID NO: 3570875 - DNA, 25 bp, Homo sapien
ttgaggtgcacagagcgcgcatcct

SEQ ID NO: 3570876 - DNA, 25 bp, Homo sapien
gatgtctgcccacacttgcggtaga

SEQ ID NO: 3570877 - DNA, 25 bp, Homo sapien
gtgaagagcccatcaggcaggtcgc

SEQ ID NO: 3570878 - DNA, 25 bp, Homo sapien
cgcactgcgtgatgtagtccacaca

SEQ ID NO: 3570879 - DNA, 25 bp, Homo sapien
cacagcggtacacgatcaccgggat

SEQ ID NO: 3570880 - DNA, 25 bp, Homo sapien
gccgctcgccctgtatgtacagtgt

SEQ ID NO: 3570881 - DNA, 25 bp, Homo sapien
gatcaccgggatatccgagtcccca

SEQ ID NO: 3570882 - DNA, 25 bp, Homo sapien
agcaccagcacctggttctcactgt

SEQ ID NO: 3570883 - DNA, 25 bp, Homo sapien
ctccttcgctccaccagcaccagca

SEQ ID NO: 3570884 - DNA, 25 bp, Homo sapien
caccagcaccagcacctggttctca

SEQ ID NO: 3570885 - DNA, 25 bp, Homo sapien
ccagcaccagcacctggttctcact

SEQ ID NO: 3570886 - DNA, 25 bp, Homo sapien
gctgtaggctcaggccagctttgta

SEQ ID NO: 3570887 - DNA, 25 bp, Homo sapien
cagctttgtagggtaggcgtcccag

SEQ ID NO: 3570888 - DNA, 25 bp, Homo sapien
acggagctccgagccactgagagag

SEQ ID NO: 3570889 - DNA, 25 bp, Homo sapien
tagttgcagcggctcttcgcagggc

SEQ ID NO: 3570890 - DNA, 25 bp, Homo sapien
cgtgtacacctcaaaggtgtgctca

SEQ ID NO: 3570891 - DNA, 25 bp, Homo sapien
tacacttgacccactcatgagcctg

SEQ ID NO: 3570892 - DNA, 25 bp, Homo sapien
agccgttctccctccgtgtacacct

SEQ ID NO: 3570893 - DNA, 25 bp, Homo sapien
cagcccaaacaggtacagccgttct

SEQ ID NO: 3570894 - DNA, 25 bp, Homo sapien
gggtcactgcccgctcattctcaaa

SEQ ID NO: 3570895 - DNA, 25 bp, Homo sapien
cgctggcccgaatctctccattggg

SEQ ID NO: 3570896 - DNA, 25 bp, Homo sapien
aaagtagctcaggaccccgtcacca

SEQ ID NO: 3570897 - DNA, 25 bp, Homo sapien
actgccaggcacacaatctcgctgg

SEQ ID NO: 3570898 - DNA, 25 bp, Homo sapien
tgtactctgcctcctgctacaatgg

SEQ ID NO: 3570899 - DNA, 25 bp, Homo sapien
ctcctgctacaatggctctgaagga

SEQ ID NO: 3570900 - DNA, 25 bp, Homo sapien
gcctcctgctacaatggctctgaag

SEQ ID NO: 3570901 - DNA, 25 bp, Homo sapien
tctgcctcctgctacaatggctctg

SEQ ID NO: 3570902 - DNA, 25 bp, Homo sapien
gaggttgtgaacagcatggagttcc

SEQ ID NO: 3570903 - DNA, 25 bp, Homo sapien
caatgaggttgtgaacagcatggag

SEQ ID NO: 3570904 - DNA, 25 bp, Homo sapien
tgtgaacagcatggagttccaaaga

SEQ ID NO: 3570905 - DNA, 25 bp, Homo sapien
gggcaatgaggttgtgaacagcatg

SEQ ID NO: 3570906 - DNA, 25 bp, Homo sapien
caggacaactgagtagtgcttttcc

SEQ ID NO: 3570907 - DNA, 25 bp, Homo sapien
cactgtggctcacggtcggcaggac

SEQ ID NO: 3570908 - DNA, 25 bp, Homo sapien
ggcttcatcgagtccagccgaggca

SEQ ID NO: 3570909 - DNA, 25 bp, Homo sapien
ccggcagaggcagtcttgtagagga

SEQ ID NO: 3570910 - DNA, 25 bp, Homo sapien
gaaagaggattgtcccagacagcgg

SEQ ID NO: 3570911 - DNA, 25 bp, Homo sapien
tgtccccaagcccaagccagttggg

SEQ ID NO: 3570912 - DNA, 25 bp, Homo sapien
tctccaggttggaggcataggccag

SEQ ID NO: 3570913 - DNA, 25 bp, Homo sapien
ggcaaactcaataataatccctgga

SEQ ID NO: 3570914 - DNA, 25 bp, Homo sapien
tctgcacacgcatgtactccaaagc

SEQ ID NO: 3570915 - DNA, 25 bp, Homo sapien
ggctcagaggcgcacaaacaccagc

SEQ ID NO: 3570916 - DNA, 25 bp, Homo sapien
catccccagaaacacaaatccgggg

SEQ ID NO: 3570917 - DNA, 25 bp, Homo sapien
cagaaacacaaatccggggggctca

SEQ ID NO: 3570918 - DNA, 25 bp, Homo sapien
cggttgttccgaaggaattccatct

SEQ ID NO: 3570919 - DNA, 25 bp, Homo sapien
aattccatctgcagcgtctgccccg

SEQ ID NO: 3570920 - DNA, 25 bp, Homo sapien
agggtcccccgagaagcagttgatc

SEQ ID NO: 3570921 - DNA, 25 bp, Homo sapien
tgggtctcagccaggtctgtggtgg

SEQ ID NO: 3570922 - DNA, 25 bp, Homo sapien
agccagagcctccagaggatctcaa

SEQ ID NO: 3570923 - DNA, 25 bp, Homo sapien
ctggacacagctgcccagtcagcca

SEQ ID NO: 3570924 - DNA, 25 bp, Homo sapien
gagcctccagaggatctcaagctcc

SEQ ID NO: 3570925 - DNA, 25 bp, Homo sapien
ctccagaggatctcaagctccttct

SEQ ID NO: 3570926 - DNA, 25 bp, Homo sapien
cctggttgccaaagagcgggtggta

SEQ ID NO: 3570927 - DNA, 25 bp, Homo sapien
gcggtacttgccctcacggtacttg

SEQ ID NO: 3570928 - DNA, 25 bp, Homo sapien
ctccaggtggcaccgccgggtgctg

SEQ ID NO: 3570929 - DNA, 25 bp, Homo sapien
tacttgccctcacggtacttggcct

SEQ ID NO: 3570930 - DNA, 25 bp, Homo sapien
gggcagaccccaagtatcggtggca

SEQ ID NO: 3570931 - DNA, 25 bp, Homo sapien
cccacccactagattatcacaaagg

SEQ ID NO: 3570932 - DNA, 25 bp, Homo sapien
gattatcacaaagggtctcttccag

SEQ ID NO: 3570933 - DNA, 25 bp, Homo sapien
ccccaagtatcggtggcaagcaggg

SEQ ID NO: 3570934 - DNA, 25 bp, Homo sapien
tcctgtccatcttcaggctccgcac

SEQ ID NO: 3570935 - DNA, 25 bp, Homo sapien
aggctccgcaccttggagacgccag

SEQ ID NO: 3570936 - DNA, 25 bp, Homo sapien
ttcaggctccgcaccttggagacgc

SEQ ID NO: 3570937 - DNA, 25 bp, Homo sapien
catcttcaggctccgcaccttggag

SEQ ID NO: 3570938 - DNA, 25 bp, Homo sapien
gaatccagccgtgtactcttgctcc

SEQ ID NO: 3570939 - DNA, 25 bp, Homo sapien
ctctggaatccagccgtgtactctt

SEQ ID NO: 3570940 - DNA, 25 bp, Homo sapien
tgagccccgtaatccttgcctgggc

SEQ ID NO: 3570941 - DNA, 25 bp, Homo sapien
ggcaggactgagccccgtaatcctt

SEQ ID NO: 3570942 - DNA, 25 bp, Homo sapien
aacaacacagaggttgatggaggcc

SEQ ID NO: 3570943 - DNA, 25 bp, Homo sapien
agggcctcagcgatggctccctgca

SEQ ID NO: 3570944 - DNA, 25 bp, Homo sapien
tgcacagcgcttgcagataacaaca

SEQ ID NO: 3570945 - DNA, 25 bp, Homo sapien
tcggccacctccgaggtagacaggg

SEQ ID NO: 3570946 - DNA, 25 bp, Homo sapien
acgttgcccacgctcatgtcgatga

SEQ ID NO: 3570947 - DNA, 25 bp, Homo sapien
acgctcatgtcgatgaaggtgatgc

SEQ ID NO: 3570948 - DNA, 25 bp, Homo sapien
tgaggtcgaagctgcgccggtccac

SEQ ID NO: 3570949 - DNA, 25 bp, Homo sapien
ctgaagatgcggtagggcgtggtga

SEQ ID NO: 3570950 - DNA, 25 bp, Homo sapien
ttgtagagctgcactttgtccccga

SEQ ID NO: 3570951 - DNA, 25 bp, Homo sapien
tctagattcttgtagagctgcactt

SEQ ID NO: 3570952 - DNA, 25 bp, Homo sapien
gctgcactttgtccccgaccacggc

SEQ ID NO: 3570953 - DNA, 25 bp, Homo sapien
cactttgtccccgaccacggccacg

SEQ ID NO: 3570954 - DNA, 25 bp, Homo sapien
agataagcgctagagagccgggccc

SEQ ID NO: 3570955 - DNA, 25 bp, Homo sapien
tggaactcccagcagataagcgcta

SEQ ID NO: 3570956 - DNA, 25 bp, Homo sapien
gctccaggctgccagcgcggtcagg

SEQ ID NO: 3570957 - DNA, 25 bp, Homo sapien
cttattcttgaagccacgaagctcc

SEQ ID NO: 3570958 - DNA, 25 bp, Homo sapien
tctctgcccggaaggcaaaggttcg

SEQ ID NO: 3570959 - DNA, 25 bp, Homo sapien
caaaggttcggttgtttgtgatcac

SEQ ID NO: 3570960 - DNA, 25 bp, Homo sapien
tgcaggccacagagataaagcgctt

SEQ ID NO: 3570961 - DNA, 25 bp, Homo sapien
ttcaaacttctggtccccgatggca

SEQ ID NO: 3570962 - DNA, 25 bp, Homo sapien
gatcagtatccagtctcacccatcg

SEQ ID NO: 3570963 - DNA, 25 bp, Homo sapien
cagtatccagtctcacccatcgttt

SEQ ID NO: 3570964 - DNA, 25 bp, Homo sapien
aaagtatcgcaggtgatcagtatcc

SEQ ID NO: 3570965 - DNA, 25 bp, Homo sapien
cttgttactgtcaaagtatcgcagg

SEQ ID NO: 3570966 - DNA, 25 bp, Homo sapien
cagccagccttgatgactggtgtga

SEQ ID NO: 3570967 - DNA, 25 bp, Homo sapien
ccctgcggtgggttcttgtccagcc

SEQ ID NO: 3570968 - DNA, 25 bp, Homo sapien
ccagccttgatgactggtgtgacgg

SEQ ID NO: 3570969 - DNA, 25 bp, Homo sapien
agccagccagccttgatgactggtg

SEQ ID NO: 3570970 - DNA, 25 bp, Homo sapien
ctcaggctgctggtatgccatccgc

SEQ ID NO: 3570971 - DNA, 25 bp, Homo sapien
agctcaggctgctggtatgccatcc

SEQ ID NO: 3570972 - DNA, 25 bp, Homo sapien
gctcaggctgctggtatgccatccg

SEQ ID NO: 3570973 - DNA, 25 bp, Homo sapien
caggctgctggtatgccatccgcca

SEQ ID NO: 3570974 - DNA, 25 bp, Homo sapien
tcctctccctcgctcagcagactgg

SEQ ID NO: 3570975 - DNA, 25 bp, Homo sapien
acggcccgtgggactcggctcggtg

SEQ ID NO: 3570976 - DNA, 25 bp, Homo sapien
ttggtcgtccccagacagttcctct

SEQ ID NO: 3570977 - DNA, 25 bp, Homo sapien
gccctcataggcgtggtcatcctct

SEQ ID NO: 3570978 - DNA, 25 bp, Homo sapien
tgcccccgagacccactcagcgtca

SEQ ID NO: 3570979 - DNA, 25 bp, Homo sapien
ctgcccccgagacccactcagcgtc

SEQ ID NO: 3570980 - DNA, 25 bp, Homo sapien
gcccccgagacccactcagcgtcat

SEQ ID NO: 3570981 - DNA, 25 bp, Homo sapien
agacagacacgggaacacaagaagt

SEQ ID NO: 3570982 - DNA, 25 bp, Homo sapien
ggacacgagttcctaacacacaggg

SEQ ID NO: 3570983 - DNA, 25 bp, Homo sapien
gaaaccgacctaggacacagacaaa

SEQ ID NO: 3570984 - DNA, 25 bp, Homo sapien
cactctctgtctggtagtcctcagg

SEQ ID NO: 3570985 - DNA, 25 bp, Homo sapien
gggacctcatcgtagtcagagtcat

SEQ ID NO: 3570986 - DNA, 25 bp, Homo sapien
ggcctcagggcaaggggcctggcct

SEQ ID NO: 3570987 - DNA, 25 bp, Homo sapien
tgagagaggggttggggggcctcag

SEQ ID NO: 3570988 - DNA, 25 bp, Homo sapien
ctcagggcaaggggcctggcctcct

SEQ ID NO: 3570989 - DNA, 25 bp, Homo sapien
ggggcctcagggcaaggggcctggc

SEQ ID NO: 3570990 - DNA, 25 bp, Homo sapien
aggcgtaccggctttggaggtatct

SEQ ID NO: 3570991 - DNA, 25 bp, Homo sapien
actctgggaacaggcgtaccggctt

SEQ ID NO: 3570992 - DNA, 25 bp, Homo sapien
cgaactctgggaacaggcgtaccgg

SEQ ID NO: 3570993 - DNA, 25 bp, Homo sapien
acaggcgtaccggctttggaggtat

SEQ ID NO: 3570994 - DNA, 25 bp, Homo sapien
taatgatggcagcaatgactcctcc

SEQ ID NO: 3570995 - DNA, 25 bp, Homo sapien
agcaatgactcctcctccttagtgg

SEQ ID NO: 3570996 - DNA, 25 bp, Homo sapien
aatgactcctcctccttagtgggca

SEQ ID NO: 3570997 - DNA, 25 bp, Homo sapien
tggggaggggatgataatgatggca

SEQ ID NO: 3570998 - DNA, 25 bp, Homo sapien
ctgctcgtccgcatccctggggtcc

SEQ ID NO: 3570999 - DNA, 25 bp, Homo sapien
tctgtgtataactgtggatctgtcc

SEQ ID NO: 3571000 - DNA, 25 bp, Homo sapien
tgagcccaggtatggctttgcacct

SEQ ID NO: 3571001 - DNA, 25 bp, Homo sapien
aagaatgtcgtgtacctgcccgtgc

SEQ ID NO: 3571002 - DNA, 25 bp, Homo sapien
tgtgaatcacttctctacgtgcgtg

SEQ ID NO: 3571003 - DNA, 25 bp, Homo sapien
gatgtcagtgccaggagggcccaga

SEQ ID NO: 3571004 - DNA, 25 bp, Homo sapien
agatgtcagtgccaggagggcccag

SEQ ID NO: 3571005 - DNA, 25 bp, Homo sapien
gtcagtgccaggagggcccagaagt

SEQ ID NO: 3571006 - DNA, 25 bp, Homo sapien
tcagatgtcagtgccaggagggccc

SEQ ID NO: 3571007 - DNA, 25 bp, Homo sapien
gaagatgtggcgcttcatgggcaca

SEQ ID NO: 3571008 - DNA, 25 bp, Homo sapien
cggtgaccagggagtagcatgccca

SEQ ID NO: 3571009 - DNA, 25 bp, Homo sapien
caccaggccatgctgctcaaagagc

SEQ ID NO: 3571010 - DNA, 25 bp, Homo sapien
aaagagccccgtgtactgctccagg

SEQ ID NO: 3571011 - DNA, 25 bp, Homo sapien
cctgccagcggaggcctgactggca

SEQ ID NO: 3571012 - DNA, 25 bp, Homo sapien
agacagcagctattctgaagggctc

SEQ ID NO: 3571013 - DNA, 25 bp, Homo sapien
gagacagcagctattctgaagggct

SEQ ID NO: 3571014 - DNA, 25 bp, Homo sapien
ccagagacagcagctattctgaagg

SEQ ID NO: 3571015 - DNA, 25 bp, Homo sapien
agagacagcagctattctgaagggc

SEQ ID NO: 3571016 - DNA, 25 bp, Homo sapien
aaagaagttcagagcagtgccctgc

SEQ ID NO: 3571017 - DNA, 25 bp, Homo sapien
gaaggcttcccggagaaagcagcaa

SEQ ID NO: 3571018 - DNA, 25 bp, Homo sapien
gggatcagataccatcaaccagtga

SEQ ID NO: 3571019 - DNA, 25 bp, Homo sapien
tgcagcctgaggcaaagacagaatc

SEQ ID NO: 3571020 - DNA, 25 bp, Homo sapien
taagggtcgcctggaatctctaatc

SEQ ID NO: 3571021 - DNA, 25 bp, Homo sapien
gcactcagtcccagtccagaggtaa

SEQ ID NO: 3571022 - DNA, 25 bp, Homo sapien
tatcctggagtatcctgagagtcca

SEQ ID NO: 3571023 - DNA, 25 bp, Homo sapien
catggttcccagtgccttcgagcac

SEQ ID NO: 3571024 - DNA, 25 bp, Homo sapien
tcaatgtcatggaagctgtgtgagg

SEQ ID NO: 3571025 - DNA, 25 bp, Homo sapien
agttcatgcgagcttcccctcttgg

SEQ ID NO: 3571026 - DNA, 25 bp, Homo sapien
cttataacaaccctaaggcctgtga

SEQ ID NO: 3571027 - DNA, 25 bp, Homo sapien
aaccctaaggcctgtgattcttctc

SEQ ID NO: 3571028 - DNA, 25 bp, Homo sapien
ctgttttgagtaaagactccacgcg

SEQ ID NO: 3571029 - DNA, 25 bp, Homo sapien
tgttttgagtaaagactccacgcgg

SEQ ID NO: 3571030 - DNA, 25 bp, Homo sapien
tgagtaaagactccacgcggggacc

SEQ ID NO: 3571031 - DNA, 25 bp, Homo sapien
tttgagtaaagactccacgcgggga

SEQ ID NO: 3571032 - DNA, 25 bp, Homo sapien
tatgagttctagaatctcctgcctg

SEQ ID NO: 3571033 - DNA, 25 bp, Homo sapien
gggcaaagctgggaagcaacccatt

SEQ ID NO: 3571034 - DNA, 25 bp, Homo sapien
ccgtgtcttctggtggtagggctaa

SEQ ID NO: 3571035 - DNA, 25 bp, Homo sapien
cagggccagaccttgcggagaactt

SEQ ID NO: 3571036 - DNA, 25 bp, Homo sapien
cagaggctgagctagcattaccgcc

SEQ ID NO: 3571037 - DNA, 25 bp, Homo sapien
tcaacggccggatgatcaacaacct

SEQ ID NO: 3571038 - DNA, 25 bp, Homo sapien
caaaatgaccgctcaacaaggacag

SEQ ID NO: 3571039 - DNA, 25 bp, Homo sapien
caaggacagctggatagatacgggc

SEQ ID NO: 3571040 - DNA, 25 bp, Homo sapien
gtgggatcgtttattggggctctgt

SEQ ID NO: 3571041 - DNA, 25 bp, Homo sapien
gctgtgggatcgtttattggggctc

SEQ ID NO: 3571042 - DNA, 25 bp, Homo sapien
gtttattggggctctgtccagccag

SEQ ID NO: 3571043 - DNA, 25 bp, Homo sapien
gggatcgtttattggggctctgtcc

SEQ ID NO: 3571044 - DNA, 25 bp, Homo sapien
agggctcgcccggtcctgtctccgt

SEQ ID NO: 3571045 - DNA, 25 bp, Homo sapien
ggtcctgtctccgtccctgaagcgg

SEQ ID NO: 3571046 - DNA, 25 bp, Homo sapien
tcctgtctccgtccctgaagcggtg

SEQ ID NO: 3571047 - DNA, 25 bp, Homo sapien
tctccgtccctgaagcggtgcggcg

SEQ ID NO: 3571048 - DNA, 25 bp, Homo sapien
cgcgctctcgtcgatgttctccagt

SEQ ID NO: 3571049 - DNA, 25 bp, Homo sapien
tcaggtgagcgaggtgtcgtcgtcg

SEQ ID NO: 3571050 - DNA, 25 bp, Homo sapien
gtgagtccgcatgctgcaccgacag

SEQ ID NO: 3571051 - DNA, 25 bp, Homo sapien
ctcggcaacgggctctgctccgggt

SEQ ID NO: 3571052 - DNA, 25 bp, Homo sapien
tttccactcggggtacttgaggcac

SEQ ID NO: 3571053 - DNA, 25 bp, Homo sapien
tctgtttccactcggggtacttgag

SEQ ID NO: 3571054 - DNA, 25 bp, Homo sapien
tgtttccactcggggtacttgaggc

SEQ ID NO: 3571055 - DNA, 25 bp, Homo sapien
cttctgtttccactcggggtacttg

SEQ ID NO: 3571056 - DNA, 25 bp, Homo sapien
ctccctttcaaaacttcactcctca

SEQ ID NO: 3571057 - DNA, 25 bp, Homo sapien
tgggccctaggctccattctccatt

SEQ ID NO: 3571058 - DNA, 25 bp, Homo sapien
tccctgggccctaggctccattctc

SEQ ID NO: 3571059 - DNA, 25 bp, Homo sapien
caggctccaggcttgactccaccca

SEQ ID NO: 3571060 - DNA, 25 bp, Homo sapien
tgagaagatttattcaccacccact

SEQ ID NO: 3571061 - DNA, 25 bp, Homo sapien
aagatttattcaccacccacttggg

SEQ ID NO: 3571062 - DNA, 25 bp, Homo sapien
gaagatttattcaccacccacttgg

SEQ ID NO: 3571063 - DNA, 25 bp, Homo sapien
gaactgagaagatttattcaccacc

SEQ ID NO: 3571064 - DNA, 25 bp, Homo sapien
gaagtcctcaggcttagctctgtcc

SEQ ID NO: 3571065 - DNA, 25 bp, Homo sapien
tatacatgggtggaaactctgaccc

SEQ ID NO: 3571066 - DNA, 25 bp, Homo sapien
cagcctcaaagattacgtggaagaa

SEQ ID NO: 3571067 - DNA, 25 bp, Homo sapien
cacagggtcctaggtaagcacaggc

SEQ ID NO: 3571068 - DNA, 25 bp, Homo sapien
tgaggtagcccgtctggatggacac

SEQ ID NO: 3571069 - DNA, 25 bp, Homo sapien
ctcggaccaagtctttccgaggtgg

SEQ ID NO: 3571070 - DNA, 25 bp, Homo sapien
gccaggtaggtgatgacgcagctct

SEQ ID NO: 3571071 - DNA, 25 bp, Homo sapien
taggtgatgacgcagctcttgggcc

SEQ ID NO: 3571072 - DNA, 25 bp, Homo sapien
ggggatggaaggcacagggaggtga

SEQ ID NO: 3571073 - DNA, 25 bp, Homo sapien
gggatggaaggcacagggaggtgag

SEQ ID NO: 3571074 - DNA, 25 bp, Homo sapien
ctggggatggaaggcacagggaggt

SEQ ID NO: 3571075 - DNA, 25 bp, Homo sapien
ggatggaaggcacagggaggtgaga

SEQ ID NO: 3571076 - DNA, 25 bp, Homo sapien
catattgaagtcatggtggcagcct

SEQ ID NO: 3571077 - DNA, 25 bp, Homo sapien
ggctcatgagcacatatgggcactc

SEQ ID NO: 3571078 - DNA, 25 bp, Homo sapien
ccagggagatcaaggtggcttagcc

SEQ ID NO: 3571079 - DNA, 25 bp, Homo sapien
tcctgatctgctcaagagacccagc

SEQ ID NO: 3571080 - DNA, 25 bp, Homo sapien
gtgatgacatcacggttcttcaggg

SEQ ID NO: 3571081 - DNA, 25 bp, Homo sapien
ggatgtttgactgagtagttcataa

SEQ ID NO: 3571082 - DNA, 25 bp, Homo sapien
gagggtgatgacatcacggttcttc

SEQ ID NO: 3571083 - DNA, 25 bp, Homo sapien
taatgatgtaatcagcgcccatggg

SEQ ID NO: 3571084 - DNA, 25 bp, Homo sapien
tgtggggggcaagggacagttcagc

SEQ ID NO: 3571085 - DNA, 25 bp, Homo sapien
gggcaagggacagttcagccagacc

SEQ ID NO: 3571086 - DNA, 25 bp, Homo sapien
tggggggcaagggacagttcagcca

SEQ ID NO: 3571087 - DNA, 25 bp, Homo sapien
gggggcaagggacagttcagccaga

SEQ ID NO: 3571088 - DNA, 25 bp, Homo sapien
agagtgtctcggctggcacatcaca

SEQ ID NO: 3571089 - DNA, 25 bp, Homo sapien
cgggcgatgtcaaaagtctcaatga

SEQ ID NO: 3571090 - DNA, 25 bp, Homo sapien
ggagtaatagcccacgtcagcgttg

SEQ ID NO: 3571091 - DNA, 25 bp, Homo sapien
tgcggtactcaatgtcgtgtaggac

SEQ ID NO: 3571092 - DNA, 25 bp, Homo sapien
ttcctccctggtacttatcacgcgg

SEQ ID NO: 3571093 - DNA, 25 bp, Homo sapien
tgaaagtcgaatgccaaagtggatg

SEQ ID NO: 3571094 - DNA, 25 bp, Homo sapien
ctcatggttgcttcagcctggagcc

SEQ ID NO: 3571095 - DNA, 25 bp, Homo sapien
cctggagcctggaatagctacatgt

SEQ ID NO: 3571096 - DNA, 25 bp, Homo sapien
gacaccacatgagaatgcaaccaga

SEQ ID NO: 3571097 - DNA, 25 bp, Homo sapien
catatgagggagaggtcacactgtc

SEQ ID NO: 3571098 - DNA, 25 bp, Homo sapien
gactgactggcaggacataacaacc

SEQ ID NO: 3571099 - DNA, 25 bp, Homo sapien
ccactaatggtggtgggatgccgca

SEQ ID NO: 3571100 - DNA, 25 bp, Homo sapien
catgtgccaggtattacactaagtg

SEQ ID NO: 3571101 - DNA, 25 bp, Homo sapien
tctaacatgtatagtactaattctg

SEQ ID NO: 3571102 - DNA, 25 bp, Homo sapien
tattacactaagtgctttatacaca

SEQ ID NO: 3571103 - DNA, 25 bp, Homo sapien
ccagcaatactgacaggtgcaccca

SEQ ID NO: 3571104 - DNA, 25 bp, Homo sapien
ccagtcccaggcaagctaggacagt

SEQ ID NO: 3571105 - DNA, 25 bp, Homo sapien
cagttttaccactgcaagtctcaca

SEQ ID NO: 3571106 - DNA, 25 bp, Homo sapien
ccagttttaccactgcaagtctcac

SEQ ID NO: 3571107 - DNA, 25 bp, Homo sapien
caggctagtggcagactcttgtgga

SEQ ID NO: 3571108 - DNA, 25 bp, Homo sapien
tcagcgtaaactctgagtagcactt

SEQ ID NO: 3571109 - DNA, 25 bp, Homo sapien
cacgagacagaccagttgctcagcg

SEQ ID NO: 3571110 - DNA, 25 bp, Homo sapien
tgcccagagagtaagaacctttgct

SEQ ID NO: 3571111 - DNA, 25 bp, Homo sapien
caggaacccccagctattaggccct

SEQ ID NO: 3571112 - DNA, 25 bp, Homo sapien
aggaacccccagctattaggccctg

SEQ ID NO: 3571113 - DNA, 25 bp, Homo sapien
gaacccccagctattaggccctggc

SEQ ID NO: 3571114 - DNA, 25 bp, Homo sapien
ccgtcaggtgttgcctggtaggcca

SEQ ID NO: 3571115 - DNA, 25 bp, Homo sapien
tgttgccgtcaggtgttgcctggta

SEQ ID NO: 3571116 - DNA, 25 bp, Homo sapien
caggtgttgcctggtaggccatctt

SEQ ID NO: 3571117 - DNA, 25 bp, Homo sapien
atcttggctgcccccggagaaactc

SEQ ID NO: 3571118 - DNA, 25 bp, Homo sapien
tccagtgggtttccgtgagtagcca

SEQ ID NO: 3571119 - DNA, 25 bp, Homo sapien
cacgtggccaggactaggctgcatt

SEQ ID NO: 3571120 - DNA, 25 bp, Homo sapien
tagtagctattattactccagtggg

SEQ ID NO: 3571121 - DNA, 25 bp, Homo sapien
cagatactatgtaccctgggtgcct

SEQ ID NO: 3571122 - DNA, 25 bp, Homo sapien
cttgccagtgctgagcattagagaa

SEQ ID NO: 3571123 - DNA, 25 bp, Homo sapien
gtgctgagcattagagaaggtggac

SEQ ID NO: 3571124 - DNA, 25 bp, Homo sapien
tcccgccccctgactgtgttctctg

SEQ ID NO: 3571125 - DNA, 25 bp, Homo sapien
cccaagacccagggagatggtcgac

SEQ ID NO: 3571126 - DNA, 25 bp, Homo sapien
aaaggcccaggcagttacaagcaga

SEQ ID NO: 3571127 - DNA, 25 bp, Homo sapien
agaccttacacagcaggacgccagt

SEQ ID NO: 3571128 - DNA, 25 bp, Homo sapien
gaaacctggcttcagttgggctctg

SEQ ID NO: 3571129 - DNA, 25 bp, Homo sapien
gacaggtggacctaaggctaatcct

SEQ ID NO: 3571130 - DNA, 25 bp, Homo sapien
cacagtacacagcaggtccgagccc

SEQ ID NO: 3571131 - DNA, 25 bp, Homo sapien
ccacagtacacagcaggtccgagcc

SEQ ID NO: 3571132 - DNA, 25 bp, Homo sapien
cagtacacagcaggtccgagcccca

SEQ ID NO: 3571133 - DNA, 25 bp, Homo sapien
acagtacacagcaggtccgagcccc

SEQ ID NO: 3571134 - DNA, 25 bp, Homo sapien
agtgatgaacgttgcagaggctggc

SEQ ID NO: 3571135 - DNA, 25 bp, Homo sapien
cagcagtgatgaacgttgcagaggc

SEQ ID NO: 3571136 - DNA, 25 bp, Homo sapien
tgccctgtacctctccacttctatc

SEQ ID NO: 3571137 - DNA, 25 bp, Homo sapien
agcagtgatgaacgttgcagaggct

SEQ ID NO: 3571138 - DNA, 25 bp, Homo sapien
gggctttgagagacctgagttcagg

SEQ ID NO: 3571139 - DNA, 25 bp, Homo sapien
acctgagttcaggctccaagctgcc

SEQ ID NO: 3571140 - DNA, 25 bp, Homo sapien
ctgccccctgccttgtacccaggat

SEQ ID NO: 3571141 - DNA, 25 bp, Homo sapien
tgtacccaggatccacattcagcat

SEQ ID NO: 3571142 - DNA, 25 bp, Homo sapien
gaactgtcaggaggtagtgtctgtc

SEQ ID NO: 3571143 - DNA, 25 bp, Homo sapien
tgtcaggaggtagtgtctgtctctt

SEQ ID NO: 3571144 - DNA, 25 bp, Homo sapien
tcaggaggtagtgtctgtctctttt

SEQ ID NO: 3571145 - DNA, 25 bp, Homo sapien
actgaactgtcaggaggtagtgtct

SEQ ID NO: 3571146 - DNA, 25 bp, Homo sapien
cagctctggggacaggcccagagca

SEQ ID NO: 3571147 - DNA, 25 bp, Homo sapien
cctgggatcaggagcacggggcatg

SEQ ID NO: 3571148 - DNA, 25 bp, Homo sapien
ccaggggtcagctggctttcccagc

SEQ ID NO: 3571149 - DNA, 25 bp, Homo sapien
agcacggggcatgtccaggggtcag

SEQ ID NO: 3571150 - DNA, 25 bp, Homo sapien
tatccctgctctaactgtgttggat

SEQ ID NO: 3571151 - DNA, 25 bp, Homo sapien
atccctgctctaactgtgttggatg

SEQ ID NO: 3571152 - DNA, 25 bp, Homo sapien
ctcttccaccaatatccctgctcta

SEQ ID NO: 3571153 - DNA, 25 bp, Homo sapien
tgcacggcaaagagaggagaattgt

SEQ ID NO: 3571154 - DNA, 25 bp, Homo sapien
gctattgaggcccttaaaccagagt

SEQ ID NO: 3571155 - DNA, 25 bp, Homo sapien
gctgtgagcgactgatgtgtctgca

SEQ ID NO: 3571156 - DNA, 25 bp, Homo sapien
gggatatgcgttcccagggtcccaa

SEQ ID NO: 3571157 - DNA, 25 bp, Homo sapien
aaggcaggggtattggagccctgcc

SEQ ID NO: 3571158 - DNA, 25 bp, Homo sapien
ggatctgccagccacaatcctgagt

SEQ ID NO: 3571159 - DNA, 25 bp, Homo sapien
caggatctgccagccacaatcctga

SEQ ID NO: 3571160 - DNA, 25 bp, Homo sapien
atctgccagccacaatcctgagtcc

SEQ ID NO: 3571161 - DNA, 25 bp, Homo sapien
caggcctcggttggcccatctgtgt

SEQ ID NO: 3571162 - DNA, 25 bp, Homo sapien
aggctgcaggtatagcgggcaaccc

SEQ ID NO: 3571163 - DNA, 25 bp, Homo sapien
gtgtctagcccggagagaggaccag

SEQ ID NO: 3571164 - DNA, 25 bp, Homo sapien
aggaccaggagactccgggagagag

SEQ ID NO: 3571165 - DNA, 25 bp, Homo sapien
tgatcttgtgcagcgtccgatccat

SEQ ID NO: 3571166 - DNA, 25 bp, Homo sapien
cttgatcttgtgcagcgtccgatcc

SEQ ID NO: 3571167 - DNA, 25 bp, Homo sapien
tcttgtgcagcgtccgatccatctc

SEQ ID NO: 3571168 - DNA, 25 bp, Homo sapien
ccagccctgctataggtcaggttcc

SEQ ID NO: 3571169 - DNA, 25 bp, Homo sapien
ctcacactctgaccggaagctgcga

SEQ ID NO: 3571170 - DNA, 25 bp, Homo sapien
tgcgaaagtcttggtcatcgggcac

SEQ ID NO: 3571171 - DNA, 25 bp, Homo sapien
tctgaccggaagctgcgaaagtctt

SEQ ID NO: 3571172 - DNA, 25 bp, Homo sapien
ccggaagctgcgaaagtcttggtca

SEQ ID NO: 3571173 - DNA, 25 bp, Homo sapien
gggctctgtagaggccgccagcttc

SEQ ID NO: 3571174 - DNA, 25 bp, Homo sapien
gccgaggcccttggggctctgtaga

SEQ ID NO: 3571175 - DNA, 25 bp, Homo sapien
gcccttggggctctgtagaggccgc

SEQ ID NO: 3571176 - DNA, 25 bp, Homo sapien
ggacactctcacggcccaggaccgg

SEQ ID NO: 3571177 - DNA, 25 bp, Homo sapien
aggctccgacaacgtcgacgcggct

SEQ ID NO: 3571178 - DNA, 25 bp, Homo sapien
tggtcctagtccggctctcctgggt

SEQ ID NO: 3571179 - DNA, 25 bp, Homo sapien
tcgacgcggctgcagatgctgacgc

SEQ ID NO: 3571180 - DNA, 25 bp, Homo sapien
gggtcctccgcggaggctccgacaa

SEQ ID NO: 3571181 - DNA, 25 bp, Homo sapien
ggacgggaatcagtgcgctgggggc

SEQ ID NO: 3571182 - DNA, 25 bp, Homo sapien
tggggacgggaatcagtgcgctggg

SEQ ID NO: 3571183 - DNA, 25 bp, Homo sapien
gtttggggacgggaatcagtgcgct

SEQ ID NO: 3571184 - DNA, 25 bp, Homo sapien
cggtttggggacgggaatcagtgcg

SEQ ID NO: 3571185 - DNA, 25 bp, Homo sapien
cggggtgccagcgccgccgccgcag

SEQ ID NO: 3571186 - DNA, 25 bp, Homo sapien
tgcccgccgctccgccggggcccgc

SEQ ID NO: 3571187 - DNA, 25 bp, Homo sapien
ggccggggtgccagcgccgccgccg

SEQ ID NO: 3571188 - DNA, 25 bp, Homo sapien
cgccggggccggggtgccagcgccg

SEQ ID NO: 3571189 - DNA, 25 bp, Homo sapien
cgcgcccctcccggctaggctgggg

SEQ ID NO: 3571190 - DNA, 25 bp, Homo sapien
aggtgaagctgacggatctccgagc

SEQ ID NO: 3571191 - DNA, 25 bp, Homo sapien
ccagagatccaaagatgggcacaca

SEQ ID NO: 3571192 - DNA, 25 bp, Homo sapien
tgcaacaacctacagtatttacaca

SEQ ID NO: 3571193 - DNA, 25 bp, Homo sapien
gtgggctctgcgaggaagggccacg

SEQ ID NO: 3571194 - DNA, 25 bp, Homo sapien
tagaggcacaccaagcctacacaca

SEQ ID NO: 3571195 - DNA, 25 bp, Homo sapien
ccaagctagaggcacaccaagccta

SEQ ID NO: 3571196 - DNA, 25 bp, Homo sapien
cccaccaagctagaggcacaccaag

SEQ ID NO: 3571197 - DNA, 25 bp, Homo sapien
tcagagatgcccacagcttgcatcc

SEQ ID NO: 3571198 - DNA, 25 bp, Homo sapien
ggagcttgaaccgggactccctcca

SEQ ID NO: 3571199 - DNA, 25 bp, Homo sapien
tgggagcttgaaccgggactccctc

SEQ ID NO: 3571200 - DNA, 25 bp, Homo sapien
ctgggagcttgaaccgggactccct

SEQ ID NO: 3571201 - DNA, 25 bp, Homo sapien
gcttgaaccgggactccctccagcc

SEQ ID NO: 3571202 - DNA, 25 bp, Homo sapien
cagagctccatagctacctgcacca

SEQ ID NO: 3571203 - DNA, 25 bp, Homo sapien
gccagagctccatagctacctgcac

SEQ ID NO: 3571204 - DNA, 25 bp, Homo sapien
ccagagctccatagctacctgcacc

SEQ ID NO: 3571205 - DNA, 25 bp, Homo sapien
aaccctgcctgccagttttgatgga

SEQ ID NO: 3571206 - DNA, 25 bp, Homo sapien
ggagatgatagggtcccacccctac

SEQ ID NO: 3571207 - DNA, 25 bp, Homo sapien
catctagttcgacagatgatggctg

SEQ ID NO: 3571208 - DNA, 25 bp, Homo sapien
tctcccctctgggagatgatagggt

SEQ ID NO: 3571209 - DNA, 25 bp, Homo sapien
agaagcagggtctgtacagctccag

SEQ ID NO: 3571210 - DNA, 25 bp, Homo sapien
gaagcagggtctgtacagctccagc

SEQ ID NO: 3571211 - DNA, 25 bp, Homo sapien
aagcagggtctgtacagctccagca

SEQ ID NO: 3571212 - DNA, 25 bp, Homo sapien
gagaagcagggtctgtacagctcca

SEQ ID NO: 3571213 - DNA, 25 bp, Homo sapien
taagctgttttcacccctggatctc

SEQ ID NO: 3571214 - DNA, 25 bp, Homo sapien
tatccaacaaagacactgacccctg

SEQ ID NO: 3571215 - DNA, 25 bp, Homo sapien
tgggccctcaggtttgcaatttgca

SEQ ID NO: 3571216 - DNA, 25 bp, Homo sapien
taggttctcagggtacagtcagtca

SEQ ID NO: 3571217 - DNA, 25 bp, Homo sapien
aaagaaaggaccacagaacgatgac

SEQ ID NO: 3571218 - DNA, 25 bp, Homo sapien
cctgggtgcagtccttgaatcctga

SEQ ID NO: 3571219 - DNA, 25 bp, Homo sapien
gaagagggtcattccttgtgaatca

SEQ ID NO: 3571220 - DNA, 25 bp, Homo sapien
tgcctgacttcctctaacctgttgt

SEQ ID NO: 3571221 - DNA, 25 bp, Homo sapien
gcgcaggcgctctttggtgtttaca

SEQ ID NO: 3571222 - DNA, 25 bp, Homo sapien
cctagtggttgtggccgctctgtca

SEQ ID NO: 3571223 - DNA, 25 bp, Homo sapien
tgaattccaccggaatggcgcgcgc

SEQ ID NO: 3571224 - DNA, 25 bp, Homo sapien
ttacggttatcttcgctcaggcgcc

SEQ ID NO: 3571225 - DNA, 25 bp, Homo sapien
tgacctcaagtaatccacctgcctc

SEQ ID NO: 3571226 - DNA, 25 bp, Homo sapien
cgatcttggctcacttgggttcaag

SEQ ID NO: 3571227 - DNA, 25 bp, Homo sapien
actacaggtgtgtggcactacacct

SEQ ID NO: 3571228 - DNA, 25 bp, Homo sapien
gatcttggctcacttgggttcaagt

SEQ ID NO: 3571229 - DNA, 25 bp, Homo sapien
tcccagcctggtagaagagacataa

SEQ ID NO: 3571230 - DNA, 25 bp, Homo sapien
tctgcctggtatgtaggagctagcc

SEQ ID NO: 3571231 - DNA, 25 bp, Homo sapien
ggagctagcctctaaaagttgtgga

SEQ ID NO: 3571232 - DNA, 25 bp, Homo sapien
gccaagcctggttctagatgctgaa

SEQ ID NO: 3571233 - DNA, 25 bp, Homo sapien
aaaaccagcgatagtggcatgtgcc

SEQ ID NO: 3571234 - DNA, 25 bp, Homo sapien
tttttagtcaaaatcaatcacttct

SEQ ID NO: 3571235 - DNA, 25 bp, Homo sapien
tcctaggtgtattttgtgagtcaaa

SEQ ID NO: 3571236 - DNA, 25 bp, Homo sapien
agtgaagtactttaggtccccagat

SEQ ID NO: 3571237 - DNA, 25 bp, Homo sapien
tctccatgggtactgtgcctgtctc

SEQ ID NO: 3571238 - DNA, 25 bp, Homo sapien
ccaggccaagccctgttaatatact

SEQ ID NO: 3571239 - DNA, 25 bp, Homo sapien
tatatagtgtctccaagcacccaag

SEQ ID NO: 3571240 - DNA, 25 bp, Homo sapien
caagagtccgccagttctaaaggga

SEQ ID NO: 3571241 - DNA, 25 bp, Homo sapien
aaaatttcggcgaccatgtggagcc

SEQ ID NO: 3571242 - DNA, 25 bp, Homo sapien
cacctggcgttttcgtgtcacggaa

SEQ ID NO: 3571243 - DNA, 25 bp, Homo sapien
ccctagggatgttcaagtctgccaa

SEQ ID NO: 3571244 - DNA, 25 bp, Homo sapien
catgattcactttcgagggtaccca

SEQ ID NO: 3571245 - DNA, 25 bp, Homo sapien
ggcttatggaacacctccctgtcag

SEQ ID NO: 3571246 - DNA, 25 bp, Homo sapien
cacttattggcccatccggagaggg

SEQ ID NO: 3571247 - DNA, 25 bp, Homo sapien
cgacactcggaacctctaaggagga

SEQ ID NO: 3571248 - DNA, 25 bp, Homo sapien
tcagtgcacttagtctcggtagcgc

SEQ ID NO: 3571249 - DNA, 25 bp, Homo sapien
tgagaagagttcgtggtgaccagcc

SEQ ID NO: 3571250 - DNA, 25 bp, Homo sapien
tctgtgcgttactatgggcctggaa

SEQ ID NO: 3571251 - DNA, 25 bp, Homo sapien
ggaacctccagtaccgaaagcagct

SEQ ID NO: 3571252 - DNA, 25 bp, Homo sapien
tatcaaggaccctagttctggaggg

SEQ ID NO: 3571253 - DNA, 25 bp, Homo sapien
taagagtcttatgcacaggataatg

SEQ ID NO: 3571254 - DNA, 25 bp, Homo sapien
aagccagtggtcacatccggcaagg

SEQ ID NO: 3571255 - DNA, 25 bp, Homo sapien
tagtacccaggatattacacctagc

SEQ ID NO: 3571256 - DNA, 25 bp, Homo sapien
cacaattcattactccttagggtgg

SEQ ID NO: 3571257 - DNA, 25 bp, Homo sapien
accatagcagttggtctggaccagc

SEQ ID NO: 3571258 - DNA, 25 bp, Homo sapien
tacttgtgcagggtgcgcaatcctt

SEQ ID NO: 3571259 - DNA, 25 bp, Homo sapien
tacaagactgggtggcaagaactgc

SEQ ID NO: 3571260 - DNA, 25 bp, Homo sapien
ggcgtccccagtagagaagctcaac

SEQ ID NO: 3571261 - DNA, 25 bp, Homo sapien
tgtgccctggaatgaggcctgttct

SEQ ID NO: 3571262 - DNA, 25 bp, Homo sapien
tattcaaaacgtgggaggagtctac

SEQ ID NO: 3571263 - DNA, 25 bp, Homo sapien
cagaccactgttaggcatgagggct

SEQ ID NO: 3571264 - DNA, 25 bp, Homo sapien
tagcagtaatggatgggcaagccca

SEQ ID NO: 3571265 - DNA, 25 bp, Homo sapien
ccacatcttcaatcttctctgctgg

SEQ ID NO: 3571266 - DNA, 25 bp, Homo sapien
tgtaggtggagggggagctgcccgg

SEQ ID NO: 3571267 - DNA, 25 bp, Homo sapien
ctgtgtaggtggagggggagctgcc

SEQ ID NO: 3571268 - DNA, 25 bp, Homo sapien
tgtgtaggtggagggggagctgccc

SEQ ID NO: 3571269 - DNA, 25 bp, Homo sapien
taggtggagggggagctgcccggac

SEQ ID NO: 3571270 - DNA, 25 bp, Homo sapien
ggcaaggctgcaaaggtccacagaa

SEQ ID NO: 3571271 - DNA, 25 bp, Homo sapien
tatccacacatctgaagctcaagag

SEQ ID NO: 3571272 - DNA, 25 bp, Homo sapien
gagttgacaatagcccaaacgaggg

SEQ ID NO: 3571273 - DNA, 25 bp, Homo sapien
tatccgactggattaccgtgcaagt

SEQ ID NO: 3571274 - DNA, 25 bp, Homo sapien
caatttggaagaactatgcattcga

SEQ ID NO: 3571275 - DNA, 25 bp, Homo sapien
aatttggaagaactatgcattcgat

SEQ ID NO: 3571276 - DNA, 25 bp, Homo sapien
tttggaagaactatgcattcgataa

SEQ ID NO: 3571277 - DNA, 25 bp, Homo sapien
tggaagaactatgcattcgataatc

SEQ ID NO: 3571278 - DNA, 25 bp, Homo sapien
ccatatgaggtctcaggagtatgcc

SEQ ID NO: 3571279 - DNA, 25 bp, Homo sapien
tctcaggagtatgccttgatgcctg

SEQ ID NO: 3571280 - DNA, 25 bp, Homo sapien
ccttgatgcctgtgagaatcctggt

SEQ ID NO: 3571281 - DNA, 25 bp, Homo sapien
tggtgactcagcatgaaggcttttt

SEQ ID NO: 3571282 - DNA, 25 bp, Homo sapien
tgtaggtttctgaagtgaaaatgca

SEQ ID NO: 3571283 - DNA, 25 bp, Homo sapien
aatgcatttagacccatgcccagga

SEQ ID NO: 3571284 - DNA, 25 bp, Homo sapien
aattggttgctatgagccgtgatca

SEQ ID NO: 3571285 - DNA, 25 bp, Homo sapien
cccttcaggcgaatatgtaggtttc

SEQ ID NO: 3571286 - DNA, 25 bp, Homo sapien
tgctgaaggagaccggggaaagtac

SEQ ID NO: 3571287 - DNA, 25 bp, Homo sapien
gtcgtacaacggcagtggaggcagg

SEQ ID NO: 3571288 - DNA, 25 bp, Homo sapien
gaggctggtcgtacaacggcagtgg

SEQ ID NO: 3571289 - DNA, 25 bp, Homo sapien
ctgctgggaggctggtcgtacaacg

SEQ ID NO: 3571290 - DNA, 25 bp, Homo sapien
cgcccattgaattccccttcccaga

SEQ ID NO: 3571291 - DNA, 25 bp, Homo sapien
gggaaaactccaatacgcccattga

SEQ ID NO: 3571292 - DNA, 25 bp, Homo sapien
tccactagcaccgatgggaaaactc

SEQ ID NO: 3571293 - DNA, 25 bp, Homo sapien
gatacggattattgctccctcagga

SEQ ID NO: 3571294 - DNA, 25 bp, Homo sapien
acagccggttgcttttgcaaccacc

SEQ ID NO: 3571295 - DNA, 25 bp, Homo sapien
agaaaaacaaatctggtaagataat

SEQ ID NO: 3571296 - DNA, 25 bp, Homo sapien
acaaatctggtaagataattaacag

SEQ ID NO: 3571297 - DNA, 25 bp, Homo sapien
gataattaacagccggttgcttttg

SEQ ID NO: 3571298 - DNA, 25 bp, Homo sapien
aactttagggttctactgtgcagga

SEQ ID NO: 3571299 - DNA, 25 bp, Homo sapien
caaacgtgaccaaataaagagtgcc

SEQ ID NO: 3571300 - DNA, 25 bp, Homo sapien
tgtgcaggacaaacgtgaccatata

SEQ ID NO: 3571301 - DNA, 25 bp, Homo sapien
ttactccagggcaatacagtttagg

SEQ ID NO: 3571302 - DNA, 25 bp, Homo sapien
tgcctgaaacgagttctgcttccgt

SEQ ID NO: 3571303 - DNA, 25 bp, Homo sapien
cgactgtccaaagcggccagggact

SEQ ID NO: 3571304 - DNA, 25 bp, Homo sapien
gaattgctggacgtgtgtgaccgac

SEQ ID NO: 3571305 - DNA, 25 bp, Homo sapien
gcatctccgttgaggctgcctgaaa

SEQ ID NO: 3571306 - DNA, 25 bp, Homo sapien
gtacttttctggcacataacccact

SEQ ID NO: 3571307 - DNA, 25 bp, Homo sapien
ttttctggcacataacccacttggc

SEQ ID NO: 3571308 - DNA, 25 bp, Homo sapien
ccacttggccaactttatttcgagc

SEQ ID NO: 3571309 - DNA, 25 bp, Homo sapien
tgttcgaggtgggaaactgtaggta

SEQ ID NO: 3571310 - DNA, 25 bp, Homo sapien
tcctcaatggtcaactcatctggtt

SEQ ID NO: 3571311 - DNA, 25 bp, Homo sapien
tctaacacctcatgttcctcaatgg

SEQ ID NO: 3571312 - DNA, 25 bp, Homo sapien
tcatgttcctcaatggtcaactcat

SEQ ID NO: 3571313 - DNA, 25 bp, Homo sapien
caatggtcaactcatctggttgaga

SEQ ID NO: 3571314 - DNA, 25 bp, Homo sapien
gaactgctgtcatcgaaaacatcca

SEQ ID NO: 3571315 - DNA, 25 bp, Homo sapien
acaactttgcaggtgagtggataat

SEQ ID NO: 3571316 - DNA, 25 bp, Homo sapien
taatttcttaaggtgccagaagggc

SEQ ID NO: 3571317 - DNA, 25 bp, Homo sapien
catgttatcttcaaactcttcgcct

SEQ ID NO: 3571318 - DNA, 25 bp, Homo sapien
gacactgggcatcactcatgaagga

SEQ ID NO: 3571319 - DNA, 25 bp, Homo sapien
tcaggatgcggagtatagcagtctc

SEQ ID NO: 3571320 - DNA, 25 bp, Homo sapien
gaaacccaggcacatgatggtgacc

SEQ ID NO: 3571321 - DNA, 25 bp, Homo sapien
tttccatggtgccagttacccagtc

SEQ ID NO: 3571322 - DNA, 25 bp, Homo sapien
cagatgacgaatgcttttgttggca

SEQ ID NO: 3571323 - DNA, 25 bp, Homo sapien
gaaggcagagttaatacccaagtaa

SEQ ID NO: 3571324 - DNA, 25 bp, Homo sapien
aaaacaacgttgctatactctggga

SEQ ID NO: 3571325 - DNA, 25 bp, Homo sapien
tccagacacctgcaactgagtaact

SEQ ID NO: 3571326 - DNA, 25 bp, Homo sapien
gactagcaaggcatcacatatccag

SEQ ID NO: 3571327 - DNA, 25 bp, Homo sapien
tatccagctatgtaatatcaggcaa

SEQ ID NO: 3571328 - DNA, 25 bp, Homo sapien
gactaagcccacgtactaagaagaa

SEQ ID NO: 3571329 - DNA, 25 bp, Homo sapien
taaggttgaaccagatgacatcaga

SEQ ID NO: 3571330 - DNA, 25 bp, Homo sapien
aaagtgccattactggtcactgcag

SEQ ID NO: 3571331 - DNA, 25 bp, Homo sapien
gggcgggcccatcgctcattttcca

SEQ ID NO: 3571332 - DNA, 25 bp, Homo sapien
agaaacaccaatctgctttagcagg

SEQ ID NO: 3571333 - DNA, 25 bp, Homo sapien
tacttggttcatggcactctttagc

SEQ ID NO: 3571334 - DNA, 25 bp, Homo sapien
agaaaggaatcagggtctcctaaca

SEQ ID NO: 3571335 - DNA, 25 bp, Homo sapien
ggcacagatgctaatttttcacttg

SEQ ID NO: 3571336 - DNA, 25 bp, Homo sapien
gtctcctaacaatggaatacttgct

SEQ ID NO: 3571337 - DNA, 25 bp, Homo sapien
cactagcaattcttccctggcacag

SEQ ID NO: 3571338 - DNA, 25 bp, Homo sapien
tgtgtgtcatccttgcataggggcc

SEQ ID NO: 3571339 - DNA, 25 bp, Homo sapien
ctaatcttctctgcatcatttcaat

SEQ ID NO: 3571340 - DNA, 25 bp, Homo sapien
taaaagtatggaatgcttcacgaat

SEQ ID NO: 3571341 - DNA, 25 bp, Homo sapien
tgctaatcttctctgcatcatttca

SEQ ID NO: 3571342 - DNA, 25 bp, Homo sapien
agggcatggtattgatgatagatca

SEQ ID NO: 3571343 - DNA, 25 bp, Homo sapien
gacaagggcatggtattgatgatag

SEQ ID NO: 3571344 - DNA, 25 bp, Homo sapien
caagggcatggtattgatgatagat

SEQ ID NO: 3571345 - DNA, 25 bp, Homo sapien
ttttgacaagggcatggtattgatg

SEQ ID NO: 3571346 - DNA, 25 bp, Homo sapien
gacaaagaccttttggcacacaact

SEQ ID NO: 3571347 - DNA, 25 bp, Homo sapien
gaaaccatgtaccatttacctattg

SEQ ID NO: 3571348 - DNA, 25 bp, Homo sapien
tattgacatatagctcaggtgacaa

SEQ ID NO: 3571349 - DNA, 25 bp, Homo sapien
tggcttagaggcactccaattggta

SEQ ID NO: 3571350 - DNA, 25 bp, Homo sapien
cattttcctggataactattaatgt

SEQ ID NO: 3571351 - DNA, 25 bp, Homo sapien
ttttcctggataactattaatgtta

SEQ ID NO: 3571352 - DNA, 25 bp, Homo sapien
tttcctggataactattaatgttac

SEQ ID NO: 3571353 - DNA, 25 bp, Homo sapien
tcctggataactattaatgttacaa

SEQ ID NO: 3571354 - DNA, 25 bp, Homo sapien
ggcattccagatactacttgaccaa

SEQ ID NO: 3571355 - DNA, 25 bp, Homo sapien
aatgcggtggtatgacaatagctca

SEQ ID NO: 3571356 - DNA, 25 bp, Homo sapien
taaacatggtatttgccaactcaga

SEQ ID NO: 3571357 - DNA, 25 bp, Homo sapien
ctcagatttagactgcagtcccaga

SEQ ID NO: 3571358 - DNA, 25 bp, Homo sapien
gctctgctcggctttgttctgatac

SEQ ID NO: 3571359 - DNA, 25 bp, Homo sapien
catgacactccagatcatttagaac

SEQ ID NO: 3571360 - DNA, 25 bp, Homo sapien
gctccatgacactccagatcattta

SEQ ID NO: 3571361 - DNA, 25 bp, Homo sapien
ctcggctttgttctgatacagcagc

SEQ ID NO: 3571362 - DNA, 25 bp, Homo sapien
tgtagacaccgggttttttgccatg

SEQ ID NO: 3571363 - DNA, 25 bp, Homo sapien
ggtgggaagataggtgtgcgccccc

SEQ ID NO: 3571364 - DNA, 25 bp, Homo sapien
aacaaaacaacacatataggatatt

SEQ ID NO: 3571365 - DNA, 25 bp, Homo sapien
caaaacaacacatataggatatttt

SEQ ID NO: 3571366 - DNA, 25 bp, Homo sapien
gcaagcctcttgtctcaaataaaac

SEQ ID NO: 3571367 - DNA, 25 bp, Homo sapien
cacatataggatatttttcacatta

SEQ ID NO: 3571368 - DNA, 25 bp, Homo sapien
acgtgtggcccattttcgagcttcc

SEQ ID NO: 3571369 - DNA, 25 bp, Homo sapien
tgtttttatgctcacgtgccacacg

SEQ ID NO: 3571370 - DNA, 25 bp, Homo sapien
tcgagcttccttatttagactgtgc

SEQ ID NO: 3571371 - DNA, 25 bp, Homo sapien
cagtttctgattctaactgtcggct

SEQ ID NO: 3571372 - DNA, 25 bp, Homo sapien
agatgttaaatgttacaaccttaat

SEQ ID NO: 3571373 - DNA, 25 bp, Homo sapien
ttttagaaattctgatcacggctca

SEQ ID NO: 3571374 - DNA, 25 bp, Homo sapien
taattgaccgattccagaatcagag

SEQ ID NO: 3571375 - DNA, 25 bp, Homo sapien
taatttttcctggatgtcctagatg

SEQ ID NO: 3571376 - DNA, 25 bp, Homo sapien
taatttttaatctatagaaggcaga

SEQ ID NO: 3571377 - DNA, 25 bp, Homo sapien
ggcagaattaaatatcagaaatagc

SEQ ID NO: 3571378 - DNA, 25 bp, Homo sapien
ttttaatctatagaaggcagaatta

SEQ ID NO: 3571379 - DNA, 25 bp, Homo sapien
gcagaattaaatatcagaaatagca

SEQ ID NO: 3571380 - DNA, 25 bp, Homo sapien
acatattcaattgggtgtcttggac

SEQ ID NO: 3571381 - DNA, 25 bp, Homo sapien
cctgtaaggcaagggcatatgcaaa

SEQ ID NO: 3571382 - DNA, 25 bp, Homo sapien
tatcacagtggtaactttaaaagtc

SEQ ID NO: 3571383 - DNA, 25 bp, Homo sapien
aaaataacacctggttgcatcccac

SEQ ID NO: 3571384 - DNA, 25 bp, Homo sapien
gagctcaatatccaccagttgggcg

SEQ ID NO: 3571385 - DNA, 25 bp, Homo sapien
tcaatatccaccagttgggcggctt

SEQ ID NO: 3571386 - DNA, 25 bp, Homo sapien
tatccaccagttgggcggcttttaa

SEQ ID NO: 3571387 - DNA, 25 bp, Homo sapien
gggagagctcaatatccaccagttg

SEQ ID NO: 3571388 - DNA, 25 bp, Homo sapien
gaaatacagcgttttcttgcaaaaa

SEQ ID NO: 3571389 - DNA, 25 bp, Homo sapien
cagcgttttcttgcaaaaacagctg

SEQ ID NO: 3571390 - DNA, 25 bp, Homo sapien
gggctggggtttgtgaaatacagcg

SEQ ID NO: 3571391 - DNA, 25 bp, Homo sapien
tacagcgttttcttgcaaaaacagc

SEQ ID NO: 3571392 - DNA, 25 bp, Homo sapien
cattctgttgtgacatagtatctca

SEQ ID NO: 3571393 - DNA, 25 bp, Homo sapien
cgccattctgttgtgacatagtatc

SEQ ID NO: 3571394 - DNA, 25 bp, Homo sapien
tctgttgtgacatagtatctcattg

SEQ ID NO: 3571395 - DNA, 25 bp, Homo sapien
atcgccattctgttgtgacatagta

SEQ ID NO: 3571396 - DNA, 25 bp, Homo sapien
agaatggcactggtattttgaaaga

SEQ ID NO: 3571397 - DNA, 25 bp, Homo sapien
gaatggcactggtattttgaaagag

SEQ ID NO: 3571398 - DNA, 25 bp, Homo sapien
aagaatggcactggtattttgaaag

SEQ ID NO: 3571399 - DNA, 25 bp, Homo sapien
aattataaaggccagtagagctacc

SEQ ID NO: 3571400 - DNA, 25 bp, Homo sapien
gagtgtgtaacctcaggccaagcca

SEQ ID NO: 3571401 - DNA, 25 bp, Homo sapien
ctggtacttggaacaaaagggcact

SEQ ID NO: 3571402 - DNA, 25 bp, Homo sapien
ttaacaaaagctcctagggccatct

SEQ ID NO: 3571403 - DNA, 25 bp, Homo sapien
tatatatacaagaggcattcaggat

SEQ ID NO: 3571404 - DNA, 25 bp, Homo sapien
tgaaatggacaactgcctaggaaaa

SEQ ID NO: 3571405 - DNA, 25 bp, Homo sapien
cacagaattgagagctctggtacag

SEQ ID NO: 3571406 - DNA, 25 bp, Homo sapien
aaaaatttgatcacggctgggcatg

SEQ ID NO: 3571407 - DNA, 25 bp, Homo sapien
tctagctcagtccggctgaaggcta

SEQ ID NO: 3571408 - DNA, 25 bp, Homo sapien
taatccttgagatgatcatacacat

SEQ ID NO: 3571409 - DNA, 25 bp, Homo sapien
aataatccttgagatgatcatacac

SEQ ID NO: 3571410 - DNA, 25 bp, Homo sapien
ccggctgaaggctattaaataatcc

SEQ ID NO: 3571411 - DNA, 25 bp, Homo sapien
ggttttgtttgagcacctgtttcca

SEQ ID NO: 3571412 - DNA, 25 bp, Homo sapien
gttttgtttgagcacctgtttccat

SEQ ID NO: 3571413 - DNA, 25 bp, Homo sapien
ttttgtttgagcacctgtttccatt

SEQ ID NO: 3571414 - DNA, 25 bp, Homo sapien
ttgtttgagcacctgtttccatttc

SEQ ID NO: 3571415 - DNA, 25 bp, Homo sapien
taaggcatggattttaaggtgaacc

SEQ ID NO: 3571416 - DNA, 25 bp, Homo sapien
gagttcagcaaatggtaatacaggc

SEQ ID NO: 3571417 - DNA, 25 bp, Homo sapien
tacaccactagatgacaccattgag

SEQ ID NO: 3571418 - DNA, 25 bp, Homo sapien
ccttagaaatggtcttggtggacaa

SEQ ID NO: 3571419 - DNA, 25 bp, Homo sapien
atcaaattgcctcttagactgaatc

SEQ ID NO: 3571420 - DNA, 25 bp, Homo sapien
gcctcttagactgaatcattctctt

SEQ ID NO: 3571421 - DNA, 25 bp, Homo sapien
aattgcctcttagactgaatcattc

SEQ ID NO: 3571422 - DNA, 25 bp, Homo sapien
ctgtgcatcaaattgcctcttagac

SEQ ID NO: 3571423 - DNA, 25 bp, Homo sapien
taaaagtggcctctgagctactaaa

SEQ ID NO: 3571424 - DNA, 25 bp, Homo sapien
cactcacatgtccattctaaagtca

SEQ ID NO: 3571425 - DNA, 25 bp, Homo sapien
cattagcagaggacgttcaggaagg

SEQ ID NO: 3571426 - DNA, 25 bp, Homo sapien
tgtgctgtgcttggcagtatttgaa

SEQ ID NO: 3571427 - DNA, 25 bp, Homo sapien
catgcctggccttgacggctctttg

SEQ ID NO: 3571428 - DNA, 25 bp, Homo sapien
gagaacatctgtggactgcttgtac

SEQ ID NO: 3571429 - DNA, 25 bp, Homo sapien
gttccagggagtttcttcgagaaca

SEQ ID NO: 3571430 - DNA, 25 bp, Homo sapien
tgtataaccgagtagtaaagttcca

SEQ ID NO: 3571431 - DNA, 25 bp, Homo sapien
gaccgtatgttccaccatgctattg

SEQ ID NO: 3571432 - DNA, 25 bp, Homo sapien
tgggcttggaaaggaccgtatgttc

SEQ ID NO: 3571433 - DNA, 25 bp, Homo sapien
ccaatggatcaccaaagcagtctat

SEQ ID NO: 3571434 - DNA, 25 bp, Homo sapien
catgctattggtggttcttgccggg

SEQ ID NO: 3571435 - DNA, 25 bp, Homo sapien
taacttctattgcatgacatggagg

SEQ ID NO: 3571436 - DNA, 25 bp, Homo sapien
agacggagatgaagggcacagaaat

SEQ ID NO: 3571437 - DNA, 25 bp, Homo sapien
taaactactacactaagaacgtatg

SEQ ID NO: 3571438 - DNA, 25 bp, Homo sapien
cattattcattgtgatgctgccaac

SEQ ID NO: 3571439 - DNA, 25 bp, Homo sapien
cacaggtagtagttgcggtggaaac

SEQ ID NO: 3571440 - DNA, 25 bp, Homo sapien
catgctgtgggactacacttcctag

SEQ ID NO: 3571441 - DNA, 25 bp, Homo sapien
gattgaccacgtgactaattctctc

SEQ ID NO: 3571442 - DNA, 25 bp, Homo sapien
gcctccatacctgctgtgagattga

SEQ ID NO: 3571443 - DNA, 25 bp, Homo sapien
acacaactactcctctatggtgctg

SEQ ID NO: 3571444 - DNA, 25 bp, Homo sapien
tactcctctatggtgctggcagact

SEQ ID NO: 3571445 - DNA, 25 bp, Homo sapien
tcagcagttcacccgctttaaagcc

SEQ ID NO: 3571446 - DNA, 25 bp, Homo sapien
cagttcacccgctttaaagcctcag

SEQ ID NO: 3571447 - DNA, 25 bp, Homo sapien
gaaatcagaaaggtcttaggagccc

SEQ ID NO: 3571448 - DNA, 25 bp, Homo sapien
tcaggagcccactaagagttacttc

SEQ ID NO: 3571449 - DNA, 25 bp, Homo sapien
taaaaattggcgttcctatgacacc

SEQ ID NO: 3571450 - DNA, 25 bp, Homo sapien
caggatattggcagagtctccccac

SEQ ID NO: 3571451 - DNA, 25 bp, Homo sapien
taagggagtaatcttgcatggcgga

SEQ ID NO: 3571452 - DNA, 25 bp, Homo sapien
cacgatttgctctcaaatggatcag

SEQ ID NO: 3571453 - DNA, 25 bp, Homo sapien
tcctgatttggatagctaggtaagg

SEQ ID NO: 3571454 - DNA, 25 bp, Homo sapien
tgggttggttccaaggactctactc

SEQ ID NO: 3571455 - DNA, 25 bp, Homo sapien
tgctcccaatagctttctatgtgtt

SEQ ID NO: 3571456 - DNA, 25 bp, Homo sapien
ctgctcccaatagctttctatgtgt

SEQ ID NO: 3571457 - DNA, 25 bp, Homo sapien
ctcccaatagctttctatgtgttta

SEQ ID NO: 3571458 - DNA, 25 bp, Homo sapien
gctcccaatagctttctatgtgttt

SEQ ID NO: 3571459 - DNA, 25 bp, Homo sapien
tcatgcctggtttatttttaagaag

SEQ ID NO: 3571460 - DNA, 25 bp, Homo sapien
gatgtgtaccatcatgcctggttta

SEQ ID NO: 3571461 - DNA, 25 bp, Homo sapien
atcatgcctggtttatttttaagaa

SEQ ID NO: 3571462 - DNA, 25 bp, Homo sapien
acagatgtgtaccatcatgcctggt

SEQ ID NO: 3571463 - DNA, 25 bp, Homo sapien
tgcctgcatagcttcactgcaagct

SEQ ID NO: 3571464 - DNA, 25 bp, Homo sapien
ttgcctgcatagcttcactgcaagc

SEQ ID NO: 3571465 - DNA, 25 bp, Homo sapien
cctgcatagcttcactgcaagctcc

SEQ ID NO: 3571466 - DNA, 25 bp, Homo sapien
gcctgcatagcttcactgcaagctc

SEQ ID NO: 3571467 - DNA, 25 bp, Homo sapien
ctggggtatcacttaggtggctggt

SEQ ID NO: 3571468 - DNA, 25 bp, Homo sapien
gggtatcacttaggtggctggtctt

SEQ ID NO: 3571469 - DNA, 25 bp, Homo sapien
tatcacttaggtggctggtcttctc

SEQ ID NO: 3571470 - DNA, 25 bp, Homo sapien
ctggtcttctcagactccagatgtc

SEQ ID NO: 3571471 - DNA, 25 bp, Homo sapien
tgtgggcggcaccagagaataacct

SEQ ID NO: 3571472 - DNA, 25 bp, Homo sapien
ggtgccctagtattcagcctgatgc

SEQ ID NO: 3571473 - DNA, 25 bp, Homo sapien
gcctgatgccttaggaaccatggga

SEQ ID NO: 3571474 - DNA, 25 bp, Homo sapien
taaccaatgtagcagggaaagaatc

SEQ ID NO: 3571475 - DNA, 25 bp, Homo sapien
tgcaagttgcataatatcacagggc

SEQ ID NO: 3571476 - DNA, 25 bp, Homo sapien
acagggcatgatactatctaagaca

SEQ ID NO: 3571477 - DNA, 25 bp, Homo sapien
gagtggtagttacaatctgttgaac

SEQ ID NO: 3571478 - DNA, 25 bp, Homo sapien
caacactatctattgtcagagtggt

SEQ ID NO: 3571479 - DNA, 25 bp, Homo sapien
aaattctctaagacactggactggg

SEQ ID NO: 3571480 - DNA, 25 bp, Homo sapien
ggggaaattctctaagacactggac

SEQ ID NO: 3571481 - DNA, 25 bp, Homo sapien
tgggggaaattctctaagacactgg

SEQ ID NO: 3571482 - DNA, 25 bp, Homo sapien
gggaaattctctaagacactggact

SEQ ID NO: 3571483 - DNA, 25 bp, Homo sapien
caaccattggggcgattcctcaagg

SEQ ID NO: 3571484 - DNA, 25 bp, Homo sapien
gttcaaccattggggcgattcctca

SEQ ID NO: 3571485 - DNA, 25 bp, Homo sapien
tcaaccattggggcgattcctcaag

SEQ ID NO: 3571486 - DNA, 25 bp, Homo sapien
atccaaaagacaggtgatatgtttg

SEQ ID NO: 3571487 - DNA, 25 bp, Homo sapien
catgtcatcccaggtcaaatgactt

SEQ ID NO: 3571488 - DNA, 25 bp, Homo sapien
ccaaaagacaggtgatatgtttggc

SEQ ID NO: 3571489 - DNA, 25 bp, Homo sapien
actataattagatagcatgtcatcc

SEQ ID NO: 3571490 - DNA, 25 bp, Homo sapien
taatgccaaggcaatattaagcaat

SEQ ID NO: 3571491 - DNA, 25 bp, Homo sapien
ccatattgagctctttgaggataag

SEQ ID NO: 3571492 - DNA, 25 bp, Homo sapien
tccatcactctaatttgcaatcatg

SEQ ID NO: 3571493 - DNA, 25 bp, Homo sapien
ttactaaccacagtcctccagcagt

SEQ ID NO: 3571494 - DNA, 25 bp, Homo sapien
tatcttctacatcaataaccactag

SEQ ID NO: 3571495 - DNA, 25 bp, Homo sapien
tttcccagtttgagtcattatttta

SEQ ID NO: 3571496 - DNA, 25 bp, Homo sapien
tcaataaccactagataacaaatgt

SEQ ID NO: 3571497 - DNA, 25 bp, Homo sapien
tatttcttacatcactcttgtatct

SEQ ID NO: 3571498 - DNA, 25 bp, Homo sapien
gataatcattccttgcgtgggtagc

SEQ ID NO: 3571499 - DNA, 25 bp, Homo sapien
gaattacactcagatcgccgggctt

SEQ ID NO: 3571500 - DNA, 25 bp, Homo sapien
gatcctgatgtgcatttgctgccgc

SEQ ID NO: 3571501 - DNA, 25 bp, Homo sapien
gctgccgctagggtaagaagataat

SEQ ID NO: 3571502 - DNA, 25 bp, Homo sapien
tttacacttgccttctgtaaactga

SEQ ID NO: 3571503 - DNA, 25 bp, Homo sapien
ctttacacttgccttctgtaaactg

SEQ ID NO: 3571504 - DNA, 25 bp, Homo sapien
tacacttgccttctgtaaactgatt

SEQ ID NO: 3571505 - DNA, 25 bp, Homo sapien
ttacacttgccttctgtaaactgat

SEQ ID NO: 3571506 - DNA, 25 bp, Homo sapien
cttgattgaaaaagactaagtttag

SEQ ID NO: 3571507 - DNA, 25 bp, Homo sapien
ttgattgaaaaagactaagtttaga

SEQ ID NO: 3571508 - DNA, 25 bp, Homo sapien
tgattgaaaaagactaagtttagat

SEQ ID NO: 3571509 - DNA, 25 bp, Homo sapien
gactattctcagtaccatacaactt

SEQ ID NO: 3571510 - DNA, 25 bp, Homo sapien
ttcctgcaaaggttagagagaccca

SEQ ID NO: 3571511 - DNA, 25 bp, Homo sapien
ggaggcaagcgtcagcaaactttca

SEQ ID NO: 3571512 - DNA, 25 bp, Homo sapien
gagacccagggacaatcaacctatg

SEQ ID NO: 3571513 - DNA, 25 bp, Homo sapien
tttctctcgtactgcatgagccatc

SEQ ID NO: 3571514 - DNA, 25 bp, Homo sapien
taattcagtttggatctttgtcaac

SEQ ID NO: 3571515 - DNA, 25 bp, Homo sapien
gcctttagctaaatctttcactgtc

SEQ ID NO: 3571516 - DNA, 25 bp, Homo sapien
tcgatgtcagctttctctcgtactg

SEQ ID NO: 3571517 - DNA, 25 bp, Homo sapien
gcaccagaggtagttaaactctcta

SEQ ID NO: 3571518 - DNA, 25 bp, Homo sapien
ttcaggtctgagattacttcatcaa

SEQ ID NO: 3571519 - DNA, 25 bp, Homo sapien
gcccaggaatgtcagttaaattcag

SEQ ID NO: 3571520 - DNA, 25 bp, Homo sapien
gattacttcatcaatggaagagaaa

SEQ ID NO: 3571521 - DNA, 25 bp, Homo sapien
tcaagaactagtgggattaataacc

SEQ ID NO: 3571522 - DNA, 25 bp, Homo sapien
tacttgaattatgccgaaaagcggt

SEQ ID NO: 3571523 - DNA, 25 bp, Homo sapien
aatgtcaaccagaaacatatgggac

SEQ ID NO: 3571524 - DNA, 25 bp, Homo sapien
tactgagctttttgaacgtccatgg

SEQ ID NO: 3571525 - DNA, 25 bp, Homo sapien
gttgctgttcttttaagcttctcac

SEQ ID NO: 3571526 - DNA, 25 bp, Homo sapien
tttagttgctgttcttttaagcttc

SEQ ID NO: 3571527 - DNA, 25 bp, Homo sapien
tagttgctgttcttttaagcttctc

SEQ ID NO: 3571528 - DNA, 25 bp, Homo sapien
agttgctgttcttttaagcttctca

SEQ ID NO: 3571529 - DNA, 25 bp, Homo sapien
cacatatattcatccgagactgggc

SEQ ID NO: 3571530 - DNA, 25 bp, Homo sapien
tcacatatattcatccgagactggg

SEQ ID NO: 3571531 - DNA, 25 bp, Homo sapien
acatatattcatccgagactgggct

SEQ ID NO: 3571532 - DNA, 25 bp, Homo sapien
atatattcatccgagactgggctac

SEQ ID NO: 3571533 - DNA, 25 bp, Homo sapien
agatttccaaacgggatacatgctc

SEQ ID NO: 3571534 - DNA, 25 bp, Homo sapien
aaagatttccaaacgggatacatgc

SEQ ID NO: 3571535 - DNA, 25 bp, Homo sapien
aagatttccaaacgggatacatgct

SEQ ID NO: 3571536 - DNA, 25 bp, Homo sapien
aaaagatttccaaacgggatacatg

SEQ ID NO: 3571537 - DNA, 25 bp, Homo sapien
gcttactgctcttaccgccaattgg

SEQ ID NO: 3571538 - DNA, 25 bp, Homo sapien
gcacattacagcaattgctgcgcaa

SEQ ID NO: 3571539 - DNA, 25 bp, Homo sapien
tgcgcaatcacttcttggccctctg

SEQ ID NO: 3571540 - DNA, 25 bp, Homo sapien
cattcactgttgtatgttcggcaca

SEQ ID NO: 3571541 - DNA, 25 bp, Homo sapien
gactgcttgggttatttcataggac

SEQ ID NO: 3571542 - DNA, 25 bp, Homo sapien
gagaaatctgctagtagtctcatag

SEQ ID NO: 3571543 - DNA, 25 bp, Homo sapien
gtctcatagcagttccttgacaggt

SEQ ID NO: 3571544 - DNA, 25 bp, Homo sapien
ccatctgggaaaccaataatatgtg

SEQ ID NO: 3571545 - DNA, 25 bp, Homo sapien
gggataatcttctgggtcttgagca

SEQ ID NO: 3571546 - DNA, 25 bp, Homo sapien
gcactagtagtccaggtgggccaat

SEQ ID NO: 3571547 - DNA, 25 bp, Homo sapien
tattcagtggtttcaggtgcagtta

SEQ ID NO: 3571548 - DNA, 25 bp, Homo sapien
caccaggtaggccagtctttgagcc

SEQ ID NO: 3571549 - DNA, 25 bp, Homo sapien
atgtagtaggtatttcatatgtatc

SEQ ID NO: 3571550 - DNA, 25 bp, Homo sapien
aggtattgactagccaacttctgca

SEQ ID NO: 3571551 - DNA, 25 bp, Homo sapien
tgtaatcattccgatcatcagcttt

SEQ ID NO: 3571552 - DNA, 25 bp, Homo sapien
tctctcttcaggtattgactagcca

SEQ ID NO: 3571553 - DNA, 25 bp, Homo sapien
tttactccaggccaatctctcttca

SEQ ID NO: 3571554 - DNA, 25 bp, Homo sapien
tttctgagattatgaccaggtggct

SEQ ID NO: 3571555 - DNA, 25 bp, Homo sapien
cactgattgcatggataaatgccac

SEQ ID NO: 3571556 - DNA, 25 bp, Homo sapien
gataccgataagatccactgattgc

SEQ ID NO: 3571557 - DNA, 25 bp, Homo sapien
tttctaatgtatagtgcccatctcc

SEQ ID NO: 3571558 - DNA, 25 bp, Homo sapien
tgttttggacaggtggccagtctgc

SEQ ID NO: 3571559 - DNA, 25 bp, Homo sapien
tgcagctctgtgtcagcagcccaaa

SEQ ID NO: 3571560 - DNA, 25 bp, Homo sapien
caagtcttgttgagcagatctacct

SEQ ID NO: 3571561 - DNA, 25 bp, Homo sapien
caatggccccaaagacgattatgca

SEQ ID NO: 3571562 - DNA, 25 bp, Homo sapien
agtctaatccactttgagattatta

SEQ ID NO: 3571563 - DNA, 25 bp, Homo sapien
tttcctctatgttttatgtcagtag

SEQ ID NO: 3571564 - DNA, 25 bp, Homo sapien
taaacgaatacttgcaaataccttc

SEQ ID NO: 3571565 - DNA, 25 bp, Homo sapien
tattaaacgaatacttgcaaatacc

SEQ ID NO: 3571566 - DNA, 25 bp, Homo sapien
cagtgagatcctatatttacaacgg

SEQ ID NO: 3571567 - DNA, 25 bp, Homo sapien
atatttccaaagtcagaggctgagt

SEQ ID NO: 3571568 - DNA, 25 bp, Homo sapien
gcctggactaaaggatctaggaacc

SEQ ID NO: 3571569 - DNA, 25 bp, Homo sapien
tgatacatccaaggcctgctactat

SEQ ID NO: 3571570 - DNA, 25 bp, Homo sapien
acttcgaattactggactcaaggga

SEQ ID NO: 3571571 - DNA, 25 bp, Homo sapien
gcaagaatgcattgtaaatagctac

SEQ ID NO: 3571572 - DNA, 25 bp, Homo sapien
caggctacaatcgaattcctgtgct

SEQ ID NO: 3571573 - DNA, 25 bp, Homo sapien
ccccagcctctgtaagaatttttga

SEQ ID NO: 3571574 - DNA, 25 bp, Homo sapien
tttctaacggcaaatatttatgctc

SEQ ID NO: 3571575 - DNA, 25 bp, Homo sapien
tatctggtagaagctacatacctaa

SEQ ID NO: 3571576 - DNA, 25 bp, Homo sapien
tactggtcattgacagtacctagcc

SEQ ID NO: 3571577 - DNA, 25 bp, Homo sapien
tatgatcccctataatactcaaaag

SEQ ID NO: 3571578 - DNA, 25 bp, Homo sapien
caacaagtactttctaggtctagga

SEQ ID NO: 3571579 - DNA, 25 bp, Homo sapien
tacaaatgatggtgagctaatgact

SEQ ID NO: 3571580 - DNA, 25 bp, Homo sapien
gattatgttaacaaatggtggagcc

SEQ ID NO: 3571581 - DNA, 25 bp, Homo sapien
ggcatcaatgtgaccccaacaagta

SEQ ID NO: 3571582 - DNA, 25 bp, Homo sapien
ccttaagccaaggttcatgatagtc

SEQ ID NO: 3571583 - DNA, 25 bp, Homo sapien
ggcttgttatttacaggtactaggc

SEQ ID NO: 3571584 - DNA, 25 bp, Homo sapien
catgatagtctagtactggcttgtt

SEQ ID NO: 3571585 - DNA, 25 bp, Homo sapien
acaggtactaggcatttcagagata

SEQ ID NO: 3571586 - DNA, 25 bp, Homo sapien
aaccaccgcctcctaggttcaggtg

SEQ ID NO: 3571587 - DNA, 25 bp, Homo sapien
actgcaaccaccgcctcctaggttc

SEQ ID NO: 3571588 - DNA, 25 bp, Homo sapien
gagagcagtggtgtggtgtcagctc

SEQ ID NO: 3571589 - DNA, 25 bp, Homo sapien
tggagagcagtggtgtggtgtcagc

SEQ ID NO: 3571590 - DNA, 25 bp, Homo sapien
gagtagtactgtcgtcaatccaacc

SEQ ID NO: 3571591 - DNA, 25 bp, Homo sapien
caacagatagtttgagtgcacaggt

SEQ ID NO: 3571592 - DNA, 25 bp, Homo sapien
cacaggttggcaaattctagcctgc

SEQ ID NO: 3571593 - DNA, 25 bp, Homo sapien
tagacatgaatatcctgagcttgct

SEQ ID NO: 3571594 - DNA, 25 bp, Homo sapien
tgcctaaagtaaagagatggtctcc

SEQ ID NO: 3571595 - DNA, 25 bp, Homo sapien
gggtcctgtgcaactgtgcctaaag

SEQ ID NO: 3571596 - DNA, 25 bp, Homo sapien
gagtttctgggcttacgagccaagg

SEQ ID NO: 3571597 - DNA, 25 bp, Homo sapien
tgagagccatcaaattcagactgag

SEQ ID NO: 3571598 - DNA, 25 bp, Homo sapien
cattacactgtgtgaactacggttt

SEQ ID NO: 3571599 - DNA, 25 bp, Homo sapien
ggtaagtctagctcaaatactgaaa

SEQ ID NO: 3571600 - DNA, 25 bp, Homo sapien
tacagagtctattgacaatggctga

SEQ ID NO: 3571601 - DNA, 25 bp, Homo sapien
ggctagcctctataacataaggtga

SEQ ID NO: 3571602 - DNA, 25 bp, Homo sapien
tactgtataaggagttagtcaccca

SEQ ID NO: 3571603 - DNA, 25 bp, Homo sapien
catggtcatcagtacattctcaggt

SEQ ID NO: 3571604 - DNA, 25 bp, Homo sapien
gaattctggcaatctgaaagcatgg

SEQ ID NO: 3571605 - DNA, 25 bp, Homo sapien
caaacattctaataccaggagcctg

SEQ ID NO: 3571606 - DNA, 25 bp, Homo sapien
ggcctgcctttgaagggctcctgaa

SEQ ID NO: 3571607 - DNA, 25 bp, Homo sapien
caggcctgcctttgaagggctcctg

SEQ ID NO: 3571608 - DNA, 25 bp, Homo sapien
gcctgcctttgaagggctcctgaag

SEQ ID NO: 3571609 - DNA, 25 bp, Homo sapien
caccaggcctgcctttgaagggctc

SEQ ID NO: 3571610 - DNA, 25 bp, Homo sapien
ggtatttgccaacatgtctgtgttt

SEQ ID NO: 3571611 - DNA, 25 bp, Homo sapien
tccagccacagtaaccttctgtatc

SEQ ID NO: 3571612 - DNA, 25 bp, Homo sapien
cagccacagtaaccttctgtatcct

SEQ ID NO: 3571613 - DNA, 25 bp, Homo sapien
caaggagccgcccttaaagtccaca

SEQ ID NO: 3571614 - DNA, 25 bp, Homo sapien
gagccgcccttaaagtccacaatgt

SEQ ID NO: 3571615 - DNA, 25 bp, Homo sapien
tatagcaactttatttataatactc

SEQ ID NO: 3571616 - DNA, 25 bp, Homo sapien
ttatttataatactcaaaaaacaga

SEQ ID NO: 3571617 - DNA, 25 bp, Homo sapien
tatttataatactcaaaaaacagaa

SEQ ID NO: 3571618 - DNA, 25 bp, Homo sapien
gcaactttatttataatactcaaaa

SEQ ID NO: 3571619 - DNA, 25 bp, Homo sapien
tccatcaacaggaaaatggataaac

SEQ ID NO: 3571620 - DNA, 25 bp, Homo sapien
tgtggtatatccatacaatggaata

SEQ ID NO: 3571621 - DNA, 25 bp, Homo sapien
gataaactgtggtatatccatacaa

SEQ ID NO: 3571622 - DNA, 25 bp, Homo sapien
atcaacaggaaaatggataaactgt

SEQ ID NO: 3571623 - DNA, 25 bp, Homo sapien
gatgcacacaacaacataaactaca

SEQ ID NO: 3571624 - DNA, 25 bp, Homo sapien
ctttacctgggtgctagttatatgg

SEQ ID NO: 3571625 - DNA, 25 bp, Homo sapien
gtttcacaggtacatactcatgcca

SEQ ID NO: 3571626 - DNA, 25 bp, Homo sapien
aagtcagtatagtagattccttgag

SEQ ID NO: 3571627 - DNA, 25 bp, Homo sapien
tcaagtctacactaagccaaaagag

SEQ ID NO: 3571628 - DNA, 25 bp, Homo sapien
gatcaatatgatctggcctcaccaa

SEQ ID NO: 3571629 - DNA, 25 bp, Homo sapien
aagtagttacgactagaggcatgcg

SEQ ID NO: 3571630 - DNA, 25 bp, Homo sapien
caaacagtgtactaaggacttgtcc

SEQ ID NO: 3571631 - DNA, 25 bp, Homo sapien
gcatactggcaaaatctatagaaag

SEQ ID NO: 3571632 - DNA, 25 bp, Homo sapien
gaaacaggcagtaaactggctctct

SEQ ID NO: 3571633 - DNA, 25 bp, Homo sapien
tcagaaggatcatctaaagggcaaa

SEQ ID NO: 3571634 - DNA, 25 bp, Homo sapien
gcctgaaataatcaatgcatactgg

SEQ ID NO: 3571635 - DNA, 25 bp, Homo sapien
aaaactttaaatcgaccaggcactg

SEQ ID NO: 3571636 - DNA, 25 bp, Homo sapien
gagatcgagatcatcttgcccacta

SEQ ID NO: 3571637 - DNA, 25 bp, Homo sapien
taaacatgtcctatttacttgatta

SEQ ID NO: 3571638 - DNA, 25 bp, Homo sapien
actttaaatcgaccaggcactgtgg

SEQ ID NO: 3571639 - DNA, 25 bp, Homo sapien
atactctctttcaatagcagccttc

SEQ ID NO: 3571640 - DNA, 25 bp, Homo sapien
catactctctttcaatagcagcctt

SEQ ID NO: 3571641 - DNA, 25 bp, Homo sapien
gcatactctctttcaatagcagcct

SEQ ID NO: 3571642 - DNA, 25 bp, Homo sapien
acaagcatacttcctgaggtagtaa

SEQ ID NO: 3571643 - DNA, 25 bp, Homo sapien
ttgtacaagcatacttcctgaggta

SEQ ID NO: 3571644 - DNA, 25 bp, Homo sapien
cctgaggtagtaaacttaaattctg

SEQ ID NO: 3571645 - DNA, 25 bp, Homo sapien
gaggtagtaaacttaaattctgcat

SEQ ID NO: 3571646 - DNA, 25 bp, Homo sapien
atgtactaccaagagccacaagtcg

SEQ ID NO: 3571647 - DNA, 25 bp, Homo sapien
cgacttgtggctcttggtagtacat

SEQ ID NO: 3571648 - DNA, 25 bp, Homo sapien
ttgtataagggtaaagacggcctca

SEQ ID NO: 3571649 - DNA, 25 bp, Homo sapien
tggtagaattcactagtggaaccgt

SEQ ID NO: 3571650 - DNA, 25 bp, Homo sapien
tagtggaaccgtctagtcctattat

SEQ ID NO: 3571651 - DNA, 25 bp, Homo sapien
tgttaattcatcattaactgtttgg

SEQ ID NO: 3571652 - DNA, 25 bp, Homo sapien
tgtaaggtagtagtatccccactgt

SEQ ID NO: 3571653 - DNA, 25 bp, Homo sapien
cctccaactggctaggactagactt

SEQ ID NO: 3571654 - DNA, 25 bp, Homo sapien
cttgctatgttatcccagttgggct

SEQ ID NO: 3571655 - DNA, 25 bp, Homo sapien
tttgtacatatttactctgtctatc

SEQ ID NO: 3571656 - DNA, 25 bp, Homo sapien
gttttccctgaatactagtttcaca

SEQ ID NO: 3571657 - DNA, 25 bp, Homo sapien
actagtttcacagcgtaagttttgg

SEQ ID NO: 3571658 - DNA, 25 bp, Homo sapien
cacagcgtaagttttggtattgtat

SEQ ID NO: 3571659 - DNA, 25 bp, Homo sapien
gggtttagcatgctcttttcctaat

SEQ ID NO: 3571660 - DNA, 25 bp, Homo sapien
ggctgtcaagccggaccaaaaaggc

SEQ ID NO: 3571661 - DNA, 25 bp, Homo sapien
tctgcaccctcggtctggttggggc

SEQ ID NO: 3571662 - DNA, 25 bp, Homo sapien
tgtcaagccggaccaaaaaggctgt

SEQ ID NO: 3571663 - DNA, 25 bp, Homo sapien
gttggggctgtcaagccggaccaaa

SEQ ID NO: 3571664 - DNA, 25 bp, Homo sapien
ctctacctcaatatgatgctcatta

SEQ ID NO: 3571665 - DNA, 25 bp, Homo sapien
cttcctctacctcaatatgatgctc

SEQ ID NO: 3571666 - DNA, 25 bp, Homo sapien
tcctctacctcaatatgatgctcat

SEQ ID NO: 3571667 - DNA, 25 bp, Homo sapien
tctgagataattggggtttcaaaga

SEQ ID NO: 3571668 - DNA, 25 bp, Homo sapien
cattacctgaatccctagggtgaac

SEQ ID NO: 3571669 - DNA, 25 bp, Homo sapien
tagggtgaaccaaatatctgccgcc

SEQ ID NO: 3571670 - DNA, 25 bp, Homo sapien
ctcaaacaagtctgtagccccaagc

SEQ ID NO: 3571671 - DNA, 25 bp, Homo sapien
ttagacttagtttaggtatcctctc

SEQ ID NO: 3571672 - DNA, 25 bp, Homo sapien
cagctgcataaggtacatcattagg

SEQ ID NO: 3571673 - DNA, 25 bp, Homo sapien
tggacttggctttgctaggcgatat

SEQ ID NO: 3571674 - DNA, 25 bp, Homo sapien
aacttcccacttcgtactgctgtcg

SEQ ID NO: 3571675 - DNA, 25 bp, Homo sapien
aagtgtttggtggaattctgcagca

SEQ ID NO: 3571676 - DNA, 25 bp, Homo sapien
ttgctttgtcacctgacatatggtc

SEQ ID NO: 3571677 - DNA, 25 bp, Homo sapien
tgctttgtcacctgacatatggtct

SEQ ID NO: 3571678 - DNA, 25 bp, Homo sapien
acatgctattatttcaggggttttt

SEQ ID NO: 3571679 - DNA, 25 bp, Homo sapien
gctttgtcacctgacatatggtcta

SEQ ID NO: 3571680 - DNA, 25 bp, Homo sapien
cttgcaaatactaccataaaaccca

SEQ ID NO: 3571681 - DNA, 25 bp, Homo sapien
tgcaaatactaccataaaacccaat

SEQ ID NO: 3571682 - DNA, 25 bp, Homo sapien
ttgcaaatactaccataaaacccaa

SEQ ID NO: 3571683 - DNA, 25 bp, Homo sapien
agaaacacccatttgtacccatcct

SEQ ID NO: 3571684 - DNA, 25 bp, Homo sapien
tgcttgtggatatttgtcggtgtcc

SEQ ID NO: 3571685 - DNA, 25 bp, Homo sapien
tgggaaagtttgtcaggtatctgaa

SEQ ID NO: 3571686 - DNA, 25 bp, Homo sapien
tgtccaggcattgaagagtttggta

SEQ ID NO: 3571687 - DNA, 25 bp, Homo sapien
tttcatgtcttctggcactggaggg

SEQ ID NO: 3571688 - DNA, 25 bp, Homo sapien
tttcgtgtcgttttcatgtcttctg

SEQ ID NO: 3571689 - DNA, 25 bp, Homo sapien
tggcactggagggtgcatgcatcaa

SEQ ID NO: 3571690 - DNA, 25 bp, Homo sapien
tcttctggcactggagggtgcatgc

SEQ ID NO: 3571691 - DNA, 25 bp, Homo sapien
gaagctaagaagacacagacgggtt

SEQ ID NO: 3571692 - DNA, 25 bp, Homo sapien
ttggacaagcaggaagtggagaact

SEQ ID NO: 3571693 - DNA, 25 bp, Homo sapien
tctacttatcaataacagaagctgg

SEQ ID NO: 3571694 - DNA, 25 bp, Homo sapien
ggagaactaagaattcacaatcagg

SEQ ID NO: 3571695 - DNA, 25 bp, Homo sapien
tccaaatgccattcgcagaacaaat

SEQ ID NO: 3571696 - DNA, 25 bp, Homo sapien
ttccaaatgccattcgcagaacaaa

SEQ ID NO: 3571697 - DNA, 25 bp, Homo sapien
ccaaatgccattcgcagaacaaatg

SEQ ID NO: 3571698 - DNA, 25 bp, Homo sapien
acggcctcgcataggaatttttaag

SEQ ID NO: 3571699 - DNA, 25 bp, Homo sapien
aggtgtcagtgactgcgcacggcct

SEQ ID NO: 3571700 - DNA, 25 bp, Homo sapien
aacaacaatcttgatatatccaggt

SEQ ID NO: 3571701 - DNA, 25 bp, Homo sapien
tcttatggctatgataagggaagga

SEQ ID NO: 3571702 - DNA, 25 bp, Homo sapien
acagaagtccttgaactatttacta

SEQ ID NO: 3571703 - DNA, 25 bp, Homo sapien
catcatcagttcctggggcttggta

SEQ ID NO: 3571704 - DNA, 25 bp, Homo sapien
aaagttctaacagccttaaagcagg

SEQ ID NO: 3571705 - DNA, 25 bp, Homo sapien
gtgtgcattataggtcccccactga

SEQ ID NO: 3571706 - DNA, 25 bp, Homo sapien
agcaaatcacattctgcttgatgtt

SEQ ID NO: 3571707 - DNA, 25 bp, Homo sapien
aagcaaatcacattctgcttgatgt

SEQ ID NO: 3571708 - DNA, 25 bp, Homo sapien
taaagccaaatagcctgaacagagg

SEQ ID NO: 3571709 - DNA, 25 bp, Homo sapien
gattcaaagacattaaccaccagga

SEQ ID NO: 3571710 - DNA, 25 bp, Homo sapien
tgcacaagctcaatccacgtctagg

SEQ ID NO: 3571711 - DNA, 25 bp, Homo sapien
gaatatgtctcttgctcgcctctcc

SEQ ID NO: 3571712 - DNA, 25 bp, Homo sapien
caagcccaagacgagggcggtcacg

SEQ ID NO: 3571713 - DNA, 25 bp, Homo sapien
ccggcggcaagtcggtgacaagccc

SEQ ID NO: 3571714 - DNA, 25 bp, Homo sapien
tggagccggcggcaagtcggtgaca

SEQ ID NO: 3571715 - DNA, 25 bp, Homo sapien
aagtcggtgacaagcccaagacgag

SEQ ID NO: 3571716 - DNA, 25 bp, Homo sapien
cgacggcagcgttagcaaggaccag

SEQ ID NO: 3571717 - DNA, 25 bp, Homo sapien
cgggttagccgcagccgcgttgtcc

SEQ ID NO: 3571718 - DNA, 25 bp, Homo sapien
aaaggagcgcttaagaagcaagact

SEQ ID NO: 3571719 - DNA, 25 bp, Homo sapien
tgaagggacatcaatcctccccgac

SEQ ID NO: 3571720 - DNA, 25 bp, Homo sapien
tccgcgccgacgcacgcgcacaggc

SEQ ID NO: 3571721 - DNA, 25 bp, Homo sapien
gagagggctccgcgccgacgcacgc

SEQ ID NO: 3571722 - DNA, 25 bp, Homo sapien
cgcgccgacgcacgcgcacaggccg

SEQ ID NO: 3571723 - DNA, 25 bp, Homo sapien
gggctccgcgccgacgcacgcgcac

SEQ ID NO: 3571724 - DNA, 25 bp, Homo sapien
caaagtgctgtggttgttctaagtg

SEQ ID NO: 3571725 - DNA, 25 bp, Homo sapien
gagggacagagagagcgaaaaccac

SEQ ID NO: 3571726 - DNA, 25 bp, Homo sapien
tctagacggagaggcaagatataga

SEQ ID NO: 3571727 - DNA, 25 bp, Homo sapien
aacaggtaccctcaatctagacgga

SEQ ID NO: 3571728 - DNA, 25 bp, Homo sapien
gaacgaagtcttgttcagggtcagg

SEQ ID NO: 3571729 - DNA, 25 bp, Homo sapien
tgccttctaaggaaaatatacctag

SEQ ID NO: 3571730 - DNA, 25 bp, Homo sapien
gatggcctttcctatgctagatcac

SEQ ID NO: 3571731 - DNA, 25 bp, Homo sapien
tttttggtttgctgagaacgaagtc

SEQ ID NO: 3571732 - DNA, 25 bp, Homo sapien
catgtgacctggacagtaagggtca

SEQ ID NO: 3571733 - DNA, 25 bp, Homo sapien
tttggcctgccacccggtgctgaga

SEQ ID NO: 3571734 - DNA, 25 bp, Homo sapien
gaaaccaaggcctgacgacagggct

SEQ ID NO: 3571735 - DNA, 25 bp, Homo sapien
gttgtaagcaatcaaactcctggca

SEQ ID NO: 3571736 - DNA, 25 bp, Homo sapien
agcatggatgacagagcaggactcc

SEQ ID NO: 3571737 - DNA, 25 bp, Homo sapien
gcatggatgacagagcaggactcca

SEQ ID NO: 3571738 - DNA, 25 bp, Homo sapien
aatcagcagggtgtgatggtgcaca

SEQ ID NO: 3571739 - DNA, 25 bp, Homo sapien
acaaaaatcagcagggtgtgatggt

SEQ ID NO: 3571740 - DNA, 25 bp, Homo sapien
gaccattactgtgcctgggccttca

SEQ ID NO: 3571741 - DNA, 25 bp, Homo sapien
tgggccttcaccattagcctgcctt

SEQ ID NO: 3571742 - DNA, 25 bp, Homo sapien
gggccttcaccattagcctgccttg

SEQ ID NO: 3571743 - DNA, 25 bp, Homo sapien
ctccaggggaccattactgtgcctg

SEQ ID NO: 3571744 - DNA, 25 bp, Homo sapien
cagcagtgaggactctaggcggaca

SEQ ID NO: 3571745 - DNA, 25 bp, Homo sapien
gatccgacagaactgacatgcagag

SEQ ID NO: 3571746 - DNA, 25 bp, Homo sapien
tctgttacgtgctcatggctcggcg

SEQ ID NO: 3571747 - DNA, 25 bp, Homo sapien
agtgctaacagttgccttgaccccg

SEQ ID NO: 3571748 - DNA, 25 bp, Homo sapien
ccgatgacagctggagttggtgacc

SEQ ID NO: 3571749 - DNA, 25 bp, Homo sapien
aggttctgcgcagtctcccacgggt

SEQ ID NO: 3571750 - DNA, 25 bp, Homo sapien
tgaggatcagcctttaaccgatgac

SEQ ID NO: 3571751 - DNA, 25 bp, Homo sapien
gacccacagtgatgacctgctcggc

SEQ ID NO: 3571752 - DNA, 25 bp, Homo sapien
cagagcttagcctaacccaccttaa

SEQ ID NO: 3571753 - DNA, 25 bp, Homo sapien
ttccatagcctagagttggacaaaa

SEQ ID NO: 3571754 - DNA, 25 bp, Homo sapien
cacttccatagcctagagttggaca

SEQ ID NO: 3571755 - DNA, 25 bp, Homo sapien
acatcagagcttagcctaacccacc

SEQ ID NO: 3571756 - DNA, 25 bp, Homo sapien
gactcactgggtagatgggctattg

SEQ ID NO: 3571757 - DNA, 25 bp, Homo sapien
ggacttatctgtacccgaagcccac

SEQ ID NO: 3571758 - DNA, 25 bp, Homo sapien
tcattaccctttcataggtgaggag

SEQ ID NO: 3571759 - DNA, 25 bp, Homo sapien
ctggcttcaaaaccccagcgtaggg

SEQ ID NO: 3571760 - DNA, 25 bp, Homo sapien
gcagtgcgctttgcgaaggtctgaa

SEQ ID NO: 3571761 - DNA, 25 bp, Homo sapien
caatgtgagactcagacggaggcag

SEQ ID NO: 3571762 - DNA, 25 bp, Homo sapien
tgaagccagagaaacaaccgacact

SEQ ID NO: 3571763 - DNA, 25 bp, Homo sapien
ggatgatgccccaataccgagaaca

SEQ ID NO: 3571764 - DNA, 25 bp, Homo sapien
tgtgtgtgtctcagcgactccctgg

SEQ ID NO: 3571765 - DNA, 25 bp, Homo sapien
ttatttgcaacaaaagggtgccagg

SEQ ID NO: 3571766 - DNA, 25 bp, Homo sapien
tacagctaaattcgccgcagagggc

SEQ ID NO: 3571767 - DNA, 25 bp, Homo sapien
gagggtcgcctcagtctgcaagtcc

SEQ ID NO: 3571768 - DNA, 25 bp, Homo sapien
cgagatgcgcaagctcttcggcggt

SEQ ID NO: 3571769 - DNA, 25 bp, Homo sapien
cggccggtggccacagaaacttgag

SEQ ID NO: 3571770 - DNA, 25 bp, Homo sapien
agaaacctctgctccggtctctgcg

SEQ ID NO: 3571771 - DNA, 25 bp, Homo sapien
tgagttacgccactatggcggacgg

SEQ ID NO: 3571772 - DNA, 25 bp, Homo sapien
ctatgtctgactctgtgggaggagc

SEQ ID NO: 3571773 - DNA, 25 bp, Homo sapien
tggccaaggtgagctttccctcgta

SEQ ID NO: 3571774 - DNA, 25 bp, Homo sapien
cctagagaagaaggactccgggagt

SEQ ID NO: 3571775 - DNA, 25 bp, Homo sapien
tagcagccgttattccagcacggag

SEQ ID NO: 3571776 - DNA, 25 bp, Homo sapien
tcaccatcgcgctggaagacatgcg

SEQ ID NO: 3571777 - DNA, 25 bp, Homo sapien
tggcccagttcaccatcgcgctgga

SEQ ID NO: 3571778 - DNA, 25 bp, Homo sapien
acatgcgcgatatgggcccagccgc

SEQ ID NO: 3571779 - DNA, 25 bp, Homo sapien
cgcgctggaagacatgcgcgatatg

SEQ ID NO: 3571780 - DNA, 25 bp, Homo sapien
cttgctgacccagaaactgatggga

SEQ ID NO: 3571781 - DNA, 25 bp, Homo sapien
ggattgagtgctgatgtctccagcc

SEQ ID NO: 3571782 - DNA, 25 bp, Homo sapien
tgcctggaccttgatgctgaccatg

SEQ ID NO: 3571783 - DNA, 25 bp, Homo sapien
tctcagtgtcagtaagctcagcccc

SEQ ID NO: 3571784 - DNA, 25 bp, Homo sapien
caaggccctaaacattgcccgttga

SEQ ID NO: 3571785 - DNA, 25 bp, Homo sapien
tatttatgcagtgacctggtcacct

SEQ ID NO: 3571786 - DNA, 25 bp, Homo sapien
tgcccgttgacataaactttccagg

SEQ ID NO: 3571787 - DNA, 25 bp, Homo sapien
gccctcagtcctctagatcaagatg

SEQ ID NO: 3571788 - DNA, 25 bp, Homo sapien
ttggagacccagaagagtgctggac

SEQ ID NO: 3571789 - DNA, 25 bp, Homo sapien
gacggcgaggttgccacgatttgct

SEQ ID NO: 3571790 - DNA, 25 bp, Homo sapien
ggttacatggtagaatcccttgcag

SEQ ID NO: 3571791 - DNA, 25 bp, Homo sapien
cagttcagtgctttgtaaccagggt

SEQ ID NO: 3571792 - DNA, 25 bp, Homo sapien
gtggggctggagcacaccttgggcc

SEQ ID NO: 3571793 - DNA, 25 bp, Homo sapien
gaaactcaccattgccctatccttg

SEQ ID NO: 3571794 - DNA, 25 bp, Homo sapien
gctcagcaacctggttatttatgtg

SEQ ID NO: 3571795 - DNA, 25 bp, Homo sapien
tttattgaaactcaccattgcccta

SEQ ID NO: 3571796 - DNA, 25 bp, Homo sapien
tagatgtcagctttattgcgcggat

SEQ ID NO: 3571797 - DNA, 25 bp, Homo sapien
gaagttgccacttaaagctccccag

SEQ ID NO: 3571798 - DNA, 25 bp, Homo sapien
cacacacttagggtgggtgctgaag

SEQ ID NO: 3571799 - DNA, 25 bp, Homo sapien
gcgcggatggctcaatggatttcaa

SEQ ID NO: 3571800 - DNA, 25 bp, Homo sapien
catagttacaaattcttggcttcaa

SEQ ID NO: 3571801 - DNA, 25 bp, Homo sapien
tacactccggactgtgttttgaaaa

SEQ ID NO: 3571802 - DNA, 25 bp, Homo sapien
aaaccagatttacacttcatacaca

SEQ ID NO: 3571803 - DNA, 25 bp, Homo sapien
tattgagtgttctacagcttacagt

SEQ ID NO: 3571804 - DNA, 25 bp, Homo sapien
tcccaatagaaagatgcctcgtgct

SEQ ID NO: 3571805 - DNA, 25 bp, Homo sapien
tctaccacagcaaggatatccaggg

SEQ ID NO: 3571806 - DNA, 25 bp, Homo sapien
tatataagacaaagttcacagggcc

SEQ ID NO: 3571807 - DNA, 25 bp, Homo sapien
tctcagggcgagtacatgaaaggcc

SEQ ID NO: 3571808 - DNA, 25 bp, Homo sapien
tccttttcggccagtccacctgctc

SEQ ID NO: 3571809 - DNA, 25 bp, Homo sapien
gaagttccagatgtcttcacagaat

SEQ ID NO: 3571810 - DNA, 25 bp, Homo sapien
catgtagcctctgcccagtcttcaa

SEQ ID NO: 3571811 - DNA, 25 bp, Homo sapien
gagtcaggtacaggacggaagttcc

SEQ ID NO: 3571812 - DNA, 25 bp, Homo sapien
ttttgtaagcaaggtgcccactagg

SEQ ID NO: 3571813 - DNA, 25 bp, Homo sapien
gggcgctgccgacttaatttttaca

SEQ ID NO: 3571814 - DNA, 25 bp, Homo sapien
tccagactcaccaggtatgggcgct

SEQ ID NO: 3571815 - DNA, 25 bp, Homo sapien
taaggtcccttcagttccatgagtc

SEQ ID NO: 3571816 - DNA, 25 bp, Homo sapien
ggcctgcctgcaagctctatggtca

SEQ ID NO: 3571817 - DNA, 25 bp, Homo sapien
cttgggccatgaatggcacaggtaa

SEQ ID NO: 3571818 - DNA, 25 bp, Homo sapien
tggcacaggtaaccaagagcttggc

SEQ ID NO: 3571819 - DNA, 25 bp, Homo sapien
tatggtcagacaggtgagtcctggc

SEQ ID NO: 3571820 - DNA, 25 bp, Homo sapien
taacacgcctacatactcaggtggt

SEQ ID NO: 3571821 - DNA, 25 bp, Homo sapien
cagccgcttggcaggtctaaggaca

SEQ ID NO: 3571822 - DNA, 25 bp, Homo sapien
cttccaaggcctcgggatgctggga

SEQ ID NO: 3571823 - DNA, 25 bp, Homo sapien
tgggaatgtcctgaactaatcttgc

SEQ ID NO: 3571824 - DNA, 25 bp, Homo sapien
ccagcaccggtgtaagacttgagta

SEQ ID NO: 3571825 - DNA, 25 bp, Homo sapien
cgttgtctcttcttgcaaatagagg

SEQ ID NO: 3571826 - DNA, 25 bp, Homo sapien
gtggtgctgctagggaactgctcca

SEQ ID NO: 3571827 - DNA, 25 bp, Homo sapien
gttgcatacaatgtgtgactccaga

SEQ ID NO: 3571828 - DNA, 25 bp, Homo sapien
gggcacgtagctgtacgcaggggtt

SEQ ID NO: 3571829 - DNA, 25 bp, Homo sapien
agtgtgggggcacgtagctgtacgc

SEQ ID NO: 3571830 - DNA, 25 bp, Homo sapien
cgtagctgtacgcaggggttccttg

SEQ ID NO: 3571831 - DNA, 25 bp, Homo sapien
tgtgggggcacgtagctgtacgcag

SEQ ID NO: 3571832 - DNA, 25 bp, Homo sapien
gtgtgccccaatcgccgtgtgctgg

SEQ ID NO: 3571833 - DNA, 25 bp, Homo sapien
ctatatgttggcatggagacagggt

SEQ ID NO: 3571834 - DNA, 25 bp, Homo sapien
catggagacagggtgtgccccaatc

SEQ ID NO: 3571835 - DNA, 25 bp, Homo sapien
cagggtgtgccccaatcgccgtgtg

SEQ ID NO: 3571836 - DNA, 25 bp, Homo sapien
aatgctgttgggctggacgaccgtg

SEQ ID NO: 3571837 - DNA, 25 bp, Homo sapien
acgaccgtggtatggtggatgacat

SEQ ID NO: 3571838 - DNA, 25 bp, Homo sapien
tgacatgaggctgggcagcatacac

SEQ ID NO: 3571839 - DNA, 25 bp, Homo sapien
catggccacaccgttggtcctcggg

SEQ ID NO: 3571840 - DNA, 25 bp, Homo sapien
ggtggagcagtgttactctgggtcg

SEQ ID NO: 3571841 - DNA, 25 bp, Homo sapien
ccttgtatggtgtccccgcagtata

SEQ ID NO: 3571842 - DNA, 25 bp, Homo sapien
gattggatacatggccgtctgatag

SEQ ID NO: 3571843 - DNA, 25 bp, Homo sapien
tactctgggtcggtgggaccttgta

SEQ ID NO: 3571844 - DNA, 25 bp, Homo sapien
gcaggtcccagtcacgactccccag

SEQ ID NO: 3571845 - DNA, 25 bp, Homo sapien
cagaaaagcattgctagaaggcagc

SEQ ID NO: 3571846 - DNA, 25 bp, Homo sapien
ccagttagttggcagaaaagcattg

SEQ ID NO: 3571847 - DNA, 25 bp, Homo sapien
tcacgactccccagacaaagatggg

SEQ ID NO: 3571848 - DNA, 25 bp, Homo sapien
caaggggaacaaggaaatgagacag

SEQ ID NO: 3571849 - DNA, 25 bp, Homo sapien
caaggaaatgagacaggctgtattt

SEQ ID NO: 3571850 - DNA, 25 bp, Homo sapien
aggaaatgagacaggctgtatttac

SEQ ID NO: 3571851 - DNA, 25 bp, Homo sapien
aacaaggaaatgagacaggctgtat

SEQ ID NO: 3571852 - DNA, 25 bp, Homo sapien
tgcttggtaagttcggttctcggtc

SEQ ID NO: 3571853 - DNA, 25 bp, Homo sapien
cagaggatgcttggtaagttcggtt

SEQ ID NO: 3571854 - DNA, 25 bp, Homo sapien
tgccacaggaagacgagttctgtgg

SEQ ID NO: 3571855 - DNA, 25 bp, Homo sapien
gatgcttggtaagttcggttctcgg

SEQ ID NO: 3571856 - DNA, 25 bp, Homo sapien
cattacatgaaccttgctggactac

SEQ ID NO: 3571857 - DNA, 25 bp, Homo sapien
tgtgctggacagaaacatacaaccc

SEQ ID NO: 3571858 - DNA, 25 bp, Homo sapien
catggtagcttaaaaggcactgggc

SEQ ID NO: 3571859 - DNA, 25 bp, Homo sapien
tgctttcaaagacaggcccacaaat

SEQ ID NO: 3571860 - DNA, 25 bp, Homo sapien
ttgaaccaaggctagaattatggct

SEQ ID NO: 3571861 - DNA, 25 bp, Homo sapien
ggttccttcgatcccagaagtactg

SEQ ID NO: 3571862 - DNA, 25 bp, Homo sapien
tcaggtaacaggtaatgcctctggt

SEQ ID NO: 3571863 - DNA, 25 bp, Homo sapien
tatggctattgtaggctgactctgc

SEQ ID NO: 3571864 - DNA, 25 bp, Homo sapien
agctgccggatgtgaacaagcccaa

SEQ ID NO: 3571865 - DNA, 25 bp, Homo sapien
agagctgccggatgtgaacaagccc

SEQ ID NO: 3571866 - DNA, 25 bp, Homo sapien
aacaagcccaagttcctgctttttg

SEQ ID NO: 3571867 - DNA, 25 bp, Homo sapien
ctccctggatgccatagtgtcttcc

SEQ ID NO: 3571868 - DNA, 25 bp, Homo sapien
gctgctggataggctgtggggtaac

SEQ ID NO: 3571869 - DNA, 25 bp, Homo sapien
cagctgctggataggctgtggggta

SEQ ID NO: 3571870 - DNA, 25 bp, Homo sapien
agctgctggataggctgtggggtaa

SEQ ID NO: 3571871 - DNA, 25 bp, Homo sapien
gcagctgctggataggctgtggggt

SEQ ID NO: 3571872 - DNA, 25 bp, Homo sapien
agctataaatttcccagacattttg

SEQ ID NO: 3571873 - DNA, 25 bp, Homo sapien
catgatccgtctgcctcagcctccc

SEQ ID NO: 3571874 - DNA, 25 bp, Homo sapien
tacagctataaatttcccagacatt

SEQ ID NO: 3571875 - DNA, 25 bp, Homo sapien
ggcctcttcttttttaatgtaagca

SEQ ID NO: 3571876 - DNA, 25 bp, Homo sapien
aagtaggtgggaaatgtgtgcaaca

SEQ ID NO: 3571877 - DNA, 25 bp, Homo sapien
tgtcaacaggctggtgaggtcctaa

SEQ ID NO: 3571878 - DNA, 25 bp, Homo sapien
atgagcctcaggtccagcctttaaa

SEQ ID NO: 3571879 - DNA, 25 bp, Homo sapien
tggaacatgtcttaggtcaatgatc

SEQ ID NO: 3571880 - DNA, 25 bp, Homo sapien
tataaaataggaagaccactgtccc

SEQ ID NO: 3571881 - DNA, 25 bp, Homo sapien
catttcctaactctcagtagctgga

SEQ ID NO: 3571882 - DNA, 25 bp, Homo sapien
caaggtatactgtttagaaatgccc

SEQ ID NO: 3571883 - DNA, 25 bp, Homo sapien
cactgtcccacaattaccaaggtat

SEQ ID NO: 3571884 - DNA, 25 bp, Homo sapien
tatctgtcctagtcagcttgagctg

SEQ ID NO: 3571885 - DNA, 25 bp, Homo sapien
gacccctgggtgatgcttggacact

SEQ ID NO: 3571886 - DNA, 25 bp, Homo sapien
gaaatgccctggtctataaacagcc

SEQ ID NO: 3571887 - DNA, 25 bp, Homo sapien
gaacacatactagatagacccctgg

SEQ ID NO: 3571888 - DNA, 25 bp, Homo sapien
gtgtaggccatgttcttagggttgc

SEQ ID NO: 3571889 - DNA, 25 bp, Homo sapien
gggttgccataaggagccccaggct

SEQ ID NO: 3571890 - DNA, 25 bp, Homo sapien
ctgcacggggctgtaaacagggttc

SEQ ID NO: 3571891 - DNA, 25 bp, Homo sapien
ccccaggctgcacggggctgtaaac

SEQ ID NO: 3571892 - DNA, 25 bp, Homo sapien
gcttctcctccataatcttcagttt

SEQ ID NO: 3571893 - DNA, 25 bp, Homo sapien
atcagcttctcctccataatcttca

SEQ ID NO: 3571894 - DNA, 25 bp, Homo sapien
tcagcttctcctccataatcttcag

SEQ ID NO: 3571895 - DNA, 25 bp, Homo sapien
tctcctccataatcttcagttttcc

SEQ ID NO: 3571896 - DNA, 25 bp, Homo sapien
ggatctgccacataccatgatggga

SEQ ID NO: 3571897 - DNA, 25 bp, Homo sapien
tgggatcacagggtagtcctttaac

SEQ ID NO: 3571898 - DNA, 25 bp, Homo sapien
tctatgagcccctgaaaaacgtatt

SEQ ID NO: 3571899 - DNA, 25 bp, Homo sapien
agctgctcaagggtagatgggattc

SEQ ID NO: 3571900 - DNA, 25 bp, Homo sapien
cctgaataagttgaaggagcaagcc

SEQ ID NO: 3571901 - DNA, 25 bp, Homo sapien
aagaaatccactcaggctgcttagg

SEQ ID NO: 3571902 - DNA, 25 bp, Homo sapien
gggaccgctcctgtaaagaaatcca

SEQ ID NO: 3571903 - DNA, 25 bp, Homo sapien
taatgaaggccaaatcatgcagggc

SEQ ID NO: 3571904 - DNA, 25 bp, Homo sapien
ttttgctggtcataagtcttcctgg

SEQ ID NO: 3571905 - DNA, 25 bp, Homo sapien
cttttgctggtcataagtcttcctg

SEQ ID NO: 3571906 - DNA, 25 bp, Homo sapien
tgtccatagggacccaaggcactgg

SEQ ID NO: 3571907 - DNA, 25 bp, Homo sapien
acccaaggcactggactgtcccttt

SEQ ID NO: 3571908 - DNA, 25 bp, Homo sapien
gtgtccatagggacccaaggcactg

SEQ ID NO: 3571909 - DNA, 25 bp, Homo sapien
tcagtcgttaaagaagcaagcctgc

SEQ ID NO: 3571910 - DNA, 25 bp, Homo sapien
tgtccaacagacaactgggaatctg

SEQ ID NO: 3571911 - DNA, 25 bp, Homo sapien
tcaccttgaggctatctgccacagg

SEQ ID NO: 3571912 - DNA, 25 bp, Homo sapien
gagtccagcaagagtataaaggcag

SEQ ID NO: 3571913 - DNA, 25 bp, Homo sapien
aagcccaatgttcctcccatcatgt

SEQ ID NO: 3571914 - DNA, 25 bp, Homo sapien
ctcctcacacgccaagcccaatgtt

SEQ ID NO: 3571915 - DNA, 25 bp, Homo sapien
tcccatcatgtcataaggttcaccg

SEQ ID NO: 3571916 - DNA, 25 bp, Homo sapien
gttcaccgtatttcttagagccaag

SEQ ID NO: 3571917 - DNA, 25 bp, Homo sapien
gaaaagctctgctagatgtgggctg

SEQ ID NO: 3571918 - DNA, 25 bp, Homo sapien
cctgtgctcatgaaatccctgtgaa

SEQ ID NO: 3571919 - DNA, 25 bp, Homo sapien
ggatcaaaagtgaggttcaacctac

SEQ ID NO: 3571920 - DNA, 25 bp, Homo sapien
gaaatcattagtgcttccaggagca

SEQ ID NO: 3571921 - DNA, 25 bp, Homo sapien
agacacagacaacggacaaagccaa

SEQ ID NO: 3571922 - DNA, 25 bp, Homo sapien
acacagacaacggacaaagccaaat

SEQ ID NO: 3571923 - DNA, 25 bp, Homo sapien
gagacacagacaacggacaaagcca

SEQ ID NO: 3571924 - DNA, 25 bp, Homo sapien
ggagacacagacaacggacaaagcc

SEQ ID NO: 3571925 - DNA, 25 bp, Homo sapien
caaactcgtcctaatgtaaagctgg

SEQ ID NO: 3571926 - DNA, 25 bp, Homo sapien
tgtagttagcaccatatgaccagtt

SEQ ID NO: 3571927 - DNA, 25 bp, Homo sapien
tattgccctagggaaacatctgccg

SEQ ID NO: 3571928 - DNA, 25 bp, Homo sapien
gagagctaggaattggcagacccag

SEQ ID NO: 3571929 - DNA, 25 bp, Homo sapien
tcccagtggagcgagtggctattag

SEQ ID NO: 3571930 - DNA, 25 bp, Homo sapien
gaaggagaatacaaagccagttgca

SEQ ID NO: 3571931 - DNA, 25 bp, Homo sapien
gccaaagtcacttctgggacaatgc

SEQ ID NO: 3571932 - DNA, 25 bp, Homo sapien
tgtgatacgagactaacctaggctg

SEQ ID NO: 3571933 - DNA, 25 bp, Homo sapien
gttattattcctagtacaccgcagg

SEQ ID NO: 3571934 - DNA, 25 bp, Homo sapien
cctggccccaagtattactttcact

SEQ ID NO: 3571935 - DNA, 25 bp, Homo sapien
gtttagtgctctttatacatctctc

SEQ ID NO: 3571936 - DNA, 25 bp, Homo sapien
ttatcaggacatatacctaccccac

SEQ ID NO: 3571937 - DNA, 25 bp, Homo sapien
tcagcaacccaattaccttgtcttt

SEQ ID NO: 3571938 - DNA, 25 bp, Homo sapien
gtggaattcagcaacccaattacct

SEQ ID NO: 3571939 - DNA, 25 bp, Homo sapien
aattcagcaacccaattaccttgtc

SEQ ID NO: 3571940 - DNA, 25 bp, Homo sapien
ggaattcagcaacccaattaccttg

SEQ ID NO: 3571941 - DNA, 25 bp, Homo sapien
cctgtcttcacactttactactagt

SEQ ID NO: 3571942 - DNA, 25 bp, Homo sapien
tcacactttactactagtagagtcc

SEQ ID NO: 3571943 - DNA, 25 bp, Homo sapien
cactttactactagtagagtcccct

SEQ ID NO: 3571944 - DNA, 25 bp, Homo sapien
tcttcacactttactactagtagag

SEQ ID NO: 3571945 - DNA, 25 bp, Homo sapien
gatgcaatctctccctgtagccttc

SEQ ID NO: 3571946 - DNA, 25 bp, Homo sapien
tgcccttgctggtaacaggaaattg

SEQ ID NO: 3571947 - DNA, 25 bp, Homo sapien
aaattgggtttgagaagcagatggc

SEQ ID NO: 3571948 - DNA, 25 bp, Homo sapien
cagatggcttgtcaaagagcctaaa

SEQ ID NO: 3571949 - DNA, 25 bp, Homo sapien
gtccatcagccacttctaagccagg

SEQ ID NO: 3571950 - DNA, 25 bp, Homo sapien
ccaggagcatcctttacagtgcagt

SEQ ID NO: 3571951 - DNA, 25 bp, Homo sapien
tgtccatcagccacttctaagccag

SEQ ID NO: 3571952 - DNA, 25 bp, Homo sapien
agcatcctttacagtgcagttcacc

SEQ ID NO: 3571953 - DNA, 25 bp, Homo sapien
gaaattacctagtaaagccctggca

SEQ ID NO: 3571954 - DNA, 25 bp, Homo sapien
gagtcagataccaaattacctaatg

SEQ ID NO: 3571955 - DNA, 25 bp, Homo sapien
aaaacgtcagatactctgcccagag

SEQ ID NO: 3571956 - DNA, 25 bp, Homo sapien
ggtctagggattttacatacattct

SEQ ID NO: 3571957 - DNA, 25 bp, Homo sapien
aaaaaatagtaacaaggtgagcaat

SEQ ID NO: 3571958 - DNA, 25 bp, Homo sapien
tgagctaatgaaagatgttcagcat

SEQ ID NO: 3571959 - DNA, 25 bp, Homo sapien
caaggtgagcaatgagctaatgaaa

SEQ ID NO: 3571960 - DNA, 25 bp, Homo sapien
atagtaacaaggtgagcaatgagct

SEQ ID NO: 3571961 - DNA, 25 bp, Homo sapien
gagatgagggttagcaattcaccca

SEQ ID NO: 3571962 - DNA, 25 bp, Homo sapien
tcaatctagggctctttcttagctc

SEQ ID NO: 3571963 - DNA, 25 bp, Homo sapien
gtgcgatcacggctggactcaaact

SEQ ID NO: 3571964 - DNA, 25 bp, Homo sapien
cacagattgacaaccacagattgag

SEQ ID NO: 3571965 - DNA, 25 bp, Homo sapien
atctcgactgtggtgtggtgacagt

SEQ ID NO: 3571966 - DNA, 25 bp, Homo sapien
tgatttttaggtaatggaactgttc

SEQ ID NO: 3571967 - DNA, 25 bp, Homo sapien
gctagctgtgatgaagatgattttt

SEQ ID NO: 3571968 - DNA, 25 bp, Homo sapien
actgtggtgtggtgacagttacaaa

SEQ ID NO: 3571969 - DNA, 25 bp, Homo sapien
ccctggctagacttgaactcccggc

SEQ ID NO: 3571970 - DNA, 25 bp, Homo sapien
gtgtgcgccaccaaggccagacaat

SEQ ID NO: 3571971 - DNA, 25 bp, Homo sapien
gtgcgccaccaaggccagacaattt

SEQ ID NO: 3571972 - DNA, 25 bp, Homo sapien
aggtgtgcgccaccaaggccagaca

SEQ ID NO: 3571973 - DNA, 25 bp, Homo sapien
taaaggtctggaatccggactatat

SEQ ID NO: 3571974 - DNA, 25 bp, Homo sapien
atatttgataaaggtctggaatccg

SEQ ID NO: 3571975 - DNA, 25 bp, Homo sapien
ttgataaaggtctggaatccggact

SEQ ID NO: 3571976 - DNA, 25 bp, Homo sapien
tggaatccggactatataaggaact

SEQ ID NO: 3571977 - DNA, 25 bp, Homo sapien
gacctccagtgacccgctcatctca

SEQ ID NO: 3571978 - DNA, 25 bp, Homo sapien
cctgacctccagtgacccgctcatc

SEQ ID NO: 3571979 - DNA, 25 bp, Homo sapien
ccaccgtgcccatccgatgttggcc

SEQ ID NO: 3571980 - DNA, 25 bp, Homo sapien
agccaccgtgcccatccgatgttgg

SEQ ID NO: 3571981 - DNA, 25 bp, Homo sapien
agatagagcccaggccaaaaaagcc

SEQ ID NO: 3571982 - DNA, 25 bp, Homo sapien
gtcccgctgccgtcactgtcgccgc

SEQ ID NO: 3571983 - DNA, 25 bp, Homo sapien
tcctccaaagatagagcccaggcca

SEQ ID NO: 3571984 - DNA, 25 bp, Homo sapien
gctgccgtcactgtcgccgccacca

SEQ ID NO: 3571985 - DNA, 25 bp, Homo sapien
ggctccgcagcctcccctctcattc

SEQ ID NO: 3571986 - DNA, 25 bp, Homo sapien
agactcaggaccagcggaccctgtg

SEQ ID NO: 3571987 - DNA, 25 bp, Homo sapien
gactcaggaccagcggaccctgtgg

SEQ ID NO: 3571988 - DNA, 25 bp, Homo sapien
tctcattctcgccagcgccaccggc

SEQ ID NO: 3571989 - DNA, 25 bp, Homo sapien
gaggcggcgatgcccttgtcttctc

SEQ ID NO: 3571990 - DNA, 25 bp, Homo sapien
aggcggcgatgcccttgtcttctcc

SEQ ID NO: 3571991 - DNA, 25 bp, Homo sapien
agcagctgcaggcgaaaacggcggc

SEQ ID NO: 3571992 - DNA, 25 bp, Homo sapien
tctcgcccgtgtccagtagggtggc

SEQ ID NO: 3571993 - DNA, 25 bp, Homo sapien
acgctctcgcccgtgtccagtaggg

SEQ ID NO: 3571994 - DNA, 25 bp, Homo sapien
gtccagtagggtggcggatggcgcg

SEQ ID NO: 3571995 - DNA, 25 bp, Homo sapien
acggcggcgacgctctcgcccgtgt

SEQ ID NO: 3571996 - DNA, 25 bp, Homo sapien
ctctgaatcctctgcagtagccgcc

SEQ ID NO: 3571997 - DNA, 25 bp, Homo sapien
tcctcctcagcgactcggctctgaa

SEQ ID NO: 3571998 - DNA, 25 bp, Homo sapien
cagcgactcggctctgaatcctctg

SEQ ID NO: 3571999 - DNA, 25 bp, Homo sapien
tcctctgcagtagccgccgaggagc

SEQ ID NO: 3572000 - DNA, 25 bp, Homo sapien
tgcgggcgagggaggaggaggcgga

SEQ ID NO: 3572001 - DNA, 25 bp, Homo sapien
gcgagggaggaggaggcggagggag

SEQ ID NO: 3572002 - DNA, 25 bp, Homo sapien
cgggcgagggaggaggaggcggagg

SEQ ID NO: 3572003 - DNA, 25 bp, Homo sapien
ctgcgggcgagggaggaggaggcgg

SEQ ID NO: 3572004 - DNA, 25 bp, Homo sapien
aggggccgtactcgcagcgtctcca

SEQ ID NO: 3572005 - DNA, 25 bp, Homo sapien
aaagtcaggtcgcccgaggccccat

SEQ ID NO: 3572006 - DNA, 25 bp, Homo sapien
ccaaggggccgtactcgcagcgtct

SEQ ID NO: 3572007 - DNA, 25 bp, Homo sapien
gtgaggaaagtcaggtcgcccgagg

SEQ ID NO: 3572008 - DNA, 25 bp, Homo sapien
tgtgattctgttcatccctcgccat

SEQ ID NO: 3572009 - DNA, 25 bp, Homo sapien
ctgtgattctgttcatccctcgcca

SEQ ID NO: 3572010 - DNA, 25 bp, Homo sapien
atcaggcactctctttttcaaactg

SEQ ID NO: 3572011 - DNA, 25 bp, Homo sapien
tttccccaaatacatcaggcactct

SEQ ID NO: 3572012 - DNA, 25 bp, Homo sapien
cccaaatacatcaggcactctcttt

SEQ ID NO: 3572013 - DNA, 25 bp, Homo sapien
acatcaggcactctctttttcaaac

SEQ ID NO: 3572014 - DNA, 25 bp, Homo sapien
tggtgcaggtatcattccagctgct

SEQ ID NO: 3572015 - DNA, 25 bp, Homo sapien
ggaactgtcttttatcgagcaacta

SEQ ID NO: 3572016 - DNA, 25 bp, Homo sapien
taagggagagccaactggtgctcag

SEQ ID NO: 3572017 - DNA, 25 bp, Homo sapien
catgtgccatggaatcatgagtgac

SEQ ID NO: 3572018 - DNA, 25 bp, Homo sapien
catgtggtcgccctgctggttctga

SEQ ID NO: 3572019 - DNA, 25 bp, Homo sapien
catttggcttcgagttccccaggcg

SEQ ID NO: 3572020 - DNA, 25 bp, Homo sapien
caacagggcacagcaaatacgactt

SEQ ID NO: 3572021 - DNA, 25 bp, Homo sapien
tgacccctgcgcttggattgctaga

SEQ ID NO: 3572022 - DNA, 25 bp, Homo sapien
caagtatgcagagccgtgaacgtca

SEQ ID NO: 3572023 - DNA, 25 bp, Homo sapien
gatcagaccgtggtgggccttcaag

SEQ ID NO: 3572024 - DNA, 25 bp, Homo sapien
tagaaagctgcctccgtccagaaat

SEQ ID NO: 3572025 - DNA, 25 bp, Homo sapien
ggctggtacccatgataacaattga

SEQ ID NO: 3572026 - DNA, 25 bp, Homo sapien
tggggagagagaacagagtttgatc

SEQ ID NO: 3572027 - DNA, 25 bp, Homo sapien
gagagagaacagagtttgatctgta

SEQ ID NO: 3572028 - DNA, 25 bp, Homo sapien
aagtggggagagagaacagagtttg

SEQ ID NO: 3572029 - DNA, 25 bp, Homo sapien
gggagagagaacagagtttgatctg

SEQ ID NO: 3572030 - DNA, 25 bp, Homo sapien
tactgcccgagttttcattctccat

SEQ ID NO: 3572031 - DNA, 25 bp, Homo sapien
gacaccaattatgggatcaatgtgg

SEQ ID NO: 3572032 - DNA, 25 bp, Homo sapien
ctggacaccaattatgggatcaatg

SEQ ID NO: 3572033 - DNA, 25 bp, Homo sapien
cctttactgcccgagttttcattct

SEQ ID NO: 3572034 - DNA, 25 bp, Homo sapien
tgtctgctttaaaggtcttcccaga

SEQ ID NO: 3572035 - DNA, 25 bp, Homo sapien
ccagagagggagaagtaaatgctaa

SEQ ID NO: 3572036 - DNA, 25 bp, Homo sapien
tgctaattcaccatcttggcaggaa

SEQ ID NO: 3572037 - DNA, 25 bp, Homo sapien
ttttctggattctgtccatgtctgc

SEQ ID NO: 3572038 - DNA, 25 bp, Homo sapien
acacccatgtcagaagtcacaactt

SEQ ID NO: 3572039 - DNA, 25 bp, Homo sapien
cccatgtcagaagtcacaacttctt

SEQ ID NO: 3572040 - DNA, 25 bp, Homo sapien
catgtcagaagtcacaacttcttcc

SEQ ID NO: 3572041 - DNA, 25 bp, Homo sapien
cacccatgtcagaagtcacaacttc

SEQ ID NO: 3572042 - DNA, 25 bp, Homo sapien
aattttggacatcttggtccgtagc

SEQ ID NO: 3572043 - DNA, 25 bp, Homo sapien
aaacttttacagtgccttgcctgca

SEQ ID NO: 3572044 - DNA, 25 bp, Homo sapien
caatgggcttggtagaactgctgct

SEQ ID NO: 3572045 - DNA, 25 bp, Homo sapien
taactcagaagttttcgtcctgcaa

SEQ ID NO: 3572046 - DNA, 25 bp, Homo sapien
tccttcactgactggttgctcctga

SEQ ID NO: 3572047 - DNA, 25 bp, Homo sapien
cagcctccttcactgactggttgct

SEQ ID NO: 3572048 - DNA, 25 bp, Homo sapien
aggaacagcctccttcactgactgg

SEQ ID NO: 3572049 - DNA, 25 bp, Homo sapien
ttagcaggaacagcctccttcactg

SEQ ID NO: 3572050 - DNA, 25 bp, Homo sapien
ttaataatgaaaaatttccaatgaa

SEQ ID NO: 3572051 - DNA, 25 bp, Homo sapien
taataatgaaaaatttccaatgaaa

SEQ ID NO: 3572052 - DNA, 25 bp, Homo sapien
taatgaaaaatttccaatgaaataa

SEQ ID NO: 3572053 - DNA, 25 bp, Homo sapien
aataatgaaaaatttccaatgaaat

SEQ ID NO: 3572054 - DNA, 25 bp, Homo sapien
cctgtgtgctttccattcccggcaa

SEQ ID NO: 3572055 - DNA, 25 bp, Homo sapien
tgtgctttccattcccggcaaagct

SEQ ID NO: 3572056 - DNA, 25 bp, Homo sapien
ctttccattcccggcaaagctgctg

SEQ ID NO: 3572057 - DNA, 25 bp, Homo sapien
ctgtgtgctttccattcccggcaaa

SEQ ID NO: 3572058 - DNA, 25 bp, Homo sapien
acaggagaaacgcactcaagcctgg

SEQ ID NO: 3572059 - DNA, 25 bp, Homo sapien
ttgagaggcatatgagaacagatac

SEQ ID NO: 3572060 - DNA, 25 bp, Homo sapien
gagattaatacaccacccctcaagt

SEQ ID NO: 3572061 - DNA, 25 bp, Homo sapien
ccttcatcgttcattagaaaagcac

SEQ ID NO: 3572062 - DNA, 25 bp, Homo sapien
tccctgaggtctcgacctcatgggc

SEQ ID NO: 3572063 - DNA, 25 bp, Homo sapien
ccgcacctggtggcactattttttt

SEQ ID NO: 3572064 - DNA, 25 bp, Homo sapien
gctccctgaggtctcgacctcatgg

SEQ ID NO: 3572065 - DNA, 25 bp, Homo sapien
ctccctgaggtctcgacctcatggg

SEQ ID NO: 3572066 - DNA, 25 bp, Homo sapien
gacaggggttcattgtactggccag

SEQ ID NO: 3572067 - DNA, 25 bp, Homo sapien
cagtggtactatctaggcttaccgc

SEQ ID NO: 3572068 - DNA, 25 bp, Homo sapien
aggggttcattgtactggccaggct

SEQ ID NO: 3572069 - DNA, 25 bp, Homo sapien
caggggttcattgtactggccaggc

SEQ ID NO: 3572070 - DNA, 25 bp, Homo sapien
ccctgatgtgtaagatgggcttaaa

SEQ ID NO: 3572071 - DNA, 25 bp, Homo sapien
ggccagactgagaaagaccttccct

SEQ ID NO: 3572072 - DNA, 25 bp, Homo sapien
ttccctcacatcctgtgggtaaagg

SEQ ID NO: 3572073 - DNA, 25 bp, Homo sapien
ccctaggtaggccacttaagtgaca

SEQ ID NO: 3572074 - DNA, 25 bp, Homo sapien
caggtgtggtgaccgatgcctgtaa

SEQ ID NO: 3572075 - DNA, 25 bp, Homo sapien
acggtggctcatgccactcgtaatc

SEQ ID NO: 3572076 - DNA, 25 bp, Homo sapien
tgaaaagtacatggggccaggcacg

SEQ ID NO: 3572077 - DNA, 25 bp, Homo sapien
tagccaggtgtggtgaccgatgcct

SEQ ID NO: 3572078 - DNA, 25 bp, Homo sapien
tttaataccaattggtgatttttgc

SEQ ID NO: 3572079 - DNA, 25 bp, Homo sapien
gattaataagtatgagaggagattc

SEQ ID NO: 3572080 - DNA, 25 bp, Homo sapien
taccaattggtgatttttgcccaaa

SEQ ID NO: 3572081 - DNA, 25 bp, Homo sapien
gattctctgcaattatgtatatctc

SEQ ID NO: 3572082 - DNA, 25 bp, Homo sapien
tacagctttgtaatctcaaggatat

SEQ ID NO: 3572083 - DNA, 25 bp, Homo sapien
tagaaagagcatagaatacaagccc

SEQ ID NO: 3572084 - DNA, 25 bp, Homo sapien
gttcaatttgcctagctgacactca

SEQ ID NO: 3572085 - DNA, 25 bp, Homo sapien
gaagttcaaaggacacaatgatgat

SEQ ID NO: 3572086 - DNA, 25 bp, Homo sapien
agacaccggagggtggtaacttgct

SEQ ID NO: 3572087 - DNA, 25 bp, Homo sapien
acttgctggcttcgaaataccatgt

SEQ ID NO: 3572088 - DNA, 25 bp, Homo sapien
gggaagctaagtgtctctggactca

SEQ ID NO: 3572089 - DNA, 25 bp, Homo sapien
caaatcagcaaacggaattccaggg

SEQ ID NO: 3572090 - DNA, 25 bp, Homo sapien
ctgttaatgaaggtccaatgccctg

SEQ ID NO: 3572091 - DNA, 25 bp, Homo sapien
cactgttaatgaaggtccaatgccc

SEQ ID NO: 3572092 - DNA, 25 bp, Homo sapien
gccttagaactaggggacagggaca

SEQ ID NO: 3572093 - DNA, 25 bp, Homo sapien
tgttaatgaaggtccaatgccctga

SEQ ID NO: 3572094 - DNA, 25 bp, Homo sapien
caaaactccagatgcttgggcctca

SEQ ID NO: 3572095 - DNA, 25 bp, Homo sapien
ggttaaagtgatcccactggccctc

SEQ ID NO: 3572096 - DNA, 25 bp, Homo sapien
gaagtctttccctctagactagtgg

SEQ ID NO: 3572097 - DNA, 25 bp, Homo sapien
gggcctcaccctcaaagactgattc

SEQ ID NO: 3572098 - DNA, 25 bp, Homo sapien
caaatctctcatgaaaatggcttcc

SEQ ID NO: 3572099 - DNA, 25 bp, Homo sapien
gctcttccctggatgtataaatggc

SEQ ID NO: 3572100 - DNA, 25 bp, Homo sapien
ttgtcactgcacttgaagcttggca

SEQ ID NO: 3572101 - DNA, 25 bp, Homo sapien
ccataatggcacagacttaggtatt

SEQ ID NO: 3572102 - DNA, 25 bp, Homo sapien
taaggtgacaccacacacttattgc

SEQ ID NO: 3572103 - DNA, 25 bp, Homo sapien
tcagcaatttaaacaccataccact

SEQ ID NO: 3572104 - DNA, 25 bp, Homo sapien
ggctaaagtaatcaccttatcatta

SEQ ID NO: 3572105 - DNA, 25 bp, Homo sapien
cactaaaagaatgtactaattccca

SEQ ID NO: 3572106 - DNA, 25 bp, Homo sapien
tataatacaaatgatcatgttagat

SEQ ID NO: 3572107 - DNA, 25 bp, Homo sapien
tgttagatattactatttatgctag

SEQ ID NO: 3572108 - DNA, 25 bp, Homo sapien
tatgctagttctagtactgattgtt

SEQ ID NO: 3572109 - DNA, 25 bp, Homo sapien
tttcagaggctgtctttttatgaaa

SEQ ID NO: 3572110 - DNA, 25 bp, Homo sapien
ctttagggtcaagtgcttaaatcaa

SEQ ID NO: 3572111 - DNA, 25 bp, Homo sapien
caaaagggttaagcacaggacattt

SEQ ID NO: 3572112 - DNA, 25 bp, Homo sapien
aggcaaggttcttgggtgctacagc

SEQ ID NO: 3572113 - DNA, 25 bp, Homo sapien
ataaagagcaaaagggttaagcaca

SEQ ID NO: 3572114 - DNA, 25 bp, Homo sapien
gcccacgagggacagttctttacat

SEQ ID NO: 3572115 - DNA, 25 bp, Homo sapien
gactaccacgctgggttaatttctg

SEQ ID NO: 3572116 - DNA, 25 bp, Homo sapien
tcgacagaactggacaaaaaactag

SEQ ID NO: 3572117 - DNA, 25 bp, Homo sapien
cccagccaggctatataaggtttga

SEQ ID NO: 3572118 - DNA, 25 bp, Homo sapien
ggaaggaaacctatacaccagagaa

SEQ ID NO: 3572119 - DNA, 25 bp, Homo sapien
tatactgctagtttgtaaggcctgc

SEQ ID NO: 3572120 - DNA, 25 bp, Homo sapien
tcaatttggtaacctcaactcaact

SEQ ID NO: 3572121 - DNA, 25 bp, Homo sapien
actgctagtttgtaaggcctgctct

SEQ ID NO: 3572122 - DNA, 25 bp, Homo sapien
gctttacattgtatccagcttttgc

SEQ ID NO: 3572123 - DNA, 25 bp, Homo sapien
ctgctttacattgtatccagctttt

SEQ ID NO: 3572124 - DNA, 25 bp, Homo sapien
tgctttacattgtatccagcttttg

SEQ ID NO: 3572125 - DNA, 25 bp, Homo sapien
taactttccttgatataaggactgg

SEQ ID NO: 3572126 - DNA, 25 bp, Homo sapien
gacatgaggcagtattataaagatt

SEQ ID NO: 3572127 - DNA, 25 bp, Homo sapien
ggactggttatacaggtcacattag

SEQ ID NO: 3572128 - DNA, 25 bp, Homo sapien
tgagacatgaggcagtattataaag

SEQ ID NO: 3572129 - DNA, 25 bp, Homo sapien
caaaggcatagatgcagaggagcac

SEQ ID NO: 3572130 - DNA, 25 bp, Homo sapien
agtttaacggctatacaggtcccag

SEQ ID NO: 3572131 - DNA, 25 bp, Homo sapien
tcatgggcccactaattgggactca

SEQ ID NO: 3572132 - DNA, 25 bp, Homo sapien
gaggagcacacttccactaggcatg

SEQ ID NO: 3572133 - DNA, 25 bp, Homo sapien
accaggacttgaaagatggacatac

SEQ ID NO: 3572134 - DNA, 25 bp, Homo sapien
tcaaactctgcgggcaccaccagga

SEQ ID NO: 3572135 - DNA, 25 bp, Homo sapien
aaactctgcgggcaccaccaggact

SEQ ID NO: 3572136 - DNA, 25 bp, Homo sapien
accaccaggacttgaaagatggaca

SEQ ID NO: 3572137 - DNA, 25 bp, Homo sapien
tatgagggctgtatcctctacctct

SEQ ID NO: 3572138 - DNA, 25 bp, Homo sapien
cacggtggtatgagggctgtatcct

SEQ ID NO: 3572139 - DNA, 25 bp, Homo sapien
ctctacctctaccatgctctgcctc

SEQ ID NO: 3572140 - DNA, 25 bp, Homo sapien
cctggaagtacttgatgctgagctc

SEQ ID NO: 3572141 - DNA, 25 bp, Homo sapien
ctgttctgacatcatcaatccactt

SEQ ID NO: 3572142 - DNA, 25 bp, Homo sapien
ctacatctgtgtagtgtggtacaca

SEQ ID NO: 3572143 - DNA, 25 bp, Homo sapien
tttttagcccaagatactacatctg

SEQ ID NO: 3572144 - DNA, 25 bp, Homo sapien
gccagcacaattattcgttattaga

SEQ ID NO: 3572145 - DNA, 25 bp, Homo sapien
ggaagaaagactgcatatagcacct

SEQ ID NO: 3572146 - DNA, 25 bp, Homo sapien
gctgtgtcccataattgcaatcgta

SEQ ID NO: 3572147 - DNA, 25 bp, Homo sapien
tgtagctaggaatcaagctcctgaa

SEQ ID NO: 3572148 - DNA, 25 bp, Homo sapien
tcctgaaccgctcttgacctgctgt

SEQ ID NO: 3572149 - DNA, 25 bp, Homo sapien
ccacagtggagtcacgaatgtagct

SEQ ID NO: 3572150 - DNA, 25 bp, Homo sapien
gaaacgttcctgacccgcagtatcc

SEQ ID NO: 3572151 - DNA, 25 bp, Homo sapien
cagtatcccacagctgaagcctgat

SEQ ID NO: 3572152 - DNA, 25 bp, Homo sapien
tgtaactgggaatgaggctacggaa

SEQ ID NO: 3572153 - DNA, 25 bp, Homo sapien
tgcagcagaatcacggatgtaactg

SEQ ID NO: 3572154 - DNA, 25 bp, Homo sapien
cacagaatcagaaatatggcttccc

SEQ ID NO: 3572155 - DNA, 25 bp, Homo sapien
cctaaggtaaatgtcaatgagcagc

SEQ ID NO: 3572156 - DNA, 25 bp, Homo sapien
aagatctttttgcagccctacataa

SEQ ID NO: 3572157 - DNA, 25 bp, Homo sapien
tccccagaacatgcgagtgtgtgcg

SEQ ID NO: 3572158 - DNA, 25 bp, Homo sapien
cactgtttaggtgacaagtatctct

SEQ ID NO: 3572159 - DNA, 25 bp, Homo sapien
tgtcagtcactttgatacgcatcct

SEQ ID NO: 3572160 - DNA, 25 bp, Homo sapien
ctcaagggtggcatttagaaggtct

SEQ ID NO: 3572161 - DNA, 25 bp, Homo sapien
gaaatctttttgaatgcctcaaggg

SEQ ID NO: 3572162 - DNA, 25 bp, Homo sapien
ttgcagaaaattgcacactgaaaat

SEQ ID NO: 3572163 - DNA, 25 bp, Homo sapien
gttgcagaaaattgcacactgaaaa

SEQ ID NO: 3572164 - DNA, 25 bp, Homo sapien
tgttgcagaaaattgcacactgaaa

SEQ ID NO: 3572165 - DNA, 25 bp, Homo sapien
tgcagaaaattgcacactgaaaata

SEQ ID NO: 3572166 - DNA, 25 bp, Homo sapien
tccaagtacatagtttttgataaaa

SEQ ID NO: 3572167 - DNA, 25 bp, Homo sapien
caagctggtatataggggtgtgatt

SEQ ID NO: 3572168 - DNA, 25 bp, Homo sapien
ccaagctggtatataggggtgtgat

SEQ ID NO: 3572169 - DNA, 25 bp, Homo sapien
tacaccctgcctaaagataatatct

SEQ ID NO: 3572170 - DNA, 25 bp, Homo sapien
actacaccctgcctaaagataatat

SEQ ID NO: 3572171 - DNA, 25 bp, Homo sapien
tttatatgaaaaatcaatgcaatgt

SEQ ID NO: 3572172 - DNA, 25 bp, Homo sapien
ccactacaccctgcctaaagataat

SEQ ID NO: 3572173 - DNA, 25 bp, Homo sapien
cagctaggtagtactataaaggcca

SEQ ID NO: 3572174 - DNA, 25 bp, Homo sapien
ttcaaaaggtgactccaaaagcaaa

SEQ ID NO: 3572175 - DNA, 25 bp, Homo sapien
tacataggcaacatcacaaactgac

SEQ ID NO: 3572176 - DNA, 25 bp, Homo sapien
tatgggattactgcatataggctgc

SEQ ID NO: 3572177 - DNA, 25 bp, Homo sapien
cagaacccctgaaattatccgaact

SEQ ID NO: 3572178 - DNA, 25 bp, Homo sapien
gacactgagggccaatactacactg

SEQ ID NO: 3572179 - DNA, 25 bp, Homo sapien
gatctattggcctcaccatacagga

SEQ ID NO: 3572180 - DNA, 25 bp, Homo sapien
atcacccgggccaggtactagacaa

SEQ ID NO: 3572181 - DNA, 25 bp, Homo sapien
tgataggtgttgtcaaaactgtcat

SEQ ID NO: 3572182 - DNA, 25 bp, Homo sapien
ctgataggtgttgtcaaaactgtca

SEQ ID NO: 3572183 - DNA, 25 bp, Homo sapien
gataggtgttgtcaaaactgtcata

SEQ ID NO: 3572184 - DNA, 25 bp, Homo sapien
ataggtgttgtcaaaactgtcatac

SEQ ID NO: 3572185 - DNA, 25 bp, Homo sapien
tagaacgtattatctgccctcagtg

SEQ ID NO: 3572186 - DNA, 25 bp, Homo sapien
aaatgtttgaaatcatatagaacgt

SEQ ID NO: 3572187 - DNA, 25 bp, Homo sapien
atcatatagaacgtattatctgccc

SEQ ID NO: 3572188 - DNA, 25 bp, Homo sapien
gaaatcatatagaacgtattatctg

SEQ ID NO: 3572189 - DNA, 25 bp, Homo sapien
gcaccatgcctagccggtactacaa

SEQ ID NO: 3572190 - DNA, 25 bp, Homo sapien
agtccaaggctagccgggcaacaaa

SEQ ID NO: 3572191 - DNA, 25 bp, Homo sapien
accaggattatggtcgtgaggcacc

SEQ ID NO: 3572192 - DNA, 25 bp, Homo sapien
atgcctagccggtactacaatgtga

SEQ ID NO: 3572193 - DNA, 25 bp, Homo sapien
agagtgaggtgacacaatcaagact

SEQ ID NO: 3572194 - DNA, 25 bp, Homo sapien
tagagtgaggtgacacaatcaagac

SEQ ID NO: 3572195 - DNA, 25 bp, Homo sapien
agtagtaattgacctaaaagactca

SEQ ID NO: 3572196 - DNA, 25 bp, Homo sapien
ccaaccctaagcaagtattaagtgt

SEQ ID NO: 3572197 - DNA, 25 bp, Homo sapien
aatctgaatcatccaagttagaaag

SEQ ID NO: 3572198 - DNA, 25 bp, Homo sapien
gttggttctcggaaaatctgaatca

SEQ ID NO: 3572199 - DNA, 25 bp, Homo sapien
tggggaaaacaacgcccagatccca

SEQ ID NO: 3572200 - DNA, 25 bp, Homo sapien
acgacatcagcacttcgcagggcca

SEQ ID NO: 3572201 - DNA, 25 bp, Homo sapien
caaggttgaagagggcccgctctcg

SEQ ID NO: 3572202 - DNA, 25 bp, Homo sapien
cttggccaaggttgaagagggcccg

SEQ ID NO: 3572203 - DNA, 25 bp, Homo sapien
gggacgctgcggccagctgccagga

SEQ ID NO: 3572204 - DNA, 25 bp, Homo sapien
gggcggtgcggggacgctgcggcca

SEQ ID NO: 3572205 - DNA, 25 bp, Homo sapien
gacgctgcggccagctgccaggagt

SEQ ID NO: 3572206 - DNA, 25 bp, Homo sapien
gtgcggggacgctgcggccagctgc

SEQ ID NO: 3572207 - DNA, 25 bp, Homo sapien
cttgaatttcctcagcggattcccg

SEQ ID NO: 3572208 - DNA, 25 bp, Homo sapien
ccccaggaacaccagcttgaatttc

SEQ ID NO: 3572209 - DNA, 25 bp, Homo sapien
aggaacaccagcttgaatttcctca

SEQ ID NO: 3572210 - DNA, 25 bp, Homo sapien
ttcctcagcggattcccgaagtctc

SEQ ID NO: 3572211 - DNA, 25 bp, Homo sapien
gctgacgaaaaaggcgagcggaagg

SEQ ID NO: 3572212 - DNA, 25 bp, Homo sapien
ccgccgccgcctcccggcagagtag

SEQ ID NO: 3572213 - DNA, 25 bp, Homo sapien
cgccgccgcctcccggcagagtagc

SEQ ID NO: 3572214 - DNA, 25 bp, Homo sapien
gggcggtgtcggcaggagccagggg

SEQ ID NO: 3572215 - DNA, 25 bp, Homo sapien
agggcggtgtcggcaggagccaggg

SEQ ID NO: 3572216 - DNA, 25 bp, Homo sapien
tccctccttccgcactcggctccca

SEQ ID NO: 3572217 - DNA, 25 bp, Homo sapien
ccctccttccgcactcggctcccag

SEQ ID NO: 3572218 - DNA, 25 bp, Homo sapien
ggcggagccggaaccgcagacgtat

SEQ ID NO: 3572219 - DNA, 25 bp, Homo sapien
gtggcggagccggaaccgcagacgt

SEQ ID NO: 3572220 - DNA, 25 bp, Homo sapien
tggcggagccggaaccgcagacgta

SEQ ID NO: 3572221 - DNA, 25 bp, Homo sapien
gcgcagcgcctgagcttccacagct

SEQ ID NO: 3572222 - DNA, 25 bp, Homo sapien
gcagcgcctgagcttccacagctgc

SEQ ID NO: 3572223 - DNA, 25 bp, Homo sapien
agcccaacctgctgagtgcgcgagc

SEQ ID NO: 3572224 - DNA, 25 bp, Homo sapien
gccgcagcccaacctgctgagtgcg

SEQ ID NO: 3572225 - DNA, 25 bp, Homo sapien
ggcgagcccgggcgcgagcctgcgg

SEQ ID NO: 3572226 - DNA, 25 bp, Homo sapien
gcgagcccgggcgcgagcctgcggc

SEQ ID NO: 3572227 - DNA, 25 bp, Homo sapien
gggcgagcccgggcgcgagcctgcg

SEQ ID NO: 3572228 - DNA, 25 bp, Homo sapien
ttggaaatggctacacaggaaaggt

SEQ ID NO: 3572229 - DNA, 25 bp, Homo sapien
cagaaatattgtaggagcaaaggca

SEQ ID NO: 3572230 - DNA, 25 bp, Homo sapien
ccagaaaggcaaagtactcaatgct

SEQ ID NO: 3572231 - DNA, 25 bp, Homo sapien
tattgagagcataagaaatgagctg

SEQ ID NO: 3572232 - DNA, 25 bp, Homo sapien
tccggtcttcggtttgcacagctag

SEQ ID NO: 3572233 - DNA, 25 bp, Homo sapien
agcttccggaactaaaatgatgtgg

SEQ ID NO: 3572234 - DNA, 25 bp, Homo sapien
gtctcggtgggatattgctgctgca

SEQ ID NO: 3572235 - DNA, 25 bp, Homo sapien
tcagtgttttcagacgccctgggaa

SEQ ID NO: 3572236 - DNA, 25 bp, Homo sapien
taattttagtagagacaataccatg

SEQ ID NO: 3572237 - DNA, 25 bp, Homo sapien
agagacaataccatgttggtcaggt

SEQ ID NO: 3572238 - DNA, 25 bp, Homo sapien
tcaggttggtcttgaactcctgacc

SEQ ID NO: 3572239 - DNA, 25 bp, Homo sapien
ctcaggtggttcacccgcttgggcc

SEQ ID NO: 3572240 - DNA, 25 bp, Homo sapien
tcaaatagggcacgttaaatggcta

SEQ ID NO: 3572241 - DNA, 25 bp, Homo sapien
tgtttttgaagttggcatcaaatag

SEQ ID NO: 3572242 - DNA, 25 bp, Homo sapien
tcaggtggttcacccgcttgggcct

SEQ ID NO: 3572243 - DNA, 25 bp, Homo sapien
gcaaggtataagatctgtctttcaa

SEQ ID NO: 3572244 - DNA, 25 bp, Homo sapien
ctttggctccagttagatttctgtg

SEQ ID NO: 3572245 - DNA, 25 bp, Homo sapien
gggtggatacagcatgcaaggtata

SEQ ID NO: 3572246 - DNA, 25 bp, Homo sapien
caagcctgtcacttcctgcaaacag

SEQ ID NO: 3572247 - DNA, 25 bp, Homo sapien
catatacccttgactaaggaccggt

SEQ ID NO: 3572248 - DNA, 25 bp, Homo sapien
gttgtcctcttctactgagcttgca

SEQ ID NO: 3572249 - DNA, 25 bp, Homo sapien
actaaggaccggtcttcctctattg

SEQ ID NO: 3572250 - DNA, 25 bp, Homo sapien
ctcttctactgagcttgcagctttg

SEQ ID NO: 3572251 - DNA, 25 bp, Homo sapien
caaagctgccagagttagatcctat

SEQ ID NO: 3572252 - DNA, 25 bp, Homo sapien
ggctaaaccatgagtctgccctagg

SEQ ID NO: 3572253 - DNA, 25 bp, Homo sapien
gataggcatcaagccaagaggtctc

SEQ ID NO: 3572254 - DNA, 25 bp, Homo sapien
tttgtaccgagcacaaggccaagtc

SEQ ID NO: 3572255 - DNA, 25 bp, Homo sapien
catcattgggattgagagcaggctc

SEQ ID NO: 3572256 - DNA, 25 bp, Homo sapien
tcacaaagctagtcagtggcgtaac

SEQ ID NO: 3572257 - DNA, 25 bp, Homo sapien
gccagatgctgttcctaagctaaac

SEQ ID NO: 3572258 - DNA, 25 bp, Homo sapien
cctcatctaaaggagagtgaatgcc

SEQ ID NO: 3572259 - DNA, 25 bp, Homo sapien
tgaatacacagcaaatagagtcctt

SEQ ID NO: 3572260 - DNA, 25 bp, Homo sapien
tgcttgctccacttagctggtctgg

SEQ ID NO: 3572261 - DNA, 25 bp, Homo sapien
actgatggaaattgacattgggacc

SEQ ID NO: 3572262 - DNA, 25 bp, Homo sapien
gatcaaatacgttctgtgacccacc

SEQ ID NO: 3572263 - DNA, 25 bp, Homo sapien
tgtcaaactatgtgcttcttggtgg

SEQ ID NO: 3572264 - DNA, 25 bp, Homo sapien
aatttacaaataggtgatgtctact

SEQ ID NO: 3572265 - DNA, 25 bp, Homo sapien
cctgccttacttgttcactttgctg

SEQ ID NO: 3572266 - DNA, 25 bp, Homo sapien
tacaaataggtgatgtctacttcat

SEQ ID NO: 3572267 - DNA, 25 bp, Homo sapien
agagaaaggcactaattaggtaatc

SEQ ID NO: 3572268 - DNA, 25 bp, Homo sapien
tttccttccactaaactgattgaaa

SEQ ID NO: 3572269 - DNA, 25 bp, Homo sapien
cctctataatcttgctgggtgctgg

SEQ ID NO: 3572270 - DNA, 25 bp, Homo sapien
taaatactggtggaacaagacagct

SEQ ID NO: 3572271 - DNA, 25 bp, Homo sapien
catggctctcaactccagatccaaa

SEQ ID NO: 3572272 - DNA, 25 bp, Homo sapien
catatgacagctgtttgtgccagtc

SEQ ID NO: 3572273 - DNA, 25 bp, Homo sapien
tccttgaacgcctgcacctgtggct

SEQ ID NO: 3572274 - DNA, 25 bp, Homo sapien
tggcattgccgccagtcctggtgct

SEQ ID NO: 3572275 - DNA, 25 bp, Homo sapien
ccagagcgggagatcagctggtcca

SEQ ID NO: 3572276 - DNA, 25 bp, Homo sapien
cacccgttgggtccaggtatggcct

SEQ ID NO: 3572277 - DNA, 25 bp, Homo sapien
tcccgtgggagactctaagcttgaa

SEQ ID NO: 3572278 - DNA, 25 bp, Homo sapien
gtagggatataatatgtaaggttcc

SEQ ID NO: 3572279 - DNA, 25 bp, Homo sapien
atagcactgaccagactgcaccatt

SEQ ID NO: 3572280 - DNA, 25 bp, Homo sapien
ccatttagcctgtttaatgtgtctg

SEQ ID NO: 3572281 - DNA, 25 bp, Homo sapien
ggtgcccttggacacatcatttaat

SEQ ID NO: 3572282 - DNA, 25 bp, Homo sapien
gacttggacctagctttgtcactgc

SEQ ID NO: 3572283 - DNA, 25 bp, Homo sapien
ccttggaggcggtataacttaagca

SEQ ID NO: 3572284 - DNA, 25 bp, Homo sapien
ggaatcacaagagggagttaggcac

SEQ ID NO: 3572285 - DNA, 25 bp, Homo sapien
caagagatccgtgttcaaatcccag

SEQ ID NO: 3572286 - DNA, 25 bp, Homo sapien
taaggaggctggtatgtctaaagag

SEQ ID NO: 3572287 - DNA, 25 bp, Homo sapien
gaaagtgccttgatcctaaaccaag

SEQ ID NO: 3572288 - DNA, 25 bp, Homo sapien
tataacgaatgaaaagcgcttgggc

SEQ ID NO: 3572289 - DNA, 25 bp, Homo sapien
tgctcagagatcagggtaggctaga

SEQ ID NO: 3572290 - DNA, 25 bp, Homo sapien
tctggagtaaaatgacgacgacccc

SEQ ID NO: 3572291 - DNA, 25 bp, Homo sapien
ggttggcagctggatcgtggaggct

SEQ ID NO: 3572292 - DNA, 25 bp, Homo sapien
gtaggctagatggttggcagctgga

SEQ ID NO: 3572293 - DNA, 25 bp, Homo sapien
aagcagaaaaatgctggcagccacg

SEQ ID NO: 3572294 - DNA, 25 bp, Homo sapien
tcatggaaaggatcttaaagcagaa

SEQ ID NO: 3572295 - DNA, 25 bp, Homo sapien
gaggcctgaggcgcctcaggcgtat

SEQ ID NO: 3572296 - DNA, 25 bp, Homo sapien
agtcatggaaaggatcttaaagcag

SEQ ID NO: 3572297 - DNA, 25 bp, Homo sapien
tcttggtgttgagcccacctctgtc

SEQ ID NO: 3572298 - DNA, 25 bp, Homo sapien
ctctgtacatcctttcaggaaccag

SEQ ID NO: 3572299 - DNA, 25 bp, Homo sapien
cctacgcggcggcttgggtttcgca

SEQ ID NO: 3572300 - DNA, 25 bp, Homo sapien
tcacgttttcattggtggcctcttg

SEQ ID NO: 3572301 - DNA, 25 bp, Homo sapien
ggtgacagtcggcacagttgtgttc

SEQ ID NO: 3572302 - DNA, 25 bp, Homo sapien
tggcaggatagatggcatgagaacc

SEQ ID NO: 3572303 - DNA, 25 bp, Homo sapien
tcagcagcctgcatgtaggaatgta

SEQ ID NO: 3572304 - DNA, 25 bp, Homo sapien
gtggcatgcaggctactcaggaagc

SEQ ID NO: 3572305 - DNA, 25 bp, Homo sapien
tgcttgccaggttcaaggtattctc

SEQ ID NO: 3572306 - DNA, 25 bp, Homo sapien
cctctgcttgccaggttcaaggtat

SEQ ID NO: 3572307 - DNA, 25 bp, Homo sapien
acaggcgtgatattctttttttttg

SEQ ID NO: 3572308 - DNA, 25 bp, Homo sapien
gattacaggcgtgatattctttttt

SEQ ID NO: 3572309 - DNA, 25 bp, Homo sapien
ggcaagtcagacatgtaaacagtgt

SEQ ID NO: 3572310 - DNA, 25 bp, Homo sapien
taaggacttcacagtctgttgggca

SEQ ID NO: 3572311 - DNA, 25 bp, Homo sapien
tagcaccctgctagacttaaggact

SEQ ID NO: 3572312 - DNA, 25 bp, Homo sapien
gttgagatcactctaaaagccctct

SEQ ID NO: 3572313 - DNA, 25 bp, Homo sapien
aagattcgtatatcttgctggaaaa

SEQ ID NO: 3572314 - DNA, 25 bp, Homo sapien
tgtccaggtcttgaaagactctagc

SEQ ID NO: 3572315 - DNA, 25 bp, Homo sapien
ttgaaagactctagcatgaactgtc

SEQ ID NO: 3572316 - DNA, 25 bp, Homo sapien
aaggcaaaagattcgtatatcttgc

SEQ ID NO: 3572317 - DNA, 25 bp, Homo sapien
ttttggaattgcacttctggagttc

SEQ ID NO: 3572318 - DNA, 25 bp, Homo sapien
ggaaagttagtgattcccagtgtat

SEQ ID NO: 3572319 - DNA, 25 bp, Homo sapien
cacttgcagcgtttatcattctgag

SEQ ID NO: 3572320 - DNA, 25 bp, Homo sapien
gcattaagtggaaaaccaggttctc

SEQ ID NO: 3572321 - DNA, 25 bp, Homo sapien
gacagagatacgtatatcaaggtcc

SEQ ID NO: 3572322 - DNA, 25 bp, Homo sapien
tcagaaacgtagacagagatacgta

SEQ ID NO: 3572323 - DNA, 25 bp, Homo sapien
tcagacactcagaaacgtagacaga

SEQ ID NO: 3572324 - DNA, 25 bp, Homo sapien
cagagatacgtatatcaaggtcctg

SEQ ID NO: 3572325 - DNA, 25 bp, Homo sapien
tgtactggccgtgtggaactctcat

SEQ ID NO: 3572326 - DNA, 25 bp, Homo sapien
actgagtaagaaggtcattgtgccc

SEQ ID NO: 3572327 - DNA, 25 bp, Homo sapien
cccaaggaccatggcgtttaatgtc

SEQ ID NO: 3572328 - DNA, 25 bp, Homo sapien
tcttgggcaccccttggaaatcaca

SEQ ID NO: 3572329 - DNA, 25 bp, Homo sapien
caccttgcccccttttctattccag

SEQ ID NO: 3572330 - DNA, 25 bp, Homo sapien
ttcctaggcagagtgtttgtgtccc

SEQ ID NO: 3572331 - DNA, 25 bp, Homo sapien
ttttcctaggcagagtgtttgtgtc

SEQ ID NO: 3572332 - DNA, 25 bp, Homo sapien
aaaattctcccatgtctacttcttt

SEQ ID NO: 3572333 - DNA, 25 bp, Homo sapien
cataaaaggtggtcgaatgcaactt

SEQ ID NO: 3572334 - DNA, 25 bp, Homo sapien
aggtaaataggcgacattctgggca

SEQ ID NO: 3572335 - DNA, 25 bp, Homo sapien
taattggactttgagctacagctaa

SEQ ID NO: 3572336 - DNA, 25 bp, Homo sapien
ggcgataatgccagcaggattccat

SEQ ID NO: 3572337 - DNA, 25 bp, Homo sapien
aaatagcacctgacgcatagtaagc

SEQ ID NO: 3572338 - DNA, 25 bp, Homo sapien
cacatctagcgatgcggcgtggcac

SEQ ID NO: 3572339 - DNA, 25 bp, Homo sapien
tgaaaactcttaaccatagcgcccc

SEQ ID NO: 3572340 - DNA, 25 bp, Homo sapien
catcttaatggtggaaggcaggtca

SEQ ID NO: 3572341 - DNA, 25 bp, Homo sapien
ggccaccagagggagtgcctccctt

SEQ ID NO: 3572342 - DNA, 25 bp, Homo sapien
ggactaccagcagtctcttctggca

SEQ ID NO: 3572343 - DNA, 25 bp, Homo sapien
ctcttctggcactcctgagcgcggc

SEQ ID NO: 3572344 - DNA, 25 bp, Homo sapien
cttcctgccgaggactaccagcagt

SEQ ID NO: 3572345 - DNA, 25 bp, Homo sapien
tccagggccgaggggtcaagaagca

SEQ ID NO: 3572346 - DNA, 25 bp, Homo sapien
cagaaggaagtgaggtagatttgaa

SEQ ID NO: 3572347 - DNA, 25 bp, Homo sapien
ctccagggccgaggggtcaagaagc

SEQ ID NO: 3572348 - DNA, 25 bp, Homo sapien
gaagtgaggtagatttgaactttgg

SEQ ID NO: 3572349 - DNA, 25 bp, Homo sapien
gacttattctttggctgcaccaaaa

SEQ ID NO: 3572350 - DNA, 25 bp, Homo sapien
tgtccctggaggacttattctttgg

SEQ ID NO: 3572351 - DNA, 25 bp, Homo sapien
cctggaggacttattctttggctgc

SEQ ID NO: 3572352 - DNA, 25 bp, Homo sapien
gaggacttattctttggctgcacca

SEQ ID NO: 3572353 - DNA, 25 bp, Homo sapien
ccattgatgtgaagcccggttggag

SEQ ID NO: 3572354 - DNA, 25 bp, Homo sapien
ggacaagatcctgaccattgatgtg

SEQ ID NO: 3572355 - DNA, 25 bp, Homo sapien
aggatgggtactcctccaccatcaa

SEQ ID NO: 3572356 - DNA, 25 bp, Homo sapien
gcagggcacacgcatcacctttgag

SEQ ID NO: 3572357 - DNA, 25 bp, Homo sapien
caacatcatcccagcagacatcatt

SEQ ID NO: 3572358 - DNA, 25 bp, Homo sapien
gacatcattttcatcgtaaaggaga

SEQ ID NO: 3572359 - DNA, 25 bp, Homo sapien
gacaacctcttcttcgtgaacccca

SEQ ID NO: 3572360 - DNA, 25 bp, Homo sapien
aggagaagctacaccctcgcttccg

SEQ ID NO: 3572361 - DNA, 25 bp, Homo sapien
gggaggagatcagagtgagccctgc

SEQ ID NO: 3572362 - DNA, 25 bp, Homo sapien
gtgggcaaagtgcaggagcagcggg

SEQ ID NO: 3572363 - DNA, 25 bp, Homo sapien
agcggggaggagatcagagtgagcc

SEQ ID NO: 3572364 - DNA, 25 bp, Homo sapien
aggagatcagagtgagccctgcctg

SEQ ID NO: 3572365 - DNA, 25 bp, Homo sapien
tagatgaccgtctgctcaacatccc

SEQ ID NO: 3572366 - DNA, 25 bp, Homo sapien
gaggtgaggaccctagatgaccgtc

SEQ ID NO: 3572367 - DNA, 25 bp, Homo sapien
ggaccctagatgaccgtctgctcaa

SEQ ID NO: 3572368 - DNA, 25 bp, Homo sapien
tgaggaccctagatgaccgtctgct

SEQ ID NO: 3572369 - DNA, 25 bp, Homo sapien
ccactaagaaaggggatctcttcat

SEQ ID NO: 3572370 - DNA, 25 bp, Homo sapien
cccactaagaaaggggatctcttca

SEQ ID NO: 3572371 - DNA, 25 bp, Homo sapien
cattgccggaggaccccactaagaa

SEQ ID NO: 3572372 - DNA, 25 bp, Homo sapien
gccattgccggaggaccccactaag

SEQ ID NO: 3572373 - DNA, 25 bp, Homo sapien
gctgcacagatatgatacaagggtg

SEQ ID NO: 3572374 - DNA, 25 bp, Homo sapien
tgggatggcgcagggcttaaactga

SEQ ID NO: 3572375 - DNA, 25 bp, Homo sapien
cataataaagatctatttcctgtcc

SEQ ID NO: 3572376 - DNA, 25 bp, Homo sapien
aagaagcagatgctgcgccaggcat

SEQ ID NO: 3572377 - DNA, 25 bp, Homo sapien
ggcaggcactagagtaccagattct

SEQ ID NO: 3572378 - DNA, 25 bp, Homo sapien
cctacacgggcttcagattggatgc

SEQ ID NO: 3572379 - DNA, 25 bp, Homo sapien
aaatggaccagatgacctacacggg

SEQ ID NO: 3572380 - DNA, 25 bp, Homo sapien
cctgggtctagagagaaatggacca

SEQ ID NO: 3572381 - DNA, 25 bp, Homo sapien
catggcccggctagagacaaagcca

SEQ ID NO: 3572382 - DNA, 25 bp, Homo sapien
tttatggatgacaagtgggctaggc

SEQ ID NO: 3572383 - DNA, 25 bp, Homo sapien
ggcaggacgaagattctggctgaac

SEQ ID NO: 3572384 - DNA, 25 bp, Homo sapien
cgccaaggttgagcttgctttatgg

SEQ ID NO: 3572385 - DNA, 25 bp, Homo sapien
caccacgttccaggaacccaagcgg

SEQ ID NO: 3572386 - DNA, 25 bp, Homo sapien
acatcaccacgttccaggaacccaa

SEQ ID NO: 3572387 - DNA, 25 bp, Homo sapien
agcctctcgggaagtgcaggcagcc

SEQ ID NO: 3572388 - DNA, 25 bp, Homo sapien
ccacgttccaggaacccaagcggag

SEQ ID NO: 3572389 - DNA, 25 bp, Homo sapien
gcgctactgtactggcccagggcag

SEQ ID NO: 3572390 - DNA, 25 bp, Homo sapien
ggcagagttcatgtatctcgtcttg

SEQ ID NO: 3572391 - DNA, 25 bp, Homo sapien
gtaagggcacagtggccagcgctac

SEQ ID NO: 3572392 - DNA, 25 bp, Homo sapien
tctcgtcttgaccacgtctacaggg

SEQ ID NO: 3572393 - DNA, 25 bp, Homo sapien
cagaagtgaagtggcaagggaggtc

SEQ ID NO: 3572394 - DNA, 25 bp, Homo sapien
aaggcagaagtgaagtggcaaggga

SEQ ID NO: 3572395 - DNA, 25 bp, Homo sapien
gaagtgaagtggcaagggaggtcat

SEQ ID NO: 3572396 - DNA, 25 bp, Homo sapien
gcagaagtgaagtggcaagggaggt

SEQ ID NO: 3572397 - DNA, 25 bp, Homo sapien
ttgatgaggtcataggtcaccagct

SEQ ID NO: 3572398 - DNA, 25 bp, Homo sapien
ggagggcatccttgatgaggtcata

SEQ ID NO: 3572399 - DNA, 25 bp, Homo sapien
ctgtcatgaggttggctttcaggag

SEQ ID NO: 3572400 - DNA, 25 bp, Homo sapien
tgacaatggcattacgagcaacatt

SEQ ID NO: 3572401 - DNA, 25 bp, Homo sapien
cctgagcttggaatcggacctttac

SEQ ID NO: 3572402 - DNA, 25 bp, Homo sapien
tttaccacatccgtgggctgggcca

SEQ ID NO: 3572403 - DNA, 25 bp, Homo sapien
gacggtgctttggtatctccgacca

SEQ ID NO: 3572404 - DNA, 25 bp, Homo sapien
gcacctgtggtgctgcctgctagga

SEQ ID NO: 3572405 - DNA, 25 bp, Homo sapien
gtgggcgagccatggggtcagtggc

SEQ ID NO: 3572406 - DNA, 25 bp, Homo sapien
tgtgggcgagccatggggtcagtgg

SEQ ID NO: 3572407 - DNA, 25 bp, Homo sapien
ctgtgggcgagccatggggtcagtg

SEQ ID NO: 3572408 - DNA, 25 bp, Homo sapien
ggcaaccagcccattgtagaggctt

SEQ ID NO: 3572409 - DNA, 25 bp, Homo sapien
actggcccctgactttctccttgga

SEQ ID NO: 3572410 - DNA, 25 bp, Homo sapien
tgacagaatcatacaggccgatgcg

SEQ ID NO: 3572411 - DNA, 25 bp, Homo sapien
gaatggtgcccatcacaccgcggta

SEQ ID NO: 3572412 - DNA, 25 bp, Homo sapien
ctgcaaggccaagacagggtagcta

SEQ ID NO: 3572413 - DNA, 25 bp, Homo sapien
tgccagccccaagaaacttcacagt

SEQ ID NO: 3572414 - DNA, 25 bp, Homo sapien
ctgtaaccggactttagcagtatcc

SEQ ID NO: 3572415 - DNA, 25 bp, Homo sapien
aaaggtgatgagatctgcgatgcag

SEQ ID NO: 3572416 - DNA, 25 bp, Homo sapien
acttcacagtggcagtagggggcac

SEQ ID NO: 3572417 - DNA, 25 bp, Homo sapien
gagacaggggcacctttaatcagca

SEQ ID NO: 3572418 - DNA, 25 bp, Homo sapien
agcaacaagacgagatagaggaact

SEQ ID NO: 3572419 - DNA, 25 bp, Homo sapien
gcacctttaatcagcaacaagacga

SEQ ID NO: 3572420 - DNA, 25 bp, Homo sapien
caagacgagatagaggaactctgcc

SEQ ID NO: 3572421 - DNA, 25 bp, Homo sapien
gctgttttatcagccccaggcacag

SEQ ID NO: 3572422 - DNA, 25 bp, Homo sapien
gacatgagtctgtcacattcctgac

SEQ ID NO: 3572423 - DNA, 25 bp, Homo sapien
tgagaaggctcaggcaaatggtatc

SEQ ID NO: 3572424 - DNA, 25 bp, Homo sapien
cattcctgaccttgagctgggttgc

SEQ ID NO: 3572425 - DNA, 25 bp, Homo sapien
gggaccaagatccttggcttgtccg

SEQ ID NO: 3572426 - DNA, 25 bp, Homo sapien
tcactgttacacgtgggcctcagtt

SEQ ID NO: 3572427 - DNA, 25 bp, Homo sapien
ctgtgaactggaaagagccacttca

SEQ ID NO: 3572428 - DNA, 25 bp, Homo sapien
gcttgtccgagtcagctgaagggcc

SEQ ID NO: 3572429 - DNA, 25 bp, Homo sapien
tttgtaaggtctcacggtgaggcct

SEQ ID NO: 3572430 - DNA, 25 bp, Homo sapien
tgtaaggtctcacggtgaggcctcc

SEQ ID NO: 3572431 - DNA, 25 bp, Homo sapien
ttgtaaggtctcacggtgaggcctc

SEQ ID NO: 3572432 - DNA, 25 bp, Homo sapien
ctttgtaaggtctcacggtgaggcc

SEQ ID NO: 3572433 - DNA, 25 bp, Homo sapien
tcaagcttctctaaaggtgtcccgt

SEQ ID NO: 3572434 - DNA, 25 bp, Homo sapien
ttccatagaaaatgggtgggagacg

SEQ ID NO: 3572435 - DNA, 25 bp, Homo sapien
gtgggagacgaaacacctaatggtc

SEQ ID NO: 3572436 - DNA, 25 bp, Homo sapien
tcatggcccgatccccttggttttc

SEQ ID NO: 3572437 - DNA, 25 bp, Homo sapien
agtcaatcccaaggcgcgcgcagct

SEQ ID NO: 3572438 - DNA, 25 bp, Homo sapien
ccgggcgagcgtggacagtcaatcc

SEQ ID NO: 3572439 - DNA, 25 bp, Homo sapien
agaacacggcagtgcgtgcggctgt

SEQ ID NO: 3572440 - DNA, 25 bp, Homo sapien
gcggctgtgtctgtcggctggcgga

SEQ ID NO: 3572441 - DNA, 25 bp, Homo sapien
ctgtgaggatggcaagactgaccgc

SEQ ID NO: 3572442 - DNA, 25 bp, Homo sapien
gactgaccgccagaaacaagtcttg

SEQ ID NO: 3572443 - DNA, 25 bp, Homo sapien
gccttcccagccaggacggtttcta

SEQ ID NO: 3572444 - DNA, 25 bp, Homo sapien
acggtttctaacagcgtccagcggg

SEQ ID NO: 3572445 - DNA, 25 bp, Homo sapien
accttgtacctgtgaacgcatttgg

SEQ ID NO: 3572446 - DNA, 25 bp, Homo sapien
tgtacctgtgaacgcatttggggca

SEQ ID NO: 3572447 - DNA, 25 bp, Homo sapien
catattgtcttcaagttatggggtg

SEQ ID NO: 3572448 - DNA, 25 bp, Homo sapien
cttcaagttatggggtggaaaattg

SEQ ID NO: 3572449 - DNA, 25 bp, Homo sapien
caggagcttatttctggcaccaaag

SEQ ID NO: 3572450 - DNA, 25 bp, Homo sapien
tggtaatgatttccggattctggcc

SEQ ID NO: 3572451 - DNA, 25 bp, Homo sapien
gactcttctaggtcaggcaacccct

SEQ ID NO: 3572452 - DNA, 25 bp, Homo sapien
gacaccatgggcctcatgtggagat

SEQ ID NO: 3572453 - DNA, 25 bp, Homo sapien
ttctttgggcagagcgctttttcac

SEQ ID NO: 3572454 - DNA, 25 bp, Homo sapien
ggggttgtccctatactctgctgcc

SEQ ID NO: 3572455 - DNA, 25 bp, Homo sapien
gggtaatgaagggattagtatcttc

SEQ ID NO: 3572456 - DNA, 25 bp, Homo sapien
cgattaacaggttgcggtttagagg

SEQ ID NO: 3572457 - DNA, 25 bp, Homo sapien
ttctctgaggaggtccactccctgc

SEQ ID NO: 3572458 - DNA, 25 bp, Homo sapien
tctctgaggaggtccactccctgcc

SEQ ID NO: 3572459 - DNA, 25 bp, Homo sapien
ctttagcagaaatttgtcctttggt

SEQ ID NO: 3572460 - DNA, 25 bp, Homo sapien
cttctctgaggaggtccactccctg

SEQ ID NO: 3572461 - DNA, 25 bp, Homo sapien
ctcaaatcagagtgaaggtatgcag

SEQ ID NO: 3572462 - DNA, 25 bp, Homo sapien
ccacacctgactaatttttgtattt

SEQ ID NO: 3572463 - DNA, 25 bp, Homo sapien
caggcacctgccaccctgccaccac

SEQ ID NO: 3572464 - DNA, 25 bp, Homo sapien
cacctgccaccctgccaccacacct

SEQ ID NO: 3572465 - DNA, 25 bp, Homo sapien
ttagtaaaggtgggccaggctggtc

SEQ ID NO: 3572466 - DNA, 25 bp, Homo sapien
caaaggtgttcttgaggcatggcag

SEQ ID NO: 3572467 - DNA, 25 bp, Homo sapien
ttcggacacgttagctaccagtggc

SEQ ID NO: 3572468 - DNA, 25 bp, Homo sapien
ggaatatttacgagccccagcctca

SEQ ID NO: 3572469 - DNA, 25 bp, Homo sapien
gaattccgagtcctgctactttagg

SEQ ID NO: 3572470 - DNA, 25 bp, Homo sapien
caggatcccaaacgcaaaaaggagg

SEQ ID NO: 3572471 - DNA, 25 bp, Homo sapien
ttcagctgctcataggttacgaaca

SEQ ID NO: 3572472 - DNA, 25 bp, Homo sapien
taacatctggactttcatcagggcc

SEQ ID NO: 3572473 - DNA, 25 bp, Homo sapien
caaaacggtgattcccgtaacatct

SEQ ID NO: 3572474 - DNA, 25 bp, Homo sapien
agaaaaacaaccaacacatcaggtg

SEQ ID NO: 3572475 - DNA, 25 bp, Homo sapien
gaaaaacaaccaacacatcaggtgg

SEQ ID NO: 3572476 - DNA, 25 bp, Homo sapien
tgataagaaaaacaaccaacacatc

SEQ ID NO: 3572477 - DNA, 25 bp, Homo sapien
aaacaaccaacacatcaggtggagt

SEQ ID NO: 3572478 - DNA, 25 bp, Homo sapien
cctgccaggacatggagaagcttgg

SEQ ID NO: 3572479 - DNA, 25 bp, Homo sapien
gctgtggctcaccaactcagggaga

SEQ ID NO: 3572480 - DNA, 25 bp, Homo sapien
tacagtgtggcaccagatttagctc

SEQ ID NO: 3572481 - DNA, 25 bp, Homo sapien
tagtcacattccctgacgatgccag

SEQ ID NO: 3572482 - DNA, 25 bp, Homo sapien
ggttgacccacggtagccacattcg

SEQ ID NO: 3572483 - DNA, 25 bp, Homo sapien
tattacgtcattcccaggcttgaga

SEQ ID NO: 3572484 - DNA, 25 bp, Homo sapien
gatgatgaggcattccacgcagagg

SEQ ID NO: 3572485 - DNA, 25 bp, Homo sapien
cacgcagagggagcagtaagtgcaa

SEQ ID NO: 3572486 - DNA, 25 bp, Homo sapien
ggtgagttcatataccgggtcttca

SEQ ID NO: 3572487 - DNA, 25 bp, Homo sapien
tctttatcatacagtcgagggggct

SEQ ID NO: 3572488 - DNA, 25 bp, Homo sapien
cacagaagccggctccaaaggcaga

SEQ ID NO: 3572489 - DNA, 25 bp, Homo sapien
gtccaccggggaggccaccactgtg

SEQ ID NO: 3572490 - DNA, 25 bp, Homo sapien
ttcctcatgatgttgggcaaagttc

SEQ ID NO: 3572491 - DNA, 25 bp, Homo sapien
gcaggtggtagtccagcagcttctc

SEQ ID NO: 3572492 - DNA, 25 bp, Homo sapien
gcacagttgacgatagcattcctca

SEQ ID NO: 3572493 - DNA, 25 bp, Homo sapien
caccacctcagcacagttgacgata

SEQ ID NO: 3572494 - DNA, 25 bp, Homo sapien
ccaaaatccgggtagtgaggctgga

SEQ ID NO: 3572495 - DNA, 25 bp, Homo sapien
tgtaggcgtccatagtcccgctgta

SEQ ID NO: 3572496 - DNA, 25 bp, Homo sapien
tgtattttctgtcgctcctggatgg

SEQ ID NO: 3572497 - DNA, 25 bp, Homo sapien
tgtatgctggcctgaaatcggacct

SEQ ID NO: 3572498 - DNA, 25 bp, Homo sapien
cagtgtcccctactaagcagcattc

SEQ ID NO: 3572499 - DNA, 25 bp, Homo sapien
agtgtcccctactaagcagcattct

SEQ ID NO: 3572500 - DNA, 25 bp, Homo sapien
gccagtgtcccctactaagcagcat

SEQ ID NO: 3572501 - DNA, 25 bp, Homo sapien
gggccagtgtcccctactaagcagc

SEQ ID NO: 3572502 - DNA, 25 bp, Homo sapien
cttgacccacacactttcagccacc

SEQ ID NO: 3572503 - DNA, 25 bp, Homo sapien
agcctcctcataagcgtccggtacc

SEQ ID NO: 3572504 - DNA, 25 bp, Homo sapien
cctcataagcgtccggtaccagctt

SEQ ID NO: 3572505 - DNA, 25 bp, Homo sapien
gtctcttgacccacacactttcagc

SEQ ID NO: 3572506 - DNA, 25 bp, Homo sapien
tgtccgcgcctttgggggtgtacac

SEQ ID NO: 3572507 - DNA, 25 bp, Homo sapien
tacacctgcttgacggagtcataga

SEQ ID NO: 3572508 - DNA, 25 bp, Homo sapien
cggagtcatagaggccgatgcggat

SEQ ID NO: 3572509 - DNA, 25 bp, Homo sapien
atggaggcgaagctcatctggcgct

SEQ ID NO: 3572510 - DNA, 25 bp, Homo sapien
atggtgcccagcacgccacggtact

SEQ ID NO: 3572511 - DNA, 25 bp, Homo sapien
agccgggccgtctggaccgcctggt

SEQ ID NO: 3572512 - DNA, 25 bp, Homo sapien
cggtactgcacgagccgggccgtct

SEQ ID NO: 3572513 - DNA, 25 bp, Homo sapien
acgccacggtactgcacgagccggg

SEQ ID NO: 3572514 - DNA, 25 bp, Homo sapien
caggcggaccttggctgtgtccagt

SEQ ID NO: 3572515 - DNA, 25 bp, Homo sapien
gtccagtggaaaggtaacgaggtca

SEQ ID NO: 3572516 - DNA, 25 bp, Homo sapien
aggtaacgaggtcagcaaaacaggc

SEQ ID NO: 3572517 - DNA, 25 bp, Homo sapien
gctgtgtccagtggaaaggtaacga

SEQ ID NO: 3572518 - DNA, 25 bp, Homo sapien
agtcctggaaggctctgcccagtcc

SEQ ID NO: 3572519 - DNA, 25 bp, Homo sapien
tgctccacagccctgggcttcagtg

SEQ ID NO: 3572520 - DNA, 25 bp, Homo sapien
ctttagggccgagaggaggtccaag

SEQ ID NO: 3572521 - DNA, 25 bp, Homo sapien
agaggaggtccaaggagagaggctg

SEQ ID NO: 3572522 - DNA, 25 bp, Homo sapien
agggccgagaggaggtccaaggaga

SEQ ID NO: 3572523 - DNA, 25 bp, Homo sapien
cagcagggattggatggcccctcct

SEQ ID NO: 3572524 - DNA, 25 bp, Homo sapien
agcacaggggctccctagggctcca

SEQ ID NO: 3572525 - DNA, 25 bp, Homo sapien
tgtgagtcctgccacggcaggggca

SEQ ID NO: 3572526 - DNA, 25 bp, Homo sapien
cctccttgtcattcactgttgtctc

SEQ ID NO: 3572527 - DNA, 25 bp, Homo sapien
cattttgggcttatctactgtgacc

SEQ ID NO: 3572528 - DNA, 25 bp, Homo sapien
tgtaaggcattttgggcttatctac

SEQ ID NO: 3572529 - DNA, 25 bp, Homo sapien
aagtcatgtagccagcacgtggcgg

SEQ ID NO: 3572530 - DNA, 25 bp, Homo sapien
tggaatctcagggaagtcatgtagc

SEQ ID NO: 3572531 - DNA, 25 bp, Homo sapien
tgggcacagctgaatcgggccccag

SEQ ID NO: 3572532 - DNA, 25 bp, Homo sapien
gcactcagagtaagggctgggcaca

SEQ ID NO: 3572533 - DNA, 25 bp, Homo sapien
gtgggcactcagagtaagggctggg

SEQ ID NO: 3572534 - DNA, 25 bp, Homo sapien
cagctgaatcgggccccaggtgatg

SEQ ID NO: 3572535 - DNA, 25 bp, Homo sapien
gaagcatggatgttcaagtgcaaag

SEQ ID NO: 3572536 - DNA, 25 bp, Homo sapien
ggccctgaccttaatgtcagcagaa

SEQ ID NO: 3572537 - DNA, 25 bp, Homo sapien
cagaataagcagctgcattagtgtt

SEQ ID NO: 3572538 - DNA, 25 bp, Homo sapien
aaagcttgggctgtacctgtcctct

SEQ ID NO: 3572539 - DNA, 25 bp, Homo sapien
gattttattcaaacacaggcaagaa

SEQ ID NO: 3572540 - DNA, 25 bp, Homo sapien
atatgattttattcaaacacaggca

SEQ ID NO: 3572541 - DNA, 25 bp, Homo sapien
tattcaaacacaggcaagaacaatg

SEQ ID NO: 3572542 - DNA, 25 bp, Homo sapien
tttattcaaacacaggcaagaacaa

SEQ ID NO: 3572543 - DNA, 25 bp, Homo sapien
cagcagtcagctgtgtcaaggacac

SEQ ID NO: 3572544 - DNA, 25 bp, Homo sapien
gtttctccaccgaaagatgcctgct

SEQ ID NO: 3572545 - DNA, 25 bp, Homo sapien
gctgaccgggtctcttgaggcatcc

SEQ ID NO: 3572546 - DNA, 25 bp, Homo sapien
tgaaattctggcaagtggacactgg

SEQ ID NO: 3572547 - DNA, 25 bp, Homo sapien
tcaggctgcgtcagtctttctggga

SEQ ID NO: 3572548 - DNA, 25 bp, Homo sapien
agctcccctggtggcttcgctcttg

SEQ ID NO: 3572549 - DNA, 25 bp, Homo sapien
tactgagaagaaaatatccgtgcaa

SEQ ID NO: 3572550 - DNA, 25 bp, Homo sapien
ccgtgcaatcctgagagtttcttcc

SEQ ID NO: 3572551 - DNA, 25 bp, Homo sapien
ggctgacagggcatcactaattccg

SEQ ID NO: 3572552 - DNA, 25 bp, Homo sapien
tgtctacaatctgggaagctctcag

SEQ ID NO: 3572553 - DNA, 25 bp, Homo sapien
tatccaactctcagggagatggcgg

SEQ ID NO: 3572554 - DNA, 25 bp, Homo sapien
gactattgagagcacactgtaccac

SEQ ID NO: 3572555 - DNA, 25 bp, Homo sapien
gctatttgggatttaggatgacaca

SEQ ID NO: 3572556 - DNA, 25 bp, Homo sapien
cctgagctatttgggatttaggatg

SEQ ID NO: 3572557 - DNA, 25 bp, Homo sapien
ctgtttcctgagctatttgggattt

SEQ ID NO: 3572558 - DNA, 25 bp, Homo sapien
tgggatttaggatgacacaagtccc

SEQ ID NO: 3572559 - DNA, 25 bp, Homo sapien
agctgtactgcaggtagattttctg

SEQ ID NO: 3572560 - DNA, 25 bp, Homo sapien
ttctgggtcatcagttgtatcttac

SEQ ID NO: 3572561 - DNA, 25 bp, Homo sapien
ccccagctgtactgcaggtagattt

SEQ ID NO: 3572562 - DNA, 25 bp, Homo sapien
ccagctgtactgcaggtagattttc

SEQ ID NO: 3572563 - DNA, 25 bp, Homo sapien
ggaagggccaactacctcagttcat

SEQ ID NO: 3572564 - DNA, 25 bp, Homo sapien
tctgttttagagagacttagatgag

SEQ ID NO: 3572565 - DNA, 25 bp, Homo sapien
tgaaatgaccataaaaagacctctg

SEQ ID NO: 3572566 - DNA, 25 bp, Homo sapien
ggccttagagcatagtattctatct

SEQ ID NO: 3572567 - DNA, 25 bp, Homo sapien
aattggccagagcagggataccctc

SEQ ID NO: 3572568 - DNA, 25 bp, Homo sapien
tcatcaggactgctaccctaacaca

SEQ ID NO: 3572569 - DNA, 25 bp, Homo sapien
tctgaaatactcctacacttctggc

SEQ ID NO: 3572570 - DNA, 25 bp, Homo sapien
gaaaccatcttgactagtagtgaag

SEQ ID NO: 3572571 - DNA, 25 bp, Homo sapien
gaatttgatcttattcttcttggac

SEQ ID NO: 3572572 - DNA, 25 bp, Homo sapien
cttcttggacttcagcgagctgatc

SEQ ID NO: 3572573 - DNA, 25 bp, Homo sapien
tggacttcagcgagctgatctgtaa

SEQ ID NO: 3572574 - DNA, 25 bp, Homo sapien
cttcagcgagctgatctgtaagggc

SEQ ID NO: 3572575 - DNA, 25 bp, Homo sapien
aacttgaggagtgacccctgctgca

SEQ ID NO: 3572576 - DNA, 25 bp, Homo sapien
gaatatgctcagtacaaacttgagg

SEQ ID NO: 3572577 - DNA, 25 bp, Homo sapien
cacttctgtggaagagatgatgact

SEQ ID NO: 3572578 - DNA, 25 bp, Homo sapien
gctgggcccacagaatatgctcagt

SEQ ID NO: 3572579 - DNA, 25 bp, Homo sapien
aaagcatccgcagggaagcctccaa

SEQ ID NO: 3572580 - DNA, 25 bp, Homo sapien
tggcaaagttgctgagagtgaaagc

SEQ ID NO: 3572581 - DNA, 25 bp, Homo sapien
tgagagtgaaagcatccgcagggaa

SEQ ID NO: 3572582 - DNA, 25 bp, Homo sapien
gctgctggtggcaaagttgctgaga

SEQ ID NO: 3572583 - DNA, 25 bp, Homo sapien
ggaggcaaaaagaagttgggcacca

SEQ ID NO: 3572584 - DNA, 25 bp, Homo sapien
aagaagttgggcaccacaatgggcc

SEQ ID NO: 3572585 - DNA, 25 bp, Homo sapien
gcaaaaagaagttgggcaccacaat

SEQ ID NO: 3572586 - DNA, 25 bp, Homo sapien
tggggaggcaaaaagaagttgggca

SEQ ID NO: 3572587 - DNA, 25 bp, Homo sapien
gctatcagcagagtcaccgagctca

SEQ ID NO: 3572588 - DNA, 25 bp, Homo sapien
tctgcctgatgtcagaggagtcgat

SEQ ID NO: 3572589 - DNA, 25 bp, Homo sapien
ctctgggaggctagatttagcggca

SEQ ID NO: 3572590 - DNA, 25 bp, Homo sapien
ggacgtctctgatccagttgtcacc

SEQ ID NO: 3572591 - DNA, 25 bp, Homo sapien
ctctgacttgggctccttgttctga

SEQ ID NO: 3572592 - DNA, 25 bp, Homo sapien
ctgtggtgagctccatccaacaaac

SEQ ID NO: 3572593 - DNA, 25 bp, Homo sapien
tgagctccatccaacaaacgtgctg

SEQ ID NO: 3572594 - DNA, 25 bp, Homo sapien
tccaacaaacgtgctgctctgttga

SEQ ID NO: 3572595 - DNA, 25 bp, Homo sapien
agtgttgggcatgggatgggctgag

SEQ ID NO: 3572596 - DNA, 25 bp, Homo sapien
tcacactcacaagcaacaagacttt

SEQ ID NO: 3572597 - DNA, 25 bp, Homo sapien
caagactttggctaggagaaccctg

SEQ ID NO: 3572598 - DNA, 25 bp, Homo sapien
taggagaaccctgcctaggcaggtg

SEQ ID NO: 3572599 - DNA, 25 bp, Homo sapien
ctggagaaggacaagaggggccttc

SEQ ID NO: 3572600 - DNA, 25 bp, Homo sapien
gacaagaggggccttccctctgcac

SEQ ID NO: 3572601 - DNA, 25 bp, Homo sapien
aaggacaagaggggccttccctctg

SEQ ID NO: 3572602 - DNA, 25 bp, Homo sapien
tggagaaggacaagaggggccttcc

SEQ ID NO: 3572603 - DNA, 25 bp, Homo sapien
cgtcaggctgagggctgatgacctc

SEQ ID NO: 3572604 - DNA, 25 bp, Homo sapien
ctcgtcaggctgagggctgatgacc

SEQ ID NO: 3572605 - DNA, 25 bp, Homo sapien
tcgtcaggctgagggctgatgacct

SEQ ID NO: 3572606 - DNA, 25 bp, Homo sapien
tcaggctgagggctgatgacctcac

SEQ ID NO: 3572607 - DNA, 25 bp, Homo sapien
tgtctgatatgacactagaccaagg

SEQ ID NO: 3572608 - DNA, 25 bp, Homo sapien
ccgtggtgatctcatttaaggtcct

SEQ ID NO: 3572609 - DNA, 25 bp, Homo sapien
taatgggtactgcatgcctcaggga

SEQ ID NO: 3572610 - DNA, 25 bp, Homo sapien
ctagttttgtctgtcaccgtggtga

SEQ ID NO: 3572611 - DNA, 25 bp, Homo sapien
gagctcttaccaatggctcatctgg

SEQ ID NO: 3572612 - DNA, 25 bp, Homo sapien
tcaaagctgcttgcgaatccctggt

SEQ ID NO: 3572613 - DNA, 25 bp, Homo sapien
tgcttctactcctggctcggtgaga

SEQ ID NO: 3572614 - DNA, 25 bp, Homo sapien
cattgtgcatcgttcttgcagtgct

SEQ ID NO: 3572615 - DNA, 25 bp, Homo sapien
taatctatagttgtggatacatctg

SEQ ID NO: 3572616 - DNA, 25 bp, Homo sapien
tatcagaggaccagaatctaatcta

SEQ ID NO: 3572617 - DNA, 25 bp, Homo sapien
gaccagaatctaatctatagttgtg

SEQ ID NO: 3572618 - DNA, 25 bp, Homo sapien
ttattctaatatcagaggaccagaa

SEQ ID NO: 3572619 - DNA, 25 bp, Homo sapien
caggaatcgttgggagctgggagtc

SEQ ID NO: 3572620 - DNA, 25 bp, Homo sapien
tcaggaatcgttgggagctgggagt

SEQ ID NO: 3572621 - DNA, 25 bp, Homo sapien
tgggcatgttcatgcttccagttac

SEQ ID NO: 3572622 - DNA, 25 bp, Homo sapien
gggcatgttcatgcttccagttact

SEQ ID NO: 3572623 - DNA, 25 bp, Homo sapien
ggtgggcatgttcatgcttccagtt

SEQ ID NO: 3572624 - DNA, 25 bp, Homo sapien
ctggtgggcatgttcatgcttccag

SEQ ID NO: 3572625 - DNA, 25 bp, Homo sapien
gcttgatgaagggagataatgcctg

SEQ ID NO: 3572626 - DNA, 25 bp, Homo sapien
caagtggaagtcaaacacagagcat

SEQ ID NO: 3572627 - DNA, 25 bp, Homo sapien
tctgaggccatggataccaacaggt

SEQ ID NO: 3572628 - DNA, 25 bp, Homo sapien
ataatgcctgtcatatccaccactg

SEQ ID NO: 3572629 - DNA, 25 bp, Homo sapien
ctgtgagatggccgtttgagtctga

SEQ ID NO: 3572630 - DNA, 25 bp, Homo sapien
ccaagatggtccctacagctctcct

SEQ ID NO: 3572631 - DNA, 25 bp, Homo sapien
ccaggatacactggctcccagggtc

SEQ ID NO: 3572632 - DNA, 25 bp, Homo sapien
caccaggttactggatttctccagg

SEQ ID NO: 3572633 - DNA, 25 bp, Homo sapien
tgaggggtaggaaaggcttggtgag

SEQ ID NO: 3572634 - DNA, 25 bp, Homo sapien
ctgaggggtaggaaaggcttggtga

SEQ ID NO: 3572635 - DNA, 25 bp, Homo sapien
aggggtaggaaaggcttggtgagct

SEQ ID NO: 3572636 - DNA, 25 bp, Homo sapien
gaggggtaggaaaggcttggtgagc

SEQ ID NO: 3572637 - DNA, 25 bp, Homo sapien
gaatctgatcaagctcactcagatt

SEQ ID NO: 3572638 - DNA, 25 bp, Homo sapien
tgaatctgatcaagctcactcagat

SEQ ID NO: 3572639 - DNA, 25 bp, Homo sapien
ctggcggaagtacctctgaatctga

SEQ ID NO: 3572640 - DNA, 25 bp, Homo sapien
caaacttgacttgcccctgagcctt

SEQ ID NO: 3572641 - DNA, 25 bp, Homo sapien
tcttagtctgacattcaaggacctt

SEQ ID NO: 3572642 - DNA, 25 bp, Homo sapien
tcagctttttcctacatgcactgct

SEQ ID NO: 3572643 - DNA, 25 bp, Homo sapien
gagccttggcgtaagttctttctgc

SEQ ID NO: 3572644 - DNA, 25 bp, Homo sapien
tgaaaccggcgaatgttctgcacat

SEQ ID NO: 3572645 - DNA, 25 bp, Homo sapien
ccctgaagatgcagggattcatgaa

SEQ ID NO: 3572646 - DNA, 25 bp, Homo sapien
ggcaagggtgcctctccctgaagat

SEQ ID NO: 3572647 - DNA, 25 bp, Homo sapien
gatgtggtcagtttgtcatcacatg

SEQ ID NO: 3572648 - DNA, 25 bp, Homo sapien
ctcccaggagaggagaaatcaagct

SEQ ID NO: 3572649 - DNA, 25 bp, Homo sapien
tcccaggagaggagaaatcaagctc

SEQ ID NO: 3572650 - DNA, 25 bp, Homo sapien
gagcaagttggtctagggtctgcct

SEQ ID NO: 3572651 - DNA, 25 bp, Homo sapien
cagcatacgtatcagaggcagggaa

SEQ ID NO: 3572652 - DNA, 25 bp, Homo sapien
ttgaggaggcatgagcaagttggtc

SEQ ID NO: 3572653 - DNA, 25 bp, Homo sapien
ggagaatgcagcatacgtatcagag

SEQ ID NO: 3572654 - DNA, 25 bp, Homo sapien
gtaccagccacagacaaactggaag

SEQ ID NO: 3572655 - DNA, 25 bp, Homo sapien
gacagcaacttttatctgcccctgg

SEQ ID NO: 3572656 - DNA, 25 bp, Homo sapien
aagtgtatcaaactctccaaagggg

SEQ ID NO: 3572657 - DNA, 25 bp, Homo sapien
ggcactctccactgaagtctgtgat

SEQ ID NO: 3572658 - DNA, 25 bp, Homo sapien
atgccaaactttgaagaccagggtt

SEQ ID NO: 3572659 - DNA, 25 bp, Homo sapien
ttatgccaaactttgaagaccaggg

SEQ ID NO: 3572660 - DNA, 25 bp, Homo sapien
tatgccaaactttgaagaccagggt

SEQ ID NO: 3572661 - DNA, 25 bp, Homo sapien
ggctgacgaataacggataacacaa

SEQ ID NO: 3572662 - DNA, 25 bp, Homo sapien
agcagattctggaaggctgacgaat

SEQ ID NO: 3572663 - DNA, 25 bp, Homo sapien
gaaggctgacgaataacggataaca

SEQ ID NO: 3572664 - DNA, 25 bp, Homo sapien
tctggaaggctgacgaataacggat

SEQ ID NO: 3572665 - DNA, 25 bp, Homo sapien
tgggtgtatacaggagatgactcat

SEQ ID NO: 3572666 - DNA, 25 bp, Homo sapien
gttttcaaccacttgggtgtataca

SEQ ID NO: 3572667 - DNA, 25 bp, Homo sapien
tatcgatactttccgctctgtcaag

SEQ ID NO: 3572668 - DNA, 25 bp, Homo sapien
aaggatacacaacaactgggtatcg

SEQ ID NO: 3572669 - DNA, 25 bp, Homo sapien
gaacttgaactaatgtgacggccct

SEQ ID NO: 3572670 - DNA, 25 bp, Homo sapien
gaaagtttctgtcgcctgttctcca

SEQ ID NO: 3572671 - DNA, 25 bp, Homo sapien
cagtgtcagtcatgtagcatacaaa

SEQ ID NO: 3572672 - DNA, 25 bp, Homo sapien
tgacggccctctcagtgattgctgc

SEQ ID NO: 3572673 - DNA, 25 bp, Homo sapien
gactgcaaacgttccatccaaatca

SEQ ID NO: 3572674 - DNA, 25 bp, Homo sapien
gtgcattgctctttctactaggatg

SEQ ID NO: 3572675 - DNA, 25 bp, Homo sapien
tctttctactaggatgctgactgca

SEQ ID NO: 3572676 - DNA, 25 bp, Homo sapien
ctgcgtcaggcggacttcagctgtg

SEQ ID NO: 3572677 - DNA, 25 bp, Homo sapien
ctggtggcaggagatgacttctggt

SEQ ID NO: 3572678 - DNA, 25 bp, Homo sapien
agctggacctcatcattccttctgg

SEQ ID NO: 3572679 - DNA, 25 bp, Homo sapien
agagagctggacctcatcattcctt

SEQ ID NO: 3572680 - DNA, 25 bp, Homo sapien
gatgacttctggtggagagagctgg

SEQ ID NO: 3572681 - DNA, 25 bp, Homo sapien
agaaccacatgaactcgcaaggcag

SEQ ID NO: 3572682 - DNA, 25 bp, Homo sapien
aggttggaagcatttcgtccaaaca

SEQ ID NO: 3572683 - DNA, 25 bp, Homo sapien
tttcgtccaaacagaggatacacac

SEQ ID NO: 3572684 - DNA, 25 bp, Homo sapien
catggagtccagctcatgagtgggc

SEQ ID NO: 3572685 - DNA, 25 bp, Homo sapien
agcagcacacaatggatgggcagcc

SEQ ID NO: 3572686 - DNA, 25 bp, Homo sapien
tctggccaggtccacataggctgag

SEQ ID NO: 3572687 - DNA, 25 bp, Homo sapien
tcttatgaatgtggttgtggccagc

SEQ ID NO: 3572688 - DNA, 25 bp, Homo sapien
taggctgagccaatccagctgtctg

SEQ ID NO: 3572689 - DNA, 25 bp, Homo sapien
gcagcttccaacacccgttctctat

SEQ ID NO: 3572690 - DNA, 25 bp, Homo sapien
ttctctatctccacgatgcgtgaag

SEQ ID NO: 3572691 - DNA, 25 bp, Homo sapien
ccacgatgcgtgaaggaaatcgaaa

SEQ ID NO: 3572692 - DNA, 25 bp, Homo sapien
tctccacgatgcgtgaaggaaatcg

SEQ ID NO: 3572693 - DNA, 25 bp, Homo sapien
tgaggtaggcccccgtcttctggta

SEQ ID NO: 3572694 - DNA, 25 bp, Homo sapien
tccaggccatgaggtaggcccccgt

SEQ ID NO: 3572695 - DNA, 25 bp, Homo sapien
ggccatgaggtaggcccccgtcttc

SEQ ID NO: 3572696 - DNA, 25 bp, Homo sapien
cacccacgatcttctgcatgagctc

SEQ ID NO: 3572697 - DNA, 25 bp, Homo sapien
caagttaatgggtgccatggcacac

SEQ ID NO: 3572698 - DNA, 25 bp, Homo sapien
gaagtattcccgattgcaaataaaa

SEQ ID NO: 3572699 - DNA, 25 bp, Homo sapien
aatgggtgccatggcacacgtatcc

SEQ ID NO: 3572700 - DNA, 25 bp, Homo sapien
aaatgaagtattcccgattgcaaat

SEQ ID NO: 3572701 - DNA, 25 bp, Homo sapien
gcagatactctttgcatgactcaat

SEQ ID NO: 3572702 - DNA, 25 bp, Homo sapien
actactccaagcagatactctttgc

SEQ ID NO: 3572703 - DNA, 25 bp, Homo sapien
tgttggaacttttactactccaagc

SEQ ID NO: 3572704 - DNA, 25 bp, Homo sapien
tgcatgactcaatactgattatatc

SEQ ID NO: 3572705 - DNA, 25 bp, Homo sapien
tataataatgaactcctacacaccc

SEQ ID NO: 3572706 - DNA, 25 bp, Homo sapien
aaattcaggtatacagaaaagttgc

SEQ ID NO: 3572707 - DNA, 25 bp, Homo sapien
cttcatctcgatacacccattaaca

SEQ ID NO: 3572708 - DNA, 25 bp, Homo sapien
cccattaacactgacacatttgctt

SEQ ID NO: 3572709 - DNA, 25 bp, Homo sapien
cttttaattttgattgtgacaagtc

SEQ ID NO: 3572710 - DNA, 25 bp, Homo sapien
tttgattgtgacaagtcatatggtg

SEQ ID NO: 3572711 - DNA, 25 bp, Homo sapien
tgtatctcctaggaagggctatact

SEQ ID NO: 3572712 - DNA, 25 bp, Homo sapien
tattcacaatgcagcctcttttaat

SEQ ID NO: 3572713 - DNA, 25 bp, Homo sapien
cactaaactgtagagcgggttcccg

SEQ ID NO: 3572714 - DNA, 25 bp, Homo sapien
catgtgaactcaacgtgatgggaga

SEQ ID NO: 3572715 - DNA, 25 bp, Homo sapien
tggtgacagaggcattgaccccgac

SEQ ID NO: 3572716 - DNA, 25 bp, Homo sapien
caacaactctgctaggaaacaggcc

SEQ ID NO: 3572717 - DNA, 25 bp, Homo sapien
cagaaagggcttatcagcattggac

SEQ ID NO: 3572718 - DNA, 25 bp, Homo sapien
agagtgactctgaggatgacccact

SEQ ID NO: 3572719 - DNA, 25 bp, Homo sapien
tcaatgctcttaagtcaaggaccac

SEQ ID NO: 3572720 - DNA, 25 bp, Homo sapien
aaggaccacaggaaccaactctagt

SEQ ID NO: 3572721 - DNA, 25 bp, Homo sapien
gcaacgtttgcaagtgatttactca

SEQ ID NO: 3572722 - DNA, 25 bp, Homo sapien
tggtgtagggtatggccataagact

SEQ ID NO: 3572723 - DNA, 25 bp, Homo sapien
caaggtcaaggaggtaagttgctaa

SEQ ID NO: 3572724 - DNA, 25 bp, Homo sapien
caggataaaattgttgggcaaggtc

SEQ ID NO: 3572725 - DNA, 25 bp, Homo sapien
tgctgttcttggactacgcctgtac

SEQ ID NO: 3572726 - DNA, 25 bp, Homo sapien
tgagatggaaacagttcgggcagca

SEQ ID NO: 3572727 - DNA, 25 bp, Homo sapien
aaacagttcgggcagcaagaactcc

SEQ ID NO: 3572728 - DNA, 25 bp, Homo sapien
acaggctctgataatctggactgag

SEQ ID NO: 3572729 - DNA, 25 bp, Homo sapien
tctggtctctcacattaggataata

SEQ ID NO: 3572730 - DNA, 25 bp, Homo sapien
cctcacgatgctgggtggttaccat

SEQ ID NO: 3572731 - DNA, 25 bp, Homo sapien
gagattaaaggtctgtattcccaca

SEQ ID NO: 3572732 - DNA, 25 bp, Homo sapien
catagcacagatccttgataatggc

SEQ ID NO: 3572733 - DNA, 25 bp, Homo sapien
cagtaagggacgcacaaaaaaggtg

SEQ ID NO: 3572734 - DNA, 25 bp, Homo sapien
taggaggctaccacagtcatttagg

SEQ ID NO: 3572735 - DNA, 25 bp, Homo sapien
gaaatgagtttataagtaggaggcc

SEQ ID NO: 3572736 - DNA, 25 bp, Homo sapien
cttacaataattcaacctaggctgg

SEQ ID NO: 3572737 - DNA, 25 bp, Homo sapien
tgcaccagatttcaaactggactcc

SEQ ID NO: 3572738 - DNA, 25 bp, Homo sapien
cacagagtgtggttgcagttctgaa

SEQ ID NO: 3572739 - DNA, 25 bp, Homo sapien
ggtgttcactattaaagatgggatc

SEQ ID NO: 3572740 - DNA, 25 bp, Homo sapien
ttagtaggagcctttgcactggaac

SEQ ID NO: 3572741 - DNA, 25 bp, Homo sapien
tgaagaggggctagccctttaacca

SEQ ID NO: 3572742 - DNA, 25 bp, Homo sapien
ttcaaggaactcaggtcctttcagc

SEQ ID NO: 3572743 - DNA, 25 bp, Homo sapien
ttgagagtgttgaactggaaagtag

SEQ ID NO: 3572744 - DNA, 25 bp, Homo sapien
agtgttgaactggaaagtagtactg

SEQ ID NO: 3572745 - DNA, 25 bp, Homo sapien
agtgctccatcagtccatttcctcg

SEQ ID NO: 3572746 - DNA, 25 bp, Homo sapien
atcagtccatttcctcggtcctctg

SEQ ID NO: 3572747 - DNA, 25 bp, Homo sapien
ccatcagtccatttcctcggtcctc

SEQ ID NO: 3572748 - DNA, 25 bp, Homo sapien
tgctccatcagtccatttcctcggt

SEQ ID NO: 3572749 - DNA, 25 bp, Homo sapien
aagactcgaagactcccattttggt

SEQ ID NO: 3572750 - DNA, 25 bp, Homo sapien
ccagcagcaggcgagaaatcttagc

SEQ ID NO: 3572751 - DNA, 25 bp, Homo sapien
caatcacaggcatgtagctgtcgac

SEQ ID NO: 3572752 - DNA, 25 bp, Homo sapien
gacagcaacaactgggtactgggca

SEQ ID NO: 3572753 - DNA, 25 bp, Homo sapien
agcccgagcagcttgtcctgtcctg

SEQ ID NO: 3572754 - DNA, 25 bp, Homo sapien
gaagtttcaccagcccgagcagctt

SEQ ID NO: 3572755 - DNA, 25 bp, Homo sapien
tggaggggaagtttcaccagcccga

SEQ ID NO: 3572756 - DNA, 25 bp, Homo sapien
aggggaagtttcaccagcccgagca

SEQ ID NO: 3572757 - DNA, 25 bp, Homo sapien
tcaattaccatcacattgttcttaa

SEQ ID NO: 3572758 - DNA, 25 bp, Homo sapien
tattccaagtttcaattaccatcac

SEQ ID NO: 3572759 - DNA, 25 bp, Homo sapien
atcaacagcacatgcaacagcaaag

SEQ ID NO: 3572760 - DNA, 25 bp, Homo sapien
taaagaccggttgtgttgtgcccca

SEQ ID NO: 3572761 - DNA, 25 bp, Homo sapien
cattgcatggtgattgtttctcaga

SEQ ID NO: 3572762 - DNA, 25 bp, Homo sapien
cccatgcgatgacagatctggtgac

SEQ ID NO: 3572763 - DNA, 25 bp, Homo sapien
cgtagctacgaaggttgaaggatgt

SEQ ID NO: 3572764 - DNA, 25 bp, Homo sapien
gggagcaccaagttctgtgctttct

SEQ ID NO: 3572765 - DNA, 25 bp, Homo sapien
ctaaattatgggaggctggcgtagc

SEQ ID NO: 3572766 - DNA, 25 bp, Homo sapien
tgaaggatgtggtgctacagggctt

SEQ ID NO: 3572767 - DNA, 25 bp, Homo sapien
tataatgggtgttgccacttaactt

SEQ ID NO: 3572768 - DNA, 25 bp, Homo sapien
agttctggtagtgccttatttggac

SEQ ID NO: 3572769 - DNA, 25 bp, Homo sapien
ttggacttgtaggagcacaaagtgg

SEQ ID NO: 3572770 - DNA, 25 bp, Homo sapien
tatctgtaataagctccatggttac

SEQ ID NO: 3572771 - DNA, 25 bp, Homo sapien
tctaccaggcacacttagttactgc

SEQ ID NO: 3572772 - DNA, 25 bp, Homo sapien
ttttctggactaatgccacagccca

SEQ ID NO: 3572773 - DNA, 25 bp, Homo sapien
tgatgatatggcttctacctgactg

SEQ ID NO: 3572774 - DNA, 25 bp, Homo sapien
aagctatactgaagccacacgctca

SEQ ID NO: 3572775 - DNA, 25 bp, Homo sapien
gggccaaatggagactgaccatttt

SEQ ID NO: 3572776 - DNA, 25 bp, Homo sapien
tgaatgacagctcgcaaagaaagtg

SEQ ID NO: 3572777 - DNA, 25 bp, Homo sapien
aagtgacacagatccaatgacttct

SEQ ID NO: 3572778 - DNA, 25 bp, Homo sapien
tgatcactgaaagaaagcagctctg

SEQ ID NO: 3572779 - DNA, 25 bp, Homo sapien
gctacttccctctataagattacag

SEQ ID NO: 3572780 - DNA, 25 bp, Homo sapien
gaaacaagaggctgtcatatgcgta

SEQ ID NO: 3572781 - DNA, 25 bp, Homo sapien
tatctaatgctatcaaggctatgga

SEQ ID NO: 3572782 - DNA, 25 bp, Homo sapien
tataagccacaaagtggtgggaaga

SEQ ID NO: 3572783 - DNA, 25 bp, Homo sapien
ggttggaattccaccagtgctctat

SEQ ID NO: 3572784 - DNA, 25 bp, Homo sapien
tatcattgggccaccaaactgtact

SEQ ID NO: 3572785 - DNA, 25 bp, Homo sapien
cacaaatcgctgctggaacttcacc

SEQ ID NO: 3572786 - DNA, 25 bp, Homo sapien
tactggaaacacaaatcgctgctgg

SEQ ID NO: 3572787 - DNA, 25 bp, Homo sapien
gaaagattagcagttgcttagggct

SEQ ID NO: 3572788 - DNA, 25 bp, Homo sapien
tcttccaaagtcagaatgtctaagg

SEQ ID NO: 3572789 - DNA, 25 bp, Homo sapien
gaaatgcgaagcgaatgctagtaag

SEQ ID NO: 3572790 - DNA, 25 bp, Homo sapien
cagaatggacaaattgatagggaaa

SEQ ID NO: 3572791 - DNA, 25 bp, Homo sapien
tttactggaggcgagtcgaacaacc

SEQ ID NO: 3572792 - DNA, 25 bp, Homo sapien
aattttactggaggcgagtcgaaca

SEQ ID NO: 3572793 - DNA, 25 bp, Homo sapien
aggcgagtcgaacaacctcagtgat

SEQ ID NO: 3572794 - DNA, 25 bp, Homo sapien
tgtctttcccaatccgctttccgaa

SEQ ID NO: 3572795 - DNA, 25 bp, Homo sapien
tcatctgaggactatctggaggaac

SEQ ID NO: 3572796 - DNA, 25 bp, Homo sapien
agggccagtctatccacacttagtg

SEQ ID NO: 3572797 - DNA, 25 bp, Homo sapien
tttttgctgtagtcaccttaggtgg

SEQ ID NO: 3572798 - DNA, 25 bp, Homo sapien
ggaggaactcccatggtttcgatga

SEQ ID NO: 3572799 - DNA, 25 bp, Homo sapien
gagcatctgttgttcaaccaaattt

SEQ ID NO: 3572800 - DNA, 25 bp, Homo sapien
gagagcatctgttgttcaaccaaat

SEQ ID NO: 3572801 - DNA, 25 bp, Homo sapien
ctgagagcatctgttgttcaaccaa

SEQ ID NO: 3572802 - DNA, 25 bp, Homo sapien
tgagagcatctgttgttcaaccaaa

SEQ ID NO: 3572803 - DNA, 25 bp, Homo sapien
ttttagaagggacgatatcatcctc

SEQ ID NO: 3572804 - DNA, 25 bp, Homo sapien
tcttcactgaggaaatcactgatgc

SEQ ID NO: 3572805 - DNA, 25 bp, Homo sapien
gatgatctggcaagagctgttgact

SEQ ID NO: 3572806 - DNA, 25 bp, Homo sapien
cacttgactccagaaccttagatga

SEQ ID NO: 3572807 - DNA, 25 bp, Homo sapien
aatacacatcactcccaggagatgg

SEQ ID NO: 3572808 - DNA, 25 bp, Homo sapien
gaagactctggtcatactgagggtc

SEQ ID NO: 3572809 - DNA, 25 bp, Homo sapien
ggagagcctagcccatcccagaaat

SEQ ID NO: 3572810 - DNA, 25 bp, Homo sapien
tcagctcactgatgcaatacacatc

SEQ ID NO: 3572811 - DNA, 25 bp, Homo sapien
ccgggcagaggtctcctcatttctc

SEQ ID NO: 3572812 - DNA, 25 bp, Homo sapien
gccgggcggggagctgacccctcac

SEQ ID NO: 3572813 - DNA, 25 bp, Homo sapien
agctgacccctcacctccctccggg

SEQ ID NO: 3572814 - DNA, 25 bp, Homo sapien
cgggcagaggtctcctcatttctca

SEQ ID NO: 3572815 - DNA, 25 bp, Homo sapien
taggagctgcagaccagccggccaa

SEQ ID NO: 3572816 - DNA, 25 bp, Homo sapien
ttaggagctgcagaccagccggcca

SEQ ID NO: 3572817 - DNA, 25 bp, Homo sapien
gttaggagctgcagaccagccggcc

SEQ ID NO: 3572818 - DNA, 25 bp, Homo sapien
cacagagaaaccccatctccaccaa

SEQ ID NO: 3572819 - DNA, 25 bp, Homo sapien
gttgccccattgattggtcttcaca

SEQ ID NO: 3572820 - DNA, 25 bp, Homo sapien
tttattctattgatatggtgaggcc

SEQ ID NO: 3572821 - DNA, 25 bp, Homo sapien
gctgggattctgatattgtgttgaa

SEQ ID NO: 3572822 - DNA, 25 bp, Homo sapien
tctaactcatattagttgaccacag

SEQ ID NO: 3572823 - DNA, 25 bp, Homo sapien
ttagccaaaagtggtactgcatgcc

SEQ ID NO: 3572824 - DNA, 25 bp, Homo sapien
ttttaccaatgcctctgaagttcag

SEQ ID NO: 3572825 - DNA, 25 bp, Homo sapien
ttcagagatacctgcttaaggccac

SEQ ID NO: 3572826 - DNA, 25 bp, Homo sapien
tagagatgaacctcgaatttccact

SEQ ID NO: 3572827 - DNA, 25 bp, Homo sapien
atgtggtctttaaaccgattcctag

SEQ ID NO: 3572828 - DNA, 25 bp, Homo sapien
aaatgtattctcagttgaagggagg

SEQ ID NO: 3572829 - DNA, 25 bp, Homo sapien
tgtggtctttaaaccgattcctaga

SEQ ID NO: 3572830 - DNA, 25 bp, Homo sapien
tattctcagttgaagggaggaggtg

SEQ ID NO: 3572831 - DNA, 25 bp, Homo sapien
aatcttcattaataggaggatgaac

SEQ ID NO: 3572832 - DNA, 25 bp, Homo sapien
gagaatcttcattaataggaggatg

SEQ ID NO: 3572833 - DNA, 25 bp, Homo sapien
gaatcttcattaataggaggatgaa

SEQ ID NO: 3572834 - DNA, 25 bp, Homo sapien
agagaatcttcattaataggaggat

SEQ ID NO: 3572835 - DNA, 25 bp, Homo sapien
aatcaccatggcattacgcagttta

SEQ ID NO: 3572836 - DNA, 25 bp, Homo sapien
agaaatcaccatggcattacgcagt

SEQ ID NO: 3572837 - DNA, 25 bp, Homo sapien
accatggcattacgcagtttattgc

SEQ ID NO: 3572838 - DNA, 25 bp, Homo sapien
cattacgcagtttattgccttgttc

SEQ ID NO: 3572839 - DNA, 25 bp, Homo sapien
aaatccaaaatgcagcagaaacatt

SEQ ID NO: 3572840 - DNA, 25 bp, Homo sapien
ctgaagagggtaaatgcagaaaaca

SEQ ID NO: 3572841 - DNA, 25 bp, Homo sapien
gaaaaatccaaaatgcagcagaaac

SEQ ID NO: 3572842 - DNA, 25 bp, Homo sapien
acagaaaaatccaaaatgcagcaga

SEQ ID NO: 3572843 - DNA, 25 bp, Homo sapien
tccatatactggctcttccaactgg

SEQ ID NO: 3572844 - DNA, 25 bp, Homo sapien
tatccatatactggctcttccaact

SEQ ID NO: 3572845 - DNA, 25 bp, Homo sapien
catatactggctcttccaactggtg

SEQ ID NO: 3572846 - DNA, 25 bp, Homo sapien
atatccatatactggctcttccaac

SEQ ID NO: 3572847 - DNA, 25 bp, Homo sapien
ggaattcagaactgttcagaaggga

SEQ ID NO: 3572848 - DNA, 25 bp, Homo sapien
agagttacagactctaaactctgtc

SEQ ID NO: 3572849 - DNA, 25 bp, Homo sapien
ttcagaagggacatctgcttccgtg

SEQ ID NO: 3572850 - DNA, 25 bp, Homo sapien
ctgcctttcagagttacagactcta

SEQ ID NO: 3572851 - DNA, 25 bp, Homo sapien
ccaaaggaagaatcctttattgtat

SEQ ID NO: 3572852 - DNA, 25 bp, Homo sapien
tctctgcaaagcatacatggtcttt

SEQ ID NO: 3572853 - DNA, 25 bp, Homo sapien
cctttattgtatcagggttctctgc

SEQ ID NO: 3572854 - DNA, 25 bp, Homo sapien
ctgaattaagactgtgctgtagtcc

SEQ ID NO: 3572855 - DNA, 25 bp, Homo sapien
acagaggttccagggcaagtgagac

SEQ ID NO: 3572856 - DNA, 25 bp, Homo sapien
gatggaacctgaaactgggtactgc

SEQ ID NO: 3572857 - DNA, 25 bp, Homo sapien
tatgtatgtcgcgaggccttgatgg

SEQ ID NO: 3572858 - DNA, 25 bp, Homo sapien
gagtggttgatctactgctgttggc

SEQ ID NO: 3572859 - DNA, 25 bp, Homo sapien
gcctcatctcttactaagcttcctt

SEQ ID NO: 3572860 - DNA, 25 bp, Homo sapien
tggaagcctcatctcttactaagct

SEQ ID NO: 3572861 - DNA, 25 bp, Homo sapien
cttggaagcctcatctcttactaag

SEQ ID NO: 3572862 - DNA, 25 bp, Homo sapien
aagcctcatctcttactaagcttcc

SEQ ID NO: 3572863 - DNA, 25 bp, Homo sapien
caggtccagatcactttactggcaa

SEQ ID NO: 3572864 - DNA, 25 bp, Homo sapien
tgctttccagaacggttgaactgat

SEQ ID NO: 3572865 - DNA, 25 bp, Homo sapien
ggtgtaagccattctcactgtggtt

SEQ ID NO: 3572866 - DNA, 25 bp, Homo sapien
ctaagcacagtacccgacaggtttt

SEQ ID NO: 3572867 - DNA, 25 bp, Homo sapien
tcttttcaggagagatcccatggtt

SEQ ID NO: 3572868 - DNA, 25 bp, Homo sapien
ttcaggagagatcccatggttagtc

SEQ ID NO: 3572869 - DNA, 25 bp, Homo sapien
catggttagtcaactcaatactgtc

SEQ ID NO: 3572870 - DNA, 25 bp, Homo sapien
gagatcccatggttagtcaactcaa

SEQ ID NO: 3572871 - DNA, 25 bp, Homo sapien
aaagcagtggtataacaagaattca

SEQ ID NO: 3572872 - DNA, 25 bp, Homo sapien
agcagtggtataacaagaattcaag

SEQ ID NO: 3572873 - DNA, 25 bp, Homo sapien
aagcagtggtataacaagaattcaa

SEQ ID NO: 3572874 - DNA, 25 bp, Homo sapien
gcagtggtataacaagaattcaagt

SEQ ID NO: 3572875 - DNA, 25 bp, Homo sapien
gtgtggctgcgtcctaatacaacta

SEQ ID NO: 3572876 - DNA, 25 bp, Homo sapien
tcaactctgctgtttggcataaaag

SEQ ID NO: 3572877 - DNA, 25 bp, Homo sapien
tacaaatataggtgatgagccagat

SEQ ID NO: 3572878 - DNA, 25 bp, Homo sapien
taaaagagtgaccatagcaagagct

SEQ ID NO: 3572879 - DNA, 25 bp, Homo sapien
tgacagcagccttctagacatattt

SEQ ID NO: 3572880 - DNA, 25 bp, Homo sapien
catatttgcctttaagagtcctgtt

SEQ ID NO: 3572881 - DNA, 25 bp, Homo sapien
gacatatttgcctttaagagtcctg

SEQ ID NO: 3572882 - DNA, 25 bp, Homo sapien
tatttgcctttaagagtcctgttcc

SEQ ID NO: 3572883 - DNA, 25 bp, Homo sapien
ggttggagaaagttgagctagtcca

SEQ ID NO: 3572884 - DNA, 25 bp, Homo sapien
aatccattgatttgatgggttggag

SEQ ID NO: 3572885 - DNA, 25 bp, Homo sapien
tggagttctccaagtttcttagacg

SEQ ID NO: 3572886 - DNA, 25 bp, Homo sapien
tcttagacgttgatgaaacaatggt

SEQ ID NO: 3572887 - DNA, 25 bp, Homo sapien
gaccatcaagtttggtgattacttc

SEQ ID NO: 3572888 - DNA, 25 bp, Homo sapien
caagtttggtgattacttccagcac

SEQ ID NO: 3572889 - DNA, 25 bp, Homo sapien
aagtttggtgattacttccagcacc

SEQ ID NO: 3572890 - DNA, 25 bp, Homo sapien
gactaataccttcatgcccagagga

SEQ ID NO: 3572891 - DNA, 25 bp, Homo sapien
tctggaccactgagctattgagagc

SEQ ID NO: 3572892 - DNA, 25 bp, Homo sapien
tatttactaacagccagggtcttcc

SEQ ID NO: 3572893 - DNA, 25 bp, Homo sapien
caagtatgaggcaccaaggctagcc

SEQ ID NO: 3572894 - DNA, 25 bp, Homo sapien
gtagttccatgctccaaacattttc

SEQ ID NO: 3572895 - DNA, 25 bp, Homo sapien
ctagtagttccatgctccaaacatt

SEQ ID NO: 3572896 - DNA, 25 bp, Homo sapien
agtagttccatgctccaaacatttt

SEQ ID NO: 3572897 - DNA, 25 bp, Homo sapien
tagtagttccatgctccaaacattt

SEQ ID NO: 3572898 - DNA, 25 bp, Homo sapien
tcaagtgcctccctgaatttagggt

SEQ ID NO: 3572899 - DNA, 25 bp, Homo sapien
ttgcaaatgtacagggcctcagagc

SEQ ID NO: 3572900 - DNA, 25 bp, Homo sapien
tgctttctagtgctctgcagaggct

SEQ ID NO: 3572901 - DNA, 25 bp, Homo sapien
tcaataatttcggagtcaagtgcct

SEQ ID NO: 3572902 - DNA, 25 bp, Homo sapien
gattgcttgggtatggaagtttgac

SEQ ID NO: 3572903 - DNA, 25 bp, Homo sapien
ttgcttgggtatggaagtttgacac

SEQ ID NO: 3572904 - DNA, 25 bp, Homo sapien
aggattgcttgggtatggaagtttg

SEQ ID NO: 3572905 - DNA, 25 bp, Homo sapien
tgcttgggtatggaagtttgacacc

SEQ ID NO: 3572906 - DNA, 25 bp, Homo sapien
tctagatgtcaacccgttcaaccgg

SEQ ID NO: 3572907 - DNA, 25 bp, Homo sapien
aaacacatcatgtcggccgggtgcg

SEQ ID NO: 3572908 - DNA, 25 bp, Homo sapien
tgggcagggaatacatctcaaatct

SEQ ID NO: 3572909 - DNA, 25 bp, Homo sapien
caaatctctgtacacgctgcctgag

SEQ ID NO: 3572910 - DNA, 25 bp, Homo sapien
catgctttgtattacgtctgcaggt

SEQ ID NO: 3572911 - DNA, 25 bp, Homo sapien
catatatgctaggtacacaacaaca

SEQ ID NO: 3572912 - DNA, 25 bp, Homo sapien
cacaacaacacttattgctgacaat

SEQ ID NO: 3572913 - DNA, 25 bp, Homo sapien
catttatcaactttgtgaccttaga

SEQ ID NO: 3572914 - DNA, 25 bp, Homo sapien
actcggacaagtacacaagtgggag

SEQ ID NO: 3572915 - DNA, 25 bp, Homo sapien
gttttggaccacaacgaatagcgta

SEQ ID NO: 3572916 - DNA, 25 bp, Homo sapien
tagaaaacagcgtagctggccttca

SEQ ID NO: 3572917 - DNA, 25 bp, Homo sapien
ctgggacaaaagagggttccatctg

SEQ ID NO: 3572918 - DNA, 25 bp, Homo sapien
ctctttttttgcgcccacggctgcc

SEQ ID NO: 3572919 - DNA, 25 bp, Homo sapien
ccccggcaaccggcgccgctgggca

SEQ ID NO: 3572920 - DNA, 25 bp, Homo sapien
tccccggcaaccggcgccgctgggc

SEQ ID NO: 3572921 - DNA, 25 bp, Homo sapien
gccatccctccccacggcgcctgcg

SEQ ID NO: 3572922 - DNA, 25 bp, Homo sapien
cccacggcgcctgcgttccccggca

SEQ ID NO: 3572923 - DNA, 25 bp, Homo sapien
ctccggaaaacggtgcgaagagaag

SEQ ID NO: 3572924 - DNA, 25 bp, Homo sapien
ctctaacagtctccggaaaacggtg

SEQ ID NO: 3572925 - DNA, 25 bp, Homo sapien
aaacggtgcgaagagaaggcgccaa

SEQ ID NO: 3572926 - DNA, 25 bp, Homo sapien
cagtctccggaaaacggtgcgaaga

SEQ ID NO: 3572927 - DNA, 25 bp, Homo sapien
attgccctgaagagcgctcctcctt

SEQ ID NO: 3572928 - DNA, 25 bp, Homo sapien
ctcctccttccggtgaaagtcgtcg

SEQ ID NO: 3572929 - DNA, 25 bp, Homo sapien
cattgcgcagggtgcattgccctga

SEQ ID NO: 3572930 - DNA, 25 bp, Homo sapien
agggatgcgccctttgtggactcca

SEQ ID NO: 3572931 - DNA, 25 bp, Homo sapien
tgggccacactcaacgtgggacgaa

SEQ ID NO: 3572932 - DNA, 25 bp, Homo sapien
tcctttgtatgagtgctgttgcgca

SEQ ID NO: 3572933 - DNA, 25 bp, Homo sapien
acttccggtggaagcgctgaagcga

SEQ ID NO: 3572934 - DNA, 25 bp, Homo sapien
tgtccaaaggcgacagggcgtcgtt

SEQ ID NO: 3572935 - DNA, 25 bp, Homo sapien
taatcaatgggaacttctagtctgc

SEQ ID NO: 3572936 - DNA, 25 bp, Homo sapien
gaaatgtgtcttggtattcccacca

SEQ ID NO: 3572937 - DNA, 25 bp, Homo sapien
cctaggaagtatatcagggcctgcc

SEQ ID NO: 3572938 - DNA, 25 bp, Homo sapien
agcttgcaaaaatgaactcgtgccc

SEQ ID NO: 3572939 - DNA, 25 bp, Homo sapien
gtgcattcagggtgttacggccata

SEQ ID NO: 3572940 - DNA, 25 bp, Homo sapien
atcgggtgcattcagggtgttacgg

SEQ ID NO: 3572941 - DNA, 25 bp, Homo sapien
ggtgcattcagggtgttacggccat

SEQ ID NO: 3572942 - DNA, 25 bp, Homo sapien
cgggtgcattcagggtgttacggcc

SEQ ID NO: 3572943 - DNA, 25 bp, Homo sapien
tattcctcacttgttctttatggaa

SEQ ID NO: 3572944 - DNA, 25 bp, Homo sapien
tatggaatattgcctggaagtccat

SEQ ID NO: 3572945 - DNA, 25 bp, Homo sapien
gaagtccatgccaatatctttcttg

SEQ ID NO: 3572946 - DNA, 25 bp, Homo sapien
gcctggaagtccatgccaatatctt

SEQ ID NO: 3572947 - DNA, 25 bp, Homo sapien
gaacatagcactttgttcctggcag

SEQ ID NO: 3572948 - DNA, 25 bp, Homo sapien
atagcactttgttcctggcagcggg

SEQ ID NO: 3572949 - DNA, 25 bp, Homo sapien
cctgaacatagcactttgttcctgg

SEQ ID NO: 3572950 - DNA, 25 bp, Homo sapien
agtccctgaacatagcactttgttc

SEQ ID NO: 3572951 - DNA, 25 bp, Homo sapien
ctttcccagtgtgaagagtggccag

SEQ ID NO: 3572952 - DNA, 25 bp, Homo sapien
tgcccgtgtctcaatggttggccaa

SEQ ID NO: 3572953 - DNA, 25 bp, Homo sapien
tccaatgatgtgatacaatagatac

SEQ ID NO: 3572954 - DNA, 25 bp, Homo sapien
gattcgaaatctggagtctgcccgt

SEQ ID NO: 3572955 - DNA, 25 bp, Homo sapien
ccctgtgaagttcagtgtgcatgta

SEQ ID NO: 3572956 - DNA, 25 bp, Homo sapien
gtggagctgatctcttagaaatggc

SEQ ID NO: 3572957 - DNA, 25 bp, Homo sapien
tagaaatggctcatagtgttgtggg

SEQ ID NO: 3572958 - DNA, 25 bp, Homo sapien
gggcttgtgagattatgccttgtct

SEQ ID NO: 3572959 - DNA, 25 bp, Homo sapien
aagggaaaggctcaagataatccag

SEQ ID NO: 3572960 - DNA, 25 bp, Homo sapien
ttaggaaagggaaaggctcaagata

SEQ ID NO: 3572961 - DNA, 25 bp, Homo sapien
gaaaggctcaagataatccagatat

SEQ ID NO: 3572962 - DNA, 25 bp, Homo sapien
gaaagggaaaggctcaagataatcc

SEQ ID NO: 3572963 - DNA, 25 bp, Homo sapien
gaaaactgagttttgaatactgctt

SEQ ID NO: 3572964 - DNA, 25 bp, Homo sapien
tgacttgcctcagctttagtcttct

SEQ ID NO: 3572965 - DNA, 25 bp, Homo sapien
gaagacagcatggtaagatggtaaa

SEQ ID NO: 3572966 - DNA, 25 bp, Homo sapien
ggtctctgaagttcggaaaactgag

SEQ ID NO: 3572967 - DNA, 25 bp, Homo sapien
ggatcacaggcgtacgccaccgtac

SEQ ID NO: 3572968 - DNA, 25 bp, Homo sapien
ctcctaaagtgttgggattataggg

SEQ ID NO: 3572969 - DNA, 25 bp, Homo sapien
tttagtaaagatggtggtttctcca

SEQ ID NO: 3572970 - DNA, 25 bp, Homo sapien
caggcgtacgccaccgtacccggct

SEQ ID NO: 3572971 - DNA, 25 bp, Homo sapien
tcttcccatggccagctactaagca

SEQ ID NO: 3572972 - DNA, 25 bp, Homo sapien
ttcccatggccagctactaagcaag

SEQ ID NO: 3572973 - DNA, 25 bp, Homo sapien
gtgtcttcccatggccagctactaa

SEQ ID NO: 3572974 - DNA, 25 bp, Homo sapien
tcccatggccagctactaagcaagc

SEQ ID NO: 3572975 - DNA, 25 bp, Homo sapien
gatagcatcacaagaaacgagcctg

SEQ ID NO: 3572976 - DNA, 25 bp, Homo sapien
cttgagattgtcttggcatggccca

SEQ ID NO: 3572977 - DNA, 25 bp, Homo sapien
actgtcttaggtgatgtgtagcccc

SEQ ID NO: 3572978 - DNA, 25 bp, Homo sapien
tccttagccatagcgagcggtggtg

SEQ ID NO: 3572979 - DNA, 25 bp, Homo sapien
tatgaccatgggtgtacagctatca

SEQ ID NO: 3572980 - DNA, 25 bp, Homo sapien
gccattctcttgacggacatctggg

SEQ ID NO: 3572981 - DNA, 25 bp, Homo sapien
ggctgtggaccacaccactatctat

SEQ ID NO: 3572982 - DNA, 25 bp, Homo sapien
ggtagctcataggtggaatcctaca

SEQ ID NO: 3572983 - DNA, 25 bp, Homo sapien
atccgtagtgacacttattttctgt

SEQ ID NO: 3572984 - DNA, 25 bp, Homo sapien
aactgggtcagatgacagttctatg

SEQ ID NO: 3572985 - DNA, 25 bp, Homo sapien
ataactgggtcagatgacagttcta

SEQ ID NO: 3572986 - DNA, 25 bp, Homo sapien
tgggtcagatgacagttctatgttt

SEQ ID NO: 3572987 - DNA, 25 bp, Homo sapien
ctaggaagtgtgaagtggttcctta

SEQ ID NO: 3572988 - DNA, 25 bp, Homo sapien
gaagtggttccttatttgcatttca

SEQ ID NO: 3572989 - DNA, 25 bp, Homo sapien
gtgaagtggttccttatttgcattt

SEQ ID NO: 3572990 - DNA, 25 bp, Homo sapien
aggaagtgtgaagtggttccttatt

SEQ ID NO: 3572991 - DNA, 25 bp, Homo sapien
gtggcagcaggataaaaccattcat

SEQ ID NO: 3572992 - DNA, 25 bp, Homo sapien
ggcagcaggataaaaccattcattc

SEQ ID NO: 3572993 - DNA, 25 bp, Homo sapien
agcaggataaaaccattcattcagg

SEQ ID NO: 3572994 - DNA, 25 bp, Homo sapien
cagtggcagcaggataaaaccattc

SEQ ID NO: 3572995 - DNA, 25 bp, Homo sapien
tcctagagtgatatatctgcatttg

SEQ ID NO: 3572996 - DNA, 25 bp, Homo sapien
gctttaggtttatcaaaagagcaca

SEQ ID NO: 3572997 - DNA, 25 bp, Homo sapien
tctgcatttgtaagactaaagaaag

SEQ ID NO: 3572998 - DNA, 25 bp, Homo sapien
tacagatcataaagttagacaaaat

SEQ ID NO: 3572999 - DNA, 25 bp, Homo sapien
cagcaaaggtcctgacccagaggca

SEQ ID NO: 3573000 - DNA, 25 bp, Homo sapien
gacacacagcgtaattatgggcaag

SEQ ID NO: 3573001 - DNA, 25 bp, Homo sapien
taaatgacaggccacacatgcagtc

SEQ ID NO: 3573002 - DNA, 25 bp, Homo sapien
tccagtcccataacgtgataagcag

SEQ ID NO: 3573003 - DNA, 25 bp, Homo sapien
tgcctctgatttgcgaggcacagac

SEQ ID NO: 3573004 - DNA, 25 bp, Homo sapien
cactgatcgaacctgagactgttga

SEQ ID NO: 3573005 - DNA, 25 bp, Homo sapien
tgggagtcaggctagcccctcctgc

SEQ ID NO: 3573006 - DNA, 25 bp, Homo sapien
cctgtggtcaaggttcaaagtgcca

SEQ ID NO: 3573007 - DNA, 25 bp, Homo sapien
gaaagccacaggactccaccagctt

SEQ ID NO: 3573008 - DNA, 25 bp, Homo sapien
ttctctggaaagccacaggactcca

SEQ ID NO: 3573009 - DNA, 25 bp, Homo sapien
cccagcttttggctcctggcttctc

SEQ ID NO: 3573010 - DNA, 25 bp, Homo sapien
ccaccagcttctctctgccaacagt

SEQ ID NO: 3573011 - DNA, 25 bp, Homo sapien
tgcggaattcctgtccatactcatg

SEQ ID NO: 3573012 - DNA, 25 bp, Homo sapien
catactcatgtatccacttgttggc

SEQ ID NO: 3573013 - DNA, 25 bp, Homo sapien
tactcatgtatccacttgttggcca

SEQ ID NO: 3573014 - DNA, 25 bp, Homo sapien
gagctgcagggtctgcggaattcct

SEQ ID NO: 3573015 - DNA, 25 bp, Homo sapien
tccccttcaccactcctgtgcaggt

SEQ ID NO: 3573016 - DNA, 25 bp, Homo sapien
cctgtgcaggttccaccaaaacagt

SEQ ID NO: 3573017 - DNA, 25 bp, Homo sapien
cagccagcatgaagtgtgtcactgt

SEQ ID NO: 3573018 - DNA, 25 bp, Homo sapien
caggacaggacagccagcatgaagt

SEQ ID NO: 3573019 - DNA, 25 bp, Homo sapien
ggcatagatgaaggctgtggctcct

SEQ ID NO: 3573020 - DNA, 25 bp, Homo sapien
taaccacaggcacgctgaggttggc

SEQ ID NO: 3573021 - DNA, 25 bp, Homo sapien
cgctgaggttggcatagatgaaggc

SEQ ID NO: 3573022 - DNA, 25 bp, Homo sapien
cctaaccacaggcacgctgaggttg

SEQ ID NO: 3573023 - DNA, 25 bp, Homo sapien
tcataaatgttgcaactcggtttcc

SEQ ID NO: 3573024 - DNA, 25 bp, Homo sapien
gcaactcggtttcctgacttcattc

SEQ ID NO: 3573025 - DNA, 25 bp, Homo sapien
atagatcataaatgttgcaactcgg

SEQ ID NO: 3573026 - DNA, 25 bp, Homo sapien
aaatgttgcaactcggtttcctgac

SEQ ID NO: 3573027 - DNA, 25 bp, Homo sapien
ctaccccaggggattggtcattgac

SEQ ID NO: 3573028 - DNA, 25 bp, Homo sapien
accccaggggattggtcattgactc

SEQ ID NO: 3573029 - DNA, 25 bp, Homo sapien
aggggattggtcattgactccacca

SEQ ID NO: 3573030 - DNA, 25 bp, Homo sapien
cccaggggattggtcattgactcca

SEQ ID NO: 3573031 - DNA, 25 bp, Homo sapien
gtcaacagtgtccttcagccaggca

SEQ ID NO: 3573032 - DNA, 25 bp, Homo sapien
aaagtgaggctcatagtgtcctccg

SEQ ID NO: 3573033 - DNA, 25 bp, Homo sapien
gacatcaaggcctgtgagggcagca

SEQ ID NO: 3573034 - DNA, 25 bp, Homo sapien
gcagatactctgcatagggaggccg

SEQ ID NO: 3573035 - DNA, 25 bp, Homo sapien
catcaatgatctgttgcccgaaatg

SEQ ID NO: 3573036 - DNA, 25 bp, Homo sapien
aaacacaccacagattgaagcatca

SEQ ID NO: 3573037 - DNA, 25 bp, Homo sapien
tgcccgaaatgactaaatgacgtct

SEQ ID NO: 3573038 - DNA, 25 bp, Homo sapien
tgaagcatcaatgatctgttgcccg

SEQ ID NO: 3573039 - DNA, 25 bp, Homo sapien
tgctgatgcggtactccacttgtaa

SEQ ID NO: 3573040 - DNA, 25 bp, Homo sapien
ctgatgcggtactccacttgtaact

SEQ ID NO: 3573041 - DNA, 25 bp, Homo sapien
cttttgctgatgcggtactccactt

SEQ ID NO: 3573042 - DNA, 25 bp, Homo sapien
ctgcttctcccctgatgccaccact

SEQ ID NO: 3573043 - DNA, 25 bp, Homo sapien
tccctaacaagatattgagagcaca

SEQ ID NO: 3573044 - DNA, 25 bp, Homo sapien
catacaatgatatacacaggtctca

SEQ ID NO: 3573045 - DNA, 25 bp, Homo sapien
tgcatacagccacatgtaccacgtc

SEQ ID NO: 3573046 - DNA, 25 bp, Homo sapien
ttttcaataccccagagaatcctct

SEQ ID NO: 3573047 - DNA, 25 bp, Homo sapien
ctgaactccaggcatgtgaagatga

SEQ ID NO: 3573048 - DNA, 25 bp, Homo sapien
ctccaggcatgtgaagatgaaagag

SEQ ID NO: 3573049 - DNA, 25 bp, Homo sapien
gagaaattcttggcgggttctcagg

SEQ ID NO: 3573050 - DNA, 25 bp, Homo sapien
gaactccaggcatgtgaagatgaaa

SEQ ID NO: 3573051 - DNA, 25 bp, Homo sapien
tgagtcactgacgaagtcatggtag

SEQ ID NO: 3573052 - DNA, 25 bp, Homo sapien
caggtaggcgttggaattggtctca

SEQ ID NO: 3573053 - DNA, 25 bp, Homo sapien
tcatggtagagagcaatgtagggct

SEQ ID NO: 3573054 - DNA, 25 bp, Homo sapien
taggaacagtagaggctagggatct

SEQ ID NO: 3573055 - DNA, 25 bp, Homo sapien
tatattgggcctctggatgacagcc

SEQ ID NO: 3573056 - DNA, 25 bp, Homo sapien
ctggccatcctcttattatctgggc

SEQ ID NO: 3573057 - DNA, 25 bp, Homo sapien
tatttcaagacattcctggccatcc

SEQ ID NO: 3573058 - DNA, 25 bp, Homo sapien
gggtctgacatagcccctcgtaggt

SEQ ID NO: 3573059 - DNA, 25 bp, Homo sapien
gaaagccaaagcctattgcaaaagg

SEQ ID NO: 3573060 - DNA, 25 bp, Homo sapien
gctaattcattcttggctccactag

SEQ ID NO: 3573061 - DNA, 25 bp, Homo sapien
tccccagagaattggaagctaattc

SEQ ID NO: 3573062 - DNA, 25 bp, Homo sapien
taagtgcaatgaaagagaagtccag

SEQ ID NO: 3573063 - DNA, 25 bp, Homo sapien
agagctacccgtggcctgctggcct

SEQ ID NO: 3573064 - DNA, 25 bp, Homo sapien
aagatgccccatgcattggcagagc

SEQ ID NO: 3573065 - DNA, 25 bp, Homo sapien
ggctgcaagatgccccatgcattgg

SEQ ID NO: 3573066 - DNA, 25 bp, Homo sapien
gcattggcagagctacccgtggcct

SEQ ID NO: 3573067 - DNA, 25 bp, Homo sapien
gaaggagatgctgaattgttctaat

SEQ ID NO: 3573068 - DNA, 25 bp, Homo sapien
ctctcaatgcatctcagaaggagat

SEQ ID NO: 3573069 - DNA, 25 bp, Homo sapien
gactctcaatgcatctcagaaggag

SEQ ID NO: 3573070 - DNA, 25 bp, Homo sapien
cccagtgtgcttctaaccacaacca

SEQ ID NO: 3573071 - DNA, 25 bp, Homo sapien
actcccgagagaggctgagggcaca

SEQ ID NO: 3573072 - DNA, 25 bp, Homo sapien
tgtagagaagaaactcccgagagag

SEQ ID NO: 3573073 - DNA, 25 bp, Homo sapien
gaagaaactcccgagagaggctgag

SEQ ID NO: 3573074 - DNA, 25 bp, Homo sapien
aggctgagggcacacgaaacatttc

SEQ ID NO: 3573075 - DNA, 25 bp, Homo sapien
tctcctcatttactaatgacttatg

SEQ ID NO: 3573076 - DNA, 25 bp, Homo sapien
cctcatttactaatgacttatgacc

SEQ ID NO: 3573077 - DNA, 25 bp, Homo sapien
cagtctcctcatttactaatgactt

SEQ ID NO: 3573078 - DNA, 25 bp, Homo sapien
catttactaatgacttatgaccacc

SEQ ID NO: 3573079 - DNA, 25 bp, Homo sapien
cacatcctgattgtttcactttaca

SEQ ID NO: 3573080 - DNA, 25 bp, Homo sapien
gagaacctaaccattccactactgt

SEQ ID NO: 3573081 - DNA, 25 bp, Homo sapien
tatcaggagtactttgatgtcatca

SEQ ID NO: 3573082 - DNA, 25 bp, Homo sapien
ccactactgttggacaaatacattg

SEQ ID NO: 3573083 - DNA, 25 bp, Homo sapien
gactgtacaactcgggtgggaaatg

SEQ ID NO: 3573084 - DNA, 25 bp, Homo sapien
ttgaagactgtacaactcgggtggg

SEQ ID NO: 3573085 - DNA, 25 bp, Homo sapien
gaagactgtacaactcgggtgggaa

SEQ ID NO: 3573086 - DNA, 25 bp, Homo sapien
tgggaaatggggttagctatacaaa

SEQ ID NO: 3573087 - DNA, 25 bp, Homo sapien
tctatataaggcacaacagggagta

SEQ ID NO: 3573088 - DNA, 25 bp, Homo sapien
gacaaactgcctcctacatgggaaa

SEQ ID NO: 3573089 - DNA, 25 bp, Homo sapien
tggctggtactacagaacagtgact

SEQ ID NO: 3573090 - DNA, 25 bp, Homo sapien
gggagtaagtagatcaacagtgcca

SEQ ID NO: 3573091 - DNA, 25 bp, Homo sapien
gtttggtcctattgggaagatgaaa

SEQ ID NO: 3573092 - DNA, 25 bp, Homo sapien
cagtttggtcctattgggaagatga

SEQ ID NO: 3573093 - DNA, 25 bp, Homo sapien
gctcagtttggtcctattgggaaga

SEQ ID NO: 3573094 - DNA, 25 bp, Homo sapien
cttggctcagtttggtcctattggg

SEQ ID NO: 3573095 - DNA, 25 bp, Homo sapien
gtaaagcagctataaaggatttcac

SEQ ID NO: 3573096 - DNA, 25 bp, Homo sapien
caaaggccaagtgatccaaggcatc

SEQ ID NO: 3573097 - DNA, 25 bp, Homo sapien
catggaatggcatggtaataatccc

SEQ ID NO: 3573098 - DNA, 25 bp, Homo sapien
gcatcttctagacttgcctcatcct

SEQ ID NO: 3573099 - DNA, 25 bp, Homo sapien
agatcctcggaagagactgacagcc

SEQ ID NO: 3573100 - DNA, 25 bp, Homo sapien
actctctgaaagacacctcgggcca

SEQ ID NO: 3573101 - DNA, 25 bp, Homo sapien
acattgagcatgtacacgtcctgca

SEQ ID NO: 3573102 - DNA, 25 bp, Homo sapien
caaaggctggaaggtcttgctccac

SEQ ID NO: 3573103 - DNA, 25 bp, Homo sapien
ggcagagccagtgactctctgaaag

SEQ ID NO: 3573104 - DNA, 25 bp, Homo sapien
tgagtaggcaggacttcaggcacac

SEQ ID NO: 3573105 - DNA, 25 bp, Homo sapien
aggcaggacttcaggcacacgccat

SEQ ID NO: 3573106 - DNA, 25 bp, Homo sapien
gagtaggcaggacttcaggcacacg

SEQ ID NO: 3573107 - DNA, 25 bp, Homo sapien
ggcaggacttcaggcacacgccatc

SEQ ID NO: 3573108 - DNA, 25 bp, Homo sapien
ctcggatgttctcactggcctccag

SEQ ID NO: 3573109 - DNA, 25 bp, Homo sapien
gttctcactggcctccagactatgt

SEQ ID NO: 3573110 - DNA, 25 bp, Homo sapien
tctcactggcctccagactatgtac

SEQ ID NO: 3573111 - DNA, 25 bp, Homo sapien
gatgttctcactggcctccagacta

SEQ ID NO: 3573112 - DNA, 25 bp, Homo sapien
cacattcctccagtcagactgcagg

SEQ ID NO: 3573113 - DNA, 25 bp, Homo sapien
cagactgcaggcgtttgatgagagt

SEQ ID NO: 3573114 - DNA, 25 bp, Homo sapien
tgcaagcagagggttagccacaggg

SEQ ID NO: 3573115 - DNA, 25 bp, Homo sapien
cgtttgatgagagtaaatgcaagca

SEQ ID NO: 3573116 - DNA, 25 bp, Homo sapien
tgcaaagaaagtaccttgtcgtaga

SEQ ID NO: 3573117 - DNA, 25 bp, Homo sapien
catgcaaagaaagtaccttgtcgta

SEQ ID NO: 3573118 - DNA, 25 bp, Homo sapien
caaagaaagtaccttgtcgtagaat

SEQ ID NO: 3573119 - DNA, 25 bp, Homo sapien
ctcatgcaaagaaagtaccttgtcg

SEQ ID NO: 3573120 - DNA, 25 bp, Homo sapien
agcgccgagaacgtgtcgccccgag

SEQ ID NO: 3573121 - DNA, 25 bp, Homo sapien
tctgggtctcctgtcccgagcgcca

SEQ ID NO: 3573122 - DNA, 25 bp, Homo sapien
cgcaggtaccgcctcagcagcccca

SEQ ID NO: 3573123 - DNA, 25 bp, Homo sapien
gccacgctggtcagcgccgagaacg

SEQ ID NO: 3573124 - DNA, 25 bp, Homo sapien
ccagcgctcgcgaacttcccctcag

SEQ ID NO: 3573125 - DNA, 25 bp, Homo sapien
ccctcagacagtcctggccgcgcgg

SEQ ID NO: 3573126 - DNA, 25 bp, Homo sapien
ctcagacagtcctggccgcgcggcg

SEQ ID NO: 3573127 - DNA, 25 bp, Homo sapien
cgcgaacttcccctcagacagtcct

SEQ ID NO: 3573128 - DNA, 25 bp, Homo sapien
cacgattcctactctcgggactgag

SEQ ID NO: 3573129 - DNA, 25 bp, Homo sapien
cagccagtgtgtgtagctcaaggac

SEQ ID NO: 3573130 - DNA, 25 bp, Homo sapien
actgagcagccacgtgatgaacatg

SEQ ID NO: 3573131 - DNA, 25 bp, Homo sapien
tattctagcctagaacaacaaggcc

SEQ ID NO: 3573132 - DNA, 25 bp, Homo sapien
gattctgatacaacatcctagcagg

SEQ ID NO: 3573133 - DNA, 25 bp, Homo sapien
cagtgaggtaacagggcaatagtcc

SEQ ID NO: 3573134 - DNA, 25 bp, Homo sapien
gctttggctccccaagtacaaggaa

SEQ ID NO: 3573135 - DNA, 25 bp, Homo sapien
caaaatgtgcaagggtgcctaggaa

SEQ ID NO: 3573136 - DNA, 25 bp, Homo sapien
caattacgagatacagaactaggct

SEQ ID NO: 3573137 - DNA, 25 bp, Homo sapien
tagctgacagctgcaacaaacgaaa

SEQ ID NO: 3573138 - DNA, 25 bp, Homo sapien
cacttgatatagaggaagcacctac

SEQ ID NO: 3573139 - DNA, 25 bp, Homo sapien
caaagccaataggagtgttgccact

SEQ ID NO: 3573140 - DNA, 25 bp, Homo sapien
cagaacgccagatcagtccattctt

SEQ ID NO: 3573141 - DNA, 25 bp, Homo sapien
ctaaacagaacgccagatcagtcca

SEQ ID NO: 3573142 - DNA, 25 bp, Homo sapien
aacagaacgccagatcagtccattc

SEQ ID NO: 3573143 - DNA, 25 bp, Homo sapien
gaacgccagatcagtccattcttac

SEQ ID NO: 3573144 - DNA, 25 bp, Homo sapien
agagcatcaatgagtttcttcagtt

SEQ ID NO: 3573145 - DNA, 25 bp, Homo sapien
tctgttccacttgtccgaagggtag

SEQ ID NO: 3573146 - DNA, 25 bp, Homo sapien
caggtgacgcacacatctctgcata

SEQ ID NO: 3573147 - DNA, 25 bp, Homo sapien
tagcaacacagccattttgaaaagt

SEQ ID NO: 3573148 - DNA, 25 bp, Homo sapien
tctggtcaggtgacgcacacatctc

SEQ ID NO: 3573149 - DNA, 25 bp, Homo sapien
tattaggctggctactgtcatatcc

SEQ ID NO: 3573150 - DNA, 25 bp, Homo sapien
tatacttttgatggtaggtggttca

SEQ ID NO: 3573151 - DNA, 25 bp, Homo sapien
tgtcatatccagtggtaacgtcccg

SEQ ID NO: 3573152 - DNA, 25 bp, Homo sapien
taacgtcccgtacatgcaatatagc

SEQ ID NO: 3573153 - DNA, 25 bp, Homo sapien
tttcataaaccttaaccagttgctg

SEQ ID NO: 3573154 - DNA, 25 bp, Homo sapien
tatccaaaactgaagttccacagag

SEQ ID NO: 3573155 - DNA, 25 bp, Homo sapien
cagttgctgtttcaatgttatattc

SEQ ID NO: 3573156 - DNA, 25 bp, Homo sapien
acaacagctgcactcaccccatctt

SEQ ID NO: 3573157 - DNA, 25 bp, Homo sapien
aggaggtctattatcctacttccaa

SEQ ID NO: 3573158 - DNA, 25 bp, Homo sapien
tcaaatgcaaaaaggacttctttcc

SEQ ID NO: 3573159 - DNA, 25 bp, Homo sapien
ggtctattatcctacttccaatcca

SEQ ID NO: 3573160 - DNA, 25 bp, Homo sapien
tcccattttccaggaggtctattat

SEQ ID NO: 3573161 - DNA, 25 bp, Homo sapien
taaacgttcttcacatcagcatttc

SEQ ID NO: 3573162 - DNA, 25 bp, Homo sapien
gcaattgccttcagaattttagaag

SEQ ID NO: 3573163 - DNA, 25 bp, Homo sapien
gactgtggtggctaacatataaacg

SEQ ID NO: 3573164 - DNA, 25 bp, Homo sapien
aatccttctttaagtgcaattgcct

SEQ ID NO: 3573165 - DNA, 25 bp, Homo sapien
atctgtggctagcactacccgggca

SEQ ID NO: 3573166 - DNA, 25 bp, Homo sapien
tggctagcactacccgggcattttc

SEQ ID NO: 3573167 - DNA, 25 bp, Homo sapien
tgtggctagcactacccgggcattt

SEQ ID NO: 3573168 - DNA, 25 bp, Homo sapien
caggatctgtggctagcactacccg

SEQ ID NO: 3573169 - DNA, 25 bp, Homo sapien
cctaagttcaatgttaacgttcctg

SEQ ID NO: 3573170 - DNA, 25 bp, Homo sapien
taggcacaatgttagtgataggaat

SEQ ID NO: 3573171 - DNA, 25 bp, Homo sapien
ggattgtactgaagaacctaagttc

SEQ ID NO: 3573172 - DNA, 25 bp, Homo sapien
caatgttaacgttcctgtatgtagg

SEQ ID NO: 3573173 - DNA, 25 bp, Homo sapien
tccttcttcaggatttggacattta

SEQ ID NO: 3573174 - DNA, 25 bp, Homo sapien
cagcacagattctccttcttcagga

SEQ ID NO: 3573175 - DNA, 25 bp, Homo sapien
cttcttcaggatttggacatttaac

SEQ ID NO: 3573176 - DNA, 25 bp, Homo sapien
tctccttcttcaggatttggacatt

SEQ ID NO: 3573177 - DNA, 25 bp, Homo sapien
taaaagccaactgcacatagtcatg

SEQ ID NO: 3573178 - DNA, 25 bp, Homo sapien
ggtagaaaagtctggatcaggatct

SEQ ID NO: 3573179 - DNA, 25 bp, Homo sapien
catgtccgaccccatgaaaagatgt

SEQ ID NO: 3573180 - DNA, 25 bp, Homo sapien
ggatctttttgttctggtactggaa

SEQ ID NO: 3573181 - DNA, 25 bp, Homo sapien
taatttgactgctatgcctctcaag

SEQ ID NO: 3573182 - DNA, 25 bp, Homo sapien
tcaaacatatgcataggaagacaga

SEQ ID NO: 3573183 - DNA, 25 bp, Homo sapien
catggataattctctctcgccggca

SEQ ID NO: 3573184 - DNA, 25 bp, Homo sapien
aagcaggacctgaacgaggttccat

SEQ ID NO: 3573185 - DNA, 25 bp, Homo sapien
tcttcagcgggctggtatccactaa

SEQ ID NO: 3573186 - DNA, 25 bp, Homo sapien
cagatcttccatgtatctcctgcaa

SEQ ID NO: 3573187 - DNA, 25 bp, Homo sapien
gatctgagcaccagtttcccagtaa

SEQ ID NO: 3573188 - DNA, 25 bp, Homo sapien
tgtaaaaacagatctttttcagatc

SEQ ID NO: 3573189 - DNA, 25 bp, Homo sapien
ctggttcttggattgtaatgcccat

SEQ ID NO: 3573190 - DNA, 25 bp, Homo sapien
tctggttcttggattgtaatgccca

SEQ ID NO: 3573191 - DNA, 25 bp, Homo sapien
tgaccatgactctgtggataagact

SEQ ID NO: 3573192 - DNA, 25 bp, Homo sapien
tctttgtaacctttgatgaccatga

SEQ ID NO: 3573193 - DNA, 25 bp, Homo sapien
tttgtctttgtaacctttgatgacc

SEQ ID NO: 3573194 - DNA, 25 bp, Homo sapien
cagtggcaggaaaaggggctttgtc

SEQ ID NO: 3573195 - DNA, 25 bp, Homo sapien
tgacaaattgtgtaacaagttattt

SEQ ID NO: 3573196 - DNA, 25 bp, Homo sapien
tgtgacaaattgtgtaacaagttat

SEQ ID NO: 3573197 - DNA, 25 bp, Homo sapien
tttgtgacaaattgtgtaacaagtt

SEQ ID NO: 3573198 - DNA, 25 bp, Homo sapien
ccaacaaagagttttaatatggatt

SEQ ID NO: 3573199 - DNA, 25 bp, Homo sapien
gtgtagctgaactgataattactat

SEQ ID NO: 3573200 - DNA, 25 bp, Homo sapien
attactattgtgacctgaacttcac

SEQ ID NO: 3573201 - DNA, 25 bp, Homo sapien
gctgaactgataattactattgtga

SEQ ID NO: 3573202 - DNA, 25 bp, Homo sapien
tgataattactattgtgacctgaac

SEQ ID NO: 3573203 - DNA, 25 bp, Homo sapien
tccttgcggttgtgagaggcagtaa

SEQ ID NO: 3573204 - DNA, 25 bp, Homo sapien
tgctttgagcttctgaactgcatat

SEQ ID NO: 3573205 - DNA, 25 bp, Homo sapien
ctttgagcttctgaactgcatatgg

SEQ ID NO: 3573206 - DNA, 25 bp, Homo sapien
ccattgtcttccttgcggttgtgag

SEQ ID NO: 3573207 - DNA, 25 bp, Homo sapien
ggtgtaggaacatatcttgaaaaaa

SEQ ID NO: 3573208 - DNA, 25 bp, Homo sapien
caagactgcagcagtgagtttagca

SEQ ID NO: 3573209 - DNA, 25 bp, Homo sapien
taggaacatatcttgaaaaaaggta

SEQ ID NO: 3573210 - DNA, 25 bp, Homo sapien
gactgcagcagtgagtttagcaagc

SEQ ID NO: 3573211 - DNA, 25 bp, Homo sapien
ccgagtgtcatacccaaccacaaag

SEQ ID NO: 3573212 - DNA, 25 bp, Homo sapien
agtctgagaaacatctctcaaggta

SEQ ID NO: 3573213 - DNA, 25 bp, Homo sapien
tgcagctgctagttacttgaccccg

SEQ ID NO: 3573214 - DNA, 25 bp, Homo sapien
tacttgaccccgagtgtcataccca

SEQ ID NO: 3573215 - DNA, 25 bp, Homo sapien
catcccattccgtaacaggttttca

SEQ ID NO: 3573216 - DNA, 25 bp, Homo sapien
cagtcccaaaagtcattcggcaaca

SEQ ID NO: 3573217 - DNA, 25 bp, Homo sapien
ccccatggcagaacgaagtcctgca

SEQ ID NO: 3573218 - DNA, 25 bp, Homo sapien
gacgatctcgcagctccttgttcat

SEQ ID NO: 3573219 - DNA, 25 bp, Homo sapien
gaacaagttgggagtagagagataa

SEQ ID NO: 3573220 - DNA, 25 bp, Homo sapien
agttggattgtggagcaaggagggt

SEQ ID NO: 3573221 - DNA, 25 bp, Homo sapien
taatgagttcagtattagacttact

SEQ ID NO: 3573222 - DNA, 25 bp, Homo sapien
agtgaaagatcagtaggagttggat

SEQ ID NO: 3573223 - DNA, 25 bp, Homo sapien
ggaaccccagtgtggatcagtacac

SEQ ID NO: 3573224 - DNA, 25 bp, Homo sapien
gaaacaacacgccatcttcaccata

SEQ ID NO: 3573225 - DNA, 25 bp, Homo sapien
cgccatcttcaccatattactaaca

SEQ ID NO: 3573226 - DNA, 25 bp, Homo sapien
gctttttactatttatggcatagat

SEQ ID NO: 3573227 - DNA, 25 bp, Homo sapien
catcagtttctgtggcattgggcac

SEQ ID NO: 3573228 - DNA, 25 bp, Homo sapien
gtggcattgggcacagtgagtacat

SEQ ID NO: 3573229 - DNA, 25 bp, Homo sapien
cagacatcagtttctgtggcattgg

SEQ ID NO: 3573230 - DNA, 25 bp, Homo sapien
tggcattgggcacagtgagtacatc

SEQ ID NO: 3573231 - DNA, 25 bp, Homo sapien
caataccagggagtgataaaaggcc

SEQ ID NO: 3573232 - DNA, 25 bp, Homo sapien
ggagtgataaaaggccagcaactac

SEQ ID NO: 3573233 - DNA, 25 bp, Homo sapien
taccagggagtgataaaaggccagc

SEQ ID NO: 3573234 - DNA, 25 bp, Homo sapien
ctagacaataccagggagtgataaa

SEQ ID NO: 3573235 - DNA, 25 bp, Homo sapien
aaggagcaaccccacgcataggtgg

SEQ ID NO: 3573236 - DNA, 25 bp, Homo sapien
gagggaagacagcacttgaaaggaa

SEQ ID NO: 3573237 - DNA, 25 bp, Homo sapien
ggttacaattgagagcactgcagaa

SEQ ID NO: 3573238 - DNA, 25 bp, Homo sapien
cggctctggcagtccgaaggagcaa

SEQ ID NO: 3573239 - DNA, 25 bp, Homo sapien
aggttggagttcagatccccctctg

SEQ ID NO: 3573240 - DNA, 25 bp, Homo sapien
tgcccgatggccgtgtccagctgag

SEQ ID NO: 3573241 - DNA, 25 bp, Homo sapien
cttatcccagcggagccactgcccg

SEQ ID NO: 3573242 - DNA, 25 bp, Homo sapien
ttcagatccccctctgtgttttcag

SEQ ID NO: 3573243 - DNA, 25 bp, Homo sapien
gggccggcgaagacactgagttggg

SEQ ID NO: 3573244 - DNA, 25 bp, Homo sapien
catcggagaccaaccgcagggtgtt

SEQ ID NO: 3573245 - DNA, 25 bp, Homo sapien
ggttcgctcaccagggtccaggcgt

SEQ ID NO: 3573246 - DNA, 25 bp, Homo sapien
ggtgttcgtaacagctcctgccgcg

SEQ ID NO: 3573247 - DNA, 25 bp, Homo sapien
gcgaagtgactgaggcggtcgcgcc

SEQ ID NO: 3573248 - DNA, 25 bp, Homo sapien
gtccgggtctctgggcgaagtgact

SEQ ID NO: 3573249 - DNA, 25 bp, Homo sapien
gcgagagaacaacagtcccagatgt

SEQ ID NO: 3573250 - DNA, 25 bp, Homo sapien
cggtcgcgccgcgagagaacaacag

SEQ ID NO: 3573251 - DNA, 25 bp, Homo sapien
tggtgaggcaatagtgcacggttct

SEQ ID NO: 3573252 - DNA, 25 bp, Homo sapien
ccgaagttctagactggagcccggg

SEQ ID NO: 3573253 - DNA, 25 bp, Homo sapien
ggcaatagtgcacggttctttttat

SEQ ID NO: 3573254 - DNA, 25 bp, Homo sapien
ccttcccgcccttgctgatttaagt

SEQ ID NO: 3573255 - DNA, 25 bp, Homo sapien
ctctgccagcatgggaaaaaggaaa

SEQ ID NO: 3573256 - DNA, 25 bp, Homo sapien
gtagagctctgccagcatgggaaaa

SEQ ID NO: 3573257 - DNA, 25 bp, Homo sapien
caaaagtagagctctgccagcatgg

SEQ ID NO: 3573258 - DNA, 25 bp, Homo sapien
ccaaaagtagagctctgccagcatg

SEQ ID NO: 3573259 - DNA, 25 bp, Homo sapien
atatgcctatccaatatgtcgtctt

SEQ ID NO: 3573260 - DNA, 25 bp, Homo sapien
taatatgcctatccaatatgtcgtc

SEQ ID NO: 3573261 - DNA, 25 bp, Homo sapien
tatgcctatccaatatgtcgtcttt

SEQ ID NO: 3573262 - DNA, 25 bp, Homo sapien
aatatgcctatccaatatgtcgtct

SEQ ID NO: 3573263 - DNA, 25 bp, Homo sapien
tgtatggtcccaaagctatggtttg

SEQ ID NO: 3573264 - DNA, 25 bp, Homo sapien
aggtatctggcccacttgcgtaaga

SEQ ID NO: 3573265 - DNA, 25 bp, Homo sapien
cattgcagttgtggtgaaggtgctc

SEQ ID NO: 3573266 - DNA, 25 bp, Homo sapien
aaggtgctcattgtccaagcaggtg

SEQ ID NO: 3573267 - DNA, 25 bp, Homo sapien
aagtcctatccacgtaaatttctga

SEQ ID NO: 3573268 - DNA, 25 bp, Homo sapien
ttctccctcaagaagagatgaggaa

SEQ ID NO: 3573269 - DNA, 25 bp, Homo sapien
agagcatcaacataactgcatatgg

SEQ ID NO: 3573270 - DNA, 25 bp, Homo sapien
gctgggtggtgtctaaagtcctatc

SEQ ID NO: 3573271 - DNA, 25 bp, Homo sapien
ttcaatgggtacttccagggaccgc

SEQ ID NO: 3573272 - DNA, 25 bp, Homo sapien
tatcatgcggaaagggaaaatcacc

SEQ ID NO: 3573273 - DNA, 25 bp, Homo sapien
tcagaactgatagagccttagagac

SEQ ID NO: 3573274 - DNA, 25 bp, Homo sapien
gaccgcatggagatcccttaagttg

SEQ ID NO: 3573275 - DNA, 25 bp, Homo sapien
tggcagtatcagtcttttagaagca

SEQ ID NO: 3573276 - DNA, 25 bp, Homo sapien
tcagaaaacttctctcagatagtcg

SEQ ID NO: 3573277 - DNA, 25 bp, Homo sapien
aaacttctctcagatagtcgtggtg

SEQ ID NO: 3573278 - DNA, 25 bp, Homo sapien
cgcccaccttggcagtatcagtctt

SEQ ID NO: 3573279 - DNA, 25 bp, Homo sapien
tatgaaccatagagctaacgaggcc

SEQ ID NO: 3573280 - DNA, 25 bp, Homo sapien
ttgaaaagcactaggcaaggagacc

SEQ ID NO: 3573281 - DNA, 25 bp, Homo sapien
taacgaggcctaacattcagggtcc

SEQ ID NO: 3573282 - DNA, 25 bp, Homo sapien
tatgcacaaggcttcggtctaccag

SEQ ID NO: 3573283 - DNA, 25 bp, Homo sapien
tgtaggagttgtcatcacggccagg

SEQ ID NO: 3573284 - DNA, 25 bp, Homo sapien
ccactttgcgggagcgggtgtatcc

SEQ ID NO: 3573285 - DNA, 25 bp, Homo sapien
cctggccggcagagcaaattgctgt

SEQ ID NO: 3573286 - DNA, 25 bp, Homo sapien
tagagccttcagcacggcatgcagg

SEQ ID NO: 3573287 - DNA, 25 bp, Homo sapien
cagggattgaggtgggggaagactc

SEQ ID NO: 3573288 - DNA, 25 bp, Homo sapien
tgaggtgggggaagactcggtagaa

SEQ ID NO: 3573289 - DNA, 25 bp, Homo sapien
caacagggattgaggtgggggaaga

SEQ ID NO: 3573290 - DNA, 25 bp, Homo sapien
agcaacagggattgaggtgggggaa

SEQ ID NO: 3573291 - DNA, 25 bp, Homo sapien
gagaggggatggctctgtcacctgc

SEQ ID NO: 3573292 - DNA, 25 bp, Homo sapien
aaagagagaggggatggctctgtca

SEQ ID NO: 3573293 - DNA, 25 bp, Homo sapien
aagagagaggggatggctctgtcac

SEQ ID NO: 3573294 - DNA, 25 bp, Homo sapien
aggggatggctctgtcacctgcagc

SEQ ID NO: 3573295 - DNA, 25 bp, Homo sapien
gatctcagtattgacttcggagctg

SEQ ID NO: 3573296 - DNA, 25 bp, Homo sapien
ctggacacatctgggatctcagtat

SEQ ID NO: 3573297 - DNA, 25 bp, Homo sapien
ctttgtggacacactaaggctcctc

SEQ ID NO: 3573298 - DNA, 25 bp, Homo sapien
ggagtccctttgtggacacactaag

SEQ ID NO: 3573299 - DNA, 25 bp, Homo sapien
caggccccaaggattatgcaacagt

SEQ ID NO: 3573300 - DNA, 25 bp, Homo sapien
caaagggcctctgattgctgtcccc

SEQ ID NO: 3573301 - DNA, 25 bp, Homo sapien
tcagaaccagggtggattgcccaag

SEQ ID NO: 3573302 - DNA, 25 bp, Homo sapien
caggccagcctagggttgcagttaa

SEQ ID NO: 3573303 - DNA, 25 bp, Homo sapien
ccttcctgtttcctaccctctatga

SEQ ID NO: 3573304 - DNA, 25 bp, Homo sapien
gtggcccaagcgctgcgaccctgtg

SEQ ID NO: 3573305 - DNA, 25 bp, Homo sapien
gggcgcccgtttgctcgctggacac

SEQ ID NO: 3573306 - DNA, 25 bp, Homo sapien
gccctctgaccgagggtggcccaag

SEQ ID NO: 3573307 - DNA, 25 bp, Homo sapien
gtttgctcgctggacacggcgccct

SEQ ID NO: 3573308 - DNA, 25 bp, Homo sapien
aattaacatcatagaccaggcatgg

SEQ ID NO: 3573309 - DNA, 25 bp, Homo sapien
ctgaagaccagagagtaaatgactt

SEQ ID NO: 3573310 - DNA, 25 bp, Homo sapien
cagggtcccctgacttctcattcga

SEQ ID NO: 3573311 - DNA, 25 bp, Homo sapien
tttaacatggatcctagaaaatgtc

SEQ ID NO: 3573312 - DNA, 25 bp, Homo sapien
catgatcagtgaatgacaggccagg

SEQ ID NO: 3573313 - DNA, 25 bp, Homo sapien
caagttcgtgtgagaccctaaccta

SEQ ID NO: 3573314 - DNA, 25 bp, Homo sapien
caaacccaggaaggtaagatcccat

SEQ ID NO: 3573315 - DNA, 25 bp, Homo sapien
cagtctttggcctagctcagggtaa

SEQ ID NO: 3573316 - DNA, 25 bp, Homo sapien
tctggagctccttactcaaggaagt

SEQ ID NO: 3573317 - DNA, 25 bp, Homo sapien
tccacggtgacgtgcctctggagct

SEQ ID NO: 3573318 - DNA, 25 bp, Homo sapien
ccacaaggaaaggtggcattacttc

SEQ ID NO: 3573319 - DNA, 25 bp, Homo sapien
gatcagtgtgcacttgtagatctcc

SEQ ID NO: 3573320 - DNA, 25 bp, Homo sapien
accacgtgaggtcggtagagcagtt

SEQ ID NO: 3573321 - DNA, 25 bp, Homo sapien
gccaggccgtgggatgtgatgtgcc

SEQ ID NO: 3573322 - DNA, 25 bp, Homo sapien
cagtccacagggcacgatgtgctca

SEQ ID NO: 3573323 - DNA, 25 bp, Homo sapien
gatgtgctcaaaccacgtgaggtcg

SEQ ID NO: 3573324 - DNA, 25 bp, Homo sapien
gcaagccaaagggtcttagagtaga

SEQ ID NO: 3573325 - DNA, 25 bp, Homo sapien
aaggcaagccaaagggtcttagagt

SEQ ID NO: 3573326 - DNA, 25 bp, Homo sapien
caagccaaagggtcttagagtagat

SEQ ID NO: 3573327 - DNA, 25 bp, Homo sapien
agccaaagggtcttagagtagatac

SEQ ID NO: 3573328 - DNA, 25 bp, Homo sapien
tctccgggctttggtgtccctctca

SEQ ID NO: 3573329 - DNA, 25 bp, Homo sapien
tccgggctttggtgtccctctcagg

SEQ ID NO: 3573330 - DNA, 25 bp, Homo sapien
tggattagatcaccggttttcaaat

SEQ ID NO: 3573331 - DNA, 25 bp, Homo sapien
atgagaaaactggattagatcaccg

SEQ ID NO: 3573332 - DNA, 25 bp, Homo sapien
caaacgcagcgggtagctgtgattc

SEQ ID NO: 3573333 - DNA, 25 bp, Homo sapien
catgacattgtcattcgcaggacgt

SEQ ID NO: 3573334 - DNA, 25 bp, Homo sapien
gctgtgattcaaaacccgcgctaga

SEQ ID NO: 3573335 - DNA, 25 bp, Homo sapien
gttggactagatgtgaggagccttc

SEQ ID NO: 3573336 - DNA, 25 bp, Homo sapien
tcaggtaccgccctgctccgcggcg

SEQ ID NO: 3573337 - DNA, 25 bp, Homo sapien
ctcggctctcaggtaccgccctgct

SEQ ID NO: 3573338 - DNA, 25 bp, Homo sapien
tctcaggtaccgccctgctccgcgg

SEQ ID NO: 3573339 - DNA, 25 bp, Homo sapien
ggctctcaggtaccgccctgctccg

SEQ ID NO: 3573340 - DNA, 25 bp, Homo sapien
ggccctggagctcgcacaggcgcac

SEQ ID NO: 3573341 - DNA, 25 bp, Homo sapien
cgtctagccagacgccagtgtaggg

SEQ ID NO: 3573342 - DNA, 25 bp, Homo sapien
gatcttgcgatcgtctagccagacg

SEQ ID NO: 3573343 - DNA, 25 bp, Homo sapien
gatcgcgcagatcttgcgatcgtct

SEQ ID NO: 3573344 - DNA, 25 bp, Homo sapien
atgcgcaagcgcaggccgagacgcc

SEQ ID NO: 3573345 - DNA, 25 bp, Homo sapien
gcaggtcgagtaccgggtggcaaag

SEQ ID NO: 3573346 - DNA, 25 bp, Homo sapien
acgccgcaggtcgagtaccgggtgg

SEQ ID NO: 3573347 - DNA, 25 bp, Homo sapien
ggccaccgcggcctgtgacgcgcac

SEQ ID NO: 3573348 - DNA, 25 bp, Homo sapien
gggcctcaatgcctggctcggcctg

SEQ ID NO: 3573349 - DNA, 25 bp, Homo sapien
gcgcaccaaccgaacggcgggttgc

SEQ ID NO: 3573350 - DNA, 25 bp, Homo sapien
gcagccccagtagctcggcgtacgg

SEQ ID NO: 3573351 - DNA, 25 bp, Homo sapien
gtagccgcgcagtttcctcgggcgt

SEQ ID NO: 3573352 - DNA, 25 bp, Homo sapien
ttaaatgttgaacgaggatatggtg

SEQ ID NO: 3573353 - DNA, 25 bp, Homo sapien
tatggtgtttgtggggtcaaagcca

SEQ ID NO: 3573354 - DNA, 25 bp, Homo sapien
aatgttgaacgaggatatggtgttt

SEQ ID NO: 3573355 - DNA, 25 bp, Homo sapien
tgtttgtggggtcaaagccaggact

SEQ ID NO: 3573356 - DNA, 25 bp, Homo sapien
gggagctgaggtcacaagggaacat

SEQ ID NO: 3573357 - DNA, 25 bp, Homo sapien
tttgttcccaaaacactgccatggg

SEQ ID NO: 3573358 - DNA, 25 bp, Homo sapien
ccctgccaccattgggaaaaccgtg

SEQ ID NO: 3573359 - DNA, 25 bp, Homo sapien
accgtgagaatccagtttgttccca

SEQ ID NO: 3573360 - DNA, 25 bp, Homo sapien
agaccagagtattaaattatactac

SEQ ID NO: 3573361 - DNA, 25 bp, Homo sapien
acaagaccagagtattaaattatac

SEQ ID NO: 3573362 - DNA, 25 bp, Homo sapien
ttacaagaccagagtattaaattat

SEQ ID NO: 3573363 - DNA, 25 bp, Homo sapien
ttgtcctggggagggattctccatt

SEQ ID NO: 3573364 - DNA, 25 bp, Homo sapien
agacgtttcccgccggcgggagctg

SEQ ID NO: 3573365 - DNA, 25 bp, Homo sapien
gtagcagtccgtggcctcttgggaa

SEQ ID NO: 3573366 - DNA, 25 bp, Homo sapien
tatcaagtgtacatcccctgagagt

SEQ ID NO: 3573367 - DNA, 25 bp, Homo sapien
ccatgatggctaaattggtggtcac

SEQ ID NO: 3573368 - DNA, 25 bp, Homo sapien
cagttggtgcacagggaatgcttcc

SEQ ID NO: 3573369 - DNA, 25 bp, Homo sapien
gaataacatctacattgctaggaga

SEQ ID NO: 3573370 - DNA, 25 bp, Homo sapien
aactctttgacacactggatctctg

SEQ ID NO: 3573371 - DNA, 25 bp, Homo sapien
tcagtccttgcaagttgcttatgga

SEQ ID NO: 3573372 - DNA, 25 bp, Homo sapien
taaaaaatagtcctaggaagctgtg

SEQ ID NO: 3573373 - DNA, 25 bp, Homo sapien
tcaatacctagagagtgaaacccgt

SEQ ID NO: 3573374 - DNA, 25 bp, Homo sapien
tgaaacccgtacaatgagataaaga

SEQ ID NO: 3573375 - DNA, 25 bp, Homo sapien
aaatcccttcctatatacagtgtgc

SEQ ID NO: 3573376 - DNA, 25 bp, Homo sapien
ttgcggtttgttgatcccctcctcc

SEQ ID NO: 3573377 - DNA, 25 bp, Homo sapien
taagtgatgcaatcagctgtctgct

SEQ ID NO: 3573378 - DNA, 25 bp, Homo sapien
gctgatgtgtctcacacgtagcaga

SEQ ID NO: 3573379 - DNA, 25 bp, Homo sapien
tccattatggctggacaggcggtga

SEQ ID NO: 3573380 - DNA, 25 bp, Homo sapien
tgagcttctttagcaaccaagcatg

SEQ ID NO: 3573381 - DNA, 25 bp, Homo sapien
aatatgctgcctcaactctgagctg

SEQ ID NO: 3573382 - DNA, 25 bp, Homo sapien
atacaaatcctatgatctctatgcc

SEQ ID NO: 3573383 - DNA, 25 bp, Homo sapien
ttggaaaattctggtgttggttgga

SEQ ID NO: 3573384 - DNA, 25 bp, Homo sapien
gagttccatcttgcaagggataata

SEQ ID NO: 3573385 - DNA, 25 bp, Homo sapien
gaaacgtactctgtgtcaagactcg

SEQ ID NO: 3573386 - DNA, 25 bp, Homo sapien
caggatctcagtatgctgtaatgca

SEQ ID NO: 3573387 - DNA, 25 bp, Homo sapien
tctctgaagggcacattgtacccaa

SEQ ID NO: 3573388 - DNA, 25 bp, Homo sapien
ctttctgagttattgccctggcagc

SEQ ID NO: 3573389 - DNA, 25 bp, Homo sapien
tacaaaactaattggagatcctaac

SEQ ID NO: 3573390 - DNA, 25 bp, Homo sapien
taattggagatcctaacttggagtt

SEQ ID NO: 3573391 - DNA, 25 bp, Homo sapien
tctgctaaaagtaactccaacttgg

SEQ ID NO: 3573392 - DNA, 25 bp, Homo sapien
ctggcttgctacaaaactaattgga

SEQ ID NO: 3573393 - DNA, 25 bp, Homo sapien
acaaagggagtgacgtgacagctgc

SEQ ID NO: 3573394 - DNA, 25 bp, Homo sapien
tggcattgtgaaggatgatcacata

SEQ ID NO: 3573395 - DNA, 25 bp, Homo sapien
tgaaggatgatcacatatcagggcc

SEQ ID NO: 3573396 - DNA, 25 bp, Homo sapien
gatcacatatcagggccagaaagct

SEQ ID NO: 3573397 - DNA, 25 bp, Homo sapien
cactgaggggctcggatgctgctcc

SEQ ID NO: 3573398 - DNA, 25 bp, Homo sapien
tggtccctgcccttagcactggcaa

SEQ ID NO: 3573399 - DNA, 25 bp, Homo sapien
tgcttgagtgtcgtcagtctgggtt

SEQ ID NO: 3573400 - DNA, 25 bp, Homo sapien
cccttggtccctgcccttagcactg

SEQ ID NO: 3573401 - DNA, 25 bp, Homo sapien
ataacaacaattatacagctcatat

SEQ ID NO: 3573402 - DNA, 25 bp, Homo sapien
tgagggtaatgcaacttcttattta

SEQ ID NO: 3573403 - DNA, 25 bp, Homo sapien
gagggtaatgcaacttcttatttat

SEQ ID NO: 3573404 - DNA, 25 bp, Homo sapien
ggtaatgcaacttcttatttattaa

SEQ ID NO: 3573405 - DNA, 25 bp, Homo sapien
ggtcactttgtctggactggccgtg

SEQ ID NO: 3573406 - DNA, 25 bp, Homo sapien
tgggctaggaagacgttccagtgac

SEQ ID NO: 3573407 - DNA, 25 bp, Homo sapien
tttgtctggactggccgtgaccttc

SEQ ID NO: 3573408 - DNA, 25 bp, Homo sapien
tggactggccgtgaccttcagctcc

SEQ ID NO: 3573409 - DNA, 25 bp, Homo sapien
gggccagcgagcagtcggaagtgct

SEQ ID NO: 3573410 - DNA, 25 bp, Homo sapien
cgagcagtcggaagtgctgtgcctc

SEQ ID NO: 3573411 - DNA, 25 bp, Homo sapien
ctgtgcctctttctggaagtcttgc

SEQ ID NO: 3573412 - DNA, 25 bp, Homo sapien
ttcgtgggggccagcgagcagtcgg

SEQ ID NO: 3573413 - DNA, 25 bp, Homo sapien
ctgacgtcctgtcgcctccacagtg

SEQ ID NO: 3573414 - DNA, 25 bp, Homo sapien
attccccttccctgacgtcctgtcg

SEQ ID NO: 3573415 - DNA, 25 bp, Homo sapien
tgtcgcctccacagtgaagcctgtt

SEQ ID NO: 3573416 - DNA, 25 bp, Homo sapien
gtcattccccttccctgacgtcctg

SEQ ID NO: 3573417 - DNA, 25 bp, Homo sapien
gactgggttttagcatgtaagccat

SEQ ID NO: 3573418 - DNA, 25 bp, Homo sapien
actgggttttagcatgtaagccatg

SEQ ID NO: 3573419 - DNA, 25 bp, Homo sapien
tgggttttagcatgtaagccatgct

SEQ ID NO: 3573420 - DNA, 25 bp, Homo sapien
ggttttagcatgtaagccatgctaa

SEQ ID NO: 3573421 - DNA, 25 bp, Homo sapien
tccagggacacaggataggctcagc

SEQ ID NO: 3573422 - DNA, 25 bp, Homo sapien
gaatcagcgtgggattaccgccaag

SEQ ID NO: 3573423 - DNA, 25 bp, Homo sapien
tatgtacagtcaggtgccagatacc

SEQ ID NO: 3573424 - DNA, 25 bp, Homo sapien
tatcatagcggcaggcaacaagcat

SEQ ID NO: 3573425 - DNA, 25 bp, Homo sapien
gccttgggccaggtacttcacctct

SEQ ID NO: 3573426 - DNA, 25 bp, Homo sapien
ttgggccaggtacttcacctctctg

SEQ ID NO: 3573427 - DNA, 25 bp, Homo sapien
gtgtggccttgggccaggtacttca

SEQ ID NO: 3573428 - DNA, 25 bp, Homo sapien
tggccttgggccaggtacttcacct

SEQ ID NO: 3573429 - DNA, 25 bp, Homo sapien
tttctcacagaatgagaactgtggt

SEQ ID NO: 3573430 - DNA, 25 bp, Homo sapien
ggtgatagcagcagattgttgaaga

SEQ ID NO: 3573431 - DNA, 25 bp, Homo sapien
gagggtgggtttctcacagaatgag

SEQ ID NO: 3573432 - DNA, 25 bp, Homo sapien
gtgatagcagcagattgttgaagag

SEQ ID NO: 3573433 - DNA, 25 bp, Homo sapien
aggtagatctccaccaagtccgagg

SEQ ID NO: 3573434 - DNA, 25 bp, Homo sapien
cctcgtgttccagggcaaagcgacg

SEQ ID NO: 3573435 - DNA, 25 bp, Homo sapien
gcccggtgccttgggacacctggta

SEQ ID NO: 3573436 - DNA, 25 bp, Homo sapien
caaagcgacgcaggttgtctgggct

SEQ ID NO: 3573437 - DNA, 25 bp, Homo sapien
ctgggcaaatcttgcagcacttccc

SEQ ID NO: 3573438 - DNA, 25 bp, Homo sapien
acacgctggcagtcctggcggccat

SEQ ID NO: 3573439 - DNA, 25 bp, Homo sapien
ggcggccatcctcacaggtgcatag

SEQ ID NO: 3573440 - DNA, 25 bp, Homo sapien
gtactcggtgggacaggtcacacgc

SEQ ID NO: 3573441 - DNA, 25 bp, Homo sapien
ctgaataaggagggtgagaaggaag

SEQ ID NO: 3573442 - DNA, 25 bp, Homo sapien
gagaaggaaggaggatcagggcctc

SEQ ID NO: 3573443 - DNA, 25 bp, Homo sapien
gaaggaggatcagggcctcagacct

SEQ ID NO: 3573444 - DNA, 25 bp, Homo sapien
aaggaaggaggatcagggcctcaga

SEQ ID NO: 3573445 - DNA, 25 bp, Homo sapien
ttcaggacgatcttgacagttgtgc

SEQ ID NO: 3573446 - DNA, 25 bp, Homo sapien
tttctccttcaggacgatcttgaca

SEQ ID NO: 3573447 - DNA, 25 bp, Homo sapien
tctccttcaggacgatcttgacagt

SEQ ID NO: 3573448 - DNA, 25 bp, Homo sapien
tccttcaggacgatcttgacagttg

SEQ ID NO: 3573449 - DNA, 25 bp, Homo sapien
tgaagctcagaggggcgctgaggcc

SEQ ID NO: 3573450 - DNA, 25 bp, Homo sapien
gaagctcagaggggcgctgaggcca

SEQ ID NO: 3573451 - DNA, 25 bp, Homo sapien
tctctttctcccagcatcactggaa

SEQ ID NO: 3573452 - DNA, 25 bp, Homo sapien
ctctttctcccagcatcactggaac

SEQ ID NO: 3573453 - DNA, 25 bp, Homo sapien
tcactgactgagcatagcaggcccc

SEQ ID NO: 3573454 - DNA, 25 bp, Homo sapien
cactgactgagcatagcaggcccca

SEQ ID NO: 3573455 - DNA, 25 bp, Homo sapien
cagcaagacaggctgcagcaagagg

SEQ ID NO: 3573456 - DNA, 25 bp, Homo sapien
cccagcacgggctcaggcagatagg

SEQ ID NO: 3573457 - DNA, 25 bp, Homo sapien
agcacgggctcaggcagataggaca

SEQ ID NO: 3573458 - DNA, 25 bp, Homo sapien
acgggctcaggcagataggacactc

SEQ ID NO: 3573459 - DNA, 25 bp, Homo sapien
cacgggctcaggcagataggacact

SEQ ID NO: 3573460 - DNA, 25 bp, Homo sapien
caccccatggagcgactgcacactg

SEQ ID NO: 3573461 - DNA, 25 bp, Homo sapien
tcctcttcatccgattgctcacttg

SEQ ID NO: 3573462 - DNA, 25 bp, Homo sapien
accccatggagcgactgcacactgt

SEQ ID NO: 3573463 - DNA, 25 bp, Homo sapien
ccccatggagcgactgcacactgtc

SEQ ID NO: 3573464 - DNA, 25 bp, Homo sapien
ctgcagttcctcacggctctcacag

SEQ ID NO: 3573465 - DNA, 25 bp, Homo sapien
tgcagttcctcacggctctcacagt

SEQ ID NO: 3573466 - DNA, 25 bp, Homo sapien
agtccatggctaggcccatggagtg

SEQ ID NO: 3573467 - DNA, 25 bp, Homo sapien
ctcacagtccatggctaggcccatg

SEQ ID NO: 3573468 - DNA, 25 bp, Homo sapien
tgggcagcctggttcggggcaggtt

SEQ ID NO: 3573469 - DNA, 25 bp, Homo sapien
tggttcggggcaggttgtgaggccg

SEQ ID NO: 3573470 - DNA, 25 bp, Homo sapien
tgaggccgcagtagatctggccctc

SEQ ID NO: 3573471 - DNA, 25 bp, Homo sapien
caggttgtgaggccgcagtagatct

SEQ ID NO: 3573472 - DNA, 25 bp, Homo sapien
ctgcagaggacacactggttgggca

SEQ ID NO: 3573473 - DNA, 25 bp, Homo sapien
ctgaagatctctccgtgttggtaca

SEQ ID NO: 3573474 - DNA, 25 bp, Homo sapien
tgcagaggacacactggttgggcag

SEQ ID NO: 3573475 - DNA, 25 bp, Homo sapien
catgggcactgaagatctctccgtg

SEQ ID NO: 3573476 - DNA, 25 bp, Homo sapien
tcccgttgtgctggcaggactttgg

SEQ ID NO: 3573477 - DNA, 25 bp, Homo sapien
tggcaggactttggtggggcccgga

SEQ ID NO: 3573478 - DNA, 25 bp, Homo sapien
ggtcccgttgtgctggcaggacttt

SEQ ID NO: 3573479 - DNA, 25 bp, Homo sapien
tgctggcaggactttggtggggccc

SEQ ID NO: 3573480 - DNA, 25 bp, Homo sapien
cagtggaggcggtaacaactcacat

SEQ ID NO: 3573481 - DNA, 25 bp, Homo sapien
ccacacacttgggacagcattgctg

SEQ ID NO: 3573482 - DNA, 25 bp, Homo sapien
aggcggacagtggaggcggtaacaa

SEQ ID NO: 3573483 - DNA, 25 bp, Homo sapien
cacacttgggacagcattgctgtgg

SEQ ID NO: 3573484 - DNA, 25 bp, Homo sapien
actctgttacaagggtcactctgct

SEQ ID NO: 3573485 - DNA, 25 bp, Homo sapien
tctgttacaagggtcactctgctgc

SEQ ID NO: 3573486 - DNA, 25 bp, Homo sapien
tcactctgttacaagggtcactctg

SEQ ID NO: 3573487 - DNA, 25 bp, Homo sapien
ttcttcactctgttacaagggtcac

SEQ ID NO: 3573488 - DNA, 25 bp, Homo sapien
ggcagtacatcaggccttgtggctc

SEQ ID NO: 3573489 - DNA, 25 bp, Homo sapien
ctctgagcaggtacagcgcaggcag

SEQ ID NO: 3573490 - DNA, 25 bp, Homo sapien
ctctcgccgggggagtatctcttcc

SEQ ID NO: 3573491 - DNA, 25 bp, Homo sapien
cttgtggctccaagtaggggtgcca

SEQ ID NO: 3573492 - DNA, 25 bp, Homo sapien
tcacagggcagttagggaatcaagc

SEQ ID NO: 3573493 - DNA, 25 bp, Homo sapien
tatgattagacaaatgaggcccaga

SEQ ID NO: 3573494 - DNA, 25 bp, Homo sapien
gaatctgctagacaactgggcatgc

SEQ ID NO: 3573495 - DNA, 25 bp, Homo sapien
gagccttaacgcttatctcacaggg

SEQ ID NO: 3573496 - DNA, 25 bp, Homo sapien
ggtgtgaagatcaccaggcacctgt

SEQ ID NO: 3573497 - DNA, 25 bp, Homo sapien
gaacaaagtcctcctggtgtgaaga

SEQ ID NO: 3573498 - DNA, 25 bp, Homo sapien
cacctgtgtagaggaggattggcag

SEQ ID NO: 3573499 - DNA, 25 bp, Homo sapien
ttgaacaaagtcctcctggtgtgaa

SEQ ID NO: 3573500 - DNA, 25 bp, Homo sapien
aagatggaatactggcaggacctgc

SEQ ID NO: 3573501 - DNA, 25 bp, Homo sapien
gaagatggaatactggcaggacctg

SEQ ID NO: 3573502 - DNA, 25 bp, Homo sapien
gaaccagagcagcgcgagtcccagc

SEQ ID NO: 3573503 - DNA, 25 bp, Homo sapien
gggctcgagcgtgggagtccagggg

SEQ ID NO: 3573504 - DNA, 25 bp, Homo sapien
gaggagaggaccctcacctcgggaa

SEQ ID NO: 3573505 - DNA, 25 bp, Homo sapien
agagcagcgcgagtcccagcaagga

SEQ ID NO: 3573506 - DNA, 25 bp, Homo sapien
cagaagggagaggcgatcaaagaaa

SEQ ID NO: 3573507 - DNA, 25 bp, Homo sapien
ccccaggaggtctgctgctagagcg

SEQ ID NO: 3573508 - DNA, 25 bp, Homo sapien
cgaaggaaggtccagcagaagggag

SEQ ID NO: 3573509 - DNA, 25 bp, Homo sapien
gctggtccgggagcggagtcgggag

SEQ ID NO: 3573510 - DNA, 25 bp, Homo sapien
tacaaagagttgacaggaaaactgc

SEQ ID NO: 3573511 - DNA, 25 bp, Homo sapien
gagcctgggtcatgtgtcacgtcct

SEQ ID NO: 3573512 - DNA, 25 bp, Homo sapien
ctgtaacctaggcaggctcggcaac

SEQ ID NO: 3573513 - DNA, 25 bp, Homo sapien
gaaaactgcagcatcggatatggaa

SEQ ID NO: 3573514 - DNA, 25 bp, Homo sapien
caactgtaaccaaccactttatggg

SEQ ID NO: 3573515 - DNA, 25 bp, Homo sapien
taagactttggcagcttcgcgaatt

SEQ ID NO: 3573516 - DNA, 25 bp, Homo sapien
gtctaagactttggcagcttcgcga

SEQ ID NO: 3573517 - DNA, 25 bp, Homo sapien
gaggcctacccattctcctagtttc

SEQ ID NO: 3573518 - DNA, 25 bp, Homo sapien
ggcagtgggttacgggtgaacctga

SEQ ID NO: 3573519 - DNA, 25 bp, Homo sapien
cgggtgaacctgaatcttgaacgca

SEQ ID NO: 3573520 - DNA, 25 bp, Homo sapien
tccgcctccgcgcgactcggcggca

SEQ ID NO: 3573521 - DNA, 25 bp, Homo sapien
tacgggtgaacctgaatcttgaacg

SEQ ID NO: 3573522 - DNA, 25 bp, Homo sapien
tcagaatttgagttcagggtactct

SEQ ID NO: 3573523 - DNA, 25 bp, Homo sapien
gagttcagggtactcttggagagcc

SEQ ID NO: 3573524 - DNA, 25 bp, Homo sapien
taagcgatagccatcgtatttcttt

SEQ ID NO: 3573525 - DNA, 25 bp, Homo sapien
acttgagagtctaagcgatagccat

SEQ ID NO: 3573526 - DNA, 25 bp, Homo sapien
tcttcctgtttttgcacgttaccac

SEQ ID NO: 3573527 - DNA, 25 bp, Homo sapien
ttcttcctgtttttgcacgttacca

SEQ ID NO: 3573528 - DNA, 25 bp, Homo sapien
cttcctgtttttgcacgttaccaca

SEQ ID NO: 3573529 - DNA, 25 bp, Homo sapien
aagtgatcctcccaccttagcctcc

SEQ ID NO: 3573530 - DNA, 25 bp, Homo sapien
tgggattacaggcccagcccgtttc

SEQ ID NO: 3573531 - DNA, 25 bp, Homo sapien
actgtagcctttgtctcctgggctc

SEQ ID NO: 3573532 - DNA, 25 bp, Homo sapien
gccaccatgcccagtgtgttgccca

SEQ ID NO: 3573533 - DNA, 25 bp, Homo sapien
taaacataagtttcgaagatttcat

SEQ ID NO: 3573534 - DNA, 25 bp, Homo sapien
atctctaaacataagtttcgaagat

SEQ ID NO: 3573535 - DNA, 25 bp, Homo sapien
ggcaatatagtgtgttgtgggaagt

SEQ ID NO: 3573536 - DNA, 25 bp, Homo sapien
tctaaacataagtttcgaagatttc

SEQ ID NO: 3573537 - DNA, 25 bp, Homo sapien
tgtttgccagcaacacaagtgcgtt

SEQ ID NO: 3573538 - DNA, 25 bp, Homo sapien
ctaatggtctgttagcagtggctca

SEQ ID NO: 3573539 - DNA, 25 bp, Homo sapien
cagtggctcagcattgcggtgaaaa

SEQ ID NO: 3573540 - DNA, 25 bp, Homo sapien
catagtggttgactcctgtgataac

SEQ ID NO: 3573541 - DNA, 25 bp, Homo sapien
gtatgttaacaacattaagcaccaa

SEQ ID NO: 3573542 - DNA, 25 bp, Homo sapien
agaaggatacattctaaaacactag

SEQ ID NO: 3573543 - DNA, 25 bp, Homo sapien
ggaggcagaaggatacattctaaaa

SEQ ID NO: 3573544 - DNA, 25 bp, Homo sapien
gaaaagccagagaacatagtatgtt

SEQ ID NO: 3573545 - DNA, 25 bp, Homo sapien
cctgtttggattgggcagagttgcc

SEQ ID NO: 3573546 - DNA, 25 bp, Homo sapien
gcttggctaagcacctgacacgtag

SEQ ID NO: 3573547 - DNA, 25 bp, Homo sapien
taaacctgaggcagcagcctatcaa

SEQ ID NO: 3573548 - DNA, 25 bp, Homo sapien
aaccacccctttgtatagcctgtag

SEQ ID NO: 3573549 - DNA, 25 bp, Homo sapien
caaaaaagactgctactagagaggc

SEQ ID NO: 3573550 - DNA, 25 bp, Homo sapien
agagagagctgacccttaactatgg

SEQ ID NO: 3573551 - DNA, 25 bp, Homo sapien
tgtatgactagtagctccagctgtg

SEQ ID NO: 3573552 - DNA, 25 bp, Homo sapien
tcaggcagaacaacccagaaggata

SEQ ID NO: 3573553 - DNA, 25 bp, Homo sapien
gaagaaccttctcgaggccagatga

SEQ ID NO: 3573554 - DNA, 25 bp, Homo sapien
ttcaggaatgcagggtactcggagc

SEQ ID NO: 3573555 - DNA, 25 bp, Homo sapien
gatggtcacttgctctcacagggct

SEQ ID NO: 3573556 - DNA, 25 bp, Homo sapien
tactcggagccatatgatgccttgc

SEQ ID NO: 3573557 - DNA, 25 bp, Homo sapien
gagttatgccttacctacaagctag

SEQ ID NO: 3573558 - DNA, 25 bp, Homo sapien
gaacaagtcaagtgtttaccagcct

SEQ ID NO: 3573559 - DNA, 25 bp, Homo sapien
tagaagcgtcagtaatatctctgcc

SEQ ID NO: 3573560 - DNA, 25 bp, Homo sapien
gcagtgagttgaaacagcaaggctt

SEQ ID NO: 3573561 - DNA, 25 bp, Homo sapien
tagcctaactagacgtcccagaaac

SEQ ID NO: 3573562 - DNA, 25 bp, Homo sapien
tcaaactcattgtgggtgcgggtat

SEQ ID NO: 3573563 - DNA, 25 bp, Homo sapien
tatggccatttgacaccctttaagc

SEQ ID NO: 3573564 - DNA, 25 bp, Homo sapien
tgagcaagcaattgagcgcataagc

SEQ ID NO: 3573565 - DNA, 25 bp, Homo sapien
agagctaaaggaactatgggcaaag

SEQ ID NO: 3573566 - DNA, 25 bp, Homo sapien
gatagaaactgtcccaaaggaagcc

SEQ ID NO: 3573567 - DNA, 25 bp, Homo sapien
tcctaagtagacagtatcagtaaag

SEQ ID NO: 3573568 - DNA, 25 bp, Homo sapien
gaaacaatgacccatacacaggaaa

SEQ ID NO: 3573569 - DNA, 25 bp, Homo sapien
acctagaaaatagcagaagtccttc

SEQ ID NO: 3573570 - DNA, 25 bp, Homo sapien
ccaaaacgtgacacaagagacagga

SEQ ID NO: 3573571 - DNA, 25 bp, Homo sapien
gaatactggaaatagcaaagatcac

SEQ ID NO: 3573572 - DNA, 25 bp, Homo sapien
aaagggttgcctgtataagacctag

SEQ ID NO: 3573573 - DNA, 25 bp, Homo sapien
tgtcacccgagatgcaagggtggtt

SEQ ID NO: 3573574 - DNA, 25 bp, Homo sapien
gtggttcagcgtaggcaaatcaata

SEQ ID NO: 3573575 - DNA, 25 bp, Homo sapien
aattcagcaccccttcatgttgaaa

SEQ ID NO: 3573576 - DNA, 25 bp, Homo sapien
ttgttttctattgctccgtcagact

SEQ ID NO: 3573577 - DNA, 25 bp, Homo sapien
tggctagacgctcctttcagtgaag

SEQ ID NO: 3573578 - DNA, 25 bp, Homo sapien
tggaacttaaggtctagatcccgcc

SEQ ID NO: 3573579 - DNA, 25 bp, Homo sapien
gtttgaatacctctaacggcctgga

SEQ ID NO: 3573580 - DNA, 25 bp, Homo sapien
tgaagatgttctccccagctacagg

SEQ ID NO: 3573581 - DNA, 25 bp, Homo sapien
cagaatgagcccaggcatactagtt

SEQ ID NO: 3573582 - DNA, 25 bp, Homo sapien
tcagagctgtagtgacacagcccag

SEQ ID NO: 3573583 - DNA, 25 bp, Homo sapien
tactagttatattggagaagtccac

SEQ ID NO: 3573584 - DNA, 25 bp, Homo sapien
ccaggaaagagcgaagagcagagtc

SEQ ID NO: 3573585 - DNA, 25 bp, Homo sapien
gatcacaacctaagggtgtgccagg

SEQ ID NO: 3573586 - DNA, 25 bp, Homo sapien
tctcatgtaactggcattagcccca

SEQ ID NO: 3573587 - DNA, 25 bp, Homo sapien
taggctgggcattgaacactgatag

SEQ ID NO: 3573588 - DNA, 25 bp, Homo sapien
catgcaaacaagatcgacagggtgg

SEQ ID NO: 3573589 - DNA, 25 bp, Homo sapien
cctaggatggtattgacagttgttt

SEQ ID NO: 3573590 - DNA, 25 bp, Homo sapien
tgcatagcagttgtaacaagtgcag

SEQ ID NO: 3573591 - DNA, 25 bp, Homo sapien
aaactctaggtccagcttactgcct

SEQ ID NO: 3573592 - DNA, 25 bp, Homo sapien
cagtgatgcctaggatggtattgac

SEQ ID NO: 3573593 - DNA, 25 bp, Homo sapien
tcatgtagctgatgaccgaaggctc

SEQ ID NO: 3573594 - DNA, 25 bp, Homo sapien
caaacgaacttgtgatccagtgccc

SEQ ID NO: 3573595 - DNA, 25 bp, Homo sapien
cattaaagtttgacacacgcagaca

SEQ ID NO: 3573596 - DNA, 25 bp, Homo sapien
gagctggcagcaacttgggattcct

SEQ ID NO: 3573597 - DNA, 25 bp, Homo sapien
caagggtcaccagtttagagatcag

SEQ ID NO: 3573598 - DNA, 25 bp, Homo sapien
gagttaaatgtacctatagcccctg

SEQ ID NO: 3573599 - DNA, 25 bp, Homo sapien
caagagtagctgttggccctggttc

SEQ ID NO: 3573600 - DNA, 25 bp, Homo sapien
ggtaaaacaggcaatgaactcgctc

SEQ ID NO: 3573601 - DNA, 25 bp, Homo sapien
ctgtggccggctggtcaaccttgag

SEQ ID NO: 3573602 - DNA, 25 bp, Homo sapien
accaggtcatgcctgggccaaggag

SEQ ID NO: 3573603 - DNA, 25 bp, Homo sapien
tggtcaaccttgaggtgcggtccag

SEQ ID NO: 3573604 - DNA, 25 bp, Homo sapien
ccactctttattgccgctgggccag

SEQ ID NO: 3573605 - DNA, 25 bp, Homo sapien
tgggctcctggcagaactcatccat

SEQ ID NO: 3573606 - DNA, 25 bp, Homo sapien
gggctcctggcagaactcatccatg

SEQ ID NO: 3573607 - DNA, 25 bp, Homo sapien
catccatgaactcgaggaagtggcc

SEQ ID NO: 3573608 - DNA, 25 bp, Homo sapien
gaactcatccatgaactcgaggaag

SEQ ID NO: 3573609 - DNA, 25 bp, Homo sapien
aacactgtgcgcagagagccactca

SEQ ID NO: 3573610 - DNA, 25 bp, Homo sapien
gggtagtcccgaacactgtgcgcag

SEQ ID NO: 3573611 - DNA, 25 bp, Homo sapien
gccatggggagcggggtagtcccga

SEQ ID NO: 3573612 - DNA, 25 bp, Homo sapien
gagcggggtagtcccgaacactgtg

SEQ ID NO: 3573613 - DNA, 25 bp, Homo sapien
gctgccggtaacgtgcctggaactc

SEQ ID NO: 3573614 - DNA, 25 bp, Homo sapien
agctgccggtaacgtgcctggaact

SEQ ID NO: 3573615 - DNA, 25 bp, Homo sapien
cagctgccggtaacgtgcctggaac

SEQ ID NO: 3573616 - DNA, 25 bp, Homo sapien
tcaccagccgccgttctgtccactg

SEQ ID NO: 3573617 - DNA, 25 bp, Homo sapien
ccagccgccgttctgtccactggtg

SEQ ID NO: 3573618 - DNA, 25 bp, Homo sapien
gactctatcttaagccctggttcag

SEQ ID NO: 3573619 - DNA, 25 bp, Homo sapien
tgtaggcagttgctctctaagggcc

SEQ ID NO: 3573620 - DNA, 25 bp, Homo sapien
gagaggcaccaagctcatcctggtt

SEQ ID NO: 3573621 - DNA, 25 bp, Homo sapien
ggttctcacctagccagaagcaaga

SEQ ID NO: 3573622 - DNA, 25 bp, Homo sapien
gcgaatgaagatgtcatccagaagt

SEQ ID NO: 3573623 - DNA, 25 bp, Homo sapien
ccagaagttgggctctagtcttctt

SEQ ID NO: 3573624 - DNA, 25 bp, Homo sapien
tagtggagcctctgtaatgttccgg

SEQ ID NO: 3573625 - DNA, 25 bp, Homo sapien
taatgttccggggatcccgcaagcg

SEQ ID NO: 3573626 - DNA, 25 bp, Homo sapien
tatcccaggtttatgcacagacttc

SEQ ID NO: 3573627 - DNA, 25 bp, Homo sapien
aggtttatgcacagacttccctggc

SEQ ID NO: 3573628 - DNA, 25 bp, Homo sapien
catctgtaattgtgggcggtactca

SEQ ID NO: 3573629 - DNA, 25 bp, Homo sapien
cctggcctaacttcatacagtcaca

SEQ ID NO: 3573630 - DNA, 25 bp, Homo sapien
gcttggaggagtggcacaggagtgg

SEQ ID NO: 3573631 - DNA, 25 bp, Homo sapien
agggcttgtgcattcttctggattc

SEQ ID NO: 3573632 - DNA, 25 bp, Homo sapien
aacatagggtttctgaagagtgtcc

SEQ ID NO: 3573633 - DNA, 25 bp, Homo sapien
tgggtgcttcagcatttgttgcagg

SEQ ID NO: 3573634 - DNA, 25 bp, Homo sapien
gccgtggtacttgctgggaaggaag

SEQ ID NO: 3573635 - DNA, 25 bp, Homo sapien
cctttggctcaatgaaggctggatc

SEQ ID NO: 3573636 - DNA, 25 bp, Homo sapien
cagcagttcttcatagccgtggtac

SEQ ID NO: 3573637 - DNA, 25 bp, Homo sapien
gaaggcagttgggagtttcctccga

SEQ ID NO: 3573638 - DNA, 25 bp, Homo sapien
tctaaatcatccttatggatgacgg

SEQ ID NO: 3573639 - DNA, 25 bp, Homo sapien
aaatcatccttatggatgacggagg

SEQ ID NO: 3573640 - DNA, 25 bp, Homo sapien
tccttatggatgacggaggaaggca

SEQ ID NO: 3573641 - DNA, 25 bp, Homo sapien
ctttaactctaaatcatccttatgg

SEQ ID NO: 3573642 - DNA, 25 bp, Homo sapien
aagaggcttgcaagctccaccaagg

SEQ ID NO: 3573643 - DNA, 25 bp, Homo sapien
tatcagtgtcctcagaccagagatc

SEQ ID NO: 3573644 - DNA, 25 bp, Homo sapien
gacttatccccatgggtgtccctat

SEQ ID NO: 3573645 - DNA, 25 bp, Homo sapien
tgtccacagcaatcgagcctaaggg

SEQ ID NO: 3573646 - DNA, 25 bp, Homo sapien
cagtggcacgaaggtccggcaagac

SEQ ID NO: 3573647 - DNA, 25 bp, Homo sapien
gctgaggcggacagttgtgtcactc

SEQ ID NO: 3573648 - DNA, 25 bp, Homo sapien
ggacagggtctcttcactatgcaca

SEQ ID NO: 3573649 - DNA, 25 bp, Homo sapien
tcctcatctgatgggcgctctgggc

SEQ ID NO: 3573650 - DNA, 25 bp, Homo sapien
aggctgcttcggcacctttgggatt

SEQ ID NO: 3573651 - DNA, 25 bp, Homo sapien
cacagaagtgcttttggtagtgggc

SEQ ID NO: 3573652 - DNA, 25 bp, Homo sapien
gctctagcatatcctttgagggaga

SEQ ID NO: 3573653 - DNA, 25 bp, Homo sapien
ttgagggagacttggttgtcgtcat

SEQ ID NO: 3573654 - DNA, 25 bp, Homo sapien
aacaccaagcgccatcacttggcag

SEQ ID NO: 3573655 - DNA, 25 bp, Homo sapien
tcagcatctaaaacaccaagcgcca

SEQ ID NO: 3573656 - DNA, 25 bp, Homo sapien
tctaaaacaccaagcgccatcactt

SEQ ID NO: 3573657 - DNA, 25 bp, Homo sapien
ccaagcgccatcacttggcagctgg

SEQ ID NO: 3573658 - DNA, 25 bp, Homo sapien
gcactgtggagtgagcagctctaca

SEQ ID NO: 3573659 - DNA, 25 bp, Homo sapien
gaaggcaatgctgaacctaatggag

SEQ ID NO: 3573660 - DNA, 25 bp, Homo sapien
tgggagtcctgccttggaagcccta

SEQ ID NO: 3573661 - DNA, 25 bp, Homo sapien
tacattataataggctgcactcttc

SEQ ID NO: 3573662 - DNA, 25 bp, Homo sapien
cttccatgattccttccgagacatc

SEQ ID NO: 3573663 - DNA, 25 bp, Homo sapien
aattaagtggattcccagtcgctcc

SEQ ID NO: 3573664 - DNA, 25 bp, Homo sapien
tcaaaacatgatgcttaggctttac

SEQ ID NO: 3573665 - DNA, 25 bp, Homo sapien
tactatcttccttcgaattaagtgg

SEQ ID NO: 3573666 - DNA, 25 bp, Homo sapien
gacacagagtagatcccagggcttg

SEQ ID NO: 3573667 - DNA, 25 bp, Homo sapien
atgaaccttgtccaccccgacacag

SEQ ID NO: 3573668 - DNA, 25 bp, Homo sapien
cagggcttggcattgatgaggtggg

SEQ ID NO: 3573669 - DNA, 25 bp, Homo sapien
ttgtccaccccgacacagagtagat

SEQ ID NO: 3573670 - DNA, 25 bp, Homo sapien
ccagagggttgttatgaaagacgaa

SEQ ID NO: 3573671 - DNA, 25 bp, Homo sapien
gggttgttatgaaagacgaactcgc

SEQ ID NO: 3573672 - DNA, 25 bp, Homo sapien
caccagagggttgttatgaaagacg

SEQ ID NO: 3573673 - DNA, 25 bp, Homo sapien
gagggttgttatgaaagacgaactc

SEQ ID NO: 3573674 - DNA, 25 bp, Homo sapien
gaagagagctactggtaggacagca

SEQ ID NO: 3573675 - DNA, 25 bp, Homo sapien
agagagctactggtaggacagcatc

SEQ ID NO: 3573676 - DNA, 25 bp, Homo sapien
agagctactggtaggacagcatcct

SEQ ID NO: 3573677 - DNA, 25 bp, Homo sapien
ggaagagagctactggtaggacagc

SEQ ID NO: 3573678 - DNA, 25 bp, Homo sapien
tgtgaagccagcctgcaatcggtgg

SEQ ID NO: 3573679 - DNA, 25 bp, Homo sapien
gaaaggaggacccacacatctaagg

SEQ ID NO: 3573680 - DNA, 25 bp, Homo sapien
gacctcatggctgtctgggacacag

SEQ ID NO: 3573681 - DNA, 25 bp, Homo sapien
tacaagctttgttgagcagactgcc

SEQ ID NO: 3573682 - DNA, 25 bp, Homo sapien
cacactgaaaggtattgggtcagat

SEQ ID NO: 3573683 - DNA, 25 bp, Homo sapien
catcttggcgagagtatttatttgc

SEQ ID NO: 3573684 - DNA, 25 bp, Homo sapien
tatcagggacatcaggatcgaaggg

SEQ ID NO: 3573685 - DNA, 25 bp, Homo sapien
cccaatgaaggtactgaagtccaag

SEQ ID NO: 3573686 - DNA, 25 bp, Homo sapien
cacaggaaggatctcgaatatggga

SEQ ID NO: 3573687 - DNA, 25 bp, Homo sapien
agtgacttcacaggaaggatctcga

SEQ ID NO: 3573688 - DNA, 25 bp, Homo sapien
ggaggaagtgaacatatcttggttg

SEQ ID NO: 3573689 - DNA, 25 bp, Homo sapien
aaggatctcgaatatgggaggaagt

SEQ ID NO: 3573690 - DNA, 25 bp, Homo sapien
ttgggctaaaatttctccagaaggc

SEQ ID NO: 3573691 - DNA, 25 bp, Homo sapien
ggcccttctacacagttgggctaaa

SEQ ID NO: 3573692 - DNA, 25 bp, Homo sapien
cctgaattggcccttctacacagtt

SEQ ID NO: 3573693 - DNA, 25 bp, Homo sapien
tgggctaaaatttctccagaaggca

SEQ ID NO: 3573694 - DNA, 25 bp, Homo sapien
ctaactcaggaacacaaatataaag

SEQ ID NO: 3573695 - DNA, 25 bp, Homo sapien
aaatccagggtaagatgaaaacaca

SEQ ID NO: 3573696 - DNA, 25 bp, Homo sapien
tgattgatgcctagagcacccagga

SEQ ID NO: 3573697 - DNA, 25 bp, Homo sapien
gatgtcctgcatgattgggcccctg

SEQ ID NO: 3573698 - DNA, 25 bp, Homo sapien
tataggtctgccatccactgtgtgc

SEQ ID NO: 3573699 - DNA, 25 bp, Homo sapien
aagatgggcacgctgtctgaacgcg

SEQ ID NO: 3573700 - DNA, 25 bp, Homo sapien
tcctttcatggagagcctagctatt

SEQ ID NO: 3573701 - DNA, 25 bp, Homo sapien
caggtgttacccgaaggcttctgga

SEQ ID NO: 3573702 - DNA, 25 bp, Homo sapien
tgaatccctcggtaccctcagggtg

SEQ ID NO: 3573703 - DNA, 25 bp, Homo sapien
ggtatttcaaggtctacagcaccac

SEQ ID NO: 3573704 - DNA, 25 bp, Homo sapien
aaagccagatgagaatcctgcagcc

SEQ ID NO: 3573705 - DNA, 25 bp, Homo sapien
cactttaagaaggagtgcccaggca

SEQ ID NO: 3573706 - DNA, 25 bp, Homo sapien
taccagtgtggcaagtcagggcact

SEQ ID NO: 3573707 - DNA, 25 bp, Homo sapien
tcataatagggaccagaaggcggcc

SEQ ID NO: 3573708 - DNA, 25 bp, Homo sapien
agagaaagataccaacattcaagca

SEQ ID NO: 3573709 - DNA, 25 bp, Homo sapien
tagaacatgagatagggatagaaag

SEQ ID NO: 3573710 - DNA, 25 bp, Homo sapien
tagatttaagcctaagaagcctact

SEQ ID NO: 3573711 - DNA, 25 bp, Homo sapien
gaagtatgcctaccagatccagaaa

SEQ ID NO: 3573712 - DNA, 25 bp, Homo sapien
tgctttgaccgctggtttcctgtta

SEQ ID NO: 3573713 - DNA, 25 bp, Homo sapien
tagactctgacaatatgggtggtgc

SEQ ID NO: 3573714 - DNA, 25 bp, Homo sapien
gctgtagtctagcaagtctttcccc

SEQ ID NO: 3573715 - DNA, 25 bp, Homo sapien
tggagctgaggctctcaaaaccgta

SEQ ID NO: 3573716 - DNA, 25 bp, Homo sapien
ctttttcatgggcagtacagtataa

SEQ ID NO: 3573717 - DNA, 25 bp, Homo sapien
catgggcagtacagtataatccagt

SEQ ID NO: 3573718 - DNA, 25 bp, Homo sapien
tataatccagttgctcatctgagtc

SEQ ID NO: 3573719 - DNA, 25 bp, Homo sapien
cagtacagtataatccagttgctca

SEQ ID NO: 3573720 - DNA, 25 bp, Homo sapien
gcagcatgaattggggctctttatg

SEQ ID NO: 3573721 - DNA, 25 bp, Homo sapien
atgaattggggctctttatggggac

SEQ ID NO: 3573722 - DNA, 25 bp, Homo sapien
gactgcagcatgaattggggctctt

SEQ ID NO: 3573723 - DNA, 25 bp, Homo sapien
ctgcagcatgaattggggctcttta

SEQ ID NO: 3573724 - DNA, 25 bp, Homo sapien
tgtaggtatgggatcctgataatcc

SEQ ID NO: 3573725 - DNA, 25 bp, Homo sapien
agctgaacttgctgtaggtatggga

SEQ ID NO: 3573726 - DNA, 25 bp, Homo sapien
ccagtctactgactcgtcatagagc

SEQ ID NO: 3573727 - DNA, 25 bp, Homo sapien
tcatagagctgaacttgctgtaggt

SEQ ID NO: 3573728 - DNA, 25 bp, Homo sapien
cagccaggctggcaaagcaactggg

SEQ ID NO: 3573729 - DNA, 25 bp, Homo sapien
gttggagagtctgttgtcatccagc

SEQ ID NO: 3573730 - DNA, 25 bp, Homo sapien
actggggttggagagtctgttgtca

SEQ ID NO: 3573731 - DNA, 25 bp, Homo sapien
gccaggctggcaaagcaactggggt

SEQ ID NO: 3573732 - DNA, 25 bp, Homo sapien
tgtcagcgatgttacagatgcctcc

SEQ ID NO: 3573733 - DNA, 25 bp, Homo sapien
atgtacctcttgcttgtcagcgatg

SEQ ID NO: 3573734 - DNA, 25 bp, Homo sapien
gtgtctccagcgctgggaacctcag

SEQ ID NO: 3573735 - DNA, 25 bp, Homo sapien
tgtctccagcgctgggaacctcagg

SEQ ID NO: 3573736 - DNA, 25 bp, Homo sapien
cttgttatagaccacagctttgcca

SEQ ID NO: 3573737 - DNA, 25 bp, Homo sapien
atgcccttgttatagaccacagctt

SEQ ID NO: 3573738 - DNA, 25 bp, Homo sapien
gcccttgttatagaccacagctttg

SEQ ID NO: 3573739 - DNA, 25 bp, Homo sapien
ccttgttatagaccacagctttgcc

SEQ ID NO: 3573740 - DNA, 25 bp, Homo sapien
gcagatgacacaaataacgttttca

SEQ ID NO: 3573741 - DNA, 25 bp, Homo sapien
aggtagatgagacctaggtaactct

SEQ ID NO: 3573742 - DNA, 25 bp, Homo sapien
gagacctaggtaactctcttccaca

SEQ ID NO: 3573743 - DNA, 25 bp, Homo sapien
caggcagatgacacaaataacgttt

SEQ ID NO: 3573744 - DNA, 25 bp, Homo sapien
ggtgttgagcatctctgggcctaga

SEQ ID NO: 3573745 - DNA, 25 bp, Homo sapien
ttgagcatctctgggcctagatcct

SEQ ID NO: 3573746 - DNA, 25 bp, Homo sapien
tgttgagcatctctgggcctagatc

SEQ ID NO: 3573747 - DNA, 25 bp, Homo sapien
tggtgttgagcatctctgggcctag

SEQ ID NO: 3573748 - DNA, 25 bp, Homo sapien
ttgggaccctaacttaacagcatag

SEQ ID NO: 3573749 - DNA, 25 bp, Homo sapien
cattctactggctaggtgactgata

SEQ ID NO: 3573750 - DNA, 25 bp, Homo sapien
cataaccacaacctaaggtcctagg

SEQ ID NO: 3573751 - DNA, 25 bp, Homo sapien
ggaagtcgagattgctaccagccac

SEQ ID NO: 3573752 - DNA, 25 bp, Homo sapien
cggaggtgtggcagaatccccaaat

SEQ ID NO: 3573753 - DNA, 25 bp, Homo sapien
tctgcgacggccaaattgggcggca

SEQ ID NO: 3573754 - DNA, 25 bp, Homo sapien
taaggccattgcctgtgaggagcag

SEQ ID NO: 3573755 - DNA, 25 bp, Homo sapien
tcaggctgttgaaggaaaggtccaa

SEQ ID NO: 3573756 - DNA, 25 bp, Homo sapien
aaagagtaagagtgggccgggcgcg

SEQ ID NO: 3573757 - DNA, 25 bp, Homo sapien
tggtcttgaacctctgggctcaagc

SEQ ID NO: 3573758 - DNA, 25 bp, Homo sapien
acacggtctcattttgttcccaggc

SEQ ID NO: 3573759 - DNA, 25 bp, Homo sapien
gatcctcccatcctggcctcccaaa

SEQ ID NO: 3573760 - DNA, 25 bp, Homo sapien
taaatgcgagatccagttcctttag

SEQ ID NO: 3573761 - DNA, 25 bp, Homo sapien
ttaaagtctccatatttcacgtaga

SEQ ID NO: 3573762 - DNA, 25 bp, Homo sapien
tttgatgccattaaatgcgagatcc

SEQ ID NO: 3573763 - DNA, 25 bp, Homo sapien
cacgtagatagttttgatgccatta

SEQ ID NO: 3573764 - DNA, 25 bp, Homo sapien
acatatagatatgcctaatgtcttc

SEQ ID NO: 3573765 - DNA, 25 bp, Homo sapien
aaaagttccatatatagcactcaac

SEQ ID NO: 3573766 - DNA, 25 bp, Homo sapien
catttccccattggtagcctttagg

SEQ ID NO: 3573767 - DNA, 25 bp, Homo sapien
agcctttaggctatatgaataaaag

SEQ ID NO: 3573768 - DNA, 25 bp, Homo sapien
ggttttctgaggcattgatataaat

SEQ ID NO: 3573769 - DNA, 25 bp, Homo sapien
ttctgaggcattgatataaatcaca

SEQ ID NO: 3573770 - DNA, 25 bp, Homo sapien
tttctgaggcattgatataaatcac

SEQ ID NO: 3573771 - DNA, 25 bp, Homo sapien
ttttctgaggcattgatataaatca

SEQ ID NO: 3573772 - DNA, 25 bp, Homo sapien
tcaaataggacaagggcaatataaa

SEQ ID NO: 3573773 - DNA, 25 bp, Homo sapien
tgaccagatttccagtccctaggga

SEQ ID NO: 3573774 - DNA, 25 bp, Homo sapien
agccaggtgcgccacctcaagtctg

SEQ ID NO: 3573775 - DNA, 25 bp, Homo sapien
tctggaggtgcaagagacaaaccac

SEQ ID NO: 3573776 - DNA, 25 bp, Homo sapien
cccaatcacatctttgctggctgac

SEQ ID NO: 3573777 - DNA, 25 bp, Homo sapien
aatcacatctttgctggctgacctc

SEQ ID NO: 3573778 - DNA, 25 bp, Homo sapien
caatcacatctttgctggctgacct

SEQ ID NO: 3573779 - DNA, 25 bp, Homo sapien
tcacatctttgctggctgacctcac

SEQ ID NO: 3573780 - DNA, 25 bp, Homo sapien
ttaatggtgcacagatctgatggct

SEQ ID NO: 3573781 - DNA, 25 bp, Homo sapien
tgatggcttcctcacacagtggtgc

SEQ ID NO: 3573782 - DNA, 25 bp, Homo sapien
atggtgcacagatctgatggcttcc

SEQ ID NO: 3573783 - DNA, 25 bp, Homo sapien
attaatggtgcacagatctgatggc

SEQ ID NO: 3573784 - DNA, 25 bp, Homo sapien
gcctgcccccggcactaagtaatat

SEQ ID NO: 3573785 - DNA, 25 bp, Homo sapien
accccagtcctctttgtaaagcctg

SEQ ID NO: 3573786 - DNA, 25 bp, Homo sapien
agccaccccagtcctctttgtaaag

SEQ ID NO: 3573787 - DNA, 25 bp, Homo sapien
ctaagtaatatctggtcagctccct

SEQ ID NO: 3573788 - DNA, 25 bp, Homo sapien
ctttcccgacgttcagcttgtgctc

SEQ ID NO: 3573789 - DNA, 25 bp, Homo sapien
gtccaggatatgtccaggaaggtcc

SEQ ID NO: 3573790 - DNA, 25 bp, Homo sapien
tgattttcccgccgagactctttct

SEQ ID NO: 3573791 - DNA, 25 bp, Homo sapien
tcaggctttcccgacgttcagcttg

SEQ ID NO: 3573792 - DNA, 25 bp, Homo sapien
cttcctccggcacgcgaagcagatt

SEQ ID NO: 3573793 - DNA, 25 bp, Homo sapien
cgcgaagcagatttctggctgggaa

SEQ ID NO: 3573794 - DNA, 25 bp, Homo sapien
catccagcttgtagattcctgagaa

SEQ ID NO: 3573795 - DNA, 25 bp, Homo sapien
catcatccagcttgtagattcctga

SEQ ID NO: 3573796 - DNA, 25 bp, Homo sapien
tttgtttcttcacttgtttctttgc

SEQ ID NO: 3573797 - DNA, 25 bp, Homo sapien
atctttgactttgggaatggcccct

SEQ ID NO: 3573798 - DNA, 25 bp, Homo sapien
gatctttgactttgggaatggcccc

SEQ ID NO: 3573799 - DNA, 25 bp, Homo sapien
ttgatctttgactttgggaatggcc

SEQ ID NO: 3573800 - DNA, 25 bp, Homo sapien
ggccggagaaagactcgaattcgaa

SEQ ID NO: 3573801 - DNA, 25 bp, Homo sapien
ttcgaaaactaagtttcagtcgcac

SEQ ID NO: 3573802 - DNA, 25 bp, Homo sapien
ctgggccggagaaagactcgaattc

SEQ ID NO: 3573803 - DNA, 25 bp, Homo sapien
ctcgaattcgaaaactaagtttcag

SEQ ID NO: 3573804 - DNA, 25 bp, Homo sapien
tccggcgtcgcttcagcctccgagg

SEQ ID NO: 3573805 - DNA, 25 bp, Homo sapien
ctgcctccggcgtcgcttcagcctc

SEQ ID NO: 3573806 - DNA, 25 bp, Homo sapien
ggcgtcgcttcagcctccgaggggt

SEQ ID NO: 3573807 - DNA, 25 bp, Homo sapien
ccggcgtcgcttcagcctccgaggg

SEQ ID NO: 3573808 - DNA, 25 bp, Homo sapien
cggaggcgacgtcccagtcaggagg

SEQ ID NO: 3573809 - DNA, 25 bp, Homo sapien
ctgcggaggcgacgtcccagtcagg

SEQ ID NO: 3573810 - DNA, 25 bp, Homo sapien
aggcgacgtcccagtcaggagggat

SEQ ID NO: 3573811 - DNA, 25 bp, Homo sapien
cgacgtcccagtcaggagggatgcg

SEQ ID NO: 3573812 - DNA, 25 bp, Homo sapien
tatcttccccacgccttagtaactg

SEQ ID NO: 3573813 - DNA, 25 bp, Homo sapien
tctcggagccgctccactgcggtgc

SEQ ID NO: 3573814 - DNA, 25 bp, Homo sapien
actgcgacgcgacggcagacagtgt

SEQ ID NO: 3573815 - DNA, 25 bp, Homo sapien
agtgtaggcggcaaccgacggccgg

SEQ ID NO: 3573816 - DNA, 25 bp, Homo sapien
ggttcttgggaacagttgaatcctg

SEQ ID NO: 3573817 - DNA, 25 bp, Homo sapien
gggagaagcggtggtagcggaggct

SEQ ID NO: 3573818 - DNA, 25 bp, Homo sapien
ttggataaggtgaggagccggttct

SEQ ID NO: 3573819 - DNA, 25 bp, Homo sapien
tggtgcttccaactgcgggacagga

SEQ ID NO: 3573820 - DNA, 25 bp, Homo sapien
cttgtgctagggccatgctaacctc

SEQ ID NO: 3573821 - DNA, 25 bp, Homo sapien
gcctgtcatccttgtgctagggcca

SEQ ID NO: 3573822 - DNA, 25 bp, Homo sapien
ttgcctgtcatccttgtgctagggc

SEQ ID NO: 3573823 - DNA, 25 bp, Homo sapien
tgtgctagggccatgctaacctctg

SEQ ID NO: 3573824 - DNA, 25 bp, Homo sapien
caccgactgatttagtagcttaaca

SEQ ID NO: 3573825 - DNA, 25 bp, Homo sapien
caactgccgtattgttggtggagtg

SEQ ID NO: 3573826 - DNA, 25 bp, Homo sapien
acagactactagttgccacgtgcag

SEQ ID NO: 3573827 - DNA, 25 bp, Homo sapien
gattctgatgtcttattcccactgc

SEQ ID NO: 3573828 - DNA, 25 bp, Homo sapien
tgaaacctgaccataacctctgagg

SEQ ID NO: 3573829 - DNA, 25 bp, Homo sapien
tccccaagggatatatcattctcag

SEQ ID NO: 3573830 - DNA, 25 bp, Homo sapien
cattactccggtactacaggtagag

SEQ ID NO: 3573831 - DNA, 25 bp, Homo sapien
gacatatttccactgcagactgcaa

SEQ ID NO: 3573832 - DNA, 25 bp, Homo sapien
tatagtatagctttgggccatgtag

SEQ ID NO: 3573833 - DNA, 25 bp, Homo sapien
tgatgtctagctgtagtctccttga

SEQ ID NO: 3573834 - DNA, 25 bp, Homo sapien
tacaacttcttgtgtatgacagctt

SEQ ID NO: 3573835 - DNA, 25 bp, Homo sapien
cacagatatgagaagttgtagctct

SEQ ID NO: 3573836 - DNA, 25 bp, Homo sapien
gactgaataaccctctccatgatga

SEQ ID NO: 3573837 - DNA, 25 bp, Homo sapien
cacaagggtctcgaggcttgcagat

SEQ ID NO: 3573838 - DNA, 25 bp, Homo sapien
gttgatatatgtcctgtaatttgtg

SEQ ID NO: 3573839 - DNA, 25 bp, Homo sapien
ccatgatgatcccttagagttcccc

SEQ ID NO: 3573840 - DNA, 25 bp, Homo sapien
aacttggactttaataggcctgttg

SEQ ID NO: 3573841 - DNA, 25 bp, Homo sapien
cttggactttaataggcctgttgtt

SEQ ID NO: 3573842 - DNA, 25 bp, Homo sapien
tggactttaataggcctgttgttat

SEQ ID NO: 3573843 - DNA, 25 bp, Homo sapien
agaaacttggactttaataggcctg

SEQ ID NO: 3573844 - DNA, 25 bp, Homo sapien
cattgctatgaataagggtgtgaaa

SEQ ID NO: 3573845 - DNA, 25 bp, Homo sapien
catccccaccgacatttgtcatttt

SEQ ID NO: 3573846 - DNA, 25 bp, Homo sapien
tttaattcttttggacataaacaca

SEQ ID NO: 3573847 - DNA, 25 bp, Homo sapien
ttcctaccaacagtacacagtggtt

SEQ ID NO: 3573848 - DNA, 25 bp, Homo sapien
gggccctgggacctattccatgata

SEQ ID NO: 3573849 - DNA, 25 bp, Homo sapien
ggagctgttccctgaaacctgtggg

SEQ ID NO: 3573850 - DNA, 25 bp, Homo sapien
cacaggccggcacttagcttgtgga

SEQ ID NO: 3573851 - DNA, 25 bp, Homo sapien
gatagtggtaccctaactgaaccca

SEQ ID NO: 3573852 - DNA, 25 bp, Homo sapien
aaaacaccttgagattattctcaac

SEQ ID NO: 3573853 - DNA, 25 bp, Homo sapien
caaaacaccttgagattattctcaa

SEQ ID NO: 3573854 - DNA, 25 bp, Homo sapien
aaacaccttgagattattctcaact

SEQ ID NO: 3573855 - DNA, 25 bp, Homo sapien
tcaaaacaccttgagattattctca

SEQ ID NO: 3573856 - DNA, 25 bp, Homo sapien
gccttgatagaatccccacttgctc

SEQ ID NO: 3573857 - DNA, 25 bp, Homo sapien
cccacttgctcattgcctggcttgg

SEQ ID NO: 3573858 - DNA, 25 bp, Homo sapien
tttgcatgcactctcttgcctctat

SEQ ID NO: 3573859 - DNA, 25 bp, Homo sapien
gcctctattgcctcaagaagccttg

SEQ ID NO: 3573860 - DNA, 25 bp, Homo sapien
gatagtccctgagtgacgtgtccag

SEQ ID NO: 3573861 - DNA, 25 bp, Homo sapien
gacttagcgggtggtaattcctcac

SEQ ID NO: 3573862 - DNA, 25 bp, Homo sapien
gattccttggttgattgatagtccc

SEQ ID NO: 3573863 - DNA, 25 bp, Homo sapien
tactccagtcaacaaagctgcatgg

SEQ ID NO: 3573864 - DNA, 25 bp, Homo sapien
tttgcatgctaaccatgatgcagcc

SEQ ID NO: 3573865 - DNA, 25 bp, Homo sapien
gatgcagcctctttaaagtcacaca

SEQ ID NO: 3573866 - DNA, 25 bp, Homo sapien
catccgtaggcttgggtgagcatca

SEQ ID NO: 3573867 - DNA, 25 bp, Homo sapien
ggatctagatcgactgacagagaca

SEQ ID NO: 3573868 - DNA, 25 bp, Homo sapien
attcctactgatattctttccaata

SEQ ID NO: 3573869 - DNA, 25 bp, Homo sapien
gtaacatcatagcatgagcacagat

SEQ ID NO: 3573870 - DNA, 25 bp, Homo sapien
tggaattcctactgatattctttcc

SEQ ID NO: 3573871 - DNA, 25 bp, Homo sapien
gaattcctactgatattctttccaa

SEQ ID NO: 3573872 - DNA, 25 bp, Homo sapien
acagctggtctgtaagactctgggc

SEQ ID NO: 3573873 - DNA, 25 bp, Homo sapien
tctgtggacaaagagacctcgagtt

SEQ ID NO: 3573874 - DNA, 25 bp, Homo sapien
gatgtttcaccacccatacagctgg

SEQ ID NO: 3573875 - DNA, 25 bp, Homo sapien
ggctcagccgaggactggatagtct

SEQ ID NO: 3573876 - DNA, 25 bp, Homo sapien
gtctcctggagctgacccttgctca

SEQ ID NO: 3573877 - DNA, 25 bp, Homo sapien
tcctggagctgacccttgctcatat

SEQ ID NO: 3573878 - DNA, 25 bp, Homo sapien
tctcctggagctgacccttgctcat

SEQ ID NO: 3573879 - DNA, 25 bp, Homo sapien
cctggagctgacccttgctcatatc

SEQ ID NO: 3573880 - DNA, 25 bp, Homo sapien
tttctggcaggcacgcccagcttct

SEQ ID NO: 3573881 - DNA, 25 bp, Homo sapien
ctatgcagggcttgggcacattctc

SEQ ID NO: 3573882 - DNA, 25 bp, Homo sapien
cctgtgagttctcggcacagcaaac

SEQ ID NO: 3573883 - DNA, 25 bp, Homo sapien
gaggctccctttctggcaggcacgc

SEQ ID NO: 3573884 - DNA, 25 bp, Homo sapien
tcctaatgaataactcagtcctggc

SEQ ID NO: 3573885 - DNA, 25 bp, Homo sapien
gttgaatacaatccaggctagactg

SEQ ID NO: 3573886 - DNA, 25 bp, Homo sapien
tgaaagtatagtgggccctaggcac

SEQ ID NO: 3573887 - DNA, 25 bp, Homo sapien
cagataagtcctttccagagtcaca

SEQ ID NO: 3573888 - DNA, 25 bp, Homo sapien
tattgatgtttatgagagaagatga

SEQ ID NO: 3573889 - DNA, 25 bp, Homo sapien
tgagtgttctaactactgggctttc

SEQ ID NO: 3573890 - DNA, 25 bp, Homo sapien
gaggactacctaggacaatattttg

SEQ ID NO: 3573891 - DNA, 25 bp, Homo sapien
acttttccctctatgttattgatgt

SEQ ID NO: 3573892 - DNA, 25 bp, Homo sapien
cacataggctatggcaatggatgaa

SEQ ID NO: 3573893 - DNA, 25 bp, Homo sapien
cattgcccatgacgtggaagtctag

SEQ ID NO: 3573894 - DNA, 25 bp, Homo sapien
agcgtccttcttggcagttgatgca

SEQ ID NO: 3573895 - DNA, 25 bp, Homo sapien
gatgacagggttgagaacaggtgtg

SEQ ID NO: 3573896 - DNA, 25 bp, Homo sapien
ggaggaaggacaccaccatggcgat

SEQ ID NO: 3573897 - DNA, 25 bp, Homo sapien
aaggacaccaccatggcgatgcaga

SEQ ID NO: 3573898 - DNA, 25 bp, Homo sapien
accatggcgatgcagaagcccatga

SEQ ID NO: 3573899 - DNA, 25 bp, Homo sapien
ggacaccaccatggcgatgcagaag

SEQ ID NO: 3573900 - DNA, 25 bp, Homo sapien
tgggggtggtgtcagagcaggaggc

SEQ ID NO: 3573901 - DNA, 25 bp, Homo sapien
gggtggtgtcagagcaggaggcctg

SEQ ID NO: 3573902 - DNA, 25 bp, Homo sapien
tggtgtcagagcaggaggcctggac

SEQ ID NO: 3573903 - DNA, 25 bp, Homo sapien
ctgggggtggtgtcagagcaggagg

SEQ ID NO: 3573904 - DNA, 25 bp, Homo sapien
tggtagatgtggacaatgatgtcaa

SEQ ID NO: 3573905 - DNA, 25 bp, Homo sapien
tggacaatgatgtcaaatgccatct

SEQ ID NO: 3573906 - DNA, 25 bp, Homo sapien
aagcagtggtagatgtggacaatga

SEQ ID NO: 3573907 - DNA, 25 bp, Homo sapien
gatgtggacaatgatgtcaaatgcc

SEQ ID NO: 3573908 - DNA, 25 bp, Homo sapien
agctgtccccaaacaagaacaggga

SEQ ID NO: 3573909 - DNA, 25 bp, Homo sapien
tgaggagtcccctgatccattacag

SEQ ID NO: 3573910 - DNA, 25 bp, Homo sapien
aaaggtattacccatcaggatgagc

SEQ ID NO: 3573911 - DNA, 25 bp, Homo sapien
actggttgtcaagacagtgttggtc

SEQ ID NO: 3573912 - DNA, 25 bp, Homo sapien
attttctgagtgtccctctgcattt

SEQ ID NO: 3573913 - DNA, 25 bp, Homo sapien
tgcattttgcagagtgggggttcag

SEQ ID NO: 3573914 - DNA, 25 bp, Homo sapien
gatacagatgtcacatgacccacac

SEQ ID NO: 3573915 - DNA, 25 bp, Homo sapien
agtgggggttcagatacagatgtca

SEQ ID NO: 3573916 - DNA, 25 bp, Homo sapien
aagggtgagggctctcgcactgagg

SEQ ID NO: 3573917 - DNA, 25 bp, Homo sapien
ctaagggtgagggctctcgcactga

SEQ ID NO: 3573918 - DNA, 25 bp, Homo sapien
ggtgagggctctcgcactgagggag

SEQ ID NO: 3573919 - DNA, 25 bp, Homo sapien
agggctctcgcactgagggagcact

SEQ ID NO: 3573920 - DNA, 25 bp, Homo sapien
tttgctttaatgtcgtctacaaaac

SEQ ID NO: 3573921 - DNA, 25 bp, Homo sapien
ttaatgtcgtctacaaaactaggtc

SEQ ID NO: 3573922 - DNA, 25 bp, Homo sapien
gctttaatgtcgtctacaaaactag

SEQ ID NO: 3573923 - DNA, 25 bp, Homo sapien
aatgtcgtctacaaaactaggtcct

SEQ ID NO: 3573924 - DNA, 25 bp, Homo sapien
cggcctttagttcacaactgaaaag

SEQ ID NO: 3573925 - DNA, 25 bp, Homo sapien
tcagggggctcatgtccaggtccat

SEQ ID NO: 3573926 - DNA, 25 bp, Homo sapien
ggcctcagggggctcatgtccaggt

SEQ ID NO: 3573927 - DNA, 25 bp, Homo sapien
cctcagggggctcatgtccaggtcc

SEQ ID NO: 3573928 - DNA, 25 bp, Homo sapien
cctgtcacagcctgggtcttgagac

SEQ ID NO: 3573929 - DNA, 25 bp, Homo sapien
ctgtcacagcctgggtcttgagaca

SEQ ID NO: 3573930 - DNA, 25 bp, Homo sapien
ctgttatatgccatctgggaggtcc

SEQ ID NO: 3573931 - DNA, 25 bp, Homo sapien
aaactttggaagaggtacatctgca

SEQ ID NO: 3573932 - DNA, 25 bp, Homo sapien
tctagggaactgatgcgaagcactg

SEQ ID NO: 3573933 - DNA, 25 bp, Homo sapien
tgggaggtccttactactgctggga

SEQ ID NO: 3573934 - DNA, 25 bp, Homo sapien
gggatgcccaatagatagaagacgg

SEQ ID NO: 3573935 - DNA, 25 bp, Homo sapien
gaagacgggtgagccatccactgat

SEQ ID NO: 3573936 - DNA, 25 bp, Homo sapien
tccactgattcattacaggctgtgg

SEQ ID NO: 3573937 - DNA, 25 bp, Homo sapien
tgattcattacaggctgtggcatcc

SEQ ID NO: 3573938 - DNA, 25 bp, Homo sapien
ccgtgggaccagataactgccagtc

SEQ ID NO: 3573939 - DNA, 25 bp, Homo sapien
gataactgccagtcagctgagaaca

SEQ ID NO: 3573940 - DNA, 25 bp, Homo sapien
gccagtcagctgagaacaacttccg

SEQ ID NO: 3573941 - DNA, 25 bp, Homo sapien
tgagaacaacttccgagggtggagt

SEQ ID NO: 3573942 - DNA, 25 bp, Homo sapien
aaggagcagtcacgagggccattgt

SEQ ID NO: 3573943 - DNA, 25 bp, Homo sapien
gccaaaaggagcagtcacgagggcc

SEQ ID NO: 3573944 - DNA, 25 bp, Homo sapien
aaagccaaaaggagcagtcacgagg

SEQ ID NO: 3573945 - DNA, 25 bp, Homo sapien
aaaaggagcagtcacgagggccatt

SEQ ID NO: 3573946 - DNA, 25 bp, Homo sapien
gattttcttggaactacgtctacat

SEQ ID NO: 3573947 - DNA, 25 bp, Homo sapien
cagcttcaggtccacatccacattg

SEQ ID NO: 3573948 - DNA, 25 bp, Homo sapien
tgctctttgacctccactgattcca

SEQ ID NO: 3573949 - DNA, 25 bp, Homo sapien
gattccatgagcagtttgtctttga

SEQ ID NO: 3573950 - DNA, 25 bp, Homo sapien
aagggtgagggctctcgcactgagg

SEQ ID NO: 3573951 - DNA, 25 bp, Homo sapien
ctaagggtgagggctctcgcactga

SEQ ID NO: 3573952 - DNA, 25 bp, Homo sapien
ggtgagggctctcgcactgagggag

SEQ ID NO: 3573953 - DNA, 25 bp, Homo sapien
agggctctcgcactgagggagcact

SEQ ID NO: 3573954 - DNA, 25 bp, Homo sapien
ccaaatacagtctgttttatggtca

SEQ ID NO: 3573955 - DNA, 25 bp, Homo sapien
tctgattcgcaaagagtgagactgt

SEQ ID NO: 3573956 - DNA, 25 bp, Homo sapien
aaaactgcagcttaatcaaatactg

SEQ ID NO: 3573957 - DNA, 25 bp, Homo sapien
ggtcagtgttgctctgattcgcaaa

SEQ ID NO: 3573958 - DNA, 25 bp, Homo sapien
tcaactgaattatttcaggtacttg

SEQ ID NO: 3573959 - DNA, 25 bp, Homo sapien
tattgaggaatcaactgaattattt

SEQ ID NO: 3573960 - DNA, 25 bp, Homo sapien
ctattgaggaatcaactgaattatt

SEQ ID NO: 3573961 - DNA, 25 bp, Homo sapien
actgaattatttcaggtacttgttg

SEQ ID NO: 3573962 - DNA, 25 bp, Homo sapien
tctcacagagtctggttctacagat

SEQ ID NO: 3573963 - DNA, 25 bp, Homo sapien
ctcacagagtctggttctacagatg

SEQ ID NO: 3573964 - DNA, 25 bp, Homo sapien
tgagtagtaggtgcccactaccggg

SEQ ID NO: 3573965 - DNA, 25 bp, Homo sapien
cccactaccgggagatgggagctgc

SEQ ID NO: 3573966 - DNA, 25 bp, Homo sapien
agtaggtgcccactaccgggagatg

SEQ ID NO: 3573967 - DNA, 25 bp, Homo sapien
tgcccactaccgggagatgggagct

SEQ ID NO: 3573968 - DNA, 25 bp, Homo sapien
gttaatgcgaagcaccgaggtcaag

SEQ ID NO: 3573969 - DNA, 25 bp, Homo sapien
ggacaccaccatggcgatgcagaaa

SEQ ID NO: 3573970 - DNA, 25 bp, Homo sapien
cttgggagttaatgcgaagcaccga

SEQ ID NO: 3573971 - DNA, 25 bp, Homo sapien
accatggcgatgcagaaacccatga

SEQ ID NO: 3573972 - DNA, 25 bp, Homo sapien
ggtggtatcagagcaggaggcctgg

SEQ ID NO: 3573973 - DNA, 25 bp, Homo sapien
gtggtatcagagcaggaggcctgga

SEQ ID NO: 3573974 - DNA, 25 bp, Homo sapien
gggtggtatcagagcaggaggcctg

SEQ ID NO: 3573975 - DNA, 25 bp, Homo sapien
tggtatcagagcaggaggcctggac

SEQ ID NO: 3573976 - DNA, 25 bp, Homo sapien
aatgccatctgggaggtctgtacta

SEQ ID NO: 3573977 - DNA, 25 bp, Homo sapien
gaagcagtggtagatgtcagcaatg

SEQ ID NO: 3573978 - DNA, 25 bp, Homo sapien
caatgctgtcaaatgccatctggga

SEQ ID NO: 3573979 - DNA, 25 bp, Homo sapien
gccagatgatcacagaagcagtggt

SEQ ID NO: 3573980 - DNA, 25 bp, Homo sapien
aggaggagggcagtgagccaggcac

SEQ ID NO: 3573981 - DNA, 25 bp, Homo sapien
gggcaggaggagggcagtgagccag

SEQ ID NO: 3573982 - DNA, 25 bp, Homo sapien
gcaggaggagggcagtgagccaggc

SEQ ID NO: 3573983 - DNA, 25 bp, Homo sapien
ctggaatgggcaggaggagggcagt

SEQ ID NO: 3573984 - DNA, 25 bp, Homo sapien
ggtctgtgggttcatgagaacaggg

SEQ ID NO: 3573985 - DNA, 25 bp, Homo sapien
cggttgccaagacagcattggtctg

SEQ ID NO: 3573986 - DNA, 25 bp, Homo sapien
ctgtagtggagaggatgtctagggc

SEQ ID NO: 3573987 - DNA, 25 bp, Homo sapien
gaagctgtggaacaggtacatctgt

SEQ ID NO: 3573988 - DNA, 25 bp, Homo sapien
cacaattcgtgggtaggaagcagcc

SEQ ID NO: 3573989 - DNA, 25 bp, Homo sapien
tagtggttaaatgctccgatcttgg

SEQ ID NO: 3573990 - DNA, 25 bp, Homo sapien
gatcttggtgccagactaatttgga

SEQ ID NO: 3573991 - DNA, 25 bp, Homo sapien
gacggcctatcctcacttaagactg

SEQ ID NO: 3573992 - DNA, 25 bp, Homo sapien
actcccccaggtgtgcgaggctccg

SEQ ID NO: 3573993 - DNA, 25 bp, Homo sapien
gcgaggctccgacagacgcgagagg

SEQ ID NO: 3573994 - DNA, 25 bp, Homo sapien
gtgcgaggctccgacagacgcgaga

SEQ ID NO: 3573995 - DNA, 25 bp, Homo sapien
ccaggtgtgcgaggctccgacagac

SEQ ID NO: 3573996 - DNA, 25 bp, Homo sapien
taagcgtcctgtctggacccagctc

SEQ ID NO: 3573997 - DNA, 25 bp, Homo sapien
ctctaagcgtcctgtctggacccag

SEQ ID NO: 3573998 - DNA, 25 bp, Homo sapien
tgtggccctctaagcgtcctgtctg

SEQ ID NO: 3573999 - DNA, 25 bp, Homo sapien
ggccctctaagcgtcctgtctggac

SEQ ID NO: 3574000 - DNA, 25 bp, Homo sapien
cctctgcttccagaattataagagt

SEQ ID NO: 3574001 - DNA, 25 bp, Homo sapien
tctgcttccagaattataagagtca

SEQ ID NO: 3574002 - DNA, 25 bp, Homo sapien
atcctctgcttccagaattataaga

SEQ ID NO: 3574003 - DNA, 25 bp, Homo sapien
tgcttccagaattataagagtcatc

SEQ ID NO: 3574004 - DNA, 25 bp, Homo sapien
aagagtctgtaagcctgtgatgtcc

SEQ ID NO: 3574005 - DNA, 25 bp, Homo sapien
ctaaaagtctgtgcctcgaatggtc

SEQ ID NO: 3574006 - DNA, 25 bp, Homo sapien
gactctgtgaccatagagaccagga

SEQ ID NO: 3574007 - DNA, 25 bp, Homo sapien
tcgaatggtctatgactccccaaat

SEQ ID NO: 3574008 - DNA, 25 bp, Homo sapien
gagccagaggttcagatgttcttca

SEQ ID NO: 3574009 - DNA, 25 bp, Homo sapien
gagggaacttacatacagggtggtc

SEQ ID NO: 3574010 - DNA, 25 bp, Homo sapien
cctgtgtttcatgggatgagccaga

SEQ ID NO: 3574011 - DNA, 25 bp, Homo sapien
gaaaagacccggagtgagcaaacaa

SEQ ID NO: 3574012 - DNA, 25 bp, Homo sapien
gttgttctgattctaacgcctctga

SEQ ID NO: 3574013 - DNA, 25 bp, Homo sapien
tggagccaagccgtctggattcaaa

SEQ ID NO: 3574014 - DNA, 25 bp, Homo sapien
ttgtattcagatgaccctgtgccca

SEQ ID NO: 3574015 - DNA, 25 bp, Homo sapien
cctcatctaaaaagtgtgcacggta

SEQ ID NO: 3574016 - DNA, 25 bp, Homo sapien
ggtgaggcccaacacctgccttagg

SEQ ID NO: 3574017 - DNA, 25 bp, Homo sapien
cactgattcctacacattgccaaga

SEQ ID NO: 3574018 - DNA, 25 bp, Homo sapien
caagatttcacacatgtgaccaggg

SEQ ID NO: 3574019 - DNA, 25 bp, Homo sapien
acatgtggcccttgccttctgagca

SEQ ID NO: 3574020 - DNA, 25 bp, Homo sapien
tctcatagaatttctgagggtcaag

SEQ ID NO: 3574021 - DNA, 25 bp, Homo sapien
tctgtaccttgttggcagttgacca

SEQ ID NO: 3574022 - DNA, 25 bp, Homo sapien
gaacccacagatgggctaactggaa

SEQ ID NO: 3574023 - DNA, 25 bp, Homo sapien
ttcattcgatgattgctgttgggcc

SEQ ID NO: 3574024 - DNA, 25 bp, Homo sapien
cacagactttcttgcctgaagatgg

SEQ ID NO: 3574025 - DNA, 25 bp, Homo sapien
agactttcttgcctgaagatggagg

SEQ ID NO: 3574026 - DNA, 25 bp, Homo sapien
ccttcattcatatcacagactttct

SEQ ID NO: 3574027 - DNA, 25 bp, Homo sapien
cccttcattcatatcacagactttc

SEQ ID NO: 3574028 - DNA, 25 bp, Homo sapien
ggttatctccggctgaccactcaga

SEQ ID NO: 3574029 - DNA, 25 bp, Homo sapien
tgtgtatggtatcaagcccttctgc

SEQ ID NO: 3574030 - DNA, 25 bp, Homo sapien
tgcagcattcactatccgaggtggt

SEQ ID NO: 3574031 - DNA, 25 bp, Homo sapien
tgtgcccacgtcttgtaacaatgtg

SEQ ID NO: 3574032 - DNA, 25 bp, Homo sapien
tgaggtcacaccagatcaaccatgg

SEQ ID NO: 3574033 - DNA, 25 bp, Homo sapien
ccaggagaatttagacgggaagcac

SEQ ID NO: 3574034 - DNA, 25 bp, Homo sapien
tctaagatggagagcgctgttcctc

SEQ ID NO: 3574035 - DNA, 25 bp, Homo sapien
gggcaatgccttacccagggtctgg

SEQ ID NO: 3574036 - DNA, 25 bp, Homo sapien
gcctcacgcacaaccacatcgaggt

SEQ ID NO: 3574037 - DNA, 25 bp, Homo sapien
tgctggccgcgctggacgctgcgct

SEQ ID NO: 3574038 - DNA, 25 bp, Homo sapien
tgcagctcaaccacgcgctggtgcg

SEQ ID NO: 3574039 - DNA, 25 bp, Homo sapien
ggaggacggcgccttcgacgggctg

SEQ ID NO: 3574040 - DNA, 25 bp, Homo sapien
ggtataacagataaacctggcaggt

SEQ ID NO: 3574041 - DNA, 25 bp, Homo sapien
aaaataatcactcaacacaagggcc

SEQ ID NO: 3574042 - DNA, 25 bp, Homo sapien
caaaagacctttaatggcctcctat

SEQ ID NO: 3574043 - DNA, 25 bp, Homo sapien
taataacttgtctgacataataaga

SEQ ID NO: 3574044 - DNA, 25 bp, Homo sapien
ttaacactgagcagagatgcccggg

SEQ ID NO: 3574045 - DNA, 25 bp, Homo sapien
cagggaaactaaggacacactcgga

SEQ ID NO: 3574046 - DNA, 25 bp, Homo sapien
cactcggaccgaatgtaatacaccc

SEQ ID NO: 3574047 - DNA, 25 bp, Homo sapien
cataccccgagtttgtgaggcaccc

SEQ ID NO: 3574048 - DNA, 25 bp, Homo sapien
tgtggctcggctctcaggacaaaag

SEQ ID NO: 3574049 - DNA, 25 bp, Homo sapien
gacactttgtactggaacgctggag

SEQ ID NO: 3574050 - DNA, 25 bp, Homo sapien
ttgaagccgctgtgcagtgaccctg

SEQ ID NO: 3574051 - DNA, 25 bp, Homo sapien
gcttggaaacatgacctgcggcttc

SEQ ID NO: 3574052 - DNA, 25 bp, Homo sapien
tacaacgtttccctgaccatgggct

SEQ ID NO: 3574053 - DNA, 25 bp, Homo sapien
agaaatttgctaaataacactgggc

SEQ ID NO: 3574054 - DNA, 25 bp, Homo sapien
caaaggatggtaggctgaattcaac

SEQ ID NO: 3574055 - DNA, 25 bp, Homo sapien
agtgctctgatccttccctgcagct

SEQ ID NO: 3574056 - DNA, 25 bp, Homo sapien
taggaaggcccattgtgatcatctg

SEQ ID NO: 3574057 - DNA, 25 bp, Homo sapien
tcaacgcggtcatcttttagctgcc

SEQ ID NO: 3574058 - DNA, 25 bp, Homo sapien
taagcatccgagtgcacgagagtgg

SEQ ID NO: 3574059 - DNA, 25 bp, Homo sapien
cagtaagttattctcaaaggccagg

SEQ ID NO: 3574060 - DNA, 25 bp, Homo sapien
gtctctggcgagcaaagtcctcaaa

SEQ ID NO: 3574061 - DNA, 25 bp, Homo sapien
atccttcatgcctttcagtctctgg

SEQ ID NO: 3574062 - DNA, 25 bp, Homo sapien
tgttgagctgtggagagccggtacc

SEQ ID NO: 3574063 - DNA, 25 bp, Homo sapien
ctgttgttgagctgtggagagccgg

SEQ ID NO: 3574064 - DNA, 25 bp, Homo sapien
gtgtcagctcagattctaccttggg

SEQ ID NO: 3574065 - DNA, 25 bp, Homo sapien
ttaggaagcattcccgtttctggac

SEQ ID NO: 3574066 - DNA, 25 bp, Homo sapien
tgaagaacctttctcccagaagtgt

SEQ ID NO: 3574067 - DNA, 25 bp, Homo sapien
gccaccagtagtttcacagcatgtt

SEQ ID NO: 3574068 - DNA, 25 bp, Homo sapien
ttggtatctactggcgtctcgttct

SEQ ID NO: 3574069 - DNA, 25 bp, Homo sapien
tttgtgtcaagttctatgagattgg

SEQ ID NO: 3574070 - DNA, 25 bp, Homo sapien
caagttctatgagattggtatctac

SEQ ID NO: 3574071 - DNA, 25 bp, Homo sapien
tctatgagattggtatctactggcg

SEQ ID NO: 3574072 - DNA, 25 bp, Homo sapien
ggtgcattagggtgaagggcagttc

SEQ ID NO: 3574073 - DNA, 25 bp, Homo sapien
gaagggcagttccacggccacgtcg

SEQ ID NO: 3574074 - DNA, 25 bp, Homo sapien
cattagggtgaagggcagttccacg

SEQ ID NO: 3574075 - DNA, 25 bp, Homo sapien
gtgaagggcagttccacggccacgt

SEQ ID NO: 3574076 - DNA, 25 bp, Homo sapien
gacccagtgagccttgagcggactc

SEQ ID NO: 3574077 - DNA, 25 bp, Homo sapien
agtgagccttgagcggactcacagg

SEQ ID NO: 3574078 - DNA, 25 bp, Homo sapien
agccttgagcggactcacaggctgt

SEQ ID NO: 3574079 - DNA, 25 bp, Homo sapien
ccagtgagccttgagcggactcaca

SEQ ID NO: 3574080 - DNA, 25 bp, Homo sapien
agttctgccactcggagcctcggtc

SEQ ID NO: 3574081 - DNA, 25 bp, Homo sapien
ggtagatccaaaagatgccctccag

SEQ ID NO: 3574082 - DNA, 25 bp, Homo sapien
gagctggacgaggagacttcctctg

SEQ ID NO: 3574083 - DNA, 25 bp, Homo sapien
ttttgccgtcagaggaggtagatcc

SEQ ID NO: 3574084 - DNA, 25 bp, Homo sapien
tctggatcttaaccttctaccgggc

SEQ ID NO: 3574085 - DNA, 25 bp, Homo sapien
gattctggtcagtcaagccaatggg

SEQ ID NO: 3574086 - DNA, 25 bp, Homo sapien
ccaggaacgataaggtcagggacca

SEQ ID NO: 3574087 - DNA, 25 bp, Homo sapien
gatttcttaggatgagccacactgc

SEQ ID NO: 3574088 - DNA, 25 bp, Homo sapien
gcacctgggacgctcccctctgcac

SEQ ID NO: 3574089 - DNA, 25 bp, Homo sapien
cctctgcactccggggtcttgggct

SEQ ID NO: 3574090 - DNA, 25 bp, Homo sapien
ccctctgcactccggggtcttgggc

SEQ ID NO: 3574091 - DNA, 25 bp, Homo sapien
tttgtaggaaacaatgatccccagg

SEQ ID NO: 3574092 - DNA, 25 bp, Homo sapien
tgtaggaaacaatgatccccaggat

SEQ ID NO: 3574093 - DNA, 25 bp, Homo sapien
ggaaacaatgatccccaggatctca

SEQ ID NO: 3574094 - DNA, 25 bp, Homo sapien
cactttgtaggaaacaatgatcccc

SEQ ID NO: 3574095 - DNA, 25 bp, Homo sapien
tctctcggttattggctaggaaggg

SEQ ID NO: 3574096 - DNA, 25 bp, Homo sapien
cttgagcttcccgtccaaggcgagg

SEQ ID NO: 3574097 - DNA, 25 bp, Homo sapien
tagaccttgcagaacgtcgagctgg

SEQ ID NO: 3574098 - DNA, 25 bp, Homo sapien
ggtgctagaggccaagttcgtgtct

SEQ ID NO: 3574099 - DNA, 25 bp, Homo sapien
gcccagctcgggcaaggagaccact

SEQ ID NO: 3574100 - DNA, 25 bp, Homo sapien
tacattctacgcacaaacaggactg

SEQ ID NO: 3574101 - DNA, 25 bp, Homo sapien
gaatatctagtctgagcctgctcca

SEQ ID NO: 3574102 - DNA, 25 bp, Homo sapien
tgccactcaaaagaggcacatctac

SEQ ID NO: 3574103 - DNA, 25 bp, Homo sapien
atggcaacagggcacttgtactgag

SEQ ID NO: 3574104 - DNA, 25 bp, Homo sapien
catggcaacagggcacttgtactga

SEQ ID NO: 3574105 - DNA, 25 bp, Homo sapien
ttgaaaaggcagatgtctgcatact

SEQ ID NO: 3574106 - DNA, 25 bp, Homo sapien
ttgtactgagctgtgttgaaaaggc

SEQ ID NO: 3574107 - DNA, 25 bp, Homo sapien
tgatgggttctccatggtaatagat

SEQ ID NO: 3574108 - DNA, 25 bp, Homo sapien
gacgctgatgggttctccatggtaa

SEQ ID NO: 3574109 - DNA, 25 bp, Homo sapien
gttggtgacgtggacgttgacgctg

SEQ ID NO: 3574110 - DNA, 25 bp, Homo sapien
tgacgtggacgttgacgctgatggg

SEQ ID NO: 3574111 - DNA, 25 bp, Homo sapien
cataagaagggacggggttggctgg

SEQ ID NO: 3574112 - DNA, 25 bp, Homo sapien
ggttggctgggaggacagcaaggtt

SEQ ID NO: 3574113 - DNA, 25 bp, Homo sapien
gcataagaagggacggggttggctg

SEQ ID NO: 3574114 - DNA, 25 bp, Homo sapien
cggggttggctgggaggacagcaag

SEQ ID NO: 3574115 - DNA, 25 bp, Homo sapien
gggcatactgaaccttccggatgac

SEQ ID NO: 3574116 - DNA, 25 bp, Homo sapien
gcttgtccgacatgaggaactgcct

SEQ ID NO: 3574117 - DNA, 25 bp, Homo sapien
ccggatgaccagacgcacagaattc

SEQ ID NO: 3574118 - DNA, 25 bp, Homo sapien
gagaggcttctaggtgcaagggctt

SEQ ID NO: 3574119 - DNA, 25 bp, Homo sapien
ctcctcccacatcccacagcaccct

SEQ ID NO: 3574120 - DNA, 25 bp, Homo sapien
caagcctcctcccacatcccacagc

SEQ ID NO: 3574121 - DNA, 25 bp, Homo sapien
cctcccacatcccacagcacccttc

SEQ ID NO: 3574122 - DNA, 25 bp, Homo sapien
cccttcctcttccctggtctcaggt

SEQ ID NO: 3574123 - DNA, 25 bp, Homo sapien
ctccctcacccagcaggcggcccac

SEQ ID NO: 3574124 - DNA, 25 bp, Homo sapien
agcaggcggcccacaccctggcatc

SEQ ID NO: 3574125 - DNA, 25 bp, Homo sapien
ggcccacaccctggcatcctactca

SEQ ID NO: 3574126 - DNA, 25 bp, Homo sapien
ccctccctcacccagcaggcggccc

SEQ ID NO: 3574127 - DNA, 25 bp, Homo sapien
gaaggctttgacttcatagtccaca

SEQ ID NO: 3574128 - DNA, 25 bp, Homo sapien
tgacttcatagtccacaccgcaagc

SEQ ID NO: 3574129 - DNA, 25 bp, Homo sapien
ccgcgcagaaggctttgacttcata

SEQ ID NO: 3574130 - DNA, 25 bp, Homo sapien
aaattctccgcgcagaaggctttga

SEQ ID NO: 3574131 - DNA, 25 bp, Homo sapien
gcttagcctagacacaaagactgtt

SEQ ID NO: 3574132 - DNA, 25 bp, Homo sapien
gggatgatcgcactttgattccagg

SEQ ID NO: 3574133 - DNA, 25 bp, Homo sapien
gtaggtcctcagaacactttggtcc

SEQ ID NO: 3574134 - DNA, 25 bp, Homo sapien
tccaaggtgggaccagcttagccta

SEQ ID NO: 3574135 - DNA, 25 bp, Homo sapien
cacagaacatggaaggtttggaggg

SEQ ID NO: 3574136 - DNA, 25 bp, Homo sapien
gtcacagaacatggaaggtttggag

SEQ ID NO: 3574137 - DNA, 25 bp, Homo sapien
tcacagaacatggaaggtttggagg

SEQ ID NO: 3574138 - DNA, 25 bp, Homo sapien
cagaacatggaaggtttggagggat

SEQ ID NO: 3574139 - DNA, 25 bp, Homo sapien
cctgtctcatgtattgcagcccaga

SEQ ID NO: 3574140 - DNA, 25 bp, Homo sapien
gtctcatgtattgcagcccagacac

SEQ ID NO: 3574141 - DNA, 25 bp, Homo sapien
aggacagaacgagccacctgtcaca

SEQ ID NO: 3574142 - DNA, 25 bp, Homo sapien
ggaacgactgtacgttggccacaaa

SEQ ID NO: 3574143 - DNA, 25 bp, Homo sapien
gaaggcgcaggtcagcgtcacatag

SEQ ID NO: 3574144 - DNA, 25 bp, Homo sapien
aaacaggtccttgcgaaaggtcagg

SEQ ID NO: 3574145 - DNA, 25 bp, Homo sapien
tcttgatgaggcgttcctgcagccg

SEQ ID NO: 3574146 - DNA, 25 bp, Homo sapien
agccccccagagtgccggcagcagc

SEQ ID NO: 3574147 - DNA, 25 bp, Homo sapien
gccccccagagtgccggcagcagcc

SEQ ID NO: 3574148 - DNA, 25 bp, Homo sapien
ggtatggaaacggtctgacaggctt

SEQ ID NO: 3574149 - DNA, 25 bp, Homo sapien
atggaaacggtctgacaggcttggc

SEQ ID NO: 3574150 - DNA, 25 bp, Homo sapien
ctctccccagggcatatgtggaggg

SEQ ID NO: 3574151 - DNA, 25 bp, Homo sapien
ggctggagtagtctggcaggcctgg

SEQ ID NO: 3574152 - DNA, 25 bp, Homo sapien
ctttgagatactcaggatccaccag

SEQ ID NO: 3574153 - DNA, 25 bp, Homo sapien
tttgagatactcaggatccaccagg

SEQ ID NO: 3574154 - DNA, 25 bp, Homo sapien
acagggtccacgaggtcgatgtggt

SEQ ID NO: 3574155 - DNA, 25 bp, Homo sapien
gggtccacgaggtcgatgtggtcca

SEQ ID NO: 3574156 - DNA, 25 bp, Homo sapien
cacagggtccacgaggtcgatgtgg

SEQ ID NO: 3574157 - DNA, 25 bp, Homo sapien
cagggtccacgaggtcgatgtggtc

SEQ ID NO: 3574158 - DNA, 25 bp, Homo sapien
ctgaggaggagaggcatagggggcg

SEQ ID NO: 3574159 - DNA, 25 bp, Homo sapien
aggaggagaggcatagggggcgtta

SEQ ID NO: 3574160 - DNA, 25 bp, Homo sapien
aggagaggcatagggggcgttagca

SEQ ID NO: 3574161 - DNA, 25 bp, Homo sapien
gaggagaggcatagggggcgttagc

SEQ ID NO: 3574162 - DNA, 25 bp, Homo sapien
tccaagtgccaagtctgatctaccg

SEQ ID NO: 3574163 - DNA, 25 bp, Homo sapien
taagccaagccacagtgttcccgtg

SEQ ID NO: 3574164 - DNA, 25 bp, Homo sapien
ggcactctgaactcagctgcttaag

SEQ ID NO: 3574165 - DNA, 25 bp, Homo sapien
gaatctaagatgaaaccctggtgca

SEQ ID NO: 3574166 - DNA, 25 bp, Homo sapien
actgagggggaagcaggatggcatc

SEQ ID NO: 3574167 - DNA, 25 bp, Homo sapien
ctgagggggaagcaggatggcatct

SEQ ID NO: 3574168 - DNA, 25 bp, Homo sapien
tgagggggaagcaggatggcatctg

SEQ ID NO: 3574169 - DNA, 25 bp, Homo sapien
aggtgtgcatttcaggggacatgcc

SEQ ID NO: 3574170 - DNA, 25 bp, Homo sapien
tgccgtttcctctgcttcccaagag

SEQ ID NO: 3574171 - DNA, 25 bp, Homo sapien
cgctgggcgcagctgttacagactc

SEQ ID NO: 3574172 - DNA, 25 bp, Homo sapien
tcccaagagaaaatgaccagagtgt

SEQ ID NO: 3574173 - DNA, 25 bp, Homo sapien
tttccatttggactggccttcttga

SEQ ID NO: 3574174 - DNA, 25 bp, Homo sapien
ttccatttggactggccttcttgaa

SEQ ID NO: 3574175 - DNA, 25 bp, Homo sapien
cagggttcgcgtatcctgcccaggg

SEQ ID NO: 3574176 - DNA, 25 bp, Homo sapien
gagaggtcaggccagggttcgcgta

SEQ ID NO: 3574177 - DNA, 25 bp, Homo sapien
caggccagggttcgcgtatcctgcc

SEQ ID NO: 3574178 - DNA, 25 bp, Homo sapien
ggtcaggccagggttcgcgtatcct

SEQ ID NO: 3574179 - DNA, 25 bp, Homo sapien
actggtaagcctccacgatagccat

SEQ ID NO: 3574180 - DNA, 25 bp, Homo sapien
cagagaagaccagagaagtggcacc

SEQ ID NO: 3574181 - DNA, 25 bp, Homo sapien
caagctggggctggacgtgcagaga

SEQ ID NO: 3574182 - DNA, 25 bp, Homo sapien
ccagagaagtggcaccggccacaag

SEQ ID NO: 3574183 - DNA, 25 bp, Homo sapien
tcacaaggtttgaagcagcagctcc

SEQ ID NO: 3574184 - DNA, 25 bp, Homo sapien
gcttccagaagcctcgggagcccat

SEQ ID NO: 3574185 - DNA, 25 bp, Homo sapien
ctgcttccagaagcctcgggagccc

SEQ ID NO: 3574186 - DNA, 25 bp, Homo sapien
tccagaagcctcgggagcccatggt

SEQ ID NO: 3574187 - DNA, 25 bp, Homo sapien
ttccagaagcctcgggagcccatgg

SEQ ID NO: 3574188 - DNA, 25 bp, Homo sapien
ttgtcagcaccaggaccacctcctt

SEQ ID NO: 3574189 - DNA, 25 bp, Homo sapien
tcaggaagcaggactctgatggctt

SEQ ID NO: 3574190 - DNA, 25 bp, Homo sapien
ctccttcaggaagcaggactctgat

SEQ ID NO: 3574191 - DNA, 25 bp, Homo sapien
tgatggcttcctcaaacaacagcag

SEQ ID NO: 3574192 - DNA, 25 bp, Homo sapien
tgcagaaggtacaggccccggtgtc

SEQ ID NO: 3574193 - DNA, 25 bp, Homo sapien
cagaaggtacaggccccggtgtcgg

SEQ ID NO: 3574194 - DNA, 25 bp, Homo sapien
ctgcagaaggtacaggccccggtgt

SEQ ID NO: 3574195 - DNA, 25 bp, Homo sapien
cggtgtcggtgttgtttccccagag

SEQ ID NO: 3574196 - DNA, 25 bp, Homo sapien
tatagggcactcctgacacaagaca

SEQ ID NO: 3574197 - DNA, 25 bp, Homo sapien
gtgatgtgcccagttccgttccagg

SEQ ID NO: 3574198 - DNA, 25 bp, Homo sapien
tgagcaccatggatgcgcagtcttg

SEQ ID NO: 3574199 - DNA, 25 bp, Homo sapien
ctgaaatgatggcaaaccccaggga

SEQ ID NO: 3574200 - DNA, 25 bp, Homo sapien
cacctatgccagaggctggtgcgca

SEQ ID NO: 3574201 - DNA, 25 bp, Homo sapien
aacttcctggtgagtcagatagaaa

SEQ ID NO: 3574202 - DNA, 25 bp, Homo sapien
gagaggaaaagcaaacttcctggtg

SEQ ID NO: 3574203 - DNA, 25 bp, Homo sapien
cactcaatgcacatctcatggagag

SEQ ID NO: 3574204 - DNA, 25 bp, Homo sapien
gcagcgccaaagcagtggactgtga

SEQ ID NO: 3574205 - DNA, 25 bp, Homo sapien
tgagagcccaaagattcagtggagt

SEQ ID NO: 3574206 - DNA, 25 bp, Homo sapien
cagcagtccagcctgcatggagaca

SEQ ID NO: 3574207 - DNA, 25 bp, Homo sapien
gaaaaggcgttcctgatacgcgtcc

SEQ ID NO: 3574208 - DNA, 25 bp, Homo sapien
cagtaactgagcaagcctcttcccc

SEQ ID NO: 3574209 - DNA, 25 bp, Homo sapien
atggatagcaccatccccatcatca

SEQ ID NO: 3574210 - DNA, 25 bp, Homo sapien
ccccgtggccatggatagcaccatc

SEQ ID NO: 3574211 - DNA, 25 bp, Homo sapien
tccccatcatcaaactttatcagca

SEQ ID NO: 3574212 - DNA, 25 bp, Homo sapien
gtttaatctcaaggataactcaagg

SEQ ID NO: 3574213 - DNA, 25 bp, Homo sapien
atttatgtttaatctcaaggataac

SEQ ID NO: 3574214 - DNA, 25 bp, Homo sapien
gaattggaaactggaggctagggag

SEQ ID NO: 3574215 - DNA, 25 bp, Homo sapien
gttcaggggaggcaacgcccgcctg

SEQ ID NO: 3574216 - DNA, 25 bp, Homo sapien
catttccattcgcaaagccttcatg

SEQ ID NO: 3574217 - DNA, 25 bp, Homo sapien
tcatttccattcgcaaagccttcat

SEQ ID NO: 3574218 - DNA, 25 bp, Homo sapien
atttccattcgcaaagccttcatgg

SEQ ID NO: 3574219 - DNA, 25 bp, Homo sapien
ctgcacacctgctttcctgccctcc

SEQ ID NO: 3574220 - DNA, 25 bp, Homo sapien
gcacacctgctttcctgccctcctt

SEQ ID NO: 3574221 - DNA, 25 bp, Homo sapien
tgcacacctgctttcctgccctcct

SEQ ID NO: 3574222 - DNA, 25 bp, Homo sapien
cacacctgctttcctgccctccttc

SEQ ID NO: 3574223 - DNA, 25 bp, Homo sapien
atcacaatggagcttgaatacacaa

SEQ ID NO: 3574224 - DNA, 25 bp, Homo sapien
cacaatggagcttgaatacacaaac

SEQ ID NO: 3574225 - DNA, 25 bp, Homo sapien
atggagcttgaatacacaaacacat

SEQ ID NO: 3574226 - DNA, 25 bp, Homo sapien
caatggagcttgaatacacaaacac

SEQ ID NO: 3574227 - DNA, 25 bp, Homo sapien
ttctttcaagccctcagaactcagg

SEQ ID NO: 3574228 - DNA, 25 bp, Homo sapien
tcctttactgctgggacagcgccta

SEQ ID NO: 3574229 - DNA, 25 bp, Homo sapien
tcttctccttgtctaatgtggaggg

SEQ ID NO: 3574230 - DNA, 25 bp, Homo sapien
gggaacatagcaccagcatcagttg

SEQ ID NO: 3574231 - DNA, 25 bp, Homo sapien
ccttgtgcgtaaagggacctctgag

SEQ ID NO: 3574232 - DNA, 25 bp, Homo sapien
caggcttggccattaccttccaggc

SEQ ID NO: 3574233 - DNA, 25 bp, Homo sapien
gacctctgagatcccttctggacct

SEQ ID NO: 3574234 - DNA, 25 bp, Homo sapien
tgaactctgcggctcatgctaagaa

SEQ ID NO: 3574235 - DNA, 25 bp, Homo sapien
tcatgcttgcagctgcgtccccaga

SEQ ID NO: 3574236 - DNA, 25 bp, Homo sapien
agagaggcactgagtcatgcttgca

SEQ ID NO: 3574237 - DNA, 25 bp, Homo sapien
cctggcacagcgtgggtgtgcagta

SEQ ID NO: 3574238 - DNA, 25 bp, Homo sapien
agctcccaagcctagggcattttct

SEQ ID NO: 3574239 - DNA, 25 bp, Homo sapien
aacagcagctaacacgtagtactta

SEQ ID NO: 3574240 - DNA, 25 bp, Homo sapien
aaccttggtcttaaccactctgcct

SEQ ID NO: 3574241 - DNA, 25 bp, Homo sapien
gaagtctggcagtcaaccttggtct

SEQ ID NO: 3574242 - DNA, 25 bp, Homo sapien
cattaagattcccataacaaaagat

SEQ ID NO: 3574243 - DNA, 25 bp, Homo sapien
accatgcccagactcttgttatttt

SEQ ID NO: 3574244 - DNA, 25 bp, Homo sapien
gctcatctcaaaggcctgagctcaa

SEQ ID NO: 3574245 - DNA, 25 bp, Homo sapien
aagaataattttgtgctgggcgtgg

SEQ ID NO: 3574246 - DNA, 25 bp, Homo sapien
gcccagactcttgttatttttaaga

SEQ ID NO: 3574247 - DNA, 25 bp, Homo sapien
aaggttcgtccactttatagcatgg

SEQ ID NO: 3574248 - DNA, 25 bp, Homo sapien
cacaacgttgtgcaaaaccgccact

SEQ ID NO: 3574249 - DNA, 25 bp, Homo sapien
tcacgtaaggtttgcaaggttcgtc

SEQ ID NO: 3574250 - DNA, 25 bp, Homo sapien
gactcatactataggtgacctcttg

SEQ ID NO: 3574251 - DNA, 25 bp, Homo sapien
gcctgttaatgggaccatcctcaga

SEQ ID NO: 3574252 - DNA, 25 bp, Homo sapien
aaaagcagggttcagggatctagaa

SEQ ID NO: 3574253 - DNA, 25 bp, Homo sapien
gagtgggttgtccttgcagagcccc

SEQ ID NO: 3574254 - DNA, 25 bp, Homo sapien
ggtgtgactatgaccactacgcgga

SEQ ID NO: 3574255 - DNA, 25 bp, Homo sapien
ttcagaagaagcagatcttggccgg

SEQ ID NO: 3574256 - DNA, 25 bp, Homo sapien
gatgaggctccggaagacattcctt

SEQ ID NO: 3574257 - DNA, 25 bp, Homo sapien
cctgcagtaggtccaagtctgtctg

SEQ ID NO: 3574258 - DNA, 25 bp, Homo sapien
cttcttcttgatgggagtcccgctg

SEQ ID NO: 3574259 - DNA, 25 bp, Homo sapien
agctgggagtccaagagacaagaga

SEQ ID NO: 3574260 - DNA, 25 bp, Homo sapien
ctaacccaagtctggccccacactg

SEQ ID NO: 3574261 - DNA, 25 bp, Homo sapien
tctttaagtcagcagctcggggctc

SEQ ID NO: 3574262 - DNA, 25 bp, Homo sapien
gactcactccctaacccaagtctgg

SEQ ID NO: 3574263 - DNA, 25 bp, Homo sapien
taaagagatcggcttgagcaaaggc

SEQ ID NO: 3574264 - DNA, 25 bp, Homo sapien
caatgcagccaggttgttagcagtg

SEQ ID NO: 3574265 - DNA, 25 bp, Homo sapien
gaagggcattccagctaaagagatc

SEQ ID NO: 3574266 - DNA, 25 bp, Homo sapien
cacagaggcgtgaaaagtacaaaga

SEQ ID NO: 3574267 - DNA, 25 bp, Homo sapien
gggatgctccccacgaccttctggg

SEQ ID NO: 3574268 - DNA, 25 bp, Homo sapien
cacagtgtgggcggcactaccacta

SEQ ID NO: 3574269 - DNA, 25 bp, Homo sapien
actaccactatccaaggcaggggga

SEQ ID NO: 3574270 - DNA, 25 bp, Homo sapien
gatgctccccacgaccttctgggtg

SEQ ID NO: 3574271 - DNA, 25 bp, Homo sapien
ccaggggcttcatctggcaccaggt

SEQ ID NO: 3574272 - DNA, 25 bp, Homo sapien
caggggcttcatctggcaccaggtc

SEQ ID NO: 3574273 - DNA, 25 bp, Homo sapien
aggggcttcatctggcaccaggtct

SEQ ID NO: 3574274 - DNA, 25 bp, Homo sapien
gcaggcctcagccagatggtaggcg

SEQ ID NO: 3574275 - DNA, 25 bp, Homo sapien
caggcctcagccagatggtaggcgc

SEQ ID NO: 3574276 - DNA, 25 bp, Homo sapien
ggtaggcgcgggcactctggcagta

SEQ ID NO: 3574277 - DNA, 25 bp, Homo sapien
gggcactctggcagtagcggagcat

SEQ ID NO: 3574278 - DNA, 25 bp, Homo sapien
gaggtccgcggcgtcagcgcccagg

SEQ ID NO: 3574279 - DNA, 25 bp, Homo sapien
acggtcgcagggaggtccgcggcgt

SEQ ID NO: 3574280 - DNA, 25 bp, Homo sapien
ggtcgcagggaggtccgcggcgtca

SEQ ID NO: 3574281 - DNA, 25 bp, Homo sapien
tcgcagggaggtccgcggcgtcagc

SEQ ID NO: 3574282 - DNA, 25 bp, Homo sapien
ctggaaaatccccagccagcaggag

SEQ ID NO: 3574283 - DNA, 25 bp, Homo sapien
cagccagcaggaggagcgcgggcca

SEQ ID NO: 3574284 - DNA, 25 bp, Homo sapien
ccccagccagcaggaggagcgcggg

SEQ ID NO: 3574285 - DNA, 25 bp, Homo sapien
agccagcaggaggagcgcgggccag

SEQ ID NO: 3574286 - DNA, 25 bp, Homo sapien
cgcccgccgcgtcgagcagcgcagc

SEQ ID NO: 3574287 - DNA, 25 bp, Homo sapien
ccgccgcgtcgagcagcgcagcgcc

SEQ ID NO: 3574288 - DNA, 25 bp, Homo sapien
cgccgcccgccgcgtcgagcagcgc

SEQ ID NO: 3574289 - DNA, 25 bp, Homo sapien
cccgccgcgtcgagcagcgcagcgc

SEQ ID NO: 3574290 - DNA, 25 bp, Homo sapien
tatctcttctccgattgtggcttct

SEQ ID NO: 3574291 - DNA, 25 bp, Homo sapien
tctcttctccgattgtggcttctgg

SEQ ID NO: 3574292 - DNA, 25 bp, Homo sapien
ctcttctccgattgtggcttctggt

SEQ ID NO: 3574293 - DNA, 25 bp, Homo sapien
gttggtgaagagttatcgatgatgt

SEQ ID NO: 3574294 - DNA, 25 bp, Homo sapien
cgttgtggtagtgtggtccttttgc

SEQ ID NO: 3574295 - DNA, 25 bp, Homo sapien
tagaacagatgctggtcccatgccc

SEQ ID NO: 3574296 - DNA, 25 bp, Homo sapien
ttgcctgtaacgaaatagtgcctgc

SEQ ID NO: 3574297 - DNA, 25 bp, Homo sapien
aaggcactggtgtcttgtggtcttc

SEQ ID NO: 3574298 - DNA, 25 bp, Homo sapien
actgtgagtttgctatcaactgtct

SEQ ID NO: 3574299 - DNA, 25 bp, Homo sapien
ctgactatgaaacttaactgtgagt

SEQ ID NO: 3574300 - DNA, 25 bp, Homo sapien
gactatgaaacttaactgtgagttt

SEQ ID NO: 3574301 - DNA, 25 bp, Homo sapien
ctatgaaacttaactgtgagtttgc

SEQ ID NO: 3574302 - DNA, 25 bp, Homo sapien
tgtgacgctcagagggcccctgcat

SEQ ID NO: 3574303 - DNA, 25 bp, Homo sapien
gtacctttgtgacgctcagagggcc

SEQ ID NO: 3574304 - DNA, 25 bp, Homo sapien
tttcaggaaagtacctttgtgacgc

SEQ ID NO: 3574305 - DNA, 25 bp, Homo sapien
caggaatttcaggaaagtacctttg

SEQ ID NO: 3574306 - DNA, 25 bp, Homo sapien
ccaaaggctgcgaggttgtggtgtc

SEQ ID NO: 3574307 - DNA, 25 bp, Homo sapien
tgtctgggaaactccgaggacagag

SEQ ID NO: 3574308 - DNA, 25 bp, Homo sapien
cagcggagaccctgttaactactac

SEQ ID NO: 3574309 - DNA, 25 bp, Homo sapien
tgatgatccacagcggagaccctgt

SEQ ID NO: 3574310 - DNA, 25 bp, Homo sapien
aaagatgagatactgcccaccaccc

SEQ ID NO: 3574311 - DNA, 25 bp, Homo sapien
caaagatgagatactgcccaccacc

SEQ ID NO: 3574312 - DNA, 25 bp, Homo sapien
gctgtattctggagtctggatgttg

SEQ ID NO: 3574313 - DNA, 25 bp, Homo sapien
gcagctgtattctggagtctggatg

SEQ ID NO: 3574314 - DNA, 25 bp, Homo sapien
ctgtattctggagtctggatgttgc

SEQ ID NO: 3574315 - DNA, 25 bp, Homo sapien
cagctgtattctggagtctggatgt

SEQ ID NO: 3574316 - DNA, 25 bp, Homo sapien
tcttctcaattagactgagctgcac

SEQ ID NO: 3574317 - DNA, 25 bp, Homo sapien
tgtagggcgtacactgacaagtatc

SEQ ID NO: 3574318 - DNA, 25 bp, Homo sapien
taaatcagatgctggttgatcacag

SEQ ID NO: 3574319 - DNA, 25 bp, Homo sapien
cagggaaagctgttatcaggtggct

SEQ ID NO: 3574320 - DNA, 25 bp, Homo sapien
ttcagccggtgggagaagttagtgc

SEQ ID NO: 3574321 - DNA, 25 bp, Homo sapien
ttaaattcctcatgagttttctcca

SEQ ID NO: 3574322 - DNA, 25 bp, Homo sapien
cagtccacttggaagttcagccggt

SEQ ID NO: 3574323 - DNA, 25 bp, Homo sapien
gtgctgttaattcccactaggtgtt

SEQ ID NO: 3574324 - DNA, 25 bp, Homo sapien
aggaaatgtgcaacaagagtaatag

SEQ ID NO: 3574325 - DNA, 25 bp, Homo sapien
tgtttgtgaacctctcttatcaggg

SEQ ID NO: 3574326 - DNA, 25 bp, Homo sapien
caagaaccatgtgtccatctagctg

SEQ ID NO: 3574327 - DNA, 25 bp, Homo sapien
gtgtttgtgaacctctcttatcagg

SEQ ID NO: 3574328 - DNA, 25 bp, Homo sapien
gggacaagaaccatgtgtccatcta

SEQ ID NO: 3574329 - DNA, 25 bp, Homo sapien
tgtgtttgggaacagacgcgagcct

SEQ ID NO: 3574330 - DNA, 25 bp, Homo sapien
catctctttctaagtggtgggaagc

SEQ ID NO: 3574331 - DNA, 25 bp, Homo sapien
tacccaaagcgatcgtagtaagagg

SEQ ID NO: 3574332 - DNA, 25 bp, Homo sapien
cagctcctagcagtgagtcctgata

SEQ ID NO: 3574333 - DNA, 25 bp, Homo sapien
ctggctcaggctgtccaaatctgaa

SEQ ID NO: 3574334 - DNA, 25 bp, Homo sapien
agggagcagagtgtgcatctgagct

SEQ ID NO: 3574335 - DNA, 25 bp, Homo sapien
cctggctcaggctgtccaaatctga

SEQ ID NO: 3574336 - DNA, 25 bp, Homo sapien
gggagcagagtgtgcatctgagctc

SEQ ID NO: 3574337 - DNA, 25 bp, Homo sapien
gatcatcccgcccgccaaggatgtg

SEQ ID NO: 3574338 - DNA, 25 bp, Homo sapien
tgcagggatggctggacctccacct

SEQ ID NO: 3574339 - DNA, 25 bp, Homo sapien
ctgcccaagctctggatgatggtga

SEQ ID NO: 3574340 - DNA, 25 bp, Homo sapien
aaaggtgaagaccttatcggtgctt

SEQ ID NO: 3574341 - DNA, 25 bp, Homo sapien
gattcacaagctccaagatccagag

SEQ ID NO: 3574342 - DNA, 25 bp, Homo sapien
taacaataatctcgactgccgccat

SEQ ID NO: 3574343 - DNA, 25 bp, Homo sapien
taatagaaccttgacccacagactg

SEQ ID NO: 3574344 - DNA, 25 bp, Homo sapien
tccagagccttagaagcgggttccg

SEQ ID NO: 3574345 - DNA, 25 bp, Homo sapien
ccacacatctgtgcctggatcatag

SEQ ID NO: 3574346 - DNA, 25 bp, Homo sapien
cccatgacatagatggtgtcctcaa

SEQ ID NO: 3574347 - DNA, 25 bp, Homo sapien
gaagattttgctcatgagacccccc

SEQ ID NO: 3574348 - DNA, 25 bp, Homo sapien
tgtcctcaagggagacagcctcgag

SEQ ID NO: 3574349 - DNA, 25 bp, Homo sapien
ggagaacacagtcgcctcatgttag

SEQ ID NO: 3574350 - DNA, 25 bp, Homo sapien
gagtcaagtcctaggaccacaggct

SEQ ID NO: 3574351 - DNA, 25 bp, Homo sapien
catcatactgagctgggagaggtac

SEQ ID NO: 3574352 - DNA, 25 bp, Homo sapien
gaagcgtgggcaccctaatttggga

SEQ ID NO: 3574353 - DNA, 25 bp, Homo sapien
tggcgcccccaatcacgaagagctt

SEQ ID NO: 3574354 - DNA, 25 bp, Homo sapien
aagagcttgcccgcgcaggacgcca

SEQ ID NO: 3574355 - DNA, 25 bp, Homo sapien
ctgtgcaggcgcctcaggccgtcga

SEQ ID NO: 3574356 - DNA, 25 bp, Homo sapien
ccgtcgaagccacccaccgcgaaca

SEQ ID NO: 3574357 - DNA, 25 bp, Homo sapien
tgtaaaatacctggcaccaagctga

SEQ ID NO: 3574358 - DNA, 25 bp, Homo sapien
aaacctagactctatggccccagag

SEQ ID NO: 3574359 - DNA, 25 bp, Homo sapien
gggatgagaccttaacctgcatggt

SEQ ID NO: 3574360 - DNA, 25 bp, Homo sapien
agttgctgtacctccctgagccggt

SEQ ID NO: 3574361 - DNA, 25 bp, Homo sapien
ttagagaacctccctccagcacatc

SEQ ID NO: 3574362 - DNA, 25 bp, Homo sapien
tccctccagcacatccacagatctg

SEQ ID NO: 3574363 - DNA, 25 bp, Homo sapien
tagagaacctccctccagcacatcc

SEQ ID NO: 3574364 - DNA, 25 bp, Homo sapien
ctccagcacatccacagatctgtac

SEQ ID NO: 3574365 - DNA, 25 bp, Homo sapien
cttgtgtcccagggcagccgctgca

SEQ ID NO: 3574366 - DNA, 25 bp, Homo sapien
ggcagccgctgcagctcgtgcctac

SEQ ID NO: 3574367 - DNA, 25 bp, Homo sapien
gtgtcccagggcagccgctgcagct

SEQ ID NO: 3574368 - DNA, 25 bp, Homo sapien
agggcagccgctgcagctcgtgcct

SEQ ID NO: 3574369 - DNA, 25 bp, Homo sapien
tgcacaactgccatcttgtgcctcc

SEQ ID NO: 3574370 - DNA, 25 bp, Homo sapien
tccacacatcatgactgttgatgtg

SEQ ID NO: 3574371 - DNA, 25 bp, Homo sapien
cagagaggctaccttgatccaggtg

SEQ ID NO: 3574372 - DNA, 25 bp, Homo sapien
tgtgcagatgggagctaaacatcca

SEQ ID NO: 3574373 - DNA, 25 bp, Homo sapien
cagctgttgcccatcggctctcttg

SEQ ID NO: 3574374 - DNA, 25 bp, Homo sapien
ttgagctggtgtaagactctggacc

SEQ ID NO: 3574375 - DNA, 25 bp, Homo sapien
tctggacctgtgacccagtgtgctt

SEQ ID NO: 3574376 - DNA, 25 bp, Homo sapien
acttcttgagctggtgtaagactct

SEQ ID NO: 3574377 - DNA, 25 bp, Homo sapien
gaggctactagtcaatcccgtgtga

SEQ ID NO: 3574378 - DNA, 25 bp, Homo sapien
ggtcacacgcgtagttagccctgct

SEQ ID NO: 3574379 - DNA, 25 bp, Homo sapien
ttcctgaataaagggcgggtcacac

SEQ ID NO: 3574380 - DNA, 25 bp, Homo sapien
taggttatcagaaaacatcccgccc

SEQ ID NO: 3574381 - DNA, 25 bp, Homo sapien
gacgtagacgtcattgcggagagca

SEQ ID NO: 3574382 - DNA, 25 bp, Homo sapien
aattctgagcgagtgtagccgggca

SEQ ID NO: 3574383 - DNA, 25 bp, Homo sapien
gatgaccacgatcacttcagctagg

SEQ ID NO: 3574384 - DNA, 25 bp, Homo sapien
tcaggagacctttgcggtcgcaacc

SEQ ID NO: 3574385 - DNA, 25 bp, Homo sapien
tccaggaagtaagcgggcgccagta

SEQ ID NO: 3574386 - DNA, 25 bp, Homo sapien
caggatgaagcaggcgcgagcctcg

SEQ ID NO: 3574387 - DNA, 25 bp, Homo sapien
aagcaggcgcgagcctcgagcagca

SEQ ID NO: 3574388 - DNA, 25 bp, Homo sapien
ccagtagcggcaggcgcacgtgctc

SEQ ID NO: 3574389 - DNA, 25 bp, Homo sapien
aggaagtcggcgtggcgcgccacct

SEQ ID NO: 3574390 - DNA, 25 bp, Homo sapien
ggccctcgagaaagcgcacgcaggc

SEQ ID NO: 3574391 - DNA, 25 bp, Homo sapien
ccacgcggcgcagcgctaggctgtt

SEQ ID NO: 3574392 - DNA, 25 bp, Homo sapien
ctcgtcaggcgccagctccaggaag

SEQ ID NO: 3574393 - DNA, 25 bp, Homo sapien
ccgcgcggtggcacggaaagtcgcg

SEQ ID NO: 3574394 - DNA, 25 bp, Homo sapien
acaagctgcggaagtaggcgctgcc

SEQ ID NO: 3574395 - DNA, 25 bp, Homo sapien
tcgggagctactggcaccactggca

SEQ ID NO: 3574396 - DNA, 25 bp, Homo sapien
ccgtacacgtagtcgagcaccacgg

SEQ ID NO: 3574397 - DNA, 25 bp, Homo sapien
acggacccgcgcacggcgcttcgca

SEQ ID NO: 3574398 - DNA, 25 bp, Homo sapien
cgccggtaggcgttcagggcctgca

SEQ ID NO: 3574399 - DNA, 25 bp, Homo sapien
tgcagcacgcgctgcgcgtggcacg

SEQ ID NO: 3574400 - DNA, 25 bp, Homo sapien
acggcgcttcgcagcccggctccga

SEQ ID NO: 3574401 - DNA, 25 bp, Homo sapien
gcatccaggttccttacggctacag

SEQ ID NO: 3574402 - DNA, 25 bp, Homo sapien
gggagaggcgacagccctcatccgt

SEQ ID NO: 3574403 - DNA, 25 bp, Homo sapien
gttccttacggctacagtgccccag

SEQ ID NO: 3574404 - DNA, 25 bp, Homo sapien
gacagccctcatccgtttatttcct

SEQ ID NO: 3574405 - DNA, 25 bp, Homo sapien
cctgcctacccactcagacacagtg

SEQ ID NO: 3574406 - DNA, 25 bp, Homo sapien
ctgcctacccactcagacacagtgc

SEQ ID NO: 3574407 - DNA, 25 bp, Homo sapien
tgctctcacaggtatcactcccgtt

SEQ ID NO: 3574408 - DNA, 25 bp, Homo sapien
agactcccgtttgctgttcgctcgg

SEQ ID NO: 3574409 - DNA, 25 bp, Homo sapien
acaggtatcactcccgtttgtgcct

SEQ ID NO: 3574410 - DNA, 25 bp, Homo sapien
tgcccagactcccgtttgctgttcg

SEQ ID NO: 3574411 - DNA, 25 bp, Homo sapien
gccttgtcccggaatgacgatgggt

SEQ ID NO: 3574412 - DNA, 25 bp, Homo sapien
gctggccttgtcccggaatgacgat

SEQ ID NO: 3574413 - DNA, 25 bp, Homo sapien
cttgtcccggaatgacgatgggttc

SEQ ID NO: 3574414 - DNA, 25 bp, Homo sapien
tcccggaatgacgatgggttcgaag

SEQ ID NO: 3574415 - DNA, 25 bp, Homo sapien
tggtcccagggctgtactttggctt

SEQ ID NO: 3574416 - DNA, 25 bp, Homo sapien
cccagggctgtactttggctttcag

SEQ ID NO: 3574417 - DNA, 25 bp, Homo sapien
ctttggctttcagctcaggtgcccc

SEQ ID NO: 3574418 - DNA, 25 bp, Homo sapien
tgtggtcccagggctgtactttggc

SEQ ID NO: 3574419 - DNA, 25 bp, Homo sapien
gcagctttaatcacattggccaagg

SEQ ID NO: 3574420 - DNA, 25 bp, Homo sapien
tatccagaacacttctaccaggtgg

SEQ ID NO: 3574421 - DNA, 25 bp, Homo sapien
agggccctaggttccctctgttcag

SEQ ID NO: 3574422 - DNA, 25 bp, Homo sapien
ccactgatgtgggaacctgaggtca

SEQ ID NO: 3574423 - DNA, 25 bp, Homo sapien
gaggaggacgtgtctccacattgca

SEQ ID NO: 3574424 - DNA, 25 bp, Homo sapien
ggctgaacctccttgtgctttgaga

SEQ ID NO: 3574425 - DNA, 25 bp, Homo sapien
gctttgagactgacaggaagagcag

SEQ ID NO: 3574426 - DNA, 25 bp, Homo sapien
catgggatccagtagtcctgagctc

SEQ ID NO: 3574427 - DNA, 25 bp, Homo sapien
gagttcagacacacttccaccagct

SEQ ID NO: 3574428 - DNA, 25 bp, Homo sapien
aaagcttccaggtcgggatacagga

SEQ ID NO: 3574429 - DNA, 25 bp, Homo sapien
gagtccccctcaagagaggctgcgg

SEQ ID NO: 3574430 - DNA, 25 bp, Homo sapien
tctgtgtcaggtacaggtgggacag

SEQ ID NO: 3574431 - DNA, 25 bp, Homo sapien
atacggagagcacatcggagacctc

SEQ ID NO: 3574432 - DNA, 25 bp, Homo sapien
tcataactgttgtctgaacatacgg

SEQ ID NO: 3574433 - DNA, 25 bp, Homo sapien
ctatgagggtcttggtgtggctgcc

SEQ ID NO: 3574434 - DNA, 25 bp, Homo sapien
tgttggcatatgtgtcataactgtt

SEQ ID NO: 3574435 - DNA, 25 bp, Homo sapien
ggttgtagctccgtatgccacccag

SEQ ID NO: 3574436 - DNA, 25 bp, Homo sapien
gcaccgcagcactcagcatgatctg

SEQ ID NO: 3574437 - DNA, 25 bp, Homo sapien
gatctgctcagggttgtagctccgt

SEQ ID NO: 3574438 - DNA, 25 bp, Homo sapien
tccttcatgatgctgacgtcccggc

SEQ ID NO: 3574439 - DNA, 25 bp, Homo sapien
gaacaagaacccaactgcctcaggg

SEQ ID NO: 3574440 - DNA, 25 bp, Homo sapien
cacgactctgttgacctaagctggg

SEQ ID NO: 3574441 - DNA, 25 bp, Homo sapien
gacctttcctgggatctaggcagaa

SEQ ID NO: 3574442 - DNA, 25 bp, Homo sapien
tgatccccaggagacaatgacactg

SEQ ID NO: 3574443 - DNA, 25 bp, Homo sapien
agatgcccacgatgagggtgaagga

SEQ ID NO: 3574444 - DNA, 25 bp, Homo sapien
ccacatgagacagtactcgtccggg

SEQ ID NO: 3574445 - DNA, 25 bp, Homo sapien
tgagggtgaaggagaccaggtcggc

SEQ ID NO: 3574446 - DNA, 25 bp, Homo sapien
agaccaggtcggcagtgacccacat

SEQ ID NO: 3574447 - DNA, 25 bp, Homo sapien
gcccgaggccaacttccagtcatgg

SEQ ID NO: 3574448 - DNA, 25 bp, Homo sapien
cgaggccaacttccagtcatggcca

SEQ ID NO: 3574449 - DNA, 25 bp, Homo sapien
ctgtggacagacggcccgaggccaa

SEQ ID NO: 3574450 - DNA, 25 bp, Homo sapien
gtggacagacggcccgaggccaact

SEQ ID NO: 3574451 - DNA, 25 bp, Homo sapien
agggcgtgggagttgtcagaggtga

SEQ ID NO: 3574452 - DNA, 25 bp, Homo sapien
gacagggcgtgggagttgtcagagg

SEQ ID NO: 3574453 - DNA, 25 bp, Homo sapien
ggtgacggatgggacccccgcacac

SEQ ID NO: 3574454 - DNA, 25 bp, Homo sapien
cagaggtgacggatgggacccccgc

SEQ ID NO: 3574455 - DNA, 25 bp, Homo sapien
agaagagccacggtgcgttgactgt

SEQ ID NO: 3574456 - DNA, 25 bp, Homo sapien
actcaggttccaggacgcgtagtcc

SEQ ID NO: 3574457 - DNA, 25 bp, Homo sapien
tgtgtagaggttcacactcaggttc

SEQ ID NO: 3574458 - DNA, 25 bp, Homo sapien
gcgttgactgtgtagaggttcacac

SEQ ID NO: 3574459 - DNA, 25 bp, Homo sapien
ctctgcctgctaggcagccacatga

SEQ ID NO: 3574460 - DNA, 25 bp, Homo sapien
caggctggcgactgcctccttggag

SEQ ID NO: 3574461 - DNA, 25 bp, Homo sapien
tgagtgtagcgcaggttcagccgct

SEQ ID NO: 3574462 - DNA, 25 bp, Homo sapien
tcctggcgggacacctgagtgtagc

SEQ ID NO: 3574463 - DNA, 25 bp, Homo sapien
aaaactgctgcggtaggggtgctcc

SEQ ID NO: 3574464 - DNA, 25 bp, Homo sapien
agcacggcctccagagtcacgttga

SEQ ID NO: 3574465 - DNA, 25 bp, Homo sapien
ggtcacgcaggttgagcagcagtgt

SEQ ID NO: 3574466 - DNA, 25 bp, Homo sapien
agcagtgtggcattgcccttggcca

SEQ ID NO: 3574467 - DNA, 25 bp, Homo sapien
tgtggtcggagggtgacagggagct

SEQ ID NO: 3574468 - DNA, 25 bp, Homo sapien
ctgtggtcggagggtgacagggagc

SEQ ID NO: 3574469 - DNA, 25 bp, Homo sapien
tgttttccatgcctaagattgggat

SEQ ID NO: 3574470 - DNA, 25 bp, Homo sapien
tccttgcagtccctgctggtgtttt

SEQ ID NO: 3574471 - DNA, 25 bp, Homo sapien
cttgcagtccctgctggtgttttcc

SEQ ID NO: 3574472 - DNA, 25 bp, Homo sapien
ttccatgcctaagattgggatcagg

SEQ ID NO: 3574473 - DNA, 25 bp, Homo sapien
cagttaagcatggaggcaggcctgc

SEQ ID NO: 3574474 - DNA, 25 bp, Homo sapien
cactggccagcgttgagtctctgca

SEQ ID NO: 3574475 - DNA, 25 bp, Homo sapien
tcctccacgttggtggtgcgccgca

SEQ ID NO: 3574476 - DNA, 25 bp, Homo sapien
cagggtggtgtcatgcatgaggaag

SEQ ID NO: 3574477 - DNA, 25 bp, Homo sapien
cggaaggacatgagcgtgtgctctg

SEQ ID NO: 3574478 - DNA, 25 bp, Homo sapien
tggagcccgtacagcttctgctcga

SEQ ID NO: 3574479 - DNA, 25 bp, Homo sapien
ggacatgagcgtgtgctctggagcc

SEQ ID NO: 3574480 - DNA, 25 bp, Homo sapien
acagcttctgctcgagggccttccg

SEQ ID NO: 3574481 - DNA, 25 bp, Homo sapien
gtactcactgtcacagtgggctctg

SEQ ID NO: 3574482 - DNA, 25 bp, Homo sapien
tgcactggtggcagaatgcggcgct

SEQ ID NO: 3574483 - DNA, 25 bp, Homo sapien
tccaactcacgtcggttcagccgta

SEQ ID NO: 3574484 - DNA, 25 bp, Homo sapien
ggcgctgactttgatcccttcgtct

SEQ ID NO: 3574485 - DNA, 25 bp, Homo sapien
cccgcggtggccaatgagagcaggc

SEQ ID NO: 3574486 - DNA, 25 bp, Homo sapien
gggccccgcggtggccaatgagagc

SEQ ID NO: 3574487 - DNA, 25 bp, Homo sapien
gggggccccgcggtggccaatgaga

SEQ ID NO: 3574488 - DNA, 25 bp, Homo sapien
catgggggccccgcggtggccaatg

SEQ ID NO: 3574489 - DNA, 25 bp, Homo sapien
gagggcaaacaccacggtgaagaag

SEQ ID NO: 3574490 - DNA, 25 bp, Homo sapien
caccacggtgaagaaggtacagaga

SEQ ID NO: 3574491 - DNA, 25 bp, Homo sapien
caaacaccacggtgaagaaggtaca

SEQ ID NO: 3574492 - DNA, 25 bp, Homo sapien
caggtagagggcaaacaccacggtg

SEQ ID NO: 3574493 - DNA, 25 bp, Homo sapien
cacgatccaggagagcatggtgact

SEQ ID NO: 3574494 - DNA, 25 bp, Homo sapien
tctgcgcgggcgaactgtcctgcca

SEQ ID NO: 3574495 - DNA, 25 bp, Homo sapien
gcgaactgtcctgccacgatccagg

SEQ ID NO: 3574496 - DNA, 25 bp, Homo sapien
gtccgctctgcgcgggcgaactgtc

SEQ ID NO: 3574497 - DNA, 25 bp, Homo sapien
acggccgacatggccaccaccgtgg

SEQ ID NO: 3574498 - DNA, 25 bp, Homo sapien
cacggccgacatggccaccaccgtg

SEQ ID NO: 3574499 - DNA, 25 bp, Homo sapien
ggccaccaccgtggaagccaggatg

SEQ ID NO: 3574500 - DNA, 25 bp, Homo sapien
ccacggccgacatggccaccaccgt

SEQ ID NO: 3574501 - DNA, 25 bp, Homo sapien
gaatgctgagtctcgcctgggatga

SEQ ID NO: 3574502 - DNA, 25 bp, Homo sapien
cctggagccgttctagctgctggca

SEQ ID NO: 3574503 - DNA, 25 bp, Homo sapien
tcccagtctctggaagggtcagtca

SEQ ID NO: 3574504 - DNA, 25 bp, Homo sapien
tcacagtggcacttcaggcgggagt

SEQ ID NO: 3574505 - DNA, 25 bp, Homo sapien
cattcgatgagtctggcctaggtgc

SEQ ID NO: 3574506 - DNA, 25 bp, Homo sapien
cacagtgagttaaggatggtttcca

SEQ ID NO: 3574507 - DNA, 25 bp, Homo sapien
tctgactgagaaggatgaatcccac

SEQ ID NO: 3574508 - DNA, 25 bp, Homo sapien
tttctcggacagacagcacgctggt

SEQ ID NO: 3574509 - DNA, 25 bp, Homo sapien
ggctcaggttgggtcgctgacagac

SEQ ID NO: 3574510 - DNA, 25 bp, Homo sapien
aggttgggtcgctgacagacgcctc

SEQ ID NO: 3574511 - DNA, 25 bp, Homo sapien
gggtcgctgacagacgcctcctctg

SEQ ID NO: 3574512 - DNA, 25 bp, Homo sapien
ggagtcaggcgaggacagaagagca

SEQ ID NO: 3574513 - DNA, 25 bp, Homo sapien
gaacaactatccattgctaagagag

SEQ ID NO: 3574514 - DNA, 25 bp, Homo sapien
tgccgaatctaactcacccgaaggg

SEQ ID NO: 3574515 - DNA, 25 bp, Homo sapien
tccccatggtaaaaacgcaatgagc

SEQ ID NO: 3574516 - DNA, 25 bp, Homo sapien
ctaagagagcatgaatcggaggcac

SEQ ID NO: 3574517 - DNA, 25 bp, Homo sapien
cctcacagaggggatagtggaagcc

SEQ ID NO: 3574518 - DNA, 25 bp, Homo sapien
caggagaagaaactccctcacagag

SEQ ID NO: 3574519 - DNA, 25 bp, Homo sapien
ttcaaatgccagctttgcagccagg

SEQ ID NO: 3574520 - DNA, 25 bp, Homo sapien
aggcatggccccagaaggtgaccac

SEQ ID NO: 3574521 - DNA, 25 bp, Homo sapien
gaaacacacttcagcactatgcctg

SEQ ID NO: 3574522 - DNA, 25 bp, Homo sapien
tgcctgcaatggacgtaaggcagag

SEQ ID NO: 3574523 - DNA, 25 bp, Homo sapien
ttaaggctccggaatgggtgaagcc

SEQ ID NO: 3574524 - DNA, 25 bp, Homo sapien
taaggcagagagttaaggctccgga

SEQ ID NO: 3574525 - DNA, 25 bp, Homo sapien
gagaaaagtgcttggcgcatagtga

SEQ ID NO: 3574526 - DNA, 25 bp, Homo sapien
gaacaattctaacggtgatccaggg

SEQ ID NO: 3574527 - DNA, 25 bp, Homo sapien
aatgaagacgggtgaggttgtgaga

SEQ ID NO: 3574528 - DNA, 25 bp, Homo sapien
tagtgagtgctcagccttagctatg

SEQ ID NO: 3574529 - DNA, 25 bp, Homo sapien
gctgccccacggcaatgtgacatag

SEQ ID NO: 3574530 - DNA, 25 bp, Homo sapien
ctgccccacggcaatgtgacatagt

SEQ ID NO: 3574531 - DNA, 25 bp, Homo sapien
gccagtgcaggttcatctgctgccc

SEQ ID NO: 3574532 - DNA, 25 bp, Homo sapien
cgatgtatgcgaaggcagcagctgt

SEQ ID NO: 3574533 - DNA, 25 bp, Homo sapien
cagctgtggtcacaaggatgggtac

SEQ ID NO: 3574534 - DNA, 25 bp, Homo sapien
ccagtagcccatgcggttgtagagg

SEQ ID NO: 3574535 - DNA, 25 bp, Homo sapien
atgggtacgggccagtcgctccagt

SEQ ID NO: 3574536 - DNA, 25 bp, Homo sapien
gcgtgaggccaaaggtgaaggtgag

SEQ ID NO: 3574537 - DNA, 25 bp, Homo sapien
gttgaattcatcatagtcattgtgg

SEQ ID NO: 3574538 - DNA, 25 bp, Homo sapien
tcatcatagtcattgtggacttccc

SEQ ID NO: 3574539 - DNA, 25 bp, Homo sapien
caggtgagcgtgaggccaaaggtga

SEQ ID NO: 3574540 - DNA, 25 bp, Homo sapien
ccaggaggagtgtgctggagactgc

SEQ ID NO: 3574541 - DNA, 25 bp, Homo sapien
caccaggaggagtgtgctggagact

SEQ ID NO: 3574542 - DNA, 25 bp, Homo sapien
cagctggctcctggggtaggcacca

SEQ ID NO: 3574543 - DNA, 25 bp, Homo sapien
gaaaagctgagtgggctggggctga

SEQ ID NO: 3574544 - DNA, 25 bp, Homo sapien
agggaccagacagggcgagcagctg

SEQ ID NO: 3574545 - DNA, 25 bp, Homo sapien
taaggagggaccagacagggcgagc

SEQ ID NO: 3574546 - DNA, 25 bp, Homo sapien
gagggaccagacagggcgagcagct

SEQ ID NO: 3574547 - DNA, 25 bp, Homo sapien
aggagggaccagacagggcgagcag

SEQ ID NO: 3574548 - DNA, 25 bp, Homo sapien
tgtacgcctacattctctgacagct

SEQ ID NO: 3574549 - DNA, 25 bp, Homo sapien
gctcattaggggtccggctgcccca

SEQ ID NO: 3574550 - DNA, 25 bp, Homo sapien
tctgacagctcattaggggtccggc

SEQ ID NO: 3574551 - DNA, 25 bp, Homo sapien
gtccgcacatgtacgcctacattct

SEQ ID NO: 3574552 - DNA, 25 bp, Homo sapien
cagtaaatcttgtccgaggacctcc

SEQ ID NO: 3574553 - DNA, 25 bp, Homo sapien
tccgaggacctcctctgagtcaggt

SEQ ID NO: 3574554 - DNA, 25 bp, Homo sapien
tcatgaacacatatgctcaatcctc

SEQ ID NO: 3574555 - DNA, 25 bp, Homo sapien
tatgctcaatcctccttccagttgt

SEQ ID NO: 3574556 - DNA, 25 bp, Homo sapien
gcgctggtagcgcttccaacggcag

SEQ ID NO: 3574557 - DNA, 25 bp, Homo sapien
tatcatcatgggagcgctggtagcg

SEQ ID NO: 3574558 - DNA, 25 bp, Homo sapien
aacggcagccgtagatgcccgtgag

SEQ ID NO: 3574559 - DNA, 25 bp, Homo sapien
cggtgtggtatcatcatgggagcgc

SEQ ID NO: 3574560 - DNA, 25 bp, Homo sapien
tggccctcaggcgcccatggaggcc

SEQ ID NO: 3574561 - DNA, 25 bp, Homo sapien
ctggccctcaggcgcccatggaggc

SEQ ID NO: 3574562 - DNA, 25 bp, Homo sapien
cctcaggcgcccatggaggccccca

SEQ ID NO: 3574563 - DNA, 25 bp, Homo sapien
gccctcaggcgcccatggaggcccc

SEQ ID NO: 3574564 - DNA, 25 bp, Homo sapien
tccatgcagaaactataacagcagc

SEQ ID NO: 3574565 - DNA, 25 bp, Homo sapien
ctgtccgaggccctggagacaatgt

SEQ ID NO: 3574566 - DNA, 25 bp, Homo sapien
tgaggtgtcaggactccaacgctgg

SEQ ID NO: 3574567 - DNA, 25 bp, Homo sapien
gctcctagggccctgagagggccaa

SEQ ID NO: 3574568 - DNA, 25 bp, Homo sapien
ccatggtttccatagggctccggga

SEQ ID NO: 3574569 - DNA, 25 bp, Homo sapien
caggaaggcccataccaaggttagg

SEQ ID NO: 3574570 - DNA, 25 bp, Homo sapien
tcctgggacgcagttcaaaacttgg

SEQ ID NO: 3574571 - DNA, 25 bp, Homo sapien
gttaggcacctggtcgtcctgagca

SEQ ID NO: 3574572 - DNA, 25 bp, Homo sapien
ctaagtcacaggggcagctgccagt

SEQ ID NO: 3574573 - DNA, 25 bp, Homo sapien
ggcagctgccagtggggagaggctc

SEQ ID NO: 3574574 - DNA, 25 bp, Homo sapien
ccagtggggagaggctcggggagga

SEQ ID NO: 3574575 - DNA, 25 bp, Homo sapien
taagtcacaggggcagctgccagtg

SEQ ID NO: 3574576 - DNA, 25 bp, Homo sapien
ttccaggcaggtccgagaacctggg

SEQ ID NO: 3574577 - DNA, 25 bp, Homo sapien
tggcacaggatactaatttcatcac

SEQ ID NO: 3574578 - DNA, 25 bp, Homo sapien
gaccaatgaaaaccgagcttgctcg

SEQ ID NO: 3574579 - DNA, 25 bp, Homo sapien
aatgtcgaggtttcaccttggtgac

SEQ ID NO: 3574580 - DNA, 25 bp, Homo sapien
ggcagtgatatcacttcactgggag

SEQ ID NO: 3574581 - DNA, 25 bp, Homo sapien
aagaaggtaccggtggctgtgagct

SEQ ID NO: 3574582 - DNA, 25 bp, Homo sapien
cacagaggcagtgatatcacttcac

SEQ ID NO: 3574583 - DNA, 25 bp, Homo sapien
ctggaagaaggtaccggtggctgtg

SEQ ID NO: 3574584 - DNA, 25 bp, Homo sapien
ccctttcacgctgcccagggtcctg

SEQ ID NO: 3574585 - DNA, 25 bp, Homo sapien
ctgggggcagaggccctttcacgct

SEQ ID NO: 3574586 - DNA, 25 bp, Homo sapien
ccaggacccacggatccaggatcca

SEQ ID NO: 3574587 - DNA, 25 bp, Homo sapien
aggacccacggatccaggatccaaa

SEQ ID NO: 3574588 - DNA, 25 bp, Homo sapien
tacctgtggggttgtctggacgcgg

SEQ ID NO: 3574589 - DNA, 25 bp, Homo sapien
cctgtggggttgtctggacgcggag

SEQ ID NO: 3574590 - DNA, 25 bp, Homo sapien
tggggttgtctggacgcggaggccg

SEQ ID NO: 3574591 - DNA, 25 bp, Homo sapien
gggttgtctggacgcggaggccgcc

SEQ ID NO: 3574592 - DNA, 25 bp, Homo sapien
tggctcttcaagcagaaaacccctg

SEQ ID NO: 3574593 - DNA, 25 bp, Homo sapien
agtgctcggccccaaacaggaagtg

SEQ ID NO: 3574594 - DNA, 25 bp, Homo sapien
tggagcagatggcttagtagtggaa

SEQ ID NO: 3574595 - DNA, 25 bp, Homo sapien
ggaagtggctcttcaagcagaaaac

SEQ ID NO: 3574596 - DNA, 25 bp, Homo sapien
gaacttccctgtaattgagagctgg

SEQ ID NO: 3574597 - DNA, 25 bp, Homo sapien
gacatagggcacatattcacggaca

SEQ ID NO: 3574598 - DNA, 25 bp, Homo sapien
actaggcgggtgtctacagatgacc

SEQ ID NO: 3574599 - DNA, 25 bp, Homo sapien
caatccttgtgaatcagggcgggtc

SEQ ID NO: 3574600 - DNA, 25 bp, Homo sapien
acaaacatcctggaaacagggactc

SEQ ID NO: 3574601 - DNA, 25 bp, Homo sapien
gaaacagggactcgggccatggcct

SEQ ID NO: 3574602 - DNA, 25 bp, Homo sapien
gccatggcctcgctcagagtcacct

SEQ ID NO: 3574603 - DNA, 25 bp, Homo sapien
ggcaacagccacctgaacagtctgg

SEQ ID NO: 3574604 - DNA, 25 bp, Homo sapien
tgatgtaaatgacccgcgccaaaca

SEQ ID NO: 3574605 - DNA, 25 bp, Homo sapien
taccaaagagccaatctgagcagag

SEQ ID NO: 3574606 - DNA, 25 bp, Homo sapien
tatagatccctcaatacccaaatgg

SEQ ID NO: 3574607 - DNA, 25 bp, Homo sapien
cagatcctgttgatttgccctcaga

SEQ ID NO: 3574608 - DNA, 25 bp, Homo sapien
gacaaagacgttttcatcgatctgt

SEQ ID NO: 3574609 - DNA, 25 bp, Homo sapien
ctttccagacaaagacgttttcatc

SEQ ID NO: 3574610 - DNA, 25 bp, Homo sapien
actccccccaggaacactgggtgat

SEQ ID NO: 3574611 - DNA, 25 bp, Homo sapien
aagacgttttcatcgatctgtttgt

SEQ ID NO: 3574612 - DNA, 25 bp, Homo sapien
catatcaccgagattctatggttcc

SEQ ID NO: 3574613 - DNA, 25 bp, Homo sapien
ccagagtgttcacggagcctgcaga

SEQ ID NO: 3574614 - DNA, 25 bp, Homo sapien
tccaagtctggatttcatatcaccg

SEQ ID NO: 3574615 - DNA, 25 bp, Homo sapien
tatggttccatgatccagtgcttcc

SEQ ID NO: 3574616 - DNA, 25 bp, Homo sapien
ctttggctcagcatgctgtgacagg

SEQ ID NO: 3574617 - DNA, 25 bp, Homo sapien
tggctttggctcagcatgctgtgac

SEQ ID NO: 3574618 - DNA, 25 bp, Homo sapien
gcagtgtccacattgaagatcttgg

SEQ ID NO: 3574619 - DNA, 25 bp, Homo sapien
agatcttggtcatcccgactgacag

SEQ ID NO: 3574620 - DNA, 25 bp, Homo sapien
aaataaagcagtgtccacattgaag

SEQ ID NO: 3574621 - DNA, 25 bp, Homo sapien
gatcttggtcatcccgactgacagc

SEQ ID NO: 3574622 - DNA, 25 bp, Homo sapien
gtccagggctatccccagaactgtg

SEQ ID NO: 3574623 - DNA, 25 bp, Homo sapien
cagaactgtggcaatgactgcccag

SEQ ID NO: 3574624 - DNA, 25 bp, Homo sapien
gctcttaacaccctggacatgagga

SEQ ID NO: 3574625 - DNA, 25 bp, Homo sapien
aactcagagtggcatggctcttaac

SEQ ID NO: 3574626 - DNA, 25 bp, Homo sapien
gtggactcccgggcttttgatggac

SEQ ID NO: 3574627 - DNA, 25 bp, Homo sapien
ggactcccgggcttttgatggacag

SEQ ID NO: 3574628 - DNA, 25 bp, Homo sapien
agtggactcccgggcttttgatgga

SEQ ID NO: 3574629 - DNA, 25 bp, Homo sapien
tggactcccgggcttttgatggaca

SEQ ID NO: 3574630 - DNA, 25 bp, Homo sapien
tgtaatgggctccatgctgctggct

SEQ ID NO: 3574631 - DNA, 25 bp, Homo sapien
gctttcagagaggtacacccaacag

SEQ ID NO: 3574632 - DNA, 25 bp, Homo sapien
gaggtacacccaacaggaagcataa

SEQ ID NO: 3574633 - DNA, 25 bp, Homo sapien
ctctgtggaatgtaatgggctccat

SEQ ID NO: 3574634 - DNA, 25 bp, Homo sapien
ggaggctgcagtgagtgaagatcgc

SEQ ID NO: 3574635 - DNA, 25 bp, Homo sapien
tgaagatcgcgccattgcactccag

SEQ ID NO: 3574636 - DNA, 25 bp, Homo sapien
ggcggaggctgcagtgagtgaagat

SEQ ID NO: 3574637 - DNA, 25 bp, Homo sapien
gaagatcgcgccattgcactccagc

SEQ ID NO: 3574638 - DNA, 25 bp, Homo sapien
ttcggggcaggcgctgaacccctca

SEQ ID NO: 3574639 - DNA, 25 bp, Homo sapien
ttggctctcgcaggccgccgggaca

SEQ ID NO: 3574640 - DNA, 25 bp, Homo sapien
ggacccctgtgttatcttcggggca

SEQ ID NO: 3574641 - DNA, 25 bp, Homo sapien
ccttggctctcgcaggccgccggga

SEQ ID NO: 3574642 - DNA, 25 bp, Homo sapien
cagcccggcggttcggtccgactgt

SEQ ID NO: 3574643 - DNA, 25 bp, Homo sapien
ccctcactgacggaaaggcgcggag

SEQ ID NO: 3574644 - DNA, 25 bp, Homo sapien
cgggcgctcgcgctgttccaagctg

SEQ ID NO: 3574645 - DNA, 25 bp, Homo sapien
ctgaggcgggacgaaggtgacagcc

SEQ ID NO: 3574646 - DNA, 25 bp, Homo sapien
ctgcaaccacggaccggtacggcgg

SEQ ID NO: 3574647 - DNA, 25 bp, Homo sapien
tgcaaccacggaccggtacggcggc

SEQ ID NO: 3574648 - DNA, 25 bp, Homo sapien
gctctctctgcaaaacggggcgaac

SEQ ID NO: 3574649 - DNA, 25 bp, Homo sapien
gtcccgactcggctctctctgcaaa

SEQ ID NO: 3574650 - DNA, 25 bp, Homo sapien
cggctctctctgcaaaacggggcga

SEQ ID NO: 3574651 - DNA, 25 bp, Homo sapien
ggtcccgactcggctctctctgcaa

SEQ ID NO: 3574652 - DNA, 25 bp, Homo sapien
cggcggccgactcccgagctcccgg

SEQ ID NO: 3574653 - DNA, 25 bp, Homo sapien
acagggaggggatgggcaggggcag

SEQ ID NO: 3574654 - DNA, 25 bp, Homo sapien
gcaggggcaggggcctgaggaggag

SEQ ID NO: 3574655 - DNA, 25 bp, Homo sapien
cacggatgaaaaccaacagggaggg

SEQ ID NO: 3574656 - DNA, 25 bp, Homo sapien
gggcaggggcctgaggaggagccct

SEQ ID NO: 3574657 - DNA, 25 bp, Homo sapien
gctcctggacgcacactgtagaaca

SEQ ID NO: 3574658 - DNA, 25 bp, Homo sapien
ggatgccgtagactcgcagggctcc

SEQ ID NO: 3574659 - DNA, 25 bp, Homo sapien
ctaagcatgtgaagagtccggcagc

SEQ ID NO: 3574660 - DNA, 25 bp, Homo sapien
atgcaggagatgacctgaaatgcca

SEQ ID NO: 3574661 - DNA, 25 bp, Homo sapien
gggaactgcagaatttgggcacatg

SEQ ID NO: 3574662 - DNA, 25 bp, Homo sapien
agtttacaggccacttccaacccag

SEQ ID NO: 3574663 - DNA, 25 bp, Homo sapien
cagaaccatgagaatggagtgaggc

SEQ ID NO: 3574664 - DNA, 25 bp, Homo sapien
ggcacatgctgtccagtttacaggc

SEQ ID NO: 3574665 - DNA, 25 bp, Homo sapien
agcaaggcctgcaacgataggccca

SEQ ID NO: 3574666 - DNA, 25 bp, Homo sapien
tgctccggccccaacagccaatggg

SEQ ID NO: 3574667 - DNA, 25 bp, Homo sapien
ggcctgcaacgataggcccacgttg

SEQ ID NO: 3574668 - DNA, 25 bp, Homo sapien
ggcccggccgagtgtacagacccca

SEQ ID NO: 3574669 - DNA, 25 bp, Homo sapien
tctgatccgcatctttcacctgtgg

SEQ ID NO: 3574670 - DNA, 25 bp, Homo sapien
gaggtagcagggtcaccccttggcc

SEQ ID NO: 3574671 - DNA, 25 bp, Homo sapien
tgatgtctccagtctatggagccca

SEQ ID NO: 3574672 - DNA, 25 bp, Homo sapien
gacagaattacggacattacagcct

SEQ ID NO: 3574673 - DNA, 25 bp, Homo sapien
gatgctaagacaagggaggacagcc

SEQ ID NO: 3574674 - DNA, 25 bp, Homo sapien
gggcatttcacactccatagcacag

SEQ ID NO: 3574675 - DNA, 25 bp, Homo sapien
tgtggagtggagagcctaacatcac

SEQ ID NO: 3574676 - DNA, 25 bp, Homo sapien
actggaactgatgggacagcgctca

SEQ ID NO: 3574677 - DNA, 25 bp, Homo sapien
cctggccgccgaggtgaagaaacct

SEQ ID NO: 3574678 - DNA, 25 bp, Homo sapien
tgatgacttcgtgcgcagcagcaag

SEQ ID NO: 3574679 - DNA, 25 bp, Homo sapien
gagaacatcctggtgtcacccgtgg

SEQ ID NO: 3574680 - DNA, 25 bp, Homo sapien
gctcctggcactgcggagaagttga

SEQ ID NO: 3574681 - DNA, 25 bp, Homo sapien
gatgcgagacgagttatagggcctc

SEQ ID NO: 3574682 - DNA, 25 bp, Homo sapien
tttgaccaggacatctacgggcgcg

SEQ ID NO: 3574683 - DNA, 25 bp, Homo sapien
aagcggctccctgctattcattggg

SEQ ID NO: 3574684 - DNA, 25 bp, Homo sapien
caaaggctcctgagacacatgggtg

SEQ ID NO: 3574685 - DNA, 25 bp, Homo sapien
ccagaatgacctggccgcagtgagg

SEQ ID NO: 3574686 - DNA, 25 bp, Homo sapien
ggcagactctggtcaagaagcatcg

SEQ ID NO: 3574687 - DNA, 25 bp, Homo sapien
gagcctttgttgctatcaatccaag

SEQ ID NO: 3574688 - DNA, 25 bp, Homo sapien
actataaaactaggtgctgcagccc

SEQ ID NO: 3574689 - DNA, 25 bp, Homo sapien
caaactcaggcacacatttagtaag

SEQ ID NO: 3574690 - DNA, 25 bp, Homo sapien
tcatgctacatccagggctacaggt

SEQ ID NO: 3574691 - DNA, 25 bp, Homo sapien
tggaaggagattgtggggatccttg

SEQ ID NO: 3574692 - DNA, 25 bp, Homo sapien
gaaggagattgtggggatccttgcc

SEQ ID NO: 3574693 - DNA, 25 bp, Homo sapien
gagcaatccagcagtagccaccaag

SEQ ID NO: 3574694 - DNA, 25 bp, Homo sapien
caagatgtacatgggtctgcagaag

SEQ ID NO: 3574695 - DNA, 25 bp, Homo sapien
gaagggccagctgattcactcccat

SEQ ID NO: 3574696 - DNA, 25 bp, Homo sapien
ctgcagaagggccagctgattcact

SEQ ID NO: 3574697 - DNA, 25 bp, Homo sapien
gccaaagaaattactgctacatgaa

SEQ ID NO: 3574698 - DNA, 25 bp, Homo sapien
aaaatgtaagattctggaacaagcc

SEQ ID NO: 3574699 - DNA, 25 bp, Homo sapien
tgtaaaacagtgaagccctggccca

SEQ ID NO: 3574700 - DNA, 25 bp, Homo sapien
agaaccagaataaacgccgtagagg

SEQ ID NO: 3574701 - DNA, 25 bp, Homo sapien
aatcactgacgggttgagccaggct

SEQ ID NO: 3574702 - DNA, 25 bp, Homo sapien
gattctttggaggaactgggaccga

SEQ ID NO: 3574703 - DNA, 25 bp, Homo sapien
tctttaaaggctcagggaccgtgtg

SEQ ID NO: 3574704 - DNA, 25 bp, Homo sapien
cgtgaacctttgcatgctctgggac

SEQ ID NO: 3574705 - DNA, 25 bp, Homo sapien
tcactgtgagagtagagctcaggca

SEQ ID NO: 3574706 - DNA, 25 bp, Homo sapien
cggagtcatccagtaggcatcccag

SEQ ID NO: 3574707 - DNA, 25 bp, Homo sapien
gcagtactgtagctggactcggagt

SEQ ID NO: 3574708 - DNA, 25 bp, Homo sapien
tgattataacctgcacgtggcacag

SEQ ID NO: 3574709 - DNA, 25 bp, Homo sapien
ccccaacctttgctaggtgactcaa

SEQ ID NO: 3574710 - DNA, 25 bp, Homo sapien
ccgctttcaggtagggatgaggccc

SEQ ID NO: 3574711 - DNA, 25 bp, Homo sapien
acagtgcgccctgtgattgcatgca

SEQ ID NO: 3574712 - DNA, 25 bp, Homo sapien
ttctccatagacagtgcgccctgtg

SEQ ID NO: 3574713 - DNA, 25 bp, Homo sapien
tccaggactaaaacatgggcctctc

SEQ ID NO: 3574714 - DNA, 25 bp, Homo sapien
cctgctatagagacagtgcactgac

SEQ ID NO: 3574715 - DNA, 25 bp, Homo sapien
catggcccctggaatacaagtgatg

SEQ ID NO: 3574716 - DNA, 25 bp, Homo sapien
ggtccaccttctagggaggattagc

SEQ ID NO: 3574717 - DNA, 25 bp, Homo sapien
ggcaggaggggaacagcgaagccca

SEQ ID NO: 3574718 - DNA, 25 bp, Homo sapien
gggaacagcgaagcccaggccaacg

SEQ ID NO: 3574719 - DNA, 25 bp, Homo sapien
aacagcgaagcccaggccaacggca

SEQ ID NO: 3574720 - DNA, 25 bp, Homo sapien
caggaggggaacagcgaagcccagg

SEQ ID NO: 3574721 - DNA, 25 bp, Homo sapien
acagtgtgattccagggctctgttc

SEQ ID NO: 3574722 - DNA, 25 bp, Homo sapien
cagggctctgttcccttgctgctgc

SEQ ID NO: 3574723 - DNA, 25 bp, Homo sapien
gcccctggcagaacatggacagaga

SEQ ID NO: 3574724 - DNA, 25 bp, Homo sapien
aacatggacagagacagtgtgattc

SEQ ID NO: 3574725 - DNA, 25 bp, Homo sapien
gctgccaagggggattgccaaggaa

SEQ ID NO: 3574726 - DNA, 25 bp, Homo sapien
atgtgctcatgattcttagacacaa

SEQ ID NO: 3574727 - DNA, 25 bp, Homo sapien
tgtgctcatgattcttagacacaaa

SEQ ID NO: 3574728 - DNA, 25 bp, Homo sapien
caagggggattgccaaggaaaccat

SEQ ID NO: 3574729 - DNA, 25 bp, Homo sapien
ttgaaggatgagttagccaggtgga

SEQ ID NO: 3574730 - DNA, 25 bp, Homo sapien
tgggaggtgcgggaaaggcttcctg

SEQ ID NO: 3574731 - DNA, 25 bp, Homo sapien
tcttgaaggatgagttagccaggtg

SEQ ID NO: 3574732 - DNA, 25 bp, Homo sapien
cttgaaggatgagttagccaggtgg

SEQ ID NO: 3574733 - DNA, 25 bp, Homo sapien
gcaataaaagtccaccctagggctc

SEQ ID NO: 3574734 - DNA, 25 bp, Homo sapien
aatggagatcccagttagcaaccgc

SEQ ID NO: 3574735 - DNA, 25 bp, Homo sapien
ggttgaaacacatgcccggttctgt

SEQ ID NO: 3574736 - DNA, 25 bp, Homo sapien
taagtgcactgtccatgttaaccag

SEQ ID NO: 3574737 - DNA, 25 bp, Homo sapien
tcagtcatcctggtttccctagtgc

SEQ ID NO: 3574738 - DNA, 25 bp, Homo sapien
tgcttgggcagacccctctatctag

SEQ ID NO: 3574739 - DNA, 25 bp, Homo sapien
gctctgttcacctggtcaacaccta

SEQ ID NO: 3574740 - DNA, 25 bp, Homo sapien
ggaaccagctagaatggcctcctcc

SEQ ID NO: 3574741 - DNA, 25 bp, Homo sapien
cacgacacggaatatactgagagct

SEQ ID NO: 3574742 - DNA, 25 bp, Homo sapien
gcagtgggcctgatcaacaacttcg

SEQ ID NO: 3574743 - DNA, 25 bp, Homo sapien
aactctagcacagcgaaggtggcac

SEQ ID NO: 3574744 - DNA, 25 bp, Homo sapien
taattatggctcatgtagcacacgc

SEQ ID NO: 3574745 - DNA, 25 bp, Homo sapien
tgacattaaggccaaggttgtttct

SEQ ID NO: 3574746 - DNA, 25 bp, Homo sapien
ttgacattaaggccaaggttgtttc

SEQ ID NO: 3574747 - DNA, 25 bp, Homo sapien
tattgacattaaggccaaggttgtt

SEQ ID NO: 3574748 - DNA, 25 bp, Homo sapien
tttattgacattaaggccaaggttg

SEQ ID NO: 3574749 - DNA, 25 bp, Homo sapien
tctgtggcacatgacgattctctga

SEQ ID NO: 3574750 - DNA, 25 bp, Homo sapien
atcgaccagtgacacagatcttggg

SEQ ID NO: 3574751 - DNA, 25 bp, Homo sapien
gcactgccgggagattcgtttcgcc

SEQ ID NO: 3574752 - DNA, 25 bp, Homo sapien
aattttgtcaattgctgaagcccag

SEQ ID NO: 3574753 - DNA, 25 bp, Homo sapien
tatggctcgctgaggtcttttttgg

SEQ ID NO: 3574754 - DNA, 25 bp, Homo sapien
tggaactctgaacactaggtttttc

SEQ ID NO: 3574755 - DNA, 25 bp, Homo sapien
cttggtggtactcgggccctccgcg

SEQ ID NO: 3574756 - DNA, 25 bp, Homo sapien
tgtctttggccttcctcgtgggctt

SEQ ID NO: 3574757 - DNA, 25 bp, Homo sapien
gggcattcggcatctcccgtctgaa

SEQ ID NO: 3574758 - DNA, 25 bp, Homo sapien
cagtgcataaggtgttcccaaggac

SEQ ID NO: 3574759 - DNA, 25 bp, Homo sapien
tgacggtaatgacagaggttggctc

SEQ ID NO: 3574760 - DNA, 25 bp, Homo sapien
tgtacggagagacagaccgcaaata

SEQ ID NO: 3574761 - DNA, 25 bp, Homo sapien
tcacaggcttgatgtccgtccatgc

SEQ ID NO: 3574762 - DNA, 25 bp, Homo sapien
gagcactgtagctggtctcatgaac

SEQ ID NO: 3574763 - DNA, 25 bp, Homo sapien
gaggctgcgtattcttctgcgatca

SEQ ID NO: 3574764 - DNA, 25 bp, Homo sapien
ggcctctcctttgaactgagcactg

SEQ ID NO: 3574765 - DNA, 25 bp, Homo sapien
gaggtgtctagagttcaggtattta

SEQ ID NO: 3574766 - DNA, 25 bp, Homo sapien
gttcaggtatttagacctgaccatg

SEQ ID NO: 3574767 - DNA, 25 bp, Homo sapien
ccatggatgaggtgtctagagttca

SEQ ID NO: 3574768 - DNA, 25 bp, Homo sapien
gtgtaagccatggatgaggtgtcta

SEQ ID NO: 3574769 - DNA, 25 bp, Homo sapien
ctggggatggatgtgtaacccaagc

SEQ ID NO: 3574770 - DNA, 25 bp, Homo sapien
cccaagcttgtcttcgtttccttca

SEQ ID NO: 3574771 - DNA, 25 bp, Homo sapien
ttgtcttcgtttccttcaagctcat

SEQ ID NO: 3574772 - DNA, 25 bp, Homo sapien
gggatggatgtgtaacccaagcttg

SEQ ID NO: 3574773 - DNA, 25 bp, Homo sapien
cttccagactgtgccatccctgaga

SEQ ID NO: 3574774 - DNA, 25 bp, Homo sapien
caagctacctgtgtagatgactttc

SEQ ID NO: 3574775 - DNA, 25 bp, Homo sapien
cagactgtgccatccctgagagtaa

SEQ ID NO: 3574776 - DNA, 25 bp, Homo sapien
tccttttgcatccatgtaagtctca

SEQ ID NO: 3574777 - DNA, 25 bp, Homo sapien
gggtactgagagaaagctccctgac

SEQ ID NO: 3574778 - DNA, 25 bp, Homo sapien
ctgacagtcgagaccggcagacctc

SEQ ID NO: 3574779 - DNA, 25 bp, Homo sapien
caccaccgggtactgagagaaagct

SEQ ID NO: 3574780 - DNA, 25 bp, Homo sapien
gaaagctccctgacagtcgagaccg

SEQ ID NO: 3574781 - DNA, 25 bp, Homo sapien
ctttcggcaagcttttcagcaacct

SEQ ID NO: 3574782 - DNA, 25 bp, Homo sapien
ttttactttcggcaagcttttcagc

SEQ ID NO: 3574783 - DNA, 25 bp, Homo sapien
ttactttcggcaagcttttcagcaa

SEQ ID NO: 3574784 - DNA, 25 bp, Homo sapien
tactttcggcaagcttttcagcaac

SEQ ID NO: 3574785 - DNA, 25 bp, Homo sapien
gggtccaagcgagagcttgcctcct

SEQ ID NO: 3574786 - DNA, 25 bp, Homo sapien
ccttgctccccgaataccaaccctg

SEQ ID NO: 3574787 - DNA, 25 bp, Homo sapien
ggtccaagcgagagcttgcctcctc

SEQ ID NO: 3574788 - DNA, 25 bp, Homo sapien
tgctccccgaataccaaccctggaa

SEQ ID NO: 3574789 - DNA, 25 bp, Homo sapien
gccaggcgcggaagtccttctggta

SEQ ID NO: 3574790 - DNA, 25 bp, Homo sapien
tcggcgcggcgcacaatccaggcag

SEQ ID NO: 3574791 - DNA, 25 bp, Homo sapien
tgtaggagctgctcactgcactcgc

SEQ ID NO: 3574792 - DNA, 25 bp, Homo sapien
aggccgcagagatctgcacgggctt

SEQ ID NO: 3574793 - DNA, 25 bp, Homo sapien
cgcggggccggaggtggagccggag

SEQ ID NO: 3574794 - DNA, 25 bp, Homo sapien
gcggggccggaggtggagccggagc

SEQ ID NO: 3574795 - DNA, 25 bp, Homo sapien
gttgcccgggcaactgcatccaact

SEQ ID NO: 3574796 - DNA, 25 bp, Homo sapien
tctctatggcaaccgcgcgcgccga

SEQ ID NO: 3574797 - DNA, 25 bp, Homo sapien
actgcatccaactcgccctgggctg

SEQ ID NO: 3574798 - DNA, 25 bp, Homo sapien
tggcctccgagtacttggtgaaaac

SEQ ID NO: 3574799 - DNA, 25 bp, Homo sapien
agcaggccctcgtgatgcacggcca

SEQ ID NO: 3574800 - DNA, 25 bp, Homo sapien
agcgatgtccgctttgtccaactgg

SEQ ID NO: 3574801 - DNA, 25 bp, Homo sapien
actggttccagaagcgggcgatgca

SEQ ID NO: 3574802 - DNA, 25 bp, Homo sapien
atgcagcaggccctcgtgatgcacg

SEQ ID NO: 3574803 - DNA, 25 bp, Homo sapien
atgctagctgaaaagccggcctcct

SEQ ID NO: 3574804 - DNA, 25 bp, Homo sapien
gatgctagctgaaaagccggcctcc

SEQ ID NO: 3574805 - DNA, 25 bp, Homo sapien
tgctagctgaaaagccggcctcctc

SEQ ID NO: 3574806 - DNA, 25 bp, Homo sapien
ctagctgaaaagccggcctcctctt

SEQ ID NO: 3574807 - DNA, 25 bp, Homo sapien
gcaaacgcctttgggagcgcagtct

SEQ ID NO: 3574808 - DNA, 25 bp, Homo sapien
cgatgctgactgaaagagtgctgca

SEQ ID NO: 3574809 - DNA, 25 bp, Homo sapien
gaagcggccccacccttttatgctg

SEQ ID NO: 3574810 - DNA, 25 bp, Homo sapien
tgtagagtccctcgattaccggtcg

SEQ ID NO: 3574811 - DNA, 25 bp, Homo sapien
gagagctgagtctgagccagcatca

SEQ ID NO: 3574812 - DNA, 25 bp, Homo sapien
caagagagctgagtctgagccagca

SEQ ID NO: 3574813 - DNA, 25 bp, Homo sapien
tcaagagagctgagtctgagccagc

SEQ ID NO: 3574814 - DNA, 25 bp, Homo sapien
aagagagctgagtctgagccagcat

SEQ ID NO: 3574815 - DNA, 25 bp, Homo sapien
actggccttccaggacaatgtccct

SEQ ID NO: 3574816 - DNA, 25 bp, Homo sapien
tggccttccaggacaatgtccctct

SEQ ID NO: 3574817 - DNA, 25 bp, Homo sapien
gtgtcatgaccagggtggacattgg

SEQ ID NO: 3574818 - DNA, 25 bp, Homo sapien
catgaccagggtggacattgggcct

SEQ ID NO: 3574819 - DNA, 25 bp, Homo sapien
cactgcaccgtacttggtaaagatg

SEQ ID NO: 3574820 - DNA, 25 bp, Homo sapien
tacaatgtccataaacactgcaccg

SEQ ID NO: 3574821 - DNA, 25 bp, Homo sapien
tctgaaactgccatacatgtgttgc

SEQ ID NO: 3574822 - DNA, 25 bp, Homo sapien
ggtgcagggtaacaagtctgaaact

SEQ ID NO: 3574823 - DNA, 25 bp, Homo sapien
tgagatttaatactggatgccacaa

SEQ ID NO: 3574824 - DNA, 25 bp, Homo sapien
aagttcccagagtgcacatgattgc

SEQ ID NO: 3574825 - DNA, 25 bp, Homo sapien
aagatccagtctttacccttgagga

SEQ ID NO: 3574826 - DNA, 25 bp, Homo sapien
caggaatgggcaacaagatggataa

SEQ ID NO: 3574827 - DNA, 25 bp, Homo sapien
cacgagaaacaatggttgggttctg

SEQ ID NO: 3574828 - DNA, 25 bp, Homo sapien
gagccacgagaaacaatggttgggt

SEQ ID NO: 3574829 - DNA, 25 bp, Homo sapien
gagaaacaatggttgggttctgtgt

SEQ ID NO: 3574830 - DNA, 25 bp, Homo sapien
tatggggagccacgagaaacaatgg

SEQ ID NO: 3574831 - DNA, 25 bp, Homo sapien
tgaatgcccgtcttcagtgcatccc

SEQ ID NO: 3574832 - DNA, 25 bp, Homo sapien
cctggccctgcacttgctattctgt

SEQ ID NO: 3574833 - DNA, 25 bp, Homo sapien
gaagatgggtctgaccaggtgccag

SEQ ID NO: 3574834 - DNA, 25 bp, Homo sapien
ctgcacttgctattctgtgcagcag

SEQ ID NO: 3574835 - DNA, 25 bp, Homo sapien
ggctctcaaggttgtatttgaagaa

SEQ ID NO: 3574836 - DNA, 25 bp, Homo sapien
agtgagagacaaaccctgaggaact

SEQ ID NO: 3574837 - DNA, 25 bp, Homo sapien
tgggctctcaaggttgtatttgaag

SEQ ID NO: 3574838 - DNA, 25 bp, Homo sapien
gagacaaaccctgaggaactgtggg

SEQ ID NO: 3574839 - DNA, 25 bp, Homo sapien
tgaggactgggcaagctcacacaag

SEQ ID NO: 3574840 - DNA, 25 bp, Homo sapien
gagcagggagcttgatacacgtttg

SEQ ID NO: 3574841 - DNA, 25 bp, Homo sapien
caggaaaagcgtacaggtttgaggc

SEQ ID NO: 3574842 - DNA, 25 bp, Homo sapien
ccagtagttctgctgttacaggtgc

SEQ ID NO: 3574843 - DNA, 25 bp, Homo sapien
ggtgcatgcgtcaaacctctcacaa

SEQ ID NO: 3574844 - DNA, 25 bp, Homo sapien
ggagctaagactgctatcactgaag

SEQ ID NO: 3574845 - DNA, 25 bp, Homo sapien
aagctgcacgtgtaatccccaatgg

SEQ ID NO: 3574846 - DNA, 25 bp, Homo sapien
tccccaatggctgtacaacactggt

SEQ ID NO: 3574847 - DNA, 25 bp, Homo sapien
tgctctcctctcacgcattccccgg

SEQ ID NO: 3574848 - DNA, 25 bp, Homo sapien
gactgagggagcgaggggaataacc

SEQ ID NO: 3574849 - DNA, 25 bp, Homo sapien
ctctcacgcattccccggatccgcg

SEQ ID NO: 3574850 - DNA, 25 bp, Homo sapien
cgggcgcgccccttggaagcagggc

SEQ ID NO: 3574851 - DNA, 25 bp, Homo sapien
tctaggtggtggctaaatctgggcc

SEQ ID NO: 3574852 - DNA, 25 bp, Homo sapien
tcactcatatcggagcctggactgg

SEQ ID NO: 3574853 - DNA, 25 bp, Homo sapien
gagcacatgcttactggtggcctca

SEQ ID NO: 3574854 - DNA, 25 bp, Homo sapien
gagttggagagcacagttgccccgt

SEQ ID NO: 3574855 - DNA, 25 bp, Homo sapien
caaactacttcagagctcagtggct

SEQ ID NO: 3574856 - DNA, 25 bp, Homo sapien
aaggccgttcctgcagttgttcgca

SEQ ID NO: 3574857 - DNA, 25 bp, Homo sapien
tctcccagttccaagtcacgatttg

SEQ ID NO: 3574858 - DNA, 25 bp, Homo sapien
ctccactcagggtttctcacagggc

SEQ ID NO: 3574859 - DNA, 25 bp, Homo sapien
ggtcagttccatgattctgtctgtg

SEQ ID NO: 3574860 - DNA, 25 bp, Homo sapien
tgcccctgggtgtagtggtgagggc

SEQ ID NO: 3574861 - DNA, 25 bp, Homo sapien
gttccatgattctgtctgtggttcc

SEQ ID NO: 3574862 - DNA, 25 bp, Homo sapien
cacctgcccctgggtgtagtggtga

SEQ ID NO: 3574863 - DNA, 25 bp, Homo sapien
atccattattcagagcagggtattg

SEQ ID NO: 3574864 - DNA, 25 bp, Homo sapien
caaattggcttatcacgttgttcaa

SEQ ID NO: 3574865 - DNA, 25 bp, Homo sapien
tatttattaggtcaaattggcttat

SEQ ID NO: 3574866 - DNA, 25 bp, Homo sapien
ccattattcagagcagggtattgaa

SEQ ID NO: 3574867 - DNA, 25 bp, Homo sapien
tcagttagggattctatgtgcatca

SEQ ID NO: 3574868 - DNA, 25 bp, Homo sapien
tctgatgggtgtttgactagacagg

SEQ ID NO: 3574869 - DNA, 25 bp, Homo sapien
cactttgtaccaaatgagctgcgat

SEQ ID NO: 3574870 - DNA, 25 bp, Homo sapien
tttctgaaacgtagtgcccaggctg

SEQ ID NO: 3574871 - DNA, 25 bp, Homo sapien
tccagaacccagtagctagcctgtg

SEQ ID NO: 3574872 - DNA, 25 bp, Homo sapien
tgagttcttcccaatgcccctaggg

SEQ ID NO: 3574873 - DNA, 25 bp, Homo sapien
tagcctgtgcaaaggtgaacctcag

SEQ ID NO: 3574874 - DNA, 25 bp, Homo sapien
ttgaatactttgcaagcagcaggct

SEQ ID NO: 3574875 - DNA, 25 bp, Homo sapien
gacttgccttgggatacatagctca

SEQ ID NO: 3574876 - DNA, 25 bp, Homo sapien
ttgtggatcacggaagtcttcatgg

SEQ ID NO: 3574877 - DNA, 25 bp, Homo sapien
aggaagatcaacatcctgcagaatg

SEQ ID NO: 3574878 - DNA, 25 bp, Homo sapien
ccaagattccaaagtgcctgattcc

SEQ ID NO: 3574879 - DNA, 25 bp, Homo sapien
tcctgccccagctaagactgatgga

SEQ ID NO: 3574880 - DNA, 25 bp, Homo sapien
aattcctaactcaaggtcccagaga

SEQ ID NO: 3574881 - DNA, 25 bp, Homo sapien
aaattcctaactcaaggtcccagag

SEQ ID NO: 3574882 - DNA, 25 bp, Homo sapien
aagactgatggataagtagcaaagg

SEQ ID NO: 3574883 - DNA, 25 bp, Homo sapien
tcatgaaagagctcgtgggactgcc

SEQ ID NO: 3574884 - DNA, 25 bp, Homo sapien
cgacggttctcaggtcccagtgcat

SEQ ID NO: 3574885 - DNA, 25 bp, Homo sapien
cagcttactagctagtggagtgcga

SEQ ID NO: 3574886 - DNA, 25 bp, Homo sapien
tacttgtcggttggagctggtcatg

SEQ ID NO: 3574887 - DNA, 25 bp, Homo sapien
actgtgaacactaaattgagaaaac

SEQ ID NO: 3574888 - DNA, 25 bp, Homo sapien
gaagcgggaaagagttgagcaaatt

SEQ ID NO: 3574889 - DNA, 25 bp, Homo sapien
tgtgaacactaaattgagaaaactc

SEQ ID NO: 3574890 - DNA, 25 bp, Homo sapien
agagttgagcaaatttgatctgtaa

SEQ ID NO: 3574891 - DNA, 25 bp, Homo sapien
ctgatcaactagttgtgaacacaac

SEQ ID NO: 3574892 - DNA, 25 bp, Homo sapien
aatctctaactggttctgatcaact

SEQ ID NO: 3574893 - DNA, 25 bp, Homo sapien
tagtcaagtgaggaactgggagtgg

SEQ ID NO: 3574894 - DNA, 25 bp, Homo sapien
tgaacacaactgcatttggactagc

SEQ ID NO: 3574895 - DNA, 25 bp, Homo sapien
tgccctctcctggaataccgactgt

SEQ ID NO: 3574896 - DNA, 25 bp, Homo sapien
taatccagttgcctactctacagct

SEQ ID NO: 3574897 - DNA, 25 bp, Homo sapien
ccgactgtcttgaatacatcagaag

SEQ ID NO: 3574898 - DNA, 25 bp, Homo sapien
gtcacctgttgacctttcctctgaa

SEQ ID NO: 3574899 - DNA, 25 bp, Homo sapien
ctcccaagtaggtgaagtgtgcacc

SEQ ID NO: 3574900 - DNA, 25 bp, Homo sapien
tcccaagtaggtgaagtgtgcacca

SEQ ID NO: 3574901 - DNA, 25 bp, Homo sapien
tcccaagcatttgtaccagttacat

SEQ ID NO: 3574902 - DNA, 25 bp, Homo sapien
ttagttgctctatccttgcccaaac

SEQ ID NO: 3574903 - DNA, 25 bp, Homo sapien
cagttacatcttaccagcagtgtga

SEQ ID NO: 3574904 - DNA, 25 bp, Homo sapien
tgatatttatgttgtggagcacttg

SEQ ID NO: 3574905 - DNA, 25 bp, Homo sapien
gttgggcgacatgtccaaatctgct

SEQ ID NO: 3574906 - DNA, 25 bp, Homo sapien
gcagcgttgggcgacatgtccaaat

SEQ ID NO: 3574907 - DNA, 25 bp, Homo sapien
tgtggagacattaccaaagtgggtc

SEQ ID NO: 3574908 - DNA, 25 bp, Homo sapien
cgaggatccgtgttcatctttctct

SEQ ID NO: 3574909 - DNA, 25 bp, Homo sapien
catggcataatgactgtggacattc

SEQ ID NO: 3574910 - DNA, 25 bp, Homo sapien
ggcacacatggcataatgactgtgg

SEQ ID NO: 3574911 - DNA, 25 bp, Homo sapien
gtggttacaaggcacacatggcata

SEQ ID NO: 3574912 - DNA, 25 bp, Homo sapien
caaggcacacatggcataatgactg

SEQ ID NO: 3574913 - DNA, 25 bp, Homo sapien
ctggtcttggatatagctttctcct

SEQ ID NO: 3574914 - DNA, 25 bp, Homo sapien
tccttgttaccactagcttttctac

SEQ ID NO: 3574915 - DNA, 25 bp, Homo sapien
ttccttgttaccactagcttttcta

SEQ ID NO: 3574916 - DNA, 25 bp, Homo sapien
gtcttggatatagctttctcctcta

SEQ ID NO: 3574917 - DNA, 25 bp, Homo sapien
tctctccccagcattctagtgtttt

SEQ ID NO: 3574918 - DNA, 25 bp, Homo sapien
tctccccagcattctagtgttttcc

SEQ ID NO: 3574919 - DNA, 25 bp, Homo sapien
tccccagcattctagtgttttccat

SEQ ID NO: 3574920 - DNA, 25 bp, Homo sapien
ttctctccccagcattctagtgttt

SEQ ID NO: 3574921 - DNA, 25 bp, Homo sapien
ttttctcccaatatgtcaagtgtga

SEQ ID NO: 3574922 - DNA, 25 bp, Homo sapien
gaggagtgtctctgactctatgacc

SEQ ID NO: 3574923 - DNA, 25 bp, Homo sapien
gtcaagtgtgaagtgattggaccca

SEQ ID NO: 3574924 - DNA, 25 bp, Homo sapien
taatggtttactattgaggagtgtc

SEQ ID NO: 3574925 - DNA, 25 bp, Homo sapien
caaatgtcacgttatgacaccagcc

SEQ ID NO: 3574926 - DNA, 25 bp, Homo sapien
gaaaagagaccccaaggtagtcatg

SEQ ID NO: 3574927 - DNA, 25 bp, Homo sapien
catgcttgcctgttgggaacacagg

SEQ ID NO: 3574928 - DNA, 25 bp, Homo sapien
taaatgcttggatagtgtctcatgc

SEQ ID NO: 3574929 - DNA, 25 bp, Homo sapien
ccattatgaactcttgcattggctc

SEQ ID NO: 3574930 - DNA, 25 bp, Homo sapien
caggtggaaggccattatgaactct

SEQ ID NO: 3574931 - DNA, 25 bp, Homo sapien
tgaactcttgcattggctctcttat

SEQ ID NO: 3574932 - DNA, 25 bp, Homo sapien
tatgaactcttgcattggctctctt

SEQ ID NO: 3574933 - DNA, 25 bp, Homo sapien
cattctaagttcttgtggagtgtga

SEQ ID NO: 3574934 - DNA, 25 bp, Homo sapien
tcaaagaggaacttgaataatttca

SEQ ID NO: 3574935 - DNA, 25 bp, Homo sapien
gaactctgtgcgttttttgatagta

SEQ ID NO: 3574936 - DNA, 25 bp, Homo sapien
gagtgtgaatatcagcaattttctg

SEQ ID NO: 3574937 - DNA, 25 bp, Homo sapien
ttaccttgcagtgaacctcactatt

SEQ ID NO: 3574938 - DNA, 25 bp, Homo sapien
gaacctcactattgtcctgtctaat

SEQ ID NO: 3574939 - DNA, 25 bp, Homo sapien
actattgtcctgtctaatgactttg

SEQ ID NO: 3574940 - DNA, 25 bp, Homo sapien
tgcagtgaacctcactattgtcctg

SEQ ID NO: 3574941 - DNA, 25 bp, Homo sapien
cataagtaggagaaagagtgctgct

SEQ ID NO: 3574942 - DNA, 25 bp, Homo sapien
tattcccattgcgaatgtttgtggg

SEQ ID NO: 3574943 - DNA, 25 bp, Homo sapien
ggatggctggatacagataaccaca

SEQ ID NO: 3574944 - DNA, 25 bp, Homo sapien
tatttactagcataacctggtctac

SEQ ID NO: 3574945 - DNA, 25 bp, Homo sapien
ttgcaggcagttactctctgagctt

SEQ ID NO: 3574946 - DNA, 25 bp, Homo sapien
tctacttctgagtttctgtggccta

SEQ ID NO: 3574947 - DNA, 25 bp, Homo sapien
tcagttgacaattcgttgcaggcag

SEQ ID NO: 3574948 - DNA, 25 bp, Homo sapien
tcttgaagactaatgctcagttgac

SEQ ID NO: 3574949 - DNA, 25 bp, Homo sapien
tgtcatactgagagggcaggctgtt

SEQ ID NO: 3574950 - DNA, 25 bp, Homo sapien
ggccaaggcaagtcaaaaagctgca

SEQ ID NO: 3574951 - DNA, 25 bp, Homo sapien
tcttcaagacctatgctgagctgga

SEQ ID NO: 3574952 - DNA, 25 bp, Homo sapien
gacaagttagaacagacacactttg

SEQ ID NO: 3574953 - DNA, 25 bp, Homo sapien
cattctccacataataagacccatg

SEQ ID NO: 3574954 - DNA, 25 bp, Homo sapien
agcaagtcagcagagtcattctcca

SEQ ID NO: 3574955 - DNA, 25 bp, Homo sapien
gcacagcaagtcagcagagtcattc

SEQ ID NO: 3574956 - DNA, 25 bp, Homo sapien
cacagcaagtcagcagagtcattct

SEQ ID NO: 3574957 - DNA, 25 bp, Homo sapien
catgactcacctttccatgtgccat

SEQ ID NO: 3574958 - DNA, 25 bp, Homo sapien
tgtgccattcttcccacaactgatg

SEQ ID NO: 3574959 - DNA, 25 bp, Homo sapien
acaactgatgcttgcccattctgca

SEQ ID NO: 3574960 - DNA, 25 bp, Homo sapien
gggtcagatttctggattgcaatcc

SEQ ID NO: 3574961 - DNA, 25 bp, Homo sapien
aagcaggctaaagggtatacaaatt

SEQ ID NO: 3574962 - DNA, 25 bp, Homo sapien
tacagtttttatcacacacacccat

SEQ ID NO: 3574963 - DNA, 25 bp, Homo sapien
gataggctgcataagtctagggata

SEQ ID NO: 3574964 - DNA, 25 bp, Homo sapien
tacaaatttgcagttagataggctg

SEQ ID NO: 3574965 - DNA, 25 bp, Homo sapien
tcagctttaaagaggctggtcaagc

SEQ ID NO: 3574966 - DNA, 25 bp, Homo sapien
cagattcccttgcaaggcagcttaa

SEQ ID NO: 3574967 - DNA, 25 bp, Homo sapien
taagattcattagcccatagtcaaa

SEQ ID NO: 3574968 - DNA, 25 bp, Homo sapien
taatggtgaacctgggacaagaaac

SEQ ID NO: 3574969 - DNA, 25 bp, Homo sapien
tttgtggtcactatacgtggctggg

SEQ ID NO: 3574970 - DNA, 25 bp, Homo sapien
gaggtaccagaatgctcctgtatgt

SEQ ID NO: 3574971 - DNA, 25 bp, Homo sapien
cataggaactccctgtagctacaca

SEQ ID NO: 3574972 - DNA, 25 bp, Homo sapien
catcatagaacctggacaaaagcct

SEQ ID NO: 3574973 - DNA, 25 bp, Homo sapien
ccagtggaaaatggaacttctgttg

SEQ ID NO: 3574974 - DNA, 25 bp, Homo sapien
ggttctttgagaatagataagacat

SEQ ID NO: 3574975 - DNA, 25 bp, Homo sapien
tggaaaatggaacttctgttggttc

SEQ ID NO: 3574976 - DNA, 25 bp, Homo sapien
tgagaatagataagacatgagatat

SEQ ID NO: 3574977 - DNA, 25 bp, Homo sapien
gtgctccgtcaggatagacatggac

SEQ ID NO: 3574978 - DNA, 25 bp, Homo sapien
tgttgaaccgtgagggcaagctgct

SEQ ID NO: 3574979 - DNA, 25 bp, Homo sapien
gttgaaccgtgagggcaagctgctg

SEQ ID NO: 3574980 - DNA, 25 bp, Homo sapien
ctgttgaaccgtgagggcaagctgc

SEQ ID NO: 3574981 - DNA, 25 bp, Homo sapien
cttgtcttactatgttttattacag

SEQ ID NO: 3574982 - DNA, 25 bp, Homo sapien
tattacagaacaggagcagtgatag

SEQ ID NO: 3574983 - DNA, 25 bp, Homo sapien
tagattggggtagatatcctgcatt

SEQ ID NO: 3574984 - DNA, 25 bp, Homo sapien
ttattgtagattggggtagatatcc

SEQ ID NO: 3574985 - DNA, 25 bp, Homo sapien
ccccttattgtgtcatcgctcagta

SEQ ID NO: 3574986 - DNA, 25 bp, Homo sapien
tcctgtagtccccttattgtgtcat

SEQ ID NO: 3574987 - DNA, 25 bp, Homo sapien
ctcagtaatgttcatatcagtggcc

SEQ ID NO: 3574988 - DNA, 25 bp, Homo sapien
tcagtggcccagaggcaacgagaaa

SEQ ID NO: 3574989 - DNA, 25 bp, Homo sapien
gaccattttggctgggacctgtggc

SEQ ID NO: 3574990 - DNA, 25 bp, Homo sapien
agaccattttggctgggacctgtgg

SEQ ID NO: 3574991 - DNA, 25 bp, Homo sapien
gagagaccattttggctgggacctg

SEQ ID NO: 3574992 - DNA, 25 bp, Homo sapien
aagagagaccattttggctgggacc

SEQ ID NO: 3574993 - DNA, 25 bp, Homo sapien
gaaggcatttagcttgatgtgtact

SEQ ID NO: 3574994 - DNA, 25 bp, Homo sapien
ttgaatgtcgtgttcccttgtggga

SEQ ID NO: 3574995 - DNA, 25 bp, Homo sapien
ttggagtccatccatgaaaagagga

SEQ ID NO: 3574996 - DNA, 25 bp, Homo sapien
cattaccatcttagagtttgtgggc

SEQ ID NO: 3574997 - DNA, 25 bp, Homo sapien
tacgtacccaaggacattgcctcag

SEQ ID NO: 3574998 - DNA, 25 bp, Homo sapien
taggtttccgccatgtactgaaagg

SEQ ID NO: 3574999 - DNA, 25 bp, Homo sapien
gatgggccatgcgtcctgaaaacag

SEQ ID NO: 3575000 - DNA, 25 bp, Homo sapien
aaaagccatgtctatctaagcggag

SEQ ID NO: 3575001 - DNA, 25 bp, Homo sapien
tcaaaggaatgactaacaccccagc

SEQ ID NO: 3575002 - DNA, 25 bp, Homo sapien
acagagcaggcgactggacgcacga

SEQ ID NO: 3575003 - DNA, 25 bp, Homo sapien
tatcgttctgggctgtatccactct

SEQ ID NO: 3575004 - DNA, 25 bp, Homo sapien
cacgaagcattcctgctgagtgaag

SEQ ID NO: 3575005 - DNA, 25 bp, Homo sapien
tcttcgaaggtttgttgactgcatg

SEQ ID NO: 3575006 - DNA, 25 bp, Homo sapien
aaggaagaggtgctgacactccagg

SEQ ID NO: 3575007 - DNA, 25 bp, Homo sapien
catgaatgaaggagataacagggcc

SEQ ID NO: 3575008 - DNA, 25 bp, Homo sapien
tgcctccattacagttcttcgaagg

SEQ ID NO: 3575009 - DNA, 25 bp, Homo sapien
tgtgaccacgggacaggtgggcggc

SEQ ID NO: 3575010 - DNA, 25 bp, Homo sapien
gggctgatgcggtgagagcacagct

SEQ ID NO: 3575011 - DNA, 25 bp, Homo sapien
ggcccactgagccaacgcccatctg

SEQ ID NO: 3575012 - DNA, 25 bp, Homo sapien
tctgccacgggctgatgcggtgaga

SEQ ID NO: 3575013 - DNA, 25 bp, Homo sapien
gcagccgatttgtgttctcccaacc

SEQ ID NO: 3575014 - DNA, 25 bp, Homo sapien
agacccaggtctcgcccagatcttt

SEQ ID NO: 3575015 - DNA, 25 bp, Homo sapien
tcatctggtagccagatcctctggc

SEQ ID NO: 3575016 - DNA, 25 bp, Homo sapien
gcccagatctttgagcagccgattt

SEQ ID NO: 3575017 - DNA, 25 bp, Homo sapien
actgcggaatccctagaacagagcc

SEQ ID NO: 3575018 - DNA, 25 bp, Homo sapien
tagccaagcgcctgaggacaggcat

SEQ ID NO: 3575019 - DNA, 25 bp, Homo sapien
tcccagaaacgtgtagataggcaag

SEQ ID NO: 3575020 - DNA, 25 bp, Homo sapien
gaaatgctctctagtctgggcgtag

SEQ ID NO: 3575021 - DNA, 25 bp, Homo sapien
gagcagcatccttcaagaggcacac

SEQ ID NO: 3575022 - DNA, 25 bp, Homo sapien
tgagcagcatccttcaagaggcaca

SEQ ID NO: 3575023 - DNA, 25 bp, Homo sapien
cagcatccttcaagaggcacacatg

SEQ ID NO: 3575024 - DNA, 25 bp, Homo sapien
gtgagcagcatccttcaagaggcac

SEQ ID NO: 3575025 - DNA, 25 bp, Homo sapien
caggaccacacgaggtacgggtagg

SEQ ID NO: 3575026 - DNA, 25 bp, Homo sapien
atggtgtcctcgcaggccctggtcc

SEQ ID NO: 3575027 - DNA, 25 bp, Homo sapien
ccaggaccacacgaggtacgggtag

SEQ ID NO: 3575028 - DNA, 25 bp, Homo sapien
gcccctctggtatgggcccttgctg

SEQ ID NO: 3575029 - DNA, 25 bp, Homo sapien
gcagggcatggagcccaagttcagg

SEQ ID NO: 3575030 - DNA, 25 bp, Homo sapien
agggcagggcatggagcccaagttc

SEQ ID NO: 3575031 - DNA, 25 bp, Homo sapien
ggcatggagcccaagttcaggggag

SEQ ID NO: 3575032 - DNA, 25 bp, Homo sapien
cacagggcagggcatggagcccaag

SEQ ID NO: 3575033 - DNA, 25 bp, Homo sapien
ggtgtctgggatgattgtcctgatc

SEQ ID NO: 3575034 - DNA, 25 bp, Homo sapien
tctgggatgattgtcctgatcagcc

SEQ ID NO: 3575035 - DNA, 25 bp, Homo sapien
tgtctgggatgattgtcctgatcag

SEQ ID NO: 3575036 - DNA, 25 bp, Homo sapien
tgccagcctgaatgggggtgtctgg

SEQ ID NO: 3575037 - DNA, 25 bp, Homo sapien
tggcgcccagcaggtaagacaatgt

SEQ ID NO: 3575038 - DNA, 25 bp, Homo sapien
ggccggtaaggagactgtcttcagc

SEQ ID NO: 3575039 - DNA, 25 bp, Homo sapien
cagcaggtaagacaatgtggaccaa

SEQ ID NO: 3575040 - DNA, 25 bp, Homo sapien
ggtaaggagactgtcttcagcagcc

SEQ ID NO: 3575041 - DNA, 25 bp, Homo sapien
gaacgtgttagttgagctgtggcct

SEQ ID NO: 3575042 - DNA, 25 bp, Homo sapien
cagggcgggaacgtgttagttgagc

SEQ ID NO: 3575043 - DNA, 25 bp, Homo sapien
tggcacctgcgcctggactgcgctt

SEQ ID NO: 3575044 - DNA, 25 bp, Homo sapien
tgtggcctgatcctgatgggcagct

SEQ ID NO: 3575045 - DNA, 25 bp, Homo sapien
actccagacccggatatctgcccgg

SEQ ID NO: 3575046 - DNA, 25 bp, Homo sapien
ccggccactcagtatttccactagg

SEQ ID NO: 3575047 - DNA, 25 bp, Homo sapien
aaactgtatcacaatccccacgggc

SEQ ID NO: 3575048 - DNA, 25 bp, Homo sapien
ccatgtcggcattcggccccttcag

SEQ ID NO: 3575049 - DNA, 25 bp, Homo sapien
ttctcaacacgtccaatgctgccag

SEQ ID NO: 3575050 - DNA, 25 bp, Homo sapien
tcacgcagaaaacccaccagggcta

SEQ ID NO: 3575051 - DNA, 25 bp, Homo sapien
cagggtcacgcagaaaacccaccag

SEQ ID NO: 3575052 - DNA, 25 bp, Homo sapien
acttctcaacacgtccaatgctgcc

SEQ ID NO: 3575053 - DNA, 25 bp, Homo sapien
cgagttcacttgacgaggccgggaa

SEQ ID NO: 3575054 - DNA, 25 bp, Homo sapien
gagaagggacatcaatcggaagccg

SEQ ID NO: 3575055 - DNA, 25 bp, Homo sapien
tgacaacacggccaggctttgagct

SEQ ID NO: 3575056 - DNA, 25 bp, Homo sapien
gcctgcgtgtgtgtccctgaggaaa

SEQ ID NO: 3575057 - DNA, 25 bp, Homo sapien
ggccctgaaaggtcaagtctgtatc

SEQ ID NO: 3575058 - DNA, 25 bp, Homo sapien
gaggaattgagaagtgccaccccaa

SEQ ID NO: 3575059 - DNA, 25 bp, Homo sapien
cattctgaagaaggcgggcagaccc

SEQ ID NO: 3575060 - DNA, 25 bp, Homo sapien
tagtgattccatgtggtgggcccag

SEQ ID NO: 3575061 - DNA, 25 bp, Homo sapien
gggtccttgagcagagtcctcgctc

SEQ ID NO: 3575062 - DNA, 25 bp, Homo sapien
ggtccttgagcagagtcctcgctcc

SEQ ID NO: 3575063 - DNA, 25 bp, Homo sapien
ggtcgcagctgtcgcttccgttgga

SEQ ID NO: 3575064 - DNA, 25 bp, Homo sapien
gacatagcgctccacggtacgctca

SEQ ID NO: 3575065 - DNA, 25 bp, Homo sapien
tggtacttacagtggcaccgctcga

SEQ ID NO: 3575066 - DNA, 25 bp, Homo sapien
ggtacgctcacacctgcggcaggtg

SEQ ID NO: 3575067 - DNA, 25 bp, Homo sapien
aggcagccggcagcgtctcccatgg

SEQ ID NO: 3575068 - DNA, 25 bp, Homo sapien
aggtcagtgcatgccttggtcacca

SEQ ID NO: 3575069 - DNA, 25 bp, Homo sapien
cttagaagctgtcttgatctttggg

SEQ ID NO: 3575070 - DNA, 25 bp, Homo sapien
tagcgatggaatcccactatattgc

SEQ ID NO: 3575071 - DNA, 25 bp, Homo sapien
caggtatcgggtcttgaggtcagca

SEQ ID NO: 3575072 - DNA, 25 bp, Homo sapien
gacgagttccgagtccttcacaggc

SEQ ID NO: 3575073 - DNA, 25 bp, Homo sapien
tgcactaccttggtggccgacaggt

SEQ ID NO: 3575074 - DNA, 25 bp, Homo sapien
tgagctctgcagatagacgagttcc

SEQ ID NO: 3575075 - DNA, 25 bp, Homo sapien
ctgttgtgtagacgcatcagtttat

SEQ ID NO: 3575076 - DNA, 25 bp, Homo sapien
tcactgttgtgtagacgcatcagtt

SEQ ID NO: 3575077 - DNA, 25 bp, Homo sapien
tgtgtagacgcatcagtttattggc

SEQ ID NO: 3575078 - DNA, 25 bp, Homo sapien
gtagacgcatcagtttattggcttg

SEQ ID NO: 3575079 - DNA, 25 bp, Homo sapien
gacagcgcatacacgaaggccgact

SEQ ID NO: 3575080 - DNA, 25 bp, Homo sapien
gagcccgtagctgaggttgtccgca

SEQ ID NO: 3575081 - DNA, 25 bp, Homo sapien
atcggaaaacttggcccccatgagg

SEQ ID NO: 3575082 - DNA, 25 bp, Homo sapien
agccgggcaggtcgccggaggtgca

SEQ ID NO: 3575083 - DNA, 25 bp, Homo sapien
tcctgacccctgtacctgtgagcat

SEQ ID NO: 3575084 - DNA, 25 bp, Homo sapien
gatgcgccagacaaatgcacaaagg

SEQ ID NO: 3575085 - DNA, 25 bp, Homo sapien
gctgagacgaggtcataccggatca

SEQ ID NO: 3575086 - DNA, 25 bp, Homo sapien
acaaaggacctgctatgcgtggacc

SEQ ID NO: 3575087 - DNA, 25 bp, Homo sapien
agttccagcgcatgtcggcaaaggc

SEQ ID NO: 3575088 - DNA, 25 bp, Homo sapien
cagtgttgcgtctggttcagtgcca

SEQ ID NO: 3575089 - DNA, 25 bp, Homo sapien
gcgagctcaatggaggagcagttcc

SEQ ID NO: 3575090 - DNA, 25 bp, Homo sapien
aggccttcatgacctcgcgggcggc

SEQ ID NO: 3575091 - DNA, 25 bp, Homo sapien
acctgttgctgaaccctgccttact

SEQ ID NO: 3575092 - DNA, 25 bp, Homo sapien
gaggcaaacgtcatcacctcagtgt

SEQ ID NO: 3575093 - DNA, 25 bp, Homo sapien
tgtttcccggttgtcaacagctctt

SEQ ID NO: 3575094 - DNA, 25 bp, Homo sapien
tgaaccctgccttacttcctgggtg

SEQ ID NO: 3575095 - DNA, 25 bp, Homo sapien
gacagctgggaaaagctagtgccca

SEQ ID NO: 3575096 - DNA, 25 bp, Homo sapien
gctgggtaccccattgcaaaaggaa

SEQ ID NO: 3575097 - DNA, 25 bp, Homo sapien
tccagactgtttgctggcggcgcag

SEQ ID NO: 3575098 - DNA, 25 bp, Homo sapien
cacaggactcttatgggcggcaaat

SEQ ID NO: 3575099 - DNA, 25 bp, Homo sapien
agcacacgccggtctggagcgccag

SEQ ID NO: 3575100 - DNA, 25 bp, Homo sapien
cacttgatgccatagcacacgccgg

SEQ ID NO: 3575101 - DNA, 25 bp, Homo sapien
atgccatagcacacgccggtctgga

SEQ ID NO: 3575102 - DNA, 25 bp, Homo sapien
cctcgcagacctgcggccgcgccct

SEQ ID NO: 3575103 - DNA, 25 bp, Homo sapien
ggaggagccgcgccgaagtcctccg

SEQ ID NO: 3575104 - DNA, 25 bp, Homo sapien
agccgcgccgaagtcctccgcctgc

SEQ ID NO: 3575105 - DNA, 25 bp, Homo sapien
gagccgcgccgaagtcctccgcctg

SEQ ID NO: 3575106 - DNA, 25 bp, Homo sapien
ggcgcgcccggggtcacacccagga

SEQ ID NO: 3575107 - DNA, 25 bp, Homo sapien
ctggctcgaattaggcgcggccgaa

SEQ ID NO: 3575108 - DNA, 25 bp, Homo sapien
gaaggcgtgtctcccagcgtggccc

SEQ ID NO: 3575109 - DNA, 25 bp, Homo sapien
aacgcgccttcgagcccctctggcc

SEQ ID NO: 3575110 - DNA, 25 bp, Homo sapien
gcgtcccgcgcctggctcgaattag

SEQ ID NO: 3575111 - DNA, 25 bp, Homo sapien
gcagcagagtcgaggacccggagct

SEQ ID NO: 3575112 - DNA, 25 bp, Homo sapien
gcagagtcgaggacccggagctggg

SEQ ID NO: 3575113 - DNA, 25 bp, Homo sapien
aaggagaggaatgaggaatcaggag

SEQ ID NO: 3575114 - DNA, 25 bp, Homo sapien
gagaggaatgaggaatcaggagtcc

SEQ ID NO: 3575115 - DNA, 25 bp, Homo sapien
cgttcctgcgcgtgggtagtcagca

SEQ ID NO: 3575116 - DNA, 25 bp, Homo sapien
tagtcagcacgcagagatgggaagc

SEQ ID NO: 3575117 - DNA, 25 bp, Homo sapien
tttctggagcctgtcggcaaaaccc

SEQ ID NO: 3575118 - DNA, 25 bp, Homo sapien
gatgggaagccccactgttttctgg

SEQ ID NO: 3575119 - DNA, 25 bp, Homo sapien
ctcgaagttggtccgagctaccctg

SEQ ID NO: 3575120 - DNA, 25 bp, Homo sapien
ttggtccgagctaccctgcctgcag

SEQ ID NO: 3575121 - DNA, 25 bp, Homo sapien
agcgagcggtcacctcctcgaagtt

SEQ ID NO: 3575122 - DNA, 25 bp, Homo sapien
cgccaggcgtagcacctttggagag

SEQ ID NO: 3575123 - DNA, 25 bp, Homo sapien
agggagaacaccacgagcgcagcgc

SEQ ID NO: 3575124 - DNA, 25 bp, Homo sapien
gccgccaacagatggtcataggccc

SEQ ID NO: 3575125 - DNA, 25 bp, Homo sapien
cagcgccgccaacagatggtcatag

SEQ ID NO: 3575126 - DNA, 25 bp, Homo sapien
cagatggtcataggcccggtctgtg

SEQ ID NO: 3575127 - DNA, 25 bp, Homo sapien
ggcgcgcaaggtcggcacgggcggg

SEQ ID NO: 3575128 - DNA, 25 bp, Homo sapien
ctcccgccacgcagctcacggagct

SEQ ID NO: 3575129 - DNA, 25 bp, Homo sapien
agctgaccccgccaaccagggacgc

SEQ ID NO: 3575130 - DNA, 25 bp, Homo sapien
gacgccgagcgacggcttcaaggtt

SEQ ID NO: 3575131 - DNA, 25 bp, Homo sapien
cggctttgaccccagccgtgaggct

SEQ ID NO: 3575132 - DNA, 25 bp, Homo sapien
gaccccagccgtgaggctttcgaga

SEQ ID NO: 3575133 - DNA, 25 bp, Homo sapien
tttcgagagacgtctgcttggctgc

SEQ ID NO: 3575134 - DNA, 25 bp, Homo sapien
tgaggctttcgagagacgtctgctt

SEQ ID NO: 3575135 - DNA, 25 bp, Homo sapien
ctgtcgcgggatccaagtcccccac

SEQ ID NO: 3575136 - DNA, 25 bp, Homo sapien
tctgtcgcgggatccaagtccccca

SEQ ID NO: 3575137 - DNA, 25 bp, Homo sapien
accctctgtcgcgggatccaagtcc

SEQ ID NO: 3575138 - DNA, 25 bp, Homo sapien
cctctgtcgcgggatccaagtcccc

SEQ ID NO: 3575139 - DNA, 25 bp, Homo sapien
gggtggctcgggcatgacctcatcc

SEQ ID NO: 3575140 - DNA, 25 bp, Homo sapien
tcatccgccgaacgactgggaagga

SEQ ID NO: 3575141 - DNA, 25 bp, Homo sapien
acctcatccgccgaacgactgggaa

SEQ ID NO: 3575142 - DNA, 25 bp, Homo sapien
gggcatgacctcatccgccgaacga

SEQ ID NO: 3575143 - DNA, 25 bp, Homo sapien
gcttcgctccgcaaaggggaactct

SEQ ID NO: 3575144 - DNA, 25 bp, Homo sapien
cgggaaagttcgaggagggccgcag

SEQ ID NO: 3575145 - DNA, 25 bp, Homo sapien
gcacaacccaccaccgtcccgcgtg

SEQ ID NO: 3575146 - DNA, 25 bp, Homo sapien
gaggcttcgctccgcaaaggggaac

SEQ ID NO: 3575147 - DNA, 25 bp, Homo sapien
tgcgagaagcgtcgtccccctcgga

SEQ ID NO: 3575148 - DNA, 25 bp, Homo sapien
ggtccccgctgagcggctgcccgct

SEQ ID NO: 3575149 - DNA, 25 bp, Homo sapien
ccaagggggtcgtggcgggtgcgag

SEQ ID NO: 3575150 - DNA, 25 bp, Homo sapien
tggcgggtgcgagaagcgtcgtccc

SEQ ID NO: 3575151 - DNA, 25 bp, Homo sapien
gagtgcggtttccagcgggcccgtg

SEQ ID NO: 3575152 - DNA, 25 bp, Homo sapien
aggacccgcgcggagtcaggcgcgg

SEQ ID NO: 3575153 - DNA, 25 bp, Homo sapien
atcctggcaagctgcggccggctca

SEQ ID NO: 3575154 - DNA, 25 bp, Homo sapien
cctcttcgtgaagcggcgcgagaag

SEQ ID NO: 3575155 - DNA, 25 bp, Homo sapien
tcgcgcagcgtggttactgtagacg

SEQ ID NO: 3575156 - DNA, 25 bp, Homo sapien
catccttaggtgttggtcgcgcagc

SEQ ID NO: 3575157 - DNA, 25 bp, Homo sapien
gtaaggcccatctcgaatcgtcgca

SEQ ID NO: 3575158 - DNA, 25 bp, Homo sapien
tgtagacgtctgaggtcccgaaacc

SEQ ID NO: 3575159 - DNA, 25 bp, Homo sapien
cccatcgggtgctgtgggttcatcc

SEQ ID NO: 3575160 - DNA, 25 bp, Homo sapien
cgatttctaactgcccatcgggtgc

SEQ ID NO: 3575161 - DNA, 25 bp, Homo sapien
catgactgcgatttctaactgccca

SEQ ID NO: 3575162 - DNA, 25 bp, Homo sapien
cccacaacatgactgcgatttctaa

SEQ ID NO: 3575163 - DNA, 25 bp, Homo sapien
tccaccaccagggtgcttttagaaa

SEQ ID NO: 3575164 - DNA, 25 bp, Homo sapien
caccagggtgcttttagaaaggcct

SEQ ID NO: 3575165 - DNA, 25 bp, Homo sapien
gagactaaagcgtactgcttccacc

SEQ ID NO: 3575166 - DNA, 25 bp, Homo sapien
ttcccatttctcattggttacaatg

SEQ ID NO: 3575167 - DNA, 25 bp, Homo sapien
agggactccggggaagtcactcagc

SEQ ID NO: 3575168 - DNA, 25 bp, Homo sapien
gactccggggaagtcactcagcctc

SEQ ID NO: 3575169 - DNA, 25 bp, Homo sapien
ctcagcctctgggatccttagtttc

SEQ ID NO: 3575170 - DNA, 25 bp, Homo sapien
gcctctgggatccttagtttcatca

SEQ ID NO: 3575171 - DNA, 25 bp, Homo sapien
ctctgggtgaagagtgaggagagcc

SEQ ID NO: 3575172 - DNA, 25 bp, Homo sapien
gagccagagagaggttgacagccat

SEQ ID NO: 3575173 - DNA, 25 bp, Homo sapien
tgggtgaagagtgaggagagccaga

SEQ ID NO: 3575174 - DNA, 25 bp, Homo sapien
ggagagccagagagaggttgacagc

SEQ ID NO: 3575175 - DNA, 25 bp, Homo sapien
ggccaggacgcaggcagcgatgacc

SEQ ID NO: 3575176 - DNA, 25 bp, Homo sapien
ccaggacgcaggcagcgatgaccag

SEQ ID NO: 3575177 - DNA, 25 bp, Homo sapien
cgcaggcagcgatgaccaggccttc

SEQ ID NO: 3575178 - DNA, 25 bp, Homo sapien
gacgcaggcagcgatgaccaggcct

SEQ ID NO: 3575179 - DNA, 25 bp, Homo sapien
aggcctctgggcagcgttactgaca

SEQ ID NO: 3575180 - DNA, 25 bp, Homo sapien
tttgagctccaacgtggaaagtgct

SEQ ID NO: 3575181 - DNA, 25 bp, Homo sapien
tgctgtccatgatgtcacgggcccc

SEQ ID NO: 3575182 - DNA, 25 bp, Homo sapien
tactgacactttataaggcaggctg

SEQ ID NO: 3575183 - DNA, 25 bp, Homo sapien
atggtgcctccatcgacaagcctgg

SEQ ID NO: 3575184 - DNA, 25 bp, Homo sapien
ggcagactgatagcccagtggagca

SEQ ID NO: 3575185 - DNA, 25 bp, Homo sapien
aaaggtcttcgacgtccaccactcg

SEQ ID NO: 3575186 - DNA, 25 bp, Homo sapien
tctgttgtccaaaggtcttcgacgt

SEQ ID NO: 3575187 - DNA, 25 bp, Homo sapien
agggagcacctagcttcctgttctg

SEQ ID NO: 3575188 - DNA, 25 bp, Homo sapien
catctctgtcactcatgggcactga

SEQ ID NO: 3575189 - DNA, 25 bp, Homo sapien
tctgtcactcatgggcactgaggga

SEQ ID NO: 3575190 - DNA, 25 bp, Homo sapien
gagggagcacctagcttcctgttct

SEQ ID NO: 3575191 - DNA, 25 bp, Homo sapien
ctcggacccaaaccgagaatcatac

SEQ ID NO: 3575192 - DNA, 25 bp, Homo sapien
gaatcatacccctagaccaacgagc

SEQ ID NO: 3575193 - DNA, 25 bp, Homo sapien
cctctcggacccaaaccgagaatca

SEQ ID NO: 3575194 - DNA, 25 bp, Homo sapien
agaatcatacccctagaccaacgag

SEQ ID NO: 3575195 - DNA, 25 bp, Homo sapien
tccacgttggtggagcctaaggaag

SEQ ID NO: 3575196 - DNA, 25 bp, Homo sapien
gaggcctgaggtcatgtgtccaaac

SEQ ID NO: 3575197 - DNA, 25 bp, Homo sapien
gaatgtcaatgatgaggaggcctga

SEQ ID NO: 3575198 - DNA, 25 bp, Homo sapien
caacagggaccagttcatggagggc

SEQ ID NO: 3575199 - DNA, 25 bp, Homo sapien
taaccatccgcaggctcatttccct

SEQ ID NO: 3575200 - DNA, 25 bp, Homo sapien
gcctccataaccatccgcaggctca

SEQ ID NO: 3575201 - DNA, 25 bp, Homo sapien
tccataaccatccgcaggctcattt

SEQ ID NO: 3575202 - DNA, 25 bp, Homo sapien
cataaccatccgcaggctcatttcc

SEQ ID NO: 3575203 - DNA, 25 bp, Homo sapien
aggcattggagttggcaatgacgat

SEQ ID NO: 3575204 - DNA, 25 bp, Homo sapien
ctgggccccgccatgtgcattgagg

SEQ ID NO: 3575205 - DNA, 25 bp, Homo sapien
agagctgctgtctgccgggaggagg

SEQ ID NO: 3575206 - DNA, 25 bp, Homo sapien
ccgccatgtgcattgaggcattgga

SEQ ID NO: 3575207 - DNA, 25 bp, Homo sapien
ctgcagacgccacggtctgttggct

SEQ ID NO: 3575208 - DNA, 25 bp, Homo sapien
gacgccacggtctgttggctttgcg

SEQ ID NO: 3575209 - DNA, 25 bp, Homo sapien
tttgcgagcaggatgaactggggag

SEQ ID NO: 3575210 - DNA, 25 bp, Homo sapien
ccacggtctgttggctttgcgagca

SEQ ID NO: 3575211 - DNA, 25 bp, Homo sapien
agtgcgggggcaaatagcccatcca

SEQ ID NO: 3575212 - DNA, 25 bp, Homo sapien
tgcagggcaagtgagtgggtgatgc

SEQ ID NO: 3575213 - DNA, 25 bp, Homo sapien
taggttggggtgctctcagcagagc

SEQ ID NO: 3575214 - DNA, 25 bp, Homo sapien
cagcagagccaggggagacggcagc

SEQ ID NO: 3575215 - DNA, 25 bp, Homo sapien
gccagatcggatgcttgaacaacag

SEQ ID NO: 3575216 - DNA, 25 bp, Homo sapien
tgcagttgcgctgagccagaaagag

SEQ ID NO: 3575217 - DNA, 25 bp, Homo sapien
acagggcgcaagaagtaaagatgtc

SEQ ID NO: 3575218 - DNA, 25 bp, Homo sapien
cagccccaaccctggtcaagttcaa

SEQ ID NO: 3575219 - DNA, 25 bp, Homo sapien
tagggagagacttggtggcctcatg

SEQ ID NO: 3575220 - DNA, 25 bp, Homo sapien
ccaggttctggccacgtcgtggaag

SEQ ID NO: 3575221 - DNA, 25 bp, Homo sapien
aggttctggccacgtcgtggaagaa

SEQ ID NO: 3575222 - DNA, 25 bp, Homo sapien
ccccgatggggccaaggcattggaa

SEQ ID NO: 3575223 - DNA, 25 bp, Homo sapien
atggggccaaggcattggaacctcc

SEQ ID NO: 3575224 - DNA, 25 bp, Homo sapien
ctggctgggctccagggtcgcccat

SEQ ID NO: 3575225 - DNA, 25 bp, Homo sapien
gtgtggataggagcctggctgggct

SEQ ID NO: 3575226 - DNA, 25 bp, Homo sapien
agcctggctgggctccagggtcgcc

SEQ ID NO: 3575227 - DNA, 25 bp, Homo sapien
cgtgtggataggagcctggctgggc

SEQ ID NO: 3575228 - DNA, 25 bp, Homo sapien
catgcaattagttggcattgcagca

SEQ ID NO: 3575229 - DNA, 25 bp, Homo sapien
cttggaacgggtgagactggaagcc

SEQ ID NO: 3575230 - DNA, 25 bp, Homo sapien
tgtagaagaggccagatagagccag

SEQ ID NO: 3575231 - DNA, 25 bp, Homo sapien
cacaggggtgctgctagagacatgc

SEQ ID NO: 3575232 - DNA, 25 bp, Homo sapien
gtgagtagcctaggagctcacagaa

SEQ ID NO: 3575233 - DNA, 25 bp, Homo sapien
gaggagaggtgagtagcctaggagc

SEQ ID NO: 3575234 - DNA, 25 bp, Homo sapien
tgagccccgcctacacgcccactat

SEQ ID NO: 3575235 - DNA, 25 bp, Homo sapien
cctacacgcccactatcattgccat

SEQ ID NO: 3575236 - DNA, 25 bp, Homo sapien
ccccgtagtggagcttgtaagacct

SEQ ID NO: 3575237 - DNA, 25 bp, Homo sapien
tcagccatccccgtagtggagcttg

SEQ ID NO: 3575238 - DNA, 25 bp, Homo sapien
gccatccccgtagtggagcttgtaa

SEQ ID NO: 3575239 - DNA, 25 bp, Homo sapien
gtggagcttgtaagacctgcctctg

SEQ ID NO: 3575240 - DNA, 25 bp, Homo sapien
atcaggaacaggtaagggccatagg

SEQ ID NO: 3575241 - DNA, 25 bp, Homo sapien
caggaacaggtaagggccataggcc

SEQ ID NO: 3575242 - DNA, 25 bp, Homo sapien
ggcactgcccgggtctcatcaggaa

SEQ ID NO: 3575243 - DNA, 25 bp, Homo sapien
gcccgggtctcatcaggaacaggta

SEQ ID NO: 3575244 - DNA, 25 bp, Homo sapien
atcacctgccggctcttggccagta

SEQ ID NO: 3575245 - DNA, 25 bp, Homo sapien
gggatgctaccaggggccgaatcat

SEQ ID NO: 3575246 - DNA, 25 bp, Homo sapien
ctcttggccagtacccaggctgtgc

SEQ ID NO: 3575247 - DNA, 25 bp, Homo sapien
gcacgggggccagggatgctaccag

SEQ ID NO: 3575248 - DNA, 25 bp, Homo sapien
aggcctctcctcgaagggttccgcg

SEQ ID NO: 3575249 - DNA, 25 bp, Homo sapien
cctccgggcctcgggaatatttgtg

SEQ ID NO: 3575250 - DNA, 25 bp, Homo sapien
gttccgcgcgcagaaaggtgggccg

SEQ ID NO: 3575251 - DNA, 25 bp, Homo sapien
ccagaagacgcgctggaaaggcgtt

SEQ ID NO: 3575252 - DNA, 25 bp, Homo sapien
tggagaggatccctcaggagccagc

SEQ ID NO: 3575253 - DNA, 25 bp, Homo sapien
taagcacttagggaccttctgtcag

SEQ ID NO: 3575254 - DNA, 25 bp, Homo sapien
gatgctatagaccaagacgaccctg

SEQ ID NO: 3575255 - DNA, 25 bp, Homo sapien
ctgggctgcagggaatcgagttacc

SEQ ID NO: 3575256 - DNA, 25 bp, Homo sapien
ggtcccccagtgatctagagtccca

SEQ ID NO: 3575257 - DNA, 25 bp, Homo sapien
gtcccccagtgatctagagtcccaa

SEQ ID NO: 3575258 - DNA, 25 bp, Homo sapien
cagtgatctagagtcccaagtgtga

SEQ ID NO: 3575259 - DNA, 25 bp, Homo sapien
ccccagtgatctagagtcccaagtg

SEQ ID NO: 3575260 - DNA, 25 bp, Homo sapien
cttccttcagcaggaaagggacaac

SEQ ID NO: 3575261 - DNA, 25 bp, Homo sapien
tctgatgcttccaggtcccggccac

SEQ ID NO: 3575262 - DNA, 25 bp, Homo sapien
gggacaacagcctcttctaggccca

SEQ ID NO: 3575263 - DNA, 25 bp, Homo sapien
aggtcccggccacacttctctccac

SEQ ID NO: 3575264 - DNA, 25 bp, Homo sapien
tatctttttgataagccgcatgcat

SEQ ID NO: 3575265 - DNA, 25 bp, Homo sapien
gccctggctataagataaactcttg

SEQ ID NO: 3575266 - DNA, 25 bp, Homo sapien
aagccgcatgcataatgtgtcctga

SEQ ID NO: 3575267 - DNA, 25 bp, Homo sapien
tctcttagagccctggctataagat

SEQ ID NO: 3575268 - DNA, 25 bp, Homo sapien
ttacacaagaatgttttgaccccac

SEQ ID NO: 3575269 - DNA, 25 bp, Homo sapien
tttacacaagaatgttttgacccca

SEQ ID NO: 3575270 - DNA, 25 bp, Homo sapien
gaatttacacaagaatgttttgacc

SEQ ID NO: 3575271 - DNA, 25 bp, Homo sapien
tatcaatggctaatgtattcaatgg

SEQ ID NO: 3575272 - DNA, 25 bp, Homo sapien
cagagatcacgcaaaaggaaacatg

SEQ ID NO: 3575273 - DNA, 25 bp, Homo sapien
cccaacaagtagagatccacagtga

SEQ ID NO: 3575274 - DNA, 25 bp, Homo sapien
tgtctcaaccatgaaacagaagtgt

SEQ ID NO: 3575275 - DNA, 25 bp, Homo sapien
agtttcggaattatctgtaggaagc

SEQ ID NO: 3575276 - DNA, 25 bp, Homo sapien
cacagtttcggaattatctgtagga

SEQ ID NO: 3575277 - DNA, 25 bp, Homo sapien
attttccacagtttcggaattatct

SEQ ID NO: 3575278 - DNA, 25 bp, Homo sapien
tccacagtttcggaattatctgtag

SEQ ID NO: 3575279 - DNA, 25 bp, Homo sapien
tcagctgacagcgtgtcaggattgg

SEQ ID NO: 3575280 - DNA, 25 bp, Homo sapien
tttaagttcctgaataatgtgctcc

SEQ ID NO: 3575281 - DNA, 25 bp, Homo sapien
tctttaagttcctgaataatgtgct

SEQ ID NO: 3575282 - DNA, 25 bp, Homo sapien
gaattaattttacaaacaggctcat

SEQ ID NO: 3575283 - DNA, 25 bp, Homo sapien
agaattaattttacaaacaggctca

SEQ ID NO: 3575284 - DNA, 25 bp, Homo sapien
tattacatctttggttaaatattta

SEQ ID NO: 3575285 - DNA, 25 bp, Homo sapien
atatttaaaatccacaaactcattc

SEQ ID NO: 3575286 - DNA, 25 bp, Homo sapien
tatttaaaatccacaaactcattca

SEQ ID NO: 3575287 - DNA, 25 bp, Homo sapien
ttaaaatccacaaactcattcattc

SEQ ID NO: 3575288 - DNA, 25 bp, Homo sapien
gaaatctagtctgaccggagcctgt

SEQ ID NO: 3575289 - DNA, 25 bp, Homo sapien
caggctgcccaagtacaaagggaaa

SEQ ID NO: 3575290 - DNA, 25 bp, Homo sapien
cttagaacataagactagggccggg

SEQ ID NO: 3575291 - DNA, 25 bp, Homo sapien
aagttgaaatccaagtgcgtctggc

SEQ ID NO: 3575292 - DNA, 25 bp, Homo sapien
tttttttctgtttcagtgtcctgat

SEQ ID NO: 3575293 - DNA, 25 bp, Homo sapien
tttctgtttcagtgtcctgatttca

SEQ ID NO: 3575294 - DNA, 25 bp, Homo sapien
tgtttcagtgtcctgatttcatctt

SEQ ID NO: 3575295 - DNA, 25 bp, Homo sapien
tcagtgtcctgatttcatcttcact

SEQ ID NO: 3575296 - DNA, 25 bp, Homo sapien
gaataagctgttaatgactccaagg

SEQ ID NO: 3575297 - DNA, 25 bp, Homo sapien
cccataagaaggaggttgctgaatc

SEQ ID NO: 3575298 - DNA, 25 bp, Homo sapien
cagagcatagtaggccaagtggcac

SEQ ID NO: 3575299 - DNA, 25 bp, Homo sapien
tgtttactggctaatgaaaggcaca

SEQ ID NO: 3575300 - DNA, 25 bp, Homo sapien
tctgtggcagaaaagcagcaatgcc

SEQ ID NO: 3575301 - DNA, 25 bp, Homo sapien
aagacagcaggatgcctgttgggca

SEQ ID NO: 3575302 - DNA, 25 bp, Homo sapien
cagcaatgccagtgacagctgaaga

SEQ ID NO: 3575303 - DNA, 25 bp, Homo sapien
agcaggatgcctgttgggcagcact

SEQ ID NO: 3575304 - DNA, 25 bp, Homo sapien
gtcagtattcatctaagtcccagga

SEQ ID NO: 3575305 - DNA, 25 bp, Homo sapien
tacaggacagcaagtgattgagctc

SEQ ID NO: 3575306 - DNA, 25 bp, Homo sapien
tacagggaaatgatagctacaggac

SEQ ID NO: 3575307 - DNA, 25 bp, Homo sapien
ggctacagaccaagattcacaaatg

SEQ ID NO: 3575308 - DNA, 25 bp, Homo sapien
gactggtaagatcaaatattgttgg

SEQ ID NO: 3575309 - DNA, 25 bp, Homo sapien
caaatgactggtaagatcaaatatt

SEQ ID NO: 3575310 - DNA, 25 bp, Homo sapien
ctcgaagaactgtcctataaggact

SEQ ID NO: 3575311 - DNA, 25 bp, Homo sapien
ttggtattgcattatctcgaagaac

SEQ ID NO: 3575312 - DNA, 25 bp, Homo sapien
actgaattgaaggtaggcataaaat

SEQ ID NO: 3575313 - DNA, 25 bp, Homo sapien
aaaattctatgttaatgacctccac

SEQ ID NO: 3575314 - DNA, 25 bp, Homo sapien
cttcaactccagctctaaagtatag

SEQ ID NO: 3575315 - DNA, 25 bp, Homo sapien
gcccttctggcaatctattataaat

SEQ ID NO: 3575316 - DNA, 25 bp, Homo sapien
gcccaggctggctctgaattcctag

SEQ ID NO: 3575317 - DNA, 25 bp, Homo sapien
ccaggctggctctgaattcctaggc

SEQ ID NO: 3575318 - DNA, 25 bp, Homo sapien
aggctggctctgaattcctaggctc

SEQ ID NO: 3575319 - DNA, 25 bp, Homo sapien
ttgcccaggctggctctgaattcct

SEQ ID NO: 3575320 - DNA, 25 bp, Homo sapien
ctcacaatctggttagaattatcta

SEQ ID NO: 3575321 - DNA, 25 bp, Homo sapien
cacatttgcgttcatttattcaaga

SEQ ID NO: 3575322 - DNA, 25 bp, Homo sapien
taaactgttgaaccggaattggctc

SEQ ID NO: 3575323 - DNA, 25 bp, Homo sapien
caacatctcctagacgtatagaaag

SEQ ID NO: 3575324 - DNA, 25 bp, Homo sapien
aatgacttcacaagtatctgcttca

SEQ ID NO: 3575325 - DNA, 25 bp, Homo sapien
ttcacaagtatctgcttcaattaat

SEQ ID NO: 3575326 - DNA, 25 bp, Homo sapien
tgacttcacaagtatctgcttcaat

SEQ ID NO: 3575327 - DNA, 25 bp, Homo sapien
gacttcacaagtatctgcttcaatt

SEQ ID NO: 3575328 - DNA, 25 bp, Homo sapien
cccaatatctgaggtgttacattag

SEQ ID NO: 3575329 - DNA, 25 bp, Homo sapien
gttacactgaaacaagtctgcttca

SEQ ID NO: 3575330 - DNA, 25 bp, Homo sapien
tacattagttacactgaaacaagtc

SEQ ID NO: 3575331 - DNA, 25 bp, Homo sapien
tttgaatcaagtttatgtctatccc

SEQ ID NO: 3575332 - DNA, 25 bp, Homo sapien
taagtctgctctcctacagttctcc

SEQ ID NO: 3575333 - DNA, 25 bp, Homo sapien
aatgtttatttagctgatcaggtgt

SEQ ID NO: 3575334 - DNA, 25 bp, Homo sapien
agttctacagatcatagaggtctca

SEQ ID NO: 3575335 - DNA, 25 bp, Homo sapien
tgtttggcacataatcgataatgtt

SEQ ID NO: 3575336 - DNA, 25 bp, Homo sapien
gcttattaagacaagtactggcaga

SEQ ID NO: 3575337 - DNA, 25 bp, Homo sapien
tgtaaagcttattaagacaagtact

SEQ ID NO: 3575338 - DNA, 25 bp, Homo sapien
taaagcttattaagacaagtactgg

SEQ ID NO: 3575339 - DNA, 25 bp, Homo sapien
aagcttattaagacaagtactggca

SEQ ID NO: 3575340 - DNA, 25 bp, Homo sapien
tactgagcgagttctttcccatgtc

SEQ ID NO: 3575341 - DNA, 25 bp, Homo sapien
tgtctcggaacttaaaacactggga

SEQ ID NO: 3575342 - DNA, 25 bp, Homo sapien
aaggccaagtcagactaagatgctc

SEQ ID NO: 3575343 - DNA, 25 bp, Homo sapien
tgggaatgccccaggactcaatcct

SEQ ID NO: 3575344 - DNA, 25 bp, Homo sapien
tgcccggcctagacatctattcttg

SEQ ID NO: 3575345 - DNA, 25 bp, Homo sapien
tattcttgaatgtctatcaggtctc

SEQ ID NO: 3575346 - DNA, 25 bp, Homo sapien
gctcagagcctgttctagcactttg

SEQ ID NO: 3575347 - DNA, 25 bp, Homo sapien
aaaaatcttgaagtcggctgggcgc

SEQ ID NO: 3575348 - DNA, 25 bp, Homo sapien
ccaagtcggactgcgtgctcttccg

SEQ ID NO: 3575349 - DNA, 25 bp, Homo sapien
tgcgtgctcttccgcgtgcagttgg

SEQ ID NO: 3575350 - DNA, 25 bp, Homo sapien
cctgaagaaggccaagtcggactgc

SEQ ID NO: 3575351 - DNA, 25 bp, Homo sapien
tgaagaaggccaagtcggactgcgt

SEQ ID NO: 3575352 - DNA, 25 bp, Homo sapien
gggacgcggctccacagtgctgtga

SEQ ID NO: 3575353 - DNA, 25 bp, Homo sapien
cacagtgctgtgagcggccgggagg

SEQ ID NO: 3575354 - DNA, 25 bp, Homo sapien
gcgggctagaagccgcgagggccag

SEQ ID NO: 3575355 - DNA, 25 bp, Homo sapien
ggccaggaggggtgccgcggtccga

SEQ ID NO: 3575356 - DNA, 25 bp, Homo sapien
aagagggaaggaatagaacgaggag

SEQ ID NO: 3575357 - DNA, 25 bp, Homo sapien
ttaagttcagtagtgagaaagaggg

SEQ ID NO: 3575358 - DNA, 25 bp, Homo sapien
gtgactgacagtgaacaattgattg

SEQ ID NO: 3575359 - DNA, 25 bp, Homo sapien
ctgtgactgacagtgaacaattgat

SEQ ID NO: 3575360 - DNA, 25 bp, Homo sapien
ttttgctggagcaaatattctgaaa

SEQ ID NO: 3575361 - DNA, 25 bp, Homo sapien
tttttgctggagcaaatattctgaa

SEQ ID NO: 3575362 - DNA, 25 bp, Homo sapien
tcagcagagactggcatactctcag

SEQ ID NO: 3575363 - DNA, 25 bp, Homo sapien
ccttccttagactgggggcgcctct

SEQ ID NO: 3575364 - DNA, 25 bp, Homo sapien
ggtttgggcaatgtctcagcagaga

SEQ ID NO: 3575365 - DNA, 25 bp, Homo sapien
caaagcctggtcctgagtaggtgcc

SEQ ID NO: 3575366 - DNA, 25 bp, Homo sapien
ctcatataaagctctctttcttgtc

SEQ ID NO: 3575367 - DNA, 25 bp, Homo sapien
tcatataaagctctctttcttgtct

SEQ ID NO: 3575368 - DNA, 25 bp, Homo sapien
ccatctccatctgggggatggtaaa

SEQ ID NO: 3575369 - DNA, 25 bp, Homo sapien
gagatttggggccatctccatctgg

SEQ ID NO: 3575370 - DNA, 25 bp, Homo sapien
gatttggggccatctccatctgggg

SEQ ID NO: 3575371 - DNA, 25 bp, Homo sapien
gggccatctccatctgggggatggt

SEQ ID NO: 3575372 - DNA, 25 bp, Homo sapien
ttgatccgcgtgagcggagcagccc

SEQ ID NO: 3575373 - DNA, 25 bp, Homo sapien
tcctcagctgcggtgatggagccag

SEQ ID NO: 3575374 - DNA, 25 bp, Homo sapien
tctgacatgactaatgaggctccgg

SEQ ID NO: 3575375 - DNA, 25 bp, Homo sapien
acataggagcttttgatgaactggc

SEQ ID NO: 3575376 - DNA, 25 bp, Homo sapien
taacagcttgatcagatgtggcaat

SEQ ID NO: 3575377 - DNA, 25 bp, Homo sapien
cagggtaacagcttgatcagatgtg

SEQ ID NO: 3575378 - DNA, 25 bp, Homo sapien
cagccagggtaacagcttgatcaga

SEQ ID NO: 3575379 - DNA, 25 bp, Homo sapien
ggtaacagcttgatcagatgtggca

SEQ ID NO: 3575380 - DNA, 25 bp, Homo sapien
tccttgccctttcctgctgttgtcc

SEQ ID NO: 3575381 - DNA, 25 bp, Homo sapien
ttgccctttcctgctgttgtccatg

SEQ ID NO: 3575382 - DNA, 25 bp, Homo sapien
gccctttcctgctgttgtccatgag

SEQ ID NO: 3575383 - DNA, 25 bp, Homo sapien
cctttcctgctgttgtccatgagca

SEQ ID NO: 3575384 - DNA, 25 bp, Homo sapien
aagtgctcaacacttcttgaaagag

SEQ ID NO: 3575385 - DNA, 25 bp, Homo sapien
gaaagagagtatggctccaagcctt

SEQ ID NO: 3575386 - DNA, 25 bp, Homo sapien
cttcttgaaagagagtatggctcca

SEQ ID NO: 3575387 - DNA, 25 bp, Homo sapien
ttggaactgacaagaaagtggacac

SEQ ID NO: 3575388 - DNA, 25 bp, Homo sapien
tgcttggatttatagccccctaccc

SEQ ID NO: 3575389 - DNA, 25 bp, Homo sapien
ctggaaactctctgaggtgaagaca

SEQ ID NO: 3575390 - DNA, 25 bp, Homo sapien
tttctgacagggttattatttccat

SEQ ID NO: 3575391 - DNA, 25 bp, Homo sapien
ggtgaagacaagttggatattatgc

SEQ ID NO: 3575392 - DNA, 25 bp, Homo sapien
ctataatgtatacagctatctgcat

SEQ ID NO: 3575393 - DNA, 25 bp, Homo sapien
tcttctataatgtatacagctatct

SEQ ID NO: 3575394 - DNA, 25 bp, Homo sapien
ttctataatgtatacagctatctgc

SEQ ID NO: 3575395 - DNA, 25 bp, Homo sapien
cttcttctataatgtatacagctat

SEQ ID NO: 3575396 - DNA, 25 bp, Homo sapien
cgaactctcgatctcagatgatccg

SEQ ID NO: 3575397 - DNA, 25 bp, Homo sapien
tggtctcgaactctcgatctcagat

SEQ ID NO: 3575398 - DNA, 25 bp, Homo sapien
tctcgaactctcgatctcagatgat

SEQ ID NO: 3575399 - DNA, 25 bp, Homo sapien
ctggtctcgaactctcgatctcaga

SEQ ID NO: 3575400 - DNA, 25 bp, Homo sapien
ttaacaagatcctcaagcggttcct

SEQ ID NO: 3575401 - DNA, 25 bp, Homo sapien
tgtagtatgtaatgaccagcaccat

SEQ ID NO: 3575402 - DNA, 25 bp, Homo sapien
gcctctcgagtagagtacctaggac

SEQ ID NO: 3575403 - DNA, 25 bp, Homo sapien
tgttaagactataggatccaggcct

SEQ ID NO: 3575404 - DNA, 25 bp, Homo sapien
tctgacgagcgtttctaccggatcc

SEQ ID NO: 3575405 - DNA, 25 bp, Homo sapien
ggtgcatcacaagatccctataggg

SEQ ID NO: 3575406 - DNA, 25 bp, Homo sapien
tccactcaagaacatgaagagtctc

SEQ ID NO: 3575407 - DNA, 25 bp, Homo sapien
gaatcttcagtatcaggcaactggc

SEQ ID NO: 3575408 - DNA, 25 bp, Homo sapien
aaaagaccttctccacaaataagat

SEQ ID NO: 3575409 - DNA, 25 bp, Homo sapien
tggaggaaatccaacgcgagaacgc

SEQ ID NO: 3575410 - DNA, 25 bp, Homo sapien
gcacgagatatcactaccattccca

SEQ ID NO: 3575411 - DNA, 25 bp, Homo sapien
gcccttgacagagatagcacgagat

SEQ ID NO: 3575412 - DNA, 25 bp, Homo sapien
tgcaacaactccgtaacccgcaaat

SEQ ID NO: 3575413 - DNA, 25 bp, Homo sapien
tcctcgacggcacttcaggaacaaa

SEQ ID NO: 3575414 - DNA, 25 bp, Homo sapien
taataattgccctcacgatcgaaga

SEQ ID NO: 3575415 - DNA, 25 bp, Homo sapien
cactatgttagttctcgtagcgtgg

SEQ ID NO: 3575416 - DNA, 25 bp, Homo sapien
gaaactcgatcctaatcctcgacgg

SEQ ID NO: 3575417 - DNA, 25 bp, Homo sapien
catcttggccgctacgtgtgacgcc

SEQ ID NO: 3575418 - DNA, 25 bp, Homo sapien
tgctccaaccgctagcgccatcttg

SEQ ID NO: 3575419 - DNA, 25 bp, Homo sapien
acgtagcagagagcgcagccgattg

SEQ ID NO: 3575420 - DNA, 25 bp, Homo sapien
taccgtaaaggtcgcagcagagccc

SEQ ID NO: 3575421 - DNA, 25 bp, Homo sapien
ctcccgactggccgcgcgcggctgc

SEQ ID NO: 3575422 - DNA, 25 bp, Homo sapien
cctcccgactggccgcgcgcggctg

SEQ ID NO: 3575423 - DNA, 25 bp, Homo sapien
tgtcccctagtcttggcggaggagc

SEQ ID NO: 3575424 - DNA, 25 bp, Homo sapien
gaggagccttttagatgagccccga

SEQ ID NO: 3575425 - DNA, 25 bp, Homo sapien
gggccaagcattcggagcccggctt

SEQ ID NO: 3575426 - DNA, 25 bp, Homo sapien
tagatgagccccgaaaggccgggca

SEQ ID NO: 3575427 - DNA, 25 bp, Homo sapien
tattgaactgcctggattgatccat

SEQ ID NO: 3575428 - DNA, 25 bp, Homo sapien
aagcctgtattttggaattggactt

SEQ ID NO: 3575429 - DNA, 25 bp, Homo sapien
tctctacccgagttttctcgtctat

SEQ ID NO: 3575430 - DNA, 25 bp, Homo sapien
actagctgcgtgactgtgggaaaac

SEQ ID NO: 3575431 - DNA, 25 bp, Homo sapien
gaacaaagcgctaccagtaatccca

SEQ ID NO: 3575432 - DNA, 25 bp, Homo sapien
tagtaggtcagatagtttaggagaa

SEQ ID NO: 3575433 - DNA, 25 bp, Homo sapien
tatatactttctttaggctggccct

SEQ ID NO: 3575434 - DNA, 25 bp, Homo sapien
taggagaacaatagagaacaaagcg

SEQ ID NO: 3575435 - DNA, 25 bp, Homo sapien
gtgagggacagtgcattcaggccca

SEQ ID NO: 3575436 - DNA, 25 bp, Homo sapien
tgtgagggacagtgcattcaggccc

SEQ ID NO: 3575437 - DNA, 25 bp, Homo sapien
tctgtttgcttcctaatgtcttaac

SEQ ID NO: 3575438 - DNA, 25 bp, Homo sapien
tttaacaactttgttggctacaaga

SEQ ID NO: 3575439 - DNA, 25 bp, Homo sapien
taacctaaatcaccatctcaaaaag

SEQ ID NO: 3575440 - DNA, 25 bp, Homo sapien
tatgtagcctgtctaattatatact

SEQ ID NO: 3575441 - DNA, 25 bp, Homo sapien
catttactgaagtggacttcttcca

SEQ ID NO: 3575442 - DNA, 25 bp, Homo sapien
tcaaaagttaagtggagacatggaa

SEQ ID NO: 3575443 - DNA, 25 bp, Homo sapien
tcatccatgaagactggaacccact

SEQ ID NO: 3575444 - DNA, 25 bp, Homo sapien
cagaggactcactatctgtggtagc

SEQ ID NO: 3575445 - DNA, 25 bp, Homo sapien
ggaatccagactccgtaggcggtct

SEQ ID NO: 3575446 - DNA, 25 bp, Homo sapien
aatccagactccgtaggcggtctgc

SEQ ID NO: 3575447 - DNA, 25 bp, Homo sapien
tccagactccgtaggcggtctgctg

SEQ ID NO: 3575448 - DNA, 25 bp, Homo sapien
atccagactccgtaggcggtctgct

SEQ ID NO: 3575449 - DNA, 25 bp, Homo sapien
cgtcatcacggcccattctcaatga

SEQ ID NO: 3575450 - DNA, 25 bp, Homo sapien
ggttacagatcaacagcataccaag

SEQ ID NO: 3575451 - DNA, 25 bp, Homo sapien
gtaaggttacagatcaacagcatac

SEQ ID NO: 3575452 - DNA, 25 bp, Homo sapien
aaggttacagatcaacagcatacca

SEQ ID NO: 3575453 - DNA, 25 bp, Homo sapien
tcaagtctctcaggtcccgaatgaa

SEQ ID NO: 3575454 - DNA, 25 bp, Homo sapien
gaatcttatcttgcctcgccctgtg

SEQ ID NO: 3575455 - DNA, 25 bp, Homo sapien
caggttctactcacagcagcgtgga

SEQ ID NO: 3575456 - DNA, 25 bp, Homo sapien
tctgctccgtcagaatccagggcgt

SEQ ID NO: 3575457 - DNA, 25 bp, Homo sapien
tattcattctcgatcagttcgtctt

SEQ ID NO: 3575458 - DNA, 25 bp, Homo sapien
agttcgtcttttgcttccgacctgg

SEQ ID NO: 3575459 - DNA, 25 bp, Homo sapien
ttccgacctggcctggaggcctgca

SEQ ID NO: 3575460 - DNA, 25 bp, Homo sapien
gcctgcaggtacatggtggacctta

SEQ ID NO: 3575461 - DNA, 25 bp, Homo sapien
ctggaaatctccatcgtcttctctg

SEQ ID NO: 3575462 - DNA, 25 bp, Homo sapien
tctccatcgtcttctctgttgcaag

SEQ ID NO: 3575463 - DNA, 25 bp, Homo sapien
tctgttgcaagccatcaggcagtcc

SEQ ID NO: 3575464 - DNA, 25 bp, Homo sapien
tctctgttgcaagccatcaggcagt

SEQ ID NO: 3575465 - DNA, 25 bp, Homo sapien
agaccacggaggtgagcgaagcctc

SEQ ID NO: 3575466 - DNA, 25 bp, Homo sapien
ggtaccaatctatcctgaggcttga

SEQ ID NO: 3575467 - DNA, 25 bp, Homo sapien
cctgccagcagatgtcgggcagcca

SEQ ID NO: 3575468 - DNA, 25 bp, Homo sapien
agcctccagcggcatccagctggta

SEQ ID NO: 3575469 - DNA, 25 bp, Homo sapien
cgtgggaaatgtttgatgatgccat

SEQ ID NO: 3575470 - DNA, 25 bp, Homo sapien
tgacgtgggaaatgtttgatgatgc

SEQ ID NO: 3575471 - DNA, 25 bp, Homo sapien
acgtgggaaatgtttgatgatgcca

SEQ ID NO: 3575472 - DNA, 25 bp, Homo sapien
gacgtgggaaatgtttgatgatgcc

SEQ ID NO: 3575473 - DNA, 25 bp, Homo sapien
tcctgctgtgctggcatgttctgag

SEQ ID NO: 3575474 - DNA, 25 bp, Homo sapien
agctcctgctgtgctggcatgttct

SEQ ID NO: 3575475 - DNA, 25 bp, Homo sapien
gctgtgctggcatgttctgagccat

SEQ ID NO: 3575476 - DNA, 25 bp, Homo sapien
ctgctgtgctggcatgttctgagcc

SEQ ID NO: 3575477 - DNA, 25 bp, Homo sapien
tgttccagttgccaagacttgtggg

SEQ ID NO: 3575478 - DNA, 25 bp, Homo sapien
gaacatcctctggattcatcaggaa

SEQ ID NO: 3575479 - DNA, 25 bp, Homo sapien
gtaaacaacacggaaatgctgtggt

SEQ ID NO: 3575480 - DNA, 25 bp, Homo sapien
ttccgtgttctggaatgcctctgct

SEQ ID NO: 3575481 - DNA, 25 bp, Homo sapien
cagaggccttcacggccaaggcggc

SEQ ID NO: 3575482 - DNA, 25 bp, Homo sapien
agatgggctggatttcaacagatga

SEQ ID NO: 3575483 - DNA, 25 bp, Homo sapien
ccttcacggccaaggcggcctttga

SEQ ID NO: 3575484 - DNA, 25 bp, Homo sapien
gcggcctttgactcttcatagatgg

SEQ ID NO: 3575485 - DNA, 25 bp, Homo sapien
gggcagcgctgtccctgaacacagg

SEQ ID NO: 3575486 - DNA, 25 bp, Homo sapien
tgctgatgctattttaggatgcaga

SEQ ID NO: 3575487 - DNA, 25 bp, Homo sapien
cgggcagcgctgtccctgaacacag

SEQ ID NO: 3575488 - DNA, 25 bp, Homo sapien
gatgctattttaggatgcagaacct

SEQ ID NO: 3575489 - DNA, 25 bp, Homo sapien
agaggctgggcatcaatctggacac

SEQ ID NO: 3575490 - DNA, 25 bp, Homo sapien
gggcccaaggtcgaagatgaggaag

SEQ ID NO: 3575491 - DNA, 25 bp, Homo sapien
gagaggctgggcatcaatctggaca

SEQ ID NO: 3575492 - DNA, 25 bp, Homo sapien
agccagagctgggcccaaggtcgaa

SEQ ID NO: 3575493 - DNA, 25 bp, Homo sapien
gtatggtctggatccatgcagggtc

SEQ ID NO: 3575494 - DNA, 25 bp, Homo sapien
taggtatggtctggatccatgcagg

SEQ ID NO: 3575495 - DNA, 25 bp, Homo sapien
ggtatggtctggatccatgcagggt

SEQ ID NO: 3575496 - DNA, 25 bp, Homo sapien
tatggtctggatccatgcagggtcc

SEQ ID NO: 3575497 - DNA, 25 bp, Homo sapien
tggtaacaggccctgttatgatgct

SEQ ID NO: 3575498 - DNA, 25 bp, Homo sapien
cctgaaggtcgccctggtaacaggc

SEQ ID NO: 3575499 - DNA, 25 bp, Homo sapien
cagagcctgaaggtcgccctggtaa

SEQ ID NO: 3575500 - DNA, 25 bp, Homo sapien
ggtaacaggccctgttatgatgctt

SEQ ID NO: 3575501 - DNA, 25 bp, Homo sapien
gtccttgcggtatgtcagcagactg

SEQ ID NO: 3575502 - DNA, 25 bp, Homo sapien
gcctcagtgtccttgcggtatgtca

SEQ ID NO: 3575503 - DNA, 25 bp, Homo sapien
cttgagatagacagtcccttttttt

SEQ ID NO: 3575504 - DNA, 25 bp, Homo sapien
agtgtccttgcggtatgtcagcaga

SEQ ID NO: 3575505 - DNA, 25 bp, Homo sapien
actgtgtccacaccgagccgcgccc

SEQ ID NO: 3575506 - DNA, 25 bp, Homo sapien
ccactgtgtccacaccgagccgcgc

SEQ ID NO: 3575507 - DNA, 25 bp, Homo sapien
gtgtccacaccgagccgcgcccatg

SEQ ID NO: 3575508 - DNA, 25 bp, Homo sapien
ccccactgtgtccacaccgagccgc

SEQ ID NO: 3575509 - DNA, 25 bp, Homo sapien
catggccttgctctaacgtcacttc

SEQ ID NO: 3575510 - DNA, 25 bp, Homo sapien
ggcttgcccgtatcatcctgtccat

SEQ ID NO: 3575511 - DNA, 25 bp, Homo sapien
ccttgggcttgcccgtatcatcctg

SEQ ID NO: 3575512 - DNA, 25 bp, Homo sapien
cccatggccttgctctaacgtcact

SEQ ID NO: 3575513 - DNA, 25 bp, Homo sapien
gggcccagccctccatgagcaggcc

SEQ ID NO: 3575514 - DNA, 25 bp, Homo sapien
ggcccagccctccatgagcaggcct

SEQ ID NO: 3575515 - DNA, 25 bp, Homo sapien
ggctgaattaagagcgtcagacatc

SEQ ID NO: 3575516 - DNA, 25 bp, Homo sapien
gcttctgaatcacgggctgctccaa

SEQ ID NO: 3575517 - DNA, 25 bp, Homo sapien
aattaagagcgtcagacatcagctg

SEQ ID NO: 3575518 - DNA, 25 bp, Homo sapien
gccaggagagcatgtagggcatatc

SEQ ID NO: 3575519 - DNA, 25 bp, Homo sapien
taaaaggtcatcatctgtctgcgcc

SEQ ID NO: 3575520 - DNA, 25 bp, Homo sapien
ggtttactgcggagctggctgtaat

SEQ ID NO: 3575521 - DNA, 25 bp, Homo sapien
gaattccagggtctgctgatgggct

SEQ ID NO: 3575522 - DNA, 25 bp, Homo sapien
ctgggctgttgcacccccactctgg

SEQ ID NO: 3575523 - DNA, 25 bp, Homo sapien
catccagtggctccacgggtgtggt

SEQ ID NO: 3575524 - DNA, 25 bp, Homo sapien
taggagccgcaagctcctaggccca

SEQ ID NO: 3575525 - DNA, 25 bp, Homo sapien
gggcccataggagccgcaagctcct

SEQ ID NO: 3575526 - DNA, 25 bp, Homo sapien
gaggccatgcaaagtccttgtgagg

SEQ ID NO: 3575527 - DNA, 25 bp, Homo sapien
cagaacaactatagtggcctctgca

SEQ ID NO: 3575528 - DNA, 25 bp, Homo sapien
tagtggcctctgcatgtagcttggg

SEQ ID NO: 3575529 - DNA, 25 bp, Homo sapien
gttggccagaacaactatagtggcc

SEQ ID NO: 3575530 - DNA, 25 bp, Homo sapien
gcttcctcacaatatggtgtctgag

SEQ ID NO: 3575531 - DNA, 25 bp, Homo sapien
gaacaaattgggtccaaactgaagc

SEQ ID NO: 3575532 - DNA, 25 bp, Homo sapien
gaagccaggtctgcgtagctctgaa

SEQ ID NO: 3575533 - DNA, 25 bp, Homo sapien
tcaagatagggaagaccccacaggg

SEQ ID NO: 3575534 - DNA, 25 bp, Homo sapien
tccttaactttgagcaggtcacttc

SEQ ID NO: 3575535 - DNA, 25 bp, Homo sapien
cacacggtgtgtacaccttgccttt

SEQ ID NO: 3575536 - DNA, 25 bp, Homo sapien
gctgcacacggtgtgtacaccttgc

SEQ ID NO: 3575537 - DNA, 25 bp, Homo sapien
gcacacggtgtgtacaccttgcctt

SEQ ID NO: 3575538 - DNA, 25 bp, Homo sapien
tgcacacggtgtgtacaccttgcct

SEQ ID NO: 3575539 - DNA, 25 bp, Homo sapien
tgggctggggagatgcggtggatct

SEQ ID NO: 3575540 - DNA, 25 bp, Homo sapien
ggctggggagatgcggtggatctgg

SEQ ID NO: 3575541 - DNA, 25 bp, Homo sapien
ctggggagatgcggtggatctggcc

SEQ ID NO: 3575542 - DNA, 25 bp, Homo sapien
ggggagatgcggtggatctggcccg

SEQ ID NO: 3575543 - DNA, 25 bp, Homo sapien
gcctgggtgacttggctaaaacaca

SEQ ID NO: 3575544 - DNA, 25 bp, Homo sapien
tgcctgggtgacttggctaaaacac

SEQ ID NO: 3575545 - DNA, 25 bp, Homo sapien
ttgtgtggtcaagctgcccctactg

SEQ ID NO: 3575546 - DNA, 25 bp, Homo sapien
tctagctacagagttgtctattgtg

SEQ ID NO: 3575547 - DNA, 25 bp, Homo sapien
caaatgtaattttgcggcaaaagtt

SEQ ID NO: 3575548 - DNA, 25 bp, Homo sapien
gatgctgccatgaatagctttatga

SEQ ID NO: 3575549 - DNA, 25 bp, Homo sapien
catgctctctggtccttgactggtt

SEQ ID NO: 3575550 - DNA, 25 bp, Homo sapien
ttccagcctcatgaggatggctgtc

SEQ ID NO: 3575551 - DNA, 25 bp, Homo sapien
tgctctctggtccttgactggttcc

SEQ ID NO: 3575552 - DNA, 25 bp, Homo sapien
ccagcctcatgaggatggctgtcat

SEQ ID NO: 3575553 - DNA, 25 bp, Homo sapien
tagggcagtcaagtcaccaagtcgc

SEQ ID NO: 3575554 - DNA, 25 bp, Homo sapien
tttcccaagcgccacaagaggagga

SEQ ID NO: 3575555 - DNA, 25 bp, Homo sapien
catgagaacacaaaccctagagagt

SEQ ID NO: 3575556 - DNA, 25 bp, Homo sapien
gaagtcctccttccgtcttagctga

SEQ ID NO: 3575557 - DNA, 25 bp, Homo sapien
gctgccgtgggcagcccacagtctg

SEQ ID NO: 3575558 - DNA, 25 bp, Homo sapien
tgtcccctaggtctgttcaaaaagc

SEQ ID NO: 3575559 - DNA, 25 bp, Homo sapien
ttattatgcttggtctccagttcca

SEQ ID NO: 3575560 - DNA, 25 bp, Homo sapien
gttcctataaacagctcgggcctcc

SEQ ID NO: 3575561 - DNA, 25 bp, Homo sapien
cagcagccctgtgtagtgttttcaa

SEQ ID NO: 3575562 - DNA, 25 bp, Homo sapien
tatacaaagagttggtcccgaggcc

SEQ ID NO: 3575563 - DNA, 25 bp, Homo sapien
tacgtgcagtagcacccgtgggtgt

SEQ ID NO: 3575564 - DNA, 25 bp, Homo sapien
aacaaggtcttgagttggtcccagc

SEQ ID NO: 3575565 - DNA, 25 bp, Homo sapien
ccagagttctgggatcccggatcac

SEQ ID NO: 3575566 - DNA, 25 bp, Homo sapien
tctgacaggtcaacattattctcgg

SEQ ID NO: 3575567 - DNA, 25 bp, Homo sapien
ccaagctgggtgcaaaacagaacca

SEQ ID NO: 3575568 - DNA, 25 bp, Homo sapien
gcagtggtaaagatcaggccctgga

SEQ ID NO: 3575569 - DNA, 25 bp, Homo sapien
ggctcaggcggttctcggcaagatt

SEQ ID NO: 3575570 - DNA, 25 bp, Homo sapien
tactgttggttaaacttctgccggc

SEQ ID NO: 3575571 - DNA, 25 bp, Homo sapien
tagatcaagggtctcagtgtctggc

SEQ ID NO: 3575572 - DNA, 25 bp, Homo sapien
gaagaaaggtccagctcagtcagtg

SEQ ID NO: 3575573 - DNA, 25 bp, Homo sapien
ggaaacagccatatatcccacagag

SEQ ID NO: 3575574 - DNA, 25 bp, Homo sapien
agacatgtttatccaggaaccctgc

SEQ ID NO: 3575575 - DNA, 25 bp, Homo sapien
ggcacccagcgcagtaatgggcatt

SEQ ID NO: 3575576 - DNA, 25 bp, Homo sapien
tcgatgaaggttccatgggtggaca

SEQ ID NO: 3575577 - DNA, 25 bp, Homo sapien
gaactcttcacactgagcttcaggg

SEQ ID NO: 3575578 - DNA, 25 bp, Homo sapien
ctctcagagctttgccccgctgaat

SEQ ID NO: 3575579 - DNA, 25 bp, Homo sapien
tggttatgccatccccaaccagatc

SEQ ID NO: 3575580 - DNA, 25 bp, Homo sapien
cagatccacacatgaactcttcaca

SEQ ID NO: 3575581 - DNA, 25 bp, Homo sapien
gggcactttgtcttggtgttgtgca

SEQ ID NO: 3575582 - DNA, 25 bp, Homo sapien
gtgcagccaggcctagggtcagcag

SEQ ID NO: 3575583 - DNA, 25 bp, Homo sapien
cttacagggcactttgtcttggtgt

SEQ ID NO: 3575584 - DNA, 25 bp, Homo sapien
gttgtgcagccaggcctagggtcag

SEQ ID NO: 3575585 - DNA, 25 bp, Homo sapien
cgacccctcacacgcaggagcaggg

SEQ ID NO: 3575586 - DNA, 25 bp, Homo sapien
ggagcagggcagactagctcacagt

SEQ ID NO: 3575587 - DNA, 25 bp, Homo sapien
gagaaaatagcagggtcacgatcag

SEQ ID NO: 3575588 - DNA, 25 bp, Homo sapien
tcctctcggcctcagctgacttact

SEQ ID NO: 3575589 - DNA, 25 bp, Homo sapien
cagctcctctcccgggcagtctcgg

SEQ ID NO: 3575590 - DNA, 25 bp, Homo sapien
gctcctctcccgggcagtctcggca

SEQ ID NO: 3575591 - DNA, 25 bp, Homo sapien
tcctctcccgggcagtctcggcaca

SEQ ID NO: 3575592 - DNA, 25 bp, Homo sapien
cctctcccgggcagtctcggcacat

SEQ ID NO: 3575593 - DNA, 25 bp, Homo sapien
ggggtcacggcccgaggaggagcag

SEQ ID NO: 3575594 - DNA, 25 bp, Homo sapien
cggggtcacggcccgaggaggagca

SEQ ID NO: 3575595 - DNA, 25 bp, Homo sapien
tcctctccggattgtgctctagtgt

SEQ ID NO: 3575596 - DNA, 25 bp, Homo sapien
tctagtgtctggacccgtactcctc

SEQ ID NO: 3575597 - DNA, 25 bp, Homo sapien
catcatctgcgggacccttcaacag

SEQ ID NO: 3575598 - DNA, 25 bp, Homo sapien
ggtcctggcaggtcacttttcctct

SEQ ID NO: 3575599 - DNA, 25 bp, Homo sapien
tagtatgcgggtccctagaagagag

SEQ ID NO: 3575600 - DNA, 25 bp, Homo sapien
caggtcctggttccaagtgtagaag

SEQ ID NO: 3575601 - DNA, 25 bp, Homo sapien
gctgcctgtggactctagtatgcgg

SEQ ID NO: 3575602 - DNA, 25 bp, Homo sapien
ttctcttccctgatcgtcaccagcc

SEQ ID NO: 3575603 - DNA, 25 bp, Homo sapien
ctgagagtggggcagggtgccccat

SEQ ID NO: 3575604 - DNA, 25 bp, Homo sapien
tggatactcctatatcctgtgggct

SEQ ID NO: 3575605 - DNA, 25 bp, Homo sapien
gttggtggatactcctatatcctgt

SEQ ID NO: 3575606 - DNA, 25 bp, Homo sapien
ggtggatactcctatatcctgtggg

SEQ ID NO: 3575607 - DNA, 25 bp, Homo sapien
ggcagttggtggatactcctatatc

SEQ ID NO: 3575608 - DNA, 25 bp, Homo sapien
gcccacaggctcagcgccccttcct

SEQ ID NO: 3575609 - DNA, 25 bp, Homo sapien
cccacaggctcagcgccccttcctt

SEQ ID NO: 3575610 - DNA, 25 bp, Homo sapien
gcccttggtcatcagtagtgcacac

SEQ ID NO: 3575611 - DNA, 25 bp, Homo sapien
cagcaaaggcccttggtcatcagta

SEQ ID NO: 3575612 - DNA, 25 bp, Homo sapien
tcagcaaaggcccttggtcatcagt

SEQ ID NO: 3575613 - DNA, 25 bp, Homo sapien
aaggcccttggtcatcagtagtgca

SEQ ID NO: 3575614 - DNA, 25 bp, Homo sapien
accgaagtcggagaccatcgtggca

SEQ ID NO: 3575615 - DNA, 25 bp, Homo sapien
caaggtctgcgttgcaggtagatta

SEQ ID NO: 3575616 - DNA, 25 bp, Homo sapien
gtgcccttgttgtggaccgaagtcg

SEQ ID NO: 3575617 - DNA, 25 bp, Homo sapien
taagtcgaaaagtgacgtcgcaagg

SEQ ID NO: 3575618 - DNA, 25 bp, Homo sapien
ggaaggtgctgtcctcacccctgtt

SEQ ID NO: 3575619 - DNA, 25 bp, Homo sapien
ctggaaggtgctgtcctcacccctg

SEQ ID NO: 3575620 - DNA, 25 bp, Homo sapien
tggaaggtgctgtcctcacccctgt

SEQ ID NO: 3575621 - DNA, 25 bp, Homo sapien
tgctcacagacacccgaaggtttag

SEQ ID NO: 3575622 - DNA, 25 bp, Homo sapien
acagacacccgaaggtttaggctgc

SEQ ID NO: 3575623 - DNA, 25 bp, Homo sapien
tcacagacacccgaaggtttaggct

SEQ ID NO: 3575624 - DNA, 25 bp, Homo sapien
cagtgctcacagacacccgaaggtt

SEQ ID NO: 3575625 - DNA, 25 bp, Homo sapien
ctgccggatctgcaggttccgggtt

SEQ ID NO: 3575626 - DNA, 25 bp, Homo sapien
acaaatggctgccggatctgcaggt

SEQ ID NO: 3575627 - DNA, 25 bp, Homo sapien
tgaaggggcgcaggatgacaaatgg

SEQ ID NO: 3575628 - DNA, 25 bp, Homo sapien
gaaggggcgcaggatgacaaatggc

SEQ ID NO: 3575629 - DNA, 25 bp, Homo sapien
ggtctgatgtccacaggtgcgggga

SEQ ID NO: 3575630 - DNA, 25 bp, Homo sapien
tctgatgtccacaggtgcggggagg

SEQ ID NO: 3575631 - DNA, 25 bp, Homo sapien
caggtctgatgtccacaggtgcggg

SEQ ID NO: 3575632 - DNA, 25 bp, Homo sapien
aggtctgatgtccacaggtgcgggg

SEQ ID NO: 3575633 - DNA, 25 bp, Homo sapien
cagtaggtctcttcgatgcccttcc

SEQ ID NO: 3575634 - DNA, 25 bp, Homo sapien
ccagtaggtctcttcgatgcccttc

SEQ ID NO: 3575635 - DNA, 25 bp, Homo sapien
agtaggtctcttcgatgcccttccc

SEQ ID NO: 3575636 - DNA, 25 bp, Homo sapien
tcaaggctgagcagtatctggacag

SEQ ID NO: 3575637 - DNA, 25 bp, Homo sapien
agtctgacctctgatatcaatttgg

SEQ ID NO: 3575638 - DNA, 25 bp, Homo sapien
cagtctgacctctgatatcaatttg

SEQ ID NO: 3575639 - DNA, 25 bp, Homo sapien
gagcagtatctggacagtgctttgg

SEQ ID NO: 3575640 - DNA, 25 bp, Homo sapien
ctgggaagccgtgttgacagtgtcc

SEQ ID NO: 3575641 - DNA, 25 bp, Homo sapien
gaggcaataccaaggcatcgtgaga

SEQ ID NO: 3575642 - DNA, 25 bp, Homo sapien
cgtgttgacagtgtccccagagagg

SEQ ID NO: 3575643 - DNA, 25 bp, Homo sapien
taccaaggcatcgtgagacccacga

SEQ ID NO: 3575644 - DNA, 25 bp, Homo sapien
cctgatgcaaatgggcacgttgggt

SEQ ID NO: 3575645 - DNA, 25 bp, Homo sapien
acgttgggtgcatgcctcttccgga

SEQ ID NO: 3575646 - DNA, 25 bp, Homo sapien
tgtaggcgtccccaatggtctccac

SEQ ID NO: 3575647 - DNA, 25 bp, Homo sapien
catgctgactgccattgcactgagg

SEQ ID NO: 3575648 - DNA, 25 bp, Homo sapien
cactgaagtatatggtaacctggtc

SEQ ID NO: 3575649 - DNA, 25 bp, Homo sapien
tcaatgggttcactcagggctgaga

SEQ ID NO: 3575650 - DNA, 25 bp, Homo sapien
agagatcgttgagcaagcccaccgc

SEQ ID NO: 3575651 - DNA, 25 bp, Homo sapien
agttgcccccattttccgagcttca

SEQ ID NO: 3575652 - DNA, 25 bp, Homo sapien
cagcaacactggtcctcttgccttg

SEQ ID NO: 3575653 - DNA, 25 bp, Homo sapien
gagtcagcaacactggtcctcttgc

SEQ ID NO: 3575654 - DNA, 25 bp, Homo sapien
tcctcagtctgctcctgaatcaggt

SEQ ID NO: 3575655 - DNA, 25 bp, Homo sapien
cctcttgccttggttgatgcttttg

SEQ ID NO: 3575656 - DNA, 25 bp, Homo sapien
gtcctctggagcctcgtcccagcac

SEQ ID NO: 3575657 - DNA, 25 bp, Homo sapien
ctgtcctctggagcctcgtcccagc

SEQ ID NO: 3575658 - DNA, 25 bp, Homo sapien
gctaggtctgtcctctggagcctcg

SEQ ID NO: 3575659 - DNA, 25 bp, Homo sapien
aggtctgtcctctggagcctcgtcc

SEQ ID NO: 3575660 - DNA, 25 bp, Homo sapien
ccctcctgatgatttcggcaaccaa

SEQ ID NO: 3575661 - DNA, 25 bp, Homo sapien
tgatttcggcaaccaacaccatggg

SEQ ID NO: 3575662 - DNA, 25 bp, Homo sapien
ccgtgatcaggggtcaccagcggcc

SEQ ID NO: 3575663 - DNA, 25 bp, Homo sapien
gagatgccaccctcctgatgatttc

SEQ ID NO: 3575664 - DNA, 25 bp, Homo sapien
ttgaaaccttgacagcgcagctctt

SEQ ID NO: 3575665 - DNA, 25 bp, Homo sapien
caggtgtgaacgacactgcctgctt

SEQ ID NO: 3575666 - DNA, 25 bp, Homo sapien
ctggcgtgccggttccccacaggtg

SEQ ID NO: 3575667 - DNA, 25 bp, Homo sapien
agccttgccacgcagacactggcgt

SEQ ID NO: 3575668 - DNA, 25 bp, Homo sapien
agagtgggcccgagtcagcacctcc

SEQ ID NO: 3575669 - DNA, 25 bp, Homo sapien
cagtagagtgggcccgagtcagcac

SEQ ID NO: 3575670 - DNA, 25 bp, Homo sapien
cccgaggagcagtagagtgggcccg

SEQ ID NO: 3575671 - DNA, 25 bp, Homo sapien
aggagcagtagagtgggcccgagtc

SEQ ID NO: 3575672 - DNA, 25 bp, Homo sapien
ccagggcgcccaggccccggcagca

SEQ ID NO: 3575673 - DNA, 25 bp, Homo sapien
ccaggccccggcagcagctcaggag

SEQ ID NO: 3575674 - DNA, 25 bp, Homo sapien
ctgtgagggtgcgccgcccagggcg

SEQ ID NO: 3575675 - DNA, 25 bp, Homo sapien
gcccagggcgcccaggccccggcag

SEQ ID NO: 3575676 - DNA, 25 bp, Homo sapien
tgcaatcatagggcagggccatgcc

SEQ ID NO: 3575677 - DNA, 25 bp, Homo sapien
ctgcaatcatagggcagggccatgc

SEQ ID NO: 3575678 - DNA, 25 bp, Homo sapien
gaccttgagcacaaagcatctgtcc

SEQ ID NO: 3575679 - DNA, 25 bp, Homo sapien
gggctctgcataaccatggtcagtg

SEQ ID NO: 3575680 - DNA, 25 bp, Homo sapien
tggtggtggtgcagatacctcatgc

SEQ ID NO: 3575681 - DNA, 25 bp, Homo sapien
tccaccacacagttttggaacttga

SEQ ID NO: 3575682 - DNA, 25 bp, Homo sapien
ccatgcagtttggatatccctggat

SEQ ID NO: 3575683 - DNA, 25 bp, Homo sapien
tgaaggtccagtctaggtgcaggac

SEQ ID NO: 3575684 - DNA, 25 bp, Homo sapien
tatccctggattagacaaagctgaa

SEQ ID NO: 3575685 - DNA, 25 bp, Homo sapien
gcccagggagggatctcatgcagat

SEQ ID NO: 3575686 - DNA, 25 bp, Homo sapien
aagcaggttccccagagatcacgaa

SEQ ID NO: 3575687 - DNA, 25 bp, Homo sapien
agagatcacgaaaatgcccaggcag

SEQ ID NO: 3575688 - DNA, 25 bp, Homo sapien
aggtggcgacgttctcacaccgcag

SEQ ID NO: 3575689 - DNA, 25 bp, Homo sapien
caggcaggtggcgacgttctcacac

SEQ ID NO: 3575690 - DNA, 25 bp, Homo sapien
ccggctctgcccgaggctatcctgg

SEQ ID NO: 3575691 - DNA, 25 bp, Homo sapien
gccccggctctgcccgaggctatcc

SEQ ID NO: 3575692 - DNA, 25 bp, Homo sapien
cccggctctgcccgaggctatcctg

SEQ ID NO: 3575693 - DNA, 25 bp, Homo sapien
cggctctgcccgaggctatcctggg

SEQ ID NO: 3575694 - DNA, 25 bp, Homo sapien
gtcagcaggatccggtgggggcccc

SEQ ID NO: 3575695 - DNA, 25 bp, Homo sapien
gagctcctgggctgtcagcaggatc

SEQ ID NO: 3575696 - DNA, 25 bp, Homo sapien
tgggctgtcagcaggatccggtggg

SEQ ID NO: 3575697 - DNA, 25 bp, Homo sapien
gtggatggatgaaggtgagctcctg

SEQ ID NO: 3575698 - DNA, 25 bp, Homo sapien
ctcgggctcgggtctggaacccctg

SEQ ID NO: 3575699 - DNA, 25 bp, Homo sapien
ccccagtcgcaacgttcccaagttg

SEQ ID NO: 3575700 - DNA, 25 bp, Homo sapien
aggagggcactgaacactgtcttca

SEQ ID NO: 3575701 - DNA, 25 bp, Homo sapien
ccctgggcctgatgcatctgctggt

SEQ ID NO: 3575702 - DNA, 25 bp, Homo sapien
ctgggattggaaggctgcccgcttc

SEQ ID NO: 3575703 - DNA, 25 bp, Homo sapien
agagggctgggattggaaggctgcc

SEQ ID NO: 3575704 - DNA, 25 bp, Homo sapien
gaaggctgcccgcttccagatgcgc

SEQ ID NO: 3575705 - DNA, 25 bp, Homo sapien
ccagagagggctgggattggaaggc

SEQ ID NO: 3575706 - DNA, 25 bp, Homo sapien
caagaaacgggcatccccaggagac

SEQ ID NO: 3575707 - DNA, 25 bp, Homo sapien
cactgctgtcttcttaacaccaaga

SEQ ID NO: 3575708 - DNA, 25 bp, Homo sapien
tcttaacaccaagaaacgggcatcc

SEQ ID NO: 3575709 - DNA, 25 bp, Homo sapien
gctgtcttcttaacaccaagaaacg

SEQ ID NO: 3575710 - DNA, 25 bp, Homo sapien
ttcggggtctgcacgacgagcatgc

SEQ ID NO: 3575711 - DNA, 25 bp, Homo sapien
actcaaggcattcggggtctgcacg

SEQ ID NO: 3575712 - DNA, 25 bp, Homo sapien
cattcggggtctgcacgacgagcat

SEQ ID NO: 3575713 - DNA, 25 bp, Homo sapien
gggtctgcacgacgagcatgcctac

SEQ ID NO: 3575714 - DNA, 25 bp, Homo sapien
ctcaaggcattcggggtctgcacaa

SEQ ID NO: 3575715 - DNA, 25 bp, Homo sapien
actcaaggcattcggggtctgcaca

SEQ ID NO: 3575716 - DNA, 25 bp, Homo sapien
cattcggggtctgcacaaggagcac

SEQ ID NO: 3575717 - DNA, 25 bp, Homo sapien
ttcggggtctgcacaaggagcacac

SEQ ID NO: 3575718 - DNA, 25 bp, Homo sapien
ccagtgccgagagacaggtaggagc

SEQ ID NO: 3575719 - DNA, 25 bp, Homo sapien
gggcaggaagactaatctcccatcc

SEQ ID NO: 3575720 - DNA, 25 bp, Homo sapien
ggtaggagcggttgcagtaggacag

SEQ ID NO: 3575721 - DNA, 25 bp, Homo sapien
aagagcagcatgtcatagggcagga

SEQ ID NO: 3575722 - DNA, 25 bp, Homo sapien
cccagttccactgtggcctgccctg

SEQ ID NO: 3575723 - DNA, 25 bp, Homo sapien
cctggagagctgctcggaactcccg

SEQ ID NO: 3575724 - DNA, 25 bp, Homo sapien
tggagagctgctcggaactcccggg

SEQ ID NO: 3575725 - DNA, 25 bp, Homo sapien
agagctgctcggaactcccgggcac

SEQ ID NO: 3575726 - DNA, 25 bp, Homo sapien
ttagtcaactccacagccccataat

SEQ ID NO: 3575727 - DNA, 25 bp, Homo sapien
cacatgaatgaccaaaatagggaag

SEQ ID NO: 3575728 - DNA, 25 bp, Homo sapien
gccaagctcctcgaattagtcaact

SEQ ID NO: 3575729 - DNA, 25 bp, Homo sapien
tgaagatgcctttagctgcactaac

SEQ ID NO: 3575730 - DNA, 25 bp, Homo sapien
accaaggctccaataattggcctac

SEQ ID NO: 3575731 - DNA, 25 bp, Homo sapien
gctccaataattggcctacgctgga

SEQ ID NO: 3575732 - DNA, 25 bp, Homo sapien
ggcctacgctggagtttcttggcag

SEQ ID NO: 3575733 - DNA, 25 bp, Homo sapien
cctacgctggagtttcttggcagta

SEQ ID NO: 3575734 - DNA, 25 bp, Homo sapien
caccctctgggggcttcgtgcttcc

SEQ ID NO: 3575735 - DNA, 25 bp, Homo sapien
ctgggggcagacactttcacagtcc

SEQ ID NO: 3575736 - DNA, 25 bp, Homo sapien
tgggggcagacactttcacagtccc

SEQ ID NO: 3575737 - DNA, 25 bp, Homo sapien
ggcagacactttcacagtccccaac

SEQ ID NO: 3575738 - DNA, 25 bp, Homo sapien
ggggcagacactttcacagtcccca

SEQ ID NO: 3575739 - DNA, 25 bp, Homo sapien
cagctgcccagtgctgtcctccagg

SEQ ID NO: 3575740 - DNA, 25 bp, Homo sapien
gcccagtgctgtcctccagggtcat

SEQ ID NO: 3575741 - DNA, 25 bp, Homo sapien
gctgcccagtgctgtcctccagggt

SEQ ID NO: 3575742 - DNA, 25 bp, Homo sapien
tgcccagtgctgtcctccagggtca

SEQ ID NO: 3575743 - DNA, 25 bp, Homo sapien
ctctaggccagctaagctcagatga

SEQ ID NO: 3575744 - DNA, 25 bp, Homo sapien
tctaggccagctaagctcagatgac

SEQ ID NO: 3575745 - DNA, 25 bp, Homo sapien
tctctaggccagctaagctcagatg

SEQ ID NO: 3575746 - DNA, 25 bp, Homo sapien
catctctaggccagctaagctcaga

SEQ ID NO: 3575747 - DNA, 25 bp, Homo sapien
gggatgttgtgggtccagtacactc

SEQ ID NO: 3575748 - DNA, 25 bp, Homo sapien
ttgtgggtccagtacactcccccga

SEQ ID NO: 3575749 - DNA, 25 bp, Homo sapien
ggcagcgctgggatgttgtgggtcc

SEQ ID NO: 3575750 - DNA, 25 bp, Homo sapien
cgctgggatgttgtgggtccagtac

SEQ ID NO: 3575751 - DNA, 25 bp, Homo sapien
ggaggaagccagacatgagccacgt

SEQ ID NO: 3575752 - DNA, 25 bp, Homo sapien
tcaggtccctcaaggatgagggcgt

SEQ ID NO: 3575753 - DNA, 25 bp, Homo sapien
tgagggcgttgggaggaagccagac

SEQ ID NO: 3575754 - DNA, 25 bp, Homo sapien
caggtccctcaaggatgagggcgtt

SEQ ID NO: 3575755 - DNA, 25 bp, Homo sapien
gtccaaggaacccttgcggccatca

SEQ ID NO: 3575756 - DNA, 25 bp, Homo sapien
caccagcagcaccgcatggaaactt

SEQ ID NO: 3575757 - DNA, 25 bp, Homo sapien
cagcagcaccgcatggaaacttggt

SEQ ID NO: 3575758 - DNA, 25 bp, Homo sapien
cccttgcggccatcactcctcccag

SEQ ID NO: 3575759 - DNA, 25 bp, Homo sapien
catggacagatccaggggtggtctt

SEQ ID NO: 3575760 - DNA, 25 bp, Homo sapien
gtggtctttgctgtgagatctgagt

SEQ ID NO: 3575761 - DNA, 25 bp, Homo sapien
tgggcctctgcatggacagatccag

SEQ ID NO: 3575762 - DNA, 25 bp, Homo sapien
gctgtgagatctgagtaagggctca

SEQ ID NO: 3575763 - DNA, 25 bp, Homo sapien
agaggagggcccgatcgagggtcag

SEQ ID NO: 3575764 - DNA, 25 bp, Homo sapien
ctgagggcaggattgcccgtctggg

SEQ ID NO: 3575765 - DNA, 25 bp, Homo sapien
agggcccgatcgagggtcaggtgcc

SEQ ID NO: 3575766 - DNA, 25 bp, Homo sapien
gcccgatcgagggtcaggtgccctg

SEQ ID NO: 3575767 - DNA, 25 bp, Homo sapien
tatcccataggtcgcttaggtgctg

SEQ ID NO: 3575768 - DNA, 25 bp, Homo sapien
gaggatcccttgtatacgataagtc

SEQ ID NO: 3575769 - DNA, 25 bp, Homo sapien
tgtctgaatccctctggtaaattct

SEQ ID NO: 3575770 - DNA, 25 bp, Homo sapien
cagttattgtactttatggctccag

SEQ ID NO: 3575771 - DNA, 25 bp, Homo sapien
catttagcaaccacacaaaggagct

SEQ ID NO: 3575772 - DNA, 25 bp, Homo sapien
tgtgaaagtgctcagaaactgctgc

SEQ ID NO: 3575773 - DNA, 25 bp, Homo sapien
tgccagctaccagccagtgtgaagg

SEQ ID NO: 3575774 - DNA, 25 bp, Homo sapien
tataagctagacaagccagggagtc

SEQ ID NO: 3575775 - DNA, 25 bp, Homo sapien
taggaaatgcgtccaccaggtcatt

SEQ ID NO: 3575776 - DNA, 25 bp, Homo sapien
gggaatagactgaaactgctgccta

SEQ ID NO: 3575777 - DNA, 25 bp, Homo sapien
cagatgttcccgacagtgcggccat

SEQ ID NO: 3575778 - DNA, 25 bp, Homo sapien
ttgagacgctccctagagtggaacc

SEQ ID NO: 3575779 - DNA, 25 bp, Homo sapien
actttcgtcggacgcctagggctgg

SEQ ID NO: 3575780 - DNA, 25 bp, Homo sapien
cctcaactttcgtcggacgcctagg

SEQ ID NO: 3575781 - DNA, 25 bp, Homo sapien
tgaagatcccaagtccccgatccta

SEQ ID NO: 3575782 - DNA, 25 bp, Homo sapien
tccgcgctgcggttgaagatcccaa

SEQ ID NO: 3575783 - DNA, 25 bp, Homo sapien
ggtctttgtgcggacacgtgcatct

SEQ ID NO: 3575784 - DNA, 25 bp, Homo sapien
tgtccgtggctttgcgcggctgctt

SEQ ID NO: 3575785 - DNA, 25 bp, Homo sapien
tttgcgcccgtgtccacgtttgcgg

SEQ ID NO: 3575786 - DNA, 25 bp, Homo sapien
tcttgcgggagacaaaggctacgcc

SEQ ID NO: 3575787 - DNA, 25 bp, Homo sapien
tggaagggccaagatgaaatggcca

SEQ ID NO: 3575788 - DNA, 25 bp, Homo sapien
gagggcatttgtcttcccataatta

SEQ ID NO: 3575789 - DNA, 25 bp, Homo sapien
agatgaaatggccagcgcctgcact

SEQ ID NO: 3575790 - DNA, 25 bp, Homo sapien
acctgttaaagcatgtgtgggctgg

SEQ ID NO: 3575791 - DNA, 25 bp, Homo sapien
tgtaacacttgaaggaatgagtgtg

SEQ ID NO: 3575792 - DNA, 25 bp, Homo sapien
ggcactcagtaaacgtgataacgaa

SEQ ID NO: 3575793 - DNA, 25 bp, Homo sapien
cggagcgggcactcagtaaacgtga

SEQ ID NO: 3575794 - DNA, 25 bp, Homo sapien
tcagtaaacgtgataacgaatgcat

SEQ ID NO: 3575795 - DNA, 25 bp, Homo sapien
tgacggagcgggcactcagtaaacg

SEQ ID NO: 3575796 - DNA, 25 bp, Homo sapien
gctccatccagcgggcagagggaga

SEQ ID NO: 3575797 - DNA, 25 bp, Homo sapien
tcagtaccagcagacaatggctcca

SEQ ID NO: 3575798 - DNA, 25 bp, Homo sapien
atggctccatccagcgggcagaggg

SEQ ID NO: 3575799 - DNA, 25 bp, Homo sapien
cagtaccagcagacaatggctccat

SEQ ID NO: 3575800 - DNA, 25 bp, Homo sapien
gggacacactggggtcagaagggag

SEQ ID NO: 3575801 - DNA, 25 bp, Homo sapien
ctggaggtacaaggggacacactgg

SEQ ID NO: 3575802 - DNA, 25 bp, Homo sapien
cacactggggtcagaagggagaaga

SEQ ID NO: 3575803 - DNA, 25 bp, Homo sapien
gacacactggggtcagaagggagaa

SEQ ID NO: 3575804 - DNA, 25 bp, Homo sapien
atctacaatttctgtctccaagtat

SEQ ID NO: 3575805 - DNA, 25 bp, Homo sapien
tctacaatttctgtctccaagtatg

SEQ ID NO: 3575806 - DNA, 25 bp, Homo sapien
aaaatcaagtttcatcaccgcgatg

SEQ ID NO: 3575807 - DNA, 25 bp, Homo sapien
tgaaccgcatacactaacaacttgg

SEQ ID NO: 3575808 - DNA, 25 bp, Homo sapien
tctgggtcattagttgcaaatcgac

SEQ ID NO: 3575809 - DNA, 25 bp, Homo sapien
atcgacaggttctgttttagtcaca

SEQ ID NO: 3575810 - DNA, 25 bp, Homo sapien
gaggtgggcaggaaccgggtcacaa

SEQ ID NO: 3575811 - DNA, 25 bp, Homo sapien
gcaggaaccgggtcacaaagagcct

SEQ ID NO: 3575812 - DNA, 25 bp, Homo sapien
tatccgtcatgtaaaggagtttgaa

SEQ ID NO: 3575813 - DNA, 25 bp, Homo sapien
gtcacaaagagccttatccgtcatg

SEQ ID NO: 3575814 - DNA, 25 bp, Homo sapien
tatcactgcaatagtctcttctgca

SEQ ID NO: 3575815 - DNA, 25 bp, Homo sapien
ctgcaatagtctcttctgcaggctc

SEQ ID NO: 3575816 - DNA, 25 bp, Homo sapien
cctatcactgcaatagtctcttctg

SEQ ID NO: 3575817 - DNA, 25 bp, Homo sapien
tcactgcaatagtctcttctgcagg

SEQ ID NO: 3575818 - DNA, 25 bp, Homo sapien
aaaagcccatgcttccagagttgca

SEQ ID NO: 3575819 - DNA, 25 bp, Homo sapien
caaaagcccatgcttccagagttgc

SEQ ID NO: 3575820 - DNA, 25 bp, Homo sapien
tgttcaaaatcctcgttggtggccg

SEQ ID NO: 3575821 - DNA, 25 bp, Homo sapien
cttgttcaaaatcctcgttggtggc

SEQ ID NO: 3575822 - DNA, 25 bp, Homo sapien
gacttgttcaaaatcctcgttggtg

SEQ ID NO: 3575823 - DNA, 25 bp, Homo sapien
cagagacttgttcaaaatcctcgtt

SEQ ID NO: 3575824 - DNA, 25 bp, Homo sapien
aaccatatttctcttgtacactcac

SEQ ID NO: 3575825 - DNA, 25 bp, Homo sapien
taaccttctgtatgctttgtagaga

SEQ ID NO: 3575826 - DNA, 25 bp, Homo sapien
tttctcttgtacactcacttatccc

SEQ ID NO: 3575827 - DNA, 25 bp, Homo sapien
cccagttaaccttctgtatgctttg

SEQ ID NO: 3575828 - DNA, 25 bp, Homo sapien
caaaaaacgtctccttcctggcttg

SEQ ID NO: 3575829 - DNA, 25 bp, Homo sapien
gtggcatttaatttggttcctggtg

SEQ ID NO: 3575830 - DNA, 25 bp, Homo sapien
caaggtggcatttaatttggttcct

SEQ ID NO: 3575831 - DNA, 25 bp, Homo sapien
tccaagatcaaggtggcatttaatt

SEQ ID NO: 3575832 - DNA, 25 bp, Homo sapien
aatgtcttattgtcttctcaggtca

SEQ ID NO: 3575833 - DNA, 25 bp, Homo sapien
caggtcactgtccacgcacaaagaa

SEQ ID NO: 3575834 - DNA, 25 bp, Homo sapien
gagtcagctatatcttgccactaga

SEQ ID NO: 3575835 - DNA, 25 bp, Homo sapien
ccttaactcaatgctttgaaatgtc

SEQ ID NO: 3575836 - DNA, 25 bp, Homo sapien
ctaactttgaaatagggcttgatgc

SEQ ID NO: 3575837 - DNA, 25 bp, Homo sapien
gaaatagggcttgatgccatatggg

SEQ ID NO: 3575838 - DNA, 25 bp, Homo sapien
atagggcttgatgccatatgggtca

SEQ ID NO: 3575839 - DNA, 25 bp, Homo sapien
cttgatgccatatgggtcatagcag

SEQ ID NO: 3575840 - DNA, 25 bp, Homo sapien
ggacattcactgggatgacctgcct

SEQ ID NO: 3575841 - DNA, 25 bp, Homo sapien
catgcactgtgataggctctaggaa

SEQ ID NO: 3575842 - DNA, 25 bp, Homo sapien
tatatgaaaatggagcatggtgtcc

SEQ ID NO: 3575843 - DNA, 25 bp, Homo sapien
ttcatcattgctaccacctcagagt

SEQ ID NO: 3575844 - DNA, 25 bp, Homo sapien
gaaagagcctgctgtagtacacttt

SEQ ID NO: 3575845 - DNA, 25 bp, Homo sapien
gggatagccaatgcgcaggtccagc

SEQ ID NO: 3575846 - DNA, 25 bp, Homo sapien
ctgggatagccaatgcgcaggtcca

SEQ ID NO: 3575847 - DNA, 25 bp, Homo sapien
ggatagccaatgcgcaggtccagct

SEQ ID NO: 3575848 - DNA, 25 bp, Homo sapien
tgggatagccaatgcgcaggtccag

SEQ ID NO: 3575849 - DNA, 25 bp, Homo sapien
ctcccaggttcgttattcttatgcc

SEQ ID NO: 3575850 - DNA, 25 bp, Homo sapien
agtagctgggattactggcacccac

SEQ ID NO: 3575851 - DNA, 25 bp, Homo sapien
cctgccttgggctcccaaagtgctg

SEQ ID NO: 3575852 - DNA, 25 bp, Homo sapien
caccacactcagctaattttttgta

SEQ ID NO: 3575853 - DNA, 25 bp, Homo sapien
catgagccaccccacccagcctttt

SEQ ID NO: 3575854 - DNA, 25 bp, Homo sapien
taagctagaattctacaggcagcca

SEQ ID NO: 3575855 - DNA, 25 bp, Homo sapien
cgtgcttcgccaaaatgagagtact

SEQ ID NO: 3575856 - DNA, 25 bp, Homo sapien
tgtatgctagacaggcaggcagtcc

SEQ ID NO: 3575857 - DNA, 25 bp, Homo sapien
gaacctactgaaagacgtgcttcgc

SEQ ID NO: 3575858 - DNA, 25 bp, Homo sapien
tccagatagttagctgtgagccagc

SEQ ID NO: 3575859 - DNA, 25 bp, Homo sapien
gtcatgaccatcacagcagaggagt

SEQ ID NO: 3575860 - DNA, 25 bp, Homo sapien
tgagcctctcaggaagcattgatga

SEQ ID NO: 3575861 - DNA, 25 bp, Homo sapien
taaataatgcagtcagctaagagcc

SEQ ID NO: 3575862 - DNA, 25 bp, Homo sapien
ttagcatgccaacaagccattagac

SEQ ID NO: 3575863 - DNA, 25 bp, Homo sapien
gatgacgtgactcaggattaaatcc

SEQ ID NO: 3575864 - DNA, 25 bp, Homo sapien
tgtcaacttgacatccttcccttag

SEQ ID NO: 3575865 - DNA, 25 bp, Homo sapien
taaccaagtatccaaggatgtcaac

SEQ ID NO: 3575866 - DNA, 25 bp, Homo sapien
ggagagtcatctacaccccaaggtg

SEQ ID NO: 3575867 - DNA, 25 bp, Homo sapien
taaaggcatatcgtacatggcaatg

SEQ ID NO: 3575868 - DNA, 25 bp, Homo sapien
gaaagcacaccttgatactgaggcc

SEQ ID NO: 3575869 - DNA, 25 bp, Homo sapien
tacctgggctatcggccgtgataca

SEQ ID NO: 3575870 - DNA, 25 bp, Homo sapien
ccccaccatggtgtttcatgaaaca

SEQ ID NO: 3575871 - DNA, 25 bp, Homo sapien
tgtgcctccattttcactcttgaaa

SEQ ID NO: 3575872 - DNA, 25 bp, Homo sapien
taagctgattgtcactctgcctgcc

SEQ ID NO: 3575873 - DNA, 25 bp, Homo sapien
tacaaatgagaacccaaatagtagt

SEQ ID NO: 3575874 - DNA, 25 bp, Homo sapien
tcaagctgtggtagtcatgtacact

SEQ ID NO: 3575875 - DNA, 25 bp, Homo sapien
tgccacatggtagttgtcaagctgt

SEQ ID NO: 3575876 - DNA, 25 bp, Homo sapien
cgcagatgtttgttctagtagcgat

SEQ ID NO: 3575877 - DNA, 25 bp, Homo sapien
tcagcttttgagttgacttccagaa

SEQ ID NO: 3575878 - DNA, 25 bp, Homo sapien
caagagtcagggctgctgccgccag

SEQ ID NO: 3575879 - DNA, 25 bp, Homo sapien
tgctgtggtcgctcctggtccccat

SEQ ID NO: 3575880 - DNA, 25 bp, Homo sapien
tttgctgcattccttgctgtggtcg

SEQ ID NO: 3575881 - DNA, 25 bp, Homo sapien
tcccacagcgcctcccaagagtcag

SEQ ID NO: 3575882 - DNA, 25 bp, Homo sapien
tcgacgacgcctacatgggcatgtg

SEQ ID NO: 3575883 - DNA, 25 bp, Homo sapien
agaaggcagctttcccgctctgggt

SEQ ID NO: 3575884 - DNA, 25 bp, Homo sapien
gctgctcatgtggaaggcgctgcac

SEQ ID NO: 3575885 - DNA, 25 bp, Homo sapien
taccgcgagttgctgctagtgcacc

SEQ ID NO: 3575886 - DNA, 25 bp, Homo sapien
aattagccggccatagtggctcgtg

SEQ ID NO: 3575887 - DNA, 25 bp, Homo sapien
ccgtctctattgggagtacaaaaat

SEQ ID NO: 3575888 - DNA, 25 bp, Homo sapien
tcacttgaacctgggaggcggaggt

SEQ ID NO: 3575889 - DNA, 25 bp, Homo sapien
cctgtaatctcagctatttgggagg

SEQ ID NO: 3575890 - DNA, 25 bp, Homo sapien
tggcccttgcgggtcctcggtacta

SEQ ID NO: 3575891 - DNA, 25 bp, Homo sapien
gatgcgcaccaaccgcagacagata

SEQ ID NO: 3575892 - DNA, 25 bp, Homo sapien
gcgccgcccaccaagtcctggttct

SEQ ID NO: 3575893 - DNA, 25 bp, Homo sapien
atccgaacacttgggatggatgtga

SEQ ID NO: 3575894 - DNA, 25 bp, Homo sapien
ccagcgcccgcgccgtgccctgcat

SEQ ID NO: 3575895 - DNA, 25 bp, Homo sapien
tcccagctggatctccggccagagc

SEQ ID NO: 3575896 - DNA, 25 bp, Homo sapien
ggccagagcccgaggctgctgcgcc

SEQ ID NO: 3575897 - DNA, 25 bp, Homo sapien
gctccagcgcccgcgccgtgccctg

SEQ ID NO: 3575898 - DNA, 25 bp, Homo sapien
cctctctcagttatccgtgggtggg

SEQ ID NO: 3575899 - DNA, 25 bp, Homo sapien
gagtttgcccatggttactgcccca

SEQ ID NO: 3575900 - DNA, 25 bp, Homo sapien
ctctgtggtccgagagagcggccat

SEQ ID NO: 3575901 - DNA, 25 bp, Homo sapien
gcatcctaggccagtgccgatggca

SEQ ID NO: 3575902 - DNA, 25 bp, Homo sapien
aattagtcagacttggcccctgtcc

SEQ ID NO: 3575903 - DNA, 25 bp, Homo sapien
gatgaggctgagagcgtggactgcc

SEQ ID NO: 3575904 - DNA, 25 bp, Homo sapien
tagatgggacccgaaggagggagcg

SEQ ID NO: 3575905 - DNA, 25 bp, Homo sapien
gctcagctggcccctaagagacaag

SEQ ID NO: 3575906 - DNA, 25 bp, Homo sapien
cacctcttaggtctgcgggaaaatc

SEQ ID NO: 3575907 - DNA, 25 bp, Homo sapien
caggagagcacgctgacgttctggc

SEQ ID NO: 3575908 - DNA, 25 bp, Homo sapien
gctggtaccatcctgactgaaccct

SEQ ID NO: 3575909 - DNA, 25 bp, Homo sapien
gaacgcaacgcacatcaagcctatg

SEQ ID NO: 3575910 - DNA, 25 bp, Homo sapien
ggaaccgctcaagcaggcgctgctc

SEQ ID NO: 3575911 - DNA, 25 bp, Homo sapien
acacgcgggaaccgctcaagcaggc

SEQ ID NO: 3575912 - DNA, 25 bp, Homo sapien
cgcgggaaccgctcaagcaggcgct

SEQ ID NO: 3575913 - DNA, 25 bp, Homo sapien
cgggaaccgctcaagcaggcgctgc

SEQ ID NO: 3575914 - DNA, 25 bp, Homo sapien
cattgaatactctgaaaccgaaggg

SEQ ID NO: 3575915 - DNA, 25 bp, Homo sapien
taccactgggatagaggaatcaaga

SEQ ID NO: 3575916 - DNA, 25 bp, Homo sapien
ctttgaacaaccaaatgtgcattga

SEQ ID NO: 3575917 - DNA, 25 bp, Homo sapien
caagaggacaatctagctctccata

SEQ ID NO: 3575918 - DNA, 25 bp, Homo sapien
gagatgcattcttgatagcgagagc

SEQ ID NO: 3575919 - DNA, 25 bp, Homo sapien
catcaccacccttaggcagagagag

SEQ ID NO: 3575920 - DNA, 25 bp, Homo sapien
ggatgagataaacctgacagcaacc

SEQ ID NO: 3575921 - DNA, 25 bp, Homo sapien
tagcgagagcacaatggttcccctg

SEQ ID NO: 3575922 - DNA, 25 bp, Homo sapien
gccaggcttcaaaggtgtgacagca

SEQ ID NO: 3575923 - DNA, 25 bp, Homo sapien
tagcctcacttgtagcctgcctggt

SEQ ID NO: 3575924 - DNA, 25 bp, Homo sapien
ggagggcatggttggcttatccacc

SEQ ID NO: 3575925 - DNA, 25 bp, Homo sapien
ggttgaatctcatgcttgccaggct

SEQ ID NO: 3575926 - DNA, 25 bp, Homo sapien
ggctgctagagtccaaggaccttcc

SEQ ID NO: 3575927 - DNA, 25 bp, Homo sapien
gtccaaggaccttccacaactcgga

SEQ ID NO: 3575928 - DNA, 25 bp, Homo sapien
ccacaactcggacaggaggtttcat

SEQ ID NO: 3575929 - DNA, 25 bp, Homo sapien
ggtagagccgggtagagggctgcta

SEQ ID NO: 3575930 - DNA, 25 bp, Homo sapien
tcagctcttgtcagggacatgaaaa

SEQ ID NO: 3575931 - DNA, 25 bp, Homo sapien
tgtgcgagtgctggaggtttcaaac

SEQ ID NO: 3575932 - DNA, 25 bp, Homo sapien
gtgcgagtgctggaggtttcaaaca

SEQ ID NO: 3575933 - DNA, 25 bp, Homo sapien
ctgtgcgagtgctggaggtttcaaa

SEQ ID NO: 3575934 - DNA, 25 bp, Homo sapien
tgcaaggagccacatgaacacatag

SEQ ID NO: 3575935 - DNA, 25 bp, Homo sapien
aagtgagggtgatcaagctgactca

SEQ ID NO: 3575936 - DNA, 25 bp, Homo sapien
cactgagttaatcctggagcaccag

SEQ ID NO: 3575937 - DNA, 25 bp, Homo sapien
tacgttgatatggatgttagctgct

SEQ ID NO: 3575938 - DNA, 25 bp, Homo sapien
gccaaggctcattgacggtgtatac

SEQ ID NO: 3575939 - DNA, 25 bp, Homo sapien
caacaactgaagagggcacataatc

SEQ ID NO: 3575940 - DNA, 25 bp, Homo sapien
aaatctcggcagtatgtaggttatc

SEQ ID NO: 3575941 - DNA, 25 bp, Homo sapien
gggacatgagaagctcaccaagata

SEQ ID NO: 3575942 - DNA, 25 bp, Homo sapien
gaaagtacacaggtttgttctctga

SEQ ID NO: 3575943 - DNA, 25 bp, Homo sapien
cccattagggaacaacttcttgtag

SEQ ID NO: 3575944 - DNA, 25 bp, Homo sapien
ggaacaacttcttgtagtcaacatt

SEQ ID NO: 3575945 - DNA, 25 bp, Homo sapien
tgtttttagcaagggtttcaatgga

SEQ ID NO: 3575946 - DNA, 25 bp, Homo sapien
caatggatactaaacggcccacatg

SEQ ID NO: 3575947 - DNA, 25 bp, Homo sapien
aaaccaggagccacggacctgacgt

SEQ ID NO: 3575948 - DNA, 25 bp, Homo sapien
gccacggacctgacgtattgcctat

SEQ ID NO: 3575949 - DNA, 25 bp, Homo sapien
tgacgtattgcctatcatgagctgg

SEQ ID NO: 3575950 - DNA, 25 bp, Homo sapien
tattgcctatcatgagctggcaacc

SEQ ID NO: 3575951 - DNA, 25 bp, Homo sapien
tactacttggcggacaaatgtgtgt

SEQ ID NO: 3575952 - DNA, 25 bp, Homo sapien
aaggatcacgcttactacttggcgg

SEQ ID NO: 3575953 - DNA, 25 bp, Homo sapien
ttttagaggcaaggatcacgcttac

SEQ ID NO: 3575954 - DNA, 25 bp, Homo sapien
cagatgttgctcgattttagaggca

SEQ ID NO: 3575955 - DNA, 25 bp, Homo sapien
ccttctctgcaagtgtcaataaatc

SEQ ID NO: 3575956 - DNA, 25 bp, Homo sapien
cctctgatagaggtttcatattgta

SEQ ID NO: 3575957 - DNA, 25 bp, Homo sapien
cagctagtgttggaattgactgatt

SEQ ID NO: 3575958 - DNA, 25 bp, Homo sapien
ggtggagggcgatgaagatcaaata

SEQ ID NO: 3575959 - DNA, 25 bp, Homo sapien
tgcttccagatgcagggatcccttg

SEQ ID NO: 3575960 - DNA, 25 bp, Homo sapien
tctggatagtttcagctgtcagtct

SEQ ID NO: 3575961 - DNA, 25 bp, Homo sapien
gctagtctagcggttttgcattccc

SEQ ID NO: 3575962 - DNA, 25 bp, Homo sapien
tcttagatctatatgtccacccctc

SEQ ID NO: 3575963 - DNA, 25 bp, Homo sapien
gagtcgataggaaatcccagttgaa

SEQ ID NO: 3575964 - DNA, 25 bp, Homo sapien
gcctgcattcagagtcgataggaaa

SEQ ID NO: 3575965 - DNA, 25 bp, Homo sapien
cccaatattggttgttcttttcagg

SEQ ID NO: 3575966 - DNA, 25 bp, Homo sapien
aaggcagggttctcgcaggcagatt

SEQ ID NO: 3575967 - DNA, 25 bp, Homo sapien
ttatggtacccttgacccctgtcag

SEQ ID NO: 3575968 - DNA, 25 bp, Homo sapien
taatgatcacacttcaggactgagg

SEQ ID NO: 3575969 - DNA, 25 bp, Homo sapien
cccatattccggtaaaacagctgat

SEQ ID NO: 3575970 - DNA, 25 bp, Homo sapien
tgatatgaaccagtttgaggacccc

SEQ ID NO: 3575971 - DNA, 25 bp, Homo sapien
agtgtatatcagtctccaatccatg

SEQ ID NO: 3575972 - DNA, 25 bp, Homo sapien
gctttctcaaaggacatcatggtat

SEQ ID NO: 3575973 - DNA, 25 bp, Homo sapien
cttaagtgtatatcagtctccaatc

SEQ ID NO: 3575974 - DNA, 25 bp, Homo sapien
aaggacatcatggtattctcaggcc

SEQ ID NO: 3575975 - DNA, 25 bp, Homo sapien
atccccagtggcatcaaatagagac

SEQ ID NO: 3575976 - DNA, 25 bp, Homo sapien
tatgtccaaagatggttggcttggg

SEQ ID NO: 3575977 - DNA, 25 bp, Homo sapien
catgggtgcacctctatgtccaaag

SEQ ID NO: 3575978 - DNA, 25 bp, Homo sapien
ccttctcctgaatgcagggagaata

SEQ ID NO: 3575979 - DNA, 25 bp, Homo sapien
gggtaatccaacaggcacttgtaga

SEQ ID NO: 3575980 - DNA, 25 bp, Homo sapien
gaaagggtaatccaacaggcacttg

SEQ ID NO: 3575981 - DNA, 25 bp, Homo sapien
aagggtaatccaacaggcacttgta

SEQ ID NO: 3575982 - DNA, 25 bp, Homo sapien
ggtaatccaacaggcacttgtagac

SEQ ID NO: 3575983 - DNA, 25 bp, Homo sapien
gggatttggatataaaagtatagaa

SEQ ID NO: 3575984 - DNA, 25 bp, Homo sapien
cagggatttggatataaaagtatag

SEQ ID NO: 3575985 - DNA, 25 bp, Homo sapien
ttccagggatttggatataaaagta

SEQ ID NO: 3575986 - DNA, 25 bp, Homo sapien
ccagggatttggatataaaagtata

SEQ ID NO: 3575987 - DNA, 25 bp, Homo sapien
cttgtgattacattacattgcttga

SEQ ID NO: 3575988 - DNA, 25 bp, Homo sapien
tgtgattacattacattgcttgagt

SEQ ID NO: 3575989 - DNA, 25 bp, Homo sapien
ttgtgattacattacattgcttgag

SEQ ID NO: 3575990 - DNA, 25 bp, Homo sapien
gccacaggccagaaaaggataacca

SEQ ID NO: 3575991 - DNA, 25 bp, Homo sapien
taaccatcacagttatgctgaccag

SEQ ID NO: 3575992 - DNA, 25 bp, Homo sapien
ttccaaacatgccacgtagaaggcc

SEQ ID NO: 3575993 - DNA, 25 bp, Homo sapien
ccaggtgcacgtagggagcaaagat

SEQ ID NO: 3575994 - DNA, 25 bp, Homo sapien
gcattgacagcccagctaccagcca

SEQ ID NO: 3575995 - DNA, 25 bp, Homo sapien
cctttctttccagaatttgcatata

SEQ ID NO: 3575996 - DNA, 25 bp, Homo sapien
tccagaatttgcatataatgaacat

SEQ ID NO: 3575997 - DNA, 25 bp, Homo sapien
gaagaatcactagcagaatcaggat

SEQ ID NO: 3575998 - DNA, 25 bp, Homo sapien
cttatgacacaagtgcaggtatagt

SEQ ID NO: 3575999 - DNA, 25 bp, Homo sapien
tagttcaatcctttcccaaagcaac

SEQ ID NO: 3576000 - DNA, 25 bp, Homo sapien
agttcaatcctttcccaaagcaaca

SEQ ID NO: 3576001 - DNA, 25 bp, Homo sapien
agtcaggatcctagctaaactcaga

SEQ ID NO: 3576002 - DNA, 25 bp, Homo sapien
tgaagagtaggcagtcaggatccta

SEQ ID NO: 3576003 - DNA, 25 bp, Homo sapien
gagtaggcagtcaggatcctagcta

SEQ ID NO: 3576004 - DNA, 25 bp, Homo sapien
taggcagtcaggatcctagctaaac

SEQ ID NO: 3576005 - DNA, 25 bp, Homo sapien
gcatctcagtcttgggaacaatggt

SEQ ID NO: 3576006 - DNA, 25 bp, Homo sapien
ggttccaagccatgccggtggtcag

SEQ ID NO: 3576007 - DNA, 25 bp, Homo sapien
tcctggcagacgaagatcacaaatg

SEQ ID NO: 3576008 - DNA, 25 bp, Homo sapien
tcatggaagctagccagtaagcatc

SEQ ID NO: 3576009 - DNA, 25 bp, Homo sapien
ctggatgtttctatccacaggaaca

SEQ ID NO: 3576010 - DNA, 25 bp, Homo sapien
agttaaagtattcactggatgtttc

SEQ ID NO: 3576011 - DNA, 25 bp, Homo sapien
aattaccaggcacggcaaaataatt

SEQ ID NO: 3576012 - DNA, 25 bp, Homo sapien
caggcacggcaaaataattgctctt

SEQ ID NO: 3576013 - DNA, 25 bp, Homo sapien
gaaattaccaggcacggcaaaataa

SEQ ID NO: 3576014 - DNA, 25 bp, Homo sapien
taccaggcacggcaaaataattgct

SEQ ID NO: 3576015 - DNA, 25 bp, Homo sapien
gaaatggagccctagcatccccagt

SEQ ID NO: 3576016 - DNA, 25 bp, Homo sapien
cattggtgcaatacttttatggaag

SEQ ID NO: 3576017 - DNA, 25 bp, Homo sapien
gtttaacattggtgcaatactttta

SEQ ID NO: 3576018 - DNA, 25 bp, Homo sapien
tatggaagaaatggagccctagcat

SEQ ID NO: 3576019 - DNA, 25 bp, Homo sapien
ctatgctccccgcatctgagaaaat

SEQ ID NO: 3576020 - DNA, 25 bp, Homo sapien
agcctatgctccccgcatctgagaa

SEQ ID NO: 3576021 - DNA, 25 bp, Homo sapien
gcctatgctccccgcatctgagaaa

SEQ ID NO: 3576022 - DNA, 25 bp, Homo sapien
tcagcctatgctccccgcatctgag

SEQ ID NO: 3576023 - DNA, 25 bp, Homo sapien
tgtggttgaagatgcgtggaatcca

SEQ ID NO: 3576024 - DNA, 25 bp, Homo sapien
gaatccatggattaagcttttttgg

SEQ ID NO: 3576025 - DNA, 25 bp, Homo sapien
tccagaggcaactatagcagccagt

SEQ ID NO: 3576026 - DNA, 25 bp, Homo sapien
agaggcaactatagcagccagtaag

SEQ ID NO: 3576027 - DNA, 25 bp, Homo sapien
taaaagtcaagatggtggttacctc

SEQ ID NO: 3576028 - DNA, 25 bp, Homo sapien
cattcaggtatatagtggtaaaggg

SEQ ID NO: 3576029 - DNA, 25 bp, Homo sapien
ggaaggacaagatagagaaggttct

SEQ ID NO: 3576030 - DNA, 25 bp, Homo sapien
aactggccgaactaaaatctacttg

SEQ ID NO: 3576031 - DNA, 25 bp, Homo sapien
cagcctagggtatgcagggaatcaa

SEQ ID NO: 3576032 - DNA, 25 bp, Homo sapien
catcacacaagtagagctggacagg

SEQ ID NO: 3576033 - DNA, 25 bp, Homo sapien
cagcatgggaacactattgggtcaa

SEQ ID NO: 3576034 - DNA, 25 bp, Homo sapien
cagggtatcatgtcaggccaccaaa

SEQ ID NO: 3576035 - DNA, 25 bp, Homo sapien
tatataaacccttaatcataaacca

SEQ ID NO: 3576036 - DNA, 25 bp, Homo sapien
tcttcaatgctggacacacggtttc

SEQ ID NO: 3576037 - DNA, 25 bp, Homo sapien
ttagaaatggccatcatctgattag

SEQ ID NO: 3576038 - DNA, 25 bp, Homo sapien
gattagtcattcagttgcagttctc

SEQ ID NO: 3576039 - DNA, 25 bp, Homo sapien
cagaaggcttggcacaatgaggctg

SEQ ID NO: 3576040 - DNA, 25 bp, Homo sapien
ggagaagagggcatcaggagttgga

SEQ ID NO: 3576041 - DNA, 25 bp, Homo sapien
tctcacagaaggcttggcacaatga

SEQ ID NO: 3576042 - DNA, 25 bp, Homo sapien
cacagaaggcttggcacaatgaggc

SEQ ID NO: 3576043 - DNA, 25 bp, Homo sapien
ttagtgattgttctttgttgcctcc

SEQ ID NO: 3576044 - DNA, 25 bp, Homo sapien
agctgcagcaatcagtggagtgagg

SEQ ID NO: 3576045 - DNA, 25 bp, Homo sapien
gctgcagcaatcagtggagtgaggc

SEQ ID NO: 3576046 - DNA, 25 bp, Homo sapien
ttagctgcagcaatcagtggagtga

SEQ ID NO: 3576047 - DNA, 25 bp, Homo sapien
tagctgcagcaatcagtggagtgag

SEQ ID NO: 3576048 - DNA, 25 bp, Homo sapien
caaatgggttgaatctcacagacac

SEQ ID NO: 3576049 - DNA, 25 bp, Homo sapien
tattccatttcttccgaggtaagcc

SEQ ID NO: 3576050 - DNA, 25 bp, Homo sapien
gatcatgacccagtagtatatcgca

SEQ ID NO: 3576051 - DNA, 25 bp, Homo sapien
cacagacacattaagggaaagaagc

SEQ ID NO: 3576052 - DNA, 25 bp, Homo sapien
cagctatcatggaaaagttactaaa

SEQ ID NO: 3576053 - DNA, 25 bp, Homo sapien
catggaaaagttactaaacacttga

SEQ ID NO: 3576054 - DNA, 25 bp, Homo sapien
atcatggaaaagttactaaacactt

SEQ ID NO: 3576055 - DNA, 25 bp, Homo sapien
tcatggaaaagttactaaacacttg

SEQ ID NO: 3576056 - DNA, 25 bp, Homo sapien
actaaaagctgatctctcagcagaa

SEQ ID NO: 3576057 - DNA, 25 bp, Homo sapien
agactaaaagctgatctctcagcag

SEQ ID NO: 3576058 - DNA, 25 bp, Homo sapien
catcagactaaaagctgatctctca

SEQ ID NO: 3576059 - DNA, 25 bp, Homo sapien
tcagactaaaagctgatctctcagc

SEQ ID NO: 3576060 - DNA, 25 bp, Homo sapien
gacagcggttcagaaagtcccggaa

SEQ ID NO: 3576061 - DNA, 25 bp, Homo sapien
aagtcccggaagatagctgacagct

SEQ ID NO: 3576062 - DNA, 25 bp, Homo sapien
catccatctcgagacagcggttcag

SEQ ID NO: 3576063 - DNA, 25 bp, Homo sapien
ttctggggtcccattggtggcaatg

SEQ ID NO: 3576064 - DNA, 25 bp, Homo sapien
acttgaaatagaactggtaacactc

SEQ ID NO: 3576065 - DNA, 25 bp, Homo sapien
ttgaaatagaactggtaacactcac

SEQ ID NO: 3576066 - DNA, 25 bp, Homo sapien
cttgaaatagaactggtaacactca

SEQ ID NO: 3576067 - DNA, 25 bp, Homo sapien
ggctccccttcaatcatttcgatgg

SEQ ID NO: 3576068 - DNA, 25 bp, Homo sapien
tctcagagggttttcattgaggtat

SEQ ID NO: 3576069 - DNA, 25 bp, Homo sapien
tccccttcaatcatttcgatggcca

SEQ ID NO: 3576070 - DNA, 25 bp, Homo sapien
ttcaatcatttcgatggccatgatg

SEQ ID NO: 3576071 - DNA, 25 bp, Homo sapien
ctaccatggtgctccgtttgctctg

SEQ ID NO: 3576072 - DNA, 25 bp, Homo sapien
cagtatggggttcctaccatggtgc

SEQ ID NO: 3576073 - DNA, 25 bp, Homo sapien
caaccttgggcccataggcctttcg

SEQ ID NO: 3576074 - DNA, 25 bp, Homo sapien
gcccataggcctttcgtgtcacaac

SEQ ID NO: 3576075 - DNA, 25 bp, Homo sapien
tgtctagctcctagcctatttccta

SEQ ID NO: 3576076 - DNA, 25 bp, Homo sapien
cttcatgtctagctcctagcctatt

SEQ ID NO: 3576077 - DNA, 25 bp, Homo sapien
ctcctagcctatttcctattgaacc

SEQ ID NO: 3576078 - DNA, 25 bp, Homo sapien
gctcctagcctatttcctattgaac

SEQ ID NO: 3576079 - DNA, 25 bp, Homo sapien
tgaatgacctggttcgaatgcaaga

SEQ ID NO: 3576080 - DNA, 25 bp, Homo sapien
tgacctggttcgaatgcaagaactc

SEQ ID NO: 3576081 - DNA, 25 bp, Homo sapien
aatgacctggttcgaatgcaagaac

SEQ ID NO: 3576082 - DNA, 25 bp, Homo sapien
acctggttcgaatgcaagaactcca

SEQ ID NO: 3576083 - DNA, 25 bp, Homo sapien
tataacagccgaaaacagaaacaac

SEQ ID NO: 3576084 - DNA, 25 bp, Homo sapien
cataatgctagctaagtaaaagaag

SEQ ID NO: 3576085 - DNA, 25 bp, Homo sapien
ggttacatagggctgggagagtcag

SEQ ID NO: 3576086 - DNA, 25 bp, Homo sapien
actacagaggtagaaaatagattag

SEQ ID NO: 3576087 - DNA, 25 bp, Homo sapien
ccacagctcatctcccacgaggtaa

SEQ ID NO: 3576088 - DNA, 25 bp, Homo sapien
gcacacagctgcaatttggccttca

SEQ ID NO: 3576089 - DNA, 25 bp, Homo sapien
tcaaggagcctccagccaagtattc

SEQ ID NO: 3576090 - DNA, 25 bp, Homo sapien
tggccttcatccatgcaagtttctg

SEQ ID NO: 3576091 - DNA, 25 bp, Homo sapien
caggatctcattaataatcagctct

SEQ ID NO: 3576092 - DNA, 25 bp, Homo sapien
caagtaattcacaatgtttgggttc

SEQ ID NO: 3576093 - DNA, 25 bp, Homo sapien
taattcacaatgtttgggttcttgt

SEQ ID NO: 3576094 - DNA, 25 bp, Homo sapien
tctcattaataatcagctctttctt

SEQ ID NO: 3576095 - DNA, 25 bp, Homo sapien
ctgaaatcaagagtatattcaatgt

SEQ ID NO: 3576096 - DNA, 25 bp, Homo sapien
ctgtcctgtggccacatccattgct

SEQ ID NO: 3576097 - DNA, 25 bp, Homo sapien
gtggccacatccattgctgtgtaca

SEQ ID NO: 3576098 - DNA, 25 bp, Homo sapien
acatccattgctgtgtacacggtgc

SEQ ID NO: 3576099 - DNA, 25 bp, Homo sapien
tgtcctgtggccacatccattgctg

SEQ ID NO: 3576100 - DNA, 25 bp, Homo sapien
tacaagactgcttcctaggcaagcc

SEQ ID NO: 3576101 - DNA, 25 bp, Homo sapien
gaatgaccccacttgacacatgtgt

SEQ ID NO: 3576102 - DNA, 25 bp, Homo sapien
tacatgctcccagaagatctgaggg

SEQ ID NO: 3576103 - DNA, 25 bp, Homo sapien
tgtaggctctagtggccaggagacc

SEQ ID NO: 3576104 - DNA, 25 bp, Homo sapien
gatctcagcactaggacaaacaggg

SEQ ID NO: 3576105 - DNA, 25 bp, Homo sapien
tgaattcattacactgagggcagca

SEQ ID NO: 3576106 - DNA, 25 bp, Homo sapien
caaacagggttcatccggaaaagca

SEQ ID NO: 3576107 - DNA, 25 bp, Homo sapien
gcaacatggtcagctaatggcatct

SEQ ID NO: 3576108 - DNA, 25 bp, Homo sapien
ttctcaaaccgtgtatatttcttct

SEQ ID NO: 3576109 - DNA, 25 bp, Homo sapien
caatcttctcaaaccgtgtatattt

SEQ ID NO: 3576110 - DNA, 25 bp, Homo sapien
tttcttcttaggatcgcccacactc

SEQ ID NO: 3576111 - DNA, 25 bp, Homo sapien
ttcttcttaggatcgcccacactca

SEQ ID NO: 3576112 - DNA, 25 bp, Homo sapien
tctccatcctaacatagtatccaac

SEQ ID NO: 3576113 - DNA, 25 bp, Homo sapien
ctccatcctaacatagtatccaacc

SEQ ID NO: 3576114 - DNA, 25 bp, Homo sapien
cacgtcccgagttggagtgacagga

SEQ ID NO: 3576115 - DNA, 25 bp, Homo sapien
cagtattccgggtcaaagcatctgg

SEQ ID NO: 3576116 - DNA, 25 bp, Homo sapien
gaaatgggagatgtagccacgtccc

SEQ ID NO: 3576117 - DNA, 25 bp, Homo sapien
gaagtggttcaatcacagaccgtgt

SEQ ID NO: 3576118 - DNA, 25 bp, Homo sapien
gcaagaccagcctttgttagcatag

SEQ ID NO: 3576119 - DNA, 25 bp, Homo sapien
aaaatggccttccttactctcactg

SEQ ID NO: 3576120 - DNA, 25 bp, Homo sapien
tagaggctagacaactatcaaaaga

SEQ ID NO: 3576121 - DNA, 25 bp, Homo sapien
tgaggttagaacatccacagagcaa

SEQ ID NO: 3576122 - DNA, 25 bp, Homo sapien
tcctgaaggacggataggtttctac

SEQ ID NO: 3576123 - DNA, 25 bp, Homo sapien
tgcctcaccctgtacaaaatgctgc

SEQ ID NO: 3576124 - DNA, 25 bp, Homo sapien
gaatgtgggtcattcatccgtgagt

SEQ ID NO: 3576125 - DNA, 25 bp, Homo sapien
taagcaagctatatactactgaggt

SEQ ID NO: 3576126 - DNA, 25 bp, Homo sapien
gaacattccagtagtgggaacagca

SEQ ID NO: 3576127 - DNA, 25 bp, Homo sapien
taagccaagacgctgagatcagagg

SEQ ID NO: 3576128 - DNA, 25 bp, Homo sapien
tgactggacaggcttttaataggtg

SEQ ID NO: 3576129 - DNA, 25 bp, Homo sapien
gagactaaagccaactacatcctgc

SEQ ID NO: 3576130 - DNA, 25 bp, Homo sapien
aatgctctaagaggctgaacactgc

SEQ ID NO: 3576131 - DNA, 25 bp, Homo sapien
aagacaatttgttgcttccctggag

SEQ ID NO: 3576132 - DNA, 25 bp, Homo sapien
caattacctaggacactttgggact

SEQ ID NO: 3576133 - DNA, 25 bp, Homo sapien
cgagactggactggtataaacatca

SEQ ID NO: 3576134 - DNA, 25 bp, Homo sapien
catcttctgaaactggtggcactgc

SEQ ID NO: 3576135 - DNA, 25 bp, Homo sapien
gtgctctgggcgtggagcaatcact

SEQ ID NO: 3576136 - DNA, 25 bp, Homo sapien
ctggtggcactgcaggagtctcaga

SEQ ID NO: 3576137 - DNA, 25 bp, Homo sapien
gcgtggagcaatcactggtggtggg

SEQ ID NO: 3576138 - DNA, 25 bp, Homo sapien
gtagaattttgcagttaactcaggt

SEQ ID NO: 3576139 - DNA, 25 bp, Homo sapien
tttctttatatctgcggtagaattt

SEQ ID NO: 3576140 - DNA, 25 bp, Homo sapien
gttaactcaggttcctctgtttctc

SEQ ID NO: 3576141 - DNA, 25 bp, Homo sapien
ttatatctgcggtagaattttgcag

SEQ ID NO: 3576142 - DNA, 25 bp, Homo sapien
gaagaattgtaatcctcagctgact

SEQ ID NO: 3576143 - DNA, 25 bp, Homo sapien
agaagaattgtaatcctcagctgac

SEQ ID NO: 3576144 - DNA, 25 bp, Homo sapien
gaattgtaatcctcagctgacttat

SEQ ID NO: 3576145 - DNA, 25 bp, Homo sapien
caaggcattagaagaattgtaatcc

SEQ ID NO: 3576146 - DNA, 25 bp, Homo sapien
gactgccctggacgcagttctcata

SEQ ID NO: 3576147 - DNA, 25 bp, Homo sapien
actgccctggacgcagttctcatac

SEQ ID NO: 3576148 - DNA, 25 bp, Homo sapien
gttgtaaaactccaacacatccaga

SEQ ID NO: 3576149 - DNA, 25 bp, Homo sapien
ggatgtcttcttcgagttgtaaaac

SEQ ID NO: 3576150 - DNA, 25 bp, Homo sapien
acatccagaacagcctgcgggtttt

SEQ ID NO: 3576151 - DNA, 25 bp, Homo sapien
tgatgtctgaagcaagcgggcccac

SEQ ID NO: 3576152 - DNA, 25 bp, Homo sapien
agaaatctctggccgctctttctct

SEQ ID NO: 3576153 - DNA, 25 bp, Homo sapien
tgacagcatcaaaaccgacatgaat

SEQ ID NO: 3576154 - DNA, 25 bp, Homo sapien
tcaaaaccgacatgaattgtgtgtt

SEQ ID NO: 3576155 - DNA, 25 bp, Homo sapien
acagcatcaaaaccgacatgaattg

SEQ ID NO: 3576156 - DNA, 25 bp, Homo sapien
gaatgaattagtcaggaaatcaagg

SEQ ID NO: 3576157 - DNA, 25 bp, Homo sapien
caggaaatcaaggttaagcacctta

SEQ ID NO: 3576158 - DNA, 25 bp, Homo sapien
gaagttggcagctactatatgaatg

SEQ ID NO: 3576159 - DNA, 25 bp, Homo sapien
ggcagctactatatgaatgaattag

SEQ ID NO: 3576160 - DNA, 25 bp, Homo sapien
ggtgaagtagaaggactcatacaca

SEQ ID NO: 3576161 - DNA, 25 bp, Homo sapien
caaatgcaatgtgtccaaaataatc

SEQ ID NO: 3576162 - DNA, 25 bp, Homo sapien
tccctattgggctaatgacactacc

SEQ ID NO: 3576163 - DNA, 25 bp, Homo sapien
tacacataacgatataagcccaatg

SEQ ID NO: 3576164 - DNA, 25 bp, Homo sapien
aatcacttcagattgtcccaaatct

SEQ ID NO: 3576165 - DNA, 25 bp, Homo sapien
tgtcccaaatctggcaagagcataa

SEQ ID NO: 3576166 - DNA, 25 bp, Homo sapien
cagttttgctcagatatagttaata

SEQ ID NO: 3576167 - DNA, 25 bp, Homo sapien
cattttgtggcttcataaacagttt

SEQ ID NO: 3576168 - DNA, 25 bp, Homo sapien
tagtgctggtatttctcatcggagg

SEQ ID NO: 3576169 - DNA, 25 bp, Homo sapien
tggtttagggttccagcatctttgc

SEQ ID NO: 3576170 - DNA, 25 bp, Homo sapien
tttatctccaggtaaaatggatcgg

SEQ ID NO: 3576171 - DNA, 25 bp, Homo sapien
tgctgccggctccaatcatagtgct

SEQ ID NO: 3576172 - DNA, 25 bp, Homo sapien
gggtctagctcaagtccttccactg

SEQ ID NO: 3576173 - DNA, 25 bp, Homo sapien
cattctgagacattgcaaagcacgg

SEQ ID NO: 3576174 - DNA, 25 bp, Homo sapien
tacagcccttccttcagggtctagc

SEQ ID NO: 3576175 - DNA, 25 bp, Homo sapien
gcaaaaactaagtgtgaatcccagt

SEQ ID NO: 3576176 - DNA, 25 bp, Homo sapien
taaagctaggcatgaggccaacatt

SEQ ID NO: 3576177 - DNA, 25 bp, Homo sapien
tagtctctgtagaccaaaagtttgg

SEQ ID NO: 3576178 - DNA, 25 bp, Homo sapien
ggatgaaaaaccaatgcctcagacg

SEQ ID NO: 3576179 - DNA, 25 bp, Homo sapien
gcctcagacgtgctgcaatataaag

SEQ ID NO: 3576180 - DNA, 25 bp, Homo sapien
cacggcttgaaaatgcactcgggaa

SEQ ID NO: 3576181 - DNA, 25 bp, Homo sapien
gagtctagccccaaaagtaggcaga

SEQ ID NO: 3576182 - DNA, 25 bp, Homo sapien
ccagtggaagcgaaaatgcctagcc

SEQ ID NO: 3576183 - DNA, 25 bp, Homo sapien
catgtcagcagtacctagagtctag

SEQ ID NO: 3576184 - DNA, 25 bp, Homo sapien
cacatgagcgtccacattccttgat

SEQ ID NO: 3576185 - DNA, 25 bp, Homo sapien
gagcaacaactgaggccagtttcaa

SEQ ID NO: 3576186 - DNA, 25 bp, Homo sapien
agcaacaactgaggccagtttcaat

SEQ ID NO: 3576187 - DNA, 25 bp, Homo sapien
catgagcgtccacattccttgatct

SEQ ID NO: 3576188 - DNA, 25 bp, Homo sapien
accggctccgctcgattcagctggg

SEQ ID NO: 3576189 - DNA, 25 bp, Homo sapien
ggctagccccggcatctctggcgat

SEQ ID NO: 3576190 - DNA, 25 bp, Homo sapien
cgattgtttccgtcgcagagccgca

SEQ ID NO: 3576191 - DNA, 25 bp, Homo sapien
gctccgctcgattcagctgggctgg

SEQ ID NO: 3576192 - DNA, 25 bp, Homo sapien
taaatatactagagtcccagcagag

SEQ ID NO: 3576193 - DNA, 25 bp, Homo sapien
ggtctggcatgtggcctaggcaata

SEQ ID NO: 3576194 - DNA, 25 bp, Homo sapien
taaatagcccaaaatagacccacac

SEQ ID NO: 3576195 - DNA, 25 bp, Homo sapien
tcagtggaattgaagtaaatagccc

SEQ ID NO: 3576196 - DNA, 25 bp, Homo sapien
ccaactatggtgttctactcggtca

SEQ ID NO: 3576197 - DNA, 25 bp, Homo sapien
tactcggtcagccaaggtttctaga

SEQ ID NO: 3576198 - DNA, 25 bp, Homo sapien
gaagggacaagcctagcaccgtgta

SEQ ID NO: 3576199 - DNA, 25 bp, Homo sapien
gaggcaccttctgtaagaattgaca

SEQ ID NO: 3576200 - DNA, 25 bp, Homo sapien
catgcgggaatgtgtataagtcaag

SEQ ID NO: 3576201 - DNA, 25 bp, Homo sapien
cattgactgacacaatagtttcggg

SEQ ID NO: 3576202 - DNA, 25 bp, Homo sapien
ggcaaacaacaaacttaggtctaca

SEQ ID NO: 3576203 - DNA, 25 bp, Homo sapien
gaagactaaagagtaacatgcggga

SEQ ID NO: 3576204 - DNA, 25 bp, Homo sapien
tcgataatactaaaaagagctgacc

SEQ ID NO: 3576205 - DNA, 25 bp, Homo sapien
caagggtctcagtccaatgccattt

SEQ ID NO: 3576206 - DNA, 25 bp, Homo sapien
gatccagagtagcaaagtagctgct

SEQ ID NO: 3576207 - DNA, 25 bp, Homo sapien
tgacccactagaagacaaataggcc

SEQ ID NO: 3576208 - DNA, 25 bp, Homo sapien
actgggcatggtatcttagggctaa

SEQ ID NO: 3576209 - DNA, 25 bp, Homo sapien
tcttgagtaaaaccccaatgtcgca

SEQ ID NO: 3576210 - DNA, 25 bp, Homo sapien
tgaataattgaagccactctcccag

SEQ ID NO: 3576211 - DNA, 25 bp, Homo sapien
aaaagtctgcctgtcaaaatgatgc

SEQ ID NO: 3576212 - DNA, 25 bp, Homo sapien
tgtgcgcgagctaccgcttcacttt

SEQ ID NO: 3576213 - DNA, 25 bp, Homo sapien
gcctgtgagggaagcgcgatgggcg

SEQ ID NO: 3576214 - DNA, 25 bp, Homo sapien
tggatgcggagaccaggttcctcga

SEQ ID NO: 3576215 - DNA, 25 bp, Homo sapien
ggcctgaccgcctagttcactggct

SEQ ID NO: 3576216 - DNA, 25 bp, Homo sapien
gcctttaagaagcataccgtcacga

SEQ ID NO: 3576217 - DNA, 25 bp, Homo sapien
gatgccactgttcccaaactcagac

SEQ ID NO: 3576218 - DNA, 25 bp, Homo sapien
tgaaaccctgagcaaaagacccatc

SEQ ID NO: 3576219 - DNA, 25 bp, Homo sapien
cctccgatgtcatgattgcagccta

SEQ ID NO: 3576220 - DNA, 25 bp, Homo sapien
gagtttgcagagatccaagaccacg

SEQ ID NO: 3576221 - DNA, 25 bp, Homo sapien
gtttgcagagatccaagaccacgcc

SEQ ID NO: 3576222 - DNA, 25 bp, Homo sapien
ggagtttgcagagatccaagaccac

SEQ ID NO: 3576223 - DNA, 25 bp, Homo sapien
tttgcagagatccaagaccacgcca

SEQ ID NO: 3576224 - DNA, 25 bp, Homo sapien
gactgcctttccctgtattcaaatt

SEQ ID NO: 3576225 - DNA, 25 bp, Homo sapien
gaattactaacatcagtggaaatgc

SEQ ID NO: 3576226 - DNA, 25 bp, Homo sapien
tcacattctaaaaatagttcccagg

SEQ ID NO: 3576227 - DNA, 25 bp, Homo sapien
tgttacattgatgagcacttccaga

SEQ ID NO: 3576228 - DNA, 25 bp, Homo sapien
tctctgtgagttcaatggttttaac

SEQ ID NO: 3576229 - DNA, 25 bp, Homo sapien
caaattattgctgactgcagtcacc

SEQ ID NO: 3576230 - DNA, 25 bp, Homo sapien
taaccatcactctacactctctgtg

SEQ ID NO: 3576231 - DNA, 25 bp, Homo sapien
caactgtactccctcagttattcta

SEQ ID NO: 3576232 - DNA, 25 bp, Homo sapien
tcaaaaatgcaacttttcggccagg

SEQ ID NO: 3576233 - DNA, 25 bp, Homo sapien
gaaagcaagccttcccaatcaattt

SEQ ID NO: 3576234 - DNA, 25 bp, Homo sapien
aatggaaataagtggtatagaagag

SEQ ID NO: 3576235 - DNA, 25 bp, Homo sapien
cataaatggaaataagtggtataga

SEQ ID NO: 3576236 - DNA, 25 bp, Homo sapien
tctagtaccactttttaagtagaca

SEQ ID NO: 3576237 - DNA, 25 bp, Homo sapien
cctaggcagcggtgtattgtaaagc

SEQ ID NO: 3576238 - DNA, 25 bp, Homo sapien
tagagtctgtttgcatgggtagaac

SEQ ID NO: 3576239 - DNA, 25 bp, Homo sapien
taggagtctagacctgcactgtgca

SEQ ID NO: 3576240 - DNA, 25 bp, Homo sapien
ggtgatcccattatgaaaccaaggt

SEQ ID NO: 3576241 - DNA, 25 bp, Homo sapien
caacatagccacaggctcctaagga

SEQ ID NO: 3576242 - DNA, 25 bp, Homo sapien
catggagccccagttatgtcattgc

SEQ ID NO: 3576243 - DNA, 25 bp, Homo sapien
tttatcgtgtattaactggctcccc

SEQ ID NO: 3576244 - DNA, 25 bp, Homo sapien
taaggatagccagtgaccaagtgtc

SEQ ID NO: 3576245 - DNA, 25 bp, Homo sapien
tatgtctggcagttgtcagctgtca

SEQ ID NO: 3576246 - DNA, 25 bp, Homo sapien
tgttgcctgagctcattacaaactc

SEQ ID NO: 3576247 - DNA, 25 bp, Homo sapien
tgggttatagatgggcagttcctct

SEQ ID NO: 3576248 - DNA, 25 bp, Homo sapien
tggccccaaaactgagaataactta

SEQ ID NO: 3576249 - DNA, 25 bp, Homo sapien
gggcattcttccaagagagcaaaaa

SEQ ID NO: 3576250 - DNA, 25 bp, Homo sapien
ttacatggtcagggcattcttccaa

SEQ ID NO: 3576251 - DNA, 25 bp, Homo sapien
tcagggcattcttccaagagagcaa

SEQ ID NO: 3576252 - DNA, 25 bp, Homo sapien
catggtcagggcattcttccaagag

SEQ ID NO: 3576253 - DNA, 25 bp, Homo sapien
tgcttgtactcaagaggatcttggg

SEQ ID NO: 3576254 - DNA, 25 bp, Homo sapien
tatagtctataggaaaagcactggg

SEQ ID NO: 3576255 - DNA, 25 bp, Homo sapien
gataaagctttggtctattggtcca

SEQ ID NO: 3576256 - DNA, 25 bp, Homo sapien
aattgacaaatgttcagggcagcca

SEQ ID NO: 3576257 - DNA, 25 bp, Homo sapien
gaagcattccctcagttttttatag

SEQ ID NO: 3576258 - DNA, 25 bp, Homo sapien
ttttatagtatactggctggctcct

SEQ ID NO: 3576259 - DNA, 25 bp, Homo sapien
gaaaaaggtagctaacatgcctgaa

SEQ ID NO: 3576260 - DNA, 25 bp, Homo sapien
taaaggtagtcagtttcagatatgc

SEQ ID NO: 3576261 - DNA, 25 bp, Homo sapien
tcaggatagtgacttgagcccttgg

SEQ ID NO: 3576262 - DNA, 25 bp, Homo sapien
taaggtatctaagtggttgccaaac

SEQ ID NO: 3576263 - DNA, 25 bp, Homo sapien
taaactgatctagggctttaagcct

SEQ ID NO: 3576264 - DNA, 25 bp, Homo sapien
aattaaccaaaagctacatgccaga

SEQ ID NO: 3576265 - DNA, 25 bp, Homo sapien
aatggtcagttaaataaggttgaga

SEQ ID NO: 3576266 - DNA, 25 bp, Homo sapien
aaactgttaatagttgagattaatg

SEQ ID NO: 3576267 - DNA, 25 bp, Homo sapien
tatttgcttgacacatctctaaaac

SEQ ID NO: 3576268 - DNA, 25 bp, Homo sapien
tctctaaaaccagttaatggtcagt

SEQ ID NO: 3576269 - DNA, 25 bp, Homo sapien
cattctaagtgaaaactccgagtgc

SEQ ID NO: 3576270 - DNA, 25 bp, Homo sapien
tcatatggaaaacaccggctgcact

SEQ ID NO: 3576271 - DNA, 25 bp, Homo sapien
gatgtagccaattctttaagcatgg

SEQ ID NO: 3576272 - DNA, 25 bp, Homo sapien
gactcagactaacatacaggacagt

SEQ ID NO: 3576273 - DNA, 25 bp, Homo sapien
ggagaggatactttcagccaccacc

SEQ ID NO: 3576274 - DNA, 25 bp, Homo sapien
tatatattcactcacatgcaagcga

SEQ ID NO: 3576275 - DNA, 25 bp, Homo sapien
tagacaatctcactagctccagcca

SEQ ID NO: 3576276 - DNA, 25 bp, Homo sapien
tgcaagcgatttcctacattttaag

SEQ ID NO: 3576277 - DNA, 25 bp, Homo sapien
tcaacttcaatccaaaaattcttct

SEQ ID NO: 3576278 - DNA, 25 bp, Homo sapien
ccaaaaattcttctcggtcacgatt

SEQ ID NO: 3576279 - DNA, 25 bp, Homo sapien
aaattcttctcggtcacgattatga

SEQ ID NO: 3576280 - DNA, 25 bp, Homo sapien
ttcaacttcaatccaaaaattcttc

SEQ ID NO: 3576281 - DNA, 25 bp, Homo sapien
tgtagtagacagctgtacatttttt

SEQ ID NO: 3576282 - DNA, 25 bp, Homo sapien
tccagcatctaagcatccttcttac

SEQ ID NO: 3576283 - DNA, 25 bp, Homo sapien
acattttttgcaatccagcatctaa

SEQ ID NO: 3576284 - DNA, 25 bp, Homo sapien
ttggggttgtagtagacagctgtac

SEQ ID NO: 3576285 - DNA, 25 bp, Homo sapien
cacagcggcagcgtccttccactgt

SEQ ID NO: 3576286 - DNA, 25 bp, Homo sapien
agcggcagcgtccttccactgtaga

SEQ ID NO: 3576287 - DNA, 25 bp, Homo sapien
gcggcagcgtccttccactgtagaa

SEQ ID NO: 3576288 - DNA, 25 bp, Homo sapien
ctggggtactgtgagcatctgcaca

SEQ ID NO: 3576289 - DNA, 25 bp, Homo sapien
tcagtctaacagcagcggaggaatc

SEQ ID NO: 3576290 - DNA, 25 bp, Homo sapien
tttcatctttttatgagcctggctt

SEQ ID NO: 3576291 - DNA, 25 bp, Homo sapien
gctaccagatagctttctaataaaa

SEQ ID NO: 3576292 - DNA, 25 bp, Homo sapien
ctttcctgtccatttagtgagctac

SEQ ID NO: 3576293 - DNA, 25 bp, Homo sapien
taagggaaaccaagtgacagtgctg

SEQ ID NO: 3576294 - DNA, 25 bp, Homo sapien
gaagctcttgtactggccattgaaa

SEQ ID NO: 3576295 - DNA, 25 bp, Homo sapien
tagcctgtgagaatgtcctgactga

SEQ ID NO: 3576296 - DNA, 25 bp, Homo sapien
cagtggctagtacagaggtctcagt

SEQ ID NO: 3576297 - DNA, 25 bp, Homo sapien
aagaggttataacagcagactggta

SEQ ID NO: 3576298 - DNA, 25 bp, Homo sapien
cacagtcaaggtaggaattataggc

SEQ ID NO: 3576299 - DNA, 25 bp, Homo sapien
taacagcagactggtaaaacatggc

SEQ ID NO: 3576300 - DNA, 25 bp, Homo sapien
catagatctgctagcttacaaatga

SEQ ID NO: 3576301 - DNA, 25 bp, Homo sapien
tgtccaaaggtgtacacaagtatgt

SEQ ID NO: 3576302 - DNA, 25 bp, Homo sapien
tattgaatgcctagtcacgagtgcc

SEQ ID NO: 3576303 - DNA, 25 bp, Homo sapien
tgtgattccacgattaacgtgccgt

SEQ ID NO: 3576304 - DNA, 25 bp, Homo sapien
gaagtcctagttccattatcctgaa

SEQ ID NO: 3576305 - DNA, 25 bp, Homo sapien
ggtccagtatcacaattcatggtca

SEQ ID NO: 3576306 - DNA, 25 bp, Homo sapien
cacaatagcagtaacttggaagcta

SEQ ID NO: 3576307 - DNA, 25 bp, Homo sapien
catggtcagtataagaagcaatgtt

SEQ ID NO: 3576308 - DNA, 25 bp, Homo sapien
agctaactggaactttaaaaggctg

SEQ ID NO: 3576309 - DNA, 25 bp, Homo sapien
attttcatgatcagcgacaagggag

SEQ ID NO: 3576310 - DNA, 25 bp, Homo sapien
gattttcatgatcagcgacaaggga

SEQ ID NO: 3576311 - DNA, 25 bp, Homo sapien
atcctcaaactgtccagcaactgtt

SEQ ID NO: 3576312 - DNA, 25 bp, Homo sapien
ccagcaactgttggtgtggtatcca

SEQ ID NO: 3576313 - DNA, 25 bp, Homo sapien
ttggtgtggtatccacctccatccc

SEQ ID NO: 3576314 - DNA, 25 bp, Homo sapien
caactgttggtgtggtatccacctc

SEQ ID NO: 3576315 - DNA, 25 bp, Homo sapien
ggtctccagtctgccggcttaccat

SEQ ID NO: 3576316 - DNA, 25 bp, Homo sapien
gtctgccggcttaccatgcagattt

SEQ ID NO: 3576317 - DNA, 25 bp, Homo sapien
ccagtctgccggcttaccatgcaga

SEQ ID NO: 3576318 - DNA, 25 bp, Homo sapien
tctctctcttgctttggtgggtgtg

SEQ ID NO: 3576319 - DNA, 25 bp, Homo sapien
ccagccatattatactggctgctca

SEQ ID NO: 3576320 - DNA, 25 bp, Homo sapien
ccccagccatattatactggctgct

SEQ ID NO: 3576321 - DNA, 25 bp, Homo sapien
gaccccagccatattatactggctg

SEQ ID NO: 3576322 - DNA, 25 bp, Homo sapien
tgaccccagccatattatactggct

SEQ ID NO: 3576323 - DNA, 25 bp, Homo sapien
cgcacattgcagtgaacattgcctc

SEQ ID NO: 3576324 - DNA, 25 bp, Homo sapien
tgaatcctcatcctcaggatctgga

SEQ ID NO: 3576325 - DNA, 25 bp, Homo sapien
tggatgcaaggcctggcattcgcac

SEQ ID NO: 3576326 - DNA, 25 bp, Homo sapien
tccatcgtagtcatctgaatcctca

SEQ ID NO: 3576327 - DNA, 25 bp, Homo sapien
aattcagtaataggttcaacatcat

SEQ ID NO: 3576328 - DNA, 25 bp, Homo sapien
ctgatttatcactaggcacaaatct

SEQ ID NO: 3576329 - DNA, 25 bp, Homo sapien
cttcatcagcaacaggttcttttga

SEQ ID NO: 3576330 - DNA, 25 bp, Homo sapien
taaattcagtaataggttcaacatc

SEQ ID NO: 3576331 - DNA, 25 bp, Homo sapien
aattctgattatacagtgagcatcc

SEQ ID NO: 3576332 - DNA, 25 bp, Homo sapien
taatctcatcaacaatgagctaagg

SEQ ID NO: 3576333 - DNA, 25 bp, Homo sapien
tgagcatcctagaaaagccttgcct

SEQ ID NO: 3576334 - DNA, 25 bp, Homo sapien
gcgcctcaccgggaatgaattttta

SEQ ID NO: 3576335 - DNA, 25 bp, Homo sapien
ctgacaagagcaaggtttcgcattt

SEQ ID NO: 3576336 - DNA, 25 bp, Homo sapien
tgactgacaagagcaaggtttcgca

SEQ ID NO: 3576337 - DNA, 25 bp, Homo sapien
cccacctccaatggccgtcactatt

SEQ ID NO: 3576338 - DNA, 25 bp, Homo sapien
tcccacctccaatggccgtcactat

SEQ ID NO: 3576339 - DNA, 25 bp, Homo sapien
ggcattagattaaattacaccatac

SEQ ID NO: 3576340 - DNA, 25 bp, Homo sapien
aaggaggcattagattaaattacac

SEQ ID NO: 3576341 - DNA, 25 bp, Homo sapien
taatttgctatcaaaggaggcatta

SEQ ID NO: 3576342 - DNA, 25 bp, Homo sapien
gctatcaaaggaggcattagattaa

SEQ ID NO: 3576343 - DNA, 25 bp, Homo sapien
ccataacatacaaatgctctcctag

SEQ ID NO: 3576344 - DNA, 25 bp, Homo sapien
tcaccataacatacaaatgctctcc

SEQ ID NO: 3576345 - DNA, 25 bp, Homo sapien
cataacatacaaatgctctcctaga

SEQ ID NO: 3576346 - DNA, 25 bp, Homo sapien
caccataacatacaaatgctctcct

SEQ ID NO: 3576347 - DNA, 25 bp, Homo sapien
aagtaaatcctcatgtaagaccaca

SEQ ID NO: 3576348 - DNA, 25 bp, Homo sapien
taaatcctcatgtaagaccacaaag

SEQ ID NO: 3576349 - DNA, 25 bp, Homo sapien
tcatgtaagaccacaaagtatataa

SEQ ID NO: 3576350 - DNA, 25 bp, Homo sapien
tagaaagtaaatcctcatgtaagac

SEQ ID NO: 3576351 - DNA, 25 bp, Homo sapien
tgcaaaaatcaatacaggactgtcc

SEQ ID NO: 3576352 - DNA, 25 bp, Homo sapien
tgaaagaagcgtcaacatacagaaa

SEQ ID NO: 3576353 - DNA, 25 bp, Homo sapien
aatgcctgggaactaggaatgtatc

SEQ ID NO: 3576354 - DNA, 25 bp, Homo sapien
tcttccaccacttcaaagaaactgc

SEQ ID NO: 3576355 - DNA, 25 bp, Homo sapien
caaaacgggagtctggtccctctgc

SEQ ID NO: 3576356 - DNA, 25 bp, Homo sapien
gaaagacaggcacacttcagaccct

SEQ ID NO: 3576357 - DNA, 25 bp, Homo sapien
gcatatgacccctgtctgtgtcgag

SEQ ID NO: 3576358 - DNA, 25 bp, Homo sapien
tcggctctgaaactacgtatcccag

SEQ ID NO: 3576359 - DNA, 25 bp, Homo sapien
atgtaaagggtaccagtgccgaggc

SEQ ID NO: 3576360 - DNA, 25 bp, Homo sapien
ggcgggaaacttttgaggaagctca

SEQ ID NO: 3576361 - DNA, 25 bp, Homo sapien
ccgttcagcacagcctcagtgtctg

SEQ ID NO: 3576362 - DNA, 25 bp, Homo sapien
cgaggcccttcccgttcagcacagc

SEQ ID NO: 3576363 - DNA, 25 bp, Homo sapien
gcagcagagtgcggcaacacaggcc

SEQ ID NO: 3576364 - DNA, 25 bp, Homo sapien
agcaatgcgtgcaccacaccgcccg

SEQ ID NO: 3576365 - DNA, 25 bp, Homo sapien
gagcacagcaatgcgtgcaccacac

SEQ ID NO: 3576366 - DNA, 25 bp, Homo sapien
ttggagcacagcaatgcgtgcacca

SEQ ID NO: 3576367 - DNA, 25 bp, Homo sapien
gttggagcacagcaatgcgtgcacc

SEQ ID NO: 3576368 - DNA, 25 bp, Homo sapien
tacactgaagttaacccctgaagct

SEQ ID NO: 3576369 - DNA, 25 bp, Homo sapien
agtgtacacacaacctcatggcagg

SEQ ID NO: 3576370 - DNA, 25 bp, Homo sapien
tcatggcaggtttgggcaagctaca

SEQ ID NO: 3576371 - DNA, 25 bp, Homo sapien
cattatgtgacagagagcactccag

SEQ ID NO: 3576372 - DNA, 25 bp, Homo sapien
tgaggcatcaccttgaataacgggc

SEQ ID NO: 3576373 - DNA, 25 bp, Homo sapien
ggttttgagccatgaagttccccaa

SEQ ID NO: 3576374 - DNA, 25 bp, Homo sapien
aatagtggctttacccagctgcagg

SEQ ID NO: 3576375 - DNA, 25 bp, Homo sapien
tcatccagtggcaaaaagcacgagg

SEQ ID NO: 3576376 - DNA, 25 bp, Homo sapien
taagggcaatacctgttgaagaagg

SEQ ID NO: 3576377 - DNA, 25 bp, Homo sapien
tattaatgggcaggtactacagaac

SEQ ID NO: 3576378 - DNA, 25 bp, Homo sapien
aattaatgacgttccttgggccagc

SEQ ID NO: 3576379 - DNA, 25 bp, Homo sapien
gccagcagcagatatggtgtgtcca

SEQ ID NO: 3576380 - DNA, 25 bp, Homo sapien
tgtacaatgttatggctctgcctga

SEQ ID NO: 3576381 - DNA, 25 bp, Homo sapien
aatagaagtctaatggccaaaggcc

SEQ ID NO: 3576382 - DNA, 25 bp, Homo sapien
gatactaagggcaagaatagaccag

SEQ ID NO: 3576383 - DNA, 25 bp, Homo sapien
tccaggcagataggaaattccaaca

SEQ ID NO: 3576384 - DNA, 25 bp, Homo sapien
aggctgttactaaatgacttatgta

SEQ ID NO: 3576385 - DNA, 25 bp, Homo sapien
taaattgtctgtaaatcatcatcta

SEQ ID NO: 3576386 - DNA, 25 bp, Homo sapien
gatgttatctacaattctcaaactg

SEQ ID NO: 3576387 - DNA, 25 bp, Homo sapien
tattaagtgtggttatctccaatag

SEQ ID NO: 3576388 - DNA, 25 bp, Homo sapien
cagaactggtcacttcacagaaaga

SEQ ID NO: 3576389 - DNA, 25 bp, Homo sapien
aattaccaaggaccatgaacctgga

SEQ ID NO: 3576390 - DNA, 25 bp, Homo sapien
cttttaataactggcccgctggtgt

SEQ ID NO: 3576391 - DNA, 25 bp, Homo sapien
gttttgggccctcacagattcggaa

SEQ ID NO: 3576392 - DNA, 25 bp, Homo sapien
cattggaggctaggcttgcactggc

SEQ ID NO: 3576393 - DNA, 25 bp, Homo sapien
tcacgggcaggctgatttgcatctc

SEQ ID NO: 3576394 - DNA, 25 bp, Homo sapien
taagctatagtccaatgggctcccc

SEQ ID NO: 3576395 - DNA, 25 bp, Homo sapien
caatccggtgtagccgtttgcggga

SEQ ID NO: 3576396 - DNA, 25 bp, Homo sapien
actcatctgtgctttggcccaaatg

SEQ ID NO: 3576397 - DNA, 25 bp, Homo sapien
tcccaatgggtcttctagcttctgc

SEQ ID NO: 3576398 - DNA, 25 bp, Homo sapien
caacagtaaatcctttgggtctcac

SEQ ID NO: 3576399 - DNA, 25 bp, Homo sapien
caatgtcctactctgtgttatctaa

SEQ ID NO: 3576400 - DNA, 25 bp, Homo sapien
cgccttcgccgagtttctacaaaat

SEQ ID NO: 3576401 - DNA, 25 bp, Homo sapien
tctgggaaccgtcactttctgagtc

SEQ ID NO: 3576402 - DNA, 25 bp, Homo sapien
taccacgtcgcaaactcttctggga

SEQ ID NO: 3576403 - DNA, 25 bp, Homo sapien
gaaagtcttcgcttgtgtactcgcc

SEQ ID NO: 3576404 - DNA, 25 bp, Homo sapien
catcatcatcggaatattttttctt

SEQ ID NO: 3576405 - DNA, 25 bp, Homo sapien
tcatcatcatcggaatattttttct

SEQ ID NO: 3576406 - DNA, 25 bp, Homo sapien
tgctctgcctcattggccgagaggg

SEQ ID NO: 3576407 - DNA, 25 bp, Homo sapien
cactgtcatcattagatggcggatc

SEQ ID NO: 3576408 - DNA, 25 bp, Homo sapien
gggtgtcgcctcagtctacggctac

SEQ ID NO: 3576409 - DNA, 25 bp, Homo sapien
tacggctacaaaagtcagtgtcact

SEQ ID NO: 3576410 - DNA, 25 bp, Homo sapien
cggcgtttcttccttcgagcagcag

SEQ ID NO: 3576411 - DNA, 25 bp, Homo sapien
tgtccagatcatttaatcgccggcg

SEQ ID NO: 3576412 - DNA, 25 bp, Homo sapien
ggagatatcttttcctcggccaact

SEQ ID NO: 3576413 - DNA, 25 bp, Homo sapien
tagtagagatgtctttcccacgatg

SEQ ID NO: 3576414 - DNA, 25 bp, Homo sapien
cctccatcggcttctttgatgtcat

SEQ ID NO: 3576415 - DNA, 25 bp, Homo sapien
tccatcggcttctttgatgtcatct

SEQ ID NO: 3576416 - DNA, 25 bp, Homo sapien
tcctccatcggcttctttgatgtca

SEQ ID NO: 3576417 - DNA, 25 bp, Homo sapien
atcttcaatagcttcatcaattgct

SEQ ID NO: 3576418 - DNA, 25 bp, Homo sapien
gttgacctcctttcaagcaagtttg

SEQ ID NO: 3576419 - DNA, 25 bp, Homo sapien
tgacctcctttcaagcaagtttgct

SEQ ID NO: 3576420 - DNA, 25 bp, Homo sapien
cctttcaagcaagtttgctttggat

SEQ ID NO: 3576421 - DNA, 25 bp, Homo sapien
ttgttgacctcctttcaagcaagtt

SEQ ID NO: 3576422 - DNA, 25 bp, Homo sapien
ctgataccaacatacaccaagcgtt

SEQ ID NO: 3576423 - DNA, 25 bp, Homo sapien
taccaacatacaccaagcgttcttt

SEQ ID NO: 3576424 - DNA, 25 bp, Homo sapien
tttcaatactgataccaacatacac

SEQ ID NO: 3576425 - DNA, 25 bp, Homo sapien
tgatgttttcaatactgataccaac

SEQ ID NO: 3576426 - DNA, 25 bp, Homo sapien
cagcacatcaaaatagtcctagtaa

SEQ ID NO: 3576427 - DNA, 25 bp, Homo sapien
atggaaataacccaaggtttagctg

SEQ ID NO: 3576428 - DNA, 25 bp, Homo sapien
tccttagtggatgagcctattagct

SEQ ID NO: 3576429 - DNA, 25 bp, Homo sapien
ggataaacagatttgagcaagatgg

SEQ ID NO: 3576430 - DNA, 25 bp, Homo sapien
taaaactttattcacagacaataaa

SEQ ID NO: 3576431 - DNA, 25 bp, Homo sapien
ataaaactttattcacagacaataa

SEQ ID NO: 3576432 - DNA, 25 bp, Homo sapien
caataaaactttattcacagacaat

SEQ ID NO: 3576433 - DNA, 25 bp, Homo sapien
aataaaactttattcacagacaata

SEQ ID NO: 3576434 - DNA, 25 bp, Homo sapien
atacagtgagacaattctgctctca

SEQ ID NO: 3576435 - DNA, 25 bp, Homo sapien
cattcttagttagcaggcagtacaa

SEQ ID NO: 3576436 - DNA, 25 bp, Homo sapien
tccttgttttagatggatccattta

SEQ ID NO: 3576437 - DNA, 25 bp, Homo sapien
gacaattctgctctcatattcccaa

SEQ ID NO: 3576438 - DNA, 25 bp, Homo sapien
ctttaaggcaacatccaaatcctgc

SEQ ID NO: 3576439 - DNA, 25 bp, Homo sapien
tctttaaggcaacatccaaatcctg

SEQ ID NO: 3576440 - DNA, 25 bp, Homo sapien
aatcctgcaactgttcctctaattt

SEQ ID NO: 3576441 - DNA, 25 bp, Homo sapien
ggattctgtgcctatcctactggca

SEQ ID NO: 3576442 - DNA, 25 bp, Homo sapien
tgttaacttcatgggtagtgggctc

SEQ ID NO: 3576443 - DNA, 25 bp, Homo sapien
tctgagagctggtaagggaccacat

SEQ ID NO: 3576444 - DNA, 25 bp, Homo sapien
caccttttgaacagaagatgagcac

SEQ ID NO: 3576445 - DNA, 25 bp, Homo sapien
tatggtatccactatcgcaagagtc

SEQ ID NO: 3576446 - DNA, 25 bp, Homo sapien
ccactatcgcaagagtcacacagaa

SEQ ID NO: 3576447 - DNA, 25 bp, Homo sapien
tgatcatcagaggagggcgaaggca

SEQ ID NO: 3576448 - DNA, 25 bp, Homo sapien
cgaaggcaggcagtatggtatccac

SEQ ID NO: 3576449 - DNA, 25 bp, Homo sapien
aagaaacactcatggttctttttat

SEQ ID NO: 3576450 - DNA, 25 bp, Homo sapien
tatcatgtaaattcaaataaggaag

SEQ ID NO: 3576451 - DNA, 25 bp, Homo sapien
tgtaagaaacactcatggttctttt

SEQ ID NO: 3576452 - DNA, 25 bp, Homo sapien
aacactcatggttctttttatcatg

SEQ ID NO: 3576453 - DNA, 25 bp, Homo sapien
agatgcactgaagctatgccaatat

SEQ ID NO: 3576454 - DNA, 25 bp, Homo sapien
cctgtgtccttaggacttgcctgca

SEQ ID NO: 3576455 - DNA, 25 bp, Homo sapien
gggattctgcttgcaacgattgtta

SEQ ID NO: 3576456 - DNA, 25 bp, Homo sapien
tggcacaacaggatgtttcaggaac

SEQ ID NO: 3576457 - DNA, 25 bp, Homo sapien
cttctactctgcagtaaaggcaaag

SEQ ID NO: 3576458 - DNA, 25 bp, Homo sapien
gaggattatccttaagcacttggca

SEQ ID NO: 3576459 - DNA, 25 bp, Homo sapien
gctcaattaagacaaggaccatgcc

SEQ ID NO: 3576460 - DNA, 25 bp, Homo sapien
ctgcttggtattctgacttgaggat

SEQ ID NO: 3576461 - DNA, 25 bp, Homo sapien
aatacttagagggatcttctcagca

SEQ ID NO: 3576462 - DNA, 25 bp, Homo sapien
tcagaagtatgtggcgtgagtccca

SEQ ID NO: 3576463 - DNA, 25 bp, Homo sapien
gacttaacttgcatagccttgatga

SEQ ID NO: 3576464 - DNA, 25 bp, Homo sapien
tgtgctaggcaactttacatgagct

SEQ ID NO: 3576465 - DNA, 25 bp, Homo sapien
ccacattttttgcatggttcatcat

SEQ ID NO: 3576466 - DNA, 25 bp, Homo sapien
gctcaggatggtttggaaggccaca

SEQ ID NO: 3576467 - DNA, 25 bp, Homo sapien
catcatcatctgctaggatggcttc

SEQ ID NO: 3576468 - DNA, 25 bp, Homo sapien
atttccatctgccacgtgtccgaga

SEQ ID NO: 3576469 - DNA, 25 bp, Homo sapien
cagtgggtctagatattcttggaga

SEQ ID NO: 3576470 - DNA, 25 bp, Homo sapien
ctgtattttctgaggcagtggtttc

SEQ ID NO: 3576471 - DNA, 25 bp, Homo sapien
gcatagaaccctttgtctcagaagg

SEQ ID NO: 3576472 - DNA, 25 bp, Homo sapien
gagatcttcttaaagtacgacccac

SEQ ID NO: 3576473 - DNA, 25 bp, Homo sapien
ggccaccaacagtacttgtactctg

SEQ ID NO: 3576474 - DNA, 25 bp, Homo sapien
ctgactctagagtactctttggaac

SEQ ID NO: 3576475 - DNA, 25 bp, Homo sapien
tgtactctggcattctaccacttct

SEQ ID NO: 3576476 - DNA, 25 bp, Homo sapien
tctgaggctagtttctcacagtggt

SEQ ID NO: 3576477 - DNA, 25 bp, Homo sapien
ttcttctggtattggactcaatctt

SEQ ID NO: 3576478 - DNA, 25 bp, Homo sapien
acattctaggattggtgggcgctta

SEQ ID NO: 3576479 - DNA, 25 bp, Homo sapien
caatctttgtgcgtccttatcaaga

SEQ ID NO: 3576480 - DNA, 25 bp, Homo sapien
tggtgggcgcttatccttcttagtt

SEQ ID NO: 3576481 - DNA, 25 bp, Homo sapien
tcatggtacacgactcggtggaaga

SEQ ID NO: 3576482 - DNA, 25 bp, Homo sapien
tggtacacgactcggtggaagataa

SEQ ID NO: 3576483 - DNA, 25 bp, Homo sapien
gaagagagatcttttgccatctcag

SEQ ID NO: 3576484 - DNA, 25 bp, Homo sapien
tacacgactcggtggaagataaagc

SEQ ID NO: 3576485 - DNA, 25 bp, Homo sapien
ggatcgggttcctctatttgtgctt

SEQ ID NO: 3576486 - DNA, 25 bp, Homo sapien
atttgtgctttttgactatggatct

SEQ ID NO: 3576487 - DNA, 25 bp, Homo sapien
gacagaatttaaggactctgttcca

SEQ ID NO: 3576488 - DNA, 25 bp, Homo sapien
tctctaagactgatattgaactatc

SEQ ID NO: 3576489 - DNA, 25 bp, Homo sapien
tctagcttcactatgactggcagtt

SEQ ID NO: 3576490 - DNA, 25 bp, Homo sapien
gatttacacaaaggtcccttgactg

SEQ ID NO: 3576491 - DNA, 25 bp, Homo sapien
gactggactgtcaaaatcatcactc

SEQ ID NO: 3576492 - DNA, 25 bp, Homo sapien
tttcccttcatgacccaaagcagtg

SEQ ID NO: 3576493 - DNA, 25 bp, Homo sapien
aacggttttctaaatccataggctg

SEQ ID NO: 3576494 - DNA, 25 bp, Homo sapien
acattggctgtagaacggttttcta

SEQ ID NO: 3576495 - DNA, 25 bp, Homo sapien
gttttctaaatccataggctgctcc

SEQ ID NO: 3576496 - DNA, 25 bp, Homo sapien
taaatccataggctgctcctcactt

SEQ ID NO: 3576497 - DNA, 25 bp, Homo sapien
cccagaggcaatcactagtaatatt

SEQ ID NO: 3576498 - DNA, 25 bp, Homo sapien
taaggagcacctaatactagtgcag

SEQ ID NO: 3576499 - DNA, 25 bp, Homo sapien
actgttaaaagaactgagcacttca

SEQ ID NO: 3576500 - DNA, 25 bp, Homo sapien
cactaagttggtatcatgttgcctc

SEQ ID NO: 3576501 - DNA, 25 bp, Homo sapien
tcacgccaggctaatcccaaagtgc

SEQ ID NO: 3576502 - DNA, 25 bp, Homo sapien
tagcttaatacagtagaaggcaaaa

SEQ ID NO: 3576503 - DNA, 25 bp, Homo sapien
aatttagcagctaccccaagagagc

SEQ ID NO: 3576504 - DNA, 25 bp, Homo sapien
tataagcaagagtcatcacgccagg

SEQ ID NO: 3576505 - DNA, 25 bp, Homo sapien
tacttccacaaaagttacgttgtgc

SEQ ID NO: 3576506 - DNA, 25 bp, Homo sapien
tctgaccctgacacagttattctgt

SEQ ID NO: 3576507 - DNA, 25 bp, Homo sapien
tagaatacctcttaatttgggcttg

SEQ ID NO: 3576508 - DNA, 25 bp, Homo sapien
taatccctatgtgtctagggcaggg

SEQ ID NO: 3576509 - DNA, 25 bp, Homo sapien
tatctgaaagtcacattggctggac

SEQ ID NO: 3576510 - DNA, 25 bp, Homo sapien
tggacataaagtccctggctgacat

SEQ ID NO: 3576511 - DNA, 25 bp, Homo sapien
tatacaaaacactcacgggaaaaga

SEQ ID NO: 3576512 - DNA, 25 bp, Homo sapien
cactgatgtcaaaaagagtgaaggc

SEQ ID NO: 3576513 - DNA, 25 bp, Homo sapien
taagctgggactttcccgagaagag

SEQ ID NO: 3576514 - DNA, 25 bp, Homo sapien
ttgtgctttcaggagtgcaagagtc

SEQ ID NO: 3576515 - DNA, 25 bp, Homo sapien
gagtctcagccaactcgtttcgatt

SEQ ID NO: 3576516 - DNA, 25 bp, Homo sapien
gagtttttcaatagtacaggatcaa

SEQ ID NO: 3576517 - DNA, 25 bp, Homo sapien
tcatctgaaggaatggcacaaatca

SEQ ID NO: 3576518 - DNA, 25 bp, Homo sapien
catctgaaggaatggcacaaatcaa

SEQ ID NO: 3576519 - DNA, 25 bp, Homo sapien
agattcgagtgctcccatcttgtgc

SEQ ID NO: 3576520 - DNA, 25 bp, Homo sapien
gtgcaagttggtcacatggtcatcc

SEQ ID NO: 3576521 - DNA, 25 bp, Homo sapien
ttcgagtgctcccatcttgtgcaag

SEQ ID NO: 3576522 - DNA, 25 bp, Homo sapien
cgagtgctcccatcttgtgcaagtt

SEQ ID NO: 3576523 - DNA, 25 bp, Homo sapien
gccacatcatcacggtcaaagcagt

SEQ ID NO: 3576524 - DNA, 25 bp, Homo sapien
catcacggtcaaagcagtaagacat

SEQ ID NO: 3576525 - DNA, 25 bp, Homo sapien
catcatcacggtcaaagcagtaaga

SEQ ID NO: 3576526 - DNA, 25 bp, Homo sapien
cacatcatcacggtcaaagcagtaa

SEQ ID NO: 3576527 - DNA, 25 bp, Homo sapien
ggaggcacagagctctaggttgatc

SEQ ID NO: 3576528 - DNA, 25 bp, Homo sapien
gaggcacagagctctaggttgatct

SEQ ID NO: 3576529 - DNA, 25 bp, Homo sapien
aggcacagagctctaggttgatctg

SEQ ID NO: 3576530 - DNA, 25 bp, Homo sapien
ggcacagagctctaggttgatctgg

SEQ ID NO: 3576531 - DNA, 25 bp, Homo sapien
ggagaggtggcggcggtggcagtgg

SEQ ID NO: 3576532 - DNA, 25 bp, Homo sapien
cggcgactaaggagaggtggcggcg

SEQ ID NO: 3576533 - DNA, 25 bp, Homo sapien
ggcggcgactaaggagaggtggcgg

SEQ ID NO: 3576534 - DNA, 25 bp, Homo sapien
aaggagaggtggcggcggtggcagt

SEQ ID NO: 3576535 - DNA, 25 bp, Homo sapien
ccttggggcggtctgagggtgccgt

SEQ ID NO: 3576536 - DNA, 25 bp, Homo sapien
cggtctgagggtgccgtgaagaggt

SEQ ID NO: 3576537 - DNA, 25 bp, Homo sapien
gggcggtctgagggtgccgtgaaga

SEQ ID NO: 3576538 - DNA, 25 bp, Homo sapien
gccttggggcggtctgagggtgccg

SEQ ID NO: 3576539 - DNA, 25 bp, Homo sapien
aacttgcacgtttaattgaaaaatg

SEQ ID NO: 3576540 - DNA, 25 bp, Homo sapien
aaaaatgtgtgacaacatctatcag

SEQ ID NO: 3576541 - DNA, 25 bp, Homo sapien
cccggccatcacttgattttctaaa

SEQ ID NO: 3576542 - DNA, 25 bp, Homo sapien
gattactgcctcttacaaaactcca

SEQ ID NO: 3576543 - DNA, 25 bp, Homo sapien
ttacatcaccaattgtttagcatag

SEQ ID NO: 3576544 - DNA, 25 bp, Homo sapien
catcaccaattgtttagcatagtac

SEQ ID NO: 3576545 - DNA, 25 bp, Homo sapien
acatcaccaattgtttagcatagta

SEQ ID NO: 3576546 - DNA, 25 bp, Homo sapien
tacatcaccaattgtttagcatagt

SEQ ID NO: 3576547 - DNA, 25 bp, Homo sapien
cttgatctcctgaccgcataatctg

SEQ ID NO: 3576548 - DNA, 25 bp, Homo sapien
gtcttgatctcctgaccgcataatc

SEQ ID NO: 3576549 - DNA, 25 bp, Homo sapien
atggtcttgatctcctgaccgcata

SEQ ID NO: 3576550 - DNA, 25 bp, Homo sapien
tggtcttgatctcctgaccgcataa

SEQ ID NO: 3576551 - DNA, 25 bp, Homo sapien
ttttaaacaactatgactgatcaat

SEQ ID NO: 3576552 - DNA, 25 bp, Homo sapien
gactgatcaatagtaatcgttattt

SEQ ID NO: 3576553 - DNA, 25 bp, Homo sapien
ctatgactgatcaatagtaatcgtt

SEQ ID NO: 3576554 - DNA, 25 bp, Homo sapien
tagtaatcgttatttcactgtcata

SEQ ID NO: 3576555 - DNA, 25 bp, Homo sapien
ctcccatgagattaatcagtacaca

SEQ ID NO: 3576556 - DNA, 25 bp, Homo sapien
tgttcacctccgtttagcaaattaa

SEQ ID NO: 3576557 - DNA, 25 bp, Homo sapien
caactacgccaagttaatatgggaa

SEQ ID NO: 3576558 - DNA, 25 bp, Homo sapien
tgggaaataacagaaacagtggtat

SEQ ID NO: 3576559 - DNA, 25 bp, Homo sapien
gtgatcttgatccaattggtaccag

SEQ ID NO: 3576560 - DNA, 25 bp, Homo sapien
tcatcaaactgacactcacagaggt

SEQ ID NO: 3576561 - DNA, 25 bp, Homo sapien
tctttgtctcgaccaattggctgga

SEQ ID NO: 3576562 - DNA, 25 bp, Homo sapien
gcatagtatcggcatcctcctcatt

SEQ ID NO: 3576563 - DNA, 25 bp, Homo sapien
tagattttcattgatagctggctct

SEQ ID NO: 3576564 - DNA, 25 bp, Homo sapien
cccgggcagacaacacattaagtta

SEQ ID NO: 3576565 - DNA, 25 bp, Homo sapien
cagtagtcatggtataaaactttca

SEQ ID NO: 3576566 - DNA, 25 bp, Homo sapien
cacatactagattggaagaactaac

SEQ ID NO: 3576567 - DNA, 25 bp, Homo sapien
aagagtgctagtttgcattcaacac

SEQ ID NO: 3576568 - DNA, 25 bp, Homo sapien
taagagtgctagtttgcattcaaca

SEQ ID NO: 3576569 - DNA, 25 bp, Homo sapien
agagtgctagtttgcattcaacact

SEQ ID NO: 3576570 - DNA, 25 bp, Homo sapien
agtgctagtttgcattcaacactca

SEQ ID NO: 3576571 - DNA, 25 bp, Homo sapien
caggtactgttaaactcttggcata

SEQ ID NO: 3576572 - DNA, 25 bp, Homo sapien
catgcccaggtactgttaaactctt

SEQ ID NO: 3576573 - DNA, 25 bp, Homo sapien
ctcccatgcccaggtactgttaaac

SEQ ID NO: 3576574 - DNA, 25 bp, Homo sapien
gcccaggtactgttaaactcttggc

SEQ ID NO: 3576575 - DNA, 25 bp, Homo sapien
tgaatgctcacaggttgttactggg

SEQ ID NO: 3576576 - DNA, 25 bp, Homo sapien
catgttgccaagatggacaatggac

SEQ ID NO: 3576577 - DNA, 25 bp, Homo sapien
gtagagtacagggacacgatcacag

SEQ ID NO: 3576578 - DNA, 25 bp, Homo sapien
gacagtgttacgtttttcagagaga

SEQ ID NO: 3576579 - DNA, 25 bp, Homo sapien
cagagagacaatcaacaatgcagag

SEQ ID NO: 3576580 - DNA, 25 bp, Homo sapien
gactgctgatgggtaggcaatttct

SEQ ID NO: 3576581 - DNA, 25 bp, Homo sapien
gagtgctcggttgagtaccaagtcc

SEQ ID NO: 3576582 - DNA, 25 bp, Homo sapien
ccagctatgacctgaatgaagcact

SEQ ID NO: 3576583 - DNA, 25 bp, Homo sapien
tataacctactgttaccacaaaatg

SEQ ID NO: 3576584 - DNA, 25 bp, Homo sapien
gcaatttagacatactgctgtgcca

SEQ ID NO: 3576585 - DNA, 25 bp, Homo sapien
cactaattagctatgcacaaaacag

SEQ ID NO: 3576586 - DNA, 25 bp, Homo sapien
attcctgaccttgcgattcgcctgg

SEQ ID NO: 3576587 - DNA, 25 bp, Homo sapien
tcatatcccttgacaaagtttgaga

SEQ ID NO: 3576588 - DNA, 25 bp, Homo sapien
tgtgaagaagaacttaatagctgag

SEQ ID NO: 3576589 - DNA, 25 bp, Homo sapien
gaagtgaagagctgcatcttactca

SEQ ID NO: 3576590 - DNA, 25 bp, Homo sapien
ttaatagctgagctctgggaagtga

SEQ ID NO: 3576591 - DNA, 25 bp, Homo sapien
gcttattctaagattcgtatttgct

SEQ ID NO: 3576592 - DNA, 25 bp, Homo sapien
ttcaagtactgagccccccaaaata

SEQ ID NO: 3576593 - DNA, 25 bp, Homo sapien
tttctttgaaacacttactacattc

SEQ ID NO: 3576594 - DNA, 25 bp, Homo sapien
tccggagtagctgggcgcttgccac

SEQ ID NO: 3576595 - DNA, 25 bp, Homo sapien
aaattattctgaggctaaaagaaat

SEQ ID NO: 3576596 - DNA, 25 bp, Homo sapien
tcaagtgcgatttcttttaagggat

SEQ ID NO: 3576597 - DNA, 25 bp, Homo sapien
gaaatcaagtgcgatttcttttaag

SEQ ID NO: 3576598 - DNA, 25 bp, Homo sapien
attattctgaggctaaaagaaatca

SEQ ID NO: 3576599 - DNA, 25 bp, Homo sapien
gcaacaaggcctagcagatgccaga

SEQ ID NO: 3576600 - DNA, 25 bp, Homo sapien
tgtcaaagtaaaaagtcatccgcct

SEQ ID NO: 3576601 - DNA, 25 bp, Homo sapien
ccacaaggagaaagacgagagcact

SEQ ID NO: 3576602 - DNA, 25 bp, Homo sapien
catttgaatcaactagatggcccca

SEQ ID NO: 3576603 - DNA, 25 bp, Homo sapien
gcttcaaatggagctccaccaattc

SEQ ID NO: 3576604 - DNA, 25 bp, Homo sapien
tcagcttcaaatggagctccaccaa

SEQ ID NO: 3576605 - DNA, 25 bp, Homo sapien
tggagctccaccaattcttttggta

SEQ ID NO: 3576606 - DNA, 25 bp, Homo sapien
tcaaatggagctccaccaattcttt

SEQ ID NO: 3576607 - DNA, 25 bp, Homo sapien
ttaccttccatagcacttagttctg

SEQ ID NO: 3576608 - DNA, 25 bp, Homo sapien
gaaatgtaccattattgtgggagcc

SEQ ID NO: 3576609 - DNA, 25 bp, Homo sapien
tgtgggagccaacagtagagaagtt

SEQ ID NO: 3576610 - DNA, 25 bp, Homo sapien
ggaactctccgtacttgctgcttaa

SEQ ID NO: 3576611 - DNA, 25 bp, Homo sapien
taggacatgactataccttctcgca

SEQ ID NO: 3576612 - DNA, 25 bp, Homo sapien
ggatagtctcctgcaatcaaaccaa

SEQ ID NO: 3576613 - DNA, 25 bp, Homo sapien
gggacaatggttctggtcaagtcct

SEQ ID NO: 3576614 - DNA, 25 bp, Homo sapien
aaaaggctgtgttggctatctcatg

SEQ ID NO: 3576615 - DNA, 25 bp, Homo sapien
tgattcgaatcattttgccagttaa

SEQ ID NO: 3576616 - DNA, 25 bp, Homo sapien
aatcattttgccagttaatggtcca

SEQ ID NO: 3576617 - DNA, 25 bp, Homo sapien
gaaatccttgattcgaatcattttg

SEQ ID NO: 3576618 - DNA, 25 bp, Homo sapien
tgccagttaatggtccactaagcat

SEQ ID NO: 3576619 - DNA, 25 bp, Homo sapien
ttacctatgtgggctttattaaaga

SEQ ID NO: 3576620 - DNA, 25 bp, Homo sapien
cagactatttaaaatacattgtgca

SEQ ID NO: 3576621 - DNA, 25 bp, Homo sapien
cggccaatcactatttttaaagtat

SEQ ID NO: 3576622 - DNA, 25 bp, Homo sapien
tacttttcagactatttaaaataca

SEQ ID NO: 3576623 - DNA, 25 bp, Homo sapien
ctatttaaaatacattgtgcatttc

SEQ ID NO: 3576624 - DNA, 25 bp, Homo sapien
caaaagcaagtgttgttactcaaaa

SEQ ID NO: 3576625 - DNA, 25 bp, Homo sapien
gggcaaacactcgttcttggaggaa

SEQ ID NO: 3576626 - DNA, 25 bp, Homo sapien
tttaaatacaaaaagcagagtctgc

SEQ ID NO: 3576627 - DNA, 25 bp, Homo sapien
tagacaatgcctaacctacaaagcg

SEQ ID NO: 3576628 - DNA, 25 bp, Homo sapien
gtttcattcacaggacattctaggc

SEQ ID NO: 3576629 - DNA, 25 bp, Homo sapien
caagcaattgttgtgtggcagcctc

SEQ ID NO: 3576630 - DNA, 25 bp, Homo sapien
gagactactgttccactaagtttca

SEQ ID NO: 3576631 - DNA, 25 bp, Homo sapien
tgggactcagacaatcctccgaaag

SEQ ID NO: 3576632 - DNA, 25 bp, Homo sapien
aacttacttaattctgagcaaaaca

SEQ ID NO: 3576633 - DNA, 25 bp, Homo sapien
gagcaaaacatgaaagtagtctaat

SEQ ID NO: 3576634 - DNA, 25 bp, Homo sapien
tgatgaatgggatcaagtctgccat

SEQ ID NO: 3576635 - DNA, 25 bp, Homo sapien
tcaactcccggctcaaactgatgga

SEQ ID NO: 3576636 - DNA, 25 bp, Homo sapien
tcacttggagattctttgcctctgc

SEQ ID NO: 3576637 - DNA, 25 bp, Homo sapien
gcctctgctcctctgatgaagtcag

SEQ ID NO: 3576638 - DNA, 25 bp, Homo sapien
acttggagattctttgcctctgctc

SEQ ID NO: 3576639 - DNA, 25 bp, Homo sapien
tggagattctttgcctctgctcctc

SEQ ID NO: 3576640 - DNA, 25 bp, Homo sapien
ggattttatgttgcggctcgttaga

SEQ ID NO: 3576641 - DNA, 25 bp, Homo sapien
tttatgttgcggctcgttagagtga

SEQ ID NO: 3576642 - DNA, 25 bp, Homo sapien
cagggattttatgttgcggctcgtt

SEQ ID NO: 3576643 - DNA, 25 bp, Homo sapien
ttatgttgcggctcgttagagtgat

SEQ ID NO: 3576644 - DNA, 25 bp, Homo sapien
tcaatttcggtgaactgccacctcc

SEQ ID NO: 3576645 - DNA, 25 bp, Homo sapien
caatttcggtgaactgccacctcca

SEQ ID NO: 3576646 - DNA, 25 bp, Homo sapien
cagctccacgcgtgtttttccggta

SEQ ID NO: 3576647 - DNA, 25 bp, Homo sapien
ctccagctccacgcgtgtttttccg

SEQ ID NO: 3576648 - DNA, 25 bp, Homo sapien
agctgctgcacggcttcctgaccga

SEQ ID NO: 3576649 - DNA, 25 bp, Homo sapien
ggcgagagcgaacagtagtgagtaa

SEQ ID NO: 3576650 - DNA, 25 bp, Homo sapien
agcgaacagtagtgagtaaggagca

SEQ ID NO: 3576651 - DNA, 25 bp, Homo sapien
acagtagtgagtaaggagcaggagc

SEQ ID NO: 3576652 - DNA, 25 bp, Homo sapien
cgagagcgaacagtagtgagtaagg

SEQ ID NO: 3576653 - DNA, 25 bp, Homo sapien
gacttcctcaaagagcggccattta

SEQ ID NO: 3576654 - DNA, 25 bp, Homo sapien
gagataatggagaattaatacaatt

SEQ ID NO: 3576655 - DNA, 25 bp, Homo sapien
ctaccaccgcgacttcctcaaagag

SEQ ID NO: 3576656 - DNA, 25 bp, Homo sapien
aacacatccctaaactcaggataaa

SEQ ID NO: 3576657 - DNA, 25 bp, Homo sapien
taacaggctcatgttagccagacaa

SEQ ID NO: 3576658 - DNA, 25 bp, Homo sapien
agtaagccagtttgcattaacaggc

SEQ ID NO: 3576659 - DNA, 25 bp, Homo sapien
caactgtagactagaatgcacggac

SEQ ID NO: 3576660 - DNA, 25 bp, Homo sapien
gcttgcttaccttcttaccggtgag

SEQ ID NO: 3576661 - DNA, 25 bp, Homo sapien
cggaggcccgagccgcgaagaaccg

SEQ ID NO: 3576662 - DNA, 25 bp, Homo sapien
cagcccggcggagttgcgtcccagg

SEQ ID NO: 3576663 - DNA, 25 bp, Homo sapien
accagcccggcggagttgcgtccca

SEQ ID NO: 3576664 - DNA, 25 bp, Homo sapien
agaccagcccggcggagttgcgtcc

SEQ ID NO: 3576665 - DNA, 25 bp, Homo sapien
ttctccgttgccgacgtccggcggc

SEQ ID NO: 3576666 - DNA, 25 bp, Homo sapien
aagaaggagcagactacggcgaagt

SEQ ID NO: 3576667 - DNA, 25 bp, Homo sapien
cagcggcccgtagcgctccaagaag

SEQ ID NO: 3576668 - DNA, 25 bp, Homo sapien
agggaacggcaactcaggcaggtct

SEQ ID NO: 3576669 - DNA, 25 bp, Homo sapien
gccgagggatggcaaggcaacctta

SEQ ID NO: 3576670 - DNA, 25 bp, Homo sapien
ggcaaccttacagacgacaggaggc

SEQ ID NO: 3576671 - DNA, 25 bp, Homo sapien
acaggaggcgctctcaagtgggctc

SEQ ID NO: 3576672 - DNA, 25 bp, Homo sapien
gtgggctcctctgcggatcccagcg

SEQ ID NO: 3576673 - DNA, 25 bp, Homo sapien
gctgggacctcggtaagatgtctct

SEQ ID NO: 3576674 - DNA, 25 bp, Homo sapien
tgtctctgtggaagtttgccgacgg

SEQ ID NO: 3576675 - DNA, 25 bp, Homo sapien
cattgagaggcggaacatgacagga

SEQ ID NO: 3576676 - DNA, 25 bp, Homo sapien
tgttcagggaccagaatcggagtgt

SEQ ID NO: 3576677 - DNA, 25 bp, Homo sapien
gctaaaacaagctgcgcacggtggt

SEQ ID NO: 3576678 - DNA, 25 bp, Homo sapien
tatagaattcccaaacgggcaagtg

SEQ ID NO: 3576679 - DNA, 25 bp, Homo sapien
agaaattaaaatccgccgggcgctg

SEQ ID NO: 3576680 - DNA, 25 bp, Homo sapien
tgtaatcccatgtagttgccactgc

SEQ ID NO: 3576681 - DNA, 25 bp, Homo sapien
acccacttcggcctctcagaagtgc

SEQ ID NO: 3576682 - DNA, 25 bp, Homo sapien
ccacccacttcggcctctcagaagt

SEQ ID NO: 3576683 - DNA, 25 bp, Homo sapien
tccacccacttcggcctctcagaag

SEQ ID NO: 3576684 - DNA, 25 bp, Homo sapien
cacccacttcggcctctcagaagtg

SEQ ID NO: 3576685 - DNA, 25 bp, Homo sapien
tctttttcatttgcccacgggtgga

SEQ ID NO: 3576686 - DNA, 25 bp, Homo sapien
aatggcagtgccttagggtaacttc

SEQ ID NO: 3576687 - DNA, 25 bp, Homo sapien
gatgattgtgacacccagttaccaa

SEQ ID NO: 3576688 - DNA, 25 bp, Homo sapien
gcaagctcagctatgtatttcagag

SEQ ID NO: 3576689 - DNA, 25 bp, Homo sapien
tattataatgaggatctgtttcccc

SEQ ID NO: 3576690 - DNA, 25 bp, Homo sapien
cacagtgccagtaaagcaagaactc

SEQ ID NO: 3576691 - DNA, 25 bp, Homo sapien
tgagaatgagatgcttactcccttc

SEQ ID NO: 3576692 - DNA, 25 bp, Homo sapien
ggtcttcaagcagtatcctgaaata

SEQ ID NO: 3576693 - DNA, 25 bp, Homo sapien
gttaaacctacagaatagttatgtg

SEQ ID NO: 3576694 - DNA, 25 bp, Homo sapien
taaatcacagatacgacatttcagt

SEQ ID NO: 3576695 - DNA, 25 bp, Homo sapien
tacctaaatcctcaagttgttaaca

SEQ ID NO: 3576696 - DNA, 25 bp, Homo sapien
tcctaaggacatgaatattctcctc

SEQ ID NO: 3576697 - DNA, 25 bp, Homo sapien
gagctgttcctagctgttccttgtg

SEQ ID NO: 3576698 - DNA, 25 bp, Homo sapien
gatgagctgttcctagctgttcctt

SEQ ID NO: 3576699 - DNA, 25 bp, Homo sapien
gctgttcctagctgttccttgtgtt

SEQ ID NO: 3576700 - DNA, 25 bp, Homo sapien
ttgatgagctgttcctagctgttcc

SEQ ID NO: 3576701 - DNA, 25 bp, Homo sapien
tatcattttaacgagctctctttgc

SEQ ID NO: 3576702 - DNA, 25 bp, Homo sapien
tcattttaacgagctctctttgcta

SEQ ID NO: 3576703 - DNA, 25 bp, Homo sapien
ttatcattttaacgagctctctttg

SEQ ID NO: 3576704 - DNA, 25 bp, Homo sapien
cattttaacgagctctctttgctac

SEQ ID NO: 3576705 - DNA, 25 bp, Homo sapien
tgtgatatatacgaagtcttgcccc

SEQ ID NO: 3576706 - DNA, 25 bp, Homo sapien
cactgaggcataccccgcattttga

SEQ ID NO: 3576707 - DNA, 25 bp, Homo sapien
acaggttgcaagctcgtctctcaga

SEQ ID NO: 3576708 - DNA, 25 bp, Homo sapien
gggctgggtacattcctcactgagg

SEQ ID NO: 3576709 - DNA, 25 bp, Homo sapien
tatcagctatatgccccagaaaatg

SEQ ID NO: 3576710 - DNA, 25 bp, Homo sapien
cagaggcagcaagattatttaacag

SEQ ID NO: 3576711 - DNA, 25 bp, Homo sapien
tcggcctcaatagactgccagaggg

SEQ ID NO: 3576712 - DNA, 25 bp, Homo sapien
aaaacggagtgtctagcttatcagc

SEQ ID NO: 3576713 - DNA, 25 bp, Homo sapien
tgtctccagtctaatctccagagga

SEQ ID NO: 3576714 - DNA, 25 bp, Homo sapien
gcagcagcccagttcatcacttgag

SEQ ID NO: 3576715 - DNA, 25 bp, Homo sapien
cacttgagttccattgatccagcca

SEQ ID NO: 3576716 - DNA, 25 bp, Homo sapien
cactgtgagcctgcagtaaagcagc

SEQ ID NO: 3576717 - DNA, 25 bp, Homo sapien
ttaatgtacagtccagaggtttttg

SEQ ID NO: 3576718 - DNA, 25 bp, Homo sapien
aatgtacagtccagaggtttttgtt

SEQ ID NO: 3576719 - DNA, 25 bp, Homo sapien
taatgtacagtccagaggtttttgt

SEQ ID NO: 3576720 - DNA, 25 bp, Homo sapien
ggtgtagcaggctggcgcttaattt

SEQ ID NO: 3576721 - DNA, 25 bp, Homo sapien
tgggtgtagcaggctggcgcttaat

SEQ ID NO: 3576722 - DNA, 25 bp, Homo sapien
tagcaggctggcgcttaatttgaac

SEQ ID NO: 3576723 - DNA, 25 bp, Homo sapien
gtgtagcaggctggcgcttaatttg

SEQ ID NO: 3576724 - DNA, 25 bp, Homo sapien
taggtgttggtatgcacagcattcc

SEQ ID NO: 3576725 - DNA, 25 bp, Homo sapien
tgtacagactcttgtgattggccga

SEQ ID NO: 3576726 - DNA, 25 bp, Homo sapien
gcgttgggctctccagtctacctaa

SEQ ID NO: 3576727 - DNA, 25 bp, Homo sapien
tttgctgacccaggatagcagtggc

SEQ ID NO: 3576728 - DNA, 25 bp, Homo sapien
aaatgtgagctaccacgtctggcct

SEQ ID NO: 3576729 - DNA, 25 bp, Homo sapien
caaatgtgagctaccacgtctggcc

SEQ ID NO: 3576730 - DNA, 25 bp, Homo sapien
tacaaatgtgagctaccacgtctgg

SEQ ID NO: 3576731 - DNA, 25 bp, Homo sapien
attacaaatgtgagctaccacgtct

SEQ ID NO: 3576732 - DNA, 25 bp, Homo sapien
tacagcccgttcaattcttacacag

SEQ ID NO: 3576733 - DNA, 25 bp, Homo sapien
tgtattctgataccaagccaaaacc

SEQ ID NO: 3576734 - DNA, 25 bp, Homo sapien
gtcccttaggagacagacattatct

SEQ ID NO: 3576735 - DNA, 25 bp, Homo sapien
gccaaaacctgtcccttagtgcatg

SEQ ID NO: 3576736 - DNA, 25 bp, Homo sapien
ttctgacacctaagaagggccctct

SEQ ID NO: 3576737 - DNA, 25 bp, Homo sapien
gggtcacatactccttaagcctaca

SEQ ID NO: 3576738 - DNA, 25 bp, Homo sapien
tctaggccacggttgggaagactgt

SEQ ID NO: 3576739 - DNA, 25 bp, Homo sapien
accagatgagactgtaagggtcaca

SEQ ID NO: 3576740 - DNA, 25 bp, Homo sapien
gaagggaatggtgccctcgatgctg

SEQ ID NO: 3576741 - DNA, 25 bp, Homo sapien
tatataaacttttacaggcttgctg

SEQ ID NO: 3576742 - DNA, 25 bp, Homo sapien
tggtgccctcgatgctggtttccac

SEQ ID NO: 3576743 - DNA, 25 bp, Homo sapien
aacttttacaggcttgctgaaggga

SEQ ID NO: 3576744 - DNA, 25 bp, Homo sapien
ggcattttggaatgcgagcactgga

SEQ ID NO: 3576745 - DNA, 25 bp, Homo sapien
aatgcgagcactggagttgtaggcc

SEQ ID NO: 3576746 - DNA, 25 bp, Homo sapien
agcactggagttgtaggccagcagc

SEQ ID NO: 3576747 - DNA, 25 bp, Homo sapien
ccaggggcattttggaatgcgagca

SEQ ID NO: 3576748 - DNA, 25 bp, Homo sapien
tccaagcggtgtgggagagataaac

SEQ ID NO: 3576749 - DNA, 25 bp, Homo sapien
taaacctgagtgatgagccggtgcc

SEQ ID NO: 3576750 - DNA, 25 bp, Homo sapien
gccctgggccaggattccggaagtc

SEQ ID NO: 3576751 - DNA, 25 bp, Homo sapien
caggattccggaagtctgcaggctt

SEQ ID NO: 3576752 - DNA, 25 bp, Homo sapien
cccgcggcgggtgttgatgccatgt

SEQ ID NO: 3576753 - DNA, 25 bp, Homo sapien
ggcccgcggcgggtgttgatgccat

SEQ ID NO: 3576754 - DNA, 25 bp, Homo sapien
ttaataatcgcgaaggcccgcggcg

SEQ ID NO: 3576755 - DNA, 25 bp, Homo sapien
aagagttaataatcgcgaaggcccg

SEQ ID NO: 3576756 - DNA, 25 bp, Homo sapien
atggatgaacgagattcccactgtc

SEQ ID NO: 3576757 - DNA, 25 bp, Homo sapien
ctaattagtgacgcacatgaatgga

SEQ ID NO: 3576758 - DNA, 25 bp, Homo sapien
attagtgacgcacatgaatggatga

SEQ ID NO: 3576759 - DNA, 25 bp, Homo sapien
agtgacgcacatgaatggatgaacg

SEQ ID NO: 3576760 - DNA, 25 bp, Homo sapien
tatccagcgaaaccacagccaaggg

SEQ ID NO: 3576761 - DNA, 25 bp, Homo sapien
agcgaaaccacagccaagggaatgg

SEQ ID NO: 3576762 - DNA, 25 bp, Homo sapien
atccagcgaaaccacagccaaggga

SEQ ID NO: 3576763 - DNA, 25 bp, Homo sapien
ccagcgaaaccacagccaagggaat

SEQ ID NO: 3576764 - DNA, 25 bp, Homo sapien
aaagggttgtctgactcgcccgctg

SEQ ID NO: 3576765 - DNA, 25 bp, Homo sapien
aaaccgcaaagggttgtctgactcg

SEQ ID NO: 3576766 - DNA, 25 bp, Homo sapien
gggttgtctgactcgcccgctggct

SEQ ID NO: 3576767 - DNA, 25 bp, Homo sapien
atcaacatccagggcaaccaccaac

SEQ ID NO: 3576768 - DNA, 25 bp, Homo sapien
gcaggtttggatgtcatgagtcggg

SEQ ID NO: 3576769 - DNA, 25 bp, Homo sapien
cactctgtcgcagcatggtctgtag

SEQ ID NO: 3576770 - DNA, 25 bp, Homo sapien
caaagctgtcctgcaagtggggcaa

SEQ ID NO: 3576771 - DNA, 25 bp, Homo sapien
gtctgtagaattttgaccacttctg

SEQ ID NO: 3576772 - DNA, 25 bp, Homo sapien
tctgaaaaaagtctacttcctgtaa

SEQ ID NO: 3576773 - DNA, 25 bp, Homo sapien
acacatcccaaataaggggtcaagt

SEQ ID NO: 3576774 - DNA, 25 bp, Homo sapien
tgtaaaaatttttcacacatcccaa

SEQ ID NO: 3576775 - DNA, 25 bp, Homo sapien
ctctgaaaaaagtctacttcctgta

SEQ ID NO: 3576776 - DNA, 25 bp, Homo sapien
gccacatattttggccaaccccaca

SEQ ID NO: 3576777 - DNA, 25 bp, Homo sapien
tattttggccaaccccacatcttac

SEQ ID NO: 3576778 - DNA, 25 bp, Homo sapien
catattttggccaaccccacatctt

SEQ ID NO: 3576779 - DNA, 25 bp, Homo sapien
cacatattttggccaaccccacatc

SEQ ID NO: 3576780 - DNA, 25 bp, Homo sapien
gcctgcagcctcatgtgatgtataa

SEQ ID NO: 3576781 - DNA, 25 bp, Homo sapien
cagcctcatgtgatgtataatcacc

SEQ ID NO: 3576782 - DNA, 25 bp, Homo sapien
agttgcaaagctttggcctgcagcc

SEQ ID NO: 3576783 - DNA, 25 bp, Homo sapien
tataagttgcaaagctttggcctgc

SEQ ID NO: 3576784 - DNA, 25 bp, Homo sapien
ttattctccacaccactgtacatga

SEQ ID NO: 3576785 - DNA, 25 bp, Homo sapien
cttattctccacaccactgtacatg

SEQ ID NO: 3576786 - DNA, 25 bp, Homo sapien
gcttattctccacaccactgtacat

SEQ ID NO: 3576787 - DNA, 25 bp, Homo sapien
gctgctgaggccaaatcactctgct

SEQ ID NO: 3576788 - DNA, 25 bp, Homo sapien
ctgctgaggccaaatcactctgctt

SEQ ID NO: 3576789 - DNA, 25 bp, Homo sapien
tgctgctgaggccaaatcactctgc

SEQ ID NO: 3576790 - DNA, 25 bp, Homo sapien
ctgctgaggccaaatcactctgctt

SEQ ID NO: 3576791 - DNA, 25 bp, Homo sapien
gctgctgaggccaaatcactctgct

SEQ ID NO: 3576792 - DNA, 25 bp, Homo sapien
tgctgctgaggccaaatcactctgc

SEQ ID NO: 3576793 - DNA, 25 bp, Homo sapien
gaagataggtggcagagaaatcagc

SEQ ID NO: 3576794 - DNA, 25 bp, Homo sapien
gaagtagttgacagcgaagataggt

SEQ ID NO: 3576795 - DNA, 25 bp, Homo sapien
ttgatgagaagtagttgacagcgaa

SEQ ID NO: 3576796 - DNA, 25 bp, Homo sapien
ctactcctgccaattcagattgaag

SEQ ID NO: 3576797 - DNA, 25 bp, Homo sapien
gggattgcagacgcacaccagcaca

SEQ ID NO: 3576798 - DNA, 25 bp, Homo sapien
ggattgcagacgcacaccagcacac

SEQ ID NO: 3576799 - DNA, 25 bp, Homo sapien
gattgcagacgcacaccagcacacc

SEQ ID NO: 3576800 - DNA, 25 bp, Homo sapien
tttcagggccggcataacacatcag

SEQ ID NO: 3576801 - DNA, 25 bp, Homo sapien
cgtccactggactatgacacttcct

SEQ ID NO: 3576802 - DNA, 25 bp, Homo sapien
tacgatagttaacgatgcctcctgg

SEQ ID NO: 3576803 - DNA, 25 bp, Homo sapien
tcatgctcggcaggtaacgttacga

SEQ ID NO: 3576804 - DNA, 25 bp, Homo sapien
gagtgtacaacttttgggaagtgtc

SEQ ID NO: 3576805 - DNA, 25 bp, Homo sapien
tagagtgtacaacttttgggaagtg

SEQ ID NO: 3576806 - DNA, 25 bp, Homo sapien
agagtgtacaacttttgggaagtgt

SEQ ID NO: 3576807 - DNA, 25 bp, Homo sapien
attagagtgtacaacttttgggaag

SEQ ID NO: 3576808 - DNA, 25 bp, Homo sapien
ttaagcagaggctgcttgatgcaga

SEQ ID NO: 3576809 - DNA, 25 bp, Homo sapien
agaaagaatgagcctaggccgggca

SEQ ID NO: 3576810 - DNA, 25 bp, Homo sapien
gggcacagttagatctgaattgtta

SEQ ID NO: 3576811 - DNA, 25 bp, Homo sapien
ccttttccccacaggatggaataca

SEQ ID NO: 3576812 - DNA, 25 bp, Homo sapien
tgggagaaacagctgatgacaccag

SEQ ID NO: 3576813 - DNA, 25 bp, Homo sapien
cctgagggtccaagtgctgaagact

SEQ ID NO: 3576814 - DNA, 25 bp, Homo sapien
gaagactatacactctttcaaggct

SEQ ID NO: 3576815 - DNA, 25 bp, Homo sapien
ggtccaagtgctgaagactatacac

SEQ ID NO: 3576816 - DNA, 25 bp, Homo sapien
aagactgtctcggaggtaggcatag

SEQ ID NO: 3576817 - DNA, 25 bp, Homo sapien
actgtctcggaggtaggcatagtgc

SEQ ID NO: 3576818 - DNA, 25 bp, Homo sapien
gaaagactgtctcggaggtaggcat

SEQ ID NO: 3576819 - DNA, 25 bp, Homo sapien
agactgtctcggaggtaggcatagt

SEQ ID NO: 3576820 - DNA, 25 bp, Homo sapien
tggacaggttttagcagcattgaaa

SEQ ID NO: 3576821 - DNA, 25 bp, Homo sapien
tgttggacaggttttagcagcattg

SEQ ID NO: 3576822 - DNA, 25 bp, Homo sapien
tttagcagcattgaaaataagtacc

SEQ ID NO: 3576823 - DNA, 25 bp, Homo sapien
ttagcagcattgaaaataagtacca

SEQ ID NO: 3576824 - DNA, 25 bp, Homo sapien
ggatgccgacttcccagaaacttca

SEQ ID NO: 3576825 - DNA, 25 bp, Homo sapien
gctctggcaccaagggaagcaccag

SEQ ID NO: 3576826 - DNA, 25 bp, Homo sapien
accagggttggatgccgacttccca

SEQ ID NO: 3576827 - DNA, 25 bp, Homo sapien
aagcaccagggttggatgccgactt

SEQ ID NO: 3576828 - DNA, 25 bp, Homo sapien
gccactaggcccggcagatttttgc

SEQ ID NO: 3576829 - DNA, 25 bp, Homo sapien
ccactaggcccggcagatttttgca

SEQ ID NO: 3576830 - DNA, 25 bp, Homo sapien
cactaggcccggcagatttttgcat

SEQ ID NO: 3576831 - DNA, 25 bp, Homo sapien
actaggcccggcagatttttgcatt

SEQ ID NO: 3576832 - DNA, 25 bp, Homo sapien
tatttgctaggtggatagatgcaca

SEQ ID NO: 3576833 - DNA, 25 bp, Homo sapien
tctataaggacggaacaaatgtcag

SEQ ID NO: 3576834 - DNA, 25 bp, Homo sapien
aaattcagggccgtactatcctcaa

SEQ ID NO: 3576835 - DNA, 25 bp, Homo sapien
cacaagggttggtgcatagtcagca

SEQ ID NO: 3576836 - DNA, 25 bp, Homo sapien
ttatgggactcagtgagtaaatggg

SEQ ID NO: 3576837 - DNA, 25 bp, Homo sapien
cacattatgggactcagtgagtaaa

SEQ ID NO: 3576838 - DNA, 25 bp, Homo sapien
tatgggactcagtgagtaaatgggc

SEQ ID NO: 3576839 - DNA, 25 bp, Homo sapien
gggactcagtgagtaaatgggcaaa

SEQ ID NO: 3576840 - DNA, 25 bp, Homo sapien
ttcatgaagagcctctcgaatatct

SEQ ID NO: 3576841 - DNA, 25 bp, Homo sapien
tagtacagcataagagttcatgaag

SEQ ID NO: 3576842 - DNA, 25 bp, Homo sapien
tccatatggagtccctatcagtagg

SEQ ID NO: 3576843 - DNA, 25 bp, Homo sapien
tccaccaatgcaagatgaatccctt

SEQ ID NO: 3576844 - DNA, 25 bp, Homo sapien
gaaatcaaggcacttctcagcaaaa

SEQ ID NO: 3576845 - DNA, 25 bp, Homo sapien
tcttctcggagggtgatgttgttag

SEQ ID NO: 3576846 - DNA, 25 bp, Homo sapien
gccaggacagtgtcaagctgatctt

SEQ ID NO: 3576847 - DNA, 25 bp, Homo sapien
catcgttgaacatgtcaactaggaa

SEQ ID NO: 3576848 - DNA, 25 bp, Homo sapien
tcgcacaggtctccggcacaaattt

SEQ ID NO: 3576849 - DNA, 25 bp, Homo sapien
ggcacttttaagacctcgcacaggt

SEQ ID NO: 3576850 - DNA, 25 bp, Homo sapien
gaagaggctggagtcaatcatctca

SEQ ID NO: 3576851 - DNA, 25 bp, Homo sapien
gaagtagttctatcctgaggtatga

SEQ ID NO: 3576852 - DNA, 25 bp, Homo sapien
tccacaagctcctgactcaatcaag

SEQ ID NO: 3576853 - DNA, 25 bp, Homo sapien
cacgctcatgtgcagtacgtttcct

SEQ ID NO: 3576854 - DNA, 25 bp, Homo sapien
tcaatcaagttcacagccccggtat

SEQ ID NO: 3576855 - DNA, 25 bp, Homo sapien
tgtaaagttccttggcacgctcatg

SEQ ID NO: 3576856 - DNA, 25 bp, Homo sapien
tcttgtcaagggtctgctccaagaa

SEQ ID NO: 3576857 - DNA, 25 bp, Homo sapien
ttgtcaagggtctgctccaagaaat

SEQ ID NO: 3576858 - DNA, 25 bp, Homo sapien
cttgtcaagggtctgctccaagaaa

SEQ ID NO: 3576859 - DNA, 25 bp, Homo sapien
catcatcaactaagcgtatttcttc

SEQ ID NO: 3576860 - DNA, 25 bp, Homo sapien
tcaactaagcgtatttcttcattag

SEQ ID NO: 3576861 - DNA, 25 bp, Homo sapien
cgcatcatcaactaagcgtatttct

SEQ ID NO: 3576862 - DNA, 25 bp, Homo sapien
ccaaacgcatcatcaactaagcgta

SEQ ID NO: 3576863 - DNA, 25 bp, Homo sapien
ctgcgcacttgttcatagtcatcag

SEQ ID NO: 3576864 - DNA, 25 bp, Homo sapien
tgcagcactgcgcacttgttcatag

SEQ ID NO: 3576865 - DNA, 25 bp, Homo sapien
tagtcatcagagagtaatttacagg

SEQ ID NO: 3576866 - DNA, 25 bp, Homo sapien
agtcatcagagagtaatttacaggc

SEQ ID NO: 3576867 - DNA, 25 bp, Homo sapien
tggtgtaatttcagtcctctttcat

SEQ ID NO: 3576868 - DNA, 25 bp, Homo sapien
ctgattataaattgtttggtgtaat

SEQ ID NO: 3576869 - DNA, 25 bp, Homo sapien
gtgtaatttcagtcctctttcatgg

SEQ ID NO: 3576870 - DNA, 25 bp, Homo sapien
taatttcagtcctctttcatggagc

SEQ ID NO: 3576871 - DNA, 25 bp, Homo sapien
taaatacacatgaaagctaccagag

SEQ ID NO: 3576872 - DNA, 25 bp, Homo sapien
aatacacatgaaagctaccagagaa

SEQ ID NO: 3576873 - DNA, 25 bp, Homo sapien
tacacatgaaagctaccagagaaag

SEQ ID NO: 3576874 - DNA, 25 bp, Homo sapien
catgaaagctaccagagaaagccaa

SEQ ID NO: 3576875 - DNA, 25 bp, Homo sapien
tacaccatgagacgtatctgtcaga

SEQ ID NO: 3576876 - DNA, 25 bp, Homo sapien
gccaagtaactgcaggcacttattt

SEQ ID NO: 3576877 - DNA, 25 bp, Homo sapien
cttggtcactgaagtaatcccctat

SEQ ID NO: 3576878 - DNA, 25 bp, Homo sapien
gctgctgttctgacacgtgggtctt

SEQ ID NO: 3576879 - DNA, 25 bp, Homo sapien
gaacaagtcaaacgtcatctgtgcc

SEQ ID NO: 3576880 - DNA, 25 bp, Homo sapien
gtcatgcatcaattaccaacaagga

SEQ ID NO: 3576881 - DNA, 25 bp, Homo sapien
taactctataatcaaaacctggcag

SEQ ID NO: 3576882 - DNA, 25 bp, Homo sapien
gcagcccttacagaggtatatcccg

SEQ ID NO: 3576883 - DNA, 25 bp, Homo sapien
cacccagcctatgatttttcataat

SEQ ID NO: 3576884 - DNA, 25 bp, Homo sapien
gcacccagcctatgatttttcataa

SEQ ID NO: 3576885 - DNA, 25 bp, Homo sapien
cataatattaacttataatcctttt

SEQ ID NO: 3576886 - DNA, 25 bp, Homo sapien
ttttcataatattaacttataatcc

SEQ ID NO: 3576887 - DNA, 25 bp, Homo sapien
gaatacaaagcaccataacaagcag

SEQ ID NO: 3576888 - DNA, 25 bp, Homo sapien
cattaatggtccttagcagtcctca

SEQ ID NO: 3576889 - DNA, 25 bp, Homo sapien
aaatcaattctacagggttctaggg

SEQ ID NO: 3576890 - DNA, 25 bp, Homo sapien
tacttgaaggattgtgaggaccaaa

SEQ ID NO: 3576891 - DNA, 25 bp, Homo sapien
gccaattgcaagcaaagtatccagc

SEQ ID NO: 3576892 - DNA, 25 bp, Homo sapien
gcaggccacatcaactaatcgcatt

SEQ ID NO: 3576893 - DNA, 25 bp, Homo sapien
taatcgcatttggatagcttgattc

SEQ ID NO: 3576894 - DNA, 25 bp, Homo sapien
tgattctctggtagcttagtgccaa

SEQ ID NO: 3576895 - DNA, 25 bp, Homo sapien
tcattctgcaggatgttgatggcat

SEQ ID NO: 3576896 - DNA, 25 bp, Homo sapien
ttcattctgcaggatgttgatggca

SEQ ID NO: 3576897 - DNA, 25 bp, Homo sapien
tttcattctgcaggatgttgatggc

SEQ ID NO: 3576898 - DNA, 25 bp, Homo sapien
gtctttgataataaacccaacaatg

SEQ ID NO: 3576899 - DNA, 25 bp, Homo sapien
catccataatgcagtctggtgaaaa

SEQ ID NO: 3576900 - DNA, 25 bp, Homo sapien
aacccaacaatgatgcaattttcag

SEQ ID NO: 3576901 - DNA, 25 bp, Homo sapien
tgcagtctggtgaaaatcctgctgt

SEQ ID NO: 3576902 - DNA, 25 bp, Homo sapien
ggtgctgtcaccaggattaaataaa

SEQ ID NO: 3576903 - DNA, 25 bp, Homo sapien
tcactgagagatcgaaaacttcttg

SEQ ID NO: 3576904 - DNA, 25 bp, Homo sapien
gctctaagcttagttccatatctgg

SEQ ID NO: 3576905 - DNA, 25 bp, Homo sapien
tgattttggtcagatgtggtagctc

SEQ ID NO: 3576906 - DNA, 25 bp, Homo sapien
caatcctttgggagggccaagcagg

SEQ ID NO: 3576907 - DNA, 25 bp, Homo sapien
ggagggccaagcaggagggttgctt

SEQ ID NO: 3576908 - DNA, 25 bp, Homo sapien
tgggagggccaagcaggagggttgc

SEQ ID NO: 3576909 - DNA, 25 bp, Homo sapien
atcccaatcctttgggagggccaag

SEQ ID NO: 3576910 - DNA, 25 bp, Homo sapien
gggaggtagctttacacagatctat

SEQ ID NO: 3576911 - DNA, 25 bp, Homo sapien
gagaatcctgactactccctctacg

SEQ ID NO: 3576912 - DNA, 25 bp, Homo sapien
acagatctatgtggagtgctgcaga

SEQ ID NO: 3576913 - DNA, 25 bp, Homo sapien
gtaataatgttccaagagaatcctg

SEQ ID NO: 3576914 - DNA, 25 bp, Homo sapien
gaaccactttcgtgaattcctcata

SEQ ID NO: 3576915 - DNA, 25 bp, Homo sapien
ctgaaccactttcgtgaattcctca

SEQ ID NO: 3576916 - DNA, 25 bp, Homo sapien
cataaacccgcttcttaaggtgcgc

SEQ ID NO: 3576917 - DNA, 25 bp, Homo sapien
gaattcctcataaacccgcttctta

SEQ ID NO: 3576918 - DNA, 25 bp, Homo sapien
gatccggaaaacttgcgtaggcgcg

SEQ ID NO: 3576919 - DNA, 25 bp, Homo sapien
tggacggatccggaaaacttgcgta

SEQ ID NO: 3576920 - DNA, 25 bp, Homo sapien
ctctcagcttccgtacactaggagg

SEQ ID NO: 3576921 - DNA, 25 bp, Homo sapien
agcttccgtacactaggagggaggc

SEQ ID NO: 3576922 - DNA, 25 bp, Homo sapien
cgtgcaagtggtttattgatggagt

SEQ ID NO: 3576923 - DNA, 25 bp, Homo sapien
tcgtgcaagtggtttattgatggag

SEQ ID NO: 3576924 - DNA, 25 bp, Homo sapien
ctcgtgcaagtggtttattgatgga

SEQ ID NO: 3576925 - DNA, 25 bp, Homo sapien
cacttggagggtttggtaaatcaga

SEQ ID NO: 3576926 - DNA, 25 bp, Homo sapien
gaagcagcgtaggacagaggaaaaa

SEQ ID NO: 3576927 - DNA, 25 bp, Homo sapien
taaatcagaatgctgtgccaacccc

SEQ ID NO: 3576928 - DNA, 25 bp, Homo sapien
gaagttccttgatgtaagaggtcag

SEQ ID NO: 3576929 - DNA, 25 bp, Homo sapien
cactttgaaaacctccactctagag

SEQ ID NO: 3576930 - DNA, 25 bp, Homo sapien
tgaaaaggaagtagctgcaagttgc

SEQ ID NO: 3576931 - DNA, 25 bp, Homo sapien
taagccacgccagaattcataacag

SEQ ID NO: 3576932 - DNA, 25 bp, Homo sapien
tggcaagactctagaccaaccctgg

SEQ ID NO: 3576933 - DNA, 25 bp, Homo sapien
tacatgaaggcacatgccagggaca

SEQ ID NO: 3576934 - DNA, 25 bp, Homo sapien
gtacgtcaggtagaacttggagaat

SEQ ID NO: 3576935 - DNA, 25 bp, Homo sapien
tggggtacgtcaggtagaacttgga

SEQ ID NO: 3576936 - DNA, 25 bp, Homo sapien
acgtcaggtagaacttggagaatac

SEQ ID NO: 3576937 - DNA, 25 bp, Homo sapien
ccaccaggtgaaggtgaatgaataa

SEQ ID NO: 3576938 - DNA, 25 bp, Homo sapien
tgttgtctaggaccgccttccaggg

SEQ ID NO: 3576939 - DNA, 25 bp, Homo sapien
tgagcctcacggtacacttcaggga

SEQ ID NO: 3576940 - DNA, 25 bp, Homo sapien
tctgccagctttgagcccggaaact

SEQ ID NO: 3576941 - DNA, 25 bp, Homo sapien
tgttatggcttctgcacgtgccagg

SEQ ID NO: 3576942 - DNA, 25 bp, Homo sapien
gcccactggccgctccactgcgcag

SEQ ID NO: 3576943 - DNA, 25 bp, Homo sapien
gtctggctcgtcatcctgcccactg

SEQ ID NO: 3576944 - DNA, 25 bp, Homo sapien
ctgcccactggccgctccactgcgc

SEQ ID NO: 3576945 - DNA, 25 bp, Homo sapien
agaggggtctggctcgtcatcctgc

SEQ ID NO: 3576946 - DNA, 25 bp, Homo sapien
ggaccacgtgcaaacaattattgtt

SEQ ID NO: 3576947 - DNA, 25 bp, Homo sapien
ttctggtgcccaggaccacgtgcaa

SEQ ID NO: 3576948 - DNA, 25 bp, Homo sapien
caattattgtttaccaactgtccac

SEQ ID NO: 3576949 - DNA, 25 bp, Homo sapien
tttaccaactgtccactgtcactca

SEQ ID NO: 3576950 - DNA, 25 bp, Homo sapien
ccacagcaaacacagcaggggtgtc

SEQ ID NO: 3576951 - DNA, 25 bp, Homo sapien
aatgggtggtggcagcagaactccc

SEQ ID NO: 3576952 - DNA, 25 bp, Homo sapien
caaacacagcaggggtgtcagagag

SEQ ID NO: 3576953 - DNA, 25 bp, Homo sapien
ctaatgggtggtggcagcagaactc

SEQ ID NO: 3576954 - DNA, 25 bp, Homo sapien
ggtaggggcactggagtttatgatg

SEQ ID NO: 3576955 - DNA, 25 bp, Homo sapien
gtaggggcactggagtttatgatgt

SEQ ID NO: 3576956 - DNA, 25 bp, Homo sapien
ttgacattggacttggagctttaca

SEQ ID NO: 3576957 - DNA, 25 bp, Homo sapien
tcttaccagtcaagtgttcctagag

SEQ ID NO: 3576958 - DNA, 25 bp, Homo sapien
ctgtgccattttgcctcgtaggtgt

SEQ ID NO: 3576959 - DNA, 25 bp, Homo sapien
tatttccttggtgtgggctgtccac

SEQ ID NO: 3576960 - DNA, 25 bp, Homo sapien
tgaatataaagtactcatgtacgct

SEQ ID NO: 3576961 - DNA, 25 bp, Homo sapien
catgtagccattactaagcttggga

SEQ ID NO: 3576962 - DNA, 25 bp, Homo sapien
gctgtggcaatgatcacggctaact

SEQ ID NO: 3576963 - DNA, 25 bp, Homo sapien
gagacagcgcattgctctgtagccc

SEQ ID NO: 3576964 - DNA, 25 bp, Homo sapien
ggatcttgacgcatgtctcctcctt

SEQ ID NO: 3576965 - DNA, 25 bp, Homo sapien
gaagaatggcgttcactggctgagt

SEQ ID NO: 3576966 - DNA, 25 bp, Homo sapien
aggccgggaagaatggcgttcactg

SEQ ID NO: 3576967 - DNA, 25 bp, Homo sapien
gctgagttttgtggatgaactcgtg

SEQ ID NO: 3576968 - DNA, 25 bp, Homo sapien
gtgggtcctcaaacacttcctggac

SEQ ID NO: 3576969 - DNA, 25 bp, Homo sapien
ggagtgggtcctcaaacacttcctg

SEQ ID NO: 3576970 - DNA, 25 bp, Homo sapien
agcggggagtgggtcctcaaacact

SEQ ID NO: 3576971 - DNA, 25 bp, Homo sapien
tgcagagcggggagtgggtcctcaa

SEQ ID NO: 3576972 - DNA, 25 bp, Homo sapien
cattcaggtcttagcacagctgttt

SEQ ID NO: 3576973 - DNA, 25 bp, Homo sapien
gagaacattcaggtcttagcacagc

SEQ ID NO: 3576974 - DNA, 25 bp, Homo sapien
ctgagaacattcaggtcttagcaca

SEQ ID NO: 3576975 - DNA, 25 bp, Homo sapien
gaacattcaggtcttagcacagctg

SEQ ID NO: 3576976 - DNA, 25 bp, Homo sapien
ccacagatcccttcacatgatagaa

SEQ ID NO: 3576977 - DNA, 25 bp, Homo sapien
ctccacagatcccttcacatgatag

SEQ ID NO: 3576978 - DNA, 25 bp, Homo sapien
tcactccacagatcccttcacatga

SEQ ID NO: 3576979 - DNA, 25 bp, Homo sapien
actctttgatgaggtcggcggagca

SEQ ID NO: 3576980 - DNA, 25 bp, Homo sapien
tattgcagaactaataaaaaatcca

SEQ ID NO: 3576981 - DNA, 25 bp, Homo sapien
taattgcatcctcgaattccagggc

SEQ ID NO: 3576982 - DNA, 25 bp, Homo sapien
tagacagtattagctcctgagtcca

SEQ ID NO: 3576983 - DNA, 25 bp, Homo sapien
gcatcgggccaggacaagcatttga

SEQ ID NO: 3576984 - DNA, 25 bp, Homo sapien
taattgcaccaagctccactgtaga

SEQ ID NO: 3576985 - DNA, 25 bp, Homo sapien
ggaaactgaccattctctgatgatg

SEQ ID NO: 3576986 - DNA, 25 bp, Homo sapien
ctctgatgatgaactatttttctta

SEQ ID NO: 3576987 - DNA, 25 bp, Homo sapien
ccagatttgggtagtctgctaactc

SEQ ID NO: 3576988 - DNA, 25 bp, Homo sapien
tctaaactagaattcaacctcatct

SEQ ID NO: 3576989 - DNA, 25 bp, Homo sapien
caaggtgtcaacatacagattagca

SEQ ID NO: 3576990 - DNA, 25 bp, Homo sapien
ttacaaggtgtcaacatacagatta

SEQ ID NO: 3576991 - DNA, 25 bp, Homo sapien
gtgtcaacatacagattagcataag

SEQ ID NO: 3576992 - DNA, 25 bp, Homo sapien
ggtgtcaacatacagattagcataa

SEQ ID NO: 3576993 - DNA, 25 bp, Homo sapien
cagcaggtatcagtgaaactggagc

SEQ ID NO: 3576994 - DNA, 25 bp, Homo sapien
cttcaactgtcataagaaacatgtt

SEQ ID NO: 3576995 - DNA, 25 bp, Homo sapien
acagcaggtatcagtgaaactggag

SEQ ID NO: 3576996 - DNA, 25 bp, Homo sapien
gaaacatgttccatcaaattcagaa

SEQ ID NO: 3576997 - DNA, 25 bp, Homo sapien
atttttcaaaaatttcaccatatgt

SEQ ID NO: 3576998 - DNA, 25 bp, Homo sapien
aaaatttcaccatatgttttcttat

SEQ ID NO: 3576999 - DNA, 25 bp, Homo sapien
tggatggaatttttcaaaaatttca

SEQ ID NO: 3577000 - DNA, 25 bp, Homo sapien
ttcaaaaatttcaccatatgttttc

SEQ ID NO: 3577001 - DNA, 25 bp, Homo sapien
caccctgagggaatgcctgactgta

SEQ ID NO: 3577002 - DNA, 25 bp, Homo sapien
aaagacgaagctacaatccatgaag

SEQ ID NO: 3577003 - DNA, 25 bp, Homo sapien
tatgtgtaggctctatacaagaggc

SEQ ID NO: 3577004 - DNA, 25 bp, Homo sapien
taaggctatgtgtgccaaacccctg

SEQ ID NO: 3577005 - DNA, 25 bp, Homo sapien
tttcacggtccctcacagcatacag

SEQ ID NO: 3577006 - DNA, 25 bp, Homo sapien
tcacggtccctcacagcatacaggt

SEQ ID NO: 3577007 - DNA, 25 bp, Homo sapien
tcaggaaaatcctctggatgtaatt

SEQ ID NO: 3577008 - DNA, 25 bp, Homo sapien
ttcttcaggaaaatcctctggatgt

SEQ ID NO: 3577009 - DNA, 25 bp, Homo sapien
aaaaggccgtaatatatagaagctg

SEQ ID NO: 3577010 - DNA, 25 bp, Homo sapien
ggccgtaatatatagaagctggcga

SEQ ID NO: 3577011 - DNA, 25 bp, Homo sapien
cgtaatatatagaagctggcgatgc

SEQ ID NO: 3577012 - DNA, 25 bp, Homo sapien
atatatagaagctggcgatgcaaac

SEQ ID NO: 3577013 - DNA, 25 bp, Homo sapien
ctggaaatgtgggatttgatgggtt

SEQ ID NO: 3577014 - DNA, 25 bp, Homo sapien
gatttgatgggttgggagctgacct

SEQ ID NO: 3577015 - DNA, 25 bp, Homo sapien
caatactatttgagcactggaaatg

SEQ ID NO: 3577016 - DNA, 25 bp, Homo sapien
ggagataggacttcaatactatttg

SEQ ID NO: 3577017 - DNA, 25 bp, Homo sapien
tggctccaatcaacgcctcacattg

SEQ ID NO: 3577018 - DNA, 25 bp, Homo sapien
catgctctgctaaaatctcccttgc

SEQ ID NO: 3577019 - DNA, 25 bp, Homo sapien
taattgcctgaaccattgcctgagc

SEQ ID NO: 3577020 - DNA, 25 bp, Homo sapien
caaaagaggtacaagtgtggtgact

SEQ ID NO: 3577021 - DNA, 25 bp, Homo sapien
agccccacgggcctagaaagctgtc

SEQ ID NO: 3577022 - DNA, 25 bp, Homo sapien
ggaaatccatagagcttagcaaagc

SEQ ID NO: 3577023 - DNA, 25 bp, Homo sapien
tcagtgtctctgataggaagccagt

SEQ ID NO: 3577024 - DNA, 25 bp, Homo sapien
gaaagctgtctgtctctcagtcctg

SEQ ID NO: 3577025 - DNA, 25 bp, Homo sapien
gctctgcttgattctaaagagctaa

SEQ ID NO: 3577026 - DNA, 25 bp, Homo sapien
tgcttgattctaaagagctaatggg

SEQ ID NO: 3577027 - DNA, 25 bp, Homo sapien
ggccagctaggcaaaaaggcacgga

SEQ ID NO: 3577028 - DNA, 25 bp, Homo sapien
aaaggcacggaaaagcagagcacct

SEQ ID NO: 3577029 - DNA, 25 bp, Homo sapien
gtcgcgatcggcctccgccggatta

SEQ ID NO: 3577030 - DNA, 25 bp, Homo sapien
ggcctcatccggcagaaaccgtaag

SEQ ID NO: 3577031 - DNA, 25 bp, Homo sapien
caagaagccgatgtagaggagccgc

SEQ ID NO: 3577032 - DNA, 25 bp, Homo sapien
taggttatcaatcaggccggagcag

SEQ ID NO: 3577033 - DNA, 25 bp, Homo sapien
ggtctcagaccacgaactacaagga

SEQ ID NO: 3577034 - DNA, 25 bp, Homo sapien
taagtttcactttgctcgtccgccc

SEQ ID NO: 3577035 - DNA, 25 bp, Homo sapien
ccaaactgggcgaagactaggagat

SEQ ID NO: 3577036 - DNA, 25 bp, Homo sapien
gcacgcgaagttccgggctactaag

SEQ ID NO: 3577037 - DNA, 25 bp, Homo sapien
ggtcctggtcatgcctcctgtaatc

SEQ ID NO: 3577038 - DNA, 25 bp, Homo sapien
ttatctggtcctggtcatgcctcct

SEQ ID NO: 3577039 - DNA, 25 bp, Homo sapien
attatctggtcctggtcatgcctcc

SEQ ID NO: 3577040 - DNA, 25 bp, Homo sapien
tctggtcctggtcatgcctcctgta

SEQ ID NO: 3577041 - DNA, 25 bp, Homo sapien
tctcgaacaaggtgtacagaatggg

SEQ ID NO: 3577042 - DNA, 25 bp, Homo sapien
tacagaatggggacagtacaccatc

SEQ ID NO: 3577043 - DNA, 25 bp, Homo sapien
aaaaaatctcgaacaaggtgtacag

SEQ ID NO: 3577044 - DNA, 25 bp, Homo sapien
gaatggggacagtacaccatctgcc

SEQ ID NO: 3577045 - DNA, 25 bp, Homo sapien
ggtgctctgaacagttctactgaaa

SEQ ID NO: 3577046 - DNA, 25 bp, Homo sapien
agtgtggaagaatggtgctctgaac

SEQ ID NO: 3577047 - DNA, 25 bp, Homo sapien
tgacaatccggttgctaggctgggc

SEQ ID NO: 3577048 - DNA, 25 bp, Homo sapien
caatccggttgctaggctgggcaag

SEQ ID NO: 3577049 - DNA, 25 bp, Homo sapien
tgccaatagcagagtcaatcaatac

SEQ ID NO: 3577050 - DNA, 25 bp, Homo sapien
gtcaatcaatactgaaacatacagt

SEQ ID NO: 3577051 - DNA, 25 bp, Homo sapien
tagcagagtcaatcaatactgaaac

SEQ ID NO: 3577052 - DNA, 25 bp, Homo sapien
gtcttgccaatagcagagtcaatca

SEQ ID NO: 3577053 - DNA, 25 bp, Homo sapien
actgaggttagtaacaaagggatga

SEQ ID NO: 3577054 - DNA, 25 bp, Homo sapien
ctactgcacaatacactgaggttag

SEQ ID NO: 3577055 - DNA, 25 bp, Homo sapien
tgaggttagtaacaaagggatgaag

SEQ ID NO: 3577056 - DNA, 25 bp, Homo sapien
ctgcacaatacactgaggttagtaa

SEQ ID NO: 3577057 - DNA, 25 bp, Homo sapien
caggaggtgaaagggaatacaaatt

SEQ ID NO: 3577058 - DNA, 25 bp, Homo sapien
attcacagcagacttccagaggccc

SEQ ID NO: 3577059 - DNA, 25 bp, Homo sapien
caaattcacagcagacttccagagg

SEQ ID NO: 3577060 - DNA, 25 bp, Homo sapien
gaatacaaattcacagcagacttcc

SEQ ID NO: 3577061 - DNA, 25 bp, Homo sapien
catgagtaagattttaatgggaagt

SEQ ID NO: 3577062 - DNA, 25 bp, Homo sapien
taaagtcttcagtgacgaaatacta

SEQ ID NO: 3577063 - DNA, 25 bp, Homo sapien
aatactatatatggtgaatagtaac

SEQ ID NO: 3577064 - DNA, 25 bp, Homo sapien
taacatgagtaagattttaatggga

SEQ ID NO: 3577065 - DNA, 25 bp, Homo sapien
aaaaatcgaagcgtctcctgctttt

SEQ ID NO: 3577066 - DNA, 25 bp, Homo sapien
cagaaaaatcgaagcgtctcctgct

SEQ ID NO: 3577067 - DNA, 25 bp, Homo sapien
aatcagaaaaatcgaagcgtctcct

SEQ ID NO: 3577068 - DNA, 25 bp, Homo sapien
aaatcgaagcgtctcctgcttttcc

SEQ ID NO: 3577069 - DNA, 25 bp, Homo sapien
tattacattagaactggctgaggca

SEQ ID NO: 3577070 - DNA, 25 bp, Homo sapien
agaacatgctgattttggcacaagt

SEQ ID NO: 3577071 - DNA, 25 bp, Homo sapien
tagcatgtatcaaactgaatcaggg

SEQ ID NO: 3577072 - DNA, 25 bp, Homo sapien
taaaagaatcttgcttctggccggg

SEQ ID NO: 3577073 - DNA, 25 bp, Homo sapien
gcctggccaattatcttaaagatta

SEQ ID NO: 3577074 - DNA, 25 bp, Homo sapien
tatcttaaagattattgtgaggcgc

SEQ ID NO: 3577075 - DNA, 25 bp, Homo sapien
taaagattattgtgaggcgcaaaag

SEQ ID NO: 3577076 - DNA, 25 bp, Homo sapien
tattgtgaggcgcaaaagaaagaat

SEQ ID NO: 3577077 - DNA, 25 bp, Homo sapien
ggctttttcatgaacatgccaccca

SEQ ID NO: 3577078 - DNA, 25 bp, Homo sapien
tagacatcggagaaagcctctgggc

SEQ ID NO: 3577079 - DNA, 25 bp, Homo sapien
cataaaggagctcaaggcacaaaga

SEQ ID NO: 3577080 - DNA, 25 bp, Homo sapien
gagaattgctagaagtatggctttt

SEQ ID NO: 3577081 - DNA, 25 bp, Homo sapien
ccccgggtgaacagatggtctaaca

SEQ ID NO: 3577082 - DNA, 25 bp, Homo sapien
caaatctggatgtccctgccacaaa

SEQ ID NO: 3577083 - DNA, 25 bp, Homo sapien
gaagtccatagatgcttttgagcca

SEQ ID NO: 3577084 - DNA, 25 bp, Homo sapien
tcatattaggctcatcttaggctca

SEQ ID NO: 3577085 - DNA, 25 bp, Homo sapien
gccttgggaatattgttgggatcaa

SEQ ID NO: 3577086 - DNA, 25 bp, Homo sapien
tgagggttgccaagggagtcactga

SEQ ID NO: 3577087 - DNA, 25 bp, Homo sapien
ggaactgctgaaccaaaccacttgt

SEQ ID NO: 3577088 - DNA, 25 bp, Homo sapien
aatatggcaatcagtgtgcagatga

SEQ ID NO: 3577089 - DNA, 25 bp, Homo sapien
cattggaacagggaatttgtgcagc

SEQ ID NO: 3577090 - DNA, 25 bp, Homo sapien
tactttgttaaatgcggcttggcca

SEQ ID NO: 3577091 - DNA, 25 bp, Homo sapien
caatgaagtaactgtgagtcctcaa

SEQ ID NO: 3577092 - DNA, 25 bp, Homo sapien
gaacagtctgagcatgtcatgaagg

SEQ ID NO: 3577093 - DNA, 25 bp, Homo sapien
tgtgtccctctgcccaggcaactcc

SEQ ID NO: 3577094 - DNA, 25 bp, Homo sapien
cctgtgtccctctgcccaggcaact

SEQ ID NO: 3577095 - DNA, 25 bp, Homo sapien
cactctcaacacctgtgtccctctg

SEQ ID NO: 3577096 - DNA, 25 bp, Homo sapien
tgtccctctgcccaggcaactccct

SEQ ID NO: 3577097 - DNA, 25 bp, Homo sapien
tacagagatggagtaacctgcccaa

SEQ ID NO: 3577098 - DNA, 25 bp, Homo sapien
tgtgtgtggcctgcatagcttaaaa

SEQ ID NO: 3577099 - DNA, 25 bp, Homo sapien
tataggccaacagccaaatgtagcc

SEQ ID NO: 3577100 - DNA, 25 bp, Homo sapien
caatagcaatttacacaggtgagcc

SEQ ID NO: 3577101 - DNA, 25 bp, Homo sapien
aagagtcgggaaaagacttgaggca

SEQ ID NO: 3577102 - DNA, 25 bp, Homo sapien
ccagaagtttggagcccaatatgca

SEQ ID NO: 3577103 - DNA, 25 bp, Homo sapien
gcccagaagtttggagcccaatatg

SEQ ID NO: 3577104 - DNA, 25 bp, Homo sapien
cccaatatgcatgacagaggcccct

SEQ ID NO: 3577105 - DNA, 25 bp, Homo sapien
aactagggaactctctatggtatag

SEQ ID NO: 3577106 - DNA, 25 bp, Homo sapien
gattaaacagtcatcaatctttttc

SEQ ID NO: 3577107 - DNA, 25 bp, Homo sapien
agggaactctctatggtatagtgtg

SEQ ID NO: 3577108 - DNA, 25 bp, Homo sapien
ctctctatggtatagtgtgtagaaa

SEQ ID NO: 3577109 - DNA, 25 bp, Homo sapien
caggaaaggacccaatgaaagagca

SEQ ID NO: 3577110 - DNA, 25 bp, Homo sapien
ccagggaaataacacgaacaaagct

SEQ ID NO: 3577111 - DNA, 25 bp, Homo sapien
taacacgaacaaagctgaaactctt

SEQ ID NO: 3577112 - DNA, 25 bp, Homo sapien
gaaactcttccatcgaatagaccca

SEQ ID NO: 3577113 - DNA, 25 bp, Homo sapien
cagtaggatcgcagcagatatacac

SEQ ID NO: 3577114 - DNA, 25 bp, Homo sapien
acagtaggatcgcagcagatataca

SEQ ID NO: 3577115 - DNA, 25 bp, Homo sapien
agtgaaacagtaggatcgcagcaga

SEQ ID NO: 3577116 - DNA, 25 bp, Homo sapien
gaaacagtaggatcgcagcagatat

SEQ ID NO: 3577117 - DNA, 25 bp, Homo sapien
cttgaaatgtaggagaacagcaaag

SEQ ID NO: 3577118 - DNA, 25 bp, Homo sapien
tggtgctacatagaggtagatatgc

SEQ ID NO: 3577119 - DNA, 25 bp, Homo sapien
gaggtagatatgcttgaaatgtagg

SEQ ID NO: 3577120 - DNA, 25 bp, Homo sapien
cataagctggtgctacatagaggta

SEQ ID NO: 3577121 - DNA, 25 bp, Homo sapien
ctgaaataatcgtgcaatggagagt

SEQ ID NO: 3577122 - DNA, 25 bp, Homo sapien
taatccaaataaaaagccattgtac

SEQ ID NO: 3577123 - DNA, 25 bp, Homo sapien
aaagccattgtactgaaaatgaata

SEQ ID NO: 3577124 - DNA, 25 bp, Homo sapien
caatggagagtagcattaatccaaa

SEQ ID NO: 3577125 - DNA, 25 bp, Homo sapien
tcttgtattagtatacatcagaatt

SEQ ID NO: 3577126 - DNA, 25 bp, Homo sapien
tgtattagtatacatcagaattagt

SEQ ID NO: 3577127 - DNA, 25 bp, Homo sapien
ttagtatacatcagaattagtaagg

SEQ ID NO: 3577128 - DNA, 25 bp, Homo sapien
agtatacatcagaattagtaaggga

SEQ ID NO: 3577129 - DNA, 25 bp, Homo sapien
ttttccatcaatgcatttacagcac

SEQ ID NO: 3577130 - DNA, 25 bp, Homo sapien
tccacagaagtaataccgacagaat

SEQ ID NO: 3577131 - DNA, 25 bp, Homo sapien
caattaataacccgaagttccacag

SEQ ID NO: 3577132 - DNA, 25 bp, Homo sapien
taataccgacagaataaattttggc

SEQ ID NO: 3577133 - DNA, 25 bp, Homo sapien
ctacattgaaacattaggaaagaaa

SEQ ID NO: 3577134 - DNA, 25 bp, Homo sapien
acattgaaacattaggaaagaaaca

SEQ ID NO: 3577135 - DNA, 25 bp, Homo sapien
cattgaaacattaggaaagaaacag

SEQ ID NO: 3577136 - DNA, 25 bp, Homo sapien
tacattgaaacattaggaaagaaac

SEQ ID NO: 3577137 - DNA, 25 bp, Homo sapien
taaggtccttgagctggagtaattc

SEQ ID NO: 3577138 - DNA, 25 bp, Homo sapien
gggtaatccaacgtccactctgaag

SEQ ID NO: 3577139 - DNA, 25 bp, Homo sapien
tatactcaaaccatgcaaagaaagg

SEQ ID NO: 3577140 - DNA, 25 bp, Homo sapien
gatgacggaaaatctctggaaaagt

SEQ ID NO: 3577141 - DNA, 25 bp, Homo sapien
gcaagccagtttcggtgtacttcaa

SEQ ID NO: 3577142 - DNA, 25 bp, Homo sapien
aaactgtgagtgatagcaagccagt

SEQ ID NO: 3577143 - DNA, 25 bp, Homo sapien
ctcataataccactgtgatattggc

SEQ ID NO: 3577144 - DNA, 25 bp, Homo sapien
aataccactgtgatattggcaaact

SEQ ID NO: 3577145 - DNA, 25 bp, Homo sapien
acaattctaacaaaattcattacct

SEQ ID NO: 3577146 - DNA, 25 bp, Homo sapien
actttttcttacaggcggccctcag

SEQ ID NO: 3577147 - DNA, 25 bp, Homo sapien
ccaagacataaggatgaggagttca

SEQ ID NO: 3577148 - DNA, 25 bp, Homo sapien
ttacctgaaaaaggcctcatatacc

SEQ ID NO: 3577149 - DNA, 25 bp, Homo sapien
tataagctccggcatgatttggtgc

SEQ ID NO: 3577150 - DNA, 25 bp, Homo sapien
catgtagccagtatgcagcagagcc

SEQ ID NO: 3577151 - DNA, 25 bp, Homo sapien
cacatactctgcatggatggccctc

SEQ ID NO: 3577152 - DNA, 25 bp, Homo sapien
taccatttcaccagtggcgtagaga

SEQ ID NO: 3577153 - DNA, 25 bp, Homo sapien
actacagcctgagaggcagagtgag

SEQ ID NO: 3577154 - DNA, 25 bp, Homo sapien
gcttgagcctgaaaggtggaggttg

SEQ ID NO: 3577155 - DNA, 25 bp, Homo sapien
ctgcactacagcctgagaggcagag

SEQ ID NO: 3577156 - DNA, 25 bp, Homo sapien
cttggcaggttgaggtaggaggatt

SEQ ID NO: 3577157 - DNA, 25 bp, Homo sapien
aagaaaaataatgggtgggtgcagt

SEQ ID NO: 3577158 - DNA, 25 bp, Homo sapien
gcgtccggccgatggcttcttttct

SEQ ID NO: 3577159 - DNA, 25 bp, Homo sapien
cgcgtccggccgatggcttcttttc

SEQ ID NO: 3577160 - DNA, 25 bp, Homo sapien
atttcatggttgcttcttggtttcc

SEQ ID NO: 3577161 - DNA, 25 bp, Homo sapien
ttggtttccacgctttcagtcttgg

SEQ ID NO: 3577162 - DNA, 25 bp, Homo sapien
catttcatggttgcttcttggtttc

SEQ ID NO: 3577163 - DNA, 25 bp, Homo sapien
ttcttggtttccacgctttcagtct

SEQ ID NO: 3577164 - DNA, 25 bp, Homo sapien
taactgcctattaaggatgaggacc

SEQ ID NO: 3577165 - DNA, 25 bp, Homo sapien
caaaggcaggatagcgacaaacacg

SEQ ID NO: 3577166 - DNA, 25 bp, Homo sapien
tgttccaaatcagacagcgccaggt

SEQ ID NO: 3577167 - DNA, 25 bp, Homo sapien
gagttagaacggtacctggcacctc

SEQ ID NO: 3577168 - DNA, 25 bp, Homo sapien
ggatgagaaggcatttgagaagagt

SEQ ID NO: 3577169 - DNA, 25 bp, Homo sapien
atgagaaggcatttgagaagagtca

SEQ ID NO: 3577170 - DNA, 25 bp, Homo sapien
tgagaaggcatttgagaagagtcac

SEQ ID NO: 3577171 - DNA, 25 bp, Homo sapien
gatgagaaggcatttgagaagagtc

SEQ ID NO: 3577172 - DNA, 25 bp, Homo sapien
caaagccgaaaaccaattgccagta

SEQ ID NO: 3577173 - DNA, 25 bp, Homo sapien
cgaaaaccaattgccagtacccgtg

SEQ ID NO: 3577174 - DNA, 25 bp, Homo sapien
ccgtggcaattgtgagcgccgccat

SEQ ID NO: 3577175 - DNA, 25 bp, Homo sapien
tgccagtacccgtggcaattgtgag

SEQ ID NO: 3577176 - DNA, 25 bp, Homo sapien
gctgcggcaccgcacgcttcccacc

SEQ ID NO: 3577177 - DNA, 25 bp, Homo sapien
aacttgatccacatccgggatcccg

SEQ ID NO: 3577178 - DNA, 25 bp, Homo sapien
caccaacttgatccacatccgggat

SEQ ID NO: 3577179 - DNA, 25 bp, Homo sapien
tgcggcaccgcacgcttcccaccaa

SEQ ID NO: 3577180 - DNA, 25 bp, Homo sapien
caacagggcttaacaggtcttagcg

SEQ ID NO: 3577181 - DNA, 25 bp, Homo sapien
gcgctcagtctacaagaatcagtgg

SEQ ID NO: 3577182 - DNA, 25 bp, Homo sapien
ggaggccgttgcaatgctttgacga

SEQ ID NO: 3577183 - DNA, 25 bp, Homo sapien
tgtaatataagcacatgggtggcgg

SEQ ID NO: 3577184 - DNA, 25 bp, Homo sapien
cgtgcacttcttcatgcgcctcaga

SEQ ID NO: 3577185 - DNA, 25 bp, Homo sapien
ttcttcatgcgcctcagagccagac

SEQ ID NO: 3577186 - DNA, 25 bp, Homo sapien
gctgagcgtgcacttcttcatgcgc

SEQ ID NO: 3577187 - DNA, 25 bp, Homo sapien
cttcatgcgcctcagagccagacag

SEQ ID NO: 3577188 - DNA, 25 bp, Homo sapien
tggtgagcccccgttggtccctgtg

SEQ ID NO: 3577189 - DNA, 25 bp, Homo sapien
cagctcggttggtgccacactgtcc

SEQ ID NO: 3577190 - DNA, 25 bp, Homo sapien
atgggttgcttggtgagcccccgtt

SEQ ID NO: 3577191 - DNA, 25 bp, Homo sapien
ggactgtttccacagctcggttggt

SEQ ID NO: 3577192 - DNA, 25 bp, Homo sapien
cctgttatcagggttgttttgctcc

SEQ ID NO: 3577193 - DNA, 25 bp, Homo sapien
ctgatcacaggccacgtttcccagc

SEQ ID NO: 3577194 - DNA, 25 bp, Homo sapien
cctttgatgggcctgttatcagggt

SEQ ID NO: 3577195 - DNA, 25 bp, Homo sapien
atcagggttgttttgctcctggagc

SEQ ID NO: 3577196 - DNA, 25 bp, Homo sapien
caggaactgagagctgacgagtgtt

SEQ ID NO: 3577197 - DNA, 25 bp, Homo sapien
gagtgttgtgttcccggcgttgctc

SEQ ID NO: 3577198 - DNA, 25 bp, Homo sapien
tgagagctgacgagtgttgtgttcc

SEQ ID NO: 3577199 - DNA, 25 bp, Homo sapien
agctgacgagtgttgtgttcccggc

SEQ ID NO: 3577200 - DNA, 25 bp, Homo sapien
tctcatgcttttgccaagcagaagg

SEQ ID NO: 3577201 - DNA, 25 bp, Homo sapien
ctttctcatgcttttgccaagcaga

SEQ ID NO: 3577202 - DNA, 25 bp, Homo sapien
tttgttctccgtctttctcatgctt

SEQ ID NO: 3577203 - DNA, 25 bp, Homo sapien
ttctcatgcttttgccaagcagaag

SEQ ID NO: 3577204 - DNA, 25 bp, Homo sapien
aatcatgacgtgcagtttggaggcc

SEQ ID NO: 3577205 - DNA, 25 bp, Homo sapien
tttactgctcaagggaactggcgct

SEQ ID NO: 3577206 - DNA, 25 bp, Homo sapien
tcacagggcctatctatgggaagcc

SEQ ID NO: 3577207 - DNA, 25 bp, Homo sapien
tcatcacccggtgggaagcagtgct

SEQ ID NO: 3577208 - DNA, 25 bp, Homo sapien
agcacccttggagaccgtctctttc

SEQ ID NO: 3577209 - DNA, 25 bp, Homo sapien
acagcacccttggagaccgtctctt

SEQ ID NO: 3577210 - DNA, 25 bp, Homo sapien
gcacagcacccttggagaccgtctc

SEQ ID NO: 3577211 - DNA, 25 bp, Homo sapien
tctcctcaggggccgtgaatcttcc

SEQ ID NO: 3577212 - DNA, 25 bp, Homo sapien
gaaaaatgtctggtctctcaaggtg

SEQ ID NO: 3577213 - DNA, 25 bp, Homo sapien
tatcagccaaggtatgcaagcaggc

SEQ ID NO: 3577214 - DNA, 25 bp, Homo sapien
tgatcacttgcaggtacccagggag

SEQ ID NO: 3577215 - DNA, 25 bp, Homo sapien
gaaggtctgcaaccaagatccagca

SEQ ID NO: 3577216 - DNA, 25 bp, Homo sapien
agattagtatagtcccctgcctcgc

SEQ ID NO: 3577217 - DNA, 25 bp, Homo sapien
gataaatgcggcactggctagcggt

SEQ ID NO: 3577218 - DNA, 25 bp, Homo sapien
tcctggttaactggaggtagcctct

SEQ ID NO: 3577219 - DNA, 25 bp, Homo sapien
caccagggccttcttacagatggat

SEQ ID NO: 3577220 - DNA, 25 bp, Homo sapien
ttggccacccagtccagagtcaggt

SEQ ID NO: 3577221 - DNA, 25 bp, Homo sapien
cacagtgaagtggaccgtctgcaca

SEQ ID NO: 3577222 - DNA, 25 bp, Homo sapien
tatagcggaacactttgccgtcacg

SEQ ID NO: 3577223 - DNA, 25 bp, Homo sapien
gattttcagtacctcttccacgaag

SEQ ID NO: 3577224 - DNA, 25 bp, Homo sapien
tgaggttgtatagagcttccccccg

SEQ ID NO: 3577225 - DNA, 25 bp, Homo sapien
cgttcagcgtgatggggtcggacat

SEQ ID NO: 3577226 - DNA, 25 bp, Homo sapien
tgtatagagcttccccccgacgttc

SEQ ID NO: 3577227 - DNA, 25 bp, Homo sapien
ttccccccgacgttcagcgtgatgg

SEQ ID NO: 3577228 - DNA, 25 bp, Homo sapien
tgccatgaagatgctcttggctcct

SEQ ID NO: 3577229 - DNA, 25 bp, Homo sapien
cttgccatgaagatgctcttggctc

SEQ ID NO: 3577230 - DNA, 25 bp, Homo sapien
ttgccatgaagatgctcttggctcc

SEQ ID NO: 3577231 - DNA, 25 bp, Homo sapien
gggccacagtgtccatcatcacaaa

SEQ ID NO: 3577232 - DNA, 25 bp, Homo sapien
aaggcaaaatgacatgacacgaggg

SEQ ID NO: 3577233 - DNA, 25 bp, Homo sapien
cacggccctgctacaaaaggcaaaa

SEQ ID NO: 3577234 - DNA, 25 bp, Homo sapien
agtaatgaactaacaccactgagcc

SEQ ID NO: 3577235 - DNA, 25 bp, Homo sapien
gcccctaactctgctgtgaactctt

SEQ ID NO: 3577236 - DNA, 25 bp, Homo sapien
ccaccagtaacacaggtaccagaag

SEQ ID NO: 3577237 - DNA, 25 bp, Homo sapien
gactcttcagccctacagtttgtct

SEQ ID NO: 3577238 - DNA, 25 bp, Homo sapien
tatctccttgaacccatccctatag

SEQ ID NO: 3577239 - DNA, 25 bp, Homo sapien
ttacttaagtagatggatgcctggc

SEQ ID NO: 3577240 - DNA, 25 bp, Homo sapien
cactgcgtaagggaatggacagcac

SEQ ID NO: 3577241 - DNA, 25 bp, Homo sapien
cagcacgtggctgggtaaatttcaa

SEQ ID NO: 3577242 - DNA, 25 bp, Homo sapien
gaatctaaagggatgtgacaaggcc

SEQ ID NO: 3577243 - DNA, 25 bp, Homo sapien
ttgcagcgagttgctctgcgccccg

SEQ ID NO: 3577244 - DNA, 25 bp, Homo sapien
gggtctgtgcgctgccttccgggac

SEQ ID NO: 3577245 - DNA, 25 bp, Homo sapien
cggcgcgtcgagagcgaactccatc

SEQ ID NO: 3577246 - DNA, 25 bp, Homo sapien
gggactggtagttctctctgggctc

SEQ ID NO: 3577247 - DNA, 25 bp, Homo sapien
aaggcaaggactttgcttctgaagc

SEQ ID NO: 3577248 - DNA, 25 bp, Homo sapien
cagatgagccacattcaaagagtca

SEQ ID NO: 3577249 - DNA, 25 bp, Homo sapien
ggccttttgagattataccttgcag

SEQ ID NO: 3577250 - DNA, 25 bp, Homo sapien
cagagagcctaagtaacctttatgg

SEQ ID NO: 3577251 - DNA, 25 bp, Homo sapien
gagaacttcctctccgcatcctgga

SEQ ID NO: 3577252 - DNA, 25 bp, Homo sapien
gactgctcggagtatctgaagtacc

SEQ ID NO: 3577253 - DNA, 25 bp, Homo sapien
tccagggaataagtgtgctgcctcc

SEQ ID NO: 3577254 - DNA, 25 bp, Homo sapien
tacgcgaagactccaggtctagagg

SEQ ID NO: 3577255 - DNA, 25 bp, Homo sapien
tcaagacaagatggacacggcagct

SEQ ID NO: 3577256 - DNA, 25 bp, Homo sapien
caccaagcccctcaagacaagatgg

SEQ ID NO: 3577257 - DNA, 25 bp, Homo sapien
ctggagtgagaacgggttccaccac

SEQ ID NO: 3577258 - DNA, 25 bp, Homo sapien
aagcaaaaattggaacagactggag

SEQ ID NO: 3577259 - DNA, 25 bp, Homo sapien
tcgccccagggtagaatgaaacgtc

SEQ ID NO: 3577260 - DNA, 25 bp, Homo sapien
tggctggacccatatgctcaaaggc

SEQ ID NO: 3577261 - DNA, 25 bp, Homo sapien
aagtgggttccctgcagatgtcagc

SEQ ID NO: 3577262 - DNA, 25 bp, Homo sapien
gacccatggataggccaaaggacca

SEQ ID NO: 3577263 - DNA, 25 bp, Homo sapien
tccttgtccacctgaacgtagtcca

SEQ ID NO: 3577264 - DNA, 25 bp, Homo sapien
tgaggactgccgcacgtctgtccac

SEQ ID NO: 3577265 - DNA, 25 bp, Homo sapien
tgaacgtagtccaccttctcatcag

SEQ ID NO: 3577266 - DNA, 25 bp, Homo sapien
tctgtccactcctgcatggtgttct

SEQ ID NO: 3577267 - DNA, 25 bp, Homo sapien
aacgctgccggtgctcttcttaggg

SEQ ID NO: 3577268 - DNA, 25 bp, Homo sapien
gccagataatcaacgctgccggtgc

SEQ ID NO: 3577269 - DNA, 25 bp, Homo sapien
agtccagggccagataatcaacgct

SEQ ID NO: 3577270 - DNA, 25 bp, Homo sapien
tcttaggggcaggactgttcgtgcc

SEQ ID NO: 3577271 - DNA, 25 bp, Homo sapien
ggaacgggagatgcagacactgggt

SEQ ID NO: 3577272 - DNA, 25 bp, Homo sapien
cgggagatgcagacactgggttttg

SEQ ID NO: 3577273 - DNA, 25 bp, Homo sapien
aacgggagatgcagacactgggttt

SEQ ID NO: 3577274 - DNA, 25 bp, Homo sapien
ctgggaacgggagatgcagacactg

SEQ ID NO: 3577275 - DNA, 25 bp, Homo sapien
gacatagttctcttcgctgtctcct

SEQ ID NO: 3577276 - DNA, 25 bp, Homo sapien
catagttctcttcgctgtctcctga

SEQ ID NO: 3577277 - DNA, 25 bp, Homo sapien
atagttctcttcgctgtctcctgag

SEQ ID NO: 3577278 - DNA, 25 bp, Homo sapien
gtggagatggggcggcagtactggg

SEQ ID NO: 3577279 - DNA, 25 bp, Homo sapien
ctcaggtcaagtggtgttggctttg

SEQ ID NO: 3577280 - DNA, 25 bp, Homo sapien
gagttcatcgatgacggtgttgttc

SEQ ID NO: 3577281 - DNA, 25 bp, Homo sapien
gttgttcctcaggtcaagtggtgtt

SEQ ID NO: 3577282 - DNA, 25 bp, Homo sapien
gccctagaccaagacttggtgatag

SEQ ID NO: 3577283 - DNA, 25 bp, Homo sapien
caagtgagtcaaagtgatgggcccc

SEQ ID NO: 3577284 - DNA, 25 bp, Homo sapien
cattgggatgtagacgctctgggaa

SEQ ID NO: 3577285 - DNA, 25 bp, Homo sapien
gaagaacctggattcatgggcacat

SEQ ID NO: 3577286 - DNA, 25 bp, Homo sapien
agaattggtgctgtccgatcggccc

SEQ ID NO: 3577287 - DNA, 25 bp, Homo sapien
tactcgtaggtctcacaggaagaag

SEQ ID NO: 3577288 - DNA, 25 bp, Homo sapien
gaaagagccaactccatcactcatg

SEQ ID NO: 3577289 - DNA, 25 bp, Homo sapien
cacgctgtgggtactcgtaggtctc

SEQ ID NO: 3577290 - DNA, 25 bp, Homo sapien
tcactcatggattcagcagaccggc

SEQ ID NO: 3577291 - DNA, 25 bp, Homo sapien
tatctgtctcggagcctgtgaggct

SEQ ID NO: 3577292 - DNA, 25 bp, Homo sapien
cactgattggcggtctctgctgagg

SEQ ID NO: 3577293 - DNA, 25 bp, Homo sapien
gctgggcgtcttgaaggtgtacaca

SEQ ID NO: 3577294 - DNA, 25 bp, Homo sapien
tgaggactgccccatcgaggtgttt

SEQ ID NO: 3577295 - DNA, 25 bp, Homo sapien
ctcggcttgggaaggctatagaagc

SEQ ID NO: 3577296 - DNA, 25 bp, Homo sapien
gaattctgtattgtgccggctcggc

SEQ ID NO: 3577297 - DNA, 25 bp, Homo sapien
ggaggtcgtaggtactgtctctgaa

SEQ ID NO: 3577298 - DNA, 25 bp, Homo sapien
gacttgaccactgatcccgttgaca

SEQ ID NO: 3577299 - DNA, 25 bp, Homo sapien
ctggtgccctgagagaagctggcac

SEQ ID NO: 3577300 - DNA, 25 bp, Homo sapien
tggtgccctgagagaagctggcact

SEQ ID NO: 3577301 - DNA, 25 bp, Homo sapien
tatcatctgttacaggtttaacagc

SEQ ID NO: 3577302 - DNA, 25 bp, Homo sapien
caatgtatcatctgttacaggttta

SEQ ID NO: 3577303 - DNA, 25 bp, Homo sapien
tgtatcatctgttacaggtttaaca

SEQ ID NO: 3577304 - DNA, 25 bp, Homo sapien
atcaatgtatcatctgttacaggtt

SEQ ID NO: 3577305 - DNA, 25 bp, Homo sapien
tagcccttccagcagaggtaaagca

SEQ ID NO: 3577306 - DNA, 25 bp, Homo sapien
actgaaaagtactaggccctgtgag

SEQ ID NO: 3577307 - DNA, 25 bp, Homo sapien
tagacgtgtttgtctacctgaaacg

SEQ ID NO: 3577308 - DNA, 25 bp, Homo sapien
taacccacctaatggctgtggcagc

SEQ ID NO: 3577309 - DNA, 25 bp, Homo sapien
tctctggcacccagttatcactgtg

SEQ ID NO: 3577310 - DNA, 25 bp, Homo sapien
ctggtgcaagtagagatactcctga

SEQ ID NO: 3577311 - DNA, 25 bp, Homo sapien
tactcctgaggtgcgctggtggaca

SEQ ID NO: 3577312 - DNA, 25 bp, Homo sapien
gctcttcggcttatgcactggtgca

SEQ ID NO: 3577313 - DNA, 25 bp, Homo sapien
tcaaacgtgaacagagttggctggc

SEQ ID NO: 3577314 - DNA, 25 bp, Homo sapien
ggagaagagcgggggccatgaccgg

SEQ ID NO: 3577315 - DNA, 25 bp, Homo sapien
tggagaagagcgggggccatgaccg

SEQ ID NO: 3577316 - DNA, 25 bp, Homo sapien
ctggagaagagcgggggccatgacc

SEQ ID NO: 3577317 - DNA, 25 bp, Homo sapien
gcctggaggtgacttcctatcacaa

SEQ ID NO: 3577318 - DNA, 25 bp, Homo sapien
ggtgacttcctatcacaatgtaggc

SEQ ID NO: 3577319 - DNA, 25 bp, Homo sapien
gacttcctatcacaatgtaggccat

SEQ ID NO: 3577320 - DNA, 25 bp, Homo sapien
tggaggtgacttcctatcacaatgt

SEQ ID NO: 3577321 - DNA, 25 bp, Homo sapien
ccataaacaaggcatatggaagcat

SEQ ID NO: 3577322 - DNA, 25 bp, Homo sapien
ctatctcaggctgtacccttctcat

SEQ ID NO: 3577323 - DNA, 25 bp, Homo sapien
acaggtataaagccctgcacccagc

SEQ ID NO: 3577324 - DNA, 25 bp, Homo sapien
tagcctccggaatagccaggaatac

SEQ ID NO: 3577325 - DNA, 25 bp, Homo sapien
cttagcctccggaatagccaggaat

SEQ ID NO: 3577326 - DNA, 25 bp, Homo sapien
gattacaggtataaagccctgcacc

SEQ ID NO: 3577327 - DNA, 25 bp, Homo sapien
attccaggaaaataccaatctttct

SEQ ID NO: 3577328 - DNA, 25 bp, Homo sapien
ccatatatagggtaccctttttgat

SEQ ID NO: 3577329 - DNA, 25 bp, Homo sapien
caatatatgaatcagttataattcc

SEQ ID NO: 3577330 - DNA, 25 bp, Homo sapien
tataaactttaaatagcacatacaa

SEQ ID NO: 3577331 - DNA, 25 bp, Homo sapien
tatatgaatcagttataattccata

SEQ ID NO: 3577332 - DNA, 25 bp, Homo sapien
cttgatgcatacgatctcacagtat

SEQ ID NO: 3577333 - DNA, 25 bp, Homo sapien
gatgcatacgatctcacagtataca

SEQ ID NO: 3577334 - DNA, 25 bp, Homo sapien
tacgatctcacagtatacattagca

SEQ ID NO: 3577335 - DNA, 25 bp, Homo sapien
gcatacgatctcacagtatacatta

SEQ ID NO: 3577336 - DNA, 25 bp, Homo sapien
cagaaccagaacaaggcgatcttca

SEQ ID NO: 3577337 - DNA, 25 bp, Homo sapien
gttggtcccatcaaggattcattca

SEQ ID NO: 3577338 - DNA, 25 bp, Homo sapien
ccctgggttagaagaatgaccaaat

SEQ ID NO: 3577339 - DNA, 25 bp, Homo sapien
ctatcgtaccccttagctgcggcag

SEQ ID NO: 3577340 - DNA, 25 bp, Homo sapien
caattggtgtaaaacagaagcgtca

SEQ ID NO: 3577341 - DNA, 25 bp, Homo sapien
tgactctgagacaactggcaattgg

SEQ ID NO: 3577342 - DNA, 25 bp, Homo sapien
gaacatgcacgttggagtccgaatc

SEQ ID NO: 3577343 - DNA, 25 bp, Homo sapien
caagaatcgtgatcagcggcaataa

SEQ ID NO: 3577344 - DNA, 25 bp, Homo sapien
gctagttgttggtcagcatacagaa

SEQ ID NO: 3577345 - DNA, 25 bp, Homo sapien
tttaagctaaaactgaaaccatcga

SEQ ID NO: 3577346 - DNA, 25 bp, Homo sapien
tgctgacccttagactaaaagttct

SEQ ID NO: 3577347 - DNA, 25 bp, Homo sapien
taaagattcaagagtctggccgggc

SEQ ID NO: 3577348 - DNA, 25 bp, Homo sapien
ccttcttgctgtccgttttgtgact

SEQ ID NO: 3577349 - DNA, 25 bp, Homo sapien
cttgctgtccgttttgtgacttaga

SEQ ID NO: 3577350 - DNA, 25 bp, Homo sapien
tttgtgacttagaagcagccatggt

SEQ ID NO: 3577351 - DNA, 25 bp, Homo sapien
ttgtgacttagaagcagccatggta

SEQ ID NO: 3577352 - DNA, 25 bp, Homo sapien
gtgactgtgcaggatggcctgaaat

SEQ ID NO: 3577353 - DNA, 25 bp, Homo sapien
caagtgtgactgtgcaggatggcct

SEQ ID NO: 3577354 - DNA, 25 bp, Homo sapien
tcaagtgtgactgtgcaggatggcc

SEQ ID NO: 3577355 - DNA, 25 bp, Homo sapien
agtgtgactgtgcaggatggcctga

SEQ ID NO: 3577356 - DNA, 25 bp, Homo sapien
aaccccctatgagaaagatctgtgt

SEQ ID NO: 3577357 - DNA, 25 bp, Homo sapien
cacctcaaccccctatgagaaagat

SEQ ID NO: 3577358 - DNA, 25 bp, Homo sapien
gaaagatctgtgtgcgttctcatac

SEQ ID NO: 3577359 - DNA, 25 bp, Homo sapien
ctcaaccccctatgagaaagatctg

SEQ ID NO: 3577360 - DNA, 25 bp, Homo sapien
taaaggtcaggcctgcatctacctg

SEQ ID NO: 3577361 - DNA, 25 bp, Homo sapien
tcctcagcctgattgaagccacaga

SEQ ID NO: 3577362 - DNA, 25 bp, Homo sapien
catctacctgctcacagaagttcag

SEQ ID NO: 3577363 - DNA, 25 bp, Homo sapien
ttgatgatccgcagaggcttcttgg

SEQ ID NO: 3577364 - DNA, 25 bp, Homo sapien
tccgcaggataaaccagcgtttctt

SEQ ID NO: 3577365 - DNA, 25 bp, Homo sapien
ggccactccgcaggataaaccagcg

SEQ ID NO: 3577366 - DNA, 25 bp, Homo sapien
cactccgcaggataaaccagcgttt

SEQ ID NO: 3577367 - DNA, 25 bp, Homo sapien
gccactccgcaggataaaccagcgt

SEQ ID NO: 3577368 - DNA, 25 bp, Homo sapien
taaagcttttaataggtcctcagat

SEQ ID NO: 3577369 - DNA, 25 bp, Homo sapien
catgcccagacgaccttaaagcttt

SEQ ID NO: 3577370 - DNA, 25 bp, Homo sapien
tcagatatcataggttaaagacggg

SEQ ID NO: 3577371 - DNA, 25 bp, Homo sapien
ggtgccacatgacctgtcccctttt

SEQ ID NO: 3577372 - DNA, 25 bp, Homo sapien
ccactgtgtacgcccggcactgtgt

SEQ ID NO: 3577373 - DNA, 25 bp, Homo sapien
actgtgtacgcccggcactgtgtga

SEQ ID NO: 3577374 - DNA, 25 bp, Homo sapien
cactgtgtacgcccggcactgtgtg

SEQ ID NO: 3577375 - DNA, 25 bp, Homo sapien
agccactgtgtacgcccggcactgt

SEQ ID NO: 3577376 - DNA, 25 bp, Homo sapien
taagaagctgttgcgatagtctgca

SEQ ID NO: 3577377 - DNA, 25 bp, Homo sapien
tcatctggcaaagtgcgggagacaa

SEQ ID NO: 3577378 - DNA, 25 bp, Homo sapien
gaaatgttaaccaatgctgtgctct

SEQ ID NO: 3577379 - DNA, 25 bp, Homo sapien
gcatcactcctagctgttgaacaga

SEQ ID NO: 3577380 - DNA, 25 bp, Homo sapien
caagttgaacaagtaccagcaggag

SEQ ID NO: 3577381 - DNA, 25 bp, Homo sapien
gttctaagatataaagggccgccaa

SEQ ID NO: 3577382 - DNA, 25 bp, Homo sapien
tctggtgacaatgaaggcccgtgaa

SEQ ID NO: 3577383 - DNA, 25 bp, Homo sapien
caggagcagtctacggaaaaccaaa

SEQ ID NO: 3577384 - DNA, 25 bp, Homo sapien
gctgtgatcacaggatgcgccatca

SEQ ID NO: 3577385 - DNA, 25 bp, Homo sapien
catgatatggtaacacctcatttaa

SEQ ID NO: 3577386 - DNA, 25 bp, Homo sapien
gagggatgtgttcttctgaataacc

SEQ ID NO: 3577387 - DNA, 25 bp, Homo sapien
gctggctaggctaatgtcaaattca

SEQ ID NO: 3577388 - DNA, 25 bp, Homo sapien
gggaatctgatctcacttctgaaca

SEQ ID NO: 3577389 - DNA, 25 bp, Homo sapien
tcaactgtcaactctcaggtggtga

SEQ ID NO: 3577390 - DNA, 25 bp, Homo sapien
tacaaccttagccacaaggcacgtg

SEQ ID NO: 3577391 - DNA, 25 bp, Homo sapien
gagtttcgcaaaagcctcttccaag

SEQ ID NO: 3577392 - DNA, 25 bp, Homo sapien
cacacacataatgggagcaagggag

SEQ ID NO: 3577393 - DNA, 25 bp, Homo sapien
tgtgataggtctgttcaattctttc

SEQ ID NO: 3577394 - DNA, 25 bp, Homo sapien
atattctggatgcagttgtcagaca

SEQ ID NO: 3577395 - DNA, 25 bp, Homo sapien
ttcttttgtgataggtctgttcaat

SEQ ID NO: 3577396 - DNA, 25 bp, Homo sapien
aaagcaacagatgagctgttgccag

SEQ ID NO: 3577397 - DNA, 25 bp, Homo sapien
ctctcccgttggcaaagcaacagat

SEQ ID NO: 3577398 - DNA, 25 bp, Homo sapien
ggcaaagcaacagatgagctgttgc

SEQ ID NO: 3577399 - DNA, 25 bp, Homo sapien
ctcccgttggcaaagcaacagatga

SEQ ID NO: 3577400 - DNA, 25 bp, Homo sapien
taagagtagcccatgacagcaacag

SEQ ID NO: 3577401 - DNA, 25 bp, Homo sapien
ccaggcctgtatttgggcataattc

SEQ ID NO: 3577402 - DNA, 25 bp, Homo sapien
tacaacctcatgtgcacctagagtc

SEQ ID NO: 3577403 - DNA, 25 bp, Homo sapien
taattcaatggaactgatcacagca

SEQ ID NO: 3577404 - DNA, 25 bp, Homo sapien
tgggcaagaagaggtgcctacagaa

SEQ ID NO: 3577405 - DNA, 25 bp, Homo sapien
aactggacttggagcgaggcggtag

SEQ ID NO: 3577406 - DNA, 25 bp, Homo sapien
ccaccaggtcatacagaggccagag

SEQ ID NO: 3577407 - DNA, 25 bp, Homo sapien
ctacagaagctcaatcccaccaggt

SEQ ID NO: 3577408 - DNA, 25 bp, Homo sapien
cctcccatgtctaggcttgaaaaca

SEQ ID NO: 3577409 - DNA, 25 bp, Homo sapien
acattacataagatgccctgaactg

SEQ ID NO: 3577410 - DNA, 25 bp, Homo sapien
gtcacagggcagcacattacataag

SEQ ID NO: 3577411 - DNA, 25 bp, Homo sapien
tttttctaggtctgtgtcacagggc

SEQ ID NO: 3577412 - DNA, 25 bp, Homo sapien
taaaagtgattacgatgggccgggc

SEQ ID NO: 3577413 - DNA, 25 bp, Homo sapien
aaatacaacagtggttattaggcca

SEQ ID NO: 3577414 - DNA, 25 bp, Homo sapien
gccaccggaggaatagggcatcaat

SEQ ID NO: 3577415 - DNA, 25 bp, Homo sapien
gggcatcaatgtctaatgggtatag

SEQ ID NO: 3577416 - DNA, 25 bp, Homo sapien
aatcacaatcttgtatatagttgct

SEQ ID NO: 3577417 - DNA, 25 bp, Homo sapien
gttgctactagagggttacaggaac

SEQ ID NO: 3577418 - DNA, 25 bp, Homo sapien
atatagttgctactagagggttaca

SEQ ID NO: 3577419 - DNA, 25 bp, Homo sapien
cacaatcttgtatatagttgctact

SEQ ID NO: 3577420 - DNA, 25 bp, Homo sapien
tcagagagttgataattgagggaga

SEQ ID NO: 3577421 - DNA, 25 bp, Homo sapien
agacttctttttgaggagggagatg

SEQ ID NO: 3577422 - DNA, 25 bp, Homo sapien
ggagacttctttttgaggagggaga

SEQ ID NO: 3577423 - DNA, 25 bp, Homo sapien
agagttgataattgagggagacttc

SEQ ID NO: 3577424 - DNA, 25 bp, Homo sapien
tagaaatatcactttggcaacagca

SEQ ID NO: 3577425 - DNA, 25 bp, Homo sapien
ggaccagcacaagcaccttacagag

SEQ ID NO: 3577426 - DNA, 25 bp, Homo sapien
atcctgaaggcagtggcggaccact

SEQ ID NO: 3577427 - DNA, 25 bp, Homo sapien
tgcatgcactagtcagggtcctgga

SEQ ID NO: 3577428 - DNA, 25 bp, Homo sapien
taaacggtttctgacgaattctgaa

SEQ ID NO: 3577429 - DNA, 25 bp, Homo sapien
ggtttctgacgaattctgaatgtcc

SEQ ID NO: 3577430 - DNA, 25 bp, Homo sapien
aacggtttctgacgaattctgaatg

SEQ ID NO: 3577431 - DNA, 25 bp, Homo sapien
tctaaacggtttctgacgaattctg

SEQ ID NO: 3577432 - DNA, 25 bp, Homo sapien
ccttaggcttggtaacattcatctc

SEQ ID NO: 3577433 - DNA, 25 bp, Homo sapien
agagagccacatttgaggccttttc

SEQ ID NO: 3577434 - DNA, 25 bp, Homo sapien
tattattctactgtaaaccaggcac

SEQ ID NO: 3577435 - DNA, 25 bp, Homo sapien
tgttcacaacctaaacaagatctgc

SEQ ID NO: 3577436 - DNA, 25 bp, Homo sapien
gaaatctgactgtgagtactccagc

SEQ ID NO: 3577437 - DNA, 25 bp, Homo sapien
aatagcatgggaacattaagtggcc

SEQ ID NO: 3577438 - DNA, 25 bp, Homo sapien
cattcaaagaaccttggactgggca

SEQ ID NO: 3577439 - DNA, 25 bp, Homo sapien
ctagcactagcagggaacaacattc

SEQ ID NO: 3577440 - DNA, 25 bp, Homo sapien
tcgcctttgtctcagttactcctct

SEQ ID NO: 3577441 - DNA, 25 bp, Homo sapien
ccctcacttgtctctctattgctag

SEQ ID NO: 3577442 - DNA, 25 bp, Homo sapien
gataccaaaggtctaattccctcac

SEQ ID NO: 3577443 - DNA, 25 bp, Homo sapien
tgatgataccaaaggtctaattccc

SEQ ID NO: 3577444 - DNA, 25 bp, Homo sapien
taggtacccttgagtaactgctccc

SEQ ID NO: 3577445 - DNA, 25 bp, Homo sapien
ccccaaagaagtggcaatgtagtac

SEQ ID NO: 3577446 - DNA, 25 bp, Homo sapien
gctgagatacaagacccacataagg

SEQ ID NO: 3577447 - DNA, 25 bp, Homo sapien
tgcttccccgttgatagactgaaaa

SEQ ID NO: 3577448 - DNA, 25 bp, Homo sapien
gacaaacacacaggggacttttctg

SEQ ID NO: 3577449 - DNA, 25 bp, Homo sapien
caagaatcaaggacaaacacacagg

SEQ ID NO: 3577450 - DNA, 25 bp, Homo sapien
tttcctgtgctgaagccattcgcct

SEQ ID NO: 3577451 - DNA, 25 bp, Homo sapien
ttttcctgtgctgaagccattcgcc

SEQ ID NO: 3577452 - DNA, 25 bp, Homo sapien
aggaacacagcgctgtaacacctgg

SEQ ID NO: 3577453 - DNA, 25 bp, Homo sapien
gccaccggaagccaaaagaggcaaa

SEQ ID NO: 3577454 - DNA, 25 bp, Homo sapien
cctgaactgtaagacgataaatctc

SEQ ID NO: 3577455 - DNA, 25 bp, Homo sapien
tgtaagacgataaatctctattgtc

SEQ ID NO: 3577456 - DNA, 25 bp, Homo sapien
aatggagtggtagatatacaagccc

SEQ ID NO: 3577457 - DNA, 25 bp, Homo sapien
tacaagcccagtgaaagtacccaca

SEQ ID NO: 3577458 - DNA, 25 bp, Homo sapien
gcttggataaagactagaacctaca

SEQ ID NO: 3577459 - DNA, 25 bp, Homo sapien
gacagaaggtactaagggcaatgag

SEQ ID NO: 3577460 - DNA, 25 bp, Homo sapien
atagcaacttaatgatctgaggtcc

SEQ ID NO: 3577461 - DNA, 25 bp, Homo sapien
tggtaacggactagacacagacaag

SEQ ID NO: 3577462 - DNA, 25 bp, Homo sapien
ctcagataagcagagggacttaagt

SEQ ID NO: 3577463 - DNA, 25 bp, Homo sapien
taagtgtgattaaaaagccaccagt

SEQ ID NO: 3577464 - DNA, 25 bp, Homo sapien
gtccagtgtaggagacaagctcttt

SEQ ID NO: 3577465 - DNA, 25 bp, Homo sapien
cataccgagttcttaatgataggga

SEQ ID NO: 3577466 - DNA, 25 bp, Homo sapien
gagttggcacacaaacattatcaag

SEQ ID NO: 3577467 - DNA, 25 bp, Homo sapien
tatgatgagtactaaaataggctgg

SEQ ID NO: 3577468 - DNA, 25 bp, Homo sapien
tattctttgttcacttctcacagca

SEQ ID NO: 3577469 - DNA, 25 bp, Homo sapien
tctattctttgttcacttctcacag

SEQ ID NO: 3577470 - DNA, 25 bp, Homo sapien
ctttgttcacttctcacagcactta

SEQ ID NO: 3577471 - DNA, 25 bp, Homo sapien
tttctattctttgttcacttctcac

SEQ ID NO: 3577472 - DNA, 25 bp, Homo sapien
catgaacagcaactcaaccaatgca

SEQ ID NO: 3577473 - DNA, 25 bp, Homo sapien
gccacatgctgaggtatttctttgc

SEQ ID NO: 3577474 - DNA, 25 bp, Homo sapien
ggccacatccatgagttgccacatg

SEQ ID NO: 3577475 - DNA, 25 bp, Homo sapien
ccattttgttcaaccaggaagtcca

SEQ ID NO: 3577476 - DNA, 25 bp, Homo sapien
aatacatttgaccagcccctagagg

SEQ ID NO: 3577477 - DNA, 25 bp, Homo sapien
tagaggttccacatctaaggttggt

SEQ ID NO: 3577478 - DNA, 25 bp, Homo sapien
gaatcgtagctccaacgacaaaggc

SEQ ID NO: 3577479 - DNA, 25 bp, Homo sapien
gactctgctttaagcctgccaagga

SEQ ID NO: 3577480 - DNA, 25 bp, Homo sapien
gagataggttccatcattagcctca

SEQ ID NO: 3577481 - DNA, 25 bp, Homo sapien
cataaaagtctggacaacctaggtt

SEQ ID NO: 3577482 - DNA, 25 bp, Homo sapien
gactagggaagtgtcttaatcagcc

SEQ ID NO: 3577483 - DNA, 25 bp, Homo sapien
ttgagacacagaatacttgcctagt

SEQ ID NO: 3577484 - DNA, 25 bp, Homo sapien
cactgcaagtgctggagcaatattc

SEQ ID NO: 3577485 - DNA, 25 bp, Homo sapien
taagtcaccacgcatggaaagcaat

SEQ ID NO: 3577486 - DNA, 25 bp, Homo sapien
ctttagaaacagtcttccagccggg

SEQ ID NO: 3577487 - DNA, 25 bp, Homo sapien
gagaccttttagacttagccacaat

SEQ ID NO: 3577488 - DNA, 25 bp, Homo sapien
caaatcgagtgtctcagtcctggga

SEQ ID NO: 3577489 - DNA, 25 bp, Homo sapien
gggtactacaagaacagctgggctg

SEQ ID NO: 3577490 - DNA, 25 bp, Homo sapien
tggaacgcttgcagagagaacctgg

SEQ ID NO: 3577491 - DNA, 25 bp, Homo sapien
cagcagagctcgaaccaatgggtct

SEQ ID NO: 3577492 - DNA, 25 bp, Homo sapien
taaggagctttactcacaatctgcc

SEQ ID NO: 3577493 - DNA, 25 bp, Homo sapien
ccaggcactagaggaagattgcttg

SEQ ID NO: 3577494 - DNA, 25 bp, Homo sapien
tatatggagacaccaaccaggcact

SEQ ID NO: 3577495 - DNA, 25 bp, Homo sapien
tgcacaggacagtactctatatagt

SEQ ID NO: 3577496 - DNA, 25 bp, Homo sapien
taccgcgatctcctccaataatggg

SEQ ID NO: 3577497 - DNA, 25 bp, Homo sapien
tgagacagatgtccaataccgcgat

SEQ ID NO: 3577498 - DNA, 25 bp, Homo sapien
agatgaaatccctgccttgaccaag

SEQ ID NO: 3577499 - DNA, 25 bp, Homo sapien
aaattgctaagagactggtggacct

SEQ ID NO: 3577500 - DNA, 25 bp, Homo sapien
gggcaaaatagtgcaacaccatctc

SEQ ID NO: 3577501 - DNA, 25 bp, Homo sapien
tggatgtggtgccatgcacctgtgg

SEQ ID NO: 3577502 - DNA, 25 bp, Homo sapien
tgggcaaaatagtgcaacaccatct

SEQ ID NO: 3577503 - DNA, 25 bp, Homo sapien
gcctgggcaaaatagtgcaacacca

SEQ ID NO: 3577504 - DNA, 25 bp, Homo sapien
taactttgtggaatgatcgatagag

SEQ ID NO: 3577505 - DNA, 25 bp, Homo sapien
tggggctaacattcctatgatgcca

SEQ ID NO: 3577506 - DNA, 25 bp, Homo sapien
ccaagttgtccatgaacccattttt

SEQ ID NO: 3577507 - DNA, 25 bp, Homo sapien
taataggtattcagtaactttgtgg

SEQ ID NO: 3577508 - DNA, 25 bp, Homo sapien
caagtggagttaatcaccctattct

SEQ ID NO: 3577509 - DNA, 25 bp, Homo sapien
tgagctcacatctttaggcctttaa

SEQ ID NO: 3577510 - DNA, 25 bp, Homo sapien
tgacactgccccactccaagtggag

SEQ ID NO: 3577511 - DNA, 25 bp, Homo sapien
tcttgcttctgtacctatgtgccaa

SEQ ID NO: 3577512 - DNA, 25 bp, Homo sapien
caggaggatatcaggaagtatcaca

SEQ ID NO: 3577513 - DNA, 25 bp, Homo sapien
gggaagataaatctccttcaggagg

SEQ ID NO: 3577514 - DNA, 25 bp, Homo sapien
gagtaaagatcaaaaggctgcctgg

SEQ ID NO: 3577515 - DNA, 25 bp, Homo sapien
atgtgacatttgaggcaggccttga

SEQ ID NO: 3577516 - DNA, 25 bp, Homo sapien
cccactgtttggcacagatatgtct

SEQ ID NO: 3577517 - DNA, 25 bp, Homo sapien
tagaaattgctggtcttaagccctc

SEQ ID NO: 3577518 - DNA, 25 bp, Homo sapien
acccaaaacggctgcccaataagca

SEQ ID NO: 3577519 - DNA, 25 bp, Homo sapien
ggctgcccaataagcaagtggacca

SEQ ID NO: 3577520 - DNA, 25 bp, Homo sapien
gctggagtgctctcaggtcaccgca

SEQ ID NO: 3577521 - DNA, 25 bp, Homo sapien
caggctggagtgctctcaggtcacc

SEQ ID NO: 3577522 - DNA, 25 bp, Homo sapien
gccactgtgcccgactaatcttgta

SEQ ID NO: 3577523 - DNA, 25 bp, Homo sapien
ccactgtgcccgactaatcttgtat

SEQ ID NO: 3577524 - DNA, 25 bp, Homo sapien
gcagggatgagtactgatttattac

SEQ ID NO: 3577525 - DNA, 25 bp, Homo sapien
ccatataagggcatcattctgtttc

SEQ ID NO: 3577526 - DNA, 25 bp, Homo sapien
gagcatttgccttcacgcaacttgg

SEQ ID NO: 3577527 - DNA, 25 bp, Homo sapien
acatgtagacttctagtctttctag

SEQ ID NO: 3577528 - DNA, 25 bp, Homo sapien
tgcagccatatcaggatgccccaga

SEQ ID NO: 3577529 - DNA, 25 bp, Homo sapien
tttttattccaagcacctgatccag

SEQ ID NO: 3577530 - DNA, 25 bp, Homo sapien
gccccagaggcaatagtcagcattt

SEQ ID NO: 3577531 - DNA, 25 bp, Homo sapien
cgatgggagggttgttacttctgcc

SEQ ID NO: 3577532 - DNA, 25 bp, Homo sapien
atagcgcctcaacttcttctcggga

SEQ ID NO: 3577533 - DNA, 25 bp, Homo sapien
agccggtgcacaccacgtcgccgcc

SEQ ID NO: 3577534 - DNA, 25 bp, Homo sapien
aggcgatttcctcagccagccggtg

SEQ ID NO: 3577535 - DNA, 25 bp, Homo sapien
acttcttctcgggaggcgatttcct

SEQ ID NO: 3577536 - DNA, 25 bp, Homo sapien
gccgggtcgcgcggacgagggcgcg

SEQ ID NO: 3577537 - DNA, 25 bp, Homo sapien
cgggtcgcgcggacgagggcgcggg

SEQ ID NO: 3577538 - DNA, 25 bp, Homo sapien
ccgccgggtcgcgcggacgagggcg

SEQ ID NO: 3577539 - DNA, 25 bp, Homo sapien
ctggagccccccgccgggtcgcgcg

SEQ ID NO: 3577540 - DNA, 25 bp, Homo sapien
taatcgccggctccaagagtgcttt

SEQ ID NO: 3577541 - DNA, 25 bp, Homo sapien
tgactatcttatgaggagggagcac

SEQ ID NO: 3577542 - DNA, 25 bp, Homo sapien
catctcgggctgtgcataggaagca

SEQ ID NO: 3577543 - DNA, 25 bp, Homo sapien
taggcgccatctatcggaaccagtt

SEQ ID NO: 3577544 - DNA, 25 bp, Homo sapien
cattgcgtttaaacccacagggacg

SEQ ID NO: 3577545 - DNA, 25 bp, Homo sapien
gacggcctagctggaaggacttagc

SEQ ID NO: 3577546 - DNA, 25 bp, Homo sapien
gacttagcaggctgaggtaatcctg

SEQ ID NO: 3577547 - DNA, 25 bp, Homo sapien
acactgtgggatggttaaatctagc

SEQ ID NO: 3577548 - DNA, 25 bp, Homo sapien
cagatgcaacactagtgaagctgga

SEQ ID NO: 3577549 - DNA, 25 bp, Homo sapien
ggcttcactgtgacaatcctacagg

SEQ ID NO: 3577550 - DNA, 25 bp, Homo sapien
gcggttactctgttatctggcttca

SEQ ID NO: 3577551 - DNA, 25 bp, Homo sapien
agcacttaaccccttgtaccagatg

SEQ ID NO: 3577552 - DNA, 25 bp, Homo sapien
caagcagttgcttcaacagggcaaa

SEQ ID NO: 3577553 - DNA, 25 bp, Homo sapien
tcttccggaggagctctcaagcagt

SEQ ID NO: 3577554 - DNA, 25 bp, Homo sapien
caattgaacagtctactctcctggg

SEQ ID NO: 3577555 - DNA, 25 bp, Homo sapien
gagatgacttttgactgctggagaa

SEQ ID NO: 3577556 - DNA, 25 bp, Homo sapien
caaggtccagtgtcaatctagagta

SEQ ID NO: 3577557 - DNA, 25 bp, Homo sapien
ggtccagtgtcaatctagagtaaga

SEQ ID NO: 3577558 - DNA, 25 bp, Homo sapien
ccaaggtccagtgtcaatctagagt

SEQ ID NO: 3577559 - DNA, 25 bp, Homo sapien
ccagtgtcaatctagagtaagagct

SEQ ID NO: 3577560 - DNA, 25 bp, Homo sapien
tttcccatctaagtaattcctgatt

SEQ ID NO: 3577561 - DNA, 25 bp, Homo sapien
taagtaattcctgattgacatatat

SEQ ID NO: 3577562 - DNA, 25 bp, Homo sapien
tcccatctaagtaattcctgattga

SEQ ID NO: 3577563 - DNA, 25 bp, Homo sapien
ccatctaagtaattcctgattgaca

SEQ ID NO: 3577564 - DNA, 25 bp, Homo sapien
taagtctaagtcactgtattccaga

SEQ ID NO: 3577565 - DNA, 25 bp, Homo sapien
ctaggtgctggcgatgtgatgaaca

SEQ ID NO: 3577566 - DNA, 25 bp, Homo sapien
caccttcagtaacagacagataact

SEQ ID NO: 3577567 - DNA, 25 bp, Homo sapien
tgaacagcatagagatgttcttccg

SEQ ID NO: 3577568 - DNA, 25 bp, Homo sapien
gaatggcagcataagacaaccggta

SEQ ID NO: 3577569 - DNA, 25 bp, Homo sapien
aaccggtatttgcataaggcgctga

SEQ ID NO: 3577570 - DNA, 25 bp, Homo sapien
tgctgtcgcggacctcacattctgg

SEQ ID NO: 3577571 - DNA, 25 bp, Homo sapien
tggaagccattgtccaacccttggt

SEQ ID NO: 3577572 - DNA, 25 bp, Homo sapien
gcaatgcctcataacgctgtctgta

SEQ ID NO: 3577573 - DNA, 25 bp, Homo sapien
cacatgaagggagttgggactgtcc

SEQ ID NO: 3577574 - DNA, 25 bp, Homo sapien
gacactgtaattaaagttcttcggc

SEQ ID NO: 3577575 - DNA, 25 bp, Homo sapien
tgtctgtatacgatccaagcccatt

SEQ ID NO: 3577576 - DNA, 25 bp, Homo sapien
tgatacatgcgtattctactgagaa

SEQ ID NO: 3577577 - DNA, 25 bp, Homo sapien
caggttctaaactccccaatcaatg

SEQ ID NO: 3577578 - DNA, 25 bp, Homo sapien
tataggtccttatacatgtaactca

SEQ ID NO: 3577579 - DNA, 25 bp, Homo sapien
gctcctacacagtaagcagcctgtc

SEQ ID NO: 3577580 - DNA, 25 bp, Homo sapien
gaattacccatcctttaggctcagc

SEQ ID NO: 3577581 - DNA, 25 bp, Homo sapien
tacccatcctttaggctcagccaaa

SEQ ID NO: 3577582 - DNA, 25 bp, Homo sapien
ttaggctcagccaaactcccatcct

SEQ ID NO: 3577583 - DNA, 25 bp, Homo sapien
ctagaattacccatcctttaggctc

SEQ ID NO: 3577584 - DNA, 25 bp, Homo sapien
tcaattcagaatagctacttcttta

SEQ ID NO: 3577585 - DNA, 25 bp, Homo sapien
ttcaattcagaatagctacttcttt

SEQ ID NO: 3577586 - DNA, 25 bp, Homo sapien
atacttaatgtaatatctcaacagc

SEQ ID NO: 3577587 - DNA, 25 bp, Homo sapien
aaatacttaatgtaatatctcaaca

SEQ ID NO: 3577588 - DNA, 25 bp, Homo sapien
tatcacaaagtatatggcaagggag

SEQ ID NO: 3577589 - DNA, 25 bp, Homo sapien
gaagtactgaaaatgagataaggat

SEQ ID NO: 3577590 - DNA, 25 bp, Homo sapien
tgagataaggatttatcacaaagta

SEQ ID NO: 3577591 - DNA, 25 bp, Homo sapien
gcaatgtttaatgaagtactgaaaa

SEQ ID NO: 3577592 - DNA, 25 bp, Homo sapien
tgcgggagctcatccttacgtgaaa

SEQ ID NO: 3577593 - DNA, 25 bp, Homo sapien
tctatgatatcttatggcacaacaa

SEQ ID NO: 3577594 - DNA, 25 bp, Homo sapien
taatggatttgagagtccccttgct

SEQ ID NO: 3577595 - DNA, 25 bp, Homo sapien
tataagtacctcttcttgcgggagc

SEQ ID NO: 3577596 - DNA, 25 bp, Homo sapien
ctataaaaggcatgaatgaggaaac

SEQ ID NO: 3577597 - DNA, 25 bp, Homo sapien
attgtcaacacccaagatgcactgc

SEQ ID NO: 3577598 - DNA, 25 bp, Homo sapien
tgcaggtagcgttcaaatcccatcc

SEQ ID NO: 3577599 - DNA, 25 bp, Homo sapien
catgtggcacagatccaaatcgacg

SEQ ID NO: 3577600 - DNA, 25 bp, Homo sapien
tccaaatcgacgaaggtccagatac

SEQ ID NO: 3577601 - DNA, 25 bp, Homo sapien
cctgagcacagcacaaggattaata

SEQ ID NO: 3577602 - DNA, 25 bp, Homo sapien
gtggtcctccctaagcagcttggat

SEQ ID NO: 3577603 - DNA, 25 bp, Homo sapien
cccggccgagccaagcattttgatt

SEQ ID NO: 3577604 - DNA, 25 bp, Homo sapien
ggcattagggatcacttagctcaag

SEQ ID NO: 3577605 - DNA, 25 bp, Homo sapien
ttggtagacttctgtaagtcccgat

SEQ ID NO: 3577606 - DNA, 25 bp, Homo sapien
cattggtagacttctgtaagtcccg

SEQ ID NO: 3577607 - DNA, 25 bp, Homo sapien
attggtagacttctgtaagtcccga

SEQ ID NO: 3577608 - DNA, 25 bp, Homo sapien
tgtttcttttaggtctgaccagtac

SEQ ID NO: 3577609 - DNA, 25 bp, Homo sapien
attgtgtttcttttaggtctgacca

SEQ ID NO: 3577610 - DNA, 25 bp, Homo sapien
caattgtgtttcttttaggtctgac

SEQ ID NO: 3577611 - DNA, 25 bp, Homo sapien
tgtgtttcttttaggtctgaccagt

SEQ ID NO: 3577612 - DNA, 25 bp, Homo sapien
ctggctaagcgctcctctaagaaat

SEQ ID NO: 3577613 - DNA, 25 bp, Homo sapien
aggaaccagaagatcaacagcagca

SEQ ID NO: 3577614 - DNA, 25 bp, Homo sapien
ctccaaagagttccccaactccagg

SEQ ID NO: 3577615 - DNA, 25 bp, Homo sapien
cctctaagaaatggtatcgttcttc

SEQ ID NO: 3577616 - DNA, 25 bp, Homo sapien
caggagttcgaagttacagtcagcc

SEQ ID NO: 3577617 - DNA, 25 bp, Homo sapien
gctacacaattaatatggctgggct

SEQ ID NO: 3577618 - DNA, 25 bp, Homo sapien
aactttgcctcactttgccgttaag

SEQ ID NO: 3577619 - DNA, 25 bp, Homo sapien
tctagtctaggcgacaggcaagacc

SEQ ID NO: 3577620 - DNA, 25 bp, Homo sapien
tgtcagaaccagacgaaacaaaaca

SEQ ID NO: 3577621 - DNA, 25 bp, Homo sapien
taccccataacgttagaatgttgca

SEQ ID NO: 3577622 - DNA, 25 bp, Homo sapien
gcttcaaaataggagtgattccatg

SEQ ID NO: 3577623 - DNA, 25 bp, Homo sapien
gaaacaatgacttgtcagaaccaga

SEQ ID NO: 3577624 - DNA, 25 bp, Homo sapien
caggtgaacctctgaagaaaagccc

SEQ ID NO: 3577625 - DNA, 25 bp, Homo sapien
tgcaggaggaacacatatcatcttt

SEQ ID NO: 3577626 - DNA, 25 bp, Homo sapien
gacaagagtgcaaagttgcttcccc

SEQ ID NO: 3577627 - DNA, 25 bp, Homo sapien
actaatttaatggtatgcaggagga

SEQ ID NO: 3577628 - DNA, 25 bp, Homo sapien
gagtgtactttcttctggtatatca

SEQ ID NO: 3577629 - DNA, 25 bp, Homo sapien
taaagattctgcacactctctgaga

SEQ ID NO: 3577630 - DNA, 25 bp, Homo sapien
tactgcattctctaaagatcactag

SEQ ID NO: 3577631 - DNA, 25 bp, Homo sapien
tacagcagagtattcttcaattaca

SEQ ID NO: 3577632 - DNA, 25 bp, Homo sapien
caacaaacctgtgatgatacaagtg

SEQ ID NO: 3577633 - DNA, 25 bp, Homo sapien
ccatgaagcaccatacggatcaata

SEQ ID NO: 3577634 - DNA, 25 bp, Homo sapien
tgaacaatagcagtaccccaaaaaa

SEQ ID NO: 3577635 - DNA, 25 bp, Homo sapien
tggataaagcccaagctatctgtaa

SEQ ID NO: 3577636 - DNA, 25 bp, Homo sapien
tgagaccacattactagagagactg

SEQ ID NO: 3577637 - DNA, 25 bp, Homo sapien
caaatgagggatagaagcaggcact

SEQ ID NO: 3577638 - DNA, 25 bp, Homo sapien
aacgcctttagggtgtgagaccaca

SEQ ID NO: 3577639 - DNA, 25 bp, Homo sapien
gaatttagtcatctggcccaaagct

SEQ ID NO: 3577640 - DNA, 25 bp, Homo sapien
tagaacagtgtgtaacgggggcttg

SEQ ID NO: 3577641 - DNA, 25 bp, Homo sapien
agaacagtgtgtaacgggggcttgg

SEQ ID NO: 3577642 - DNA, 25 bp, Homo sapien
attttttgagctcatgggaaatagt

SEQ ID NO: 3577643 - DNA, 25 bp, Homo sapien
ttttgagctcatgggaaatagtaga

SEQ ID NO: 3577644 - DNA, 25 bp, Homo sapien
taacagactagagaaggagacacag

SEQ ID NO: 3577645 - DNA, 25 bp, Homo sapien
agtggagtcccacagtataacagac

SEQ ID NO: 3577646 - DNA, 25 bp, Homo sapien
tgtaggcgacataaaggattttggc

SEQ ID NO: 3577647 - DNA, 25 bp, Homo sapien
cattctactaggcattgtaggcgac

SEQ ID NO: 3577648 - DNA, 25 bp, Homo sapien
agaaatgaatggatgtgagagatat

SEQ ID NO: 3577649 - DNA, 25 bp, Homo sapien
gcagtatcttaatctgaaaaggtaa

SEQ ID NO: 3577650 - DNA, 25 bp, Homo sapien
ttaggaggctattagtctaggcagt

SEQ ID NO: 3577651 - DNA, 25 bp, Homo sapien
aatggatatatgaagatcagttagg

SEQ ID NO: 3577652 - DNA, 25 bp, Homo sapien
tagataatctaggtcctaatgtctc

SEQ ID NO: 3577653 - DNA, 25 bp, Homo sapien
gactagataatctaggtcctaatgt

SEQ ID NO: 3577654 - DNA, 25 bp, Homo sapien
gataatctaggtcctaatgtctcct

SEQ ID NO: 3577655 - DNA, 25 bp, Homo sapien
actagataatctaggtcctaatgtc

SEQ ID NO: 3577656 - DNA, 25 bp, Homo sapien
cattatccctcatgtagaaaggctt

SEQ ID NO: 3577657 - DNA, 25 bp, Homo sapien
taattaataacgaagacaggtatgt

SEQ ID NO: 3577658 - DNA, 25 bp, Homo sapien
catgttcagtccgtaggtcagcacc

SEQ ID NO: 3577659 - DNA, 25 bp, Homo sapien
ccctcatgtagaaaggcttgagtgt

SEQ ID NO: 3577660 - DNA, 25 bp, Homo sapien
gcttgctttaagatctccactgctt

SEQ ID NO: 3577661 - DNA, 25 bp, Homo sapien
tgctttaagatctccactgcttcag

SEQ ID NO: 3577662 - DNA, 25 bp, Homo sapien
aaaggtgaagttctgggatgcttgc

SEQ ID NO: 3577663 - DNA, 25 bp, Homo sapien
ttgctttaagatctccactgcttca

SEQ ID NO: 3577664 - DNA, 25 bp, Homo sapien
aagtcaatacaatggagctgctaac

SEQ ID NO: 3577665 - DNA, 25 bp, Homo sapien
catggagacaatgtgcgtgcgcgca

SEQ ID NO: 3577666 - DNA, 25 bp, Homo sapien
catatacttggcacctactaggcac

SEQ ID NO: 3577667 - DNA, 25 bp, Homo sapien
gaaagaatgatctgcctgaagacaa

SEQ ID NO: 3577668 - DNA, 25 bp, Homo sapien
ataattagttaaccagtgacctgat

SEQ ID NO: 3577669 - DNA, 25 bp, Homo sapien
ttctgaaaggttttgccaaagatat

SEQ ID NO: 3577670 - DNA, 25 bp, Homo sapien
tacccaccagtaacatgaaagtgtc

SEQ ID NO: 3577671 - DNA, 25 bp, Homo sapien
gacctgatatttcacgttctaatct

SEQ ID NO: 3577672 - DNA, 25 bp, Homo sapien
taaagcccctaaagctatgttttga

SEQ ID NO: 3577673 - DNA, 25 bp, Homo sapien
tcctgaaagaccttgagctcaaaaa

SEQ ID NO: 3577674 - DNA, 25 bp, Homo sapien
taagtcacttcaacgtagtgaaagc

SEQ ID NO: 3577675 - DNA, 25 bp, Homo sapien
ttttaacggctaagataatgactga

SEQ ID NO: 3577676 - DNA, 25 bp, Homo sapien
ttttgagaaacctcccatactatcc

SEQ ID NO: 3577677 - DNA, 25 bp, Homo sapien
catatgtacccagaggtaggatggc

SEQ ID NO: 3577678 - DNA, 25 bp, Homo sapien
gacatactgacttcagttctgcata

SEQ ID NO: 3577679 - DNA, 25 bp, Homo sapien
ggttgatccatgctgtcacaaataa

SEQ ID NO: 3577680 - DNA, 25 bp, Homo sapien
aagttgttttttagcatatgttcta

SEQ ID NO: 3577681 - DNA, 25 bp, Homo sapien
ttgttttttagcatatgttctaatc

SEQ ID NO: 3577682 - DNA, 25 bp, Homo sapien
gttttttagcatatgttctaatctg

SEQ ID NO: 3577683 - DNA, 25 bp, Homo sapien
tttttagcatatgttctaatctgtc

SEQ ID NO: 3577684 - DNA, 25 bp, Homo sapien
ttgagagaaccatcattgttgtagc

SEQ ID NO: 3577685 - DNA, 25 bp, Homo sapien
ttgtgacagagttcaacatcttcag

SEQ ID NO: 3577686 - DNA, 25 bp, Homo sapien
gaatttgtgacagagttcaacatct

SEQ ID NO: 3577687 - DNA, 25 bp, Homo sapien
tagccttgaacagttcctctataac

SEQ ID NO: 3577688 - DNA, 25 bp, Homo sapien
tgccaggtgcctccggctctgagaa

SEQ ID NO: 3577689 - DNA, 25 bp, Homo sapien
tcttgaaggctgtcaacaaaagaaa

SEQ ID NO: 3577690 - DNA, 25 bp, Homo sapien
tgagaattttcagctcggaaggtcg

SEQ ID NO: 3577691 - DNA, 25 bp, Homo sapien
ttcagctcggaaggtcggaccaaag

SEQ ID NO: 3577692 - DNA, 25 bp, Homo sapien
tcagtaagacccaattggtagaagc

SEQ ID NO: 3577693 - DNA, 25 bp, Homo sapien
aagttatattttggttctacagcta

SEQ ID NO: 3577694 - DNA, 25 bp, Homo sapien
agttatattttggttctacagctac

SEQ ID NO: 3577695 - DNA, 25 bp, Homo sapien
gtaagacccaattggtagaagctta

SEQ ID NO: 3577696 - DNA, 25 bp, Homo sapien
agctttttaactggtgtctggcacc

SEQ ID NO: 3577697 - DNA, 25 bp, Homo sapien
gactaaacctaccttatgcagaatg

SEQ ID NO: 3577698 - DNA, 25 bp, Homo sapien
ccttggaaaactctgaaatctcgca

SEQ ID NO: 3577699 - DNA, 25 bp, Homo sapien
tttcctagcgtgtcccatgcatgtc

SEQ ID NO: 3577700 - DNA, 25 bp, Homo sapien
agcctggcatagagacagccttcaa

SEQ ID NO: 3577701 - DNA, 25 bp, Homo sapien
tagagacagccttcaacaatttaaa

SEQ ID NO: 3577702 - DNA, 25 bp, Homo sapien
ttatactttgggctgaagcctggca

SEQ ID NO: 3577703 - DNA, 25 bp, Homo sapien
agagagagaatttgatttccacagt

SEQ ID NO: 3577704 - DNA, 25 bp, Homo sapien
catggtatccaatgcttacagcagc

SEQ ID NO: 3577705 - DNA, 25 bp, Homo sapien
tgcacaggagtaaacactgggcttt

SEQ ID NO: 3577706 - DNA, 25 bp, Homo sapien
cataagatattgtgtacaggcactc

SEQ ID NO: 3577707 - DNA, 25 bp, Homo sapien
aaatgtacaattaggccgagcacag

SEQ ID NO: 3577708 - DNA, 25 bp, Homo sapien
tatccaagtaatgaaggttaacatc

SEQ ID NO: 3577709 - DNA, 25 bp, Homo sapien
aactattctattacattttccttga

SEQ ID NO: 3577710 - DNA, 25 bp, Homo sapien
aaagattcccttcctttcaagtgag

SEQ ID NO: 3577711 - DNA, 25 bp, Homo sapien
ccattcttctagcaaagtacaaaag

SEQ ID NO: 3577712 - DNA, 25 bp, Homo sapien
tcaagtgagctatttccagaaaaga

SEQ ID NO: 3577713 - DNA, 25 bp, Homo sapien
tcacttctagatgaagttgtcctga

SEQ ID NO: 3577714 - DNA, 25 bp, Homo sapien
gttgtcctgagacagttaagaaagc

SEQ ID NO: 3577715 - DNA, 25 bp, Homo sapien
cacttctagatgaagttgtcctgag

SEQ ID NO: 3577716 - DNA, 25 bp, Homo sapien
tatagtcacttagcagcagtcttgg

SEQ ID NO: 3577717 - DNA, 25 bp, Homo sapien
gcctacgttgttcacctcacagcag

SEQ ID NO: 3577718 - DNA, 25 bp, Homo sapien
cacagcagtttaggaccacagcaca

SEQ ID NO: 3577719 - DNA, 25 bp, Homo sapien
tacctggtccactgatgtcacactg

SEQ ID NO: 3577720 - DNA, 25 bp, Homo sapien
gatcgtggtggtaaaaagtagccaa

SEQ ID NO: 3577721 - DNA, 25 bp, Homo sapien
tagctgaggctaagttctgggcaag

SEQ ID NO: 3577722 - DNA, 25 bp, Homo sapien
aaatctactaaagctcggtgaggac

SEQ ID NO: 3577723 - DNA, 25 bp, Homo sapien
agaaatcgtcttaagggtatacagc

SEQ ID NO: 3577724 - DNA, 25 bp, Homo sapien
actctggagtcagtagtaacattcc

SEQ ID NO: 3577725 - DNA, 25 bp, Homo sapien
tagtctagctggtggcctatcatca

SEQ ID NO: 3577726 - DNA, 25 bp, Homo sapien
gaagttactgttggaatggcaccag

SEQ ID NO: 3577727 - DNA, 25 bp, Homo sapien
tgtttccagcaatttagaggtgttc

SEQ ID NO: 3577728 - DNA, 25 bp, Homo sapien
tcaaaggatagagggttggcaggga

SEQ ID NO: 3577729 - DNA, 25 bp, Homo sapien
ttatgcttctacaggcagccaggag

SEQ ID NO: 3577730 - DNA, 25 bp, Homo sapien
gctttcaaaggatagagggttggca

SEQ ID NO: 3577731 - DNA, 25 bp, Homo sapien
tttcaaaggatagagggttggcagg

SEQ ID NO: 3577732 - DNA, 25 bp, Homo sapien
gattattggagtatgaatatgtaca

SEQ ID NO: 3577733 - DNA, 25 bp, Homo sapien
agctccctcagagtcattggatgtg

SEQ ID NO: 3577734 - DNA, 25 bp, Homo sapien
cagctccctcagagtcattggatgt

SEQ ID NO: 3577735 - DNA, 25 bp, Homo sapien
tggatgtgattattggagtatgaat

SEQ ID NO: 3577736 - DNA, 25 bp, Homo sapien
tattgtcgcagatactccagaggat

SEQ ID NO: 3577737 - DNA, 25 bp, Homo sapien
aaagaatgaatagcagctgtcgctt

SEQ ID NO: 3577738 - DNA, 25 bp, Homo sapien
tgcgaatcctcaatatagaacccag

SEQ ID NO: 3577739 - DNA, 25 bp, Homo sapien
cgttagtcctacacctaaagtgagg

SEQ ID NO: 3577740 - DNA, 25 bp, Homo sapien
acattttgccttttggatggacttt

SEQ ID NO: 3577741 - DNA, 25 bp, Homo sapien
cattttgccttttggatggactttt

SEQ ID NO: 3577742 - DNA, 25 bp, Homo sapien
atggactttttatcagctgcccttg

SEQ ID NO: 3577743 - DNA, 25 bp, Homo sapien
tcagctgcccttgtacttccacaga

SEQ ID NO: 3577744 - DNA, 25 bp, Homo sapien
aagacttccttctgggatcggacag

SEQ ID NO: 3577745 - DNA, 25 bp, Homo sapien
ctactgtcaaggcctgaatctgcaa

SEQ ID NO: 3577746 - DNA, 25 bp, Homo sapien
tccttctgggatcggacagaacgaa

SEQ ID NO: 3577747 - DNA, 25 bp, Homo sapien
tgggatcggacagaacgaatccatc

SEQ ID NO: 3577748 - DNA, 25 bp, Homo sapien
tatatgttccaatcacaataggata

SEQ ID NO: 3577749 - DNA, 25 bp, Homo sapien
acatgtactcacaatcctgcctcaa

SEQ ID NO: 3577750 - DNA, 25 bp, Homo sapien
caataggatacacactttggtattc

SEQ ID NO: 3577751 - DNA, 25 bp, Homo sapien
caatgtgagcgtaaaacattttacg

SEQ ID NO: 3577752 - DNA, 25 bp, Homo sapien
ggatatgtgaggacaacagaaatca

SEQ ID NO: 3577753 - DNA, 25 bp, Homo sapien
tcagtacaatcatgggtgacaaagc

SEQ ID NO: 3577754 - DNA, 25 bp, Homo sapien
gaaatcactgcaacggcaagccatg

SEQ ID NO: 3577755 - DNA, 25 bp, Homo sapien
ctgtgtcagtacaatcatgggtgac

SEQ ID NO: 3577756 - DNA, 25 bp, Homo sapien
ggaacagaagcgcacggaccgcagc

SEQ ID NO: 3577757 - DNA, 25 bp, Homo sapien
gtcccgcacgctcagtttggctgaa

SEQ ID NO: 3577758 - DNA, 25 bp, Homo sapien
tggatcttaatgcgctccccactcg

SEQ ID NO: 3577759 - DNA, 25 bp, Homo sapien
ccactcgcgttctgagccccgagag

SEQ ID NO: 3577760 - DNA, 25 bp, Homo sapien
gcaaacgccagaaagaaaccacgtg

SEQ ID NO: 3577761 - DNA, 25 bp, Homo sapien
gcagctctgctctaaggcactccag

SEQ ID NO: 3577762 - DNA, 25 bp, Homo sapien
gcggaatggacaggacactaggcaa

SEQ ID NO: 3577763 - DNA, 25 bp, Homo sapien
tcggctgcgcgctttctccttcagg

SEQ ID NO: 3577764 - DNA, 25 bp, Homo sapien
tatgtgtcatccttgaacgggccac

SEQ ID NO: 3577765 - DNA, 25 bp, Homo sapien
cagtgtgagtacatctactgctggc

SEQ ID NO: 3577766 - DNA, 25 bp, Homo sapien
ctgacagtgtgagtacatctactgc

SEQ ID NO: 3577767 - DNA, 25 bp, Homo sapien
tctactgctggcagtgtagggcttg

SEQ ID NO: 3577768 - DNA, 25 bp, Homo sapien
tgagtacatctactgctggcagtgt

SEQ ID NO: 3577769 - DNA, 25 bp, Homo sapien
caaagagttcctcaaggtgagagac

SEQ ID NO: 3577770 - DNA, 25 bp, Homo sapien
gaatttcaacttgtgagctggagca

SEQ ID NO: 3577771 - DNA, 25 bp, Homo sapien
gagagactggtgaattgactttgca

SEQ ID NO: 3577772 - DNA, 25 bp, Homo sapien
gcaattaatcctcgctgttagccat

SEQ ID NO: 3577773 - DNA, 25 bp, Homo sapien
tatgaatctggtgcttctctattgg

SEQ ID NO: 3577774 - DNA, 25 bp, Homo sapien
tgaatctggtgcttctctattgggt

SEQ ID NO: 3577775 - DNA, 25 bp, Homo sapien
tgtttatgaatctggtgcttctcta

SEQ ID NO: 3577776 - DNA, 25 bp, Homo sapien
atctggtgcttctctattgggtgca

SEQ ID NO: 3577777 - DNA, 25 bp, Homo sapien
tgttagtccatcaatgggcccctgt

SEQ ID NO: 3577778 - DNA, 25 bp, Homo sapien
tcataagtaacatgcctggcaacag

SEQ ID NO: 3577779 - DNA, 25 bp, Homo sapien
cttggaacggttatgagtagtctca

SEQ ID NO: 3577780 - DNA, 25 bp, Homo sapien
gacctgagcagtctaggaagaagag

SEQ ID NO: 3577781 - DNA, 25 bp, Homo sapien
gctgcctcatcctgaatcactggtg

SEQ ID NO: 3577782 - DNA, 25 bp, Homo sapien
ttcttcagaccccattagaccaggg

SEQ ID NO: 3577783 - DNA, 25 bp, Homo sapien
ccaccagactgagggaattaacacc

SEQ ID NO: 3577784 - DNA, 25 bp, Homo sapien
tttctcatcccgtgagtcccagtgc

SEQ ID NO: 3577785 - DNA, 25 bp, Homo sapien
tacaggtcgaaagggttctcctatg

SEQ ID NO: 3577786 - DNA, 25 bp, Homo sapien
ttctcctatggaggtcgtctgaact

SEQ ID NO: 3577787 - DNA, 25 bp, Homo sapien
aaccttgggactgttgtacaggtcg

SEQ ID NO: 3577788 - DNA, 25 bp, Homo sapien
tcatctgagagtcattgctgaacct

SEQ ID NO: 3577789 - DNA, 25 bp, Homo sapien
tggggctggcggggaaggagaggcc

SEQ ID NO: 3577790 - DNA, 25 bp, Homo sapien
ctggcggggaaggagaggccctggt

SEQ ID NO: 3577791 - DNA, 25 bp, Homo sapien
ggctggcggggaaggagaggccctg

SEQ ID NO: 3577792 - DNA, 25 bp, Homo sapien
ctggggctggcggggaaggagaggc

SEQ ID NO: 3577793 - DNA, 25 bp, Homo sapien
ctgcagcagctttgcgaggagagtg

SEQ ID NO: 3577794 - DNA, 25 bp, Homo sapien
tgcagcagctttgcgaggagagtgg

SEQ ID NO: 3577795 - DNA, 25 bp, Homo sapien
caaaagctgaccttagggtgaccca

SEQ ID NO: 3577796 - DNA, 25 bp, Homo sapien
caaatacatcagagggagtgggatc

SEQ ID NO: 3577797 - DNA, 25 bp, Homo sapien
cgtggcctccattcggaagggaaca

SEQ ID NO: 3577798 - DNA, 25 bp, Homo sapien
ggatcttcgaagaaagcaaaagctg

SEQ ID NO: 3577799 - DNA, 25 bp, Homo sapien
gcaattgcaaagtcaagcttcaggg

SEQ ID NO: 3577800 - DNA, 25 bp, Homo sapien
gccacgctgcactagtgatgtcaga

SEQ ID NO: 3577801 - DNA, 25 bp, Homo sapien
tcagcctgtccctgaacgagggcag

SEQ ID NO: 3577802 - DNA, 25 bp, Homo sapien
tatttttaaagtgcaacggctcaca

SEQ ID NO: 3577803 - DNA, 25 bp, Homo sapien
tatttgtcaacgaaggctacacggg

SEQ ID NO: 3577804 - DNA, 25 bp, Homo sapien
aaggctacacgggatcacttctggt

SEQ ID NO: 3577805 - DNA, 25 bp, Homo sapien
aatagtctttatttgtcaacgaagg

SEQ ID NO: 3577806 - DNA, 25 bp, Homo sapien
tcaacgaaggctacacgggatcact

SEQ ID NO: 3577807 - DNA, 25 bp, Homo sapien
tacagccttgttggtatttacacag

SEQ ID NO: 3577808 - DNA, 25 bp, Homo sapien
tcagaggtgctcagaacaacaggtg

SEQ ID NO: 3577809 - DNA, 25 bp, Homo sapien
cagaagcagcttggtacagactcct

SEQ ID NO: 3577810 - DNA, 25 bp, Homo sapien
tcaaaattagttccagacttcagga

SEQ ID NO: 3577811 - DNA, 25 bp, Homo sapien
tggggaccaggaggtcacctagtac

SEQ ID NO: 3577812 - DNA, 25 bp, Homo sapien
ccaggacggccgagcgtgctccaga

SEQ ID NO: 3577813 - DNA, 25 bp, Homo sapien
gccgagcgtgctccagactagtcct

SEQ ID NO: 3577814 - DNA, 25 bp, Homo sapien
ggctgttcgccctcagaataaatca

SEQ ID NO: 3577815 - DNA, 25 bp, Homo sapien
ctttggcattccagagggggtaaga

SEQ ID NO: 3577816 - DNA, 25 bp, Homo sapien
ttgcctttggcattccagagggggt

SEQ ID NO: 3577817 - DNA, 25 bp, Homo sapien
tctgatattccacattcgtaatgaa

SEQ ID NO: 3577818 - DNA, 25 bp, Homo sapien
aagaaacacaacattggccctcgcc

SEQ ID NO: 3577819 - DNA, 25 bp, Homo sapien
ctgccgtgaggactggagaatagcc

SEQ ID NO: 3577820 - DNA, 25 bp, Homo sapien
gatactttaaagttgcagctgcgaa

SEQ ID NO: 3577821 - DNA, 25 bp, Homo sapien
tagggcagtcaagtacacaaggatg

SEQ ID NO: 3577822 - DNA, 25 bp, Homo sapien
tggatgctcaaatccccaagcctga

SEQ ID NO: 3577823 - DNA, 25 bp, Homo sapien
ggtgggataaaaaggaaatctcatc

SEQ ID NO: 3577824 - DNA, 25 bp, Homo sapien
tgccctccagcaatgtctgtttggg

SEQ ID NO: 3577825 - DNA, 25 bp, Homo sapien
cagtctgccctccagcaatgtctgt

SEQ ID NO: 3577826 - DNA, 25 bp, Homo sapien
tccagcaatgtctgtttggggtgtg

SEQ ID NO: 3577827 - DNA, 25 bp, Homo sapien
tcctctcaggatgggagtcgatgct

SEQ ID NO: 3577828 - DNA, 25 bp, Homo sapien
tgtaggatcatacacctgggcaggt

SEQ ID NO: 3577829 - DNA, 25 bp, Homo sapien
gaggcctggtcactctatcgaatga

SEQ ID NO: 3577830 - DNA, 25 bp, Homo sapien
tgagtgtcaaaagggccggtcctct

SEQ ID NO: 3577831 - DNA, 25 bp, Homo sapien
gcgcataacactgcctgtgccacag

SEQ ID NO: 3577832 - DNA, 25 bp, Homo sapien
gaagcaccaccttcaatacaacagc

SEQ ID NO: 3577833 - DNA, 25 bp, Homo sapien
taaagcttcgggatccttcaacttc

SEQ ID NO: 3577834 - DNA, 25 bp, Homo sapien
ccaatgtggcagtgaggcgcataac

SEQ ID NO: 3577835 - DNA, 25 bp, Homo sapien
caagggcccttggtatgaagagtac

SEQ ID NO: 3577836 - DNA, 25 bp, Homo sapien
cccagtgggatgacgttaaggcgaa

SEQ ID NO: 3577837 - DNA, 25 bp, Homo sapien
caggatgggactgatcaactgggca

SEQ ID NO: 3577838 - DNA, 25 bp, Homo sapien
tatcagtccaacaaggtttccacgg

SEQ ID NO: 3577839 - DNA, 25 bp, Homo sapien
tgcctcagcttgggcgtgctcttca

SEQ ID NO: 3577840 - DNA, 25 bp, Homo sapien
caggcctctccctgacgacacaggc

SEQ ID NO: 3577841 - DNA, 25 bp, Homo sapien
gacgacacaggcacagttcttcaca

SEQ ID NO: 3577842 - DNA, 25 bp, Homo sapien
ctcagcttgggcgtgctcttcaggt

SEQ ID NO: 3577843 - DNA, 25 bp, Homo sapien
aacacattgggtgggcttctctaga

SEQ ID NO: 3577844 - DNA, 25 bp, Homo sapien
tatgatatgggcaggccacaccaca

SEQ ID NO: 3577845 - DNA, 25 bp, Homo sapien
gctctgcgatcagctggtacatgga

SEQ ID NO: 3577846 - DNA, 25 bp, Homo sapien
ggaactggttagaaggatgcttagc

SEQ ID NO: 3577847 - DNA, 25 bp, Homo sapien
attcctacgtctcagtggtggcggc

SEQ ID NO: 3577848 - DNA, 25 bp, Homo sapien
gagggctttgcctcggaaggcaggc

SEQ ID NO: 3577849 - DNA, 25 bp, Homo sapien
tccacattcctacgtctcagtggtg

SEQ ID NO: 3577850 - DNA, 25 bp, Homo sapien
tggagggaagatactcaaagtcata

SEQ ID NO: 3577851 - DNA, 25 bp, Homo sapien
tcacactgggtacctagggacagac

SEQ ID NO: 3577852 - DNA, 25 bp, Homo sapien
tggcaccgacaactacacaggattt

SEQ ID NO: 3577853 - DNA, 25 bp, Homo sapien
aacacagtcaggtatgcggccacaa

SEQ ID NO: 3577854 - DNA, 25 bp, Homo sapien
catggtgcccacattgaaggcttgc

SEQ ID NO: 3577855 - DNA, 25 bp, Homo sapien
tgggtactgctcgacagagatcacg

SEQ ID NO: 3577856 - DNA, 25 bp, Homo sapien
gactgagccgctggatgcaaacttc

SEQ ID NO: 3577857 - DNA, 25 bp, Homo sapien
gatgatgtctgtggtcactcggcca

SEQ ID NO: 3577858 - DNA, 25 bp, Homo sapien
tctctaggtagtgggcatggttcaa

SEQ ID NO: 3577859 - DNA, 25 bp, Homo sapien
ttgctgttgtcccactcctgcgttt

SEQ ID NO: 3577860 - DNA, 25 bp, Homo sapien
ccactcctgcgttttcatctgtgtg

SEQ ID NO: 3577861 - DNA, 25 bp, Homo sapien
tgtgtggatgagctcgtaggagggt

SEQ ID NO: 3577862 - DNA, 25 bp, Homo sapien
tgttgtcccactcctgcgttttcat

SEQ ID NO: 3577863 - DNA, 25 bp, Homo sapien
gggataaccagggatcacgttgtgt

SEQ ID NO: 3577864 - DNA, 25 bp, Homo sapien
cacgttgtgtagctggaatccaaag

SEQ ID NO: 3577865 - DNA, 25 bp, Homo sapien
cagggatcacgttgtgtagctggaa

SEQ ID NO: 3577866 - DNA, 25 bp, Homo sapien
tgtgtagctggaatccaaaggtgag

SEQ ID NO: 3577867 - DNA, 25 bp, Homo sapien
gaattcttctactgctgtcagcaga

SEQ ID NO: 3577868 - DNA, 25 bp, Homo sapien
aaaggaattcttctactgctgtcag

SEQ ID NO: 3577869 - DNA, 25 bp, Homo sapien
tgggggctaccaagtttgggagctg

SEQ ID NO: 3577870 - DNA, 25 bp, Homo sapien
aaggaattcttctactgctgtcagc

SEQ ID NO: 3577871 - DNA, 25 bp, Homo sapien
catacttgtatatcaccctgcggcc

SEQ ID NO: 3577872 - DNA, 25 bp, Homo sapien
catcgtcacagaagagaggcggtca

SEQ ID NO: 3577873 - DNA, 25 bp, Homo sapien
ccttggtggtgtcatagagcgtctc

SEQ ID NO: 3577874 - DNA, 25 bp, Homo sapien
gatgtttctgtagtagcccactgag

SEQ ID NO: 3577875 - DNA, 25 bp, Homo sapien
gtttccatggttctcttgagttatg

SEQ ID NO: 3577876 - DNA, 25 bp, Homo sapien
gagctctccaacaggagtgtcacgg

SEQ ID NO: 3577877 - DNA, 25 bp, Homo sapien
gagacttaaagggacggaatgaatg

SEQ ID NO: 3577878 - DNA, 25 bp, Homo sapien
tgagttatgctccaaccagagctct

SEQ ID NO: 3577879 - DNA, 25 bp, Homo sapien
accatatttgagaagggcatttaag

SEQ ID NO: 3577880 - DNA, 25 bp, Homo sapien
ccatatttgagaagggcatttaagg

SEQ ID NO: 3577881 - DNA, 25 bp, Homo sapien
agcacgaagaccatatttgagaagg

SEQ ID NO: 3577882 - DNA, 25 bp, Homo sapien
cgaagaccatatttgagaagggcat

SEQ ID NO: 3577883 - DNA, 25 bp, Homo sapien
tccagtgagtatttgggcctctact

SEQ ID NO: 3577884 - DNA, 25 bp, Homo sapien
ctgggtctgaaccccgagtcctgct

SEQ ID NO: 3577885 - DNA, 25 bp, Homo sapien
tatttgggcctctactctatcaggc

SEQ ID NO: 3577886 - DNA, 25 bp, Homo sapien
gggtctgaaccccgagtcctgctct

SEQ ID NO: 3577887 - DNA, 25 bp, Homo sapien
tgccatgctatctccctgatccatc

SEQ ID NO: 3577888 - DNA, 25 bp, Homo sapien
atgattggccttctgtatggcaagg

SEQ ID NO: 3577889 - DNA, 25 bp, Homo sapien
atgggtcagatacagcccactgagg

SEQ ID NO: 3577890 - DNA, 25 bp, Homo sapien
ctgatgcctcttgggaccccatgcc

SEQ ID NO: 3577891 - DNA, 25 bp, Homo sapien
tagatcttctctgtgcgtgttacgc

SEQ ID NO: 3577892 - DNA, 25 bp, Homo sapien
cgtgttacgcgatcaaagtccagag

SEQ ID NO: 3577893 - DNA, 25 bp, Homo sapien
tacagaatccgaagggtgaacttgc

SEQ ID NO: 3577894 - DNA, 25 bp, Homo sapien
aagatcctggatgtgatgcggcccg

SEQ ID NO: 3577895 - DNA, 25 bp, Homo sapien
aaaacagtgtggcagatgattccca

SEQ ID NO: 3577896 - DNA, 25 bp, Homo sapien
tcaaacacaattgcagatgcaaaaa

SEQ ID NO: 3577897 - DNA, 25 bp, Homo sapien
ctggggtaatcaaacacaattgcag

SEQ ID NO: 3577898 - DNA, 25 bp, Homo sapien
aaacagtgtggcagatgattcccat

SEQ ID NO: 3577899 - DNA, 25 bp, Homo sapien
tctccctggaggatctctagtgaag

SEQ ID NO: 3577900 - DNA, 25 bp, Homo sapien
tcttttggaaggtcccgctgtgact

SEQ ID NO: 3577901 - DNA, 25 bp, Homo sapien
agacagggcacaggaagatacaggg

SEQ ID NO: 3577902 - DNA, 25 bp, Homo sapien
accaacaatgacagaggccttttta

SEQ ID NO: 3577903 - DNA, 25 bp, Homo sapien
gtgacattcctcttgcccacggtgg

SEQ ID NO: 3577904 - DNA, 25 bp, Homo sapien
gagcctgctctttgcgctggcgcca

SEQ ID NO: 3577905 - DNA, 25 bp, Homo sapien
tccaccaggttgaggccgttgtcga

SEQ ID NO: 3577906 - DNA, 25 bp, Homo sapien
catcggccccgatgtagtagctgtt

SEQ ID NO: 3577907 - DNA, 25 bp, Homo sapien
tatggtgacatcatccttgctggag

SEQ ID NO: 3577908 - DNA, 25 bp, Homo sapien
gaggtctctacctggacatgcactg

SEQ ID NO: 3577909 - DNA, 25 bp, Homo sapien
cagtgtgtagaaggcgcctgaggca

SEQ ID NO: 3577910 - DNA, 25 bp, Homo sapien
gtctgtatcacttcggaaactgctc

SEQ ID NO: 3577911 - DNA, 25 bp, Homo sapien
tgtcaggcggccaaagctgtcgtac

SEQ ID NO: 3577912 - DNA, 25 bp, Homo sapien
tcacatttgtcaggcggccaaagct

SEQ ID NO: 3577913 - DNA, 25 bp, Homo sapien
ggtcacatttgtcaggcggccaaag

SEQ ID NO: 3577914 - DNA, 25 bp, Homo sapien
tttgtcaggcggccaaagctgtcgt

SEQ ID NO: 3577915 - DNA, 25 bp, Homo sapien
gggtggcactgagtagtagaaatat

SEQ ID NO: 3577916 - DNA, 25 bp, Homo sapien
gctggaacttggtgcattctacctc

SEQ ID NO: 3577917 - DNA, 25 bp, Homo sapien
tggctggatacattcccatgtctcc

SEQ ID NO: 3577918 - DNA, 25 bp, Homo sapien
aatataatggtgctctagctggaac

SEQ ID NO: 3577919 - DNA, 25 bp, Homo sapien
tgagggttttcacaatggggcaatg

SEQ ID NO: 3577920 - DNA, 25 bp, Homo sapien
caatggggcaatgaaaggtcagaga

SEQ ID NO: 3577921 - DNA, 25 bp, Homo sapien
gagggttttcacaatggggcaatga

SEQ ID NO: 3577922 - DNA, 25 bp, Homo sapien
ttcacaatggggcaatgaaaggtca

SEQ ID NO: 3577923 - DNA, 25 bp, Homo sapien
ctctttgctgcttgattgatacctg

SEQ ID NO: 3577924 - DNA, 25 bp, Homo sapien
tgtgagccacctctacagaaccctt

SEQ ID NO: 3577925 - DNA, 25 bp, Homo sapien
acctgtaattatcccaccagaactg

SEQ ID NO: 3577926 - DNA, 25 bp, Homo sapien
tggctgcctcaagtcccggccccat

SEQ ID NO: 3577927 - DNA, 25 bp, Homo sapien
ggcttagttacatttgtgacagttt

SEQ ID NO: 3577928 - DNA, 25 bp, Homo sapien
tggcttagttacatttgtgacagtt

SEQ ID NO: 3577929 - DNA, 25 bp, Homo sapien
gtggtttcaggcttgttatctaatc

SEQ ID NO: 3577930 - DNA, 25 bp, Homo sapien
gtgtggtttcaggcttgttatctaa

SEQ ID NO: 3577931 - DNA, 25 bp, Homo sapien
ggtttcaggcttgttatctaatctc

SEQ ID NO: 3577932 - DNA, 25 bp, Homo sapien
tttcaggcttgttatctaatctctc

SEQ ID NO: 3577933 - DNA, 25 bp, Homo sapien
gcttttggttgccagaaggccggaa

SEQ ID NO: 3577934 - DNA, 25 bp, Homo sapien
catcccagtagagtctcggcggaca

SEQ ID NO: 3577935 - DNA, 25 bp, Homo sapien
ccggaattgccatggtatgtcatca

SEQ ID NO: 3577936 - DNA, 25 bp, Homo sapien
caactcgtgtccttgtgtggtcaca

SEQ ID NO: 3577937 - DNA, 25 bp, Homo sapien
gatagagctcctggtcaattggtga

SEQ ID NO: 3577938 - DNA, 25 bp, Homo sapien
gaattcggatgttcccaaggtcggc

SEQ ID NO: 3577939 - DNA, 25 bp, Homo sapien
ggatggccaccttgcttagcaggaa

SEQ ID NO: 3577940 - DNA, 25 bp, Homo sapien
tcgccgtccccagtgtaggtgaagt

SEQ ID NO: 3577941 - DNA, 25 bp, Homo sapien
ttcacactcccctcgctctctgggc

SEQ ID NO: 3577942 - DNA, 25 bp, Homo sapien
ctctctgggcagtgtcgtggcagct

SEQ ID NO: 3577943 - DNA, 25 bp, Homo sapien
ggagcctgcaaactcgccagggccg

SEQ ID NO: 3577944 - DNA, 25 bp, Homo sapien
tctgggcagtgtcgtggcagctttt

SEQ ID NO: 3577945 - DNA, 25 bp, Homo sapien
ttctgcctgtcgttatgatgaaaag

SEQ ID NO: 3577946 - DNA, 25 bp, Homo sapien
gaaaagatcgttccttgatgggaag

SEQ ID NO: 3577947 - DNA, 25 bp, Homo sapien
tcgttatgatgaaaagatcgttcct

SEQ ID NO: 3577948 - DNA, 25 bp, Homo sapien
tatgatgaaaagatcgttccttgat

SEQ ID NO: 3577949 - DNA, 25 bp, Homo sapien
atggggcagcggagtagagaggaag

SEQ ID NO: 3577950 - DNA, 25 bp, Homo sapien
tggggcagcggagtagagaggaagc

SEQ ID NO: 3577951 - DNA, 25 bp, Homo sapien
ggggcagcggagtagagaggaagct

SEQ ID NO: 3577952 - DNA, 25 bp, Homo sapien
gccagtgacacctgcgcaaatgtgt

SEQ ID NO: 3577953 - DNA, 25 bp, Homo sapien
tgaaagccagtgacacctgcgcaaa

SEQ ID NO: 3577954 - DNA, 25 bp, Homo sapien
gaatgaaagccagtgacacctgcgc

SEQ ID NO: 3577955 - DNA, 25 bp, Homo sapien
ctgagaatgaaagccagtgacacct

SEQ ID NO: 3577956 - DNA, 25 bp, Homo sapien
tcgatgcgtctgatcatggtgccat

SEQ ID NO: 3577957 - DNA, 25 bp, Homo sapien
tggtgccatccacgaagtagatcag

SEQ ID NO: 3577958 - DNA, 25 bp, Homo sapien
gatgatcccattctgatcgatgcgt

SEQ ID NO: 3577959 - DNA, 25 bp, Homo sapien
tgagatcattagagccgagcagggt

SEQ ID NO: 3577960 - DNA, 25 bp, Homo sapien
tccccgcagcgagtgtcatcaaagg

SEQ ID NO: 3577961 - DNA, 25 bp, Homo sapien
tgctgtcagaaaggaagacggcccc

SEQ ID NO: 3577962 - DNA, 25 bp, Homo sapien
cttgattttaaagacccgccggctg

SEQ ID NO: 3577963 - DNA, 25 bp, Homo sapien
tgtggccaggtagtatttgtgtgct

SEQ ID NO: 3577964 - DNA, 25 bp, Homo sapien
gacatggccaactggtgagcatttt

SEQ ID NO: 3577965 - DNA, 25 bp, Homo sapien
aagacatggccaactggtgagcatt

SEQ ID NO: 3577966 - DNA, 25 bp, Homo sapien
agacatggccaactggtgagcattt

SEQ ID NO: 3577967 - DNA, 25 bp, Homo sapien
acatggccaactggtgagcattttc

SEQ ID NO: 3577968 - DNA, 25 bp, Homo sapien
tgacagatgtctgtgccagtcagac

SEQ ID NO: 3577969 - DNA, 25 bp, Homo sapien
tcctatgaacctaccgcgtgtgtgc

SEQ ID NO: 3577970 - DNA, 25 bp, Homo sapien
tgcagttgactgacacaaatacgct

SEQ ID NO: 3577971 - DNA, 25 bp, Homo sapien
cacgcgtgcgccttagagtgagatt

SEQ ID NO: 3577972 - DNA, 25 bp, Homo sapien
ggtccttcccggagctctaagcgtg

SEQ ID NO: 3577973 - DNA, 25 bp, Homo sapien
ggtctcatcaggttgcacaagctga

SEQ ID NO: 3577974 - DNA, 25 bp, Homo sapien
tctaagcgtggctgtgctccatcac

SEQ ID NO: 3577975 - DNA, 25 bp, Homo sapien
ggagcttggcgcaattcctcttgaa

SEQ ID NO: 3577976 - DNA, 25 bp, Homo sapien
gaggctcccgtcagagccacaggtg

SEQ ID NO: 3577977 - DNA, 25 bp, Homo sapien
atgctcccaatgacaggaggctgct

SEQ ID NO: 3577978 - DNA, 25 bp, Homo sapien
aggagatgcttctccggcgcccatt

SEQ ID NO: 3577979 - DNA, 25 bp, Homo sapien
tctaatgtagttgaaatcacccaca

SEQ ID NO: 3577980 - DNA, 25 bp, Homo sapien
cctgattttgcaaggcatgcaagat

SEQ ID NO: 3577981 - DNA, 25 bp, Homo sapien
gacaaggaaagaacagaattgcctg

SEQ ID NO: 3577982 - DNA, 25 bp, Homo sapien
ggacaaggaaagaacagaattgcct

SEQ ID NO: 3577983 - DNA, 25 bp, Homo sapien
gagtcacctgattttgcaaggcatg

SEQ ID NO: 3577984 - DNA, 25 bp, Homo sapien
caagtaattctattaatccacttac

SEQ ID NO: 3577985 - DNA, 25 bp, Homo sapien
tcaagtaattctattaatccactta

SEQ ID NO: 3577986 - DNA, 25 bp, Homo sapien
tcccacaggattagatctgggcagg

SEQ ID NO: 3577987 - DNA, 25 bp, Homo sapien
gtcaatttcatagccctgcagcact

SEQ ID NO: 3577988 - DNA, 25 bp, Homo sapien
ctgggcaggattcatattcataacc

SEQ ID NO: 3577989 - DNA, 25 bp, Homo sapien
tctaggctccatcctccaagcttgg

SEQ ID NO: 3577990 - DNA, 25 bp, Homo sapien
gtgacagaatgaggcaaaatgcata

SEQ ID NO: 3577991 - DNA, 25 bp, Homo sapien
aaatgcataagtgagcaaagcccac

SEQ ID NO: 3577992 - DNA, 25 bp, Homo sapien
cactctttggcctttagacctgtag

SEQ ID NO: 3577993 - DNA, 25 bp, Homo sapien
tttagacctgtaggcaaggcccctg

SEQ ID NO: 3577994 - DNA, 25 bp, Homo sapien
tcatcatggtgagcgagttctcctg

SEQ ID NO: 3577995 - DNA, 25 bp, Homo sapien
gtggattctcatgaacggcttggca

SEQ ID NO: 3577996 - DNA, 25 bp, Homo sapien
catcatggtgagcgagttctcctga

SEQ ID NO: 3577997 - DNA, 25 bp, Homo sapien
ggattctcatgaacggcttggcacc

SEQ ID NO: 3577998 - DNA, 25 bp, Homo sapien
tgtagcctcattgtaatggtcgggt

SEQ ID NO: 3577999 - DNA, 25 bp, Homo sapien
tggtcgggttttctacattcaggtc

SEQ ID NO: 3578000 - DNA, 25 bp, Homo sapien
tttggttctgtagcctcattgtaat

SEQ ID NO: 3578001 - DNA, 25 bp, Homo sapien
cattgtaatggtcgggttttctaca

SEQ ID NO: 3578002 - DNA, 25 bp, Homo sapien
ttctgaaagcccaaacaccttctgg

SEQ ID NO: 3578003 - DNA, 25 bp, Homo sapien
tgcagccagagatagagatttcctc

SEQ ID NO: 3578004 - DNA, 25 bp, Homo sapien
tagacgtctgtcttgtcccaaatga

SEQ ID NO: 3578005 - DNA, 25 bp, Homo sapien
tgatcctcaggacagatttgtagcc

SEQ ID NO: 3578006 - DNA, 25 bp, Homo sapien
cataacaggctgatgggacctgacc

SEQ ID NO: 3578007 - DNA, 25 bp, Homo sapien
tgacccaagccctacagaggtgttt

SEQ ID NO: 3578008 - DNA, 25 bp, Homo sapien
ttagtataaaccagagtgtgccagg

SEQ ID NO: 3578009 - DNA, 25 bp, Homo sapien
catggtggaatgcaattaggaaagc

SEQ ID NO: 3578010 - DNA, 25 bp, Homo sapien
tgacaaagaagcgatcccatggcag

SEQ ID NO: 3578011 - DNA, 25 bp, Homo sapien
caggatgatggagatgccgccattt

SEQ ID NO: 3578012 - DNA, 25 bp, Homo sapien
tctcctcatgtctcatgatgatggt

SEQ ID NO: 3578013 - DNA, 25 bp, Homo sapien
tgtgtgatgaaaggtgcccgctcga

SEQ ID NO: 3578014 - DNA, 25 bp, Homo sapien
gactctgataaatccaccatgtggg

SEQ ID NO: 3578015 - DNA, 25 bp, Homo sapien
tctgtcacaccctggctgtagtagg

SEQ ID NO: 3578016 - DNA, 25 bp, Homo sapien
taaatctaaggttcatctgggcagt

SEQ ID NO: 3578017 - DNA, 25 bp, Homo sapien
gactgaaaggattccgcatggaacc

SEQ ID NO: 3578018 - DNA, 25 bp, Homo sapien
tcacttggccacgaataacacaagc

SEQ ID NO: 3578019 - DNA, 25 bp, Homo sapien
acttggccacgaataacacaagcat

SEQ ID NO: 3578020 - DNA, 25 bp, Homo sapien
tcatcacttggccacgaataacaca

SEQ ID NO: 3578021 - DNA, 25 bp, Homo sapien
ccaaccaggggggttccatctgatg

SEQ ID NO: 3578022 - DNA, 25 bp, Homo sapien
tccgcagtggaagactgccttaact

SEQ ID NO: 3578023 - DNA, 25 bp, Homo sapien
cctacactgagggttgggcactcgc

SEQ ID NO: 3578024 - DNA, 25 bp, Homo sapien
atagttgctgctttgaacgtagaac

SEQ ID NO: 3578025 - DNA, 25 bp, Homo sapien
gggcactcgctcagggctggagatg

SEQ ID NO: 3578026 - DNA, 25 bp, Homo sapien
ggcctgactgaggtgcccttgccga

SEQ ID NO: 3578027 - DNA, 25 bp, Homo sapien
agggcctgactgaggtgcccttgcc

SEQ ID NO: 3578028 - DNA, 25 bp, Homo sapien
ccgacgccaacaagggaaaagatct

SEQ ID NO: 3578029 - DNA, 25 bp, Homo sapien
ggtgcccttgccgacgccaacaagg

SEQ ID NO: 3578030 - DNA, 25 bp, Homo sapien
tacaggtgaggtcagtgatatctga

SEQ ID NO: 3578031 - DNA, 25 bp, Homo sapien
tgatatctgaaggtggggcatccct

SEQ ID NO: 3578032 - DNA, 25 bp, Homo sapien
aagttacaggggtcttctgagtgac

SEQ ID NO: 3578033 - DNA, 25 bp, Homo sapien
tccacgttcctcatgtacaggtgag

SEQ ID NO: 3578034 - DNA, 25 bp, Homo sapien
ggtgccgtgacaccacctggggcca

SEQ ID NO: 3578035 - DNA, 25 bp, Homo sapien
gtgccgtgacaccacctggggccat

SEQ ID NO: 3578036 - DNA, 25 bp, Homo sapien
taacagcaagatggcccagcactta

SEQ ID NO: 3578037 - DNA, 25 bp, Homo sapien
aacagcaagatggcccagcacttac

SEQ ID NO: 3578038 - DNA, 25 bp, Homo sapien
ctaacagcaagatggcccagcactt

SEQ ID NO: 3578039 - DNA, 25 bp, Homo sapien
tccttcagacaccaagggagcgtga

SEQ ID NO: 3578040 - DNA, 25 bp, Homo sapien
gacaccaagggagcgtgagctccca

SEQ ID NO: 3578041 - DNA, 25 bp, Homo sapien
tgtggcctcctagctaagcatggct

SEQ ID NO: 3578042 - DNA, 25 bp, Homo sapien
cctgaggctgtgcttcccgcagagc

SEQ ID NO: 3578043 - DNA, 25 bp, Homo sapien
gcagggtggaattagtgaccccaca

SEQ ID NO: 3578044 - DNA, 25 bp, Homo sapien
cagaggaggagttgttagctgctca

SEQ ID NO: 3578045 - DNA, 25 bp, Homo sapien
ggacaactaggaacaagctcaagct

SEQ ID NO: 3578046 - DNA, 25 bp, Homo sapien
gggaggaagttgagtctcaccagcc

SEQ ID NO: 3578047 - DNA, 25 bp, Homo sapien
tggctcatggcgcttaagcagcagg

SEQ ID NO: 3578048 - DNA, 25 bp, Homo sapien
ctccttgaggccagtcagacttgct

SEQ ID NO: 3578049 - DNA, 25 bp, Homo sapien
aacaataccgagacctgtgtgcagg

SEQ ID NO: 3578050 - DNA, 25 bp, Homo sapien
ccaggaggacatacaggagacgtgt

SEQ ID NO: 3578051 - DNA, 25 bp, Homo sapien
ggattatgtgcgtgctgtccctgcc

SEQ ID NO: 3578052 - DNA, 25 bp, Homo sapien
tcctggatgatgtccagagggttag

SEQ ID NO: 3578053 - DNA, 25 bp, Homo sapien
ccctgcccacgaggaacttgatgcg

SEQ ID NO: 3578054 - DNA, 25 bp, Homo sapien
tcatagaaggagtgtaggttctgct

SEQ ID NO: 3578055 - DNA, 25 bp, Homo sapien
tgtcttctccagcagtcggcagcct

SEQ ID NO: 3578056 - DNA, 25 bp, Homo sapien
ctgtcttctccagcagtcggcagcc

SEQ ID NO: 3578057 - DNA, 25 bp, Homo sapien
gtcttctccagcagtcggcagcctc

SEQ ID NO: 3578058 - DNA, 25 bp, Homo sapien
tctgagtaagtactcacactacact

SEQ ID NO: 3578059 - DNA, 25 bp, Homo sapien
agttattacgctctcgtaagccttg

SEQ ID NO: 3578060 - DNA, 25 bp, Homo sapien
cgtaagccttgtggtactgctgcag

SEQ ID NO: 3578061 - DNA, 25 bp, Homo sapien
tgcagcctatttaaatctgagtaag

SEQ ID NO: 3578062 - DNA, 25 bp, Homo sapien
cctggcacttggggacagtccactc

SEQ ID NO: 3578063 - DNA, 25 bp, Homo sapien
actctctatggttgtttcatctatg

SEQ ID NO: 3578064 - DNA, 25 bp, Homo sapien
ttccccttggctcccgcagtgggtg

SEQ ID NO: 3578065 - DNA, 25 bp, Homo sapien
cagtccactctctatggttgtttca

SEQ ID NO: 3578066 - DNA, 25 bp, Homo sapien
ggttgatcttttccacttcctactg

SEQ ID NO: 3578067 - DNA, 25 bp, Homo sapien
acatgctccaaaaatgcaagtggca

SEQ ID NO: 3578068 - DNA, 25 bp, Homo sapien
gctgaaggaggctctattcccctgg

SEQ ID NO: 3578069 - DNA, 25 bp, Homo sapien
ctggctcatctctcagaacagctga

SEQ ID NO: 3578070 - DNA, 25 bp, Homo sapien
ccgcctggagcccatgggtgccaga

SEQ ID NO: 3578071 - DNA, 25 bp, Homo sapien
tggagccgcctggagcccatgggtg

SEQ ID NO: 3578072 - DNA, 25 bp, Homo sapien
cctctggagccgcctggagcccatg

SEQ ID NO: 3578073 - DNA, 25 bp, Homo sapien
agccgcctggagcccatgggtgcca

SEQ ID NO: 3578074 - DNA, 25 bp, Homo sapien
cagacgcagtgccaaccattcaggt

SEQ ID NO: 3578075 - DNA, 25 bp, Homo sapien
cattcaggtctaaggtacatctgcc

SEQ ID NO: 3578076 - DNA, 25 bp, Homo sapien
tacatctgccgttgccattgcacaa

SEQ ID NO: 3578077 - DNA, 25 bp, Homo sapien
agcccagctggcagacgcagtgcca

SEQ ID NO: 3578078 - DNA, 25 bp, Homo sapien
tgaaagacaaagtacagggttgagg

SEQ ID NO: 3578079 - DNA, 25 bp, Homo sapien
ctgaaagacaaagtacagggttgag

SEQ ID NO: 3578080 - DNA, 25 bp, Homo sapien
aggataatcacacccccattagcca

SEQ ID NO: 3578081 - DNA, 25 bp, Homo sapien
ccagccatttgcttccaggataatc

SEQ ID NO: 3578082 - DNA, 25 bp, Homo sapien
ccatttgcttccaggataatcacac

SEQ ID NO: 3578083 - DNA, 25 bp, Homo sapien
gccatttgcttccaggataatcaca

SEQ ID NO: 3578084 - DNA, 25 bp, Homo sapien
gatgacttgctgactttcttaaagc

SEQ ID NO: 3578085 - DNA, 25 bp, Homo sapien
aggatgacttgctgactttcttaaa

SEQ ID NO: 3578086 - DNA, 25 bp, Homo sapien
gacttgctgactttcttaaagcaat

SEQ ID NO: 3578087 - DNA, 25 bp, Homo sapien
agcaatatgcccgtccttacccact

SEQ ID NO: 3578088 - DNA, 25 bp, Homo sapien
ctttaactaccctatccagatagtg

SEQ ID NO: 3578089 - DNA, 25 bp, Homo sapien
ttaactaccctatccagatagtgag

SEQ ID NO: 3578090 - DNA, 25 bp, Homo sapien
tttaactaccctatccagatagtga

SEQ ID NO: 3578091 - DNA, 25 bp, Homo sapien
tgggttggcggttctagtcatctga

SEQ ID NO: 3578092 - DNA, 25 bp, Homo sapien
ctcagggcaactcgaacggctgcat

SEQ ID NO: 3578093 - DNA, 25 bp, Homo sapien
gaaacaaggatcactacagcaggtg

SEQ ID NO: 3578094 - DNA, 25 bp, Homo sapien
gcatcattggtacatgttaggccac

SEQ ID NO: 3578095 - DNA, 25 bp, Homo sapien
tcaacaagaaaaggatgggaccatt

SEQ ID NO: 3578096 - DNA, 25 bp, Homo sapien
gaaaatgctcaccacacaatgagag

SEQ ID NO: 3578097 - DNA, 25 bp, Homo sapien
ttcagctgagccactatgactagtc

SEQ ID NO: 3578098 - DNA, 25 bp, Homo sapien
catgcaggaaaattagacaaggacg

SEQ ID NO: 3578099 - DNA, 25 bp, Homo sapien
atgacatttctttggtatttaggac

SEQ ID NO: 3578100 - DNA, 25 bp, Homo sapien
tatgacatttctttggtatttagga

SEQ ID NO: 3578101 - DNA, 25 bp, Homo sapien
tgacatttctttggtatttaggacc

SEQ ID NO: 3578102 - DNA, 25 bp, Homo sapien
ctatgacatttctttggtatttagg

SEQ ID NO: 3578103 - DNA, 25 bp, Homo sapien
tggaggggaaaaggtatctgcatcc

SEQ ID NO: 3578104 - DNA, 25 bp, Homo sapien
ctggaggggaaaaggtatctgcatc

SEQ ID NO: 3578105 - DNA, 25 bp, Homo sapien
tctggaggggaaaaggtatctgcat

SEQ ID NO: 3578106 - DNA, 25 bp, Homo sapien
gaggggaaaaggtatctgcatcccc

SEQ ID NO: 3578107 - DNA, 25 bp, Homo sapien
gtggatggtttgacttcttggcatc

SEQ ID NO: 3578108 - DNA, 25 bp, Homo sapien
tagaagagcgacaacagagcataca

SEQ ID NO: 3578109 - DNA, 25 bp, Homo sapien
aagagcgacaacagagcatacaggg

SEQ ID NO: 3578110 - DNA, 25 bp, Homo sapien
gtagaagtggatggtttgacttctt

SEQ ID NO: 3578111 - DNA, 25 bp, Homo sapien
accaaggatacaaactaatgttagg

SEQ ID NO: 3578112 - DNA, 25 bp, Homo sapien
aggatacaaactaatgttaggcttc

SEQ ID NO: 3578113 - DNA, 25 bp, Homo sapien
gatacaaactaatgttaggcttcaa

SEQ ID NO: 3578114 - DNA, 25 bp, Homo sapien
caaggatacaaactaatgttaggct

SEQ ID NO: 3578115 - DNA, 25 bp, Homo sapien
ggtgagtgctcattccaggataata

SEQ ID NO: 3578116 - DNA, 25 bp, Homo sapien
taataaaccaagcaaaacgtctggc

SEQ ID NO: 3578117 - DNA, 25 bp, Homo sapien
taatggctgcatgtactgggcactc

SEQ ID NO: 3578118 - DNA, 25 bp, Homo sapien
gatcccaggcctaatggactccaga

SEQ ID NO: 3578119 - DNA, 25 bp, Homo sapien
ccttggaggagctaaagagcaaggt

SEQ ID NO: 3578120 - DNA, 25 bp, Homo sapien
accgcatgtagccttggaggagcta

SEQ ID NO: 3578121 - DNA, 25 bp, Homo sapien
agatccataccgcatgtagccttgg

SEQ ID NO: 3578122 - DNA, 25 bp, Homo sapien
cctgacacagatccataccgcatgt

SEQ ID NO: 3578123 - DNA, 25 bp, Homo sapien
gagtttaaatccaaccgatggctag

SEQ ID NO: 3578124 - DNA, 25 bp, Homo sapien
taccaaatcgtgagtttaaatccaa

SEQ ID NO: 3578125 - DNA, 25 bp, Homo sapien
tggctaggaaatgccagtcataata

SEQ ID NO: 3578126 - DNA, 25 bp, Homo sapien
tggaaattgggagtaataaggttga

SEQ ID NO: 3578127 - DNA, 25 bp, Homo sapien
ccccatccccacatgcgatgagggc

SEQ ID NO: 3578128 - DNA, 25 bp, Homo sapien
aggctggccctgaaatgccccaaca

SEQ ID NO: 3578129 - DNA, 25 bp, Homo sapien
ctgaaatgccccaacagacaaagat

SEQ ID NO: 3578130 - DNA, 25 bp, Homo sapien
atccccacatgcgatgagggcccag

SEQ ID NO: 3578131 - DNA, 25 bp, Homo sapien
ttgccgtcgcggcaggtcccatgct

SEQ ID NO: 3578132 - DNA, 25 bp, Homo sapien
tgcagtgttcgccattccagccagg

SEQ ID NO: 3578133 - DNA, 25 bp, Homo sapien
agggctgcactcgcacttgccgtcg

SEQ ID NO: 3578134 - DNA, 25 bp, Homo sapien
atggccaccacagtcggcagcacag

SEQ ID NO: 3578135 - DNA, 25 bp, Homo sapien
gtccctgcctttgtgcttgcccctt

SEQ ID NO: 3578136 - DNA, 25 bp, Homo sapien
ctccaagaaccatctaaatggggtt

SEQ ID NO: 3578137 - DNA, 25 bp, Homo sapien
aactccaagaaccatctaaatgggg

SEQ ID NO: 3578138 - DNA, 25 bp, Homo sapien
caagaaccatctaaatggggtttca

SEQ ID NO: 3578139 - DNA, 25 bp, Homo sapien
caactccaagaaccatctaaatggg

SEQ ID NO: 3578140 - DNA, 25 bp, Homo sapien
ccaggagaggctaaagatcaggagc

SEQ ID NO: 3578141 - DNA, 25 bp, Homo sapien
gggagggcccaggagaggctaaaga

SEQ ID NO: 3578142 - DNA, 25 bp, Homo sapien
aagtacaagaactgcagctgggagg

SEQ ID NO: 3578143 - DNA, 25 bp, Homo sapien
agggcccaggagaggctaaagatca

SEQ ID NO: 3578144 - DNA, 25 bp, Homo sapien
cagatctctggctggtgacaacctt

SEQ ID NO: 3578145 - DNA, 25 bp, Homo sapien
ccattactggccaagttcactgctt

SEQ ID NO: 3578146 - DNA, 25 bp, Homo sapien
cctttcagggtctggctcacagatc

SEQ ID NO: 3578147 - DNA, 25 bp, Homo sapien
actgcttctgcttttgtgctcccaa

SEQ ID NO: 3578148 - DNA, 25 bp, Homo sapien
gaacactggtctaagcatgtggccc

SEQ ID NO: 3578149 - DNA, 25 bp, Homo sapien
tagaacagtcgtgtccagtccagct

SEQ ID NO: 3578150 - DNA, 25 bp, Homo sapien
agtggcattcgcctctcacgcagac

SEQ ID NO: 3578151 - DNA, 25 bp, Homo sapien
ggaaggttccgtggcctgaacactg

SEQ ID NO: 3578152 - DNA, 25 bp, Homo sapien
tcagatcttggaacctcagaaggat

SEQ ID NO: 3578153 - DNA, 25 bp, Homo sapien
ttccaatttgacaggaaacaactca

SEQ ID NO: 3578154 - DNA, 25 bp, Homo sapien
ggcccattaggcttctgtgacaatc

SEQ ID NO: 3578155 - DNA, 25 bp, Homo sapien
acaatcccctagacccagagagctt

SEQ ID NO: 3578156 - DNA, 25 bp, Homo sapien
aaagaggtggtaggtagactctgcc

SEQ ID NO: 3578157 - DNA, 25 bp, Homo sapien
gtaggtagactctgcctctgccttt

SEQ ID NO: 3578158 - DNA, 25 bp, Homo sapien
tgccacaatgatgctctgccaaaga

SEQ ID NO: 3578159 - DNA, 25 bp, Homo sapien
tctgccaaagaggtggtaggtagac

SEQ ID NO: 3578160 - DNA, 25 bp, Homo sapien
tacactggttggtgggcacatcgca

SEQ ID NO: 3578161 - DNA, 25 bp, Homo sapien
tctcgcccttgtagccagggttgca

SEQ ID NO: 3578162 - DNA, 25 bp, Homo sapien
tgggcacatcgcactcagcgccttt

SEQ ID NO: 3578163 - DNA, 25 bp, Homo sapien
tgcaggccacatcgatacactggtt

SEQ ID NO: 3578164 - DNA, 25 bp, Homo sapien
tctggagaatggcccttggaaaccc

SEQ ID NO: 3578165 - DNA, 25 bp, Homo sapien
tggaaacccttctcgtgggcatcag

SEQ ID NO: 3578166 - DNA, 25 bp, Homo sapien
ctctgagaagtagaagtgagctgcc

SEQ ID NO: 3578167 - DNA, 25 bp, Homo sapien
ccagagctccaatgcagagttctca

SEQ ID NO: 3578168 - DNA, 25 bp, Homo sapien
ttgctggggcagttatccaccgact

SEQ ID NO: 3578169 - DNA, 25 bp, Homo sapien
ctctgccacagtcggggcccaggaa

SEQ ID NO: 3578170 - DNA, 25 bp, Homo sapien
aagcagtggcaggtcccagagatgc

SEQ ID NO: 3578171 - DNA, 25 bp, Homo sapien
gcagtcaccattgccatagcagttg

SEQ ID NO: 3578172 - DNA, 25 bp, Homo sapien
caggaatcaagctttaggttagcca

SEQ ID NO: 3578173 - DNA, 25 bp, Homo sapien
tcaagctttaggttagccaagaccc

SEQ ID NO: 3578174 - DNA, 25 bp, Homo sapien
agctttaggttagccaagacccaca

SEQ ID NO: 3578175 - DNA, 25 bp, Homo sapien
gaatcaagctttaggttagccaaga

SEQ ID NO: 3578176 - DNA, 25 bp, Homo sapien
tgctttgctcatgttcacactgcag

SEQ ID NO: 3578177 - DNA, 25 bp, Homo sapien
tttgctcatgttcacactgcagctg

SEQ ID NO: 3578178 - DNA, 25 bp, Homo sapien
cctgctttgctcatgttcacactgc

SEQ ID NO: 3578179 - DNA, 25 bp, Homo sapien
gctttgctcatgttcacactgcagc

SEQ ID NO: 3578180 - DNA, 25 bp, Homo sapien
gcccaattgcctccttaactgtctc

SEQ ID NO: 3578181 - DNA, 25 bp, Homo sapien
aactgtctcacaggggcagtaatat

SEQ ID NO: 3578182 - DNA, 25 bp, Homo sapien
caggggcagtaatatcagtaaaggg

SEQ ID NO: 3578183 - DNA, 25 bp, Homo sapien
cccaattgcctccttaactgtctca

SEQ ID NO: 3578184 - DNA, 25 bp, Homo sapien
cttgccttgctctgagtgggcaaac

SEQ ID NO: 3578185 - DNA, 25 bp, Homo sapien
acctctgtggacgtgcgagcttgat

SEQ ID NO: 3578186 - DNA, 25 bp, Homo sapien
gccttgctctgagtgggcaaacctc

SEQ ID NO: 3578187 - DNA, 25 bp, Homo sapien
gtgcgagcttgatgccggactccag

SEQ ID NO: 3578188 - DNA, 25 bp, Homo sapien
ggcccactcgacactctcattctct

SEQ ID NO: 3578189 - DNA, 25 bp, Homo sapien
aaggcccactcgacactctcattct

SEQ ID NO: 3578190 - DNA, 25 bp, Homo sapien
gtcaaggcccactcgacactctcat

SEQ ID NO: 3578191 - DNA, 25 bp, Homo sapien
aggtcaaggcccactcgacactctc

SEQ ID NO: 3578192 - DNA, 25 bp, Homo sapien
tgcccataacagaagcttctagctt

SEQ ID NO: 3578193 - DNA, 25 bp, Homo sapien
aagctgccgataagaagttcatgcc

SEQ ID NO: 3578194 - DNA, 25 bp, Homo sapien
gggaaaaacatcagtgatgcctgac

SEQ ID NO: 3578195 - DNA, 25 bp, Homo sapien
tcattccctcaaagctgccgataag

SEQ ID NO: 3578196 - DNA, 25 bp, Homo sapien
ggaagttactggagttggattcgaa

SEQ ID NO: 3578197 - DNA, 25 bp, Homo sapien
caaataatgatcctttccagccagt

SEQ ID NO: 3578198 - DNA, 25 bp, Homo sapien
tcttgctaggtgttcactgaccctc

SEQ ID NO: 3578199 - DNA, 25 bp, Homo sapien
gattcgaagactcggctttatgttg

SEQ ID NO: 3578200 - DNA, 25 bp, Homo sapien
aactgggagctgaggccctcttcca

SEQ ID NO: 3578201 - DNA, 25 bp, Homo sapien
gggctcagggtgaactgggagctga

SEQ ID NO: 3578202 - DNA, 25 bp, Homo sapien
ggtgaactgggagctgaggccctct

SEQ ID NO: 3578203 - DNA, 25 bp, Homo sapien
tgaactgggagctgaggccctcttc

SEQ ID NO: 3578204 - DNA, 25 bp, Homo sapien
caaaagagacaatatcccacagccc

SEQ ID NO: 3578205 - DNA, 25 bp, Homo sapien
gagacaatatcccacagcccccaga

SEQ ID NO: 3578206 - DNA, 25 bp, Homo sapien
gcccccagagggtgtggctccctta

SEQ ID NO: 3578207 - DNA, 25 bp, Homo sapien
agcccccagagggtgtggctccctt

SEQ ID NO: 3578208 - DNA, 25 bp, Homo sapien
ggatgaagcctgtctcatggctgga

SEQ ID NO: 3578209 - DNA, 25 bp, Homo sapien
tcctgggttaggagcctcctgccat

SEQ ID NO: 3578210 - DNA, 25 bp, Homo sapien
gaatccaaatactggatgaagcctg

SEQ ID NO: 3578211 - DNA, 25 bp, Homo sapien
cgtcattgtaaaaagccaagtgcca

SEQ ID NO: 3578212 - DNA, 25 bp, Homo sapien
gaaagcacagttagcagtgggtctg

SEQ ID NO: 3578213 - DNA, 25 bp, Homo sapien
gacagagaaagcacagttagcagtg

SEQ ID NO: 3578214 - DNA, 25 bp, Homo sapien
caccacgcaccagcgtccttcccgg

SEQ ID NO: 3578215 - DNA, 25 bp, Homo sapien
agcagtgggtctgttccaccacgca

SEQ ID NO: 3578216 - DNA, 25 bp, Homo sapien
ggcaggaccttgcacaagtgtctgt

SEQ ID NO: 3578217 - DNA, 25 bp, Homo sapien
aagtgtctgttcttcattaatcatg

SEQ ID NO: 3578218 - DNA, 25 bp, Homo sapien
tcatgattggtaatatgtcagtcat

SEQ ID NO: 3578219 - DNA, 25 bp, Homo sapien
cagggctggcaggaccttgcacaag

SEQ ID NO: 3578220 - DNA, 25 bp, Homo sapien
taggagcccatgcagatcaacaggg

SEQ ID NO: 3578221 - DNA, 25 bp, Homo sapien
taagatttgaggtaggagcccatgc

SEQ ID NO: 3578222 - DNA, 25 bp, Homo sapien
gaggtaggagcccatgcagatcaac

SEQ ID NO: 3578223 - DNA, 25 bp, Homo sapien
cagatcaacagggtatgtggggttc

SEQ ID NO: 3578224 - DNA, 25 bp, Homo sapien
tccagaaagtgccaggaggaatctt

SEQ ID NO: 3578225 - DNA, 25 bp, Homo sapien
aatttctccagaatctatgaaactg

SEQ ID NO: 3578226 - DNA, 25 bp, Homo sapien
ggaatcttctgggaagctcgccttc

SEQ ID NO: 3578227 - DNA, 25 bp, Homo sapien
cattgaatttcagatgcacaggatg

SEQ ID NO: 3578228 - DNA, 25 bp, Homo sapien
tccatttgcatcagtaatgacagat

SEQ ID NO: 3578229 - DNA, 25 bp, Homo sapien
gcacagtgctgcattgaaggcattt

SEQ ID NO: 3578230 - DNA, 25 bp, Homo sapien
ctggtttccagtctgacgtattttt

SEQ ID NO: 3578231 - DNA, 25 bp, Homo sapien
ttgcatcagtaatgacagataatcc

SEQ ID NO: 3578232 - DNA, 25 bp, Homo sapien
aacacggacaacgcagcaaccctac

SEQ ID NO: 3578233 - DNA, 25 bp, Homo sapien
agggagacgtcggttggcacaggcc

SEQ ID NO: 3578234 - DNA, 25 bp, Homo sapien
ctttgcctttcctgtcaggggtctc

SEQ ID NO: 3578235 - DNA, 25 bp, Homo sapien
gggtatagggagacgtcggttggca

SEQ ID NO: 3578236 - DNA, 25 bp, Homo sapien
tctctaagccagtgccccctgaggg

SEQ ID NO: 3578237 - DNA, 25 bp, Homo sapien
gctggctgtgtcctccgtgatctca

SEQ ID NO: 3578238 - DNA, 25 bp, Homo sapien
gccagtttaggccaaacaggtgcat

SEQ ID NO: 3578239 - DNA, 25 bp, Homo sapien
gtgtcctccgtgatctcatacatct

SEQ ID NO: 3578240 - DNA, 25 bp, Homo sapien
cctccatcggctgcaggtgccagtt

SEQ ID NO: 3578241 - DNA, 25 bp, Homo sapien
caaaacagagataagtagtacatat

SEQ ID NO: 3578242 - DNA, 25 bp, Homo sapien
cattttatagattaggtgcctcaaa

SEQ ID NO: 3578243 - DNA, 25 bp, Homo sapien
taagttagatagtattagtaactcc

SEQ ID NO: 3578244 - DNA, 25 bp, Homo sapien
cattcaaactcacaactctttaagt

SEQ ID NO: 3578245 - DNA, 25 bp, Homo sapien
gaaagctgcgtttactccacaccta

SEQ ID NO: 3578246 - DNA, 25 bp, Homo sapien
cagaggcagtgacgctagcttatct

SEQ ID NO: 3578247 - DNA, 25 bp, Homo sapien
taggctgttcggtcttccagaaagc

SEQ ID NO: 3578248 - DNA, 25 bp, Homo sapien
tcccacagggataggttcaaactcc

SEQ ID NO: 3578249 - DNA, 25 bp, Homo sapien
ggagagtacactgtgctggacgtca

SEQ ID NO: 3578250 - DNA, 25 bp, Homo sapien
tgagatgacgatggcgctcagggct

SEQ ID NO: 3578251 - DNA, 25 bp, Homo sapien
tccagttacagtacttggagggctt

SEQ ID NO: 3578252 - DNA, 25 bp, Homo sapien
tcagggctgcgcacttccagttaca

SEQ ID NO: 3578253 - DNA, 25 bp, Homo sapien
cgggaggcgccgagaatgtccatct

SEQ ID NO: 3578254 - DNA, 25 bp, Homo sapien
cactgtaagccccatcatggcggga

SEQ ID NO: 3578255 - DNA, 25 bp, Homo sapien
tgtccctaggaatggctgcttgcct

SEQ ID NO: 3578256 - DNA, 25 bp, Homo sapien
tcaatgaggttgtcctgcaatgtcc

SEQ ID NO: 3578257 - DNA, 25 bp, Homo sapien
gagctgggaccacctttacaactca

SEQ ID NO: 3578258 - DNA, 25 bp, Homo sapien
tttgagcaatggatgtgggaagata

SEQ ID NO: 3578259 - DNA, 25 bp, Homo sapien
accattaggaaaaccgccttgctgc

SEQ ID NO: 3578260 - DNA, 25 bp, Homo sapien
agaaagacaggagacgtgagctggg

SEQ ID NO: 3578261 - DNA, 25 bp, Homo sapien
cagaataggaagttctaacttgatc

SEQ ID NO: 3578262 - DNA, 25 bp, Homo sapien
actcagaataggaagttctaacttg

SEQ ID NO: 3578263 - DNA, 25 bp, Homo sapien
tcagaataggaagttctaacttgat

SEQ ID NO: 3578264 - DNA, 25 bp, Homo sapien
ctcagaataggaagttctaacttga

SEQ ID NO: 3578265 - DNA, 25 bp, Homo sapien
tcagaaccatcgattagtggctggc

SEQ ID NO: 3578266 - DNA, 25 bp, Homo sapien
tccaagcagagggagtggtgactgt

SEQ ID NO: 3578267 - DNA, 25 bp, Homo sapien
ggtccatgcagagcatcagaaccat

SEQ ID NO: 3578268 - DNA, 25 bp, Homo sapien
ccatcgattagtggctggcttcttc

SEQ ID NO: 3578269 - DNA, 25 bp, Homo sapien
tgctttcggaaaaacaattctacag

SEQ ID NO: 3578270 - DNA, 25 bp, Homo sapien
gagatctgattaagctaccctgggc

SEQ ID NO: 3578271 - DNA, 25 bp, Homo sapien
tactctgttactgatgaggcacaca

SEQ ID NO: 3578272 - DNA, 25 bp, Homo sapien
ggcaggctgacacacaattatccta

SEQ ID NO: 3578273 - DNA, 25 bp, Homo sapien
tcaaggagactgatgtccctgagct

SEQ ID NO: 3578274 - DNA, 25 bp, Homo sapien
ggagactgatgtccctgagctgaca

SEQ ID NO: 3578275 - DNA, 25 bp, Homo sapien
aggagactgatgtccctgagctgac

SEQ ID NO: 3578276 - DNA, 25 bp, Homo sapien
agactgatgtccctgagctgacaaa

SEQ ID NO: 3578277 - DNA, 25 bp, Homo sapien
gctctccggagagcgagtggtccgt

SEQ ID NO: 3578278 - DNA, 25 bp, Homo sapien
tgttgctgttgagcagccagttctc

SEQ ID NO: 3578279 - DNA, 25 bp, Homo sapien
tgccccggttcagggagttaatgga

SEQ ID NO: 3578280 - DNA, 25 bp, Homo sapien
ttgctcctcggcgtgaagttgcccc

SEQ ID NO: 3578281 - DNA, 25 bp, Homo sapien
ctagggcacaaacatggcggtcagc

SEQ ID NO: 3578282 - DNA, 25 bp, Homo sapien
acaaacatggcggtcagcggcggtg

SEQ ID NO: 3578283 - DNA, 25 bp, Homo sapien
tagggcacaaacatggcggtcagcg

SEQ ID NO: 3578284 - DNA, 25 bp, Homo sapien
acatggcggtcagcggcggtgagct

SEQ ID NO: 3578285 - DNA, 25 bp, Homo sapien
tgcagttctgtagtgctggaccaga

SEQ ID NO: 3578286 - DNA, 25 bp, Homo sapien
tgacagaatgtgaatggtactccct

SEQ ID NO: 3578287 - DNA, 25 bp, Homo sapien
ccagaagggaactagcaaggatgtt

SEQ ID NO: 3578288 - DNA, 25 bp, Homo sapien
ggtactccctgaagatatgcagttc

SEQ ID NO: 3578289 - DNA, 25 bp, Homo sapien
ccaatttataccctcttcttacaga

SEQ ID NO: 3578290 - DNA, 25 bp, Homo sapien
tcttacagatatagctaccaagtat

SEQ ID NO: 3578291 - DNA, 25 bp, Homo sapien
ctgggagtacacattggtacacttg

SEQ ID NO: 3578292 - DNA, 25 bp, Homo sapien
cacattggtacacttgcaaagctgt

SEQ ID NO: 3578293 - DNA, 25 bp, Homo sapien
tttaggagtccagctgaaaaacgct

SEQ ID NO: 3578294 - DNA, 25 bp, Homo sapien
cacacggtgtattcaacggtcctag

SEQ ID NO: 3578295 - DNA, 25 bp, Homo sapien
caggaagttacctggagcagacagc

SEQ ID NO: 3578296 - DNA, 25 bp, Homo sapien
tgaatgacaaccaagaccaggaagt

SEQ ID NO: 3578297 - DNA, 25 bp, Homo sapien
ttctcgaggggcctggggtgatttg

SEQ ID NO: 3578298 - DNA, 25 bp, Homo sapien
ctaggaactgtcactgattctcgag

SEQ ID NO: 3578299 - DNA, 25 bp, Homo sapien
gatttgggcactctgtgcatcctca

SEQ ID NO: 3578300 - DNA, 25 bp, Homo sapien
aggaactgtcactgattctcgaggg

SEQ ID NO: 3578301 - DNA, 25 bp, Homo sapien
cttcaccgaagagcggccatccaaa

SEQ ID NO: 3578302 - DNA, 25 bp, Homo sapien
aaatccagcaagtcacaaggcagca

SEQ ID NO: 3578303 - DNA, 25 bp, Homo sapien
aatccagcaagtcacaaggcagcat

SEQ ID NO: 3578304 - DNA, 25 bp, Homo sapien
gaagagcggccatccaaatccagca

SEQ ID NO: 3578305 - DNA, 25 bp, Homo sapien
tccatttccaggtggacagaccatg

SEQ ID NO: 3578306 - DNA, 25 bp, Homo sapien
ttaacgtccatttccaggtggacag

SEQ ID NO: 3578307 - DNA, 25 bp, Homo sapien
catttccaggtggacagaccatgac

SEQ ID NO: 3578308 - DNA, 25 bp, Homo sapien
cgtccatttccaggtggacagacca

SEQ ID NO: 3578309 - DNA, 25 bp, Homo sapien
ggtaacagtaacacagcctgcagct

SEQ ID NO: 3578310 - DNA, 25 bp, Homo sapien
agctgcaccgctgagcccggaggca

SEQ ID NO: 3578311 - DNA, 25 bp, Homo sapien
aggaataggcatcctctgggtaaca

SEQ ID NO: 3578312 - DNA, 25 bp, Homo sapien
tgcagctttgttcacggtctcgtcc

SEQ ID NO: 3578313 - DNA, 25 bp, Homo sapien
cactccgtgataggtattatgatga

SEQ ID NO: 3578314 - DNA, 25 bp, Homo sapien
gatgataatgttcggccctaacagc

SEQ ID NO: 3578315 - DNA, 25 bp, Homo sapien
ccacttacagcagtacatctttggg

SEQ ID NO: 3578316 - DNA, 25 bp, Homo sapien
gactgtagtgagtgtcaaaggctgt

SEQ ID NO: 3578317 - DNA, 25 bp, Homo sapien
gccattctctgttaaagccaagagc

SEQ ID NO: 3578318 - DNA, 25 bp, Homo sapien
agccattctctgttaaagccaagag

SEQ ID NO: 3578319 - DNA, 25 bp, Homo sapien
ccattctctgttaaagccaagagct

SEQ ID NO: 3578320 - DNA, 25 bp, Homo sapien
aagccattctctgttaaagccaaga

SEQ ID NO: 3578321 - DNA, 25 bp, Homo sapien
tatcacaactgccaaaccatcggtt

SEQ ID NO: 3578322 - DNA, 25 bp, Homo sapien
caggaagggcctgttttatcacaac

SEQ ID NO: 3578323 - DNA, 25 bp, Homo sapien
gatccggtgccttgctgaagttccc

SEQ ID NO: 3578324 - DNA, 25 bp, Homo sapien
tcccattactggatccggtgccttg

SEQ ID NO: 3578325 - DNA, 25 bp, Homo sapien
aaaccccgggaaaatgcagcgtgct

SEQ ID NO: 3578326 - DNA, 25 bp, Homo sapien
atcaaaccccgggaaaatgcagcgt

SEQ ID NO: 3578327 - DNA, 25 bp, Homo sapien
gaaaatgcagcgtgctcaagggctg

SEQ ID NO: 3578328 - DNA, 25 bp, Homo sapien
cccgggaaaatgcagcgtgctcaag

SEQ ID NO: 3578329 - DNA, 25 bp, Homo sapien
cttgccttgtccccctgtctgcgca

SEQ ID NO: 3578330 - DNA, 25 bp, Homo sapien
ctgtctgcgcagaggactgcagtgc

SEQ ID NO: 3578331 - DNA, 25 bp, Homo sapien
gaagagagccttgccttgtccccct

SEQ ID NO: 3578332 - DNA, 25 bp, Homo sapien
tgcgcagaggactgcagtgcttcct

SEQ ID NO: 3578333 - DNA, 25 bp, Homo sapien
gtgcccaatgcacatggctgcccat

SEQ ID NO: 3578334 - DNA, 25 bp, Homo sapien
ataaactcgaggaaggatagggctc

SEQ ID NO: 3578335 - DNA, 25 bp, Homo sapien
gccctgctaaggatcaggacccgag

SEQ ID NO: 3578336 - DNA, 25 bp, Homo sapien
tctgcatgaaagtaataaactcgag

SEQ ID NO: 3578337 - DNA, 25 bp, Homo sapien
ggatcaggacccgagctgccagcag

SEQ ID NO: 3578338 - DNA, 25 bp, Homo sapien
ggcagagactcattgagctctctca

SEQ ID NO: 3578339 - DNA, 25 bp, Homo sapien
catagaagatccctggttttgggtt

SEQ ID NO: 3578340 - DNA, 25 bp, Homo sapien
ccagatggcagagactcattgagct

SEQ ID NO: 3578341 - DNA, 25 bp, Homo sapien
attgagctctctcatgatcccaacc

SEQ ID NO: 3578342 - DNA, 25 bp, Homo sapien
gacatgcttattaccaacttttaga

SEQ ID NO: 3578343 - DNA, 25 bp, Homo sapien
gcttattaccaacttttagagtgac

SEQ ID NO: 3578344 - DNA, 25 bp, Homo sapien
ggcatgagacatgcttattaccaac

SEQ ID NO: 3578345 - DNA, 25 bp, Homo sapien
caacttttagagtgacattcagagc

SEQ ID NO: 3578346 - DNA, 25 bp, Homo sapien
agacagctgcaggctaaagtccccc

SEQ ID NO: 3578347 - DNA, 25 bp, Homo sapien
acagctgcaggctaaagtcccccat

SEQ ID NO: 3578348 - DNA, 25 bp, Homo sapien
ctgcaggctaaagtcccccatctcc

SEQ ID NO: 3578349 - DNA, 25 bp, Homo sapien
agctgcaggctaaagtcccccatct

SEQ ID NO: 3578350 - DNA, 25 bp, Homo sapien
atcaggggatacaagctggtcaccc

SEQ ID NO: 3578351 - DNA, 25 bp, Homo sapien
tgcaaagaagctgactggcctctgc

SEQ ID NO: 3578352 - DNA, 25 bp, Homo sapien
accttggctcaagtctaacagcacc

SEQ ID NO: 3578353 - DNA, 25 bp, Homo sapien
tcctgggtttccttgcaaagaagct

SEQ ID NO: 3578354 - DNA, 25 bp, Homo sapien
tgtgcatctttgtcggtacatctgc

SEQ ID NO: 3578355 - DNA, 25 bp, Homo sapien
tgggccttcacctgatgtttccttc

SEQ ID NO: 3578356 - DNA, 25 bp, Homo sapien
gtttccttctcgtgatgtctgtctg

SEQ ID NO: 3578357 - DNA, 25 bp, Homo sapien
tctgcctgtccgatgtctctcatgg

SEQ ID NO: 3578358 - DNA, 25 bp, Homo sapien
tccagcggcgccgcggggcaagagc

SEQ ID NO: 3578359 - DNA, 25 bp, Homo sapien
cagcggcgccgcggggcaagagcgg

SEQ ID NO: 3578360 - DNA, 25 bp, Homo sapien
gcggcgccgcggggcaagagcgggg

SEQ ID NO: 3578361 - DNA, 25 bp, Homo sapien
ctccagcggcgccgcggggcaagag

SEQ ID NO: 3578362 - DNA, 25 bp, Homo sapien
tggcggagccacttttaactaagaa

SEQ ID NO: 3578363 - DNA, 25 bp, Homo sapien
gctggcggagccacttttaactaag

SEQ ID NO: 3578364 - DNA, 25 bp, Homo sapien
ggctggcggagccacttttaactaa

SEQ ID NO: 3578365 - DNA, 25 bp, Homo sapien
ctggcggagccacttttaactaaga

SEQ ID NO: 3578366 - DNA, 25 bp, Homo sapien
ctctcattggccggaggggaggggg

SEQ ID NO: 3578367 - DNA, 25 bp, Homo sapien
ctgctcaataggggttgatgaagca

SEQ ID NO: 3578368 - DNA, 25 bp, Homo sapien
caggatgaacaatgcaagggagcac

SEQ ID NO: 3578369 - DNA, 25 bp, Homo sapien
tgctcaataggggttgatgaagcag

SEQ ID NO: 3578370 - DNA, 25 bp, Homo sapien
gatgaagcaggatgaacaatgcaag

SEQ ID NO: 3578371 - DNA, 25 bp, Homo sapien
aggtttataacatagtcatatccat

SEQ ID NO: 3578372 - DNA, 25 bp, Homo sapien
ggtttataacatagtcatatccatc

SEQ ID NO: 3578373 - DNA, 25 bp, Homo sapien
taaatctatctgaacggcaacccat

SEQ ID NO: 3578374 - DNA, 25 bp, Homo sapien
caagtttgcagagctctagggcact

SEQ ID NO: 3578375 - DNA, 25 bp, Homo sapien
tcccaagtctcattgttaccattag

SEQ ID NO: 3578376 - DNA, 25 bp, Homo sapien
ttaccaagtccactgagacttgctg

SEQ ID NO: 3578377 - DNA, 25 bp, Homo sapien
gatatgacttgtgcagggacacaca

SEQ ID NO: 3578378 - DNA, 25 bp, Homo sapien
caaactaaaggtcaggatgcctggg

SEQ ID NO: 3578379 - DNA, 25 bp, Homo sapien
tgtgatccttaccacatccaggagg

SEQ ID NO: 3578380 - DNA, 25 bp, Homo sapien
caggaccaagttcatctaagggaca

SEQ ID NO: 3578381 - DNA, 25 bp, Homo sapien
agaactaagtctactccttgccctg

SEQ ID NO: 3578382 - DNA, 25 bp, Homo sapien
taagtgggcactagagacatagaac

SEQ ID NO: 3578383 - DNA, 25 bp, Homo sapien
tccaggcaacctctctgtgtgaagc

SEQ ID NO: 3578384 - DNA, 25 bp, Homo sapien
cagtgacgtgagcgcctgggctcaa

SEQ ID NO: 3578385 - DNA, 25 bp, Homo sapien
tgatgggggtattaggtacaaagga

SEQ ID NO: 3578386 - DNA, 25 bp, Homo sapien
gaatgatgggggtattaggtacaaa

SEQ ID NO: 3578387 - DNA, 25 bp, Homo sapien
tggaggaatgatgggggtattaggt

SEQ ID NO: 3578388 - DNA, 25 bp, Homo sapien
gaggaatgatgggggtattaggtac

SEQ ID NO: 3578389 - DNA, 25 bp, Homo sapien
agcaccctgccgctggcacagagga

SEQ ID NO: 3578390 - DNA, 25 bp, Homo sapien
agaacaataggaccggagcaccctg

SEQ ID NO: 3578391 - DNA, 25 bp, Homo sapien
tcaaattcccactgagaacaatagg

SEQ ID NO: 3578392 - DNA, 25 bp, Homo sapien
tgccgctggcacagaggacaatctc

SEQ ID NO: 3578393 - DNA, 25 bp, Homo sapien
taatgcaggcacatggactttttgt

SEQ ID NO: 3578394 - DNA, 25 bp, Homo sapien
taacaagcactaaggaggagtcaga

SEQ ID NO: 3578395 - DNA, 25 bp, Homo sapien
gaaaaggagttcagacctgagagca

SEQ ID NO: 3578396 - DNA, 25 bp, Homo sapien
catatccttaagactcatgtcaggc

SEQ ID NO: 3578397 - DNA, 25 bp, Homo sapien
cagtgctatttgttccaaaatgccc

SEQ ID NO: 3578398 - DNA, 25 bp, Homo sapien
agtaactgttgcactcctgggtcca

SEQ ID NO: 3578399 - DNA, 25 bp, Homo sapien
aaaatgccctcagacgaaaccaata

SEQ ID NO: 3578400 - DNA, 25 bp, Homo sapien
ggttctccttaatgtctgccttcag

SEQ ID NO: 3578401 - DNA, 25 bp, Homo sapien
aaatggtcttcatgcacagaggcca

SEQ ID NO: 3578402 - DNA, 25 bp, Homo sapien
tgcaaatcaagttataaccacagag

SEQ ID NO: 3578403 - DNA, 25 bp, Homo sapien
tcttctgcttagagaggaggcagct

SEQ ID NO: 3578404 - DNA, 25 bp, Homo sapien
ttgcacttcattaggccccaaatgg

SEQ ID NO: 3578405 - DNA, 25 bp, Homo sapien
catcttgaaaggtaagcctggagcc

SEQ ID NO: 3578406 - DNA, 25 bp, Homo sapien
taacactactgcaagatcaacaccg

SEQ ID NO: 3578407 - DNA, 25 bp, Homo sapien
gatcaacaatggctctcgctcaggg

SEQ ID NO: 3578408 - DNA, 25 bp, Homo sapien
tgaggaagactcactggctttgact

SEQ ID NO: 3578409 - DNA, 25 bp, Homo sapien
tgccacagctgcaggtgagtaattg

SEQ ID NO: 3578410 - DNA, 25 bp, Homo sapien
cacatgatgatgtgggatgcctcca

SEQ ID NO: 3578411 - DNA, 25 bp, Homo sapien
caaagctgcctttagaggccagaaa

SEQ ID NO: 3578412 - DNA, 25 bp, Homo sapien
agaaagtagacttggaagttgggct

SEQ ID NO: 3578413 - DNA, 25 bp, Homo sapien
agagaaaacatcaacccaagcttgc

SEQ ID NO: 3578414 - DNA, 25 bp, Homo sapien
agttaattgcaaaatccatatggag

SEQ ID NO: 3578415 - DNA, 25 bp, Homo sapien
agaaaacatcaacccaagcttgcca

SEQ ID NO: 3578416 - DNA, 25 bp, Homo sapien
taattgcaaaatccatatggagtgg

SEQ ID NO: 3578417 - DNA, 25 bp, Homo sapien
agttaaaagagcctgtcatagtgcc

SEQ ID NO: 3578418 - DNA, 25 bp, Homo sapien
gttcatggagcaccaaaaagctgca

SEQ ID NO: 3578419 - DNA, 25 bp, Homo sapien
catatggtgtcgagagcatctgcac

SEQ ID NO: 3578420 - DNA, 25 bp, Homo sapien
tctaggcaaggccacaggtacacac

SEQ ID NO: 3578421 - DNA, 25 bp, Homo sapien
cattatttagatctgagtaccgcat

SEQ ID NO: 3578422 - DNA, 25 bp, Homo sapien
ggagccattcccatgattgctgtca

SEQ ID NO: 3578423 - DNA, 25 bp, Homo sapien
cataacgaagctgttaatgtaactt

SEQ ID NO: 3578424 - DNA, 25 bp, Homo sapien
taaaagggagccattcccatgattg

SEQ ID NO: 3578425 - DNA, 25 bp, Homo sapien
gcatgcaattaggatccaagaattc

SEQ ID NO: 3578426 - DNA, 25 bp, Homo sapien
atcttgtgcatgcaattaggatcca

SEQ ID NO: 3578427 - DNA, 25 bp, Homo sapien
catgcccagccatacaactattaag

SEQ ID NO: 3578428 - DNA, 25 bp, Homo sapien
tgcccagccatacaactattaagta

SEQ ID NO: 3578429 - DNA, 25 bp, Homo sapien
tattctattaataattcagactgcc

SEQ ID NO: 3578430 - DNA, 25 bp, Homo sapien
aataattcagactgccctcccctta

SEQ ID NO: 3578431 - DNA, 25 bp, Homo sapien
ctattctattaataattcagactgc

SEQ ID NO: 3578432 - DNA, 25 bp, Homo sapien
tattaataattcagactgccctccc

SEQ ID NO: 3578433 - DNA, 25 bp, Homo sapien
ttttgctggctgtcgtgcggaagca

SEQ ID NO: 3578434 - DNA, 25 bp, Homo sapien
tgctggctgtcgtgcggaagcacca

SEQ ID NO: 3578435 - DNA, 25 bp, Homo sapien
ctggctgtcgtgcggaagcaccagc

SEQ ID NO: 3578436 - DNA, 25 bp, Homo sapien
cttttgctggctgtcgtgcggaagc

SEQ ID NO: 3578437 - DNA, 25 bp, Homo sapien
cccaagggctggtagggcatgaaat

SEQ ID NO: 3578438 - DNA, 25 bp, Homo sapien
acgcaggaccacgttcgactcagag

SEQ ID NO: 3578439 - DNA, 25 bp, Homo sapien
aagaggaagacgctgaaactgggcc

SEQ ID NO: 3578440 - DNA, 25 bp, Homo sapien
ccaggcaatagtctccacgcaggac

SEQ ID NO: 3578441 - DNA, 25 bp, Homo sapien
cttgggaacgagcctcagggaggag

SEQ ID NO: 3578442 - DNA, 25 bp, Homo sapien
gaggagagtggaataatgagtgtgc

SEQ ID NO: 3578443 - DNA, 25 bp, Homo sapien
gggaacgagcctcagggaggagagt

SEQ ID NO: 3578444 - DNA, 25 bp, Homo sapien
gggaggagagtggaataatgagtgt

SEQ ID NO: 3578445 - DNA, 25 bp, Homo sapien
gagcagcgacccaatctctggcatg

SEQ ID NO: 3578446 - DNA, 25 bp, Homo sapien
tccctaatccggaagcaaagagcag

SEQ ID NO: 3578447 - DNA, 25 bp, Homo sapien
atgacccagagacttaggcgcctcc

SEQ ID NO: 3578448 - DNA, 25 bp, Homo sapien
caatctctggcatgtcactcatggg

SEQ ID NO: 3578449 - DNA, 25 bp, Homo sapien
aggagctgcgccctgaccgtgtgct

SEQ ID NO: 3578450 - DNA, 25 bp, Homo sapien
cgtgtcagcctccatgtcggcatca

SEQ ID NO: 3578451 - DNA, 25 bp, Homo sapien
gggaggccaatgtctgtccggtaca

SEQ ID NO: 3578452 - DNA, 25 bp, Homo sapien
ttttcatgctcggtgtcggtgagtg

SEQ ID NO: 3578453 - DNA, 25 bp, Homo sapien
ccccagctcccgcagggtgaagttg

SEQ ID NO: 3578454 - DNA, 25 bp, Homo sapien
gccccagctcccgcagggtgaagtt

SEQ ID NO: 3578455 - DNA, 25 bp, Homo sapien
agctcccgcagggtgaagttggcac

SEQ ID NO: 3578456 - DNA, 25 bp, Homo sapien
ccagctcccgcagggtgaagttggc

SEQ ID NO: 3578457 - DNA, 25 bp, Homo sapien
gggttccatgatcctgttgagccag

SEQ ID NO: 3578458 - DNA, 25 bp, Homo sapien
gaagccactcacgtgttatgaagaa

SEQ ID NO: 3578459 - DNA, 25 bp, Homo sapien
aagggctcactctaagggttccatg

SEQ ID NO: 3578460 - DNA, 25 bp, Homo sapien
ttcggccggccctctcaaagagaag

SEQ ID NO: 3578461 - DNA, 25 bp, Homo sapien
ttgtaaactgctacgcacatgcctg

SEQ ID NO: 3578462 - DNA, 25 bp, Homo sapien
tgcctgcctatgagatgagaatgct

SEQ ID NO: 3578463 - DNA, 25 bp, Homo sapien
aacaggtcagctttcacatggatac

SEQ ID NO: 3578464 - DNA, 25 bp, Homo sapien
tcacttacggacaggacggagcaaa

SEQ ID NO: 3578465 - DNA, 25 bp, Homo sapien
cactagggaggcttctcacggccat

SEQ ID NO: 3578466 - DNA, 25 bp, Homo sapien
cagtttaagggcaacagggagtcac

SEQ ID NO: 3578467 - DNA, 25 bp, Homo sapien
ggtagacaaacactggagcccagct

SEQ ID NO: 3578468 - DNA, 25 bp, Homo sapien
catggcaggtctggaaacttgagca

SEQ ID NO: 3578469 - DNA, 25 bp, Homo sapien
cgggcgtcctggtcgtaggccttca

SEQ ID NO: 3578470 - DNA, 25 bp, Homo sapien
ggcacaatgtccttgacgcggctgc

SEQ ID NO: 3578471 - DNA, 25 bp, Homo sapien
tcagggtctcgctggagctgtacga

SEQ ID NO: 3578472 - DNA, 25 bp, Homo sapien
tcagcgagcggtaaggcttcctctc

SEQ ID NO: 3578473 - DNA, 25 bp, Homo sapien
tgggaagctcctaatagccctttct

SEQ ID NO: 3578474 - DNA, 25 bp, Homo sapien
tctgactggtgggaagctcctaata

SEQ ID NO: 3578475 - DNA, 25 bp, Homo sapien
tcctcagtgccaccgtcagcactgg

SEQ ID NO: 3578476 - DNA, 25 bp, Homo sapien
tccatctgggtgttgctagaaggtc

SEQ ID NO: 3578477 - DNA, 25 bp, Homo sapien
tctctgttgtagcacccagagcata

SEQ ID NO: 3578478 - DNA, 25 bp, Homo sapien
ggttaagtatcctgcctggaaggcc

SEQ ID NO: 3578479 - DNA, 25 bp, Homo sapien
cattttatcgacaaagaaaccagga

SEQ ID NO: 3578480 - DNA, 25 bp, Homo sapien
tggaaggccacaacaaaaaagtgac

SEQ ID NO: 3578481 - DNA, 25 bp, Homo sapien
caagataccttgtgtgcacaatagc

SEQ ID NO: 3578482 - DNA, 25 bp, Homo sapien
gcacaatagcttcttgtcttataaa

SEQ ID NO: 3578483 - DNA, 25 bp, Homo sapien
gggcatacctgacactgatgctaag

SEQ ID NO: 3578484 - DNA, 25 bp, Homo sapien
agacacatgtagtctatgccctggg

SEQ ID NO: 3578485 - DNA, 25 bp, Homo sapien
tcatggagctaattgtgcccagagt

SEQ ID NO: 3578486 - DNA, 25 bp, Homo sapien
tgccgttggtaattaagtcttataa

SEQ ID NO: 3578487 - DNA, 25 bp, Homo sapien
catccaaggcctcaaaggactttgc

SEQ ID NO: 3578488 - DNA, 25 bp, Homo sapien
tacacgcctaatcaagccttgtgct

SEQ ID NO: 3578489 - DNA, 25 bp, Homo sapien
caagataatggcagactgggtggct

SEQ ID NO: 3578490 - DNA, 25 bp, Homo sapien
atccaaagcctttatacgtttctca

SEQ ID NO: 3578491 - DNA, 25 bp, Homo sapien
cgtgcattctgtccctagacaagat

SEQ ID NO: 3578492 - DNA, 25 bp, Homo sapien
gactggttcggttttgtcatccaaa

SEQ ID NO: 3578493 - DNA, 25 bp, Homo sapien
gatgtacacagcactgccaatcaca

SEQ ID NO: 3578494 - DNA, 25 bp, Homo sapien
catgatgtacacagcactgccaatc

SEQ ID NO: 3578495 - DNA, 25 bp, Homo sapien
gtacacagcactgccaatcacactg

SEQ ID NO: 3578496 - DNA, 25 bp, Homo sapien
cttcatgatgtacacagcactgcca

SEQ ID NO: 3578497 - DNA, 25 bp, Homo sapien
gctctcccagggagtttgcggaaga

SEQ ID NO: 3578498 - DNA, 25 bp, Homo sapien
gcctgatttacgaggctgcctgtgg

SEQ ID NO: 3578499 - DNA, 25 bp, Homo sapien
gggcctgatttacgaggctgcctgt

SEQ ID NO: 3578500 - DNA, 25 bp, Homo sapien
gagtttgcggaagattcaaaggctg

SEQ ID NO: 3578501 - DNA, 25 bp, Homo sapien
cctaaaggtaagctggctgagtcca

SEQ ID NO: 3578502 - DNA, 25 bp, Homo sapien
ttgctcccatgactcgagtaaccgg

SEQ ID NO: 3578503 - DNA, 25 bp, Homo sapien
gtaagctggctgagtccatcagaat

SEQ ID NO: 3578504 - DNA, 25 bp, Homo sapien
tcgagtaaccgggagctcatgcaca

SEQ ID NO: 3578505 - DNA, 25 bp, Homo sapien
gcttgactttgaaatggattgacat

SEQ ID NO: 3578506 - DNA, 25 bp, Homo sapien
tttggcttgactttgaaatggattg

SEQ ID NO: 3578507 - DNA, 25 bp, Homo sapien
ggcttgactttgaaatggattgaca

SEQ ID NO: 3578508 - DNA, 25 bp, Homo sapien
tggcttgactttgaaatggattgac

SEQ ID NO: 3578509 - DNA, 25 bp, Homo sapien
tagccaagtacaagcactcgtgaag

SEQ ID NO: 3578510 - DNA, 25 bp, Homo sapien
gggcttggtgtgacaaggcctgata

SEQ ID NO: 3578511 - DNA, 25 bp, Homo sapien
gcactcgtgaagcacccttggaggg

SEQ ID NO: 3578512 - DNA, 25 bp, Homo sapien
aataaatctagccaagtacaagcac

SEQ ID NO: 3578513 - DNA, 25 bp, Homo sapien
acagctgcagcctggtacctagagt

SEQ ID NO: 3578514 - DNA, 25 bp, Homo sapien
tggtacctagagtccatagccccgg

SEQ ID NO: 3578515 - DNA, 25 bp, Homo sapien
ggaaagatgggtcatgaggattttc

SEQ ID NO: 3578516 - DNA, 25 bp, Homo sapien
ctagagtccatagccccggaggtgg

SEQ ID NO: 3578517 - DNA, 25 bp, Homo sapien
gtaaccaggctgtctatatcccaga

SEQ ID NO: 3578518 - DNA, 25 bp, Homo sapien
gagcaaaaggctctggtaaactaga

SEQ ID NO: 3578519 - DNA, 25 bp, Homo sapien
cagggcagtggctgcaaatagctcg

SEQ ID NO: 3578520 - DNA, 25 bp, Homo sapien
gctcgataaccagctcaggtaacca

SEQ ID NO: 3578521 - DNA, 25 bp, Homo sapien
cccagcctgacatattccgttggca

SEQ ID NO: 3578522 - DNA, 25 bp, Homo sapien
catcaatacccttgatagaagccag

SEQ ID NO: 3578523 - DNA, 25 bp, Homo sapien
gacatattccgttggcaccaggcca

SEQ ID NO: 3578524 - DNA, 25 bp, Homo sapien
ccagacgaggctttgaagccttggg

SEQ ID NO: 3578525 - DNA, 25 bp, Homo sapien
ccaagaggagtcagtgtacagggct

SEQ ID NO: 3578526 - DNA, 25 bp, Homo sapien
gggcttctcagatcactcaacaggg

SEQ ID NO: 3578527 - DNA, 25 bp, Homo sapien
tagagctctaacctagccttcaggc

SEQ ID NO: 3578528 - DNA, 25 bp, Homo sapien
gaaacatgaggctagcacccttact

SEQ ID NO: 3578529 - DNA, 25 bp, Homo sapien
tcaaataatccttgaagtatgcaat

SEQ ID NO: 3578530 - DNA, 25 bp, Homo sapien
agggtctaagaatagtccttcaaat

SEQ ID NO: 3578531 - DNA, 25 bp, Homo sapien
tccccccaaggactttctctgactc

SEQ ID NO: 3578532 - DNA, 25 bp, Homo sapien
tgttgtcactgcatattccagacac

SEQ ID NO: 3578533 - DNA, 25 bp, Homo sapien
tccctctagaaattcctgcctccat

SEQ ID NO: 3578534 - DNA, 25 bp, Homo sapien
tccatatcagcaacaccagtttctc

SEQ ID NO: 3578535 - DNA, 25 bp, Homo sapien
gatttcatgctctcattttgcttcc

SEQ ID NO: 3578536 - DNA, 25 bp, Homo sapien
cattcttccacgatgtcatggattt

SEQ ID NO: 3578537 - DNA, 25 bp, Homo sapien
ttttgcttccctctgaagggaaggc

SEQ ID NO: 3578538 - DNA, 25 bp, Homo sapien
cctctgaagggaaggcctttatcca

SEQ ID NO: 3578539 - DNA, 25 bp, Homo sapien
caacggcattcatcaagaggacaga

SEQ ID NO: 3578540 - DNA, 25 bp, Homo sapien
acaggaaaacccaacggcattcatc

SEQ ID NO: 3578541 - DNA, 25 bp, Homo sapien
cttttcaatgcacaggaaaacccaa

SEQ ID NO: 3578542 - DNA, 25 bp, Homo sapien
aaaacccaacggcattcatcaagag

SEQ ID NO: 3578543 - DNA, 25 bp, Homo sapien
cagatgttgagcctctaggtagata

SEQ ID NO: 3578544 - DNA, 25 bp, Homo sapien
gcctctaggtagatagagctccagt

SEQ ID NO: 3578545 - DNA, 25 bp, Homo sapien
tgttgagcctctaggtagatagagc

SEQ ID NO: 3578546 - DNA, 25 bp, Homo sapien
taggtagatagagctccagtcctgc

SEQ ID NO: 3578547 - DNA, 25 bp, Homo sapien
cctggtcaagtggacatgggcccat

SEQ ID NO: 3578548 - DNA, 25 bp, Homo sapien
tcatacaaggctggctgactcttca

SEQ ID NO: 3578549 - DNA, 25 bp, Homo sapien
tgtgcaggagcccattgggaactcc

SEQ ID NO: 3578550 - DNA, 25 bp, Homo sapien
gatccatagtccctgttcatacaag

SEQ ID NO: 3578551 - DNA, 25 bp, Homo sapien
gcatctttgcccctaaagagagctg

SEQ ID NO: 3578552 - DNA, 25 bp, Homo sapien
tctcagtggtctaatggggaacacc

SEQ ID NO: 3578553 - DNA, 25 bp, Homo sapien
ctgctctgaaccctgtgatatgttg

SEQ ID NO: 3578554 - DNA, 25 bp, Homo sapien
tttctttctggtgcctgggcatctt

SEQ ID NO: 3578555 - DNA, 25 bp, Homo sapien
caaagctaatattgactgaccacag

SEQ ID NO: 3578556 - DNA, 25 bp, Homo sapien
cacagctggcaagaataatagaaga

SEQ ID NO: 3578557 - DNA, 25 bp, Homo sapien
cctgtgtaaggtgttgtagggcctc

SEQ ID NO: 3578558 - DNA, 25 bp, Homo sapien
tcctagaacgagagccccttgaagt

SEQ ID NO: 3578559 - DNA, 25 bp, Homo sapien
gcttagaggttgcttttccacatgt

SEQ ID NO: 3578560 - DNA, 25 bp, Homo sapien
ggatttagatagagatgactcccat

SEQ ID NO: 3578561 - DNA, 25 bp, Homo sapien
tggaaccttcagtccaagcaacgtg

SEQ ID NO: 3578562 - DNA, 25 bp, Homo sapien
gtccaagcaacgtgaatctctccct

SEQ ID NO: 3578563 - DNA, 25 bp, Homo sapien
aggctgggatgttcccactgactca

SEQ ID NO: 3578564 - DNA, 25 bp, Homo sapien
ggttactgagagcagttcgtcttgc

SEQ ID NO: 3578565 - DNA, 25 bp, Homo sapien
tctcttggaggcaaaggtgtgactg

SEQ ID NO: 3578566 - DNA, 25 bp, Homo sapien
actgactcaccacaggttactgaga

SEQ ID NO: 3578567 - DNA, 25 bp, Homo sapien
ctctgttccctgtggtgtttgtttg

SEQ ID NO: 3578568 - DNA, 25 bp, Homo sapien
tgtttggcggtggcttgttgtttgg

SEQ ID NO: 3578569 - DNA, 25 bp, Homo sapien
ggagcctgcaaaggttctctgtccc

SEQ ID NO: 3578570 - DNA, 25 bp, Homo sapien
tggagcctgcaaaggttctctgtcc

SEQ ID NO: 3578571 - DNA, 25 bp, Homo sapien
gaagagtcagcaatgtccgtgggcc

SEQ ID NO: 3578572 - DNA, 25 bp, Homo sapien
gtcagcacgttctgaagagtcagca

SEQ ID NO: 3578573 - DNA, 25 bp, Homo sapien
ctggctccatgtcagcacgttctga

SEQ ID NO: 3578574 - DNA, 25 bp, Homo sapien
ctgaagagtcagcaatgtccgtggg

SEQ ID NO: 3578575 - DNA, 25 bp, Homo sapien
tctccaaggccattggatcctggag

SEQ ID NO: 3578576 - DNA, 25 bp, Homo sapien
tccaaggccattggatcctggagga

SEQ ID NO: 3578577 - DNA, 25 bp, Homo sapien
ctctccaaggccattggatcctgga

SEQ ID NO: 3578578 - DNA, 25 bp, Homo sapien
caaggccattggatcctggaggatg

SEQ ID NO: 3578579 - DNA, 25 bp, Homo sapien
aaatcttctggatacccaggaacct

SEQ ID NO: 3578580 - DNA, 25 bp, Homo sapien
agaactgtatcatcgcacctgcagc

SEQ ID NO: 3578581 - DNA, 25 bp, Homo sapien
gagcagtggatacagaaacccggga

SEQ ID NO: 3578582 - DNA, 25 bp, Homo sapien
gaaactcagcgttcctgtgccctgg

SEQ ID NO: 3578583 - DNA, 25 bp, Homo sapien
agctttggtttctaatccaagccga

SEQ ID NO: 3578584 - DNA, 25 bp, Homo sapien
tccaagccgattatatgtgccagca

SEQ ID NO: 3578585 - DNA, 25 bp, Homo sapien
ttgttactctgcgaagagctttggt

SEQ ID NO: 3578586 - DNA, 25 bp, Homo sapien
cagaccaggtggagagatccagagt

SEQ ID NO: 3578587 - DNA, 25 bp, Homo sapien
ttctgctccgtccttggacttttcc

SEQ ID NO: 3578588 - DNA, 25 bp, Homo sapien
tttgtttcttctgctccgtccttgg

SEQ ID NO: 3578589 - DNA, 25 bp, Homo sapien
ttcttctgctccgtccttggacttt

SEQ ID NO: 3578590 - DNA, 25 bp, Homo sapien
ctttgtttcttctgctccgtccttg

SEQ ID NO: 3578591 - DNA, 25 bp, Homo sapien
tccagagctgctatatcagcagcaa

SEQ ID NO: 3578592 - DNA, 25 bp, Homo sapien
agctgctatatcagcagcaagggct

SEQ ID NO: 3578593 - DNA, 25 bp, Homo sapien
cagagctgctatatcagcagcaagg

SEQ ID NO: 3578594 - DNA, 25 bp, Homo sapien
ctgtccagagctgctatatcagcag

SEQ ID NO: 3578595 - DNA, 25 bp, Homo sapien
ccatcagtaagtcagtgaatgccaa

SEQ ID NO: 3578596 - DNA, 25 bp, Homo sapien
gttggttgataaactaatgtgggag

SEQ ID NO: 3578597 - DNA, 25 bp, Homo sapien
ccccgtaggtccagtcagcttgcat

SEQ ID NO: 3578598 - DNA, 25 bp, Homo sapien
cagaaagcttggtcaggttagggtg

SEQ ID NO: 3578599 - DNA, 25 bp, Homo sapien
gcttatttctaccttggtgaagctg

SEQ ID NO: 3578600 - DNA, 25 bp, Homo sapien
tgaacgcatttgtcaggggagaagc

SEQ ID NO: 3578601 - DNA, 25 bp, Homo sapien
ccttggtgaagctgaacgcatttgt

SEQ ID NO: 3578602 - DNA, 25 bp, Homo sapien
ccacccacgcagacacacgtgctta

SEQ ID NO: 3578603 - DNA, 25 bp, Homo sapien
gtcatccttagccactgttccttct

SEQ ID NO: 3578604 - DNA, 25 bp, Homo sapien
ttctttcaggacatcaccccacact

SEQ ID NO: 3578605 - DNA, 25 bp, Homo sapien
accatttcaggacacgctggtcatc

SEQ ID NO: 3578606 - DNA, 25 bp, Homo sapien
caggacacgctggtcatccttagcc

SEQ ID NO: 3578607 - DNA, 25 bp, Homo sapien
tcaaatggaactcaagacaggaagg

SEQ ID NO: 3578608 - DNA, 25 bp, Homo sapien
aagaaaacaggccttagtgtcagcc

SEQ ID NO: 3578609 - DNA, 25 bp, Homo sapien
tctgtggctctatggaaacgactct

SEQ ID NO: 3578610 - DNA, 25 bp, Homo sapien
gatggattctttcgtgccctgatgc

SEQ ID NO: 3578611 - DNA, 25 bp, Homo sapien
tcaagctcttccttctgtgcattca

SEQ ID NO: 3578612 - DNA, 25 bp, Homo sapien
agctcttccttctgtgcattcatac

SEQ ID NO: 3578613 - DNA, 25 bp, Homo sapien
aagctcttccttctgtgcattcata

SEQ ID NO: 3578614 - DNA, 25 bp, Homo sapien
caagctcttccttctgtgcattcat

SEQ ID NO: 3578615 - DNA, 25 bp, Homo sapien
catttctgttttcgggagacttgat

SEQ ID NO: 3578616 - DNA, 25 bp, Homo sapien
ccctgtaaacaatgcgctcctcttc

SEQ ID NO: 3578617 - DNA, 25 bp, Homo sapien
ctgcatttctgttttcgggagactt

SEQ ID NO: 3578618 - DNA, 25 bp, Homo sapien
tgtaaacaatgcgctcctcttccaa

SEQ ID NO: 3578619 - DNA, 25 bp, Homo sapien
cttgtgtcggatggtgagcgaaccc

SEQ ID NO: 3578620 - DNA, 25 bp, Homo sapien
tgtcagcactccagtatcactttgt

SEQ ID NO: 3578621 - DNA, 25 bp, Homo sapien
tctcgcgctgtgatcttctccctga

SEQ ID NO: 3578622 - DNA, 25 bp, Homo sapien
catgcttttgaagtttctgcgctct

SEQ ID NO: 3578623 - DNA, 25 bp, Homo sapien
gactctcattatctggccacatctg

SEQ ID NO: 3578624 - DNA, 25 bp, Homo sapien
gcagataccaaatacaggctttctc

SEQ ID NO: 3578625 - DNA, 25 bp, Homo sapien
tatactgactcccttgcggcgagac

SEQ ID NO: 3578626 - DNA, 25 bp, Homo sapien
tcttttccacgagcctagacagctg

SEQ ID NO: 3578627 - DNA, 25 bp, Homo sapien
ctcccaagttgccatcctgcacgtg

SEQ ID NO: 3578628 - DNA, 25 bp, Homo sapien
cccaagttgccatcctgcacgtgga

SEQ ID NO: 3578629 - DNA, 25 bp, Homo sapien
tggaagcctctgagaggtagcagaa

SEQ ID NO: 3578630 - DNA, 25 bp, Homo sapien
cttatctcccaagttgccatcctgc

SEQ ID NO: 3578631 - DNA, 25 bp, Homo sapien
gacagcagacactggttaccaggtt

SEQ ID NO: 3578632 - DNA, 25 bp, Homo sapien
acagcagacactggttaccaggttt

SEQ ID NO: 3578633 - DNA, 25 bp, Homo sapien
tgacagcagacactggttaccaggt

SEQ ID NO: 3578634 - DNA, 25 bp, Homo sapien
gtgacagcagacactggttaccagg

SEQ ID NO: 3578635 - DNA, 25 bp, Homo sapien
ggtatcgcaatattcacacgcagta

SEQ ID NO: 3578636 - DNA, 25 bp, Homo sapien
tacctacagggactattctaagtgc

SEQ ID NO: 3578637 - DNA, 25 bp, Homo sapien
tatttaacctacctacccatgggca

SEQ ID NO: 3578638 - DNA, 25 bp, Homo sapien
gccgagatttgaacataggtccctg

SEQ ID NO: 3578639 - DNA, 25 bp, Homo sapien
taaggcctgagcaaactcatcaatg

SEQ ID NO: 3578640 - DNA, 25 bp, Homo sapien
agggcctgaccaccgtaaggcctga

SEQ ID NO: 3578641 - DNA, 25 bp, Homo sapien
caatgttcccaaagaggctattttc

SEQ ID NO: 3578642 - DNA, 25 bp, Homo sapien
ccttttatgaggtgtctgctgcaca

SEQ ID NO: 3578643 - DNA, 25 bp, Homo sapien
caacaggagttactggggcaatgag

SEQ ID NO: 3578644 - DNA, 25 bp, Homo sapien
gtcaacaggagttactggggcaatg

SEQ ID NO: 3578645 - DNA, 25 bp, Homo sapien
ctggggcaatgagattaaaggccat

SEQ ID NO: 3578646 - DNA, 25 bp, Homo sapien
gagttactggggcaatgagattaaa

SEQ ID NO: 3578647 - DNA, 25 bp, Homo sapien
ctgagctgaactagcagggtagcct

SEQ ID NO: 3578648 - DNA, 25 bp, Homo sapien
ctggagatcgacctctgcagaaaaa

SEQ ID NO: 3578649 - DNA, 25 bp, Homo sapien
aaaactgagctgaactagcagggta

SEQ ID NO: 3578650 - DNA, 25 bp, Homo sapien
tggagatcgacctctgcagaaaaac

SEQ ID NO: 3578651 - DNA, 25 bp, Homo sapien
gagataccacgggagcagtgaaaac

SEQ ID NO: 3578652 - DNA, 25 bp, Homo sapien
ttctcactgagataccacgggagca

SEQ ID NO: 3578653 - DNA, 25 bp, Homo sapien
ttatcagtgtccgactgtgaagaaa

SEQ ID NO: 3578654 - DNA, 25 bp, Homo sapien
tgtgaagaaaccaggctatccttct

SEQ ID NO: 3578655 - DNA, 25 bp, Homo sapien
tagaaaaagcactcatgggacattt

SEQ ID NO: 3578656 - DNA, 25 bp, Homo sapien
catattggtagtgcaaagctggatc

SEQ ID NO: 3578657 - DNA, 25 bp, Homo sapien
tgaaatccagggcacatctcgtatt

SEQ ID NO: 3578658 - DNA, 25 bp, Homo sapien
agccacattccaagtcctcaatagt

SEQ ID NO: 3578659 - DNA, 25 bp, Homo sapien
gatggcgttacgctctgcatataga

SEQ ID NO: 3578660 - DNA, 25 bp, Homo sapien
tctttaggcgtcaaatgatggcgtt

SEQ ID NO: 3578661 - DNA, 25 bp, Homo sapien
tccccatagggaggtattatgatca

SEQ ID NO: 3578662 - DNA, 25 bp, Homo sapien
gcacctttgatatgcccaggaacag

SEQ ID NO: 3578663 - DNA, 25 bp, Homo sapien
aagtgtctgagagatcactagccct

SEQ ID NO: 3578664 - DNA, 25 bp, Homo sapien
tgcaaaaccatccacccaagctgtt

SEQ ID NO: 3578665 - DNA, 25 bp, Homo sapien
aaaccatccacccaagctgttcctc

SEQ ID NO: 3578666 - DNA, 25 bp, Homo sapien
aaccatccacccaagctgttcctct

SEQ ID NO: 3578667 - DNA, 25 bp, Homo sapien
aactgcaaaaccatccacccaagct

SEQ ID NO: 3578668 - DNA, 25 bp, Homo sapien
cacggacagggtgactgggctgctg

SEQ ID NO: 3578669 - DNA, 25 bp, Homo sapien
ctggagccacggacagggtgactgg

SEQ ID NO: 3578670 - DNA, 25 bp, Homo sapien
cggacagggtgactgggctgctgcc

SEQ ID NO: 3578671 - DNA, 25 bp, Homo sapien
gagccacggacagggtgactgggct

SEQ ID NO: 3578672 - DNA, 25 bp, Homo sapien
ttaattcaattccatgcagttaaat

SEQ ID NO: 3578673 - DNA, 25 bp, Homo sapien
tgtttttgtgtggatcctgtgctca

SEQ ID NO: 3578674 - DNA, 25 bp, Homo sapien
tttttgtgtggatcctgtgctcatc

SEQ ID NO: 3578675 - DNA, 25 bp, Homo sapien
tgtgtggatcctgtgctcatctttg

SEQ ID NO: 3578676 - DNA, 25 bp, Homo sapien
ctgaagaagctcacaaatccactca

SEQ ID NO: 3578677 - DNA, 25 bp, Homo sapien
tgaagaagctcacaaatccactcac

SEQ ID NO: 3578678 - DNA, 25 bp, Homo sapien
tccccatcccagtgctgctgcccat

SEQ ID NO: 3578679 - DNA, 25 bp, Homo sapien
ctctccccatcccagtgctgctgcc

SEQ ID NO: 3578680 - DNA, 25 bp, Homo sapien
tcccagtgctgctgcccatgctgtt

SEQ ID NO: 3578681 - DNA, 25 bp, Homo sapien
agtttccagaatgtgtcatcctctc

SEQ ID NO: 3578682 - DNA, 25 bp, Homo sapien
gaaataatcagcttgtctgtctggt

SEQ ID NO: 3578683 - DNA, 25 bp, Homo sapien
tccatgaatgatggcttcagactca

SEQ ID NO: 3578684 - DNA, 25 bp, Homo sapien
agtaatggccctgcctcggactcat

SEQ ID NO: 3578685 - DNA, 25 bp, Homo sapien
caagtgtgttgggtcccagcaggcc

SEQ ID NO: 3578686 - DNA, 25 bp, Homo sapien
aaatggcctccatctatcatcaccg

SEQ ID NO: 3578687 - DNA, 25 bp, Homo sapien
tcatcgtagagcatggagagcccag

SEQ ID NO: 3578688 - DNA, 25 bp, Homo sapien
gcaaggcacagttcatgggttcccc

SEQ ID NO: 3578689 - DNA, 25 bp, Homo sapien
aacatagctcatcgtagagcatgga

SEQ ID NO: 3578690 - DNA, 25 bp, Homo sapien
ggagagcccagagcgcatacgcaag

SEQ ID NO: 3578691 - DNA, 25 bp, Homo sapien
cacccacttaaccaagatccctgag

SEQ ID NO: 3578692 - DNA, 25 bp, Homo sapien
tctccatagcatggaattactgagg

SEQ ID NO: 3578693 - DNA, 25 bp, Homo sapien
gtctccatagcatggaattactgag

SEQ ID NO: 3578694 - DNA, 25 bp, Homo sapien
ctgtggaagtttcggtcacccactt

SEQ ID NO: 3578695 - DNA, 25 bp, Homo sapien
gttcctgtgacagcaaaccccacaa

SEQ ID NO: 3578696 - DNA, 25 bp, Homo sapien
ttctgtatgcctggtaagaggcggt

SEQ ID NO: 3578697 - DNA, 25 bp, Homo sapien
ctaagtggcttcttgttcctgtgac

SEQ ID NO: 3578698 - DNA, 25 bp, Homo sapien
gccacagggtccagttctgtatgcc

SEQ ID NO: 3578699 - DNA, 25 bp, Homo sapien
agctggggcgccaaccacagtgacc

SEQ ID NO: 3578700 - DNA, 25 bp, Homo sapien
gaggacagctggggcgccaaccaca

SEQ ID NO: 3578701 - DNA, 25 bp, Homo sapien
acagctggggcgccaaccacagtga

SEQ ID NO: 3578702 - DNA, 25 bp, Homo sapien
agggtgcattaagaggacagctggg

SEQ ID NO: 3578703 - DNA, 25 bp, Homo sapien
catctactggatacagtgtaaggag

SEQ ID NO: 3578704 - DNA, 25 bp, Homo sapien
caacatctaccggatacagtgtccc

SEQ ID NO: 3578705 - DNA, 25 bp, Homo sapien
gggcatgcccatgctccccaacatc

SEQ ID NO: 3578706 - DNA, 25 bp, Homo sapien
atacagtgtccccaacatctactgg

SEQ ID NO: 3578707 - DNA, 25 bp, Homo sapien
tattccctgagcactttctaacaca

SEQ ID NO: 3578708 - DNA, 25 bp, Homo sapien
tccctgagcactttctaacacaggg

SEQ ID NO: 3578709 - DNA, 25 bp, Homo sapien
tctaacacagggtcctgcaaaaacc

SEQ ID NO: 3578710 - DNA, 25 bp, Homo sapien
cagggtcctgcaaaaacctttccat

SEQ ID NO: 3578711 - DNA, 25 bp, Homo sapien
gctaagagttgtaggttattgagaa

SEQ ID NO: 3578712 - DNA, 25 bp, Homo sapien
agttgtaggttattgagaaggccag

SEQ ID NO: 3578713 - DNA, 25 bp, Homo sapien
ggttgctaagagttgtaggttattg

SEQ ID NO: 3578714 - DNA, 25 bp, Homo sapien
cagaggggagaatagccagaaaggg

SEQ ID NO: 3578715 - DNA, 25 bp, Homo sapien
gcaaggtaaagctctgtggaccata

SEQ ID NO: 3578716 - DNA, 25 bp, Homo sapien
tcgcaaggtaaagctctgtggacca

SEQ ID NO: 3578717 - DNA, 25 bp, Homo sapien
cttcgcaaggtaaagctctgtggac

SEQ ID NO: 3578718 - DNA, 25 bp, Homo sapien
cgcaaggtaaagctctgtggaccat

SEQ ID NO: 3578719 - DNA, 25 bp, Homo sapien
tcctacaaagggagcttcgaatgga

SEQ ID NO: 3578720 - DNA, 25 bp, Homo sapien
tagaaattgctgaaataccgaggcc

SEQ ID NO: 3578721 - DNA, 25 bp, Homo sapien
taccgaggccgcaatggaagataaa

SEQ ID NO: 3578722 - DNA, 25 bp, Homo sapien
gaatggaatcaatttccctggacca

SEQ ID NO: 3578723 - DNA, 25 bp, Homo sapien
tccattactggagttgatcctccag

SEQ ID NO: 3578724 - DNA, 25 bp, Homo sapien
ctctcctgaagatattgagaaggaa

SEQ ID NO: 3578725 - DNA, 25 bp, Homo sapien
gaaaatggcttccaataaaggggca

SEQ ID NO: 3578726 - DNA, 25 bp, Homo sapien
gggcattgggtcttgtcttccatta

SEQ ID NO: 3578727 - DNA, 25 bp, Homo sapien
ggcgccctgcagctttgcatgaatg

SEQ ID NO: 3578728 - DNA, 25 bp, Homo sapien
gcacagttgtttgaggataagtcca

SEQ ID NO: 3578729 - DNA, 25 bp, Homo sapien
ggtgtttgcacagttgtttgaggat

SEQ ID NO: 3578730 - DNA, 25 bp, Homo sapien
tgcatgaatgtgatacttcacttcc

SEQ ID NO: 3578731 - DNA, 25 bp, Homo sapien
tctgtggtggctggactgactctcc

SEQ ID NO: 3578732 - DNA, 25 bp, Homo sapien
tgtggtggctggactgactctccat

SEQ ID NO: 3578733 - DNA, 25 bp, Homo sapien
ttctgtggtggctggactgactctc

SEQ ID NO: 3578734 - DNA, 25 bp, Homo sapien
ttttctgtggtggctggactgactc

SEQ ID NO: 3578735 - DNA, 25 bp, Homo sapien
ttccgaggcactggcacacgcagct

SEQ ID NO: 3578736 - DNA, 25 bp, Homo sapien
gcttccgaggcactggcacacgcag

SEQ ID NO: 3578737 - DNA, 25 bp, Homo sapien
ggcttccgaggcactggcacacgca

SEQ ID NO: 3578738 - DNA, 25 bp, Homo sapien
cgaggcactggcacacgcagctcac

SEQ ID NO: 3578739 - DNA, 25 bp, Homo sapien
gagcatcagtaagccttctctgcag

SEQ ID NO: 3578740 - DNA, 25 bp, Homo sapien
tgcagccaacccctagcatggatag

SEQ ID NO: 3578741 - DNA, 25 bp, Homo sapien
cctgagcatcagtaagccttctctg

SEQ ID NO: 3578742 - DNA, 25 bp, Homo sapien
tagcatggatagcttgggcacaagg

SEQ ID NO: 3578743 - DNA, 25 bp, Homo sapien
aaaaaggactccaatgcttaatatg

SEQ ID NO: 3578744 - DNA, 25 bp, Homo sapien
aaaaggactccaatgcttaatatgg

SEQ ID NO: 3578745 - DNA, 25 bp, Homo sapien
ttaaaaaggactccaatgcttaata

SEQ ID NO: 3578746 - DNA, 25 bp, Homo sapien
aaaggactccaatgcttaatatggt

SEQ ID NO: 3578747 - DNA, 25 bp, Homo sapien
tctttccccactggaggaggtataa

SEQ ID NO: 3578748 - DNA, 25 bp, Homo sapien
gaggaggtataaggtgggggctcag

SEQ ID NO: 3578749 - DNA, 25 bp, Homo sapien
tccccactggaggaggtataaggtg

SEQ ID NO: 3578750 - DNA, 25 bp, Homo sapien
ggaggtataaggtgggggctcagtg

SEQ ID NO: 3578751 - DNA, 25 bp, Homo sapien
tagggacctatgcttccttcagcct

SEQ ID NO: 3578752 - DNA, 25 bp, Homo sapien
atctgtgtgaactttggcaagccgc

SEQ ID NO: 3578753 - DNA, 25 bp, Homo sapien
ctctgctgcttagcatagggaccta

SEQ ID NO: 3578754 - DNA, 25 bp, Homo sapien
actgtttgcagtagggccccgcaga

SEQ ID NO: 3578755 - DNA, 25 bp, Homo sapien
tcacttcttttgataagactcaagg

SEQ ID NO: 3578756 - DNA, 25 bp, Homo sapien
ctcacttcttttgataagactcaag

SEQ ID NO: 3578757 - DNA, 25 bp, Homo sapien
tctcttgcccagaatactgtcacag

SEQ ID NO: 3578758 - DNA, 25 bp, Homo sapien
tgaccactgctagggatcacctttg

SEQ ID NO: 3578759 - DNA, 25 bp, Homo sapien
taacaccttagtccgtgctgtcatc

SEQ ID NO: 3578760 - DNA, 25 bp, Homo sapien
caggcacctcatacgcaaattccag

SEQ ID NO: 3578761 - DNA, 25 bp, Homo sapien
gcatgactgcctgcagcaaattgat

SEQ ID NO: 3578762 - DNA, 25 bp, Homo sapien
gcaaattgatttgtgccagttgctg

SEQ ID NO: 3578763 - DNA, 25 bp, Homo sapien
taggagtgggacattcccaacagac

SEQ ID NO: 3578764 - DNA, 25 bp, Homo sapien
cagagagagccacggagcatgactg

SEQ ID NO: 3578765 - DNA, 25 bp, Homo sapien
tctcatcagtggtcaggatgatgac

SEQ ID NO: 3578766 - DNA, 25 bp, Homo sapien
catcagtggtcaggatgatgaccat

SEQ ID NO: 3578767 - DNA, 25 bp, Homo sapien
cccaggcagtagcactgtgagccac

SEQ ID NO: 3578768 - DNA, 25 bp, Homo sapien
ccacccagtggtggatctcatcagt

SEQ ID NO: 3578769 - DNA, 25 bp, Homo sapien
tgtcatcaatggtatgaccaagaag

SEQ ID NO: 3578770 - DNA, 25 bp, Homo sapien
tatctttgatcaagcttgtcatcaa

SEQ ID NO: 3578771 - DNA, 25 bp, Homo sapien
caagaagcacgcaagatggtgctgc

SEQ ID NO: 3578772 - DNA, 25 bp, Homo sapien
ggtgctgcaccaaccatattccttc

SEQ ID NO: 3578773 - DNA, 25 bp, Homo sapien
gaggcttgaacacaatgagcgcaga

SEQ ID NO: 3578774 - DNA, 25 bp, Homo sapien
tgaacacaatgagcgcagacagctg

SEQ ID NO: 3578775 - DNA, 25 bp, Homo sapien
ggtgcagaggcttgaacacaatgag

SEQ ID NO: 3578776 - DNA, 25 bp, Homo sapien
tttcaggtgcagaggcttgaacaca

SEQ ID NO: 3578777 - DNA, 25 bp, Homo sapien
tcatggacctaaaatataatggagc

SEQ ID NO: 3578778 - DNA, 25 bp, Homo sapien
cttttccaggcaaggtgttcatttc

SEQ ID NO: 3578779 - DNA, 25 bp, Homo sapien
gaactgcaatctatccctcatggac

SEQ ID NO: 3578780 - DNA, 25 bp, Homo sapien
tgatgcacagagcactttacttgga

SEQ ID NO: 3578781 - DNA, 25 bp, Homo sapien
tagaccttagcccatatccttccag

SEQ ID NO: 3578782 - DNA, 25 bp, Homo sapien
gcaatttaccagcaagccttcacag

SEQ ID NO: 3578783 - DNA, 25 bp, Homo sapien
cactcaaacaattgatagccaggga

SEQ ID NO: 3578784 - DNA, 25 bp, Homo sapien
gaggtgggcacttcaatagaacagg

SEQ ID NO: 3578785 - DNA, 25 bp, Homo sapien
ttcacagctctgagtagattcactt

SEQ ID NO: 3578786 - DNA, 25 bp, Homo sapien
tgactgggtcaaattcccccaagat

SEQ ID NO: 3578787 - DNA, 25 bp, Homo sapien
attcccccaagatttcacagctctg

SEQ ID NO: 3578788 - DNA, 25 bp, Homo sapien
tttcacagctctgagtagattcact

SEQ ID NO: 3578789 - DNA, 25 bp, Homo sapien
ctgccacgtaggatagaccgggtca

SEQ ID NO: 3578790 - DNA, 25 bp, Homo sapien
gatagaccgggtcaacaaaataatc

SEQ ID NO: 3578791 - DNA, 25 bp, Homo sapien
tagaccgggtcaacaaaataatcat

SEQ ID NO: 3578792 - DNA, 25 bp, Homo sapien
ccacgtaggatagaccgggtcaaca

SEQ ID NO: 3578793 - DNA, 25 bp, Homo sapien
ccaggtattagggtgcaaatgagca

SEQ ID NO: 3578794 - DNA, 25 bp, Homo sapien
cactcaagcgttcattcaacccgtt

SEQ ID NO: 3578795 - DNA, 25 bp, Homo sapien
gaattgagttcattaaactctggac

SEQ ID NO: 3578796 - DNA, 25 bp, Homo sapien
tattagggtgcaaatgagcagccca

SEQ ID NO: 3578797 - DNA, 25 bp, Homo sapien
tattaatcagagagccacaggccct

SEQ ID NO: 3578798 - DNA, 25 bp, Homo sapien
gctcccctagggtacctgaggtcca

SEQ ID NO: 3578799 - DNA, 25 bp, Homo sapien
tctgtgctagcctgtgggatgccaa

SEQ ID NO: 3578800 - DNA, 25 bp, Homo sapien
taactcattgggtgaaaaacctgac

SEQ ID NO: 3578801 - DNA, 25 bp, Homo sapien
cttatgatgtttgctcacagggaag

SEQ ID NO: 3578802 - DNA, 25 bp, Homo sapien
ccttatgatgtttgctcacagggaa

SEQ ID NO: 3578803 - DNA, 25 bp, Homo sapien
ttatgatgtttgctcacagggaagt

SEQ ID NO: 3578804 - DNA, 25 bp, Homo sapien
tatgatgtttgctcacagggaagtt

SEQ ID NO: 3578805 - DNA, 25 bp, Homo sapien
gggttgcttgctagtgaaagtccct

SEQ ID NO: 3578806 - DNA, 25 bp, Homo sapien
ataggcaatcaaccacaggtcccgg

SEQ ID NO: 3578807 - DNA, 25 bp, Homo sapien
tttgtgtgctcctggatcacaagga

SEQ ID NO: 3578808 - DNA, 25 bp, Homo sapien
gggagaatatacacccacatgtttc

SEQ ID NO: 3578809 - DNA, 25 bp, Homo sapien
tctgggcaagctacagagcccctct

SEQ ID NO: 3578810 - DNA, 25 bp, Homo sapien
cagcatgttaacattccgaagggac

SEQ ID NO: 3578811 - DNA, 25 bp, Homo sapien
tatcaggccctagtgtcatttccca

SEQ ID NO: 3578812 - DNA, 25 bp, Homo sapien
gggacagagtgatccacatacagca

SEQ ID NO: 3578813 - DNA, 25 bp, Homo sapien
gtgttccaataggtggtgctgccag

SEQ ID NO: 3578814 - DNA, 25 bp, Homo sapien
tgaagggactcggtgtgtttcacaa

SEQ ID NO: 3578815 - DNA, 25 bp, Homo sapien
tgccagaggatgcagtgcgtgctac

SEQ ID NO: 3578816 - DNA, 25 bp, Homo sapien
ttgccctggggccatcggagacacg

SEQ ID NO: 3578817 - DNA, 25 bp, Homo sapien
ttctcactctgattagcgagcaatt

SEQ ID NO: 3578818 - DNA, 25 bp, Homo sapien
tcaatgagcagaaatctactggttc

SEQ ID NO: 3578819 - DNA, 25 bp, Homo sapien
ggcacagaatatgagttccaactct

SEQ ID NO: 3578820 - DNA, 25 bp, Homo sapien
ctgattagcgagcaatttcctgaag

SEQ ID NO: 3578821 - DNA, 25 bp, Homo sapien
gagtgacccctggatctttgatctg

SEQ ID NO: 3578822 - DNA, 25 bp, Homo sapien
gataggctccccagtttacttaaca

SEQ ID NO: 3578823 - DNA, 25 bp, Homo sapien
ttcaggcctagagggtcctcaggtg

SEQ ID NO: 3578824 - DNA, 25 bp, Homo sapien
gcactcaggagacaattcaggccta

SEQ ID NO: 3578825 - DNA, 25 bp, Homo sapien
cagtccctcgccaaccatgggggtt

SEQ ID NO: 3578826 - DNA, 25 bp, Homo sapien
acacagcagtccctcgccaaccatg

SEQ ID NO: 3578827 - DNA, 25 bp, Homo sapien
acagcagtccctcgccaaccatggg

SEQ ID NO: 3578828 - DNA, 25 bp, Homo sapien
cacacacagcagtccctcgccaacc

SEQ ID NO: 3578829 - DNA, 25 bp, Homo sapien
gtggaaacccatcaaagccaaatgc

SEQ ID NO: 3578830 - DNA, 25 bp, Homo sapien
tcaggtggtacagaaggacttgtag

SEQ ID NO: 3578831 - DNA, 25 bp, Homo sapien
gacttgtaggcaaaattagaggtgc

SEQ ID NO: 3578832 - DNA, 25 bp, Homo sapien
taattgcatggcctttttaaggcac

SEQ ID NO: 3578833 - DNA, 25 bp, Homo sapien
tgatgcactttaactcttggagctg

SEQ ID NO: 3578834 - DNA, 25 bp, Homo sapien
caccagctgcgcctttgctgatgca

SEQ ID NO: 3578835 - DNA, 25 bp, Homo sapien
attctggctgctccatagctgcccc

SEQ ID NO: 3578836 - DNA, 25 bp, Homo sapien
tagctgccccctctagtccaggtct

SEQ ID NO: 3578837 - DNA, 25 bp, Homo sapien
cctgtactctacagggagggttctt

SEQ ID NO: 3578838 - DNA, 25 bp, Homo sapien
cctccatagtaagtcctgtactcta

SEQ ID NO: 3578839 - DNA, 25 bp, Homo sapien
taagtcctgtactctacagggaggg

SEQ ID NO: 3578840 - DNA, 25 bp, Homo sapien
tagtaagtcctgtactctacaggga

SEQ ID NO: 3578841 - DNA, 25 bp, Homo sapien
gagtattgtcctaaaagcctgctga

SEQ ID NO: 3578842 - DNA, 25 bp, Homo sapien
tctccagcgtgaagcaagtaagcag

SEQ ID NO: 3578843 - DNA, 25 bp, Homo sapien
gatagaagcgatttgctctccagcg

SEQ ID NO: 3578844 - DNA, 25 bp, Homo sapien
tatggtcactcattacagggccagc

SEQ ID NO: 3578845 - DNA, 25 bp, Homo sapien
cagaatgtgatatcgcttgatatag

SEQ ID NO: 3578846 - DNA, 25 bp, Homo sapien
cttgatatagtcataaagtgcattc

SEQ ID NO: 3578847 - DNA, 25 bp, Homo sapien
ttatttaacagaatgtgatatcgct

SEQ ID NO: 3578848 - DNA, 25 bp, Homo sapien
gatatcgcttgatatagtcataaag

SEQ ID NO: 3578849 - DNA, 25 bp, Homo sapien
ggcgagtctatgcactcctggagca

SEQ ID NO: 3578850 - DNA, 25 bp, Homo sapien
tcaagtcgacgtcaaatgcttccca

SEQ ID NO: 3578851 - DNA, 25 bp, Homo sapien
ggctccctggtagaagcttgattaa

SEQ ID NO: 3578852 - DNA, 25 bp, Homo sapien
aaagtcatacaagctagtccagtgg

SEQ ID NO: 3578853 - DNA, 25 bp, Homo sapien
cgcaggcccttactgattggattaa

SEQ ID NO: 3578854 - DNA, 25 bp, Homo sapien
tgaggagtgtaccaaagggacccag

SEQ ID NO: 3578855 - DNA, 25 bp, Homo sapien
ccttgagatctgagtggcgtaccct

SEQ ID NO: 3578856 - DNA, 25 bp, Homo sapien
caacggtgctaaggatcaaggtgag

SEQ ID NO: 3578857 - DNA, 25 bp, Homo sapien
tgtgaaccagaaggacggagttacc

SEQ ID NO: 3578858 - DNA, 25 bp, Homo sapien
ttagctgagctaggaaggattgcca

SEQ ID NO: 3578859 - DNA, 25 bp, Homo sapien
ccaatatgatttcctgacggctgag

SEQ ID NO: 3578860 - DNA, 25 bp, Homo sapien
tccaaaatttgaggcctgtgaacca

SEQ ID NO: 3578861 - DNA, 25 bp, Homo sapien
caatgacagtctgcatctgatgctc

SEQ ID NO: 3578862 - DNA, 25 bp, Homo sapien
aatgacagtctgcatctgatgctcc

SEQ ID NO: 3578863 - DNA, 25 bp, Homo sapien
tcaatgacagtctgcatctgatgct

SEQ ID NO: 3578864 - DNA, 25 bp, Homo sapien
taaaatgccatacagcaggtggaga

SEQ ID NO: 3578865 - DNA, 25 bp, Homo sapien
ctcttctcggaggaactatttgtca

SEQ ID NO: 3578866 - DNA, 25 bp, Homo sapien
gattgattgattgggccctggaact

SEQ ID NO: 3578867 - DNA, 25 bp, Homo sapien
cagtttaaggcctctgaaccaaagg

SEQ ID NO: 3578868 - DNA, 25 bp, Homo sapien
gttctttcggggctgttgatttctc

SEQ ID NO: 3578869 - DNA, 25 bp, Homo sapien
tttgaagctggttttaaataggctg

SEQ ID NO: 3578870 - DNA, 25 bp, Homo sapien
tggatgcaaggttggtggttctttc

SEQ ID NO: 3578871 - DNA, 25 bp, Homo sapien
tctccacccaacaaatgcaggatgc

SEQ ID NO: 3578872 - DNA, 25 bp, Homo sapien
ctccaacaggtccagttccactaag

SEQ ID NO: 3578873 - DNA, 25 bp, Homo sapien
ggagacacccgttcactccaggcaa

SEQ ID NO: 3578874 - DNA, 25 bp, Homo sapien
ccggagaaaacggattcctcctcag

SEQ ID NO: 3578875 - DNA, 25 bp, Homo sapien
acacaggtgccgctaaaggagacac

SEQ ID NO: 3578876 - DNA, 25 bp, Homo sapien
ccgctggttcgcaccgctgctccgg

SEQ ID NO: 3578877 - DNA, 25 bp, Homo sapien
gcggagagcgcgagggagtcgcggc

SEQ ID NO: 3578878 - DNA, 25 bp, Homo sapien
gccgactcctgtaccacgaagacaa

SEQ ID NO: 3578879 - DNA, 25 bp, Homo sapien
gagcccaaagttggcggcgtcccgc

SEQ ID NO: 3578880 - DNA, 25 bp, Homo sapien
ccctctggcagccgggttaaaggct

SEQ ID NO: 3578881 - DNA, 25 bp, Homo sapien
cttcagcaaggtcaaggcgcggccg

SEQ ID NO: 3578882 - DNA, 25 bp, Homo sapien
gtccccgccgcgacctgattcccgc

SEQ ID NO: 3578883 - DNA, 25 bp, Homo sapien
ggcagccgggttaaaggctccttca

SEQ ID NO: 3578884 - DNA, 25 bp, Homo sapien
cagcggcaggaaatccgaagggccc

SEQ ID NO: 3578885 - DNA, 25 bp, Homo sapien
tttttttccagccgagcactggctt

SEQ ID NO: 3578886 - DNA, 25 bp, Homo sapien
cactggcttttcaatcgcattgtta

SEQ ID NO: 3578887 - DNA, 25 bp, Homo sapien
caatcgcattgttaaggatcatggc

SEQ ID NO: 3578888 - DNA, 25 bp, Homo sapien
cagattcagacagatcggggatttc

SEQ ID NO: 3578889 - DNA, 25 bp, Homo sapien
gaacagattcagacagatcggggat

SEQ ID NO: 3578890 - DNA, 25 bp, Homo sapien
gattcagacagatcggggatttcag

SEQ ID NO: 3578891 - DNA, 25 bp, Homo sapien
aacagattcagacagatcggggatt

SEQ ID NO: 3578892 - DNA, 25 bp, Homo sapien
caacacctccgagggaagacttgga

SEQ ID NO: 3578893 - DNA, 25 bp, Homo sapien
gagctctgaagacccaatgaaacct

SEQ ID NO: 3578894 - DNA, 25 bp, Homo sapien
cacgtgaagggcacagggcttgaaa

SEQ ID NO: 3578895 - DNA, 25 bp, Homo sapien
caccgcgggcaggtttctaaacacg

SEQ ID NO: 3578896 - DNA, 25 bp, Homo sapien
agcagcatcagcacccgacgcccat

SEQ ID NO: 3578897 - DNA, 25 bp, Homo sapien
acccgacgcccatcgcacaagtggg

SEQ ID NO: 3578898 - DNA, 25 bp, Homo sapien
gcgccgtggtgcgaggcgtatccta

SEQ ID NO: 3578899 - DNA, 25 bp, Homo sapien
ccatcgcacaagtgggcgccgtggt

SEQ ID NO: 3578900 - DNA, 25 bp, Homo sapien
gtctttcgagaaccgggagctcgca

SEQ ID NO: 3578901 - DNA, 25 bp, Homo sapien
ggtacttacactccccaagcaggca

SEQ ID NO: 3578902 - DNA, 25 bp, Homo sapien
aagcaggcaaactttcaggcttgtc

SEQ ID NO: 3578903 - DNA, 25 bp, Homo sapien
tcaggcttgtctttcgagaaccggg

SEQ ID NO: 3578904 - DNA, 25 bp, Homo sapien
atttccaaagttaaggaccacgcag

SEQ ID NO: 3578905 - DNA, 25 bp, Homo sapien
ccacgcagctgaatttccagtactt

SEQ ID NO: 3578906 - DNA, 25 bp, Homo sapien
tccaaagttaaggaccacgcagctg

SEQ ID NO: 3578907 - DNA, 25 bp, Homo sapien
gccctgaaagcggagccaatttcca

SEQ ID NO: 3578908 - DNA, 25 bp, Homo sapien
cgaacatcaataccgcggccgggcg

SEQ ID NO: 3578909 - DNA, 25 bp, Homo sapien
caggatctgagctccaaccaccgcc

SEQ ID NO: 3578910 - DNA, 25 bp, Homo sapien
ctagacgaacatcaataccgcggcc

SEQ ID NO: 3578911 - DNA, 25 bp, Homo sapien
ccccgcgggttgcagagggcgagga

SEQ ID NO: 3578912 - DNA, 25 bp, Homo sapien
ggcgccgcgccggtggctcctctct

SEQ ID NO: 3578913 - DNA, 25 bp, Homo sapien
agcgagaccaacaatagctcccgcg

SEQ ID NO: 3578914 - DNA, 25 bp, Homo sapien
gcaggtccgggctctgcgctcagct

SEQ ID NO: 3578915 - DNA, 25 bp, Homo sapien
cgtggctgcaggctgctaccgccgg

SEQ ID NO: 3578916 - DNA, 25 bp, Homo sapien
ctgcaatcccgaggcttctgggggg

SEQ ID NO: 3578917 - DNA, 25 bp, Homo sapien
gtgtgtttaatagcttcccttctct

SEQ ID NO: 3578918 - DNA, 25 bp, Homo sapien
gtgtgtgtttaatagcttcccttct

SEQ ID NO: 3578919 - DNA, 25 bp, Homo sapien
gtgtttaatagcttcccttctcttc

SEQ ID NO: 3578920 - DNA, 25 bp, Homo sapien
ttttcaaagggcctccgcatctgtt

SEQ ID NO: 3578921 - DNA, 25 bp, Homo sapien
ttgattgactcaatccttgtaccca

SEQ ID NO: 3578922 - DNA, 25 bp, Homo sapien
gcctccgcatctgttgattgactca

SEQ ID NO: 3578923 - DNA, 25 bp, Homo sapien
tgtacccacgcctgctggaatccta

SEQ ID NO: 3578924 - DNA, 25 bp, Homo sapien
cagatgagcctgtaatggttctgat

SEQ ID NO: 3578925 - DNA, 25 bp, Homo sapien
tctgatgtcagattgtactcctcca

SEQ ID NO: 3578926 - DNA, 25 bp, Homo sapien
cctttgaaggcatatgatttgggca

SEQ ID NO: 3578927 - DNA, 25 bp, Homo sapien
gacatttgctcccagatagcaggga

SEQ ID NO: 3578928 - DNA, 25 bp, Homo sapien
tgtatagaaggtaaagtttttgaga

SEQ ID NO: 3578929 - DNA, 25 bp, Homo sapien
cctgctttggctggttatagaattc

SEQ ID NO: 3578930 - DNA, 25 bp, Homo sapien
tattattttaatgaccctgatggtt

SEQ ID NO: 3578931 - DNA, 25 bp, Homo sapien
tgaccctgatggttttattgtctct

SEQ ID NO: 3578932 - DNA, 25 bp, Homo sapien
ctttgactgcaagatactcactact

SEQ ID NO: 3578933 - DNA, 25 bp, Homo sapien
tcactactttccaccacctttgaag

SEQ ID NO: 3578934 - DNA, 25 bp, Homo sapien
gtcaaaggtagaccctcactgttac

SEQ ID NO: 3578935 - DNA, 25 bp, Homo sapien
ctttgaagtcaaaggtagaccctca

SEQ ID NO: 3578936 - DNA, 25 bp, Homo sapien
ggtgtggaaagacatcgagttcctt

SEQ ID NO: 3578937 - DNA, 25 bp, Homo sapien
caagagccttaaggtgtggaaagac

SEQ ID NO: 3578938 - DNA, 25 bp, Homo sapien
gaaatatgcaagagccttaaggtgt

SEQ ID NO: 3578939 - DNA, 25 bp, Homo sapien
gccttaaggtgtggaaagacatcga

SEQ ID NO: 3578940 - DNA, 25 bp, Homo sapien
acaagaagcccctcttccgctcagg

SEQ ID NO: 3578941 - DNA, 25 bp, Homo sapien
aacaagaagcccctcttccgctcag

SEQ ID NO: 3578942 - DNA, 25 bp, Homo sapien
aaacaagaagcccctcttccgctca

SEQ ID NO: 3578943 - DNA, 25 bp, Homo sapien
aaagatctgtcaaccacataggagc

SEQ ID NO: 3578944 - DNA, 25 bp, Homo sapien
caaatttgtttatggcgctggtcta

SEQ ID NO: 3578945 - DNA, 25 bp, Homo sapien
tattctcagacgaacaaagggcttc

SEQ ID NO: 3578946 - DNA, 25 bp, Homo sapien
gccaagggcgtggaaacaatgtgac

SEQ ID NO: 3578947 - DNA, 25 bp, Homo sapien
ggacctgaaataccggtttgccaca

SEQ ID NO: 3578948 - DNA, 25 bp, Homo sapien
agaagtcttgtctcctcgcagtccc

SEQ ID NO: 3578949 - DNA, 25 bp, Homo sapien
atcctgaccaaatcggctcccaggg

SEQ ID NO: 3578950 - DNA, 25 bp, Homo sapien
agtcccttagaagctcaatcctcag

SEQ ID NO: 3578951 - DNA, 25 bp, Homo sapien
ctaagtgcctacgacgtgcttggca

SEQ ID NO: 3578952 - DNA, 25 bp, Homo sapien
tagggagtagctagaggctgcttca

SEQ ID NO: 3578953 - DNA, 25 bp, Homo sapien
caggtaggcaggtatgctttaggca

SEQ ID NO: 3578954 - DNA, 25 bp, Homo sapien
ctttaggcatggagggcgtcagtcc

SEQ ID NO: 3578955 - DNA, 25 bp, Homo sapien
tcagccatgtgtggacagctcactg

SEQ ID NO: 3578956 - DNA, 25 bp, Homo sapien
catgccagaatctcttggcgtagaa

SEQ ID NO: 3578957 - DNA, 25 bp, Homo sapien
tccactaacccagggtgagcgggtg

SEQ ID NO: 3578958 - DNA, 25 bp, Homo sapien
tagcccacgaggtttcatgccagaa

SEQ ID NO: 3578959 - DNA, 25 bp, Homo sapien
gagatcctctttctgctggctccaa

SEQ ID NO: 3578960 - DNA, 25 bp, Homo sapien
gtttttggaggaggccaaacatctc

SEQ ID NO: 3578961 - DNA, 25 bp, Homo sapien
aggtatatgggctacctgagaaaga

SEQ ID NO: 3578962 - DNA, 25 bp, Homo sapien
tggtcccacgtactgacaatgaggg

SEQ ID NO: 3578963 - DNA, 25 bp, Homo sapien
gcagggtggtcccacgtactgacaa

SEQ ID NO: 3578964 - DNA, 25 bp, Homo sapien
cagcaccaggtatatgggctacctg

SEQ ID NO: 3578965 - DNA, 25 bp, Homo sapien
tcctgctcggacaatgtaatgatga

SEQ ID NO: 3578966 - DNA, 25 bp, Homo sapien
tgtttttggatcacaccccagacat

SEQ ID NO: 3578967 - DNA, 25 bp, Homo sapien
cagggtagacctagccatacagagc

SEQ ID NO: 3578968 - DNA, 25 bp, Homo sapien
cccagacatcctgctcggacaatgt

SEQ ID NO: 3578969 - DNA, 25 bp, Homo sapien
aaaacagcagtgtctgggaacttgc

SEQ ID NO: 3578970 - DNA, 25 bp, Homo sapien
cattcatgagctttcaaaacagcag

SEQ ID NO: 3578971 - DNA, 25 bp, Homo sapien
aagctgtcctcgtggccttttcaaa

SEQ ID NO: 3578972 - DNA, 25 bp, Homo sapien
tgggaacttgcctgaaagctgtcct

SEQ ID NO: 3578973 - DNA, 25 bp, Homo sapien
aaacgctaacagaacgaccctcaca

SEQ ID NO: 3578974 - DNA, 25 bp, Homo sapien
tcccctgttcgtgggcttcttatgc

SEQ ID NO: 3578975 - DNA, 25 bp, Homo sapien
caggccaacaaaaacgctaacagaa

SEQ ID NO: 3578976 - DNA, 25 bp, Homo sapien
tcggctgctgatgaaggacaggcca

SEQ ID NO: 3578977 - DNA, 25 bp, Homo sapien
aaagggagggagtgctatcagcggc

SEQ ID NO: 3578978 - DNA, 25 bp, Homo sapien
caaagggagggagtgctatcagcgg

SEQ ID NO: 3578979 - DNA, 25 bp, Homo sapien
ctcaaagggagggagtgctatcagc

SEQ ID NO: 3578980 - DNA, 25 bp, Homo sapien
tcaaagggagggagtgctatcagcg

SEQ ID NO: 3578981 - DNA, 25 bp, Homo sapien
caagcttggcgggatgtgctctcaa

SEQ ID NO: 3578982 - DNA, 25 bp, Homo sapien
ggatgtgctctcaaaccggcacctt

SEQ ID NO: 3578983 - DNA, 25 bp, Homo sapien
ctgcccactgtggtgtaagcccggt

SEQ ID NO: 3578984 - DNA, 25 bp, Homo sapien
ttgcatccttgcatcctatcccatt

SEQ ID NO: 3578985 - DNA, 25 bp, Homo sapien
caggaaagaggtggcaagtgcattc

SEQ ID NO: 3578986 - DNA, 25 bp, Homo sapien
catggtcatcttattccaacctgag

SEQ ID NO: 3578987 - DNA, 25 bp, Homo sapien
gtttggttccactcacctcttgggc

SEQ ID NO: 3578988 - DNA, 25 bp, Homo sapien
tcaccacctgcgcttggcttggaaa

SEQ ID NO: 3578989 - DNA, 25 bp, Homo sapien
tccatgccagttttcgaagttccct

SEQ ID NO: 3578990 - DNA, 25 bp, Homo sapien
cctgtatctgatcttgggcctggaa

SEQ ID NO: 3578991 - DNA, 25 bp, Homo sapien
gagtccccagaggtgaataccaaca

SEQ ID NO: 3578992 - DNA, 25 bp, Homo sapien
tgaaaagccctaggagacctggcct

SEQ ID NO: 3578993 - DNA, 25 bp, Homo sapien
tctgtcaaggtgcaataggcttgtt

SEQ ID NO: 3578994 - DNA, 25 bp, Homo sapien
caggtctgttggagatacgcacagg

SEQ ID NO: 3578995 - DNA, 25 bp, Homo sapien
tacgcacaggtgtatgaggttgttc

SEQ ID NO: 3578996 - DNA, 25 bp, Homo sapien
tgtgcacatatttgcatgaccttgg

SEQ ID NO: 3578997 - DNA, 25 bp, Homo sapien
taacaggttccctgagtgtaggaag

SEQ ID NO: 3578998 - DNA, 25 bp, Homo sapien
tccctatcagactgggtaacaggtt

SEQ ID NO: 3578999 - DNA, 25 bp, Homo sapien
tgtaggaagtgtagcgtgatcagct

SEQ ID NO: 3579000 - DNA, 25 bp, Homo sapien
tattgaatgacttatcttccttctg

SEQ ID NO: 3579001 - DNA, 25 bp, Homo sapien
tagaatatgctagagtcaagcccac

SEQ ID NO: 3579002 - DNA, 25 bp, Homo sapien
gggtaagtatttcaatggtggctcc

SEQ ID NO: 3579003 - DNA, 25 bp, Homo sapien
tgggcaaaggcataccaccacaaag

SEQ ID NO: 3579004 - DNA, 25 bp, Homo sapien
tgcacagaatcaccctctttctaga

SEQ ID NO: 3579005 - DNA, 25 bp, Homo sapien
tctttcatgtcgtgggaaccttgcc

SEQ ID NO: 3579006 - DNA, 25 bp, Homo sapien
cttttctttcatgtcgtgggaacct

SEQ ID NO: 3579007 - DNA, 25 bp, Homo sapien
ttcatgtcgtgggaaccttgccaca

SEQ ID NO: 3579008 - DNA, 25 bp, Homo sapien
catgtcgtgggaaccttgccacatt

SEQ ID NO: 3579009 - DNA, 25 bp, Homo sapien
tagctggctggaagctatcaccagg

SEQ ID NO: 3579010 - DNA, 25 bp, Homo sapien
cacagcagacaactactgctggttc

SEQ ID NO: 3579011 - DNA, 25 bp, Homo sapien
tggttcattagctggctggaagcta

SEQ ID NO: 3579012 - DNA, 25 bp, Homo sapien
cagcagacaactactgctggttcat

SEQ ID NO: 3579013 - DNA, 25 bp, Homo sapien
gctgatggcttcaatgccactagct

SEQ ID NO: 3579014 - DNA, 25 bp, Homo sapien
tctagagccaatgtcccgctgggca

SEQ ID NO: 3579015 - DNA, 25 bp, Homo sapien
aatgccactagctctagagccaatg

SEQ ID NO: 3579016 - DNA, 25 bp, Homo sapien
cactagctctagagccaatgtcccg

SEQ ID NO: 3579017 - DNA, 25 bp, Homo sapien
cactagttgaatgttccccatttct

SEQ ID NO: 3579018 - DNA, 25 bp, Homo sapien
gaattctgaaccatgaacttcacta

SEQ ID NO: 3579019 - DNA, 25 bp, Homo sapien
gacaaactgggactttgaatttgga

SEQ ID NO: 3579020 - DNA, 25 bp, Homo sapien
aatttggagcctgaattctgaacca

SEQ ID NO: 3579021 - DNA, 25 bp, Homo sapien
gaaacaggtcctctataaaccatac

SEQ ID NO: 3579022 - DNA, 25 bp, Homo sapien
tctataaaccatacgaacaaccctg

SEQ ID NO: 3579023 - DNA, 25 bp, Homo sapien
taaaccatacgaacaaccctggaca

SEQ ID NO: 3579024 - DNA, 25 bp, Homo sapien
agaatccactgaaacaggtcctcta

SEQ ID NO: 3579025 - DNA, 25 bp, Homo sapien
ttttggctgccatgcctcagctgtc

SEQ ID NO: 3579026 - DNA, 25 bp, Homo sapien
tgctgataggcattttggctgccat

SEQ ID NO: 3579027 - DNA, 25 bp, Homo sapien
taggcattttggctgccatgcctca

SEQ ID NO: 3579028 - DNA, 25 bp, Homo sapien
agtgctgataggcattttggctgcc

SEQ ID NO: 3579029 - DNA, 25 bp, Homo sapien
gggccacgctgaatgagtttgccag

SEQ ID NO: 3579030 - DNA, 25 bp, Homo sapien
ctggggccacgctgaatgagtttgc

SEQ ID NO: 3579031 - DNA, 25 bp, Homo sapien
cacgctgaatgagtttgccagagtc

SEQ ID NO: 3579032 - DNA, 25 bp, Homo sapien
ctgaatgagtttgccagagtcaggc

SEQ ID NO: 3579033 - DNA, 25 bp, Homo sapien
ctgtgcttcccagctagcctgcctg

SEQ ID NO: 3579034 - DNA, 25 bp, Homo sapien
cactgagctcatagagtgacctgga

SEQ ID NO: 3579035 - DNA, 25 bp, Homo sapien
gctttctcattctgcggcccactga

SEQ ID NO: 3579036 - DNA, 25 bp, Homo sapien
acctggataccctggccccagaata

SEQ ID NO: 3579037 - DNA, 25 bp, Homo sapien
gctcccattgtggactgaacctgca

SEQ ID NO: 3579038 - DNA, 25 bp, Homo sapien
ggtagctatgacagagctctctgaa

SEQ ID NO: 3579039 - DNA, 25 bp, Homo sapien
agaggactggccctggtagctatga

SEQ ID NO: 3579040 - DNA, 25 bp, Homo sapien
tggaatggctccttatctctctgga

SEQ ID NO: 3579041 - DNA, 25 bp, Homo sapien
cacaacagaacccagataagtaaca

SEQ ID NO: 3579042 - DNA, 25 bp, Homo sapien
gaagctccagtgtttggacatctgc

SEQ ID NO: 3579043 - DNA, 25 bp, Homo sapien
gccatctacaggacattgtgcccag

SEQ ID NO: 3579044 - DNA, 25 bp, Homo sapien
agcctgagaagctcacaacagaacc

SEQ ID NO: 3579045 - DNA, 25 bp, Homo sapien
atactaaatccacagttgtgccctc

SEQ ID NO: 3579046 - DNA, 25 bp, Homo sapien
gttgtgccctccatgctgagagagc

SEQ ID NO: 3579047 - DNA, 25 bp, Homo sapien
gtgccctccatgctgagagagccgg

SEQ ID NO: 3579048 - DNA, 25 bp, Homo sapien
cacagttgtgccctccatgctgaga

SEQ ID NO: 3579049 - DNA, 25 bp, Homo sapien
gtactgctggcatgtcccaaggctg

SEQ ID NO: 3579050 - DNA, 25 bp, Homo sapien
ctggcatctgggtgatatacatgat

SEQ ID NO: 3579051 - DNA, 25 bp, Homo sapien
catctgggtgatatacatgatgctg

SEQ ID NO: 3579052 - DNA, 25 bp, Homo sapien
ctgggtgatatacatgatgctgggc

SEQ ID NO: 3579053 - DNA, 25 bp, Homo sapien
gtctctggcagccacatctgggaac

SEQ ID NO: 3579054 - DNA, 25 bp, Homo sapien
ctctggcagccacatctgggaacat

SEQ ID NO: 3579055 - DNA, 25 bp, Homo sapien
aatgatgtctctggcagccacatct

SEQ ID NO: 3579056 - DNA, 25 bp, Homo sapien
ctaatgatgtctctggcagccacat

SEQ ID NO: 3579057 - DNA, 25 bp, Homo sapien
ctgggatgattggtggaaggccctt

SEQ ID NO: 3579058 - DNA, 25 bp, Homo sapien
ggaaaggactgggatgattggtgga

SEQ ID NO: 3579059 - DNA, 25 bp, Homo sapien
gactgggatgattggtggaaggccc

SEQ ID NO: 3579060 - DNA, 25 bp, Homo sapien
gatgattggtggaaggccctttgtc

SEQ ID NO: 3579061 - DNA, 25 bp, Homo sapien
cattttccatattccagtggaggga

SEQ ID NO: 3579062 - DNA, 25 bp, Homo sapien
tattaatgccttataggctagagcc

SEQ ID NO: 3579063 - DNA, 25 bp, Homo sapien
tatttgggcaaatagatgtgcgtcc

SEQ ID NO: 3579064 - DNA, 25 bp, Homo sapien
tagatgccaattgtttattaatgcc

SEQ ID NO: 3579065 - DNA, 25 bp, Homo sapien
aagcctggctcatctcctcatattc

SEQ ID NO: 3579066 - DNA, 25 bp, Homo sapien
gctcatctcctcatattccatgagg

SEQ ID NO: 3579067 - DNA, 25 bp, Homo sapien
ttccatgaggatttccaaaattgct

SEQ ID NO: 3579068 - DNA, 25 bp, Homo sapien
catgaggatttccaaaattgctaca

SEQ ID NO: 3579069 - DNA, 25 bp, Homo sapien
tattactgacagttcccaaggcatg

SEQ ID NO: 3579070 - DNA, 25 bp, Homo sapien
cggatccactgtgctcctaatgaaa

SEQ ID NO: 3579071 - DNA, 25 bp, Homo sapien
tgacctcaagatatgtacaccgtgg

SEQ ID NO: 3579072 - DNA, 25 bp, Homo sapien
cagttaaattccagtgcactgcagc

SEQ ID NO: 3579073 - DNA, 25 bp, Homo sapien
agaggccttgggctcgcccagaggg

SEQ ID NO: 3579074 - DNA, 25 bp, Homo sapien
gtgctgccaacgagattgatgctga

SEQ ID NO: 3579075 - DNA, 25 bp, Homo sapien
cttgtttccagacccctgattgtat

SEQ ID NO: 3579076 - DNA, 25 bp, Homo sapien
tatgtgcctgcgtgggtcatttcag

SEQ ID NO: 3579077 - DNA, 25 bp, Homo sapien
ccttacagatacgaaaatggagcgg

SEQ ID NO: 3579078 - DNA, 25 bp, Homo sapien
tacccctttactgggatcagcttgc

SEQ ID NO: 3579079 - DNA, 25 bp, Homo sapien
tctttgtgcataaacccatgtgcta

SEQ ID NO: 3579080 - DNA, 25 bp, Homo sapien
tatgcatgacctgaaatggagccag

SEQ ID NO: 3579081 - DNA, 25 bp, Homo sapien
ttaaggatccagcttgatgccatgg

SEQ ID NO: 3579082 - DNA, 25 bp, Homo sapien
tctgcagcatatggccctgactcca

SEQ ID NO: 3579083 - DNA, 25 bp, Homo sapien
tatcaaggcaccagatcacttctct

SEQ ID NO: 3579084 - DNA, 25 bp, Homo sapien
cctgactcttagtggcctgcagtct

SEQ ID NO: 3579085 - DNA, 25 bp, Homo sapien
cctgtgatggattggctggctgtca

SEQ ID NO: 3579086 - DNA, 25 bp, Homo sapien
ttatttaaagccactgatattgggc

SEQ ID NO: 3579087 - DNA, 25 bp, Homo sapien
ccaagagtgcgaatgatggtctgca

SEQ ID NO: 3579088 - DNA, 25 bp, Homo sapien
ttcaaggtgagtgggacgaacaccc

SEQ ID NO: 3579089 - DNA, 25 bp, Homo sapien
gacaagcatttccacaggtaaccat

SEQ ID NO: 3579090 - DNA, 25 bp, Homo sapien
gctgcttggcaagagacccagagac

SEQ ID NO: 3579091 - DNA, 25 bp, Homo sapien
tgcttggcaagagacccagagacaa

SEQ ID NO: 3579092 - DNA, 25 bp, Homo sapien
ccatagttcaggcacgaggtggaac

SEQ ID NO: 3579093 - DNA, 25 bp, Homo sapien
tgaaccagtggtgtccatgtcctgt

SEQ ID NO: 3579094 - DNA, 25 bp, Homo sapien
tgcagcactctgtactcgtgtctca

SEQ ID NO: 3579095 - DNA, 25 bp, Homo sapien
ctcctttgaaccagtggtgtccatg

SEQ ID NO: 3579096 - DNA, 25 bp, Homo sapien
ctcacttaagattcttgttgtattc

SEQ ID NO: 3579097 - DNA, 25 bp, Homo sapien
gactctggacaaaccccttttgcta

SEQ ID NO: 3579098 - DNA, 25 bp, Homo sapien
ctatcctgtttggggactctggaca

SEQ ID NO: 3579099 - DNA, 25 bp, Homo sapien
ctggacaaaccccttttgctacctg

SEQ ID NO: 3579100 - DNA, 25 bp, Homo sapien
tcacccccagacaaagagcacttgg

SEQ ID NO: 3579101 - DNA, 25 bp, Homo sapien
tcagggtttcatatgggattttaca

SEQ ID NO: 3579102 - DNA, 25 bp, Homo sapien
gggccttggtaagagacatttccaa

SEQ ID NO: 3579103 - DNA, 25 bp, Homo sapien
ggagggcaggtgttcaccttccatc

SEQ ID NO: 3579104 - DNA, 25 bp, Homo sapien
tttacactcctctaaggcggagggc

SEQ ID NO: 3579105 - DNA, 25 bp, Homo sapien
ttaggctgccaagccttttccagtt

SEQ ID NO: 3579106 - DNA, 25 bp, Homo sapien
taggctgccaagccttttccagttc

SEQ ID NO: 3579107 - DNA, 25 bp, Homo sapien
cctattggtggctttccttcactgc

SEQ ID NO: 3579108 - DNA, 25 bp, Homo sapien
ttgaaaggtggcctgcctattggtg

SEQ ID NO: 3579109 - DNA, 25 bp, Homo sapien
aggtggcctgcctattggtggcttt

SEQ ID NO: 3579110 - DNA, 25 bp, Homo sapien
ccttcactgcatgtgccaagtaatc

SEQ ID NO: 3579111 - DNA, 25 bp, Homo sapien
agctgtcaagccacatcatgactgg

SEQ ID NO: 3579112 - DNA, 25 bp, Homo sapien
ctctttaacagagacctgtcatcac

SEQ ID NO: 3579113 - DNA, 25 bp, Homo sapien
tggcactccgagcttcatgcaaggc

SEQ ID NO: 3579114 - DNA, 25 bp, Homo sapien
catgcaaggccaagcacttaatctc

SEQ ID NO: 3579115 - DNA, 25 bp, Homo sapien
cagatgtgctcagacttgagcctga

SEQ ID NO: 3579116 - DNA, 25 bp, Homo sapien
cttcctcgagcaatgcagcaaacat

SEQ ID NO: 3579117 - DNA, 25 bp, Homo sapien
gacttgagcctgactcacggaagag

SEQ ID NO: 3579118 - DNA, 25 bp, Homo sapien
tgcagcaaacatcggcaccacagat

SEQ ID NO: 3579119 - DNA, 25 bp, Homo sapien
ccaggtcagcattgagtgtactcag

SEQ ID NO: 3579120 - DNA, 25 bp, Homo sapien
ggctgggacttaccccaccctgcag

SEQ ID NO: 3579121 - DNA, 25 bp, Homo sapien
acttaccccaccctgcagtcctcat

SEQ ID NO: 3579122 - DNA, 25 bp, Homo sapien
agcttgtcctgttcccgtgggggct

SEQ ID NO: 3579123 - DNA, 25 bp, Homo sapien
tctctataggacacagacgatgctt

SEQ ID NO: 3579124 - DNA, 25 bp, Homo sapien
cccaaagcatggagttgtattgtcc

SEQ ID NO: 3579125 - DNA, 25 bp, Homo sapien
tagtgcccacagcacaatccctttg

SEQ ID NO: 3579126 - DNA, 25 bp, Homo sapien
aatgtgggtttctctcgtgtagtgc

SEQ ID NO: 3579127 - DNA, 25 bp, Homo sapien
cactttggaaagctagaatttacta

SEQ ID NO: 3579128 - DNA, 25 bp, Homo sapien
aagctagaatttactagaccattca

SEQ ID NO: 3579129 - DNA, 25 bp, Homo sapien
ctttggaaagctagaatttactaga

SEQ ID NO: 3579130 - DNA, 25 bp, Homo sapien
tggaaagctagaatttactagacca

SEQ ID NO: 3579131 - DNA, 25 bp, Homo sapien
agacccatgacaaatccaagctcca

SEQ ID NO: 3579132 - DNA, 25 bp, Homo sapien
caatatgaccaatgtttgtcaccag

SEQ ID NO: 3579133 - DNA, 25 bp, Homo sapien
tatgaccaatgtttgtcaccagaga

SEQ ID NO: 3579134 - DNA, 25 bp, Homo sapien
tgtcaccagagacccatgacaaatc

SEQ ID NO: 3579135 - DNA, 25 bp, Homo sapien
tacagggtggattcagacgactagc

SEQ ID NO: 3579136 - DNA, 25 bp, Homo sapien
tactagcgggtactggtgtgcctgc

SEQ ID NO: 3579137 - DNA, 25 bp, Homo sapien
cacagtggcagaatcagcttgcggg

SEQ ID NO: 3579138 - DNA, 25 bp, Homo sapien
cctggactgtgtggtctaggaaact

SEQ ID NO: 3579139 - DNA, 25 bp, Homo sapien
gggtgccccactgacgatcatcatg

SEQ ID NO: 3579140 - DNA, 25 bp, Homo sapien
tggttgttttagcaggaaaaccaca

SEQ ID NO: 3579141 - DNA, 25 bp, Homo sapien
gatcatcatggcaaatcacactcac

SEQ ID NO: 3579142 - DNA, 25 bp, Homo sapien
aaaccacattgatattgcccactcc

SEQ ID NO: 3579143 - DNA, 25 bp, Homo sapien
tgagctctctgaatttggccacctg

SEQ ID NO: 3579144 - DNA, 25 bp, Homo sapien
acatcctttttaggacctgtgggca

SEQ ID NO: 3579145 - DNA, 25 bp, Homo sapien
atcctttttaggacctgtgggcatc

SEQ ID NO: 3579146 - DNA, 25 bp, Homo sapien
tggccacctgatgcaacatcctttt

SEQ ID NO: 3579147 - DNA, 25 bp, Homo sapien
taactttggtctgaaagacaaaaca

SEQ ID NO: 3579148 - DNA, 25 bp, Homo sapien
agacaaaacaagcacctaccaccat

SEQ ID NO: 3579149 - DNA, 25 bp, Homo sapien
ctgaaagacaaaacaagcacctacc

SEQ ID NO: 3579150 - DNA, 25 bp, Homo sapien
ctttggtctgaaagacaaaacaagc

SEQ ID NO: 3579151 - DNA, 25 bp, Homo sapien
agaacatgggtgaattaccccagta

SEQ ID NO: 3579152 - DNA, 25 bp, Homo sapien
gtgaattaccccagtaacttctctc

SEQ ID NO: 3579153 - DNA, 25 bp, Homo sapien
catgggtgaattaccccagtaactt

SEQ ID NO: 3579154 - DNA, 25 bp, Homo sapien
gaacatgggtgaattaccccagtaa

SEQ ID NO: 3579155 - DNA, 25 bp, Homo sapien
cagacctagggtctatgccattgag

SEQ ID NO: 3579156 - DNA, 25 bp, Homo sapien
tatggagttcgtactctcccggaca

SEQ ID NO: 3579157 - DNA, 25 bp, Homo sapien
gctgggccattgctacttcacatag

SEQ ID NO: 3579158 - DNA, 25 bp, Homo sapien
caaagactattaactcactgagagc

SEQ ID NO: 3579159 - DNA, 25 bp, Homo sapien
agatctaaaatctggttctggctgc

SEQ ID NO: 3579160 - DNA, 25 bp, Homo sapien
ttttaccaagcctaactagatctaa

SEQ ID NO: 3579161 - DNA, 25 bp, Homo sapien
ctacttttaccaagcctaactagat

SEQ ID NO: 3579162 - DNA, 25 bp, Homo sapien
ctagatctaaaatctggttctggct

SEQ ID NO: 3579163 - DNA, 25 bp, Homo sapien
ctacaccatcagtgtagcatgtata

SEQ ID NO: 3579164 - DNA, 25 bp, Homo sapien
agtctggggcccacataagaatttc

SEQ ID NO: 3579165 - DNA, 25 bp, Homo sapien
agcatgtatatctttgtaaccagtc

SEQ ID NO: 3579166 - DNA, 25 bp, Homo sapien
catcagtgtagcatgtatatctttg

SEQ ID NO: 3579167 - DNA, 25 bp, Homo sapien
ctggagtcaggcatcagctcaggtg

SEQ ID NO: 3579168 - DNA, 25 bp, Homo sapien
tgtttccctcaaccttggccaaggc

SEQ ID NO: 3579169 - DNA, 25 bp, Homo sapien
catcagctcaggtgttggaggatct

SEQ ID NO: 3579170 - DNA, 25 bp, Homo sapien
tcagctcaggtgttggaggatcttc

SEQ ID NO: 3579171 - DNA, 25 bp, Homo sapien
tttggagagagcacattctctggtt

SEQ ID NO: 3579172 - DNA, 25 bp, Homo sapien
gcacattctctggtttgctccctac

SEQ ID NO: 3579173 - DNA, 25 bp, Homo sapien
ctgtttggagagagcacattctctg

SEQ ID NO: 3579174 - DNA, 25 bp, Homo sapien
gagagagcacattctctggtttgct

SEQ ID NO: 3579175 - DNA, 25 bp, Homo sapien
tgatattcgtgaggctaacatactc

SEQ ID NO: 3579176 - DNA, 25 bp, Homo sapien
ctattttgatattcgtgaggctaac

SEQ ID NO: 3579177 - DNA, 25 bp, Homo sapien
ttcgtgaggctaacatactcaacca

SEQ ID NO: 3579178 - DNA, 25 bp, Homo sapien
tttgatattcgtgaggctaacatac

SEQ ID NO: 3579179 - DNA, 25 bp, Homo sapien
catcttggagcttcatgggactcta

SEQ ID NO: 3579180 - DNA, 25 bp, Homo sapien
tcagataagctaagtcggcacgtgc

SEQ ID NO: 3579181 - DNA, 25 bp, Homo sapien
cctaagaggtaggatcaggtgcctg

SEQ ID NO: 3579182 - DNA, 25 bp, Homo sapien
tctagggccccagtaagtttccata

SEQ ID NO: 3579183 - DNA, 25 bp, Homo sapien
tgtaaaagaagtgccgggcctgctc

SEQ ID NO: 3579184 - DNA, 25 bp, Homo sapien
tttatggctgccagtccactacggg

SEQ ID NO: 3579185 - DNA, 25 bp, Homo sapien
gcctgctgcccgctgagcttgtctg

SEQ ID NO: 3579186 - DNA, 25 bp, Homo sapien
tgcctgtaaaagaagtgccgggcct

SEQ ID NO: 3579187 - DNA, 25 bp, Homo sapien
tctctcctccactattgatatgcaa

SEQ ID NO: 3579188 - DNA, 25 bp, Homo sapien
tggactctgcagaacagaacacact

SEQ ID NO: 3579189 - DNA, 25 bp, Homo sapien
actattgatatgcaacacacccatg

SEQ ID NO: 3579190 - DNA, 25 bp, Homo sapien
ctacagtaggcaaatggactctgca

SEQ ID NO: 3579191 - DNA, 25 bp, Homo sapien
agagttgcggcccactctcagtcct

SEQ ID NO: 3579192 - DNA, 25 bp, Homo sapien
gtggctagcttctatctcagttcct

SEQ ID NO: 3579193 - DNA, 25 bp, Homo sapien
tgtggctagcttctatctcagttcc

SEQ ID NO: 3579194 - DNA, 25 bp, Homo sapien
ctgtggctagcttctatctcagttc

SEQ ID NO: 3579195 - DNA, 25 bp, Homo sapien
gccaatgtgaccagagtagtctaca

SEQ ID NO: 3579196 - DNA, 25 bp, Homo sapien
tcttttctctgctcgcccaaggttc

SEQ ID NO: 3579197 - DNA, 25 bp, Homo sapien
tgctcgcccaaggttctgactcttc

SEQ ID NO: 3579198 - DNA, 25 bp, Homo sapien
gaatctgcttcacactgagctggca

SEQ ID NO: 3579199 - DNA, 25 bp, Homo sapien
gctcctgaagaaggttgtaatcttg

SEQ ID NO: 3579200 - DNA, 25 bp, Homo sapien
tttgcagtagctattcaggtgaatg

SEQ ID NO: 3579201 - DNA, 25 bp, Homo sapien
taatcttgatagagatgtggctgta

SEQ ID NO: 3579202 - DNA, 25 bp, Homo sapien
tgtgaaagcctctatgtccttgggc

SEQ ID NO: 3579203 - DNA, 25 bp, Homo sapien
ttgcccttggcaagcccatcaacgt

SEQ ID NO: 3579204 - DNA, 25 bp, Homo sapien
gctttaatggtgttacccaccttca

SEQ ID NO: 3579205 - DNA, 25 bp, Homo sapien
tgcctctgtttccacgttgatcctt

SEQ ID NO: 3579206 - DNA, 25 bp, Homo sapien
ccatcaacgtgcatggctgcacctg

SEQ ID NO: 3579207 - DNA, 25 bp, Homo sapien
accactaggctgaggatccttgaga

SEQ ID NO: 3579208 - DNA, 25 bp, Homo sapien
aggatccttgagaacagtgaccact

SEQ ID NO: 3579209 - DNA, 25 bp, Homo sapien
tgaccactacatattcttgagatcc

SEQ ID NO: 3579210 - DNA, 25 bp, Homo sapien
cctaatgttaagttcaatggttggg

SEQ ID NO: 3579211 - DNA, 25 bp, Homo sapien
ctgagatttcggcaggtggctccca

SEQ ID NO: 3579212 - DNA, 25 bp, Homo sapien
tgagatttcggcaggtggctcccac

SEQ ID NO: 3579213 - DNA, 25 bp, Homo sapien
tgtaatctgagatttcggcaggtgg

SEQ ID NO: 3579214 - DNA, 25 bp, Homo sapien
aatctgagatttcggcaggtggctc

SEQ ID NO: 3579215 - DNA, 25 bp, Homo sapien
ttaggccaatagaagagtagtgatt

SEQ ID NO: 3579216 - DNA, 25 bp, Homo sapien
catgaaggctatgagtatggaagct

SEQ ID NO: 3579217 - DNA, 25 bp, Homo sapien
taattctgctaacctactgcacaat

SEQ ID NO: 3579218 - DNA, 25 bp, Homo sapien
ggtaaaattgagacagatcatgaag

SEQ ID NO: 3579219 - DNA, 25 bp, Homo sapien
gagtcccagtttgcctcatctggtg

SEQ ID NO: 3579220 - DNA, 25 bp, Homo sapien
aaagtgtagtgtaagaacaatggcc

SEQ ID NO: 3579221 - DNA, 25 bp, Homo sapien
gaagcgtgggtcagctttgctacat

SEQ ID NO: 3579222 - DNA, 25 bp, Homo sapien
tggcctgccactttcgatctgtgaa

SEQ ID NO: 3579223 - DNA, 25 bp, Homo sapien
tcctggaaagcagggactttaatat

SEQ ID NO: 3579224 - DNA, 25 bp, Homo sapien
ctggaaagcagggactttaatattt

SEQ ID NO: 3579225 - DNA, 25 bp, Homo sapien
agatcctggaaagcagggactttaa

SEQ ID NO: 3579226 - DNA, 25 bp, Homo sapien
gatcctggaaagcagggactttaat

SEQ ID NO: 3579227 - DNA, 25 bp, Homo sapien
tgagttcaagctgcctttacaacta

SEQ ID NO: 3579228 - DNA, 25 bp, Homo sapien
aaggctccagatggacgaccccatc

SEQ ID NO: 3579229 - DNA, 25 bp, Homo sapien
tgcctccatacaaggtggaggaagg

SEQ ID NO: 3579230 - DNA, 25 bp, Homo sapien
tgcctttacaactactttctccagg

SEQ ID NO: 3579231 - DNA, 25 bp, Homo sapien
ttcctcggtaatacattcctccact

SEQ ID NO: 3579232 - DNA, 25 bp, Homo sapien
ggctgcaacacctttcttccacgtg

SEQ ID NO: 3579233 - DNA, 25 bp, Homo sapien
caagtgctcccatatcctgttatct

SEQ ID NO: 3579234 - DNA, 25 bp, Homo sapien
tccactttgccagggataactgctc

SEQ ID NO: 3579235 - DNA, 25 bp, Homo sapien
ccaagtttgcctgctccactggtgc

SEQ ID NO: 3579236 - DNA, 25 bp, Homo sapien
gtccaagtttgcctgctccactggt

SEQ ID NO: 3579237 - DNA, 25 bp, Homo sapien
tctgtgtccaagtttgcctgctcca

SEQ ID NO: 3579238 - DNA, 25 bp, Homo sapien
gtgtccaagtttgcctgctccactg

SEQ ID NO: 3579239 - DNA, 25 bp, Homo sapien
tgggcaatggtctcctgaccaatac

SEQ ID NO: 3579240 - DNA, 25 bp, Homo sapien
taagggagcaatagaatgaatgact

SEQ ID NO: 3579241 - DNA, 25 bp, Homo sapien
ccagggcataggaagacttgatgga

SEQ ID NO: 3579242 - DNA, 25 bp, Homo sapien
catagactgctgcaagatctgcacc

SEQ ID NO: 3579243 - DNA, 25 bp, Homo sapien
aggctgtgcaaaaccagtcttctgt

SEQ ID NO: 3579244 - DNA, 25 bp, Homo sapien
aaggacattcatccccatggcactg

SEQ ID NO: 3579245 - DNA, 25 bp, Homo sapien
gcccaagatgggttcacaaggacat

SEQ ID NO: 3579246 - DNA, 25 bp, Homo sapien
gcactgggcaatctcaggctgtgca

SEQ ID NO: 3579247 - DNA, 25 bp, Homo sapien
tgtcctcagctatttttggaccatg

SEQ ID NO: 3579248 - DNA, 25 bp, Homo sapien
atatagtagtccctgcttattcccc

SEQ ID NO: 3579249 - DNA, 25 bp, Homo sapien
gctaacaataaggtagaacaaatac

SEQ ID NO: 3579250 - DNA, 25 bp, Homo sapien
cactctgtctatcaaagtatcttac

SEQ ID NO: 3579251 - DNA, 25 bp, Homo sapien
taacttgctagctgtcagatctcag

SEQ ID NO: 3579252 - DNA, 25 bp, Homo sapien
tgcagctctgaccagatggcattgc

SEQ ID NO: 3579253 - DNA, 25 bp, Homo sapien
tgtgtccagcactggaacagtggct

SEQ ID NO: 3579254 - DNA, 25 bp, Homo sapien
cttttcttttagagagggagctcca

SEQ ID NO: 3579255 - DNA, 25 bp, Homo sapien
gaatatcaaattctctgggtgagaa

SEQ ID NO: 3579256 - DNA, 25 bp, Homo sapien
tatctatattgctagtgctagcaaa

SEQ ID NO: 3579257 - DNA, 25 bp, Homo sapien
taatagctgccccaaccttttgatg

SEQ ID NO: 3579258 - DNA, 25 bp, Homo sapien
tactcttgatgagataagcactttc

SEQ ID NO: 3579259 - DNA, 25 bp, Homo sapien
tggtgaggcctttcaggtgctggtt

SEQ ID NO: 3579260 - DNA, 25 bp, Homo sapien
gaggcctttcaggtgctggttttga

SEQ ID NO: 3579261 - DNA, 25 bp, Homo sapien
ggcctttcaggtgctggttttgatt

SEQ ID NO: 3579262 - DNA, 25 bp, Homo sapien
ttcaggtgctggttttgatttttcc

SEQ ID NO: 3579263 - DNA, 25 bp, Homo sapien
aatccatctatgtctctggcccttc

SEQ ID NO: 3579264 - DNA, 25 bp, Homo sapien
tcacgaatccatctatgtctctggc

SEQ ID NO: 3579265 - DNA, 25 bp, Homo sapien
tttcacgaatccatctatgtctctg

SEQ ID NO: 3579266 - DNA, 25 bp, Homo sapien
atctatgtctctggcccttccactt

SEQ ID NO: 3579267 - DNA, 25 bp, Homo sapien
cacttttgtgttctgtggcagtttg

SEQ ID NO: 3579268 - DNA, 25 bp, Homo sapien
tgtggcagtttgaattctcatctct

SEQ ID NO: 3579269 - DNA, 25 bp, Homo sapien
tgttctgtggcagtttgaattctca

SEQ ID NO: 3579270 - DNA, 25 bp, Homo sapien
ggcagtttgaattctcatctcttct

SEQ ID NO: 3579271 - DNA, 25 bp, Homo sapien
ggaaaattagccttcagccttgtat

SEQ ID NO: 3579272 - DNA, 25 bp, Homo sapien
aattagccttcagccttgtatattc

SEQ ID NO: 3579273 - DNA, 25 bp, Homo sapien
tagccttcagccttgtatattcttc

SEQ ID NO: 3579274 - DNA, 25 bp, Homo sapien
atattcttctttcaagtatggttct

SEQ ID NO: 3579275 - DNA, 25 bp, Homo sapien
gggccttctttgcactggtaccacc

SEQ ID NO: 3579276 - DNA, 25 bp, Homo sapien
tctttgcactggtaccaccccggtc

SEQ ID NO: 3579277 - DNA, 25 bp, Homo sapien
cttctttgcactggtaccaccccgg

SEQ ID NO: 3579278 - DNA, 25 bp, Homo sapien
cgtttagaatatgttcttggcattt

SEQ ID NO: 3579279 - DNA, 25 bp, Homo sapien
ctgcgtttagaatatgttcttggca

SEQ ID NO: 3579280 - DNA, 25 bp, Homo sapien
tgcgtttagaatatgttcttggcat

SEQ ID NO: 3579281 - DNA, 25 bp, Homo sapien
ttagaatatgttcttggcatttcat

SEQ ID NO: 3579282 - DNA, 25 bp, Homo sapien
gcagtctggacatgagggctgccat

SEQ ID NO: 3579283 - DNA, 25 bp, Homo sapien
agtggctcttgccaccttggaccca

SEQ ID NO: 3579284 - DNA, 25 bp, Homo sapien
agcagtctggacatgagggctgcca

SEQ ID NO: 3579285 - DNA, 25 bp, Homo sapien
ctccctcaatcagcagtctggacat

SEQ ID NO: 3579286 - DNA, 25 bp, Homo sapien
acatctggggtctcaaacgctatca

SEQ ID NO: 3579287 - DNA, 25 bp, Homo sapien
catctggggtctcaaacgctatcat

SEQ ID NO: 3579288 - DNA, 25 bp, Homo sapien
cttttgaggatacagggtccaagtt

SEQ ID NO: 3579289 - DNA, 25 bp, Homo sapien
atatcctccactaagaattaaattc

SEQ ID NO: 3579290 - DNA, 25 bp, Homo sapien
gccaaatatcctccactaagaatta

SEQ ID NO: 3579291 - DNA, 25 bp, Homo sapien
ttaaattcatatttgtactagtcat

SEQ ID NO: 3579292 - DNA, 25 bp, Homo sapien
attaaattcatatttgtactagtca

SEQ ID NO: 3579293 - DNA, 25 bp, Homo sapien
caaggatgcctgtctcactagtaac

SEQ ID NO: 3579294 - DNA, 25 bp, Homo sapien
cagaaatgaattatccccggtgggc

SEQ ID NO: 3579295 - DNA, 25 bp, Homo sapien
cagacgtgaggtatcactagatcca

SEQ ID NO: 3579296 - DNA, 25 bp, Homo sapien
tgtaattccagatgacattgccacc

SEQ ID NO: 3579297 - DNA, 25 bp, Homo sapien
aacatgacgagtttgaaatttcacg

SEQ ID NO: 3579298 - DNA, 25 bp, Homo sapien
aaaacatgacgagtttgaaatttca

SEQ ID NO: 3579299 - DNA, 25 bp, Homo sapien
catgacgagtttgaaatttcacgct

SEQ ID NO: 3579300 - DNA, 25 bp, Homo sapien
gacgagtttgaaatttcacgcttct

SEQ ID NO: 3579301 - DNA, 25 bp, Homo sapien
caggttcatgccccagtgcgccaag

SEQ ID NO: 3579302 - DNA, 25 bp, Homo sapien
tcaggttcatgccccagtgcgccaa

SEQ ID NO: 3579303 - DNA, 25 bp, Homo sapien
cgatatctcaggttcatgccccagt

SEQ ID NO: 3579304 - DNA, 25 bp, Homo sapien
tatctcaggttcatgccccagtgcg

SEQ ID NO: 3579305 - DNA, 25 bp, Homo sapien
cagatatttgcagacatcagtgcag

SEQ ID NO: 3579306 - DNA, 25 bp, Homo sapien
gcagatatttgcagacatcagtgca

SEQ ID NO: 3579307 - DNA, 25 bp, Homo sapien
ctgtagaggatatttcagcaagaga

SEQ ID NO: 3579308 - DNA, 25 bp, Homo sapien
tagaggatatttcagcaagagagaa

SEQ ID NO: 3579309 - DNA, 25 bp, Homo sapien
tgtagaggatatttcagcaagagag

SEQ ID NO: 3579310 - DNA, 25 bp, Homo sapien
gtagaggatatttcagcaagagaga

SEQ ID NO: 3579311 - DNA, 25 bp, Homo sapien
tcagaaagacaagtttgccatgtcc

SEQ ID NO: 3579312 - DNA, 25 bp, Homo sapien
ctcagaaagacaagtttgccatgtc

SEQ ID NO: 3579313 - DNA, 25 bp, Homo sapien
ggcaatcaccatagaaacagcacgg

SEQ ID NO: 3579314 - DNA, 25 bp, Homo sapien
gctccccacgaagagagacactgaa

SEQ ID NO: 3579315 - DNA, 25 bp, Homo sapien
tatatgggcaggatacagggctttc

SEQ ID NO: 3579316 - DNA, 25 bp, Homo sapien
ttgacagagcggtgcaatgctcccc

SEQ ID NO: 3579317 - DNA, 25 bp, Homo sapien
caacgagcctgattctacaccagca

SEQ ID NO: 3579318 - DNA, 25 bp, Homo sapien
gcctgattctacaccagcaaaaaca

SEQ ID NO: 3579319 - DNA, 25 bp, Homo sapien
tcctctcttgacaacgagcctgatt

SEQ ID NO: 3579320 - DNA, 25 bp, Homo sapien
tcttgacaacgagcctgattctaca

SEQ ID NO: 3579321 - DNA, 25 bp, Homo sapien
gactcaaccagcatcaagacgttct

SEQ ID NO: 3579322 - DNA, 25 bp, Homo sapien
gcatcaagacgttcttatcatctgt

SEQ ID NO: 3579323 - DNA, 25 bp, Homo sapien
tgcagaggagactcaaccagcatca

SEQ ID NO: 3579324 - DNA, 25 bp, Homo sapien
gaatgactggatgcagaggagactc

SEQ ID NO: 3579325 - DNA, 25 bp, Homo sapien
catgaatgcaaagtcttggcactgc

SEQ ID NO: 3579326 - DNA, 25 bp, Homo sapien
ccaggcaggtgtaaagtgcaagcca

SEQ ID NO: 3579327 - DNA, 25 bp, Homo sapien
taaggtagacttacaagccaggcag

SEQ ID NO: 3579328 - DNA, 25 bp, Homo sapien
cagttgtcttgaaagggcagattac

SEQ ID NO: 3579329 - DNA, 25 bp, Homo sapien
gccaaaggacagcacgttcatatcc

SEQ ID NO: 3579330 - DNA, 25 bp, Homo sapien
gaactggcaagccatggccaaagga

SEQ ID NO: 3579331 - DNA, 25 bp, Homo sapien
tctgagttccatcgaggctcctcca

SEQ ID NO: 3579332 - DNA, 25 bp, Homo sapien
gacacagtggtcaaaggtccagaat

SEQ ID NO: 3579333 - DNA, 25 bp, Homo sapien
tgacagggcaatctgaaggccaaat

SEQ ID NO: 3579334 - DNA, 25 bp, Homo sapien
tgaaggccaaattgagtggctttta

SEQ ID NO: 3579335 - DNA, 25 bp, Homo sapien
gaaggccaaattgagtggcttttat

SEQ ID NO: 3579336 - DNA, 25 bp, Homo sapien
taaaatgacagggcaatctgaaggc

SEQ ID NO: 3579337 - DNA, 25 bp, Homo sapien
ttaaacctgctgtctctctctggtc

SEQ ID NO: 3579338 - DNA, 25 bp, Homo sapien
taaacctgctgtctctctctggtct

SEQ ID NO: 3579339 - DNA, 25 bp, Homo sapien
aacctgctgtctctctctggtctca

SEQ ID NO: 3579340 - DNA, 25 bp, Homo sapien
acctgctgtctctctctggtctcac

SEQ ID NO: 3579341 - DNA, 25 bp, Homo sapien
tggtttacttggcacacgccctgta

SEQ ID NO: 3579342 - DNA, 25 bp, Homo sapien
agcttcttcactatggaaatgtgca

SEQ ID NO: 3579343 - DNA, 25 bp, Homo sapien
cctgtactaggaatctctgagtcaa

SEQ ID NO: 3579344 - DNA, 25 bp, Homo sapien
caagtgacgtatgggattcctgcct

SEQ ID NO: 3579345 - DNA, 25 bp, Homo sapien
ccacagcactgggtaagaaagggag

SEQ ID NO: 3579346 - DNA, 25 bp, Homo sapien
taagaaagggagagtcaatgctaga

SEQ ID NO: 3579347 - DNA, 25 bp, Homo sapien
ctttaagatccacagcactgggtaa

SEQ ID NO: 3579348 - DNA, 25 bp, Homo sapien
aaagggagagtcaatgctagacaag

SEQ ID NO: 3579349 - DNA, 25 bp, Homo sapien
agcagaatcagtccttgcttattag

SEQ ID NO: 3579350 - DNA, 25 bp, Homo sapien
gttatcttcagcagaatcagtcctt

SEQ ID NO: 3579351 - DNA, 25 bp, Homo sapien
gggcaccttcaagacaggtgaagtt

SEQ ID NO: 3579352 - DNA, 25 bp, Homo sapien
ttcaagacaggtgaagttatcttca

SEQ ID NO: 3579353 - DNA, 25 bp, Homo sapien
cagttatgctttcctgtgctgctgc

SEQ ID NO: 3579354 - DNA, 25 bp, Homo sapien
tgtgctgctgctccaagactctgct

SEQ ID NO: 3579355 - DNA, 25 bp, Homo sapien
aagactctgctgcccagctgtcaac

SEQ ID NO: 3579356 - DNA, 25 bp, Homo sapien
gactctgctgcccagctgtcaacat

SEQ ID NO: 3579357 - DNA, 25 bp, Homo sapien
aatgggagtcactgattccaaaacc

SEQ ID NO: 3579358 - DNA, 25 bp, Homo sapien
ccattcactgttgtggtctgggaac

SEQ ID NO: 3579359 - DNA, 25 bp, Homo sapien
tctgggaactgaggatgtcacgaat

SEQ ID NO: 3579360 - DNA, 25 bp, Homo sapien
tgggaactgaggatgtcacgaatac

SEQ ID NO: 3579361 - DNA, 25 bp, Homo sapien
gcagcctccaccacaaacctcagtg

SEQ ID NO: 3579362 - DNA, 25 bp, Homo sapien
cgaagaaagtgcagcaacagcttat

SEQ ID NO: 3579363 - DNA, 25 bp, Homo sapien
ttgcacgtgcatccgctttctcttt

SEQ ID NO: 3579364 - DNA, 25 bp, Homo sapien
tccgaagaaagtgcagcaacagctt

SEQ ID NO: 3579365 - DNA, 25 bp, Homo sapien
tctcttgcacgtgcatccgctttct

SEQ ID NO: 3579366 - DNA, 25 bp, Homo sapien
catttggcctgctgcccctatcaca

SEQ ID NO: 3579367 - DNA, 25 bp, Homo sapien
cacagttcccctggagtacttcagc

SEQ ID NO: 3579368 - DNA, 25 bp, Homo sapien
tagctcaagtccctgtttaataagc

SEQ ID NO: 3579369 - DNA, 25 bp, Homo sapien
cctgtttaataagcctttgcacaca

SEQ ID NO: 3579370 - DNA, 25 bp, Homo sapien
catcatgctccttgtcttggccttc

SEQ ID NO: 3579371 - DNA, 25 bp, Homo sapien
ccatcatgctccttgtcttggcctt

SEQ ID NO: 3579372 - DNA, 25 bp, Homo sapien
cattcatccacaacaaagatgtgga

SEQ ID NO: 3579373 - DNA, 25 bp, Homo sapien
attcatccacaacaaagatgtggac

SEQ ID NO: 3579374 - DNA, 25 bp, Homo sapien
ccattcatccacaacaaagatgtgg

SEQ ID NO: 3579375 - DNA, 25 bp, Homo sapien
cccattcatccacaacaaagatgtg

SEQ ID NO: 3579376 - DNA, 25 bp, Homo sapien
ggctggcctgattaacttctcctgt

SEQ ID NO: 3579377 - DNA, 25 bp, Homo sapien
cagggttcctgccaaatttttgcta

SEQ ID NO: 3579378 - DNA, 25 bp, Homo sapien
tacactgatcttcacgtgggactgt

SEQ ID NO: 3579379 - DNA, 25 bp, Homo sapien
caagattcccagcacattgtccagg

SEQ ID NO: 3579380 - DNA, 25 bp, Homo sapien
taataaccagtacaggaagcatttc

SEQ ID NO: 3579381 - DNA, 25 bp, Homo sapien
gcatttccactcctgtttcagcaga

SEQ ID NO: 3579382 - DNA, 25 bp, Homo sapien
tctttcaagaaccagtatgtgtgca

SEQ ID NO: 3579383 - DNA, 25 bp, Homo sapien
agtgccttcgatggcaatctttgcc

SEQ ID NO: 3579384 - DNA, 25 bp, Homo sapien
tcactctctgattccttttataata

SEQ ID NO: 3579385 - DNA, 25 bp, Homo sapien
cactctctgattccttttataatat

SEQ ID NO: 3579386 - DNA, 25 bp, Homo sapien
actctctgattccttttataatata

SEQ ID NO: 3579387 - DNA, 25 bp, Homo sapien
ctctctgattccttttataatatac

SEQ ID NO: 3579388 - DNA, 25 bp, Homo sapien
tcaaagcctctaactctctcatgtg

SEQ ID NO: 3579389 - DNA, 25 bp, Homo sapien
ctctctcatgtgctttttctctgtg

SEQ ID NO: 3579390 - DNA, 25 bp, Homo sapien
aagttggaatagaattcaaagcctc

SEQ ID NO: 3579391 - DNA, 25 bp, Homo sapien
cagcttgctctgaacttatgttctg

SEQ ID NO: 3579392 - DNA, 25 bp, Homo sapien
tggaaaggagggagtcacgaaacca

SEQ ID NO: 3579393 - DNA, 25 bp, Homo sapien
tagttgtggtggtagtgaatacagc

SEQ ID NO: 3579394 - DNA, 25 bp, Homo sapien
gcagtgagcatctatgttgggccca

SEQ ID NO: 3579395 - DNA, 25 bp, Homo sapien
gctctctagagacctgtgtggaaag

SEQ ID NO: 3579396 - DNA, 25 bp, Homo sapien
caagaagcttcaaatacactcgagc

SEQ ID NO: 3579397 - DNA, 25 bp, Homo sapien
ggccatgtagttagttatcgcaaga

SEQ ID NO: 3579398 - DNA, 25 bp, Homo sapien
cttttccgggtgaaaggtgctgatg

SEQ ID NO: 3579399 - DNA, 25 bp, Homo sapien
tatcaatgggaattaatgctaggct

SEQ ID NO: 3579400 - DNA, 25 bp, Homo sapien
tctgagctttttccgagtgtcctac

SEQ ID NO: 3579401 - DNA, 25 bp, Homo sapien
cttgttgttcacatcgtatgtctga

SEQ ID NO: 3579402 - DNA, 25 bp, Homo sapien
tccgagtgtcctacttttgctcccg

SEQ ID NO: 3579403 - DNA, 25 bp, Homo sapien
cacatcgtatgtctgagctttttcc

SEQ ID NO: 3579404 - DNA, 25 bp, Homo sapien
agctagcctcgtttcttatgctcag

SEQ ID NO: 3579405 - DNA, 25 bp, Homo sapien
gaagatgatcaatatggtagccgac

SEQ ID NO: 3579406 - DNA, 25 bp, Homo sapien
tggagaactccgtactgtgcactga

SEQ ID NO: 3579407 - DNA, 25 bp, Homo sapien
gataaagggctatcgccattgaaaa

SEQ ID NO: 3579408 - DNA, 25 bp, Homo sapien
tgggatttccaatgagcctgctgta

SEQ ID NO: 3579409 - DNA, 25 bp, Homo sapien
gctggtcacccctagctagaagctg

SEQ ID NO: 3579410 - DNA, 25 bp, Homo sapien
tagtacttggaatggccagagctgc

SEQ ID NO: 3579411 - DNA, 25 bp, Homo sapien
caatggaggcatagtgcagagcttc

SEQ ID NO: 3579412 - DNA, 25 bp, Homo sapien
catgggagcgggtctttttcctgat

SEQ ID NO: 3579413 - DNA, 25 bp, Homo sapien
ggccatcctgtgaaatgcacctagg

SEQ ID NO: 3579414 - DNA, 25 bp, Homo sapien
taggccacaggtagcagttgacagt

SEQ ID NO: 3579415 - DNA, 25 bp, Homo sapien
gagtgagtgccctagaaaacagctg

SEQ ID NO: 3579416 - DNA, 25 bp, Homo sapien
caccaggtatcactgaaatgtggac

SEQ ID NO: 3579417 - DNA, 25 bp, Homo sapien
tatcctactgtaatatgggacaggt

SEQ ID NO: 3579418 - DNA, 25 bp, Homo sapien
gtaaaagtcctaactatcccatgct

SEQ ID NO: 3579419 - DNA, 25 bp, Homo sapien
tgggacaggtagaaacacgtcattg

SEQ ID NO: 3579420 - DNA, 25 bp, Homo sapien
tccccaatcttgttaaataggtcaa

SEQ ID NO: 3579421 - DNA, 25 bp, Homo sapien
aaagcatagtcatcagactctccaa

SEQ ID NO: 3579422 - DNA, 25 bp, Homo sapien
ggaaatcaagagaactcctgcgaga

SEQ ID NO: 3579423 - DNA, 25 bp, Homo sapien
ggtcaacatgaagagataggaaatc

SEQ ID NO: 3579424 - DNA, 25 bp, Homo sapien
tccagcacattgtgaacagatgttt

SEQ ID NO: 3579425 - DNA, 25 bp, Homo sapien
tcccgtagatttttagaatgagatt

SEQ ID NO: 3579426 - DNA, 25 bp, Homo sapien
gtgccacttccagcacattgtgaac

SEQ ID NO: 3579427 - DNA, 25 bp, Homo sapien
tgaacagatgttttcccgtagattt

SEQ ID NO: 3579428 - DNA, 25 bp, Homo sapien
cgcatggatgagacaccgctgagtc

SEQ ID NO: 3579429 - DNA, 25 bp, Homo sapien
acgcatggatgagacaccgctgagt

SEQ ID NO: 3579430 - DNA, 25 bp, Homo sapien
cagacgcatggatgagacaccgctg

SEQ ID NO: 3579431 - DNA, 25 bp, Homo sapien
agacgcatggatgagacaccgctga

SEQ ID NO: 3579432 - DNA, 25 bp, Homo sapien
tgaagcttatacccatatgcacttg

SEQ ID NO: 3579433 - DNA, 25 bp, Homo sapien
gggtctcagcactgcctagaaggcc

SEQ ID NO: 3579434 - DNA, 25 bp, Homo sapien
tctcagcactgcctagaaggcccag

SEQ ID NO: 3579435 - DNA, 25 bp, Homo sapien
cagcactgcctagaaggcccagcat

SEQ ID NO: 3579436 - DNA, 25 bp, Homo sapien
cagtgtcatgacagtcactttagtg

SEQ ID NO: 3579437 - DNA, 25 bp, Homo sapien
tctgtgcatgcaaagtggtggtatt

SEQ ID NO: 3579438 - DNA, 25 bp, Homo sapien
tttagtgcctatgagcttctgtgca

SEQ ID NO: 3579439 - DNA, 25 bp, Homo sapien
gaattcatctctattgcaccctagc

SEQ ID NO: 3579440 - DNA, 25 bp, Homo sapien
gacatgtccatttggaaatacgcat

SEQ ID NO: 3579441 - DNA, 25 bp, Homo sapien
taaaaatgccagatagtctccaacg

SEQ ID NO: 3579442 - DNA, 25 bp, Homo sapien
aatgctgtgatcaggatgctgccaa

SEQ ID NO: 3579443 - DNA, 25 bp, Homo sapien
ggtctctgcccactattctggcaga

SEQ ID NO: 3579444 - DNA, 25 bp, Homo sapien
cagatattcaacatttgtagctgac

SEQ ID NO: 3579445 - DNA, 25 bp, Homo sapien
taattccttgtcatacagatattca

SEQ ID NO: 3579446 - DNA, 25 bp, Homo sapien
tccatcgaattccacacagtttgag

SEQ ID NO: 3579447 - DNA, 25 bp, Homo sapien
ctgactccttatccatcgaattcca

SEQ ID NO: 3579448 - DNA, 25 bp, Homo sapien
cttgcttccccctgttcccacagtc

SEQ ID NO: 3579449 - DNA, 25 bp, Homo sapien
tgcttccccctgttcccacagtcac

SEQ ID NO: 3579450 - DNA, 25 bp, Homo sapien
cttccccctgttcccacagtcacca

SEQ ID NO: 3579451 - DNA, 25 bp, Homo sapien
ttagccttgcttccccctgttccca

SEQ ID NO: 3579452 - DNA, 25 bp, Homo sapien
tcatggcatgcattgggaattttcc

SEQ ID NO: 3579453 - DNA, 25 bp, Homo sapien
tattgccccagttacagttggtagc

SEQ ID NO: 3579454 - DNA, 25 bp, Homo sapien
acagttggtagccattccgtggcca

SEQ ID NO: 3579455 - DNA, 25 bp, Homo sapien
caagaaacatattgccccagttaca

SEQ ID NO: 3579456 - DNA, 25 bp, Homo sapien
tgtcttgggacaaaaggcctatgct

SEQ ID NO: 3579457 - DNA, 25 bp, Homo sapien
cacgatttcagactaattaacttgg

SEQ ID NO: 3579458 - DNA, 25 bp, Homo sapien
gattggcttcccagtatcaagctta

SEQ ID NO: 3579459 - DNA, 25 bp, Homo sapien
gatgtactagaaacccttgaagaag

SEQ ID NO: 3579460 - DNA, 25 bp, Homo sapien
gagcccctggaattatggtatctaa

SEQ ID NO: 3579461 - DNA, 25 bp, Homo sapien
aattgaattttggatagcctttagc

SEQ ID NO: 3579462 - DNA, 25 bp, Homo sapien
aaaacagcctctaaagagcccctgg

SEQ ID NO: 3579463 - DNA, 25 bp, Homo sapien
taaaggataattctgcaagtgcagg

SEQ ID NO: 3579464 - DNA, 25 bp, Homo sapien
tagtgtttattcagagaaataaact

SEQ ID NO: 3579465 - DNA, 25 bp, Homo sapien
actttcggacttttgatcggcatcc

SEQ ID NO: 3579466 - DNA, 25 bp, Homo sapien
agtgtttattcagagaaataaactt

SEQ ID NO: 3579467 - DNA, 25 bp, Homo sapien
taaactttcggacttttgatcggca

SEQ ID NO: 3579468 - DNA, 25 bp, Homo sapien
ctggaggcacatgataacctttaca

SEQ ID NO: 3579469 - DNA, 25 bp, Homo sapien
gatgaaaagatagtactatagtctg

SEQ ID NO: 3579470 - DNA, 25 bp, Homo sapien
tagtactatagtctggagttccagt

SEQ ID NO: 3579471 - DNA, 25 bp, Homo sapien
agaggtgcctccaaccattttcatg

SEQ ID NO: 3579472 - DNA, 25 bp, Homo sapien
agtggtgttgtcattcgccagcagc

SEQ ID NO: 3579473 - DNA, 25 bp, Homo sapien
ttgttgaggctcaaagctttagtgg

SEQ ID NO: 3579474 - DNA, 25 bp, Homo sapien
tctgggttcctctcagcaaaaacag

SEQ ID NO: 3579475 - DNA, 25 bp, Homo sapien
tcagcaagtggtgcaccaggattta

SEQ ID NO: 3579476 - DNA, 25 bp, Homo sapien
tagagtgataactaagactgcaccc

SEQ ID NO: 3579477 - DNA, 25 bp, Homo sapien
tgcacccatgtctgcggacagaaaa

SEQ ID NO: 3579478 - DNA, 25 bp, Homo sapien
cacctatgtggtcgcttcagaatca

SEQ ID NO: 3579479 - DNA, 25 bp, Homo sapien
gcagagctcccgaaatttctgaaga

SEQ ID NO: 3579480 - DNA, 25 bp, Homo sapien
ttctctttgtaaagtgacagcagag

SEQ ID NO: 3579481 - DNA, 25 bp, Homo sapien
gctgtgaagtctcattatcactgac

SEQ ID NO: 3579482 - DNA, 25 bp, Homo sapien
ttcaaataactcacttctaaagcag

SEQ ID NO: 3579483 - DNA, 25 bp, Homo sapien
aataactcacttctaaagcagttcc

SEQ ID NO: 3579484 - DNA, 25 bp, Homo sapien
agggcccagacagcagccagtctag

SEQ ID NO: 3579485 - DNA, 25 bp, Homo sapien
ctgaggaccagggtcctctctctgt

SEQ ID NO: 3579486 - DNA, 25 bp, Homo sapien
gagggagaaccaagggcccagacag

SEQ ID NO: 3579487 - DNA, 25 bp, Homo sapien
cctctctctgtggagactggaggga

SEQ ID NO: 3579488 - DNA, 25 bp, Homo sapien
ctgatagtggacagatctctgtcat

SEQ ID NO: 3579489 - DNA, 25 bp, Homo sapien
tataaggatgtttctcacgagctcc

SEQ ID NO: 3579490 - DNA, 25 bp, Homo sapien
tcattaaactagcagcatatgttgc

SEQ ID NO: 3579491 - DNA, 25 bp, Homo sapien
gctattataaggatgtttctcacga

SEQ ID NO: 3579492 - DNA, 25 bp, Homo sapien
gtgatggttctcattaaactagcag

SEQ ID NO: 3579493 - DNA, 25 bp, Homo sapien
tagtatccagatagtacagcagaaa

SEQ ID NO: 3579494 - DNA, 25 bp, Homo sapien
ttttagtatccagatagtacagcag

SEQ ID NO: 3579495 - DNA, 25 bp, Homo sapien
ttagtatccagatagtacagcagaa

SEQ ID NO: 3579496 - DNA, 25 bp, Homo sapien
agtatccagatagtacagcagaaac

SEQ ID NO: 3579497 - DNA, 25 bp, Homo sapien
gaagaggcgtttccaccaacccaca

SEQ ID NO: 3579498 - DNA, 25 bp, Homo sapien
tgaagaggcgtttccaccaacccac

SEQ ID NO: 3579499 - DNA, 25 bp, Homo sapien
aagaggcgtttccaccaacccacag

SEQ ID NO: 3579500 - DNA, 25 bp, Homo sapien
aaatgacaacttatcacatggctga

SEQ ID NO: 3579501 - DNA, 25 bp, Homo sapien
tcaatgttcatcaaatgacaactta

SEQ ID NO: 3579502 - DNA, 25 bp, Homo sapien
agtgaatcttcctaccgagatctgt

SEQ ID NO: 3579503 - DNA, 25 bp, Homo sapien
gatctgtacggtgaccacagcacca

SEQ ID NO: 3579504 - DNA, 25 bp, Homo sapien
tcatgcttgttcttcctcctttact

SEQ ID NO: 3579505 - DNA, 25 bp, Homo sapien
catgcttgttcttcctcctttactc

SEQ ID NO: 3579506 - DNA, 25 bp, Homo sapien
tgcttgttcttcctcctttactcct

SEQ ID NO: 3579507 - DNA, 25 bp, Homo sapien
atgcttgttcttcctcctttactcc

SEQ ID NO: 3579508 - DNA, 25 bp, Homo sapien
gatcctatctattgagcgaaactct

SEQ ID NO: 3579509 - DNA, 25 bp, Homo sapien
taattagtgcagctctcctaaggag

SEQ ID NO: 3579510 - DNA, 25 bp, Homo sapien
tgtgaatatataagcccgggagttt

SEQ ID NO: 3579511 - DNA, 25 bp, Homo sapien
tgcagactccctcaaaacatctatg

SEQ ID NO: 3579512 - DNA, 25 bp, Homo sapien
gctgagaatttctatcattaactga

SEQ ID NO: 3579513 - DNA, 25 bp, Homo sapien
ctaaagggaagattggatgatactc

SEQ ID NO: 3579514 - DNA, 25 bp, Homo sapien
gaagatgttatcaaatcctctgcct

SEQ ID NO: 3579515 - DNA, 25 bp, Homo sapien
tggatgatactccacagccaatatt

SEQ ID NO: 3579516 - DNA, 25 bp, Homo sapien
cagccaatattgacttactgaagat

SEQ ID NO: 3579517 - DNA, 25 bp, Homo sapien
gaaatatgaagagtctcttcaaaga

SEQ ID NO: 3579518 - DNA, 25 bp, Homo sapien
tacaatcaacatataatggatgggt

SEQ ID NO: 3579519 - DNA, 25 bp, Homo sapien
agagaatgaatagttcccaagccag

SEQ ID NO: 3579520 - DNA, 25 bp, Homo sapien
gaacaagacttgactcattgatatc

SEQ ID NO: 3579521 - DNA, 25 bp, Homo sapien
atttagagggaaatgctgccaacaa

SEQ ID NO: 3579522 - DNA, 25 bp, Homo sapien
agagggaaatgctgccaacaatctc

SEQ ID NO: 3579523 - DNA, 25 bp, Homo sapien
tagagggaaatgctgccaacaatct

SEQ ID NO: 3579524 - DNA, 25 bp, Homo sapien
tttagagggaaatgctgccaacaat

SEQ ID NO: 3579525 - DNA, 25 bp, Homo sapien
gatgctttccttgtagcagaggctg

SEQ ID NO: 3579526 - DNA, 25 bp, Homo sapien
ctggatgctttccttgtagcagagg

SEQ ID NO: 3579527 - DNA, 25 bp, Homo sapien
tgctttccttgtagcagaggctgct

SEQ ID NO: 3579528 - DNA, 25 bp, Homo sapien
tggatgctttccttgtagcagaggc

SEQ ID NO: 3579529 - DNA, 25 bp, Homo sapien
ggctgtctgatggtaaagtctgcat

SEQ ID NO: 3579530 - DNA, 25 bp, Homo sapien
ggtgaaagtgaaacgagagcaccca

SEQ ID NO: 3579531 - DNA, 25 bp, Homo sapien
ccaggctgtctgatggtaaagtctg

SEQ ID NO: 3579532 - DNA, 25 bp, Homo sapien
aagtgaaacgagagcacccaggctg

SEQ ID NO: 3579533 - DNA, 25 bp, Homo sapien
caattatcaagtggcaggcggcacc

SEQ ID NO: 3579534 - DNA, 25 bp, Homo sapien
gtcaagccccatgtgcagacagtgg

SEQ ID NO: 3579535 - DNA, 25 bp, Homo sapien
tcatggcctcatatggagaaaacac

SEQ ID NO: 3579536 - DNA, 25 bp, Homo sapien
tgagagactcaaggcatcacacaca

SEQ ID NO: 3579537 - DNA, 25 bp, Homo sapien
cattgttgcaaacctcatagagtgc

SEQ ID NO: 3579538 - DNA, 25 bp, Homo sapien
caatgatgggatatagtctaagcaa

SEQ ID NO: 3579539 - DNA, 25 bp, Homo sapien
cacagataggttatatggtctggcc

SEQ ID NO: 3579540 - DNA, 25 bp, Homo sapien
cgatgggctatagcacaatgatggg

SEQ ID NO: 3579541 - DNA, 25 bp, Homo sapien
gcaaagatttgcacttctatggata

SEQ ID NO: 3579542 - DNA, 25 bp, Homo sapien
aaaacattcctacaacgctacccag

SEQ ID NO: 3579543 - DNA, 25 bp, Homo sapien
tatatttgcctagtgatgtcaggga

SEQ ID NO: 3579544 - DNA, 25 bp, Homo sapien
cgtcatgacatgtggaaaaacattc

SEQ ID NO: 3579545 - DNA, 25 bp, Homo sapien
tgagaagtacctccaaggtaagacc

SEQ ID NO: 3579546 - DNA, 25 bp, Homo sapien
gggctctcatggctagttaggacac

SEQ ID NO: 3579547 - DNA, 25 bp, Homo sapien
ggctagttaggacacagccacacag

SEQ ID NO: 3579548 - DNA, 25 bp, Homo sapien
gccagcagccgattccacctggctg

SEQ ID NO: 3579549 - DNA, 25 bp, Homo sapien
tatcatttcgtgcagtgttcaacca

SEQ ID NO: 3579550 - DNA, 25 bp, Homo sapien
ggagtacaacatccacctcatgagg

SEQ ID NO: 3579551 - DNA, 25 bp, Homo sapien
cagaattagacactgaagcctggaa

SEQ ID NO: 3579552 - DNA, 25 bp, Homo sapien
tccctgttgcgcttggcagaggaac

SEQ ID NO: 3579553 - DNA, 25 bp, Homo sapien
cacagagcttccgtgaaggtgcaat

SEQ ID NO: 3579554 - DNA, 25 bp, Homo sapien
cgtgaaggtgcaatgaaaaaaccca

SEQ ID NO: 3579555 - DNA, 25 bp, Homo sapien
gtcacttcacagagcttccgtgaag

SEQ ID NO: 3579556 - DNA, 25 bp, Homo sapien
gtttcatagaatagatgcacaaatt

SEQ ID NO: 3579557 - DNA, 25 bp, Homo sapien
tttttagtcctttcgaatgccacaa

SEQ ID NO: 3579558 - DNA, 25 bp, Homo sapien
agtcctttcgaatgccacaatgaag

SEQ ID NO: 3579559 - DNA, 25 bp, Homo sapien
cgaatgccacaatgaagggagagtt

SEQ ID NO: 3579560 - DNA, 25 bp, Homo sapien
tttcgaatgccacaatgaagggaga

SEQ ID NO: 3579561 - DNA, 25 bp, Homo sapien
tatacaatcggcttgaaaggacaga

SEQ ID NO: 3579562 - DNA, 25 bp, Homo sapien
tcgtgactgatctatacaatcggct

SEQ ID NO: 3579563 - DNA, 25 bp, Homo sapien
ttcccactaccctgagtagagcttt

SEQ ID NO: 3579564 - DNA, 25 bp, Homo sapien
ccgactggttcctaaggtcttcgtg

SEQ ID NO: 3579565 - DNA, 25 bp, Homo sapien
aggctaaggacagcagatccaacat

SEQ ID NO: 3579566 - DNA, 25 bp, Homo sapien
tccttgtgtatgttgaggtttcatc

SEQ ID NO: 3579567 - DNA, 25 bp, Homo sapien
ctggcctttgcaataaaatctactt

SEQ ID NO: 3579568 - DNA, 25 bp, Homo sapien
tttctccaccaagagagtttccatc

SEQ ID NO: 3579569 - DNA, 25 bp, Homo sapien
tctacttatgcaccagatgagaaca

SEQ ID NO: 3579570 - DNA, 25 bp, Homo sapien
gataatacagaatctggtcccctgc

SEQ ID NO: 3579571 - DNA, 25 bp, Homo sapien
gcatcctaagtgaaaagcctgctct

SEQ ID NO: 3579572 - DNA, 25 bp, Homo sapien
taaagggctactttgatcatggcca

SEQ ID NO: 3579573 - DNA, 25 bp, Homo sapien
tcctgacaggtgatatggctcaagc

SEQ ID NO: 3579574 - DNA, 25 bp, Homo sapien
cactataaaacagctacattgcatc

SEQ ID NO: 3579575 - DNA, 25 bp, Homo sapien
tatgatatcagcaaaggtgacaaca

SEQ ID NO: 3579576 - DNA, 25 bp, Homo sapien
taaagtatgtaaagcactattccac

SEQ ID NO: 3579577 - DNA, 25 bp, Homo sapien
taactgagatatacttggaaaagag

SEQ ID NO: 3579578 - DNA, 25 bp, Homo sapien
tcttccaggaccactattaatatca

SEQ ID NO: 3579579 - DNA, 25 bp, Homo sapien
tttcttccaggaccactattaatat

SEQ ID NO: 3579580 - DNA, 25 bp, Homo sapien
ttaatatcacaattgacttttcctg

SEQ ID NO: 3579581 - DNA, 25 bp, Homo sapien
attaatatcacaattgacttttcct

SEQ ID NO: 3579582 - DNA, 25 bp, Homo sapien
ggaatataccactgacacgtgctgc

SEQ ID NO: 3579583 - DNA, 25 bp, Homo sapien
gataggagctatattacaacaggac

SEQ ID NO: 3579584 - DNA, 25 bp, Homo sapien
gaagggatctatgcctacaaacagg

SEQ ID NO: 3579585 - DNA, 25 bp, Homo sapien
ggtagatggatacacagactctggt

SEQ ID NO: 3579586 - DNA, 25 bp, Homo sapien
cagtagaaatagtagccgtagtcat

SEQ ID NO: 3579587 - DNA, 25 bp, Homo sapien
ggattgctctccataccagccgaga

SEQ ID NO: 3579588 - DNA, 25 bp, Homo sapien
gagtagatgggtcctgttgctttcc

SEQ ID NO: 3579589 - DNA, 25 bp, Homo sapien
gagagattgagcttcggcatccatg

SEQ ID NO: 3579590 - DNA, 25 bp, Homo sapien
gatggttgagtcacaagagtttctc

SEQ ID NO: 3579591 - DNA, 25 bp, Homo sapien
taggcttggatgcttcctacaatga

SEQ ID NO: 3579592 - DNA, 25 bp, Homo sapien
gataccttccaagaacaaggtgcca

SEQ ID NO: 3579593 - DNA, 25 bp, Homo sapien
ccaggtggaactactgctgagtgaa

SEQ ID NO: 3579594 - DNA, 25 bp, Homo sapien
tgcctgagagtgtatgaggtgccct

SEQ ID NO: 3579595 - DNA, 25 bp, Homo sapien
tgtgttgctgtgtaactctaagctc

SEQ ID NO: 3579596 - DNA, 25 bp, Homo sapien
gcccttgtgtcacatatccacctca

SEQ ID NO: 3579597 - DNA, 25 bp, Homo sapien
catttgaggaacaaatatgcccttg

SEQ ID NO: 3579598 - DNA, 25 bp, Homo sapien
cctcataaggtgctgttagtctgtg

SEQ ID NO: 3579599 - DNA, 25 bp, Homo sapien
gagttcattgagttcattgcctact

SEQ ID NO: 3579600 - DNA, 25 bp, Homo sapien
gagagcatgagaggcctgagttcat

SEQ ID NO: 3579601 - DNA, 25 bp, Homo sapien
catctcccgatcaagttcaagtcct

SEQ ID NO: 3579602 - DNA, 25 bp, Homo sapien
gcaccacagagagcatgagaggcct

SEQ ID NO: 3579603 - DNA, 25 bp, Homo sapien
ctggaccttcaaccttacgtagacg

SEQ ID NO: 3579604 - DNA, 25 bp, Homo sapien
tctctggaccttcaaccttacgtag

SEQ ID NO: 3579605 - DNA, 25 bp, Homo sapien
tatctctggaccttcaaccttacgt

SEQ ID NO: 3579606 - DNA, 25 bp, Homo sapien
tctctctgatcaccaacttctgagt

SEQ ID NO: 3579607 - DNA, 25 bp, Homo sapien
atggttttccaagcccctcatgatg

SEQ ID NO: 3579608 - DNA, 25 bp, Homo sapien
gttttccaagcccctcatgatgtgg

SEQ ID NO: 3579609 - DNA, 25 bp, Homo sapien
atatggttttccaagcccctcatga

SEQ ID NO: 3579610 - DNA, 25 bp, Homo sapien
tgatgtggagtcttcctagctcttc

SEQ ID NO: 3579611 - DNA, 25 bp, Homo sapien
actgggatttcagggacatgctcac

SEQ ID NO: 3579612 - DNA, 25 bp, Homo sapien
tcagggacatgctcacagagggacg

SEQ ID NO: 3579613 - DNA, 25 bp, Homo sapien
gatttcagggacatgctcacagagg

SEQ ID NO: 3579614 - DNA, 25 bp, Homo sapien
catgctcacagagggacggttggaa

SEQ ID NO: 3579615 - DNA, 25 bp, Homo sapien
cagaggctgctctgatgaagtaggt

SEQ ID NO: 3579616 - DNA, 25 bp, Homo sapien
gaagagtatgcagaggctgctctga

SEQ ID NO: 3579617 - DNA, 25 bp, Homo sapien
agagtatgcagaggctgctctgatg

SEQ ID NO: 3579618 - DNA, 25 bp, Homo sapien
tatgcagaggctgctctgatgaagt

SEQ ID NO: 3579619 - DNA, 25 bp, Homo sapien
actgtactattaggagagctgtcat

SEQ ID NO: 3579620 - DNA, 25 bp, Homo sapien
cacctagaaagatgccttccataaa

SEQ ID NO: 3579621 - DNA, 25 bp, Homo sapien
cactcgaatttcacctagaaagatg

SEQ ID NO: 3579622 - DNA, 25 bp, Homo sapien
taaactgtactattaggagagctgt

SEQ ID NO: 3579623 - DNA, 25 bp, Homo sapien
catgacttacatgagtatgcctaga

SEQ ID NO: 3579624 - DNA, 25 bp, Homo sapien
tagtgtctactggaatacagaagtc

SEQ ID NO: 3579625 - DNA, 25 bp, Homo sapien
tggctttgaggatagagcagctacc

SEQ ID NO: 3579626 - DNA, 25 bp, Homo sapien
caatgcaatgttaagtcacggaaac

SEQ ID NO: 3579627 - DNA, 25 bp, Homo sapien
tggtcccaacttgcggtcactgtca

SEQ ID NO: 3579628 - DNA, 25 bp, Homo sapien
aatcacggtccacttggtcccaact

SEQ ID NO: 3579629 - DNA, 25 bp, Homo sapien
gctgtcaaatggagaccaatcacgg

SEQ ID NO: 3579630 - DNA, 25 bp, Homo sapien
gcggtcactgtcagctttttatgtt

SEQ ID NO: 3579631 - DNA, 25 bp, Homo sapien
aagctttgctgtaaattcctattga

SEQ ID NO: 3579632 - DNA, 25 bp, Homo sapien
gctttgctgtaaattcctattgatt

SEQ ID NO: 3579633 - DNA, 25 bp, Homo sapien
tcctccaagctttgctgtaaattcc

SEQ ID NO: 3579634 - DNA, 25 bp, Homo sapien
ccaagctttgctgtaaattcctatt

SEQ ID NO: 3579635 - DNA, 25 bp, Homo sapien
tcaattccgttttgtagctttgtac

SEQ ID NO: 3579636 - DNA, 25 bp, Homo sapien
ttagcatcaattccgttttgtagct

SEQ ID NO: 3579637 - DNA, 25 bp, Homo sapien
agcatcaattccgttttgtagcttt

SEQ ID NO: 3579638 - DNA, 25 bp, Homo sapien
catcaattccgttttgtagctttgt

SEQ ID NO: 3579639 - DNA, 25 bp, Homo sapien
ttggatcagtttagtctgcaggcct

SEQ ID NO: 3579640 - DNA, 25 bp, Homo sapien
tgtaaaagcaacgcccaaaggtcca

SEQ ID NO: 3579641 - DNA, 25 bp, Homo sapien
ccaaaggtccagtgtggacgattaa

SEQ ID NO: 3579642 - DNA, 25 bp, Homo sapien
gaacaaatgtaaaagcaacgcccaa

SEQ ID NO: 3579643 - DNA, 25 bp, Homo sapien
caaaggtccagtgtggacgattaat

SEQ ID NO: 3579644 - DNA, 25 bp, Homo sapien
tccccactggagttttcaaaggcaa

SEQ ID NO: 3579645 - DNA, 25 bp, Homo sapien
ggatgaatctcatcttcagacaatg

SEQ ID NO: 3579646 - DNA, 25 bp, Homo sapien
tcattctcttgagcagaggtgaaaa

SEQ ID NO: 3579647 - DNA, 25 bp, Homo sapien
catcttcagacaatgttaaactcat

SEQ ID NO: 3579648 - DNA, 25 bp, Homo sapien
aaattcccacacttggcagatcatc

SEQ ID NO: 3579649 - DNA, 25 bp, Homo sapien
cccacacttggcagatcatcagaat

SEQ ID NO: 3579650 - DNA, 25 bp, Homo sapien
cagaaattcccacacttggcagatc

SEQ ID NO: 3579651 - DNA, 25 bp, Homo sapien
ccacacttggcagatcatcagaatc

SEQ ID NO: 3579652 - DNA, 25 bp, Homo sapien
aaaccacttgagaggtcattctgca

SEQ ID NO: 3579653 - DNA, 25 bp, Homo sapien
caattcaaaaccacttgagaggtca

SEQ ID NO: 3579654 - DNA, 25 bp, Homo sapien
aaatcaattcaaaaccacttgagag

SEQ ID NO: 3579655 - DNA, 25 bp, Homo sapien
ttcaaaaccacttgagaggtcattc

SEQ ID NO: 3579656 - DNA, 25 bp, Homo sapien
taacgtaatcatccgaagatgtcat

SEQ ID NO: 3579657 - DNA, 25 bp, Homo sapien
ttcccactgttggcagcttctcctg

SEQ ID NO: 3579658 - DNA, 25 bp, Homo sapien
gcttctcctgtaacgtaatcatccg

SEQ ID NO: 3579659 - DNA, 25 bp, Homo sapien
ggcagcttctcctgtaacgtaatca

SEQ ID NO: 3579660 - DNA, 25 bp, Homo sapien
tctttggaccagaagttatcctctg

SEQ ID NO: 3579661 - DNA, 25 bp, Homo sapien
ttctttggaccagaagttatcctct

SEQ ID NO: 3579662 - DNA, 25 bp, Homo sapien
gtgctgccttgactgccacggagag

SEQ ID NO: 3579663 - DNA, 25 bp, Homo sapien
taaaagcgatttgatgtacaaccag

SEQ ID NO: 3579664 - DNA, 25 bp, Homo sapien
tatttactatgggttaggactacac

SEQ ID NO: 3579665 - DNA, 25 bp, Homo sapien
tgaagtataatcctaaatcctgtct

SEQ ID NO: 3579666 - DNA, 25 bp, Homo sapien
caagcaaatcagcttccaaaggact

SEQ ID NO: 3579667 - DNA, 25 bp, Homo sapien
tcaagctaacggaaaggccacctta

SEQ ID NO: 3579668 - DNA, 25 bp, Homo sapien
gaaaggccaccttaatgcagttgcc

SEQ ID NO: 3579669 - DNA, 25 bp, Homo sapien
taacggaaaggccaccttaatgcag

SEQ ID NO: 3579670 - DNA, 25 bp, Homo sapien
agctaacggaaaggccaccttaatg

SEQ ID NO: 3579671 - DNA, 25 bp, Homo sapien
atttttctgattgatgttcccccac

SEQ ID NO: 3579672 - DNA, 25 bp, Homo sapien
ggtgttgacataaataaccttgaat

SEQ ID NO: 3579673 - DNA, 25 bp, Homo sapien
tctgattgatgttcccccaccaaat

SEQ ID NO: 3579674 - DNA, 25 bp, Homo sapien
ccttgaattaggtggcatttttctg

SEQ ID NO: 3579675 - DNA, 25 bp, Homo sapien
tcttctttagagacagccttgtaaa

SEQ ID NO: 3579676 - DNA, 25 bp, Homo sapien
tttcttctttagagacagccttgta

SEQ ID NO: 3579677 - DNA, 25 bp, Homo sapien
aacttttcttctttagagacagcct

SEQ ID NO: 3579678 - DNA, 25 bp, Homo sapien
tctttagagacagccttgtaaaatg

SEQ ID NO: 3579679 - DNA, 25 bp, Homo sapien
tcagacagagatgtaccccatcagc

SEQ ID NO: 3579680 - DNA, 25 bp, Homo sapien
tgtgtttatctagcgaaccctaata

SEQ ID NO: 3579681 - DNA, 25 bp, Homo sapien
gcattctggtcctcccatctttgga

SEQ ID NO: 3579682 - DNA, 25 bp, Homo sapien
ggttctcaagcatttagactaaggc

SEQ ID NO: 3579683 - DNA, 25 bp, Homo sapien
tgcagttgctcatgaaatataggct

SEQ ID NO: 3579684 - DNA, 25 bp, Homo sapien
caagttgacctctccatgtgcattt

SEQ ID NO: 3579685 - DNA, 25 bp, Homo sapien
catgcttgagttcaaatgttggcac

SEQ ID NO: 3579686 - DNA, 25 bp, Homo sapien
gaccgtaaccctcataggaaacaga

SEQ ID NO: 3579687 - DNA, 25 bp, Homo sapien
gccaatgcatatttagaggagtgag

SEQ ID NO: 3579688 - DNA, 25 bp, Homo sapien
ggctgacgtagctcccatccataat

SEQ ID NO: 3579689 - DNA, 25 bp, Homo sapien
gcagtcactggctttgtaatgtgcc

SEQ ID NO: 3579690 - DNA, 25 bp, Homo sapien
catccataataaatgacctgcaggg

SEQ ID NO: 3579691 - DNA, 25 bp, Homo sapien
atgacttcttgctgcgtttttcatc

SEQ ID NO: 3579692 - DNA, 25 bp, Homo sapien
tcttgctgcgtttttcatcaagttg

SEQ ID NO: 3579693 - DNA, 25 bp, Homo sapien
acttcttgctgcgtttttcatcaag

SEQ ID NO: 3579694 - DNA, 25 bp, Homo sapien
tgacttcttgctgcgtttttcatca

SEQ ID NO: 3579695 - DNA, 25 bp, Homo sapien
agtaagagcaacaaccatatacagc

SEQ ID NO: 3579696 - DNA, 25 bp, Homo sapien
caaccatatacagctgcaacacagg

SEQ ID NO: 3579697 - DNA, 25 bp, Homo sapien
ggaattccattgacaggaggctaat

SEQ ID NO: 3579698 - DNA, 25 bp, Homo sapien
ggaggctaatacatgctgtgtggca

SEQ ID NO: 3579699 - DNA, 25 bp, Homo sapien
ttgcacagcagattttagaactagt

SEQ ID NO: 3579700 - DNA, 25 bp, Homo sapien
gaacactgatcacttcaacaaccag

SEQ ID NO: 3579701 - DNA, 25 bp, Homo sapien
cgtcagtaggattaggttgcacagc

SEQ ID NO: 3579702 - DNA, 25 bp, Homo sapien
gaactagtaatctaacaactggtgt

SEQ ID NO: 3579703 - DNA, 25 bp, Homo sapien
ctcctacaccaactttctctagagg

SEQ ID NO: 3579704 - DNA, 25 bp, Homo sapien
cctcctacaccaactttctctagag

SEQ ID NO: 3579705 - DNA, 25 bp, Homo sapien
agtagctgttaaccctcctacacca

SEQ ID NO: 3579706 - DNA, 25 bp, Homo sapien
tagtaagtagctgttaaccctccta

SEQ ID NO: 3579707 - DNA, 25 bp, Homo sapien
tacaatcctcacaggcttatgagac

SEQ ID NO: 3579708 - DNA, 25 bp, Homo sapien
tcctcacaggcttatgagactgcct

SEQ ID NO: 3579709 - DNA, 25 bp, Homo sapien
tcacaggcttatgagactgccttct

SEQ ID NO: 3579710 - DNA, 25 bp, Homo sapien
gcttatgagactgccttctaagtga

SEQ ID NO: 3579711 - DNA, 25 bp, Homo sapien
ttttgagtggggtcacagatcatta

SEQ ID NO: 3579712 - DNA, 25 bp, Homo sapien
cctgtgtgccacgattttgagtggg

SEQ ID NO: 3579713 - DNA, 25 bp, Homo sapien
gagtggggtcacagatcattatatc

SEQ ID NO: 3579714 - DNA, 25 bp, Homo sapien
gtggggtcacagatcattatatcag

SEQ ID NO: 3579715 - DNA, 25 bp, Homo sapien
tcaatggaggtcactactttcaaag

SEQ ID NO: 3579716 - DNA, 25 bp, Homo sapien
caatggaggtcactactttcaaagc

SEQ ID NO: 3579717 - DNA, 25 bp, Homo sapien
cttcaatggaggtcactactttcaa

SEQ ID NO: 3579718 - DNA, 25 bp, Homo sapien
tcttcaatggaggtcactactttca

SEQ ID NO: 3579719 - DNA, 25 bp, Homo sapien
gagctgatgctccacatggtaccag

SEQ ID NO: 3579720 - DNA, 25 bp, Homo sapien
tggtaccagtgttaaaggagatgtc

SEQ ID NO: 3579721 - DNA, 25 bp, Homo sapien
ttcagatccacagatgagctgatgc

SEQ ID NO: 3579722 - DNA, 25 bp, Homo sapien
tgttaaaggagatgtcaccttgata

SEQ ID NO: 3579723 - DNA, 25 bp, Homo sapien
agtccagcagatggtttaaaattcc

SEQ ID NO: 3579724 - DNA, 25 bp, Homo sapien
cagtccagcagatggtttaaaattc

SEQ ID NO: 3579725 - DNA, 25 bp, Homo sapien
ccagcagatggtttaaaattcccat

SEQ ID NO: 3579726 - DNA, 25 bp, Homo sapien
ttacagtccagcagatggtttaaaa

SEQ ID NO: 3579727 - DNA, 25 bp, Homo sapien
cacgtgcagtagtcacagcaatggt

SEQ ID NO: 3579728 - DNA, 25 bp, Homo sapien
ttaaacacgtgcagtagtcacagca

SEQ ID NO: 3579729 - DNA, 25 bp, Homo sapien
ggtagtactaatggttggagccatg

SEQ ID NO: 3579730 - DNA, 25 bp, Homo sapien
tggttggagccatgagctgttgact

SEQ ID NO: 3579731 - DNA, 25 bp, Homo sapien
tatctaaaatacggggattccgaga

SEQ ID NO: 3579732 - DNA, 25 bp, Homo sapien
ctatctaaaatacggggattccgag

SEQ ID NO: 3579733 - DNA, 25 bp, Homo sapien
ggggattccgagaagggctattgaa

SEQ ID NO: 3579734 - DNA, 25 bp, Homo sapien
atacggggattccgagaagggctat

SEQ ID NO: 3579735 - DNA, 25 bp, Homo sapien
ttgaacacatatctttgtagtcccc

SEQ ID NO: 3579736 - DNA, 25 bp, Homo sapien
cttgcttcctgaatgtaagttacca

SEQ ID NO: 3579737 - DNA, 25 bp, Homo sapien
gtagtccccaaatgcactcttttta

SEQ ID NO: 3579738 - DNA, 25 bp, Homo sapien
gaatgtaagttaccatgacctcctt

SEQ ID NO: 3579739 - DNA, 25 bp, Homo sapien
cacctttgggcctttcaaggacata

SEQ ID NO: 3579740 - DNA, 25 bp, Homo sapien
tctgttagggtcaaaatgtgctgga

SEQ ID NO: 3579741 - DNA, 25 bp, Homo sapien
catatgccagaagctattcgtgtgc

SEQ ID NO: 3579742 - DNA, 25 bp, Homo sapien
gctctaaggcatcattttgtctcca

SEQ ID NO: 3579743 - DNA, 25 bp, Homo sapien
cccggtcatagttctggccgtggaa

SEQ ID NO: 3579744 - DNA, 25 bp, Homo sapien
cagtgacattttttccccggtcata

SEQ ID NO: 3579745 - DNA, 25 bp, Homo sapien
tttcaatggctgaaacagtgacatt

SEQ ID NO: 3579746 - DNA, 25 bp, Homo sapien
taattgcattgaatggaaaatgaag

SEQ ID NO: 3579747 - DNA, 25 bp, Homo sapien
gatgacatgcactctaccaaagcta

SEQ ID NO: 3579748 - DNA, 25 bp, Homo sapien
ccctagttggacagagaagccttaa

SEQ ID NO: 3579749 - DNA, 25 bp, Homo sapien
tatcaagtacgacagcacatggctc

SEQ ID NO: 3579750 - DNA, 25 bp, Homo sapien
gaggagttgaaccacttgcactaag

SEQ ID NO: 3579751 - DNA, 25 bp, Homo sapien
attagattctggctggaagactgcc

SEQ ID NO: 3579752 - DNA, 25 bp, Homo sapien
aaagctagtaaatggcagtgccaaa

SEQ ID NO: 3579753 - DNA, 25 bp, Homo sapien
gaagtatcctctatgtcagagacag

SEQ ID NO: 3579754 - DNA, 25 bp, Homo sapien
gggctcttggccttgcatggagact

SEQ ID NO: 3579755 - DNA, 25 bp, Homo sapien
gaggcatctatagacgaatccctgt

SEQ ID NO: 3579756 - DNA, 25 bp, Homo sapien
tctatagacgaatccctgtacattc

SEQ ID NO: 3579757 - DNA, 25 bp, Homo sapien
atagacgaatccctgtacattcttg

SEQ ID NO: 3579758 - DNA, 25 bp, Homo sapien
gcatctatagacgaatccctgtaca

SEQ ID NO: 3579759 - DNA, 25 bp, Homo sapien
caccagtggattcaccaacatagct

SEQ ID NO: 3579760 - DNA, 25 bp, Homo sapien
tcaccagtggattcaccaacatagc

SEQ ID NO: 3579761 - DNA, 25 bp, Homo sapien
acggaaggcccctctgacggccaga

SEQ ID NO: 3579762 - DNA, 25 bp, Homo sapien
tctgcttgaagctgtctgagggacg

SEQ ID NO: 3579763 - DNA, 25 bp, Homo sapien
tcaaggattctccattcccttggtg

SEQ ID NO: 3579764 - DNA, 25 bp, Homo sapien
cttggtgacagcatgcatctgcttg

SEQ ID NO: 3579765 - DNA, 25 bp, Homo sapien
tccccaaaaaatttgaccatcacat

SEQ ID NO: 3579766 - DNA, 25 bp, Homo sapien
cccaaaaaatttgaccatcacattc

SEQ ID NO: 3579767 - DNA, 25 bp, Homo sapien
ccccaaaaaatttgaccatcacatt

SEQ ID NO: 3579768 - DNA, 25 bp, Homo sapien
ctccccaaaaaatttgaccatcaca

SEQ ID NO: 3579769 - DNA, 25 bp, Homo sapien
cttaattttagtgtcaattccatat

SEQ ID NO: 3579770 - DNA, 25 bp, Homo sapien
ttaattttagtgtcaattccatatc

SEQ ID NO: 3579771 - DNA, 25 bp, Homo sapien
ttctttactggcttggacttactta

SEQ ID NO: 3579772 - DNA, 25 bp, Homo sapien
tgctaacttcctctcggatgacgtc

SEQ ID NO: 3579773 - DNA, 25 bp, Homo sapien
tctcagacatgagagatctaagttg

SEQ ID NO: 3579774 - DNA, 25 bp, Homo sapien
cggatgacgtccatgtatctttttc

SEQ ID NO: 3579775 - DNA, 25 bp, Homo sapien
aataataaatttgcacactaccaag

SEQ ID NO: 3579776 - DNA, 25 bp, Homo sapien
gtgcaagtgtgtattcaaagctttc

SEQ ID NO: 3579777 - DNA, 25 bp, Homo sapien
tctaggtgaccagagatcttatttg

SEQ ID NO: 3579778 - DNA, 25 bp, Homo sapien
taccagtgtatattatgagtggagt

SEQ ID NO: 3579779 - DNA, 25 bp, Homo sapien
cacactttccagaaccttagaaatg

SEQ ID NO: 3579780 - DNA, 25 bp, Homo sapien
ttccagaaccttagaaatgtcatcc

SEQ ID NO: 3579781 - DNA, 25 bp, Homo sapien
gaatatgttcggtgccaaagttcac

SEQ ID NO: 3579782 - DNA, 25 bp, Homo sapien
tcaggaactacaattgaatagcaga

SEQ ID NO: 3579783 - DNA, 25 bp, Homo sapien
tatttccggtaatacagttgctgcc

SEQ ID NO: 3579784 - DNA, 25 bp, Homo sapien
ggtaatacagttgctgcccttggca

SEQ ID NO: 3579785 - DNA, 25 bp, Homo sapien
attatatttccggtaatacagttgc

SEQ ID NO: 3579786 - DNA, 25 bp, Homo sapien
aagctgcttcatttgaaactcttgg

SEQ ID NO: 3579787 - DNA, 25 bp, Homo sapien
catgagcccttcaaacaaacaacct

SEQ ID NO: 3579788 - DNA, 25 bp, Homo sapien
tgctactacccttgccatgagccct

SEQ ID NO: 3579789 - DNA, 25 bp, Homo sapien
gttttaatcctaggcttgacttatg

SEQ ID NO: 3579790 - DNA, 25 bp, Homo sapien
cagcccttattgctagttcccgttt

SEQ ID NO: 3579791 - DNA, 25 bp, Homo sapien
gccttactagtttcaatctccaata

SEQ ID NO: 3579792 - DNA, 25 bp, Homo sapien
tttgctgcctgtgaagccgtagtgg

SEQ ID NO: 3579793 - DNA, 25 bp, Homo sapien
tataatacccatcattctcctagta

SEQ ID NO: 3579794 - DNA, 25 bp, Homo sapien
tctagcatctataatacccatcatt

SEQ ID NO: 3579795 - DNA, 25 bp, Homo sapien
atccataatctcaatgatgaacaag

SEQ ID NO: 3579796 - DNA, 25 bp, Homo sapien
tcagggtccatcatccataatctca

SEQ ID NO: 3579797 - DNA, 25 bp, Homo sapien
tccataatctcaatgatgaacaaga

SEQ ID NO: 3579798 - DNA, 25 bp, Homo sapien
gggtccatcatccataatctcaatg

SEQ ID NO: 3579799 - DNA, 25 bp, Homo sapien
catggctcaaggtactcctcaatag

SEQ ID NO: 3579800 - DNA, 25 bp, Homo sapien
tgaccgccatggctcaaggtactcc

SEQ ID NO: 3579801 - DNA, 25 bp, Homo sapien
tggctcaaggtactcctcaatagcc

SEQ ID NO: 3579802 - DNA, 25 bp, Homo sapien
cgccatggctcaaggtactcctcaa

SEQ ID NO: 3579803 - DNA, 25 bp, Homo sapien
acatgaaaaattatcattgtacttc

SEQ ID NO: 3579804 - DNA, 25 bp, Homo sapien
tgactaatgacatgaaaaattatca

SEQ ID NO: 3579805 - DNA, 25 bp, Homo sapien
aaaattatcattgtacttcaactat

SEQ ID NO: 3579806 - DNA, 25 bp, Homo sapien
taatgacatgaaaaattatcattgt

SEQ ID NO: 3579807 - DNA, 25 bp, Homo sapien
agtaattataaacctatcctcagcc

SEQ ID NO: 3579808 - DNA, 25 bp, Homo sapien
ttctgaggtgctacagtaattataa

SEQ ID NO: 3579809 - DNA, 25 bp, Homo sapien
ctcgtacaatgaatctgaggcagat

SEQ ID NO: 3579810 - DNA, 25 bp, Homo sapien
ggaactgacctcgtacaatgaatct

SEQ ID NO: 3579811 - DNA, 25 bp, Homo sapien
cattctttgacgtttcagagtgaaa

SEQ ID NO: 3579812 - DNA, 25 bp, Homo sapien
gaaagtatattgcagcaagttcaga

SEQ ID NO: 3579813 - DNA, 25 bp, Homo sapien
actggagacttaaggcactgccaat

SEQ ID NO: 3579814 - DNA, 25 bp, Homo sapien
cagttctggccctaggaaagtatat

SEQ ID NO: 3579815 - DNA, 25 bp, Homo sapien
aattccatttgcagccagttctggc

SEQ ID NO: 3579816 - DNA, 25 bp, Homo sapien
gaactctggaaatacggatgcttcg

SEQ ID NO: 3579817 - DNA, 25 bp, Homo sapien
gtgggaactctggaaatacggatgc

SEQ ID NO: 3579818 - DNA, 25 bp, Homo sapien
gaaatacggatgcttcgtgtcttat

SEQ ID NO: 3579819 - DNA, 25 bp, Homo sapien
gatgcttcgtgtcttattctcaacc

SEQ ID NO: 3579820 - DNA, 25 bp, Homo sapien
ttgtattgattgagggcttgaagtg

SEQ ID NO: 3579821 - DNA, 25 bp, Homo sapien
tgacagcaggtcaatactgtatctg

SEQ ID NO: 3579822 - DNA, 25 bp, Homo sapien
aggagactgacagcaggtcaatact

SEQ ID NO: 3579823 - DNA, 25 bp, Homo sapien
attgtattgattgagggcttgaagt

SEQ ID NO: 3579824 - DNA, 25 bp, Homo sapien
ttttcatctccattgctctttacct

SEQ ID NO: 3579825 - DNA, 25 bp, Homo sapien
ccattgctctttacctccatccact

SEQ ID NO: 3579826 - DNA, 25 bp, Homo sapien
catctccattgctctttacctccat

SEQ ID NO: 3579827 - DNA, 25 bp, Homo sapien
tctccattgctctttacctccatcc

SEQ ID NO: 3579828 - DNA, 25 bp, Homo sapien
attaatccagtatatcattgttaga

SEQ ID NO: 3579829 - DNA, 25 bp, Homo sapien
tattaatccagtatatcattgttag

SEQ ID NO: 3579830 - DNA, 25 bp, Homo sapien
ttattaatccagtatatcattgtta

SEQ ID NO: 3579831 - DNA, 25 bp, Homo sapien
tgtgaatgcctagaaaaggtgatca

SEQ ID NO: 3579832 - DNA, 25 bp, Homo sapien
cttgggtggctagatcagttcgaac

SEQ ID NO: 3579833 - DNA, 25 bp, Homo sapien
ggcagggccatttaaactaacttga

SEQ ID NO: 3579834 - DNA, 25 bp, Homo sapien
gactggaaaactatgtgtgaatgcc

SEQ ID NO: 3579835 - DNA, 25 bp, Homo sapien
caactacggaaaaaccagaagcatc

SEQ ID NO: 3579836 - DNA, 25 bp, Homo sapien
tagagtaaacgtcttcctatgagga

SEQ ID NO: 3579837 - DNA, 25 bp, Homo sapien
gaagaaacccagcatagaactttac

SEQ ID NO: 3579838 - DNA, 25 bp, Homo sapien
gaatgccctgcaattaacagtcaaa

SEQ ID NO: 3579839 - DNA, 25 bp, Homo sapien
tcttgaagacggcagaaggttagat

SEQ ID NO: 3579840 - DNA, 25 bp, Homo sapien
gctttataggtccatgggctatgag

SEQ ID NO: 3579841 - DNA, 25 bp, Homo sapien
tttaaatccagtttgccacctcatg

SEQ ID NO: 3579842 - DNA, 25 bp, Homo sapien
tcttttaattagagcacataggctg

SEQ ID NO: 3579843 - DNA, 25 bp, Homo sapien
gcttcaaggttgatgtcactgacat

SEQ ID NO: 3579844 - DNA, 25 bp, Homo sapien
gctgtgatgtgctggccaaatcccc

SEQ ID NO: 3579845 - DNA, 25 bp, Homo sapien
tgctggcagtgctagttgatcaatc

SEQ ID NO: 3579846 - DNA, 25 bp, Homo sapien
ctatggtgaccctaaaagaacctct

SEQ ID NO: 3579847 - DNA, 25 bp, Homo sapien
ttcccaggatcaggtgattttccta

SEQ ID NO: 3579848 - DNA, 25 bp, Homo sapien
agtctcattgccatcatacaggctg

SEQ ID NO: 3579849 - DNA, 25 bp, Homo sapien
ttttctcactatcattttctctcat

SEQ ID NO: 3579850 - DNA, 25 bp, Homo sapien
aatctgaatctgttgacatgaattc

SEQ ID NO: 3579851 - DNA, 25 bp, Homo sapien
cagagctcttgcatgaatctgaatc

SEQ ID NO: 3579852 - DNA, 25 bp, Homo sapien
tgcatgaatctgaatctgttgacat

SEQ ID NO: 3579853 - DNA, 25 bp, Homo sapien
tgttagacacaattaggcagtgtgc

SEQ ID NO: 3579854 - DNA, 25 bp, Homo sapien
gtttcaccaaagaactgggactcag

SEQ ID NO: 3579855 - DNA, 25 bp, Homo sapien
cgagaaaagcatatttagggaaggt

SEQ ID NO: 3579856 - DNA, 25 bp, Homo sapien
tcacctggtgaaacataaagtgttc

SEQ ID NO: 3579857 - DNA, 25 bp, Homo sapien
gaatctcagctttttcatagttttc

SEQ ID NO: 3579858 - DNA, 25 bp, Homo sapien
ctgcccatgtagaatctcagctttt

SEQ ID NO: 3579859 - DNA, 25 bp, Homo sapien
atattcttcaggcaatatcagtaac

SEQ ID NO: 3579860 - DNA, 25 bp, Homo sapien
attcttcaggcaatatcagtaacaa

SEQ ID NO: 3579861 - DNA, 25 bp, Homo sapien
aaatattcttcaggcaatatcagta

SEQ ID NO: 3579862 - DNA, 25 bp, Homo sapien
tcacgagtcatctctgaagttgagg

SEQ ID NO: 3579863 - DNA, 25 bp, Homo sapien
tcaaggtatatccactcttgatttc

SEQ ID NO: 3579864 - DNA, 25 bp, Homo sapien
caaggtatatccactcttgatttct

SEQ ID NO: 3579865 - DNA, 25 bp, Homo sapien
ttcaaggtatatccactcttgattt

SEQ ID NO: 3579866 - DNA, 25 bp, Homo sapien
atttctaaatacattagggtcttag

SEQ ID NO: 3579867 - DNA, 25 bp, Homo sapien
tccaccaaaccagcacagccttgca

SEQ ID NO: 3579868 - DNA, 25 bp, Homo sapien
tcagaggcaggctggacttccagaa

SEQ ID NO: 3579869 - DNA, 25 bp, Homo sapien
ttccaaaaaccactgccttccatgg

SEQ ID NO: 3579870 - DNA, 25 bp, Homo sapien
tccatcattgcatcttgggccttcc

SEQ ID NO: 3579871 - DNA, 25 bp, Homo sapien
acataaatgcctggggaaataaggg

SEQ ID NO: 3579872 - DNA, 25 bp, Homo sapien
taagggcaaattgactccattgctg

SEQ ID NO: 3579873 - DNA, 25 bp, Homo sapien
agggcaaattgactccattgctgct

SEQ ID NO: 3579874 - DNA, 25 bp, Homo sapien
aataagggcaaattgactccattgc

SEQ ID NO: 3579875 - DNA, 25 bp, Homo sapien
gtctggaccatcagataaatttcca

SEQ ID NO: 3579876 - DNA, 25 bp, Homo sapien
atttccagtgacaagcatttaaaac

SEQ ID NO: 3579877 - DNA, 25 bp, Homo sapien
ttctgtgctaaaagtctggaccatc

SEQ ID NO: 3579878 - DNA, 25 bp, Homo sapien
taactagacttagagtccgtcggga

SEQ ID NO: 3579879 - DNA, 25 bp, Homo sapien
ggaagcatggaagccttagtctttt

SEQ ID NO: 3579880 - DNA, 25 bp, Homo sapien
tggatcatttgaatactggactggg

SEQ ID NO: 3579881 - DNA, 25 bp, Homo sapien
ggtctctcataagttgcaatgttgc

SEQ ID NO: 3579882 - DNA, 25 bp, Homo sapien
gaagcatgttacctggatggctcaa

SEQ ID NO: 3579883 - DNA, 25 bp, Homo sapien
tagctgttcccaataaaatttagat

SEQ ID NO: 3579884 - DNA, 25 bp, Homo sapien
acatgattgaatcttgctgctcctg

SEQ ID NO: 3579885 - DNA, 25 bp, Homo sapien
tcaaactagctgttcccaataaaat

SEQ ID NO: 3579886 - DNA, 25 bp, Homo sapien
caaacttcattgttacagccacaag

SEQ ID NO: 3579887 - DNA, 25 bp, Homo sapien
tgcaaaactcccaaaatattagtat

SEQ ID NO: 3579888 - DNA, 25 bp, Homo sapien
catttactgaggagctatcatttgt

SEQ ID NO: 3579889 - DNA, 25 bp, Homo sapien
taaatttgctgctggtcaagattca

SEQ ID NO: 3579890 - DNA, 25 bp, Homo sapien
gctgcaactaattctctaaatttgc

SEQ ID NO: 3579891 - DNA, 25 bp, Homo sapien
acatctcttatgagtcttatttctg

SEQ ID NO: 3579892 - DNA, 25 bp, Homo sapien
caggatgagtggaacctgaaaaggc

SEQ ID NO: 3579893 - DNA, 25 bp, Homo sapien
taggtccttcaagctttgtgacact

SEQ ID NO: 3579894 - DNA, 25 bp, Homo sapien
cctgaaaaggctattgttaggtcct

SEQ ID NO: 3579895 - DNA, 25 bp, Homo sapien
gatgcagcgctagaggcatagttgt

SEQ ID NO: 3579896 - DNA, 25 bp, Homo sapien
gaatgtctgcgatcctttcgtgtga

SEQ ID NO: 3579897 - DNA, 25 bp, Homo sapien
gataacggagacacaatctgcagcg

SEQ ID NO: 3579898 - DNA, 25 bp, Homo sapien
atctgcagcgtaacagttgattcca

SEQ ID NO: 3579899 - DNA, 25 bp, Homo sapien
tcttagtagatctttgtcttgggac

SEQ ID NO: 3579900 - DNA, 25 bp, Homo sapien
cttgggaccccaactttcacaagtg

SEQ ID NO: 3579901 - DNA, 25 bp, Homo sapien
tatgggagccctattactatgacag

SEQ ID NO: 3579902 - DNA, 25 bp, Homo sapien
ggtgagggaagcattctacagtgtt

SEQ ID NO: 3579903 - DNA, 25 bp, Homo sapien
tgcttactgaaaacaggactggtgc

SEQ ID NO: 3579904 - DNA, 25 bp, Homo sapien
gcttactgaaaacaggactggtgct

SEQ ID NO: 3579905 - DNA, 25 bp, Homo sapien
tactgaaaacaggactggtgctggg

SEQ ID NO: 3579906 - DNA, 25 bp, Homo sapien
ttactgaaaacaggactggtgctgg

SEQ ID NO: 3579907 - DNA, 25 bp, Homo sapien
tctgactgagggttatggtcataac

SEQ ID NO: 3579908 - DNA, 25 bp, Homo sapien
caaacaatgggtgtccaggatgaaa

SEQ ID NO: 3579909 - DNA, 25 bp, Homo sapien
cttgaaggaaggttgagtctgactg

SEQ ID NO: 3579910 - DNA, 25 bp, Homo sapien
ggtcataacaaggtgtggtccaggc

SEQ ID NO: 3579911 - DNA, 25 bp, Homo sapien
aagttttgccacttgaagttgttca

SEQ ID NO: 3579912 - DNA, 25 bp, Homo sapien
catcgtataagttttgccacttgaa

SEQ ID NO: 3579913 - DNA, 25 bp, Homo sapien
gtttctgtcctcatcgtataagttt

SEQ ID NO: 3579914 - DNA, 25 bp, Homo sapien
tcctcatcgtataagttttgccact

SEQ ID NO: 3579915 - DNA, 25 bp, Homo sapien
cctctgcgtggcatagaaaagcaat

SEQ ID NO: 3579916 - DNA, 25 bp, Homo sapien
ataaggaggctaagtcgtgggctaa

SEQ ID NO: 3579917 - DNA, 25 bp, Homo sapien
caattctaagtgacagagcctagac

SEQ ID NO: 3579918 - DNA, 25 bp, Homo sapien
gaaaggaccagtgagctcattggca

SEQ ID NO: 3579919 - DNA, 25 bp, Homo sapien
taagtatttcaggaccatattggca

SEQ ID NO: 3579920 - DNA, 25 bp, Homo sapien
tagaccacttgattttaaccagacc

SEQ ID NO: 3579921 - DNA, 25 bp, Homo sapien
tgaacacactctcacaaagatcccg

SEQ ID NO: 3579922 - DNA, 25 bp, Homo sapien
aaagatcccgagtctgtgatcaggc

SEQ ID NO: 3579923 - DNA, 25 bp, Homo sapien
tggtgaggcccagtagcaattcttg

SEQ ID NO: 3579924 - DNA, 25 bp, Homo sapien
cacaggtggcattgtgaatgataaa

SEQ ID NO: 3579925 - DNA, 25 bp, Homo sapien
ttgaaagagtcaatggaagccagta

SEQ ID NO: 3579926 - DNA, 25 bp, Homo sapien
catttgtggtcaacattggtgaggc

SEQ ID NO: 3579927 - DNA, 25 bp, Homo sapien
gattatggagttaatacagtgccca

SEQ ID NO: 3579928 - DNA, 25 bp, Homo sapien
tgttgttgagacgtagattctctct

SEQ ID NO: 3579929 - DNA, 25 bp, Homo sapien
ggcaatccttctccttgagatgtaa

SEQ ID NO: 3579930 - DNA, 25 bp, Homo sapien
cacgcctggttaactgcaagacttt

SEQ ID NO: 3579931 - DNA, 25 bp, Homo sapien
taacctaaggcgatagaagtcagca

SEQ ID NO: 3579932 - DNA, 25 bp, Homo sapien
tgtagacgcagacctaggatcctct

SEQ ID NO: 3579933 - DNA, 25 bp, Homo sapien
tacctaggaaattgtcatggcgggc

SEQ ID NO: 3579934 - DNA, 25 bp, Homo sapien
tgggcaaaacacaaactgtagacgc

SEQ ID NO: 3579935 - DNA, 25 bp, Homo sapien
tgcttgtttttctagctcattttat

SEQ ID NO: 3579936 - DNA, 25 bp, Homo sapien
cttgataccaaagccggacagagac

SEQ ID NO: 3579937 - DNA, 25 bp, Homo sapien
gtttttctagctcattttatgaggc

SEQ ID NO: 3579938 - DNA, 25 bp, Homo sapien
cttgtttttctagctcattttatga

SEQ ID NO: 3579939 - DNA, 25 bp, Homo sapien
ggtttctgggtacaatttcttgcta

SEQ ID NO: 3579940 - DNA, 25 bp, Homo sapien
gcaaaaactgcctttggcaagacgt

SEQ ID NO: 3579941 - DNA, 25 bp, Homo sapien
gtcatatttcagcacaatctgcagg

SEQ ID NO: 3579942 - DNA, 25 bp, Homo sapien
tttggcaagacgtagcatctgattc

SEQ ID NO: 3579943 - DNA, 25 bp, Homo sapien
ttctctatgattgggctctcaattt

SEQ ID NO: 3579944 - DNA, 25 bp, Homo sapien
cttctctatgattgggctctcaatt

SEQ ID NO: 3579945 - DNA, 25 bp, Homo sapien
tctctatgattgggctctcaatttc

SEQ ID NO: 3579946 - DNA, 25 bp, Homo sapien
ccaaaacagtgttgagggcaaagac

SEQ ID NO: 3579947 - DNA, 25 bp, Homo sapien
cttcagtaccaaaacagtgttgagg

SEQ ID NO: 3579948 - DNA, 25 bp, Homo sapien
tgaaacgtttagaatagaccttcag

SEQ ID NO: 3579949 - DNA, 25 bp, Homo sapien
gaatagaccttcagtaccaaaacag

SEQ ID NO: 3579950 - DNA, 25 bp, Homo sapien
ccttcaactcttacatcgttttctg

SEQ ID NO: 3579951 - DNA, 25 bp, Homo sapien
agaaaccttcaactcttacatcgtt

SEQ ID NO: 3579952 - DNA, 25 bp, Homo sapien
catagttgcccaaagaaccctgaga

SEQ ID NO: 3579953 - DNA, 25 bp, Homo sapien
taatgacttcatccttcatagttgc

SEQ ID NO: 3579954 - DNA, 25 bp, Homo sapien
cctttaggagggatgcctttatatc

SEQ ID NO: 3579955 - DNA, 25 bp, Homo sapien
gcaagcaatgcgtcaaaaatacctg

SEQ ID NO: 3579956 - DNA, 25 bp, Homo sapien
tcatctgttatcaagtaggaccacg

SEQ ID NO: 3579957 - DNA, 25 bp, Homo sapien
tgttccaaaggcaagcaatgcgtca

SEQ ID NO: 3579958 - DNA, 25 bp, Homo sapien
gtcattttacttctatgggccatca

SEQ ID NO: 3579959 - DNA, 25 bp, Homo sapien
ccatctgacataggggtcattttac

SEQ ID NO: 3579960 - DNA, 25 bp, Homo sapien
tgatcctttttactaccatctgaca

SEQ ID NO: 3579961 - DNA, 25 bp, Homo sapien
cctctgtgccttttgatccttttta

SEQ ID NO: 3579962 - DNA, 25 bp, Homo sapien
gatcaggcagataagacaccagtag

SEQ ID NO: 3579963 - DNA, 25 bp, Homo sapien
taagaatcctctaatgggctgcagt

SEQ ID NO: 3579964 - DNA, 25 bp, Homo sapien
tacctggatggagctttaagaatcc

SEQ ID NO: 3579965 - DNA, 25 bp, Homo sapien
ggcctatgccttaaatgaactctag

SEQ ID NO: 3579966 - DNA, 25 bp, Homo sapien
atgcagacatcaggtaagataggct

SEQ ID NO: 3579967 - DNA, 25 bp, Homo sapien
catcaggtaagataggcttctgctc

SEQ ID NO: 3579968 - DNA, 25 bp, Homo sapien
tcatgcagacatcaggtaagatagg

SEQ ID NO: 3579969 - DNA, 25 bp, Homo sapien
tcaggtaagataggcttctgctcac

SEQ ID NO: 3579970 - DNA, 25 bp, Homo sapien
acttctatggcctccttcttatcaa

SEQ ID NO: 3579971 - DNA, 25 bp, Homo sapien
attggcagtgccttacttctatggc

SEQ ID NO: 3579972 - DNA, 25 bp, Homo sapien
gtgccttacttctatggcctccttc

SEQ ID NO: 3579973 - DNA, 25 bp, Homo sapien
atggcctttgcacattggcagtgcc

SEQ ID NO: 3579974 - DNA, 25 bp, Homo sapien
ggctactatgccactatgcattcga

SEQ ID NO: 3579975 - DNA, 25 bp, Homo sapien
agtaaagcccaaatggctactatgc

SEQ ID NO: 3579976 - DNA, 25 bp, Homo sapien
caaatggctactatgccactatgca

SEQ ID NO: 3579977 - DNA, 25 bp, Homo sapien
cactatgcattcgatgtactggctt

SEQ ID NO: 3579978 - DNA, 25 bp, Homo sapien
tattttatcatagcccatggtgaca

SEQ ID NO: 3579979 - DNA, 25 bp, Homo sapien
cagggctctttgtgagccacttggc

SEQ ID NO: 3579980 - DNA, 25 bp, Homo sapien
tgtaaggctaaagcttccagggctc

SEQ ID NO: 3579981 - DNA, 25 bp, Homo sapien
gcacgttatccatctgcggtatttt

SEQ ID NO: 3579982 - DNA, 25 bp, Homo sapien
gaaccccattatcaagaacttctac

SEQ ID NO: 3579983 - DNA, 25 bp, Homo sapien
tctgctctttccaggataacattct

SEQ ID NO: 3579984 - DNA, 25 bp, Homo sapien
gctctttccaggataacattctggt

SEQ ID NO: 3579985 - DNA, 25 bp, Homo sapien
cagtctgctctttccaggataacat

SEQ ID NO: 3579986 - DNA, 25 bp, Homo sapien
tcagtctgctctttccaggataaca

SEQ ID NO: 3579987 - DNA, 25 bp, Homo sapien
caatagtgctttcaatctcccagga

SEQ ID NO: 3579988 - DNA, 25 bp, Homo sapien
caaagatggaaacctcagagttaga

SEQ ID NO: 3579989 - DNA, 25 bp, Homo sapien
aattcctgtcgttaatatcctatca

SEQ ID NO: 3579990 - DNA, 25 bp, Homo sapien
tgttttcctctctccgcattactaa

SEQ ID NO: 3579991 - DNA, 25 bp, Homo sapien
tctctttctcacttccaataatcta

SEQ ID NO: 3579992 - DNA, 25 bp, Homo sapien
aacaattacatgtactacactttcc

SEQ ID NO: 3579993 - DNA, 25 bp, Homo sapien
tactacactttcctaaatctacttg

SEQ ID NO: 3579994 - DNA, 25 bp, Homo sapien
taatctacttaaatctccttgtgta

SEQ ID NO: 3579995 - DNA, 25 bp, Homo sapien
ggtccgtagatgatttttgaacagg

SEQ ID NO: 3579996 - DNA, 25 bp, Homo sapien
tagcctaggtccgtagatgattttt

SEQ ID NO: 3579997 - DNA, 25 bp, Homo sapien
ccgtagatgatttttgaacaggctc

SEQ ID NO: 3579998 - DNA, 25 bp, Homo sapien
ctaggtccgtagatgatttttgaac

SEQ ID NO: 3579999 - DNA, 25 bp, Homo sapien
tgctcatgcaacgaccccttccact

SEQ ID NO: 3580000 - DNA, 25 bp, Homo sapien
ttgtctttgctcatgcaacgacccc

SEQ ID NO: 3580001 - DNA, 25 bp, Homo sapien
tttgctcatgcaacgaccccttcca

SEQ ID NO: 3580002 - DNA, 25 bp, Homo sapien
gtctttgctcatgcaacgacccctt

SEQ ID NO: 3580003 - DNA, 25 bp, Homo sapien
ttgactcactactatagtgcccttg

SEQ ID NO: 3580004 - DNA, 25 bp, Homo sapien
ttggatgggagccttgactcactac

SEQ ID NO: 3580005 - DNA, 25 bp, Homo sapien
gactcactactatagtgcccttgcc

SEQ ID NO: 3580006 - DNA, 25 bp, Homo sapien
ggagccttgactcactactatagtg

SEQ ID NO: 3580007 - DNA, 25 bp, Homo sapien
cattgggtactcacaacacggctgt

SEQ ID NO: 3580008 - DNA, 25 bp, Homo sapien
ggtactcacaacacggctgttggct

SEQ ID NO: 3580009 - DNA, 25 bp, Homo sapien
tttccattgggtactcacaacacgg

SEQ ID NO: 3580010 - DNA, 25 bp, Homo sapien
aacagactttccattgggtactcac

SEQ ID NO: 3580011 - DNA, 25 bp, Homo sapien
gtatcatcagggttaagaacaaagg

SEQ ID NO: 3580012 - DNA, 25 bp, Homo sapien
cattgcttctggtatcatcagggtt

SEQ ID NO: 3580013 - DNA, 25 bp, Homo sapien
catcagggttaagaacaaaggaggg

SEQ ID NO: 3580014 - DNA, 25 bp, Homo sapien
tctggtatcatcagggttaagaaca

SEQ ID NO: 3580015 - DNA, 25 bp, Homo sapien
gaacagaatccacttgccagtaggg

SEQ ID NO: 3580016 - DNA, 25 bp, Homo sapien
ccagcacatcagtgttggtccagca

SEQ ID NO: 3580017 - DNA, 25 bp, Homo sapien
ccagtagggtagcatcaaacattcc

SEQ ID NO: 3580018 - DNA, 25 bp, Homo sapien
ggaatccttgcagtgatccagcaca

SEQ ID NO: 3580019 - DNA, 25 bp, Homo sapien
ggaggggctagatcccatatacaaa

SEQ ID NO: 3580020 - DNA, 25 bp, Homo sapien
gggctagatcccatatacaaaactg

SEQ ID NO: 3580021 - DNA, 25 bp, Homo sapien
ggggctagatcccatatacaaaact

SEQ ID NO: 3580022 - DNA, 25 bp, Homo sapien
gaggggctagatcccatatacaaaa

SEQ ID NO: 3580023 - DNA, 25 bp, Homo sapien
tagatcagctctatgagtggaaggt

SEQ ID NO: 3580024 - DNA, 25 bp, Homo sapien
gtgggcactagatcagctctatgag

SEQ ID NO: 3580025 - DNA, 25 bp, Homo sapien
tcagctctatgagtggaaggtgaag

SEQ ID NO: 3580026 - DNA, 25 bp, Homo sapien
cactagatcagctctatgagtggaa

SEQ ID NO: 3580027 - DNA, 25 bp, Homo sapien
tcaggatttgaatggaagttcaagg

SEQ ID NO: 3580028 - DNA, 25 bp, Homo sapien
aagttcaaggtcaagttgctctgag

SEQ ID NO: 3580029 - DNA, 25 bp, Homo sapien
ttactgcagtgaattcaggatttga

SEQ ID NO: 3580030 - DNA, 25 bp, Homo sapien
caagttgctctgagttgcatctaag

SEQ ID NO: 3580031 - DNA, 25 bp, Homo sapien
catttgcatccggtgatggtcataa

SEQ ID NO: 3580032 - DNA, 25 bp, Homo sapien
tctcaggcccagcaaatcacggcag

SEQ ID NO: 3580033 - DNA, 25 bp, Homo sapien
tatatacagagatgcttgcatttgc

SEQ ID NO: 3580034 - DNA, 25 bp, Homo sapien
agtccaccctgacattgaactgctc

SEQ ID NO: 3580035 - DNA, 25 bp, Homo sapien
tctgcacagggaagagggttgccta

SEQ ID NO: 3580036 - DNA, 25 bp, Homo sapien
tagccacctagcacccagagtagtg

SEQ ID NO: 3580037 - DNA, 25 bp, Homo sapien
gagggccctgctgcatcaagatctc

SEQ ID NO: 3580038 - DNA, 25 bp, Homo sapien
caataggtggcactcgtgggtaaaa

SEQ ID NO: 3580039 - DNA, 25 bp, Homo sapien
ggtgacaaacatgagctgagtgttg

SEQ ID NO: 3580040 - DNA, 25 bp, Homo sapien
gtgacaaacatgagctgagtgttgg

SEQ ID NO: 3580041 - DNA, 25 bp, Homo sapien
gacaaacatgagctgagtgttggat

SEQ ID NO: 3580042 - DNA, 25 bp, Homo sapien
tgacaaacatgagctgagtgttgga

SEQ ID NO: 3580043 - DNA, 25 bp, Homo sapien
gtgaagttgctaatatctttgttca

SEQ ID NO: 3580044 - DNA, 25 bp, Homo sapien
cttccagattcccatatgcaatatt

SEQ ID NO: 3580045 - DNA, 25 bp, Homo sapien
catccccttccagattcccatatgc

SEQ ID NO: 3580046 - DNA, 25 bp, Homo sapien
cttcctctccatgggtgaagttgct

SEQ ID NO: 3580047 - DNA, 25 bp, Homo sapien
gtcctggattcccacgatttgagat

SEQ ID NO: 3580048 - DNA, 25 bp, Homo sapien
tgctgctgatatatacctgttcctg

SEQ ID NO: 3580049 - DNA, 25 bp, Homo sapien
gactgactatctccctgtgcaggtc

SEQ ID NO: 3580050 - DNA, 25 bp, Homo sapien
tgttcctgaaattggtgcccttccc

SEQ ID NO: 3580051 - DNA, 25 bp, Homo sapien
tgtgaagtgctacatgaactaaaat

SEQ ID NO: 3580052 - DNA, 25 bp, Homo sapien
aattgaatcatagggacagttgccc

SEQ ID NO: 3580053 - DNA, 25 bp, Homo sapien
ccttgtctgcaaaataagaacatct

SEQ ID NO: 3580054 - DNA, 25 bp, Homo sapien
ttctatgagagtcaatctccttgtc

SEQ ID NO: 3580055 - DNA, 25 bp, Homo sapien
ccatgaacttgaatcagtgaagttg

SEQ ID NO: 3580056 - DNA, 25 bp, Homo sapien
tcttgtgaaggcgttccatgaactt

SEQ ID NO: 3580057 - DNA, 25 bp, Homo sapien
tcagtgaagttgaaggaccaggttg

SEQ ID NO: 3580058 - DNA, 25 bp, Homo sapien
ctatacaaagaatcttgtgaaggcg

SEQ ID NO: 3580059 - DNA, 25 bp, Homo sapien
attcctgctgtattagagtccttct

SEQ ID NO: 3580060 - DNA, 25 bp, Homo sapien
tttcgcaatgactgtaatgattcct

SEQ ID NO: 3580061 - DNA, 25 bp, Homo sapien
tggtggtcttttcgcaatgactgta

SEQ ID NO: 3580062 - DNA, 25 bp, Homo sapien
tagagtccttctgaattggaatttc

SEQ ID NO: 3580063 - DNA, 25 bp, Homo sapien
tcaccacaggactaatattcacggc

SEQ ID NO: 3580064 - DNA, 25 bp, Homo sapien
gtgtcaccacaggactaatattcac

SEQ ID NO: 3580065 - DNA, 25 bp, Homo sapien
ccacaggactaatattcacggccat

SEQ ID NO: 3580066 - DNA, 25 bp, Homo sapien
tgtcaccacaggactaatattcacg

SEQ ID NO: 3580067 - DNA, 25 bp, Homo sapien
catttctccctgtcacaatattttc

SEQ ID NO: 3580068 - DNA, 25 bp, Homo sapien
caatattttctatgggcttcctcat

SEQ ID NO: 3580069 - DNA, 25 bp, Homo sapien
tgtaaactccagaacagcagagaac

SEQ ID NO: 3580070 - DNA, 25 bp, Homo sapien
accacatccttccctggtatataac

SEQ ID NO: 3580071 - DNA, 25 bp, Homo sapien
ctgaccatgagaagatgtgcttgtt

SEQ ID NO: 3580072 - DNA, 25 bp, Homo sapien
tgctgaccatgagaagatgtgcttg

SEQ ID NO: 3580073 - DNA, 25 bp, Homo sapien
tgtaaattcctgaagcctcccagcc

SEQ ID NO: 3580074 - DNA, 25 bp, Homo sapien
cctgctgaccatgagaagatgtgct

SEQ ID NO: 3580075 - DNA, 25 bp, Homo sapien
tggggcctctccagccatgcttcct

SEQ ID NO: 3580076 - DNA, 25 bp, Homo sapien
ctgcttcccctttgctttccaccat

SEQ ID NO: 3580077 - DNA, 25 bp, Homo sapien
tcctggggcctctccagccatgctt

SEQ ID NO: 3580078 - DNA, 25 bp, Homo sapien
ttcctggggcctctccagccatgct

SEQ ID NO: 3580079 - DNA, 25 bp, Homo sapien
gattttatctcagcaggtcgggtca

SEQ ID NO: 3580080 - DNA, 25 bp, Homo sapien
tgtttaggtcattcaagactcagtc

SEQ ID NO: 3580081 - DNA, 25 bp, Homo sapien
aatcctgggacatgaacaaggtagc

SEQ ID NO: 3580082 - DNA, 25 bp, Homo sapien
caaggtagcacaggatgcactggat

SEQ ID NO: 3580083 - DNA, 25 bp, Homo sapien
gtgaaatctatgcatcgataaatac

SEQ ID NO: 3580084 - DNA, 25 bp, Homo sapien
ttttccacactattggagagttcat

SEQ ID NO: 3580085 - DNA, 25 bp, Homo sapien
catcgataaatacagctcaaaagct

SEQ ID NO: 3580086 - DNA, 25 bp, Homo sapien
ttccacactattggagagttcattg

SEQ ID NO: 3580087 - DNA, 25 bp, Homo sapien
tggccgatgggaatggtctgtcaca

SEQ ID NO: 3580088 - DNA, 25 bp, Homo sapien
tgctcgctgggtcttggatgtcggg

SEQ ID NO: 3580089 - DNA, 25 bp, Homo sapien
ggtcttggatgtcgggttcgaccac

SEQ ID NO: 3580090 - DNA, 25 bp, Homo sapien
tcgggttcgaccacttggccgatgg

SEQ ID NO: 3580091 - DNA, 25 bp, Homo sapien
cagattctgagcagcactctgcatc

SEQ ID NO: 3580092 - DNA, 25 bp, Homo sapien
cctggaactcgcatagcacaaagct

SEQ ID NO: 3580093 - DNA, 25 bp, Homo sapien
tcagattctgagcagcactctgcat

SEQ ID NO: 3580094 - DNA, 25 bp, Homo sapien
tcttgggggccctggaactcgcata

SEQ ID NO: 3580095 - DNA, 25 bp, Homo sapien
gggtaaaggctcactctgccattgc

SEQ ID NO: 3580096 - DNA, 25 bp, Homo sapien
caaacacgctgggaagatgcaccat

SEQ ID NO: 3580097 - DNA, 25 bp, Homo sapien
gccagttagtcacggattccgggtc

SEQ ID NO: 3580098 - DNA, 25 bp, Homo sapien
tttacaaaccagctcatatgaaggg

SEQ ID NO: 3580099 - DNA, 25 bp, Homo sapien
taaacctccagggttatggcacacc

SEQ ID NO: 3580100 - DNA, 25 bp, Homo sapien
gttttgacttatctggtggactgga

SEQ ID NO: 3580101 - DNA, 25 bp, Homo sapien
ctgttttgacttatctggtggactg

SEQ ID NO: 3580102 - DNA, 25 bp, Homo sapien
tggactggataaacctccagggtta

SEQ ID NO: 3580103 - DNA, 25 bp, Homo sapien
gtcctgctcccaccagagaatgcat

SEQ ID NO: 3580104 - DNA, 25 bp, Homo sapien
gtccaagctgttcaccaaattctat

SEQ ID NO: 3580105 - DNA, 25 bp, Homo sapien
tgtctcctctgtccaagctgttcac

SEQ ID NO: 3580106 - DNA, 25 bp, Homo sapien
aattctatgcattcttccagtcctg

SEQ ID NO: 3580107 - DNA, 25 bp, Homo sapien
gcttgtaagggaaagggcaatcacc

SEQ ID NO: 3580108 - DNA, 25 bp, Homo sapien
taaatgcctgggatgcggaaacaat

SEQ ID NO: 3580109 - DNA, 25 bp, Homo sapien
aatcaccaggcaagtagatagcccc

SEQ ID NO: 3580110 - DNA, 25 bp, Homo sapien
cccaaccagttgtgaagtgagtaga

SEQ ID NO: 3580111 - DNA, 25 bp, Homo sapien
gacaggagagaaatggaacccaggt

SEQ ID NO: 3580112 - DNA, 25 bp, Homo sapien
agctaagcgaccagacggaaaaccg

SEQ ID NO: 3580113 - DNA, 25 bp, Homo sapien
gccacaggctcacctaacaaagcta

SEQ ID NO: 3580114 - DNA, 25 bp, Homo sapien
tgtgcaagaaaagccggccgaaaga

SEQ ID NO: 3580115 - DNA, 25 bp, Homo sapien
caggaagcgggcagaaaaaagagtt

SEQ ID NO: 3580116 - DNA, 25 bp, Homo sapien
taatgaagggaagcgtgcctcgaag

SEQ ID NO: 3580117 - DNA, 25 bp, Homo sapien
tacactgaccttcgctgaaaaatag

SEQ ID NO: 3580118 - DNA, 25 bp, Homo sapien
tctccacagccgtctctaatgaagg

SEQ ID NO: 3580119 - DNA, 25 bp, Homo sapien
cagtaagaacctacaaacgtgtttg

SEQ ID NO: 3580120 - DNA, 25 bp, Homo sapien
gctcaagggctcgttcaaggtcaag

SEQ ID NO: 3580121 - DNA, 25 bp, Homo sapien
tctccaaaggctggaataggcggtg

SEQ ID NO: 3580122 - DNA, 25 bp, Homo sapien
tgtagcccgcgctgtaatcgtagga

SEQ ID NO: 3580123 - DNA, 25 bp, Homo sapien
ggcgaaagaggccaaatggccccgc

SEQ ID NO: 3580124 - DNA, 25 bp, Homo sapien
aacacgtcgagaggctcggcggcaa

SEQ ID NO: 3580125 - DNA, 25 bp, Homo sapien
ggcaagcaagactgccgcctccgtg

SEQ ID NO: 3580126 - DNA, 25 bp, Homo sapien
acttcggctttgcaagctggcggcc

SEQ ID NO: 3580127 - DNA, 25 bp, Homo sapien
attgcgtgcccgcagcgggaccttc

SEQ ID NO: 3580128 - DNA, 25 bp, Homo sapien
tgccgtgggccggggccgcgactgt

SEQ ID NO: 3580129 - DNA, 25 bp, Homo sapien
cgtgggccggggccgcgactgtcgg

SEQ ID NO: 3580130 - DNA, 25 bp, Homo sapien
ccgtgggccggggccgcgactgtcg

SEQ ID NO: 3580131 - DNA, 25 bp, Homo sapien
cttgccgtgggccggggccgcgact

SEQ ID NO: 3580132 - DNA, 25 bp, Homo sapien
cgtttggctggcgtgtcggcggcgc

SEQ ID NO: 3580133 - DNA, 25 bp, Homo sapien
cggccgtttggctggcgtgtcggcg

SEQ ID NO: 3580134 - DNA, 25 bp, Homo sapien
gggcgcggcgcccatgaggccgctg

SEQ ID NO: 3580135 - DNA, 25 bp, Homo sapien
tttggctggcgtgtcggcggcgctc

SEQ ID NO: 3580136 - DNA, 25 bp, Homo sapien
caatgaagctgagtagatcgcgggt

SEQ ID NO: 3580137 - DNA, 25 bp, Homo sapien
tgctggacgccgagtcaatgaagct

SEQ ID NO: 3580138 - DNA, 25 bp, Homo sapien
ttccgcttcgacttgcccggcttgt

SEQ ID NO: 3580139 - DNA, 25 bp, Homo sapien
cttgtccagcgccagcttgatgttg

SEQ ID NO: 3580140 - DNA, 25 bp, Homo sapien
gctcattaggtcttgtaagcaaggg

SEQ ID NO: 3580141 - DNA, 25 bp, Homo sapien
gcgcggcgcagcctactagttccgg

SEQ ID NO: 3580142 - DNA, 25 bp, Homo sapien
agttccgggcctggctcgctgcgct

SEQ ID NO: 3580143 - DNA, 25 bp, Homo sapien
tcccgggggagctcattaggtcttg

SEQ ID NO: 3580144 - DNA, 25 bp, Homo sapien
aaagttctgcatcttctgggtggta

SEQ ID NO: 3580145 - DNA, 25 bp, Homo sapien
agttctgcatcttctgggtggtacc

SEQ ID NO: 3580146 - DNA, 25 bp, Homo sapien
gttctgcatcttctgggtggtaccg

SEQ ID NO: 3580147 - DNA, 25 bp, Homo sapien
ctaaagttctgcatcttctgggtgg

SEQ ID NO: 3580148 - DNA, 25 bp, Homo sapien
tgttgccctacaatcactgacgtgt

SEQ ID NO: 3580149 - DNA, 25 bp, Homo sapien
atttttaatcgatgcccctgttgcc

SEQ ID NO: 3580150 - DNA, 25 bp, Homo sapien
cactcacatagtttcaagccctggt

SEQ ID NO: 3580151 - DNA, 25 bp, Homo sapien
tcaaaaccagcatccactcacatag

SEQ ID NO: 3580152 - DNA, 25 bp, Homo sapien
gggtgattggtaagctgtctaaact

SEQ ID NO: 3580153 - DNA, 25 bp, Homo sapien
ttggtaagctgtctaaacttcccag

SEQ ID NO: 3580154 - DNA, 25 bp, Homo sapien
aacttcccagttggtaggtggagat

SEQ ID NO: 3580155 - DNA, 25 bp, Homo sapien
cccagttggtaggtggagataagca

SEQ ID NO: 3580156 - DNA, 25 bp, Homo sapien
tggctgggctccaagctccatggct

SEQ ID NO: 3580157 - DNA, 25 bp, Homo sapien
agctggctgggctccaagctccatg

SEQ ID NO: 3580158 - DNA, 25 bp, Homo sapien
ctgggctcagctggctgggctccaa

SEQ ID NO: 3580159 - DNA, 25 bp, Homo sapien
ggctgggctccaagctccatggctg

SEQ ID NO: 3580160 - DNA, 25 bp, Homo sapien
gcaacacttgcttccgcaaagaaaa

SEQ ID NO: 3580161 - DNA, 25 bp, Homo sapien
tgtgtgaagtaagcaacacttgctt

SEQ ID NO: 3580162 - DNA, 25 bp, Homo sapien
tagatcactgcttgtgtgaagtaag

SEQ ID NO: 3580163 - DNA, 25 bp, Homo sapien
ggcagctatagatcactgcttgtgt

SEQ ID NO: 3580164 - DNA, 25 bp, Homo sapien
ccatctcaggaagccgagagtcaga

SEQ ID NO: 3580165 - DNA, 25 bp, Homo sapien
ctcaggaagccgagagtcagagccc

SEQ ID NO: 3580166 - DNA, 25 bp, Homo sapien
tccatctcaggaagccgagagtcag

SEQ ID NO: 3580167 - DNA, 25 bp, Homo sapien
caggaagccgagagtcagagcccat

SEQ ID NO: 3580168 - DNA, 25 bp, Homo sapien
tgcctcagtcctgggtactctggga

SEQ ID NO: 3580169 - DNA, 25 bp, Homo sapien
gcctcagtcctgggtactctgggag

SEQ ID NO: 3580170 - DNA, 25 bp, Homo sapien
tcagtcctgggtactctgggagcat

SEQ ID NO: 3580171 - DNA, 25 bp, Homo sapien
actgcctcagtcctgggtactctgg

SEQ ID NO: 3580172 - DNA, 25 bp, Homo sapien
caagaggtcttagaggtggaagagg

SEQ ID NO: 3580173 - DNA, 25 bp, Homo sapien
aggaaccaggagacctccctcacgg

SEQ ID NO: 3580174 - DNA, 25 bp, Homo sapien
agacctccctcacggggaggacaca

SEQ ID NO: 3580175 - DNA, 25 bp, Homo sapien
ctccaagaagtagaggccctccaag

SEQ ID NO: 3580176 - DNA, 25 bp, Homo sapien
cttcgcaccaggatcagggctgtct

SEQ ID NO: 3580177 - DNA, 25 bp, Homo sapien
gctgtctggataattagccagtggc

SEQ ID NO: 3580178 - DNA, 25 bp, Homo sapien
ccaacgcccgctggttgctgctggt

SEQ ID NO: 3580179 - DNA, 25 bp, Homo sapien
tctaacaactcggtctgctcctctg

SEQ ID NO: 3580180 - DNA, 25 bp, Homo sapien
gaccagtgagtaaattactctgtga

SEQ ID NO: 3580181 - DNA, 25 bp, Homo sapien
cagtgagtaaattactctgtgacct

SEQ ID NO: 3580182 - DNA, 25 bp, Homo sapien
tactctgtgacctgagaatccagct

SEQ ID NO: 3580183 - DNA, 25 bp, Homo sapien
ctaggaccagtgagtaaattactct

SEQ ID NO: 3580184 - DNA, 25 bp, Homo sapien
tctactaagacatttaaactggcca

SEQ ID NO: 3580185 - DNA, 25 bp, Homo sapien
ccatcgctgaggagtctagttcacc

SEQ ID NO: 3580186 - DNA, 25 bp, Homo sapien
tcaacctctctgtattggaagaagc

SEQ ID NO: 3580187 - DNA, 25 bp, Homo sapien
tcacctctaagccaagtaggatgag

SEQ ID NO: 3580188 - DNA, 25 bp, Homo sapien
gaactgcttccccaatcctaagaag

SEQ ID NO: 3580189 - DNA, 25 bp, Homo sapien
tgcttccccaatcctaagaagtaca

SEQ ID NO: 3580190 - DNA, 25 bp, Homo sapien
aacactgtgtgatagatgtcgtgtg

SEQ ID NO: 3580191 - DNA, 25 bp, Homo sapien
cgtgtgattgagttgcctgaactgc

SEQ ID NO: 3580192 - DNA, 25 bp, Homo sapien
cattgtgcgagtagagaaaagtaag

SEQ ID NO: 3580193 - DNA, 25 bp, Homo sapien
catttgtgaggtattgctccctcag

SEQ ID NO: 3580194 - DNA, 25 bp, Homo sapien
taagaagtcattatgggcattgtgc

SEQ ID NO: 3580195 - DNA, 25 bp, Homo sapien
tccctcagagggtcgaggacaccat

SEQ ID NO: 3580196 - DNA, 25 bp, Homo sapien
gttctacccattgactccaggcagt

SEQ ID NO: 3580197 - DNA, 25 bp, Homo sapien
agctgtgaggccgtagataagttcc

SEQ ID NO: 3580198 - DNA, 25 bp, Homo sapien
caagatccaccccaagacatgttag

SEQ ID NO: 3580199 - DNA, 25 bp, Homo sapien
tatgctggcttagacactggctcct

SEQ ID NO: 3580200 - DNA, 25 bp, Homo sapien
taataggatacaattatgcttgcca

SEQ ID NO: 3580201 - DNA, 25 bp, Homo sapien
caattaaggctgctatctatattcc

SEQ ID NO: 3580202 - DNA, 25 bp, Homo sapien
taataaggcttatctgacactccaa

SEQ ID NO: 3580203 - DNA, 25 bp, Homo sapien
tattttaaagattctacacaaggga

SEQ ID NO: 3580204 - DNA, 25 bp, Homo sapien
gctaagcccagtgcacacagcattt

SEQ ID NO: 3580205 - DNA, 25 bp, Homo sapien
tattaatgtcaaatatgctgcctgc

SEQ ID NO: 3580206 - DNA, 25 bp, Homo sapien
agtggccaacatcccagaactaaga

SEQ ID NO: 3580207 - DNA, 25 bp, Homo sapien
cagcatttccatcagccggagttga

SEQ ID NO: 3580208 - DNA, 25 bp, Homo sapien
gtccagctgtattatttatttacag

SEQ ID NO: 3580209 - DNA, 25 bp, Homo sapien
ccagctgtattatttatttacagca

SEQ ID NO: 3580210 - DNA, 25 bp, Homo sapien
agctgtattatttatttacagcaca

SEQ ID NO: 3580211 - DNA, 25 bp, Homo sapien
aaggtccagctgtattatttattta

SEQ ID NO: 3580212 - DNA, 25 bp, Homo sapien
tctactccagttatgagggccactg

SEQ ID NO: 3580213 - DNA, 25 bp, Homo sapien
catgggacacttgctcttaccgtca

SEQ ID NO: 3580214 - DNA, 25 bp, Homo sapien
gtgcaaagacagtgagaacccagga

SEQ ID NO: 3580215 - DNA, 25 bp, Homo sapien
gaagattcttcctagacgtggtgca

SEQ ID NO: 3580216 - DNA, 25 bp, Homo sapien
ggagcgggctaacagcacagacata

SEQ ID NO: 3580217 - DNA, 25 bp, Homo sapien
cccctctgagatggtgactgcaacc

SEQ ID NO: 3580218 - DNA, 25 bp, Homo sapien
tatgtctaacttccaaggagcgggc

SEQ ID NO: 3580219 - DNA, 25 bp, Homo sapien
cacagacataggatccaaggcattc

SEQ ID NO: 3580220 - DNA, 25 bp, Homo sapien
gaaactggtgtctaacccacggtca

SEQ ID NO: 3580221 - DNA, 25 bp, Homo sapien
tcaggcactgattgggcacgggact

SEQ ID NO: 3580222 - DNA, 25 bp, Homo sapien
tcaaattagaactccatgagagccg

SEQ ID NO: 3580223 - DNA, 25 bp, Homo sapien
tactccacgtgaagaagaacatgct

SEQ ID NO: 3580224 - DNA, 25 bp, Homo sapien
tgggtacaagtggttctacagacgg

SEQ ID NO: 3580225 - DNA, 25 bp, Homo sapien
ttttgttggctgaattgggtacaag

SEQ ID NO: 3580226 - DNA, 25 bp, Homo sapien
catccagcctccttgcatttttgtt

SEQ ID NO: 3580227 - DNA, 25 bp, Homo sapien
aaggaagattcccatagaaacagaa

SEQ ID NO: 3580228 - DNA, 25 bp, Homo sapien
cctcatttagtacttggaacagaat

SEQ ID NO: 3580229 - DNA, 25 bp, Homo sapien
tagtcaggccatgatagaaagctgg

SEQ ID NO: 3580230 - DNA, 25 bp, Homo sapien
agctggatgagctttggcaagtgat

SEQ ID NO: 3580231 - DNA, 25 bp, Homo sapien
ctttcaaggcataggaaaacatgac

SEQ ID NO: 3580232 - DNA, 25 bp, Homo sapien
tgaactaatgtttttgcctccatac

SEQ ID NO: 3580233 - DNA, 25 bp, Homo sapien
tgaggttcaaacatgtcatcgacac

SEQ ID NO: 3580234 - DNA, 25 bp, Homo sapien
catacatagtagtgatccaggaggg

SEQ ID NO: 3580235 - DNA, 25 bp, Homo sapien
cttggtctcacaccccactgttgaa

SEQ ID NO: 3580236 - DNA, 25 bp, Homo sapien
cctggcccgaataattgtaatatac

SEQ ID NO: 3580237 - DNA, 25 bp, Homo sapien
catttcacctggcccgaataattgt

SEQ ID NO: 3580238 - DNA, 25 bp, Homo sapien
ttcacctggcccgaataattgtaat

SEQ ID NO: 3580239 - DNA, 25 bp, Homo sapien
tgttcccagactgctagttgctgtc

SEQ ID NO: 3580240 - DNA, 25 bp, Homo sapien
agtgaatcagatacattgggatttt

SEQ ID NO: 3580241 - DNA, 25 bp, Homo sapien
tgaatcagatacattgggatttttc

SEQ ID NO: 3580242 - DNA, 25 bp, Homo sapien
atcagatacattgggatttttcaaa

SEQ ID NO: 3580243 - DNA, 25 bp, Homo sapien
gaatcagatacattgggatttttca

SEQ ID NO: 3580244 - DNA, 25 bp, Homo sapien
cactcagttggtaaataatagggcc

SEQ ID NO: 3580245 - DNA, 25 bp, Homo sapien
tatccattatgacacacagcttagg

SEQ ID NO: 3580246 - DNA, 25 bp, Homo sapien
ccaagttccagcatctgtcgtgtga

SEQ ID NO: 3580247 - DNA, 25 bp, Homo sapien
gaatgtctccctcagtacttagcaa

SEQ ID NO: 3580248 - DNA, 25 bp, Homo sapien
gtcaggagttccaggctccagtgct

SEQ ID NO: 3580249 - DNA, 25 bp, Homo sapien
ttgcttcagtcaggagttccaggct

SEQ ID NO: 3580250 - DNA, 25 bp, Homo sapien
attgcttcagtcaggagttccaggc

SEQ ID NO: 3580251 - DNA, 25 bp, Homo sapien
agttccaggctccagtgctatgatc

SEQ ID NO: 3580252 - DNA, 25 bp, Homo sapien
tctatctacatgcacagcagcctat

SEQ ID NO: 3580253 - DNA, 25 bp, Homo sapien
atatctatctacatgcacagcagcc

SEQ ID NO: 3580254 - DNA, 25 bp, Homo sapien
caccaagacaaacggaagagatttt

SEQ ID NO: 3580255 - DNA, 25 bp, Homo sapien
aaatatttgagaagttatcagctga

SEQ ID NO: 3580256 - DNA, 25 bp, Homo sapien
agttgctctttaagctgggaagaaa

SEQ ID NO: 3580257 - DNA, 25 bp, Homo sapien
ttaaagttgctctttaagctgggaa

SEQ ID NO: 3580258 - DNA, 25 bp, Homo sapien
agcatcctttaaagttgctctttaa

SEQ ID NO: 3580259 - DNA, 25 bp, Homo sapien
cctttaaagttgctctttaagctgg

SEQ ID NO: 3580260 - DNA, 25 bp, Homo sapien
aaaatgatgacaggacattttccta

SEQ ID NO: 3580261 - DNA, 25 bp, Homo sapien
aaaaaatgatgacaggacattttcc

SEQ ID NO: 3580262 - DNA, 25 bp, Homo sapien
ttaaaaaatgatgacaggacatttt

SEQ ID NO: 3580263 - DNA, 25 bp, Homo sapien
aaatgatgacaggacattttcctat

SEQ ID NO: 3580264 - DNA, 25 bp, Homo sapien
gttagaggcataaggatagtccacc

SEQ ID NO: 3580265 - DNA, 25 bp, Homo sapien
aagggctccagtaagccactgcaaa

SEQ ID NO: 3580266 - DNA, 25 bp, Homo sapien
aatgggctgcataagtgaagggctc

SEQ ID NO: 3580267 - DNA, 25 bp, Homo sapien
gataggccaagcaggcaaaggctgt

SEQ ID NO: 3580268 - DNA, 25 bp, Homo sapien
gatgctctctgaacaatgtggaccg

SEQ ID NO: 3580269 - DNA, 25 bp, Homo sapien
tgtggaccgcttttcctaaaatctg

SEQ ID NO: 3580270 - DNA, 25 bp, Homo sapien
gagagtcgattaatggcatcccagg

SEQ ID NO: 3580271 - DNA, 25 bp, Homo sapien
ggtactaaatcctcaaactgccaga

SEQ ID NO: 3580272 - DNA, 25 bp, Homo sapien
taaaccaggcggcaagcatgccacc

SEQ ID NO: 3580273 - DNA, 25 bp, Homo sapien
aggcggcaagcatgccaccatagga

SEQ ID NO: 3580274 - DNA, 25 bp, Homo sapien
cataggagcctcctatggcaatgac

SEQ ID NO: 3580275 - DNA, 25 bp, Homo sapien
gccaccataggagcctcctatggca

SEQ ID NO: 3580276 - DNA, 25 bp, Homo sapien
tgtcaggaaattcaagtgtctggaa

SEQ ID NO: 3580277 - DNA, 25 bp, Homo sapien
ctgatgtcaggaaattcaagtgtct

SEQ ID NO: 3580278 - DNA, 25 bp, Homo sapien
tcaggaaattcaagtgtctggaatc

SEQ ID NO: 3580279 - DNA, 25 bp, Homo sapien
tgatgtcaggaaattcaagtgtctg

SEQ ID NO: 3580280 - DNA, 25 bp, Homo sapien
gggagagactctccatagtatcgat

SEQ ID NO: 3580281 - DNA, 25 bp, Homo sapien
gaatgagttgtcaccaaaggggaga

SEQ ID NO: 3580282 - DNA, 25 bp, Homo sapien
tccatagtatcgatgttcagcaaac

SEQ ID NO: 3580283 - DNA, 25 bp, Homo sapien
gatgttcagcaaacaccaacatagc

SEQ ID NO: 3580284 - DNA, 25 bp, Homo sapien
taccattcaacccaccaatcctcac

SEQ ID NO: 3580285 - DNA, 25 bp, Homo sapien
acccaccaatcctcactactgggta

SEQ ID NO: 3580286 - DNA, 25 bp, Homo sapien
tagtacgatataaattagttcagcc

SEQ ID NO: 3580287 - DNA, 25 bp, Homo sapien
tcccaaagaacttgaaatagaacta

SEQ ID NO: 3580288 - DNA, 25 bp, Homo sapien
ttcattaccagtgtagaaaagtatt

SEQ ID NO: 3580289 - DNA, 25 bp, Homo sapien
taccagtgtagaaaagtattgatcc

SEQ ID NO: 3580290 - DNA, 25 bp, Homo sapien
gtgtagaaaagtattgatccaccat

SEQ ID NO: 3580291 - DNA, 25 bp, Homo sapien
caaaaccagataatgtccccttcat

SEQ ID NO: 3580292 - DNA, 25 bp, Homo sapien
agctactaggtaccgctgattaaaa

SEQ ID NO: 3580293 - DNA, 25 bp, Homo sapien
gtatttatcagctactaggtaccgc

SEQ ID NO: 3580294 - DNA, 25 bp, Homo sapien
ttccagtatttatcagctactaggt

SEQ ID NO: 3580295 - DNA, 25 bp, Homo sapien
tttatcagctactaggtaccgctga

SEQ ID NO: 3580296 - DNA, 25 bp, Homo sapien
ggctacgaatagtcccagttaataa

SEQ ID NO: 3580297 - DNA, 25 bp, Homo sapien
cagaactgtgtttgatggctacgaa

SEQ ID NO: 3580298 - DNA, 25 bp, Homo sapien
catttaacctgcctgtccaacagaa

SEQ ID NO: 3580299 - DNA, 25 bp, Homo sapien
gataggaaccaaccacaaggaacta

SEQ ID NO: 3580300 - DNA, 25 bp, Homo sapien
tttcgaaactcagcaggtttcaaca

SEQ ID NO: 3580301 - DNA, 25 bp, Homo sapien
tgactgtgttggacttaaagaaagg

SEQ ID NO: 3580302 - DNA, 25 bp, Homo sapien
gactgtgttggacttaaagaaagga

SEQ ID NO: 3580303 - DNA, 25 bp, Homo sapien
aacagctttctgtaaaatgtacaac

SEQ ID NO: 3580304 - DNA, 25 bp, Homo sapien
gaaacagctttctgtaaaatgtaca

SEQ ID NO: 3580305 - DNA, 25 bp, Homo sapien
ctgagaaacagctttctgtaaaatg

SEQ ID NO: 3580306 - DNA, 25 bp, Homo sapien
cagctttctgtaaaatgtacaacat

SEQ ID NO: 3580307 - DNA, 25 bp, Homo sapien
gttcagtactaaccgacatctctgg

SEQ ID NO: 3580308 - DNA, 25 bp, Homo sapien
cagcagaagcttagcgagggacaca

SEQ ID NO: 3580309 - DNA, 25 bp, Homo sapien
agcttccagcaaaagaacgccaagg

SEQ ID NO: 3580310 - DNA, 25 bp, Homo sapien
ggtatactgggttgcatagcatccc

SEQ ID NO: 3580311 - DNA, 25 bp, Homo sapien
tgttattgccaatcatctgaagcct

SEQ ID NO: 3580312 - DNA, 25 bp, Homo sapien
gagaagtttgttattgccaatcatc

SEQ ID NO: 3580313 - DNA, 25 bp, Homo sapien
tccaggttgttagcttctttgcgat

SEQ ID NO: 3580314 - DNA, 25 bp, Homo sapien
gtttgttattgccaatcatctgaag

SEQ ID NO: 3580315 - DNA, 25 bp, Homo sapien
agtcttgtaatgatttagttggata

SEQ ID NO: 3580316 - DNA, 25 bp, Homo sapien
tggataatacatatgtgcaactgcc

SEQ ID NO: 3580317 - DNA, 25 bp, Homo sapien
gataatacatatgtgcaactgccca

SEQ ID NO: 3580318 - DNA, 25 bp, Homo sapien
cttgtaatgatttagttggataata

SEQ ID NO: 3580319 - DNA, 25 bp, Homo sapien
tgatgggtgagaaaaagtatcgcac

SEQ ID NO: 3580320 - DNA, 25 bp, Homo sapien
ggcaggtcatagaaactaggaccct

SEQ ID NO: 3580321 - DNA, 25 bp, Homo sapien
cccatagttgatcttaagaccgtca

SEQ ID NO: 3580322 - DNA, 25 bp, Homo sapien
taccgtacaaccaaattgcagggct

SEQ ID NO: 3580323 - DNA, 25 bp, Homo sapien
tcacagaggatgtacttttccatca

SEQ ID NO: 3580324 - DNA, 25 bp, Homo sapien
aactgtaaggattacttgtcatttc

SEQ ID NO: 3580325 - DNA, 25 bp, Homo sapien
atttcacagaggatgtacttttcca

SEQ ID NO: 3580326 - DNA, 25 bp, Homo sapien
gaaatgctgaactgtaaggattact

SEQ ID NO: 3580327 - DNA, 25 bp, Homo sapien
gcggttgggcctgggacggcgaagc

SEQ ID NO: 3580328 - DNA, 25 bp, Homo sapien
gtaggctccgttgcccgggctctga

SEQ ID NO: 3580329 - DNA, 25 bp, Homo sapien
gaatttcgaggtaggctccgttgcc

SEQ ID NO: 3580330 - DNA, 25 bp, Homo sapien
gtgtgaatttcgaggtaggctccgt

SEQ ID NO: 3580331 - DNA, 25 bp, Homo sapien
ctgttggaagtagagaaccgaatag

SEQ ID NO: 3580332 - DNA, 25 bp, Homo sapien
taaggccggccggagggctatggtg

SEQ ID NO: 3580333 - DNA, 25 bp, Homo sapien
tagttcttggctacagccgggaggg

SEQ ID NO: 3580334 - DNA, 25 bp, Homo sapien
gcccagggcgccagaaaagacagaa

SEQ ID NO: 3580335 - DNA, 25 bp, Homo sapien
agagacgccgcccaagccaggtcac

SEQ ID NO: 3580336 - DNA, 25 bp, Homo sapien
gtgggagggcgaaaaggaggccagc

SEQ ID NO: 3580337 - DNA, 25 bp, Homo sapien
gctggagactgcagtgcgggtggga

SEQ ID NO: 3580338 - DNA, 25 bp, Homo sapien
gcagaagcgcacaggctaagccctg

SEQ ID NO: 3580339 - DNA, 25 bp, Homo sapien
ggtcacccaatatccctaccattat

SEQ ID NO: 3580340 - DNA, 25 bp, Homo sapien
caagtctgcccttatcatgctaggg

SEQ ID NO: 3580341 - DNA, 25 bp, Homo sapien
tagcccatgctttatctatagcgcc

SEQ ID NO: 3580342 - DNA, 25 bp, Homo sapien
ttcattgcggtcacaccccaagtct

SEQ ID NO: 3580343 - DNA, 25 bp, Homo sapien
tgcggctcactccacactttcccgg

SEQ ID NO: 3580344 - DNA, 25 bp, Homo sapien
ctctttcagtcaccccgccagaccc

SEQ ID NO: 3580345 - DNA, 25 bp, Homo sapien
gctgcggctcactccacactttccc

SEQ ID NO: 3580346 - DNA, 25 bp, Homo sapien
gcgctgcggctcactccacactttc

SEQ ID NO: 3580347 - DNA, 25 bp, Homo sapien
aatggtcgtttccagatgcttgtag

SEQ ID NO: 3580348 - DNA, 25 bp, Homo sapien
ccgcagtttgacgaaaatggtcgtt

SEQ ID NO: 3580349 - DNA, 25 bp, Homo sapien
gtaggatttcctcgctaagctccac

SEQ ID NO: 3580350 - DNA, 25 bp, Homo sapien
cagatgcttgtaggatttcctcgct

SEQ ID NO: 3580351 - DNA, 25 bp, Homo sapien
gatattgtgggttgtgtttctgacc

SEQ ID NO: 3580352 - DNA, 25 bp, Homo sapien
tgtgggttgtgtttctgaccactgc

SEQ ID NO: 3580353 - DNA, 25 bp, Homo sapien
gttgtgtttctgaccactgcaataa

SEQ ID NO: 3580354 - DNA, 25 bp, Homo sapien
gtataaagaggagaacattgctaca

SEQ ID NO: 3580355 - DNA, 25 bp, Homo sapien
aggattgtgatatttctcgttggac

SEQ ID NO: 3580356 - DNA, 25 bp, Homo sapien
tccactcctttacttgatgtttatg

SEQ ID NO: 3580357 - DNA, 25 bp, Homo sapien
tggtgtccatttgcacaaactgcct

SEQ ID NO: 3580358 - DNA, 25 bp, Homo sapien
gatatttctcgttggacaaggcctt

SEQ ID NO: 3580359 - DNA, 25 bp, Homo sapien
ttttcagctaattggactcgggtca

SEQ ID NO: 3580360 - DNA, 25 bp, Homo sapien
cagggacatgaaagcctaaaccggc

SEQ ID NO: 3580361 - DNA, 25 bp, Homo sapien
gaagagccgtctatcagccttgcaa

SEQ ID NO: 3580362 - DNA, 25 bp, Homo sapien
tacaaccctggaattgcctattggg

SEQ ID NO: 3580363 - DNA, 25 bp, Homo sapien
ccttcatcagactggtaatgcctca

SEQ ID NO: 3580364 - DNA, 25 bp, Homo sapien
caaagtatggctcctggaaatgata

SEQ ID NO: 3580365 - DNA, 25 bp, Homo sapien
cattccaacatcaagggactgagga

SEQ ID NO: 3580366 - DNA, 25 bp, Homo sapien
ccttccaaacgcaaataggctcatg

SEQ ID NO: 3580367 - DNA, 25 bp, Homo sapien
ccagaggctaatagagcaatgatcc

SEQ ID NO: 3580368 - DNA, 25 bp, Homo sapien
gctaaatctggcgtctctggccaaa

SEQ ID NO: 3580369 - DNA, 25 bp, Homo sapien
gcctaattctgtgggaatcaccagt

SEQ ID NO: 3580370 - DNA, 25 bp, Homo sapien
ggaagaacccatggcctaatctaag

SEQ ID NO: 3580371 - DNA, 25 bp, Homo sapien
ggaggaatacatcaaccctggtggt

SEQ ID NO: 3580372 - DNA, 25 bp, Homo sapien
tagtagacaagtatccataaggcct

SEQ ID NO: 3580373 - DNA, 25 bp, Homo sapien
tctgagtctggccaagggtatatag

SEQ ID NO: 3580374 - DNA, 25 bp, Homo sapien
tatagagaaggctaaaccctaggga

SEQ ID NO: 3580375 - DNA, 25 bp, Homo sapien
tccagactggaaaagggtgaaacca

SEQ ID NO: 3580376 - DNA, 25 bp, Homo sapien
tatatgttctgctaatgctggcctg

SEQ ID NO: 3580377 - DNA, 25 bp, Homo sapien
cagatgattaccaccgaagccctaa

SEQ ID NO: 3580378 - DNA, 25 bp, Homo sapien
catgctttgtaagctcaggagccca

SEQ ID NO: 3580379 - DNA, 25 bp, Homo sapien
catgctaagtcaaggaagagtttct

SEQ ID NO: 3580380 - DNA, 25 bp, Homo sapien
cacaagtgtgttctgtctggcttca

SEQ ID NO: 3580381 - DNA, 25 bp, Homo sapien
taatacatgtcctgagcttctgaga

SEQ ID NO: 3580382 - DNA, 25 bp, Homo sapien
gagaattcttcagctcgctgctggg

SEQ ID NO: 3580383 - DNA, 25 bp, Homo sapien
taaagaatcagcatttgactttttg

SEQ ID NO: 3580384 - DNA, 25 bp, Homo sapien
caaataaagaatcagcatttgactt

SEQ ID NO: 3580385 - DNA, 25 bp, Homo sapien
ataacagtagtaaaatcaaataaag

SEQ ID NO: 3580386 - DNA, 25 bp, Homo sapien
agaatcagcatttgactttttgcag

SEQ ID NO: 3580387 - DNA, 25 bp, Homo sapien
taatggcaagaactggagacaaccc

SEQ ID NO: 3580388 - DNA, 25 bp, Homo sapien
aaatgtccatcggtagggcactgac

SEQ ID NO: 3580389 - DNA, 25 bp, Homo sapien
tgaagtcaagccagacagatgggcg

SEQ ID NO: 3580390 - DNA, 25 bp, Homo sapien
ctttaaaatatgagtgccagctggg

SEQ ID NO: 3580391 - DNA, 25 bp, Homo sapien
tgctactgggattacttccactgaa

SEQ ID NO: 3580392 - DNA, 25 bp, Homo sapien
ttccactgaagagggttgccggatg

SEQ ID NO: 3580393 - DNA, 25 bp, Homo sapien
gatgccacgcgtggtctacggtagt

SEQ ID NO: 3580394 - DNA, 25 bp, Homo sapien
ccttctaagtgaacacgatgccacg

SEQ ID NO: 3580395 - DNA, 25 bp, Homo sapien
cctgaaggaaaagtccagcaatttg

SEQ ID NO: 3580396 - DNA, 25 bp, Homo sapien
taaagttcctcgtatcattcctggc

SEQ ID NO: 3580397 - DNA, 25 bp, Homo sapien
tacagctggacaactacagggcttg

SEQ ID NO: 3580398 - DNA, 25 bp, Homo sapien
tcagggatcatgacacataaagttc

SEQ ID NO: 3580399 - DNA, 25 bp, Homo sapien
ccaccttttaggcaataaacaattg

SEQ ID NO: 3580400 - DNA, 25 bp, Homo sapien
tacagcattgcccttagcagattct

SEQ ID NO: 3580401 - DNA, 25 bp, Homo sapien
gacctggtccatttcaatgcatata

SEQ ID NO: 3580402 - DNA, 25 bp, Homo sapien
caaatcagcctaaatgttaggaagg

SEQ ID NO: 3580403 - DNA, 25 bp, Homo sapien
aaagactatattcttggaaggcacc

SEQ ID NO: 3580404 - DNA, 25 bp, Homo sapien
tctaatgcccacaaatcaatttccc

SEQ ID NO: 3580405 - DNA, 25 bp, Homo sapien
gaactgaaggttgactgcatgaatt

SEQ ID NO: 3580406 - DNA, 25 bp, Homo sapien
ggaaggcaccaatgtataagcttta

SEQ ID NO: 3580407 - DNA, 25 bp, Homo sapien
tagtaactctgggtaatggaccgaa

SEQ ID NO: 3580408 - DNA, 25 bp, Homo sapien
gcattggcgcttcggtagtaactct

SEQ ID NO: 3580409 - DNA, 25 bp, Homo sapien
cataggtgaggatcaaggcattggc

SEQ ID NO: 3580410 - DNA, 25 bp, Homo sapien
cactcaggaaggcaacggaaggatt

SEQ ID NO: 3580411 - DNA, 25 bp, Homo sapien
ggcactgacagattgtaggtactca

SEQ ID NO: 3580412 - DNA, 25 bp, Homo sapien
gcactgacagattgtaggtactcaa

SEQ ID NO: 3580413 - DNA, 25 bp, Homo sapien
ctctgaagccagtaaaacgaggata

SEQ ID NO: 3580414 - DNA, 25 bp, Homo sapien
cagtaaaacgaggataataccactt

SEQ ID NO: 3580415 - DNA, 25 bp, Homo sapien
cttccaagtaccaaatcatccagaa

SEQ ID NO: 3580416 - DNA, 25 bp, Homo sapien
ccaagtaccaaatcatccagaagcc

SEQ ID NO: 3580417 - DNA, 25 bp, Homo sapien
tccaagtaccaaatcatccagaagc

SEQ ID NO: 3580418 - DNA, 25 bp, Homo sapien
ttccaagtaccaaatcatccagaag

SEQ ID NO: 3580419 - DNA, 25 bp, Homo sapien
tccttatctttatgtcacttgtgac

SEQ ID NO: 3580420 - DNA, 25 bp, Homo sapien
taatgaaatgtagaaatcgggaggc

SEQ ID NO: 3580421 - DNA, 25 bp, Homo sapien
catactcctcatttagtgtctttcc

SEQ ID NO: 3580422 - DNA, 25 bp, Homo sapien
ttttagagacaaggatatgagagga

SEQ ID NO: 3580423 - DNA, 25 bp, Homo sapien
tttttcaccattaatctccactgtc

SEQ ID NO: 3580424 - DNA, 25 bp, Homo sapien
tcaactccaattgtggctccttgac

SEQ ID NO: 3580425 - DNA, 25 bp, Homo sapien
ttttcaccattaatctccactgtct

SEQ ID NO: 3580426 - DNA, 25 bp, Homo sapien
tgcctttgtcattaaaggaagcaag

SEQ ID NO: 3580427 - DNA, 25 bp, Homo sapien
tagttttgatactgcacactgacag

SEQ ID NO: 3580428 - DNA, 25 bp, Homo sapien
cataggcagagtttgattggtttaa

SEQ ID NO: 3580429 - DNA, 25 bp, Homo sapien
taggttcagtttgacgtccagattc

SEQ ID NO: 3580430 - DNA, 25 bp, Homo sapien
agtgaatcttcggacgaggcacgtc

SEQ ID NO: 3580431 - DNA, 25 bp, Homo sapien
ctgagtgaatcttcggacgaggcac

SEQ ID NO: 3580432 - DNA, 25 bp, Homo sapien
atcttcggacgaggcacgtcttccc

SEQ ID NO: 3580433 - DNA, 25 bp, Homo sapien
tgaatcttcggacgaggcacgtctt

SEQ ID NO: 3580434 - DNA, 25 bp, Homo sapien
aacaattttgaacaggaaatcataa

SEQ ID NO: 3580435 - DNA, 25 bp, Homo sapien
cagcgttgccaattaaaacaatttt

SEQ ID NO: 3580436 - DNA, 25 bp, Homo sapien
ttgaacaggaaatcataatcttcca

SEQ ID NO: 3580437 - DNA, 25 bp, Homo sapien
taaaacaattttgaacaggaaatca

SEQ ID NO: 3580438 - DNA, 25 bp, Homo sapien
gagaaaggcccagtcagacttgccc

SEQ ID NO: 3580439 - DNA, 25 bp, Homo sapien
tgagaaaggcccagtcagacttgcc

SEQ ID NO: 3580440 - DNA, 25 bp, Homo sapien
gtgagaaaggcccagtcagacttgc

SEQ ID NO: 3580441 - DNA, 25 bp, Homo sapien
tatcatgtcgcagtttcctcctgtg

SEQ ID NO: 3580442 - DNA, 25 bp, Homo sapien
acctttattcctccaagctatcatg

SEQ ID NO: 3580443 - DNA, 25 bp, Homo sapien
tccaagctatcatgtcgcagtttcc

SEQ ID NO: 3580444 - DNA, 25 bp, Homo sapien
tcagcatgaaaaggagatgacaaac

SEQ ID NO: 3580445 - DNA, 25 bp, Homo sapien
agcctcaggtgatccacgcacctca

SEQ ID NO: 3580446 - DNA, 25 bp, Homo sapien
gggattataggcatgagccaccaca

SEQ ID NO: 3580447 - DNA, 25 bp, Homo sapien
accatgcctgggtaatttgtgtttt

SEQ ID NO: 3580448 - DNA, 25 bp, Homo sapien
acgcacctcagcctcccaaagtgct

SEQ ID NO: 3580449 - DNA, 25 bp, Homo sapien
ctccaagtatatccccacatgtgtg

SEQ ID NO: 3580450 - DNA, 25 bp, Homo sapien
tccaagtatatccccacatgtgtgt

SEQ ID NO: 3580451 - DNA, 25 bp, Homo sapien
ccccacatgtgtgtcaggcccatgg

SEQ ID NO: 3580452 - DNA, 25 bp, Homo sapien
tcaccccctactatccttaaggaca

SEQ ID NO: 3580453 - DNA, 25 bp, Homo sapien
gtctctcaccccctactatccttaa

SEQ ID NO: 3580454 - DNA, 25 bp, Homo sapien
ctctcaccccctactatccttaagg

SEQ ID NO: 3580455 - DNA, 25 bp, Homo sapien
tctcaccccctactatccttaagga

SEQ ID NO: 3580456 - DNA, 25 bp, Homo sapien
tgtacactgaattgaaagcctttca

SEQ ID NO: 3580457 - DNA, 25 bp, Homo sapien
gtaagtgtacactgaattgaaagcc

SEQ ID NO: 3580458 - DNA, 25 bp, Homo sapien
ccactgctgtgttcagtaagtgtac

SEQ ID NO: 3580459 - DNA, 25 bp, Homo sapien
tgctgtgttcagtaagtgtacactg

SEQ ID NO: 3580460 - DNA, 25 bp, Homo sapien
gactgtcacactaggctggacccct

SEQ ID NO: 3580461 - DNA, 25 bp, Homo sapien
gaagactgtcacactaggctggacc

SEQ ID NO: 3580462 - DNA, 25 bp, Homo sapien
tggaagactgtcacactaggctgga

SEQ ID NO: 3580463 - DNA, 25 bp, Homo sapien
gttggaagactgtcacactaggctg

SEQ ID NO: 3580464 - DNA, 25 bp, Homo sapien
tcaccaaggccagactctggtagct

SEQ ID NO: 3580465 - DNA, 25 bp, Homo sapien
catcacaggcctaatgtgcacccat

SEQ ID NO: 3580466 - DNA, 25 bp, Homo sapien
aaatgcaatgcagaccatcacaggc

SEQ ID NO: 3580467 - DNA, 25 bp, Homo sapien
taatgtgcacccatatcactatgga

SEQ ID NO: 3580468 - DNA, 25 bp, Homo sapien
tgcagaccatcacaggcctaatgtg

SEQ ID NO: 3580469 - DNA, 25 bp, Homo sapien
ggtgataatctagcttgggaaccac

SEQ ID NO: 3580470 - DNA, 25 bp, Homo sapien
tacccaatagatttgttcctgaagt

SEQ ID NO: 3580471 - DNA, 25 bp, Homo sapien
caaatggtccagcatatatgtatat

SEQ ID NO: 3580472 - DNA, 25 bp, Homo sapien
gaatacacatgctgaaatgagagtt

SEQ ID NO: 3580473 - DNA, 25 bp, Homo sapien
gaaagctttcttggattcaccacct

SEQ ID NO: 3580474 - DNA, 25 bp, Homo sapien
ttattccaccttgctcaggcatcac

SEQ ID NO: 3580475 - DNA, 25 bp, Homo sapien
ccatgcattcttattccaccttgct

SEQ ID NO: 3580476 - DNA, 25 bp, Homo sapien
ttctgaaagctttcttggattcacc

SEQ ID NO: 3580477 - DNA, 25 bp, Homo sapien
gaatattccgtaagtggttctgcgt

SEQ ID NO: 3580478 - DNA, 25 bp, Homo sapien
tgttgcggaagccaagtcagttgtc

SEQ ID NO: 3580479 - DNA, 25 bp, Homo sapien
tcagttgtctgacagaatgttctac

SEQ ID NO: 3580480 - DNA, 25 bp, Homo sapien
tcaacatttgggtaagaatattccg

SEQ ID NO: 3580481 - DNA, 25 bp, Homo sapien
tggtgacgttcacttcatcctacag

SEQ ID NO: 3580482 - DNA, 25 bp, Homo sapien
aatgcataggtaaacttagtcgagg

SEQ ID NO: 3580483 - DNA, 25 bp, Homo sapien
tttgctttgacctaccccttgagag

SEQ ID NO: 3580484 - DNA, 25 bp, Homo sapien
gctcatctccacactatttgtttgg

SEQ ID NO: 3580485 - DNA, 25 bp, Homo sapien
cactgacttccccattagagccttt

SEQ ID NO: 3580486 - DNA, 25 bp, Homo sapien
caaacacaggtggttaaactgtaca

SEQ ID NO: 3580487 - DNA, 25 bp, Homo sapien
tatgacccagagtttagatctaaca

SEQ ID NO: 3580488 - DNA, 25 bp, Homo sapien
tcagatgtctcaatagtagtgatcc

SEQ ID NO: 3580489 - DNA, 25 bp, Homo sapien
ctaggatacaaataatgttccatct

SEQ ID NO: 3580490 - DNA, 25 bp, Homo sapien
aataatgttccatctgataaattgg

SEQ ID NO: 3580491 - DNA, 25 bp, Homo sapien
ggatacaaataatgttccatctgat

SEQ ID NO: 3580492 - DNA, 25 bp, Homo sapien
taatgttccatctgataaattggat

SEQ ID NO: 3580493 - DNA, 25 bp, Homo sapien
ttttatgtaagcagtccaccatagc

SEQ ID NO: 3580494 - DNA, 25 bp, Homo sapien
gagtgtactctaaaggtaaatagga

SEQ ID NO: 3580495 - DNA, 25 bp, Homo sapien
cacagggtttgaagagtagagtaaa

SEQ ID NO: 3580496 - DNA, 25 bp, Homo sapien
catatgcattgtatgtttcgcatta

SEQ ID NO: 3580497 - DNA, 25 bp, Homo sapien
tgagagaacagcacaaccggctcca

SEQ ID NO: 3580498 - DNA, 25 bp, Homo sapien
ccagtgcacagtcatatccaatgga

SEQ ID NO: 3580499 - DNA, 25 bp, Homo sapien
aacagcacaaccggctccagtgcac

SEQ ID NO: 3580500 - DNA, 25 bp, Homo sapien
cagtgcacagtcatatccaatggag

SEQ ID NO: 3580501 - DNA, 25 bp, Homo sapien
ctgtgacacctacagaggatacaac

SEQ ID NO: 3580502 - DNA, 25 bp, Homo sapien
tttcagtcaattatgagtccattca

SEQ ID NO: 3580503 - DNA, 25 bp, Homo sapien
tattcctcagatagttattgagcac

SEQ ID NO: 3580504 - DNA, 25 bp, Homo sapien
ctttctatgagccagctactgtgac

SEQ ID NO: 3580505 - DNA, 25 bp, Homo sapien
agtagccactattgttattccattg

SEQ ID NO: 3580506 - DNA, 25 bp, Homo sapien
tacaacaacccagaaagtagccact

SEQ ID NO: 3580507 - DNA, 25 bp, Homo sapien
tacagatccataactatatgctagg

SEQ ID NO: 3580508 - DNA, 25 bp, Homo sapien
gctaggcatgtgctatgtgcattta

SEQ ID NO: 3580509 - DNA, 25 bp, Homo sapien
tgtttgcagctattgaacaccaggc

SEQ ID NO: 3580510 - DNA, 25 bp, Homo sapien
ctgtttgcagctattgaacaccagg

SEQ ID NO: 3580511 - DNA, 25 bp, Homo sapien
cctcgggaccaaagctatacatatg

SEQ ID NO: 3580512 - DNA, 25 bp, Homo sapien
taagattcatacttccctcgggacc

SEQ ID NO: 3580513 - DNA, 25 bp, Homo sapien
tgtcaccacttagaaaaagggctgg

SEQ ID NO: 3580514 - DNA, 25 bp, Homo sapien
cgtcctggaaagtgataggcaccca

SEQ ID NO: 3580515 - DNA, 25 bp, Homo sapien
caaaagaaattgagctctctaccca

SEQ ID NO: 3580516 - DNA, 25 bp, Homo sapien
tagttgcccaaatgctagtagtggc

SEQ ID NO: 3580517 - DNA, 25 bp, Homo sapien
agaaaaggtaagagatagttgccca

SEQ ID NO: 3580518 - DNA, 25 bp, Homo sapien
cagatggaaagggaccattacccct

SEQ ID NO: 3580519 - DNA, 25 bp, Homo sapien
tttaatttggctcccacatgatggc

SEQ ID NO: 3580520 - DNA, 25 bp, Homo sapien
gcctgtactgggaagcacaccaggt

SEQ ID NO: 3580521 - DNA, 25 bp, Homo sapien
gagaaaagtattcgtcagaccatga

SEQ ID NO: 3580522 - DNA, 25 bp, Homo sapien
tgacaggcaccacgctgagacctga

SEQ ID NO: 3580523 - DNA, 25 bp, Homo sapien
cccagattactcaaatgctttacat

SEQ ID NO: 3580524 - DNA, 25 bp, Homo sapien
ttctccctctgtaatggacatttct

SEQ ID NO: 3580525 - DNA, 25 bp, Homo sapien
taaccaaataatggcctttatggca

SEQ ID NO: 3580526 - DNA, 25 bp, Homo sapien
gtgtttccacggtataattatcaaa

SEQ ID NO: 3580527 - DNA, 25 bp, Homo sapien
tggaagaaccaccaccaatgttggt

SEQ ID NO: 3580528 - DNA, 25 bp, Homo sapien
tacctagaaacctagtaaagcatta

SEQ ID NO: 3580529 - DNA, 25 bp, Homo sapien
tcagtggaccaggtgtggaagaacc

SEQ ID NO: 3580530 - DNA, 25 bp, Homo sapien
cttgattagattaagaaatacctag

SEQ ID NO: 3580531 - DNA, 25 bp, Homo sapien
gagcctatcgccctaacaaatctct

SEQ ID NO: 3580532 - DNA, 25 bp, Homo sapien
cttggactgcactaagctaccagca

SEQ ID NO: 3580533 - DNA, 25 bp, Homo sapien
cccagttccaaggactttcaacttg

SEQ ID NO: 3580534 - DNA, 25 bp, Homo sapien
acacgagcctatcgccctaacaaat

SEQ ID NO: 3580535 - DNA, 25 bp, Homo sapien
cataaaccacctggcacccagtaga

SEQ ID NO: 3580536 - DNA, 25 bp, Homo sapien
tttttgcaattgctctaaaggtttg

SEQ ID NO: 3580537 - DNA, 25 bp, Homo sapien
aaccacctggcacccagtagatgct

SEQ ID NO: 3580538 - DNA, 25 bp, Homo sapien
tttgcaattgctctaaaggtttgaa

SEQ ID NO: 3580539 - DNA, 25 bp, Homo sapien
gagggctaggtcatgtcgaaaaaca

SEQ ID NO: 3580540 - DNA, 25 bp, Homo sapien
aaaaagtcattcagcctacaaaggc

SEQ ID NO: 3580541 - DNA, 25 bp, Homo sapien
gagagtttgagacatgaaccctttg

SEQ ID NO: 3580542 - DNA, 25 bp, Homo sapien
ttttatcagaatacccagcacagga

SEQ ID NO: 3580543 - DNA, 25 bp, Homo sapien
ataatattgctagtacacatatggg

SEQ ID NO: 3580544 - DNA, 25 bp, Homo sapien
taaagaggactttccctatacagtc

SEQ ID NO: 3580545 - DNA, 25 bp, Homo sapien
gcgcccagccaatcttatgtcaatt

SEQ ID NO: 3580546 - DNA, 25 bp, Homo sapien
cagttgattatctttgtgggtagaa

SEQ ID NO: 3580547 - DNA, 25 bp, Homo sapien
tctgtcaccaccctagatctaagca

SEQ ID NO: 3580548 - DNA, 25 bp, Homo sapien
tagtgtctctctaaaccctctgtca

SEQ ID NO: 3580549 - DNA, 25 bp, Homo sapien
tccctcatacagacgacaaaaatta

SEQ ID NO: 3580550 - DNA, 25 bp, Homo sapien
gatctaagcaccatcatccctcata

SEQ ID NO: 3580551 - DNA, 25 bp, Homo sapien
tagctcagctggagcgagcggcaat

SEQ ID NO: 3580552 - DNA, 25 bp, Homo sapien
aaatggatgtgcgaatgagtcacgc

SEQ ID NO: 3580553 - DNA, 25 bp, Homo sapien
aaggtctgcgatgtcctgagtccaa

SEQ ID NO: 3580554 - DNA, 25 bp, Homo sapien
tcacgcacgcaagggaaggtctgcg

SEQ ID NO: 3580555 - DNA, 25 bp, Homo sapien
catccagaggcccagtgagcctcgg

SEQ ID NO: 3580556 - DNA, 25 bp, Homo sapien
aggacgatctggtcggatagccgcg

SEQ ID NO: 3580557 - DNA, 25 bp, Homo sapien
atagccgcgggcacgaacctgggaa

SEQ ID NO: 3580558 - DNA, 25 bp, Homo sapien
gaccgactggaagcggcatccagag

SEQ ID NO: 3580559 - DNA, 25 bp, Homo sapien
tgcatggggccctacgcttccttct

SEQ ID NO: 3580560 - DNA, 25 bp, Homo sapien
ggggttgcatggggccctacgcttc

SEQ ID NO: 3580561 - DNA, 25 bp, Homo sapien
ggttgcatggggccctacgcttcct

SEQ ID NO: 3580562 - DNA, 25 bp, Homo sapien
ttgcatggggccctacgcttccttc

SEQ ID NO: 3580563 - DNA, 25 bp, Homo sapien
ggtagtcctccgaaatgcatttttg

SEQ ID NO: 3580564 - DNA, 25 bp, Homo sapien
cagtacagttgagagagttggtgtc

SEQ ID NO: 3580565 - DNA, 25 bp, Homo sapien
ggcgaccctcgcctttattcggaga

SEQ ID NO: 3580566 - DNA, 25 bp, Homo sapien
cttttgttgaggtgcgaggacccga

SEQ ID NO: 3580567 - DNA, 25 bp, Homo sapien
caaggtggaaagagacgttgctttg

SEQ ID NO: 3580568 - DNA, 25 bp, Homo sapien
gcgtccgaagaaatcgttgttggaa

SEQ ID NO: 3580569 - DNA, 25 bp, Homo sapien
acaaaggcgtccgaagaaatcgttg

SEQ ID NO: 3580570 - DNA, 25 bp, Homo sapien
cgttgttggaaggtgaccaaggtgg

SEQ ID NO: 3580571 - DNA, 25 bp, Homo sapien
tcaatcatttttcccggttggtgat

SEQ ID NO: 3580572 - DNA, 25 bp, Homo sapien
catttttcccggttggtgattcagg

SEQ ID NO: 3580573 - DNA, 25 bp, Homo sapien
cttcaatcatttttcccggttggtg

SEQ ID NO: 3580574 - DNA, 25 bp, Homo sapien
atcatttttcccggttggtgattca

SEQ ID NO: 3580575 - DNA, 25 bp, Homo sapien
gtttgccaggtttttcatagctgcc

SEQ ID NO: 3580576 - DNA, 25 bp, Homo sapien
tgctcagttgaaccagaatgttaaa

SEQ ID NO: 3580577 - DNA, 25 bp, Homo sapien
tgtactcccaagaatagtgcatatt

SEQ ID NO: 3580578 - DNA, 25 bp, Homo sapien
tgccctgaaatccagtcaggaggaa

SEQ ID NO: 3580579 - DNA, 25 bp, Homo sapien
tatcttaattgggagctacagacct

SEQ ID NO: 3580580 - DNA, 25 bp, Homo sapien
tagggcctgagatggaacaatgcgc

SEQ ID NO: 3580581 - DNA, 25 bp, Homo sapien
ttcaaaagtcgcttccccagctggg

SEQ ID NO: 3580582 - DNA, 25 bp, Homo sapien
tagagggcaccaaagagatgagtcc

SEQ ID NO: 3580583 - DNA, 25 bp, Homo sapien
gatcattgagataagcaggtagaaa

SEQ ID NO: 3580584 - DNA, 25 bp, Homo sapien
tataaaagctatggctacatccagg

SEQ ID NO: 3580585 - DNA, 25 bp, Homo sapien
tgcatgttatcctccattatgagga

SEQ ID NO: 3580586 - DNA, 25 bp, Homo sapien
taacatattcctacagcaggatctc

SEQ ID NO: 3580587 - DNA, 25 bp, Homo sapien
ttcagtgaattatcttgtatacctc

SEQ ID NO: 3580588 - DNA, 25 bp, Homo sapien
ggagatcagtagtctcagcaacaag

SEQ ID NO: 3580589 - DNA, 25 bp, Homo sapien
ttggagatcagtagtctcagcaaca

SEQ ID NO: 3580590 - DNA, 25 bp, Homo sapien
tatacctctagagtgagcacattcc

SEQ ID NO: 3580591 - DNA, 25 bp, Homo sapien
cagccctggcccataaaactttcct

SEQ ID NO: 3580592 - DNA, 25 bp, Homo sapien
tctttggtgccagaagcttcctttt

SEQ ID NO: 3580593 - DNA, 25 bp, Homo sapien
caccagatagtaatggatttcacag

SEQ ID NO: 3580594 - DNA, 25 bp, Homo sapien
atttcacagttagggcattgctggg

SEQ ID NO: 3580595 - DNA, 25 bp, Homo sapien
tccagtccctttcatgcagccatta

SEQ ID NO: 3580596 - DNA, 25 bp, Homo sapien
agacacatcaccatcagtaggaaca

SEQ ID NO: 3580597 - DNA, 25 bp, Homo sapien
ccacccactggaaccatgggccctc

SEQ ID NO: 3580598 - DNA, 25 bp, Homo sapien
tccagacacatcaccatcagtagga

SEQ ID NO: 3580599 - DNA, 25 bp, Homo sapien
gccacccactggaaccatgggccct

SEQ ID NO: 3580600 - DNA, 25 bp, Homo sapien
acagcaccagtgtaattctcaagca

SEQ ID NO: 3580601 - DNA, 25 bp, Homo sapien
tttagcatattatccacagcaccag

SEQ ID NO: 3580602 - DNA, 25 bp, Homo sapien
attctcaagcattgacaaatattca

SEQ ID NO: 3580603 - DNA, 25 bp, Homo sapien
tgtgccttaatgactgactcacagc

SEQ ID NO: 3580604 - DNA, 25 bp, Homo sapien
ctcagcaaatactagctgattacca

SEQ ID NO: 3580605 - DNA, 25 bp, Homo sapien
caaaagtatttgtcgactgaaaagc

SEQ ID NO: 3580606 - DNA, 25 bp, Homo sapien
acaaaagtatttgtcgactgaaaag

SEQ ID NO: 3580607 - DNA, 25 bp, Homo sapien
tactagctgattaccattacaaaag

SEQ ID NO: 3580608 - DNA, 25 bp, Homo sapien
ttgatattcttcttcactaacccca

SEQ ID NO: 3580609 - DNA, 25 bp, Homo sapien
tctgttccacaactgtcctattcat

SEQ ID NO: 3580610 - DNA, 25 bp, Homo sapien
atattcttcttcactaaccccattt

SEQ ID NO: 3580611 - DNA, 25 bp, Homo sapien
cctgtctgttccacaactgtcctat

SEQ ID NO: 3580612 - DNA, 25 bp, Homo sapien
caagggactatcagtgaggcaccca

SEQ ID NO: 3580613 - DNA, 25 bp, Homo sapien
tcagcggtgccttacccaaggaagt

SEQ ID NO: 3580614 - DNA, 25 bp, Homo sapien
cacaggtggtcaaagtaaagatttc

SEQ ID NO: 3580615 - DNA, 25 bp, Homo sapien
tcttaatgccttacccacctgtgga

SEQ ID NO: 3580616 - DNA, 25 bp, Homo sapien
tgtaaaggtcatgagtccaaaacag

SEQ ID NO: 3580617 - DNA, 25 bp, Homo sapien
tatctgaggtatggtgtgacaattc

SEQ ID NO: 3580618 - DNA, 25 bp, Homo sapien
gaaaaacatttcatggatggtacaa

SEQ ID NO: 3580619 - DNA, 25 bp, Homo sapien
tcagaggtagcaagttcttagagtc

SEQ ID NO: 3580620 - DNA, 25 bp, Homo sapien
gtcatgaggctaagaagctgctgca

SEQ ID NO: 3580621 - DNA, 25 bp, Homo sapien
ggcctctcaagcaaaaaccagtagc

SEQ ID NO: 3580622 - DNA, 25 bp, Homo sapien
tatgggaaaacggaagcttacagaa

SEQ ID NO: 3580623 - DNA, 25 bp, Homo sapien
ccacttatgcgatgagaatgagctc

SEQ ID NO: 3580624 - DNA, 25 bp, Homo sapien
ggactactataggcgcacgccacca

SEQ ID NO: 3580625 - DNA, 25 bp, Homo sapien
gggactactataggcgcacgccacc

SEQ ID NO: 3580626 - DNA, 25 bp, Homo sapien
tctgtggattcatatgggagcgata

SEQ ID NO: 3580627 - DNA, 25 bp, Homo sapien
tctttaccccttgacagaagtggtc

SEQ ID NO: 3580628 - DNA, 25 bp, Homo sapien
tacaatgagttttaatagcgtccca

SEQ ID NO: 3580629 - DNA, 25 bp, Homo sapien
caggatgagcctccttttagcagag

SEQ ID NO: 3580630 - DNA, 25 bp, Homo sapien
tgctgtgccttctaaaagccagtgg

SEQ ID NO: 3580631 - DNA, 25 bp, Homo sapien
aatatctcggcggagagtccaggct

SEQ ID NO: 3580632 - DNA, 25 bp, Homo sapien
gaaagggccacctgtatcagcatca

SEQ ID NO: 3580633 - DNA, 25 bp, Homo sapien
gatttacatgattcagcggctgctc

SEQ ID NO: 3580634 - DNA, 25 bp, Homo sapien
gaagaaactttatgccctggatgtc

SEQ ID NO: 3580635 - DNA, 25 bp, Homo sapien
tcttctgcagaacttactgccagaa

SEQ ID NO: 3580636 - DNA, 25 bp, Homo sapien
aattcattagatcctgcttggccta

SEQ ID NO: 3580637 - DNA, 25 bp, Homo sapien
cccaatgtgaatacgtctagcatcc

SEQ ID NO: 3580638 - DNA, 25 bp, Homo sapien
tgagcttatgctccatgaacagaaa

SEQ ID NO: 3580639 - DNA, 25 bp, Homo sapien
aatagcaccactttgggagaaacta

SEQ ID NO: 3580640 - DNA, 25 bp, Homo sapien
agcttattcgacagtgaggtgcagg

SEQ ID NO: 3580641 - DNA, 25 bp, Homo sapien
tcagtcccaagatggtaggcatgtt

SEQ ID NO: 3580642 - DNA, 25 bp, Homo sapien
gatttgagggccctttgctacagca

SEQ ID NO: 3580643 - DNA, 25 bp, Homo sapien
ttgataatccccgaggtcagcctgt

SEQ ID NO: 3580644 - DNA, 25 bp, Homo sapien
tgagggcccaattggtcaagcagga

SEQ ID NO: 3580645 - DNA, 25 bp, Homo sapien
catcgtggtcaacctgtgggtggtc

SEQ ID NO: 3580646 - DNA, 25 bp, Homo sapien
actgcttaactcactgctgagtaca

SEQ ID NO: 3580647 - DNA, 25 bp, Homo sapien
tgcttaactcactgctgagtacata

SEQ ID NO: 3580648 - DNA, 25 bp, Homo sapien
taactgcttaactcactgctgagta

SEQ ID NO: 3580649 - DNA, 25 bp, Homo sapien
aactgcttaactcactgctgagtac

SEQ ID NO: 3580650 - DNA, 25 bp, Homo sapien
gaaaaccccttgaatattatgttga

SEQ ID NO: 3580651 - DNA, 25 bp, Homo sapien
tctcccagcaagacaccagttgaaa

SEQ ID NO: 3580652 - DNA, 25 bp, Homo sapien
gaagaacgaattgatacaccaccag

SEQ ID NO: 3580653 - DNA, 25 bp, Homo sapien
tcaaaaacgaattgcaggaaccctg

SEQ ID NO: 3580654 - DNA, 25 bp, Homo sapien
aatgacacagtcgagtcagtttaaa

SEQ ID NO: 3580655 - DNA, 25 bp, Homo sapien
gaaaatgacacagtcgagtcagttt

SEQ ID NO: 3580656 - DNA, 25 bp, Homo sapien
gacacagtcgagtcagtttaaataa

SEQ ID NO: 3580657 - DNA, 25 bp, Homo sapien
tgacacagtcgagtcagtttaaata

SEQ ID NO: 3580658 - DNA, 25 bp, Homo sapien
aaagctgctgttggatctagaaggt

SEQ ID NO: 3580659 - DNA, 25 bp, Homo sapien
ttcctactgcctgcagagtttcagg

SEQ ID NO: 3580660 - DNA, 25 bp, Homo sapien
aaaatgtacgatttttcactgtgca

SEQ ID NO: 3580661 - DNA, 25 bp, Homo sapien
tctatataaattgtctggctgaggc

SEQ ID NO: 3580662 - DNA, 25 bp, Homo sapien
taagtaacgggaatctgtaagaatg

SEQ ID NO: 3580663 - DNA, 25 bp, Homo sapien
ggttttgacttagatggacaccatg

SEQ ID NO: 3580664 - DNA, 25 bp, Homo sapien
tcaaatgatttaatgcagatgaaca

SEQ ID NO: 3580665 - DNA, 25 bp, Homo sapien
gaacttggacactgatgccatcaaa

SEQ ID NO: 3580666 - DNA, 25 bp, Homo sapien
aacatggtacttgctatgagccagg

SEQ ID NO: 3580667 - DNA, 25 bp, Homo sapien
gaaacatgaacatggtacttgctat

SEQ ID NO: 3580668 - DNA, 25 bp, Homo sapien
tgaacatggtacttgctatgagcca

SEQ ID NO: 3580669 - DNA, 25 bp, Homo sapien
catgaacatggtacttgctatgagc

SEQ ID NO: 3580670 - DNA, 25 bp, Homo sapien
ccatactgatgggaagggtatcttt

SEQ ID NO: 3580671 - DNA, 25 bp, Homo sapien
ggagataggcatataaaacactgag

SEQ ID NO: 3580672 - DNA, 25 bp, Homo sapien
gcaggcactagcactttctacatgt

SEQ ID NO: 3580673 - DNA, 25 bp, Homo sapien
aactactggaaggtggctaaggaag

SEQ ID NO: 3580674 - DNA, 25 bp, Homo sapien
cactgccataggaactgaggtctgt

SEQ ID NO: 3580675 - DNA, 25 bp, Homo sapien
tgtatcaacggtatccacatggaga

SEQ ID NO: 3580676 - DNA, 25 bp, Homo sapien
tgaacttacgtatatgaacactgcc

SEQ ID NO: 3580677 - DNA, 25 bp, Homo sapien
caggtgtgcgcaggaagaaaatttc

SEQ ID NO: 3580678 - DNA, 25 bp, Homo sapien
tttcattaagtttatatcctcctgg

SEQ ID NO: 3580679 - DNA, 25 bp, Homo sapien
gaaagcaatctcattgcaattcagc

SEQ ID NO: 3580680 - DNA, 25 bp, Homo sapien
ttcccactgaaaatgtccaactttg

SEQ ID NO: 3580681 - DNA, 25 bp, Homo sapien
tctcattgcaattcagctaaaaata

SEQ ID NO: 3580682 - DNA, 25 bp, Homo sapien
gaggaggcatctaaccatgctgcag

SEQ ID NO: 3580683 - DNA, 25 bp, Homo sapien
agacctgcactcttgtagaattggg

SEQ ID NO: 3580684 - DNA, 25 bp, Homo sapien
ggtcagctcccagagataatgggca

SEQ ID NO: 3580685 - DNA, 25 bp, Homo sapien
tagtaccaagtaagcaacctaatgg

SEQ ID NO: 3580686 - DNA, 25 bp, Homo sapien
ccttgaaatcccatgcagtctggat

SEQ ID NO: 3580687 - DNA, 25 bp, Homo sapien
caatgacttcttgctaaaaccagtg

SEQ ID NO: 3580688 - DNA, 25 bp, Homo sapien
cacagtctcctttgtaagatgtccc

SEQ ID NO: 3580689 - DNA, 25 bp, Homo sapien
ccatagtcaggcacttaccttgaaa

SEQ ID NO: 3580690 - DNA, 25 bp, Homo sapien
tttgctatttcattaacttctgctt

SEQ ID NO: 3580691 - DNA, 25 bp, Homo sapien
atttttgagacgattttattgagaa

SEQ ID NO: 3580692 - DNA, 25 bp, Homo sapien
tcaagccatcctccgtccatgggct

SEQ ID NO: 3580693 - DNA, 25 bp, Homo sapien
ttagcttcccaagtaaccagaatta

SEQ ID NO: 3580694 - DNA, 25 bp, Homo sapien
aatccttcctgtcatgtgtgtatcc

SEQ ID NO: 3580695 - DNA, 25 bp, Homo sapien
gatttgtcacgtgctgtctcatttc

SEQ ID NO: 3580696 - DNA, 25 bp, Homo sapien
tatcctttaaggatttgtcacgtgc

SEQ ID NO: 3580697 - DNA, 25 bp, Homo sapien
ttctaatccttcctgtcatgtgtgt

SEQ ID NO: 3580698 - DNA, 25 bp, Homo sapien
gagtcagtcatagtgggttccaatt

SEQ ID NO: 3580699 - DNA, 25 bp, Homo sapien
tagtgggttccaattcctcaactcc

SEQ ID NO: 3580700 - DNA, 25 bp, Homo sapien
cactatattaatttggagtcagtca

SEQ ID NO: 3580701 - DNA, 25 bp, Homo sapien
tcctcaactcctacttgtgtgatct

SEQ ID NO: 3580702 - DNA, 25 bp, Homo sapien
catgaataactcgataaatgcctgg

SEQ ID NO: 3580703 - DNA, 25 bp, Homo sapien
gcctattagttcacctgcctgacag

SEQ ID NO: 3580704 - DNA, 25 bp, Homo sapien
gaattcagagactttgaggagctcc

SEQ ID NO: 3580705 - DNA, 25 bp, Homo sapien
tagaggtagaatgaaatatagcccc

SEQ ID NO: 3580706 - DNA, 25 bp, Homo sapien
cttgaggcaccacgagttcctgctt

SEQ ID NO: 3580707 - DNA, 25 bp, Homo sapien
gtttcacgttccttgaggcaccacg

SEQ ID NO: 3580708 - DNA, 25 bp, Homo sapien
ttcacgttccttgaggcaccacgag

SEQ ID NO: 3580709 - DNA, 25 bp, Homo sapien
cgttccttgaggcaccacgagttcc

SEQ ID NO: 3580710 - DNA, 25 bp, Homo sapien
tgcaagtaggcttcctgtagcacca

SEQ ID NO: 3580711 - DNA, 25 bp, Homo sapien
ttgcttctgcaagtaggcttcctgt

SEQ ID NO: 3580712 - DNA, 25 bp, Homo sapien
gataagcaattgctacaaaagcatg

SEQ ID NO: 3580713 - DNA, 25 bp, Homo sapien
tgtagcaccaaactcccgccacaaa

SEQ ID NO: 3580714 - DNA, 25 bp, Homo sapien
aaagggttgtcctgaattctgtttg

SEQ ID NO: 3580715 - DNA, 25 bp, Homo sapien
agggttgtcctgaattctgtttggc

SEQ ID NO: 3580716 - DNA, 25 bp, Homo sapien
tttgtcccgcaacactagcagtata

SEQ ID NO: 3580717 - DNA, 25 bp, Homo sapien
tatatcctcaggcaattaacttttt

SEQ ID NO: 3580718 - DNA, 25 bp, Homo sapien
taataagaattgagtcaaactcatt

SEQ ID NO: 3580719 - DNA, 25 bp, Homo sapien
ggaactcagtagatggcaattgtaa

SEQ ID NO: 3580720 - DNA, 25 bp, Homo sapien
ggaagtcaaagacaatttactgtac

SEQ ID NO: 3580721 - DNA, 25 bp, Homo sapien
caatgccaggcagatcataggaact

SEQ ID NO: 3580722 - DNA, 25 bp, Homo sapien
ctcaagagagtagcggtaggatcag

SEQ ID NO: 3580723 - DNA, 25 bp, Homo sapien
tagcggtaggatcagaagaatttcc

SEQ ID NO: 3580724 - DNA, 25 bp, Homo sapien
gtagcggtaggatcagaagaatttc

SEQ ID NO: 3580725 - DNA, 25 bp, Homo sapien
agagtagcggtaggatcagaagaat

SEQ ID NO: 3580726 - DNA, 25 bp, Homo sapien
taagacgaacagcacatgacaaggc

SEQ ID NO: 3580727 - DNA, 25 bp, Homo sapien
gtagaaatatttgagcagtaaacat

SEQ ID NO: 3580728 - DNA, 25 bp, Homo sapien
gtgacccatacgtttgcaacaaatg

SEQ ID NO: 3580729 - DNA, 25 bp, Homo sapien
aagtaaggtacgcttccaggacgag

SEQ ID NO: 3580730 - DNA, 25 bp, Homo sapien
tgaagcactcttttgactaatgacc

SEQ ID NO: 3580731 - DNA, 25 bp, Homo sapien
acagtgaaaggattctcggatttgg

SEQ ID NO: 3580732 - DNA, 25 bp, Homo sapien
aaggattctcggatttggagtcagg

SEQ ID NO: 3580733 - DNA, 25 bp, Homo sapien
gcactcttttgactaatgacctgtg

SEQ ID NO: 3580734 - DNA, 25 bp, Homo sapien
taaagtacgcaataaaaacagcggc

SEQ ID NO: 3580735 - DNA, 25 bp, Homo sapien
gctgcctggccttaccaaagtactg

SEQ ID NO: 3580736 - DNA, 25 bp, Homo sapien
catacttgcgaaatgacagggcaac

SEQ ID NO: 3580737 - DNA, 25 bp, Homo sapien
gtataccacgtttgcccaaggacaa

SEQ ID NO: 3580738 - DNA, 25 bp, Homo sapien
ggccactccagagacggacctagat

SEQ ID NO: 3580739 - DNA, 25 bp, Homo sapien
ggttccacttgtgtcgctcagcgat

SEQ ID NO: 3580740 - DNA, 25 bp, Homo sapien
tgaggccgagccgaatttcaccaaa

SEQ ID NO: 3580741 - DNA, 25 bp, Homo sapien
cctagataggttcgcatgaggccga

SEQ ID NO: 3580742 - DNA, 25 bp, Homo sapien
gaggataaacggtctacacggccat

SEQ ID NO: 3580743 - DNA, 25 bp, Homo sapien
tagagtcagtgacgatcgcagtcgc

SEQ ID NO: 3580744 - DNA, 25 bp, Homo sapien
agaaaatgtgaagagagcgaccgcc

SEQ ID NO: 3580745 - DNA, 25 bp, Homo sapien
gtcagtgacattcgggacccgcgaa

SEQ ID NO: 3580746 - DNA, 25 bp, Homo sapien
gagacacacgtaacactgagacctg

SEQ ID NO: 3580747 - DNA, 25 bp, Homo sapien
tataaaggacggtagaatgccactg

SEQ ID NO: 3580748 - DNA, 25 bp, Homo sapien
tactggtggccctcaaatcggttac

SEQ ID NO: 3580749 - DNA, 25 bp, Homo sapien
ttgggtacctcaagagcagcatgtc

SEQ ID NO: 3580750 - DNA, 25 bp, Homo sapien
gcctcaagctttacacagctgtcct

SEQ ID NO: 3580751 - DNA, 25 bp, Homo sapien
gctttacacagctgtccttacttcc

SEQ ID NO: 3580752 - DNA, 25 bp, Homo sapien
tcagcctcaagctttacacagctgt

SEQ ID NO: 3580753 - DNA, 25 bp, Homo sapien
cacagctgtccttacttcctaacat

SEQ ID NO: 3580754 - DNA, 25 bp, Homo sapien
ctttctgacaacattttttgttgcc

SEQ ID NO: 3580755 - DNA, 25 bp, Homo sapien
tgttgccttcttgtttctcactttc

SEQ ID NO: 3580756 - DNA, 25 bp, Homo sapien
ttttgttgccttcttgtttctcact

SEQ ID NO: 3580757 - DNA, 25 bp, Homo sapien
gttgccttcttgtttctcactttca

SEQ ID NO: 3580758 - DNA, 25 bp, Homo sapien
ggcctttggtaatcgccaatcaatc

SEQ ID NO: 3580759 - DNA, 25 bp, Homo sapien
tctagactgcttgtgttcaaatcgc

SEQ ID NO: 3580760 - DNA, 25 bp, Homo sapien
gaatgtggccttaggtctagactgc

SEQ ID NO: 3580761 - DNA, 25 bp, Homo sapien
gagaccagcgtattttagctcccac

SEQ ID NO: 3580762 - DNA, 25 bp, Homo sapien
aaggtacttagtgtagtgtctcgac

SEQ ID NO: 3580763 - DNA, 25 bp, Homo sapien
tactagtggttatggtggttcccaa

SEQ ID NO: 3580764 - DNA, 25 bp, Homo sapien
ctgtctgcccttgagaattgtctga

SEQ ID NO: 3580765 - DNA, 25 bp, Homo sapien
taatcttagttcttacctctgagga

SEQ ID NO: 3580766 - DNA, 25 bp, Homo sapien
tgccaaagggtgttaggttccatcc

SEQ ID NO: 3580767 - DNA, 25 bp, Homo sapien
tctctggacaatgggtacctctcta

SEQ ID NO: 3580768 - DNA, 25 bp, Homo sapien
tagtacccaacagagaatgctcttg

SEQ ID NO: 3580769 - DNA, 25 bp, Homo sapien
ggctctctatatctgtgggctccac

SEQ ID NO: 3580770 - DNA, 25 bp, Homo sapien
tgtaagggacttagcatccgtgggt

SEQ ID NO: 3580771 - DNA, 25 bp, Homo sapien
aacatgggtccagaaagagaaccac

SEQ ID NO: 3580772 - DNA, 25 bp, Homo sapien
cctctttgatactgagagactactg

SEQ ID NO: 3580773 - DNA, 25 bp, Homo sapien
agaggatgcctcgagcttctttcat

SEQ ID NO: 3580774 - DNA, 25 bp, Homo sapien
tccccaatacctaggtcagtgctca

SEQ ID NO: 3580775 - DNA, 25 bp, Homo sapien
gtgctcattcttagtagacccttaa

SEQ ID NO: 3580776 - DNA, 25 bp, Homo sapien
tctctattactaaagtaaggtccag

SEQ ID NO: 3580777 - DNA, 25 bp, Homo sapien
tgtatgaaatgttaagcccctcttc

SEQ ID NO: 3580778 - DNA, 25 bp, Homo sapien
aaaaattagaatgtcagcttgatga

SEQ ID NO: 3580779 - DNA, 25 bp, Homo sapien
aatgtcagcttgatgaatatcgagc

SEQ ID NO: 3580780 - DNA, 25 bp, Homo sapien
gaatatcgagcagaagttgatcaac

SEQ ID NO: 3580781 - DNA, 25 bp, Homo sapien
cagaagttgatcaactcagggaaac

SEQ ID NO: 3580782 - DNA, 25 bp, Homo sapien
tatatacaagagtggccaagagtac

SEQ ID NO: 3580783 - DNA, 25 bp, Homo sapien
aaaatttagtatcagagaggccagc

SEQ ID NO: 3580784 - DNA, 25 bp, Homo sapien
caccttgtggcagggactctgtgac

SEQ ID NO: 3580785 - DNA, 25 bp, Homo sapien
tttgtgcctcaactataaactggag

SEQ ID NO: 3580786 - DNA, 25 bp, Homo sapien
tcagctgcctaggtgggacaatctt

SEQ ID NO: 3580787 - DNA, 25 bp, Homo sapien
ttgtcacccatacttcaatgcagtg

SEQ ID NO: 3580788 - DNA, 25 bp, Homo sapien
gaagcatctgttctcaggttggatc

SEQ ID NO: 3580789 - DNA, 25 bp, Homo sapien
gggtggtcacgcaagctgcacattt

SEQ ID NO: 3580790 - DNA, 25 bp, Homo sapien
taaatgtgtagagccacatgcagct

SEQ ID NO: 3580791 - DNA, 25 bp, Homo sapien
tagtctgcatcaaccctatgaggag

SEQ ID NO: 3580792 - DNA, 25 bp, Homo sapien
tactgtaccttaagatcctcggccc

SEQ ID NO: 3580793 - DNA, 25 bp, Homo sapien
taaatacggaatcctcaagaagctc

SEQ ID NO: 3580794 - DNA, 25 bp, Homo sapien
cacagtggtcagcttgattttcttg

SEQ ID NO: 3580795 - DNA, 25 bp, Homo sapien
tcctgtaggtaggaacatgttctct

SEQ ID NO: 3580796 - DNA, 25 bp, Homo sapien
caaatccatttgactcacagtggtc

SEQ ID NO: 3580797 - DNA, 25 bp, Homo sapien
tttagatcatacaaaaagcgagtcc

SEQ ID NO: 3580798 - DNA, 25 bp, Homo sapien
gaactcatagcttctgtctccagaa

SEQ ID NO: 3580799 - DNA, 25 bp, Homo sapien
cctacaaaggtctggaacaaggttg

SEQ ID NO: 3580800 - DNA, 25 bp, Homo sapien
tcaggaagtccttgatctacagctt

SEQ ID NO: 3580801 - DNA, 25 bp, Homo sapien
tgctaatcaagagtgactgaccggg

SEQ ID NO: 3580802 - DNA, 25 bp, Homo sapien
cactaggaaattggctacatctgac

SEQ ID NO: 3580803 - DNA, 25 bp, Homo sapien
tacatatttggtgttaggagggact

SEQ ID NO: 3580804 - DNA, 25 bp, Homo sapien
gaaggcctgttgaatgccaagcaca

SEQ ID NO: 3580805 - DNA, 25 bp, Homo sapien
tggcattcagggtcatgatcttggc

SEQ ID NO: 3580806 - DNA, 25 bp, Homo sapien
ccctactagtatattgagtgacagc

SEQ ID NO: 3580807 - DNA, 25 bp, Homo sapien
taccatctacctaagaggagagctg

SEQ ID NO: 3580808 - DNA, 25 bp, Homo sapien
gataatgactacagcctttcccact

SEQ ID NO: 3580809 - DNA, 25 bp, Homo sapien
gaaagagtactcaggttgaacccta

SEQ ID NO: 3580810 - DNA, 25 bp, Homo sapien
tttcatagtgaagtgcaagtgctgg

SEQ ID NO: 3580811 - DNA, 25 bp, Homo sapien
cacatgtgtctagaggccttctgag

SEQ ID NO: 3580812 - DNA, 25 bp, Homo sapien
cctacaatgagaaagaacgcagatc

SEQ ID NO: 3580813 - DNA, 25 bp, Homo sapien
tatttagtggctgtataacctggga

SEQ ID NO: 3580814 - DNA, 25 bp, Homo sapien
gaaaccatgttcatctctgtgcaca

SEQ ID NO: 3580815 - DNA, 25 bp, Homo sapien
tgtctcttcagatgggctggtccca

SEQ ID NO: 3580816 - DNA, 25 bp, Homo sapien
ccagatttacaattgggcaagtcac

SEQ ID NO: 3580817 - DNA, 25 bp, Homo sapien
catggaggaaagacgcattccctct

SEQ ID NO: 3580818 - DNA, 25 bp, Homo sapien
ggaccaatctcttgactgctctata

SEQ ID NO: 3580819 - DNA, 25 bp, Homo sapien
tataataaagacacacacctgcact

SEQ ID NO: 3580820 - DNA, 25 bp, Homo sapien
aaaatatagttggaaagcctgactc

SEQ ID NO: 3580821 - DNA, 25 bp, Homo sapien
tctctcccggtttggtgttctaaga

SEQ ID NO: 3580822 - DNA, 25 bp, Homo sapien
cagaatctataaaatcccaatgcta

SEQ ID NO: 3580823 - DNA, 25 bp, Homo sapien
agaatctataaaatcccaatgctat

SEQ ID NO: 3580824 - DNA, 25 bp, Homo sapien
ccagaatctataaaatcccaatgct

SEQ ID NO: 3580825 - DNA, 25 bp, Homo sapien
gagccgggatttaagactaagtgta

SEQ ID NO: 3580826 - DNA, 25 bp, Homo sapien
gagtcacatagtgctatctaagtgg

SEQ ID NO: 3580827 - DNA, 25 bp, Homo sapien
tgtgacacttgaaagactcaatctg

SEQ ID NO: 3580828 - DNA, 25 bp, Homo sapien
cagttacatcgctagcaaacagtgg

SEQ ID NO: 3580829 - DNA, 25 bp, Homo sapien
tggcgtctgacccacgatgaaccat

SEQ ID NO: 3580830 - DNA, 25 bp, Homo sapien
ctgggtcaaaaggtggcgtctgacc

SEQ ID NO: 3580831 - DNA, 25 bp, Homo sapien
aattgccattattccttggtggcag

SEQ ID NO: 3580832 - DNA, 25 bp, Homo sapien
aaaggtggcgtctgacccacgatga

SEQ ID NO: 3580833 - DNA, 25 bp, Homo sapien
gtgccccatccacggttcagctgat

SEQ ID NO: 3580834 - DNA, 25 bp, Homo sapien
gtttccaacctatggagaaagctgg

SEQ ID NO: 3580835 - DNA, 25 bp, Homo sapien
taagagtctaggtggtaatgtttcc

SEQ ID NO: 3580836 - DNA, 25 bp, Homo sapien
tccaattatgcttgtaggtaggcta

SEQ ID NO: 3580837 - DNA, 25 bp, Homo sapien
tgctttttctattagtcagctgcag

SEQ ID NO: 3580838 - DNA, 25 bp, Homo sapien
tttttctattagtcagctgcagagt

SEQ ID NO: 3580839 - DNA, 25 bp, Homo sapien
cttttatatccacatgctttttcta

SEQ ID NO: 3580840 - DNA, 25 bp, Homo sapien
tattagtcagctgcagagttgcctg

SEQ ID NO: 3580841 - DNA, 25 bp, Homo sapien
ctgagactggaaccttctttaagca

SEQ ID NO: 3580842 - DNA, 25 bp, Homo sapien
catttagaactgtccaatactacac

SEQ ID NO: 3580843 - DNA, 25 bp, Homo sapien
tggctgcgtctaatttgtaatctgc

SEQ ID NO: 3580844 - DNA, 25 bp, Homo sapien
cctatatgttccttcctttggctgc

SEQ ID NO: 3580845 - DNA, 25 bp, Homo sapien
agcaataaaggagccttgttatcta

SEQ ID NO: 3580846 - DNA, 25 bp, Homo sapien
ccaagcaataaaggagccttgttat

SEQ ID NO: 3580847 - DNA, 25 bp, Homo sapien
caataaaggagccttgttatctagc

SEQ ID NO: 3580848 - DNA, 25 bp, Homo sapien
ataaaggagccttgttatctagctc

SEQ ID NO: 3580849 - DNA, 25 bp, Homo sapien
acaggaaaattagatgacagcaatt

SEQ ID NO: 3580850 - DNA, 25 bp, Homo sapien
ctaacaggaaaattagatgacagca

SEQ ID NO: 3580851 - DNA, 25 bp, Homo sapien
gaaaattagatgacagcaatttctt

SEQ ID NO: 3580852 - DNA, 25 bp, Homo sapien
ggaaaattagatgacagcaatttct

SEQ ID NO: 3580853 - DNA, 25 bp, Homo sapien
gataacgaattgtctcaagtttgtt

SEQ ID NO: 3580854 - DNA, 25 bp, Homo sapien
aacgaattgtctcaagtttgttaga

SEQ ID NO: 3580855 - DNA, 25 bp, Homo sapien
ctgcaagataacgaattgtctcaag

SEQ ID NO: 3580856 - DNA, 25 bp, Homo sapien
gcgtcaattttattactggtctctg

SEQ ID NO: 3580857 - DNA, 25 bp, Homo sapien
atataggcggctgcacctctgggac

SEQ ID NO: 3580858 - DNA, 25 bp, Homo sapien
ctcatataggcggctgcacctctgg

SEQ ID NO: 3580859 - DNA, 25 bp, Homo sapien
tcatataggcggctgcacctctggg

SEQ ID NO: 3580860 - DNA, 25 bp, Homo sapien
taggcggctgcacctctgggacaaa

SEQ ID NO: 3580861 - DNA, 25 bp, Homo sapien
cctccaaggtaaaggaggatgtttg

SEQ ID NO: 3580862 - DNA, 25 bp, Homo sapien
aatgactgatgagttgacagaagca

SEQ ID NO: 3580863 - DNA, 25 bp, Homo sapien
caagaagaaaactggactgagaatg

SEQ ID NO: 3580864 - DNA, 25 bp, Homo sapien
catcaacaaaaaggtcatctacacc

SEQ ID NO: 3580865 - DNA, 25 bp, Homo sapien
gctgcttcttatctctttcagaggt

SEQ ID NO: 3580866 - DNA, 25 bp, Homo sapien
taaaaaagagataagagacacaaca

SEQ ID NO: 3580867 - DNA, 25 bp, Homo sapien
gcaataaataacttctgctgcttct

SEQ ID NO: 3580868 - DNA, 25 bp, Homo sapien
gagataagagacacaacaaaccctt

SEQ ID NO: 3580869 - DNA, 25 bp, Homo sapien
tcaaggtcatggctcatgggcgacc

SEQ ID NO: 3580870 - DNA, 25 bp, Homo sapien
gaagccagagactctacaagggtag

SEQ ID NO: 3580871 - DNA, 25 bp, Homo sapien
tggtgccaggttccccaaaagtgct

SEQ ID NO: 3580872 - DNA, 25 bp, Homo sapien
tataatagctatgaggaagccagag

SEQ ID NO: 3580873 - DNA, 25 bp, Homo sapien
taaattctgtagttgtttccataag

SEQ ID NO: 3580874 - DNA, 25 bp, Homo sapien
ttctgtagttgtttccataagttgc

SEQ ID NO: 3580875 - DNA, 25 bp, Homo sapien
tgtagttgtttccataagttgcttt

SEQ ID NO: 3580876 - DNA, 25 bp, Homo sapien
tgtaaattctgtagttgtttccata

SEQ ID NO: 3580877 - DNA, 25 bp, Homo sapien
caagaaagtacatttaaaagaacat

SEQ ID NO: 3580878 - DNA, 25 bp, Homo sapien
atatgaagcagcaggaagttaaaaa

SEQ ID NO: 3580879 - DNA, 25 bp, Homo sapien
ctataggatatgaagcagcaggaag

SEQ ID NO: 3580880 - DNA, 25 bp, Homo sapien
ggatatgaagcagcaggaagttaaa

SEQ ID NO: 3580881 - DNA, 25 bp, Homo sapien
tgctcctttctaagttgatatccag

SEQ ID NO: 3580882 - DNA, 25 bp, Homo sapien
ttattatctgctctgattcgactgg

SEQ ID NO: 3580883 - DNA, 25 bp, Homo sapien
tctgctctgattcgactggtttcat

SEQ ID NO: 3580884 - DNA, 25 bp, Homo sapien
cagtttattatctgctctgattcga

SEQ ID NO: 3580885 - DNA, 25 bp, Homo sapien
atgatcttgtaacgaatatttgttc

SEQ ID NO: 3580886 - DNA, 25 bp, Homo sapien
gatcttgtaacgaatatttgttctg

SEQ ID NO: 3580887 - DNA, 25 bp, Homo sapien
atcttgtaacgaatatttgttctga

SEQ ID NO: 3580888 - DNA, 25 bp, Homo sapien
aaatgatcttgtaacgaatatttgt

SEQ ID NO: 3580889 - DNA, 25 bp, Homo sapien
ttagttgttgcttaacttggtctaa

SEQ ID NO: 3580890 - DNA, 25 bp, Homo sapien
attagttgttgcttaacttggtcta

SEQ ID NO: 3580891 - DNA, 25 bp, Homo sapien
tagttgttgcttaacttggtctaat

SEQ ID NO: 3580892 - DNA, 25 bp, Homo sapien
ctaaccacatggaattattacttgg

SEQ ID NO: 3580893 - DNA, 25 bp, Homo sapien
gaaaatgccgtattactctcagctc

SEQ ID NO: 3580894 - DNA, 25 bp, Homo sapien
caggaaagatcacatgcaattagca

SEQ ID NO: 3580895 - DNA, 25 bp, Homo sapien
aactagtaagccactgtattcagaa

SEQ ID NO: 3580896 - DNA, 25 bp, Homo sapien
ctttcctgatagcatccaaatgagc

SEQ ID NO: 3580897 - DNA, 25 bp, Homo sapien
catgtctttcctgatagcatccaaa

SEQ ID NO: 3580898 - DNA, 25 bp, Homo sapien
ccatgtctttcctgatagcatccaa

SEQ ID NO: 3580899 - DNA, 25 bp, Homo sapien
tgtctttcctgatagcatccaaatg

SEQ ID NO: 3580900 - DNA, 25 bp, Homo sapien
gatcttttgatctaccatgaccctt

SEQ ID NO: 3580901 - DNA, 25 bp, Homo sapien
tgtaagatcttttgatctaccatga

SEQ ID NO: 3580902 - DNA, 25 bp, Homo sapien
acggcacctggccatagtagaaatc

SEQ ID NO: 3580903 - DNA, 25 bp, Homo sapien
gccatagtagaaatctgtaagatct

SEQ ID NO: 3580904 - DNA, 25 bp, Homo sapien
taaagcagttaacgctgatacaatt

SEQ ID NO: 3580905 - DNA, 25 bp, Homo sapien
tgataaagcagttaacgctgataca

SEQ ID NO: 3580906 - DNA, 25 bp, Homo sapien
aagcagttaacgctgatacaattgt

SEQ ID NO: 3580907 - DNA, 25 bp, Homo sapien
cagttaacgctgatacaattgtttc

SEQ ID NO: 3580908 - DNA, 25 bp, Homo sapien
tcttaactaggcattatgagtgcta

SEQ ID NO: 3580909 - DNA, 25 bp, Homo sapien
cacttaattggaataattctgcaca

SEQ ID NO: 3580910 - DNA, 25 bp, Homo sapien
tgaacattccccatatcagtaaata

SEQ ID NO: 3580911 - DNA, 25 bp, Homo sapien
gattgttcataatagtgatattgtc

SEQ ID NO: 3580912 - DNA, 25 bp, Homo sapien
cgcctatcatatccctccttggttg

SEQ ID NO: 3580913 - DNA, 25 bp, Homo sapien
agttatatccactggccgcctatca

SEQ ID NO: 3580914 - DNA, 25 bp, Homo sapien
ctatcatatccctccttggttgtgg

SEQ ID NO: 3580915 - DNA, 25 bp, Homo sapien
aggagttatatccactggccgccta

SEQ ID NO: 3580916 - DNA, 25 bp, Homo sapien
caagaacactcagattcaagtggga

SEQ ID NO: 3580917 - DNA, 25 bp, Homo sapien
tcttacatgctggtctactaacgtg

SEQ ID NO: 3580918 - DNA, 25 bp, Homo sapien
ctaaggtccttccattggtcagagg

SEQ ID NO: 3580919 - DNA, 25 bp, Homo sapien
ggaactctggcctatcttgcaccaa

SEQ ID NO: 3580920 - DNA, 25 bp, Homo sapien
tgggctcgaggccagcacctaaaaa

SEQ ID NO: 3580921 - DNA, 25 bp, Homo sapien
gaaaacaggacaccctcaaacacag

SEQ ID NO: 3580922 - DNA, 25 bp, Homo sapien
ttccagtgagaataaggcagacgtg

SEQ ID NO: 3580923 - DNA, 25 bp, Homo sapien
cagagataagaggtgcctattcgcc

SEQ ID NO: 3580924 - DNA, 25 bp, Homo sapien
cttacgttggctcctgacgagatta

SEQ ID NO: 3580925 - DNA, 25 bp, Homo sapien
gagcactcaggcatctatgacacga

SEQ ID NO: 3580926 - DNA, 25 bp, Homo sapien
gaagcccaggccttcaaaggttcgc

SEQ ID NO: 3580927 - DNA, 25 bp, Homo sapien
gcgtcgcccagcacaaggcgtgaat

SEQ ID NO: 3580928 - DNA, 25 bp, Homo sapien
agaaagagccgccaagcctggcgac

SEQ ID NO: 3580929 - DNA, 25 bp, Homo sapien
ttgaaacccaacgatctcctctgcc

SEQ ID NO: 3580930 - DNA, 25 bp, Homo sapien
tctccgcagggccggcgagaaatgc

SEQ ID NO: 3580931 - DNA, 25 bp, Homo sapien
gccgccaagcctggcgactattcat

SEQ ID NO: 3580932 - DNA, 25 bp, Homo sapien
ctttcgggcaaggtagttctggcac

SEQ ID NO: 3580933 - DNA, 25 bp, Homo sapien
tagttctggcaccacaggaatgctg

SEQ ID NO: 3580934 - DNA, 25 bp, Homo sapien
tggcaccacaggaatgctgggaatt

SEQ ID NO: 3580935 - DNA, 25 bp, Homo sapien
gggtaaatctcgcacaggctttcgg

SEQ ID NO: 3580936 - DNA, 25 bp, Homo sapien
agacccacagttcgcgagcatggct

SEQ ID NO: 3580937 - DNA, 25 bp, Homo sapien
cgtggtcccacgaaactgggtctct

SEQ ID NO: 3580938 - DNA, 25 bp, Homo sapien
gggcatagtccaacagctggctccc

SEQ ID NO: 3580939 - DNA, 25 bp, Homo sapien
cttcaccgccctaggaaagcgagat

SEQ ID NO: 3580940 - DNA, 25 bp, Homo sapien
tgcgagggccaacgaaaccttctgg

SEQ ID NO: 3580941 - DNA, 25 bp, Homo sapien
tcgtgaggcgtcacatcctgctgct

SEQ ID NO: 3580942 - DNA, 25 bp, Homo sapien
gaacctgaagttttcggccgctgag

SEQ ID NO: 3580943 - DNA, 25 bp, Homo sapien
gatggagtcgcatttagccgcacag

SEQ ID NO: 3580944 - DNA, 25 bp, Homo sapien
tcacggtatctttgggcagaagaca

SEQ ID NO: 3580945 - DNA, 25 bp, Homo sapien
cacggtatctttgggcagaagacag

SEQ ID NO: 3580946 - DNA, 25 bp, Homo sapien
ttcacggtatctttgggcagaagac

SEQ ID NO: 3580947 - DNA, 25 bp, Homo sapien
gaggatgatgtactcactgatggag

SEQ ID NO: 3580948 - DNA, 25 bp, Homo sapien
gatgatgtactcactgatggagtat

SEQ ID NO: 3580949 - DNA, 25 bp, Homo sapien
ggagaggatgatgtactcactgatg

SEQ ID NO: 3580950 - DNA, 25 bp, Homo sapien
ctagggagaggatgatgtactcact

SEQ ID NO: 3580951 - DNA, 25 bp, Homo sapien
tgctgagctctttgtcttgcttggc

SEQ ID NO: 3580952 - DNA, 25 bp, Homo sapien
gtccaagggctctccctgtgctgag

SEQ ID NO: 3580953 - DNA, 25 bp, Homo sapien
cctgtccaagggctctccctgtgct

SEQ ID NO: 3580954 - DNA, 25 bp, Homo sapien
tgagctctttgtcttgcttggcttt

SEQ ID NO: 3580955 - DNA, 25 bp, Homo sapien
ttagtcttgcaagcttagagcccag

SEQ ID NO: 3580956 - DNA, 25 bp, Homo sapien
gggcattgcggcacaaagctaaatt

SEQ ID NO: 3580957 - DNA, 25 bp, Homo sapien
caagagaccttggtgaacacaccca

SEQ ID NO: 3580958 - DNA, 25 bp, Homo sapien
tagacataaactcaagggcattgcg

SEQ ID NO: 3580959 - DNA, 25 bp, Homo sapien
ccagatgtctaaggcactccttggc

SEQ ID NO: 3580960 - DNA, 25 bp, Homo sapien
cccaagctagccctccagccatcat

SEQ ID NO: 3580961 - DNA, 25 bp, Homo sapien
catgctactgccagactccagatgt

SEQ ID NO: 3580962 - DNA, 25 bp, Homo sapien
aagctctcttctagtgcctcatctt

SEQ ID NO: 3580963 - DNA, 25 bp, Homo sapien
tccccttctgtgcttaatctgactt

SEQ ID NO: 3580964 - DNA, 25 bp, Homo sapien
tgtttgcctctttatccccttctgt

SEQ ID NO: 3580965 - DNA, 25 bp, Homo sapien
cttccttgtccagtaattttgcaat

SEQ ID NO: 3580966 - DNA, 25 bp, Homo sapien
tttatccccttctgtgcttaatctg

SEQ ID NO: 3580967 - DNA, 25 bp, Homo sapien
attagctggctgtggtgacggacac

SEQ ID NO: 3580968 - DNA, 25 bp, Homo sapien
ggctgtggtgacggacacctgtagt

SEQ ID NO: 3580969 - DNA, 25 bp, Homo sapien
cccagctacttgggaggctgaggca

SEQ ID NO: 3580970 - DNA, 25 bp, Homo sapien
tagctggctgtggtgacggacacct

SEQ ID NO: 3580971 - DNA, 25 bp, Homo sapien
catgttccccattggtttcaggttg

SEQ ID NO: 3580972 - DNA, 25 bp, Homo sapien
tctcagattcagccaccttctggtt

SEQ ID NO: 3580973 - DNA, 25 bp, Homo sapien
tcactctccgcagagcctctcatgt

SEQ ID NO: 3580974 - DNA, 25 bp, Homo sapien
ggtcccatggttggaatgctggctc

SEQ ID NO: 3580975 - DNA, 25 bp, Homo sapien
gccttggattataagggatgggctt

SEQ ID NO: 3580976 - DNA, 25 bp, Homo sapien
cttggattataagggatgggcttct

SEQ ID NO: 3580977 - DNA, 25 bp, Homo sapien
tagccttggattataagggatgggc

SEQ ID NO: 3580978 - DNA, 25 bp, Homo sapien
tgtagccttggattataagggatgg

SEQ ID NO: 3580979 - DNA, 25 bp, Homo sapien
ctcctgatgccgtggagtgttgcaa

SEQ ID NO: 3580980 - DNA, 25 bp, Homo sapien
tggagtgttgcaaaccacctggaac

SEQ ID NO: 3580981 - DNA, 25 bp, Homo sapien
caaaccacctggaacccaagtgtca

SEQ ID NO: 3580982 - DNA, 25 bp, Homo sapien
gatgccgtggagtgttgcaaaccac

SEQ ID NO: 3580983 - DNA, 25 bp, Homo sapien
tggacttgatgctttggctgtaaca

SEQ ID NO: 3580984 - DNA, 25 bp, Homo sapien
ttttctagctttgtcctaagagtgc

SEQ ID NO: 3580985 - DNA, 25 bp, Homo sapien
ggcattagggacaaggcctggactt

SEQ ID NO: 3580986 - DNA, 25 bp, Homo sapien
ggcctggacttgatgctttggctgt

SEQ ID NO: 3580987 - DNA, 25 bp, Homo sapien
actctatcaggcatttttacaatgg

SEQ ID NO: 3580988 - DNA, 25 bp, Homo sapien
ttacaatggggccacccaccgctga

SEQ ID NO: 3580989 - DNA, 25 bp, Homo sapien
ccaccgctgacaactagaaacgcaa

SEQ ID NO: 3580990 - DNA, 25 bp, Homo sapien
taaacactctatcaggcatttttac

SEQ ID NO: 3580991 - DNA, 25 bp, Homo sapien
ttgattttataatcgtgtgtgcttt

SEQ ID NO: 3580992 - DNA, 25 bp, Homo sapien
cagctcggtggagaaacatcctgtc

SEQ ID NO: 3580993 - DNA, 25 bp, Homo sapien
gtgtctctgtaaactccagcctagg

SEQ ID NO: 3580994 - DNA, 25 bp, Homo sapien
ccagcctaggcaaggagtattccca

SEQ ID NO: 3580995 - DNA, 25 bp, Homo sapien
gatctaacgggtacagcctggtgca

SEQ ID NO: 3580996 - DNA, 25 bp, Homo sapien
gaagaaaagtctgccatcccattgg

SEQ ID NO: 3580997 - DNA, 25 bp, Homo sapien
agcacatgcatcatcgctgccaggg

SEQ ID NO: 3580998 - DNA, 25 bp, Homo sapien
gagtcccctggcaagtcagctgtca

SEQ ID NO: 3580999 - DNA, 25 bp, Homo sapien
tcctcagagccatgcggtagtgctg

SEQ ID NO: 3581000 - DNA, 25 bp, Homo sapien
tgtcattagtccagtgcatggactt

SEQ ID NO: 3581001 - DNA, 25 bp, Homo sapien
gtgcatggacttgctgtctgaatca

SEQ ID NO: 3581002 - DNA, 25 bp, Homo sapien
acggcgacctaaagtatttgtgtca

SEQ ID NO: 3581003 - DNA, 25 bp, Homo sapien
ctttctgggctgagtaggtgaaacg

SEQ ID NO: 3581004 - DNA, 25 bp, Homo sapien
gatgtacgggagaagatgatcagag

SEQ ID NO: 3581005 - DNA, 25 bp, Homo sapien
aaaaatcaatacagggatgtacggg

SEQ ID NO: 3581006 - DNA, 25 bp, Homo sapien
acagagactaaaggagaggtggaca

SEQ ID NO: 3581007 - DNA, 25 bp, Homo sapien
aatcaatacagggatgtacgggaga

SEQ ID NO: 3581008 - DNA, 25 bp, Homo sapien
taaatggccgacaattctgtgggag

SEQ ID NO: 3581009 - DNA, 25 bp, Homo sapien
caagaaatcccgcaaaaggcctgca

SEQ ID NO: 3581010 - DNA, 25 bp, Homo sapien
tgcagtgttagcaccagtctggccc

SEQ ID NO: 3581011 - DNA, 25 bp, Homo sapien
taggatctaagacagcgcacagagg

SEQ ID NO: 3581012 - DNA, 25 bp, Homo sapien
gaaactggcgaattgcagacatgga

SEQ ID NO: 3581013 - DNA, 25 bp, Homo sapien
caacattgggaagtgcaagacaaca

SEQ ID NO: 3581014 - DNA, 25 bp, Homo sapien
tatcgtggtggcctaaaaatagagc

SEQ ID NO: 3581015 - DNA, 25 bp, Homo sapien
caccagttcattggagccatagaga

SEQ ID NO: 3581016 - DNA, 25 bp, Homo sapien
gaatgcattgctagcccttccattg

SEQ ID NO: 3581017 - DNA, 25 bp, Homo sapien
tttagcgtaagatgaacaatgcctg

SEQ ID NO: 3581018 - DNA, 25 bp, Homo sapien
ccaggcagacaatgatgtttagcgt

SEQ ID NO: 3581019 - DNA, 25 bp, Homo sapien
cctcaggactatgggaagatgcata

SEQ ID NO: 3581020 - DNA, 25 bp, Homo sapien
tctaggaacagatctctcattggct

SEQ ID NO: 3581021 - DNA, 25 bp, Homo sapien
gatgtaccccagaaataaggcgatg

SEQ ID NO: 3581022 - DNA, 25 bp, Homo sapien
cattggctctagtaccatctctgga

SEQ ID NO: 3581023 - DNA, 25 bp, Homo sapien
ataaacttggtccaggtgcagctcc

SEQ ID NO: 3581024 - DNA, 25 bp, Homo sapien
gaaagcccgtcagaggttcatccct

SEQ ID NO: 3581025 - DNA, 25 bp, Homo sapien
caatcataaagctaatcccaggtgg

SEQ ID NO: 3581026 - DNA, 25 bp, Homo sapien
ggtggaatcccctcctgtcagtgag

SEQ ID NO: 3581027 - DNA, 25 bp, Homo sapien
tgtcgttgtcagaggcgcagtagct

SEQ ID NO: 3581028 - DNA, 25 bp, Homo sapien
cccagattgctcttcaataacaagc

SEQ ID NO: 3581029 - DNA, 25 bp, Homo sapien
ttcctttgagggaatccagatgaaa

SEQ ID NO: 3581030 - DNA, 25 bp, Homo sapien
caagcttgcattggttatatatatc

SEQ ID NO: 3581031 - DNA, 25 bp, Homo sapien
tcctttgagggaatccagatgaaag

SEQ ID NO: 3581032 - DNA, 25 bp, Homo sapien
ccaaattcttgttctagcttaattg

SEQ ID NO: 3581033 - DNA, 25 bp, Homo sapien
cttgttctagcttaattgctcgatc

SEQ ID NO: 3581034 - DNA, 25 bp, Homo sapien
tctagcttaattgctcgatcatagg

SEQ ID NO: 3581035 - DNA, 25 bp, Homo sapien
aattgctcgatcataggttttcttg

SEQ ID NO: 3581036 - DNA, 25 bp, Homo sapien
gatagagctgggcaacttgtaaccg

SEQ ID NO: 3581037 - DNA, 25 bp, Homo sapien
tcctgatacatcaagtatacagtgt

SEQ ID NO: 3581038 - DNA, 25 bp, Homo sapien
tgggttttatgaagatggcaatggg

SEQ ID NO: 3581039 - DNA, 25 bp, Homo sapien
tgtaaccgcttgatagcatttcctg

SEQ ID NO: 3581040 - DNA, 25 bp, Homo sapien
gggaggtgtaagaagattggtgaac

SEQ ID NO: 3581041 - DNA, 25 bp, Homo sapien
tcaggggaggtgtaagaagattggt

SEQ ID NO: 3581042 - DNA, 25 bp, Homo sapien
gaggtgtaagaagattggtgaacat

SEQ ID NO: 3581043 - DNA, 25 bp, Homo sapien
ggtgtaagaagattggtgaacatac

SEQ ID NO: 3581044 - DNA, 25 bp, Homo sapien
tactggccggcttctataaacttgt

SEQ ID NO: 3581045 - DNA, 25 bp, Homo sapien
gactgcacactggttccatataaat

SEQ ID NO: 3581046 - DNA, 25 bp, Homo sapien
cgtagtctcgctttggcctcgtagt

SEQ ID NO: 3581047 - DNA, 25 bp, Homo sapien
gacaaagtgatagtctctgccatcc

SEQ ID NO: 3581048 - DNA, 25 bp, Homo sapien
gaagactttctcaggatatgttcta

SEQ ID NO: 3581049 - DNA, 25 bp, Homo sapien
ctggaagcttgctgtaaacgacctg

SEQ ID NO: 3581050 - DNA, 25 bp, Homo sapien
ggatatgttctatggcaggatctct

SEQ ID NO: 3581051 - DNA, 25 bp, Homo sapien
gtaaacgacctggagtttcatttgc

SEQ ID NO: 3581052 - DNA, 25 bp, Homo sapien
ccaggataatcaccggccgggtgta

SEQ ID NO: 3581053 - DNA, 25 bp, Homo sapien
cattgatccgatccttcatgggccc

SEQ ID NO: 3581054 - DNA, 25 bp, Homo sapien
tatcaagtcgtcattgatccgatcc

SEQ ID NO: 3581055 - DNA, 25 bp, Homo sapien
tttatcagggaattcagatatcaag

SEQ ID NO: 3581056 - DNA, 25 bp, Homo sapien
tttcctgccttgtaacaggctcata

SEQ ID NO: 3581057 - DNA, 25 bp, Homo sapien
tgaagcacattcatagtctatcaat

SEQ ID NO: 3581058 - DNA, 25 bp, Homo sapien
gcacattcatagtctatcaatgcca

SEQ ID NO: 3581059 - DNA, 25 bp, Homo sapien
cattcatagtctatcaatgccaggt

SEQ ID NO: 3581060 - DNA, 25 bp, Homo sapien
ttcatagtctatcaatgccaggttt

SEQ ID NO: 3581061 - DNA, 25 bp, Homo sapien
gccaagctacttcttaagggtacag

SEQ ID NO: 3581062 - DNA, 25 bp, Homo sapien
tacagagagtggaccttgatgctcc

SEQ ID NO: 3581063 - DNA, 25 bp, Homo sapien
taagtggtatgtacccatggccacc

SEQ ID NO: 3581064 - DNA, 25 bp, Homo sapien
cctgagcgatgtagagggtatacgc

SEQ ID NO: 3581065 - DNA, 25 bp, Homo sapien
tagtgttggtagacagcaatggcag

SEQ ID NO: 3581066 - DNA, 25 bp, Homo sapien
caatggcagcatcccttatgtccgg

SEQ ID NO: 3581067 - DNA, 25 bp, Homo sapien
gattgcgattcagacaactagggca

SEQ ID NO: 3581068 - DNA, 25 bp, Homo sapien
cacaggcattgcttgaggtaggtac

SEQ ID NO: 3581069 - DNA, 25 bp, Homo sapien
tggaagccagtcacaatgagagacc

SEQ ID NO: 3581070 - DNA, 25 bp, Homo sapien
tgccagagacttcgcagagggtttt

SEQ ID NO: 3581071 - DNA, 25 bp, Homo sapien
gtcacagtcgccacaaaacactatg

SEQ ID NO: 3581072 - DNA, 25 bp, Homo sapien
tgctgttgtgtcatccccataaaat

SEQ ID NO: 3581073 - DNA, 25 bp, Homo sapien
ggtagctactttcgctatcgctggc

SEQ ID NO: 3581074 - DNA, 25 bp, Homo sapien
gctactttcgctatcgctggcatta

SEQ ID NO: 3581075 - DNA, 25 bp, Homo sapien
ctatcgctggcattagaagaaacat

SEQ ID NO: 3581076 - DNA, 25 bp, Homo sapien
ttcgctatcgctggcattagaagaa

SEQ ID NO: 3581077 - DNA, 25 bp, Homo sapien
agccagaacggaaaggaatacactc

SEQ ID NO: 3581078 - DNA, 25 bp, Homo sapien
gagataccaagcattgaagagcagc

SEQ ID NO: 3581079 - DNA, 25 bp, Homo sapien
cggaaaggaatacactcatgcaagg

SEQ ID NO: 3581080 - DNA, 25 bp, Homo sapien
taccaagcattgaagagcagccaga

SEQ ID NO: 3581081 - DNA, 25 bp, Homo sapien
aaggcaagtaaaagccgcagaggag

SEQ ID NO: 3581082 - DNA, 25 bp, Homo sapien
accagaaatgtgagcgaaaggcaag

SEQ ID NO: 3581083 - DNA, 25 bp, Homo sapien
tgagcgaaaggcaagtaaaagccgc

SEQ ID NO: 3581084 - DNA, 25 bp, Homo sapien
atgtgagcgaaaggcaagtaaaagc

SEQ ID NO: 3581085 - DNA, 25 bp, Homo sapien
gaacccgctgcttgattgctgtttc

SEQ ID NO: 3581086 - DNA, 25 bp, Homo sapien
tcttctttttagcaaatgaagaaag

SEQ ID NO: 3581087 - DNA, 25 bp, Homo sapien
tctccattttacaggaacccgctgc

SEQ ID NO: 3581088 - DNA, 25 bp, Homo sapien
gcattaagaaaactcagataagata

SEQ ID NO: 3581089 - DNA, 25 bp, Homo sapien
cctttctttcaacatggtttcttgc

SEQ ID NO: 3581090 - DNA, 25 bp, Homo sapien
ctttctttcaacatggtttcttgct

SEQ ID NO: 3581091 - DNA, 25 bp, Homo sapien
tcagagtctttgttccataaccgtc

SEQ ID NO: 3581092 - DNA, 25 bp, Homo sapien
gtctttgttccataaccgtcgtcac

SEQ ID NO: 3581093 - DNA, 25 bp, Homo sapien
gagtctttgttccataaccgtcgtc

SEQ ID NO: 3581094 - DNA, 25 bp, Homo sapien
cagagtctttgttccataaccgtcg

SEQ ID NO: 3581095 - DNA, 25 bp, Homo sapien
taacaatctggatcccattctctct

SEQ ID NO: 3581096 - DNA, 25 bp, Homo sapien
gttgaaatgaatactaccatgacag

SEQ ID NO: 3581097 - DNA, 25 bp, Homo sapien
gaagaagtcagtggagttgaaatga

SEQ ID NO: 3581098 - DNA, 25 bp, Homo sapien
catgacagaccgtgctgccttaaca

SEQ ID NO: 3581099 - DNA, 25 bp, Homo sapien
gttgcatgatagaaaaggcaaaccg

SEQ ID NO: 3581100 - DNA, 25 bp, Homo sapien
caagtcccagttttggcaagtctct

SEQ ID NO: 3581101 - DNA, 25 bp, Homo sapien
gcaaaccggacccagtcctggtcaa

SEQ ID NO: 3581102 - DNA, 25 bp, Homo sapien
tgatagaaaaggcaaaccggaccca

SEQ ID NO: 3581103 - DNA, 25 bp, Homo sapien
tgggaattttcgtgaaaagatgaag

SEQ ID NO: 3581104 - DNA, 25 bp, Homo sapien
ttttcgtgaaaagatgaagctcttt

SEQ ID NO: 3581105 - DNA, 25 bp, Homo sapien
agaatgggaattttcgtgaaaagat

SEQ ID NO: 3581106 - DNA, 25 bp, Homo sapien
gaattttcgtgaaaagatgaagctc

SEQ ID NO: 3581107 - DNA, 25 bp, Homo sapien
catggggcaaaaacaggggacgtct

SEQ ID NO: 3581108 - DNA, 25 bp, Homo sapien
acaggggacgtctaattgttgtcac

SEQ ID NO: 3581109 - DNA, 25 bp, Homo sapien
agaaaaggcatggggcaaaaacagg

SEQ ID NO: 3581110 - DNA, 25 bp, Homo sapien
gacgtctaattgttgtcacactcat

SEQ ID NO: 3581111 - DNA, 25 bp, Homo sapien
acaactagtttgtaaaagcacagag

SEQ ID NO: 3581112 - DNA, 25 bp, Homo sapien
gctgacaaaacaactagtttgtaaa

SEQ ID NO: 3581113 - DNA, 25 bp, Homo sapien
aactagtttgtaaaagcacagagag

SEQ ID NO: 3581114 - DNA, 25 bp, Homo sapien
aaacaactagtttgtaaaagcacag

SEQ ID NO: 3581115 - DNA, 25 bp, Homo sapien
taaatgtagagcagcaaggtgaccc

SEQ ID NO: 3581116 - DNA, 25 bp, Homo sapien
cattgctgggaatgagtcctgtgcc

SEQ ID NO: 3581117 - DNA, 25 bp, Homo sapien
tgaaggtgccaaagactctgaaggc

SEQ ID NO: 3581118 - DNA, 25 bp, Homo sapien
aaaggacacctgtttggatgtgcgc

SEQ ID NO: 3581119 - DNA, 25 bp, Homo sapien
cttaataaaagtagctaatagcagg

SEQ ID NO: 3581120 - DNA, 25 bp, Homo sapien
aaaagatgaattgtaaagcacttaa

SEQ ID NO: 3581121 - DNA, 25 bp, Homo sapien
cataataaggataagaaaaaagatg

SEQ ID NO: 3581122 - DNA, 25 bp, Homo sapien
taaagcacttaatgcaatgccttaa

SEQ ID NO: 3581123 - DNA, 25 bp, Homo sapien
aaatcccaacgactatcacttgtag

SEQ ID NO: 3581124 - DNA, 25 bp, Homo sapien
caatttagagttctttgcttaggaa

SEQ ID NO: 3581125 - DNA, 25 bp, Homo sapien
ttatgaaactgtgggagctaatcct

SEQ ID NO: 3581126 - DNA, 25 bp, Homo sapien
tgtagcctagtgaaggctgagaact

SEQ ID NO: 3581127 - DNA, 25 bp, Homo sapien
gttgaggcccaagacatctacagca

SEQ ID NO: 3581128 - DNA, 25 bp, Homo sapien
gctcaggtaaccaaagggcatagag

SEQ ID NO: 3581129 - DNA, 25 bp, Homo sapien
gatgtcatacttatttctcccaagg

SEQ ID NO: 3581130 - DNA, 25 bp, Homo sapien
gaccaagcccagtatagctaaggag

SEQ ID NO: 3581131 - DNA, 25 bp, Homo sapien
tgaaccaatccagcccactatgtgt

SEQ ID NO: 3581132 - DNA, 25 bp, Homo sapien
gttttattcaaggataaccatgctc

SEQ ID NO: 3581133 - DNA, 25 bp, Homo sapien
taacatcatctacaccagaggtcag

SEQ ID NO: 3581134 - DNA, 25 bp, Homo sapien
tcacacttcaaatatcgtaacatca

SEQ ID NO: 3581135 - DNA, 25 bp, Homo sapien
tatctaaaccactttattcagggcc

SEQ ID NO: 3581136 - DNA, 25 bp, Homo sapien
agcagcagaattgagtatttgcagc

SEQ ID NO: 3581137 - DNA, 25 bp, Homo sapien
tcagggccaccaatgaacttcatgt

SEQ ID NO: 3581138 - DNA, 25 bp, Homo sapien
atttgcagcaaagatcagatggcct

SEQ ID NO: 3581139 - DNA, 25 bp, Homo sapien
tggaagtccgactaactgatcagtg

SEQ ID NO: 3581140 - DNA, 25 bp, Homo sapien
tgaagcccaccaatgtccacaggga

SEQ ID NO: 3581141 - DNA, 25 bp, Homo sapien
taggttacaggagcaaccactggca

SEQ ID NO: 3581142 - DNA, 25 bp, Homo sapien
taatccctcacaatatggctgtcag

SEQ ID NO: 3581143 - DNA, 25 bp, Homo sapien
tgtcccttaggcagcaacatggcta

SEQ ID NO: 3581144 - DNA, 25 bp, Homo sapien
taaacagtttgtgagggcaccacgg

SEQ ID NO: 3581145 - DNA, 25 bp, Homo sapien
aatacattcgagacgcagttctggc

SEQ ID NO: 3581146 - DNA, 25 bp, Homo sapien
gctgagtcttatttccctacgtgtg

SEQ ID NO: 3581147 - DNA, 25 bp, Homo sapien
catccattggcaatcgtagattcat

SEQ ID NO: 3581148 - DNA, 25 bp, Homo sapien
caatcattccatccattggcaatcg

SEQ ID NO: 3581149 - DNA, 25 bp, Homo sapien
aaagcaatcattccatccattggca

SEQ ID NO: 3581150 - DNA, 25 bp, Homo sapien
cattccatccattggcaatcgtaga

SEQ ID NO: 3581151 - DNA, 25 bp, Homo sapien
catttgggcttagactccacttcac

SEQ ID NO: 3581152 - DNA, 25 bp, Homo sapien
ctgtcatttgggcttagactccact

SEQ ID NO: 3581153 - DNA, 25 bp, Homo sapien
tgactgtcatttgggcttagactcc

SEQ ID NO: 3581154 - DNA, 25 bp, Homo sapien
tgtcatttgggcttagactccactt

SEQ ID NO: 3581155 - DNA, 25 bp, Homo sapien
caagcacaaggtcaaaaacaccgta

SEQ ID NO: 3581156 - DNA, 25 bp, Homo sapien
gcacacagggcagttttggcaactc

SEQ ID NO: 3581157 - DNA, 25 bp, Homo sapien
cctctgtgcaaaaggagatttggaa

SEQ ID NO: 3581158 - DNA, 25 bp, Homo sapien
tcaaaaacaccgtatgcaaatgcac

SEQ ID NO: 3581159 - DNA, 25 bp, Homo sapien
gccttccatacaagctttctggcct

SEQ ID NO: 3581160 - DNA, 25 bp, Homo sapien
tttctggcctttctgaccttctttg

SEQ ID NO: 3581161 - DNA, 25 bp, Homo sapien
aacctcatttgctacaattcccacc

SEQ ID NO: 3581162 - DNA, 25 bp, Homo sapien
tgatagccaggccttccatacaagc

SEQ ID NO: 3581163 - DNA, 25 bp, Homo sapien
ttcactgtcttcaatcgggcacgtt

SEQ ID NO: 3581164 - DNA, 25 bp, Homo sapien
cttcaatcgggcacgttcctttctt

SEQ ID NO: 3581165 - DNA, 25 bp, Homo sapien
actgtcttcaatcgggcacgttcct

SEQ ID NO: 3581166 - DNA, 25 bp, Homo sapien
tcttcaatcgggcacgttcctttct

SEQ ID NO: 3581167 - DNA, 25 bp, Homo sapien
gcacacactggtaaaagttttagga

SEQ ID NO: 3581168 - DNA, 25 bp, Homo sapien
gtcggcatatgagctgataagcaca

SEQ ID NO: 3581169 - DNA, 25 bp, Homo sapien
taagcacaagtttgcacatgcacac

SEQ ID NO: 3581170 - DNA, 25 bp, Homo sapien
cttgtcacagtcaccaattttggta

SEQ ID NO: 3581171 - DNA, 25 bp, Homo sapien
cagaggcattgataacgtggagaat

SEQ ID NO: 3581172 - DNA, 25 bp, Homo sapien
cttgacttggcagcccactgtcctt

SEQ ID NO: 3581173 - DNA, 25 bp, Homo sapien
gctcttgtcgtagtcgaacatggct

SEQ ID NO: 3581174 - DNA, 25 bp, Homo sapien
ccagcatgactctcctggcttgcca

SEQ ID NO: 3581175 - DNA, 25 bp, Homo sapien
gtagctgagtagtaaccatgtcggg

SEQ ID NO: 3581176 - DNA, 25 bp, Homo sapien
tagctgagtagtaaccatgtcgggc

SEQ ID NO: 3581177 - DNA, 25 bp, Homo sapien
gctgagtagtaaccatgtcgggcta

SEQ ID NO: 3581178 - DNA, 25 bp, Homo sapien
ctgagtagtaaccatgtcgggctaa

SEQ ID NO: 3581179 - DNA, 25 bp, Homo sapien
tcaaggctgaaaatacacgagaaca

SEQ ID NO: 3581180 - DNA, 25 bp, Homo sapien
caaggtatatcattaccatggtata

SEQ ID NO: 3581181 - DNA, 25 bp, Homo sapien
ggctgaaaatacacgagaacaaggt

SEQ ID NO: 3581182 - DNA, 25 bp, Homo sapien
tacacgagaacaaggtatatcatta

SEQ ID NO: 3581183 - DNA, 25 bp, Homo sapien
aatgtgctacttttaggagatagtg

SEQ ID NO: 3581184 - DNA, 25 bp, Homo sapien
cttcaaaagatccaaaaagcatctt

SEQ ID NO: 3581185 - DNA, 25 bp, Homo sapien
tccttcaaaagatccaaaaagcatc

SEQ ID NO: 3581186 - DNA, 25 bp, Homo sapien
caatccttcaaaagatccaaaaagc

SEQ ID NO: 3581187 - DNA, 25 bp, Homo sapien
aatccttcaaaagatccaaaaagca

SEQ ID NO: 3581188 - DNA, 25 bp, Homo sapien
tctttcctgttcctattggaaccag

SEQ ID NO: 3581189 - DNA, 25 bp, Homo sapien
attccaggtctgtgtgaatccagct

SEQ ID NO: 3581190 - DNA, 25 bp, Homo sapien
gagctctccattttactctttcctg

SEQ ID NO: 3581191 - DNA, 25 bp, Homo sapien
tgtgaatccagctgagctctccatt

SEQ ID NO: 3581192 - DNA, 25 bp, Homo sapien
cagggctcagccgtcaatgaagttc

SEQ ID NO: 3581193 - DNA, 25 bp, Homo sapien
tcttaaggagaagaacaacttgctg

SEQ ID NO: 3581194 - DNA, 25 bp, Homo sapien
cagactgtgtcctggtgaatcagac

SEQ ID NO: 3581195 - DNA, 25 bp, Homo sapien
tattgagaccagaacgaaccctgct

SEQ ID NO: 3581196 - DNA, 25 bp, Homo sapien
tgtccgctgaagcagtaagggactg

SEQ ID NO: 3581197 - DNA, 25 bp, Homo sapien
cttctttgtccgctgaagcagtaag

SEQ ID NO: 3581198 - DNA, 25 bp, Homo sapien
gaagcagtaagggactgatactgaa

SEQ ID NO: 3581199 - DNA, 25 bp, Homo sapien
gctgaagcagtaagggactgatact

SEQ ID NO: 3581200 - DNA, 25 bp, Homo sapien
tcaagaaatccatcgccaagtgaag

SEQ ID NO: 3581201 - DNA, 25 bp, Homo sapien
atccatcgccaagtgaagctggaag

SEQ ID NO: 3581202 - DNA, 25 bp, Homo sapien
cagcttgtaccactggagtgaagaa

SEQ ID NO: 3581203 - DNA, 25 bp, Homo sapien
gagtgaagaatcctgccattccaca

SEQ ID NO: 3581204 - DNA, 25 bp, Homo sapien
agaacagttaacattagcaataatc

SEQ ID NO: 3581205 - DNA, 25 bp, Homo sapien
gcaccactaaagtacttcaagcact

SEQ ID NO: 3581206 - DNA, 25 bp, Homo sapien
taatcagttccacttgcacagcacc

SEQ ID NO: 3581207 - DNA, 25 bp, Homo sapien
gcacttcacacgaaagattaaagga

SEQ ID NO: 3581208 - DNA, 25 bp, Homo sapien
agatcatttctagtggggaaatgaa

SEQ ID NO: 3581209 - DNA, 25 bp, Homo sapien
ctgcaagaccccaggaaggtacatt

SEQ ID NO: 3581210 - DNA, 25 bp, Homo sapien
aggaaggtacattctctctgacacc

SEQ ID NO: 3581211 - DNA, 25 bp, Homo sapien
tgcaagaccccaggaaggtacattc

SEQ ID NO: 3581212 - DNA, 25 bp, Homo sapien
tgatatgactatacgcatggcccat

SEQ ID NO: 3581213 - DNA, 25 bp, Homo sapien
gagtctcattaaaaagaggttcctc

SEQ ID NO: 3581214 - DNA, 25 bp, Homo sapien
catgtctcttagagtcatttagatg

SEQ ID NO: 3581215 - DNA, 25 bp, Homo sapien
taaagtcagccctctaggtacaaaa

SEQ ID NO: 3581216 - DNA, 25 bp, Homo sapien
gattttggcctcaaatcgagcgtaa

SEQ ID NO: 3581217 - DNA, 25 bp, Homo sapien
gcgtttctgattggttcgcagggat

SEQ ID NO: 3581218 - DNA, 25 bp, Homo sapien
catcatctgctctcgtaggtcatgg

SEQ ID NO: 3581219 - DNA, 25 bp, Homo sapien
gcagggatccggacccggagctcat

SEQ ID NO: 3581220 - DNA, 25 bp, Homo sapien
aaacacaccaccatcaaattcccaa

SEQ ID NO: 3581221 - DNA, 25 bp, Homo sapien
aaaacacaccaccatcaaattccca

SEQ ID NO: 3581222 - DNA, 25 bp, Homo sapien
tcagagctacgaaggtcacattggc

SEQ ID NO: 3581223 - DNA, 25 bp, Homo sapien
ctcagagctacgaaggtcacattgg

SEQ ID NO: 3581224 - DNA, 25 bp, Homo sapien
ctagaagaagccctggtgaaatctt

SEQ ID NO: 3581225 - DNA, 25 bp, Homo sapien
ggtgaaatcttatgtgatatcggca

SEQ ID NO: 3581226 - DNA, 25 bp, Homo sapien
tattgccacttctcacccaatctgg

SEQ ID NO: 3581227 - DNA, 25 bp, Homo sapien
gacaaccttcctgataacactccaa

SEQ ID NO: 3581228 - DNA, 25 bp, Homo sapien
gcctggcattcgaggccaatttgat

SEQ ID NO: 3581229 - DNA, 25 bp, Homo sapien
tgtgccttgaatgaattagcctggc

SEQ ID NO: 3581230 - DNA, 25 bp, Homo sapien
taagacataacctagcccttaggag

SEQ ID NO: 3581231 - DNA, 25 bp, Homo sapien
taagcactgtgacttctgacgacta

SEQ ID NO: 3581232 - DNA, 25 bp, Homo sapien
taaacgttgtatagctgagaagact

SEQ ID NO: 3581233 - DNA, 25 bp, Homo sapien
ttctgtgacagagacgctatggaag

SEQ ID NO: 3581234 - DNA, 25 bp, Homo sapien
cagctgtagcagttaggagtcaaaa

SEQ ID NO: 3581235 - DNA, 25 bp, Homo sapien
tgatatatacaagggtgcatgggaa

SEQ ID NO: 3581236 - DNA, 25 bp, Homo sapien
aagattagccccttccatttgctag

SEQ ID NO: 3581237 - DNA, 25 bp, Homo sapien
aaggactatcacattccacgggaat

SEQ ID NO: 3581238 - DNA, 25 bp, Homo sapien
tgttccctacgtggttacctcttga

SEQ ID NO: 3581239 - DNA, 25 bp, Homo sapien
tcttgaaacagcttaattataacta

SEQ ID NO: 3581240 - DNA, 25 bp, Homo sapien
tccagtaagatttccagacttttgt

SEQ ID NO: 3581241 - DNA, 25 bp, Homo sapien
actcattttatccagtaagatttcc

SEQ ID NO: 3581242 - DNA, 25 bp, Homo sapien
ggccaagatcccaaaatggaagtgt

SEQ ID NO: 3581243 - DNA, 25 bp, Homo sapien
caacatgttggtcatcgtgtggatc

SEQ ID NO: 3581244 - DNA, 25 bp, Homo sapien
tcggtaaaaataggagagatggctc

SEQ ID NO: 3581245 - DNA, 25 bp, Homo sapien
gcaaaataggatctacctggtaggg

SEQ ID NO: 3581246 - DNA, 25 bp, Homo sapien
cactagcggaacctgatgaattata

SEQ ID NO: 3581247 - DNA, 25 bp, Homo sapien
aagactctgacagaactcactagcg

SEQ ID NO: 3581248 - DNA, 25 bp, Homo sapien
cctgatgaattataaaacagcccct

SEQ ID NO: 3581249 - DNA, 25 bp, Homo sapien
taaaacagcccctcctagattctca

SEQ ID NO: 3581250 - DNA, 25 bp, Homo sapien
gatgagatgccgtctttcctgacca

SEQ ID NO: 3581251 - DNA, 25 bp, Homo sapien
gcttttcctctgagcgtcttactag

SEQ ID NO: 3581252 - DNA, 25 bp, Homo sapien
gaaggtctggaatacgcatggatga

SEQ ID NO: 3581253 - DNA, 25 bp, Homo sapien
tcctgaccatacttaatagtaggta

SEQ ID NO: 3581254 - DNA, 25 bp, Homo sapien
agagtccttgttttgccctccagtc

SEQ ID NO: 3581255 - DNA, 25 bp, Homo sapien
tccagtcccttcaggaagggccaaa

SEQ ID NO: 3581256 - DNA, 25 bp, Homo sapien
aaaccgtgcatagcagtagggtgtg

SEQ ID NO: 3581257 - DNA, 25 bp, Homo sapien
ccaaatgaacagcaggcaacacgca

SEQ ID NO: 3581258 - DNA, 25 bp, Homo sapien
ccgaataggtaaccacactgacttc

SEQ ID NO: 3581259 - DNA, 25 bp, Homo sapien
tactccacgatgaaagatcggaatg

SEQ ID NO: 3581260 - DNA, 25 bp, Homo sapien
tttcaccgaataggtaaccacactg

SEQ ID NO: 3581261 - DNA, 25 bp, Homo sapien
tgtggcacaagttcttttcaccgaa

SEQ ID NO: 3581262 - DNA, 25 bp, Homo sapien
gcatagagaacagttaggaggcaat

SEQ ID NO: 3581263 - DNA, 25 bp, Homo sapien
aggctgggagcatagagaacagtta

SEQ ID NO: 3581264 - DNA, 25 bp, Homo sapien
ttaggaggcaatggcagcagtccag

SEQ ID NO: 3581265 - DNA, 25 bp, Homo sapien
gatggactggaggtgttgaggctgg

SEQ ID NO: 3581266 - DNA, 25 bp, Homo sapien
gacaatagatttgcagtcatcgcgc

SEQ ID NO: 3581267 - DNA, 25 bp, Homo sapien
tgcatggctcttggaaaagtagaac

SEQ ID NO: 3581268 - DNA, 25 bp, Homo sapien
aaagtagaactatgcttggaaggca

SEQ ID NO: 3581269 - DNA, 25 bp, Homo sapien
gtcatcgcgcacaccaacaaaagtt

SEQ ID NO: 3581270 - DNA, 25 bp, Homo sapien
caactcccttgcacgtccagttttg

SEQ ID NO: 3581271 - DNA, 25 bp, Homo sapien
actcccttgcacgtccagttttgtg

SEQ ID NO: 3581272 - DNA, 25 bp, Homo sapien
tcctctccaattgtcgagagttgcc

SEQ ID NO: 3581273 - DNA, 25 bp, Homo sapien
cgagagttgccacatgcgatgccaa

SEQ ID NO: 3581274 - DNA, 25 bp, Homo sapien
ggtagaaagcagagagaggcgtggc

SEQ ID NO: 3581275 - DNA, 25 bp, Homo sapien
ctcgggtagaaagcagagagaggcg

SEQ ID NO: 3581276 - DNA, 25 bp, Homo sapien
cgggtagaaagcagagagaggcgtg

SEQ ID NO: 3581277 - DNA, 25 bp, Homo sapien
tagaaagcagagagaggcgtggcag

SEQ ID NO: 3581278 - DNA, 25 bp, Homo sapien
ttagaaaactctcttcacactactg

SEQ ID NO: 3581279 - DNA, 25 bp, Homo sapien
agaaaactctcttcacactactgca

SEQ ID NO: 3581280 - DNA, 25 bp, Homo sapien
tagaaaactctcttcacactactgc

SEQ ID NO: 3581281 - DNA, 25 bp, Homo sapien
atttgccagagtacttgcgaatgtg

SEQ ID NO: 3581282 - DNA, 25 bp, Homo sapien
tgcgaatgtgcaaggatgaaaagag

SEQ ID NO: 3581283 - DNA, 25 bp, Homo sapien
cagagtacttgcgaatgtgcaagga

SEQ ID NO: 3581284 - DNA, 25 bp, Homo sapien
cactgttttctgactgaggcataca

SEQ ID NO: 3581285 - DNA, 25 bp, Homo sapien
aagaacttcagtgtctctcagtaag

SEQ ID NO: 3581286 - DNA, 25 bp, Homo sapien
ccagttgtcttactctcaggccctg

SEQ ID NO: 3581287 - DNA, 25 bp, Homo sapien
cagcttcaagcacagagactagaga

SEQ ID NO: 3581288 - DNA, 25 bp, Homo sapien
tggcttttcctacttaaccagtgga

SEQ ID NO: 3581289 - DNA, 25 bp, Homo sapien
aaacgatgatactcttagggctact

SEQ ID NO: 3581290 - DNA, 25 bp, Homo sapien
tctatctttgggagtaaagacggct

SEQ ID NO: 3581291 - DNA, 25 bp, Homo sapien
caatccctgttctggtctatctttg

SEQ ID NO: 3581292 - DNA, 25 bp, Homo sapien
gactcaatagtaaaggaacaatccc

SEQ ID NO: 3581293 - DNA, 25 bp, Homo sapien
ctgctccgtactccctctgggggtc

SEQ ID NO: 3581294 - DNA, 25 bp, Homo sapien
gctccgtactccctctgggggtcca

SEQ ID NO: 3581295 - DNA, 25 bp, Homo sapien
tgctccgtactccctctgggggtcc

SEQ ID NO: 3581296 - DNA, 25 bp, Homo sapien
tatgctcagggggacaaagacaagt

SEQ ID NO: 3581297 - DNA, 25 bp, Homo sapien
tcagggggacaaagacaagtgcagc

SEQ ID NO: 3581298 - DNA, 25 bp, Homo sapien
gggacaaagacaagtgcagcacatg

SEQ ID NO: 3581299 - DNA, 25 bp, Homo sapien
gggggacaaagacaagtgcagcaca

SEQ ID NO: 3581300 - DNA, 25 bp, Homo sapien
caggtctgaatagcccttgtgaagg

SEQ ID NO: 3581301 - DNA, 25 bp, Homo sapien
aatctgggcctttagcatgtgaaac

SEQ ID NO: 3581302 - DNA, 25 bp, Homo sapien
tgctgattcctctcaccgcgggaag

SEQ ID NO: 3581303 - DNA, 25 bp, Homo sapien
aattaccagagagtagggccaggga

SEQ ID NO: 3581304 - DNA, 25 bp, Homo sapien
tttctacacaataacacatgcgcat

SEQ ID NO: 3581305 - DNA, 25 bp, Homo sapien
tgcgcatcatcatcagtgactcacg

SEQ ID NO: 3581306 - DNA, 25 bp, Homo sapien
gtgattgcataaggcacaaacctgc

SEQ ID NO: 3581307 - DNA, 25 bp, Homo sapien
tacagctgactatgggaatgtcgac

SEQ ID NO: 3581308 - DNA, 25 bp, Homo sapien
tggtgtataaactccgcctggccag

SEQ ID NO: 3581309 - DNA, 25 bp, Homo sapien
cacagctctttagcaagtttccagg

SEQ ID NO: 3581310 - DNA, 25 bp, Homo sapien
agtttccaggggttttcagcatagc

SEQ ID NO: 3581311 - DNA, 25 bp, Homo sapien
cacctcctgacgctcttgagtggtg

SEQ ID NO: 3581312 - DNA, 25 bp, Homo sapien
gacagattttgagggtgatgccgat

SEQ ID NO: 3581313 - DNA, 25 bp, Homo sapien
cagagtctgtcctatgtagaggcca

SEQ ID NO: 3581314 - DNA, 25 bp, Homo sapien
ccctggttgagattgcctagggaca

SEQ ID NO: 3581315 - DNA, 25 bp, Homo sapien
gggacctcttaaacagacaggagac

SEQ ID NO: 3581316 - DNA, 25 bp, Homo sapien
gaattactgagctaaagacaatcaa

SEQ ID NO: 3581317 - DNA, 25 bp, Homo sapien
gtttcatctgctataattgcacaca

SEQ ID NO: 3581318 - DNA, 25 bp, Homo sapien
taatgtatatgattgtgggagaccg

SEQ ID NO: 3581319 - DNA, 25 bp, Homo sapien
gagaccggaatatgcctccccaaaa

SEQ ID NO: 3581320 - DNA, 25 bp, Homo sapien
cttctgaggacatctgcttctccat

SEQ ID NO: 3581321 - DNA, 25 bp, Homo sapien
gatacagtcagacggagaagctgtg

SEQ ID NO: 3581322 - DNA, 25 bp, Homo sapien
tgtctagcacactcagctgagcggg

SEQ ID NO: 3581323 - DNA, 25 bp, Homo sapien
ctgagcgggctgtgatttgataaat

SEQ ID NO: 3581324 - DNA, 25 bp, Homo sapien
agaaaagcttcgaaataatttgaat

SEQ ID NO: 3581325 - DNA, 25 bp, Homo sapien
tgatgatgggtccttgttgtctgcc

SEQ ID NO: 3581326 - DNA, 25 bp, Homo sapien
taactgtcttgctttattcctatcc

SEQ ID NO: 3581327 - DNA, 25 bp, Homo sapien
cacaatgcaaattgggtttccacgg

SEQ ID NO: 3581328 - DNA, 25 bp, Homo sapien
tgggatttcctgactacagaggctg

SEQ ID NO: 3581329 - DNA, 25 bp, Homo sapien
tactgggtatgtcaatgggtcttca

SEQ ID NO: 3581330 - DNA, 25 bp, Homo sapien
gccctaactggatgtgaaagctgaa

SEQ ID NO: 3581331 - DNA, 25 bp, Homo sapien
tagtgtttggatccgttaccacttc

SEQ ID NO: 3581332 - DNA, 25 bp, Homo sapien
taccacttcaatttcatagctgaaa

SEQ ID NO: 3581333 - DNA, 25 bp, Homo sapien
ggatccgttaccacttcaatttcat

SEQ ID NO: 3581334 - DNA, 25 bp, Homo sapien
gaaatcctcagcagtcttttagtgt

SEQ ID NO: 3581335 - DNA, 25 bp, Homo sapien
tctacatagattttggtcaattata

SEQ ID NO: 3581336 - DNA, 25 bp, Homo sapien
attttatgggaaaaattctacatag

SEQ ID NO: 3581337 - DNA, 25 bp, Homo sapien
gtcaattatatcagttttgactgac

SEQ ID NO: 3581338 - DNA, 25 bp, Homo sapien
tatgggaaaaattctacatagattt

SEQ ID NO: 3581339 - DNA, 25 bp, Homo sapien
tcattagtggtcatggctccccata

SEQ ID NO: 3581340 - DNA, 25 bp, Homo sapien
ccttctagacttgtgcaggtaccac

SEQ ID NO: 3581341 - DNA, 25 bp, Homo sapien
gaggcagctgcagtatgtagttcat

SEQ ID NO: 3581342 - DNA, 25 bp, Homo sapien
cttttgtgggttgaccatcataggc

SEQ ID NO: 3581343 - DNA, 25 bp, Homo sapien
ctggcctgtgacttgatgattagag

SEQ ID NO: 3581344 - DNA, 25 bp, Homo sapien
ccttacttgtgattgctgaagcttg

SEQ ID NO: 3581345 - DNA, 25 bp, Homo sapien
gaagcttgtcatgtaagagatacaa

SEQ ID NO: 3581346 - DNA, 25 bp, Homo sapien
tcaggaggaccaaagggtaagagcc

SEQ ID NO: 3581347 - DNA, 25 bp, Homo sapien
acctgggccacaggtttaattctga

SEQ ID NO: 3581348 - DNA, 25 bp, Homo sapien
taacctaacaagtcactctattacc

SEQ ID NO: 3581349 - DNA, 25 bp, Homo sapien
gccacttctattggttagtctccca

SEQ ID NO: 3581350 - DNA, 25 bp, Homo sapien
tctgtgtgcctctgctagactaatc

SEQ ID NO: 3581351 - DNA, 25 bp, Homo sapien
tagactaatcttccaaacctgccac

SEQ ID NO: 3581352 - DNA, 25 bp, Homo sapien
ctccccataacccagtccatcaggg

SEQ ID NO: 3581353 - DNA, 25 bp, Homo sapien
ctggatcccttgatcctttagctta

SEQ ID NO: 3581354 - DNA, 25 bp, Homo sapien
gggactggatcccttgatcctttag

SEQ ID NO: 3581355 - DNA, 25 bp, Homo sapien
ccatcaggggactggatcccttgat

SEQ ID NO: 3581356 - DNA, 25 bp, Homo sapien
aatgcatgcaatctgcttagtccag

SEQ ID NO: 3581357 - DNA, 25 bp, Homo sapien
aagtctcagtgtcctaatgtgtacc

SEQ ID NO: 3581358 - DNA, 25 bp, Homo sapien
tatatgagttgtatgtgaaacccag

SEQ ID NO: 3581359 - DNA, 25 bp, Homo sapien
tgagacttcgttgcatagtacagca

SEQ ID NO: 3581360 - DNA, 25 bp, Homo sapien
tttaattagcacaactgtgacctcg

SEQ ID NO: 3581361 - DNA, 25 bp, Homo sapien
tcaaaatctgcttgacccccttggg

SEQ ID NO: 3581362 - DNA, 25 bp, Homo sapien
tgtgacctcgaaggctttagcaaat

SEQ ID NO: 3581363 - DNA, 25 bp, Homo sapien
tgcggtgaatagcaagggaacagcc

SEQ ID NO: 3581364 - DNA, 25 bp, Homo sapien
gcctttctaactgcttgatattttc

SEQ ID NO: 3581365 - DNA, 25 bp, Homo sapien
taggcctttctaactgcttgatatt

SEQ ID NO: 3581366 - DNA, 25 bp, Homo sapien
ttcataggcctttctaactgcttga

SEQ ID NO: 3581367 - DNA, 25 bp, Homo sapien
tcatattttcataggcctttctaac

SEQ ID NO: 3581368 - DNA, 25 bp, Homo sapien
cacggttcacgttctttggacatga

SEQ ID NO: 3581369 - DNA, 25 bp, Homo sapien
tccacacagagacatatcagaacat

SEQ ID NO: 3581370 - DNA, 25 bp, Homo sapien
tagaggtaacaaagccacggttcac

SEQ ID NO: 3581371 - DNA, 25 bp, Homo sapien
tagtaatgagggtacagatccacac

SEQ ID NO: 3581372 - DNA, 25 bp, Homo sapien
tcaggttgatattgtgctataatcg

SEQ ID NO: 3581373 - DNA, 25 bp, Homo sapien
agctgcctgctcgtgggatgcacca

SEQ ID NO: 3581374 - DNA, 25 bp, Homo sapien
tcgtgggatgcaccacggaggtcaa

SEQ ID NO: 3581375 - DNA, 25 bp, Homo sapien
tataatcgtcactgtctgtccagcc

SEQ ID NO: 3581376 - DNA, 25 bp, Homo sapien
tggcttggccagtctgacaaggtaa

SEQ ID NO: 3581377 - DNA, 25 bp, Homo sapien
catgaaccgagacactggcttggcc

SEQ ID NO: 3581378 - DNA, 25 bp, Homo sapien
gagtgcccaagtctagtgtgaactg

SEQ ID NO: 3581379 - DNA, 25 bp, Homo sapien
tcagaactgtcccaatcaaggaaag

SEQ ID NO: 3581380 - DNA, 25 bp, Homo sapien
ctggcaggactgctagcttcccttc

SEQ ID NO: 3581381 - DNA, 25 bp, Homo sapien
gcaagatctttttagctcctctgta

SEQ ID NO: 3581382 - DNA, 25 bp, Homo sapien
ttgcaagatctttttagctcctctg

SEQ ID NO: 3581383 - DNA, 25 bp, Homo sapien
tgcaagatctttttagctcctctgt

SEQ ID NO: 3581384 - DNA, 25 bp, Homo sapien
catgggaccactactttgcactgag

SEQ ID NO: 3581385 - DNA, 25 bp, Homo sapien
tggagggacatgatgcggacccact

SEQ ID NO: 3581386 - DNA, 25 bp, Homo sapien
tctggtctgcctgactctcatcttc

SEQ ID NO: 3581387 - DNA, 25 bp, Homo sapien
gcaacaactaggttctggtctgcct

SEQ ID NO: 3581388 - DNA, 25 bp, Homo sapien
aaggaaccacagagacttccatggt

SEQ ID NO: 3581389 - DNA, 25 bp, Homo sapien
agatacaggtctccgttctgagaag

SEQ ID NO: 3581390 - DNA, 25 bp, Homo sapien
atacaggtctccgttctgagaagcc

SEQ ID NO: 3581391 - DNA, 25 bp, Homo sapien
atccaggcgaagatacaggtctccg

SEQ ID NO: 3581392 - DNA, 25 bp, Homo sapien
acaggtctccgttctgagaagccga

SEQ ID NO: 3581393 - DNA, 25 bp, Homo sapien
ctttcggacgccattcaggggtgga

SEQ ID NO: 3581394 - DNA, 25 bp, Homo sapien
tcggacgccattcaggggtggactc

SEQ ID NO: 3581395 - DNA, 25 bp, Homo sapien
tttcggacgccattcaggggtggac

SEQ ID NO: 3581396 - DNA, 25 bp, Homo sapien
ggacgccattcaggggtggactcgg

SEQ ID NO: 3581397 - DNA, 25 bp, Homo sapien
agtttgtgggtcgaagaggccatgg

SEQ ID NO: 3581398 - DNA, 25 bp, Homo sapien
gagggaggtggccttatcggcctct

SEQ ID NO: 3581399 - DNA, 25 bp, Homo sapien
gcggagggaggtggccttatcggcc

SEQ ID NO: 3581400 - DNA, 25 bp, Homo sapien
ggagggaggtggccttatcggcctc

SEQ ID NO: 3581401 - DNA, 25 bp, Homo sapien
cggagggaggtggccttatcggcct

SEQ ID NO: 3581402 - DNA, 25 bp, Homo sapien
ttaacgtatccatcaagcttttgct

SEQ ID NO: 3581403 - DNA, 25 bp, Homo sapien
ctttcctgttgatatcgcagttggc

SEQ ID NO: 3581404 - DNA, 25 bp, Homo sapien
tcctgttgatatcgcagttggccat

SEQ ID NO: 3581405 - DNA, 25 bp, Homo sapien
gctgcctttttaacgtatccatcaa

SEQ ID NO: 3581406 - DNA, 25 bp, Homo sapien
ttgttgtactaccatgaaatcagtt

SEQ ID NO: 3581407 - DNA, 25 bp, Homo sapien
aagtcactggctagcgatggttgtt

SEQ ID NO: 3581408 - DNA, 25 bp, Homo sapien
tccaaagtcactggctagcgatggt

SEQ ID NO: 3581409 - DNA, 25 bp, Homo sapien
tttccaaagtcactggctagcgatg

SEQ ID NO: 3581410 - DNA, 25 bp, Homo sapien
ctaatccaacggatgaaaatactag

SEQ ID NO: 3581411 - DNA, 25 bp, Homo sapien
tcttccctcttaaaagtatgaaata

SEQ ID NO: 3581412 - DNA, 25 bp, Homo sapien
aaaagtatgaaataagtactgaaat

SEQ ID NO: 3581413 - DNA, 25 bp, Homo sapien
gaaataagtactgaaatgtttcaat

SEQ ID NO: 3581414 - DNA, 25 bp, Homo sapien
gtatgaaataagtactgaaatgttt

SEQ ID NO: 3581415 - DNA, 25 bp, Homo sapien
aaggtatctgttgtatgaatacaaa

SEQ ID NO: 3581416 - DNA, 25 bp, Homo sapien
caaattgtataaactacaatgtgtt

SEQ ID NO: 3581417 - DNA, 25 bp, Homo sapien
ccaggataaagtgtgtgaaggtatc

SEQ ID NO: 3581418 - DNA, 25 bp, Homo sapien
ctgttgtatgaatacaaattcaccc

SEQ ID NO: 3581419 - DNA, 25 bp, Homo sapien
atgctctccaaagatccacccatgg

SEQ ID NO: 3581420 - DNA, 25 bp, Homo sapien
cagcttccagagtggattccaagca

SEQ ID NO: 3581421 - DNA, 25 bp, Homo sapien
tcccccttgctctagatcttgatca

SEQ ID NO: 3581422 - DNA, 25 bp, Homo sapien
tggcagcttccagagtggattccaa

SEQ ID NO: 3581423 - DNA, 25 bp, Homo sapien
gccatttccaataatatgggttttg

SEQ ID NO: 3581424 - DNA, 25 bp, Homo sapien
acagccatttccaataatatgggtt

SEQ ID NO: 3581425 - DNA, 25 bp, Homo sapien
cagccatttccaataatatgggttt

SEQ ID NO: 3581426 - DNA, 25 bp, Homo sapien
catttccaataatatgggttttgaa

SEQ ID NO: 3581427 - DNA, 25 bp, Homo sapien
taatctttgctggaagcactatctg

SEQ ID NO: 3581428 - DNA, 25 bp, Homo sapien
gatgagataatctttgctggaagca

SEQ ID NO: 3581429 - DNA, 25 bp, Homo sapien
tgctggaagcactatctggcagttt

SEQ ID NO: 3581430 - DNA, 25 bp, Homo sapien
tttgcagagatgagataatctttgc

SEQ ID NO: 3581431 - DNA, 25 bp, Homo sapien
tcaccattatcaacagctacaaagg

SEQ ID NO: 3581432 - DNA, 25 bp, Homo sapien
aataacatggtgattgcacgggcca

SEQ ID NO: 3581433 - DNA, 25 bp, Homo sapien
cttcaattcaccattatcaacagct

SEQ ID NO: 3581434 - DNA, 25 bp, Homo sapien
aacttcatccctcaagtcttttaat

SEQ ID NO: 3581435 - DNA, 25 bp, Homo sapien
cagctgaccctgtgatgtgcgttct

SEQ ID NO: 3581436 - DNA, 25 bp, Homo sapien
gatagttaccatcacgtaaccagag

SEQ ID NO: 3581437 - DNA, 25 bp, Homo sapien
cagctggaccacagaactcctgcag

SEQ ID NO: 3581438 - DNA, 25 bp, Homo sapien
atagtgcctacgctccagctggacc

SEQ ID NO: 3581439 - DNA, 25 bp, Homo sapien
ttcaattactgaattccgttctgca

SEQ ID NO: 3581440 - DNA, 25 bp, Homo sapien
aattactgaattccgttctgcaaca

SEQ ID NO: 3581441 - DNA, 25 bp, Homo sapien
ctgaattccgttctgcaacaaatcc

SEQ ID NO: 3581442 - DNA, 25 bp, Homo sapien
tactgaattccgttctgcaacaaat

SEQ ID NO: 3581443 - DNA, 25 bp, Homo sapien
gtcctggtgtgggactatacgctgt

SEQ ID NO: 3581444 - DNA, 25 bp, Homo sapien
tgtatctcccatactcaacatcctt

SEQ ID NO: 3581445 - DNA, 25 bp, Homo sapien
catactcaacatccttccagagaac

SEQ ID NO: 3581446 - DNA, 25 bp, Homo sapien
gggactatacgctgtatctcccata

SEQ ID NO: 3581447 - DNA, 25 bp, Homo sapien
gcctttgtgcaggactaccttgcga

SEQ ID NO: 3581448 - DNA, 25 bp, Homo sapien
taggtctgctggtccaccagccaga

SEQ ID NO: 3581449 - DNA, 25 bp, Homo sapien
tcttccccaccgacaatgttgaagc

SEQ ID NO: 3581450 - DNA, 25 bp, Homo sapien
tctggagctccccacttaggtctgc

SEQ ID NO: 3581451 - DNA, 25 bp, Homo sapien
acccatccatctatgctgtcaatct

SEQ ID NO: 3581452 - DNA, 25 bp, Homo sapien
ccatccatctatgctgtcaatctgt

SEQ ID NO: 3581453 - DNA, 25 bp, Homo sapien
atccatctatgctgtcaatctgtat

SEQ ID NO: 3581454 - DNA, 25 bp, Homo sapien
catccatctatgctgtcaatctgta

SEQ ID NO: 3581455 - DNA, 25 bp, Homo sapien
agctgtgaggtcgaggtgatctcca

SEQ ID NO: 3581456 - DNA, 25 bp, Homo sapien
caatagatctccagagctgtgaggt

SEQ ID NO: 3581457 - DNA, 25 bp, Homo sapien
ctaacataaatgtgctgtcctggtg

SEQ ID NO: 3581458 - DNA, 25 bp, Homo sapien
tgagtcgtagaagaaagatcttcgc

SEQ ID NO: 3581459 - DNA, 25 bp, Homo sapien
cttccagggagacggcccgttggag

SEQ ID NO: 3581460 - DNA, 25 bp, Homo sapien
aaggctgacgagttgcggtgctatg

SEQ ID NO: 3581461 - DNA, 25 bp, Homo sapien
cgagttgcggtgctatgttgggaat

SEQ ID NO: 3581462 - DNA, 25 bp, Homo sapien
acggcccgttggagagtcattgaag

SEQ ID NO: 3581463 - DNA, 25 bp, Homo sapien
cacagattactagccttcattggaa

SEQ ID NO: 3581464 - DNA, 25 bp, Homo sapien
cacaaatgtaattcgaaagcctttc

SEQ ID NO: 3581465 - DNA, 25 bp, Homo sapien
ggcatttatatatggctccccttgt

SEQ ID NO: 3581466 - DNA, 25 bp, Homo sapien
aagtagcatcaagaacaagggaggg

SEQ ID NO: 3581467 - DNA, 25 bp, Homo sapien
tacccatttatccttgtggaagcac

SEQ ID NO: 3581468 - DNA, 25 bp, Homo sapien
ctacccatttatccttgtggaagca

SEQ ID NO: 3581469 - DNA, 25 bp, Homo sapien
gcagttcgagaagatgaagtgagga

SEQ ID NO: 3581470 - DNA, 25 bp, Homo sapien
ttcgagaagatgaagtgaggaagcg

SEQ ID NO: 3581471 - DNA, 25 bp, Homo sapien
cagttcgagaagatgaagtgaggaa

SEQ ID NO: 3581472 - DNA, 25 bp, Homo sapien
gagaagatgaagtgaggaagcgcat

SEQ ID NO: 3581473 - DNA, 25 bp, Homo sapien
gcttttgtcacactcaacaggggaa

SEQ ID NO: 3581474 - DNA, 25 bp, Homo sapien
cacatagtttgttcacagtgctgta

SEQ ID NO: 3581475 - DNA, 25 bp, Homo sapien
agtgctgtaaacaggttccggaggc

SEQ ID NO: 3581476 - DNA, 25 bp, Homo sapien
gggagaagcaggcttatcacatagt

SEQ ID NO: 3581477 - DNA, 25 bp, Homo sapien
cttacagcagggttatgagagctca

SEQ ID NO: 3581478 - DNA, 25 bp, Homo sapien
gacattagttgtcaatcagctaccc

SEQ ID NO: 3581479 - DNA, 25 bp, Homo sapien
tttgcacccaacatgagtacctcac

SEQ ID NO: 3581480 - DNA, 25 bp, Homo sapien
aaccttgggcctctatgtaattaca

SEQ ID NO: 3581481 - DNA, 25 bp, Homo sapien
caaaactgagtacaataggtgttca

SEQ ID NO: 3581482 - DNA, 25 bp, Homo sapien
ttttcagtgctcattaagatgtctc

SEQ ID NO: 3581483 - DNA, 25 bp, Homo sapien
cacccggtctgctacatgcttttaa

SEQ ID NO: 3581484 - DNA, 25 bp, Homo sapien
gtacacatggcaccggctacctttt

SEQ ID NO: 3581485 - DNA, 25 bp, Homo sapien
taacttgtaagaggatagggaccaa

SEQ ID NO: 3581486 - DNA, 25 bp, Homo sapien
tcagtgtcatacagattatggccag

SEQ ID NO: 3581487 - DNA, 25 bp, Homo sapien
cattgtgttcatgatagtggttaac

SEQ ID NO: 3581488 - DNA, 25 bp, Homo sapien
tggttggcttctacagcggtccctc

SEQ ID NO: 3581489 - DNA, 25 bp, Homo sapien
catgtgctttggaattggtgagtac

SEQ ID NO: 3581490 - DNA, 25 bp, Homo sapien
ctggtgtagtcgtcgtcaacaagca

SEQ ID NO: 3581491 - DNA, 25 bp, Homo sapien
tcgtcgtcaacaagcatgtgctttg

SEQ ID NO: 3581492 - DNA, 25 bp, Homo sapien
tgctttggaattggtgagtaccttc

SEQ ID NO: 3581493 - DNA, 25 bp, Homo sapien
tgggtggcagggaggttttatattc

SEQ ID NO: 3581494 - DNA, 25 bp, Homo sapien
tggttttccattggtggagaataag

SEQ ID NO: 3581495 - DNA, 25 bp, Homo sapien
ttaggagatctcatcttcaaacagg

SEQ ID NO: 3581496 - DNA, 25 bp, Homo sapien
tgtgttctttaatattgctactgcc

SEQ ID NO: 3581497 - DNA, 25 bp, Homo sapien
tcaggtggaccataaggatcagtca

SEQ ID NO: 3581498 - DNA, 25 bp, Homo sapien
tactgcctcttcgtgtgttacttct

SEQ ID NO: 3581499 - DNA, 25 bp, Homo sapien
tataaatggtagtgggtttgccaac

SEQ ID NO: 3581500 - DNA, 25 bp, Homo sapien
tactttgcagcactactattcgtaa

SEQ ID NO: 3581501 - DNA, 25 bp, Homo sapien
taaatgtcccaaaagcattggactg

SEQ ID NO: 3581502 - DNA, 25 bp, Homo sapien
ggactgaattcctatagtacacatt

SEQ ID NO: 3581503 - DNA, 25 bp, Homo sapien
tgcatatggcattagagtccaattt

SEQ ID NO: 3581504 - DNA, 25 bp, Homo sapien
gtagtaacttgcttagtaataacca

SEQ ID NO: 3581505 - DNA, 25 bp, Homo sapien
aaaagtcatggaaggcagtgtataa

SEQ ID NO: 3581506 - DNA, 25 bp, Homo sapien
tataagcttcctatgatccagtaac

SEQ ID NO: 3581507 - DNA, 25 bp, Homo sapien
gaacatctactgttactggatacca

SEQ ID NO: 3581508 - DNA, 25 bp, Homo sapien
gcagctcctccatctataattttag

SEQ ID NO: 3581509 - DNA, 25 bp, Homo sapien
acctcctgcaatactgaagcctaaa

SEQ ID NO: 3581510 - DNA, 25 bp, Homo sapien
tagtctatctcctacttgcaacctt

SEQ ID NO: 3581511 - DNA, 25 bp, Homo sapien
tgtctccaggaatgtgttggttccc

SEQ ID NO: 3581512 - DNA, 25 bp, Homo sapien
gttgtagttgtttttagaaaatgca

SEQ ID NO: 3581513 - DNA, 25 bp, Homo sapien
aaggaacagaaaatggaaagccttg

SEQ ID NO: 3581514 - DNA, 25 bp, Homo sapien
cagaaaatggaaagccttgttttgt

SEQ ID NO: 3581515 - DNA, 25 bp, Homo sapien
ttttagaaaatgcagttagccacat

SEQ ID NO: 3581516 - DNA, 25 bp, Homo sapien
aacagagcaagtatgtagttgacat

SEQ ID NO: 3581517 - DNA, 25 bp, Homo sapien
ggtaagttcaacaaacagagcaagt

SEQ ID NO: 3581518 - DNA, 25 bp, Homo sapien
tcaacaaacagagcaagtatgtagt

SEQ ID NO: 3581519 - DNA, 25 bp, Homo sapien
acgggtaagttcaacaaacagagca

SEQ ID NO: 3581520 - DNA, 25 bp, Homo sapien
gggccagccaaacaaaaggactcag

SEQ ID NO: 3581521 - DNA, 25 bp, Homo sapien
ccagccaaacaaaaggactcagctg

SEQ ID NO: 3581522 - DNA, 25 bp, Homo sapien
ggccagccaaacaaaaggactcagc

SEQ ID NO: 3581523 - DNA, 25 bp, Homo sapien
tgggccagccaaacaaaaggactca

SEQ ID NO: 3581524 - DNA, 25 bp, Homo sapien
tcctacagcataaatcatgagcaat

SEQ ID NO: 3581525 - DNA, 25 bp, Homo sapien
acaccagtgatttgtgtcctggctc

SEQ ID NO: 3581526 - DNA, 25 bp, Homo sapien
cacacagggttaatagcatgagctc

SEQ ID NO: 3581527 - DNA, 25 bp, Homo sapien
cttctgccccttgaactataggtta

SEQ ID NO: 3581528 - DNA, 25 bp, Homo sapien
gagatctcggtagaggctacaggca

SEQ ID NO: 3581529 - DNA, 25 bp, Homo sapien
tccaccagagaatatcagcatagct

SEQ ID NO: 3581530 - DNA, 25 bp, Homo sapien
tgttaaatgtcctacaccaagttgc

SEQ ID NO: 3581531 - DNA, 25 bp, Homo sapien
gctctgatataacgcatgtgactgg

SEQ ID NO: 3581532 - DNA, 25 bp, Homo sapien
cttacaatgaccaaatctataactg

SEQ ID NO: 3581533 - DNA, 25 bp, Homo sapien
ggtgcttacaatgaccaaatctata

SEQ ID NO: 3581534 - DNA, 25 bp, Homo sapien
caattgattgcccacatgcagacac

SEQ ID NO: 3581535 - DNA, 25 bp, Homo sapien
ccccaggtgcttacaatgaccaaat

SEQ ID NO: 3581536 - DNA, 25 bp, Homo sapien
tacgactatcgtggcataaacttca

SEQ ID NO: 3581537 - DNA, 25 bp, Homo sapien
cagatggtttgtcactagtgtctgt

SEQ ID NO: 3581538 - DNA, 25 bp, Homo sapien
ttcagtcagatggtttgtcactagt

SEQ ID NO: 3581539 - DNA, 25 bp, Homo sapien
tcatacgactatcgtggcataaact

SEQ ID NO: 3581540 - DNA, 25 bp, Homo sapien
tactgtgggaaacctctgacacatc

SEQ ID NO: 3581541 - DNA, 25 bp, Homo sapien
caaaataggtcgtcttctacgcaca

SEQ ID NO: 3581542 - DNA, 25 bp, Homo sapien
tcagggcttccaccgctttactgtg

SEQ ID NO: 3581543 - DNA, 25 bp, Homo sapien
tctacgcacatacagccgaacgata

SEQ ID NO: 3581544 - DNA, 25 bp, Homo sapien
acaatggggacagaaattgctattt

SEQ ID NO: 3581545 - DNA, 25 bp, Homo sapien
cagcatcagtgattggtcttttggc

SEQ ID NO: 3581546 - DNA, 25 bp, Homo sapien
catcagtgattggtcttttggcact

SEQ ID NO: 3581547 - DNA, 25 bp, Homo sapien
cagtgattggtcttttggcactttc

SEQ ID NO: 3581548 - DNA, 25 bp, Homo sapien
tgtctctcaaacgttcaaccaaagc

SEQ ID NO: 3581549 - DNA, 25 bp, Homo sapien
ctccagccaggacactatattttgt

SEQ ID NO: 3581550 - DNA, 25 bp, Homo sapien
tctgtctctcaaacgttcaaccaaa

SEQ ID NO: 3581551 - DNA, 25 bp, Homo sapien
tctctcaaacgttcaaccaaagcta

SEQ ID NO: 3581552 - DNA, 25 bp, Homo sapien
caatctgattgctattcacttcccc

SEQ ID NO: 3581553 - DNA, 25 bp, Homo sapien
aatctgattgctattcacttcccca

SEQ ID NO: 3581554 - DNA, 25 bp, Homo sapien
tctgattgctattcacttccccagc

SEQ ID NO: 3581555 - DNA, 25 bp, Homo sapien
cacaatctgattgctattcacttcc

SEQ ID NO: 3581556 - DNA, 25 bp, Homo sapien
tttagaaaatgtgagcaccttgtga

SEQ ID NO: 3581557 - DNA, 25 bp, Homo sapien
ctggaatacagggtcaaatacctgt

SEQ ID NO: 3581558 - DNA, 25 bp, Homo sapien
catggagccccaaacaaatggtact

SEQ ID NO: 3581559 - DNA, 25 bp, Homo sapien
tacttacaccatacagacatggagc

SEQ ID NO: 3581560 - DNA, 25 bp, Homo sapien
gtcccaagtccaatcatgaggcctg

SEQ ID NO: 3581561 - DNA, 25 bp, Homo sapien
gagaaattcatctaaaccgccatgt

SEQ ID NO: 3581562 - DNA, 25 bp, Homo sapien
tgggtgtgacagtattaccggagac

SEQ ID NO: 3581563 - DNA, 25 bp, Homo sapien
tgcctttaggtattagaaagtccca

SEQ ID NO: 3581564 - DNA, 25 bp, Homo sapien
tatctgtgcctttagtctgcactgt

SEQ ID NO: 3581565 - DNA, 25 bp, Homo sapien
tttatctgtgcctttagtctgcact

SEQ ID NO: 3581566 - DNA, 25 bp, Homo sapien
ttatctgtgcctttagtctgcactg

SEQ ID NO: 3581567 - DNA, 25 bp, Homo sapien
ggtcatctccaatgtggggattatc

SEQ ID NO: 3581568 - DNA, 25 bp, Homo sapien
tccaatgtggggattatctgtcccc

SEQ ID NO: 3581569 - DNA, 25 bp, Homo sapien
gcagcacctcctggtataatcttcg

SEQ ID NO: 3581570 - DNA, 25 bp, Homo sapien
taataaatatgccagggtcatctcc

SEQ ID NO: 3581571 - DNA, 25 bp, Homo sapien
gatcgaaaattactaggctaccact

SEQ ID NO: 3581572 - DNA, 25 bp, Homo sapien
ttggccatgaagataataggacagc

SEQ ID NO: 3581573 - DNA, 25 bp, Homo sapien
ggctaccacttgaacattggccatg

SEQ ID NO: 3581574 - DNA, 25 bp, Homo sapien
taggacagcgaacaatataagtagg

SEQ ID NO: 3581575 - DNA, 25 bp, Homo sapien
tatgtacttctcattagctcccaac

SEQ ID NO: 3581576 - DNA, 25 bp, Homo sapien
cagtgtaagctggtaataatggagt

SEQ ID NO: 3581577 - DNA, 25 bp, Homo sapien
tggagtgagttcctcttttgtagtc

SEQ ID NO: 3581578 - DNA, 25 bp, Homo sapien
tgtcctgtaacagtatgtatccaaa

SEQ ID NO: 3581579 - DNA, 25 bp, Homo sapien
ttttactctttactgaaccatgaga

SEQ ID NO: 3581580 - DNA, 25 bp, Homo sapien
tttactctttactgaaccatgagaa

SEQ ID NO: 3581581 - DNA, 25 bp, Homo sapien
tctttactgaaccatgagaattttt

SEQ ID NO: 3581582 - DNA, 25 bp, Homo sapien
tactctttactgaaccatgagaatt

SEQ ID NO: 3581583 - DNA, 25 bp, Homo sapien
tgcgattaaccaactgtacttctga

SEQ ID NO: 3581584 - DNA, 25 bp, Homo sapien
taccaaccttgactaggcaagaggg

SEQ ID NO: 3581585 - DNA, 25 bp, Homo sapien
ttaggtgctactcccttggaacgga

SEQ ID NO: 3581586 - DNA, 25 bp, Homo sapien
gacttgtgaccctgaacaattctct

SEQ ID NO: 3581587 - DNA, 25 bp, Homo sapien
gttattcagtttcgggtatttcaca

SEQ ID NO: 3581588 - DNA, 25 bp, Homo sapien
gccaatatttgtggtcaatagcaaa

SEQ ID NO: 3581589 - DNA, 25 bp, Homo sapien
aaacacttccattgtatagtgcaca

SEQ ID NO: 3581590 - DNA, 25 bp, Homo sapien
tcagttgcaagctaaactaaccaca

SEQ ID NO: 3581591 - DNA, 25 bp, Homo sapien
gtagctattagttacaggcttctta

SEQ ID NO: 3581592 - DNA, 25 bp, Homo sapien
agtctgtagttttatattctatttg

SEQ ID NO: 3581593 - DNA, 25 bp, Homo sapien
ggcccattggcagtggtaaggattt

SEQ ID NO: 3581594 - DNA, 25 bp, Homo sapien
tgttttacacaactttatttgtaga

SEQ ID NO: 3581595 - DNA, 25 bp, Homo sapien
ccactgtgattctaaagaacctcat

SEQ ID NO: 3581596 - DNA, 25 bp, Homo sapien
tccactgtgattctaaagaacctca

SEQ ID NO: 3581597 - DNA, 25 bp, Homo sapien
ctcacaggttgtaagatccagaaat

SEQ ID NO: 3581598 - DNA, 25 bp, Homo sapien
aggttgtaagatccagaaattccac

SEQ ID NO: 3581599 - DNA, 25 bp, Homo sapien
aattcatattcaatttctgtcccat

SEQ ID NO: 3581600 - DNA, 25 bp, Homo sapien
tcaaattcatattcaatttctgtcc

SEQ ID NO: 3581601 - DNA, 25 bp, Homo sapien
catattcaatttctgtcccattgac

SEQ ID NO: 3581602 - DNA, 25 bp, Homo sapien
cctctccagtgtaatttcttcaaat

SEQ ID NO: 3581603 - DNA, 25 bp, Homo sapien
cttggtcatattttatgctactgat

SEQ ID NO: 3581604 - DNA, 25 bp, Homo sapien
cttcttcgctatctcatataatctc

SEQ ID NO: 3581605 - DNA, 25 bp, Homo sapien
ttcgctatctcatataatctctttt

SEQ ID NO: 3581606 - DNA, 25 bp, Homo sapien
tcttcgctatctcatataatctctt

SEQ ID NO: 3581607 - DNA, 25 bp, Homo sapien
ttcttcgctatctcatataatctct

SEQ ID NO: 3581608 - DNA, 25 bp, Homo sapien
ctctgttagattcaattaacttaga

SEQ ID NO: 3581609 - DNA, 25 bp, Homo sapien
tgttagattcaattaacttagaagt

SEQ ID NO: 3581610 - DNA, 25 bp, Homo sapien
ttctctgttagattcaattaactta

SEQ ID NO: 3581611 - DNA, 25 bp, Homo sapien
tttttctctgttagattcaattaac

SEQ ID NO: 3581612 - DNA, 25 bp, Homo sapien
tagagttgctcagttcttcaaggtg

SEQ ID NO: 3581613 - DNA, 25 bp, Homo sapien
cataggtccgaaacacgtcaaagct

SEQ ID NO: 3581614 - DNA, 25 bp, Homo sapien
aggtccgaaacacgtcaaagcttat

SEQ ID NO: 3581615 - DNA, 25 bp, Homo sapien
tacataggtccgaaacacgtcaaag

SEQ ID NO: 3581616 - DNA, 25 bp, Homo sapien
gttgatacataggtccgaaacacgt

SEQ ID NO: 3581617 - DNA, 25 bp, Homo sapien
tcgactcacacatcctaattcaggg

SEQ ID NO: 3581618 - DNA, 25 bp, Homo sapien
tgaaggtaggtcaaacaaacaggac

SEQ ID NO: 3581619 - DNA, 25 bp, Homo sapien
taaactgactactcatactatgtgc

SEQ ID NO: 3581620 - DNA, 25 bp, Homo sapien
ctatgtgcccagaaagtaattaggt

SEQ ID NO: 3581621 - DNA, 25 bp, Homo sapien
cacaaggatctgtgcgcagtaggat

SEQ ID NO: 3581622 - DNA, 25 bp, Homo sapien
tccaggagagtagtagaccaagggt

SEQ ID NO: 3581623 - DNA, 25 bp, Homo sapien
gaccaagggtcttgacaatgaagaa

SEQ ID NO: 3581624 - DNA, 25 bp, Homo sapien
tagcacagagacaggacacatttag

SEQ ID NO: 3581625 - DNA, 25 bp, Homo sapien
ataaggaattgtgtccaaagtatct

SEQ ID NO: 3581626 - DNA, 25 bp, Homo sapien
ggaattgtgtccaaagtatctgtgt

SEQ ID NO: 3581627 - DNA, 25 bp, Homo sapien
tgtgtccaaagtatctgtgttgaca

SEQ ID NO: 3581628 - DNA, 25 bp, Homo sapien
tgacaattataggagcaggactggc

SEQ ID NO: 3581629 - DNA, 25 bp, Homo sapien
tgaatgacacactaccccactgtgc

SEQ ID NO: 3581630 - DNA, 25 bp, Homo sapien
ccacggtaggctcttctgaatgaca

SEQ ID NO: 3581631 - DNA, 25 bp, Homo sapien
taacgccctggtgtgactgccaaag

SEQ ID NO: 3581632 - DNA, 25 bp, Homo sapien
tgctgctacaccaggctctctgaag

SEQ ID NO: 3581633 - DNA, 25 bp, Homo sapien
gcagtcccaagctattgtaattatc

SEQ ID NO: 3581634 - DNA, 25 bp, Homo sapien
ccaggtcgcttctggtgtagttccc

SEQ ID NO: 3581635 - DNA, 25 bp, Homo sapien
tcattccactttaccagcaatctgc

SEQ ID NO: 3581636 - DNA, 25 bp, Homo sapien
tttaccagcaatctgcaaatgttct

SEQ ID NO: 3581637 - DNA, 25 bp, Homo sapien
tcttctcttcaactccgtccttcat

SEQ ID NO: 3581638 - DNA, 25 bp, Homo sapien
atcttctcttcaactccgtccttca

SEQ ID NO: 3581639 - DNA, 25 bp, Homo sapien
tggcttaagcaaaatttggaatttg

SEQ ID NO: 3581640 - DNA, 25 bp, Homo sapien
ctggcttaagcaaaatttggaattt

SEQ ID NO: 3581641 - DNA, 25 bp, Homo sapien
tgttttgagcagcactatccaggta

SEQ ID NO: 3581642 - DNA, 25 bp, Homo sapien
ccaggtatcagccactttaaggttc

SEQ ID NO: 3581643 - DNA, 25 bp, Homo sapien
gcactatccaggtatcagccacttt

SEQ ID NO: 3581644 - DNA, 25 bp, Homo sapien
atatgaattttatatgggaggttcc

SEQ ID NO: 3581645 - DNA, 25 bp, Homo sapien
catagcttgttcacattgttttaag

SEQ ID NO: 3581646 - DNA, 25 bp, Homo sapien
ttctcagcccgagaaacacttggcc

SEQ ID NO: 3581647 - DNA, 25 bp, Homo sapien
tagtatcccacaaaagctgataatt

SEQ ID NO: 3581648 - DNA, 25 bp, Homo sapien
aataaatgcatgttgcatagcttgt

SEQ ID NO: 3581649 - DNA, 25 bp, Homo sapien
aacactgtaacacaataggaggtaa

SEQ ID NO: 3581650 - DNA, 25 bp, Homo sapien
actgtaacacaataggaggtaagtt

SEQ ID NO: 3581651 - DNA, 25 bp, Homo sapien
tgtaacactgtaacacaataggagg

SEQ ID NO: 3581652 - DNA, 25 bp, Homo sapien
gtaacactgtaacacaataggaggt

SEQ ID NO: 3581653 - DNA, 25 bp, Homo sapien
caatccttgaaagcattaaatggct

SEQ ID NO: 3581654 - DNA, 25 bp, Homo sapien
taagtttcagacaagtaggaggcat

SEQ ID NO: 3581655 - DNA, 25 bp, Homo sapien
agtatacggtctatttcaatccttg

SEQ ID NO: 3581656 - DNA, 25 bp, Homo sapien
tggatctctaattatcagtatacgg

SEQ ID NO: 3581657 - DNA, 25 bp, Homo sapien
ggcaggtacaatgctccccacaagt

SEQ ID NO: 3581658 - DNA, 25 bp, Homo sapien
tccctttgcccttggtgctcgtctt

SEQ ID NO: 3581659 - DNA, 25 bp, Homo sapien
tttgcccttggtgctcgtcttgtgg

SEQ ID NO: 3581660 - DNA, 25 bp, Homo sapien
ctgggctgaaccaaccatgtgggca

SEQ ID NO: 3581661 - DNA, 25 bp, Homo sapien
gtcccacaaggtcctgttgaagctg

SEQ ID NO: 3581662 - DNA, 25 bp, Homo sapien
ctgtcccacaaggtcctgttgaagc

SEQ ID NO: 3581663 - DNA, 25 bp, Homo sapien
gtcctgtttgaagctgggccccctg

SEQ ID NO: 3581664 - DNA, 25 bp, Homo sapien
ctgtttgaagctgggccccctggtc

SEQ ID NO: 3581665 - DNA, 25 bp, Homo sapien
aggagggcatggtctgagaactgta

SEQ ID NO: 3581666 - DNA, 25 bp, Homo sapien
gaggagggcatggtctgagaactgt

SEQ ID NO: 3581667 - DNA, 25 bp, Homo sapien
tgacggcatccatcccatcggaccc

SEQ ID NO: 3581668 - DNA, 25 bp, Homo sapien
tgttgcttggtgaggtatgcattca

SEQ ID NO: 3581669 - DNA, 25 bp, Homo sapien
cctgatcagggtgggcgcactcctg

SEQ ID NO: 3581670 - DNA, 25 bp, Homo sapien
cagccacaagcacagtgggcatccc

SEQ ID NO: 3581671 - DNA, 25 bp, Homo sapien
tttcttccagccagttgtaaaagtc

SEQ ID NO: 3581672 - DNA, 25 bp, Homo sapien
cactgatgcctactctttcctttgg

SEQ ID NO: 3581673 - DNA, 25 bp, Homo sapien
tataagcagtgcatcgtgggagcag

SEQ ID NO: 3581674 - DNA, 25 bp, Homo sapien
tccaccgtggattcctcagtatctt

SEQ ID NO: 3581675 - DNA, 25 bp, Homo sapien
agtataggcctgatttttgcctgag

SEQ ID NO: 3581676 - DNA, 25 bp, Homo sapien
aggtgcttattgcaagggctgagat

SEQ ID NO: 3581677 - DNA, 25 bp, Homo sapien
tcagtggattgaccaggtgctgggg

SEQ ID NO: 3581678 - DNA, 25 bp, Homo sapien
tgcttattgcaagggctgagatcat

SEQ ID NO: 3581679 - DNA, 25 bp, Homo sapien
tcttatccttgttaatagcctctga

SEQ ID NO: 3581680 - DNA, 25 bp, Homo sapien
tccttgtatcttcttatccttgtta

SEQ ID NO: 3581681 - DNA, 25 bp, Homo sapien
tccacaacagaagtaagatcctaga

SEQ ID NO: 3581682 - DNA, 25 bp, Homo sapien
ccctgttcactgacttaaataagaa

SEQ ID NO: 3581683 - DNA, 25 bp, Homo sapien
aattttaagacggtgatctctcctg

SEQ ID NO: 3581684 - DNA, 25 bp, Homo sapien
tacttctatcaagctgaagggatgg

SEQ ID NO: 3581685 - DNA, 25 bp, Homo sapien
aagtagaccgtgttcatcatttcca

SEQ ID NO: 3581686 - DNA, 25 bp, Homo sapien
gagggttacgggctgatcatctaaa

SEQ ID NO: 3581687 - DNA, 25 bp, Homo sapien
taaacattgtatctccagggcctgg

SEQ ID NO: 3581688 - DNA, 25 bp, Homo sapien
tatgtgctgcaatgactccagaagc

SEQ ID NO: 3581689 - DNA, 25 bp, Homo sapien
tatataccttgagtccaatgggagc

SEQ ID NO: 3581690 - DNA, 25 bp, Homo sapien
taagcgaaggactcagaatagcacg

SEQ ID NO: 3581691 - DNA, 25 bp, Homo sapien
agatacatggcactctaggatcact

SEQ ID NO: 3581692 - DNA, 25 bp, Homo sapien
ggcactctaggatcactttccttct

SEQ ID NO: 3581693 - DNA, 25 bp, Homo sapien
acatggcactctaggatcactttcc

SEQ ID NO: 3581694 - DNA, 25 bp, Homo sapien
tccttctgcctatggggcatttttt

SEQ ID NO: 3581695 - DNA, 25 bp, Homo sapien
ccgatagcctgtggtagaatgacat

SEQ ID NO: 3581696 - DNA, 25 bp, Homo sapien
tattcagggtgccaatgagctcgga

SEQ ID NO: 3581697 - DNA, 25 bp, Homo sapien
tgaagaactaggaggagacaacagc

SEQ ID NO: 3581698 - DNA, 25 bp, Homo sapien
agaatgacatctagagcccaggctt

SEQ ID NO: 3581699 - DNA, 25 bp, Homo sapien
gctggctgggaaccttcaatttcat

SEQ ID NO: 3581700 - DNA, 25 bp, Homo sapien
gagggcagctcagtgaacctttcct

SEQ ID NO: 3581701 - DNA, 25 bp, Homo sapien
gaatatgattatccctgatgagggc

SEQ ID NO: 3581702 - DNA, 25 bp, Homo sapien
catacttagtaaaatccctgcaggg

SEQ ID NO: 3581703 - DNA, 25 bp, Homo sapien
aagtagcaattaatgcaaccactgg

SEQ ID NO: 3581704 - DNA, 25 bp, Homo sapien
gtagcaattaatgcaaccactggtg

SEQ ID NO: 3581705 - DNA, 25 bp, Homo sapien
catcctgttgggtgacttttttgtt

SEQ ID NO: 3581706 - DNA, 25 bp, Homo sapien
ttcaaagtagcaattaatgcaacca

SEQ ID NO: 3581707 - DNA, 25 bp, Homo sapien
catggacaaacacctgtcctctctg

SEQ ID NO: 3581708 - DNA, 25 bp, Homo sapien
tgctgcttgattcaccttccaggtg

SEQ ID NO: 3581709 - DNA, 25 bp, Homo sapien
tctctgtcaccacagctaggcagac

SEQ ID NO: 3581710 - DNA, 25 bp, Homo sapien
cagggctgcgttcagcatggacaaa

SEQ ID NO: 3581711 - DNA, 25 bp, Homo sapien
tccatcctgggctttagaggccaag

SEQ ID NO: 3581712 - DNA, 25 bp, Homo sapien
gctgtgattagctggttagccaaac

SEQ ID NO: 3581713 - DNA, 25 bp, Homo sapien
aatcctggaagctagagagagcatg

SEQ ID NO: 3581714 - DNA, 25 bp, Homo sapien
cttgaggacattggagatctactga

SEQ ID NO: 3581715 - DNA, 25 bp, Homo sapien
gaacctgcgacccagcttcttagca

SEQ ID NO: 3581716 - DNA, 25 bp, Homo sapien
tagcataccagatagaggcaaacat

SEQ ID NO: 3581717 - DNA, 25 bp, Homo sapien
ctctgatttcgccttcctggcattg

SEQ ID NO: 3581718 - DNA, 25 bp, Homo sapien
tggcattgtgcacgaacctgcgacc

SEQ ID NO: 3581719 - DNA, 25 bp, Homo sapien
cccctgggataccatagtcagttca

SEQ ID NO: 3581720 - DNA, 25 bp, Homo sapien
gatcctaacgtcaagtgtcctgccc

SEQ ID NO: 3581721 - DNA, 25 bp, Homo sapien
gcatccttgttgctaccctgggctg

SEQ ID NO: 3581722 - DNA, 25 bp, Homo sapien
tattgagtcccatacacccctggga

SEQ ID NO: 3581723 - DNA, 25 bp, Homo sapien
aatccggtggccatttttgatgaag

SEQ ID NO: 3581724 - DNA, 25 bp, Homo sapien
tatttttgccataccatccctttgg

SEQ ID NO: 3581725 - DNA, 25 bp, Homo sapien
ggtattctagctatctcaacaacag

SEQ ID NO: 3581726 - DNA, 25 bp, Homo sapien
ccatcagttgtcacatctctgggta

SEQ ID NO: 3581727 - DNA, 25 bp, Homo sapien
gaagcaatctaagagcaataccatg

SEQ ID NO: 3581728 - DNA, 25 bp, Homo sapien
cataagctactgtgggcaatctggc

SEQ ID NO: 3581729 - DNA, 25 bp, Homo sapien
taagaagggactgtttgaactcaca

SEQ ID NO: 3581730 - DNA, 25 bp, Homo sapien
gcagatcttgtaagcctcataagct

SEQ ID NO: 3581731 - DNA, 25 bp, Homo sapien
ttcttactacccatggaactcagga

SEQ ID NO: 3581732 - DNA, 25 bp, Homo sapien
tgcctaaaatatgagccagcaagtc

SEQ ID NO: 3581733 - DNA, 25 bp, Homo sapien
tgtagaatagaacaatcgctttggg

SEQ ID NO: 3581734 - DNA, 25 bp, Homo sapien
gacaaatctccaaataatccagctg

SEQ ID NO: 3581735 - DNA, 25 bp, Homo sapien
gtactatacacagagttagctcagg

SEQ ID NO: 3581736 - DNA, 25 bp, Homo sapien
tatgctaaccatttctctagtgctg

SEQ ID NO: 3581737 - DNA, 25 bp, Homo sapien
taagtctcagagtagcctaattcac

SEQ ID NO: 3581738 - DNA, 25 bp, Homo sapien
ggtggtgccctgttcttagcttttc

SEQ ID NO: 3581739 - DNA, 25 bp, Homo sapien
gtattcctcatgggatgtatcctct

SEQ ID NO: 3581740 - DNA, 25 bp, Homo sapien
agtattcctcatgggatgtatcctc

SEQ ID NO: 3581741 - DNA, 25 bp, Homo sapien
tattcctcatgggatgtatcctctg

SEQ ID NO: 3581742 - DNA, 25 bp, Homo sapien
attcctcatgggatgtatcctctga

SEQ ID NO: 3581743 - DNA, 25 bp, Homo sapien
tctggaaaccacaattggcagacag

SEQ ID NO: 3581744 - DNA, 25 bp, Homo sapien
tgttgtctggaaaccacaattggca

SEQ ID NO: 3581745 - DNA, 25 bp, Homo sapien
ctaatactcttgttgtctggaaacc

SEQ ID NO: 3581746 - DNA, 25 bp, Homo sapien
ccacaattggcagacagtgcctgag

SEQ ID NO: 3581747 - DNA, 25 bp, Homo sapien
aaagaatgcacattcatcatagaga

SEQ ID NO: 3581748 - DNA, 25 bp, Homo sapien
agaatgcacattcatcatagagatt

SEQ ID NO: 3581749 - DNA, 25 bp, Homo sapien
aaaagaatgcacattcatcatagag

SEQ ID NO: 3581750 - DNA, 25 bp, Homo sapien
aagaatgcacattcatcatagagat

SEQ ID NO: 3581751 - DNA, 25 bp, Homo sapien
tcagttatggctgaaatctgacagc

SEQ ID NO: 3581752 - DNA, 25 bp, Homo sapien
tgacagcctttagctctggaatact

SEQ ID NO: 3581753 - DNA, 25 bp, Homo sapien
tctttctgttctggtctggtcagtt

SEQ ID NO: 3581754 - DNA, 25 bp, Homo sapien
tctggtctggtcagttatggctgaa

SEQ ID NO: 3581755 - DNA, 25 bp, Homo sapien
aatacactttccctggtggtgtggc

SEQ ID NO: 3581756 - DNA, 25 bp, Homo sapien
cacatttcaatcttttgactttatc

SEQ ID NO: 3581757 - DNA, 25 bp, Homo sapien
gctcctttcccaagatccacattca

SEQ ID NO: 3581758 - DNA, 25 bp, Homo sapien
ggtgtggcccggtcattgattaagc

SEQ ID NO: 3581759 - DNA, 25 bp, Homo sapien
tatcatccagctgattactactgac

SEQ ID NO: 3581760 - DNA, 25 bp, Homo sapien
tactgactcattgggtagttttact

SEQ ID NO: 3581761 - DNA, 25 bp, Homo sapien
ggtggatttatcaggtcagattcaa

SEQ ID NO: 3581762 - DNA, 25 bp, Homo sapien
gacatggtgtatgtccatcagcttg

SEQ ID NO: 3581763 - DNA, 25 bp, Homo sapien
caccatcgtgaacctcaaagttaat

SEQ ID NO: 3581764 - DNA, 25 bp, Homo sapien
ccatcgtgaacctcaaagttaatta

SEQ ID NO: 3581765 - DNA, 25 bp, Homo sapien
atcgtgaacctcaaagttaattatc

SEQ ID NO: 3581766 - DNA, 25 bp, Homo sapien
catcgtgaacctcaaagttaattat

SEQ ID NO: 3581767 - DNA, 25 bp, Homo sapien
tctgtggccaagctaccctcatttc

SEQ ID NO: 3581768 - DNA, 25 bp, Homo sapien
tgtttcttaggaccaagcttcttgg

SEQ ID NO: 3581769 - DNA, 25 bp, Homo sapien
ctttccatagagtgtgccacagaca

SEQ ID NO: 3581770 - DNA, 25 bp, Homo sapien
tcctccagtggaagggtagtctgct

SEQ ID NO: 3581771 - DNA, 25 bp, Homo sapien
ctggtaagttaaaatgatagatggt

SEQ ID NO: 3581772 - DNA, 25 bp, Homo sapien
tggtaagttaaaatgatagatggtc

SEQ ID NO: 3581773 - DNA, 25 bp, Homo sapien
tgtgttgactccatgttttagcagc

SEQ ID NO: 3581774 - DNA, 25 bp, Homo sapien
taaaaagtcaatgtgttgactccat

SEQ ID NO: 3581775 - DNA, 25 bp, Homo sapien
gactccatgttttagcagcaacatc

SEQ ID NO: 3581776 - DNA, 25 bp, Homo sapien
gcaacatctataattgactctaaaa

SEQ ID NO: 3581777 - DNA, 25 bp, Homo sapien
gaagtatgatgcgtgcctcggaagc

SEQ ID NO: 3581778 - DNA, 25 bp, Homo sapien
tcacaactgaagtatgatgcgtgcc

SEQ ID NO: 3581779 - DNA, 25 bp, Homo sapien
tatgatgcgtgcctcggaagctctc

SEQ ID NO: 3581780 - DNA, 25 bp, Homo sapien
taacagatctcacaactgaagtatg

SEQ ID NO: 3581781 - DNA, 25 bp, Homo sapien
ccaaaattggccacaaactctaaca

SEQ ID NO: 3581782 - DNA, 25 bp, Homo sapien
tggccacaaactctaacatactcag

SEQ ID NO: 3581783 - DNA, 25 bp, Homo sapien
cacaaactctaacatactcagtgtt

SEQ ID NO: 3581784 - DNA, 25 bp, Homo sapien
tgtgacccaaaattggccacaaact

SEQ ID NO: 3581785 - DNA, 25 bp, Homo sapien
ccaggatgatcatctcagctacttc

SEQ ID NO: 3581786 - DNA, 25 bp, Homo sapien
gtttcttcctcaagactagatgctt

SEQ ID NO: 3581787 - DNA, 25 bp, Homo sapien
gactagatgcttccaggatgatcat

SEQ ID NO: 3581788 - DNA, 25 bp, Homo sapien
aggatgatcatctcagctacttcca

SEQ ID NO: 3581789 - DNA, 25 bp, Homo sapien
aaacatctgctatttggtcaacacc

SEQ ID NO: 3581790 - DNA, 25 bp, Homo sapien
cccaaagcccatatatggtggtggt

SEQ ID NO: 3581791 - DNA, 25 bp, Homo sapien
gaagctccaagctactaagggctaa

SEQ ID NO: 3581792 - DNA, 25 bp, Homo sapien
tgcttcatgttatcctcggtaggta

SEQ ID NO: 3581793 - DNA, 25 bp, Homo sapien
gcctcttacttcgtgggttagtcga

SEQ ID NO: 3581794 - DNA, 25 bp, Homo sapien
cttcagaggagaaatatgagactgc

SEQ ID NO: 3581795 - DNA, 25 bp, Homo sapien
ggaatgatcatgtggagcgtcctca

SEQ ID NO: 3581796 - DNA, 25 bp, Homo sapien
tgatacatgcacgagttctgggcct

SEQ ID NO: 3581797 - DNA, 25 bp, Homo sapien
ctctcttggatgtccacaggagtca

SEQ ID NO: 3581798 - DNA, 25 bp, Homo sapien
tcaggaacattacccttaggtgatt

SEQ ID NO: 3581799 - DNA, 25 bp, Homo sapien
cattgaaggctcatatctgcatact

SEQ ID NO: 3581800 - DNA, 25 bp, Homo sapien
aacattacccttaggtgattgaagc

SEQ ID NO: 3581801 - DNA, 25 bp, Homo sapien
gagtattgtctaaaacatgttttct

SEQ ID NO: 3581802 - DNA, 25 bp, Homo sapien
tacagtccttgaattttttgtccat

SEQ ID NO: 3581803 - DNA, 25 bp, Homo sapien
tttgtagcagctaggtgctgccacc

SEQ ID NO: 3581804 - DNA, 25 bp, Homo sapien
tttgtccatacacatgagtattgtc

SEQ ID NO: 3581805 - DNA, 25 bp, Homo sapien
cttctttagtgccactcatatggtt

SEQ ID NO: 3581806 - DNA, 25 bp, Homo sapien
catgtcagtctgcttcctgtttgcc

SEQ ID NO: 3581807 - DNA, 25 bp, Homo sapien
gattgtgagagtgacccaccatgcc

SEQ ID NO: 3581808 - DNA, 25 bp, Homo sapien
ctttagtgccactcatatggtttgg

SEQ ID NO: 3581809 - DNA, 25 bp, Homo sapien
cacagtccatgagtgctcccaattg

SEQ ID NO: 3581810 - DNA, 25 bp, Homo sapien
cagtccatgagtgctcccaattgct

SEQ ID NO: 3581811 - DNA, 25 bp, Homo sapien
tccatgagtgctcccaattgctcac

SEQ ID NO: 3581812 - DNA, 25 bp, Homo sapien
cacacagtccatgagtgctcccaat

SEQ ID NO: 3581813 - DNA, 25 bp, Homo sapien
gccaaattccgttcagatgtgtata

SEQ ID NO: 3581814 - DNA, 25 bp, Homo sapien
cagattacatcccttgtgtgcagca

SEQ ID NO: 3581815 - DNA, 25 bp, Homo sapien
catttccatgacttggtgaaggcta

SEQ ID NO: 3581816 - DNA, 25 bp, Homo sapien
gctctcagggcatagtccacctacg

SEQ ID NO: 3581817 - DNA, 25 bp, Homo sapien
catcaacctccaaaatagttgggac

SEQ ID NO: 3581818 - DNA, 25 bp, Homo sapien
agtggtacgaacatggctccctgct

SEQ ID NO: 3581819 - DNA, 25 bp, Homo sapien
gtggtacgaacatggctccctgctg

SEQ ID NO: 3581820 - DNA, 25 bp, Homo sapien
ctgcatcaacctccaaaatagttgg

SEQ ID NO: 3581821 - DNA, 25 bp, Homo sapien
ctctgtctcctcgtattttgaaaga

SEQ ID NO: 3581822 - DNA, 25 bp, Homo sapien
ctagctgcgagtaaaaggcagcaag

SEQ ID NO: 3581823 - DNA, 25 bp, Homo sapien
gctgcgagtaaaaggcagcaagcag

SEQ ID NO: 3581824 - DNA, 25 bp, Homo sapien
gctgctgtactctaattcagctctg

SEQ ID NO: 3581825 - DNA, 25 bp, Homo sapien
taacgaccatactgtcatactccat

SEQ ID NO: 3581826 - DNA, 25 bp, Homo sapien
ttaacgaccatactgtcatactcca

SEQ ID NO: 3581827 - DNA, 25 bp, Homo sapien
cttaacgaccatactgtcatactcc

SEQ ID NO: 3581828 - DNA, 25 bp, Homo sapien
gggtacacagttggaacctcacgaa

SEQ ID NO: 3581829 - DNA, 25 bp, Homo sapien
gaggcagttgggctgatcgagaaca

SEQ ID NO: 3581830 - DNA, 25 bp, Homo sapien
ggaacctcacgaatttctaaatgca

SEQ ID NO: 3581831 - DNA, 25 bp, Homo sapien
tgttgaacaactctgtcctgcattg

SEQ ID NO: 3581832 - DNA, 25 bp, Homo sapien
actgtgtcataggaatagcgcaagg

SEQ ID NO: 3581833 - DNA, 25 bp, Homo sapien
agatcagcatcagtagtaactgtgt

SEQ ID NO: 3581834 - DNA, 25 bp, Homo sapien
ccaagtgggctgctggggattttaa

SEQ ID NO: 3581835 - DNA, 25 bp, Homo sapien
ctgggcaaagcatccaagtgggctg

SEQ ID NO: 3581836 - DNA, 25 bp, Homo sapien
atttctcctgaacaagctgcttccg

SEQ ID NO: 3581837 - DNA, 25 bp, Homo sapien
ggattaccaagtggccgctccattt

SEQ ID NO: 3581838 - DNA, 25 bp, Homo sapien
aattgggctggattaccaagtggcc

SEQ ID NO: 3581839 - DNA, 25 bp, Homo sapien
tggaaaccataattgggctggatta

SEQ ID NO: 3581840 - DNA, 25 bp, Homo sapien
caggtggttaagtagcaggacaaac

SEQ ID NO: 3581841 - DNA, 25 bp, Homo sapien
cctgataaatgcctgaaagaactga

SEQ ID NO: 3581842 - DNA, 25 bp, Homo sapien
tagctctgctgctagacagtgaaca

SEQ ID NO: 3581843 - DNA, 25 bp, Homo sapien
gctgcttgggatctaagggagacaa

SEQ ID NO: 3581844 - DNA, 25 bp, Homo sapien
aagaacctctattggcacttctggg

SEQ ID NO: 3581845 - DNA, 25 bp, Homo sapien
tgaggaccactgataaaatctgaga

SEQ ID NO: 3581846 - DNA, 25 bp, Homo sapien
cagcaaattagagtgttggtcaaca

SEQ ID NO: 3581847 - DNA, 25 bp, Homo sapien
tctgggatacccaatctgaggacca

SEQ ID NO: 3581848 - DNA, 25 bp, Homo sapien
cctgggttgctcaatgccaatgctc

SEQ ID NO: 3581849 - DNA, 25 bp, Homo sapien
tactaagactaaaacccaatgctcc

SEQ ID NO: 3581850 - DNA, 25 bp, Homo sapien
cctccagactgacaatagaatttcc

SEQ ID NO: 3581851 - DNA, 25 bp, Homo sapien
tagaccatttacttccagggcattg

SEQ ID NO: 3581852 - DNA, 25 bp, Homo sapien
tgctgggaccccgatgtagctctgg

SEQ ID NO: 3581853 - DNA, 25 bp, Homo sapien
tatagtactcacaagccacaccatg

SEQ ID NO: 3581854 - DNA, 25 bp, Homo sapien
taaacagaagcctccttgagacaaa

SEQ ID NO: 3581855 - DNA, 25 bp, Homo sapien
ttaggtacctcatgcaaattcagtg

SEQ ID NO: 3581856 - DNA, 25 bp, Homo sapien
gctactcaatttctacagagcggca

SEQ ID NO: 3581857 - DNA, 25 bp, Homo sapien
tacccatcatcaataggtttgcagg

SEQ ID NO: 3581858 - DNA, 25 bp, Homo sapien
tccttaatctccttcgagccaagag

SEQ ID NO: 3581859 - DNA, 25 bp, Homo sapien
gcggcaaaagcctcaagagaatgca

SEQ ID NO: 3581860 - DNA, 25 bp, Homo sapien
aaataaacgtaatgggctacaccat

SEQ ID NO: 3581861 - DNA, 25 bp, Homo sapien
aaaatgatgaccaaactgtactttg

SEQ ID NO: 3581862 - DNA, 25 bp, Homo sapien
tgatgaccaaactgtactttgtttt

SEQ ID NO: 3581863 - DNA, 25 bp, Homo sapien
aatgatgaccaaactgtactttgtt

SEQ ID NO: 3581864 - DNA, 25 bp, Homo sapien
gtagaatattgatctgggcctcaga

SEQ ID NO: 3581865 - DNA, 25 bp, Homo sapien
catggcatgcatcgacaggttggaa

SEQ ID NO: 3581866 - DNA, 25 bp, Homo sapien
gaaacccagtcctgctagagagagg

SEQ ID NO: 3581867 - DNA, 25 bp, Homo sapien
gcctcagagtagaaagcaagactaa

SEQ ID NO: 3581868 - DNA, 25 bp, Homo sapien
tgtcccatttccttaattgtgaaag

SEQ ID NO: 3581869 - DNA, 25 bp, Homo sapien
ttgtgaaagagtatagttgaattta

SEQ ID NO: 3581870 - DNA, 25 bp, Homo sapien
cttaattgtgaaagagtatagttga

SEQ ID NO: 3581871 - DNA, 25 bp, Homo sapien
tcccatttccttaattgtgaaagag

SEQ ID NO: 3581872 - DNA, 25 bp, Homo sapien
tctgttaaagggacataagattatc

SEQ ID NO: 3581873 - DNA, 25 bp, Homo sapien
tattgtgttaggatcagttcaaact

SEQ ID NO: 3581874 - DNA, 25 bp, Homo sapien
cactcactaacgaagtcaccttagg

SEQ ID NO: 3581875 - DNA, 25 bp, Homo sapien
tctttaagtagtcattattgtcccc

SEQ ID NO: 3581876 - DNA, 25 bp, Homo sapien
gccaggtagggaatctgccatccag

SEQ ID NO: 3581877 - DNA, 25 bp, Homo sapien
taacagaacatctatgggttccact

SEQ ID NO: 3581878 - DNA, 25 bp, Homo sapien
catcaagttgcaactgcaggcctga

SEQ ID NO: 3581879 - DNA, 25 bp, Homo sapien
caaaactcatcatggaaatagcctc

SEQ ID NO: 3581880 - DNA, 25 bp, Homo sapien
gctcttcatgagcatagtttggtca

SEQ ID NO: 3581881 - DNA, 25 bp, Homo sapien
tcgtactgagccaacaggtagtgct

SEQ ID NO: 3581882 - DNA, 25 bp, Homo sapien
tttccaaataagcaatgttagagcc

SEQ ID NO: 3581883 - DNA, 25 bp, Homo sapien
agtttggtcatccagtaatactagg

SEQ ID NO: 3581884 - DNA, 25 bp, Homo sapien
ggaatacagtgtttgactttgagaa

SEQ ID NO: 3581885 - DNA, 25 bp, Homo sapien
gcttccacttaacgtaattataatg

SEQ ID NO: 3581886 - DNA, 25 bp, Homo sapien
attataatgtgttcccagatacaga

SEQ ID NO: 3581887 - DNA, 25 bp, Homo sapien
ttcttgcttccacttaacgtaatta

SEQ ID NO: 3581888 - DNA, 25 bp, Homo sapien
cacattaattagtcactaagccttg

SEQ ID NO: 3581889 - DNA, 25 bp, Homo sapien
gcattgaaacctttattgacctcac

SEQ ID NO: 3581890 - DNA, 25 bp, Homo sapien
acacctttaggcattctttgtgacc

SEQ ID NO: 3581891 - DNA, 25 bp, Homo sapien
ccttttgctctgtctcaaagcactt

SEQ ID NO: 3581892 - DNA, 25 bp, Homo sapien
tgctcgccgggcacatggagcgaca

SEQ ID NO: 3581893 - DNA, 25 bp, Homo sapien
tggtgcaagcaactttgcagtggca

SEQ ID NO: 3581894 - DNA, 25 bp, Homo sapien
acgataaagtgttgttggtgcaagc

SEQ ID NO: 3581895 - DNA, 25 bp, Homo sapien
tgcatccaaacatcaacgataaagt

SEQ ID NO: 3581896 - DNA, 25 bp, Homo sapien
accgagctgccgcttcgatcactgc

SEQ ID NO: 3581897 - DNA, 25 bp, Homo sapien
gagctgccgcttcgatcactgcccc

SEQ ID NO: 3581898 - DNA, 25 bp, Homo sapien
tgccgcttcgatcactgccccctgc

SEQ ID NO: 3581899 - DNA, 25 bp, Homo sapien
gccgcttcgatcactgccccctgca

SEQ ID NO: 3581900 - DNA, 25 bp, Homo sapien
tggccatcccggagccccggtggaa

SEQ ID NO: 3581901 - DNA, 25 bp, Homo sapien
cgcgggcaagtaccgagcctctcgg

SEQ ID NO: 3581902 - DNA, 25 bp, Homo sapien
cccggtggaagcaacgccgcgggca

SEQ ID NO: 3581903 - DNA, 25 bp, Homo sapien
cgccgtggccatcccggagccccgg

SEQ ID NO: 3581904 - DNA, 25 bp, Homo sapien
gcgtgtggggggagggacagaacca

SEQ ID NO: 3581905 - DNA, 25 bp, Homo sapien
tgtggggggagggacagaaccaaga

SEQ ID NO: 3581906 - DNA, 25 bp, Homo sapien
gaggcgtgtggggggagggacagaa

SEQ ID NO: 3581907 - DNA, 25 bp, Homo sapien
acgaggcgtgtggggggagggacag

SEQ ID NO: 3581908 - DNA, 25 bp, Homo sapien
tgctgcaatccagagtcactgtggg

SEQ ID NO: 3581909 - DNA, 25 bp, Homo sapien
gacgtgaccccgagactgcatttgg

SEQ ID NO: 3581910 - DNA, 25 bp, Homo sapien
cctttgggcgctcttggtgccacga

SEQ ID NO: 3581911 - DNA, 25 bp, Homo sapien
tacagccacccgagggtagaagacc

SEQ ID NO: 3581912 - DNA, 25 bp, Homo sapien
cttcctttaatacaaggactgtcaa

SEQ ID NO: 3581913 - DNA, 25 bp, Homo sapien
ttgtattacatgaatgctggtgctt

SEQ ID NO: 3581914 - DNA, 25 bp, Homo sapien
caaggactgtcaatctcaaatgtaa

SEQ ID NO: 3581915 - DNA, 25 bp, Homo sapien
cagtgtgtgagttagttgtattaca

SEQ ID NO: 3581916 - DNA, 25 bp, Homo sapien
gggctctcccatttggataccagga

SEQ ID NO: 3581917 - DNA, 25 bp, Homo sapien
gataccaggacaggaaatcatgtgt

SEQ ID NO: 3581918 - DNA, 25 bp, Homo sapien
cacctgacagggcaacatctgctct

SEQ ID NO: 3581919 - DNA, 25 bp, Homo sapien
tgagcacaccatataggctgccatt

SEQ ID NO: 3581920 - DNA, 25 bp, Homo sapien
ggcttcattaccaaatgttacaggt

SEQ ID NO: 3581921 - DNA, 25 bp, Homo sapien
cataaccatttagtaaattggcttc

SEQ ID NO: 3581922 - DNA, 25 bp, Homo sapien
cccataaccatttagtaaattggct

SEQ ID NO: 3581923 - DNA, 25 bp, Homo sapien
tgttacaggtttaccaatagtctgg

SEQ ID NO: 3581924 - DNA, 25 bp, Homo sapien
taacacaattctggcgttaccatca

SEQ ID NO: 3581925 - DNA, 25 bp, Homo sapien
tcaccctcatttggatccatatttc

SEQ ID NO: 3581926 - DNA, 25 bp, Homo sapien
tcttagtcttggtattgctgtttcc

SEQ ID NO: 3581927 - DNA, 25 bp, Homo sapien
cagcatcttctcctagacacagttt

SEQ ID NO: 3581928 - DNA, 25 bp, Homo sapien
ggccagagatatggatccaatttca

SEQ ID NO: 3581929 - DNA, 25 bp, Homo sapien
gttgattttggtatacggccagaga

SEQ ID NO: 3581930 - DNA, 25 bp, Homo sapien
gcctagaccgatatccagaagagtt

SEQ ID NO: 3581931 - DNA, 25 bp, Homo sapien
tcattcatctgcatatggtaatccg

SEQ ID NO: 3581932 - DNA, 25 bp, Homo sapien
cctcatcctcacatatgagaaactg

SEQ ID NO: 3581933 - DNA, 25 bp, Homo sapien
ttctggcagtcctcatcctcacata

SEQ ID NO: 3581934 - DNA, 25 bp, Homo sapien
cacatatgagaaactgcagtagcat

SEQ ID NO: 3581935 - DNA, 25 bp, Homo sapien
tggcagtcctcatcctcacatatga

SEQ ID NO: 3581936 - DNA, 25 bp, Homo sapien
tattactgatgagcaagatcttact

SEQ ID NO: 3581937 - DNA, 25 bp, Homo sapien
agagtgtaacgggattgtaacacaa

SEQ ID NO: 3581938 - DNA, 25 bp, Homo sapien
gctttttatgcattcagccattcta

SEQ ID NO: 3581939 - DNA, 25 bp, Homo sapien
tctgccttccttgtagtgaaagtga

SEQ ID NO: 3581940 - DNA, 25 bp, Homo sapien
tgaagccctaccatcaggcctggga

SEQ ID NO: 3581941 - DNA, 25 bp, Homo sapien
gtgggcaccatcgatagacagcagg

SEQ ID NO: 3581942 - DNA, 25 bp, Homo sapien
caggtgctgtcacaacccaactggg

SEQ ID NO: 3581943 - DNA, 25 bp, Homo sapien
ggagcaggtccctagtgaagcccta

SEQ ID NO: 3581944 - DNA, 25 bp, Homo sapien
ccagctgaggagtgaactcttgtca

SEQ ID NO: 3581945 - DNA, 25 bp, Homo sapien
aatgcaggatgctctgactgaagcc

SEQ ID NO: 3581946 - DNA, 25 bp, Homo sapien
tagcattaaactgggtcaggaggaa

SEQ ID NO: 3581947 - DNA, 25 bp, Homo sapien
tcccaagtgactccaatatgcaaag

SEQ ID NO: 3581948 - DNA, 25 bp, Homo sapien
tatgtcatctcttacgaatagctgc

SEQ ID NO: 3581949 - DNA, 25 bp, Homo sapien
aaaaagggcaagtgagagattagac

SEQ ID NO: 3581950 - DNA, 25 bp, Homo sapien
ggtttctgatggtttactgttctac

SEQ ID NO: 3581951 - DNA, 25 bp, Homo sapien
cctccaatgtgaacagtaaaaaaca

SEQ ID NO: 3581952 - DNA, 25 bp, Homo sapien
cccgagattttgcaatggaagagaa

SEQ ID NO: 3581953 - DNA, 25 bp, Homo sapien
acagaaaggttgtgcgtagtagtag

SEQ ID NO: 3581954 - DNA, 25 bp, Homo sapien
ggatctaaataaatggttcccgaga

SEQ ID NO: 3581955 - DNA, 25 bp, Homo sapien
gtagtaggaggatctaaataaatgg

SEQ ID NO: 3581956 - DNA, 25 bp, Homo sapien
gggactagagatgcacaccaacaca

SEQ ID NO: 3581957 - DNA, 25 bp, Homo sapien
cctcttgggttcaggtgatatccct

SEQ ID NO: 3581958 - DNA, 25 bp, Homo sapien
ttgggttcaggtgatatccctgcct

SEQ ID NO: 3581959 - DNA, 25 bp, Homo sapien
cacctcttgggttcaggtgatatcc

SEQ ID NO: 3581960 - DNA, 25 bp, Homo sapien
gataacttgtgtccctggttcatag

SEQ ID NO: 3581961 - DNA, 25 bp, Homo sapien
taacagaggtaatacagtgccagct

SEQ ID NO: 3581962 - DNA, 25 bp, Homo sapien
tgcctgctgctttaatggatgagac

SEQ ID NO: 3581963 - DNA, 25 bp, Homo sapien
ttttagggaggcctgaagtcaccat

SEQ ID NO: 3581964 - DNA, 25 bp, Homo sapien
cattgccaccatatttgcacccact

SEQ ID NO: 3581965 - DNA, 25 bp, Homo sapien
atgggtttttctgaacaatgttcga

SEQ ID NO: 3581966 - DNA, 25 bp, Homo sapien
cactgtattctttataagcttcaga

SEQ ID NO: 3581967 - DNA, 25 bp, Homo sapien
gaacaatgttcgatccacttcaagt

SEQ ID NO: 3581968 - DNA, 25 bp, Homo sapien
cagtgactcagaatggccctatgct

SEQ ID NO: 3581969 - DNA, 25 bp, Homo sapien
gctgtatccgtggaacacactgcta

SEQ ID NO: 3581970 - DNA, 25 bp, Homo sapien
gaaaaacccaagactgattgctcag

SEQ ID NO: 3581971 - DNA, 25 bp, Homo sapien
tgtagagcccaggaatgcatttctg

SEQ ID NO: 3581972 - DNA, 25 bp, Homo sapien
gcaactagttgtaatggccaggagc

SEQ ID NO: 3581973 - DNA, 25 bp, Homo sapien
tacaaaactataggttggaagggca

SEQ ID NO: 3581974 - DNA, 25 bp, Homo sapien
tgagtgccaaaaccccatgatatat

SEQ ID NO: 3581975 - DNA, 25 bp, Homo sapien
tgtcaatcactctaatggctgcaag

SEQ ID NO: 3581976 - DNA, 25 bp, Homo sapien
cagccaccgggtgacttatttcaga

SEQ ID NO: 3581977 - DNA, 25 bp, Homo sapien
tgagacatggttgctttgtcccgaa

SEQ ID NO: 3581978 - DNA, 25 bp, Homo sapien
tgcctacaaaacagagccagccttc

SEQ ID NO: 3581979 - DNA, 25 bp, Homo sapien
ggaaggaaagttggctctcccctgc

SEQ ID NO: 3581980 - DNA, 25 bp, Homo sapien
gttgctagagtgtaacaggttttct

SEQ ID NO: 3581981 - DNA, 25 bp, Homo sapien
catcaatctctgtcaactgcctcat

SEQ ID NO: 3581982 - DNA, 25 bp, Homo sapien
ccccaagatatttcctagagctact

SEQ ID NO: 3581983 - DNA, 25 bp, Homo sapien
ctcatcctctgccacaaccccaaga

SEQ ID NO: 3581984 - DNA, 25 bp, Homo sapien
ttagatgataacactactgagggct

SEQ ID NO: 3581985 - DNA, 25 bp, Homo sapien
gatgataacactactgagggctgta

SEQ ID NO: 3581986 - DNA, 25 bp, Homo sapien
aaaatctctgaaggcttcatggtga

SEQ ID NO: 3581987 - DNA, 25 bp, Homo sapien
tgtaaaaatctctgaaggcttcatg

SEQ ID NO: 3581988 - DNA, 25 bp, Homo sapien
gattaattgtactgtgaagcggtca

SEQ ID NO: 3581989 - DNA, 25 bp, Homo sapien
agcggtcaagtcctccagaatactg

SEQ ID NO: 3581990 - DNA, 25 bp, Homo sapien
tgtgaagcggtcaagtcctccagaa

SEQ ID NO: 3581991 - DNA, 25 bp, Homo sapien
attgtactgtgaagcggtcaagtcc

SEQ ID NO: 3581992 - DNA, 25 bp, Homo sapien
catgggctgacttctataataatcc

SEQ ID NO: 3581993 - DNA, 25 bp, Homo sapien
tgtaaccaccactcacgtcaataaa

SEQ ID NO: 3581994 - DNA, 25 bp, Homo sapien
cacagataaccacaggaaatgtatg

SEQ ID NO: 3581995 - DNA, 25 bp, Homo sapien
ttccttcaaaagtaagcatgggctg

SEQ ID NO: 3581996 - DNA, 25 bp, Homo sapien
aaaagattatgtggagctctttccc

SEQ ID NO: 3581997 - DNA, 25 bp, Homo sapien
caaagaagttccatgttagagaaga

SEQ ID NO: 3581998 - DNA, 25 bp, Homo sapien
tccaaaacaagggatatactagtgt

SEQ ID NO: 3581999 - DNA, 25 bp, Homo sapien
cagggtctggaaggacaagacaatt

SEQ ID NO: 3582000 - DNA, 25 bp, Homo sapien
caggttccatggagctaacatgtga

SEQ ID NO: 3582001 - DNA, 25 bp, Homo sapien
tcttcagccttgtaagaacccatgt

SEQ ID NO: 3582002 - DNA, 25 bp, Homo sapien
tctaaagagtagtaagtcaccgctc

SEQ ID NO: 3582003 - DNA, 25 bp, Homo sapien
gaccactcagtcaattcaagcagca

SEQ ID NO: 3582004 - DNA, 25 bp, Homo sapien
agtgcacagtaacatgcaaagaaca

SEQ ID NO: 3582005 - DNA, 25 bp, Homo sapien
gagtgcacagtaacatgcaaagaac

SEQ ID NO: 3582006 - DNA, 25 bp, Homo sapien
cttcacgttagtccggagtgcacag

SEQ ID NO: 3582007 - DNA, 25 bp, Homo sapien
acgttagtccggagtgcacagtaac

SEQ ID NO: 3582008 - DNA, 25 bp, Homo sapien
tgctactaaagagcatccgttccct

SEQ ID NO: 3582009 - DNA, 25 bp, Homo sapien
ataaggagcatatggaccggtattc

SEQ ID NO: 3582010 - DNA, 25 bp, Homo sapien
tctgactacaaaacgacatgtcttg

SEQ ID NO: 3582011 - DNA, 25 bp, Homo sapien
ggtattcagcttctcagcacagcgc

SEQ ID NO: 3582012 - DNA, 25 bp, Homo sapien
gattctctagattgtactacaggcc

SEQ ID NO: 3582013 - DNA, 25 bp, Homo sapien
tactgccttagagcatgggtcagca

SEQ ID NO: 3582014 - DNA, 25 bp, Homo sapien
aagtgattccagtgtccagctagga

SEQ ID NO: 3582015 - DNA, 25 bp, Homo sapien
ggcttgtaagccatacgatctgtca

SEQ ID NO: 3582016 - DNA, 25 bp, Homo sapien
tacgcccttccaagattgaaccaga

SEQ ID NO: 3582017 - DNA, 25 bp, Homo sapien
acaaccctcagggaatattatgaat

SEQ ID NO: 3582018 - DNA, 25 bp, Homo sapien
gaatgatacgggcctcacagaatga

SEQ ID NO: 3582019 - DNA, 25 bp, Homo sapien
cattattagtctgttacaaccctca

SEQ ID NO: 3582020 - DNA, 25 bp, Homo sapien
gaatgcagatatctcattgttacac

SEQ ID NO: 3582021 - DNA, 25 bp, Homo sapien
ttttagtggatgactagtattccat

SEQ ID NO: 3582022 - DNA, 25 bp, Homo sapien
tagtggctgtactaacatgtatttc

SEQ ID NO: 3582023 - DNA, 25 bp, Homo sapien
atatacctatcagtgtgtttgctgg

SEQ ID NO: 3582024 - DNA, 25 bp, Homo sapien
tagcagtgaagacatcacgtcctgg

SEQ ID NO: 3582025 - DNA, 25 bp, Homo sapien
caatgtacttgcatatagatgctca

SEQ ID NO: 3582026 - DNA, 25 bp, Homo sapien
tccatggttcaatctggataggttg

SEQ ID NO: 3582027 - DNA, 25 bp, Homo sapien
tctaattagactttgaacttcggtg

SEQ ID NO: 3582028 - DNA, 25 bp, Homo sapien
gccatcgtgcccgatcttgttaagt

SEQ ID NO: 3582029 - DNA, 25 bp, Homo sapien
tcgtgcccgatcttgttaagtttat

SEQ ID NO: 3582030 - DNA, 25 bp, Homo sapien
catcgtgcccgatcttgttaagttt

SEQ ID NO: 3582031 - DNA, 25 bp, Homo sapien
cgtgcccgatcttgttaagtttatc

SEQ ID NO: 3582032 - DNA, 25 bp, Homo sapien
ggtgaatgctgacagccctgtgcct

SEQ ID NO: 3582033 - DNA, 25 bp, Homo sapien
tccctttggcccaggatgggaccaa

SEQ ID NO: 3582034 - DNA, 25 bp, Homo sapien
tagtgctctacgtcactgtggccaa

SEQ ID NO: 3582035 - DNA, 25 bp, Homo sapien
gcctctccgttaagggcagtatcct

SEQ ID NO: 3582036 - DNA, 25 bp, Homo sapien
cataccagtgtagctcatgcctgac

SEQ ID NO: 3582037 - DNA, 25 bp, Homo sapien
tgagtctcagcatgcaaccatgatc

SEQ ID NO: 3582038 - DNA, 25 bp, Homo sapien
tgatcaacccagctcaatgcctgag

SEQ ID NO: 3582039 - DNA, 25 bp, Homo sapien
aaccatgatcctacatacaggccca

SEQ ID NO: 3582040 - DNA, 25 bp, Homo sapien
aggtgcatcccaccacacccaccta

SEQ ID NO: 3582041 - DNA, 25 bp, Homo sapien
ggtgcatcccaccacacccacctaa

SEQ ID NO: 3582042 - DNA, 25 bp, Homo sapien
tgccccaaactgtcttatgtgaggg

SEQ ID NO: 3582043 - DNA, 25 bp, Homo sapien
tttttgagttgccacatctgcccca

SEQ ID NO: 3582044 - DNA, 25 bp, Homo sapien
ttaacctggcactggaatgcaatgc

SEQ ID NO: 3582045 - DNA, 25 bp, Homo sapien
tacaaagtttctgggcttgggacaa

SEQ ID NO: 3582046 - DNA, 25 bp, Homo sapien
tctgttatccaacctggaaacacag

SEQ ID NO: 3582047 - DNA, 25 bp, Homo sapien
agccttgttgttagatctgttatcc

SEQ ID NO: 3582048 - DNA, 25 bp, Homo sapien
tataactcatgtgaaccaccccagt

SEQ ID NO: 3582049 - DNA, 25 bp, Homo sapien
tagtacaaactaccacctataactc

SEQ ID NO: 3582050 - DNA, 25 bp, Homo sapien
gactggccataagttctaaataaat

SEQ ID NO: 3582051 - DNA, 25 bp, Homo sapien
accatgactggccataagttctaaa

SEQ ID NO: 3582052 - DNA, 25 bp, Homo sapien
catgactggccataagttctaaata

SEQ ID NO: 3582053 - DNA, 25 bp, Homo sapien
caccatgactggccataagttctaa

SEQ ID NO: 3582054 - DNA, 25 bp, Homo sapien
ggaacacctcaatataacattggtg

SEQ ID NO: 3582055 - DNA, 25 bp, Homo sapien
caatataacattggtgtctgggtag

SEQ ID NO: 3582056 - DNA, 25 bp, Homo sapien
ggtaggaaagagtcctcaggtgatc

SEQ ID NO: 3582057 - DNA, 25 bp, Homo sapien
ccaaagctattgatgaaggaacacc

SEQ ID NO: 3582058 - DNA, 25 bp, Homo sapien
gcaagcaggtcttgacataggctct

SEQ ID NO: 3582059 - DNA, 25 bp, Homo sapien
gtccctgtgaagaccatgagcaagc

SEQ ID NO: 3582060 - DNA, 25 bp, Homo sapien
gcccaactgtgtcccatatagccaa

SEQ ID NO: 3582061 - DNA, 25 bp, Homo sapien
taggctctttcacaataatcaccag

SEQ ID NO: 3582062 - DNA, 25 bp, Homo sapien
gggacattgtagagagcaccttctg

SEQ ID NO: 3582063 - DNA, 25 bp, Homo sapien
cagggacattgtagagagcaccttc

SEQ ID NO: 3582064 - DNA, 25 bp, Homo sapien
acattgtagagagcaccttctgtgt

SEQ ID NO: 3582065 - DNA, 25 bp, Homo sapien
gcagggacattgtagagagcacctt

SEQ ID NO: 3582066 - DNA, 25 bp, Homo sapien
atttccgttaataaggttcactgtg

SEQ ID NO: 3582067 - DNA, 25 bp, Homo sapien
ccatcatgttcaaagagagatatat

SEQ ID NO: 3582068 - DNA, 25 bp, Homo sapien
aaatcaagatggcaaattttctgct

SEQ ID NO: 3582069 - DNA, 25 bp, Homo sapien
cacttgacgtatgatttgggttttc

SEQ ID NO: 3582070 - DNA, 25 bp, Homo sapien
gaaaagtaatcaagtcaccacaata

SEQ ID NO: 3582071 - DNA, 25 bp, Homo sapien
tgttgcttcagagataagggattaa

SEQ ID NO: 3582072 - DNA, 25 bp, Homo sapien
gcctttatgctatcactaaccggaa

SEQ ID NO: 3582073 - DNA, 25 bp, Homo sapien
gcaaagagcacacaacaggatcatt

SEQ ID NO: 3582074 - DNA, 25 bp, Homo sapien
taggggaacactgagcatgtgctga

SEQ ID NO: 3582075 - DNA, 25 bp, Homo sapien
gctttaaggagccactcaactaaat

SEQ ID NO: 3582076 - DNA, 25 bp, Homo sapien
ttaaggagccactcaactaaatgag

SEQ ID NO: 3582077 - DNA, 25 bp, Homo sapien
aaggacaaggataggggaacactga

SEQ ID NO: 3582078 - DNA, 25 bp, Homo sapien
ctcagcctctttttcatcatccttg

SEQ ID NO: 3582079 - DNA, 25 bp, Homo sapien
cttcctcagcctctttttcatcatc

SEQ ID NO: 3582080 - DNA, 25 bp, Homo sapien
tcagcctctttttcatcatccttga

SEQ ID NO: 3582081 - DNA, 25 bp, Homo sapien
tcctcagcctctttttcatcatcct

SEQ ID NO: 3582082 - DNA, 25 bp, Homo sapien
gcagagtcatgtgcatccccctcct

SEQ ID NO: 3582083 - DNA, 25 bp, Homo sapien
agcagagtcatgtgcatccccctcc

SEQ ID NO: 3582084 - DNA, 25 bp, Homo sapien
agtcatgtgcatccccctcctcagc

SEQ ID NO: 3582085 - DNA, 25 bp, Homo sapien
agagtcatgtgcatccccctcctca

SEQ ID NO: 3582086 - DNA, 25 bp, Homo sapien
aacttcacattagtctcatctttct

SEQ ID NO: 3582087 - DNA, 25 bp, Homo sapien
cctcagactccaacttcacattagt

SEQ ID NO: 3582088 - DNA, 25 bp, Homo sapien
gctcctcttctgacttattattcat

SEQ ID NO: 3582089 - DNA, 25 bp, Homo sapien
tcatctttcttcacggagctgctgc

SEQ ID NO: 3582090 - DNA, 25 bp, Homo sapien
actgcttgtttgttctgttcctttt

SEQ ID NO: 3582091 - DNA, 25 bp, Homo sapien
ctgcttgtttgttctgttccttttc

SEQ ID NO: 3582092 - DNA, 25 bp, Homo sapien
gcttgtttgttctgttccttttcaa

SEQ ID NO: 3582093 - DNA, 25 bp, Homo sapien
tgcttgtttgttctgttccttttca

SEQ ID NO: 3582094 - DNA, 25 bp, Homo sapien
acttagaagatccccgctgcccatt

SEQ ID NO: 3582095 - DNA, 25 bp, Homo sapien
agaagatccccgctgcccattctta

SEQ ID NO: 3582096 - DNA, 25 bp, Homo sapien
tggtcaactccttcttaattgcctg

SEQ ID NO: 3582097 - DNA, 25 bp, Homo sapien
gagtcatctgctttcaactttccag

SEQ ID NO: 3582098 - DNA, 25 bp, Homo sapien
taagtcgaaagaagagccatacatc

SEQ ID NO: 3582099 - DNA, 25 bp, Homo sapien
gaaagaagagccatacatctgtgct

SEQ ID NO: 3582100 - DNA, 25 bp, Homo sapien
aaagtcatagtctaagtcgaaagaa

SEQ ID NO: 3582101 - DNA, 25 bp, Homo sapien
catagtctaagtcgaaagaagagcc

SEQ ID NO: 3582102 - DNA, 25 bp, Homo sapien
taaggtttctcacacagctgaaaat

SEQ ID NO: 3582103 - DNA, 25 bp, Homo sapien
gatgataaggtttctcacacagctg

SEQ ID NO: 3582104 - DNA, 25 bp, Homo sapien
tgataaggtttctcacacagctgaa

SEQ ID NO: 3582105 - DNA, 25 bp, Homo sapien
tgatgataaggtttctcacacagct

SEQ ID NO: 3582106 - DNA, 25 bp, Homo sapien
gggatgtcgatttgccagccagaaa

SEQ ID NO: 3582107 - DNA, 25 bp, Homo sapien
cacgcatgctagctgctgtggcaag

SEQ ID NO: 3582108 - DNA, 25 bp, Homo sapien
taattgtcacgggacccttgggatg

SEQ ID NO: 3582109 - DNA, 25 bp, Homo sapien
gcttggctcacactactggcctcga

SEQ ID NO: 3582110 - DNA, 25 bp, Homo sapien
gtcagccctgccgtaagtgcatgca

SEQ ID NO: 3582111 - DNA, 25 bp, Homo sapien
taagttctcactgtaagccacggac

SEQ ID NO: 3582112 - DNA, 25 bp, Homo sapien
ccacggactctatgcacagttgaca

SEQ ID NO: 3582113 - DNA, 25 bp, Homo sapien
gagtaggtcgggaaaaagcaccata

SEQ ID NO: 3582114 - DNA, 25 bp, Homo sapien
ccatagcatttccaaggcggcacag

SEQ ID NO: 3582115 - DNA, 25 bp, Homo sapien
gactttgagccaaaagacctatagc

SEQ ID NO: 3582116 - DNA, 25 bp, Homo sapien
aattagccagcttaggtttacaggc

SEQ ID NO: 3582117 - DNA, 25 bp, Homo sapien
cccttggtgggaccgctatggccaa

SEQ ID NO: 3582118 - DNA, 25 bp, Homo sapien
tagacgcttaatgtcctgcaggaca

SEQ ID NO: 3582119 - DNA, 25 bp, Homo sapien
gctggtcttgcagtagactgcccaa

SEQ ID NO: 3582120 - DNA, 25 bp, Homo sapien
gacacccagctaaggacattgaggc

SEQ ID NO: 3582121 - DNA, 25 bp, Homo sapien
tgtaagctattggagttggaattac

SEQ ID NO: 3582122 - DNA, 25 bp, Homo sapien
gaagtgagctaaaactccagaaatg

SEQ ID NO: 3582123 - DNA, 25 bp, Homo sapien
tgtcttccttgttgggagggagtaa

SEQ ID NO: 3582124 - DNA, 25 bp, Homo sapien
gggcccagactcaagaccaagacta

SEQ ID NO: 3582125 - DNA, 25 bp, Homo sapien
caagactactgtctaccatctcagt

SEQ ID NO: 3582126 - DNA, 25 bp, Homo sapien
cagaatatgtggtacagatgcaggc

SEQ ID NO: 3582127 - DNA, 25 bp, Homo sapien
taaagtagcattaagggtgaccctc

SEQ ID NO: 3582128 - DNA, 25 bp, Homo sapien
cacacgaggtatgggaagtgagctc

SEQ ID NO: 3582129 - DNA, 25 bp, Homo sapien
ggagatgaaacctagcacacgaggt

SEQ ID NO: 3582130 - DNA, 25 bp, Homo sapien
tcacagacacagcccaaatagtgct

SEQ ID NO: 3582131 - DNA, 25 bp, Homo sapien
tgaaacatcaagagcagatattccc

SEQ ID NO: 3582132 - DNA, 25 bp, Homo sapien
gcccaaatagtgctttaccagtgta

SEQ ID NO: 3582133 - DNA, 25 bp, Homo sapien
gaagtttaatgtactcatagctcca

SEQ ID NO: 3582134 - DNA, 25 bp, Homo sapien
gctatagcttctgtatccactcttg

SEQ ID NO: 3582135 - DNA, 25 bp, Homo sapien
cctctttatctatgaaagttctagg

SEQ ID NO: 3582136 - DNA, 25 bp, Homo sapien
gataacttgctatagcttctgtatc

SEQ ID NO: 3582137 - DNA, 25 bp, Homo sapien
aagttctaggtagcaccttctttca

SEQ ID NO: 3582138 - DNA, 25 bp, Homo sapien
tacccaagtgttgtctgcagtcaga

SEQ ID NO: 3582139 - DNA, 25 bp, Homo sapien
ggtctaagcaactgagcctcacata

SEQ ID NO: 3582140 - DNA, 25 bp, Homo sapien
aaaaaattcaactggccctgctgga

SEQ ID NO: 3582141 - DNA, 25 bp, Homo sapien
taagaagggcagatacaaagcagct

SEQ ID NO: 3582142 - DNA, 25 bp, Homo sapien
tggcatagtactagacacaactgaa

SEQ ID NO: 3582143 - DNA, 25 bp, Homo sapien
aatagaaactaccagcctaagaggg

SEQ ID NO: 3582144 - DNA, 25 bp, Homo sapien
taccagtgtattagaggatcagaaa

SEQ ID NO: 3582145 - DNA, 25 bp, Homo sapien
gggttcaactccaagggaataatga

SEQ ID NO: 3582146 - DNA, 25 bp, Homo sapien
agtacagtggtggacaggcatccaa

SEQ ID NO: 3582147 - DNA, 25 bp, Homo sapien
gggcttccactgaacaattctgggc

SEQ ID NO: 3582148 - DNA, 25 bp, Homo sapien
gacaggcatccaagcaggggcttcc

SEQ ID NO: 3582149 - DNA, 25 bp, Homo sapien
ccactgaacaattctgggctgggca

SEQ ID NO: 3582150 - DNA, 25 bp, Homo sapien
tagaaatcagctccggcaaaacttc

SEQ ID NO: 3582151 - DNA, 25 bp, Homo sapien
tatcgttgcgatgagtgtaacacca

SEQ ID NO: 3582152 - DNA, 25 bp, Homo sapien
agtgccccgcacagttctatcgttg

SEQ ID NO: 3582153 - DNA, 25 bp, Homo sapien
tgtaacaccaagcaccagggaatca

SEQ ID NO: 3582154 - DNA, 25 bp, Homo sapien
ttgttgccttcctttcttactaaca

SEQ ID NO: 3582155 - DNA, 25 bp, Homo sapien
ccagaatagcggctttggataataa

SEQ ID NO: 3582156 - DNA, 25 bp, Homo sapien
gcggctttggataataaaatgctat

SEQ ID NO: 3582157 - DNA, 25 bp, Homo sapien
tgtcgttccagtgccagaatagcgg

SEQ ID NO: 3582158 - DNA, 25 bp, Homo sapien
tctaccaaatggctgtcgttccagt

SEQ ID NO: 3582159 - DNA, 25 bp, Homo sapien
gttccccatatacccagaacagcag

SEQ ID NO: 3582160 - DNA, 25 bp, Homo sapien
tgcaggcaggtcatggcaaaatgcc

SEQ ID NO: 3582161 - DNA, 25 bp, Homo sapien
tccaaactctccagaggtaagtaag

SEQ ID NO: 3582162 - DNA, 25 bp, Homo sapien
tgacatctgcaaagcttgttagctt

SEQ ID NO: 3582163 - DNA, 25 bp, Homo sapien
tctttctccggttttggcatcgtgg

SEQ ID NO: 3582164 - DNA, 25 bp, Homo sapien
catcagtaaagtcattaggtcttga

SEQ ID NO: 3582165 - DNA, 25 bp, Homo sapien
tgattttatattgcggtgtcttctc

SEQ ID NO: 3582166 - DNA, 25 bp, Homo sapien
gcaggtgcttattggtatacttcca

SEQ ID NO: 3582167 - DNA, 25 bp, Homo sapien
gcattgctcttaggacaagtccact

SEQ ID NO: 3582168 - DNA, 25 bp, Homo sapien
tgcacctctatcttggactgtcaga

SEQ ID NO: 3582169 - DNA, 25 bp, Homo sapien
ccactgaaaaggttgttgccagatg

SEQ ID NO: 3582170 - DNA, 25 bp, Homo sapien
gccagatgtatgctcccttgcaatg

SEQ ID NO: 3582171 - DNA, 25 bp, Homo sapien
tgtacaactccagctgatgaatgag

SEQ ID NO: 3582172 - DNA, 25 bp, Homo sapien
ggtgtgtgttattccccacactgtg

SEQ ID NO: 3582173 - DNA, 25 bp, Homo sapien
ggtcttaaatcccacatgcattagc

SEQ ID NO: 3582174 - DNA, 25 bp, Homo sapien
caatcatctaggtcttaaatcccac

SEQ ID NO: 3582175 - DNA, 25 bp, Homo sapien
tgccaaatccaatgtgtcctgacat

SEQ ID NO: 3582176 - DNA, 25 bp, Homo sapien
ctatttctgggatctacattctctt

SEQ ID NO: 3582177 - DNA, 25 bp, Homo sapien
tcctttccccagtggtagtcctagc

SEQ ID NO: 3582178 - DNA, 25 bp, Homo sapien
gccatacatgcaagggtctatttct

SEQ ID NO: 3582179 - DNA, 25 bp, Homo sapien
tgaagcctagtaagaaaagaaaaca

SEQ ID NO: 3582180 - DNA, 25 bp, Homo sapien
catgaagcctagtaagaaaagaaaa

SEQ ID NO: 3582181 - DNA, 25 bp, Homo sapien
ccatgaagcctagtaagaaaagaaa

SEQ ID NO: 3582182 - DNA, 25 bp, Homo sapien
ttctttattttgctcaatacatgaa

SEQ ID NO: 3582183 - DNA, 25 bp, Homo sapien
agttgtcgtctcatcagtttcattt

SEQ ID NO: 3582184 - DNA, 25 bp, Homo sapien
gttgtcgtctcatcagtttcatttt

SEQ ID NO: 3582185 - DNA, 25 bp, Homo sapien
ttattttgctcaatacatgaagcat

SEQ ID NO: 3582186 - DNA, 25 bp, Homo sapien
tggcaacagatacaccaagatgcag

SEQ ID NO: 3582187 - DNA, 25 bp, Homo sapien
ttggcaacagatacaccaagatgca

SEQ ID NO: 3582188 - DNA, 25 bp, Homo sapien
gcaacagatacaccaagatgcagtt

SEQ ID NO: 3582189 - DNA, 25 bp, Homo sapien
tttggcaacagatacaccaagatgc

SEQ ID NO: 3582190 - DNA, 25 bp, Homo sapien
aaccggcacggtaatagcatgcact

SEQ ID NO: 3582191 - DNA, 25 bp, Homo sapien
ggcacggtaatagcatgcactccat

SEQ ID NO: 3582192 - DNA, 25 bp, Homo sapien
taaaccggcacggtaatagcatgca

SEQ ID NO: 3582193 - DNA, 25 bp, Homo sapien
gcatgcactccattcttcacttcaa

SEQ ID NO: 3582194 - DNA, 25 bp, Homo sapien
ccccatctatgcagggacttgctgg

SEQ ID NO: 3582195 - DNA, 25 bp, Homo sapien
ctccatcctacagcggttcccaagg

SEQ ID NO: 3582196 - DNA, 25 bp, Homo sapien
gtctcagcatcagccccttgcattg

SEQ ID NO: 3582197 - DNA, 25 bp, Homo sapien
ttgcagttggagaactaccccatct

SEQ ID NO: 3582198 - DNA, 25 bp, Homo sapien
cattatctcatcatcgactggacat

SEQ ID NO: 3582199 - DNA, 25 bp, Homo sapien
catagttctaatggtataattcatt

SEQ ID NO: 3582200 - DNA, 25 bp, Homo sapien
catcgactggacatttcatcaaaca

SEQ ID NO: 3582201 - DNA, 25 bp, Homo sapien
tctcatcatcgactggacatttcat

SEQ ID NO: 3582202 - DNA, 25 bp, Homo sapien
cattgcctggcaaggaaaaaggtct

SEQ ID NO: 3582203 - DNA, 25 bp, Homo sapien
tatgataccctcactactcgtcgag

SEQ ID NO: 3582204 - DNA, 25 bp, Homo sapien
agaagagtagtacacctcgacccca

SEQ ID NO: 3582205 - DNA, 25 bp, Homo sapien
tgttgacaccccgaatcgagatttg

SEQ ID NO: 3582206 - DNA, 25 bp, Homo sapien
gcacctgcaatagattggtcctttc

SEQ ID NO: 3582207 - DNA, 25 bp, Homo sapien
taaggacataggagtaaacatcaat

SEQ ID NO: 3582208 - DNA, 25 bp, Homo sapien
atgcaagacgcacctgcaatagatt

SEQ ID NO: 3582209 - DNA, 25 bp, Homo sapien
catcaatgccatgagaatttccaaa

SEQ ID NO: 3582210 - DNA, 25 bp, Homo sapien
gagagaagcgtgattcctgtaaaat

SEQ ID NO: 3582211 - DNA, 25 bp, Homo sapien
tgaaaacttccttgcttgtacccta

SEQ ID NO: 3582212 - DNA, 25 bp, Homo sapien
gaaaatccctatctcatcacctgaa

SEQ ID NO: 3582213 - DNA, 25 bp, Homo sapien
gacaatgatgttattcaccagtcct

SEQ ID NO: 3582214 - DNA, 25 bp, Homo sapien
gcaatcccactagggggtatacacc

SEQ ID NO: 3582215 - DNA, 25 bp, Homo sapien
gtggggatctctccaggtttggtca

SEQ ID NO: 3582216 - DNA, 25 bp, Homo sapien
ttgtggggatctctccaggtttggt

SEQ ID NO: 3582217 - DNA, 25 bp, Homo sapien
tggggatctctccaggtttggtcat

SEQ ID NO: 3582218 - DNA, 25 bp, Homo sapien
tgtggggatctctccaggtttggtc

SEQ ID NO: 3582219 - DNA, 25 bp, Homo sapien
gcaagaagggatgtcttctcccatt

SEQ ID NO: 3582220 - DNA, 25 bp, Homo sapien
tttttgagaatttagcaatgtcacc

SEQ ID NO: 3582221 - DNA, 25 bp, Homo sapien
gatttttgaagtctgtcatggcacg

SEQ ID NO: 3582222 - DNA, 25 bp, Homo sapien
tctgtcatggcacggagcaagaagg

SEQ ID NO: 3582223 - DNA, 25 bp, Homo sapien
tcttttggacatacagctctgaatc

SEQ ID NO: 3582224 - DNA, 25 bp, Homo sapien
tagtcccctcttatgtataccatga

SEQ ID NO: 3582225 - DNA, 25 bp, Homo sapien
cagctgatggctaatctcaaaaaga

SEQ ID NO: 3582226 - DNA, 25 bp, Homo sapien
gaattggtccagtaagtgacagctg

SEQ ID NO: 3582227 - DNA, 25 bp, Homo sapien
taagaataagtctctaacggtcact

SEQ ID NO: 3582228 - DNA, 25 bp, Homo sapien
gaaccttatccctaacagatgcata

SEQ ID NO: 3582229 - DNA, 25 bp, Homo sapien
agatgcataactagcagctgccaca

SEQ ID NO: 3582230 - DNA, 25 bp, Homo sapien
tatgcaggcagatgccaagcacatc

SEQ ID NO: 3582231 - DNA, 25 bp, Homo sapien
tgcctctgcttatctctcccatagc

SEQ ID NO: 3582232 - DNA, 25 bp, Homo sapien
gtgttttgtgtttgcctctgcttat

SEQ ID NO: 3582233 - DNA, 25 bp, Homo sapien
gcaggctgagtctggtgcccttgtt

SEQ ID NO: 3582234 - DNA, 25 bp, Homo sapien
gtctggtgcccttgttctgtgtttt

SEQ ID NO: 3582235 - DNA, 25 bp, Homo sapien
tctggctattactgggagcagtggc

SEQ ID NO: 3582236 - DNA, 25 bp, Homo sapien
gctggacaagcccaaatgatctgcc

SEQ ID NO: 3582237 - DNA, 25 bp, Homo sapien
attgagatccccccctgccaaattt

SEQ ID NO: 3582238 - DNA, 25 bp, Homo sapien
ccccatggctggacaagcccaaatg

SEQ ID NO: 3582239 - DNA, 25 bp, Homo sapien
tggggacccacagctcctgaggatg

SEQ ID NO: 3582240 - DNA, 25 bp, Homo sapien
tctccaccatgactggcatcagcag

SEQ ID NO: 3582241 - DNA, 25 bp, Homo sapien
ctggcatcagcaggggcaaaagtgc

SEQ ID NO: 3582242 - DNA, 25 bp, Homo sapien
ttctctgagacctcagggcccttct

SEQ ID NO: 3582243 - DNA, 25 bp, Homo sapien
ctggtttgtgtgcttcgacaaatga

SEQ ID NO: 3582244 - DNA, 25 bp, Homo sapien
aatgagattcatggtgttacaggga

SEQ ID NO: 3582245 - DNA, 25 bp, Homo sapien
gtgttacagggaagaggtccctatc

SEQ ID NO: 3582246 - DNA, 25 bp, Homo sapien
gtcagaggaggaacgcgtccacctt

SEQ ID NO: 3582247 - DNA, 25 bp, Homo sapien
caggatggtctcaacctctttattt

SEQ ID NO: 3582248 - DNA, 25 bp, Homo sapien
aggatggtctcaacctctttatttt

SEQ ID NO: 3582249 - DNA, 25 bp, Homo sapien
atggtctcaacctctttattttttg

SEQ ID NO: 3582250 - DNA, 25 bp, Homo sapien
ccaggatggtctcaacctctttatt

SEQ ID NO: 3582251 - DNA, 25 bp, Homo sapien
tagaggattatcaagccagactcaa

SEQ ID NO: 3582252 - DNA, 25 bp, Homo sapien
tttgtatgggcattagaaacaggag

SEQ ID NO: 3582253 - DNA, 25 bp, Homo sapien
aaggcacatttggaggtatggagaa

SEQ ID NO: 3582254 - DNA, 25 bp, Homo sapien
taccaaaatgtaattgctagctctg

SEQ ID NO: 3582255 - DNA, 25 bp, Homo sapien
taaccagctgttcccacatattttc

SEQ ID NO: 3582256 - DNA, 25 bp, Homo sapien
ctacagctgctataaccagctgttc

SEQ ID NO: 3582257 - DNA, 25 bp, Homo sapien
tgttcccacatattttcttcatggg

SEQ ID NO: 3582258 - DNA, 25 bp, Homo sapien
gctgctataaccagctgttcccaca

SEQ ID NO: 3582259 - DNA, 25 bp, Homo sapien
tggaatagtggggattatagacacg

SEQ ID NO: 3582260 - DNA, 25 bp, Homo sapien
cctctggaatagtggggattataga

SEQ ID NO: 3582261 - DNA, 25 bp, Homo sapien
ctggaatagtggggattatagacac

SEQ ID NO: 3582262 - DNA, 25 bp, Homo sapien
ctctggaatagtggggattatagac

SEQ ID NO: 3582263 - DNA, 25 bp, Homo sapien
tcacgtccatttgactcagctgttt

SEQ ID NO: 3582264 - DNA, 25 bp, Homo sapien
actcagctgttttgattcaggagca

SEQ ID NO: 3582265 - DNA, 25 bp, Homo sapien
ctcagctgttttgattcaggagcat

SEQ ID NO: 3582266 - DNA, 25 bp, Homo sapien
cttgtcacgtccatttgactcagct

SEQ ID NO: 3582267 - DNA, 25 bp, Homo sapien
taaccaagccttaatggccaccact

SEQ ID NO: 3582268 - DNA, 25 bp, Homo sapien
cttcctgacagggtggagtagtgcc

SEQ ID NO: 3582269 - DNA, 25 bp, Homo sapien
gttatgtcctctatagtctccacca

SEQ ID NO: 3582270 - DNA, 25 bp, Homo sapien
tgaaacctccactagaccttctgta

SEQ ID NO: 3582271 - DNA, 25 bp, Homo sapien
catcttgggaggatgtggaccatct

SEQ ID NO: 3582272 - DNA, 25 bp, Homo sapien
tatcaggccatcttgggaggatgtg

SEQ ID NO: 3582273 - DNA, 25 bp, Homo sapien
ccatcttgggaggatgtggaccatc

SEQ ID NO: 3582274 - DNA, 25 bp, Homo sapien
tgtcatatcaggccatcttgggagg

SEQ ID NO: 3582275 - DNA, 25 bp, Homo sapien
tttctcgtgctgtgcaaaagctgtt

SEQ ID NO: 3582276 - DNA, 25 bp, Homo sapien
cattctttaggttgtatctttattg

SEQ ID NO: 3582277 - DNA, 25 bp, Homo sapien
tctgtatcgattttgcatattgcac

SEQ ID NO: 3582278 - DNA, 25 bp, Homo sapien
cgattttgcatattgcacctttgtc

SEQ ID NO: 3582279 - DNA, 25 bp, Homo sapien
tatttcaacaagacagtctctaagc

SEQ ID NO: 3582280 - DNA, 25 bp, Homo sapien
ggcttgtgttctgataactgacgtg

SEQ ID NO: 3582281 - DNA, 25 bp, Homo sapien
agtctggttaagaatacctgctggg

SEQ ID NO: 3582282 - DNA, 25 bp, Homo sapien
gatccttagctttcttgcactggac

SEQ ID NO: 3582283 - DNA, 25 bp, Homo sapien
ttagcagtggttatggcagagagcc

SEQ ID NO: 3582284 - DNA, 25 bp, Homo sapien
cagagggccttttggttgacttcag

SEQ ID NO: 3582285 - DNA, 25 bp, Homo sapien
gactgcaaatcttggcttgggactc

SEQ ID NO: 3582286 - DNA, 25 bp, Homo sapien
ttctccctagtgcaagagcagcttg

SEQ ID NO: 3582287 - DNA, 25 bp, Homo sapien
tgtgacagaccagtgatctacttcg

SEQ ID NO: 3582288 - DNA, 25 bp, Homo sapien
tcagtggattcgcatacaaggtttg

SEQ ID NO: 3582289 - DNA, 25 bp, Homo sapien
ggcttttaagctacctaatgaggga

SEQ ID NO: 3582290 - DNA, 25 bp, Homo sapien
tgagggaaacaccaaactactctgg

SEQ ID NO: 3582291 - DNA, 25 bp, Homo sapien
cctacaaggctctacaagatctgcc

SEQ ID NO: 3582292 - DNA, 25 bp, Homo sapien
tattccaaggcctccagtagtttcc

SEQ ID NO: 3582293 - DNA, 25 bp, Homo sapien
tccagggagctctaaaagaagccaa

SEQ ID NO: 3582294 - DNA, 25 bp, Homo sapien
ccaatttctagtctaggaggccagt

SEQ ID NO: 3582295 - DNA, 25 bp, Homo sapien
gaagacatgacctgcagaatcaggc

SEQ ID NO: 3582296 - DNA, 25 bp, Homo sapien
tagtcctagtcattgggccagaacc

SEQ ID NO: 3582297 - DNA, 25 bp, Homo sapien
gctacccgcagactgagcttccaaa

SEQ ID NO: 3582298 - DNA, 25 bp, Homo sapien
ccagggtccaggtctacagagcaaa

SEQ ID NO: 3582299 - DNA, 25 bp, Homo sapien
gggcctcaacagtttattgccaaga

SEQ ID NO: 3582300 - DNA, 25 bp, Homo sapien
tcctgagtctattggcctaatgcct

SEQ ID NO: 3582301 - DNA, 25 bp, Homo sapien
taatgccttgtggttagaagtagag

SEQ ID NO: 3582302 - DNA, 25 bp, Homo sapien
tgcaccccaggtactaagacaataa

SEQ ID NO: 3582303 - DNA, 25 bp, Homo sapien
taaaagtcagtcctagcccaagggc

SEQ ID NO: 3582304 - DNA, 25 bp, Homo sapien
cattctctgttcctatgtcatagca

SEQ ID NO: 3582305 - DNA, 25 bp, Homo sapien
gctaggtgtagctatacaaaattga

SEQ ID NO: 3582306 - DNA, 25 bp, Homo sapien
caaagtaaatacttgcaacactgaa

SEQ ID NO: 3582307 - DNA, 25 bp, Homo sapien
tgcatgcaaataatatcaagttcac

SEQ ID NO: 3582308 - DNA, 25 bp, Homo sapien
caatgtgccacaatgagtagctgat

SEQ ID NO: 3582309 - DNA, 25 bp, Homo sapien
gaaatggtattgatgttgcatgcaa

SEQ ID NO: 3582310 - DNA, 25 bp, Homo sapien
agagtattcctgttcaagccttcca

SEQ ID NO: 3582311 - DNA, 25 bp, Homo sapien
cacctgaggacttttcacttaccaa

SEQ ID NO: 3582312 - DNA, 25 bp, Homo sapien
ggagtatcagtagacacaacaaatg

SEQ ID NO: 3582313 - DNA, 25 bp, Homo sapien
gacacaacaaatggttaaaacagca

SEQ ID NO: 3582314 - DNA, 25 bp, Homo sapien
cacttaccaaaagggagtatcagta

SEQ ID NO: 3582315 - DNA, 25 bp, Homo sapien
gtggaggaaactacatacaaaggag

SEQ ID NO: 3582316 - DNA, 25 bp, Homo sapien
tgttgaaaagactaccatcctcccc

SEQ ID NO: 3582317 - DNA, 25 bp, Homo sapien
ttccatggttgcaaggattttctcc

SEQ ID NO: 3582318 - DNA, 25 bp, Homo sapien
tcctccccattaaagtattttgcca

SEQ ID NO: 3582319 - DNA, 25 bp, Homo sapien
ttctactggtgctagaactcaatgt

SEQ ID NO: 3582320 - DNA, 25 bp, Homo sapien
tatttcccgttctgtttatcaccac

SEQ ID NO: 3582321 - DNA, 25 bp, Homo sapien
tgtaagatcattgtaaagctcacac

SEQ ID NO: 3582322 - DNA, 25 bp, Homo sapien
cattgaagccatctggtgctgggtt

SEQ ID NO: 3582323 - DNA, 25 bp, Homo sapien
taattagacagtattctcccctcct

SEQ ID NO: 3582324 - DNA, 25 bp, Homo sapien
gaagacttacggtagctaacaggca

SEQ ID NO: 3582325 - DNA, 25 bp, Homo sapien
gcataaaacataagagtgggtggct

SEQ ID NO: 3582326 - DNA, 25 bp, Homo sapien
tactggataggcaatcaaggaacag

SEQ ID NO: 3582327 - DNA, 25 bp, Homo sapien
aagtgagatgttagagcctatgaac

SEQ ID NO: 3582328 - DNA, 25 bp, Homo sapien
gtacccattacctaagcagtgtact

SEQ ID NO: 3582329 - DNA, 25 bp, Homo sapien
tacccattacctaagcagtgtactt

SEQ ID NO: 3582330 - DNA, 25 bp, Homo sapien
ccacacccaacctgtatcacattta

SEQ ID NO: 3582331 - DNA, 25 bp, Homo sapien
tccacacccaacctgtatcacattt

SEQ ID NO: 3582332 - DNA, 25 bp, Homo sapien
gcctccacacccaacctgtatcaca

SEQ ID NO: 3582333 - DNA, 25 bp, Homo sapien
ctccacacccaacctgtatcacatt

SEQ ID NO: 3582334 - DNA, 25 bp, Homo sapien
tttggaatactgtcaataggactgg

SEQ ID NO: 3582335 - DNA, 25 bp, Homo sapien
ctgggttttggtaaatcccagaatg

SEQ ID NO: 3582336 - DNA, 25 bp, Homo sapien
attactctttcaatttcgctgcttg

SEQ ID NO: 3582337 - DNA, 25 bp, Homo sapien
tggtaaatcccagaatgatttaggg

SEQ ID NO: 3582338 - DNA, 25 bp, Homo sapien
tcaggtgtgactttagattgcctat

SEQ ID NO: 3582339 - DNA, 25 bp, Homo sapien
agctgtgtcactactattgttcagt

SEQ ID NO: 3582340 - DNA, 25 bp, Homo sapien
caggggcagattattgaatttccaa

SEQ ID NO: 3582341 - DNA, 25 bp, Homo sapien
gttttgacaagctgtgtcactacta

SEQ ID NO: 3582342 - DNA, 25 bp, Homo sapien
gagtaacttaattatcaaccttcta

SEQ ID NO: 3582343 - DNA, 25 bp, Homo sapien
ttggtcagactacaggcagaaggtg

SEQ ID NO: 3582344 - DNA, 25 bp, Homo sapien
tctgagtctagccaccgagtacggc

SEQ ID NO: 3582345 - DNA, 25 bp, Homo sapien
cagatttaggaccactggttagcca

SEQ ID NO: 3582346 - DNA, 25 bp, Homo sapien
tgttgcagggcacacggaattagct

SEQ ID NO: 3582347 - DNA, 25 bp, Homo sapien
gaatgatacccaaccctcttgatgg

SEQ ID NO: 3582348 - DNA, 25 bp, Homo sapien
tatagggaaatctcatatgcactca

SEQ ID NO: 3582349 - DNA, 25 bp, Homo sapien
gatattactacgctatttcaggaca

SEQ ID NO: 3582350 - DNA, 25 bp, Homo sapien
taagaaatacttgatcctgcctgac

SEQ ID NO: 3582351 - DNA, 25 bp, Homo sapien
tgggccagcaacaacatatcaatgt

SEQ ID NO: 3582352 - DNA, 25 bp, Homo sapien
tgtttgtttcaactgaagcacatgc

SEQ ID NO: 3582353 - DNA, 25 bp, Homo sapien
gagtggcagcaagcattacctagga

SEQ ID NO: 3582354 - DNA, 25 bp, Homo sapien
ttacctaggaaatgcctctctcaca

SEQ ID NO: 3582355 - DNA, 25 bp, Homo sapien
caagatatgtcccagaatgataatg

SEQ ID NO: 3582356 - DNA, 25 bp, Homo sapien
agatatgtcccagaatgataatggc

SEQ ID NO: 3582357 - DNA, 25 bp, Homo sapien
atggctcattatagtcgttacagat

SEQ ID NO: 3582358 - DNA, 25 bp, Homo sapien
tatagtcgttacagattaaatcaga

SEQ ID NO: 3582359 - DNA, 25 bp, Homo sapien
taatttccctctaattcctctccaa

SEQ ID NO: 3582360 - DNA, 25 bp, Homo sapien
ctaatttccctctaattcctctcca

SEQ ID NO: 3582361 - DNA, 25 bp, Homo sapien
tctccaaaaaattccccctcacaca

SEQ ID NO: 3582362 - DNA, 25 bp, Homo sapien
ttttaaccgcatttttcaacagctg

SEQ ID NO: 3582363 - DNA, 25 bp, Homo sapien
cagtaatgataaagctcggtcagta

SEQ ID NO: 3582364 - DNA, 25 bp, Homo sapien
tttgcagtattcttccagtaatgat

SEQ ID NO: 3582365 - DNA, 25 bp, Homo sapien
ttcttccagtaatgataaagctcgg

SEQ ID NO: 3582366 - DNA, 25 bp, Homo sapien
tcctcacaggtgttatgattagaca

SEQ ID NO: 3582367 - DNA, 25 bp, Homo sapien
tcagatctaactcaaatgctctctc

SEQ ID NO: 3582368 - DNA, 25 bp, Homo sapien
gaatttgtcggcagtcttaaaccca

SEQ ID NO: 3582369 - DNA, 25 bp, Homo sapien
tagacaatatatgcacaatccctag

SEQ ID NO: 3582370 - DNA, 25 bp, Homo sapien
ctctagtgcccaaagctttagtctt

SEQ ID NO: 3582371 - DNA, 25 bp, Homo sapien
ctagtgcccaaagctttagtctttt

SEQ ID NO: 3582372 - DNA, 25 bp, Homo sapien
ttcatttcctcattaaagtctgccg

SEQ ID NO: 3582373 - DNA, 25 bp, Homo sapien
tttcctcattaaagtctgccgacat

SEQ ID NO: 3582374 - DNA, 25 bp, Homo sapien
cacacacacgtaatgtgtttaattc

SEQ ID NO: 3582375 - DNA, 25 bp, Homo sapien
acacacacgtaatgtgtttaattcc

SEQ ID NO: 3582376 - DNA, 25 bp, Homo sapien
acacacacacgtaatgtgtttaatt

SEQ ID NO: 3582377 - DNA, 25 bp, Homo sapien
tatcagcttggataaggcatctcag

SEQ ID NO: 3582378 - DNA, 25 bp, Homo sapien
acaagtgtggctccaaaatctcagg

SEQ ID NO: 3582379 - DNA, 25 bp, Homo sapien
tatctggaaaagcacaatagtcacg

SEQ ID NO: 3582380 - DNA, 25 bp, Homo sapien
tattaaacccatgaggaagagctcc

SEQ ID NO: 3582381 - DNA, 25 bp, Homo sapien
caaatctgcggtactgaatctattc

SEQ ID NO: 3582382 - DNA, 25 bp, Homo sapien
taaattacaagtaccagaaccaaca

SEQ ID NO: 3582383 - DNA, 25 bp, Homo sapien
gaatctattcttattaccaacggtg

SEQ ID NO: 3582384 - DNA, 25 bp, Homo sapien
ctgaattatgtaccactgaaactat

SEQ ID NO: 3582385 - DNA, 25 bp, Homo sapien
cagctggattgaggccaagagccag

SEQ ID NO: 3582386 - DNA, 25 bp, Homo sapien
caggagtcaatatctcttttcaggt

SEQ ID NO: 3582387 - DNA, 25 bp, Homo sapien
tttcaggtctcagtttgatccagct

SEQ ID NO: 3582388 - DNA, 25 bp, Homo sapien
gccaggtaactgttgcaaaccactt

SEQ ID NO: 3582389 - DNA, 25 bp, Homo sapien
tacaccgcccacagagtttacagca

SEQ ID NO: 3582390 - DNA, 25 bp, Homo sapien
gactaactcaattaaggcacaaacc

SEQ ID NO: 3582391 - DNA, 25 bp, Homo sapien
gttactgaaattcctcttcaggcag

SEQ ID NO: 3582392 - DNA, 25 bp, Homo sapien
gataaagatactcaaatctgtagag

SEQ ID NO: 3582393 - DNA, 25 bp, Homo sapien
cataagctatgtaaacggtccgcga

SEQ ID NO: 3582394 - DNA, 25 bp, Homo sapien
tactcaatgggcacttgatgcagga

SEQ ID NO: 3582395 - DNA, 25 bp, Homo sapien
cccaaaggtgttttcagagacgccg

SEQ ID NO: 3582396 - DNA, 25 bp, Homo sapien
gatcctcccatgtattaaccgagag

SEQ ID NO: 3582397 - DNA, 25 bp, Homo sapien
cccgttcttttagggaagagcactg

SEQ ID NO: 3582398 - DNA, 25 bp, Homo sapien
aagacatttctttgccaccgctggc

SEQ ID NO: 3582399 - DNA, 25 bp, Homo sapien
ctgcaccctccacgcgatgaagtgt

SEQ ID NO: 3582400 - DNA, 25 bp, Homo sapien
cctccacgcgatgaagtgtttcctc

SEQ ID NO: 3582401 - DNA, 25 bp, Homo sapien
tggtgtccgatgagggcctgctttc

SEQ ID NO: 3582402 - DNA, 25 bp, Homo sapien
tgctttctgattcataggtaatgcc

SEQ ID NO: 3582403 - DNA, 25 bp, Homo sapien
tcaaaatacgaattcagggggcaca

SEQ ID NO: 3582404 - DNA, 25 bp, Homo sapien
tatagttctggaagctaggatttgg

SEQ ID NO: 3582405 - DNA, 25 bp, Homo sapien
tatagcttgccttggtacagccacc

SEQ ID NO: 3582406 - DNA, 25 bp, Homo sapien
tcaacaaactactggcatgtaggcc

SEQ ID NO: 3582407 - DNA, 25 bp, Homo sapien
tagctaacctatgggtacctattgg

SEQ ID NO: 3582408 - DNA, 25 bp, Homo sapien
tgtatgttacctgcaaagcctacca

SEQ ID NO: 3582409 - DNA, 25 bp, Homo sapien
gggataatatacatttcacatgatt

SEQ ID NO: 3582410 - DNA, 25 bp, Homo sapien
taaacaaatggacttatatataaca

SEQ ID NO: 3582411 - DNA, 25 bp, Homo sapien
tgtttacctgagcattgggatttaa

SEQ ID NO: 3582412 - DNA, 25 bp, Homo sapien
aggcaaattgtttacctgagcattg

SEQ ID NO: 3582413 - DNA, 25 bp, Homo sapien
tatgatcaaggaagacctatcgccc

SEQ ID NO: 3582414 - DNA, 25 bp, Homo sapien
tgttttaattcccatgaccagtgga

SEQ ID NO: 3582415 - DNA, 25 bp, Homo sapien
tattaccatgggtgctagggaaggc

SEQ ID NO: 3582416 - DNA, 25 bp, Homo sapien
ggaaggcagtccatctaaattttgt

SEQ ID NO: 3582417 - DNA, 25 bp, Homo sapien
ggaacatcttaagttactggattag

SEQ ID NO: 3582418 - DNA, 25 bp, Homo sapien
ttcttacaggtatcaatcagctctg

SEQ ID NO: 3582419 - DNA, 25 bp, Homo sapien
tataaaggcccttcagttatctgaa

SEQ ID NO: 3582420 - DNA, 25 bp, Homo sapien
ttttgctccagactatgttttcagc

SEQ ID NO: 3582421 - DNA, 25 bp, Homo sapien
gctgtgctgccaaagatgaaaaact

SEQ ID NO: 3582422 - DNA, 25 bp, Homo sapien
tactgtggatattctatggcttata

SEQ ID NO: 3582423 - DNA, 25 bp, Homo sapien
tgatcccagttatgaggcaaaagaa

SEQ ID NO: 3582424 - DNA, 25 bp, Homo sapien
tctatgtgcacaagagactgaaagg

SEQ ID NO: 3582425 - DNA, 25 bp, Homo sapien
tgatctcagtgggtatacagcaaag

SEQ ID NO: 3582426 - DNA, 25 bp, Homo sapien
ccaaaatttttgttcagagggcaga

SEQ ID NO: 3582427 - DNA, 25 bp, Homo sapien
tgtactgtaggagcatcagcgccta

SEQ ID NO: 3582428 - DNA, 25 bp, Homo sapien
ttatagtacactaagagccagaggg

SEQ ID NO: 3582429 - DNA, 25 bp, Homo sapien
tttatccatgtgctaatcatccaga

SEQ ID NO: 3582430 - DNA, 25 bp, Homo sapien
aattaatgtatgaactcctgccacc

SEQ ID NO: 3582431 - DNA, 25 bp, Homo sapien
ccattacagtaaatagagccaaacc

SEQ ID NO: 3582432 - DNA, 25 bp, Homo sapien
gataagtctggtcaaagaagtgcag

SEQ ID NO: 3582433 - DNA, 25 bp, Homo sapien
cataaggaacctaacaaagcagctt

SEQ ID NO: 3582434 - DNA, 25 bp, Homo sapien
aattaacaagtagtgaatcggacac

SEQ ID NO: 3582435 - DNA, 25 bp, Homo sapien
aagctttgactactgtttctcccca

SEQ ID NO: 3582436 - DNA, 25 bp, Homo sapien
gacccacagtcagcattaacaatca

SEQ ID NO: 3582437 - DNA, 25 bp, Homo sapien
aacctggttttattatgacaccata

SEQ ID NO: 3582438 - DNA, 25 bp, Homo sapien
gctgcattgtgaggggcttgctcct

SEQ ID NO: 3582439 - DNA, 25 bp, Homo sapien
ttcaattcaaggcttctgtttcaaa

SEQ ID NO: 3582440 - DNA, 25 bp, Homo sapien
cattggtactgcacaaaattatata

SEQ ID NO: 3582441 - DNA, 25 bp, Homo sapien
gctcaagtgcagtagtagatgattt

SEQ ID NO: 3582442 - DNA, 25 bp, Homo sapien
tggctactacccattcatgctcaag

SEQ ID NO: 3582443 - DNA, 25 bp, Homo sapien
taagcaggttcatcactccaatttg

SEQ ID NO: 3582444 - DNA, 25 bp, Homo sapien
cactccaatttgtgagtttggctac

SEQ ID NO: 3582445 - DNA, 25 bp, Homo sapien
caggtctcaaatcgtattatctagc

SEQ ID NO: 3582446 - DNA, 25 bp, Homo sapien
ccaattcaggtctcaaatcgtatta

SEQ ID NO: 3582447 - DNA, 25 bp, Homo sapien
tcgtattatctagcaacaaaacatt

SEQ ID NO: 3582448 - DNA, 25 bp, Homo sapien
ctggaaaccaaagaccaattcaggt

SEQ ID NO: 3582449 - DNA, 25 bp, Homo sapien
gcagaagccctgatattacctcttt

SEQ ID NO: 3582450 - DNA, 25 bp, Homo sapien
agcagaagccctgatattacctctt

SEQ ID NO: 3582451 - DNA, 25 bp, Homo sapien
cagcagctggtcccgtctcttctgc

SEQ ID NO: 3582452 - DNA, 25 bp, Homo sapien
gctggtcccgtctcttctgccccaa

SEQ ID NO: 3582453 - DNA, 25 bp, Homo sapien
ctcttctgccccaacagctgtatcc

SEQ ID NO: 3582454 - DNA, 25 bp, Homo sapien
aaagcaggaaatgtggccagcagct

SEQ ID NO: 3582455 - DNA, 25 bp, Homo sapien
caatttgcaccttgtacaactcgga

SEQ ID NO: 3582456 - DNA, 25 bp, Homo sapien
taagcaggtttcagtgtacagttgg

SEQ ID NO: 3582457 - DNA, 25 bp, Homo sapien
caattaactaaaacgcaggagtctc

SEQ ID NO: 3582458 - DNA, 25 bp, Homo sapien
cgtgtcatttaagtggccagaacca

SEQ ID NO: 3582459 - DNA, 25 bp, Homo sapien
gaataaggggacacattaatagcta

SEQ ID NO: 3582460 - DNA, 25 bp, Homo sapien
gtggacagggcccaaattagatttc

SEQ ID NO: 3582461 - DNA, 25 bp, Homo sapien
cattaatagctatttcaaccagaag

SEQ ID NO: 3582462 - DNA, 25 bp, Homo sapien
tggacagggcccaaattagatttcc

SEQ ID NO: 3582463 - DNA, 25 bp, Homo sapien
acacacacaaactgagatgttgccc

SEQ ID NO: 3582464 - DNA, 25 bp, Homo sapien
tgttgcccattaaagtagacaaagc

SEQ ID NO: 3582465 - DNA, 25 bp, Homo sapien
cagcagagcatgagcgttacgggaa

SEQ ID NO: 3582466 - DNA, 25 bp, Homo sapien
tgagatgttgcccattaaagtagac

SEQ ID NO: 3582467 - DNA, 25 bp, Homo sapien
tgaggcgggaacgactgttctgtaa

SEQ ID NO: 3582468 - DNA, 25 bp, Homo sapien
tgtgaggcgggaacgactgttctgt

SEQ ID NO: 3582469 - DNA, 25 bp, Homo sapien
gaggcgggaacgactgttctgtaac

SEQ ID NO: 3582470 - DNA, 25 bp, Homo sapien
gtgaggcgggaacgactgttctgta

SEQ ID NO: 3582471 - DNA, 25 bp, Homo sapien
cattaggagttggttactgtgtcac

SEQ ID NO: 3582472 - DNA, 25 bp, Homo sapien
aaatgtgtccggtgaagatgtccca

SEQ ID NO: 3582473 - DNA, 25 bp, Homo sapien
gatgtcccactaaggtaagtttgac

SEQ ID NO: 3582474 - DNA, 25 bp, Homo sapien
taaacgcggataaagagcagattac

SEQ ID NO: 3582475 - DNA, 25 bp, Homo sapien
aagagaagacgacgccttccgggcg

SEQ ID NO: 3582476 - DNA, 25 bp, Homo sapien
cttccgggcgcacgccgagcagaac

SEQ ID NO: 3582477 - DNA, 25 bp, Homo sapien
acgccgagcagaactccaccgacac

SEQ ID NO: 3582478 - DNA, 25 bp, Homo sapien
taagagaagacgacgccttccgggc

SEQ ID NO: 3582479 - DNA, 25 bp, Homo sapien
taagactgcccgtaggtagcgactc

SEQ ID NO: 3582480 - DNA, 25 bp, Homo sapien
tcttcagtcgattaaggcgggcagc

SEQ ID NO: 3582481 - DNA, 25 bp, Homo sapien
gcagtgcctgtacgcgtttgcccag

SEQ ID NO: 3582482 - DNA, 25 bp, Homo sapien
taccgtttaacagcctttgcagcag

SEQ ID NO: 3582483 - DNA, 25 bp, Homo sapien
tccttcgtcgccaaactgctgcttg

SEQ ID NO: 3582484 - DNA, 25 bp, Homo sapien
aaactgctgcttgcggccgggagat

SEQ ID NO: 3582485 - DNA, 25 bp, Homo sapien
tcagagggcagcgaacaagttgcag

SEQ ID NO: 3582486 - DNA, 25 bp, Homo sapien
tggtcaggctatgcctcatgagggc

SEQ ID NO: 3582487 - DNA, 25 bp, Homo sapien
cactggccgaaacgaaatgcaggga

SEQ ID NO: 3582488 - DNA, 25 bp, Homo sapien
gtgaggccctgcgatgactcgaccg

SEQ ID NO: 3582489 - DNA, 25 bp, Homo sapien
taagagtgggcctcacgggccccaa

SEQ ID NO: 3582490 - DNA, 25 bp, Homo sapien
aatgcagggaaaggtccgagtcgcc

SEQ ID NO: 3582491 - DNA, 25 bp, Homo sapien
tatgaagagagggtactcatgcttg

SEQ ID NO: 3582492 - DNA, 25 bp, Homo sapien
gagccaaaatccaatcagtactgac

SEQ ID NO: 3582493 - DNA, 25 bp, Homo sapien
gactgtaaaaaccacaacgttgcac

SEQ ID NO: 3582494 - DNA, 25 bp, Homo sapien
tatggcatgcgttttcccactgaaa

SEQ ID NO: 3582495 - DNA, 25 bp, Homo sapien
tagtttgcctgtctacccatgaagt

SEQ ID NO: 3582496 - DNA, 25 bp, Homo sapien
gctgatagacatgctcaacttatgg

SEQ ID NO: 3582497 - DNA, 25 bp, Homo sapien
cagagacgagggtgctcattttact

SEQ ID NO: 3582498 - DNA, 25 bp, Homo sapien
tgccatatacgtgaagcagaagaaa

SEQ ID NO: 3582499 - DNA, 25 bp, Homo sapien
tcagtgtttcactcaattgtggtta

SEQ ID NO: 3582500 - DNA, 25 bp, Homo sapien
cattgagagcccctccaatttagct

SEQ ID NO: 3582501 - DNA, 25 bp, Homo sapien
ttttctccctagcaacattaacata

SEQ ID NO: 3582502 - DNA, 25 bp, Homo sapien
ccagggagcctttcttcaatttagt

SEQ ID NO: 3582503 - DNA, 25 bp, Homo sapien
caattttggccaatgacactggcag

SEQ ID NO: 3582504 - DNA, 25 bp, Homo sapien
caagaggtgatatctcaagtctgcc

SEQ ID NO: 3582505 - DNA, 25 bp, Homo sapien
gcagaatatccctgacctgactcag

SEQ ID NO: 3582506 - DNA, 25 bp, Homo sapien
gcacctgggcaggtactccttcaaa

SEQ ID NO: 3582507 - DNA, 25 bp, Homo sapien
catgggacttctccccgcaggctgg

SEQ ID NO: 3582508 - DNA, 25 bp, Homo sapien
gccgcaatttgggatggatgagccg

SEQ ID NO: 3582509 - DNA, 25 bp, Homo sapien
gcaggctgggcgcaaaacttaggcc

SEQ ID NO: 3582510 - DNA, 25 bp, Homo sapien
gcttccagaaccgtccggcctctgc

SEQ ID NO: 3582511 - DNA, 25 bp, Homo sapien
tgctgcaagcatacatacacacgtt

SEQ ID NO: 3582512 - DNA, 25 bp, Homo sapien
tgaattctgaattgcaggccagagg

SEQ ID NO: 3582513 - DNA, 25 bp, Homo sapien
tataagcctaactatctacagtggg

SEQ ID NO: 3582514 - DNA, 25 bp, Homo sapien
ttggtagccttcagcaaaatgggtg

SEQ ID NO: 3582515 - DNA, 25 bp, Homo sapien
tagtttccgactgtactcaccctgg

SEQ ID NO: 3582516 - DNA, 25 bp, Homo sapien
tgacctccgcttcaggatgcagatg

SEQ ID NO: 3582517 - DNA, 25 bp, Homo sapien
ttcaatgcgggagcgaagcatagcc

SEQ ID NO: 3582518 - DNA, 25 bp, Homo sapien
caactcgtggttggctgctagggtc

SEQ ID NO: 3582519 - DNA, 25 bp, Homo sapien
ctgggagcctgctgtttctggagca

SEQ ID NO: 3582520 - DNA, 25 bp, Homo sapien
tgggagcctgctgtttctggagcat

SEQ ID NO: 3582521 - DNA, 25 bp, Homo sapien
tttcccctcagatttcaaacgctgc

SEQ ID NO: 3582522 - DNA, 25 bp, Homo sapien
taagggctgactacagtcttttccc

SEQ ID NO: 3582523 - DNA, 25 bp, Homo sapien
ttccagtaaggagccctgtaattgg

SEQ ID NO: 3582524 - DNA, 25 bp, Homo sapien
tcaaacgctgcagggtgttgctagg

SEQ ID NO: 3582525 - DNA, 25 bp, Homo sapien
attatatggttgtctgatatcataa

SEQ ID NO: 3582526 - DNA, 25 bp, Homo sapien
ctgatatcataaagtgaattcacaa

SEQ ID NO: 3582527 - DNA, 25 bp, Homo sapien
gatatcataaagtgaattcacaaaa

SEQ ID NO: 3582528 - DNA, 25 bp, Homo sapien
tatatggttgtctgatatcataaag

SEQ ID NO: 3582529 - DNA, 25 bp, Homo sapien
cccagagaataagtgatagagcgag

SEQ ID NO: 3582530 - DNA, 25 bp, Homo sapien
cacagcgggagctcatagagtcaaa

SEQ ID NO: 3582531 - DNA, 25 bp, Homo sapien
gcaccaaggacagggtagttccact

SEQ ID NO: 3582532 - DNA, 25 bp, Homo sapien
tattggctcacagaaagtgcacagc

SEQ ID NO: 3582533 - DNA, 25 bp, Homo sapien
gaggtcacttaaccattacactgta

SEQ ID NO: 3582534 - DNA, 25 bp, Homo sapien
gctacctgtttctggaggtcactta

SEQ ID NO: 3582535 - DNA, 25 bp, Homo sapien
cagctactaagtggtttaactgaga

SEQ ID NO: 3582536 - DNA, 25 bp, Homo sapien
ctaagtggtttaactgagattcaaa

SEQ ID NO: 3582537 - DNA, 25 bp, Homo sapien
tctgtgattgaatcaagtatgtggg

SEQ ID NO: 3582538 - DNA, 25 bp, Homo sapien
tattgtctgtgattgaatcaagtat

SEQ ID NO: 3582539 - DNA, 25 bp, Homo sapien
tgaagatgagagtagatgagagacc

SEQ ID NO: 3582540 - DNA, 25 bp, Homo sapien
aacaaactagtgaataagcctggga

SEQ ID NO: 3582541 - DNA, 25 bp, Homo sapien
tcaagctgaacctaggaaagagaag

SEQ ID NO: 3582542 - DNA, 25 bp, Homo sapien
cagggtgggcacattacccaggcta

SEQ ID NO: 3582543 - DNA, 25 bp, Homo sapien
ggtgggcatatgacacagacctggc

SEQ ID NO: 3582544 - DNA, 25 bp, Homo sapien
cagtgaatggtccaataggtgggca

SEQ ID NO: 3582545 - DNA, 25 bp, Homo sapien
ttagatgtttagaattcctaaaata

SEQ ID NO: 3582546 - DNA, 25 bp, Homo sapien
ttttatttaaaatgagaagtcacgc

SEQ ID NO: 3582547 - DNA, 25 bp, Homo sapien
tatttaaaatgagaagtcacgctaa

SEQ ID NO: 3582548 - DNA, 25 bp, Homo sapien
tagatgtttagaattcctaaaatat

SEQ ID NO: 3582549 - DNA, 25 bp, Homo sapien
tcataaaaatacaggcttgagacct

SEQ ID NO: 3582550 - DNA, 25 bp, Homo sapien
ggtaccagaccctcttaactgtggc

SEQ ID NO: 3582551 - DNA, 25 bp, Homo sapien
tacaaaggtcctgcaagggtaccag

SEQ ID NO: 3582552 - DNA, 25 bp, Homo sapien
caataccccatgtttaatgctctgg

SEQ ID NO: 3582553 - DNA, 25 bp, Homo sapien
tgtaatcaaagaagcacatgcagat

SEQ ID NO: 3582554 - DNA, 25 bp, Homo sapien
tgcagattgacttttacatgctgtg

SEQ ID NO: 3582555 - DNA, 25 bp, Homo sapien
gaaagtgaggatatttgtccaccta

SEQ ID NO: 3582556 - DNA, 25 bp, Homo sapien
agatcagattccaccggtttagtag

SEQ ID NO: 3582557 - DNA, 25 bp, Homo sapien
tggaaatcttggcaatcaaaagcat

SEQ ID NO: 3582558 - DNA, 25 bp, Homo sapien
gcaacttcctctgaagtagagtcca

SEQ ID NO: 3582559 - DNA, 25 bp, Homo sapien
tcaaaagcattctgagaggcagtgt

SEQ ID NO: 3582560 - DNA, 25 bp, Homo sapien
ttctcccagagagcaacttcctctg

SEQ ID NO: 3582561 - DNA, 25 bp, Homo sapien
ggagaattaaaaatgtagcaaacag

SEQ ID NO: 3582562 - DNA, 25 bp, Homo sapien
tcatggagaattaaaaatgtagcaa

SEQ ID NO: 3582563 - DNA, 25 bp, Homo sapien
catggagaattaaaaatgtagcaaa

SEQ ID NO: 3582564 - DNA, 25 bp, Homo sapien
gaattaaaaatgtagcaaacagtac

SEQ ID NO: 3582565 - DNA, 25 bp, Homo sapien
aatggtcccagacagtaagctctac

SEQ ID NO: 3582566 - DNA, 25 bp, Homo sapien
ggcctgaacccatcatacaccatag

SEQ ID NO: 3582567 - DNA, 25 bp, Homo sapien
tgttccaaagccaatacgaagacct

SEQ ID NO: 3582568 - DNA, 25 bp, Homo sapien
cacaggcttccatcagatcttcagg

SEQ ID NO: 3582569 - DNA, 25 bp, Homo sapien
taagatagtgaacattcatgctttc

SEQ ID NO: 3582570 - DNA, 25 bp, Homo sapien
cagctattaaagattgacaatggag

SEQ ID NO: 3582571 - DNA, 25 bp, Homo sapien
ggacctagagtcagctatacttggt

SEQ ID NO: 3582572 - DNA, 25 bp, Homo sapien
tacctcctgggtatgcattttaggg

SEQ ID NO: 3582573 - DNA, 25 bp, Homo sapien
caatataagacaatacaagtggcaa

SEQ ID NO: 3582574 - DNA, 25 bp, Homo sapien
taaatgaactttaacctaccatgcc

SEQ ID NO: 3582575 - DNA, 25 bp, Homo sapien
tatatttaaaaagctacagttggtc

SEQ ID NO: 3582576 - DNA, 25 bp, Homo sapien
gacacctcgctgtaccagatatatg

SEQ ID NO: 3582577 - DNA, 25 bp, Homo sapien
gaccaggctacagaactgttgcaga

SEQ ID NO: 3582578 - DNA, 25 bp, Homo sapien
agaccaggctacagaactgttgcag

SEQ ID NO: 3582579 - DNA, 25 bp, Homo sapien
ttagcagtggtagatcaaggcattc

SEQ ID NO: 3582580 - DNA, 25 bp, Homo sapien
gaatttagatgacttccccttagca

SEQ ID NO: 3582581 - DNA, 25 bp, Homo sapien
ccagatgtgcacttctccagttgta

SEQ ID NO: 3582582 - DNA, 25 bp, Homo sapien
gcacttctccagttgtaggaagctt

SEQ ID NO: 3582583 - DNA, 25 bp, Homo sapien
caactgtgaatagactcatttggtc

SEQ ID NO: 3582584 - DNA, 25 bp, Homo sapien
ttgataagtttctttagggcctcac

SEQ ID NO: 3582585 - DNA, 25 bp, Homo sapien
cttatttacaactgtgaatagactc

SEQ ID NO: 3582586 - DNA, 25 bp, Homo sapien
gtctatacgttactaacttgataag

SEQ ID NO: 3582587 - DNA, 25 bp, Homo sapien
agggataaggaaaggacataaatct

SEQ ID NO: 3582588 - DNA, 25 bp, Homo sapien
ctgtgagaagggagggataaggaaa

SEQ ID NO: 3582589 - DNA, 25 bp, Homo sapien
taaatctgaatagaaagtcattaca

SEQ ID NO: 3582590 - DNA, 25 bp, Homo sapien
atctgaatagaaagtcattacatac

SEQ ID NO: 3582591 - DNA, 25 bp, Homo sapien
tgggacatactggagagctagtttc

SEQ ID NO: 3582592 - DNA, 25 bp, Homo sapien
gacatactggagagctagtttcatt

SEQ ID NO: 3582593 - DNA, 25 bp, Homo sapien
ggacatactggagagctagtttcat

SEQ ID NO: 3582594 - DNA, 25 bp, Homo sapien
gggacatactggagagctagtttca

SEQ ID NO: 3582595 - DNA, 25 bp, Homo sapien
ggtataggtctcattacagaaccat

SEQ ID NO: 3582596 - DNA, 25 bp, Homo sapien
tcagcaggtgggagacaaacttttc

SEQ ID NO: 3582597 - DNA, 25 bp, Homo sapien
tagactgttgccttaatacctggga

SEQ ID NO: 3582598 - DNA, 25 bp, Homo sapien
tctctgcatcagaactagactgttg

SEQ ID NO: 3582599 - DNA, 25 bp, Homo sapien
tggtagccagttaaaaatgagatgc

SEQ ID NO: 3582600 - DNA, 25 bp, Homo sapien
ttcaggtcttgggtagggctagaaa

SEQ ID NO: 3582601 - DNA, 25 bp, Homo sapien
aaatatgggtatgtatcagaaacgt

SEQ ID NO: 3582602 - DNA, 25 bp, Homo sapien
tgctaaacctgtataagaaacctgc

SEQ ID NO: 3582603 - DNA, 25 bp, Homo sapien
cagccccagaatctgtgatttaata

SEQ ID NO: 3582604 - DNA, 25 bp, Homo sapien
ttcccatggctttcagttggaacct

SEQ ID NO: 3582605 - DNA, 25 bp, Homo sapien
ttcaggtgaatcagatgcatgctga

SEQ ID NO: 3582606 - DNA, 25 bp, Homo sapien
atcagatgcatgctgattttgagaa

SEQ ID NO: 3582607 - DNA, 25 bp, Homo sapien
catagatagattcaagcagctcact

SEQ ID NO: 3582608 - DNA, 25 bp, Homo sapien
gaaatgaccaaatactatgaaatga

SEQ ID NO: 3582609 - DNA, 25 bp, Homo sapien
acacctaggctcattatagtacaat

SEQ ID NO: 3582610 - DNA, 25 bp, Homo sapien
cagctcactgaaccccaaacctcag

SEQ ID NO: 3582611 - DNA, 25 bp, Homo sapien
caaatggacaggttcaatttctgtg

SEQ ID NO: 3582612 - DNA, 25 bp, Homo sapien
cgcttaaatgtatcccgatgccaaa

SEQ ID NO: 3582613 - DNA, 25 bp, Homo sapien
cctaggaaactattgcgcttaaatg

SEQ ID NO: 3582614 - DNA, 25 bp, Homo sapien
ttccgcttcagagggtaccatctca

SEQ ID NO: 3582615 - DNA, 25 bp, Homo sapien
tatagggttgaagtagctgacccag

SEQ ID NO: 3582616 - DNA, 25 bp, Homo sapien
ccactgtggttgtagtaagtctgcc

SEQ ID NO: 3582617 - DNA, 25 bp, Homo sapien
cctgctgcatatggccaagtagaaa

SEQ ID NO: 3582618 - DNA, 25 bp, Homo sapien
ggtctggcatcctaacagtttttca

SEQ ID NO: 3582619 - DNA, 25 bp, Homo sapien
gaaataacgtatacaacattcaggt

SEQ ID NO: 3582620 - DNA, 25 bp, Homo sapien
gagatgcagataccaataccagcct

SEQ ID NO: 3582621 - DNA, 25 bp, Homo sapien
taccagcctggcagtttatatatgg

SEQ ID NO: 3582622 - DNA, 25 bp, Homo sapien
gggagtgaatgaaataacgtataca

SEQ ID NO: 3582623 - DNA, 25 bp, Homo sapien
ttgtctggtagcaaataggccttta

SEQ ID NO: 3582624 - DNA, 25 bp, Homo sapien
tgcctttgtctggtagcaaataggc

SEQ ID NO: 3582625 - DNA, 25 bp, Homo sapien
tggtagcaaataggcctttacatat

SEQ ID NO: 3582626 - DNA, 25 bp, Homo sapien
ccattttgcctttgtctggtagcaa

SEQ ID NO: 3582627 - DNA, 25 bp, Homo sapien
tgagctgagatcgtgccagcctggg

SEQ ID NO: 3582628 - DNA, 25 bp, Homo sapien
gctgagatcgtgccagcctgggcaa

SEQ ID NO: 3582629 - DNA, 25 bp, Homo sapien
cctgggcaacaacagtgaaactcca

SEQ ID NO: 3582630 - DNA, 25 bp, Homo sapien
gcctgggcaacaacagtgaaactcc

SEQ ID NO: 3582631 - DNA, 25 bp, Homo sapien
tctgaacgctgtttttttacatccg

SEQ ID NO: 3582632 - DNA, 25 bp, Homo sapien
gactccacatattcaattgcaaact

SEQ ID NO: 3582633 - DNA, 25 bp, Homo sapien
gctgctgctaagtccttacactggg

SEQ ID NO: 3582634 - DNA, 25 bp, Homo sapien
agtctccactataaacactcatcac

SEQ ID NO: 3582635 - DNA, 25 bp, Homo sapien
gctaattatggattagagaaactgt

SEQ ID NO: 3582636 - DNA, 25 bp, Homo sapien
tgagcatgagcatgtcagagcaagg

SEQ ID NO: 3582637 - DNA, 25 bp, Homo sapien
agcatgagcatgtcagagcaaggtt

SEQ ID NO: 3582638 - DNA, 25 bp, Homo sapien
gccagaagctaattatggattagag

SEQ ID NO: 3582639 - DNA, 25 bp, Homo sapien
ggagctgctaagattggttaaagag

SEQ ID NO: 3582640 - DNA, 25 bp, Homo sapien
agaagacaaggacgtcatgccagag

SEQ ID NO: 3582641 - DNA, 25 bp, Homo sapien
gctgctaagattggttaaagagctc

SEQ ID NO: 3582642 - DNA, 25 bp, Homo sapien
agacaaggacgtcatgccagaggag

SEQ ID NO: 3582643 - DNA, 25 bp, Homo sapien
agaatctctgtttaggcaaagatga

SEQ ID NO: 3582644 - DNA, 25 bp, Homo sapien
tctctgccacagtggaatacaaaca

SEQ ID NO: 3582645 - DNA, 25 bp, Homo sapien
ctgccacagtggaatacaaacacac

SEQ ID NO: 3582646 - DNA, 25 bp, Homo sapien
tctttgatctctgccacagtggaat

SEQ ID NO: 3582647 - DNA, 25 bp, Homo sapien
gatctctgccacagtggaatacaaa

SEQ ID NO: 3582648 - DNA, 25 bp, Homo sapien
tagcaattccaaccctctgtctcca

SEQ ID NO: 3582649 - DNA, 25 bp, Homo sapien
gcatagcaattccaaccctctgtct

SEQ ID NO: 3582650 - DNA, 25 bp, Homo sapien
tggcatagcaattccaaccctctgt

SEQ ID NO: 3582651 - DNA, 25 bp, Homo sapien
cttggcatagcaattccaaccctct

SEQ ID NO: 3582652 - DNA, 25 bp, Homo sapien
tggagaaatgctggaacagacttgc

SEQ ID NO: 3582653 - DNA, 25 bp, Homo sapien
gaaatgctggaacagacttgctcat

SEQ ID NO: 3582654 - DNA, 25 bp, Homo sapien
ttggagaaatgctggaacagacttg

SEQ ID NO: 3582655 - DNA, 25 bp, Homo sapien
gagaaatgctggaacagacttgctc

SEQ ID NO: 3582656 - DNA, 25 bp, Homo sapien
gagtttgtcagggtgagaaaatgga

SEQ ID NO: 3582657 - DNA, 25 bp, Homo sapien
ttgtcagggtgagaaaatggattat

SEQ ID NO: 3582658 - DNA, 25 bp, Homo sapien
gtttgtcagggtgagaaaatggatt

SEQ ID NO: 3582659 - DNA, 25 bp, Homo sapien
aatggattatcaggttgtgtaggca

SEQ ID NO: 3582660 - DNA, 25 bp, Homo sapien
tagtccacatgcacaggatcatgag

SEQ ID NO: 3582661 - DNA, 25 bp, Homo sapien
tatatcactaacacactgcaggctg

SEQ ID NO: 3582662 - DNA, 25 bp, Homo sapien
tatcccaaggcaaagttagaatggt

SEQ ID NO: 3582663 - DNA, 25 bp, Homo sapien
aaagttaaaggcagagtagtccaca

SEQ ID NO: 3582664 - DNA, 25 bp, Homo sapien
gactttatcattataagagatatta

SEQ ID NO: 3582665 - DNA, 25 bp, Homo sapien
tattttccaaggcacttagtgccta

SEQ ID NO: 3582666 - DNA, 25 bp, Homo sapien
tccaaggcacttagtgcctagcaca

SEQ ID NO: 3582667 - DNA, 25 bp, Homo sapien
ggtgaatcacagctcttataatgaa

SEQ ID NO: 3582668 - DNA, 25 bp, Homo sapien
taatatacaactctccctcagtgga

SEQ ID NO: 3582669 - DNA, 25 bp, Homo sapien
tttgtgagaaagatcctgctactca

SEQ ID NO: 3582670 - DNA, 25 bp, Homo sapien
aaacccttatcgtaatgaaatagct

SEQ ID NO: 3582671 - DNA, 25 bp, Homo sapien
gcaggagtttagtgccaataataaa

SEQ ID NO: 3582672 - DNA, 25 bp, Homo sapien
ttcttggtacgcattcatttgtaac

SEQ ID NO: 3582673 - DNA, 25 bp, Homo sapien
tcttggtacgcattcatttgtaact

SEQ ID NO: 3582674 - DNA, 25 bp, Homo sapien
tactcaggagggcaacattgagaat

SEQ ID NO: 3582675 - DNA, 25 bp, Homo sapien
gagacagcagaatacatctgacagg

SEQ ID NO: 3582676 - DNA, 25 bp, Homo sapien
tgaaagtaaagctcaaatgtcagtt

SEQ ID NO: 3582677 - DNA, 25 bp, Homo sapien
atgtcagtttcacaactgagacagc

SEQ ID NO: 3582678 - DNA, 25 bp, Homo sapien
caaacaaaagagatacggagcatcc

SEQ ID NO: 3582679 - DNA, 25 bp, Homo sapien
tgtaattcactagaccacagtatgg

SEQ ID NO: 3582680 - DNA, 25 bp, Homo sapien
agaggcacgatttcccacccttgtt

SEQ ID NO: 3582681 - DNA, 25 bp, Homo sapien
cactggactaggagtaatgaagctg

SEQ ID NO: 3582682 - DNA, 25 bp, Homo sapien
caaatgacgttcttctgtttaccca

SEQ ID NO: 3582683 - DNA, 25 bp, Homo sapien
tgtttacccaacagctgcgtcccgg

SEQ ID NO: 3582684 - DNA, 25 bp, Homo sapien
gaagttaatacaaagacagacacgc

SEQ ID NO: 3582685 - DNA, 25 bp, Homo sapien
gacagtatcaccagaagaagcctta

SEQ ID NO: 3582686 - DNA, 25 bp, Homo sapien
gcactacgcactaattcttctggct

SEQ ID NO: 3582687 - DNA, 25 bp, Homo sapien
aattcttctggctgattatctactt

SEQ ID NO: 3582688 - DNA, 25 bp, Homo sapien
ttcagcactacgcactaattcttct

SEQ ID NO: 3582689 - DNA, 25 bp, Homo sapien
tacgcactaattcttctggctgatt

SEQ ID NO: 3582690 - DNA, 25 bp, Homo sapien
catggctgacccttggagagaaaag

SEQ ID NO: 3582691 - DNA, 25 bp, Homo sapien
tggaagcccccggagttggaagcaa

SEQ ID NO: 3582692 - DNA, 25 bp, Homo sapien
tcaagatgcaatgaggggtgcaacc

SEQ ID NO: 3582693 - DNA, 25 bp, Homo sapien
gaagcaattagtcaagatgcaatga

SEQ ID NO: 3582694 - DNA, 25 bp, Homo sapien
tctgtaaagggtatgatgctagcca

SEQ ID NO: 3582695 - DNA, 25 bp, Homo sapien
cacagactcccaagggttagagggt

SEQ ID NO: 3582696 - DNA, 25 bp, Homo sapien
tagttcagagcaagcaatcggccag

SEQ ID NO: 3582697 - DNA, 25 bp, Homo sapien
tagattagctccttgagccagtgcc

SEQ ID NO: 3582698 - DNA, 25 bp, Homo sapien
gcatcatcattcacatatgcctctg

SEQ ID NO: 3582699 - DNA, 25 bp, Homo sapien
ccagctgctaagtggaatcttggca

SEQ ID NO: 3582700 - DNA, 25 bp, Homo sapien
gaagagatgtaactggggaccagct

SEQ ID NO: 3582701 - DNA, 25 bp, Homo sapien
tcattcacatatgcctctgggaggc

SEQ ID NO: 3582702 - DNA, 25 bp, Homo sapien
tctggaagcattcaggcggatatgg

SEQ ID NO: 3582703 - DNA, 25 bp, Homo sapien
tactgtcttcaaacccctgggaatc

SEQ ID NO: 3582704 - DNA, 25 bp, Homo sapien
gatccttgggatagtcaggactaca

SEQ ID NO: 3582705 - DNA, 25 bp, Homo sapien
gtccaacaaaggattcgactcgcct

SEQ ID NO: 3582706 - DNA, 25 bp, Homo sapien
cataggcatttttaagcttagatgg

SEQ ID NO: 3582707 - DNA, 25 bp, Homo sapien
attagagggtgcagtgcacaacagc

SEQ ID NO: 3582708 - DNA, 25 bp, Homo sapien
tcatctgttaactgcccccattaga

SEQ ID NO: 3582709 - DNA, 25 bp, Homo sapien
agcacgcagtgaggctacaggagag

SEQ ID NO: 3582710 - DNA, 25 bp, Homo sapien
tttggaaggcattttcctagcggca

SEQ ID NO: 3582711 - DNA, 25 bp, Homo sapien
ctagcggcactcctttccaaagttt

SEQ ID NO: 3582712 - DNA, 25 bp, Homo sapien
ggcattttcctagcggcactccttt

SEQ ID NO: 3582713 - DNA, 25 bp, Homo sapien
ttgatgaatctgatgaaatgtcttc

SEQ ID NO: 3582714 - DNA, 25 bp, Homo sapien
tgttataaaacaaaatcgatgaaca

SEQ ID NO: 3582715 - DNA, 25 bp, Homo sapien
ctgttataaaacaaaatcgatgaac

SEQ ID NO: 3582716 - DNA, 25 bp, Homo sapien
taaatagcaaactgagacaagccct

SEQ ID NO: 3582717 - DNA, 25 bp, Homo sapien
tcactggaacgaaaaggagctaaac

SEQ ID NO: 3582718 - DNA, 25 bp, Homo sapien
gacaagccctacattttacagcctg

SEQ ID NO: 3582719 - DNA, 25 bp, Homo sapien
gaaggcaatcagcatcagttgtgca

SEQ ID NO: 3582720 - DNA, 25 bp, Homo sapien
aatgcccttaggtggcatcaggtga

SEQ ID NO: 3582721 - DNA, 25 bp, Homo sapien
aggcaatgcccttaggtggcatcag

SEQ ID NO: 3582722 - DNA, 25 bp, Homo sapien
gcaatgcccttaggtggcatcaggt

SEQ ID NO: 3582723 - DNA, 25 bp, Homo sapien
atgcccttaggtggcatcaggtgag

SEQ ID NO: 3582724 - DNA, 25 bp, Homo sapien
gaattatgtaatgcatttgattaaa

SEQ ID NO: 3582725 - DNA, 25 bp, Homo sapien
tttaagaattatgtaatgcatttga

SEQ ID NO: 3582726 - DNA, 25 bp, Homo sapien
catttaagaattatgtaatgcattt

SEQ ID NO: 3582727 - DNA, 25 bp, Homo sapien
taagaattatgtaatgcatttgatt

SEQ ID NO: 3582728 - DNA, 25 bp, Homo sapien
aaatcatcctttacatcagcattcc

SEQ ID NO: 3582729 - DNA, 25 bp, Homo sapien
catcctttacatcagcattccataa

SEQ ID NO: 3582730 - DNA, 25 bp, Homo sapien
tttacatcagcattccataaagcag

SEQ ID NO: 3582731 - DNA, 25 bp, Homo sapien
tcagcattccataaagcagactcac

SEQ ID NO: 3582732 - DNA, 25 bp, Homo sapien
agctctctgcattagaactggtgtt

SEQ ID NO: 3582733 - DNA, 25 bp, Homo sapien
tctgcattagaactggtgtttccat

SEQ ID NO: 3582734 - DNA, 25 bp, Homo sapien
ctccagctctctgcattagaactgg

SEQ ID NO: 3582735 - DNA, 25 bp, Homo sapien
ctctgcattagaactggtgtttcca

SEQ ID NO: 3582736 - DNA, 25 bp, Homo sapien
cttgtttcatatatggcgatgctag

SEQ ID NO: 3582737 - DNA, 25 bp, Homo sapien
ggcgatgctagagtcaattcaactt

SEQ ID NO: 3582738 - DNA, 25 bp, Homo sapien
aatcagactcagagaaaccttcttt

SEQ ID NO: 3582739 - DNA, 25 bp, Homo sapien
gatgctagagtcaattcaactttac

SEQ ID NO: 3582740 - DNA, 25 bp, Homo sapien
ggagaggaatgggttgcctatttct

SEQ ID NO: 3582741 - DNA, 25 bp, Homo sapien
tttctggacacactaattgcttcag

SEQ ID NO: 3582742 - DNA, 25 bp, Homo sapien
gcctatttctggacacactaattgc

SEQ ID NO: 3582743 - DNA, 25 bp, Homo sapien
gaggaatgggttgcctatttctgga

SEQ ID NO: 3582744 - DNA, 25 bp, Homo sapien
gcaaccccactttcactgtccctgt

SEQ ID NO: 3582745 - DNA, 25 bp, Homo sapien
tccacttctggaaccacaaaaatct

SEQ ID NO: 3582746 - DNA, 25 bp, Homo sapien
tttaatggtccctatttcatgagcc

SEQ ID NO: 3582747 - DNA, 25 bp, Homo sapien
ggttctagggatctcaactccactt

SEQ ID NO: 3582748 - DNA, 25 bp, Homo sapien
aagtgcgtctcctcccaacatttta

SEQ ID NO: 3582749 - DNA, 25 bp, Homo sapien
ggttgacttgagattccaaaccatt

SEQ ID NO: 3582750 - DNA, 25 bp, Homo sapien
ataaatcagtcacaagtgcgtctcc

SEQ ID NO: 3582751 - DNA, 25 bp, Homo sapien
ttgacttgagattccaaaccattac

SEQ ID NO: 3582752 - DNA, 25 bp, Homo sapien
tatccttcatttcagaggtctgtga

SEQ ID NO: 3582753 - DNA, 25 bp, Homo sapien
atccttcatttcagaggtctgtgag

SEQ ID NO: 3582754 - DNA, 25 bp, Homo sapien
ttttatccttcatttcagaggtctg

SEQ ID NO: 3582755 - DNA, 25 bp, Homo sapien
ttatccttcatttcagaggtctgtg

SEQ ID NO: 3582756 - DNA, 25 bp, Homo sapien
tgctctgactgtgaggactccttct

SEQ ID NO: 3582757 - DNA, 25 bp, Homo sapien
cagttattaacggagcctcggcctt

SEQ ID NO: 3582758 - DNA, 25 bp, Homo sapien
gcctgggctcctctgtactacctat

SEQ ID NO: 3582759 - DNA, 25 bp, Homo sapien
attcagaagtggctcgcctgggctc

SEQ ID NO: 3582760 - DNA, 25 bp, Homo sapien
ctctgatttgggttgaacaattgtt

SEQ ID NO: 3582761 - DNA, 25 bp, Homo sapien
ttgggttgaacaattgtttccctca

SEQ ID NO: 3582762 - DNA, 25 bp, Homo sapien
tgatttgggttgaacaattgtttcc

SEQ ID NO: 3582763 - DNA, 25 bp, Homo sapien
tgggttgaacaattgtttccctcac

SEQ ID NO: 3582764 - DNA, 25 bp, Homo sapien
ggcctttgccatattgagcaacaat

SEQ ID NO: 3582765 - DNA, 25 bp, Homo sapien
aatgagctaagcgtctggtctgatg

SEQ ID NO: 3582766 - DNA, 25 bp, Homo sapien
gaactatggtgtccatcgtagccca

SEQ ID NO: 3582767 - DNA, 25 bp, Homo sapien
ttttatcaggaactacattggagga

SEQ ID NO: 3582768 - DNA, 25 bp, Homo sapien
ggatttagggggctacatactggct

SEQ ID NO: 3582769 - DNA, 25 bp, Homo sapien
ttccagctggataacttaaccatac

SEQ ID NO: 3582770 - DNA, 25 bp, Homo sapien
ccagctggataacttaaccatactt

SEQ ID NO: 3582771 - DNA, 25 bp, Homo sapien
ccttccagctggataacttaaccat

SEQ ID NO: 3582772 - DNA, 25 bp, Homo sapien
aagctgggaagttggatccaatgga

SEQ ID NO: 3582773 - DNA, 25 bp, Homo sapien
tcattcaatacaggtctgggtggaa

SEQ ID NO: 3582774 - DNA, 25 bp, Homo sapien
gaaaaagcatatcttggggagggct

SEQ ID NO: 3582775 - DNA, 25 bp, Homo sapien
tacagtctccgaaatttccgtttga

SEQ ID NO: 3582776 - DNA, 25 bp, Homo sapien
tctctcactggaaaaggagctagta

SEQ ID NO: 3582777 - DNA, 25 bp, Homo sapien
tagcacctggagtatgccctttgaa

SEQ ID NO: 3582778 - DNA, 25 bp, Homo sapien
tccatgaacttttccaccagagggt

SEQ ID NO: 3582779 - DNA, 25 bp, Homo sapien
tggttccagtgataacaggcgccaa

SEQ ID NO: 3582780 - DNA, 25 bp, Homo sapien
tgattcacgaactagaggtctgtct

SEQ ID NO: 3582781 - DNA, 25 bp, Homo sapien
tgtccatggatgatacaccctgtga

SEQ ID NO: 3582782 - DNA, 25 bp, Homo sapien
taagaccactcgtttgggaatggcc

SEQ ID NO: 3582783 - DNA, 25 bp, Homo sapien
cacaggctgatatgctttagcagaa

SEQ ID NO: 3582784 - DNA, 25 bp, Homo sapien
tccttcccaaaaggatattctgtca

SEQ ID NO: 3582785 - DNA, 25 bp, Homo sapien
tgtatttctctctctgcacttggtt

SEQ ID NO: 3582786 - DNA, 25 bp, Homo sapien
cactcactcttttgtatttctctct

SEQ ID NO: 3582787 - DNA, 25 bp, Homo sapien
caaaaggatattctgtcactcactc

SEQ ID NO: 3582788 - DNA, 25 bp, Homo sapien
caaatggttgcaatatacctgggcc

SEQ ID NO: 3582789 - DNA, 25 bp, Homo sapien
tgtcaccaagtcaacagcaacctgt

SEQ ID NO: 3582790 - DNA, 25 bp, Homo sapien
agttactatttgaaggagatgcccc

SEQ ID NO: 3582791 - DNA, 25 bp, Homo sapien
tcagtggcatatggaccagaacgtg

SEQ ID NO: 3582792 - DNA, 25 bp, Homo sapien
tagagccgggagaggagggggctta

SEQ ID NO: 3582793 - DNA, 25 bp, Homo sapien
cttgctgacggtctctagaactgcc

SEQ ID NO: 3582794 - DNA, 25 bp, Homo sapien
tgctgacggtctctagaactgccac

SEQ ID NO: 3582795 - DNA, 25 bp, Homo sapien
acctgagatggctcaggctcaacac

SEQ ID NO: 3582796 - DNA, 25 bp, Homo sapien
ggctcaacacaatgagacagttcat

SEQ ID NO: 3582797 - DNA, 25 bp, Homo sapien
aaagagcatgcttaaagaactgtta

SEQ ID NO: 3582798 - DNA, 25 bp, Homo sapien
gaaaagagcatgcttaaagaactgt

SEQ ID NO: 3582799 - DNA, 25 bp, Homo sapien
gagcatgcttaaagaactgttaatc

SEQ ID NO: 3582800 - DNA, 25 bp, Homo sapien
gcatgcttaaagaactgttaatcat

SEQ ID NO: 3582801 - DNA, 25 bp, Homo sapien
gtttttataatctagtagtgacaac

SEQ ID NO: 3582802 - DNA, 25 bp, Homo sapien
aaacttctgaatgagaatgcagccc

SEQ ID NO: 3582803 - DNA, 25 bp, Homo sapien
ctgtattgagaaggcttagggtcac

SEQ ID NO: 3582804 - DNA, 25 bp, Homo sapien
gaaaagaaccagaagtcattggctg

SEQ ID NO: 3582805 - DNA, 25 bp, Homo sapien
tcattgatggttggtgaattctcca

SEQ ID NO: 3582806 - DNA, 25 bp, Homo sapien
tctgtcagattctaaaacactaaat

SEQ ID NO: 3582807 - DNA, 25 bp, Homo sapien
tgtcagattctaaaacactaaattc

SEQ ID NO: 3582808 - DNA, 25 bp, Homo sapien
ctgtcagattctaaaacactaaatt

SEQ ID NO: 3582809 - DNA, 25 bp, Homo sapien
atctgtcagattctaaaacactaaa

SEQ ID NO: 3582810 - DNA, 25 bp, Homo sapien
ttcccgaccatggattagcccagga

SEQ ID NO: 3582811 - DNA, 25 bp, Homo sapien
tggagttgcgcttgaggatccctct

SEQ ID NO: 3582812 - DNA, 25 bp, Homo sapien
ggttaggccaggtgacacaattttg

SEQ ID NO: 3582813 - DNA, 25 bp, Homo sapien
tctgtgctactggaactggagttgc

SEQ ID NO: 3582814 - DNA, 25 bp, Homo sapien
aagtatctgcgacagttgacttttc

SEQ ID NO: 3582815 - DNA, 25 bp, Homo sapien
ggattgaagtatctgcgacagttga

SEQ ID NO: 3582816 - DNA, 25 bp, Homo sapien
ggattggagccttgatttgggaccc

SEQ ID NO: 3582817 - DNA, 25 bp, Homo sapien
ttggagccttgatttgggacccatt

SEQ ID NO: 3582818 - DNA, 25 bp, Homo sapien
tttgaagagattgaaatgtttagca

SEQ ID NO: 3582819 - DNA, 25 bp, Homo sapien
tgagccacaaacctgatcaaacgct

SEQ ID NO: 3582820 - DNA, 25 bp, Homo sapien
aatgtttagcatttcctcttaacag

SEQ ID NO: 3582821 - DNA, 25 bp, Homo sapien
gctgacttacatcaattgagccaca

SEQ ID NO: 3582822 - DNA, 25 bp, Homo sapien
ttttagtttgttgtgatgagtgacc

SEQ ID NO: 3582823 - DNA, 25 bp, Homo sapien
tggagctattaaacggattcttcct

SEQ ID NO: 3582824 - DNA, 25 bp, Homo sapien
gaccttctggcaacttggagctatt

SEQ ID NO: 3582825 - DNA, 25 bp, Homo sapien
cttggagctattaaacggattcttc

SEQ ID NO: 3582826 - DNA, 25 bp, Homo sapien
agacacatttggtttccttgtgttt

SEQ ID NO: 3582827 - DNA, 25 bp, Homo sapien
actggaagctggatttaccacactg

SEQ ID NO: 3582828 - DNA, 25 bp, Homo sapien
ggacatatcaatcacactggaagct

SEQ ID NO: 3582829 - DNA, 25 bp, Homo sapien
ttttcctgggacatatcaatcacac

SEQ ID NO: 3582830 - DNA, 25 bp, Homo sapien
aacattgcaggaacttgatactgag

SEQ ID NO: 3582831 - DNA, 25 bp, Homo sapien
ttaaagtataggtaagaaacattgc

SEQ ID NO: 3582832 - DNA, 25 bp, Homo sapien
cttgatactgagtaaggtagtagtt

SEQ ID NO: 3582833 - DNA, 25 bp, Homo sapien
tataggtaagaaacattgcaggaac

SEQ ID NO: 3582834 - DNA, 25 bp, Homo sapien
ttctacaacgccagccagctctgga

SEQ ID NO: 3582835 - DNA, 25 bp, Homo sapien
ggctcttctacaacgccagccagct

SEQ ID NO: 3582836 - DNA, 25 bp, Homo sapien
tctggctcttctacaacgccagcca

SEQ ID NO: 3582837 - DNA, 25 bp, Homo sapien
ctcgggcttgctggtgctgcatctt

SEQ ID NO: 3582838 - DNA, 25 bp, Homo sapien
tttctcatagatgctctgatgatat

SEQ ID NO: 3582839 - DNA, 25 bp, Homo sapien
gctctgatgatatctgcgccatgga

SEQ ID NO: 3582840 - DNA, 25 bp, Homo sapien
gctgctggtcatccttaattttttc

SEQ ID NO: 3582841 - DNA, 25 bp, Homo sapien
cgccatggattttgtccctgtgcct

SEQ ID NO: 3582842 - DNA, 25 bp, Homo sapien
ctctcttcttcggccctcttcagag

SEQ ID NO: 3582843 - DNA, 25 bp, Homo sapien
ttcagagcagcatcccgctgcaaaa

SEQ ID NO: 3582844 - DNA, 25 bp, Homo sapien
cagcatcccgctgcaaaaccttcat

SEQ ID NO: 3582845 - DNA, 25 bp, Homo sapien
tctcttcttcggccctcttcagagc

SEQ ID NO: 3582846 - DNA, 25 bp, Homo sapien
cagtcaggaagcttaagtcaatcat

SEQ ID NO: 3582847 - DNA, 25 bp, Homo sapien
tcagtcaggaagcttaagtcaatca

SEQ ID NO: 3582848 - DNA, 25 bp, Homo sapien
tgaacaactaagactgcaaccagga

SEQ ID NO: 3582849 - DNA, 25 bp, Homo sapien
aaatgtggctcaaaattctcagggc

SEQ ID NO: 3582850 - DNA, 25 bp, Homo sapien
ttagggcagctgatagcaagatcct

SEQ ID NO: 3582851 - DNA, 25 bp, Homo sapien
tgtcgtcaattcataagaggcagca

SEQ ID NO: 3582852 - DNA, 25 bp, Homo sapien
tgtctaccatacacaatccagctag

SEQ ID NO: 3582853 - DNA, 25 bp, Homo sapien
tcatgtaggcggatgtaattttctc

SEQ ID NO: 3582854 - DNA, 25 bp, Homo sapien
tgccatgccttgactcgaaaacctt

SEQ ID NO: 3582855 - DNA, 25 bp, Homo sapien
tatccaaagcaccactctcatcatg

SEQ ID NO: 3582856 - DNA, 25 bp, Homo sapien
gagttctagctcagacaactgttgt

SEQ ID NO: 3582857 - DNA, 25 bp, Homo sapien
tccatcctgtttagaaaccccatgc

SEQ ID NO: 3582858 - DNA, 25 bp, Homo sapien
cactgagttctagctcagacaactg

SEQ ID NO: 3582859 - DNA, 25 bp, Homo sapien
gggacaaagctcacgtttattccat

SEQ ID NO: 3582860 - DNA, 25 bp, Homo sapien
tgcccaccaccatgcaggctacttt

SEQ ID NO: 3582861 - DNA, 25 bp, Homo sapien
aacctctgactccctattcaagtga

SEQ ID NO: 3582862 - DNA, 25 bp, Homo sapien
cctctgactccctattcaagtgatt

SEQ ID NO: 3582863 - DNA, 25 bp, Homo sapien
cccaccaccatgcaggctacttttt

SEQ ID NO: 3582864 - DNA, 25 bp, Homo sapien
ggcggatcacttaagctcacaagtt

SEQ ID NO: 3582865 - DNA, 25 bp, Homo sapien
cctgggccacgtggcaaaaccctat

SEQ ID NO: 3582866 - DNA, 25 bp, Homo sapien
taggtgtagtggtgcatgccaagta

SEQ ID NO: 3582867 - DNA, 25 bp, Homo sapien
tgtagtggtgcatgccaagtagtcc

SEQ ID NO: 3582868 - DNA, 25 bp, Homo sapien
agagactttcatatcaccaaactca

SEQ ID NO: 3582869 - DNA, 25 bp, Homo sapien
cctatgtttccagggtgtctcaaac

SEQ ID NO: 3582870 - DNA, 25 bp, Homo sapien
tttcatatcaccaaactcaaaagaa

SEQ ID NO: 3582871 - DNA, 25 bp, Homo sapien
tctcaaggtcacaaaagagactttc

SEQ ID NO: 3582872 - DNA, 25 bp, Homo sapien
gataaagcagattattcccagatga

SEQ ID NO: 3582873 - DNA, 25 bp, Homo sapien
cagattattcccagatgagtttttg

SEQ ID NO: 3582874 - DNA, 25 bp, Homo sapien
taaatttgataaagcagattattcc

SEQ ID NO: 3582875 - DNA, 25 bp, Homo sapien
ttgataaagcagattattcccagat

SEQ ID NO: 3582876 - DNA, 25 bp, Homo sapien
tcccaggatctaggtttaaaatcaa

SEQ ID NO: 3582877 - DNA, 25 bp, Homo sapien
ctttggaactggagcccacatcctc

SEQ ID NO: 3582878 - DNA, 25 bp, Homo sapien
ccagatcttacagtgggcaatcaag

SEQ ID NO: 3582879 - DNA, 25 bp, Homo sapien
tacacaggatggcacagagtgaaag

SEQ ID NO: 3582880 - DNA, 25 bp, Homo sapien
atctgaccggtagagccacgtctcc

SEQ ID NO: 3582881 - DNA, 25 bp, Homo sapien
agaatctgaccggtagagccacgtc

SEQ ID NO: 3582882 - DNA, 25 bp, Homo sapien
tgcagaatctgaccggtagagccac

SEQ ID NO: 3582883 - DNA, 25 bp, Homo sapien
cctgcagaatctgaccggtagagcc

SEQ ID NO: 3582884 - DNA, 25 bp, Homo sapien
tcagcagaaccctcgcctacccggg

SEQ ID NO: 3582885 - DNA, 25 bp, Homo sapien
agaaaacgcgatagctcagcagaac

SEQ ID NO: 3582886 - DNA, 25 bp, Homo sapien
caggtcagtccctgaaagccctaga

SEQ ID NO: 3582887 - DNA, 25 bp, Homo sapien
cctgagcaatctgggggcagttact

SEQ ID NO: 3582888 - DNA, 25 bp, Homo sapien
aggtggctctggagtaggtgggaaa

SEQ ID NO: 3582889 - DNA, 25 bp, Homo sapien
ctgggcagcggaggtggctctggag

SEQ ID NO: 3582890 - DNA, 25 bp, Homo sapien
cagcggaggtggctctggagtaggt

SEQ ID NO: 3582891 - DNA, 25 bp, Homo sapien
gaggtggctctggagtaggtgggaa

SEQ ID NO: 3582892 - DNA, 25 bp, Homo sapien
gcctcgccgtctctcttgtcttctg

SEQ ID NO: 3582893 - DNA, 25 bp, Homo sapien
cccgggcaaggcgttgcgagccttc

SEQ ID NO: 3582894 - DNA, 25 bp, Homo sapien
agccttcactctcccgacggacgct

SEQ ID NO: 3582895 - DNA, 25 bp, Homo sapien
tcggcctggcggtgcaaaccgcgca

SEQ ID NO: 3582896 - DNA, 25 bp, Homo sapien
agcctctgcactccgagaagggaca

SEQ ID NO: 3582897 - DNA, 25 bp, Homo sapien
gtgtggagcactaggagcctctgca

SEQ ID NO: 3582898 - DNA, 25 bp, Homo sapien
taaagcagcactgttgttattgtta

SEQ ID NO: 3582899 - DNA, 25 bp, Homo sapien
tattatttttatcacggcgcgttag

SEQ ID NO: 3582900 - DNA, 25 bp, Homo sapien
taaatataacaagcaactgaagatt

SEQ ID NO: 3582901 - DNA, 25 bp, Homo sapien
aaatataacaagcaactgaagattt

SEQ ID NO: 3582902 - DNA, 25 bp, Homo sapien
ttaaatataacaagcaactgaagat

SEQ ID NO: 3582903 - DNA, 25 bp, Homo sapien
gactgtgctagaccctgccagtggc

SEQ ID NO: 3582904 - DNA, 25 bp, Homo sapien
gaatgactgtgctagaccctgccag

SEQ ID NO: 3582905 - DNA, 25 bp, Homo sapien
tgactgtgctagaccctgccagtgg

SEQ ID NO: 3582906 - DNA, 25 bp, Homo sapien
ctgaatgactgtgctagaccctgcc

SEQ ID NO: 3582907 - DNA, 25 bp, Homo sapien
gaataacttgattgctcatcacttc

SEQ ID NO: 3582908 - DNA, 25 bp, Homo sapien
cctaaaatgagaactccttcaggca

SEQ ID NO: 3582909 - DNA, 25 bp, Homo sapien
tcaagactggattaggttttccaca

SEQ ID NO: 3582910 - DNA, 25 bp, Homo sapien
gatagaatctgtccaacatctgacc

SEQ ID NO: 3582911 - DNA, 25 bp, Homo sapien
taacaaatctatacacccttgtaac

SEQ ID NO: 3582912 - DNA, 25 bp, Homo sapien
caaatggtttttatctggcttcaca

SEQ ID NO: 3582913 - DNA, 25 bp, Homo sapien
tgaactggttcgcaaaggcagtaag

SEQ ID NO: 3582914 - DNA, 25 bp, Homo sapien
cagtaagttcattcctagttcgggt

SEQ ID NO: 3582915 - DNA, 25 bp, Homo sapien
tagcaattgctcatctcaaacaggt

SEQ ID NO: 3582916 - DNA, 25 bp, Homo sapien
tttacagcggaagacacaaactctg

SEQ ID NO: 3582917 - DNA, 25 bp, Homo sapien
caaactctgagatccaaatgacctg

SEQ ID NO: 3582918 - DNA, 25 bp, Homo sapien
aaaagttgtccgttcaaagccagtg

SEQ ID NO: 3582919 - DNA, 25 bp, Homo sapien
acttccaggcttgcgactaaaggga

SEQ ID NO: 3582920 - DNA, 25 bp, Homo sapien
tctcacttggtggactctcagtcag

SEQ ID NO: 3582921 - DNA, 25 bp, Homo sapien
gatgctggctaaactgagggcctca

SEQ ID NO: 3582922 - DNA, 25 bp, Homo sapien
tccaaggtggtttatatggctagca

SEQ ID NO: 3582923 - DNA, 25 bp, Homo sapien
gaagggctccactagacagttctca

SEQ ID NO: 3582924 - DNA, 25 bp, Homo sapien
ttacttgagaatcctcctcccagtg

SEQ ID NO: 3582925 - DNA, 25 bp, Homo sapien
ttgatgtagtcaaactgccatggcc

SEQ ID NO: 3582926 - DNA, 25 bp, Homo sapien
gatgtagtcaaactgccatggccat

SEQ ID NO: 3582927 - DNA, 25 bp, Homo sapien
catggccatggtgtattacttgaga

SEQ ID NO: 3582928 - DNA, 25 bp, Homo sapien
cttctctcagggctaccacaagcca

SEQ ID NO: 3582929 - DNA, 25 bp, Homo sapien
ttctctcagggctaccacaagccaa

SEQ ID NO: 3582930 - DNA, 25 bp, Homo sapien
acttctctcagggctaccacaagcc

SEQ ID NO: 3582931 - DNA, 25 bp, Homo sapien
ctccattgtgttcggtgctttcctg

SEQ ID NO: 3582932 - DNA, 25 bp, Homo sapien
tctccattgtgttcggtgctttcct

SEQ ID NO: 3582933 - DNA, 25 bp, Homo sapien
aatctccattgtgttcggtgctttc

SEQ ID NO: 3582934 - DNA, 25 bp, Homo sapien
ttaatctccattgtgttcggtgctt

SEQ ID NO: 3582935 - DNA, 25 bp, Homo sapien
tatattgcctttgttaaattttctc

SEQ ID NO: 3582936 - DNA, 25 bp, Homo sapien
ttccttgatgctgcccacacctttg

SEQ ID NO: 3582937 - DNA, 25 bp, Homo sapien
attgcctttgttaaattttctccag

SEQ ID NO: 3582938 - DNA, 25 bp, Homo sapien
tggttttccttgatgctgcccacac

SEQ ID NO: 3582939 - DNA, 25 bp, Homo sapien
atcactctcaagagatttcagagca

SEQ ID NO: 3582940 - DNA, 25 bp, Homo sapien
aaggtatcactctcaagagatttca

SEQ ID NO: 3582941 - DNA, 25 bp, Homo sapien
aggtatcactctcaagagatttcag

SEQ ID NO: 3582942 - DNA, 25 bp, Homo sapien
tcactctcaagagatttcagagcag

SEQ ID NO: 3582943 - DNA, 25 bp, Homo sapien
tataactaacagaggatagattctt

SEQ ID NO: 3582944 - DNA, 25 bp, Homo sapien
aatataactaacagaggatagattc

SEQ ID NO: 3582945 - DNA, 25 bp, Homo sapien
atataactaacagaggatagattct

SEQ ID NO: 3582946 - DNA, 25 bp, Homo sapien
ataactaacagaggatagattcttt

SEQ ID NO: 3582947 - DNA, 25 bp, Homo sapien
tcaggaagctcggaccgaaggccgc

SEQ ID NO: 3582948 - DNA, 25 bp, Homo sapien
caggaagctcggaccgaaggccgcc

SEQ ID NO: 3582949 - DNA, 25 bp, Homo sapien
aggaagctcggaccgaaggccgcca

SEQ ID NO: 3582950 - DNA, 25 bp, Homo sapien
tctggcggccgccgcgccagcgtct

SEQ ID NO: 3582951 - DNA, 25 bp, Homo sapien
gtctgggaaggccaagctgacgcac

SEQ ID NO: 3582952 - DNA, 25 bp, Homo sapien
ccagcgtctgggaaggccaagctga

SEQ ID NO: 3582953 - DNA, 25 bp, Homo sapien
acgctctggcggccgccgcgccagc

SEQ ID NO: 3582954 - DNA, 25 bp, Homo sapien
gtggcagctggactagccctcgaac

SEQ ID NO: 3582955 - DNA, 25 bp, Homo sapien
cctggcgggcggcattgagatctac

SEQ ID NO: 3582956 - DNA, 25 bp, Homo sapien
cagtacgtgaagacgcagtggcagc

SEQ ID NO: 3582957 - DNA, 25 bp, Homo sapien
attgagatctacatcaccttcccca

SEQ ID NO: 3582958 - DNA, 25 bp, Homo sapien
aaagcggccgccagcttcggaatgt

SEQ ID NO: 3582959 - DNA, 25 bp, Homo sapien
ccgtggtgatcgtgtgccccatgga

SEQ ID NO: 3582960 - DNA, 25 bp, Homo sapien
aatgttctagttcctcggcaaccac

SEQ ID NO: 3582961 - DNA, 25 bp, Homo sapien
gttctgggcctgtaccgcagtctca

SEQ ID NO: 3582962 - DNA, 25 bp, Homo sapien
ctggaaccaggccatccgcttcttc

SEQ ID NO: 3582963 - DNA, 25 bp, Homo sapien
gacgtgattaagacccgcaggtagg

SEQ ID NO: 3582964 - DNA, 25 bp, Homo sapien
ctttggaaacactcctctggacgtg

SEQ ID NO: 3582965 - DNA, 25 bp, Homo sapien
gggcttcggagccatcgtgtgcaca

SEQ ID NO: 3582966 - DNA, 25 bp, Homo sapien
cattccctgcacaactggtaccgag

SEQ ID NO: 3582967 - DNA, 25 bp, Homo sapien
taccggaacttgatggactgtggct

SEQ ID NO: 3582968 - DNA, 25 bp, Homo sapien
gcacaaataccggaacttgatggac

SEQ ID NO: 3582969 - DNA, 25 bp, Homo sapien
ctggaggcgcacaaataccggaact

SEQ ID NO: 3582970 - DNA, 25 bp, Homo sapien
gaggcgcacaaataccggaacttga

SEQ ID NO: 3582971 - DNA, 25 bp, Homo sapien
atgattccagtgcagtagtgccaaa

SEQ ID NO: 3582972 - DNA, 25 bp, Homo sapien
tccagtgcagtagtgccaaaaggct

SEQ ID NO: 3582973 - DNA, 25 bp, Homo sapien
cagtgcagtagtgccaaaaggctcc

SEQ ID NO: 3582974 - DNA, 25 bp, Homo sapien
ctttccacatcccttgagctctgtg

SEQ ID NO: 3582975 - DNA, 25 bp, Homo sapien
catgtgtcctatagcgccgtgtctc

SEQ ID NO: 3582976 - DNA, 25 bp, Homo sapien
gcattgtggccgtcaagtccatgtg

SEQ ID NO: 3582977 - DNA, 25 bp, Homo sapien
gccgtcaagtccatgtgtcctatag

SEQ ID NO: 3582978 - DNA, 25 bp, Homo sapien
tctgtgcattgtggccgtcaagtcc

SEQ ID NO: 3582979 - DNA, 25 bp, Homo sapien
tgtgtcatgtgaccctgtgcccgcc

SEQ ID NO: 3582980 - DNA, 25 bp, Homo sapien
tgcccacttgtccatgtgcttacta

SEQ ID NO: 3582981 - DNA, 25 bp, Homo sapien
ccacttgtccatgtgcttactatga

SEQ ID NO: 3582982 - DNA, 25 bp, Homo sapien
acttgtccatgtgcttactatgagc

SEQ ID NO: 3582983 - DNA, 25 bp, Homo sapien
cctaattgctagaaccaatgggcag

SEQ ID NO: 3582984 - DNA, 25 bp, Homo sapien
gaactactggcacattgaaggcact

SEQ ID NO: 3582985 - DNA, 25 bp, Homo sapien
gctaattgcctactctcacaagaaa

SEQ ID NO: 3582986 - DNA, 25 bp, Homo sapien
tgacaattcccaggtatatctaggg

SEQ ID NO: 3582987 - DNA, 25 bp, Homo sapien
cttaatccagtctattgttgttggg

SEQ ID NO: 3582988 - DNA, 25 bp, Homo sapien
ggtgtattacgtgccacattttctt

SEQ ID NO: 3582989 - DNA, 25 bp, Homo sapien
taatccagtctattgttgttgggca

SEQ ID NO: 3582990 - DNA, 25 bp, Homo sapien
tattccatggtgtattacgtgccac

SEQ ID NO: 3582991 - DNA, 25 bp, Homo sapien
gcacgtcacatactgaaacatactt

SEQ ID NO: 3582992 - DNA, 25 bp, Homo sapien
gaccttaaatataaacacctcctca

SEQ ID NO: 3582993 - DNA, 25 bp, Homo sapien
aatggctatgaagcacgtcacatac

SEQ ID NO: 3582994 - DNA, 25 bp, Homo sapien
ggataacacttatcaaacatagccc

SEQ ID NO: 3582995 - DNA, 25 bp, Homo sapien
tatgaaaatggtttaataatactga

SEQ ID NO: 3582996 - DNA, 25 bp, Homo sapien
ttatatgaaaatggtttaataatac

SEQ ID NO: 3582997 - DNA, 25 bp, Homo sapien
atatgaaaatggtttaataatactg

SEQ ID NO: 3582998 - DNA, 25 bp, Homo sapien
tgaaaatggtttaataatactgaaa

SEQ ID NO: 3582999 - DNA, 25 bp, Homo sapien
agctgataaaatttattggctacga

SEQ ID NO: 3583000 - DNA, 25 bp, Homo sapien
gataaaatttattggctacgactac

SEQ ID NO: 3583001 - DNA, 25 bp, Homo sapien
ataaaatttattggctacgactaca

SEQ ID NO: 3583002 - DNA, 25 bp, Homo sapien
ctgataaaatttattggctacgact

SEQ ID NO: 3583003 - DNA, 25 bp, Homo sapien
caatcaaaggtttctttggcagaca

SEQ ID NO: 3583004 - DNA, 25 bp, Homo sapien
gactaaaggcatctgatcaaaagac

SEQ ID NO: 3583005 - DNA, 25 bp, Homo sapien
catgtactctgaaccctatgcacta

SEQ ID NO: 3583006 - DNA, 25 bp, Homo sapien
tatgagacacttatcaatgcaaagc

SEQ ID NO: 3583007 - DNA, 25 bp, Homo sapien
aaaatgcatctcagaccagaatacc

SEQ ID NO: 3583008 - DNA, 25 bp, Homo sapien
taatcacctgggtatattttattag

SEQ ID NO: 3583009 - DNA, 25 bp, Homo sapien
atgaaaatgcatctcagaccagaat

SEQ ID NO: 3583010 - DNA, 25 bp, Homo sapien
aatcacctgggtatattttattagg

SEQ ID NO: 3583011 - DNA, 25 bp, Homo sapien
tgcattttatttgaaaatccaccca

SEQ ID NO: 3583012 - DNA, 25 bp, Homo sapien
ctgcattttatttgaaaatccaccc

SEQ ID NO: 3583013 - DNA, 25 bp, Homo sapien
gcattttatttgaaaatccacccat

SEQ ID NO: 3583014 - DNA, 25 bp, Homo sapien
cccacagaggccgagaattcttaag

SEQ ID NO: 3583015 - DNA, 25 bp, Homo sapien
tatatgatcataacatggcacgagc

SEQ ID NO: 3583016 - DNA, 25 bp, Homo sapien
ggaaaggccctaatgtcaaatggaa

SEQ ID NO: 3583017 - DNA, 25 bp, Homo sapien
gagattcagacctatggacttgcct

SEQ ID NO: 3583018 - DNA, 25 bp, Homo sapien
gagggagcctagagtcctttaaaga

SEQ ID NO: 3583019 - DNA, 25 bp, Homo sapien
taagtatttaagtccccatctccca

SEQ ID NO: 3583020 - DNA, 25 bp, Homo sapien
tataaactcccaaagatctagaagg

SEQ ID NO: 3583021 - DNA, 25 bp, Homo sapien
catgatcaaagctcaatggctgggc

SEQ ID NO: 3583022 - DNA, 25 bp, Homo sapien
ctaaagtgatttataagaaatcctc

SEQ ID NO: 3583023 - DNA, 25 bp, Homo sapien
taaagtgatttataagaaatcctcc

SEQ ID NO: 3583024 - DNA, 25 bp, Homo sapien
ctctgcaaaggggtcctttcctgaa

SEQ ID NO: 3583025 - DNA, 25 bp, Homo sapien
ctgtgaggactgtgactggaggggc

SEQ ID NO: 3583026 - DNA, 25 bp, Homo sapien
gctgacatgagcgtttcaaacccga

SEQ ID NO: 3583027 - DNA, 25 bp, Homo sapien
tatcttgacgaactgcagctgacac

SEQ ID NO: 3583028 - DNA, 25 bp, Homo sapien
gaatcacgcaggcagctacagatgg

SEQ ID NO: 3583029 - DNA, 25 bp, Homo sapien
tcataagggtcgaaaagtcctgtcc

SEQ ID NO: 3583030 - DNA, 25 bp, Homo sapien
ctgacagacccacagtaaaatgccc

SEQ ID NO: 3583031 - DNA, 25 bp, Homo sapien
ttcaccagggtagcagtctgaagac

SEQ ID NO: 3583032 - DNA, 25 bp, Homo sapien
caccagggtagcagtctgaagacct

SEQ ID NO: 3583033 - DNA, 25 bp, Homo sapien
agtctgaagacctgacagacccaca

SEQ ID NO: 3583034 - DNA, 25 bp, Homo sapien
ggtaaaacacatacacgtctcatat

SEQ ID NO: 3583035 - DNA, 25 bp, Homo sapien
tactgctagacaagtcctagaggct

SEQ ID NO: 3583036 - DNA, 25 bp, Homo sapien
cctagaggcttataaacaatgttga

SEQ ID NO: 3583037 - DNA, 25 bp, Homo sapien
ctgaagaatacggaagagacaaatc

SEQ ID NO: 3583038 - DNA, 25 bp, Homo sapien
gacaaacacacctagcttaaagaag

SEQ ID NO: 3583039 - DNA, 25 bp, Homo sapien
aataggcccaatacctgtactgccg

SEQ ID NO: 3583040 - DNA, 25 bp, Homo sapien
gactgggtagaaacttaacaatgct

SEQ ID NO: 3583041 - DNA, 25 bp, Homo sapien
tactgccgcttatggctgtcttgag

SEQ ID NO: 3583042 - DNA, 25 bp, Homo sapien
cagtcatggtacatacttgctatgg

SEQ ID NO: 3583043 - DNA, 25 bp, Homo sapien
tgccaaatcccagtacgctgatact

SEQ ID NO: 3583044 - DNA, 25 bp, Homo sapien
gcctccacaactgtaagccaataat

SEQ ID NO: 3583045 - DNA, 25 bp, Homo sapien
tgtaaacagcattgagagttaggac

SEQ ID NO: 3583046 - DNA, 25 bp, Homo sapien
tgggttaagtctagtgccacaaata

SEQ ID NO: 3583047 - DNA, 25 bp, Homo sapien
agtaatgccaacattaaccctgtca

SEQ ID NO: 3583048 - DNA, 25 bp, Homo sapien
gcttcccctgtgagatagtgctaaa

SEQ ID NO: 3583049 - DNA, 25 bp, Homo sapien
gacaggatttctctactatatacat

SEQ ID NO: 3583050 - DNA, 25 bp, Homo sapien
gagaccaagagctacaagttatgcc

SEQ ID NO: 3583051 - DNA, 25 bp, Homo sapien
aaattaatccaagagactggctgag

SEQ ID NO: 3583052 - DNA, 25 bp, Homo sapien
tactttaccccatacaaagagatgg

SEQ ID NO: 3583053 - DNA, 25 bp, Homo sapien
tcggctagcattctacggacaaaat

SEQ ID NO: 3583054 - DNA, 25 bp, Homo sapien
cacagttacatgtagtgtgtaatac

SEQ ID NO: 3583055 - DNA, 25 bp, Homo sapien
cattaccacagttacatgtagtgtg

SEQ ID NO: 3583056 - DNA, 25 bp, Homo sapien
aaatcaaacacattaccacagttac

SEQ ID NO: 3583057 - DNA, 25 bp, Homo sapien
aacacattaccacagttacatgtag

SEQ ID NO: 3583058 - DNA, 25 bp, Homo sapien
caggctggctgtatattaaggttgg

SEQ ID NO: 3583059 - DNA, 25 bp, Homo sapien
tttggaggtctcatgacaggctggc

SEQ ID NO: 3583060 - DNA, 25 bp, Homo sapien
aaggttggttgcgtcattacaggaa

SEQ ID NO: 3583061 - DNA, 25 bp, Homo sapien
ttgcgtcattacaggaacacttccc

SEQ ID NO: 3583062 - DNA, 25 bp, Homo sapien
tatcaggtttagacatcaagaaaac

SEQ ID NO: 3583063 - DNA, 25 bp, Homo sapien
agactctgtcttcgctgctaagaaa

SEQ ID NO: 3583064 - DNA, 25 bp, Homo sapien
tgccattatgcaagtgatcacaagt

SEQ ID NO: 3583065 - DNA, 25 bp, Homo sapien
aataagcctgctctagttcttccat

SEQ ID NO: 3583066 - DNA, 25 bp, Homo sapien
gttcctcaaatacataccagtgggt

SEQ ID NO: 3583067 - DNA, 25 bp, Homo sapien
caggcacagtagcaataccaaggga

SEQ ID NO: 3583068 - DNA, 25 bp, Homo sapien
gctgtgaaacttctccacatgtata

SEQ ID NO: 3583069 - DNA, 25 bp, Homo sapien
taccaagggacacggtactgccttc

SEQ ID NO: 3583070 - DNA, 25 bp, Homo sapien
tactgcattaggcactagggctagg

SEQ ID NO: 3583071 - DNA, 25 bp, Homo sapien
tatatggtcacagcaacaaaggctt

SEQ ID NO: 3583072 - DNA, 25 bp, Homo sapien
tatcaggttataagacctcactggt

SEQ ID NO: 3583073 - DNA, 25 bp, Homo sapien
aaaggcccagcaaagttacgaggag

SEQ ID NO: 3583074 - DNA, 25 bp, Homo sapien
gtagtagcaggataggccattacag

SEQ ID NO: 3583075 - DNA, 25 bp, Homo sapien
ggtgtagtagcaggataggccatta

SEQ ID NO: 3583076 - DNA, 25 bp, Homo sapien
aattccatatcctatcatgcctgtt

SEQ ID NO: 3583077 - DNA, 25 bp, Homo sapien
tatcatgcctgttggtgtagtagca

SEQ ID NO: 3583078 - DNA, 25 bp, Homo sapien
cacttgtgatcattaagaactgtcg

SEQ ID NO: 3583079 - DNA, 25 bp, Homo sapien
taagaggaacaatcaattaggtcag

SEQ ID NO: 3583080 - DNA, 25 bp, Homo sapien
gaaagtataactcatgtgtgtcaac

SEQ ID NO: 3583081 - DNA, 25 bp, Homo sapien
taagacagctgtgagtaagtgacac

SEQ ID NO: 3583082 - DNA, 25 bp, Homo sapien
catctggcagcaaatggcggaatat

SEQ ID NO: 3583083 - DNA, 25 bp, Homo sapien
aagtcatcaagtgcatagtggcagc

SEQ ID NO: 3583084 - DNA, 25 bp, Homo sapien
ccaagatctgcaagagcagtagaca

SEQ ID NO: 3583085 - DNA, 25 bp, Homo sapien
tgccaagaagagcagaagcctgtaa

SEQ ID NO: 3583086 - DNA, 25 bp, Homo sapien
gtgtcaacagtgcaaaattttgggc

SEQ ID NO: 3583087 - DNA, 25 bp, Homo sapien
tgggcattgcataaacagggttgca

SEQ ID NO: 3583088 - DNA, 25 bp, Homo sapien
cactatcaaggttgacaagggaatt

SEQ ID NO: 3583089 - DNA, 25 bp, Homo sapien
gttgcatcagatgtctaccacagaa

SEQ ID NO: 3583090 - DNA, 25 bp, Homo sapien
tctggcacaaagtaacccttaaata

SEQ ID NO: 3583091 - DNA, 25 bp, Homo sapien
ggtaaatataggcaaccagcttcct

SEQ ID NO: 3583092 - DNA, 25 bp, Homo sapien
tttactggaatatgtctggcacaaa

SEQ ID NO: 3583093 - DNA, 25 bp, Homo sapien
taatagtgactaacacattaatagg

SEQ ID NO: 3583094 - DNA, 25 bp, Homo sapien
gcattccaagcggttgttggtgcaa

SEQ ID NO: 3583095 - DNA, 25 bp, Homo sapien
cacctggttgactccaatttacatc

SEQ ID NO: 3583096 - DNA, 25 bp, Homo sapien
ggtgcaacctttggttgccagttag

SEQ ID NO: 3583097 - DNA, 25 bp, Homo sapien
gttgccagttagatcccccagttaa

SEQ ID NO: 3583098 - DNA, 25 bp, Homo sapien
tagtggttccatttccgatgccaag

SEQ ID NO: 3583099 - DNA, 25 bp, Homo sapien
ttcttagtggttccatttccgatgc

SEQ ID NO: 3583100 - DNA, 25 bp, Homo sapien
cttagtggttccatttccgatgcca

SEQ ID NO: 3583101 - DNA, 25 bp, Homo sapien
gtggttccatttccgatgccaagat

SEQ ID NO: 3583102 - DNA, 25 bp, Homo sapien
tgcccacaaggttggctaaagatga

SEQ ID NO: 3583103 - DNA, 25 bp, Homo sapien
agtttggcaacaggaaggttctggt

SEQ ID NO: 3583104 - DNA, 25 bp, Homo sapien
catcagatactaacttgctaggtgg

SEQ ID NO: 3583105 - DNA, 25 bp, Homo sapien
aagatgaatccaagtcatcagatac

SEQ ID NO: 3583106 - DNA, 25 bp, Homo sapien
agaatttgtaaggaactttatgacg

SEQ ID NO: 3583107 - DNA, 25 bp, Homo sapien
actttatgacgctatggttttctaa

SEQ ID NO: 3583108 - DNA, 25 bp, Homo sapien
ggaactttatgacgctatggttttc

SEQ ID NO: 3583109 - DNA, 25 bp, Homo sapien
tgtaaggaactttatgacgctatgg

SEQ ID NO: 3583110 - DNA, 25 bp, Homo sapien
caataaaaagctcctgtacccacag

SEQ ID NO: 3583111 - DNA, 25 bp, Homo sapien
cacaaagtggaaacctggttctaca

SEQ ID NO: 3583112 - DNA, 25 bp, Homo sapien
gaataatgactaaacagctccttga

SEQ ID NO: 3583113 - DNA, 25 bp, Homo sapien
gccatccgatggtaagaacagaatt

SEQ ID NO: 3583114 - DNA, 25 bp, Homo sapien
acattaaggccagctgaagggtgtg

SEQ ID NO: 3583115 - DNA, 25 bp, Homo sapien
ccccagaatctacaataacatttgt

SEQ ID NO: 3583116 - DNA, 25 bp, Homo sapien
aagtcaacattaaggccagctgaag

SEQ ID NO: 3583117 - DNA, 25 bp, Homo sapien
acacagattcaaagtcaacattaag

SEQ ID NO: 3583118 - DNA, 25 bp, Homo sapien
ttccatttcaccaaggcccagtgaa

SEQ ID NO: 3583119 - DNA, 25 bp, Homo sapien
cacatgctaaaaagagcaggcgctg

SEQ ID NO: 3583120 - DNA, 25 bp, Homo sapien
cactggcctgcaggttaaatctcaa

SEQ ID NO: 3583121 - DNA, 25 bp, Homo sapien
tattaaacactactaagcactaagc

SEQ ID NO: 3583122 - DNA, 25 bp, Homo sapien
tcttaaagcttcaatgaggacaagc

SEQ ID NO: 3583123 - DNA, 25 bp, Homo sapien
ttaatcctatagagtaagggctggc

SEQ ID NO: 3583124 - DNA, 25 bp, Homo sapien
tgtatcagataaatgtcttccctct

SEQ ID NO: 3583125 - DNA, 25 bp, Homo sapien
caaggtcagaggctatctagataca

SEQ ID NO: 3583126 - DNA, 25 bp, Homo sapien
tcaccactactttttgtgaggaaag

SEQ ID NO: 3583127 - DNA, 25 bp, Homo sapien
taagcttggaatggcatcatcaaca

SEQ ID NO: 3583128 - DNA, 25 bp, Homo sapien
aaagtagatacatctgaagaaatgg

SEQ ID NO: 3583129 - DNA, 25 bp, Homo sapien
caaacatttcatgagtaggtgtcct

SEQ ID NO: 3583130 - DNA, 25 bp, Homo sapien
tcttccctgtcctaggtgagtgtgc

SEQ ID NO: 3583131 - DNA, 25 bp, Homo sapien
tataaagagccacccatcttgcacc

SEQ ID NO: 3583132 - DNA, 25 bp, Homo sapien
cacttaatagactgcgaacaccttt

SEQ ID NO: 3583133 - DNA, 25 bp, Homo sapien
caaagccaacagtcaggtagttaaa

SEQ ID NO: 3583134 - DNA, 25 bp, Homo sapien
catgagccaacaaggacattggttt

SEQ ID NO: 3583135 - DNA, 25 bp, Homo sapien
gaaaggagttgcattaagcttacag

SEQ ID NO: 3583136 - DNA, 25 bp, Homo sapien
tgtagagatgctatgataccaacgc

SEQ ID NO: 3583137 - DNA, 25 bp, Homo sapien
tacagttggccagttaggctgaaag

SEQ ID NO: 3583138 - DNA, 25 bp, Homo sapien
cctaggttggaatgccatggcataa

SEQ ID NO: 3583139 - DNA, 25 bp, Homo sapien
tgcacctgcccagataatcaaattt

SEQ ID NO: 3583140 - DNA, 25 bp, Homo sapien
ttgctatcatccaaaattttcaggg

SEQ ID NO: 3583141 - DNA, 25 bp, Homo sapien
aataccgactgcttgtttagactcc

SEQ ID NO: 3583142 - DNA, 25 bp, Homo sapien
cagggtgatgaaaacctaggtcttc

SEQ ID NO: 3583143 - DNA, 25 bp, Homo sapien
tgcgcatcatttctgtggtgtttaa

SEQ ID NO: 3583144 - DNA, 25 bp, Homo sapien
tactacgtctgttattggcattcat

SEQ ID NO: 3583145 - DNA, 25 bp, Homo sapien
cactaatctatgactaggaatgcgc

SEQ ID NO: 3583146 - DNA, 25 bp, Homo sapien
gtcatatactataacagcagcatta

SEQ ID NO: 3583147 - DNA, 25 bp, Homo sapien
aatatatcgatctgattgtcctgga

SEQ ID NO: 3583148 - DNA, 25 bp, Homo sapien
gtatcatgcagaagtcaaaaccttg

SEQ ID NO: 3583149 - DNA, 25 bp, Homo sapien
tcctggatatgagtactgacttgaa

SEQ ID NO: 3583150 - DNA, 25 bp, Homo sapien
tattccaatatattgcagtctgtca

SEQ ID NO: 3583151 - DNA, 25 bp, Homo sapien
aatggtcatgttaattctactaacc

SEQ ID NO: 3583152 - DNA, 25 bp, Homo sapien
tctcagatcttaaaacttagctaaa

SEQ ID NO: 3583153 - DNA, 25 bp, Homo sapien
catttttaggaattactctcagatc

SEQ ID NO: 3583154 - DNA, 25 bp, Homo sapien
aaagcaattcacaataaggcagaaa

SEQ ID NO: 3583155 - DNA, 25 bp, Homo sapien
tggctgctgcaaatcaagcagatca

SEQ ID NO: 3583156 - DNA, 25 bp, Homo sapien
tgtacttgctacctgagaagcagtt

SEQ ID NO: 3583157 - DNA, 25 bp, Homo sapien
gaagcagttgacataggatgtacag

SEQ ID NO: 3583158 - DNA, 25 bp, Homo sapien
tgacataggatgtacagatgggtga

SEQ ID NO: 3583159 - DNA, 25 bp, Homo sapien
gctgcagttgttaaagaggtatgag

SEQ ID NO: 3583160 - DNA, 25 bp, Homo sapien
gggtagaaaatatgtcaatggctgg

SEQ ID NO: 3583161 - DNA, 25 bp, Homo sapien
tctttgcaagttcttttaggcgctg

SEQ ID NO: 3583162 - DNA, 25 bp, Homo sapien
gctggtgcagtcattatccctcctg

SEQ ID NO: 3583163 - DNA, 25 bp, Homo sapien
aaagctttcaaacgtgcctgttctt

SEQ ID NO: 3583164 - DNA, 25 bp, Homo sapien
cactttggtcagagatagaccagtg

SEQ ID NO: 3583165 - DNA, 25 bp, Homo sapien
tggtcagagatagaccagtgcttgc

SEQ ID NO: 3583166 - DNA, 25 bp, Homo sapien
cactgcattggaaagtgtagttgcc

SEQ ID NO: 3583167 - DNA, 25 bp, Homo sapien
aaagcatcaagaagactgctagggg

SEQ ID NO: 3583168 - DNA, 25 bp, Homo sapien
caaagcatcaagaagactgctaggg

SEQ ID NO: 3583169 - DNA, 25 bp, Homo sapien
aagcatcaagaagactgctaggggc

SEQ ID NO: 3583170 - DNA, 25 bp, Homo sapien
attgtacaaatattaagaatttcat

SEQ ID NO: 3583171 - DNA, 25 bp, Homo sapien
caattgtacaaatattaagaatttc

SEQ ID NO: 3583172 - DNA, 25 bp, Homo sapien
tgcaattgtacaaatattaagaatt

SEQ ID NO: 3583173 - DNA, 25 bp, Homo sapien
ctgcaattgtacaaatattaagaat

SEQ ID NO: 3583174 - DNA, 25 bp, Homo sapien
cttcatgtactaattaacagtggag

SEQ ID NO: 3583175 - DNA, 25 bp, Homo sapien
aaaccatactcctaaaagctcgaca

SEQ ID NO: 3583176 - DNA, 25 bp, Homo sapien
tgttatacaaacgtgacctagttgg

SEQ ID NO: 3583177 - DNA, 25 bp, Homo sapien
cgacatactactgagcatgcagaag

SEQ ID NO: 3583178 - DNA, 25 bp, Homo sapien
taaaagatgtactggaagctgggtg

SEQ ID NO: 3583179 - DNA, 25 bp, Homo sapien
tgttacaaggatagcttatgccagg

SEQ ID NO: 3583180 - DNA, 25 bp, Homo sapien
tactcttagccttgacattagaggg

SEQ ID NO: 3583181 - DNA, 25 bp, Homo sapien
gccagaacaaccagcaggtatgaag

SEQ ID NO: 3583182 - DNA, 25 bp, Homo sapien
gactgaaatttcgacgtatcccaaa

SEQ ID NO: 3583183 - DNA, 25 bp, Homo sapien
taaatggtatgacagtgggtaggca

SEQ ID NO: 3583184 - DNA, 25 bp, Homo sapien
tacttactgtctgaggtaggtactg

SEQ ID NO: 3583185 - DNA, 25 bp, Homo sapien
gctaatggcacagccgggactgaaa

SEQ ID NO: 3583186 - DNA, 25 bp, Homo sapien
ggtatatcacctctgtcaattccaa

SEQ ID NO: 3583187 - DNA, 25 bp, Homo sapien
ctgtgaaaggtctggtatatcacct

SEQ ID NO: 3583188 - DNA, 25 bp, Homo sapien
aaaggtctggtatatcacctctgtc

SEQ ID NO: 3583189 - DNA, 25 bp, Homo sapien
ggtctggtatatcacctctgtcaat

SEQ ID NO: 3583190 - DNA, 25 bp, Homo sapien
gcctgaccatgaacaagctctttga

SEQ ID NO: 3583191 - DNA, 25 bp, Homo sapien
tgctcaggccctaggcaatttccag

SEQ ID NO: 3583192 - DNA, 25 bp, Homo sapien
gaacacctgtatgtaagctaccttg

SEQ ID NO: 3583193 - DNA, 25 bp, Homo sapien
aatataccttcatgatgctcaggcc

SEQ ID NO: 3583194 - DNA, 25 bp, Homo sapien
cattttctaatcagtctcccttcct

SEQ ID NO: 3583195 - DNA, 25 bp, Homo sapien
atctgataaaggccagatatggtgg

SEQ ID NO: 3583196 - DNA, 25 bp, Homo sapien
attttctaatcagtctcccttcctt

SEQ ID NO: 3583197 - DNA, 25 bp, Homo sapien
aaatctgataaaggccagatatggt

SEQ ID NO: 3583198 - DNA, 25 bp, Homo sapien
tcactgcctgatatatttgtcctcc

SEQ ID NO: 3583199 - DNA, 25 bp, Homo sapien
cattattactcagatgttactaatc

SEQ ID NO: 3583200 - DNA, 25 bp, Homo sapien
agatgttactaatcactgcctgata

SEQ ID NO: 3583201 - DNA, 25 bp, Homo sapien
cactgcctgatatatttgtcctcct

SEQ ID NO: 3583202 - DNA, 25 bp, Homo sapien
ccagctgtctcactggaaagaaacc

SEQ ID NO: 3583203 - DNA, 25 bp, Homo sapien
tgcccagccaacgaaaacattttga

SEQ ID NO: 3583204 - DNA, 25 bp, Homo sapien
tttgaactatggctccagctgtctc

SEQ ID NO: 3583205 - DNA, 25 bp, Homo sapien
gaaagaaacctgcactgatactgga

SEQ ID NO: 3583206 - DNA, 25 bp, Homo sapien
aactctgagattcttgtcatcctag

SEQ ID NO: 3583207 - DNA, 25 bp, Homo sapien
catcctagttaggaacttcttatag

SEQ ID NO: 3583208 - DNA, 25 bp, Homo sapien
ctctgcaactttgaggaactctgag

SEQ ID NO: 3583209 - DNA, 25 bp, Homo sapien
tatagatgtcaagaccttctttgca

SEQ ID NO: 3583210 - DNA, 25 bp, Homo sapien
caggagcatgaaggcagcatttatt

SEQ ID NO: 3583211 - DNA, 25 bp, Homo sapien
ttccttcattgtatgctgcaaacag

SEQ ID NO: 3583212 - DNA, 25 bp, Homo sapien
catctttgaacaggagcatgaaggc

SEQ ID NO: 3583213 - DNA, 25 bp, Homo sapien
tcattgtatgctgcaaacagtctaa

SEQ ID NO: 3583214 - DNA, 25 bp, Homo sapien
tcagtgcccataagaatgaaaaaag

SEQ ID NO: 3583215 - DNA, 25 bp, Homo sapien
atattactcagtgcccataagaatg

SEQ ID NO: 3583216 - DNA, 25 bp, Homo sapien
actcagtgcccataagaatgaaaaa

SEQ ID NO: 3583217 - DNA, 25 bp, Homo sapien
ttactcagtgcccataagaatgaaa

SEQ ID NO: 3583218 - DNA, 25 bp, Homo sapien
gattctgaataattggtacagtttt

SEQ ID NO: 3583219 - DNA, 25 bp, Homo sapien
atctgattctgaataattggtacag

SEQ ID NO: 3583220 - DNA, 25 bp, Homo sapien
tgaataattggtacagtttttagga

SEQ ID NO: 3583221 - DNA, 25 bp, Homo sapien
aagaagtgcatccatctgattctga

SEQ ID NO: 3583222 - DNA, 25 bp, Homo sapien
cacaagatgaaatgatctgatcctc

SEQ ID NO: 3583223 - DNA, 25 bp, Homo sapien
tctggctattacacaagagatactt

SEQ ID NO: 3583224 - DNA, 25 bp, Homo sapien
ttattcatgacccaacagcaatggc

SEQ ID NO: 3583225 - DNA, 25 bp, Homo sapien
tacattatacagcaaggtctatagc

SEQ ID NO: 3583226 - DNA, 25 bp, Homo sapien
ccaaaaggtgtagcctactgaggtt

SEQ ID NO: 3583227 - DNA, 25 bp, Homo sapien
cctctccaaaaggtgtagcctactg

SEQ ID NO: 3583228 - DNA, 25 bp, Homo sapien
tctccaaaaggtgtagcctactgag

SEQ ID NO: 3583229 - DNA, 25 bp, Homo sapien
agtcctctccaaaaggtgtagccta

SEQ ID NO: 3583230 - DNA, 25 bp, Homo sapien
actataccgcctaataaatgtagac

SEQ ID NO: 3583231 - DNA, 25 bp, Homo sapien
tcttcacttttgtgaaatcaaatgc

SEQ ID NO: 3583232 - DNA, 25 bp, Homo sapien
aaatatctactataccgcctaataa

SEQ ID NO: 3583233 - DNA, 25 bp, Homo sapien
cttgtctgtatgaaactgctttctc

SEQ ID NO: 3583234 - DNA, 25 bp, Homo sapien
gaaacaagtattggactgaacacct

SEQ ID NO: 3583235 - DNA, 25 bp, Homo sapien
tgcattttgtaacatgggtcctaca

SEQ ID NO: 3583236 - DNA, 25 bp, Homo sapien
gggtcctacatatagattactggtc

SEQ ID NO: 3583237 - DNA, 25 bp, Homo sapien
tccttaagttagagcgccgtaactc

SEQ ID NO: 3583238 - DNA, 25 bp, Homo sapien
cttgcaatccacttttatccaaaaa

SEQ ID NO: 3583239 - DNA, 25 bp, Homo sapien
tgcaatccacttttatccaaaaaat

SEQ ID NO: 3583240 - DNA, 25 bp, Homo sapien
taaacaacgtgtttcttgaagccaa

SEQ ID NO: 3583241 - DNA, 25 bp, Homo sapien
ttgaagccaaatactgaataaaacg

SEQ ID NO: 3583242 - DNA, 25 bp, Homo sapien
ggtcacactggtctcgaacttgcga

SEQ ID NO: 3583243 - DNA, 25 bp, Homo sapien
gctggcatgcaaaggtgtcatctcg

SEQ ID NO: 3583244 - DNA, 25 bp, Homo sapien
attacatatgtgcaccaccacgctt

SEQ ID NO: 3583245 - DNA, 25 bp, Homo sapien
ccaggctggcatgcaaaggtgtcat

SEQ ID NO: 3583246 - DNA, 25 bp, Homo sapien
tacaccatcaaatgatgagttgtaa

SEQ ID NO: 3583247 - DNA, 25 bp, Homo sapien
ataaactgtctgccaactgtgggat

SEQ ID NO: 3583248 - DNA, 25 bp, Homo sapien
taaactgtctgccaactgtgggatg

SEQ ID NO: 3583249 - DNA, 25 bp, Homo sapien
caaatgatgagttgtaatgagagat

SEQ ID NO: 3583250 - DNA, 25 bp, Homo sapien
aatgatctaacttggccttgattgc

SEQ ID NO: 3583251 - DNA, 25 bp, Homo sapien
atgaattcaaatgatctaacttggc

SEQ ID NO: 3583252 - DNA, 25 bp, Homo sapien
caaatgatctaacttggccttgatt

SEQ ID NO: 3583253 - DNA, 25 bp, Homo sapien
tctaacttggccttgattgctagca

SEQ ID NO: 3583254 - DNA, 25 bp, Homo sapien
tggatatgcatgcttcaacttctga

SEQ ID NO: 3583255 - DNA, 25 bp, Homo sapien
ttttagataagcagctacggtggcc

SEQ ID NO: 3583256 - DNA, 25 bp, Homo sapien
tagcactttataactggcctatggc

SEQ ID NO: 3583257 - DNA, 25 bp, Homo sapien
tacggtggccaatactgcttaaaga

SEQ ID NO: 3583258 - DNA, 25 bp, Homo sapien
taccacatggcacgtaggttctctg

SEQ ID NO: 3583259 - DNA, 25 bp, Homo sapien
cacaggcaaggtcacaggagctaag

SEQ ID NO: 3583260 - DNA, 25 bp, Homo sapien
taagcctaccatagaaatgacaatc

SEQ ID NO: 3583261 - DNA, 25 bp, Homo sapien
gaaagcagaaggaaccaatacccac

SEQ ID NO: 3583262 - DNA, 25 bp, Homo sapien
gaaaactggagatacggctgggcac

SEQ ID NO: 3583263 - DNA, 25 bp, Homo sapien
ttctacagcaagtcaggcaacccag

SEQ ID NO: 3583264 - DNA, 25 bp, Homo sapien
ctatatagatttccccaggcagagt

SEQ ID NO: 3583265 - DNA, 25 bp, Homo sapien
ggacactcagggttcacttctacag

SEQ ID NO: 3583266 - DNA, 25 bp, Homo sapien
cacaccctttagaacgttatcatga

SEQ ID NO: 3583267 - DNA, 25 bp, Homo sapien
gcgggaagatagtttaagcccaaga

SEQ ID NO: 3583268 - DNA, 25 bp, Homo sapien
tacaagaataagagtggctgggcca

SEQ ID NO: 3583269 - DNA, 25 bp, Homo sapien
tatttgcccaaatacaaggtgatgc

SEQ ID NO: 3583270 - DNA, 25 bp, Homo sapien
aaaaaatctagtactggatcagaaa

SEQ ID NO: 3583271 - DNA, 25 bp, Homo sapien
cgttagcccagttaaatatcatcag

SEQ ID NO: 3583272 - DNA, 25 bp, Homo sapien
tgctaagaacttactaactgttcgt

SEQ ID NO: 3583273 - DNA, 25 bp, Homo sapien
aatgacaaccccacctataggaaag

SEQ ID NO: 3583274 - DNA, 25 bp, Homo sapien
gaaaccaacaactgagaggctctgc

SEQ ID NO: 3583275 - DNA, 25 bp, Homo sapien
gcctggaggcctatggaactgacca

SEQ ID NO: 3583276 - DNA, 25 bp, Homo sapien
gctagtaagcatgtgaagaccctgt

SEQ ID NO: 3583277 - DNA, 25 bp, Homo sapien
cagtaatggcggatgtagcaccaaa

SEQ ID NO: 3583278 - DNA, 25 bp, Homo sapien
gtttttactttcattgctacattag

SEQ ID NO: 3583279 - DNA, 25 bp, Homo sapien
ccttctacccaaccacagcttttca

SEQ ID NO: 3583280 - DNA, 25 bp, Homo sapien
taatctcttcctaaacttgacaaac

SEQ ID NO: 3583281 - DNA, 25 bp, Homo sapien
attagatactctccagagtgactgg

SEQ ID NO: 3583282 - DNA, 25 bp, Homo sapien
taacaacagccttgtgccaaggcaa

SEQ ID NO: 3583283 - DNA, 25 bp, Homo sapien
tgtctaaagtagcacaaactagtgg

SEQ ID NO: 3583284 - DNA, 25 bp, Homo sapien
catatccttagtcttccaatttaac

SEQ ID NO: 3583285 - DNA, 25 bp, Homo sapien
tctttataatgcacatatgatttct

SEQ ID NO: 3583286 - DNA, 25 bp, Homo sapien
gtccaacttgacctacagtagccaa

SEQ ID NO: 3583287 - DNA, 25 bp, Homo sapien
taatacccatgtgaaggacaggacc

SEQ ID NO: 3583288 - DNA, 25 bp, Homo sapien
tagcctcagacaattgctccgactg

SEQ ID NO: 3583289 - DNA, 25 bp, Homo sapien
attcctgtgcaatctagagactcgg

SEQ ID NO: 3583290 - DNA, 25 bp, Homo sapien
caagagtaaaccttggccgggcgca

SEQ ID NO: 3583291 - DNA, 25 bp, Homo sapien
tcagggcagataaacattgtaccgc

SEQ ID NO: 3583292 - DNA, 25 bp, Homo sapien
tacaacagtggatatgtgccataca

SEQ ID NO: 3583293 - DNA, 25 bp, Homo sapien
aaacccatagaacatacaaacagca

SEQ ID NO: 3583294 - DNA, 25 bp, Homo sapien
taaggctacttcttcctggtagggc

SEQ ID NO: 3583295 - DNA, 25 bp, Homo sapien
tttaactgggaacatactaagacag

SEQ ID NO: 3583296 - DNA, 25 bp, Homo sapien
tctctagagaaacgtataaagcagt

SEQ ID NO: 3583297 - DNA, 25 bp, Homo sapien
gaacacaaagtaacggaaatgccac

SEQ ID NO: 3583298 - DNA, 25 bp, Homo sapien
ctaagctccattggcttgagtgatc

SEQ ID NO: 3583299 - DNA, 25 bp, Homo sapien
tgagtgatccaatgagctttgtacc

SEQ ID NO: 3583300 - DNA, 25 bp, Homo sapien
agctccattggcttgagtgatccaa

SEQ ID NO: 3583301 - DNA, 25 bp, Homo sapien
cattggcttgagtgatccaatgagc

SEQ ID NO: 3583302 - DNA, 25 bp, Homo sapien
ttactgaaacccgaaggaggctgat

SEQ ID NO: 3583303 - DNA, 25 bp, Homo sapien
cagcccggagggataacaaggatct

SEQ ID NO: 3583304 - DNA, 25 bp, Homo sapien
tgcaaggaaccaggcgtttactgaa

SEQ ID NO: 3583305 - DNA, 25 bp, Homo sapien
ttggagacgctcagacgagggcgac

SEQ ID NO: 3583306 - DNA, 25 bp, Homo sapien
gattcggtccgtcaggctctggccg

SEQ ID NO: 3583307 - DNA, 25 bp, Homo sapien
tactgtcttggatacggcagagccg

SEQ ID NO: 3583308 - DNA, 25 bp, Homo sapien
atgatctcgtgggtcgtggccttgc

SEQ ID NO: 3583309 - DNA, 25 bp, Homo sapien
ggtcgtggccttgcatactgtcttg

SEQ ID NO: 3583310 - DNA, 25 bp, Homo sapien
caccccacccgctcagcagccggcg

SEQ ID NO: 3583311 - DNA, 25 bp, Homo sapien
ccccacccgctcagcagccggcggg

SEQ ID NO: 3583312 - DNA, 25 bp, Homo sapien
accaccccacccgctcagcagccgg

SEQ ID NO: 3583313 - DNA, 25 bp, Homo sapien
ctcctccaccaccccacccgctcag

SEQ ID NO: 3583314 - DNA, 25 bp, Homo sapien
ggcgcggttcggggccgcgcgctgc

SEQ ID NO: 3583315 - DNA, 25 bp, Homo sapien
gcctgccggcctggggcgcggttcg

SEQ ID NO: 3583316 - DNA, 25 bp, Homo sapien
cccgcctgccggcctggggcgcggt

SEQ ID NO: 3583317 - DNA, 25 bp, Homo sapien
caccggctccttccccgcctgccgg

SEQ ID NO: 3583318 - DNA, 25 bp, Homo sapien
gagtcggacaagatgtcgggcactc

SEQ ID NO: 3583319 - DNA, 25 bp, Homo sapien
gtgtcacccgcggagtcggacaaga

SEQ ID NO: 3583320 - DNA, 25 bp, Homo sapien
cggacaagatgtcgggcactccctt

SEQ ID NO: 3583321 - DNA, 25 bp, Homo sapien
cacccgcggagtcggacaagatgtc

SEQ ID NO: 3583322 - DNA, 25 bp, Homo sapien
tgatggaactcgccaggcgggcgca

SEQ ID NO: 3583323 - DNA, 25 bp, Homo sapien
tggaactcgccaggcgggcgcaaca

SEQ ID NO: 3583324 - DNA, 25 bp, Homo sapien
ggcgcaacaggaggcccgcccgagg

SEQ ID NO: 3583325 - DNA, 25 bp, Homo sapien
gggcgcaacaggaggcccgcccgag

SEQ ID NO: 3583326 - DNA, 25 bp, Homo sapien
cacctggttttgtttatctctactc

SEQ ID NO: 3583327 - DNA, 25 bp, Homo sapien
ctgtctggaactgttgatgctgcag

SEQ ID NO: 3583328 - DNA, 25 bp, Homo sapien
actgtctggaactgttgatgctgca

SEQ ID NO: 3583329 - DNA, 25 bp, Homo sapien
cagtgaggaactgtggggaactgtc

SEQ ID NO: 3583330 - DNA, 25 bp, Homo sapien
tgtctggaactgttgatgctgcagg

SEQ ID NO: 3583331 - DNA, 25 bp, Homo sapien
gtttccattatgcagacagcccagg

SEQ ID NO: 3583332 - DNA, 25 bp, Homo sapien
ggcacagaagccaaccagtatttta

SEQ ID NO: 3583333 - DNA, 25 bp, Homo sapien
tactaatggatgtctggctagaaac

SEQ ID NO: 3583334 - DNA, 25 bp, Homo sapien
gctagaaacagtgttggcagaatcc

SEQ ID NO: 3583335 - DNA, 25 bp, Homo sapien
cagtggtatggtgcacggcttgtaa

SEQ ID NO: 3583336 - DNA, 25 bp, Homo sapien
tgattggattcctcgagctggcgtg

SEQ ID NO: 3583337 - DNA, 25 bp, Homo sapien
cactagggtggagactgtcattgac

SEQ ID NO: 3583338 - DNA, 25 bp, Homo sapien
gcatgcctgttctccctcactaggg

SEQ ID NO: 3583339 - DNA, 25 bp, Homo sapien
tcaggtataggtacatgatagaatc

SEQ ID NO: 3583340 - DNA, 25 bp, Homo sapien
aaaccatatcaggtataggtacatg

SEQ ID NO: 3583341 - DNA, 25 bp, Homo sapien
catatcaggtataggtacatgatag

SEQ ID NO: 3583342 - DNA, 25 bp, Homo sapien
ggtataggtacatgatagaatctta

SEQ ID NO: 3583343 - DNA, 25 bp, Homo sapien
tgtttgatagcgtgactgcagcctc

SEQ ID NO: 3583344 - DNA, 25 bp, Homo sapien
aagaggacactggtaatgatgctga

SEQ ID NO: 3583345 - DNA, 25 bp, Homo sapien
gcaggctcaggaggtatgtttgata

SEQ ID NO: 3583346 - DNA, 25 bp, Homo sapien
taacttaatactctgggcaatctca

SEQ ID NO: 3583347 - DNA, 25 bp, Homo sapien
tggggcttctgtctacagcctccac

SEQ ID NO: 3583348 - DNA, 25 bp, Homo sapien
ggggcttctgtctacagcctccacc

SEQ ID NO: 3583349 - DNA, 25 bp, Homo sapien
ctggggcttctgtctacagcctcca

SEQ ID NO: 3583350 - DNA, 25 bp, Homo sapien
acagactttcgctccctagcagcgg

SEQ ID NO: 3583351 - DNA, 25 bp, Homo sapien
ccctagcagcgggtcggagatcgaa

SEQ ID NO: 3583352 - DNA, 25 bp, Homo sapien
tgcggctgaaacgtctttggaagga

SEQ ID NO: 3583353 - DNA, 25 bp, Homo sapien
cggagatcgaaggaacgggccaatt

SEQ ID NO: 3583354 - DNA, 25 bp, Homo sapien
acccaggcagtgcagtggcatgatc

SEQ ID NO: 3583355 - DNA, 25 bp, Homo sapien
cagtgcagtggcatgatcatagctc

SEQ ID NO: 3583356 - DNA, 25 bp, Homo sapien
cttttaaagacagggttggtctctg

SEQ ID NO: 3583357 - DNA, 25 bp, Homo sapien
cctcttgcctcagtcccctaagtag

SEQ ID NO: 3583358 - DNA, 25 bp, Homo sapien
tgactggacttactcatgactgtgg

SEQ ID NO: 3583359 - DNA, 25 bp, Homo sapien
acttacaaggactagagcagatgct

SEQ ID NO: 3583360 - DNA, 25 bp, Homo sapien
caggtgtctttacttatccagcagg

SEQ ID NO: 3583361 - DNA, 25 bp, Homo sapien
cagctaggtagctttgctcatggga

SEQ ID NO: 3583362 - DNA, 25 bp, Homo sapien
tcccactaattaagcacagccaagc

SEQ ID NO: 3583363 - DNA, 25 bp, Homo sapien
aatacttctgagacactgtgtagca

SEQ ID NO: 3583364 - DNA, 25 bp, Homo sapien
gattaggacttgaattcagcctcca

SEQ ID NO: 3583365 - DNA, 25 bp, Homo sapien
ggctgatcactcctataaaatttgg

SEQ ID NO: 3583366 - DNA, 25 bp, Homo sapien
gacaccctcccgcaaattctggaag

SEQ ID NO: 3583367 - DNA, 25 bp, Homo sapien
agaggcattcttgccgctggcccag

SEQ ID NO: 3583368 - DNA, 25 bp, Homo sapien
gctggcccagtcactatgtagtgga

SEQ ID NO: 3583369 - DNA, 25 bp, Homo sapien
ttagtctcgactagggcagtagccc

SEQ ID NO: 3583370 - DNA, 25 bp, Homo sapien
ccaaattgttagagtaaatgagaac

SEQ ID NO: 3583371 - DNA, 25 bp, Homo sapien
gaacagcacctggaattctttagga

SEQ ID NO: 3583372 - DNA, 25 bp, Homo sapien
taatctggaaggtgaatcttgtttg

SEQ ID NO: 3583373 - DNA, 25 bp, Homo sapien
acagcacctggaattctttaggaat

SEQ ID NO: 3583374 - DNA, 25 bp, Homo sapien
tcctaggagggcaccatattgctac

SEQ ID NO: 3583375 - DNA, 25 bp, Homo sapien
gaacctgctccattccgaactaggc

SEQ ID NO: 3583376 - DNA, 25 bp, Homo sapien
caagtaggtaggaccgcagatgcac

SEQ ID NO: 3583377 - DNA, 25 bp, Homo sapien
gatcccgctattgatcagcatgaag

SEQ ID NO: 3583378 - DNA, 25 bp, Homo sapien
taagtctccgcacaagcaggaagtg

SEQ ID NO: 3583379 - DNA, 25 bp, Homo sapien
tagaagggtacgtgcattcccagag

SEQ ID NO: 3583380 - DNA, 25 bp, Homo sapien
atgctcaggaaagacccgcgaagac

SEQ ID NO: 3583381 - DNA, 25 bp, Homo sapien
tactaaaggcatgtcccaacacgca

SEQ ID NO: 3583382 - DNA, 25 bp, Homo sapien
attaaaacagtttcatgacctgcta

SEQ ID NO: 3583383 - DNA, 25 bp, Homo sapien
taaaacagtttcatgacctgctatt

SEQ ID NO: 3583384 - DNA, 25 bp, Homo sapien
aacagtttcatgacctgctatttct

SEQ ID NO: 3583385 - DNA, 25 bp, Homo sapien
tcattaaaacagtttcatgacctgc

SEQ ID NO: 3583386 - DNA, 25 bp, Homo sapien
gagagagattctgtaaagactgaag

SEQ ID NO: 3583387 - DNA, 25 bp, Homo sapien
tccatttgtctcttcagggagagag

SEQ ID NO: 3583388 - DNA, 25 bp, Homo sapien
gagtccactgagtgctttccagctg

SEQ ID NO: 3583389 - DNA, 25 bp, Homo sapien
tatagccactggatgtacacatgta

SEQ ID NO: 3583390 - DNA, 25 bp, Homo sapien
cccagaaagagcatctgatgactga

SEQ ID NO: 3583391 - DNA, 25 bp, Homo sapien
tgtctgcctgtcaacagctcaacag

SEQ ID NO: 3583392 - DNA, 25 bp, Homo sapien
ttgggtcacatacctggcccctggt

SEQ ID NO: 3583393 - DNA, 25 bp, Homo sapien
catccctgtggaaataacttccaca

SEQ ID NO: 3583394 - DNA, 25 bp, Homo sapien
ttccttcggctttggtaatggaatg

SEQ ID NO: 3583395 - DNA, 25 bp, Homo sapien
gagtcaaggagggcaaggatctgtt

SEQ ID NO: 3583396 - DNA, 25 bp, Homo sapien
agagtcaaggagggcaaggatctgt

SEQ ID NO: 3583397 - DNA, 25 bp, Homo sapien
tggtaatggaatgtagtcaccagga

SEQ ID NO: 3583398 - DNA, 25 bp, Homo sapien
tcctttttgaggttcaatttggata

SEQ ID NO: 3583399 - DNA, 25 bp, Homo sapien
tttgaggttcaatttggataatttc

SEQ ID NO: 3583400 - DNA, 25 bp, Homo sapien
gttcaatttggataatttcattaag

SEQ ID NO: 3583401 - DNA, 25 bp, Homo sapien
gaggttcaatttggataatttcatt

SEQ ID NO: 3583402 - DNA, 25 bp, Homo sapien
tatttacagtcaattcaagtccact

SEQ ID NO: 3583403 - DNA, 25 bp, Homo sapien
tagtagttgccttagattacaatat

SEQ ID NO: 3583404 - DNA, 25 bp, Homo sapien
tactagacaaactgctatctgttag

SEQ ID NO: 3583405 - DNA, 25 bp, Homo sapien
cacttcacaggtagtgtgattgttt

SEQ ID NO: 3583406 - DNA, 25 bp, Homo sapien
tgctgttgttagctgataaccagca

SEQ ID NO: 3583407 - DNA, 25 bp, Homo sapien
gttcattgtaagtcctctcaactct

SEQ ID NO: 3583408 - DNA, 25 bp, Homo sapien
gatagttcattgtaagtcctctcaa

SEQ ID NO: 3583409 - DNA, 25 bp, Homo sapien
ctgttgttagctgataaccagcaac

SEQ ID NO: 3583410 - DNA, 25 bp, Homo sapien
caggagctcaacaggtagaggtgta

SEQ ID NO: 3583411 - DNA, 25 bp, Homo sapien
tgttgtgaaggcacaagtcgtggct

SEQ ID NO: 3583412 - DNA, 25 bp, Homo sapien
tatttagtagagaacgacaagccag

SEQ ID NO: 3583413 - DNA, 25 bp, Homo sapien
ggtgtaatccacgtgggaaagcagt

SEQ ID NO: 3583414 - DNA, 25 bp, Homo sapien
attggtccgcccaaccacgattggt

SEQ ID NO: 3583415 - DNA, 25 bp, Homo sapien
ccgcccaaccacgattggtgaaggg

SEQ ID NO: 3583416 - DNA, 25 bp, Homo sapien
ggcggcggccgtgatgacgtcctca

SEQ ID NO: 3583417 - DNA, 25 bp, Homo sapien
tgatgacgtcctcattggtccgccc

SEQ ID NO: 3583418 - DNA, 25 bp, Homo sapien
tcctagagtttggtgccctgccgcc

SEQ ID NO: 3583419 - DNA, 25 bp, Homo sapien
gcgctccgctggtcctcctagagtt

SEQ ID NO: 3583420 - DNA, 25 bp, Homo sapien
cgcgtgtgcgtattgcctcagtgga

SEQ ID NO: 3583421 - DNA, 25 bp, Homo sapien
tgccccgccacgactgcggctgcgg

SEQ ID NO: 3583422 - DNA, 25 bp, Homo sapien
aaagggcattgcatccaacaatggg

SEQ ID NO: 3583423 - DNA, 25 bp, Homo sapien
taggtcatggcagcctaaaactttg

SEQ ID NO: 3583424 - DNA, 25 bp, Homo sapien
ttgatcccatgaacatacaaagggc

SEQ ID NO: 3583425 - DNA, 25 bp, Homo sapien
ggagtcctcctgaggtaagtggcca

SEQ ID NO: 3583426 - DNA, 25 bp, Homo sapien
attccggatccagtgtcttcgtcag

SEQ ID NO: 3583427 - DNA, 25 bp, Homo sapien
gaactctcctcaacctaagtcataa

SEQ ID NO: 3583428 - DNA, 25 bp, Homo sapien
catgtgcttgttagccattcaccta

SEQ ID NO: 3583429 - DNA, 25 bp, Homo sapien
taaagttgtatctcagaactctcct

SEQ ID NO: 3583430 - DNA, 25 bp, Homo sapien
gaccttgtatttggtgacctttcaa

SEQ ID NO: 3583431 - DNA, 25 bp, Homo sapien
catctgtgaatcaaggcagtattac

SEQ ID NO: 3583432 - DNA, 25 bp, Homo sapien
caccctccgtgttgactagaagtgg

SEQ ID NO: 3583433 - DNA, 25 bp, Homo sapien
ggctctttatagatgtccttcgtta

SEQ ID NO: 3583434 - DNA, 25 bp, Homo sapien
aactccatggtgttcagattccagc

SEQ ID NO: 3583435 - DNA, 25 bp, Homo sapien
tatgtagcagcgatacagaggaaat

SEQ ID NO: 3583436 - DNA, 25 bp, Homo sapien
gattataaaggatatgtagcagcga

SEQ ID NO: 3583437 - DNA, 25 bp, Homo sapien
ggaaattgtgggacatgatgtaaaa

SEQ ID NO: 3583438 - DNA, 25 bp, Homo sapien
agccccatactagcctctgagactg

SEQ ID NO: 3583439 - DNA, 25 bp, Homo sapien
catttatattgtgggtgttactctg

SEQ ID NO: 3583440 - DNA, 25 bp, Homo sapien
cagcgacaaggattcacttgggcca

SEQ ID NO: 3583441 - DNA, 25 bp, Homo sapien
cttttattcactgtatgccttggca

SEQ ID NO: 3583442 - DNA, 25 bp, Homo sapien
ccttgggccaagtgtagctgtccag

SEQ ID NO: 3583443 - DNA, 25 bp, Homo sapien
cttaggctctgggtagtaggaagcc

SEQ ID NO: 3583444 - DNA, 25 bp, Homo sapien
tagaccagggatcttacaaaagcct

SEQ ID NO: 3583445 - DNA, 25 bp, Homo sapien
ccaggttgtgtttgtacgcgtagtc

SEQ ID NO: 3583446 - DNA, 25 bp, Homo sapien
tgggtagagtctcccctgggacaga

SEQ ID NO: 3583447 - DNA, 25 bp, Homo sapien
caaagacacgtctcggatggtgctg

SEQ ID NO: 3583448 - DNA, 25 bp, Homo sapien
ctgagtggtgggtagagtctcccct

SEQ ID NO: 3583449 - DNA, 25 bp, Homo sapien
tggcaattctcaaagacacgtctcg

SEQ ID NO: 3583450 - DNA, 25 bp, Homo sapien
gcaagcatttgagggagcaaggaca

SEQ ID NO: 3583451 - DNA, 25 bp, Homo sapien
caagcatttgagggagcaaggacag

SEQ ID NO: 3583452 - DNA, 25 bp, Homo sapien
ggaacacgtaagcattgtttccctg

SEQ ID NO: 3583453 - DNA, 25 bp, Homo sapien
acactcttaaaaggacttccactgg

SEQ ID NO: 3583454 - DNA, 25 bp, Homo sapien
tcatctgggatgtgccggatcccgc

SEQ ID NO: 3583455 - DNA, 25 bp, Homo sapien
gatcccgccggcgatgactcccagt

SEQ ID NO: 3583456 - DNA, 25 bp, Homo sapien
tgctcatcagcgatgtaggagtatt

SEQ ID NO: 3583457 - DNA, 25 bp, Homo sapien
ccctcatgaggttactcattgtaat

SEQ ID NO: 3583458 - DNA, 25 bp, Homo sapien
accctcatgaggttactcattgtaa

SEQ ID NO: 3583459 - DNA, 25 bp, Homo sapien
ctcatcagcgatgtaggagtatttt

SEQ ID NO: 3583460 - DNA, 25 bp, Homo sapien
tgtcctctcagccgggggaaggaag

SEQ ID NO: 3583461 - DNA, 25 bp, Homo sapien
tctcagccgggggaaggaaggactc

SEQ ID NO: 3583462 - DNA, 25 bp, Homo sapien
ctctcagccgggggaaggaaggact

SEQ ID NO: 3583463 - DNA, 25 bp, Homo sapien
atgtcctctcagccgggggaaggaa

SEQ ID NO: 3583464 - DNA, 25 bp, Homo sapien
tagcacttctcagccgtgcactcgg

SEQ ID NO: 3583465 - DNA, 25 bp, Homo sapien
agaatctgctccgtgaaggctcctg

SEQ ID NO: 3583466 - DNA, 25 bp, Homo sapien
caaagatgatagggcgctcgtggaa

SEQ ID NO: 3583467 - DNA, 25 bp, Homo sapien
tcggtgacccggtagcacttctcag

SEQ ID NO: 3583468 - DNA, 25 bp, Homo sapien
taagctgctcctgtgaaggcattcc

SEQ ID NO: 3583469 - DNA, 25 bp, Homo sapien
gaaagactcggtcttgggcccagca

SEQ ID NO: 3583470 - DNA, 25 bp, Homo sapien
gggatgcctgctctctataaacaac

SEQ ID NO: 3583471 - DNA, 25 bp, Homo sapien
catctcattgtggttagagagacca

SEQ ID NO: 3583472 - DNA, 25 bp, Homo sapien
ggctgtgggcttcaccagcctcacc

SEQ ID NO: 3583473 - DNA, 25 bp, Homo sapien
tttcatggttcaggtggctcctccc

SEQ ID NO: 3583474 - DNA, 25 bp, Homo sapien
gggcaaacatctccttttcatggtt

SEQ ID NO: 3583475 - DNA, 25 bp, Homo sapien
acttcaggatggtcttgggcaaaca

SEQ ID NO: 3583476 - DNA, 25 bp, Homo sapien
tttctctagggccatgacaaggagg

SEQ ID NO: 3583477 - DNA, 25 bp, Homo sapien
gacaatgagccctttagagtccacc

SEQ ID NO: 3583478 - DNA, 25 bp, Homo sapien
gtggcctctgccttcggtacacctt

SEQ ID NO: 3583479 - DNA, 25 bp, Homo sapien
ctttagagtccaccatccagatctt

SEQ ID NO: 3583480 - DNA, 25 bp, Homo sapien
ctggaaggtaccatagggtagatgt

SEQ ID NO: 3583481 - DNA, 25 bp, Homo sapien
gaaggtaccatagggtagatgttca

SEQ ID NO: 3583482 - DNA, 25 bp, Homo sapien
ggaaggtaccatagggtagatgttc

SEQ ID NO: 3583483 - DNA, 25 bp, Homo sapien
aaggtaccatagggtagatgttcag

SEQ ID NO: 3583484 - DNA, 25 bp, Homo sapien
ggcagctgcaatgatcacaatatgt

SEQ ID NO: 3583485 - DNA, 25 bp, Homo sapien
gcctcccttttttggtatgcttcca

SEQ ID NO: 3583486 - DNA, 25 bp, Homo sapien
gcccaattaagtccttgccttgaga

SEQ ID NO: 3583487 - DNA, 25 bp, Homo sapien
gagacacccaattgtcagagcctag

SEQ ID NO: 3583488 - DNA, 25 bp, Homo sapien
ttggtgattcgcagagcagccaaga

SEQ ID NO: 3583489 - DNA, 25 bp, Homo sapien
gaaagcttgttcttggtgattcgca

SEQ ID NO: 3583490 - DNA, 25 bp, Homo sapien
ccttggaaaacaaacacgtgattgg

SEQ ID NO: 3583491 - DNA, 25 bp, Homo sapien
cacgtgattggaaagcttgttcttg

SEQ ID NO: 3583492 - DNA, 25 bp, Homo sapien
ccaagagaagacccttggcagagtt

SEQ ID NO: 3583493 - DNA, 25 bp, Homo sapien
aaacagagtggcctgagatcaacct

SEQ ID NO: 3583494 - DNA, 25 bp, Homo sapien
aacagagtggcctgagatcaacctc

SEQ ID NO: 3583495 - DNA, 25 bp, Homo sapien
tgggatcagatagccaggtgctgct

SEQ ID NO: 3583496 - DNA, 25 bp, Homo sapien
gaggaacaggcaacttttcttagcc

SEQ ID NO: 3583497 - DNA, 25 bp, Homo sapien
tgagaacacaacctgaccatgaggc

SEQ ID NO: 3583498 - DNA, 25 bp, Homo sapien
cattaaatgaccatatggcctgagc

SEQ ID NO: 3583499 - DNA, 25 bp, Homo sapien
caataatcaggtggacaaaatggca

SEQ ID NO: 3583500 - DNA, 25 bp, Homo sapien
cagagtaagaggatatttgtgcccc

SEQ ID NO: 3583501 - DNA, 25 bp, Homo sapien
gcatctttctttagtcacccagggt

SEQ ID NO: 3583502 - DNA, 25 bp, Homo sapien
caagctggcctgatactgttactgt

SEQ ID NO: 3583503 - DNA, 25 bp, Homo sapien
ggataccatggtaacaaaatagacc

SEQ ID NO: 3583504 - DNA, 25 bp, Homo sapien
gcatcaattatgaaccaggctcagg

SEQ ID NO: 3583505 - DNA, 25 bp, Homo sapien
aattactaaatgattacaagtgtga

SEQ ID NO: 3583506 - DNA, 25 bp, Homo sapien
tataaaacagttgttcatgacatac

SEQ ID NO: 3583507 - DNA, 25 bp, Homo sapien
tctgcagtgcctccccgtgtactcc

SEQ ID NO: 3583508 - DNA, 25 bp, Homo sapien
agtgcctccccgtgtactccatgta

SEQ ID NO: 3583509 - DNA, 25 bp, Homo sapien
ctccatgtaccagtagctttattca

SEQ ID NO: 3583510 - DNA, 25 bp, Homo sapien
tactccatgtaccagtagctttatt

SEQ ID NO: 3583511 - DNA, 25 bp, Homo sapien
gctattctacctatctagaagacca

SEQ ID NO: 3583512 - DNA, 25 bp, Homo sapien
ttcccctgctattctacctatctag

SEQ ID NO: 3583513 - DNA, 25 bp, Homo sapien
ttctacctatctagaagaccatttt

SEQ ID NO: 3583514 - DNA, 25 bp, Homo sapien
gcatgtttatacttaggtacatttc

SEQ ID NO: 3583515 - DNA, 25 bp, Homo sapien
gaaaggaagctacttagctgtttcg

SEQ ID NO: 3583516 - DNA, 25 bp, Homo sapien
gaggtaaccactctgagaagcccat

SEQ ID NO: 3583517 - DNA, 25 bp, Homo sapien
tatttctgcacttggtacaggccag

SEQ ID NO: 3583518 - DNA, 25 bp, Homo sapien
ggcaaataaagttatctccatcatt

SEQ ID NO: 3583519 - DNA, 25 bp, Homo sapien
aacttcaggactaggaacagccctg

SEQ ID NO: 3583520 - DNA, 25 bp, Homo sapien
tcggaggagccagatacatgagatc

SEQ ID NO: 3583521 - DNA, 25 bp, Homo sapien
cagcctcagaatacaggacttagtg

SEQ ID NO: 3583522 - DNA, 25 bp, Homo sapien
tctctggaggttcggctgttgcaac

SEQ ID NO: 3583523 - DNA, 25 bp, Homo sapien
agtgggtgaccaccgtccagtgtca

SEQ ID NO: 3583524 - DNA, 25 bp, Homo sapien
tgggtgaccaccgtccagtgtcact

SEQ ID NO: 3583525 - DNA, 25 bp, Homo sapien
taaagtgggtgaccaccgtccagtg

SEQ ID NO: 3583526 - DNA, 25 bp, Homo sapien
ctgtaaagtgggtgaccaccgtcca

SEQ ID NO: 3583527 - DNA, 25 bp, Homo sapien
caggattggtggacaatgcaggtcc

SEQ ID NO: 3583528 - DNA, 25 bp, Homo sapien
caggagcctttatgggcgtctggcc

SEQ ID NO: 3583529 - DNA, 25 bp, Homo sapien
cccacggaaactgggtcagcagcac

SEQ ID NO: 3583530 - DNA, 25 bp, Homo sapien
tggacctggccccttgtgtggctct

SEQ ID NO: 3583531 - DNA, 25 bp, Homo sapien
taagagcagagatgcttctctggtc

SEQ ID NO: 3583532 - DNA, 25 bp, Homo sapien
agagcagagatgcttctctggtccc

SEQ ID NO: 3583533 - DNA, 25 bp, Homo sapien
ctaagagcagagatgcttctctggt

SEQ ID NO: 3583534 - DNA, 25 bp, Homo sapien
agcagagatgcttctctggtcccag

SEQ ID NO: 3583535 - DNA, 25 bp, Homo sapien
aacaaaagtcacctgagcctctgcc

SEQ ID NO: 3583536 - DNA, 25 bp, Homo sapien
aacaacaaaagtcacctgagcctct

SEQ ID NO: 3583537 - DNA, 25 bp, Homo sapien
acaaaagtcacctgagcctctgcct

SEQ ID NO: 3583538 - DNA, 25 bp, Homo sapien
tgaaacaacaaaagtcacctgagcc

SEQ ID NO: 3583539 - DNA, 25 bp, Homo sapien
ccctctgtggttctgtgcatggaga

SEQ ID NO: 3583540 - DNA, 25 bp, Homo sapien
gctcctctcccattatgagcatggc

SEQ ID NO: 3583541 - DNA, 25 bp, Homo sapien
gttctgtgcatggagatgctcctct

SEQ ID NO: 3583542 - DNA, 25 bp, Homo sapien
ttgtagtcttaagtggcattgctcc

SEQ ID NO: 3583543 - DNA, 25 bp, Homo sapien
tttggagataaagggggaccattgc

SEQ ID NO: 3583544 - DNA, 25 bp, Homo sapien
ataaagggggaccattgcagcatgg

SEQ ID NO: 3583545 - DNA, 25 bp, Homo sapien
atttggagataaagggggaccattg

SEQ ID NO: 3583546 - DNA, 25 bp, Homo sapien
gagataaagggggaccattgcagca

SEQ ID NO: 3583547 - DNA, 25 bp, Homo sapien
ccatccctaaccagcttgtgactgt

SEQ ID NO: 3583548 - DNA, 25 bp, Homo sapien
tcattgtctgcttaacaatgagaac

SEQ ID NO: 3583549 - DNA, 25 bp, Homo sapien
attgtctgcttaacaatgagaacac

SEQ ID NO: 3583550 - DNA, 25 bp, Homo sapien
ggcctggacccatccctaaccagct

SEQ ID NO: 3583551 - DNA, 25 bp, Homo sapien
tgtgagcacagtcaatccttgaaca

SEQ ID NO: 3583552 - DNA, 25 bp, Homo sapien
catctatcatgtagcaggcgcggtg

SEQ ID NO: 3583553 - DNA, 25 bp, Homo sapien
ttgcgaacactcacagatgaactgt

SEQ ID NO: 3583554 - DNA, 25 bp, Homo sapien
gggcattggcacctgtaaccaccac

SEQ ID NO: 3583555 - DNA, 25 bp, Homo sapien
tcctgctgctgattcatgggtgaat

SEQ ID NO: 3583556 - DNA, 25 bp, Homo sapien
tgggtgaattcatgctggggagccg

SEQ ID NO: 3583557 - DNA, 25 bp, Homo sapien
gctgtcctgctgctgattcatgggt

SEQ ID NO: 3583558 - DNA, 25 bp, Homo sapien
cgcctgcatggacttgttttccact

SEQ ID NO: 3583559 - DNA, 25 bp, Homo sapien
gctgacaatgaggtgagtgagggca

SEQ ID NO: 3583560 - DNA, 25 bp, Homo sapien
agctgacaatgaggtgagtgagggc

SEQ ID NO: 3583561 - DNA, 25 bp, Homo sapien
ctgcacagccctgtctgcgcagtgt

SEQ ID NO: 3583562 - DNA, 25 bp, Homo sapien
ttgtgacctctttgggcctctggag

SEQ ID NO: 3583563 - DNA, 25 bp, Homo sapien
aagttgtgacctctttgggcctctg

SEQ ID NO: 3583564 - DNA, 25 bp, Homo sapien
aaagttgtgacctctttgggcctct

SEQ ID NO: 3583565 - DNA, 25 bp, Homo sapien
gttgtgacctctttgggcctctgga

SEQ ID NO: 3583566 - DNA, 25 bp, Homo sapien
aaagggaacctgaactagaagctgc

SEQ ID NO: 3583567 - DNA, 25 bp, Homo sapien
tcagggtcattatgagcaacaaaca

SEQ ID NO: 3583568 - DNA, 25 bp, Homo sapien
cagtgtctctctcagggtcattatg

SEQ ID NO: 3583569 - DNA, 25 bp, Homo sapien
tctgggtcacagaatagatgaccaa

SEQ ID NO: 3583570 - DNA, 25 bp, Homo sapien
caaaccaactatggggtgacagcct

SEQ ID NO: 3583571 - DNA, 25 bp, Homo sapien
ctggcagcaaaccaactatggggtg

SEQ ID NO: 3583572 - DNA, 25 bp, Homo sapien
gaatataagttagtcccctgtagct

SEQ ID NO: 3583573 - DNA, 25 bp, Homo sapien
cccctttggcatcccagtgaggttg

SEQ ID NO: 3583574 - DNA, 25 bp, Homo sapien
catgcagtacttgttacggtatttg

SEQ ID NO: 3583575 - DNA, 25 bp, Homo sapien
tgttacggtatttgttgagcaggcg

SEQ ID NO: 3583576 - DNA, 25 bp, Homo sapien
caaattggatgaggcaatttattcc

SEQ ID NO: 3583577 - DNA, 25 bp, Homo sapien
ggcattggcattggcgaagtcttca

SEQ ID NO: 3583578 - DNA, 25 bp, Homo sapien
ctgaggcagatccctgacagatccc

SEQ ID NO: 3583579 - DNA, 25 bp, Homo sapien
aaacccatgattgcctctctgaggc

SEQ ID NO: 3583580 - DNA, 25 bp, Homo sapien
aacccatgattgcctctctgaggca

SEQ ID NO: 3583581 - DNA, 25 bp, Homo sapien
tctgaggcagatccctgacagatcc

SEQ ID NO: 3583582 - DNA, 25 bp, Homo sapien
cacatccaagtgcatgcagacagac

SEQ ID NO: 3583583 - DNA, 25 bp, Homo sapien
catccaagtgcatgcagacagacca

SEQ ID NO: 3583584 - DNA, 25 bp, Homo sapien
acatccaagtgcatgcagacagacc

SEQ ID NO: 3583585 - DNA, 25 bp, Homo sapien
tccacatccaagtgcatgcagacag

SEQ ID NO: 3583586 - DNA, 25 bp, Homo sapien
ctcttccactagagactcctctggc

SEQ ID NO: 3583587 - DNA, 25 bp, Homo sapien
tcttccactagagactcctctggca

SEQ ID NO: 3583588 - DNA, 25 bp, Homo sapien
cttccactagagactcctctggcac

SEQ ID NO: 3583589 - DNA, 25 bp, Homo sapien
gctcttccactagagactcctctgg

SEQ ID NO: 3583590 - DNA, 25 bp, Homo sapien
cataagaggtgtcagggcatgtaac

SEQ ID NO: 3583591 - DNA, 25 bp, Homo sapien
gaaaaaatgtcctgattgatccata

SEQ ID NO: 3583592 - DNA, 25 bp, Homo sapien
ttcacctcatgggtcaatttgtggc

SEQ ID NO: 3583593 - DNA, 25 bp, Homo sapien
gcaagtgtagtatggattattaaaa

SEQ ID NO: 3583594 - DNA, 25 bp, Homo sapien
tgggagcagcttgggactggctgtg

SEQ ID NO: 3583595 - DNA, 25 bp, Homo sapien
ggactggctgtggaaatatttatta

SEQ ID NO: 3583596 - DNA, 25 bp, Homo sapien
ggcttgggagcagcttgggactggc

SEQ ID NO: 3583597 - DNA, 25 bp, Homo sapien
gactggctgtggaaatatttattac

SEQ ID NO: 3583598 - DNA, 25 bp, Homo sapien
ggggcacatgcttggggggcttcct

SEQ ID NO: 3583599 - DNA, 25 bp, Homo sapien
gtggggcacatgcttggggggcttc

SEQ ID NO: 3583600 - DNA, 25 bp, Homo sapien
tggggcacatgcttggggggcttcc

SEQ ID NO: 3583601 - DNA, 25 bp, Homo sapien
agcttcccgattctagtgctggcag

SEQ ID NO: 3583602 - DNA, 25 bp, Homo sapien
ttcccgattctagtgctggcagcag

SEQ ID NO: 3583603 - DNA, 25 bp, Homo sapien
ctgatgtctatccttctgtcctgcg

SEQ ID NO: 3583604 - DNA, 25 bp, Homo sapien
gcagcctgatgtctatccttctgtc

SEQ ID NO: 3583605 - DNA, 25 bp, Homo sapien
gggaggcttctgcttatctgtcccc

SEQ ID NO: 3583606 - DNA, 25 bp, Homo sapien
tatctgtccccttttgcaattttga

SEQ ID NO: 3583607 - DNA, 25 bp, Homo sapien
tttgcaattttgaactcttcaccct

SEQ ID NO: 3583608 - DNA, 25 bp, Homo sapien
tctgatgcttctccagtggagaatt

SEQ ID NO: 3583609 - DNA, 25 bp, Homo sapien
gacggtgtgatgatacccaggccac

SEQ ID NO: 3583610 - DNA, 25 bp, Homo sapien
tgaaccaaatgcagagtgagggatg

SEQ ID NO: 3583611 - DNA, 25 bp, Homo sapien
tctcttttccataggtcaggacctg

SEQ ID NO: 3583612 - DNA, 25 bp, Homo sapien
gggtctgacctctttcaagcctgaa

SEQ ID NO: 3583613 - DNA, 25 bp, Homo sapien
ggcccagatcttaaactgtaacctc

SEQ ID NO: 3583614 - DNA, 25 bp, Homo sapien
gcccagatcttaaactgtaacctct

SEQ ID NO: 3583615 - DNA, 25 bp, Homo sapien
tgtaggcccagatcttaaactgtaa

SEQ ID NO: 3583616 - DNA, 25 bp, Homo sapien
taggcccagatcttaaactgtaacc

SEQ ID NO: 3583617 - DNA, 25 bp, Homo sapien
ggacattcaaggctgggaaaatagc

SEQ ID NO: 3583618 - DNA, 25 bp, Homo sapien
cttgcctgctgtggacctatctgca

SEQ ID NO: 3583619 - DNA, 25 bp, Homo sapien
aatagcgagcacgaaggctctgcct

SEQ ID NO: 3583620 - DNA, 25 bp, Homo sapien
gacctatctgcaggcctgaatgatg

SEQ ID NO: 3583621 - DNA, 25 bp, Homo sapien
aatcatccctgattgtccctttctc

SEQ ID NO: 3583622 - DNA, 25 bp, Homo sapien
tgaattcggtcctaaatttgtacaa

SEQ ID NO: 3583623 - DNA, 25 bp, Homo sapien
ccaatcatccctgattgtccctttc

SEQ ID NO: 3583624 - DNA, 25 bp, Homo sapien
ttgaattcggtcctaaatttgtaca

SEQ ID NO: 3583625 - DNA, 25 bp, Homo sapien
ccactgtgctcagccgaagagtttc

SEQ ID NO: 3583626 - DNA, 25 bp, Homo sapien
aatacagatgtccaggtctcaaccc

SEQ ID NO: 3583627 - DNA, 25 bp, Homo sapien
gccttctgtggcataggagcctgaa

SEQ ID NO: 3583628 - DNA, 25 bp, Homo sapien
gaagcaaagccagatttaggaacca

SEQ ID NO: 3583629 - DNA, 25 bp, Homo sapien
ggacaagggagcactttgccaagga

SEQ ID NO: 3583630 - DNA, 25 bp, Homo sapien
cacccagatgagactttgtgcagag

SEQ ID NO: 3583631 - DNA, 25 bp, Homo sapien
cagcccactgttctggttggagaag

SEQ ID NO: 3583632 - DNA, 25 bp, Homo sapien
caaaggtcaaattacagtttgccca

SEQ ID NO: 3583633 - DNA, 25 bp, Homo sapien
gtgaagagatgacacctcataaatc

SEQ ID NO: 3583634 - DNA, 25 bp, Homo sapien
gctgccagtactgtgaagcttcccc

SEQ ID NO: 3583635 - DNA, 25 bp, Homo sapien
agcggcacgtcagccacagcagtgt

SEQ ID NO: 3583636 - DNA, 25 bp, Homo sapien
tctctcagagtaaacatgggtgtgt

SEQ ID NO: 3583637 - DNA, 25 bp, Homo sapien
tgactttagtcacggcatctcttaa

SEQ ID NO: 3583638 - DNA, 25 bp, Homo sapien
tatatcagccaaaaccagtgttgac

SEQ ID NO: 3583639 - DNA, 25 bp, Homo sapien
gagaatgagcccatttggtgtccag

SEQ ID NO: 3583640 - DNA, 25 bp, Homo sapien
gtgtccagtcttatcactcctaggg

SEQ ID NO: 3583641 - DNA, 25 bp, Homo sapien
gcaagtcatcgtatgccttcccgtg

SEQ ID NO: 3583642 - DNA, 25 bp, Homo sapien
gcctgcatgaactcatccagcaagt

SEQ ID NO: 3583643 - DNA, 25 bp, Homo sapien
ttcaggccgatgtacagagggtctc

SEQ ID NO: 3583644 - DNA, 25 bp, Homo sapien
tgcacgcgctggtgtttcaggccga

SEQ ID NO: 3583645 - DNA, 25 bp, Homo sapien
aacaggattttgtgttgtcttcatc

SEQ ID NO: 3583646 - DNA, 25 bp, Homo sapien
caaaaatataagttcctagagaaca

SEQ ID NO: 3583647 - DNA, 25 bp, Homo sapien
ctagagaacaggattttgtgttgtc

SEQ ID NO: 3583648 - DNA, 25 bp, Homo sapien
taagttcctagagaacaggattttg

SEQ ID NO: 3583649 - DNA, 25 bp, Homo sapien
taatcccctggattggacacccttg

SEQ ID NO: 3583650 - DNA, 25 bp, Homo sapien
taagaccttggactcgtaagtgcag

SEQ ID NO: 3583651 - DNA, 25 bp, Homo sapien
tcacttagaagcatcaaacagccag

SEQ ID NO: 3583652 - DNA, 25 bp, Homo sapien
ccaaggcctgggtacacgtaagatc

SEQ ID NO: 3583653 - DNA, 25 bp, Homo sapien
ctcctggaggaggtcaattgtggct

SEQ ID NO: 3583654 - DNA, 25 bp, Homo sapien
cagactcttgacttgcagaccgggc

SEQ ID NO: 3583655 - DNA, 25 bp, Homo sapien
gctgggaaggtccagactcttgact

SEQ ID NO: 3583656 - DNA, 25 bp, Homo sapien
cctcctggaggaggtcaattgtggc

SEQ ID NO: 3583657 - DNA, 25 bp, Homo sapien
agttgaattcatagaggctcaagac

SEQ ID NO: 3583658 - DNA, 25 bp, Homo sapien
cagcatctccttctgagttgaattc

SEQ ID NO: 3583659 - DNA, 25 bp, Homo sapien
ggctcaagacttctgccaagagaag

SEQ ID NO: 3583660 - DNA, 25 bp, Homo sapien
agagaagatctccaaggctcagcag

SEQ ID NO: 3583661 - DNA, 25 bp, Homo sapien
cctgtcccagttgccaccttttggc

SEQ ID NO: 3583662 - DNA, 25 bp, Homo sapien
tcccagttgccaccttttggcccca

SEQ ID NO: 3583663 - DNA, 25 bp, Homo sapien
tgtcccagttgccaccttttggccc

SEQ ID NO: 3583664 - DNA, 25 bp, Homo sapien
cagttgccaccttttggccccagag

SEQ ID NO: 3583665 - DNA, 25 bp, Homo sapien
ctcattgttggtgccgacgtccagc

SEQ ID NO: 3583666 - DNA, 25 bp, Homo sapien
gcatgccgtgtacagggccagcttg

SEQ ID NO: 3583667 - DNA, 25 bp, Homo sapien
gggttcacccctccgcatgccgtgt

SEQ ID NO: 3583668 - DNA, 25 bp, Homo sapien
gttggtgccgacgtccagcagcaca

SEQ ID NO: 3583669 - DNA, 25 bp, Homo sapien
tgtctgggataaggccggagcattt

SEQ ID NO: 3583670 - DNA, 25 bp, Homo sapien
tttgccggtgtgaaagagcttgtct

SEQ ID NO: 3583671 - DNA, 25 bp, Homo sapien
ggataaggccggagcatttattcac

SEQ ID NO: 3583672 - DNA, 25 bp, Homo sapien
gagcttgtctgggataaggccggag

SEQ ID NO: 3583673 - DNA, 25 bp, Homo sapien
tgcaggtgaccagtccttcctggca

SEQ ID NO: 3583674 - DNA, 25 bp, Homo sapien
aggctggtgacaaaccctactgaga

SEQ ID NO: 3583675 - DNA, 25 bp, Homo sapien
gatggcagaaagatgcctgccttgc

SEQ ID NO: 3583676 - DNA, 25 bp, Homo sapien
accctactgagaagagatggcagaa

SEQ ID NO: 3583677 - DNA, 25 bp, Homo sapien
caaagaacagggctccttgtgacat

SEQ ID NO: 3583678 - DNA, 25 bp, Homo sapien
tgcaaagaacagggctccttgtgac

SEQ ID NO: 3583679 - DNA, 25 bp, Homo sapien
ggattatgaaaaatccgatctgcaa

SEQ ID NO: 3583680 - DNA, 25 bp, Homo sapien
aaaaatccgatctgcaaagaacagg

SEQ ID NO: 3583681 - DNA, 25 bp, Homo sapien
tcttacagggttgccatgaaaatcc

SEQ ID NO: 3583682 - DNA, 25 bp, Homo sapien
cttacagggttgccatgaaaatcca

SEQ ID NO: 3583683 - DNA, 25 bp, Homo sapien
ctcttacagggttgccatgaaaatc

SEQ ID NO: 3583684 - DNA, 25 bp, Homo sapien
cagtctttctaactagacttcgagc

SEQ ID NO: 3583685 - DNA, 25 bp, Homo sapien
tactctgcggtaccacagggtgggt

SEQ ID NO: 3583686 - DNA, 25 bp, Homo sapien
gacttcgagctccttgagtatgggc

SEQ ID NO: 3583687 - DNA, 25 bp, Homo sapien
gatgcaatgtactgtcactgtttct

SEQ ID NO: 3583688 - DNA, 25 bp, Homo sapien
ggttgaatgcaactgaattcactat

SEQ ID NO: 3583689 - DNA, 25 bp, Homo sapien
gatggttgaatgcaactgaattcac

SEQ ID NO: 3583690 - DNA, 25 bp, Homo sapien
tgaatgcaactgaattcactatcat

SEQ ID NO: 3583691 - DNA, 25 bp, Homo sapien
aaaagatggttgaatgcaactgaat

SEQ ID NO: 3583692 - DNA, 25 bp, Homo sapien
cttcctctaaaatcacagcggttgt

SEQ ID NO: 3583693 - DNA, 25 bp, Homo sapien
tcctctaaaatcacagcggttgtgg

SEQ ID NO: 3583694 - DNA, 25 bp, Homo sapien
tctaaaatcacagcggttgtggtct

SEQ ID NO: 3583695 - DNA, 25 bp, Homo sapien
aaatcacagcggttgtggtcttcat

SEQ ID NO: 3583696 - DNA, 25 bp, Homo sapien
aatattgtcttctggccaagaattc

SEQ ID NO: 3583697 - DNA, 25 bp, Homo sapien
cctttgtcatgaatggtgatgaaca

SEQ ID NO: 3583698 - DNA, 25 bp, Homo sapien
atattgtcttctggccaagaattca

SEQ ID NO: 3583699 - DNA, 25 bp, Homo sapien
attgttgcaagatgacctttgtcat

SEQ ID NO: 3583700 - DNA, 25 bp, Homo sapien
aaagtaacgcttatcatcggccacc

SEQ ID NO: 3583701 - DNA, 25 bp, Homo sapien
gaaaatgcccttatcatgagagact

SEQ ID NO: 3583702 - DNA, 25 bp, Homo sapien
gaaatggaggctgcgatcgacttga

SEQ ID NO: 3583703 - DNA, 25 bp, Homo sapien
taggaaatttactacgcccagccag

SEQ ID NO: 3583704 - DNA, 25 bp, Homo sapien
atgccaacatcacatctatgtcgtc

SEQ ID NO: 3583705 - DNA, 25 bp, Homo sapien
gccaacatcacatctatgtcgtcca

SEQ ID NO: 3583706 - DNA, 25 bp, Homo sapien
caacatcacatctatgtcgtccact

SEQ ID NO: 3583707 - DNA, 25 bp, Homo sapien
catcacatctatgtcgtccacttgg

SEQ ID NO: 3583708 - DNA, 25 bp, Homo sapien
gctgatctgtgcagaaaggatcatt

SEQ ID NO: 3583709 - DNA, 25 bp, Homo sapien
atgcctcagatgaaatgccatgagc

SEQ ID NO: 3583710 - DNA, 25 bp, Homo sapien
gaaatgccatgagctgatctgtgca

SEQ ID NO: 3583711 - DNA, 25 bp, Homo sapien
gatgaaatgccatgagctgatctgt

SEQ ID NO: 3583712 - DNA, 25 bp, Homo sapien
tccagagtcccaatatgcatgaagg

SEQ ID NO: 3583713 - DNA, 25 bp, Homo sapien
caatcagagttagcctccagagtcc

SEQ ID NO: 3583714 - DNA, 25 bp, Homo sapien
gaatttattcccctctatgaggcag

SEQ ID NO: 3583715 - DNA, 25 bp, Homo sapien
tcaagcccaaaggaagatatgctgg

SEQ ID NO: 3583716 - DNA, 25 bp, Homo sapien
gaagagcttctcgttccggtcttgg

SEQ ID NO: 3583717 - DNA, 25 bp, Homo sapien
tgcggaaagtcaggccatagtgctg

SEQ ID NO: 3583718 - DNA, 25 bp, Homo sapien
cgaagtcagcactcggtagaagagc

SEQ ID NO: 3583719 - DNA, 25 bp, Homo sapien
ggcgtgtacacgattggcatgaact

SEQ ID NO: 3583720 - DNA, 25 bp, Homo sapien
actctgctgccgctcgtaatatctc

SEQ ID NO: 3583721 - DNA, 25 bp, Homo sapien
tatctcatgattcggaggagctgga

SEQ ID NO: 3583722 - DNA, 25 bp, Homo sapien
cgggattaggccgtggattccaagc

SEQ ID NO: 3583723 - DNA, 25 bp, Homo sapien
gattaggccgtggattccaagctgc

SEQ ID NO: 3583724 - DNA, 25 bp, Homo sapien
ctgacagacgggagttttctaaata

SEQ ID NO: 3583725 - DNA, 25 bp, Homo sapien
gatatgttgcgtttattgatttatg

SEQ ID NO: 3583726 - DNA, 25 bp, Homo sapien
aggagttgttggtctgacagacggg

SEQ ID NO: 3583727 - DNA, 25 bp, Homo sapien
tctgtttatgtgatatgttgcgttt

SEQ ID NO: 3583728 - DNA, 25 bp, Homo sapien
cagcattccagacaactgctaggct

SEQ ID NO: 3583729 - DNA, 25 bp, Homo sapien
ctgagagaagactcagtacgtcaac

SEQ ID NO: 3583730 - DNA, 25 bp, Homo sapien
gtacgtcaactttctcgtagtcgct

SEQ ID NO: 3583731 - DNA, 25 bp, Homo sapien
cattccagacaactgctaggcttcc

SEQ ID NO: 3583732 - DNA, 25 bp, Homo sapien
tgttccaaacccaattctgccatct

SEQ ID NO: 3583733 - DNA, 25 bp, Homo sapien
ctgaatgttaagctcattatgttcc

SEQ ID NO: 3583734 - DNA, 25 bp, Homo sapien
tttcaaataatcagccaagtcccct

SEQ ID NO: 3583735 - DNA, 25 bp, Homo sapien
aataatcagccaagtcccctggatt

SEQ ID NO: 3583736 - DNA, 25 bp, Homo sapien
taaagcccttcatgactactgtagc

SEQ ID NO: 3583737 - DNA, 25 bp, Homo sapien
ttgcccctggagtaaagcccttcat

SEQ ID NO: 3583738 - DNA, 25 bp, Homo sapien
tgaggcctaactcgagtcttgcccc

SEQ ID NO: 3583739 - DNA, 25 bp, Homo sapien
tcatgactactgtagcccacacctt

SEQ ID NO: 3583740 - DNA, 25 bp, Homo sapien
ctgagctcgaaggcccttaatagaa

SEQ ID NO: 3583741 - DNA, 25 bp, Homo sapien
cactggggataacggctgagctcga

SEQ ID NO: 3583742 - DNA, 25 bp, Homo sapien
gtggggttgggaagaaatctcattg

SEQ ID NO: 3583743 - DNA, 25 bp, Homo sapien
ctcgaaggcccttaatagaaaagct

SEQ ID NO: 3583744 - DNA, 25 bp, Homo sapien
tgtaaatatccacaacatgttctcc

SEQ ID NO: 3583745 - DNA, 25 bp, Homo sapien
ttctccttggtccagagctccaaca

SEQ ID NO: 3583746 - DNA, 25 bp, Homo sapien
caacatgttctccttggtccagagc

SEQ ID NO: 3583747 - DNA, 25 bp, Homo sapien
tccacaacatgttctccttggtcca

SEQ ID NO: 3583748 - DNA, 25 bp, Homo sapien
gcaggcataaccttctctgagggac

SEQ ID NO: 3583749 - DNA, 25 bp, Homo sapien
tctgtctgggctctcaatggatcaa

SEQ ID NO: 3583750 - DNA, 25 bp, Homo sapien
ggtggtgccttatcttcgacctcaa

SEQ ID NO: 3583751 - DNA, 25 bp, Homo sapien
tcagctttttagcaacaggcaccaa

SEQ ID NO: 3583752 - DNA, 25 bp, Homo sapien
tctggaaatgataactgatgtgggc

SEQ ID NO: 3583753 - DNA, 25 bp, Homo sapien
gagcattattcctggcacaaggtaa

SEQ ID NO: 3583754 - DNA, 25 bp, Homo sapien
gactctacattttagcactgattgc

SEQ ID NO: 3583755 - DNA, 25 bp, Homo sapien
caaatgcccattgtaagacatggga

SEQ ID NO: 3583756 - DNA, 25 bp, Homo sapien
cattcttcggcttttctctgttatt

SEQ ID NO: 3583757 - DNA, 25 bp, Homo sapien
gttatttccatctgattcctccaaa

SEQ ID NO: 3583758 - DNA, 25 bp, Homo sapien
tccatctgattcctccaaacttctc

SEQ ID NO: 3583759 - DNA, 25 bp, Homo sapien
ctgttatttccatctgattcctcca

SEQ ID NO: 3583760 - DNA, 25 bp, Homo sapien
cctgcctagaccctaactggtatat

SEQ ID NO: 3583761 - DNA, 25 bp, Homo sapien
gaaacaaggctcacttaagaactgc

SEQ ID NO: 3583762 - DNA, 25 bp, Homo sapien
tatattttccttgggatccgaagga

SEQ ID NO: 3583763 - DNA, 25 bp, Homo sapien
taaatgccctgcagtagaaggaaac

SEQ ID NO: 3583764 - DNA, 25 bp, Homo sapien
tgagactaactaaggtatttgcccc

SEQ ID NO: 3583765 - DNA, 25 bp, Homo sapien
taaacactcatgaagagagggagtg

SEQ ID NO: 3583766 - DNA, 25 bp, Homo sapien
ttaggacactgcctggcataaacac

SEQ ID NO: 3583767 - DNA, 25 bp, Homo sapien
gactgaagagtagtggctgagcact

SEQ ID NO: 3583768 - DNA, 25 bp, Homo sapien
tacgtgatataagctgttccctctg

SEQ ID NO: 3583769 - DNA, 25 bp, Homo sapien
ggcctgggacaatctgacccctgag

SEQ ID NO: 3583770 - DNA, 25 bp, Homo sapien
tctggtgaatcccaagaacacagtg

SEQ ID NO: 3583771 - DNA, 25 bp, Homo sapien
aatgactgcactagcctctaactgg

SEQ ID NO: 3583772 - DNA, 25 bp, Homo sapien
tcttcactgttctgcagcatctgct

SEQ ID NO: 3583773 - DNA, 25 bp, Homo sapien
cttcactgttctgcagcatctgctg

SEQ ID NO: 3583774 - DNA, 25 bp, Homo sapien
ccccagctggcatctgggaggtgcc

SEQ ID NO: 3583775 - DNA, 25 bp, Homo sapien
caatcttcactgttctgcagcatct

SEQ ID NO: 3583776 - DNA, 25 bp, Homo sapien
tacagtctacttagtattttgcaat

SEQ ID NO: 3583777 - DNA, 25 bp, Homo sapien
caataacattcatgagtatacagtc

SEQ ID NO: 3583778 - DNA, 25 bp, Homo sapien
gcttacttaacacgatatactttcc

SEQ ID NO: 3583779 - DNA, 25 bp, Homo sapien
aacataagccaatgtttctaaagtc

SEQ ID NO: 3583780 - DNA, 25 bp, Homo sapien
ccttgattttcagacccttgggagc

SEQ ID NO: 3583781 - DNA, 25 bp, Homo sapien
aattatttacaacatgcctatgaga

SEQ ID NO: 3583782 - DNA, 25 bp, Homo sapien
tctgagtatcatcttcaggttccag

SEQ ID NO: 3583783 - DNA, 25 bp, Homo sapien
ttgtgttccgggcaccccattccat

SEQ ID NO: 3583784 - DNA, 25 bp, Homo sapien
tggtctattccctaaacatctcctt

SEQ ID NO: 3583785 - DNA, 25 bp, Homo sapien
ctgacagatgctggggtctcctaac

SEQ ID NO: 3583786 - DNA, 25 bp, Homo sapien
cagaaattccgagcagggatgaagt

SEQ ID NO: 3583787 - DNA, 25 bp, Homo sapien
aaatacagaaattccgagcagggat

SEQ ID NO: 3583788 - DNA, 25 bp, Homo sapien
ccctggccattgtgttgagaataaa

SEQ ID NO: 3583789 - DNA, 25 bp, Homo sapien
cacaactgactgaggaggccaatgg

SEQ ID NO: 3583790 - DNA, 25 bp, Homo sapien
taggaaggaggatcagtcagtgcaa

SEQ ID NO: 3583791 - DNA, 25 bp, Homo sapien
ggaggcttcaatcagtggtgaccca

SEQ ID NO: 3583792 - DNA, 25 bp, Homo sapien
gaagagaagggcactcacagtaact

SEQ ID NO: 3583793 - DNA, 25 bp, Homo sapien
cactggaggacaacagaacagccag

SEQ ID NO: 3583794 - DNA, 25 bp, Homo sapien
gccttccatggagactctctgagca

SEQ ID NO: 3583795 - DNA, 25 bp, Homo sapien
gatgcaaagtaccaaggctcaagcc

SEQ ID NO: 3583796 - DNA, 25 bp, Homo sapien
ggtcgcctctctccacgcataaaag

SEQ ID NO: 3583797 - DNA, 25 bp, Homo sapien
tcgcctctctccacgcataaaaggg

SEQ ID NO: 3583798 - DNA, 25 bp, Homo sapien
ggctccctgcattactggtcgcctc

SEQ ID NO: 3583799 - DNA, 25 bp, Homo sapien
tccctgcattactggtcgcctctct

SEQ ID NO: 3583800 - DNA, 25 bp, Homo sapien
gggcggggcgcaattttccggcagc

SEQ ID NO: 3583801 - DNA, 25 bp, Homo sapien
ttttccggcagccacgggatcgcaa

SEQ ID NO: 3583802 - DNA, 25 bp, Homo sapien
acgggatcgcaacgcgggccgtcct

SEQ ID NO: 3583803 - DNA, 25 bp, Homo sapien
ttccggcagccacgggatcgcaacg

SEQ ID NO: 3583804 - DNA, 25 bp, Homo sapien
ttcctggtgacatcgtatccgcgct

SEQ ID NO: 3583805 - DNA, 25 bp, Homo sapien
agggttcctggtgacatcgtatccg

SEQ ID NO: 3583806 - DNA, 25 bp, Homo sapien
ggttcctggtgacatcgtatccgcg

SEQ ID NO: 3583807 - DNA, 25 bp, Homo sapien
tcctggtgacatcgtatccgcgctt

SEQ ID NO: 3583808 - DNA, 25 bp, Homo sapien
cgcgccgggccaggcttggagtggc

SEQ ID NO: 3583809 - DNA, 25 bp, Homo sapien
gcgcgccgggccaggcttggagtgg

SEQ ID NO: 3583810 - DNA, 25 bp, Homo sapien
cgccgggccaggcttggagtggcag

SEQ ID NO: 3583811 - DNA, 25 bp, Homo sapien
gccgggccaggcttggagtggcagc

SEQ ID NO: 3583812 - DNA, 25 bp, Homo sapien
gccagggagccagccgcgtgcctgt

SEQ ID NO: 3583813 - DNA, 25 bp, Homo sapien
cgggcgcggtgggtgtccagcgcgg

SEQ ID NO: 3583814 - DNA, 25 bp, Homo sapien
gcggtgggtgtccagcgcgggaggg

SEQ ID NO: 3583815 - DNA, 25 bp, Homo sapien
ggcgcggtgggtgtccagcgcggga

SEQ ID NO: 3583816 - DNA, 25 bp, Homo sapien
ggcacgggagagaaagcaaggtcag

SEQ ID NO: 3583817 - DNA, 25 bp, Homo sapien
ctggcacgggagagaaagcaaggtc

SEQ ID NO: 3583818 - DNA, 25 bp, Homo sapien
caaggtcagggcctccttccagcca

SEQ ID NO: 3583819 - DNA, 25 bp, Homo sapien
aggtcagggcctccttccagccagc

SEQ ID NO: 3583820 - DNA, 25 bp, Homo sapien
cgggcctgatccggggacgcgccct

SEQ ID NO: 3583821 - DNA, 25 bp, Homo sapien
caaagcgaaaccaagccctggaagc

SEQ ID NO: 3583822 - DNA, 25 bp, Homo sapien
agccaggcaaagcgaaaccaagccc

SEQ ID NO: 3583823 - DNA, 25 bp, Homo sapien
ctcggtcctctccttccctggccca

SEQ ID NO: 3583824 - DNA, 25 bp, Homo sapien
tcggtcctctccttccctggcccac

SEQ ID NO: 3583825 - DNA, 25 bp, Homo sapien
gagctgcggtctgtgagtcctctcc

SEQ ID NO: 3583826 - DNA, 25 bp, Homo sapien
tcccgccaatgggtggaccgcgctg

SEQ ID NO: 3583827 - DNA, 25 bp, Homo sapien
agctgaggtctacgcggtcccgctg

SEQ ID NO: 3583828 - DNA, 25 bp, Homo sapien
gagttcctcaaagagcggtcccaca

SEQ ID NO: 3583829 - DNA, 25 bp, Homo sapien
agaatgcccgcctgagactctccat

SEQ ID NO: 3583830 - DNA, 25 bp, Homo sapien
actgcgtgcacgtggttttccccag

SEQ ID NO: 3583831 - DNA, 25 bp, Homo sapien
aagcagctcagaatgcccgcctgag

SEQ ID NO: 3583832 - DNA, 25 bp, Homo sapien
gggcgcctcagcactgcgtgcacgt

SEQ ID NO: 3583833 - DNA, 25 bp, Homo sapien
taagtaccaagcagacatcatggcc

SEQ ID NO: 3583834 - DNA, 25 bp, Homo sapien
ggtgccagcattagccccgttgtaa

SEQ ID NO: 3583835 - DNA, 25 bp, Homo sapien
gcattagccccgttgtaagtaccaa

SEQ ID NO: 3583836 - DNA, 25 bp, Homo sapien
tcaaagctcccggtgccagcattag

SEQ ID NO: 3583837 - DNA, 25 bp, Homo sapien
tgtccacggtcactaagcacgaaga

SEQ ID NO: 3583838 - DNA, 25 bp, Homo sapien
caaacagctaaatccaccggttggg

SEQ ID NO: 3583839 - DNA, 25 bp, Homo sapien
tcagggtgacatcgttgcaattccg

SEQ ID NO: 3583840 - DNA, 25 bp, Homo sapien
aattccgtgaggcttcagatgggca

SEQ ID NO: 3583841 - DNA, 25 bp, Homo sapien
ggcaagaagcagaatctcagactgg

SEQ ID NO: 3583842 - DNA, 25 bp, Homo sapien
tcttcaaatgagaggtggagaccca

SEQ ID NO: 3583843 - DNA, 25 bp, Homo sapien
gaaggcgtcgccaatcttgagcaac

SEQ ID NO: 3583844 - DNA, 25 bp, Homo sapien
tcagactggcaagatgcaagggcag

SEQ ID NO: 3583845 - DNA, 25 bp, Homo sapien
aagcaaatggcaataaactgaaggg

SEQ ID NO: 3583846 - DNA, 25 bp, Homo sapien
cctcccggtgtaggacagaacacct

SEQ ID NO: 3583847 - DNA, 25 bp, Homo sapien
aaggtcagagagtaacatttccagg

SEQ ID NO: 3583848 - DNA, 25 bp, Homo sapien
gaaatgtgattcgacaaaaagtgca

SEQ ID NO: 3583849 - DNA, 25 bp, Homo sapien
accttggagacttctctggtggctc

SEQ ID NO: 3583850 - DNA, 25 bp, Homo sapien
ctctgaaggcttgggcaggtccaca

SEQ ID NO: 3583851 - DNA, 25 bp, Homo sapien
caggtccacagctctcacaggccat

SEQ ID NO: 3583852 - DNA, 25 bp, Homo sapien
tgcacagaaggaagaccttggagac

SEQ ID NO: 3583853 - DNA, 25 bp, Homo sapien
gcccgggtgacagagcaatacttca

SEQ ID NO: 3583854 - DNA, 25 bp, Homo sapien
cgggtgacagagcaatacttcatct

SEQ ID NO: 3583855 - DNA, 25 bp, Homo sapien
cccgggtgacagagcaatacttcat

SEQ ID NO: 3583856 - DNA, 25 bp, Homo sapien
cactttgtgccttttgaccgcgcct

SEQ ID NO: 3583857 - DNA, 25 bp, Homo sapien
tctgactgcacaagcccactttgtg

SEQ ID NO: 3583858 - DNA, 25 bp, Homo sapien
caggaaatcaaagctgacactggct

SEQ ID NO: 3583859 - DNA, 25 bp, Homo sapien
tatttccatcaggaatgagatgtaa

SEQ ID NO: 3583860 - DNA, 25 bp, Homo sapien
tggtaacaaattcatcaatcacttc

SEQ ID NO: 3583861 - DNA, 25 bp, Homo sapien
ctgcccttagtgactcagtgtcatt

SEQ ID NO: 3583862 - DNA, 25 bp, Homo sapien
atcaatcacttcagatctgctggct

SEQ ID NO: 3583863 - DNA, 25 bp, Homo sapien
gcccttagtgactcagtgtcattca

SEQ ID NO: 3583864 - DNA, 25 bp, Homo sapien
ggcacgaaggacacttccatccctt

SEQ ID NO: 3583865 - DNA, 25 bp, Homo sapien
aggacccacagaggcacgaaggaca

SEQ ID NO: 3583866 - DNA, 25 bp, Homo sapien
cagactcccatggatgtcatgtatc

SEQ ID NO: 3583867 - DNA, 25 bp, Homo sapien
gagcaaggcacatgggatcaggacc

SEQ ID NO: 3583868 - DNA, 25 bp, Homo sapien
tccttgcttagcagattggggttga

SEQ ID NO: 3583869 - DNA, 25 bp, Homo sapien
tccctttccttgcttagcagattgg

SEQ ID NO: 3583870 - DNA, 25 bp, Homo sapien
acatccctttccttgcttagcagat

SEQ ID NO: 3583871 - DNA, 25 bp, Homo sapien
ccctttccttgcttagcagattggg

SEQ ID NO: 3583872 - DNA, 25 bp, Homo sapien
cctgagaccagatgaaggactgttg

SEQ ID NO: 3583873 - DNA, 25 bp, Homo sapien
ccatgactctaacttgaaacattgc

SEQ ID NO: 3583874 - DNA, 25 bp, Homo sapien
tctttggatagtgggcggtagtccc

SEQ ID NO: 3583875 - DNA, 25 bp, Homo sapien
gagtccttcctattagctctttgga

SEQ ID NO: 3583876 - DNA, 25 bp, Homo sapien
caccaccaagataacgaccgcttgg

SEQ ID NO: 3583877 - DNA, 25 bp, Homo sapien
gtgattcagggaagtaggcccactg

SEQ ID NO: 3583878 - DNA, 25 bp, Homo sapien
ccactggacaaggaggtggctccac

SEQ ID NO: 3583879 - DNA, 25 bp, Homo sapien
cgaccgcttggagtgattcagggaa

SEQ ID NO: 3583880 - DNA, 25 bp, Homo sapien
ctggtgccccgatgaagaactgagg

SEQ ID NO: 3583881 - DNA, 25 bp, Homo sapien
ccaccgccgctcagaagctgccaag

SEQ ID NO: 3583882 - DNA, 25 bp, Homo sapien
ccggtgctttgggccccacgcacag

SEQ ID NO: 3583883 - DNA, 25 bp, Homo sapien
tgggccccacgcacagcactgagtg

SEQ ID NO: 3583884 - DNA, 25 bp, Homo sapien
gccctgccatgggaatacaggtttc

SEQ ID NO: 3583885 - DNA, 25 bp, Homo sapien
cctgccatgggaatacaggtttctg

SEQ ID NO: 3583886 - DNA, 25 bp, Homo sapien
ccatgggaatacaggtttctgttct

SEQ ID NO: 3583887 - DNA, 25 bp, Homo sapien
gaggcaccggagaaactaggagttc

SEQ ID NO: 3583888 - DNA, 25 bp, Homo sapien
gcgaaggccgtagtctcgctcagga

SEQ ID NO: 3583889 - DNA, 25 bp, Homo sapien
agggctccccatacaccaggtgtgg

SEQ ID NO: 3583890 - DNA, 25 bp, Homo sapien
caattcttcaaatttgcccagggct

SEQ ID NO: 3583891 - DNA, 25 bp, Homo sapien
gacctggtctttttgcgagctggca

SEQ ID NO: 3583892 - DNA, 25 bp, Homo sapien
gcgctgctcgccagcttgctcgcac

SEQ ID NO: 3583893 - DNA, 25 bp, Homo sapien
gccagcttgctcgcactcggctgtg

SEQ ID NO: 3583894 - DNA, 25 bp, Homo sapien
tgctcgccagcttgctcgcactcgg

SEQ ID NO: 3583895 - DNA, 25 bp, Homo sapien
gcttgctcgcactcggctgtgcggc

SEQ ID NO: 3583896 - DNA, 25 bp, Homo sapien
ggtagggtaactgcgggctgccgga

SEQ ID NO: 3583897 - DNA, 25 bp, Homo sapien
gcaggacttcgccagggcagtcctc

SEQ ID NO: 3583898 - DNA, 25 bp, Homo sapien
cagtcctcggggttccaggacacgg

SEQ ID NO: 3583899 - DNA, 25 bp, Homo sapien
tgctcggcgcgggtgagtgcgggca

SEQ ID NO: 3583900 - DNA, 25 bp, Homo sapien
catgtgctcaatgtaagtcacatta

SEQ ID NO: 3583901 - DNA, 25 bp, Homo sapien
ccacattactcaaagggaggagaga

SEQ ID NO: 3583902 - DNA, 25 bp, Homo sapien
tgtaagtcacattaacattccccac

SEQ ID NO: 3583903 - DNA, 25 bp, Homo sapien
gaatggtgcgttgaagcccaagata

SEQ ID NO: 3583904 - DNA, 25 bp, Homo sapien
caagccagactttggagccgaagcc

SEQ ID NO: 3583905 - DNA, 25 bp, Homo sapien
tatgaaacgctctatgccaatggca

SEQ ID NO: 3583906 - DNA, 25 bp, Homo sapien
caggtgggcatctacatcctcagca

SEQ ID NO: 3583907 - DNA, 25 bp, Homo sapien
tcaggaaagtctcgaaggaagcggc

SEQ ID NO: 3583908 - DNA, 25 bp, Homo sapien
ccatgcccgagcagatgaaatttca

SEQ ID NO: 3583909 - DNA, 25 bp, Homo sapien
tgaaatttcagtggatccgggtgaa

SEQ ID NO: 3583910 - DNA, 25 bp, Homo sapien
caagggttggatcaagggcaatgcc

SEQ ID NO: 3583911 - DNA, 25 bp, Homo sapien
gattatgattatgccctcctggaac

SEQ ID NO: 3583912 - DNA, 25 bp, Homo sapien
cataaggcagtgttcccatttagga

SEQ ID NO: 3583913 - DNA, 25 bp, Homo sapien
tccataaggcagtgttcccatttag

SEQ ID NO: 3583914 - DNA, 25 bp, Homo sapien
aaggcagtgttcccatttaggaact

SEQ ID NO: 3583915 - DNA, 25 bp, Homo sapien
taaggcagtgttcccatttaggaac

SEQ ID NO: 3583916 - DNA, 25 bp, Homo sapien
tctttatcagaggttcacatgcctg

SEQ ID NO: 3583917 - DNA, 25 bp, Homo sapien
gcaaagttagacaatggcacaaagt

SEQ ID NO: 3583918 - DNA, 25 bp, Homo sapien
taaggctagtagaaccacatttccc

SEQ ID NO: 3583919 - DNA, 25 bp, Homo sapien
tttgtgaagcaccttgattccttga

SEQ ID NO: 3583920 - DNA, 25 bp, Homo sapien
aacattgattgctcttcagaagaca

SEQ ID NO: 3583921 - DNA, 25 bp, Homo sapien
tacggattacttctttatgctaacc

SEQ ID NO: 3583922 - DNA, 25 bp, Homo sapien
catcaagtatgtgtctggtataggc

SEQ ID NO: 3583923 - DNA, 25 bp, Homo sapien
tgtaactcctaaggtatagtgatcc

SEQ ID NO: 3583924 - DNA, 25 bp, Homo sapien
actacaaaaggaatggaacagataa

SEQ ID NO: 3583925 - DNA, 25 bp, Homo sapien
aaaggaatggaacagataataaaat

SEQ ID NO: 3583926 - DNA, 25 bp, Homo sapien
gaatggaacagataataaaataatg

SEQ ID NO: 3583927 - DNA, 25 bp, Homo sapien
tggaacagataataaaataatgaga

SEQ ID NO: 3583928 - DNA, 25 bp, Homo sapien
ttaaactgttctgccatgcaaccac

SEQ ID NO: 3583929 - DNA, 25 bp, Homo sapien
aaactgttctgccatgcaaccacca

SEQ ID NO: 3583930 - DNA, 25 bp, Homo sapien
aactgttctgccatgcaaccaccac

SEQ ID NO: 3583931 - DNA, 25 bp, Homo sapien
taaactgttctgccatgcaaccacc

SEQ ID NO: 3583932 - DNA, 25 bp, Homo sapien
tgaaggggttcagcatgggggtgat

SEQ ID NO: 3583933 - DNA, 25 bp, Homo sapien
gaaggggttcagcatgggggtgatc

SEQ ID NO: 3583934 - DNA, 25 bp, Homo sapien
gatgaaggggttcagcatgggggtg

SEQ ID NO: 3583935 - DNA, 25 bp, Homo sapien
aggggttcagcatgggggtgatcac

SEQ ID NO: 3583936 - DNA, 25 bp, Homo sapien
aatgatccgtgagataggaagaaaa

SEQ ID NO: 3583937 - DNA, 25 bp, Homo sapien
gaaaatgatccgtgagataggaaga

SEQ ID NO: 3583938 - DNA, 25 bp, Homo sapien
agagaaaatgatccgtgagatagga

SEQ ID NO: 3583939 - DNA, 25 bp, Homo sapien
tctgaactcaggtaccccccaacga

SEQ ID NO: 3583940 - DNA, 25 bp, Homo sapien
aggcaatcaaattgtgcagctggga

SEQ ID NO: 3583941 - DNA, 25 bp, Homo sapien
gcaatcaaattgtgcagctgggagt

SEQ ID NO: 3583942 - DNA, 25 bp, Homo sapien
cttgatgcaggtcatttgtaaggca

SEQ ID NO: 3583943 - DNA, 25 bp, Homo sapien
atgcaggtcatttgtaaggcaatca

SEQ ID NO: 3583944 - DNA, 25 bp, Homo sapien
caggagcatgtctttcttccatgcc

SEQ ID NO: 3583945 - DNA, 25 bp, Homo sapien
gcctccaaaaacagcaaagagagac

SEQ ID NO: 3583946 - DNA, 25 bp, Homo sapien
tctttcttccatgcctccaaaaaca

SEQ ID NO: 3583947 - DNA, 25 bp, Homo sapien
gagcatgtctttcttccatgcctcc

SEQ ID NO: 3583948 - DNA, 25 bp, Homo sapien
cggccaggataatgagcagattctc

SEQ ID NO: 3583949 - DNA, 25 bp, Homo sapien
tgacggccaggataatgagcagatt

SEQ ID NO: 3583950 - DNA, 25 bp, Homo sapien
gacggccaggataatgagcagattc

SEQ ID NO: 3583951 - DNA, 25 bp, Homo sapien
gctgacggccaggataatgagcaga

SEQ ID NO: 3583952 - DNA, 25 bp, Homo sapien
aacagcccagcgagggccagctgca

SEQ ID NO: 3583953 - DNA, 25 bp, Homo sapien
cccagcgagggccagctgcagtttt

SEQ ID NO: 3583954 - DNA, 25 bp, Homo sapien
agggccagctgcagttttggatcct

SEQ ID NO: 3583955 - DNA, 25 bp, Homo sapien
ctaggtacatgaacaggaacagccc

SEQ ID NO: 3583956 - DNA, 25 bp, Homo sapien
tcattaaggacataggcgtgggcaa

SEQ ID NO: 3583957 - DNA, 25 bp, Homo sapien
acaacctaggcaatatcattaagga

SEQ ID NO: 3583958 - DNA, 25 bp, Homo sapien
atataagacctaacaccataaaaat

SEQ ID NO: 3583959 - DNA, 25 bp, Homo sapien
ggcaatatcattaaggacataggcg

SEQ ID NO: 3583960 - DNA, 25 bp, Homo sapien
aaaggatggaacagatcatgagatt

SEQ ID NO: 3583961 - DNA, 25 bp, Homo sapien
tcacacaagagaaaggatggaacag

SEQ ID NO: 3583962 - DNA, 25 bp, Homo sapien
gatggaacagatcatgagatttgac

SEQ ID NO: 3583963 - DNA, 25 bp, Homo sapien
aggatggaacagatcatgagatttg

SEQ ID NO: 3583964 - DNA, 25 bp, Homo sapien
accactccattcctgggagatgatg

SEQ ID NO: 3583965 - DNA, 25 bp, Homo sapien
caaatatagggatatctaaaataca

SEQ ID NO: 3583966 - DNA, 25 bp, Homo sapien
accaaatatagggatatctaaaata

SEQ ID NO: 3583967 - DNA, 25 bp, Homo sapien
ccaaatatagggatatctaaaatac

SEQ ID NO: 3583968 - DNA, 25 bp, Homo sapien
gaaaaccaaatatagggatatctaa

SEQ ID NO: 3583969 - DNA, 25 bp, Homo sapien
cagggggtgacagatgggcagatgg

SEQ ID NO: 3583970 - DNA, 25 bp, Homo sapien
gggggtgacagatgggcagatggcc

SEQ ID NO: 3583971 - DNA, 25 bp, Homo sapien
gggtgacagatgggcagatggccac

SEQ ID NO: 3583972 - DNA, 25 bp, Homo sapien
tcggtagtgcagggggtgacagatg

SEQ ID NO: 3583973 - DNA, 25 bp, Homo sapien
agtgggggtcagagctgccagccag

SEQ ID NO: 3583974 - DNA, 25 bp, Homo sapien
gaagtgggggtcagagctgccagcc

SEQ ID NO: 3583975 - DNA, 25 bp, Homo sapien
gtggaagtgggggtcagagctgcca

SEQ ID NO: 3583976 - DNA, 25 bp, Homo sapien
gtgtggaagtgggggtcagagctgc

SEQ ID NO: 3583977 - DNA, 25 bp, Homo sapien
ccagggcaccaacgagaaagggctt

SEQ ID NO: 3583978 - DNA, 25 bp, Homo sapien
gttgctccgagcctaatgagagagg

SEQ ID NO: 3583979 - DNA, 25 bp, Homo sapien
actgggcacctatcaagggttagac

SEQ ID NO: 3583980 - DNA, 25 bp, Homo sapien
ctttatcaaacatcaactgggcacc

SEQ ID NO: 3583981 - DNA, 25 bp, Homo sapien
ttacttggctaataagcagcagggc

SEQ ID NO: 3583982 - DNA, 25 bp, Homo sapien
gcactttgagggcaagagctacata

SEQ ID NO: 3583983 - DNA, 25 bp, Homo sapien
caactgcaattgtcccaccaggaga

SEQ ID NO: 3583984 - DNA, 25 bp, Homo sapien
tcagagcccaacacagggtttgaaa

SEQ ID NO: 3583985 - DNA, 25 bp, Homo sapien
gaggaagccaatctgtagagcaaga

SEQ ID NO: 3583986 - DNA, 25 bp, Homo sapien
tcttaaagattgtacccctggccat

SEQ ID NO: 3583987 - DNA, 25 bp, Homo sapien
gagatgggcatctaacccatgcaag

SEQ ID NO: 3583988 - DNA, 25 bp, Homo sapien
tagagcaagagaatgaacggacgga

SEQ ID NO: 3583989 - DNA, 25 bp, Homo sapien
tgatgaagacgccaaaagcaaattc

SEQ ID NO: 3583990 - DNA, 25 bp, Homo sapien
aagacgccaaaagcaaattcaataa

SEQ ID NO: 3583991 - DNA, 25 bp, Homo sapien
gatgaagacgccaaaagcaaattca

SEQ ID NO: 3583992 - DNA, 25 bp, Homo sapien
tgaagacgccaaaagcaaattcaat

SEQ ID NO: 3583993 - DNA, 25 bp, Homo sapien
tggactgtgagtaaacggattaccc

SEQ ID NO: 3583994 - DNA, 25 bp, Homo sapien
cagaacagactgatctcccttgagc

SEQ ID NO: 3583995 - DNA, 25 bp, Homo sapien
taactttgttaacttggctaggaca

SEQ ID NO: 3583996 - DNA, 25 bp, Homo sapien
tagaggcgaagtcccatattcactc

SEQ ID NO: 3583997 - DNA, 25 bp, Homo sapien
aatcgtggacacttggtatttgcca

SEQ ID NO: 3583998 - DNA, 25 bp, Homo sapien
tccccgccagaaaaacatgtgtatg

SEQ ID NO: 3583999 - DNA, 25 bp, Homo sapien
gagactgttggtcattcctgagaaa

SEQ ID NO: 3584000 - DNA, 25 bp, Homo sapien
gacttaaaggagagccccatctgta

SEQ ID NO: 3584001 - DNA, 25 bp, Homo sapien
agggactgaatgcactccatcaagt

SEQ ID NO: 3584002 - DNA, 25 bp, Homo sapien
gcattgtggattatggttcaacatg

SEQ ID NO: 3584003 - DNA, 25 bp, Homo sapien
tccagagggcatgctgtattcccac

SEQ ID NO: 3584004 - DNA, 25 bp, Homo sapien
cagagccttcgtggcctaatcagct

SEQ ID NO: 3584005 - DNA, 25 bp, Homo sapien
ctccttccagataggattaagtctt

SEQ ID NO: 3584006 - DNA, 25 bp, Homo sapien
tgtctatctctttccgaaagagaat

SEQ ID NO: 3584007 - DNA, 25 bp, Homo sapien
tctttccgaaagagaattcctcctc

SEQ ID NO: 3584008 - DNA, 25 bp, Homo sapien
tggtcatctctctgtagccttactt

SEQ ID NO: 3584009 - DNA, 25 bp, Homo sapien
tagttttgtaagaacgtgtttcata

SEQ ID NO: 3584010 - DNA, 25 bp, Homo sapien
gaacgtgtttcatacaagctctctt

SEQ ID NO: 3584011 - DNA, 25 bp, Homo sapien
tatagtacccagtcattcgtctttg

SEQ ID NO: 3584012 - DNA, 25 bp, Homo sapien
tgtcacgatccaccaaatagttttg

SEQ ID NO: 3584013 - DNA, 25 bp, Homo sapien
ccagaagtgggattattgattggat

SEQ ID NO: 3584014 - DNA, 25 bp, Homo sapien
gattattgattggatcacatggtaa

SEQ ID NO: 3584015 - DNA, 25 bp, Homo sapien
aagtgggattattgattggatcaca

SEQ ID NO: 3584016 - DNA, 25 bp, Homo sapien
tgggattattgattggatcacatgg

SEQ ID NO: 3584017 - DNA, 25 bp, Homo sapien
ctatttcagtaaaaagaggacaggc

SEQ ID NO: 3584018 - DNA, 25 bp, Homo sapien
gggcagtgactaccatcaacaaggg

SEQ ID NO: 3584019 - DNA, 25 bp, Homo sapien
gttgtgcaccatgtaatgtcagctg

SEQ ID NO: 3584020 - DNA, 25 bp, Homo sapien
taggctaaacagcatgggcagtgac

SEQ ID NO: 3584021 - DNA, 25 bp, Homo sapien
tagatgcaagcagtatcgttggttc

SEQ ID NO: 3584022 - DNA, 25 bp, Homo sapien
tattgcacactcacaatatgacagg

SEQ ID NO: 3584023 - DNA, 25 bp, Homo sapien
cagcaataaggatagtcaatggcac

SEQ ID NO: 3584024 - DNA, 25 bp, Homo sapien
taaacgctgtgctcccagcaataag

SEQ ID NO: 3584025 - DNA, 25 bp, Homo sapien
tttgtcatcacgtcctcagtacctg

SEQ ID NO: 3584026 - DNA, 25 bp, Homo sapien
tgtgcatatgtacccattgattagc

SEQ ID NO: 3584027 - DNA, 25 bp, Homo sapien
cagaatctcaaagtgaccagtatgg

SEQ ID NO: 3584028 - DNA, 25 bp, Homo sapien
tatttttagaagtaccagaatctca

SEQ ID NO: 3584029 - DNA, 25 bp, Homo sapien
tatatgcatctccagattggtgaaa

SEQ ID NO: 3584030 - DNA, 25 bp, Homo sapien
ttttgcaccaaaagattatagacat

SEQ ID NO: 3584031 - DNA, 25 bp, Homo sapien
ttatagacataaccataggctttgt

SEQ ID NO: 3584032 - DNA, 25 bp, Homo sapien
gctcagtggtcagtagctcagacca

SEQ ID NO: 3584033 - DNA, 25 bp, Homo sapien
gacaccaagtgaaatctctgtttag

SEQ ID NO: 3584034 - DNA, 25 bp, Homo sapien
ttagttgggctgcttgacgtctgtc

SEQ ID NO: 3584035 - DNA, 25 bp, Homo sapien
gctatagttaccctgaatgcttccc

SEQ ID NO: 3584036 - DNA, 25 bp, Homo sapien
tgcccttgatcccaatttacagctg

SEQ ID NO: 3584037 - DNA, 25 bp, Homo sapien
caacagggtagctaagaaaagtcag

SEQ ID NO: 3584038 - DNA, 25 bp, Homo sapien
gactagaaagttgtggccagacccg

SEQ ID NO: 3584039 - DNA, 25 bp, Homo sapien
gccagtagcagaagtggaaactcag

SEQ ID NO: 3584040 - DNA, 25 bp, Homo sapien
aaccagtcaggatatatagcagcca

SEQ ID NO: 3584041 - DNA, 25 bp, Homo sapien
cactctctcgttgtgggcactggca

SEQ ID NO: 3584042 - DNA, 25 bp, Homo sapien
agtcaaatcatgttacctccccggg

SEQ ID NO: 3584043 - DNA, 25 bp, Homo sapien
tattcgggtattcaagcctgccaca

SEQ ID NO: 3584044 - DNA, 25 bp, Homo sapien
tgcacgggtcactgtttcacaaagg

SEQ ID NO: 3584045 - DNA, 25 bp, Homo sapien
gatctatctagatgccctaccgtaa

SEQ ID NO: 3584046 - DNA, 25 bp, Homo sapien
cctagcctgggtagaaacaaatgtc

SEQ ID NO: 3584047 - DNA, 25 bp, Homo sapien
gagaacaggacacttaaatacggac

SEQ ID NO: 3584048 - DNA, 25 bp, Homo sapien
cagaatggagtttgccagaggagac

SEQ ID NO: 3584049 - DNA, 25 bp, Homo sapien
gtttaatgattagaacagttcccag

SEQ ID NO: 3584050 - DNA, 25 bp, Homo sapien
tcaatccagttcaagttcagccagg

SEQ ID NO: 3584051 - DNA, 25 bp, Homo sapien
ttctcgctagattgagagccccacg

SEQ ID NO: 3584052 - DNA, 25 bp, Homo sapien
cctcacaaaggagcatatgcttaat

SEQ ID NO: 3584053 - DNA, 25 bp, Homo sapien
gcccagtgggagatttcccagtgaa

SEQ ID NO: 3584054 - DNA, 25 bp, Homo sapien
gatacaaagtatcacctttttctag

SEQ ID NO: 3584055 - DNA, 25 bp, Homo sapien
tctactcttgcccagtgggagattt

SEQ ID NO: 3584056 - DNA, 25 bp, Homo sapien
cagtgaaatcccaccgatgatctga

SEQ ID NO: 3584057 - DNA, 25 bp, Homo sapien
aatactatagttgcagcaggccctg

SEQ ID NO: 3584058 - DNA, 25 bp, Homo sapien
ggccctgttacagcttagtggatat

SEQ ID NO: 3584059 - DNA, 25 bp, Homo sapien
ggaaatactatagttgcagcaggcc

SEQ ID NO: 3584060 - DNA, 25 bp, Homo sapien
tatagttgcagcaggccctgttaca

SEQ ID NO: 3584061 - DNA, 25 bp, Homo sapien
cgggagctagagacactgtggtcca

SEQ ID NO: 3584062 - DNA, 25 bp, Homo sapien
cacagtaaccaagtatccaggagcg

SEQ ID NO: 3584063 - DNA, 25 bp, Homo sapien
taccgaaacacacagtaaccaagta

SEQ ID NO: 3584064 - DNA, 25 bp, Homo sapien
ggatgcttttttaccgaaacacaca

SEQ ID NO: 3584065 - DNA, 25 bp, Homo sapien
agaaacaaggtgaaccctcttggag

SEQ ID NO: 3584066 - DNA, 25 bp, Homo sapien
gaaaagggaacaccactcctggcaa

SEQ ID NO: 3584067 - DNA, 25 bp, Homo sapien
tcttggagttaaacttgaggctgac

SEQ ID NO: 3584068 - DNA, 25 bp, Homo sapien
catccatttcagcttgaggcttcca

SEQ ID NO: 3584069 - DNA, 25 bp, Homo sapien
ttaattgttcaccagcttcagaaga

SEQ ID NO: 3584070 - DNA, 25 bp, Homo sapien
aattgttcaccagcttcagaagaca

SEQ ID NO: 3584071 - DNA, 25 bp, Homo sapien
ttgttcaccagcttcagaagacaag

SEQ ID NO: 3584072 - DNA, 25 bp, Homo sapien
tgttcaccagcttcagaagacaagg

SEQ ID NO: 3584073 - DNA, 25 bp, Homo sapien
catttattttgccaactcctacagc

SEQ ID NO: 3584074 - DNA, 25 bp, Homo sapien
atgcatttattttgccaactcctac

SEQ ID NO: 3584075 - DNA, 25 bp, Homo sapien
ccaactcctacagccatttctaggg

SEQ ID NO: 3584076 - DNA, 25 bp, Homo sapien
tttattttgccaactcctacagcca

SEQ ID NO: 3584077 - DNA, 25 bp, Homo sapien
gggtgagcttgatcaccccagacat

SEQ ID NO: 3584078 - DNA, 25 bp, Homo sapien
tctttagcacaagccgccaagctac

SEQ ID NO: 3584079 - DNA, 25 bp, Homo sapien
agcacaagccgccaagctacctttt

SEQ ID NO: 3584080 - DNA, 25 bp, Homo sapien
cccttctttagcacaagccgccaag

SEQ ID NO: 3584081 - DNA, 25 bp, Homo sapien
taccccagtggatgctaaatgcttt

SEQ ID NO: 3584082 - DNA, 25 bp, Homo sapien
accacttggaatgagcagacacagc

SEQ ID NO: 3584083 - DNA, 25 bp, Homo sapien
ccctctgtaagggttggtcactgtt

SEQ ID NO: 3584084 - DNA, 25 bp, Homo sapien
gcttctctcgatgtgaggtcggact

SEQ ID NO: 3584085 - DNA, 25 bp, Homo sapien
taaactatccctgaaccatgtgctc

SEQ ID NO: 3584086 - DNA, 25 bp, Homo sapien
tatctcaggccaactagaggatgcc

SEQ ID NO: 3584087 - DNA, 25 bp, Homo sapien
tttctaggagttcactgggacagcc

SEQ ID NO: 3584088 - DNA, 25 bp, Homo sapien
tgcatccagaaggtcattcccaggt

SEQ ID NO: 3584089 - DNA, 25 bp, Homo sapien
tccaaaagcctcttaggatgcaagc

SEQ ID NO: 3584090 - DNA, 25 bp, Homo sapien
tgcagctgctggattacgaacctct

SEQ ID NO: 3584091 - DNA, 25 bp, Homo sapien
tgttagctcctactgacccagcaga

SEQ ID NO: 3584092 - DNA, 25 bp, Homo sapien
gaccagtacatgtgccctaatagag

SEQ ID NO: 3584093 - DNA, 25 bp, Homo sapien
cattgggcgcaagaacagctcttgc

SEQ ID NO: 3584094 - DNA, 25 bp, Homo sapien
agcacccgaaccagcattgggcgca

SEQ ID NO: 3584095 - DNA, 25 bp, Homo sapien
cgaaccagcattgggcgcaagaaca

SEQ ID NO: 3584096 - DNA, 25 bp, Homo sapien
tgtcgagcacccgaaccagcattgg

SEQ ID NO: 3584097 - DNA, 25 bp, Homo sapien
gcagaagggccacggagtgaaagag

SEQ ID NO: 3584098 - DNA, 25 bp, Homo sapien
gaagggccacggagtgaaagagcct

SEQ ID NO: 3584099 - DNA, 25 bp, Homo sapien
agaatgagcagaagggccacggagt

SEQ ID NO: 3584100 - DNA, 25 bp, Homo sapien
gagcagaagggccacggagtgaaag

SEQ ID NO: 3584101 - DNA, 25 bp, Homo sapien
tttggtttccttcctatggtggcca

SEQ ID NO: 3584102 - DNA, 25 bp, Homo sapien
ttggtttccttcctatggtggccat

SEQ ID NO: 3584103 - DNA, 25 bp, Homo sapien
tttgtcatcaaagcccttcagtttc

SEQ ID NO: 3584104 - DNA, 25 bp, Homo sapien
gtcatcaaagcccttcagtttctcc

SEQ ID NO: 3584105 - DNA, 25 bp, Homo sapien
catcaaagcccttcagtttctccat

SEQ ID NO: 3584106 - DNA, 25 bp, Homo sapien
gtttgtcatcaaagcccttcagttt

SEQ ID NO: 3584107 - DNA, 25 bp, Homo sapien
tacagacatcgatgcagacatactt

SEQ ID NO: 3584108 - DNA, 25 bp, Homo sapien
cagtacagacatcgatgcagacata

SEQ ID NO: 3584109 - DNA, 25 bp, Homo sapien
gaaatttacagtacagacatcgatg

SEQ ID NO: 3584110 - DNA, 25 bp, Homo sapien
tttacagtacagacatcgatgcaga

SEQ ID NO: 3584111 - DNA, 25 bp, Homo sapien
tcagggcatgtgtagcaggaagttt

SEQ ID NO: 3584112 - DNA, 25 bp, Homo sapien
ttcagggcatgtgtagcaggaagtt

SEQ ID NO: 3584113 - DNA, 25 bp, Homo sapien
cagggcatgtgtagcaggaagtttg

SEQ ID NO: 3584114 - DNA, 25 bp, Homo sapien
gggcatgtgtagcaggaagtttgcc

SEQ ID NO: 3584115 - DNA, 25 bp, Homo sapien
ctttgtcaaacatctgaaagtcccc

SEQ ID NO: 3584116 - DNA, 25 bp, Homo sapien
tgtcaaacatctgaaagtcccccag

SEQ ID NO: 3584117 - DNA, 25 bp, Homo sapien
ctctttgtcaaacatctgaaagtcc

SEQ ID NO: 3584118 - DNA, 25 bp, Homo sapien
tcaaacatctgaaagtcccccagat

SEQ ID NO: 3584119 - DNA, 25 bp, Homo sapien
agaaaggccacagagcatccagccc

SEQ ID NO: 3584120 - DNA, 25 bp, Homo sapien
gggtggcatgaggacccaagaaagg

SEQ ID NO: 3584121 - DNA, 25 bp, Homo sapien
catgaggacccaagaaaggccacag

SEQ ID NO: 3584122 - DNA, 25 bp, Homo sapien
aaaggccacagagcatccagcccga

SEQ ID NO: 3584123 - DNA, 25 bp, Homo sapien
caacctcggagagaagatggaccca

SEQ ID NO: 3584124 - DNA, 25 bp, Homo sapien
gaggacatggctcatataggacccc

SEQ ID NO: 3584125 - DNA, 25 bp, Homo sapien
gatctatgatctaaccctggaggaa

SEQ ID NO: 3584126 - DNA, 25 bp, Homo sapien
gaatcaaccaagtagctcaagcaga

SEQ ID NO: 3584127 - DNA, 25 bp, Homo sapien
cccaagccctgaattgccggcaaag

SEQ ID NO: 3584128 - DNA, 25 bp, Homo sapien
gatgctgtcctcaaatatacctata

SEQ ID NO: 3584129 - DNA, 25 bp, Homo sapien
agtcacatggaataccccaagccct

SEQ ID NO: 3584130 - DNA, 25 bp, Homo sapien
tgaattgccggcaaagccaaagcag

SEQ ID NO: 3584131 - DNA, 25 bp, Homo sapien
tgtgaaaggagaggcctataaccct

SEQ ID NO: 3584132 - DNA, 25 bp, Homo sapien
atttcagggctttactacagtcggc

SEQ ID NO: 3584133 - DNA, 25 bp, Homo sapien
tccagagactgtcacgaagcagagc

SEQ ID NO: 3584134 - DNA, 25 bp, Homo sapien
taaagttcagcagacctgggtgcgt

SEQ ID NO: 3584135 - DNA, 25 bp, Homo sapien
cacccaagtgctcttttattgttat

SEQ ID NO: 3584136 - DNA, 25 bp, Homo sapien
tcactgacacattatgaagaaaact

SEQ ID NO: 3584137 - DNA, 25 bp, Homo sapien
gacaagtatcgatcacctactccat

SEQ ID NO: 3584138 - DNA, 25 bp, Homo sapien
atactctaacagcaagaccagtccc

SEQ ID NO: 3584139 - DNA, 25 bp, Homo sapien
tgctccagggccgtggacagttatg

SEQ ID NO: 3584140 - DNA, 25 bp, Homo sapien
acaccagagcagagcgtgagtaagg

SEQ ID NO: 3584141 - DNA, 25 bp, Homo sapien
ctctgcccctgggtgcgtgctccag

SEQ ID NO: 3584142 - DNA, 25 bp, Homo sapien
ctgcacaactcccaagacaccagag

SEQ ID NO: 3584143 - DNA, 25 bp, Homo sapien
caaggtactcagactgggcacagca

SEQ ID NO: 3584144 - DNA, 25 bp, Homo sapien
gttctaaacagcagacagcgcacca

SEQ ID NO: 3584145 - DNA, 25 bp, Homo sapien
tatgagttacaaggagagcaacctg

SEQ ID NO: 3584146 - DNA, 25 bp, Homo sapien
tacaagcagcacagggagttcacat

SEQ ID NO: 3584147 - DNA, 25 bp, Homo sapien
caggcttcacccaaccatttcctct

SEQ ID NO: 3584148 - DNA, 25 bp, Homo sapien
cagaataccgaaaaagtgcccagtt

SEQ ID NO: 3584149 - DNA, 25 bp, Homo sapien
aattccttcaggacgggttcacagc

SEQ ID NO: 3584150 - DNA, 25 bp, Homo sapien
ggtttccaacatagcacaagccagt

SEQ ID NO: 3584151 - DNA, 25 bp, Homo sapien
caatcacacacgttgcaggaactgt

SEQ ID NO: 3584152 - DNA, 25 bp, Homo sapien
caatggggatgttgatcttctctgt

SEQ ID NO: 3584153 - DNA, 25 bp, Homo sapien
gccaatggggatgttgatcttctct

SEQ ID NO: 3584154 - DNA, 25 bp, Homo sapien
ggccaatggggatgttgatcttctc

SEQ ID NO: 3584155 - DNA, 25 bp, Homo sapien
tgggccaatggggatgttgatcttc

SEQ ID NO: 3584156 - DNA, 25 bp, Homo sapien
tggcacataaacagaacaaaggaag

SEQ ID NO: 3584157 - DNA, 25 bp, Homo sapien
gcacataaacagaacaaaggaagaa

SEQ ID NO: 3584158 - DNA, 25 bp, Homo sapien
ggcacataaacagaacaaaggaaga

SEQ ID NO: 3584159 - DNA, 25 bp, Homo sapien
tgttagactcaaggatgggatgcag

SEQ ID NO: 3584160 - DNA, 25 bp, Homo sapien
taaaccaacctatcgggagtctgtc

SEQ ID NO: 3584161 - DNA, 25 bp, Homo sapien
caagggcgcctgataatccatcact

SEQ ID NO: 3584162 - DNA, 25 bp, Homo sapien
tactctgacctcaaacaagggcgcc

SEQ ID NO: 3584163 - DNA, 25 bp, Homo sapien
tcctccagcattgataaacagtctg

SEQ ID NO: 3584164 - DNA, 25 bp, Homo sapien
tgtaaatgttaagtcgctgaaactg

SEQ ID NO: 3584165 - DNA, 25 bp, Homo sapien
taagtcgctgaaactgcagtaccag

SEQ ID NO: 3584166 - DNA, 25 bp, Homo sapien
gagagtccagttgctgtcctcaatt

SEQ ID NO: 3584167 - DNA, 25 bp, Homo sapien
gagagctgtctccttcgggctagga

SEQ ID NO: 3584168 - DNA, 25 bp, Homo sapien
catgacctctaaaacgctgcgggac

SEQ ID NO: 3584169 - DNA, 25 bp, Homo sapien
tccagcatgtaaagggatccagtct

SEQ ID NO: 3584170 - DNA, 25 bp, Homo sapien
tctgaagcctggacaactaacgtct

SEQ ID NO: 3584171 - DNA, 25 bp, Homo sapien
ctgcaaagttagtttggagcgtccc

SEQ ID NO: 3584172 - DNA, 25 bp, Homo sapien
tgcaaagttagtttggagcgtccct

SEQ ID NO: 3584173 - DNA, 25 bp, Homo sapien
gcaaagttagtttggagcgtccctc

SEQ ID NO: 3584174 - DNA, 25 bp, Homo sapien
tctgcaaagttagtttggagcgtcc

SEQ ID NO: 3584175 - DNA, 25 bp, Homo sapien
gccgtactggatgagcggtgtgaaa

SEQ ID NO: 3584176 - DNA, 25 bp, Homo sapien
gcatcttggtcacgttgtagccgag

SEQ ID NO: 3584177 - DNA, 25 bp, Homo sapien
agctcgtgcccaaccaggttgggca

SEQ ID NO: 3584178 - DNA, 25 bp, Homo sapien
tgtagccgaggttctggcacatgga

SEQ ID NO: 3584179 - DNA, 25 bp, Homo sapien
ctgcaggagcaaccccagactgaga

SEQ ID NO: 3584180 - DNA, 25 bp, Homo sapien
aggagcaaccccagactgagaccga

SEQ ID NO: 3584181 - DNA, 25 bp, Homo sapien
gagcaaccccagactgagaccgacg

SEQ ID NO: 3584182 - DNA, 25 bp, Homo sapien
gcaggagcaaccccagactgagacc

SEQ ID NO: 3584183 - DNA, 25 bp, Homo sapien
cagctcccgggacgggagtgtgatg

SEQ ID NO: 3584184 - DNA, 25 bp, Homo sapien
cgggagtgtgatgcggcgacgaggg

SEQ ID NO: 3584185 - DNA, 25 bp, Homo sapien
gcgcgcgactgtgtgggattttaga

SEQ ID NO: 3584186 - DNA, 25 bp, Homo sapien
cgcgcgactgtgtgggattttagac

SEQ ID NO: 3584187 - DNA, 25 bp, Homo sapien
ccgcgtccgttcggcgtctccgcga

SEQ ID NO: 3584188 - DNA, 25 bp, Homo sapien
gcgtctccgcgaggccagccagcag

SEQ ID NO: 3584189 - DNA, 25 bp, Homo sapien
cgggccgaggccgagggacaggctg

SEQ ID NO: 3584190 - DNA, 25 bp, Homo sapien
ggacaggctgcgagggtcatggctg

SEQ ID NO: 3584191 - DNA, 25 bp, Homo sapien
gattcgaaaggaaatgagaccggga

SEQ ID NO: 3584192 - DNA, 25 bp, Homo sapien
gaaatgaaattccacagggggattc

SEQ ID NO: 3584193 - DNA, 25 bp, Homo sapien
tctaaataaggttgggagggtgaga

SEQ ID NO: 3584194 - DNA, 25 bp, Homo sapien
gaccgggactctccgtgcttctcgg

SEQ ID NO: 3584195 - DNA, 25 bp, Homo sapien
ccacaaattcgattgggaacccatt

SEQ ID NO: 3584196 - DNA, 25 bp, Homo sapien
caaattcgattgggaacccatttcg

SEQ ID NO: 3584197 - DNA, 25 bp, Homo sapien
ttccacaaattcgattgggaaccca

SEQ ID NO: 3584198 - DNA, 25 bp, Homo sapien
gatttccacaaattcgattgggaac

SEQ ID NO: 3584199 - DNA, 25 bp, Homo sapien
agtcccatgttccacaaacccatac

SEQ ID NO: 3584200 - DNA, 25 bp, Homo sapien
tgtccctgtggtggcagattgctca

SEQ ID NO: 3584201 - DNA, 25 bp, Homo sapien
ctgtccctgtggtggcagattgctc

SEQ ID NO: 3584202 - DNA, 25 bp, Homo sapien
cacaaacccatactgccctagctgt

SEQ ID NO: 3584203 - DNA, 25 bp, Homo sapien
gtagctccaccactgtcacccctca

SEQ ID NO: 3584204 - DNA, 25 bp, Homo sapien
cgtagctccaccactgtcacccctc

SEQ ID NO: 3584205 - DNA, 25 bp, Homo sapien
tagctccaccactgtcacccctcat

SEQ ID NO: 3584206 - DNA, 25 bp, Homo sapien
tgtacttggtgagacccgtcacccg

SEQ ID NO: 3584207 - DNA, 25 bp, Homo sapien
taactgctatgagatcggccacact

SEQ ID NO: 3584208 - DNA, 25 bp, Homo sapien
ttctccgcgctgttcctcgtcatgg

SEQ ID NO: 3584209 - DNA, 25 bp, Homo sapien
cccgcagggcgagtttagtctggaa

SEQ ID NO: 3584210 - DNA, 25 bp, Homo sapien
cactcaatgaatctgcaaccagaac

SEQ ID NO: 3584211 - DNA, 25 bp, Homo sapien
gcactcaatgaatctgcaaccagaa

SEQ ID NO: 3584212 - DNA, 25 bp, Homo sapien
tcttctcctgtaatagatatttaca

SEQ ID NO: 3584213 - DNA, 25 bp, Homo sapien
tcaatgggtttccatcagttagcct

SEQ ID NO: 3584214 - DNA, 25 bp, Homo sapien
ggtttccatcagttagccttcttcc

SEQ ID NO: 3584215 - DNA, 25 bp, Homo sapien
aatgggtttccatcagttagccttc

SEQ ID NO: 3584216 - DNA, 25 bp, Homo sapien
tagcatgttgttcccgggggtgttc

SEQ ID NO: 3584217 - DNA, 25 bp, Homo sapien
tgcttgttaactgagtacatccaca

SEQ ID NO: 3584218 - DNA, 25 bp, Homo sapien
tgaacccctctacgtcatctatgag

SEQ ID NO: 3584219 - DNA, 25 bp, Homo sapien
aatcttgtacatccaacctcttggg

SEQ ID NO: 3584220 - DNA, 25 bp, Homo sapien
catctatgagggtgagaatcagtgg

SEQ ID NO: 3584221 - DNA, 25 bp, Homo sapien
gatttgcaagttcaaactactcctt

SEQ ID NO: 3584222 - DNA, 25 bp, Homo sapien
gagtcctgagttgatggggcatatt

SEQ ID NO: 3584223 - DNA, 25 bp, Homo sapien
ctgagggagcgttgtgtgcacaggg

SEQ ID NO: 3584224 - DNA, 25 bp, Homo sapien
ttatgtgtggaattgaacttgtatg

SEQ ID NO: 3584225 - DNA, 25 bp, Homo sapien
tataatttggtatagtatactggaa

SEQ ID NO: 3584226 - DNA, 25 bp, Homo sapien
tgatactctgatgtagttagaagtg

SEQ ID NO: 3584227 - DNA, 25 bp, Homo sapien
gcgttttagtatctggaacgtcact

SEQ ID NO: 3584228 - DNA, 25 bp, Homo sapien
cagtgttagggctaggtgttgatta

SEQ ID NO: 3584229 - DNA, 25 bp, Homo sapien
ttgattaagtggtgaagtaggcaca

SEQ ID NO: 3584230 - DNA, 25 bp, Homo sapien
tgttagggctaggtgttgattaagt

SEQ ID NO: 3584231 - DNA, 25 bp, Homo sapien
ctaggtgttgattaagtggtgaagt

SEQ ID NO: 3584232 - DNA, 25 bp, Homo sapien
tgaggcaagttcttcagtgggcttc

SEQ ID NO: 3584233 - DNA, 25 bp, Homo sapien
tgtcataaatactatacaactggtt

SEQ ID NO: 3584234 - DNA, 25 bp, Homo sapien
tatgggaatgcagagtgtatactcc

SEQ ID NO: 3584235 - DNA, 25 bp, Homo sapien
ttaggatacaagtagcaggatacgt

SEQ ID NO: 3584236 - DNA, 25 bp, Homo sapien
ccacaggtggtctgtagaagagtcc

SEQ ID NO: 3584237 - DNA, 25 bp, Homo sapien
cgcttgagggcatggatagagtact

SEQ ID NO: 3584238 - DNA, 25 bp, Homo sapien
gaagagtccactcttgccagagcat

SEQ ID NO: 3584239 - DNA, 25 bp, Homo sapien
cagcaactagtttaggagagcctcg

SEQ ID NO: 3584240 - DNA, 25 bp, Homo sapien
catgagggattactccaagtgtcaa

SEQ ID NO: 3584241 - DNA, 25 bp, Homo sapien
gggaacatactttggaattcactct

SEQ ID NO: 3584242 - DNA, 25 bp, Homo sapien
tgcaggcgttgcttttttgaggaaa

SEQ ID NO: 3584243 - DNA, 25 bp, Homo sapien
cccttcatgggaaatgtttggtaat

SEQ ID NO: 3584244 - DNA, 25 bp, Homo sapien
tatacctgcctgttaattcagcaag

SEQ ID NO: 3584245 - DNA, 25 bp, Homo sapien
tcaatgaataaaactggccggtatc

SEQ ID NO: 3584246 - DNA, 25 bp, Homo sapien
gtgacttctgtagccagtgagttga

SEQ ID NO: 3584247 - DNA, 25 bp, Homo sapien
cactgagaacatgtaatgaacaagc

SEQ ID NO: 3584248 - DNA, 25 bp, Homo sapien
gacatgaagtcatcccttttatggc

SEQ ID NO: 3584249 - DNA, 25 bp, Homo sapien
aaggacatgaagtcatcccttttat

SEQ ID NO: 3584250 - DNA, 25 bp, Homo sapien
catgaagtcatcccttttatggctg

SEQ ID NO: 3584251 - DNA, 25 bp, Homo sapien
ggacatgaagtcatcccttttatgg

SEQ ID NO: 3584252 - DNA, 25 bp, Homo sapien
ttgtccattgcccagacttgtaata

SEQ ID NO: 3584253 - DNA, 25 bp, Homo sapien
gatcttcttcatctattacaggttg

SEQ ID NO: 3584254 - DNA, 25 bp, Homo sapien
agacttgtaatactggatcttcttc

SEQ ID NO: 3584255 - DNA, 25 bp, Homo sapien
tcttcttcatctattacaggttgtt

SEQ ID NO: 3584256 - DNA, 25 bp, Homo sapien
ggaagctagcattaatatgaaggag

SEQ ID NO: 3584257 - DNA, 25 bp, Homo sapien
cattaatgttaaggaagctagcatt

SEQ ID NO: 3584258 - DNA, 25 bp, Homo sapien
aatgttaaggaagctagcattaata

SEQ ID NO: 3584259 - DNA, 25 bp, Homo sapien
taaggaagctagcattaatatgaag

SEQ ID NO: 3584260 - DNA, 25 bp, Homo sapien
ctccttgtgcaatgcttttacaagt

SEQ ID NO: 3584261 - DNA, 25 bp, Homo sapien
cttgtgcaatgcttttacaagtggt

SEQ ID NO: 3584262 - DNA, 25 bp, Homo sapien
tgtgcaatgcttttacaagtggtta

SEQ ID NO: 3584263 - DNA, 25 bp, Homo sapien
ccttgtgcaatgcttttacaagtgg

SEQ ID NO: 3584264 - DNA, 25 bp, Homo sapien
aagaagtgtttagcttcagaagaag

SEQ ID NO: 3584265 - DNA, 25 bp, Homo sapien
gaaacgagaagtgacatagatggaa

SEQ ID NO: 3584266 - DNA, 25 bp, Homo sapien
cgagaagtgacatagatggaaaata

SEQ ID NO: 3584267 - DNA, 25 bp, Homo sapien
agaagaagaaacgagaagtgacata

SEQ ID NO: 3584268 - DNA, 25 bp, Homo sapien
agacatgggagcatgattgaaacat

SEQ ID NO: 3584269 - DNA, 25 bp, Homo sapien
ggagcatgattgaaacatacggttg

SEQ ID NO: 3584270 - DNA, 25 bp, Homo sapien
catgggagcatgattgaaacatacg

SEQ ID NO: 3584271 - DNA, 25 bp, Homo sapien
gcatgattgaaacatacggttgttt

SEQ ID NO: 3584272 - DNA, 25 bp, Homo sapien
cagattcttgccatatttgtaacat

SEQ ID NO: 3584273 - DNA, 25 bp, Homo sapien
catatttgtaacatcatcacttcca

SEQ ID NO: 3584274 - DNA, 25 bp, Homo sapien
tcttgccatatttgtaacatcatca

SEQ ID NO: 3584275 - DNA, 25 bp, Homo sapien
tttgaacagattcttgccatatttg

SEQ ID NO: 3584276 - DNA, 25 bp, Homo sapien
gatgcattgttatgttgtttgctta

SEQ ID NO: 3584277 - DNA, 25 bp, Homo sapien
agatgcattgttatgttgtttgctt

SEQ ID NO: 3584278 - DNA, 25 bp, Homo sapien
atgcattgttatgttgtttgcttaa

SEQ ID NO: 3584279 - DNA, 25 bp, Homo sapien
gagctgccatgcagttggccttctt

SEQ ID NO: 3584280 - DNA, 25 bp, Homo sapien
agagctgccatgcagttggccttct

SEQ ID NO: 3584281 - DNA, 25 bp, Homo sapien
gctgccatgcagttggccttctttc

SEQ ID NO: 3584282 - DNA, 25 bp, Homo sapien
ctgccatgcagttggccttctttct

SEQ ID NO: 3584283 - DNA, 25 bp, Homo sapien
agacaacgggaagaaccaggatcat

SEQ ID NO: 3584284 - DNA, 25 bp, Homo sapien
tctcagtctcaaagacaacgggaag

SEQ ID NO: 3584285 - DNA, 25 bp, Homo sapien
taaaggaagtggtcccaatccacac

SEQ ID NO: 3584286 - DNA, 25 bp, Homo sapien
caatccacacggctgccctgggaaa

SEQ ID NO: 3584287 - DNA, 25 bp, Homo sapien
gaaagaagaggttctggccgcagac

SEQ ID NO: 3584288 - DNA, 25 bp, Homo sapien
tgtgagccacaaagagggagagaaa

SEQ ID NO: 3584289 - DNA, 25 bp, Homo sapien
cattttgtgagccacaaagagggag

SEQ ID NO: 3584290 - DNA, 25 bp, Homo sapien
agagaaagaagaggttctggccgca

SEQ ID NO: 3584291 - DNA, 25 bp, Homo sapien
tcttctccacgtcgccttttgggag

SEQ ID NO: 3584292 - DNA, 25 bp, Homo sapien
tccgaccaggtctcatctagcttct

SEQ ID NO: 3584293 - DNA, 25 bp, Homo sapien
cttagtcttctccacgtcgcctttt

SEQ ID NO: 3584294 - DNA, 25 bp, Homo sapien
taggggttcccctgcgacagcggcc

SEQ ID NO: 3584295 - DNA, 25 bp, Homo sapien
tcatggagagggaatggatgaaaaa

SEQ ID NO: 3584296 - DNA, 25 bp, Homo sapien
catggagagggaatggatgaaaaaa

SEQ ID NO: 3584297 - DNA, 25 bp, Homo sapien
ccttcatggagagggaatggatgaa

SEQ ID NO: 3584298 - DNA, 25 bp, Homo sapien
gttccttcatggagagggaatggat

SEQ ID NO: 3584299 - DNA, 25 bp, Homo sapien
cctaaatgataagtaggaagtcact

SEQ ID NO: 3584300 - DNA, 25 bp, Homo sapien
tagccaaccttctctaaagaatgga

SEQ ID NO: 3584301 - DNA, 25 bp, Homo sapien
tccacggaagttaatagtaagcatc

SEQ ID NO: 3584302 - DNA, 25 bp, Homo sapien
cacaagataagcattctagccaacc

SEQ ID NO: 3584303 - DNA, 25 bp, Homo sapien
taaacaaagtcctgttcacatgttc

SEQ ID NO: 3584304 - DNA, 25 bp, Homo sapien
tagagtacaggataactaaacaaag

SEQ ID NO: 3584305 - DNA, 25 bp, Homo sapien
tacagtgtgccctagagtacaggat

SEQ ID NO: 3584306 - DNA, 25 bp, Homo sapien
tccctgtaatacagtgtgccctaga

SEQ ID NO: 3584307 - DNA, 25 bp, Homo sapien
aaaaagtgcacaattatcgtctggg

SEQ ID NO: 3584308 - DNA, 25 bp, Homo sapien
caatttatagttaggacacaccaga

SEQ ID NO: 3584309 - DNA, 25 bp, Homo sapien
gaacatgaccttcctagtttggact

SEQ ID NO: 3584310 - DNA, 25 bp, Homo sapien
tgattacccataactgcggcctgct

SEQ ID NO: 3584311 - DNA, 25 bp, Homo sapien
gcatgtatgtaacactttactccaa

SEQ ID NO: 3584312 - DNA, 25 bp, Homo sapien
ttcaagtgatcagcaacacaatgtc

SEQ ID NO: 3584313 - DNA, 25 bp, Homo sapien
tcatgaagtacaaatagagtagctc

SEQ ID NO: 3584314 - DNA, 25 bp, Homo sapien
gaaatttagagctgaactcatgaag

SEQ ID NO: 3584315 - DNA, 25 bp, Homo sapien
aggtagtccactacccacagtttgg

SEQ ID NO: 3584316 - DNA, 25 bp, Homo sapien
aaaaagttatattttcctgcatgcc

SEQ ID NO: 3584317 - DNA, 25 bp, Homo sapien
cctattagaggactttctgtaacaa

SEQ ID NO: 3584318 - DNA, 25 bp, Homo sapien
taaagtgatgtagccccatagaaag

SEQ ID NO: 3584319 - DNA, 25 bp, Homo sapien
ttccagcgattctccctgcctcagc

SEQ ID NO: 3584320 - DNA, 25 bp, Homo sapien
tcattgccaactctgcctcctgcca

SEQ ID NO: 3584321 - DNA, 25 bp, Homo sapien
attgccaactctgcctcctgccacc

SEQ ID NO: 3584322 - DNA, 25 bp, Homo sapien
ctgccacctccccagttccagcgat

SEQ ID NO: 3584323 - DNA, 25 bp, Homo sapien
acatagaggaataattgccctgtta

SEQ ID NO: 3584324 - DNA, 25 bp, Homo sapien
tatatttgaggccttactctttgtt

SEQ ID NO: 3584325 - DNA, 25 bp, Homo sapien
tgtggcctttcctacagaagacata

SEQ ID NO: 3584326 - DNA, 25 bp, Homo sapien
tcctttgtggcctttcctacagaag

SEQ ID NO: 3584327 - DNA, 25 bp, Homo sapien
cttgttgctcttttgaccattcata

SEQ ID NO: 3584328 - DNA, 25 bp, Homo sapien
ttgttgctcttttgaccattcataa

SEQ ID NO: 3584329 - DNA, 25 bp, Homo sapien
gcttgttgctcttttgaccattcat

SEQ ID NO: 3584330 - DNA, 25 bp, Homo sapien
tgcttgttgctcttttgaccattca

SEQ ID NO: 3584331 - DNA, 25 bp, Homo sapien
ggatcatttcggtttcagacttcaa

SEQ ID NO: 3584332 - DNA, 25 bp, Homo sapien
aatgaagtactaaagccctgagaac

SEQ ID NO: 3584333 - DNA, 25 bp, Homo sapien
tcactggaatcaaaacgatggttgg

SEQ ID NO: 3584334 - DNA, 25 bp, Homo sapien
tctggtactatggtaacagagccac

SEQ ID NO: 3584335 - DNA, 25 bp, Homo sapien
gaagctaatttctctaccagctgag

SEQ ID NO: 3584336 - DNA, 25 bp, Homo sapien
ggcattcaaagaaagctccagatgg

SEQ ID NO: 3584337 - DNA, 25 bp, Homo sapien
gactcggtgtattcttgcatctcag

SEQ ID NO: 3584338 - DNA, 25 bp, Homo sapien
aatggacaaataccaccagactcgg

SEQ ID NO: 3584339 - DNA, 25 bp, Homo sapien
ctaaaagtctttcggtaggtgaatg

SEQ ID NO: 3584340 - DNA, 25 bp, Homo sapien
tcacagccatagctacccaagagaa

SEQ ID NO: 3584341 - DNA, 25 bp, Homo sapien
gatgtggagaagcttgaactgtcat

SEQ ID NO: 3584342 - DNA, 25 bp, Homo sapien
cataagaagatacgtggatggcaga

SEQ ID NO: 3584343 - DNA, 25 bp, Homo sapien
tcttgaaaggttcgttttctctcca

SEQ ID NO: 3584344 - DNA, 25 bp, Homo sapien
gatcttgaaaggttcgttttctctc

SEQ ID NO: 3584345 - DNA, 25 bp, Homo sapien
tggatcttgaaaggttcgttttctc

SEQ ID NO: 3584346 - DNA, 25 bp, Homo sapien
ccggatgtactcaggcaggcgagct

SEQ ID NO: 3584347 - DNA, 25 bp, Homo sapien
tctgcaaagaggatgcccggatgta

SEQ ID NO: 3584348 - DNA, 25 bp, Homo sapien
cactgtctagcgtttcctctgagca

SEQ ID NO: 3584349 - DNA, 25 bp, Homo sapien
taattatggcccaaccactgtctag

SEQ ID NO: 3584350 - DNA, 25 bp, Homo sapien
ccagcccatcggcagtgtgcggaag

SEQ ID NO: 3584351 - DNA, 25 bp, Homo sapien
atgtcaccagcccatcggcagtgtg

SEQ ID NO: 3584352 - DNA, 25 bp, Homo sapien
caaatgtcaccagcccatcggcagt

SEQ ID NO: 3584353 - DNA, 25 bp, Homo sapien
catcggcagtgtgcggaagctttgc

SEQ ID NO: 3584354 - DNA, 25 bp, Homo sapien
agactggatgggctttgtgtgatcc

SEQ ID NO: 3584355 - DNA, 25 bp, Homo sapien
actggatgggctttgtgtgatcctt

SEQ ID NO: 3584356 - DNA, 25 bp, Homo sapien
gactggatgggctttgtgtgatcct

SEQ ID NO: 3584357 - DNA, 25 bp, Homo sapien
ccagactggatgggctttgtgtgat

SEQ ID NO: 3584358 - DNA, 25 bp, Homo sapien
agaaaaggctgctcatatgcacctc

SEQ ID NO: 3584359 - DNA, 25 bp, Homo sapien
gaaaaggctgctcatatgcacctcc

SEQ ID NO: 3584360 - DNA, 25 bp, Homo sapien
tgagaaaaggctgctcatatgcacc

SEQ ID NO: 3584361 - DNA, 25 bp, Homo sapien
gagaaaaggctgctcatatgcacct

SEQ ID NO: 3584362 - DNA, 25 bp, Homo sapien
tgaaaatgttctctacgtaactgag

SEQ ID NO: 3584363 - DNA, 25 bp, Homo sapien
atcattgtatgtggccatgaaagtc

SEQ ID NO: 3584364 - DNA, 25 bp, Homo sapien
tcttccattgtccatctttgatact

SEQ ID NO: 3584365 - DNA, 25 bp, Homo sapien
tctttgatactttagggagatgcca

SEQ ID NO: 3584366 - DNA, 25 bp, Homo sapien
tacccttatttctccatttctgtca

SEQ ID NO: 3584367 - DNA, 25 bp, Homo sapien
cactacccttatttctccatttctg

SEQ ID NO: 3584368 - DNA, 25 bp, Homo sapien
ctacccttatttctccatttctgtc

SEQ ID NO: 3584369 - DNA, 25 bp, Homo sapien
actacccttatttctccatttctgt

SEQ ID NO: 3584370 - DNA, 25 bp, Homo sapien
aagatcaggtcctttgccatacaag

SEQ ID NO: 3584371 - DNA, 25 bp, Homo sapien
agatcaggtcctttgccatacaagg

SEQ ID NO: 3584372 - DNA, 25 bp, Homo sapien
ctaaagatcaggtcctttgccatac

SEQ ID NO: 3584373 - DNA, 25 bp, Homo sapien
taaagatcaggtcctttgccataca

SEQ ID NO: 3584374 - DNA, 25 bp, Homo sapien
tcagatgatcccactgggttttggg

SEQ ID NO: 3584375 - DNA, 25 bp, Homo sapien
gggttttggggattgagatggcttc

SEQ ID NO: 3584376 - DNA, 25 bp, Homo sapien
gttttggggattgagatggcttctt

SEQ ID NO: 3584377 - DNA, 25 bp, Homo sapien
ctgggttttggggattgagatggct

SEQ ID NO: 3584378 - DNA, 25 bp, Homo sapien
tgtctagctcctcgtataccttgag

SEQ ID NO: 3584379 - DNA, 25 bp, Homo sapien
gctcctcgtataccttgagggccat

SEQ ID NO: 3584380 - DNA, 25 bp, Homo sapien
tctagctcctcgtataccttgaggg

SEQ ID NO: 3584381 - DNA, 25 bp, Homo sapien
ttctgtctagctcctcgtatacctt

SEQ ID NO: 3584382 - DNA, 25 bp, Homo sapien
ttggcagcagatcacgaccacctaa

SEQ ID NO: 3584383 - DNA, 25 bp, Homo sapien
tggttggcagcagatcacgaccacc

SEQ ID NO: 3584384 - DNA, 25 bp, Homo sapien
gttggcagcagatcacgaccaccta

SEQ ID NO: 3584385 - DNA, 25 bp, Homo sapien
ttggttggcagcagatcacgaccac

SEQ ID NO: 3584386 - DNA, 25 bp, Homo sapien
agcctagaatttgagtgccgattgg

SEQ ID NO: 3584387 - DNA, 25 bp, Homo sapien
gccgattggaacttgaattcttctg

SEQ ID NO: 3584388 - DNA, 25 bp, Homo sapien
tcctgtggcatacttgagtctgaga

SEQ ID NO: 3584389 - DNA, 25 bp, Homo sapien
agtctgagattcctttgagcctaga

SEQ ID NO: 3584390 - DNA, 25 bp, Homo sapien
tacataagggtcaaggactgggact

SEQ ID NO: 3584391 - DNA, 25 bp, Homo sapien
gcactgtccttagttgagagaacca

SEQ ID NO: 3584392 - DNA, 25 bp, Homo sapien
ccaaatgtaccctggagagcaaacg

SEQ ID NO: 3584393 - DNA, 25 bp, Homo sapien
cactaaattccggtagcactgtcct

SEQ ID NO: 3584394 - DNA, 25 bp, Homo sapien
ggcagacgttctacgtctaccacct

SEQ ID NO: 3584395 - DNA, 25 bp, Homo sapien
gggcaggcagacgttctacgtctac

SEQ ID NO: 3584396 - DNA, 25 bp, Homo sapien
gttctacgtctaccacctcagaatt

SEQ ID NO: 3584397 - DNA, 25 bp, Homo sapien
gacgttctacgtctaccacctcaga

SEQ ID NO: 3584398 - DNA, 25 bp, Homo sapien
gatggaagtgggcattgtcagatgg

SEQ ID NO: 3584399 - DNA, 25 bp, Homo sapien
tgatggaagtgggcattgtcagatg

SEQ ID NO: 3584400 - DNA, 25 bp, Homo sapien
cttttgaaacaaccaatttgcactt

SEQ ID NO: 3584401 - DNA, 25 bp, Homo sapien
tttgaaacaaccaatttgcactttg

SEQ ID NO: 3584402 - DNA, 25 bp, Homo sapien
tatgaagcagttaatagtagctaat

SEQ ID NO: 3584403 - DNA, 25 bp, Homo sapien
tcccaccaagtattcacagggctgc

SEQ ID NO: 3584404 - DNA, 25 bp, Homo sapien
taatgccagtaccacctttctggtg

SEQ ID NO: 3584405 - DNA, 25 bp, Homo sapien
ctgcacttaaggcagacagtactgg

SEQ ID NO: 3584406 - DNA, 25 bp, Homo sapien
gcacagcagattcataatgccagta

SEQ ID NO: 3584407 - DNA, 25 bp, Homo sapien
gatacctactaaccccacattagca

SEQ ID NO: 3584408 - DNA, 25 bp, Homo sapien
catgaatgggctatctcttcttggc

SEQ ID NO: 3584409 - DNA, 25 bp, Homo sapien
gcatagccctctttcatgataccta

SEQ ID NO: 3584410 - DNA, 25 bp, Homo sapien
tgggacctgggattacattgcttgc

SEQ ID NO: 3584411 - DNA, 25 bp, Homo sapien
cagggcctgcctcttacttatagct

SEQ ID NO: 3584412 - DNA, 25 bp, Homo sapien
gagagacttctctatggaggttaaa

SEQ ID NO: 3584413 - DNA, 25 bp, Homo sapien
caacaaaggccaagcttatctagag

SEQ ID NO: 3584414 - DNA, 25 bp, Homo sapien
gatgaattccctaaacaatggacat

SEQ ID NO: 3584415 - DNA, 25 bp, Homo sapien
cagctttcatcactcctttatcaca

SEQ ID NO: 3584416 - DNA, 25 bp, Homo sapien
ttctgtgtaattggagccacagggt

SEQ ID NO: 3584417 - DNA, 25 bp, Homo sapien
gccacagggttggagtacattaatc

SEQ ID NO: 3584418 - DNA, 25 bp, Homo sapien
tacattaatctccactctgttaggc

SEQ ID NO: 3584419 - DNA, 25 bp, Homo sapien
ggtttggaatagagccagccctgtg

SEQ ID NO: 3584420 - DNA, 25 bp, Homo sapien
tgtttggtgtgtgcatcaaacacaa

SEQ ID NO: 3584421 - DNA, 25 bp, Homo sapien
tccctttccaaaagcgtgctgaagg

SEQ ID NO: 3584422 - DNA, 25 bp, Homo sapien
ggtgtgtgcatcaaacacaattgtc

SEQ ID NO: 3584423 - DNA, 25 bp, Homo sapien
catgagctgagtgaagttaccccga

SEQ ID NO: 3584424 - DNA, 25 bp, Homo sapien
cgaaagtcatactttaaggtgccac

SEQ ID NO: 3584425 - DNA, 25 bp, Homo sapien
tcatttcactgaggtcatgagctga

SEQ ID NO: 3584426 - DNA, 25 bp, Homo sapien
ggtgccacagtagggatgttttgat

SEQ ID NO: 3584427 - DNA, 25 bp, Homo sapien
cgttaatctcccagactgcgaggga

SEQ ID NO: 3584428 - DNA, 25 bp, Homo sapien
tgcgttgggtccgttaatctcccag

SEQ ID NO: 3584429 - DNA, 25 bp, Homo sapien
caggaaccgtgaagagcctccttgc

SEQ ID NO: 3584430 - DNA, 25 bp, Homo sapien
taagcaactcaggaaccgtgaagag

SEQ ID NO: 3584431 - DNA, 25 bp, Homo sapien
tgtgattaggtgtcctgcagcctga

SEQ ID NO: 3584432 - DNA, 25 bp, Homo sapien
gtgattaggtgtcctgcagcctgag

SEQ ID NO: 3584433 - DNA, 25 bp, Homo sapien
ctgtgattaggtgtcctgcagcctg

SEQ ID NO: 3584434 - DNA, 25 bp, Homo sapien
tgaaataggttttaatgacatcagc

SEQ ID NO: 3584435 - DNA, 25 bp, Homo sapien
agtaaatatcaggtagcatttttcc

SEQ ID NO: 3584436 - DNA, 25 bp, Homo sapien
aataggttttaatgacatcagccct

SEQ ID NO: 3584437 - DNA, 25 bp, Homo sapien
actggactgcagtatctgccccaaa

SEQ ID NO: 3584438 - DNA, 25 bp, Homo sapien
tcatcccgaatgagggttcctttcc

SEQ ID NO: 3584439 - DNA, 25 bp, Homo sapien
catcttcttcagctacctgtatcat

SEQ ID NO: 3584440 - DNA, 25 bp, Homo sapien
tcttgataccagagagttccacttt

SEQ ID NO: 3584441 - DNA, 25 bp, Homo sapien
cccacatggctctcttgataccaga

SEQ ID NO: 3584442 - DNA, 25 bp, Homo sapien
ccggttatctttgtaggccttgcca

SEQ ID NO: 3584443 - DNA, 25 bp, Homo sapien
catttgttgacatcttccggttatc

SEQ ID NO: 3584444 - DNA, 25 bp, Homo sapien
caggccacatctgagggcaccaact

SEQ ID NO: 3584445 - DNA, 25 bp, Homo sapien
gcataggaccagctatatgtagttg

SEQ ID NO: 3584446 - DNA, 25 bp, Homo sapien
aaaaagcaaggtggagtccttgtgt

SEQ ID NO: 3584447 - DNA, 25 bp, Homo sapien
taatggagattgaaaaaagcaaggt

SEQ ID NO: 3584448 - DNA, 25 bp, Homo sapien
ctaatggagattgaaaaaagcaagg

SEQ ID NO: 3584449 - DNA, 25 bp, Homo sapien
aagcaaggtggagtccttgtgtctt

SEQ ID NO: 3584450 - DNA, 25 bp, Homo sapien
gaaagtttaatgtgtgggaggtgga

SEQ ID NO: 3584451 - DNA, 25 bp, Homo sapien
gcacaaatgttgaaaggtactcaaa

SEQ ID NO: 3584452 - DNA, 25 bp, Homo sapien
acattgggttggtgatttctggcac

SEQ ID NO: 3584453 - DNA, 25 bp, Homo sapien
gatttctggcacaaatgttgaaagg

SEQ ID NO: 3584454 - DNA, 25 bp, Homo sapien
tactttgacaagacagactactgtt

SEQ ID NO: 3584455 - DNA, 25 bp, Homo sapien
cctgatttactttgacaagacagac

SEQ ID NO: 3584456 - DNA, 25 bp, Homo sapien
cactttcttgacctgatttactttg

SEQ ID NO: 3584457 - DNA, 25 bp, Homo sapien
tgacaagacagactactgttttcca

SEQ ID NO: 3584458 - DNA, 25 bp, Homo sapien
ggagtgagctgacccatgaatgatg

SEQ ID NO: 3584459 - DNA, 25 bp, Homo sapien
tgaaaagatagtggccatcaaagcc

SEQ ID NO: 3584460 - DNA, 25 bp, Homo sapien
tctaagcctccttgatgcagatgct

SEQ ID NO: 3584461 - DNA, 25 bp, Homo sapien
tggccccaacgtaaggcaggaagat

SEQ ID NO: 3584462 - DNA, 25 bp, Homo sapien
ggcttttgggatgaatttcctctac

SEQ ID NO: 3584463 - DNA, 25 bp, Homo sapien
tggcttttgggatgaatttcctcta

SEQ ID NO: 3584464 - DNA, 25 bp, Homo sapien
tgctgttgggaggtgttgagaagct

SEQ ID NO: 3584465 - DNA, 25 bp, Homo sapien
gggctggcttctggtgagtgtgctg

SEQ ID NO: 3584466 - DNA, 25 bp, Homo sapien
aacagatcattttctagactaaggg

SEQ ID NO: 3584467 - DNA, 25 bp, Homo sapien
cctgcagggtaaatgccacgactaa

SEQ ID NO: 3584468 - DNA, 25 bp, Homo sapien
ccaaacatggagtactttatccacc

SEQ ID NO: 3584469 - DNA, 25 bp, Homo sapien
agaaggtattaagcagaccctttgt

SEQ ID NO: 3584470 - DNA, 25 bp, Homo sapien
tgcacatttgcacaaagaaggtatt

SEQ ID NO: 3584471 - DNA, 25 bp, Homo sapien
caccttactgatgcaaggttgcatt

SEQ ID NO: 3584472 - DNA, 25 bp, Homo sapien
gataatgcactgaggaacaaagctt

SEQ ID NO: 3584473 - DNA, 25 bp, Homo sapien
gatccataggatagaagtgagtcta

SEQ ID NO: 3584474 - DNA, 25 bp, Homo sapien
taaatatcaaggcacaaactggtta

SEQ ID NO: 3584475 - DNA, 25 bp, Homo sapien
cataccaattatgtggcagagattc

SEQ ID NO: 3584476 - DNA, 25 bp, Homo sapien
gatatagggcaaccgtcatgagaca

SEQ ID NO: 3584477 - DNA, 25 bp, Homo sapien
cgctaggcaaaagagaaatgtaacc

SEQ ID NO: 3584478 - DNA, 25 bp, Homo sapien
taagatgagagattcacgctaggca

SEQ ID NO: 3584479 - DNA, 25 bp, Homo sapien
gggacccattggcactttgttagta

SEQ ID NO: 3584480 - DNA, 25 bp, Homo sapien
tgttattacgttggtcaactattaa

SEQ ID NO: 3584481 - DNA, 25 bp, Homo sapien
cttgatgttattacgttggtcaact

SEQ ID NO: 3584482 - DNA, 25 bp, Homo sapien
gatgttattacgttggtcaactatt

SEQ ID NO: 3584483 - DNA, 25 bp, Homo sapien
tgatgttattacgttggtcaactat

SEQ ID NO: 3584484 - DNA, 25 bp, Homo sapien
gagggattccttacaacactgctga

SEQ ID NO: 3584485 - DNA, 25 bp, Homo sapien
ggtctgtttgaaacctgagggattc

SEQ ID NO: 3584486 - DNA, 25 bp, Homo sapien
cttcatgcaaaggtctgtttgaaac

SEQ ID NO: 3584487 - DNA, 25 bp, Homo sapien
gctgaattcttccagtgccaagggc

SEQ ID NO: 3584488 - DNA, 25 bp, Homo sapien
agaactctcattgatgagctcttcc

SEQ ID NO: 3584489 - DNA, 25 bp, Homo sapien
tattgtctgcagttctattgtacat

SEQ ID NO: 3584490 - DNA, 25 bp, Homo sapien
agaacaaacatgtagtctggaactc

SEQ ID NO: 3584491 - DNA, 25 bp, Homo sapien
gactcaaacctcttattgtctgcag

SEQ ID NO: 3584492 - DNA, 25 bp, Homo sapien
tttcaccacttgactcaaacctctt

SEQ ID NO: 3584493 - DNA, 25 bp, Homo sapien
aaagccatcaaagcaaggtgggggt

SEQ ID NO: 3584494 - DNA, 25 bp, Homo sapien
tccatgctccgcatcttctgatgtc

SEQ ID NO: 3584495 - DNA, 25 bp, Homo sapien
aaaaatggagtctgctgttatttgc

SEQ ID NO: 3584496 - DNA, 25 bp, Homo sapien
gaacctttattactgaggagaaagc

SEQ ID NO: 3584497 - DNA, 25 bp, Homo sapien
tctggatcaatagcaactggacaca

SEQ ID NO: 3584498 - DNA, 25 bp, Homo sapien
tctggtgtctatcacatttgacctg

SEQ ID NO: 3584499 - DNA, 25 bp, Homo sapien
actgcttttcgcgtaggttctccta

SEQ ID NO: 3584500 - DNA, 25 bp, Homo sapien
tattaatgcgattgctcctgagggc

SEQ ID NO: 3584501 - DNA, 25 bp, Homo sapien
ggagacagctccagtgttattctta

SEQ ID NO: 3584502 - DNA, 25 bp, Homo sapien
gaacatgtctgagttgtgactgtca

SEQ ID NO: 3584503 - DNA, 25 bp, Homo sapien
agttagttgctgttactccatcaca

SEQ ID NO: 3584504 - DNA, 25 bp, Homo sapien
tgtgccccttgaaggttctatttcc

SEQ ID NO: 3584505 - DNA, 25 bp, Homo sapien
agggttgtcagctttttgtcatttg

SEQ ID NO: 3584506 - DNA, 25 bp, Homo sapien
tgcctctagggttgtcagctttttg

SEQ ID NO: 3584507 - DNA, 25 bp, Homo sapien
tctagggttgtcagctttttgtcat

SEQ ID NO: 3584508 - DNA, 25 bp, Homo sapien
ttgtcatttggtgattttatgactc

SEQ ID NO: 3584509 - DNA, 25 bp, Homo sapien
tccagatttttgtctctttagtcat

SEQ ID NO: 3584510 - DNA, 25 bp, Homo sapien
gtcttccagatttttgtctctttag

SEQ ID NO: 3584511 - DNA, 25 bp, Homo sapien
ttgcctttgtcttccagatttttgt

SEQ ID NO: 3584512 - DNA, 25 bp, Homo sapien
cttccagatttttgtctctttagtc

SEQ ID NO: 3584513 - DNA, 25 bp, Homo sapien
caatggcatagttggtgcttgcccc

SEQ ID NO: 3584514 - DNA, 25 bp, Homo sapien
ttgctgtcccattcctgcctgagcg

SEQ ID NO: 3584515 - DNA, 25 bp, Homo sapien
ctttggcacattcaacctgaggctt

SEQ ID NO: 3584516 - DNA, 25 bp, Homo sapien
tattactctcaatacagcttgtggc

SEQ ID NO: 3584517 - DNA, 25 bp, Homo sapien
gcaggatccatgctaatctgataat

SEQ ID NO: 3584518 - DNA, 25 bp, Homo sapien
tgcaggatccatgctaatctgataa

SEQ ID NO: 3584519 - DNA, 25 bp, Homo sapien
tctccagagggttcacaatgtaatg

SEQ ID NO: 3584520 - DNA, 25 bp, Homo sapien
cacagcacaaggatgattcaggagc

SEQ ID NO: 3584521 - DNA, 25 bp, Homo sapien
tgatgggtcatcgtcttctaggcac

SEQ ID NO: 3584522 - DNA, 25 bp, Homo sapien
tctaggcaccttgttgagagccatc

SEQ ID NO: 3584523 - DNA, 25 bp, Homo sapien
tgaacggccattgcccatggatcac

SEQ ID NO: 3584524 - DNA, 25 bp, Homo sapien
ccatggatcacaaaagcctggctct

SEQ ID NO: 3584525 - DNA, 25 bp, Homo sapien
ttcagtagtacagtagcctgtacta

SEQ ID NO: 3584526 - DNA, 25 bp, Homo sapien
actacttcagattgtagtctcaggg

SEQ ID NO: 3584527 - DNA, 25 bp, Homo sapien
tatcatctaaaggagttgagcactc

SEQ ID NO: 3584528 - DNA, 25 bp, Homo sapien
attttcttatcatctaaaggagttg

SEQ ID NO: 3584529 - DNA, 25 bp, Homo sapien
tcttatcatctaaaggagttgagca

SEQ ID NO: 3584530 - DNA, 25 bp, Homo sapien
catctaaaggagttgagcactccat

SEQ ID NO: 3584531 - DNA, 25 bp, Homo sapien
tcagatgtttgtctcatgattagat

SEQ ID NO: 3584532 - DNA, 25 bp, Homo sapien
gattagattgggctcatgtttttgg

SEQ ID NO: 3584533 - DNA, 25 bp, Homo sapien
caggtttttagatataccggtcagg

SEQ ID NO: 3584534 - DNA, 25 bp, Homo sapien
tgtgttcgaggatctcacccaagat

SEQ ID NO: 3584535 - DNA, 25 bp, Homo sapien
tctctgtcaggtgataatattggcg

SEQ ID NO: 3584536 - DNA, 25 bp, Homo sapien
tgtgatgaagtcagggctaaagccc

SEQ ID NO: 3584537 - DNA, 25 bp, Homo sapien
aatccatcaagtctgtttctctgtc

SEQ ID NO: 3584538 - DNA, 25 bp, Homo sapien
caaagttaatatgcagttagccaga

SEQ ID NO: 3584539 - DNA, 25 bp, Homo sapien
tctggccagtagacagtatcatctg

SEQ ID NO: 3584540 - DNA, 25 bp, Homo sapien
cagagaggaaatatgcagatcacaa

SEQ ID NO: 3584541 - DNA, 25 bp, Homo sapien
tcctagggaccaacaatgagaccac

SEQ ID NO: 3584542 - DNA, 25 bp, Homo sapien
ccacagaggcaggtatacaactaga

SEQ ID NO: 3584543 - DNA, 25 bp, Homo sapien
tgacagacagtgacctgtttctcag

SEQ ID NO: 3584544 - DNA, 25 bp, Homo sapien
tttctcagcatcctgcaccttattg

SEQ ID NO: 3584545 - DNA, 25 bp, Homo sapien
catcctgcaccttattgctttcctg

SEQ ID NO: 3584546 - DNA, 25 bp, Homo sapien
atgacagacagtgacctgtttctca

SEQ ID NO: 3584547 - DNA, 25 bp, Homo sapien
tgcactgggtttggcaggatttggt

SEQ ID NO: 3584548 - DNA, 25 bp, Homo sapien
tctccaggtgcaaggtgtcaaagaa

SEQ ID NO: 3584549 - DNA, 25 bp, Homo sapien
gaagcttgcccctgtagagggaaaa

SEQ ID NO: 3584550 - DNA, 25 bp, Homo sapien
gaatcataggggaagaagcttgccc

SEQ ID NO: 3584551 - DNA, 25 bp, Homo sapien
gtgggatcctggtgtcatgcacaaa

SEQ ID NO: 3584552 - DNA, 25 bp, Homo sapien
catgcacaaaagtggcttgattata

SEQ ID NO: 3584553 - DNA, 25 bp, Homo sapien
tattctgaggtacactcatcactta

SEQ ID NO: 3584554 - DNA, 25 bp, Homo sapien
cagagcttgcagtctcaggcagatg

SEQ ID NO: 3584555 - DNA, 25 bp, Homo sapien
cttgaaagaagtagagttgtaggaa

SEQ ID NO: 3584556 - DNA, 25 bp, Homo sapien
ctactcattggaaggtggtttttct

SEQ ID NO: 3584557 - DNA, 25 bp, Homo sapien
ggaattgtttaaatgatggaagtgg

SEQ ID NO: 3584558 - DNA, 25 bp, Homo sapien
agggtatgttctggagttgctaaag

SEQ ID NO: 3584559 - DNA, 25 bp, Homo sapien
gagagaacatcctgcagcagaggat

SEQ ID NO: 3584560 - DNA, 25 bp, Homo sapien
gatggcttgagagaacatcctgcag

SEQ ID NO: 3584561 - DNA, 25 bp, Homo sapien
ggaagatggcttgagagaacatcct

SEQ ID NO: 3584562 - DNA, 25 bp, Homo sapien
aagatggcttgagagaacatcctgc

SEQ ID NO: 3584563 - DNA, 25 bp, Homo sapien
agtcccatatactgaggatgattca

SEQ ID NO: 3584564 - DNA, 25 bp, Homo sapien
tttctatgctcagtaaattggaatg

SEQ ID NO: 3584565 - DNA, 25 bp, Homo sapien
aaattggaatgtctacctccattgg

SEQ ID NO: 3584566 - DNA, 25 bp, Homo sapien
tgaacaatgcaagcttgatttgagg

SEQ ID NO: 3584567 - DNA, 25 bp, Homo sapien
ttacagtggatgctagaaataggaa

SEQ ID NO: 3584568 - DNA, 25 bp, Homo sapien
aattacagtggatgctagaaatagg

SEQ ID NO: 3584569 - DNA, 25 bp, Homo sapien
tggatgctagaaataggaattccat

SEQ ID NO: 3584570 - DNA, 25 bp, Homo sapien
agtggatgctagaaataggaattcc

SEQ ID NO: 3584571 - DNA, 25 bp, Homo sapien
caatttcttgaggtattggcttcat

SEQ ID NO: 3584572 - DNA, 25 bp, Homo sapien
ggaacaatttcttgaggtattggct

SEQ ID NO: 3584573 - DNA, 25 bp, Homo sapien
aacaatttcttgaggtattggcttc

SEQ ID NO: 3584574 - DNA, 25 bp, Homo sapien
aggaacaatttcttgaggtattggc

SEQ ID NO: 3584575 - DNA, 25 bp, Homo sapien
tctacgcactgctttgaatatatcc

SEQ ID NO: 3584576 - DNA, 25 bp, Homo sapien
tggcttttcagtgtgtctgctcttg

SEQ ID NO: 3584577 - DNA, 25 bp, Homo sapien
acgcactgctttgaatatatcccag

SEQ ID NO: 3584578 - DNA, 25 bp, Homo sapien
tctgctggcttttcagtgtgtctgc

SEQ ID NO: 3584579 - DNA, 25 bp, Homo sapien
tttagaataagtgcactgtagtgct

SEQ ID NO: 3584580 - DNA, 25 bp, Homo sapien
gtgcactgtagtgctgagaagaatg

SEQ ID NO: 3584581 - DNA, 25 bp, Homo sapien
gatgtctattaagttcacttggtcc

SEQ ID NO: 3584582 - DNA, 25 bp, Homo sapien
tctttgttggactctaagaacttcc

SEQ ID NO: 3584583 - DNA, 25 bp, Homo sapien
catgatcactggtcaacagcccaca

SEQ ID NO: 3584584 - DNA, 25 bp, Homo sapien
atttgcctgcatacactgacacctg

SEQ ID NO: 3584585 - DNA, 25 bp, Homo sapien
gtatctggcccatcattgtcctctg

SEQ ID NO: 3584586 - DNA, 25 bp, Homo sapien
ctgtgggtgtcttcagcactagtct

SEQ ID NO: 3584587 - DNA, 25 bp, Homo sapien
tcttggcttttgtgtaaaacgccga

SEQ ID NO: 3584588 - DNA, 25 bp, Homo sapien
tatcttctattcaactgatcagcag

SEQ ID NO: 3584589 - DNA, 25 bp, Homo sapien
gaaagattgaatcctcacgtcagta

SEQ ID NO: 3584590 - DNA, 25 bp, Homo sapien
tctggttgcttggaaacaattctcc

SEQ ID NO: 3584591 - DNA, 25 bp, Homo sapien
cagggtcttgctttgaataattgac

SEQ ID NO: 3584592 - DNA, 25 bp, Homo sapien
tggggttgtgcagacccatctagac

SEQ ID NO: 3584593 - DNA, 25 bp, Homo sapien
gtcttgctttgaataattgacaaca

SEQ ID NO: 3584594 - DNA, 25 bp, Homo sapien
gggtcttgctttgaataattgacaa

SEQ ID NO: 3584595 - DNA, 25 bp, Homo sapien
agagcattgaattatactacaaggg

SEQ ID NO: 3584596 - DNA, 25 bp, Homo sapien
gtcctggggaggaattcttcatttc

SEQ ID NO: 3584597 - DNA, 25 bp, Homo sapien
ttgtcctggggaggaattcttcatt

SEQ ID NO: 3584598 - DNA, 25 bp, Homo sapien
tttacaagaccagagcattgaatta

SEQ ID NO: 3584599 - DNA, 25 bp, Homo sapien
gctttggattcagttgtactgggtg

SEQ ID NO: 3584600 - DNA, 25 bp, Homo sapien
tactgggtgtgtcaggtgtgatcct

SEQ ID NO: 3584601 - DNA, 25 bp, Homo sapien
gttgctacacttaccaccctgaata

SEQ ID NO: 3584602 - DNA, 25 bp, Homo sapien
tgtgatccttagttgctctgttgct

SEQ ID NO: 3584603 - DNA, 25 bp, Homo sapien
cactgctggaaacatgcaagaaacc

SEQ ID NO: 3584604 - DNA, 25 bp, Homo sapien
cagctgctcttctggtaaacgttca

SEQ ID NO: 3584605 - DNA, 25 bp, Homo sapien
ggattagaagggacctccctgcctg

SEQ ID NO: 3584606 - DNA, 25 bp, Homo sapien
cttctggtaaacgttcaagaacaag

SEQ ID NO: 3584607 - DNA, 25 bp, Homo sapien
ttgctaaaacaccagacatcgaaca

SEQ ID NO: 3584608 - DNA, 25 bp, Homo sapien
taaaacaccagacatcgaacagaca

SEQ ID NO: 3584609 - DNA, 25 bp, Homo sapien
gctaaaacaccagacatcgaacaga

SEQ ID NO: 3584610 - DNA, 25 bp, Homo sapien
aaacaccagacatcgaacagacacc

SEQ ID NO: 3584611 - DNA, 25 bp, Homo sapien
aaattgtctgtttgtgtacttgatc

SEQ ID NO: 3584612 - DNA, 25 bp, Homo sapien
aattgtctgtttgtgtacttgatca

SEQ ID NO: 3584613 - DNA, 25 bp, Homo sapien
tgaaattgtctgtttgtgtacttga

SEQ ID NO: 3584614 - DNA, 25 bp, Homo sapien
gttgaaattgtctgtttgtgtactt

SEQ ID NO: 3584615 - DNA, 25 bp, Homo sapien
tcaagacacgctgataacttttatg

SEQ ID NO: 3584616 - DNA, 25 bp, Homo sapien
ttaactcaagacacgctgataactt

SEQ ID NO: 3584617 - DNA, 25 bp, Homo sapien
actcaagacacgctgataactttta

SEQ ID NO: 3584618 - DNA, 25 bp, Homo sapien
taactcaagacacgctgataacttt

SEQ ID NO: 3584619 - DNA, 25 bp, Homo sapien
tcctgtattcggtcacaacataatc

SEQ ID NO: 3584620 - DNA, 25 bp, Homo sapien
tcctgtttcctgtattcggtcacaa

SEQ ID NO: 3584621 - DNA, 25 bp, Homo sapien
caacataatcttaaggtggtgagct

SEQ ID NO: 3584622 - DNA, 25 bp, Homo sapien
tattcggtcacaacataatcttaag

SEQ ID NO: 3584623 - DNA, 25 bp, Homo sapien
tgctgtgaggctccctgtgagtcca

SEQ ID NO: 3584624 - DNA, 25 bp, Homo sapien
ggctccctgtgagtccatgcactct

SEQ ID NO: 3584625 - DNA, 25 bp, Homo sapien
gaggctccctgtgagtccatgcact

SEQ ID NO: 3584626 - DNA, 25 bp, Homo sapien
tgtgaggctccctgtgagtccatgc

SEQ ID NO: 3584627 - DNA, 25 bp, Homo sapien
agcaaagggatccttaactataaat

SEQ ID NO: 3584628 - DNA, 25 bp, Homo sapien
ttgaccaattggttgtttaggaaca

SEQ ID NO: 3584629 - DNA, 25 bp, Homo sapien
caattggttgtttaggaacacattg

SEQ ID NO: 3584630 - DNA, 25 bp, Homo sapien
gaccaattggttgtttaggaacaca

SEQ ID NO: 3584631 - DNA, 25 bp, Homo sapien
taggaacacattgttcaattttcac

SEQ ID NO: 3584632 - DNA, 25 bp, Homo sapien
tagctcccagtcgttcagccatggg

SEQ ID NO: 3584633 - DNA, 25 bp, Homo sapien
ccactctgacaatagggaacccatt

SEQ ID NO: 3584634 - DNA, 25 bp, Homo sapien
gatgatttcgcccaaccgtaggctt

SEQ ID NO: 3584635 - DNA, 25 bp, Homo sapien
ggtaaacagccaatacactacagtg

SEQ ID NO: 3584636 - DNA, 25 bp, Homo sapien
tgtgtcccaggcttcaaactgtact

SEQ ID NO: 3584637 - DNA, 25 bp, Homo sapien
caggcttcaaactgtactggttact

SEQ ID NO: 3584638 - DNA, 25 bp, Homo sapien
ctgtactggttactcagatcttcta

SEQ ID NO: 3584639 - DNA, 25 bp, Homo sapien
gtactggttactcagatcttctaaa

SEQ ID NO: 3584640 - DNA, 25 bp, Homo sapien
gcctcttttgtatctctcaaagtct

SEQ ID NO: 3584641 - DNA, 25 bp, Homo sapien
aggcctcttttgtatctctcaaagt

SEQ ID NO: 3584642 - DNA, 25 bp, Homo sapien
ctcttttgtatctctcaaagtcttg

SEQ ID NO: 3584643 - DNA, 25 bp, Homo sapien
ggcctcttttgtatctctcaaagtc

SEQ ID NO: 3584644 - DNA, 25 bp, Homo sapien
aaaatgtagtcttgtgtctggtggt

SEQ ID NO: 3584645 - DNA, 25 bp, Homo sapien
tggatccccttcctttgattgtcct

SEQ ID NO: 3584646 - DNA, 25 bp, Homo sapien
gatcctagatgagggtggccatgtt

SEQ ID NO: 3584647 - DNA, 25 bp, Homo sapien
gctgtggaatgctgttgatcctaga

SEQ ID NO: 3584648 - DNA, 25 bp, Homo sapien
tagcacaggcttctatcacctgcac

SEQ ID NO: 3584649 - DNA, 25 bp, Homo sapien
gatttgcttagcacaggcttctatc

SEQ ID NO: 3584650 - DNA, 25 bp, Homo sapien
ctgcagagatttgcttagcacaggc

SEQ ID NO: 3584651 - DNA, 25 bp, Homo sapien
gcttagcacaggcttctatcacctg

SEQ ID NO: 3584652 - DNA, 25 bp, Homo sapien
ctgcccagtctttcaataggcataa

SEQ ID NO: 3584653 - DNA, 25 bp, Homo sapien
tttcgaaaataatgttgtcttcaga

SEQ ID NO: 3584654 - DNA, 25 bp, Homo sapien
ttcaataggcataataggaaatgcc

SEQ ID NO: 3584655 - DNA, 25 bp, Homo sapien
gagatcatgtgctgaagtctgccca

SEQ ID NO: 3584656 - DNA, 25 bp, Homo sapien
taaatttgcatgtcactagtggcta

SEQ ID NO: 3584657 - DNA, 25 bp, Homo sapien
gccttctgttcgtttcctaattgga

SEQ ID NO: 3584658 - DNA, 25 bp, Homo sapien
tttctctggatgtgtagtggacctc

SEQ ID NO: 3584659 - DNA, 25 bp, Homo sapien
gattggatacctacgatatttctgg

SEQ ID NO: 3584660 - DNA, 25 bp, Homo sapien
aagatggtcaacattggagccttct

SEQ ID NO: 3584661 - DNA, 25 bp, Homo sapien
gagccttctaagaccctggtccggc

SEQ ID NO: 3584662 - DNA, 25 bp, Homo sapien
tggtcaacattggagccttctaaga

SEQ ID NO: 3584663 - DNA, 25 bp, Homo sapien
cattggagccttctaagaccctggt

SEQ ID NO: 3584664 - DNA, 25 bp, Homo sapien
catctgtcactatgcggaggtgtca

SEQ ID NO: 3584665 - DNA, 25 bp, Homo sapien
ttttccacaggacctagagaagtgc

SEQ ID NO: 3584666 - DNA, 25 bp, Homo sapien
actcacagtgtgctggcaagacctg

SEQ ID NO: 3584667 - DNA, 25 bp, Homo sapien
gaactcggttcagcacaggtgtgag

SEQ ID NO: 3584668 - DNA, 25 bp, Homo sapien
gatcctagaacaatctttgattgtg

SEQ ID NO: 3584669 - DNA, 25 bp, Homo sapien
aaattcctgagtctgcgtttggatc

SEQ ID NO: 3584670 - DNA, 25 bp, Homo sapien
gaaacaaagcactccatctgtgcac

SEQ ID NO: 3584671 - DNA, 25 bp, Homo sapien
gattgtgagtaatacctgtgcgtag

SEQ ID NO: 3584672 - DNA, 25 bp, Homo sapien
caatttacaagagtatcactttatc

SEQ ID NO: 3584673 - DNA, 25 bp, Homo sapien
taaacatcggaattgcttcagagcc

SEQ ID NO: 3584674 - DNA, 25 bp, Homo sapien
ggttaaacatcggaattgcttcaga

SEQ ID NO: 3584675 - DNA, 25 bp, Homo sapien
tatcaaggggaatggttaaacatcg

SEQ ID NO: 3584676 - DNA, 25 bp, Homo sapien
gggaatggttaaacatcggaattgc

SEQ ID NO: 3584677 - DNA, 25 bp, Homo sapien
ctgaggtagagatgcagtaatacat

SEQ ID NO: 3584678 - DNA, 25 bp, Homo sapien
gaggtagagatgcagtaatacataa

SEQ ID NO: 3584679 - DNA, 25 bp, Homo sapien
gtagagatgcagtaatacataaata

SEQ ID NO: 3584680 - DNA, 25 bp, Homo sapien
ggtagagatgcagtaatacataaat

SEQ ID NO: 3584681 - DNA, 25 bp, Homo sapien
gtgagggtggaagacctagcggtcc

SEQ ID NO: 3584682 - DNA, 25 bp, Homo sapien
agtgatttcccagagagtggtttcc

SEQ ID NO: 3584683 - DNA, 25 bp, Homo sapien
tcttgccagaaggtgtcgtcagtga

SEQ ID NO: 3584684 - DNA, 25 bp, Homo sapien
gagtttcagtgatttcccagagagt

SEQ ID NO: 3584685 - DNA, 25 bp, Homo sapien
tttcacttggattagcatcttttcc

SEQ ID NO: 3584686 - DNA, 25 bp, Homo sapien
acttggattagcatcttttcctcca

SEQ ID NO: 3584687 - DNA, 25 bp, Homo sapien
tgtttcacttggattagcatctttt

SEQ ID NO: 3584688 - DNA, 25 bp, Homo sapien
tcacttggattagcatcttttcctc

SEQ ID NO: 3584689 - DNA, 25 bp, Homo sapien
ggcaacagctatcacagagagaaaa

SEQ ID NO: 3584690 - DNA, 25 bp, Homo sapien
gaacaatgaattatagcttctaaca

SEQ ID NO: 3584691 - DNA, 25 bp, Homo sapien
ccccaatgaaactgtagacttaaag

SEQ ID NO: 3584692 - DNA, 25 bp, Homo sapien
tatgcattttgctagagatcttgac

SEQ ID NO: 3584693 - DNA, 25 bp, Homo sapien
caaaatgctagttggaacatctgag

SEQ ID NO: 3584694 - DNA, 25 bp, Homo sapien
gagcagcgataaagaggcacactct

SEQ ID NO: 3584695 - DNA, 25 bp, Homo sapien
tcagactcatcaatgcagtgaacag

SEQ ID NO: 3584696 - DNA, 25 bp, Homo sapien
tgaaaccctccgaagcctaggtgac

SEQ ID NO: 3584697 - DNA, 25 bp, Homo sapien
tcttgagaaccctgtttactttgtc

SEQ ID NO: 3584698 - DNA, 25 bp, Homo sapien
aaatggatcttgagaaccctgttta

SEQ ID NO: 3584699 - DNA, 25 bp, Homo sapien
tggatcttgagaaccctgtttactt

SEQ ID NO: 3584700 - DNA, 25 bp, Homo sapien
tgagaaccctgtttactttgtccga

SEQ ID NO: 3584701 - DNA, 25 bp, Homo sapien
tgtgttcacgattccaaagagctaa

SEQ ID NO: 3584702 - DNA, 25 bp, Homo sapien
aactcttaggtctgccgagaatgga

SEQ ID NO: 3584703 - DNA, 25 bp, Homo sapien
tatagcatgtatagaggagccccac

SEQ ID NO: 3584704 - DNA, 25 bp, Homo sapien
ccatggcaagtgacagttaggacaa

SEQ ID NO: 3584705 - DNA, 25 bp, Homo sapien
gcaagtatgtgtttcaccaggcatc

SEQ ID NO: 3584706 - DNA, 25 bp, Homo sapien
agagcagctggcaaccttggttgat

SEQ ID NO: 3584707 - DNA, 25 bp, Homo sapien
aatagactccattaggtcacactca

SEQ ID NO: 3584708 - DNA, 25 bp, Homo sapien
ggcttcacgacgtccggctcaatag

SEQ ID NO: 3584709 - DNA, 25 bp, Homo sapien
tggctgttgtgtgcatcacggctag

SEQ ID NO: 3584710 - DNA, 25 bp, Homo sapien
tgttgtgtgcatcacggctagatcg

SEQ ID NO: 3584711 - DNA, 25 bp, Homo sapien
catcacggctagatcggcgtatggg

SEQ ID NO: 3584712 - DNA, 25 bp, Homo sapien
tgtgcatcacggctagatcggcgta

SEQ ID NO: 3584713 - DNA, 25 bp, Homo sapien
aataaatgcacccatagcttctcgg

SEQ ID NO: 3584714 - DNA, 25 bp, Homo sapien
tcttgaggccattgttcatgagcac

SEQ ID NO: 3584715 - DNA, 25 bp, Homo sapien
ggcctggtgacatcgaagacaataa

SEQ ID NO: 3584716 - DNA, 25 bp, Homo sapien
ctgaaaccggtttgccattagggag

SEQ ID NO: 3584717 - DNA, 25 bp, Homo sapien
caaatactatgttaggacccaggga

SEQ ID NO: 3584718 - DNA, 25 bp, Homo sapien
gagaagtgctacaaacaagggaaag

SEQ ID NO: 3584719 - DNA, 25 bp, Homo sapien
tgggtcccagatgagaatatcaact

SEQ ID NO: 3584720 - DNA, 25 bp, Homo sapien
tgggcctgagaaactaatgtcacct

SEQ ID NO: 3584721 - DNA, 25 bp, Homo sapien
ccctgaggacagtgataataaacct

SEQ ID NO: 3584722 - DNA, 25 bp, Homo sapien
catgtgctacctataccctgaggac

SEQ ID NO: 3584723 - DNA, 25 bp, Homo sapien
gctggaataaatgaccatgtgctac

SEQ ID NO: 3584724 - DNA, 25 bp, Homo sapien
gaaaacgaaggcacagaggctaagt

SEQ ID NO: 3584725 - DNA, 25 bp, Homo sapien
gatccagatggaggcagttcaactc

SEQ ID NO: 3584726 - DNA, 25 bp, Homo sapien
cagagtaaagtaaggatccagatgg

SEQ ID NO: 3584727 - DNA, 25 bp, Homo sapien
tacatgcagagtaaagtaaggatcc

SEQ ID NO: 3584728 - DNA, 25 bp, Homo sapien
taaagtaaggatccagatggaggca

SEQ ID NO: 3584729 - DNA, 25 bp, Homo sapien
cgtgcgtgacactgggctgcgtcat

SEQ ID NO: 3584730 - DNA, 25 bp, Homo sapien
gtccgcccctgcacggaaggacgtg

SEQ ID NO: 3584731 - DNA, 25 bp, Homo sapien
cctctgtgaaccagcctaggggctt

SEQ ID NO: 3584732 - DNA, 25 bp, Homo sapien
gaactatcccggtttcctctgtgaa

SEQ ID NO: 3584733 - DNA, 25 bp, Homo sapien
caccacagtctccgggtcccagtgg

SEQ ID NO: 3584734 - DNA, 25 bp, Homo sapien
acagtctccgggtcccagtggagca

SEQ ID NO: 3584735 - DNA, 25 bp, Homo sapien
cacagtctccgggtcccagtggagc

SEQ ID NO: 3584736 - DNA, 25 bp, Homo sapien
gcaccacagtctccgggtcccagtg

SEQ ID NO: 3584737 - DNA, 25 bp, Homo sapien
gaagttctggtgcacgtagcgcttg

SEQ ID NO: 3584738 - DNA, 25 bp, Homo sapien
tgagcgcgaagtccacgccgattgt

SEQ ID NO: 3584739 - DNA, 25 bp, Homo sapien
gcaacttgtacaggtgctccttgtg

SEQ ID NO: 3584740 - DNA, 25 bp, Homo sapien
cccggtagtgcgaagagaagttctg

SEQ ID NO: 3584741 - DNA, 25 bp, Homo sapien
gccagacgtgccgtgcctgaccagg

SEQ ID NO: 3584742 - DNA, 25 bp, Homo sapien
tgcctgaccagggaagcgcagcctg

SEQ ID NO: 3584743 - DNA, 25 bp, Homo sapien
ctggcggccggccagacgtgccgtg

SEQ ID NO: 3584744 - DNA, 25 bp, Homo sapien
cgtgcctgaccagggaagcgcagcc

SEQ ID NO: 3584745 - DNA, 25 bp, Homo sapien
tggggagcgcaagtgtaggtgcaga

SEQ ID NO: 3584746 - DNA, 25 bp, Homo sapien
ctgcgcacgagagagacttggggag

SEQ ID NO: 3584747 - DNA, 25 bp, Homo sapien
gcgcacgagagagacttggggagcg
